(19) United States
(12) Patent Application Publication
(10) Pub. No.: US 2022/0213167 A1
(43) Pub. Date: Jul. 7, 2022

(54) ENGINEERED CELLS EXPRESSING ANTI-TUMOR T CELL RECEPTORS AND METHODS OF USE THEREOF

(71) Applicant: GigaMune, Inc., South San Francisco, CA (US)

(72) Inventors: Matthew James Spindler, San Francisco, CA (US); David Scott Johnson, San Francisco, CA (US); Adam Shultz Adler, Belmont, CA (US); Michael Asensio, South San Francisco, CA (US)

(21) Appl. No.: 17/608,261

(22) PCT Filed: May 1, 2020
(86) PCT No.: PCT/US2020/031018

§ 371 Date: Nov. 2, 2021

Related U.S. Application Data
(60) Provisional application No. 62/842,691, filed on May 3, 2019.

(51) Int. Cl. C07K 14/725; C12N 5/0783

(52) U.S. Cl. CPC C07K 14/7051; C12N 5/0636

(57) ABSTRACT

Provided herein are compositions comprising recombinant mammalian cells that express recombinant T cell receptors with specificity against gp100 peptide:MHC antigens. Also provided are therapeutic methods of using the recombinant mammalian cells as cell therapies against melanoma tumors.

### 1. CROSS REFERENCE TO RELATED APPLICATIONS

[0001] This application claims priority to U.S. Provisional Application No. 62/842,691, filed May 3, 2019 including the sequence listing filed with the application as a text file; the contents are incorporated by reference for all purposes.

### 2. SEQUENCE LISTING

[0002] The instant application contains a Sequence Listing which is submitted as an ASCII file on duplicate CDs labeled Copy 1 and Copy 2 and mailed on May 1, 2020 via USPS Priority Mail Express and is hereby incorporated by reference in its entirety. Said ASCII file, created on Apr. 30, 2020, is named GGM-003WOsequencelisting.txt, and is 213 MB in size.

### 3. FIELD

[0003] Provided herein are T cell receptors (TCRs) with binding specificity for gp100, also known as premelanosome protein (PMEL), and compositions comprising such TCRs, including non-natural DNA vectors encoding TCRs, pharmaceutical compositions, and non-natural cell therapies.

### 4. BACKGROUND

[0004] Melanoma, also known as malignant melanoma, is a type of cancer that develops from the pigment-containing cells known as melanocytes. Melanomas typically occur in the skin, but may rarely occur in the mouth, intestines, or eye. In women, they most commonly occur on the legs, while in men they are most common on the back. Sometimes they develop from a mole with changes such as an increase in size, irregular edges, change in color, itchiness, or skin breakdown.

[0005] The primary cause of melanoma is ultraviolet light (UV) exposure in those with low levels of skin pigment. The UV light may be from either the sun or from other sources, such as tanning devices. About 25% develop from moles. Those with many moles, a history of affected family members, and who have poor immune function are at greater risk. A number of rare genetic defects such as xeroderma pigmentosum also increase risk. Diagnosis is by biopsy and analysis of any skin lesion that has signs of being potentially cancerous.

[0006] Melanoma is the most dangerous type of skin cancer. Globally, in 2012, it newly occurred in 232,000 people. In 2015 there were 3.1 million with active disease which resulted in 59,800 deaths. Australia and New Zealand have the highest rates of melanoma in the world. There are also high rates in Northern Europe and North America, while it is less common in Asia, Africa, and Latin America. Melanoma is more common in men than women. Melanoma has become more common since the 1960s in areas which are mostly populated with white people.

[0007] Immunotherapy is aimed at stimulating the person's immune system against the tumor, by enhancing the body's own ability to recognize and kill cancer cells. The current approach to treating melanoma with immunotherapy includes three broad categories of treatments including cytokines, immune check point inhibitors, and adoptive cell transfer. These treatment options are most often used in people with metastatic melanoma and significantly improves overall survival.

[0008] Adoptive cell therapy (ACT) using tumor-infiltrating lymphocytes (TILs) isolated from a person's own melanoma tumor. These cells are grown in large numbers in a laboratory and returned to the patient after a treatment that temporarily reduces normal T cells in the patient's body. TIL therapy following lymphodepletion can result in durable complete response in a variety of setups.

[0009] The second treatment, adoptive transfer of genetically altered autologous lymphocytes, depends on delivering genes that encode so called T cell receptors (TCRs), into patient's lymphocytes. After that manipulation lymphocytes recognize and bind to certain molecules found on the surface of melanoma cells and kill them.

### 5. SUMMARY

[0010] Provided herein are novel TCRs with binding specificity for gp100, also known as premelanosome protein (PMEL), a protein highly expressed in melanoma and other tumors. Specifically, these TCRs target gp100 peptides presented by major histocompatibility complex (pMHC).

[0011] Also provided are isolated polynucleotides encoding the TCRs provided herein, and portions thereof.

[0012] Also provided are vectors comprising such polynucleotides.

[0013] Also provided are recombinant host cells comprising such polynucleotides and recombinant host cells comprising such vectors.

[0014] Also provided are methods of producing the TCRs using the polynucleotides, vectors, or host cells provided herein.

[0015] Also provided are pharmaceutical compositions comprising the TCRs and a pharmaceutically acceptable excipient.

[0016] In some aspects, the present invention provides a pharmaceutical composition comprising the TCR and an excipient. In some embodiments, the TCR is in an amount sufficient as prophylaxis against melanoma or other tumor when administered to a subject. In some embodiments, the TCR is an amount sufficient to clear melanoma or other tumor in an individual actively fighting disease.

[0017] In other aspects, the present invention provides a method of treating a disease comprising the step of: administering an effective amount of the TCR or the pharmaceutical composition provided herein to a subject with the disease.

[0018] In some aspects, the present invention provides a mixture of polynucleotides encoding the TCRs provided herein. In other aspects, the present invention provides a mixture of vectors comprising the isolated polynucleotides. In other aspects, the present invention provides a mixture of host cell clones comprising the mixture of polynucleotides or vectors.

[0019] Some aspects of the present invention are related to a method of producing TCR, comprising: expressing the antibodies in host cells using a library of polynucleotide vectors, and isolating the cells that express the TCR.

[0020] TCRs of the invention may be transformed into T cells, rendering them capable of destroying cells presenting gp100 pMHC, such as melanoma tumor cells, for administration to a patient in the treatment process known as adoptive therapy (see Zhao et al., (2007) J Immunol. 179: 5845-54; Robbins et al., (2008) J Immunol. 180: 6 116-31; and WO2008/038002).

[0021] In other aspects, the present invention provides methods for discovery of TCRs from highly diverse mammalian T cell repertoires.

### 6. BRIEF DESCRIPTION OF THE DRAWINGS

[0022] FIG. 1 summarizes the method of discovering TCRs from transcripts expressed in peripheral blood TCRs isolated from virus seropositive human donors.

[0023] FIG. 2 summarizes a method of encapsulating T cells into physical containers with lysis mix and solid supports that capture nucleic acid targets from lysed cells.

[0024] FIG. 3 summarizes a method of encapsulating target-specific primers with nucleic acid targets affixed to solid supports.

[0025] FIG. 4 shows the method of amplifying individual target nucleic acids with complementary regions.

[0026] FIG. 5 shows the individual amplified target nucleic acids with complementary regions.

[0027] FIG. 6 summarizes a method of fusing separate amplified nucleic acid targets into single fused nucleic acid constructs.

[0028] FIG. 7 shows the method of generating circularized gene expression constructs from the fused nucleic acid constructs.

### 7. DETAILED DESCRIPTION

### 8. Definitions

[0029] Unless otherwise defined herein, scientific and technical terms used in connection with the present invention shall have the meanings that are commonly understood by those of ordinary skill in the art. Further, unless otherwise required by context, singular terms shall include pluralities and plural terms shall include the singular. Generally, nomenclatures used in connection with, and techniques of, cell and tissue culture, molecular biology, immunology, microbiology, genetics and protein and nucleic acid chemistry and hybridization described herein are those well-known and commonly used in the art. The methods and techniques of the present invention are generally performed according to conventional methods well known in the art and as described in various general and more specific references that are cited and discussed throughout the present specification unless otherwise indicated. See, e.g., Sambrook et al. Molecular Cloning: A Laboratory Manual, 2d ed., Cold Spring Harbor Laboratory Press, Cold Spring Harbor, N.Y. (1989) and Ausubel et al., Current Protocols in Molecular Biology, Greene Publishing Associates (1992), and Harlow and Lane Antibodies: A Laboratory Manual Cold Spring Harbor Laboratory Press, Cold Spring Harbor, N.Y. (1990), which are incorporated herein by reference. Enzymatic reactions and purification techniques are performed according to manufacturer's specifications, as commonly accomplished in the art or as described herein. The terminology used in connection with, and the laboratory procedures and techniques of, analytical chemistry, synthetic organic chemistry, and medicinal and pharmaceutical chemistry described herein are those well-known and commonly used in the art. Standard techniques can be used for chemical syntheses, chemical analyses, pharmaceutical preparation, formulation, and delivery, and treatment of patients.

[0030] The following terms, unless otherwise indicated, shall be understood to have the following meanings:

[0031] The term “T cell receptor”, or “TCR”, is a molecule found on the surface of T cells, or T lymphocytes, that is responsible for recognizing fragments of antigen as peptides bound to major histocompatibility complex (MHC) molecules. The TCR is composed of two different protein chains (that is, it is a heterodimer). In humans, in 95% of T cells the TCR consists of an alpha (α) chain and a beta (β) chain (encoded by TRA and TRB, respectively), whereas in 5% of T cells the TCR consists of gamma and delta (γ/δ) chains (encoded by TRG and TRD, respectively). This ratio changes during ontogeny and in diseased states (such as leukemia). It also differs between species. Each locus can produce a variety of polypeptides with constant and variable regions. When the TCR engages with antigenic peptide and MHC (peptide:MHC), the T lymphocyte is activated through signal transduction, that is, a series of biochemical events mediated by associated enzymes, co-receptors, specialized adaptor molecules, and activated or released transcription factors. The TCR is a disulfide-linked membrane-anchored heterodimeric protein normally consisting of the highly variable alpha (α) and beta (β) chains expressed as part of a complex with the invariant CD3 chain molecules. T cells expressing this receptor are referred to as α:β (or αβ) T cells, though a minority of T cells express an alternate receptor, formed by variable gamma (γ) and delta (δ) chains, referred as γδ T cells. Each chain is composed of two extracellular domains: Variable (V) region and a Constant (C) region, both of Immunoglobulin superfamily (IgSF) domain forming antiparallel β-sheets. The Constant region is proximal to the cell membrane, followed by a transmembrane region and a short cytoplasmic tail, while the Variable region binds to the peptide/MHC complex. The variable domain of both the TCR α-chain and β-chain each have three hypervariable or complementarity determining regions (CDRs). There is also an additional area of hypervariability on the β-chain (HV4) that does not normally contact antigen and, therefore, is not considered a CDR. The residues in these variable domains are located in two regions of the TCR, at the interface of the α- and β-chains and in the β-chain framework region that is thought to be in proximity to the CD3 signal-transduction complex. CDR3 is the main CDR responsible for recognizing processed antigen, although CDR1 of the alpha chain has also been shown to interact with the N-terminal part of the antigenic peptide, whereas CDR1 of the β-chain interacts with the C-terminal part of the peptide. CDR2 is thought to recognize the MHC. CDR4 of the β-chain is not thought to participate in antigen recognition. The constant domain of the TCR consists of short connecting sequences in which a cysteine residue forms disulfide bonds, which form a link between the two chains. The generation of TCR diversity is similar to that for antibodies and B cell antigen receptors. It arises mainly from genetic recombination of the DNA encoded segments in individual somatic T cells by somatic V(D)J recombination using RAG1 and RAG2 recombinases. Unlike immunoglobulins, TCR genes do not undergo somatic hypermutation. Each recombined TCR possess unique antigen specificity, determined by the structure of the antigen-binding site formed by the α and β chains in case of αβ T cells or γ and δ chains on case of γδ T cells.

[0032] “Affinity” refers to the strength of the sum total of non-covalent interactions between a single binding site of a molecule (e.g., an RPP) and its binding partner (e.g., an antigen or epitope). Unless indicated otherwise, as used herein, “affinity” refers to intrinsic binding affinity, which reflects a 1:1 interaction between members of a binding pair (e.g., TCR and peptide:MHC). The affinity of a molecule X for its partner Y can be represented by the dissociation equilibrium constant (K_{D}). The kinetic components that contribute to the dissociation equilibrium constant are described in more detail below. Affinity can be measured by common methods known in the art, including those described herein. Affinity can be determined, for example, using surface plasmon resonance (SPR) technology (e.g., BIACORE) or biolayer interferometry (e.g., FORTEBIO®).

[0033] “Avidity” refers to the accumulated strength of multiple affinities of individual non-covalent binding interactions, such as between a protein receptor and its ligand, and is commonly referred to as functional affinity. As such, avidity is distinct from affinity, which describes the strength of a single interaction. However, because individual binding events increase the likelihood of other interactions to occur (i.e. increase the local concentration of each binding partner in proximity to the binding site), avidity should not be thought of as the mere sum of its constituent affinities but as the combined effect of all affinities participating in the biomolecular interaction.

[0034] The “major histocompatibility complex” (MHC) is a set of cell surface proteins essential for the acquired immune system to recognize foreign molecules in vertebrates, which in turn determines histocompatibility. The main function of MHC molecules is to bind to antigens derived from pathogens and display them on the cell surface for recognition by the appropriate T-cells. The MHC determines compatibility of donors for organ transplant, as well as one's susceptibility to an autoimmune disease via crossreacting immunization. The human MHC is also called the HLA (human leukocyte antigen) complex (often just the HLA).

[0035] “MHC class I” molecules are one of two primary classes of MHC molecules and are found on the cell surface of all nucleated cells in the bodies of jawed vertebrates. They also occur on platelets, but not on red blood cells. Their function is to display peptide fragments of proteins from within the cell to cytotoxic T cells, often termed “peptide:MHC”; this will trigger an immediate response from the immune system against a particular non-self antigen displayed with the help of an MHC class I protein. Because MHC class I molecules present peptides derived from cytosolic proteins, the pathway of MHC class I presentation is often called cytosolic or endogenous pathway.

[0036] With regard to the binding of an TCR to a target peptide:MHC, the terms “bind,” “specific binding,” “specifically binds to,” “specific for,” “selectively binds,” and “selective for” a particular antigen (e.g., a polypeptide target) or an epitope on a particular antigen mean binding that is measurably different from a non-specific or non-selective interaction (e.g., with a non-target molecule). Specific binding can be measured, for example, by measuring binding to a target molecule and comparing it to binding to a non-target molecule. Specific binding can also be determined by competition with a control molecule that mimics the epitope recognized on the target molecule. In that case, specific binding is indicated if the binding of the RPP to the target molecule is competitively inhibited by the control molecule.

[0037] Percent “identity” between a polypeptide sequence and a reference sequence, is defined as the percentage of amino acid residues in the polypeptide sequence that are identical to the amino acid residues in the reference sequence, after aligning the sequences and introducing gaps, if necessary, to achieve the maximum percent sequence identity. Alignment for purposes of determining percent amino acid sequence identity can be achieved in various ways that are within the skill in the art, for instance, using publicly available computer software such as BLAST, BLAST-2, ALIGN, MEGALIGN (DNASTAR), CLUSTALW, CLUSTAL OMEGA, or MUSCLE software. Those skilled in the art can determine appropriate parameters for aligning sequences, including any algorithms needed to achieve maximal alignment over the full length of the sequences being compared.

[0038] A “conservative substitution” or a “conservative amino acid substitution,” refers to the substitution an amino acid with a chemically or functionally similar amino acid. Conservative substitution tables providing similar amino acids are well known in the art. By way of example, the groups of amino acids provided in TABLES 1-3 are, in some embodiments, considered conservative substitutions for one another.

TABLE 1
Selected groups of amino acids that are considered conservative
substitutions for one another, in certain embodiments.

| | |
|---|---|
| Acidic Residues | D and E |
| Basic Residues | K, R, and H |
| Hydrophilic Uncharged Residues | S, T, N, and Q |
| Aliphatic Uncharged Residues | G, A, V, L, and I |
| Non-polar Uncharged Residues | C, M, and P |
| Aromatic Residues | F, Y, and W |

TABLE 2
Additional selected groups of amino acids that are considered
conservative substitutions for one another, in certain embodiments.

| | |
|---|---|
| Group 1 | A, S, and T |
| Group 2 | D and E |
| Group 3 | N and Q |
| Group 4 | R and K |
| Group 5 | I, L, and M |
| Group 6 | F, Y, and W |

TABLE 3
Further selected groups of amino acids that are considered
conservative substitutions for one another, in certain embodiments.

| | |
|---|---|
| Group A | A and G |
| Group B | D and E |
| Group C | N and Q |
| Group D | R, K, and H |
| Group E | I, L, M, V |
| Group F | F, Y, and W |
| Group G | S and T |
| Group H | C and M |

[0039] Additional conservative substitutions may be found, for example, in Creighton, Proteins: Structures and Molecular Properties 2nd ed. (1993) W. H. Freeman & Co., New York, N.Y. An RPP generated by making one or more conservative substitutions of amino acid residues in a parent RPP is referred to as a “conservatively modified variant.”

[0040] The term “treating” (and variations thereof such as “treat” or “treatment”) refers to clinical intervention in an attempt to alter the natural course of a disease or condition in a subject in need thereof. Treatment can be performed both for prophylaxis and during the course of clinical pathology. Desirable effects of treatment include preventing occurrence or recurrence of disease, alleviation of symptoms, diminish of any direct or indirect pathological consequences of the disease, preventing metastasis, decreasing the rate of disease progression, amelioration or palliation of the disease state, and remission or improved prognosis.

[0041] As used herein, the term “therapeutically effective amount” or “effective amount” refers to an amount of an RPP or pharmaceutical composition provided herein that, when administered to a subject, is effective to treat a disease or disorder.

[0042] As used herein, the term “subject” means a mammalian subject. Exemplary subjects include humans, monkeys, dogs, cats, mice, rats, cows, horses, camels, goats, rabbits, and sheep. In certain embodiments, the subject is a human. In some embodiments the subject has a disease or condition that can be treated with an RPP provided herein. In some aspects, the disease or condition is a cancer.

[0043] The term “package insert” is used to refer to instructions customarily included in commercial packages of therapeutic or diagnostic products (e.g., kits) that contain information about the indications, usage, dosage, administration, combination therapy, contraindications and/or warnings concerning the use of such therapeutic or diagnostic products.

[0044] A “chemotherapeutic agent” refers to a chemical compound useful in the treatment of cancer. Chemotherapeutic agents include “anti-hormonal agents” or “endocrine therapeutics” which act to regulate, reduce, block, or inhibit the effects of hormones that can promote the growth of cancer.

[0045] The term “pharmaceutical composition” refers to a preparation which is in such form as to permit the biological activity of an active ingredient contained therein to be effective in treating a subject, and which contains no additional components which are unacceptably toxic to the subject.

[0046] The terms “modulate” and “modulation” refer to reducing or inhibiting or, alternatively, activating or increasing, a recited variable.

[0047] The terms “increase” and “activate” refer to an increase of 10%, 20%, 30%, 40%, 50%, 60%, 70%, 75%, 80%, 85%, 90%, 95%, 100%, 2-fold, 3-fold, 4-fold, 5-fold, 10-fold, 20-fold, 50-fold, 100-fold, or greater in a recited variable.

[0048] The terms “reduce” and “inhibit” refer to a decrease of 10%, 20%, 30%, 40%, 50%, 60%, 70%, 75%, 80%, 85%, 90%, 95%, 2-fold, 3-fold, 4-fold, 5-fold, 10-fold, 20-fold, 50-fold, 100-fold, or greater in a recited variable.

[0049] The term “effector T cell” includes T helper (i.e., CD4+) cells and cytotoxic (i.e., CD8+) T cells. CD4+ effector T cells contribute to the development of several immunologic processes, including maturation of B cells into plasma cells and memory B cells, and activation of cytotoxic T cells and macrophages. CD8+ effector T cells destroy virus-infected cells and tumor cells. See Seder and Ahmed, Nature Immunol., 2003, 4:835-842, incorporated by reference in its entirety, for additional information on effector T cells.

[0050] The term “regulatory T cell” includes cells that regulate immunological tolerance, for example, by suppressing effector T cells. In some aspects, the regulatory T cell has a CD4+CD25+Foxp3+ phenotype. In some aspects, the regulatory T cell has a CD8+CD25+ phenotype. See Nocentini et al., Br. J. Pharmacol., 2012, 165:2089-2099, incorporated by reference in its entirety, for additional information on regulatory T cells.

[0051] A “cytotoxic T cell” (also known as TC, cytotoxic T lymphocyte, CTL, T-killer cell, cytolytic T cell, CD8+ T-cell or killer T cell) is a T lymphocyte (a type of white blood cell) that kills cancer cells, cells that are infected (particularly with viruses), or cells that are damaged in other ways. Most cytotoxic T cells express T-cell receptors (TCRs) that can recognize a specific antigen. An antigen is a molecule capable of stimulating an immune response, and is often produced by cancer cells or viruses. Antigens inside a cell are bound to class I MHC molecules, and brought to the surface of the cell by the class I MHC molecule, where they can be recognized by the T cell. If the TCR is specific for that antigen, it binds to the complex of the class I MHC molecule and the antigen, and the T cell destroys the cell.

[0052] The term “in vivo” translates to “in the living”, and refers to scientific studies in which the effects of various biological entities are tested on whole, living organisms or cells, usually animals, including humans, and plants, as opposed to a tissue extract or dead organism. This is not to be confused with experiments done in vitro (“within the glass”), i.e., in a laboratory environment using test tubes, Petri dishes, etc. Examples of investigations in vivo include: the pathogenesis of disease by comparing the effects of bacterial infection with the effects of purified bacterial toxins; the development of non-antibiotics, antiviral drugs, and new drugs generally; and new surgical procedures. Consequently, animal testing and clinical trials are major elements of in vivo research. In vivo testing is often employed over in vitro because it is better suited for observing the overall effects of an experiment on a living subject.

[0053] The term “recombinant” refers to proteins that result from the expression of recombinant DNA within living cells. Recombinant DNA is the general name for a piece of DNA that has been created by the combination of at least two separate segments of DNA.

[0054] The term “in vitro” translates to “in the glass”, and refers to scientific studies that are performed with microorganisms, cells, or biological molecules outside their normal biological context. Colloquially called “test-tube experiments”, these studies in biology and its subdisciplines are traditionally done in labware such as test tubes, flasks, Petri dishes, and microtiter plates. Studies conducted using components of an organism that have been isolated from their usual biological surroundings permit a more detailed or more convenient analysis than can be done with whole organisms; however, results obtained from in vitro experiments may not fully or accurately predict the effects on a whole organism. In contrast to in vitro experiments, in vivo studies are those conducted in animals, including humans, and whole plants.

[0055] A “variant” of a polypeptide (e.g., a TCR) comprises an amino acid sequence wherein one or more amino acid residues are inserted into, deleted from and/or substituted into the amino acid sequence relative to the native polypeptide sequence, and retains essentially the same biological activity as the native polypeptide. The biological activity of the polypeptide can be measured using standard techniques in the art (for example, if the variant is an TCR, its activity may be tested by binding assays, as described herein). Variants of the invention include fragments, analogs, recombinant polypeptides, synthetic polypeptides, and/or fusion proteins.

[0056] A “derivative” of a polypeptide is a polypeptide (e.g., a TCR) that has been chemically modified, e.g., via conjugation to another chemical moiety such as, for example, polyethylene glycol, albumin (e.g., human serum albumin), phosphorylation, and glycosylation. Unless otherwise indicated, the term “TCR” includes, in addition to antibodies comprising two full-length TCR alpha and two full-length TCR beta chains, derivatives, variants, fragments, and muteins thereof, examples of which are described below.

[0057] A nucleotide sequence is “operably linked” to a regulatory sequence if the regulatory sequence affects the expression (e.g., the level, timing, or location of expression) of the nucleotide sequence. A “regulatory sequence” is a nucleic acid that affects the expression (e.g., the level, timing, or location of expression) of a nucleic acid to which it is operably linked. The regulatory sequence can, for example, exert its effects directly on the regulated nucleic acid, or through the action of one or more other molecules (e.g., polypeptides that bind to the regulatory sequence and/or the nucleic acid). Examples of regulatory sequences include promoters, enhancers and other expression control elements (e.g., polyadenylation signals). Further examples of regulatory sequences are described in, for example, Goeddel, 1990, Gene Expression Technology: Methods in Enzymology 185, Academic Press, San Diego, Calif. and Baron et al., 1995, Nucleic Acids Res. 23:3605-06.

[0058] A “host cell” is a cell that can be used to express a nucleic acid, e.g., a nucleic acid of the invention. Typically, a host cell is a cultured cell that can be transformed or transfected with a polypeptide-encoding nucleic acid, which can then be expressed in the host cell.

[0059] The phrase “recombinant host cell” can be used to denote a host cell that has been transformed or transfected with a nucleic acid to be expressed. A host cell also can be a cell that comprises the nucleic acid but does not express it at a desired level unless a regulatory sequence is introduced into the host cell such that it becomes operably linked with the nucleic acid. It is understood that the term host cell refers not only to the particular subject cell but to the progeny or potential progeny of such a cell. Because certain modifications may occur in succeeding generations due to, e.g., mutation or environmental influence, such progeny may not, in fact, be identical to the parent cell, but are still included within the scope of the term as used herein.

[0060] “Cell therapy” (also called cellular therapy or cytotherapy) is therapy in which cellular material is injected, grafted or implanted into a patient; this generally means intact, living cells. For example, T cells capable of fighting cancer cells via cell-mediated immunity may be injected in the course of immunotherapy. A “TCR-T cell therapy” is a type of cellular therapy wherein at least one recombinant TCR sequence is engineered into autologous or allogeneic T cells, and then the engineered TCR-T cells are injected into a patient. In such applications, the TCR is directed against a peptide:MHC of therapeutic interest, for example, a tumor-specific peptide:MHC.

### 9. OTHER INTERPRETATIONAL CONVENTIONS

[0061] Ranges recited herein are understood to be shorthand for all of the values within the range, inclusive of the recited endpoints. For example, a range of 1 to 50 is understood to include any number, combination of numbers, or sub-range from the group consisting of 1, 2, 3, 4, 5, 6, 7, 8, 9, 10, 11, 12, 13, 14, 15, 16, 17, 18, 19, 20, 21, 22, 23, 24, 25, 26, 27, 28, 29, 30, 31, 32, 33, 34, 35, 36, 37, 38, 39, 40, 41, 42, 43, 44, 45, 46, 47, 48, 49, and 50.

[0062] Unless otherwise indicated, reference to a compound that has one or more stereocenters intends each stereoisomer, and all combinations of stereoisomers, thereof.

### 10. NUCLEIC ACIDS

[0063] In one aspect, the present invention provides isolated nucleic acid molecules. The nucleic acids comprise, for example, polynucleotides that encode all or part of a TCR, for example, one or both chains of a TCR of the invention, or a fragment, derivative, mutein, or variant thereof.

[0064] In another aspect, the present invention provides methods to generate libraries of nucleic acids that encode for libraries of TCRs, derived from primary T cells. These libraries of nucleic acids are generated by isolating T cells into single-cell reaction containers, wherein they are lysed and TCR-specific nucleic acids are purified or captured, for example on solid supports such as beads. The present invention provides methods for performing capture of transcripts from millions of single T cells in parallel. Capture of transcripts is followed by amplification of nucleic acids that encode TCR alpha and beta, and subsequent linkage of said nucleic acids into libraries of fused constructs that encode both TCR alpha and beta. In such libraries the native pairing of TCR alpha and beta, as originally found in the input T cells, is maintained. Such methods are performed in parallel on millions of single T cells, such that the resulting library of fused TCR alpha and beta nucleic acids comprises natively paired sequences for millions of single cells.

### 11. EXPRESSION VECTORS

[0065] The present invention provides vectors comprising a nucleic acid encoding a polypeptide of the invention or a portion thereof. Examples of vectors include, but are not limited to, plasmids, viral vectors, non-episomal mammalian vectors and expression vectors, for example, recombinant expression vectors.

[0066] In another aspect of the present invention, expression vectors containing the nucleic acid molecules and polynucleotides of the present invention are also provided, and host cells transformed with such vectors, and methods of producing the polypeptides are also provided. The term “expression vector” refers to a plasmid, phage, virus or vector for expressing a polypeptide from a polynucleotide sequence. Vectors for the expression of the polypeptides contain at a minimum sequences required for vector propagation and for expression of the cloned insert. An expression vector comprises a transcriptional unit comprising an assembly of (1) a genetic element or elements having a regulatory role in gene expression, for example, promoters or enhancers, (2) a sequence that encodes polypeptides and proteins to be transcribed into mRNA and translated into protein, and (3) appropriate transcription initiation and termination sequences. These sequences may further include a selection marker. Vectors suitable for expression in host cells are readily available and the nucleic acid molecules are inserted into the vectors using standard recombinant DNA techniques. Such vectors can include promoters which function in specific tissues, and viral vectors for the expression of polypeptides in targeted human or animal cells.

[0067] The recombinant expression vectors of the invention can comprise a nucleic acid of the invention in a form suitable for expression of the nucleic acid in a host cell. The recombinant expression vectors include one or more regulatory sequences, selected on the basis of the host cells to be used for expression, which is operably linked to the nucleic acid sequence to be expressed. Regulatory sequences include those that direct constitutive expression of a nucleotide sequence in many types of host cells (e.g., SV40 early gene enhancer, Rous sarcoma virus promoter and cytomegalovirus promoter), those that direct expression of the nucleotide sequence only in certain host cells (e.g., tissue-specific regulatory sequences, see Voss et al., 1986, Trends Biochem. Sci. 11:287, Maniatis et al., 1987, Science 236:1237, incorporated by reference herein in their entireties), and those that direct inducible expression of a nucleotide sequence in response to particular treatment or condition (e.g., the metallothionin promoter in mammalian cells and the tet-responsive and/or streptomycin responsive promoter in both prokaryotic and eukaryotic systems (see id.). It will be appreciated by those skilled in the art that the design of the expression vector can depend on such factors as the choice of the host cell to be transformed, the level of expression of protein desired, etc. The expression vectors of the invention can be introduced into host cells to thereby produce proteins or peptides, including fusion proteins or peptides, encoded by nucleic acids as described herein.

[0068] The invention further provides methods of making polypeptides. A variety of other expression/host systems may be utilized. Vector DNA can be introduced into prokaryotic or eukaryotic systems via conventional transformation or transfection techniques. These systems include but are not limited to microorganisms such as bacteria (for example, E. coli) transformed with recombinant bacteriophage, plasmid or cosmid DNA expression vectors; yeast transformed with yeast expression vectors; insect cell systems infected with virus expression vectors (e.g., baculovirus); plant cell systems transfected with virus expression vectors (e.g., cauliflower mosaic virus, CaMV; tobacco mosaic virus, TMV) or transformed with bacterial expression vectors (e.g., Ti or pBR322 plasmid); or animal cell systems. Mammalian cells useful in recombinant protein production include but are not limited to primary T cells, Jurkat cells, VERO cells, HeLa cells, Chinese hamster ovary (CHO) cell lines, or their derivatives such as Veggie CHO and related cell lines which grow in serum-free media (see Rasmussen et al., 1998, Cytotechnology 28:31) or CHO strain DX-B11, which is deficient in DHFR (see Urlaub et al., 1980, Proc. Natl. Acad. Sci. USA 77:4216-20) COS cells such as the COS-7 line of monkey kidney cells (ATCC CRL 1651) (see Gluzman et al., 1981, Cell 23:175), W138, BHK, HepG2, 3T3 (ATCC CCL 163), RIN, MDCK, A549, PC12, K562, L cells, C127 cells, BHK (ATCC CRL 10) cell lines, the CV1/EBNA cell line derived from the African green monkey kidney cell line CV1 (ATCC CCL 70) (see McMahan et al., 1991, EMBO J. 10:2821), human embryonic kidney cells such as 293, 293 EBNA or MSR 293, human epidermal A431 cells, human Colo205 cells, other transformed primate cell lines, normal diploid cells, cell strains derived from in vitro culture of primary tissue, primary explants, HL-60, U937, HaK or Jurkat cells, or any kind of primary cells, such as T cells Mammalian expression allows for the production of secreted or soluble polypeptides which may be recovered from the growth medium, or expression on the cell surface.

[0069] For stable transfection of mammalian cells, it is known that, depending upon the expression vector and transfection technique used, only a small fraction of cells may integrate the foreign DNA into their genome. In order to identify and select these integrants, a gene that encodes a selectable marker (e.g., for resistance to antibiotics) is generally introduced into the host cells along with the gene of interest. Once such cells are transformed with vectors that contain selectable markers as well as the desired expression cassette, the cells can be allowed to grow in an enriched media before they are switched to selective media, for example. The selectable marker is designed to allow growth and recovery of cells that successfully express the introduced sequences. Resistant clumps of stably transformed cells can be proliferated using tissue culture techniques appropriate to the cell line employed. An overview of expression of recombinant proteins is found in Methods of Enzymology, v. 185, Goeddell, D. V., ed., Academic Press (1990). Preferred selectable markers include those which confer resistance to drugs, such as G418, hygromycin and methotrexate. Cells stably transfected with the introduced nucleic acid can be identified by drug selection (e.g., cells that have incorporated the selectable marker gene will survive, while the other cells die), among other methods. The transformed cells can be cultured under conditions that promote expression of the polypeptide.

[0070] In addition, the polypeptides can be synthesized in solution or on a solid support in accordance with conventional techniques. Various automatic synthesizers are commercially available and can be used in accordance with known protocols. See, for example, Stewart and Young, Solid Phase Peptide Synthesis, 2d. Ed., Pierce Chemical Co. (1984); Tam et al., J Am Chem Soc, 105:6442, (1983); Merrifield, Science 232:341-347 (1986); Barany and Merrifield, The Peptides, Gross and Meienhofer, eds, Academic Press, New York, 1-284; Barany et al., Int J Pep Protein Res, 30:705-739 (1987).

[0071] The polypeptides and proteins of the present invention can be purified according to protein purification techniques well known to those of skill in the art. These techniques involve, at one level, the crude fractionation of the proteinaceous and non-proteinaceous fractions. Having separated the peptide polypeptides from other proteins, the peptide or polypeptide of interest can be further purified using chromatographic and electrophoretic techniques to achieve partial or complete purification (or purification to homogeneity). The term “purified polypeptide” as used herein, is intended to refer to a composition, isolatable from other components, wherein the polypeptide is purified to any degree relative to its naturally-obtainable state. A purified polypeptide therefore also refers to a polypeptide that is free from the environment in which it may naturally occur. Generally, “purified” will refer to a polypeptide composition that has been subjected to fractionation to remove various other components, and which composition substantially retains its expressed biological activity. Where the term “substantially purified” is used, this designation will refer to a peptide or polypeptide composition in which the polypeptide or peptide forms the major component of the composition, such as constituting about 50%, about 60%, about 70%, about 80%, about 85%, or about 90% or more of the proteins in the composition.

[0072] In some aspects, the present invention includes libraries of TCR-encoding nucleic acid vectors for integration into mammalian genomes. Such vectors include plasmids, retroviruses, and lentivirus. The libraries of nucleic acid vectors may include 10, 100, 1,000, 10,000, or more than 100,000 different TCR-encoding sequences. The sequences are derived from T cells. These libraries of nucleic acids are generated by isolating T cells into single-cell reaction containers, wherein they are lysed and TCR-specific nucleic acids are purified or captured, for example on solid supports such as beads. The present invention provides methods for performing capture of transcripts from millions of single T cells in parallel. Capture of transcripts is followed by amplification of nucleic acids that encode TCR alpha and beta, and subsequent linkage of said nucleic acids into libraries of fused constructs that encode both TCR alpha and beta. In such libraries the native pairing of TCR alpha and beta, as originally found in the input T cells, is maintained. Such methods are performed in parallel on millions of single T cells, such that the resulting library of fused TCR alpha and beta nucleic acids comprises natively paired sequences for millions of single cells. These paired fused amplicons are then engineered into full-length TCR constructs using Gibson Assembly, restriction endonucleases, or other recombinant DNA techniques.

[0073] Engineering into full-length TCR constructs is performed on the full library en masse, such that the TCR sequence content and TCR sequence counts of the library are essentially maintained throughout the process. In some aspects, the library of expression vectors is engineered in two steps, such that the TCR fragment amplicon is subcloned into an intermediate vector, and then a second round of Gibson Assembly, restriction digestion, or other recombinant technique is used to engineer additional domains of the TCR into the linker of the TCR fragment amplicon. The native pairing of TCR alpha and beta is essentially maintained throughout the process of engineering into full-length expression vector libraries. The vectors are designed in various orientations, for example, two separate promoters drive expression of TCR alpha and beta, or one promoter drives expression of both TCR alpha and beta, and a translational skip motif is used to separately translate the TCR alpha and beta into separate polypeptides. In some embodiments, the expression vectors comprise sequences for site-directed integration into mammalian production cells, for example, CRISPR-Cas9, Flp-In, Cre/Lox, or zinc finger recombination methods. Site-directed integration ensures that each mammalian production cell encodes a single TCR alpha and beta sequence, and decreases variability in expression levels between single production cells.

### 12. T CELL RECEPTORS

[0074] Native TCRs exist in heterodimeric αβ or γδ forms. However, recombinant TCRs consisting of αα or ββ homodimers have previously been shown to bind to peptide MHC molecules. Therefore, the TCR of the invention may be a heterodimeric β TCR or may be an αα or ββ homodimeric TCR. For use in adoptive cell therapy, an b β heterodimeric TCR may, for example, be transfected as full-length chains having both cytoplasmic and transmembrane domains. In certain embodiments TCRs of the invention may have an introduced disulfide bond between residues of the respective constant domains, as described, for example, in WO 2006/000830. TCRs of the invention, particularly αβ heterodimeric TCRs, may comprise an α chain TRAC constant domain sequence and/or a β chain TRBC1 or TRBC2 constant domain sequence. The alpha and beta chain constant domain sequences may be modified by truncation or substitution to delete the native disulfide bond between Cys4 of exon 2 of TRAC and Cys2 of exon 2 of TRBC1 or TRBC2. The alpha and/or beta chain constant domain sequence(s) may also be modified by substitution of cysteine residues for Thr 48 of TRAC and Ser 57 of TRBC1 or TRBC2, the said cysteines forming a disulfide bond between the alpha and beta constant domains of the TCR. TCRs of the invention may be in single chain format, for example see WO 2004/033685. In certain embodiments single chain TCRs of the invention may have an introduced disulfide bond between residues of the respective constant domains, as described in WO 2004/033685.

[0075] The invention also provides a cell harbouring a vector of the invention, preferably a TCR expression vector. The vector may comprise nucleic acid of the invention encoding in a single open reading frame, or two distinct open reading frames, the alpha chain and the beta chain respectively. Another aspect provides a cell harbouring a first expression vector which comprises nucleic acid encoding the alpha chain of a TCR of the invention, and a second expression vector which comprises nucleic acid encoding the beta chain of a TCR of the invention. Such cells are particularly useful in adoptive TCR-T or other cell therapy. The cells may be isolated and/or recombinant and/or nonnaturally occurring and/or engineered.

[0076] Since the TCRs of the invention have utility in adoptive TCR-T therapy, the invention includes a nonnaturally occurring and/or purified and/or or engineered cell, especially a T cell, presenting a TCR of the invention. There are a number of methods suitable for the transfection of T cells with nucleic acid (such as DNA, cDNA or RNA) encoding the TCRs of the invention (see for example Robbins et al., (2008) J Immunol. 180: 6116-6131). T cells expressing the TCRs of the invention will be suitable for use in adoptive therapy-based treatment of cancers such as those of the pancreas and liver. As will be known to those skilled in the art, there are a number of suitable methods by which adoptive therapy can be carried out (see for example Rosenberg et al., (2008) Nat Rev Cancer 8(4): 299-308). TCR-T cells can be either derived from T cells in a patient's own blood (autologous) or derived from the T cells of another healthy donor (allogenic).

[0077] As is well-known in the art TCRs of the invention may be subject to post-translational modifications when expressed by transfected cells. Glycosylation is one such modification, which comprises the covalent attachment of oligosaccharide moieties to defined amino acids in the TCR chain. For example, asparagine residues, or serine/threonine residues are well-known locations for oligosaccharide attachment. The glycosylation status of a particular protein depends on a number of factors, including protein sequence, protein conformation and the availability of certain enzymes. Furthermore, glycosylation status (i.e oligosaccharide type, covalent linkage and total number of attachments) can influence protein function. Therefore, when producing recombinant proteins, controlling glycosylation is often desirable. Glycosylation of transfected TCRs may be controlled by mutations of the transfected gene (Kuball J et al. (2009), J Exp Med 206(2):463-475). Such mutations are also encompassed in this invention.

[0078] Certain TCRs of the invention may be in soluble form (i.e. having no transmembrane or cytoplasmic domains). For stability, TCRs of the invention, and preferably soluble 13 heterodimeric TCRs, may have an introduced disulfide bond between residues of the respective constant domains, as described, for example, in WO 03/020763. Some soluble TCRs of the invention are useful for making fusion proteins which can be used for delivering detectable labels or therapeutic agents to antigen presenting cells and tissues containing antigen presenting cells. They may therefore be associated (covalently or otherwise) with a detectable label (for diagnostic purposes wherein the TCR is used to detect the presence of cells presenting peptide:MHC; a therapeutic agent; or a pharmacokinetics-modifying moiety (for example by PEGylation). Detectable labels for diagnostic purposes include for instance, fluorescent labels, radiolabels, enzymes, nucleic acid probes and contrast reagents.

[0079] TCRs can be purified from host cells that have been transfected by a gene encoding the TCRs by elution of filtered supernatant of host cell culture fluid using a Heparin HP column, using a salt gradient, or other methods. Fragments or analogs of TCRs can be readily prepared by those of ordinary skill in the art following the teachings of this specification and using techniques well-known in the art. Preferred amino- and carboxy-termini of fragments or analogs occur near boundaries of functional domains Structural and functional domains can be identified by comparison of the nucleotide and/or amino acid sequence data to public or proprietary sequence databases. Computerized comparison methods can be used to identify sequence motifs or predicted protein conformation domains that occur in other proteins of known structure and/or function. Methods to identify protein sequences that fold into a known three-dimensional structure are known.

[0080] In certain embodiments, a TCR comprises one or more water soluble polymer attachments, including, but not limited to, polyethylene glycol, polyoxyethylene glycol, or polypropylene glycol. See, e.g., U.S. Pat. Nos. 4,640,835, 4,496,689, 4,301,144, 4,670,417, 4,791,192 and 4,179,337. In certain embodiments, a derivative binding agent comprises one or more of monomethoxy-polyethylene glycol, dextran, cellulose, or other carbohydrate based polymers, poly-(N-vinyl pyrrolidone)-polyethylene glycol, propylene glycol homopolymers, a polypropylene oxide/ethylene oxide co-polymer, polyoxyethylated polyols (e.g., glycerol) and polyvinyl alcohol, as well as mixtures of such polymers. In certain embodiments, one or more water-soluble polymer is randomly attached to one or more side chains. In certain embodiments, PEG can act to improve the therapeutic capacity for a binding agent, such as a TCR. Certain such methods are discussed, for example, in U.S. Pat. No. 6,133,426, which is hereby incorporated by reference for any purpose.

### 13. METHODS OF IDENTIFYING T CELL RECEPTORS

[0081] The variable region of TCRα and δ chains is encoded by a number of variable (V) and joining (J) genes, while TCRβ and γ chains are additionally encoded by diversity (D) genes. During VDJ recombination, one random allele of each gene segment is recombined with the others to form a functional variable region. Recombination of the variable region with a constant gene segment results in a functional TCR chain transcript. Additionally, random nucleotides are added and/or deleted at the junction sites between the gene segments. This process leads to strong combinatorial (depending on which gene regions will recombine) and junctional diversity (which and how many nucleotides will be added/deleted), resulting in a large and highly variable TCR repertoire, which will ensure the identification of a plethora of antigens. Additional diversity is achieved by the pairing of α and β or γ and δ chains to form a functional TCR.

[0082] VDJ recombination of the different TCR genes could theoretically generate between 10¹⁵ and 10²⁰ TCR chains. The actual diversity present in a human body is estimated at around 10′³ different clonotypes, implying that the afore-described seemingly random TCR development is obviously not random at all and is subject to different constraints. Moreover, while there are TCRs that are common in the general population, recent high-resolution studies have shown that the majority of TCRs is rare (in analogy to common vs. rare genomic variants). This is one of the reasons why precise methods are necessary to properly investigate complete individual immune repertoires.

[0083] Antibody discovery faces many of the same challenges as TCR discovery, but antibody discovery is far more technologically advanced than TCR discovery. For example, methods such as mouse hybridomas (Köhler & Milstein, Nature, 1975, 256(5517):495-7) and phage display (McCafferty et al., Nature, 1990, 348(6301):552-4) are widely used to quickly identify specific and efficacious antibody candidates. Though pioneering groups have described methods for yeast display of TCRs (Kieke et al., PNAS, 1999, 96(10):5651-6), such methods require artificial mutation of natural TCRs, which confounds broader utility. Additionally, TCRs are best studied in the context of T cell surface co-receptors, such as CD8 and CD3 (Kuhns et al., Immunity, 2006, 24(2):133-9). Thus, other groups have reported recombinant expression of TCR libraries in mammalian cells (Chervin et al., Journal of Immunological Methods, 2008, 339(2):175-84; Malecek et al., Journal Immunological Methods, 2013, 392(1-2):1-11). However, reported technologies fail to leverage the TCR diversity of natural human repertoires.

[0084] Recently, several groups have described methods that combine microfluidics, multiplex PCR, yeast display, and deep sequencing for ultra-high-throughput discovery of antibodies from human repertoires (Adler et al., MAbs, 2017, 9(8):1282-1296; Wang et al., Nature Biotechnol, 2018, 36(2):152-155). Here, we report a similar technology for ultra-high-throughput discovery of TCRs from human repertoires. Human repertoires can be virus-positive, healthy donors, cancer donors, donors with autoimmunity, or donors with any disease condition. Because the diversity of TCRαβ repertoires are generated by millions of single cells expressing different TCRα and TCRβ sequences, we first use a droplet microfluidic technology to isolate single cells into droplet emulsions and natively pair TCRα and TCRβ on a single cell level. The microfluidic technology can process millions of single T cells in an hour, which is significantly higher throughput than previously reported methods for TCRαβ pairing (Turchaninova et al., Eur Journal of Immunology 2013, 43(9):2507-15; Howie et al., Science Translational Medicine 2015, 7(301):301ra131). TCRα and TCRβ transcripts are captured from lysed single cells, amplified, and then physically linked into a single amplicon for subsequent cloning into expression vectors. Lysis and amplification are performed in two steps, since the reagents for lysis are incompatible with efficient RT-PCR.

[0085] Some other methods are available for natively pairing TCRα and TCRβ via a single cell barcoding method, for example through a commercial group (10× Genomics; Azizi et al., Cell 2018, 174(5):1293-1308.e36). Single cells are isolated into microfluidic droplets with molecular barcodes, and then TCRα and TCRβ from the single cells are fused to the unique barcodes. The single cell TCRα and TCRβ pairing is then inferred through bioinformatics. Though these molecular identifiers might offer advantages in terms of quantification, as used elsewhere for methods that do not leverage single cells (Shugay et al., 2014), single cell barcoding methods do not generate libraries of physically linked TCRα and TCRβ. This complicates any downstream efforts to identify binding and avidity properties of the TCRαβ sequences.

[0086] In our method, the library of millions of physically linked, natively paired TCRαβ amplicons is cloned en masse into expression vectors. The vectors are then subjected to restriction digestion en masse, and a DNA insert that encodes a TCR constant domain and translational skip sequence is cloned into the library. The full-length TCRαβ libraries are then packaged into lentiviral constructs and transduced into Jurkat cells that lack endogenous TCRβ expression and which are additionally engineered to stably express CD8. The resulting TCR-Jurkat libraries comprise natively linked TCRαβ sequences from millions of single T cells. The TCR-Jurkat libraries are immortal and renewable, enabling multiple rounds of panning with multiple antigens, using both binding to MHC multimers and activation by artificial antigen-presenting cells (aAPCs).

[0087] Similar methods can be applied to T cell repertoires from any animal with T cells, for example, mouse, rat, dog, cow, rabbit, or horse.

### 14. SEQUENCES

[0088] SEQ ID NOS 1-12 as found in the sequence listing submitted with this application, recite the pairs of sequences of the TCR α and β V(D)J polypeptides for TCR clones 1-6. For example, TCR clone 1 comprises SEQ ID NO:1 (TCRα for TCR 1) and SEQ ID NO:2 (TCRβ for TCR 1), TCR clone 2 comprises SEQ ID NO:3 (TCRα for TCR 2) and SEQ ID NO:4 (TCRβ for TCR 2), TCR clone 3 comprises SEQ ID NO:5 (TCRα for TCR 3) and SEQ IDNO:6 (TCRβ for TCR 3), and so on.

[0089] SEQ ID NOS: 13-790940 recite the pairs of CDR3 alpha sequences and CDR3 beta sequences for TCR clones 7-395464. For example, TCR clone 7 comprises the CDR3 alpha sequence of SEQ ID NO:13 and the CDR3 beta sequence of SEQ ID NO:14. Six of these clones are duplicates of TCR clones 1-6.

[0090] SEQ ID NOS:790941-791100 are the sequences of the TCR α and β V(D)J polypeptides.

[0091] SEQ ID NO:791101 is the amino acid sequence of the HLA_A 0201 gp100 peptide.

| SEQ ID NOS | Description |
|---|---|
| 1, 3, 5, 7, 9, 11 | Jurkat-TIL full length TCR-alpha |
| | variable sequences |
| 2, 4, 6, 8, 10, 12 | Jurkat-TIL full length TCR-beta |
| | variable sequences |
| 13, 15, 17, through 790939 | Jurkat-TIL CDR3-alpha sequences |
| (odd numbers) | |
| 14, 16, 18, through 790940 | Jurkat-TIL CDR3-beta sequences |
| (even numbers) | |
| 790941-790983 | TCR-alpha V gene sequences |
| 790984-791035 | TCR-alpha J gene sequences |
| 791036-791086 | TCR-beta V gene sequences |
| 791087-791100 | TCR-beta J gene sequences |
| 791101 | HLA_A 0201 gp100 peptide |

[0092] In some embodiments, disclosed is an isolated, non-naturally occurring mammalian cell comprising recombinant T cell receptor (TCR) that specifically binds gp100 antigen HLA*A 02:01/gp100 (KTWGQYWQV) (SEQ ID NO:791101), wherein the TCR comprises an alpha chain and a beta chain, the alpha chain comprising an alpha variable domain comprising an alpha CDR3 and the beta chain comprising a beta variable domain comprising an beta CDR3, wherein the alpha CDR3 sequence is selected from SEQ ID NOS: 13-790939, odd numbers, and the beta CDR3 sequence is selected from SEQ ID NOS: 14-790940, even numbers. In some embodiments, the alpha variable domain comprises a sequence selected from SEQ ID NOS: 1-11, odd numbers, and the beta variable domain comprises a sequence selected from SEQ ID NOS: 2-12, even numbers.

### 15. PHARMACEUTICAL COMPOSITIONS

[0093] For administration to patients, the TCRs or TCR-T cells of the invention may be provided in a pharmaceutical composition together with one or more pharmaceutically acceptable carriers or excipients. TCR-T cells in accordance with the invention will usually be supplied as part of a sterile, pharmaceutical composition which will normally include a pharmaceutically acceptable carrier. This pharmaceutical composition may be in any suitable form, (depending upon the desired method of administering it to a patient). It may be provided in unit dosage form, will generally be provided in a sealed container and may be provided as part of a kit. Such a kit would normally (although not necessarily) include instructions for use. It may include a plurality of said unit dosage forms. The pharmaceutical composition may be adapted for administration by any appropriate route, preferably a parenteral (including subcutaneous, intramuscular, or preferably intravenous) route. Such compositions may be prepared by any method known in the art of pharmacy, for example by mixing the active ingredient with the carriers) or excipient(s) under sterile conditions. TCRs, pharmaceutical compositions, vectors, nucleic acids and cells of the invention may be provided in substantially pure form, for example at least 50%, at least 60%, at least 70%, at least 80%, at least 85%, at least 90%, at least 91%, at least 92%, at least 93%, at least 94%, at least 95%, at least 96%, at least 97%, at least 98%, at least 99% or 100% pure.

[0094] Also provided by the invention are: (i) a non-naturally occurring and/or purified and/or engineered TCR which binds the target peptide:MHC, or a cell expressing and/or presenting such a TCR, for use in medicine, preferably in a method of treating cancer. The method may comprise adoptive therapy; (ii) the use of a TCR which binds the target peptide:MHC, or a cell expressing and/or presenting such a TCR, in the manufacture of a medicament for treating cancer; (iii) a method of treating cancer in a patient, comprising administering to the patient a TCR which binds the peptide:MHC target, or a cell expressing and/or presenting such a TCR. Therapeutic agents which may be associated with the TCRs of the invention include immunomodulators, radioactive compounds, enzymes (perforin for example) or chemotherapeutic agents (cis-platin for example). To ensure that toxic effects are exercised in the desired location the toxin could be inside a liposome linked to a TCR so that the compound is released slowly. This will prevent damaging effects during the transport in the body and ensure that the toxin has maximum effect after binding of the TCR to the relevant antigen presenting cells.

[0095] Other suitable therapeutic agents include small molecule cytotoxic agents, i.e. compounds with the ability to kill mammalian cells having a molecular weight of less than 700 Daltons. Such compounds could also contain toxic metals capable of having a cytotoxic effect. Furthermore, it is to be understood that these small molecule cytotoxic agents also include pro-drugs, i.e. compounds that decay or are converted under physiological conditions to release cytotoxic agents. Examples of such agents include cis-platin, maytansine derivatives, rachelmycin, calicheamicin, docetaxel, etoposide, gemcitabine, ifosfamide, irinotecan, melphalan, mitoxantrone, sorfimer sodiumphotofrin II, temozolomide, topotecan, trimetreate glucuronate, auristatin E vincristine and doxorubicin; peptide cytotoxins, i.e. proteins or fragments thereof with the ability to kill mammalian cells. For example, ricin, diphtheria toxin, pseudomonas bacterial exotoxin A, DNase and RNase; radio-nuclides, i.e. unstable isotopes of elements which decay with the concurrent emission of one or more of a orb particles, or g rays. For example, iodine 131, rhenium 186, indium 111, yttrium 90, bismuth 210 and 213, actinium 225 and astatine 213; chelating agents may be used to facilitate the association of these radio-nuclides to the high affinity TCRs, or multimers thereof; immuno-stimulants, i.e. immune effector molecules which stimulate immune response. For example, cytokines such as IL-2 and IFN-g, Superantigens and mutants thereof; TCR-HLA fusions; chemokines such as IL-8, platelet factor 4, melanoma growth stimulatory protein, etc; antibodies or fragments thereof, including anti-T cell or NK cell determinant antibodies (e.g. anti-CD3, anti-CD28 or anti-CD16); alternative protein scaffolds with antibody like binding characteristics complement activators; xenogeneic protein domains, allogeneic protein domains, viral/bacterial protein domains, viral/bacterial peptides.

### 16. METHODS OF USE

[0096] Therapeutic TCRs may be used that specifically bind to antigen target or targets.

[0097] In vivo and/or in vitro assays may optionally be employed to help identify optimal dosage ranges. The precise dose to be employed in the formulation will also depend on the route of administration, and the seriousness of the condition, and should be decided according to the judgment of the practitioner and each subject's circumstances. Effective doses may be extrapolated from dose-response curves derived from in vitro or animal model test systems.

[0098] An oligopeptide or polypeptide is within the scope of the invention if it has an amino acid sequence that is at least 75%, 76%, 77%, 78%, 79%, 80%, 81%, 82%, 83%, 84%, 85%, 86%, 87%, 88%, 89%, 90%, 91%, 92%, 93%, 94%, 95%, 96%, 97%, 98% or 99% identical to least one of the CDRs provided herein.

[0099] The terms “treatment,” “treating,” and the like are used herein to generally mean obtaining a desired pharmacologic and/or physiologic effect. The effect may be prophylactic, in terms of completely or partially preventing a disease, condition, or symptoms thereof, and/or may be therapeutic in terms of a partial or complete cure for a disease or condition and/or adverse effect, such as a symptom, attributable to the disease or condition. “Treatment” as used herein covers any treatment of a disease or condition of a mammal, particularly a human, and includes: (a) preventing the disease or condition from occurring in a subject which may be predisposed to the disease or condition but has not yet been diagnosed as having it; (b) inhibiting the disease or condition (e.g., arresting its development); or (c) relieving the disease or condition (e.g., causing regression of the disease or condition, providing improvement in one or more symptoms). Improvements in any conditions can be readily assessed according to standard methods and techniques known in the art. The population of subjects treated by the method of the disease includes subjects suffering from the undesirable condition or disease, as well as subjects at risk for development of the condition or disease.

[0100] By the term “therapeutically effective dose” or “effective amount” is meant a dose or amount that produces the desired effect for which it is administered. The exact dose or amount will depend on the purpose of the treatment, and will be ascertainable by one skilled in the art using known techniques (see, e.g., Lloyd (1999) The Art, Science and Technology of Pharmaceutical Compounding).

[0101] The term “sufficient amount” means an amount sufficient to produce a desired effect.

[0102] The term “therapeutically effective amount” is an amount that is effective to ameliorate a symptom of a disease. A therapeutically effective amount can be a “prophylactically effective amount” as prophylaxis can be considered therapy.

[0103] The term “ameliorating” refers to any therapeutically beneficial result in the treatment of a disease state, e.g., a neurodegenerative disease state, including prophylaxis, lessening in the severity or progression, remission, or cure thereof.

[0104] The actual amount administered, and rate and time-course of administration, will depend on the nature and severity of protein aggregation disease being treated. Prescription of treatment, e.g. decisions on dosage etc., is within the responsibility of general practitioners and other medical doctors, and typically takes account of the disorder to be treated, the condition of the individual patient, the site of delivery, the method of administration and other factors known to practitioners. Examples of the techniques and protocols mentioned above can be found in Remington's Pharmaceutical Sciences, 16th edition, Osol, A. (ed), 1980.

[0105] In some embodiments, the pharmaceutical composition is administered by inhalation, orally, by buccal administration, by sublingual administration, by injection or by topical application.

[0106] In some embodiments, the pharmaceutical composition is administered in an amount sufficient to modulate survival of neurons or dopamine release. In some embodiments, the major cannabinoid is administered in an amount less than 1 g, less than 500 mg, less than 100 mg, less than 10 mg per dose.

[0107] In some embodiments, the pharmaceutical composition is administered once a day, 2-4 times a day, 2-4 times a week, once a week, or once every two weeks.

### 17. EXAMPLES

[0108] Below are examples of specific embodiments for carrying out the present invention. The examples are offered for illustrative purposes only, and are not intended to limit the scope of the present invention in any way. Efforts have been made to ensure accuracy with respect to numbers used (e.g., amounts, temperatures, etc.), but some experimental error and deviation should, of course, be allowed for.

[0109] The following publication is incorporated by reference for all purposes: Spindler, M. J., Nelson, A. L., Wagner, E. K. et al. Massively parallel interrogation and mining of natively paired human TCRαβ repertoires. Nat Biotechnol (2020). https://doi.org/10.1038/s41587-020-0438-y.

### Example 1: Identification of Anti-Gp100 TCRs from Human Donor T Cell Repertoires

[0110] Sourcing and Processing Human Materials

[0111] Human TILs were generated from tumor biopsies from consenting individuals undergoing TIL clinical therapy for metastatic melanoma using a proprietary method which in brief involves the following. Tumor biopsies were disaggregated to a single cell suspension using collagenase and DNAse, then plated in tissue culture plates in the presence of IL-2 for up to 21 days. Following this initial outgrowth the TIL underwent a rapid expansion protocol (REP) by mixing the derived TIL with donor-mixed irradiated PBMC feeder cells with addition of OKT3 and IL-2, for 14 days prior to cryopreservation.

### Generating Paired TCRα-TCRβ Linkage Libraries

[0112] Library generation is divided into three steps: (i) poly(A)+ mRNA capture, (ii) multiplexed overlap extension reverse transcriptase polymerase chain reaction (OE-RT-PCR), and (iii) nested PCR to remove artifacts and add adapters for deep sequencing or expression libraries (Adler et al., 2017).

[0113] For poly(A)+ mRNA capture, we used a custom designed co-flow emulsion droplet microfluidic chip fabricated from glass (Dolomite). The microfluidic chip has two input channels for fluorocarbon oil (Dolomite), one input channel for the cell suspension mix, and one input channel for oligo-dT beads (New England Biolabs) in 0.5M NaCl, 0.5% Tween-20, and 20 mM DTT. The input channels are etched to 50 μm×150 μm for most of the chip's length, narrow to 55 μm at the droplet junction, and are coated with hydrophobic Pico-Glide (Dolomite). Three Mitos P-Pump pressure pumps (Dolomite) are used to pump the liquids through the chip. Droplet size depends on pressure, but typically we find that droplets of ˜45 μm diameter are optimally stable. Emulsions were collected into 1.5 mL microcentrifuge tubes and incubated at 40° C. for 30 minutes to capture mRNA onto oligo-dT beads. Emulsions were then broken using Pico-Break (Dolomite) and mRNA-bound beads are magnetically isolated.

[0114] For multiplex OE-RT-PCR, mRNA-bound beads were re-encasuplated into droplets with an OE-RT-PCR mix. The OE-RT-PCR mix contains 2× one step RT-PCR buffer (ThermoFisher), 2.0 mM MgSO₄, SuperScript III reverse transcriptase (ThermoFisher), and Platinum Taq (ThermoFisher), plus a mixture of primers directed against the TRAC, TRBC, and all V-gene regions. TCRa and TCRb chains are physically linked by overlapping primer sequences included on the TRAC and TRBV primers. The amplified DNA was recovered from the droplets using a proprietary droplet breaking solution (GigaMune) and purified using a QIAquick PCR Purification Kit (Qiagen).

[0115] For nested PCR, the OE-RT-PCR product was first run on a 1.7% agarose gel and a band at 800-1200 bp was excised and purified using NucleoSpin Gel and PCR Clean-up Kit (Macherey-Nagel). Nested PCR was performed using NEBNext amplification mix (NEB) to add adapters for Illumina sequencing or cloning into a mammalian expression construct. PCR products were run on a 1.2% agarose gel, and the 800-1100 bp band was excised and purified using NucleoSpin Gel and PCR Clean-up Kit (Macherey-Nagel).

### Linked TCRαβ Repertoire Sequencing

[0116] Deep TCRαβ sequencing libraries were quantified using a quantitative PCR Illumina Library Quantification Kit (Kapa Biosystems) and diluted to 8.5-10 pM. Libraries were sequenced on a MiSeq (Illumina) using v3 600-cycle MiSeq Reagent Kits, according to the manufacturer's instructions. To identify the paired sequences from the TCRαβ libraries, we obtain forward reads of 357 cycles that cover the TCRα V gene and CDR3, and reverse reads of 162 cycles that cover the TCRβ CDR3 and enough of the TCRβ V gene for accurate calling.

[0117] To remove base call errors, we use the expected error filtering method of Edgar and Flyvbjerg (Edgar, Bioinformatics 2015, 31(21):3476-82). The expected number of errors (E) for a read is calculated from its Phred scores. By default, reads with E>1 are discarded, leaving reads for which the most probable number of base call errors is zero. For the clonotypes analyzed in this study, we excluded singletons and required that unique CDR3α+CDR3β paired sequences share the same V and J genes.

[0118] To identify reading frame and CDR3 amino acid sequences generated by V(D)J rearrangements, we first processed a database of well-curated TCR sequences (IMGT, http://www.imgt.org/download/LIGM-DB/; Lefranc et al., 2009) to generate position-specific sequence matrices (PSSMs) for the 5′ and 3′ CDR3 junctions. Each nucleotide sequence from the Illumina sequencing runs was translated into all reading frames. We then used the PSSMs to identify the FR3-CDR3 (5′) and CDR3-FR4 (3′) junctions and the appropriate protein reading frame for each of the nucleotide sequences. To report a CDR3 sequence, we required 5′ and 3′ PSSM hits in the same reading frame. Additionally, sequences that had low PSSM identity scores were marked with an exclamation point. These steps allowed us to predict valid, functional, CDR3 sequences with high confidence. We queried TCRα and TCRβ nucleotide sequences against the IMGT database of reference V and J gene germline sequences using UBLAST (https://www.drive5.com/usearch/manual/ublast_algo.html; Edgar, 2010); V and J genes were identified based on the UBLAST alignments with the best alignment (lowest E-values).

### Single Chain TCRα and TCRβ Repertoire Sequencing

[0119] For single chain sequencing of the recombinant TCRα-TCRβ expression libraries, TCRα and TCRβ V(D)J regions were amplified separately using universal primers, that contained adapters for Illumina sequencing, within the TRAV.SS and TRAC regions for TCRα and within the TRBV.SS and TRBC regions for TCRβ. We conducted RT-PCR off RNA samples using SuperScript III reverse transcriptase (ThermoFisher) and Platinum Taq (ThermoFisher). We used NEBNext amplification mix (NEB) for PCR off plasmid DNA. These amplicons were run on 1.7% agarose gels and the 500-600 bp band was excised and purified using NucleoSpin Gel and PCR Clean-up Kit (Macherey-Nagel). Samples were separately quantified using an Illumina Library Quantification Kit (Kapa Biosystems). After diluting to 9 pM, libraries were sequenced on a MiSeq (Illumina) using v2 500-cycle MiSeq Reagent Kits, according to the manufacturer's instructions. We obtained overlapping forward and reverse reads of 255 cycles for TCRα and TCRβ separately. TCRα and TCRβ sequences were analyzed separately using the same methods as described above for paired sequences, with the additional requirement that overlapping reads were observed.

### Generating Recombinant TCRα 0 Jurkat Expression Libraries

[0120] We developed a subcloning workflow to convert the linked TCRαβ amplicons into full-length lentiviral expression constructs. In this workflow, we first used nested PCR to add overhang adapters to the 5′ and 3′ ends of the linked TCRαβ amplicons for downstream Gibson assembly. Then, we used NEBuilder HiFi DNA Assembly Master Mix (New England Biolabs) to insert the linked TCRαβ library into a pReceiver-based lentiviral vector (GeneCopoeia) that contains the EF1α promoter, a TCRα signal sequence, the TCRβ constant region, and the Puromycin resistance gene. We transformed this intermediate library into Endura electrocompetent E. coli (Lucigen), plated onto LB Lennox carbenicillin plates (Teknova), and scraped and pooled >5 million colonies from each library for plasmid purification. Plasmids were purified using the endotoxin free ZymoPURE II Plasmid Maxiprep Kit (Zymo Research). These intermediate libraries were linearized with a NheI-HF (New England Biolabs) restriction digest present within the linker region, run on a 0.8% agarose gel, and gel extracted using the NucleoSpin Gel and PCR Clean-up Kit (Macherey-Nagel). To create the full-length TCRαβ lentiviral libraries, we performed a second Gibson assembly to insert the TCRα constant region, a ribosomal skip motif (P2A; Funston, Journal General Virology 2008, 89(Pt 2):389-96), and a TCRβ signal sequence. These full-length TCRαβ lentiviral libraries were transformed into Endura electrocompetent cells and purified using the endotoxin free maxiprep kit as described above.

### Lentiviral Transduction of Jurkat Cells

[0121] We then optimized our lentiviral transduction protocol to obtain a low transduction efficiency to ensure that we expressed only one TCRαβ pair per cell. We packaged lentivirus into VSV-G pseudotyped lentiviral particles using the 3^{rd} generation ViraSafe Lentiviral Packaging System (Cell Biolabs) and Lenti-Pac 293Ta cells (GeneCopoeia). 21 million Lenti-Pac 293Ta cells per 10 cm plate were transfected with 4.3 ug pCMV-VSV-G, 4.3 ug pRSV-Rev, 4.3 ug pCgpV, and 4.3 ug of the TCRαβ expression libraries using Lipofectamine 3000 (ThermoFisher) following the manufacturer's protocol. Lentiviral supernatant was collected at 48 hours post-transfection, spun down at 500×g for 10 minutes to eliminate cellular debris, and clarified through a 0.45 um syringe filter. RNA was isolated from fresh lentiviral supernatant using the NucleoSpin RNA Virus kit (Macherey-Nagel) following the manufacturer's protocol. Fresh lentiviral supernatant was used to transduce CD8⁺ ΔTCRβ Jurkat cells. Clarified lentiviral supernatant was added at a 1:10 ratio with Jurkat cells in RPMI media with 10% FBS and 8 ug/ml Polybrene (EMD Millipore). Jurkat cells were incubated with lentiviral particles for 6 hours and then media was exchanged. Two days after viral transduction, Jurkat cells were analyzed for cell surface CD3 and TCRαβ expression to measure viral transduction efficiency. Cells were then cultured for 14 days with puromycin to select for stable integration and again assessed for CD3 and TCRαβ surface expression. To generate the natively paired TCRαβ Jurkat expression libraries, we transduced 40 million ΔTCRβ Jurkat and on day 2 observed surface expression on 8-14% of transduced cells compared to 4% on the parental Jurkat cells. TCRαβ surface increased to 42-56% following selection. For monoclonal TCRαβ cell line generation, 800,000 CD8+ΔTCRβ Jurkat cells were transduced and selected with puromycin for 14 days. CD3 and TCRαβ surface expression was measured following selection.

### Screening Recombinant TCRαβ Jurkat Libraries

[0122] We screened the TCRαβ Jurkat libraries with peptide-HLA (pHLA) dextramers (Immudex) targeting gp100 (HLA*A 02:01 restricted KTWGQYWQV peptide). We stained 2-5 million CD8+ TCRαβ Jurkat library cells with 10 ul of APC-conjugated dextramer at room temperature for 10 minutes. Cells were then stained with an anti-CD3-FITC antibody (clone: UCHT1; BioLegend) for 30 minutes at 4° C. and DAPI (BioLegend) to assess cell viability. Cells were then sorted on a FACSMelody (BD Biosciences) for Live CD3⁺/dextramer⁺ cells. The sorted Jurkat cells were recovered and expanded in RPMI media with 10% FBS and 100 U/ml Pen/Strep (Gibco). Once cells reached high viability (>85%) and appropriate cell numbers, 2 million cells were lysed, and RNA was extracted using the NucleoSpin RNA Plus kit (Macherey-Nagel) for single chain TCRα and TCRβ repertoire sequencing as described above. Multiple rounds of dextramer staining, FACS sorting, and cell expansion were conducted to enrich for populations of pHLA-binding TCRs.

[0123] Following pHLA-binding enrichment, we co-cultured CD8⁺ TCRαβ Jurkat cell populations with peptide-pulsed antigen presenting cells (APCs) to assess cell activation. We pulsed T2 cells with 10 μM peptide, mixed 200,000 peptide-pulsed T2 cells with 200,000 CD8⁺TCRαβ Jurkat cells per well in 96-well round-bottom plates (Falcon), and cultured for 16-20 hours. Cells were harvested out of the round-bottom plates and stained for HLA-A2 (clone: BB7.2; BioLegend), CD69 (clone: FN50; BioLegend), CD62L (clone: DREG-56; Bio-Legend), and cell viability with DAPI. Cells were analyzed on a FACSMelody or CytoFLEX LX (Beckman Coulter) for activation (HLA-A2−/CD69+/CD62L−). We used 1× Cell Stimulation Cocktail (eBioscience, ThermoFisher) as a positive control and irrelevant peptide-pulsed T2 cells as a negative control. To identify TCRs present in peptide-activated Jurkat cells, we co-cultured partially enriched TCRαβ Jurkat cell populations with peptide-pulsed T2 cells, stained with the activation markers described above and sorted for activated (HLA-A2−/CD69+/CD62L−) cells on a FACSMelody. These activated cells were lysed and RNA isolated using the NucleoSpin RNA Plus XS kit (Macherey-Nagel) for single chain TCRα and TCRβ repertoire sequencing. Peptides were synthesized at >90% purity (ELIM Biopharm), resuspended in DMSO to 4 mg/ml, aliquoted for single use, and stored at −20° C.

[0124] Therapeutically relevant TCRs should activate T cells upon binding their cognate peptide:MHC, but prior work has established that TCRs can bind their peptide:MHC target but fail to activate T cells (Sibener et al., Cell 2018, 174(3):672-687.e27). Thus, to further reduce false positives, we performed in vitro activation screens on MHC dextramer-enriched TCRαβ Jurkat populations Panning Round 2, 3, or 4 TCR-Jurkat populations were incubated with peptide-pulsed T2 cells, and then FACS-selected for increased cell surface CD69 and decreased CD62L expression. The ratio of the frequency of a TCR in the CD69+/CD62L-fraction to its frequency in the CD69-/CD62L+ fraction was used to quantify the TCR's ability to activate T cells. Activation ratios were integrated with corresponding TCRαβ read frequencies after the 3^{rd} or 4^{th} round of MHC dextramer panning, to assess the likelihood of a true positive.

### Monoclonal TCRαβ Characterization

[0125] Enriched TCRα and TCRβ single chain sequences were identified from the pHLA-binding and cell activation screens. We used this enrichment data and the natively paired TCRα-TCRβ sequencing data to identify candidate antigen-reactive TCR clones. We designed full-length TCRα-TCRβ lentiviral expression constructs using the Illumina sequencing data, specifically the CDR3 nucleotide sequences and V-gene calls, and synthesized these plasmids using the BioXp 3200 system (SGI-DNA). These monoclonal TCRαβ expression constructs follow the same layout as the TCRαβ libraries. Lentiviral plasmids were sequence verified by Sanger sequencing, packaged into VSV-G pseudotyped lentiviral particles, transduced into ΔTCRβ Jurkat cells, and stable cell lines were selected.

[0126] Monoclonal TCRαβ Jurkat cell lines were assessed for pHLA binding and cellular activation. We stained 0.5-1 million cells with 5 ul of pHLA dextramer and anti-CD3 antibodies as described above. We then ran co-culture assays with the monoclonal CD8⁺TCRαβ Jurkat cell lines that showed pHLA binding. As described above, we pulsed T2 cells with 1004 peptide, mixed 200,000 peptide-pulsed T2 cells with 200,000 TCRαβ Jurkat cells per well, and measured cell activation by staining for CD69 and CD62L.

[0127] We then measured functional avidity of the monoclonal TCRs that showed cellular activation using T2 cells pulsed with a dilution series of peptide (1E-7-10 μM). Cells were co-cultured in duplicate wells for 20 hours, harvested, pooled, and stained for activation markers as described above. Cells were run on the CytoFLEX LX and Jurkat cell CD69 Median Fluorescence Intensity (MFI) was calculated using FlowJo (Treestar) and analyzed in Prism (GraphPad). Two independent experiments were conducted, and the mean and standard deviation values were plotted. TCR number is equivalent to TCR clone.

TABLE 4
Funtional annotation of TCR sequences

| | Library | Library | Monoclonal | Monoclonal | TCR |
|---|---|---|---|---|---|
| Target | Binding | Activation | Binding | Activation | number |
| PMEL | Yes | Yes | Yes | Yes | 1 |
| (gp100) | | | | | |
| PMEL | Yes | Yes | Yes | Yes | 2 |
| (gp100) | | | | | |
| PMEL | Yes | Yes | Yes | Yes | 3 |
| (gp100) | | | | | |
| PMEL | Yes | Yes | Yes | Yes | 4 |
| (gp100) | | | | | |
| PMEL | Yes | Yes | Yes | Yes | 5 |
| (gp100) | | | | | |

### 18. INCORPORATION BY REFERENCE

[0128] All publications, patents, patent applications and other documents cited in this application are hereby incorporated by reference in their entireties for all purposes to the same extent as if each individual publication, patent, patent application or other document were individually indicated to be incorporated by reference for all purposes.

### 19. EQUIVALENTS

[0129] Whereas various specific embodiments have been illustrated and described, the above specification is not restrictive. It will be appreciated that various changes can be made without departing from the spirit and scope of the invention(s). Many variations will become apparent to those skilled in the art upon review of this specification.

1. A non-naturally occurring mammalian cell, comprising recombinant T cell receptor subunits SEQ ID 1 and SEQ ID 2, that specifically binds gp100 antigen HLA*A 02:01/gp100 (KTWGQYWQV).

2. A non-naturally occurring mammalian cell, comprising recombinant T cell receptor subunits SEQ ID 3 and SEQ ID 4, that specifically binds gp100 antigen HLA*A 02:01/gp100 (KTWGQYWQV).

3. A non-naturally occurring mammalian cell, comprising recombinant T cell receptor subunits SEQ ID 5 and SEQ ID 6, that specifically binds gp100 antigen HLA*A 02:01/gp100 (KTWGQYWQV).

4. A non-naturally occurring mammalian cell, comprising recombinant T cell receptor subunits SEQ ID 7 and SEQ ID 8, that specifically binds gp100 antigen HLA*A 02:01/gp100 (KTWGQYWQV).

5. A non-naturally occurring mammalian cell, comprising recombinant T cell receptor subunits SEQ ID 9 and SEQ ID 10, that specifically binds gp100 antigen HLA*A 02:01/gp100 (KTWGQYWQV).

The application's sequence listing, which the Patent Office published only in electronic form, follows.

SEQUENCE LISTING (791101 sequences)

SEQ ID NO: 1 - protein, 107 aa, Homo sapiens
  Alpha chain variable domain of TCR clone 1
QQPVQSPQAVILREGEDAVINCSSSKALYSVHWYRQKHGEAPVFLMILLKGGEQKGHEKISASFNEKKQQSSLYLTASQLSYSGTYFCGIGNEKLTFGTGTRLTIIP

SEQ ID NO: 2 - protein, 114 aa, Homo sapiens
  Beta chain variable domain of TCR clone 1
GAGVSQSPRYKVTKRGQDVALRCDPISGHVSLYWYRQALGQGPEFLTYFNYEAQQDKSGLPNDRFSAERPEGSISTLTIQRTEQRDSAMYRCASSVAGGTDTQYFGPGTRLTVL

SEQ ID NO: 3 - protein, 111 aa, Homo sapiens
  Alpha chain variable domain of TCR clone 2
QKEVEQNSGPLSVPEGAIASLNCTYSDRGSQSFFWYRQYSGKSPELIMSIYSNGDKEDGRFTAQLNKASQYVSLLIRDSQPSDSATYLCAVSTDSWGKLQFGAGTQVVVTP

SEQ ID NO: 4 - protein, 112 aa, Homo sapiens
  Beta chain variable domain of TCR clone 2
GAGVSQSPRYKVTKRGQDVALRCDPISGHVSLYWYRQALGQGPEFLTYFNYEAQQDKSGLPNDRFSAERPEGSISTLTIQRTEQRDSAMYRCASSLADSEQYFGPGTRLTVT

SEQ ID NO: 5 - protein, 109 aa, Homo sapiens
  Alpha chain variable domain of TCR clone 3
GQQLNQSPQSMFIQEGEDVSMNCTSSSIFNTWLWYKQDPGEGPVLLIALYKAGELTSNGRLTAQFGITRKDSFLNISASIPSDVGIYFCAPGGDDKIIFGKGTRLHILP

SEQ ID NO: 6 - protein, 114 aa, Homo sapiens
  Beta chain variable domain of TCR clone 3
GAGVSQSPRYKVTKRGQDVALRCDPISGHVSLYWYRQALGQGPEFLTYFNYEAQQDKSGLPNDRFSAERPEGSISTLTIQRTEQRDSAMYRCASSLGGGADEQFFGPGTRLTVL

SEQ ID NO: 7 - protein, 111 aa, Homo sapiens
  Alpha chain variable domain of TCR clone 4
GEDVEQSLFLSVREGDSSVINCTYTDSSSTYLYWYKQEPGAGLQLLTYIFSNMDMKQDQRLTVLLNKKDKHLSLRIADTQTGDSAIYFCAEIANRDDKIIFGKGTRLHILP

SEQ ID NO: 8 - protein, 113 aa, Homo sapiens
  Beta chain variable domain of TCR clone 4
DTEVTQTPKHLVMGMTNKKSLKCEQHMGHRAMYWYKQKAKKPPELMFVYSYEKLSINESVPSRFSPECPNSSLLNLHLHALQPEDSALYLCASSQAVNTGELFFGEGSRLTVL

SEQ ID NO: 9 - protein, 108 aa, Homo sapiens
  Alpha chain variable domain of TCR clone 5
GEDVEQSLFLSVREGDSSVINCTYTDSSSTYLYWYKQEPGAGLQLLTYIFSNMDMKQDQRLTVLLNKKDKHLSLRIADTQTGDSAIYFCAEDTDKLIFGTGTRLQVFP

SEQ ID NO: 10 - protein, 112 aa, Homo sapiens
  Beta chain variable domain of TCR clone 5
EAGVAQSPRYKIIEKRQSVAFWCNPISGHATLYWYQQILGQGPKLLIQFQNNGVVDDSQLPKDRFSAERLKGVDSTLKIQPAKLEDSAVYLCASSLGGGELFFGEGSRLTVL

SEQ ID NO: 11 - protein, 111 aa, Homo sapiens
  Alpha chain variable domain of TCR clone 6
QKEVEQDPGPLSVPEGAIVSLNCTYSNSAFQYFMWYRQYSRKGPELLMYTYSSGNKEDGRFTAQADKSSKYISLFIRDSQPSDSATYLCAMTLQGAQKLVFGQGTRLAINP

SEQ ID NO: 12 - protein, 113 aa, Homo sapiens; identical to SEQ ID NO: 8
  Beta chain variable domain of TCR clone 6

SEQ ID NO: 13 - protein, 12 aa, Homo sapiens
  CDR3 for alpha chain variable domain of TCR clone 7 (TRAV12-3, TRAJ17)
CAMTLTGNKLTF

SEQ ID NO: 14 - protein, 15 aa, Homo sapiens
  CDR3 for beta chain variable domain of TCR clone 7 (TRBV20-1, TRBJ2-7)
CSARDRVSGMDEQYF

SEQ ID NO: 15 - protein, 16 aa, Homo sapiens
  CDR3 for alpha chain variable domain of TCR clone 8 (TRAV30, TRAJ24)
CGTEIVDADSWGKFQF

SEQ ID NO: 16 - protein, 14 aa, Homo sapiens
  CDR3 for beta chain variable domain of TCR clone 8 (TRBV12-5, TRBJ2-5)
CASGSRTHQETQYF

SEQ ID NO: 17 - protein, 13 aa, Homo sapiens
  CDR3 for alpha chain variable domain of TCR clone 9 (TRAV2, TRAJ40)
CAVVTSGTYKYIF

SEQ ID NO: 18 - protein, 14 aa, Homo sapiens
  CDR3 for beta chain variable domain of TCR clone 9 (TRBV19, TRBJ2-1)
CASPTFVLSGEQFF

SEQ ID NO: 19 - protein, 17 aa, Homo sapiens
  CDR3 for alpha chain variable domain of TCR clone 10 (TRAV3, TRAJ6)
CAVRDGPRAGGSYIPTF

SEQ ID NO: 20 - protein, 14 aa, Homo sapiens
  CDR3 for beta chain variable domain of TCR clone 10 (TRBV7-2, TRBJ2-7)
CASSPKTSFYEQYF

SEQ ID NO: 21 - protein, 11 aa, Homo sapiens
  CDR3 for alpha chain variable domain of TCR clone 11 (TRAV3, TRAJ21)
CAVGNFNKFYF

SEQ ID NO: 22 - protein, 16 aa, Homo sapiens
  CDR3 for beta chain variable domain of TCR clone 11 (TRBV19, TRBJ2-1)
CASSKAGPSSYNEQFF

SEQ ID NO: 23 - protein, 14 aa, Homo sapiens
  CDR3 for alpha chain variable domain of TCR clone 12 (TRAV12-2, TRAJ13)
CAVKKTGGYQKVTF

SEQ ID NO: 24 - protein, 15 aa, Homo sapiens
  CDR3 for beta chain variable domain of TCR clone 12 (TRBV27, TRBJ2-1)
CASSNGGGSSNEQFF

SEQ ID NO: 25 - protein, 13 aa, Homo sapiens
  CDR3 for alpha chain variable domain of TCR clone 13 (TRAV21, TRAJ27)
CAARPGNAGKSTF

SEQ ID NO: 26 - protein, 14 aa, Homo sapiens
  CDR3 for beta chain variable domain of TCR clone 13 (TRBV7-6, TRBJ2-3)
CASSLGTVTDTQYF

SEQ ID NO: 27 - protein, 18 aa, Homo sapiens
  CDR3 for alpha chain variable domain of TCR clone 14 (TRAV21, TRAJ52)
CAVRPSPAGGTSYGKLTF

SEQ ID NO: 28 - protein, 17 aa, Homo sapiens
  CDR3 for beta chain variable domain of TCR clone 14 (TRBV13, TRBJ2-3)
CASSLSRVAGGRNTQYF

SEQ ID NO: 29 - protein, 16 aa, Homo sapiens
  CDR3 for alpha chain variable domain of TCR clone 15 (TRAV12-3, TRAJ53)
CAMSPGSGGSNYKLTF

SEQ ID NO: 30 - protein, 11 aa, Homo sapiens
  CDR3 for beta chain variable domain of TCR clone 15 (TRBV29-1, TRBJ2-5)
CSEDRTGTQYF

SEQ ID NO: 31 - protein, 14 aa, Homo sapiens
  CDR3 for alpha chain variable domain of TCR clone 16 (TRAV13-1, TRAJ35)
CAASKGGFGNVLHC

SEQ ID NO: 32 - protein, 13 aa, Homo sapiens
  CDR3 for beta chain variable domain of TCR clone 16 (TRBV7-3, TRBJ1-1)
CASSQDWGAEAFF

SEQ ID NO: 33 - protein, 14 aa, Homo sapiens
  CDR3 for alpha chain variable domain of TCR clone 17 (TRAV1-2, TRAJ8)
CAVREDTGFQKLVF

SEQ ID NO: 34 - protein, 15 aa, Homo sapiens
  CDR3 for beta chain variable domain of TCR clone 17 (TRBV6-3, TRBJ2-7)
CASSSPGTVFYEQYF

SEQ ID NO: 35 - protein, 15 aa, Homo sapiens
  CDR3 for alpha chain variable domain of TCR clone 18 (TRAV8-3, TRAJ45)
CASSYSGGGADGLTF

SEQ ID NO: 36 - protein, 13 aa, Homo sapiens
  CDR3 for beta chain variable domain of TCR clone 18 (TRBV10-3, TRBJ2-7)
CASKLAVNYEQYF

SEQ ID NO: 37 - protein, 15 aa, Homo sapiens
  CDR3 for alpha chain variable domain of TCR clone 19 (TRAV26-1, TRAJ29)
CIVRVEGSGNTPLVF

SEQ ID NO: 38 - protein, 15 aa, Homo sapiens
  CDR3 for beta chain variable domain of TCR clone 19 (TRBV7-9, TRBJ1-5)
CASSQGHQPNQPQHF

SEQ ID NO: 39 - protein, 14 aa, Homo sapiens
  CDR3 for alpha chain variable domain of TCR clone 20 (TRAV1-2, TRAJ16)
CAVNRFSDGQKLLF

SEQ ID NO: 40 - protein, 15 aa, Homo sapiens
  CDR3 for beta chain variable domain of TCR clone 20 (TRBV9, TRBJ1-6)
CASSVAGTGDSPLHF

SEQ ID NO: 41 - protein, 13 aa, Homo sapiens
  CDR3 for alpha chain variable domain of TCR clone 21 (TRAV1-2, TRAJ9)
CAALNTGGFKTIF

SEQ ID NO: 42 - protein, 13 aa, Homo sapiens
  CDR3 for beta chain variable domain of TCR clone 21 (TRBV19, TRBJ1-2)
CASSVPGQDGYTF

SEQ ID NO: 43 - protein, 11 aa, Homo sapiens
  CDR3 for alpha chain variable domain of TCR clone 22 (TRAV1-1, TRAJ23)
CAVRQGGKLIF

SEQ ID NO: 44 - protein, 20 aa, Homo sapiens
  CDR3 for beta chain variable domain of TCR clone 22 (TRBV7-8, TRBJ2-2)
CASSHLFPGPTIHITGELFF

SEQ ID NO: 45 - protein, 14 aa, Homo sapiens
  CDR3 for alpha chain variable domain of TCR clone 23 (TRAV12-2, TRAJ40)
CAVKIPSGTYKYIF

SEQ ID NO: 46 - protein, 14 aa, Homo sapiens
  CDR3 for beta chain variable domain of TCR clone 23 (TRBV20-1, TRBJ1-1)
CSAQTRIGGTEAFF

SEQ ID NO: 47 - protein, 15 aa, Homo sapiens
  CDR3 for alpha chain variable domain of TCR clone 24 (TRAV27, TRAJ38)
CAARRNAGNNRKLIW

SEQ ID NO: 48 - protein, 13 aa, Homo sapiens
  CDR3 for beta chain variable domain of TCR clone 24 (TRBV12-5, TRBJ2-3)
CASGDRQSDTQYF

SEQ ID NO: 49 - protein, 14 aa, Homo sapiens
  CDR3 for alpha chain variable domain of TCR clone 25 (TRAV2, TRAJ37)
CAVDFTSNTGKLIF

SEQ ID NO: 50 - protein, 15 aa, Homo sapiens
  CDR3 for beta chain variable domain of TCR clone 25 (TRBV20-1, TRBJ1-1)
CSASRGVTGNTEAFF

SEQ ID NO: 51 - protein, 12 aa, Homo sapiens
  CDR3 for alpha chain variable domain of TCR clone 26 (TRAV8-3, TRAJ20)
CAVGANDYKLSF

SEQ ID NO: 52 - protein, 16 aa, Homo sapiens
  CDR3 for beta chain variable domain of TCR clone 26 (TRBV19, TRBJ2-2)
CASRSPGTGATGELFF

SEQ ID NO: 53 - protein, 15 aa, Homo sapiens
  CDR3 for alpha chain variable domain of TCR clone 27 (TRAV3, TRAJ5)
CAVRDLDTGRRALTF

SEQ ID NO: 54 - protein, 13 aa, Homo sapiens
  CDR3 for beta chain variable domain of TCR clone 27 (TRBV12-4, TRBJ2-7)
CASSPTETYEQYF

SEQ ID NO: 55 - protein, 14 aa, Homo sapiens
  CDR3 for alpha chain variable domain of TCR clone 28 (TRAV26-1, TRAJ38)
CIADNAGNNRKLIW

SEQ ID NO: 56 - protein, 13 aa, Homo sapiens
  CDR3 for beta chain variable domain of TCR clone 28 (TRBV20-1, TRBJ1-1)
CSARGGGNTEAFF

SEQ ID NO: 57 - protein, 14 aa, Homo sapiens
  CDR3 for alpha chain variable domain of TCR clone 29 (TRAV12-2, TRAJ17)
CAVLFKAAGNKLTF

SEQ ID NO: 58 - protein, 17 aa, Homo sapiens
  CDR3 for beta chain variable domain of TCR clone 29 (TRBV20-1, TRBJ2-2)
CSASGSGQGGLTGELFF

SEQ ID NO: 59 - protein, 15 aa, Homo sapiens
  CDR3 for alpha chain variable domain of TCR clone 30 (TRAV26-1, TRAJ29)
CIVRVEGSGNTPLVF

SEQ ID NO: 60 - protein, 14 aa, Homo sapiens
  CDR3 for beta chain variable domain of TCR clone 30 (TRBV18, TRBJ2-5)
CASSPGVSQETQYF

SEQ ID NO: 61 - protein, 14 aa, Homo sapiens
  CDR3 for alpha chain variable domain of TCR clone 31 (TRAV12-1, TRAJ17)
CVVNYKAAGNKLTF

SEQ ID NO: 62 - protein, 17 aa, Homo sapiens
  CDR3 for beta chain variable domain of TCR clone 31 (TRBV20-1, TRBJ2-1)
CSASSSGLAGSYNEQFF

SEQ ID NO: 63 - protein, 13 aa, Homo sapiens
  CDR3 for alpha chain variable domain of TCR clone 32 (TRAV21, TRAJ57)
CAVTQGGSEKLVF

SEQ ID NO: 64 - protein, 16 aa, Homo sapiens
  CDR3 for beta chain variable domain of TCR clone 32 (TRBV29-1, TRBJ2-7)
CSVEDAEDGTAYEQYF

SEQ ID NO: 65 - protein, 12 aa, Homo sapiens
  CDR3 for alpha chain variable domain of TCR clone 33 (TRAV12-1, TRAJ40)
CVVYSGTYKYIF

SEQ ID NO: 66 - protein, 18 aa, Homo sapiens
  CDR3 for beta chain variable domain of TCR clone 33 (TRBV11-2, TRBJ2-3)
CASSLGGASRGAPNTQYF

SEQ ID NO: 67 - protein, 12 aa, Homo sapiens
  CDR3 for alpha chain variable domain of TCR clone 34 (TRAV2, TRAJ9)
CAVGAGGFKTIF

SEQ ID NO: 68 - protein, 16 aa, Homo sapiens
  CDR3 for beta chain variable domain of TCR clone 34 (TRBV13, TRBJ2-2)
CASSPRTGEHTGELFF

SEQ ID NO: 69 - protein, 14 aa, Homo sapiens
  CDR3 for alpha chain variable domain of TCR clone 35 (TRAV35, TRAJ22)
CAGLRPGSARQLTF

SEQ ID NO: 70 - protein, 15 aa, Homo sapiens
  CDR3 for beta chain variable domain of TCR clone 35 (TRBV12-4, TRBJ2-5)
CASSPPTGLQETQYF

SEQ ID NO: 71 - protein, 14 aa, Homo sapiens
  CDR3 for alpha chain variable domain of TCR clone 36 (TRAV21, TRAJ35)
CAVMPIGFGNVLHC

SEQ ID NO: 72 - protein, 12 aa, Homo sapiens
  CDR3 for beta chain variable domain of TCR clone 36 (TRBV7-9, TRBJ2-7)
CASSIKREEQYF

SEQ ID NO: 73 - protein, 13 aa, Homo sapiens
  CDR3 for alpha chain variable domain of TCR clone 37 (TRAV3, TRAJ27)
CAVRPLGAGKSTF

SEQ ID NO: 74 - protein, 13 aa, Homo sapiens
  CDR3 for beta chain variable domain of TCR clone 37 (TRBV7-9, TRBJ2-3)
CASSPGSTDTQYF

SEQ ID NO: 75 - protein, 13 aa, Homo sapiens
  CDR3 for alpha chain variable domain of TCR clone 38 (TRAV27, TRAJ45)
CRSSGGGADGLTF

SEQ ID NO: 76 - protein, 17 aa, Homo sapiens
  CDR3 for beta chain variable domain of TCR clone 38 (TRBV11-2, TRBJ2-1)
CASSLYPPGVEYNEQFF

SEQ ID NO: 77 - protein, 13 aa, Homo sapiens
  CDR3 for alpha chain variable domain of TCR clone 39 (TRAV20, TRAJ37)
CAGCSSNTGKLIF

SEQ ID NO: 78 - protein, 11 aa, Homo sapiens
  CDR3 for beta chain variable domain of TCR clone 39 (TRBV12-4, TRBJ2-3)
CASTATDTQYF

SEQ ID NO: 79 - protein, 11 aa, Homo sapiens
  CDR3 for alpha chain variable domain of TCR clone 40 (TRAV2, TRAJ13)
CASGGYQKVTF

SEQ ID NO: 80 - protein, 16 aa, Homo sapiens
  CDR3 for beta chain variable domain of TCR clone 40 (TRBV6-1, TRBJ2-5)
CASSETLDRGAETQYF

SEQ ID NO: 81 - protein, 10 aa, Homo sapiens
  CDR3 for alpha chain variable domain of TCR clone 41 (TRAV23/DV6, TRAJ57)
CAASSTLSQG

SEQ ID NO: 82 - protein, 14 aa, Homo sapiens
  CDR3 for beta chain variable domain of TCR clone 41 (TRBV25-1, TRBJ1-1)
CASTHLGGNTEAFF

SEQ ID NO: 83 - protein, 13 aa, Homo sapiens
  CDR3 for alpha chain variable domain of TCR clone 42 (TRAV2, TRAJ40)
CAVVTSGTYKYIF

SEQ ID NO: 84 - protein, 15 aa, Homo sapiens
  CDR3 for beta chain variable domain of TCR clone 42 (TRBV11-3, TRBJ2-3)
CASLKDGREGDTQYF

SEQ ID NO: 85 - protein, 15 aa, Homo sapiens
  CDR3 for alpha chain variable domain of TCR clone 43 (TRAV17, TRAJ57)
CATGPSQGGSEKLVF

SEQ ID NO: 86 - protein, 16 aa, Homo sapiens
  CDR3 for beta chain variable domain of TCR clone 43 (TRBV12-4, TRBJ1-5)
CASSRPVGGSNQPQHF

SEQ ID NO: 87 - protein, 14 aa, Homo sapiens
  CDR3 for alpha chain variable domain of TCR clone 44 (TRAV1-2, TRAJ16)
CAVNRFSDGQKLLF

SEQ ID NO: 88 - protein, 15 aa, Homo sapiens
  CDR3 for beta chain variable domain of TCR clone 44 (TRBV7-9, TRBJ1-6)
CASSSPGRGNSPLHF

SEQ ID NO: 89 - protein, 12 aa, Homo sapiens
  CDR3 for alpha chain variable domain of TCR clone 45 (TRAV21, TRAJ33)
CAKMDSNYQLIW

SEQ ID NO: 90 - protein, 14 aa, Homo sapiens
  CDR3 for beta chain variable domain of TCR clone 45 (TRBV2, TRBJ2-7)
CASSLTSGGYEQYF

SEQ ID NO: 91 - protein, 14 aa, Homo sapiens
  CDR3 for alpha chain variable domain of TCR clone 46 (TRAV38-1, TRAJ40)
CALRPTSGTYKYIF

SEQ ID NO: 92 - protein, 14 aa, Homo sapiens
  CDR3 for beta chain variable domain of TCR clone 46 (TRBV25-1, TRBJ1-1)
CASTHLGGNTEAFF

SEQ ID NO: 93 - protein, 16 aa, Homo sapiens
  CDR3 for alpha chain variable domain of TCR clone 47 (TRAV1-2, TRAJ10)
CAVRGVLTGGGNKLTF

SEQ ID NO: 94 - protein, 12 aa, Homo sapiens
  CDR3 for beta chain variable domain of TCR clone 47 (TRBV7-8, TRBJ2-7)
CASSLGDREQYF

SEQ ID NO: 95 - protein, 13 aa, Homo sapiens
  CDR3 for alpha chain variable domain of TCR clone 48 (TRAV13-2, TRAJ48)
CAEMDFGNEKLTF

SEQ ID NO: 96 - protein, 15 aa, Homo sapiens
  CDR3 for beta chain variable domain of TCR clone 48 (TRBV7-9, TRBJ1-6)
CASSSPGRGNSPLHF

SEQ ID NO: 97 - protein, 11 aa, Homo sapiens
  CDR3 for alpha chain variable domain of TCR clone 49 (TRAV1-2, TRAJ31)
CAVNNNARLMF

SEQ ID NO: 98 - protein, 15 aa, Homo sapiens
  CDR3 for beta chain variable domain of TCR clone 49 (TRBV28, TRBJ2-1)
CASSIIAGGRSEQFF

SEQ ID NO: 99 - protein, 13 aa, Homo sapiens
  CDR3 for alpha chain variable domain of TCR clone 50 (TRAV8-3, TRAJ28)
CAVGAVGSYQLTF

SEQ ID NO: 100 - protein, 15 aa, Homo sapiens
  CDR3 for beta chain variable domain of TCR clone 50 (TRBV7-9, TRBJ1-5)
CASSQGHQPNQPQHF

SEQ ID NO: 101 - protein, 15 aa, Homo sapiens
  CDR3 for alpha chain variable domain of TCR clone 51 (TRAV12-3, TRAJ6)
CAMSATTGGSYIPTF

SEQ ID NO: 102 - protein, 16 aa, Homo sapiens
  CDR3 for beta chain variable domain of TCR clone 51 (TRBV20-1, TRBJ1-2)
CSASMGQGVANYGYTF

SEQ ID NO: 103 - protein, 13 aa, Homo sapiens
  CDR3 for alpha chain variable domain of TCR clone 52 (TRAV8-3, TRAJ28)
CAVGAVGSYQLTF

SEQ ID NO: 104 - protein, 14 aa, Homo sapiens
  CDR3 for beta chain variable domain of TCR clone 52 (TRBV7-2, TRBJ2-7)
CASRSQGAAYEQYF

SEQ ID NO: 105 - protein, 11 aa, Homo sapiens
  CDR3 for alpha chain variable domain of TCR clone 53 (TRAV12-3, TRAJ43)
CAMSVSNDMRF

SEQ ID NO: 106 - protein, 13 aa, Homo sapiens
  CDR3 for beta chain variable domain of TCR clone 53 (TRBV20-1, TRBJ1-1)
CSAPLGGGTEAFF

SEQ ID NO: 107 - protein, 15 aa, Homo sapiens
  CDR3 for alpha chain variable domain of TCR clone 54 (TRAV26-1, TRAJ22)
CIVRVSFWFCKATDL

SEQ ID NO: 108 - protein, 13 aa, Homo sapiens
  CDR3 for beta chain variable domain of TCR clone 54 (TRBV7-9, TRBJ1-2)
CASSLKQNYGYTF

SEQ ID NO: 109 - protein, 13 aa, Homo sapiens
  CDR3 for alpha chain variable domain of TCR clone 55 (TRAV1-1, TRAJ9)
CAAKNTGGFKTIF

SEQ ID NO: 110 - protein, 14 aa, Homo sapiens
  CDR3 for beta chain variable domain of TCR clone 55 (TRBV20-1, TRBJ2-1)
CSAQIGGSANEQFF

SEQ ID NO: 111 - protein, 11 aa, Homo sapiens
  CDR3 for alpha chain variable domain of TCR clone 56 (TRAV2, TRAJ33)
CAVESNYQLIW

SEQ ID NO: 112 - protein, 15 aa, Homo sapiens
  CDR3 for beta chain variable domain of TCR clone 56 (TRBV19, TRBJ1-1)
CASTSGQIQNTEAFF

SEQ ID NO: 113 - protein, 15 aa, Homo sapiens
  CDR3 for alpha chain variable domain of TCR clone 57 (TRAV8-3, TRAJ27)
CAVGPSKTNAGKSTF

SEQ ID NO: 114 - protein, 15 aa, Homo sapiens
  CDR3 for beta chain variable domain of TCR clone 57 (TRBV7-2, TRBJ2-1)
CASSSGLAGGNEQFF

SEQ ID NO: 115 - protein, 15 aa, Homo sapiens
  CDR3 for alpha chain variable domain of TCR clone 58 (TRAV2, TRAJ9)
CAVEDRGTGGFKTIF

SEQ ID NO: 116 - protein, 16 aa, Homo sapiens
  CDR3 for beta chain variable domain of TCR clone 58 (TRBV24-1, TRBJ2-3)
CATSDPGTGATDTQYF

SEQ ID NO: 117 - protein, 14 aa, Homo sapiens
  CDR3 for alpha chain variable domain of TCR clone 59 (TRAV20, TRAJ56)
CAVQFGGANSKLTF

SEQ ID NO: 118 - protein, 14 aa, Homo sapiens
  CDR3 for beta chain variable domain of TCR clone 59 (TRBV20-1, TRBJ2-7)
CSAKRGRSSYEQYF

SEQ ID NO: 119 - protein, 15 aa, Homo sapiens
  CDR3 for alpha chain variable domain of TCR clone 60 (TRAV25, TRAJ52)
CAGRPGGTSYGKLTF

SEQ ID NO: 120 - protein, 17 aa, Homo sapiens
  CDR3 for beta chain variable domain of TCR clone 60 (TRBV7-8, TRBJ2-6)
CASSAGTGGAGANVLTF

SEQ ID NO: 121 - protein, 11 aa, Homo sapiens
  CDR3 for alpha chain variable domain of TCR clone 61 (TRAV17, TRAJ9)
CATTGGFKTIF

SEQ ID NO: 122 - protein, 14 aa, Homo sapiens
  CDR3 for beta chain variable domain of TCR clone 61 (TRBV7-9, TRBJ2-2)
CASSGLADTGELFF

SEQ ID NO: 123 - protein, 14 aa, Homo sapiens
  CDR3 for alpha chain variable domain of TCR clone 62 (TRAV26-1, TRAJ39)
CIVRGSRAGNMLTF

SEQ ID NO: 124 - protein, 15 aa, Homo sapiens
  CDR3 for beta chain variable domain of TCR clone 62 (TRBV7-9, TRBJ1-5)
CASSQGHQPNQPQHF

SEQ ID NO: 125 - protein, 14 aa, Homo sapiens
  CDR3 for alpha chain variable domain of TCR clone 63 (TRAV35, TRAJ33)
CAGSSQDSNYQLIW

SEQ ID NO: 126 - protein, 15 aa, Homo sapiens
  CDR3 for beta chain variable domain of TCR clone 63 (TRBV20-1, TRBJ2-7)
CSAESGTSGAYEQYF

SEQ ID NO: 127 - protein, 11 aa, Homo sapiens
  CDR3 for alpha chain variable domain of TCR clone 64 (TRAV21, TRAJ11)
CAVNGYSTLTF

SEQ ID NO: 128 - protein, 11 aa, Homo sapiens
  CDR3 for beta chain variable domain of TCR clone 64 (TRBV19, TRBJ1-1)
CASSIGSEAFF

SEQ ID NO: 129 - protein, 14 aa, Homo sapiens
  CDR3 for alpha chain variable domain of TCR clone 65 (TRAV8-3, TRAJ4)
CAVGAAGGYNKLIF

SEQ ID NO: 130 - protein, 15 aa, Homo sapiens
  CDR3 for beta chain variable domain of TCR clone 65 (TRBV6-5, TRBJ2-1)
CASSYDAGAGNEQFF

SEQ ID NO: 131 - protein, 12 aa, Homo sapiens
  CDR3 for alpha chain variable domain of TCR clone 66 (TRAV13-2, TRAJ23)
CAERHRGGKLIF

SEQ ID NO: 132 - protein, 16 aa, Homo sapiens
  CDR3 for beta chain variable domain of TCR clone 66 (TRBV20-1, TRBJ1-4)
CSAPGQGLLTNEKLFF

SEQ ID NO: 133 - protein, 15 aa, Homo sapiens
  CDR3 for alpha chain variable domain of TCR clone 67 (TRAV3, TRAJ20)
CAVRDIKLSDYKLSF

SEQ ID NO: 134 - protein, 15 aa, Homo sapiens
  CDR3 for beta chain variable domain of TCR clone 67 (TRBV7-9, TRBJ1-6)
CASSSPGRGNSPLHF

SEQ ID NO: 135 - protein, 14 aa, Homo sapiens
  CDR3 for alpha chain variable domain of TCR clone 68 (TRAV38-1, TRAJ45)
CAYYSGGGADGLTF

SEQ ID NO: 136 - protein, 20 aa, Homo sapiens
  CDR3 for beta chain variable domain of TCR clone 68 (TRBV28, TRBJ2-1)
CASTPIGRSPGLAGGNEQFF

SEQ ID NO: 137 - protein, 18 aa, Homo sapiens
  CDR3 for alpha chain variable domain of TCR clone 69 (TRAV13-1, TRAJ52)
CAASKRSAGGTSYGKLTF

SEQ ID NO: 138 - protein, 13 aa, Homo sapiens
  CDR3 for beta chain variable domain of TCR clone 69 (TRBV12-4, TRBJ1-2)
CASSLRQGKGYTF

SEQ ID NO: 139 - protein, 11 aa, Homo sapiens
  CDR3 for alpha chain variable domain of TCR clone 70 (TRAV1-2, TRAJ20)
CAVANDYKLSF

SEQ ID NO: 140 - protein, 18 aa, Homo sapiens
  CDR3 for beta chain variable domain of TCR clone 70 (TRBV20-1, TRBJ2-6)
CSAETTPTHGSGANVLTF

SEQ ID NO: 141 - protein, 16 aa, Homo sapiens
  CDR3 for alpha chain variable domain of TCR clone 71 (TRAV21, TRAJ37)
CAVRTAGSSNTGKLIF

SEQ ID NO: 142 - protein, 13 aa, Homo sapiens
  CDR3 for beta chain variable domain of TCR clone 71 (TRBV7-9, TRBJ2-5)
CASLPSGRETQYF

SEQ ID NO: 143 - protein, 17 aa, Homo sapiens
  CDR3 for alpha chain variable domain of TCR clone 72 (TRAV3, TRAJ6)
CAVRDGPRAGGSYIPTF

SEQ ID NO: 144 - protein, 20 aa, Homo sapiens
  CDR3 for beta chain variable domain of TCR clone 72 (TRBV28, TRBJ2-1)
CASTPIGRSPGLAGGNEQFF

SEQ ID NO: 145 - protein, 13 aa, Homo sapiens
  CDR3 for alpha chain variable domain of TCR clone 73 (TRAV13-1, TRAJ5)
CAASDTGRRALTF

SEQ ID NO: 146 - protein, 12 aa, Homo sapiens
  CDR3 for beta chain variable domain of TCR clone 73 (TRBV28, TRBJ2-3)
CASSLYRDTQYF

SEQ ID NO: 147 - protein, 11 aa, Homo sapiens
  CDR3 for alpha chain variable domain of TCR clone 74 (TRAV12-3, TRAJ27)
CAMANAGKSTF

SEQ ID NO: 148 - protein, 13 aa, Homo sapiens
  CDR3 for beta chain variable domain of TCR clone 74 (TRBV20-1, TRBJ1-1)
CSARVGGNTEAFF

SEQ ID NO: 149 - protein, 12 aa, Homo sapiens
  CDR3 for alpha chain variable domain of TCR clone 75 (TRAV21, TRAJ11)
CAATSGYSTLTF

SEQ ID NO: 150 - protein, 14 aa, Homo sapiens
  CDR3 for beta chain variable domain of TCR clone 75 (TRBV20-1, TRBJ2-7)
CSAPELAGVGEQYF

SEQ ID NO: 151 - protein, 12 aa, Homo sapiens
  CDR3 for alpha chain variable domain of TCR clone 76 (TRAV17, TRAJ12)
CATLRSSYKLIF

SEQ ID NO: 152 - protein, 16 aa, Homo sapiens
  CDR3 for beta chain variable domain of TCR clone 76 (TRBV28, TRBJ2-7)
CASSLFFETGGPEQYF

SEQ ID NO: 153 - protein, 16 aa, Homo sapiens
  CDR3 for alpha chain variable domain of TCR clone 77 (TRAV16, TRAJ4)
CALSRMFSGGYNKLIF

SEQ ID NO: 154 - protein, 16 aa, Homo sapiens
  CDR3 for beta chain variable domain of TCR clone 77 (TRBV24-1, TRBJ2-3)
CATSDPGTGATDTQYF

SEQ ID NO: 155 - protein, 13 aa, Homo sapiens
  CDR3 for alpha chain variable domain of TCR clone 78 (TRAV12-3, TRAJ33)
CAMSVNSNYQLIW

SEQ ID NO: 156 - protein, 13 aa, Homo sapiens
  CDR3 for beta chain variable domain of TCR clone 78 (TRBV7-2, TRBJ2-2)
CASSLAVTGELFF

SEQ ID NO: 157 - protein, 13 aa, Homo sapiens
  CDR3 for alpha chain variable domain of TCR clone 79 (TRAV27, TRAJ41)
CAGEGNSGYALNF

SEQ ID NO: 158 - protein, 14 aa, Homo sapiens
  CDR3 for beta chain variable domain of TCR clone 79 (TRBV7-2, TRBJ1-1)
CASSFLTGTTEAFF

SEQ ID NO: 159 - protein, 10 aa, Homo sapiens
  CDR3 for alpha chain variable domain of TCR clone 80 (TRAV16, TRAJ22)
SAMYLRQLTF

SEQ ID NO: 160 - protein, 15 aa, Homo sapiens
  CDR3 for beta chain variable domain of TCR clone 80 (TRBV7-9, TRBJ1-6)
CASSSPGRGNSPLHF

SEQ ID NO: 161 - protein, 10 aa, Homo sapiens
  CDR3 for alpha chain variable domain of TCR clone 81 (TRAV12-3, TRAJ49)
CAMNDDQFYF

SEQ ID NO: 162 - protein, 13 aa, Homo sapiens
  CDR3 for beta chain variable domain of TCR clone 81 (TRBV12-4, TRBJ1-1)
CASSPGTGFEAFF

SEQ ID NO: 163 - protein, 15 aa, Homo sapiens
  CDR3 for alpha chain variable domain of TCR clone 82 (TRAV21, TRAJ24)
CAARSSTDSWGKLQF

SEQ ID NO: 164 - protein, 13 aa, Homo sapiens
  CDR3 for beta chain variable domain of TCR clone 82 (TRBV11-2, TRBJ2-5)
CASSSTGEETQYF

SEQ ID NO: 165 - protein, 23 aa, Homo sapiens
  CDR3 for alpha chain variable domain of TCR clone 83 (TRAV26-1, TRAJ38)
CIADNAGNNHIQNPDPAVYQLRD

SEQ ID NO: 166 - protein, 13 aa, Homo sapiens
  CDR3 for beta chain variable domain of TCR clone 83 (TRBV20-1, TRBJ1-1)
CSARGGGNTEAFF

SEQ ID NO: 167 - protein, 11 aa, Homo sapiens
  CDR3 for alpha chain variable domain of TCR clone 84 (TRAV1-2, TRAJ40)
CAVPGTYKYIF

SEQ ID NO: 168 - protein, 16 aa, Homo sapiens
  CDR3 for beta chain variable domain of TCR clone 84 (TRBV29-1, TRBJ2-7)
CSVEVVGTSGSYEQYF

SEQ ID NO: 169 - protein, 17 aa, Homo sapiens
  CDR3 for alpha chain variable domain of TCR clone 85 (TRAV3, TRAJ42)
CAVRDRDYGGSQGNLIF

SEQ ID NO: 170 - protein, 15 aa, Homo sapiens
  CDR3 for beta chain variable domain of TCR clone 85 (TRBV6-6, TRBJ2-7)
CASSYSYGGSYEQYF

SEQ ID NO: 171 - protein, 15 aa, Homo sapiens
  CDR3 for alpha chain variable domain of TCR clone 86 (TRAV8-3, TRAJ11)
CAVGLLNSGYSTLTF

SEQ ID NO: 172 - protein, 16 aa, Homo sapiens
  CDR3 for beta chain variable domain of TCR clone 86 (TRBV7-9, TRBJ1-2)
CASSLGFSSGEDGYTF

SEQ ID NO: 173 - protein, 15 aa, Homo sapiens
  CDR3 for alpha chain variable domain of TCR clone 87 (TRAV3, TRAJ5)
CAVRDRKTGRRALTF

SEQ ID NO: 174 - protein, 15 aa, Homo sapiens
  CDR3 for beta chain variable domain of TCR clone 87 (TRBV7-8, TRBJ2-1)
CASSLADSLYNEQFF

SEQ ID NO: 175 - protein, 12 aa, Homo sapiens
  CDR3 for alpha chain variable domain of TCR clone 88 (TRAV16, TRAJ10)
CSRTGGGNKLTF

SEQ ID NO: 176 - protein, 15 aa, Homo sapiens
  CDR3 for beta chain variable domain of TCR clone 88 (TRBV6-3, TRBJ2-7)
CASSSPGTVFYEQYF

SEQ ID NO: 177 - protein, 13 aa, Homo sapiens
  CDR3 for alpha chain variable domain of TCR clone 89 (TRAV8-3, TRAJ36)
CAVGATGANNLFF

SEQ ID NO: 178 - protein, 15 aa, Homo sapiens
  CDR3 for beta chain variable domain of TCR clone 89 (TRBV7-2, TRBJ1-2)
CASSPRAGWNYGYTF

SEQ ID NO: 179 - protein, 11 aa, Homo sapiens
  CDR3 for alpha chain variable domain of TCR clone 90 (TRAV2, TRAJ33)
CAVDSNYQLIW

SEQ ID NO: 180 - protein, 15 aa, Homo sapiens
  CDR3 for beta chain variable domain of TCR clone 90 (TRBV19, TRBJ1-2)
CASSVGQVLNYGYTF

SEQ ID NO: 181 - protein, 14 aa, Homo sapiens
  CDR3 for alpha chain variable domain of TCR clone 91 (TRAV8-2, TRAJ4)
CVVSPSGGYNKLIF

SEQ ID NO: 182 - protein, 15 aa, Homo sapiens
  CDR3 for beta chain variable domain of TCR clone 91 (TRBV4-1, TRBJ1-4)
CASSDTGGTNEKLFF

SEQ ID NO: 183 - protein, 14 aa, Homo sapiens
  CDR3 for alpha chain variable domain of TCR clone 92 (TRAV17, TRAJ22)
CATSPSGSARQLTF

SEQ ID NO: 184 - protein, 15 aa, Homo sapiens
  CDR3 for beta chain variable domain of TCR clone 92 (TRBV4-1, TRBJ2-5)
CASSQWDLYQETQYF

SEQ ID NO: 185 - protein, 12 aa, Homo sapiens
  CDR3 for alpha chain variable domain of TCR clone 93 (TRAV1-1, TRAJ8)
CAGGTGFQKLVF

SEQ ID NO: 186 - protein, 15 aa, Homo sapiens
  CDR3 for beta chain variable domain of TCR clone 93 (TRBV7-9, TRBJ1-4)
CASSRTGGFNEKLFF

SEQ ID NO: 187 - protein, 13 aa, Homo sapiens
  CDR3 for alpha chain variable domain of TCR clone 94 (TRAV27, TRAJ3)
ASLRGSSASKIIF

SEQ ID NO: 188 - protein, 15 aa, Homo sapiens
  CDR3 for beta chain variable domain of TCR clone 94 (TRBV28, TRBJ1-3)
CASSMGWASGNTIYF

SEQ ID NO: 189 - protein, 13 aa, Homo sapiens
  CDR3 for alpha chain variable domain of TCR clone 95 (TRAV21, TRAJ20)
CAVGLRVDYKLSF

SEQ ID NO: 190 - protein, 13 aa, Homo sapiens
  CDR3 for beta chain variable domain of TCR clone 95 (TRBV6-1, TRBJ1-1)
CASSRQGNTEAFF

SEQ ID NO: 191 - protein, 17 aa, Homo sapiens
  CDR3 for alpha chain variable domain of TCR clone 96 (TRAV13-1, TRAJ31)
CAPRDRLMFGDGTQLVV

SEQ ID NO: 192 - protein, 12 aa, Homo sapiens
  CDR3 for beta chain variable domain of TCR clone 96 (TRBV7-9, TRBJ2-7)
CASSLEGYEQYF

SEQ ID NO: 193 - protein, 13 aa, Homo sapiens
  CDR3 for alpha chain variable domain of TCR clone 97 (TRAV17, TRAJ9)
CATDYTGGFKTIF

SEQ ID NO: 194 - protein, 16 aa, Homo sapiens
  CDR3 for beta chain variable domain of TCR clone 97 (TRBV7-7, TRBJ2-1)
CASSLASGTSYNEQFF

SEQ ID NO: 195 - protein, 15 aa, Homo sapiens
  CDR3 for alpha chain variable domain of TCR clone 98 (TRAV26-1, TRAJ44)
CIVRANTGTASKLTF

SEQ ID NO: 196 - protein, 16 aa, Homo sapiens
  CDR3 for beta chain variable domain of TCR clone 98 (TRBV7-7, TRBJ2-1)
CASSLASGTSYNEQFF

SEQ ID NO: 197 - protein, 14 aa, Homo sapiens
  CDR3 for alpha chain variable domain of TCR clone 99 (TRAV26-1, TRAJ34)
CIVRVAYNTDKLIF

SEQ ID NO: 198 - protein, 15 aa, Homo sapiens
  CDR3 for beta chain variable domain of TCR clone 99 (TRBV20-1, TRBJ2-7)
CSARVPAAYFYEQYF

SEQ ID NO: 199 - protein, 15 aa, Homo sapiens
  CDR3 for alpha chain variable domain of TCR clone 100 (TRAV3, TRAJ22)
CAVRDRGGSARQLTF

SEQ ID NO: 200 - protein, 16 aa, Homo sapiens
  CDR3 for beta chain variable domain of TCR clone 100 (TRBV5-4, TRBJ2-3)
CASQQPGAGGADTQYF

SEQ ID NO: 201 - protein, 12 aa, Homo sapiens
  CDR3 for alpha chain variable domain of TCR clone 101 (TRAV17, TRAJ57)
CATDGGSEKLVF

SEQ ID NO: 202 - protein, 13 aa, Homo sapiens
  CDR3 for beta chain variable domain of TCR clone 101 (TRBV7-9, TRBJ2-7)
CASSFAGAYEQYF

SEQ ID NO: 203 - protein, 10 aa, Homo sapiens
  CDR3 for alpha chain variable domain of TCR clone 102 (TRAV30, TRAJ48)
CGIGNEKLTF

SEQ ID NO: 204 - protein, 14 aa, Homo sapiens
  CDR3 for beta chain variable domain of TCR clone 102 (TRBV7-6, TRBJ2-3)
CASSVAGGTDTQYF

SEQ ID NO: 205 - protein, 15 aa, Homo sapiens
  CDR3 for alpha chain variable domain of TCR clone 103 (TRAV35, TRAJ40)
CAGQLGTSGTYKYIF

SEQ ID NO: 206 - protein, 14 aa, Homo sapiens
  CDR3 for beta chain variable domain of TCR clone 103 (TRBV7-3, TRBJ2-1)
CASSLAGGTNEQFF

SEQ ID NO: 207 - protein, 12 aa, Homo sapiens
  CDR3 for alpha chain variable domain of TCR clone 104 (TRAV2, TRAJ31)
CAVEDNNARLMF

SEQ ID NO: 208 - protein, 16 aa, Homo sapiens
  CDR3 for beta chain variable domain of TCR clone 104 (TRBV10-3, TRBJ2-1)
CAISGVGDGGGGEQFF

SEQ ID NO: 209 - protein, 11 aa, Homo sapiens
  CDR3 for alpha chain variable domain of TCR clone 105 (TRAV17, TRAJ9)
CGFTGGFKTIF

SEQ ID NO: 210 - protein, 14 aa, Homo sapiens
  CDR3 for beta chain variable domain of TCR clone 105 (TRBV7-9, TRBJ2-2)
CASSLVQDTGELFF

SEQ ID NO: 211 - protein, 14 aa, Homo sapiens
  CDR3 for alpha chain variable domain of TCR clone 106 (TRAV13-1, TRAJ44)
CAAKATGTASKLTF

SEQ ID NO: 212 - protein, 17 aa, Homo sapiens
  CDR3 for beta chain variable domain of TCR clone 106 (TRBV7-3, TRBJ2-3)
CASSLMKRMRGADTQYF

SEQ ID NO: 213 - protein, 15 aa, Homo sapiens
  CDR3 for alpha chain variable domain of TCR clone 107 (TRAV2, TRAJ15)
CAVEDRGQAGTALIF

SEQ ID NO: 214 - protein, 13 aa, Homo sapiens
  CDR3 for beta chain variable domain of TCR clone 107 (TRBV10-2, TRBJ2-7)
CASGASGGYEQYF

SEQ ID NO: 215 - protein, 16 aa, Homo sapiens
  CDR3 for alpha chain variable domain of TCR clone 108 (TRAV4, TRAJ22)
CLVGDLYSGSARQLTF

SEQ ID NO: 216 - protein, 16 aa, Homo sapiens
  CDR3 for beta chain variable domain of TCR clone 108 (TRBV7-9, TRBJ2-1)
CASSDVAGGSYNEQFF

SEQ ID NO: 217 - protein, 17 aa, Homo sapiens
  CDR3 for alpha chain variable domain of TCR clone 109 (TRAV8-6, TRAJ58)
CAVSSWVGETSGSRLTF

SEQ ID NO: 218 - protein, 14 aa, Homo sapiens
  CDR3 for beta chain variable domain of TCR clone 109 (TRBV4-2, TRBJ2-1)
CASGLDRAYNEQFF

SEQ ID NO: 219 - protein, 13 aa, Homo sapiens
  CDR3 for alpha chain variable domain of TCR clone 110 (TRAV26-2, TRAJ43)
CILRAVNNNDMRF

SEQ ID NO: 220 - protein, 15 aa, Homo sapiens
  CDR3 for beta chain variable domain of TCR clone 110 (TRBV7-2, TRBJ2-1)
CASTHGTGIYNEQFF

SEQ ID NO: 221 - protein, 13 aa, Homo sapiens
  CDR3 for alpha chain variable domain of TCR clone 111 (TRAV3, TRAJ21)
CAVREPDFNKFYF

SEQ ID NO: 222 - protein, 13 aa, Homo sapiens
  CDR3 for beta chain variable domain of TCR clone 111 (TRBV9, TRBJ2-1)
CASSPSGGNEQFF

SEQ ID NO: 223 - protein, 14 aa, Homo sapiens
  CDR3 for alpha chain variable domain of TCR clone 112 (TRAV12-3, TRAJ10)
SHLPLTGGGNKLTF

SEQ ID NO: 224 - protein, 14 aa, Homo sapiens
  CDR3 for beta chain variable domain of TCR clone 112 (TRBV6-1, TRBJ1-3)
CASVQGGGGNTIYF

SEQ ID NO: 225 - protein, 20 aa, Homo sapiens
  CDR3 for alpha chain variable domain of TCR clone 113 (TRAV26-1, TRAJ42)
CCVLLHRQTYYGGSQGNLIF

SEQ ID NO: 226 - protein, 16 aa, Homo sapiens
  CDR3 for beta chain variable domain of TCR clone 113 (TRBV7-3, TRBJ2-2)
CASSLKRGTLSGELFF

SEQ ID NO: 227 - protein, 18 aa, Homo sapiens
  CDR3 for alpha chain variable domain of TCR clone 114 (TRAV13-1, TRAJ52)
CAAKNPNAGGTSYGKLTF

SEQ ID NO: 228 - protein, 15 aa, Homo sapiens
  CDR3 for beta chain variable domain of TCR clone 114 (TRBV6-1, TRBJ2-3)
CASSERGGITDTQYF

SEQ ID NO: 229 - protein, 16 aa, Homo sapiens
  CDR3 for alpha chain variable domain of TCR clone 115 (TRAV27, TRAJ13)
CAGAKSDSGGYQKVTF

SEQ ID NO: 230 - protein, 15 aa, Homo sapiens
  CDR3 for beta chain variable domain of TCR clone 115 (TRBV29-1, TRBJ2-1)
CSVGRHALFYNEQFF

SEQ ID NO: 231 - protein, 12 aa, Homo sapiens
  CDR3 for alpha chain variable domain of TCR clone 116 (TRAV36/DV7, TRAJ54)
CAVVRGAQKLVF

SEQ ID NO: 232 - protein, 14 aa, Homo sapiens
  CDR3 for beta chain variable domain of TCR clone 116 (TRBV7-3, TRBJ1-1)
CASSLKGGNTEAFF

SEQ ID NO: 233 - protein, 18 aa, Homo sapiens
  CDR3 for alpha chain variable domain of TCR clone 117 (TRAV12-3, TRAJ52)
CAMSVGGAGGTSYGKLTF

SEQ ID NO: 234 - protein, 15 aa, Homo sapiens
  CDR3 for beta chain variable domain of TCR clone 117 (TRBV27, TRBJ1-6)
CASSFDRGLGSPLHF

SEQ ID NO: 235 - protein, 13 aa, Homo sapiens
  CDR3 for alpha chain variable domain of TCR clone 118 (TRAV17, TRAJ9)
CATDYTGGFKTIF

SEQ ID NO: 236 - protein, 14 aa, Homo sapiens
  CDR3 for beta chain variable domain of TCR clone 118 (TRBV19, TRBJ2-5)
CASSMTGQQETQYF

SEQ ID NO: 237 - protein, 16 aa, Homo sapiens
  CDR3 for alpha chain variable domain of TCR clone 119 (TRAV8-3, TRAJ13)
CAVGAYPSGGYQKVTF

SEQ ID NO: 238 - protein, 15 aa, Homo sapiens
  CDR3 for beta chain variable domain of TCR clone 119 (TRBV19, TRBJ1-5)
CASSIVWADNQPQHF

SEQ ID NO: 239 - protein, 14 aa, Homo sapiens
  CDR3 for alpha chain variable domain of TCR clone 120 (TRAV20, TRAJ42)
CAVQAGGSQGNLIF

SEQ ID NO: 240 - protein, 14 aa, Homo sapiens
  CDR3 for beta chain variable domain of TCR clone 120 (TRBV28, TRBJ1-2)
CASRIQGANYGYTF

SEQ ID NO: 241 - protein, 12 aa, Homo sapiens
  CDR3 for alpha chain variable domain of TCR clone 121 (TRAV8-3, TRAJ26)
CAGDNYGQNFVF

SEQ ID NO: 242 - protein, 15 aa, Homo sapiens
  CDR3 for beta chain variable domain of TCR clone 121 (TRBV9, TRBJ2-1)
CASSLAGSSYNEQFF

SEQ ID NO: 243 - protein, 14 aa, Homo sapiens
  CDR3 for alpha chain variable domain of TCR clone 122 (TRAV1-1, TRAJ27)
CAVIYNTNAGKSTF

SEQ ID NO: 244 - protein, 15 aa, Homo sapiens
  CDR3 for beta chain variable domain of TCR clone 122 (TRBV7-2, TRBJ2-1)
CASSSGLAGGNEQFF

SEQ ID NO: 245 - protein, 15 aa, Homo sapiens
  CDR3 for alpha chain variable domain of TCR clone 123 (TRAV12-1, TRAJ44)
CVADLPTGTASKLTF

SEQ ID NO: 246 - protein, 13 aa, Homo sapiens
  CDR3 for beta chain variable domain of TCR clone 123 (TRBV6-5, TRBJ2-5)
CASSPQGGETQYF

SEQ ID NO: 247 - protein, 15 aa, Homo sapiens
  CDR3 for alpha chain variable domain of TCR clone 124 (TRAV12-2, TRAJ43)
CAFDMRFGAGTRLTV

SEQ ID NO: 248 - protein, 18 aa, Homo sapiens
  CDR3 for beta chain variable domain of TCR clone 124 (TRBV20-1, TRBJ2-3)
CSASGLAGGPGTTDTQYF

SEQ ID NO: 249 - protein, 14 aa, Homo sapiens
  CDR3 for alpha chain variable domain of TCR clone 125 (TRAV29/DV5, TRAJ36)
CAARRKTGANNLFF

SEQ ID NO: 250 - protein, 14 aa, Homo sapiens
  CDR3 for beta chain variable domain of TCR clone 125 (TRBV12-5, TRBJ2-5)
CASGSRTHQETQYF

SEQ ID NO: 251 - protein, 12 aa, Homo sapiens
  CDR3 for alpha chain variable domain of TCR clone 126 (TRAV17, TRAJ4)
CATDGGYNKLIF

SEQ ID NO: 252 - protein, 13 aa, Homo sapiens
  CDR3 for beta chain variable domain of TCR clone 126 (TRBV29-1, TRBJ2-2)
CSTTGVNTGELFF

SEQ ID NO: 253 - protein, 15 aa, Homo sapiens
  CDR3 for alpha chain variable domain of TCR clone 127 (TRAV17, TRAJ57)
CATGPSQGGSEKLVF

SEQ ID NO: 254 - protein, 14 aa, Homo sapiens
  CDR3 for beta chain variable domain of TCR clone 127 (TRBV12-5, TRBJ2-5)
CASGSRTHQETQYF

SEQ ID NO: 255 - protein, 12 aa, Homo sapiens
  CDR3 for alpha chain variable domain of TCR clone 128 (TRAV12-1, TRAJ40)
CVFYSGTYKYIF

SEQ ID NO: 256 - protein, 18 aa, Homo sapiens
  CDR3 for beta chain variable domain of TCR clone 128 (TRBV12-4, TRBJ2-2)
CASSLVAGTRGRTGELFF

SEQ ID NO: 257 - protein, 14 aa, Homo sapiens
  CDR3 for alpha chain variable domain of TCR clone 129 (TRAV12-2, TRAJ5)
CAVNRSTGRRALTF

SEQ ID NO: 258 - protein, 12 aa, Homo sapiens
  CDR3 for beta chain variable domain of TCR clone 129 (TRBV19, TRBJ1-5)
CASSIAQQPQHF

SEQ ID NO: 259 - protein, 18 aa, Homo sapiens
  CDR3 for alpha chain variable domain of TCR clone 130 (TRAV21, TRAJ52)
CAVRPSPAGGTSYGKLTF

SEQ ID NO: 260 - protein, 13 aa, Homo sapiens
  CDR3 for beta chain variable domain of TCR clone 130 (TRBV7-3, TRBJ1-1)
CASSQDWGAEAFF

SEQ ID NO: 261 - protein, 14 aa, Homo sapiens
  CDR3 for alpha chain variable domain of TCR clone 131 (TRAV8-3, TRAJ9)
CAVVYNTGGFKTIF

SEQ ID NO: 262 - protein, 14 aa, Homo sapiens
  CDR3 for beta chain variable domain of TCR clone 131 (TRBV7-3, TRBJ2-2)
CASSSGGYTGELFF

SEQ ID NO: 263 - protein, 14 aa, Homo sapiens
  CDR3 for alpha chain variable domain of TCR clone 132 (TRAV8-4, TRAJ13)
CAVTLSGGYQKVTF

SEQ ID NO: 264 - protein, 14 aa, Homo sapiens
  CDR3 for beta chain variable domain of TCR clone 132 (TRBV7-2, TRBJ1-2)
CASSQTGSTYGYTF

SEQ ID NO: 265 - protein, 13 aa, Homo sapiens
  CDR3 for alpha chain variable domain of TCR clone 133 (TRAV38-1, TRAJ42)
CARWGGSQGNLIF

SEQ ID NO: 266 - protein, 17 aa, Homo sapiens
  CDR3 for beta chain variable domain of TCR clone 133 (TRBV20-1, TRBJ2-1)
CSARDPLAGVWDNEQFF

SEQ ID NO: 267 - protein, 13 aa, Homo sapiens
  CDR3 for alpha chain variable domain of TCR clone 134 (TRAV12-2, TRAJ20)
CAVYPSNDYKLSF

SEQ ID NO: 268 - protein, 15 aa, Homo sapiens
  CDR3 for beta chain variable domain of TCR clone 134 (TRBV27, TRBJ2-5)
CASSLYPRGGETQYF

SEQ ID NO: 269 - protein, 14 aa, Homo sapiens
  CDR3 for alpha chain variable domain of TCR clone 135 (TRAV12-3, TRAJ9)
CAMSPNTGGFKTIF

SEQ ID NO: 270 - protein, 12 aa, Homo sapiens
  CDR3 for beta chain variable domain of TCR clone 135 (TRBV19, TRBJ1-5)
CASSIAQQPQHF

SEQ ID NO: 271 - protein, 15 aa, Homo sapiens
  CDR3 for alpha chain variable domain of TCR clone 136 (TRAV17, TRAJ23)
CATDAEDNQGGKLIF

SEQ ID NO: 272 - protein, 12 aa, Homo sapiens
  CDR3 for beta chain variable domain of TCR clone 136 (TRBV2, TRBJ2-1)
CAKREGYNEQFF

SEQ ID NO: 273 - protein, 14 aa, Homo sapiens
  CDR3 for alpha chain variable domain of TCR clone 137 (TRAV38-1, TRAJ45)
CASHSGGGADGLTF

SEQ ID NO: 274 - protein, 13 aa, Homo sapiens
  CDR3 for beta chain variable domain of TCR clone 137 (TRBV10-3, TRBJ1-2)
CAISERDSYGYTF

SEQ ID NO: 275 - protein, 16 aa, Homo sapiens
  CDR3 for alpha chain variable domain of TCR clone 138 (TRAV26-1, TRAJ53)
CIVRVAMGGSNYKLTF

SEQ ID NO: 276 - protein, 12 aa, Homo sapiens
  CDR3 for beta chain variable domain of TCR clone 138 (TRBV7-9, TRBJ1-5)
CASSPQGQPQHF

SEQ ID NO: 277 - protein, 16 aa, Homo sapiens
  CDR3 for alpha chain variable domain of TCR clone 139 (TRAV3, TRAJ37)
CAVRGKGSGNTGKLIF

SEQ ID NO: 278 - protein, 13 aa, Homo sapiens
  CDR3 for beta chain variable domain of TCR clone 139 (TRBV14, TRBJ2-7)
CASSQDRRYEQYF

SEQ ID NO: 279 - protein, 11 aa, Homo sapiens
  CDR3 for alpha chain variable domain of TCR clone 140 (TRAV2, TRAJ21)
CAVFNFNKFYF

SEQ ID NO: 280 - protein, 14 aa, Homo sapiens
  CDR3 for beta chain variable domain of TCR clone 140 (TRBV15, TRBJ2-3)
CATRSGTSTDTQYF

SEQ ID NO: 281 - protein, 15 aa, Homo sapiens
  CDR3 for alpha chain variable domain of TCR clone 141 (TRAV21, TRAJ53)
CATLNSGGSNYKLTF

SEQ ID NO: 282 - protein, 16 aa, Homo sapiens
  CDR3 for beta chain variable domain of TCR clone 141 (TRBV9, TRBJ2-1)
CASSVGGGGNYNEQFF

SEQ ID NO: 283 - protein, 14 aa, Homo sapiens
  CDR3 for alpha chain variable domain of TCR clone 142 (TRAV26-1, TRAJ45)
CIEVTGGGADGLTF

SEQ ID NO: 284 - protein, 13 aa, Homo sapiens
  CDR3 for beta chain variable domain of TCR clone 142 (TRBV7-6, TRBJ1-2)
CASSLVADYGYTF

SEQ ID NO: 285 - protein, 14 aa, Homo sapiens
  CDR3 for alpha chain variable domain of TCR clone 143 (TRAV38-1, TRAJ29)
CAFITPSGNTPLVF

SEQ ID NO: 286 - protein, 14 aa, Homo sapiens
  CDR3 for beta chain variable domain of TCR clone 143 (TRBV18, TRBJ2-7)
CASSPRGGAYEQYF

SEQ ID NO: 287 - protein, 18 aa, Homo sapiens
  CDR3 for alpha chain variable domain of TCR clone 144 (TRAV12-3, TRAJ52)
CAMSRTNAGGTSYGKLTF

SEQ ID NO: 288 - protein, 17 aa, Homo sapiens
  CDR3 for beta chain variable domain of TCR clone 144 (TRBV7-3, TRBJ2-3)
CASSLMKRMRGADTQYF

SEQ ID NO: 289 - protein, 17 aa, Homo sapiens
  CDR3 for alpha chain variable domain of TCR clone 145 (TRAV23/DV6, TRAJ57)
CAASSTLSQGGSEKLVF

SEQ ID NO: 290 - protein, 14 aa, Homo sapiens
  CDR3 for beta chain variable domain of TCR clone 145 (TRBV25-1, TRBJ1-1)
CASTHLGGNTEAFF

SEQ ID NO: 291 - protein, 14 aa, Homo sapiens
  CDR3 for alpha chain variable domain of TCR clone 146 (TRAV17, TRAJ16)
CATADFSDGQKLLF

SEQ ID NO: 292 - protein, 15 aa, Homo sapiens
  CDR3 for beta chain variable domain of TCR clone 146 (TRBV18, TRBJ2-1)
CASSPPSASYNEQFF

SEQ ID NO: 293 - protein, 13 aa, Homo sapiens
  CDR3 for alpha chain variable domain of TCR clone 147 (TRAV35, TRAJ42)
CAGFPGSQGNLIF

SEQ ID NO: 294 - protein, 13 aa, Homo sapiens
  CDR3 for beta chain variable domain of TCR clone 147 (TRBV29-1, TRBJ2-1)
CSVEGGRVNEQFF

SEQ ID NO: 295 - protein, 14 aa, Homo sapiens
  CDR3 for alpha chain variable domain of TCR clone 148 (TRAV8-4, TRAJ9)
CAVRINTGGFKTIF

SEQ ID NO: 296 - protein, 15 aa, Homo sapiens
  CDR3 for beta chain variable domain of TCR clone 148 (TRBV10-2, TRBJ2-6)
CASSEQGTGANVLTF

SEQ ID NO: 297 - protein, 14 aa, Homo sapiens
  CDR3 for alpha chain variable domain of TCR clone 149 (TRAV13-1, TRAJ40)
CAASMTSGTYKYIF

SEQ ID NO: 298 - protein, 15 aa, Homo sapiens
  CDR3 for beta chain variable domain of TCR clone 149 (TRBV7-3, TRBJ2-1)
CASSPTGGGEVEQFF

SEQ ID NO: 299 - protein, 15 aa, Homo sapiens
  CDR3 for alpha chain variable domain of TCR clone 150 (TRAV4, TRAJ39)
CLVGPNNNAGNMLTF

SEQ ID NO: 300 - protein, 13 aa, Homo sapiens
  CDR3 for beta chain variable domain of TCR clone 150 (TRBV11-2, TRBJ2-5)
CASSSTGEETQYF

SEQ ID NO: 301 - protein, 13 aa, Homo sapiens
  CDR3 for alpha chain variable domain of TCR clone 151 (TRAV27, TRAJ49)
CAPRPYTGNQFYF

SEQ ID NO: 302 - protein, 16 aa, Homo sapiens
  CDR3 for beta chain variable domain of TCR clone 151 (TRBV4-1, TRBJ1-2)
CASSQDAGQVLYGYTF

SEQ ID NO: 303 - protein, 11 aa, Homo sapiens
  CDR3 for alpha chain variable domain of TCR clone 152 (TRAV2, TRAJ33)
CAVDSNYQLIW

SEQ ID NO: 304 - protein, 14 aa, Homo sapiens
  CDR3 for beta chain variable domain of TCR clone 152 (TRBV11-2, TRBJ2-3)
CASSRLARTDTQYF

SEQ ID NO: 305 - protein, 14 aa, Homo sapiens
  CDR3 for alpha chain variable domain of TCR clone 153 (TRAV16, TRAJ33)
CALSAMDSNYQLIW

SEQ ID NO: 306 - protein, 12 aa, Homo sapiens
  CDR3 for beta chain variable domain of TCR clone 153 (TRBV5-1, TRBJ1-2)
CASSQDTYGYTF

SEQ ID NO: 307 - protein, 13 aa, Homo sapiens
  CDR3 for alpha chain variable domain of TCR clone 154 (TRAV13-2, TRAJ53)
CAENMGSNYKLTF

SEQ ID NO: 308 - protein, 13 aa, Homo sapiens
  CDR3 for beta chain variable domain of TCR clone 154 (TRBV4-1, TRBJ2-2)
CASSQENTGELFF

SEQ ID NO: 309 - protein, 17 aa, Homo sapiens
  CDR3 for alpha chain variable domain of TCR clone 155 (TRAV13-1, TRAJ52)
CAASSGAGGTSYGKLTF

SEQ ID NO: 310 - protein, 15 aa, Homo sapiens
  CDR3 for beta chain variable domain of TCR clone 155 (TRBV2, TRBJ2-1)
CASSELAGSYNEQFF

SEQ ID NO: 311 - protein, 16 aa, Homo sapiens
  CDR3 for alpha chain variable domain of TCR clone 156 (TRAV3, TRAJ21)
CAVRDIERGNFNKFYF

SEQ ID NO: 312 - protein, 13 aa, Homo sapiens
  CDR3 for beta chain variable domain of TCR clone 156 (TRBV27, TRBJ2-7)
CASSLTTGYEQYF

SEQ ID NO: 313 - protein, 17 aa, Homo sapiens
  CDR3 for alpha chain variable domain of TCR clone 157 (TRAV26-1, TRAJ53)
CIVRVDDSGGSNYKLTF

SEQ ID NO: 314 - protein, 15 aa, Homo sapiens
  CDR3 for beta chain variable domain of TCR clone 157 (TRBV20-1, TRBJ2-7)
CSARVPAAYFYEQYF

SEQ ID NO: 315 - protein, 13 aa, Homo sapiens
  CDR3 for alpha chain variable domain of TCR clone 158 (TRAV2, TRAJ15)
CAVASQAGTALIF

SEQ ID NO: 316 - protein, 16 aa, Homo sapiens
  CDR3 for beta chain variable domain of TCR clone 158 (TRBV5-1, TRBJ1-1)
CASSSGGNSLNTEAFF

SEQ ID NO: 317 - protein, 12 aa, Homo sapiens
  CDR3 for alpha chain variable domain of TCR clone 159 (TRAV13-1, TRAJ21)
CAAKEGFNKFYF

SEQ ID NO: 318 - protein, 14 aa, Homo sapiens
  CDR3 for beta chain variable domain of TCR clone 159 (TRBV5-4, TRBJ1-1)
CASSLDSRRDEAFF

SEQ ID NO: 319 - protein, 11 aa, Homo sapiens
  CDR3 for alpha chain variable domain of TCR clone 160 (TRAV21, TRAJ34)
CAHYNTDKLIF

SEQ ID NO: 320 - protein, 13 aa, Homo sapiens
  CDR3 for beta chain variable domain of TCR clone 160 (TRBV7-6, TRBJ1-2)
CASSLVADYGYTF

SEQ ID NO: 321 - protein, 18 aa, Homo sapiens
  CDR3 for alpha chain variable domain of TCR clone 161 (TRAV29/DV5, TRAJ52)
CAAGFRGAGGTSYGKLTF

SEQ ID NO: 322 - protein, 16 aa, Homo sapiens
  CDR3 for beta chain variable domain of TCR clone 161 (TRBV7-3, TRBJ2-2)
CASSLKRGTLSGELFF

SEQ ID NO: 323 - protein, 12 aa, Homo sapiens
  CDR3 for alpha chain variable domain of TCR clone 162 (TRAV12-3, TRAJ40)
CAMSSGTYKYIF

SEQ ID NO: 324 - protein, 15 aa, Homo sapiens
  CDR3 for beta chain variable domain of TCR clone 162 (TRBV7-3, TRBJ2-2)
CASSETGQGTGELFF

SEQ ID NO: 325 - protein, 15 aa, Homo sapiens
  CDR3 for alpha chain variable domain of TCR clone 163 (TRAV3, TRAJ4)
CAVRDGTGGYNKLIF

SEQ ID NO: 326 - protein, 16 aa, Homo sapiens
  CDR3 for beta chain variable domain of TCR clone 163 (TRBV27, TRBJ2-2)
CASSSSGVSNTGELFF

SEQ ID NO: 327 - protein, 20 aa, Homo sapiens
  CDR3 for alpha chain variable domain of TCR clone 164 (TRAV12-1, TRAJ42)
SSVIQPPTSVKGGSQGNLIF

SEQ ID NO: 328 - protein, 18 aa, Homo sapiens
  CDR3 for beta chain variable domain of TCR clone 164 (TRBV11-2, TRBJ2-3)
CASSLGGASRGAPNTQYF

SEQ ID NO: 329 - protein, 15 aa, Homo sapiens
  CDR3 for alpha chain variable domain of TCR clone 165 (TRAV8-2, TRAJ40)
CVVLGTTSGTYKYIF

SEQ ID NO: 330 - protein, 16 aa, Homo sapiens
  CDR3 for beta chain variable domain of TCR clone 165 (TRBV7-3, TRBJ2-1)
CASSLEGYRSYNEQFF

SEQ ID NO: 331 - protein, 14 aa, Homo sapiens
  CDR3 for alpha chain variable domain of TCR clone 166 (TRAV3, TRAJ9)
CAVRLNTGGFKTIF

SEQ ID NO: 332 - protein, 15 aa, Homo sapiens
  CDR3 for beta chain variable domain of TCR clone 166 (TRBV7-2, TRBJ2-1)
CASSLASGRVNEQFF

SEQ ID NO: 333 - protein, 16 aa, Homo sapiens
  CDR3 for alpha chain variable domain of TCR clone 167 (TRAV20, TRAJ22)
CAVQASSSGSARQLTF

SEQ ID NO: 334 - protein, 13 aa, Homo sapiens
  CDR3 for beta chain variable domain of TCR clone 167 (TRBV7-2, TRBJ2-5)
CASSQTSVETQYF

SEQ ID NO: 335 - protein, 15 aa, Homo sapiens
  CDR3 for alpha chain variable domain of TCR clone 168 (TRAV23/DV6, TRAJ18)
CAARYRGSTLGRLYF

SEQ ID NO: 336 - protein, 13 aa, Homo sapiens
  CDR3 for beta chain variable domain of TCR clone 168 (TRBV7-2, TRBJ2-7)
CASSSPSGSEQYF

SEQ ID NO: 337 - protein, 12 aa, Homo sapiens
  CDR3 for alpha chain variable domain of TCR clone 169 (TRAV17, TRAJ39)
CATGAAGNMLTF

SEQ ID NO: 338 - protein, 14 aa, Homo sapiens
  CDR3 for beta chain variable domain of TCR clone 169 (TRBV7-9, TRBJ1-2)
CASSRQGANYGYTF

SEQ ID NO: 339 - protein, 17 aa, Homo sapiens
  CDR3 for alpha chain variable domain of TCR clone 170 (TRAV12-3, TRAJ6)
CAMSARGGAGGSYIPTF

SEQ ID NO: 340 - protein, 12 aa, Homo sapiens
  CDR3 for beta chain variable domain of TCR clone 170 (TRBV12-4, TRBJ2-3)
CASSTLPDTQYF

SEQ ID NO: 341 - protein, 14 aa, Homo sapiens
  CDR3 for alpha chain variable domain of TCR clone 171 (TRAV12-1, TRAJ12)
CVVTRMDSSYKLIF

SEQ ID NO: 342 - protein, 13 aa, Homo sapiens
  CDR3 for beta chain variable domain of TCR clone 171 (TRBV20-1, TRBJ1-1)
CSARGGGNTEAFF

SEQ ID NO: 343 - protein, 13 aa, Homo sapiens
  CDR3 for alpha chain variable domain of TCR clone 172 (TRAV13-1, TRAJ21)
CAASIYNFNKFYF

SEQ ID NO: 344 - protein, 13 aa, Homo sapiens
  CDR3 for beta chain variable domain of TCR clone 172 (TRBV27, TRBJ1-4)
CASSLMGDEKLFF

SEQ ID NO: 345 - protein, 12 aa, Homo sapiens
  CDR3 for alpha chain variable domain of TCR clone 173 (TRAV27, TRAJ35)
CAGADFGNVLHC

SEQ ID NO: 346 - protein, 16 aa, Homo sapiens
  CDR3 for beta chain variable domain of TCR clone 173 (TRBV6-1, TRBJ2-1)
CASILRQGSSYNEQFF

SEQ ID NO: 347 - protein, 15 aa, Homo sapiens
  CDR3 for alpha chain variable domain of TCR clone 174 (TRAV38-1, TRAJ37)
CAFIFGSGNTGKLIF

SEQ ID NO: 348 - protein, 12 aa, Homo sapiens
  CDR3 for beta chain variable domain of TCR clone 174 (TRBV7-9, TRBJ2-7)
CASSLEGYEQYF

SEQ ID NO: 349 - protein, 15 aa, Homo sapiens
  CDR3 for alpha chain variable domain of TCR clone 175 (TRAV12-3, TRAJ27)
CAMRAYNTNAGKSTF

SEQ ID NO: 350 - protein, 13 aa, Homo sapiens
  CDR3 for beta chain variable domain of TCR clone 175 (TRBV11-2, TRBJ2-5)
CASSRGPSETQYF

SEQ ID NO: 351 - protein, 11 aa, Homo sapiens
  CDR3 for alpha chain variable domain of TCR clone 176 (TRAV12-1, TRAJ30)
CVVNGQDKIIF

SEQ ID NO: 352 - protein, 12 aa, Homo sapiens
  CDR3 for beta chain variable domain of TCR clone 176 (TRBV27, TRBJ2-2)
CASKLFTGELFF

SEQ ID NO: 353 - protein, 13 aa, Homo sapiens
  CDR3 for alpha chain variable domain of TCR clone 177 (TRAV3, TRAJ15)
CAVRDQAGTALIF

SEQ ID NO: 354 - protein, 15 aa, Homo sapiens
  CDR3 for beta chain variable domain of TCR clone 177 (TRBV11-1, TRBJ2-7)
CASSLNYGASYEQYF

SEQ ID NO: 355 - protein, 17 aa, Homo sapiens
  CDR3 for alpha chain variable domain of TCR clone 178 (TRAV26-2, TRAJ42)
CILRDVGYGGSQGNLIF

SEQ ID NO: 356 - protein, 16 aa, Homo sapiens
  CDR3 for beta chain variable domain of TCR clone 178 (TRBV12-4, TRBJ2-7)
CASSLIGGTGTYEQYF

SEQ ID NO: 357 - protein, 15 aa, Homo sapiens
  CDR3 for alpha chain variable domain of TCR clone 179 (TRAV25, TRAJ53)
CPTSNSGGSNYKLTF

SEQ ID NO: 358 - protein, 14 aa, Homo sapiens
  CDR3 for beta chain variable domain of TCR clone 179 (TRBV11-2, TRBJ2-3)
CASSRLARTDTQYF

SEQ ID NO: 359 - protein, 14 aa, Homo sapiens
  CDR3 for alpha chain variable domain of TCR clone 180 (TRAV1-2, TRAJ6)
CAVSLSGGSYIPTF

SEQ ID NO: 360 - protein, 15 aa, Homo sapiens
  CDR3 for beta chain variable domain of TCR clone 180 (TRBV28, TRBJ2-7)
CASSPGGRGFYEQYF

SEQ ID NO: 361 - protein, 18 aa, Homo sapiens
  CDR3 for alpha chain variable domain of TCR clone 181 (TRAV26-1, TRAJ23)
CIVRVGLEVWNQGGKLIF

SEQ ID NO: 362 - protein, 16 aa, Homo sapiens
  CDR3 for beta chain variable domain of TCR clone 181 (TRBV12-4, TRBJ2-5)
CASSFFVRGRQETQYF

SEQ ID NO: 363 - protein, 16 aa, Homo sapiens
  CDR3 for alpha chain variable domain of TCR clone 182 (TRAV26-1, TRAJ37)
CIVRGDGSGNTGKLIF

SEQ ID NO: 364 - protein, 17 aa, Homo sapiens
  CDR3 for beta chain variable domain of TCR clone 182 (TRBV4-1, TRBJ2-7)
CASSRDPLGVRGGEQYF

SEQ ID NO: 365 - protein, 13 aa, Homo sapiens
  CDR3 for alpha chain variable domain of TCR clone 183 (TRAV17, TRAJ26)
CATVDNYGQNFVF

SEQ ID NO: 366 - protein, 16 aa, Homo sapiens
  CDR3 for beta chain variable domain of TCR clone 183 (TRBV2, TRBJ2-1)
CASSVGGSLSYNEQFF

SEQ ID NO: 367 - protein, 10 aa, Homo sapiens
  CDR3 for alpha chain variable domain of TCR clone 184 (TRAV26-1, TRAJ40)
CIAGTYKYIF

SEQ ID NO: 368 - protein, 15 aa, Homo sapiens
  CDR3 for beta chain variable domain of TCR clone 184 (TRBV19, TRBJ2-1)
CASSSPGVPLDEQFF

SEQ ID NO: 369 - protein, 12 aa, Homo sapiens
  CDR3 for alpha chain variable domain of TCR clone 185 (TRAV30, TRAJ43)
CGTEERGNDMRF

SEQ ID NO: 370 - protein, 13 aa, Homo sapiens
  CDR3 for beta chain variable domain of TCR clone 185 (TRBV27, TRBJ2-7)
CASSFSQGYEQYF

SEQ ID NO: 371 - protein, 12 aa, Homo sapiens
  CDR3 for alpha chain variable domain of TCR clone 186 (TRAV35, TRAJ39)
LAPNNAGNMLTF

SEQ ID NO: 372 - protein, 16 aa, Homo sapiens
  CDR3 for beta chain variable domain of TCR clone 186 (TRBV2, TRBJ2-3)
CASSTSVEGVTDTQYF

SEQ ID NO: 373 - protein, 12 aa, Homo sapiens
  CDR3 for alpha chain variable domain of TCR clone 187 (TRAV13-1, TRAJ27)
CAAHTNAGKSTF

SEQ ID NO: 374 - protein, 14 aa, Homo sapiens
  CDR3 for beta chain variable domain of TCR clone 187 (TRBV19, TRBJ2-2)
CASSGQGIAGELFF

SEQ ID NO: 375 - protein, 17 aa, Homo sapiens
  CDR3 for alpha chain variable domain of TCR clone 188 (TRAV4, TRAJ42)
CLVGVLNYGGSQGNLIF

SEQ ID NO: 376 - protein, 12 aa, Homo sapiens
  CDR3 for beta chain variable domain of TCR clone 188 (TRBV20-1, TRBJ2-1)
CSAQYTYNEQFF

SEQ ID NO: 377 - protein, 16 aa, Homo sapiens
  CDR3 for alpha chain variable domain of TCR clone 189 (TRAV3, TRAJ37)
CAVRPHGSGNTGKLIF

SEQ ID NO: 378 - protein, 16 aa, Homo sapiens
  CDR3 for beta chain variable domain of TCR clone 189 (TRBV9, TRBJ1-2)
CASSVEEKVSPYGYTF

SEQ ID NO: 379 - protein, 12 aa, Homo sapiens
  CDR3 for alpha chain variable domain of TCR clone 190 (TRAV2, TRAJ10)
CASTGGGNKLTF

SEQ ID NO: 380 - protein, 14 aa, Homo sapiens
  CDR3 for beta chain variable domain of TCR clone 190 (TRBV7-2, TRBJ2-2)
CASRGQGAAGELFF

SEQ ID NO: 381 - protein, 16 aa, Homo sapiens
  CDR3 for alpha chain variable domain of TCR clone 191 (TRAV16, TRAJ52)
CALSAAGGTSYGKLTF

SEQ ID NO: 382 - protein, 12 aa, Homo sapiens
  CDR3 for beta chain variable domain of TCR clone 191 (TRBV12-4, TRBJ1-3)
CASSFSGNTIYF

SEQ ID NO: 383 - protein, 15 aa, Homo sapiens
  CDR3 for alpha chain variable domain of TCR clone 192 (TRAV3, TRAJ47)
CAVRDIGEYGNKLVF

SEQ ID NO: 384 - protein, 14 aa, Homo sapiens
  CDR3 for beta chain variable domain of TCR clone 192 (TRBV13, TRBJ2-5)
CASSLERVGETQYF

SEQ ID NO: 385 - protein, 11 aa, Homo sapiens
  CDR3 for alpha chain variable domain of TCR clone 193 (TRAV12-1, TRAJ34)
CVVNKGRELIF

SEQ ID NO: 386 - protein, 12 aa, Homo sapiens
  CDR3 for beta chain variable domain of TCR clone 193 (TRBV2, TRBJ2-1)
CAYGPPGNEQFF

SEQ ID NO: 387 - protein, 15 aa, Homo sapiens
  CDR3 for alpha chain variable domain of TCR clone 194 (TRAV38-1, TRAJ37)
CAFIHGSGNTGKLIF

SEQ ID NO: 388 - protein, 12 aa, Homo sapiens
  CDR3 for beta chain variable domain of TCR clone 194 (TRBV7-9, TRBJ2-7)
CASSFGSYEQYF

SEQ ID NO: 389 - protein, 14 aa, Homo sapiens
  CDR3 for alpha chain variable domain of TCR clone 195 (TRAV12-2, TRAJ44)
CAVNPAGTASKLTF

SEQ ID NO: 390 - protein, 13 aa, Homo sapiens
  CDR3 for beta chain variable domain of TCR clone 195 (TRBV20-1, TRBJ1-6)
CSAPLGVGSPLHF

SEQ ID NO: 391 - protein, 12 aa, Homo sapiens
  CDR3 for alpha chain variable domain of TCR clone 196 (TRAV13-1, TRAJ15)
CAASQAGTALIF

SEQ ID NO: 392 - protein, 14 aa, Homo sapiens
  CDR3 for beta chain variable domain of TCR clone 196 (TRBV19, TRBJ2-2)
CASSTLHRSGELFF

SEQ ID NO: 393 - protein, 15 aa, Homo sapiens
  CDR3 for alpha chain variable domain of TCR clone 197 (TRAV35, TRAJ50)
CAGQLRKTSYDKVIF

SEQ ID NO: 394 - protein, 12 aa, Homo sapiens
  CDR3 for beta chain variable domain of TCR clone 197 (TRBV5-1, TRBJ2-5)
CASSLGLETQYF

SEQ ID NO: 395 - protein, 13 aa, Homo sapiens
  CDR3 for alpha chain variable domain of TCR clone 198 (TRAV2, TRAJ21)
CAVEDLNFNKFYF

SEQ ID NO: 396 - protein, 15 aa, Homo sapiens
  CDR3 for beta chain variable domain of TCR clone 198 (TRBV28, TRBJ2-5)
CASSPGQGSIETQYF

SEQ ID NO: 397 - protein, 10 aa, Homo sapiens
  CDR3 for alpha chain variable domain of TCR clone 199 (TRAV8-4, TRAJ43)
CAVSADDMRF

SEQ ID NO: 398 - protein, 15 aa, Homo sapiens
  CDR3 for beta chain variable domain of TCR clone 199 (TRBV5-1, TRBJ2-3)
CASSVTSGSTDTQYF

SEQ ID NO: 399 - protein, 13 aa, Homo sapiens
  CDR3 for alpha chain variable domain of TCR clone 200 (TRAV8-3, TRAJ48)
CAVVPFGNEKLTF

SEQ ID NO: 400 - protein, 15 aa, Homo sapiens
  CDR3 for beta chain variable domain of TCR clone 200 (TRBV11-2, TRBJ2-1)
CASSSPSTRYNEQFF

SEQ ID NO: 401 - protein, 14 aa, Homo sapiens
  CDR3 for alpha chain variable domain of TCR clone 201 (TRAV13-2, TRAJ43)
CAEIPTYNNNDMRF

SEQ ID NO: 402 - protein, 15 aa, Homo sapiens
  CDR3 for beta chain variable domain of TCR clone 201 (TRBV7-9, TRBJ2-2)
CASGPLDTFPGELFF

SEQ ID NO: 403 - protein, 13 aa, Homo sapiens
  CDR3 for alpha chain variable domain of TCR clone 202 (TRAV12-3, TRAJ7)
CAMSASGNNRLAF

SEQ ID NO: 404 - protein, 14 aa, Homo sapiens
  CDR3 for beta chain variable domain of TCR clone 202 (TRBV13, TRBJ2-5)
CASSLGPRGETQYF

SEQ ID NO: 405 - protein, 13 aa, Homo sapiens
  CDR3 for alpha chain variable domain of TCR clone 203 (TRAV12-3, TRAJ9)
CAMRNTGGFKTIF

SEQ ID NO: 406 - protein, 14 aa, Homo sapiens
  CDR3 for beta chain variable domain of TCR clone 203 (TRBV11-2, TRBJ2-7)
CASSSTGEGYEQYF

SEQ ID NO: 407 - protein, 12 aa, Homo sapiens
  CDR3 for alpha chain variable domain of TCR clone 204 (TRAV3, TRAJ43)
CAVRDPNNDMRF

SEQ ID NO: 408 - protein, 15 aa, Homo sapiens
  CDR3 for beta chain variable domain of TCR clone 204 (TRBV27, TRBJ1-5)
CASSLGTGFDQPQHF

SEQ ID NO: 409 - protein, 15 aa, Homo sapiens
  CDR3 for alpha chain variable domain of TCR clone 205 (TRAV3, TRAJ3)
CAVRDRDSSASKIIF

SEQ ID NO: 410 - protein, 18 aa, Homo sapiens
  CDR3 for beta chain variable domain of TCR clone 205 (TRBV25-1, TRBJ1-2)
CASSGLQNGQGLIFGYTF

SEQ ID NO: 411 - protein, 15 aa, Homo sapiens
  CDR3 for alpha chain variable domain of TCR clone 206 (TRAV12-1, TRAJ44)
CVVFVNTGTASKLTF

SEQ ID NO: 412 - protein, 17 aa, Homo sapiens
  CDR3 for beta chain variable domain of TCR clone 206 (TRBV7-8, TRBJ2-6)
CASSAGTGGAGANVLTF

SEQ ID NO: 413 - protein, 13 aa, Homo sapiens
  CDR3 for alpha chain variable domain of TCR clone 207 (TRAV35, TRAJ36)
CAGPRIGANNLFF

SEQ ID NO: 414 - protein, 15 aa, Homo sapiens
  CDR3 for beta chain variable domain of TCR clone 207 (TRBV28, TRBJ2-5)
CASSPPWSYQETQYF

SEQ ID NO: 415 - protein, 12 aa, Homo sapiens
  CDR3 for alpha chain variable domain of TCR clone 208 (TRAV13-1, TRAJ49)
CAASPMGNQFYF

SEQ ID NO: 416 - protein, 13 aa, Homo sapiens
  CDR3 for beta chain variable domain of TCR clone 208 (TRBV20-1, TRBJ2-2)
CSASAAGTGELFF

SEQ ID NO: 417 - protein, 12 aa, Homo sapiens
  CDR3 for alpha chain variable domain of TCR clone 209 (TRAV21, TRAJ31)
CAVWGNNARLMF

SEQ ID NO: 418 - protein, 16 aa, Homo sapiens
  CDR3 for beta chain variable domain of TCR clone 209 (TRBV27, TRBJ2-5)
CASSYGPGGQKETQYF

SEQ ID NO: 419 - protein, 13 aa, Homo sapiens
  CDR3 for alpha chain variable domain of TCR clone 210 (TRAV12-2, TRAJ39)
CAVNNNAGNMLTF

SEQ ID NO: 420 - protein, 13 aa, Homo sapiens
  CDR3 for beta chain variable domain of TCR clone 210 (TRBV2, TRBJ1-5)
CATAGPGNQPQHF

SEQ ID NO: 421 - protein, 15 aa, Homo sapiens
  CDR3 for alpha chain variable domain of TCR clone 211 (TRAV12-3, TRAJ49)
CAMAVTPNTGNQFYF

SEQ ID NO: 422 - protein, 18 aa, Homo sapiens
  CDR3 for beta chain variable domain of TCR clone 211 (TRBV4-1, TRBJ1-5)
CASSQDPRGQGLNQPQHF

SEQ ID NO: 423 - protein, 15 aa, Homo sapiens
  CDR3 for alpha chain variable domain of TCR clone 212 (TRAV34, TRAJ38)
CGADFTPGNNRKLIW

SEQ ID NO: 424 - protein, 16 aa, Homo sapiens
  CDR3 for beta chain variable domain of TCR clone 212 (TRBV12-5, TRBJ2-5)
CASGPRTSGNQETQYF

SEQ ID NO: 425 - protein, 15 aa, Homo sapiens
  CDR3 for alpha chain variable domain of TCR clone 213 (TRAV26-1, TRAJ40)
CIVRVTTSGTYKYIF

SEQ ID NO: 426 - protein, 12 aa, Homo sapiens
  CDR3 for beta chain variable domain of TCR clone 213 (TRBV7-9, TRBJ1-4)
CASSTDREKLFF

SEQ ID NO: 427 - protein, 16 aa, Homo sapiens
  CDR3 for alpha chain variable domain of TCR clone 214 (TRAV12-3, TRAJ53)
CAMSPGSGGSNYKLTF

SEQ ID NO: 428 - protein, 16 aa, Homo sapiens
  CDR3 for beta chain variable domain of TCR clone 214 (TRBV4-2, TRBJ1-1)
CASSQAGFGMNTEAFF

SEQ ID NO: 429 - protein, 16 aa, Homo sapiens
  CDR3 for alpha chain variable domain of TCR clone 215 (TRAV3, TRAJ18)
CAVRDGRGSTLGRLYF

SEQ ID NO: 430 - protein, 15 aa, Homo sapiens
  CDR3 for beta chain variable domain of TCR clone 215 (TRBV7-9, TRBJ1-6)
CASSSPGRGNSPLHF

SEQ ID NO: 431 - protein, 12 aa, Homo sapiens
  CDR3 for alpha chain variable domain of TCR clone 216 (TRAV35, TRAJ49)
CAGWNTGNQFYF

SEQ ID NO: 432 - protein, 16 aa, Homo sapiens
  CDR3 for beta chain variable domain of TCR clone 216 (TRBV5-1, TRBJ2-2)
CASSLWDTTNTGELFF

SEQ ID NO: 433 - protein, 17 aa, Homo sapiens
  CDR3 for alpha chain variable domain of TCR clone 217 (TRAV13-1, TRAJ52)
CAAGRNAGGTSYGKLTF

SEQ ID NO: 434 - protein, 13 aa, Homo sapiens
  CDR3 for beta chain variable domain of TCR clone 217 (TRBV7-2, TRBJ1-1)
CASNLKGAKVAFF

SEQ ID NO: 435 - protein, 21 aa, Homo sapiens
  CDR3 for alpha chain variable domain of TCR clone 218 (TRAV1-1, TRAJ6)
CLLLLRCERLERTGGSYIPTF

SEQ ID NO: 436 - protein, 13 aa, Homo sapiens
  CDR3 for beta chain variable domain of TCR clone 218 (TRBV10-2, TRBJ2-7)
CASGASGGYEQYF

SEQ ID NO: 437 - protein, 13 aa, Homo sapiens
  CDR3 for alpha chain variable domain of TCR clone 219 (TRAV12-3, TRAJ7)
CAMTPYGNNRLAF

SEQ ID NO: 438 - protein, 16 aa, Homo sapiens
  CDR3 for beta chain variable domain of TCR clone 219 (TRBV20-1, TRBJ1-4)
CSARPYGGELNEKLFF

SEQ ID NO: 439 - protein, 14 aa, Homo sapiens
  CDR3 for alpha chain variable domain of TCR clone 220 (TRAV17, TRAJ39)
CATDPVRAGNMLTF

SEQ ID NO: 440 - protein, 15 aa, Homo sapiens
  CDR3 for beta chain variable domain of TCR clone 220 (TRBV13, TRBJ1-5)
CASSFGQGGVQPQHF

SEQ ID NO: 441 - protein, 13 aa, Homo sapiens
  CDR3 for alpha chain variable domain of TCR clone 221 (TRAV22, TRAJ29)
CAVGGSGNTPLVF

SEQ ID NO: 442 - protein, 13 aa, Homo sapiens
  CDR3 for beta chain variable domain of TCR clone 221 (TRBV4-2, TRBJ1-1)
CASSQAGNTEAFF

SEQ ID NO: 443 - protein, 14 aa, Homo sapiens
  CDR3 for alpha chain variable domain of TCR clone 222 (TRAV13-1, TRAJ44)
CAAKATGTASKLTF

SEQ ID NO: 444 - protein, 17 aa, Homo sapiens
  CDR3 for beta chain variable domain of TCR clone 222 (TRBV7-3, TRBJ2-3)
RASSLMKRMRGADTQYF

SEQ ID NO: 445 - protein, 18 aa, Homo sapiens
  CDR3 for alpha chain variable domain of TCR clone 223 (TRAV9-2, TRAJ52)
CALSRHNAGGTSYGKLTF

SEQ ID NO: 446 - protein, 13 aa, Homo sapiens
  CDR3 for beta chain variable domain of TCR clone 223 (TRBV7-9, TRBJ1-2)
CASSLKQNYGYTF

SEQ ID NO: 447 - protein, 15 aa, Homo sapiens
  CDR3 for alpha chain variable domain of TCR clone 224 (TRAV12-2, TRAJ53)
CAVNGGGGSNYKLTF

SEQ ID NO: 448 - protein, 13 aa, Homo sapiens
  CDR3 for beta chain variable domain of TCR clone 224 (TRBV3-1, TRBJ1-1)
CASSPGVITEAFF

SEQ ID NO: 449 - protein, 13 aa, Homo sapiens
  CDR3 for alpha chain variable domain of TCR clone 225 (TRAV8-6, TRAJ49)
CAVITNTGNQFYF

SEQ ID NO: 450 - protein, 14 aa, Homo sapiens
  CDR3 for beta chain variable domain of TCR clone 225 (TRBV5-1, TRBJ2-7)
CASSRGESLYEQYF

SEQ ID NO: 451 - protein, 13 aa, Homo sapiens
  CDR3 for alpha chain variable domain of TCR clone 226 (TRAV8-3, TRAJ44)
CAVVPGTASKLTF

SEQ ID NO: 452 - protein, 14 aa, Homo sapiens
  CDR3 for beta chain variable domain of TCR clone 226 (TRBV11-2, TRBJ2-3)
CASSRLARTDTQYF

SEQ ID NO: 453 - protein, 12 aa, Homo sapiens
  CDR3 for alpha chain variable domain of TCR clone 227 (TRAV1-1, TRAJ39)
CAVPVVGNMLTF

SEQ ID NO: 454 - protein, 15 aa, Homo sapiens
  CDR3 for beta chain variable domain of TCR clone 227 (TRBV19, TRBJ1-6)
CASSTQGAVGSPLHF

SEQ ID NO: 455 - protein, 14 aa, Homo sapiens
  CDR3 for alpha chain variable domain of TCR clone 228 (TRAV29/DV5, TRAJ45)
CAASFRGGADGLTF

SEQ ID NO: 456 - protein, 11 aa, Homo sapiens
  CDR3 for beta chain variable domain of TCR clone 228 (TRBV11-2, TRBJ2-2)
CASSLPGELFF

SEQ ID NO: 457 - protein, 15 aa, Homo sapiens
  CDR3 for alpha chain variable domain of TCR clone 229 (TRAV12-1, TRAJ42)
CVVTRDGGSQGNLIF

SEQ ID NO: 458 - protein, 14 aa, Homo sapiens
  CDR3 for beta chain variable domain of TCR clone 229 (TRBV11-2, TRBJ2-3)
CASSLGGGANTQYF

SEQ ID NO: 459 - protein, 13 aa, Homo sapiens
  CDR3 for alpha chain variable domain of TCR clone 230 (TRAV1-2, TRAJ9)
CAVLNTGGFKTIF

SEQ ID NO: 460 - protein, 14 aa, Homo sapiens
  CDR3 for beta chain variable domain of TCR clone 230 (TRBV20-1, TRBJ2-3)
CSARGGTSTDTQYF

SEQ ID NO: 461 - protein, 14 aa, Homo sapiens
  CDR3 for alpha chain variable domain of TCR clone 231 (TRAV35, TRAJ13)
CAGSPSGGYQKVTF

SEQ ID NO: 462 - protein, 13 aa, Homo sapiens
  CDR3 for beta chain variable domain of TCR clone 231 (TRBV29-1, TRBJ1-1)
CSVGDSRNTEAFF

SEQ ID NO: 463 - protein, 12 aa, Homo sapiens
  CDR3 for alpha chain variable domain of TCR clone 232 (TRAV4, TRAJ26)
CLVGDYGQNFVF

SEQ ID NO: 464 - protein, 16 aa, Homo sapiens
  CDR3 for beta chain variable domain of TCR clone 232 (TRBV7-2, TRBJ1-2)
CASSSNQDRRGHGYTF

SEQ ID NO: 465 - protein, 13 aa, Homo sapiens
  CDR3 for alpha chain variable domain of TCR clone 233 (TRAV35, TRAJ42)
CAGFPGSQGNLIF

SEQ ID NO: 466 - protein, 14 aa, Homo sapiens
  CDR3 for beta chain variable domain of TCR clone 233 (TRBV19, TRBJ2-1)
CASPTFVLSGEQFF

SEQ ID NO: 467 - protein, 14 aa, Homo sapiens
  CDR3 for alpha chain variable domain of TCR clone 234 (TRAV17, TRAJ34)
CATDSLEGTDKLIF

SEQ ID NO: 468 - protein, 13 aa, Homo sapiens
  CDR3 for beta chain variable domain of TCR clone 234 (TRBV11-2, TRBJ2-7)
CASSGTRPYEQYF

SEQ ID NO: 469 - protein, 14 aa, Homo sapiens
  CDR3 for alpha chain variable domain of TCR clone 235 (TRAV12-2, TRAJ53)
CAVKGGGSNYKLTF

SEQ ID NO: 470 - protein, 14 aa, Homo sapiens
  CDR3 for beta chain variable domain of TCR clone 235 (TRBV7-7, TRBJ2-2)
CATRQDSDTGELFF

SEQ ID NO: 471 - protein, 12 aa, Homo sapiens
  CDR3 for alpha chain variable domain of TCR clone 236 (TRAV3, TRAJ31)
CAVRDGNARLMF

SEQ ID NO: 472 - protein, 18 aa, Homo sapiens
  CDR3 for beta chain variable domain of TCR clone 236 (TRBV7-2, TRBJ2-3)
CASSLKREGSGITDTQYF

SEQ ID NO: 473 - protein, 13 aa, Homo sapiens
  CDR3 for alpha chain variable domain of TCR clone 237 (TRAV8-6, TRAJ21)
CAVSPSSLNKFYF

SEQ ID NO: 474 - protein, 14 aa, Homo sapiens
  CDR3 for beta chain variable domain of TCR clone 237 (TRBV7-9, TRBJ2-5)
CASSLDTAQETQYF

SEQ ID NO: 475 - protein, 19 aa, Homo sapiens
  CDR3 for alpha chain variable domain of TCR clone 238 (TRAV3, TRAJ6)
CAVRDRNPSRSGGSYIPTF

SEQ ID NO: 476 - protein, 15 aa, Homo sapiens
  CDR3 for beta chain variable domain of TCR clone 238 (TRBV18, TRBJ2-7)
CASSPTFMDSYEQYF

SEQ ID NO: 477 - protein, 13 aa, Homo sapiens
  CDR3 for alpha chain variable domain of TCR clone 239 (TRAV21, TRAJ27)
CAARPGNAGKSTF

SEQ ID NO: 478 - protein, 14 aa, Homo sapiens
  CDR3 for beta chain variable domain of TCR clone 239 (TRBV11-2, TRBJ2-7)
CASSLGAGAYEQYF

SEQ ID NO: 479 - protein, 13 aa, Homo sapiens
  CDR3 for alpha chain variable domain of TCR clone 240 (TRAV27, TRAJ57)
CRSAQGGSEKLVF

SEQ ID NO: 480 - protein, 11 aa, Homo sapiens
  CDR3 for beta chain variable domain of TCR clone 240 (TRBV11-2, TRBJ1-1)
CASSINTEAFF

SEQ ID NO: 481 - protein, 19 aa, Homo sapiens
  CDR3 for alpha chain variable domain of TCR clone 241 (TRAV26-1, TRAJ52)
CIVRAHRNAGGTSYGKLTF

SEQ ID NO: 482 - protein, 15 aa, Homo sapiens
  CDR3 for beta chain variable domain of TCR clone 241 (TRBV29-1, TRBJ2-1)
CSGRDRKSSYNEQFF

SEQ ID NO: 483 - protein, 13 aa, Homo sapiens
  CDR3 for alpha chain variable domain of TCR clone 242 (TRAV13-1, TRAJ5)
CAARVTGRRALTF

SEQ ID NO: 484 - protein, 15 aa, Homo sapiens
  CDR3 for beta chain variable domain of TCR clone 242 (TRBV7-9, TRBJ2-7)
CASSPGGGLTYEQYF

SEQ ID NO: 485 - protein, 13 aa, Homo sapiens
  CDR3 for alpha chain variable domain of TCR clone 243 (TRAV12-1, TRAJ16)
CVVNGPDGQKLLF

SEQ ID NO: 486 - protein, 13 aa, Homo sapiens
  CDR3 for beta chain variable domain of TCR clone 243 (TRBV2, TRBJ1-1)
CARNPTGGFHAFF

SEQ ID NO: 487 - protein, 14 aa, Homo sapiens
  CDR3 for alpha chain variable domain of TCR clone 244 (TRAV12-3, TRAJ22)
CAMSLFGSARQLTF

SEQ ID NO: 488 - protein, 11 aa, Homo sapiens
  CDR3 for beta chain variable domain of TCR clone 244 (TRBV12-4, TRBJ2-2)
CASSSAGELFF

SEQ ID NO: 489 - protein, 14 aa, Homo sapiens
  CDR3 for alpha chain variable domain of TCR clone 245 (TRAV1-2, TRAJ16)
CAVNRFSDGQKLLF

SEQ ID NO: 490 - protein, 13 aa, Homo sapiens
  CDR3 for beta chain variable domain of TCR clone 245 (TRBV7-9, TRBJ1-2)
CASSLKQNYGYTF

SEQ ID NO: 491 - protein, 14 aa, Homo sapiens
  CDR3 for alpha chain variable domain of TCR clone 246 (TRAV13-1, TRAJ9)
CAASALTGGFKTIF

SEQ ID NO: 492 - protein, 13 aa, Homo sapiens
  CDR3 for beta chain variable domain of TCR clone 246 (TRBV20-1, TRBJ1-1)
CSAGTVGNTEAFF

SEQ ID NO: 493 - protein, 11 aa, Homo sapiens
  CDR3 for alpha chain variable domain of TCR clone 247 (TRAV2, TRAJ23)
CAVETRGKLIF

SEQ ID NO: 494 - protein, 14 aa, Homo sapiens
  CDR3 for beta chain variable domain of TCR clone 247 (TRBV2, TRBJ2-3)
CASSEGQNTDTQYF

SEQ ID NO: 495 - protein, 12 aa, Homo sapiens
  CDR3 for alpha chain variable domain of TCR clone 248 (TRAV3, TRAJ26)
CAVRDYGQNFVF

SEQ ID NO: 496 - protein, 16 aa, Homo sapiens
  CDR3 for beta chain variable domain of TCR clone 248 (TRBV11-2, TRBJ1-2)
CASSPSGREANYGYTF

SEQ ID NO: 497 - protein, 11 aa, Homo sapiens
  CDR3 for alpha chain variable domain of TCR clone 249 (TRAV4, TRAJ23)
CLVAPGGKLIF

SEQ ID NO: 498 - protein, 15 aa, Homo sapiens
  CDR3 for beta chain variable domain of TCR clone 249 (TRBV7-2, TRBJ2-1)
CASSFQADEYNEQFF

SEQ ID NO: 499 - protein, 11 aa, Homo sapiens
  CDR3 for alpha chain variable domain of TCR clone 250 (TRAV13-1, TRAJ6)
CATLGSYIPTF

SEQ ID NO: 500 - protein, 12 aa, Homo sapiens
  CDR3 for beta chain variable domain of TCR clone 250 (TRBV11-2, TRBJ2-1)
CASSPGNNEQFF

SEQ ID NO: 501 - protein, 16 aa, Homo sapiens
  CDR3 for alpha chain variable domain of TCR clone 251 (TRAV4, TRAJ9)
CLVGDPNRPGGFKTIF

SEQ ID NO: 502 - protein, 16 aa, Homo sapiens
  CDR3 for beta chain variable domain of TCR clone 251 (TRBV28, TRBJ1-4)
CASSPPYRGRSEKLFF

SEQ ID NO: 503 - protein, 14 aa, Homo sapiens
  CDR3 for alpha chain variable domain of TCR clone 252 (TRAV17, TRAJ16)
CATADFSDGQKLLF

SEQ ID NO: 504 - protein, 12 aa, Homo sapiens
  CDR3 for beta chain variable domain of TCR clone 252 (TRBV24-1, TRBJ1-1)
CATLYPDTEAFF

SEQ ID NO: 505 - protein, 12 aa, Homo sapiens
  CDR3 for alpha chain variable domain of TCR clone 253 (TRAV26-2, TRAJ21)
CILKGNFNKFYF

SEQ ID NO: 506 - protein, 14 aa, Homo sapiens
  CDR3 for beta chain variable domain of TCR clone 253 (TRBV7-9, TRBJ1-1)
CASTPLQSYTEAFF

SEQ ID NO: 507 - protein, 10 aa, Homo sapiens
  CDR3 for alpha chain variable domain of TCR clone 254 (TRAV1-2, TRAJ31)
CVSEDARLMF

SEQ ID NO: 508 - protein, 14 aa, Homo sapiens
  CDR3 for beta chain variable domain of TCR clone 254 (TRBV19, TRBJ2-1)
CASPTFVLSGEQFF

SEQ ID NO: 509 - protein, 13 aa, Homo sapiens
  CDR3 for alpha chain variable domain of TCR clone 255 (TRAV12-1, TRAJ40)
CVVPTSGTYKYIF

SEQ ID NO: 510 - protein, 18 aa, Homo sapiens
  CDR3 for beta chain variable domain of TCR clone 255 (TRBV7-6, TRBJ2-1)
CASSPRTSGMSSYNEQFF

SEQ ID NO: 511 - protein, 17 aa, Homo sapiens
  CDR3 for alpha chain variable domain of TCR clone 256 (TRAV3, TRAJ38)
CAVRDCLNAGNNRKLIW

SEQ ID NO: 512 - protein, 14 aa, Homo sapiens
  CDR3 for beta chain variable domain of TCR clone 256 (TRBV5-5, TRBJ1-5)
CASSGQGVDQPQHF

SEQ ID NO: 513 - protein, 15 aa, Homo sapiens
  CDR3 for alpha chain variable domain of TCR clone 257 (TRAV12-2, TRAJ53)
CAVNGGGGSNYKLTF

SEQ ID NO: 514 - protein, 17 aa, Homo sapiens
  CDR3 for beta chain variable domain of TCR clone 257 (TRBV7-3, TRBJ2-3)
CASSLMKRMRGADTQYF

SEQ ID NO: 515 - protein, 14 aa, Homo sapiens
  CDR3 for alpha chain variable domain of TCR clone 258 (TRAV17, TRAJ31)
CATVLRNNNARLMF

SEQ ID NO: 516 - protein, 14 aa, Homo sapiens
  CDR3 for beta chain variable domain of TCR clone 258 (TRBV12-4, TRBJ2-5)
CASSLWQKQETQYF

SEQ ID NO: 517 - protein, 10 aa, Homo sapiens
  CDR3 for alpha chain variable domain of TCR clone 259 (TRAV21, TRAJ31)
CAVDNARLMF

SEQ ID NO: 518 - protein, 13 aa, Homo sapiens
  CDR3 for beta chain variable domain of TCR clone 259 (TRBV4-1, TRBJ1-1)
CASSRKMNTEAFF

SEQ ID NO: 519 - protein, 15 aa, Homo sapiens
  CDR3 for alpha chain variable domain of TCR clone 260 (TRAV17, TRAJ13)
CATDAGSGGYQKVTF

SEQ ID NO: 520 - protein, 17 aa, Homo sapiens
  CDR3 for beta chain variable domain of TCR clone 260 (TRBV11-2, TRBJ2-1)
CASSLYPPGVEYNEQFF

SEQ ID NO: 521 - protein, 16 aa, Homo sapiens
  CDR3 for alpha chain variable domain of TCR clone 261 (TRAV30, TRAJ24)
CGTEIVDADSWGKFQF

SEQ ID NO: 522 - protein, 15 aa, Homo sapiens
  CDR3 for beta chain variable domain of TCR clone 261 (TRBV7-9, TRBJ1-4)
CASSARTGGNEKLFF

SEQ ID NO: 523 - protein, 12 aa, Homo sapiens
  CDR3 for alpha chain variable domain of TCR clone 262 (TRAV3, TRAJ39)
CAVIEWSNMLTF

SEQ ID NO: 524 - protein, 14 aa, Homo sapiens
  CDR3 for beta chain variable domain of TCR clone 262 (TRBV7-8, TRBJ2-3)
CASSFPDGQDTQYF

SEQ ID NO: 525 - protein, 12 aa, Homo sapiens
  CDR3 for alpha chain variable domain of TCR clone 263 (TRAV12-3, TRAJ41)
CAMSYSGYALNF

SEQ ID NO: 526 - protein, 13 aa, Homo sapiens
  CDR3 for beta chain variable domain of TCR clone 263 (TRBV7-3, TRBJ2-1)
CASSLDSYNEQFF

SEQ ID NO: 527 - protein, 13 aa, Homo sapiens
  CDR3 for alpha chain variable domain of TCR clone 264 (TRAV13-1, TRAJ39)
CAASIWAGNMLTF

SEQ ID NO: 528 - protein, 15 aa, Homo sapiens
  CDR3 for beta chain variable domain of TCR clone 264 (TRBV7-9, TRBJ1-1)
CASSLLEQGGTEAFF

SEQ ID NO: 529 - protein, 13 aa, Homo sapiens
  CDR3 for alpha chain variable domain of TCR clone 265 (TRAV21, TRAJ36)
CAVIKTGANNLFF

SEQ ID NO: 530 - protein, 13 aa, Homo sapiens
  CDR3 for beta chain variable domain of TCR clone 265 (TRBV29-1, TRBJ2-3)
CSATRGGRDTQYF

SEQ ID NO: 531 - protein, 14 aa, Homo sapiens
  CDR3 for alpha chain variable domain of TCR clone 266 (TRAV35, TRAJ42)
CAGRYGGSQGNLIF

SEQ ID NO: 532 - protein, 15 aa, Homo sapiens
  CDR3 for beta chain variable domain of TCR clone 266 (TRBV7-9, TRBJ2-1)
CASSLGWGRANEQFF

SEQ ID NO: 533 - protein, 11 aa, Homo sapiens
  CDR3 for alpha chain variable domain of TCR clone 267 (TRAV35, TRAJ34)
CWARNTDKLIF

SEQ ID NO: 534 - protein, 14 aa, Homo sapiens
  CDR3 for beta chain variable domain of TCR clone 267 (TRBV5-1, TRBJ2-7)
CASSRGESLYEQYF

SEQ ID NO: 535 - protein, 14 aa, Homo sapiens
  CDR3 for alpha chain variable domain of TCR clone 268 (TRAV1-2, TRAJ16)
CAVNRFSDGQKLLF

SEQ ID NO: 536 - protein, 14 aa, Homo sapiens
  CDR3 for beta chain variable domain of TCR clone 268 (TRBV7-9, TRBJ2-3)
CASSLEDGTDTQYF

SEQ ID NO: 537 - protein, 14 aa, Homo sapiens
  CDR3 for alpha chain variable domain of TCR clone 269 (TRAV17, TRAJ54)
CATDANQGAQKLVF

SEQ ID NO: 538 - protein, 12 aa, Homo sapiens
  CDR3 for beta chain variable domain of TCR clone 269 (TRBV6-3, TRBJ2-1)
CASSGSYNEQFF

SEQ ID NO: 539 - protein, 15 aa, Homo sapiens
  CDR3 for alpha chain variable domain of TCR clone 270 (TRAV21, TRAJ40)
CAVRPQTSGTYKYIF

SEQ ID NO: 540 - protein, 13 aa, Homo sapiens
  CDR3 for beta chain variable domain of TCR clone 270 (TRBV7-2, TRBJ2-2)
CASSSVRAGELFF

SEQ ID NO: 541 - protein, 13 aa, Homo sapiens
  CDR3 for alpha chain variable domain of TCR clone 271 (TRAV21, TRAJ15)
CAVANQAGTALIF

SEQ ID NO: 542 - protein, 14 aa, Homo sapiens
  CDR3 for beta chain variable domain of TCR clone 271 (TRBV27, TRBJ2-2)
CASSLGAATGELFF

SEQ ID NO: 543 - protein, 16 aa, Homo sapiens
  CDR3 for alpha chain variable domain of TCR clone 272 (TRAV30, TRAJ24)
CGTEIVDADSWGKFQF

SEQ ID NO: 544 - protein, 15 aa, Homo sapiens
  CDR3 for beta chain variable domain of TCR clone 272 (TRBV20-1, TRBJ2-7)
CSARDRVSGMDEQYF

SEQ ID NO: 545 - protein, 13 aa, Homo sapiens
  CDR3 for alpha chain variable domain of TCR clone 273 (TRAV12-1, TRAJ34)
CVVTGYNTDKLIF

SEQ ID NO: 546 - protein, 13 aa, Homo sapiens
  CDR3 for beta chain variable domain of TCR clone 273 (TRBV28, TRBJ2-7)
CASKAGGVYEQYF

SEQ ID NO: 547 - protein, 12 aa, Homo sapiens
  CDR3 for alpha chain variable domain of TCR clone 274 (TRAV13-1, TRAJ53)
AASGGSNYKLTF

SEQ ID NO: 548 - protein, 15 aa, Homo sapiens
  CDR3 for beta chain variable domain of TCR clone 274 (TRBV5-1, TRBJ2-1)
CASSPPRAPYNEQFF

SEQ ID NO: 549 - protein, 15 aa, Homo sapiens
  CDR3 for alpha chain variable domain of TCR clone 275 (TRAV25, TRAJ52)
CAGTSGGTSYGKLTF

SEQ ID NO: 550 - protein, 16 aa, Homo sapiens
  CDR3 for beta chain variable domain of TCR clone 275 (TRBV15, TRBJ1-2)
CATSRGPRTGGGGYTF

SEQ ID NO: 551 - protein, 13 aa, Homo sapiens
  CDR3 for alpha chain variable domain of TCR clone 276 (TRAV12-1, TRAJ6)
CVVFPGGSYIPTF

SEQ ID NO: 552 - protein, 14 aa, Homo sapiens
  CDR3 for beta chain variable domain of TCR clone 276 (TRBV20-1, TRBJ1-3)
CSASPTGAGNTIYF

SEQ ID NO: 553 - protein, 13 aa, Homo sapiens
  CDR3 for alpha chain variable domain of TCR clone 277 (TRAV12-3, TRAJ43)
CAMIRPNNNDMRF

SEQ ID NO: 554 - protein, 12 aa, Homo sapiens
  CDR3 for beta chain variable domain of TCR clone 277 (TRBV11-2, TRBJ2-5)
CASSLGQETQYF

SEQ ID NO: 555 - protein, 11 aa, Homo sapiens
  CDR3 for alpha chain variable domain of TCR clone 278 (TRAV4, TRAJ31)
CLVGDNARLMF

SEQ ID NO: 556 - protein, 16 aa, Homo sapiens
  CDR3 for beta chain variable domain of TCR clone 278 (TRBV7-2, TRBJ2-5)
CASSSKWLSGQETQYF

SEQ ID NO: 557 - protein, 15 aa, Homo sapiens
  CDR3 for alpha chain variable domain of TCR clone 279 (TRAV8-3, TRAJ40)
CAAPSLGSGTYKYIF

SEQ ID NO: 558 - protein, 16 aa, Homo sapiens
  CDR3 for beta chain variable domain of TCR clone 279 (TRBV7-3, TRBJ2-3)
CASSLSGYRPEDTQYF

SEQ ID NO: 559 - protein, 15 aa, Homo sapiens
  CDR3 for alpha chain variable domain of TCR clone 280 (TRAV17, TRAJ52)
CATEAGGTSYGKLTF

SEQ ID NO: 560 - protein, 14 aa, Homo sapiens
  CDR3 for beta chain variable domain of TCR clone 280 (TRBV28, TRBJ1-5)
CASSLGVLVKPQHF

SEQ ID NO: 561 - protein, 17 aa, Homo sapiens
  CDR3 for alpha chain variable domain of TCR clone 281 (TRAV4, TRAJ13)
CLVGVQGSSGGYQKVTF

SEQ ID NO: 562 - protein, 18 aa, Homo sapiens
  CDR3 for beta chain variable domain of TCR clone 281 (TRBV15, TRBJ2-3)
CATSRDGARSWDTDTQYF

SEQ ID NO: 563 - protein, 13 aa, Homo sapiens
  CDR3 for alpha chain variable domain of TCR clone 282 (TRAV21, TRAJ27)
CAALNTNAGKSTF

SEQ ID NO: 564 - protein, 14 aa, Homo sapiens
  CDR3 for beta chain variable domain of TCR clone 282 (TRBV27, TRBJ1-1)
CASSLLSGLSEAFF

SEQ ID NO: 565 - protein, 16 aa, Homo sapiens
  CDR3 for alpha chain variable domain of TCR clone 283 (TRAV2, TRAJ4)
CAVEDRFSGGYNKLIF

SEQ ID NO: 566 - protein, 13 aa, Homo sapiens
  CDR3 for beta chain variable domain of TCR clone 283 (TRBV7-7, TRBJ2-5)
CASSRSGQETQYF

SEQ ID NO: 567 - protein, 11 aa, Homo sapiens
  CDR3 for alpha chain variable domain of TCR clone 284 (TRAV3, TRAJ13)
CAVTSYQKVTF

SEQ ID NO: 568 - protein, 15 aa, Homo sapiens
  CDR3 for beta chain variable domain of TCR clone 284 (TRBV7-9, TRBJ2-7)
CASSSSGLAVYEQYF

SEQ ID NO: 569 - protein, 18 aa, Homo sapiens
  CDR3 for alpha chain variable domain of TCR clone 285 (TRAV26-1, TRAJ52)
CIVRVEGAGGTSYGKLTF

SEQ ID NO: 570 - protein, 13 aa, Homo sapiens
  CDR3 for beta chain variable domain of TCR clone 285 (TRBV7-3, TRBJ1-2)
CASSLKRGYGYTF

SEQ ID NO: 571 - protein, 15 aa, Homo sapiens
  CDR3 for alpha chain variable domain of TCR clone 286 (TRAV8-3, TRAJ45)
CASSYSGGGADGLTF

SEQ ID NO: 572 - protein, 17 aa, Homo sapiens
  CDR3 for beta chain variable domain of TCR clone 286 (TRBV7-8, TRBJ1-2)
CASSLRPLQGHLYGYTF

SEQ ID NO: 573 - protein, 16 aa, Homo sapiens
  CDR3 for alpha chain variable domain of TCR clone 287 (TRAV12-2, TRAJ32)
CAVNLGQGGATNKLIF

SEQ ID NO: 574 - protein, 15 aa, Homo sapiens
  CDR3 for beta chain variable domain of TCR clone 287 (TRBV20-1, TRBJ2-7)
CSARGPLAGGREQYF

SEQ ID NO: 575 - protein, 16 aa, Homo sapiens
  CDR3 for alpha chain variable domain of TCR clone 288 (TRAV12-2, TRAJ10)
CAVNRVLTGGGNKLTF

SEQ ID NO: 576 - protein, 12 aa, Homo sapiens
  CDR3 for beta chain variable domain of TCR clone 288 (TRBV28, TRBJ2-7)
CASSFSSYEQYF

SEQ ID NO: 577 - protein, 11 aa, Homo sapiens
  CDR3 for alpha chain variable domain of TCR clone 289 (TRAV12-2, TRAJ31)
CAVTRWARLMF

SEQ ID NO: 578 - protein, 15 aa, Homo sapiens
  CDR3 for beta chain variable domain of TCR clone 289 (TRBV19, TRBJ2-7)
CASSIGGGLVNEQYF

SEQ ID NO: 579 - protein, 13 aa, Homo sapiens
  CDR3 for alpha chain variable domain of TCR clone 290 (TRAV16, TRAJ26)
CITVLCLGQNFVF

SEQ ID NO: 580 - protein, 12 aa, Homo sapiens
  CDR3 for beta chain variable domain of TCR clone 290 (TRBV11-2, TRBJ2-1)
CASSPGNNEQFF

SEQ ID NO: 581 - protein, 11 aa, Homo sapiens
  CDR3 for alpha chain variable domain of TCR clone 291 (TRAV1-2, TRAJ20)
CAVSNDYKLSF

SEQ ID NO: 582 - protein, 16 aa, Homo sapiens
  CDR3 for beta chain variable domain of TCR clone 291 (TRBV29-1, TRBJ2-6)
CSVEDITYSGANVLTF

SEQ ID NO: 583 - protein, 12 aa, Homo sapiens
  CDR3 for alpha chain variable domain of TCR clone 292 (TRAV2, TRAJ33)
CAFMDSNYQLIW

SEQ ID NO: 584 - protein, 16 aa, Homo sapiens
  CDR3 for beta chain variable domain of TCR clone 292 (TRBV2, TRBJ2-7)
CASSEPWTGPSYEQYF

SEQ ID NO: 585 - protein, 14 aa, Homo sapiens
  CDR3 for alpha chain variable domain of TCR clone 293 (TRAV12-3, TRAJ42)
CAMNYGGSQGNLIF

SEQ ID NO: 586 - protein, 15 aa, Homo sapiens
  CDR3 for beta chain variable domain of TCR clone 293 (TRBV5-7, TRBJ1-5)
CASSYGKLWDQPQHF

SEQ ID NO: 587 - protein, 14 aa, Homo sapiens
  CDR3 for alpha chain variable domain of TCR clone 294 (TRAV12-2, TRAJ17)
CAVNIKAAGNKLTF

SEQ ID NO: 588 - protein, 16 aa, Homo sapiens
  CDR3 for beta chain variable domain of TCR clone 294 (TRBV20-1, TRBJ2-6)
CSASSQGYDGANVLTF

SEQ ID NO: 589 - protein, 14 aa, Homo sapiens
  CDR3 for alpha chain variable domain of TCR clone 295 (TRAV20, TRAJ29)
CAVQAWVGNTPLVF

SEQ ID NO: 590 - protein, 15 aa, Homo sapiens
  CDR3 for beta chain variable domain of TCR clone 295 (TRBV29-1, TRBJ2-7)
CSVEFFDRGSYEQYF

SEQ ID NO: 591 - protein, 16 aa, Homo sapiens
  CDR3 for alpha chain variable domain of TCR clone 296 (TRAV23/DV6, TRAJ9)
CAASIGGNTGGFKTIF

SEQ ID NO: 592 - protein, 14 aa, Homo sapiens
  CDR3 for beta chain variable domain of TCR clone 296 (TRBV9, TRBJ2-7)
CASSVGVGSYEQYF

SEQ ID NO: 593 - protein, 14 aa, Homo sapiens
  CDR3 for alpha chain variable domain of TCR clone 297 (TRAV12-2, TRAJ13)
CAVKKTGGYQKVTF

SEQ ID NO: 594 - protein, 12 aa, Homo sapiens
  CDR3 for beta chain variable domain of TCR clone 297 (TRBV12-4, TRBJ1-2)
CASSFIWLHLRF

SEQ ID NO: 595 - protein, 14 aa, Homo sapiens
  CDR3 for alpha chain variable domain of TCR clone 298 (TRAV12-2, TRAJ45)
CALPERGGADGLTF

SEQ ID NO: 596 - protein, 14 aa, Homo sapiens
  CDR3 for beta chain variable domain of TCR clone 298 (TRBV18, TRBJ1-5)
CASSPGNSNQPQHF

SEQ ID NO: 597 - protein, 14 aa, Homo sapiens
  CDR3 for alpha chain variable domain of TCR clone 299 (TRAV8-2, TRAJ11)
CVVSEKSGYSTLTF

SEQ ID NO: 598 - protein, 16 aa, Homo sapiens
  CDR3 for beta chain variable domain of TCR clone 299 (TRBV28, TRBJ2-1)
CASSSPEYPRDNEQFF

SEQ ID NO: 599 - protein, 12 aa, Homo sapiens
  CDR3 for alpha chain variable domain of TCR clone 300 (TRAV29/DV5, TRAJ49)
CAATDTGNQFYF

SEQ ID NO: 600 - protein, 12 aa, Homo sapiens
  CDR3 for beta chain variable domain of TCR clone 300 (TRBV12-4, TRBJ2-7)
CASSLGGYEQYF

SEQ ID NO: 601 - protein, 12 aa, Homo sapiens
  CDR3 for alpha chain variable domain of TCR clone 301 (TRAV12-3, TRAJ20)
CAMVRGDYKLSF

SEQ ID NO: 602 - protein, 14 aa, Homo sapiens
  CDR3 for beta chain variable domain of TCR clone 301 (TRBV5-5, TRBJ1-5)
CASSGQGVDQPQHF

SEQ ID NO: 603 - protein, 14 aa, Homo sapiens
  CDR3 for alpha chain variable domain of TCR clone 302 (TRAV13-1, TRAJ44)
CAAKATGTASKLTF

SEQ ID NO: 604 - protein, 13 aa, Homo sapiens
  CDR3 for beta chain variable domain of TCR clone 302 (TRBV5-5, TRBJ1-2)
CASSFWRGEDYTF

SEQ ID NO: 605 - protein, 17 aa, Homo sapiens
  CDR3 for alpha chain variable domain of TCR clone 303 (TRAV2, TRAJ36)
CAVEDRGNWGKQPLLWD

SEQ ID NO: 606 - protein, 14 aa, Homo sapiens
  CDR3 for beta chain variable domain of TCR clone 303 (TRBV7-9, TRBJ2-5)
CASSLDTAQETQYF

SEQ ID NO: 607 - protein, 12 aa, Homo sapiens
  CDR3 for alpha chain variable domain of TCR clone 304 (TRAV12-3, TRAJ3)
CAIDSSASKIIF

SEQ ID NO: 608 - protein, 17 aa, Homo sapiens
  CDR3 for beta chain variable domain of TCR clone 304 (TRBV7-9, TRBJ2-3)
CASSLEEAGAYPDTQYF

SEQ ID NO: 609 - protein, 15 aa, Homo sapiens
  CDR3 for alpha chain variable domain of TCR clone 305 (TRAV8-3, TRAJ15)
CAVGAPNQAGTALIF

SEQ ID NO: 610 - protein, 14 aa, Homo sapiens
  CDR3 for beta chain variable domain of TCR clone 305 (TRBV20-1, TRBJ2-1)
CSPNDEASYNEQFF

SEQ ID NO: 611 - protein, 15 aa, Homo sapiens
  CDR3 for alpha chain variable domain of TCR clone 306 (TRAV2, TRAJ22)
CAVPSRGGSARQLTF

SEQ ID NO: 612 - protein, 11 aa, Homo sapiens
  CDR3 for beta chain variable domain of TCR clone 306 (TRBV27, TRBJ2-3)
CASSLGDTQYF

SEQ ID NO: 613 - protein, 13 aa, Homo sapiens
  CDR3 for alpha chain variable domain of TCR clone 307 (TRAV13-1, TRAJ39)
CSKYSNAGNMLTF

SEQ ID NO: 614 - protein, 16 aa, Homo sapiens
  CDR3 for beta chain variable domain of TCR clone 307 (TRBV20-1, TRBJ1-4)
CSAPGQGLLTNEKLFF

SEQ ID NO: 615 - protein, 16 aa, Homo sapiens
  CDR3 for alpha chain variable domain of TCR clone 308 (TRAV27, TRAJ52)
CAGAPAGGTSYGKLTF

SEQ ID NO: 616 - protein, 12 aa, Homo sapiens
  CDR3 for beta chain variable domain of TCR clone 308 (TRBV27, TRBJ2-1)
CASRGFYNEQFF

SEQ ID NO: 617 - protein, 10 aa, Homo sapiens
  CDR3 for alpha chain variable domain of TCR clone 309 (TRAV12-1, TRAJ37)
ARGNTGKLIF

SEQ ID NO: 618 - protein, 15 aa, Homo sapiens
  CDR3 for beta chain variable domain of TCR clone 309 (TRBV7-2, TRBJ2-3)
CASSLEQGGTDTQYF

SEQ ID NO: 619 - protein, 11 aa, Homo sapiens
  CDR3 for alpha chain variable domain of TCR clone 310 (TRAV17, TRAJ31)
CATSNNARLMF

SEQ ID NO: 620 - protein, 16 aa, Homo sapiens
  CDR3 for beta chain variable domain of TCR clone 310 (TRBV7-8, TRBJ2-4)
CASSAERTLAKNIQYF

SEQ ID NO: 621 - protein, 11 aa, Homo sapiens
  CDR3 for alpha chain variable domain of TCR clone 311 (TRAV16, TRAJ33)
CALHSNYQLIW

SEQ ID NO: 622 - protein, 15 aa, Homo sapiens
  CDR3 for beta chain variable domain of TCR clone 311 (TRBV4-1, TRBJ2-7)
CASSQQGQGFDEQYF

SEQ ID NO: 623 - protein, 13 aa, Homo sapiens
  CDR3 for alpha chain variable domain of TCR clone 312 (TRAV27, TRAJ29)
CAGAHSGNTPLVF

SEQ ID NO: 624 - protein, 14 aa, Homo sapiens
  CDR3 for beta chain variable domain of TCR clone 312 (TRBV7-9, TRBJ2-7)
CASSIGQGAGEQYF

SEQ ID NO: 625 - protein, 13 aa, Homo sapiens
  CDR3 for alpha chain variable domain of TCR clone 313 (TRAV3, TRAJ29)
CAVRDIIDTPLVF

SEQ ID NO: 626 - protein, 14 aa, Homo sapiens
  CDR3 for beta chain variable domain of TCR clone 313 (TRBV27, TRBJ2-1)
CASSATGGYNEQFF

SEQ ID NO: 627 - protein, 16 aa, Homo sapiens
  CDR3 for alpha chain variable domain of TCR clone 314 (TRAV30, TRAJ24)
CGTEIVDADSWGKFQF

SEQ ID NO: 628 - protein, 12 aa, Homo sapiens
  CDR3 for beta chain variable domain of TCR clone 314 (TRBV11-2, TRBJ2-2)
CASSLGGGELFF

SEQ ID NO: 629 - protein, 19 aa, Homo sapiens
  CDR3 for alpha chain variable domain of TCR clone 315 (TRAV2, TRAJ20)
ILQVREADAAVYRDCKLSF

SEQ ID NO: 630 - protein, 13 aa, Homo sapiens
  CDR3 for beta chain variable domain of TCR clone 315 (TRBV15, TRBJ1-6)
CATSGGLNSPLHF

SEQ ID NO: 631 - protein, 11 aa, Homo sapiens
  CDR3 for alpha chain variable domain of TCR clone 316 (TRAV21, TRAJ48)
CAVDGNEKLTF

SEQ ID NO: 632 - protein, 16 aa, Homo sapiens
  CDR3 for beta chain variable domain of TCR clone 316 (TRBV12-4, TRBJ1-5)
CASSSGPRGSNQPQHF

SEQ ID NO: 633 - protein, 14 aa, Homo sapiens
  CDR3 for alpha chain variable domain of TCR clone 317 (TRAV1-2, TRAJ16)
CAVNRFSDGQKLLF

SEQ ID NO: 634 - protein, 11 aa, Homo sapiens
  CDR3 for beta chain variable domain of TCR clone 317 (TRBV29-1, TRBJ2-5)
CSEDRTGTQYF

SEQ ID NO: 635 - protein, 15 aa, Homo sapiens
  CDR3 for alpha chain variable domain of TCR clone 318 (TRAV21, TRAJ45)
CAVSYSGGGADGLTF

SEQ ID NO: 636 - protein, 13 aa, Homo sapiens
  CDR3 for beta chain variable domain of TCR clone 318 (TRBV20-1, TRBJ2-5)
CSAATELQETQYF

SEQ ID NO: 637 - protein, 12 aa, Homo sapiens
  CDR3 for alpha chain variable domain of TCR clone 319 (TRAV12-2, TRAJ10)
WGVTGGGNKLTF

SEQ ID NO: 638 - protein, 16 aa, Homo sapiens
  CDR3 for beta chain variable domain of TCR clone 319 (TRBV6-4, TRBJ1-2)
CASSEAVGDPNYGYTF

SEQ ID NO: 639 - protein, 13 aa, Homo sapiens
  CDR3 for alpha chain variable domain of TCR clone 320 (TRAV12-3, TRAJ13)
CAMSSGGYQKVTF

SEQ ID NO: 640 - protein, 13 aa, Homo sapiens
  CDR3 for beta chain variable domain of TCR clone 320 (TRBV20-1, TRBJ1-1)
CSAPPGGHTEAFF

SEQ ID NO: 641 - protein, 14 aa, Homo sapiens
  CDR3 for alpha chain variable domain of TCR clone 321 (TRAV3, TRAJ22)
CAVRDYGSARQLTF

SEQ ID NO: 642 - protein, 13 aa, Homo sapiens
  CDR3 for beta chain variable domain of TCR clone 321 (TRBV11-2, TRBJ2-5)
CASGHGAKETQYF

SEQ ID NO: 643 - protein, 12 aa, Homo sapiens
  CDR3 for alpha chain variable domain of TCR clone 322 (TRAV3, TRAJ20)
CAVRDGDYKLSF

SEQ ID NO: 644 - protein, 13 aa, Homo sapiens
  CDR3 for beta chain variable domain of TCR clone 322 (TRBV9, TRBJ2-1)
CASSVGQGGEQFF

SEQ ID NO: 645 - protein, 14 aa, Homo sapiens
  CDR3 for alpha chain variable domain of TCR clone 323 (TRAV4, TRAJ26)
CLVGPHNYGQNFVF

SEQ ID NO: 646 - protein, 17 aa, Homo sapiens
  CDR3 for beta chain variable domain of TCR clone 323 (TRBV24-1, TRBJ2-1)
CATSDVSTSGTYNEQFF

SEQ ID NO: 647 - protein, 14 aa, Homo sapiens
  CDR3 for alpha chain variable domain of TCR clone 324 (TRAV12-3, TRAJ12)
CAMSEVDSSYKLIF

SEQ ID NO: 648 - protein, 12 aa, Homo sapiens
  CDR3 for beta chain variable domain of TCR clone 324 (TRBV18, TRBJ1-4)
CASSPSREKLFF

SEQ ID NO: 649 - protein, 13 aa, Homo sapiens
  CDR3 for alpha chain variable domain of TCR clone 325 (TRAV8-3, TRAJ43)
CAVGPDNNNDMRF

SEQ ID NO: 650 - protein, 12 aa, Homo sapiens
  CDR3 for beta chain variable domain of TCR clone 325 (TRBV7-2, TRBJ1-6)
CASSLSSSPLHF

SEQ ID NO: 651 - protein, 14 aa, Homo sapiens
  CDR3 for alpha chain variable domain of TCR clone 326 (TRAV1-2, TRAJ16)
CAVNRFSDGQKLLF

SEQ ID NO: 652 - protein, 13 aa, Homo sapiens
  CDR3 for beta chain variable domain of TCR clone 326 (TRBV4-1, TRBJ2-1)
CASSQAGGDEQFF

SEQ ID NO: 653 - protein, 14 aa, Homo sapiens
  CDR3 for alpha chain variable domain of TCR clone 327 (TRAV21, TRAJ15)
CAVSLNQAGTALIF

SEQ ID NO: 654 - protein, 11 aa, Homo sapiens
  CDR3 for beta chain variable domain of TCR clone 327 (TRBV20-1, TRBJ2-7)
CSARTSYEQYF

SEQ ID NO: 655 - protein, 15 aa, Homo sapiens
  CDR3 for alpha chain variable domain of TCR clone 328 (TRAV8-3, TRAJ41)
CAVGSNSNSGYALNF

SEQ ID NO: 656 - protein, 17 aa, Homo sapiens
  CDR3 for beta chain variable domain of TCR clone 328 (TRBV25-1, TRBJ2-1)
CASSAYGQGRGVYEQFF

SEQ ID NO: 657 - protein, 10 aa, Homo sapiens
  CDR3 for alpha chain variable domain of TCR clone 329 (TRAV1-2, TRAJ20)
CALNDYKLSF

SEQ ID NO: 658 - protein, 16 aa, Homo sapiens
  CDR3 for beta chain variable domain of TCR clone 329 (TRBV20-1, TRBJ1-1)
CSARALTQGMNTEAFF

SEQ ID NO: 659 - protein, 13 aa, Homo sapiens
  CDR3 for alpha chain variable domain of TCR clone 330 (TRAV2, TRAJ29)
CAAQNSGNTPLVF

SEQ ID NO: 660 - protein, 14 aa, Homo sapiens
  CDR3 for beta chain variable domain of TCR clone 330 (TRBV7-9, TRBJ2-4)
CASSLAMGGNIQYF

SEQ ID NO: 661 - protein, 14 aa, Homo sapiens
  CDR3 for alpha chain variable domain of TCR clone 331 (TRAV35, TRAJ50)
CAGHRKTSYDKVIF

SEQ ID NO: 662 - protein, 13 aa, Homo sapiens
  CDR3 for beta chain variable domain of TCR clone 331 (TRBV7-7, TRBJ2-3)
CASSLSRADTQYF

SEQ ID NO: 663 - protein, 11 aa, Homo sapiens
  CDR3 for alpha chain variable domain of TCR clone 332 (TRAV35, TRAJ30)
CAGERDDKIIF

SEQ ID NO: 664 - protein, 14 aa, Homo sapiens
  CDR3 for beta chain variable domain of TCR clone 332 (TRBV15, TRBJ2-5)
CATSGDRGQETQYF

SEQ ID NO: 665 - protein, 14 aa, Homo sapiens
  CDR3 for alpha chain variable domain of TCR clone 333 (TRAV13-1, TRAJ44)
CAAKATGTASKLTF

SEQ ID NO: 666 - protein, 14 aa, Homo sapiens
  CDR3 for beta chain variable domain of TCR clone 333 (TRBV19, TRBJ2-2)
CASSTLHRSGELFF

SEQ ID NO: 667 - protein, 12 aa, Homo sapiens
  CDR3 for alpha chain variable domain of TCR clone 334 (TRAV21, TRAJ3)
CCFYSSASKIIF

SEQ ID NO: 668 - protein, 16 aa, Homo sapiens
  CDR3 for beta chain variable domain of TCR clone 334 (TRBV19, TRBJ2-1)
CASSKAGPSSYNEQFF

SEQ ID NO: 669 - protein, 14 aa, Homo sapiens
  CDR3 for alpha chain variable domain of TCR clone 335 (TRAV3, TRAJ7)
CAVREEEREQQTRF

SEQ ID NO: 670 - protein, 12 aa, Homo sapiens
  CDR3 for beta chain variable domain of TCR clone 335 (TRBV7-8, TRBJ2-7)
CASSLGDREQYF

SEQ ID NO: 671 - protein, 17 aa, Homo sapiens
  CDR3 for alpha chain variable domain of TCR clone 336 (TRAV2, TRAJ22)
ILQVREADAAEQRQLTF

SEQ ID NO: 672 - protein, 16 aa, Homo sapiens
  CDR3 for beta chain variable domain of TCR clone 336 (TRBV2, TRBJ2-5)
CASSETQGVGEETQYF

SEQ ID NO: 673 - protein, 14 aa, Homo sapiens
  CDR3 for alpha chain variable domain of TCR clone 337 (TRAV2, TRAJ37)
CAVDFTSNTGKLIF

SEQ ID NO: 674 - protein, 13 aa, Homo sapiens
  CDR3 for beta chain variable domain of TCR clone 337 (TRBV20-1, TRBJ1-1)
CSAPLGGGTEAFF

SEQ ID NO: 675 - protein, 18 aa, Homo sapiens
  CDR3 for alpha chain variable domain of TCR clone 338 (TRAV21, TRAJ52)
CAVRPSPAGGTSYGKLTF

SEQ ID NO: 676 - protein, 14 aa, Homo sapiens
  CDR3 for beta chain variable domain of TCR clone 338 (TRBV4-1, TRBJ2-2)
CASSQAVNTGELFF

SEQ ID NO: 677 - protein, 12 aa, Homo sapiens
  CDR3 for alpha chain variable domain of TCR clone 339 (TRAV21, TRAJ13)
PGPSGGYQKVTF

SEQ ID NO: 678 - protein, 15 aa, Homo sapiens
  CDR3 for beta chain variable domain of TCR clone 339 (TRBV7-9, TRBJ1-6)
CASSSPGRGNSPLHF

SEQ ID NO: 679 - protein, 11 aa, Homo sapiens
  CDR3 for alpha chain variable domain of TCR clone 340 (TRAV13-1, TRAJ39)
CASHAGNMLTF

SEQ ID NO: 680 - protein, 14 aa, Homo sapiens
  CDR3 for beta chain variable domain of TCR clone 340 (TRBV11-2, TRBJ1-5)
CASSLDRGRQPQHF

SEQ ID NO: 681 - protein, 14 aa, Homo sapiens
  CDR3 for alpha chain variable domain of TCR clone 341 (TRAV1-2, TRAJ16)
CAVNRFSDGQKLLF

SEQ ID NO: 682 - protein, 12 aa, Homo sapiens
  CDR3 for beta chain variable domain of TCR clone 341 (TRBV11-2, TRBJ2-2)
CASSLGGGELFF

SEQ ID NO: 683 - protein, 14 aa, Homo sapiens
  CDR3 for alpha chain variable domain of TCR clone 342 (TRAV1-2, TRAJ16)
CAVNRFSDGQKLLF

SEQ ID NO: 684 - protein, 16 aa, Homo sapiens
  CDR3 for beta chain variable domain of TCR clone 342 (TRBV20-1, TRBJ1-4)
CSAPGQGLLTNEKLFF

SEQ ID NO: 685 - protein, 13 aa, Homo sapiens
  CDR3 for alpha chain variable domain of TCR clone 343 (TRAV30, TRAJ24)
CGTVTDSWGKLQF

SEQ ID NO: 686 - protein, 14 aa, Homo sapiens
  CDR3 for beta chain variable domain of TCR clone 343 (TRBV6-3, TRBJ2-2)
CASTYTPDTGELFF

SEQ ID NO: 687 - protein, 14 aa, Homo sapiens
  CDR3 for alpha chain variable domain of TCR clone 344 (TRAV16, TRAJ15)
CALSGPQAGTALIF

SEQ ID NO: 688 - protein, 12 aa, Homo sapiens
  CDR3 for beta chain variable domain of TCR clone 344 (TRBV18, TRBJ2-5)
CASSPSKETQYF

SEQ ID NO: 689 - protein, 15 aa, Homo sapiens
  CDR3 for alpha chain variable domain of TCR clone 345 (TRAV21, TRAJ37)
CAVRPTLSNTGKLIF

SEQ ID NO: 690 - protein, 16 aa, Homo sapiens
  CDR3 for beta chain variable domain of TCR clone 345 (TRBV24-1, TRBJ2-3)
CATSDRRQDLTDTQYF

SEQ ID NO: 691 - protein, 11 aa, Homo sapiens
  CDR3 for alpha chain variable domain of TCR clone 346 (TRAV12-1, TRAJ8)
CVVTGFQKLVF

SEQ ID NO: 692 - protein, 14 aa, Homo sapiens
  CDR3 for beta chain variable domain of TCR clone 346 (TRBV19, TRBJ2-1)
CASGKSTQYNEQFF

SEQ ID NO: 693 - protein, 15 aa, Homo sapiens
  CDR3 for alpha chain variable domain of TCR clone 347 (TRAV12-3, TRAJ6)
CAMSATSGGSYIPTF

SEQ ID NO: 694 - protein, 11 aa, Homo sapiens
  CDR3 for beta chain variable domain of TCR clone 347 (TRBV20-1, TRBJ1-5)
CSAQGDQPQHF

SEQ ID NO: 695 - protein, 15 aa, Homo sapiens
  CDR3 for alpha chain variable domain of TCR clone 348 (TRAV8-4, TRAJ3)
CAVTGENLVQQCFQD

SEQ ID NO: 696 - protein, 16 aa, Homo sapiens
  CDR3 for beta chain variable domain of TCR clone 348 (TRBV4-2, TRBJ1-1)
CASSQAGFGMNTEAFF

SEQ ID NO: 697 - protein, 15 aa, Homo sapiens
  CDR3 for alpha chain variable domain of TCR clone 349 (TRAV13-1, TRAJ44)
CAASRGGGTASKLTF

SEQ ID NO: 698 - protein, 14 aa, Homo sapiens
  CDR3 for beta chain variable domain of TCR clone 349 (TRBV7-2, TRBJ2-5)
CASSPRGSSETQYF

SEQ ID NO: 699 - protein, 15 aa, Homo sapiens
  CDR3 for alpha chain variable domain of TCR clone 350 (TRAV17, TRAJ56)
CATEPFTGANSKLTF

SEQ ID NO: 700 - protein, 15 aa, Homo sapiens
  CDR3 for beta chain variable domain of TCR clone 350 (TRBV28, TRBJ1-5)
CASSRTGGYVQPQHF

SEQ ID NO: 701 - protein, 12 aa, Homo sapiens
  CDR3 for alpha chain variable domain of TCR clone 351 (TRAV12-1, TRAJ34)
CVVAGATDKLIF

SEQ ID NO: 702 - protein, 12 aa, Homo sapiens
  CDR3 for beta chain variable domain of TCR clone 351 (TRBV7-9, TRBJ1-1)
CASSLVRGEAFF

SEQ ID NO: 703 - protein, 16 aa, Homo sapiens
  CDR3 for alpha chain variable domain of TCR clone 352 (TRAV3, TRAJ37)
CAVRVRGSGNTGKLIF

SEQ ID NO: 704 - protein, 11 aa, Homo sapiens
  CDR3 for beta chain variable domain of TCR clone 352 (TRBV11-2, TRBJ2-2)
CASSLPGELFF

SEQ ID NO: 705 - protein, 11 aa, Homo sapiens
  CDR3 for alpha chain variable domain of TCR clone 353 (TRAV35, TRAJ30)
CAGPGDDKIIF

SEQ ID NO: 706 - protein, 14 aa, Homo sapiens
  CDR3 for beta chain variable domain of TCR clone 353 (TRBV7-6, TRBJ1-6)
CASSQAGGGSPLHF

SEQ ID NO: 707 - protein, 15 aa, Homo sapiens
  CDR3 for alpha chain variable domain of TCR clone 354 (TRAV29/DV5, TRAJ24)
CAASGATDSWGKFQF

SEQ ID NO: 708 - protein, 12 aa, Homo sapiens
  CDR3 for beta chain variable domain of TCR clone 354 (TRBV11-2, TRBJ2-2)
CASSLPTGELFF

SEQ ID NO: 709 - protein, 12 aa, Homo sapiens
  CDR3 for alpha chain variable domain of TCR clone 355 (TRAV3, TRAJ20)
CAVRDPDYKLSF

SEQ ID NO: 710 - protein, 13 aa, Homo sapiens
  CDR3 for beta chain variable domain of TCR clone 355 (TRBV9, TRBJ2-1)
CASSVGQGGEQFF

SEQ ID NO: 711 - protein, 17 aa, Homo sapiens
  CDR3 for alpha chain variable domain of TCR clone 356 (TRAV17, TRAJ7)
CATLGRLAFGKGNQVVV

SEQ ID NO: 712 - protein, 13 aa, Homo sapiens
  CDR3 for beta chain variable domain of TCR clone 356 (TRBV12-4, TRBJ2-7)
CASSLERVREQYF

SEQ ID NO: 713 - protein, 11 aa, Homo sapiens
  CDR3 for alpha chain variable domain of TCR clone 357 (TRAV3, TRAJ17)
PRGAAGNKLTF

SEQ ID NO: 714 - protein, 16 aa, Homo sapiens
  CDR3 for beta chain variable domain of TCR clone 357 (TRBV7-6, TRBJ2-1)
CASSAPGPSSYNEQFF

SEQ ID NO: 715 - protein, 14 aa, Homo sapiens
  CDR3 for alpha chain variable domain of TCR clone 358 (TRAV12-1, TRAJ30)
CVVNIGGRDDKIIF

SEQ ID NO: 716 - protein, 13 aa, Homo sapiens
  CDR3 for beta chain variable domain of TCR clone 358 (TRBV12-5, TRBJ2-1)
CASGLGRGNEQFF

SEQ ID NO: 717 - protein, 14 aa, Homo sapiens
  CDR3 for alpha chain variable domain of TCR clone 359 (TRAV26-1, TRAJ26)
CIVRATFLGQNFVF

SEQ ID NO: 718 - protein, 16 aa, Homo sapiens
  CDR3 for beta chain variable domain of TCR clone 359 (TRBV12-4, TRBJ2-7)
CASRSTGTGPSYEQYF

SEQ ID NO: 719 - protein, 11 aa, Homo sapiens
  CDR3 for alpha chain variable domain of TCR clone 360 (TRAV1-1, TRAJ23)
CAVRQGGKLIF

SEQ ID NO: 720 - protein, 14 aa, Homo sapiens
  CDR3 for beta chain variable domain of TCR clone 360 (TRBV19, TRBJ2-1)
CASPTFVLSGEQFF

SEQ ID NO: 721 - protein, 11 aa, Homo sapiens
  CDR3 for alpha chain variable domain of TCR clone 361 (TRAV17, TRAJ43)
CATPRSNDMRF

SEQ ID NO: 722 - protein, 15 aa, Homo sapiens
  CDR3 for beta chain variable domain of TCR clone 361 (TRBV11-2, TRBJ2-1)
CASSLGTSGLNEQFF

SEQ ID NO: 723 - protein, 16 aa, Homo sapiens
  CDR3 for alpha chain variable domain of TCR clone 362 (TRAV3, TRAJ23)
CAVKIGIYNQGGKLIF

SEQ ID NO: 724 - protein, 17 aa, Homo sapiens
  CDR3 for beta chain variable domain of TCR clone 362 (TRBV10-3, TRBJ2-6)
CAISESTAPSGANVLTF

SEQ ID NO: 725 - protein, 13 aa, Homo sapiens
  CDR3 for alpha chain variable domain of TCR clone 363 (TRAV23/DV6, TRAJ22)
CAPYSGSARQLTF

SEQ ID NO: 726 - protein, 15 aa, Homo sapiens
  CDR3 for beta chain variable domain of TCR clone 363 (TRBV11-2, TRBJ1-6)
CASSLDPWAVSPLHF

SEQ ID NO: 727 - protein, 16 aa, Homo sapiens
  CDR3 for alpha chain variable domain of TCR clone 364 (TRAV16, TRAJ52)
CALSGVGGTSYGKLTF

SEQ ID NO: 728 - protein, 14 aa, Homo sapiens
  CDR3 for beta chain variable domain of TCR clone 364 (TRBV19, TRBJ1-2)
CASSLQGQAYGYTF

SEQ ID NO: 729 - protein, 12 aa, Homo sapiens
  CDR3 for alpha chain variable domain of TCR clone 365 (TRAV13-1, TRAJ15)
CAASQAGTALIF

SEQ ID NO: 730 - protein, 18 aa, Homo sapiens
  CDR3 for beta chain variable domain of TCR clone 365 (TRBV7-9, TRBJ2-3)
CASSLPINGQISTDTQYF

SEQ ID NO: 731 - protein, 12 aa, Homo sapiens
  CDR3 for alpha chain variable domain of TCR clone 366 (TRAV27, TRAJ36)
ASTPAGANNLFF

SEQ ID NO: 732 - protein, 13 aa, Homo sapiens
  CDR3 for beta chain variable domain of TCR clone 366 (TRBV7-9, TRBJ2-3)
CASSPGSTDTQYF

SEQ ID NO: 733 - protein, 18 aa, Homo sapiens
  CDR3 for alpha chain variable domain of TCR clone 367 (TRAV26-2, TRAJ45)
CILRLWGYSGGGADGLTF

SEQ ID NO: 734 - protein, 17 aa, Homo sapiens
  CDR3 for beta chain variable domain of TCR clone 367 (TRBV28, TRBJ2-3)
CASSPTPAGGRVDTQYF

SEQ ID NO: 735 - protein, 11 aa, Homo sapiens
  CDR3 for alpha chain variable domain of TCR clone 368 (TRAV39, TRAJ49)
CAVDISTQFYF

SEQ ID NO: 736 - protein, 11 aa, Homo sapiens
  CDR3 for beta chain variable domain of TCR clone 368 (TRBV7-8, TRBJ2-7)
CASSLSLEQYF

SEQ ID NO: 737 - protein, 11 aa, Homo sapiens
  CDR3 for alpha chain variable domain of TCR clone 369 (TRAV23/DV6, TRAJ48)
CAPRWGEKLTF

SEQ ID NO: 738 - protein, 13 aa, Homo sapiens
  CDR3 for beta chain variable domain of TCR clone 369 (TRBV12-4, TRBJ2-5)
CASSPGTEETQYF

SEQ ID NO: 739 - protein, 13 aa, Homo sapiens
  CDR3 for alpha chain variable domain of TCR clone 370 (TRAV35, TRAJ43)
CAGYPYNNNDMRF

SEQ ID NO: 740 - protein, 15 aa, Homo sapiens
  CDR3 for beta chain variable domain of TCR clone 370 (TRBV25-1, TRBJ1-4)
CASSKRIATNEKLFF

SEQ ID NO: 741 - protein, 14 aa, Homo sapiens
  CDR3 for alpha chain variable domain of TCR clone 371 (TRAV30, TRAJ26)
CGTEIVSYGQNFVF

SEQ ID NO: 742 - protein, 13 aa, Homo sapiens
  CDR3 for beta chain variable domain of TCR clone 371 (TRBV19, TRBJ1-3)
CASRLSLGNTIYF

SEQ ID NO: 743 - protein, 10 aa, Homo sapiens
  CDR3 for alpha chain variable domain of TCR clone 372 (TRAV38-2/DV8, TRAJ40)
CASGTYKYIF

SEQ ID NO: 744 - protein, 14 aa, Homo sapiens
  CDR3 for beta chain variable domain of TCR clone 372 (TRBV7-9, TRBJ2-1)
CASSPRDSLYEQFF

SEQ ID NO: 745 - protein, 14 aa, Homo sapiens
  CDR3 for alpha chain variable domain of TCR clone 373 (TRAV17, TRAJ37)
CATDGSSNTGKLIF

SEQ ID NO: 746 - protein, 13 aa, Homo sapiens
  CDR3 for beta chain variable domain of TCR clone 373 (TRBV11-2, TRBJ2-1)
CASSLDLVNEQFF

SEQ ID NO: 747 - protein, 14 aa, Homo sapiens
  CDR3 for alpha chain variable domain of TCR clone 374 (TRAV12-2, TRAJ24)
CAVTPADSWGKLQF

SEQ ID NO: 748 - protein, 12 aa, Homo sapiens
  CDR3 for beta chain variable domain of TCR clone 374 (TRBV3-1, TRBJ2-1)
CASSQGSSGQFF

SEQ ID NO: 749 - protein, 13 aa, Homo sapiens
  CDR3 for alpha chain variable domain of TCR clone 375 (TRAV12-3, TRAJ53)
CAMRGGSNYKLTF

SEQ ID NO: 750 - protein, 15 aa, Homo sapiens
  CDR3 for beta chain variable domain of TCR clone 375 (TRBV2, TRBJ2-1)
CATQARLVMIGEQFF

SEQ ID NO: 751 - protein, 14 aa, Homo sapiens
  CDR3 for alpha chain variable domain of TCR clone 376 (TRAV12-2, TRAJ17)
CAALFKAAGNKLTF

SEQ ID NO: 752 - protein, 16 aa, Homo sapiens
  CDR3 for beta chain variable domain of TCR clone 376 (TRBV20-1, TRBJ2-2)
CSASASGIPGAGELFF

SEQ ID NO: 753 - protein, 13 aa, Homo sapiens
  CDR3 for alpha chain variable domain of TCR clone 377 (TRAV8-6, TRAJ8)
CAVSNTGFQKLVF

SEQ ID NO: 754 - protein, 15 aa, Homo sapiens
  CDR3 for beta chain variable domain of TCR clone 377 (TRBV28, TRBJ2-5)
CASSSGRTIQETQYF

SEQ ID NO: 755 - protein, 14 aa, Homo sapiens
  CDR3 for alpha chain variable domain of TCR clone 378 (TRAV1-2, TRAJ16)
CAVNRFSDGQKLLF

SEQ ID NO: 756 - protein, 16 aa, Homo sapiens
  CDR3 for beta chain variable domain of TCR clone 378 (TRBV12-5, TRBJ2-5)
CASGPRTSGNQETQYF

SEQ ID NO: 757 - protein, 14 aa, Homo sapiens
  CDR3 for alpha chain variable domain of TCR clone 379 (TRAV1-2, TRAJ16)
CAVNRFSDGQKLLF

SEQ ID NO: 758 - protein, 13 aa, Homo sapiens
  CDR3 for beta chain variable domain of TCR clone 379 (TRBV10-3, TRBJ2-7)
CASKLAVNYEQYF

SEQ ID NO: 759 - protein, 15 aa, Homo sapiens
  CDR3 for alpha chain variable domain of TCR clone 380 (TRAV35, TRAJ58)
CAGRRQETSGSRLTF

SEQ ID NO: 760 - protein, 11 aa, Homo sapiens
  CDR3 for beta chain variable domain of TCR clone 380 (TRBV11-2, TRBJ1-1)
CASSINTEAFF

SEQ ID NO: 761 - protein, 13 aa, Homo sapiens
  CDR3 for alpha chain variable domain of TCR clone 381 (TRAV20, TRAJ21)
CAVEGYNFNKFYF

SEQ ID NO: 762 - protein, 14 aa, Homo sapiens
  CDR3 for beta chain variable domain of TCR clone 381 (TRBV3-1, TRBJ2-5)
CASSQGPDQETQYF

SEQ ID NO: 763 - protein, 16 aa, Homo sapiens
  CDR3 for alpha chain variable domain of TCR clone 382 (TRAV35, TRAJ28)
CAGQRYSGAGSYQLTF

SEQ ID NO: 764 - protein, 13 aa, Homo sapiens
  CDR3 for beta chain variable domain of TCR clone 382 (TRBV19, TRBJ1-2)
CASSQGQVYGYTF

SEQ ID NO: 765 - protein, 14 aa, Homo sapiens
  CDR3 for alpha chain variable domain of TCR clone 383 (TRAV17, TRAJ12)
CATDEKDSSYKLIF

SEQ ID NO: 766 - protein, 16 aa, Homo sapiens
  CDR3 for beta chain variable domain of TCR clone 383 (TRBV11-2, TRBJ2-1)
CASSPRLAGVYNEQFF

SEQ ID NO: 767 - protein, 12 aa, Homo sapiens
  CDR3 for alpha chain variable domain of TCR clone 384 (TRAV20, TRAJ56)
CAVTGANSKLTF

SEQ ID NO: 768 - protein, 14 aa, Homo sapiens
  CDR3 for beta chain variable domain of TCR clone 384 (TRBV20-1, TRBJ2-5)
CSALVPGYQETQYF

SEQ ID NO: 769 - protein, 13 aa, Homo sapiens
  CDR3 for alpha chain variable domain of TCR clone 385 (TRAV12-1, TRAJ33)
CGDAPDSNYQLIW

SEQ ID NO: 770 - protein, 15 aa, Homo sapiens
  CDR3 for beta chain variable domain of TCR clone 385 (TRBV27, TRBJ2-1)
CASSNGGGSSNEQFF

SEQ ID NO: 771 - protein, 12 aa, Homo sapiens
  CDR3 for alpha chain variable domain of TCR clone 386 (TRAV27, TRAJ9)
CAGESGGFKTIF

SEQ ID NO: 772 - protein, 18 aa, Homo sapiens
  CDR3 for beta chain variable domain of TCR clone 386 (TRBV10-2, TRBJ2-2)
CISAPAVHRQADAGELFF

SEQ ID NO: 773 - protein, 14 aa, Homo sapiens
  CDR3 for alpha chain variable domain of TCR clone 387 (TRAV3, TRAJ21)
CAVESQANFNKFYF

SEQ ID NO: 774 - protein, 18 aa, Homo sapiens
  CDR3 for beta chain variable domain of TCR clone 387 (TRBV7-9, TRBJ2-1)
CASSLAVSGTSGRNEQFF

SEQ ID NO: 775 - protein, 14 aa, Homo sapiens
  CDR3 for alpha chain variable domain of TCR clone 388 (TRAV12-3, TRAJ29)
CAMILLSGNTPLVF

SEQ ID NO: 776 - protein, 16 aa, Homo sapiens
  CDR3 for beta chain variable domain of TCR clone 388 (TRBV28, TRBJ2-7)
CASSSGTSGRGYEQYF

SEQ ID NO: 777 - protein, 16 aa, Homo sapiens
  CDR3 for alpha chain variable domain of TCR clone 389 (TRAV21, TRAJ17)
CAVRPGEEAAGNKLTF

SEQ ID NO: 778 - protein, 16 aa, Homo sapiens
  CDR3 for beta chain variable domain of TCR clone 389 (TRBV2, TRBJ2-7)
CASSEPWTGPSYEQYF

SEQ ID NO: 779 - protein, 14 aa, Homo sapiens
  CDR3 for alpha chain variable domain of TCR clone 390 (TRAV26-1, TRAJ45)
CIVRVVGGADGLTF

SEQ ID NO: 780 - protein, 16 aa, Homo sapiens
  CDR3 for beta chain variable domain of TCR clone 390 (TRBV7-9, TRBJ1-1)
CASSLTQVRSNTEAFF

SEQ ID NO: 781 - protein, 13 aa, Homo sapiens
  CDR3 for alpha chain variable domain of TCR clone 391 (TRAV20, TRAJ54)
CAVQAGGAQKLVF

SEQ ID NO: 782 - protein, 14 aa, Homo sapiens
  CDR3 for beta chain variable domain of TCR clone 391 (TRBV20-1, TRBJ2-7)
CSAKTGTGGYEQYF

SEQ ID NO: 783 - protein, 17 aa, Homo sapiens
  CDR3 for alpha chain variable domain of TCR clone 392 (TRAV17, TRAJ28)
CATDPRRGGAGSYQLTF

SEQ ID NO: 784 - protein, 16 aa, Homo sapiens
  CDR3 for beta chain variable domain of TCR clone 392 (TRBV25-1, TRBJ1-1)
CASSGDRDRGRIEAFF

SEQ ID NO: 785 - protein, 12 aa, Homo sapiens
  CDR3 for alpha chain variable domain of TCR clone 393 (TRAV26-1, TRAJ36)
CIVRVRADNLFF

SEQ ID NO: 786 - protein, 13 aa, Homo sapiens
  CDR3 for beta chain variable domain of TCR clone 393 (TRBV11-2, TRBJ2-5)
CASSRGPSETQYF

SEQ ID NO: 787 - protein, 18 aa, Homo sapiens
  CDR3 for alpha chain variable domain of TCR clone 394 (TRAV26-2, TRAJ45)
CILRVDKYSGGGADGLTF

SEQ ID NO: 788 - protein, 16 aa, Homo sapiens
  CDR3 for beta chain variable domain of TCR clone 394 (TRBV2, TRBJ1-4)
CASNLLQGATNEKLFF

SEQ ID NO: 789 - protein, 13 aa, Homo sapiens
  CDR3 for alpha chain variable domain of TCR clone 395 (TRAV30, TRAJ34)
CGTVGYNTDKLIF

SEQ ID NO: 790 - protein, 16 aa, Homo sapiens
  CDR3 for beta chain variable domain of TCR clone 395 (TRBV7-9, TRBJ1-2)
CASSLGFSSGEDGYTF

SEQ ID NO: 791 - protein, 12 aa, Homo sapiens
  CDR3 for alpha chain variable domain of TCR clone 396 (TRAV12-3, TRAJ4)
CAMTGAGTRLAV

SEQ ID NO: 792 - protein, 14 aa, Homo sapiens
  CDR3 for beta chain variable domain of TCR clone 396 (TRBV10-3, TRBJ1-1)
CAISDTDRGVEAFF

SEQ ID NO: 793 - protein, 13 aa, Homo sapiens
  CDR3 for alpha chain variable domain of TCR clone 397 (TRAV9-2, TRAJ53)
CALSGGSNYKLTF

SEQ ID NO: 794 - protein, 17 aa, Homo sapiens
  CDR3 for beta chain variable domain of TCR clone 397 (TRBV11-2, TRBJ2-1)
CASSLYPPGVEYNEQFF

SEQ ID NO: 795 - protein, 16 aa, Homo sapiens
  CDR3 for alpha chain variable domain of TCR clone 398 (TRAV38-1, TRAJ37)
CAFKGDGSSNTGKLIF

SEQ ID NO: 796 - protein, 13 aa, Homo sapiens
  CDR3 for beta chain variable domain of TCR clone 398 (TRBV12-4, TRBJ2-5)
CASSLFRRETQYF

SEQ ID NO: 797 - protein, 14 aa, Homo sapiens
  CDR3 for alpha chain variable domain of TCR clone 399 (TRAV26-1, TRAJ22)
CIVRVYGSARQLTF

SEQ ID NO: 798 - protein, 17 aa, Homo sapiens
  CDR3 for beta chain variable domain of TCR clone 399 (TRBV7-3, TRBJ2-3)
CASSPGGLAGFGDTQYF

SEQ ID NO: 799 - protein, 20 aa, Homo sapiens
  CDR3 for alpha chain variable domain of TCR clone 400 (TRAV12-3, TRAJ41)
SLFIRDSQPSDSATPEALNF

SEQ ID NO: 800 - protein, 15 aa, Homo sapiens
  CDR3 for beta chain variable domain of TCR clone 400 (TRBV5-1, TRBJ2-7)
CASSLDLTSSYEQYF

SEQ ID NO: 801 - protein, 13 aa, Homo sapiens
  CDR3 for alpha chain variable domain of TCR clone 401 (TRAV8-4, TRAJ10)
CAAFTGGGNKLTF

SEQ ID NO: 802 - protein, 15 aa, Homo sapiens
  CDR3 for beta chain variable domain of TCR clone 401 (TRBV2, TRBJ2-3)
CASSDFEKATDTQYF

SEQ ID NO: 803 - protein, 10 aa, Homo sapiens
  CDR3 for alpha chain variable domain of TCR clone 402 (TRAV1-2, TRAJ20)
CACNDYKLSF

SEQ ID NO: 804 - protein, 16 aa, Homo sapiens
  CDR3 for beta chain variable domain of TCR clone 402 (TRBV20-1, TRBJ2-1)
CSARDLKQGMNNEQFF

SEQ ID NO: 805 - protein, 14 aa, Homo sapiens
  CDR3 for alpha chain variable domain of TCR clone 403 (TRAV13-2, TRAJ17)
CAENSKAAGNKLTF

SEQ ID NO: 806 - protein, 11 aa, Homo sapiens
  CDR3 for beta chain variable domain of TCR clone 403 (TRBV6-3, TRBJ2-3)
CATGQADTQYF

SEQ ID NO: 807 - protein, 11 aa, Homo sapiens
  CDR3 for alpha chain variable domain of TCR clone 404 (TRAV27, TRAJ47)
SIVEYGNKLVF

SEQ ID NO: 808 - protein, 18 aa, Homo sapiens
  CDR3 for beta chain variable domain of TCR clone 404 (TRBV2, TRBJ2-1)
CASRGLAGGPRTYNEQFF

SEQ ID NO: 809 - protein, 11 aa, Homo sapiens
  CDR3 for alpha chain variable domain of TCR clone 405 (TRAV1-1, TRAJ23)
CAVRQGGKLIF

SEQ ID NO: 810 - protein, 13 aa, Homo sapiens
  CDR3 for beta chain variable domain of TCR clone 405 (TRBV7-3, TRBJ1-1)
CASSQDWGAEAFF

SEQ ID NO: 811 - protein, 13 aa, Homo sapiens
  CDR3 for alpha chain variable domain of TCR clone 406 (TRAV13-1, TRAJ20)
CAARVSNDYKLSF

SEQ ID NO: 812 - protein, 12 aa, Homo sapiens
  CDR3 for beta chain variable domain of TCR clone 406 (TRBV20-1, TRBJ2-1)
CSARLGTDEQFF

SEQ ID NO: 813 - protein, 14 aa, Homo sapiens
  CDR3 for alpha chain variable domain of TCR clone 407 (TRAV8-3, TRAJ4)
CAVGASGGYNKLIF

SEQ ID NO: 814 - protein, 16 aa, Homo sapiens
  CDR3 for beta chain variable domain of TCR clone 407 (TRBV4-3, TRBJ2-2)
CASSHLQGSGTGELFF

SEQ ID NO: 815 - protein, 15 aa, Homo sapiens
  CDR3 for alpha chain variable domain of TCR clone 408 (TRAV1-2, TRAJ30)
CAVRPHGNRDDKIIF

SEQ ID NO: 816 - protein, 13 aa, Homo sapiens
  CDR3 for beta chain variable domain of TCR clone 408 (TRBV4-1, TRBJ2-7)
CASSQGQAYEQYF

SEQ ID NO: 817 - protein, 12 aa, Homo sapiens
  CDR3 for alpha chain variable domain of TCR clone 409 (TRAV12-3, TRAJ5)
CAMDTGRRALTF

SEQ ID NO: 818 - protein, 13 aa, Homo sapiens
  CDR3 for beta chain variable domain of TCR clone 409 (TRBV7-7, TRBJ2-2)
CASSLTSAGELFF

SEQ ID NO: 819 - protein, 12 aa, Homo sapiens
  CDR3 for alpha chain variable domain of TCR clone 410 (TRAV8-3, TRAJ27)
CAVGAEAGKSTF

SEQ ID NO: 820 - protein, 14 aa, Homo sapiens
  CDR3 for beta chain variable domain of TCR clone 410 (TRBV2, TRBJ2-1)
CASRLIVGHDEQFF

SEQ ID NO: 821 - protein, 13 aa, Homo sapiens
  CDR3 for alpha chain variable domain of TCR clone 411 (TRAV35, TRAJ42)
CAGFPGSQGNLIF

SEQ ID NO: 822 - protein, 14 aa, Homo sapiens
  CDR3 for beta chain variable domain of TCR clone 411 (TRBV4-1, TRBJ2-2)
CASSQAVNTGELFF

SEQ ID NO: 823 - protein, 12 aa, Homo sapiens
  CDR3 for alpha chain variable domain of TCR clone 412 (TRAV27, TRAJ13)
CAGVRGYQKVTF

SEQ ID NO: 824 - protein, 16 aa, Homo sapiens
  CDR3 for beta chain variable domain of TCR clone 412 (TRBV28, TRBJ2-1)
CASSSSYSGSLNEQFF

SEQ ID NO: 825 - protein, 14 aa, Homo sapiens
  CDR3 for alpha chain variable domain of TCR clone 413 (TRAV1-2, TRAJ29)
CAVRELTSATPLVF

SEQ ID NO: 826 - protein, 14 aa, Homo sapiens
  CDR3 for beta chain variable domain of TCR clone 413 (TRBV3-1, TRBJ2-5)
CASSQGPDQETQYF

SEQ ID NO: 827 - protein, 11 aa, Homo sapiens
  CDR3 for alpha chain variable domain of TCR clone 414 (TRAV8-3, TRAJ15)
CAVGPGTALIF

SEQ ID NO: 828 - protein, 18 aa, Homo sapiens
  CDR3 for beta chain variable domain of TCR clone 414 (TRBV18, TRBJ2-3)
CASSYTSGAAGGTDTQYF

SEQ ID NO: 829 - protein, 13 aa, Homo sapiens
  CDR3 for alpha chain variable domain of TCR clone 415 (TRAV2, TRAJ20)
CAVEDPSEYKLSF

SEQ ID NO: 830 - protein, 16 aa, Homo sapiens
  CDR3 for beta chain variable domain of TCR clone 415 (TRBV25-1, TRBJ2-7)
CASSELTGGGIYEQYF

SEQ ID NO: 831 - protein, 12 aa, Homo sapiens
  CDR3 for alpha chain variable domain of TCR clone 416 (TRAV29/DV5, TRAJ49)
CAATDTGNQFYF

SEQ ID NO: 832 - protein, 19 aa, Homo sapiens
  CDR3 for beta chain variable domain of TCR clone 416 (TRBV25-1, TRBJ2-2)
CAILVYRVDRGRKTGELFF

SEQ ID NO: 833 - protein, 13 aa, Homo sapiens
  CDR3 for alpha chain variable domain of TCR clone 417 (TRAV30, TRAJ6)
CGFIEGGSYIPTF

SEQ ID NO: 834 - protein, 13 aa, Homo sapiens
  CDR3 for beta chain variable domain of TCR clone 417 (TRBV5-4, TRBJ2-5)
CASSPVSQETQYF

SEQ ID NO: 835 - protein, 10 aa, Homo sapiens
  CDR3 for alpha chain variable domain of TCR clone 418 (TRAV20, TRAJ22)
CAAPARQLTF

SEQ ID NO: 836 - protein, 14 aa, Homo sapiens
  CDR3 for beta chain variable domain of TCR clone 418 (TRBV19, TRBJ2-1)
CASSMGSGATEQFF

SEQ ID NO: 837 - protein, 14 aa, Homo sapiens
  CDR3 for alpha chain variable domain of TCR clone 419 (TRAV17, TRAJ57)
CATDPQGGSEKLVF

SEQ ID NO: 838 - protein, 18 aa, Homo sapiens
  CDR3 for beta chain variable domain of TCR clone 419 (TRBV6-6, TRBJ1-3)
CASSYSKWDSISGNTIYF

SEQ ID NO: 839 - protein, 15 aa, Homo sapiens
  CDR3 for alpha chain variable domain of TCR clone 420 (TRAV26-1, TRAJ15)
CIVRAANQAGTALIF

SEQ ID NO: 840 - protein, 15 aa, Homo sapiens
  CDR3 for beta chain variable domain of TCR clone 420 (TRBV20-1, TRBJ1-1)
CSARSAATSNTEAFF

SEQ ID NO: 841 - protein, 12 aa, Homo sapiens
  CDR3 for alpha chain variable domain of TCR clone 421 (TRAV12-3, TRAJ17)
CAMTLTGNKLTF

SEQ ID NO: 842 - protein, 13 aa, Homo sapiens
  CDR3 for beta chain variable domain of TCR clone 421 (TRBV7-9, TRBJ1-2)
CASSLKQNYGYTF

SEQ ID NO: 843 - protein, 12 aa, Homo sapiens
  CDR3 for alpha chain variable domain of TCR clone 422 (TRAV21, TRAJ23)
CAVMLQGGKLIF

SEQ ID NO: 844 - protein, 14 aa, Homo sapiens
  CDR3 for beta chain variable domain of TCR clone 422 (TRBV7-9, TRBJ1-4)
CAITEGEANEKLFF

SEQ ID NO: 845 - protein, 14 aa, Homo sapiens
  CDR3 for alpha chain variable domain of TCR clone 423 (TRAV16, TRAJ17)
CALSGRAAGNKLTF

SEQ ID NO: 846 - protein, 15 aa, Homo sapiens
  CDR3 for beta chain variable domain of TCR clone 423 (TRBV3-1, TRBJ1-2)
CASSPTRLPEGGYTF

SEQ ID NO: 847 - protein, 15 aa, Homo sapiens
  CDR3 for alpha chain variable domain of TCR clone 424 (TRAV20, TRAJ53)
CAVQASGGSNYKLTF

SEQ ID NO: 848 - protein, 12 aa, Homo sapiens
  CDR3 for beta chain variable domain of TCR clone 424 (TRBV7-6, TRBJ2-5)
CASSLSQETQYF

SEQ ID NO: 849 - protein, 13 aa, Homo sapiens
  CDR3 for alpha chain variable domain of TCR clone 425 (TRAV2, TRAJ40)
CAVVTSGTYKYIF

SEQ ID NO: 850 - protein, 16 aa, Homo sapiens
  CDR3 for beta chain variable domain of TCR clone 425 (TRBV19, TRBJ2-2)
CASRSPGTGATGELFF

SEQ ID NO: 851 - protein, 12 aa, Homo sapiens
  CDR3 for alpha chain variable domain of TCR clone 426 (TRAV13-1, TRAJ49)
CAAPNTGNQFYF

SEQ ID NO: 852 - protein, 17 aa, Homo sapiens
  CDR3 for beta chain variable domain of TCR clone 426 (TRBV25-1, TRBJ2-7)
CASSDARVVFSSYEQYF

SEQ ID NO: 853 - protein, 17 aa, Homo sapiens
  CDR3 for alpha chain variable domain of TCR clone 427 (TRAV16, TRAJ58)
CITVLSNGETSGSRLTF

SEQ ID NO: 854 - protein, 17 aa, Homo sapiens
  CDR3 for beta chain variable domain of TCR clone 427 (TRBV18, TRBJ2-1)
CASSKGLSGGADNEQFF

SEQ ID NO: 855 - protein, 10 aa, Homo sapiens
  CDR3 for alpha chain variable domain of TCR clone 428 (TRAV5, TRAJ34)
CAEDTDKLIF

SEQ ID NO: 856 - protein, 12 aa, Homo sapiens
  CDR3 for beta chain variable domain of TCR clone 428 (TRBV11-2, TRBJ2-2)
CASSLGGGELFF

SEQ ID NO: 857 - protein, 15 aa, Homo sapiens
  CDR3 for alpha chain variable domain of TCR clone 429 (TRAV35, TRAJ23)
CAGPLGNNQGGKLIF

SEQ ID NO: 858 - protein, 14 aa, Homo sapiens
  CDR3 for beta chain variable domain of TCR clone 429 (TRBV7-9, TRBJ1-1)
CASTPLQSYTEAFF

SEQ ID NO: 859 - protein, 13 aa, Homo sapiens
  CDR3 for alpha chain variable domain of TCR clone 430 (TRAV12-3, TRAJ40)
CAMSDSGTYKYIF

SEQ ID NO: 860 - protein, 14 aa, Homo sapiens
  CDR3 for beta chain variable domain of TCR clone 430 (TRBV7-2, TRBJ1-5)
CASSTQGAGQPQHF

SEQ ID NO: 861 - protein, 14 aa, Homo sapiens
  CDR3 for alpha chain variable domain of TCR clone 431 (TRAV27, TRAJ36)
CAGPPKRGANNLFF

SEQ ID NO: 862 - protein, 15 aa, Homo sapiens
  CDR3 for beta chain variable domain of TCR clone 431 (TRBV18, TRBJ2-7)
CASSPASTPNYEQYF

SEQ ID NO: 863 - protein, 13 aa, Homo sapiens
  CDR3 for alpha chain variable domain of TCR clone 432 (TRAV12-3, TRAJ13)
CAMTSGGYQKVTF

SEQ ID NO: 864 - protein, 13 aa, Homo sapiens
  CDR3 for beta chain variable domain of TCR clone 432 (TRBV20-1, TRBJ2-2)
CSALSGGAGELFF

SEQ ID NO: 865 - protein, 13 aa, Homo sapiens
  CDR3 for alpha chain variable domain of TCR clone 433 (TRAV13-2, TRAJ13)
CAERPGGYQKVTF

SEQ ID NO: 866 - protein, 15 aa, Homo sapiens
  CDR3 for beta chain variable domain of TCR clone 433 (TRBV11-3, TRBJ2-7)
CASSPGPASSYEQYF

SEQ ID NO: 867 - protein, 13 aa, Homo sapiens
  CDR3 for alpha chain variable domain of TCR clone 434 (TRAV30, TRAJ24)
CGTVTDSWGKLQF

SEQ ID NO: 868 - protein, 15 aa, Homo sapiens
  CDR3 for beta chain variable domain of TCR clone 434 (TRBV25-1, TRBJ1-4)
CASSPGDSTNEKLFF

SEQ ID NO: 869 - protein, 14 aa, Homo sapiens
  CDR3 for alpha chain variable domain of TCR clone 435 (TRAV12-2, TRAJ6)
CASKWGGGSYIPTF

SEQ ID NO: 870 - protein, 13 aa, Homo sapiens
  CDR3 for beta chain variable domain of TCR clone 435 (TRBV2, TRBJ1-1)
CASSEGGNTEAFF

SEQ ID NO: 871 - protein, 14 aa, Homo sapiens
  CDR3 for alpha chain variable domain of TCR clone 436 (TRAV2, TRAJ22)
CAVGRGGSARQLTF

SEQ ID NO: 872 - protein, 12 aa, Homo sapiens
  CDR3 for beta chain variable domain of TCR clone 436 (TRBV19, TRBJ2-1)
CASSMQDTEQFF

SEQ ID NO: 873 - protein, 18 aa, Homo sapiens
  CDR3 for alpha chain variable domain of TCR clone 437 (TRAV17, TRAJ45)
CATSLDLYSGGGADGLTF

SEQ ID NO: 874 - protein, 15 aa, Homo sapiens
  CDR3 for beta chain variable domain of TCR clone 437 (TRBV11-2, TRBJ2-1)
CASSKNRGLIYEQFF

SEQ ID NO: 875 - protein, 16 aa, Homo sapiens
  CDR3 for alpha chain variable domain of TCR clone 438 (TRAV3, TRAJ5)
CAVRNLMDTGRRALTF

SEQ ID NO: 876 - protein, 16 aa, Homo sapiens
  CDR3 for beta chain variable domain of TCR clone 438 (TRBV4-2, TRBJ2-7)
CASSQEGLANSYEQYF

SEQ ID NO: 877 - protein, 13 aa, Homo sapiens
  CDR3 for alpha chain variable domain of TCR clone 439 (TRAV13-1, TRAJ6)
CAASKGGSYIPTF

SEQ ID NO: 878 - protein, 14 aa, Homo sapiens
  CDR3 for beta chain variable domain of TCR clone 439 (TRBV7-2, TRBJ2-1)
CASSLGVGYNEQFF

SEQ ID NO: 879 - protein, 13 aa, Homo sapiens
  CDR3 for alpha chain variable domain of TCR clone 440 (TRAV2, TRAJ24)
CAVTTDSWGKLQF

SEQ ID NO: 880 - protein, 14 aa, Homo sapiens
  CDR3 for beta chain variable domain of TCR clone 440 (TRBV13, TRBJ2-5)
CASSLGRGQETQYF

SEQ ID NO: 881 - protein, 14 aa, Homo sapiens
  CDR3 for alpha chain variable domain of TCR clone 441 (TRAV13-1, TRAJ13)
CAASRVGGYQKVTF

SEQ ID NO: 882 - protein, 17 aa, Homo sapiens
  CDR3 for beta chain variable domain of TCR clone 441 (TRBV15, TRBJ1-5)
CATSRAPPGTRNQPQHF

SEQ ID NO: 883 - protein, 16 aa, Homo sapiens
  CDR3 for alpha chain variable domain of TCR clone 442 (TRAV30, TRAJ24)
CGTEIVDADSWGKFQF

SEQ ID NO: 884 - protein, 14 aa, Homo sapiens
  CDR3 for beta chain variable domain of TCR clone 442 (TRBV7-2, TRBJ2-7)
CASSPKTSFYEQYF

SEQ ID NO: 885 - protein, 13 aa, Homo sapiens
  CDR3 for alpha chain variable domain of TCR clone 443 (TRAV12-1, TRAJ7)
CVVNMRGNNRLAF

SEQ ID NO: 886 - protein, 15 aa, Homo sapiens
  CDR3 for beta chain variable domain of TCR clone 443 (TRBV27, TRBJ2-3)
CASSLGLAATDTQYF

SEQ ID NO: 887 - protein, 12 aa, Homo sapiens
  CDR3 for alpha chain variable domain of TCR clone 444 (TRAV12-3, TRAJ42)
CAPGGSQGNLIF

SEQ ID NO: 888 - protein, 13 aa, Homo sapiens
  CDR3 for beta chain variable domain of TCR clone 444 (TRBV5-7, TRBJ2-6)
CASTSSGANVLTF

SEQ ID NO: 889 - protein, 13 aa, Homo sapiens
  CDR3 for alpha chain variable domain of TCR clone 445 (TRAV17, TRAJ4)
CATKSGGYNKLIF

SEQ ID NO: 890 - protein, 14 aa, Homo sapiens
  CDR3 for beta chain variable domain of TCR clone 445 (TRBV20-1, TRBJ1-5)
CSARDDRGNQPQHF

SEQ ID NO: 891 - protein, 19 aa, Homo sapiens
  CDR3 for alpha chain variable domain of TCR clone 446 (TRAV38-1, TRAJ53)
CAFMKHGLESGGSNYKLTF

SEQ ID NO: 892 - protein, 13 aa, Homo sapiens
  CDR3 for beta chain variable domain of TCR clone 446 (TRBV19, TRBJ2-7)
CASSPRQSYEQYF

SEQ ID NO: 893 - protein, 14 aa, Homo sapiens
  CDR3 for alpha chain variable domain of TCR clone 447 (TRAV1-2, TRAJ16)
CAVNRFSDGQKLLF

SEQ ID NO: 894 - protein, 14 aa, Homo sapiens
  CDR3 for beta chain variable domain of TCR clone 447 (TRBV13, TRBJ2-5)
CASSLGRGQETQYF

SEQ ID NO: 895 - protein, 11 aa, Homo sapiens
  CDR3 for alpha chain variable domain of TCR clone 448 (TRAV26-1, TRAJ27)
CIDPNAGKSTF

SEQ ID NO: 896 - protein, 18 aa, Homo sapiens
  CDR3 for beta chain variable domain of TCR clone 448 (TRBV7-9, TRBJ2-6)
CASSFPGAGISGANVLTF

SEQ ID NO: 897 - protein, 13 aa, Homo sapiens
  CDR3 for alpha chain variable domain of TCR clone 449 (TRAV27, TRAJ54)
CAGAGQGAQKLVF

SEQ ID NO: 898 - protein, 15 aa, Homo sapiens
  CDR3 for beta chain variable domain of TCR clone 449 (TRBV18, TRBJ2-6)
CASSPSYAGANVLTF

SEQ ID NO: 899 - protein, 14 aa, Homo sapiens
  CDR3 for alpha chain variable domain of TCR clone 450 (TRAV12-2, TRAJ40)
CAVKIPSGTYKYIF

SEQ ID NO: 900 - protein, 20 aa, Homo sapiens
  CDR3 for beta chain variable domain of TCR clone 450 (TRBV28, TRBJ2-1)
CASTPIGRSPGLAGGNEQFF

SEQ ID NO: 901 - protein, 15 aa, Homo sapiens
  CDR3 for alpha chain variable domain of TCR clone 451 (TRAV8-3, TRAJ23)
CAVGDRYNQGGKLIF

SEQ ID NO: 902 - protein, 22 aa, Homo sapiens
  CDR3 for beta chain variable domain of TCR clone 451 (TRBV29-1, TRBJ2-5)
TVSNMSPEDSSIYLCSAGTQYF

SEQ ID NO: 903 - protein, 15 aa, Homo sapiens
  CDR3 for alpha chain variable domain of TCR clone 452 (TRAV25, TRAJ53)
CAATGGGGSNYKLTF

SEQ ID NO: 904 - protein, 19 aa, Homo sapiens
  CDR3 for beta chain variable domain of TCR clone 452 (TRBV7-2, TRBJ2-3)
CASSFLSRNWGGGTDTQYF

SEQ ID NO: 905 - protein, 14 aa, Homo sapiens
  CDR3 for alpha chain variable domain of TCR clone 453 (TRAV12-2, TRAJ48)
CAVNAFFGNEKLTF

SEQ ID NO: 906 - protein, 13 aa, Homo sapiens
  CDR3 for beta chain variable domain of TCR clone 453 (TRBV28, TRBJ2-7)
CAGAQQGLDEQYF

SEQ ID NO: 907 - protein, 15 aa, Homo sapiens
  CDR3 for alpha chain variable domain of TCR clone 454 (TRAV17, TRAJ22)
CATVAPSGSARQLTF

SEQ ID NO: 908 - protein, 16 aa, Homo sapiens
  CDR3 for beta chain variable domain of TCR clone 454 (TRBV10-3, TRBJ2-7)
CAISADFADRPYEQYF

SEQ ID NO: 909 - protein, 14 aa, Homo sapiens
  CDR3 for alpha chain variable domain of TCR clone 455 (TRAV25, TRAJ35)
CARRMEGFGNVLHC

SEQ ID NO: 910 - protein, 13 aa, Homo sapiens
  CDR3 for beta chain variable domain of TCR clone 455 (TRBV7-2, TRBJ1-4)
CASSLAGLEKLFF

SEQ ID NO: 911 - protein, 16 aa, Homo sapiens
  CDR3 for alpha chain variable domain of TCR clone 456 (TRAV8-3, TRAJ10)
CAVGPILTGGGNKLTF

SEQ ID NO: 912 - protein, 16 aa, Homo sapiens
  CDR3 for beta chain variable domain of TCR clone 456 (TRBV7-2, TRBJ2-5)
CASSSKWLSGQETQYF

SEQ ID NO: 913 - protein, 15 aa, Homo sapiens
  CDR3 for alpha chain variable domain of TCR clone 457 (TRAV29/DV5, TRAJ29)
CAASERSSGNTPLVF

SEQ ID NO: 914 - protein, 17 aa, Homo sapiens
  CDR3 for beta chain variable domain of TCR clone 457 (TRBV4-1, TRBJ1-4)
CASSQEGPRGVEEKLFF

SEQ ID NO: 915 - protein, 16 aa, Homo sapiens
  CDR3 for alpha chain variable domain of TCR clone 458 (TRAV17, TRAJ28)
CATASVSGAGSYQLTF

SEQ ID NO: 916 - protein, 11 aa, Homo sapiens
  CDR3 for beta chain variable domain of TCR clone 458 (TRBV7-9, TRBJ2-5)
CASSLGETQYF

SEQ ID NO: 917 - protein, 14 aa, Homo sapiens
  CDR3 for alpha chain variable domain of TCR clone 459 (TRAV26-1, TRAJ38)
CIADNAGNNRKLIW

SEQ ID NO: 918 - protein, 17 aa, Homo sapiens
  CDR3 for beta chain variable domain of TCR clone 459 (TRBV7-9, TRBJ2-3)
CASSPTVAGDLTDTQYF

SEQ ID NO: 919 - protein, 18 aa, Homo sapiens
  CDR3 for alpha chain variable domain of TCR clone 460 (TRAV26-1, TRAJ22)
CIVRVALISSGSARQLTF

SEQ ID NO: 920 - protein, 13 aa, Homo sapiens
  CDR3 for beta chain variable domain of TCR clone 460 (TRBV13, TRBJ2-5)
CASSPEVGETQYF

SEQ ID NO: 921 - protein, 14 aa, Homo sapiens
  CDR3 for alpha chain variable domain of TCR clone 461 (TRAV12-2, TRAJ45)
CAVNIGGGADGLTF

SEQ ID NO: 922 - protein, 13 aa, Homo sapiens
  CDR3 for beta chain variable domain of TCR clone 461 (TRBV19, TRBJ2-2)
CASSIWSTGELFF

SEQ ID NO: 923 - protein, 19 aa, Homo sapiens
  CDR3 for alpha chain variable domain of TCR clone 462 (TRAV26-1, TRAJ52)
CIVRAHRNAGGTSYGKLTF

SEQ ID NO: 924 - protein, 15 aa, Homo sapiens
  CDR3 for beta chain variable domain of TCR clone 462 (TRBV12-4, TRBJ2-5)
CASSPPTGLQETQYF

SEQ ID NO: 925 - protein, 15 aa, Homo sapiens
  CDR3 for alpha chain variable domain of TCR clone 463 (TRAV21, TRAJ52)
CAVRGGGTSYGKLTF

SEQ ID NO: 926 - protein, 15 aa, Homo sapiens
  CDR3 for beta chain variable domain of TCR clone 463 (TRBV18, TRBJ1-5)
CASSPSDRSNQPQHF

SEQ ID NO: 927 - protein, 13 aa, Homo sapiens
  CDR3 for alpha chain variable domain of TCR clone 464 (TRAV1-2, TRAJ12)
CAVSMDSSYKLIF

SEQ ID NO: 928 - protein, 15 aa, Homo sapiens
  CDR3 for beta chain variable domain of TCR clone 464 (TRBV27, TRBJ2-5)
CASSLIPSGGETQYF

SEQ ID NO: 929 - protein, 13 aa, Homo sapiens
  CDR3 for alpha chain variable domain of TCR clone 465 (TRAV38-1, TRAJ42)
CARWGGSQGNLIF

SEQ ID NO: 930 - protein, 10 aa, Homo sapiens
  CDR3 for beta chain variable domain of TCR clone 465 (TRBV2, TRBJ2-5)
CASSAATQYF

SEQ ID NO: 931 - protein, 14 aa, Homo sapiens
  CDR3 for alpha chain variable domain of TCR clone 466 (TRAV17, TRAJ32)
CATDPGGATNKLIF

SEQ ID NO: 932 - protein, 14 aa, Homo sapiens
  CDR3 for beta chain variable domain of TCR clone 466 (TRBV2, TRBJ1-5)
CASSENRGGQPQHF

SEQ ID NO: 933 - protein, 13 aa, Homo sapiens
  CDR3 for alpha chain variable domain of TCR clone 467 (TRAV8-1, TRAJ30)
CAVIMNRDDKIIF

SEQ ID NO: 934 - protein, 14 aa, Homo sapiens
  CDR3 for beta chain variable domain of TCR clone 467 (TRBV7-2, TRBJ1-6)
CASSLQGANSPLHF

SEQ ID NO: 935 - protein, 13 aa, Homo sapiens
  CDR3 for alpha chain variable domain of TCR clone 468 (TRAV8-3, TRAJ43)
CAVVPYNNNDMRF

SEQ ID NO: 936 - protein, 17 aa, Homo sapiens
  CDR3 for beta chain variable domain of TCR clone 468 (TRBV7-7, TRBJ1-1)
CASIGDRPNLGVTEAFF

SEQ ID NO: 937 - protein, 13 aa, Homo sapiens
  CDR3 for alpha chain variable domain of TCR clone 469 (TRAV27, TRAJ42)
CAGARGSQGNLIF

SEQ ID NO: 938 - protein, 15 aa, Homo sapiens
  CDR3 for beta chain variable domain of TCR clone 469 (TRBV10-3, TRBJ2-2)
CAIRTDREDTGELFF

SEQ ID NO: 939 - protein, 17 aa, Homo sapiens
  CDR3 for alpha chain variable domain of TCR clone 470 (TRAV3, TRAJ12)
CAVRDGGRMDSSYKLIF

SEQ ID NO: 940 - protein, 14 aa, Homo sapiens
  CDR3 for beta chain variable domain of TCR clone 470 (TRBV7-9, TRBJ1-2)
CASSRQGANYGYTF

SEQ ID NO: 941 - protein, 14 aa, Homo sapiens
  CDR3 for alpha chain variable domain of TCR clone 471 (TRAV16, TRAJ37)
CALDISGNTGKLIF

SEQ ID NO: 942 - protein, 14 aa, Homo sapiens
  CDR3 for beta chain variable domain of TCR clone 471 (TRBV7-6, TRBJ2-7)
CASSFRQGADEQYF

SEQ ID NO: 943 - protein, 16 aa, Homo sapiens
  CDR3 for alpha chain variable domain of TCR clone 472 (TRAV3, TRAJ4)
CAVRPSPSGGYNKLIF

SEQ ID NO: 944 - protein, 12 aa, Homo sapiens
  CDR3 for beta chain variable domain of TCR clone 472 (TRBV7-9, TRBJ2-7)
CASSQGVYEQYF

SEQ ID NO: 945 - protein, 14 aa, Homo sapiens
  CDR3 for alpha chain variable domain of TCR clone 473 (TRAV35, TRAJ33)
CWPRGRDSNYQLIW

SEQ ID NO: 946 - protein, 11 aa, Homo sapiens
  CDR3 for beta chain variable domain of TCR clone 473 (TRBV10-3, TRBJ2-7)
CAISEGLEQYF

SEQ ID NO: 947 - protein, 14 aa, Homo sapiens
  CDR3 for alpha chain variable domain of TCR clone 474 (TRAV8-4, TRAJ48)
CAVSETFGNEKLTF

SEQ ID NO: 948 - protein, 14 aa, Homo sapiens
  CDR3 for beta chain variable domain of TCR clone 474 (TRBV13, TRBJ2-7)
CASSLKGASYEQYF

SEQ ID NO: 949 - protein, 20 aa, Homo sapiens
  CDR3 for alpha chain variable domain of TCR clone 475 (TRAV1-1, TRAJ4)
CLLLLRCEGFLSGGYNKLIF

SEQ ID NO: 950 - protein, 16 aa, Homo sapiens
  CDR3 for beta chain variable domain of TCR clone 475 (TRBV28, TRBJ1-4)
CASSPPYRGRSEKLFF

SEQ ID NO: 951 - protein, 11 aa, Homo sapiens
  CDR3 for alpha chain variable domain of TCR clone 476 (TRAV17, TRAJ36)
CAPTGANNLFF

SEQ ID NO: 952 - protein, 12 aa, Homo sapiens
  CDR3 for beta chain variable domain of TCR clone 476 (TRBV29-1, TRBJ2-3)
CSVTGGADTQYF

SEQ ID NO: 953 - protein, 11 aa, Homo sapiens
  CDR3 for alpha chain variable domain of TCR clone 477 (TRAV12-2, TRAJ29)
CAVTLRSPLVF

SEQ ID NO: 954 - protein, 16 aa, Homo sapiens
  CDR3 for beta chain variable domain of TCR clone 477 (TRBV19, TRBJ1-5)
CASSIDRGGPRQPQHF

SEQ ID NO: 955 - protein, 15 aa, Homo sapiens
  CDR3 for alpha chain variable domain of TCR clone 478 (TRAV17, TRAJ4)
CATGTWSGGYNKLIF

SEQ ID NO: 956 - protein, 13 aa, Homo sapiens
  CDR3 for beta chain variable domain of TCR clone 478 (TRBV6-6, TRBJ2-7)
CASSPKHLAEQYF

SEQ ID NO: 957 - protein, 14 aa, Homo sapiens
  CDR3 for alpha chain variable domain of TCR clone 479 (TRAV12-2, TRAJ11)
CAVNRESGYSTLTF

SEQ ID NO: 958 - protein, 10 aa, Homo sapiens
  CDR3 for beta chain variable domain of TCR clone 479 (TRBV20-1, TRBJ2-5)
CSARFETQYF

SEQ ID NO: 959 - protein, 15 aa, Homo sapiens
  CDR3 for alpha chain variable domain of TCR clone 480 (TRAV3, TRAJ17)
CAVSPKEAAGNKLTF

SEQ ID NO: 960 - protein, 12 aa, Homo sapiens
  CDR3 for beta chain variable domain of TCR clone 480 (TRBV7-9, TRBJ1-6)
CASSLMTSPLHF

SEQ ID NO: 961 - protein, 13 aa, Homo sapiens
  CDR3 for alpha chain variable domain of TCR clone 481 (TRAV26-1, TRAJ33)
CIVRVEGNYQLIW

SEQ ID NO: 962 - protein, 16 aa, Homo sapiens
  CDR3 for beta chain variable domain of TCR clone 481 (TRBV15, TRBJ2-7)
CATSRDRGRRRGEQYF

SEQ ID NO: 963 - protein, 12 aa, Homo sapiens
  CDR3 for alpha chain variable domain of TCR clone 482 (TRAV2, TRAJ5)
CALDTGRRALTF

SEQ ID NO: 964 - protein, 15 aa, Homo sapiens
  CDR3 for beta chain variable domain of TCR clone 482 (TRBV10-3, TRBJ2-1)
CAISDVQDRAYEQFF

SEQ ID NO: 965 - protein, 11 aa, Homo sapiens
  CDR3 for alpha chain variable domain of TCR clone 483 (TRAV21, TRAJ34)
CAVTNTDKLIF

SEQ ID NO: 966 - protein, 16 aa, Homo sapiens
  CDR3 for beta chain variable domain of TCR clone 483 (TRBV18, TRBJ1-1)
CASSPGVGGRGGEAFF

SEQ ID NO: 967 - protein, 12 aa, Homo sapiens
  CDR3 for alpha chain variable domain of TCR clone 484 (TRAV1-1, TRAJ9)
CAVDTGGFKTIF

SEQ ID NO: 968 - protein, 14 aa, Homo sapiens
  CDR3 for beta chain variable domain of TCR clone 484 (TRBV7-8, TRBJ2-5)
CASSATGGQETQYF

SEQ ID NO: 969 - protein, 15 aa, Homo sapiens
  CDR3 for alpha chain variable domain of TCR clone 485 (TRAV21, TRAJ32)
CAVNSYGGATNKLIF

SEQ ID NO: 970 - protein, 18 aa, Homo sapiens
  CDR3 for beta chain variable domain of TCR clone 485 (TRBV7-9, TRBJ2-1)
CASSTGLAEGSSYNEQFF

SEQ ID NO: 971 - protein, 15 aa, Homo sapiens
  CDR3 for alpha chain variable domain of TCR clone 486 (TRAV8-3, TRAJ6)
CAVGPLGGGSYIPTF

SEQ ID NO: 972 - protein, 14 aa, Homo sapiens
  CDR3 for beta chain variable domain of TCR clone 486 (TRBV19, TRBJ2-2)
CASSTGQGAGELFF

SEQ ID NO: 973 - protein, 18 aa, Homo sapiens
  CDR3 for alpha chain variable domain of TCR clone 487 (TRAV3, TRAJ17)
CAVRARRGGRSCRQQANF

SEQ ID NO: 974 - protein, 14 aa, Homo sapiens
  CDR3 for beta chain variable domain of TCR clone 487 (TRBV4-1, TRBJ2-2)
CASSQAVNTGELFF

SEQ ID NO: 975 - protein, 13 aa, Homo sapiens
  CDR3 for alpha chain variable domain of TCR clone 488 (TRAV12-2, TRAJ10)
CAVPTGGGNKLTF

SEQ ID NO: 976 - protein, 11 aa, Homo sapiens
  CDR3 for beta chain variable domain of TCR clone 488 (TRBV6-1, TRBJ2-1)
CASISSNEQFF

SEQ ID NO: 977 - protein, 13 aa, Homo sapiens
  CDR3 for alpha chain variable domain of TCR clone 489 (TRAV13-2, TRAJ40)
CAEFTSGTYKYIF

SEQ ID NO: 978 - protein, 14 aa, Homo sapiens
  CDR3 for beta chain variable domain of TCR clone 489 (TRBV10-2, TRBJ1-5)
CASSSTGRNQPQHF

SEQ ID NO: 979 - protein, 12 aa, Homo sapiens
  CDR3 for alpha chain variable domain of TCR clone 490 (TRAV13-1, TRAJ48)
CAANFGNEKLTF

SEQ ID NO: 980 - protein, 13 aa, Homo sapiens
  CDR3 for beta chain variable domain of TCR clone 490 (TRBV7-3, TRBJ1-1)
CASSQDWGAEAFF

SEQ ID NO: 981 - protein, 14 aa, Homo sapiens
  CDR3 for alpha chain variable domain of TCR clone 491 (TRAV17, TRAJ56)
CATVPAGANSKLTF

SEQ ID NO: 982 - protein, 13 aa, Homo sapiens
  CDR3 for beta chain variable domain of TCR clone 491 (TRBV12-4, TRBJ2-2)
CASSITGSGELFF

SEQ ID NO: 983 - protein, 14 aa, Homo sapiens
  CDR3 for alpha chain variable domain of TCR clone 492 (TRAV1-2, TRAJ16)
CAVNRFSDGQKLLF

SEQ ID NO: 984 - protein, 15 aa, Homo sapiens
  CDR3 for beta chain variable domain of TCR clone 492 (TRBV20-1, TRBJ2-7)
CSARDRVSGMDEQYF

SEQ ID NO: 985 - protein, 14 aa, Homo sapiens
  CDR3 for alpha chain variable domain of TCR clone 493 (TRAV12-1, TRAJ23)
CVVIVYNQGGKLIF

SEQ ID NO: 986 - protein, 15 aa, Homo sapiens
  CDR3 for beta chain variable domain of TCR clone 493 (TRBV20-1, TRBJ1-5)
CSAKPPGQGPQPQHF

SEQ ID NO: 987 - protein, 14 aa, Homo sapiens
  CDR3 for alpha chain variable domain of TCR clone 494 (TRAV20, TRAJ10)
CAVRVEGGGNKLTF

SEQ ID NO: 988 - protein, 18 aa, Homo sapiens
  CDR3 for beta chain variable domain of TCR clone 494 (TRBV24-1, TRBJ2-1)
CATSDLMFLGRGVHEQFF

SEQ ID NO: 989 - protein, 16 aa, Homo sapiens
  CDR3 for alpha chain variable domain of TCR clone 495 (TRAV22, TRAJ45)
CAVERGKRGGADGLTF

SEQ ID NO: 990 - protein, 13 aa, Homo sapiens
  CDR3 for beta chain variable domain of TCR clone 495 (TRBV27, TRBJ1-1)
CASSLSIGAEAFF

SEQ ID NO: 991 - protein, 16 aa, Homo sapiens
  CDR3 for alpha chain variable domain of TCR clone 496 (TRAV20, TRAJ10)
CAVLRGLTGGGNKLTF

SEQ ID NO: 992 - protein, 14 aa, Homo sapiens
  CDR3 for beta chain variable domain of TCR clone 496 (TRBV19, TRBJ1-5)
CASRAPDSFLSQHF

SEQ ID NO: 993 - protein, 14 aa, Homo sapiens
  CDR3 for alpha chain variable domain of TCR clone 497 (TRAV12-3, TRAJ6)
CAMSATGGSYIPTF

SEQ ID NO: 994 - protein, 16 aa, Homo sapiens
  CDR3 for beta chain variable domain of TCR clone 497 (TRBV4-2, TRBJ2-1)
CASSPRAGQGANEQFF

SEQ ID NO: 995 - protein, 12 aa, Homo sapiens
  CDR3 for alpha chain variable domain of TCR clone 498 (TRAV21, TRAJ31)
CVLAGNNARLMF

SEQ ID NO: 996 - protein, 16 aa, Homo sapiens
  CDR3 for beta chain variable domain of TCR clone 498 (TRBV27, TRBJ2-5)
CASSFGPGGTKETQYF

SEQ ID NO: 997 - protein, 14 aa, Homo sapiens
  CDR3 for alpha chain variable domain of TCR clone 499 (TRAV9-2, TRAJ39)
CALYIYNAGNMLTF

SEQ ID NO: 998 - protein, 14 aa, Homo sapiens
  CDR3 for beta chain variable domain of TCR clone 499 (TRBV6-1, TRBJ1-3)
CASVQGGGGNTIYF

SEQ ID NO: 999 - protein, 13 aa, Homo sapiens
  CDR3 for alpha chain variable domain of TCR clone 500 (TRAV17, TRAJ5)
CAPMDTGRRALTF

SEQ ID NO: 1000 - protein, 15 aa, Homo sapiens
  CDR3 for beta chain variable domain of TCR clone 500 (TRBV6-6, TRBJ2-5)
CASSPGGGLEETQYF

SEQ ID NO: 1001 - protein, 13 aa, Homo sapiens
  CDR3 for alpha chain variable domain of TCR clone 501 (TRAV13-1, TRAJ12)
CAASPDSSYKLIF

SEQ ID NO: 1002 - protein, 16 aa, Homo sapiens
  CDR3 for beta chain variable domain of TCR clone 501 (TRBV15, TRBJ2-1)
CATSRERLAGAYEQFF

SEQ ID NO: 1003 - protein, 16 aa, Homo sapiens
  CDR3 for alpha chain variable domain of TCR clone 502 (TRAV30, TRAJ24)
CGTEIVDADSWGKFQF

SEQ ID NO: 1004 - protein, 19 aa, Homo sapiens
  CDR3 for beta chain variable domain of TCR clone 502 (TRBV25-1, TRBJ2-2)
CAILVYRVDRGRKTGELFF

SEQ ID NO: 1005 - protein, 12 aa, Homo sapiens
  CDR3 for alpha chain variable domain of TCR clone 503 (TRAV29/DV5, TRAJ15)
CASNQAGTALIF

SEQ ID NO: 1006 - protein, 15 aa, Homo sapiens
  CDR3 for beta chain variable domain of TCR clone 503 (TRBV11-2, TRBJ2-2)
CASSSDRVNAGELFF

SEQ ID NO: 1007 - protein, 18 aa, Homo sapiens
  CDR3 for alpha chain variable domain of TCR clone 504 (TRAV1-2, TRAJ18)
CAVRDMGDRGSTLGRLYF

SEQ ID NO: 1008 - protein, 16 aa, Homo sapiens
  CDR3 for beta chain variable domain of TCR clone 504 (TRBV29-1, TRBJ1-2)
CSVEANRDIANYGYTF

SEQ ID NO: 1009 - protein, 13 aa, Homo sapiens
  CDR3 for alpha chain variable domain of TCR clone 505 (TRAV27, TRAJ41)
CAGEGNSGYALNF

SEQ ID NO: 1010 - protein, 14 aa, Homo sapiens
  CDR3 for beta chain variable domain of TCR clone 505 (TRBV25-1, TRBJ1-1)
CASTHLGGNTEAFF

SEQ ID NO: 1011 - protein, 15 aa, Homo sapiens
  CDR3 for alpha chain variable domain of TCR clone 506 (TRAV26-1, TRAJ23)
CIVRVAGYQGGKLIF

SEQ ID NO: 1012 - protein, 18 aa, Homo sapiens
  CDR3 for beta chain variable domain of TCR clone 506 (TRBV28, TRBJ2-1)
CASSSTSGRANSYNEQFF

SEQ ID NO: 1013 - protein, 13 aa, Homo sapiens
  CDR3 for alpha chain variable domain of TCR clone 507 (TRAV12-2, TRAJ6)
CAVNVSRKLHTYI

SEQ ID NO: 1014 - protein, 12 aa, Homo sapiens
  CDR3 for beta chain variable domain of TCR clone 507 (TRBV29-1, TRBJ2-3)
CSVTGGADTQYF

SEQ ID NO: 1015 - protein, 14 aa, Homo sapiens
  CDR3 for alpha chain variable domain of TCR clone 508 (TRAV26-1, TRAJ21)
CIVRPPYNFNKFYF

SEQ ID NO: 1016 - protein, 14 aa, Homo sapiens
  CDR3 for beta chain variable domain of TCR clone 508 (TRBV11-3, TRBJ2-1)
CASSATTSGSIQFF

SEQ ID NO: 1017 - protein, 13 aa, Homo sapiens
  CDR3 for alpha chain variable domain of TCR clone 509 (TRAV26-1, TRAJ29)
CIVRRSGNTPLVF

SEQ ID NO: 1018 - protein, 16 aa, Homo sapiens
  CDR3 for beta chain variable domain of TCR clone 509 (TRBV11-2, TRBJ2-7)
CASSLAPTGVNYEQYF

SEQ ID NO: 1019 - protein, 10 aa, Homo sapiens
  CDR3 for alpha chain variable domain of TCR clone 510 (TRAV1-2, TRAJ23)
CAGQGGKLIF

SEQ ID NO: 1020 - protein, 16 aa, Homo sapiens
  CDR3 for beta chain variable domain of TCR clone 510 (TRBV11-2, TRBJ1-1)
CASSLRQGGEHSKAFF

SEQ ID NO: 1021 - protein, 13 aa, Homo sapiens
  CDR3 for alpha chain variable domain of TCR clone 511 (TRAV12-1, TRAJ31)
CVVNMNNNARLMF

SEQ ID NO: 1022 - protein, 15 aa, Homo sapiens
  CDR3 for beta chain variable domain of TCR clone 511 (TRBV4-1, TRBJ1-2)
CASSQGQGAAYGYTF

SEQ ID NO: 1023 - protein, 15 aa, Homo sapiens
  CDR3 for alpha chain variable domain of TCR clone 512 (TRAV12-1, TRAJ9)
CVVSFGDTGGFKTIF

SEQ ID NO: 1024 - protein, 13 aa, Homo sapiens
  CDR3 for beta chain variable domain of TCR clone 512 (TRBV2, TRBJ1-4)
CASSERAGEKLFF

SEQ ID NO: 1025 - protein, 13 aa, Homo sapiens
  CDR3 for alpha chain variable domain of TCR clone 513 (TRAV27, TRAJ17)
CAGAATAGNKLTF

SEQ ID NO: 1026 - protein, 15 aa, Homo sapiens
  CDR3 for beta chain variable domain of TCR clone 513 (TRBV5-1, TRBJ2-3)
CASRNQAGSTDTQYF

SEQ ID NO: 1027 - protein, 14 aa, Homo sapiens
  CDR3 for alpha chain variable domain of TCR clone 514 (TRAV17, TRAJ6)
CATDASGGSYIPTF

SEQ ID NO: 1028 - protein, 19 aa, Homo sapiens
  CDR3 for beta chain variable domain of TCR clone 514 (TRBV4-3, TRBJ2-7)
CASSQEFIGWQVTPYEQYF

SEQ ID NO: 1029 - protein, 17 aa, Homo sapiens
  CDR3 for alpha chain variable domain of TCR clone 515 (TRAV4, TRAJ18)
CLVGERSVGSTLGRLYF

SEQ ID NO: 1030 - protein, 14 aa, Homo sapiens
  CDR3 for beta chain variable domain of TCR clone 515 (TRBV6-5, TRBJ1-2)
CASSYDGTGGGYTF

SEQ ID NO: 1031 - protein, 13 aa, Homo sapiens
  CDR3 for alpha chain variable domain of TCR clone 516 (TRAV35, TRAJ21)
CAGQLSNFNKFYF

SEQ ID NO: 1032 - protein, 11 aa, Homo sapiens
  CDR3 for beta chain variable domain of TCR clone 516 (TRBV7-6, TRBJ2-5)
CASSSQETQYF

SEQ ID NO: 1033 - protein, 14 aa, Homo sapiens
  CDR3 for alpha chain variable domain of TCR clone 517 (TRAV12-3, TRAJ56)
CAMSVTGANSKLTF

SEQ ID NO: 1034 - protein, 17 aa, Homo sapiens
  CDR3 for beta chain variable domain of TCR clone 517 (TRBV20-1, TRBJ2-3)
CSASLLGRGGSADTQYF

SEQ ID NO: 1035 - protein, 12 aa, Homo sapiens
  CDR3 for alpha chain variable domain of TCR clone 518 (TRAV16, TRAJ56)
CAPTGANSKLTF

SEQ ID NO: 1036 - protein, 17 aa, Homo sapiens
  CDR3 for beta chain variable domain of TCR clone 518 (TRBV27, TRBJ2-6)
CASSLTGFASGANVLTF

SEQ ID NO: 1037 - protein, 12 aa, Homo sapiens
  CDR3 for alpha chain variable domain of TCR clone 519 (TRAV12-3, TRAJ17)
CAMTLTGNKLTF

SEQ ID NO: 1038 - protein, 12 aa, Homo sapiens
  CDR3 for beta chain variable domain of TCR clone 519 (TRBV2, TRBJ2-1)
CAYGPPGNEQFF

SEQ ID NO: 1039 - protein, 13 aa, Homo sapiens
  CDR3 for alpha chain variable domain of TCR clone 520 (TRAV2, TRAJ29)
CAAGNSGNTPLVF

SEQ ID NO: 1040 - protein, 16 aa, Homo sapiens
  CDR3 for beta chain variable domain of TCR clone 520 (TRBV7-9, TRBJ1-2)
CASSPGGGAINYGYTF

SEQ ID NO: 1041 - protein, 16 aa, Homo sapiens
  CDR3 for alpha chain variable domain of TCR clone 521 (TRAV21, TRAJ52)
CAVTNAGGTSYGKLTF

SEQ ID NO: 1042 - protein, 13 aa, Homo sapiens
  CDR3 for beta chain variable domain of TCR clone 521 (TRBV20-1, TRBJ2-3)
CSARLAGTDTQYF

SEQ ID NO: 1043 - protein, 14 aa, Homo sapiens
  CDR3 for alpha chain variable domain of TCR clone 522 (TRAV1-2, TRAJ16)
CAVNRFSDGQKLLF

SEQ ID NO: 1044 - protein, 14 aa, Homo sapiens
  CDR3 for beta chain variable domain of TCR clone 522 (TRBV19, TRBJ2-1)
CASPTFVLSGEQFF

SEQ ID NO: 1045 - protein, 11 aa, Homo sapiens
  CDR3 for alpha chain variable domain of TCR clone 523 (TRAV12-1, TRAJ15)
CVVNAGTALIF

SEQ ID NO: 1046 - protein, 16 aa, Homo sapiens
  CDR3 for beta chain variable domain of TCR clone 523 (TRBV28, TRBJ2-1)
CASSSRVRDSYNEQFF

SEQ ID NO: 1047 - protein, 12 aa, Homo sapiens
  CDR3 for alpha chain variable domain of TCR clone 524 (TRAV10, TRAJ34)
CVVSGKHRQAHL

SEQ ID NO: 1048 - protein, 14 aa, Homo sapiens
  CDR3 for beta chain variable domain of TCR clone 524 (TRBV19, TRBJ2-1)
CASPTFVLSGEQFF

SEQ ID NO: 1049 - protein, 16 aa, Homo sapiens
  CDR3 for alpha chain variable domain of TCR clone 525 (TRAV30, TRAJ24)
CGTEIVDADSWGKFQF

SEQ ID NO: 1050 - protein, 12 aa, Homo sapiens
  CDR3 for beta chain variable domain of TCR clone 525 (TRBV11-2, TRBJ2-2)
CASSLPTGELFF

SEQ ID NO: 1051 - protein, 14 aa, Homo sapiens
  CDR3 for alpha chain variable domain of TCR clone 526 (TRAV8-3, TRAJ6)
CAVGASGGSYIPTF

SEQ ID NO: 1052 - protein, 17 aa, Homo sapiens
  CDR3 for beta chain variable domain of TCR clone 526 (TRBV18, TRBJ2-2)
CASSPSDPWQNTGELFF

SEQ ID NO: 1053 - protein, 14 aa, Homo sapiens
  CDR3 for alpha chain variable domain of TCR clone 527 (TRAV1-2, TRAJ8)
CAVREDTGFQKLVF

SEQ ID NO: 1054 - protein, 15 aa, Homo sapiens
  CDR3 for beta chain variable domain of TCR clone 527 (TRBV20-1, TRBJ2-7)
CSARDRVSGMDEQYF

SEQ ID NO: 1055 - protein, 15 aa, Homo sapiens
  CDR3 for alpha chain variable domain of TCR clone 528 (TRAV3, TRAJ45)
CAVRTPWGGADGLTF

SEQ ID NO: 1056 - protein, 16 aa, Homo sapiens
  CDR3 for beta chain variable domain of TCR clone 528 (TRBV6-1, TRBJ2-2)
CASSFGQGANTGELFF

SEQ ID NO: 1057 - protein, 14 aa, Homo sapiens
  CDR3 for alpha chain variable domain of TCR clone 529 (TRAV1-2, TRAJ16)
CAVNRFSDGQKLLF

SEQ ID NO: 1058 - protein, 13 aa, Homo sapiens
  CDR3 for beta chain variable domain of TCR clone 529 (TRBV19, TRBJ1-2)
CASSVPGQDGYTF

SEQ ID NO: 1059 - protein, 13 aa, Homo sapiens
  CDR3 for alpha chain variable domain of TCR clone 530 (TRAV27, TRAJ8)
CAGGPTGFQKLVF

SEQ ID NO: 1060 - protein, 15 aa, Homo sapiens
  CDR3 for beta chain variable domain of TCR clone 530 (TRBV6-1, TRBJ2-7)
CASSESMGDFYEQYF

SEQ ID NO: 1061 - protein, 12 aa, Homo sapiens
  CDR3 for alpha chain variable domain of TCR clone 531 (TRAV8-3, TRAJ40)
CAVTSGTYKYIF

SEQ ID NO: 1062 - protein, 14 aa, Homo sapiens
  CDR3 for beta chain variable domain of TCR clone 531 (TRBV12-4, TRBJ2-3)
CASSGQGSTDTQYF

SEQ ID NO: 1063 - protein, 12 aa, Homo sapiens
  CDR3 for alpha chain variable domain of TCR clone 532 (TRAV27, TRAJ42)
CAGGGSQGNLIF

SEQ ID NO: 1064 - protein, 13 aa, Homo sapiens
  CDR3 for beta chain variable domain of TCR clone 532 (TRBV19, TRBJ2-7)
CASSIRSSYEQYF

SEQ ID NO: 1065 - protein, 16 aa, Homo sapiens
  CDR3 for alpha chain variable domain of TCR clone 533 (TRAV4, TRAJ18)
CCVLLIGGSTLGRLYF

SEQ ID NO: 1066 - protein, 12 aa, Homo sapiens
  CDR3 for beta chain variable domain of TCR clone 533 (TRBV6-3, TRBJ2-7)
CASSLTPYEQYF

SEQ ID NO: 1067 - protein, 13 aa, Homo sapiens
  CDR3 for alpha chain variable domain of TCR clone 534 (TRAV35, TRAJ48)
CAGHEFGNEKLTF

SEQ ID NO: 1068 - protein, 14 aa, Homo sapiens
  CDR3 for beta chain variable domain of TCR clone 534 (TRBV19, TRBJ2-1)
CASPTFVLSGEQFF

SEQ ID NO: 1069 - protein, 15 aa, Homo sapiens
  CDR3 for alpha chain variable domain of TCR clone 535 (TRAV26-1, TRAJ48)
CIVRVGDFGNEKLTF

SEQ ID NO: 1070 - protein, 16 aa, Homo sapiens
  CDR3 for beta chain variable domain of TCR clone 535 (TRBV4-1, TRBJ2-3)
CASSQRAGGLTDTQYF

SEQ ID NO: 1071 - protein, 15 aa, Homo sapiens
  CDR3 for alpha chain variable domain of TCR clone 536 (TRAV38-1, TRAJ57)
CAFMDSQGGSEKLVF

SEQ ID NO: 1072 - protein, 16 aa, Homo sapiens
  CDR3 for beta chain variable domain of TCR clone 536 (TRBV10-3, TRBJ2-1)
CAIRGGGRGDYNEQFF

SEQ ID NO: 1073 - protein, 13 aa, Homo sapiens
  CDR3 for alpha chain variable domain of TCR clone 537 (TRAV1-2, TRAJ9)
CAALNTGGFKTIF

SEQ ID NO: 1074 - protein, 14 aa, Homo sapiens
  CDR3 for beta chain variable domain of TCR clone 537 (TRBV13, TRBJ2-3)
CASSSGSPTDTQYF

SEQ ID NO: 1075 - protein, 11 aa, Homo sapiens
  CDR3 for alpha chain variable domain of TCR clone 538 (TRAV2, TRAJ13)
CASGGYQKVTF

SEQ ID NO: 1076 - protein, 16 aa, Homo sapiens
  CDR3 for beta chain variable domain of TCR clone 538 (TRBV19, TRBJ2-1)
CASSKAGPSSYNEQFF

SEQ ID NO: 1077 - protein, 12 aa, Homo sapiens
  CDR3 for alpha chain variable domain of TCR clone 539 (TRAV20, TRAJ54)
CAVQEGAQKLVF

SEQ ID NO: 1078 - protein, 17 aa, Homo sapiens
  CDR3 for beta chain variable domain of TCR clone 539 (TRBV13, TRBJ2-3)
CASSLSRVAGGRNTQYF

SEQ ID NO: 1079 - protein, 16 aa, Homo sapiens
  CDR3 for alpha chain variable domain of TCR clone 540 (TRAV3, TRAJ28)
CAVLPRSGAGSYQLTF

SEQ ID NO: 1080 - protein, 13 aa, Homo sapiens
  CDR3 for beta chain variable domain of TCR clone 540 (TRBV12-4, TRBJ2-5)
CASRLAVQETQYF

SEQ ID NO: 1081 - protein, 15 aa, Homo sapiens
  CDR3 for alpha chain variable domain of TCR clone 541 (TRAV1-2, TRAJ28)
CAVQYSGAGSYQLTF

SEQ ID NO: 1082 - protein, 13 aa, Homo sapiens
  CDR3 for beta chain variable domain of TCR clone 541 (TRBV20-1, TRBJ2-7)
CSATHTSGYEQYF

SEQ ID NO: 1083 - protein, 10 aa, Homo sapiens
  CDR3 for alpha chain variable domain of TCR clone 542 (TRAV12-3, TRAJ18)
CAMSAEAQPW

SEQ ID NO: 1084 - protein, 13 aa, Homo sapiens
  CDR3 for beta chain variable domain of TCR clone 542 (TRBV15, TRBJ1-6)
CATSGGLNSPLHF

SEQ ID NO: 1085 - protein, 17 aa, Homo sapiens
  CDR3 for alpha chain variable domain of TCR clone 543 (TRAV3, TRAJ38)
CAVRDCLNAGNNRKLIW

SEQ ID NO: 1086 - protein, 13 aa, Homo sapiens
  CDR3 for beta chain variable domain of TCR clone 543 (TRBV23-1, TRBJ1-4)
CASRGKFNEKLFF

SEQ ID NO: 1087 - protein, 16 aa, Homo sapiens
  CDR3 for alpha chain variable domain of TCR clone 544 (TRAV12-3, TRAJ53)
CAMSPGSGGSNYKLTF

SEQ ID NO: 1088 - protein, 17 aa, Homo sapiens
  CDR3 for beta chain variable domain of TCR clone 544 (TRBV28, TRBJ2-5)
CASSTPEGDALQETQYF

SEQ ID NO: 1089 - protein, 13 aa, Homo sapiens
  CDR3 for alpha chain variable domain of TCR clone 545 (TRAV20, TRAJ34)
CAVSSYNTDKLIF

SEQ ID NO: 1090 - protein, 13 aa, Homo sapiens
  CDR3 for beta chain variable domain of TCR clone 545 (TRBV7-9, TRBJ1-2)
CASSLKQNYGYTF

SEQ ID NO: 1091 - protein, 13 aa, Homo sapiens
  CDR3 for alpha chain variable domain of TCR clone 546 (TRAV20, TRAJ40)
CAVPFSGTYKYIF

SEQ ID NO: 1092 - protein, 13 aa, Homo sapiens
  CDR3 for beta chain variable domain of TCR clone 546 (TRBV15, TRBJ2-5)
CATSQIGEETQYF

SEQ ID NO: 1093 - protein, 16 aa, Homo sapiens
  CDR3 for alpha chain variable domain of TCR clone 547 (TRAV3, TRAJ3)
CAVRDRAKSSASKIIF

SEQ ID NO: 1094 - protein, 13 aa, Homo sapiens
  CDR3 for beta chain variable domain of TCR clone 547 (TRBV10-3, TRBJ2-7)
CASKLAVNYEQYF

SEQ ID NO: 1095 - protein, 14 aa, Homo sapiens
  CDR3 for alpha chain variable domain of TCR clone 548 (TRAV35, TRAJ13)
CAGRSPGGYQKVTF

SEQ ID NO: 1096 - protein, 14 aa, Homo sapiens
  CDR3 for beta chain variable domain of TCR clone 548 (TRBV19, TRBJ2-2)
CASSMVGLSGELFF

SEQ ID NO: 1097 - protein, 13 aa, Homo sapiens
  CDR3 for alpha chain variable domain of TCR clone 549 (TRAV16, TRAJ48)
CSPLNFGNEKLTF

SEQ ID NO: 1098 - protein, 11 aa, Homo sapiens
  CDR3 for beta chain variable domain of TCR clone 549 (TRBV7-9, TRBJ2-3)
CASSPTDTQYF

SEQ ID NO: 1099 - protein, 12 aa, Homo sapiens
  CDR3 for alpha chain variable domain of TCR clone 550 (TRAV21, TRAJ31)
CAVSPARGRLMF

SEQ ID NO: 1100 - protein, 14 aa, Homo sapiens
  CDR3 for beta chain variable domain of TCR clone 550 (TRBV28, TRBJ2-7)
CASSLLRISYEQYF

SEQ ID NO: 1101 - protein, 13 aa, Homo sapiens
  CDR3 for alpha chain variable domain of TCR clone 551 (TRAV8-1, TRAJ28)
CAVSGAGSYQLTF

SEQ ID NO: 1102 - protein, 14 aa, Homo sapiens
  CDR3 for beta chain variable domain of TCR clone 551 (TRBV7-2, TRBJ2-2)
CASRGQGAAGELFF

SEQ ID NO: 1103 - protein, 11 aa, Homo sapiens
  CDR3 for alpha chain variable domain of TCR clone 552 (TRAV35, TRAJ34)
CWARNTDKLIF

SEQ ID NO: 1104 - protein, 13 aa, Homo sapiens
  CDR3 for beta chain variable domain of TCR clone 552 (TRBV19, TRBJ2-7)
CASSIDRTYEQYF

SEQ ID NO: 1105 - protein, 15 aa, Homo sapiens
  CDR3 for alpha chain variable domain of TCR clone 553 (TRAV3, TRAJ32)
CAVSSYGGATNKLIF

SEQ ID NO: 1106 - protein, 13 aa, Homo sapiens
  CDR3 for beta chain variable domain of TCR clone 553 (TRBV20-1, TRBJ2-7)
CSARPSTNYEQYF

SEQ ID NO: 1107 - protein, 15 aa, Homo sapiens
  CDR3 for alpha chain variable domain of TCR clone 554 (TRAV14/DV4, TRAJ10)
CAMRELTGGGNKLTF

SEQ ID NO: 1108 - protein, 18 aa, Homo sapiens
  CDR3 for beta chain variable domain of TCR clone 554 (TRBV7-9, TRBJ2-7)
CASSLTTSGSRTWYEQYF

SEQ ID NO: 1109 - protein, 14 aa, Homo sapiens
  CDR3 for alpha chain variable domain of TCR clone 555 (TRAV27, TRAJ15)
CAGFDNQAGTALIF

SEQ ID NO: 1110 - protein, 11 aa, Homo sapiens
  CDR3 for beta chain variable domain of TCR clone 555 (TRBV29-1, TRBJ1-1)
CSVEVGTRTFF

SEQ ID NO: 1111 - protein, 12 aa, Homo sapiens
  CDR3 for alpha chain variable domain of TCR clone 556 (TRAV20, TRAJ39)
CAVGNAGNMLTF

SEQ ID NO: 1112 - protein, 16 aa, Homo sapiens
  CDR3 for beta chain variable domain of TCR clone 556 (TRBV15, TRBJ1-2)
CATSRGPRTGGGGYTF

SEQ ID NO: 1113 - protein, 14 aa, Homo sapiens
  CDR3 for alpha chain variable domain of TCR clone 557 (TRAV1-2, TRAJ16)
CAVNRFSDGQKLLF

SEQ ID NO: 1114 - protein, 16 aa, Homo sapiens
  CDR3 for beta chain variable domain of TCR clone 557 (TRBV7-3, TRBJ2-2)
CASSLKRGTLSGELFF

SEQ ID NO: 1115 - protein, 10 aa, Homo sapiens
  CDR3 for alpha chain variable domain of TCR clone 558 (TRAV21, TRAJ43)
CAVRIGDMRF

SEQ ID NO: 1116 - protein, 13 aa, Homo sapiens
  CDR3 for beta chain variable domain of TCR clone 558 (TRBV20-1, TRBJ2-7)
CSAPGLADYEQYF

SEQ ID NO: 1117 - protein, 16 aa, Homo sapiens
  CDR3 for alpha chain variable domain of TCR clone 559 (TRAV3, TRAJ10)
CAVRDMRAGGGNKLTF

SEQ ID NO: 1118 - protein, 14 aa, Homo sapiens
  CDR3 for beta chain variable domain of TCR clone 559 (TRBV25-1, TRBJ1-1)
CASTHLGGNTEAFF

SEQ ID NO: 1119 - protein, 14 aa, Homo sapiens
  CDR3 for alpha chain variable domain of TCR clone 560 (TRAV16, TRAJ15)
CALSFNQAGTALIF

SEQ ID NO: 1120 - protein, 16 aa, Homo sapiens
  CDR3 for beta chain variable domain of TCR clone 560 (TRBV9, TRBJ2-7)
CASSAGPDRSPYEQYF

SEQ ID NO: 1121 - protein, 18 aa, Homo sapiens
  CDR3 for alpha chain variable domain of TCR clone 561 (TRAV21, TRAJ52)
CAVRPSPAGGTSYGKLTF

SEQ ID NO: 1122 - protein, 15 aa, Homo sapiens
  CDR3 for beta chain variable domain of TCR clone 561 (TRBV7-9, TRBJ2-7)
CASSSSGLAVYEQYF

SEQ ID NO: 1123 - protein, 12 aa, Homo sapiens
  CDR3 for alpha chain variable domain of TCR clone 562 (TRAV8-4, TRAJ43)
CAVSVNNNDMRF

SEQ ID NO: 1124 - protein, 14 aa, Homo sapiens
  CDR3 for beta chain variable domain of TCR clone 562 (TRBV11-2, TRBJ1-2)
CASSLGTANYGYTF

SEQ ID NO: 1125 - protein, 13 aa, Homo sapiens
  CDR3 for alpha chain variable domain of TCR clone 563 (TRAV8-4, TRAJ48)
CAVSLFGNEKLTF

SEQ ID NO: 1126 - protein, 15 aa, Homo sapiens
  CDR3 for beta chain variable domain of TCR clone 563 (TRBV20-1, TRBJ2-7)
CSARKGLAESYEQYF

SEQ ID NO: 1127 - protein, 14 aa, Homo sapiens
  CDR3 for alpha chain variable domain of TCR clone 564 (TRAV26-1, TRAJ49)
CIVRLTNTGNQFYF

SEQ ID NO: 1128 - protein, 13 aa, Homo sapiens
  CDR3 for beta chain variable domain of TCR clone 564 (TRBV4-1, TRBJ2-7)
CASSQGQAYEQYF

SEQ ID NO: 1129 - protein, 12 aa, Homo sapiens
  CDR3 for alpha chain variable domain of TCR clone 565 (TRAV12-2, TRAJ8)
CAVNTGFQKLVF

SEQ ID NO: 1130 - protein, 15 aa, Homo sapiens
  CDR3 for beta chain variable domain of TCR clone 565 (TRBV7-8, TRBJ1-5)
CASSLERRGLEPQHF

SEQ ID NO: 1131 - protein, 14 aa, Homo sapiens
  CDR3 for alpha chain variable domain of TCR clone 566 (TRAV12-1, TRAJ30)
CVPTGTNRDDKIIF

SEQ ID NO: 1132 - protein, 11 aa, Homo sapiens
  CDR3 for beta chain variable domain of TCR clone 566 (TRBV4-1, TRBJ2-2)
CASEHTGELFF

SEQ ID NO: 1133 - protein, 14 aa, Homo sapiens
  CDR3 for alpha chain variable domain of TCR clone 567 (TRAV12-3, TRAJ58)
CAMSTETSGSRLTF

SEQ ID NO: 1134 - protein, 13 aa, Homo sapiens
  CDR3 for beta chain variable domain of TCR clone 567 (TRBV27, TRBJ2-3)
CASSWGRTDTQYF

SEQ ID NO: 1135 - protein, 16 aa, Homo sapiens
  CDR3 for alpha chain variable domain of TCR clone 568 (TRAV3, TRAJ3)
CAVRDRAKSSASKIIF

SEQ ID NO: 1136 - protein, 16 aa, Homo sapiens
  CDR3 for beta chain variable domain of TCR clone 568 (TRBV20-1, TRBJ2-4)
CSATSLAELAKNIQYF

SEQ ID NO: 1137 - protein, 12 aa, Homo sapiens
  CDR3 for alpha chain variable domain of TCR clone 569 (TRAV12-3, TRAJ20)
CAMVRGDYKLSF

SEQ ID NO: 1138 - protein, 12 aa, Homo sapiens
  CDR3 for beta chain variable domain of TCR clone 569 (TRBV6-1, TRBJ2-7)
CASSDYSYEQYF

SEQ ID NO: 1139 - protein, 13 aa, Homo sapiens
  CDR3 for alpha chain variable domain of TCR clone 570 (TRAV27, TRAJ53)
CAGQGGSNYKLTF

SEQ ID NO: 1140 - protein, 13 aa, Homo sapiens
  CDR3 for beta chain variable domain of TCR clone 570 (TRBV29-1, TRBJ1-1)
CSVESGFGTEAFF

SEQ ID NO: 1141 - protein, 13 aa, Homo sapiens
  CDR3 for alpha chain variable domain of TCR clone 571 (TRAV16, TRAJ31)
CALSAHNNARLMF

SEQ ID NO: 1142 - protein, 17 aa, Homo sapiens
  CDR3 for beta chain variable domain of TCR clone 571 (TRBV12-4, TRBJ2-1)
CASSPGLAGGRINEQFF

SEQ ID NO: 1143 - protein, 13 aa, Homo sapiens
  CDR3 for alpha chain variable domain of TCR clone 572 (TRAV25, TRAJ30)
CAGRVDRDDKIIF

SEQ ID NO: 1144 - protein, 17 aa, Homo sapiens
  CDR3 for beta chain variable domain of TCR clone 572 (TRBV7-9, TRBJ2-6)
CASSFGAGYSGANVLTF

SEQ ID NO: 1145 - protein, 15 aa, Homo sapiens
  CDR3 for alpha chain variable domain of TCR clone 573 (TRAV17, TRAJ16)
CATALRFSDGQKLLF

SEQ ID NO: 1146 - protein, 12 aa, Homo sapiens
  CDR3 for beta chain variable domain of TCR clone 573 (TRBV2, TRBJ2-7)
CASSDPDYEQYF

SEQ ID NO: 1147 - protein, 14 aa, Homo sapiens
  CDR3 for alpha chain variable domain of TCR clone 574 (TRAV20, TRAJ20)
CAVRRGYNDYKLSF

SEQ ID NO: 1148 - protein, 13 aa, Homo sapiens
  CDR3 for beta chain variable domain of TCR clone 574 (TRBV19, TRBJ2-5)
CASSETAPETQYF

SEQ ID NO: 1149 - protein, 12 aa, Homo sapiens
  CDR3 for alpha chain variable domain of TCR clone 575 (TRAV17, TRAJ30)
CVPERRDDKIIF

SEQ ID NO: 1150 - protein, 14 aa, Homo sapiens
  CDR3 for beta chain variable domain of TCR clone 575 (TRBV7-7, TRBJ2-2)
CASSRDRSTGELFF

SEQ ID NO: 1151 - protein, 12 aa, Homo sapiens
  CDR3 for alpha chain variable domain of TCR clone 576 (TRAV3, TRAJ27)
CAVRDGAGKSTF

SEQ ID NO: 1152 - protein, 13 aa, Homo sapiens
  CDR3 for beta chain variable domain of TCR clone 576 (TRBV10-3, TRBJ1-2)
CAINADLNYGYTF

SEQ ID NO: 1153 - protein, 16 aa, Homo sapiens
  CDR3 for alpha chain variable domain of TCR clone 577 (TRAV27, TRAJ52)
CAGAGAGGTSYGKLTF

SEQ ID NO: 1154 - protein, 17 aa, Homo sapiens
  CDR3 for beta chain variable domain of TCR clone 577 (TRBV24-1, TRBJ2-3)
CATSDLPSGEDTDTQYF

SEQ ID NO: 1155 - protein, 16 aa, Homo sapiens
  CDR3 for alpha chain variable domain of TCR clone 578 (TRAV12-2, TRAJ40)
CAVIRGGTSGTYKYIF

SEQ ID NO: 1156 - protein, 14 aa, Homo sapiens
  CDR3 for beta chain variable domain of TCR clone 578 (TRBV20-1, TRBJ2-5)
CSARDGRAGETQYF

SEQ ID NO: 1157 - protein, 12 aa, Homo sapiens
  CDR3 for alpha chain variable domain of TCR clone 579 (TRAV25, TRAJ11)
CAGASGYSTLTF

SEQ ID NO: 1158 - protein, 14 aa, Homo sapiens
  CDR3 for beta chain variable domain of TCR clone 579 (TRBV5-8, TRBJ2-3)
CASSLGQGTDTQYF

SEQ ID NO: 1159 - protein, 13 aa, Homo sapiens
  CDR3 for alpha chain variable domain of TCR clone 580 (TRAV26-2, TRAJ54)
CIPRVGGAQKLVF

SEQ ID NO: 1160 - protein, 16 aa, Homo sapiens
  CDR3 for beta chain variable domain of TCR clone 580 (TRBV4-1, TRBJ1-1)
CASSSMSERPNTEAFF

SEQ ID NO: 1161 - protein, 14 aa, Homo sapiens
  CDR3 for alpha chain variable domain of TCR clone 581 (TRAV17, TRAJ53)
CATDAGGSNYKLTF

SEQ ID NO: 1162 - protein, 16 aa, Homo sapiens
  CDR3 for beta chain variable domain of TCR clone 581 (TRBV4-1, TRBJ1-1)
CASSQDAGMGNTEAFF

SEQ ID NO: 1163 - protein, 16 aa, Homo sapiens
  CDR3 for alpha chain variable domain of TCR clone 582 (TRAV30, TRAJ24)
CGTEIVDADSWGKFQF

SEQ ID NO: 1164 - protein, 12 aa, Homo sapiens
  CDR3 for beta chain variable domain of TCR clone 582 (TRBV11-2, TRBJ2-1)
CASSPGNNEQFF

SEQ ID NO: 1165 - protein, 14 aa, Homo sapiens
  CDR3 for alpha chain variable domain of TCR clone 583 (TRAV23/DV6, TRAJ11)
CAASLESGYSTLTF

SEQ ID NO: 1166 - protein, 13 aa, Homo sapiens
  CDR3 for beta chain variable domain of TCR clone 583 (TRBV4-1, TRBJ2-5)
CASSLTRGETQYF

SEQ ID NO: 1167 - protein, 16 aa, Homo sapiens
  CDR3 for alpha chain variable domain of TCR clone 584 (TRAV26-2, TRAJ45)
CTTASPIGGGADGLTF

SEQ ID NO: 1168 - protein, 20 aa, Homo sapiens
  CDR3 for beta chain variable domain of TCR clone 584 (TRBV28, TRBJ2-1)
CASTPIGRSPGLAGGNEQFF

SEQ ID NO: 1169 - protein, 13 aa, Homo sapiens
  CDR3 for alpha chain variable domain of TCR clone 585 (TRAV3, TRAJ20)
CAVRSLNDYKLSF

SEQ ID NO: 1170 - protein, 13 aa, Homo sapiens
  CDR3 for beta chain variable domain of TCR clone 585 (TRBV6-1, TRBJ2-1)
CAGMDPTNNEQFF

SEQ ID NO: 1171 - protein, 14 aa, Homo sapiens
  CDR3 for alpha chain variable domain of TCR clone 586 (TRAV35, TRAJ40)
CAGSTTSGTYKYIF

SEQ ID NO: 1172 - protein, 13 aa, Homo sapiens
  CDR3 for beta chain variable domain of TCR clone 586 (TRBV20-1, TRBJ1-6)
CSAPLGVGSPLHF

SEQ ID NO: 1173 - protein, 11 aa, Homo sapiens
  CDR3 for alpha chain variable domain of TCR clone 587 (TRAV21, TRAJ9)
CAVPGGFKTIF

SEQ ID NO: 1174 - protein, 12 aa, Homo sapiens
  CDR3 for beta chain variable domain of TCR clone 587 (TRBV20-1, TRBJ2-3)
CSARVGTDTQYF

SEQ ID NO: 1175 - protein, 10 aa, Homo sapiens
  CDR3 for alpha chain variable domain of TCR clone 588 (TRAV2, TRAJ34)
CAVVNDKLIF

SEQ ID NO: 1176 - protein, 15 aa, Homo sapiens
  CDR3 for beta chain variable domain of TCR clone 588 (TRBV3-1, TRBJ2-2)
CASSQDWTRAGELFF

SEQ ID NO: 1177 - protein, 14 aa, Homo sapiens
  CDR3 for alpha chain variable domain of TCR clone 589 (TRAV17, TRAJ54)
CATDANQGAQKLVF

SEQ ID NO: 1178 - protein, 12 aa, Homo sapiens
  CDR3 for beta chain variable domain of TCR clone 589 (TRBV7-9, TRBJ2-7)
CASSIKREEQYF

SEQ ID NO: 1179 - protein, 13 aa, Homo sapiens
  CDR3 for alpha chain variable domain of TCR clone 590 (TRAV8-3, TRAJ21)
CAVGAYNFNKFYF

SEQ ID NO: 1180 - protein, 16 aa, Homo sapiens
  CDR3 for beta chain variable domain of TCR clone 590 (TRBV19, TRBJ2-1)
CASSMGGGSSYNEQFF

SEQ ID NO: 1181 - protein, 13 aa, Homo sapiens
  CDR3 for alpha chain variable domain of TCR clone 591 (TRAV3, TRAJ36)
CAVRDTGANNLFF

SEQ ID NO: 1182 - protein, 15 aa, Homo sapiens
  CDR3 for beta chain variable domain of TCR clone 591 (TRBV24-1, TRBJ2-1)
CATSGSGGFYNEQFF

SEQ ID NO: 1183 - protein, 14 aa, Homo sapiens
  CDR3 for alpha chain variable domain of TCR clone 592 (TRAV20, TRAJ22)
CAVALGGSARQLTF

SEQ ID NO: 1184 - protein, 15 aa, Homo sapiens
  CDR3 for beta chain variable domain of TCR clone 592 (TRBV7-2, TRBJ1-1)
CASSFAGDRDTEAFF

SEQ ID NO: 1185 - protein, 12 aa, Homo sapiens
  CDR3 for alpha chain variable domain of TCR clone 593 (TRAV1-2, TRAJ9)
CAGYTGGFKTIF

SEQ ID NO: 1186 - protein, 15 aa, Homo sapiens
  CDR3 for beta chain variable domain of TCR clone 593 (TRBV11-2, TRBJ2-1)
CASSPAGQSLNEQFF

SEQ ID NO: 1187 - protein, 14 aa, Homo sapiens
  CDR3 for alpha chain variable domain of TCR clone 594 (TRAV8-1, TRAJ5)
CAVRTDTGRRALTF

SEQ ID NO: 1188 - protein, 14 aa, Homo sapiens
  CDR3 for beta chain variable domain of TCR clone 594 (TRBV7-8, TRBJ2-3)
CASSFPDGQDTQYF

SEQ ID NO: 1189 - protein, 13 aa, Homo sapiens
  CDR3 for alpha chain variable domain of TCR clone 595 (TRAV27, TRAJ56)
CAGKPGANSKLTF

SEQ ID NO: 1190 - protein, 18 aa, Homo sapiens
  CDR3 for beta chain variable domain of TCR clone 595 (TRBV11-2, TRBJ2-3)
CASSLGGASRGAPNTQYF

SEQ ID NO: 1191 - protein, 10 aa, Homo sapiens
  CDR3 for alpha chain variable domain of TCR clone 596 (TRAV26-1, TRAJ22)
CIVSLNFFWF

SEQ ID NO: 1192 - protein, 15 aa, Homo sapiens
  CDR3 for beta chain variable domain of TCR clone 596 (TRBV4-2, TRBJ1-2)
CASSQRTGGRDGYTF

SEQ ID NO: 1193 - protein, 16 aa, Homo sapiens
  CDR3 for alpha chain variable domain of TCR clone 597 (TRAV30, TRAJ24)
CGTEIVDADSWGKFQF

SEQ ID NO: 1194 - protein, 13 aa, Homo sapiens
  CDR3 for beta chain variable domain of TCR clone 597 (TRBV18, TRBJ1-2)
CASSASATEGYTF

SEQ ID NO: 1195 - protein, 14 aa, Homo sapiens
  CDR3 for alpha chain variable domain of TCR clone 598 (TRAV12-1, TRAJ9)
CVVTGYTGGFKTIF

SEQ ID NO: 1196 - protein, 13 aa, Homo sapiens
  CDR3 for beta chain variable domain of TCR clone 598 (TRBV20-1, TRBJ1-1)
CSARAGGNTEAFF

SEQ ID NO: 1197 - protein, 11 aa, Homo sapiens
  CDR3 for alpha chain variable domain of TCR clone 599 (TRAV13-1, TRAJ52)
PGGTSYGKLTF

SEQ ID NO: 1198 - protein, 16 aa, Homo sapiens
  CDR3 for beta chain variable domain of TCR clone 599 (TRBV28, TRBJ2-7)
CASSPWVATGDLSQYF

SEQ ID NO: 1199 - protein, 15 aa, Homo sapiens
  CDR3 for alpha chain variable domain of TCR clone 600 (TRAV13-1, TRAJ11)
CAASNRNSGYSTLTF

SEQ ID NO: 1200 - protein, 11 aa, Homo sapiens
  CDR3 for beta chain variable domain of TCR clone 600 (TRBV20-1, TRBJ2-7)
CSARLSYEQYF

SEQ ID NO: 1201 - protein, 14 aa, Homo sapiens
  CDR3 for alpha chain variable domain of TCR clone 601 (TRAV23/DV6, TRAJ8)
CAASKATGFQKLVF

SEQ ID NO: 1202 - protein, 15 aa, Homo sapiens
  CDR3 for beta chain variable domain of TCR clone 601 (TRBV28, TRBJ2-3)
CASSPDRQGANTQYF

SEQ ID NO: 1203 - protein, 13 aa, Homo sapiens
  CDR3 for alpha chain variable domain of TCR clone 602 (TRAV27, TRAJ6)
CAGGTRGSYIPTF

SEQ ID NO: 1204 - protein, 14 aa, Homo sapiens
  CDR3 for beta chain variable domain of TCR clone 602 (TRBV6-3, TRBJ1-1)
CASSYQRRDTEAFF

SEQ ID NO: 1205 - protein, 18 aa, Homo sapiens
  CDR3 for alpha chain variable domain of TCR clone 603 (TRAV21, TRAJ52)
CAVRPSPAGGTSYGKLTF

SEQ ID NO: 1206 - protein, 16 aa, Homo sapiens
  CDR3 for beta chain variable domain of TCR clone 603 (TRBV7-3, TRBJ2-1)
CASSLEGYRSYNEQFF

SEQ ID NO: 1207 - protein, 13 aa, Homo sapiens
  CDR3 for alpha chain variable domain of TCR clone 604 (TRAV26-1, )
CIVSHRVEGFWNQ

SEQ ID NO: 1208 - protein, 14 aa, Homo sapiens
  CDR3 for beta chain variable domain of TCR clone 604 (TRBV20-1, TRBJ2-7)
CSAWTALSSYEQYF

SEQ ID NO: 1209 - protein, 15 aa, Homo sapiens
  CDR3 for alpha chain variable domain of TCR clone 605 (TRAV17, TRAJ37)
CATDHGSSNTGKLIF

SEQ ID NO: 1210 - protein, 14 aa, Homo sapiens
  CDR3 for beta chain variable domain of TCR clone 605 (TRBV7-2, TRBJ2-3)
CASSRTSGADTQYF

SEQ ID NO: 1211 - protein, 10 aa, Homo sapiens
  CDR3 for alpha chain variable domain of TCR clone 606 (TRAV23/DV6, TRAJ43)
CAAAVAALEQ

SEQ ID NO: 1212 - protein, 13 aa, Homo sapiens
  CDR3 for beta chain variable domain of TCR clone 606 (TRBV12-4, TRBJ1-2)
CASSLRQGKGYTF

SEQ ID NO: 1213 - protein, 15 aa, Homo sapiens
  CDR3 for alpha chain variable domain of TCR clone 607 (TRAV8-4, TRAJ47)
CAVSDPEEYGNKLVF

SEQ ID NO: 1214 - protein, 15 aa, Homo sapiens
  CDR3 for beta chain variable domain of TCR clone 607 (TRBV11-2, TRBJ2-1)
CASSLGPDSYNEQFF

SEQ ID NO: 1215 - protein, 15 aa, Homo sapiens
  CDR3 for alpha chain variable domain of TCR clone 608 (TRAV17, TRAJ16)
CATALRFSDGQKLLF

SEQ ID NO: 1216 - protein, 15 aa, Homo sapiens
  CDR3 for beta chain variable domain of TCR clone 608 (TRBV20-1, TRBJ1-1)
CSASRGVTGNTEAFF

SEQ ID NO: 1217 - protein, 16 aa, Homo sapiens
  CDR3 for alpha chain variable domain of TCR clone 609 (TRAV38-1, TRAJ32)
CAFMKGGGGATNKLIF

SEQ ID NO: 1218 - protein, 13 aa, Homo sapiens
  CDR3 for beta chain variable domain of TCR clone 609 (TRBV20-1, TRBJ2-5)
CSAREAFQETQYF

SEQ ID NO: 1219 - protein, 12 aa, Homo sapiens
  CDR3 for alpha chain variable domain of TCR clone 610 (TRAV9-2, TRAJ26)
CALRGYGQNFVF

SEQ ID NO: 1220 - protein, 12 aa, Homo sapiens
  CDR3 for beta chain variable domain of TCR clone 610 (TRBV29-1, TRBJ2-3)
CSVTGGADTQYF

SEQ ID NO: 1221 - protein, 11 aa, Homo sapiens
  CDR3 for alpha chain variable domain of TCR clone 611 (TRAV12-3, TRAJ49)
CAANTGNQFYF

SEQ ID NO: 1222 - protein, 12 aa, Homo sapiens
  CDR3 for beta chain variable domain of TCR clone 611 (TRBV6-3, TRBJ2-7)
CASSEPGFEQYF

SEQ ID NO: 1223 - protein, 15 aa, Homo sapiens
  CDR3 for alpha chain variable domain of TCR clone 612 (TRAV8-2, TRAJ16)
CVVSDGFSDGQKLLF

SEQ ID NO: 1224 - protein, 14 aa, Homo sapiens
  CDR3 for beta chain variable domain of TCR clone 612 (TRBV7-3, TRBJ1-1)
CASSLGTGYTEAFF

SEQ ID NO: 1225 - protein, 16 aa, Homo sapiens
  CDR3 for alpha chain variable domain of TCR clone 613 (TRAV26-2, TRAJ57)
CILRDVGSGGSEKLVF

SEQ ID NO: 1226 - protein, 13 aa, Homo sapiens
  CDR3 for beta chain variable domain of TCR clone 613 (TRBV18, TRBJ2-3)
CASSPGVTDTQYF

SEQ ID NO: 1227 - protein, 15 aa, Homo sapiens
  CDR3 for alpha chain variable domain of TCR clone 614 (TRAV40, TRAJ45)
CLLGDLGGGADGLTF

SEQ ID NO: 1228 - protein, 13 aa, Homo sapiens
  CDR3 for beta chain variable domain of TCR clone 614 (TRBV7-9, TRBJ1-2)
CASSLKQNYGYTF

SEQ ID NO: 1229 - protein, 13 aa, Homo sapiens
  CDR3 for alpha chain variable domain of TCR clone 615 (TRAV29/DV5, TRAJ31)
CAASRNNNARLMF

SEQ ID NO: 1230 - protein, 12 aa, Homo sapiens
  CDR3 for beta chain variable domain of TCR clone 615 (TRBV14, TRBJ2-5)
CASSQLKETQYF

SEQ ID NO: 1231 - protein, 18 aa, Homo sapiens
  CDR3 for alpha chain variable domain of TCR clone 616 (TRAV26-2, TRAJ54)
CILRDVEVGIQGAQKLVF

SEQ ID NO: 1232 - protein, 16 aa, Homo sapiens
  CDR3 for beta chain variable domain of TCR clone 616 (TRBV6-1, TRBJ2-5)
CASSETLDRGAETQYF

SEQ ID NO: 1233 - protein, 11 aa, Homo sapiens
  CDR3 for alpha chain variable domain of TCR clone 617 (TRAV3, TRAJ32)
CAVREGIMVVL

SEQ ID NO: 1234 - protein, 13 aa, Homo sapiens
  CDR3 for beta chain variable domain of TCR clone 617 (TRBV2, TRBJ1-1)
CASSEGGNTEAFF

SEQ ID NO: 1235 - protein, 14 aa, Homo sapiens
  CDR3 for alpha chain variable domain of TCR clone 618 (TRAV17, TRAJ45)
CATASGGGADGLTF

SEQ ID NO: 1236 - protein, 15 aa, Homo sapiens
  CDR3 for beta chain variable domain of TCR clone 618 (TRBV11-2, TRBJ2-1)
CASSRNRGLMYEQFF

SEQ ID NO: 1237 - protein, 15 aa, Homo sapiens
  CDR3 for alpha chain variable domain of TCR clone 619 (TRAV12-1, TRAJ44)
CVVDTPQGTASKLTF

SEQ ID NO: 1238 - protein, 13 aa, Homo sapiens
  CDR3 for beta chain variable domain of TCR clone 619 (TRBV27, TRBJ2-1)
CASSSGSYNEQFF

SEQ ID NO: 1239 - protein, 13 aa, Homo sapiens
  CDR3 for alpha chain variable domain of TCR clone 620 (TRAV8-4, TRAJ30)
CAVSVNRDDKIIF

SEQ ID NO: 1240 - protein, 13 aa, Homo sapiens
  CDR3 for beta chain variable domain of TCR clone 620 (TRBV3-1, TRBJ2-2)
CASLARGSGELFF

SEQ ID NO: 1241 - protein, 14 aa, Homo sapiens
  CDR3 for alpha chain variable domain of TCR clone 621 (TRAV12-2, TRAJ3)
CAVSLYSSASKIIF

SEQ ID NO: 1242 - protein, 14 aa, Homo sapiens
  CDR3 for beta chain variable domain of TCR clone 621 (TRBV27, TRBJ2-1)
CAGSIAETYNEQFF

SEQ ID NO: 1243 - protein, 23 aa, Homo sapiens
  CDR3 for alpha chain variable domain of TCR clone 622 (TRAV26-1, TRAJ38)
CIADNAGNNHIQNPDPAVYQLRD

SEQ ID NO: 1244 - protein, 12 aa, Homo sapiens
  CDR3 for beta chain variable domain of TCR clone 622 (TRBV11-2, TRBJ2-2)
CASSLGGGELFF

SEQ ID NO: 1245 - protein, 14 aa, Homo sapiens
  CDR3 for alpha chain variable domain of TCR clone 623 (TRAV13-1, TRAJ20)
CAARPGSNDYKLSF

SEQ ID NO: 1246 - protein, 13 aa, Homo sapiens
  CDR3 for beta chain variable domain of TCR clone 623 (TRBV20-1, TRBJ1-1)
CSAPPGGHTEAFF

SEQ ID NO: 1247 - protein, 11 aa, Homo sapiens
  CDR3 for alpha chain variable domain of TCR clone 624 (TRAV12-1, TRAJ26)
CVVAYGQNFVF

SEQ ID NO: 1248 - protein, 15 aa, Homo sapiens
  CDR3 for beta chain variable domain of TCR clone 624 (TRBV12-4, TRBJ2-5)
CASSGTGQAQETQYF

SEQ ID NO: 1249 - protein, 14 aa, Homo sapiens
  CDR3 for alpha chain variable domain of TCR clone 625 (TRAV13-1, TRAJ40)
CAARSTSGTYKYIF

SEQ ID NO: 1250 - protein, 15 aa, Homo sapiens
  CDR3 for beta chain variable domain of TCR clone 625 (TRBV18, TRBJ1-5)
CASSETGGNNQPQHF

SEQ ID NO: 1251 - protein, 14 aa, Homo sapiens
  CDR3 for alpha chain variable domain of TCR clone 626 (TRAV12-2, TRAJ33)
CAVKRARSNYQLIW

SEQ ID NO: 1252 - protein, 12 aa, Homo sapiens
  CDR3 for beta chain variable domain of TCR clone 626 (TRBV24-1, TRBJ2-3)
CATSDSTDTQYF

SEQ ID NO: 1253 - protein, 14 aa, Homo sapiens
  CDR3 for alpha chain variable domain of TCR clone 627 (TRAV21, TRAJ28)
CAVGSGAGSYQLTF

SEQ ID NO: 1254 - protein, 14 aa, Homo sapiens
  CDR3 for beta chain variable domain of TCR clone 627 (TRBV18, TRBJ1-4)
CASSPGPNGEKLFF

SEQ ID NO: 1255 - protein, 13 aa, Homo sapiens
  CDR3 for alpha chain variable domain of TCR clone 628 (TRAV35, TRAJ44)
CAGLSGTASKLTF

SEQ ID NO: 1256 - protein, 17 aa, Homo sapiens
  CDR3 for beta chain variable domain of TCR clone 628 (TRBV7-8, TRBJ1-2)
CASSLRPLQGHLYGYTF

SEQ ID NO: 1257 - protein, 14 aa, Homo sapiens
  CDR3 for alpha chain variable domain of TCR clone 629 (TRAV12-3, TRAJ54)
CAMRGIQGAQKLVF

SEQ ID NO: 1258 - protein, 13 aa, Homo sapiens
  CDR3 for beta chain variable domain of TCR clone 629 (TRBV19, TRBJ1-1)
CASSPSNGGEAFF

SEQ ID NO: 1259 - protein, 14 aa, Homo sapiens
  CDR3 for alpha chain variable domain of TCR clone 630 (TRAV23/DV6, TRAJ4)
CAANLSGGYNKLIF

SEQ ID NO: 1260 - protein, 11 aa, Homo sapiens
  CDR3 for beta chain variable domain of TCR clone 630 (TRBV7-9, TRBJ2-3)
CASSPTDTQYF

SEQ ID NO: 1261 - protein, 16 aa, Homo sapiens
  CDR3 for alpha chain variable domain of TCR clone 631 (TRAV30, TRAJ24)
CGTEIVDADSWGKFQF

SEQ ID NO: 1262 - protein, 13 aa, Homo sapiens
  CDR3 for beta chain variable domain of TCR clone 631 (TRBV11-2, TRBJ2-5)
CASSSTGEETQYF

SEQ ID NO: 1263 - protein, 12 aa, Homo sapiens
  CDR3 for alpha chain variable domain of TCR clone 632 (TRAV23/DV6, TRAJ30)
CAASKGDDKIIF

SEQ ID NO: 1264 - protein, 18 aa, Homo sapiens
  CDR3 for beta chain variable domain of TCR clone 632 (TRBV10-3, TRBJ2-3)
CAISESRVGPMRGDTQYF

SEQ ID NO: 1265 - protein, 14 aa, Homo sapiens
  CDR3 for alpha chain variable domain of TCR clone 633 (TRAV12-2, TRAJ13)
CAVKKTGGYQKVTF

SEQ ID NO: 1266 - protein, 14 aa, Homo sapiens
  CDR3 for beta chain variable domain of TCR clone 633 (TRBV12-5, TRBJ2-5)
CASGSRTHQETQYF

SEQ ID NO: 1267 - protein, 15 aa, Homo sapiens
  CDR3 for alpha chain variable domain of TCR clone 634 (TRAV12-2, TRAJ53)
CAVNGGGGSNYKLTF

SEQ ID NO: 1268 - protein, 17 aa, Homo sapiens
  CDR3 for beta chain variable domain of TCR clone 634 (TRBV7-3, TRBJ2-3)
RASSLMKRMRGADTQYF

SEQ ID NO: 1269 - protein, 13 aa, Homo sapiens
  CDR3 for alpha chain variable domain of TCR clone 635 (TRAV38-2/DV8, TRAJ34)
CAYRNYNTDKLIF

SEQ ID NO: 1270 - protein, 15 aa, Homo sapiens
  CDR3 for beta chain variable domain of TCR clone 635 (TRBV20-1, TRBJ2-5)
CSAEGTGGLQETQYF

SEQ ID NO: 1271 - protein, 12 aa, Homo sapiens
  CDR3 for alpha chain variable domain of TCR clone 636 (TRAV12-3, TRAJ34)
CAMGYNTDKLIF

SEQ ID NO: 1272 - protein, 14 aa, Homo sapiens
  CDR3 for beta chain variable domain of TCR clone 636 (TRBV4-1, TRBJ2-2)
CASSQAVNTGELFF

SEQ ID NO: 1273 - protein, 12 aa, Homo sapiens
  CDR3 for alpha chain variable domain of TCR clone 637 (TRAV10, TRAJ43)
CVVVRVGNDMRF

SEQ ID NO: 1274 - protein, 15 aa, Homo sapiens
  CDR3 for beta chain variable domain of TCR clone 637 (TRBV2, TRBJ2-7)
CASSEGLARSYEQYF

SEQ ID NO: 1275 - protein, 15 aa, Homo sapiens
  CDR3 for alpha chain variable domain of TCR clone 638 (TRAV23/DV6, TRAJ13)
CAAWPGGGGYQKVTF

SEQ ID NO: 1276 - protein, 17 aa, Homo sapiens
  CDR3 for beta chain variable domain of TCR clone 638 (TRBV19, TRBJ2-7)
CASSISFYDSYPYEQYF

SEQ ID NO: 1277 - protein, 15 aa, Homo sapiens
  CDR3 for alpha chain variable domain of TCR clone 639 (TRAV27, TRAJ38)
CAGRFNAGNNRKLIW

SEQ ID NO: 1278 - protein, 13 aa, Homo sapiens
  CDR3 for beta chain variable domain of TCR clone 639 (TRBV12-5, TRBJ2-3)
CASQNRGTDTQYF

SEQ ID NO: 1279 - protein, 12 aa, Homo sapiens
  CDR3 for alpha chain variable domain of TCR clone 640 (TRAV22, TRAJ29)
CAPPSGNTPLVF

SEQ ID NO: 1280 - protein, 14 aa, Homo sapiens
  CDR3 for beta chain variable domain of TCR clone 640 (TRBV11-2, TRBJ2-7)
CASSLGAGAYEQYF

SEQ ID NO: 1281 - protein, 11 aa, Homo sapiens
  CDR3 for alpha chain variable domain of TCR clone 641 (TRAV21, TRAJ41)
CAVRSGYALNF

SEQ ID NO: 1282 - protein, 13 aa, Homo sapiens
  CDR3 for beta chain variable domain of TCR clone 641 (TRBV7-9, TRBJ1-2)
CASSLKQNYGYTF

SEQ ID NO: 1283 - protein, 15 aa, Homo sapiens
  CDR3 for alpha chain variable domain of TCR clone 642 (TRAV16, TRAJ16)
CALQGGGSDGQKLLF

SEQ ID NO: 1284 - protein, 15 aa, Homo sapiens
  CDR3 for beta chain variable domain of TCR clone 642 (TRBV20-1, TRBJ2-7)
CSARDRVSGMDEQYF

SEQ ID NO: 1285 - protein, 13 aa, Homo sapiens
  CDR3 for alpha chain variable domain of TCR clone 643 (TRAV12-3, TRAJ13)
CAMGTGGYQKVTF

SEQ ID NO: 1286 - protein, 14 aa, Homo sapiens
  CDR3 for beta chain variable domain of TCR clone 643 (TRBV7-2, TRBJ2-5)
CASSTGGELKTQYF

SEQ ID NO: 1287 - protein, 13 aa, Homo sapiens
  CDR3 for alpha chain variable domain of TCR clone 644 (TRAV12-2, TRAJ37)
CAGGSGNTGKLIF

SEQ ID NO: 1288 - protein, 14 aa, Homo sapiens
  CDR3 for beta chain variable domain of TCR clone 644 (TRBV6-1, TRBJ2-6)
CASQQGAGANVLTF

SEQ ID NO: 1289 - protein, 14 aa, Homo sapiens
  CDR3 for alpha chain variable domain of TCR clone 645 (TRAV23/DV6, TRAJ40)
CAASLTSGTYKYIF

SEQ ID NO: 1290 - protein, 14 aa, Homo sapiens
  CDR3 for beta chain variable domain of TCR clone 645 (TRBV5-1, TRBJ2-3)
CASSRGQGGGTQYF

SEQ ID NO: 1291 - protein, 16 aa, Homo sapiens
  CDR3 for alpha chain variable domain of TCR clone 646 (TRAV16, TRAJ57)
CAPYLITQGGSEKLVF

SEQ ID NO: 1292 - protein, 17 aa, Homo sapiens
  CDR3 for beta chain variable domain of TCR clone 646 (TRBV24-1, TRBJ2-4)
CATSDAEARGVRNIQYF

SEQ ID NO: 1293 - protein, 15 aa, Homo sapiens
  CDR3 for alpha chain variable domain of TCR clone 647 (TRAV17, TRAJ56)
CATDANTGANSKLTF

SEQ ID NO: 1294 - protein, 14 aa, Homo sapiens
  CDR3 for beta chain variable domain of TCR clone 647 (TRBV19, TRBJ1-5)
CASSLGTGGQPQHF

SEQ ID NO: 1295 - protein, 15 aa, Homo sapiens
  CDR3 for alpha chain variable domain of TCR clone 648 (TRAV16, TRAJ12)
CSKWPLRDSSYKLIF

SEQ ID NO: 1296 - protein, 13 aa, Homo sapiens
  CDR3 for beta chain variable domain of TCR clone 648 (TRBV4-2, TRBJ1-1)
CASSQAGNTEAFF

SEQ ID NO: 1297 - protein, 13 aa, Homo sapiens
  CDR3 for alpha chain variable domain of TCR clone 649 (TRAV3, TRAJ21)
CAVREPDFNKFYF

SEQ ID NO: 1298 - protein, 18 aa, Homo sapiens
  CDR3 for beta chain variable domain of TCR clone 649 (TRBV11-2, TRBJ2-3)
CASSLGGASRGAPNTQYF

SEQ ID NO: 1299 - protein, 14 aa, Homo sapiens
  CDR3 for alpha chain variable domain of TCR clone 650 (TRAV8-3, TRAJ36)
CAVGPITGANNLFF

SEQ ID NO: 1300 - protein, 15 aa, Homo sapiens
  CDR3 for beta chain variable domain of TCR clone 650 (TRBV4-1, TRBJ2-1)
CASSQDPGNYNEQFF

SEQ ID NO: 1301 - protein, 13 aa, Homo sapiens
  CDR3 for alpha chain variable domain of TCR clone 651 (TRAV39, TRAJ58)
CAGEETSGSRLTF

SEQ ID NO: 1302 - protein, 13 aa, Homo sapiens
  CDR3 for beta chain variable domain of TCR clone 651 (TRBV15, TRBJ2-7)
CATSTTGHYEQYF

SEQ ID NO: 1303 - protein, 14 aa, Homo sapiens
  CDR3 for alpha chain variable domain of TCR clone 652 (TRAV1-1, TRAJ28)
CAAPSGAGSYQLTF

SEQ ID NO: 1304 - protein, 15 aa, Homo sapiens
  CDR3 for beta chain variable domain of TCR clone 652 (TRBV7-2, TRBJ1-2)
CASSLVSGGDYGYTF

SEQ ID NO: 1305 - protein, 13 aa, Homo sapiens
  CDR3 for alpha chain variable domain of TCR clone 653 (TRAV2, TRAJ40)
CAVVTSGTYKYIF

SEQ ID NO: 1306 - protein, 16 aa, Homo sapiens
  CDR3 for beta chain variable domain of TCR clone 653 (TRBV7-9, TRBJ1-3)
CASSLGAGSSGNTIYF

SEQ ID NO: 1307 - protein, 14 aa, Homo sapiens
  CDR3 for alpha chain variable domain of TCR clone 654 (TRAV4, TRAJ9)
CLVGSGTGGFKTIF

SEQ ID NO: 1308 - protein, 15 aa, Homo sapiens
  CDR3 for beta chain variable domain of TCR clone 654 (TRBV7-2, TRBJ2-1)
CASSLASGRVNEQFF

SEQ ID NO: 1309 - protein, 15 aa, Homo sapiens
  CDR3 for alpha chain variable domain of TCR clone 655 (TRAV17, TRAJ35)
CATAFVIGFGNVLHC

SEQ ID NO: 1310 - protein, 15 aa, Homo sapiens
  CDR3 for beta chain variable domain of TCR clone 655 (TRBV7-9, TRBJ2-7)
CASSLALAEAYEQYF

SEQ ID NO: 1311 - protein, 13 aa, Homo sapiens
  CDR3 for alpha chain variable domain of TCR clone 656 (TRAV1-1, TRAJ13)
CAVNSGGYQKVTF

SEQ ID NO: 1312 - protein, 12 aa, Homo sapiens
  CDR3 for beta chain variable domain of TCR clone 656 (TRBV28, TRBJ2-1)
CASSVQINEQFF

SEQ ID NO: 1313 - protein, 14 aa, Homo sapiens
  CDR3 for alpha chain variable domain of TCR clone 657 (TRAV12-2, TRAJ36)
CAVKISTGANNLFF

SEQ ID NO: 1314 - protein, 14 aa, Homo sapiens
  CDR3 for beta chain variable domain of TCR clone 657 (TRBV25-1, TRBJ1-2)
CASSDTTGVVGYTF

SEQ ID NO: 1315 - protein, 14 aa, Homo sapiens
  CDR3 for alpha chain variable domain of TCR clone 658 (TRAV35, TRAJ33)
CAGSSQDSNYQLIW

SEQ ID NO: 1316 - protein, 15 aa, Homo sapiens
  CDR3 for beta chain variable domain of TCR clone 658 (TRBV5-1, TRBJ1-4)
FAPAAWKDGNEKLFF

SEQ ID NO: 1317 - protein, 11 aa, Homo sapiens
  CDR3 for alpha chain variable domain of TCR clone 659 (TRAV16, TRAJ31)
CALFNNARLMF

SEQ ID NO: 1318 - protein, 15 aa, Homo sapiens
  CDR3 for beta chain variable domain of TCR clone 659 (TRBV18, TRBJ1-1)
CASSPRQGENTEAFF

SEQ ID NO: 1319 - protein, 11 aa, Homo sapiens
  CDR3 for alpha chain variable domain of TCR clone 660 (TRAV3, TRAJ21)
CAVGNFNKFYF

SEQ ID NO: 1320 - protein, 14 aa, Homo sapiens
  CDR3 for beta chain variable domain of TCR clone 660 (TRBV29-1, TRBJ2-2)
CSGRGSGNTGELFF

SEQ ID NO: 1321 - protein, 16 aa, Homo sapiens
  CDR3 for alpha chain variable domain of TCR clone 661 (TRAV20, TRAJ52)
CAVLPDGGTSYGKLTF

SEQ ID NO: 1322 - protein, 12 aa, Homo sapiens
  CDR3 for beta chain variable domain of TCR clone 661 (TRBV19, TRBJ2-1)
CASSQISNEQFF

SEQ ID NO: 1323 - protein, 13 aa, Homo sapiens
  CDR3 for alpha chain variable domain of TCR clone 662 (TRAV12-2, TRAJ34)
CAVRGYNTDKLIF

SEQ ID NO: 1324 - protein, 15 aa, Homo sapiens
  CDR3 for beta chain variable domain of TCR clone 662 (TRBV28, TRBJ2-1)
CASRTGAGVIARQFF

SEQ ID NO: 1325 - protein, 11 aa, Homo sapiens
  CDR3 for alpha chain variable domain of TCR clone 663 (TRAV26-1, TRAJ37)
CIVRVGRKLIF

SEQ ID NO: 1326 - protein, 13 aa, Homo sapiens
  CDR3 for beta chain variable domain of TCR clone 663 (TRBV14, TRBJ1-2)
CASSEDRRYGYTF

SEQ ID NO: 1327 - protein, 12 aa, Homo sapiens
  CDR3 for alpha chain variable domain of TCR clone 664 (TRAV12-1, TRAJ23)
CVVNIPGGKLIF

SEQ ID NO: 1328 - protein, 15 aa, Homo sapiens
  CDR3 for beta chain variable domain of TCR clone 664 (TRBV7-2, TRBJ2-7)
CASSLVSSGSYEQYF

SEQ ID NO: 1329 - protein, 14 aa, Homo sapiens
  CDR3 for alpha chain variable domain of TCR clone 665 (TRAV1-2, TRAJ8)
CAVREDTGFQKLVF

SEQ ID NO: 1330 - protein, 15 aa, Homo sapiens
  CDR3 for beta chain variable domain of TCR clone 665 (TRBV12-4, TRBJ2-5)
CASSPPTGLQETQYF

SEQ ID NO: 1331 - protein, 14 aa, Homo sapiens
  CDR3 for alpha chain variable domain of TCR clone 666 (TRAV4, TRAJ17)
CLVGDMAAGNKLTF

SEQ ID NO: 1332 - protein, 14 aa, Homo sapiens
  CDR3 for beta chain variable domain of TCR clone 666 (TRBV4-1, TRBJ2-7)
CASSPVAGGDEQYF

SEQ ID NO: 1333 - protein, 15 aa, Homo sapiens
  CDR3 for alpha chain variable domain of TCR clone 667 (TRAV2, TRAJ9)
CAVAALNTGGFKTIF

SEQ ID NO: 1334 - protein, 14 aa, Homo sapiens
  CDR3 for beta chain variable domain of TCR clone 667 (TRBV7-8, TRBJ2-5)
CASSATGGQETQYF

SEQ ID NO: 1335 - protein, 15 aa, Homo sapiens
  CDR3 for alpha chain variable domain of TCR clone 668 (TRAV13-1, TRAJ10)
CAATILTGGGNKLTF

SEQ ID NO: 1336 - protein, 15 aa, Homo sapiens
  CDR3 for beta chain variable domain of TCR clone 668 (TRBV2, TRBJ2-7)
CASTLLGSGATEQYF

SEQ ID NO: 1337 - protein, 14 aa, Homo sapiens
  CDR3 for alpha chain variable domain of TCR clone 669 (TRAV23/DV6, TRAJ22)
CAASVSGSARQLTF

SEQ ID NO: 1338 - protein, 16 aa, Homo sapiens
  CDR3 for beta chain variable domain of TCR clone 669 (TRBV19, TRBJ2-2)
CASSFPGQGLAGELFF

SEQ ID NO: 1339 - protein, 15 aa, Homo sapiens
  CDR3 for alpha chain variable domain of TCR clone 670 (TRAV21, TRAJ38)
CAVRQDAGNNRKLIW

SEQ ID NO: 1340 - protein, 16 aa, Homo sapiens
  CDR3 for beta chain variable domain of TCR clone 670 (TRBV4-2, TRBJ1-1)
CASRPLDGGGDTEAFF

SEQ ID NO: 1341 - protein, 13 aa, Homo sapiens
  CDR3 for alpha chain variable domain of TCR clone 671 (TRAV13-1, TRAJ11)
CAAVLAGYSTLTF

SEQ ID NO: 1342 - protein, 17 aa, Homo sapiens
  CDR3 for beta chain variable domain of TCR clone 671 (TRBV25-1, TRBJ2-7)
CASSDARVVFSSYEQYF

SEQ ID NO: 1343 - protein, 15 aa, Homo sapiens
  CDR3 for alpha chain variable domain of TCR clone 672 (TRAV26-1, TRAJ40)
CIVRAVPSGTYKYIF

SEQ ID NO: 1344 - protein, 14 aa, Homo sapiens
  CDR3 for beta chain variable domain of TCR clone 672 (TRBV19, TRBJ2-1)
CASKDPGLANEQFF

SEQ ID NO: 1345 - protein, 16 aa, Homo sapiens
  CDR3 for alpha chain variable domain of TCR clone 673 (TRAV17, TRAJ22)
CATGPISSGSARQLTF

SEQ ID NO: 1346 - protein, 13 aa, Homo sapiens
  CDR3 for beta chain variable domain of TCR clone 673 (TRBV11-2, TRBJ2-1)
CASSLGLAGGRFF

SEQ ID NO: 1347 - protein, 15 aa, Homo sapiens
  CDR3 for alpha chain variable domain of TCR clone 674 (TRAV26-1, TRAJ44)
CIVRIGTGTASKLTF

SEQ ID NO: 1348 - protein, 15 aa, Homo sapiens
  CDR3 for beta chain variable domain of TCR clone 674 (TRBV7-6, TRBJ2-1)
CASSSLAGEGNEQFF

SEQ ID NO: 1349 - protein, 17 aa, Homo sapiens
  CDR3 for alpha chain variable domain of TCR clone 675 (TRAV8-6, TRAJ8)
CAVKEGIENTGFQKLVF

SEQ ID NO: 1350 - protein, 12 aa, Homo sapiens
  CDR3 for beta chain variable domain of TCR clone 675 (TRBV19, TRBJ1-4)
CASKDWPGGLFF

SEQ ID NO: 1351 - protein, 13 aa, Homo sapiens
  CDR3 for alpha chain variable domain of TCR clone 676 (TRAV35, TRAJ57)
CAGSQGGSEKLVF

SEQ ID NO: 1352 - protein, 14 aa, Homo sapiens
  CDR3 for beta chain variable domain of TCR clone 676 (TRBV25-1, TRBJ1-1)
CASTHLGGNTEAFF

SEQ ID NO: 1353 - protein, 11 aa, Homo sapiens
  CDR3 for alpha chain variable domain of TCR clone 677 (TRAV20, TRAJ23)
CACNQGGKLIF

SEQ ID NO: 1354 - protein, 16 aa, Homo sapiens
  CDR3 for beta chain variable domain of TCR clone 677 (TRBV7-8, TRBJ2-5)
CASSFGGQPAQETQYF

SEQ ID NO: 1355 - protein, 12 aa, Homo sapiens
  CDR3 for alpha chain variable domain of TCR clone 678 (TRAV21, TRAJ23)
CAVGPQGGKLIF

SEQ ID NO: 1356 - protein, 13 aa, Homo sapiens
  CDR3 for beta chain variable domain of TCR clone 678 (TRBV20-1, TRBJ2-7)
CSARTGAGYEQYF

SEQ ID NO: 1357 - protein, 14 aa, Homo sapiens
  CDR3 for alpha chain variable domain of TCR clone 679 (TRAV16, TRAJ39)
CALSKNNAGNMLTF

SEQ ID NO: 1358 - protein, 16 aa, Homo sapiens
  CDR3 for beta chain variable domain of TCR clone 679 (TRBV6-6, TRBJ2-1)
CASSYSFSGSYNEQFF

SEQ ID NO: 1359 - protein, 16 aa, Homo sapiens
  CDR3 for alpha chain variable domain of TCR clone 680 (TRAV12-2, TRAJ6)
CAAPLAGSGGSYIPTF

SEQ ID NO: 1360 - protein, 10 aa, Homo sapiens
  CDR3 for beta chain variable domain of TCR clone 680 (TRBV28, TRBJ1-2)
CASSSDRAVF

SEQ ID NO: 1361 - protein, 11 aa, Homo sapiens
  CDR3 for alpha chain variable domain of TCR clone 681 (TRAV4, TRAJ31)
CLVGLNARLMF

SEQ ID NO: 1362 - protein, 16 aa, Homo sapiens
  CDR3 for beta chain variable domain of TCR clone 681 (TRBV15, TRBJ2-6)
CATSVNGGFLANVLTF

SEQ ID NO: 1363 - protein, 14 aa, Homo sapiens
  CDR3 for alpha chain variable domain of TCR clone 682 (TRAV34, TRAJ44)
CGADGTGTASKLTF

SEQ ID NO: 1364 - protein, 15 aa, Homo sapiens
  CDR3 for beta chain variable domain of TCR clone 682 (TRBV5-1, TRBJ2-1)
CASSPPRAPYNEQFF

SEQ ID NO: 1365 - protein, 14 aa, Homo sapiens
  CDR3 for alpha chain variable domain of TCR clone 683 (TRAV3, TRAJ9)
CAVRGNTGGFKTIF

SEQ ID NO: 1366 - protein, 14 aa, Homo sapiens
  CDR3 for beta chain variable domain of TCR clone 683 (TRBV15, TRBJ2-1)
CATSGVEDYNEQFF

SEQ ID NO: 1367 - protein, 14 aa, Homo sapiens
  CDR3 for alpha chain variable domain of TCR clone 684 (TRAV12-3, TRAJ13)
CAMRNSGGYQKVTF

SEQ ID NO: 1368 - protein, 14 aa, Homo sapiens
  CDR3 for beta chain variable domain of TCR clone 684 (TRBV4-1, TRBJ1-6)
CASSPGSDSSPLHF

SEQ ID NO: 1369 - protein, 13 aa, Homo sapiens
  CDR3 for alpha chain variable domain of TCR clone 685 (TRAV8-3, TRAJ4)
WVFYSGGYNKLIF

SEQ ID NO: 1370 - protein, 14 aa, Homo sapiens
  CDR3 for beta chain variable domain of TCR clone 685 (TRBV7-9, TRBJ2-3)
CASSLEDGTDTQYF

SEQ ID NO: 1371 - protein, 13 aa, Homo sapiens
  CDR3 for alpha chain variable domain of TCR clone 686 (TRAV8-3, TRAJ43)
CAVGPDNNNDMRF

SEQ ID NO: 1372 - protein, 14 aa, Homo sapiens
  CDR3 for beta chain variable domain of TCR clone 686 (TRBV19, TRBJ2-1)
CASPTFVLSGEQFF

SEQ ID NO: 1373 - protein, 14 aa, Homo sapiens
  CDR3 for alpha chain variable domain of TCR clone 687 (TRAV1-2, TRAJ8)
CAVREDTGFQKLVF

SEQ ID NO: 1374 - protein, 17 aa, Homo sapiens
  CDR3 for beta chain variable domain of TCR clone 687 (TRBV11-2, TRBJ2-1)
CASSLYPPGVEYNEQFF

SEQ ID NO: 1375 - protein, 12 aa, Homo sapiens
  CDR3 for alpha chain variable domain of TCR clone 688 (TRAV16, TRAJ22)
CALEVSARQLTF

SEQ ID NO: 1376 - protein, 14 aa, Homo sapiens
  CDR3 for beta chain variable domain of TCR clone 688 (TRBV11-2, TRBJ2-3)
CASSSIASTDTQYF

SEQ ID NO: 1377 - protein, 13 aa, Homo sapiens
  CDR3 for alpha chain variable domain of TCR clone 689 (TRAV27, TRAJ49)
CAPRPYTGNQFYF

SEQ ID NO: 1378 - protein, 18 aa, Homo sapiens
  CDR3 for beta chain variable domain of TCR clone 689 (TRBV7-3, TRBJ2-5)
CASSLGGAAQGRWETQYF

SEQ ID NO: 1379 - protein, 18 aa, Homo sapiens
  CDR3 for alpha chain variable domain of TCR clone 690 (TRAV26-1, TRAJ5)
CIVRVVPPRDTGRRALTF

SEQ ID NO: 1380 - protein, 15 aa, Homo sapiens
  CDR3 for beta chain variable domain of TCR clone 690 (TRBV7-9, TRBJ2-7)
CASSLPMGQANEQYF

SEQ ID NO: 1381 - protein, 13 aa, Homo sapiens
  CDR3 for alpha chain variable domain of TCR clone 691 (TRAV12-2, TRAJ4)
CAVRSGGYNKLIF

SEQ ID NO: 1382 - protein, 15 aa, Homo sapiens
  CDR3 for beta chain variable domain of TCR clone 691 (TRBV10-3, TRBJ2-1)
CAISDVQDRAYEQFF

SEQ ID NO: 1383 - protein, 14 aa, Homo sapiens
  CDR3 for alpha chain variable domain of TCR clone 692 (TRAV12-2, TRAJ32)
CAHPESGATNKLIF

SEQ ID NO: 1384 - protein, 14 aa, Homo sapiens
  CDR3 for beta chain variable domain of TCR clone 692 (TRBV4-2, TRBJ2-3)
CASRETRAPGMQYF

SEQ ID NO: 1385 - protein, 17 aa, Homo sapiens
  CDR3 for alpha chain variable domain of TCR clone 693 (TRAV35, TRAJ28)
CAGLQVYSGAGSYQLTF

SEQ ID NO: 1386 - protein, 15 aa, Homo sapiens
  CDR3 for beta chain variable domain of TCR clone 693 (TRBV2, TRBJ1-2)
CASSEIGGANYGYTF

SEQ ID NO: 1387 - protein, 15 aa, Homo sapiens
  CDR3 for alpha chain variable domain of TCR clone 694 (TRAV13-1, TRAJ17)
CAASIERAAGNKLTF

SEQ ID NO: 1388 - protein, 12 aa, Homo sapiens
  CDR3 for beta chain variable domain of TCR clone 694 (TRBV5-7, TRBJ1-1)
CASSLGRGKAFF

SEQ ID NO: 1389 - protein, 14 aa, Homo sapiens
  CDR3 for alpha chain variable domain of TCR clone 695 (TRAV35, TRAJ22)
CAGLRPGSARQLTF

SEQ ID NO: 1390 - protein, 13 aa, Homo sapiens
  CDR3 for beta chain variable domain of TCR clone 695 (TRBV20-1, TRBJ2-7)
CSATHTSGYEQYF

SEQ ID NO: 1391 - protein, 11 aa, Homo sapiens
  CDR3 for alpha chain variable domain of TCR clone 696 (TRAV3, TRAJ21)
CAVGNFNKFYF

SEQ ID NO: 1392 - protein, 13 aa, Homo sapiens
  CDR3 for beta chain variable domain of TCR clone 696 (TRBV7-9, TRBJ1-2)
CASSLKQNYGYTF

SEQ ID NO: 1393 - protein, 12 aa, Homo sapiens
  CDR3 for alpha chain variable domain of TCR clone 697 (TRAV12-3, TRAJ17)
CAMTLTGNKLTF

SEQ ID NO: 1394 - protein, 13 aa, Homo sapiens
  CDR3 for beta chain variable domain of TCR clone 697 (TRBV7-3, TRBJ1-1)
CASSQDWGAEAFF

SEQ ID NO: 1395 - protein, 16 aa, Homo sapiens
  CDR3 for alpha chain variable domain of TCR clone 698 (TRAV26-1, )
CIDIQNPDPAVYQLRD

SEQ ID NO: 1396 - protein, 19 aa, Homo sapiens
  CDR3 for beta chain variable domain of TCR clone 698 (TRBV19, TRBJ2-5)
CASSIGQVTDFFLGETQYF

SEQ ID NO: 1397 - protein, 12 aa, Homo sapiens
  CDR3 for alpha chain variable domain of TCR clone 699 (TRAV13-1, TRAJ9)
CASHTGGFKTIF

SEQ ID NO: 1398 - protein, 18 aa, Homo sapiens
  CDR3 for beta chain variable domain of TCR clone 699 (TRBV11-2, TRBJ2-3)
CASSLGGASRGAPNTQYF

SEQ ID NO: 1399 - protein, 16 aa, Homo sapiens
  CDR3 for alpha chain variable domain of TCR clone 700 (TRAV3, TRAJ10)
CAVRDMRAGGGNKLTF

SEQ ID NO: 1400 - protein, 19 aa, Homo sapiens
  CDR3 for beta chain variable domain of TCR clone 700 (TRBV6-3, TRBJ1-2)
CASSYSKGRTGPPNYGYTF

SEQ ID NO: 1401 - protein, 15 aa, Homo sapiens
  CDR3 for alpha chain variable domain of TCR clone 701 (TRAV20, TRAJ6)
CAVRLQSGGSYIPTF

SEQ ID NO: 1402 - protein, 14 aa, Homo sapiens
  CDR3 for beta chain variable domain of TCR clone 701 (TRBV12-4, TRBJ2-7)
CASSASGGWYEQYF

SEQ ID NO: 1403 - protein, 14 aa, Homo sapiens
  CDR3 for alpha chain variable domain of TCR clone 702 (TRAV35, TRAJ13)
CAGSPSGGYQKVTF

SEQ ID NO: 1404 - protein, 17 aa, Homo sapiens
  CDR3 for beta chain variable domain of TCR clone 702 (TRBV7-6, TRBJ2-5)
CASSPGLADPWGETQYF

SEQ ID NO: 1405 - protein, 13 aa, Homo sapiens
  CDR3 for alpha chain variable domain of TCR clone 703 (TRAV27, TRAJ6)
CAGGTRGSYIPTF

SEQ ID NO: 1406 - protein, 13 aa, Homo sapiens
  CDR3 for beta chain variable domain of TCR clone 703 (TRBV4-1, TRBJ2-2)
CASSQENTGELFF

SEQ ID NO: 1407 - protein, 16 aa, Homo sapiens
  CDR3 for alpha chain variable domain of TCR clone 704 (TRAV17, TRAJ53)
CATDALSGGSNYKLTF

SEQ ID NO: 1408 - protein, 12 aa, Homo sapiens
  CDR3 for beta chain variable domain of TCR clone 704 (TRBV5-1, TRBJ2-7)
CASSFRGYEQYF

SEQ ID NO: 1409 - protein, 15 aa, Homo sapiens
  CDR3 for alpha chain variable domain of TCR clone 705 (TRAV2, TRAJ24)
CAVVRLKNSWGKLQF

SEQ ID NO: 1410 - protein, 16 aa, Homo sapiens
  CDR3 for beta chain variable domain of TCR clone 705 (TRBV7-7, TRBJ2-3)
CASSPGTSGSTDTQYF

SEQ ID NO: 1411 - protein, 15 aa, Homo sapiens
  CDR3 for alpha chain variable domain of TCR clone 706 (TRAV2, TRAJ28)
CAVPYSGAGSYQLTF

SEQ ID NO: 1412 - protein, 17 aa, Homo sapiens
  CDR3 for beta chain variable domain of TCR clone 706 (TRBV20-1, TRBJ2-4)
CSARDWASGGRENIQYF

SEQ ID NO: 1413 - protein, 14 aa, Homo sapiens
  CDR3 for alpha chain variable domain of TCR clone 707 (TRAV17, TRAJ35)
CATDRPGFGNVLHC

SEQ ID NO: 1414 - protein, 19 aa, Homo sapiens
  CDR3 for beta chain variable domain of TCR clone 707 (TRBV11-3, TRBJ2-2)
CASSTRPGAKTTNTGELFF

SEQ ID NO: 1415 - protein, 13 aa, Homo sapiens
  CDR3 for alpha chain variable domain of TCR clone 708 (TRAV12-1, TRAJ9)
CVVLNTGGFKTIF

SEQ ID NO: 1416 - protein, 13 aa, Homo sapiens
  CDR3 for beta chain variable domain of TCR clone 708 (TRBV20-1, TRBJ1-1)
CSARGGGNTEAFF

SEQ ID NO: 1417 - protein, 16 aa, Homo sapiens
  CDR3 for alpha chain variable domain of TCR clone 709 (TRAV21, TRAJ45)
CAVSWGSGGGADGLTF

SEQ ID NO: 1418 - protein, 14 aa, Homo sapiens
  CDR3 for beta chain variable domain of TCR clone 709 (TRBV4-2, TRBJ1-2)
CASSPGGSNYGYTF

SEQ ID NO: 1419 - protein, 12 aa, Homo sapiens
  CDR3 for alpha chain variable domain of TCR clone 710 (TRAV3, TRAJ27)
CAVRDKAGKSTF

SEQ ID NO: 1420 - protein, 14 aa, Homo sapiens
  CDR3 for beta chain variable domain of TCR clone 710 (TRBV5-1, TRBJ1-2)
CASSVDSTNYGYTF

SEQ ID NO: 1421 - protein, 13 aa, Homo sapiens
  CDR3 for alpha chain variable domain of TCR clone 711 (TRAV25, TRAJ10)
CAGRTGGGNKLTF

SEQ ID NO: 1422 - protein, 15 aa, Homo sapiens
  CDR3 for beta chain variable domain of TCR clone 711 (TRBV19, TRBJ2-1)
CASSSPGVPLDEQFF

SEQ ID NO: 1423 - protein, 12 aa, Homo sapiens
  CDR3 for alpha chain variable domain of TCR clone 712 (TRAV16, TRAJ49)
CALNEGGNQFYF

SEQ ID NO: 1424 - protein, 14 aa, Homo sapiens
  CDR3 for beta chain variable domain of TCR clone 712 (TRBV7-9, TRBJ2-1)
CASRPTGLRNEQFF

SEQ ID NO: 1425 - protein, 16 aa, Homo sapiens
  CDR3 for alpha chain variable domain of TCR clone 713 (TRAV3, TRAJ10)
CAVRDMRAGGGNKLTF

SEQ ID NO: 1426 - protein, 13 aa, Homo sapiens
  CDR3 for beta chain variable domain of TCR clone 713 (TRBV6-1, TRBJ1-1)
CASSRQGNTEAFF

SEQ ID NO: 1427 - protein, 12 aa, Homo sapiens
  CDR3 for alpha chain variable domain of TCR clone 714 (TRAV16, TRAJ26)
CALRSYGQNFVF

SEQ ID NO: 1428 - protein, 14 aa, Homo sapiens
  CDR3 for beta chain variable domain of TCR clone 714 (TRBV10-3, TRBJ2-1)
CAISSDLAYNEQFF

SEQ ID NO: 1429 - protein, 13 aa, Homo sapiens
  CDR3 for alpha chain variable domain of TCR clone 715 (TRAV35, TRAJ22)
CAGLSGSARQLTF

SEQ ID NO: 1430 - protein, 16 aa, Homo sapiens
  CDR3 for beta chain variable domain of TCR clone 715 (TRBV7-9, TRBJ2-1)
CASSLVLTGQGNEQFF

SEQ ID NO: 1431 - protein, 15 aa, Homo sapiens
  CDR3 for alpha chain variable domain of TCR clone 716 (TRAV2, TRAJ15)
CAVEDREQAGTALIF

SEQ ID NO: 1432 - protein, 13 aa, Homo sapiens
  CDR3 for beta chain variable domain of TCR clone 716 (TRBV10-2, TRBJ2-3)
CASSESGDHTQYF

SEQ ID NO: 1433 - protein, 13 aa, Homo sapiens
  CDR3 for alpha chain variable domain of TCR clone 717 (TRAV21, TRAJ57)
CAVTQGGSEKLVF

SEQ ID NO: 1434 - protein, 15 aa, Homo sapiens
  CDR3 for beta chain variable domain of TCR clone 717 (TRBV5-1, TRBJ1-1)
CASSSTTGTNTEAFF

SEQ ID NO: 1435 - protein, 14 aa, Homo sapiens
  CDR3 for alpha chain variable domain of TCR clone 718 (TRAV17, TRAJ11)
CATDTSRGYSTLTF

SEQ ID NO: 1436 - protein, 13 aa, Homo sapiens
  CDR3 for beta chain variable domain of TCR clone 718 (TRBV19, TRBJ2-5)
CASRDSRRETQYF

SEQ ID NO: 1437 - protein, 12 aa, Homo sapiens
  CDR3 for alpha chain variable domain of TCR clone 719 (TRAV16, TRAJ13)
CITLRGYQKVTF

SEQ ID NO: 1438 - protein, 17 aa, Homo sapiens
  CDR3 for beta chain variable domain of TCR clone 719 (TRBV28, TRBJ2-5)
CASSRQGGLAGAETQYF

SEQ ID NO: 1439 - protein, 12 aa, Homo sapiens
  CDR3 for alpha chain variable domain of TCR clone 720 (TRAV21, TRAJ37)
CAVRGNTGKLIF

SEQ ID NO: 1440 - protein, 14 aa, Homo sapiens
  CDR3 for beta chain variable domain of TCR clone 720 (TRBV19, TRBJ2-1)
CASEVTGARNEQFF

SEQ ID NO: 1441 - protein, 11 aa, Homo sapiens
  CDR3 for alpha chain variable domain of TCR clone 721 (TRAV12-3, TRAJ41)
CAMNAREALNF

SEQ ID NO: 1442 - protein, 16 aa, Homo sapiens
  CDR3 for beta chain variable domain of TCR clone 721 (TRBV7-8, TRBJ2-3)
CASSTEGQRETDTQYF

SEQ ID NO: 1443 - protein, 14 aa, Homo sapiens
  CDR3 for alpha chain variable domain of TCR clone 722 (TRAV1-2, TRAJ8)
CAVREDTGFQKLVF

SEQ ID NO: 1444 - protein, 12 aa, Homo sapiens
  CDR3 for beta chain variable domain of TCR clone 722 (TRBV11-2, TRBJ2-2)
CASSLGGGELFF

SEQ ID NO: 1445 - protein, 13 aa, Homo sapiens
  CDR3 for alpha chain variable domain of TCR clone 723 (TRAV2, TRAJ12)
CAVGADSSYKLIF

SEQ ID NO: 1446 - protein, 13 aa, Homo sapiens
  CDR3 for beta chain variable domain of TCR clone 723 (TRBV20-1, TRBJ2-1)
CSARSSPRDEQFF

SEQ ID NO: 1447 - protein, 16 aa, Homo sapiens
  CDR3 for alpha chain variable domain of TCR clone 724 (TRAV13-1, TRAJ37)
CAASSLGSSNTGKLIF

SEQ ID NO: 1448 - protein, 12 aa, Homo sapiens
  CDR3 for beta chain variable domain of TCR clone 724 (TRBV6-1, TRBJ2-5)
CASSEGRETQYF

SEQ ID NO: 1449 - protein, 13 aa, Homo sapiens
  CDR3 for alpha chain variable domain of TCR clone 725 (TRAV12-2, TRAJ47)
CAVFMEYGNKLVF

SEQ ID NO: 1450 - protein, 14 aa, Homo sapiens
  CDR3 for beta chain variable domain of TCR clone 725 (TRBV4-1, TRBJ1-5)
CASSQGPTNQPQHF

SEQ ID NO: 1451 - protein, 12 aa, Homo sapiens
  CDR3 for alpha chain variable domain of TCR clone 726 (TRAV12-3, TRAJ17)
CAMTLTGNKLTF

SEQ ID NO: 1452 - protein, 15 aa, Homo sapiens
  CDR3 for beta chain variable domain of TCR clone 726 (TRBV20-1, TRBJ2-7)
CSARDWVSGMDEQYF

SEQ ID NO: 1453 - protein, 11 aa, Homo sapiens
  CDR3 for alpha chain variable domain of TCR clone 727 (TRAV3, TRAJ17)
CAEAAGNKLTF

SEQ ID NO: 1454 - protein, 15 aa, Homo sapiens
  CDR3 for beta chain variable domain of TCR clone 727 (TRBV12-4, TRBJ2-7)
CASSLGSGGPYEQYF

SEQ ID NO: 1455 - protein, 10 aa, Homo sapiens
  CDR3 for alpha chain variable domain of TCR clone 728 (TRAV23/DV6, TRAJ31)
CARGGARLMF

SEQ ID NO: 1456 - protein, 14 aa, Homo sapiens
  CDR3 for beta chain variable domain of TCR clone 728 (TRBV7-8, TRBJ1-2)
CASSPDSLSYGYTF

SEQ ID NO: 1457 - protein, 16 aa, Homo sapiens
  CDR3 for alpha chain variable domain of TCR clone 729 (TRAV8-3, TRAJ8)
CAVPRDGNTGFQKLVF

SEQ ID NO: 1458 - protein, 14 aa, Homo sapiens
  CDR3 for beta chain variable domain of TCR clone 729 (TRBV28, TRBJ1-1)
CASSESGRGTEAFF

SEQ ID NO: 1459 - protein, 14 aa, Homo sapiens
  CDR3 for alpha chain variable domain of TCR clone 730 (TRAV12-3, TRAJ10)
SHLPLTGGGNKLTF

SEQ ID NO: 1460 - protein, 12 aa, Homo sapiens
  CDR3 for beta chain variable domain of TCR clone 730 (TRBV11-2, TRBJ2-2)
CASSLGGGELFF

SEQ ID NO: 1461 - protein, 13 aa, Homo sapiens
  CDR3 for alpha chain variable domain of TCR clone 731 (TRAV12-1, TRAJ33)
CGDAPDSNYQLIW

SEQ ID NO: 1462 - protein, 12 aa, Homo sapiens
  CDR3 for beta chain variable domain of TCR clone 731 (TRBV11-2, TRBJ2-2)
CASSLGGGELFF

SEQ ID NO: 1463 - protein, 11 aa, Homo sapiens
  CDR3 for alpha chain variable domain of TCR clone 732 (TRAV12-2, TRAJ33)
CAVTSNYQLIW

SEQ ID NO: 1464 - protein, 14 aa, Homo sapiens
  CDR3 for beta chain variable domain of TCR clone 732 (TRBV12-4, TRBJ2-2)
CASNQGANTGELFF

SEQ ID NO: 1465 - protein, 14 aa, Homo sapiens
  CDR3 for alpha chain variable domain of TCR clone 733 (TRAV12-2, TRAJ40)
CAVKIPSGTYKYIF

SEQ ID NO: 1466 - protein, 13 aa, Homo sapiens
  CDR3 for beta chain variable domain of TCR clone 733 (TRBV7-9, TRBJ1-2)
CASSLKQNYGYTF

SEQ ID NO: 1467 - protein, 16 aa, Homo sapiens
  CDR3 for alpha chain variable domain of TCR clone 734 (TRAV30, TRAJ24)
CGTEIVDADSWGKFQF

SEQ ID NO: 1468 - protein, 15 aa, Homo sapiens
  CDR3 for beta chain variable domain of TCR clone 734 (TRBV27, TRBJ2-1)
CASSNGGGSSNEQFF

SEQ ID NO: 1469 - protein, 13 aa, Homo sapiens
  CDR3 for alpha chain variable domain of TCR clone 735 (TRAV12-1, TRAJ11)
CVVTRGGYSTLTF

SEQ ID NO: 1470 - protein, 13 aa, Homo sapiens
  CDR3 for beta chain variable domain of TCR clone 735 (TRBV20-1, TRBJ1-2)
CSARDQGAYGYTF

SEQ ID NO: 1471 - protein, 17 aa, Homo sapiens
  CDR3 for alpha chain variable domain of TCR clone 736 (TRAV12-2, TRAJ6)
CAPQGPPRAGGSYIPTF

SEQ ID NO: 1472 - protein, 16 aa, Homo sapiens
  CDR3 for beta chain variable domain of TCR clone 736 (TRBV19, TRBJ2-2)
CASSTARASNTGELFF

SEQ ID NO: 1473 - protein, 12 aa, Homo sapiens
  CDR3 for alpha chain variable domain of TCR clone 737 (TRAV27, TRAJ13)
CAGAGGYQKVTF

SEQ ID NO: 1474 - protein, 15 aa, Homo sapiens
  CDR3 for beta chain variable domain of TCR clone 737 (TRBV20-1, TRBJ2-6)
CSARDRGPGANVLTF

SEQ ID NO: 1475 - protein, 15 aa, Homo sapiens
  CDR3 for alpha chain variable domain of TCR clone 738 (TRAV26-1, TRAJ48)
CIARWSWFGNEKLTF

SEQ ID NO: 1476 - protein, 12 aa, Homo sapiens
  CDR3 for beta chain variable domain of TCR clone 738 (TRBV19, TRBJ2-5)
CASSISEETQYF

SEQ ID NO: 1477 - protein, 18 aa, Homo sapiens
  CDR3 for alpha chain variable domain of TCR clone 739 (TRAV35, TRAJ28)
CAGHNYPLSGAGSYQLTF

SEQ ID NO: 1478 - protein, 12 aa, Homo sapiens
  CDR3 for beta chain variable domain of TCR clone 739 (TRBV7-9, TRBJ1-1)
CASSLEGTEAFF

SEQ ID NO: 1479 - protein, 12 aa, Homo sapiens
  CDR3 for alpha chain variable domain of TCR clone 740 (TRAV3, TRAJ7)
CADLLWEQQTRF

SEQ ID NO: 1480 - protein, 13 aa, Homo sapiens
  CDR3 for beta chain variable domain of TCR clone 740 (TRBV7-3, TRBJ2-5)
CASSFRGGETQYF

SEQ ID NO: 1481 - protein, 19 aa, Homo sapiens
  CDR3 for alpha chain variable domain of TCR clone 741 (TRAV1-2, TRAJ26)
CLLPLCCERPDNYGQNFVF

SEQ ID NO: 1482 - protein, 15 aa, Homo sapiens
  CDR3 for beta chain variable domain of TCR clone 741 (TRBV9, TRBJ1-6)
CASSVAGTGDSPLHF

SEQ ID NO: 1483 - protein, 15 aa, Homo sapiens
  CDR3 for alpha chain variable domain of TCR clone 742 (TRAV8-1, TRAJ6)
CAVNTPPGGSYIPTF

SEQ ID NO: 1484 - protein, 14 aa, Homo sapiens
  CDR3 for beta chain variable domain of TCR clone 742 (TRBV12-4, TRBJ2-1)
CASSLGQGASEQFF

SEQ ID NO: 1485 - protein, 14 aa, Homo sapiens
  CDR3 for alpha chain variable domain of TCR clone 743 (TRAV12-1, TRAJ17)
CVVNYKAAGNKLTF

SEQ ID NO: 1486 - protein, 14 aa, Homo sapiens
  CDR3 for beta chain variable domain of TCR clone 743 (TRBV7-8, TRBJ2-3)
CASSLEAGTDTQYF

SEQ ID NO: 1487 - protein, 12 aa, Homo sapiens
  CDR3 for alpha chain variable domain of TCR clone 744 (TRAV12-1, TRAJ31)
CVSWNNNARLMF

SEQ ID NO: 1488 - protein, 15 aa, Homo sapiens
  CDR3 for beta chain variable domain of TCR clone 744 (TRBV7-2, TRBJ1-5)
CASSLDRGQDQPQHF

SEQ ID NO: 1489 - protein, 11 aa, Homo sapiens
  CDR3 for alpha chain variable domain of TCR clone 745 (TRAV3, TRAJ21)
CAVGNFNKFYF

SEQ ID NO: 1490 - protein, 17 aa, Homo sapiens
  CDR3 for beta chain variable domain of TCR clone 745 (TRBV24-1, TRBJ2-1)
CATSDVSTSGTYNEQFF

SEQ ID NO: 1491 - protein, 16 aa, Homo sapiens
  CDR3 for alpha chain variable domain of TCR clone 746 (TRAV3, TRAJ37)
CAVRPHGSGNTGKLIF

SEQ ID NO: 1492 - protein, 14 aa, Homo sapiens
  CDR3 for beta chain variable domain of TCR clone 746 (TRBV25-1, TRBJ1-1)
CASTHLGGNTEAFF

SEQ ID NO: 1493 - protein, 12 aa, Homo sapiens
  CDR3 for alpha chain variable domain of TCR clone 747 (TRAV8-3, TRAJ26)
CAGDNYGQNFVF

SEQ ID NO: 1494 - protein, 12 aa, Homo sapiens
  CDR3 for beta chain variable domain of TCR clone 747 (TRBV11-2, TRBJ2-1)
CASSPGNNEQFF

SEQ ID NO: 1495 - protein, 16 aa, Homo sapiens
  CDR3 for alpha chain variable domain of TCR clone 748 (TRAV1-2, TRAJ6)
CAVRDQGTGGSYIPTF

SEQ ID NO: 1496 - protein, 13 aa, Homo sapiens
  CDR3 for beta chain variable domain of TCR clone 748 (TRBV28, TRBJ2-7)
CASTPGLAGEQYF

SEQ ID NO: 1497 - protein, 13 aa, Homo sapiens
  CDR3 for alpha chain variable domain of TCR clone 749 (TRAV8-3, TRAJ6)
CAARRGGSYIPTF

SEQ ID NO: 1498 - protein, 15 aa, Homo sapiens
  CDR3 for beta chain variable domain of TCR clone 749 (TRBV4-1, TRBJ2-3)
CASSNLAGGRDTQYF

SEQ ID NO: 1499 - protein, 12 aa, Homo sapiens
  CDR3 for alpha chain variable domain of TCR clone 750 (TRAV13-1, TRAJ49)
CAASIRSNQFYF

SEQ ID NO: 1500 - protein, 14 aa, Homo sapiens
  CDR3 for beta chain variable domain of TCR clone 750 (TRBV7-2, TRBJ2-1)
CASSPGLAGNEQFF

SEQ ID NO: 1501 - protein, 17 aa, Homo sapiens
  CDR3 for alpha chain variable domain of TCR clone 751 (TRAV27, TRAJ26)
CAGARAPLDNYGQNFVF

SEQ ID NO: 1502 - protein, 15 aa, Homo sapiens
  CDR3 for beta chain variable domain of TCR clone 751 (TRBV11-2, TRBJ2-5)
CASSPRSGGLETQYF

SEQ ID NO: 1503 - protein, 12 aa, Homo sapiens
  CDR3 for alpha chain variable domain of TCR clone 752 (TRAV13-1, TRAJ21)
CAAKEGFNKFYF

SEQ ID NO: 1504 - protein, 17 aa, Homo sapiens
  CDR3 for beta chain variable domain of TCR clone 752 (TRBV20-1, TRBJ2-1)
CSASSSGLAGSYNEQFF

SEQ ID NO: 1505 - protein, 15 aa, Homo sapiens
  CDR3 for alpha chain variable domain of TCR clone 753 (TRAV12-3, TRAJ11)
CAMSEENSGYSTLTF

SEQ ID NO: 1506 - protein, 16 aa, Homo sapiens
  CDR3 for beta chain variable domain of TCR clone 753 (TRBV5-1, TRBJ2-7)
CASSLEGLAGLYEQYF

SEQ ID NO: 1507 - protein, 13 aa, Homo sapiens
  CDR3 for alpha chain variable domain of TCR clone 754 (TRAV23/DV6, TRAJ16)
CAASISDGQKLLF

SEQ ID NO: 1508 - protein, 15 aa, Homo sapiens
  CDR3 for beta chain variable domain of TCR clone 754 (TRBV2, TRBJ2-2)
CASSRETVGTGELFF

SEQ ID NO: 1509 - protein, 13 aa, Homo sapiens
  CDR3 for alpha chain variable domain of TCR clone 755 (TRAV4, TRAJ42)
CLVGGGSQGNLIF

SEQ ID NO: 1510 - protein, 16 aa, Homo sapiens
  CDR3 for beta chain variable domain of TCR clone 755 (TRBV5-1, TRBJ2-3)
CASSLQGRVGADTQYF

SEQ ID NO: 1511 - protein, 16 aa, Homo sapiens
  CDR3 for alpha chain variable domain of TCR clone 756 (TRAV26-1, TRAJ32)
CIVRTNYGGATNKLIF

SEQ ID NO: 1512 - protein, 14 aa, Homo sapiens
  CDR3 for beta chain variable domain of TCR clone 756 (TRBV27, TRBJ1-1)
CASSLLSGLSEAFF

SEQ ID NO: 1513 - protein, 12 aa, Homo sapiens
  CDR3 for alpha chain variable domain of TCR clone 757 (TRAV1-1, TRAJ43)
CAPRVSSNDMRF

SEQ ID NO: 1514 - protein, 15 aa, Homo sapiens
  CDR3 for beta chain variable domain of TCR clone 757 (TRBV5-1, TRBJ2-7)
CASSLGDFTTYEQYF

SEQ ID NO: 1515 - protein, 13 aa, Homo sapiens
  CDR3 for alpha chain variable domain of TCR clone 758 (TRAV21, TRAJ27)
CAARPGNAGKSTF

SEQ ID NO: 1516 - protein, 13 aa, Homo sapiens
  CDR3 for beta chain variable domain of TCR clone 758 (TRBV18, TRBJ2-7)
CASQSGGGYEQYF

SEQ ID NO: 1517 - protein, 17 aa, Homo sapiens
  CDR3 for alpha chain variable domain of TCR clone 759 (TRAV3, TRAJ6)
CAVRDGPRAGGSYIPTF

SEQ ID NO: 1518 - protein, 18 aa, Homo sapiens
  CDR3 for beta chain variable domain of TCR clone 759 (TRBV7-9, TRBJ2-7)
CASSLTTSGSRTWYEQYF

SEQ ID NO: 1519 - protein, 15 aa, Homo sapiens
  CDR3 for alpha chain variable domain of TCR clone 760 (TRAV8-3, TRAJ45)
CASSYSGGGADGLTF

SEQ ID NO: 1520 - protein, 16 aa, Homo sapiens
  CDR3 for beta chain variable domain of TCR clone 760 (TRBV7-9, TRBJ2-2)
CASSGFGGANTGELFF

SEQ ID NO: 1521 - protein, 17 aa, Homo sapiens
  CDR3 for alpha chain variable domain of TCR clone 761 (TRAV3, TRAJ42)
CAVRDRDYGGSQGNLIF

SEQ ID NO: 1522 - protein, 14 aa, Homo sapiens
  CDR3 for beta chain variable domain of TCR clone 761 (TRBV7-2, TRBJ2-5)
CASSPRGSSETQYF

SEQ ID NO: 1523 - protein, 14 aa, Homo sapiens
  CDR3 for alpha chain variable domain of TCR clone 762 (TRAV13-1, TRAJ26)
CAASSAHYGQNFVF

SEQ ID NO: 1524 - protein, 17 aa, Homo sapiens
  CDR3 for beta chain variable domain of TCR clone 762 (TRBV25-1, TRBJ2-5)
CASSRRGGRGGQETQYF

SEQ ID NO: 1525 - protein, 22 aa, Homo sapiens
  CDR3 for alpha chain variable domain of TCR clone 763 (TRAV8-2, TRAJ45)
HLTKPSAHMSDAAEYSADGLTF

SEQ ID NO: 1526 - protein, 13 aa, Homo sapiens
  CDR3 for beta chain variable domain of TCR clone 763 (TRBV7-3, TRBJ2-1)
CASSPVAYNEQFF

SEQ ID NO: 1527 - protein, 16 aa, Homo sapiens
  CDR3 for alpha chain variable domain of TCR clone 764 (TRAV3, TRAJ10)
CAVRDMRAGGGNKLTF

SEQ ID NO: 1528 - protein, 15 aa, Homo sapiens
  CDR3 for beta chain variable domain of TCR clone 764 (TRBV11-2, TRBJ1-6)
CASTGFGTAVSPLHF

SEQ ID NO: 1529 - protein, 14 aa, Homo sapiens
  CDR3 for alpha chain variable domain of TCR clone 765 (TRAV2, TRAJ41)
CAVGTSNSGYALNF

SEQ ID NO: 1530 - protein, 13 aa, Homo sapiens
  CDR3 for beta chain variable domain of TCR clone 765 (TRBV4-1, TRBJ2-1)
CASSQEVQYEQFF

SEQ ID NO: 1531 - protein, 15 aa, Homo sapiens
  CDR3 for alpha chain variable domain of TCR clone 766 (TRAV26-1, TRAJ12)
IASSELMDSSYKLIF

SEQ ID NO: 1532 - protein, 11 aa, Homo sapiens
  CDR3 for beta chain variable domain of TCR clone 766 (TRBV7-9, TRBJ2-3)
CASSPPDTQYF

SEQ ID NO: 1533 - protein, 12 aa, Homo sapiens
  CDR3 for alpha chain variable domain of TCR clone 767 (TRAV27, TRAJ9)
CAGESGGFKTIF

SEQ ID NO: 1534 - protein, 14 aa, Homo sapiens
  CDR3 for beta chain variable domain of TCR clone 767 (TRBV6-1, TRBJ2-1)
CASAKDGFYNEQFF

SEQ ID NO: 1535 - protein, 15 aa, Homo sapiens
  CDR3 for alpha chain variable domain of TCR clone 768 (TRAV36/DV7, TRAJ53)
CAVEGSGGSNYKLTF

SEQ ID NO: 1536 - protein, 16 aa, Homo sapiens
  CDR3 for beta chain variable domain of TCR clone 768 (TRBV27, TRBJ2-2)
CASSLSGFWVTGELFF

SEQ ID NO: 1537 - protein, 17 aa, Homo sapiens
  CDR3 for alpha chain variable domain of TCR clone 769 (TRAV3, TRAJ6)
CAVSRRTDTGGSYIPTF

SEQ ID NO: 1538 - protein, 18 aa, Homo sapiens
  CDR3 for beta chain variable domain of TCR clone 769 (TRBV7-2, TRBJ2-3)
CASSLETSRGRKADTQYF

SEQ ID NO: 1539 - protein, 12 aa, Homo sapiens
  CDR3 for alpha chain variable domain of TCR clone 770 (TRAV2, TRAJ34)
CAVERNTDKLIF

SEQ ID NO: 1540 - protein, 14 aa, Homo sapiens
  CDR3 for beta chain variable domain of TCR clone 770 (TRBV7-9, TRBJ2-1)
CASSDNSGYNEQFF

SEQ ID NO: 1541 - protein, 14 aa, Homo sapiens
  CDR3 for alpha chain variable domain of TCR clone 771 (TRAV1-2, TRAJ8)
CAVREDTGFQKLVF

SEQ ID NO: 1542 - protein, 16 aa, Homo sapiens
  CDR3 for beta chain variable domain of TCR clone 771 (TRBV12-5, TRBJ2-5)
CASGPRTSGNQETQYF

SEQ ID NO: 1543 - protein, 12 aa, Homo sapiens
  CDR3 for alpha chain variable domain of TCR clone 772 (TRAV12-2, TRAJ47)
CAVAEYGNKLVF

SEQ ID NO: 1544 - protein, 14 aa, Homo sapiens
  CDR3 for beta chain variable domain of TCR clone 772 (TRBV20-1, TRBJ1-1)
CSAMGGTANTEAFF

SEQ ID NO: 1545 - protein, 13 aa, Homo sapiens
  CDR3 for alpha chain variable domain of TCR clone 773 (TRAV3, TRAJ21)
CAVREPDFNKFYF

SEQ ID NO: 1546 - protein, 17 aa, Homo sapiens
  CDR3 for beta chain variable domain of TCR clone 773 (TRBV7-8, TRBJ2-6)
CASSAGTGGAGANVLTF

SEQ ID NO: 1547 - protein, 17 aa, Homo sapiens
  CDR3 for alpha chain variable domain of TCR clone 774 (TRAV12-2, TRAJ52)
CAVNPYAGGTSYGKLTF

SEQ ID NO: 1548 - protein, 16 aa, Homo sapiens
  CDR3 for beta chain variable domain of TCR clone 774 (TRBV5-5, TRBJ2-2)
CASSGRREGATGELFF

SEQ ID NO: 1549 - protein, 21 aa, Homo sapiens
  CDR3 for alpha chain variable domain of TCR clone 775 (TRAV12-1, TRAJ32)
SSVIQPPTSMNYGGATNKLIF

SEQ ID NO: 1550 - protein, 15 aa, Homo sapiens
  CDR3 for beta chain variable domain of TCR clone 775 (TRBV7-9, TRBJ2-2)
CASGPLDTFPGELFF

SEQ ID NO: 1551 - protein, 19 aa, Homo sapiens
  CDR3 for alpha chain variable domain of TCR clone 776 (TRAV2, TRAJ20)
ILQVREADAAVYRDCKLSF

SEQ ID NO: 1552 - protein, 12 aa, Homo sapiens
  CDR3 for beta chain variable domain of TCR clone 776 (TRBV11-2, TRBJ2-2)
CASSLGGGELFF

SEQ ID NO: 1553 - protein, 16 aa, Homo sapiens
  CDR3 for alpha chain variable domain of TCR clone 777 (TRAV8-3, TRAJ44)
CAVGASNTGTASKLTF

SEQ ID NO: 1554 - protein, 15 aa, Homo sapiens
  CDR3 for beta chain variable domain of TCR clone 777 (TRBV27, TRBJ1-5)
CASTFNRGSNQPQHF

SEQ ID NO: 1555 - protein, 16 aa, Homo sapiens
  CDR3 for alpha chain variable domain of TCR clone 778 (TRAV13-2, TRAJ32)
CAENMNYGGATNKLIF

SEQ ID NO: 1556 - protein, 14 aa, Homo sapiens
  CDR3 for beta chain variable domain of TCR clone 778 (TRBV15, TRBJ2-5)
CATSSTGYQETQYF

SEQ ID NO: 1557 - protein, 11 aa, Homo sapiens
  CDR3 for alpha chain variable domain of TCR clone 779 (TRAV12-1, TRAJ21)
CVVYNFNKFYF

SEQ ID NO: 1558 - protein, 14 aa, Homo sapiens
  CDR3 for beta chain variable domain of TCR clone 779 (TRBV19, TRBJ2-7)
CASSMGQGAIEQYF

SEQ ID NO: 1559 - protein, 12 aa, Homo sapiens
  CDR3 for alpha chain variable domain of TCR clone 780 (TRAV13-1, TRAJ21)
CAAKEGFNKFYF

SEQ ID NO: 1560 - protein, 15 aa, Homo sapiens
  CDR3 for beta chain variable domain of TCR clone 780 (TRBV25-1, TRBJ1-4)
CASSPGDSTNEKLFF

SEQ ID NO: 1561 - protein, 13 aa, Homo sapiens
  CDR3 for alpha chain variable domain of TCR clone 781 (TRAV36/DV7, TRAJ53)
CALSGGSNYKLTF

SEQ ID NO: 1562 - protein, 13 aa, Homo sapiens
  CDR3 for beta chain variable domain of TCR clone 781 (TRBV28, TRBJ2-7)
CASSLPSRYEQYF

SEQ ID NO: 1563 - protein, 13 aa, Homo sapiens
  CDR3 for alpha chain variable domain of TCR clone 782 (TRAV23/DV6, TRAJ15)
CAALPAGRNCSDL

SEQ ID NO: 1564 - protein, 14 aa, Homo sapiens
  CDR3 for beta chain variable domain of TCR clone 782 (TRBV7-9, TRBJ1-2)
CASSRQGANYGYTF

SEQ ID NO: 1565 - protein, 13 aa, Homo sapiens
  CDR3 for alpha chain variable domain of TCR clone 783 (TRAV21, TRAJ27)
CAARPGNAGKSTF

SEQ ID NO: 1566 - protein, 13 aa, Homo sapiens
  CDR3 for beta chain variable domain of TCR clone 783 (TRBV13, TRBJ2-1)
CASILGGRGEQFF

SEQ ID NO: 1567 - protein, 13 aa, Homo sapiens
  CDR3 for alpha chain variable domain of TCR clone 784 (TRAV20, TRAJ48)
CAVQGVGNEKLTF

SEQ ID NO: 1568 - protein, 14 aa, Homo sapiens
  CDR3 for beta chain variable domain of TCR clone 784 (TRBV27, TRBJ2-7)
CASSFRDGPYEQYF

SEQ ID NO: 1569 - protein, 14 aa, Homo sapiens
  CDR3 for alpha chain variable domain of TCR clone 785 (TRAV35, TRAJ24)
CAGPRRDSWGKLQF

SEQ ID NO: 1570 - protein, 12 aa, Homo sapiens
  CDR3 for beta chain variable domain of TCR clone 785 (TRBV12-4, TRBJ2-3)
CASSLGQDTQYF

SEQ ID NO: 1571 - protein, 14 aa, Homo sapiens
  CDR3 for alpha chain variable domain of TCR clone 786 (TRAV30, TRAJ33)
CGTVAPRSNYQLIW

SEQ ID NO: 1572 - protein, 16 aa, Homo sapiens
  CDR3 for beta chain variable domain of TCR clone 786 (TRBV3-1, TRBJ2-5)
CASSPGQFNGFGTQYF

SEQ ID NO: 1573 - protein, 16 aa, Homo sapiens
  CDR3 for alpha chain variable domain of TCR clone 787 (TRAV17, TRAJ35)
CATAEGGIGFGNVLHC

SEQ ID NO: 1574 - protein, 16 aa, Homo sapiens
  CDR3 for beta chain variable domain of TCR clone 787 (TRBV6-5, TRBJ2-7)
CASSSDPTSGFYEQYF

SEQ ID NO: 1575 - protein, 14 aa, Homo sapiens
  CDR3 for alpha chain variable domain of TCR clone 788 (TRAV21, TRAJ52)
CGRAGGTSYGKLTF

SEQ ID NO: 1576 - protein, 14 aa, Homo sapiens
  CDR3 for beta chain variable domain of TCR clone 788 (TRBV19, TRBJ1-2)
CASSVLGYNYGYTF

SEQ ID NO: 1577 - protein, 16 aa, Homo sapiens
  CDR3 for alpha chain variable domain of TCR clone 789 (TRAV30, TRAJ24)
CGTEIVDADSWGKFQF

SEQ ID NO: 1578 - protein, 18 aa, Homo sapiens
  CDR3 for beta chain variable domain of TCR clone 789 (TRBV7-9, TRBJ2-7)
CASSLTTSGSRTWYEQYF

SEQ ID NO: 1579 - protein, 13 aa, Homo sapiens
  CDR3 for alpha chain variable domain of TCR clone 790 (TRAV8-3, TRAJ44)
CAVVPGTASKLTF

SEQ ID NO: 1580 - protein, 14 aa, Homo sapiens
  CDR3 for beta chain variable domain of TCR clone 790 (TRBV11-2, TRBJ2-3)
CASRRLARTDTQYF

SEQ ID NO: 1581 - protein, 11 aa, Homo sapiens
  CDR3 for alpha chain variable domain of TCR clone 791 (TRAV13-1, TRAJ30)
CAASRDDKIIF

SEQ ID NO: 1582 - protein, 15 aa, Homo sapiens
  CDR3 for beta chain variable domain of TCR clone 791 (TRBV18, TRBJ1-1)
CASSPSSWVNTEAFF

SEQ ID NO: 1583 - protein, 14 aa, Homo sapiens
  CDR3 for alpha chain variable domain of TCR clone 792 (TRAV26-2, TRAJ32)
CCVGYGGATNKLIF

SEQ ID NO: 1584 - protein, 14 aa, Homo sapiens
  CDR3 for beta chain variable domain of TCR clone 792 (TRBV4-2, TRBJ2-1)
CASGLDRAYNEQFF

SEQ ID NO: 1585 - protein, 14 aa, Homo sapiens
  CDR3 for alpha chain variable domain of TCR clone 793 (TRAV3, TRAJ28)
CAVRRGAGSYQLTF

SEQ ID NO: 1586 - protein, 16 aa, Homo sapiens
  CDR3 for beta chain variable domain of TCR clone 793 (TRBV4-1, TRBJ2-7)
CASSQEWTSGPLEQYF

SEQ ID NO: 1587 - protein, 20 aa, Homo sapiens
  CDR3 for alpha chain variable domain of TCR clone 794 (TRAV21, TRAJ4)
AASQPGDSATLAGGYNKLIF

SEQ ID NO: 1588 - protein, 19 aa, Homo sapiens
  CDR3 for beta chain variable domain of TCR clone 794 (TRBV18, TRBJ1-3)
CASSPLSRTGMSSGNTIYF

SEQ ID NO: 1589 - protein, 11 aa, Homo sapiens
  CDR3 for alpha chain variable domain of TCR clone 795 (TRAV13-1, TRAJ40)
CAVSGTYKYIF

SEQ ID NO: 1590 - protein, 13 aa, Homo sapiens
  CDR3 for beta chain variable domain of TCR clone 795 (TRBV19, TRBJ1-5)
CASSIGGNQPQHF

SEQ ID NO: 1591 - protein, 15 aa, Homo sapiens
  CDR3 for alpha chain variable domain of TCR clone 796 (TRAV26-2, TRAJ39)
CSLRGNNNAGNMLTF

SEQ ID NO: 1592 - protein, 15 aa, Homo sapiens
  CDR3 for beta chain variable domain of TCR clone 796 (TRBV5-4, TRBJ1-1)
CASSSLGWANTEAFF

SEQ ID NO: 1593 - protein, 14 aa, Homo sapiens
  CDR3 for alpha chain variable domain of TCR clone 797 (TRAV12-3, TRAJ10)
SHLPLTGGGNKLTF

SEQ ID NO: 1594 - protein, 12 aa, Homo sapiens
  CDR3 for beta chain variable domain of TCR clone 797 (TRBV7-9, TRBJ2-7)
CASSIKREEQYF

SEQ ID NO: 1595 - protein, 15 aa, Homo sapiens
  CDR3 for alpha chain variable domain of TCR clone 798 (TRAV12-2, TRAJ53)
CAVNGGGGSNYKLTF

SEQ ID NO: 1596 - protein, 14 aa, Homo sapiens
  CDR3 for beta chain variable domain of TCR clone 798 (TRBV19, TRBJ2-2)
CASSTLHRSGELFF

SEQ ID NO: 1597 - protein, 13 aa, Homo sapiens
  CDR3 for alpha chain variable domain of TCR clone 799 (TRAV8-3, TRAJ43)
CAVVPYNNNDMRF

SEQ ID NO: 1598 - protein, 16 aa, Homo sapiens
  CDR3 for beta chain variable domain of TCR clone 799 (TRBV7-2, TRBJ2-5)
CASSPFPTGGEETQYF

SEQ ID NO: 1599 - protein, 15 aa, Homo sapiens
  CDR3 for alpha chain variable domain of TCR clone 800 (TRAV25, TRAJ52)
CAGTSGGTSYGKLTF

SEQ ID NO: 1600 - protein, 13 aa, Homo sapiens
  CDR3 for beta chain variable domain of TCR clone 800 (TRBV6-5, TRBJ2-5)
CASSPQGGETQYF

SEQ ID NO: 1601 - protein, 15 aa, Homo sapiens
  CDR3 for alpha chain variable domain of TCR clone 801 (TRAV26-1, TRAJ3)
CIVRSGYSSASKIIF

SEQ ID NO: 1602 - protein, 14 aa, Homo sapiens
  CDR3 for beta chain variable domain of TCR clone 801 (TRBV13, TRBJ2-5)
CASYRRLAEETQYF

SEQ ID NO: 1603 - protein, 13 aa, Homo sapiens
  CDR3 for alpha chain variable domain of TCR clone 802 (TRAV17, TRAJ9)
CATAITGGFKTIF

SEQ ID NO: 1604 - protein, 16 aa, Homo sapiens
  CDR3 for beta chain variable domain of TCR clone 802 (TRBV15, TRBJ2-1)
CATSRNLAGGYNEQFF

SEQ ID NO: 1605 - protein, 14 aa, Homo sapiens
  CDR3 for alpha chain variable domain of TCR clone 803 (TRAV12-3, TRAJ10)
SHLPLTGGGNKLTF

SEQ ID NO: 1606 - protein, 15 aa, Homo sapiens
  CDR3 for beta chain variable domain of TCR clone 803 (TRBV11-2, TRBJ1-3)
CASSLDGTVGNTIYF

SEQ ID NO: 1607 - protein, 16 aa, Homo sapiens
  CDR3 for alpha chain variable domain of TCR clone 804 (TRAV30, TRAJ24)
CGTEIVDADSWGKFQF

SEQ ID NO: 1608 - protein, 14 aa, Homo sapiens
  CDR3 for beta chain variable domain of TCR clone 804 (TRBV12-5, TRBJ2-5)
CASGSRTHQGTQYF

SEQ ID NO: 1609 - protein, 14 aa, Homo sapiens
  CDR3 for alpha chain variable domain of TCR clone 805 (TRAV13-1, TRAJ35)
CAASKGGFGNVLHC

SEQ ID NO: 1610 - protein, 13 aa, Homo sapiens
  CDR3 for beta chain variable domain of TCR clone 805 (TRBV7-3, TRBJ1-1)
CASSQDWGAEAFF

SEQ ID NO: 1611 - protein, 14 aa, Homo sapiens
  CDR3 for alpha chain variable domain of TCR clone 806 (TRAV35, TRAJ38)
CAGSNAGNNRKLIW

SEQ ID NO: 1612 - protein, 12 aa, Homo sapiens
  CDR3 for beta chain variable domain of TCR clone 806 (TRBV19, TRBJ2-7)
CASTDRGYEQYF

SEQ ID NO: 1613 - protein, 11 aa, Homo sapiens
  CDR3 for alpha chain variable domain of TCR clone 807 (TRAV13-1, TRAJ43)
CAAHNNNDMRF

SEQ ID NO: 1614 - protein, 15 aa, Homo sapiens
  CDR3 for beta chain variable domain of TCR clone 807 (TRBV6-1, TRBJ2-2)
CASSRLRGDTGELFF

SEQ ID NO: 1615 - protein, 15 aa, Homo sapiens
  CDR3 for alpha chain variable domain of TCR clone 808 (TRAV20, TRAJ53)
CAVQASGGSNYKLTF

SEQ ID NO: 1616 - protein, 12 aa, Homo sapiens
  CDR3 for beta chain variable domain of TCR clone 808 (TRBV7-8, TRBJ2-7)
CASSLGDREQYF

SEQ ID NO: 1617 - protein, 14 aa, Homo sapiens
  CDR3 for alpha chain variable domain of TCR clone 809 (TRAV12-2, TRAJ13)
CAVKKTGGYQKVTF

SEQ ID NO: 1618 - protein, 13 aa, Homo sapiens
  CDR3 for beta chain variable domain of TCR clone 809 (TRBV10-3, TRBJ2-7)
CASKLAVNYEQYF

SEQ ID NO: 1619 - protein, 16 aa, Homo sapiens
  CDR3 for alpha chain variable domain of TCR clone 810 (TRAV12-2, TRAJ43)
CAGDDMRFGAGTRLTV

SEQ ID NO: 1620 - protein, 16 aa, Homo sapiens
  CDR3 for beta chain variable domain of TCR clone 810 (TRBV2, TRBJ2-4)
CASSEAPGGEQNIQYF

SEQ ID NO: 1621 - protein, 15 aa, Homo sapiens
  CDR3 for alpha chain variable domain of TCR clone 811 (TRAV26-1, TRAJ29)
CIVRVEGSGNTPLVF

SEQ ID NO: 1622 - protein, 14 aa, Homo sapiens
  CDR3 for beta chain variable domain of TCR clone 811 (TRBV25-1, TRBJ1-1)
CASTHLGGNTEAFF

SEQ ID NO: 1623 - protein, 13 aa, Homo sapiens
  CDR3 for alpha chain variable domain of TCR clone 812 (TRAV36/DV7, TRAJ49)
CAVEANTGNQFYF

SEQ ID NO: 1624 - protein, 13 aa, Homo sapiens
  CDR3 for beta chain variable domain of TCR clone 812 (TRBV10-3, TRBJ2-7)
CASKLAVNYEQYF

SEQ ID NO: 1625 - protein, 12 aa, Homo sapiens
  CDR3 for alpha chain variable domain of TCR clone 813 (TRAV35, TRAJ31)
CAAASNNARLMF

SEQ ID NO: 1626 - protein, 14 aa, Homo sapiens
  CDR3 for beta chain variable domain of TCR clone 813 (TRBV2, TRBJ2-2)
CASSLFGGNGELFF

SEQ ID NO: 1627 - protein, 14 aa, Homo sapiens
  CDR3 for alpha chain variable domain of TCR clone 814 (TRAV1-2, TRAJ8)
CAVREDTGFQKLVF

SEQ ID NO: 1628 - protein, 15 aa, Homo sapiens
  CDR3 for beta chain variable domain of TCR clone 814 (TRBV4-1, TRBJ2-7)
CASSQNTGRLYEQYF

SEQ ID NO: 1629 - protein, 14 aa, Homo sapiens
  CDR3 for alpha chain variable domain of TCR clone 815 (TRAV12-3, TRAJ10)
SHLPLTGGGNKLTF

SEQ ID NO: 1630 - protein, 13 aa, Homo sapiens
  CDR3 for beta chain variable domain of TCR clone 815 (TRBV9, TRBJ2-1)
CASSPSGGNEQFF

SEQ ID NO: 1631 - protein, 15 aa, Homo sapiens
  CDR3 for alpha chain variable domain of TCR clone 816 (TRAV12-3, TRAJ10)
CASYILTGGGNKLTF

SEQ ID NO: 1632 - protein, 15 aa, Homo sapiens
  CDR3 for beta chain variable domain of TCR clone 816 (TRBV7-2, TRBJ1-6)
CASSLGPDRGMPLHF

SEQ ID NO: 1633 - protein, 17 aa, Homo sapiens
  CDR3 for alpha chain variable domain of TCR clone 817 (TRAV3, TRAJ42)
CAVRDRDYGGSQGNLIF

SEQ ID NO: 1634 - protein, 12 aa, Homo sapiens
  CDR3 for beta chain variable domain of TCR clone 817 (TRBV11-2, TRBJ2-1)
CASSPGNNEQFF

SEQ ID NO: 1635 - protein, 13 aa, Homo sapiens
  CDR3 for alpha chain variable domain of TCR clone 818 (TRAV21, TRAJ57)
CAVIEGGSEKLVF

SEQ ID NO: 1636 - protein, 15 aa, Homo sapiens
  CDR3 for beta chain variable domain of TCR clone 818 (TRBV10-3, TRBJ2-5)
CAISEFGRGQETQYF

SEQ ID NO: 1637 - protein, 14 aa, Homo sapiens
  CDR3 for alpha chain variable domain of TCR clone 819 (TRAV12-3, TRAJ10)
SHLPLTGGGNKLTF

SEQ ID NO: 1638 - protein, 12 aa, Homo sapiens
  CDR3 for beta chain variable domain of TCR clone 819 (TRBV7-8, TRBJ2-7)
CASSLGDREQYF

SEQ ID NO: 1639 - protein, 12 aa, Homo sapiens
  CDR3 for alpha chain variable domain of TCR clone 820 (TRAV1-2, TRAJ33)
CAALDSNYQLIW

SEQ ID NO: 1640 - protein, 16 aa, Homo sapiens
  CDR3 for beta chain variable domain of TCR clone 820 (TRBV6-4, TRBJ1-2)
CASSEAVGDPNYGYTF

SEQ ID NO: 1641 - protein, 14 aa, Homo sapiens
  CDR3 for alpha chain variable domain of TCR clone 821 (TRAV12-2, TRAJ13)
CAVKKTGGYQKVTF

SEQ ID NO: 1642 - protein, 14 aa, Homo sapiens
  CDR3 for beta chain variable domain of TCR clone 821 (TRBV5-5, TRBJ2-7)
CASSLGQGTYEQYF

SEQ ID NO: 1643 - protein, 14 aa, Homo sapiens
  CDR3 for alpha chain variable domain of TCR clone 822 (TRAV12-3, TRAJ10)
SHLPLTGGGNKLTF

SEQ ID NO: 1644 - protein, 15 aa, Homo sapiens
  CDR3 for beta chain variable domain of TCR clone 822 (TRBV7-9, TRBJ1-4)
CASSRTGGFNEKLFF

SEQ ID NO: 1645 - protein, 16 aa, Homo sapiens
  CDR3 for alpha chain variable domain of TCR clone 823 (TRAV12-3, TRAJ53)
CAMSVGSGGSNYKLTF

SEQ ID NO: 1646 - protein, 11 aa, Homo sapiens
  CDR3 for beta chain variable domain of TCR clone 823 (TRBV29-1, TRBJ2-5)
CSVASGETQYF

SEQ ID NO: 1647 - protein, 14 aa, Homo sapiens
  CDR3 for alpha chain variable domain of TCR clone 824 (TRAV12-2, TRAJ29)
CAVRRNSGNTPLVF

SEQ ID NO: 1648 - protein, 13 aa, Homo sapiens
  CDR3 for beta chain variable domain of TCR clone 824 (TRBV12-4, TRBJ2-1)
CASSHYTDNEQFF

SEQ ID NO: 1649 - protein, 13 aa, Homo sapiens
  CDR3 for alpha chain variable domain of TCR clone 825 (TRAV12-1, TRAJ21)
CVVTLYNFNKFYF

SEQ ID NO: 1650 - protein, 20 aa, Homo sapiens
  CDR3 for beta chain variable domain of TCR clone 825 (TRBV7-8, TRBJ2-1)
CASSLAHRLAGVRSYNEQFF

SEQ ID NO: 1651 - protein, 14 aa, Homo sapiens
  CDR3 for alpha chain variable domain of TCR clone 826 (TRAV12-3, TRAJ10)
SHLPLTGGGNKLTF

SEQ ID NO: 1652 - protein, 15 aa, Homo sapiens
  CDR3 for beta chain variable domain of TCR clone 826 (TRBV7-9, TRBJ1-6)
CASSSPGRGNSPLHF

SEQ ID NO: 1653 - protein, 15 aa, Homo sapiens
  CDR3 for alpha chain variable domain of TCR clone 827 (TRAV26-1, TRAJ44)
CIARVPFGTASKLTF

SEQ ID NO: 1654 - protein, 17 aa, Homo sapiens
  CDR3 for beta chain variable domain of TCR clone 827 (TRBV24-1, TRBJ2-4)
CATSDAEARGVRNIQYF

SEQ ID NO: 1655 - protein, 13 aa, Homo sapiens
  CDR3 for alpha chain variable domain of TCR clone 828 (TRAV8-3, TRAJ20)
CAVGRPNDYKLSF

SEQ ID NO: 1656 - protein, 14 aa, Homo sapiens
  CDR3 for beta chain variable domain of TCR clone 828 (TRBV12-5, TRBJ2-5)
CASGSRTHQETQYF

SEQ ID NO: 1657 - protein, 16 aa, Homo sapiens
  CDR3 for alpha chain variable domain of TCR clone 829 (TRAV35, TRAJ37)
CWAFLRGSSNTGKLIF

SEQ ID NO: 1658 - protein, 13 aa, Homo sapiens
  CDR3 for beta chain variable domain of TCR clone 829 (TRBV2, TRBJ1-2)
CASSVRGNYGYTF

SEQ ID NO: 1659 - protein, 14 aa, Homo sapiens
  CDR3 for alpha chain variable domain of TCR clone 830 (TRAV1-2, TRAJ8)
CAVREDTGFQKLVF

SEQ ID NO: 1660 - protein, 12 aa, Homo sapiens
  CDR3 for beta chain variable domain of TCR clone 830 (TRBV2, TRBJ2-1)
CAYGPPGNEQFF

SEQ ID NO: 1661 - protein, 14 aa, Homo sapiens
  CDR3 for alpha chain variable domain of TCR clone 831 (TRAV26-1, TRAJ48)
CIVRVGFGNEKLTF

SEQ ID NO: 1662 - protein, 13 aa, Homo sapiens
  CDR3 for beta chain variable domain of TCR clone 831 (TRBV11-3, TRBJ2-3)
CASSHDTKDTQYF

SEQ ID NO: 1663 - protein, 15 aa, Homo sapiens
  CDR3 for alpha chain variable domain of TCR clone 832 (TRAV27, TRAJ50)
CAGVGRGTSYDKVIF

SEQ ID NO: 1664 - protein, 14 aa, Homo sapiens
  CDR3 for beta chain variable domain of TCR clone 832 (TRBV7-2, TRBJ1-1)
CASSFYDLNTEAFF

SEQ ID NO: 1665 - protein, 12 aa, Homo sapiens
  CDR3 for alpha chain variable domain of TCR clone 833 (TRAV12-3, TRAJ17)
CAMTLTGNKLTF

SEQ ID NO: 1666 - protein, 13 aa, Homo sapiens
  CDR3 for beta chain variable domain of TCR clone 833 (TRBV27, TRBJ2-1)
CASRTLGVGEQFF

SEQ ID NO: 1667 - protein, 11 aa, Homo sapiens
  CDR3 for alpha chain variable domain of TCR clone 834 (TRAV8-3, TRAJ49)
CAVNTGNQFYF

SEQ ID NO: 1668 - protein, 12 aa, Homo sapiens
  CDR3 for beta chain variable domain of TCR clone 834 (TRBV11-2, TRBJ2-7)
CASSPPADEQYF

SEQ ID NO: 1669 - protein, 15 aa, Homo sapiens
  CDR3 for alpha chain variable domain of TCR clone 835 (TRAV2, TRAJ24)
CAVEVLTDSWGKFQF

SEQ ID NO: 1670 - protein, 14 aa, Homo sapiens
  CDR3 for beta chain variable domain of TCR clone 835 (TRBV19, TRBJ2-1)
CASSMGSGRRSSSS

SEQ ID NO: 1671 - protein, 13 aa, Homo sapiens
  CDR3 for alpha chain variable domain of TCR clone 836 (TRAV12-3, TRAJ40)
CAMSARGTYKYIF

SEQ ID NO: 1672 - protein, 16 aa, Homo sapiens
  CDR3 for beta chain variable domain of TCR clone 836 (TRBV20-1, TRBJ2-3)
CSGEAGLAGGQDTQYF

SEQ ID NO: 1673 - protein, 10 aa, Homo sapiens
  CDR3 for alpha chain variable domain of TCR clone 837 (TRAV12-2, TRAJ52)
RSTSYGKLTF

SEQ ID NO: 1674 - protein, 11 aa, Homo sapiens
  CDR3 for beta chain variable domain of TCR clone 837 (TRBV11-2, TRBJ2-2)
CASSLPGELFF

SEQ ID NO: 1675 - protein, 17 aa, Homo sapiens
  CDR3 for alpha chain variable domain of TCR clone 838 (TRAV13-1, TRAJ28)
CAASPPYSGAGSYQLTF

SEQ ID NO: 1676 - protein, 12 aa, Homo sapiens
  CDR3 for beta chain variable domain of TCR clone 838 (TRBV11-2, TRBJ2-2)
CASSLPTGELFF

SEQ ID NO: 1677 - protein, 12 aa, Homo sapiens
  CDR3 for alpha chain variable domain of TCR clone 839 (TRAV17, TRAJ20)
CATQSNDYKLSF

SEQ ID NO: 1678 - protein, 13 aa, Homo sapiens
  CDR3 for beta chain variable domain of TCR clone 839 (TRBV10-3, TRBJ1-1)
CAIIPEGGTEAFF

SEQ ID NO: 1679 - protein, 15 aa, Homo sapiens
  CDR3 for alpha chain variable domain of TCR clone 840 (TRAV13-1, TRAJ57)
CAASNTQGGSEKLVF

SEQ ID NO: 1680 - protein, 16 aa, Homo sapiens
  CDR3 for beta chain variable domain of TCR clone 840 (TRBV19, TRBJ2-1)
CASSKAGPSSYNEQFF

SEQ ID NO: 1681 - protein, 14 aa, Homo sapiens
  CDR3 for alpha chain variable domain of TCR clone 841 (TRAV13-2, TRAJ15)
CAENPNQAGTALIF

SEQ ID NO: 1682 - protein, 16 aa, Homo sapiens
  CDR3 for beta chain variable domain of TCR clone 841 (TRBV12-4, TRBJ1-2)
CASSPTATGKTRGYTF

SEQ ID NO: 1683 - protein, 14 aa, Homo sapiens
  CDR3 for alpha chain variable domain of TCR clone 842 (TRAV13-1, TRAJ3)
CAASKSSSASKIIF

SEQ ID NO: 1684 - protein, 13 aa, Homo sapiens
  CDR3 for beta chain variable domain of TCR clone 842 (TRBV25-1, TRBJ2-5)
CASSESGRETQYF

SEQ ID NO: 1685 - protein, 15 aa, Homo sapiens
  CDR3 for alpha chain variable domain of TCR clone 843 (TRAV29/DV5, TRAJ42)
CAAKTDGGSQGNLIF

SEQ ID NO: 1686 - protein, 15 aa, Homo sapiens
  CDR3 for beta chain variable domain of TCR clone 843 (TRBV5-1, TRBJ2-2)
CASSSQGGNTGELFF

SEQ ID NO: 1687 - protein, 14 aa, Homo sapiens
  CDR3 for alpha chain variable domain of TCR clone 844 (TRAV21, TRAJ45)
CAVSSGGGADGLTF

SEQ ID NO: 1688 - protein, 15 aa, Homo sapiens
  CDR3 for beta chain variable domain of TCR clone 844 (TRBV6-1, TRBJ2-4)
CASSEAVWTINIQYF

SEQ ID NO: 1689 - protein, 17 aa, Homo sapiens
  CDR3 for alpha chain variable domain of TCR clone 845 (TRAV8-1, TRAJ43)
CAVTNDMRFGAGTRLTV

SEQ ID NO: 1690 - protein, 17 aa, Homo sapiens
  CDR3 for beta chain variable domain of TCR clone 845 (TRBV5-4, TRBJ2-1)
CASSSAGGRGPYNEQFF

SEQ ID NO: 1691 - protein, 12 aa, Homo sapiens
  CDR3 for alpha chain variable domain of TCR clone 846 (TRAV13-1, TRAJ9)
CASHTGGFKTIF

SEQ ID NO: 1692 - protein, 13 aa, Homo sapiens
  CDR3 for beta chain variable domain of TCR clone 846 (TRBV12-4, TRBJ1-2)
CASSSGSKDGYTF

SEQ ID NO: 1693 - protein, 11 aa, Homo sapiens
  CDR3 for alpha chain variable domain of TCR clone 847 (TRAV21, TRAJ34)
CAVTNTDKLIF

SEQ ID NO: 1694 - protein, 17 aa, Homo sapiens
  CDR3 for beta chain variable domain of TCR clone 847 (TRBV20-1, TRBJ2-1)
CSARSPSGGPPTMSSSS

SEQ ID NO: 1695 - protein, 13 aa, Homo sapiens
  CDR3 for alpha chain variable domain of TCR clone 848 (TRAV12-1, TRAJ3)
CVVNPRGASKIIF

SEQ ID NO: 1696 - protein, 13 aa, Homo sapiens
  CDR3 for beta chain variable domain of TCR clone 848 (TRBV28, TRBJ1-5)
CASSDRGNQPQHF

SEQ ID NO: 1697 - protein, 15 aa, Homo sapiens
  CDR3 for alpha chain variable domain of TCR clone 849 (TRAV4, TRAJ10)
CLVGDEEGGGNKLTF

SEQ ID NO: 1698 - protein, 15 aa, Homo sapiens
  CDR3 for beta chain variable domain of TCR clone 849 (TRBV7-2, TRBJ2-7)
CASSLTGQGTYEQYF

SEQ ID NO: 1699 - protein, 13 aa, Homo sapiens
  CDR3 for alpha chain variable domain of TCR clone 850 (TRAV21, TRAJ27)
CAARPGNAGKSTF

SEQ ID NO: 1700 - protein, 16 aa, Homo sapiens
  CDR3 for beta chain variable domain of TCR clone 850 (TRBV20-1, TRBJ1-2)
CSASMGQGVANYGYTF

SEQ ID NO: 1701 - protein, 13 aa, Homo sapiens
  CDR3 for alpha chain variable domain of TCR clone 851 (TRAV13-2, TRAJ48)
CAEMDFGNEKLTF

SEQ ID NO: 1702 - protein, 13 aa, Homo sapiens
  CDR3 for beta chain variable domain of TCR clone 851 (TRBV7-9, TRBJ1-2)
CASSLKQNYGYTF

SEQ ID NO: 1703 - protein, 12 aa, Homo sapiens
  CDR3 for alpha chain variable domain of TCR clone 852 (TRAV27, TRAJ21)
CAGVRQLQQILL

SEQ ID NO: 1704 - protein, 14 aa, Homo sapiens
  CDR3 for beta chain variable domain of TCR clone 852 (TRBV7-9, TRBJ1-4)
CASSLEGQSEKLFF

SEQ ID NO: 1705 - protein, 14 aa, Homo sapiens
  CDR3 for alpha chain variable domain of TCR clone 853 (TRAV27, TRAJ23)
CAGAFDNQGGKLIF

SEQ ID NO: 1706 - protein, 15 aa, Homo sapiens
  CDR3 for beta chain variable domain of TCR clone 853 (TRBV7-3, TRBJ2-7)
CASSLTGQGKYEQYF

SEQ ID NO: 1707 - protein, 16 aa, Homo sapiens
  CDR3 for alpha chain variable domain of TCR clone 854 (TRAV21, TRAJ52)
CAVTNAGGTSYGKLTF

SEQ ID NO: 1708 - protein, 11 aa, Homo sapiens
  CDR3 for beta chain variable domain of TCR clone 854 (TRBV2, TRBJ1-1)
CASREGTEAFF

SEQ ID NO: 1709 - protein, 16 aa, Homo sapiens
  CDR3 for alpha chain variable domain of TCR clone 855 (TRAV8-3, TRAJ10)
CAVGPGVTGGGNKLTF

SEQ ID NO: 1710 - protein, 13 aa, Homo sapiens
  CDR3 for beta chain variable domain of TCR clone 855 (TRBV18, TRBJ1-1)
CASSPGPSGEAFF

SEQ ID NO: 1711 - protein, 14 aa, Homo sapiens
  CDR3 for alpha chain variable domain of TCR clone 856 (TRAV12-2, TRAJ9)
CAVNMEGGGFKTIF

SEQ ID NO: 1712 - protein, 14 aa, Homo sapiens
  CDR3 for beta chain variable domain of TCR clone 856 (TRBV2, TRBJ2-5)
CASSEVLAQETQYF

SEQ ID NO: 1713 - protein, 14 aa, Homo sapiens
  CDR3 for alpha chain variable domain of TCR clone 857 (TRAV12-3, TRAJ10)
SHLPLTGGGNKLTF

SEQ ID NO: 1714 - protein, 15 aa, Homo sapiens
  CDR3 for beta chain variable domain of TCR clone 857 (TRBV7-3, TRBJ2-2)
CASSETGQGTGELFF

SEQ ID NO: 1715 - protein, 10 aa, Homo sapiens
  CDR3 for alpha chain variable domain of TCR clone 858 (TRAV12-1, TRAJ43)
CVVHNNDMRF

SEQ ID NO: 1716 - protein, 13 aa, Homo sapiens
  CDR3 for beta chain variable domain of TCR clone 858 (TRBV12-4, TRBJ1-2)
CASSSGLTVISTF

SEQ ID NO: 1717 - protein, 13 aa, Homo sapiens
  CDR3 for alpha chain variable domain of TCR clone 859 (TRAV20, TRAJ37)
CAGCSSNTGKLIF

SEQ ID NO: 1718 - protein, 21 aa, Homo sapiens
  CDR3 for beta chain variable domain of TCR clone 859 (TRBV4-2, TRBJ2-3)
PCSQKTRPCISVPAAPDTQYF

SEQ ID NO: 1719 - protein, 13 aa, Homo sapiens
  CDR3 for alpha chain variable domain of TCR clone 860 (TRAV8-6, TRAJ50)
CAVIKTSYDKVIF

SEQ ID NO: 1720 - protein, 15 aa, Homo sapiens
  CDR3 for beta chain variable domain of TCR clone 860 (TRBV7-2, TRBJ2-2)
CASRRPGQNTGELFF

SEQ ID NO: 1721 - protein, 15 aa, Homo sapiens
  CDR3 for alpha chain variable domain of TCR clone 861 (TRAV3, TRAJ13)
CAVRVYSGGYQKVTF

SEQ ID NO: 1722 - protein, 15 aa, Homo sapiens
  CDR3 for beta chain variable domain of TCR clone 861 (TRBV5-7, TRBJ1-2)
CASSLGVAANYGYTF

SEQ ID NO: 1723 - protein, 13 aa, Homo sapiens
  CDR3 for alpha chain variable domain of TCR clone 862 (TRAV3, TRAJ20)
CAVRDTPRYKLSF

SEQ ID NO: 1724 - protein, 16 aa, Homo sapiens
  CDR3 for beta chain variable domain of TCR clone 862 (TRBV20-1, TRBJ2-7)
CSARAPGLALSYEQYF

SEQ ID NO: 1725 - protein, 16 aa, Homo sapiens
  CDR3 for alpha chain variable domain of TCR clone 863 (TRAV8-1, TRAJ42)
CAVTSRYGGSQGNLIF

SEQ ID NO: 1726 - protein, 12 aa, Homo sapiens
  CDR3 for beta chain variable domain of TCR clone 863 (TRBV6-3, TRBJ2-7)
CASSLGRRGLYF

SEQ ID NO: 1727 - protein, 14 aa, Homo sapiens
  CDR3 for alpha chain variable domain of TCR clone 864 (TRAV12-1, TRAJ13)
CVVIDSGGYQKVTF

SEQ ID NO: 1728 - protein, 12 aa, Homo sapiens
  CDR3 for beta chain variable domain of TCR clone 864 (TRBV29-1, TRBJ2-3)
CSVTGGADTQYF

SEQ ID NO: 1729 - protein, 15 aa, Homo sapiens
  CDR3 for alpha chain variable domain of TCR clone 865 (TRAV26-2, TRAJ13)
CILRDLSGGYQKVTF

SEQ ID NO: 1730 - protein, 11 aa, Homo sapiens
  CDR3 for beta chain variable domain of TCR clone 865 (TRBV7-9, TRBJ2-5)
CASSLSATQYF

SEQ ID NO: 1731 - protein, 14 aa, Homo sapiens
  CDR3 for alpha chain variable domain of TCR clone 866 (TRAV2, TRAJ9)
CAVDPNTGGFKTIF

SEQ ID NO: 1732 - protein, 13 aa, Homo sapiens
  CDR3 for beta chain variable domain of TCR clone 866 (TRBV20-1, TRBJ2-1)
CSASTGTSNEQFF

SEQ ID NO: 1733 - protein, 12 aa, Homo sapiens
  CDR3 for alpha chain variable domain of TCR clone 867 (TRAV12-2, TRAJ21)
CAVRYNFNKFYF

SEQ ID NO: 1734 - protein, 14 aa, Homo sapiens
  CDR3 for beta chain variable domain of TCR clone 867 (TRBV28, TRBJ2-1)
CASSYYTAYNEQFF

SEQ ID NO: 1735 - protein, 20 aa, Homo sapiens
  CDR3 for alpha chain variable domain of TCR clone 868 (TRAV25, TRAJ21)
TATQTTDVGTYPLSFNKFYF

SEQ ID NO: 1736 - protein, 14 aa, Homo sapiens
  CDR3 for beta chain variable domain of TCR clone 868 (TRBV6-1, TRBJ2-1)
CASAKDGFYNEQFF

SEQ ID NO: 1737 - protein, 13 aa, Homo sapiens
  CDR3 for alpha chain variable domain of TCR clone 869 (TRAV26-1, TRAJ48)
CIVRVVGDEKLTF

SEQ ID NO: 1738 - protein, 19 aa, Homo sapiens
  CDR3 for beta chain variable domain of TCR clone 869 (TRBV11-3, TRBJ2-2)
CASSTRPGAKTTNTGELFF

SEQ ID NO: 1739 - protein, 12 aa, Homo sapiens
  CDR3 for alpha chain variable domain of TCR clone 870 (TRAV38-1, TRAJ32)
CAPLGATNKLIF

SEQ ID NO: 1740 - protein, 14 aa, Homo sapiens
  CDR3 for beta chain variable domain of TCR clone 870 (TRBV29-1, TRBJ2-5)
CSVETSGSGETQYF

SEQ ID NO: 1741 - protein, 14 aa, Homo sapiens
  CDR3 for alpha chain variable domain of TCR clone 871 (TRAV25, TRAJ22)
CAVRSSGSARQLTF

SEQ ID NO: 1742 - protein, 16 aa, Homo sapiens
  CDR3 for beta chain variable domain of TCR clone 871 (TRBV4-2, TRBJ1-1)
CASSPSPGRAAPEAFF

SEQ ID NO: 1743 - protein, 14 aa, Homo sapiens
  CDR3 for alpha chain variable domain of TCR clone 872 (TRAV12-3, TRAJ58)
CAMSTETSGSRLTF

SEQ ID NO: 1744 - protein, 15 aa, Homo sapiens
  CDR3 for beta chain variable domain of TCR clone 872 (TRBV4-1, TRBJ1-4)
CASSDTGGTNEKLFF

SEQ ID NO: 1745 - protein, 18 aa, Homo sapiens
  CDR3 for alpha chain variable domain of TCR clone 873 (TRAV21, TRAJ52)
CAVRPSPAGGTSYGKLTF

SEQ ID NO: 1746 - protein, 13 aa, Homo sapiens
  CDR3 for beta chain variable domain of TCR clone 873 (TRBV29-1, TRBJ2-2)
CSVYREDTGELFF

SEQ ID NO: 1747 - protein, 14 aa, Homo sapiens
  CDR3 for alpha chain variable domain of TCR clone 874 (TRAV1-2, TRAJ27)
CAVRSGTNAGKSTF

SEQ ID NO: 1748 - protein, 15 aa, Homo sapiens
  CDR3 for beta chain variable domain of TCR clone 874 (TRBV18, TRBJ2-7)
CASSPLQGRTYEQYF

SEQ ID NO: 1749 - protein, 14 aa, Homo sapiens
  CDR3 for alpha chain variable domain of TCR clone 875 (TRAV12-2, TRAJ40)
CAVKIPSGTYKYIF

SEQ ID NO: 1750 - protein, 17 aa, Homo sapiens
  CDR3 for beta chain variable domain of TCR clone 875 (TRBV11-2, TRBJ2-1)
CASSLYPPGVEYNEQFF

SEQ ID NO: 1751 - protein, 16 aa, Homo sapiens
  CDR3 for alpha chain variable domain of TCR clone 876 (TRAV30, TRAJ57)
CGTGWAPQGGSEKLVF

SEQ ID NO: 1752 - protein, 14 aa, Homo sapiens
  CDR3 for beta chain variable domain of TCR clone 876 (TRBV18, TRBJ1-1)
CASSPGFQGVEAFF

SEQ ID NO: 1753 - protein, 16 aa, Homo sapiens
  CDR3 for alpha chain variable domain of TCR clone 877 (TRAV12-2, TRAJ45)
CAVKRNPGGGADGLTF

SEQ ID NO: 1754 - protein, 12 aa, Homo sapiens
  CDR3 for beta chain variable domain of TCR clone 877 (TRBV6-1, TRBJ2-5)
CASSEGRETQYF

SEQ ID NO: 1755 - protein, 12 aa, Homo sapiens
  CDR3 for alpha chain variable domain of TCR clone 878 (TRAV12-3, TRAJ17)
CAMTLTGNKLTF

SEQ ID NO: 1756 - protein, 20 aa, Homo sapiens
  CDR3 for beta chain variable domain of TCR clone 878 (TRBV7-8, TRBJ2-2)
CASSHLFPGPTIHITGELFF

SEQ ID NO: 1757 - protein, 13 aa, Homo sapiens
  CDR3 for alpha chain variable domain of TCR clone 879 (TRAV12-1, TRAJ26)
CVVRRNYGQNFVF

SEQ ID NO: 1758 - protein, 15 aa, Homo sapiens
  CDR3 for beta chain variable domain of TCR clone 879 (TRBV28, TRBJ2-1)
CASSIIAGGRSEQFF

SEQ ID NO: 1759 - protein, 16 aa, Homo sapiens
  CDR3 for alpha chain variable domain of TCR clone 880 (TRAV21, TRAJ37)
CAVRPRGSSNTGKLIF

SEQ ID NO: 1760 - protein, 13 aa, Homo sapiens
  CDR3 for beta chain variable domain of TCR clone 880 (TRBV7-9, TRBJ2-5)
CASLSPGQETQYF

SEQ ID NO: 1761 - protein, 12 aa, Homo sapiens
  CDR3 for alpha chain variable domain of TCR clone 881 (TRAV3, TRAJ43)
CAVRDPNNDMRF

SEQ ID NO: 1762 - protein, 13 aa, Homo sapiens
  CDR3 for beta chain variable domain of TCR clone 881 (TRBV19, TRBJ1-2)
CASSVPGQDGYTF

SEQ ID NO: 1763 - protein, 14 aa, Homo sapiens
  CDR3 for alpha chain variable domain of TCR clone 882 (TRAV20, TRAJ32)
CCGRYGGATNKLIF

SEQ ID NO: 1764 - protein, 16 aa, Homo sapiens
  CDR3 for beta chain variable domain of TCR clone 882 (TRBV19, TRBJ2-2)
CASRSPGTGATGELFF

SEQ ID NO: 1765 - protein, 18 aa, Homo sapiens
  CDR3 for alpha chain variable domain of TCR clone 883 (TRAV26-2, TRAJ54)
CILRDVEVGIQGAQKLVF

SEQ ID NO: 1766 - protein, 17 aa, Homo sapiens
  CDR3 for beta chain variable domain of TCR clone 883 (TRBV20-1, TRBJ1-5)
CSASLSPGQGGNQPQHF

SEQ ID NO: 1767 - protein, 14 aa, Homo sapiens
  CDR3 for alpha chain variable domain of TCR clone 884 (TRAV12-2, TRAJ13)
CAVKKTGGYQKVTF

SEQ ID NO: 1768 - protein, 16 aa, Homo sapiens
  CDR3 for beta chain variable domain of TCR clone 884 (TRBV2, TRBJ2-1)
CASRSPAGGKYNEQFF

SEQ ID NO: 1769 - protein, 13 aa, Homo sapiens
  CDR3 for alpha chain variable domain of TCR clone 885 (TRAV26-1, TRAJ34)
CIVRPWITDKLIF

SEQ ID NO: 1770 - protein, 13 aa, Homo sapiens
  CDR3 for beta chain variable domain of TCR clone 885 (TRBV5-1, TRBJ2-1)
CASSLGSYNEQFF

SEQ ID NO: 1771 - protein, 12 aa, Homo sapiens
  CDR3 for alpha chain variable domain of TCR clone 886 (TRAV12-3, TRAJ17)
CAMTLTGNKLTF

SEQ ID NO: 1772 - protein, 15 aa, Homo sapiens
  CDR3 for beta chain variable domain of TCR clone 886 (TRBV10-2, TRBJ2-6)
CASSEQGTGANVLTF

SEQ ID NO: 1773 - protein, 14 aa, Homo sapiens
  CDR3 for alpha chain variable domain of TCR clone 887 (TRAV3, TRAJ17)
CAVRDAAAGNKLTF

SEQ ID NO: 1774 - protein, 13 aa, Homo sapiens
  CDR3 for beta chain variable domain of TCR clone 887 (TRBV2, TRBJ1-1)
CASSVSGYTEAFF

SEQ ID NO: 1775 - protein, 13 aa, Homo sapiens
  CDR3 for alpha chain variable domain of TCR clone 888 (TRAV12-1, TRAJ22)
CVVYSGSARQLTF

SEQ ID NO: 1776 - protein, 10 aa, Homo sapiens
  CDR3 for beta chain variable domain of TCR clone 888 (TRBV6-3, TRBJ2-2)
CASRDGELFF

SEQ ID NO: 1777 - protein, 14 aa, Homo sapiens
  CDR3 for alpha chain variable domain of TCR clone 889 (TRAV3, TRAJ21)
CALGRGSTNFTLDL

SEQ ID NO: 1778 - protein, 14 aa, Homo sapiens
  CDR3 for beta chain variable domain of TCR clone 889 (TRBV7-9, TRBJ2-4)
CASSLAMGGNIQYF

SEQ ID NO: 1779 - protein, 15 aa, Homo sapiens
  CDR3 for alpha chain variable domain of TCR clone 890 (TRAV12-1, TRAJ44)
CVVDEYTGTASKLTF

SEQ ID NO: 1780 - protein, 14 aa, Homo sapiens
  CDR3 for beta chain variable domain of TCR clone 890 (TRBV5-1, TRBJ1-2)
CASSLEPVNYGYTF

SEQ ID NO: 1781 - protein, 12 aa, Homo sapiens
  CDR3 for alpha chain variable domain of TCR clone 891 (TRAV35, TRAJ30)
CAGLNRDDKIIF

SEQ ID NO: 1782 - protein, 15 aa, Homo sapiens
  CDR3 for beta chain variable domain of TCR clone 891 (TRBV9, TRBJ1-6)
CASSVAGTGDSPLHF

SEQ ID NO: 1783 - protein, 14 aa, Homo sapiens
  CDR3 for alpha chain variable domain of TCR clone 892 (TRAV1-2, TRAJ8)
CAVREDTGFQKLVF

SEQ ID NO: 1784 - protein, 15 aa, Homo sapiens
  CDR3 for beta chain variable domain of TCR clone 892 (TRBV7-3, TRBJ2-2)
CASSETGQGTGELFF

SEQ ID NO: 1785 - protein, 16 aa, Homo sapiens
  CDR3 for alpha chain variable domain of TCR clone 893 (TRAV8-3, TRAJ8)
CAVPRDGNTGFQKLVF

SEQ ID NO: 1786 - protein, 15 aa, Homo sapiens
  CDR3 for beta chain variable domain of TCR clone 893 (TRBV6-1, TRBJ2-6)
CASSSRPSGANVLTF

SEQ ID NO: 1787 - protein, 15 aa, Homo sapiens
  CDR3 for alpha chain variable domain of TCR clone 894 (TRAV26-1, TRAJ56)
CIVRVATGANSKLTF

SEQ ID NO: 1788 - protein, 15 aa, Homo sapiens
  CDR3 for beta chain variable domain of TCR clone 894 (TRBV27, TRBJ2-7)
CASSPQREGQREQYF

SEQ ID NO: 1789 - protein, 14 aa, Homo sapiens
  CDR3 for alpha chain variable domain of TCR clone 895 (TRAV16, TRAJ33)
CALSAMDSNYQLIW

SEQ ID NO: 1790 - protein, 16 aa, Homo sapiens
  CDR3 for beta chain variable domain of TCR clone 895 (TRBV25-1, TRBJ2-7)
CASSELTGGGIYEQYF

SEQ ID NO: 1791 - protein, 11 aa, Homo sapiens
  CDR3 for alpha chain variable domain of TCR clone 896 (TRAV13-1, TRAJ6)
CATLGSYIPTF

SEQ ID NO: 1792 - protein, 13 aa, Homo sapiens
  CDR3 for beta chain variable domain of TCR clone 896 (TRBV6-6, TRBJ2-1)
CASSLHQGDEQFF

SEQ ID NO: 1793 - protein, 12 aa, Homo sapiens
  CDR3 for alpha chain variable domain of TCR clone 897 (TRAV17, TRAJ20)
CATYSNDYKLSF

SEQ ID NO: 1794 - protein, 11 aa, Homo sapiens
  CDR3 for beta chain variable domain of TCR clone 897 (TRBV4-1, TRBJ2-2)
CASEHTGELFF

SEQ ID NO: 1795 - protein, 14 aa, Homo sapiens
  CDR3 for alpha chain variable domain of TCR clone 898 (TRAV1-2, TRAJ16)
CAVNRFSDGQKLLF

SEQ ID NO: 1796 - protein, 12 aa, Homo sapiens
  CDR3 for beta chain variable domain of TCR clone 898 (TRBV7-9, TRBJ2-7)
CASSLEGYEQYF

SEQ ID NO: 1797 - protein, 14 aa, Homo sapiens
  CDR3 for alpha chain variable domain of TCR clone 899 (TRAV12-1, TRAJ27)
CGEHIRTNAGKSTF

SEQ ID NO: 1798 - protein, 15 aa, Homo sapiens
  CDR3 for beta chain variable domain of TCR clone 899 (TRBV19, TRBJ1-1)
CASTSGQIQNTEAFF

SEQ ID NO: 1799 - protein, 17 aa, Homo sapiens
  CDR3 for alpha chain variable domain of TCR clone 900 (TRAV35, TRAJ47)
GLLDCRTHTEYGNKLVF

SEQ ID NO: 1800 - protein, 11 aa, Homo sapiens
  CDR3 for beta chain variable domain of TCR clone 900 (TRBV29-1, TRBJ1-1)
CSVEVGTRTFF

SEQ ID NO: 1801 - protein, 14 aa, Homo sapiens
  CDR3 for alpha chain variable domain of TCR clone 901 (TRAV1-2, TRAJ16)
CAVNRFSDGQKLLF

SEQ ID NO: 1802 - protein, 14 aa, Homo sapiens
  CDR3 for beta chain variable domain of TCR clone 901 (TRBV4-1, TRBJ2-2)
CASSQAVNTGELFF

SEQ ID NO: 1803 - protein, 17 aa, Homo sapiens
  CDR3 for alpha chain variable domain of TCR clone 902 (TRAV13-1, TRAJ28)
CAASPPYSGAGSYQLTF

SEQ ID NO: 1804 - protein, 15 aa, Homo sapiens
  CDR3 for beta chain variable domain of TCR clone 902 (TRBV6-3, TRBJ2-2)
CASSFLATLTGELFF

SEQ ID NO: 1805 - protein, 13 aa, Homo sapiens
  CDR3 for alpha chain variable domain of TCR clone 903 (TRAV8-3, TRAJ48)
CAVVPFGNEKLTF

SEQ ID NO: 1806 - protein, 14 aa, Homo sapiens
  CDR3 for beta chain variable domain of TCR clone 903 (TRBV18, TRBJ2-7)
CASSPRGGAYEQYF

SEQ ID NO: 1807 - protein, 16 aa, Homo sapiens
  CDR3 for alpha chain variable domain of TCR clone 904 (TRAV30, TRAJ24)
CGTEIVDADSWGKFQF

SEQ ID NO: 1808 - protein, 14 aa, Homo sapiens
  CDR3 for beta chain variable domain of TCR clone 904 (TRBV7-9, TRBJ2-4)
CASSLAMGGNIQYF

SEQ ID NO: 1809 - protein, 16 aa, Homo sapiens
  CDR3 for alpha chain variable domain of TCR clone 905 (TRAV30, TRAJ24)
CGTEIVDADSWGKFQF

SEQ ID NO: 1810 - protein, 16 aa, Homo sapiens
  CDR3 for beta chain variable domain of TCR clone 905 (TRBV2, TRBJ1-3)
CASSGGAGRSGNTIYF

SEQ ID NO: 1811 - protein, 15 aa, Homo sapiens
  CDR3 for alpha chain variable domain of TCR clone 906 (TRAV17, TRAJ57)
CATGPSQGGSEKLVF

SEQ ID NO: 1812 - protein, 18 aa, Homo sapiens
  CDR3 for beta chain variable domain of TCR clone 906 (TRBV7-9, TRBJ2-7)
CASSLTTSGSRTWYEQYF

SEQ ID NO: 1813 - protein, 18 aa, Homo sapiens
  CDR3 for alpha chain variable domain of TCR clone 907 (TRAV21, TRAJ52)
CAVRPSPAGGTSYGKLTF

SEQ ID NO: 1814 - protein, 12 aa, Homo sapiens
  CDR3 for beta chain variable domain of TCR clone 907 (TRBV11-2, TRBJ2-2)
CASSLGGGELFF

SEQ ID NO: 1815 - protein, 15 aa, Homo sapiens
  CDR3 for alpha chain variable domain of TCR clone 908 (TRAV35, TRAJ52)
CAGPRGGTSYGKLTF

SEQ ID NO: 1816 - protein, 14 aa, Homo sapiens
  CDR3 for beta chain variable domain of TCR clone 908 (TRBV20-1, TRBJ2-7)
CSAWTALSSYEQYF

SEQ ID NO: 1817 - protein, 13 aa, Homo sapiens
  CDR3 for alpha chain variable domain of TCR clone 909 (TRAV36/DV7, TRAJ37)
CAVFSSNTGKLIF

SEQ ID NO: 1818 - protein, 16 aa, Homo sapiens
  CDR3 for beta chain variable domain of TCR clone 909 (TRBV3-1, TRBJ2-5)
CASSPGQFNGFGTQYF

SEQ ID NO: 1819 - protein, 14 aa, Homo sapiens
  CDR3 for alpha chain variable domain of TCR clone 910 (TRAV1-2, TRAJ16)
CAVNRFSDGQKLLF

SEQ ID NO: 1820 - protein, 14 aa, Homo sapiens
  CDR3 for beta chain variable domain of TCR clone 910 (TRBV7-2, TRBJ2-7)
CASSPKTSFYEQYF

SEQ ID NO: 1821 - protein, 13 aa, Homo sapiens
  CDR3 for alpha chain variable domain of TCR clone 911 (TRAV12-1, TRAJ26)
CVVRRNYGQNFVF

SEQ ID NO: 1822 - protein, 14 aa, Homo sapiens
  CDR3 for beta chain variable domain of TCR clone 911 (TRBV6-3, TRBJ1-1)
CASRYTGESTEAFF

SEQ ID NO: 1823 - protein, 13 aa, Homo sapiens
  CDR3 for alpha chain variable domain of TCR clone 912 (TRAV17, TRAJ40)
CAGALGGTYKYIF

SEQ ID NO: 1824 - protein, 16 aa, Homo sapiens
  CDR3 for beta chain variable domain of TCR clone 912 (TRBV7-2, TRBJ1-4)
CASSLAPGRRDEKLFF

SEQ ID NO: 1825 - protein, 15 aa, Homo sapiens
  CDR3 for alpha chain variable domain of TCR clone 913 (TRAV3, TRAJ3)
CAVRDGHSSASKIIF

SEQ ID NO: 1826 - protein, 14 aa, Homo sapiens
  CDR3 for beta chain variable domain of TCR clone 913 (TRBV28, TRBJ1-4)
CASSFGTFDEKLFF

SEQ ID NO: 1827 - protein, 14 aa, Homo sapiens
  CDR3 for alpha chain variable domain of TCR clone 914 (TRAV8-3, TRAJ35)
CAVVPQGFGNVLHC

SEQ ID NO: 1828 - protein, 15 aa, Homo sapiens
  CDR3 for beta chain variable domain of TCR clone 914 (TRBV6-1, TRBJ2-2)
CASSAGQGYTGELFF

SEQ ID NO: 1829 - protein, 15 aa, Homo sapiens
  CDR3 for alpha chain variable domain of TCR clone 915 (TRAV35, TRAJ23)
CAGQRGYNQGGKLIF

SEQ ID NO: 1830 - protein, 16 aa, Homo sapiens
  CDR3 for beta chain variable domain of TCR clone 915 (TRBV27, TRBJ2-1)
CASSSRLAGNYNEQFF

SEQ ID NO: 1831 - protein, 13 aa, Homo sapiens
  CDR3 for alpha chain variable domain of TCR clone 916 (TRAV13-2, TRAJ13)
CAERPGGYQKVTF

SEQ ID NO: 1832 - protein, 16 aa, Homo sapiens
  CDR3 for beta chain variable domain of TCR clone 916 (TRBV18, TRBJ2-5)
CASSPPSSGGAKTQYF

SEQ ID NO: 1833 - protein, 14 aa, Homo sapiens
  CDR3 for alpha chain variable domain of TCR clone 917 (TRAV17, TRAJ5)
CATVALTGRRALTF

SEQ ID NO: 1834 - protein, 14 aa, Homo sapiens
  CDR3 for beta chain variable domain of TCR clone 917 (TRBV28, TRBJ2-7)
CASSPYGMAYEQYF

SEQ ID NO: 1835 - protein, 14 aa, Homo sapiens
  CDR3 for alpha chain variable domain of TCR clone 918 (TRAV23/DV6, TRAJ4)
CAAPSSGGYNKLIF

SEQ ID NO: 1836 - protein, 16 aa, Homo sapiens
  CDR3 for beta chain variable domain of TCR clone 918 (TRBV19, TRBJ1-1)
CASRFGGPVTGTEAFF

SEQ ID NO: 1837 - protein, 14 aa, Homo sapiens
  CDR3 for alpha chain variable domain of TCR clone 919 (TRAV1-2, TRAJ16)
CAVNRFSDGQKLLF

SEQ ID NO: 1838 - protein, 13 aa, Homo sapiens
  CDR3 for beta chain variable domain of TCR clone 919 (TRBV7-3, TRBJ1-1)
CASSQDWGAEAFF

SEQ ID NO: 1839 - protein, 14 aa, Homo sapiens
  CDR3 for alpha chain variable domain of TCR clone 920 (TRAV17, TRAJ57)
CATDPQGGSEKLVF

SEQ ID NO: 1840 - protein, 16 aa, Homo sapiens
  CDR3 for beta chain variable domain of TCR clone 920 (TRBV20-1, TRBJ1-4)
CSAPGQGLLTNEKLFF

SEQ ID NO: 1841 - protein, 16 aa, Homo sapiens
  CDR3 for alpha chain variable domain of TCR clone 921 (TRAV27, TRAJ53)
CAAPEGSGGSNYKLTF

SEQ ID NO: 1842 - protein, 14 aa, Homo sapiens
  CDR3 for beta chain variable domain of TCR clone 921 (TRBV4-3, TRBJ1-5)
CASSQGGQGWPQHF

SEQ ID NO: 1843 - protein, 15 aa, Homo sapiens
  CDR3 for alpha chain variable domain of TCR clone 922 (TRAV17, TRAJ6)
CATDLPSGGSYIPTF

SEQ ID NO: 1844 - protein, 16 aa, Homo sapiens
  CDR3 for beta chain variable domain of TCR clone 922 (TRBV4-1, TRBJ2-7)
CASSQDPTGYSYEQYF

SEQ ID NO: 1845 - protein, 12 aa, Homo sapiens
  CDR3 for alpha chain variable domain of TCR clone 923 (TRAV12-1, TRAJ40)
CVVPSGTYKYIF

SEQ ID NO: 1846 - protein, 15 aa, Homo sapiens
  CDR3 for beta chain variable domain of TCR clone 923 (TRBV12-4, TRBJ2-1)
CASSPLSGRNNEQFF

SEQ ID NO: 1847 - protein, 13 aa, Homo sapiens
  CDR3 for alpha chain variable domain of TCR clone 924 (TRAV27, TRAJ45)
CRSSGGGADGLTF

SEQ ID NO: 1848 - protein, 11 aa, Homo sapiens
  CDR3 for beta chain variable domain of TCR clone 924 (TRBV19, TRBJ1-1)
CASSIGSEAFF

SEQ ID NO: 1849 - protein, 12 aa, Homo sapiens
  CDR3 for alpha chain variable domain of TCR clone 925 (TRAV8-3, TRAJ26)
CAGDNYGQNFVF

SEQ ID NO: 1850 - protein, 15 aa, Homo sapiens
  CDR3 for beta chain variable domain of TCR clone 925 (TRBV11-2, TRBJ2-1)
CASSLGTSGLNEQFF

SEQ ID NO: 1851 - protein, 14 aa, Homo sapiens
  CDR3 for alpha chain variable domain of TCR clone 926 (TRAV1-2, TRAJ16)
CAVNRFSDGQKLLF

SEQ ID NO: 1852 - protein, 16 aa, Homo sapiens
  CDR3 for beta chain variable domain of TCR clone 926 (TRBV11-2, TRBJ1-2)
CASSLDTGGADYGYTF

SEQ ID NO: 1853 - protein, 13 aa, Homo sapiens
  CDR3 for alpha chain variable domain of TCR clone 927 (TRAV36/DV7, TRAJ33)
CAVDMDSNYQLIW

SEQ ID NO: 1854 - protein, 16 aa, Homo sapiens
  CDR3 for beta chain variable domain of TCR clone 927 (TRBV15, TRBJ2-3)
CATRLSGGRAPDTQYF

SEQ ID NO: 1855 - protein, 12 aa, Homo sapiens
  CDR3 for alpha chain variable domain of TCR clone 928 (TRAV13-1, TRAJ21)
CAAFFNFNKFYF

SEQ ID NO: 1856 - protein, 14 aa, Homo sapiens
  CDR3 for beta chain variable domain of TCR clone 928 (TRBV4-1, TRBJ2-7)
CASRLTSGSYEQYF

SEQ ID NO: 1857 - protein, 10 aa, Homo sapiens
  CDR3 for alpha chain variable domain of TCR clone 929 (TRAV1-2, TRAJ31)
CAFFDARLMF

SEQ ID NO: 1858 - protein, 15 aa, Homo sapiens
  CDR3 for beta chain variable domain of TCR clone 929 (TRBV4-1, TRBJ1-4)
CASSDTGGTNEKLFF

SEQ ID NO: 1859 - protein, 17 aa, Homo sapiens
  CDR3 for alpha chain variable domain of TCR clone 930 (TRAV3, TRAJ6)
CAVRDGPRAGGSYIPTF

SEQ ID NO: 1860 - protein, 16 aa, Homo sapiens
  CDR3 for beta chain variable domain of TCR clone 930 (TRBV7-8, TRBJ2-3)
CASSTEGQRETDTQYF

SEQ ID NO: 1861 - protein, 14 aa, Homo sapiens
  CDR3 for alpha chain variable domain of TCR clone 931 (TRAV13-2, TRAJ11)
CAETGNSGYSTLTF

SEQ ID NO: 1862 - protein, 11 aa, Homo sapiens
  CDR3 for beta chain variable domain of TCR clone 931 (TRBV10-3, TRBJ2-7)
CAISEGLEQYF

SEQ ID NO: 1863 - protein, 12 aa, Homo sapiens
  CDR3 for alpha chain variable domain of TCR clone 932 (TRAV35, TRAJ30)
CAGLNRDDKIIF

SEQ ID NO: 1864 - protein, 15 aa, Homo sapiens
  CDR3 for beta chain variable domain of TCR clone 932 (TRBV18, TRBJ2-3)
CASSPLAGETDTQYF

SEQ ID NO: 1865 - protein, 16 aa, Homo sapiens
  CDR3 for alpha chain variable domain of TCR clone 933 (TRAV13-1, TRAJ18)
CAASRMRGSTLGRLYF

SEQ ID NO: 1866 - protein, 16 aa, Homo sapiens
  CDR3 for beta chain variable domain of TCR clone 933 (TRBV27, TRBJ1-1)
CASSSRGRTGYTEAFF

SEQ ID NO: 1867 - protein, 16 aa, Homo sapiens
  CDR3 for alpha chain variable domain of TCR clone 934 (TRAV17, TRAJ52)
CATSNAGGTSYGKLTF

SEQ ID NO: 1868 - protein, 13 aa, Homo sapiens
  CDR3 for beta chain variable domain of TCR clone 934 (TRBV27, TRBJ1-6)
CASSLVLVSPLHF

SEQ ID NO: 1869 - protein, 14 aa, Homo sapiens
  CDR3 for alpha chain variable domain of TCR clone 935 (TRAV1-2, TRAJ8)
CAVREDTGFQKLVF

SEQ ID NO: 1870 - protein, 16 aa, Homo sapiens
  CDR3 for beta chain variable domain of TCR clone 935 (TRBV7-3, TRBJ2-2)
CASSLKRGTLSGELFF

SEQ ID NO: 1871 - protein, 13 aa, Homo sapiens
  CDR3 for alpha chain variable domain of TCR clone 936 (TRAV21, TRAJ37)
CAVSSGNTGKLIF

SEQ ID NO: 1872 - protein, 17 aa, Homo sapiens
  CDR3 for beta chain variable domain of TCR clone 936 (TRBV5-1, TRBJ2-5)
CASSLLGLAANQETQYF

SEQ ID NO: 1873 - protein, 12 aa, Homo sapiens
  CDR3 for alpha chain variable domain of TCR clone 937 (TRAV12-3, TRAJ17)
CAMTLTGNKLTF

SEQ ID NO: 1874 - protein, 15 aa, Homo sapiens
  CDR3 for beta chain variable domain of TCR clone 937 (TRBV19, TRBJ2-1)
CASSILGEGRNEQFF

SEQ ID NO: 1875 - protein, 13 aa, Homo sapiens
  CDR3 for alpha chain variable domain of TCR clone 938 (TRAV8-3, TRAJ48)
CCGCNFGNEKLTF

SEQ ID NO: 1876 - protein, 12 aa, Homo sapiens
  CDR3 for beta chain variable domain of TCR clone 938 (TRBV7-2, TRBJ2-5)
CASSQYQETQYF

SEQ ID NO: 1877 - protein, 17 aa, Homo sapiens
  CDR3 for alpha chain variable domain of TCR clone 939 (TRAV3, TRAJ12)
CAVRDGGRMDSSYKLIF

SEQ ID NO: 1878 - protein, 13 aa, Homo sapiens
  CDR3 for beta chain variable domain of TCR clone 939 (TRBV15, TRBJ1-6)
CATSGGLNSPLHF

SEQ ID NO: 1879 - protein, 12 aa, Homo sapiens
  CDR3 for alpha chain variable domain of TCR clone 940 (TRAV12-3, TRAJ21)
CAMFNNFNKFYF

SEQ ID NO: 1880 - protein, 14 aa, Homo sapiens
  CDR3 for beta chain variable domain of TCR clone 940 (TRBV28, TRBJ2-1)
CASSIQGTVGEQFF

SEQ ID NO: 1881 - protein, 11 aa, Homo sapiens
  CDR3 for alpha chain variable domain of TCR clone 941 (TRAV1-1, TRAJ16)
CAAGDGQKLLF

SEQ ID NO: 1882 - protein, 15 aa, Homo sapiens
  CDR3 for beta chain variable domain of TCR clone 941 (TRBV28, TRBJ1-2)
CASIPQGSDDYGYTF

SEQ ID NO: 1883 - protein, 14 aa, Homo sapiens
  CDR3 for alpha chain variable domain of TCR clone 942 (TRAV27, TRAJ23)
CAGLSYNQGGKLIF

SEQ ID NO: 1884 - protein, 15 aa, Homo sapiens
  CDR3 for beta chain variable domain of TCR clone 942 (TRBV19, TRBJ2-2)
CASSLNRGVTGELFF

SEQ ID NO: 1885 - protein, 13 aa, Homo sapiens
  CDR3 for alpha chain variable domain of TCR clone 943 (TRAV29/DV5, TRAJ31)
CAASRNNNARLMF

SEQ ID NO: 1886 - protein, 12 aa, Homo sapiens
  CDR3 for beta chain variable domain of TCR clone 943 (TRBV14, TRBJ2-7)
CASSLYKDEQYF

SEQ ID NO: 1887 - protein, 11 aa, Homo sapiens
  CDR3 for alpha chain variable domain of TCR clone 944 (TRAV12-1, TRAJ21)
CVVNNFNKFYF

SEQ ID NO: 1888 - protein, 14 aa, Homo sapiens
  CDR3 for beta chain variable domain of TCR clone 944 (TRBV15, TRBJ1-5)
CATSREQSNQPQHF

SEQ ID NO: 1889 - protein, 12 aa, Homo sapiens
  CDR3 for alpha chain variable domain of TCR clone 945 (TRAV12-1, TRAJ40)
CVVYSGTYKYIF

SEQ ID NO: 1890 - protein, 14 aa, Homo sapiens
  CDR3 for beta chain variable domain of TCR clone 945 (TRBV7-9, TRBJ2-5)
CASSLDTAQETQYF

SEQ ID NO: 1891 - protein, 14 aa, Homo sapiens
  CDR3 for alpha chain variable domain of TCR clone 946 (TRAV12-2, TRAJ17)
CAVLFKAAGNKLTF

SEQ ID NO: 1892 - protein, 14 aa, Homo sapiens
  CDR3 for beta chain variable domain of TCR clone 946 (TRBV12-5, TRBJ2-5)
CASGSRTHQETQYF

SEQ ID NO: 1893 - protein, 12 aa, Homo sapiens
  CDR3 for alpha chain variable domain of TCR clone 947 (TRAV3, TRAJ43)
CAVRDPNNDMRF

SEQ ID NO: 1894 - protein, 15 aa, Homo sapiens
  CDR3 for beta chain variable domain of TCR clone 947 (TRBV6-5, TRBJ2-1)
CASSYDAGAGNEQFF

SEQ ID NO: 1895 - protein, 12 aa, Homo sapiens
  CDR3 for alpha chain variable domain of TCR clone 948 (TRAV22, TRAJ22)
CAPGGSARQLTF

SEQ ID NO: 1896 - protein, 13 aa, Homo sapiens
  CDR3 for beta chain variable domain of TCR clone 948 (TRBV15, TRBJ1-6)
CATSGGLNSPLHF

SEQ ID NO: 1897 - protein, 14 aa, Homo sapiens
  CDR3 for alpha chain variable domain of TCR clone 949 (TRAV12-3, TRAJ53)
CGATSGGSNYKLTF

SEQ ID NO: 1898 - protein, 13 aa, Homo sapiens
  CDR3 for beta chain variable domain of TCR clone 949 (TRBV19, TRBJ1-5)
CASSTQDGQPQHF

SEQ ID NO: 1899 - protein, 12 aa, Homo sapiens
  CDR3 for alpha chain variable domain of TCR clone 950 (TRAV13-2, TRAJ23)
CAERHRGGKLIF

SEQ ID NO: 1900 - protein, 15 aa, Homo sapiens
  CDR3 for beta chain variable domain of TCR clone 950 (TRBV7-9, TRBJ1-6)
CASSSPGRGNSPLHF

SEQ ID NO: 1901 - protein, 12 aa, Homo sapiens
  CDR3 for alpha chain variable domain of TCR clone 951 (TRAV12-3, TRAJ29)
CAAREGNTPLVF

SEQ ID NO: 1902 - protein, 17 aa, Homo sapiens
  CDR3 for beta chain variable domain of TCR clone 951 (TRBV18, TRBJ2-1)
CASSPLAAGAGDNEQFF

SEQ ID NO: 1903 - protein, 12 aa, Homo sapiens
  CDR3 for alpha chain variable domain of TCR clone 952 (TRAV13-1, TRAJ21)
CAAKEGFNKFYF

SEQ ID NO: 1904 - protein, 13 aa, Homo sapiens
  CDR3 for beta chain variable domain of TCR clone 952 (TRBV7-3, TRBJ1-1)
CASSQDWGAEAFF

SEQ ID NO: 1905 - protein, 13 aa, Homo sapiens
  CDR3 for alpha chain variable domain of TCR clone 953 (TRAV3, TRAJ43)
CAVKARNNNDMRF

SEQ ID NO: 1906 - protein, 16 aa, Homo sapiens
  CDR3 for beta chain variable domain of TCR clone 953 (TRBV7-9, TRBJ2-3)
CASSFSVAGGTDTQYF

SEQ ID NO: 1907 - protein, 14 aa, Homo sapiens
  CDR3 for alpha chain variable domain of TCR clone 954 (TRAV2, TRAJ39)
CAVEGDNAGNMLTF

SEQ ID NO: 1908 - protein, 14 aa, Homo sapiens
  CDR3 for beta chain variable domain of TCR clone 954 (TRBV28, TRBJ2-7)
CASSLRARGNEQYF

SEQ ID NO: 1909 - protein, 14 aa, Homo sapiens
  CDR3 for alpha chain variable domain of TCR clone 955 (TRAV12-2, TRAJ9)
CAVNALEGGFKTIF

SEQ ID NO: 1910 - protein, 16 aa, Homo sapiens
  CDR3 for beta chain variable domain of TCR clone 955 (TRBV19, TRBJ1-6)
CASSVAPVAGNSPLHF

SEQ ID NO: 1911 - protein, 14 aa, Homo sapiens
  CDR3 for alpha chain variable domain of TCR clone 956 (TRAV8-4, TRAJ54)
CAVSEVLGAQKLVF

SEQ ID NO: 1912 - protein, 13 aa, Homo sapiens
  CDR3 for beta chain variable domain of TCR clone 956 (TRBV27, TRBJ2-7)
CASSFVSSYEQYF

SEQ ID NO: 1913 - protein, 13 aa, Homo sapiens
  CDR3 for alpha chain variable domain of TCR clone 957 (TRAV16, TRAJ27)
CALRRTNAGKSTF

SEQ ID NO: 1914 - protein, 15 aa, Homo sapiens
  CDR3 for beta chain variable domain of TCR clone 957 (TRBV18, TRBJ2-1)
CASSPPSASYNEQFF

SEQ ID NO: 1915 - protein, 14 aa, Homo sapiens
  CDR3 for alpha chain variable domain of TCR clone 958 (TRAV23/DV6, TRAJ37)
CAASTSSNTGKLIF

SEQ ID NO: 1916 - protein, 13 aa, Homo sapiens
  CDR3 for beta chain variable domain of TCR clone 958 (TRBV7-7, TRBJ1-1)
CASSLGANTEAFF

SEQ ID NO: 1917 - protein, 16 aa, Homo sapiens
  CDR3 for alpha chain variable domain of TCR clone 959 (TRAV4, TRAJ22)
CLVGDLYSGSARQLTF

SEQ ID NO: 1918 - protein, 16 aa, Homo sapiens
  CDR3 for beta chain variable domain of TCR clone 959 (TRBV7-9, TRBJ2-3)
CASSPWREVGTDTQYF

SEQ ID NO: 1919 - protein, 15 aa, Homo sapiens
  CDR3 for alpha chain variable domain of TCR clone 960 (TRAV20, TRAJ4)
CAVEGSSGGYNKLIF

SEQ ID NO: 1920 - protein, 14 aa, Homo sapiens
  CDR3 for beta chain variable domain of TCR clone 960 (TRBV7-8, TRBJ2-7)
CASTLGGALGEQYF

SEQ ID NO: 1921 - protein, 15 aa, Homo sapiens
  CDR3 for alpha chain variable domain of TCR clone 961 (TRAV8-4, TRAJ37)
CAVTYGSSNTGKLIF

SEQ ID NO: 1922 - protein, 13 aa, Homo sapiens
  CDR3 for beta chain variable domain of TCR clone 961 (TRBV12-4, TRBJ2-5)
CASSLGGSRTQYF

SEQ ID NO: 1923 - protein, 13 aa, Homo sapiens
  CDR3 for alpha chain variable domain of TCR clone 962 (TRAV26-2, TRAJ57)
CILSRGGSEKLVF

SEQ ID NO: 1924 - protein, 16 aa, Homo sapiens
  CDR3 for beta chain variable domain of TCR clone 962 (TRBV18, TRBJ1-5)
CASSPRTGGGNQPQHF

SEQ ID NO: 1925 - protein, 14 aa, Homo sapiens
  CDR3 for alpha chain variable domain of TCR clone 963 (TRAV38-2/DV8, TRAJ30)
CAYMDGLGGDKIIF

SEQ ID NO: 1926 - protein, 15 aa, Homo sapiens
  CDR3 for beta chain variable domain of TCR clone 963 (TRBV7-9, TRBJ2-2)
CASRPADRDTGELFF

SEQ ID NO: 1927 - protein, 13 aa, Homo sapiens
  CDR3 for alpha chain variable domain of TCR clone 964 (TRAV2, TRAJ40)
CAVVTSGTYKYIF

SEQ ID NO: 1928 - protein, 16 aa, Homo sapiens
  CDR3 for beta chain variable domain of TCR clone 964 (TRBV29-1, TRBJ1-2)
CSVEANRDIANYGYTF

SEQ ID NO: 1929 - protein, 12 aa, Homo sapiens
  CDR3 for alpha chain variable domain of TCR clone 965 (TRAV26-1, TRAJ26)
CIVYNYGQNFVF

SEQ ID NO: 1930 - protein, 15 aa, Homo sapiens
  CDR3 for beta chain variable domain of TCR clone 965 (TRBV7-2, TRBJ2-3)
CASSLRGGSTDTQYF

SEQ ID NO: 1931 - protein, 13 aa, Homo sapiens
  CDR3 for alpha chain variable domain of TCR clone 966 (TRAV16, TRAJ28)
CALTGAGSYQLTF

SEQ ID NO: 1932 - protein, 16 aa, Homo sapiens
  CDR3 for beta chain variable domain of TCR clone 966 (TRBV28, TRBJ1-5)
CASSLTGQGWNQPQHF

SEQ ID NO: 1933 - protein, 12 aa, Homo sapiens
  CDR3 for alpha chain variable domain of TCR clone 967 (TRAV17, TRAJ49)
CATVTTGNQFYF

SEQ ID NO: 1934 - protein, 18 aa, Homo sapiens
  CDR3 for beta chain variable domain of TCR clone 967 (TRBV11-2, TRBJ2-6)
CASSLNPFLGTGANVLTF

SEQ ID NO: 1935 - protein, 11 aa, Homo sapiens
  CDR3 for alpha chain variable domain of TCR clone 968 (TRAV4, TRAJ28)
CLVGDNRAETL

SEQ ID NO: 1936 - protein, 13 aa, Homo sapiens
  CDR3 for beta chain variable domain of TCR clone 968 (TRBV20-1, TRBJ2-7)
CSATHTSGYEQYF

SEQ ID NO: 1937 - protein, 12 aa, Homo sapiens
  CDR3 for alpha chain variable domain of TCR clone 969 (TRAV21, TRAJ11)
CAVRGGNSTLTF

SEQ ID NO: 1938 - protein, 15 aa, Homo sapiens
  CDR3 for beta chain variable domain of TCR clone 969 (TRBV6-1, TRBJ2-7)
CASSEPIAATTEQYF

SEQ ID NO: 1939 - protein, 12 aa, Homo sapiens
  CDR3 for alpha chain variable domain of TCR clone 970 (TRAV3, TRAJ31)
CAVRPRGPRLMF

SEQ ID NO: 1940 - protein, 17 aa, Homo sapiens
  CDR3 for beta chain variable domain of TCR clone 970 (TRBV7-9, TRBJ1-5)
CASSASQGGYSNQPQHF

SEQ ID NO: 1941 - protein, 15 aa, Homo sapiens
  CDR3 for alpha chain variable domain of TCR clone 971 (TRAV38-2/DV8, TRAJ48)
CAYRSGGFGNEKLTF

SEQ ID NO: 1942 - protein, 16 aa, Homo sapiens
  CDR3 for beta chain variable domain of TCR clone 971 (TRBV28, TRBJ2-7)
CASSPWVATGDLSQYF

SEQ ID NO: 1943 - protein, 14 aa, Homo sapiens
  CDR3 for alpha chain variable domain of TCR clone 972 (TRAV1-2, TRAJ16)
CAVNRFSDGQKLLF

SEQ ID NO: 1944 - protein, 16 aa, Homo sapiens
  CDR3 for beta chain variable domain of TCR clone 972 (TRBV19, TRBJ2-1)
CASSKAGPSSYNEQFF

SEQ ID NO: 1945 - protein, 14 aa, Homo sapiens
  CDR3 for alpha chain variable domain of TCR clone 973 (TRAV8-4, TRAJ17)
CAVSDQAAGNKLTF

SEQ ID NO: 1946 - protein, 15 aa, Homo sapiens
  CDR3 for beta chain variable domain of TCR clone 973 (TRBV7-2, TRBJ1-2)
CASSLAPDRGLGYTF

SEQ ID NO: 1947 - protein, 15 aa, Homo sapiens
  CDR3 for alpha chain variable domain of TCR clone 974 (TRAV12-1, TRAJ45)
CVVLSGGGGADGLTF

SEQ ID NO: 1948 - protein, 14 aa, Homo sapiens
  CDR3 for beta chain variable domain of TCR clone 974 (TRBV11-2, TRBJ2-5)
CASSRTGGIETQYF

SEQ ID NO: 1949 - protein, 13 aa, Homo sapiens
  CDR3 for alpha chain variable domain of TCR clone 975 (TRAV21, TRAJ11)
CAVPNSGYSTLTF

SEQ ID NO: 1950 - protein, 13 aa, Homo sapiens
  CDR3 for beta chain variable domain of TCR clone 975 (TRBV3-1, TRBJ2-7)
CASSLRDGYEQYF

SEQ ID NO: 1951 - protein, 12 aa, Homo sapiens
  CDR3 for alpha chain variable domain of TCR clone 976 (TRAV3, TRAJ43)
CAVRDPNNDMRF

SEQ ID NO: 1952 - protein, 17 aa, Homo sapiens
  CDR3 for beta chain variable domain of TCR clone 976 (TRBV7-8, TRBJ2-6)
CASSAGTGGAGANVLTF

SEQ ID NO: 1953 - protein, 14 aa, Homo sapiens
  CDR3 for alpha chain variable domain of TCR clone 977 (TRAV4, TRAJ6)
CLVGEAGGSYIPTF

SEQ ID NO: 1954 - protein, 16 aa, Homo sapiens
  CDR3 for beta chain variable domain of TCR clone 977 (TRBV7-6, TRBJ2-1)
CASSLNEGPSYNEQFF

SEQ ID NO: 1955 - protein, 16 aa, Homo sapiens
  CDR3 for alpha chain variable domain of TCR clone 978 (TRAV8-3, TRAJ13)
CAVGAYPSGGYQKVTF

SEQ ID NO: 1956 - protein, 14 aa, Homo sapiens
  CDR3 for beta chain variable domain of TCR clone 978 (TRBV18, TRBJ2-5)
CASSPRASSETQYF

SEQ ID NO: 1957 - protein, 13 aa, Homo sapiens
  CDR3 for alpha chain variable domain of TCR clone 979 (TRAV22, TRAJ26)
CAVEHNYGQNFVF

SEQ ID NO: 1958 - protein, 16 aa, Homo sapiens
  CDR3 for beta chain variable domain of TCR clone 979 (TRBV7-2, TRBJ2-6)
CASSERRASGANVLTF

SEQ ID NO: 1959 - protein, 14 aa, Homo sapiens
  CDR3 for alpha chain variable domain of TCR clone 980 (TRAV12-2, TRAJ45)
CAVYSGGGADGLTF

SEQ ID NO: 1960 - protein, 14 aa, Homo sapiens
  CDR3 for beta chain variable domain of TCR clone 980 (TRBV6-5, TRBJ1-2)
CASTRGGGSDGYTF

SEQ ID NO: 1961 - protein, 13 aa, Homo sapiens
  CDR3 for alpha chain variable domain of TCR clone 981 (TRAV12-1, TRAJ26)
SATYLYYGQNFVF

SEQ ID NO: 1962 - protein, 15 aa, Homo sapiens
  CDR3 for beta chain variable domain of TCR clone 981 (TRBV5-1, TRBJ2-6)
CASSLDPSGANVLTF

SEQ ID NO: 1963 - protein, 14 aa, Homo sapiens
  CDR3 for alpha chain variable domain of TCR clone 982 (TRAV8-3, TRAJ4)
CAVGASGGYNKLIF

SEQ ID NO: 1964 - protein, 13 aa, Homo sapiens
  CDR3 for beta chain variable domain of TCR clone 982 (TRBV18, TRBJ2-5)
CASSLQGQETQYF

SEQ ID NO: 1965 - protein, 12 aa, Homo sapiens
  CDR3 for alpha chain variable domain of TCR clone 983 (TRAV17, TRAJ30)
CATDARDDKIIF

SEQ ID NO: 1966 - protein, 15 aa, Homo sapiens
  CDR3 for beta chain variable domain of TCR clone 983 (TRBV4-1, TRBJ2-1)
CASSQGGELYNEQFF

SEQ ID NO: 1967 - protein, 11 aa, Homo sapiens
  CDR3 for alpha chain variable domain of TCR clone 984 (TRAV12-1, TRAJ43)
CVEYDNNDMRF

SEQ ID NO: 1968 - protein, 15 aa, Homo sapiens
  CDR3 for beta chain variable domain of TCR clone 984 (TRBV18, TRBJ2-5)
CASSPRASEAETQYF

SEQ ID NO: 1969 - protein, 13 aa, Homo sapiens
  CDR3 for alpha chain variable domain of TCR clone 985 (TRAV8-6, TRAJ9)
CAVWDTGGFKTIF

SEQ ID NO: 1970 - protein, 14 aa, Homo sapiens
  CDR3 for beta chain variable domain of TCR clone 985 (TRBV2, TRBJ2-1)
CASSEALIYNEQFF

SEQ ID NO: 1971 - protein, 13 aa, Homo sapiens
  CDR3 for alpha chain variable domain of TCR clone 986 (TRAV30, TRAJ24)
CGTVTDSWGKLQF

SEQ ID NO: 1972 - protein, 15 aa, Homo sapiens
  CDR3 for beta chain variable domain of TCR clone 986 (TRBV4-1, TRBJ2-1)
CASSQDPGNYNEQFF

SEQ ID NO: 1973 - protein, 12 aa, Homo sapiens
  CDR3 for alpha chain variable domain of TCR clone 987 (TRAV21, TRAJ29)
CAVTSGNTPLVF

SEQ ID NO: 1974 - protein, 15 aa, Homo sapiens
  CDR3 for beta chain variable domain of TCR clone 987 (TRBV12-4, TRBJ1-2)
CASRLGVAGNYGYTF

SEQ ID NO: 1975 - protein, 17 aa, Homo sapiens
  CDR3 for alpha chain variable domain of TCR clone 988 (TRAV3, TRAJ6)
CAVRDGPRAGGSYIPTF

SEQ ID NO: 1976 - protein, 13 aa, Homo sapiens
  CDR3 for beta chain variable domain of TCR clone 988 (TRBV27, TRBJ2-1)
CASRTLGVGEQFF

SEQ ID NO: 1977 - protein, 12 aa, Homo sapiens
  CDR3 for alpha chain variable domain of TCR clone 989 (TRAV27, TRAJ41)
CAGRNSGYALNF

SEQ ID NO: 1978 - protein, 15 aa, Homo sapiens
  CDR3 for beta chain variable domain of TCR clone 989 (TRBV20-1, TRBJ1-5)
CSATSDRGLGQPQHF

SEQ ID NO: 1979 - protein, 15 aa, Homo sapiens
  CDR3 for alpha chain variable domain of TCR clone 990 (TRAV8-3, TRAJ45)
CASSYSGGGADGLTF

SEQ ID NO: 1980 - protein, 18 aa, Homo sapiens
  CDR3 for beta chain variable domain of TCR clone 990 (TRBV18, TRBJ1-3)
CASSPRGGAGPSGNTIYF

SEQ ID NO: 1981 - protein, 12 aa, Homo sapiens
  CDR3 for alpha chain variable domain of TCR clone 991 (TRAV8-3, TRAJ43)
CAVGAGNNDMRF

SEQ ID NO: 1982 - protein, 14 aa, Homo sapiens
  CDR3 for beta chain variable domain of TCR clone 991 (TRBV4-2, TRBJ1-5)
CASSRDRGNQPQHF

SEQ ID NO: 1983 - protein, 13 aa, Homo sapiens
  CDR3 for alpha chain variable domain of TCR clone 992 (TRAV8-3, TRAJ28)
CAVGAVGSYQLTF

SEQ ID NO: 1984 - protein, 17 aa, Homo sapiens
  CDR3 for beta chain variable domain of TCR clone 992 (TRBV11-2, TRBJ2-1)
CASSLYPPGVEYNEQFF

SEQ ID NO: 1985 - protein, 16 aa, Homo sapiens
  CDR3 for alpha chain variable domain of TCR clone 993 (TRAV3, TRAJ21)
CAVRDIERGNFNKFYF

SEQ ID NO: 1986 - protein, 16 aa, Homo sapiens
  CDR3 for beta chain variable domain of TCR clone 993 (TRBV12-4, TRBJ1-5)
CASSRPVGGSNQPQHF

SEQ ID NO: 1987 - protein, 17 aa, Homo sapiens
  CDR3 for alpha chain variable domain of TCR clone 994 (TRAV3, TRAJ42)
CAVRDRDYGGSQGNLIF

SEQ ID NO: 1988 - protein, 14 aa, Homo sapiens
  CDR3 for beta chain variable domain of TCR clone 994 (TRBV19, TRBJ2-5)
CASSMTGQQETQYF

SEQ ID NO: 1989 - protein, 14 aa, Homo sapiens
  CDR3 for alpha chain variable domain of TCR clone 995 (TRAV1-2, TRAJ16)
CAVNRFSDGQKLLF

SEQ ID NO: 1990 - protein, 17 aa, Homo sapiens
  CDR3 for beta chain variable domain of TCR clone 995 (TRBV13, TRBJ2-3)
CASSLSRVAGGRNTQYF

SEQ ID NO: 1991 - protein, 16 aa, Homo sapiens
  CDR3 for alpha chain variable domain of TCR clone 996 (TRAV12-1, TRAJ48)
CVVNMVSNFGNEKLTF

SEQ ID NO: 1992 - protein, 18 aa, Homo sapiens
  CDR3 for beta chain variable domain of TCR clone 996 (TRBV11-2, TRBJ2-6)
CASSLNPFLGTGANVLTF

SEQ ID NO: 1993 - protein, 14 aa, Homo sapiens
  CDR3 for alpha chain variable domain of TCR clone 997 (TRAV12-1, TRAJ17)
CVVNYKAAGNKLTF

SEQ ID NO: 1994 - protein, 15 aa, Homo sapiens
  CDR3 for beta chain variable domain of TCR clone 997 (TRBV7-2, TRBJ2-1)
CASTHGTGIYNEQFF

SEQ ID NO: 1995 - protein, 10 aa, Homo sapiens
  CDR3 for alpha chain variable domain of TCR clone 998 (TRAV17, TRAJ52)
SATSYGKLTF

SEQ ID NO: 1996 - protein, 13 aa, Homo sapiens
  CDR3 for beta chain variable domain of TCR clone 998 (TRBV29-1, TRBJ2-5)
CSVGGTSAETQYF

SEQ ID NO: 1997 - protein, 16 aa, Homo sapiens
  CDR3 for alpha chain variable domain of TCR clone 999 (TRAV14/DV4, TRAJ15)
CAMREGPAQAGTALIF

SEQ ID NO: 1998 - protein, 12 aa, Homo sapiens
  CDR3 for beta chain variable domain of TCR clone 999 (TRBV28, TRBJ2-6)
CAIQAGANVLTF

SEQ ID NO: 1999 - protein, 14 aa, Homo sapiens
  CDR3 for alpha chain variable domain of TCR clone 1000 (TRAV8-3, TRAJ44)
CAVGNTGTASKLTF

SEQ ID NO: 2000 - protein, 15 aa, Homo sapiens
  CDR3 for beta chain variable domain of TCR clone 1000 (TRBV28, TRBJ2-7)
CASSFRGQGRYEQYF

SEQ ID NO: 2001 - protein, 14 aa, Homo sapiens
  CDR3 for alpha chain variable domain of TCR clone 1001 (TRAV36/DV7, TRAJ40)
CAVETTSGTYKYIF

SEQ ID NO: 2002 - protein, 13 aa, Homo sapiens
  CDR3 for beta chain variable domain of TCR clone 1001 (TRBV10-3, TRBJ2-5)
CAMTSGAGETQYF

SEQ ID NO: 2003 - protein, 16 aa, Homo sapiens
  CDR3 for alpha chain variable domain of TCR clone 1002 (TRAV16, TRAJ52)
CALSAAGGTSYGKLTF

SEQ ID NO: 2004 - protein, 17 aa, Homo sapiens
  CDR3 for beta chain variable domain of TCR clone 1002 (TRBV11-2, TRBJ2-1)
CASSLYPPGVEYNEQFF

SEQ ID NO: 2005 - protein, 10 aa, Homo sapiens
  CDR3 for alpha chain variable domain of TCR clone 1003 (TRAV36/DV7, TRAJ56)
CAGPAVELTF

SEQ ID NO: 2006 - protein, 13 aa, Homo sapiens
  CDR3 for beta chain variable domain of TCR clone 1003 (TRBV7-9, TRBJ2-7)
CASSFWSSYEQYF

SEQ ID NO: 2007 - protein, 14 aa, Homo sapiens
  CDR3 for alpha chain variable domain of TCR clone 1004 (TRAV1-2, TRAJ8)
CAVREDTGFQKLVF

SEQ ID NO: 2008 - protein, 16 aa, Homo sapiens
  CDR3 for beta chain variable domain of TCR clone 1004 (TRBV12-4, TRBJ1-5)
CASSRPVGGSNQPQHF

SEQ ID NO: 2009 - protein, 15 aa, Homo sapiens
  CDR3 for alpha chain variable domain of TCR clone 1005 (TRAV4, TRAJ39)
CLVGPNNNAGNMLTF

SEQ ID NO: 2010 - protein, 16 aa, Homo sapiens
  CDR3 for beta chain variable domain of TCR clone 1005 (TRBV13, TRBJ2-2)
CASSPRTGEHTGELFF

SEQ ID NO: 2011 - protein, 14 aa, Homo sapiens
  CDR3 for alpha chain variable domain of TCR clone 1006 (TRAV12-2, TRAJ44)
CAVNKAGTASKLTF

SEQ ID NO: 2012 - protein, 12 aa, Homo sapiens
  CDR3 for beta chain variable domain of TCR clone 1006 (TRBV19, TRBJ1-4)
CASKDWPGGLFF

SEQ ID NO: 2013 - protein, 13 aa, Homo sapiens
  CDR3 for alpha chain variable domain of TCR clone 1007 (TRAV12-2, TRAJ4)
CAGFSGGYNKLIF

SEQ ID NO: 2014 - protein, 14 aa, Homo sapiens
  CDR3 for beta chain variable domain of TCR clone 1007 (TRBV24-1, TRBJ1-1)
CATSIPRGDTEAFF

SEQ ID NO: 2015 - protein, 12 aa, Homo sapiens
  CDR3 for alpha chain variable domain of TCR clone 1008 (TRAV17, TRAJ57)
CATDGGSEKLVF

SEQ ID NO: 2016 - protein, 12 aa, Homo sapiens
  CDR3 for beta chain variable domain of TCR clone 1008 (TRBV29-1, TRBJ2-2)
CSVDKYTGELFF

SEQ ID NO: 2017 - protein, 13 aa, Homo sapiens
  CDR3 for alpha chain variable domain of TCR clone 1009 (TRAV23/DV6, TRAJ12)
CAPRVDSSYKLIF

SEQ ID NO: 2018 - protein, 12 aa, Homo sapiens
  CDR3 for beta chain variable domain of TCR clone 1009 (TRBV7-6, TRBJ2-5)
CASSLSQETQYF

SEQ ID NO: 2019 - protein, 13 aa, Homo sapiens
  CDR3 for alpha chain variable domain of TCR clone 1010 (TRAV36/DV7, TRAJ53)
CALSGGSNYKLTF

SEQ ID NO: 2020 - protein, 13 aa, Homo sapiens
  CDR3 for beta chain variable domain of TCR clone 1010 (TRBV28, TRBJ2-4)
CASSQSSKNIQYF

SEQ ID NO: 2021 - protein, 14 aa, Homo sapiens
  CDR3 for alpha chain variable domain of TCR clone 1011 (TRAV1-2, TRAJ16)
CAVNRFSDGQKLLF

SEQ ID NO: 2022 - protein, 13 aa, Homo sapiens
  CDR3 for beta chain variable domain of TCR clone 1011 (TRBV20-1, TRBJ1-1)
CSARGGGNTEAFF

SEQ ID NO: 2023 - protein, 13 aa, Homo sapiens
  CDR3 for alpha chain variable domain of TCR clone 1012 (TRAV36/DV7, TRAJ54)
CAVDIQGAQKLVF

SEQ ID NO: 2024 - protein, 14 aa, Homo sapiens
  CDR3 for beta chain variable domain of TCR clone 1012 (TRBV19, TRBJ2-7)
CASNFRDTFTGMYF

SEQ ID NO: 2025 - protein, 14 aa, Homo sapiens
  CDR3 for alpha chain variable domain of TCR clone 1013 (TRAV30, TRAJ33)
CGTERRFSNYQLIW

SEQ ID NO: 2026 - protein, 16 aa, Homo sapiens
  CDR3 for beta chain variable domain of TCR clone 1013 (TRBV7-3, TRBJ2-2)
CASSLKRGTLSGELFF

SEQ ID NO: 2027 - protein, 12 aa, Homo sapiens
  CDR3 for alpha chain variable domain of TCR clone 1014 (TRAV13-1, TRAJ17)
CAARTAGNKLTF

SEQ ID NO: 2028 - protein, 15 aa, Homo sapiens
  CDR3 for beta chain variable domain of TCR clone 1014 (TRBV7-6, TRBJ1-1)
CASSPQGGANTEAFF

SEQ ID NO: 2029 - protein, 16 aa, Homo sapiens
  CDR3 for alpha chain variable domain of TCR clone 1015 (TRAV4, TRAJ5)
CLVGPDHGHGQESTYF

SEQ ID NO: 2030 - protein, 15 aa, Homo sapiens
  CDR3 for beta chain variable domain of TCR clone 1015 (TRBV27, TRBJ2-5)
CASSLIPSGGETQYF

SEQ ID NO: 2031 - protein, 15 aa, Homo sapiens
  CDR3 for alpha chain variable domain of TCR clone 1016 (TRAV12-3, TRAJ6)
CAMSAASGGSYIPTF

SEQ ID NO: 2032 - protein, 13 aa, Homo sapiens
  CDR3 for beta chain variable domain of TCR clone 1016 (TRBV20-1, TRBJ1-2)
CSASTERIYGYTF

SEQ ID NO: 2033 - protein, 11 aa, Homo sapiens
  CDR3 for alpha chain variable domain of TCR clone 1017 (TRAV17, TRAJ31)
CATSNNARLMF

SEQ ID NO: 2034 - protein, 14 aa, Homo sapiens
  CDR3 for beta chain variable domain of TCR clone 1017 (TRBV18, TRBJ2-7)
CASSPRGGAYEQYF

SEQ ID NO: 2035 - protein, 17 aa, Homo sapiens
  CDR3 for alpha chain variable domain of TCR clone 1018 (TRAV16, TRAJ42)
CALSPKLYGGSQGNLIF

SEQ ID NO: 2036 - protein, 13 aa, Homo sapiens
  CDR3 for beta chain variable domain of TCR clone 1018 (TRBV19, TRBJ1-5)
CASSTRRDQPQHF

SEQ ID NO: 2037 - protein, 15 aa, Homo sapiens
  CDR3 for alpha chain variable domain of TCR clone 1019 (TRAV35, TRAJ40)
CAGQLWDSGTYKYIF

SEQ ID NO: 2038 - protein, 12 aa, Homo sapiens
  CDR3 for beta chain variable domain of TCR clone 1019 (TRBV7-8, TRBJ2-7)
CASSLAGYEQYF

SEQ ID NO: 2039 - protein, 13 aa, Homo sapiens
  CDR3 for alpha chain variable domain of TCR clone 1020 (TRAV20, TRAJ20)
CAVRWVRDYKLSF

SEQ ID NO: 2040 - protein, 14 aa, Homo sapiens
  CDR3 for beta chain variable domain of TCR clone 1020 (TRBV19, TRBJ2-2)
CASTVTANTGELFF

SEQ ID NO: 2041 - protein, 14 aa, Homo sapiens
  CDR3 for alpha chain variable domain of TCR clone 1021 (TRAV29/DV5, TRAJ44)
CAAFLVGTASKLTF

SEQ ID NO: 2042 - protein, 15 aa, Homo sapiens
  CDR3 for beta chain variable domain of TCR clone 1021 (TRBV7-3, TRBJ2-2)
CASSETGQGTGELFF

SEQ ID NO: 2043 - protein, 16 aa, Homo sapiens
  CDR3 for alpha chain variable domain of TCR clone 1022 (TRAV12-1, TRAJ12)
CVVNTLLMDSSYKLIF

SEQ ID NO: 2044 - protein, 13 aa, Homo sapiens
  CDR3 for beta chain variable domain of TCR clone 1022 (TRBV11-2, TRBJ2-1)
CASSSEAYNEQFF

SEQ ID NO: 2045 - protein, 11 aa, Homo sapiens
  CDR3 for alpha chain variable domain of TCR clone 1023 (TRAV2, TRAJ13)
CASGGYQKVTF

SEQ ID NO: 2046 - protein, 16 aa, Homo sapiens
  CDR3 for beta chain variable domain of TCR clone 1023 (TRBV2, TRBJ2-1)
CASSVGGSLSYNEQFF

SEQ ID NO: 2047 - protein, 14 aa, Homo sapiens
  CDR3 for alpha chain variable domain of TCR clone 1024 (TRAV3, TRAJ40)
CAVRDRRGTYKYIF

SEQ ID NO: 2048 - protein, 15 aa, Homo sapiens
  CDR3 for beta chain variable domain of TCR clone 1024 (TRBV11-1, TRBJ1-3)
CASTDPRAFGNTIYF

SEQ ID NO: 2049 - protein, 15 aa, Homo sapiens
  CDR3 for alpha chain variable domain of TCR clone 1025 (TRAV20, TRAJ43)
CAVQAGKSSNNDMRF

SEQ ID NO: 2050 - protein, 14 aa, Homo sapiens
  CDR3 for beta chain variable domain of TCR clone 1025 (TRBV27, TRBJ2-1)
CASRHLGGGKEQFF

SEQ ID NO: 2051 - protein, 11 aa, Homo sapiens
  CDR3 for alpha chain variable domain of TCR clone 1026 (TRAV13-1, TRAJ49)
CACVGGNQFYF

SEQ ID NO: 2052 - protein, 16 aa, Homo sapiens
  CDR3 for beta chain variable domain of TCR clone 1026 (TRBV11-2, TRBJ2-2)
CASSLRTGNLIGELFF

SEQ ID NO: 2053 - protein, 16 aa, Homo sapiens
  CDR3 for alpha chain variable domain of TCR clone 1027 (TRAV16, TRAJ4)
CITVLPFSGGYNKLIF

SEQ ID NO: 2054 - protein, 14 aa, Homo sapiens
  CDR3 for beta chain variable domain of TCR clone 1027 (TRBV19, TRBJ2-7)
CASSMGQGAIEQYF

SEQ ID NO: 2055 - protein, 12 aa, Homo sapiens
  CDR3 for alpha chain variable domain of TCR clone 1028 (TRAV25, TRAJ20)
CAGRSNDYKLSF

SEQ ID NO: 2056 - protein, 15 aa, Homo sapiens
  CDR3 for beta chain variable domain of TCR clone 1028 (TRBV7-6, TRBJ2-7)
CASSGRRDTFGEQYF

SEQ ID NO: 2057 - protein, 14 aa, Homo sapiens
  CDR3 for alpha chain variable domain of TCR clone 1029 (TRAV26-1, TRAJ38)
CIADNAGNNRKLIW

SEQ ID NO: 2058 - protein, 13 aa, Homo sapiens
  CDR3 for beta chain variable domain of TCR clone 1029 (TRBV7-9, TRBJ1-2)
CASSLKQNYGYTF

SEQ ID NO: 2059 - protein, 14 aa, Homo sapiens
  CDR3 for alpha chain variable domain of TCR clone 1030 (TRAV16, TRAJ33)
CALSAMDSNYQLIW

SEQ ID NO: 2060 - protein, 17 aa, Homo sapiens
  CDR3 for beta chain variable domain of TCR clone 1030 (TRBV25-1, TRBJ2-7)
CASSDARVVFSSYEQYF

SEQ ID NO: 2061 - protein, 16 aa, Homo sapiens
  CDR3 for alpha chain variable domain of TCR clone 1031 (TRAV27, TRAJ53)
CAAPEGSGGSNYKLTF

SEQ ID NO: 2062 - protein, 15 aa, Homo sapiens
  CDR3 for beta chain variable domain of TCR clone 1031 (TRBV20-1, TRBJ1-1)
CSASRGVTGNTEAFF

SEQ ID NO: 2063 - protein, 14 aa, Homo sapiens
  CDR3 for alpha chain variable domain of TCR clone 1032 (TRAV16, TRAJ33)
CALSAMDSNYQLIW

SEQ ID NO: 2064 - protein, 15 aa, Homo sapiens
  CDR3 for beta chain variable domain of TCR clone 1032 (TRBV28, TRBJ2-7)
CASSLEAYPIYEQYF

SEQ ID NO: 2065 - protein, 15 aa, Homo sapiens
  CDR3 for alpha chain variable domain of TCR clone 1033 (TRAV8-3, TRAJ32)
CAVGPYGGATNKLIF

SEQ ID NO: 2066 - protein, 14 aa, Homo sapiens
  CDR3 for beta chain variable domain of TCR clone 1033 (TRBV29-1, TRBJ2-2)
CSVLAETNTGELFF

SEQ ID NO: 2067 - protein, 12 aa, Homo sapiens
  CDR3 for alpha chain variable domain of TCR clone 1034 (TRAV3, TRAJ20)
CAVRDPDYKLSF

SEQ ID NO: 2068 - protein, 14 aa, Homo sapiens
  CDR3 for beta chain variable domain of TCR clone 1034 (TRBV4-2, TRBJ2-1)
CASGLDRAYNEQFF

SEQ ID NO: 2069 - protein, 12 aa, Homo sapiens
  CDR3 for alpha chain variable domain of TCR clone 1035 (TRAV12-3, TRAJ17)
CAMTLTGNKLTF

SEQ ID NO: 2070 - protein, 14 aa, Homo sapiens
  CDR3 for beta chain variable domain of TCR clone 1035 (TRBV4-1, TRBJ2-7)
CASSQDREHVEQYF

SEQ ID NO: 2071 - protein, 13 aa, Homo sapiens
  CDR3 for alpha chain variable domain of TCR clone 1036 (TRAV3, TRAJ41)
CAVSSNSGYALNF

SEQ ID NO: 2072 - protein, 13 aa, Homo sapiens
  CDR3 for beta chain variable domain of TCR clone 1036 (TRBV20-1, TRBJ2-2)
CSALSGGAGELFF

SEQ ID NO: 2073 - protein, 13 aa, Homo sapiens
  CDR3 for alpha chain variable domain of TCR clone 1037 (TRAV25, TRAJ26)
CAGMDNYGQNFVF

SEQ ID NO: 2074 - protein, 15 aa, Homo sapiens
  CDR3 for beta chain variable domain of TCR clone 1037 (TRBV10-3, TRBJ2-1)
CAIRNGTSGHNEQFF

SEQ ID NO: 2075 - protein, 18 aa, Homo sapiens
  CDR3 for alpha chain variable domain of TCR clone 1038 (TRAV8-3, TRAJ4)
WVRDPTSNDPGGYNKLIF

SEQ ID NO: 2076 - protein, 13 aa, Homo sapiens
  CDR3 for beta chain variable domain of TCR clone 1038 (TRBV20-1, TRBJ1-2)
CSATGIQGSGYTF

SEQ ID NO: 2077 - protein, 13 aa, Homo sapiens
  CDR3 for alpha chain variable domain of TCR clone 1039 (TRAV27, TRAJ6)
CAGGTRGSYIPTF

SEQ ID NO: 2078 - protein, 15 aa, Homo sapiens
  CDR3 for beta chain variable domain of TCR clone 1039 (TRBV5-5, TRBJ2-7)
CASSLAAPLSYEQYF

SEQ ID NO: 2079 - protein, 14 aa, Homo sapiens
  CDR3 for alpha chain variable domain of TCR clone 1040 (TRAV21, TRAJ37)
CAVKGSSNTGKLIF

SEQ ID NO: 2080 - protein, 14 aa, Homo sapiens
  CDR3 for beta chain variable domain of TCR clone 1040 (TRBV7-2, TRBJ2-1)
CASSRGGARNEQFF

SEQ ID NO: 2081 - protein, 14 aa, Homo sapiens
  CDR3 for alpha chain variable domain of TCR clone 1041 (TRAV12-3, TRAJ10)
SHLPLTGGGNKLTF

SEQ ID NO: 2082 - protein, 13 aa, Homo sapiens
  CDR3 for beta chain variable domain of TCR clone 1041 (TRBV7-9, TRBJ2-3)
CASSPGSTDTQYF

SEQ ID NO: 2083 - protein, 12 aa, Homo sapiens
  CDR3 for alpha chain variable domain of TCR clone 1042 (TRAV8-3, TRAJ20)
CAVDFNDYKLSF

SEQ ID NO: 2084 - protein, 13 aa, Homo sapiens
  CDR3 for beta chain variable domain of TCR clone 1042 (TRBV5-7, TRBJ2-3)
CASSLGRTDTQYF

SEQ ID NO: 2085 - protein, 16 aa, Homo sapiens
  CDR3 for alpha chain variable domain of TCR clone 1043 (TRAV30, TRAJ24)
CGTEIVDADSWGKFQF

SEQ ID NO: 2086 - protein, 14 aa, Homo sapiens
  CDR3 for beta chain variable domain of TCR clone 1043 (TRBV13, TRBJ2-1)
CASSPRPRYNEQFF

SEQ ID NO: 2087 - protein, 14 aa, Homo sapiens
  CDR3 for alpha chain variable domain of TCR clone 1044 (TRAV12-2, TRAJ53)
CAVKGGGSNYKLTF

SEQ ID NO: 2088 - protein, 14 aa, Homo sapiens
  CDR3 for beta chain variable domain of TCR clone 1044 (TRBV19, TRBJ2-1)
CASPTFVLSGEQFF

SEQ ID NO: 2089 - protein, 16 aa, Homo sapiens
  CDR3 for alpha chain variable domain of TCR clone 1045 (TRAV12-1, TRAJ45)
CVVIRYSGGGADGLTF

SEQ ID NO: 2090 - protein, 12 aa, Homo sapiens
  CDR3 for beta chain variable domain of TCR clone 1045 (TRBV6-5, TRBJ2-2)
CASRQITGELFF

SEQ ID NO: 2091 - protein, 12 aa, Homo sapiens
  CDR3 for alpha chain variable domain of TCR clone 1046 (TRAV13-1, TRAJ53)
CAAGGSNYKLTF

SEQ ID NO: 2092 - protein, 11 aa, Homo sapiens
  CDR3 for beta chain variable domain of TCR clone 1046 (TRBV2, TRBJ1-1)
CASREGTEAFF

SEQ ID NO: 2093 - protein, 13 aa, Homo sapiens
  CDR3 for alpha chain variable domain of TCR clone 1047 (TRAV16, TRAJ10)
CALLTGGGNKLTF

SEQ ID NO: 2094 - protein, 12 aa, Homo sapiens
  CDR3 for beta chain variable domain of TCR clone 1047 (TRBV28, TRBJ2-7)
CASTGNHYEQYF

SEQ ID NO: 2095 - protein, 15 aa, Homo sapiens
  CDR3 for alpha chain variable domain of TCR clone 1048 (TRAV26-2, TRAJ45)
CILRDRVDQEEVLTD

SEQ ID NO: 2096 - protein, 15 aa, Homo sapiens
  CDR3 for beta chain variable domain of TCR clone 1048 (TRBV7-6, TRBJ2-5)
CASSKPTGPQETQYF

SEQ ID NO: 2097 - protein, 16 aa, Homo sapiens
  CDR3 for alpha chain variable domain of TCR clone 1049 (TRAV30, TRAJ24)
CGTEIVDADSWGKFQF

SEQ ID NO: 2098 - protein, 13 aa, Homo sapiens
  CDR3 for beta chain variable domain of TCR clone 1049 (TRBV7-3, TRBJ1-1)
CASSQDWGAEAFF

SEQ ID NO: 2099 - protein, 17 aa, Homo sapiens
  CDR3 for alpha chain variable domain of TCR clone 1050 (TRAV38-1, TRAJ28)
CAFMKPTSGAGSYQLTF

SEQ ID NO: 2100 - protein, 15 aa, Homo sapiens
  CDR3 for beta chain variable domain of TCR clone 1050 (TRBV5-1, TRBJ2-4)
CASSLGGGGSYIQYF

SEQ ID NO: 2101 - protein, 14 aa, Homo sapiens
  CDR3 for alpha chain variable domain of TCR clone 1051 (TRAV8-3, TRAJ39)
CAVGANNAGNMLTF

SEQ ID NO: 2102 - protein, 15 aa, Homo sapiens
  CDR3 for beta chain variable domain of TCR clone 1051 (TRBV4-3, TRBJ1-1)
CASSQELGRGTEAFF

SEQ ID NO: 2103 - protein, 14 aa, Homo sapiens
  CDR3 for alpha chain variable domain of TCR clone 1052 (TRAV8-2, TRAJ4)
CVVSPSGGYNKLIF

SEQ ID NO: 2104 - protein, 15 aa, Homo sapiens
  CDR3 for beta chain variable domain of TCR clone 1052 (TRBV2, TRBJ2-1)
CASSELAGSYNEQFF

SEQ ID NO: 2105 - protein, 12 aa, Homo sapiens
  CDR3 for alpha chain variable domain of TCR clone 1053 (TRAV12-1, TRAJ40)
CVVSSGTYKYIF

SEQ ID NO: 2106 - protein, 14 aa, Homo sapiens
  CDR3 for beta chain variable domain of TCR clone 1053 (TRBV20-1, TRBJ2-2)
CSAPDTANTGELFF

SEQ ID NO: 2107 - protein, 12 aa, Homo sapiens
  CDR3 for alpha chain variable domain of TCR clone 1054 (TRAV13-1, TRAJ42)
SVLRGSQGNLIF

SEQ ID NO: 2108 - protein, 13 aa, Homo sapiens
  CDR3 for beta chain variable domain of TCR clone 1054 (TRBV2, TRBJ1-4)
CASSELGVEKLFF

SEQ ID NO: 2109 - protein, 14 aa, Homo sapiens
  CDR3 for alpha chain variable domain of TCR clone 1055 (TRAV1-1, TRAJ27)
CAVIYNTNAGKSTF

SEQ ID NO: 2110 - protein, 15 aa, Homo sapiens
  CDR3 for beta chain variable domain of TCR clone 1055 (TRBV6-3, TRBJ2-7)
CASSSPGTVFYEQYF

SEQ ID NO: 2111 - protein, 15 aa, Homo sapiens
  CDR3 for alpha chain variable domain of TCR clone 1056 (TRAV3, TRAJ17)
CAVRDTGAAGNKLTF

SEQ ID NO: 2112 - protein, 14 aa, Homo sapiens
  CDR3 for beta chain variable domain of TCR clone 1056 (TRBV6-3, TRBJ1-1)
CASSNLLPGAEAFF

SEQ ID NO: 2113 - protein, 14 aa, Homo sapiens
  CDR3 for alpha chain variable domain of TCR clone 1057 (TRAV36/DV7, TRAJ57)
CAVGFPGGSEKLVF

SEQ ID NO: 2114 - protein, 12 aa, Homo sapiens
  CDR3 for beta chain variable domain of TCR clone 1057 (TRBV19, TRBJ2-7)
CASTSGTYEQYF

SEQ ID NO: 2115 - protein, 12 aa, Homo sapiens
  CDR3 for alpha chain variable domain of TCR clone 1058 (TRAV21, TRAJ20)
CAVRGNDYKLSF

SEQ ID NO: 2116 - protein, 14 aa, Homo sapiens
  CDR3 for beta chain variable domain of TCR clone 1058 (TRBV7-8, TRBJ2-7)
CASSQTQGADEQYF

SEQ ID NO: 2117 - protein, 11 aa, Homo sapiens
  CDR3 for alpha chain variable domain of TCR clone 1059 (TRAV12-2, TRAJ33)
CAVGSNYQLIW

SEQ ID NO: 2118 - protein, 14 aa, Homo sapiens
  CDR3 for beta chain variable domain of TCR clone 1059 (TRBV6-1, TRBJ2-2)
CASVEHIESGELFF

SEQ ID NO: 2119 - protein, 14 aa, Homo sapiens
  CDR3 for alpha chain variable domain of TCR clone 1060 (TRAV27, TRAJ22)
CAGLPSGSARQLTF

SEQ ID NO: 2120 - protein, 16 aa, Homo sapiens
  CDR3 for beta chain variable domain of TCR clone 1060 (TRBV7-3, TRBJ2-2)
CASSLKRGTLSGELFF

SEQ ID NO: 2121 - protein, 16 aa, Homo sapiens
  CDR3 for alpha chain variable domain of TCR clone 1061 (TRAV12-2, TRAJ50)
CAVGTATKTSYDKVIF

SEQ ID NO: 2122 - protein, 12 aa, Homo sapiens
  CDR3 for beta chain variable domain of TCR clone 1061 (TRBV12-4, TRBJ1-5)
CASSLGRQPQHF

SEQ ID NO: 2123 - protein, 12 aa, Homo sapiens
  CDR3 for alpha chain variable domain of TCR clone 1062 (TRAV21, TRAJ49)
CAVRNTGNQFYF

SEQ ID NO: 2124 - protein, 12 aa, Homo sapiens
  CDR3 for beta chain variable domain of TCR clone 1062 (TRBV7-9, TRBJ2-7)
CATRTDAYEQYF

SEQ ID NO: 2125 - protein, 12 aa, Homo sapiens
  CDR3 for alpha chain variable domain of TCR clone 1063 (TRAV13-1, TRAJ42)
VNYGGSQGNLIF

SEQ ID NO: 2126 - protein, 15 aa, Homo sapiens
  CDR3 for beta chain variable domain of TCR clone 1063 (TRBV20-1, TRBJ2-1)
CSASSAGSSYNEQFF

SEQ ID NO: 2127 - protein, 16 aa, Homo sapiens
  CDR3 for alpha chain variable domain of TCR clone 1064 (TRAV30, TRAJ24)
CGTEIVDADSWGKFQF

SEQ ID NO: 2128 - protein, 17 aa, Homo sapiens
  CDR3 for beta chain variable domain of TCR clone 1064 (TRBV20-1, TRBJ2-1)
CSAPPRLAGTRYNEQFF

SEQ ID NO: 2129 - protein, 11 aa, Homo sapiens
  CDR3 for alpha chain variable domain of TCR clone 1065 (TRAV17, TRAJ39)
CATNPYNMLTF

SEQ ID NO: 2130 - protein, 13 aa, Homo sapiens
  CDR3 for beta chain variable domain of TCR clone 1065 (TRBV7-8, TRBJ2-1)
CASTRDAVDEQFF

SEQ ID NO: 2131 - protein, 11 aa, Homo sapiens
  CDR3 for alpha chain variable domain of TCR clone 1066 (TRAV20, TRAJ34)
CTRDNTDKLIF

SEQ ID NO: 2132 - protein, 15 aa, Homo sapiens
  CDR3 for beta chain variable domain of TCR clone 1066 (TRBV2, TRBJ2-1)
CASSVTSEGTDEQFF

SEQ ID NO: 2133 - protein, 13 aa, Homo sapiens
  CDR3 for alpha chain variable domain of TCR clone 1067 (TRAV3, TRAJ20)
CAVRSLNDYKLSF

SEQ ID NO: 2134 - protein, 13 aa, Homo sapiens
  CDR3 for beta chain variable domain of TCR clone 1067 (TRBV7-3, TRBJ1-1)
CASSQDWGAEAFF

SEQ ID NO: 2135 - protein, 12 aa, Homo sapiens
  CDR3 for alpha chain variable domain of TCR clone 1068 (TRAV1-2, TRAJ26)
CAVRYYGQNFVF

SEQ ID NO: 2136 - protein, 14 aa, Homo sapiens
  CDR3 for beta chain variable domain of TCR clone 1068 (TRBV11-1, TRBJ2-7)
CASSFRQGSYEQYF

SEQ ID NO: 2137 - protein, 14 aa, Homo sapiens
  CDR3 for alpha chain variable domain of TCR clone 1069 (TRAV1-2, TRAJ8)
CAVREDTGFQKLVF

SEQ ID NO: 2138 - protein, 12 aa, Homo sapiens
  CDR3 for beta chain variable domain of TCR clone 1069 (TRBV29-1, TRBJ2-3)
CSVTGGADTQYF

SEQ ID NO: 2139 - protein, 12 aa, Homo sapiens
  CDR3 for alpha chain variable domain of TCR clone 1070 (TRAV27, TRAJ36)
CAGMTGANNLFF

SEQ ID NO: 2140 - protein, 14 aa, Homo sapiens
  CDR3 for beta chain variable domain of TCR clone 1070 (TRBV12-4, TRBJ2-3)
CASSLVPSTDTQYF

SEQ ID NO: 2141 - protein, 11 aa, Homo sapiens
  CDR3 for alpha chain variable domain of TCR clone 1071 (TRAV12-1, TRAJ37)
CVVNTPGKLIF

SEQ ID NO: 2142 - protein, 13 aa, Homo sapiens
  CDR3 for beta chain variable domain of TCR clone 1071 (TRBV12-4, TRBJ1-5)
CASSPDRAQPQHF

SEQ ID NO: 2143 - protein, 16 aa, Homo sapiens
  CDR3 for alpha chain variable domain of TCR clone 1072 (TRAV12-3, TRAJ53)
CAMSPGSGGSNYKLTF

SEQ ID NO: 2144 - protein, 14 aa, Homo sapiens
  CDR3 for beta chain variable domain of TCR clone 1072 (TRBV4-2, TRBJ2-1)
CASGLDRAYNEQFF

SEQ ID NO: 2145 - protein, 14 aa, Homo sapiens
  CDR3 for alpha chain variable domain of TCR clone 1073 (TRAV17, TRAJ57)
CATDASGGSEKLVF

SEQ ID NO: 2146 - protein, 14 aa, Homo sapiens
  CDR3 for beta chain variable domain of TCR clone 1073 (TRBV4-2, TRBJ2-1)
CASGLDRAYNEQFF

SEQ ID NO: 2147 - protein, 14 aa, Homo sapiens
  CDR3 for alpha chain variable domain of TCR clone 1074 (TRAV3, TRAJ21)
CAVESQANFNKFYF

SEQ ID NO: 2148 - protein, 12 aa, Homo sapiens
  CDR3 for beta chain variable domain of TCR clone 1074 (TRBV6-3, TRBJ2-7)
CASSLTPYEQYF

SEQ ID NO: 2149 - protein, 16 aa, Homo sapiens
  CDR3 for alpha chain variable domain of TCR clone 1075 (TRAV38-2/DV8, TRAJ47)
CAYRSAIMEYGNKLVF

SEQ ID NO: 2150 - protein, 14 aa, Homo sapiens
  CDR3 for beta chain variable domain of TCR clone 1075 (TRBV19, TRBJ2-7)
CASSIFAGTYEQYF

SEQ ID NO: 2151 - protein, 14 aa, Homo sapiens
  CDR3 for alpha chain variable domain of TCR clone 1076 (TRAV12-1, TRAJ42)
CVVIYGGSQGNLIF

SEQ ID NO: 2152 - protein, 13 aa, Homo sapiens
  CDR3 for beta chain variable domain of TCR clone 1076 (TRBV18, TRBJ2-5)
CASSPPGKETQYF

SEQ ID NO: 2153 - protein, 16 aa, Homo sapiens
  CDR3 for alpha chain variable domain of TCR clone 1077 (TRAV30, TRAJ24)
CGTEIVDADSWGKFQF

SEQ ID NO: 2154 - protein, 18 aa, Homo sapiens
  CDR3 for beta chain variable domain of TCR clone 1077 (TRBV11-2, TRBJ2-3)
CASSLGGASRGAPNTQYF

SEQ ID NO: 2155 - protein, 14 aa, Homo sapiens
  CDR3 for alpha chain variable domain of TCR clone 1078 (TRAV23/DV6, TRAJ24)
CAASLSDSWGKLQF

SEQ ID NO: 2156 - protein, 16 aa, Homo sapiens
  CDR3 for beta chain variable domain of TCR clone 1078 (TRBV7-9, TRBJ2-6)
CASSLKGPLRANVLTF

SEQ ID NO: 2157 - protein, 14 aa, Homo sapiens
  CDR3 for alpha chain variable domain of TCR clone 1079 (TRAV3, TRAJ34)
CAVRAPGNTDKLIF

SEQ ID NO: 2158 - protein, 17 aa, Homo sapiens
  CDR3 for beta chain variable domain of TCR clone 1079 (TRBV20-1, TRBJ2-7)
CSAAPGLARGISYEQYF

SEQ ID NO: 2159 - protein, 14 aa, Homo sapiens
  CDR3 for alpha chain variable domain of TCR clone 1080 (TRAV12-2, TRAJ36)
CAVNPPTGANNLFF

SEQ ID NO: 2160 - protein, 13 aa, Homo sapiens
  CDR3 for beta chain variable domain of TCR clone 1080 (TRBV20-1, TRBJ1-6)
CSAPTGLGSPLHF

SEQ ID NO: 2161 - protein, 14 aa, Homo sapiens
  CDR3 for alpha chain variable domain of TCR clone 1081 (TRAV29/DV5, TRAJ32)
CAAAYGGATNKLIF

SEQ ID NO: 2162 - protein, 15 aa, Homo sapiens
  CDR3 for beta chain variable domain of TCR clone 1081 (TRBV27, TRBJ2-7)
CASSTAGTGSYEQYF

SEQ ID NO: 2163 - protein, 12 aa, Homo sapiens
  CDR3 for alpha chain variable domain of TCR clone 1082 (TRAV13-1, TRAJ21)
CAAKEGFNKFYF

SEQ ID NO: 2164 - protein, 18 aa, Homo sapiens
  CDR3 for beta chain variable domain of TCR clone 1082 (TRBV20-1, TRBJ2-6)
CSAETTPTHGSGANVLTF

SEQ ID NO: 2165 - protein, 13 aa, Homo sapiens
  CDR3 for alpha chain variable domain of TCR clone 1083 (TRAV8-3, TRAJ6)
CAVGSGGSYIPTF

SEQ ID NO: 2166 - protein, 14 aa, Homo sapiens
  CDR3 for beta chain variable domain of TCR clone 1083 (TRBV11-2, TRBJ1-1)
CASSTQRGRTEAFF

SEQ ID NO: 2167 - protein, 12 aa, Homo sapiens
  CDR3 for alpha chain variable domain of TCR clone 1084 (TRAV21, TRAJ39)
CAADNAGNMLTF

SEQ ID NO: 2168 - protein, 13 aa, Homo sapiens
  CDR3 for beta chain variable domain of TCR clone 1084 (TRBV12-4, TRBJ1-1)
CASSPGTGFEAFF

SEQ ID NO: 2169 - protein, 14 aa, Homo sapiens
  CDR3 for alpha chain variable domain of TCR clone 1085 (TRAV1-2, TRAJ16)
CAVNRFSDGQKLLF

SEQ ID NO: 2170 - protein, 12 aa, Homo sapiens
  CDR3 for beta chain variable domain of TCR clone 1085 (TRBV28, TRBJ2-6)
CAIQAGANVLTF

SEQ ID NO: 2171 - protein, 14 aa, Homo sapiens
  CDR3 for alpha chain variable domain of TCR clone 1086 (TRAV12-2, TRAJ13)
CAVKKTGGYQKVTF

SEQ ID NO: 2172 - protein, 17 aa, Homo sapiens
  CDR3 for beta chain variable domain of TCR clone 1086 (TRBV13, TRBJ2-3)
CASSLSRVAGGRNTQYF

SEQ ID NO: 2173 - protein, 15 aa, Homo sapiens
  CDR3 for alpha chain variable domain of TCR clone 1087 (TRAV26-2, TRAJ57)
CILRDIRGGSEKLVF

SEQ ID NO: 2174 - protein, 15 aa, Homo sapiens
  CDR3 for beta chain variable domain of TCR clone 1087 (TRBV2, TRBJ2-1)
CASDIGLAGEGEQFF

SEQ ID NO: 2175 - protein, 12 aa, Homo sapiens
  CDR3 for alpha chain variable domain of TCR clone 1088 (TRAV16, TRAJ26)
CASKDGGQNFVF

SEQ ID NO: 2176 - protein, 13 aa, Homo sapiens
  CDR3 for beta chain variable domain of TCR clone 1088 (TRBV25-1, TRBJ1-1)
CASSDRGRAEAFF

SEQ ID NO: 2177 - protein, 12 aa, Homo sapiens
  CDR3 for alpha chain variable domain of TCR clone 1089 (TRAV12-3, TRAJ17)
CAMTLTGNKLTF

SEQ ID NO: 2178 - protein, 17 aa, Homo sapiens
  CDR3 for beta chain variable domain of TCR clone 1089 (TRBV11-2, TRBJ2-1)
CASSLYPPGVEYNEQFF

SEQ ID NO: 2179 - protein, 11 aa, Homo sapiens
  CDR3 for alpha chain variable domain of TCR clone 1090 (TRAV12-2, TRAJ31)
CAILNNARLMF

SEQ ID NO: 2180 - protein, 13 aa, Homo sapiens
  CDR3 for beta chain variable domain of TCR clone 1090 (TRBV20-1, TRBJ1-1)
CSARLGQGTEAFF

SEQ ID NO: 2181 - protein, 14 aa, Homo sapiens
  CDR3 for alpha chain variable domain of TCR clone 1091 (TRAV26-1, TRAJ40)
CIVRVARGTYKYIF

SEQ ID NO: 2182 - protein, 14 aa, Homo sapiens
  CDR3 for beta chain variable domain of TCR clone 1091 (TRBV7-3, TRBJ2-7)
CASSLKADSYEQYF

SEQ ID NO: 2183 - protein, 13 aa, Homo sapiens
  CDR3 for alpha chain variable domain of TCR clone 1092 (TRAV12-3, TRAJ5)
CAMIYTGRRALTF

SEQ ID NO: 2184 - protein, 12 aa, Homo sapiens
  CDR3 for beta chain variable domain of TCR clone 1092 (TRBV18, TRBJ1-4)
CASSPSREKLFF

SEQ ID NO: 2185 - protein, 14 aa, Homo sapiens
  CDR3 for alpha chain variable domain of TCR clone 1093 (TRAV12-1, TRAJ3)
CGAARYSSASKIIF

SEQ ID NO: 2186 - protein, 15 aa, Homo sapiens
  CDR3 for beta chain variable domain of TCR clone 1093 (TRBV7-2, TRBJ2-6)
CASSREGSGANVLTF

SEQ ID NO: 2187 - protein, 13 aa, Homo sapiens
  CDR3 for alpha chain variable domain of TCR clone 1094 (TRAV21, TRAJ27)
CAARPGNAGKSTL

SEQ ID NO: 2188 - protein, 14 aa, Homo sapiens
  CDR3 for beta chain variable domain of TCR clone 1094 (TRBV7-6, TRBJ2-3)
CASSLGTVTDTQYF

SEQ ID NO: 2189 - protein, 17 aa, Homo sapiens
  CDR3 for alpha chain variable domain of TCR clone 1095 (TRAV3, TRAJ42)
CAVRDRDYGGSQGNLIF

SEQ ID NO: 2190 - protein, 15 aa, Homo sapiens
  CDR3 for beta chain variable domain of TCR clone 1095 (TRBV2, TRBJ2-7)
CASSEGLARSYEQYF

SEQ ID NO: 2191 - protein, 12 aa, Homo sapiens
  CDR3 for alpha chain variable domain of TCR clone 1096 (TRAV12-2, TRAJ10)
WGVTGGGNKLTF

SEQ ID NO: 2192 - protein, 14 aa, Homo sapiens
  CDR3 for beta chain variable domain of TCR clone 1096 (TRBV27, TRBJ2-7)
CASATGTERREQYF

SEQ ID NO: 2193 - protein, 13 aa, Homo sapiens
  CDR3 for alpha chain variable domain of TCR clone 1097 (TRAV8-3, TRAJ48)
CAVVPFGNEKLTF

SEQ ID NO: 2194 - protein, 12 aa, Homo sapiens
  CDR3 for beta chain variable domain of TCR clone 1097 (TRBV11-2, TRBJ2-2)
CASSLGGGELFF

SEQ ID NO: 2195 - protein, 15 aa, Homo sapiens
  CDR3 for alpha chain variable domain of TCR clone 1098 (TRAV3, TRAJ4)
CAVRDGTGGYNKLIF

SEQ ID NO: 2196 - protein, 13 aa, Homo sapiens
  CDR3 for beta chain variable domain of TCR clone 1098 (TRBV12-5, TRBJ1-2)
CASGVRTGNGYTF

SEQ ID NO: 2197 - protein, 12 aa, Homo sapiens
  CDR3 for alpha chain variable domain of TCR clone 1099 (TRAV21, TRAJ11)
CAATSGYSTLTF

SEQ ID NO: 2198 - protein, 16 aa, Homo sapiens
  CDR3 for beta chain variable domain of TCR clone 1099 (TRBV28, TRBJ2-2)
CASSLEGGSNTGELFF

SEQ ID NO: 2199 - protein, 15 aa, Homo sapiens
  CDR3 for alpha chain variable domain of TCR clone 1100 (TRAV27, TRAJ33)
CAGADIMDSNYQLIW

SEQ ID NO: 2200 - protein, 13 aa, Homo sapiens
  CDR3 for beta chain variable domain of TCR clone 1100 (TRBV28, TRBJ1-2)
CASSLQGRGGYTF

SEQ ID NO: 2201 - protein, 12 aa, Homo sapiens
  CDR3 for alpha chain variable domain of TCR clone 1101 (TRAV1-2, TRAJ24)
CAVGGSWGKFQF

SEQ ID NO: 2202 - protein, 15 aa, Homo sapiens
  CDR3 for beta chain variable domain of TCR clone 1101 (TRBV6-1, TRBJ2-7)
CASSEGVGNPYEQYF

SEQ ID NO: 2203 - protein, 13 aa, Homo sapiens
  CDR3 for alpha chain variable domain of TCR clone 1102 (TRAV2, TRAJ40)
CAVVTSGTYKYIF

SEQ ID NO: 2204 - protein, 14 aa, Homo sapiens
  CDR3 for beta chain variable domain of TCR clone 1102 (TRBV19, TRBJ2-3)
CASSAPRGTDTQYF

SEQ ID NO: 2205 - protein, 14 aa, Homo sapiens
  CDR3 for alpha chain variable domain of TCR clone 1103 (TRAV8-1, TRAJ5)
CAVSMDTGRRALTF

SEQ ID NO: 2206 - protein, 15 aa, Homo sapiens
  CDR3 for beta chain variable domain of TCR clone 1103 (TRBV19, TRBJ2-4)
CASRGPRRGENIQYF

SEQ ID NO: 2207 - protein, 14 aa, Homo sapiens
  CDR3 for alpha chain variable domain of TCR clone 1104 (TRAV12-2, TRAJ40)
CAVKIPSGTYKYIF

SEQ ID NO: 2208 - protein, 12 aa, Homo sapiens
  CDR3 for beta chain variable domain of TCR clone 1104 (TRBV11-2, TRBJ2-2)
CASSLGGGELFF

SEQ ID NO: 2209 - protein, 14 aa, Homo sapiens
  CDR3 for alpha chain variable domain of TCR clone 1105 (TRAV13-1, TRAJ45)
CAAIGGGGADGLTF

SEQ ID NO: 2210 - protein, 16 aa, Homo sapiens
  CDR3 for beta chain variable domain of TCR clone 1105 (TRBV7-2, TRBJ1-1)
CASSLGAGWTNTEAFF

SEQ ID NO: 2211 - protein, 12 aa, Homo sapiens
  CDR3 for alpha chain variable domain of TCR clone 1106 (TRAV21, TRAJ49)
CAVNDGGNQFYF

SEQ ID NO: 2212 - protein, 14 aa, Homo sapiens
  CDR3 for beta chain variable domain of TCR clone 1106 (TRBV18, TRBJ2-7)
CASSPRGGSYEQYF

SEQ ID NO: 2213 - protein, 15 aa, Homo sapiens
  CDR3 for alpha chain variable domain of TCR clone 1107 (TRAV26-1, TRAJ42)
CIVRVKGGSQGNLIF

SEQ ID NO: 2214 - protein, 14 aa, Homo sapiens
  CDR3 for beta chain variable domain of TCR clone 1107 (TRBV19, TRBJ2-2)
CATTGHANTGELFF

SEQ ID NO: 2215 - protein, 13 aa, Homo sapiens
  CDR3 for alpha chain variable domain of TCR clone 1108 (TRAV13-1, TRAJ37)
CAARSGNTGKLIF

SEQ ID NO: 2216 - protein, 14 aa, Homo sapiens
  CDR3 for beta chain variable domain of TCR clone 1108 (TRBV12-4, TRBJ2-3)
CASSLGQGTDTQYF

SEQ ID NO: 2217 - protein, 12 aa, Homo sapiens
  CDR3 for alpha chain variable domain of TCR clone 1109 (TRAV20, TRAJ39)
CAVGNAGNMLTF

SEQ ID NO: 2218 - protein, 17 aa, Homo sapiens
  CDR3 for beta chain variable domain of TCR clone 1109 (TRBV4-1, TRBJ2-3)
CASSQGYVSGGTDTQYF

SEQ ID NO: 2219 - protein, 11 aa, Homo sapiens
  CDR3 for alpha chain variable domain of TCR clone 1110 (TRAV3, TRAJ21)
CAVGNFNKFYF

SEQ ID NO: 2220 - protein, 15 aa, Homo sapiens
  CDR3 for beta chain variable domain of TCR clone 1110 (TRBV5-1, TRBJ2-1)
CASSLVANSYNEQFF

SEQ ID NO: 2221 - protein, 11 aa, Homo sapiens
  CDR3 for alpha chain variable domain of TCR clone 1111 (TRAV12-2, TRAJ23)
CARGRGGKLIF

SEQ ID NO: 2222 - protein, 14 aa, Homo sapiens
  CDR3 for beta chain variable domain of TCR clone 1111 (TRBV28, TRBJ2-5)
CASSLGDRAETQYF

SEQ ID NO: 2223 - protein, 11 aa, Homo sapiens
  CDR3 for alpha chain variable domain of TCR clone 1112 (TRAV2, TRAJ13)
CASGGYQKVTF

SEQ ID NO: 2224 - protein, 14 aa, Homo sapiens
  CDR3 for beta chain variable domain of TCR clone 1112 (TRBV7-3, TRBJ2-1)
CASSLAGGTNEQFF

SEQ ID NO: 2225 - protein, 13 aa, Homo sapiens
  CDR3 for alpha chain variable domain of TCR clone 1113 (TRAV21, TRAJ57)
CAVTQGGSEKLVF

SEQ ID NO: 2226 - protein, 11 aa, Homo sapiens
  CDR3 for beta chain variable domain of TCR clone 1113 (TRBV11-2, TRBJ2-2)
CASSLPGELFF

SEQ ID NO: 2227 - protein, 13 aa, Homo sapiens
  CDR3 for alpha chain variable domain of TCR clone 1114 (TRAV5, TRAJ30)
CAEIANRDDKIIF

SEQ ID NO: 2228 - protein, 14 aa, Homo sapiens
  CDR3 for beta chain variable domain of TCR clone 1114 (TRBV4-1, TRBJ2-2)
CASSQAVNTGELFF

SEQ ID NO: 2229 - protein, 11 aa, Homo sapiens
  CDR3 for alpha chain variable domain of TCR clone 1115 (TRAV16, TRAJ20)
CALSEGFKAAL

SEQ ID NO: 2230 - protein, 13 aa, Homo sapiens
  CDR3 for beta chain variable domain of TCR clone 1115 (TRBV7-3, TRBJ2-1)
CASSLDSYNEQFF

SEQ ID NO: 2231 - protein, 13 aa, Homo sapiens
  CDR3 for alpha chain variable domain of TCR clone 1116 (TRAV35, TRAJ37)
CAGSSGNTGKLIF

SEQ ID NO: 2232 - protein, 16 aa, Homo sapiens
  CDR3 for beta chain variable domain of TCR clone 1116 (TRBV10-3, TRBJ2-1)
CAISLTSGNSYNEQFF

SEQ ID NO: 2233 - protein, 15 aa, Homo sapiens
  CDR3 for alpha chain variable domain of TCR clone 1117 (TRAV12-3, TRAJ42)
CAMSGHGGSQGNLIF

SEQ ID NO: 2234 - protein, 13 aa, Homo sapiens
  CDR3 for beta chain variable domain of TCR clone 1117 (TRBV19, TRBJ2-5)
CASSGRAGETQYF

SEQ ID NO: 2235 - protein, 13 aa, Homo sapiens
  CDR3 for alpha chain variable domain of TCR clone 1118 (TRAV3, TRAJ33)
CAVRDRSNYQLIW

SEQ ID NO: 2236 - protein, 16 aa, Homo sapiens
  CDR3 for beta chain variable domain of TCR clone 1118 (TRBV4-2, TRBJ2-7)
CASSQDRGTSSYEQYF

SEQ ID NO: 2237 - protein, 14 aa, Homo sapiens
  CDR3 for alpha chain variable domain of TCR clone 1119 (TRAV26-1, TRAJ38)
CIADNAGNNRKLIW

SEQ ID NO: 2238 - protein, 14 aa, Homo sapiens
  CDR3 for beta chain variable domain of TCR clone 1119 (TRBV4-1, TRBJ2-2)
CASSQAVNTGELFF

SEQ ID NO: 2239 - protein, 13 aa, Homo sapiens
  CDR3 for alpha chain variable domain of TCR clone 1120 (TRAV21, TRAJ56)
CAVRTGANSKLTF

SEQ ID NO: 2240 - protein, 15 aa, Homo sapiens
  CDR3 for beta chain variable domain of TCR clone 1120 (TRBV7-9, TRBJ1-1)
CASSHRGTVNTEAFF

SEQ ID NO: 2241 - protein, 14 aa, Homo sapiens
  CDR3 for alpha chain variable domain of TCR clone 1121 (TRAV21, TRAJ21)
CAVKGFGNFNKFYF

SEQ ID NO: 2242 - protein, 13 aa, Homo sapiens
  CDR3 for beta chain variable domain of TCR clone 1121 (TRBV18, TRBJ1-1)
CASSPETKPEAFF

SEQ ID NO: 2243 - protein, 14 aa, Homo sapiens
  CDR3 for alpha chain variable domain of TCR clone 1122 (TRAV3, TRAJ36)
CAVRDGTGANNLFF

SEQ ID NO: 2244 - protein, 16 aa, Homo sapiens
  CDR3 for beta chain variable domain of TCR clone 1122 (TRBV7-3, TRBJ2-5)
CASIQPGGSVQETQYF

SEQ ID NO: 2245 - protein, 17 aa, Homo sapiens
  CDR3 for alpha chain variable domain of TCR clone 1123 (TRAV36/DV7, TRAJ52)
CAVAQRAGGTSYGKLTF

SEQ ID NO: 2246 - protein, 15 aa, Homo sapiens
  CDR3 for beta chain variable domain of TCR clone 1123 (TRBV6-5, TRBJ1-2)
CASSYSQAFNYGYTF

SEQ ID NO: 2247 - protein, 14 aa, Homo sapiens
  CDR3 for alpha chain variable domain of TCR clone 1124 (TRAV35, TRAJ22)
CAGLRPGSARQLTF

SEQ ID NO: 2248 - protein, 14 aa, Homo sapiens
  CDR3 for beta chain variable domain of TCR clone 1124 (TRBV4-1, TRBJ2-7)
CASSPVAGGDEQYF

SEQ ID NO: 2249 - protein, 15 aa, Homo sapiens
  CDR3 for alpha chain variable domain of TCR clone 1125 (TRAV8-3, TRAJ11)
CAVGLLNSGYSTLTF

SEQ ID NO: 2250 - protein, 23 aa, Homo sapiens
  CDR3 for beta chain variable domain of TCR clone 1125 (TRBV7-9, TRBJ1-2)
EAQLEKSRLLSDRFSSGEDGYTF

SEQ ID NO: 2251 - protein, 14 aa, Homo sapiens
  CDR3 for alpha chain variable domain of TCR clone 1126 (TRAV23/DV6, TRAJ6)
CAASRSGGSYIPTF

SEQ ID NO: 2252 - protein, 17 aa, Homo sapiens
  CDR3 for beta chain variable domain of TCR clone 1126 (TRBV20-1, TRBJ2-1)
CSASASGLAGSYNEQFF

SEQ ID NO: 2253 - protein, 12 aa, Homo sapiens
  CDR3 for alpha chain variable domain of TCR clone 1127 (TRAV35, TRAJ12)
CAGMDSSYKLIF

SEQ ID NO: 2254 - protein, 14 aa, Homo sapiens
  CDR3 for beta chain variable domain of TCR clone 1127 (TRBV28, TRBJ2-5)
CASSLYRGTETQYF

SEQ ID NO: 2255 - protein, 15 aa, Homo sapiens
  CDR3 for alpha chain variable domain of TCR clone 1128 (TRAV17, TRAJ37)
CATDGGSSNTGKLIF

SEQ ID NO: 2256 - protein, 15 aa, Homo sapiens
  CDR3 for beta chain variable domain of TCR clone 1128 (TRBV28, TRBJ2-5)
CASSSGRTIQETQYF

SEQ ID NO: 2257 - protein, 14 aa, Homo sapiens
  CDR3 for alpha chain variable domain of TCR clone 1129 (TRAV26-1, TRAJ49)
CIVRPSNTGNQFYF

SEQ ID NO: 2258 - protein, 15 aa, Homo sapiens
  CDR3 for beta chain variable domain of TCR clone 1129 (TRBV19, TRBJ1-1)
CASMGFRDVNTEAFF

SEQ ID NO: 2259 - protein, 12 aa, Homo sapiens
  CDR3 for alpha chain variable domain of TCR clone 1130 (TRAV8-3, TRAJ41)
CAVALSGYALNF

SEQ ID NO: 2260 - protein, 16 aa, Homo sapiens
  CDR3 for beta chain variable domain of TCR clone 1130 (TRBV27, TRBJ2-7)
CASSSERRDSAYEQYF

SEQ ID NO: 2261 - protein, 12 aa, Homo sapiens
  CDR3 for alpha chain variable domain of TCR clone 1131 (TRAV12-1, TRAJ40)
CVVYSGTYKYIF

SEQ ID NO: 2262 - protein, 15 aa, Homo sapiens
  CDR3 for beta chain variable domain of TCR clone 1131 (TRBV7-9, TRBJ1-6)
CASSSPGRGNSPLHF

SEQ ID NO: 2263 - protein, 13 aa, Homo sapiens
  CDR3 for alpha chain variable domain of TCR clone 1132 (TRAV12-3, TRAJ13)
CAMSSGGYQKVTF

SEQ ID NO: 2264 - protein, 14 aa, Homo sapiens
  CDR3 for beta chain variable domain of TCR clone 1132 (TRBV2, TRBJ2-1)
CASRTGSSYNEQFF

SEQ ID NO: 2265 - protein, 15 aa, Homo sapiens
  CDR3 for alpha chain variable domain of TCR clone 1133 (TRAV12-1, TRAJ44)
CVVDTPQGTASKLTF

SEQ ID NO: 2266 - protein, 14 aa, Homo sapiens
  CDR3 for beta chain variable domain of TCR clone 1133 (TRBV7-9, TRBJ2-1)
CASSPRDSLYEQFF

SEQ ID NO: 2267 - protein, 14 aa, Homo sapiens
  CDR3 for alpha chain variable domain of TCR clone 1134 (TRAV14/DV4, TRAJ41)
CARGGPDSGYALNF

SEQ ID NO: 2268 - protein, 15 aa, Homo sapiens
  CDR3 for beta chain variable domain of TCR clone 1134 (TRBV19, TRBJ2-1)
CASSIQATSYNEQFF

SEQ ID NO: 2269 - protein, 14 aa, Homo sapiens
  CDR3 for alpha chain variable domain of TCR clone 1135 (TRAV16, TRAJ17)
CAPRIKAAGNKLTF

SEQ ID NO: 2270 - protein, 17 aa, Homo sapiens
  CDR3 for beta chain variable domain of TCR clone 1135 (TRBV7-2, TRBJ2-3)
CASSSYSGTRRADTQYF

SEQ ID NO: 2271 - protein, 11 aa, Homo sapiens
  CDR3 for alpha chain variable domain of TCR clone 1136 (TRAV2, TRAJ13)
CASGGYQKVTF

SEQ ID NO: 2272 - protein, 15 aa, Homo sapiens
  CDR3 for beta chain variable domain of TCR clone 1136 (TRBV6-1, TRBJ2-2)
CASSRLRGDTGELFF

SEQ ID NO: 2273 - protein, 12 aa, Homo sapiens
  CDR3 for alpha chain variable domain of TCR clone 1137 (TRAV16, TRAJ27)
CALNHQCRQINL

SEQ ID NO: 2274 - protein, 14 aa, Homo sapiens
  CDR3 for beta chain variable domain of TCR clone 1137 (TRBV11-2, TRBJ1-5)
CASSLDRGRQPQHF

SEQ ID NO: 2275 - protein, 15 aa, Homo sapiens
  CDR3 for alpha chain variable domain of TCR clone 1138 (TRAV17, TRAJ28)
CATVDSGAGSYQLTF

SEQ ID NO: 2276 - protein, 13 aa, Homo sapiens
  CDR3 for beta chain variable domain of TCR clone 1138 (TRBV5-4, TRBJ2-5)
CASSRQEGETQYF

SEQ ID NO: 2277 - protein, 14 aa, Homo sapiens
  CDR3 for alpha chain variable domain of TCR clone 1139 (TRAV12-1, TRAJ12)
CVVTRMDSSYKLIF

SEQ ID NO: 2278 - protein, 14 aa, Homo sapiens
  CDR3 for beta chain variable domain of TCR clone 1139 (TRBV4-1, TRBJ2-7)
CASSPVAGGDEQYF

SEQ ID NO: 2279 - protein, 13 aa, Homo sapiens
  CDR3 for alpha chain variable domain of TCR clone 1140 (TRAV16, TRAJ34)
CALTGYNTDKLIF

SEQ ID NO: 2280 - protein, 13 aa, Homo sapiens
  CDR3 for beta chain variable domain of TCR clone 1140 (TRBV6-1, TRBJ2-1)
CASREDGGHEQFF

SEQ ID NO: 2281 - protein, 16 aa, Homo sapiens
  CDR3 for alpha chain variable domain of TCR clone 1141 (TRAV16, TRAJ21)
CACGWATTSTNFTLDL

SEQ ID NO: 2282 - protein, 15 aa, Homo sapiens
  CDR3 for beta chain variable domain of TCR clone 1141 (TRBV19, TRBJ2-1)
CASSIQATSYNEQFF

SEQ ID NO: 2283 - protein, 15 aa, Homo sapiens
  CDR3 for alpha chain variable domain of TCR clone 1142 (TRAV26-2, TRAJ28)
CILVESGAGSYQLTF

SEQ ID NO: 2284 - protein, 16 aa, Homo sapiens
  CDR3 for beta chain variable domain of TCR clone 1142 (TRBV4-2, TRBJ1-2)
CASSQEIGGASYGYTF

SEQ ID NO: 2285 - protein, 13 aa, Homo sapiens
  CDR3 for alpha chain variable domain of TCR clone 1143 (TRAV27, TRAJ45)
CRSSGGGADGLTF

SEQ ID NO: 2286 - protein, 15 aa, Homo sapiens
  CDR3 for beta chain variable domain of TCR clone 1143 (TRBV9, TRBJ2-2)
CASSDFAGASGELFF

SEQ ID NO: 2287 - protein, 13 aa, Homo sapiens
  CDR3 for alpha chain variable domain of TCR clone 1144 (TRAV21, TRAJ20)
CAVGLRVDYKLSF

SEQ ID NO: 2288 - protein, 13 aa, Homo sapiens
  CDR3 for beta chain variable domain of TCR clone 1144 (TRBV6-1, TRBJ1-1)
CASSRQGNTGAFF

SEQ ID NO: 2289 - protein, 19 aa, Homo sapiens
  CDR3 for alpha chain variable domain of TCR clone 1145 (TRAV17, TRAJ40)
TASRAADTASYFCASKYIF

SEQ ID NO: 2290 - protein, 17 aa, Homo sapiens
  CDR3 for beta chain variable domain of TCR clone 1145 (TRBV11-2, TRBJ2-4)
CASSFLALGGAGDIQYF

SEQ ID NO: 2291 - protein, 13 aa, Homo sapiens
  CDR3 for alpha chain variable domain of TCR clone 1146 (TRAV6, TRAJ20)
CALAVSNDYKLSF

SEQ ID NO: 2292 - protein, 16 aa, Homo sapiens
  CDR3 for beta chain variable domain of TCR clone 1146 (TRBV7-9, TRBJ2-1)
CASSDVAGGSYNEQFF

SEQ ID NO: 2293 - protein, 11 aa, Homo sapiens
  CDR3 for alpha chain variable domain of TCR clone 1147 (TRAV27, TRAJ47)
CRSNQGNKLVF

SEQ ID NO: 2294 - protein, 16 aa, Homo sapiens
  CDR3 for beta chain variable domain of TCR clone 1147 (TRBV7-9, TRBJ2-1)
CASSDVAGGSYNEQFF

SEQ ID NO: 2295 - protein, 12 aa, Homo sapiens
  CDR3 for alpha chain variable domain of TCR clone 1148 (TRAV1-2, TRAJ17)
CAVRAAGNKLTF

SEQ ID NO: 2296 - protein, 16 aa, Homo sapiens
  CDR3 for beta chain variable domain of TCR clone 1148 (TRBV20-1, TRBJ2-1)
CSAPGLAGSYSDEQFF

SEQ ID NO: 2297 - protein, 15 aa, Homo sapiens
  CDR3 for alpha chain variable domain of TCR clone 1149 (TRAV3, TRAJ5)
CAVRDRKTGRRALTF

SEQ ID NO: 2298 - protein, 15 aa, Homo sapiens
  CDR3 for beta chain variable domain of TCR clone 1149 (TRBV7-9, TRBJ2-2)
CASGPLDTFPGELFF

SEQ ID NO: 2299 - protein, 16 aa, Homo sapiens
  CDR3 for alpha chain variable domain of TCR clone 1150 (TRAV8-3, TRAJ52)
CAVQPAGGTSYGKLTF

SEQ ID NO: 2300 - protein, 15 aa, Homo sapiens
  CDR3 for beta chain variable domain of TCR clone 1150 (TRBV11-2, TRBJ2-7)
CASSLAGGVATEQYF

SEQ ID NO: 2301 - protein, 14 aa, Homo sapiens
  CDR3 for alpha chain variable domain of TCR clone 1151 (TRAV12-2, TRAJ40)
CAVKIPSGTYKYIF

SEQ ID NO: 2302 - protein, 17 aa, Homo sapiens
  CDR3 for beta chain variable domain of TCR clone 1151 (TRBV13, TRBJ2-3)
CASSLSRVAGGRNTQYF

SEQ ID NO: 2303 - protein, 13 aa, Homo sapiens
  CDR3 for alpha chain variable domain of TCR clone 1152 (TRAV16, TRAJ5)
CALTNTGRRALTF

SEQ ID NO: 2304 - protein, 15 aa, Homo sapiens
  CDR3 for beta chain variable domain of TCR clone 1152 (TRBV11-2, TRBJ2-4)
CASSRPGTGINIQYF

SEQ ID NO: 2305 - protein, 15 aa, Homo sapiens
  CDR3 for alpha chain variable domain of TCR clone 1153 (TRAV3, TRAJ22)
CAVRDRGGSARQLTF

SEQ ID NO: 2306 - protein, 13 aa, Homo sapiens
  CDR3 for beta chain variable domain of TCR clone 1153 (TRBV2, TRBJ1-5)
CATAGPGNQPQHF

SEQ ID NO: 2307 - protein, 13 aa, Homo sapiens
  CDR3 for alpha chain variable domain of TCR clone 1154 (TRAV21, TRAJ27)
CAARPGNAGKSTF

SEQ ID NO: 2308 - protein, 15 aa, Homo sapiens
  CDR3 for beta chain variable domain of TCR clone 1154 (TRBV11-3, TRBJ2-7)
CASSPGPASSYEQYF

SEQ ID NO: 2309 - protein, 12 aa, Homo sapiens
  CDR3 for alpha chain variable domain of TCR clone 1155 (TRAV21, TRAJ58)
CAAETSGSRLTF

SEQ ID NO: 2310 - protein, 15 aa, Homo sapiens
  CDR3 for beta chain variable domain of TCR clone 1155 (TRBV20-1, TRBJ2-7)
CSARDPVKGEGEQYF

SEQ ID NO: 2311 - protein, 16 aa, Homo sapiens
  CDR3 for alpha chain variable domain of TCR clone 1156 (TRAV12-2, TRAJ18)
CAVTTDRGSTLGRLYF

SEQ ID NO: 2312 - protein, 14 aa, Homo sapiens
  CDR3 for beta chain variable domain of TCR clone 1156 (TRBV4-2, TRBJ1-5)
CASSQDSINQPQHF

SEQ ID NO: 2313 - protein, 17 aa, Homo sapiens
  CDR3 for alpha chain variable domain of TCR clone 1157 (TRAV38-2/DV8, TRAJ38)
CAYRSARGAGNNRKLIW

SEQ ID NO: 2314 - protein, 13 aa, Homo sapiens
  CDR3 for beta chain variable domain of TCR clone 1157 (TRBV6-5, TRBJ2-1)
CASRGRVGNEQFF

SEQ ID NO: 2315 - protein, 17 aa, Homo sapiens
  CDR3 for alpha chain variable domain of TCR clone 1158 (TRAV26-1, TRAJ28)
CIVRVPDSGAGSYQLTF

SEQ ID NO: 2316 - protein, 17 aa, Homo sapiens
  CDR3 for beta chain variable domain of TCR clone 1158 (TRBV28, TRBJ2-7)
CASSPLPAGGKSYEQYF

SEQ ID NO: 2317 - protein, 13 aa, Homo sapiens
  CDR3 for alpha chain variable domain of TCR clone 1159 (TRAV29/DV5, TRAJ31)
CAASRNNNARLMF

SEQ ID NO: 2318 - protein, 12 aa, Homo sapiens
  CDR3 for beta chain variable domain of TCR clone 1159 (TRBV14, TRBJ1-1)
CASSQLKGLAFF

SEQ ID NO: 2319 - protein, 15 aa, Homo sapiens
  CDR3 for alpha chain variable domain of TCR clone 1160 (TRAV26-1, TRAJ56)
CIVRVDNGANSKLTF

SEQ ID NO: 2320 - protein, 15 aa, Homo sapiens
  CDR3 for beta chain variable domain of TCR clone 1160 (TRBV20-1, TRBJ2-7)
CSARDPTEVGHEQYF

SEQ ID NO: 2321 - protein, 14 aa, Homo sapiens
  CDR3 for alpha chain variable domain of TCR clone 1161 (TRAV3, TRAJ33)
CAVRDMGSNYQLIW

SEQ ID NO: 2322 - protein, 17 aa, Homo sapiens
  CDR3 for beta chain variable domain of TCR clone 1161 (TRBV19, TRBJ2-1)
CASSIWSAQPTHNEQFF

SEQ ID NO: 2323 - protein, 16 aa, Homo sapiens
  CDR3 for alpha chain variable domain of TCR clone 1162 (TRAV30, TRAJ24)
CGTEIVGADSWGKFQF

SEQ ID NO: 2324 - protein, 15 aa, Homo sapiens
  CDR3 for beta chain variable domain of TCR clone 1162 (TRBV7-9, TRBJ1-4)
CASSARTGGNEKLFF

SEQ ID NO: 2325 - protein, 15 aa, Homo sapiens
  CDR3 for alpha chain variable domain of TCR clone 1163 (TRAV4, TRAJ26)
CLVGDMNNYGQNFVF

SEQ ID NO: 2326 - protein, 16 aa, Homo sapiens
  CDR3 for beta chain variable domain of TCR clone 1163 (TRBV28, TRBJ1-4)
CASSSRTGAANEKLFF

SEQ ID NO: 2327 - protein, 12 aa, Homo sapiens
  CDR3 for alpha chain variable domain of TCR clone 1164 (TRAV12-1, TRAJ20)
CVVNPDDYKLSF

SEQ ID NO: 2328 - protein, 12 aa, Homo sapiens
  CDR3 for beta chain variable domain of TCR clone 1164 (TRBV11-2, TRBJ2-2)
CASSLGGGELFF

SEQ ID NO: 2329 - protein, 15 aa, Homo sapiens
  CDR3 for alpha chain variable domain of TCR clone 1165 (TRAV30, TRAJ32)
CGTEILGGATNKLIF

SEQ ID NO: 2330 - protein, 13 aa, Homo sapiens
  CDR3 for beta chain variable domain of TCR clone 1165 (TRBV6-3, TRBJ2-7)
CASSFSGGYEQYF

SEQ ID NO: 2331 - protein, 15 aa, Homo sapiens
  CDR3 for alpha chain variable domain of TCR clone 1166 (TRAV27, TRAJ53)
CRAINSGGSNYKLTF

SEQ ID NO: 2332 - protein, 14 aa, Homo sapiens
  CDR3 for beta chain variable domain of TCR clone 1166 (TRBV7-3, TRBJ2-1)
CASSLAGGTNEQFF

SEQ ID NO: 2333 - protein, 13 aa, Homo sapiens
  CDR3 for alpha chain variable domain of TCR clone 1167 (TRAV3, TRAJ20)
CCEAFCNDYKLSF

SEQ ID NO: 2334 - protein, 15 aa, Homo sapiens
  CDR3 for beta chain variable domain of TCR clone 1167 (TRBV19, TRBJ2-6)
CASVRRDSGANVLTF

SEQ ID NO: 2335 - protein, 13 aa, Homo sapiens
  CDR3 for alpha chain variable domain of TCR clone 1168 (TRAV8-2, TRAJ43)
CVVSDQGDNDMRF

SEQ ID NO: 2336 - protein, 12 aa, Homo sapiens
  CDR3 for beta chain variable domain of TCR clone 1168 (TRBV7-9, TRBJ2-7)
CASRTGFDEQYF

SEQ ID NO: 2337 - protein, 16 aa, Homo sapiens
  CDR3 for alpha chain variable domain of TCR clone 1169 (TRAV30, TRAJ26)
CGTESVGDNYGQNFVF

SEQ ID NO: 2338 - protein, 13 aa, Homo sapiens
  CDR3 for beta chain variable domain of TCR clone 1169 (TRBV19, TRBJ1-2)
CASSISEDYGYTF

SEQ ID NO: 2339 - protein, 10 aa, Homo sapiens
  CDR3 for alpha chain variable domain of TCR clone 1170 (TRAV30, TRAJ32)
CGTEKDMVVL

SEQ ID NO: 2340 - protein, 13 aa, Homo sapiens
  CDR3 for beta chain variable domain of TCR clone 1170 (TRBV10-3, TRBJ2-7)
CASKLAVNYEQYF

SEQ ID NO: 2341 - protein, 15 aa, Homo sapiens
  CDR3 for alpha chain variable domain of TCR clone 1171 (TRAV35, TRAJ58)
CAGRRQETSGSRLTF

SEQ ID NO: 2342 - protein, 16 aa, Homo sapiens
  CDR3 for beta chain variable domain of TCR clone 1171 (TRBV2, TRBJ2-1)
CASSVGGSLSYNEQFF

SEQ ID NO: 2343 - protein, 17 aa, Homo sapiens
  CDR3 for alpha chain variable domain of TCR clone 1172 (TRAV3, TRAJ6)
CAVRDGPRAGGSYIPTF

SEQ ID NO: 2344 - protein, 15 aa, Homo sapiens
  CDR3 for beta chain variable domain of TCR clone 1172 (TRBV20-1, TRBJ1-1)
CSASWDRFLNTEAFF

SEQ ID NO: 2345 - protein, 14 aa, Homo sapiens
  CDR3 for alpha chain variable domain of TCR clone 1173 (TRAV12-2, TRAJ17)
CAVLFKAAGNKLTF

SEQ ID NO: 2346 - protein, 13 aa, Homo sapiens
  CDR3 for beta chain variable domain of TCR clone 1173 (TRBV19, TRBJ1-2)
CASSQGQVYGYTF

SEQ ID NO: 2347 - protein, 14 aa, Homo sapiens
  CDR3 for alpha chain variable domain of TCR clone 1174 (TRAV12-3, TRAJ10)
SHLPLTGGGNKLTF

SEQ ID NO: 2348 - protein, 15 aa, Homo sapiens
  CDR3 for beta chain variable domain of TCR clone 1174 (TRBV27, TRBJ1-5)
CASSLGTGFDQPQHF

SEQ ID NO: 2349 - protein, 16 aa, Homo sapiens
  CDR3 for alpha chain variable domain of TCR clone 1175 (TRAV8-3, TRAJ22)
CAVDLLGPGSARQLTF

SEQ ID NO: 2350 - protein, 14 aa, Homo sapiens
  CDR3 for beta chain variable domain of TCR clone 1175 (TRBV11-2, TRBJ2-7)
CASSLELEGYEQYF

SEQ ID NO: 2351 - protein, 13 aa, Homo sapiens
  CDR3 for alpha chain variable domain of TCR clone 1176 (TRAV3, TRAJ21)
CAVREPDFNKFYF

SEQ ID NO: 2352 - protein, 15 aa, Homo sapiens
  CDR3 for beta chain variable domain of TCR clone 1176 (TRBV2, TRBJ2-1)
CASSELAGGYNEQFF

SEQ ID NO: 2353 - protein, 13 aa, Homo sapiens
  CDR3 for alpha chain variable domain of TCR clone 1177 (TRAV3, TRAJ30)
CAVRDRGDDKIIF

SEQ ID NO: 2354 - protein, 16 aa, Homo sapiens
  CDR3 for beta chain variable domain of TCR clone 1177 (TRBV7-3, TRBJ2-2)
CASSLKRGTLSGELFF

SEQ ID NO: 2355 - protein, 14 aa, Homo sapiens
  CDR3 for alpha chain variable domain of TCR clone 1178 (TRAV12-1, TRAJ23)
CVVIVYNQGGKLIF

SEQ ID NO: 2356 - protein, 13 aa, Homo sapiens
  CDR3 for beta chain variable domain of TCR clone 1178 (TRBV11-2, TRBJ2-5)
CASSFSSQETQYF

SEQ ID NO: 2357 - protein, 13 aa, Homo sapiens
  CDR3 for alpha chain variable domain of TCR clone 1179 (TRAV8-3, TRAJ48)
CAVVPFGNEKLTF

SEQ ID NO: 2358 - protein, 19 aa, Homo sapiens
  CDR3 for beta chain variable domain of TCR clone 1179 (TRBV25-1, TRBJ2-2)
CAILVYRVDRGRKTGELFF

SEQ ID NO: 2359 - protein, 12 aa, Homo sapiens
  CDR3 for alpha chain variable domain of TCR clone 1180 (TRAV38-2/DV8, TRAJ48)
CALLSGNEKLTF

SEQ ID NO: 2360 - protein, 15 aa, Homo sapiens
  CDR3 for beta chain variable domain of TCR clone 1180 (TRBV6-1, TRBJ2-1)
CASSELRGQYNEQFF

SEQ ID NO: 2361 - protein, 14 aa, Homo sapiens
  CDR3 for alpha chain variable domain of TCR clone 1181 (TRAV1-2, TRAJ16)
CAVNRFSDGQKLLF

SEQ ID NO: 2362 - protein, 14 aa, Homo sapiens
  CDR3 for beta chain variable domain of TCR clone 1181 (TRBV25-1, TRBJ1-1)
CASTHLGGNTEAFF

SEQ ID NO: 2363 - protein, 14 aa, Homo sapiens
  CDR3 for alpha chain variable domain of TCR clone 1182 (TRAV14/DV4, TRAJ15)
CAMRRDQAGTALIF

SEQ ID NO: 2364 - protein, 16 aa, Homo sapiens
  CDR3 for beta chain variable domain of TCR clone 1182 (TRBV15, TRBJ2-3)
CATSRDLGIVTDTQYF

SEQ ID NO: 2365 - protein, 14 aa, Homo sapiens
  CDR3 for alpha chain variable domain of TCR clone 1183 (TRAV8-6, TRAJ12)
CAVKAADSSYKLIF

SEQ ID NO: 2366 - protein, 15 aa, Homo sapiens
  CDR3 for beta chain variable domain of TCR clone 1183 (TRBV5-1, TRBJ2-5)
CASSLGLAEQETQYF

SEQ ID NO: 2367 - protein, 16 aa, Homo sapiens
  CDR3 for alpha chain variable domain of TCR clone 1184 (TRAV12-3, TRAJ53)
CAMSPGSGGSNYKLTF

SEQ ID NO: 2368 - protein, 13 aa, Homo sapiens
  CDR3 for beta chain variable domain of TCR clone 1184 (TRBV7-3, TRBJ1-1)
CASSQDWGAEAFF

SEQ ID NO: 2369 - protein, 16 aa, Homo sapiens
  CDR3 for alpha chain variable domain of TCR clone 1185 (TRAV30, TRAJ24)
CGTEIVDADSWGKFQF

SEQ ID NO: 2370 - protein, 16 aa, Homo sapiens
  CDR3 for beta chain variable domain of TCR clone 1185 (TRBV12-5, TRBJ2-5)
CASGPRTSGNQETQYF

SEQ ID NO: 2371 - protein, 13 aa, Homo sapiens
  CDR3 for alpha chain variable domain of TCR clone 1186 (TRAV36/DV7, TRAJ49)
CAGDSNTGNQFYF

SEQ ID NO: 2372 - protein, 12 aa, Homo sapiens
  CDR3 for beta chain variable domain of TCR clone 1186 (TRBV11-2, TRBJ2-2)
CASSLGGGELFF

SEQ ID NO: 2373 - protein, 14 aa, Homo sapiens
  CDR3 for alpha chain variable domain of TCR clone 1187 (TRAV17, TRAJ35)
CATDRPGFGNVLHC

SEQ ID NO: 2374 - protein, 15 aa, Homo sapiens
  CDR3 for beta chain variable domain of TCR clone 1187 (TRBV28, TRBJ2-5)
CASSSGRVIQETQYF

SEQ ID NO: 2375 - protein, 12 aa, Homo sapiens
  CDR3 for alpha chain variable domain of TCR clone 1188 (TRAV41, TRAJ58)
CAVETSGSRLTF

SEQ ID NO: 2376 - protein, 15 aa, Homo sapiens
  CDR3 for beta chain variable domain of TCR clone 1188 (TRBV29-1, TRBJ2-6)
CSVGDRGSGANVLTF

SEQ ID NO: 2377 - protein, 13 aa, Homo sapiens
  CDR3 for alpha chain variable domain of TCR clone 1189 (TRAV12-1, TRAJ29)
CVVNGPGNTPLVF

SEQ ID NO: 2378 - protein, 13 aa, Homo sapiens
  CDR3 for beta chain variable domain of TCR clone 1189 (TRBV7-2, TRBJ2-5)
CASSRGGLETQYF

SEQ ID NO: 2379 - protein, 14 aa, Homo sapiens
  CDR3 for alpha chain variable domain of TCR clone 1190 (TRAV12-2, TRAJ17)
CAVLFKAAGNKLTF

SEQ ID NO: 2380 - protein, 17 aa, Homo sapiens
  CDR3 for beta chain variable domain of TCR clone 1190 (TRBV11-2, TRBJ2-1)
CASSLYPPGVEYNEQFF

SEQ ID NO: 2381 - protein, 14 aa, Homo sapiens
  CDR3 for alpha chain variable domain of TCR clone 1191 (TRAV12-2, TRAJ11)
CAVEGGSGYSTLTF

SEQ ID NO: 2382 - protein, 16 aa, Homo sapiens
  CDR3 for beta chain variable domain of TCR clone 1191 (TRBV6-1, TRBJ1-2)
CASSGAWQGRSHGYTF

SEQ ID NO: 2383 - protein, 14 aa, Homo sapiens
  CDR3 for alpha chain variable domain of TCR clone 1192 (TRAV8-1, TRAJ24)
CAVNAADSWGKLQF

SEQ ID NO: 2384 - protein, 16 aa, Homo sapiens
  CDR3 for beta chain variable domain of TCR clone 1192 (TRBV4-3, TRBJ2-1)
CASSPALDRGVNEQFF

SEQ ID NO: 2385 - protein, 15 aa, Homo sapiens
  CDR3 for alpha chain variable domain of TCR clone 1193 (TRAV12-1, TRAJ15)
CVVTRANQAGTALIF

SEQ ID NO: 2386 - protein, 14 aa, Homo sapiens
  CDR3 for beta chain variable domain of TCR clone 1193 (TRBV5-1, TRBJ1-1)
CASSLVSINTEAFF

SEQ ID NO: 2387 - protein, 15 aa, Homo sapiens
  CDR3 for alpha chain variable domain of TCR clone 1194 (TRAV12-1, TRAJ44)
CVVFVNTGTASKLTF

SEQ ID NO: 2388 - protein, 16 aa, Homo sapiens
  CDR3 for beta chain variable domain of TCR clone 1194 (TRBV20-1, TRBJ2-5)
CSPGGTSGGYMETQYF

SEQ ID NO: 2389 - protein, 13 aa, Homo sapiens
  CDR3 for alpha chain variable domain of TCR clone 1195 (TRAV8-3, TRAJ36)
CAVGATGANNLFF

SEQ ID NO: 2390 - protein, 13 aa, Homo sapiens
  CDR3 for beta chain variable domain of TCR clone 1195 (TRBV12-4, TRBJ1-2)
CASSLRQGKGYTF

SEQ ID NO: 2391 - protein, 12 aa, Homo sapiens
  CDR3 for alpha chain variable domain of TCR clone 1196 (TRAV13-2, TRAJ23)
CAERHRGGKLIF

SEQ ID NO: 2392 - protein, 13 aa, Homo sapiens
  CDR3 for beta chain variable domain of TCR clone 1196 (TRBV7-9, TRBJ1-2)
CASSLKQNYGYTF

SEQ ID NO: 2393 - protein, 12 aa, Homo sapiens
  CDR3 for alpha chain variable domain of TCR clone 1197 (TRAV12-3, TRAJ17)
CAMTLTGNKLTF

SEQ ID NO: 2394 - protein, 15 aa, Homo sapiens
  CDR3 for beta chain variable domain of TCR clone 1197 (TRBV20-1, TRBJ2-7)
CSARDRVSGMDERYF

SEQ ID NO: 2395 - protein, 11 aa, Homo sapiens
  CDR3 for alpha chain variable domain of TCR clone 1198 (TRAV1-1, TRAJ23)
CAVRQGGKLIF

SEQ ID NO: 2396 - protein, 20 aa, Homo sapiens
  CDR3 for beta chain variable domain of TCR clone 1198 (TRBV7-8, TRBJ2-2)
CASSHLFPGPTVHITGELFF

SEQ ID NO: 2397 - protein, 13 aa, Homo sapiens
  CDR3 for alpha chain variable domain of TCR clone 1199 (TRAV36/DV7, TRAJ38)
CVANAGNNRKLIW

SEQ ID NO: 2398 - protein, 14 aa, Homo sapiens
  CDR3 for beta chain variable domain of TCR clone 1199 (TRBV7-2, TRBJ2-7)
CASSLRWEVNEQYF

SEQ ID NO: 2399 - protein, 18 aa, Homo sapiens
  CDR3 for alpha chain variable domain of TCR clone 1200 (TRAV12-3, TRAJ52)
CAMSVGGAGGTSYGKLTF

SEQ ID NO: 2400 - protein, 14 aa, Homo sapiens
  CDR3 for beta chain variable domain of TCR clone 1200 (TRBV7-2, TRBJ2-7)
CASRSQGAAYEQYF

SEQ ID NO: 2401 - protein, 14 aa, Homo sapiens
  CDR3 for alpha chain variable domain of TCR clone 1201 (TRAV12-3, TRAJ10)
SHLPLTGGGNKLTF

SEQ ID NO: 2402 - protein, 13 aa, Homo sapiens
  CDR3 for beta chain variable domain of TCR clone 1201 (TRBV7-7, TRBJ2-5)
CASSRSGQETQYF

SEQ ID NO: 2403 - protein, 11 aa, Homo sapiens
  CDR3 for alpha chain variable domain of TCR clone 1202 (TRAV12-3, TRAJ43)
CAMSVSNDMRF

SEQ ID NO: 2404 - protein, 16 aa, Homo sapiens
  CDR3 for beta chain variable domain of TCR clone 1202 (TRBV20-1, TRBJ2-1)
CSARDSLGAVYNEQFF

SEQ ID NO: 2405 - protein, 16 aa, Homo sapiens
  CDR3 for alpha chain variable domain of TCR clone 1203 (TRAV30, TRAJ49)
SAAQRVGPNTGNQFYF

SEQ ID NO: 2406 - protein, 15 aa, Homo sapiens
  CDR3 for beta chain variable domain of TCR clone 1203 (TRBV2, TRBJ2-1)
CASSELAGSYNEQFF

SEQ ID NO: 2407 - protein, 13 aa, Homo sapiens
  CDR3 for alpha chain variable domain of TCR clone 1204 (TRAV13-1, TRAJ13)
CAASKGGYQKVTF

SEQ ID NO: 2408 - protein, 16 aa, Homo sapiens
  CDR3 for beta chain variable domain of TCR clone 1204 (TRBV18, TRBJ1-2)
CASSPPERVTIYGYTF

SEQ ID NO: 2409 - protein, 14 aa, Homo sapiens
  CDR3 for alpha chain variable domain of TCR clone 1205 (TRAV12-1, TRAJ26)
CVVKGSNYGQNFVF

SEQ ID NO: 2410 - protein, 17 aa, Homo sapiens
  CDR3 for beta chain variable domain of TCR clone 1205 (TRBV11-2, TRBJ2-6)
CASSQRDIFSGANVLTF

SEQ ID NO: 2411 - protein, 14 aa, Homo sapiens
  CDR3 for alpha chain variable domain of TCR clone 1206 (TRAV1-2, TRAJ8)
CAVREDTGFQKLVF

SEQ ID NO: 2412 - protein, 13 aa, Homo sapiens
  CDR3 for beta chain variable domain of TCR clone 1206 (TRBV7-3, TRBJ2-1)
CASSLDSYNEQFF

SEQ ID NO: 2413 - protein, 14 aa, Homo sapiens
  CDR3 for alpha chain variable domain of TCR clone 1207 (TRAV25, TRAJ27)
CAGPGNTNAGKSTF

SEQ ID NO: 2414 - protein, 16 aa, Homo sapiens
  CDR3 for beta chain variable domain of TCR clone 1207 (TRBV4-1, TRBJ2-6)
CASSQDGGPGANVLTF

SEQ ID NO: 2415 - protein, 14 aa, Homo sapiens
  CDR3 for alpha chain variable domain of TCR clone 1208 (TRAV13-1, TRAJ10)
CAAKEPGGGNKLTF

SEQ ID NO: 2416 - protein, 14 aa, Homo sapiens
  CDR3 for beta chain variable domain of TCR clone 1208 (TRBV6-6, TRBJ2-7)
CASSDSGAGYEQYF

SEQ ID NO: 2417 - protein, 11 aa, Homo sapiens
  CDR3 for alpha chain variable domain of TCR clone 1209 (TRAV12-2, TRAJ31)
CAILNNARLMF

SEQ ID NO: 2418 - protein, 16 aa, Homo sapiens
  CDR3 for beta chain variable domain of TCR clone 1209 (TRBV13, TRBJ2-2)
CASSPRTGEHTGELFF

SEQ ID NO: 2419 - protein, 16 aa, Homo sapiens
  CDR3 for alpha chain variable domain of TCR clone 1210 (TRAV12-3, TRAJ10)
CAMKKGITGGGNKLTF

SEQ ID NO: 2420 - protein, 12 aa, Homo sapiens
  CDR3 for beta chain variable domain of TCR clone 1210 (TRBV20-1, TRBJ2-7)
CSAITPTKEQYF

SEQ ID NO: 2421 - protein, 11 aa, Homo sapiens
  CDR3 for alpha chain variable domain of TCR clone 1211 (TRAV21, TRAJ23)
CAPQRRGKLIF

SEQ ID NO: 2422 - protein, 14 aa, Homo sapiens
  CDR3 for beta chain variable domain of TCR clone 1211 (TRBV12-4, TRBJ1-1)
CASTWTGHDTEAFF

SEQ ID NO: 2423 - protein, 11 aa, Homo sapiens
  CDR3 for alpha chain variable domain of TCR clone 1212 (TRAV12-2, TRAJ54)
CAVEGAQKLVF

SEQ ID NO: 2424 - protein, 17 aa, Homo sapiens
  CDR3 for beta chain variable domain of TCR clone 1212 (TRBV18, TRBJ1-3)
CASSPYPTGPSGNTIYF

SEQ ID NO: 2425 - protein, 14 aa, Homo sapiens
  CDR3 for alpha chain variable domain of TCR clone 1213 (TRAV1-2, TRAJ8)
CAVREDTGFQKLVF

SEQ ID NO: 2426 - protein, 16 aa, Homo sapiens
  CDR3 for beta chain variable domain of TCR clone 1213 (TRBV7-9, TRBJ2-1)
CASSDVAGGSYNEQFF

SEQ ID NO: 2427 - protein, 14 aa, Homo sapiens
  CDR3 for alpha chain variable domain of TCR clone 1214 (TRAV8-6, TRAJ5)
CAVSVDTGRRALTF

SEQ ID NO: 2428 - protein, 11 aa, Homo sapiens
  CDR3 for beta chain variable domain of TCR clone 1214 (TRBV7-3, TRBJ2-5)
CASSLSETQYF

SEQ ID NO: 2429 - protein, 14 aa, Homo sapiens
  CDR3 for alpha chain variable domain of TCR clone 1215 (TRAV3, TRAJ36)
CAVRDGTGANNLFF

SEQ ID NO: 2430 - protein, 16 aa, Homo sapiens
  CDR3 for beta chain variable domain of TCR clone 1215 (TRBV20-1, TRBJ2-6)
CSAREGPGVGANVLTF

SEQ ID NO: 2431 - protein, 12 aa, Homo sapiens
  CDR3 for alpha chain variable domain of TCR clone 1216 (TRAV20, TRAJ37)
CALPSNTGKLIF

SEQ ID NO: 2432 - protein, 14 aa, Homo sapiens
  CDR3 for beta chain variable domain of TCR clone 1216 (TRBV19, TRBJ2-1)
CASPTFVLSGEQFF

SEQ ID NO: 2433 - protein, 16 aa, Homo sapiens
  CDR3 for alpha chain variable domain of TCR clone 1217 (TRAV30, TRAJ24)
CGTEIVDADSWGKFQF

SEQ ID NO: 2434 - protein, 14 aa, Homo sapiens
  CDR3 for beta chain variable domain of TCR clone 1217 (TRBV20-1, TRBJ1-1)
CSAQTRIGGTEAFF

SEQ ID NO: 2435 - protein, 11 aa, Homo sapiens
  CDR3 for alpha chain variable domain of TCR clone 1218 (TRAV21, TRAJ33)
CAVLSNYQLIW

SEQ ID NO: 2436 - protein, 15 aa, Homo sapiens
  CDR3 for beta chain variable domain of TCR clone 1218 (TRBV11-2, TRBJ2-7)
CASSLMVGGSYEQYF

SEQ ID NO: 2437 - protein, 15 aa, Homo sapiens
  CDR3 for alpha chain variable domain of TCR clone 1219 (TRAV8-3, TRAJ27)
CAVGPSKTNAGKSTF

SEQ ID NO: 2438 - protein, 12 aa, Homo sapiens
  CDR3 for beta chain variable domain of TCR clone 1219 (TRBV11-2, TRBJ2-2)
CASSLGGGELFF

SEQ ID NO: 2439 - protein, 16 aa, Homo sapiens
  CDR3 for alpha chain variable domain of TCR clone 1220 (TRAV17, TRAJ52)
CATGIIGGTSYGKLTF

SEQ ID NO: 2440 - protein, 12 aa, Homo sapiens
  CDR3 for beta chain variable domain of TCR clone 1220 (TRBV7-3, TRBJ2-1)
CASSFINNEQFF

SEQ ID NO: 2441 - protein, 12 aa, Homo sapiens
  CDR3 for alpha chain variable domain of TCR clone 1221 (TRAV8-4, TRAJ37)
CAVRSNTGKLIF

SEQ ID NO: 2442 - protein, 16 aa, Homo sapiens
  CDR3 for beta chain variable domain of TCR clone 1221 (TRBV7-2, TRBJ2-3)
CASSLVGDASTDTQYF

SEQ ID NO: 2443 - protein, 16 aa, Homo sapiens
  CDR3 for alpha chain variable domain of TCR clone 1222 (TRAV30, TRAJ24)
CGTEIVDADSWGKFQF

SEQ ID NO: 2444 - protein, 13 aa, Homo sapiens
  CDR3 for beta chain variable domain of TCR clone 1222 (TRBV7-2, TRBJ1-4)
CASSLAGLEKLFF

SEQ ID NO: 2445 - protein, 15 aa, Homo sapiens
  CDR3 for alpha chain variable domain of TCR clone 1223 (TRAV26-1, TRAJ17)
CIVRVVKAAGNKLTF

SEQ ID NO: 2446 - protein, 16 aa, Homo sapiens
  CDR3 for beta chain variable domain of TCR clone 1223 (TRBV7-9, TRBJ2-1)
CASSLVSGPSYNEQFF

SEQ ID NO: 2447 - protein, 13 aa, Homo sapiens
  CDR3 for alpha chain variable domain of TCR clone 1224 (TRAV23/DV6, TRAJ27)
CAASKPMQANQPL

SEQ ID NO: 2448 - protein, 14 aa, Homo sapiens
  CDR3 for beta chain variable domain of TCR clone 1224 (TRBV5-4, TRBJ1-1)
CASSLDSRRDEAFF

SEQ ID NO: 2449 - protein, 12 aa, Homo sapiens
  CDR3 for alpha chain variable domain of TCR clone 1225 (TRAV12-1, TRAJ40)
CVVYSGTYKYIF

SEQ ID NO: 2450 - protein, 17 aa, Homo sapiens
  CDR3 for beta chain variable domain of TCR clone 1225 (TRBV11-3, TRBJ1-5)
CASSPLTGLRGNQPQHF

SEQ ID NO: 2451 - protein, 14 aa, Homo sapiens
  CDR3 for alpha chain variable domain of TCR clone 1226 (TRAV12-3, TRAJ10)
SHLPLTGGGNKLTF

SEQ ID NO: 2452 - protein, 12 aa, Homo sapiens
  CDR3 for beta chain variable domain of TCR clone 1226 (TRBV7-3, TRBJ2-5)
CASSSPGGTQYF

SEQ ID NO: 2453 - protein, 12 aa, Homo sapiens
  CDR3 for alpha chain variable domain of TCR clone 1227 (TRAV35, TRAJ30)
CAGQLADDKIIF

SEQ ID NO: 2454 - protein, 17 aa, Homo sapiens
  CDR3 for beta chain variable domain of TCR clone 1227 (TRBV4-2, TRBJ2-5)
CASSPGRWRNFQETQYF

SEQ ID NO: 2455 - protein, 13 aa, Homo sapiens
  CDR3 for alpha chain variable domain of TCR clone 1228 (TRAV36/DV7, TRAJ7)
CAGTRYGNNRLAF

SEQ ID NO: 2456 - protein, 14 aa, Homo sapiens
  CDR3 for beta chain variable domain of TCR clone 1228 (TRBV19, TRBJ2-1)
CASPTFVLSGEQFF

SEQ ID NO: 2457 - protein, 15 aa, Homo sapiens
  CDR3 for alpha chain variable domain of TCR clone 1229 (TRAV16, TRAJ4)
CALEDPSGGYNKLIF

SEQ ID NO: 2458 - protein, 13 aa, Homo sapiens
  CDR3 for beta chain variable domain of TCR clone 1229 (TRBV7-3, TRBJ2-7)
CASSQAGGYEQYF

SEQ ID NO: 2459 - protein, 13 aa, Homo sapiens
  CDR3 for alpha chain variable domain of TCR clone 1230 (TRAV16, TRAJ54)
CALMVQGAQKLVF

SEQ ID NO: 2460 - protein, 12 aa, Homo sapiens
  CDR3 for beta chain variable domain of TCR clone 1230 (TRBV18, TRBJ2-7)
CASSTAMGEQYF

SEQ ID NO: 2461 - protein, 14 aa, Homo sapiens
  CDR3 for alpha chain variable domain of TCR clone 1231 (TRAV12-1, TRAJ29)
CVVNEGSGNTPLVF

SEQ ID NO: 2462 - protein, 13 aa, Homo sapiens
  CDR3 for beta chain variable domain of TCR clone 1231 (TRBV7-9, TRBJ2-3)
CASSPGSTDTQYF

SEQ ID NO: 2463 - protein, 13 aa, Homo sapiens
  CDR3 for alpha chain variable domain of TCR clone 1232 (TRAV2, TRAJ10)
CAVETGGGNKLTF

SEQ ID NO: 2464 - protein, 14 aa, Homo sapiens
  CDR3 for beta chain variable domain of TCR clone 1232 (TRBV20-1, TRBJ2-3)
CSAGGRRGTDTQYF

SEQ ID NO: 2465 - protein, 13 aa, Homo sapiens
  CDR3 for alpha chain variable domain of TCR clone 1233 (TRAV29/DV5, TRAJ44)
CAASTGTASKLTF

SEQ ID NO: 2466 - protein, 13 aa, Homo sapiens
  CDR3 for beta chain variable domain of TCR clone 1233 (TRBV19, TRBJ2-7)
CASRKAGGSEQYF

SEQ ID NO: 2467 - protein, 16 aa, Homo sapiens
  CDR3 for alpha chain variable domain of TCR clone 1234 (TRAV26-1, TRAJ23)
CIVRVHPYNQGGKLIF

SEQ ID NO: 2468 - protein, 15 aa, Homo sapiens
  CDR3 for beta chain variable domain of TCR clone 1234 (TRBV5-7, TRBJ2-7)
CASSPYFEGSYEQYF

SEQ ID NO: 2469 - protein, 15 aa, Homo sapiens
  CDR3 for alpha chain variable domain of TCR clone 1235 (TRAV3, TRAJ13)
CAVRDIAGGYQKVTF

SEQ ID NO: 2470 - protein, 13 aa, Homo sapiens
  CDR3 for beta chain variable domain of TCR clone 1235 (TRBV2, TRBJ2-2)
CASSKKNTGELFF

SEQ ID NO: 2471 - protein, 14 aa, Homo sapiens
  CDR3 for alpha chain variable domain of TCR clone 1236 (TRAV1-2, TRAJ8)
CAVREDTGFQKLVF

SEQ ID NO: 2472 - protein, 12 aa, Homo sapiens
  CDR3 for beta chain variable domain of TCR clone 1236 (TRBV11-2, TRBJ2-2)
CASSLPTGELFF

SEQ ID NO: 2473 - protein, 15 aa, Homo sapiens
  CDR3 for alpha chain variable domain of TCR clone 1237 (TRAV8-4, TRAJ7)
CAVSGGNYGNNRLAF

SEQ ID NO: 2474 - protein, 11 aa, Homo sapiens
  CDR3 for beta chain variable domain of TCR clone 1237 (TRBV20-1, TRBJ2-1)
CSLSSGSEQFF

SEQ ID NO: 2475 - protein, 13 aa, Homo sapiens
  CDR3 for alpha chain variable domain of TCR clone 1238 (TRAV17, TRAJ34)
CATDLYNTDKLIF

SEQ ID NO: 2476 - protein, 12 aa, Homo sapiens
  CDR3 for beta chain variable domain of TCR clone 1238 (TRBV11-2, TRBJ2-2)
CASSLGGGELFF

SEQ ID NO: 2477 - protein, 19 aa, Homo sapiens
  CDR3 for alpha chain variable domain of TCR clone 1239 (TRAV26-1, TRAJ22)
CCVLLHRWVFSGSARQLTF

SEQ ID NO: 2478 - protein, 19 aa, Homo sapiens
  CDR3 for beta chain variable domain of TCR clone 1239 (TRBV19, TRBJ2-5)
CASSIGQVTDFFLGETQYF

SEQ ID NO: 2479 - protein, 14 aa, Homo sapiens
  CDR3 for alpha chain variable domain of TCR clone 1240 (TRAV3, TRAJ33)
CAVRDMDSNYQLIW

SEQ ID NO: 2480 - protein, 19 aa, Homo sapiens
  CDR3 for beta chain variable domain of TCR clone 1240 (TRBV7-3, TRBJ1-2)
CASSFPQGNDGELWLHLRF

SEQ ID NO: 2481 - protein, 14 aa, Homo sapiens
  CDR3 for alpha chain variable domain of TCR clone 1241 (TRAV12-1, TRAJ12)
CVVNGRDSSYKLIF

SEQ ID NO: 2482 - protein, 13 aa, Homo sapiens
  CDR3 for beta chain variable domain of TCR clone 1241 (TRBV28, TRBJ2-2)
CASIRESTGELFF

SEQ ID NO: 2483 - protein, 14 aa, Homo sapiens
  CDR3 for alpha chain variable domain of TCR clone 1242 (TRAV13-1, TRAJ44)
CAAKATGTASKLTF

SEQ ID NO: 2484 - protein, 16 aa, Homo sapiens
  CDR3 for beta chain variable domain of TCR clone 1242 (TRBV7-9, TRBJ2-6)
CASSLKGPLRANVLTF

SEQ ID NO: 2485 - protein, 15 aa, Homo sapiens
  CDR3 for alpha chain variable domain of TCR clone 1243 (TRAV14/DV4, TRAJ26)
CAMREGQNYGQNFVF

SEQ ID NO: 2486 - protein, 13 aa, Homo sapiens
  CDR3 for beta chain variable domain of TCR clone 1243 (TRBV24-1, TRBJ2-2)
CATSDWSTGELFF

SEQ ID NO: 2487 - protein, 12 aa, Homo sapiens
  CDR3 for alpha chain variable domain of TCR clone 1244 (TRAV25, TRAJ11)
CAGYSGYSTLTF

SEQ ID NO: 2488 - protein, 13 aa, Homo sapiens
  CDR3 for beta chain variable domain of TCR clone 1244 (TRBV7-9, TRBJ1-2)
CASSLKQNYGYTF

SEQ ID NO: 2489 - protein, 14 aa, Homo sapiens
  CDR3 for alpha chain variable domain of TCR clone 1245 (TRAV1-2, TRAJ16)
CAVNRFSDGQKLLF

SEQ ID NO: 2490 - protein, 15 aa, Homo sapiens
  CDR3 for beta chain variable domain of TCR clone 1245 (TRBV19, TRBJ1-5)
CASSIVWADNQPQHF

SEQ ID NO: 2491 - protein, 13 aa, Homo sapiens
  CDR3 for alpha chain variable domain of TCR clone 1246 (TRAV17, TRAJ29)
CATDAFRKHTSCL

SEQ ID NO: 2492 - protein, 13 aa, Homo sapiens
  CDR3 for beta chain variable domain of TCR clone 1246 (TRBV5-7, TRBJ2-6)
CASTSSGANVLTF

SEQ ID NO: 2493 - protein, 14 aa, Homo sapiens
  CDR3 for alpha chain variable domain of TCR clone 1247 (TRAV16, TRAJ32)
CALKSGGATNKLIF

SEQ ID NO: 2494 - protein, 13 aa, Homo sapiens
  CDR3 for beta chain variable domain of TCR clone 1247 (TRBV15, TRBJ1-6)
CATSGGLNSPLHF

SEQ ID NO: 2495 - protein, 12 aa, Homo sapiens
  CDR3 for alpha chain variable domain of TCR clone 1248 (TRAV12-1, TRAJ23)
CVVNNQGGKLIF

SEQ ID NO: 2496 - protein, 16 aa, Homo sapiens
  CDR3 for beta chain variable domain of TCR clone 1248 (TRBV11-1, TRBJ2-7)
CASSAQTGTLSYEQYF

SEQ ID NO: 2497 - protein, 15 aa, Homo sapiens
  CDR3 for alpha chain variable domain of TCR clone 1249 (TRAV3, TRAJ22)
CAVRDRGGSARQLTF

SEQ ID NO: 2498 - protein, 14 aa, Homo sapiens
  CDR3 for beta chain variable domain of TCR clone 1249 (TRBV19, TRBJ1-5)
CASSLGLIGQPQHF

SEQ ID NO: 2499 - protein, 15 aa, Homo sapiens
  CDR3 for alpha chain variable domain of TCR clone 1250 (TRAV26-1, TRAJ29)
CIVRVEGSGNTPLVF

SEQ ID NO: 2500 - protein, 15 aa, Homo sapiens
  CDR3 for beta chain variable domain of TCR clone 1250 (TRBV28, TRBJ2-5)
CASSPGQGSIETQYF

SEQ ID NO: 2501 - protein, 12 aa, Homo sapiens
  CDR3 for alpha chain variable domain of TCR clone 1251 (TRAV21, TRAJ49)
CAVTNTGNQFYF

SEQ ID NO: 2502 - protein, 17 aa, Homo sapiens
  CDR3 for beta chain variable domain of TCR clone 1251 (TRBV13, TRBJ2-3)
CASSLSRVAGGRNTQYF

SEQ ID NO: 2503 - protein, 12 aa, Homo sapiens
  CDR3 for alpha chain variable domain of TCR clone 1252 (TRAV12-3, TRAJ17)
CAMTLTGNKLTF

SEQ ID NO: 2504 - protein, 16 aa, Homo sapiens
  CDR3 for beta chain variable domain of TCR clone 1252 (TRBV12-4, TRBJ2-5)
CASSFFVRGRQETQYF

SEQ ID NO: 2505 - protein, 14 aa, Homo sapiens
  CDR3 for alpha chain variable domain of TCR clone 1253 (TRAV16, TRAJ29)
CALTRNSGNTPLVF

SEQ ID NO: 2506 - protein, 12 aa, Homo sapiens
  CDR3 for beta chain variable domain of TCR clone 1253 (TRBV2, TRBJ2-1)
CAKREGYNEQFF

SEQ ID NO: 2507 - protein, 13 aa, Homo sapiens
  CDR3 for alpha chain variable domain of TCR clone 1254 (TRAV13-2, TRAJ8)
CAFMNTGFQKLVF

SEQ ID NO: 2508 - protein, 17 aa, Homo sapiens
  CDR3 for beta chain variable domain of TCR clone 1254 (TRBV28, TRBJ2-1)
CASSSARQALTYNEQFF

SEQ ID NO: 2509 - protein, 16 aa, Homo sapiens
  CDR3 for alpha chain variable domain of TCR clone 1255 (TRAV13-1, TRAJ22)
CAAKGGRSGSARQLTF

SEQ ID NO: 2510 - protein, 15 aa, Homo sapiens
  CDR3 for beta chain variable domain of TCR clone 1255 (TRBV9, TRBJ1-6)
CASSVAGTGDSPLHF

SEQ ID NO: 2511 - protein, 13 aa, Homo sapiens
  CDR3 for alpha chain variable domain of TCR clone 1256 (TRAV3, TRAJ16)
CAVRDRNGQKLLF

SEQ ID NO: 2512 - protein, 15 aa, Homo sapiens
  CDR3 for beta chain variable domain of TCR clone 1256 (TRBV5-1, TRBJ2-1)
CASSPPRAPYNEQFF

SEQ ID NO: 2513 - protein, 12 aa, Homo sapiens
  CDR3 for alpha chain variable domain of TCR clone 1257 (TRAV13-2, TRAJ23)
CAERHRGGKLIF

SEQ ID NO: 2514 - protein, 13 aa, Homo sapiens
  CDR3 for beta chain variable domain of TCR clone 1257 (TRBV7-9, TRBJ2-3)
CASSPGSTDTQYF

SEQ ID NO: 2515 - protein, 15 aa, Homo sapiens
  CDR3 for alpha chain variable domain of TCR clone 1258 (TRAV4, TRAJ8)
CLVGEQHTGFQKLVF

SEQ ID NO: 2516 - protein, 15 aa, Homo sapiens
  CDR3 for beta chain variable domain of TCR clone 1258 (TRBV7-9, TRBJ2-5)
CASSNRDYLQETQYF

SEQ ID NO: 2517 - protein, 14 aa, Homo sapiens
  CDR3 for alpha chain variable domain of TCR clone 1259 (TRAV17, TRAJ57)
CATDPQGGSEKLVF

SEQ ID NO: 2518 - protein, 13 aa, Homo sapiens
  CDR3 for beta chain variable domain of TCR clone 1259 (TRBV19, TRBJ2-7)
CASSPRQSYEQYF

SEQ ID NO: 2519 - protein, 14 aa, Homo sapiens
  CDR3 for alpha chain variable domain of TCR clone 1260 (TRAV14/DV4, TRAJ54)
CAMREAPGAQKLVF

SEQ ID NO: 2520 - protein, 15 aa, Homo sapiens
  CDR3 for beta chain variable domain of TCR clone 1260 (TRBV5-1, TRBJ2-7)
CASSLNGGPAREQYF

SEQ ID NO: 2521 - protein, 14 aa, Homo sapiens
  CDR3 for alpha chain variable domain of TCR clone 1261 (TRAV9-2, TRAJ36)
CALPWRTGANNLFF

SEQ ID NO: 2522 - protein, 14 aa, Homo sapiens
  CDR3 for beta chain variable domain of TCR clone 1261 (TRBV2, TRBJ1-2)
CASSELQVNYGYTF

SEQ ID NO: 2523 - protein, 15 aa, Homo sapiens
  CDR3 for alpha chain variable domain of TCR clone 1262 (TRAV3, TRAJ9)
CAVRDSNTGGFKTIF

SEQ ID NO: 2524 - protein, 16 aa, Homo sapiens
  CDR3 for beta chain variable domain of TCR clone 1262 (TRBV15, TRBJ2-5)
CATSPTTGQGMETQYF

SEQ ID NO: 2525 - protein, 14 aa, Homo sapiens
  CDR3 for alpha chain variable domain of TCR clone 1263 (TRAV12-3, TRAJ10)
SHLPLTGGGNKLTF

SEQ ID NO: 2526 - protein, 14 aa, Homo sapiens
  CDR3 for beta chain variable domain of TCR clone 1263 (TRBV7-2, TRBJ2-2)
CASSLNSNTGELFF

SEQ ID NO: 2527 - protein, 14 aa, Homo sapiens
  CDR3 for alpha chain variable domain of TCR clone 1264 (TRAV12-1, TRAJ17)
CVVNYKAAGNKLTF

SEQ ID NO: 2528 - protein, 16 aa, Homo sapiens
  CDR3 for beta chain variable domain of TCR clone 1264 (TRBV12-4, TRBJ1-5)
CASSRPVGGSNQPQHF

SEQ ID NO: 2529 - protein, 16 aa, Homo sapiens
  CDR3 for alpha chain variable domain of TCR clone 1265 (TRAV21, TRAJ33)
CAVSPASMDSNYQLIW

SEQ ID NO: 2530 - protein, 17 aa, Homo sapiens
  CDR3 for beta chain variable domain of TCR clone 1265 (TRBV2, TRBJ1-4)
CASSKRELTQGEEKLFF

SEQ ID NO: 2531 - protein, 15 aa, Homo sapiens
  CDR3 for alpha chain variable domain of TCR clone 1266 (TRAV4, TRAJ36)
CLVGDRQTGANNLFF

SEQ ID NO: 2532 - protein, 15 aa, Homo sapiens
  CDR3 for beta chain variable domain of TCR clone 1266 (TRBV7-6, TRBJ2-1)
CASSSLAGEGNEQFF

SEQ ID NO: 2533 - protein, 14 aa, Homo sapiens
  CDR3 for alpha chain variable domain of TCR clone 1267 (TRAV12-3, TRAJ29)
CAMSPYSGNTPLVF

SEQ ID NO: 2534 - protein, 15 aa, Homo sapiens
  CDR3 for beta chain variable domain of TCR clone 1267 (TRBV27, TRBJ2-1)
CASSNGGGSSNEQFF

SEQ ID NO: 2535 - protein, 13 aa, Homo sapiens
  CDR3 for alpha chain variable domain of TCR clone 1268 (TRAV20, TRAJ49)
CAVQARTGNQFYF

SEQ ID NO: 2536 - protein, 14 aa, Homo sapiens
  CDR3 for beta chain variable domain of TCR clone 1268 (TRBV5-1, TRBJ1-1)
CASSLQGASTEAFF

SEQ ID NO: 2537 - protein, 13 aa, Homo sapiens
  CDR3 for alpha chain variable domain of TCR clone 1269 (TRAV12-1, TRAJ16)
CVVNGPDGQKLLF

SEQ ID NO: 2538 - protein, 15 aa, Homo sapiens
  CDR3 for beta chain variable domain of TCR clone 1269 (TRBV6-3, TRBJ2-7)
CASSSPGTVFYEQYF

SEQ ID NO: 2539 - protein, 19 aa, Homo sapiens
  CDR3 for alpha chain variable domain of TCR clone 1270 (TRAV29/DV5, TRAJ49)
CSVLLCSKLTVDTGNQFYF

SEQ ID NO: 2540 - protein, 17 aa, Homo sapiens
  CDR3 for beta chain variable domain of TCR clone 1270 (TRBV13, TRBJ2-3)
CASSLSRVAGGRNTQYF

SEQ ID NO: 2541 - protein, 14 aa, Homo sapiens
  CDR3 for alpha chain variable domain of TCR clone 1271 (TRAV8-2, TRAJ45)
CVVSAGGGADGLTF

SEQ ID NO: 2542 - protein, 12 aa, Homo sapiens
  CDR3 for beta chain variable domain of TCR clone 1271 (TRBV12-4, TRBJ2-1)
CASSLVRVEQFF

SEQ ID NO: 2543 - protein, 12 aa, Homo sapiens
  CDR3 for alpha chain variable domain of TCR clone 1272 (TRAV2, TRAJ33)
CAVWGSNYQLIW

SEQ ID NO: 2544 - protein, 16 aa, Homo sapiens
  CDR3 for beta chain variable domain of TCR clone 1272 (TRBV20-1, TRBJ1-4)
CSAPGQGLLTNEKLFF

SEQ ID NO: 2545 - protein, 12 aa, Homo sapiens
  CDR3 for alpha chain variable domain of TCR clone 1273 (TRAV21, TRAJ13)
PGPSGGYQKVTF

SEQ ID NO: 2546 - protein, 14 aa, Homo sapiens
  CDR3 for beta chain variable domain of TCR clone 1273 (TRBV20-1, TRBJ2-7)
CSAKDRKGAYEQYF

SEQ ID NO: 2547 - protein, 14 aa, Homo sapiens
  CDR3 for alpha chain variable domain of TCR clone 1274 (TRAV1-2, TRAJ16)
CAVNRFSDGQKLLF

SEQ ID NO: 2548 - protein, 13 aa, Homo sapiens
  CDR3 for beta chain variable domain of TCR clone 1274 (TRBV29-1, TRBJ1-1)
CSVGDSRNTEAFF

SEQ ID NO: 2549 - protein, 15 aa, Homo sapiens
  CDR3 for alpha chain variable domain of TCR clone 1275 (TRAV35, TRAJ20)
CAGQLVGSNDYKLSF

SEQ ID NO: 2550 - protein, 13 aa, Homo sapiens
  CDR3 for beta chain variable domain of TCR clone 1275 (TRBV19, TRBJ2-7)
CASSKTGTHEQYF

SEQ ID NO: 2551 - protein, 13 aa, Homo sapiens
  CDR3 for alpha chain variable domain of TCR clone 1276 (TRAV13-2, TRAJ13)
CAERPGGYQKVTF

SEQ ID NO: 2552 - protein, 14 aa, Homo sapiens
  CDR3 for beta chain variable domain of TCR clone 1276 (TRBV23-1, TRBJ2-5)
CASSFLRSQETQYF

SEQ ID NO: 2553 - protein, 12 aa, Homo sapiens
  CDR3 for alpha chain variable domain of TCR clone 1277 (TRAV30, TRAJ43)
CGTEERGNDMRF

SEQ ID NO: 2554 - protein, 13 aa, Homo sapiens
  CDR3 for beta chain variable domain of TCR clone 1277 (TRBV12-4, TRBJ1-2)
CASSSGSKDGYTF

SEQ ID NO: 2555 - protein, 12 aa, Homo sapiens
  CDR3 for alpha chain variable domain of TCR clone 1278 (TRAV12-1, TRAJ34)
CVVTFNTDKLIF

SEQ ID NO: 2556 - protein, 14 aa, Homo sapiens
  CDR3 for beta chain variable domain of TCR clone 1278 (TRBV19, TRBJ1-1)
CASLRTGLNTEAFF

SEQ ID NO: 2557 - protein, 15 aa, Homo sapiens
  CDR3 for alpha chain variable domain of TCR clone 1279 (TRAV4, TRAJ39)
CLVGPNNNAGNMLTF

SEQ ID NO: 2558 - protein, 14 aa, Homo sapiens
  CDR3 for beta chain variable domain of TCR clone 1279 (TRBV19, TRBJ2-1)
CASPTFVLSGEQFF

SEQ ID NO: 2559 - protein, 16 aa, Homo sapiens
  CDR3 for alpha chain variable domain of TCR clone 1280 (TRAV3, TRAJ37)
CAVRPHGSGNTGKLIF

SEQ ID NO: 2560 - protein, 13 aa, Homo sapiens
  CDR3 for beta chain variable domain of TCR clone 1280 (TRBV2, TRBJ1-5)
CASGTGGYQPQHF

SEQ ID NO: 2561 - protein, 14 aa, Homo sapiens
  CDR3 for alpha chain variable domain of TCR clone 1281 (TRAV23/DV6, TRAJ4)
CAANLSGGYNKLIF

SEQ ID NO: 2562 - protein, 17 aa, Homo sapiens
  CDR3 for beta chain variable domain of TCR clone 1281 (TRBV4-1, TRBJ1-3)
CASSPQRGIRFGNTIYF

SEQ ID NO: 2563 - protein, 15 aa, Homo sapiens
  CDR3 for alpha chain variable domain of TCR clone 1282 (TRAV13-1, TRAJ52)
SYYNAGGTSYGKLTF

SEQ ID NO: 2564 - protein, 11 aa, Homo sapiens
  CDR3 for beta chain variable domain of TCR clone 1282 (TRBV12-4, TRBJ2-2)
CASSSAGELFF

SEQ ID NO: 2565 - protein, 15 aa, Homo sapiens
  CDR3 for alpha chain variable domain of TCR clone 1283 (TRAV13-1, TRAJ16)
CAARYQMARSCSLQG

SEQ ID NO: 2566 - protein, 13 aa, Homo sapiens
  CDR3 for beta chain variable domain of TCR clone 1283 (TRBV4-1, TRBJ2-1)
CASSQAGGDEQFF

SEQ ID NO: 2567 - protein, 18 aa, Homo sapiens
  CDR3 for alpha chain variable domain of TCR clone 1284 (TRAV13-1, TRAJ52)
CAAKNPNAGGTSYGKLTF

SEQ ID NO: 2568 - protein, 14 aa, Homo sapiens
  CDR3 for beta chain variable domain of TCR clone 1284 (TRBV7-3, TRBJ2-1)
CASSLAGGTNEQFF

SEQ ID NO: 2569 - protein, 14 aa, Homo sapiens
  CDR3 for alpha chain variable domain of TCR clone 1285 (TRAV2, TRAJ37)
CAVEDQGNTGKLIF

SEQ ID NO: 2570 - protein, 14 aa, Homo sapiens
  CDR3 for beta chain variable domain of TCR clone 1285 (TRBV18, TRBJ2-1)
CASSPQGRFNEQFF

SEQ ID NO: 2571 - protein, 13 aa, Homo sapiens
  CDR3 for alpha chain variable domain of TCR clone 1286 (TRAV29/DV5, TRAJ47)
CAASAEYGNKLVF

SEQ ID NO: 2572 - protein, 15 aa, Homo sapiens
  CDR3 for beta chain variable domain of TCR clone 1286 (TRBV7-9, TRBJ1-4)
CASSARTGGNEKLFF

SEQ ID NO: 2573 - protein, 14 aa, Homo sapiens
  CDR3 for alpha chain variable domain of TCR clone 1287 (TRAV12-3, TRAJ10)
SHLPLTGGGNKLTF

SEQ ID NO: 2574 - protein, 15 aa, Homo sapiens
  CDR3 for beta chain variable domain of TCR clone 1287 (TRBV10-2, TRBJ2-6)
CASSEQGTGANVLTF

SEQ ID NO: 2575 - protein, 16 aa, Homo sapiens
  CDR3 for alpha chain variable domain of TCR clone 1288 (TRAV30, TRAJ24)
CGTEIVDADSWGKFQF

SEQ ID NO: 2576 - protein, 15 aa, Homo sapiens
  CDR3 for beta chain variable domain of TCR clone 1288 (TRBV20-1, TRBJ2-6)
CSARDRGPGANVLTF

SEQ ID NO: 2577 - protein, 12 aa, Homo sapiens
  CDR3 for alpha chain variable domain of TCR clone 1289 (TRAV8-3, TRAJ41)
CAVALSGYALNF

SEQ ID NO: 2578 - protein, 18 aa, Homo sapiens
  CDR3 for beta chain variable domain of TCR clone 1289 (TRBV20-1, TRBJ2-6)
CSAETTPTHGSGANVLTF

SEQ ID NO: 2579 - protein, 12 aa, Homo sapiens
  CDR3 for alpha chain variable domain of TCR clone 1290 (TRAV30, TRAJ20)
CGTESNDYKLSF

SEQ ID NO: 2580 - protein, 15 aa, Homo sapiens
  CDR3 for beta chain variable domain of TCR clone 1290 (TRBV20-1, TRBJ2-7)
CSARDRVSGMDEQYF

SEQ ID NO: 2581 - protein, 16 aa, Homo sapiens
  CDR3 for alpha chain variable domain of TCR clone 1291 (TRAV16, TRAJ4)
CALSRMFSGGYNKLIF

SEQ ID NO: 2582 - protein, 14 aa, Homo sapiens
  CDR3 for beta chain variable domain of TCR clone 1291 (TRBV4-1, TRBJ2-2)
CASSQAVNTGELFF

SEQ ID NO: 2583 - protein, 14 aa, Homo sapiens
  CDR3 for alpha chain variable domain of TCR clone 1292 (TRAV38-1, TRAJ39)
CAFAYNNAGNMLTF

SEQ ID NO: 2584 - protein, 15 aa, Homo sapiens
  CDR3 for beta chain variable domain of TCR clone 1292 (TRBV19, TRBJ2-6)
CASSIGPSGANVLTF

SEQ ID NO: 2585 - protein, 12 aa, Homo sapiens
  CDR3 for alpha chain variable domain of TCR clone 1293 (TRAV16, TRAJ10)
CSRTGGGNKLTF

SEQ ID NO: 2586 - protein, 12 aa, Homo sapiens
  CDR3 for beta chain variable domain of TCR clone 1293 (TRBV11-3, TRBJ1-1)
CASSHRQGEAFF

SEQ ID NO: 2587 - protein, 12 aa, Homo sapiens
  CDR3 for alpha chain variable domain of TCR clone 1294 (TRAV13-1, TRAJ21)
CAAKEGFNKFYF

SEQ ID NO: 2588 - protein, 13 aa, Homo sapiens
  CDR3 for beta chain variable domain of TCR clone 1294 (TRBV19, TRBJ2-7)
CASSPRQSYEQYF

SEQ ID NO: 2589 - protein, 17 aa, Homo sapiens
  CDR3 for alpha chain variable domain of TCR clone 1295 (TRAV26-1, TRAJ47)
CIVPSLLYMEYGNKLVF

SEQ ID NO: 2590 - protein, 14 aa, Homo sapiens
  CDR3 for beta chain variable domain of TCR clone 1295 (TRBV7-3, TRBJ1-5)
RASSFSGCNQPQHF

SEQ ID NO: 2591 - protein, 14 aa, Homo sapiens
  CDR3 for alpha chain variable domain of TCR clone 1296 (TRAV12-3, TRAJ15)
CAMIPPQAGTALIF

SEQ ID NO: 2592 - protein, 12 aa, Homo sapiens
  CDR3 for beta chain variable domain of TCR clone 1296 (TRBV11-2, TRBJ2-2)
CASSFGGGELFF

SEQ ID NO: 2593 - protein, 13 aa, Homo sapiens
  CDR3 for alpha chain variable domain of TCR clone 1297 (TRAV3, TRAJ21)
CAVREPDFNKFYF

SEQ ID NO: 2594 - protein, 14 aa, Homo sapiens
  CDR3 for beta chain variable domain of TCR clone 1297 (TRBV4-1, TRBJ2-2)
CASSQAVNTGELFF

SEQ ID NO: 2595 - protein, 13 aa, Homo sapiens
  CDR3 for alpha chain variable domain of TCR clone 1298 (TRAV12-1, TRAJ22)
CVASGGSARQLTF

SEQ ID NO: 2596 - protein, 12 aa, Homo sapiens
  CDR3 for beta chain variable domain of TCR clone 1298 (TRBV29-1, TRBJ2-3)
CSVTGGADTQYF

SEQ ID NO: 2597 - protein, 11 aa, Homo sapiens
  CDR3 for alpha chain variable domain of TCR clone 1299 (TRAV3, TRAJ21)
CAVGNFNKFYF

SEQ ID NO: 2598 - protein, 16 aa, Homo sapiens
  CDR3 for beta chain variable domain of TCR clone 1299 (TRBV7-6, TRBJ2-1)
CASSAPGPSSYNEQFF

SEQ ID NO: 2599 - protein, 13 aa, Homo sapiens
  CDR3 for alpha chain variable domain of TCR clone 1300 (TRAV21, TRAJ45)
CAVMGGGADGLTF

SEQ ID NO: 2600 - protein, 14 aa, Homo sapiens
  CDR3 for beta chain variable domain of TCR clone 1300 (TRBV4-3, TRBJ1-4)
CASSPLQRNEKLFF

SEQ ID NO: 2601 - protein, 13 aa, Homo sapiens
  CDR3 for alpha chain variable domain of TCR clone 1301 (TRAV21, TRAJ20)
CAVSRLGDYKLSF

SEQ ID NO: 2602 - protein, 13 aa, Homo sapiens
  CDR3 for beta chain variable domain of TCR clone 1301 (TRBV7-3, TRBJ1-1)
CASSPAGGLEAFF

SEQ ID NO: 2603 - protein, 12 aa, Homo sapiens
  CDR3 for alpha chain variable domain of TCR clone 1302 (TRAV12-3, TRAJ34)
CAMGYNTDKLIF

SEQ ID NO: 2604 - protein, 15 aa, Homo sapiens
  CDR3 for beta chain variable domain of TCR clone 1302 (TRBV28, TRBJ2-1)
CASSIIAGGRSEQFF

SEQ ID NO: 2605 - protein, 13 aa, Homo sapiens
  CDR3 for alpha chain variable domain of TCR clone 1303 (TRAV12-3, TRAJ35)
CAMAIGFGNVLHC

SEQ ID NO: 2606 - protein, 15 aa, Homo sapiens
  CDR3 for beta chain variable domain of TCR clone 1303 (TRBV20-1, TRBJ2-1)
CSARGSGTYYNEQFF

SEQ ID NO: 2607 - protein, 15 aa, Homo sapiens
  CDR3 for alpha chain variable domain of TCR clone 1304 (TRAV3, TRAJ22)
CAVRDRGGSARQLTF

SEQ ID NO: 2608 - protein, 13 aa, Homo sapiens
  CDR3 for beta chain variable domain of TCR clone 1304 (TRBV12-4, TRBJ1-2)
CASSLRQGKGYTF

SEQ ID NO: 2609 - protein, 13 aa, Homo sapiens
  CDR3 for alpha chain variable domain of TCR clone 1305 (TRAV39, TRAJ48)
CAAVNFGNEKLTF

SEQ ID NO: 2610 - protein, 12 aa, Homo sapiens
  CDR3 for beta chain variable domain of TCR clone 1305 (TRBV5-5, TRBJ2-5)
CASSYFGETQYF

SEQ ID NO: 2611 - protein, 16 aa, Homo sapiens
  CDR3 for alpha chain variable domain of TCR clone 1306 (TRAV30, TRAJ24)
CGTEIVDADSWGKFQF

SEQ ID NO: 2612 - protein, 15 aa, Homo sapiens
  CDR3 for beta chain variable domain of TCR clone 1306 (TRBV28, TRBJ2-1)
CASSIIAGGRSEQFF

SEQ ID NO: 2613 - protein, 12 aa, Homo sapiens
  CDR3 for alpha chain variable domain of TCR clone 1307 (TRAV8-3, TRAJ26)
CAGDNYGQNFVF

SEQ ID NO: 2614 - protein, 17 aa, Homo sapiens
  CDR3 for beta chain variable domain of TCR clone 1307 (TRBV7-8, TRBJ2-6)
CASSAGTGGAGANVLTF

SEQ ID NO: 2615 - protein, 14 aa, Homo sapiens
  CDR3 for alpha chain variable domain of TCR clone 1308 (TRAV26-1, TRAJ39)
CIVFTNNAGNMLTF

SEQ ID NO: 2616 - protein, 15 aa, Homo sapiens
  CDR3 for beta chain variable domain of TCR clone 1308 (TRBV19, TRBJ2-4)
CASSLTGLTKNIQYF

SEQ ID NO: 2617 - protein, 15 aa, Homo sapiens
  CDR3 for alpha chain variable domain of TCR clone 1309 (TRAV3, TRAJ27)
CAVRDPLTNAGKSTF

SEQ ID NO: 2618 - protein, 15 aa, Homo sapiens
  CDR3 for beta chain variable domain of TCR clone 1309 (TRBV28, TRBJ2-1)
CASSIIAGGRSEQFF

SEQ ID NO: 2619 - protein, 13 aa, Homo sapiens
  CDR3 for alpha chain variable domain of TCR clone 1310 (TRAV2, TRAJ40)
CAVVTSGTYKYIF

SEQ ID NO: 2620 - protein, 15 aa, Homo sapiens
  CDR3 for beta chain variable domain of TCR clone 1310 (TRBV18, TRBJ2-1)
CASSPPSASYNEQFF

SEQ ID NO: 2621 - protein, 13 aa, Homo sapiens
  CDR3 for alpha chain variable domain of TCR clone 1311 (TRAV2, TRAJ47)
CAVDREYGNKLVF

SEQ ID NO: 2622 - protein, 17 aa, Homo sapiens
  CDR3 for beta chain variable domain of TCR clone 1311 (TRBV15, TRBJ1-5)
CATSRVKGIYSNQPQHF

SEQ ID NO: 2623 - protein, 14 aa, Homo sapiens
  CDR3 for alpha chain variable domain of TCR clone 1312 (TRAV29/DV5, TRAJ48)
CAAMALFGNEKLTF

SEQ ID NO: 2624 - protein, 15 aa, Homo sapiens
  CDR3 for beta chain variable domain of TCR clone 1312 (TRBV7-2, TRBJ2-1)
CASTHGTGIYNEQFF

SEQ ID NO: 2625 - protein, 12 aa, Homo sapiens
  CDR3 for alpha chain variable domain of TCR clone 1313 (TRAV8-3, TRAJ20)
CAVGGGDYKLSF

SEQ ID NO: 2626 - protein, 14 aa, Homo sapiens
  CDR3 for beta chain variable domain of TCR clone 1313 (TRBV5-1, TRBJ2-7)
CASSRGESLYEQYF

SEQ ID NO: 2627 - protein, 12 aa, Homo sapiens
  CDR3 for alpha chain variable domain of TCR clone 1314 (TRAV13-1, TRAJ49)
CAASIWGNQFYF

SEQ ID NO: 2628 - protein, 14 aa, Homo sapiens
  CDR3 for beta chain variable domain of TCR clone 1314 (TRBV12-4, TRBJ1-1)
CASSLDGLNTEAFF

SEQ ID NO: 2629 - protein, 10 aa, Homo sapiens
  CDR3 for alpha chain variable domain of TCR clone 1315 (TRAV13-1, TRAJ27)
CAPLARQINL

SEQ ID NO: 2630 - protein, 13 aa, Homo sapiens
  CDR3 for beta chain variable domain of TCR clone 1315 (TRBV7-3, TRBJ1-1)
CASSQDWGAEAFF

SEQ ID NO: 2631 - protein, 17 aa, Homo sapiens
  CDR3 for alpha chain variable domain of TCR clone 1316 (TRAV13-1, TRAJ53)
CAASWKSSGGSNYKLTF

SEQ ID NO: 2632 - protein, 19 aa, Homo sapiens
  CDR3 for beta chain variable domain of TCR clone 1316 (TRBV7-9, TRBJ2-1)
CASSHNRGALLRSYNEQFF

SEQ ID NO: 2633 - protein, 12 aa, Homo sapiens
  CDR3 for alpha chain variable domain of TCR clone 1317 (TRAV12-3, TRAJ17)
CAMTLTGNKLTF

SEQ ID NO: 2634 - protein, 16 aa, Homo sapiens
  CDR3 for beta chain variable domain of TCR clone 1317 (TRBV7-3, TRBJ2-1)
CASSLEGYRSYNEQFF

SEQ ID NO: 2635 - protein, 13 aa, Homo sapiens
  CDR3 for alpha chain variable domain of TCR clone 1318 (TRAV12-1, TRAJ29)
CVVRNSGNTPLVF

SEQ ID NO: 2636 - protein, 14 aa, Homo sapiens
  CDR3 for beta chain variable domain of TCR clone 1318 (TRBV7-2, TRBJ2-7)
CASRSQGAAYEQYF

SEQ ID NO: 2637 - protein, 13 aa, Homo sapiens
  CDR3 for alpha chain variable domain of TCR clone 1319 (TRAV16, TRAJ11)
CALTQSGYSTLTF

SEQ ID NO: 2638 - protein, 14 aa, Homo sapiens
  CDR3 for beta chain variable domain of TCR clone 1319 (TRBV19, TRBJ2-7)
CASSTTRSSYEQYF

SEQ ID NO: 2639 - protein, 13 aa, Homo sapiens
  CDR3 for alpha chain variable domain of TCR clone 1320 (TRAV12-1, TRAJ11)
CVVNRAGYSTLTF

SEQ ID NO: 2640 - protein, 15 aa, Homo sapiens
  CDR3 for beta chain variable domain of TCR clone 1320 (TRBV7-3, TRBJ2-2)
CASSETGQGTGELFF

SEQ ID NO: 2641 - protein, 16 aa, Homo sapiens
  CDR3 for alpha chain variable domain of TCR clone 1321 (TRAV26-1, TRAJ52)
CIVSNAGGTSYGKLTF

SEQ ID NO: 2642 - protein, 16 aa, Homo sapiens
  CDR3 for beta chain variable domain of TCR clone 1321 (TRBV5-1, TRBJ2-1)
CASSLEGRGLYNEQFF

SEQ ID NO: 2643 - protein, 13 aa, Homo sapiens
  CDR3 for alpha chain variable domain of TCR clone 1322 (TRAV27, TRAJ6)
CAGGTRGSYIPTF

SEQ ID NO: 2644 - protein, 15 aa, Homo sapiens
  CDR3 for beta chain variable domain of TCR clone 1322 (TRBV11-2, TRBJ1-3)
CASSLSPLVRDTIYF

SEQ ID NO: 2645 - protein, 14 aa, Homo sapiens
  CDR3 for alpha chain variable domain of TCR clone 1323 (TRAV21, TRAJ12)
CAVRNGDSSYKLIF

SEQ ID NO: 2646 - protein, 14 aa, Homo sapiens
  CDR3 for beta chain variable domain of TCR clone 1323 (TRBV7-6, TRBJ2-7)
CASSLTGTGNEQYF

SEQ ID NO: 2647 - protein, 13 aa, Homo sapiens
  CDR3 for alpha chain variable domain of TCR clone 1324 (TRAV12-2, TRAJ52)
CAVSGTSYGKLTF

SEQ ID NO: 2648 - protein, 17 aa, Homo sapiens
  CDR3 for beta chain variable domain of TCR clone 1324 (TRBV11-2, TRBJ2-1)
CASSLYPPGVEYNEQFF

SEQ ID NO: 2649 - protein, 14 aa, Homo sapiens
  CDR3 for alpha chain variable domain of TCR clone 1325 (TRAV8-3, TRAJ15)
CAVGRHQAGTALIF

SEQ ID NO: 2650 - protein, 13 aa, Homo sapiens
  CDR3 for beta chain variable domain of TCR clone 1325 (TRBV9, TRBJ2-7)
CASSASDSYEQYF

SEQ ID NO: 2651 - protein, 14 aa, Homo sapiens
  CDR3 for alpha chain variable domain of TCR clone 1326 (TRAV8-2, TRAJ37)
CVVSISGNTGKLIF

SEQ ID NO: 2652 - protein, 11 aa, Homo sapiens
  CDR3 for beta chain variable domain of TCR clone 1326 (TRBV18, TRBJ2-5)
CASSPRETQYF

SEQ ID NO: 2653 - protein, 16 aa, Homo sapiens
  CDR3 for alpha chain variable domain of TCR clone 1327 (TRAV8-1, TRAJ39)
CAVNVPSYNAGNMLTF

SEQ ID NO: 2654 - protein, 15 aa, Homo sapiens
  CDR3 for beta chain variable domain of TCR clone 1327 (TRBV4-1, TRBJ2-3)
CASRSTRAGTDTQYF

SEQ ID NO: 2655 - protein, 14 aa, Homo sapiens
  CDR3 for alpha chain variable domain of TCR clone 1328 (TRAV17, TRAJ4)
CATAPLGGYNKLIF

SEQ ID NO: 2656 - protein, 13 aa, Homo sapiens
  CDR3 for beta chain variable domain of TCR clone 1328 (TRBV12-4, TRBJ1-3)
CASSLASGNTIYF

SEQ ID NO: 2657 - protein, 11 aa, Homo sapiens
  CDR3 for alpha chain variable domain of TCR clone 1329 (TRAV12-2, TRAJ49)
CALQGGNQFYF

SEQ ID NO: 2658 - protein, 13 aa, Homo sapiens
  CDR3 for beta chain variable domain of TCR clone 1329 (TRBV4-1, TRBJ1-1)
CASSQLGTGEAFF

SEQ ID NO: 2659 - protein, 15 aa, Homo sapiens
  CDR3 for alpha chain variable domain of TCR clone 1330 (TRAV12-1, TRAJ10)
CVVNKLTGGGNKLTF

SEQ ID NO: 2660 - protein, 17 aa, Homo sapiens
  CDR3 for beta chain variable domain of TCR clone 1330 (TRBV5-1, TRBJ1-6)
CASSPSLQGSDNSPLHF

SEQ ID NO: 2661 - protein, 14 aa, Homo sapiens
  CDR3 for alpha chain variable domain of TCR clone 1331 (TRAV17, TRAJ40)
CATALTSGTYKYIF

SEQ ID NO: 2662 - protein, 13 aa, Homo sapiens
  CDR3 for beta chain variable domain of TCR clone 1331 (TRBV27, TRBJ2-1)
CASSSGSYNEQFF

SEQ ID NO: 2663 - protein, 14 aa, Homo sapiens
  CDR3 for alpha chain variable domain of TCR clone 1332 (TRAV13-2, TRAJ10)
CAETFTGGGNKLTF

SEQ ID NO: 2664 - protein, 16 aa, Homo sapiens
  CDR3 for beta chain variable domain of TCR clone 1332 (TRBV18, TRBJ2-7)
CASSPRSQGISYEQYF

SEQ ID NO: 2665 - protein, 13 aa, Homo sapiens
  CDR3 for alpha chain variable domain of TCR clone 1333 (TRAV13-1, TRAJ6)
CAASSGGSYIPTF

SEQ ID NO: 2666 - protein, 15 aa, Homo sapiens
  CDR3 for beta chain variable domain of TCR clone 1333 (TRBV12-4, TRBJ2-5)
CASSPPTGLQETQYF

SEQ ID NO: 2667 - protein, 14 aa, Homo sapiens
  CDR3 for alpha chain variable domain of TCR clone 1334 (TRAV12-2, TRAJ13)
CAVKKTGGYQKVTF

SEQ ID NO: 2668 - protein, 15 aa, Homo sapiens
  CDR3 for beta chain variable domain of TCR clone 1334 (TRBV20-1, TRBJ2-7)
CSARDRVSGMDEQYF

SEQ ID NO: 2669 - protein, 15 aa, Homo sapiens
  CDR3 for alpha chain variable domain of TCR clone 1335 (TRAV2, TRAJ37)
CAVGDGSSNTGKLIF

SEQ ID NO: 2670 - protein, 13 aa, Homo sapiens
  CDR3 for beta chain variable domain of TCR clone 1335 (TRBV20-1, TRBJ2-7)
CSAQTGLSYEQYF

SEQ ID NO: 2671 - protein, 14 aa, Homo sapiens
  CDR3 for alpha chain variable domain of TCR clone 1336 (TRAV12-1, TRAJ24)
CVVRSTDSWGKFQF

SEQ ID NO: 2672 - protein, 13 aa, Homo sapiens
  CDR3 for beta chain variable domain of TCR clone 1336 (TRBV2, TRBJ2-3)
CASILAGGQGQYF

SEQ ID NO: 2673 - protein, 13 aa, Homo sapiens
  CDR3 for alpha chain variable domain of TCR clone 1337 (TRAV13-1, TRAJ20)
CAARVSNDYKLSF

SEQ ID NO: 2674 - protein, 16 aa, Homo sapiens
  CDR3 for beta chain variable domain of TCR clone 1337 (TRBV11-1, TRBJ1-1)
CATNPRDRAFNTEAFF

SEQ ID NO: 2675 - protein, 14 aa, Homo sapiens
  CDR3 for alpha chain variable domain of TCR clone 1338 (TRAV8-3, TRAJ23)
CAVIIYNQGGKLIF

SEQ ID NO: 2676 - protein, 15 aa, Homo sapiens
  CDR3 for beta chain variable domain of TCR clone 1338 (TRBV18, TRBJ2-1)
CASSPPSASYNEQFF

SEQ ID NO: 2677 - protein, 13 aa, Homo sapiens
  CDR3 for alpha chain variable domain of TCR clone 1339 (TRAV1-1, TRAJ31)
CASYLNNNARLMF

SEQ ID NO: 2678 - protein, 13 aa, Homo sapiens
  CDR3 for beta chain variable domain of TCR clone 1339 (TRBV15, TRBJ1-6)
CATSGGLNSPLHF

SEQ ID NO: 2679 - protein, 13 aa, Homo sapiens
  CDR3 for alpha chain variable domain of TCR clone 1340 (TRAV17, TRAJ5)
CATGDTGRRALTF

SEQ ID NO: 2680 - protein, 13 aa, Homo sapiens
  CDR3 for beta chain variable domain of TCR clone 1340 (TRBV19, TRBJ1-5)
CASSIEPVQPQHF

SEQ ID NO: 2681 - protein, 17 aa, Homo sapiens
  CDR3 for alpha chain variable domain of TCR clone 1341 (TRAV27, TRAJ42)
CAERVIYYGGSQGNLIF

SEQ ID NO: 2682 - protein, 14 aa, Homo sapiens
  CDR3 for beta chain variable domain of TCR clone 1341 (TRBV6-6, TRBJ2-3)
CASRLQREADTQYF

SEQ ID NO: 2683 - protein, 14 aa, Homo sapiens
  CDR3 for alpha chain variable domain of TCR clone 1342 (TRAV12-1, TRAJ33)
CVVNPEDSNYQLIW

SEQ ID NO: 2684 - protein, 11 aa, Homo sapiens
  CDR3 for beta chain variable domain of TCR clone 1342 (TRBV7-6, TRBJ2-1)
CASSNYGEQFF

SEQ ID NO: 2685 - protein, 16 aa, Homo sapiens
  CDR3 for alpha chain variable domain of TCR clone 1343 (TRAV12-1, TRAJ42)
CVVTPYYGGSQGNLIF

SEQ ID NO: 2686 - protein, 15 aa, Homo sapiens
  CDR3 for beta chain variable domain of TCR clone 1343 (TRBV4-3, TRBJ2-7)
CASSQGGRGIYEQYF

SEQ ID NO: 2687 - protein, 16 aa, Homo sapiens
  CDR3 for alpha chain variable domain of TCR clone 1344 (TRAV12-3, TRAJ53)
CAMSVGSGGSNYKLTF

SEQ ID NO: 2688 - protein, 13 aa, Homo sapiens
  CDR3 for beta chain variable domain of TCR clone 1344 (TRBV7-6, TRBJ1-2)
CASSLVADYGYTF

SEQ ID NO: 2689 - protein, 12 aa, Homo sapiens
  CDR3 for alpha chain variable domain of TCR clone 1345 (TRAV30, TRAJ43)
CGTEERGNDMRF

SEQ ID NO: 2690 - protein, 11 aa, Homo sapiens
  CDR3 for beta chain variable domain of TCR clone 1345 (TRBV29-1, TRBJ2-5)
CSEDRTGTQYF

SEQ ID NO: 2691 - protein, 14 aa, Homo sapiens
  CDR3 for alpha chain variable domain of TCR clone 1346 (TRAV1-2, TRAJ8)
CAVREDTGFQKLVF

SEQ ID NO: 2692 - protein, 16 aa, Homo sapiens
  CDR3 for beta chain variable domain of TCR clone 1346 (TRBV19, TRBJ2-1)
CASSKAGPSSYNEQFF

SEQ ID NO: 2693 - protein, 15 aa, Homo sapiens
  CDR3 for alpha chain variable domain of TCR clone 1347 (TRAV3, TRAJ20)
CAVRDSRSNDYKLSF

SEQ ID NO: 2694 - protein, 14 aa, Homo sapiens
  CDR3 for beta chain variable domain of TCR clone 1347 (TRBV20-1, TRBJ2-7)
CSARRGNGIYEQYF

SEQ ID NO: 2695 - protein, 10 aa, Homo sapiens
  CDR3 for alpha chain variable domain of TCR clone 1348 (TRAV13-1, TRAJ41)
CAASGPRRTQ

SEQ ID NO: 2696 - protein, 16 aa, Homo sapiens
  CDR3 for beta chain variable domain of TCR clone 1348 (TRBV18, TRBJ2-3)
CASSPPAGGPRKYAVF

SEQ ID NO: 2697 - protein, 15 aa, Homo sapiens
  CDR3 for alpha chain variable domain of TCR clone 1349 (TRAV3, TRAJ5)
CAVRDLDTGRRALTF

SEQ ID NO: 2698 - protein, 14 aa, Homo sapiens
  CDR3 for beta chain variable domain of TCR clone 1349 (TRBV25-1, TRBJ1-1)
CASTHLGGNTEAFF

SEQ ID NO: 2699 - protein, 14 aa, Homo sapiens
  CDR3 for alpha chain variable domain of TCR clone 1350 (TRAV26-2, TRAJ38)
CILYNAGNNRKLIW

SEQ ID NO: 2700 - protein, 14 aa, Homo sapiens
  CDR3 for beta chain variable domain of TCR clone 1350 (TRBV19, TRBJ2-1)
CASPTFVLSGEQFF

SEQ ID NO: 2701 - protein, 13 aa, Homo sapiens
  CDR3 for alpha chain variable domain of TCR clone 1351 (TRAV12-1, TRAJ26)
CVVRRNYGQNFVF

SEQ ID NO: 2702 - protein, 14 aa, Homo sapiens
  CDR3 for beta chain variable domain of TCR clone 1351 (TRBV4-2, TRBJ2-1)
CASGLDRAYNEQFF

SEQ ID NO: 2703 - protein, 17 aa, Homo sapiens
  CDR3 for alpha chain variable domain of TCR clone 1352 (TRAV26-1, TRAJ22)
CIVRVPSHSGSARQLTF

SEQ ID NO: 2704 - protein, 16 aa, Homo sapiens
  CDR3 for beta chain variable domain of TCR clone 1352 (TRBV28, TRBJ2-1)
CASRRSGRVVGNEQFF

SEQ ID NO: 2705 - protein, 14 aa, Homo sapiens
  CDR3 for alpha chain variable domain of TCR clone 1353 (TRAV12-3, TRAJ10)
SHLPLTGGGNKLTF

SEQ ID NO: 2706 - protein, 13 aa, Homo sapiens
  CDR3 for beta chain variable domain of TCR clone 1353 (TRBV7-6, TRBJ2-3)
CASSLAVGDTQYF

SEQ ID NO: 2707 - protein, 13 aa, Homo sapiens
  CDR3 for alpha chain variable domain of TCR clone 1354 (TRAV13-2, TRAJ5)
CAVMDTGRRALTF

SEQ ID NO: 2708 - protein, 12 aa, Homo sapiens
  CDR3 for beta chain variable domain of TCR clone 1354 (TRBV28, TRBJ2-7)
CASSFSSYEQYF

SEQ ID NO: 2709 - protein, 14 aa, Homo sapiens
  CDR3 for alpha chain variable domain of TCR clone 1355 (TRAV3, TRAJ9)
CAVRLNTGGFKTIF

SEQ ID NO: 2710 - protein, 16 aa, Homo sapiens
  CDR3 for beta chain variable domain of TCR clone 1355 (TRBV12-5, TRBJ2-5)
CASGPRTSGNQETQYF

SEQ ID NO: 2711 - protein, 15 aa, Homo sapiens
  CDR3 for alpha chain variable domain of TCR clone 1356 (TRAV2, TRAJ9)
CAVEDRGTGGFKTIF

SEQ ID NO: 2712 - protein, 14 aa, Homo sapiens
  CDR3 for beta chain variable domain of TCR clone 1356 (TRBV4-1, TRBJ2-2)
CASSQAVNTGELFF

SEQ ID NO: 2713 - protein, 16 aa, Homo sapiens
  CDR3 for alpha chain variable domain of TCR clone 1357 (TRAV3, TRAJ6)
CAVRDGMGRRKLHTYI

SEQ ID NO: 2714 - protein, 15 aa, Homo sapiens
  CDR3 for beta chain variable domain of TCR clone 1357 (TRBV9, TRBJ2-1)
CASSLAGSSYNEQFF

SEQ ID NO: 2715 - protein, 12 aa, Homo sapiens
  CDR3 for alpha chain variable domain of TCR clone 1358 (TRAV30, TRAJ43)
CGTEERGNDMRF

SEQ ID NO: 2716 - protein, 13 aa, Homo sapiens
  CDR3 for beta chain variable domain of TCR clone 1358 (TRBV7-9, TRBJ2-3)
CASSPGSTDTQYF

SEQ ID NO: 2717 - protein, 11 aa, Homo sapiens
  CDR3 for alpha chain variable domain of TCR clone 1359 (TRAV2, TRAJ33)
CAVDSNYQLIW

SEQ ID NO: 2718 - protein, 13 aa, Homo sapiens
  CDR3 for beta chain variable domain of TCR clone 1359 (TRBV7-2, TRBJ2-7)
CASSSPSGSEQYF

SEQ ID NO: 2719 - protein, 14 aa, Homo sapiens
  CDR3 for alpha chain variable domain of TCR clone 1360 (TRAV3, TRAJ27)
CAVRDDTNAGKSTF

SEQ ID NO: 2720 - protein, 15 aa, Homo sapiens
  CDR3 for beta chain variable domain of TCR clone 1360 (TRBV7-7, TRBJ2-2)
CATSKLAKNTGELFF

SEQ ID NO: 2721 - protein, 14 aa, Homo sapiens
  CDR3 for alpha chain variable domain of TCR clone 1361 (TRAV12-3, TRAJ58)
CAMSTETSGSRLTF

SEQ ID NO: 2722 - protein, 12 aa, Homo sapiens
  CDR3 for beta chain variable domain of TCR clone 1361 (TRBV7-8, TRBJ2-7)
CASSLGDREQYF

SEQ ID NO: 2723 - protein, 14 aa, Homo sapiens
  CDR3 for alpha chain variable domain of TCR clone 1362 (TRAV8-3, TRAJ30)
CAVGDMNRDDKIIF

SEQ ID NO: 2724 - protein, 17 aa, Homo sapiens
  CDR3 for beta chain variable domain of TCR clone 1362 (TRBV19, TRBJ2-2)
CASSRNPGGFGTGELFF

SEQ ID NO: 2725 - protein, 18 aa, Homo sapiens
  CDR3 for alpha chain variable domain of TCR clone 1363 (TRAV26-1, TRAJ52)
CIVRVAGAGGTSYGKLTF

SEQ ID NO: 2726 - protein, 13 aa, Homo sapiens
  CDR3 for beta chain variable domain of TCR clone 1363 (TRBV7-8, TRBJ1-2)
CASSAQSYYGYTF

SEQ ID NO: 2727 - protein, 15 aa, Homo sapiens
  CDR3 for alpha chain variable domain of TCR clone 1364 (TRAV35, TRAJ41)
CAGQLFSNSGYALNF

SEQ ID NO: 2728 - protein, 14 aa, Homo sapiens
  CDR3 for beta chain variable domain of TCR clone 1364 (TRBV7-2, TRBJ1-2)
CASSRGGTNYGYTF

SEQ ID NO: 2729 - protein, 16 aa, Homo sapiens
  CDR3 for alpha chain variable domain of TCR clone 1365 (TRAV16, TRAJ4)
CALSRMFSGGYNKLIF

SEQ ID NO: 2730 - protein, 16 aa, Homo sapiens
  CDR3 for beta chain variable domain of TCR clone 1365 (TRBV12-4, TRBJ1-5)
CASSRPVGGSNQPQHF

SEQ ID NO: 2731 - protein, 16 aa, Homo sapiens
  CDR3 for alpha chain variable domain of TCR clone 1366 (TRAV4, TRAJ22)
CLVGDLYSGSARQLTF

SEQ ID NO: 2732 - protein, 14 aa, Homo sapiens
  CDR3 for beta chain variable domain of TCR clone 1366 (TRBV28, TRBJ2-3)
CASSWRGRADTQYF

SEQ ID NO: 2733 - protein, 13 aa, Homo sapiens
  CDR3 for alpha chain variable domain of TCR clone 1367 (TRAV12-3, TRAJ6)
CANPSGGSYIPTF

SEQ ID NO: 2734 - protein, 14 aa, Homo sapiens
  CDR3 for beta chain variable domain of TCR clone 1367 (TRBV19, TRBJ1-1)
CASSRDRDATEAFF

SEQ ID NO: 2735 - protein, 16 aa, Homo sapiens
  CDR3 for alpha chain variable domain of TCR clone 1368 (TRAV13-2, TRAJ53)
CAENANSGGSNYKLTF

SEQ ID NO: 2736 - protein, 19 aa, Homo sapiens
  CDR3 for beta chain variable domain of TCR clone 1368 (TRBV28, TRBJ2-7)
CASSYSGTSRLGWVYEQYF

SEQ ID NO: 2737 - protein, 13 aa, Homo sapiens
  CDR3 for alpha chain variable domain of TCR clone 1369 (TRAV2, TRAJ40)
CAVVTSGTYKYIF

SEQ ID NO: 2738 - protein, 13 aa, Homo sapiens
  CDR3 for beta chain variable domain of TCR clone 1369 (TRBV7-9, TRBJ2-5)
CASLPSGRETQYF

SEQ ID NO: 2739 - protein, 14 aa, Homo sapiens
  CDR3 for alpha chain variable domain of TCR clone 1370 (TRAV26-2, TRAJ27)
CILRDISDAGKSTF

SEQ ID NO: 2740 - protein, 15 aa, Homo sapiens
  CDR3 for beta chain variable domain of TCR clone 1370 (TRBV10-3, TRBJ2-7)
CATREQGLRSYEQYF

SEQ ID NO: 2741 - protein, 11 aa, Homo sapiens
  CDR3 for alpha chain variable domain of TCR clone 1371 (TRAV12-2, TRAJ33)
CAVTSNYQLIW

SEQ ID NO: 2742 - protein, 14 aa, Homo sapiens
  CDR3 for beta chain variable domain of TCR clone 1371 (TRBV28, TRBJ2-2)
CASRIRSGTGELFF

SEQ ID NO: 2743 - protein, 13 aa, Homo sapiens
  CDR3 for alpha chain variable domain of TCR clone 1372 (TRAV20, TRAJ42)
CAVQGGSQGNLIF

SEQ ID NO: 2744 - protein, 15 aa, Homo sapiens
  CDR3 for beta chain variable domain of TCR clone 1372 (TRBV10-1, TRBJ2-1)
CASSEWRGTYNEQFF

SEQ ID NO: 2745 - protein, 15 aa, Homo sapiens
  CDR3 for alpha chain variable domain of TCR clone 1373 (TRAV12-3, TRAJ6)
CAMSATTGGSYIPTF

SEQ ID NO: 2746 - protein, 19 aa, Homo sapiens
  CDR3 for beta chain variable domain of TCR clone 1373 (TRBV25-1, TRBJ2-2)
CAILVYRVDRGRKTGELFF

SEQ ID NO: 2747 - protein, 13 aa, Homo sapiens
  CDR3 for alpha chain variable domain of TCR clone 1374 (TRAV20, TRAJ15)
CATINQAGTALIF

SEQ ID NO: 2748 - protein, 13 aa, Homo sapiens
  CDR3 for beta chain variable domain of TCR clone 1374 (TRBV12-4, TRBJ2-1)
CASRQPSNNEQFF

SEQ ID NO: 2749 - protein, 12 aa, Homo sapiens
  CDR3 for alpha chain variable domain of TCR clone 1375 (TRAV12-1, TRAJ40)
CVFYSGTYKYIF

SEQ ID NO: 2750 - protein, 12 aa, Homo sapiens
  CDR3 for beta chain variable domain of TCR clone 1375 (TRBV7-3, TRBJ2-1)
CASSFINNEQFF

SEQ ID NO: 2751 - protein, 15 aa, Homo sapiens
  CDR3 for alpha chain variable domain of TCR clone 1376 (TRAV3, TRAJ22)
CAVRDRGGSARQLTF

SEQ ID NO: 2752 - protein, 14 aa, Homo sapiens
  CDR3 for beta chain variable domain of TCR clone 1376 (TRBV19, TRBJ2-1)
CASSRLASINEQFF

SEQ ID NO: 2753 - protein, 15 aa, Homo sapiens
  CDR3 for alpha chain variable domain of TCR clone 1377 (TRAV14/DV4, TRAJ33)
CAMREGRDSNYQLIW

SEQ ID NO: 2754 - protein, 15 aa, Homo sapiens
  CDR3 for beta chain variable domain of TCR clone 1377 (TRBV5-5, TRBJ1-5)
CASSSTPGSNQPQHF

SEQ ID NO: 2755 - protein, 12 aa, Homo sapiens
  CDR3 for alpha chain variable domain of TCR clone 1378 (TRAV25, TRAJ48)
CAGDFGNEKLTF

SEQ ID NO: 2756 - protein, 12 aa, Homo sapiens
  CDR3 for beta chain variable domain of TCR clone 1378 (TRBV2, TRBJ2-5)
CASKEYGETQYF

SEQ ID NO: 2757 - protein, 13 aa, Homo sapiens
  CDR3 for alpha chain variable domain of TCR clone 1379 (TRAV8-3, TRAJ4)
WVFYSGGYNKLIF

SEQ ID NO: 2758 - protein, 16 aa, Homo sapiens
  CDR3 for beta chain variable domain of TCR clone 1379 (TRBV7-8, TRBJ2-3)
CASSTEGQRETDTQYF

SEQ ID NO: 2759 - protein, 15 aa, Homo sapiens
  CDR3 for alpha chain variable domain of TCR clone 1380 (TRAV17, TRAJ16)
CATALRFSDGQKLLF

SEQ ID NO: 2760 - protein, 15 aa, Homo sapiens
  CDR3 for beta chain variable domain of TCR clone 1380 (TRBV13, TRBJ1-5)
CASSFGQGGVQPQHF

SEQ ID NO: 2761 - protein, 15 aa, Homo sapiens
  CDR3 for alpha chain variable domain of TCR clone 1381 (TRAV2, TRAJ15)
CAVEDREQAGTALIF

SEQ ID NO: 2762 - protein, 13 aa, Homo sapiens
  CDR3 for beta chain variable domain of TCR clone 1381 (TRBV10-2, TRBJ2-7)
CASGTSGGYEQYF

SEQ ID NO: 2763 - protein, 12 aa, Homo sapiens
  CDR3 for alpha chain variable domain of TCR clone 1382 (TRAV8-3, TRAJ20)
CAVDFNDYKLSF

SEQ ID NO: 2764 - protein, 12 aa, Homo sapiens
  CDR3 for beta chain variable domain of TCR clone 1382 (TRBV29-1, TRBJ2-3)
CSVTGGADTQYF

SEQ ID NO: 2765 - protein, 14 aa, Homo sapiens
  CDR3 for alpha chain variable domain of TCR clone 1383 (TRAV12-3, TRAJ10)
SHLPLTGGGNKLTF

SEQ ID NO: 2766 - protein, 15 aa, Homo sapiens
  CDR3 for beta chain variable domain of TCR clone 1383 (TRBV4-1, TRBJ1-4)
CASSDTGGTNEKLFF

SEQ ID NO: 2767 - protein, 17 aa, Homo sapiens
  CDR3 for alpha chain variable domain of TCR clone 1384 (TRAV3, TRAJ6)
CAVRDGPRAGGSYIPTF

SEQ ID NO: 2768 - protein, 13 aa, Homo sapiens
  CDR3 for beta chain variable domain of TCR clone 1384 (TRBV19, TRBJ2-7)
CASSIDRTYEQYF

SEQ ID NO: 2769 - protein, 16 aa, Homo sapiens
  CDR3 for alpha chain variable domain of TCR clone 1385 (TRAV36/DV7, TRAJ33)
WRPGNKVQDSNYQLIW

SEQ ID NO: 2770 - protein, 15 aa, Homo sapiens
  CDR3 for beta chain variable domain of TCR clone 1385 (TRBV29-1, TRBJ2-1)
CSVGRHALFYNEQFF

SEQ ID NO: 2771 - protein, 11 aa, Homo sapiens
  CDR3 for alpha chain variable domain of TCR clone 1386 (TRAV12-3, TRAJ27)
CAMANAGKSTF

SEQ ID NO: 2772 - protein, 14 aa, Homo sapiens
  CDR3 for beta chain variable domain of TCR clone 1386 (TRBV4-1, TRBJ2-2)
CASSQAVNTGELFF

SEQ ID NO: 2773 - protein, 16 aa, Homo sapiens
  CDR3 for alpha chain variable domain of TCR clone 1387 (TRAV8-3, TRAJ42)
CAVGEGNGGSQGNLIF

SEQ ID NO: 2774 - protein, 14 aa, Homo sapiens
  CDR3 for beta chain variable domain of TCR clone 1387 (TRBV7-2, TRBJ2-1)
CASSRGGARNEQFF

SEQ ID NO: 2775 - protein, 16 aa, Homo sapiens
  CDR3 for alpha chain variable domain of TCR clone 1388 (TRAV30, TRAJ24)
CGTEIVDADSWGKFQF

SEQ ID NO: 2776 - protein, 14 aa, Homo sapiens
  CDR3 for beta chain variable domain of TCR clone 1388 (TRBV19, TRBJ2-1)
CASPTFVLSGEQFF

SEQ ID NO: 2777 - protein, 14 aa, Homo sapiens
  CDR3 for alpha chain variable domain of TCR clone 1389 (TRAV8-3, TRAJ10)
CAVGNAGGGNKLTF

SEQ ID NO: 2778 - protein, 16 aa, Homo sapiens
  CDR3 for beta chain variable domain of TCR clone 1389 (TRBV11-2, TRBJ1-2)
CASSLDTGGADYGYTF

SEQ ID NO: 2779 - protein, 22 aa, Homo sapiens
  CDR3 for alpha chain variable domain of TCR clone 1390 (TRAV12-2, TRAJ53)
SPVIQPPTSVPPILSSNYKLTF

SEQ ID NO: 2780 - protein, 13 aa, Homo sapiens
  CDR3 for beta chain variable domain of TCR clone 1390 (TRBV7-7, TRBJ2-3)
CASSLSRADTQYF

SEQ ID NO: 2781 - protein, 16 aa, Homo sapiens
  CDR3 for alpha chain variable domain of TCR clone 1391 (TRAV3, TRAJ37)
CAVRGKGSGNTGKLIF

SEQ ID NO: 2782 - protein, 12 aa, Homo sapiens
  CDR3 for beta chain variable domain of TCR clone 1391 (TRBV11-2, TRBJ2-2)
CASSLGGGELFF

SEQ ID NO: 2783 - protein, 14 aa, Homo sapiens
  CDR3 for alpha chain variable domain of TCR clone 1392 (TRAV23/DV6, TRAJ8)
CAASKNTGFQKLVF

SEQ ID NO: 2784 - protein, 16 aa, Homo sapiens
  CDR3 for beta chain variable domain of TCR clone 1392 (TRBV4-1, TRBJ2-6)
CASSQVGDPGANVLTF

SEQ ID NO: 2785 - protein, 13 aa, Homo sapiens
  CDR3 for alpha chain variable domain of TCR clone 1393 (TRAV26-1, TRAJ30)
CIVNMNRDDKIIF

SEQ ID NO: 2786 - protein, 16 aa, Homo sapiens
  CDR3 for beta chain variable domain of TCR clone 1393 (TRBV16, TRBJ2-7)
CASSRPAGGSSYEQYF

SEQ ID NO: 2787 - protein, 17 aa, Homo sapiens
  CDR3 for alpha chain variable domain of TCR clone 1394 (TRAV3, TRAJ28)
CAVREAYSGAGSYQLTF

SEQ ID NO: 2788 - protein, 18 aa, Homo sapiens
  CDR3 for beta chain variable domain of TCR clone 1394 (TRBV27, TRBJ2-1)
CASGNRAVGVGSKNEQFF

SEQ ID NO: 2789 - protein, 15 aa, Homo sapiens
  CDR3 for alpha chain variable domain of TCR clone 1395 (TRAV12-2, TRAJ56)
CAVNPFTGANSKLTF

SEQ ID NO: 2790 - protein, 13 aa, Homo sapiens
  CDR3 for beta chain variable domain of TCR clone 1395 (TRBV20-1, TRBJ1-2)
CSARDRVYGGYTF

SEQ ID NO: 2791 - protein, 11 aa, Homo sapiens
  CDR3 for alpha chain variable domain of TCR clone 1396 (TRAV2, TRAJ33)
CAVESNYQLIW

SEQ ID NO: 2792 - protein, 12 aa, Homo sapiens
  CDR3 for beta chain variable domain of TCR clone 1396 (TRBV11-2, TRBJ2-2)
CASSLGGGELFF

SEQ ID NO: 2793 - protein, 13 aa, Homo sapiens
  CDR3 for alpha chain variable domain of TCR clone 1397 (TRAV27, TRAJ45)
CRSSGGGADGLTF

SEQ ID NO: 2794 - protein, 13 aa, Homo sapiens
  CDR3 for beta chain variable domain of TCR clone 1397 (TRBV7-7, TRBJ2-5)
CASSRSGQETQYF

SEQ ID NO: 2795 - protein, 14 aa, Homo sapiens
  CDR3 for alpha chain variable domain of TCR clone 1398 (TRAV26-1, TRAJ34)
CIVRESYNTDKLIF

SEQ ID NO: 2796 - protein, 13 aa, Homo sapiens
  CDR3 for beta chain variable domain of TCR clone 1398 (TRBV19, TRBJ2-1)
CATSRGVYNEQFF

SEQ ID NO: 2797 - protein, 14 aa, Homo sapiens
  CDR3 for alpha chain variable domain of TCR clone 1399 (TRAV4, TRAJ17)
CLVGDMAAGNKLTF

SEQ ID NO: 2798 - protein, 13 aa, Homo sapiens
  CDR3 for beta chain variable domain of TCR clone 1399 (TRBV18, TRBJ2-7)
CASQSGGGYEQYF

SEQ ID NO: 2799 - protein, 13 aa, Homo sapiens
  CDR3 for alpha chain variable domain of TCR clone 1400 (TRAV12-2, TRAJ15)
CAVFNQAGTALIF

SEQ ID NO: 2800 - protein, 15 aa, Homo sapiens
  CDR3 for beta chain variable domain of TCR clone 1400 (TRBV7-8, TRBJ1-5)
CASSRGGGADQPQHF

SEQ ID NO: 2801 - protein, 14 aa, Homo sapiens
  CDR3 for alpha chain variable domain of TCR clone 1401 (TRAV12-1, TRAJ3)
CVVNPGSSASKIIF

SEQ ID NO: 2802 - protein, 14 aa, Homo sapiens
  CDR3 for beta chain variable domain of TCR clone 1401 (TRBV20-1, TRBJ2-3)
CSARGGTSTDTQYF

SEQ ID NO: 2803 - protein, 13 aa, Homo sapiens
  CDR3 for alpha chain variable domain of TCR clone 1402 (TRAV13-1, TRAJ9)
CAASGTGGFKTIF

SEQ ID NO: 2804 - protein, 13 aa, Homo sapiens
  CDR3 for beta chain variable domain of TCR clone 1402 (TRBV12-4, TRBJ2-7)
CASSLERVREQYF

SEQ ID NO: 2805 - protein, 13 aa, Homo sapiens
  CDR3 for alpha chain variable domain of TCR clone 1403 (TRAV3, TRAJ20)
CAVRPLNDYKLSF

SEQ ID NO: 2806 - protein, 12 aa, Homo sapiens
  CDR3 for beta chain variable domain of TCR clone 1403 (TRBV6-1, TRBJ2-1)
CATYGLNNEQFF

SEQ ID NO: 2807 - protein, 13 aa, Homo sapiens
  CDR3 for alpha chain variable domain of TCR clone 1404 (TRAV12-2, TRAJ9)
CAVKWAGGFKTIF

SEQ ID NO: 2808 - protein, 15 aa, Homo sapiens
  CDR3 for beta chain variable domain of TCR clone 1404 (TRBV5-1, TRBJ1-4)
CASSLTADSDEKLFF

SEQ ID NO: 2809 - protein, 12 aa, Homo sapiens
  CDR3 for alpha chain variable domain of TCR clone 1405 (TRAV12-3, TRAJ17)
CAMTLTGNKLTF

SEQ ID NO: 2810 - protein, 15 aa, Homo sapiens
  CDR3 for beta chain variable domain of TCR clone 1405 (TRBV20-1, TRBJ2-7)
CSARDQVSGMDEQYF

SEQ ID NO: 2811 - protein, 12 aa, Homo sapiens
  CDR3 for alpha chain variable domain of TCR clone 1406 (TRAV26-2, TRAJ48)
CILRKGNEKLTF

SEQ ID NO: 2812 - protein, 14 aa, Homo sapiens
  CDR3 for beta chain variable domain of TCR clone 1406 (TRBV28, TRBJ2-7)
CASSTLRGRFEQYF

SEQ ID NO: 2813 - protein, 13 aa, Homo sapiens
  CDR3 for alpha chain variable domain of TCR clone 1407 (TRAV26-1, TRAJ34)
CIVRGHNTDKLIF

SEQ ID NO: 2814 - protein, 15 aa, Homo sapiens
  CDR3 for beta chain variable domain of TCR clone 1407 (TRBV4-1, TRBJ2-7)
CASSQEWGPSYEQYF

SEQ ID NO: 2815 - protein, 11 aa, Homo sapiens
  CDR3 for alpha chain variable domain of TCR clone 1408 (TRAV12-1, TRAJ30)
CVVNGQDKIIF

SEQ ID NO: 2816 - protein, 15 aa, Homo sapiens
  CDR3 for beta chain variable domain of TCR clone 1408 (TRBV28, TRBJ2-5)
CASSSGRTIQETQYF

SEQ ID NO: 2817 - protein, 14 aa, Homo sapiens
  CDR3 for alpha chain variable domain of TCR clone 1409 (TRAV26-1, TRAJ38)
CIADNAGNNRKLIW

SEQ ID NO: 2818 - protein, 13 aa, Homo sapiens
  CDR3 for beta chain variable domain of TCR clone 1409 (TRBV19, TRBJ1-2)
CASSVPGQDGYTF

SEQ ID NO: 2819 - protein, 15 aa, Homo sapiens
  CDR3 for alpha chain variable domain of TCR clone 1410 (TRAV17, TRAJ57)
CATGPSQGGSEKLVF

SEQ ID NO: 2820 - protein, 15 aa, Homo sapiens
  CDR3 for beta chain variable domain of TCR clone 1410 (TRBV25-1, TRBJ1-4)
CASSPGDSTNEKLFF

SEQ ID NO: 2821 - protein, 12 aa, Homo sapiens
  CDR3 for alpha chain variable domain of TCR clone 1411 (TRAV20, TRAJ20)
CAVRFNDYKLSF

SEQ ID NO: 2822 - protein, 14 aa, Homo sapiens
  CDR3 for beta chain variable domain of TCR clone 1411 (TRBV20-1, TRBJ2-1)
CSAQIGGSANEQFF

SEQ ID NO: 2823 - protein, 11 aa, Homo sapiens
  CDR3 for alpha chain variable domain of TCR clone 1412 (TRAV12-1, TRAJ21)
CVVNNFNKFYF

SEQ ID NO: 2824 - protein, 14 aa, Homo sapiens
  CDR3 for beta chain variable domain of TCR clone 1412 (TRBV18, TRBJ2-7)
CASSPRGGAYEQYF

SEQ ID NO: 2825 - protein, 18 aa, Homo sapiens
  CDR3 for alpha chain variable domain of TCR clone 1413 (TRAV21, TRAJ52)
CAVRPSPAGGTSYGKLTF

SEQ ID NO: 2826 - protein, 17 aa, Homo sapiens
  CDR3 for beta chain variable domain of TCR clone 1413 (TRBV25-1, TRBJ2-1)
CASSAYGQGRGVYEQFF

SEQ ID NO: 2827 - protein, 11 aa, Homo sapiens
  CDR3 for alpha chain variable domain of TCR clone 1414 (TRAV35, TRAJ30)
CAPGGDDKIIF

SEQ ID NO: 2828 - protein, 14 aa, Homo sapiens
  CDR3 for beta chain variable domain of TCR clone 1414 (TRBV7-6, TRBJ2-1)
CASSLGGGADEQFF

SEQ ID NO: 2829 - protein, 14 aa, Homo sapiens
  CDR3 for alpha chain variable domain of TCR clone 1415 (TRAV6, TRAJ37)
CALGSQGNTGKLIF

SEQ ID NO: 2830 - protein, 15 aa, Homo sapiens
  CDR3 for beta chain variable domain of TCR clone 1415 (TRBV2, TRBJ2-1)
CASSEEREGDNEQFF

SEQ ID NO: 2831 - protein, 15 aa, Homo sapiens
  CDR3 for alpha chain variable domain of TCR clone 1416 (TRAV21, TRAJ53)
CATLNSGGSNYKLTF

SEQ ID NO: 2832 - protein, 15 aa, Homo sapiens
  CDR3 for beta chain variable domain of TCR clone 1416 (TRBV20-1, TRBJ2-7)
CSARDRVSGMDEQYF

SEQ ID NO: 2833 - protein, 17 aa, Homo sapiens
  CDR3 for alpha chain variable domain of TCR clone 1417 (TRAV26-1, TRAJ27)
CIVSTPWINTNAGKSTF

SEQ ID NO: 2834 - protein, 16 aa, Homo sapiens
  CDR3 for beta chain variable domain of TCR clone 1417 (TRBV7-9, TRBJ2-1)
CASSLDPGLAIDEQFF

SEQ ID NO: 2835 - protein, 13 aa, Homo sapiens
  CDR3 for alpha chain variable domain of TCR clone 1418 (TRAV21, TRAJ26)
CAVLDNYGQNFVF

SEQ ID NO: 2836 - protein, 16 aa, Homo sapiens
  CDR3 for beta chain variable domain of TCR clone 1418 (TRBV29-1, TRBJ2-2)
CSVETRASGNTGELFF

SEQ ID NO: 2837 - protein, 13 aa, Homo sapiens
  CDR3 for alpha chain variable domain of TCR clone 1419 (TRAV12-2, TRAJ20)
CAVYPSNDYKLSF

SEQ ID NO: 2838 - protein, 15 aa, Homo sapiens
  CDR3 for beta chain variable domain of TCR clone 1419 (TRBV18, TRBJ1-2)
CASSPGNGLGYGYTF

SEQ ID NO: 2839 - protein, 14 aa, Homo sapiens
  CDR3 for alpha chain variable domain of TCR clone 1420 (TRAV12-3, TRAJ10)
SHLPLTGGGNKLTF

SEQ ID NO: 2840 - protein, 12 aa, Homo sapiens
  CDR3 for beta chain variable domain of TCR clone 1420 (TRBV7-9, TRBJ2-7)
CATRTDAYEQYF

SEQ ID NO: 2841 - protein, 12 aa, Homo sapiens
  CDR3 for alpha chain variable domain of TCR clone 1421 (TRAV8-3, TRAJ6)
CAVAGGSYIPTF

SEQ ID NO: 2842 - protein, 14 aa, Homo sapiens
  CDR3 for beta chain variable domain of TCR clone 1421 (TRBV27, TRBJ2-7)
CASATGTERREQYF

SEQ ID NO: 2843 - protein, 15 aa, Homo sapiens
  CDR3 for alpha chain variable domain of TCR clone 1422 (TRAV21, TRAJ53)
CATLNSGGSNYKLTF

SEQ ID NO: 2844 - protein, 14 aa, Homo sapiens
  CDR3 for beta chain variable domain of TCR clone 1422 (TRBV7-2, TRBJ2-7)
CASRSQGAAYEQYF

SEQ ID NO: 2845 - protein, 12 aa, Homo sapiens
  CDR3 for alpha chain variable domain of TCR clone 1423 (TRAV12-3, TRAJ40)
CAVSSGTYKYIF

SEQ ID NO: 2846 - protein, 15 aa, Homo sapiens
  CDR3 for beta chain variable domain of TCR clone 1423 (TRBV7-9, TRBJ2-7)
CASSPGGGLTYEQYF

SEQ ID NO: 2847 - protein, 11 aa, Homo sapiens
  CDR3 for alpha chain variable domain of TCR clone 1424 (TRAV2, TRAJ13)
CASGGYQKVTF

SEQ ID NO: 2848 - protein, 13 aa, Homo sapiens
  CDR3 for beta chain variable domain of TCR clone 1424 (TRBV12-4, TRBJ1-2)
CASSLRQGKGYTF

SEQ ID NO: 2849 - protein, 11 aa, Homo sapiens
  CDR3 for alpha chain variable domain of TCR clone 1425 (TRAV12-2, TRAJ49)
CAVNTGNQFYF

SEQ ID NO: 2850 - protein, 12 aa, Homo sapiens
  CDR3 for beta chain variable domain of TCR clone 1425 (TRBV2, TRBJ2-3)
CASSGRFDTQYF

SEQ ID NO: 2851 - protein, 13 aa, Homo sapiens
  CDR3 for alpha chain variable domain of TCR clone 1426 (TRAV8-1, TRAJ34)
CAVRPYNTDKLIF

SEQ ID NO: 2852 - protein, 15 aa, Homo sapiens
  CDR3 for beta chain variable domain of TCR clone 1426 (TRBV7-9, TRBJ1-3)
CASSLRSGSGNTIYF

SEQ ID NO: 2853 - protein, 13 aa, Homo sapiens
  CDR3 for alpha chain variable domain of TCR clone 1427 (TRAV36/DV7, TRAJ37)
CAVFSSNTGKLIF

SEQ ID NO: 2854 - protein, 12 aa, Homo sapiens
  CDR3 for beta chain variable domain of TCR clone 1427 (TRBV11-2, TRBJ2-2)
CASSLGGGELFF

SEQ ID NO: 2855 - protein, 15 aa, Homo sapiens
  CDR3 for alpha chain variable domain of TCR clone 1428 (TRAV3, TRAJ29)
CAVRDINSGNTPLVF

SEQ ID NO: 2856 - protein, 16 aa, Homo sapiens
  CDR3 for beta chain variable domain of TCR clone 1428 (TRBV4-1, TRBJ2-5)
CASSQTFYGDQETQYF

SEQ ID NO: 2857 - protein, 12 aa, Homo sapiens
  CDR3 for alpha chain variable domain of TCR clone 1429 (TRAV29/DV5, TRAJ34)
CAARHNTDKLIF

SEQ ID NO: 2858 - protein, 15 aa, Homo sapiens
  CDR3 for beta chain variable domain of TCR clone 1429 (TRBV19, TRBJ2-7)
CASSPAGSGEALRYF

SEQ ID NO: 2859 - protein, 15 aa, Homo sapiens
  CDR3 for alpha chain variable domain of TCR clone 1430 (TRAV26-2, TRAJ13)
CILRDLSGGYQKVTF

SEQ ID NO: 2860 - protein, 11 aa, Homo sapiens
  CDR3 for beta chain variable domain of TCR clone 1430 (TRBV7-9, TRBJ2-3)
CASSYTDTQYF

SEQ ID NO: 2861 - protein, 12 aa, Homo sapiens
  CDR3 for alpha chain variable domain of TCR clone 1431 (TRAV21, TRAJ8)
CAVNTGFQKLVF

SEQ ID NO: 2862 - protein, 13 aa, Homo sapiens
  CDR3 for beta chain variable domain of TCR clone 1431 (TRBV6-3, TRBJ2-1)
CASSYDNYNEQFF

SEQ ID NO: 2863 - protein, 14 aa, Homo sapiens
  CDR3 for alpha chain variable domain of TCR clone 1432 (TRAV21, TRAJ38)
CAVMGAGNNRKLIW

SEQ ID NO: 2864 - protein, 13 aa, Homo sapiens
  CDR3 for beta chain variable domain of TCR clone 1432 (TRBV7-3, TRBJ2-5)
CASSIGFFETQYF

SEQ ID NO: 2865 - protein, 15 aa, Homo sapiens
  CDR3 for alpha chain variable domain of TCR clone 1433 (TRAV12-3, TRAJ5)
CAMSGLGTGRRALTF

SEQ ID NO: 2866 - protein, 16 aa, Homo sapiens
  CDR3 for beta chain variable domain of TCR clone 1433 (TRBV20-1, TRBJ2-3)
CSARLHSAGAIDTQYF

SEQ ID NO: 2867 - protein, 12 aa, Homo sapiens
  CDR3 for alpha chain variable domain of TCR clone 1434 (TRAV16, TRAJ9)
CALSSGGFKTIF

SEQ ID NO: 2868 - protein, 14 aa, Homo sapiens
  CDR3 for beta chain variable domain of TCR clone 1434 (TRBV7-9, TRBJ2-1)
CASSLAGPYNEQFF

SEQ ID NO: 2869 - protein, 15 aa, Homo sapiens
  CDR3 for alpha chain variable domain of TCR clone 1435 (TRAV8-3, TRAJ27)
CAVGPSKTNAGKSTF

SEQ ID NO: 2870 - protein, 14 aa, Homo sapiens
  CDR3 for beta chain variable domain of TCR clone 1435 (TRBV11-2, TRBJ2-3)
CASSRLARTDTQYF

SEQ ID NO: 2871 - protein, 23 aa, Homo sapiens
  CDR3 for alpha chain variable domain of TCR clone 1436 (TRAV8-3, )
CAVVTTRIPDIQNPDPAVYQLRD

SEQ ID NO: 2872 - protein, 14 aa, Homo sapiens
  CDR3 for beta chain variable domain of TCR clone 1436 (TRBV11-2, TRBJ2-7)
CASSPSTTSYEQYF

SEQ ID NO: 2873 - protein, 15 aa, Homo sapiens
  CDR3 for alpha chain variable domain of TCR clone 1437 (TRAV13-1, TRAJ45)
CAASGSGGGADGLTF

SEQ ID NO: 2874 - protein, 14 aa, Homo sapiens
  CDR3 for beta chain variable domain of TCR clone 1437 (TRBV12-4, TRBJ1-2)
CASSFVGTAYGYTF

SEQ ID NO: 2875 - protein, 13 aa, Homo sapiens
  CDR3 for alpha chain variable domain of TCR clone 1438 (TRAV20, TRAJ48)
CAVHLFGNEKLTF

SEQ ID NO: 2876 - protein, 15 aa, Homo sapiens
  CDR3 for beta chain variable domain of TCR clone 1438 (TRBV6-5, TRBJ2-6)
CASSQWEAGANVLTF

SEQ ID NO: 2877 - protein, 16 aa, Homo sapiens
  CDR3 for alpha chain variable domain of TCR clone 1439 (TRAV12-2, TRAJ52)
CRLANAGGTSYGKLTF

SEQ ID NO: 2878 - protein, 13 aa, Homo sapiens
  CDR3 for beta chain variable domain of TCR clone 1439 (TRBV10-3, TRBJ2-7)
CASKLAVNYEQYF

SEQ ID NO: 2879 - protein, 13 aa, Homo sapiens
  CDR3 for alpha chain variable domain of TCR clone 1440 (TRAV2, TRAJ15)
CAVASQAGTALIF

SEQ ID NO: 2880 - protein, 16 aa, Homo sapiens
  CDR3 for beta chain variable domain of TCR clone 1440 (TRBV18, TRBJ1-5)
CASSPYRVEGNQPQHF

SEQ ID NO: 2881 - protein, 13 aa, Homo sapiens
  CDR3 for alpha chain variable domain of TCR clone 1441 (TRAV2, TRAJ40)
CAVVTSGTYKYIF

SEQ ID NO: 2882 - protein, 17 aa, Homo sapiens
  CDR3 for beta chain variable domain of TCR clone 1441 (TRBV7-3, TRBJ2-3)
CASSLMKRMRGADTQYF

SEQ ID NO: 2883 - protein, 14 aa, Homo sapiens
  CDR3 for alpha chain variable domain of TCR clone 1442 (TRAV12-2, TRAJ13)
CAVKKTGGYQKVTF

SEQ ID NO: 2884 - protein, 15 aa, Homo sapiens
  CDR3 for beta chain variable domain of TCR clone 1442 (TRBV9, TRBJ1-6)
CASSVAGTGDSPLHF

SEQ ID NO: 2885 - protein, 13 aa, Homo sapiens
  CDR3 for alpha chain variable domain of TCR clone 1443 (TRAV17, TRAJ9)
CATGSTGGFKTIF

SEQ ID NO: 2886 - protein, 14 aa, Homo sapiens
  CDR3 for beta chain variable domain of TCR clone 1443 (TRBV7-8, TRBJ2-7)
CASTFRGGPNEQYF

SEQ ID NO: 2887 - protein, 12 aa, Homo sapiens
  CDR3 for alpha chain variable domain of TCR clone 1444 (TRAV8-3, TRAJ26)
CAGDNYGQNFVF

SEQ ID NO: 2888 - protein, 12 aa, Homo sapiens
  CDR3 for beta chain variable domain of TCR clone 1444 (TRBV11-2, TRBJ2-2)
CASSLGGGELFF

SEQ ID NO: 2889 - protein, 12 aa, Homo sapiens
  CDR3 for alpha chain variable domain of TCR clone 1445 (TRAV17, TRAJ20)
CATDSNDYKLSF

SEQ ID NO: 2890 - protein, 16 aa, Homo sapiens
  CDR3 for beta chain variable domain of TCR clone 1445 (TRBV7-2, TRBJ1-2)
CASSSNQDRRGHGYTF

SEQ ID NO: 2891 - protein, 14 aa, Homo sapiens
  CDR3 for alpha chain variable domain of TCR clone 1446 (TRAV12-2, TRAJ17)
CAVLFKAAGNKLTF

SEQ ID NO: 2892 - protein, 15 aa, Homo sapiens
  CDR3 for beta chain variable domain of TCR clone 1446 (TRBV20-1, TRBJ2-7)
CSARDRVSGMDEQYF

SEQ ID NO: 2893 - protein, 13 aa, Homo sapiens
  CDR3 for alpha chain variable domain of TCR clone 1447 (TRAV17, TRAJ22)
CAHHSGSARQLTF

SEQ ID NO: 2894 - protein, 16 aa, Homo sapiens
  CDR3 for beta chain variable domain of TCR clone 1447 (TRBV4-1, TRBJ1-2)
CASSQDAGQVLYGYTF

SEQ ID NO: 2895 - protein, 14 aa, Homo sapiens
  CDR3 for alpha chain variable domain of TCR clone 1448 (TRAV12-2, TRAJ13)
CAVKKTGGYQKVTF

SEQ ID NO: 2896 - protein, 12 aa, Homo sapiens
  CDR3 for beta chain variable domain of TCR clone 1448 (TRBV11-2, TRBJ2-2)
CASSLGGGELFF

SEQ ID NO: 2897 - protein, 22 aa, Homo sapiens
  CDR3 for alpha chain variable domain of TCR clone 1449 (TRAV21, )
CAVRQDAGNNHIQNPDPAVYQL

SEQ ID NO: 2898 - protein, 16 aa, Homo sapiens
  CDR3 for beta chain variable domain of TCR clone 1449 (TRBV4-2, TRBJ1-1)
CASRPLDGGGDTEAFF

SEQ ID NO: 2899 - protein, 14 aa, Homo sapiens
  CDR3 for alpha chain variable domain of TCR clone 1450 (TRAV1-2, TRAJ16)
CAVNRFSDGQKLLF

SEQ ID NO: 2900 - protein, 18 aa, Homo sapiens
  CDR3 for beta chain variable domain of TCR clone 1450 (TRBV20-1, TRBJ2-6)
CSAETTPTHGSGANVLTF

SEQ ID NO: 2901 - protein, 15 aa, Homo sapiens
  CDR3 for alpha chain variable domain of TCR clone 1451 (TRAV17, TRAJ54)
CATTRSEQGAQKLVF

SEQ ID NO: 2902 - protein, 16 aa, Homo sapiens
  CDR3 for beta chain variable domain of TCR clone 1451 (TRBV12-4, TRBJ2-3)
CASSLRLAETTDTQYF

SEQ ID NO: 2903 - protein, 15 aa, Homo sapiens
  CDR3 for alpha chain variable domain of TCR clone 1452 (TRAV12-3, TRAJ6)
CAMSATTGGSYIPTF

SEQ ID NO: 2904 - protein, 13 aa, Homo sapiens
  CDR3 for beta chain variable domain of TCR clone 1452 (TRBV7-9, TRBJ1-2)
CASSLKQNYGYTF

SEQ ID NO: 2905 - protein, 16 aa, Homo sapiens
  CDR3 for alpha chain variable domain of TCR clone 1453 (TRAV26-1, TRAJ38)
CIVRVELGGNNRKLIW

SEQ ID NO: 2906 - protein, 14 aa, Homo sapiens
  CDR3 for beta chain variable domain of TCR clone 1453 (TRBV5-1, TRBJ2-3)
CASSPGLAADTQYF

SEQ ID NO: 2907 - protein, 16 aa, Homo sapiens
  CDR3 for alpha chain variable domain of TCR clone 1454 (TRAV3, TRAJ37)
CAVRGKGSGNTGKLIF

SEQ ID NO: 2908 - protein, 15 aa, Homo sapiens
  CDR3 for beta chain variable domain of TCR clone 1454 (TRBV7-9, TRBJ1-6)
CASSSPGRGNSPLHF

SEQ ID NO: 2909 - protein, 16 aa, Homo sapiens
  CDR3 for alpha chain variable domain of TCR clone 1455 (TRAV17, TRAJ36)
CATVSLNWGKQPLLWD

SEQ ID NO: 2910 - protein, 13 aa, Homo sapiens
  CDR3 for beta chain variable domain of TCR clone 1455 (TRBV4-1, TRBJ1-1)
CASSQLGTGEAFF

SEQ ID NO: 2911 - protein, 18 aa, Homo sapiens
  CDR3 for alpha chain variable domain of TCR clone 1456 (TRAV12-2, )
CAVEDIQNPDPAVYQLRD

SEQ ID NO: 2912 - protein, 16 aa, Homo sapiens
  CDR3 for beta chain variable domain of TCR clone 1456 (TRBV6-1, TRBJ1-2)
CASSGAWQGRSHGYTF

SEQ ID NO: 2913 - protein, 14 aa, Homo sapiens
  CDR3 for alpha chain variable domain of TCR clone 1457 (TRAV16, TRAJ42)
CALLAGGSQGNLIF

SEQ ID NO: 2914 - protein, 13 aa, Homo sapiens
  CDR3 for beta chain variable domain of TCR clone 1457 (TRBV7-9, TRBJ1-2)
CASSLKQNYGYTF

SEQ ID NO: 2915 - protein, 12 aa, Homo sapiens
  CDR3 for alpha chain variable domain of TCR clone 1458 (TRAV12-3, TRAJ20)
CAMVRGDYKLSF

SEQ ID NO: 2916 - protein, 13 aa, Homo sapiens
  CDR3 for beta chain variable domain of TCR clone 1458 (TRBV23-1, TRBJ1-4)
CASRGKFNEKLFF

SEQ ID NO: 2917 - protein, 14 aa, Homo sapiens
  CDR3 for alpha chain variable domain of TCR clone 1459 (TRAV16, TRAJ33)
CALSAMDSNYQLIW

SEQ ID NO: 2918 - protein, 16 aa, Homo sapiens
  CDR3 for beta chain variable domain of TCR clone 1459 (TRBV12-4, TRBJ2-3)
CASSFPSNTNTDTQYF

SEQ ID NO: 2919 - protein, 23 aa, Homo sapiens
  CDR3 for alpha chain variable domain of TCR clone 1460 (TRAV30, TRAJ43)
CTLRPPSSVTQEPTSAALSDMRF

SEQ ID NO: 2920 - protein, 13 aa, Homo sapiens
  CDR3 for beta chain variable domain of TCR clone 1460 (TRBV12-4, TRBJ2-2)
CASSITGSGELFF

SEQ ID NO: 2921 - protein, 17 aa, Homo sapiens
  CDR3 for alpha chain variable domain of TCR clone 1461 (TRAV1-2, TRAJ8)
CAVRDPDENTGFQKLVF

SEQ ID NO: 2922 - protein, 16 aa, Homo sapiens
  CDR3 for beta chain variable domain of TCR clone 1461 (TRBV7-9, TRBJ2-2)
CASSGFGGANTGELFF

SEQ ID NO: 2923 - protein, 14 aa, Homo sapiens
  CDR3 for alpha chain variable domain of TCR clone 1462 (TRAV35, TRAJ22)
CAGLRPGSARQLTF

SEQ ID NO: 2924 - protein, 13 aa, Homo sapiens
  CDR3 for beta chain variable domain of TCR clone 1462 (TRBV20-1, TRBJ1-1)
CSARGGGNTEAFF

SEQ ID NO: 2925 - protein, 12 aa, Homo sapiens
  CDR3 for alpha chain variable domain of TCR clone 1463 (TRAV12-3, TRAJ17)
CAMTLTGDKLTF

SEQ ID NO: 2926 - protein, 15 aa, Homo sapiens
  CDR3 for beta chain variable domain of TCR clone 1463 (TRBV20-1, TRBJ2-7)
CSARDRVSGMDEQYF

SEQ ID NO: 2927 - protein, 12 aa, Homo sapiens
  CDR3 for alpha chain variable domain of TCR clone 1464 (TRAV13-1, TRAJ21)
CAAKEGFNKFYF

SEQ ID NO: 2928 - protein, 14 aa, Homo sapiens
  CDR3 for beta chain variable domain of TCR clone 1464 (TRBV18, TRBJ2-7)
CASSPRGGAYEQYF

SEQ ID NO: 2929 - protein, 13 aa, Homo sapiens
  CDR3 for alpha chain variable domain of TCR clone 1465 (TRAV20, TRAJ31)
CAVQAIGGARLMF

SEQ ID NO: 2930 - protein, 14 aa, Homo sapiens
  CDR3 for beta chain variable domain of TCR clone 1465 (TRBV2, TRBJ1-5)
CASSGTVSNQPQHF

SEQ ID NO: 2931 - protein, 18 aa, Homo sapiens
  CDR3 for alpha chain variable domain of TCR clone 1466 (TRAV21, TRAJ52)
CAVRPSPAGGTSYGKLTF

SEQ ID NO: 2932 - protein, 15 aa, Homo sapiens
  CDR3 for beta chain variable domain of TCR clone 1466 (TRBV20-1, TRBJ2-7)
CSARDRVSGMDEQYF

SEQ ID NO: 2933 - protein, 12 aa, Homo sapiens
  CDR3 for alpha chain variable domain of TCR clone 1467 (TRAV12-2, TRAJ45)
CASGGGADGLTF

SEQ ID NO: 2934 - protein, 16 aa, Homo sapiens
  CDR3 for beta chain variable domain of TCR clone 1467 (TRBV19, TRBJ2-3)
CASSPGLLASTDTQYF

SEQ ID NO: 2935 - protein, 15 aa, Homo sapiens
  CDR3 for alpha chain variable domain of TCR clone 1468 (TRAV1-2, TRAJ15)
CAVDVMGSAGTALIF

SEQ ID NO: 2936 - protein, 13 aa, Homo sapiens
  CDR3 for beta chain variable domain of TCR clone 1468 (TRBV20-1, TRBJ1-1)
CSAFDRENTEAFF

SEQ ID NO: 2937 - protein, 14 aa, Homo sapiens
  CDR3 for alpha chain variable domain of TCR clone 1469 (TRAV27, TRAJ12)
CAGARMDSSYKLIF

SEQ ID NO: 2938 - protein, 18 aa, Homo sapiens
  CDR3 for beta chain variable domain of TCR clone 1469 (TRBV10-3, TRBJ2-7)
CAISESGRPSGGRVEQYF

SEQ ID NO: 2939 - protein, 14 aa, Homo sapiens
  CDR3 for alpha chain variable domain of TCR clone 1470 (TRAV8-1, TRAJ5)
CAVRTDTGRRALTF

SEQ ID NO: 2940 - protein, 12 aa, Homo sapiens
  CDR3 for beta chain variable domain of TCR clone 1470 (TRBV11-2, TRBJ2-1)
CASSPGNNEQFF

SEQ ID NO: 2941 - protein, 11 aa, Homo sapiens
  CDR3 for alpha chain variable domain of TCR clone 1471 (TRAV8-2, TRAJ26)
CVVTLLLGSEF

SEQ ID NO: 2942 - protein, 15 aa, Homo sapiens
  CDR3 for beta chain variable domain of TCR clone 1471 (TRBV11-2, TRBJ2-2)
CASSSDRVNAGELFF

SEQ ID NO: 2943 - protein, 14 aa, Homo sapiens
  CDR3 for alpha chain variable domain of TCR clone 1472 (TRAV13-2, TRAJ9)
CAENSFTGGFKTIF

SEQ ID NO: 2944 - protein, 13 aa, Homo sapiens
  CDR3 for beta chain variable domain of TCR clone 1472 (TRBV19, TRBJ2-7)
CASSIDRTYEQYF

SEQ ID NO: 2945 - protein, 13 aa, Homo sapiens
  CDR3 for alpha chain variable domain of TCR clone 1473 (TRAV13-2, TRAJ13)
CADLSGGYQKVTF

SEQ ID NO: 2946 - protein, 15 aa, Homo sapiens
  CDR3 for beta chain variable domain of TCR clone 1473 (TRBV19, TRBJ1-1)
CASSIGGGRNTEAFF

SEQ ID NO: 2947 - protein, 14 aa, Homo sapiens
  CDR3 for alpha chain variable domain of TCR clone 1474 (TRAV8-4, TRAJ38)
CARLNAGNNRKLIW

SEQ ID NO: 2948 - protein, 12 aa, Homo sapiens
  CDR3 for beta chain variable domain of TCR clone 1474 (TRBV6-1, TRBJ2-7)
CASSEPLYEQYF

SEQ ID NO: 2949 - protein, 14 aa, Homo sapiens
  CDR3 for alpha chain variable domain of TCR clone 1475 (TRAV23/DV6, TRAJ27)
CAASRDTNAGKSTF

SEQ ID NO: 2950 - protein, 13 aa, Homo sapiens
  CDR3 for beta chain variable domain of TCR clone 1475 (TRBV20-1, TRBJ1-5)
CSASGRGNQPQHF

SEQ ID NO: 2951 - protein, 12 aa, Homo sapiens
  CDR3 for alpha chain variable domain of TCR clone 1476 (TRAV12-3, TRAJ17)
CAMTLTGNKLTF

SEQ ID NO: 2952 - protein, 15 aa, Homo sapiens
  CDR3 for beta chain variable domain of TCR clone 1476 (TRBV11-2, TRBJ2-2)
CASSSDRVNAGELFF

SEQ ID NO: 2953 - protein, 16 aa, Homo sapiens
  CDR3 for alpha chain variable domain of TCR clone 1477 (TRAV3, TRAJ37)
CAVRGKGSGNTGKLIF

SEQ ID NO: 2954 - protein, 16 aa, Homo sapiens
  CDR3 for beta chain variable domain of TCR clone 1477 (TRBV12-4, TRBJ1-5)
CASSRPVGGSNQPQHF

SEQ ID NO: 2955 - protein, 12 aa, Homo sapiens
  CDR3 for alpha chain variable domain of TCR clone 1478 (TRAV17, TRAJ12)
CAGGDSSYKLIF

SEQ ID NO: 2956 - protein, 12 aa, Homo sapiens
  CDR3 for beta chain variable domain of TCR clone 1478 (TRBV29-1, TRBJ1-1)
CSESDGNTEAFF

SEQ ID NO: 2957 - protein, 15 aa, Homo sapiens
  CDR3 for alpha chain variable domain of TCR clone 1479 (TRAV3, TRAJ3)
CAVRDMSSSASKIIF

SEQ ID NO: 2958 - protein, 14 aa, Homo sapiens
  CDR3 for beta chain variable domain of TCR clone 1479 (TRBV19, TRBJ2-1)
CASPTFVLSGEQFF

SEQ ID NO: 2959 - protein, 13 aa, Homo sapiens
  CDR3 for alpha chain variable domain of TCR clone 1480 (TRAV12-2, TRAJ24)
CAVSTDSWGKLQF

SEQ ID NO: 2960 - protein, 12 aa, Homo sapiens
  CDR3 for beta chain variable domain of TCR clone 1480 (TRBV7-6, TRBJ2-7)
CASSLADSEQYF

SEQ ID NO: 2961 - protein, 12 aa, Homo sapiens
  CDR3 for alpha chain variable domain of TCR clone 1481 (TRAV3, TRAJ20)
CAVRDHDYKLSF

SEQ ID NO: 2962 - protein, 13 aa, Homo sapiens
  CDR3 for beta chain variable domain of TCR clone 1481 (TRBV9, TRBJ2-7)
CASSVGQGGEQYF

SEQ ID NO: 2963 - protein, 15 aa, Homo sapiens
  CDR3 for alpha chain variable domain of TCR clone 1482 (TRAV3, TRAJ7)
CAVRDKDNGNNRLAF

SEQ ID NO: 2964 - protein, 19 aa, Homo sapiens
  CDR3 for beta chain variable domain of TCR clone 1482 (TRBV5-8, TRBJ2-3)
CASSFLGTSGSHRTDTQYF

SEQ ID NO: 2965 - protein, 16 aa, Homo sapiens
  CDR3 for alpha chain variable domain of TCR clone 1483 (TRAV16, TRAJ42)
CARKMNYGGSQGNLIF

SEQ ID NO: 2966 - protein, 13 aa, Homo sapiens
  CDR3 for beta chain variable domain of TCR clone 1483 (TRBV20-1, TRBJ2-7)
CSASPPSSYEQYF

SEQ ID NO: 2967 - protein, 10 aa, Homo sapiens
  CDR3 for alpha chain variable domain of TCR clone 1484 (TRAV12-2, TRAJ41)
CAVTGYALNF

SEQ ID NO: 2968 - protein, 15 aa, Homo sapiens
  CDR3 for beta chain variable domain of TCR clone 1484 (TRBV4-2, TRBJ2-1)
CASSQDVGLAGEQFF

SEQ ID NO: 2969 - protein, 14 aa, Homo sapiens
  CDR3 for alpha chain variable domain of TCR clone 1485 (TRAV12-2, TRAJ13)
CAVKKTGGYQKVTF

SEQ ID NO: 2970 - protein, 11 aa, Homo sapiens
  CDR3 for beta chain variable domain of TCR clone 1485 (TRBV29-1, TRBJ2-5)
CSEDRTGTQYF

SEQ ID NO: 2971 - protein, 13 aa, Homo sapiens
  CDR3 for alpha chain variable domain of TCR clone 1486 (TRAV17, TRAJ15)
CATDARAGTALIF

SEQ ID NO: 2972 - protein, 15 aa, Homo sapiens
  CDR3 for beta chain variable domain of TCR clone 1486 (TRBV20-1, TRBJ2-7)
CSARDRVSGMDEQYF

SEQ ID NO: 2973 - protein, 16 aa, Homo sapiens
  CDR3 for alpha chain variable domain of TCR clone 1487 (TRAV30, TRAJ24)
CGTEIVDADSWGKFQL

SEQ ID NO: 2974 - protein, 14 aa, Homo sapiens
  CDR3 for beta chain variable domain of TCR clone 1487 (TRBV12-5, TRBJ2-5)
CASGSRTHQETQYF

SEQ ID NO: 2975 - protein, 12 aa, Homo sapiens
  CDR3 for alpha chain variable domain of TCR clone 1488 (TRAV12-2, TRAJ52)
IGGGTSYGKLTF

SEQ ID NO: 2976 - protein, 13 aa, Homo sapiens
  CDR3 for beta chain variable domain of TCR clone 1488 (TRBV12-4, TRBJ1-1)
CASSPGTGFEAFF

SEQ ID NO: 2977 - protein, 12 aa, Homo sapiens
  CDR3 for alpha chain variable domain of TCR clone 1489 (TRAV1-2, TRAJ29)
CAVPSGNTPLVF

SEQ ID NO: 2978 - protein, 12 aa, Homo sapiens
  CDR3 for beta chain variable domain of TCR clone 1489 (TRBV7-9, TRBJ2-7)
CASSFGSYEQYF

SEQ ID NO: 2979 - protein, 13 aa, Homo sapiens
  CDR3 for alpha chain variable domain of TCR clone 1490 (TRAV17, TRAJ9)
CATFLTGGFKTIF

SEQ ID NO: 2980 - protein, 16 aa, Homo sapiens
  CDR3 for beta chain variable domain of TCR clone 1490 (TRBV5-7, TRBJ1-4)
CASSPSGGLKTEKLFF

SEQ ID NO: 2981 - protein, 11 aa, Homo sapiens
  CDR3 for alpha chain variable domain of TCR clone 1491 (TRAV21, TRAJ9)
CAVPGGFKTIF

SEQ ID NO: 2982 - protein, 17 aa, Homo sapiens
  CDR3 for beta chain variable domain of TCR clone 1491 (TRBV7-9, TRBJ2-5)
CATSGGARDPVLRARHA

SEQ ID NO: 2983 - protein, 13 aa, Homo sapiens
  CDR3 for alpha chain variable domain of TCR clone 1492 (TRAV12-2, TRAJ42)
CAVKRGSQGNLIF

SEQ ID NO: 2984 - protein, 12 aa, Homo sapiens
  CDR3 for beta chain variable domain of TCR clone 1492 (TRBV5-7, TRBJ1-2)
CASSLVQNGYTF

SEQ ID NO: 2985 - protein, 16 aa, Homo sapiens
  CDR3 for alpha chain variable domain of TCR clone 1493 (TRAV30, TRAJ24)
CGTEIVDADSWGKFQF

SEQ ID NO: 2986 - protein, 15 aa, Homo sapiens
  CDR3 for beta chain variable domain of TCR clone 1493 (TRBV6-3, TRBJ2-7)
CASSSPGTVFYEQYF

SEQ ID NO: 2987 - protein, 14 aa, Homo sapiens
  CDR3 for alpha chain variable domain of TCR clone 1494 (TRAV13-1, TRAJ44)
CAAKATGTASKLTF

SEQ ID NO: 2988 - protein, 12 aa, Homo sapiens
  CDR3 for beta chain variable domain of TCR clone 1494 (TRBV7-8, TRBJ2-7)
CASSLGDREQYF

SEQ ID NO: 2989 - protein, 13 aa, Homo sapiens
  CDR3 for alpha chain variable domain of TCR clone 1495 (TRAV2, TRAJ36)
CAVDQTGANNLFF

SEQ ID NO: 2990 - protein, 12 aa, Homo sapiens
  CDR3 for beta chain variable domain of TCR clone 1495 (TRBV19, TRBJ1-1)
CASMNRYTEAFF

SEQ ID NO: 2991 - protein, 16 aa, Homo sapiens
  CDR3 for alpha chain variable domain of TCR clone 1496 (TRAV35, TRAJ28)
CAGQKYSGAGSYQLTF

SEQ ID NO: 2992 - protein, 13 aa, Homo sapiens
  CDR3 for beta chain variable domain of TCR clone 1496 (TRBV19, TRBJ1-2)
CASSQGQVYGYTF

SEQ ID NO: 2993 - protein, 12 aa, Homo sapiens
  CDR3 for alpha chain variable domain of TCR clone 1497 (TRAV17, TRAJ20)
CATDSNDYKLSF

SEQ ID NO: 2994 - protein, 17 aa, Homo sapiens
  CDR3 for beta chain variable domain of TCR clone 1497 (TRBV5-1, TRBJ2-2)
CASSLAGLSGGTGELFF

SEQ ID NO: 2995 - protein, 10 aa, Homo sapiens
  CDR3 for alpha chain variable domain of TCR clone 1498 (TRAV17, TRAJ36)
CATVAGNLFF

SEQ ID NO: 2996 - protein, 12 aa, Homo sapiens
  CDR3 for beta chain variable domain of TCR clone 1498 (TRBV11-2, TRBJ2-4)
CASSSASGSEYF

SEQ ID NO: 2997 - protein, 17 aa, Homo sapiens
  CDR3 for alpha chain variable domain of TCR clone 1499 (TRAV8-3, TRAJ34)
CAIPGKLIFGTGTRLQV

SEQ ID NO: 2998 - protein, 15 aa, Homo sapiens
  CDR3 for beta chain variable domain of TCR clone 1499 (TRBV5-7, TRBJ2-1)
CASSRRLAGDNEQFF

SEQ ID NO: 2999 - protein, 14 aa, Homo sapiens
  CDR3 for alpha chain variable domain of TCR clone 1500 (TRAV1-2, TRAJ16)
CAVNRFSDGQKLLF

SEQ ID NO: 3000 - protein, 16 aa, Homo sapiens
  CDR3 for beta chain variable domain of TCR clone 1500 (TRBV12-4, TRBJ1-5)
CASSRPVGGSNQPQHF

SEQ ID NO: 3001 - protein, 13 aa, Homo sapiens
  CDR3 for alpha chain variable domain of TCR clone 1501 (TRAV2, TRAJ15)
CAVASQAGTALIF

SEQ ID NO: 3002 - protein, 16 aa, Homo sapiens
  CDR3 for beta chain variable domain of TCR clone 1501 (TRBV20-1, TRBJ1-4)
CSAPGQGLLTNEKLFF

SEQ ID NO: 3003 - protein, 11 aa, Homo sapiens
  CDR3 for alpha chain variable domain of TCR clone 1502 (TRAV21, TRAJ4)
HVSGGYNKLIF

SEQ ID NO: 3004 - protein, 13 aa, Homo sapiens
  CDR3 for beta chain variable domain of TCR clone 1502 (TRBV7-3, TRBJ2-5)
CASSLTAGETQYF

SEQ ID NO: 3005 - protein, 14 aa, Homo sapiens
  CDR3 for alpha chain variable domain of TCR clone 1503 (TRAV12-2, TRAJ13)
CAVKKTGGYQKVTF

SEQ ID NO: 3006 - protein, 14 aa, Homo sapiens
  CDR3 for beta chain variable domain of TCR clone 1503 (TRBV19, TRBJ2-1)
CASPTFVLSGEQFF

SEQ ID NO: 3007 - protein, 15 aa, Homo sapiens
  CDR3 for alpha chain variable domain of TCR clone 1504 (TRAV4, TRAJ10)
CLVGDGSGGGNKLTF

SEQ ID NO: 3008 - protein, 15 aa, Homo sapiens
  CDR3 for beta chain variable domain of TCR clone 1504 (TRBV27, TRBJ2-3)
CASSSLAGVIDTQYF

SEQ ID NO: 3009 - protein, 14 aa, Homo sapiens
  CDR3 for alpha chain variable domain of TCR clone 1505 (TRAV35, TRAJ22)
CAGLRPGSARQLTF

SEQ ID NO: 3010 - protein, 14 aa, Homo sapiens
  CDR3 for beta chain variable domain of TCR clone 1505 (TRBV11-3, TRBJ2-3)
CASSSGQGPDTQYF

SEQ ID NO: 3011 - protein, 15 aa, Homo sapiens
  CDR3 for alpha chain variable domain of TCR clone 1506 (TRAV25, TRAJ10)
CAGPLLTGGGNKLTF

SEQ ID NO: 3012 - protein, 15 aa, Homo sapiens
  CDR3 for beta chain variable domain of TCR clone 1506 (TRBV12-5, TRBJ2-2)
CASGRLGGNTGELFF

SEQ ID NO: 3013 - protein, 14 aa, Homo sapiens
  CDR3 for alpha chain variable domain of TCR clone 1507 (TRAV26-1, TRAJ45)
CIEVTGGGADGLTF

SEQ ID NO: 3014 - protein, 12 aa, Homo sapiens
  CDR3 for beta chain variable domain of TCR clone 1507 (TRBV12-4, TRBJ2-7)
CASSLGGYEQYF

SEQ ID NO: 3015 - protein, 14 aa, Homo sapiens
  CDR3 for alpha chain variable domain of TCR clone 1508 (TRAV12-3, TRAJ41)
CAMSAGNSGYALNF

SEQ ID NO: 3016 - protein, 11 aa, Homo sapiens
  CDR3 for beta chain variable domain of TCR clone 1508 (TRBV7-2, TRBJ2-3)
CASSSSDTQYF

SEQ ID NO: 3017 - protein, 11 aa, Homo sapiens
  CDR3 for alpha chain variable domain of TCR clone 1509 (TRAV1-2, TRAJ20)
CAVANDYKLSF

SEQ ID NO: 3018 - protein, 14 aa, Homo sapiens
  CDR3 for beta chain variable domain of TCR clone 1509 (TRBV7-9, TRBJ1-1)
CASTPLQSYTEAFF

SEQ ID NO: 3019 - protein, 15 aa, Homo sapiens
  CDR3 for alpha chain variable domain of TCR clone 1510 (TRAV4, TRAJ39)
CLVGPNNNAGNMLTF

SEQ ID NO: 3020 - protein, 14 aa, Homo sapiens
  CDR3 for beta chain variable domain of TCR clone 1510 (TRBV19, TRBJ2-7)
CASNFRDTFTGMYF

SEQ ID NO: 3021 - protein, 14 aa, Homo sapiens
  CDR3 for alpha chain variable domain of TCR clone 1511 (TRAV16, TRAJ44)
CALSTTGTASKLTF

SEQ ID NO: 3022 - protein, 14 aa, Homo sapiens
  CDR3 for beta chain variable domain of TCR clone 1511 (TRBV20-1, TRBJ2-7)
CSAISREASYEQYF

SEQ ID NO: 3023 - protein, 14 aa, Homo sapiens
  CDR3 for alpha chain variable domain of TCR clone 1512 (TRAV2, TRAJ9)
CAVEDRSGGFKTIF

SEQ ID NO: 3024 - protein, 12 aa, Homo sapiens
  CDR3 for beta chain variable domain of TCR clone 1512 (TRBV7-9, TRBJ2-7)
CASSLEGYEQYF

SEQ ID NO: 3025 - protein, 11 aa, Homo sapiens
  CDR3 for alpha chain variable domain of TCR clone 1513 (TRAV12-3, TRAJ16)
LTGGDGQKLLF

SEQ ID NO: 3026 - protein, 13 aa, Homo sapiens
  CDR3 for beta chain variable domain of TCR clone 1513 (TRBV12-4, TRBJ1-4)
CASAMGHNEKLFF

SEQ ID NO: 3027 - protein, 15 aa, Homo sapiens
  CDR3 for alpha chain variable domain of TCR clone 1514 (TRAV14/DV4, TRAJ46)
CAMREKKSSGDKLTF

SEQ ID NO: 3028 - protein, 13 aa, Homo sapiens
  CDR3 for beta chain variable domain of TCR clone 1514 (TRBV20-1, TRBJ2-5)
CSAREAFQETQYF

SEQ ID NO: 3029 - protein, 13 aa, Homo sapiens
  CDR3 for alpha chain variable domain of TCR clone 1515 (TRAV17, TRAJ22)
CAHHSGSARQLTF

SEQ ID NO: 3030 - protein, 14 aa, Homo sapiens
  CDR3 for beta chain variable domain of TCR clone 1515 (TRBV16, TRBJ1-1)
CASSQAGPNTEAFF

SEQ ID NO: 3031 - protein, 13 aa, Homo sapiens
  CDR3 for alpha chain variable domain of TCR clone 1516 (TRAV13-1, TRAJ41)
CADAPNSGYALNF

SEQ ID NO: 3032 - protein, 13 aa, Homo sapiens
  CDR3 for beta chain variable domain of TCR clone 1516 (TRBV19, TRBJ2-7)
CASEGTTTYEQYF

SEQ ID NO: 3033 - protein, 12 aa, Homo sapiens
  CDR3 for alpha chain variable domain of TCR clone 1517 (TRAV12-1, TRAJ34)
CVVAGATDKLIF

SEQ ID NO: 3034 - protein, 16 aa, Homo sapiens
  CDR3 for beta chain variable domain of TCR clone 1517 (TRBV7-2, TRBJ1-2)
CASSSNQDRRGHGYTF

SEQ ID NO: 3035 - protein, 17 aa, Homo sapiens
  CDR3 for alpha chain variable domain of TCR clone 1518 (TRAV12-1, TRAJ42)
CVVMRMNYGGSQGNLIF

SEQ ID NO: 3036 - protein, 13 aa, Homo sapiens
  CDR3 for beta chain variable domain of TCR clone 1518 (TRBV7-2, TRBJ1-1)
CASSLARPAEAFF

SEQ ID NO: 3037 - protein, 11 aa, Homo sapiens
  CDR3 for alpha chain variable domain of TCR clone 1519 (TRAV2, TRAJ13)
CASGGYQKVTF

SEQ ID NO: 3038 - protein, 14 aa, Homo sapiens
  CDR3 for beta chain variable domain of TCR clone 1519 (TRBV19, TRBJ2-1)
CASPTFVLSGEQFF

SEQ ID NO: 3039 - protein, 11 aa, Homo sapiens
  CDR3 for alpha chain variable domain of TCR clone 1520 (TRAV21, TRAJ48)
CAVDGNEKLTF

SEQ ID NO: 3040 - protein, 16 aa, Homo sapiens
  CDR3 for beta chain variable domain of TCR clone 1520 (TRBV19, TRBJ2-1)
CASSSKGTRSYNEQFF

SEQ ID NO: 3041 - protein, 11 aa, Homo sapiens
  CDR3 for alpha chain variable domain of TCR clone 1521 (TRAV12-1, TRAJ30)
CVVNGQDKIIF

SEQ ID NO: 3042 - protein, 16 aa, Homo sapiens
  CDR3 for beta chain variable domain of TCR clone 1521 (TRBV24-1, TRBJ2-3)
CATSDAISGITDTQYF

SEQ ID NO: 3043 - protein, 11 aa, Homo sapiens
  CDR3 for alpha chain variable domain of TCR clone 1522 (TRAV35, TRAJ30)
CAGPGDDKIIF

SEQ ID NO: 3044 - protein, 18 aa, Homo sapiens
  CDR3 for beta chain variable domain of TCR clone 1522 (TRBV7-6, TRBJ2-1)
CASSPRTSGMSSYNEQFF

SEQ ID NO: 3045 - protein, 16 aa, Homo sapiens
  CDR3 for alpha chain variable domain of TCR clone 1523 (TRAV30, TRAJ24)
CGTEIVDADSWGKFQF

SEQ ID NO: 3046 - protein, 14 aa, Homo sapiens
  CDR3 for beta chain variable domain of TCR clone 1523 (TRBV7-2, TRBJ1-2)
CASSQTGSTYGYTF

SEQ ID NO: 3047 - protein, 11 aa, Homo sapiens
  CDR3 for alpha chain variable domain of TCR clone 1524 (TRAV27, TRAJ45)
CAGAQEEVLTD

SEQ ID NO: 3048 - protein, 17 aa, Homo sapiens
  CDR3 for beta chain variable domain of TCR clone 1524 (TRBV11-2, TRBJ2-1)
CASSLYPPGVEYNEQFF

SEQ ID NO: 3049 - protein, 14 aa, Homo sapiens
  CDR3 for alpha chain variable domain of TCR clone 1525 (TRAV12-3, TRAJ9)
CAMSPNTGGFKTIF

SEQ ID NO: 3050 - protein, 12 aa, Homo sapiens
  CDR3 for beta chain variable domain of TCR clone 1525 (TRBV11-2, TRBJ2-2)
CASSLGGGELFF

SEQ ID NO: 3051 - protein, 16 aa, Homo sapiens
  CDR3 for alpha chain variable domain of TCR clone 1526 (TRAV21, TRAJ52)
CAVTNAGGTSYGKLTF

SEQ ID NO: 3052 - protein, 17 aa, Homo sapiens
  CDR3 for beta chain variable domain of TCR clone 1526 (TRBV28, TRBJ2-5)
CASSRQGGLAGAETQYF

SEQ ID NO: 3053 - protein, 11 aa, Homo sapiens
  CDR3 for alpha chain variable domain of TCR clone 1527 (TRAV1-1, TRAJ23)
CAVRQGGKLIF

SEQ ID NO: 3054 - protein, 12 aa, Homo sapiens
  CDR3 for beta chain variable domain of TCR clone 1527 (TRBV19, TRBJ1-5)
CASSIAQQPQHF

SEQ ID NO: 3055 - protein, 14 aa, Homo sapiens
  CDR3 for alpha chain variable domain of TCR clone 1528 (TRAV13-1, TRAJ12)
CAASYMDSSYKLIF

SEQ ID NO: 3056 - protein, 13 aa, Homo sapiens
  CDR3 for beta chain variable domain of TCR clone 1528 (TRBV2, TRBJ2-5)
CASSDGIQETQYF

SEQ ID NO: 3057 - protein, 14 aa, Homo sapiens
  CDR3 for alpha chain variable domain of TCR clone 1529 (TRAV13-2, TRAJ22)
CADGTLGSARQLTF

SEQ ID NO: 3058 - protein, 16 aa, Homo sapiens
  CDR3 for beta chain variable domain of TCR clone 1529 (TRBV19, TRBJ2-1)
CASSSKGTRSYNEQFF

SEQ ID NO: 3059 - protein, 12 aa, Homo sapiens
  CDR3 for alpha chain variable domain of TCR clone 1530 (TRAV12-3, TRAJ17)
CAMTLTGNKLTF

SEQ ID NO: 3060 - protein, 12 aa, Homo sapiens
  CDR3 for beta chain variable domain of TCR clone 1530 (TRBV11-2, TRBJ2-7)
CASSLPTYEQYF

SEQ ID NO: 3061 - protein, 15 aa, Homo sapiens
  CDR3 for alpha chain variable domain of TCR clone 1531 (TRAV12-1, TRAJ4)
CVVNPFSGGYNKLIF

SEQ ID NO: 3062 - protein, 16 aa, Homo sapiens
  CDR3 for beta chain variable domain of TCR clone 1531 (TRBV5-1, TRBJ1-1)
CASSKTGTEVGTEAFF

SEQ ID NO: 3063 - protein, 14 aa, Homo sapiens
  CDR3 for alpha chain variable domain of TCR clone 1532 (TRAV16, TRAJ17)
CALSGRAAGNKLTF

SEQ ID NO: 3064 - protein, 17 aa, Homo sapiens
  CDR3 for beta chain variable domain of TCR clone 1532 (TRBV18, TRBJ2-6)
CASSPRQGAVGANVLTF

SEQ ID NO: 3065 - protein, 15 aa, Homo sapiens
  CDR3 for alpha chain variable domain of TCR clone 1533 (TRAV3, TRAJ5)
CAVRDLDTGRRALTF

SEQ ID NO: 3066 - protein, 14 aa, Homo sapiens
  CDR3 for beta chain variable domain of TCR clone 1533 (TRBV25-1, TRBJ1-4)
CASSGGGQPEKLFF

SEQ ID NO: 3067 - protein, 14 aa, Homo sapiens
  CDR3 for alpha chain variable domain of TCR clone 1534 (TRAV26-1, TRAJ21)
CIVRPPYNFNKFYF

SEQ ID NO: 3068 - protein, 14 aa, Homo sapiens
  CDR3 for beta chain variable domain of TCR clone 1534 (TRBV19, TRBJ2-1)
CASPTFVLSGEQFF

SEQ ID NO: 3069 - protein, 18 aa, Homo sapiens
  CDR3 for alpha chain variable domain of TCR clone 1535 (TRAV21, TRAJ52)
CAVRPSPAGGTSYGKLTF

SEQ ID NO: 3070 - protein, 15 aa, Homo sapiens
  CDR3 for beta chain variable domain of TCR clone 1535 (TRBV19, TRBJ1-1)
CASTSGQIQNTEAFF

SEQ ID NO: 3071 - protein, 13 aa, Homo sapiens
  CDR3 for alpha chain variable domain of TCR clone 1536 (TRAV12-2, TRAJ42)
CAVKRGSQGNLIF

SEQ ID NO: 3072 - protein, 16 aa, Homo sapiens
  CDR3 for beta chain variable domain of TCR clone 1536 (TRBV9, TRBJ2-2)
CASSAMGKGNTGELFF

SEQ ID NO: 3073 - protein, 14 aa, Homo sapiens
  CDR3 for alpha chain variable domain of TCR clone 1537 (TRAV12-1, TRAJ30)
CVVNIGGRDDKIIF

SEQ ID NO: 3074 - protein, 15 aa, Homo sapiens
  CDR3 for beta chain variable domain of TCR clone 1537 (TRBV18, TRBJ1-2)
CASSPSNTPNYGYTF

SEQ ID NO: 3075 - protein, 12 aa, Homo sapiens
  CDR3 for alpha chain variable domain of TCR clone 1538 (TRAV1-1, TRAJ39)
CAVPVVGNMLTF

SEQ ID NO: 3076 - protein, 18 aa, Homo sapiens
  CDR3 for beta chain variable domain of TCR clone 1538 (TRBV7-9, TRBJ2-7)
CASSLTTSGSRTWYEQYF

SEQ ID NO: 3077 - protein, 12 aa, Homo sapiens
  CDR3 for alpha chain variable domain of TCR clone 1539 (TRAV25, TRAJ38)
CAGTGNNRKLIW

SEQ ID NO: 3078 - protein, 14 aa, Homo sapiens
  CDR3 for beta chain variable domain of TCR clone 1539 (TRBV19, TRBJ1-5)
CASSKMTGPQPQHF

SEQ ID NO: 3079 - protein, 17 aa, Homo sapiens
  CDR3 for alpha chain variable domain of TCR clone 1540 (TRAV3, TRAJ42)
CAVRDRDYGGSQGNLIF

SEQ ID NO: 3080 - protein, 14 aa, Homo sapiens
  CDR3 for beta chain variable domain of TCR clone 1540 (TRBV25-1, TRBJ1-1)
CASTHLGGNTEAFF

SEQ ID NO: 3081 - protein, 16 aa, Homo sapiens
  CDR3 for alpha chain variable domain of TCR clone 1541 (TRAV30, TRAJ24)
CGTEIVDADSWGKFQF

SEQ ID NO: 3082 - protein, 15 aa, Homo sapiens
  CDR3 for beta chain variable domain of TCR clone 1541 (TRBV20-1, TRBJ2-4)
CSARDLTGGPNIQYF

SEQ ID NO: 3083 - protein, 15 aa, Homo sapiens
  CDR3 for alpha chain variable domain of TCR clone 1542 (TRAV3, TRAJ22)
CAVRDRGGSARQLTF

SEQ ID NO: 3084 - protein, 13 aa, Homo sapiens
  CDR3 for beta chain variable domain of TCR clone 1542 (TRBV7-3, TRBJ2-1)
CASSPVAYNEQFF

SEQ ID NO: 3085 - protein, 12 aa, Homo sapiens
  CDR3 for alpha chain variable domain of TCR clone 1543 (TRAV21, TRAJ12)
CAVMDSSYKLIF

SEQ ID NO: 3086 - protein, 16 aa, Homo sapiens
  CDR3 for beta chain variable domain of TCR clone 1543 (TRBV7-9, TRBJ2-5)
CASRLEIGTRKETQYF

SEQ ID NO: 3087 - protein, 14 aa, Homo sapiens
  CDR3 for alpha chain variable domain of TCR clone 1544 (TRAV12-3, TRAJ5)
CAMSTYTGRRALTF

SEQ ID NO: 3088 - protein, 13 aa, Homo sapiens
  CDR3 for beta chain variable domain of TCR clone 1544 (TRBV28, TRBJ2-3)
CASSTGGGDTQYF

SEQ ID NO: 3089 - protein, 16 aa, Homo sapiens
  CDR3 for alpha chain variable domain of TCR clone 1545 (TRAV30, TRAJ24)
CGTEIVDADSWGKFQF

SEQ ID NO: 3090 - protein, 13 aa, Homo sapiens
  CDR3 for beta chain variable domain of TCR clone 1545 (TRBV20-1, TRBJ1-1)
CSARGGGNTEAFF

SEQ ID NO: 3091 - protein, 14 aa, Homo sapiens
  CDR3 for alpha chain variable domain of TCR clone 1546 (TRAV16, TRAJ31)
CALSGRNNNARLMF

SEQ ID NO: 3092 - protein, 12 aa, Homo sapiens
  CDR3 for beta chain variable domain of TCR clone 1546 (TRBV11-2, TRBJ1-2)
CASSREGDGYTF

SEQ ID NO: 3093 - protein, 12 aa, Homo sapiens
  CDR3 for alpha chain variable domain of TCR clone 1547 (TRAV8-3, TRAJ26)
CAGDNYGQNFVF

SEQ ID NO: 3094 - protein, 13 aa, Homo sapiens
  CDR3 for beta chain variable domain of TCR clone 1547 (TRBV20-1, TRBJ1-1)
CSAPLGGGTEAFF

SEQ ID NO: 3095 - protein, 12 aa, Homo sapiens
  CDR3 for alpha chain variable domain of TCR clone 1548 (TRAV12-1, TRAJ6)
CVVSERSYIPTF

SEQ ID NO: 3096 - protein, 21 aa, Homo sapiens
  CDR3 for beta chain variable domain of TCR clone 1548 (TRBV7-3, TRBJ2-1)
GGTQPCISVPAAYGLAGAQFF

SEQ ID NO: 3097 - protein, 13 aa, Homo sapiens
  CDR3 for alpha chain variable domain of TCR clone 1549 (TRAV20, TRAJ34)
CAVRSYNTDKLIF

SEQ ID NO: 3098 - protein, 12 aa, Homo sapiens
  CDR3 for beta chain variable domain of TCR clone 1549 (TRBV11-2, TRBJ2-1)
CASSPGNNEQFF

SEQ ID NO: 3099 - protein, 11 aa, Homo sapiens
  CDR3 for alpha chain variable domain of TCR clone 1550 (TRAV4, TRAJ20)
CLVGDKVTTTS

SEQ ID NO: 3100 - protein, 15 aa, Homo sapiens
  CDR3 for beta chain variable domain of TCR clone 1550 (TRBV18, TRBJ2-7)
CASSPSSTGNYEQYF

SEQ ID NO: 3101 - protein, 16 aa, Homo sapiens
  CDR3 for alpha chain variable domain of TCR clone 1551 (TRAV35, TRAJ28)
CAGQKYSGAGSYQLTF

SEQ ID NO: 3102 - protein, 16 aa, Homo sapiens
  CDR3 for beta chain variable domain of TCR clone 1551 (TRBV7-3, TRBJ2-2)
CASSLKRGTLSGELFF

SEQ ID NO: 3103 - protein, 12 aa, Homo sapiens
  CDR3 for alpha chain variable domain of TCR clone 1552 (TRAV12-3, TRAJ17)
CAMTLTGNKLTF

SEQ ID NO: 3104 - protein, 15 aa, Homo sapiens
  CDR3 for beta chain variable domain of TCR clone 1552 (TRBV12-4, TRBJ2-5)
CASSPPTGLQETQYF

SEQ ID NO: 3105 - protein, 13 aa, Homo sapiens
  CDR3 for alpha chain variable domain of TCR clone 1553 (TRAV3, TRAJ27)
CAVRPLGAGKSTF

SEQ ID NO: 3106 - protein, 12 aa, Homo sapiens
  CDR3 for beta chain variable domain of TCR clone 1553 (TRBV7-9, TRBJ2-7)
CATRTDAYEQYF

SEQ ID NO: 3107 - protein, 14 aa, Homo sapiens
  CDR3 for alpha chain variable domain of TCR clone 1554 (TRAV1-1, TRAJ23)
CAVSIYNQGGKLIF

SEQ ID NO: 3108 - protein, 15 aa, Homo sapiens
  CDR3 for beta chain variable domain of TCR clone 1554 (TRBV5-8, TRBJ2-2)
CASSLDRGATGELFF

SEQ ID NO: 3109 - protein, 11 aa, Homo sapiens
  CDR3 for alpha chain variable domain of TCR clone 1555 (TRAV12-1, TRAJ21)
CVVNNFNKFYF

SEQ ID NO: 3110 - protein, 17 aa, Homo sapiens
  CDR3 for beta chain variable domain of TCR clone 1555 (TRBV7-8, TRBJ2-1)
CASSPPTGTLAYNEQFF

SEQ ID NO: 3111 - protein, 14 aa, Homo sapiens
  CDR3 for alpha chain variable domain of TCR clone 1556 (TRAV12-2, TRAJ13)
CAVKKTGGYQKVTF

SEQ ID NO: 3112 - protein, 17 aa, Homo sapiens
  CDR3 for beta chain variable domain of TCR clone 1556 (TRBV20-1, TRBJ2-2)
CSASGSGQGGLTGELFF

SEQ ID NO: 3113 - protein, 15 aa, Homo sapiens
  CDR3 for alpha chain variable domain of TCR clone 1557 (TRAV8-6, TRAJ10)
CAVSDQAGGGNKLTF

SEQ ID NO: 3114 - protein, 15 aa, Homo sapiens
  CDR3 for beta chain variable domain of TCR clone 1557 (TRBV3-1, TRBJ2-5)
CASSANLGGPETQYF

SEQ ID NO: 3115 - protein, 14 aa, Homo sapiens
  CDR3 for alpha chain variable domain of TCR clone 1558 (TRAV1-2, TRAJ8)
CAVREDTGFQKLVF

SEQ ID NO: 3116 - protein, 15 aa, Homo sapiens
  CDR3 for beta chain variable domain of TCR clone 1558 (TRBV27, TRBJ2-1)
CASSNGGGSSNEQFF

SEQ ID NO: 3117 - protein, 15 aa, Homo sapiens
  CDR3 for alpha chain variable domain of TCR clone 1559 (TRAV8-3, TRAJ44)
CAVGAGAGTASKLTF

SEQ ID NO: 3118 - protein, 12 aa, Homo sapiens
  CDR3 for beta chain variable domain of TCR clone 1559 (TRBV7-8, TRBJ2-4)
CASSLGGNIQYF

SEQ ID NO: 3119 - protein, 13 aa, Homo sapiens
  CDR3 for alpha chain variable domain of TCR clone 1560 (TRAV39, TRAJ33)
CAANPDSNYQLIW

SEQ ID NO: 3120 - protein, 13 aa, Homo sapiens
  CDR3 for beta chain variable domain of TCR clone 1560 (TRBV18, TRBJ1-1)
CASSGGRNTEAFF

SEQ ID NO: 3121 - protein, 13 aa, Homo sapiens
  CDR3 for alpha chain variable domain of TCR clone 1561 (TRAV12-2, TRAJ50)
CAVIVTSYDKVIF

SEQ ID NO: 3122 - protein, 14 aa, Homo sapiens
  CDR3 for beta chain variable domain of TCR clone 1561 (TRBV9, TRBJ2-1)
CASSVDPRGKEQFF

SEQ ID NO: 3123 - protein, 13 aa, Homo sapiens
  CDR3 for alpha chain variable domain of TCR clone 1562 (TRAV2, TRAJ15)
CAVASQAGTALIF

SEQ ID NO: 3124 - protein, 15 aa, Homo sapiens
  CDR3 for beta chain variable domain of TCR clone 1562 (TRBV7-3, TRBJ2-2)
CASSETGQGTGELFF

SEQ ID NO: 3125 - protein, 12 aa, Homo sapiens
  CDR3 for alpha chain variable domain of TCR clone 1563 (TRAV8-3, TRAJ26)
CAGDNYGQNFVF

SEQ ID NO: 3126 - protein, 11 aa, Homo sapiens
  CDR3 for beta chain variable domain of TCR clone 1563 (TRBV29-1, TRBJ2-5)
CSEDRTGTQYF

SEQ ID NO: 3127 - protein, 14 aa, Homo sapiens
  CDR3 for alpha chain variable domain of TCR clone 1564 (TRAV1-2, TRAJ8)
CAVREDTGFQKLVF

SEQ ID NO: 3128 - protein, 14 aa, Homo sapiens
  CDR3 for beta chain variable domain of TCR clone 1564 (TRBV15, TRBJ2-3)
CATRSGTSTDTQYF

SEQ ID NO: 3129 - protein, 15 aa, Homo sapiens
  CDR3 for alpha chain variable domain of TCR clone 1565 (TRAV21, TRAJ24)
CAARSSTDSWGKLQF

SEQ ID NO: 3130 - protein, 11 aa, Homo sapiens
  CDR3 for beta chain variable domain of TCR clone 1565 (TRBV11-2, TRBJ2-2)
CASSLPGELFF

SEQ ID NO: 3131 - protein, 16 aa, Homo sapiens
  CDR3 for alpha chain variable domain of TCR clone 1566 (TRAV16, TRAJ52)
CALSAAGGTSYGKLTF

SEQ ID NO: 3132 - protein, 16 aa, Homo sapiens
  CDR3 for beta chain variable domain of TCR clone 1566 (TRBV12-4, TRBJ1-5)
CASSRPVGGSNQPQHF

SEQ ID NO: 3133 - protein, 13 aa, Homo sapiens
  CDR3 for alpha chain variable domain of TCR clone 1567 (TRAV21, TRAJ27)
CAARPGNAGKSTF

SEQ ID NO: 3134 - protein, 15 aa, Homo sapiens
  CDR3 for beta chain variable domain of TCR clone 1567 (TRBV2, TRBJ2-3)
CASSDAGGPPDTQYF

SEQ ID NO: 3135 - protein, 11 aa, Homo sapiens
  CDR3 for alpha chain variable domain of TCR clone 1568 (TRAV17, TRAJ49)
CATNTGNQFYF

SEQ ID NO: 3136 - protein, 12 aa, Homo sapiens
  CDR3 for beta chain variable domain of TCR clone 1568 (TRBV2, TRBJ2-7)
CASSGGSGIPYF

SEQ ID NO: 3137 - protein, 17 aa, Homo sapiens
  CDR3 for alpha chain variable domain of TCR clone 1569 (TRAV13-1, TRAJ5)
CSNPSLSRDTGRRALTF

SEQ ID NO: 3138 - protein, 17 aa, Homo sapiens
  CDR3 for beta chain variable domain of TCR clone 1569 (TRBV24-1, TRBJ2-1)
CATSDVSTSGTYNEQFF

SEQ ID NO: 3139 - protein, 14 aa, Homo sapiens
  CDR3 for alpha chain variable domain of TCR clone 1570 (TRAV12-2, TRAJ40)
CAVKIPSGTYKYIF

SEQ ID NO: 3140 - protein, 14 aa, Homo sapiens
  CDR3 for beta chain variable domain of TCR clone 1570 (TRBV7-8, TRBJ2-7)
CASSPRDRVYEQYF

SEQ ID NO: 3141 - protein, 15 aa, Homo sapiens
  CDR3 for alpha chain variable domain of TCR clone 1571 (TRAV12-1, TRAJ4)
CVVNPFSGGYNKLIF

SEQ ID NO: 3142 - protein, 13 aa, Homo sapiens
  CDR3 for beta chain variable domain of TCR clone 1571 (TRBV20-1, TRBJ1-2)
CSARGTADYGYTF

SEQ ID NO: 3143 - protein, 12 aa, Homo sapiens
  CDR3 for alpha chain variable domain of TCR clone 1572 (TRAV8-3, TRAJ41)
CAVGALGYALNF

SEQ ID NO: 3144 - protein, 16 aa, Homo sapiens
  CDR3 for beta chain variable domain of TCR clone 1572 (TRBV7-6, TRBJ2-3)
CASSDSRGEGTDTQYF

SEQ ID NO: 3145 - protein, 14 aa, Homo sapiens
  CDR3 for alpha chain variable domain of TCR clone 1573 (TRAV20, TRAJ10)
CAVRVEGGGNKLTF

SEQ ID NO: 3146 - protein, 13 aa, Homo sapiens
  CDR3 for beta chain variable domain of TCR clone 1573 (TRBV13, TRBJ2-2)
CASSPGLTGELFF

SEQ ID NO: 3147 - protein, 10 aa, Homo sapiens
  CDR3 for alpha chain variable domain of TCR clone 1574 (TRAV8-3, TRAJ43)
CAVALADMRF

SEQ ID NO: 3148 - protein, 14 aa, Homo sapiens
  CDR3 for beta chain variable domain of TCR clone 1574 (TRBV4-2, TRBJ2-1)
CASGLDRAYNEQFF

SEQ ID NO: 3149 - protein, 13 aa, Homo sapiens
  CDR3 for alpha chain variable domain of TCR clone 1575 (TRAV13-1, TRAJ9)
CAARGTGGFKTIF

SEQ ID NO: 3150 - protein, 12 aa, Homo sapiens
  CDR3 for beta chain variable domain of TCR clone 1575 (TRBV2, TRBJ2-1)
CAYGPPGNEQFF

SEQ ID NO: 3151 - protein, 13 aa, Homo sapiens
  CDR3 for alpha chain variable domain of TCR clone 1576 (TRAV27, TRAJ42)
CAGARGSQGNLIF

SEQ ID NO: 3152 - protein, 14 aa, Homo sapiens
  CDR3 for beta chain variable domain of TCR clone 1576 (TRBV20-1, TRBJ1-1)
CSAQTRIGGTEAFF

SEQ ID NO: 3153 - protein, 11 aa, Homo sapiens
  CDR3 for alpha chain variable domain of TCR clone 1577 (TRAV21, TRAJ34)
CAHYNTDKLIF

SEQ ID NO: 3154 - protein, 11 aa, Homo sapiens
  CDR3 for beta chain variable domain of TCR clone 1577 (TRBV29-1, TRBJ2-5)
CSEDRTGTQYF

SEQ ID NO: 3155 - protein, 14 aa, Homo sapiens
  CDR3 for alpha chain variable domain of TCR clone 1578 (TRAV12-2, TRAJ13)
CAVKKTGGYQKVTF

SEQ ID NO: 3156 - protein, 14 aa, Homo sapiens
  CDR3 for beta chain variable domain of TCR clone 1578 (TRBV7-2, TRBJ2-7)
CASSPKTSFYEQYF

SEQ ID NO: 3157 - protein, 12 aa, Homo sapiens
  CDR3 for alpha chain variable domain of TCR clone 1579 (TRAV20, TRAJ33)
CAVRGSNYQLIW

SEQ ID NO: 3158 - protein, 13 aa, Homo sapiens
  CDR3 for beta chain variable domain of TCR clone 1579 (TRBV4-3, TRBJ1-1)
CASSPTGNTEAFF

SEQ ID NO: 3159 - protein, 14 aa, Homo sapiens
  CDR3 for alpha chain variable domain of TCR clone 1580 (TRAV1-2, TRAJ16)
CAVNRFSDGQKLLF

SEQ ID NO: 3160 - protein, 12 aa, Homo sapiens
  CDR3 for beta chain variable domain of TCR clone 1580 (TRBV11-2, TRBJ2-1)
CASSPGNNEQFF

SEQ ID NO: 3161 - protein, 14 aa, Homo sapiens
  CDR3 for alpha chain variable domain of TCR clone 1581 (TRAV26-1, TRAJ38)
CIADNAGNNRKLIW

SEQ ID NO: 3162 - protein, 15 aa, Homo sapiens
  CDR3 for beta chain variable domain of TCR clone 1581 (TRBV7-6, TRBJ1-4)
CASSLGAGAGEKLFF

SEQ ID NO: 3163 - protein, 12 aa, Homo sapiens
  CDR3 for alpha chain variable domain of TCR clone 1582 (TRAV13-2, TRAJ8)
CAPWLGFQKLVF

SEQ ID NO: 3164 - protein, 14 aa, Homo sapiens
  CDR3 for beta chain variable domain of TCR clone 1582 (TRBV18, TRBJ1-5)
CASSRQQRNQPQHF

SEQ ID NO: 3165 - protein, 14 aa, Homo sapiens
  CDR3 for alpha chain variable domain of TCR clone 1583 (TRAV4, TRAJ43)
CLVGPMYNNNDMRF

SEQ ID NO: 3166 - protein, 21 aa, Homo sapiens
  CDR3 for beta chain variable domain of TCR clone 1583 (TRBV11-1, TRBJ2-1)
CASSARERLRPEGPSYNEQFF

SEQ ID NO: 3167 - protein, 16 aa, Homo sapiens
  CDR3 for alpha chain variable domain of TCR clone 1584 (TRAV30, TRAJ24)
CGTEIVDADSWGKFQF

SEQ ID NO: 3168 - protein, 16 aa, Homo sapiens
  CDR3 for beta chain variable domain of TCR clone 1584 (TRBV6-1, TRBJ2-1)
CASILRQGSSYNEQFF

SEQ ID NO: 3169 - protein, 14 aa, Homo sapiens
  CDR3 for alpha chain variable domain of TCR clone 1585 (TRAV16, TRAJ42)
CALLAGGSQGNLIF

SEQ ID NO: 3170 - protein, 15 aa, Homo sapiens
  CDR3 for beta chain variable domain of TCR clone 1585 (TRBV2, TRBJ2-7)
CASSEGLARSYEQYF

SEQ ID NO: 3171 - protein, 16 aa, Homo sapiens
  CDR3 for alpha chain variable domain of TCR clone 1586 (TRAV26-1, TRAJ23)
CIVRVERYNQGGKLIF

SEQ ID NO: 3172 - protein, 15 aa, Homo sapiens
  CDR3 for beta chain variable domain of TCR clone 1586 (TRBV18, TRBJ2-7)
CASSPRGGKGYEQYF

SEQ ID NO: 3173 - protein, 11 aa, Homo sapiens
  CDR3 for alpha chain variable domain of TCR clone 1587 (TRAV1-1, TRAJ20)
CAVFNDYKLSF

SEQ ID NO: 3174 - protein, 16 aa, Homo sapiens
  CDR3 for beta chain variable domain of TCR clone 1587 (TRBV29-1, TRBJ2-2)
CSVEKTSEGNTGELFF

SEQ ID NO: 3175 - protein, 12 aa, Homo sapiens
  CDR3 for alpha chain variable domain of TCR clone 1588 (TRAV12-3, TRAJ17)
CAMTLTGNKLTF

SEQ ID NO: 3176 - protein, 16 aa, Homo sapiens
  CDR3 for beta chain variable domain of TCR clone 1588 (TRBV19, TRBJ2-1)
CASSKAGPSSYNEQFF

SEQ ID NO: 3177 - protein, 16 aa, Homo sapiens
  CDR3 for alpha chain variable domain of TCR clone 1589 (TRAV30, TRAJ24)
CGTEIVDADSWGKFQF

SEQ ID NO: 3178 - protein, 13 aa, Homo sapiens
  CDR3 for beta chain variable domain of TCR clone 1589 (TRBV10-3, TRBJ2-7)
CASKLAVNYEQYF

SEQ ID NO: 3179 - protein, 15 aa, Homo sapiens
  CDR3 for alpha chain variable domain of TCR clone 1590 (TRAV20, TRAJ50)
CAVRQMKTSYDKVIF

SEQ ID NO: 3180 - protein, 17 aa, Homo sapiens
  CDR3 for beta chain variable domain of TCR clone 1590 (TRBV28, TRBJ2-7)
CASSPLHRASGVYEQYF

SEQ ID NO: 3181 - protein, 14 aa, Homo sapiens
  CDR3 for alpha chain variable domain of TCR clone 1591 (TRAV12-3, TRAJ10)
SHLPLTGGGNKLTF

SEQ ID NO: 3182 - protein, 13 aa, Homo sapiens
  CDR3 for beta chain variable domain of TCR clone 1591 (TRBV27, TRBJ1-1)
CASSLSIGAEAFF

SEQ ID NO: 3183 - protein, 14 aa, Homo sapiens
  CDR3 for alpha chain variable domain of TCR clone 1592 (TRAV12-3, TRAJ10)
SHLPLTGGGNKLTF

SEQ ID NO: 3184 - protein, 11 aa, Homo sapiens
  CDR3 for beta chain variable domain of TCR clone 1592 (TRBV19, TRBJ1-1)
CASSIGSEAFF

SEQ ID NO: 3185 - protein, 15 aa, Homo sapiens
  CDR3 for alpha chain variable domain of TCR clone 1593 (TRAV17, TRAJ56)
CATEPFTGANSKLTF

SEQ ID NO: 3186 - protein, 14 aa, Homo sapiens
  CDR3 for beta chain variable domain of TCR clone 1593 (TRBV19, TRBJ2-1)
CASPTFVLSGEQFF

SEQ ID NO: 3187 - protein, 17 aa, Homo sapiens
  CDR3 for alpha chain variable domain of TCR clone 1594 (TRAV3, TRAJ38)
CAVRDCLNAGNNRKLIW

SEQ ID NO: 3188 - protein, 15 aa, Homo sapiens
  CDR3 for beta chain variable domain of TCR clone 1594 (TRBV27, TRBJ2-1)
CASSNGGGSSNEQFF

SEQ ID NO: 3189 - protein, 13 aa, Homo sapiens
  CDR3 for alpha chain variable domain of TCR clone 1595 (TRAV13-1, TRAJ4)
CAASIGGYNKLIF

SEQ ID NO: 3190 - protein, 16 aa, Homo sapiens
  CDR3 for beta chain variable domain of TCR clone 1595 (TRBV20-1, TRBJ2-1)
CSAPGLAGSYSDEQFF

SEQ ID NO: 3191 - protein, 12 aa, Homo sapiens
  CDR3 for alpha chain variable domain of TCR clone 1596 (TRAV12-3, TRAJ17)
CAMTLTGNKLTF

SEQ ID NO: 3192 - protein, 14 aa, Homo sapiens
  CDR3 for beta chain variable domain of TCR clone 1596 (TRBV19, TRBJ2-1)
CASPTFVLSGEQFF

SEQ ID NO: 3193 - protein, 12 aa, Homo sapiens
  CDR3 for alpha chain variable domain of TCR clone 1597 (TRAV12-3, TRAJ17)
CAMTLTGNKLTF

SEQ ID NO: 3194 - protein, 15 aa, Homo sapiens
  CDR3 for beta chain variable domain of TCR clone 1597 (TRBV20-1, TRBJ2-7)
CSARDRVSGMDEQCF

SEQ ID NO: 3195 - protein, 13 aa, Homo sapiens
  CDR3 for alpha chain variable domain of TCR clone 1598 (TRAV17, TRAJ34)
CATDLYNTDKLIF

SEQ ID NO: 3196 - protein, 15 aa, Homo sapiens
  CDR3 for beta chain variable domain of TCR clone 1598 (TRBV20-1, TRBJ2-3)
CSATGTSGFTDTQYF

SEQ ID NO: 3197 - protein, 13 aa, Homo sapiens
  CDR3 for alpha chain variable domain of TCR clone 1599 (TRAV17, TRAJ7)
CATDNYGNNRLAF

SEQ ID NO: 3198 - protein, 16 aa, Homo sapiens
  CDR3 for beta chain variable domain of TCR clone 1599 (TRBV4-1, TRBJ2-5)
CASSQAIAASSATQYF

SEQ ID NO: 3199 - protein, 13 aa, Homo sapiens
  CDR3 for alpha chain variable domain of TCR clone 1600 (TRAV13-1, TRAJ10)
CAATAGGGNKLTF

SEQ ID NO: 3200 - protein, 14 aa, Homo sapiens
  CDR3 for beta chain variable domain of TCR clone 1600 (TRBV12-4, TRBJ2-7)
CASSPAGLKYEQYF

SEQ ID NO: 3201 - protein, 11 aa, Homo sapiens
  CDR3 for alpha chain variable domain of TCR clone 1601 (TRAV30, TRAJ23)
CGTEIAGKLIF

SEQ ID NO: 3202 - protein, 16 aa, Homo sapiens
  CDR3 for beta chain variable domain of TCR clone 1601 (TRBV7-2, TRBJ2-7)
CASTSQAASGGYEQYF

SEQ ID NO: 3203 - protein, 14 aa, Homo sapiens
  CDR3 for alpha chain variable domain of TCR clone 1602 (TRAV12-1, TRAJ17)
CVVNFKAAGNKLTF

SEQ ID NO: 3204 - protein, 17 aa, Homo sapiens
  CDR3 for beta chain variable domain of TCR clone 1602 (TRBV20-1, TRBJ2-1)
CSASASGLAGSYNEQFF

SEQ ID NO: 3205 - protein, 16 aa, Homo sapiens
  CDR3 for alpha chain variable domain of TCR clone 1603 (TRAV12-2, TRAJ28)
CAVITDSGAGSYQLTF

SEQ ID NO: 3206 - protein, 12 aa, Homo sapiens
  CDR3 for beta chain variable domain of TCR clone 1603 (TRBV9, TRBJ2-2)
CASSLVTGELFF

SEQ ID NO: 3207 - protein, 15 aa, Homo sapiens
  CDR3 for alpha chain variable domain of TCR clone 1604 (TRAV26-1, TRAJ42)
FIVRVKGGSQGNLIF

SEQ ID NO: 3208 - protein, 14 aa, Homo sapiens
  CDR3 for beta chain variable domain of TCR clone 1604 (TRBV19, TRBJ2-2)
CATTGHANTGELFF

SEQ ID NO: 3209 - protein, 16 aa, Homo sapiens
  CDR3 for alpha chain variable domain of TCR clone 1605 (TRAV30, TRAJ24)
CGTEIVDADSWGKFQF

SEQ ID NO: 3210 - protein, 17 aa, Homo sapiens
  CDR3 for beta chain variable domain of TCR clone 1605 (TRBV20-1, TRBJ2-2)
CSASGSGQGGLTGELFF

SEQ ID NO: 3211 - protein, 15 aa, Homo sapiens
  CDR3 for alpha chain variable domain of TCR clone 1606 (TRAV41, TRAJ45)
CAASYSGGGADGLTF

SEQ ID NO: 3212 - protein, 14 aa, Homo sapiens
  CDR3 for beta chain variable domain of TCR clone 1606 (TRBV12-5, TRBJ2-5)
CASGSRTHQETQYF

SEQ ID NO: 3213 - protein, 12 aa, Homo sapiens
  CDR3 for alpha chain variable domain of TCR clone 1607 (TRAV2, TRAJ31)
CAVEEGNARLMF

SEQ ID NO: 3214 - protein, 18 aa, Homo sapiens
  CDR3 for beta chain variable domain of TCR clone 1607 (TRBV7-9, TRBJ2-3)
CASSLDLAGLATPDTQYF

SEQ ID NO: 3215 - protein, 12 aa, Homo sapiens
  CDR3 for alpha chain variable domain of TCR clone 1608 (TRAV1-1, TRAJ30)
CAVRGRDDKIIF

SEQ ID NO: 3216 - protein, 13 aa, Homo sapiens
  CDR3 for beta chain variable domain of TCR clone 1608 (TRBV11-3, TRBJ2-7)
CASSLDKLYEQYF

SEQ ID NO: 3217 - protein, 15 aa, Homo sapiens
  CDR3 for alpha chain variable domain of TCR clone 1609 (TRAV3, TRAJ3)
CAVRDGHSSASKIIF

SEQ ID NO: 3218 - protein, 17 aa, Homo sapiens
  CDR3 for beta chain variable domain of TCR clone 1609 (TRBV25-1, TRBJ2-7)
CASSDARVVFSSYEQYF

SEQ ID NO: 3219 - protein, 13 aa, Homo sapiens
  CDR3 for alpha chain variable domain of TCR clone 1610 (TRAV30, TRAJ39)
CGTEKNAGNMLTF

SEQ ID NO: 3220 - protein, 12 aa, Homo sapiens
  CDR3 for beta chain variable domain of TCR clone 1610 (TRBV12-4, TRBJ2-5)
CASSSAQETQYF

SEQ ID NO: 3221 - protein, 13 aa, Homo sapiens
  CDR3 for alpha chain variable domain of TCR clone 1611 (TRAV1-2, TRAJ36)
CAVDQTGANNLFF

SEQ ID NO: 3222 - protein, 14 aa, Homo sapiens
  CDR3 for beta chain variable domain of TCR clone 1611 (TRBV20-1, TRBJ2-5)
CSAREMTKQETQYF

SEQ ID NO: 3223 - protein, 12 aa, Homo sapiens
  CDR3 for alpha chain variable domain of TCR clone 1612 (TRAV27, TRAJ35)
CAGADFGNVLHC

SEQ ID NO: 3224 - protein, 15 aa, Homo sapiens
  CDR3 for beta chain variable domain of TCR clone 1612 (TRBV20-1, TRBJ2-7)
CSARDRVSGMDEQYF

SEQ ID NO: 3225 - protein, 11 aa, Homo sapiens
  CDR3 for alpha chain variable domain of TCR clone 1613 (TRAV3, TRAJ17)
PRGAAGNKLTF

SEQ ID NO: 3226 - protein, 12 aa, Homo sapiens
  CDR3 for beta chain variable domain of TCR clone 1613 (TRBV11-2, TRBJ2-2)
CASSLGGGELFF

SEQ ID NO: 3227 - protein, 14 aa, Homo sapiens
  CDR3 for alpha chain variable domain of TCR clone 1614 (TRAV13-1, TRAJ9)
CAASALTGGFKTIF

SEQ ID NO: 3228 - protein, 16 aa, Homo sapiens
  CDR3 for beta chain variable domain of TCR clone 1614 (TRBV7-8, TRBJ2-4)
CASSAERTLAKNIQYF

SEQ ID NO: 3229 - protein, 13 aa, Homo sapiens
  CDR3 for alpha chain variable domain of TCR clone 1615 (TRAV30, TRAJ49)
CGTEPNTGNQFYF

SEQ ID NO: 3230 - protein, 14 aa, Homo sapiens
  CDR3 for beta chain variable domain of TCR clone 1615 (TRBV29-1, TRBJ2-1)
CSVEFRGIPFEQFF

SEQ ID NO: 3231 - protein, 16 aa, Homo sapiens
  CDR3 for alpha chain variable domain of TCR clone 1616 (TRAV13-1, TRAJ45)
CAARGSRKGGADGLTF

SEQ ID NO: 3232 - protein, 13 aa, Homo sapiens
  CDR3 for beta chain variable domain of TCR clone 1616 (TRBV12-4, TRBJ2-5)
CASRKRGKETQYF

SEQ ID NO: 3233 - protein, 12 aa, Homo sapiens
  CDR3 for alpha chain variable domain of TCR clone 1617 (TRAV13-2, TRAJ23)
CAERHRGGKLIF

SEQ ID NO: 3234 - protein, 16 aa, Homo sapiens
  CDR3 for beta chain variable domain of TCR clone 1617 (TRBV7-2, TRBJ2-6)
CAILSGVSSGANVLTF

SEQ ID NO: 3235 - protein, 13 aa, Homo sapiens
  CDR3 for alpha chain variable domain of TCR clone 1618 (TRAV12-3, TRAJ33)
CAMSVNSNYQLIW

SEQ ID NO: 3236 - protein, 12 aa, Homo sapiens
  CDR3 for beta chain variable domain of TCR clone 1618 (TRBV11-2, TRBJ2-2)
CASSLGGGELFF

SEQ ID NO: 3237 - protein, 14 aa, Homo sapiens
  CDR3 for alpha chain variable domain of TCR clone 1619 (TRAV8-4, TRAJ8)
CAVSLNTGFQKLVF

SEQ ID NO: 3238 - protein, 13 aa, Homo sapiens
  CDR3 for beta chain variable domain of TCR clone 1619 (TRBV7-9, TRBJ2-3)
CASSPGSTDTQYF

SEQ ID NO: 3239 - protein, 16 aa, Homo sapiens
  CDR3 for alpha chain variable domain of TCR clone 1620 (TRAV3, TRAJ13)
CAVRDPNSGGYQKVTF

SEQ ID NO: 3240 - protein, 13 aa, Homo sapiens
  CDR3 for beta chain variable domain of TCR clone 1620 (TRBV7-9, TRBJ2-7)
CASSLQGSYEQYF

SEQ ID NO: 3241 - protein, 13 aa, Homo sapiens
  CDR3 for alpha chain variable domain of TCR clone 1621 (TRAV27, TRAJ45)
CRSSGGGADGLTF

SEQ ID NO: 3242 - protein, 15 aa, Homo sapiens
  CDR3 for beta chain variable domain of TCR clone 1621 (TRBV20-1, TRBJ2-7)
CSARDRVSGMDEQYF

SEQ ID NO: 3243 - protein, 12 aa, Homo sapiens
  CDR3 for alpha chain variable domain of TCR clone 1622 (TRAV1-2, TRAJ33)
CAALDSNYQLIW

SEQ ID NO: 3244 - protein, 13 aa, Homo sapiens
  CDR3 for beta chain variable domain of TCR clone 1622 (TRBV19, TRBJ2-7)
CASRKAGGSEQYF

SEQ ID NO: 3245 - protein, 14 aa, Homo sapiens
  CDR3 for alpha chain variable domain of TCR clone 1623 (TRAV21, TRAJ58)
CAVRRGRSGSRLTF

SEQ ID NO: 3246 - protein, 13 aa, Homo sapiens
  CDR3 for beta chain variable domain of TCR clone 1623 (TRBV7-2, TRBJ1-6)
CASSLKFDSPLHF

SEQ ID NO: 3247 - protein, 12 aa, Homo sapiens
  CDR3 for alpha chain variable domain of TCR clone 1624 (TRAV1-2, TRAJ29)
CAVPSGNTPLVF

SEQ ID NO: 3248 - protein, 13 aa, Homo sapiens
  CDR3 for beta chain variable domain of TCR clone 1624 (TRBV5-4, TRBJ1-1)
CASSVDLGTEAFF

SEQ ID NO: 3249 - protein, 13 aa, Homo sapiens
  CDR3 for alpha chain variable domain of TCR clone 1625 (TRAV12-1, TRAJ21)
CVVIGDNFNKFYF

SEQ ID NO: 3250 - protein, 14 aa, Homo sapiens
  CDR3 for beta chain variable domain of TCR clone 1625 (TRBV7-3, TRBJ2-2)
CASSLYPLTGELFF

SEQ ID NO: 3251 - protein, 13 aa, Homo sapiens
  CDR3 for alpha chain variable domain of TCR clone 1626 (TRAV13-1, TRAJ21)
CAASIYNFNKFYF

SEQ ID NO: 3252 - protein, 12 aa, Homo sapiens
  CDR3 for beta chain variable domain of TCR clone 1626 (TRBV11-2, TRBJ2-1)
CASSPGNNEQFF

SEQ ID NO: 3253 - protein, 14 aa, Homo sapiens
  CDR3 for alpha chain variable domain of TCR clone 1627 (TRAV12-2, TRAJ17)
CAVLFKAAGNKLTF

SEQ ID NO: 3254 - protein, 14 aa, Homo sapiens
  CDR3 for beta chain variable domain of TCR clone 1627 (TRBV4-1, TRBJ2-2)
CASSQAVNTGELFF

SEQ ID NO: 3255 - protein, 15 aa, Homo sapiens
  CDR3 for alpha chain variable domain of TCR clone 1628 (TRAV8-3, TRAJ45)
CASSYSGGGADGLTF

SEQ ID NO: 3256 - protein, 13 aa, Homo sapiens
  CDR3 for beta chain variable domain of TCR clone 1628 (TRBV7-9, TRBJ2-7)
CASSFAGAYEQYF

SEQ ID NO: 3257 - protein, 11 aa, Homo sapiens
  CDR3 for alpha chain variable domain of TCR clone 1629 (TRAV12-2, TRAJ39)
CAVNNMLTFGG

SEQ ID NO: 3258 - protein, 16 aa, Homo sapiens
  CDR3 for beta chain variable domain of TCR clone 1629 (TRBV5-3, TRBJ2-2)
CARSFGTGTNTGELFF

SEQ ID NO: 3259 - protein, 13 aa, Homo sapiens
  CDR3 for alpha chain variable domain of TCR clone 1630 (TRAV38-1, TRAJ52)
CAFRGTSYGKLTF

SEQ ID NO: 3260 - protein, 15 aa, Homo sapiens
  CDR3 for beta chain variable domain of TCR clone 1630 (TRBV7-8, TRBJ2-5)
CASSDAAGSQETQYF

SEQ ID NO: 3261 - protein, 14 aa, Homo sapiens
  CDR3 for alpha chain variable domain of TCR clone 1631 (TRAV12-3, TRAJ20)
CAMSARRGDYKLSF

SEQ ID NO: 3262 - protein, 14 aa, Homo sapiens
  CDR3 for beta chain variable domain of TCR clone 1631 (TRBV7-3, TRBJ2-3)
CASSPSARTDTQYF

SEQ ID NO: 3263 - protein, 14 aa, Homo sapiens
  CDR3 for alpha chain variable domain of TCR clone 1632 (TRAV35, TRAJ50)
CAGHRKTSYDKVIF

SEQ ID NO: 3264 - protein, 13 aa, Homo sapiens
  CDR3 for beta chain variable domain of TCR clone 1632 (TRBV7-7, TRBJ2-3)
CASSLSRADTQDF

SEQ ID NO: 3265 - protein, 12 aa, Homo sapiens
  CDR3 for alpha chain variable domain of TCR clone 1633 (TRAV12-2, TRAJ4)
GWPEGGYNKLIF

SEQ ID NO: 3266 - protein, 16 aa, Homo sapiens
  CDR3 for beta chain variable domain of TCR clone 1633 (TRBV6-1, TRBJ2-5)
CASSETLDRGAETQYF

SEQ ID NO: 3267 - protein, 13 aa, Homo sapiens
  CDR3 for alpha chain variable domain of TCR clone 1634 (TRAV20, TRAJ21)
CAVEGYNFNKFYF

SEQ ID NO: 3268 - protein, 14 aa, Homo sapiens
  CDR3 for beta chain variable domain of TCR clone 1634 (TRBV12-5, TRBJ2-5)
CASGSRTHQETQYF

SEQ ID NO: 3269 - protein, 12 aa, Homo sapiens
  CDR3 for alpha chain variable domain of TCR clone 1635 (TRAV23/DV6, TRAJ17)
CARGSCRQQANF

SEQ ID NO: 3270 - protein, 14 aa, Homo sapiens
  CDR3 for beta chain variable domain of TCR clone 1635 (TRBV7-2, TRBJ1-2)
CASSQTGSTYGYTF

SEQ ID NO: 3271 - protein, 15 aa, Homo sapiens
  CDR3 for alpha chain variable domain of TCR clone 1636 (TRAV17, TRAJ35)
CATAFVIGFGNVLHC

SEQ ID NO: 3272 - protein, 16 aa, Homo sapiens
  CDR3 for beta chain variable domain of TCR clone 1636 (TRBV11-2, TRBJ2-7)
CASSPLAGGPRYEQYF

SEQ ID NO: 3273 - protein, 15 aa, Homo sapiens
  CDR3 for alpha chain variable domain of TCR clone 1637 (TRAV26-1, TRAJ40)
CIDRYATSGTYKYIF

SEQ ID NO: 3274 - protein, 11 aa, Homo sapiens
  CDR3 for beta chain variable domain of TCR clone 1637 (TRBV7-9, TRBJ2-1)
CASSSQNEQFF

SEQ ID NO: 3275 - protein, 12 aa, Homo sapiens
  CDR3 for alpha chain variable domain of TCR clone 1638 (TRAV16, TRAJ10)
CSRTGGGNKLTF

SEQ ID NO: 3276 - protein, 13 aa, Homo sapiens
  CDR3 for beta chain variable domain of TCR clone 1638 (TRBV7-3, TRBJ1-1)
CASSQDWGAEAFF

SEQ ID NO: 3277 - protein, 15 aa, Homo sapiens
  CDR3 for alpha chain variable domain of TCR clone 1639 (TRAV12-2, TRAJ57)
CAVSRGQGGSEKLVF

SEQ ID NO: 3278 - protein, 14 aa, Homo sapiens
  CDR3 for beta chain variable domain of TCR clone 1639 (TRBV20-1, TRBJ2-1)
CSAHPGLPYNEQFF

SEQ ID NO: 3279 - protein, 16 aa, Homo sapiens
  CDR3 for alpha chain variable domain of TCR clone 1640 (TRAV3, TRAJ10)
CAVRDMRAGGGNKLTF

SEQ ID NO: 3280 - protein, 14 aa, Homo sapiens
  CDR3 for beta chain variable domain of TCR clone 1640 (TRBV7-2, TRBJ1-1)
CASSFLTGTTEAFF

SEQ ID NO: 3281 - protein, 11 aa, Homo sapiens
  CDR3 for alpha chain variable domain of TCR clone 1641 (TRAV35, TRAJ12)
RRMDSSYKLIF

SEQ ID NO: 3282 - protein, 14 aa, Homo sapiens
  CDR3 for beta chain variable domain of TCR clone 1641 (TRBV19, TRBJ1-1)
CASSPNRGDTEAFF

SEQ ID NO: 3283 - protein, 14 aa, Homo sapiens
  CDR3 for alpha chain variable domain of TCR clone 1642 (TRAV1-2, TRAJ16)
CAVNRFSDGQKLLF

SEQ ID NO: 3284 - protein, 16 aa, Homo sapiens
  CDR3 for beta chain variable domain of TCR clone 1642 (TRBV12-4, TRBJ2-5)
CASSFFVRGRQETQYF

SEQ ID NO: 3285 - protein, 13 aa, Homo sapiens
  CDR3 for alpha chain variable domain of TCR clone 1643 (TRAV1-2, TRAJ9)
CAALNTGGFKTIF

SEQ ID NO: 3286 - protein, 15 aa, Homo sapiens
  CDR3 for beta chain variable domain of TCR clone 1643 (TRBV6-3, TRBJ2-7)
CASSSPGTVFYEQYF

SEQ ID NO: 3287 - protein, 12 aa, Homo sapiens
  CDR3 for alpha chain variable domain of TCR clone 1644 (TRAV12-3, TRAJ17)
CAMTLTGNKLTF

SEQ ID NO: 3288 - protein, 14 aa, Homo sapiens
  CDR3 for beta chain variable domain of TCR clone 1644 (TRBV7-3, TRBJ2-1)
CASSLAGGTNEQFF

SEQ ID NO: 3289 - protein, 16 aa, Homo sapiens
  CDR3 for alpha chain variable domain of TCR clone 1645 (TRAV1-2, TRAJ10)
CAVRGVLTGGGNKLTF

SEQ ID NO: 3290 - protein, 15 aa, Homo sapiens
  CDR3 for beta chain variable domain of TCR clone 1645 (TRBV7-9, TRBJ1-6)
CASSSPGRGNSPLHF

SEQ ID NO: 3291 - protein, 11 aa, Homo sapiens
  CDR3 for alpha chain variable domain of TCR clone 1646 (TRAV2, TRAJ13)
CASGGYQKVTF

SEQ ID NO: 3292 - protein, 13 aa, Homo sapiens
  CDR3 for beta chain variable domain of TCR clone 1646 (TRBV24-1, TRBJ2-3)
CATSTGGTDTQYF

SEQ ID NO: 3293 - protein, 14 aa, Homo sapiens
  CDR3 for alpha chain variable domain of TCR clone 1647 (TRAV25, TRAJ23)
CAGQGDNQGGKLIF

SEQ ID NO: 3294 - protein, 12 aa, Homo sapiens
  CDR3 for beta chain variable domain of TCR clone 1647 (TRBV7-9, TRBJ1-1)
CASSLVRGEAFF

SEQ ID NO: 3295 - protein, 12 aa, Homo sapiens
  CDR3 for alpha chain variable domain of TCR clone 1648 (TRAV12-3, TRAJ17)
CAMTLTGNKLTF

SEQ ID NO: 3296 - protein, 17 aa, Homo sapiens
  CDR3 for beta chain variable domain of TCR clone 1648 (TRBV7-3, TRBJ2-3)
CASSLMKRMRGADTQYF

SEQ ID NO: 3297 - protein, 16 aa, Homo sapiens
  CDR3 for alpha chain variable domain of TCR clone 1649 (TRAV12-1, TRAJ22)
CVVNTISSGSARQLTF

SEQ ID NO: 3298 - protein, 13 aa, Homo sapiens
  CDR3 for beta chain variable domain of TCR clone 1649 (TRBV19, TRBJ2-1)
CASNGGVFSEQFF

SEQ ID NO: 3299 - protein, 12 aa, Homo sapiens
  CDR3 for alpha chain variable domain of TCR clone 1650 (TRAV21, TRAJ42)
CAVGGSQGNLIF

SEQ ID NO: 3300 - protein, 14 aa, Homo sapiens
  CDR3 for beta chain variable domain of TCR clone 1650 (TRBV12-4, TRBJ1-1)
CASSLGTGGTEAFF

SEQ ID NO: 3301 - protein, 10 aa, Homo sapiens
  CDR3 for alpha chain variable domain of TCR clone 1651 (TRAV3, TRAJ30)
CAVREIEIIF

SEQ ID NO: 3302 - protein, 14 aa, Homo sapiens
  CDR3 for beta chain variable domain of TCR clone 1651 (TRBV15, TRBJ2-3)
CATRSGTSTDTQYF

SEQ ID NO: 3303 - protein, 14 aa, Homo sapiens
  CDR3 for alpha chain variable domain of TCR clone 1652 (TRAV17, TRAJ33)
CATDARRSNYQLIW

SEQ ID NO: 3304 - protein, 14 aa, Homo sapiens
  CDR3 for beta chain variable domain of TCR clone 1652 (TRBV25-1, TRBJ1-4)
CASSGGGQPEKLFF

SEQ ID NO: 3305 - protein, 18 aa, Homo sapiens
  CDR3 for alpha chain variable domain of TCR clone 1653 (TRAV20, TRAJ4)
CAVQPYYMFSGGYNKLIF

SEQ ID NO: 3306 - protein, 13 aa, Homo sapiens
  CDR3 for beta chain variable domain of TCR clone 1653 (TRBV19, TRBJ2-3)
CATWDKITDTQYF

SEQ ID NO: 3307 - protein, 16 aa, Homo sapiens
  CDR3 for alpha chain variable domain of TCR clone 1654 (TRAV26-2, TRAJ48)
CILRPPFNFGNEKLTF

SEQ ID NO: 3308 - protein, 15 aa, Homo sapiens
  CDR3 for beta chain variable domain of TCR clone 1654 (TRBV20-1, TRBJ2-3)
CSARVEGTYTDTQYF

SEQ ID NO: 3309 - protein, 15 aa, Homo sapiens
  CDR3 for alpha chain variable domain of TCR clone 1655 (TRAV23/DV6, TRAJ30)
CAASSQESRDDKIIF

SEQ ID NO: 3310 - protein, 17 aa, Homo sapiens
  CDR3 for beta chain variable domain of TCR clone 1655 (TRBV4-3, TRBJ2-1)
CASSQFSSGRASGEQFF

SEQ ID NO: 3311 - protein, 14 aa, Homo sapiens
  CDR3 for alpha chain variable domain of TCR clone 1656 (TRAV20, TRAJ44)
CAVQDTGTASKLTF

SEQ ID NO: 3312 - protein, 13 aa, Homo sapiens
  CDR3 for beta chain variable domain of TCR clone 1656 (TRBV29-1, TRBJ1-3)
CSAGTGRGNTIYF

SEQ ID NO: 3313 - protein, 16 aa, Homo sapiens
  CDR3 for alpha chain variable domain of TCR clone 1657 (TRAV30, TRAJ24)
CGTEIVDADSWGKFQF

SEQ ID NO: 3314 - protein, 15 aa, Homo sapiens
  CDR3 for beta chain variable domain of TCR clone 1657 (TRBV18, TRBJ2-1)
CASLPDRGRDNEQFF

SEQ ID NO: 3315 - protein, 14 aa, Homo sapiens
  CDR3 for alpha chain variable domain of TCR clone 1658 (TRAV1-2, TRAJ16)
CAVNRFSDGQKLLF

SEQ ID NO: 3316 - protein, 11 aa, Homo sapiens
  CDR3 for beta chain variable domain of TCR clone 1658 (TRBV11-2, TRBJ2-2)
CASSLPGELFF

SEQ ID NO: 3317 - protein, 15 aa, Homo sapiens
  CDR3 for alpha chain variable domain of TCR clone 1659 (TRAV13-1, TRAJ18)
CAASGGGSTLGRLYF

SEQ ID NO: 3318 - protein, 13 aa, Homo sapiens
  CDR3 for beta chain variable domain of TCR clone 1659 (TRBV18, TRBJ2-1)
CASGLASNNEQFF

SEQ ID NO: 3319 - protein, 10 aa, Homo sapiens
  CDR3 for alpha chain variable domain of TCR clone 1660 (TRAV12-1, TRAJ37)
ARGNTGELIF

SEQ ID NO: 3320 - protein, 15 aa, Homo sapiens
  CDR3 for beta chain variable domain of TCR clone 1660 (TRBV7-2, TRBJ2-3)
CASSLEQGGTDTQYF

SEQ ID NO: 3321 - protein, 14 aa, Homo sapiens
  CDR3 for alpha chain variable domain of TCR clone 1661 (TRAV12-2, TRAJ13)
CAVKKTGGYQKVTF

SEQ ID NO: 3322 - protein, 13 aa, Homo sapiens
  CDR3 for beta chain variable domain of TCR clone 1661 (TRBV7-9, TRBJ1-2)
CASSLKQNYGYTF

SEQ ID NO: 3323 - protein, 10 aa, Homo sapiens
  CDR3 for alpha chain variable domain of TCR clone 1662 (TRAV8-2, TRAJ29)
CTGGNTPLVF

SEQ ID NO: 3324 - protein, 17 aa, Homo sapiens
  CDR3 for beta chain variable domain of TCR clone 1662 (TRBV2, TRBJ2-7)
CASSQALTGWDSYEQYF

SEQ ID NO: 3325 - protein, 13 aa, Homo sapiens
  CDR3 for alpha chain variable domain of TCR clone 1663 (TRAV1-1, TRAJ31)
CASYLNNNARLMF

SEQ ID NO: 3326 - protein, 14 aa, Homo sapiens
  CDR3 for beta chain variable domain of TCR clone 1663 (TRBV4-1, TRBJ2-5)
CASSRSGSGETQYF

SEQ ID NO: 3327 - protein, 17 aa, Homo sapiens
  CDR3 for alpha chain variable domain of TCR clone 1664 (TRAV3, TRAJ6)
CAVRDGPRAGGSYIPTF

SEQ ID NO: 3328 - protein, 12 aa, Homo sapiens
  CDR3 for beta chain variable domain of TCR clone 1664 (TRBV11-2, TRBJ2-1)
CASSPGNNEQFF

SEQ ID NO: 3329 - protein, 14 aa, Homo sapiens
  CDR3 for alpha chain variable domain of TCR clone 1665 (TRAV12-2, TRAJ24)
CAVTPADSWGKLQF

SEQ ID NO: 3330 - protein, 13 aa, Homo sapiens
  CDR3 for beta chain variable domain of TCR clone 1665 (TRBV6-4, TRBJ1-5)
CASSADLNQPQHF

SEQ ID NO: 3331 - protein, 18 aa, Homo sapiens
  CDR3 for alpha chain variable domain of TCR clone 1666 (TRAV26-2, TRAJ45)
CILRVDKYSGGGADGLTF

SEQ ID NO: 3332 - protein, 11 aa, Homo sapiens
  CDR3 for beta chain variable domain of TCR clone 1666 (TRBV29-1, TRBJ2-5)
CSEDRTGTQYF

SEQ ID NO: 3333 - protein, 13 aa, Homo sapiens
  CDR3 for alpha chain variable domain of TCR clone 1667 (TRAV26-1, TRAJ30)
CIVRVESNDKIIF

SEQ ID NO: 3334 - protein, 17 aa, Homo sapiens
  CDR3 for beta chain variable domain of TCR clone 1667 (TRBV13, TRBJ2-3)
CASSLSRVAGGRNTQYF

SEQ ID NO: 3335 - protein, 15 aa, Homo sapiens
  CDR3 for alpha chain variable domain of TCR clone 1668 (TRAV8-3, TRAJ45)
CASSYSGGGADGLTF

SEQ ID NO: 3336 - protein, 15 aa, Homo sapiens
  CDR3 for beta chain variable domain of TCR clone 1668 (TRBV27, TRBJ1-4)
CASSPRHATNEKLFF

SEQ ID NO: 3337 - protein, 14 aa, Homo sapiens
  CDR3 for alpha chain variable domain of TCR clone 1669 (TRAV12-1, TRAJ43)
CVVNGRSNNNDMRF

SEQ ID NO: 3338 - protein, 13 aa, Homo sapiens
  CDR3 for beta chain variable domain of TCR clone 1669 (TRBV27, TRBJ1-1)
CASSLSIGAEAFF

SEQ ID NO: 3339 - protein, 13 aa, Homo sapiens
  CDR3 for alpha chain variable domain of TCR clone 1670 (TRAV35, TRAJ53)
CAGQESSNYKLTF

SEQ ID NO: 3340 - protein, 11 aa, Homo sapiens
  CDR3 for beta chain variable domain of TCR clone 1670 (TRBV29-1, TRBJ2-5)
CSEDRTGTQYF

SEQ ID NO: 3341 - protein, 18 aa, Homo sapiens
  CDR3 for alpha chain variable domain of TCR clone 1671 (TRAV13-1, TRAJ52)
CAAKNPNAGGTSYGKLTF

SEQ ID NO: 3342 - protein, 18 aa, Homo sapiens
  CDR3 for beta chain variable domain of TCR clone 1671 (TRBV4-1, TRBJ1-4)
CASSPRTGGAWTNEKLFF

SEQ ID NO: 3343 - protein, 16 aa, Homo sapiens
  CDR3 for alpha chain variable domain of TCR clone 1672 (TRAV14/DV4, TRAJ21)
CAMREGPENNFNKFYF

SEQ ID NO: 3344 - protein, 12 aa, Homo sapiens
  CDR3 for beta chain variable domain of TCR clone 1672 (TRBV29-1, TRBJ2-2)
CSVDKYTGELFF

SEQ ID NO: 3345 - protein, 13 aa, Homo sapiens
  CDR3 for alpha chain variable domain of TCR clone 1673 (TRAV12-3, TRAJ13)
CAMTSGGYQKVTF

SEQ ID NO: 3346 - protein, 13 aa, Homo sapiens
  CDR3 for beta chain variable domain of TCR clone 1673 (TRBV7-9, TRBJ1-2)
CASSLKQNYGYTF

SEQ ID NO: 3347 - protein, 18 aa, Homo sapiens
  CDR3 for alpha chain variable domain of TCR clone 1674 (TRAV3, TRAJ32)
CAVRDIRGYGGATNKLIF

SEQ ID NO: 3348 - protein, 15 aa, Homo sapiens
  CDR3 for beta chain variable domain of TCR clone 1674 (TRBV12-4, TRBJ2-2)
CASSLGVRHTGELFF

SEQ ID NO: 3349 - protein, 14 aa, Homo sapiens
  CDR3 for alpha chain variable domain of TCR clone 1675 (TRAV12-3, TRAJ57)
CAMSAWGGSEKLVF

SEQ ID NO: 3350 - protein, 14 aa, Homo sapiens
  CDR3 for beta chain variable domain of TCR clone 1675 (TRBV18, TRBJ2-5)
CASSPGVSQETQYF

SEQ ID NO: 3351 - protein, 13 aa, Homo sapiens
  CDR3 for alpha chain variable domain of TCR clone 1676 (TRAV12-1, TRAJ40)
CVVPTSGTYKYIF

SEQ ID NO: 3352 - protein, 16 aa, Homo sapiens
  CDR3 for beta chain variable domain of TCR clone 1676 (TRBV7-9, TRBJ1-2)
CASSLGFSSGEDGYTF

SEQ ID NO: 3353 - protein, 13 aa, Homo sapiens
  CDR3 for alpha chain variable domain of TCR clone 1677 (TRAV20, TRAJ29)
CAVQAVGNTPLVF

SEQ ID NO: 3354 - protein, 15 aa, Homo sapiens
  CDR3 for beta chain variable domain of TCR clone 1677 (TRBV10-2, TRBJ2-5)
CASRGSGGPQETQYF

SEQ ID NO: 3355 - protein, 12 aa, Homo sapiens
  CDR3 for alpha chain variable domain of TCR clone 1678 (TRAV12-2, TRAJ52)
IGGGTSYGKLTF

SEQ ID NO: 3356 - protein, 13 aa, Homo sapiens
  CDR3 for beta chain variable domain of TCR clone 1678 (TRBV15, TRBJ2-7)
CATSTTGHYEQYF

SEQ ID NO: 3357 - protein, 14 aa, Homo sapiens
  CDR3 for alpha chain variable domain of TCR clone 1679 (TRAV3, TRAJ37)
CAVKESGNTGKLIF

SEQ ID NO: 3358 - protein, 14 aa, Homo sapiens
  CDR3 for beta chain variable domain of TCR clone 1679 (TRBV2, TRBJ1-5)
CASSENRGGQPQHF

SEQ ID NO: 3359 - protein, 15 aa, Homo sapiens
  CDR3 for alpha chain variable domain of TCR clone 1680 (TRAV21, TRAJ22)
CAVRLFFWFCKATDL

SEQ ID NO: 3360 - protein, 14 aa, Homo sapiens
  CDR3 for beta chain variable domain of TCR clone 1680 (TRBV19, TRBJ1-5)
CASRAPDSFLSQHF

SEQ ID NO: 3361 - protein, 16 aa, Homo sapiens
  CDR3 for alpha chain variable domain of TCR clone 1681 (TRAV30, TRAJ24)
CGTEIVDADSWGKFQF

SEQ ID NO: 3362 - protein, 16 aa, Homo sapiens
  CDR3 for beta chain variable domain of TCR clone 1681 (TRBV7-3, TRBJ2-2)
CASSLKRGTLSGELFF

SEQ ID NO: 3363 - protein, 13 aa, Homo sapiens
  CDR3 for alpha chain variable domain of TCR clone 1682 (TRAV2, TRAJ23)
CAVMGNQGGKLIF

SEQ ID NO: 3364 - protein, 14 aa, Homo sapiens
  CDR3 for beta chain variable domain of TCR clone 1682 (TRBV11-2, TRBJ2-1)
CASSRATSYNEQFF

SEQ ID NO: 3365 - protein, 14 aa, Homo sapiens
  CDR3 for alpha chain variable domain of TCR clone 1683 (TRAV1-2, TRAJ8)
CAVREDTGFQKLVF

SEQ ID NO: 3366 - protein, 16 aa, Homo sapiens
  CDR3 for beta chain variable domain of TCR clone 1683 (TRBV20-1, TRBJ1-4)
CSAPGQGLLTNEKLFF

SEQ ID NO: 3367 - protein, 16 aa, Homo sapiens
  CDR3 for alpha chain variable domain of TCR clone 1684 (TRAV8-3, TRAJ8)
CAVPRDGNTGFQKLVF

SEQ ID NO: 3368 - protein, 14 aa, Homo sapiens
  CDR3 for beta chain variable domain of TCR clone 1684 (TRBV4-1, TRBJ2-2)
CASSQAVNTGELFF

SEQ ID NO: 3369 - protein, 15 aa, Homo sapiens
  CDR3 for alpha chain variable domain of TCR clone 1685 (TRAV13-1, TRAJ32)
CAASIYGGATNKLIF

SEQ ID NO: 3370 - protein, 12 aa, Homo sapiens
  CDR3 for beta chain variable domain of TCR clone 1685 (TRBV7-6, TRBJ2-3)
CASSTGTDTQYF

SEQ ID NO: 3371 - protein, 16 aa, Homo sapiens
  CDR3 for alpha chain variable domain of TCR clone 1686 (TRAV8-3, TRAJ44)
CAVGTLMTGTASKLTF

SEQ ID NO: 3372 - protein, 13 aa, Homo sapiens
  CDR3 for beta chain variable domain of TCR clone 1686 (TRBV11-2, TRBJ2-1)
CASSLRLTHEQFF

SEQ ID NO: 3373 - protein, 14 aa, Homo sapiens
  CDR3 for alpha chain variable domain of TCR clone 1687 (TRAV12-1, TRAJ9)
CVVTGDTGGFKTIF

SEQ ID NO: 3374 - protein, 16 aa, Homo sapiens
  CDR3 for beta chain variable domain of TCR clone 1687 (TRBV29-1, TRBJ1-2)
CSVEANRDIANYGYTF

SEQ ID NO: 3375 - protein, 15 aa, Homo sapiens
  CDR3 for alpha chain variable domain of TCR clone 1688 (TRAV17, TRAJ45)
TSVLRTGGGADGLTF

SEQ ID NO: 3376 - protein, 15 aa, Homo sapiens
  CDR3 for beta chain variable domain of TCR clone 1688 (TRBV5-7, TRBJ1-5)
CASSYGKLWDQPQHF

SEQ ID NO: 3377 - protein, 15 aa, Homo sapiens
  CDR3 for alpha chain variable domain of TCR clone 1689 (TRAV2, TRAJ37)
CAVEDGSSNTGKLIF

SEQ ID NO: 3378 - protein, 13 aa, Homo sapiens
  CDR3 for beta chain variable domain of TCR clone 1689 (TRBV20-1, TRBJ1-6)
CSTFREGNSPLHF

SEQ ID NO: 3379 - protein, 10 aa, Homo sapiens
  CDR3 for alpha chain variable domain of TCR clone 1690 (TRAV12-1, TRAJ33)
CVASNYQLIW

SEQ ID NO: 3380 - protein, 15 aa, Homo sapiens
  CDR3 for beta chain variable domain of TCR clone 1690 (TRBV5-4, TRBJ1-4)
CASSHGDGENEKLFF

SEQ ID NO: 3381 - protein, 10 aa, Homo sapiens
  CDR3 for alpha chain variable domain of TCR clone 1691 (TRAV1-2, TRAJ34)
CAVNTDKLIF

SEQ ID NO: 3382 - protein, 13 aa, Homo sapiens
  CDR3 for beta chain variable domain of TCR clone 1691 (TRBV10-1, TRBJ2-1)
CASSAGPDNEQFF

SEQ ID NO: 3383 - protein, 11 aa, Homo sapiens
  CDR3 for alpha chain variable domain of TCR clone 1692 (TRAV2, TRAJ13)
CASGGYQKVTF

SEQ ID NO: 3384 - protein, 15 aa, Homo sapiens
  CDR3 for beta chain variable domain of TCR clone 1692 (TRBV29-1, TRBJ2-1)
CSGRDRKSSYNEQFF

SEQ ID NO: 3385 - protein, 14 aa, Homo sapiens
  CDR3 for alpha chain variable domain of TCR clone 1693 (TRAV2, TRAJ9)
CAVEDRSGGFKTIF

SEQ ID NO: 3386 - protein, 13 aa, Homo sapiens
  CDR3 for beta chain variable domain of TCR clone 1693 (TRBV19, TRBJ1-2)
CASSVPGQDGYTF

SEQ ID NO: 3387 - protein, 14 aa, Homo sapiens
  CDR3 for alpha chain variable domain of TCR clone 1694 (TRAV1-2, TRAJ16)
CAVNRFSDGQKLLF

SEQ ID NO: 3388 - protein, 15 aa, Homo sapiens
  CDR3 for beta chain variable domain of TCR clone 1694 (TRBV29-1, TRBJ2-7)
CSVEFFDRGSYEQYF

SEQ ID NO: 3389 - protein, 11 aa, Homo sapiens
  CDR3 for alpha chain variable domain of TCR clone 1695 (TRAV12-2, TRAJ43)
CASPIGNDMRF

SEQ ID NO: 3390 - protein, 12 aa, Homo sapiens
  CDR3 for beta chain variable domain of TCR clone 1695 (TRBV20-1, TRBJ2-7)
CSAGLKMGEQYF

SEQ ID NO: 3391 - protein, 15 aa, Homo sapiens
  CDR3 for alpha chain variable domain of TCR clone 1696 (TRAV3, TRAJ5)
CAVRDLDTGRRALTF

SEQ ID NO: 3392 - protein, 15 aa, Homo sapiens
  CDR3 for beta chain variable domain of TCR clone 1696 (TRBV20-1, TRBJ2-1)
CSARSPGGPGNEQFF

SEQ ID NO: 3393 - protein, 14 aa, Homo sapiens
  CDR3 for alpha chain variable domain of TCR clone 1697 (TRAV27, TRAJ22)
CAGVSVLGKRQLTF

SEQ ID NO: 3394 - protein, 17 aa, Homo sapiens
  CDR3 for beta chain variable domain of TCR clone 1697 (TRBV14, TRBJ2-1)
CASSQDRRVTSYNEQFF

SEQ ID NO: 3395 - protein, 13 aa, Homo sapiens
  CDR3 for alpha chain variable domain of TCR clone 1698 (TRAV12-3, TRAJ54)
CAMTLQGAQKLVF

SEQ ID NO: 3396 - protein, 14 aa, Homo sapiens
  CDR3 for beta chain variable domain of TCR clone 1698 (TRBV4-1, TRBJ2-2)
CASSQAVNTGELFF

SEQ ID NO: 3397 - protein, 14 aa, Homo sapiens
  CDR3 for alpha chain variable domain of TCR clone 1699 (TRAV1-2, TRAJ8)
CAVREDTGFQKLVF

SEQ ID NO: 3398 - protein, 12 aa, Homo sapiens
  CDR3 for beta chain variable domain of TCR clone 1699 (TRBV7-8, TRBJ2-7)
CASSLGDREQYF

SEQ ID NO: 3399 - protein, 14 aa, Homo sapiens
  CDR3 for alpha chain variable domain of TCR clone 1700 (TRAV12-2, TRAJ13)
CAVKKTGGYQKVTF

SEQ ID NO: 3400 - protein, 13 aa, Homo sapiens
  CDR3 for beta chain variable domain of TCR clone 1700 (TRBV20-1, TRBJ1-1)
CSARGGGNTEAFF

SEQ ID NO: 3401 - protein, 14 aa, Homo sapiens
  CDR3 for alpha chain variable domain of TCR clone 1701 (TRAV8-1, TRAJ23)
CAVGTYNQGGKLIF

SEQ ID NO: 3402 - protein, 16 aa, Homo sapiens
  CDR3 for beta chain variable domain of TCR clone 1701 (TRBV18, TRBJ1-5)
CASSPSTGNSNQPQHF

SEQ ID NO: 3403 - protein, 16 aa, Homo sapiens
  CDR3 for alpha chain variable domain of TCR clone 1702 (TRAV12-3, TRAJ50)
CAMRDPMKTSYDKVIF

SEQ ID NO: 3404 - protein, 13 aa, Homo sapiens
  CDR3 for beta chain variable domain of TCR clone 1702 (TRBV4-1, TRBJ2-3)
CASSLDFTDTQYF

SEQ ID NO: 3405 - protein, 12 aa, Homo sapiens
  CDR3 for alpha chain variable domain of TCR clone 1703 (TRAV27, TRAJ58)
CAGARDTSRLTF

SEQ ID NO: 3406 - protein, 14 aa, Homo sapiens
  CDR3 for beta chain variable domain of TCR clone 1703 (TRBV7-3, TRBJ2-1)
CASSLGTSANEQFF

SEQ ID NO: 3407 - protein, 12 aa, Homo sapiens
  CDR3 for alpha chain variable domain of TCR clone 1704 (TRAV38-1, TRAJ20)
CAFIWNDYKLSF

SEQ ID NO: 3408 - protein, 14 aa, Homo sapiens
  CDR3 for beta chain variable domain of TCR clone 1704 (TRBV19, TRBJ2-1)
CASSMGSGATEQFF

SEQ ID NO: 3409 - protein, 14 aa, Homo sapiens
  CDR3 for alpha chain variable domain of TCR clone 1705 (TRAV8-1, TRAJ34)
CAVNPSYNTDKLIF

SEQ ID NO: 3410 - protein, 16 aa, Homo sapiens
  CDR3 for beta chain variable domain of TCR clone 1705 (TRBV7-2, TRBJ2-6)
CASSLAGRSGANVLTF

SEQ ID NO: 3411 - protein, 14 aa, Homo sapiens
  CDR3 for alpha chain variable domain of TCR clone 1706 (TRAV3, TRAJ34)
CAVRDINNTDKLIF

SEQ ID NO: 3412 - protein, 15 aa, Homo sapiens
  CDR3 for beta chain variable domain of TCR clone 1706 (TRBV20-1, TRBJ2-7)
CSARDRVSGMDEQYF

SEQ ID NO: 3413 - protein, 17 aa, Homo sapiens
  CDR3 for alpha chain variable domain of TCR clone 1707 (TRAV38-2/DV8, TRAJ23)
CALSRKLIFGQGTELSV

SEQ ID NO: 3414 - protein, 17 aa, Homo sapiens
  CDR3 for beta chain variable domain of TCR clone 1707 (TRBV5-4, TRBJ2-1)
CASSSAGGRGPYNEQFF

SEQ ID NO: 3415 - protein, 16 aa, Homo sapiens
  CDR3 for alpha chain variable domain of TCR clone 1708 (TRAV12-2, TRAJ28)
CAVITDSGAGSYQLTF

SEQ ID NO: 3416 - protein, 14 aa, Homo sapiens
  CDR3 for beta chain variable domain of TCR clone 1708 (TRBV25-1, TRBJ1-1)
CASTHLGGNTEAFF

SEQ ID NO: 3417 - protein, 15 aa, Homo sapiens
  CDR3 for alpha chain variable domain of TCR clone 1709 (TRAV3, TRAJ42)
CAVRGGTGSQGNLIF

SEQ ID NO: 3418 - protein, 14 aa, Homo sapiens
  CDR3 for beta chain variable domain of TCR clone 1709 (TRBV19, TRBJ1-2)
CASSSLFARDVYTF

SEQ ID NO: 3419 - protein, 13 aa, Homo sapiens
  CDR3 for alpha chain variable domain of TCR clone 1710 (TRAV8-3, TRAJ44)
CAVVPGTASKLTF

SEQ ID NO: 3420 - protein, 14 aa, Homo sapiens
  CDR3 for beta chain variable domain of TCR clone 1710 (TRBV11-2, TRBJ2-3)
CASSRLARTDTQHF

SEQ ID NO: 3421 - protein, 14 aa, Homo sapiens
  CDR3 for alpha chain variable domain of TCR clone 1711 (TRAV23/DV6, TRAJ57)
CAASNQGGSEKLVF

SEQ ID NO: 3422 - protein, 13 aa, Homo sapiens
  CDR3 for beta chain variable domain of TCR clone 1711 (TRBV11-2, TRBJ2-7)
CASSSYPSYEQYF

SEQ ID NO: 3423 - protein, 15 aa, Homo sapiens
  CDR3 for alpha chain variable domain of TCR clone 1712 (TRAV12-2, TRAJ20)
CAVKGGFGAGTTVTV

SEQ ID NO: 3424 - protein, 13 aa, Homo sapiens
  CDR3 for beta chain variable domain of TCR clone 1712 (TRBV12-4, TRBJ2-7)
CASSPGQLYEQYF

SEQ ID NO: 3425 - protein, 12 aa, Homo sapiens
  CDR3 for alpha chain variable domain of TCR clone 1713 (TRAV8-6, TRAJ43)
CAVSNNNNDMRF

SEQ ID NO: 3426 - protein, 15 aa, Homo sapiens
  CDR3 for beta chain variable domain of TCR clone 1713 (TRBV7-3, TRBJ2-6)
CASSLGGSGANVLTF

SEQ ID NO: 3427 - protein, 13 aa, Homo sapiens
  CDR3 for alpha chain variable domain of TCR clone 1714 (TRAV17, TRAJ54)
CATSWGGAQKLVF

SEQ ID NO: 3428 - protein, 15 aa, Homo sapiens
  CDR3 for beta chain variable domain of TCR clone 1714 (TRBV4-3, TRBJ2-3)
CASSPSLLSTDTQYF

SEQ ID NO: 3429 - protein, 12 aa, Homo sapiens
  CDR3 for alpha chain variable domain of TCR clone 1715 (TRAV2, TRAJ32)
CAVGGATNKLIF

SEQ ID NO: 3430 - protein, 15 aa, Homo sapiens
  CDR3 for beta chain variable domain of TCR clone 1715 (TRBV7-2, TRBJ2-1)
CASSSRTSREDEQFF

SEQ ID NO: 3431 - protein, 14 aa, Homo sapiens
  CDR3 for alpha chain variable domain of TCR clone 1716 (TRAV21, TRAJ45)
CAVVSGGGADGLTF

SEQ ID NO: 3432 - protein, 14 aa, Homo sapiens
  CDR3 for beta chain variable domain of TCR clone 1716 (TRBV20-1, TRBJ2-3)
CSALGLEGADTQYF

SEQ ID NO: 3433 - protein, 12 aa, Homo sapiens
  CDR3 for alpha chain variable domain of TCR clone 1717 (TRAV16, TRAJ12)
CAHGDSSYKLIF

SEQ ID NO: 3434 - protein, 12 aa, Homo sapiens
  CDR3 for beta chain variable domain of TCR clone 1717 (TRBV28, TRBJ2-1)
CASSRLVGEQFF

SEQ ID NO: 3435 - protein, 17 aa, Homo sapiens
  CDR3 for alpha chain variable domain of TCR clone 1718 (TRAV3, TRAJ42)
CAVRDRDYGGSQGNLIF

SEQ ID NO: 3436 - protein, 13 aa, Homo sapiens
  CDR3 for beta chain variable domain of TCR clone 1718 (TRBV10-3, TRBJ2-7)
CASKLAVNYEQYF

SEQ ID NO: 3437 - protein, 15 aa, Homo sapiens
  CDR3 for alpha chain variable domain of TCR clone 1719 (TRAV8-3, TRAJ7)
CAVGSISYGNNRLAF

SEQ ID NO: 3438 - protein, 15 aa, Homo sapiens
  CDR3 for beta chain variable domain of TCR clone 1719 (TRBV4-2, TRBJ1-1)
CASSQEDLPRTEAFF

SEQ ID NO: 3439 - protein, 15 aa, Homo sapiens
  CDR3 for alpha chain variable domain of TCR clone 1720 (TRAV3, TRAJ24)
CAVRDKMTAGGNCSL

SEQ ID NO: 3440 - protein, 14 aa, Homo sapiens
  CDR3 for beta chain variable domain of TCR clone 1720 (TRBV7-2, TRBJ2-3)
CASSQTGSSYTQYF

SEQ ID NO: 3441 - protein, 14 aa, Homo sapiens
  CDR3 for alpha chain variable domain of TCR clone 1721 (TRAV8-3, TRAJ9)
CAVVYNTGGFKTIF

SEQ ID NO: 3442 - protein, 16 aa, Homo sapiens
  CDR3 for beta chain variable domain of TCR clone 1721 (TRBV7-3, TRBJ2-2)
CASSLKRGTLSGELFF

SEQ ID NO: 3443 - protein, 11 aa, Homo sapiens
  CDR3 for alpha chain variable domain of TCR clone 1722 (TRAV2, TRAJ13)
CASGGYQKVTF

SEQ ID NO: 3444 - protein, 13 aa, Homo sapiens
  CDR3 for beta chain variable domain of TCR clone 1722 (TRBV20-1, TRBJ2-2)
CSASAAGTGELFF

SEQ ID NO: 3445 - protein, 15 aa, Homo sapiens
  CDR3 for alpha chain variable domain of TCR clone 1723 (TRAV36/DV7, TRAJ54)
CAVEKPVQGAQKLVF

SEQ ID NO: 3446 - protein, 14 aa, Homo sapiens
  CDR3 for beta chain variable domain of TCR clone 1723 (TRBV4-3, TRBJ2-2)
CASSQGHVTGELFF

SEQ ID NO: 3447 - protein, 11 aa, Homo sapiens
  CDR3 for alpha chain variable domain of TCR clone 1724 (TRAV12-1, TRAJ43)
CVEYDNNDMRF

SEQ ID NO: 3448 - protein, 16 aa, Homo sapiens
  CDR3 for beta chain variable domain of TCR clone 1724 (TRBV5-4, TRBJ2-1)
CASSLVGSGQDNEQFF

SEQ ID NO: 3449 - protein, 13 aa, Homo sapiens
  CDR3 for alpha chain variable domain of TCR clone 1725 (TRAV27, TRAJ45)
CRSSGGGADGLTF

SEQ ID NO: 3450 - protein, 14 aa, Homo sapiens
  CDR3 for beta chain variable domain of TCR clone 1725 (TRBV7-9, TRBJ2-1)
CASSSMVGFGEQFF

SEQ ID NO: 3451 - protein, 13 aa, Homo sapiens
  CDR3 for alpha chain variable domain of TCR clone 1726 (TRAV3, TRAJ4)
CAVRDGGYNKLIF

SEQ ID NO: 3452 - protein, 14 aa, Homo sapiens
  CDR3 for beta chain variable domain of TCR clone 1726 (TRBV12-4, TRBJ1-2)
CASSSSAAGSSYTF

SEQ ID NO: 3453 - protein, 14 aa, Homo sapiens
  CDR3 for alpha chain variable domain of TCR clone 1727 (TRAV2, TRAJ9)
CAVEDRSGGFKTIF

SEQ ID NO: 3454 - protein, 14 aa, Homo sapiens
  CDR3 for beta chain variable domain of TCR clone 1727 (TRBV18, TRBJ2-7)
CASSPRGGAYEQYF

SEQ ID NO: 3455 - protein, 14 aa, Homo sapiens
  CDR3 for alpha chain variable domain of TCR clone 1728 (TRAV16, TRAJ54)
CALSGVQGAQKLVF

SEQ ID NO: 3456 - protein, 15 aa, Homo sapiens
  CDR3 for beta chain variable domain of TCR clone 1728 (TRBV18, TRBJ2-2)
CASSTSGLHTGELFF

SEQ ID NO: 3457 - protein, 14 aa, Homo sapiens
  CDR3 for alpha chain variable domain of TCR clone 1729 (TRAV1-2, TRAJ16)
CAVNRFSDGQKLLF

SEQ ID NO: 3458 - protein, 11 aa, Homo sapiens
  CDR3 for beta chain variable domain of TCR clone 1729 (TRBV7-9, TRBJ2-3)
CASSPTDTQYF

SEQ ID NO: 3459 - protein, 15 aa, Homo sapiens
  CDR3 for alpha chain variable domain of TCR clone 1730 (TRAV2, TRAJ15)
CAVEDRNQAGTALIF

SEQ ID NO: 3460 - protein, 13 aa, Homo sapiens
  CDR3 for beta chain variable domain of TCR clone 1730 (TRBV10-2, TRBJ2-1)
CASGASGDAKQFF

SEQ ID NO: 3461 - protein, 16 aa, Homo sapiens
  CDR3 for alpha chain variable domain of TCR clone 1731 (TRAV13-1, TRAJ48)
CAASIFGNFGNEKLTF

SEQ ID NO: 3462 - protein, 12 aa, Homo sapiens
  CDR3 for beta chain variable domain of TCR clone 1731 (TRBV14, TRBJ2-4)
CASSNLKSIQYF

SEQ ID NO: 3463 - protein, 14 aa, Homo sapiens
  CDR3 for alpha chain variable domain of TCR clone 1732 (TRAV12-3, TRAJ10)
SHLPLTGGGNKLTF

SEQ ID NO: 3464 - protein, 16 aa, Homo sapiens
  CDR3 for beta chain variable domain of TCR clone 1732 (TRBV19, TRBJ2-1)
CASSKAGPSSYNEQFF

SEQ ID NO: 3465 - protein, 13 aa, Homo sapiens
  CDR3 for alpha chain variable domain of TCR clone 1733 (TRAV27, TRAJ27)
CAGGITNAGKSTF

SEQ ID NO: 3466 - protein, 13 aa, Homo sapiens
  CDR3 for beta chain variable domain of TCR clone 1733 (TRBV20-1, TRBJ1-2)
CSASLGVGYGYTF

SEQ ID NO: 3467 - protein, 14 aa, Homo sapiens
  CDR3 for alpha chain variable domain of TCR clone 1734 (TRAV12-2, TRAJ13)
CAVKKTGGYQKVTF

SEQ ID NO: 3468 - protein, 13 aa, Homo sapiens
  CDR3 for beta chain variable domain of TCR clone 1734 (TRBV20-1, TRBJ1-1)
CSARLGQGTEAFF

SEQ ID NO: 3469 - protein, 13 aa, Homo sapiens
  CDR3 for alpha chain variable domain of TCR clone 1735 (TRAV20, TRAJ49)
CAVQARTGNQFYF

SEQ ID NO: 3470 - protein, 14 aa, Homo sapiens
  CDR3 for beta chain variable domain of TCR clone 1735 (TRBV7-2, TRBJ2-7)
CASSPKTSFYEQYF

SEQ ID NO: 3471 - protein, 14 aa, Homo sapiens
  CDR3 for alpha chain variable domain of TCR clone 1736 (TRAV1-2, TRAJ8)
CAVREDTGFQKLVF

SEQ ID NO: 3472 - protein, 15 aa, Homo sapiens
  CDR3 for beta chain variable domain of TCR clone 1736 (TRBV11-3, TRBJ2-3)
CASLKDGREGDTQYF

SEQ ID NO: 3473 - protein, 11 aa, Homo sapiens
  CDR3 for alpha chain variable domain of TCR clone 1737 (TRAV1-2, TRAJ20)
CAVANDYKLSF

SEQ ID NO: 3474 - protein, 16 aa, Homo sapiens
  CDR3 for beta chain variable domain of TCR clone 1737 (TRBV4-3, TRBJ1-6)
CASSQDPGVYNSPLHF

SEQ ID NO: 3475 - protein, 17 aa, Homo sapiens
  CDR3 for alpha chain variable domain of TCR clone 1738 (TRAV26-1, TRAJ37)
CIVRVITVSSNTGKLIF

SEQ ID NO: 3476 - protein, 14 aa, Homo sapiens
  CDR3 for beta chain variable domain of TCR clone 1738 (TRBV19, TRBJ2-1)
CASPTFVLSGEQFF

SEQ ID NO: 3477 - protein, 11 aa, Homo sapiens
  CDR3 for alpha chain variable domain of TCR clone 1739 (TRAV12-3, TRAJ49)
CAANTGNQFYF

SEQ ID NO: 3478 - protein, 15 aa, Homo sapiens
  CDR3 for beta chain variable domain of TCR clone 1739 (TRBV11-2, TRBJ2-1)
CASSLGTSGLNEQFF

SEQ ID NO: 3479 - protein, 13 aa, Homo sapiens
  CDR3 for alpha chain variable domain of TCR clone 1740 (TRAV16, TRAJ22)
SAMLAGSARQLTF

SEQ ID NO: 3480 - protein, 18 aa, Homo sapiens
  CDR3 for beta chain variable domain of TCR clone 1740 (TRBV7-2, TRBJ2-3)
CASSLETSRGRKADTQYF

SEQ ID NO: 3481 - protein, 18 aa, Homo sapiens
  CDR3 for alpha chain variable domain of TCR clone 1741 (TRAV29/DV5, TRAJ53)
CSVLLCSKRGGSNYKLTF

SEQ ID NO: 3482 - protein, 17 aa, Homo sapiens
  CDR3 for beta chain variable domain of TCR clone 1741 (TRBV7-8, TRBJ2-6)
CASSAGTGGAGANVLTF

SEQ ID NO: 3483 - protein, 10 aa, Homo sapiens
  CDR3 for alpha chain variable domain of TCR clone 1742 (TRAV30, TRAJ48)
CGIGNEKLTF

SEQ ID NO: 3484 - protein, 15 aa, Homo sapiens
  CDR3 for beta chain variable domain of TCR clone 1742 (TRBV28, TRBJ2-5)
CASSPPWSYQETQYF

SEQ ID NO: 3485 - protein, 13 aa, Homo sapiens
  CDR3 for alpha chain variable domain of TCR clone 1743 (TRAV12-2, TRAJ3)
CAFQYSSASKIIF

SEQ ID NO: 3486 - protein, 11 aa, Homo sapiens
  CDR3 for beta chain variable domain of TCR clone 1743 (TRBV20-1, TRBJ2-3)
CSGTSSTTQYF

SEQ ID NO: 3487 - protein, 13 aa, Homo sapiens
  CDR3 for alpha chain variable domain of TCR clone 1744 (TRAV12-1, TRAJ37)
CVVNAGNTGKLIF

SEQ ID NO: 3488 - protein, 14 aa, Homo sapiens
  CDR3 for beta chain variable domain of TCR clone 1744 (TRBV7-2, TRBJ2-3)
CASRRGLAADTQYF

SEQ ID NO: 3489 - protein, 16 aa, Homo sapiens
  CDR3 for alpha chain variable domain of TCR clone 1745 (TRAV3, TRAJ37)
CAVRGKGSGNTGKLIF

SEQ ID NO: 3490 - protein, 15 aa, Homo sapiens
  CDR3 for beta chain variable domain of TCR clone 1745 (TRBV7-3, TRBJ2-2)
CASSETGQGTGELFF

SEQ ID NO: 3491 - protein, 12 aa, Homo sapiens
  CDR3 for alpha chain variable domain of TCR clone 1746 (TRAV2, TRAJ9)
CAVGAGGFKTIF

SEQ ID NO: 3492 - protein, 14 aa, Homo sapiens
  CDR3 for beta chain variable domain of TCR clone 1746 (TRBV6-1, TRBJ1-3)
CASVQGGGGNTIYF

SEQ ID NO: 3493 - protein, 13 aa, Homo sapiens
  CDR3 for alpha chain variable domain of TCR clone 1747 (TRAV13-1, TRAJ39)
CAASIWAGDMLTF

SEQ ID NO: 3494 - protein, 15 aa, Homo sapiens
  CDR3 for beta chain variable domain of TCR clone 1747 (TRBV7-9, TRBJ1-1)
CASSLLEQGGTEAFF

SEQ ID NO: 3495 - protein, 13 aa, Homo sapiens
  CDR3 for alpha chain variable domain of TCR clone 1748 (TRAV8-3, TRAJ37)
CAVPSSNTGKLIF

SEQ ID NO: 3496 - protein, 12 aa, Homo sapiens
  CDR3 for beta chain variable domain of TCR clone 1748 (TRBV11-2, TRBJ2-1)
CASSPGNNEQFF

SEQ ID NO: 3497 - protein, 11 aa, Homo sapiens
  CDR3 for alpha chain variable domain of TCR clone 1749 (TRAV12-2, TRAJ39)
CAVNNMLTFGG

SEQ ID NO: 3498 - protein, 16 aa, Homo sapiens
  CDR3 for beta chain variable domain of TCR clone 1749 (TRBV9, TRBJ2-7)
CASSAGPDRSPYEQYF

SEQ ID NO: 3499 - protein, 14 aa, Homo sapiens
  CDR3 for alpha chain variable domain of TCR clone 1750 (TRAV13-1, TRAJ3)
CAAEGYSSASKIIF

SEQ ID NO: 3500 - protein, 14 aa, Homo sapiens
  CDR3 for beta chain variable domain of TCR clone 1750 (TRBV19, TRBJ2-5)
CASSSSGIQETQYF

SEQ ID NO: 3501 - protein, 12 aa, Homo sapiens
  CDR3 for alpha chain variable domain of TCR clone 1751 (TRAV1-2, TRAJ29)
CAVPSGNTPLVF

SEQ ID NO: 3502 - protein, 12 aa, Homo sapiens
  CDR3 for beta chain variable domain of TCR clone 1751 (TRBV12-4, TRBJ2-7)
CASSLGGYEQYF

SEQ ID NO: 3503 - protein, 14 aa, Homo sapiens
  CDR3 for alpha chain variable domain of TCR clone 1752 (TRAV12-2, TRAJ15)
CAPHTGQAGTALIF

SEQ ID NO: 3504 - protein, 17 aa, Homo sapiens
  CDR3 for beta chain variable domain of TCR clone 1752 (TRBV5-5, TRBJ1-2)
CASSLGSLDGQSEGYTF

SEQ ID NO: 3505 - protein, 13 aa, Homo sapiens
  CDR3 for alpha chain variable domain of TCR clone 1753 (TRAV27, TRAJ11)
CAGARSGYSTLTF

SEQ ID NO: 3506 - protein, 16 aa, Homo sapiens
  CDR3 for beta chain variable domain of TCR clone 1753 (TRBV10-2, TRBJ2-2)
CASSESRDRGSGELFF

SEQ ID NO: 3507 - protein, 10 aa, Homo sapiens
  CDR3 for alpha chain variable domain of TCR clone 1754 (TRAV36/DV7, TRAJ48)
CAVGNEKLTF

SEQ ID NO: 3508 - protein, 16 aa, Homo sapiens
  CDR3 for beta chain variable domain of TCR clone 1754 (TRBV15, TRBJ2-3)
CATRLSGGRAPDTQYF

SEQ ID NO: 3509 - protein, 14 aa, Homo sapiens
  CDR3 for alpha chain variable domain of TCR clone 1755 (TRAV12-2, TRAJ13)
CAVKKTGGYQKVTF

SEQ ID NO: 3510 - protein, 14 aa, Homo sapiens
  CDR3 for beta chain variable domain of TCR clone 1755 (TRBV25-1, TRBJ1-1)
CASTHLGGNTEAFF

SEQ ID NO: 3511 - protein, 15 aa, Homo sapiens
  CDR3 for alpha chain variable domain of TCR clone 1756 (TRAV23/DV6, TRAJ37)
CAAGEGSSNTGKLIF

SEQ ID NO: 3512 - protein, 17 aa, Homo sapiens
  CDR3 for beta chain variable domain of TCR clone 1756 (TRBV20-1, TRBJ2-7)
CSATRAGGVAGVEEQYF

SEQ ID NO: 3513 - protein, 14 aa, Homo sapiens
  CDR3 for alpha chain variable domain of TCR clone 1757 (TRAV10, TRAJ32)
CGEPRGGATNKLIF

SEQ ID NO: 3514 - protein, 14 aa, Homo sapiens
  CDR3 for beta chain variable domain of TCR clone 1757 (TRBV5-4, TRBJ2-2)
CASRLDGGTGELFF

SEQ ID NO: 3515 - protein, 14 aa, Homo sapiens
  CDR3 for alpha chain variable domain of TCR clone 1758 (TRAV26-1, TRAJ38)
CIADNAGNNRKLIW

SEQ ID NO: 3516 - protein, 17 aa, Homo sapiens
  CDR3 for beta chain variable domain of TCR clone 1758 (TRBV15, TRBJ1-1)
CATSRVGGADGDTEAFF

SEQ ID NO: 3517 - protein, 11 aa, Homo sapiens
  CDR3 for alpha chain variable domain of TCR clone 1759 (TRAV3, TRAJ49)
CAPITGNQFYF

SEQ ID NO: 3518 - protein, 16 aa, Homo sapiens
  CDR3 for beta chain variable domain of TCR clone 1759 (TRBV5-1, TRBJ2-3)
CASSVFPMSSTDTQYF

SEQ ID NO: 3519 - protein, 13 aa, Homo sapiens
  CDR3 for alpha chain variable domain of TCR clone 1760 (TRAV25, TRAJ54)
CAGTIQGAQKLVF

SEQ ID NO: 3520 - protein, 15 aa, Homo sapiens
  CDR3 for beta chain variable domain of TCR clone 1760 (TRBV19, TRBJ1-5)
CASSILTGENQPQHF

SEQ ID NO: 3521 - protein, 14 aa, Homo sapiens
  CDR3 for alpha chain variable domain of TCR clone 1761 (TRAV8-3, TRAJ39)
CAVGANNAGNMLTF

SEQ ID NO: 3522 - protein, 12 aa, Homo sapiens
  CDR3 for beta chain variable domain of TCR clone 1761 (TRBV28, TRBJ1-3)
CASVSSGNTIYF

SEQ ID NO: 3523 - protein, 10 aa, Homo sapiens
  CDR3 for alpha chain variable domain of TCR clone 1762 (TRAV9-2, TRAJ49)
CALTGNQFYF

SEQ ID NO: 3524 - protein, 16 aa, Homo sapiens
  CDR3 for beta chain variable domain of TCR clone 1762 (TRBV19, TRBJ2-3)
CASSPGAASRTDTQYF

SEQ ID NO: 3525 - protein, 14 aa, Homo sapiens
  CDR3 for alpha chain variable domain of TCR clone 1763 (TRAV17, TRAJ15)
CATGPNQAGTALIF

SEQ ID NO: 3526 - protein, 15 aa, Homo sapiens
  CDR3 for beta chain variable domain of TCR clone 1763 (TRBV11-2, TRBJ2-2)
CASSSDRVNAGELFF

SEQ ID NO: 3527 - protein, 12 aa, Homo sapiens
  CDR3 for alpha chain variable domain of TCR clone 1764 (TRAV12-3, TRAJ17)
CAMTLTGNKLTF

SEQ ID NO: 3528 - protein, 15 aa, Homo sapiens
  CDR3 for beta chain variable domain of TCR clone 1764 (TRBV20-1, TRBJ2-7)
CSARDRVAGMDEQYF

SEQ ID NO: 3529 - protein, 11 aa, Homo sapiens
  CDR3 for alpha chain variable domain of TCR clone 1765 (TRAV16, TRAJ49)
CSLNTGNQFYF

SEQ ID NO: 3530 - protein, 12 aa, Homo sapiens
  CDR3 for beta chain variable domain of TCR clone 1765 (TRBV7-9, TRBJ1-4)
CASSTDREKLFF

SEQ ID NO: 3531 - protein, 11 aa, Homo sapiens
  CDR3 for alpha chain variable domain of TCR clone 1766 (TRAV13-1, TRAJ8)
CAARGFQKLVF

SEQ ID NO: 3532 - protein, 16 aa, Homo sapiens
  CDR3 for beta chain variable domain of TCR clone 1766 (TRBV19, TRBJ1-5)
CASSTRGTRSNQPQHF

SEQ ID NO: 3533 - protein, 19 aa, Homo sapiens
  CDR3 for alpha chain variable domain of TCR clone 1767 (TRAV16, )
CALSGDIQNPDPAVYQLRD

SEQ ID NO: 3534 - protein, 16 aa, Homo sapiens
  CDR3 for beta chain variable domain of TCR clone 1767 (TRBV12-5, TRBJ2-5)
CASGPRTSGNQETQYF

SEQ ID NO: 3535 - protein, 12 aa, Homo sapiens
  CDR3 for alpha chain variable domain of TCR clone 1768 (TRAV12-3, TRAJ17)
CAMTLTGNELTF

SEQ ID NO: 3536 - protein, 15 aa, Homo sapiens
  CDR3 for beta chain variable domain of TCR clone 1768 (TRBV20-1, TRBJ2-7)
CSARDRVSGMDEQYF

SEQ ID NO: 3537 - protein, 14 aa, Homo sapiens
  CDR3 for alpha chain variable domain of TCR clone 1769 (TRAV1-2, TRAJ8)
CAVREDTGFQKLVF

SEQ ID NO: 3538 - protein, 15 aa, Homo sapiens
  CDR3 for beta chain variable domain of TCR clone 1769 (TRBV28, TRBJ2-6)
CASSLAGSGANVLTF

SEQ ID NO: 3539 - protein, 13 aa, Homo sapiens
  CDR3 for alpha chain variable domain of TCR clone 1770 (TRAV13-1, TRAJ6)
CAASKGGSYIPTF

SEQ ID NO: 3540 - protein, 13 aa, Homo sapiens
  CDR3 for beta chain variable domain of TCR clone 1770 (TRBV7-9, TRBJ2-5)
CASLPSGRETQYF

SEQ ID NO: 3541 - protein, 14 aa, Homo sapiens
  CDR3 for alpha chain variable domain of TCR clone 1771 (TRAV12-2, TRAJ4)
CAEDLSGGYNKLIF

SEQ ID NO: 3542 - protein, 13 aa, Homo sapiens
  CDR3 for beta chain variable domain of TCR clone 1771 (TRBV7-9, TRBJ1-2)
CASSLKQNYGYTF

SEQ ID NO: 3543 - protein, 14 aa, Homo sapiens
  CDR3 for alpha chain variable domain of TCR clone 1772 (TRAV27, TRAJ37)
CAGERSSNTGKLIF

SEQ ID NO: 3544 - protein, 15 aa, Homo sapiens
  CDR3 for beta chain variable domain of TCR clone 1772 (TRBV11-3, TRBJ1-6)
CASSLDWGANSPLHF

SEQ ID NO: 3545 - protein, 17 aa, Homo sapiens
  CDR3 for alpha chain variable domain of TCR clone 1773 (TRAV27, TRAJ52)
CAGAGWAGGTSYGKLTF

SEQ ID NO: 3546 - protein, 16 aa, Homo sapiens
  CDR3 for beta chain variable domain of TCR clone 1773 (TRBV19, TRBJ2-1)
CASSKAGPSSYNEQFF

SEQ ID NO: 3547 - protein, 17 aa, Homo sapiens
  CDR3 for alpha chain variable domain of TCR clone 1774 (TRAV3, TRAJ42)
CAVRDRDYGGSQGNLIF

SEQ ID NO: 3548 - protein, 18 aa, Homo sapiens
  CDR3 for beta chain variable domain of TCR clone 1774 (TRBV20-1, TRBJ2-3)
CSASGLAGGPGTTDTQYF

SEQ ID NO: 3549 - protein, 13 aa, Homo sapiens
  CDR3 for alpha chain variable domain of TCR clone 1775 (TRAV23/DV6, TRAJ12)
CAPRVDSSYKLIF

SEQ ID NO: 3550 - protein, 12 aa, Homo sapiens
  CDR3 for beta chain variable domain of TCR clone 1775 (TRBV7-8, TRBJ2-7)
CASSLGDREQYF

SEQ ID NO: 3551 - protein, 14 aa, Homo sapiens
  CDR3 for alpha chain variable domain of TCR clone 1776 (TRAV12-2, TRAJ13)
CAVKKTGGYQKVTF

SEQ ID NO: 3552 - protein, 16 aa, Homo sapiens
  CDR3 for beta chain variable domain of TCR clone 1776 (TRBV12-5, TRBJ2-5)
CASGPRTSGNQETQYF

SEQ ID NO: 3553 - protein, 15 aa, Homo sapiens
  CDR3 for alpha chain variable domain of TCR clone 1777 (TRAV12-2, TRAJ43)
CAFDMRFGAGTRLTV

SEQ ID NO: 3554 - protein, 17 aa, Homo sapiens
  CDR3 for beta chain variable domain of TCR clone 1777 (TRBV13, TRBJ2-3)
CASSLSRVAGGRNTQYF

SEQ ID NO: 3555 - protein, 16 aa, Homo sapiens
  CDR3 for alpha chain variable domain of TCR clone 1778 (TRAV3, TRAJ37)
CAVRGKGSGNTGKLIF

SEQ ID NO: 3556 - protein, 15 aa, Homo sapiens
  CDR3 for beta chain variable domain of TCR clone 1778 (TRBV7-9, TRBJ2-2)
CASGPLDTFPGELFF

SEQ ID NO: 3557 - protein, 14 aa, Homo sapiens
  CDR3 for alpha chain variable domain of TCR clone 1779 (TRAV12-2, TRAJ13)
CAVKKTGGYQKVTF

SEQ ID NO: 3558 - protein, 14 aa, Homo sapiens
  CDR3 for beta chain variable domain of TCR clone 1779 (TRBV10-3, TRBJ2-1)
CAISSDLAYNEQFF

SEQ ID NO: 3559 - protein, 14 aa, Homo sapiens
  CDR3 for alpha chain variable domain of TCR clone 1780 (TRAV17, TRAJ15)
CATTTNQAGTALIF

SEQ ID NO: 3560 - protein, 16 aa, Homo sapiens
  CDR3 for beta chain variable domain of TCR clone 1780 (TRBV4-1, TRBJ2-7)
CASSRGDILNSYEQYF

SEQ ID NO: 3561 - protein, 14 aa, Homo sapiens
  CDR3 for alpha chain variable domain of TCR clone 1781 (TRAV2, TRAJ9)
CAVEDRSGGFKTIF

SEQ ID NO: 3562 - protein, 16 aa, Homo sapiens
  CDR3 for beta chain variable domain of TCR clone 1781 (TRBV7-3, TRBJ2-1)
CASSLEGYRSYNEQFF

SEQ ID NO: 3563 - protein, 14 aa, Homo sapiens
  CDR3 for alpha chain variable domain of TCR clone 1782 (TRAV36/DV7, TRAJ13)
WGSGENGGYQKVTF

SEQ ID NO: 3564 - protein, 15 aa, Homo sapiens
  CDR3 for beta chain variable domain of TCR clone 1782 (TRBV19, TRBJ2-1)
CASSTGTSSYNEQFF

SEQ ID NO: 3565 - protein, 13 aa, Homo sapiens
  CDR3 for alpha chain variable domain of TCR clone 1783 (TRAV17, TRAJ5)
CAPMDTGRRALTF

SEQ ID NO: 3566 - protein, 13 aa, Homo sapiens
  CDR3 for beta chain variable domain of TCR clone 1783 (TRBV7-9, TRBJ1-2)
CASSLKQNYGYTF

SEQ ID NO: 3567 - protein, 16 aa, Homo sapiens
  CDR3 for alpha chain variable domain of TCR clone 1784 (TRAV3, TRAJ37)
CAVRGKGSGNTGKLIF

SEQ ID NO: 3568 - protein, 14 aa, Homo sapiens
  CDR3 for beta chain variable domain of TCR clone 1784 (TRBV7-2, TRBJ2-7)
CASSPKTSFYEQYF

SEQ ID NO: 3569 - protein, 10 aa, Homo sapiens
  CDR3 for alpha chain variable domain of TCR clone 1785 (TRAV12-2, TRAJ43)
CAVKVLSMRF

SEQ ID NO: 3570 - protein, 14 aa, Homo sapiens
  CDR3 for beta chain variable domain of TCR clone 1785 (TRBV11-2, TRBJ2-7)
CASSLGNSLYEQYF

SEQ ID NO: 3571 - protein, 15 aa, Homo sapiens
  CDR3 for alpha chain variable domain of TCR clone 1786 (TRAV21, TRAJ10)
CAVPLLTGGGNKLTF

SEQ ID NO: 3572 - protein, 14 aa, Homo sapiens
  CDR3 for beta chain variable domain of TCR clone 1786 (TRBV12-4, TRBJ1-1)
CASSLGTGGTEAFF

SEQ ID NO: 3573 - protein, 11 aa, Homo sapiens
  CDR3 for alpha chain variable domain of TCR clone 1787 (TRAV2, TRAJ13)
CASGGYQKVTF

SEQ ID NO: 3574 - protein, 17 aa, Homo sapiens
  CDR3 for beta chain variable domain of TCR clone 1787 (TRBV7-3, TRBJ2-3)
CASSLMKRMRGADTQYF

SEQ ID NO: 3575 - protein, 15 aa, Homo sapiens
  CDR3 for alpha chain variable domain of TCR clone 1788 (TRAV21, TRAJ53)
CATLNSGGSNYKLTF

SEQ ID NO: 3576 - protein, 15 aa, Homo sapiens
  CDR3 for beta chain variable domain of TCR clone 1788 (TRBV18, TRBJ2-1)
CASSPPSASYNEQFF

SEQ ID NO: 3577 - protein, 14 aa, Homo sapiens
  CDR3 for alpha chain variable domain of TCR clone 1789 (TRAV2, TRAJ9)
CAVEDRSGGFKTIF

SEQ ID NO: 3578 - protein, 16 aa, Homo sapiens
  CDR3 for beta chain variable domain of TCR clone 1789 (TRBV7-3, TRBJ2-2)
CASSLKRGTLSGELFF

SEQ ID NO: 3579 - protein, 14 aa, Homo sapiens
  CDR3 for alpha chain variable domain of TCR clone 1790 (TRAV27, TRAJ17)
CRSTIRAAGNKLTF

SEQ ID NO: 3580 - protein, 16 aa, Homo sapiens
  CDR3 for beta chain variable domain of TCR clone 1790 (TRBV5-7, TRBJ2-5)
CASTLAPAGGRETQYF

SEQ ID NO: 3581 - protein, 11 aa, Homo sapiens
  CDR3 for alpha chain variable domain of TCR clone 1791 (TRAV3, TRAJ21)
RAVGNFNKFYF

SEQ ID NO: 3582 - protein, 16 aa, Homo sapiens
  CDR3 for beta chain variable domain of TCR clone 1791 (TRBV19, TRBJ2-1)
CASSKAGPSSYNEQFF

SEQ ID NO: 3583 - protein, 18 aa, Homo sapiens
  CDR3 for alpha chain variable domain of TCR clone 1792 (TRAV21, TRAJ52)
CAVRPSPAGGTSYGKLTF

SEQ ID NO: 3584 - protein, 13 aa, Homo sapiens
  CDR3 for beta chain variable domain of TCR clone 1792 (TRBV10-3, TRBJ2-7)
CASKLAVNYEQYF

SEQ ID NO: 3585 - protein, 12 aa, Homo sapiens
  CDR3 for alpha chain variable domain of TCR clone 1793 (TRAV16, TRAJ10)
CSRTGGGNKLTF

SEQ ID NO: 3586 - protein, 19 aa, Homo sapiens
  CDR3 for beta chain variable domain of TCR clone 1793 (TRBV25-1, TRBJ2-2)
CAILVYRVDRGRKTGELFF

SEQ ID NO: 3587 - protein, 16 aa, Homo sapiens
  CDR3 for alpha chain variable domain of TCR clone 1794 (TRAV1-1, TRAJ45)
CAVRAYSGGGADGLTF

SEQ ID NO: 3588 - protein, 13 aa, Homo sapiens
  CDR3 for beta chain variable domain of TCR clone 1794 (TRBV20-1, TRBJ1-2)
CSARGTADYGYTF

SEQ ID NO: 3589 - protein, 14 aa, Homo sapiens
  CDR3 for alpha chain variable domain of TCR clone 1795 (TRAV1-2, TRAJ16)
CAVNRFSDGQKLLF

SEQ ID NO: 3590 - protein, 14 aa, Homo sapiens
  CDR3 for beta chain variable domain of TCR clone 1795 (TRBV7-2, TRBJ1-1)
CASSFLTGTTEAFF

SEQ ID NO: 3591 - protein, 13 aa, Homo sapiens
  CDR3 for alpha chain variable domain of TCR clone 1796 (TRAV23/DV6, TRAJ34)
CAAIENNTDKLIF

SEQ ID NO: 3592 - protein, 13 aa, Homo sapiens
  CDR3 for beta chain variable domain of TCR clone 1796 (TRBV29-1, TRBJ2-7)
CSVGPSGGYEQYF

SEQ ID NO: 3593 - protein, 14 aa, Homo sapiens
  CDR3 for alpha chain variable domain of TCR clone 1797 (TRAV14/DV4, TRAJ15)
CAMRRDQAGTALIF

SEQ ID NO: 3594 - protein, 11 aa, Homo sapiens
  CDR3 for beta chain variable domain of TCR clone 1797 (TRBV7-2, TRBJ2-7)
CASSSGLWQYF

SEQ ID NO: 3595 - protein, 13 aa, Homo sapiens
  CDR3 for alpha chain variable domain of TCR clone 1798 (TRAV25, TRAJ40)
CAGSASGTYKYIF

SEQ ID NO: 3596 - protein, 14 aa, Homo sapiens
  CDR3 for beta chain variable domain of TCR clone 1798 (TRBV7-2, TRBJ2-7)
CASRSQGAAYEQYF

SEQ ID NO: 3597 - protein, 16 aa, Homo sapiens
  CDR3 for alpha chain variable domain of TCR clone 1799 (TRAV12-2, TRAJ40)
CAVIRGGTSGTYKYIF

SEQ ID NO: 3598 - protein, 16 aa, Homo sapiens
  CDR3 for beta chain variable domain of TCR clone 1799 (TRBV7-9, TRBJ2-1)
CASSDVAGGSYNEQFF

SEQ ID NO: 3599 - protein, 12 aa, Homo sapiens
  CDR3 for alpha chain variable domain of TCR clone 1800 (TRAV26-2, TRAJ21)
CILKGNFNKFYF

SEQ ID NO: 3600 - protein, 14 aa, Homo sapiens
  CDR3 for beta chain variable domain of TCR clone 1800 (TRBV12-4, TRBJ1-1)
CASSLGTGGTEAFF

SEQ ID NO: 3601 - protein, 13 aa, Homo sapiens
  CDR3 for alpha chain variable domain of TCR clone 1801 (TRAV13-1, TRAJ6)
CAARRGGSYIPTF

SEQ ID NO: 3602 - protein, 16 aa, Homo sapiens
  CDR3 for beta chain variable domain of TCR clone 1801 (TRBV7-9, TRBJ2-2)
CASSLATGVGTGELFF

SEQ ID NO: 3603 - protein, 15 aa, Homo sapiens
  CDR3 for alpha chain variable domain of TCR clone 1802 (TRAV8-3, TRAJ37)
CAVGARASNTGKLIF

SEQ ID NO: 3604 - protein, 15 aa, Homo sapiens
  CDR3 for beta chain variable domain of TCR clone 1802 (TRBV5-4, TRBJ2-3)
CASSLAGRVTDTQYF

SEQ ID NO: 3605 - protein, 19 aa, Homo sapiens
  CDR3 for alpha chain variable domain of TCR clone 1803 (TRAV13-1, TRAJ52)
CAASPYQNAGGTSYGKLTF

SEQ ID NO: 3606 - protein, 14 aa, Homo sapiens
  CDR3 for beta chain variable domain of TCR clone 1803 (TRBV19, TRBJ2-7)
CASTVQGRPYEQYF

SEQ ID NO: 3607 - protein, 15 aa, Homo sapiens
  CDR3 for alpha chain variable domain of TCR clone 1804 (TRAV13-1, TRAJ42)
CAASIAGGSQGNLIF

SEQ ID NO: 3608 - protein, 15 aa, Homo sapiens
  CDR3 for beta chain variable domain of TCR clone 1804 (TRBV19, TRBJ2-1)
CASSIVRGEGREQFF

SEQ ID NO: 3609 - protein, 13 aa, Homo sapiens
  CDR3 for alpha chain variable domain of TCR clone 1805 (TRAV26-1, TRAJ34)
CIVRPWITDKLIF

SEQ ID NO: 3610 - protein, 14 aa, Homo sapiens
  CDR3 for beta chain variable domain of TCR clone 1805 (TRBV7-2, TRBJ2-7)
CASRSQGAAYEQYF

SEQ ID NO: 3611 - protein, 12 aa, Homo sapiens
  CDR3 for alpha chain variable domain of TCR clone 1806 (TRAV36/DV7, TRAJ37)
CACYGNTGKLIF

SEQ ID NO: 3612 - protein, 13 aa, Homo sapiens
  CDR3 for beta chain variable domain of TCR clone 1806 (TRBV10-3, TRBJ2-7)
CASKLAVNYEQYF

SEQ ID NO: 3613 - protein, 15 aa, Homo sapiens
  CDR3 for alpha chain variable domain of TCR clone 1807 (TRAV3, TRAJ9)
CAVRARNTGGFKTIF

SEQ ID NO: 3614 - protein, 12 aa, Homo sapiens
  CDR3 for beta chain variable domain of TCR clone 1807 (TRBV11-2, TRBJ2-7)
CASSLPTYEQYF

SEQ ID NO: 3615 - protein, 14 aa, Homo sapiens
  CDR3 for alpha chain variable domain of TCR clone 1808 (TRAV2, TRAJ37)
CAVDFTSNTGKLIF

SEQ ID NO: 3616 - protein, 13 aa, Homo sapiens
  CDR3 for beta chain variable domain of TCR clone 1808 (TRBV4-1, TRBJ2-2)
CASSQENTGELFF

SEQ ID NO: 3617 - protein, 16 aa, Homo sapiens
  CDR3 for alpha chain variable domain of TCR clone 1809 (TRAV17, TRAJ28)
CATDEYSGAGSYQLTF

SEQ ID NO: 3618 - protein, 13 aa, Homo sapiens
  CDR3 for beta chain variable domain of TCR clone 1809 (TRBV7-9, TRBJ1-2)
CASRTGPNYGYTF

SEQ ID NO: 3619 - protein, 11 aa, Homo sapiens
  CDR3 for alpha chain variable domain of TCR clone 1810 (TRAV17, TRAJ36)
CAPTGANNLFF

SEQ ID NO: 3620 - protein, 13 aa, Homo sapiens
  CDR3 for beta chain variable domain of TCR clone 1810 (TRBV12-4, TRBJ2-7)
CASSPTETYEQYF

SEQ ID NO: 3621 - protein, 14 aa, Homo sapiens
  CDR3 for alpha chain variable domain of TCR clone 1811 (TRAV1-2, TRAJ16)
CAVNRFSDGQKLLF

SEQ ID NO: 3622 - protein, 15 aa, Homo sapiens
  CDR3 for beta chain variable domain of TCR clone 1811 (TRBV2, TRBJ2-1)
CASSEEREGDNEQFF

SEQ ID NO: 3623 - protein, 14 aa, Homo sapiens
  CDR3 for alpha chain variable domain of TCR clone 1812 (TRAV13-1, TRAJ44)
CAAKATGTASKLTF

SEQ ID NO: 3624 - protein, 14 aa, Homo sapiens
  CDR3 for beta chain variable domain of TCR clone 1812 (TRBV25-1, TRBJ1-1)
CASTHLGGNTEAFF

SEQ ID NO: 3625 - protein, 13 aa, Homo sapiens
  CDR3 for alpha chain variable domain of TCR clone 1813 (TRAV13-1, TRAJ49)
CAAMLYTGNQFYF

SEQ ID NO: 3626 - protein, 15 aa, Homo sapiens
  CDR3 for beta chain variable domain of TCR clone 1813 (TRBV12-4, TRBJ1-5)
CASTRGSGFGQPQHF

SEQ ID NO: 3627 - protein, 12 aa, Homo sapiens
  CDR3 for alpha chain variable domain of TCR clone 1814 (TRAV3, TRAJ34)
CAVLGNTDKLIF

SEQ ID NO: 3628 - protein, 13 aa, Homo sapiens
  CDR3 for beta chain variable domain of TCR clone 1814 (TRBV19, TRBJ2-1)
CASSIGTGNEQFF

SEQ ID NO: 3629 - protein, 10 aa, Homo sapiens
  CDR3 for alpha chain variable domain of TCR clone 1815 (TRAV13-1, TRAJ27)
CAPLARQINL

SEQ ID NO: 3630 - protein, 13 aa, Homo sapiens
  CDR3 for beta chain variable domain of TCR clone 1815 (TRBV28, TRBJ1-1)
CASSKQGWTEAFF

SEQ ID NO: 3631 - protein, 18 aa, Homo sapiens
  CDR3 for alpha chain variable domain of TCR clone 1816 (TRAV21, TRAJ52)
CAVRPSPAGGTSYGKLTF

SEQ ID NO: 3632 - protein, 13 aa, Homo sapiens
  CDR3 for beta chain variable domain of TCR clone 1816 (TRBV2, TRBJ1-5)
CATAGPGNQPQHF

SEQ ID NO: 3633 - protein, 12 aa, Homo sapiens
  CDR3 for alpha chain variable domain of TCR clone 1817 (TRAV27, TRAJ35)
CAGADFGNVLHC

SEQ ID NO: 3634 - protein, 13 aa, Homo sapiens
  CDR3 for beta chain variable domain of TCR clone 1817 (TRBV7-3, TRBJ1-1)
CASSQDWGAEAFF

SEQ ID NO: 3635 - protein, 12 aa, Homo sapiens
  CDR3 for alpha chain variable domain of TCR clone 1818 (TRAV13-1, TRAJ21)
CAAKEGFNKFYF

SEQ ID NO: 3636 - protein, 15 aa, Homo sapiens
  CDR3 for beta chain variable domain of TCR clone 1818 (TRBV7-9, TRBJ1-6)
CASSSPGRGNSPLHF

SEQ ID NO: 3637 - protein, 15 aa, Homo sapiens
  CDR3 for alpha chain variable domain of TCR clone 1819 (TRAV26-1, TRAJ23)
CIVRVLNNQGGKLIF

SEQ ID NO: 3638 - protein, 15 aa, Homo sapiens
  CDR3 for beta chain variable domain of TCR clone 1819 (TRBV7-3, TRBJ2-1)
CASSFGQSNYNEQFF

SEQ ID NO: 3639 - protein, 15 aa, Homo sapiens
  CDR3 for alpha chain variable domain of TCR clone 1820 (TRAV13-2, TRAJ10)
CAENRDTGGGNKLTF

SEQ ID NO: 3640 - protein, 16 aa, Homo sapiens
  CDR3 for beta chain variable domain of TCR clone 1820 (TRBV2, TRBJ1-3)
CASSRTGGSTGNTIYF

SEQ ID NO: 3641 - protein, 13 aa, Homo sapiens
  CDR3 for alpha chain variable domain of TCR clone 1821 (TRAV17, TRAJ40)
CATAPGGTYKYIF

SEQ ID NO: 3642 - protein, 12 aa, Homo sapiens
  CDR3 for beta chain variable domain of TCR clone 1821 (TRBV2, TRBJ1-5)
CASSENRTPQHF

SEQ ID NO: 3643 - protein, 18 aa, Homo sapiens
  CDR3 for alpha chain variable domain of TCR clone 1822 (TRAV26-2, TRAJ45)
CILRVDKYSGGGADGLTF

SEQ ID NO: 3644 - protein, 14 aa, Homo sapiens
  CDR3 for beta chain variable domain of TCR clone 1822 (TRBV7-2, TRBJ2-7)
CASRSQGAAYEQYF

SEQ ID NO: 3645 - protein, 14 aa, Homo sapiens
  CDR3 for alpha chain variable domain of TCR clone 1823 (TRAV12-3, TRAJ33)
CAMSVPGSNYQLIW

SEQ ID NO: 3646 - protein, 12 aa, Homo sapiens
  CDR3 for beta chain variable domain of TCR clone 1823 (TRBV7-8, TRBJ2-7)
CASSLGDREQYF

SEQ ID NO: 3647 - protein, 14 aa, Homo sapiens
  CDR3 for alpha chain variable domain of TCR clone 1824 (TRAV12-2, TRAJ17)
CAVLFKAAGNKLTF

SEQ ID NO: 3648 - protein, 12 aa, Homo sapiens
  CDR3 for beta chain variable domain of TCR clone 1824 (TRBV11-2, TRBJ2-2)
CASSLGGGELFF

SEQ ID NO: 3649 - protein, 13 aa, Homo sapiens
  CDR3 for alpha chain variable domain of TCR clone 1825 (TRAV2, TRAJ15)
CAVASQAGTALIF

SEQ ID NO: 3650 - protein, 17 aa, Homo sapiens
  CDR3 for beta chain variable domain of TCR clone 1825 (TRBV20-1, TRBJ2-2)
CSASGSGQGGLTGELFF

SEQ ID NO: 3651 - protein, 13 aa, Homo sapiens
  CDR3 for alpha chain variable domain of TCR clone 1826 (TRAV12-3, TRAJ47)
CAMKKEYGNKLVF

SEQ ID NO: 3652 - protein, 16 aa, Homo sapiens
  CDR3 for beta chain variable domain of TCR clone 1826 (TRBV3-1, TRBJ2-6)
CASSLTWVSGANVLTF

SEQ ID NO: 3653 - protein, 13 aa, Homo sapiens
  CDR3 for alpha chain variable domain of TCR clone 1827 (TRAV2, TRAJ24)
CAVSTDSWGKLQF

SEQ ID NO: 3654 - protein, 14 aa, Homo sapiens
  CDR3 for beta chain variable domain of TCR clone 1827 (TRBV13, TRBJ2-5)
CASSLGTAQETQYF

SEQ ID NO: 3655 - protein, 15 aa, Homo sapiens
  CDR3 for alpha chain variable domain of TCR clone 1828 (TRAV17, TRAJ10)
CATVLLTGGGNKLTF

SEQ ID NO: 3656 - protein, 16 aa, Homo sapiens
  CDR3 for beta chain variable domain of TCR clone 1828 (TRBV7-9, TRBJ2-3)
CASSPWREVGTDTQYF

SEQ ID NO: 3657 - protein, 14 aa, Homo sapiens
  CDR3 for alpha chain variable domain of TCR clone 1829 (TRAV38-1, TRAJ43)
CAFMKHNNNNDMRF

SEQ ID NO: 3658 - protein, 17 aa, Homo sapiens
  CDR3 for beta chain variable domain of TCR clone 1829 (TRBV7-7, TRBJ1-4)
CASSLVGQGASNEKLFF

SEQ ID NO: 3659 - protein, 13 aa, Homo sapiens
  CDR3 for alpha chain variable domain of TCR clone 1830 (TRAV3, TRAJ8)
CAVRFTGFQKLVF

SEQ ID NO: 3660 - protein, 15 aa, Homo sapiens
  CDR3 for beta chain variable domain of TCR clone 1830 (TRBV20-1, TRBJ2-7)
CSARDRVSGMDEQYF

SEQ ID NO: 3661 - protein, 12 aa, Homo sapiens
  CDR3 for alpha chain variable domain of TCR clone 1831 (TRAV8-3, TRAJ26)
CAGDNYGQNFVF

SEQ ID NO: 3662 - protein, 15 aa, Homo sapiens
  CDR3 for beta chain variable domain of TCR clone 1831 (TRBV5-1, TRBJ2-3)
CASSVTSGSTDTQYF

SEQ ID NO: 3663 - protein, 11 aa, Homo sapiens
  CDR3 for alpha chain variable domain of TCR clone 1832 (TRAV4, TRAJ23)
CLVAPGGKLIF

SEQ ID NO: 3664 - protein, 13 aa, Homo sapiens
  CDR3 for beta chain variable domain of TCR clone 1832 (TRBV7-9, TRBJ1-2)
CASSLKQNYGYTF

SEQ ID NO: 3665 - protein, 15 aa, Homo sapiens
  CDR3 for alpha chain variable domain of TCR clone 1833 (TRAV12-1, TRAJ36)
CVVNEHQTGANNLFF

SEQ ID NO: 3666 - protein, 12 aa, Homo sapiens
  CDR3 for beta chain variable domain of TCR clone 1833 (TRBV29-1, TRBJ2-3)
CSVTGGADTQYF

SEQ ID NO: 3667 - protein, 12 aa, Homo sapiens
  CDR3 for alpha chain variable domain of TCR clone 1834 (TRAV2, TRAJ33)
CAVPDSNYQLIW

SEQ ID NO: 3668 - protein, 15 aa, Homo sapiens
  CDR3 for beta chain variable domain of TCR clone 1834 (TRBV15, TRBJ1-5)
CATSRDPVSNQPQHF

SEQ ID NO: 3669 - protein, 14 aa, Homo sapiens
  CDR3 for alpha chain variable domain of TCR clone 1835 (TRAV8-1, TRAJ5)
CAVRTDTGRRALTF

SEQ ID NO: 3670 - protein, 15 aa, Homo sapiens
  CDR3 for beta chain variable domain of TCR clone 1835 (TRBV7-3, TRBJ2-1)
CASSPTGGGEVEQFF

SEQ ID NO: 3671 - protein, 15 aa, Homo sapiens
  CDR3 for alpha chain variable domain of TCR clone 1836 (TRAV26-1, TRAJ21)
CIVRVPNYNFNKFYF

SEQ ID NO: 3672 - protein, 16 aa, Homo sapiens
  CDR3 for beta chain variable domain of TCR clone 1836 (TRBV7-9, TRBJ2-3)
CASSLQGNPGTDTQYF

SEQ ID NO: 3673 - protein, 13 aa, Homo sapiens
  CDR3 for alpha chain variable domain of TCR clone 1837 (TRAV17, TRAJ5)
CATMDTGRRALTF

SEQ ID NO: 3674 - protein, 15 aa, Homo sapiens
  CDR3 for beta chain variable domain of TCR clone 1837 (TRBV20-1, TRBJ2-5)
CSATRTSGSLETQYF

SEQ ID NO: 3675 - protein, 17 aa, Homo sapiens
  CDR3 for alpha chain variable domain of TCR clone 1838 (TRAV12-3, TRAJ26)
CAMSGGRWDNYGQNFVF

SEQ ID NO: 3676 - protein, 12 aa, Homo sapiens
  CDR3 for beta chain variable domain of TCR clone 1838 (TRBV19, TRBJ1-1)
CASSTTGIEAFF

SEQ ID NO: 3677 - protein, 13 aa, Homo sapiens
  CDR3 for alpha chain variable domain of TCR clone 1839 (TRAV12-3, TRAJ41)
CAIAPNSGYALNF

SEQ ID NO: 3678 - protein, 14 aa, Homo sapiens
  CDR3 for beta chain variable domain of TCR clone 1839 (TRBV7-2, TRBJ1-3)
CASSLGTAGNTIYF

SEQ ID NO: 3679 - protein, 17 aa, Homo sapiens
  CDR3 for alpha chain variable domain of TCR clone 1840 (TRAV13-2, TRAJ42)
CAEKGKNYGGSQGNLIF

SEQ ID NO: 3680 - protein, 16 aa, Homo sapiens
  CDR3 for beta chain variable domain of TCR clone 1840 (TRBV7-9, TRBJ2-1)
CASSLGTGWDYNEQFF

SEQ ID NO: 3681 - protein, 14 aa, Homo sapiens
  CDR3 for alpha chain variable domain of TCR clone 1841 (TRAV12-2, TRAJ40)
CAVKIPSGTYKYIF

SEQ ID NO: 3682 - protein, 17 aa, Homo sapiens
  CDR3 for beta chain variable domain of TCR clone 1841 (TRBV7-8, TRBJ2-6)
CASSAGTGGAGANVLTF

SEQ ID NO: 3683 - protein, 14 aa, Homo sapiens
  CDR3 for alpha chain variable domain of TCR clone 1842 (TRAV12-2, TRAJ45)
CAVNKGGGADGLTF

SEQ ID NO: 3684 - protein, 14 aa, Homo sapiens
  CDR3 for beta chain variable domain of TCR clone 1842 (TRBV20-1, TRBJ1-1)
CSAMGGTANTEAFF

SEQ ID NO: 3685 - protein, 15 aa, Homo sapiens
  CDR3 for alpha chain variable domain of TCR clone 1843 (TRAV12-3, TRAJ52)
CNGGAGGTSYGKLTF

SEQ ID NO: 3686 - protein, 13 aa, Homo sapiens
  CDR3 for beta chain variable domain of TCR clone 1843 (TRBV20-1, TRBJ2-5)
CSARGDYQETQYF

SEQ ID NO: 3687 - protein, 15 aa, Homo sapiens
  CDR3 for alpha chain variable domain of TCR clone 1844 (TRAV27, TRAJ38)
CAARRNAGNNRKLIW

SEQ ID NO: 3688 - protein, 13 aa, Homo sapiens
  CDR3 for beta chain variable domain of TCR clone 1844 (TRBV7-3, TRBJ2-1)
CASSLDSYNEQFF

SEQ ID NO: 3689 - protein, 14 aa, Homo sapiens
  CDR3 for alpha chain variable domain of TCR clone 1845 (TRAV13-1, TRAJ23)
CAASRLGRGGKLIF

SEQ ID NO: 3690 - protein, 15 aa, Homo sapiens
  CDR3 for beta chain variable domain of TCR clone 1845 (TRBV7-2, TRBJ2-1)
CASSLVAGRYNEQFF

SEQ ID NO: 3691 - protein, 15 aa, Homo sapiens
  CDR3 for alpha chain variable domain of TCR clone 1846 (TRAV26-2, TRAJ54)
CILRDVGQGAQKLVF

SEQ ID NO: 3692 - protein, 13 aa, Homo sapiens
  CDR3 for beta chain variable domain of TCR clone 1846 (TRBV7-9, TRBJ1-1)
CASSLAGVTEAFF

SEQ ID NO: 3693 - protein, 13 aa, Homo sapiens
  CDR3 for alpha chain variable domain of TCR clone 1847 (TRAV12-3, TRAJ33)
CAMSVNSNYQLIW

SEQ ID NO: 3694 - protein, 16 aa, Homo sapiens
  CDR3 for beta chain variable domain of TCR clone 1847 (TRBV13, TRBJ2-5)
CASSLRTGGSWETQYF

SEQ ID NO: 3695 - protein, 14 aa, Homo sapiens
  CDR3 for alpha chain variable domain of TCR clone 1848 (TRAV12-3, TRAJ10)
SHLPLTGGGNKLTF

SEQ ID NO: 3696 - protein, 11 aa, Homo sapiens
  CDR3 for beta chain variable domain of TCR clone 1848 (TRBV29-1, TRBJ2-5)
CSEDRTGTQYF

SEQ ID NO: 3697 - protein, 14 aa, Homo sapiens
  CDR3 for alpha chain variable domain of TCR clone 1849 (TRAV2, TRAJ9)
CAVEDRSGGFKTIF

SEQ ID NO: 3698 - protein, 14 aa, Homo sapiens
  CDR3 for beta chain variable domain of TCR clone 1849 (TRBV18, TRBJ1-5)
CASSRQQRNQPQHF

SEQ ID NO: 3699 - protein, 17 aa, Homo sapiens
  CDR3 for alpha chain variable domain of TCR clone 1850 (TRAV38-1, TRAJ45)
CAFMRSHSGGGADGLTF

SEQ ID NO: 3700 - protein, 15 aa, Homo sapiens
  CDR3 for beta chain variable domain of TCR clone 1850 (TRBV7-2, TRBJ2-3)
CASSLVVRGPDTQYF

SEQ ID NO: 3701 - protein, 14 aa, Homo sapiens
  CDR3 for alpha chain variable domain of TCR clone 1851 (TRAV16, TRAJ48)
CALTPGFGNEKLTF

SEQ ID NO: 3702 - protein, 14 aa, Homo sapiens
  CDR3 for beta chain variable domain of TCR clone 1851 (TRBV7-2, TRBJ2-7)
CASSSISGFSEQYF

SEQ ID NO: 3703 - protein, 14 aa, Homo sapiens
  CDR3 for alpha chain variable domain of TCR clone 1852 (TRAV2, TRAJ9)
CAVEDRSGGFKTIF

SEQ ID NO: 3704 - protein, 12 aa, Homo sapiens
  CDR3 for beta chain variable domain of TCR clone 1852 (TRBV11-2, TRBJ2-1)
CASSPGNNEQFF

SEQ ID NO: 3705 - protein, 13 aa, Homo sapiens
  CDR3 for alpha chain variable domain of TCR clone 1853 (TRAV2, TRAJ15)
CAVASQAGTALIF

SEQ ID NO: 3706 - protein, 15 aa, Homo sapiens
  CDR3 for beta chain variable domain of TCR clone 1853 (TRBV20-1, TRBJ2-7)
CSARDRVSGMDEQYF

SEQ ID NO: 3707 - protein, 13 aa, Homo sapiens
  CDR3 for alpha chain variable domain of TCR clone 1854 (TRAV16, TRAJ29)
CALSRRGNTPLVF

SEQ ID NO: 3708 - protein, 15 aa, Homo sapiens
  CDR3 for beta chain variable domain of TCR clone 1854 (TRBV4-1, TRBJ2-3)
CASSRGQGIPDTQYF

SEQ ID NO: 3709 - protein, 14 aa, Homo sapiens
  CDR3 for alpha chain variable domain of TCR clone 1855 (TRAV26-1, TRAJ44)
CISPLPGTASKLTF

SEQ ID NO: 3710 - protein, 16 aa, Homo sapiens
  CDR3 for beta chain variable domain of TCR clone 1855 (TRBV19, TRBJ2-1)
CASSKAGPSSYNEQFF

SEQ ID NO: 3711 - protein, 16 aa, Homo sapiens
  CDR3 for alpha chain variable domain of TCR clone 1856 (TRAV3, TRAJ32)
CAVRENYGGATNKLIF

SEQ ID NO: 3712 - protein, 12 aa, Homo sapiens
  CDR3 for beta chain variable domain of TCR clone 1856 (TRBV20-1, TRBJ1-2)
CSVTPEGYGYTF

SEQ ID NO: 3713 - protein, 12 aa, Homo sapiens
  CDR3 for alpha chain variable domain of TCR clone 1857 (TRAV14/DV4, TRAJ9)
CAMNPGGFKTIF

SEQ ID NO: 3714 - protein, 16 aa, Homo sapiens
  CDR3 for beta chain variable domain of TCR clone 1857 (TRBV28, TRBJ2-5)
CASSFSPAGGWETQYF

SEQ ID NO: 3715 - protein, 15 aa, Homo sapiens
  CDR3 for alpha chain variable domain of TCR clone 1858 (TRAV12-2, TRAJ9)
CAVNNERTGGFKTIF

SEQ ID NO: 3716 - protein, 14 aa, Homo sapiens
  CDR3 for beta chain variable domain of TCR clone 1858 (TRBV4-1, TRBJ1-4)
CASSQERKNEKLFF

SEQ ID NO: 3717 - protein, 13 aa, Homo sapiens
  CDR3 for alpha chain variable domain of TCR clone 1859 (TRAV36/DV7, TRAJ54)
CAVCTQGAQKLVF

SEQ ID NO: 3718 - protein, 13 aa, Homo sapiens
  CDR3 for beta chain variable domain of TCR clone 1859 (TRBV7-6, TRBJ2-7)
CASSLDHTHEQYF

SEQ ID NO: 3719 - protein, 14 aa, Homo sapiens
  CDR3 for alpha chain variable domain of TCR clone 1860 (TRAV2, TRAJ9)
CAVEDRSGGFKTIF

SEQ ID NO: 3720 - protein, 11 aa, Homo sapiens
  CDR3 for beta chain variable domain of TCR clone 1860 (TRBV7-9, TRBJ2-5)
CASSLGETQYF

SEQ ID NO: 3721 - protein, 12 aa, Homo sapiens
  CDR3 for alpha chain variable domain of TCR clone 1861 (TRAV2, TRAJ36)
CAELTGANNLFF

SEQ ID NO: 3722 - protein, 14 aa, Homo sapiens
  CDR3 for beta chain variable domain of TCR clone 1861 (TRBV18, TRBJ2-7)
CASSPRGGAYEQYF

SEQ ID NO: 3723 - protein, 13 aa, Homo sapiens
  CDR3 for alpha chain variable domain of TCR clone 1862 (TRAV12-2, TRAJ10)
CAVPTGGGNKLTF

SEQ ID NO: 3724 - protein, 14 aa, Homo sapiens
  CDR3 for beta chain variable domain of TCR clone 1862 (TRBV25-1, TRBJ1-1)
CASTHLGGNTEAFF

SEQ ID NO: 3725 - protein, 13 aa, Homo sapiens
  CDR3 for alpha chain variable domain of TCR clone 1863 (TRAV26-1, TRAJ31)
CIVRVDGNARLMF

SEQ ID NO: 3726 - protein, 17 aa, Homo sapiens
  CDR3 for beta chain variable domain of TCR clone 1863 (TRBV11-2, TRBJ2-1)
CASSLYPPGVEYNEQFF

SEQ ID NO: 3727 - protein, 12 aa, Homo sapiens
  CDR3 for alpha chain variable domain of TCR clone 1864 (TRAV12-2, TRAJ3)
CAVWSSASKIIF

SEQ ID NO: 3728 - protein, 12 aa, Homo sapiens
  CDR3 for beta chain variable domain of TCR clone 1864 (TRBV11-2, TRBJ2-1)
CASSPGNNEQFF

SEQ ID NO: 3729 - protein, 14 aa, Homo sapiens
  CDR3 for alpha chain variable domain of TCR clone 1865 (TRAV3, TRAJ16)
CCERLKSDGQKLLF

SEQ ID NO: 3730 - protein, 15 aa, Homo sapiens
  CDR3 for beta chain variable domain of TCR clone 1865 (TRBV28, TRBJ2-7)
CASSPGGRGFYEQYF

SEQ ID NO: 3731 - protein, 15 aa, Homo sapiens
  CDR3 for alpha chain variable domain of TCR clone 1866 (TRAV13-1, TRAJ32)
CAASIYGGATNKLIF

SEQ ID NO: 3732 - protein, 14 aa, Homo sapiens
  CDR3 for beta chain variable domain of TCR clone 1866 (TRBV7-9, TRBJ2-1)
CASSLASGSNEQFF

SEQ ID NO: 3733 - protein, 23 aa, Homo sapiens
  CDR3 for alpha chain variable domain of TCR clone 1867 (TRAV1-1, TRAJ11)
LLQELQMKDSASYFCAGYSTLTF

SEQ ID NO: 3734 - protein, 15 aa, Homo sapiens
  CDR3 for beta chain variable domain of TCR clone 1867 (TRBV6-5, TRBJ2-1)
CASRGDFDSYNEQFF

SEQ ID NO: 3735 - protein, 13 aa, Homo sapiens
  CDR3 for alpha chain variable domain of TCR clone 1868 (TRAV27, TRAJ56)
CAGKPGANSKLTF

SEQ ID NO: 3736 - protein, 15 aa, Homo sapiens
  CDR3 for beta chain variable domain of TCR clone 1868 (TRBV6-1, TRBJ2-3)
CASSERWDSTDTQYF

SEQ ID NO: 3737 - protein, 14 aa, Homo sapiens
  CDR3 for alpha chain variable domain of TCR clone 1869 (TRAV1-2, TRAJ8)
CAVREDTGFQKLVF

SEQ ID NO: 3738 - protein, 14 aa, Homo sapiens
  CDR3 for beta chain variable domain of TCR clone 1869 (TRBV7-6, TRBJ2-3)
CASSLGTVTDTQYF

SEQ ID NO: 3739 - protein, 15 aa, Homo sapiens
  CDR3 for alpha chain variable domain of TCR clone 1870 (TRAV12-2, TRAJ53)
CAVNGGGGSNYKLTF

SEQ ID NO: 3740 - protein, 14 aa, Homo sapiens
  CDR3 for beta chain variable domain of TCR clone 1870 (TRBV18, TRBJ2-7)
CASSPRGGAYEQYF

SEQ ID NO: 3741 - protein, 20 aa, Homo sapiens
  CDR3 for alpha chain variable domain of TCR clone 1871 (TRAV12-2, TRAJ52)
SPVIQPPARAGGTSYGKLTF

SEQ ID NO: 3742 - protein, 16 aa, Homo sapiens
  CDR3 for beta chain variable domain of TCR clone 1871 (TRBV15, TRBJ1-2)
CATSRGPRTGGGGYTF

SEQ ID NO: 3743 - protein, 16 aa, Homo sapiens
  CDR3 for alpha chain variable domain of TCR clone 1872 (TRAV3, TRAJ37)
CAVRGKGSGNTGKLIF

SEQ ID NO: 3744 - protein, 13 aa, Homo sapiens
  CDR3 for beta chain variable domain of TCR clone 1872 (TRBV19, TRBJ1-2)
CASSVPGQDGYTF

SEQ ID NO: 3745 - protein, 16 aa, Homo sapiens
  CDR3 for alpha chain variable domain of TCR clone 1873 (TRAV12-1, TRAJ53)
CVVTSVAGGSNYKLTF

SEQ ID NO: 3746 - protein, 16 aa, Homo sapiens
  CDR3 for beta chain variable domain of TCR clone 1873 (TRBV6-6, TRBJ2-3)
CASSYSHAGSTDTQYF

SEQ ID NO: 3747 - protein, 11 aa, Homo sapiens
  CDR3 for alpha chain variable domain of TCR clone 1874 (TRAV23/DV6, TRAJ49)
CAVAPVTSSIL

SEQ ID NO: 3748 - protein, 13 aa, Homo sapiens
  CDR3 for beta chain variable domain of TCR clone 1874 (TRBV6-1, TRBJ1-1)
CASSRQGNTEAFF

SEQ ID NO: 3749 - protein, 14 aa, Homo sapiens
  CDR3 for alpha chain variable domain of TCR clone 1875 (TRAV2, TRAJ9)
CAVEDRSGGFKTIF

SEQ ID NO: 3750 - protein, 12 aa, Homo sapiens
  CDR3 for beta chain variable domain of TCR clone 1875 (TRBV12-4, TRBJ2-4)
CASSSSGNIQYF

SEQ ID NO: 3751 - protein, 13 aa, Homo sapiens
  CDR3 for alpha chain variable domain of TCR clone 1876 (TRAV26-1, TRAJ36)
CIVVGTGANNLFF

SEQ ID NO: 3752 - protein, 13 aa, Homo sapiens
  CDR3 for beta chain variable domain of TCR clone 1876 (TRBV6-5, TRBJ2-6)
CASSTSGPLRLDF

SEQ ID NO: 3753 - protein, 14 aa, Homo sapiens
  CDR3 for alpha chain variable domain of TCR clone 1877 (TRAV29/DV5, TRAJ20)
CAATIRSNDYKLSF

SEQ ID NO: 3754 - protein, 15 aa, Homo sapiens
  CDR3 for beta chain variable domain of TCR clone 1877 (TRBV20-1, TRBJ2-1)
CSASSAGSSYNEQFF

SEQ ID NO: 3755 - protein, 14 aa, Homo sapiens
  CDR3 for alpha chain variable domain of TCR clone 1878 (TRAV1-2, TRAJ33)
CAVRAPDSNYQLIW

SEQ ID NO: 3756 - protein, 14 aa, Homo sapiens
  CDR3 for beta chain variable domain of TCR clone 1878 (TRBV11-3, TRBJ1-6)
CASSFSGGDSPLHF

SEQ ID NO: 3757 - protein, 14 aa, Homo sapiens
  CDR3 for alpha chain variable domain of TCR clone 1879 (TRAV26-1, TRAJ57)
CIRAGQGGSEKLVF

SEQ ID NO: 3758 - protein, 13 aa, Homo sapiens
  CDR3 for beta chain variable domain of TCR clone 1879 (TRBV19, TRBJ2-7)
CASSLTTSYEQYF

SEQ ID NO: 3759 - protein, 13 aa, Homo sapiens
  CDR3 for alpha chain variable domain of TCR clone 1880 (TRAV12-3, TRAJ54)
CALVPQGAQKLVF

SEQ ID NO: 3760 - protein, 15 aa, Homo sapiens
  CDR3 for beta chain variable domain of TCR clone 1880 (TRBV4-1, TRBJ2-2)
CASSQDSRGTGELFF

SEQ ID NO: 3761 - protein, 12 aa, Homo sapiens
  CDR3 for alpha chain variable domain of TCR clone 1881 (TRAV12-2, TRAJ31)
CAVNTPDARLMF

SEQ ID NO: 3762 - protein, 17 aa, Homo sapiens
  CDR3 for beta chain variable domain of TCR clone 1881 (TRBV20-1, TRBJ1-6)
CSARGGYTFSYNSPLHF

SEQ ID NO: 3763 - protein, 14 aa, Homo sapiens
  CDR3 for alpha chain variable domain of TCR clone 1882 (TRAV13-1, TRAJ40)
CAASMTSGTYKYIF

SEQ ID NO: 3764 - protein, 13 aa, Homo sapiens
  CDR3 for beta chain variable domain of TCR clone 1882 (TRBV4-1, TRBJ2-5)
CASSQEVQETQYF

SEQ ID NO: 3765 - protein, 14 aa, Homo sapiens
  CDR3 for alpha chain variable domain of TCR clone 1883 (TRAV13-1, TRAJ53)
CAASISGSNYKLTF

SEQ ID NO: 3766 - protein, 15 aa, Homo sapiens
  CDR3 for beta chain variable domain of TCR clone 1883 (TRBV4-1, TRBJ1-4)
CASSDTGGTNEKLFF

SEQ ID NO: 3767 - protein, 15 aa, Homo sapiens
  CDR3 for alpha chain variable domain of TCR clone 1884 (TRAV8-3, TRAJ11)
CAVGLLNSGYSTLTF

SEQ ID NO: 3768 - protein, 14 aa, Homo sapiens
  CDR3 for beta chain variable domain of TCR clone 1884 (TRBV4-1, TRBJ2-5)
CASSRSGSGETQYF

SEQ ID NO: 3769 - protein, 11 aa, Homo sapiens
  CDR3 for alpha chain variable domain of TCR clone 1885 (TRAV21, TRAJ11)
CAVNGYSTLTF

SEQ ID NO: 3770 - protein, 11 aa, Homo sapiens
  CDR3 for beta chain variable domain of TCR clone 1885 (TRBV11-2, TRBJ2-7)
CASSSDYEQYF

SEQ ID NO: 3771 - protein, 12 aa, Homo sapiens
  CDR3 for alpha chain variable domain of TCR clone 1886 (TRAV13-2, TRAJ23)
CAERHRGGKLIF

SEQ ID NO: 3772 - protein, 12 aa, Homo sapiens
  CDR3 for beta chain variable domain of TCR clone 1886 (TRBV11-2, TRBJ2-2)
CASSLGGGELFF

SEQ ID NO: 3773 - protein, 15 aa, Homo sapiens
  CDR3 for alpha chain variable domain of TCR clone 1887 (TRAV8-3, TRAJ45)
CASSYSGGGADGLTF

SEQ ID NO: 3774 - protein, 12 aa, Homo sapiens
  CDR3 for beta chain variable domain of TCR clone 1887 (TRBV12-4, TRBJ2-7)
CASSLGGYEQYF

SEQ ID NO: 3775 - protein, 14 aa, Homo sapiens
  CDR3 for alpha chain variable domain of TCR clone 1888 (TRAV8-3, TRAJ27)
CAGGRNTNAGKSTF

SEQ ID NO: 3776 - protein, 15 aa, Homo sapiens
  CDR3 for beta chain variable domain of TCR clone 1888 (TRBV11-3, TRBJ2-5)
CASSLRGRVQETQYF

SEQ ID NO: 3777 - protein, 13 aa, Homo sapiens
  CDR3 for alpha chain variable domain of TCR clone 1889 (TRAV29/DV5, TRAJ29)
CAASAAGNTPLVF

SEQ ID NO: 3778 - protein, 14 aa, Homo sapiens
  CDR3 for beta chain variable domain of TCR clone 1889 (TRBV19, TRBJ2-3)
CASSAPRGTDTQYF

SEQ ID NO: 3779 - protein, 13 aa, Homo sapiens
  CDR3 for alpha chain variable domain of TCR clone 1890 (TRAV21, TRAJ27)
CAARPGNAGKSTF

SEQ ID NO: 3780 - protein, 13 aa, Homo sapiens
  CDR3 for beta chain variable domain of TCR clone 1890 (TRBV7-6, TRBJ2-1)
CQQLGGGADEQFF

SEQ ID NO: 3781 - protein, 14 aa, Homo sapiens
  CDR3 for alpha chain variable domain of TCR clone 1891 (TRAV1-1, TRAJ35)
CAVRSIGFGNVLHC

SEQ ID NO: 3782 - protein, 14 aa, Homo sapiens
  CDR3 for beta chain variable domain of TCR clone 1891 (TRBV5-7, TRBJ2-7)
CASSGGLSSYEQYF

SEQ ID NO: 3783 - protein, 12 aa, Homo sapiens
  CDR3 for alpha chain variable domain of TCR clone 1892 (TRAV21, TRAJ6)
CAVKGGSYIPTF

SEQ ID NO: 3784 - protein, 13 aa, Homo sapiens
  CDR3 for beta chain variable domain of TCR clone 1892 (TRBV11-2, TRBJ1-1)
CASSFTENTEAFF

SEQ ID NO: 3785 - protein, 13 aa, Homo sapiens
  CDR3 for alpha chain variable domain of TCR clone 1893 (TRAV36/DV7, TRAJ54)
CAVLIQGAQKLVF

SEQ ID NO: 3786 - protein, 13 aa, Homo sapiens
  CDR3 for beta chain variable domain of TCR clone 1893 (TRBV29-1, TRBJ2-4)
CSVGEGTKNIQYF

SEQ ID NO: 3787 - protein, 13 aa, Homo sapiens
  CDR3 for alpha chain variable domain of TCR clone 1894 (TRAV35, TRAJ32)
CAGVGGATNKLIF

SEQ ID NO: 3788 - protein, 17 aa, Homo sapiens
  CDR3 for beta chain variable domain of TCR clone 1894 (TRBV4-3, TRBJ2-1)
CASSQFSSGRASGEQFF

SEQ ID NO: 3789 - protein, 11 aa, Homo sapiens
  CDR3 for alpha chain variable domain of TCR clone 1895 (TRAV13-2, TRAJ36)
CAETGANNLFF

SEQ ID NO: 3790 - protein, 13 aa, Homo sapiens
  CDR3 for beta chain variable domain of TCR clone 1895 (TRBV7-9, TRBJ2-4)
CATEGLAGNIQYF

SEQ ID NO: 3791 - protein, 14 aa, Homo sapiens
  CDR3 for alpha chain variable domain of TCR clone 1896 (TRAV12-3, TRAJ43)
CAMSLGGAGTRLTV

SEQ ID NO: 3792 - protein, 13 aa, Homo sapiens
  CDR3 for beta chain variable domain of TCR clone 1896 (TRBV7-9, TRBJ1-2)
CASSLKQNYGYTF

SEQ ID NO: 3793 - protein, 11 aa, Homo sapiens
  CDR3 for alpha chain variable domain of TCR clone 1897 (TRAV2, TRAJ13)
CASGGYQKVTF

SEQ ID NO: 3794 - protein, 16 aa, Homo sapiens
  CDR3 for beta chain variable domain of TCR clone 1897 (TRBV19, TRBJ2-1)
CASSMGGGSSYNEQFF

SEQ ID NO: 3795 - protein, 15 aa, Homo sapiens
  CDR3 for alpha chain variable domain of TCR clone 1898 (TRAV21, TRAJ24)
CAARSSTDSWGKLQF

SEQ ID NO: 3796 - protein, 15 aa, Homo sapiens
  CDR3 for beta chain variable domain of TCR clone 1898 (TRBV5-1, TRBJ2-1)
CASSPPRAPYNEQFF

SEQ ID NO: 3797 - protein, 14 aa, Homo sapiens
  CDR3 for alpha chain variable domain of TCR clone 1899 (TRAV1-2, TRAJ16)
CAVNRFSDGQKLLF

SEQ ID NO: 3798 - protein, 14 aa, Homo sapiens
  CDR3 for beta chain variable domain of TCR clone 1899 (TRBV18, TRBJ2-7)
CASSPRGGAYEQYF

SEQ ID NO: 3799 - protein, 13 aa, Homo sapiens
  CDR3 for alpha chain variable domain of TCR clone 1900 (TRAV17, TRAJ40)
CAGALGGTYKYIF

SEQ ID NO: 3800 - protein, 16 aa, Homo sapiens
  CDR3 for beta chain variable domain of TCR clone 1900 (TRBV11-2, TRBJ1-2)
CASSLDTGGADYGYTF

SEQ ID NO: 3801 - protein, 14 aa, Homo sapiens
  CDR3 for alpha chain variable domain of TCR clone 1901 (TRAV12-2, TRAJ13)
CAVKKTGGYQKVTF

SEQ ID NO: 3802 - protein, 15 aa, Homo sapiens
  CDR3 for beta chain variable domain of TCR clone 1901 (TRBV28, TRBJ2-5)
CASSPPWSYQETQYF

SEQ ID NO: 3803 - protein, 11 aa, Homo sapiens
  CDR3 for alpha chain variable domain of TCR clone 1902 (TRAV12-2, TRAJ43)
CAAYNNNDMRF

SEQ ID NO: 3804 - protein, 14 aa, Homo sapiens
  CDR3 for beta chain variable domain of TCR clone 1902 (TRBV7-8, TRBJ1-2)
CASSAGTAIYGYTF

SEQ ID NO: 3805 - protein, 16 aa, Homo sapiens
  CDR3 for alpha chain variable domain of TCR clone 1903 (TRAV3, TRAJ37)
CAVRGKGSGNTGKLIF

SEQ ID NO: 3806 - protein, 16 aa, Homo sapiens
  CDR3 for beta chain variable domain of TCR clone 1903 (TRBV12-5, TRBJ2-5)
CASGPRTSGSQETQYF

SEQ ID NO: 3807 - protein, 10 aa, Homo sapiens
  CDR3 for alpha chain variable domain of TCR clone 1904 (TRAV8-4, TRAJ43)
CAVSADDMRF

SEQ ID NO: 3808 - protein, 13 aa, Homo sapiens
  CDR3 for beta chain variable domain of TCR clone 1904 (TRBV12-4, TRBJ2-5)
CASSPGTEETQYF

SEQ ID NO: 3809 - protein, 14 aa, Homo sapiens
  CDR3 for alpha chain variable domain of TCR clone 1905 (TRAV1-2, TRAJ8)
CAVREDTGFQKLVF

SEQ ID NO: 3810 - protein, 15 aa, Homo sapiens
  CDR3 for beta chain variable domain of TCR clone 1905 (TRBV9, TRBJ1-6)
CASSVAGTGDSPLHF

SEQ ID NO: 3811 - protein, 12 aa, Homo sapiens
  CDR3 for alpha chain variable domain of TCR clone 1906 (TRAV27, TRAJ34)
CAGAKNTDKLIF

SEQ ID NO: 3812 - protein, 13 aa, Homo sapiens
  CDR3 for beta chain variable domain of TCR clone 1906 (TRBV4-1, TRBJ2-1)
CASSQEVQYEQFF

SEQ ID NO: 3813 - protein, 15 aa, Homo sapiens
  CDR3 for alpha chain variable domain of TCR clone 1907 (TRAV3, TRAJ15)
CAVRPANQAGTALIF

SEQ ID NO: 3814 - protein, 14 aa, Homo sapiens
  CDR3 for beta chain variable domain of TCR clone 1907 (TRBV4-1, TRBJ2-2)
CASSQAVNTGELFF

SEQ ID NO: 3815 - protein, 13 aa, Homo sapiens
  CDR3 for alpha chain variable domain of TCR clone 1908 (TRAV17, TRAJ54)
CATVIQGAQKLVF

SEQ ID NO: 3816 - protein, 15 aa, Homo sapiens
  CDR3 for beta chain variable domain of TCR clone 1908 (TRBV13, TRBJ2-1)
CASSLLSGLNNEQFF

SEQ ID NO: 3817 - protein, 13 aa, Homo sapiens
  CDR3 for alpha chain variable domain of TCR clone 1909 (TRAV17, TRAJ9)
CATDYTGGFKTIF

SEQ ID NO: 3818 - protein, 13 aa, Homo sapiens
  CDR3 for beta chain variable domain of TCR clone 1909 (TRBV7-9, TRBJ1-2)
CASSLKQNYGYTF

SEQ ID NO: 3819 - protein, 16 aa, Homo sapiens
  CDR3 for alpha chain variable domain of TCR clone 1910 (TRAV30, TRAJ24)
CGTEIVDADSWGKFQF

SEQ ID NO: 3820 - protein, 14 aa, Homo sapiens
  CDR3 for beta chain variable domain of TCR clone 1910 (TRBV7-8, TRBJ2-3)
CASSLEAGTDTQYF

SEQ ID NO: 3821 - protein, 16 aa, Homo sapiens
  CDR3 for alpha chain variable domain of TCR clone 1911 (TRAV17, TRAJ22)
CATDAISSGSARQLTF

SEQ ID NO: 3822 - protein, 15 aa, Homo sapiens
  CDR3 for beta chain variable domain of TCR clone 1911 (TRBV5-1, TRBJ2-1)
CASSPPRAPYNEQFF

SEQ ID NO: 3823 - protein, 19 aa, Homo sapiens
  CDR3 for alpha chain variable domain of TCR clone 1912 (TRAV2, TRAJ20)
ILQVREADAAVYRDCKLSF

SEQ ID NO: 3824 - protein, 17 aa, Homo sapiens
  CDR3 for beta chain variable domain of TCR clone 1912 (TRBV11-2, TRBJ2-1)
CASSLYPPGVEYNEQFF

SEQ ID NO: 3825 - protein, 12 aa, Homo sapiens
  CDR3 for alpha chain variable domain of TCR clone 1913 (TRAV26-1, TRAJ43)
CIVRPRGDDMRF

SEQ ID NO: 3826 - protein, 16 aa, Homo sapiens
  CDR3 for beta chain variable domain of TCR clone 1913 (TRBV3-1, TRBJ2-1)
CASSQGGRRSFDEQFF

SEQ ID NO: 3827 - protein, 14 aa, Homo sapiens
  CDR3 for alpha chain variable domain of TCR clone 1914 (TRAV8-6, TRAJ29)
CAVSRASGNTPLVF

SEQ ID NO: 3828 - protein, 13 aa, Homo sapiens
  CDR3 for beta chain variable domain of TCR clone 1914 (TRBV19, TRBJ1-5)
CASSEGSNQPQHF

SEQ ID NO: 3829 - protein, 15 aa, Homo sapiens
  CDR3 for alpha chain variable domain of TCR clone 1915 (TRAV3, TRAJ29)
CAVRAPLSGNTPLVF

SEQ ID NO: 3830 - protein, 15 aa, Homo sapiens
  CDR3 for beta chain variable domain of TCR clone 1915 (TRBV28, TRBJ1-1)
CASRIKGGLNTEAFF

SEQ ID NO: 3831 - protein, 21 aa, Homo sapiens
  CDR3 for alpha chain variable domain of TCR clone 1916 (TRAV12-1, TRAJ37)
CVVNGGLWQHRQTNLWARDNF

SEQ ID NO: 3832 - protein, 12 aa, Homo sapiens
  CDR3 for beta chain variable domain of TCR clone 1916 (TRBV20-1, TRBJ1-2)
CSAPGFNYGYTF

SEQ ID NO: 3833 - protein, 15 aa, Homo sapiens
  CDR3 for alpha chain variable domain of TCR clone 1917 (TRAV12-3, TRAJ6)
CAMSATSGGSYIPTF

SEQ ID NO: 3834 - protein, 13 aa, Homo sapiens
  CDR3 for beta chain variable domain of TCR clone 1917 (TRBV7-9, TRBJ1-2)
CASSLKQNYGYTF

SEQ ID NO: 3835 - protein, 13 aa, Homo sapiens
  CDR3 for alpha chain variable domain of TCR clone 1918 (TRAV12-3, TRAJ13)
CAMSSGGYQEVTF

SEQ ID NO: 3836 - protein, 13 aa, Homo sapiens
  CDR3 for beta chain variable domain of TCR clone 1918 (TRBV20-1, TRBJ1-1)
CSAPPGGHTEAFF

SEQ ID NO: 3837 - protein, 15 aa, Homo sapiens
  CDR3 for alpha chain variable domain of TCR clone 1919 (TRAV27, TRAJ38)
CAARRNAGNNRKLIW

SEQ ID NO: 3838 - protein, 13 aa, Homo sapiens
  CDR3 for beta chain variable domain of TCR clone 1919 (TRBV20-1, TRBJ1-1)
CSARAGGNTEAFF

SEQ ID NO: 3839 - protein, 16 aa, Homo sapiens
  CDR3 for alpha chain variable domain of TCR clone 1920 (TRAV8-3, TRAJ28)
CAVGATLGLGVTNSLS

SEQ ID NO: 3840 - protein, 14 aa, Homo sapiens
  CDR3 for beta chain variable domain of TCR clone 1920 (TRBV7-2, TRBJ2-1)
CASSLGVGYNEQFF

SEQ ID NO: 3841 - protein, 13 aa, Homo sapiens
  CDR3 for alpha chain variable domain of TCR clone 1921 (TRAV12-3, TRAJ5)
CAMRPTGRRALTF

SEQ ID NO: 3842 - protein, 13 aa, Homo sapiens
  CDR3 for beta chain variable domain of TCR clone 1921 (TRBV2, TRBJ2-7)
CASSVVEAYEQYF

SEQ ID NO: 3843 - protein, 13 aa, Homo sapiens
  CDR3 for alpha chain variable domain of TCR clone 1922 (TRAV21, TRAJ20)
CAVGVFADYKLSF

SEQ ID NO: 3844 - protein, 14 aa, Homo sapiens
  CDR3 for beta chain variable domain of TCR clone 1922 (TRBV4-2, TRBJ1-4)
CASSPSSGNEKLFF

SEQ ID NO: 3845 - protein, 12 aa, Homo sapiens
  CDR3 for alpha chain variable domain of TCR clone 1923 (TRAV12-2, TRAJ31)
CAVNTPDARLMF

SEQ ID NO: 3846 - protein, 15 aa, Homo sapiens
  CDR3 for beta chain variable domain of TCR clone 1923 (TRBV4-2, TRBJ1-1)
CASSQDQGLNTEAFF

SEQ ID NO: 3847 - protein, 16 aa, Homo sapiens
  CDR3 for alpha chain variable domain of TCR clone 1924 (TRAV16, TRAJ42)
CALSGLLGGSQGNLIF

SEQ ID NO: 3848 - protein, 15 aa, Homo sapiens
  CDR3 for beta chain variable domain of TCR clone 1924 (TRBV5-1, TRBJ2-1)
CASSPGGLAGNEQFF

SEQ ID NO: 3849 - protein, 15 aa, Homo sapiens
  CDR3 for alpha chain variable domain of TCR clone 1925 (TRAV21, TRAJ32)
CAAAPYGGATNKLIF

SEQ ID NO: 3850 - protein, 17 aa, Homo sapiens
  CDR3 for beta chain variable domain of TCR clone 1925 (TRBV18, TRBJ2-3)
CASSPFGDGGFTDTQYF

SEQ ID NO: 3851 - protein, 15 aa, Homo sapiens
  CDR3 for alpha chain variable domain of TCR clone 1926 (TRAV27, TRAJ38)
CAARRNAGNNRKLIW

SEQ ID NO: 3852 - protein, 11 aa, Homo sapiens
  CDR3 for beta chain variable domain of TCR clone 1926 (TRBV12-4, TRBJ2-2)
CASSSAGELFF

SEQ ID NO: 3853 - protein, 14 aa, Homo sapiens
  CDR3 for alpha chain variable domain of TCR clone 1927 (TRAV16, TRAJ26)
CALSSANYGQNFVF

SEQ ID NO: 3854 - protein, 16 aa, Homo sapiens
  CDR3 for beta chain variable domain of TCR clone 1927 (TRBV20-1, TRBJ1-4)
CSAPGQGLLTNEKLFF

SEQ ID NO: 3855 - protein, 14 aa, Homo sapiens
  CDR3 for alpha chain variable domain of TCR clone 1928 (TRAV26-2, TRAJ31)
CILIPGNNNARLMF

SEQ ID NO: 3856 - protein, 16 aa, Homo sapiens
  CDR3 for beta chain variable domain of TCR clone 1928 (TRBV7-3, TRBJ2-1)
CASSLVSGSSNNEQFF

SEQ ID NO: 3857 - protein, 14 aa, Homo sapiens
  CDR3 for alpha chain variable domain of TCR clone 1929 (TRAV17, TRAJ57)
CATDPQGGSEKLVF

SEQ ID NO: 3858 - protein, 14 aa, Homo sapiens
  CDR3 for beta chain variable domain of TCR clone 1929 (TRBV7-8, TRBJ2-7)
CASSPRDRVYEQYF

SEQ ID NO: 3859 - protein, 13 aa, Homo sapiens
  CDR3 for alpha chain variable domain of TCR clone 1930 (TRAV26-1, TRAJ33)
CIVRVDSNYQLIW

SEQ ID NO: 3860 - protein, 15 aa, Homo sapiens
  CDR3 for beta chain variable domain of TCR clone 1930 (TRBV7-2, TRBJ1-5)
CASSFSAGINQPQHF

SEQ ID NO: 3861 - protein, 12 aa, Homo sapiens
  CDR3 for alpha chain variable domain of TCR clone 1931 (TRAV21, TRAJ33)
CAVQDSNYQLIW

SEQ ID NO: 3862 - protein, 14 aa, Homo sapiens
  CDR3 for beta chain variable domain of TCR clone 1931 (TRBV28, TRBJ2-1)
CASSPGEGGNEQFF

SEQ ID NO: 3863 - protein, 16 aa, Homo sapiens
  CDR3 for alpha chain variable domain of TCR clone 1932 (TRAV3, TRAJ10)
CAVRDMRAGGGNKLTF

SEQ ID NO: 3864 - protein, 17 aa, Homo sapiens
  CDR3 for beta chain variable domain of TCR clone 1932 (TRBV28, TRBJ2-5)
CASSTPEGDALQETQYF

SEQ ID NO: 3865 - protein, 15 aa, Homo sapiens
  CDR3 for alpha chain variable domain of TCR clone 1933 (TRAV8-3, TRAJ45)
CALSYSGGGADGLTF

SEQ ID NO: 3866 - protein, 13 aa, Homo sapiens
  CDR3 for beta chain variable domain of TCR clone 1933 (TRBV10-3, TRBJ2-7)
CASKLAVNYEQYF

SEQ ID NO: 3867 - protein, 16 aa, Homo sapiens
  CDR3 for alpha chain variable domain of TCR clone 1934 (TRAV3, TRAJ37)
CAVRPHGSGNTGKLIF

SEQ ID NO: 3868 - protein, 11 aa, Homo sapiens
  CDR3 for beta chain variable domain of TCR clone 1934 (TRBV10-3, TRBJ2-7)
CAISEGLEQYF

SEQ ID NO: 3869 - protein, 13 aa, Homo sapiens
  CDR3 for alpha chain variable domain of TCR clone 1935 (TRAV1-1, TRAJ23)
CAVVANQGGKLIF

SEQ ID NO: 3870 - protein, 16 aa, Homo sapiens
  CDR3 for beta chain variable domain of TCR clone 1935 (TRBV5-5, TRBJ1-2)
CASSPTWGRGLYGYTF

SEQ ID NO: 3871 - protein, 14 aa, Homo sapiens
  CDR3 for alpha chain variable domain of TCR clone 1936 (TRAV2, TRAJ9)
CAVEDRSGGFKTIF

SEQ ID NO: 3872 - protein, 13 aa, Homo sapiens
  CDR3 for beta chain variable domain of TCR clone 1936 (TRBV12-4, TRBJ1-5)
CASSPDRAQPQHF

SEQ ID NO: 3873 - protein, 14 aa, Homo sapiens
  CDR3 for alpha chain variable domain of TCR clone 1937 (TRAV1-2, TRAJ12)
CAVSGTDSSYKLIF

SEQ ID NO: 3874 - protein, 15 aa, Homo sapiens
  CDR3 for beta chain variable domain of TCR clone 1937 (TRBV2, TRBJ2-4)
CASSGTNLAKNIQYF

SEQ ID NO: 3875 - protein, 13 aa, Homo sapiens
  CDR3 for alpha chain variable domain of TCR clone 1938 (TRAV21, TRAJ27)
CAARPGNAGKSTF

SEQ ID NO: 3876 - protein, 14 aa, Homo sapiens
  CDR3 for beta chain variable domain of TCR clone 1938 (TRBV20-1, TRBJ2-1)
CSAAGSGEYNEQFF

SEQ ID NO: 3877 - protein, 14 aa, Homo sapiens
  CDR3 for alpha chain variable domain of TCR clone 1939 (TRAV29/DV5, TRAJ49)
CAASLSNTGNQFYF

SEQ ID NO: 3878 - protein, 15 aa, Homo sapiens
  CDR3 for beta chain variable domain of TCR clone 1939 (TRBV20-1, TRBJ2-1)
CSARGIGGTYNEQFF

SEQ ID NO: 3879 - protein, 14 aa, Homo sapiens
  CDR3 for alpha chain variable domain of TCR clone 1940 (TRAV12-3, TRAJ10)
SHLPLTGGGNKLTF

SEQ ID NO: 3880 - protein, 16 aa, Homo sapiens
  CDR3 for beta chain variable domain of TCR clone 1940 (TRBV4-1, TRBJ1-4)
CASSQDLRRGGEKLFF

SEQ ID NO: 3881 - protein, 13 aa, Homo sapiens
  CDR3 for alpha chain variable domain of TCR clone 1941 (TRAV3, TRAJ21)
CAVREPDFNKFYF

SEQ ID NO: 3882 - protein, 12 aa, Homo sapiens
  CDR3 for beta chain variable domain of TCR clone 1941 (TRBV5-1, TRBJ2-4)
LAGEWTKNIQYF

SEQ ID NO: 3883 - protein, 17 aa, Homo sapiens
  CDR3 for alpha chain variable domain of TCR clone 1942 (TRAV26-1, TRAJ58)
CIVRVGAEETSGSRLTF

SEQ ID NO: 3884 - protein, 18 aa, Homo sapiens
  CDR3 for beta chain variable domain of TCR clone 1942 (TRBV7-9, TRBJ2-7)
CASSLTTSGSRTWYEQYF

SEQ ID NO: 3885 - protein, 15 aa, Homo sapiens
  CDR3 for alpha chain variable domain of TCR clone 1943 (TRAV12-3, TRAJ6)
CAMSATTGGSYIPTF

SEQ ID NO: 3886 - protein, 15 aa, Homo sapiens
  CDR3 for beta chain variable domain of TCR clone 1943 (TRBV5-1, TRBJ2-7)
CASSLNGGPAREQYF

SEQ ID NO: 3887 - protein, 16 aa, Homo sapiens
  CDR3 for alpha chain variable domain of TCR clone 1944 (TRAV35, TRAJ28)
CAGYLYSGAGSYQLTF

SEQ ID NO: 3888 - protein, 16 aa, Homo sapiens
  CDR3 for beta chain variable domain of TCR clone 1944 (TRBV5-1, TRBJ2-1)
CASSHGLAGPQNEQFF

SEQ ID NO: 3889 - protein, 13 aa, Homo sapiens
  CDR3 for alpha chain variable domain of TCR clone 1945 (TRAV12-3, TRAJ33)
CAMSLNSNYQLIW

SEQ ID NO: 3890 - protein, 13 aa, Homo sapiens
  CDR3 for beta chain variable domain of TCR clone 1945 (TRBV7-2, TRBJ2-2)
CASSLAVTGELFF

SEQ ID NO: 3891 - protein, 19 aa, Homo sapiens
  CDR3 for alpha chain variable domain of TCR clone 1946 (TRAV2, TRAJ20)
ILQVREADAAVYRDCKLSF

SEQ ID NO: 3892 - protein, 16 aa, Homo sapiens
  CDR3 for beta chain variable domain of TCR clone 1946 (TRBV19, TRBJ2-1)
CASSKAGPSSYNEQFF

SEQ ID NO: 3893 - protein, 13 aa, Homo sapiens
  CDR3 for alpha chain variable domain of TCR clone 1947 (TRAV13-2, TRAJ13)
CAERPGGYQKVTF

SEQ ID NO: 3894 - protein, 15 aa, Homo sapiens
  CDR3 for beta chain variable domain of TCR clone 1947 (TRBV4-1, TRBJ1-4)
CASSDTGGTNEKLFF

SEQ ID NO: 3895 - protein, 13 aa, Homo sapiens
  CDR3 for alpha chain variable domain of TCR clone 1948 (TRAV27, TRAJ6)
CAGGTRGSYIPTF

SEQ ID NO: 3896 - protein, 14 aa, Homo sapiens
  CDR3 for beta chain variable domain of TCR clone 1948 (TRBV20-1, TRBJ2-4)
CSASGRVGENIQYF

SEQ ID NO: 3897 - protein, 16 aa, Homo sapiens
  CDR3 for alpha chain variable domain of TCR clone 1949 (TRAV3, TRAJ37)
CAVRVRGSGNTGKLIF

SEQ ID NO: 3898 - protein, 13 aa, Homo sapiens
  CDR3 for beta chain variable domain of TCR clone 1949 (TRBV14, TRBJ2-1)
CASSQDRRNEQFF

SEQ ID NO: 3899 - protein, 14 aa, Homo sapiens
  CDR3 for alpha chain variable domain of TCR clone 1950 (TRAV21, TRAJ32)
CCGDYGGATNKLIF

SEQ ID NO: 3900 - protein, 13 aa, Homo sapiens
  CDR3 for beta chain variable domain of TCR clone 1950 (TRBV2, TRBJ1-6)
CASGRGGISPLHF

SEQ ID NO: 3901 - protein, 13 aa, Homo sapiens
  CDR3 for alpha chain variable domain of TCR clone 1951 (TRAV8-3, TRAJ6)
CAVEKGGSYIPTF

SEQ ID NO: 3902 - protein, 15 aa, Homo sapiens
  CDR3 for beta chain variable domain of TCR clone 1951 (TRBV28, TRBJ2-5)
CASSADRGRGETQYF

SEQ ID NO: 3903 - protein, 11 aa, Homo sapiens
  CDR3 for alpha chain variable domain of TCR clone 1952 (TRAV2, TRAJ13)
CASGGYQKVTF

SEQ ID NO: 3904 - protein, 15 aa, Homo sapiens
  CDR3 for beta chain variable domain of TCR clone 1952 (TRBV7-9, TRBJ1-6)
CASSSPGRGNSPLHF

SEQ ID NO: 3905 - protein, 11 aa, Homo sapiens
  CDR3 for alpha chain variable domain of TCR clone 1953 (TRAV2, TRAJ20)
CAVLNDYKLSF

SEQ ID NO: 3906 - protein, 16 aa, Homo sapiens
  CDR3 for beta chain variable domain of TCR clone 1953 (TRBV11-1, TRBJ2-2)
CASSAEGLKNTGELFF

SEQ ID NO: 3907 - protein, 22 aa, Homo sapiens
  CDR3 for alpha chain variable domain of TCR clone 1954 (TRAV4, )
CLVGPHNYDIQNPDPAVYQLRD

SEQ ID NO: 3908 - protein, 17 aa, Homo sapiens
  CDR3 for beta chain variable domain of TCR clone 1954 (TRBV24-1, TRBJ2-1)
CATSDVSTSGTYNEQFF

SEQ ID NO: 3909 - protein, 12 aa, Homo sapiens
  CDR3 for alpha chain variable domain of TCR clone 1955 (TRAV13-1, TRAJ53)
AASGGSNYKLTF

SEQ ID NO: 3910 - protein, 12 aa, Homo sapiens
  CDR3 for beta chain variable domain of TCR clone 1955 (TRBV18, TRBJ1-4)
CASSPSREKLFF

SEQ ID NO: 3911 - protein, 12 aa, Homo sapiens
  CDR3 for alpha chain variable domain of TCR clone 1956 (TRAV8-1, TRAJ6)
CASSGGSYIPTF

SEQ ID NO: 3912 - protein, 12 aa, Homo sapiens
  CDR3 for beta chain variable domain of TCR clone 1956 (TRBV19, TRBJ1-1)
CASMNRYTEAFF

SEQ ID NO: 3913 - protein, 15 aa, Homo sapiens
  CDR3 for alpha chain variable domain of TCR clone 1957 (TRAV30, TRAJ32)
CGTEILGGATNKLIF

SEQ ID NO: 3914 - protein, 17 aa, Homo sapiens
  CDR3 for beta chain variable domain of TCR clone 1957 (TRBV5-4, TRBJ2-1)
CASSSAGGRGPYNEQFF

SEQ ID NO: 3915 - protein, 16 aa, Homo sapiens
  CDR3 for alpha chain variable domain of TCR clone 1958 (TRAV12-2, TRAJ10)
CAVNRVLTGGGNKLTF

SEQ ID NO: 3916 - protein, 14 aa, Homo sapiens
  CDR3 for beta chain variable domain of TCR clone 1958 (TRBV9, TRBJ2-1)
CASSVALAVNEQFF

SEQ ID NO: 3917 - protein, 13 aa, Homo sapiens
  CDR3 for alpha chain variable domain of TCR clone 1959 (TRAV20, TRAJ9)
CAVPDTGGFKTIF

SEQ ID NO: 3918 - protein, 15 aa, Homo sapiens
  CDR3 for beta chain variable domain of TCR clone 1959 (TRBV27, TRBJ2-7)
CASSKAGRGGYEQYF

SEQ ID NO: 3919 - protein, 13 aa, Homo sapiens
  CDR3 for alpha chain variable domain of TCR clone 1960 (TRAV8-6, TRAJ13)
CAVRDGGYQKVTF

SEQ ID NO: 3920 - protein, 15 aa, Homo sapiens
  CDR3 for beta chain variable domain of TCR clone 1960 (TRBV7-9, TRBJ2-2)
CASRPEGTSTGELFF

SEQ ID NO: 3921 - protein, 14 aa, Homo sapiens
  CDR3 for alpha chain variable domain of TCR clone 1961 (TRAV12-2, TRAJ13)
CAVKKTGGYQKVTF

SEQ ID NO: 3922 - protein, 13 aa, Homo sapiens
  CDR3 for beta chain variable domain of TCR clone 1961 (TRBV28, TRBJ2-7)
CASKAGGVYEQYF

SEQ ID NO: 3923 - protein, 15 aa, Homo sapiens
  CDR3 for alpha chain variable domain of TCR clone 1962 (TRAV8-1, TRAJ6)
CAVNAGAGGSYIPTF

SEQ ID NO: 3924 - protein, 14 aa, Homo sapiens
  CDR3 for beta chain variable domain of TCR clone 1962 (TRBV25-1, TRBJ1-6)
CASSLSADISPLHF

SEQ ID NO: 3925 - protein, 14 aa, Homo sapiens
  CDR3 for alpha chain variable domain of TCR clone 1963 (TRAV12-1, TRAJ8)
CVVNSNTGFQKLVF

SEQ ID NO: 3926 - protein, 17 aa, Homo sapiens
  CDR3 for beta chain variable domain of TCR clone 1963 (TRBV7-8, TRBJ2-6)
CASSAGTGGAGANVLTF

SEQ ID NO: 3927 - protein, 14 aa, Homo sapiens
  CDR3 for alpha chain variable domain of TCR clone 1964 (TRAV21, TRAJ35)
CAVMPIGFGNVLHC

SEQ ID NO: 3928 - protein, 12 aa, Homo sapiens
  CDR3 for beta chain variable domain of TCR clone 1964 (TRBV7-9, TRBJ2-7)
CASSIKREEQYF

SEQ ID NO: 3929 - protein, 15 aa, Homo sapiens
  CDR3 for alpha chain variable domain of TCR clone 1965 (TRAV3, TRAJ3)
CAVRDRRSSASKIIF

SEQ ID NO: 3930 - protein, 13 aa, Homo sapiens
  CDR3 for beta chain variable domain of TCR clone 1965 (TRBV9, TRBJ2-5)
CASSPAGLGTQYF

SEQ ID NO: 3931 - protein, 14 aa, Homo sapiens
  CDR3 for alpha chain variable domain of TCR clone 1966 (TRAV34, TRAJ22)
CGADTSGSARQLTF

SEQ ID NO: 3932 - protein, 16 aa, Homo sapiens
  CDR3 for beta chain variable domain of TCR clone 1966 (TRBV2, TRBJ2-3)
CQHRGAPRRWTDTQYF

SEQ ID NO: 3933 - protein, 14 aa, Homo sapiens
  CDR3 for alpha chain variable domain of TCR clone 1967 (TRAV1-2, TRAJ16)
CAVNRFSDGQKLLF

SEQ ID NO: 3934 - protein, 16 aa, Homo sapiens
  CDR3 for beta chain variable domain of TCR clone 1967 (TRBV27, TRBJ2-2)
CASSFRGLVRTGELFF

SEQ ID NO: 3935 - protein, 11 aa, Homo sapiens
  CDR3 for alpha chain variable domain of TCR clone 1968 (TRAV17, TRAJ21)
CATGNFNKFYF

SEQ ID NO: 3936 - protein, 16 aa, Homo sapiens
  CDR3 for beta chain variable domain of TCR clone 1968 (TRBV2, TRBJ2-1)
CASSANPRDWQAEQFF

SEQ ID NO: 3937 - protein, 12 aa, Homo sapiens
  CDR3 for alpha chain variable domain of TCR clone 1969 (TRAV13-1, TRAJ21)
CAAKEGFNKFYF

SEQ ID NO: 3938 - protein, 20 aa, Homo sapiens
  CDR3 for beta chain variable domain of TCR clone 1969 (TRBV28, TRBJ2-1)
CASTPIGRSPGLAGGNEQFF

SEQ ID NO: 3939 - protein, 14 aa, Homo sapiens
  CDR3 for alpha chain variable domain of TCR clone 1970 (TRAV26-1, TRAJ48)
CIVRVPFGNEKLTF

SEQ ID NO: 3940 - protein, 16 aa, Homo sapiens
  CDR3 for beta chain variable domain of TCR clone 1970 (TRBV18, TRBJ2-1)
CASSPYLSIRGDEQFF

SEQ ID NO: 3941 - protein, 12 aa, Homo sapiens
  CDR3 for alpha chain variable domain of TCR clone 1971 (TRAV21, TRAJ13)
PGPSGGYQKVTF

SEQ ID NO: 3942 - protein, 13 aa, Homo sapiens
  CDR3 for beta chain variable domain of TCR clone 1971 (TRBV7-9, TRBJ1-2)
CASSLKQNYGYTF

SEQ ID NO: 3943 - protein, 14 aa, Homo sapiens
  CDR3 for alpha chain variable domain of TCR clone 1972 (TRAV1-2, TRAJ16)
CAVNRFSDGQKLLF

SEQ ID NO: 3944 - protein, 17 aa, Homo sapiens
  CDR3 for beta chain variable domain of TCR clone 1972 (TRBV20-1, TRBJ2-1)
CSASSSGLAGSYNEQFF

SEQ ID NO: 3945 - protein, 17 aa, Homo sapiens
  CDR3 for alpha chain variable domain of TCR clone 1973 (TRAV3, TRAJ42)
CAVRDRDYGGSQGNLIF

SEQ ID NO: 3946 - protein, 17 aa, Homo sapiens
  CDR3 for beta chain variable domain of TCR clone 1973 (TRBV7-9, TRBJ2-3)
CASSPTVAGDLTDTQYF

SEQ ID NO: 3947 - protein, 15 aa, Homo sapiens
  CDR3 for alpha chain variable domain of TCR clone 1974 (TRAV3, TRAJ30)
CAVRDEYGRDDKIIF

SEQ ID NO: 3948 - protein, 16 aa, Homo sapiens
  CDR3 for beta chain variable domain of TCR clone 1974 (TRBV5-1, TRBJ2-5)
CASSLANHRGRETQYF

SEQ ID NO: 3949 - protein, 15 aa, Homo sapiens
  CDR3 for alpha chain variable domain of TCR clone 1975 (TRAV21, TRAJ56)
CAVTKYTGANSKLTF

SEQ ID NO: 3950 - protein, 14 aa, Homo sapiens
  CDR3 for beta chain variable domain of TCR clone 1975 (TRBV20-1, TRBJ2-3)
CSARVRGSTDTQYF

SEQ ID NO: 3951 - protein, 19 aa, Homo sapiens
  CDR3 for alpha chain variable domain of TCR clone 1976 (TRAV25, TRAJ43)
TATQTTDVGTYFCAVFMRF

SEQ ID NO: 3952 - protein, 13 aa, Homo sapiens
  CDR3 for beta chain variable domain of TCR clone 1976 (TRBV7-9, TRBJ1-2)
CASSLKQNYGYTF

SEQ ID NO: 3953 - protein, 14 aa, Homo sapiens
  CDR3 for alpha chain variable domain of TCR clone 1977 (TRAV2, TRAJ12)
CAVDAMDSSYKLIF

SEQ ID NO: 3954 - protein, 13 aa, Homo sapiens
  CDR3 for beta chain variable domain of TCR clone 1977 (TRBV19, TRBJ2-1)
CASKVGAGGEQFF

SEQ ID NO: 3955 - protein, 14 aa, Homo sapiens
  CDR3 for alpha chain variable domain of TCR clone 1978 (TRAV8-3, TRAJ4)
CAVGASGGYNKLIF

SEQ ID NO: 3956 - protein, 17 aa, Homo sapiens
  CDR3 for beta chain variable domain of TCR clone 1978 (TRBV11-2, TRBJ2-1)
CASSLYPPGVEYNEQFF

SEQ ID NO: 3957 - protein, 16 aa, Homo sapiens
  CDR3 for alpha chain variable domain of TCR clone 1979 (TRAV3, TRAJ10)
CAVRDMNAGGGNKLTF

SEQ ID NO: 3958 - protein, 16 aa, Homo sapiens
  CDR3 for beta chain variable domain of TCR clone 1979 (TRBV6-3, TRBJ1-2)
CASSYSRRASNYGYTF

SEQ ID NO: 3959 - protein, 15 aa, Homo sapiens
  CDR3 for alpha chain variable domain of TCR clone 1980 (TRAV3, TRAJ5)
CAVRDLYTGRRALTF

SEQ ID NO: 3960 - protein, 16 aa, Homo sapiens
  CDR3 for beta chain variable domain of TCR clone 1980 (TRBV20-1, TRBJ1-4)
CSAPGQGLLTNEKLFF

SEQ ID NO: 3961 - protein, 13 aa, Homo sapiens
  CDR3 for alpha chain variable domain of TCR clone 1981 (TRAV20, TRAJ34)
CAVSSYNTDKLIF

SEQ ID NO: 3962 - protein, 15 aa, Homo sapiens
  CDR3 for beta chain variable domain of TCR clone 1981 (TRBV20-1, TRBJ1-2)
CSAAGEGARIYGYTF

SEQ ID NO: 3963 - protein, 11 aa, Homo sapiens
  CDR3 for alpha chain variable domain of TCR clone 1982 (TRAV12-1, TRAJ33)
CVVNMNYQLIW

SEQ ID NO: 3964 - protein, 11 aa, Homo sapiens
  CDR3 for beta chain variable domain of TCR clone 1982 (TRBV10-1, TRBJ2-3)
CASSDSDTQYF

SEQ ID NO: 3965 - protein, 12 aa, Homo sapiens
  CDR3 for alpha chain variable domain of TCR clone 1983 (TRAV17, TRAJ36)
CATLTGANNLFF

SEQ ID NO: 3966 - protein, 15 aa, Homo sapiens
  CDR3 for beta chain variable domain of TCR clone 1983 (TRBV19, TRBJ1-2)
CASSTKTDTNYGYTF

SEQ ID NO: 3967 - protein, 16 aa, Homo sapiens
  CDR3 for alpha chain variable domain of TCR clone 1984 (TRAV3, TRAJ27)
CAVRDPQGTNAGKSTF

SEQ ID NO: 3968 - protein, 17 aa, Homo sapiens
  CDR3 for beta chain variable domain of TCR clone 1984 (TRBV4-1, TRBJ2-7)
CASSQGRGLQTSYEQYF

SEQ ID NO: 3969 - protein, 11 aa, Homo sapiens
  CDR3 for alpha chain variable domain of TCR clone 1985 (TRAV2, TRAJ13)
CASGGYQKVTF

SEQ ID NO: 3970 - protein, 15 aa, Homo sapiens
  CDR3 for beta chain variable domain of TCR clone 1985 (TRBV20-1, TRBJ2-7)
CSARDRVSGMDEQYF

SEQ ID NO: 3971 - protein, 12 aa, Homo sapiens
  CDR3 for alpha chain variable domain of TCR clone 1986 (TRAV17, TRAJ20)
CATQANDYKLSF

SEQ ID NO: 3972 - protein, 12 aa, Homo sapiens
  CDR3 for beta chain variable domain of TCR clone 1986 (TRBV6-1, TRBJ1-1)
CASNSPTAEAFF

SEQ ID NO: 3973 - protein, 11 aa, Homo sapiens
  CDR3 for alpha chain variable domain of TCR clone 1987 (TRAV17, TRAJ9)
CATTGGFKTIF

SEQ ID NO: 3974 - protein, 11 aa, Homo sapiens
  CDR3 for beta chain variable domain of TCR clone 1987 (TRBV29-1, TRBJ2-5)
CSEDRTGTQYF

SEQ ID NO: 3975 - protein, 14 aa, Homo sapiens
  CDR3 for alpha chain variable domain of TCR clone 1988 (TRAV13-2, TRAJ16)
CAENNWEDGQKLLF

SEQ ID NO: 3976 - protein, 14 aa, Homo sapiens
  CDR3 for beta chain variable domain of TCR clone 1988 (TRBV7-9, TRBJ1-1)
CASSLGGLKTEAFF

SEQ ID NO: 3977 - protein, 17 aa, Homo sapiens
  CDR3 for alpha chain variable domain of TCR clone 1989 (TRAV3, TRAJ12)
CAVRDGGRMDSSYKLIF

SEQ ID NO: 3978 - protein, 16 aa, Homo sapiens
  CDR3 for beta chain variable domain of TCR clone 1989 (TRBV9, TRBJ2-2)
CASSAMGKGNTGELFF

SEQ ID NO: 3979 - protein, 15 aa, Homo sapiens
  CDR3 for alpha chain variable domain of TCR clone 1990 (TRAV16, TRAJ20)
CALKGGLRADYKLSF

SEQ ID NO: 3980 - protein, 16 aa, Homo sapiens
  CDR3 for beta chain variable domain of TCR clone 1990 (TRBV11-3, TRBJ2-2)
CASSSRTSPGTGELFF

SEQ ID NO: 3981 - protein, 12 aa, Homo sapiens
  CDR3 for alpha chain variable domain of TCR clone 1991 (TRAV8-3, TRAJ34)
WASGYNTDKLIF

SEQ ID NO: 3982 - protein, 13 aa, Homo sapiens
  CDR3 for beta chain variable domain of TCR clone 1991 (TRBV6-4, TRBJ2-3)
CASSVSWADTQYF

SEQ ID NO: 3983 - protein, 16 aa, Homo sapiens
  CDR3 for alpha chain variable domain of TCR clone 1992 (TRAV12-3, TRAJ53)
CAMSPGSGGSNYKLTF

SEQ ID NO: 3984 - protein, 20 aa, Homo sapiens
  CDR3 for beta chain variable domain of TCR clone 1992 (TRBV7-8, TRBJ2-2)
CASSHLFPGPTIHITGELFF

SEQ ID NO: 3985 - protein, 11 aa, Homo sapiens
  CDR3 for alpha chain variable domain of TCR clone 1993 (TRAV2, TRAJ33)
CAVDSNYQLIW

SEQ ID NO: 3986 - protein, 12 aa, Homo sapiens
  CDR3 for beta chain variable domain of TCR clone 1993 (TRBV11-2, TRBJ2-2)
CASSLGGGELFF

SEQ ID NO: 3987 - protein, 13 aa, Homo sapiens
  CDR3 for alpha chain variable domain of TCR clone 1994 (TRAV8-3, TRAJ28)
CAVGAVGSYQLTF

SEQ ID NO: 3988 - protein, 14 aa, Homo sapiens
  CDR3 for beta chain variable domain of TCR clone 1994 (TRBV25-1, TRBJ1-1)
CASTHLGGNTEAFF

SEQ ID NO: 3989 - protein, 14 aa, Homo sapiens
  CDR3 for alpha chain variable domain of TCR clone 1995 (TRAV12-1, TRAJ43)
CVVNGRSNNNDMRF

SEQ ID NO: 3990 - protein, 13 aa, Homo sapiens
  CDR3 for beta chain variable domain of TCR clone 1995 (TRBV10-3, TRBJ2-7)
CASKLAVNYEQYF

SEQ ID NO: 3991 - protein, 19 aa, Homo sapiens
  CDR3 for alpha chain variable domain of TCR clone 1996 (TRAV3, TRAJ37)
CAVRDIVGGYPSNTGKLIF

SEQ ID NO: 3992 - protein, 14 aa, Homo sapiens
  CDR3 for beta chain variable domain of TCR clone 1996 (TRBV7-8, TRBJ2-3)
CASSLEAGTDTQYF

SEQ ID NO: 3993 - protein, 14 aa, Homo sapiens
  CDR3 for alpha chain variable domain of TCR clone 1997 (TRAV12-2, TRAJ13)
CAVNPSGGYQKVTF

SEQ ID NO: 3994 - protein, 13 aa, Homo sapiens
  CDR3 for beta chain variable domain of TCR clone 1997 (TRBV20-1, TRBJ1-6)
CSAKLGGTSPLHF

SEQ ID NO: 3995 - protein, 18 aa, Homo sapiens
  CDR3 for alpha chain variable domain of TCR clone 1998 (TRAV29/DV5, TRAJ26)
CSVLLCSKRKPEGQNFVF

SEQ ID NO: 3996 - protein, 17 aa, Homo sapiens
  CDR3 for beta chain variable domain of TCR clone 1998 (TRBV20-1, TRBJ2-2)
CSASGSGQGGLTGELFF

SEQ ID NO: 3997 - protein, 12 aa, Homo sapiens
  CDR3 for alpha chain variable domain of TCR clone 1999 (TRAV17, TRAJ20)
CATALNDYKLSF

SEQ ID NO: 3998 - protein, 12 aa, Homo sapiens
  CDR3 for beta chain variable domain of TCR clone 1999 (TRBV10-3, TRBJ2-7)
CAHGADSGEQYF

SEQ ID NO: 3999 - protein, 12 aa, Homo sapiens
  CDR3 for alpha chain variable domain of TCR clone 2000 (TRAV13-1, TRAJ21)
CAAKEGFNKFYF

SEQ ID NO: 4000 - protein, 15 aa, Homo sapiens
  CDR3 for beta chain variable domain of TCR clone 2000 (TRBV15, TRBJ1-5)
CATSRDPVSNQPQHF

SEQ ID NO: 4001 - protein, 13 aa, Homo sapiens
  CDR3 for alpha chain variable domain of TCR clone 2001 (TRAV2, TRAJ40)
CAVVTSGTYKYIF

SEQ ID NO: 4002 - protein, 14 aa, Homo sapiens
  CDR3 for beta chain variable domain of TCR clone 2001 (TRBV7-9, TRBJ2-1)
CASSSMVGFGEQFF

SEQ ID NO: 4003 - protein, 12 aa, Homo sapiens
  CDR3 for alpha chain variable domain of TCR clone 2002 (TRAV12-3, TRAJ17)
CAMTLTGNKLTF

SEQ ID NO: 4004 - protein, 15 aa, Homo sapiens
  CDR3 for beta chain variable domain of TCR clone 2002 (TRBV7-9, TRBJ1-6)
CASSSPGRGNSPLHF

SEQ ID NO: 4005 - protein, 14 aa, Homo sapiens
  CDR3 for alpha chain variable domain of TCR clone 2003 (TRAV17, TRAJ6)
CATNPAGGSYIPTF

SEQ ID NO: 4006 - protein, 15 aa, Homo sapiens
  CDR3 for beta chain variable domain of TCR clone 2003 (TRBV2, TRBJ2-5)
CASSGTVAAGETQYF

SEQ ID NO: 4007 - protein, 14 aa, Homo sapiens
  CDR3 for alpha chain variable domain of TCR clone 2004 (TRAV8-4, TRAJ8)
CAVSVGTGFQKLVF

SEQ ID NO: 4008 - protein, 15 aa, Homo sapiens
  CDR3 for beta chain variable domain of TCR clone 2004 (TRBV2, TRBJ2-3)
CASSGEGTGTDTQYF

SEQ ID NO: 4009 - protein, 12 aa, Homo sapiens
  CDR3 for alpha chain variable domain of TCR clone 2005 (TRAV3, TRAJ20)
CAVRDHDYKLSF

SEQ ID NO: 4010 - protein, 15 aa, Homo sapiens
  CDR3 for beta chain variable domain of TCR clone 2005 (TRBV9, TRBJ1-6)
CASSVAGTGDSPLHF

SEQ ID NO: 4011 - protein, 17 aa, Homo sapiens
  CDR3 for alpha chain variable domain of TCR clone 2006 (TRAV3, TRAJ7)
CAVRDMSPLEGTTDSLL

SEQ ID NO: 4012 - protein, 17 aa, Homo sapiens
  CDR3 for beta chain variable domain of TCR clone 2006 (TRBV15, TRBJ1-2)
CATSGREIDVVNYGYTF

SEQ ID NO: 4013 - protein, 23 aa, Homo sapiens
  CDR3 for alpha chain variable domain of TCR clone 2007 (TRAV26-1, TRAJ38)
CIVRPLNAGNNHIQNPDPAVYQL

SEQ ID NO: 4014 - protein, 13 aa, Homo sapiens
  CDR3 for beta chain variable domain of TCR clone 2007 (TRBV18, TRBJ1-1)
CASSPNGDTEAFF

SEQ ID NO: 4015 - protein, 14 aa, Homo sapiens
  CDR3 for alpha chain variable domain of TCR clone 2008 (TRAV1-2, TRAJ8)
CAVREDTGFQKLVF

SEQ ID NO: 4016 - protein, 12 aa, Homo sapiens
  CDR3 for beta chain variable domain of TCR clone 2008 (TRBV24-1, TRBJ1-1)
CATLYPDTEAFF

SEQ ID NO: 4017 - protein, 16 aa, Homo sapiens
  CDR3 for alpha chain variable domain of TCR clone 2009 (TRAV16, TRAJ42)
CARKMNYGGSQGNLIF

SEQ ID NO: 4018 - protein, 15 aa, Homo sapiens
  CDR3 for beta chain variable domain of TCR clone 2009 (TRBV20-1, TRBJ2-7)
CSAREGRDSLYEQYF

SEQ ID NO: 4019 - protein, 10 aa, Homo sapiens
  CDR3 for alpha chain variable domain of TCR clone 2010 (TRAV13-1, TRAJ15)
INQAGTALIF

SEQ ID NO: 4020 - protein, 14 aa, Homo sapiens
  CDR3 for beta chain variable domain of TCR clone 2010 (TRBV7-9, TRBJ2-1)
CASSDNSGYNEQFF

SEQ ID NO: 4021 - protein, 13 aa, Homo sapiens
  CDR3 for alpha chain variable domain of TCR clone 2011 (TRAV13-1, TRAJ10)
CAALEGGGNKLTF

SEQ ID NO: 4022 - protein, 13 aa, Homo sapiens
  CDR3 for beta chain variable domain of TCR clone 2011 (TRBV7-9, TRBJ1-2)
CASSLKQNYGYTF

SEQ ID NO: 4023 - protein, 14 aa, Homo sapiens
  CDR3 for alpha chain variable domain of TCR clone 2012 (TRAV8-3, TRAJ39)
CAVGAWGAGNMLTF

SEQ ID NO: 4024 - protein, 16 aa, Homo sapiens
  CDR3 for beta chain variable domain of TCR clone 2012 (TRBV7-2, TRBJ1-3)
CASSSGRVLSGNTIYF

SEQ ID NO: 4025 - protein, 12 aa, Homo sapiens
  CDR3 for alpha chain variable domain of TCR clone 2013 (TRAV16, TRAJ9)
CALRAGGFKTIF

SEQ ID NO: 4026 - protein, 13 aa, Homo sapiens
  CDR3 for beta chain variable domain of TCR clone 2013 (TRBV4-3, TRBJ1-1)
CASSQVEGSMAFF

SEQ ID NO: 4027 - protein, 12 aa, Homo sapiens
  CDR3 for alpha chain variable domain of TCR clone 2014 (TRAV2, TRAJ33)
CAVPDSNYQLIW

SEQ ID NO: 4028 - protein, 17 aa, Homo sapiens
  CDR3 for beta chain variable domain of TCR clone 2014 (TRBV6-5, TRBJ2-3)
CASSYGTSLYKSDTQYF

SEQ ID NO: 4029 - protein, 14 aa, Homo sapiens
  CDR3 for alpha chain variable domain of TCR clone 2015 (TRAV30, TRAJ26)
CGTEIVSYGQNFVF

SEQ ID NO: 4030 - protein, 13 aa, Homo sapiens
  CDR3 for beta chain variable domain of TCR clone 2015 (TRBV7-3, TRBJ1-1)
CASSQDWGAEAFF

SEQ ID NO: 4031 - protein, 21 aa, Homo sapiens
  CDR3 for alpha chain variable domain of TCR clone 2016 (TRAV30, TRAJ43)
GLPAQLLRNLLPIIELNDMRF

SEQ ID NO: 4032 - protein, 14 aa, Homo sapiens
  CDR3 for beta chain variable domain of TCR clone 2016 (TRBV27, TRBJ2-1)
CASRHLGGGKEQFF

SEQ ID NO: 4033 - protein, 15 aa, Homo sapiens
  CDR3 for alpha chain variable domain of TCR clone 2017 (TRAV26-1, TRAJ22)
CIVRVSFWFCKATDL

SEQ ID NO: 4034 - protein, 12 aa, Homo sapiens
  CDR3 for beta chain variable domain of TCR clone 2017 (TRBV11-2, TRBJ2-2)
CASSLGGGELFF

SEQ ID NO: 4035 - protein, 14 aa, Homo sapiens
  CDR3 for alpha chain variable domain of TCR clone 2018 (TRAV12-3, TRAJ10)
SHLPLTGGGNKLTF

SEQ ID NO: 4036 - protein, 16 aa, Homo sapiens
  CDR3 for beta chain variable domain of TCR clone 2018 (TRBV10-3, TRBJ2-1)
CAISGVGDGGGGEQFF

SEQ ID NO: 4037 - protein, 14 aa, Homo sapiens
  CDR3 for alpha chain variable domain of TCR clone 2019 (TRAV24, TRAJ42)
CAQNYGGSQGNLIF

SEQ ID NO: 4038 - protein, 15 aa, Homo sapiens
  CDR3 for beta chain variable domain of TCR clone 2019 (TRBV19, TRBJ1-5)
CASSIPGGAGQPQHF

SEQ ID NO: 4039 - protein, 14 aa, Homo sapiens
  CDR3 for alpha chain variable domain of TCR clone 2020 (TRAV1-2, TRAJ16)
CAVRSASDGQKLLF

SEQ ID NO: 4040 - protein, 17 aa, Homo sapiens
  CDR3 for beta chain variable domain of TCR clone 2020 (TRBV7-3, TRBJ2-3)
CASSLMKRMRGADTQYF

SEQ ID NO: 4041 - protein, 13 aa, Homo sapiens
  CDR3 for alpha chain variable domain of TCR clone 2021 (TRAV3, TRAJ41)
CAVSSNSGYALNF

SEQ ID NO: 4042 - protein, 14 aa, Homo sapiens
  CDR3 for beta chain variable domain of TCR clone 2021 (TRBV7-2, TRBJ2-7)
CASSPKTSFYEQYF

SEQ ID NO: 4043 - protein, 12 aa, Homo sapiens
  CDR3 for alpha chain variable domain of TCR clone 2022 (TRAV13-1, TRAJ21)
CAAKEGFNKFYF

SEQ ID NO: 4044 - protein, 13 aa, Homo sapiens
  CDR3 for beta chain variable domain of TCR clone 2022 (TRBV7-9, TRBJ2-1)
CASSLGTVNEQFF

SEQ ID NO: 4045 - protein, 14 aa, Homo sapiens
  CDR3 for alpha chain variable domain of TCR clone 2023 (TRAV4, TRAJ20)
CLVGRRSNDYKLSF

SEQ ID NO: 4046 - protein, 18 aa, Homo sapiens
  CDR3 for beta chain variable domain of TCR clone 2023 (TRBV2, TRBJ2-5)
CASSGDPQGRGAQETQYF

SEQ ID NO: 4047 - protein, 16 aa, Homo sapiens
  CDR3 for alpha chain variable domain of TCR clone 2024 (TRAV13-1, TRAJ10)
CAAGYILTGGGNKLTF

SEQ ID NO: 4048 - protein, 15 aa, Homo sapiens
  CDR3 for beta chain variable domain of TCR clone 2024 (TRBV12-4, TRBJ2-7)
CASSQTGAISYEQYF

SEQ ID NO: 4049 - protein, 16 aa, Homo sapiens
  CDR3 for alpha chain variable domain of TCR clone 2025 (TRAV3, TRAJ37)
CAVRGKGSGNTGKLIF

SEQ ID NO: 4050 - protein, 13 aa, Homo sapiens
  CDR3 for beta chain variable domain of TCR clone 2025 (TRBV7-2, TRBJ2-2)
CASSSVRAGELFF

SEQ ID NO: 4051 - protein, 15 aa, Homo sapiens
  CDR3 for alpha chain variable domain of TCR clone 2026 (TRAV25, TRAJ53)
CAATGGGGSNYKLTF

SEQ ID NO: 4052 - protein, 11 aa, Homo sapiens
  CDR3 for beta chain variable domain of TCR clone 2026 (TRBV11-3, TRBJ2-2)
CASSSGGELFF

SEQ ID NO: 4053 - protein, 13 aa, Homo sapiens
  CDR3 for alpha chain variable domain of TCR clone 2027 (TRAV1-2, TRAJ12)
CAVSMDSSYKLIF

SEQ ID NO: 4054 - protein, 14 aa, Homo sapiens
  CDR3 for beta chain variable domain of TCR clone 2027 (TRBV19, TRBJ2-1)
CASSSGRDYNEQFF

SEQ ID NO: 4055 - protein, 16 aa, Homo sapiens
  CDR3 for alpha chain variable domain of TCR clone 2028 (TRAV3, TRAJ37)
CAVRPHGSGNTGKLIF

SEQ ID NO: 4056 - protein, 17 aa, Homo sapiens
  CDR3 for beta chain variable domain of TCR clone 2028 (TRBV5-1, TRBJ2-5)
CASSPVALGQNQETQYF

SEQ ID NO: 4057 - protein, 14 aa, Homo sapiens
  CDR3 for alpha chain variable domain of TCR clone 2029 (TRAV26-1, TRAJ38)
CIADNAGNNRKLIW

SEQ ID NO: 4058 - protein, 15 aa, Homo sapiens
  CDR3 for beta chain variable domain of TCR clone 2029 (TRBV20-1, TRBJ2-7)
CSARDRVSGMDEQYF

SEQ ID NO: 4059 - protein, 13 aa, Homo sapiens
  CDR3 for alpha chain variable domain of TCR clone 2030 (TRAV36/DV7, TRAJ37)
CAVFSSNTGKLIF

SEQ ID NO: 4060 - protein, 15 aa, Homo sapiens
  CDR3 for beta chain variable domain of TCR clone 2030 (TRBV5-1, TRBJ2-2)
CASSSQGGNTGELFF

SEQ ID NO: 4061 - protein, 14 aa, Homo sapiens
  CDR3 for alpha chain variable domain of TCR clone 2031 (TRAV1-2, TRAJ16)
CAVNRFSDGQKLLF

SEQ ID NO: 4062 - protein, 12 aa, Homo sapiens
  CDR3 for beta chain variable domain of TCR clone 2031 (TRBV24-1, TRBJ1-1)
CATLYPDTEAFF

SEQ ID NO: 4063 - protein, 13 aa, Homo sapiens
  CDR3 for alpha chain variable domain of TCR clone 2032 (TRAV23/DV6, TRAJ58)
CAARLIRGSRLTF

SEQ ID NO: 4064 - protein, 13 aa, Homo sapiens
  CDR3 for beta chain variable domain of TCR clone 2032 (TRBV2, TRBJ1-6)
CADSGSYNSPLHF

SEQ ID NO: 4065 - protein, 15 aa, Homo sapiens
  CDR3 for alpha chain variable domain of TCR clone 2033 (TRAV13-1, TRAJ32)
CAASIYGGATNKLIF

SEQ ID NO: 4066 - protein, 17 aa, Homo sapiens
  CDR3 for beta chain variable domain of TCR clone 2033 (TRBV7-3, TRBJ2-5)
CASSLGSGRSGSETQYF

SEQ ID NO: 4067 - protein, 13 aa, Homo sapiens
  CDR3 for alpha chain variable domain of TCR clone 2034 (TRAV2, TRAJ40)
CAVVTSGTYKYIF

SEQ ID NO: 4068 - protein, 16 aa, Homo sapiens
  CDR3 for beta chain variable domain of TCR clone 2034 (TRBV19, TRBJ2-1)
CASSKAGPSSYNEQFF

SEQ ID NO: 4069 - protein, 23 aa, Homo sapiens
  CDR3 for alpha chain variable domain of TCR clone 2035 (TRAV8-3, TRAJ38)
CAVGASNAGNNHIQNPDPAVYQL

SEQ ID NO: 4070 - protein, 15 aa, Homo sapiens
  CDR3 for beta chain variable domain of TCR clone 2035 (TRBV11-3, TRBJ1-3)
CASSLFGPSGNTIYF

SEQ ID NO: 4071 - protein, 14 aa, Homo sapiens
  CDR3 for alpha chain variable domain of TCR clone 2036 (TRAV1-1, TRAJ27)
CAVIYNTNAGKSTF

SEQ ID NO: 4072 - protein, 13 aa, Homo sapiens
  CDR3 for beta chain variable domain of TCR clone 2036 (TRBV7-9, TRBJ1-2)
CASSLKQNYGYTF

SEQ ID NO: 4073 - protein, 16 aa, Homo sapiens
  CDR3 for alpha chain variable domain of TCR clone 2037 (TRAV12-3, TRAJ53)
CAMSPGSGGSNYKLTF

SEQ ID NO: 4074 - protein, 12 aa, Homo sapiens
  CDR3 for beta chain variable domain of TCR clone 2037 (TRBV7-8, TRBJ2-7)
CASSLGDREQYF

SEQ ID NO: 4075 - protein, 14 aa, Homo sapiens
  CDR3 for alpha chain variable domain of TCR clone 2038 (TRAV1-2, TRAJ16)
CAVNRFSDGQKLLF

SEQ ID NO: 4076 - protein, 14 aa, Homo sapiens
  CDR3 for beta chain variable domain of TCR clone 2038 (TRBV7-3, TRBJ1-1)
CASSLKGGNTEAFF

SEQ ID NO: 4077 - protein, 13 aa, Homo sapiens
  CDR3 for alpha chain variable domain of TCR clone 2039 (TRAV17, TRAJ22)
CAGRRGSARQLTF

SEQ ID NO: 4078 - protein, 14 aa, Homo sapiens
  CDR3 for beta chain variable domain of TCR clone 2039 (TRBV19, TRBJ1-1)
CASSITGWETEAFF

SEQ ID NO: 4079 - protein, 14 aa, Homo sapiens
  CDR3 for alpha chain variable domain of TCR clone 2040 (TRAV12-2, TRAJ44)
CAVNPAGTASKLTF

SEQ ID NO: 4080 - protein, 16 aa, Homo sapiens
  CDR3 for beta chain variable domain of TCR clone 2040 (TRBV2, TRBJ2-6)
CASSEVGGAGANVLTF

SEQ ID NO: 4081 - protein, 17 aa, Homo sapiens
  CDR3 for alpha chain variable domain of TCR clone 2041 (TRAV3, TRAJ6)
CAVRDGPRAGGSYIPTF

SEQ ID NO: 4082 - protein, 18 aa, Homo sapiens
  CDR3 for beta chain variable domain of TCR clone 2041 (TRBV7-3, TRBJ2-3)
CASSSTGTYPGSTDTQYF

SEQ ID NO: 4083 - protein, 18 aa, Homo sapiens
  CDR3 for alpha chain variable domain of TCR clone 2042 (TRAV8-4, TRAJ52)
CAVTRANAGGTSYGKLTF

SEQ ID NO: 4084 - protein, 20 aa, Homo sapiens
  CDR3 for beta chain variable domain of TCR clone 2042 (TRBV19, TRBJ2-1)
CASSISRTVTSTRLNNEQFF

SEQ ID NO: 4085 - protein, 14 aa, Homo sapiens
  CDR3 for alpha chain variable domain of TCR clone 2043 (TRAV1-2, TRAJ16)
CAVNRFSDGQKLLF

SEQ ID NO: 4086 - protein, 17 aa, Homo sapiens
  CDR3 for beta chain variable domain of TCR clone 2043 (TRBV7-8, TRBJ2-6)
CASSAGTGGAGANVLTF

SEQ ID NO: 4087 - protein, 15 aa, Homo sapiens
  CDR3 for alpha chain variable domain of TCR clone 2044 (TRAV21, TRAJ53)
CATLNSGGSNYKLTF

SEQ ID NO: 4088 - protein, 16 aa, Homo sapiens
  CDR3 for beta chain variable domain of TCR clone 2044 (TRBV12-4, TRBJ1-5)
CASSRPVGGSNQPQHF

SEQ ID NO: 4089 - protein, 13 aa, Homo sapiens
  CDR3 for alpha chain variable domain of TCR clone 2045 (TRAV2, TRAJ40)
CAVVTSGTYKYIF

SEQ ID NO: 4090 - protein, 15 aa, Homo sapiens
  CDR3 for beta chain variable domain of TCR clone 2045 (TRBV18, TRBJ1-1)
CASSPRQGENTEAFF

SEQ ID NO: 4091 - protein, 13 aa, Homo sapiens
  CDR3 for alpha chain variable domain of TCR clone 2046 (TRAV20, TRAJ37)
CAGCSSNTGKLIF

SEQ ID NO: 4092 - protein, 15 aa, Homo sapiens
  CDR3 for beta chain variable domain of TCR clone 2046 (TRBV7-2, TRBJ2-1)
CASSFQADEYNEQFF

SEQ ID NO: 4093 - protein, 13 aa, Homo sapiens
  CDR3 for alpha chain variable domain of TCR clone 2047 (TRAV12-1, TRAJ13)
CVVALLGYQKVTF

SEQ ID NO: 4094 - protein, 13 aa, Homo sapiens
  CDR3 for beta chain variable domain of TCR clone 2047 (TRBV20-1, TRBJ2-5)
CSAILTGQETQYF

SEQ ID NO: 4095 - protein, 15 aa, Homo sapiens
  CDR3 for alpha chain variable domain of TCR clone 2048 (TRAV16, TRAJ17)
CALSGNKAAGNKLTF

SEQ ID NO: 4096 - protein, 16 aa, Homo sapiens
  CDR3 for beta chain variable domain of TCR clone 2048 (TRBV7-6, TRBJ1-6)
CASSSLPAGEYSPLHF

SEQ ID NO: 4097 - protein, 16 aa, Homo sapiens
  CDR3 for alpha chain variable domain of TCR clone 2049 (TRAV12-3, TRAJ53)
CAMSPGSGGSNYKLTF

SEQ ID NO: 4098 - protein, 14 aa, Homo sapiens
  CDR3 for beta chain variable domain of TCR clone 2049 (TRBV7-2, TRBJ1-1)
CASSFLTGTTEAFF

SEQ ID NO: 4099 - protein, 14 aa, Homo sapiens
  CDR3 for alpha chain variable domain of TCR clone 2050 (TRAV12-1, TRAJ15)
CLPPANQAGTALIF

SEQ ID NO: 4100 - protein, 13 aa, Homo sapiens
  CDR3 for beta chain variable domain of TCR clone 2050 (TRBV7-2, TRBJ2-4)
CASSREHANIQYF

SEQ ID NO: 4101 - protein, 15 aa, Homo sapiens
  CDR3 for alpha chain variable domain of TCR clone 2051 (TRAV12-3, TRAJ6)
CAMSPASGGSYIPTF

SEQ ID NO: 4102 - protein, 15 aa, Homo sapiens
  CDR3 for beta chain variable domain of TCR clone 2051 (TRBV2, TRBJ1-2)
CASSESRTVNYGYTF

SEQ ID NO: 4103 - protein, 13 aa, Homo sapiens
  CDR3 for alpha chain variable domain of TCR clone 2052 (TRAV12-2, TRAJ18)
CAVRGSTLGRLYF

SEQ ID NO: 4104 - protein, 20 aa, Homo sapiens
  CDR3 for beta chain variable domain of TCR clone 2052 (TRBV7-8, TRBJ2-2)
CASSHLFPGPTIHITGELFF

SEQ ID NO: 4105 - protein, 12 aa, Homo sapiens
  CDR3 for alpha chain variable domain of TCR clone 2053 (TRAV13-1, TRAJ21)
CAAKEGFNKFYF

SEQ ID NO: 4106 - protein, 20 aa, Homo sapiens
  CDR3 for beta chain variable domain of TCR clone 2053 (TRBV7-8, TRBJ2-2)
CASSHLFPGPTIHITGELFF

SEQ ID NO: 4107 - protein, 15 aa, Homo sapiens
  CDR3 for alpha chain variable domain of TCR clone 2054 (TRAV27, TRAJ38)
CAARRNAGNNRKLIW

SEQ ID NO: 4108 - protein, 14 aa, Homo sapiens
  CDR3 for beta chain variable domain of TCR clone 2054 (TRBV7-8, TRBJ2-3)
CASSLEAGTDTQYF

SEQ ID NO: 4109 - protein, 13 aa, Homo sapiens
  CDR3 for alpha chain variable domain of TCR clone 2055 (TRAV8-3, TRAJ48)
CAVVRFGNEKLTF

SEQ ID NO: 4110 - protein, 16 aa, Homo sapiens
  CDR3 for beta chain variable domain of TCR clone 2055 (TRBV20-1, TRBJ2-5)
CSARDFASGIQETQYF

SEQ ID NO: 4111 - protein, 15 aa, Homo sapiens
  CDR3 for alpha chain variable domain of TCR clone 2056 (TRAV8-6, TRAJ6)
CAVSGESGGSYIPTF

SEQ ID NO: 4112 - protein, 14 aa, Homo sapiens
  CDR3 for beta chain variable domain of TCR clone 2056 (TRBV7-9, TRBJ2-1)
CASSSMVGFGEQFF

SEQ ID NO: 4113 - protein, 15 aa, Homo sapiens
  CDR3 for alpha chain variable domain of TCR clone 2057 (TRAV8-3, TRAJ45)
CASSYSGGGADGLTF

SEQ ID NO: 4114 - protein, 16 aa, Homo sapiens
  CDR3 for beta chain variable domain of TCR clone 2057 (TRBV20-1, TRBJ2-2)
CSASASGIPGAGELFF

SEQ ID NO: 4115 - protein, 14 aa, Homo sapiens
  CDR3 for alpha chain variable domain of TCR clone 2058 (TRAV29/DV5, TRAJ32)
CAAAYGGATNKLIF

SEQ ID NO: 4116 - protein, 11 aa, Homo sapiens
  CDR3 for beta chain variable domain of TCR clone 2058 (TRBV11-2, TRBJ2-2)
CASSLPGELFF

SEQ ID NO: 4117 - protein, 14 aa, Homo sapiens
  CDR3 for alpha chain variable domain of TCR clone 2059 (TRAV12-2, TRAJ13)
CAVKKTGGYQKVTF

SEQ ID NO: 4118 - protein, 15 aa, Homo sapiens
  CDR3 for beta chain variable domain of TCR clone 2059 (TRBV12-4, TRBJ2-5)
CASSPPTGLQETQYF

SEQ ID NO: 4119 - protein, 11 aa, Homo sapiens
  CDR3 for alpha chain variable domain of TCR clone 2060 (TRAV20, TRAJ40)
CAVGGTYKYIF

SEQ ID NO: 4120 - protein, 15 aa, Homo sapiens
  CDR3 for beta chain variable domain of TCR clone 2060 (TRBV6-3, TRBJ2-2)
CASSFLATLTGELFF

SEQ ID NO: 4121 - protein, 13 aa, Homo sapiens
  CDR3 for alpha chain variable domain of TCR clone 2061 (TRAV17, TRAJ33)
CATDADSNYQLIW

SEQ ID NO: 4122 - protein, 17 aa, Homo sapiens
  CDR3 for beta chain variable domain of TCR clone 2061 (TRBV20-1, TRBJ2-3)
CSAVSPGLAGGQDTQYF

SEQ ID NO: 4123 - protein, 14 aa, Homo sapiens
  CDR3 for alpha chain variable domain of TCR clone 2062 (TRAV1-2, TRAJ8)
CAVREDTGFQKLVF

SEQ ID NO: 4124 - protein, 11 aa, Homo sapiens
  CDR3 for beta chain variable domain of TCR clone 2062 (TRBV11-3, TRBJ2-7)
CASSRTYEQYF

SEQ ID NO: 4125 - protein, 13 aa, Homo sapiens
  CDR3 for alpha chain variable domain of TCR clone 2063 (TRAV8-6, TRAJ13)
CAVSSGGYQKVTF

SEQ ID NO: 4126 - protein, 15 aa, Homo sapiens
  CDR3 for beta chain variable domain of TCR clone 2063 (TRBV7-9, TRBJ2-7)
CASSLPMGQANEQYF

SEQ ID NO: 4127 - protein, 16 aa, Homo sapiens
  CDR3 for alpha chain variable domain of TCR clone 2064 (TRAV1-1, TRAJ29)
CAVRSTRNSGNTPLVF

SEQ ID NO: 4128 - protein, 16 aa, Homo sapiens
  CDR3 for beta chain variable domain of TCR clone 2064 (TRBV27, TRBJ1-1)
CASSSRGRTGYTEAFF

SEQ ID NO: 4129 - protein, 18 aa, Homo sapiens
  CDR3 for alpha chain variable domain of TCR clone 2065 (TRAV17, TRAJ45)
CATSLDLYSGGGADGLTF

SEQ ID NO: 4130 - protein, 13 aa, Homo sapiens
  CDR3 for beta chain variable domain of TCR clone 2065 (TRBV10-3, TRBJ2-7)
CASKLAVNYEQYF

SEQ ID NO: 4131 - protein, 16 aa, Homo sapiens
  CDR3 for alpha chain variable domain of TCR clone 2066 (TRAV23/DV6, )
CADIQNPDPAVYQLRD

SEQ ID NO: 4132 - protein, 13 aa, Homo sapiens
  CDR3 for beta chain variable domain of TCR clone 2066 (TRBV28, TRBJ2-7)
CASRSSGVYEQYF

SEQ ID NO: 4133 - protein, 13 aa, Homo sapiens
  CDR3 for alpha chain variable domain of TCR clone 2067 (TRAV12-2, TRAJ52)
CAVGGTSYGKLTF

SEQ ID NO: 4134 - protein, 14 aa, Homo sapiens
  CDR3 for beta chain variable domain of TCR clone 2067 (TRBV19, TRBJ2-1)
CASPTFVLSGEQFF

SEQ ID NO: 4135 - protein, 13 aa, Homo sapiens
  CDR3 for alpha chain variable domain of TCR clone 2068 (TRAV20, TRAJ37)
CAGCSSNTGKLIF

SEQ ID NO: 4136 - protein, 14 aa, Homo sapiens
  CDR3 for beta chain variable domain of TCR clone 2068 (TRBV20-1, TRBJ2-5)
CSARDGRAGETQYF

SEQ ID NO: 4137 - protein, 14 aa, Homo sapiens
  CDR3 for alpha chain variable domain of TCR clone 2069 (TRAV1-2, TRAJ8)
CAVREDTGFQKLVF

SEQ ID NO: 4138 - protein, 16 aa, Homo sapiens
  CDR3 for beta chain variable domain of TCR clone 2069 (TRBV4-1, TRBJ2-3)
CASSQSTSGAEDTQYF

SEQ ID NO: 4139 - protein, 14 aa, Homo sapiens
  CDR3 for alpha chain variable domain of TCR clone 2070 (TRAV35, TRAJ42)
CCVPYGGSQGNLIF

SEQ ID NO: 4140 - protein, 18 aa, Homo sapiens
  CDR3 for beta chain variable domain of TCR clone 2070 (TRBV13, TRBJ2-6)
CASSPMTSGGSGANVLTF

SEQ ID NO: 4141 - protein, 11 aa, Homo sapiens
  CDR3 for alpha chain variable domain of TCR clone 2071 (TRAV2, TRAJ13)
CASGGYQKVTF

SEQ ID NO: 4142 - protein, 20 aa, Homo sapiens
  CDR3 for beta chain variable domain of TCR clone 2071 (TRBV28, TRBJ2-1)
CASTPIGRSPGLAGGNEQFF

SEQ ID NO: 4143 - protein, 15 aa, Homo sapiens
  CDR3 for alpha chain variable domain of TCR clone 2072 (TRAV3, TRAJ40)
CAVRDVTSGTYKYIF

SEQ ID NO: 4144 - protein, 13 aa, Homo sapiens
  CDR3 for beta chain variable domain of TCR clone 2072 (TRBV7-9, TRBJ1-2)
CASSLKQNYGYTF

SEQ ID NO: 4145 - protein, 19 aa, Homo sapiens
  CDR3 for alpha chain variable domain of TCR clone 2073 (TRAV8-3, TRAJ8)
LSTSVLWDPMNTGFQKLVF

SEQ ID NO: 4146 - protein, 13 aa, Homo sapiens
  CDR3 for beta chain variable domain of TCR clone 2073 (TRBV10-2, TRBJ2-3)
CASSESGDHTQYF

SEQ ID NO: 4147 - protein, 10 aa, Homo sapiens
  CDR3 for alpha chain variable domain of TCR clone 2074 (TRAV16, TRAJ26)
CAPEELWSEF

SEQ ID NO: 4148 - protein, 15 aa, Homo sapiens
  CDR3 for beta chain variable domain of TCR clone 2074 (TRBV7-2, TRBJ2-3)
CASSLTGTSTDTQYF

SEQ ID NO: 4149 - protein, 12 aa, Homo sapiens
  CDR3 for alpha chain variable domain of TCR clone 2075 (TRAV1-2, TRAJ26)
CAVSPYGQNFVF

SEQ ID NO: 4150 - protein, 14 aa, Homo sapiens
  CDR3 for beta chain variable domain of TCR clone 2075 (TRBV5-1, TRBJ2-7)
CASSFASGVNEQYF

SEQ ID NO: 4151 - protein, 14 aa, Homo sapiens
  CDR3 for alpha chain variable domain of TCR clone 2076 (TRAV13-1, TRAJ20)
CAARPGSNDYKLSF

SEQ ID NO: 4152 - protein, 15 aa, Homo sapiens
  CDR3 for beta chain variable domain of TCR clone 2076 (TRBV4-1, TRBJ2-7)
CASSQQGQGFDEQYF

SEQ ID NO: 4153 - protein, 14 aa, Homo sapiens
  CDR3 for alpha chain variable domain of TCR clone 2077 (TRAV1-2, TRAJ8)
CAVREDTGFQKLVF

SEQ ID NO: 4154 - protein, 14 aa, Homo sapiens
  CDR3 for beta chain variable domain of TCR clone 2077 (TRBV7-9, TRBJ1-1)
CASTPLQSYTEAFF

SEQ ID NO: 4155 - protein, 14 aa, Homo sapiens
  CDR3 for alpha chain variable domain of TCR clone 2078 (TRAV13-2, TRAJ4)
CAEKGPKGYNKLIF

SEQ ID NO: 4156 - protein, 13 aa, Homo sapiens
  CDR3 for beta chain variable domain of TCR clone 2078 (TRBV18, TRBJ2-5)
CASSPPGKETQYF

SEQ ID NO: 4157 - protein, 13 aa, Homo sapiens
  CDR3 for alpha chain variable domain of TCR clone 2079 (TRAV27, TRAJ57)
CAGFQGGSEKLVF

SEQ ID NO: 4158 - protein, 14 aa, Homo sapiens
  CDR3 for beta chain variable domain of TCR clone 2079 (TRBV20-1, TRBJ1-2)
CSGRKDGRAYGYTF

SEQ ID NO: 4159 - protein, 14 aa, Homo sapiens
  CDR3 for alpha chain variable domain of TCR clone 2080 (TRAV12-3, TRAJ10)
SHLPLTGGGNKLTF

SEQ ID NO: 4160 - protein, 14 aa, Homo sapiens
  CDR3 for beta chain variable domain of TCR clone 2080 (TRBV19, TRBJ2-1)
CASPTFVLSGEQFF

SEQ ID NO: 4161 - protein, 14 aa, Homo sapiens
  CDR3 for alpha chain variable domain of TCR clone 2081 (TRAV8-3, TRAJ39)
CAVGANNAGNMLTF

SEQ ID NO: 4162 - protein, 12 aa, Homo sapiens
  CDR3 for beta chain variable domain of TCR clone 2081 (TRBV11-3, TRBJ1-1)
CASSHRQGEAFF

SEQ ID NO: 4163 - protein, 13 aa, Homo sapiens
  CDR3 for alpha chain variable domain of TCR clone 2082 (TRAV20, TRAJ26)
CAVPTSYGQNFVF

SEQ ID NO: 4164 - protein, 16 aa, Homo sapiens
  CDR3 for beta chain variable domain of TCR clone 2082 (TRBV28, TRBJ2-7)
CASSSPQGRDVYEQYF

SEQ ID NO: 4165 - protein, 12 aa, Homo sapiens
  CDR3 for alpha chain variable domain of TCR clone 2083 (TRAV25, TRAJ53)
CQSGGSNYKLTF

SEQ ID NO: 4166 - protein, 15 aa, Homo sapiens
  CDR3 for beta chain variable domain of TCR clone 2083 (TRBV5-1, TRBJ2-2)
CASSWTSPNTGELFF

SEQ ID NO: 4167 - protein, 14 aa, Homo sapiens
  CDR3 for alpha chain variable domain of TCR clone 2084 (TRAV26-1, TRAJ45)
CIEVTGGGADGLTF

SEQ ID NO: 4168 - protein, 19 aa, Homo sapiens
  CDR3 for beta chain variable domain of TCR clone 2084 (TRBV19, TRBJ2-2)
CASTRPGLAGGRVTGELFF

SEQ ID NO: 4169 - protein, 16 aa, Homo sapiens
  CDR3 for alpha chain variable domain of TCR clone 2085 (TRAV26-1, TRAJ48)
CIVREPPNFGNEKLTF

SEQ ID NO: 4170 - protein, 12 aa, Homo sapiens
  CDR3 for beta chain variable domain of TCR clone 2085 (TRBV19, TRBJ2-1)
CASSRQGAEQFF

SEQ ID NO: 4171 - protein, 15 aa, Homo sapiens
  CDR3 for alpha chain variable domain of TCR clone 2086 (TRAV12-3, TRAJ49)
CAMAVTPNTGNQFYF

SEQ ID NO: 4172 - protein, 14 aa, Homo sapiens
  CDR3 for beta chain variable domain of TCR clone 2086 (TRBV7-8, TRBJ2-3)
CASSLEAGTDTQYF

SEQ ID NO: 4173 - protein, 16 aa, Homo sapiens
  CDR3 for alpha chain variable domain of TCR clone 2087 (TRAV8-2, TRAJ7)
CVVSEGPYYGNNRLAF

SEQ ID NO: 4174 - protein, 15 aa, Homo sapiens
  CDR3 for beta chain variable domain of TCR clone 2087 (TRBV27, TRBJ2-3)
CASSLGLAATDTQYF

SEQ ID NO: 4175 - protein, 17 aa, Homo sapiens
  CDR3 for alpha chain variable domain of TCR clone 2088 (TRAV35, TRAJ52)
CAGQLAAGGTSYGKLTF

SEQ ID NO: 4176 - protein, 12 aa, Homo sapiens
  CDR3 for beta chain variable domain of TCR clone 2088 (TRBV20-1, TRBJ2-7)
CSAGRRQSEQYF

SEQ ID NO: 4177 - protein, 14 aa, Homo sapiens
  CDR3 for alpha chain variable domain of TCR clone 2089 (TRAV8-6, TRAJ53)
CAALVLGSNYKLTF

SEQ ID NO: 4178 - protein, 15 aa, Homo sapiens
  CDR3 for beta chain variable domain of TCR clone 2089 (TRBV20-1, TRBJ2-3)
CSAEPLAGHGDTQYF

SEQ ID NO: 4179 - protein, 15 aa, Homo sapiens
  CDR3 for alpha chain variable domain of TCR clone 2090 (TRAV8-3, TRAJ23)
CAVGDRYNQGGKLIF

SEQ ID NO: 4180 - protein, 17 aa, Homo sapiens
  CDR3 for beta chain variable domain of TCR clone 2090 (TRBV4-1, TRBJ1-4)
CASSQEGPRGVEEKLFF

SEQ ID NO: 4181 - protein, 19 aa, Homo sapiens
  CDR3 for alpha chain variable domain of TCR clone 2091 (TRAV2, TRAJ20)
ILQVREADAAVYRDCKLSF

SEQ ID NO: 4182 - protein, 12 aa, Homo sapiens
  CDR3 for beta chain variable domain of TCR clone 2091 (TRBV11-2, TRBJ2-1)
CASSPGNNEQFF

SEQ ID NO: 4183 - protein, 12 aa, Homo sapiens
  CDR3 for alpha chain variable domain of TCR clone 2092 (TRAV1-1, TRAJ39)
CAVPVVGNMLTF

SEQ ID NO: 4184 - protein, 17 aa, Homo sapiens
  CDR3 for beta chain variable domain of TCR clone 2092 (TRBV28, TRBJ2-5)
CASSTPEGDALQETQYF

SEQ ID NO: 4185 - protein, 15 aa, Homo sapiens
  CDR3 for alpha chain variable domain of TCR clone 2093 (TRAV1-1, TRAJ5)
CAVRHMDTGRRALTF

SEQ ID NO: 4186 - protein, 17 aa, Homo sapiens
  CDR3 for beta chain variable domain of TCR clone 2093 (TRBV28, TRBJ2-7)
CASSPGLAGGDSSEQYF

SEQ ID NO: 4187 - protein, 13 aa, Homo sapiens
  CDR3 for alpha chain variable domain of TCR clone 2094 (TRAV3, TRAJ20)
CCEAFCNDYKLSF

SEQ ID NO: 4188 - protein, 15 aa, Homo sapiens
  CDR3 for beta chain variable domain of TCR clone 2094 (TRBV6-5, TRBJ2-1)
CASSYDAGAGNEQFF

SEQ ID NO: 4189 - protein, 21 aa, Homo sapiens
  CDR3 for alpha chain variable domain of TCR clone 2095 (TRAV1-2, TRAJ37)
CLLPLCCERFHGSGNTGKLIF

SEQ ID NO: 4190 - protein, 14 aa, Homo sapiens
  CDR3 for beta chain variable domain of TCR clone 2095 (TRBV2, TRBJ2-5)
CASSEVLAQETQYF

SEQ ID NO: 4191 - protein, 13 aa, Homo sapiens
  CDR3 for alpha chain variable domain of TCR clone 2096 (TRAV12-3, TRAJ31)
CAMSANNNARLMF

SEQ ID NO: 4192 - protein, 16 aa, Homo sapiens
  CDR3 for beta chain variable domain of TCR clone 2096 (TRBV7-9, TRBJ1-2)
CASSLGFSSGEDGYTF

SEQ ID NO: 4193 - protein, 14 aa, Homo sapiens
  CDR3 for alpha chain variable domain of TCR clone 2097 (TRAV17, TRAJ12)
CAILPMDSSYKLIF

SEQ ID NO: 4194 - protein, 15 aa, Homo sapiens
  CDR3 for beta chain variable domain of TCR clone 2097 (TRBV5-1, TRBJ1-1)
CASSLGEGENTEAFF

SEQ ID NO: 4195 - protein, 14 aa, Homo sapiens
  CDR3 for alpha chain variable domain of TCR clone 2098 (TRAV1-2, TRAJ8)
CAVREDTGFQKLVF

SEQ ID NO: 4196 - protein, 16 aa, Homo sapiens
  CDR3 for beta chain variable domain of TCR clone 2098 (TRBV28, TRBJ1-4)
CASSPPYRGRSEKLFF

SEQ ID NO: 4197 - protein, 11 aa, Homo sapiens
  CDR3 for alpha chain variable domain of TCR clone 2099 (TRAV23/DV6, TRAJ58)
CAARLLRGETS

SEQ ID NO: 4198 - protein, 13 aa, Homo sapiens
  CDR3 for beta chain variable domain of TCR clone 2099 (TRBV6-4, TRBJ1-5)
CASSADLNQPQHF

SEQ ID NO: 4199 - protein, 14 aa, Homo sapiens
  CDR3 for alpha chain variable domain of TCR clone 2100 (TRAV12-3, TRAJ35)
CAMSLIGFGNVLHC

SEQ ID NO: 4200 - protein, 12 aa, Homo sapiens
  CDR3 for beta chain variable domain of TCR clone 2100 (TRBV12-4, TRBJ1-1)
CASSLAGLEAFF

SEQ ID NO: 4201 - protein, 12 aa, Homo sapiens
  CDR3 for alpha chain variable domain of TCR clone 2101 (TRAV23/DV6, TRAJ30)
CAASKGDDKIIF

SEQ ID NO: 4202 - protein, 13 aa, Homo sapiens
  CDR3 for beta chain variable domain of TCR clone 2101 (TRBV19, TRBJ1-2)
CASSVPGQDGYTF

SEQ ID NO: 4203 - protein, 11 aa, Homo sapiens
  CDR3 for alpha chain variable domain of TCR clone 2102 (TRAV1-2, TRAJ20)
CAVANDYKLSF

SEQ ID NO: 4204 - protein, 15 aa, Homo sapiens
  CDR3 for beta chain variable domain of TCR clone 2102 (TRBV2, TRBJ2-1)
CASSELAGSYNEQFF

SEQ ID NO: 4205 - protein, 14 aa, Homo sapiens
  CDR3 for alpha chain variable domain of TCR clone 2103 (TRAV12-1, TRAJ17)
CVVNYKAAGNKLTF

SEQ ID NO: 4206 - protein, 14 aa, Homo sapiens
  CDR3 for beta chain variable domain of TCR clone 2103 (TRBV7-2, TRBJ2-7)
CASRSQGAAYEQYF

SEQ ID NO: 4207 - protein, 13 aa, Homo sapiens
  CDR3 for alpha chain variable domain of TCR clone 2104 (TRAV8-6, TRAJ40)
CAVSVTGTYKYIF

SEQ ID NO: 4208 - protein, 15 aa, Homo sapiens
  CDR3 for beta chain variable domain of TCR clone 2104 (TRBV4-1, TRBJ2-3)
CASGRGQGIPDTQYF

SEQ ID NO: 4209 - protein, 14 aa, Homo sapiens
  CDR3 for alpha chain variable domain of TCR clone 2105 (TRAV1-1, TRAJ27)
CAVIYNTNAGKSTF

SEQ ID NO: 4210 - protein, 14 aa, Homo sapiens
  CDR3 for beta chain variable domain of TCR clone 2105 (TRBV25-1, TRBJ1-1)
CASTHLGGNTEAFF

SEQ ID NO: 4211 - protein, 12 aa, Homo sapiens
  CDR3 for alpha chain variable domain of TCR clone 2106 (TRAV16, TRAJ57)
CALEGGSEKLVF

SEQ ID NO: 4212 - protein, 12 aa, Homo sapiens
  CDR3 for beta chain variable domain of TCR clone 2106 (TRBV28, TRBJ2-7)
CASSGRPYEQYF

SEQ ID NO: 4213 - protein, 13 aa, Homo sapiens
  CDR3 for alpha chain variable domain of TCR clone 2107 (TRAV4, TRAJ34)
CLVGDYNTDKLIF

SEQ ID NO: 4214 - protein, 23 aa, Homo sapiens
  CDR3 for beta chain variable domain of TCR clone 2107 (TRBV4-2, TRBJ2-3)
CASSQDPPRASSISGGRGDTQYF

SEQ ID NO: 4215 - protein, 14 aa, Homo sapiens
  CDR3 for alpha chain variable domain of TCR clone 2108 (TRAV35, TRAJ41)
CAGQASVRRNALNF

SEQ ID NO: 4216 - protein, 14 aa, Homo sapiens
  CDR3 for beta chain variable domain of TCR clone 2108 (TRBV20-1, TRBJ1-2)
CSASEQGAVYGYTF

SEQ ID NO: 4217 - protein, 13 aa, Homo sapiens
  CDR3 for alpha chain variable domain of TCR clone 2109 (TRAV36/DV7, TRAJ37)
CAVFSSNTGKLIF

SEQ ID NO: 4218 - protein, 15 aa, Homo sapiens
  CDR3 for beta chain variable domain of TCR clone 2109 (TRBV12-4, TRBJ2-5)
CQQFFVRGRQETQYF

SEQ ID NO: 4219 - protein, 13 aa, Homo sapiens
  CDR3 for alpha chain variable domain of TCR clone 2110 (TRAV21, TRAJ27)
CAARPGNAGKSTF

SEQ ID NO: 4220 - protein, 14 aa, Homo sapiens
  CDR3 for beta chain variable domain of TCR clone 2110 (TRBV7-9, TRBJ2-5)
CASSLDTAQETQYF

SEQ ID NO: 4221 - protein, 15 aa, Homo sapiens
  CDR3 for alpha chain variable domain of TCR clone 2111 (TRAV1-2, TRAJ32)
CAVRGYGGATNKLIF

SEQ ID NO: 4222 - protein, 15 aa, Homo sapiens
  CDR3 for beta chain variable domain of TCR clone 2111 (TRBV25-1, TRBJ2-5)
CASSDTGTHQETQYF

SEQ ID NO: 4223 - protein, 16 aa, Homo sapiens
  CDR3 for alpha chain variable domain of TCR clone 2112 (TRAV26-1, TRAJ52)
CIVSNAGGTSYGKLTF

SEQ ID NO: 4224 - protein, 15 aa, Homo sapiens
  CDR3 for beta chain variable domain of TCR clone 2112 (TRBV7-3, TRBJ2-1)
CASSPTGGGEVEQFF

SEQ ID NO: 4225 - protein, 13 aa, Homo sapiens
  CDR3 for alpha chain variable domain of TCR clone 2113 (TRAV13-1, TRAJ10)
CAATAGGGNKLTF

SEQ ID NO: 4226 - protein, 12 aa, Homo sapiens
  CDR3 for beta chain variable domain of TCR clone 2113 (TRBV7-3, TRBJ2-1)
CASSFQSGPQFF

SEQ ID NO: 4227 - protein, 14 aa, Homo sapiens
  CDR3 for alpha chain variable domain of TCR clone 2114 (TRAV12-3, TRAJ10)
SHLPLTGGGNKLTF

SEQ ID NO: 4228 - protein, 11 aa, Homo sapiens
  CDR3 for beta chain variable domain of TCR clone 2114 (TRBV20-1, TRBJ2-5)
CSADRAETQYF

SEQ ID NO: 4229 - protein, 12 aa, Homo sapiens
  CDR3 for alpha chain variable domain of TCR clone 2115 (TRAV13-1, TRAJ21)
CAAKEGFNKFYF

SEQ ID NO: 4230 - protein, 14 aa, Homo sapiens
  CDR3 for beta chain variable domain of TCR clone 2115 (TRBV23-1, TRBJ2-5)
CASSFLRSQETQYF

SEQ ID NO: 4231 - protein, 17 aa, Homo sapiens
  CDR3 for alpha chain variable domain of TCR clone 2116 (TRAV12-2, TRAJ48)
CASNEKLTFGTGTRLTI

SEQ ID NO: 4232 - protein, 14 aa, Homo sapiens
  CDR3 for beta chain variable domain of TCR clone 2116 (TRBV5-1, TRBJ2-5)
CASSLAGKQETQYF

SEQ ID NO: 4233 - protein, 15 aa, Homo sapiens
  CDR3 for alpha chain variable domain of TCR clone 2117 (TRAV4, TRAJ17)
CLVGDIGAAGNKLTF

SEQ ID NO: 4234 - protein, 14 aa, Homo sapiens
  CDR3 for beta chain variable domain of TCR clone 2117 (TRBV6-3, TRBJ2-7)
CASSYSVRVYEQYF

SEQ ID NO: 4235 - protein, 16 aa, Homo sapiens
  CDR3 for alpha chain variable domain of TCR clone 2118 (TRAV3, TRAJ21)
CAVRDIERGNFNKFYF

SEQ ID NO: 4236 - protein, 13 aa, Homo sapiens
  CDR3 for beta chain variable domain of TCR clone 2118 (TRBV4-2, TRBJ1-1)
CASSQAGNTEAFF

SEQ ID NO: 4237 - protein, 13 aa, Homo sapiens
  CDR3 for alpha chain variable domain of TCR clone 2119 (TRAV20, TRAJ20)
CAVQALNDYKLSF

SEQ ID NO: 4238 - protein, 13 aa, Homo sapiens
  CDR3 for beta chain variable domain of TCR clone 2119 (TRBV7-9, TRBJ1-4)
CASSLPGIEKLFF

SEQ ID NO: 4239 - protein, 16 aa, Homo sapiens
  CDR3 for alpha chain variable domain of TCR clone 2120 (TRAV2, TRAJ13)
CAARILGVTRKLPLEL

SEQ ID NO: 4240 - protein, 14 aa, Homo sapiens
  CDR3 for beta chain variable domain of TCR clone 2120 (TRBV19, TRBJ2-1)
CASEVTGARNEQFF

SEQ ID NO: 4241 - protein, 14 aa, Homo sapiens
  CDR3 for alpha chain variable domain of TCR clone 2121 (TRAV1-2, TRAJ27)
CAPAEYTNAGKSTF

SEQ ID NO: 4242 - protein, 18 aa, Homo sapiens
  CDR3 for beta chain variable domain of TCR clone 2121 (TRBV28, TRBJ1-2)
CASRQQQGKRGSNYGYTF

SEQ ID NO: 4243 - protein, 13 aa, Homo sapiens
  CDR3 for alpha chain variable domain of TCR clone 2122 (TRAV1-2, TRAJ9)
CAALNTGGFKTIF

SEQ ID NO: 4244 - protein, 13 aa, Homo sapiens
  CDR3 for beta chain variable domain of TCR clone 2122 (TRBV15, TRBJ1-6)
CATSGGLNSPLHF

SEQ ID NO: 4245 - protein, 14 aa, Homo sapiens
  CDR3 for alpha chain variable domain of TCR clone 2123 (TRAV1-2, TRAJ8)
CAVREDTGFQKLVF

SEQ ID NO: 4246 - protein, 16 aa, Homo sapiens
  CDR3 for beta chain variable domain of TCR clone 2123 (TRBV7-6, TRBJ2-6)
CASSLPGLSGANVLTF

SEQ ID NO: 4247 - protein, 14 aa, Homo sapiens
  CDR3 for alpha chain variable domain of TCR clone 2124 (TRAV20, TRAJ56)
CAVQFGGANSKLTF

SEQ ID NO: 4248 - protein, 14 aa, Homo sapiens
  CDR3 for beta chain variable domain of TCR clone 2124 (TRBV7-2, TRBJ1-1)
CASSFLTGTTEAFF

SEQ ID NO: 4249 - protein, 12 aa, Homo sapiens
  CDR3 for alpha chain variable domain of TCR clone 2125 (TRAV17, TRAJ53)
CATEGSNYKLTF

SEQ ID NO: 4250 - protein, 19 aa, Homo sapiens
  CDR3 for beta chain variable domain of TCR clone 2125 (TRBV5-1, TRBJ2-3)
CASSLWTSGGITTPDTQYF

SEQ ID NO: 4251 - protein, 13 aa, Homo sapiens
  CDR3 for alpha chain variable domain of TCR clone 2126 (TRAV1-2, TRAJ13)
CAVNSGGYQKVTF

SEQ ID NO: 4252 - protein, 14 aa, Homo sapiens
  CDR3 for beta chain variable domain of TCR clone 2126 (TRBV4-1, TRBJ1-5)
CASSPKGDNQPQHF

SEQ ID NO: 4253 - protein, 15 aa, Homo sapiens
  CDR3 for alpha chain variable domain of TCR clone 2127 (TRAV8-3, TRAJ45)
CASSYSGGGADGLTF

SEQ ID NO: 4254 - protein, 15 aa, Homo sapiens
  CDR3 for beta chain variable domain of TCR clone 2127 (TRBV18, TRBJ1-1)
CASSPRQGENTEAFF

SEQ ID NO: 4255 - protein, 11 aa, Homo sapiens
  CDR3 for alpha chain variable domain of TCR clone 2128 (TRAV2, TRAJ13)
CASGGYQKVTF

SEQ ID NO: 4256 - protein, 14 aa, Homo sapiens
  CDR3 for beta chain variable domain of TCR clone 2128 (TRBV19, TRBJ2-1)
CASSKDRGQDEQFF

SEQ ID NO: 4257 - protein, 14 aa, Homo sapiens
  CDR3 for alpha chain variable domain of TCR clone 2129 (TRAV1-2, TRAJ16)
CAVNRFSDGQKLLF

SEQ ID NO: 4258 - protein, 14 aa, Homo sapiens
  CDR3 for beta chain variable domain of TCR clone 2129 (TRBV6-1, TRBJ1-3)
CASVQGGGGNTIYF

SEQ ID NO: 4259 - protein, 13 aa, Homo sapiens
  CDR3 for alpha chain variable domain of TCR clone 2130 (TRAV36/DV7, TRAJ57)
CAVVLGGSEKLVF

SEQ ID NO: 4260 - protein, 14 aa, Homo sapiens
  CDR3 for beta chain variable domain of TCR clone 2130 (TRBV4-1, TRBJ1-2)
CASSQDGQVRGYTF

SEQ ID NO: 4261 - protein, 15 aa, Homo sapiens
  CDR3 for alpha chain variable domain of TCR clone 2131 (TRAV21, TRAJ24)
CAARSSTDSWGKLQF

SEQ ID NO: 4262 - protein, 14 aa, Homo sapiens
  CDR3 for beta chain variable domain of TCR clone 2131 (TRBV11-2, TRBJ2-5)
CASSRTGGIETQYF

SEQ ID NO: 4263 - protein, 19 aa, Homo sapiens
  CDR3 for alpha chain variable domain of TCR clone 2132 (TRAV27, TRAJ53)
ASTSVQSRNSGGSNYKLTF

SEQ ID NO: 4264 - protein, 14 aa, Homo sapiens
  CDR3 for beta chain variable domain of TCR clone 2132 (TRBV11-1, TRBJ2-7)
CASTFAVPSYEQYF

SEQ ID NO: 4265 - protein, 13 aa, Homo sapiens
  CDR3 for alpha chain variable domain of TCR clone 2133 (TRAV8-6, TRAJ16)
CAVSSPDGQKLLF

SEQ ID NO: 4266 - protein, 16 aa, Homo sapiens
  CDR3 for beta chain variable domain of TCR clone 2133 (TRBV5-7, TRBJ2-3)
CASSSLGGAITDTQYF

SEQ ID NO: 4267 - protein, 13 aa, Homo sapiens
  CDR3 for alpha chain variable domain of TCR clone 2134 (TRAV21, TRAJ15)
CAVRNQAGTALIF

SEQ ID NO: 4268 - protein, 16 aa, Homo sapiens
  CDR3 for beta chain variable domain of TCR clone 2134 (TRBV20-1, TRBJ2-5)
CSPGGTSGGYMETQYF

SEQ ID NO: 4269 - protein, 18 aa, Homo sapiens
  CDR3 for alpha chain variable domain of TCR clone 2135 (TRAV12-3, TRAJ52)
CAMSVGGAGGTSYGKLTF

SEQ ID NO: 4270 - protein, 17 aa, Homo sapiens
  CDR3 for beta chain variable domain of TCR clone 2135 (TRBV13, TRBJ2-3)
CASSLSRVAGGRNTQYF

SEQ ID NO: 4271 - protein, 14 aa, Homo sapiens
  CDR3 for alpha chain variable domain of TCR clone 2136 (TRAV1-2, TRAJ8)
CAVREDTGFQKLVF

SEQ ID NO: 4272 - protein, 14 aa, Homo sapiens
  CDR3 for beta chain variable domain of TCR clone 2136 (TRBV11-2, TRBJ2-3)
CASSRLARTDTQYF

SEQ ID NO: 4273 - protein, 15 aa, Homo sapiens
  CDR3 for alpha chain variable domain of TCR clone 2137 (TRAV21, TRAJ13)
CAVRPTSGGYQKVTF

SEQ ID NO: 4274 - protein, 18 aa, Homo sapiens
  CDR3 for beta chain variable domain of TCR clone 2137 (TRBV11-3, TRBJ2-1)
CASSSYPGGRDSYNEQFF

SEQ ID NO: 4275 - protein, 17 aa, Homo sapiens
  CDR3 for alpha chain variable domain of TCR clone 2138 (TRAV12-2, TRAJ36)
CAVKDNLFFGTGTRLTV

SEQ ID NO: 4276 - protein, 15 aa, Homo sapiens
  CDR3 for beta chain variable domain of TCR clone 2138 (TRBV28, TRBJ2-2)
CASTVAGANTGELFF

SEQ ID NO: 4277 - protein, 16 aa, Homo sapiens
  CDR3 for alpha chain variable domain of TCR clone 2139 (TRAV23/DV6, TRAJ21)
CAASSGGGTTSTNFTL

SEQ ID NO: 4278 - protein, 11 aa, Homo sapiens
  CDR3 for beta chain variable domain of TCR clone 2139 (TRBV7-8, TRBJ2-7)
CASSLSLEQYF

SEQ ID NO: 4279 - protein, 12 aa, Homo sapiens
  CDR3 for alpha chain variable domain of TCR clone 2140 (TRAV12-3, TRAJ40)
CAMSSGTYKYIF

SEQ ID NO: 4280 - protein, 20 aa, Homo sapiens
  CDR3 for beta chain variable domain of TCR clone 2140 (TRBV7-8, TRBJ2-2)
CASSHLFPGPTIHITGELFF

SEQ ID NO: 4281 - protein, 14 aa, Homo sapiens
  CDR3 for alpha chain variable domain of TCR clone 2141 (TRAV2, TRAJ3)
CAVDRYSSASKIIF

SEQ ID NO: 4282 - protein, 16 aa, Homo sapiens
  CDR3 for beta chain variable domain of TCR clone 2141 (TRBV20-1, TRBJ1-5)
CSAELPGQQTNQPQHF

SEQ ID NO: 4283 - protein, 12 aa, Homo sapiens
  CDR3 for alpha chain variable domain of TCR clone 2142 (TRAV26-1, TRAJ26)
CIVFIYGQNFVF

SEQ ID NO: 4284 - protein, 13 aa, Homo sapiens
  CDR3 for beta chain variable domain of TCR clone 2142 (TRBV27, TRBJ1-1)
CASSLSIGAEAFF

SEQ ID NO: 4285 - protein, 15 aa, Homo sapiens
  CDR3 for alpha chain variable domain of TCR clone 2143 (TRAV35, TRAJ40)
CAGQLGTSGTYKYIF

SEQ ID NO: 4286 - protein, 11 aa, Homo sapiens
  CDR3 for beta chain variable domain of TCR clone 2143 (TRBV23-1, TRBJ2-7)
SSSGTGLEQYF

SEQ ID NO: 4287 - protein, 15 aa, Homo sapiens
  CDR3 for alpha chain variable domain of TCR clone 2144 (TRAV27, TRAJ38)
CAARRNAGNNRKLIW

SEQ ID NO: 4288 - protein, 15 aa, Homo sapiens
  CDR3 for beta chain variable domain of TCR clone 2144 (TRBV5-1, TRBJ2-1)
CASSPPRAPYNEQFF

SEQ ID NO: 4289 - protein, 11 aa, Homo sapiens
  CDR3 for alpha chain variable domain of TCR clone 2145 (TRAV13-1, TRAJ15)
CAATPGTALIF

SEQ ID NO: 4290 - protein, 17 aa, Homo sapiens
  CDR3 for beta chain variable domain of TCR clone 2145 (TRBV13, TRBJ2-3)
CASSLSRVAGGRNTQYF

SEQ ID NO: 4291 - protein, 12 aa, Homo sapiens
  CDR3 for alpha chain variable domain of TCR clone 2146 (TRAV23/DV6, TRAJ31)
CAARRIGARLMF

SEQ ID NO: 4292 - protein, 13 aa, Homo sapiens
  CDR3 for beta chain variable domain of TCR clone 2146 (TRBV28, TRBJ2-7)
CASKAGGVYEQYF

SEQ ID NO: 4293 - protein, 18 aa, Homo sapiens
  CDR3 for alpha chain variable domain of TCR clone 2147 (TRAV21, TRAJ52)
CAVRPSPAGGTSYGKLTF

SEQ ID NO: 4294 - protein, 13 aa, Homo sapiens
  CDR3 for beta chain variable domain of TCR clone 2147 (TRBV19, TRBJ1-2)
CASSVPGQDGYTF

SEQ ID NO: 4295 - protein, 11 aa, Homo sapiens
  CDR3 for alpha chain variable domain of TCR clone 2148 (TRAV12-1, TRAJ43)
CVEYDNNDMRF

SEQ ID NO: 4296 - protein, 17 aa, Homo sapiens
  CDR3 for beta chain variable domain of TCR clone 2148 (TRBV20-1, TRBJ2-1)
CSARDPLAGVWDNEQFF

SEQ ID NO: 4297 - protein, 13 aa, Homo sapiens
  CDR3 for alpha chain variable domain of TCR clone 2149 (TRAV12-2, TRAJ52)
CAAHGTSYGKLTF

SEQ ID NO: 4298 - protein, 15 aa, Homo sapiens
  CDR3 for beta chain variable domain of TCR clone 2149 (TRBV10-3, TRBJ2-7)
CAISTFSGVKGEQYF

SEQ ID NO: 4299 - protein, 17 aa, Homo sapiens
  CDR3 for alpha chain variable domain of TCR clone 2150 (TRAV21, TRAJ24)
CAGIRLRSTDSWGKLQF

SEQ ID NO: 4300 - protein, 15 aa, Homo sapiens
  CDR3 for beta chain variable domain of TCR clone 2150 (TRBV7-2, TRBJ2-3)
CASSPRGLSTDTQYF

SEQ ID NO: 4301 - protein, 11 aa, Homo sapiens
  CDR3 for alpha chain variable domain of TCR clone 2151 (TRAV12-3, TRAJ43)
CAMSVSNDMRF

SEQ ID NO: 4302 - protein, 14 aa, Homo sapiens
  CDR3 for beta chain variable domain of TCR clone 2151 (TRBV12-5, TRBJ2-5)
CASGSRTHQETQYF

SEQ ID NO: 4303 - protein, 15 aa, Homo sapiens
  CDR3 for alpha chain variable domain of TCR clone 2152 (TRAV26-2, TRAJ13)
CILRDLSGGYQKVTF

SEQ ID NO: 4304 - protein, 14 aa, Homo sapiens
  CDR3 for beta chain variable domain of TCR clone 2152 (TRBV4-1, TRBJ2-3)
CASSQEGSTDTQYF

SEQ ID NO: 4305 - protein, 10 aa, Homo sapiens
  CDR3 for alpha chain variable domain of TCR clone 2153 (TRAV23/DV6, TRAJ57)
CAASSTLSQG

SEQ ID NO: 4306 - protein, 14 aa, Homo sapiens
  CDR3 for beta chain variable domain of TCR clone 2153 (TRBV7-8, TRBJ2-5)
CASSATGGQETQYF

SEQ ID NO: 4307 - protein, 11 aa, Homo sapiens
  CDR3 for alpha chain variable domain of TCR clone 2154 (TRAV2, TRAJ13)
CASGGYQKVTF

SEQ ID NO: 4308 - protein, 18 aa, Homo sapiens
  CDR3 for beta chain variable domain of TCR clone 2154 (TRBV19, TRBJ2-6)
CASIGPTSGGSGANVLTF

SEQ ID NO: 4309 - protein, 15 aa, Homo sapiens
  CDR3 for alpha chain variable domain of TCR clone 2155 (TRAV13-2, TRAJ40)
CAENRSRQGTYKYIF

SEQ ID NO: 4310 - protein, 15 aa, Homo sapiens
  CDR3 for beta chain variable domain of TCR clone 2155 (TRBV19, TRBJ2-1)
CASSMGWNSNNEQFF

SEQ ID NO: 4311 - protein, 14 aa, Homo sapiens
  CDR3 for alpha chain variable domain of TCR clone 2156 (TRAV2, TRAJ3)
CAVRPYSSASKIIF

SEQ ID NO: 4312 - protein, 17 aa, Homo sapiens
  CDR3 for beta chain variable domain of TCR clone 2156 (TRBV7-6, TRBJ2-5)
CASSSPQAGDPSETQYF

SEQ ID NO: 4313 - protein, 14 aa, Homo sapiens
  CDR3 for alpha chain variable domain of TCR clone 2157 (TRAV17, TRAJ49)
CATDARDTGNQFYF

SEQ ID NO: 4314 - protein, 14 aa, Homo sapiens
  CDR3 for beta chain variable domain of TCR clone 2157 (TRBV5-5, TRBJ1-2)
CASSFGQINYGYTF

SEQ ID NO: 4315 - protein, 17 aa, Homo sapiens
  CDR3 for alpha chain variable domain of TCR clone 2158 (TRAV26-1, TRAJ28)
CIVRALYSGAGSYQLTF

SEQ ID NO: 4316 - protein, 12 aa, Homo sapiens
  CDR3 for beta chain variable domain of TCR clone 2158 (TRBV12-4, TRBJ2-1)
CASRQTENEQFF

SEQ ID NO: 4317 - protein, 14 aa, Homo sapiens
  CDR3 for alpha chain variable domain of TCR clone 2159 (TRAV26-1, TRAJ21)
CIVRVVYNFNKFYF

SEQ ID NO: 4318 - protein, 11 aa, Homo sapiens
  CDR3 for beta chain variable domain of TCR clone 2159 (TRBV5-6, TRBJ2-5)
CASSLERTQYF

SEQ ID NO: 4319 - protein, 15 aa, Homo sapiens
  CDR3 for alpha chain variable domain of TCR clone 2160 (TRAV26-2, TRAJ28)
CILVESGAGSYQLTF

SEQ ID NO: 4320 - protein, 11 aa, Homo sapiens
  CDR3 for beta chain variable domain of TCR clone 2160 (TRBV25-1, TRBJ2-7)
CASSTSYEQYF

SEQ ID NO: 4321 - protein, 14 aa, Homo sapiens
  CDR3 for alpha chain variable domain of TCR clone 2161 (TRAV17, TRAJ54)
CATDANQGAQKLVF

SEQ ID NO: 4322 - protein, 14 aa, Homo sapiens
  CDR3 for beta chain variable domain of TCR clone 2161 (TRBV25-1, TRBJ1-1)
CASTHLGGNTEAFF

SEQ ID NO: 4323 - protein, 11 aa, Homo sapiens
  CDR3 for alpha chain variable domain of TCR clone 2162 (TRAV12-3, TRAJ43)
CAMSVSNDMRF

SEQ ID NO: 4324 - protein, 15 aa, Homo sapiens
  CDR3 for beta chain variable domain of TCR clone 2162 (TRBV5-1, TRBJ2-1)
CASSPPRAPYNEQFF

SEQ ID NO: 4325 - protein, 13 aa, Homo sapiens
  CDR3 for alpha chain variable domain of TCR clone 2163 (TRAV17, TRAJ6)
CATGFGGSYIPTF

SEQ ID NO: 4326 - protein, 14 aa, Homo sapiens
  CDR3 for beta chain variable domain of TCR clone 2163 (TRBV5-1, TRBJ2-5)
CASSFGGSQETQYF

SEQ ID NO: 4327 - protein, 14 aa, Homo sapiens
  CDR3 for alpha chain variable domain of TCR clone 2164 (TRAV1-2, TRAJ16)
CAVNRFSDGQKLLF

SEQ ID NO: 4328 - protein, 16 aa, Homo sapiens
  CDR3 for beta chain variable domain of TCR clone 2164 (TRBV19, TRBJ2-3)
CASSPEWDRGTDTQYF

SEQ ID NO: 4329 - protein, 12 aa, Homo sapiens
  CDR3 for alpha chain variable domain of TCR clone 2165 (TRAV13-1, TRAJ21)
CAAKEGFNKFYF

SEQ ID NO: 4330 - protein, 17 aa, Homo sapiens
  CDR3 for beta chain variable domain of TCR clone 2165 (TRBV19, TRBJ2-7)
CASSISFYDSYPYEQYF

SEQ ID NO: 4331 - protein, 19 aa, Homo sapiens
  CDR3 for alpha chain variable domain of TCR clone 2166 (TRAV40, )
CLPIPDIQNPDPAVYQLRD

SEQ ID NO: 4332 - protein, 15 aa, Homo sapiens
  CDR3 for beta chain variable domain of TCR clone 2166 (TRBV2, TRBJ1-2)
CASSEIGGANYGYTF

SEQ ID NO: 4333 - protein, 18 aa, Homo sapiens
  CDR3 for alpha chain variable domain of TCR clone 2167 (TRAV17, TRAJ28)
CATDPPRGSGAGSYQLTF

SEQ ID NO: 4334 - protein, 14 aa, Homo sapiens
  CDR3 for beta chain variable domain of TCR clone 2167 (TRBV13, TRBJ2-5)
CASSLDYPQETQYF

SEQ ID NO: 4335 - protein, 14 aa, Homo sapiens
  CDR3 for alpha chain variable domain of TCR clone 2168 (TRAV12-2, TRAJ17)
CAVLFKAAGNKLTF

SEQ ID NO: 4336 - protein, 14 aa, Homo sapiens
  CDR3 for beta chain variable domain of TCR clone 2168 (TRBV15, TRBJ1-2)
CATSRDFDRVGYTF

SEQ ID NO: 4337 - protein, 14 aa, Homo sapiens
  CDR3 for alpha chain variable domain of TCR clone 2169 (TRAV1-2, TRAJ8)
CAVREDTGFQKLVF

SEQ ID NO: 4338 - protein, 15 aa, Homo sapiens
  CDR3 for beta chain variable domain of TCR clone 2169 (TRBV19, TRBJ2-1)
CASSTGTSSYNEQFF

SEQ ID NO: 4339 - protein, 14 aa, Homo sapiens
  CDR3 for alpha chain variable domain of TCR clone 2170 (TRAV1-2, TRAJ16)
CAVNRFSDGQKLLF

SEQ ID NO: 4340 - protein, 15 aa, Homo sapiens
  CDR3 for beta chain variable domain of TCR clone 2170 (TRBV27, TRBJ2-1)
CASSNGGGSSNEQFF

SEQ ID NO: 4341 - protein, 15 aa, Homo sapiens
  CDR3 for alpha chain variable domain of TCR clone 2171 (TRAV3, TRAJ3)
CAVRDMSSSASKIIF

SEQ ID NO: 4342 - protein, 14 aa, Homo sapiens
  CDR3 for beta chain variable domain of TCR clone 2171 (TRBV6-6, TRBJ2-7)
CASSIAGGVDEQYF

SEQ ID NO: 4343 - protein, 11 aa, Homo sapiens
  CDR3 for alpha chain variable domain of TCR clone 2172 (TRAV13-2, TRAJ54)
RAVQGAQKLVF

SEQ ID NO: 4344 - protein, 15 aa, Homo sapiens
  CDR3 for beta chain variable domain of TCR clone 2172 (TRBV20-1, TRBJ2-7)
CSAESGTSGAYEQYF

SEQ ID NO: 4345 - protein, 11 aa, Homo sapiens
  CDR3 for alpha chain variable domain of TCR clone 2173 (TRAV12-3, TRAJ20)
CAMSYDYKLSF

SEQ ID NO: 4346 - protein, 14 aa, Homo sapiens
  CDR3 for beta chain variable domain of TCR clone 2173 (TRBV7-2, TRBJ2-7)
CASSPKTSFYEQYF

SEQ ID NO: 4347 - protein, 14 aa, Homo sapiens
  CDR3 for alpha chain variable domain of TCR clone 2174 (TRAV3, TRAJ34)
CAVRDINNTDKLIF

SEQ ID NO: 4348 - protein, 14 aa, Homo sapiens
  CDR3 for beta chain variable domain of TCR clone 2174 (TRBV7-2, TRBJ2-2)
CASSLGQNTGELFF

SEQ ID NO: 4349 - protein, 14 aa, Homo sapiens
  CDR3 for alpha chain variable domain of TCR clone 2175 (TRAV21, TRAJ23)
CAIMIYNQGGKLIF

SEQ ID NO: 4350 - protein, 18 aa, Homo sapiens
  CDR3 for beta chain variable domain of TCR clone 2175 (TRBV20-1, TRBJ2-6)
CSAETTPTHGSGANVLTF

SEQ ID NO: 4351 - protein, 15 aa, Homo sapiens
  CDR3 for alpha chain variable domain of TCR clone 2176 (TRAV12-1, TRAJ41)
CVVNSRTGSGYALNF

SEQ ID NO: 4352 - protein, 11 aa, Homo sapiens
  CDR3 for beta chain variable domain of TCR clone 2176 (TRBV6-4, TRBJ2-1)
CASSDSYAQFF

SEQ ID NO: 4353 - protein, 15 aa, Homo sapiens
  CDR3 for alpha chain variable domain of TCR clone 2177 (TRAV2, TRAJ32)
CAVANYGGATNKLIF

SEQ ID NO: 4354 - protein, 15 aa, Homo sapiens
  CDR3 for beta chain variable domain of TCR clone 2177 (TRBV7-7, TRBJ2-5)
CASSQLERAEETQYF

SEQ ID NO: 4355 - protein, 13 aa, Homo sapiens
  CDR3 for alpha chain variable domain of TCR clone 2178 (TRAV8-3, TRAJ42)
CARYGGSQGNLIF

SEQ ID NO: 4356 - protein, 14 aa, Homo sapiens
  CDR3 for beta chain variable domain of TCR clone 2178 (TRBV20-1, TRBJ2-1)
CSALDRGTYNEQFF

SEQ ID NO: 4357 - protein, 11 aa, Homo sapiens
  CDR3 for alpha chain variable domain of TCR clone 2179 (TRAV21, TRAJ7)
CAAYGNNRLAF

SEQ ID NO: 4358 - protein, 14 aa, Homo sapiens
  CDR3 for beta chain variable domain of TCR clone 2179 (TRBV4-1, TRBJ2-7)
CASSRTGVAFEQYF

SEQ ID NO: 4359 - protein, 16 aa, Homo sapiens
  CDR3 for alpha chain variable domain of TCR clone 2180 (TRAV3, TRAJ10)
CAVRDMRAGGGNKLTF

SEQ ID NO: 4360 - protein, 15 aa, Homo sapiens
  CDR3 for beta chain variable domain of TCR clone 2180 (TRBV9, TRBJ1-6)
CASSVAGTGDSPLHF

SEQ ID NO: 4361 - protein, 14 aa, Homo sapiens
  CDR3 for alpha chain variable domain of TCR clone 2181 (TRAV1-2, TRAJ8)
CAVREDTGFQKLVF

SEQ ID NO: 4362 - protein, 14 aa, Homo sapiens
  CDR3 for beta chain variable domain of TCR clone 2181 (TRBV5-4, TRBJ1-1)
CASSLDSRRDEAFF

SEQ ID NO: 4363 - protein, 14 aa, Homo sapiens
  CDR3 for alpha chain variable domain of TCR clone 2182 (TRAV13-1, TRAJ24)
CAASRTDSWGKLQF

SEQ ID NO: 4364 - protein, 15 aa, Homo sapiens
  CDR3 for beta chain variable domain of TCR clone 2182 (TRBV7-9, TRBJ1-5)
CASSQGHQPNQPQHF

SEQ ID NO: 4365 - protein, 13 aa, Homo sapiens
  CDR3 for alpha chain variable domain of TCR clone 2183 (TRAV1-2, TRAJ9)
CAALNTGGFKTIF

SEQ ID NO: 4366 - protein, 13 aa, Homo sapiens
  CDR3 for beta chain variable domain of TCR clone 2183 (TRBV19, TRBJ1-2)
CASSVPGQDGYAF

SEQ ID NO: 4367 - protein, 12 aa, Homo sapiens
  CDR3 for alpha chain variable domain of TCR clone 2184 (TRAV13-2, TRAJ23)
CAERHRGGKLIF

SEQ ID NO: 4368 - protein, 15 aa, Homo sapiens
  CDR3 for beta chain variable domain of TCR clone 2184 (TRBV9, TRBJ1-6)
CASSVAGTGDSPLHF

SEQ ID NO: 4369 - protein, 16 aa, Homo sapiens
  CDR3 for alpha chain variable domain of TCR clone 2185 (TRAV30, TRAJ24)
CGTEIVDADSWGKFKF

SEQ ID NO: 4370 - protein, 14 aa, Homo sapiens
  CDR3 for beta chain variable domain of TCR clone 2185 (TRBV12-5, TRBJ2-5)
CASGSRTHQETQYF

SEQ ID NO: 4371 - protein, 13 aa, Homo sapiens
  CDR3 for alpha chain variable domain of TCR clone 2186 (TRAV8-1, TRAJ39)
CAGLNNAGNMLTF

SEQ ID NO: 4372 - protein, 17 aa, Homo sapiens
  CDR3 for beta chain variable domain of TCR clone 2186 (TRBV19, TRBJ2-3)
CASSIDPAGGGTDTQYF

SEQ ID NO: 4373 - protein, 12 aa, Homo sapiens
  CDR3 for alpha chain variable domain of TCR clone 2187 (TRAV12-2, TRAJ7)
CAVMRGNNRLAF

SEQ ID NO: 4374 - protein, 17 aa, Homo sapiens
  CDR3 for beta chain variable domain of TCR clone 2187 (TRBV7-9, TRBJ2-3)
CASSPTVAGDLTDTQYF

SEQ ID NO: 4375 - protein, 12 aa, Homo sapiens
  CDR3 for alpha chain variable domain of TCR clone 2188 (TRAV13-1, TRAJ49)
CAASPMGNQFYF

SEQ ID NO: 4376 - protein, 17 aa, Homo sapiens
  CDR3 for beta chain variable domain of TCR clone 2188 (TRBV11-2, TRBJ2-1)
CASSLYPPGVEYNEQFF

SEQ ID NO: 4377 - protein, 14 aa, Homo sapiens
  CDR3 for alpha chain variable domain of TCR clone 2189 (TRAV1-2, TRAJ16)
CAVNRFSDGQKLLF

SEQ ID NO: 4378 - protein, 14 aa, Homo sapiens
  CDR3 for beta chain variable domain of TCR clone 2189 (TRBV12-5, TRBJ2-5)
CASGSRTHQETQYF

SEQ ID NO: 4379 - protein, 13 aa, Homo sapiens
  CDR3 for alpha chain variable domain of TCR clone 2190 (TRAV4, TRAJ22)
CLGGSGSARQLTF

SEQ ID NO: 4380 - protein, 15 aa, Homo sapiens
  CDR3 for beta chain variable domain of TCR clone 2190 (TRBV7-9, TRBJ1-6)
CASSSPGRGNSPLHF

SEQ ID NO: 4381 - protein, 16 aa, Homo sapiens
  CDR3 for alpha chain variable domain of TCR clone 2191 (TRAV27, TRAJ48)
TAAQPGDTGLYLPLTF

SEQ ID NO: 4382 - protein, 13 aa, Homo sapiens
  CDR3 for beta chain variable domain of TCR clone 2191 (TRBV7-2, TRBJ2-5)
CASSQTSVETQYF

SEQ ID NO: 4383 - protein, 14 aa, Homo sapiens
  CDR3 for alpha chain variable domain of TCR clone 2192 (TRAV12-3, TRAJ47)
CAMSVREYGNKLVF

SEQ ID NO: 4384 - protein, 15 aa, Homo sapiens
  CDR3 for beta chain variable domain of TCR clone 2192 (TRBV20-1, TRBJ2-2)
CSARDTRLNTGELFF

SEQ ID NO: 4385 - protein, 12 aa, Homo sapiens
  CDR3 for alpha chain variable domain of TCR clone 2193 (TRAV12-3, TRAJ20)
CAMVRGDYKLSF

SEQ ID NO: 4386 - protein, 16 aa, Homo sapiens
  CDR3 for beta chain variable domain of TCR clone 2193 (TRBV5-1, TRBJ2-3)
CASSLGLAVYTDTQYF

SEQ ID NO: 4387 - protein, 14 aa, Homo sapiens
  CDR3 for alpha chain variable domain of TCR clone 2194 (TRAV12-2, TRAJ52)
CAVPGGTSYGKLTF

SEQ ID NO: 4388 - protein, 12 aa, Homo sapiens
  CDR3 for beta chain variable domain of TCR clone 2194 (TRBV18, TRBJ2-1)
CASSPGTSEGFF

SEQ ID NO: 4389 - protein, 13 aa, Homo sapiens
  CDR3 for alpha chain variable domain of TCR clone 2195 (TRAV30, TRAJ6)
CGTEAGGSYIPTF

SEQ ID NO: 4390 - protein, 16 aa, Homo sapiens
  CDR3 for beta chain variable domain of TCR clone 2195 (TRBV4-3, TRBJ2-3)
CASSLGLAGEGDTQYF

SEQ ID NO: 4391 - protein, 13 aa, Homo sapiens
  CDR3 for alpha chain variable domain of TCR clone 2196 (TRAV21, TRAJ49)
CAVRQSTGNQFYF

SEQ ID NO: 4392 - protein, 13 aa, Homo sapiens
  CDR3 for beta chain variable domain of TCR clone 2196 (TRBV6-6, TRBJ1-5)
CASRAYQDQPQHF

SEQ ID NO: 4393 - protein, 12 aa, Homo sapiens
  CDR3 for alpha chain variable domain of TCR clone 2197 (TRAV12-3, TRAJ31)
CAMSVPNARLMF

SEQ ID NO: 4394 - protein, 12 aa, Homo sapiens
  CDR3 for beta chain variable domain of TCR clone 2197 (TRBV11-2, TRBJ2-1)
CASSVQREGQFF

SEQ ID NO: 4395 - protein, 14 aa, Homo sapiens
  CDR3 for alpha chain variable domain of TCR clone 2198 (TRAV38-2/DV8, TRAJ54)
AAMYQIQGAQKLVF

SEQ ID NO: 4396 - protein, 17 aa, Homo sapiens
  CDR3 for beta chain variable domain of TCR clone 2198 (TRBV6-1, TRBJ2-3)
CASSEALRLISTDTQYF

SEQ ID NO: 4397 - protein, 14 aa, Homo sapiens
  CDR3 for alpha chain variable domain of TCR clone 2199 (TRAV1-2, TRAJ8)
CAVREDTGFQKLVF

SEQ ID NO: 4398 - protein, 15 aa, Homo sapiens
  CDR3 for beta chain variable domain of TCR clone 2199 (TRBV28, TRBJ2-4)
CAAGSGTLLMGIQYF

SEQ ID NO: 4399 - protein, 14 aa, Homo sapiens
  CDR3 for alpha chain variable domain of TCR clone 2200 (TRAV12-2, TRAJ13)
CAVKKTGGYQKVTF

SEQ ID NO: 4400 - protein, 15 aa, Homo sapiens
  CDR3 for beta chain variable domain of TCR clone 2200 (TRBV6-3, TRBJ2-7)
CASSSPGTVFYEQYF

SEQ ID NO: 4401 - protein, 13 aa, Homo sapiens
  CDR3 for alpha chain variable domain of TCR clone 2201 (TRAV12-2, TRAJ20)
CAVNRFDDYKLSF

SEQ ID NO: 4402 - protein, 12 aa, Homo sapiens
  CDR3 for beta chain variable domain of TCR clone 2201 (TRBV19, TRBJ2-1)
CASSQISNEQFF

SEQ ID NO: 4403 - protein, 20 aa, Homo sapiens
  CDR3 for alpha chain variable domain of TCR clone 2202 (TRAV8-3, TRAJ45)
LSTSVLWGSYSGGGADGLTF

SEQ ID NO: 4404 - protein, 11 aa, Homo sapiens
  CDR3 for beta chain variable domain of TCR clone 2202 (TRBV20-1, TRBJ2-5)
CSADRAETQYF

SEQ ID NO: 4405 - protein, 19 aa, Homo sapiens
  CDR3 for alpha chain variable domain of TCR clone 2203 (TRAV21, TRAJ20)
SLVTQPPTSVLPNDYKLSF

SEQ ID NO: 4406 - protein, 14 aa, Homo sapiens
  CDR3 for beta chain variable domain of TCR clone 2203 (TRBV7-2, TRBJ1-3)
CASSRLRSGNTIYF

SEQ ID NO: 4407 - protein, 12 aa, Homo sapiens
  CDR3 for alpha chain variable domain of TCR clone 2204 (TRAV13-1, TRAJ21)
CAAKEGFNKFYF

SEQ ID NO: 4408 - protein, 13 aa, Homo sapiens
  CDR3 for beta chain variable domain of TCR clone 2204 (TRBV19, TRBJ1-2)
CASSVPGQDGYTF

SEQ ID NO: 4409 - protein, 15 aa, Homo sapiens
  CDR3 for alpha chain variable domain of TCR clone 2205 (TRAV23/DV6, TRAJ18)
CAASFRGSTLGRLYF

SEQ ID NO: 4410 - protein, 13 aa, Homo sapiens
  CDR3 for beta chain variable domain of TCR clone 2205 (TRBV28, TRBJ2-7)
CAILDRAGGEQYF

SEQ ID NO: 4411 - protein, 13 aa, Homo sapiens
  CDR3 for alpha chain variable domain of TCR clone 2206 (TRAV23/DV6, TRAJ22)
CAPYSGSARQLTF

SEQ ID NO: 4412 - protein, 13 aa, Homo sapiens
  CDR3 for beta chain variable domain of TCR clone 2206 (TRBV6-1, TRBJ1-1)
CASSRQGNTEAFF

SEQ ID NO: 4413 - protein, 13 aa, Homo sapiens
  CDR3 for alpha chain variable domain of TCR clone 2207 (TRAV23/DV6, TRAJ22)
CAPWGGSARQLTF

SEQ ID NO: 4414 - protein, 14 aa, Homo sapiens
  CDR3 for beta chain variable domain of TCR clone 2207 (TRBV18, TRBJ2-7)
CASSPTSGGYEQYF

SEQ ID NO: 4415 - protein, 13 aa, Homo sapiens
  CDR3 for alpha chain variable domain of TCR clone 2208 (TRAV2, TRAJ40)
CAVVTSGTYKYIF

SEQ ID NO: 4416 - protein, 14 aa, Homo sapiens
  CDR3 for beta chain variable domain of TCR clone 2208 (TRBV19, TRBJ2-1)
CASPTVVLSGEQFF

SEQ ID NO: 4417 - protein, 16 aa, Homo sapiens
  CDR3 for alpha chain variable domain of TCR clone 2209 (TRAV30, TRAJ24)
CGTEVVDADSWGKFQF

SEQ ID NO: 4418 - protein, 14 aa, Homo sapiens
  CDR3 for beta chain variable domain of TCR clone 2209 (TRBV12-5, TRBJ2-5)
CASGSRTHQETQYF

SEQ ID NO: 4419 - protein, 15 aa, Homo sapiens
  CDR3 for alpha chain variable domain of TCR clone 2210 (TRAV3, TRAJ4)
CAQNMFSGGYNKLIF

SEQ ID NO: 4420 - protein, 16 aa, Homo sapiens
  CDR3 for beta chain variable domain of TCR clone 2210 (TRBV3-1, TRBJ1-6)
CASSQEFQGSYSPLHF

SEQ ID NO: 4421 - protein, 14 aa, Homo sapiens
  CDR3 for alpha chain variable domain of TCR clone 2211 (TRAV12-2, TRAJ45)
CAVNIGGGADGLTF

SEQ ID NO: 4422 - protein, 17 aa, Homo sapiens
  CDR3 for beta chain variable domain of TCR clone 2211 (TRBV7-8, TRBJ2-6)
CASSAGTGGAGANVLTF

SEQ ID NO: 4423 - protein, 17 aa, Homo sapiens
  CDR3 for alpha chain variable domain of TCR clone 2212 (TRAV3, TRAJ6)
CAVRDGPRAGGSYIPTL

SEQ ID NO: 4424 - protein, 14 aa, Homo sapiens
  CDR3 for beta chain variable domain of TCR clone 2212 (TRBV7-2, TRBJ2-7)
CASSPKTSFYEQYF

SEQ ID NO: 4425 - protein, 12 aa, Homo sapiens
  CDR3 for alpha chain variable domain of TCR clone 2213 (TRAV12-3, TRAJ17)
CAMTLTGNKLTF

SEQ ID NO: 4426 - protein, 15 aa, Homo sapiens
  CDR3 for beta chain variable domain of TCR clone 2213 (TRBV6-6, TRBJ2-5)
CASSPGGGLEETQYF

SEQ ID NO: 4427 - protein, 15 aa, Homo sapiens
  CDR3 for alpha chain variable domain of TCR clone 2214 (TRAV8-4, TRAJ40)
CAVSSITSGTYKYIF

SEQ ID NO: 4428 - protein, 13 aa, Homo sapiens
  CDR3 for beta chain variable domain of TCR clone 2214 (TRBV2, TRBJ2-1)
CATSRGTDNEQFF

SEQ ID NO: 4429 - protein, 11 aa, Homo sapiens
  CDR3 for alpha chain variable domain of TCR clone 2215 (TRAV25, TRAJ49)
CAGGTGNQFYF

SEQ ID NO: 4430 - protein, 12 aa, Homo sapiens
  CDR3 for beta chain variable domain of TCR clone 2215 (TRBV6-5, TRBJ2-1)
CASRNDRGQQFF

SEQ ID NO: 4431 - protein, 13 aa, Homo sapiens
  CDR3 for alpha chain variable domain of TCR clone 2216 (TRAV26-1, TRAJ30)
CIVRVESNDKIIF

SEQ ID NO: 4432 - protein, 15 aa, Homo sapiens
  CDR3 for beta chain variable domain of TCR clone 2216 (TRBV6-1, TRBJ2-3)
CASSERGGITDTQYF

SEQ ID NO: 4433 - protein, 14 aa, Homo sapiens
  CDR3 for alpha chain variable domain of TCR clone 2217 (TRAV1-2, TRAJ8)
CAVREDTGFQKLVF

SEQ ID NO: 4434 - protein, 14 aa, Homo sapiens
  CDR3 for beta chain variable domain of TCR clone 2217 (TRBV12-5, TRBJ2-5)
CASGSRTHQETQYF

SEQ ID NO: 4435 - protein, 14 aa, Homo sapiens
  CDR3 for alpha chain variable domain of TCR clone 2218 (TRAV2, TRAJ9)
CAVEDRSGGFKTIF

SEQ ID NO: 4436 - protein, 14 aa, Homo sapiens
  CDR3 for beta chain variable domain of TCR clone 2218 (TRBV7-3, TRBJ2-1)
CASSLAGGTNEQFF

SEQ ID NO: 4437 - protein, 15 aa, Homo sapiens
  CDR3 for alpha chain variable domain of TCR clone 2219 (TRAV8-4, TRAJ12)
CAVSDRVDSSYKLIF

SEQ ID NO: 4438 - protein, 15 aa, Homo sapiens
  CDR3 for beta chain variable domain of TCR clone 2219 (TRBV11-3, TRBJ2-1)
CASSLAGQTYNEQFF

SEQ ID NO: 4439 - protein, 17 aa, Homo sapiens
  CDR3 for alpha chain variable domain of TCR clone 2220 (TRAV26-1, TRAJ11)
CIVRVGQSNSGYSTLTF

SEQ ID NO: 4440 - protein, 15 aa, Homo sapiens
  CDR3 for beta chain variable domain of TCR clone 2220 (TRBV27, TRBJ2-5)
CASSLIPSGGETQYF

SEQ ID NO: 4441 - protein, 12 aa, Homo sapiens
  CDR3 for alpha chain variable domain of TCR clone 2221 (TRAV29/DV5, TRAJ43)
CAAPYNNNDMRF

SEQ ID NO: 4442 - protein, 17 aa, Homo sapiens
  CDR3 for beta chain variable domain of TCR clone 2221 (TRBV19, TRBJ2-6)
CASSTGQVFSGANVLTF

SEQ ID NO: 4443 - protein, 16 aa, Homo sapiens
  CDR3 for alpha chain variable domain of TCR clone 2222 (TRAV2, TRAJ10)
CCGGSTVTGGGNKLTF

SEQ ID NO: 4444 - protein, 16 aa, Homo sapiens
  CDR3 for beta chain variable domain of TCR clone 2222 (TRBV18, TRBJ1-5)
CASSPSTGNSNQPQHF

SEQ ID NO: 4445 - protein, 16 aa, Homo sapiens
  CDR3 for alpha chain variable domain of TCR clone 2223 (TRAV13-1, TRAJ48)
CSKYRESNFGNEKLTF

SEQ ID NO: 4446 - protein, 17 aa, Homo sapiens
  CDR3 for beta chain variable domain of TCR clone 2223 (TRBV28, TRBJ2-1)
CASSSARQALTYNEQFF

SEQ ID NO: 4447 - protein, 14 aa, Homo sapiens
  CDR3 for alpha chain variable domain of TCR clone 2224 (TRAV1-2, TRAJ8)
CAVREDTGFQKLVF

SEQ ID NO: 4448 - protein, 17 aa, Homo sapiens
  CDR3 for beta chain variable domain of TCR clone 2224 (TRBV20-1, TRBJ2-2)
CSASGSGQGGLTGELFF

SEQ ID NO: 4449 - protein, 14 aa, Homo sapiens
  CDR3 for alpha chain variable domain of TCR clone 2225 (TRAV12-2, TRAJ40)
CAVKIPSGTYKYIF

SEQ ID NO: 4450 - protein, 15 aa, Homo sapiens
  CDR3 for beta chain variable domain of TCR clone 2225 (TRBV2, TRBJ2-7)
CASSEGLARSYEQYF

SEQ ID NO: 4451 - protein, 12 aa, Homo sapiens
  CDR3 for alpha chain variable domain of TCR clone 2226 (TRAV12-1, TRAJ29)
CVADSGNTPLVF

SEQ ID NO: 4452 - protein, 12 aa, Homo sapiens
  CDR3 for beta chain variable domain of TCR clone 2226 (TRBV2, TRBJ2-7)
CASKRGSYEQYF

SEQ ID NO: 4453 - protein, 13 aa, Homo sapiens
  CDR3 for alpha chain variable domain of TCR clone 2227 (TRAV3, TRAJ8)
CAVRFTGFQKLVF

SEQ ID NO: 4454 - protein, 12 aa, Homo sapiens
  CDR3 for beta chain variable domain of TCR clone 2227 (TRBV2, TRBJ1-2)
CASSGQTYGYTF

SEQ ID NO: 4455 - protein, 15 aa, Homo sapiens
  CDR3 for alpha chain variable domain of TCR clone 2228 (TRAV17, TRAJ54)
CATEKLGQGAQKLVF

SEQ ID NO: 4456 - protein, 14 aa, Homo sapiens
  CDR3 for beta chain variable domain of TCR clone 2228 (TRBV7-3, TRBJ1-1)
CQQLRGQMNTEAFF

SEQ ID NO: 4457 - protein, 14 aa, Homo sapiens
  CDR3 for alpha chain variable domain of TCR clone 2229 (TRAV9-2, TRAJ39)
CALYIYNAGNMLTF

SEQ ID NO: 4458 - protein, 14 aa, Homo sapiens
  CDR3 for beta chain variable domain of TCR clone 2229 (TRBV12-5, TRBJ2-5)
CASGSRTHQETQYF

SEQ ID NO: 4459 - protein, 13 aa, Homo sapiens
  CDR3 for alpha chain variable domain of TCR clone 2230 (TRAV21, TRAJ47)
CAVSGLYGNKLVF

SEQ ID NO: 4460 - protein, 17 aa, Homo sapiens
  CDR3 for beta chain variable domain of TCR clone 2230 (TRBV15, TRBJ2-3)
CATSGTTSEEGTDTQYF

SEQ ID NO: 4461 - protein, 13 aa, Homo sapiens
  CDR3 for alpha chain variable domain of TCR clone 2231 (TRAV38-2/DV8, TRAJ34)
CAYRTWNTDKLIF

SEQ ID NO: 4462 - protein, 18 aa, Homo sapiens
  CDR3 for beta chain variable domain of TCR clone 2231 (TRBV6-6, TRBJ1-3)
CASSYSKWDSISGNTIYF

SEQ ID NO: 4463 - protein, 12 aa, Homo sapiens
  CDR3 for alpha chain variable domain of TCR clone 2232 (TRAV2, TRAJ37)
CAVTMNTGKLIF

SEQ ID NO: 4464 - protein, 15 aa, Homo sapiens
  CDR3 for beta chain variable domain of TCR clone 2232 (TRBV5-1, TRBJ2-5)
CASSFGGPPQETQYF

SEQ ID NO: 4465 - protein, 10 aa, Homo sapiens
  CDR3 for alpha chain variable domain of TCR clone 2233 (TRAV25, TRAJ17)
CQAAGNKLTF

SEQ ID NO: 4466 - protein, 13 aa, Homo sapiens
  CDR3 for beta chain variable domain of TCR clone 2233 (TRBV6-5, TRBJ2-2)
CASSLPGVGELFF

SEQ ID NO: 4467 - protein, 14 aa, Homo sapiens
  CDR3 for alpha chain variable domain of TCR clone 2234 (TRAV1-2, TRAJ16)
CAVNRFSDGQKLLF

SEQ ID NO: 4468 - protein, 14 aa, Homo sapiens
  CDR3 for beta chain variable domain of TCR clone 2234 (TRBV7-3, TRBJ2-1)
CASSLAGGTNEQFF

SEQ ID NO: 4469 - protein, 18 aa, Homo sapiens
  CDR3 for alpha chain variable domain of TCR clone 2235 (TRAV38-2/DV8, TRAJ42)
CAYRSADLTGGSQGNLIF

SEQ ID NO: 4470 - protein, 12 aa, Homo sapiens
  CDR3 for beta chain variable domain of TCR clone 2235 (TRBV11-2, TRBJ2-2)
CASSLGGGELFF

SEQ ID NO: 4471 - protein, 14 aa, Homo sapiens
  CDR3 for alpha chain variable domain of TCR clone 2236 (TRAV13-2, TRAJ29)
CAENIEPGNTPLVF

SEQ ID NO: 4472 - protein, 14 aa, Homo sapiens
  CDR3 for beta chain variable domain of TCR clone 2236 (TRBV19, TRBJ2-2)
CATTGHANTGELFF

SEQ ID NO: 4473 - protein, 15 aa, Homo sapiens
  CDR3 for alpha chain variable domain of TCR clone 2237 (TRAV12-1, TRAJ44)
CVADLPTGTASKLTF

SEQ ID NO: 4474 - protein, 13 aa, Homo sapiens
  CDR3 for beta chain variable domain of TCR clone 2237 (TRBV20-1, TRBJ2-5)
CSARGDYQETQYF

SEQ ID NO: 4475 - protein, 11 aa, Homo sapiens
  CDR3 for alpha chain variable domain of TCR clone 2238 (TRAV35, TRAJ30)
CAPGGDDKIIF

SEQ ID NO: 4476 - protein, 13 aa, Homo sapiens
  CDR3 for beta chain variable domain of TCR clone 2238 (TRBV7-6, TRBJ2-1)
CQQLGGGADEQFF

SEQ ID NO: 4477 - protein, 11 aa, Homo sapiens
  CDR3 for alpha chain variable domain of TCR clone 2239 (TRAV13-2, TRAJ20)
CADSNDYKLSF

SEQ ID NO: 4478 - protein, 12 aa, Homo sapiens
  CDR3 for beta chain variable domain of TCR clone 2239 (TRBV11-2, TRBJ2-2)
CASSLGGGELFF

SEQ ID NO: 4479 - protein, 15 aa, Homo sapiens
  CDR3 for alpha chain variable domain of TCR clone 2240 (TRAV13-1, TRAJ45)
CAASGSGGGADGLTF

SEQ ID NO: 4480 - protein, 12 aa, Homo sapiens
  CDR3 for beta chain variable domain of TCR clone 2240 (TRBV11-2, TRBJ2-2)
CASSLGGGELFF

SEQ ID NO: 4481 - protein, 11 aa, Homo sapiens
  CDR3 for alpha chain variable domain of TCR clone 2241 (TRAV17, TRAJ9)
CGFTGGFKTIF

SEQ ID NO: 4482 - protein, 12 aa, Homo sapiens
  CDR3 for beta chain variable domain of TCR clone 2241 (TRBV29-1, TRBJ2-3)
CSVTGGADTQYF

SEQ ID NO: 4483 - protein, 13 aa, Homo sapiens
  CDR3 for alpha chain variable domain of TCR clone 2242 (TRAV2, TRAJ40)
CAVVTSGTYKYIF

SEQ ID NO: 4484 - protein, 15 aa, Homo sapiens
  CDR3 for beta chain variable domain of TCR clone 2242 (TRBV28, TRBJ2-1)
CASSGLAEVDNEQFF

SEQ ID NO: 4485 - protein, 14 aa, Homo sapiens
  CDR3 for alpha chain variable domain of TCR clone 2243 (TRAV2, TRAJ20)
CAVEDGTNDYKLSF

SEQ ID NO: 4486 - protein, 13 aa, Homo sapiens
  CDR3 for beta chain variable domain of TCR clone 2243 (TRBV7-2, TRBJ1-1)
CASSRNTNTEAFF

SEQ ID NO: 4487 - protein, 16 aa, Homo sapiens
  CDR3 for alpha chain variable domain of TCR clone 2244 (TRAV26-1, TRAJ45)
CIVEKYSGGGADGLTF

SEQ ID NO: 4488 - protein, 15 aa, Homo sapiens
  CDR3 for beta chain variable domain of TCR clone 2244 (TRBV15, TRBJ2-7)
CHQQRPIQQAYEQYF

SEQ ID NO: 4489 - protein, 12 aa, Homo sapiens
  CDR3 for alpha chain variable domain of TCR clone 2245 (TRAV8-4, TRAJ43)
CAVSVNNNDMRF

SEQ ID NO: 4490 - protein, 13 aa, Homo sapiens
  CDR3 for beta chain variable domain of TCR clone 2245 (TRBV7-9, TRBJ1-2)
CASSLKQNYGYTF

SEQ ID NO: 4491 - protein, 12 aa, Homo sapiens
  CDR3 for alpha chain variable domain of TCR clone 2246 (TRAV13-1, TRAJ40)
CAASWATYKYIF

SEQ ID NO: 4492 - protein, 15 aa, Homo sapiens
  CDR3 for beta chain variable domain of TCR clone 2246 (TRBV7-8, TRBJ2-1)
CASSSRLAAYNEQFF

SEQ ID NO: 4493 - protein, 13 aa, Homo sapiens
  CDR3 for alpha chain variable domain of TCR clone 2247 (TRAV26-1, TRAJ34)
CIVRPWITDKLIF

SEQ ID NO: 4494 - protein, 14 aa, Homo sapiens
  CDR3 for beta chain variable domain of TCR clone 2247 (TRBV12-4, TRBJ1-4)
CASSRQGANEKLFF

SEQ ID NO: 4495 - protein, 13 aa, Homo sapiens
  CDR3 for alpha chain variable domain of TCR clone 2248 (TRAV12-1, TRAJ43)
CVVSHHNNNDMRF

SEQ ID NO: 4496 - protein, 14 aa, Homo sapiens
  CDR3 for beta chain variable domain of TCR clone 2248 (TRBV5-5, TRBJ2-2)
CASSLLGDTGELFF

SEQ ID NO: 4497 - protein, 12 aa, Homo sapiens
  CDR3 for alpha chain variable domain of TCR clone 2249 (TRAV13-1, TRAJ53)
AASGGSNYKLTF

SEQ ID NO: 4498 - protein, 16 aa, Homo sapiens
  CDR3 for beta chain variable domain of TCR clone 2249 (TRBV28, TRBJ2-6)
CASSNRRGSGANVLTF

SEQ ID NO: 4499 - protein, 14 aa, Homo sapiens
  CDR3 for alpha chain variable domain of TCR clone 2250 (TRAV12-2, TRAJ40)
CAVKIPSGTYKYIF

SEQ ID NO: 4500 - protein, 15 aa, Homo sapiens
  CDR3 for beta chain variable domain of TCR clone 2250 (TRBV20-1, TRBJ1-4)
CSARREWGVNEKLFF

SEQ ID NO: 4501 - protein, 12 aa, Homo sapiens
  CDR3 for alpha chain variable domain of TCR clone 2251 (TRAV12-3, TRAJ17)
CAMTLTGNKLTF

SEQ ID NO: 4502 - protein, 11 aa, Homo sapiens
  CDR3 for beta chain variable domain of TCR clone 2251 (TRBV29-1, TRBJ2-5)
CSEDRTGTQYF

SEQ ID NO: 4503 - protein, 15 aa, Homo sapiens
  CDR3 for alpha chain variable domain of TCR clone 2252 (TRAV8-1, TRAJ6)
CAVNTPPGGSYIPTF

SEQ ID NO: 4504 - protein, 15 aa, Homo sapiens
  CDR3 for beta chain variable domain of TCR clone 2252 (TRBV11-2, TRBJ2-2)
CASSSDRVNAGELFF

SEQ ID NO: 4505 - protein, 16 aa, Homo sapiens
  CDR3 for alpha chain variable domain of TCR clone 2253 (TRAV8-4, TRAJ5)
CAVSPLTDTGRRALTF

SEQ ID NO: 4506 - protein, 14 aa, Homo sapiens
  CDR3 for beta chain variable domain of TCR clone 2253 (TRBV19, TRBJ1-6)
CASSTDGWNSPLHF

SEQ ID NO: 4507 - protein, 15 aa, Homo sapiens
  CDR3 for alpha chain variable domain of TCR clone 2254 (TRAV21, TRAJ53)
CATLNSGGSNYKLTF

SEQ ID NO: 4508 - protein, 15 aa, Homo sapiens
  CDR3 for beta chain variable domain of TCR clone 2254 (TRBV27, TRBJ2-1)
CASSNGGGSSNEQFF

SEQ ID NO: 4509 - protein, 14 aa, Homo sapiens
  CDR3 for alpha chain variable domain of TCR clone 2255 (TRAV12-1, TRAJ17)
CVVNPKAAGNKLTF

SEQ ID NO: 4510 - protein, 16 aa, Homo sapiens
  CDR3 for beta chain variable domain of TCR clone 2255 (TRBV20-1, TRBJ2-1)
CSASASGYSSYNEQFF

SEQ ID NO: 4511 - protein, 14 aa, Homo sapiens
  CDR3 for alpha chain variable domain of TCR clone 2256 (TRAV6, TRAJ6)
CALPTSGGSYIPTF

SEQ ID NO: 4512 - protein, 17 aa, Homo sapiens
  CDR3 for beta chain variable domain of TCR clone 2256 (TRBV5-1, TRBJ2-5)
CASSPVALGQNQETQYF

SEQ ID NO: 4513 - protein, 15 aa, Homo sapiens
  CDR3 for alpha chain variable domain of TCR clone 2257 (TRAV26-1, TRAJ28)
CIVRVAGAGSYQLTF

SEQ ID NO: 4514 - protein, 19 aa, Homo sapiens
  CDR3 for beta chain variable domain of TCR clone 2257 (TRBV7-3, TRBJ2-7)
CASSLTGVAGGWPSYEQYF

SEQ ID NO: 4515 - protein, 14 aa, Homo sapiens
  CDR3 for alpha chain variable domain of TCR clone 2258 (TRAV26-1, TRAJ38)
CIADNAGNNRKLIW

SEQ ID NO: 4516 - protein, 13 aa, Homo sapiens
  CDR3 for beta chain variable domain of TCR clone 2258 (TRBV7-9, TRBJ2-3)
CASSPGSTDTQYF

SEQ ID NO: 4517 - protein, 12 aa, Homo sapiens
  CDR3 for alpha chain variable domain of TCR clone 2259 (TRAV12-1, TRAJ40)
CVVNGETYKYIF

SEQ ID NO: 4518 - protein, 14 aa, Homo sapiens
  CDR3 for beta chain variable domain of TCR clone 2259 (TRBV7-9, TRBJ1-1)
CASSSTKGNTEAFF

SEQ ID NO: 4519 - protein, 16 aa, Homo sapiens
  CDR3 for alpha chain variable domain of TCR clone 2260 (TRAV12-1, TRAJ43)
CVVNPHRFGAGTRLTV

SEQ ID NO: 4520 - protein, 13 aa, Homo sapiens
  CDR3 for beta chain variable domain of TCR clone 2260 (TRBV20-1, TRBJ1-1)
CSARGGGNTEAFF

SEQ ID NO: 4521 - protein, 16 aa, Homo sapiens
  CDR3 for alpha chain variable domain of TCR clone 2261 (TRAV35, TRAJ20)
CWADPSSGFNDYKLSF

SEQ ID NO: 4522 - protein, 16 aa, Homo sapiens
  CDR3 for beta chain variable domain of TCR clone 2261 (TRBV4-3, TRBJ1-6)
CASSAQPGGEGSPLHF

SEQ ID NO: 4523 - protein, 14 aa, Homo sapiens
  CDR3 for alpha chain variable domain of TCR clone 2262 (TRAV12-3, TRAJ9)
CAMSVETGGFKTIF

SEQ ID NO: 4524 - protein, 14 aa, Homo sapiens
  CDR3 for beta chain variable domain of TCR clone 2262 (TRBV7-2, TRBJ2-7)
CASRSQGAAYEQYF

SEQ ID NO: 4525 - protein, 12 aa, Homo sapiens
  CDR3 for alpha chain variable domain of TCR clone 2263 (TRAV13-2, TRAJ39)
CAENNAGNMLTF

SEQ ID NO: 4526 - protein, 12 aa, Homo sapiens
  CDR3 for beta chain variable domain of TCR clone 2263 (TRBV11-2, TRBJ2-2)
CASSLGGGELFF

SEQ ID NO: 4527 - protein, 17 aa, Homo sapiens
  CDR3 for alpha chain variable domain of TCR clone 2264 (TRAV14/DV4, TRAJ4)
CAMREASGRGGYNKLIF

SEQ ID NO: 4528 - protein, 14 aa, Homo sapiens
  CDR3 for beta chain variable domain of TCR clone 2264 (TRBV19, TRBJ2-7)
CASSMGQGAIEQYF

SEQ ID NO: 4529 - protein, 15 aa, Homo sapiens
  CDR3 for alpha chain variable domain of TCR clone 2265 (TRAV27, TRAJ38)
CAARRNAGNNRKLIW

SEQ ID NO: 4530 - protein, 17 aa, Homo sapiens
  CDR3 for beta chain variable domain of TCR clone 2265 (TRBV20-1, TRBJ2-2)
CSASGSGQGGLTGELFF

SEQ ID NO: 4531 - protein, 16 aa, Homo sapiens
  CDR3 for alpha chain variable domain of TCR clone 2266 (TRAV13-1, TRAJ48)
CAASIFGNFGNEKLTF

SEQ ID NO: 4532 - protein, 14 aa, Homo sapiens
  CDR3 for beta chain variable domain of TCR clone 2266 (TRBV7-3, TRBJ1-1)
CASSLKGGNTEAFF

SEQ ID NO: 4533 - protein, 15 aa, Homo sapiens
  CDR3 for alpha chain variable domain of TCR clone 2267 (TRAV21, TRAJ53)
CATLNSGGSNYKLTF

SEQ ID NO: 4534 - protein, 13 aa, Homo sapiens
  CDR3 for beta chain variable domain of TCR clone 2267 (TRBV7-9, TRBJ2-3)
CASSPGSTDTQYF

SEQ ID NO: 4535 - protein, 17 aa, Homo sapiens
  CDR3 for alpha chain variable domain of TCR clone 2268 (TRAV12-2, TRAJ22)
CAVNRIPFSGSARQLTF

SEQ ID NO: 4536 - protein, 13 aa, Homo sapiens
  CDR3 for beta chain variable domain of TCR clone 2268 (TRBV11-3, TRBJ1-1)
CASSSNRDTEAFF

SEQ ID NO: 4537 - protein, 13 aa, Homo sapiens
  CDR3 for alpha chain variable domain of TCR clone 2269 (TRAV27, TRAJ29)
CAGAHSGNTPLVF

SEQ ID NO: 4538 - protein, 15 aa, Homo sapiens
  CDR3 for beta chain variable domain of TCR clone 2269 (TRBV15, TRBJ1-4)
CATSRDMGSYEKLFF

SEQ ID NO: 4539 - protein, 14 aa, Homo sapiens
  CDR3 for alpha chain variable domain of TCR clone 2270 (TRAV12-3, TRAJ54)
CAMSALQGAQKLVF

SEQ ID NO: 4540 - protein, 15 aa, Homo sapiens
  CDR3 for beta chain variable domain of TCR clone 2270 (TRBV19, TRBJ2-4)
CASSTPGIAKNIQYF

SEQ ID NO: 4541 - protein, 14 aa, Homo sapiens
  CDR3 for alpha chain variable domain of TCR clone 2271 (TRAV12-2, TRAJ45)
CAVYSGGGADGLTF

SEQ ID NO: 4542 - protein, 13 aa, Homo sapiens
  CDR3 for beta chain variable domain of TCR clone 2271 (TRBV7-7, TRBJ2-3)
CASSLSRADTQYF

SEQ ID NO: 4543 - protein, 12 aa, Homo sapiens
  CDR3 for alpha chain variable domain of TCR clone 2272 (TRAV13-1, TRAJ36)
WRGGAGANNLFF

SEQ ID NO: 4544 - protein, 16 aa, Homo sapiens
  CDR3 for beta chain variable domain of TCR clone 2272 (TRBV7-9, TRBJ2-5)
CASRLEIGTRKETQYF

SEQ ID NO: 4545 - protein, 13 aa, Homo sapiens
  CDR3 for alpha chain variable domain of TCR clone 2273 (TRAV14/DV4, TRAJ20)
CAMRESNDYKLSF

SEQ ID NO: 4546 - protein, 15 aa, Homo sapiens
  CDR3 for beta chain variable domain of TCR clone 2273 (TRBV7-9, TRBJ1-1)
CASSRPGTANTEAFF

SEQ ID NO: 4547 - protein, 13 aa, Homo sapiens
  CDR3 for alpha chain variable domain of TCR clone 2274 (TRAV12-3, TRAJ33)
CAMSVNSNYQLIW

SEQ ID NO: 4548 - protein, 13 aa, Homo sapiens
  CDR3 for beta chain variable domain of TCR clone 2274 (TRBV4-1, TRBJ2-2)
CASSQENTGELFF

SEQ ID NO: 4549 - protein, 15 aa, Homo sapiens
  CDR3 for alpha chain variable domain of TCR clone 2275 (TRAV26-1, TRAJ38)
CIVRAEGGNNRKLIW

SEQ ID NO: 4550 - protein, 14 aa, Homo sapiens
  CDR3 for beta chain variable domain of TCR clone 2275 (TRBV7-6, TRBJ2-5)
CASSSPSGSETQYF

SEQ ID NO: 4551 - protein, 15 aa, Homo sapiens
  CDR3 for alpha chain variable domain of TCR clone 2276 (TRAV3, TRAJ10)
CAVRDGTGGGNKLTF

SEQ ID NO: 4552 - protein, 15 aa, Homo sapiens
  CDR3 for beta chain variable domain of TCR clone 2276 (TRBV4-2, TRBJ1-4)
CASSLVQREVEKLFF

SEQ ID NO: 4553 - protein, 16 aa, Homo sapiens
  CDR3 for alpha chain variable domain of TCR clone 2277 (TRAV30, TRAJ24)
CGTEIVDADSWGKFQF

SEQ ID NO: 4554 - protein, 16 aa, Homo sapiens
  CDR3 for beta chain variable domain of TCR clone 2277 (TRBV28, TRBJ2-7)
CASSLFFETGGPEQYF

SEQ ID NO: 4555 - protein, 12 aa, Homo sapiens
  CDR3 for alpha chain variable domain of TCR clone 2278 (TRAV8-3, TRAJ20)
CAVGANDYKLSF

SEQ ID NO: 4556 - protein, 15 aa, Homo sapiens
  CDR3 for beta chain variable domain of TCR clone 2278 (TRBV11-2, TRBJ2-1)
CASSLGTSGLNEQFF

SEQ ID NO: 4557 - protein, 13 aa, Homo sapiens
  CDR3 for alpha chain variable domain of TCR clone 2279 (TRAV12-3, TRAJ56)
CALATGANSKLTF

SEQ ID NO: 4558 - protein, 12 aa, Homo sapiens
  CDR3 for beta chain variable domain of TCR clone 2279 (TRBV10-2, TRBJ2-3)
CASSPESDTQYF

SEQ ID NO: 4559 - protein, 12 aa, Homo sapiens
  CDR3 for alpha chain variable domain of TCR clone 2280 (TRAV17, TRAJ12)
CATLRSSYKLIF

SEQ ID NO: 4560 - protein, 14 aa, Homo sapiens
  CDR3 for beta chain variable domain of TCR clone 2280 (TRBV19, TRBJ2-1)
CARGARSFQWEQFF

SEQ ID NO: 4561 - protein, 14 aa, Homo sapiens
  CDR3 for alpha chain variable domain of TCR clone 2281 (TRAV16, TRAJ57)
CALPTQGGSEKLVF

SEQ ID NO: 4562 - protein, 15 aa, Homo sapiens
  CDR3 for beta chain variable domain of TCR clone 2281 (TRBV28, TRBJ1-3)
CASWGGHLSGNTIYF

SEQ ID NO: 4563 - protein, 13 aa, Homo sapiens
  CDR3 for alpha chain variable domain of TCR clone 2282 (TRAV12-3, TRAJ13)
CAMSSGGYQKVTF

SEQ ID NO: 4564 - protein, 16 aa, Homo sapiens
  CDR3 for beta chain variable domain of TCR clone 2282 (TRBV4-1, TRBJ2-7)
CASSRGDILNSYEQYF

SEQ ID NO: 4565 - protein, 14 aa, Homo sapiens
  CDR3 for alpha chain variable domain of TCR clone 2283 (TRAV38-1, TRAJ27)
CAFIHNTNAGKSTF

SEQ ID NO: 4566 - protein, 12 aa, Homo sapiens
  CDR3 for beta chain variable domain of TCR clone 2283 (TRBV7-8, TRBJ2-7)
CASSLGDREQYF

SEQ ID NO: 4567 - protein, 12 aa, Homo sapiens
  CDR3 for alpha chain variable domain of TCR clone 2284 (TRAV3, TRAJ20)
CAVRDPDYKLSF

SEQ ID NO: 4568 - protein, 15 aa, Homo sapiens
  CDR3 for beta chain variable domain of TCR clone 2284 (TRBV2, TRBJ2-2)
CASSRETVGTGELFF

SEQ ID NO: 4569 - protein, 11 aa, Homo sapiens
  CDR3 for alpha chain variable domain of TCR clone 2285 (TRAV8-3, TRAJ18)
CAVGGRQRLNP

SEQ ID NO: 4570 - protein, 12 aa, Homo sapiens
  CDR3 for beta chain variable domain of TCR clone 2285 (TRBV28, TRBJ2-6)
CAIQAGANVLTF

SEQ ID NO: 4571 - protein, 14 aa, Homo sapiens
  CDR3 for alpha chain variable domain of TCR clone 2286 (TRAV38-1, TRAJ35)
CAFLTIGFGNVLHC

SEQ ID NO: 4572 - protein, 17 aa, Homo sapiens
  CDR3 for beta chain variable domain of TCR clone 2286 (TRBV28, TRBJ1-1)
CASSGDLRTESNTEAFF

SEQ ID NO: 4573 - protein, 16 aa, Homo sapiens
  CDR3 for alpha chain variable domain of TCR clone 2287 (TRAV3, TRAJ37)
CAVRGKGSGNTGKLIF

SEQ ID NO: 4574 - protein, 13 aa, Homo sapiens
  CDR3 for beta chain variable domain of TCR clone 2287 (TRBV7-3, TRBJ1-1)
CASSQDWGAEAFF

SEQ ID NO: 4575 - protein, 14 aa, Homo sapiens
  CDR3 for alpha chain variable domain of TCR clone 2288 (TRAV26-1, TRAJ21)
CIVRVVYNFNKFYF

SEQ ID NO: 4576 - protein, 17 aa, Homo sapiens
  CDR3 for beta chain variable domain of TCR clone 2288 (TRBV11-2, TRBJ2-1)
CASSLYPPGVEYNEQFF

SEQ ID NO: 4577 - protein, 14 aa, Homo sapiens
  CDR3 for alpha chain variable domain of TCR clone 2289 (TRAV13-1, TRAJ35)
CAASKGGFGNVLHF

SEQ ID NO: 4578 - protein, 13 aa, Homo sapiens
  CDR3 for beta chain variable domain of TCR clone 2289 (TRBV7-3, TRBJ1-1)
CASSQDWGAEAFF

SEQ ID NO: 4579 - protein, 14 aa, Homo sapiens
  CDR3 for alpha chain variable domain of TCR clone 2290 (TRAV12-3, TRAJ10)
SHLPLTGGGNKLTF

SEQ ID NO: 4580 - protein, 15 aa, Homo sapiens
  CDR3 for beta chain variable domain of TCR clone 2290 (TRBV29-1, TRBJ2-6)
CSVGDRGSGANVLTF

SEQ ID NO: 4581 - protein, 12 aa, Homo sapiens
  CDR3 for alpha chain variable domain of TCR clone 2291 (TRAV8-3, TRAJ26)
CAGDNYGQNFVF

SEQ ID NO: 4582 - protein, 18 aa, Homo sapiens
  CDR3 for beta chain variable domain of TCR clone 2291 (TRBV12-4, TRBJ2-2)
CASSLVAGTRGRTGELFF

SEQ ID NO: 4583 - protein, 14 aa, Homo sapiens
  CDR3 for alpha chain variable domain of TCR clone 2292 (TRAV38-1, TRAJ54)
CAFMSPSGAQKLVF

SEQ ID NO: 4584 - protein, 16 aa, Homo sapiens
  CDR3 for beta chain variable domain of TCR clone 2292 (TRBV28, TRBJ2-1)
CASSLGGSGSYNEQFF

SEQ ID NO: 4585 - protein, 13 aa, Homo sapiens
  CDR3 for alpha chain variable domain of TCR clone 2293 (TRAV8-1, TRAJ15)
CAVKNQAGTALIF

SEQ ID NO: 4586 - protein, 15 aa, Homo sapiens
  CDR3 for beta chain variable domain of TCR clone 2293 (TRBV7-3, TRBJ2-7)
CASSLTPTGYDEQYF

SEQ ID NO: 4587 - protein, 16 aa, Homo sapiens
  CDR3 for alpha chain variable domain of TCR clone 2294 (TRAV30, TRAJ24)
CGTEIVDADSWGKFQF

SEQ ID NO: 4588 - protein, 13 aa, Homo sapiens
  CDR3 for beta chain variable domain of TCR clone 2294 (TRBV20-1, TRBJ1-1)
CSAPPGGHTEAFF

SEQ ID NO: 4589 - protein, 15 aa, Homo sapiens
  CDR3 for alpha chain variable domain of TCR clone 2295 (TRAV21, TRAJ24)
CAARSSTDSWGKLQF

SEQ ID NO: 4590 - protein, 15 aa, Homo sapiens
  CDR3 for beta chain variable domain of TCR clone 2295 (TRBV4-1, TRBJ2-7)
CASSQNTGRLYEQYF

SEQ ID NO: 4591 - protein, 19 aa, Homo sapiens
  CDR3 for alpha chain variable domain of TCR clone 2296 (TRAV2, TRAJ20)
ILQVREADAAVYRDCKLSF

SEQ ID NO: 4592 - protein, 16 aa, Homo sapiens
  CDR3 for beta chain variable domain of TCR clone 2296 (TRBV20-1, TRBJ1-4)
CSAPGQGLLTNEKLFF

SEQ ID NO: 4593 - protein, 14 aa, Homo sapiens
  CDR3 for alpha chain variable domain of TCR clone 2297 (TRAV3, TRAJ17)
CAVRDAAAGNKLTF

SEQ ID NO: 4594 - protein, 16 aa, Homo sapiens
  CDR3 for beta chain variable domain of TCR clone 2297 (TRBV20-1, TRBJ1-2)
CSASMGQGVANYGYTF

SEQ ID NO: 4595 - protein, 15 aa, Homo sapiens
  CDR3 for alpha chain variable domain of TCR clone 2298 (TRAV21, TRAJ57)
CAVIITQGGSEKLVF

SEQ ID NO: 4596 - protein, 14 aa, Homo sapiens
  CDR3 for beta chain variable domain of TCR clone 2298 (TRBV5-1, TRBJ2-2)
CASSLIWIPGELFF

SEQ ID NO: 4597 - protein, 19 aa, Homo sapiens
  CDR3 for alpha chain variable domain of TCR clone 2299 (TRAV17, TRAJ17)
CATDGRPGVIKAAGNKLTF

SEQ ID NO: 4598 - protein, 17 aa, Homo sapiens
  CDR3 for beta chain variable domain of TCR clone 2299 (TRBV12-4, TRBJ1-1)
CASSLSGFRTMNTEAFF

SEQ ID NO: 4599 - protein, 15 aa, Homo sapiens
  CDR3 for alpha chain variable domain of TCR clone 2300 (TRAV26-1, TRAJ27)
CIVRVLTPMQANQPL

SEQ ID NO: 4600 - protein, 13 aa, Homo sapiens
  CDR3 for beta chain variable domain of TCR clone 2300 (TRBV20-1, TRBJ2-7)
CSATHTSGYEQYF

SEQ ID NO: 4601 - protein, 14 aa, Homo sapiens
  CDR3 for alpha chain variable domain of TCR clone 2301 (TRAV16, TRAJ26)
CITVLSAYGQNFVF

SEQ ID NO: 4602 - protein, 14 aa, Homo sapiens
  CDR3 for beta chain variable domain of TCR clone 2301 (TRBV7-2, TRBJ2-7)
CASRSQGAAYEQYF

SEQ ID NO: 4603 - protein, 13 aa, Homo sapiens
  CDR3 for alpha chain variable domain of TCR clone 2302 (TRAV8-6, TRAJ8)
CAFMNTGFQKLVF

SEQ ID NO: 4604 - protein, 15 aa, Homo sapiens
  CDR3 for beta chain variable domain of TCR clone 2302 (TRBV28, TRBJ2-5)
CASSSGRVIQETQYF

SEQ ID NO: 4605 - protein, 14 aa, Homo sapiens
  CDR3 for alpha chain variable domain of TCR clone 2303 (TRAV12-3, TRAJ10)
SHLPLTGGGNKLTF

SEQ ID NO: 4606 - protein, 15 aa, Homo sapiens
  CDR3 for beta chain variable domain of TCR clone 2303 (TRBV11-3, TRBJ2-3)
CASLKDGREGDTQYF

SEQ ID NO: 4607 - protein, 15 aa, Homo sapiens
  CDR3 for alpha chain variable domain of TCR clone 2304 (TRAV8-4, TRAJ48)
CAVSAAYFGNEKLTF

SEQ ID NO: 4608 - protein, 12 aa, Homo sapiens
  CDR3 for beta chain variable domain of TCR clone 2304 (TRBV3-1, TRBJ2-5)
CASSQRGETQYF

SEQ ID NO: 4609 - protein, 14 aa, Homo sapiens
  CDR3 for alpha chain variable domain of TCR clone 2305 (TRAV8-4, TRAJ40)
CAVIPTSGTYKYIF

SEQ ID NO: 4610 - protein, 15 aa, Homo sapiens
  CDR3 for beta chain variable domain of TCR clone 2305 (TRBV7-2, TRBJ2-1)
CASTSASGDYNEQFF

SEQ ID NO: 4611 - protein, 17 aa, Homo sapiens
  CDR3 for alpha chain variable domain of TCR clone 2306 (TRAV27, TRAJ18)
CAGLHRGRGSTLGRLYF

SEQ ID NO: 4612 - protein, 14 aa, Homo sapiens
  CDR3 for beta chain variable domain of TCR clone 2306 (TRBV20-1, TRBJ1-5)
CSARGRGSNQPQHF

SEQ ID NO: 4613 - protein, 13 aa, Homo sapiens
  CDR3 for alpha chain variable domain of TCR clone 2307 (TRAV1-2, TRAJ9)
CAALNTGGFKTIF

SEQ ID NO: 4614 - protein, 20 aa, Homo sapiens
  CDR3 for beta chain variable domain of TCR clone 2307 (TRBV28, TRBJ2-1)
CASTPIGRSPGLAGGNEQFF

SEQ ID NO: 4615 - protein, 13 aa, Homo sapiens
  CDR3 for alpha chain variable domain of TCR clone 2308 (TRAV13-2, TRAJ15)
CAERPQAGTALIF

SEQ ID NO: 4616 - protein, 15 aa, Homo sapiens
  CDR3 for beta chain variable domain of TCR clone 2308 (TRBV11-2, TRBJ2-7)
CASRFPGTGGYEQYF

SEQ ID NO: 4617 - protein, 13 aa, Homo sapiens
  CDR3 for alpha chain variable domain of TCR clone 2309 (TRAV12-1, TRAJ17)
CVVNKAAGNKLTF

SEQ ID NO: 4618 - protein, 16 aa, Homo sapiens
  CDR3 for beta chain variable domain of TCR clone 2309 (TRBV11-2, TRBJ2-2)
CASSLRTGNLIGELFF

SEQ ID NO: 4619 - protein, 13 aa, Homo sapiens
  CDR3 for alpha chain variable domain of TCR clone 2310 (TRAV16, TRAJ28)
CAPTGAGSYQLTF

SEQ ID NO: 4620 - protein, 16 aa, Homo sapiens
  CDR3 for beta chain variable domain of TCR clone 2310 (TRBV28, TRBJ1-5)
CASSLTGQGWNQPQHF

SEQ ID NO: 4621 - protein, 12 aa, Homo sapiens
  CDR3 for alpha chain variable domain of TCR clone 2311 (TRAV30, TRAJ39)
CGRGNAGNMLTF

SEQ ID NO: 4622 - protein, 15 aa, Homo sapiens
  CDR3 for beta chain variable domain of TCR clone 2311 (TRBV5-1, TRBJ1-1)
CASSWTGRGNTEAFF

SEQ ID NO: 4623 - protein, 16 aa, Homo sapiens
  CDR3 for alpha chain variable domain of TCR clone 2312 (TRAV12-1, TRAJ13)
CVVNLEVSGGYQKVTF

SEQ ID NO: 4624 - protein, 16 aa, Homo sapiens
  CDR3 for beta chain variable domain of TCR clone 2312 (TRBV24-1, TRBJ2-6)
CATSDRRASGANVLTF

SEQ ID NO: 4625 - protein, 23 aa, Homo sapiens
  CDR3 for alpha chain variable domain of TCR clone 2313 (TRAV1-1, TRAJ29)
LLQELQMKDSASYFLGGNTPLVF

SEQ ID NO: 4626 - protein, 13 aa, Homo sapiens
  CDR3 for beta chain variable domain of TCR clone 2313 (TRBV25-1, TRBJ2-7)
CASSEDGDYEQYF

SEQ ID NO: 4627 - protein, 13 aa, Homo sapiens
  CDR3 for alpha chain variable domain of TCR clone 2314 (TRAV2, TRAJ15)
CAVASQAGTALIF

SEQ ID NO: 4628 - protein, 14 aa, Homo sapiens
  CDR3 for beta chain variable domain of TCR clone 2314 (TRBV25-1, TRBJ1-1)
CASTHLGGNTEAFF

SEQ ID NO: 4629 - protein, 14 aa, Homo sapiens
  CDR3 for alpha chain variable domain of TCR clone 2315 (TRAV3, TRAJ8)
CAVSLNTGFQKLVF

SEQ ID NO: 4630 - protein, 14 aa, Homo sapiens
  CDR3 for beta chain variable domain of TCR clone 2315 (TRBV6-6, TRBJ1-5)
CASVDSGFNQPQHF

SEQ ID NO: 4631 - protein, 11 aa, Homo sapiens
  CDR3 for alpha chain variable domain of TCR clone 2316 (TRAV1-2, TRAJ40)
CAVPGTYKYIF

SEQ ID NO: 4632 - protein, 16 aa, Homo sapiens
  CDR3 for beta chain variable domain of TCR clone 2316 (TRBV7-3, TRBJ2-2)
CASSLKRGTLSGELFF

SEQ ID NO: 4633 - protein, 15 aa, Homo sapiens
  CDR3 for alpha chain variable domain of TCR clone 2317 (TRAV13-1, TRAJ44)
CAASRNTGTASKLTF

SEQ ID NO: 4634 - protein, 14 aa, Homo sapiens
  CDR3 for beta chain variable domain of TCR clone 2317 (TRBV11-2, TRBJ1-2)
CASSLYRGNYGYTF

SEQ ID NO: 4635 - protein, 12 aa, Homo sapiens
  CDR3 for alpha chain variable domain of TCR clone 2318 (TRAV8-6, TRAJ11)
CAVSSGYSTLTF

SEQ ID NO: 4636 - protein, 11 aa, Homo sapiens
  CDR3 for beta chain variable domain of TCR clone 2318 (TRBV20-1, TRBJ1-5)
CSAQGDQPQHF

SEQ ID NO: 4637 - protein, 14 aa, Homo sapiens
  CDR3 for alpha chain variable domain of TCR clone 2319 (TRAV8-2, TRAJ23)
CVVSDDNQGGKLIF

SEQ ID NO: 4638 - protein, 16 aa, Homo sapiens
  CDR3 for beta chain variable domain of TCR clone 2319 (TRBV4-2, TRBJ2-5)
CASSQELVGSQETQYF

SEQ ID NO: 4639 - protein, 13 aa, Homo sapiens
  CDR3 for alpha chain variable domain of TCR clone 2320 (TRAV35, TRAJ57)
CAGSQGGSEKLVF

SEQ ID NO: 4640 - protein, 15 aa, Homo sapiens
  CDR3 for beta chain variable domain of TCR clone 2320 (TRBV20-1, TRBJ2-7)
CSARDRVSGMDEQYF

SEQ ID NO: 4641 - protein, 14 aa, Homo sapiens
  CDR3 for alpha chain variable domain of TCR clone 2321 (TRAV13-1, TRAJ35)
CAASKGGFGNVLHC

SEQ ID NO: 4642 - protein, 15 aa, Homo sapiens
  CDR3 for beta chain variable domain of TCR clone 2321 (TRBV28, TRBJ2-1)
CASSGLAEVDNEQFF

SEQ ID NO: 4643 - protein, 14 aa, Homo sapiens
  CDR3 for alpha chain variable domain of TCR clone 2322 (TRAV26-1, TRAJ6)
CIVSPVGGSYIPTF

SEQ ID NO: 4644 - protein, 16 aa, Homo sapiens
  CDR3 for beta chain variable domain of TCR clone 2322 (TRBV4-1, TRBJ2-5)
CASSSGLAGVLGTQYF

SEQ ID NO: 4645 - protein, 14 aa, Homo sapiens
  CDR3 for alpha chain variable domain of TCR clone 2323 (TRAV1-2, TRAJ16)
CAVNRFSDGQKLLF

SEQ ID NO: 4646 - protein, 14 aa, Homo sapiens
  CDR3 for beta chain variable domain of TCR clone 2323 (TRBV19, TRBJ2-2)
CASSTLHRSGELFF

SEQ ID NO: 4647 - protein, 19 aa, Homo sapiens
  CDR3 for alpha chain variable domain of TCR clone 2324 (TRAV2, TRAJ32)
TTVLSTPPSQGGATNKLIF

SEQ ID NO: 4648 - protein, 12 aa, Homo sapiens
  CDR3 for beta chain variable domain of TCR clone 2324 (TRBV20-1, TRBJ2-7)
CSAITPTKEQYF

SEQ ID NO: 4649 - protein, 14 aa, Homo sapiens
  CDR3 for alpha chain variable domain of TCR clone 2325 (TRAV1-2, TRAJ17)
CALRRGAAGNKLTF

SEQ ID NO: 4650 - protein, 13 aa, Homo sapiens
  CDR3 for beta chain variable domain of TCR clone 2325 (TRBV9, TRBJ2-1)
CASSVGQGGEQFF

SEQ ID NO: 4651 - protein, 15 aa, Homo sapiens
  CDR3 for alpha chain variable domain of TCR clone 2326 (TRAV4, TRAJ39)
CLVGPNNNAGNMLTF

SEQ ID NO: 4652 - protein, 15 aa, Homo sapiens
  CDR3 for beta chain variable domain of TCR clone 2326 (TRBV7-9, TRBJ1-6)
CASSSPGRGNSPLHF

SEQ ID NO: 4653 - protein, 15 aa, Homo sapiens
  CDR3 for alpha chain variable domain of TCR clone 2327 (TRAV8-1, TRAJ37)
CAVKKGSGNTGKLIF

SEQ ID NO: 4654 - protein, 17 aa, Homo sapiens
  CDR3 for beta chain variable domain of TCR clone 2327 (TRBV12-4, TRBJ1-1)
CASSLSGFRTMNTEAFF

SEQ ID NO: 4655 - protein, 13 aa, Homo sapiens
  CDR3 for alpha chain variable domain of TCR clone 2328 (TRAV13-1, TRAJ40)
CAAISPGTYKYIF

SEQ ID NO: 4656 - protein, 13 aa, Homo sapiens
  CDR3 for beta chain variable domain of TCR clone 2328 (TRBV10-3, TRBJ2-7)
CAIRAGGPHEQYF

SEQ ID NO: 4657 - protein, 15 aa, Homo sapiens
  CDR3 for alpha chain variable domain of TCR clone 2329 (TRAV21, TRAJ13)
CAVRPTSGGYQKVTF

SEQ ID NO: 4658 - protein, 15 aa, Homo sapiens
  CDR3 for beta chain variable domain of TCR clone 2329 (TRBV28, TRBJ2-7)
CASSPGGRGFYEQYF

SEQ ID NO: 4659 - protein, 16 aa, Homo sapiens
  CDR3 for alpha chain variable domain of TCR clone 2330 (TRAV3, TRAJ10)
CAVRDMRAGGGNKLTF

SEQ ID NO: 4660 - protein, 13 aa, Homo sapiens
  CDR3 for beta chain variable domain of TCR clone 2330 (TRBV4-2, TRBJ1-1)
CASSQAGNTEAFF

SEQ ID NO: 4661 - protein, 11 aa, Homo sapiens
  CDR3 for alpha chain variable domain of TCR clone 2331 (TRAV16, TRAJ49)
CALRSGNQFYF

SEQ ID NO: 4662 - protein, 16 aa, Homo sapiens
  CDR3 for beta chain variable domain of TCR clone 2331 (TRBV20-1, TRBJ1-5)
CSARDVGGGWIQPQHF

SEQ ID NO: 4663 - protein, 12 aa, Homo sapiens
  CDR3 for alpha chain variable domain of TCR clone 2332 (TRAV12-3, TRAJ17)
CAMTLTGNKLTL

SEQ ID NO: 4664 - protein, 15 aa, Homo sapiens
  CDR3 for beta chain variable domain of TCR clone 2332 (TRBV20-1, TRBJ2-7)
CSARDRVSGMDEQYF

SEQ ID NO: 4665 - protein, 13 aa, Homo sapiens
  CDR3 for alpha chain variable domain of TCR clone 2333 (TRAV1-2, TRAJ9)
CAALNTGGFKTIF

SEQ ID NO: 4666 - protein, 16 aa, Homo sapiens
  CDR3 for beta chain variable domain of TCR clone 2333 (TRBV11-2, TRBJ2-1)
CASSPRLAGVYNEQFF

SEQ ID NO: 4667 - protein, 14 aa, Homo sapiens
  CDR3 for alpha chain variable domain of TCR clone 2334 (TRAV13-1, TRAJ39)
CAASYNNAGNMLTF

SEQ ID NO: 4668 - protein, 13 aa, Homo sapiens
  CDR3 for beta chain variable domain of TCR clone 2334 (TRBV24-1, TRBJ1-4)
CATNNGRSEKLFF

SEQ ID NO: 4669 - protein, 13 aa, Homo sapiens
  CDR3 for alpha chain variable domain of TCR clone 2335 (TRAV13-1, TRAJ33)
CAASRAGNYQLIW

SEQ ID NO: 4670 - protein, 15 aa, Homo sapiens
  CDR3 for beta chain variable domain of TCR clone 2335 (TRBV2, TRBJ2-7)
EDSAMYFCASSEQYF

SEQ ID NO: 4671 - protein, 13 aa, Homo sapiens
  CDR3 for alpha chain variable domain of TCR clone 2336 (TRAV1-2, TRAJ9)
CAALNTGGFKTIF

SEQ ID NO: 4672 - protein, 13 aa, Homo sapiens
  CDR3 for beta chain variable domain of TCR clone 2336 (TRBV4-1, TRBJ2-1)
CASSQAGGDEQFF

SEQ ID NO: 4673 - protein, 13 aa, Homo sapiens
  CDR3 for alpha chain variable domain of TCR clone 2337 (TRAV36/DV7, TRAJ49)
CAVEANTGNQFYF

SEQ ID NO: 4674 - protein, 14 aa, Homo sapiens
  CDR3 for beta chain variable domain of TCR clone 2337 (TRBV20-1, TRBJ2-5)
CSASSGRAAETQYF

SEQ ID NO: 4675 - protein, 14 aa, Homo sapiens
  CDR3 for alpha chain variable domain of TCR clone 2338 (TRAV12-1, TRAJ30)
CVVNIGNRDDKIIF

SEQ ID NO: 4676 - protein, 14 aa, Homo sapiens
  CDR3 for beta chain variable domain of TCR clone 2338 (TRBV7-9, TRBJ2-5)
CASSPRPSGETQYF

SEQ ID NO: 4677 - protein, 13 aa, Homo sapiens
  CDR3 for alpha chain variable domain of TCR clone 2339 (TRAV21, TRAJ27)
CAARPGNAGKSTF

SEQ ID NO: 4678 - protein, 15 aa, Homo sapiens
  CDR3 for beta chain variable domain of TCR clone 2339 (TRBV20-1, TRBJ2-7)
CSARDRVSGMDEQYF

SEQ ID NO: 4679 - protein, 12 aa, Homo sapiens
  CDR3 for alpha chain variable domain of TCR clone 2340 (TRAV9-2, TRAJ36)
CALKKGANNLFF

SEQ ID NO: 4680 - protein, 13 aa, Homo sapiens
  CDR3 for beta chain variable domain of TCR clone 2340 (TRBV27, TRBJ1-1)
CASSLSIGAEAFF

SEQ ID NO: 4681 - protein, 12 aa, Homo sapiens
  CDR3 for alpha chain variable domain of TCR clone 2341 (TRAV8-3, TRAJ41)
CAVALSGYALNF

SEQ ID NO: 4682 - protein, 17 aa, Homo sapiens
  CDR3 for beta chain variable domain of TCR clone 2341 (TRBV7-3, TRBJ2-2)
CASSLSGTSGGTGELFF

SEQ ID NO: 4683 - protein, 12 aa, Homo sapiens
  CDR3 for alpha chain variable domain of TCR clone 2342 (TRAV40, TRAJ20)
CLRGLNDYKLSF

SEQ ID NO: 4684 - protein, 14 aa, Homo sapiens
  CDR3 for beta chain variable domain of TCR clone 2342 (TRBV19, TRBJ2-1)
CASSSGRDYNEQFF

SEQ ID NO: 4685 - protein, 14 aa, Homo sapiens
  CDR3 for alpha chain variable domain of TCR clone 2343 (TRAV17, TRAJ57)
CATDPQGGSEKLVF

SEQ ID NO: 4686 - protein, 17 aa, Homo sapiens
  CDR3 for beta chain variable domain of TCR clone 2343 (TRBV5-1, TRBJ2-2)
CASSLAGLSGGTGELFF

SEQ ID NO: 4687 - protein, 12 aa, Homo sapiens
  CDR3 for alpha chain variable domain of TCR clone 2344 (TRAV1-2, TRAJ26)
CAVRYYGQNFVF

SEQ ID NO: 4688 - protein, 15 aa, Homo sapiens
  CDR3 for beta chain variable domain of TCR clone 2344 (TRBV28, TRBJ2-1)
CASSIIAGGRSEQFF

SEQ ID NO: 4689 - protein, 12 aa, Homo sapiens
  CDR3 for alpha chain variable domain of TCR clone 2345 (TRAV12-3, TRAJ17)
CAMTLTGNKLTF

SEQ ID NO: 4690 - protein, 11 aa, Homo sapiens
  CDR3 for beta chain variable domain of TCR clone 2345 (TRBV28, TRBJ2-1)
CASRRVNEQFF

SEQ ID NO: 4691 - protein, 17 aa, Homo sapiens
  CDR3 for alpha chain variable domain of TCR clone 2346 (TRAV16, TRAJ58)
CITVLSNGETSGSRLTF

SEQ ID NO: 4692 - protein, 13 aa, Homo sapiens
  CDR3 for beta chain variable domain of TCR clone 2346 (TRBV20-1, TRBJ2-2)
CSASAAGTGELFF

SEQ ID NO: 4693 - protein, 13 aa, Homo sapiens
  CDR3 for alpha chain variable domain of TCR clone 2347 (TRAV1-2, TRAJ9)
CAALNTGGFKTIF

SEQ ID NO: 4694 - protein, 12 aa, Homo sapiens
  CDR3 for beta chain variable domain of TCR clone 2347 (TRBV11-3, TRBJ1-1)
CASSHRQGEAFF

SEQ ID NO: 4695 - protein, 15 aa, Homo sapiens
  CDR3 for alpha chain variable domain of TCR clone 2348 (TRAV21, TRAJ53)
CATLNSGGSNYKLTF

SEQ ID NO: 4696 - protein, 17 aa, Homo sapiens
  CDR3 for beta chain variable domain of TCR clone 2348 (TRBV20-1, TRBJ2-2)
CSASGSGQGGLTGELFF

SEQ ID NO: 4697 - protein, 11 aa, Homo sapiens
  CDR3 for alpha chain variable domain of TCR clone 2349 (TRAV12-2, TRAJ49)
CALQGGNQFYF

SEQ ID NO: 4698 - protein, 14 aa, Homo sapiens
  CDR3 for beta chain variable domain of TCR clone 2349 (TRBV7-2, TRBJ2-7)
CASSPKTSFYEQYF

SEQ ID NO: 4699 - protein, 11 aa, Homo sapiens
  CDR3 for alpha chain variable domain of TCR clone 2350 (TRAV12-2, )
CAVASLATTIS

SEQ ID NO: 4700 - protein, 16 aa, Homo sapiens
  CDR3 for beta chain variable domain of TCR clone 2350 (TRBV5-1, TRBJ2-2)
CASSSRTGGRTGELFF

SEQ ID NO: 4701 - protein, 12 aa, Homo sapiens
  CDR3 for alpha chain variable domain of TCR clone 2351 (TRAV26-1, TRAJ54)
CIGGWGAQKLVF

SEQ ID NO: 4702 - protein, 14 aa, Homo sapiens
  CDR3 for beta chain variable domain of TCR clone 2351 (TRBV11-2, TRBJ1-2)
CASSSGQAGDGYTF

SEQ ID NO: 4703 - protein, 18 aa, Homo sapiens
  CDR3 for alpha chain variable domain of TCR clone 2352 (TRAV26-1, TRAJ23)
CIVRVGLEVWNQGGKLIF

SEQ ID NO: 4704 - protein, 14 aa, Homo sapiens
  CDR3 for beta chain variable domain of TCR clone 2352 (TRBV7-6, TRBJ2-3)
CASSLGTVTDTQYF

SEQ ID NO: 4705 - protein, 14 aa, Homo sapiens
  CDR3 for alpha chain variable domain of TCR clone 2353 (TRAV12-2, TRAJ40)
CAVKIPSGTYKYIF

SEQ ID NO: 4706 - protein, 17 aa, Homo sapiens
  CDR3 for beta chain variable domain of TCR clone 2353 (TRBV20-1, TRBJ2-1)
CSAFSGTSGSLYNEQFF

SEQ ID NO: 4707 - protein, 16 aa, Homo sapiens
  CDR3 for alpha chain variable domain of TCR clone 2354 (TRAV3, TRAJ42)
CAVRDIEGGSQGNLIF

SEQ ID NO: 4708 - protein, 15 aa, Homo sapiens
  CDR3 for beta chain variable domain of TCR clone 2354 (TRBV9, TRBJ2-2)
CASSDFAGASGELFF

SEQ ID NO: 4709 - protein, 13 aa, Homo sapiens
  CDR3 for alpha chain variable domain of TCR clone 2355 (TRAV21, TRAJ27)
CAARPGNAGKSTF

SEQ ID NO: 4710 - protein, 12 aa, Homo sapiens
  CDR3 for beta chain variable domain of TCR clone 2355 (TRBV11-2, TRBJ2-2)
CASSLGGGELFF

SEQ ID NO: 4711 - protein, 14 aa, Homo sapiens
  CDR3 for alpha chain variable domain of TCR clone 2356 (TRAV17, TRAJ24)
CATLTTDSWGKFQF

SEQ ID NO: 4712 - protein, 16 aa, Homo sapiens
  CDR3 for beta chain variable domain of TCR clone 2356 (TRBV4-2, TRBJ2-7)
CASSQDGGSLRGEQYF

SEQ ID NO: 4713 - protein, 12 aa, Homo sapiens
  CDR3 for alpha chain variable domain of TCR clone 2357 (TRAV8-6, TRAJ8)
CAVTPGFQKLVF

SEQ ID NO: 4714 - protein, 16 aa, Homo sapiens
  CDR3 for beta chain variable domain of TCR clone 2357 (TRBV7-3, TRBJ2-2)
CASSLKRGTLSGELFF

SEQ ID NO: 4715 - protein, 14 aa, Homo sapiens
  CDR3 for alpha chain variable domain of TCR clone 2358 (TRAV4, TRAJ32)
CLVNYGGATNKLIF

SEQ ID NO: 4716 - protein, 14 aa, Homo sapiens
  CDR3 for beta chain variable domain of TCR clone 2358 (TRBV15, TRBJ2-5)
CATSGGTRTETQYF

SEQ ID NO: 4717 - protein, 11 aa, Homo sapiens
  CDR3 for alpha chain variable domain of TCR clone 2359 (TRAV21, TRAJ34)
CAVTNTDKLIF

SEQ ID NO: 4718 - protein, 12 aa, Homo sapiens
  CDR3 for beta chain variable domain of TCR clone 2359 (TRBV7-9, TRBJ1-1)
CASSLVRGEAFF

SEQ ID NO: 4719 - protein, 16 aa, Homo sapiens
  CDR3 for alpha chain variable domain of TCR clone 2360 (TRAV26-1, TRAJ40)
CIVRGYPTSGTYKYIF

SEQ ID NO: 4720 - protein, 14 aa, Homo sapiens
  CDR3 for beta chain variable domain of TCR clone 2360 (TRBV5-1, TRBJ1-4)
CASSSGQGGEKLFF

SEQ ID NO: 4721 - protein, 17 aa, Homo sapiens
  CDR3 for alpha chain variable domain of TCR clone 2361 (TRAV26-1, TRAJ10)
CIVSFRGLTGGGNKLTF

SEQ ID NO: 4722 - protein, 13 aa, Homo sapiens
  CDR3 for beta chain variable domain of TCR clone 2361 (TRBV20-1, TRBJ2-3)
CSASRQAADTQYF

SEQ ID NO: 4723 - protein, 13 aa, Homo sapiens
  CDR3 for alpha chain variable domain of TCR clone 2362 (TRAV29/DV5, TRAJ31)
CAASRNNNARLMF

SEQ ID NO: 4724 - protein, 13 aa, Homo sapiens
  CDR3 for beta chain variable domain of TCR clone 2362 (TRBV7-2, TRBJ2-4)
CASSREHANIQYF

SEQ ID NO: 4725 - protein, 16 aa, Homo sapiens
  CDR3 for alpha chain variable domain of TCR clone 2363 (TRAV12-1, TRAJ43)
CVVNPHRFGAGTRLTV

SEQ ID NO: 4726 - protein, 16 aa, Homo sapiens
  CDR3 for beta chain variable domain of TCR clone 2363 (TRBV27, TRBJ2-2)
CASSSTGGGDTGELFF

SEQ ID NO: 4727 - protein, 13 aa, Homo sapiens
  CDR3 for alpha chain variable domain of TCR clone 2364 (TRAV12-2, TRAJ4)
CAVFSGGYNKLIF

SEQ ID NO: 4728 - protein, 13 aa, Homo sapiens
  CDR3 for beta chain variable domain of TCR clone 2364 (TRBV19, TRBJ1-5)
CASSIDRDQPQHF

SEQ ID NO: 4729 - protein, 12 aa, Homo sapiens
  CDR3 for alpha chain variable domain of TCR clone 2365 (TRAV21, TRAJ27)
CAPPGNAGKSTF

SEQ ID NO: 4730 - protein, 13 aa, Homo sapiens
  CDR3 for beta chain variable domain of TCR clone 2365 (TRBV2, TRBJ1-1)
CARNPTGGFHAFF

SEQ ID NO: 4731 - protein, 14 aa, Homo sapiens
  CDR3 for alpha chain variable domain of TCR clone 2366 (TRAV30, TRAJ33)
CGTVAPRSNYQLIW

SEQ ID NO: 4732 - protein, 14 aa, Homo sapiens
  CDR3 for beta chain variable domain of TCR clone 2366 (TRBV19, TRBJ2-1)
CASPTFVLSGEQFF

SEQ ID NO: 4733 - protein, 13 aa, Homo sapiens
  CDR3 for alpha chain variable domain of TCR clone 2367 (TRAV17, TRAJ29)
CATGPSGNTPLVF

SEQ ID NO: 4734 - protein, 14 aa, Homo sapiens
  CDR3 for beta chain variable domain of TCR clone 2367 (TRBV2, TRBJ1-6)
CASEVSSYNSPLHF

SEQ ID NO: 4735 - protein, 23 aa, Homo sapiens
  CDR3 for alpha chain variable domain of TCR clone 2368 (TRAV8-6, TRAJ38)
CAVRNAGNNHIQNPDPAVYQLRD

SEQ ID NO: 4736 - protein, 15 aa, Homo sapiens
  CDR3 for beta chain variable domain of TCR clone 2368 (TRBV4-1, TRBJ2-2)
CASSEGQGITGELFF

SEQ ID NO: 4737 - protein, 12 aa, Homo sapiens
  CDR3 for alpha chain variable domain of TCR clone 2369 (TRAV13-1, TRAJ3)
CAATGVQQCFQD

SEQ ID NO: 4738 - protein, 16 aa, Homo sapiens
  CDR3 for beta chain variable domain of TCR clone 2369 (TRBV7-3, TRBJ2-2)
CASSLKRGTLSGELFF

SEQ ID NO: 4739 - protein, 15 aa, Homo sapiens
  CDR3 for alpha chain variable domain of TCR clone 2370 (TRAV3, TRAJ22)
CAVRDRGGSARQLTF

SEQ ID NO: 4740 - protein, 15 aa, Homo sapiens
  CDR3 for beta chain variable domain of TCR clone 2370 (TRBV7-3, TRBJ2-2)
CASSETGQGTGELFF

SEQ ID NO: 4741 - protein, 14 aa, Homo sapiens
  CDR3 for alpha chain variable domain of TCR clone 2371 (TRAV1-1, TRAJ27)
CAVIYNTNAGKSTF

SEQ ID NO: 4742 - protein, 13 aa, Homo sapiens
  CDR3 for beta chain variable domain of TCR clone 2371 (TRBV12-5, TRBJ1-2)
CASGVRTGNGYTF

SEQ ID NO: 4743 - protein, 14 aa, Homo sapiens
  CDR3 for alpha chain variable domain of TCR clone 2372 (TRAV14/DV4, TRAJ34)
CAMREGRPHRQAHL

SEQ ID NO: 4744 - protein, 14 aa, Homo sapiens
  CDR3 for beta chain variable domain of TCR clone 2372 (TRBV19, TRBJ2-1)
CASPTFVLSGEQFF

SEQ ID NO: 4745 - protein, 13 aa, Homo sapiens
  CDR3 for alpha chain variable domain of TCR clone 2373 (TRAV2, TRAJ40)
CAVVTSGTYKYIF

SEQ ID NO: 4746 - protein, 14 aa, Homo sapiens
  CDR3 for beta chain variable domain of TCR clone 2373 (TRBV19, TRBJ2-1)
CASPTFVLSSEQFF

SEQ ID NO: 4747 - protein, 14 aa, Homo sapiens
  CDR3 for alpha chain variable domain of TCR clone 2374 (TRAV16, TRAJ39)
CALSKNNAGNMLTF

SEQ ID NO: 4748 - protein, 17 aa, Homo sapiens
  CDR3 for beta chain variable domain of TCR clone 2374 (TRBV23-1, TRBJ1-2)
CASSNTGGGLLWLHLRF

SEQ ID NO: 4749 - protein, 17 aa, Homo sapiens
  CDR3 for alpha chain variable domain of TCR clone 2375 (TRAV1-1, TRAJ28)
CAVDPAYSGAGSYQLTF

SEQ ID NO: 4750 - protein, 14 aa, Homo sapiens
  CDR3 for beta chain variable domain of TCR clone 2375 (TRBV19, TRBJ2-1)
CASPTFVLSGEQFF

SEQ ID NO: 4751 - protein, 15 aa, Homo sapiens
  CDR3 for alpha chain variable domain of TCR clone 2376 (TRAV3, TRAJ22)
CAVRDRGGSARQLTF

SEQ ID NO: 4752 - protein, 13 aa, Homo sapiens
  CDR3 for beta chain variable domain of TCR clone 2376 (TRBV20-1, TRBJ1-1)
CSARVGGNTEAFF

SEQ ID NO: 4753 - protein, 12 aa, Homo sapiens
  CDR3 for alpha chain variable domain of TCR clone 2377 (TRAV1-1, TRAJ20)
CAVREDDYKLSF

SEQ ID NO: 4754 - protein, 18 aa, Homo sapiens
  CDR3 for beta chain variable domain of TCR clone 2377 (TRBV20-1, TRBJ2-3)
CSASGLAGGPGTTDTQYF

SEQ ID NO: 4755 - protein, 13 aa, Homo sapiens
  CDR3 for alpha chain variable domain of TCR clone 2378 (TRAV2, TRAJ9)
CAVESTGGFKTIF

SEQ ID NO: 4756 - protein, 15 aa, Homo sapiens
  CDR3 for beta chain variable domain of TCR clone 2378 (TRBV10-3, TRBJ2-1)
CAITFGGGTDNEQFF

SEQ ID NO: 4757 - protein, 15 aa, Homo sapiens
  CDR3 for alpha chain variable domain of TCR clone 2379 (TRAV21, TRAJ53)
CATLNSGGSNYKLTF

SEQ ID NO: 4758 - protein, 16 aa, Homo sapiens
  CDR3 for beta chain variable domain of TCR clone 2379 (TRBV20-1, TRBJ1-4)
CSAPGQGLLTNEKLFF

SEQ ID NO: 4759 - protein, 11 aa, Homo sapiens
  CDR3 for alpha chain variable domain of TCR clone 2380 (TRAV23/DV6, TRAJ48)
CAPRWGEKLTF

SEQ ID NO: 4760 - protein, 14 aa, Homo sapiens
  CDR3 for beta chain variable domain of TCR clone 2380 (TRBV29-1, TRBJ1-3)
CSVADRVVGNTIYF

SEQ ID NO: 4761 - protein, 13 aa, Homo sapiens
  CDR3 for alpha chain variable domain of TCR clone 2381 (TRAV21, TRAJ27)
CAARPGNAGKSTF

SEQ ID NO: 4762 - protein, 13 aa, Homo sapiens
  CDR3 for beta chain variable domain of TCR clone 2381 (TRBV7-3, TRBJ2-7)
CASSQAGGYEQYF

SEQ ID NO: 4763 - protein, 15 aa, Homo sapiens
  CDR3 for alpha chain variable domain of TCR clone 2382 (TRAV3, TRAJ22)
CAVRDRGGSARQLTF

SEQ ID NO: 4764 - protein, 18 aa, Homo sapiens
  CDR3 for beta chain variable domain of TCR clone 2382 (TRBV28, TRBJ2-1)
CASSSTSGRANSYNEQFF

SEQ ID NO: 4765 - protein, 11 aa, Homo sapiens
  CDR3 for alpha chain variable domain of TCR clone 2383 (TRAV21, TRAJ39)
LLVNAGNMLTF

SEQ ID NO: 4766 - protein, 18 aa, Homo sapiens
  CDR3 for beta chain variable domain of TCR clone 2383 (TRBV7-2, TRBJ2-7)
CASSLSGRGLAGGYEQYF

SEQ ID NO: 4767 - protein, 13 aa, Homo sapiens
  CDR3 for alpha chain variable domain of TCR clone 2384 (TRAV29/DV5, TRAJ49)
CAASTNTGNQFYF

SEQ ID NO: 4768 - protein, 13 aa, Homo sapiens
  CDR3 for beta chain variable domain of TCR clone 2384 (TRBV7-2, TRBJ1-4)
CASSLAGLEKLFF

SEQ ID NO: 4769 - protein, 14 aa, Homo sapiens
  CDR3 for alpha chain variable domain of TCR clone 2385 (TRAV35, TRAJ13)
CAGSPSGGYQKVTF

SEQ ID NO: 4770 - protein, 17 aa, Homo sapiens
  CDR3 for beta chain variable domain of TCR clone 2385 (TRBV18, TRBJ1-5)
CQLTTCRVRQNNQPQHF

SEQ ID NO: 4771 - protein, 14 aa, Homo sapiens
  CDR3 for alpha chain variable domain of TCR clone 2386 (TRAV12-1, TRAJ43)
CVVNGRSNNNDMRF

SEQ ID NO: 4772 - protein, 12 aa, Homo sapiens
  CDR3 for beta chain variable domain of TCR clone 2386 (TRBV29-1, TRBJ2-3)
CSVTGGADTQYF

SEQ ID NO: 4773 - protein, 14 aa, Homo sapiens
  CDR3 for alpha chain variable domain of TCR clone 2387 (TRAV12-3, TRAJ15)
CAMIPPQAGTALIF

SEQ ID NO: 4774 - protein, 12 aa, Homo sapiens
  CDR3 for beta chain variable domain of TCR clone 2387 (TRBV11-2, TRBJ2-2)
CASSLGGGELFF

SEQ ID NO: 4775 - protein, 12 aa, Homo sapiens
  CDR3 for alpha chain variable domain of TCR clone 2388 (TRAV12-3, TRAJ17)
CAMTLTGNKLTF

SEQ ID NO: 4776 - protein, 14 aa, Homo sapiens
  CDR3 for beta chain variable domain of TCR clone 2388 (TRBV18, TRBJ2-7)
CASSPRGGAYEQYF

SEQ ID NO: 4777 - protein, 16 aa, Homo sapiens
  CDR3 for alpha chain variable domain of TCR clone 2389 (TRAV30, TRAJ24)
CGTEIVDADSWGKFQF

SEQ ID NO: 4778 - protein, 15 aa, Homo sapiens
  CDR3 for beta chain variable domain of TCR clone 2389 (TRBV12-4, TRBJ2-2)
CASSPNDSGTGELFF

SEQ ID NO: 4779 - protein, 17 aa, Homo sapiens
  CDR3 for alpha chain variable domain of TCR clone 2390 (TRAV26-1, TRAJ46)
IASSESEKKSSGDKLTF

SEQ ID NO: 4780 - protein, 16 aa, Homo sapiens
  CDR3 for beta chain variable domain of TCR clone 2390 (TRBV27, TRBJ2-2)
CASSFRGLVRTGELFF

SEQ ID NO: 4781 - protein, 12 aa, Homo sapiens
  CDR3 for alpha chain variable domain of TCR clone 2391 (TRAV12-3, TRAJ17)
CAMTLTGNKLTF

SEQ ID NO: 4782 - protein, 15 aa, Homo sapiens
  CDR3 for beta chain variable domain of TCR clone 2391 (TRBV6-3, TRBJ2-7)
CASSSPGTVFYEQYF

SEQ ID NO: 4783 - protein, 12 aa, Homo sapiens
  CDR3 for alpha chain variable domain of TCR clone 2392 (TRAV20, TRAJ34)
CAVKDNTDKLIF

SEQ ID NO: 4784 - protein, 14 aa, Homo sapiens
  CDR3 for beta chain variable domain of TCR clone 2392 (TRBV7-9, TRBJ2-7)
CASSRPGGPYEQYF

SEQ ID NO: 4785 - protein, 17 aa, Homo sapiens
  CDR3 for alpha chain variable domain of TCR clone 2393 (TRAV13-1, TRAJ52)
CAAGRNAGGTSYGKLTF

SEQ ID NO: 4786 - protein, 15 aa, Homo sapiens
  CDR3 for beta chain variable domain of TCR clone 2393 (TRBV6-3, TRBJ2-7)
CASSSPGTVFYEQYF

SEQ ID NO: 4787 - protein, 11 aa, Homo sapiens
  CDR3 for alpha chain variable domain of TCR clone 2394 (TRAV12-1, TRAJ30)
CVVNGQDKIIF

SEQ ID NO: 4788 - protein, 15 aa, Homo sapiens
  CDR3 for beta chain variable domain of TCR clone 2394 (TRBV27, TRBJ2-2)
CTSVPANSSPGSCFF

SEQ ID NO: 4789 - protein, 14 aa, Homo sapiens
  CDR3 for alpha chain variable domain of TCR clone 2395 (TRAV38-1, TRAJ40)
CALRPTSGTYKYIF

SEQ ID NO: 4790 - protein, 14 aa, Homo sapiens
  CDR3 for beta chain variable domain of TCR clone 2395 (TRBV5-4, TRBJ1-1)
CASSLDSRRDEAFF

SEQ ID NO: 4791 - protein, 12 aa, Homo sapiens
  CDR3 for alpha chain variable domain of TCR clone 2396 (TRAV12-3, TRAJ17)
CAMTLTGNKLTF

SEQ ID NO: 4792 - protein, 20 aa, Homo sapiens
  CDR3 for beta chain variable domain of TCR clone 2396 (TRBV19, TRBJ2-1)
CASSISRTVTSTRLNNEQFF

SEQ ID NO: 4793 - protein, 14 aa, Homo sapiens
  CDR3 for alpha chain variable domain of TCR clone 2397 (TRAV1-2, TRAJ16)
CAVNRFSDGQKLLF

SEQ ID NO: 4794 - protein, 15 aa, Homo sapiens
  CDR3 for beta chain variable domain of TCR clone 2397 (TRBV5-1, TRBJ2-2)
CASSSQGGNTGELFF

SEQ ID NO: 4795 - protein, 16 aa, Homo sapiens
  CDR3 for alpha chain variable domain of TCR clone 2398 (TRAV3, TRAJ37)
CAVRVRGSGNTGKLIF

SEQ ID NO: 4796 - protein, 13 aa, Homo sapiens
  CDR3 for beta chain variable domain of TCR clone 2398 (TRBV7-9, TRBJ1-2)
CASSLKQNYGYTF

SEQ ID NO: 4797 - protein, 15 aa, Homo sapiens
  CDR3 for alpha chain variable domain of TCR clone 2399 (TRAV12-3, TRAJ48)
CAMNAKNFGNEKLTF

SEQ ID NO: 4798 - protein, 14 aa, Homo sapiens
  CDR3 for beta chain variable domain of TCR clone 2399 (TRBV2, TRBJ1-6)
CASSESRNNSPLHF

SEQ ID NO: 4799 - protein, 14 aa, Homo sapiens
  CDR3 for alpha chain variable domain of TCR clone 2400 (TRAV12-3, TRAJ10)
SHLPLTGGGNKLTF

SEQ ID NO: 4800 - protein, 12 aa, Homo sapiens
  CDR3 for beta chain variable domain of TCR clone 2400 (TRBV29-1, TRBJ1-1)
CSVATPGVEAFF

SEQ ID NO: 4801 - protein, 15 aa, Homo sapiens
  CDR3 for alpha chain variable domain of TCR clone 2401 (TRAV3, TRAJ22)
CAVRDRGGSARQLTF

SEQ ID NO: 4802 - protein, 17 aa, Homo sapiens
  CDR3 for beta chain variable domain of TCR clone 2401 (TRBV13, TRBJ2-3)
CASSLSRVAGGRNTQYF

SEQ ID NO: 4803 - protein, 12 aa, Homo sapiens
  CDR3 for alpha chain variable domain of TCR clone 2402 (TRAV17, TRAJ28)
WDSGAGSYQLTF

SEQ ID NO: 4804 - protein, 13 aa, Homo sapiens
  CDR3 for beta chain variable domain of TCR clone 2402 (TRBV11-3, TRBJ1-1)
CASSRQPNTEAFF

SEQ ID NO: 4805 - protein, 13 aa, Homo sapiens
  CDR3 for alpha chain variable domain of TCR clone 2403 (TRAV17, TRAJ5)
CALRGTGRRALTF

SEQ ID NO: 4806 - protein, 15 aa, Homo sapiens
  CDR3 for beta chain variable domain of TCR clone 2403 (TRBV6-1, TRBJ1-5)
CASSELREGNQPQHF

SEQ ID NO: 4807 - protein, 15 aa, Homo sapiens
  CDR3 for alpha chain variable domain of TCR clone 2404 (TRAV12-2, TRAJ52)
CAVTSGGTSYGKLTF

SEQ ID NO: 4808 - protein, 15 aa, Homo sapiens
  CDR3 for beta chain variable domain of TCR clone 2404 (TRBV7-2, TRBJ2-1)
CASSPGFISGNEQFF

SEQ ID NO: 4809 - protein, 12 aa, Homo sapiens
  CDR3 for alpha chain variable domain of TCR clone 2405 (TRAV17, TRAJ20)
CATDRYDYKLSF

SEQ ID NO: 4810 - protein, 14 aa, Homo sapiens
  CDR3 for beta chain variable domain of TCR clone 2405 (TRBV19, TRBJ2-1)
CASPTFVLSGEQFF

SEQ ID NO: 4811 - protein, 15 aa, Homo sapiens
  CDR3 for alpha chain variable domain of TCR clone 2406 (TRAV23/DV6, TRAJ12)
CAAIDLGAMDSSYKL

SEQ ID NO: 4812 - protein, 12 aa, Homo sapiens
  CDR3 for beta chain variable domain of TCR clone 2406 (TRBV10-3, TRBJ2-2)
CAIRENTGELFF

SEQ ID NO: 4813 - protein, 14 aa, Homo sapiens
  CDR3 for alpha chain variable domain of TCR clone 2407 (TRAV2, TRAJ9)
CAVDPNTGGFKTIF

SEQ ID NO: 4814 - protein, 14 aa, Homo sapiens
  CDR3 for beta chain variable domain of TCR clone 2407 (TRBV7-2, TRBJ2-7)
CASSPKTSFYEQYF

SEQ ID NO: 4815 - protein, 14 aa, Homo sapiens
  CDR3 for alpha chain variable domain of TCR clone 2408 (TRAV2, TRAJ9)
CAVEDRSGGFKTIF

SEQ ID NO: 4816 - protein, 18 aa, Homo sapiens
  CDR3 for beta chain variable domain of TCR clone 2408 (TRBV11-2, TRBJ2-3)
CASSLGGASRGAPNTQYF

SEQ ID NO: 4817 - protein, 15 aa, Homo sapiens
  CDR3 for alpha chain variable domain of TCR clone 2409 (TRAV13-1, TRAJ3)
CAASKLASSASKIIF

SEQ ID NO: 4818 - protein, 16 aa, Homo sapiens
  CDR3 for beta chain variable domain of TCR clone 2409 (TRBV25-1, TRBJ1-5)
CASGAPTVNSNQPQHF

SEQ ID NO: 4819 - protein, 12 aa, Homo sapiens
  CDR3 for alpha chain variable domain of TCR clone 2410 (TRAV13-1, TRAJ15)
CAASQAGTALIF

SEQ ID NO: 4820 - protein, 14 aa, Homo sapiens
  CDR3 for beta chain variable domain of TCR clone 2410 (TRBV19, TRBJ2-1)
CASPTFVLSGEQFF

SEQ ID NO: 4821 - protein, 16 aa, Homo sapiens
  CDR3 for alpha chain variable domain of TCR clone 2411 (TRAV3, TRAJ6)
CAVRDGMGRRKLHTYI

SEQ ID NO: 4822 - protein, 15 aa, Homo sapiens
  CDR3 for beta chain variable domain of TCR clone 2411 (TRBV5-1, TRBJ2-7)
CASSLGDFTTYEQYF

SEQ ID NO: 4823 - protein, 12 aa, Homo sapiens
  CDR3 for alpha chain variable domain of TCR clone 2412 (TRAV35, TRAJ43)
CAGAYNNNDMRF

SEQ ID NO: 4824 - protein, 14 aa, Homo sapiens
  CDR3 for beta chain variable domain of TCR clone 2412 (TRBV2, TRBJ2-2)
CASSWQGATGELFF

SEQ ID NO: 4825 - protein, 11 aa, Homo sapiens
  CDR3 for alpha chain variable domain of TCR clone 2413 (TRAV1-1, TRAJ30)
CAQNRDDKIIF

SEQ ID NO: 4826 - protein, 14 aa, Homo sapiens
  CDR3 for beta chain variable domain of TCR clone 2413 (TRBV7-8, TRBJ2-7)
CASSPGLADYEQYF

SEQ ID NO: 4827 - protein, 12 aa, Homo sapiens
  CDR3 for alpha chain variable domain of TCR clone 2414 (TRAV12-3, TRAJ17)
CAMTLTGNKLTF

SEQ ID NO: 4828 - protein, 15 aa, Homo sapiens
  CDR3 for beta chain variable domain of TCR clone 2414 (TRBV20-1, TRBJ2-7)
CSARDRASGMDEQYF

SEQ ID NO: 4829 - protein, 11 aa, Homo sapiens
  CDR3 for alpha chain variable domain of TCR clone 2415 (TRAV13-1, TRAJ15)
CAATPGTALIF

SEQ ID NO: 4830 - protein, 13 aa, Homo sapiens
  CDR3 for beta chain variable domain of TCR clone 2415 (TRBV7-2, TRBJ2-1)
CASSLGVYNEQFF

SEQ ID NO: 4831 - protein, 14 aa, Homo sapiens
  CDR3 for alpha chain variable domain of TCR clone 2416 (TRAV1-2, TRAJ8)
CAVREDTGFQKLVF

SEQ ID NO: 4832 - protein, 15 aa, Homo sapiens
  CDR3 for beta chain variable domain of TCR clone 2416 (TRBV7-9, TRBJ1-6)
CASSSPGRGNSPLHF

SEQ ID NO: 4833 - protein, 14 aa, Homo sapiens
  CDR3 for alpha chain variable domain of TCR clone 2417 (TRAV12-1, TRAJ17)
CVVNYKAAGNKLTF

SEQ ID NO: 4834 - protein, 15 aa, Homo sapiens
  CDR3 for beta chain variable domain of TCR clone 2417 (TRBV20-1, TRBJ2-7)
CSARDRVSGMDEQYF

SEQ ID NO: 4835 - protein, 16 aa, Homo sapiens
  CDR3 for alpha chain variable domain of TCR clone 2418 (TRAV20, TRAJ53)
CAVRRGSGGSNYKLTF

SEQ ID NO: 4836 - protein, 12 aa, Homo sapiens
  CDR3 for beta chain variable domain of TCR clone 2418 (TRBV29-1, TRBJ2-3)
CSVVLGADTQYF

SEQ ID NO: 4837 - protein, 12 aa, Homo sapiens
  CDR3 for alpha chain variable domain of TCR clone 2419 (TRAV23/DV6, TRAJ30)
CAASKGDDKIIF

SEQ ID NO: 4838 - protein, 15 aa, Homo sapiens
  CDR3 for beta chain variable domain of TCR clone 2419 (TRBV20-1, TRBJ2-7)
CSARDRVSGMDEQYF

SEQ ID NO: 4839 - protein, 16 aa, Homo sapiens
  CDR3 for alpha chain variable domain of TCR clone 2420 (TRAV16, TRAJ4)
CALSRMFSGGYNKLIF

SEQ ID NO: 4840 - protein, 12 aa, Homo sapiens
  CDR3 for beta chain variable domain of TCR clone 2420 (TRBV29-1, TRBJ2-3)
CSVTGGADTQYF

SEQ ID NO: 4841 - protein, 13 aa, Homo sapiens
  CDR3 for alpha chain variable domain of TCR clone 2421 (TRAV3, TRAJ43)
CAVRDTRGGDMRF

SEQ ID NO: 4842 - protein, 15 aa, Homo sapiens
  CDR3 for beta chain variable domain of TCR clone 2421 (TRBV6-5, TRBJ1-5)
CASSYSRRSNQPQHF

SEQ ID NO: 4843 - protein, 14 aa, Homo sapiens
  CDR3 for alpha chain variable domain of TCR clone 2422 (TRAV1-1, TRAJ27)
CAVIYNTNAGKSTF

SEQ ID NO: 4844 - protein, 18 aa, Homo sapiens
  CDR3 for beta chain variable domain of TCR clone 2422 (TRBV7-3, TRBJ2-1)
CASSLTLASGRAMVSSSS

SEQ ID NO: 4845 - protein, 16 aa, Homo sapiens
  CDR3 for alpha chain variable domain of TCR clone 2423 (TRAV13-1, TRAJ48)
CAASIFGNFGNEKLTF

SEQ ID NO: 4846 - protein, 16 aa, Homo sapiens
  CDR3 for beta chain variable domain of TCR clone 2423 (TRBV18, TRBJ1-5)
CASSPYRVEGNQPQHF

SEQ ID NO: 4847 - protein, 16 aa, Homo sapiens
  CDR3 for alpha chain variable domain of TCR clone 2424 (TRAV12-3, TRAJ53)
CAMSAGSGGSNYKLTF

SEQ ID NO: 4848 - protein, 13 aa, Homo sapiens
  CDR3 for beta chain variable domain of TCR clone 2424 (TRBV29-1, TRBJ2-3)
CSVGPRGTDTQYF

SEQ ID NO: 4849 - protein, 14 aa, Homo sapiens
  CDR3 for alpha chain variable domain of TCR clone 2425 (TRAV1-2, TRAJ16)
CAVNRFSDGQKLLF

SEQ ID NO: 4850 - protein, 15 aa, Homo sapiens
  CDR3 for beta chain variable domain of TCR clone 2425 (TRBV11-3, TRBJ2-3)
CASLKDGREGDTQYF

SEQ ID NO: 4851 - protein, 11 aa, Homo sapiens
  CDR3 for alpha chain variable domain of TCR clone 2426 (TRAV17, TRAJ31)
CATDRTARLMF

SEQ ID NO: 4852 - protein, 14 aa, Homo sapiens
  CDR3 for beta chain variable domain of TCR clone 2426 (TRBV4-1, TRBJ2-2)
CASSQAVNTGELFF

SEQ ID NO: 4853 - protein, 14 aa, Homo sapiens
  CDR3 for alpha chain variable domain of TCR clone 2427 (TRAV23/DV6, TRAJ13)
CAAMYSGGYQKVTF

SEQ ID NO: 4854 - protein, 14 aa, Homo sapiens
  CDR3 for beta chain variable domain of TCR clone 2427 (TRBV7-9, TRBJ2-1)
CASSPRDSLYEQFF

SEQ ID NO: 4855 - protein, 21 aa, Homo sapiens
  CDR3 for alpha chain variable domain of TCR clone 2428 (TRAV8-3, TRAJ10)
CAVGHTHGRRKQTHLWDRHSA

SEQ ID NO: 4856 - protein, 10 aa, Homo sapiens
  CDR3 for beta chain variable domain of TCR clone 2428 (TRBV20-1, TRBJ2-5)
CSARFETQYF

SEQ ID NO: 4857 - protein, 12 aa, Homo sapiens
  CDR3 for alpha chain variable domain of TCR clone 2429 (TRAV4, TRAJ21)
CLVGDNFNKFYF

SEQ ID NO: 4858 - protein, 17 aa, Homo sapiens
  CDR3 for beta chain variable domain of TCR clone 2429 (TRBV3-1, TRBJ2-7)
CASSQDLTGLSSYEQYF

SEQ ID NO: 4859 - protein, 12 aa, Homo sapiens
  CDR3 for alpha chain variable domain of TCR clone 2430 (TRAV38-1, TRAJ47)
CAFETYGNKLVF

SEQ ID NO: 4860 - protein, 15 aa, Homo sapiens
  CDR3 for beta chain variable domain of TCR clone 2430 (TRBV5-7, TRBJ2-7)
CASSGGRPVPYEQYF

SEQ ID NO: 4861 - protein, 13 aa, Homo sapiens
  CDR3 for alpha chain variable domain of TCR clone 2431 (TRAV17, TRAJ54)
CAAGIQGAQKLVF

SEQ ID NO: 4862 - protein, 14 aa, Homo sapiens
  CDR3 for beta chain variable domain of TCR clone 2431 (TRBV11-2, TRBJ1-2)
CASSLGTANYGYTF

SEQ ID NO: 4863 - protein, 10 aa, Homo sapiens
  CDR3 for alpha chain variable domain of TCR clone 2432 (TRAV1-2, TRAJ31)
CAFFDARLMF

SEQ ID NO: 4864 - protein, 13 aa, Homo sapiens
  CDR3 for beta chain variable domain of TCR clone 2432 (TRBV7-9, TRBJ1-2)
CASSLKQNYGYTF

SEQ ID NO: 4865 - protein, 12 aa, Homo sapiens
  CDR3 for alpha chain variable domain of TCR clone 2433 (TRAV16, TRAJ21)
CALLGNFNKFYF

SEQ ID NO: 4866 - protein, 15 aa, Homo sapiens
  CDR3 for beta chain variable domain of TCR clone 2433 (TRBV3-1, TRBJ2-2)
CASSQAVRETGELFF

SEQ ID NO: 4867 - protein, 18 aa, Homo sapiens
  CDR3 for alpha chain variable domain of TCR clone 2434 (TRAV13-1, TRAJ52)
CAAKNPNAGGTSYGKLTF

SEQ ID NO: 4868 - protein, 15 aa, Homo sapiens
  CDR3 for beta chain variable domain of TCR clone 2434 (TRBV28, TRBJ2-1)
CASSIIAGGRSEQFF

SEQ ID NO: 4869 - protein, 13 aa, Homo sapiens
  CDR3 for alpha chain variable domain of TCR clone 2435 (TRAV20, TRAJ56)
CAVQAGANSKLTF

SEQ ID NO: 4870 - protein, 14 aa, Homo sapiens
  CDR3 for beta chain variable domain of TCR clone 2435 (TRBV28, TRBJ1-1)
CASSPRTRWAEAFF

SEQ ID NO: 4871 - protein, 14 aa, Homo sapiens
  CDR3 for alpha chain variable domain of TCR clone 2436 (TRAV17, TRAJ16)
CATADFSDGQKLLF

SEQ ID NO: 4872 - protein, 15 aa, Homo sapiens
  CDR3 for beta chain variable domain of TCR clone 2436 (TRBV6-5, TRBJ2-1)
CASSYDAGAGNEQFF

SEQ ID NO: 4873 - protein, 14 aa, Homo sapiens
  CDR3 for alpha chain variable domain of TCR clone 2437 (TRAV16, TRAJ26)
CALSSANYGQNFVF

SEQ ID NO: 4874 - protein, 12 aa, Homo sapiens
  CDR3 for beta chain variable domain of TCR clone 2437 (TRBV6-5, TRBJ2-2)
CASRTGTGELFF

SEQ ID NO: 4875 - protein, 15 aa, Homo sapiens
  CDR3 for alpha chain variable domain of TCR clone 2438 (TRAV1-2, TRAJ35)
CAVRDPGGFGNVLHC

SEQ ID NO: 4876 - protein, 14 aa, Homo sapiens
  CDR3 for beta chain variable domain of TCR clone 2438 (TRBV5-1, TRBJ2-1)
CASSLDDRFDEQFF

SEQ ID NO: 4877 - protein, 16 aa, Homo sapiens
  CDR3 for alpha chain variable domain of TCR clone 2439 (TRAV2, TRAJ20)
TTVLWSFRSNDYKLSF

SEQ ID NO: 4878 - protein, 12 aa, Homo sapiens
  CDR3 for beta chain variable domain of TCR clone 2439 (TRBV7-6, TRBJ2-3)
CASSTGTDTQYF

SEQ ID NO: 4879 - protein, 14 aa, Homo sapiens
  CDR3 for alpha chain variable domain of TCR clone 2440 (TRAV1-2, TRAJ8)
CAVREDTGFQKLVF

SEQ ID NO: 4880 - protein, 15 aa, Homo sapiens
  CDR3 for beta chain variable domain of TCR clone 2440 (TRBV7-9, TRBJ1-4)
CASSARTGGNEKLFF

SEQ ID NO: 4881 - protein, 15 aa, Homo sapiens
  CDR3 for alpha chain variable domain of TCR clone 2441 (TRAV20, TRAJ43)
CAVQAGKSSNNDMRF

SEQ ID NO: 4882 - protein, 13 aa, Homo sapiens
  CDR3 for beta chain variable domain of TCR clone 2441 (TRBV27, TRBJ1-1)
CASSLSIGAEAFF

SEQ ID NO: 4883 - protein, 14 aa, Homo sapiens
  CDR3 for alpha chain variable domain of TCR clone 2442 (TRAV2, TRAJ9)
CAVEDRSGGFKTIF

SEQ ID NO: 4884 - protein, 19 aa, Homo sapiens
  CDR3 for beta chain variable domain of TCR clone 2442 (TRBV25-1, TRBJ2-2)
CAILVYRVDRGRKTGELFF

SEQ ID NO: 4885 - protein, 17 aa, Homo sapiens
  CDR3 for alpha chain variable domain of TCR clone 2443 (TRAV36/DV7, TRAJ52)
CAVAQRAGGTSYGKLTF

SEQ ID NO: 4886 - protein, 14 aa, Homo sapiens
  CDR3 for beta chain variable domain of TCR clone 2443 (TRBV6-1, TRBJ1-3)
CASVQGGGGNTIYF

SEQ ID NO: 4887 - protein, 14 aa, Homo sapiens
  CDR3 for alpha chain variable domain of TCR clone 2444 (TRAV27, TRAJ44)
CAASFTGTASKLTF

SEQ ID NO: 4888 - protein, 13 aa, Homo sapiens
  CDR3 for beta chain variable domain of TCR clone 2444 (TRBV27, TRBJ2-3)
CATSRGGLYTQYF

SEQ ID NO: 4889 - protein, 17 aa, Homo sapiens
  CDR3 for alpha chain variable domain of TCR clone 2445 (TRAV3, TRAJ6)
CAARDGPRAGGSYIPTF

SEQ ID NO: 4890 - protein, 14 aa, Homo sapiens
  CDR3 for beta chain variable domain of TCR clone 2445 (TRBV7-2, TRBJ2-7)
CASSPKTSFYEQYF

SEQ ID NO: 4891 - protein, 13 aa, Homo sapiens
  CDR3 for alpha chain variable domain of TCR clone 2446 (TRAV3, TRAJ21)
CAVREPDFNKFYF

SEQ ID NO: 4892 - protein, 13 aa, Homo sapiens
  CDR3 for beta chain variable domain of TCR clone 2446 (TRBV20-1, TRBJ1-1)
CSARGGGNTEAFF

SEQ ID NO: 4893 - protein, 14 aa, Homo sapiens
  CDR3 for alpha chain variable domain of TCR clone 2447 (TRAV12-1, TRAJ23)
CVVMIYNQGGKLIF

SEQ ID NO: 4894 - protein, 23 aa, Homo sapiens
  CDR3 for beta chain variable domain of TCR clone 2447 (TRBV7-3, TRBJ1-6)
CASSLTSRDEASDPSSYNSPLHF

SEQ ID NO: 4895 - protein, 14 aa, Homo sapiens
  CDR3 for alpha chain variable domain of TCR clone 2448 (TRAV20, TRAJ22)
CAVQVSGSARQLTF

SEQ ID NO: 4896 - protein, 13 aa, Homo sapiens
  CDR3 for beta chain variable domain of TCR clone 2448 (TRBV20-1, TRBJ2-5)
CSAREGGKETQYF

SEQ ID NO: 4897 - protein, 10 aa, Homo sapiens
  CDR3 for alpha chain variable domain of TCR clone 2449 (TRAV38-1, TRAJ34)
CAFMDDKLIF

SEQ ID NO: 4898 - protein, 14 aa, Homo sapiens
  CDR3 for beta chain variable domain of TCR clone 2449 (TRBV7-2, TRBJ2-2)
CASSLNSNTGELFF

SEQ ID NO: 4899 - protein, 14 aa, Homo sapiens
  CDR3 for alpha chain variable domain of TCR clone 2450 (TRAV17, TRAJ45)
CATDARGGADGLTF

SEQ ID NO: 4900 - protein, 11 aa, Homo sapiens
  CDR3 for beta chain variable domain of TCR clone 2450 (TRBV28, TRBJ2-5)
CATGNQETQYF

SEQ ID NO: 4901 - protein, 14 aa, Homo sapiens
  CDR3 for alpha chain variable domain of TCR clone 2451 (TRAV1-1, TRAJ33)
CAVRPEDSNYQLIW

SEQ ID NO: 4902 - protein, 15 aa, Homo sapiens
  CDR3 for beta chain variable domain of TCR clone 2451 (TRBV20-1, TRBJ2-1)
CSARSPGGPGNEQFF

SEQ ID NO: 4903 - protein, 16 aa, Homo sapiens
  CDR3 for alpha chain variable domain of TCR clone 2452 (TRAV12-3, TRAJ28)
CAMRANSGAGSYQLTF

SEQ ID NO: 4904 - protein, 16 aa, Homo sapiens
  CDR3 for beta chain variable domain of TCR clone 2452 (TRBV7-2, TRBJ1-3)
CASSRLEASSGNTIYF

SEQ ID NO: 4905 - protein, 14 aa, Homo sapiens
  CDR3 for alpha chain variable domain of TCR clone 2453 (TRAV13-1, TRAJ39)
CAASKNNAGNMLTF

SEQ ID NO: 4906 - protein, 15 aa, Homo sapiens
  CDR3 for beta chain variable domain of TCR clone 2453 (TRBV7-9, TRBJ1-6)
CASSSPGRGNSPLHF

SEQ ID NO: 4907 - protein, 16 aa, Homo sapiens
  CDR3 for alpha chain variable domain of TCR clone 2454 (TRAV3, TRAJ37)
CAVRPHGSGNTGKLIF

SEQ ID NO: 4908 - protein, 17 aa, Homo sapiens
  CDR3 for beta chain variable domain of TCR clone 2454 (TRBV20-1, TRBJ2-1)
CSASSSGLAGSYNEQFF

SEQ ID NO: 4909 - protein, 16 aa, Homo sapiens
  CDR3 for alpha chain variable domain of TCR clone 2455 (TRAV17, TRAJ17)
CATALQEEAAGNKLTF

SEQ ID NO: 4910 - protein, 12 aa, Homo sapiens
  CDR3 for beta chain variable domain of TCR clone 2455 (TRBV4-2, TRBJ2-5)
CASGGAQETQYF

SEQ ID NO: 4911 - protein, 14 aa, Homo sapiens
  CDR3 for alpha chain variable domain of TCR clone 2456 (TRAV12-2, TRAJ17)
CAVLFKAAGNKLTF

SEQ ID NO: 4912 - protein, 14 aa, Homo sapiens
  CDR3 for beta chain variable domain of TCR clone 2456 (TRBV7-8, TRBJ2-5)
CASSATGGQETQYF

SEQ ID NO: 4913 - protein, 19 aa, Homo sapiens
  CDR3 for alpha chain variable domain of TCR clone 2457 (TRAV26-1, TRAJ52)
CIVRVANNAGGTSYGKLTF

SEQ ID NO: 4914 - protein, 14 aa, Homo sapiens
  CDR3 for beta chain variable domain of TCR clone 2457 (TRBV19, TRBJ1-2)
CASSIGAGSYGYTF

SEQ ID NO: 4915 - protein, 12 aa, Homo sapiens
  CDR3 for alpha chain variable domain of TCR clone 2458 (TRAV26-1, TRAJ43)
CIVRGNNNDMRF

SEQ ID NO: 4916 - protein, 13 aa, Homo sapiens
  CDR3 for beta chain variable domain of TCR clone 2458 (TRBV20-1, TRBJ2-3)
CSAIYPGADTQYF

SEQ ID NO: 4917 - protein, 14 aa, Homo sapiens
  CDR3 for alpha chain variable domain of TCR clone 2459 (TRAV8-1, TRAJ34)
CAVITTYNTDKLIF

SEQ ID NO: 4918 - protein, 14 aa, Homo sapiens
  CDR3 for beta chain variable domain of TCR clone 2459 (TRBV11-3, TRBJ1-3)
CASSHNGQGNTIYF

SEQ ID NO: 4919 - protein, 15 aa, Homo sapiens
  CDR3 for alpha chain variable domain of TCR clone 2460 (TRAV38-2/DV8, TRAJ45)
CAYWDSGGGADGLTF

SEQ ID NO: 4920 - protein, 14 aa, Homo sapiens
  CDR3 for beta chain variable domain of TCR clone 2460 (TRBV7-2, TRBJ2-7)
CASRSQGAAYEQYF

SEQ ID NO: 4921 - protein, 12 aa, Homo sapiens
  CDR3 for alpha chain variable domain of TCR clone 2461 (TRAV1-1, TRAJ15)
CAVGQAGTALIF

SEQ ID NO: 4922 - protein, 16 aa, Homo sapiens
  CDR3 for beta chain variable domain of TCR clone 2461 (TRBV12-4, TRBJ2-7)
CASSPEGQGSSYEQYF

SEQ ID NO: 4923 - protein, 14 aa, Homo sapiens
  CDR3 for alpha chain variable domain of TCR clone 2462 (TRAV26-1, TRAJ38)
CIADNAGNNRKLIW

SEQ ID NO: 4924 - protein, 13 aa, Homo sapiens
  CDR3 for beta chain variable domain of TCR clone 2462 (TRBV15, TRBJ1-6)
CATSGGLNSPLHF

SEQ ID NO: 4925 - protein, 17 aa, Homo sapiens
  CDR3 for alpha chain variable domain of TCR clone 2463 (TRAV3, TRAJ6)
CAVRDGPRAGGSYIPTF

SEQ ID NO: 4926 - protein, 15 aa, Homo sapiens
  CDR3 for beta chain variable domain of TCR clone 2463 (TRBV11-3, TRBJ2-7)
CASSPGPASSYEQYF

SEQ ID NO: 4927 - protein, 14 aa, Homo sapiens
  CDR3 for alpha chain variable domain of TCR clone 2464 (TRAV1-2, TRAJ8)
CAVREDTGFQKLVF

SEQ ID NO: 4928 - protein, 17 aa, Homo sapiens
  CDR3 for beta chain variable domain of TCR clone 2464 (TRBV13, TRBJ2-3)
CASSLSRVAGGRNTQYF

SEQ ID NO: 4929 - protein, 20 aa, Homo sapiens
  CDR3 for alpha chain variable domain of TCR clone 2465 (TRAV1-1, TRAJ39)
CLLLLRCESSAYNAGNMLTF

SEQ ID NO: 4930 - protein, 13 aa, Homo sapiens
  CDR3 for beta chain variable domain of TCR clone 2465 (TRBV12-4, TRBJ1-5)
CASSPDRAQPQHF

SEQ ID NO: 4931 - protein, 12 aa, Homo sapiens
  CDR3 for alpha chain variable domain of TCR clone 2466 (TRAV12-2, TRAJ44)
CADTGTASKLTF

SEQ ID NO: 4932 - protein, 17 aa, Homo sapiens
  CDR3 for beta chain variable domain of TCR clone 2466 (TRBV20-1, TRBJ1-1)
CSARGTGGSYGNTGAFF

SEQ ID NO: 4933 - protein, 14 aa, Homo sapiens
  CDR3 for alpha chain variable domain of TCR clone 2467 (TRAV1-2, TRAJ8)
CAVREDTGFQKLVF

SEQ ID NO: 4934 - protein, 13 aa, Homo sapiens
  CDR3 for beta chain variable domain of TCR clone 2467 (TRBV12-4, TRBJ1-5)
CASSPDRAQPQHF

SEQ ID NO: 4935 - protein, 11 aa, Homo sapiens
  CDR3 for alpha chain variable domain of TCR clone 2468 (TRAV17, TRAJ39)
CATGAGNMLTF

SEQ ID NO: 4936 - protein, 16 aa, Homo sapiens
  CDR3 for beta chain variable domain of TCR clone 2468 (TRBV5-1, TRBJ2-1)
CASSFGVSGSYNEQFF

SEQ ID NO: 4937 - protein, 14 aa, Homo sapiens
  CDR3 for alpha chain variable domain of TCR clone 2469 (TRAV4, TRAJ9)
CLVGSGTGGFKTIF

SEQ ID NO: 4938 - protein, 14 aa, Homo sapiens
  CDR3 for beta chain variable domain of TCR clone 2469 (TRBV7-9, TRBJ2-4)
CASSLAMGGNIQYF

SEQ ID NO: 4939 - protein, 13 aa, Homo sapiens
  CDR3 for alpha chain variable domain of TCR clone 2470 (TRAV1-2, TRAJ9)
CAALNTGGFKTIF

SEQ ID NO: 4940 - protein, 15 aa, Homo sapiens
  CDR3 for beta chain variable domain of TCR clone 2470 (TRBV19, TRBJ1-1)
CASTSGQIQNTEAFF

SEQ ID NO: 4941 - protein, 15 aa, Homo sapiens
  CDR3 for alpha chain variable domain of TCR clone 2471 (TRAV20, TRAJ23)
CAVQAVRNQGGKLIF

SEQ ID NO: 4942 - protein, 16 aa, Homo sapiens
  CDR3 for beta chain variable domain of TCR clone 2471 (TRBV27, TRBJ2-7)
CASSKQGRGWAYEQYF

SEQ ID NO: 4943 - protein, 13 aa, Homo sapiens
  CDR3 for alpha chain variable domain of TCR clone 2472 (TRAV12-2, TRAJ7)
CAVNLYGNNRLAF

SEQ ID NO: 4944 - protein, 14 aa, Homo sapiens
  CDR3 for beta chain variable domain of TCR clone 2472 (TRBV25-1, TRBJ1-2)
CASSEATGPYGYTF

SEQ ID NO: 4945 - protein, 16 aa, Homo sapiens
  CDR3 for alpha chain variable domain of TCR clone 2473 (TRAV12-3, TRAJ58)
CAMTDTEETSGSRLTF

SEQ ID NO: 4946 - protein, 22 aa, Homo sapiens
  CDR3 for beta chain variable domain of TCR clone 2473 (TRBV23-1, TRBJ2-7)
CASSRRLDSGQGYVGGGYEQYF

SEQ ID NO: 4947 - protein, 13 aa, Homo sapiens
  CDR3 for alpha chain variable domain of TCR clone 2474 (TRAV12-3, TRAJ9)
CAMRNTGGFKTIF

SEQ ID NO: 4948 - protein, 15 aa, Homo sapiens
  CDR3 for beta chain variable domain of TCR clone 2474 (TRBV20-1, TRBJ2-7)
CSARDRVSGMDEQYF

SEQ ID NO: 4949 - protein, 15 aa, Homo sapiens
  CDR3 for alpha chain variable domain of TCR clone 2475 (TRAV2, TRAJ11)
CAVGGRNSGYSTLTF

SEQ ID NO: 4950 - protein, 14 aa, Homo sapiens
  CDR3 for beta chain variable domain of TCR clone 2475 (TRBV4-1, TRBJ2-2)
CASSQAVNTGELFF

SEQ ID NO: 4951 - protein, 13 aa, Homo sapiens
  CDR3 for alpha chain variable domain of TCR clone 2476 (TRAV35, TRAJ48)
CAGHEFGNEKLTF

SEQ ID NO: 4952 - protein, 13 aa, Homo sapiens
  CDR3 for beta chain variable domain of TCR clone 2476 (TRBV7-2, TRBJ1-6)
CASSLVGSSPLHF

SEQ ID NO: 4953 - protein, 14 aa, Homo sapiens
  CDR3 for alpha chain variable domain of TCR clone 2477 (TRAV26-1, TRAJ21)
CIAHTTSTNFTLDL

SEQ ID NO: 4954 - protein, 15 aa, Homo sapiens
  CDR3 for beta chain variable domain of TCR clone 2477 (TRBV20-1, TRBJ2-7)
CSARDRVSGMDEQYF

SEQ ID NO: 4955 - protein, 13 aa, Homo sapiens
  CDR3 for alpha chain variable domain of TCR clone 2478 (TRAV1-2, TRAJ26)
CAVRPNYGQNFVF

SEQ ID NO: 4956 - protein, 14 aa, Homo sapiens
  CDR3 for beta chain variable domain of TCR clone 2478 (TRBV4-1, TRBJ2-5)
CASSQDLALETQYF

SEQ ID NO: 4957 - protein, 14 aa, Homo sapiens
  CDR3 for alpha chain variable domain of TCR clone 2479 (TRAV1-2, TRAJ16)
CAVNRFSDGQKLLF

SEQ ID NO: 4958 - protein, 14 aa, Homo sapiens
  CDR3 for beta chain variable domain of TCR clone 2479 (TRBV12-4, TRBJ1-1)
CASSLGTGGTEAFF

SEQ ID NO: 4959 - protein, 14 aa, Homo sapiens
  CDR3 for alpha chain variable domain of TCR clone 2480 (TRAV12-3, TRAJ10)
SHLPLTGGGNKLTF

SEQ ID NO: 4960 - protein, 16 aa, Homo sapiens
  CDR3 for beta chain variable domain of TCR clone 2480 (TRBV19, TRBJ1-1)
CASRFGGPVTGTEAFF

SEQ ID NO: 4961 - protein, 12 aa, Homo sapiens
  CDR3 for alpha chain variable domain of TCR clone 2481 (TRAV21, TRAJ49)
CAVSWTGNQFYF

SEQ ID NO: 4962 - protein, 18 aa, Homo sapiens
  CDR3 for beta chain variable domain of TCR clone 2481 (TRBV7-8, TRBJ2-1)
CASSPAEGLAGGLNEQFF

SEQ ID NO: 4963 - protein, 15 aa, Homo sapiens
  CDR3 for alpha chain variable domain of TCR clone 2482 (TRAV8-6, TRAJ26)
CAVSDQSPGGQNFVF

SEQ ID NO: 4964 - protein, 13 aa, Homo sapiens
  CDR3 for beta chain variable domain of TCR clone 2482 (TRBV27, TRBJ2-7)
CASSLRHRYEQYF

SEQ ID NO: 4965 - protein, 16 aa, Homo sapiens
  CDR3 for alpha chain variable domain of TCR clone 2483 (TRAV22, TRAJ45)
CAVERGKRGGADGLTF

SEQ ID NO: 4966 - protein, 11 aa, Homo sapiens
  CDR3 for beta chain variable domain of TCR clone 2483 (TRBV29-1, TRBJ2-5)
CSEDRTGTQYF

SEQ ID NO: 4967 - protein, 17 aa, Homo sapiens
  CDR3 for alpha chain variable domain of TCR clone 2484 (TRAV3, TRAJ42)
CAVRDRDYGGSQGNLIF

SEQ ID NO: 4968 - protein, 15 aa, Homo sapiens
  CDR3 for beta chain variable domain of TCR clone 2484 (TRBV3-1, TRBJ2-1)
CASSQVVDDGEEQFF

SEQ ID NO: 4969 - protein, 14 aa, Homo sapiens
  CDR3 for alpha chain variable domain of TCR clone 2485 (TRAV1-2, TRAJ8)
CAVREDTGFQKLVF

SEQ ID NO: 4970 - protein, 16 aa, Homo sapiens
  CDR3 for beta chain variable domain of TCR clone 2485 (TRBV4-1, TRBJ1-4)
CASSQDLRRGGEKLFF

SEQ ID NO: 4971 - protein, 15 aa, Homo sapiens
  CDR3 for alpha chain variable domain of TCR clone 2486 (TRAV17, TRAJ57)
CATGPSQGGSEKLVF

SEQ ID NO: 4972 - protein, 15 aa, Homo sapiens
  CDR3 for beta chain variable domain of TCR clone 2486 (TRBV6-3, TRBJ2-7)
CASSSPGTVFYEQYF

SEQ ID NO: 4973 - protein, 13 aa, Homo sapiens
  CDR3 for alpha chain variable domain of TCR clone 2487 (TRAV12-2, TRAJ40)
CAVKRTGTYKYIF

SEQ ID NO: 4974 - protein, 15 aa, Homo sapiens
  CDR3 for beta chain variable domain of TCR clone 2487 (TRBV12-4, TRBJ1-2)
CASSPITGGGYGYTF

SEQ ID NO: 4975 - protein, 12 aa, Homo sapiens
  CDR3 for alpha chain variable domain of TCR clone 2488 (TRAV12-3, TRAJ17)
CAMTLTGNKLTF

SEQ ID NO: 4976 - protein, 16 aa, Homo sapiens
  CDR3 for beta chain variable domain of TCR clone 2488 (TRBV20-1, TRBJ1-4)
CSAPGQGLLTNEKLFF

SEQ ID NO: 4977 - protein, 11 aa, Homo sapiens
  CDR3 for alpha chain variable domain of TCR clone 2489 (TRAV12-2, TRAJ36)
CAVDGANNLFF

SEQ ID NO: 4978 - protein, 13 aa, Homo sapiens
  CDR3 for beta chain variable domain of TCR clone 2489 (TRBV28, TRBJ2-5)
CAGVSRGEETQYF

SEQ ID NO: 4979 - protein, 12 aa, Homo sapiens
  CDR3 for alpha chain variable domain of TCR clone 2490 (TRAV1-2, TRAJ29)
CAVPSGNTPLVF

SEQ ID NO: 4980 - protein, 14 aa, Homo sapiens
  CDR3 for beta chain variable domain of TCR clone 2490 (TRBV18, TRBJ2-5)
CASSPGVSQETQYF

SEQ ID NO: 4981 - protein, 11 aa, Homo sapiens
  CDR3 for alpha chain variable domain of TCR clone 2491 (TRAV2, TRAJ13)
CASGGYQKVTF

SEQ ID NO: 4982 - protein, 15 aa, Homo sapiens
  CDR3 for beta chain variable domain of TCR clone 2491 (TRBV28, TRBJ1-3)
CASSMGWASGNTIYF

SEQ ID NO: 4983 - protein, 12 aa, Homo sapiens
  CDR3 for alpha chain variable domain of TCR clone 2492 (TRAV12-2, TRAJ43)
CAVNVNNNDMRF

SEQ ID NO: 4984 - protein, 14 aa, Homo sapiens
  CDR3 for beta chain variable domain of TCR clone 2492 (TRBV25-1, TRBJ2-2)
CASSELGLPGELFF

SEQ ID NO: 4985 - protein, 15 aa, Homo sapiens
  CDR3 for alpha chain variable domain of TCR clone 2493 (TRAV8-3, TRAJ40)
CAAPSLGSGTYRYIF

SEQ ID NO: 4986 - protein, 16 aa, Homo sapiens
  CDR3 for beta chain variable domain of TCR clone 2493 (TRBV7-3, TRBJ2-3)
CASSLSGYRPEDTQYF

SEQ ID NO: 4987 - protein, 14 aa, Homo sapiens
  CDR3 for alpha chain variable domain of TCR clone 2494 (TRAV1-2, TRAJ8)
CAVREDTGFQKLVF

SEQ ID NO: 4988 - protein, 14 aa, Homo sapiens
  CDR3 for beta chain variable domain of TCR clone 2494 (TRBV7-9, TRBJ1-1)
CASSLGGANTEAFF

SEQ ID NO: 4989 - protein, 13 aa, Homo sapiens
  CDR3 for alpha chain variable domain of TCR clone 2495 (TRAV2, TRAJ29)
CAVYSSGNTPLVF

SEQ ID NO: 4990 - protein, 14 aa, Homo sapiens
  CDR3 for beta chain variable domain of TCR clone 2495 (TRBV7-9, TRBJ1-1)
CASSLGGLKTEAFF

SEQ ID NO: 4991 - protein, 13 aa, Homo sapiens
  CDR3 for alpha chain variable domain of TCR clone 2496 (TRAV13-1, TRAJ17)
CAADGAAGNKLTF

SEQ ID NO: 4992 - protein, 14 aa, Homo sapiens
  CDR3 for beta chain variable domain of TCR clone 2496 (TRBV11-2, TRBJ1-3)
CASSLTQGRNTIYF

SEQ ID NO: 4993 - protein, 18 aa, Homo sapiens
  CDR3 for alpha chain variable domain of TCR clone 2497 (TRAV26-1, TRAJ56)
CIVRVASRVTGANSKLTF

SEQ ID NO: 4994 - protein, 15 aa, Homo sapiens
  CDR3 for beta chain variable domain of TCR clone 2497 (TRBV7-9, TRBJ2-5)
CASSDTGRGRETQYF

SEQ ID NO: 4995 - protein, 20 aa, Homo sapiens
  CDR3 for alpha chain variable domain of TCR clone 2498 (TRAV21, TRAJ22)
SLVTQPPTLKSSGSARQLTF

SEQ ID NO: 4996 - protein, 16 aa, Homo sapiens
  CDR3 for beta chain variable domain of TCR clone 2498 (TRBV7-3, TRBJ2-2)
CASSLKRGTLSGELFF

SEQ ID NO: 4997 - protein, 11 aa, Homo sapiens
  CDR3 for alpha chain variable domain of TCR clone 2499 (TRAV21, TRAJ34)
CAPLDTDKLIF

SEQ ID NO: 4998 - protein, 16 aa, Homo sapiens
  CDR3 for beta chain variable domain of TCR clone 2499 (TRBV5-1, TRBJ2-3)
CASSLAGDRGTDTQYF

SEQ ID NO: 4999 - protein, 14 aa, Homo sapiens
  CDR3 for alpha chain variable domain of TCR clone 2500 (TRAV12-2, TRAJ13)
CAVKKTGGYQKVTF

SEQ ID NO: 5000 - protein, 15 aa, Homo sapiens
  CDR3 for beta chain variable domain of TCR clone 2500 (TRBV19, TRBJ1-6)
CASSTQGAVGSPLHF

SEQ ID NO: 5001 - protein, 12 aa, Homo sapiens
  CDR3 for alpha chain variable domain of TCR clone 2501 (TRAV12-3, TRAJ17)
CAMALTGNKLTF

SEQ ID NO: 5002 - protein, 15 aa, Homo sapiens
  CDR3 for beta chain variable domain of TCR clone 2501 (TRBV20-1, TRBJ2-7)
CSARDRVSGMDEQYF

SEQ ID NO: 5003 - protein, 14 aa, Homo sapiens
  CDR3 for alpha chain variable domain of TCR clone 2502 (TRAV12-2, TRAJ40)
CAVKIPSGTYKYIF

SEQ ID NO: 5004 - protein, 12 aa, Homo sapiens
  CDR3 for beta chain variable domain of TCR clone 2502 (TRBV11-2, TRBJ2-1)
CASSPGNNEQFF

SEQ ID NO: 5005 - protein, 13 aa, Homo sapiens
  CDR3 for alpha chain variable domain of TCR clone 2503 (TRAV26-1, TRAJ48)
CIVRVVGDEKLTF

SEQ ID NO: 5006 - protein, 17 aa, Homo sapiens
  CDR3 for beta chain variable domain of TCR clone 2503 (TRBV7-3, TRBJ2-2)
CASSLSGTSGGTGELFF

SEQ ID NO: 5007 - protein, 12 aa, Homo sapiens
  CDR3 for alpha chain variable domain of TCR clone 2504 (TRAV12-3, TRAJ17)
CAMTPTGNKLTF

SEQ ID NO: 5008 - protein, 15 aa, Homo sapiens
  CDR3 for beta chain variable domain of TCR clone 2504 (TRBV20-1, TRBJ2-7)
CSARDRVSGMDEQYF

SEQ ID NO: 5009 - protein, 13 aa, Homo sapiens
  CDR3 for alpha chain variable domain of TCR clone 2505 (TRAV8-1, TRAJ13)
CAVSKGGYQKVTF

SEQ ID NO: 5010 - protein, 18 aa, Homo sapiens
  CDR3 for beta chain variable domain of TCR clone 2505 (TRBV11-2, TRBJ2-7)
CASSWRTVQTGQSYEQYF

SEQ ID NO: 5011 - protein, 10 aa, Homo sapiens
  CDR3 for alpha chain variable domain of TCR clone 2506 (TRAV25, TRAJ20)
CAVNDYKLSF

SEQ ID NO: 5012 - protein, 13 aa, Homo sapiens
  CDR3 for beta chain variable domain of TCR clone 2506 (TRBV6-3, TRBJ2-7)
CASSFSGGYEQYF

SEQ ID NO: 5013 - protein, 12 aa, Homo sapiens
  CDR3 for alpha chain variable domain of TCR clone 2507 (TRAV12-3, TRAJ17)
CAMTLTGNKLTF

SEQ ID NO: 5014 - protein, 16 aa, Homo sapiens
  CDR3 for beta chain variable domain of TCR clone 2507 (TRBV13, TRBJ2-2)
CASSPRTGEHTGELFF

SEQ ID NO: 5015 - protein, 14 aa, Homo sapiens
  CDR3 for alpha chain variable domain of TCR clone 2508 (TRAV8-3, TRAJ31)
CAVGRGLNNARLMF

SEQ ID NO: 5016 - protein, 15 aa, Homo sapiens
  CDR3 for beta chain variable domain of TCR clone 2508 (TRBV7-2, TRBJ2-2)
CASSLAGGLTGELFF

SEQ ID NO: 5017 - protein, 14 aa, Homo sapiens
  CDR3 for alpha chain variable domain of TCR clone 2509 (TRAV23/DV6, TRAJ13)
CAASETGGYQKVTF

SEQ ID NO: 5018 - protein, 16 aa, Homo sapiens
  CDR3 for beta chain variable domain of TCR clone 2509 (TRBV5-1, TRBJ1-3)
CASSPWAPSSGNTIYF

SEQ ID NO: 5019 - protein, 13 aa, Homo sapiens
  CDR3 for alpha chain variable domain of TCR clone 2510 (TRAV13-1, TRAJ43)
CAASLSNNNDMRF

SEQ ID NO: 5020 - protein, 14 aa, Homo sapiens
  CDR3 for beta chain variable domain of TCR clone 2510 (TRBV5-1, TRBJ2-5)
CASSLAGKQETQYF

SEQ ID NO: 5021 - protein, 15 aa, Homo sapiens
  CDR3 for alpha chain variable domain of TCR clone 2511 (TRAV12-2, TRAJ53)
CAVNGGGGSNYKLTF

SEQ ID NO: 5022 - protein, 12 aa, Homo sapiens
  CDR3 for beta chain variable domain of TCR clone 2511 (TRBV7-6, TRBJ2-5)
CASSLSQETQYF

SEQ ID NO: 5023 - protein, 13 aa, Homo sapiens
  CDR3 for alpha chain variable domain of TCR clone 2512 (TRAV21, TRAJ10)
CAVPTGGGNKLTF

SEQ ID NO: 5024 - protein, 22 aa, Homo sapiens
  CDR3 for beta chain variable domain of TCR clone 2512 (TRBV19, TRBJ2-1)
CASSVRDRVTGTSGRIYNEQFF

SEQ ID NO: 5025 - protein, 16 aa, Homo sapiens
  CDR3 for alpha chain variable domain of TCR clone 2513 (TRAV3, TRAJ37)
CAVRPHGSGNTGKLIF

SEQ ID NO: 5026 - protein, 15 aa, Homo sapiens
  CDR3 for beta chain variable domain of TCR clone 2513 (TRBV20-1, TRBJ2-7)
CSARDRVSGMDEQYF

SEQ ID NO: 5027 - protein, 16 aa, Homo sapiens
  CDR3 for alpha chain variable domain of TCR clone 2514 (TRAV38-1, TRAJ45)
CAFMKGSGGGADGLTF

SEQ ID NO: 5028 - protein, 15 aa, Homo sapiens
  CDR3 for beta chain variable domain of TCR clone 2514 (TRBV20-1, TRBJ2-7)
CSAREGRDSLYEQYF

SEQ ID NO: 5029 - protein, 11 aa, Homo sapiens
  CDR3 for alpha chain variable domain of TCR clone 2515 (TRAV17, TRAJ49)
CATDAGNQFYF

SEQ ID NO: 5030 - protein, 16 aa, Homo sapiens
  CDR3 for beta chain variable domain of TCR clone 2515 (TRBV7-2, TRBJ1-2)
CASSPTSGTSLGGYTF

SEQ ID NO: 5031 - protein, 17 aa, Homo sapiens
  CDR3 for alpha chain variable domain of TCR clone 2516 (TRAV12-3, TRAJ18)
CAMIRADRGSTLGRLYF

SEQ ID NO: 5032 - protein, 14 aa, Homo sapiens
  CDR3 for beta chain variable domain of TCR clone 2516 (TRBV5-7, TRBJ1-6)
CASTPWPADSPLHF

SEQ ID NO: 5033 - protein, 14 aa, Homo sapiens
  CDR3 for alpha chain variable domain of TCR clone 2517 (TRAV1-2, TRAJ8)
CAVREDTGFQKLVF

SEQ ID NO: 5034 - protein, 13 aa, Homo sapiens
  CDR3 for beta chain variable domain of TCR clone 2517 (TRBV19, TRBJ1-2)
CASSVPGQDGYTF

SEQ ID NO: 5035 - protein, 15 aa, Homo sapiens
  CDR3 for alpha chain variable domain of TCR clone 2518 (TRAV8-3, TRAJ20)
CAVEAKGSNDYKLSF

SEQ ID NO: 5036 - protein, 12 aa, Homo sapiens
  CDR3 for beta chain variable domain of TCR clone 2518 (TRBV7-2, TRBJ1-2)
CASRDSIYGYTF

SEQ ID NO: 5037 - protein, 15 aa, Homo sapiens
  CDR3 for alpha chain variable domain of TCR clone 2519 (TRAV8-3, TRAJ45)
CASSYSGGGADGLTF

SEQ ID NO: 5038 - protein, 13 aa, Homo sapiens
  CDR3 for beta chain variable domain of TCR clone 2519 (TRBV10-3, TRBJ2-7)
CASKLAVSYEQYF

SEQ ID NO: 5039 - protein, 13 aa, Homo sapiens
  CDR3 for alpha chain variable domain of TCR clone 2520 (TRAV26-1, TRAJ40)
CIVRVEGTYKYIF

SEQ ID NO: 5040 - protein, 15 aa, Homo sapiens
  CDR3 for beta chain variable domain of TCR clone 2520 (TRBV12-4, TRBJ1-2)
CASSLAHRDGQAYTF

SEQ ID NO: 5041 - protein, 22 aa, Homo sapiens
  CDR3 for alpha chain variable domain of TCR clone 2521 (TRAV27, TRAJ38)
CAARRNAGNNHIQNPDPAVYQL

SEQ ID NO: 5042 - protein, 13 aa, Homo sapiens
  CDR3 for beta chain variable domain of TCR clone 2521 (TRBV12-5, TRBJ2-3)
CASGDRQSDTQYF

SEQ ID NO: 5043 - protein, 14 aa, Homo sapiens
  CDR3 for alpha chain variable domain of TCR clone 2522 (TRAV34, TRAJ44)
CGADGTGTASKLTF

SEQ ID NO: 5044 - protein, 12 aa, Homo sapiens
  CDR3 for beta chain variable domain of TCR clone 2522 (TRBV11-2, TRBJ2-2)
CASSLGGGELFF

SEQ ID NO: 5045 - protein, 12 aa, Homo sapiens
  CDR3 for alpha chain variable domain of TCR clone 2523 (TRAV12-3, TRAJ17)
CAMTLTGNKLTF

SEQ ID NO: 5046 - protein, 15 aa, Homo sapiens
  CDR3 for beta chain variable domain of TCR clone 2523 (TRBV20-1, TRBJ2-7)
CSARDRVSGMDGQYF

SEQ ID NO: 5047 - protein, 14 aa, Homo sapiens
  CDR3 for alpha chain variable domain of TCR clone 2524 (TRAV25, TRAJ44)
CAVFPTGTASKLTF

SEQ ID NO: 5048 - protein, 14 aa, Homo sapiens
  CDR3 for beta chain variable domain of TCR clone 2524 (TRBV19, TRBJ1-1)
CASTGHRLNTEAFF

SEQ ID NO: 5049 - protein, 14 aa, Homo sapiens
  CDR3 for alpha chain variable domain of TCR clone 2525 (TRAV1-1, TRAJ30)
CAVRSLNRDDKIIF

SEQ ID NO: 5050 - protein, 15 aa, Homo sapiens
  CDR3 for beta chain variable domain of TCR clone 2525 (TRBV27, TRBJ1-4)
CASSAQQDLNEKLFF

SEQ ID NO: 5051 - protein, 16 aa, Homo sapiens
  CDR3 for alpha chain variable domain of TCR clone 2526 (TRAV12-3, TRAJ53)
CAMSPGSGGSNYKLTF

SEQ ID NO: 5052 - protein, 12 aa, Homo sapiens
  CDR3 for beta chain variable domain of TCR clone 2526 (TRBV11-2, TRBJ2-2)
CASSLGGGELFF

SEQ ID NO: 5053 - protein, 17 aa, Homo sapiens
  CDR3 for alpha chain variable domain of TCR clone 2527 (TRAV3, TRAJ12)
CAVRDGGRMDSSYKLIF

SEQ ID NO: 5054 - protein, 12 aa, Homo sapiens
  CDR3 for beta chain variable domain of TCR clone 2527 (TRBV11-2, TRBJ2-2)
CASSLGGGELFF

SEQ ID NO: 5055 - protein, 12 aa, Homo sapiens
  CDR3 for alpha chain variable domain of TCR clone 2528 (TRAV12-2, TRAJ21)
CAVNRNFNKFYF

SEQ ID NO: 5056 - protein, 14 aa, Homo sapiens
  CDR3 for beta chain variable domain of TCR clone 2528 (TRBV12-4, TRBJ2-3)
CASSLSGATDTQYF

SEQ ID NO: 5057 - protein, 19 aa, Homo sapiens
  CDR3 for alpha chain variable domain of TCR clone 2529 (TRAV1-2, TRAJ26)
CLLPLCCERPDNYGQNFVF

SEQ ID NO: 5058 - protein, 11 aa, Homo sapiens
  CDR3 for beta chain variable domain of TCR clone 2529 (TRBV12-4, TRBJ2-3)
CASTATDTQYF

SEQ ID NO: 5059 - protein, 11 aa, Homo sapiens
  CDR3 for alpha chain variable domain of TCR clone 2530 (TRAV1-2, TRAJ40)
CAVPGTYKYIF

SEQ ID NO: 5060 - protein, 15 aa, Homo sapiens
  CDR3 for beta chain variable domain of TCR clone 2530 (TRBV5-7, TRBJ1-5)
CASSYGKLWDQPQHF

SEQ ID NO: 5061 - protein, 11 aa, Homo sapiens
  CDR3 for alpha chain variable domain of TCR clone 2531 (TRAV21, TRAJ11)
CAVNGYSTLTF

SEQ ID NO: 5062 - protein, 16 aa, Homo sapiens
  CDR3 for beta chain variable domain of TCR clone 2531 (TRBV4-3, TRBJ2-2)
CASSHLQGSGTGELFF

SEQ ID NO: 5063 - protein, 11 aa, Homo sapiens
  CDR3 for alpha chain variable domain of TCR clone 2532 (TRAV8-3, TRAJ15)
CAVGPGTALIF

SEQ ID NO: 5064 - protein, 15 aa, Homo sapiens
  CDR3 for beta chain variable domain of TCR clone 2532 (TRBV7-9, TRBJ2-7)
CASSLALAEAYEQYF

SEQ ID NO: 5065 - protein, 14 aa, Homo sapiens
  CDR3 for alpha chain variable domain of TCR clone 2533 (TRAV12-2, TRAJ9)
CAVNMEGGGFKTIF

SEQ ID NO: 5066 - protein, 14 aa, Homo sapiens
  CDR3 for beta chain variable domain of TCR clone 2533 (TRBV27, TRBJ2-3)
CASRKGGRTDTQYF

SEQ ID NO: 5067 - protein, 17 aa, Homo sapiens
  CDR3 for alpha chain variable domain of TCR clone 2534 (TRAV3, TRAJ6)
CAVRDGPRAGGSYIPTF

SEQ ID NO: 5068 - protein, 15 aa, Homo sapiens
  CDR3 for beta chain variable domain of TCR clone 2534 (TRBV5-8, TRBJ2-2)
CASSLDRGATGELFF

SEQ ID NO: 5069 - protein, 13 aa, Homo sapiens
  CDR3 for alpha chain variable domain of TCR clone 2535 (TRAV12-3, TRAJ9)
CAMRNTGGFKTIF

SEQ ID NO: 5070 - protein, 16 aa, Homo sapiens
  CDR3 for beta chain variable domain of TCR clone 2535 (TRBV19, TRBJ2-1)
CASSIDGSFAYNEQFF

SEQ ID NO: 5071 - protein, 13 aa, Homo sapiens
  CDR3 for alpha chain variable domain of TCR clone 2536 (TRAV13-1, TRAJ27)
CAASTHQCRQINL

SEQ ID NO: 5072 - protein, 16 aa, Homo sapiens
  CDR3 for beta chain variable domain of TCR clone 2536 (TRBV27, TRBJ2-2)
CASSFRGLVRTGELFF

SEQ ID NO: 5073 - protein, 12 aa, Homo sapiens
  CDR3 for alpha chain variable domain of TCR clone 2537 (TRAV36/DV7, TRAJ54)
CAVVRGAQKLVF

SEQ ID NO: 5074 - protein, 13 aa, Homo sapiens
  CDR3 for beta chain variable domain of TCR clone 2537 (TRBV20-1, TRBJ1-1)
CSARGGGNTEAFF

SEQ ID NO: 5075 - protein, 16 aa, Homo sapiens
  CDR3 for alpha chain variable domain of TCR clone 2538 (TRAV1-1, TRAJ28)
CAVRDDSGAGSYQLTF

SEQ ID NO: 5076 - protein, 12 aa, Homo sapiens
  CDR3 for beta chain variable domain of TCR clone 2538 (TRBV11-2, TRBJ2-5)
CASSLDTQTQYF

SEQ ID NO: 5077 - protein, 15 aa, Homo sapiens
  CDR3 for alpha chain variable domain of TCR clone 2539 (TRAV2, TRAJ22)
CAVPSRGGSARQLTF

SEQ ID NO: 5078 - protein, 14 aa, Homo sapiens
  CDR3 for beta chain variable domain of TCR clone 2539 (TRBV7-6, TRBJ2-3)
CASSLGTVTDTQYF

SEQ ID NO: 5079 - protein, 17 aa, Homo sapiens
  CDR3 for alpha chain variable domain of TCR clone 2540 (TRAV4, TRAJ18)
CLVVAAGRGSTLGRLYF

SEQ ID NO: 5080 - protein, 17 aa, Homo sapiens
  CDR3 for beta chain variable domain of TCR clone 2540 (TRBV28, TRBJ2-2)
CASSLATGMGDAGELFF

SEQ ID NO: 5081 - protein, 13 aa, Homo sapiens
  CDR3 for alpha chain variable domain of TCR clone 2541 (TRAV1-2, TRAJ33)
CAVSEDSNYQLIW

SEQ ID NO: 5082 - protein, 16 aa, Homo sapiens
  CDR3 for beta chain variable domain of TCR clone 2541 (TRBV4-2, TRBJ2-7)
CASSQDGVERGYEQYF

SEQ ID NO: 5083 - protein, 17 aa, Homo sapiens
  CDR3 for alpha chain variable domain of TCR clone 2542 (TRAV8-4, TRAJ11)
CAVSDRGENSGYSTLTF

SEQ ID NO: 5084 - protein, 14 aa, Homo sapiens
  CDR3 for beta chain variable domain of TCR clone 2542 (TRBV20-1, TRBJ2-1)
CSPNDEASYNEQFF

SEQ ID NO: 5085 - protein, 12 aa, Homo sapiens
  CDR3 for alpha chain variable domain of TCR clone 2543 (TRAV8-3, TRAJ20)
CAVDFNDYKLSF

SEQ ID NO: 5086 - protein, 17 aa, Homo sapiens
  CDR3 for beta chain variable domain of TCR clone 2543 (TRBV7-8, TRBJ2-6)
CASSAGTGGAGANVLTF

SEQ ID NO: 5087 - protein, 15 aa, Homo sapiens
  CDR3 for alpha chain variable domain of TCR clone 2544 (TRAV27, TRAJ38)
CAARRNAGNNRKLIW

SEQ ID NO: 5088 - protein, 13 aa, Homo sapiens
  CDR3 for beta chain variable domain of TCR clone 2544 (TRBV12-5, TRBJ2-3)
CASGDRQSDTQYL

SEQ ID NO: 5089 - protein, 14 aa, Homo sapiens
  CDR3 for alpha chain variable domain of TCR clone 2545 (TRAV12-2, TRAJ9)
CAVNLNTGGFKTIF

SEQ ID NO: 5090 - protein, 17 aa, Homo sapiens
  CDR3 for beta chain variable domain of TCR clone 2545 (TRBV20-1, TRBJ2-2)
CSASRQVGQGYTGELFF

SEQ ID NO: 5091 - protein, 11 aa, Homo sapiens
  CDR3 for alpha chain variable domain of TCR clone 2546 (TRAV1-2, TRAJ20)
CAVSNDYKLSF

SEQ ID NO: 5092 - protein, 15 aa, Homo sapiens
  CDR3 for beta chain variable domain of TCR clone 2546 (TRBV5-1, TRBJ2-2)
CASSSQGGNTGELFF

SEQ ID NO: 5093 - protein, 16 aa, Homo sapiens
  CDR3 for alpha chain variable domain of TCR clone 2547 (TRAV16, TRAJ37)
CSKWPDGSSNTGKLIF

SEQ ID NO: 5094 - protein, 13 aa, Homo sapiens
  CDR3 for beta chain variable domain of TCR clone 2547 (TRBV7-2, TRBJ2-2)
CASSLAVTGELFF

SEQ ID NO: 5095 - protein, 13 aa, Homo sapiens
  CDR3 for alpha chain variable domain of TCR clone 2548 (TRAV12-1, TRAJ29)
CVVDTSGNTPLVF

SEQ ID NO: 5096 - protein, 14 aa, Homo sapiens
  CDR3 for beta chain variable domain of TCR clone 2548 (TRBV12-4, TRBJ2-3)
CASSLVPSTDTQYF

SEQ ID NO: 5097 - protein, 14 aa, Homo sapiens
  CDR3 for alpha chain variable domain of TCR clone 2549 (TRAV16, TRAJ54)
CALSLIQGAQKLVF

SEQ ID NO: 5098 - protein, 17 aa, Homo sapiens
  CDR3 for beta chain variable domain of TCR clone 2549 (TRBV11-2, TRBJ2-4)
CASSSVGPGGHRNIQYF

SEQ ID NO: 5099 - protein, 13 aa, Homo sapiens
  CDR3 for alpha chain variable domain of TCR clone 2550 (TRAV1-1, TRAJ9)
CAAKNTGGFKTIF

SEQ ID NO: 5100 - protein, 14 aa, Homo sapiens
  CDR3 for beta chain variable domain of TCR clone 2550 (TRBV12-5, TRBJ2-5)
CASGSRTHQETQYF

SEQ ID NO: 5101 - protein, 14 aa, Homo sapiens
  CDR3 for alpha chain variable domain of TCR clone 2551 (TRAV8-1, TRAJ36)
CAVNSPTGANNLFF

SEQ ID NO: 5102 - protein, 15 aa, Homo sapiens
  CDR3 for beta chain variable domain of TCR clone 2551 (TRBV7-2, TRBJ2-3)
CASSLEQGGTDTQYF

SEQ ID NO: 5103 - protein, 11 aa, Homo sapiens
  CDR3 for alpha chain variable domain of TCR clone 2552 (TRAV12-1, TRAJ21)
CVVNNFNKFYF

SEQ ID NO: 5104 - protein, 11 aa, Homo sapiens
  CDR3 for beta chain variable domain of TCR clone 2552 (TRBV10-3, TRBJ2-7)
CAISEGLEQYF

SEQ ID NO: 5105 - protein, 12 aa, Homo sapiens
  CDR3 for alpha chain variable domain of TCR clone 2553 (TRAV12-1, TRAJ40)
CVVYSGTYKYIF

SEQ ID NO: 5106 - protein, 14 aa, Homo sapiens
  CDR3 for beta chain variable domain of TCR clone 2553 (TRBV20-1, TRBJ2-3)
CSARGGTSTDTQYF

SEQ ID NO: 5107 - protein, 17 aa, Homo sapiens
  CDR3 for alpha chain variable domain of TCR clone 2554 (TRAV4, TRAJ18)
CLVGERSVGSTLGRLYF

SEQ ID NO: 5108 - protein, 18 aa, Homo sapiens
  CDR3 for beta chain variable domain of TCR clone 2554 (TRBV11-2, TRBJ2-3)
CASSLGGASRGAPNTQYF

SEQ ID NO: 5109 - protein, 15 aa, Homo sapiens
  CDR3 for alpha chain variable domain of TCR clone 2555 (TRAV3, TRAJ29)
CAVRDLYSGNTPLVF

SEQ ID NO: 5110 - protein, 17 aa, Homo sapiens
  CDR3 for beta chain variable domain of TCR clone 2555 (TRBV20-1, TRBJ2-1)
CSARDPLAGVWDNEQFF

SEQ ID NO: 5111 - protein, 12 aa, Homo sapiens
  CDR3 for alpha chain variable domain of TCR clone 2556 (TRAV21, TRAJ30)
CAVMNRDDKIIF

SEQ ID NO: 5112 - protein, 17 aa, Homo sapiens
  CDR3 for beta chain variable domain of TCR clone 2556 (TRBV5-1, TRBJ1-1)
CASRPIRTGGVNTEAFF

SEQ ID NO: 5113 - protein, 15 aa, Homo sapiens
  CDR3 for alpha chain variable domain of TCR clone 2557 (TRAV30, TRAJ57)
CGTAIPQGGSEKLVF

SEQ ID NO: 5114 - protein, 13 aa, Homo sapiens
  CDR3 for beta chain variable domain of TCR clone 2557 (TRBV7-9, TRBJ1-2)
CASSPSNFWGYTF

SEQ ID NO: 5115 - protein, 16 aa, Homo sapiens
  CDR3 for alpha chain variable domain of TCR clone 2558 (TRAV13-1, TRAJ13)
CTAFFLGVTRKLPLEL

SEQ ID NO: 5116 - protein, 15 aa, Homo sapiens
  CDR3 for beta chain variable domain of TCR clone 2558 (TRBV7-8, TRBJ2-1)
CASSLADSLYNEQFF

SEQ ID NO: 5117 - protein, 12 aa, Homo sapiens
  CDR3 for alpha chain variable domain of TCR clone 2559 (TRAV20, TRAJ33)
CAVRGSNYQLIW

SEQ ID NO: 5118 - protein, 15 aa, Homo sapiens
  CDR3 for beta chain variable domain of TCR clone 2559 (TRBV11-3, TRBJ2-3)
CASLKDGREGDTQYF

SEQ ID NO: 5119 - protein, 12 aa, Homo sapiens
  CDR3 for alpha chain variable domain of TCR clone 2560 (TRAV1-1, TRAJ8)
CAGGTGFQKLVF

SEQ ID NO: 5120 - protein, 13 aa, Homo sapiens
  CDR3 for beta chain variable domain of TCR clone 2560 (TRBV7-9, TRBJ1-2)
CASSLKQNYGYTF

SEQ ID NO: 5121 - protein, 13 aa, Homo sapiens
  CDR3 for alpha chain variable domain of TCR clone 2561 (TRAV2, TRAJ11)
CAVEEIGYSTLTF

SEQ ID NO: 5122 - protein, 17 aa, Homo sapiens
  CDR3 for beta chain variable domain of TCR clone 2561 (TRBV7-2, TRBJ2-1)
CASSRGTSGAVGWEQFF

SEQ ID NO: 5123 - protein, 13 aa, Homo sapiens
  CDR3 for alpha chain variable domain of TCR clone 2562 (TRAV13-1, TRAJ10)
CAALEGGGNKLTF

SEQ ID NO: 5124 - protein, 17 aa, Homo sapiens
  CDR3 for beta chain variable domain of TCR clone 2562 (TRBV7-3, TRBJ2-2)
CASSLSGTSGGTGELFF

SEQ ID NO: 5125 - protein, 14 aa, Homo sapiens
  CDR3 for alpha chain variable domain of TCR clone 2563 (TRAV12-3, TRAJ30)
CAMSLLNRDDKIIF

SEQ ID NO: 5126 - protein, 12 aa, Homo sapiens
  CDR3 for beta chain variable domain of TCR clone 2563 (TRBV11-2, TRBJ2-2)
CASSLGGGELFF

SEQ ID NO: 5127 - protein, 12 aa, Homo sapiens
  CDR3 for alpha chain variable domain of TCR clone 2564 (TRAV12-3, TRAJ17)
CAMTLTGSKLTF

SEQ ID NO: 5128 - protein, 15 aa, Homo sapiens
  CDR3 for beta chain variable domain of TCR clone 2564 (TRBV20-1, TRBJ2-7)
CSARDRVSGMDEQYF

SEQ ID NO: 5129 - protein, 13 aa, Homo sapiens
  CDR3 for alpha chain variable domain of TCR clone 2565 (TRAV29/DV5, TRAJ31)
CAASRNNNARLMF

SEQ ID NO: 5130 - protein, 12 aa, Homo sapiens
  CDR3 for beta chain variable domain of TCR clone 2565 (TRBV14, TRBJ2-5)
CASSHLKETQYF

SEQ ID NO: 5131 - protein, 18 aa, Homo sapiens
  CDR3 for alpha chain variable domain of TCR clone 2566 (TRAV21, TRAJ52)
CAVRPSPAGGTSYGKLTF

SEQ ID NO: 5132 - protein, 13 aa, Homo sapiens
  CDR3 for beta chain variable domain of TCR clone 2566 (TRBV20-1, TRBJ1-1)
CSARVGGNTEAFF

SEQ ID NO: 5133 - protein, 15 aa, Homo sapiens
  CDR3 for alpha chain variable domain of TCR clone 2567 (TRAV12-1, TRAJ45)
CVVLSGGGGADGLTF

SEQ ID NO: 5134 - protein, 12 aa, Homo sapiens
  CDR3 for beta chain variable domain of TCR clone 2567 (TRBV12-5, TRBJ2-5)
CASGQGVETQYF

SEQ ID NO: 5135 - protein, 15 aa, Homo sapiens
  CDR3 for alpha chain variable domain of TCR clone 2568 (TRAV9-2, TRAJ49)
CALSPPDHTGNQFYF

SEQ ID NO: 5136 - protein, 14 aa, Homo sapiens
  CDR3 for beta chain variable domain of TCR clone 2568 (TRBV12-4, TRBJ1-1)
CASSLGTGGTEAFF

SEQ ID NO: 5137 - protein, 15 aa, Homo sapiens
  CDR3 for alpha chain variable domain of TCR clone 2569 (TRAV14/DV4, TRAJ12)
CAMREERDSSYKLIF

SEQ ID NO: 5138 - protein, 16 aa, Homo sapiens
  CDR3 for beta chain variable domain of TCR clone 2569 (TRBV11-2, TRBJ1-2)
CASSLDTGGADYGYTF

SEQ ID NO: 5139 - protein, 12 aa, Homo sapiens
  CDR3 for alpha chain variable domain of TCR clone 2570 (TRAV8-1, TRAJ26)
CAVNNYGQNFVF

SEQ ID NO: 5140 - protein, 15 aa, Homo sapiens
  CDR3 for beta chain variable domain of TCR clone 2570 (TRBV20-1, TRBJ1-1)
CSASWDRFLNTEAFF

SEQ ID NO: 5141 - protein, 15 aa, Homo sapiens
  CDR3 for alpha chain variable domain of TCR clone 2571 (TRAV13-1, TRAJ44)
CAASRNTGTASKLTF

SEQ ID NO: 5142 - protein, 14 aa, Homo sapiens
  CDR3 for beta chain variable domain of TCR clone 2571 (TRBV2, TRBJ2-7)
CASSLTSGGYEQYF

SEQ ID NO: 5143 - protein, 16 aa, Homo sapiens
  CDR3 for alpha chain variable domain of TCR clone 2572 (TRAV30, TRAJ24)
CGTEIVDADSWGKLQF

SEQ ID NO: 5144 - protein, 14 aa, Homo sapiens
  CDR3 for beta chain variable domain of TCR clone 2572 (TRBV12-5, TRBJ2-5)
CASGSRTHQETQYF

SEQ ID NO: 5145 - protein, 13 aa, Homo sapiens
  CDR3 for alpha chain variable domain of TCR clone 2573 (TRAV12-1, TRAJ40)
CVVNSSGTYKYIF

SEQ ID NO: 5146 - protein, 14 aa, Homo sapiens
  CDR3 for beta chain variable domain of TCR clone 2573 (TRBV2, TRBJ1-6)
CASEVSSYNSPLHF

SEQ ID NO: 5147 - protein, 14 aa, Homo sapiens
  CDR3 for alpha chain variable domain of TCR clone 2574 (TRAV1-2, TRAJ8)
CAVREDTGFQKLVF

SEQ ID NO: 5148 - protein, 15 aa, Homo sapiens
  CDR3 for beta chain variable domain of TCR clone 2574 (TRBV15, TRBJ1-1)
CATSLQGGRNTEAFF

SEQ ID NO: 5149 - protein, 12 aa, Homo sapiens
  CDR3 for alpha chain variable domain of TCR clone 2575 (TRAV12-3, TRAJ34)
CAMGYNTDKLIF

SEQ ID NO: 5150 - protein, 14 aa, Homo sapiens
  CDR3 for beta chain variable domain of TCR clone 2575 (TRBV5-7, TRBJ1-5)
CASSRTGGGQPQHF

SEQ ID NO: 5151 - protein, 14 aa, Homo sapiens
  CDR3 for alpha chain variable domain of TCR clone 2576 (TRAV38-1, TRAJ45)
CAYYSGGGADGLTF

SEQ ID NO: 5152 - protein, 15 aa, Homo sapiens
  CDR3 for beta chain variable domain of TCR clone 2576 (TRBV11-2, TRBJ2-1)
CASSKNRGLIYEQFF

SEQ ID NO: 5153 - protein, 13 aa, Homo sapiens
  CDR3 for alpha chain variable domain of TCR clone 2577 (TRAV30, TRAJ24)
CGTVTDSWGKLQF

SEQ ID NO: 5154 - protein, 15 aa, Homo sapiens
  CDR3 for beta chain variable domain of TCR clone 2577 (TRBV19, TRBJ1-1)
CASTSGQIQNTEAFF

SEQ ID NO: 5155 - protein, 13 aa, Homo sapiens
  CDR3 for alpha chain variable domain of TCR clone 2578 (TRAV1-2, TRAJ9)
CAALNTGGFKTIF

SEQ ID NO: 5156 - protein, 13 aa, Homo sapiens
  CDR3 for beta chain variable domain of TCR clone 2578 (TRBV7-9, TRBJ1-2)
CASSLKQNYGYTF

SEQ ID NO: 5157 - protein, 13 aa, Homo sapiens
  CDR3 for alpha chain variable domain of TCR clone 2579 (TRAV13-1, TRAJ33)
CAASRAGNYQLIW

SEQ ID NO: 5158 - protein, 12 aa, Homo sapiens
  CDR3 for beta chain variable domain of TCR clone 2579 (TRBV11-2, TRBJ1-2)
CASSREGDGYTF

SEQ ID NO: 5159 - protein, 12 aa, Homo sapiens
  CDR3 for alpha chain variable domain of TCR clone 2580 (TRAV17, TRAJ53)
CAGGGSNYKLTF

SEQ ID NO: 5160 - protein, 16 aa, Homo sapiens
  CDR3 for beta chain variable domain of TCR clone 2580 (TRBV11-2, TRBJ2-3)
CASSFQGRGALDTQYF

SEQ ID NO: 5161 - protein, 12 aa, Homo sapiens
  CDR3 for alpha chain variable domain of TCR clone 2581 (TRAV13-1, TRAJ26)
QVQDNYGQNFVF

SEQ ID NO: 5162 - protein, 13 aa, Homo sapiens
  CDR3 for beta chain variable domain of TCR clone 2581 (TRBV7-9, TRBJ2-7)
CASSAGLQYEQYF

SEQ ID NO: 5163 - protein, 14 aa, Homo sapiens
  CDR3 for alpha chain variable domain of TCR clone 2582 (TRAV23/DV6, TRAJ58)
CAGMRETSGSRLTF

SEQ ID NO: 5164 - protein, 13 aa, Homo sapiens
  CDR3 for beta chain variable domain of TCR clone 2582 (TRBV28, TRBJ2-7)
CASRSSGVYEQYF

SEQ ID NO: 5165 - protein, 12 aa, Homo sapiens
  CDR3 for alpha chain variable domain of TCR clone 2583 (TRAV12-3, TRAJ17)
CAMTLTGNKLTF

SEQ ID NO: 5166 - protein, 15 aa, Homo sapiens
  CDR3 for beta chain variable domain of TCR clone 2583 (TRBV20-1, TRBJ2-7)
CSARDRVSGMDEQYL

SEQ ID NO: 5167 - protein, 17 aa, Homo sapiens
  CDR3 for alpha chain variable domain of TCR clone 2584 (TRAV38-2/DV8, TRAJ45)
CAYRSRYSGGGADGLTF

SEQ ID NO: 5168 - protein, 15 aa, Homo sapiens
  CDR3 for beta chain variable domain of TCR clone 2584 (TRBV19, TRBJ2-1)
CASIKGRGPYNEQFF

SEQ ID NO: 5169 - protein, 15 aa, Homo sapiens
  CDR3 for alpha chain variable domain of TCR clone 2585 (TRAV3, TRAJ12)
CAVRDIRDSSYKLIF

SEQ ID NO: 5170 - protein, 15 aa, Homo sapiens
  CDR3 for beta chain variable domain of TCR clone 2585 (TRBV27, TRBJ2-7)
CASSLRNEQGYEQYF

SEQ ID NO: 5171 - protein, 15 aa, Homo sapiens
  CDR3 for alpha chain variable domain of TCR clone 2586 (TRAV13-2, TRAJ45)
CAEHHSGGGADGLTF

SEQ ID NO: 5172 - protein, 15 aa, Homo sapiens
  CDR3 for beta chain variable domain of TCR clone 2586 (TRBV7-2, TRBJ2-7)
CASSLALGSAYEQYF

SEQ ID NO: 5173 - protein, 15 aa, Homo sapiens
  CDR3 for alpha chain variable domain of TCR clone 2587 (TRAV8-4, TRAJ11)
CAVSRALSGYSTLTF

SEQ ID NO: 5174 - protein, 13 aa, Homo sapiens
  CDR3 for beta chain variable domain of TCR clone 2587 (TRBV10-3, TRBJ2-7)
CASKLAVNYEQYF

SEQ ID NO: 5175 - protein, 14 aa, Homo sapiens
  CDR3 for alpha chain variable domain of TCR clone 2588 (TRAV8-4, TRAJ15)
CAVTIREAGTALIF

SEQ ID NO: 5176 - protein, 13 aa, Homo sapiens
  CDR3 for beta chain variable domain of TCR clone 2588 (TRBV10-3, TRBJ2-7)
CAISEKGGYEQYF

SEQ ID NO: 5177 - protein, 11 aa, Homo sapiens
  CDR3 for alpha chain variable domain of TCR clone 2589 (TRAV23/DV6, TRAJ43)
CAASSGNDMRF

SEQ ID NO: 5178 - protein, 14 aa, Homo sapiens
  CDR3 for beta chain variable domain of TCR clone 2589 (TRBV4-1, TRBJ1-2)
CASSQDPLPYGYTF

SEQ ID NO: 5179 - protein, 13 aa, Homo sapiens
  CDR3 for alpha chain variable domain of TCR clone 2590 (TRAV27, TRAJ39)
CAGVNNAGNMLTF

SEQ ID NO: 5180 - protein, 19 aa, Homo sapiens
  CDR3 for beta chain variable domain of TCR clone 2590 (TRBV5-1, TRBJ2-3)
CASSLWLAGGITTTDTQYF

SEQ ID NO: 5181 - protein, 13 aa, Homo sapiens
  CDR3 for alpha chain variable domain of TCR clone 2591 (TRAV26-1, TRAJ41)
CIVRINSGYALNF

SEQ ID NO: 5182 - protein, 13 aa, Homo sapiens
  CDR3 for beta chain variable domain of TCR clone 2591 (TRBV20-1, TRBJ1-5)
CSATAAGGQPQHF

SEQ ID NO: 5183 - protein, 13 aa, Homo sapiens
  CDR3 for alpha chain variable domain of TCR clone 2592 (TRAV2, TRAJ40)
CAVVTSGTYKYIF

SEQ ID NO: 5184 - protein, 14 aa, Homo sapiens
  CDR3 for beta chain variable domain of TCR clone 2592 (TRBV28, TRBJ2-1)
CASSYYTAYNEQFF

SEQ ID NO: 5185 - protein, 17 aa, Homo sapiens
  CDR3 for alpha chain variable domain of TCR clone 2593 (TRAV13-1, TRAJ52)
CAASSGAGGTSYGKLTF

SEQ ID NO: 5186 - protein, 12 aa, Homo sapiens
  CDR3 for beta chain variable domain of TCR clone 2593 (TRBV11-2, TRBJ2-2)
CASSLGGGELFF

SEQ ID NO: 5187 - protein, 15 aa, Homo sapiens
  CDR3 for alpha chain variable domain of TCR clone 2594 (TRAV12-1, TRAJ52)
CVGNAGGTSYGKLTF

SEQ ID NO: 5188 - protein, 14 aa, Homo sapiens
  CDR3 for beta chain variable domain of TCR clone 2594 (TRBV7-3, TRBJ2-2)
CASSPDPSGRELFF

SEQ ID NO: 5189 - protein, 14 aa, Homo sapiens
  CDR3 for alpha chain variable domain of TCR clone 2595 (TRAV12-3, TRAJ10)
SHLPLTGGGNKLTF

SEQ ID NO: 5190 - protein, 13 aa, Homo sapiens
  CDR3 for beta chain variable domain of TCR clone 2595 (TRBV2, TRBJ1-6)
CADSGSYNSPLHF

SEQ ID NO: 5191 - protein, 13 aa, Homo sapiens
  CDR3 for alpha chain variable domain of TCR clone 2596 (TRAV36/DV7, TRAJ29)
CAVEPSGNTPLVF

SEQ ID NO: 5192 - protein, 11 aa, Homo sapiens
  CDR3 for beta chain variable domain of TCR clone 2596 (TRBV19, TRBJ2-7)
CASGNSYEQYF

SEQ ID NO: 5193 - protein, 14 aa, Homo sapiens
  CDR3 for alpha chain variable domain of TCR clone 2597 (TRAV13-2, TRAJ17)
CAENSKAAGNKLTF

SEQ ID NO: 5194 - protein, 14 aa, Homo sapiens
  CDR3 for beta chain variable domain of TCR clone 2597 (TRBV19, TRBJ2-1)
CASPTFVLSGEQFF

SEQ ID NO: 5195 - protein, 13 aa, Homo sapiens
  CDR3 for alpha chain variable domain of TCR clone 2598 (TRAV26-2, TRAJ43)
CILRAVNNNDMRF

SEQ ID NO: 5196 - protein, 14 aa, Homo sapiens
  CDR3 for beta chain variable domain of TCR clone 2598 (TRBV19, TRBJ2-1)
CASPTFVLSGEQFF

SEQ ID NO: 5197 - protein, 17 aa, Homo sapiens
  CDR3 for alpha chain variable domain of TCR clone 2599 (TRAV8-1, TRAJ42)
CAVKWGNYGGSQGNLIF

SEQ ID NO: 5198 - protein, 15 aa, Homo sapiens
  CDR3 for beta chain variable domain of TCR clone 2599 (TRBV9, TRBJ1-6)
CASSVAGTGDSPLHF

SEQ ID NO: 5199 - protein, 14 aa, Homo sapiens
  CDR3 for alpha chain variable domain of TCR clone 2600 (TRAV23/DV6, TRAJ17)
CAARGRAAGNKLTF

SEQ ID NO: 5200 - protein, 12 aa, Homo sapiens
  CDR3 for beta chain variable domain of TCR clone 2600 (TRBV7-9, TRBJ2-3)
CASSFITDTQYF

SEQ ID NO: 5201 - protein, 14 aa, Homo sapiens
  CDR3 for alpha chain variable domain of TCR clone 2601 (TRAV26-1, TRAJ38)
CIADNAGNNRKLIW

SEQ ID NO: 5202 - protein, 15 aa, Homo sapiens
  CDR3 for beta chain variable domain of TCR clone 2601 (TRBV9, TRBJ2-1)
CASSLAGSSYNEQFF

SEQ ID NO: 5203 - protein, 13 aa, Homo sapiens
  CDR3 for alpha chain variable domain of TCR clone 2602 (TRAV35, TRAJ58)
CAGLETSGSRLTF

SEQ ID NO: 5204 - protein, 15 aa, Homo sapiens
  CDR3 for beta chain variable domain of TCR clone 2602 (TRBV20-1, TRBJ2-1)
CSARFSAGGLNEQFF

SEQ ID NO: 5205 - protein, 13 aa, Homo sapiens
  CDR3 for alpha chain variable domain of TCR clone 2603 (TRAV26-1, TRAJ35)
CIVSRRVGEMLHC

SEQ ID NO: 5206 - protein, 17 aa, Homo sapiens
  CDR3 for beta chain variable domain of TCR clone 2603 (TRBV7-9, TRBJ2-7)
CASSFDGSRGGAYEQYF

SEQ ID NO: 5207 - protein, 12 aa, Homo sapiens
  CDR3 for alpha chain variable domain of TCR clone 2604 (TRAV27, TRAJ35)
CAGADFGNVLHC

SEQ ID NO: 5208 - protein, 16 aa, Homo sapiens
  CDR3 for beta chain variable domain of TCR clone 2604 (TRBV6-1, TRBJ2-1)
CASISRQGSSYNEQFF

SEQ ID NO: 5209 - protein, 15 aa, Homo sapiens
  CDR3 for alpha chain variable domain of TCR clone 2605 (TRAV17, TRAJ22)
CATVAPSGSARQLTF

SEQ ID NO: 5210 - protein, 14 aa, Homo sapiens
  CDR3 for beta chain variable domain of TCR clone 2605 (TRBV4-1, TRBJ2-2)
CASSQAVNTGELFF

SEQ ID NO: 5211 - protein, 14 aa, Homo sapiens
  CDR3 for alpha chain variable domain of TCR clone 2606 (TRAV40, TRAJ41)
CLLGPPNSGYALNF

SEQ ID NO: 5212 - protein, 11 aa, Homo sapiens
  CDR3 for beta chain variable domain of TCR clone 2606 (TRBV19, TRBJ2-7)
CASSILGEQYF

SEQ ID NO: 5213 - protein, 16 aa, Homo sapiens
  CDR3 for alpha chain variable domain of TCR clone 2607 (TRAV4, TRAJ8)
CLVGDSGNTGFQKLVF

SEQ ID NO: 5214 - protein, 15 aa, Homo sapiens
  CDR3 for beta chain variable domain of TCR clone 2607 (TRBV15, TRBJ1-2)
CATSRVRASGSGYTF

SEQ ID NO: 5215 - protein, 13 aa, Homo sapiens
  CDR3 for alpha chain variable domain of TCR clone 2608 (TRAV17, TRAJ8)
CATGPVGFQKLVF

SEQ ID NO: 5216 - protein, 15 aa, Homo sapiens
  CDR3 for beta chain variable domain of TCR clone 2608 (TRBV20-1, TRBJ2-5)
CSAGRLPSGQETQYF

SEQ ID NO: 5217 - protein, 13 aa, Homo sapiens
  CDR3 for alpha chain variable domain of TCR clone 2609 (TRAV35, TRAJ33)
CAGQLYGVYQLIW

SEQ ID NO: 5218 - protein, 14 aa, Homo sapiens
  CDR3 for beta chain variable domain of TCR clone 2609 (TRBV7-2, TRBJ1-1)
CASSLGGAGTEAFF

SEQ ID NO: 5219 - protein, 15 aa, Homo sapiens
  CDR3 for alpha chain variable domain of TCR clone 2610 (TRAV34, TRAJ38)
CGADFTPGNNRKLIW

SEQ ID NO: 5220 - protein, 12 aa, Homo sapiens
  CDR3 for beta chain variable domain of TCR clone 2610 (TRBV7-9, TRBJ2-7)
CATRTDAYEQYF

SEQ ID NO: 5221 - protein, 12 aa, Homo sapiens
  CDR3 for alpha chain variable domain of TCR clone 2611 (TRAV21, TRAJ33)
CAVQDSDYQLIW

SEQ ID NO: 5222 - protein, 14 aa, Homo sapiens
  CDR3 for beta chain variable domain of TCR clone 2611 (TRBV28, TRBJ2-1)
CASSPGEGGNEQFF

SEQ ID NO: 5223 - protein, 13 aa, Homo sapiens
  CDR3 for alpha chain variable domain of TCR clone 2612 (TRAV8-6, TRAJ49)
CAVITNTGNQFYF

SEQ ID NO: 5224 - protein, 17 aa, Homo sapiens
  CDR3 for beta chain variable domain of TCR clone 2612 (TRBV11-2, TRBJ2-1)
CASSLYPPGVEYNEQFF

SEQ ID NO: 5225 - protein, 11 aa, Homo sapiens
  CDR3 for alpha chain variable domain of TCR clone 2613 (TRAV21, TRAJ39)
LLVNAGNMLTF

SEQ ID NO: 5226 - protein, 15 aa, Homo sapiens
  CDR3 for beta chain variable domain of TCR clone 2613 (TRBV29-1, TRBJ2-1)
CSGRDRKSSYNEQFF

SEQ ID NO: 5227 - protein, 20 aa, Homo sapiens
  CDR3 for alpha chain variable domain of TCR clone 2614 (TRAV13-1, )
CAASPMDIQNPDPAVYQLRD

SEQ ID NO: 5228 - protein, 13 aa, Homo sapiens
  CDR3 for beta chain variable domain of TCR clone 2614 (TRBV20-1, TRBJ2-2)
CSASAAGTGELFF

SEQ ID NO: 5229 - protein, 12 aa, Homo sapiens
  CDR3 for alpha chain variable domain of TCR clone 2615 (TRAV29/DV5, TRAJ26)
CAAIPSGQNFVF

SEQ ID NO: 5230 - protein, 15 aa, Homo sapiens
  CDR3 for beta chain variable domain of TCR clone 2615 (TRBV19, TRBJ1-5)
CASSDSGPRNQPQHF

SEQ ID NO: 5231 - protein, 15 aa, Homo sapiens
  CDR3 for alpha chain variable domain of TCR clone 2616 (TRAV3, TRAJ36)
CAVRASQTGANNLFF

SEQ ID NO: 5232 - protein, 13 aa, Homo sapiens
  CDR3 for beta chain variable domain of TCR clone 2616 (TRBV10-3, TRBJ1-2)
CAISERDSYGYTF

SEQ ID NO: 5233 - protein, 16 aa, Homo sapiens
  CDR3 for alpha chain variable domain of TCR clone 2617 (TRAV30, TRAJ24)
CGTEIVDADSWGKFQF

SEQ ID NO: 5234 - protein, 15 aa, Homo sapiens
  CDR3 for beta chain variable domain of TCR clone 2617 (TRBV15, TRBJ1-5)
CATSRDPVSNQPQHF

SEQ ID NO: 5235 - protein, 14 aa, Homo sapiens
  CDR3 for alpha chain variable domain of TCR clone 2618 (TRAV38-1, TRAJ45)
CAYYSGGGADGLTF

SEQ ID NO: 5236 - protein, 14 aa, Homo sapiens
  CDR3 for beta chain variable domain of TCR clone 2618 (TRBV25-1, TRBJ1-1)
CASTHLGGNTEAFF

SEQ ID NO: 5237 - protein, 17 aa, Homo sapiens
  CDR3 for alpha chain variable domain of TCR clone 2619 (TRAV17, TRAJ52)
CATERPSGGTSYGKLTF

SEQ ID NO: 5238 - protein, 15 aa, Homo sapiens
  CDR3 for beta chain variable domain of TCR clone 2619 (TRBV5-1, TRBJ2-1)
CASSLVANSYNEQFF

SEQ ID NO: 5239 - protein, 18 aa, Homo sapiens
  CDR3 for alpha chain variable domain of TCR clone 2620 (TRAV21, TRAJ52)
CAVRPSPAGGTSYGKLTF

SEQ ID NO: 5240 - protein, 15 aa, Homo sapiens
  CDR3 for beta chain variable domain of TCR clone 2620 (TRBV27, TRBJ2-1)
CASSNGGGSSNEQFF

SEQ ID NO: 5241 - protein, 11 aa, Homo sapiens
  CDR3 for alpha chain variable domain of TCR clone 2621 (TRAV35, TRAJ30)
CAGPGDDKIIF

SEQ ID NO: 5242 - protein, 12 aa, Homo sapiens
  CDR3 for beta chain variable domain of TCR clone 2621 (TRBV27, TRBJ2-1)
CASRGFYNEQFF

SEQ ID NO: 5243 - protein, 14 aa, Homo sapiens
  CDR3 for alpha chain variable domain of TCR clone 2622 (TRAV1-2, TRAJ16)
CAVNRFSDGQKLLF

SEQ ID NO: 5244 - protein, 14 aa, Homo sapiens
  CDR3 for beta chain variable domain of TCR clone 2622 (TRBV11-2, TRBJ2-3)
CASSRLARTDTQYF

SEQ ID NO: 5245 - protein, 15 aa, Homo sapiens
  CDR3 for alpha chain variable domain of TCR clone 2623 (TRAV26-1, TRAJ37)
CIVKTGSSNTGKLIF

SEQ ID NO: 5246 - protein, 12 aa, Homo sapiens
  CDR3 for beta chain variable domain of TCR clone 2623 (TRBV7-8, TRBJ2-7)
CASSLGDREQYF

SEQ ID NO: 5247 - protein, 14 aa, Homo sapiens
  CDR3 for alpha chain variable domain of TCR clone 2624 (TRAV13-1, TRAJ35)
CAASKGGFGNVLHC

SEQ ID NO: 5248 - protein, 14 aa, Homo sapiens
  CDR3 for beta chain variable domain of TCR clone 2624 (TRBV4-1, TRBJ2-2)
CASSQAVNTGELFF

SEQ ID NO: 5249 - protein, 14 aa, Homo sapiens
  CDR3 for alpha chain variable domain of TCR clone 2625 (TRAV12-3, TRAJ10)
SHLPLTGGGNKLTF

SEQ ID NO: 5250 - protein, 15 aa, Homo sapiens
  CDR3 for beta chain variable domain of TCR clone 2625 (TRBV25-1, TRBJ2-4)
CASSETESAKNIQYF

SEQ ID NO: 5251 - protein, 17 aa, Homo sapiens
  CDR3 for alpha chain variable domain of TCR clone 2626 (TRAV3, TRAJ6)
CAVRDGPRAGGSYIPTF

SEQ ID NO: 5252 - protein, 16 aa, Homo sapiens
  CDR3 for beta chain variable domain of TCR clone 2626 (TRBV4-1, TRBJ2-7)
CASSLTAGQATYEQYF

SEQ ID NO: 5253 - protein, 15 aa, Homo sapiens
  CDR3 for alpha chain variable domain of TCR clone 2627 (TRAV8-6, TRAJ45)
CAVSEQGGGADGLTF

SEQ ID NO: 5254 - protein, 14 aa, Homo sapiens
  CDR3 for beta chain variable domain of TCR clone 2627 (TRBV28, TRBJ2-5)
CASRGSSFWETQYF

SEQ ID NO: 5255 - protein, 15 aa, Homo sapiens
  CDR3 for alpha chain variable domain of TCR clone 2628 (TRAV26-2, TRAJ26)
CILRDFDNYGQNFVF

SEQ ID NO: 5256 - protein, 14 aa, Homo sapiens
  CDR3 for beta chain variable domain of TCR clone 2628 (TRBV29-1, TRBJ2-5)
CSFWTPYAGETQYF

SEQ ID NO: 5257 - protein, 15 aa, Homo sapiens
  CDR3 for alpha chain variable domain of TCR clone 2629 (TRAV13-1, TRAJ17)
CAASIERAAGNKLTF

SEQ ID NO: 5258 - protein, 13 aa, Homo sapiens
  CDR3 for beta chain variable domain of TCR clone 2629 (TRBV7-7, TRBJ2-3)
CASSLSRADTQYF

SEQ ID NO: 5259 - protein, 21 aa, Homo sapiens
  CDR3 for alpha chain variable domain of TCR clone 2630 (TRAV12-1, TRAJ32)
SSVIQPPTSMNYGGATNKLIF

SEQ ID NO: 5260 - protein, 18 aa, Homo sapiens
  CDR3 for beta chain variable domain of TCR clone 2630 (TRBV20-1, TRBJ2-3)
CSASGLAGGPGTTDTQYF

SEQ ID NO: 5261 - protein, 13 aa, Homo sapiens
  CDR3 for alpha chain variable domain of TCR clone 2631 (TRAV36/DV7, TRAJ7)
CAGTRYGNNRLAF

SEQ ID NO: 5262 - protein, 15 aa, Homo sapiens
  CDR3 for beta chain variable domain of TCR clone 2631 (TRBV11-3, TRBJ2-7)
CASSPGPASSYEQYF

SEQ ID NO: 5263 - protein, 15 aa, Homo sapiens
  CDR3 for alpha chain variable domain of TCR clone 2632 (TRAV8-3, TRAJ6)
CAVGEDRGGSYIPTF

SEQ ID NO: 5264 - protein, 14 aa, Homo sapiens
  CDR3 for beta chain variable domain of TCR clone 2632 (TRBV27, TRBJ2-2)
CASLRSPPGGELFF

SEQ ID NO: 5265 - protein, 10 aa, Homo sapiens
  CDR3 for alpha chain variable domain of TCR clone 2633 (TRAV23/DV6, TRAJ22)
CAASSRGSRF

SEQ ID NO: 5266 - protein, 15 aa, Homo sapiens
  CDR3 for beta chain variable domain of TCR clone 2633 (TRBV10-3, TRBJ2-3)
CAIDTSGRRTDTQYF

SEQ ID NO: 5267 - protein, 12 aa, Homo sapiens
  CDR3 for alpha chain variable domain of TCR clone 2634 (TRAV13-1, TRAJ21)
CAAKEGFNKFYF

SEQ ID NO: 5268 - protein, 15 aa, Homo sapiens
  CDR3 for beta chain variable domain of TCR clone 2634 (TRBV2, TRBJ2-1)
CASSELAGSYNEQFF

SEQ ID NO: 5269 - protein, 11 aa, Homo sapiens
  CDR3 for alpha chain variable domain of TCR clone 2635 (TRAV12-3, TRAJ49)
CAMSSGNQFYF

SEQ ID NO: 5270 - protein, 17 aa, Homo sapiens
  CDR3 for beta chain variable domain of TCR clone 2635 (TRBV5-7, TRBJ2-7)
CASSLWRVLAGSYEQYF

SEQ ID NO: 5271 - protein, 12 aa, Homo sapiens
  CDR3 for alpha chain variable domain of TCR clone 2636 (TRAV12-3, TRAJ17)
CAMTLTGNKLTF

SEQ ID NO: 5272 - protein, 19 aa, Homo sapiens
  CDR3 for beta chain variable domain of TCR clone 2636 (TRBV25-1, TRBJ2-2)
CAILVYRVDRGRKTGELFF

SEQ ID NO: 5273 - protein, 11 aa, Homo sapiens
  CDR3 for alpha chain variable domain of TCR clone 2637 (TRAV3, TRAJ21)
CAVGNFNKFYF

SEQ ID NO: 5274 - protein, 14 aa, Homo sapiens
  CDR3 for beta chain variable domain of TCR clone 2637 (TRBV20-1, TRBJ2-2)
CSAPDTANTGELFF

SEQ ID NO: 5275 - protein, 10 aa, Homo sapiens
  CDR3 for alpha chain variable domain of TCR clone 2638 (TRAV13-1, TRAJ7)
LIGGNNRLAF

SEQ ID NO: 5276 - protein, 16 aa, Homo sapiens
  CDR3 for beta chain variable domain of TCR clone 2638 (TRBV4-1, TRBJ1-2)
CASSQDAGQVLYGYTF

SEQ ID NO: 5277 - protein, 11 aa, Homo sapiens
  CDR3 for alpha chain variable domain of TCR clone 2639 (TRAV12-1, TRAJ34)
CVVNKGRELIF

SEQ ID NO: 5278 - protein, 12 aa, Homo sapiens
  CDR3 for beta chain variable domain of TCR clone 2639 (TRBV11-2, TRBJ2-2)
CASSLGGGELFF

SEQ ID NO: 5279 - protein, 11 aa, Homo sapiens
  CDR3 for alpha chain variable domain of TCR clone 2640 (TRAV8-4, TRAJ34)
CAVSWTDKLIF

SEQ ID NO: 5280 - protein, 14 aa, Homo sapiens
  CDR3 for beta chain variable domain of TCR clone 2640 (TRBV7-9, TRBJ2-3)
CASSLEDGTDTQYF

SEQ ID NO: 5281 - protein, 12 aa, Homo sapiens
  CDR3 for alpha chain variable domain of TCR clone 2641 (TRAV13-1, TRAJ20)
SVQQVNDYKLSF

SEQ ID NO: 5282 - protein, 14 aa, Homo sapiens
  CDR3 for beta chain variable domain of TCR clone 2641 (TRBV7-6, TRBJ2-3)
CASSLTGGTDTQYF

SEQ ID NO: 5283 - protein, 12 aa, Homo sapiens
  CDR3 for alpha chain variable domain of TCR clone 2642 (TRAV21, TRAJ23)
CAVPNQGGKLIF

SEQ ID NO: 5284 - protein, 15 aa, Homo sapiens
  CDR3 for beta chain variable domain of TCR clone 2642 (TRBV27, TRBJ2-1)
CASSFGAGTGPEQFF

SEQ ID NO: 5285 - protein, 12 aa, Homo sapiens
  CDR3 for alpha chain variable domain of TCR clone 2643 (TRAV4, TRAJ6)
CLAPGGSYIPTF

SEQ ID NO: 5286 - protein, 17 aa, Homo sapiens
  CDR3 for beta chain variable domain of TCR clone 2643 (TRBV20-1, TRBJ2-2)
CSASGSGQGGLTGELFF

SEQ ID NO: 5287 - protein, 10 aa, Homo sapiens
  CDR3 for alpha chain variable domain of TCR clone 2644 (TRAV13-1, TRAJ5)
CAASRRALTF

SEQ ID NO: 5288 - protein, 16 aa, Homo sapiens
  CDR3 for beta chain variable domain of TCR clone 2644 (TRBV4-3, TRBJ2-3)
CASSQGGLAGTDTQYF

SEQ ID NO: 5289 - protein, 12 aa, Homo sapiens
  CDR3 for alpha chain variable domain of TCR clone 2645 (TRAV25, TRAJ17)
CAGEAAGNKLTF

SEQ ID NO: 5290 - protein, 14 aa, Homo sapiens
  CDR3 for beta chain variable domain of TCR clone 2645 (TRBV5-1, TRBJ2-1)
CASSALWAGNEQFF

SEQ ID NO: 5291 - protein, 17 aa, Homo sapiens
  CDR3 for alpha chain variable domain of TCR clone 2646 (TRAV3, TRAJ6)
CAVRDGPRAGGNYIPTF

SEQ ID NO: 5292 - protein, 14 aa, Homo sapiens
  CDR3 for beta chain variable domain of TCR clone 2646 (TRBV7-2, TRBJ2-7)
CASSPKTSFYEQYF

SEQ ID NO: 5293 - protein, 13 aa, Homo sapiens
  CDR3 for alpha chain variable domain of TCR clone 2647 (TRAV1-2, TRAJ31)
CAVRPNNNARLMF

SEQ ID NO: 5294 - protein, 14 aa, Homo sapiens
  CDR3 for beta chain variable domain of TCR clone 2647 (TRBV11-2, TRBJ2-1)
CASSLSGPYNEQFF

SEQ ID NO: 5295 - protein, 14 aa, Homo sapiens
  CDR3 for alpha chain variable domain of TCR clone 2648 (TRAV12-3, TRAJ10)
SHLPLTGGGNKLTF

SEQ ID NO: 5296 - protein, 13 aa, Homo sapiens
  CDR3 for beta chain variable domain of TCR clone 2648 (TRBV12-4, TRBJ1-1)
CASSPGTGFEAFF

SEQ ID NO: 5297 - protein, 13 aa, Homo sapiens
  CDR3 for alpha chain variable domain of TCR clone 2649 (TRAV2, TRAJ40)
CAVVTSGTYKYIF

SEQ ID NO: 5298 - protein, 12 aa, Homo sapiens
  CDR3 for beta chain variable domain of TCR clone 2649 (TRBV11-2, TRBJ2-1)
CASSPGNNEQFF

SEQ ID NO: 5299 - protein, 15 aa, Homo sapiens
  CDR3 for alpha chain variable domain of TCR clone 2650 (TRAV3, TRAJ20)
CAVRDIKLSDYKLSF

SEQ ID NO: 5300 - protein, 18 aa, Homo sapiens
  CDR3 for beta chain variable domain of TCR clone 2650 (TRBV20-1, TRBJ2-5)
CSQTGDSGRLGGKETQYF

SEQ ID NO: 5301 - protein, 14 aa, Homo sapiens
  CDR3 for alpha chain variable domain of TCR clone 2651 (TRAV12-2, TRAJ40)
CAVKIPSGTYKYIF

SEQ ID NO: 5302 - protein, 13 aa, Homo sapiens
  CDR3 for beta chain variable domain of TCR clone 2651 (TRBV20-1, TRBJ1-3)
CSARVQGRDTIYF

SEQ ID NO: 5303 - protein, 16 aa, Homo sapiens
  CDR3 for alpha chain variable domain of TCR clone 2652 (TRAV30, TRAJ24)
CGTEIVGADSWGKFQF

SEQ ID NO: 5304 - protein, 14 aa, Homo sapiens
  CDR3 for beta chain variable domain of TCR clone 2652 (TRBV12-5, TRBJ2-5)
CASGSRTHQETQYF

SEQ ID NO: 5305 - protein, 10 aa, Homo sapiens
  CDR3 for alpha chain variable domain of TCR clone 2653 (TRAV2, TRAJ15)
RGQAGTALIF

SEQ ID NO: 5306 - protein, 13 aa, Homo sapiens
  CDR3 for beta chain variable domain of TCR clone 2653 (TRBV27, TRBJ2-1)
CASRTLGVGEQFF

SEQ ID NO: 5307 - protein, 15 aa, Homo sapiens
  CDR3 for alpha chain variable domain of TCR clone 2654 (TRAV8-4, TRAJ10)
CAVSDGPGGGNKLTF

SEQ ID NO: 5308 - protein, 13 aa, Homo sapiens
  CDR3 for beta chain variable domain of TCR clone 2654 (TRBV28, TRBJ1-3)
CASSFLGSGTIYF

SEQ ID NO: 5309 - protein, 14 aa, Homo sapiens
  CDR3 for alpha chain variable domain of TCR clone 2655 (TRAV12-1, TRAJ38)
CGELKAGNNRKLIW

SEQ ID NO: 5310 - protein, 12 aa, Homo sapiens
  CDR3 for beta chain variable domain of TCR clone 2655 (TRBV24-1, TRBJ1-1)
CATLYPDTEAFF

SEQ ID NO: 5311 - protein, 13 aa, Homo sapiens
  CDR3 for alpha chain variable domain of TCR clone 2656 (TRAV13-1, TRAJ11)
CAASIRGYSTLTF

SEQ ID NO: 5312 - protein, 17 aa, Homo sapiens
  CDR3 for beta chain variable domain of TCR clone 2656 (TRBV4-3, TRBJ1-2)
CASSSRLQAGGSVGYTF

SEQ ID NO: 5313 - protein, 14 aa, Homo sapiens
  CDR3 for alpha chain variable domain of TCR clone 2657 (TRAV12-3, TRAJ5)
CAMTWDTGRRALTF

SEQ ID NO: 5314 - protein, 14 aa, Homo sapiens
  CDR3 for beta chain variable domain of TCR clone 2657 (TRBV10-2, TRBJ1-5)
CASSSTGRNQPQHF

SEQ ID NO: 5315 - protein, 12 aa, Homo sapiens
  CDR3 for alpha chain variable domain of TCR clone 2658 (TRAV12-3, TRAJ17)
CAMTLTGNKLTF

SEQ ID NO: 5316 - protein, 15 aa, Homo sapiens
  CDR3 for beta chain variable domain of TCR clone 2658 (TRBV20-1, TRBJ2-7)
CSARDRVSGVDEQYF

SEQ ID NO: 5317 - protein, 14 aa, Homo sapiens
  CDR3 for alpha chain variable domain of TCR clone 2659 (TRAV1-2, TRAJ16)
CAVNRFSDGQKLLF

SEQ ID NO: 5318 - protein, 16 aa, Homo sapiens
  CDR3 for beta chain variable domain of TCR clone 2659 (TRBV19, TRBJ2-1)
CASSEILAGDGNEQFF

SEQ ID NO: 5319 - protein, 13 aa, Homo sapiens
  CDR3 for alpha chain variable domain of TCR clone 2660 (TRAV16, TRAJ54)
CALKVRGAQKLVF

SEQ ID NO: 5320 - protein, 13 aa, Homo sapiens
  CDR3 for beta chain variable domain of TCR clone 2660 (TRBV20-1, TRBJ1-1)
CSARGGGNTEAFF

SEQ ID NO: 5321 - protein, 17 aa, Homo sapiens
  CDR3 for alpha chain variable domain of TCR clone 2661 (TRAV3, TRAJ12)
CAVRDGGRMDSSYKLIF

SEQ ID NO: 5322 - protein, 13 aa, Homo sapiens
  CDR3 for beta chain variable domain of TCR clone 2661 (TRBV20-1, TRBJ1-1)
CSAPLGGGTEAFF

SEQ ID NO: 5323 - protein, 13 aa, Homo sapiens
  CDR3 for alpha chain variable domain of TCR clone 2662 (TRAV26-1, TRAJ48)
CIVRVVGDEKLTF

SEQ ID NO: 5324 - protein, 16 aa, Homo sapiens
  CDR3 for beta chain variable domain of TCR clone 2662 (TRBV12-5, TRBJ2-5)
CASGPRTSGNQETQYF

SEQ ID NO: 5325 - protein, 18 aa, Homo sapiens
  CDR3 for alpha chain variable domain of TCR clone 2663 (TRAV12-2, )
CAVEDIQNPDPAVYQLRD

SEQ ID NO: 5326 - protein, 18 aa, Homo sapiens
  CDR3 for beta chain variable domain of TCR clone 2663 (TRBV11-2, TRBJ2-3)
CASSLGGASRGAPNTQYF

SEQ ID NO: 5327 - protein, 13 aa, Homo sapiens
  CDR3 for alpha chain variable domain of TCR clone 2664 (TRAV13-2, TRAJ8)
CAFMNTGFQKLVF

SEQ ID NO: 5328 - protein, 15 aa, Homo sapiens
  CDR3 for beta chain variable domain of TCR clone 2664 (TRBV19, TRBJ2-3)
CAAGDTNAPNDTQYF

SEQ ID NO: 5329 - protein, 16 aa, Homo sapiens
  CDR3 for alpha chain variable domain of TCR clone 2665 (TRAV26-1, TRAJ48)
IASSDLSNFGNEKLTF

SEQ ID NO: 5330 - protein, 14 aa, Homo sapiens
  CDR3 for beta chain variable domain of TCR clone 2665 (TRBV13, TRBJ2-7)
CASSLKGASYEQYF

SEQ ID NO: 5331 - protein, 14 aa, Homo sapiens
  CDR3 for alpha chain variable domain of TCR clone 2666 (TRAV1-2, TRAJ16)
CAVNRFSDGQKLLF

SEQ ID NO: 5332 - protein, 15 aa, Homo sapiens
  CDR3 for beta chain variable domain of TCR clone 2666 (TRBV12-4, TRBJ2-5)
CASSPPTGLQETQYF

SEQ ID NO: 5333 - protein, 13 aa, Homo sapiens
  CDR3 for alpha chain variable domain of TCR clone 2667 (TRAV34, TRAJ22)
CGAGAGSARQLTF

SEQ ID NO: 5334 - protein, 16 aa, Homo sapiens
  CDR3 for beta chain variable domain of TCR clone 2667 (TRBV7-3, TRBJ2-1)
CASSKPLAGGYNEQFF

SEQ ID NO: 5335 - protein, 12 aa, Homo sapiens
  CDR3 for alpha chain variable domain of TCR clone 2668 (TRAV13-2, TRAJ23)
CAERHRGGKLIF

SEQ ID NO: 5336 - protein, 15 aa, Homo sapiens
  CDR3 for beta chain variable domain of TCR clone 2668 (TRBV6-3, TRBJ2-7)
CASSSPGTVFYEQYF

SEQ ID NO: 5337 - protein, 20 aa, Homo sapiens
  CDR3 for alpha chain variable domain of TCR clone 2669 (TRAV12-1, TRAJ42)
SSVIQPPTSVKGGSQGNLIF

SEQ ID NO: 5338 - protein, 15 aa, Homo sapiens
  CDR3 for beta chain variable domain of TCR clone 2669 (TRBV4-1, TRBJ2-7)
CASSQNTGRLYEQYF

SEQ ID NO: 5339 - protein, 18 aa, Homo sapiens
  CDR3 for alpha chain variable domain of TCR clone 2670 (TRAV1-1, TRAJ12)
CLLLLRCERGDSSYKLIF

SEQ ID NO: 5340 - protein, 15 aa, Homo sapiens
  CDR3 for beta chain variable domain of TCR clone 2670 (TRBV18, TRBJ2-5)
CASTDRGPRQETQYF

SEQ ID NO: 5341 - protein, 14 aa, Homo sapiens
  CDR3 for alpha chain variable domain of TCR clone 2671 (TRAV1-2, TRAJ16)
CAVNRFSDGQKLLF

SEQ ID NO: 5342 - protein, 13 aa, Homo sapiens
  CDR3 for beta chain variable domain of TCR clone 2671 (TRBV18, TRBJ2-5)
CASSPAGKETQYF

SEQ ID NO: 5343 - protein, 14 aa, Homo sapiens
  CDR3 for alpha chain variable domain of TCR clone 2672 (TRAV1-2, TRAJ16)
CAVNRFSDGQKLLF

SEQ ID NO: 5344 - protein, 11 aa, Homo sapiens
  CDR3 for beta chain variable domain of TCR clone 2672 (TRBV12-4, TRBJ2-3)
CASTATDTQYF

SEQ ID NO: 5345 - protein, 14 aa, Homo sapiens
  CDR3 for alpha chain variable domain of TCR clone 2673 (TRAV12-3, TRAJ10)
SHLPLTGGGNKLTF

SEQ ID NO: 5346 - protein, 14 aa, Homo sapiens
  CDR3 for beta chain variable domain of TCR clone 2673 (TRBV19, TRBJ2-7)
CASTVQGRPYEQYF

SEQ ID NO: 5347 - protein, 15 aa, Homo sapiens
  CDR3 for alpha chain variable domain of TCR clone 2674 (TRAV21, TRAJ53)
CATLNSGGSNYKLTF

SEQ ID NO: 5348 - protein, 13 aa, Homo sapiens
  CDR3 for beta chain variable domain of TCR clone 2674 (TRBV4-1, TRBJ2-2)
CASSQENTGELFF

SEQ ID NO: 5349 - protein, 13 aa, Homo sapiens
  CDR3 for alpha chain variable domain of TCR clone 2675 (TRAV8-3, TRAJ15)
CAVGIQAGTALIF

SEQ ID NO: 5350 - protein, 17 aa, Homo sapiens
  CDR3 for beta chain variable domain of TCR clone 2675 (TRBV20-1, TRBJ2-1)
CSARDPLAGVSYNEQFF

SEQ ID NO: 5351 - protein, 12 aa, Homo sapiens
  CDR3 for alpha chain variable domain of TCR clone 2676 (TRAV17, TRAJ21)
CALRYNFNKFYF

SEQ ID NO: 5352 - protein, 13 aa, Homo sapiens
  CDR3 for beta chain variable domain of TCR clone 2676 (TRBV24-1, TRBJ2-5)
CATSTGGTETQYF

SEQ ID NO: 5353 - protein, 14 aa, Homo sapiens
  CDR3 for alpha chain variable domain of TCR clone 2677 (TRAV38-2/DV8, TRAJ23)
CAYRSQNQGGKLIF

SEQ ID NO: 5354 - protein, 13 aa, Homo sapiens
  CDR3 for beta chain variable domain of TCR clone 2677 (TRBV24-1, TRBJ2-1)
CATSAGPYNEQFF

SEQ ID NO: 5355 - protein, 13 aa, Homo sapiens
  CDR3 for alpha chain variable domain of TCR clone 2678 (TRAV23/DV6, TRAJ47)
CAASMTRGNKLVF

SEQ ID NO: 5356 - protein, 14 aa, Homo sapiens
  CDR3 for beta chain variable domain of TCR clone 2678 (TRBV7-3, TRBJ1-1)
CASSLKGGNTEAFF

SEQ ID NO: 5357 - protein, 12 aa, Homo sapiens
  CDR3 for alpha chain variable domain of TCR clone 2679 (TRAV12-3, TRAJ17)
CAMTLTGNKLTF

SEQ ID NO: 5358 - protein, 18 aa, Homo sapiens
  CDR3 for beta chain variable domain of TCR clone 2679 (TRBV4-3, TRBJ1-6)
CASSQETPASSYNSPLHF

SEQ ID NO: 5359 - protein, 15 aa, Homo sapiens
  CDR3 for alpha chain variable domain of TCR clone 2680 (TRAV3, TRAJ22)
CAVRDRGGSARQLTF

SEQ ID NO: 5360 - protein, 15 aa, Homo sapiens
  CDR3 for beta chain variable domain of TCR clone 2680 (TRBV27, TRBJ2-1)
CASSNGGGSSNEQFF

SEQ ID NO: 5361 - protein, 17 aa, Homo sapiens
  CDR3 for alpha chain variable domain of TCR clone 2681 (TRAV4, TRAJ20)
CTTASWVKGNNDYKLSF

SEQ ID NO: 5362 - protein, 17 aa, Homo sapiens
  CDR3 for beta chain variable domain of TCR clone 2681 (TRBV11-2, TRBJ2-1)
CASSLYPPGVEYNEQFF

SEQ ID NO: 5363 - protein, 11 aa, Homo sapiens
  CDR3 for alpha chain variable domain of TCR clone 2682 (TRAV36/DV7, TRAJ45)
SGGGGADGLTF

SEQ ID NO: 5364 - protein, 13 aa, Homo sapiens
  CDR3 for beta chain variable domain of TCR clone 2682 (TRBV28, TRBJ2-7)
CASSPSGTYEQYF

SEQ ID NO: 5365 - protein, 10 aa, Homo sapiens
  CDR3 for alpha chain variable domain of TCR clone 2683 (TRAV13-1, TRAJ30)
CAARDDKIIF

SEQ ID NO: 5366 - protein, 15 aa, Homo sapiens
  CDR3 for beta chain variable domain of TCR clone 2683 (TRBV7-9, TRBJ1-2)
CASSLDREPNYGYTF

SEQ ID NO: 5367 - protein, 11 aa, Homo sapiens
  CDR3 for alpha chain variable domain of TCR clone 2684 (TRAV16, TRAJ29)
WAPSGNTPLVF

SEQ ID NO: 5368 - protein, 15 aa, Homo sapiens
  CDR3 for beta chain variable domain of TCR clone 2684 (TRBV5-7, TRBJ2-7)
CASSPYFEGSYEQYF

SEQ ID NO: 5369 - protein, 14 aa, Homo sapiens
  CDR3 for alpha chain variable domain of TCR clone 2685 (TRAV2, TRAJ9)
CAVEDRSGGFKTIF

SEQ ID NO: 5370 - protein, 13 aa, Homo sapiens
  CDR3 for beta chain variable domain of TCR clone 2685 (TRBV7-3, TRBJ1-1)
CASSQDWGAEAFF

SEQ ID NO: 5371 - protein, 17 aa, Homo sapiens
  CDR3 for alpha chain variable domain of TCR clone 2686 (TRAV3, TRAJ42)
CAVRDRDYGGSQGNLIF

SEQ ID NO: 5372 - protein, 20 aa, Homo sapiens
  CDR3 for beta chain variable domain of TCR clone 2686 (TRBV28, TRBJ2-1)
CASTPIGRSPGLAGGNEQFF

SEQ ID NO: 5373 - protein, 16 aa, Homo sapiens
  CDR3 for alpha chain variable domain of TCR clone 2687 (TRAV30, TRAJ24)
CGTEIVDADSWGKFQF

SEQ ID NO: 5374 - protein, 12 aa, Homo sapiens
  CDR3 for beta chain variable domain of TCR clone 2687 (TRBV7-8, TRBJ2-7)
CASSLGDREQYF

SEQ ID NO: 5375 - protein, 14 aa, Homo sapiens
  CDR3 for alpha chain variable domain of TCR clone 2688 (TRAV1-2, TRAJ16)
CAVNRFSDGQKLLF

SEQ ID NO: 5376 - protein, 16 aa, Homo sapiens
  CDR3 for beta chain variable domain of TCR clone 2688 (TRBV7-2, TRBJ2-7)
CASSLDLSGGAYEQYF

SEQ ID NO: 5377 - protein, 11 aa, Homo sapiens
  CDR3 for alpha chain variable domain of TCR clone 2689 (TRAV21, TRAJ31)
CAVRNNARLMF

SEQ ID NO: 5378 - protein, 15 aa, Homo sapiens
  CDR3 for beta chain variable domain of TCR clone 2689 (TRBV20-1, TRBJ2-7)
CSARDRVSGMDEQYF

SEQ ID NO: 5379 - protein, 15 aa, Homo sapiens
  CDR3 for alpha chain variable domain of TCR clone 2690 (TRAV16, TRAJ10)
CALRELTGGGNKLTF

SEQ ID NO: 5380 - protein, 14 aa, Homo sapiens
  CDR3 for beta chain variable domain of TCR clone 2690 (TRBV5-5, TRBJ2-7)
CASSLGQGTYEQYF

SEQ ID NO: 5381 - protein, 13 aa, Homo sapiens
  CDR3 for alpha chain variable domain of TCR clone 2691 (TRAV38-2/DV8, TRAJ53)
CASGGGSNYKLTF

SEQ ID NO: 5382 - protein, 16 aa, Homo sapiens
  CDR3 for beta chain variable domain of TCR clone 2691 (TRBV28, TRBJ1-5)
CASRFRGAVQNQPQHF

SEQ ID NO: 5383 - protein, 13 aa, Homo sapiens
  CDR3 for alpha chain variable domain of TCR clone 2692 (TRAV12-3, TRAJ33)
CAMSVNSNYQLIW

SEQ ID NO: 5384 - protein, 11 aa, Homo sapiens
  CDR3 for beta chain variable domain of TCR clone 2692 (TRBV7-3, TRBJ2-5)
CASSLSETQYF

SEQ ID NO: 5385 - protein, 16 aa, Homo sapiens
  CDR3 for alpha chain variable domain of TCR clone 2693 (TRAV12-3, TRAJ53)
CAMSPGSGGSNYKLTF

SEQ ID NO: 5386 - protein, 13 aa, Homo sapiens
  CDR3 for beta chain variable domain of TCR clone 2693 (TRBV7-2, TRBJ2-5)
CASSQTSVETQYF

SEQ ID NO: 5387 - protein, 16 aa, Homo sapiens
  CDR3 for alpha chain variable domain of TCR clone 2694 (TRAV30, TRAJ24)
CGTEIVDADSWGKFQF

SEQ ID NO: 5388 - protein, 13 aa, Homo sapiens
  CDR3 for beta chain variable domain of TCR clone 2694 (TRBV4-1, TRBJ2-2)
CASSQENTGELFF

SEQ ID NO: 5389 - protein, 15 aa, Homo sapiens
  CDR3 for alpha chain variable domain of TCR clone 2695 (TRAV38-1, TRAJ45)
CAFMKGGGGADGLTF

SEQ ID NO: 5390 - protein, 13 aa, Homo sapiens
  CDR3 for beta chain variable domain of TCR clone 2695 (TRBV7-9, TRBJ1-2)
CASSLKQNYGYTF

SEQ ID NO: 5391 - protein, 22 aa, Homo sapiens
  CDR3 for alpha chain variable domain of TCR clone 2696 (TRAV3, TRAJ38)
CAVRDCLNAGNNHIQNPDPAVY

SEQ ID NO: 5392 - protein, 19 aa, Homo sapiens
  CDR3 for beta chain variable domain of TCR clone 2696 (TRBV7-2, TRBJ2-3)
CASSFLSRNWGGGTDTQYF

SEQ ID NO: 5393 - protein, 14 aa, Homo sapiens
  CDR3 for alpha chain variable domain of TCR clone 2697 (TRAV13-1, TRAJ4)
CAATLPSGYNKLIF

SEQ ID NO: 5394 - protein, 14 aa, Homo sapiens
  CDR3 for beta chain variable domain of TCR clone 2697 (TRBV19, TRBJ2-1)
CASPTFVLSGEQFF

SEQ ID NO: 5395 - protein, 11 aa, Homo sapiens
  CDR3 for alpha chain variable domain of TCR clone 2698 (TRAV27, TRAJ20)
CAGLNDYKLSF

SEQ ID NO: 5396 - protein, 14 aa, Homo sapiens
  CDR3 for beta chain variable domain of TCR clone 2698 (TRBV6-1, TRBJ1-1)
CASTPLQMNTEAFF

SEQ ID NO: 5397 - protein, 12 aa, Homo sapiens
  CDR3 for alpha chain variable domain of TCR clone 2699 (TRAV2, TRAJ26)
CAGSPGRLWSEF

SEQ ID NO: 5398 - protein, 13 aa, Homo sapiens
  CDR3 for beta chain variable domain of TCR clone 2699 (TRBV7-9, TRBJ1-2)
CASSLKQNYGYTF

SEQ ID NO: 5399 - protein, 16 aa, Homo sapiens
  CDR3 for alpha chain variable domain of TCR clone 2700 (TRAV12-3, TRAJ45)
CAMGWGSGGGADGLTF

SEQ ID NO: 5400 - protein, 15 aa, Homo sapiens
  CDR3 for beta chain variable domain of TCR clone 2700 (TRBV3-1, TRBJ1-2)
CASSHPGTPGYGYTF

SEQ ID NO: 5401 - protein, 12 aa, Homo sapiens
  CDR3 for alpha chain variable domain of TCR clone 2701 (TRAV13-2, TRAJ8)
CAPWLGFQKLVF

SEQ ID NO: 5402 - protein, 15 aa, Homo sapiens
  CDR3 for beta chain variable domain of TCR clone 2701 (TRBV12-4, TRBJ2-5)
CASSLSGAFQETQYF

SEQ ID NO: 5403 - protein, 11 aa, Homo sapiens
  CDR3 for alpha chain variable domain of TCR clone 2702 (TRAV13-1, TRAJ20)
CSPHGLYKLSF

SEQ ID NO: 5404 - protein, 14 aa, Homo sapiens
  CDR3 for beta chain variable domain of TCR clone 2702 (TRBV28, TRBJ2-5)
CASTGAGGVETQYF

SEQ ID NO: 5405 - protein, 14 aa, Homo sapiens
  CDR3 for alpha chain variable domain of TCR clone 2703 (TRAV12-2, TRAJ17)
CAVLFKAAGNKLTF

SEQ ID NO: 5406 - protein, 14 aa, Homo sapiens
  CDR3 for beta chain variable domain of TCR clone 2703 (TRBV7-2, TRBJ2-7)
CASRSQGAAYEQYF

SEQ ID NO: 5407 - protein, 13 aa, Homo sapiens
  CDR3 for alpha chain variable domain of TCR clone 2704 (TRAV23/DV6, TRAJ45)
CAARRGGADGLTF

SEQ ID NO: 5408 - protein, 14 aa, Homo sapiens
  CDR3 for beta chain variable domain of TCR clone 2704 (TRBV7-2, TRBJ2-3)
CASSLARGTDTQYF

SEQ ID NO: 5409 - protein, 12 aa, Homo sapiens
  CDR3 for alpha chain variable domain of TCR clone 2705 (TRAV12-3, TRAJ17)
CAMTLTGNKPTF

SEQ ID NO: 5410 - protein, 15 aa, Homo sapiens
  CDR3 for beta chain variable domain of TCR clone 2705 (TRBV20-1, TRBJ2-7)
CSARDRVSGMDEQYF

SEQ ID NO: 5411 - protein, 10 aa, Homo sapiens
  CDR3 for alpha chain variable domain of TCR clone 2706 (TRAV3, TRAJ30)
CAVREIEIIF

SEQ ID NO: 5412 - protein, 12 aa, Homo sapiens
  CDR3 for beta chain variable domain of TCR clone 2706 (TRBV20-1, TRBJ2-3)
CSADGAGDTQYF

SEQ ID NO: 5413 - protein, 14 aa, Homo sapiens
  CDR3 for alpha chain variable domain of TCR clone 2707 (TRAV2, TRAJ9)
CAVEDRSGGFKTIF

SEQ ID NO: 5414 - protein, 17 aa, Homo sapiens
  CDR3 for beta chain variable domain of TCR clone 2707 (TRBV4-1, TRBJ2-7)
CASSRDPLGVRGGEQYF

SEQ ID NO: 5415 - protein, 14 aa, Homo sapiens
  CDR3 for alpha chain variable domain of TCR clone 2708 (TRAV26-1, TRAJ38)
CIADNAGNNRKLIW

SEQ ID NO: 5416 - protein, 13 aa, Homo sapiens
  CDR3 for beta chain variable domain of TCR clone 2708 (TRBV4-1, TRBJ2-7)
CASSQGQAYEQYF

SEQ ID NO: 5417 - protein, 16 aa, Homo sapiens
  CDR3 for alpha chain variable domain of TCR clone 2709 (TRAV1-2, TRAJ18)
CAVRVERGSTLGRLYF

SEQ ID NO: 5418 - protein, 16 aa, Homo sapiens
  CDR3 for beta chain variable domain of TCR clone 2709 (TRBV20-1, TRBJ2-7)
CSASTSGRLSSYEQYF

SEQ ID NO: 5419 - protein, 13 aa, Homo sapiens
  CDR3 for alpha chain variable domain of TCR clone 2710 (TRAV30, TRAJ24)
CGTVTDSWGKLQF

SEQ ID NO: 5420 - protein, 16 aa, Homo sapiens
  CDR3 for beta chain variable domain of TCR clone 2710 (TRBV7-3, TRBJ2-2)
CASSLKRGTLSGELFF

SEQ ID NO: 5421 - protein, 16 aa, Homo sapiens
  CDR3 for alpha chain variable domain of TCR clone 2711 (TRAV12-1, TRAJ43)
CVVNPHRFGAGTRLTV

SEQ ID NO: 5422 - protein, 13 aa, Homo sapiens
  CDR3 for beta chain variable domain of TCR clone 2711 (TRBV12-4, TRBJ1-2)
CASSSGPNYGYTF

SEQ ID NO: 5423 - protein, 15 aa, Homo sapiens
  CDR3 for alpha chain variable domain of TCR clone 2712 (TRAV13-2, TRAJ23)
CAERGFYNQGGKLIF

SEQ ID NO: 5424 - protein, 14 aa, Homo sapiens
  CDR3 for beta chain variable domain of TCR clone 2712 (TRBV4-1, TRBJ2-3)
CASSQDWSTDTQYF

SEQ ID NO: 5425 - protein, 13 aa, Homo sapiens
  CDR3 for alpha chain variable domain of TCR clone 2713 (TRAV12-3, TRAJ54)
CAMFAQGAQKLVF

SEQ ID NO: 5426 - protein, 16 aa, Homo sapiens
  CDR3 for beta chain variable domain of TCR clone 2713 (TRBV7-6, TRBJ2-3)
CASSPRRGGLGDTQYF

SEQ ID NO: 5427 - protein, 10 aa, Homo sapiens
  CDR3 for alpha chain variable domain of TCR clone 2714 (TRAV36/DV7, TRAJ49)
CALTGNQFYF

SEQ ID NO: 5428 - protein, 14 aa, Homo sapiens
  CDR3 for beta chain variable domain of TCR clone 2714 (TRBV4-2, TRBJ2-5)
CASSQDRGRETQYF

SEQ ID NO: 5429 - protein, 15 aa, Homo sapiens
  CDR3 for alpha chain variable domain of TCR clone 2715 (TRAV4, TRAJ42)
CLVGGYGGSQGNLIF

SEQ ID NO: 5430 - protein, 16 aa, Homo sapiens
  CDR3 for beta chain variable domain of TCR clone 2715 (TRBV27, TRBJ1-1)
CASSTRTGGVGTEAFF

SEQ ID NO: 5431 - protein, 13 aa, Homo sapiens
  CDR3 for alpha chain variable domain of TCR clone 2716 (TRAV12-1, TRAJ11)
CVVNRAGYSTLTF

SEQ ID NO: 5432 - protein, 16 aa, Homo sapiens
  CDR3 for beta chain variable domain of TCR clone 2716 (TRBV27, TRBJ2-2)
CASSLRPGGAPGELFF

SEQ ID NO: 5433 - protein, 13 aa, Homo sapiens
  CDR3 for alpha chain variable domain of TCR clone 2717 (TRAV35, TRAJ48)
CAGHEFGNEKLTF

SEQ ID NO: 5434 - protein, 16 aa, Homo sapiens
  CDR3 for beta chain variable domain of TCR clone 2717 (TRBV12-5, TRBJ2-5)
CASGPRTSGNQETQYF

SEQ ID NO: 5435 - protein, 18 aa, Homo sapiens
  CDR3 for alpha chain variable domain of TCR clone 2718 (TRAV21, TRAJ52)
CAVRPSPAGGTSYGKLTF

SEQ ID NO: 5436 - protein, 16 aa, Homo sapiens
  CDR3 for beta chain variable domain of TCR clone 2718 (TRBV13, TRBJ2-3)
CQQPLQGSGGRNTQYF

SEQ ID NO: 5437 - protein, 17 aa, Homo sapiens
  CDR3 for alpha chain variable domain of TCR clone 2719 (TRAV3, TRAJ12)
CCERRDGTMDSSYKLIF

SEQ ID NO: 5438 - protein, 15 aa, Homo sapiens
  CDR3 for beta chain variable domain of TCR clone 2719 (TRBV5-5, TRBJ1-5)
CASSLKGGGEQPQHF

SEQ ID NO: 5439 - protein, 17 aa, Homo sapiens
  CDR3 for alpha chain variable domain of TCR clone 2720 (TRAV3, TRAJ6)
CAVRGGPRAGGSYIPTF

SEQ ID NO: 5440 - protein, 14 aa, Homo sapiens
  CDR3 for beta chain variable domain of TCR clone 2720 (TRBV7-2, TRBJ2-7)
CASSPKTSFYEQYF

SEQ ID NO: 5441 - protein, 10 aa, Homo sapiens
  CDR3 for alpha chain variable domain of TCR clone 2721 (TRAV30, TRAJ48)
CGIGNEKLTF

SEQ ID NO: 5442 - protein, 15 aa, Homo sapiens
  CDR3 for beta chain variable domain of TCR clone 2721 (TRBV28, TRBJ2-1)
CASRKTGTAYNEQFF

SEQ ID NO: 5443 - protein, 14 aa, Homo sapiens
  CDR3 for alpha chain variable domain of TCR clone 2722 (TRAV12-2, TRAJ40)
CAVKIPSGAYKYIF

SEQ ID NO: 5444 - protein, 14 aa, Homo sapiens
  CDR3 for beta chain variable domain of TCR clone 2722 (TRBV20-1, TRBJ1-1)
CSAQTRIGGTEAFF

SEQ ID NO: 5445 - protein, 13 aa, Homo sapiens
  CDR3 for alpha chain variable domain of TCR clone 2723 (TRAV21, TRAJ56)
CAVRLGANSKLTF

SEQ ID NO: 5446 - protein, 12 aa, Homo sapiens
  CDR3 for beta chain variable domain of TCR clone 2723 (TRBV12-4, TRBJ2-3)
CASSSTTDTQYF

SEQ ID NO: 5447 - protein, 16 aa, Homo sapiens
  CDR3 for alpha chain variable domain of TCR clone 2724 (TRAV12-3, TRAJ45)
CAMGWGSGGGADGLTF

SEQ ID NO: 5448 - protein, 18 aa, Homo sapiens
  CDR3 for beta chain variable domain of TCR clone 2724 (TRBV12-4, TRBJ2-2)
CASSLVAGTRGRTGELFF

SEQ ID NO: 5449 - protein, 14 aa, Homo sapiens
  CDR3 for alpha chain variable domain of TCR clone 2725 (TRAV2, TRAJ9)
CAVEDRSGGFKTIF

SEQ ID NO: 5450 - protein, 15 aa, Homo sapiens
  CDR3 for beta chain variable domain of TCR clone 2725 (TRBV19, TRBJ2-1)
CASSSPGVPLDEQFF

SEQ ID NO: 5451 - protein, 14 aa, Homo sapiens
  CDR3 for alpha chain variable domain of TCR clone 2726 (TRAV13-2, TRAJ9)
CAENLETGGFKTIF

SEQ ID NO: 5452 - protein, 16 aa, Homo sapiens
  CDR3 for beta chain variable domain of TCR clone 2726 (TRBV28, TRBJ2-5)
CASSFSPAGGWETQYF

SEQ ID NO: 5453 - protein, 12 aa, Homo sapiens
  CDR3 for alpha chain variable domain of TCR clone 2727 (TRAV16, TRAJ10)
CSRTGGGNKLTF

SEQ ID NO: 5454 - protein, 13 aa, Homo sapiens
  CDR3 for beta chain variable domain of TCR clone 2727 (TRBV15, TRBJ2-7)
CATSTTGHYEQYF

SEQ ID NO: 5455 - protein, 17 aa, Homo sapiens
  CDR3 for alpha chain variable domain of TCR clone 2728 (TRAV8-6, TRAJ58)
CAVSSWVGETSGSRLTF

SEQ ID NO: 5456 - protein, 15 aa, Homo sapiens
  CDR3 for beta chain variable domain of TCR clone 2728 (TRBV20-1, TRBJ2-7)
CSARDRVSGMDEQYF

SEQ ID NO: 5457 - protein, 13 aa, Homo sapiens
  CDR3 for alpha chain variable domain of TCR clone 2729 (TRAV21, TRAJ32)
CAVSGGATNKLIF

SEQ ID NO: 5458 - protein, 15 aa, Homo sapiens
  CDR3 for beta chain variable domain of TCR clone 2729 (TRBV23-1, TRBJ2-1)
CASSQWPQLTMSSSS

SEQ ID NO: 5459 - protein, 16 aa, Homo sapiens
  CDR3 for alpha chain variable domain of TCR clone 2730 (TRAV1-2, TRAJ10)
CAVRGVLTGGGNKLTF

SEQ ID NO: 5460 - protein, 20 aa, Homo sapiens
  CDR3 for beta chain variable domain of TCR clone 2730 (TRBV7-8, TRBJ2-2)
CASSHLFPGPTIHITGELFF

SEQ ID NO: 5461 - protein, 14 aa, Homo sapiens
  CDR3 for alpha chain variable domain of TCR clone 2731 (TRAV12-1, TRAJ8)
CVVNSNTGFQKLVF

SEQ ID NO: 5462 - protein, 16 aa, Homo sapiens
  CDR3 for beta chain variable domain of TCR clone 2731 (TRBV20-1, TRBJ2-2)
CSARDDRVGLTGELFF

SEQ ID NO: 5463 - protein, 17 aa, Homo sapiens
  CDR3 for alpha chain variable domain of TCR clone 2732 (TRAV17, TRAJ52)
CATERPSGGTSYGKLTF

SEQ ID NO: 5464 - protein, 13 aa, Homo sapiens
  CDR3 for beta chain variable domain of TCR clone 2732 (TRBV7-9, TRBJ1-2)
CASSLKQNYGYTF

SEQ ID NO: 5465 - protein, 14 aa, Homo sapiens
  CDR3 for alpha chain variable domain of TCR clone 2733 (TRAV13-1, TRAJ35)
CAASKGGFGNVLHC

SEQ ID NO: 5466 - protein, 15 aa, Homo sapiens
  CDR3 for beta chain variable domain of TCR clone 2733 (TRBV7-9, TRBJ1-6)
CASSSPGRGNSPLHF

SEQ ID NO: 5467 - protein, 15 aa, Homo sapiens
  CDR3 for alpha chain variable domain of TCR clone 2734 (TRAV12-3, TRAJ6)
CAMSATTGGSYIPTF

SEQ ID NO: 5468 - protein, 17 aa, Homo sapiens
  CDR3 for beta chain variable domain of TCR clone 2734 (TRBV13, TRBJ2-3)
CASSLSRVAGGRNTQYF

SEQ ID NO: 5469 - protein, 15 aa, Homo sapiens
  CDR3 for alpha chain variable domain of TCR clone 2735 (TRAV17, TRAJ45)
CATAELGGGADGLTF

SEQ ID NO: 5470 - protein, 14 aa, Homo sapiens
  CDR3 for beta chain variable domain of TCR clone 2735 (TRBV3-1, TRBJ2-5)
CASSQAVRQETQYF

SEQ ID NO: 5471 - protein, 15 aa, Homo sapiens
  CDR3 for alpha chain variable domain of TCR clone 2736 (TRAV21, TRAJ53)
CATLNSGGSNYKLTF

SEQ ID NO: 5472 - protein, 16 aa, Homo sapiens
  CDR3 for beta chain variable domain of TCR clone 2736 (TRBV29-1, TRBJ1-2)
CSVEANRDIANYGYTF

SEQ ID NO: 5473 - protein, 12 aa, Homo sapiens
  CDR3 for alpha chain variable domain of TCR clone 2737 (TRAV12-3, TRAJ17)
CAMTLTGNKLTF

SEQ ID NO: 5474 - protein, 13 aa, Homo sapiens
  CDR3 for beta chain variable domain of TCR clone 2737 (TRBV5-1, TRBJ1-1)
CASSADWDTEAFF

SEQ ID NO: 5475 - protein, 11 aa, Homo sapiens
  CDR3 for alpha chain variable domain of TCR clone 2738 (TRAV12-3, TRAJ27)
CAMANAGKSTF

SEQ ID NO: 5476 - protein, 12 aa, Homo sapiens
  CDR3 for beta chain variable domain of TCR clone 2738 (TRBV11-2, TRBJ2-2)
CASSLGGGELFF

SEQ ID NO: 5477 - protein, 16 aa, Homo sapiens
  CDR3 for alpha chain variable domain of TCR clone 2739 (TRAV20, TRAJ22)
CAVQASSSGSARQLTF

SEQ ID NO: 5478 - protein, 16 aa, Homo sapiens
  CDR3 for beta chain variable domain of TCR clone 2739 (TRBV20-1, TRBJ1-5)
CSASRGTGYSNQPQHF

SEQ ID NO: 5479 - protein, 13 aa, Homo sapiens
  CDR3 for alpha chain variable domain of TCR clone 2740 (TRAV12-2, TRAJ18)
CAVRGSTLGRLYF

SEQ ID NO: 5480 - protein, 18 aa, Homo sapiens
  CDR3 for beta chain variable domain of TCR clone 2740 (TRBV27, TRBJ2-3)
CASSLSGTSGRGTDTQYF

SEQ ID NO: 5481 - protein, 14 aa, Homo sapiens
  CDR3 for alpha chain variable domain of TCR clone 2741 (TRAV1-2, TRAJ16)
CAVNRFSDGQKLLF

SEQ ID NO: 5482 - protein, 16 aa, Homo sapiens
  CDR3 for beta chain variable domain of TCR clone 2741 (TRBV7-3, TRBJ2-3)
CASSLSGYRPEDTQYF

SEQ ID NO: 5483 - protein, 14 aa, Homo sapiens
  CDR3 for alpha chain variable domain of TCR clone 2742 (TRAV13-1, TRAJ10)
CAALFTGGGNKLTF

SEQ ID NO: 5484 - protein, 15 aa, Homo sapiens
  CDR3 for beta chain variable domain of TCR clone 2742 (TRBV10-3, TRBJ2-2)
CAISEGDRAAGELFF

SEQ ID NO: 5485 - protein, 13 aa, Homo sapiens
  CDR3 for alpha chain variable domain of TCR clone 2743 (TRAV2, TRAJ40)
CAVVTSGTYKYIF

SEQ ID NO: 5486 - protein, 14 aa, Homo sapiens
  CDR3 for beta chain variable domain of TCR clone 2743 (TRBV19, TRBJ2-1)
CASPTFVLSGEQFL

SEQ ID NO: 5487 - protein, 14 aa, Homo sapiens
  CDR3 for alpha chain variable domain of TCR clone 2744 (TRAV13-1, TRAJ44)
CAAKATGTASKLTF

SEQ ID NO: 5488 - protein, 16 aa, Homo sapiens
  CDR3 for beta chain variable domain of TCR clone 2744 (TRBV15, TRBJ1-2)
CATSRGPRTGGGGYTF

SEQ ID NO: 5489 - protein, 14 aa, Homo sapiens
  CDR3 for alpha chain variable domain of TCR clone 2745 (TRAV8-3, TRAJ4)
CAVGAAGGYNKLIF

SEQ ID NO: 5490 - protein, 15 aa, Homo sapiens
  CDR3 for beta chain variable domain of TCR clone 2745 (TRBV5-1, TRBJ2-1)
CASSPPRAPYNEQFF

SEQ ID NO: 5491 - protein, 12 aa, Homo sapiens
  CDR3 for alpha chain variable domain of TCR clone 2746 (TRAV12-3, TRAJ21)
CAMFNNFNKFYF

SEQ ID NO: 5492 - protein, 16 aa, Homo sapiens
  CDR3 for beta chain variable domain of TCR clone 2746 (TRBV7-9, TRBJ1-2)
CASSLAPLRAAYGYTF

SEQ ID NO: 5493 - protein, 15 aa, Homo sapiens
  CDR3 for alpha chain variable domain of TCR clone 2747 (TRAV4, TRAJ39)
CLVGPNNNAGNMLTF

SEQ ID NO: 5494 - protein, 14 aa, Homo sapiens
  CDR3 for beta chain variable domain of TCR clone 2747 (TRBV11-2, TRBJ2-5)
CASSRTGGIETQYF

SEQ ID NO: 5495 - protein, 16 aa, Homo sapiens
  CDR3 for alpha chain variable domain of TCR clone 2748 (TRAV12-3, TRAJ53)
CAMSPGSGGSNYKLTF

SEQ ID NO: 5496 - protein, 13 aa, Homo sapiens
  CDR3 for beta chain variable domain of TCR clone 2748 (TRBV10-3, TRBJ2-7)
CASKLAVNYEQYF

SEQ ID NO: 5497 - protein, 14 aa, Homo sapiens
  CDR3 for alpha chain variable domain of TCR clone 2749 (TRAV1-2, TRAJ16)
CAVNRFSDGQKLLF

SEQ ID NO: 5498 - protein, 12 aa, Homo sapiens
  CDR3 for beta chain variable domain of TCR clone 2749 (TRBV7-6, TRBJ2-7)
CASSLADSEQYF

SEQ ID NO: 5499 - protein, 11 aa, Homo sapiens
  CDR3 for alpha chain variable domain of TCR clone 2750 (TRAV14/DV4, )
CAMREISRTLT

SEQ ID NO: 5500 - protein, 14 aa, Homo sapiens
  CDR3 for beta chain variable domain of TCR clone 2750 (TRBV2, TRBJ2-1)
CASSDRAYYNEQFF

SEQ ID NO: 5501 - protein, 12 aa, Homo sapiens
  CDR3 for alpha chain variable domain of TCR clone 2751 (TRAV13-1, TRAJ21)
CAAKEGFNKFYF

SEQ ID NO: 5502 - protein, 12 aa, Homo sapiens
  CDR3 for beta chain variable domain of TCR clone 2751 (TRBV11-2, TRBJ2-2)
CASSLGGGELFF

SEQ ID NO: 5503 - protein, 15 aa, Homo sapiens
  CDR3 for alpha chain variable domain of TCR clone 2752 (TRAV3, TRAJ22)
CAVRDRGGSARQLTF

SEQ ID NO: 5504 - protein, 16 aa, Homo sapiens
  CDR3 for beta chain variable domain of TCR clone 2752 (TRBV11-2, TRBJ2-1)
CASARGSYSHHNEQFF

SEQ ID NO: 5505 - protein, 13 aa, Homo sapiens
  CDR3 for alpha chain variable domain of TCR clone 2753 (TRAV17, TRAJ9)
CATDGTGGFKTIF

SEQ ID NO: 5506 - protein, 17 aa, Homo sapiens
  CDR3 for beta chain variable domain of TCR clone 2753 (TRBV6-5, TRBJ2-7)
CASSYSFWGQGSYEQYF

SEQ ID NO: 5507 - protein, 13 aa, Homo sapiens
  CDR3 for alpha chain variable domain of TCR clone 2754 (TRAV8-6, TRAJ34)
CAVSDQGTDKLIF

SEQ ID NO: 5508 - protein, 14 aa, Homo sapiens
  CDR3 for beta chain variable domain of TCR clone 2754 (TRBV12-4, TRBJ1-1)
CASTWTGHDTEAFF

SEQ ID NO: 5509 - protein, 16 aa, Homo sapiens
  CDR3 for alpha chain variable domain of TCR clone 2755 (TRAV16, TRAJ4)
CARSRMFSGGYNKLIF

SEQ ID NO: 5510 - protein, 16 aa, Homo sapiens
  CDR3 for beta chain variable domain of TCR clone 2755 (TRBV24-1, TRBJ2-3)
CATSDPGTGATDTQYF

SEQ ID NO: 5511 - protein, 14 aa, Homo sapiens
  CDR3 for alpha chain variable domain of TCR clone 2756 (TRAV29/DV5, TRAJ36)
CAARRKTGANNLFF

SEQ ID NO: 5512 - protein, 12 aa, Homo sapiens
  CDR3 for beta chain variable domain of TCR clone 2756 (TRBV12-5, TRBJ2-5)
CASGQGVETQYF

SEQ ID NO: 5513 - protein, 10 aa, Homo sapiens
  CDR3 for alpha chain variable domain of TCR clone 2757 (TRAV1-2, TRAJ34)
CAVNTDKLIF

SEQ ID NO: 5514 - protein, 18 aa, Homo sapiens
  CDR3 for beta chain variable domain of TCR clone 2757 (TRBV7-9, TRBJ2-7)
CASSLTTSGSRTWYEQYF

SEQ ID NO: 5515 - protein, 13 aa, Homo sapiens
  CDR3 for alpha chain variable domain of TCR clone 2758 (TRAV21, TRAJ20)
CAVGLRVDYKLSF

SEQ ID NO: 5516 - protein, 11 aa, Homo sapiens
  CDR3 for beta chain variable domain of TCR clone 2758 (TRBV25-1, TRBJ2-1)
CATTRISEQFF

SEQ ID NO: 5517 - protein, 11 aa, Homo sapiens
  CDR3 for alpha chain variable domain of TCR clone 2759 (TRAV23/DV6, TRAJ17)
CKWAAGNKLTF

SEQ ID NO: 5518 - protein, 14 aa, Homo sapiens
  CDR3 for beta chain variable domain of TCR clone 2759 (TRBV6-1, TRBJ2-7)
CASSGGSYLYEQYF

SEQ ID NO: 5519 - protein, 11 aa, Homo sapiens
  CDR3 for alpha chain variable domain of TCR clone 2760 (TRAV2, TRAJ13)
CASGGYQKVTF

SEQ ID NO: 5520 - protein, 14 aa, Homo sapiens
  CDR3 for beta chain variable domain of TCR clone 2760 (TRBV6-3, TRBJ1-1)
CASSNLLPGAEAFF

SEQ ID NO: 5521 - protein, 15 aa, Homo sapiens
  CDR3 for alpha chain variable domain of TCR clone 2761 (TRAV2, TRAJ44)
CAVEAYTGTASKLTF

SEQ ID NO: 5522 - protein, 14 aa, Homo sapiens
  CDR3 for beta chain variable domain of TCR clone 2761 (TRBV11-2, TRBJ2-1)
CASSPGSRDNEQFF

SEQ ID NO: 5523 - protein, 14 aa, Homo sapiens
  CDR3 for alpha chain variable domain of TCR clone 2762 (TRAV30, TRAJ33)
CGTVAPRSNYQLIW

SEQ ID NO: 5524 - protein, 18 aa, Homo sapiens
  CDR3 for beta chain variable domain of TCR clone 2762 (TRBV11-2, TRBJ2-3)
CASSLGGASRGAPNTQYF

SEQ ID NO: 5525 - protein, 12 aa, Homo sapiens
  CDR3 for alpha chain variable domain of TCR clone 2763 (TRAV1-1, TRAJ8)
CAGGTGFQKLVF

SEQ ID NO: 5526 - protein, 16 aa, Homo sapiens
  CDR3 for beta chain variable domain of TCR clone 2763 (TRBV12-5, TRBJ2-5)
CASGPRTSGNQETQYF

SEQ ID NO: 5527 - protein, 12 aa, Homo sapiens
  CDR3 for alpha chain variable domain of TCR clone 2764 (TRAV12-3, TRAJ17)
CAMTLTGNKLTF

SEQ ID NO: 5528 - protein, 13 aa, Homo sapiens
  CDR3 for beta chain variable domain of TCR clone 2764 (TRBV10-3, TRBJ2-7)
CASKLAVNYEQYF

SEQ ID NO: 5529 - protein, 13 aa, Homo sapiens
  CDR3 for alpha chain variable domain of TCR clone 2765 (TRAV24, TRAJ44)
CALLTGTASKLTF

SEQ ID NO: 5530 - protein, 16 aa, Homo sapiens
  CDR3 for beta chain variable domain of TCR clone 2765 (TRBV2, TRBJ2-3)
CASSTSVEGVTDTQYF

SEQ ID NO: 5531 - protein, 12 aa, Homo sapiens
  CDR3 for alpha chain variable domain of TCR clone 2766 (TRAV26-1, TRAJ36)
CIVRVRADNLFF

SEQ ID NO: 5532 - protein, 14 aa, Homo sapiens
  CDR3 for beta chain variable domain of TCR clone 2766 (TRBV14, TRBJ2-3)
CASSRKLAADTQYF

SEQ ID NO: 5533 - protein, 10 aa, Homo sapiens
  CDR3 for alpha chain variable domain of TCR clone 2767 (TRAV13-1, TRAJ43)
CAASKNDMRF

SEQ ID NO: 5534 - protein, 13 aa, Homo sapiens
  CDR3 for beta chain variable domain of TCR clone 2767 (TRBV20-1, TRBJ1-5)
CSARTGVNQPQHF

SEQ ID NO: 5535 - protein, 14 aa, Homo sapiens
  CDR3 for alpha chain variable domain of TCR clone 2768 (TRAV1-2, TRAJ16)
CAVNRFSDGQKLLF

SEQ ID NO: 5536 - protein, 15 aa, Homo sapiens
  CDR3 for beta chain variable domain of TCR clone 2768 (TRBV6-3, TRBJ2-7)
CASSSPGTVFYEQYF

SEQ ID NO: 5537 - protein, 14 aa, Homo sapiens
  CDR3 for alpha chain variable domain of TCR clone 2769 (TRAV8-4, TRAJ17)
CAVSEGAAGNKLTF

SEQ ID NO: 5538 - protein, 13 aa, Homo sapiens
  CDR3 for beta chain variable domain of TCR clone 2769 (TRBV19, TRBJ2-1)
CASSMYRVNEQFF

SEQ ID NO: 5539 - protein, 14 aa, Homo sapiens
  CDR3 for alpha chain variable domain of TCR clone 2770 (TRAV12-2, TRAJ44)
CAVNPAGTASKLTF

SEQ ID NO: 5540 - protein, 15 aa, Homo sapiens
  CDR3 for beta chain variable domain of TCR clone 2770 (TRBV5-1, TRBJ2-1)
CASSPPRAPYNEQFF

SEQ ID NO: 5541 - protein, 14 aa, Homo sapiens
  CDR3 for alpha chain variable domain of TCR clone 2771 (TRAV8-4, TRAJ4)
CAVSPSGGYNKLIF

SEQ ID NO: 5542 - protein, 15 aa, Homo sapiens
  CDR3 for beta chain variable domain of TCR clone 2771 (TRBV7-8, TRBJ2-3)
CASSLSADSGGAQYF

SEQ ID NO: 5543 - protein, 12 aa, Homo sapiens
  CDR3 for alpha chain variable domain of TCR clone 2772 (TRAV8-3, TRAJ26)
CAGDNYGQNFVF

SEQ ID NO: 5544 - protein, 13 aa, Homo sapiens
  CDR3 for beta chain variable domain of TCR clone 2772 (TRBV20-1, TRBJ2-5)
CSARGDYQETQYF

SEQ ID NO: 5545 - protein, 14 aa, Homo sapiens
  CDR3 for alpha chain variable domain of TCR clone 2773 (TRAV13-1, TRAJ44)
CAAKATGTASKLTF

SEQ ID NO: 5546 - protein, 15 aa, Homo sapiens
  CDR3 for beta chain variable domain of TCR clone 2773 (TRBV4-3, TRBJ1-1)
CASSQELGRGTEAFF

SEQ ID NO: 5547 - protein, 13 aa, Homo sapiens
  CDR3 for alpha chain variable domain of TCR clone 2774 (TRAV13-1, TRAJ40)
CAASKGGTYKYIF

SEQ ID NO: 5548 - protein, 13 aa, Homo sapiens
  CDR3 for beta chain variable domain of TCR clone 2774 (TRBV7-6, TRBJ1-2)
CASSLVADYGYTF

SEQ ID NO: 5549 - protein, 15 aa, Homo sapiens
  CDR3 for alpha chain variable domain of TCR clone 2775 (TRAV17, TRAJ56)
CATDANTGANSKLTF

SEQ ID NO: 5550 - protein, 12 aa, Homo sapiens
  CDR3 for beta chain variable domain of TCR clone 2775 (TRBV7-8, TRBJ2-7)
CASSLGDREQYF

SEQ ID NO: 5551 - protein, 12 aa, Homo sapiens
  CDR3 for alpha chain variable domain of TCR clone 2776 (TRAV12-3, TRAJ43)
CAISSNNNDMRF

SEQ ID NO: 5552 - protein, 15 aa, Homo sapiens
  CDR3 for beta chain variable domain of TCR clone 2776 (TRBV27, TRBJ1-4)
CASSPRHATNEKLFF

SEQ ID NO: 5553 - protein, 14 aa, Homo sapiens
  CDR3 for alpha chain variable domain of TCR clone 2777 (TRAV4, TRAJ17)
CLVGDMAAGNKLTF

SEQ ID NO: 5554 - protein, 14 aa, Homo sapiens
  CDR3 for beta chain variable domain of TCR clone 2777 (TRBV7-6, TRBJ2-3)
CASSLGTVTDTQYF

SEQ ID NO: 5555 - protein, 14 aa, Homo sapiens
  CDR3 for alpha chain variable domain of TCR clone 2778 (TRAV1-2, TRAJ8)
CAVREDTGFQKLVF

SEQ ID NO: 5556 - protein, 14 aa, Homo sapiens
  CDR3 for beta chain variable domain of TCR clone 2778 (TRBV29-1, TRBJ1-4)
CSVTGTGGNEKLFF

SEQ ID NO: 5557 - protein, 16 aa, Homo sapiens
  CDR3 for alpha chain variable domain of TCR clone 2779 (TRAV3, TRAJ10)
CAVRDMRAGGGNKLTF

SEQ ID NO: 5558 - protein, 13 aa, Homo sapiens
  CDR3 for beta chain variable domain of TCR clone 2779 (TRBV7-9, TRBJ1-2)
CASSLKQNYGYTF

SEQ ID NO: 5559 - protein, 12 aa, Homo sapiens
  CDR3 for alpha chain variable domain of TCR clone 2780 (TRAV21, TRAJ49)
CAVNDGGNQFYF

SEQ ID NO: 5560 - protein, 14 aa, Homo sapiens
  CDR3 for beta chain variable domain of TCR clone 2780 (TRBV12-5, TRBJ2-5)
CASGSRTHQETQYF

SEQ ID NO: 5561 - protein, 14 aa, Homo sapiens
  CDR3 for alpha chain variable domain of TCR clone 2781 (TRAV12-3, TRAJ13)
CAMKNSGGYQKVTF

SEQ ID NO: 5562 - protein, 13 aa, Homo sapiens
  CDR3 for beta chain variable domain of TCR clone 2781 (TRBV29-1, TRBJ2-5)
CSARDRVEETQYF

SEQ ID NO: 5563 - protein, 11 aa, Homo sapiens
  CDR3 for alpha chain variable domain of TCR clone 2782 (TRAV21, TRAJ41)
CAVRSGYALNF

SEQ ID NO: 5564 - protein, 13 aa, Homo sapiens
  CDR3 for beta chain variable domain of TCR clone 2782 (TRBV7-2, TRBJ2-5)
CASSQTSVETQYF

SEQ ID NO: 5565 - protein, 18 aa, Homo sapiens
  CDR3 for alpha chain variable domain of TCR clone 2783 (TRAV26-1, TRAJ27)
CIVRPSFNYNTNAGKSTF

SEQ ID NO: 5566 - protein, 14 aa, Homo sapiens
  CDR3 for beta chain variable domain of TCR clone 2783 (TRBV10-3, TRBJ1-6)
CAISVDGDESPLHF

SEQ ID NO: 5567 - protein, 13 aa, Homo sapiens
  CDR3 for alpha chain variable domain of TCR clone 2784 (TRAV21, TRAJ27)
CAARPGNAGKSTF

SEQ ID NO: 5568 - protein, 15 aa, Homo sapiens
  CDR3 for beta chain variable domain of TCR clone 2784 (TRBV6-3, TRBJ2-7)
CASSSPGTVFYEQYF

SEQ ID NO: 5569 - protein, 13 aa, Homo sapiens
  CDR3 for alpha chain variable domain of TCR clone 2785 (TRAV27, TRAJ39)
CAGDTPAGNMLTF

SEQ ID NO: 5570 - protein, 13 aa, Homo sapiens
  CDR3 for beta chain variable domain of TCR clone 2785 (TRBV4-1, TRBJ2-4)
CASSQVGIDIQYF

SEQ ID NO: 5571 - protein, 11 aa, Homo sapiens
  CDR3 for alpha chain variable domain of TCR clone 2786 (TRAV3, TRAJ21)
CAVGNFNKFYF

SEQ ID NO: 5572 - protein, 16 aa, Homo sapiens
  CDR3 for beta chain variable domain of TCR clone 2786 (TRBV19, TRBJ2-1)
CASSKAGPSSYNEQFF

SEQ ID NO: 5573 - protein, 14 aa, Homo sapiens
  CDR3 for alpha chain variable domain of TCR clone 2787 (TRAV12-3, TRAJ12)
CAMSRMDSSYKLIF

SEQ ID NO: 5574 - protein, 14 aa, Homo sapiens
  CDR3 for beta chain variable domain of TCR clone 2787 (TRBV20-1, TRBJ1-4)
CSARSGQSNEKLFF

SEQ ID NO: 5575 - protein, 17 aa, Homo sapiens
  CDR3 for alpha chain variable domain of TCR clone 2788 (TRAV38-2/DV8, TRAJ28)
CAFLTLYSGAGSYQLTF

SEQ ID NO: 5576 - protein, 14 aa, Homo sapiens
  CDR3 for beta chain variable domain of TCR clone 2788 (TRBV7-2, TRBJ2-5)
CASSLSGGGETQYF

SEQ ID NO: 5577 - protein, 14 aa, Homo sapiens
  CDR3 for alpha chain variable domain of TCR clone 2789 (TRAV13-1, TRAJ9)
CAASALTGGFKTIF

SEQ ID NO: 5578 - protein, 16 aa, Homo sapiens
  CDR3 for beta chain variable domain of TCR clone 2789 (TRBV12-4, TRBJ2-3)
CASSFGTGGISDTQYF

SEQ ID NO: 5579 - protein, 14 aa, Homo sapiens
  CDR3 for alpha chain variable domain of TCR clone 2790 (TRAV3, TRAJ21)
CAVRDAYNFNKFYF

SEQ ID NO: 5580 - protein, 17 aa, Homo sapiens
  CDR3 for beta chain variable domain of TCR clone 2790 (TRBV20-1, TRBJ1-6)
CSARGGYTFSYNSPLHF

SEQ ID NO: 5581 - protein, 14 aa, Homo sapiens
  CDR3 for alpha chain variable domain of TCR clone 2791 (TRAV8-6, TRAJ49)
CAVSDPGTGNQFYF

SEQ ID NO: 5582 - protein, 16 aa, Homo sapiens
  CDR3 for beta chain variable domain of TCR clone 2791 (TRBV24-1, TRBJ2-1)
CATSGVAGANYNEQFF

SEQ ID NO: 5583 - protein, 18 aa, Homo sapiens
  CDR3 for alpha chain variable domain of TCR clone 2792 (TRAV16, TRAJ52)
CALSGVDAGGTSYGKLTF

SEQ ID NO: 5584 - protein, 15 aa, Homo sapiens
  CDR3 for beta chain variable domain of TCR clone 2792 (TRBV11-3, TRBJ2-3)
CASSAGTVVTNTQYF

SEQ ID NO: 5585 - protein, 13 aa, Homo sapiens
  CDR3 for alpha chain variable domain of TCR clone 2793 (TRAV17, TRAJ20)
CAPLGVDDYKLSF

SEQ ID NO: 5586 - protein, 12 aa, Homo sapiens
  CDR3 for beta chain variable domain of TCR clone 2793 (TRBV29-1, TRBJ2-3)
CSVTGGADTQYF

SEQ ID NO: 5587 - protein, 14 aa, Homo sapiens
  CDR3 for alpha chain variable domain of TCR clone 2794 (TRAV9-2, TRAJ6)
CALSDPGGSYIPTF

SEQ ID NO: 5588 - protein, 16 aa, Homo sapiens
  CDR3 for beta chain variable domain of TCR clone 2794 (TRBV19, TRBJ2-2)
CASRSPGTGATGELFF

SEQ ID NO: 5589 - protein, 14 aa, Homo sapiens
  CDR3 for alpha chain variable domain of TCR clone 2795 (TRAV13-1, TRAJ44)
CAAKATGTASKLTF

SEQ ID NO: 5590 - protein, 15 aa, Homo sapiens
  CDR3 for beta chain variable domain of TCR clone 2795 (TRBV10-3, TRBJ2-1)
CAISDVQDRAYEQFF

SEQ ID NO: 5591 - protein, 13 aa, Homo sapiens
  CDR3 for alpha chain variable domain of TCR clone 2796 (TRAV29/DV5, TRAJ31)
CAASRNNNARLMF

SEQ ID NO: 5592 - protein, 15 aa, Homo sapiens
  CDR3 for beta chain variable domain of TCR clone 2796 (TRBV2, TRBJ2-1)
CASSELAGSYNEQFF

SEQ ID NO: 5593 - protein, 15 aa, Homo sapiens
  CDR3 for alpha chain variable domain of TCR clone 2797 (TRAV35, TRAJ40)
CAGQLGQAGTYKYIF

SEQ ID NO: 5594 - protein, 14 aa, Homo sapiens
  CDR3 for beta chain variable domain of TCR clone 2797 (TRBV7-3, TRBJ2-1)
CASSLTGGANEQFF

SEQ ID NO: 5595 - protein, 13 aa, Homo sapiens
  CDR3 for alpha chain variable domain of TCR clone 2798 (TRAV23/DV6, TRAJ6)
CAAKTGGSYIPTF

SEQ ID NO: 5596 - protein, 15 aa, Homo sapiens
  CDR3 for beta chain variable domain of TCR clone 2798 (TRBV5-1, TRBJ1-2)
CASSSYGEFDYGYTF

SEQ ID NO: 5597 - protein, 12 aa, Homo sapiens
  CDR3 for alpha chain variable domain of TCR clone 2799 (TRAV26-2, TRAJ47)
CILVEYGNKLVF

SEQ ID NO: 5598 - protein, 16 aa, Homo sapiens
  CDR3 for beta chain variable domain of TCR clone 2799 (TRBV18, TRBJ1-4)
CASSPLVGDRAEKLFF

SEQ ID NO: 5599 - protein, 16 aa, Homo sapiens
  CDR3 for alpha chain variable domain of TCR clone 2800 (TRAV3, TRAJ5)
CAVRNLMDTGRRALTF

SEQ ID NO: 5600 - protein, 16 aa, Homo sapiens
  CDR3 for beta chain variable domain of TCR clone 2800 (TRBV12-5, TRBJ2-5)
CASGPRTSGNQETQYF

SEQ ID NO: 5601 - protein, 14 aa, Homo sapiens
  CDR3 for alpha chain variable domain of TCR clone 2801 (TRAV12-3, TRAJ10)
SHLPLTGGGNKLTF

SEQ ID NO: 5602 - protein, 14 aa, Homo sapiens
  CDR3 for beta chain variable domain of TCR clone 2801 (TRBV20-1, TRBJ2-5)
CSALVPGYQETQYF

SEQ ID NO: 5603 - protein, 13 aa, Homo sapiens
  CDR3 for alpha chain variable domain of TCR clone 2802 (TRAV8-6, TRAJ32)
CAVSDRATNKLIF

SEQ ID NO: 5604 - protein, 13 aa, Homo sapiens
  CDR3 for beta chain variable domain of TCR clone 2802 (TRBV11-2, TRBJ2-7)
CASSLDLGYEQYF

SEQ ID NO: 5605 - protein, 11 aa, Homo sapiens
  CDR3 for alpha chain variable domain of TCR clone 2803 (TRAV29/DV5, TRAJ31)
CAASYRDRLMF

SEQ ID NO: 5606 - protein, 19 aa, Homo sapiens
  CDR3 for beta chain variable domain of TCR clone 2803 (TRBV19, TRBJ2-5)
CASSIGQVTDFFLGETQYF

SEQ ID NO: 5607 - protein, 14 aa, Homo sapiens
  CDR3 for alpha chain variable domain of TCR clone 2804 (TRAV35, TRAJ53)
CAGNSGGSNYKLTF

SEQ ID NO: 5608 - protein, 11 aa, Homo sapiens
  CDR3 for beta chain variable domain of TCR clone 2804 (TRBV4-1, TRBJ1-4)
CASKENEKLFF

SEQ ID NO: 5609 - protein, 17 aa, Homo sapiens
  CDR3 for alpha chain variable domain of TCR clone 2805 (TRAV3, TRAJ6)
CAVRDGPRAGGSYIPTF

SEQ ID NO: 5610 - protein, 12 aa, Homo sapiens
  CDR3 for beta chain variable domain of TCR clone 2805 (TRBV11-2, TRBJ2-2)
CASSLGGGELFF

SEQ ID NO: 5611 - protein, 16 aa, Homo sapiens
  CDR3 for alpha chain variable domain of TCR clone 2806 (TRAV23/DV6, TRAJ9)
CAASIGGNTGGFKTIF

SEQ ID NO: 5612 - protein, 15 aa, Homo sapiens
  CDR3 for beta chain variable domain of TCR clone 2806 (TRBV6-3, TRBJ2-7)
CASSSPGTVLYEQYF

SEQ ID NO: 5613 - protein, 14 aa, Homo sapiens
  CDR3 for alpha chain variable domain of TCR clone 2807 (TRAV1-2, TRAJ16)
CAVNRFSDGQKLLF

SEQ ID NO: 5614 - protein, 20 aa, Homo sapiens
  CDR3 for beta chain variable domain of TCR clone 2807 (TRBV7-8, TRBJ2-2)
CASSHLFPGPTIHITGELFF

SEQ ID NO: 5615 - protein, 13 aa, Homo sapiens
  CDR3 for alpha chain variable domain of TCR clone 2808 (TRAV12-2, TRAJ20)
CAVNRFDDYKLSF

SEQ ID NO: 5616 - protein, 12 aa, Homo sapiens
  CDR3 for beta chain variable domain of TCR clone 2808 (TRBV28, TRBJ2-3)
CASSLYRDTQYF

SEQ ID NO: 5617 - protein, 16 aa, Homo sapiens
  CDR3 for alpha chain variable domain of TCR clone 2809 (TRAV1-2, TRAJ27)
CAVREPQTPMQANQPL

SEQ ID NO: 5618 - protein, 13 aa, Homo sapiens
  CDR3 for beta chain variable domain of TCR clone 2809 (TRBV6-1, TRBJ1-2)
CASSAREGYGYTF

SEQ ID NO: 5619 - protein, 15 aa, Homo sapiens
  CDR3 for alpha chain variable domain of TCR clone 2810 (TRAV21, TRAJ53)
CATLNSGGSNYKLTF

SEQ ID NO: 5620 - protein, 14 aa, Homo sapiens
  CDR3 for beta chain variable domain of TCR clone 2810 (TRBV15, TRBJ1-2)
CATSRASVNYGYTF

SEQ ID NO: 5621 - protein, 13 aa, Homo sapiens
  CDR3 for alpha chain variable domain of TCR clone 2811 (TRAV8-3, TRAJ28)
CAVGAVGSYQLTF

SEQ ID NO: 5622 - protein, 15 aa, Homo sapiens
  CDR3 for beta chain variable domain of TCR clone 2811 (TRBV28, TRBJ2-5)
CASSPGQGSIETQYF

SEQ ID NO: 5623 - protein, 14 aa, Homo sapiens
  CDR3 for alpha chain variable domain of TCR clone 2812 (TRAV1-2, TRAJ16)
CAVNRFSDGQKLLF

SEQ ID NO: 5624 - protein, 17 aa, Homo sapiens
  CDR3 for beta chain variable domain of TCR clone 2812 (TRBV28, TRBJ2-5)
CASSTPEGDALQETQYF

SEQ ID NO: 5625 - protein, 15 aa, Homo sapiens
  CDR3 for alpha chain variable domain of TCR clone 2813 (TRAV13-2, TRAJ10)
CAENRDTGGGNKLTF

SEQ ID NO: 5626 - protein, 20 aa, Homo sapiens
  CDR3 for beta chain variable domain of TCR clone 2813 (TRBV28, TRBJ2-1)
CASTPIGRSPGLAGGNEQFF

SEQ ID NO: 5627 - protein, 13 aa, Homo sapiens
  CDR3 for alpha chain variable domain of TCR clone 2814 (TRAV23/DV6, TRAJ10)
ASVLTGGGNKLTF

SEQ ID NO: 5628 - protein, 13 aa, Homo sapiens
  CDR3 for beta chain variable domain of TCR clone 2814 (TRBV11-1, TRBJ1-2)
CASVGSWGYGYTF

SEQ ID NO: 5629 - protein, 16 aa, Homo sapiens
  CDR3 for alpha chain variable domain of TCR clone 2815 (TRAV23/DV6, TRAJ52)
CAARPSGGTSYGKLTF

SEQ ID NO: 5630 - protein, 13 aa, Homo sapiens
  CDR3 for beta chain variable domain of TCR clone 2815 (TRBV7-9, TRBJ1-1)
CASSLSGETEAFF

SEQ ID NO: 5631 - protein, 14 aa, Homo sapiens
  CDR3 for alpha chain variable domain of TCR clone 2816 (TRAV8-3, TRAJ39)
CAVGANNAGNMLTF

SEQ ID NO: 5632 - protein, 16 aa, Homo sapiens
  CDR3 for beta chain variable domain of TCR clone 2816 (TRBV6-1, TRBJ2-5)
CASSETLDRGAETQYF

SEQ ID NO: 5633 - protein, 13 aa, Homo sapiens
  CDR3 for alpha chain variable domain of TCR clone 2817 (TRAV21, TRAJ27)
CAARPGNAGKSTF

SEQ ID NO: 5634 - protein, 20 aa, Homo sapiens
  CDR3 for beta chain variable domain of TCR clone 2817 (TRBV4-2, TRBJ2-7)
CASSQASGGNLRAVLRAGHQ

SEQ ID NO: 5635 - protein, 15 aa, Homo sapiens
  CDR3 for alpha chain variable domain of TCR clone 2818 (TRAV12-1, TRAJ5)
CVVNMLETGRRALTF

SEQ ID NO: 5636 - protein, 12 aa, Homo sapiens
  CDR3 for beta chain variable domain of TCR clone 2818 (TRBV11-2, TRBJ2-2)
CASSLGGGELFF

SEQ ID NO: 5637 - protein, 14 aa, Homo sapiens
  CDR3 for alpha chain variable domain of TCR clone 2819 (TRAV1-2, TRAJ8)
CAVREDTGFQKLVF

SEQ ID NO: 5638 - protein, 13 aa, Homo sapiens
  CDR3 for beta chain variable domain of TCR clone 2819 (TRBV10-3, TRBJ2-7)
CASKLAVNYEQYF

SEQ ID NO: 5639 - protein, 12 aa, Homo sapiens
  CDR3 for alpha chain variable domain of TCR clone 2820 (TRAV2, TRAJ10)
CASTGGGNKLTF

SEQ ID NO: 5640 - protein, 14 aa, Homo sapiens
  CDR3 for beta chain variable domain of TCR clone 2820 (TRBV19, TRBJ2-5)
CASSMTGQQETQYF

SEQ ID NO: 5641 - protein, 11 aa, Homo sapiens
  CDR3 for alpha chain variable domain of TCR clone 2821 (TRAV12-3, TRAJ27)
CAMANAGKSTF

SEQ ID NO: 5642 - protein, 14 aa, Homo sapiens
  CDR3 for beta chain variable domain of TCR clone 2821 (TRBV12-5, TRBJ2-5)
CASGSRTHQETQYF

SEQ ID NO: 5643 - protein, 18 aa, Homo sapiens
  CDR3 for alpha chain variable domain of TCR clone 2822 (TRAV21, TRAJ52)
CAVRPSPAGGTSYGKLTF

SEQ ID NO: 5644 - protein, 13 aa, Homo sapiens
  CDR3 for beta chain variable domain of TCR clone 2822 (TRBV20-1, TRBJ2-5)
CSAREAFQETQYF

SEQ ID NO: 5645 - protein, 15 aa, Homo sapiens
  CDR3 for alpha chain variable domain of TCR clone 2823 (TRAV27, TRAJ50)
CAGRERGTSYDKVIF

SEQ ID NO: 5646 - protein, 16 aa, Homo sapiens
  CDR3 for beta chain variable domain of TCR clone 2823 (TRBV10-3, TRBJ1-5)
CAISDQVGAPNQPQHF

SEQ ID NO: 5647 - protein, 12 aa, Homo sapiens
  CDR3 for alpha chain variable domain of TCR clone 2824 (TRAV26-1, TRAJ17)
CIVRSAGNKLTF

SEQ ID NO: 5648 - protein, 15 aa, Homo sapiens
  CDR3 for beta chain variable domain of TCR clone 2824 (TRBV7-6, TRBJ1-2)
CASSSGGRGGYGYTF

SEQ ID NO: 5649 - protein, 11 aa, Homo sapiens
  CDR3 for alpha chain variable domain of TCR clone 2825 (TRAV3, TRAJ21)
CAVGNFNKFYF

SEQ ID NO: 5650 - protein, 15 aa, Homo sapiens
  CDR3 for beta chain variable domain of TCR clone 2825 (TRBV19, TRBJ1-2)
CASSVGQVLNYGYTF

SEQ ID NO: 5651 - protein, 12 aa, Homo sapiens
  CDR3 for alpha chain variable domain of TCR clone 2826 (TRAV13-1, TRAJ27)
CAAHTNAGKSTF

SEQ ID NO: 5652 - protein, 14 aa, Homo sapiens
  CDR3 for beta chain variable domain of TCR clone 2826 (TRBV12-5, TRBJ2-5)
CASGSRTHQETQYF

SEQ ID NO: 5653 - protein, 12 aa, Homo sapiens
  CDR3 for alpha chain variable domain of TCR clone 2827 (TRAV12-3, TRAJ48)
CAMRIGNEKLTF

SEQ ID NO: 5654 - protein, 12 aa, Homo sapiens
  CDR3 for beta chain variable domain of TCR clone 2827 (TRBV13, TRBJ2-7)
CASSLQAYEQYF

SEQ ID NO: 5655 - protein, 13 aa, Homo sapiens
  CDR3 for alpha chain variable domain of TCR clone 2828 (TRAV13-1, TRAJ48)
CAAASFGNEKLTF

SEQ ID NO: 5656 - protein, 14 aa, Homo sapiens
  CDR3 for beta chain variable domain of TCR clone 2828 (TRBV18, TRBJ2-1)
CASSPGTSETEQFF

SEQ ID NO: 5657 - protein, 17 aa, Homo sapiens
  CDR3 for alpha chain variable domain of TCR clone 2829 (TRAV8-3, TRAJ50)
CAVGAVDTETSYDKVIF

SEQ ID NO: 5658 - protein, 13 aa, Homo sapiens
  CDR3 for beta chain variable domain of TCR clone 2829 (TRBV7-9, TRBJ2-2)
CASSSAGTGELFF

SEQ ID NO: 5659 - protein, 16 aa, Homo sapiens
  CDR3 for alpha chain variable domain of TCR clone 2830 (TRAV30, TRAJ24)
CGTEIVDADSWGKFQF

SEQ ID NO: 5660 - protein, 15 aa, Homo sapiens
  CDR3 for beta chain variable domain of TCR clone 2830 (TRBV9, TRBJ1-6)
CASSVAGTGDSPLHF

SEQ ID NO: 5661 - protein, 12 aa, Homo sapiens
  CDR3 for alpha chain variable domain of TCR clone 2831 (TRAV13-2, TRAJ31)
CAESYNNARLMF

SEQ ID NO: 5662 - protein, 13 aa, Homo sapiens
  CDR3 for beta chain variable domain of TCR clone 2831 (TRBV24-1, TRBJ1-3)
CATMADSGNTIYF

SEQ ID NO: 5663 - protein, 11 aa, Homo sapiens
  CDR3 for alpha chain variable domain of TCR clone 2832 (TRAV21, TRAJ20)
CAVRDDYKLSF

SEQ ID NO: 5664 - protein, 14 aa, Homo sapiens
  CDR3 for beta chain variable domain of TCR clone 2832 (TRBV12-4, TRBJ1-1)
CASSFSQMNTEAFF

SEQ ID NO: 5665 - protein, 15 aa, Homo sapiens
  CDR3 for alpha chain variable domain of TCR clone 2833 (TRAV12-1, TRAJ9)
CVVSFGDTGGFKTIF

SEQ ID NO: 5666 - protein, 19 aa, Homo sapiens
  CDR3 for beta chain variable domain of TCR clone 2833 (TRBV25-1, TRBJ2-2)
CAILVYRVDRGRKTGELFF

SEQ ID NO: 5667 - protein, 16 aa, Homo sapiens
  CDR3 for alpha chain variable domain of TCR clone 2834 (TRAV23/DV6, TRAJ9)
CAASIGGNTGGFKTIF

SEQ ID NO: 5668 - protein, 13 aa, Homo sapiens
  CDR3 for beta chain variable domain of TCR clone 2834 (TRBV7-9, TRBJ1-2)
CASSLKQNYGYTF

SEQ ID NO: 5669 - protein, 18 aa, Homo sapiens
  CDR3 for alpha chain variable domain of TCR clone 2835 (TRAV21, TRAJ53)
CAVKGGENSGGSNYKLTF

SEQ ID NO: 5670 - protein, 13 aa, Homo sapiens
  CDR3 for beta chain variable domain of TCR clone 2835 (TRBV9, TRBJ2-1)
CASSPSGGSEQFF

SEQ ID NO: 5671 - protein, 14 aa, Homo sapiens
  CDR3 for alpha chain variable domain of TCR clone 2836 (TRAV26-1, TRAJ44)
CIVSNTGTASKLTF

SEQ ID NO: 5672 - protein, 11 aa, Homo sapiens
  CDR3 for beta chain variable domain of TCR clone 2836 (TRBV19, TRBJ2-7)
CASSILGEQYF

SEQ ID NO: 5673 - protein, 13 aa, Homo sapiens
  CDR3 for alpha chain variable domain of TCR clone 2837 (TRAV16, TRAJ9)
CALSNTGGFKTIF

SEQ ID NO: 5674 - protein, 14 aa, Homo sapiens
  CDR3 for beta chain variable domain of TCR clone 2837 (TRBV5-1, TRBJ2-1)
CASSLEGPVYEQFF

SEQ ID NO: 5675 - protein, 18 aa, Homo sapiens
  CDR3 for alpha chain variable domain of TCR clone 2838 (TRAV21, TRAJ52)
CAVRPSPAGGTSYGKLTF

SEQ ID NO: 5676 - protein, 13 aa, Homo sapiens
  CDR3 for beta chain variable domain of TCR clone 2838 (TRBV29-1, TRBJ2-1)
CSVEGGRVNEQFF

SEQ ID NO: 5677 - protein, 12 aa, Homo sapiens
  CDR3 for alpha chain variable domain of TCR clone 2839 (TRAV12-3, TRAJ17)
CAMTLTGNKLTF

SEQ ID NO: 5678 - protein, 15 aa, Homo sapiens
  CDR3 for beta chain variable domain of TCR clone 2839 (TRBV20-1, TRBJ2-7)
CSARDRVSWMDEQYF

SEQ ID NO: 5679 - protein, 12 aa, Homo sapiens
  CDR3 for alpha chain variable domain of TCR clone 2840 (TRAV12-2, TRAJ16)
CAVNLDGQKLLF

SEQ ID NO: 5680 - protein, 12 aa, Homo sapiens
  CDR3 for beta chain variable domain of TCR clone 2840 (TRBV5-7, TRBJ2-7)
CASSVQGGEQYF

SEQ ID NO: 5681 - protein, 14 aa, Homo sapiens
  CDR3 for alpha chain variable domain of TCR clone 2841 (TRAV2, TRAJ37)
CAVDFTSNTGKLIF

SEQ ID NO: 5682 - protein, 13 aa, Homo sapiens
  CDR3 for beta chain variable domain of TCR clone 2841 (TRBV4-2, TRBJ1-1)
CASSQAGNTEAFF

SEQ ID NO: 5683 - protein, 13 aa, Homo sapiens
  CDR3 for alpha chain variable domain of TCR clone 2842 (TRAV8-6, TRAJ49)
CAVITNTGNQFYF

SEQ ID NO: 5684 - protein, 12 aa, Homo sapiens
  CDR3 for beta chain variable domain of TCR clone 2842 (TRBV11-2, TRBJ2-2)
CASSLGGGELFF

SEQ ID NO: 5685 - protein, 11 aa, Homo sapiens
  CDR3 for alpha chain variable domain of TCR clone 2843 (TRAV12-3, TRAJ43)
CAMSVSNDMRF

SEQ ID NO: 5686 - protein, 16 aa, Homo sapiens
  CDR3 for beta chain variable domain of TCR clone 2843 (TRBV2, TRBJ2-3)
CASSTSVEGVTDTQYF

SEQ ID NO: 5687 - protein, 12 aa, Homo sapiens
  CDR3 for alpha chain variable domain of TCR clone 2844 (TRAV13-1, TRAJ21)
CAAKEGFNKFYF

SEQ ID NO: 5688 - protein, 14 aa, Homo sapiens
  CDR3 for beta chain variable domain of TCR clone 2844 (TRBV5-1, TRBJ2-7)
CASSRGESLYEQYF

SEQ ID NO: 5689 - protein, 16 aa, Homo sapiens
  CDR3 for alpha chain variable domain of TCR clone 2845 (TRAV8-3, TRAJ13)
CAVGAYPSGGYQKVTF

SEQ ID NO: 5690 - protein, 13 aa, Homo sapiens
  CDR3 for beta chain variable domain of TCR clone 2845 (TRBV7-9, TRBJ1-2)
CASSLKQNYGYTF

SEQ ID NO: 5691 - protein, 17 aa, Homo sapiens
  CDR3 for alpha chain variable domain of TCR clone 2846 (TRAV3, TRAJ6)
CAVRDGPRAGGSYIPTF

SEQ ID NO: 5692 - protein, 13 aa, Homo sapiens
  CDR3 for beta chain variable domain of TCR clone 2846 (TRBV12-5, TRBJ2-3)
CASGDRQSDTQYF

SEQ ID NO: 5693 - protein, 14 aa, Homo sapiens
  CDR3 for alpha chain variable domain of TCR clone 2847 (TRAV1-2, TRAJ16)
CAVNRFSDGQKLLF

SEQ ID NO: 5694 - protein, 15 aa, Homo sapiens
  CDR3 for beta chain variable domain of TCR clone 2847 (TRBV3-1, TRBJ2-5)
CASSANLGGPETQYF

SEQ ID NO: 5695 - protein, 11 aa, Homo sapiens
  CDR3 for alpha chain variable domain of TCR clone 2848 (TRAV3, TRAJ21)
CAVGNFNKFYF

SEQ ID NO: 5696 - protein, 13 aa, Homo sapiens
  CDR3 for beta chain variable domain of TCR clone 2848 (TRBV7-3, TRBJ1-1)
CASSQDWGAEAFF

SEQ ID NO: 5697 - protein, 14 aa, Homo sapiens
  CDR3 for alpha chain variable domain of TCR clone 2849 (TRAV13-1, TRAJ8)
CAASEDTGFQKLVF

SEQ ID NO: 5698 - protein, 13 aa, Homo sapiens
  CDR3 for beta chain variable domain of TCR clone 2849 (TRBV19, TRBJ1-5)
CASSTRRDQPQHF

SEQ ID NO: 5699 - protein, 13 aa, Homo sapiens
  CDR3 for alpha chain variable domain of TCR clone 2850 (TRAV16, TRAJ9)
CALRATGGFKTIF

SEQ ID NO: 5700 - protein, 16 aa, Homo sapiens
  CDR3 for beta chain variable domain of TCR clone 2850 (TRBV5-1, TRBJ1-3)
CASSRSGEDSGNTIYF

SEQ ID NO: 5701 - protein, 14 aa, Homo sapiens
  CDR3 for alpha chain variable domain of TCR clone 2851 (TRAV8-4, TRAJ15)
CAVTIREAGTALIF

SEQ ID NO: 5702 - protein, 16 aa, Homo sapiens
  CDR3 for beta chain variable domain of TCR clone 2851 (TRBV29-1, TRBJ2-6)
CSVEDITYSGANVLTF

SEQ ID NO: 5703 - protein, 12 aa, Homo sapiens
  CDR3 for alpha chain variable domain of TCR clone 2852 (TRAV12-3, TRAJ17)
CAMTLTGNKLTF

SEQ ID NO: 5704 - protein, 15 aa, Homo sapiens
  CDR3 for beta chain variable domain of TCR clone 2852 (TRBV11-3, TRBJ2-3)
CASLKDGREGDTQYF

SEQ ID NO: 5705 - protein, 14 aa, Homo sapiens
  CDR3 for alpha chain variable domain of TCR clone 2853 (TRAV1-2, TRAJ8)
CAVREDTGFQKLVF

SEQ ID NO: 5706 - protein, 14 aa, Homo sapiens
  CDR3 for beta chain variable domain of TCR clone 2853 (TRBV20-1, TRBJ1-1)
CSAQTRIGGTEAFF

SEQ ID NO: 5707 - protein, 17 aa, Homo sapiens
  CDR3 for alpha chain variable domain of TCR clone 2854 (TRAV12-2, TRAJ4)
CAVNVRPVSGGYNKLIF

SEQ ID NO: 5708 - protein, 17 aa, Homo sapiens
  CDR3 for beta chain variable domain of TCR clone 2854 (TRBV6-3, TRBJ2-1)
CASSYSSGTRGLDEQFF

SEQ ID NO: 5709 - protein, 14 aa, Homo sapiens
  CDR3 for alpha chain variable domain of TCR clone 2855 (TRAV1-2, TRAJ8)
CAVREDTGFQKLVF

SEQ ID NO: 5710 - protein, 15 aa, Homo sapiens
  CDR3 for beta chain variable domain of TCR clone 2855 (TRBV7-9, TRBJ1-1)
CASSHRGTVNTEAFF

SEQ ID NO: 5711 - protein, 12 aa, Homo sapiens
  CDR3 for alpha chain variable domain of TCR clone 2856 (TRAV13-1, TRAJ11)
CAGPSGYSTLTF

SEQ ID NO: 5712 - protein, 13 aa, Homo sapiens
  CDR3 for beta chain variable domain of TCR clone 2856 (TRBV12-4, TRBJ2-1)
CASSLSPSNEQFF

SEQ ID NO: 5713 - protein, 12 aa, Homo sapiens
  CDR3 for alpha chain variable domain of TCR clone 2857 (TRAV13-2, TRAJ8)
CAPWLGFQKLVF

SEQ ID NO: 5714 - protein, 13 aa, Homo sapiens
  CDR3 for beta chain variable domain of TCR clone 2857 (TRBV12-4, TRBJ1-5)
CASSPDRAQPQHF

SEQ ID NO: 5715 - protein, 16 aa, Homo sapiens
  CDR3 for alpha chain variable domain of TCR clone 2858 (TRAV8-6, TRAJ28)
CAVTSKPGAGSYQLTF

SEQ ID NO: 5716 - protein, 16 aa, Homo sapiens
  CDR3 for beta chain variable domain of TCR clone 2858 (TRBV12-4, TRBJ2-5)
CASSWRPSGDLETQYF

SEQ ID NO: 5717 - protein, 16 aa, Homo sapiens
  CDR3 for alpha chain variable domain of TCR clone 2859 (TRAV23/DV6, TRAJ48)
CAASGVVNFGNEKLTF

SEQ ID NO: 5718 - protein, 15 aa, Homo sapiens
  CDR3 for beta chain variable domain of TCR clone 2859 (TRBV20-1, TRBJ2-5)
CSAGLAGVSQETQYF

SEQ ID NO: 5719 - protein, 14 aa, Homo sapiens
  CDR3 for alpha chain variable domain of TCR clone 2860 (TRAV12-2, TRAJ17)
CAALFKAAGNKLTF

SEQ ID NO: 5720 - protein, 15 aa, Homo sapiens
  CDR3 for beta chain variable domain of TCR clone 2860 (TRBV18, TRBJ2-3)
CASSPLAGETDTQYF

SEQ ID NO: 5721 - protein, 15 aa, Homo sapiens
  CDR3 for alpha chain variable domain of TCR clone 2861 (TRAV12-2, TRAJ53)
CAVNTGGGSNYKLTF

SEQ ID NO: 5722 - protein, 15 aa, Homo sapiens
  CDR3 for beta chain variable domain of TCR clone 2861 (TRBV5-1, TRBJ2-5)
CASSLGLGEIKTQYF

SEQ ID NO: 5723 - protein, 10 aa, Homo sapiens
  CDR3 for alpha chain variable domain of TCR clone 2862 (TRAV26-2, TRAJ49)
CILLGNQFYF

SEQ ID NO: 5724 - protein, 13 aa, Homo sapiens
  CDR3 for beta chain variable domain of TCR clone 2862 (TRBV20-1, TRBJ2-7)
CSADPGATYEQYF

SEQ ID NO: 5725 - protein, 13 aa, Homo sapiens
  CDR3 for alpha chain variable domain of TCR clone 2863 (TRAV17, TRAJ31)
CATDENNNARLMF

SEQ ID NO: 5726 - protein, 14 aa, Homo sapiens
  CDR3 for beta chain variable domain of TCR clone 2863 (TRBV11-2, TRBJ2-1)
CASSPSRQGGGQFF

SEQ ID NO: 5727 - protein, 14 aa, Homo sapiens
  CDR3 for alpha chain variable domain of TCR clone 2864 (TRAV38-1, TRAJ57)
CAFMNTGGSEKLVF

SEQ ID NO: 5728 - protein, 12 aa, Homo sapiens
  CDR3 for beta chain variable domain of TCR clone 2864 (TRBV20-1, TRBJ1-5)
CSTSQGNQPQHF

SEQ ID NO: 5729 - protein, 13 aa, Homo sapiens
  CDR3 for alpha chain variable domain of TCR clone 2865 (TRAV27, TRAJ23)
CAGVLPKGGKLIF

SEQ ID NO: 5730 - protein, 14 aa, Homo sapiens
  CDR3 for beta chain variable domain of TCR clone 2865 (TRBV5-8, TRBJ2-3)
CASSLSPSTDTQYF

SEQ ID NO: 5731 - protein, 15 aa, Homo sapiens
  CDR3 for alpha chain variable domain of TCR clone 2866 (TRAV3, TRAJ22)
CAVRDRGGSARQLTF

SEQ ID NO: 5732 - protein, 16 aa, Homo sapiens
  CDR3 for beta chain variable domain of TCR clone 2866 (TRBV5-4, TRBJ2-3)
CASQQPGAGGSDTQYF

SEQ ID NO: 5733 - protein, 15 aa, Homo sapiens
  CDR3 for alpha chain variable domain of TCR clone 2867 (TRAV1-1, TRAJ24)
CALSGGTDSWGKFQF

SEQ ID NO: 5734 - protein, 16 aa, Homo sapiens
  CDR3 for beta chain variable domain of TCR clone 2867 (TRBV2, TRBJ2-7)
CASSEPWTGPSYEQYF

SEQ ID NO: 5735 - protein, 13 aa, Homo sapiens
  CDR3 for alpha chain variable domain of TCR clone 2868 (TRAV1-2, TRAJ9)
CAALNTGGFKTIF

SEQ ID NO: 5736 - protein, 15 aa, Homo sapiens
  CDR3 for beta chain variable domain of TCR clone 2868 (TRBV24-1, TRBJ2-1)
CATSGSGGFYNEQFF

SEQ ID NO: 5737 - protein, 14 aa, Homo sapiens
  CDR3 for alpha chain variable domain of TCR clone 2869 (TRAV1-2, TRAJ16)
CAVNRFSDGQKLLF

SEQ ID NO: 5738 - protein, 12 aa, Homo sapiens
  CDR3 for beta chain variable domain of TCR clone 2869 (TRBV5-1, TRBJ2-7)
CASSSTTYEQYF

SEQ ID NO: 5739 - protein, 11 aa, Homo sapiens
  CDR3 for alpha chain variable domain of TCR clone 2870 (TRAV13-1, TRAJ15)
CAATPGTALIF

SEQ ID NO: 5740 - protein, 15 aa, Homo sapiens
  CDR3 for beta chain variable domain of TCR clone 2870 (TRBV28, TRBJ2-5)
CASSPPWSYQETQYF

SEQ ID NO: 5741 - protein, 14 aa, Homo sapiens
  CDR3 for alpha chain variable domain of TCR clone 2871 (TRAV12-2, TRAJ3)
CAVKGYSSASKIIF

SEQ ID NO: 5742 - protein, 14 aa, Homo sapiens
  CDR3 for beta chain variable domain of TCR clone 2871 (TRBV6-3, TRBJ1-2)
CASSEGGGSYGYTF

SEQ ID NO: 5743 - protein, 12 aa, Homo sapiens
  CDR3 for alpha chain variable domain of TCR clone 2872 (TRAV13-2, TRAJ23)
CAERHRGGKLIF

SEQ ID NO: 5744 - protein, 15 aa, Homo sapiens
  CDR3 for beta chain variable domain of TCR clone 2872 (TRBV19, TRBJ1-2)
CASSVGQVLNYGYTF

SEQ ID NO: 5745 - protein, 13 aa, Homo sapiens
  CDR3 for alpha chain variable domain of TCR clone 2873 (TRAV2, TRAJ16)
CAVERSDGQKLLF

SEQ ID NO: 5746 - protein, 15 aa, Homo sapiens
  CDR3 for beta chain variable domain of TCR clone 2873 (TRBV20-1, TRBJ2-5)
CSAIKGQGSQETQYF

SEQ ID NO: 5747 - protein, 16 aa, Homo sapiens
  CDR3 for alpha chain variable domain of TCR clone 2874 (TRAV12-2, TRAJ45)
CAVIFLSGGGADGLTF

SEQ ID NO: 5748 - protein, 19 aa, Homo sapiens
  CDR3 for beta chain variable domain of TCR clone 2874 (TRBV28, TRBJ2-4)
CASSFQPGGPAHSKNIQYF

SEQ ID NO: 5749 - protein, 13 aa, Homo sapiens
  CDR3 for alpha chain variable domain of TCR clone 2875 (TRAV13-1, TRAJ40)
CAARTSGTYKYIF

SEQ ID NO: 5750 - protein, 17 aa, Homo sapiens
  CDR3 for beta chain variable domain of TCR clone 2875 (TRBV4-1, TRBJ2-3)
CASSQGYVSGGTDTQYF

SEQ ID NO: 5751 - protein, 16 aa, Homo sapiens
  CDR3 for alpha chain variable domain of TCR clone 2876 (TRAV3, TRAJ37)
CAVRGRGSGNTGKLIF

SEQ ID NO: 5752 - protein, 13 aa, Homo sapiens
  CDR3 for beta chain variable domain of TCR clone 2876 (TRBV14, TRBJ2-7)
CASSQDRRGEQYF

SEQ ID NO: 5753 - protein, 11 aa, Homo sapiens
  CDR3 for alpha chain variable domain of TCR clone 2877 (TRAV12-3, TRAJ43)
CAMSVSNDMRF

SEQ ID NO: 5754 - protein, 20 aa, Homo sapiens
  CDR3 for beta chain variable domain of TCR clone 2877 (TRBV28, TRBJ2-1)
CASTPIGRSPGLAGGNEQFF

SEQ ID NO: 5755 - protein, 15 aa, Homo sapiens
  CDR3 for alpha chain variable domain of TCR clone 2878 (TRAV17, TRAJ42)
CATDHYGGSQGNLIF

SEQ ID NO: 5756 - protein, 14 aa, Homo sapiens
  CDR3 for beta chain variable domain of TCR clone 2878 (TRBV19, TRBJ2-5)
CASSIEHSQETQYF

SEQ ID NO: 5757 - protein, 15 aa, Homo sapiens
  CDR3 for alpha chain variable domain of TCR clone 2879 (TRAV8-3, TRAJ45)
CASSYSGGGADGLTF

SEQ ID NO: 5758 - protein, 15 aa, Homo sapiens
  CDR3 for beta chain variable domain of TCR clone 2879 (TRBV20-1, TRBJ2-7)
CSARDRVSGMDEQYF

SEQ ID NO: 5759 - protein, 12 aa, Homo sapiens
  CDR3 for alpha chain variable domain of TCR clone 2880 (TRAV25, TRAJ29)
CAGHSGNTPLVF

SEQ ID NO: 5760 - protein, 14 aa, Homo sapiens
  CDR3 for beta chain variable domain of TCR clone 2880 (TRBV6-1, TRBJ2-7)
CASTRTGDYYEQYF

SEQ ID NO: 5761 - protein, 12 aa, Homo sapiens
  CDR3 for alpha chain variable domain of TCR clone 2881 (TRAV21, TRAJ58)
CALSASGSRLTF

SEQ ID NO: 5762 - protein, 13 aa, Homo sapiens
  CDR3 for beta chain variable domain of TCR clone 2881 (TRBV5-7, TRBJ1-2)
CASSLGVFNGYTF

SEQ ID NO: 5763 - protein, 12 aa, Homo sapiens
  CDR3 for alpha chain variable domain of TCR clone 2882 (TRAV12-3, TRAJ40)
CAMTSGTYKYIF

SEQ ID NO: 5764 - protein, 15 aa, Homo sapiens
  CDR3 for beta chain variable domain of TCR clone 2882 (TRBV7-3, TRBJ2-2)
CASSLTGQGTGELFF

SEQ ID NO: 5765 - protein, 15 aa, Homo sapiens
  CDR3 for alpha chain variable domain of TCR clone 2883 (TRAV3, TRAJ22)
CAVRDRGGSARQLTF

SEQ ID NO: 5766 - protein, 14 aa, Homo sapiens
  CDR3 for beta chain variable domain of TCR clone 2883 (TRBV20-1, TRBJ1-1)
CSAQTRIGGTEAFF

SEQ ID NO: 5767 - protein, 13 aa, Homo sapiens
  CDR3 for alpha chain variable domain of TCR clone 2884 (TRAV12-1, TRAJ40)
CVVPTSGTYKYIF

SEQ ID NO: 5768 - protein, 13 aa, Homo sapiens
  CDR3 for beta chain variable domain of TCR clone 2884 (TRBV4-2, TRBJ1-1)
CASSQAGNTEAFF

SEQ ID NO: 5769 - protein, 13 aa, Homo sapiens
  CDR3 for alpha chain variable domain of TCR clone 2885 (TRAV2, TRAJ40)
CAVVTSGTYKYIF

SEQ ID NO: 5770 - protein, 14 aa, Homo sapiens
  CDR3 for beta chain variable domain of TCR clone 2885 (TRBV19, TRBJ2-1)
CASPAFVLSGEQFF

SEQ ID NO: 5771 - protein, 13 aa, Homo sapiens
  CDR3 for alpha chain variable domain of TCR clone 2886 (TRAV3, TRAJ4)
CAVRDGGYNKLIF

SEQ ID NO: 5772 - protein, 15 aa, Homo sapiens
  CDR3 for beta chain variable domain of TCR clone 2886 (TRBV5-1, TRBJ2-1)
CASSPPRAPYNEQFF

SEQ ID NO: 5773 - protein, 16 aa, Homo sapiens
  CDR3 for alpha chain variable domain of TCR clone 2887 (TRAV3, TRAJ37)
CAVRGKGSGNTGKLIF

SEQ ID NO: 5774 - protein, 14 aa, Homo sapiens
  CDR3 for beta chain variable domain of TCR clone 2887 (TRBV20-1, TRBJ2-3)
CSARGGTSTDTQYF

SEQ ID NO: 5775 - protein, 13 aa, Homo sapiens
  CDR3 for alpha chain variable domain of TCR clone 2888 (TRAV13-1, TRAJ39)
CSKYSNAGNMLTF

SEQ ID NO: 5776 - protein, 16 aa, Homo sapiens
  CDR3 for beta chain variable domain of TCR clone 2888 (TRBV7-2, TRBJ2-3)
CASSLVALYSTDTQYF

SEQ ID NO: 5777 - protein, 15 aa, Homo sapiens
  CDR3 for alpha chain variable domain of TCR clone 2889 (TRAV23/DV6, TRAJ33)
CAASNSGGGNYQLIW

SEQ ID NO: 5778 - protein, 14 aa, Homo sapiens
  CDR3 for beta chain variable domain of TCR clone 2889 (TRBV7-2, TRBJ2-7)
CASSLYPGRYEQYF

SEQ ID NO: 5779 - protein, 13 aa, Homo sapiens
  CDR3 for alpha chain variable domain of TCR clone 2890 (TRAV2, TRAJ40)
CAVVTSGTYKYIF

SEQ ID NO: 5780 - protein, 16 aa, Homo sapiens
  CDR3 for beta chain variable domain of TCR clone 2890 (TRBV29-1, TRBJ2-6)
CSVEDITYSGANVLTF

SEQ ID NO: 5781 - protein, 15 aa, Homo sapiens
  CDR3 for alpha chain variable domain of TCR clone 2891 (TRAV3, TRAJ9)
CAVRARNTGGFKTIF

SEQ ID NO: 5782 - protein, 15 aa, Homo sapiens
  CDR3 for beta chain variable domain of TCR clone 2891 (TRBV27, TRBJ1-1)
CASSPYADPYTEAFF

SEQ ID NO: 5783 - protein, 17 aa, Homo sapiens
  CDR3 for alpha chain variable domain of TCR clone 2892 (TRAV8-2, TRAJ17)
CVVSDRRFKAAGNKLTF

SEQ ID NO: 5784 - protein, 18 aa, Homo sapiens
  CDR3 for beta chain variable domain of TCR clone 2892 (TRBV7-9, TRBJ2-7)
CASSLTTSGSRTWYEQYF

SEQ ID NO: 5785 - protein, 14 aa, Homo sapiens
  CDR3 for alpha chain variable domain of TCR clone 2893 (TRAV17, TRAJ15)
CATAPNQAGTALIF

SEQ ID NO: 5786 - protein, 14 aa, Homo sapiens
  CDR3 for beta chain variable domain of TCR clone 2893 (TRBV19, TRBJ2-7)
CASSMGQGAIEQYF

SEQ ID NO: 5787 - protein, 12 aa, Homo sapiens
  CDR3 for alpha chain variable domain of TCR clone 2894 (TRAV12-3, TRAJ17)
CAMTLTGNKLTF

SEQ ID NO: 5788 - protein, 13 aa, Homo sapiens
  CDR3 for beta chain variable domain of TCR clone 2894 (TRBV5-1, TRBJ1-2)
CASSSTGVYGYTF

SEQ ID NO: 5789 - protein, 14 aa, Homo sapiens
  CDR3 for alpha chain variable domain of TCR clone 2895 (TRAV12-2, TRAJ13)
CAVKKTGGYQKVTF

SEQ ID NO: 5790 - protein, 13 aa, Homo sapiens
  CDR3 for beta chain variable domain of TCR clone 2895 (TRBV4-2, TRBJ1-1)
CASSQAGNTEAFF

SEQ ID NO: 5791 - protein, 14 aa, Homo sapiens
  CDR3 for alpha chain variable domain of TCR clone 2896 (TRAV8-6, TRAJ9)
CAVSSYTGGFKTIF

SEQ ID NO: 5792 - protein, 15 aa, Homo sapiens
  CDR3 for beta chain variable domain of TCR clone 2896 (TRBV2, TRBJ1-2)
CASSESRTVNYGYTF

SEQ ID NO: 5793 - protein, 12 aa, Homo sapiens
  CDR3 for alpha chain variable domain of TCR clone 2897 (TRAV17, TRAJ53)
CAFGGSNYKLTF

SEQ ID NO: 5794 - protein, 16 aa, Homo sapiens
  CDR3 for beta chain variable domain of TCR clone 2897 (TRBV11-2, TRBJ2-4)
CASSQEGRGGLDIQYF

SEQ ID NO: 5795 - protein, 15 aa, Homo sapiens
  CDR3 for alpha chain variable domain of TCR clone 2898 (TRAV3, TRAJ22)
CAVRDRGGSARQLTF

SEQ ID NO: 5796 - protein, 12 aa, Homo sapiens
  CDR3 for beta chain variable domain of TCR clone 2898 (TRBV12-4, TRBJ1-2)
CASSFIWLHLRF

SEQ ID NO: 5797 - protein, 12 aa, Homo sapiens
  CDR3 for alpha chain variable domain of TCR clone 2899 (TRAV13-1, TRAJ21)
CAAKEGFNKFYF

SEQ ID NO: 5798 - protein, 15 aa, Homo sapiens
  CDR3 for beta chain variable domain of TCR clone 2899 (TRBV12-4, TRBJ2-5)
CASSPPTGLQETQYF

SEQ ID NO: 5799 - protein, 16 aa, Homo sapiens
  CDR3 for alpha chain variable domain of TCR clone 2900 (TRAV17, TRAJ28)
CASYAYSGAGSYQLTF

SEQ ID NO: 5800 - protein, 15 aa, Homo sapiens
  CDR3 for beta chain variable domain of TCR clone 2900 (TRBV4-2, TRBJ2-1)
CASSPSGGLYNEQFF

SEQ ID NO: 5801 - protein, 15 aa, Homo sapiens
  CDR3 for alpha chain variable domain of TCR clone 2901 (TRAV8-4, TRAJ8)
CAVSDLNTGFQKLVF

SEQ ID NO: 5802 - protein, 14 aa, Homo sapiens
  CDR3 for beta chain variable domain of TCR clone 2901 (TRBV7-2, TRBJ2-3)
CASSQTGSSYTQYF

SEQ ID NO: 5803 - protein, 19 aa, Homo sapiens
  CDR3 for alpha chain variable domain of TCR clone 2902 (TRAV1-2, TRAJ26)
CLLPLCCERPDNYGQNFVF

SEQ ID NO: 5804 - protein, 12 aa, Homo sapiens
  CDR3 for beta chain variable domain of TCR clone 2902 (TRBV7-9, TRBJ2-7)
CATRTDAYEQYF

SEQ ID NO: 5805 - protein, 15 aa, Homo sapiens
  CDR3 for alpha chain variable domain of TCR clone 2903 (TRAV12-2, TRAJ43)
CAFDMRFGAGTRLTV

SEQ ID NO: 5806 - protein, 13 aa, Homo sapiens
  CDR3 for beta chain variable domain of TCR clone 2903 (TRBV4-2, TRBJ1-1)
CASSQAGNTEAFF

SEQ ID NO: 5807 - protein, 16 aa, Homo sapiens
  CDR3 for alpha chain variable domain of TCR clone 2904 (TRAV3, TRAJ10)
CAVRDMRAGGGNKLTF

SEQ ID NO: 5808 - protein, 17 aa, Homo sapiens
  CDR3 for beta chain variable domain of TCR clone 2904 (TRBV20-1, TRBJ2-2)
CSASGSGQGGLTGELFF

SEQ ID NO: 5809 - protein, 10 aa, Homo sapiens
  CDR3 for alpha chain variable domain of TCR clone 2905 (TRAV36/DV7, TRAJ48)
CAVGNEKLTF

SEQ ID NO: 5810 - protein, 12 aa, Homo sapiens
  CDR3 for beta chain variable domain of TCR clone 2905 (TRBV20-1, TRBJ2-5)
CSAGGAGETQYF

SEQ ID NO: 5811 - protein, 16 aa, Homo sapiens
  CDR3 for alpha chain variable domain of TCR clone 2906 (TRAV1-2, TRAJ10)
CAVRGVLTGGGNKLTF

SEQ ID NO: 5812 - protein, 12 aa, Homo sapiens
  CDR3 for beta chain variable domain of TCR clone 2906 (TRBV12-4, TRBJ2-7)
CASSLGGYEQYF

SEQ ID NO: 5813 - protein, 13 aa, Homo sapiens
  CDR3 for alpha chain variable domain of TCR clone 2907 (TRAV20, TRAJ48)
CAVQGVGNEKLTF

SEQ ID NO: 5814 - protein, 19 aa, Homo sapiens
  CDR3 for beta chain variable domain of TCR clone 2907 (TRBV2, TRBJ2-2)
CASSQPGLAGGGNTGELFF

SEQ ID NO: 5815 - protein, 13 aa, Homo sapiens
  CDR3 for alpha chain variable domain of TCR clone 2908 (TRAV2, TRAJ16)
CAVEFGDGQKLLF

SEQ ID NO: 5816 - protein, 14 aa, Homo sapiens
  CDR3 for beta chain variable domain of TCR clone 2908 (TRBV6-3, TRBJ2-5)
CASSYSLREKTQYF

SEQ ID NO: 5817 - protein, 13 aa, Homo sapiens
  CDR3 for alpha chain variable domain of TCR clone 2909 (TRAV2, TRAJ5)
CAVPDTGRRALTF

SEQ ID NO: 5818 - protein, 15 aa, Homo sapiens
  CDR3 for beta chain variable domain of TCR clone 2909 (TRBV7-2, TRBJ2-2)
CASSTRTGYTGELFF

SEQ ID NO: 5819 - protein, 14 aa, Homo sapiens
  CDR3 for alpha chain variable domain of TCR clone 2910 (TRAV8-3, TRAJ16)
CAVDRFSDGQKLLF

SEQ ID NO: 5820 - protein, 15 aa, Homo sapiens
  CDR3 for beta chain variable domain of TCR clone 2910 (TRBV7-6, TRBJ2-1)
CASSPGQGPYNEQFF

SEQ ID NO: 5821 - protein, 14 aa, Homo sapiens
  CDR3 for alpha chain variable domain of TCR clone 2911 (TRAV13-1, TRAJ35)
CAASKGGFGNVLHC

SEQ ID NO: 5822 - protein, 14 aa, Homo sapiens
  CDR3 for beta chain variable domain of TCR clone 2911 (TRBV7-2, TRBJ2-7)
CASSPKTSFYEQYF

SEQ ID NO: 5823 - protein, 13 aa, Homo sapiens
  CDR3 for alpha chain variable domain of TCR clone 2912 (TRAV27, TRAJ16)
CAGACSDGQKLLF

SEQ ID NO: 5824 - protein, 14 aa, Homo sapiens
  CDR3 for beta chain variable domain of TCR clone 2912 (TRBV11-2, TRBJ1-3)
CASSLAVPGNTIYF

SEQ ID NO: 5825 - protein, 12 aa, Homo sapiens
  CDR3 for alpha chain variable domain of TCR clone 2913 (TRAV21, TRAJ15)
CAVNQAGTALIF

SEQ ID NO: 5826 - protein, 13 aa, Homo sapiens
  CDR3 for beta chain variable domain of TCR clone 2913 (TRBV11-2, TRBJ2-5)
CASSSTGEETQYF

SEQ ID NO: 5827 - protein, 15 aa, Homo sapiens
  CDR3 for alpha chain variable domain of TCR clone 2914 (TRAV13-1, TRAJ44)
CAASRGGGTASKLTF

SEQ ID NO: 5828 - protein, 12 aa, Homo sapiens
  CDR3 for beta chain variable domain of TCR clone 2914 (TRBV11-2, TRBJ2-2)
CASSLGGGELFF

SEQ ID NO: 5829 - protein, 16 aa, Homo sapiens
  CDR3 for alpha chain variable domain of TCR clone 2915 (TRAV12-2, TRAJ32)
CAVNMNYGGATNKLIF

SEQ ID NO: 5830 - protein, 16 aa, Homo sapiens
  CDR3 for beta chain variable domain of TCR clone 2915 (TRBV7-8, TRBJ2-3)
CASSTEGQRETDTQYF

SEQ ID NO: 5831 - protein, 23 aa, Homo sapiens
  CDR3 for alpha chain variable domain of TCR clone 2916 (TRAV26-1, TRAJ38)
CIADNAGNNHIQNPDPAVYQLRD

SEQ ID NO: 5832 - protein, 17 aa, Homo sapiens
  CDR3 for beta chain variable domain of TCR clone 2916 (TRBV11-2, TRBJ2-6)
CASSQRDIFSGANVLTF

SEQ ID NO: 5833 - protein, 17 aa, Homo sapiens
  CDR3 for alpha chain variable domain of TCR clone 2917 (TRAV8-6, TRAJ58)
CAVSSWVGETSGSRLTF

SEQ ID NO: 5834 - protein, 17 aa, Homo sapiens
  CDR3 for beta chain variable domain of TCR clone 2917 (TRBV4-3, TRBJ1-2)
CASSSRLQAGGSVGYTF

SEQ ID NO: 5835 - protein, 12 aa, Homo sapiens
  CDR3 for alpha chain variable domain of TCR clone 2918 (TRAV8-3, TRAJ4)
PAFSGGYNKLIF

SEQ ID NO: 5836 - protein, 13 aa, Homo sapiens
  CDR3 for beta chain variable domain of TCR clone 2918 (TRBV20-1, TRBJ1-3)
CSAGAYSGNTIYF

SEQ ID NO: 5837 - protein, 13 aa, Homo sapiens
  CDR3 for alpha chain variable domain of TCR clone 2919 (TRAV8-6, TRAJ41)
CAVSENSGYALNF

SEQ ID NO: 5838 - protein, 17 aa, Homo sapiens
  CDR3 for beta chain variable domain of TCR clone 2919 (TRBV7-2, TRBJ2-3)
CASSLEARGTSTDTQYF

SEQ ID NO: 5839 - protein, 12 aa, Homo sapiens
  CDR3 for alpha chain variable domain of TCR clone 2920 (TRAV12-3, TRAJ17)
CAMTLTGNKLTF

SEQ ID NO: 5840 - protein, 15 aa, Homo sapiens
  CDR3 for beta chain variable domain of TCR clone 2920 (TRBV20-1, TRBJ2-7)
CSARGRVSGMDEQYF

SEQ ID NO: 5841 - protein, 13 aa, Homo sapiens
  CDR3 for alpha chain variable domain of TCR clone 2921 (TRAV14/DV4, TRAJ23)
CAMREVKGGKLIF

SEQ ID NO: 5842 - protein, 15 aa, Homo sapiens
  CDR3 for beta chain variable domain of TCR clone 2921 (TRBV6-3, TRBJ2-1)
CASSYASDSYNEQFF

SEQ ID NO: 5843 - protein, 15 aa, Homo sapiens
  CDR3 for alpha chain variable domain of TCR clone 2922 (TRAV34, TRAJ38)
CGADFTPGNNRKLIW

SEQ ID NO: 5844 - protein, 16 aa, Homo sapiens
  CDR3 for beta chain variable domain of TCR clone 2922 (TRBV6-1, TRBJ2-3)
CASSEVIGQGTDTQYF

SEQ ID NO: 5845 - protein, 11 aa, Homo sapiens
  CDR3 for alpha chain variable domain of TCR clone 2923 (TRAV3, TRAJ21)
CAVGNFNKFYF

SEQ ID NO: 5846 - protein, 12 aa, Homo sapiens
  CDR3 for beta chain variable domain of TCR clone 2923 (TRBV29-1, TRBJ2-3)
CSVTGGADTQYF

SEQ ID NO: 5847 - protein, 13 aa, Homo sapiens
  CDR3 for alpha chain variable domain of TCR clone 2924 (TRAV26-2, TRAJ43)
CILRAVNNNDMRF

SEQ ID NO: 5848 - protein, 11 aa, Homo sapiens
  CDR3 for beta chain variable domain of TCR clone 2924 (TRBV29-1, TRBJ2-5)
CSEDRTGTQYF

SEQ ID NO: 5849 - protein, 14 aa, Homo sapiens
  CDR3 for alpha chain variable domain of TCR clone 2925 (TRAV1-2, TRAJ16)
CAVNRFSDGQKLLF

SEQ ID NO: 5850 - protein, 16 aa, Homo sapiens
  CDR3 for beta chain variable domain of TCR clone 2925 (TRBV9, TRBJ2-1)
CASSVGGGGNYNEQFF

SEQ ID NO: 5851 - protein, 11 aa, Homo sapiens
  CDR3 for alpha chain variable domain of TCR clone 2926 (TRAV3, TRAJ21)
CAVGNFNKFYF

SEQ ID NO: 5852 - protein, 17 aa, Homo sapiens
  CDR3 for beta chain variable domain of TCR clone 2926 (TRBV20-1, TRBJ2-1)
CSASSSGLAGSYNEQFF

SEQ ID NO: 5853 - protein, 15 aa, Homo sapiens
  CDR3 for alpha chain variable domain of TCR clone 2927 (TRAV21, TRAJ53)
CATLNSGGSNYKLTF

SEQ ID NO: 5854 - protein, 16 aa, Homo sapiens
  CDR3 for beta chain variable domain of TCR clone 2927 (TRBV24-1, TRBJ2-3)
CATSDPGTGATDTQYF

SEQ ID NO: 5855 - protein, 14 aa, Homo sapiens
  CDR3 for alpha chain variable domain of TCR clone 2928 (TRAV8-3, TRAJ4)
CAVGAAGGYNKLIF

SEQ ID NO: 5856 - protein, 15 aa, Homo sapiens
  CDR3 for beta chain variable domain of TCR clone 2928 (TRBV20-1, TRBJ2-5)
CSAPPRTGFGETQYF

SEQ ID NO: 5857 - protein, 17 aa, Homo sapiens
  CDR3 for alpha chain variable domain of TCR clone 2929 (TRAV3, TRAJ6)
CAVRDGPRAGGSYIPPF

SEQ ID NO: 5858 - protein, 14 aa, Homo sapiens
  CDR3 for beta chain variable domain of TCR clone 2929 (TRBV7-2, TRBJ2-7)
CASSPKTSFYEQYF

SEQ ID NO: 5859 - protein, 19 aa, Homo sapiens
  CDR3 for alpha chain variable domain of TCR clone 2930 (TRAV1-2, TRAJ26)
CLLPLCCERPDNYGQNFVF

SEQ ID NO: 5860 - protein, 17 aa, Homo sapiens
  CDR3 for beta chain variable domain of TCR clone 2930 (TRBV28, TRBJ2-5)
CASSRQGGLAGAETQYF

SEQ ID NO: 5861 - protein, 13 aa, Homo sapiens
  CDR3 for alpha chain variable domain of TCR clone 2931 (TRAV13-2, TRAJ5)
CAESDTGRRALTF

SEQ ID NO: 5862 - protein, 14 aa, Homo sapiens
  CDR3 for beta chain variable domain of TCR clone 2931 (TRBV2, TRBJ1-1)
CASTQVGENTEAFF

SEQ ID NO: 5863 - protein, 11 aa, Homo sapiens
  CDR3 for alpha chain variable domain of TCR clone 2932 (TRAV2, TRAJ13)
CASGGYQKVTF

SEQ ID NO: 5864 - protein, 14 aa, Homo sapiens
  CDR3 for beta chain variable domain of TCR clone 2932 (TRBV7-3, TRBJ2-7)
CASSYDQDYYEQYF

SEQ ID NO: 5865 - protein, 12 aa, Homo sapiens
  CDR3 for alpha chain variable domain of TCR clone 2933 (TRAV23/DV6, TRAJ24)
CAANDSWGKLQF

SEQ ID NO: 5866 - protein, 16 aa, Homo sapiens
  CDR3 for beta chain variable domain of TCR clone 2933 (TRBV12-4, TRBJ2-5)
CASSLSTSGGKETQYF

SEQ ID NO: 5867 - protein, 13 aa, Homo sapiens
  CDR3 for alpha chain variable domain of TCR clone 2934 (TRAV1-1, TRAJ28)
CVTSGAGSYQLTF

SEQ ID NO: 5868 - protein, 17 aa, Homo sapiens
  CDR3 for beta chain variable domain of TCR clone 2934 (TRBV18, TRBJ2-2)
CASSQRSSGQGPGELFF

SEQ ID NO: 5869 - protein, 17 aa, Homo sapiens
  CDR3 for alpha chain variable domain of TCR clone 2935 (TRAV4, TRAJ13)
CIVGVQGSSGGYQKVTF

SEQ ID NO: 5870 - protein, 18 aa, Homo sapiens
  CDR3 for beta chain variable domain of TCR clone 2935 (TRBV15, TRBJ2-3)
CATSRDGARSWDTDTQYF

SEQ ID NO: 5871 - protein, 13 aa, Homo sapiens
  CDR3 for alpha chain variable domain of TCR clone 2936 (TRAV21, TRAJ15)
CAVANQAGTALIF

SEQ ID NO: 5872 - protein, 15 aa, Homo sapiens
  CDR3 for beta chain variable domain of TCR clone 2936 (TRBV27, TRBJ2-7)
CASSLGSSVSPEQYF

SEQ ID NO: 5873 - protein, 17 aa, Homo sapiens
  CDR3 for alpha chain variable domain of TCR clone 2937 (TRAV13-2, TRAJ31)
CAENARLMFGDGTQLVV

SEQ ID NO: 5874 - protein, 14 aa, Homo sapiens
  CDR3 for beta chain variable domain of TCR clone 2937 (TRBV7-9, TRBJ2-1)
CASSLGVADNEQFF

SEQ ID NO: 5875 - protein, 13 aa, Homo sapiens
  CDR3 for alpha chain variable domain of TCR clone 2938 (TRAV27, TRAJ40)
CAGPPSGTYKYIF

SEQ ID NO: 5876 - protein, 13 aa, Homo sapiens
  CDR3 for beta chain variable domain of TCR clone 2938 (TRBV28, TRBJ1-2)
CAGRDRGNYGYTF

SEQ ID NO: 5877 - protein, 11 aa, Homo sapiens
  CDR3 for alpha chain variable domain of TCR clone 2939 (TRAV2, TRAJ13)
CASGGYQKVTF

SEQ ID NO: 5878 - protein, 16 aa, Homo sapiens
  CDR3 for beta chain variable domain of TCR clone 2939 (TRBV12-5, TRBJ2-5)
CASGPRTSGNQETQYF

SEQ ID NO: 5879 - protein, 16 aa, Homo sapiens
  CDR3 for alpha chain variable domain of TCR clone 2940 (TRAV3, TRAJ42)
CAVRDIEGGSQGNLIF

SEQ ID NO: 5880 - protein, 14 aa, Homo sapiens
  CDR3 for beta chain variable domain of TCR clone 2940 (TRBV18, TRBJ1-1)
CASSPPTGRTEAFF

SEQ ID NO: 5881 - protein, 14 aa, Homo sapiens
  CDR3 for alpha chain variable domain of TCR clone 2941 (TRAV2, TRAJ9)
CAVEDRSGGFKTIF

SEQ ID NO: 5882 - protein, 13 aa, Homo sapiens
  CDR3 for beta chain variable domain of TCR clone 2941 (TRBV7-9, TRBJ1-2)
CASSLKQNYGYTF

SEQ ID NO: 5883 - protein, 14 aa, Homo sapiens
  CDR3 for alpha chain variable domain of TCR clone 2942 (TRAV12-3, TRAJ10)
SHLPLTGGGNKLTF

SEQ ID NO: 5884 - protein, 17 aa, Homo sapiens
  CDR3 for beta chain variable domain of TCR clone 2942 (TRBV28, TRBJ2-5)
CASSTPEGDALQETQYF

SEQ ID NO: 5885 - protein, 14 aa, Homo sapiens
  CDR3 for alpha chain variable domain of TCR clone 2943 (TRAV13-1, TRAJ44)
CAAKATGTASKLTF

SEQ ID NO: 5886 - protein, 22 aa, Homo sapiens
  CDR3 for beta chain variable domain of TCR clone 2943 (TRBV19, TRBJ2-1)
CASSVRDRVTGTSGRIYNEQFF

SEQ ID NO: 5887 - protein, 17 aa, Homo sapiens
  CDR3 for alpha chain variable domain of TCR clone 2944 (TRAV8-2, )
CVVNIQNPDPAVYQLRD

SEQ ID NO: 5888 - protein, 14 aa, Homo sapiens
  CDR3 for beta chain variable domain of TCR clone 2944 (TRBV7-9, TRBJ2-5)
CASSLVGGEETQYF

SEQ ID NO: 5889 - protein, 17 aa, Homo sapiens
  CDR3 for alpha chain variable domain of TCR clone 2945 (TRAV3, TRAJ6)
CAVRDGPRAGGSYIPTF

SEQ ID NO: 5890 - protein, 14 aa, Homo sapiens
  CDR3 for beta chain variable domain of TCR clone 2945 (TRBV11-2, TRBJ2-3)
CASSRLARTDTQYF

SEQ ID NO: 5891 - protein, 13 aa, Homo sapiens
  CDR3 for alpha chain variable domain of TCR clone 2946 (TRAV3, TRAJ29)
CAVRDWGNTPLVF

SEQ ID NO: 5892 - protein, 15 aa, Homo sapiens
  CDR3 for beta chain variable domain of TCR clone 2946 (TRBV12-4, TRBJ2-5)
CASIGRTGEGETQYF

SEQ ID NO: 5893 - protein, 14 aa, Homo sapiens
  CDR3 for alpha chain variable domain of TCR clone 2947 (TRAV1-2, TRAJ8)
CAVREDTGFQKLVF

SEQ ID NO: 5894 - protein, 14 aa, Homo sapiens
  CDR3 for beta chain variable domain of TCR clone 2947 (TRBV29-1, TRBJ2-5)
CSVETSGSGETQYF

SEQ ID NO: 5895 - protein, 11 aa, Homo sapiens
  CDR3 for alpha chain variable domain of TCR clone 2948 (TRAV8-4, TRAJ20)
CAVTNVLTTTS

SEQ ID NO: 5896 - protein, 16 aa, Homo sapiens
  CDR3 for beta chain variable domain of TCR clone 2948 (TRBV6-1, TRBJ1-2)
CASSGAWQGRSHGYTF

SEQ ID NO: 5897 - protein, 11 aa, Homo sapiens
  CDR3 for alpha chain variable domain of TCR clone 2949 (TRAV13-2, TRAJ20)
CADSNDYKLSF

SEQ ID NO: 5898 - protein, 15 aa, Homo sapiens
  CDR3 for beta chain variable domain of TCR clone 2949 (TRBV4-1, TRBJ1-4)
CASSDTGGTNEKLFF

SEQ ID NO: 5899 - protein, 13 aa, Homo sapiens
  CDR3 for alpha chain variable domain of TCR clone 2950 (TRAV12-3, TRAJ13)
CAMGTGGYQKVTF

SEQ ID NO: 5900 - protein, 16 aa, Homo sapiens
  CDR3 for beta chain variable domain of TCR clone 2950 (TRBV9, TRBJ2-1)
CASSVGGGGNYNEQFF

SEQ ID NO: 5901 - protein, 17 aa, Homo sapiens
  CDR3 for alpha chain variable domain of TCR clone 2951 (TRAV1-1, TRAJ4)
CALYNKLIFGAGTRLAV

SEQ ID NO: 5902 - protein, 16 aa, Homo sapiens
  CDR3 for beta chain variable domain of TCR clone 2951 (TRBV7-3, TRBJ2-2)
CASSLKRGTLSGELFF

SEQ ID NO: 5903 - protein, 16 aa, Homo sapiens
  CDR3 for alpha chain variable domain of TCR clone 2952 (TRAV30, TRAJ44)
CGTEDKRTGTASKLTF

SEQ ID NO: 5904 - protein, 16 aa, Homo sapiens
  CDR3 for beta chain variable domain of TCR clone 2952 (TRBV10-2, TRBJ2-7)
CASSESPGSSGFEQYF

SEQ ID NO: 5905 - protein, 14 aa, Homo sapiens
  CDR3 for alpha chain variable domain of TCR clone 2953 (TRAV12-1, TRAJ12)
CVVTRMDSSYKLIF

SEQ ID NO: 5906 - protein, 15 aa, Homo sapiens
  CDR3 for beta chain variable domain of TCR clone 2953 (TRBV20-1, TRBJ2-7)
CSARDRVSGMDEQYF

SEQ ID NO: 5907 - protein, 15 aa, Homo sapiens
  CDR3 for alpha chain variable domain of TCR clone 2954 (TRAV26-1, TRAJ22)
CIVRVSFWFCKATDL

SEQ ID NO: 5908 - protein, 16 aa, Homo sapiens
  CDR3 for beta chain variable domain of TCR clone 2954 (TRBV24-1, TRBJ2-3)
CATSDPGTGATDTQYF

SEQ ID NO: 5909 - protein, 15 aa, Homo sapiens
  CDR3 for alpha chain variable domain of TCR clone 2955 (TRAV13-2, TRAJ45)
CAENNSGGGADGLTF

SEQ ID NO: 5910 - protein, 13 aa, Homo sapiens
  CDR3 for beta chain variable domain of TCR clone 2955 (TRBV25-1, TRBJ2-6)
CASRGPGANVLTF

SEQ ID NO: 5911 - protein, 12 aa, Homo sapiens
  CDR3 for alpha chain variable domain of TCR clone 2956 (TRAV21, TRAJ39)
CAADNAGNMLTF

SEQ ID NO: 5912 - protein, 15 aa, Homo sapiens
  CDR3 for beta chain variable domain of TCR clone 2956 (TRBV27, TRBJ2-1)
CASSNGGGSSNEQFF

SEQ ID NO: 5913 - protein, 13 aa, Homo sapiens
  CDR3 for alpha chain variable domain of TCR clone 2957 (TRAV8-3, TRAJ36)
CAVGATGANNLFF

SEQ ID NO: 5914 - protein, 16 aa, Homo sapiens
  CDR3 for beta chain variable domain of TCR clone 2957 (TRBV20-1, TRBJ1-4)
CSAPGQGLLTNEKLFF

SEQ ID NO: 5915 - protein, 13 aa, Homo sapiens
  CDR3 for alpha chain variable domain of TCR clone 2958 (TRAV1-2, TRAJ9)
CAVLNTGGFKTIF

SEQ ID NO: 5916 - protein, 14 aa, Homo sapiens
  CDR3 for beta chain variable domain of TCR clone 2958 (TRBV5-1, TRBJ2-2)
CASSLGGGSGELFF

SEQ ID NO: 5917 - protein, 14 aa, Homo sapiens
  CDR3 for alpha chain variable domain of TCR clone 2959 (TRAV12-3, TRAJ10)
SHLPLTGGGNKLTF

SEQ ID NO: 5918 - protein, 16 aa, Homo sapiens
  CDR3 for beta chain variable domain of TCR clone 2959 (TRBV12-4, TRBJ2-5)
CASSWRPSGDLETQYF

SEQ ID NO: 5919 - protein, 11 aa, Homo sapiens
  CDR3 for alpha chain variable domain of TCR clone 2960 (TRAV35, TRAJ30)
CAPGGDDKIIF

SEQ ID NO: 5920 - protein, 15 aa, Homo sapiens
  CDR3 for beta chain variable domain of TCR clone 2960 (TRBV9, TRBJ1-6)
CASSVAGTGDSPLHF

SEQ ID NO: 5921 - protein, 14 aa, Homo sapiens
  CDR3 for alpha chain variable domain of TCR clone 2961 (TRAV17, TRAJ12)
CAILPMDSSYKLIF

SEQ ID NO: 5922 - protein, 11 aa, Homo sapiens
  CDR3 for beta chain variable domain of TCR clone 2961 (TRBV19, TRBJ1-1)
CASSIGSEAFF

SEQ ID NO: 5923 - protein, 16 aa, Homo sapiens
  CDR3 for alpha chain variable domain of TCR clone 2962 (TRAV3, TRAJ37)
CAVRPHGSGNTGKLIF

SEQ ID NO: 5924 - protein, 14 aa, Homo sapiens
  CDR3 for beta chain variable domain of TCR clone 2962 (TRBV2, TRBJ2-1)
CASSDRAYYNEQFF

SEQ ID NO: 5925 - protein, 13 aa, Homo sapiens
  CDR3 for alpha chain variable domain of TCR clone 2963 (TRAV29/DV5, TRAJ31)
CAASRNNNARLMF

SEQ ID NO: 5926 - protein, 14 aa, Homo sapiens
  CDR3 for beta chain variable domain of TCR clone 2963 (TRBV7-9, TRBJ2-2)
CASSLVQDTGELFF

SEQ ID NO: 5927 - protein, 17 aa, Homo sapiens
  CDR3 for alpha chain variable domain of TCR clone 2964 (TRAV13-1, TRAJ52)
CAAGRNAGGTSYGKLTF

SEQ ID NO: 5928 - protein, 12 aa, Homo sapiens
  CDR3 for beta chain variable domain of TCR clone 2964 (TRBV29-1, TRBJ1-3)
CSTRDSGNTIYF

SEQ ID NO: 5929 - protein, 14 aa, Homo sapiens
  CDR3 for alpha chain variable domain of TCR clone 2965 (TRAV1-2, TRAJ16)
CAVNRFSDGQKLLF

SEQ ID NO: 5930 - protein, 15 aa, Homo sapiens
  CDR3 for beta chain variable domain of TCR clone 2965 (TRBV7-9, TRBJ1-4)
CASSARTGGNEKLFF

SEQ ID NO: 5931 - protein, 10 aa, Homo sapiens
  CDR3 for alpha chain variable domain of TCR clone 2966 (TRAV12-2, TRAJ48)
CAVTSEKLTF

SEQ ID NO: 5932 - protein, 17 aa, Homo sapiens
  CDR3 for beta chain variable domain of TCR clone 2966 (TRBV11-1, TRBJ2-7)
CASSLTGSFGLDYEQYF

SEQ ID NO: 5933 - protein, 15 aa, Homo sapiens
  CDR3 for alpha chain variable domain of TCR clone 2967 (TRAV13-1, TRAJ15)
CAASIERQAGTALIF

SEQ ID NO: 5934 - protein, 13 aa, Homo sapiens
  CDR3 for beta chain variable domain of TCR clone 2967 (TRBV5-1, TRBJ2-7)
CASSATGGNEQYF

SEQ ID NO: 5935 - protein, 13 aa, Homo sapiens
  CDR3 for alpha chain variable domain of TCR clone 2968 (TRAV3, TRAJ21)
CAVREPDFNKFYF

SEQ ID NO: 5936 - protein, 15 aa, Homo sapiens
  CDR3 for beta chain variable domain of TCR clone 2968 (TRBV9, TRBJ1-6)
CASSVAGTGDSPLHF

SEQ ID NO: 5937 - protein, 14 aa, Homo sapiens
  CDR3 for alpha chain variable domain of TCR clone 2969 (TRAV12-1, TRAJ17)
CVVNYKAAGNKLTF

SEQ ID NO: 5938 - protein, 17 aa, Homo sapiens
  CDR3 for beta chain variable domain of TCR clone 2969 (TRBV11-2, TRBJ2-1)
CASSLYPPGVEYNEQFF

SEQ ID NO: 5939 - protein, 12 aa, Homo sapiens
  CDR3 for alpha chain variable domain of TCR clone 2970 (TRAV30, TRAJ43)
CGTEERGNDMRF

SEQ ID NO: 5940 - protein, 17 aa, Homo sapiens
  CDR3 for beta chain variable domain of TCR clone 2970 (TRBV11-2, TRBJ2-1)
CASSLYPPGVEYNEQFF

SEQ ID NO: 5941 - protein, 15 aa, Homo sapiens
  CDR3 for alpha chain variable domain of TCR clone 2971 (TRAV13-1, TRAJ57)
QVPPLSQGGSEKLVF

SEQ ID NO: 5942 - protein, 17 aa, Homo sapiens
  CDR3 for beta chain variable domain of TCR clone 2971 (TRBV7-3, TRBJ2-3)
CASSLMKRMRGADTQYF

SEQ ID NO: 5943 - protein, 13 aa, Homo sapiens
  CDR3 for alpha chain variable domain of TCR clone 2972 (TRAV3, TRAJ20)
CAVRDTGDYKLSF

SEQ ID NO: 5944 - protein, 15 aa, Homo sapiens
  CDR3 for beta chain variable domain of TCR clone 2972 (TRBV6-1, TRBJ2-7)
CASSEGGGVSYEQYF

SEQ ID NO: 5945 - protein, 13 aa, Homo sapiens
  CDR3 for alpha chain variable domain of TCR clone 2973 (TRAV21, TRAJ27)
CAALNTNAGKSTF

SEQ ID NO: 5946 - protein, 15 aa, Homo sapiens
  CDR3 for beta chain variable domain of TCR clone 2973 (TRBV20-1, TRBJ2-7)
CSARKGLAESYEQYF

SEQ ID NO: 5947 - protein, 12 aa, Homo sapiens
  CDR3 for alpha chain variable domain of TCR clone 2974 (TRAV12-1, TRAJ40)
CVVPSGTYKYIF

SEQ ID NO: 5948 - protein, 15 aa, Homo sapiens
  CDR3 for beta chain variable domain of TCR clone 2974 (TRBV12-4, TRBJ2-1)
CASSPLSGRNSEQFF

SEQ ID NO: 5949 - protein, 15 aa, Homo sapiens
  CDR3 for alpha chain variable domain of TCR clone 2975 (TRAV2, TRAJ9)
CAVEDRGTGGFKTIF

SEQ ID NO: 5950 - protein, 13 aa, Homo sapiens
  CDR3 for beta chain variable domain of TCR clone 2975 (TRBV20-1, TRBJ1-1)
CSARGGGNTEAFF

SEQ ID NO: 5951 - protein, 14 aa, Homo sapiens
  CDR3 for alpha chain variable domain of TCR clone 2976 (TRAV8-1, TRAJ5)
CAVRTDTGRRALTF

SEQ ID NO: 5952 - protein, 14 aa, Homo sapiens
  CDR3 for beta chain variable domain of TCR clone 2976 (TRBV5-5, TRBJ1-2)
CASSLDPYNYGYTF

SEQ ID NO: 5953 - protein, 16 aa, Homo sapiens
  CDR3 for alpha chain variable domain of TCR clone 2977 (TRAV3, TRAJ37)
CAVRPHGSGNTGKLIF

SEQ ID NO: 5954 - protein, 14 aa, Homo sapiens
  CDR3 for beta chain variable domain of TCR clone 2977 (TRBV20-1, TRBJ2-1)
CSARGGSSYNEQFF

SEQ ID NO: 5955 - protein, 14 aa, Homo sapiens
  CDR3 for alpha chain variable domain of TCR clone 2978 (TRAV8-4, TRAJ29)
CAVSAVEGNTPLVF

SEQ ID NO: 5956 - protein, 13 aa, Homo sapiens
  CDR3 for beta chain variable domain of TCR clone 2978 (TRBV12-4, TRBJ2-7)
CASSFQGRYEQYF

SEQ ID NO: 5957 - protein, 12 aa, Homo sapiens
  CDR3 for alpha chain variable domain of TCR clone 2979 (TRAV12-3, TRAJ17)
CAMTLTGNKLTF

SEQ ID NO: 5958 - protein, 14 aa, Homo sapiens
  CDR3 for beta chain variable domain of TCR clone 2979 (TRBV20-1, TRBJ2-1)
CSAQIGGSANEQFF

SEQ ID NO: 5959 - protein, 13 aa, Homo sapiens
  CDR3 for alpha chain variable domain of TCR clone 2980 (TRAV8-3, TRAJ47)
CAVSMEYGNKLVF

SEQ ID NO: 5960 - protein, 14 aa, Homo sapiens
  CDR3 for beta chain variable domain of TCR clone 2980 (TRBV2, TRBJ1-5)
CASSGTGFNQPQHF

SEQ ID NO: 5961 - protein, 12 aa, Homo sapiens
  CDR3 for alpha chain variable domain of TCR clone 2981 (TRAV8-1, TRAJ31)
CAVINNNARLMF

SEQ ID NO: 5962 - protein, 15 aa, Homo sapiens
  CDR3 for beta chain variable domain of TCR clone 2981 (TRBV20-1, TRBJ2-2)
CSARGGQGNTGELFF

SEQ ID NO: 5963 - protein, 22 aa, Homo sapiens
  CDR3 for alpha chain variable domain of TCR clone 2982 (TRAV2, TRAJ38)
CAVEDFPNAGNNHIQNPDPAVY

SEQ ID NO: 5964 - protein, 14 aa, Homo sapiens
  CDR3 for beta chain variable domain of TCR clone 2982 (TRBV29-1, TRBJ1-4)
CSVSGRQGGEKLFF

SEQ ID NO: 5965 - protein, 13 aa, Homo sapiens
  CDR3 for alpha chain variable domain of TCR clone 2983 (TRAV26-1, TRAJ40)
CIVATSGTYKYIF

SEQ ID NO: 5966 - protein, 16 aa, Homo sapiens
  CDR3 for beta chain variable domain of TCR clone 2983 (TRBV7-2, TRBJ2-2)
CASSLYRGPNTGELFF

SEQ ID NO: 5967 - protein, 14 aa, Homo sapiens
  CDR3 for alpha chain variable domain of TCR clone 2984 (TRAV1-2, TRAJ8)
CAVREDTGFQKLVF

SEQ ID NO: 5968 - protein, 16 aa, Homo sapiens
  CDR3 for beta chain variable domain of TCR clone 2984 (TRBV5-7, TRBJ2-5)
CASTLAPAGGRETQYF

SEQ ID NO: 5969 - protein, 14 aa, Homo sapiens
  CDR3 for alpha chain variable domain of TCR clone 2985 (TRAV12-1, TRAJ30)
CVVNIGGRDDKIIF

SEQ ID NO: 5970 - protein, 14 aa, Homo sapiens
  CDR3 for beta chain variable domain of TCR clone 2985 (TRBV7-6, TRBJ2-3)
CASSLGTVTDTQYF

SEQ ID NO: 5971 - protein, 14 aa, Homo sapiens
  CDR3 for alpha chain variable domain of TCR clone 2986 (TRAV1-2, TRAJ16)
CAVNRFSDGQKLLF

SEQ ID NO: 5972 - protein, 14 aa, Homo sapiens
  CDR3 for beta chain variable domain of TCR clone 2986 (TRBV7-3, TRBJ1-1)
CASSLGTGYTEAFF

SEQ ID NO: 5973 - protein, 14 aa, Homo sapiens
  CDR3 for alpha chain variable domain of TCR clone 2987 (TRAV3, TRAJ6)
CAVRDWGGSYIPTF

SEQ ID NO: 5974 - protein, 17 aa, Homo sapiens
  CDR3 for beta chain variable domain of TCR clone 2987 (TRBV6-5, TRBJ2-1)
CASRLSGRFESYNEQFF

SEQ ID NO: 5975 - protein, 14 aa, Homo sapiens
  CDR3 for alpha chain variable domain of TCR clone 2988 (TRAV13-1, TRAJ6)
CAASITGGSYIPTF

SEQ ID NO: 5976 - protein, 14 aa, Homo sapiens
  CDR3 for beta chain variable domain of TCR clone 2988 (TRBV6-3, TRBJ2-1)
CASLHSAYYNEQFF

SEQ ID NO: 5977 - protein, 11 aa, Homo sapiens
  CDR3 for alpha chain variable domain of TCR clone 2989 (TRAV12-2, TRAJ43)
CASPIGNDMRF

SEQ ID NO: 5978 - protein, 13 aa, Homo sapiens
  CDR3 for beta chain variable domain of TCR clone 2989 (TRBV7-3, TRBJ1-2)
CASSLKRGYGYTF

SEQ ID NO: 5979 - protein, 14 aa, Homo sapiens
  CDR3 for alpha chain variable domain of TCR clone 2990 (TRAV26-1, TRAJ34)
CIVRVAYNTDKLIF

SEQ ID NO: 5980 - protein, 14 aa, Homo sapiens
  CDR3 for beta chain variable domain of TCR clone 2990 (TRBV20-1, TRBJ2-7)
CSAWTALSSYEQYF

SEQ ID NO: 5981 - protein, 14 aa, Homo sapiens
  CDR3 for alpha chain variable domain of TCR clone 2991 (TRAV2, TRAJ9)
CAVEDRSGGFKTIF

SEQ ID NO: 5982 - protein, 14 aa, Homo sapiens
  CDR3 for beta chain variable domain of TCR clone 2991 (TRBV3-1, TRBJ2-5)
CASSQGPDQETQYF

SEQ ID NO: 5983 - protein, 15 aa, Homo sapiens
  CDR3 for alpha chain variable domain of TCR clone 2992 (TRAV3, TRAJ36)
CAVRASQTGANNLFF

SEQ ID NO: 5984 - protein, 15 aa, Homo sapiens
  CDR3 for beta chain variable domain of TCR clone 2992 (TRBV3-1, TRBJ2-1)
CASSQDYTPRGEQFF

SEQ ID NO: 5985 - protein, 20 aa, Homo sapiens
  CDR3 for alpha chain variable domain of TCR clone 2993 (TRAV4, TRAJ29)
CCVLLPRGCVPFSGNTPLVF

SEQ ID NO: 5986 - protein, 17 aa, Homo sapiens
  CDR3 for beta chain variable domain of TCR clone 2993 (TRBV25-1, TRBJ2-7)
CASSDARVVFSSYEQYF

SEQ ID NO: 5987 - protein, 14 aa, Homo sapiens
  CDR3 for alpha chain variable domain of TCR clone 2994 (TRAV16, TRAJ8)
CALLLNTGFQKLVF

SEQ ID NO: 5988 - protein, 15 aa, Homo sapiens
  CDR3 for beta chain variable domain of TCR clone 2994 (TRBV7-7, TRBJ2-2)
CATSKLAKNTGELFF

SEQ ID NO: 5989 - protein, 12 aa, Homo sapiens
  CDR3 for alpha chain variable domain of TCR clone 2995 (TRAV13-1, TRAJ20)
CAARQNDYKLSF

SEQ ID NO: 5990 - protein, 14 aa, Homo sapiens
  CDR3 for beta chain variable domain of TCR clone 2995 (TRBV5-1, TRBJ2-7)
CASSFASGVNEQYF

SEQ ID NO: 5991 - protein, 23 aa, Homo sapiens
  CDR3 for alpha chain variable domain of TCR clone 2996 (TRAV4, TRAJ26)
IPADRKSSTLSLPRVYYGQNFVF

SEQ ID NO: 5992 - protein, 16 aa, Homo sapiens
  CDR3 for beta chain variable domain of TCR clone 2996 (TRBV7-2, TRBJ1-2)
CASSSNQDRRGHGYTF

SEQ ID NO: 5993 - protein, 14 aa, Homo sapiens
  CDR3 for alpha chain variable domain of TCR clone 2997 (TRAV12-2, TRAJ24)
CAVTPADSWGKLQF

SEQ ID NO: 5994 - protein, 16 aa, Homo sapiens
  CDR3 for beta chain variable domain of TCR clone 2997 (TRBV6-4, TRBJ2-3)
APSEGGRAWGTDTQYF

SEQ ID NO: 5995 - protein, 13 aa, Homo sapiens
  CDR3 for alpha chain variable domain of TCR clone 2998 (TRAV21, TRAJ20)
CAVGLRVDYKLSF

SEQ ID NO: 5996 - protein, 15 aa, Homo sapiens
  CDR3 for beta chain variable domain of TCR clone 2998 (TRBV29-1, TRBJ2-1)
CSVPTGLALYNEQFF

SEQ ID NO: 5997 - protein, 13 aa, Homo sapiens
  CDR3 for alpha chain variable domain of TCR clone 2999 (TRAV13-2, TRAJ22)
CLGWISSARQLTF

SEQ ID NO: 5998 - protein, 15 aa, Homo sapiens
  CDR3 for beta chain variable domain of TCR clone 2999 (TRBV7-2, TRBJ2-3)
CASSSTGLETDTQYF

SEQ ID NO: 5999 - protein, 14 aa, Homo sapiens
  CDR3 for alpha chain variable domain of TCR clone 3000 (TRAV4, TRAJ26)
CLVGPHNYGQNFVF

SEQ ID NO: 6000 - protein, 17 aa, Homo sapiens
  CDR3 for beta chain variable domain of TCR clone 3000 (TRBV20-1, TRBJ2-1)
CSASSSGLAGSYNEQFF

SEQ ID NO: 6001 - protein, 15 aa, Homo sapiens
  CDR3 for alpha chain variable domain of TCR clone 3001 (TRAV29/DV5, TRAJ57)
CAASLLRGGSEKLVF

SEQ ID NO: 6002 - protein, 15 aa, Homo sapiens
  CDR3 for beta chain variable domain of TCR clone 3001 (TRBV5-1, TRBJ1-3)
CASSLEGGSGNTIYF

SEQ ID NO: 6003 - protein, 14 aa, Homo sapiens
  CDR3 for alpha chain variable domain of TCR clone 3002 (TRAV8-6, TRAJ49)
CAVSVRYTGNQFYF

SEQ ID NO: 6004 - protein, 19 aa, Homo sapiens
  CDR3 for beta chain variable domain of TCR clone 3002 (TRBV28, TRBJ2-1)
CASSFSIRGSGRTRYEQFF

SEQ ID NO: 6005 - protein, 13 aa, Homo sapiens
  CDR3 for alpha chain variable domain of TCR clone 3003 (TRAV3, TRAJ30)
CAVRDRGDDKIIF

SEQ ID NO: 6006 - protein, 14 aa, Homo sapiens
  CDR3 for beta chain variable domain of TCR clone 3003 (TRBV5-1, TRBJ1-1)
CASSRTTGDTEAFF

SEQ ID NO: 6007 - protein, 14 aa, Homo sapiens
  CDR3 for alpha chain variable domain of TCR clone 3004 (TRAV1-2, TRAJ16)
CAVNRFSDGQKLLF

SEQ ID NO: 6008 - protein, 16 aa, Homo sapiens
  CDR3 for beta chain variable domain of TCR clone 3004 (TRBV29-1, TRBJ2-7)
CSVEVVGTSGSYEQYF

SEQ ID NO: 6009 - protein, 14 aa, Homo sapiens
  CDR3 for alpha chain variable domain of TCR clone 3005 (TRAV38-1, TRAJ40)
CALRPTSGTYKYIF

SEQ ID NO: 6010 - protein, 14 aa, Homo sapiens
  CDR3 for beta chain variable domain of TCR clone 3005 (TRBV19, TRBJ2-1)
CASPTFVLSGEQFF

SEQ ID NO: 6011 - protein, 16 aa, Homo sapiens
  CDR3 for alpha chain variable domain of TCR clone 3006 (TRAV35, TRAJ28)
CAGQRYSGAGSYQLTF

SEQ ID NO: 6012 - protein, 14 aa, Homo sapiens
  CDR3 for beta chain variable domain of TCR clone 3006 (TRBV18, TRBJ2-7)
CASSPRGGAYEQYF

SEQ ID NO: 6013 - protein, 14 aa, Homo sapiens
  CDR3 for alpha chain variable domain of TCR clone 3007 (TRAV13-1, TRAJ31)
CAASSRPNNARLMF

SEQ ID NO: 6014 - protein, 15 aa, Homo sapiens
  CDR3 for beta chain variable domain of TCR clone 3007 (TRBV4-2, TRBJ2-4)
CASSPLGAAKNIQYF

SEQ ID NO: 6015 - protein, 14 aa, Homo sapiens
  CDR3 for alpha chain variable domain of TCR clone 3008 (TRAV16, TRAJ33)
CALSAMDSNYQLIW

SEQ ID NO: 6016 - protein, 12 aa, Homo sapiens
  CDR3 for beta chain variable domain of TCR clone 3008 (TRBV28, TRBJ2-6)
CAIQAGANVLTF

SEQ ID NO: 6017 - protein, 16 aa, Homo sapiens
  CDR3 for alpha chain variable domain of TCR clone 3009 (TRAV1-2, TRAJ10)
CAVRGVLTGGGNKLTF

SEQ ID NO: 6018 - protein, 12 aa, Homo sapiens
  CDR3 for beta chain variable domain of TCR clone 3009 (TRBV11-2, TRBJ2-1)
CASSPGNNEQFF

SEQ ID NO: 6019 - protein, 14 aa, Homo sapiens
  CDR3 for alpha chain variable domain of TCR clone 3010 (TRAV1-2, TRAJ16)
CAVNRFSDGQKLLF

SEQ ID NO: 6020 - protein, 11 aa, Homo sapiens
  CDR3 for beta chain variable domain of TCR clone 3010 (TRBV7-8, TRBJ2-7)
CASSLSLEQYF

SEQ ID NO: 6021 - protein, 12 aa, Homo sapiens
  CDR3 for alpha chain variable domain of TCR clone 3011 (TRAV2, TRAJ33)
CAVEDSNYQLIW

SEQ ID NO: 6022 - protein, 14 aa, Homo sapiens
  CDR3 for beta chain variable domain of TCR clone 3011 (TRBV19, TRBJ1-4)
CASSINRGGEKLFF

SEQ ID NO: 6023 - protein, 12 aa, Homo sapiens
  CDR3 for alpha chain variable domain of TCR clone 3012 (TRAV8-3, TRAJ26)
CAGDNYGQNFVF

SEQ ID NO: 6024 - protein, 16 aa, Homo sapiens
  CDR3 for beta chain variable domain of TCR clone 3012 (TRBV20-1, TRBJ1-4)
CSAPGQGLLTNEKLFF

SEQ ID NO: 6025 - protein, 11 aa, Homo sapiens
  CDR3 for alpha chain variable domain of TCR clone 3013 (TRAV17, TRAJ31)
CATDRTARLMF

SEQ ID NO: 6026 - protein, 14 aa, Homo sapiens
  CDR3 for beta chain variable domain of TCR clone 3013 (TRBV4-2, TRBJ2-3)
CASSQERGTDTQYF

SEQ ID NO: 6027 - protein, 16 aa, Homo sapiens
  CDR3 for alpha chain variable domain of TCR clone 3014 (TRAV12-2, TRAJ40)
CAVIRGGTSGTYKYIF

SEQ ID NO: 6028 - protein, 13 aa, Homo sapiens
  CDR3 for beta chain variable domain of TCR clone 3014 (TRBV7-9, TRBJ1-2)
CASSLKQNYGYTF

SEQ ID NO: 6029 - protein, 12 aa, Homo sapiens
  CDR3 for alpha chain variable domain of TCR clone 3015 (TRAV1-1, TRAJ8)
CAGGTGFQKLVF

SEQ ID NO: 6030 - protein, 13 aa, Homo sapiens
  CDR3 for beta chain variable domain of TCR clone 3015 (TRBV7-3, TRBJ1-1)
CASSQDWGAEAFF

SEQ ID NO: 6031 - protein, 16 aa, Homo sapiens
  CDR3 for alpha chain variable domain of TCR clone 3016 (TRAV3, TRAJ34)
CAVRARGTPTSSSLGL

SEQ ID NO: 6032 - protein, 15 aa, Homo sapiens
  CDR3 for beta chain variable domain of TCR clone 3016 (TRBV6-3, TRBJ2-7)
CASSSPGTVFYEQYF

SEQ ID NO: 6033 - protein, 12 aa, Homo sapiens
  CDR3 for alpha chain variable domain of TCR clone 3017 (TRAV1-1, TRAJ33)
CAASDSNYQLIW

SEQ ID NO: 6034 - protein, 18 aa, Homo sapiens
  CDR3 for beta chain variable domain of TCR clone 3017 (TRBV20-1, TRBJ2-2)
CSARVQTARPSGTGELFF

SEQ ID NO: 6035 - protein, 16 aa, Homo sapiens
  CDR3 for alpha chain variable domain of TCR clone 3018 (TRAV12-2, TRAJ18)
CAVTTDRGSTLGRLYF

SEQ ID NO: 6036 - protein, 13 aa, Homo sapiens
  CDR3 for beta chain variable domain of TCR clone 3018 (TRBV19, TRBJ2-3)
CATWDKITDTQYF

SEQ ID NO: 6037 - protein, 14 aa, Homo sapiens
  CDR3 for alpha chain variable domain of TCR clone 3019 (TRAV16, TRAJ3)
CALSQYSSASKIIF

SEQ ID NO: 6038 - protein, 14 aa, Homo sapiens
  CDR3 for beta chain variable domain of TCR clone 3019 (TRBV6-3, TRBJ2-1)
CASLHSAYYNEQFF

SEQ ID NO: 6039 - protein, 12 aa, Homo sapiens
  CDR3 for alpha chain variable domain of TCR clone 3020 (TRAV4, TRAJ6)
CLAPGGSYIPTF

SEQ ID NO: 6040 - protein, 18 aa, Homo sapiens
  CDR3 for beta chain variable domain of TCR clone 3020 (TRBV20-1, TRBJ2-3)
CSASGLAGGPGTTDTQYF

SEQ ID NO: 6041 - protein, 11 aa, Homo sapiens
  CDR3 for alpha chain variable domain of TCR clone 3021 (TRAV2, TRAJ23)
CAVETRGKLIF

SEQ ID NO: 6042 - protein, 17 aa, Homo sapiens
  CDR3 for beta chain variable domain of TCR clone 3021 (TRBV20-1, TRBJ2-1)
CSASSSGLAGSYNEQFF

SEQ ID NO: 6043 - protein, 13 aa, Homo sapiens
  CDR3 for alpha chain variable domain of TCR clone 3022 (TRAV8-2, TRAJ49)
CVVTPNTGNQFYF

SEQ ID NO: 6044 - protein, 15 aa, Homo sapiens
  CDR3 for beta chain variable domain of TCR clone 3022 (TRBV11-2, TRBJ2-1)
CASSLTSGGYNEQFF

SEQ ID NO: 6045 - protein, 12 aa, Homo sapiens
  CDR3 for alpha chain variable domain of TCR clone 3023 (TRAV17, TRAJ20)
CATDGDDYKLSF

SEQ ID NO: 6046 - protein, 18 aa, Homo sapiens
  CDR3 for beta chain variable domain of TCR clone 3023 (TRBV6-5, TRBJ2-5)
CASSYSQAGGSYQETQYF

SEQ ID NO: 6047 - protein, 13 aa, Homo sapiens
  CDR3 for alpha chain variable domain of TCR clone 3024 (TRAV3, TRAJ16)
CAVRDRNGQKLLF

SEQ ID NO: 6048 - protein, 15 aa, Homo sapiens
  CDR3 for beta chain variable domain of TCR clone 3024 (TRBV5-1, TRBJ2-1)
CASSPPRAPYNKQFF

SEQ ID NO: 6049 - protein, 13 aa, Homo sapiens
  CDR3 for alpha chain variable domain of TCR clone 3025 (TRAV8-3, TRAJ30)
CAVGGWRDDKIIF

SEQ ID NO: 6050 - protein, 14 aa, Homo sapiens
  CDR3 for beta chain variable domain of TCR clone 3025 (TRBV20-1, TRBJ1-1)
CSAPPADMNTEAFF

SEQ ID NO: 6051 - protein, 15 aa, Homo sapiens
  CDR3 for alpha chain variable domain of TCR clone 3026 (TRAV27, TRAJ38)
CAARRNAGNNRKLIW

SEQ ID NO: 6052 - protein, 13 aa, Homo sapiens
  CDR3 for beta chain variable domain of TCR clone 3026 (TRBV28, TRBJ2-5)
CAGVSRGEETQYF

SEQ ID NO: 6053 - protein, 15 aa, Homo sapiens
  CDR3 for alpha chain variable domain of TCR clone 3027 (TRAV12-1, TRAJ41)
CVVNGASNSGYALNF

SEQ ID NO: 6054 - protein, 15 aa, Homo sapiens
  CDR3 for beta chain variable domain of TCR clone 3027 (TRBV7-2, TRBJ1-5)
CASSSTGVDNQPQHF

SEQ ID NO: 6055 - protein, 15 aa, Homo sapiens
  CDR3 for alpha chain variable domain of TCR clone 3028 (TRAV8-4, TRAJ52)
CAVSDGGTSYGKLTF

SEQ ID NO: 6056 - protein, 12 aa, Homo sapiens
  CDR3 for beta chain variable domain of TCR clone 3028 (TRBV29-1, TRBJ2-3)
CSVTSGGDTQYF

SEQ ID NO: 6057 - protein, 14 aa, Homo sapiens
  CDR3 for alpha chain variable domain of TCR clone 3029 (TRAV17, TRAJ57)
CATDPQGGSEKLVF

SEQ ID NO: 6058 - protein, 15 aa, Homo sapiens
  CDR3 for beta chain variable domain of TCR clone 3029 (TRBV5-1, TRBJ2-7)
CASSLDLTSSYEQYF

SEQ ID NO: 6059 - protein, 14 aa, Homo sapiens
  CDR3 for alpha chain variable domain of TCR clone 3030 (TRAV8-3, TRAJ17)
CAVGAQTAGNKLTF

SEQ ID NO: 6060 - protein, 11 aa, Homo sapiens
  CDR3 for beta chain variable domain of TCR clone 3030 (TRBV29-1, TRBJ1-4)
CSVSSGEKLFF

SEQ ID NO: 6061 - protein, 23 aa, Homo sapiens
  CDR3 for alpha chain variable domain of TCR clone 3031 (TRAV26-1, TRAJ38)
CIADNAGNNHIQNPDPAVYQLRD

SEQ ID NO: 6062 - protein, 15 aa, Homo sapiens
  CDR3 for beta chain variable domain of TCR clone 3031 (TRBV27, TRBJ2-1)
CASSNGGGSSNEQFF

SEQ ID NO: 6063 - protein, 11 aa, Homo sapiens
  CDR3 for alpha chain variable domain of TCR clone 3032 (TRAV3, TRAJ21)
CAVGNLNKFYF

SEQ ID NO: 6064 - protein, 16 aa, Homo sapiens
  CDR3 for beta chain variable domain of TCR clone 3032 (TRBV19, TRBJ2-1)
CASSKAGPSSYNEQFF

SEQ ID NO: 6065 - protein, 13 aa, Homo sapiens
  CDR3 for alpha chain variable domain of TCR clone 3033 (TRAV13-1, TRAJ5)
CAAEHTGRRALTF

SEQ ID NO: 6066 - protein, 13 aa, Homo sapiens
  CDR3 for beta chain variable domain of TCR clone 3033 (TRBV2, TRBJ1-4)
CASNRGTNEKLFF

SEQ ID NO: 6067 - protein, 14 aa, Homo sapiens
  CDR3 for alpha chain variable domain of TCR clone 3034 (TRAV26-1, TRAJ38)
CIVVGAGNNRKLIW

SEQ ID NO: 6068 - protein, 12 aa, Homo sapiens
  CDR3 for beta chain variable domain of TCR clone 3034 (TRBV5-1, TRBJ2-5)
CASSWDQETQYF

SEQ ID NO: 6069 - protein, 13 aa, Homo sapiens
  CDR3 for alpha chain variable domain of TCR clone 3035 (TRAV8-3, TRAJ43)
CAVGIYNNNDMRF

SEQ ID NO: 6070 - protein, 16 aa, Homo sapiens
  CDR3 for beta chain variable domain of TCR clone 3035 (TRBV7-2, TRBJ2-5)
CASSLVLWTKQETQYF

SEQ ID NO: 6071 - protein, 12 aa, Homo sapiens
  CDR3 for alpha chain variable domain of TCR clone 3036 (TRAV1-2, TRAJ33)
CAALDSNYQLIW

SEQ ID NO: 6072 - protein, 13 aa, Homo sapiens
  CDR3 for beta chain variable domain of TCR clone 3036 (TRBV7-2, TRBJ2-7)
CASSFGQEKEQYF

SEQ ID NO: 6073 - protein, 16 aa, Homo sapiens
  CDR3 for alpha chain variable domain of TCR clone 3037 (TRAV3, TRAJ10)
CAVRDMRAGGGNKLTF

SEQ ID NO: 6074 - protein, 16 aa, Homo sapiens
  CDR3 for beta chain variable domain of TCR clone 3037 (TRBV12-4, TRBJ1-5)
CASSRPVGGSNQPQHF

SEQ ID NO: 6075 - protein, 14 aa, Homo sapiens
  CDR3 for alpha chain variable domain of TCR clone 3038 (TRAV8-4, TRAJ13)
CAVTLSGGYQKVTF

SEQ ID NO: 6076 - protein, 16 aa, Homo sapiens
  CDR3 for beta chain variable domain of TCR clone 3038 (TRBV19, TRBJ2-2)
CASRSPGTGATGELFF

SEQ ID NO: 6077 - protein, 12 aa, Homo sapiens
  CDR3 for alpha chain variable domain of TCR clone 3039 (TRAV12-3, TRAJ17)
CAMTLTGNKLTF

SEQ ID NO: 6078 - protein, 15 aa, Homo sapiens
  CDR3 for beta chain variable domain of TCR clone 3039 (TRBV20-1, TRBJ2-7)
RSARDRVSGMDEQYF

SEQ ID NO: 6079 - protein, 16 aa, Homo sapiens
  CDR3 for alpha chain variable domain of TCR clone 3040 (TRAV30, TRAJ24)
RGTEIVDADSWGKFQF

SEQ ID NO: 6080 - protein, 14 aa, Homo sapiens
  CDR3 for beta chain variable domain of TCR clone 3040 (TRBV12-5, TRBJ2-5)
CASGSRTHQETQYF

SEQ ID NO: 6081 - protein, 15 aa, Homo sapiens
  CDR3 for alpha chain variable domain of TCR clone 3041 (TRAV1-1, TRAJ20)
CAVRDNVANDYKLSF

SEQ ID NO: 6082 - protein, 13 aa, Homo sapiens
  CDR3 for beta chain variable domain of TCR clone 3041 (TRBV4-1, TRBJ2-2)
CASSQENTGELFF

SEQ ID NO: 6083 - protein, 18 aa, Homo sapiens
  CDR3 for alpha chain variable domain of TCR clone 3042 (TRAV1-2, TRAJ10)
CAVRALTPVTGGGNKLTF

SEQ ID NO: 6084 - protein, 14 aa, Homo sapiens
  CDR3 for beta chain variable domain of TCR clone 3042 (TRBV4-1, TRBJ1-1)
CASSQQGNGNEAFF

SEQ ID NO: 6085 - protein, 13 aa, Homo sapiens
  CDR3 for alpha chain variable domain of TCR clone 3043 (TRAV13-1, TRAJ37)
CAAVSGNTGKLIF

SEQ ID NO: 6086 - protein, 17 aa, Homo sapiens
  CDR3 for beta chain variable domain of TCR clone 3043 (TRBV10-2, TRBJ1-6)
CASSENRGSSYNSPLHF

SEQ ID NO: 6087 - protein, 13 aa, Homo sapiens
  CDR3 for alpha chain variable domain of TCR clone 3044 (TRAV27, TRAJ43)
CAGAGNNNNDMRF

SEQ ID NO: 6088 - protein, 14 aa, Homo sapiens
  CDR3 for beta chain variable domain of TCR clone 3044 (TRBV7-2, TRBJ2-7)
CASRSQGAAYEQYF

SEQ ID NO: 6089 - protein, 11 aa, Homo sapiens
  CDR3 for alpha chain variable domain of TCR clone 3045 (TRAV29/DV5, TRAJ49)
CAAVPGNQFYF

SEQ ID NO: 6090 - protein, 17 aa, Homo sapiens
  CDR3 for beta chain variable domain of TCR clone 3045 (TRBV4-2, TRBJ1-1)
CASTQFGGGSGNTEAFF

SEQ ID NO: 6091 - protein, 21 aa, Homo sapiens
  CDR3 for alpha chain variable domain of TCR clone 3046 (TRAV8-4, TRAJ47)
HLTKPSAHMSDAAERGNKLVF

SEQ ID NO: 6092 - protein, 14 aa, Homo sapiens
  CDR3 for beta chain variable domain of TCR clone 3046 (TRBV7-9, TRBJ2-1)
CASSPRDSLYEQFF

SEQ ID NO: 6093 - protein, 11 aa, Homo sapiens
  CDR3 for alpha chain variable domain of TCR clone 3047 (TRAV13-2, TRAJ20)
CADSNDYKLSF

SEQ ID NO: 6094 - protein, 12 aa, Homo sapiens
  CDR3 for beta chain variable domain of TCR clone 3047 (TRBV5-1, TRBJ2-3)
CASSLAADTQYF

SEQ ID NO: 6095 - protein, 12 aa, Homo sapiens
  CDR3 for alpha chain variable domain of TCR clone 3048 (TRAV13-2, TRAJ23)
CAERHRGGKLIF

SEQ ID NO: 6096 - protein, 16 aa, Homo sapiens
  CDR3 for beta chain variable domain of TCR clone 3048 (TRBV12-5, TRBJ2-5)
CASGPRTSGNQETQYF

SEQ ID NO: 6097 - protein, 12 aa, Homo sapiens
  CDR3 for alpha chain variable domain of TCR clone 3049 (TRAV36/DV7, TRAJ37)
CACYGNTGKLIF

SEQ ID NO: 6098 - protein, 14 aa, Homo sapiens
  CDR3 for beta chain variable domain of TCR clone 3049 (TRBV6-3, TRBJ1-4)
CASSGQNLNEKLFF

SEQ ID NO: 6099 - protein, 14 aa, Homo sapiens
  CDR3 for alpha chain variable domain of TCR clone 3050 (TRAV38-1, TRAJ45)
CASHSGGGADGLTF

SEQ ID NO: 6100 - protein, 16 aa, Homo sapiens
  CDR3 for beta chain variable domain of TCR clone 3050 (TRBV27, TRBJ2-2)
CASSFRGLVRTGELFF

SEQ ID NO: 6101 - protein, 13 aa, Homo sapiens
  CDR3 for alpha chain variable domain of TCR clone 3051 (TRAV2, TRAJ40)
CAVVTSGAYKYIF

SEQ ID NO: 6102 - protein, 14 aa, Homo sapiens
  CDR3 for beta chain variable domain of TCR clone 3051 (TRBV19, TRBJ2-1)
CASPTFVLSGEQFF

SEQ ID NO: 6103 - protein, 14 aa, Homo sapiens
  CDR3 for alpha chain variable domain of TCR clone 3052 (TRAV17, TRAJ15)
CATDRGQAGTALIF

SEQ ID NO: 6104 - protein, 17 aa, Homo sapiens
  CDR3 for beta chain variable domain of TCR clone 3052 (TRBV29-1, TRBJ2-1)
CSVVGLAGAYSYNEQFF

SEQ ID NO: 6105 - protein, 14 aa, Homo sapiens
  CDR3 for alpha chain variable domain of TCR clone 3053 (TRAV1-2, TRAJ16)
CAVNRFSDGQKLLF

SEQ ID NO: 6106 - protein, 14 aa, Homo sapiens
  CDR3 for beta chain variable domain of TCR clone 3053 (TRBV7-9, TRBJ2-2)
CASSLGHRTGELFF

SEQ ID NO: 6107 - protein, 12 aa, Homo sapiens
  CDR3 for alpha chain variable domain of TCR clone 3054 (TRAV12-3, TRAJ39)
CAMTQAGNMLTF

SEQ ID NO: 6108 - protein, 13 aa, Homo sapiens
  CDR3 for beta chain variable domain of TCR clone 3054 (TRBV20-1, TRBJ1-1)
CSAPEGGNTEAFF

SEQ ID NO: 6109 - protein, 13 aa, Homo sapiens
  CDR3 for alpha chain variable domain of TCR clone 3055 (TRAV2, TRAJ39)
TTVHNNAGNMLTF

SEQ ID NO: 6110 - protein, 16 aa, Homo sapiens
  CDR3 for beta chain variable domain of TCR clone 3055 (TRBV24-1, TRBJ2-3)
CATSGYRDRDTDTQYF

SEQ ID NO: 6111 - protein, 15 aa, Homo sapiens
  CDR3 for alpha chain variable domain of TCR clone 3056 (TRAV26-2, TRAJ21)
CILSNTTSTNFTLDL

SEQ ID NO: 6112 - protein, 16 aa, Homo sapiens
  CDR3 for beta chain variable domain of TCR clone 3056 (TRBV4-2, TRBJ2-6)
CASSQARSSGANVLTF

SEQ ID NO: 6113 - protein, 10 aa, Homo sapiens
  CDR3 for alpha chain variable domain of TCR clone 3057 (TRAV2, TRAJ34)
CAVVNDKLIF

SEQ ID NO: 6114 - protein, 20 aa, Homo sapiens
  CDR3 for beta chain variable domain of TCR clone 3057 (TRBV19, TRBJ2-1)
CASSISRTVTSTRLNNEQFF

SEQ ID NO: 6115 - protein, 13 aa, Homo sapiens
  CDR3 for alpha chain variable domain of TCR clone 3058 (TRAV12-3, TRAJ4)
CNEQAGGYNKLIF

SEQ ID NO: 6116 - protein, 15 aa, Homo sapiens
  CDR3 for beta chain variable domain of TCR clone 3058 (TRBV5-1, TRBJ1-1)
CASSLSDLGGTEAFF

SEQ ID NO: 6117 - protein, 12 aa, Homo sapiens
  CDR3 for alpha chain variable domain of TCR clone 3059 (TRAV12-2, TRAJ10)
WGVTGGGNKLTF

SEQ ID NO: 6118 - protein, 14 aa, Homo sapiens
  CDR3 for beta chain variable domain of TCR clone 3059 (TRBV19, TRBJ2-3)
CASSAPRGTDTQYF

SEQ ID NO: 6119 - protein, 15 aa, Homo sapiens
  CDR3 for alpha chain variable domain of TCR clone 3060 (TRAV26-1, TRAJ56)
CIVRVDNGANSKLTF

SEQ ID NO: 6120 - protein, 14 aa, Homo sapiens
  CDR3 for beta chain variable domain of TCR clone 3060 (TRBV5-1, TRBJ2-7)
CASSRGESLYEQYF

SEQ ID NO: 6121 - protein, 14 aa, Homo sapiens
  CDR3 for alpha chain variable domain of TCR clone 3061 (TRAV1-2, TRAJ16)
CAVNRFSDGQKLLF

SEQ ID NO: 6122 - protein, 11 aa, Homo sapiens
  CDR3 for beta chain variable domain of TCR clone 3061 (TRBV4-1, TRBJ2-2)
CASEHTGELFF

SEQ ID NO: 6123 - protein, 14 aa, Homo sapiens
  CDR3 for alpha chain variable domain of TCR clone 3062 (TRAV35, TRAJ10)
CAGILTGGGNKLTF

SEQ ID NO: 6124 - protein, 16 aa, Homo sapiens
  CDR3 for beta chain variable domain of TCR clone 3062 (TRBV12-5, TRBJ2-5)
CASGPRTSGNQETQYF

SEQ ID NO: 6125 - protein, 13 aa, Homo sapiens
  CDR3 for alpha chain variable domain of TCR clone 3063 (TRAV4, TRAJ28)
CLFIWGWELPTHF

SEQ ID NO: 6126 - protein, 14 aa, Homo sapiens
  CDR3 for beta chain variable domain of TCR clone 3063 (TRBV7-9, TRBJ2-5)
CASSLDTAQETQYF

SEQ ID NO: 6127 - protein, 14 aa, Homo sapiens
  CDR3 for alpha chain variable domain of TCR clone 3064 (TRAV2, TRAJ37)
TTVPGSSNTGKLIF

SEQ ID NO: 6128 - protein, 14 aa, Homo sapiens
  CDR3 for beta chain variable domain of TCR clone 3064 (TRBV7-8, TRBJ2-7)
CASSLWQSSYEQYF

SEQ ID NO: 6129 - protein, 15 aa, Homo sapiens
  CDR3 for alpha chain variable domain of TCR clone 3065 (TRAV12-3, TRAJ5)
CAMSGLGTGRRALTF

SEQ ID NO: 6130 - protein, 15 aa, Homo sapiens
  CDR3 for beta chain variable domain of TCR clone 3065 (TRBV19, TRBJ1-1)
CASTSGQIQNTEAFF

SEQ ID NO: 6131 - protein, 11 aa, Homo sapiens
  CDR3 for alpha chain variable domain of TCR clone 3066 (TRAV21, TRAJ11)
CAVNGYSTLTF

SEQ ID NO: 6132 - protein, 16 aa, Homo sapiens
  CDR3 for beta chain variable domain of TCR clone 3066 (TRBV19, TRBJ2-1)
CASSKAGPSSYNEQFF

SEQ ID NO: 6133 - protein, 16 aa, Homo sapiens
  CDR3 for alpha chain variable domain of TCR clone 3067 (TRAV3, TRAJ10)
CAVRDMRAGGGNKLTF

SEQ ID NO: 6134 - protein, 20 aa, Homo sapiens
  CDR3 for beta chain variable domain of TCR clone 3067 (TRBV11-3, TRBJ2-7)
CASSQRTSGSLRAVLRAGHQ

SEQ ID NO: 6135 - protein, 14 aa, Homo sapiens
  CDR3 for alpha chain variable domain of TCR clone 3068 (TRAV1-2, TRAJ16)
CAVNRFSDGQKLLF

SEQ ID NO: 6136 - protein, 18 aa, Homo sapiens
  CDR3 for beta chain variable domain of TCR clone 3068 (TRBV20-1, TRBJ2-3)
CSASGLAGGPGTTDTQYF

SEQ ID NO: 6137 - protein, 14 aa, Homo sapiens
  CDR3 for alpha chain variable domain of TCR clone 3069 (TRAV1-2, TRAJ8)
CAVREDTGFQKLVF

SEQ ID NO: 6138 - protein, 13 aa, Homo sapiens
  CDR3 for beta chain variable domain of TCR clone 3069 (TRBV4-2, TRBJ2-2)
CASEDRGTGELFF

SEQ ID NO: 6139 - protein, 12 aa, Homo sapiens
  CDR3 for alpha chain variable domain of TCR clone 3070 (TRAV23/DV6, TRAJ32)
CSMPGATNKLIF

SEQ ID NO: 6140 - protein, 17 aa, Homo sapiens
  CDR3 for beta chain variable domain of TCR clone 3070 (TRBV13, TRBJ2-3)
CASSSLGTSGLTDTQYF

SEQ ID NO: 6141 - protein, 16 aa, Homo sapiens
  CDR3 for alpha chain variable domain of TCR clone 3071 (TRAV12-2, TRAJ48)
CAVNPTSNFGNEKLTF

SEQ ID NO: 6142 - protein, 12 aa, Homo sapiens
  CDR3 for beta chain variable domain of TCR clone 3071 (TRBV9, TRBJ2-3)
CASSLRAGTQYF

SEQ ID NO: 6143 - protein, 11 aa, Homo sapiens
  CDR3 for alpha chain variable domain of TCR clone 3072 (TRAV8-4, TRAJ26)
CAGGEGQNFVF

SEQ ID NO: 6144 - protein, 17 aa, Homo sapiens
  CDR3 for beta chain variable domain of TCR clone 3072 (TRBV7-9, TRBJ2-3)
CASSPTVAGDLTDTQYF

SEQ ID NO: 6145 - protein, 12 aa, Homo sapiens
  CDR3 for alpha chain variable domain of TCR clone 3073 (TRAV1-1, TRAJ39)
CAVPVVGNMLTF

SEQ ID NO: 6146 - protein, 13 aa, Homo sapiens
  CDR3 for beta chain variable domain of TCR clone 3073 (TRBV7-9, TRBJ2-1)
CASSSSNFNEQFF

SEQ ID NO: 6147 - protein, 14 aa, Homo sapiens
  CDR3 for alpha chain variable domain of TCR clone 3074 (TRAV23/DV6, TRAJ11)
CAASLESGYSTLTF

SEQ ID NO: 6148 - protein, 15 aa, Homo sapiens
  CDR3 for beta chain variable domain of TCR clone 3074 (TRBV28, TRBJ2-7)
CASSSPGTEPFEQYF

SEQ ID NO: 6149 - protein, 15 aa, Homo sapiens
  CDR3 for alpha chain variable domain of TCR clone 3075 (TRAV26-1, TRAJ9)
CIVRESNTGGFKTIF

SEQ ID NO: 6150 - protein, 11 aa, Homo sapiens
  CDR3 for beta chain variable domain of TCR clone 3075 (TRBV7-6, TRBJ2-5)
CASSFQETQYF

SEQ ID NO: 6151 - protein, 14 aa, Homo sapiens
  CDR3 for alpha chain variable domain of TCR clone 3076 (TRAV12-2, TRAJ13)
CAVKKTGGYQKVTF

SEQ ID NO: 6152 - protein, 16 aa, Homo sapiens
  CDR3 for beta chain variable domain of TCR clone 3076 (TRBV4-1, TRBJ2-3)
CASSQSTSGAEDTQYF

SEQ ID NO: 6153 - protein, 13 aa, Homo sapiens
  CDR3 for alpha chain variable domain of TCR clone 3077 (TRAV22, TRAJ29)
CAVGGSGNTPLVF

SEQ ID NO: 6154 - protein, 13 aa, Homo sapiens
  CDR3 for beta chain variable domain of TCR clone 3077 (TRBV19, TRBJ2-7)
CASRKAGGSEQYF

SEQ ID NO: 6155 - protein, 14 aa, Homo sapiens
  CDR3 for alpha chain variable domain of TCR clone 3078 (TRAV1-2, TRAJ16)
CAVNRFSDGQKLLF

SEQ ID NO: 6156 - protein, 13 aa, Homo sapiens
  CDR3 for beta chain variable domain of TCR clone 3078 (TRBV10-3, TRBJ1-2)
CAISERDSYGYTF

SEQ ID NO: 6157 - protein, 14 aa, Homo sapiens
  CDR3 for alpha chain variable domain of TCR clone 3079 (TRAV35, TRAJ33)
CAGSSQDSNYQLIW

SEQ ID NO: 6158 - protein, 14 aa, Homo sapiens
  CDR3 for beta chain variable domain of TCR clone 3079 (TRBV20-1, TRBJ2-1)
CSAQIGGSANEQFF

SEQ ID NO: 6159 - protein, 12 aa, Homo sapiens
  CDR3 for alpha chain variable domain of TCR clone 3080 (TRAV12-3, TRAJ17)
RAMTLTGNKLTF

SEQ ID NO: 6160 - protein, 15 aa, Homo sapiens
  CDR3 for beta chain variable domain of TCR clone 3080 (TRBV20-1, TRBJ2-7)
CSARDRVSGMDEQYF

SEQ ID NO: 6161 - protein, 13 aa, Homo sapiens
  CDR3 for alpha chain variable domain of TCR clone 3081 (TRAV2, TRAJ40)
CAVVTSGTYKYIF

SEQ ID NO: 6162 - protein, 14 aa, Homo sapiens
  CDR3 for beta chain variable domain of TCR clone 3081 (TRBV19, TRBJ2-1)
CASPTLVLSGEQFF

SEQ ID NO: 6163 - protein, 14 aa, Homo sapiens
  CDR3 for alpha chain variable domain of TCR clone 3082 (TRAV27, TRAJ23)
CAGLSYNQGGKLIF

SEQ ID NO: 6164 - protein, 15 aa, Homo sapiens
  CDR3 for beta chain variable domain of TCR clone 3082 (TRBV20-1, TRBJ2-7)
CSARDRVSGMDEQYF

SEQ ID NO: 6165 - protein, 12 aa, Homo sapiens
  CDR3 for alpha chain variable domain of TCR clone 3083 (TRAV8-6, TRAJ33)
CAVTDSNYQLIW

SEQ ID NO: 6166 - protein, 15 aa, Homo sapiens
  CDR3 for beta chain variable domain of TCR clone 3083 (TRBV4-3, TRBJ1-2)
CASSRGQGRNYGYTF

SEQ ID NO: 6167 - protein, 15 aa, Homo sapiens
  CDR3 for alpha chain variable domain of TCR clone 3084 (TRAV21, TRAJ53)
CATLNSGGSNYKLTF

SEQ ID NO: 6168 - protein, 16 aa, Homo sapiens
  CDR3 for beta chain variable domain of TCR clone 3084 (TRBV20-1, TRBJ1-2)
CSASMGQGVANYGYTF

SEQ ID NO: 6169 - protein, 14 aa, Homo sapiens
  CDR3 for alpha chain variable domain of TCR clone 3085 (TRAV1-1, TRAJ27)
CAVIYNTNAGKSTF

SEQ ID NO: 6170 - protein, 14 aa, Homo sapiens
  CDR3 for beta chain variable domain of TCR clone 3085 (TRBV6-5, TRBJ1-2)
CASSYDGTGGGYTF

SEQ ID NO: 6171 - protein, 14 aa, Homo sapiens
  CDR3 for alpha chain variable domain of TCR clone 3086 (TRAV1-2, TRAJ16)
CAVNRFSDGQKLLF

SEQ ID NO: 6172 - protein, 17 aa, Homo sapiens
  CDR3 for beta chain variable domain of TCR clone 3086 (TRBV5-1, TRBJ2-2)
CASSLAGLSGGTGELFF

SEQ ID NO: 6173 - protein, 15 aa, Homo sapiens
  CDR3 for alpha chain variable domain of TCR clone 3087 (TRAV3, TRAJ23)
CAVRDRGNQGGKLIF

SEQ ID NO: 6174 - protein, 15 aa, Homo sapiens
  CDR3 for beta chain variable domain of TCR clone 3087 (TRBV7-3, TRBJ2-1)
CQQLAPSGSYNEQFF

SEQ ID NO: 6175 - protein, 15 aa, Homo sapiens
  CDR3 for alpha chain variable domain of TCR clone 3088 (TRAV12-3, TRAJ13)
CAMSARSGGYQKVTF

SEQ ID NO: 6176 - protein, 18 aa, Homo sapiens
  CDR3 for beta chain variable domain of TCR clone 3088 (TRBV3-1, TRBJ2-7)
CASSQEGGGRSWHYEQYF

SEQ ID NO: 6177 - protein, 16 aa, Homo sapiens
  CDR3 for alpha chain variable domain of TCR clone 3089 (TRAV26-1, TRAJ45)
CIVEKYSGGGADGLTF

SEQ ID NO: 6178 - protein, 16 aa, Homo sapiens
  CDR3 for beta chain variable domain of TCR clone 3089 (TRBV10-3, TRBJ1-6)
CAISERRGQGNSPLHF

SEQ ID NO: 6179 - protein, 13 aa, Homo sapiens
  CDR3 for alpha chain variable domain of TCR clone 3090 (TRAV21, TRAJ3)
CCEPYSSASKIIF

SEQ ID NO: 6180 - protein, 15 aa, Homo sapiens
  CDR3 for beta chain variable domain of TCR clone 3090 (TRBV7-3, TRBJ2-1)
CASSPTGGGEVEQFF

SEQ ID NO: 6181 - protein, 15 aa, Homo sapiens
  CDR3 for alpha chain variable domain of TCR clone 3091 (TRAV3, TRAJ3)
CCERPRYSSASKIIF

SEQ ID NO: 6182 - protein, 16 aa, Homo sapiens
  CDR3 for beta chain variable domain of TCR clone 3091 (TRBV19, TRBJ1-5)
CASSIDRGGPRQPQHF

SEQ ID NO: 6183 - protein, 15 aa, Homo sapiens
  CDR3 for alpha chain variable domain of TCR clone 3092 (TRAV3, TRAJ4)
CAVRDGTGGYNKLIF

SEQ ID NO: 6184 - protein, 15 aa, Homo sapiens
  CDR3 for beta chain variable domain of TCR clone 3092 (TRBV27, TRBJ2-7)
CASSPDQGRLYEQYF

SEQ ID NO: 6185 - protein, 14 aa, Homo sapiens
  CDR3 for alpha chain variable domain of TCR clone 3093 (TRAV1-2, TRAJ8)
CAVREDTGFQKLVF

SEQ ID NO: 6186 - protein, 16 aa, Homo sapiens
  CDR3 for beta chain variable domain of TCR clone 3093 (TRBV20-1, TRBJ2-4)
CSARAILAGQGDIQYF

SEQ ID NO: 6187 - protein, 15 aa, Homo sapiens
  CDR3 for alpha chain variable domain of TCR clone 3094 (TRAV12-2, TRAJ50)
CAVNGLETSYDKVIF

SEQ ID NO: 6188 - protein, 16 aa, Homo sapiens
  CDR3 for beta chain variable domain of TCR clone 3094 (TRBV5-4, TRBJ2-3)
CASQQPGAGGADTQYF

SEQ ID NO: 6189 - protein, 14 aa, Homo sapiens
  CDR3 for alpha chain variable domain of TCR clone 3095 (TRAV38-1, TRAJ29)
CAFITPSGNTPLVF

SEQ ID NO: 6190 - protein, 15 aa, Homo sapiens
  CDR3 for beta chain variable domain of TCR clone 3095 (TRBV5-1, TRBJ2-1)
CASSPPRAPYNEQFF

SEQ ID NO: 6191 - protein, 15 aa, Homo sapiens
  CDR3 for alpha chain variable domain of TCR clone 3096 (TRAV20, TRAJ58)
CAVQDLETSGSRLTF

SEQ ID NO: 6192 - protein, 13 aa, Homo sapiens
  CDR3 for beta chain variable domain of TCR clone 3096 (TRBV20-1, TRBJ1-1)
CSARGGGNTEAFF

SEQ ID NO: 6193 - protein, 15 aa, Homo sapiens
  CDR3 for alpha chain variable domain of TCR clone 3097 (TRAV8-3, TRAJ27)
CAVGPSKTNAGKSTF

SEQ ID NO: 6194 - protein, 15 aa, Homo sapiens
  CDR3 for beta chain variable domain of TCR clone 3097 (TRBV27, TRBJ2-1)
CASSNGGGSSNEQFF

SEQ ID NO: 6195 - protein, 14 aa, Homo sapiens
  CDR3 for alpha chain variable domain of TCR clone 3098 (TRAV26-2, TRAJ32)
CCVGYGGATNKLIF

SEQ ID NO: 6196 - protein, 13 aa, Homo sapiens
  CDR3 for beta chain variable domain of TCR clone 3098 (TRBV12-5, TRBJ2-3)
CASGDRQSDTQYF

SEQ ID NO: 6197 - protein, 15 aa, Homo sapiens
  CDR3 for alpha chain variable domain of TCR clone 3099 (TRAV8-6, TRAJ37)
CAVIFSSGNTGKLIF

SEQ ID NO: 6198 - protein, 15 aa, Homo sapiens
  CDR3 for beta chain variable domain of TCR clone 3099 (TRBV25-1, TRBJ2-4)
CASSETESAKNIQYF

SEQ ID NO: 6199 - protein, 14 aa, Homo sapiens
  CDR3 for alpha chain variable domain of TCR clone 3100 (TRAV4, TRAJ30)
CLVGDMNRDDKIIF

SEQ ID NO: 6200 - protein, 15 aa, Homo sapiens
  CDR3 for beta chain variable domain of TCR clone 3100 (TRBV7-2, TRBJ2-7)
CASSLSSGRTYEQYF

SEQ ID NO: 6201 - protein, 14 aa, Homo sapiens
  CDR3 for alpha chain variable domain of TCR clone 3101 (TRAV13-1, TRAJ35)
CAASKGGFGNVLHC

SEQ ID NO: 6202 - protein, 16 aa, Homo sapiens
  CDR3 for beta chain variable domain of TCR clone 3101 (TRBV2, TRBJ1-4)
CASNLLQGATNEKLFF

SEQ ID NO: 6203 - protein, 16 aa, Homo sapiens
  CDR3 for alpha chain variable domain of TCR clone 3102 (TRAV17, TRAJ52)
CATGIIGGTSYGKLTF

SEQ ID NO: 6204 - protein, 14 aa, Homo sapiens
  CDR3 for beta chain variable domain of TCR clone 3102 (TRBV7-3, TRBJ2-2)
CASSSGGYTGELFF

SEQ ID NO: 6205 - protein, 12 aa, Homo sapiens
  CDR3 for alpha chain variable domain of TCR clone 3103 (TRAV26-1, TRAJ13)
CIVSRGYQKVTF

SEQ ID NO: 6206 - protein, 14 aa, Homo sapiens
  CDR3 for beta chain variable domain of TCR clone 3103 (TRBV7-2, TRBJ2-7)
CASSPKTSFYEQYF

SEQ ID NO: 6207 - protein, 10 aa, Homo sapiens
  CDR3 for alpha chain variable domain of TCR clone 3104 (TRAV26-1, TRAJ22)
RSGSARQLTF

SEQ ID NO: 6208 - protein, 13 aa, Homo sapiens
  CDR3 for beta chain variable domain of TCR clone 3104 (TRBV7-9, TRBJ1-2)
CASSLKQNYGYTF

SEQ ID NO: 6209 - protein, 13 aa, Homo sapiens
  CDR3 for alpha chain variable domain of TCR clone 3105 (TRAV8-3, TRAJ28)
CAVGAVGSYQLTF

SEQ ID NO: 6210 - protein, 16 aa, Homo sapiens
  CDR3 for beta chain variable domain of TCR clone 3105 (TRBV19, TRBJ2-1)
CASSKAGPSSYNEQFF

SEQ ID NO: 6211 - protein, 14 aa, Homo sapiens
  CDR3 for alpha chain variable domain of TCR clone 3106 (TRAV36/DV7, TRAJ48)
CAQRRDFGNEKLTF

SEQ ID NO: 6212 - protein, 14 aa, Homo sapiens
  CDR3 for beta chain variable domain of TCR clone 3106 (TRBV28, TRBJ2-4)
CASTQVTGVNIQYF

SEQ ID NO: 6213 - protein, 15 aa, Homo sapiens
  CDR3 for alpha chain variable domain of TCR clone 3107 (TRAV17, TRAJ57)
CATGPSQGGSEKLVF

SEQ ID NO: 6214 - protein, 17 aa, Homo sapiens
  CDR3 for beta chain variable domain of TCR clone 3107 (TRBV20-1, TRBJ2-1)
CSASSSGLAGSYNEQFF

SEQ ID NO: 6215 - protein, 13 aa, Homo sapiens
  CDR3 for alpha chain variable domain of TCR clone 3108 (TRAV35, TRAJ27)
CAGQEGDAGKSTF

SEQ ID NO: 6216 - protein, 16 aa, Homo sapiens
  CDR3 for beta chain variable domain of TCR clone 3108 (TRBV7-2, TRBJ2-5)
CASSYKTGISLETQYF

SEQ ID NO: 6217 - protein, 13 aa, Homo sapiens
  CDR3 for alpha chain variable domain of TCR clone 3109 (TRAV1-2, TRAJ9)
CAVLNTGGFKTIF

SEQ ID NO: 6218 - protein, 13 aa, Homo sapiens
  CDR3 for beta chain variable domain of TCR clone 3109 (TRBV19, TRBJ2-7)
CASRKAGGSEQYF

SEQ ID NO: 6219 - protein, 15 aa, Homo sapiens
  CDR3 for alpha chain variable domain of TCR clone 3110 (TRAV13-1, TRAJ49)
CAASTEGNTGNQFYF

SEQ ID NO: 6220 - protein, 12 aa, Homo sapiens
  CDR3 for beta chain variable domain of TCR clone 3110 (TRBV11-2, TRBJ2-2)
CASSLGGGELFF

SEQ ID NO: 6221 - protein, 15 aa, Homo sapiens
  CDR3 for alpha chain variable domain of TCR clone 3111 (TRAV12-3, TRAJ6)
CAMSAASGGSYIPTF

SEQ ID NO: 6222 - protein, 13 aa, Homo sapiens
  CDR3 for beta chain variable domain of TCR clone 3111 (TRBV20-1, TRBJ1-2)
CSASPEFNYGYTF

SEQ ID NO: 6223 - protein, 14 aa, Homo sapiens
  CDR3 for alpha chain variable domain of TCR clone 3112 (TRAV3, TRAJ8)
CAALMNTGFQKLVF

SEQ ID NO: 6224 - protein, 15 aa, Homo sapiens
  CDR3 for beta chain variable domain of TCR clone 3112 (TRBV28, TRBJ2-5)
CASSLGLGNQETQYF

SEQ ID NO: 6225 - protein, 14 aa, Homo sapiens
  CDR3 for alpha chain variable domain of TCR clone 3113 (TRAV1-2, TRAJ8)
CAVREDTGFQKLVF

SEQ ID NO: 6226 - protein, 13 aa, Homo sapiens
  CDR3 for beta chain variable domain of TCR clone 3113 (TRBV15, TRBJ2-7)
CATSTTGHYEQYF

SEQ ID NO: 6227 - protein, 15 aa, Homo sapiens
  CDR3 for alpha chain variable domain of TCR clone 3114 (TRAV12-3, TRAJ6)
CAMSATTGGSYIPTF

SEQ ID NO: 6228 - protein, 15 aa, Homo sapiens
  CDR3 for beta chain variable domain of TCR clone 3114 (TRBV7-6, TRBJ1-5)
CASSQSSGINQPQHF

SEQ ID NO: 6229 - protein, 16 aa, Homo sapiens
  CDR3 for alpha chain variable domain of TCR clone 3115 (TRAV30, TRAJ24)
CGTEIVDADSWGKFQF

SEQ ID NO: 6230 - protein, 17 aa, Homo sapiens
  CDR3 for beta chain variable domain of TCR clone 3115 (TRBV20-1, TRBJ2-1)
CSASSSGLAGSYNEQFF

SEQ ID NO: 6231 - protein, 14 aa, Homo sapiens
  CDR3 for alpha chain variable domain of TCR clone 3116 (TRAV12-3, TRAJ21)
CAATDLYNFNKFYF

SEQ ID NO: 6232 - protein, 13 aa, Homo sapiens
  CDR3 for beta chain variable domain of TCR clone 3116 (TRBV19, TRBJ2-2)
CASSSKNTGELFF

SEQ ID NO: 6233 - protein, 14 aa, Homo sapiens
  CDR3 for alpha chain variable domain of TCR clone 3117 (TRAV1-2, TRAJ8)
CAVREDTGFQKLVF

SEQ ID NO: 6234 - protein, 15 aa, Homo sapiens
  CDR3 for beta chain variable domain of TCR clone 3117 (TRBV29-1, TRBJ2-1)
CSVPTGLALYNEQFF

SEQ ID NO: 6235 - protein, 18 aa, Homo sapiens
  CDR3 for alpha chain variable domain of TCR clone 3118 (TRAV26-2, TRAJ33)
CCVLLHPEEPASNYQLIW

SEQ ID NO: 6236 - protein, 13 aa, Homo sapiens
  CDR3 for beta chain variable domain of TCR clone 3118 (TRBV24-1, TRBJ2-2)
CATSDWSTGELFF

SEQ ID NO: 6237 - protein, 16 aa, Homo sapiens
  CDR3 for alpha chain variable domain of TCR clone 3119 (TRAV20, TRAJ53)
CAVQGNSGGSNYKLTF

SEQ ID NO: 6238 - protein, 14 aa, Homo sapiens
  CDR3 for beta chain variable domain of TCR clone 3119 (TRBV6-5, TRBJ2-7)
CASSPHRGLREQYF

SEQ ID NO: 6239 - protein, 12 aa, Homo sapiens
  CDR3 for alpha chain variable domain of TCR clone 3120 (TRAV23/DV6, TRAJ3)
CAARAPQQCFQD

SEQ ID NO: 6240 - protein, 17 aa, Homo sapiens
  CDR3 for beta chain variable domain of TCR clone 3120 (TRBV7-9, TRBJ2-3)
CASSPTVAGDLTDTQYF

SEQ ID NO: 6241 - protein, 13 aa, Homo sapiens
  CDR3 for alpha chain variable domain of TCR clone 3121 (TRAV1-2, TRAJ9)
CAVLNTGGFKTIF

SEQ ID NO: 6242 - protein, 17 aa, Homo sapiens
  CDR3 for beta chain variable domain of TCR clone 3121 (TRBV13, TRBJ2-3)
CASSLSRVAGGRNTQYF

SEQ ID NO: 6243 - protein, 16 aa, Homo sapiens
  CDR3 for alpha chain variable domain of TCR clone 3122 (TRAV26-1, TRAJ36)
CIVRAIGRSGANNLFF

SEQ ID NO: 6244 - protein, 14 aa, Homo sapiens
  CDR3 for beta chain variable domain of TCR clone 3122 (TRBV25-1, TRBJ2-1)
CASSKTGGYNEQFF

SEQ ID NO: 6245 - protein, 15 aa, Homo sapiens
  CDR3 for alpha chain variable domain of TCR clone 3123 (TRAV25, TRAJ41)
CAGPWNSNSGYALNF

SEQ ID NO: 6246 - protein, 13 aa, Homo sapiens
  CDR3 for beta chain variable domain of TCR clone 3123 (TRBV15, TRBJ1-1)
CATSRGIQARAFF

SEQ ID NO: 6247 - protein, 11 aa, Homo sapiens
  CDR3 for alpha chain variable domain of TCR clone 3124 (TRAV13-2, TRAJ31)
CAENMDARLMF

SEQ ID NO: 6248 - protein, 15 aa, Homo sapiens
  CDR3 for beta chain variable domain of TCR clone 3124 (TRBV7-8, TRBJ1-2)
CASSLVRDGGLGYTF

SEQ ID NO: 6249 - protein, 13 aa, Homo sapiens
  CDR3 for alpha chain variable domain of TCR clone 3125 (TRAV13-2, TRAJ48)
CAEMDFGNEKLTF

SEQ ID NO: 6250 - protein, 13 aa, Homo sapiens
  CDR3 for beta chain variable domain of TCR clone 3125 (TRBV13, TRBJ2-5)
CASSPEVGETQYF

SEQ ID NO: 6251 - protein, 12 aa, Homo sapiens
  CDR3 for alpha chain variable domain of TCR clone 3126 (TRAV8-3, TRAJ20)
CAVGANDYELSF

SEQ ID NO: 6252 - protein, 16 aa, Homo sapiens
  CDR3 for beta chain variable domain of TCR clone 3126 (TRBV19, TRBJ2-2)
CASRSPGTGATGELFF

SEQ ID NO: 6253 - protein, 13 aa, Homo sapiens
  CDR3 for alpha chain variable domain of TCR clone 3127 (TRAV13-2, TRAJ48)
CAEMDFGNEKLTF

SEQ ID NO: 6254 - protein, 15 aa, Homo sapiens
  CDR3 for beta chain variable domain of TCR clone 3127 (TRBV7-3, TRBJ2-1)
CASSQRGGALIEQFF

SEQ ID NO: 6255 - protein, 16 aa, Homo sapiens
  CDR3 for alpha chain variable domain of TCR clone 3128 (TRAV8-6, TRAJ39)
CAVMPMNNNAGNMLTF

SEQ ID NO: 6256 - protein, 16 aa, Homo sapiens
  CDR3 for beta chain variable domain of TCR clone 3128 (TRBV15, TRBJ2-5)
CATSRYLEAAQETQYF

SEQ ID NO: 6257 - protein, 16 aa, Homo sapiens
  CDR3 for alpha chain variable domain of TCR clone 3129 (TRAV12-3, TRAJ53)
CAMSPGSGGSNYKLTF

SEQ ID NO: 6258 - protein, 15 aa, Homo sapiens
  CDR3 for beta chain variable domain of TCR clone 3129 (TRBV27, TRBJ2-1)
CASSNGGGSSNEQFF

SEQ ID NO: 6259 - protein, 16 aa, Homo sapiens
  CDR3 for alpha chain variable domain of TCR clone 3130 (TRAV20, TRAJ38)
CAVQASNAGNNRKLIW

SEQ ID NO: 6260 - protein, 16 aa, Homo sapiens
  CDR3 for beta chain variable domain of TCR clone 3130 (TRBV7-8, TRBJ2-6)
CASRVGDSSGANVLTF

SEQ ID NO: 6261 - protein, 15 aa, Homo sapiens
  CDR3 for alpha chain variable domain of TCR clone 3131 (TRAV13-1, TRAJ32)
CAASNGWWCYKQAHL

SEQ ID NO: 6262 - protein, 17 aa, Homo sapiens
  CDR3 for beta chain variable domain of TCR clone 3131 (TRBV15, TRBJ1-2)
CATSGREIDVVNYGYTF

SEQ ID NO: 6263 - protein, 12 aa, Homo sapiens
  CDR3 for alpha chain variable domain of TCR clone 3132 (TRAV13-1, TRAJ21)
CAAKEGFNKFYF

SEQ ID NO: 6264 - protein, 19 aa, Homo sapiens
  CDR3 for beta chain variable domain of TCR clone 3132 (TRBV2, TRBJ2-7)
CASSDDETSGRANDYEQYF

SEQ ID NO: 6265 - protein, 14 aa, Homo sapiens
  CDR3 for alpha chain variable domain of TCR clone 3133 (TRAV1-2, TRAJ8)
CAVREDTGFQKLVF

SEQ ID NO: 6266 - protein, 15 aa, Homo sapiens
  CDR3 for beta chain variable domain of TCR clone 3133 (TRBV5-5, TRBJ1-5)
CASSSTPGSNQPQHF

SEQ ID NO: 6267 - protein, 13 aa, Homo sapiens
  CDR3 for alpha chain variable domain of TCR clone 3134 (TRAV23/DV6, TRAJ47)
CAASSQYGNKLVF

SEQ ID NO: 6268 - protein, 15 aa, Homo sapiens
  CDR3 for beta chain variable domain of TCR clone 3134 (TRBV7-3, TRBJ2-1)
CASSLDGNSYNEQFF

SEQ ID NO: 6269 - protein, 14 aa, Homo sapiens
  CDR3 for alpha chain variable domain of TCR clone 3135 (TRAV1-2, TRAJ8)
CAVREDTGFQKLVF

SEQ ID NO: 6270 - protein, 12 aa, Homo sapiens
  CDR3 for beta chain variable domain of TCR clone 3135 (TRBV11-2, TRBJ2-1)
CASSPGNNEQFF

SEQ ID NO: 6271 - protein, 17 aa, Homo sapiens
  CDR3 for alpha chain variable domain of TCR clone 3136 (TRAV3, TRAJ12)
CAVRDGGRMDSSYKLIF

SEQ ID NO: 6272 - protein, 13 aa, Homo sapiens
  CDR3 for beta chain variable domain of TCR clone 3136 (TRBV4-2, TRBJ1-1)
CASSQAGNTEAFF

SEQ ID NO: 6273 - protein, 12 aa, Homo sapiens
  CDR3 for alpha chain variable domain of TCR clone 3137 (TRAV12-3, TRAJ17)
CAMTLTGNKLTF

SEQ ID NO: 6274 - protein, 15 aa, Homo sapiens
  CDR3 for beta chain variable domain of TCR clone 3137 (TRBV20-1, TRBJ2-7)
CSARDRVPGMDEQYF

SEQ ID NO: 6275 - protein, 14 aa, Homo sapiens
  CDR3 for alpha chain variable domain of TCR clone 3138 (TRAV12-3, TRAJ10)
SHLPLTGGGNKLTF

SEQ ID NO: 6276 - protein, 13 aa, Homo sapiens
  CDR3 for beta chain variable domain of TCR clone 3138 (TRBV29-1, TRBJ2-5)
CSVEATAQGTQYF

SEQ ID NO: 6277 - protein, 11 aa, Homo sapiens
  CDR3 for alpha chain variable domain of TCR clone 3139 (TRAV2, TRAJ13)
CASGGYQKVTF

SEQ ID NO: 6278 - protein, 11 aa, Homo sapiens
  CDR3 for beta chain variable domain of TCR clone 3139 (TRBV6-3, TRBJ2-3)
CATGQADTQYF

SEQ ID NO: 6279 - protein, 14 aa, Homo sapiens
  CDR3 for alpha chain variable domain of TCR clone 3140 (TRAV1-2, TRAJ29)
CAVRTDSGNTPLVF

SEQ ID NO: 6280 - protein, 14 aa, Homo sapiens
  CDR3 for beta chain variable domain of TCR clone 3140 (TRBV7-2, TRBJ2-7)
CASSPKTSFYEQYF

SEQ ID NO: 6281 - protein, 14 aa, Homo sapiens
  CDR3 for alpha chain variable domain of TCR clone 3141 (TRAV3, TRAJ6)
CAVRDSRRKLHTYI

SEQ ID NO: 6282 - protein, 15 aa, Homo sapiens
  CDR3 for beta chain variable domain of TCR clone 3141 (TRBV18, TRBJ2-7)
CASSPLQGRTYEQYF

SEQ ID NO: 6283 - protein, 12 aa, Homo sapiens
  CDR3 for alpha chain variable domain of TCR clone 3142 (TRAV12-1, TRAJ31)
CVVNRNNARLMF

SEQ ID NO: 6284 - protein, 15 aa, Homo sapiens
  CDR3 for beta chain variable domain of TCR clone 3142 (TRBV10-3, TRBJ2-3)
CAISEALSSTDTQYF

SEQ ID NO: 6285 - protein, 14 aa, Homo sapiens
  CDR3 for alpha chain variable domain of TCR clone 3143 (TRAV1-2, TRAJ16)
CAVNRFSDGQKLLF

SEQ ID NO: 6286 - protein, 15 aa, Homo sapiens
  CDR3 for beta chain variable domain of TCR clone 3143 (TRBV6-6, TRBJ2-7)
CASSYSYGGSYEQYF

SEQ ID NO: 6287 - protein, 16 aa, Homo sapiens
  CDR3 for alpha chain variable domain of TCR clone 3144 (TRAV12-3, TRAJ53)
CAMSPGSGGSNYKLTF

SEQ ID NO: 6288 - protein, 15 aa, Homo sapiens
  CDR3 for beta chain variable domain of TCR clone 3144 (TRBV25-1, TRBJ1-4)
CASSKRIATNEKLFF

SEQ ID NO: 6289 - protein, 15 aa, Homo sapiens
  CDR3 for alpha chain variable domain of TCR clone 3145 (TRAV25, TRAJ52)
CAGRPGGTSYGELTF

SEQ ID NO: 6290 - protein, 17 aa, Homo sapiens
  CDR3 for beta chain variable domain of TCR clone 3145 (TRBV7-8, TRBJ2-6)
CASSAGTGGAGANVLTF

SEQ ID NO: 6291 - protein, 14 aa, Homo sapiens
  CDR3 for alpha chain variable domain of TCR clone 3146 (TRAV2, TRAJ29)
CAVTPPSGNTPLVF

SEQ ID NO: 6292 - protein, 13 aa, Homo sapiens
  CDR3 for beta chain variable domain of TCR clone 3146 (TRBV11-2, TRBJ2-1)
CASSLGLAGGRFF

SEQ ID NO: 6293 - protein, 11 aa, Homo sapiens
  CDR3 for alpha chain variable domain of TCR clone 3147 (TRAV1-2, TRAJ20)
CAVANDYKLSF

SEQ ID NO: 6294 - protein, 13 aa, Homo sapiens
  CDR3 for beta chain variable domain of TCR clone 3147 (TRBV7-3, TRBJ1-1)
CASSQDWGAEAFF

SEQ ID NO: 6295 - protein, 18 aa, Homo sapiens
  CDR3 for alpha chain variable domain of TCR clone 3148 (TRAV13-1, TRAJ52)
CAAKNPNAGGTSYGKLTF

SEQ ID NO: 6296 - protein, 17 aa, Homo sapiens
  CDR3 for beta chain variable domain of TCR clone 3148 (TRBV11-2, TRBJ2-1)
CASSLYPPGVEYNEQFF

SEQ ID NO: 6297 - protein, 12 aa, Homo sapiens
  CDR3 for alpha chain variable domain of TCR clone 3149 (TRAV12-1, TRAJ40)
CVVPSGTYKYIF

SEQ ID NO: 6298 - protein, 15 aa, Homo sapiens
  CDR3 for beta chain variable domain of TCR clone 3149 (TRBV12-4, TRBJ2-1)
CAGSPLSGRNSEQFF

SEQ ID NO: 6299 - protein, 15 aa, Homo sapiens
  CDR3 for alpha chain variable domain of TCR clone 3150 (TRAV21, TRAJ53)
CATLNSGGSNYKLTF

SEQ ID NO: 6300 - protein, 14 aa, Homo sapiens
  CDR3 for beta chain variable domain of TCR clone 3150 (TRBV15, TRBJ2-5)
CATSIGGLGETQYF

SEQ ID NO: 6301 - protein, 14 aa, Homo sapiens
  CDR3 for alpha chain variable domain of TCR clone 3151 (TRAV4, TRAJ17)
CLVGDPLVGNKLTF

SEQ ID NO: 6302 - protein, 20 aa, Homo sapiens
  CDR3 for beta chain variable domain of TCR clone 3151 (TRBV20-1, TRBJ2-1)
CSARPYSVAGGPSYYNEQFF

SEQ ID NO: 6303 - protein, 14 aa, Homo sapiens
  CDR3 for alpha chain variable domain of TCR clone 3152 (TRAV16, TRAJ31)
CSKWRRGDNARLMF

SEQ ID NO: 6304 - protein, 16 aa, Homo sapiens
  CDR3 for beta chain variable domain of TCR clone 3152 (TRBV28, TRBJ2-7)
CASSLFFETGGPEQYF

SEQ ID NO: 6305 - protein, 16 aa, Homo sapiens
  CDR3 for alpha chain variable domain of TCR clone 3153 (TRAV3, TRAJ37)
CAVRGKGSGNTGKLIF

SEQ ID NO: 6306 - protein, 16 aa, Homo sapiens
  CDR3 for beta chain variable domain of TCR clone 3153 (TRBV28, TRBJ1-5)
CASSFRGGYSNQPQHF

SEQ ID NO: 6307 - protein, 13 aa, Homo sapiens
  CDR3 for alpha chain variable domain of TCR clone 3154 (TRAV13-1, TRAJ6)
CAASRGGSYIPTF

SEQ ID NO: 6308 - protein, 15 aa, Homo sapiens
  CDR3 for beta chain variable domain of TCR clone 3154 (TRBV25-1, TRBJ2-5)
CASSDTGTHQETQYF

SEQ ID NO: 6309 - protein, 12 aa, Homo sapiens
  CDR3 for alpha chain variable domain of TCR clone 3155 (TRAV3, TRAJ27)
CAVRDGAGKSTF

SEQ ID NO: 6310 - protein, 15 aa, Homo sapiens
  CDR3 for beta chain variable domain of TCR clone 3155 (TRBV13, TRBJ2-2)
CASGYRGRRTGELFF

SEQ ID NO: 6311 - protein, 15 aa, Homo sapiens
  CDR3 for alpha chain variable domain of TCR clone 3156 (TRAV17, TRAJ57)
CATGPSQGGSEKLVF

SEQ ID NO: 6312 - protein, 11 aa, Homo sapiens
  CDR3 for beta chain variable domain of TCR clone 3156 (TRBV29-1, TRBJ2-5)
CSEDRTGTQYF

SEQ ID NO: 6313 - protein, 12 aa, Homo sapiens
  CDR3 for alpha chain variable domain of TCR clone 3157 (TRAV21, TRAJ39)
CAADNAGNMLTF

SEQ ID NO: 6314 - protein, 12 aa, Homo sapiens
  CDR3 for beta chain variable domain of TCR clone 3157 (TRBV5-4, TRBJ2-7)
CASSWAGQGENF

SEQ ID NO: 6315 - protein, 14 aa, Homo sapiens
  CDR3 for alpha chain variable domain of TCR clone 3158 (TRAV12-2, TRAJ53)
CAVKGGGSNYKLTF

SEQ ID NO: 6316 - protein, 15 aa, Homo sapiens
  CDR3 for beta chain variable domain of TCR clone 3158 (TRBV11-2, TRBJ2-2)
CASSSDRVNAGELFF

SEQ ID NO: 6317 - protein, 15 aa, Homo sapiens
  CDR3 for alpha chain variable domain of TCR clone 3159 (TRAV8-3, TRAJ40)
CAVGPYTSGTYKYIF

SEQ ID NO: 6318 - protein, 16 aa, Homo sapiens
  CDR3 for beta chain variable domain of TCR clone 3159 (TRBV7-2, TRBJ2-7)
CASSLDPGGGSGEQYF

SEQ ID NO: 6319 - protein, 15 aa, Homo sapiens
  CDR3 for alpha chain variable domain of TCR clone 3160 (TRAV3, TRAJ22)
CAVRDRGGSARQLTF

SEQ ID NO: 6320 - protein, 14 aa, Homo sapiens
  CDR3 for beta chain variable domain of TCR clone 3160 (TRBV25-1, TRBJ1-1)
CASTHLGGNTEAFF

SEQ ID NO: 6321 - protein, 15 aa, Homo sapiens
  CDR3 for alpha chain variable domain of TCR clone 3161 (TRAV3, TRAJ27)
CAVRGFTPMQANQPL

SEQ ID NO: 6322 - protein, 12 aa, Homo sapiens
  CDR3 for beta chain variable domain of TCR clone 3161 (TRBV11-2, TRBJ2-2)
CASSLGGGELFF

SEQ ID NO: 6323 - protein, 12 aa, Homo sapiens
  CDR3 for alpha chain variable domain of TCR clone 3162 (TRAV12-3, TRAJ20)
CAMVRGDYKLSF

SEQ ID NO: 6324 - protein, 14 aa, Homo sapiens
  CDR3 for beta chain variable domain of TCR clone 3162 (TRBV20-1, TRBJ2-7)
CSAISREASYEQYF

SEQ ID NO: 6325 - protein, 14 aa, Homo sapiens
  CDR3 for alpha chain variable domain of TCR clone 3163 (TRAV12-2, TRAJ13)
CAVKKTGGYQKVTF

SEQ ID NO: 6326 - protein, 19 aa, Homo sapiens
  CDR3 for beta chain variable domain of TCR clone 3163 (TRBV25-1, TRBJ2-2)
CAILVYRVDRGRKTGELFF

SEQ ID NO: 6327 - protein, 12 aa, Homo sapiens
  CDR3 for alpha chain variable domain of TCR clone 3164 (TRAV26-1, TRAJ13)
CIVSRGYQKVTF

SEQ ID NO: 6328 - protein, 16 aa, Homo sapiens
  CDR3 for beta chain variable domain of TCR clone 3164 (TRBV27, TRBJ2-1)
CASSLSKGFGLDEQFF

SEQ ID NO: 6329 - protein, 15 aa, Homo sapiens
  CDR3 for alpha chain variable domain of TCR clone 3165 (TRAV13-1, TRAJ50)
CAAKGSETSYDKVIF

SEQ ID NO: 6330 - protein, 18 aa, Homo sapiens
  CDR3 for beta chain variable domain of TCR clone 3165 (TRBV10-3, TRBJ2-1)
CTSVPSVSLRGGVDEQFF

SEQ ID NO: 6331 - protein, 21 aa, Homo sapiens
  CDR3 for alpha chain variable domain of TCR clone 3166 (TRAV25, TRAJ7)
TATQTTDVGTYFCPGNNRLAF

SEQ ID NO: 6332 - protein, 14 aa, Homo sapiens
  CDR3 for beta chain variable domain of TCR clone 3166 (TRBV11-2, TRBJ2-2)
CASSLGLRVRELFF

SEQ ID NO: 6333 - protein, 12 aa, Homo sapiens
  CDR3 for alpha chain variable domain of TCR clone 3167 (TRAV1-1, TRAJ39)
CAVPVVGNMLTF

SEQ ID NO: 6334 - protein, 13 aa, Homo sapiens
  CDR3 for beta chain variable domain of TCR clone 3167 (TRBV4-1, TRBJ1-1)
CASSRKMNTEAFF

SEQ ID NO: 6335 - protein, 23 aa, Homo sapiens
  CDR3 for alpha chain variable domain of TCR clone 3168 (TRAV30, TRAJ29)
PAQLLRNLLLWHRAFSGNTPLVF

SEQ ID NO: 6336 - protein, 15 aa, Homo sapiens
  CDR3 for beta chain variable domain of TCR clone 3168 (TRBV5-1, TRBJ2-2)
CASSLFGQNTGELFF

SEQ ID NO: 6337 - protein, 13 aa, Homo sapiens
  CDR3 for alpha chain variable domain of TCR clone 3169 (TRAV29/DV5, TRAJ31)
CAASRNNNARLMF

SEQ ID NO: 6338 - protein, 12 aa, Homo sapiens
  CDR3 for beta chain variable domain of TCR clone 3169 (TRBV11-2, TRBJ2-2)
CASSLGGGELFF

SEQ ID NO: 6339 - protein, 15 aa, Homo sapiens
  CDR3 for alpha chain variable domain of TCR clone 3170 (TRAV12-2, TRAJ53)
CAVNGGGGSNYKLTF

SEQ ID NO: 6340 - protein, 15 aa, Homo sapiens
  CDR3 for beta chain variable domain of TCR clone 3170 (TRBV20-1, TRBJ2-7)
CSARDRVSGMDEQYF

SEQ ID NO: 6341 - protein, 18 aa, Homo sapiens
  CDR3 for alpha chain variable domain of TCR clone 3171 (TRAV8-3, TRAJ6)
CAVGAEHQEEATYLHLEE

SEQ ID NO: 6342 - protein, 14 aa, Homo sapiens
  CDR3 for beta chain variable domain of TCR clone 3171 (TRBV6-6, TRBJ2-7)
CASSDSGAGYEQYF

SEQ ID NO: 6343 - protein, 12 aa, Homo sapiens
  CDR3 for alpha chain variable domain of TCR clone 3172 (TRAV13-1, TRAJ20)
CAASMGDYKLSF

SEQ ID NO: 6344 - protein, 15 aa, Homo sapiens
  CDR3 for beta chain variable domain of TCR clone 3172 (TRBV11-3, TRBJ2-3)
CASNGGLDSTDTQYF

SEQ ID NO: 6345 - protein, 17 aa, Homo sapiens
  CDR3 for alpha chain variable domain of TCR clone 3173 (TRAV3, TRAJ6)
CAVRDGPRAGGSYIPTF

SEQ ID NO: 6346 - protein, 14 aa, Homo sapiens
  CDR3 for beta chain variable domain of TCR clone 3173 (TRBV7-2, TRBJ2-7)
CASSPKTSFYEQYF

SEQ ID NO: 6347 - protein, 14 aa, Homo sapiens
  CDR3 for alpha chain variable domain of TCR clone 3174 (TRAV10, TRAJ34)
CVVSRGGDTDKLIF

SEQ ID NO: 6348 - protein, 17 aa, Homo sapiens
  CDR3 for beta chain variable domain of TCR clone 3174 (TRBV6-3, TRBJ2-3)
CASRRPLGGGSTDTQYF

SEQ ID NO: 6349 - protein, 14 aa, Homo sapiens
  CDR3 for alpha chain variable domain of TCR clone 3175 (TRAV2, TRAJ9)
CAVEDRSGGFKTIF

SEQ ID NO: 6350 - protein, 18 aa, Homo sapiens
  CDR3 for beta chain variable domain of TCR clone 3175 (TRBV20-1, TRBJ2-5)
CSQTGDSGRLGGKETQYF

SEQ ID NO: 6351 - protein, 15 aa, Homo sapiens
  CDR3 for alpha chain variable domain of TCR clone 3176 (TRAV1-2, TRAJ28)
CAVQYSGAGSYQLTF

SEQ ID NO: 6352 - protein, 13 aa, Homo sapiens
  CDR3 for beta chain variable domain of TCR clone 3176 (TRBV4-2, TRBJ1-1)
CASSQAGNTEAFF

SEQ ID NO: 6353 - protein, 12 aa, Homo sapiens
  CDR3 for alpha chain variable domain of TCR clone 3177 (TRAV38-1, TRAJ20)
CAFIWNDYKLSF

SEQ ID NO: 6354 - protein, 14 aa, Homo sapiens
  CDR3 for beta chain variable domain of TCR clone 3177 (TRBV27, TRBJ1-1)
CASSPQGKRAEAFF

SEQ ID NO: 6355 - protein, 14 aa, Homo sapiens
  CDR3 for alpha chain variable domain of TCR clone 3178 (TRAV12-2, TRAJ13)
CAVKKTGGYQKVTF

SEQ ID NO: 6356 - protein, 15 aa, Homo sapiens
  CDR3 for beta chain variable domain of TCR clone 3178 (TRBV11-2, TRBJ2-2)
CASSSDRVNAGELFF

SEQ ID NO: 6357 - protein, 16 aa, Homo sapiens
  CDR3 for alpha chain variable domain of TCR clone 3179 (TRAV3, TRAJ37)
CAVRPHGSGNTGKLIF

SEQ ID NO: 6358 - protein, 15 aa, Homo sapiens
  CDR3 for beta chain variable domain of TCR clone 3179 (TRBV10-3, TRBJ2-3)
CAISLTSGGTDTQYF

SEQ ID NO: 6359 - protein, 14 aa, Homo sapiens
  CDR3 for alpha chain variable domain of TCR clone 3180 (TRAV23/DV6, TRAJ40)
CAARKNSGTYKYIF

SEQ ID NO: 6360 - protein, 14 aa, Homo sapiens
  CDR3 for beta chain variable domain of TCR clone 3180 (TRBV10-3, TRBJ2-5)
CAISERDYQETQYF

SEQ ID NO: 6361 - protein, 14 aa, Homo sapiens
  CDR3 for alpha chain variable domain of TCR clone 3181 (TRAV1-2, TRAJ33)
CAVRAPDSNYQLIW

SEQ ID NO: 6362 - protein, 15 aa, Homo sapiens
  CDR3 for beta chain variable domain of TCR clone 3181 (TRBV10-3, TRBJ2-3)
CAISLTSGGTDTQYF

SEQ ID NO: 6363 - protein, 12 aa, Homo sapiens
  CDR3 for alpha chain variable domain of TCR clone 3182 (TRAV3, TRAJ43)
CAVRDPNNDMRF

SEQ ID NO: 6364 - protein, 14 aa, Homo sapiens
  CDR3 for beta chain variable domain of TCR clone 3182 (TRBV19, TRBJ2-5)
CASSMTGQQETQYF

SEQ ID NO: 6365 - protein, 12 aa, Homo sapiens
  CDR3 for alpha chain variable domain of TCR clone 3183 (TRAV3, TRAJ43)
CCERGRNNDMRF

SEQ ID NO: 6366 - protein, 12 aa, Homo sapiens
  CDR3 for beta chain variable domain of TCR clone 3183 (TRBV5-1, TRBJ2-7)
CASSLDSYEQYF

SEQ ID NO: 6367 - protein, 17 aa, Homo sapiens
  CDR3 for alpha chain variable domain of TCR clone 3184 (TRAV3, TRAJ6)
CAVRDGPRAGGSYIPTF

SEQ ID NO: 6368 - protein, 14 aa, Homo sapiens
  CDR3 for beta chain variable domain of TCR clone 3184 (TRBV6-1, TRBJ1-3)
CASVQGGGGNTIYF

SEQ ID NO: 6369 - protein, 14 aa, Homo sapiens
  CDR3 for alpha chain variable domain of TCR clone 3185 (TRAV26-1, TRAJ38)
CIADNAGNNRKLIW

SEQ ID NO: 6370 - protein, 14 aa, Homo sapiens
  CDR3 for beta chain variable domain of TCR clone 3185 (TRBV20-1, TRBJ1-1)
CSAQTRIGGTEAFF

SEQ ID NO: 6371 - protein, 16 aa, Homo sapiens
  CDR3 for alpha chain variable domain of TCR clone 3186 (TRAV3, TRAJ37)
CAVRGKGSGNTGKLIF

SEQ ID NO: 6372 - protein, 20 aa, Homo sapiens
  CDR3 for beta chain variable domain of TCR clone 3186 (TRBV7-8, TRBJ2-2)
CASSHLFPGPTIHITGELFF

SEQ ID NO: 6373 - protein, 14 aa, Homo sapiens
  CDR3 for alpha chain variable domain of TCR clone 3187 (TRAV2, TRAJ16)
CAVERGSDGQKLLF

SEQ ID NO: 6374 - protein, 12 aa, Homo sapiens
  CDR3 for beta chain variable domain of TCR clone 3187 (TRBV6-5, TRBJ2-7)
CASYIYGYEQYF

SEQ ID NO: 6375 - protein, 12 aa, Homo sapiens
  CDR3 for alpha chain variable domain of TCR clone 3188 (TRAV12-3, TRAJ17)
CAMTLTGNKLTF

SEQ ID NO: 6376 - protein, 16 aa, Homo sapiens
  CDR3 for beta chain variable domain of TCR clone 3188 (TRBV5-1, TRBJ2-3)
CASSLGLAVYTDTQYF

SEQ ID NO: 6377 - protein, 12 aa, Homo sapiens
  CDR3 for alpha chain variable domain of TCR clone 3189 (TRAV13-1, TRAJ11)
CAGPSGYSTLTF

SEQ ID NO: 6378 - protein, 13 aa, Homo sapiens
  CDR3 for beta chain variable domain of TCR clone 3189 (TRBV12-4, TRBJ1-5)
CASSPDRAQPQHF

SEQ ID NO: 6379 - protein, 13 aa, Homo sapiens
  CDR3 for alpha chain variable domain of TCR clone 3190 (TRAV25, TRAJ29)
CAGRFVGNTPLVF

SEQ ID NO: 6380 - protein, 15 aa, Homo sapiens
  CDR3 for beta chain variable domain of TCR clone 3190 (TRBV29-1, TRBJ2-1)
CSVRTSLSSYNEQFF

SEQ ID NO: 6381 - protein, 14 aa, Homo sapiens
  CDR3 for alpha chain variable domain of TCR clone 3191 (TRAV12-3, TRAJ10)
SHLPLTGGGNKLTF

SEQ ID NO: 6382 - protein, 15 aa, Homo sapiens
  CDR3 for beta chain variable domain of TCR clone 3191 (TRBV9, TRBJ1-6)
CASSVAGTGDSPLHF

SEQ ID NO: 6383 - protein, 14 aa, Homo sapiens
  CDR3 for alpha chain variable domain of TCR clone 3192 (TRAV3, TRAJ40)
CAVRDRRGTYKYIF

SEQ ID NO: 6384 - protein, 15 aa, Homo sapiens
  CDR3 for beta chain variable domain of TCR clone 3192 (TRBV28, TRBJ2-1)
CASSIIAGGRSEQFF

SEQ ID NO: 6385 - protein, 10 aa, Homo sapiens
  CDR3 for alpha chain variable domain of TCR clone 3193 (TRAV1-2, TRAJ20)
CVPNDYKLSF

SEQ ID NO: 6386 - protein, 14 aa, Homo sapiens
  CDR3 for beta chain variable domain of TCR clone 3193 (TRBV12-5, TRBJ2-5)
CASGSRTHQETQYF

SEQ ID NO: 6387 - protein, 17 aa, Homo sapiens
  CDR3 for alpha chain variable domain of TCR clone 3194 (TRAV8-6, TRAJ58)
CAVSSWVGETSGSRLTF

SEQ ID NO: 6388 - protein, 17 aa, Homo sapiens
  CDR3 for beta chain variable domain of TCR clone 3194 (TRBV11-2, TRBJ2-1)
CASSLYPPGVEYNEQFF

SEQ ID NO: 6389 - protein, 16 aa, Homo sapiens
  CDR3 for alpha chain variable domain of TCR clone 3195 (TRAV12-2, TRAJ32)
CAVNLGQGGATNKLIF

SEQ ID NO: 6390 - protein, 13 aa, Homo sapiens
  CDR3 for beta chain variable domain of TCR clone 3195 (TRBV9, TRBJ2-2)
CASSPRPAGELFF

SEQ ID NO: 6391 - protein, 15 aa, Homo sapiens
  CDR3 for alpha chain variable domain of TCR clone 3196 (TRAV20, TRAJ58)
CAVQDLETSGSRLTF

SEQ ID NO: 6392 - protein, 12 aa, Homo sapiens
  CDR3 for beta chain variable domain of TCR clone 3196 (TRBV9, TRBJ2-2)
CASSARTGELFF

SEQ ID NO: 6393 - protein, 16 aa, Homo sapiens
  CDR3 for alpha chain variable domain of TCR clone 3197 (TRAV13-1, TRAJ10)
CAASSHFTGGGNKLTF

SEQ ID NO: 6394 - protein, 15 aa, Homo sapiens
  CDR3 for beta chain variable domain of TCR clone 3197 (TRBV7-9, TRBJ1-6)
CASSSPGRGNSPLHF

SEQ ID NO: 6395 - protein, 14 aa, Homo sapiens
  CDR3 for alpha chain variable domain of TCR clone 3198 (TRAV1-2, TRAJ16)
CAVNRFSDGQKLLF

SEQ ID NO: 6396 - protein, 15 aa, Homo sapiens
  CDR3 for beta chain variable domain of TCR clone 3198 (TRBV20-1, TRBJ2-7)
CSARKGLAESYEQYF

SEQ ID NO: 6397 - protein, 17 aa, Homo sapiens
  CDR3 for alpha chain variable domain of TCR clone 3199 (TRAV4, TRAJ18)
CLVGERSVGSTLGRLYF

SEQ ID NO: 6398 - protein, 16 aa, Homo sapiens
  CDR3 for beta chain variable domain of TCR clone 3199 (TRBV19, TRBJ2-1)
CASSKAGPSSYNEQFF

SEQ ID NO: 6399 - protein, 13 aa, Homo sapiens
  CDR3 for alpha chain variable domain of TCR clone 3200 (TRAV21, TRAJ20)
CAVGLRVDYKLSF

SEQ ID NO: 6400 - protein, 18 aa, Homo sapiens
  CDR3 for beta chain variable domain of TCR clone 3200 (TRBV7-6, TRBJ2-1)
CASSPRTSGMSSYNEQFF

SEQ ID NO: 6401 - protein, 15 aa, Homo sapiens
  CDR3 for alpha chain variable domain of TCR clone 3201 (TRAV13-1, TRAJ5)
CAASKADTGRRALTF

SEQ ID NO: 6402 - protein, 16 aa, Homo sapiens
  CDR3 for beta chain variable domain of TCR clone 3201 (TRBV7-2, TRBJ2-1)
CASSLGRTSGDNEQFF

SEQ ID NO: 6403 - protein, 17 aa, Homo sapiens
  CDR3 for alpha chain variable domain of TCR clone 3202 (TRAV26-1, TRAJ58)
CIVRVGAEETSGSRLTF

SEQ ID NO: 6404 - protein, 13 aa, Homo sapiens
  CDR3 for beta chain variable domain of TCR clone 3202 (TRBV12-5, TRBJ1-2)
CASGVRTGNGYTF

SEQ ID NO: 6405 - protein, 12 aa, Homo sapiens
  CDR3 for alpha chain variable domain of TCR clone 3203 (TRAV21, TRAJ43)
CAVSWNNNDMRF

SEQ ID NO: 6406 - protein, 15 aa, Homo sapiens
  CDR3 for beta chain variable domain of TCR clone 3203 (TRBV20-1, TRBJ2-1)
CSASPPSGGYNEQFF

SEQ ID NO: 6407 - protein, 13 aa, Homo sapiens
  CDR3 for alpha chain variable domain of TCR clone 3204 (TRAV29/DV5, TRAJ33)
CAASVESNYQLIW

SEQ ID NO: 6408 - protein, 14 aa, Homo sapiens
  CDR3 for beta chain variable domain of TCR clone 3204 (TRBV11-2, TRBJ2-5)
CASSRTGGIETQYF

SEQ ID NO: 6409 - protein, 11 aa, Homo sapiens
  CDR3 for alpha chain variable domain of TCR clone 3205 (TRAV25, TRAJ47)
CAGLYGNKLVF

SEQ ID NO: 6410 - protein, 14 aa, Homo sapiens
  CDR3 for beta chain variable domain of TCR clone 3205 (TRBV19, TRBJ2-1)
CASKEGVQVNEQFF

SEQ ID NO: 6411 - protein, 12 aa, Homo sapiens
  CDR3 for alpha chain variable domain of TCR clone 3206 (TRAV26-1, TRAJ17)
CISQSCRQQANF

SEQ ID NO: 6412 - protein, 16 aa, Homo sapiens
  CDR3 for beta chain variable domain of TCR clone 3206 (TRBV28, TRBJ1-4)
CASSSRTGAANEKLFF

SEQ ID NO: 6413 - protein, 17 aa, Homo sapiens
  CDR3 for alpha chain variable domain of TCR clone 3207 (TRAV36/DV7, TRAJ52)
CAVAQRAGGTSYGKLTF

SEQ ID NO: 6414 - protein, 14 aa, Homo sapiens
  CDR3 for beta chain variable domain of TCR clone 3207 (TRBV20-1, TRBJ1-1)
CSAQTRIGGTEAFF

SEQ ID NO: 6415 - protein, 15 aa, Homo sapiens
  CDR3 for alpha chain variable domain of TCR clone 3208 (TRAV12-2, TRAJ8)
CAVREENTGFQKLVF

SEQ ID NO: 6416 - protein, 15 aa, Homo sapiens
  CDR3 for beta chain variable domain of TCR clone 3208 (TRBV28, TRBJ2-4)
CAAGSGTLLMGIQYF

SEQ ID NO: 6417 - protein, 12 aa, Homo sapiens
  CDR3 for alpha chain variable domain of TCR clone 3209 (TRAV13-2, TRAJ23)
CAERHRGGKLIF

SEQ ID NO: 6418 - protein, 16 aa, Homo sapiens
  CDR3 for beta chain variable domain of TCR clone 3209 (TRBV7-9, TRBJ1-2)
CASSLGFSSGEDGYTF

SEQ ID NO: 6419 - protein, 16 aa, Homo sapiens
  CDR3 for alpha chain variable domain of TCR clone 3210 (TRAV3, TRAJ37)
CAVRGKGSGNTGKLIF

SEQ ID NO: 6420 - protein, 13 aa, Homo sapiens
  CDR3 for beta chain variable domain of TCR clone 3210 (TRBV4-2, TRBJ1-1)
CASSQAGNTEAFF

SEQ ID NO: 6421 - protein, 12 aa, Homo sapiens
  CDR3 for alpha chain variable domain of TCR clone 3211 (TRAV2, TRAJ36)
CAELTGANNLFF

SEQ ID NO: 6422 - protein, 18 aa, Homo sapiens
  CDR3 for beta chain variable domain of TCR clone 3211 (TRBV19, TRBJ1-1)
CASSIDGGDYTGNTEAFF

SEQ ID NO: 6423 - protein, 12 aa, Homo sapiens
  CDR3 for alpha chain variable domain of TCR clone 3212 (TRAV12-3, TRAJ17)
CAMTLTGNKLTF

SEQ ID NO: 6424 - protein, 15 aa, Homo sapiens
  CDR3 for beta chain variable domain of TCR clone 3212 (TRBV9, TRBJ1-6)
CASSVAGTGDSPLHF

SEQ ID NO: 6425 - protein, 13 aa, Homo sapiens
  CDR3 for alpha chain variable domain of TCR clone 3213 (TRAV13-1, TRAJ6)
CAASSGGSYIPTF

SEQ ID NO: 6426 - protein, 14 aa, Homo sapiens
  CDR3 for beta chain variable domain of TCR clone 3213 (TRBV20-1, TRBJ2-4)
CSAVAGGPGNIQYF

SEQ ID NO: 6427 - protein, 14 aa, Homo sapiens
  CDR3 for alpha chain variable domain of TCR clone 3214 (TRAV12-2, TRAJ8)
CAVKENTGFQKLVF

SEQ ID NO: 6428 - protein, 13 aa, Homo sapiens
  CDR3 for beta chain variable domain of TCR clone 3214 (TRBV18, TRBJ1-2)
CASSASATEGYTF

SEQ ID NO: 6429 - protein, 14 aa, Homo sapiens
  CDR3 for alpha chain variable domain of TCR clone 3215 (TRAV12-2, TRAJ13)
CAVKKTGGYQKVTF

SEQ ID NO: 6430 - protein, 15 aa, Homo sapiens
  CDR3 for beta chain variable domain of TCR clone 3215 (TRBV20-1, TRBJ2-1)
CSARGIGGTYNEQFF

SEQ ID NO: 6431 - protein, 16 aa, Homo sapiens
  CDR3 for alpha chain variable domain of TCR clone 3216 (TRAV12-3, TRAJ53)
CAMSPGSGGSNYKLTF

SEQ ID NO: 6432 - protein, 13 aa, Homo sapiens
  CDR3 for beta chain variable domain of TCR clone 3216 (TRBV19, TRBJ1-2)
CASSVPGQDGYTF

SEQ ID NO: 6433 - protein, 13 aa, Homo sapiens
  CDR3 for alpha chain variable domain of TCR clone 3217 (TRAV8-2, TRAJ49)
CVVSPSTGNQFYF

SEQ ID NO: 6434 - protein, 14 aa, Homo sapiens
  CDR3 for beta chain variable domain of TCR clone 3217 (TRBV11-2, TRBJ2-7)
CASSRSGGAGEQYF

SEQ ID NO: 6435 - protein, 13 aa, Homo sapiens
  CDR3 for alpha chain variable domain of TCR clone 3218 (TRAV3, TRAJ21)
CAVREPDFNKFYF

SEQ ID NO: 6436 - protein, 15 aa, Homo sapiens
  CDR3 for beta chain variable domain of TCR clone 3218 (TRBV3-1, TRBJ2-7)
CASSQAPSGSYEQYF

SEQ ID NO: 6437 - protein, 12 aa, Homo sapiens
  CDR3 for alpha chain variable domain of TCR clone 3219 (TRAV23/DV6, TRAJ30)
CAASKGDDKIIF

SEQ ID NO: 6438 - protein, 17 aa, Homo sapiens
  CDR3 for beta chain variable domain of TCR clone 3219 (TRBV13, TRBJ2-3)
CASSLSRVAGGRNTQYF

SEQ ID NO: 6439 - protein, 16 aa, Homo sapiens
  CDR3 for alpha chain variable domain of TCR clone 3220 (TRAV35, TRAJ52)
CAGQGSGGTSYGKLTF

SEQ ID NO: 6440 - protein, 17 aa, Homo sapiens
  CDR3 for beta chain variable domain of TCR clone 3220 (TRBV13, TRBJ2-3)
CASSLSRVAGGRNTQYF

SEQ ID NO: 6441 - protein, 14 aa, Homo sapiens
  CDR3 for alpha chain variable domain of TCR clone 3221 (TRAV12-2, TRAJ13)
CAVNPSGGYQKVTF

SEQ ID NO: 6442 - protein, 14 aa, Homo sapiens
  CDR3 for beta chain variable domain of TCR clone 3221 (TRBV12-4, TRBJ1-1)
CASSLGTGGTEAFF

SEQ ID NO: 6443 - protein, 10 aa, Homo sapiens
  CDR3 for alpha chain variable domain of TCR clone 3222 (TRAV8-4, TRAJ43)
CAVSADDMRF

SEQ ID NO: 6444 - protein, 11 aa, Homo sapiens
  CDR3 for beta chain variable domain of TCR clone 3222 (TRBV12-4, TRBJ2-3)
CASTATDTQYF

SEQ ID NO: 6445 - protein, 13 aa, Homo sapiens
  CDR3 for alpha chain variable domain of TCR clone 3223 (TRAV17, TRAJ5)
CALRGTGRRALTF

SEQ ID NO: 6446 - protein, 13 aa, Homo sapiens
  CDR3 for beta chain variable domain of TCR clone 3223 (TRBV4-2, TRBJ1-1)
CASSQAGNTEAFF

SEQ ID NO: 6447 - protein, 13 aa, Homo sapiens
  CDR3 for alpha chain variable domain of TCR clone 3224 (TRAV12-3, TRAJ48)
CAMSLVGNEKLTF

SEQ ID NO: 6448 - protein, 11 aa, Homo sapiens
  CDR3 for beta chain variable domain of TCR clone 3224 (TRBV7-2, TRBJ2-7)
CASSSGLWQYF

SEQ ID NO: 6449 - protein, 15 aa, Homo sapiens
  CDR3 for alpha chain variable domain of TCR clone 3225 (TRAV17, TRAJ57)
CATGPSQGGSEKLVF

SEQ ID NO: 6450 - protein, 13 aa, Homo sapiens
  CDR3 for beta chain variable domain of TCR clone 3225 (TRBV27, TRBJ1-4)
CASSLMGDEKLFF

SEQ ID NO: 6451 - protein, 12 aa, Homo sapiens
  CDR3 for alpha chain variable domain of TCR clone 3226 (TRAV13-1, TRAJ15)
CAANQAGTALIF

SEQ ID NO: 6452 - protein, 14 aa, Homo sapiens
  CDR3 for beta chain variable domain of TCR clone 3226 (TRBV20-1, TRBJ2-5)
CSARYRGLQETQYF

SEQ ID NO: 6453 - protein, 11 aa, Homo sapiens
  CDR3 for alpha chain variable domain of TCR clone 3227 (TRAV17, TRAJ36)
CAPTGANNLFF

SEQ ID NO: 6454 - protein, 12 aa, Homo sapiens
  CDR3 for beta chain variable domain of TCR clone 3227 (TRBV29-1, TRBJ2-3)
CSVVLGADTQYF

SEQ ID NO: 6455 - protein, 13 aa, Homo sapiens
  CDR3 for alpha chain variable domain of TCR clone 3228 (TRAV13-2, TRAJ48)
CAEMDFGNEKLTF

SEQ ID NO: 6456 - protein, 14 aa, Homo sapiens
  CDR3 for beta chain variable domain of TCR clone 3228 (TRBV19, TRBJ2-7)
CASSMGQGAIEQYF

SEQ ID NO: 6457 - protein, 13 aa, Homo sapiens
  CDR3 for alpha chain variable domain of TCR clone 3229 (TRAV2, TRAJ40)
CAVVTSGTYKYIF

SEQ ID NO: 6458 - protein, 15 aa, Homo sapiens
  CDR3 for beta chain variable domain of TCR clone 3229 (TRBV9, TRBJ1-6)
CASSVAGTGDSPLHF

SEQ ID NO: 6459 - protein, 13 aa, Homo sapiens
  CDR3 for alpha chain variable domain of TCR clone 3230 (TRAV2, TRAJ40)
CAVVTSGTYKYTF

SEQ ID NO: 6460 - protein, 14 aa, Homo sapiens
  CDR3 for beta chain variable domain of TCR clone 3230 (TRBV19, TRBJ2-1)
CASPTFVLSGEQFF

SEQ ID NO: 6461 - protein, 10 aa, Homo sapiens
  CDR3 for alpha chain variable domain of TCR clone 3231 (TRAV8-4, TRAJ43)
CAVSADDMRF

SEQ ID NO: 6462 - protein, 16 aa, Homo sapiens
  CDR3 for beta chain variable domain of TCR clone 3231 (TRBV12-5, TRBJ2-5)
CASGPRTSGNQETQYF

SEQ ID NO: 6463 - protein, 16 aa, Homo sapiens
  CDR3 for alpha chain variable domain of TCR clone 3232 (TRAV3, TRAJ10)
CAVRDMRAGGGNKLTF

SEQ ID NO: 6464 - protein, 16 aa, Homo sapiens
  CDR3 for beta chain variable domain of TCR clone 3232 (TRBV19, TRBJ2-2)
CASSFPGQGLAGELFF

SEQ ID NO: 6465 - protein, 16 aa, Homo sapiens
  CDR3 for alpha chain variable domain of TCR clone 3233 (TRAV12-2, TRAJ32)
CAVNLGQGGATNKLIF

SEQ ID NO: 6466 - protein, 12 aa, Homo sapiens
  CDR3 for beta chain variable domain of TCR clone 3233 (TRBV29-1, TRBJ2-3)
CSVTGGADTQYF

SEQ ID NO: 6467 - protein, 12 aa, Homo sapiens
  CDR3 for alpha chain variable domain of TCR clone 3234 (TRAV12-3, TRAJ17)
CAMTLTGNKLTF

SEQ ID NO: 6468 - protein, 15 aa, Homo sapiens
  CDR3 for beta chain variable domain of TCR clone 3234 (TRBV20-1, TRBJ2-7)
CSARYRVSGMDEQYF

SEQ ID NO: 6469 - protein, 10 aa, Homo sapiens
  CDR3 for alpha chain variable domain of TCR clone 3235 (TRAV2, TRAJ15)
RGQAGTALIF

SEQ ID NO: 6470 - protein, 12 aa, Homo sapiens
  CDR3 for beta chain variable domain of TCR clone 3235 (TRBV11-2, TRBJ2-2)
CASSLGGGELFF

SEQ ID NO: 6471 - protein, 15 aa, Homo sapiens
  CDR3 for alpha chain variable domain of TCR clone 3236 (TRAV8-2, TRAJ15)
CVVTMGNQAGTALIF

SEQ ID NO: 6472 - protein, 12 aa, Homo sapiens
  CDR3 for beta chain variable domain of TCR clone 3236 (TRBV6-1, TRBJ2-7)
CASSDYSYEQYF

SEQ ID NO: 6473 - protein, 11 aa, Homo sapiens
  CDR3 for alpha chain variable domain of TCR clone 3237 (TRAV2, TRAJ37)
CAVDNTGKLIF

SEQ ID NO: 6474 - protein, 14 aa, Homo sapiens
  CDR3 for beta chain variable domain of TCR clone 3237 (TRBV20-1, TRBJ2-1)
CSATLAGGLGEQFF

SEQ ID NO: 6475 - protein, 14 aa, Homo sapiens
  CDR3 for alpha chain variable domain of TCR clone 3238 (TRAV17, TRAJ22)
CATSPSGSARQLTF

SEQ ID NO: 6476 - protein, 13 aa, Homo sapiens
  CDR3 for beta chain variable domain of TCR clone 3238 (TRBV12-4, TRBJ1-2)
CASSLRQGKGYTF

SEQ ID NO: 6477 - protein, 14 aa, Homo sapiens
  CDR3 for alpha chain variable domain of TCR clone 3239 (TRAV26-1, TRAJ38)
CIADNAGNNRKLIW

SEQ ID NO: 6478 - protein, 16 aa, Homo sapiens
  CDR3 for beta chain variable domain of TCR clone 3239 (TRBV20-1, TRBJ2-7)
CSASTSGRLSSYEQYF

SEQ ID NO: 6479 - protein, 14 aa, Homo sapiens
  CDR3 for alpha chain variable domain of TCR clone 3240 (TRAV8-4, TRAJ16)
CAVSPVGRWPEAAL

SEQ ID NO: 6480 - protein, 14 aa, Homo sapiens
  CDR3 for beta chain variable domain of TCR clone 3240 (TRBV23-1, TRBJ2-5)
CASSFLRSQETQYF

SEQ ID NO: 6481 - protein, 16 aa, Homo sapiens
  CDR3 for alpha chain variable domain of TCR clone 3241 (TRAV30, TRAJ24)
CGTEIVDADSWGKSQF

SEQ ID NO: 6482 - protein, 14 aa, Homo sapiens
  CDR3 for beta chain variable domain of TCR clone 3241 (TRBV12-5, TRBJ2-5)
CASGSRTHQETQYF

SEQ ID NO: 6483 - protein, 14 aa, Homo sapiens
  CDR3 for alpha chain variable domain of TCR clone 3242 (TRAV23/DV6, TRAJ17)
CAASIGAAGNKLTF

SEQ ID NO: 6484 - protein, 12 aa, Homo sapiens
  CDR3 for beta chain variable domain of TCR clone 3242 (TRBV20-1, TRBJ2-5)
CSAGGAGETQYF

SEQ ID NO: 6485 - protein, 13 aa, Homo sapiens
  CDR3 for alpha chain variable domain of TCR clone 3243 (TRAV12-1, TRAJ13)
CVVTSGGYQKVTF

SEQ ID NO: 6486 - protein, 14 aa, Homo sapiens
  CDR3 for beta chain variable domain of TCR clone 3243 (TRBV27, TRBJ2-7)
CASSLAGLSYEQYF

SEQ ID NO: 6487 - protein, 14 aa, Homo sapiens
  CDR3 for alpha chain variable domain of TCR clone 3244 (TRAV12-2, TRAJ40)
CAVKIPSGTYKYIF

SEQ ID NO: 6488 - protein, 16 aa, Homo sapiens
  CDR3 for beta chain variable domain of TCR clone 3244 (TRBV28, TRBJ2-5)
CASSFSPAGGWETQYF

SEQ ID NO: 6489 - protein, 13 aa, Homo sapiens
  CDR3 for alpha chain variable domain of TCR clone 3245 (TRAV12-1, TRAJ9)
CVVRNTGGFKTIF

SEQ ID NO: 6490 - protein, 14 aa, Homo sapiens
  CDR3 for beta chain variable domain of TCR clone 3245 (TRBV20-1, TRBJ2-1)
CSAQIGGSANEQFF

SEQ ID NO: 6491 - protein, 19 aa, Homo sapiens
  CDR3 for alpha chain variable domain of TCR clone 3246 (TRAV26-1, TRAJ42)
CVLLRRQTYYGGSQGNLIF

SEQ ID NO: 6492 - protein, 16 aa, Homo sapiens
  CDR3 for beta chain variable domain of TCR clone 3246 (TRBV7-3, TRBJ2-2)
CASSLKRGTLSGELFF

SEQ ID NO: 6493 - protein, 11 aa, Homo sapiens
  CDR3 for alpha chain variable domain of TCR clone 3247 (TRAV12-3, TRAJ43)
CAMSVSNDMRF

SEQ ID NO: 6494 - protein, 14 aa, Homo sapiens
  CDR3 for beta chain variable domain of TCR clone 3247 (TRBV7-8, TRBJ2-3)
CASSLEAGTDTQYF

SEQ ID NO: 6495 - protein, 14 aa, Homo sapiens
  CDR3 for alpha chain variable domain of TCR clone 3248 (TRAV1-2, TRAJ15)
CAVRDRQAGTALIF

SEQ ID NO: 6496 - protein, 17 aa, Homo sapiens
  CDR3 for beta chain variable domain of TCR clone 3248 (TRBV5-5, TRBJ1-2)
CASSLGSLDGQSEGYTF

SEQ ID NO: 6497 - protein, 13 aa, Homo sapiens
  CDR3 for alpha chain variable domain of TCR clone 3249 (TRAV13-2, TRAJ48)
CAEMDFGNEKLTF

SEQ ID NO: 6498 - protein, 12 aa, Homo sapiens
  CDR3 for beta chain variable domain of TCR clone 3249 (TRBV11-2, TRBJ2-2)
CASSLGGGELFF

SEQ ID NO: 6499 - protein, 14 aa, Homo sapiens
  CDR3 for alpha chain variable domain of TCR clone 3250 (TRAV8-2, TRAJ4)
CVVSPSGGYNKLIF

SEQ ID NO: 6500 - protein, 14 aa, Homo sapiens
  CDR3 for beta chain variable domain of TCR clone 3250 (TRBV19, TRBJ2-5)
CASSSSGIQETQYF

SEQ ID NO: 6501 - protein, 13 aa, Homo sapiens
  CDR3 for alpha chain variable domain of TCR clone 3251 (TRAV12-2, TRAJ42)
CAVKRGSQGNLIF

SEQ ID NO: 6502 - protein, 13 aa, Homo sapiens
  CDR3 for beta chain variable domain of TCR clone 3251 (TRBV7-9, TRBJ2-3)
CASSPGSTDTQYF

SEQ ID NO: 6503 - protein, 14 aa, Homo sapiens
  CDR3 for alpha chain variable domain of TCR clone 3252 (TRAV26-1, TRAJ34)
CIVRVAYNTDKLIF

SEQ ID NO: 6504 - protein, 16 aa, Homo sapiens
  CDR3 for beta chain variable domain of TCR clone 3252 (TRBV7-3, TRBJ2-2)
CASSLKRGTLSGELFF

SEQ ID NO: 6505 - protein, 16 aa, Homo sapiens
  CDR3 for alpha chain variable domain of TCR clone 3253 (TRAV13-1, TRAJ48)
CAASIFGNFGNEKLTF

SEQ ID NO: 6506 - protein, 16 aa, Homo sapiens
  CDR3 for beta chain variable domain of TCR clone 3253 (TRBV7-2, TRBJ2-6)
CASSERRASGANVLTF

SEQ ID NO: 6507 - protein, 16 aa, Homo sapiens
  CDR3 for alpha chain variable domain of TCR clone 3254 (TRAV20, TRAJ26)
CAVQHRRDNYGQNFVF

SEQ ID NO: 6508 - protein, 15 aa, Homo sapiens
  CDR3 for beta chain variable domain of TCR clone 3254 (TRBV7-2, TRBJ2-7)
CASSWGQGAIYEQYF

SEQ ID NO: 6509 - protein, 14 aa, Homo sapiens
  CDR3 for alpha chain variable domain of TCR clone 3255 (TRAV12-1, TRAJ3)
CVVNPGSSASKIIF

SEQ ID NO: 6510 - protein, 18 aa, Homo sapiens
  CDR3 for beta chain variable domain of TCR clone 3255 (TRBV4-2, TRBJ1-2)
CASSQDKVGHTVNYGYTF

SEQ ID NO: 6511 - protein, 12 aa, Homo sapiens
  CDR3 for alpha chain variable domain of TCR clone 3256 (TRAV12-2, TRAJ43)
CAVNVNNNDMRF

SEQ ID NO: 6512 - protein, 14 aa, Homo sapiens
  CDR3 for beta chain variable domain of TCR clone 3256 (TRBV12-5, TRBJ2-5)
CASGSRTHQETQYF

SEQ ID NO: 6513 - protein, 13 aa, Homo sapiens
  CDR3 for alpha chain variable domain of TCR clone 3257 (TRAV2, TRAJ40)
CAVVTSGTYKYIF

SEQ ID NO: 6514 - protein, 16 aa, Homo sapiens
  CDR3 for beta chain variable domain of TCR clone 3257 (TRBV2, TRBJ2-1)
CASSVGGSLSYNEQFF

SEQ ID NO: 6515 - protein, 11 aa, Homo sapiens
  CDR3 for alpha chain variable domain of TCR clone 3258 (TRAV1-2, TRAJ20)
CAVSNDYKLSF

SEQ ID NO: 6516 - protein, 13 aa, Homo sapiens
  CDR3 for beta chain variable domain of TCR clone 3258 (TRBV7-9, TRBJ1-2)
CASSLKQNYGYTF

SEQ ID NO: 6517 - protein, 16 aa, Homo sapiens
  CDR3 for alpha chain variable domain of TCR clone 3259 (TRAV8-3, TRAJ18)
CAVALDRGSTLGRLYF

SEQ ID NO: 6518 - protein, 11 aa, Homo sapiens
  CDR3 for beta chain variable domain of TCR clone 3259 (TRBV29-1, TRBJ1-1)
CSVEILTEAFF

SEQ ID NO: 6519 - protein, 13 aa, Homo sapiens
  CDR3 for alpha chain variable domain of TCR clone 3260 (TRAV17, TRAJ5)
CALRGTGRRALTF

SEQ ID NO: 6520 - protein, 14 aa, Homo sapiens
  CDR3 for beta chain variable domain of TCR clone 3260 (TRBV12-5, TRBJ2-5)
CASGSRTHQETQYF

SEQ ID NO: 6521 - protein, 14 aa, Homo sapiens
  CDR3 for alpha chain variable domain of TCR clone 3261 (TRAV26-1, TRAJ49)
CIVRLTNTGNQFYF

SEQ ID NO: 6522 - protein, 11 aa, Homo sapiens
  CDR3 for beta chain variable domain of TCR clone 3261 (TRBV29-1, TRBJ2-5)
CSEDRTGTQYF

SEQ ID NO: 6523 - protein, 13 aa, Homo sapiens
  CDR3 for alpha chain variable domain of TCR clone 3262 (TRAV35, TRAJ42)
CAGFPGSQGNLIF

SEQ ID NO: 6524 - protein, 14 aa, Homo sapiens
  CDR3 for beta chain variable domain of TCR clone 3262 (TRBV29-1, TRBJ2-2)
CSVLAETNTGELFF

SEQ ID NO: 6525 - protein, 14 aa, Homo sapiens
  CDR3 for alpha chain variable domain of TCR clone 3263 (TRAV38-1, TRAJ45)
CASHSGGGADGLTF

SEQ ID NO: 6526 - protein, 14 aa, Homo sapiens
  CDR3 for beta chain variable domain of TCR clone 3263 (TRBV20-1, TRBJ1-1)
CSAQTRIGGTEAFF

SEQ ID NO: 6527 - protein, 14 aa, Homo sapiens
  CDR3 for alpha chain variable domain of TCR clone 3264 (TRAV26-1, TRAJ34)
CIVRVAYNTDKLIF

SEQ ID NO: 6528 - protein, 15 aa, Homo sapiens
  CDR3 for beta chain variable domain of TCR clone 3264 (TRBV20-1, TRBJ2-7)
CSARVPAAYFYEQYL

SEQ ID NO: 6529 - protein, 14 aa, Homo sapiens
  CDR3 for alpha chain variable domain of TCR clone 3265 (TRAV26-1, TRAJ38)
CIADNAGNNRKLIW

SEQ ID NO: 6530 - protein, 15 aa, Homo sapiens
  CDR3 for beta chain variable domain of TCR clone 3265 (TRBV7-2, TRBJ2-1)
CASSLVAGRYNEQFF

SEQ ID NO: 6531 - protein, 15 aa, Homo sapiens
  CDR3 for alpha chain variable domain of TCR clone 3266 (TRAV2, TRAJ9)
CAVEDRGTGGFKTIF

SEQ ID NO: 6532 - protein, 13 aa, Homo sapiens
  CDR3 for beta chain variable domain of TCR clone 3266 (TRBV19, TRBJ1-2)
CASSVPGQDGYTF

SEQ ID NO: 6533 - protein, 13 aa, Homo sapiens
  CDR3 for alpha chain variable domain of TCR clone 3267 (TRAV21, TRAJ20)
CAVGLRVDYKLSF

SEQ ID NO: 6534 - protein, 13 aa, Homo sapiens
  CDR3 for beta chain variable domain of TCR clone 3267 (TRBV29-1, TRBJ2-1)
CSVEGGRVNEQFF

SEQ ID NO: 6535 - protein, 14 aa, Homo sapiens
  CDR3 for alpha chain variable domain of TCR clone 3268 (TRAV8-4, TRAJ9)
CAVSDRTGGFKTIF

SEQ ID NO: 6536 - protein, 13 aa, Homo sapiens
  CDR3 for beta chain variable domain of TCR clone 3268 (TRBV11-2, TRBJ2-7)
CASSLGDSYEQYF

SEQ ID NO: 6537 - protein, 14 aa, Homo sapiens
  CDR3 for alpha chain variable domain of TCR clone 3269 (TRAV1-2, TRAJ8)
CAVREDTGFQKLVF

SEQ ID NO: 6538 - protein, 14 aa, Homo sapiens
  CDR3 for beta chain variable domain of TCR clone 3269 (TRBV29-1, TRBJ2-3)
CSAGAGVGADTQYF

SEQ ID NO: 6539 - protein, 15 aa, Homo sapiens
  CDR3 for alpha chain variable domain of TCR clone 3270 (TRAV2, TRAJ44)
CAVEAYTGTASKLTF

SEQ ID NO: 6540 - protein, 17 aa, Homo sapiens
  CDR3 for beta chain variable domain of TCR clone 3270 (TRBV12-4, TRBJ2-1)
CASSPGLAGGRINEQFF

SEQ ID NO: 6541 - protein, 14 aa, Homo sapiens
  CDR3 for alpha chain variable domain of TCR clone 3271 (TRAV3, TRAJ21)
CAVRDKYNFNKFYF

SEQ ID NO: 6542 - protein, 14 aa, Homo sapiens
  CDR3 for beta chain variable domain of TCR clone 3271 (TRBV27, TRBJ2-3)
CASRDSPITDTQYF

SEQ ID NO: 6543 - protein, 14 aa, Homo sapiens
  CDR3 for alpha chain variable domain of TCR clone 3272 (TRAV13-2, TRAJ32)
CAENYGGATNKLIF

SEQ ID NO: 6544 - protein, 15 aa, Homo sapiens
  CDR3 for beta chain variable domain of TCR clone 3272 (TRBV12-4, TRBJ2-5)
CASTLNSGRGETQYF

SEQ ID NO: 6545 - protein, 13 aa, Homo sapiens
  CDR3 for alpha chain variable domain of TCR clone 3273 (TRAV17, TRAJ26)
CATVDNYGQNFVF

SEQ ID NO: 6546 - protein, 14 aa, Homo sapiens
  CDR3 for beta chain variable domain of TCR clone 3273 (TRBV6-1, TRBJ1-3)
CASVQGGGGNTIYF

SEQ ID NO: 6547 - protein, 15 aa, Homo sapiens
  CDR3 for alpha chain variable domain of TCR clone 3274 (TRAV13-1, TRAJ43)
CAATPELGGNNDMRF

SEQ ID NO: 6548 - protein, 15 aa, Homo sapiens
  CDR3 for beta chain variable domain of TCR clone 3274 (TRBV10-2, TRBJ2-6)
CASSEQGTGANVLTF

SEQ ID NO: 6549 - protein, 11 aa, Homo sapiens
  CDR3 for alpha chain variable domain of TCR clone 3275 (TRAV38-1, TRAJ43)
CAFMKHNSGRH

SEQ ID NO: 6550 - protein, 11 aa, Homo sapiens
  CDR3 for beta chain variable domain of TCR clone 3275 (TRBV7-9, TRBJ2-3)
CASSYTDTQYF

SEQ ID NO: 6551 - protein, 14 aa, Homo sapiens
  CDR3 for alpha chain variable domain of TCR clone 3276 (TRAV1-2, TRAJ16)
CAVNRFSDGQKLLF

SEQ ID NO: 6552 - protein, 15 aa, Homo sapiens
  CDR3 for beta chain variable domain of TCR clone 3276 (TRBV5-8, TRBJ1-1)
CASSFSGTSLKGAFF

SEQ ID NO: 6553 - protein, 16 aa, Homo sapiens
  CDR3 for alpha chain variable domain of TCR clone 3277 (TRAV21, TRAJ52)
CAVTNAGGTSYGKLTF

SEQ ID NO: 6554 - protein, 16 aa, Homo sapiens
  CDR3 for beta chain variable domain of TCR clone 3277 (TRBV2, TRBJ2-1)
CASSVGGSLSYNEQFF

SEQ ID NO: 6555 - protein, 10 aa, Homo sapiens
  CDR3 for alpha chain variable domain of TCR clone 3278 (TRAV1-2, TRAJ20)
CALNDYKLSF

SEQ ID NO: 6556 - protein, 11 aa, Homo sapiens
  CDR3 for beta chain variable domain of TCR clone 3278 (TRBV29-1, TRBJ2-5)
CSEDRTGTQYF

SEQ ID NO: 6557 - protein, 15 aa, Homo sapiens
  CDR3 for alpha chain variable domain of TCR clone 3279 (TRAV29/DV5, TRAJ42)
CAAKTDGGSQGNLIF

SEQ ID NO: 6558 - protein, 12 aa, Homo sapiens
  CDR3 for beta chain variable domain of TCR clone 3279 (TRBV11-2, TRBJ2-1)
CASSPGNNEQFF

SEQ ID NO: 6559 - protein, 13 aa, Homo sapiens
  CDR3 for alpha chain variable domain of TCR clone 3280 (TRAV1-2, TRAJ9)
CAVLNTGGFKTIF

SEQ ID NO: 6560 - protein, 15 aa, Homo sapiens
  CDR3 for beta chain variable domain of TCR clone 3280 (TRBV7-3, TRBJ2-1)
CASSPTGGGEVEQFF

SEQ ID NO: 6561 - protein, 13 aa, Homo sapiens
  CDR3 for alpha chain variable domain of TCR clone 3281 (TRAV3, TRAJ20)
CAVRDTPRYKLSF

SEQ ID NO: 6562 - protein, 14 aa, Homo sapiens
  CDR3 for beta chain variable domain of TCR clone 3281 (TRBV11-1, TRBJ2-7)
CASTFAVPSYEQYF

SEQ ID NO: 6563 - protein, 14 aa, Homo sapiens
  CDR3 for alpha chain variable domain of TCR clone 3282 (TRAV2, TRAJ9)
CAVEDRSGGFKTIF

SEQ ID NO: 6564 - protein, 17 aa, Homo sapiens
  CDR3 for beta chain variable domain of TCR clone 3282 (TRBV7-8, TRBJ2-6)
CASSAGTGGAGANVLTF

SEQ ID NO: 6565 - protein, 22 aa, Homo sapiens
  CDR3 for alpha chain variable domain of TCR clone 3283 (TRAV40, )
CLLGDGIPDIQNPDPAVYQLRD

SEQ ID NO: 6566 - protein, 16 aa, Homo sapiens
  CDR3 for beta chain variable domain of TCR clone 3283 (TRBV20-1, TRBJ1-5)
CSAELPGQQTNQPQHF

SEQ ID NO: 6567 - protein, 14 aa, Homo sapiens
  CDR3 for alpha chain variable domain of TCR clone 3284 (TRAV23/DV6, TRAJ23)
CAAGPYNQGGKLIF

SEQ ID NO: 6568 - protein, 17 aa, Homo sapiens
  CDR3 for beta chain variable domain of TCR clone 3284 (TRBV4-2, TRBJ1-1)
CASSQVATGGMNTEAFF

SEQ ID NO: 6569 - protein, 13 aa, Homo sapiens
  CDR3 for alpha chain variable domain of TCR clone 3285 (TRAV2, TRAJ15)
CAVASQAGTALIF

SEQ ID NO: 6570 - protein, 14 aa, Homo sapiens
  CDR3 for beta chain variable domain of TCR clone 3285 (TRBV20-1, TRBJ1-1)
CSAQTRIGGTEAFF

SEQ ID NO: 6571 - protein, 16 aa, Homo sapiens
  CDR3 for alpha chain variable domain of TCR clone 3286 (TRAV29/DV5, TRAJ39)
CAASLLFNNAGNMLTF

SEQ ID NO: 6572 - protein, 16 aa, Homo sapiens
  CDR3 for beta chain variable domain of TCR clone 3286 (TRBV19, TRBJ2-6)
CASSMSGLSGANVLTF

SEQ ID NO: 6573 - protein, 14 aa, Homo sapiens
  CDR3 for alpha chain variable domain of TCR clone 3287 (TRAV12-1, TRAJ13)
CVVIDSGGYQKVTF

SEQ ID NO: 6574 - protein, 13 aa, Homo sapiens
  CDR3 for beta chain variable domain of TCR clone 3287 (TRBV20-1, TRBJ1-1)
CSAPPGGHTEAFF

SEQ ID NO: 6575 - protein, 16 aa, Homo sapiens
  CDR3 for alpha chain variable domain of TCR clone 3288 (TRAV8-6, TRAJ37)
CAVSGLGSSNTGKLIF

SEQ ID NO: 6576 - protein, 15 aa, Homo sapiens
  CDR3 for beta chain variable domain of TCR clone 3288 (TRBV20-1, TRBJ1-5)
CSARSGPSMNQPQHF

SEQ ID NO: 6577 - protein, 11 aa, Homo sapiens
  CDR3 for alpha chain variable domain of TCR clone 3289 (TRAV13-1, TRAJ39)
CASHAGNMLTF

SEQ ID NO: 6578 - protein, 15 aa, Homo sapiens
  CDR3 for beta chain variable domain of TCR clone 3289 (TRBV20-1, TRBJ2-7)
CSARDRVSGMDEQYF

SEQ ID NO: 6579 - protein, 16 aa, Homo sapiens
  CDR3 for alpha chain variable domain of TCR clone 3290 (TRAV12-1, TRAJ28)
CVVIAYSGAGSYQLTF

SEQ ID NO: 6580 - protein, 15 aa, Homo sapiens
  CDR3 for beta chain variable domain of TCR clone 3290 (TRBV14, TRBJ1-1)
CASSQEGMGFTEAFF

SEQ ID NO: 6581 - protein, 13 aa, Homo sapiens
  CDR3 for alpha chain variable domain of TCR clone 3291 (TRAV2, TRAJ40)
CAVVTSGTYKYIF

SEQ ID NO: 6582 - protein, 17 aa, Homo sapiens
  CDR3 for beta chain variable domain of TCR clone 3291 (TRBV11-2, TRBJ2-1)
CASSLYPPGVEYNEQFF

SEQ ID NO: 6583 - protein, 12 aa, Homo sapiens
  CDR3 for alpha chain variable domain of TCR clone 3292 (TRAV12-3, TRAJ17)
CAMTLTGNKLTL

SEQ ID NO: 6584 - protein, 15 aa, Homo sapiens
  CDR3 for beta chain variable domain of TCR clone 3292 (TRBV20-1, TRBJ2-7)
CSARDRVSGMDEQYF

SEQ ID NO: 6585 - protein, 14 aa, Homo sapiens
  CDR3 for alpha chain variable domain of TCR clone 3293 (TRAV8-4, TRAJ9)
CAVTFNTGGFKTIF

SEQ ID NO: 6586 - protein, 15 aa, Homo sapiens
  CDR3 for beta chain variable domain of TCR clone 3293 (TRBV7-9, TRBJ2-2)
CASSPETGAGGELFF

SEQ ID NO: 6587 - protein, 17 aa, Homo sapiens
  CDR3 for alpha chain variable domain of TCR clone 3294 (TRAV20, TRAJ28)
CAVQGGYSGAGSYQLTF

SEQ ID NO: 6588 - protein, 15 aa, Homo sapiens
  CDR3 for beta chain variable domain of TCR clone 3294 (TRBV7-2, TRBJ2-7)
CASSLSSGRTYEQYF

SEQ ID NO: 6589 - protein, 13 aa, Homo sapiens
  CDR3 for alpha chain variable domain of TCR clone 3295 (TRAV8-6, TRAJ5)
CAVLDTGRRALTF

SEQ ID NO: 6590 - protein, 12 aa, Homo sapiens
  CDR3 for beta chain variable domain of TCR clone 3295 (TRBV7-9, TRBJ1-6)
CASSASESPLHF

SEQ ID NO: 6591 - protein, 13 aa, Homo sapiens
  CDR3 for alpha chain variable domain of TCR clone 3296 (TRAV21, TRAJ34)
CAVSEGDTDKLIF

SEQ ID NO: 6592 - protein, 17 aa, Homo sapiens
  CDR3 for beta chain variable domain of TCR clone 3296 (TRBV20-1, TRBJ1-5)
CSARDPSAQGFNQPQHF

SEQ ID NO: 6593 - protein, 11 aa, Homo sapiens
  CDR3 for alpha chain variable domain of TCR clone 3297 (TRAV17, TRAJ36)
CAPTGANNLFF

SEQ ID NO: 6594 - protein, 13 aa, Homo sapiens
  CDR3 for beta chain variable domain of TCR clone 3297 (TRBV20-1, TRBJ1-1)
CSAPPGGHTEAFF

SEQ ID NO: 6595 - protein, 14 aa, Homo sapiens
  CDR3 for alpha chain variable domain of TCR clone 3298 (TRAV8-3, TRAJ13)
CAVGARGGYQKVTF

SEQ ID NO: 6596 - protein, 16 aa, Homo sapiens
  CDR3 for beta chain variable domain of TCR clone 3298 (TRBV27, TRBJ2-7)
CASSLGSGTGPYEQYF

SEQ ID NO: 6597 - protein, 13 aa, Homo sapiens
  CDR3 for alpha chain variable domain of TCR clone 3299 (TRAV30, TRAJ20)
CGTEDRSDYKLSF

SEQ ID NO: 6598 - protein, 15 aa, Homo sapiens
  CDR3 for beta chain variable domain of TCR clone 3299 (TRBV2, TRBJ1-2)
CASTQVQDSNYGYTF

SEQ ID NO: 6599 - protein, 15 aa, Homo sapiens
  CDR3 for alpha chain variable domain of TCR clone 3300 (TRAV21, TRAJ53)
CATLNSGGSNYKLTF

SEQ ID NO: 6600 - protein, 13 aa, Homo sapiens
  CDR3 for beta chain variable domain of TCR clone 3300 (TRBV11-2, TRBJ2-5)
CASSSTGEETQYF

SEQ ID NO: 6601 - protein, 15 aa, Homo sapiens
  CDR3 for alpha chain variable domain of TCR clone 3301 (TRAV12-1, TRAJ45)
CVVLSGGGGADGLTF

SEQ ID NO: 6602 - protein, 15 aa, Homo sapiens
  CDR3 for beta chain variable domain of TCR clone 3301 (TRBV20-1, TRBJ2-7)
CSARDRVSGMDEQYF

SEQ ID NO: 6603 - protein, 14 aa, Homo sapiens
  CDR3 for alpha chain variable domain of TCR clone 3302 (TRAV12-2, TRAJ17)
CAVLFKAAGNKLTF

SEQ ID NO: 6604 - protein, 11 aa, Homo sapiens
  CDR3 for beta chain variable domain of TCR clone 3302 (TRBV29-1, TRBJ2-5)
CSEDRTGTQYF

SEQ ID NO: 6605 - protein, 12 aa, Homo sapiens
  CDR3 for alpha chain variable domain of TCR clone 3303 (TRAV13-2, TRAJ41)
CAKNIGRYALNF

SEQ ID NO: 6606 - protein, 12 aa, Homo sapiens
  CDR3 for beta chain variable domain of TCR clone 3303 (TRBV7-9, TRBJ1-1)
CASSLSGGVAFF

SEQ ID NO: 6607 - protein, 14 aa, Homo sapiens
  CDR3 for alpha chain variable domain of TCR clone 3304 (TRAV13-1, TRAJ35)
CAASKGGFGNVLHC

SEQ ID NO: 6608 - protein, 14 aa, Homo sapiens
  CDR3 for beta chain variable domain of TCR clone 3304 (TRBV7-8, TRBJ2-3)
CASSFPDGQDTQYF

SEQ ID NO: 6609 - protein, 15 aa, Homo sapiens
  CDR3 for alpha chain variable domain of TCR clone 3305 (TRAV20, TRAJ53)
CAVQASGGSNYKLTF

SEQ ID NO: 6610 - protein, 12 aa, Homo sapiens
  CDR3 for beta chain variable domain of TCR clone 3305 (TRBV7-2, TRBJ2-1)
CASSPQDIEQFF

SEQ ID NO: 6611 - protein, 17 aa, Homo sapiens
  CDR3 for alpha chain variable domain of TCR clone 3306 (TRAV3, TRAJ6)
CAVRDGPRAGGSYIPTF

SEQ ID NO: 6612 - protein, 13 aa, Homo sapiens
  CDR3 for beta chain variable domain of TCR clone 3306 (TRBV4-1, TRBJ2-2)
CASSQENTGELFF

SEQ ID NO: 6613 - protein, 13 aa, Homo sapiens
  CDR3 for alpha chain variable domain of TCR clone 3307 (TRAV1-1, TRAJ9)
CAAKNTGGFKTIF

SEQ ID NO: 6614 - protein, 13 aa, Homo sapiens
  CDR3 for beta chain variable domain of TCR clone 3307 (TRBV7-9, TRBJ1-2)
CASSLKQNYGYTF

SEQ ID NO: 6615 - protein, 14 aa, Homo sapiens
  CDR3 for alpha chain variable domain of TCR clone 3308 (TRAV8-3, TRAJ39)
CAVGANNAGNMLTF

SEQ ID NO: 6616 - protein, 13 aa, Homo sapiens
  CDR3 for beta chain variable domain of TCR clone 3308 (TRBV3-1, TRBJ2-5)
CASSPVLSETQYF

SEQ ID NO: 6617 - protein, 17 aa, Homo sapiens
  CDR3 for alpha chain variable domain of TCR clone 3309 (TRAV14/DV4, TRAJ28)
CAMRGTSSGAGSYQLTF

SEQ ID NO: 6618 - protein, 13 aa, Homo sapiens
  CDR3 for beta chain variable domain of TCR clone 3309 (TRBV28, TRBJ2-5)
CASSFAGGETQYF

SEQ ID NO: 6619 - protein, 13 aa, Homo sapiens
  CDR3 for alpha chain variable domain of TCR clone 3310 (TRAV38-1, TRAJ57)
CALVQGGSEKLVF

SEQ ID NO: 6620 - protein, 17 aa, Homo sapiens
  CDR3 for beta chain variable domain of TCR clone 3310 (TRBV29-1, TRBJ2-3)
CSVDSPPRGARTDTQYF

SEQ ID NO: 6621 - protein, 12 aa, Homo sapiens
  CDR3 for alpha chain variable domain of TCR clone 3311 (TRAV13-1, TRAJ5)
CAAKAGRRALTF

SEQ ID NO: 6622 - protein, 13 aa, Homo sapiens
  CDR3 for beta chain variable domain of TCR clone 3311 (TRBV7-9, TRBJ1-2)
CASSLKQNYGYTF

SEQ ID NO: 6623 - protein, 14 aa, Homo sapiens
  CDR3 for alpha chain variable domain of TCR clone 3312 (TRAV1-2, TRAJ16)
CAVNRFSDGQKLLF

SEQ ID NO: 6624 - protein, 14 aa, Homo sapiens
  CDR3 for beta chain variable domain of TCR clone 3312 (TRBV7-2, TRBJ2-7)
CASSLYPGRYEQYF

SEQ ID NO: 6625 - protein, 14 aa, Homo sapiens
  CDR3 for alpha chain variable domain of TCR clone 3313 (TRAV1-2, TRAJ16)
CAVNRFSDGQKLLF

SEQ ID NO: 6626 - protein, 15 aa, Homo sapiens
  CDR3 for beta chain variable domain of TCR clone 3313 (TRBV9, TRBJ2-1)
CASSLAGSSYNEQFF

SEQ ID NO: 6627 - protein, 16 aa, Homo sapiens
  CDR3 for alpha chain variable domain of TCR clone 3314 (TRAV30, TRAJ24)
CGTEIVDADSWGKFQF

SEQ ID NO: 6628 - protein, 17 aa, Homo sapiens
  CDR3 for beta chain variable domain of TCR clone 3314 (TRBV20-1, TRBJ2-1)
CSARDRRRASSYNEQFF

SEQ ID NO: 6629 - protein, 12 aa, Homo sapiens
  CDR3 for alpha chain variable domain of TCR clone 3315 (TRAV21, TRAJ33)
CAKMDSNYQLIW

SEQ ID NO: 6630 - protein, 17 aa, Homo sapiens
  CDR3 for beta chain variable domain of TCR clone 3315 (TRBV20-1, TRBJ2-2)
CSASGSGQGGLTGELFF

SEQ ID NO: 6631 - protein, 12 aa, Homo sapiens
  CDR3 for alpha chain variable domain of TCR clone 3316 (TRAV12-3, TRAJ17)
CAMTLTGNKLTF

SEQ ID NO: 6632 - protein, 15 aa, Homo sapiens
  CDR3 for beta chain variable domain of TCR clone 3316 (TRBV4-1, TRBJ1-4)
CASSDTGGTNEKLFF

SEQ ID NO: 6633 - protein, 15 aa, Homo sapiens
  CDR3 for alpha chain variable domain of TCR clone 3317 (TRAV1-2, TRAJ38)
CAVSENAGNNRKLIW

SEQ ID NO: 6634 - protein, 16 aa, Homo sapiens
  CDR3 for beta chain variable domain of TCR clone 3317 (TRBV4-1, TRBJ2-7)
CASSLTAGQATYEQYF

SEQ ID NO: 6635 - protein, 13 aa, Homo sapiens
  CDR3 for alpha chain variable domain of TCR clone 3318 (TRAV8-1, TRAJ23)
CAVTGGQGGKLIF

SEQ ID NO: 6636 - protein, 14 aa, Homo sapiens
  CDR3 for beta chain variable domain of TCR clone 3318 (TRBV20-1, TRBJ1-1)
CSAQTRIGGTEAFF

SEQ ID NO: 6637 - protein, 15 aa, Homo sapiens
  CDR3 for alpha chain variable domain of TCR clone 3319 (TRAV13-1, TRAJ6)
CAAIHPSGGSYIPTF

SEQ ID NO: 6638 - protein, 14 aa, Homo sapiens
  CDR3 for beta chain variable domain of TCR clone 3319 (TRBV7-9, TRBJ2-2)
CASGLAINTGELFF

SEQ ID NO: 6639 - protein, 11 aa, Homo sapiens
  CDR3 for alpha chain variable domain of TCR clone 3320 (TRAV13-2, TRAJ45)
VTGGGADGLTF

SEQ ID NO: 6640 - protein, 17 aa, Homo sapiens
  CDR3 for beta chain variable domain of TCR clone 3320 (TRBV19, TRBJ1-1)
CASSIAGRGLMNTEAFF

SEQ ID NO: 6641 - protein, 14 aa, Homo sapiens
  CDR3 for alpha chain variable domain of TCR clone 3321 (TRAV35, TRAJ50)
CAGHRKTSYDKVIF

SEQ ID NO: 6642 - protein, 15 aa, Homo sapiens
  CDR3 for beta chain variable domain of TCR clone 3321 (TRBV6-3, TRBJ2-7)
CASSSPGTVFYEQYF

SEQ ID NO: 6643 - protein, 14 aa, Homo sapiens
  CDR3 for alpha chain variable domain of TCR clone 3322 (TRAV3, TRAJ34)
CAVRDINNTDKLIF

SEQ ID NO: 6644 - protein, 13 aa, Homo sapiens
  CDR3 for beta chain variable domain of TCR clone 3322 (TRBV20-1, TRBJ1-1)
CSARGGGNTEAFF

SEQ ID NO: 6645 - protein, 12 aa, Homo sapiens
  CDR3 for alpha chain variable domain of TCR clone 3323 (TRAV1-2, TRAJ7)
CAVAYGNNRLAF

SEQ ID NO: 6646 - protein, 16 aa, Homo sapiens
  CDR3 for beta chain variable domain of TCR clone 3323 (TRBV5-1, TRBJ2-7)
CASSPMTGALSYEQYF

SEQ ID NO: 6647 - protein, 12 aa, Homo sapiens
  CDR3 for alpha chain variable domain of TCR clone 3324 (TRAV12-3, TRAJ17)
CAMTLTGNKLTF

SEQ ID NO: 6648 - protein, 14 aa, Homo sapiens
  CDR3 for beta chain variable domain of TCR clone 3324 (TRBV20-1, TRBJ1-3)
CSASPTGAGNTIYF

SEQ ID NO: 6649 - protein, 13 aa, Homo sapiens
  CDR3 for alpha chain variable domain of TCR clone 3325 (TRAV35, TRAJ40)
CAGQLSGTYKYIF

SEQ ID NO: 6650 - protein, 14 aa, Homo sapiens
  CDR3 for beta chain variable domain of TCR clone 3325 (TRBV3-1, TRBJ2-5)
CASSLQLAGETQYF

SEQ ID NO: 6651 - protein, 16 aa, Homo sapiens
  CDR3 for alpha chain variable domain of TCR clone 3326 (TRAV26-1, TRAJ28)
CIVRPYSGAGSYQLTF

SEQ ID NO: 6652 - protein, 18 aa, Homo sapiens
  CDR3 for beta chain variable domain of TCR clone 3326 (TRBV20-1, TRBJ2-2)
CSARDLTSGSMDTGELFF

SEQ ID NO: 6653 - protein, 14 aa, Homo sapiens
  CDR3 for alpha chain variable domain of TCR clone 3327 (TRAV12-3, TRAJ29)
CAMSPYSGNTPLVF

SEQ ID NO: 6654 - protein, 12 aa, Homo sapiens
  CDR3 for beta chain variable domain of TCR clone 3327 (TRBV9, TRBJ2-1)
CASSVGGTDIFF

SEQ ID NO: 6655 - protein, 14 aa, Homo sapiens
  CDR3 for alpha chain variable domain of TCR clone 3328 (TRAV12-2, TRAJ13)
CAVKKTGGYQKVTF

SEQ ID NO: 6656 - protein, 14 aa, Homo sapiens
  CDR3 for beta chain variable domain of TCR clone 3328 (TRBV7-6, TRBJ2-3)
CASSLGTVTDTQYF

SEQ ID NO: 6657 - protein, 15 aa, Homo sapiens
  CDR3 for alpha chain variable domain of TCR clone 3329 (TRAV12-1, TRAJ45)
CVVLSGGGGADGLTF

SEQ ID NO: 6658 - protein, 13 aa, Homo sapiens
  CDR3 for beta chain variable domain of TCR clone 3329 (TRBV7-3, TRBJ1-1)
CASSQDWGAEAFF

SEQ ID NO: 6659 - protein, 13 aa, Homo sapiens
  CDR3 for alpha chain variable domain of TCR clone 3330 (TRAV35, TRAJ33)
CAGLMDSNYQLIW

SEQ ID NO: 6660 - protein, 13 aa, Homo sapiens
  CDR3 for beta chain variable domain of TCR clone 3330 (TRBV10-3, TRBJ2-1)
CAISEFSGREQFF

SEQ ID NO: 6661 - protein, 14 aa, Homo sapiens
  CDR3 for alpha chain variable domain of TCR clone 3331 (TRAV1-2, TRAJ16)
CAVNRFSDGQKLLF

SEQ ID NO: 6662 - protein, 13 aa, Homo sapiens
  CDR3 for beta chain variable domain of TCR clone 3331 (TRBV10-2, TRBJ2-7)
CASGASGGYEQYF

SEQ ID NO: 6663 - protein, 14 aa, Homo sapiens
  CDR3 for alpha chain variable domain of TCR clone 3332 (TRAV12-2, TRAJ17)
CAVLFKAAGNKLTF

SEQ ID NO: 6664 - protein, 14 aa, Homo sapiens
  CDR3 for beta chain variable domain of TCR clone 3332 (TRBV7-3, TRBJ1-1)
CASSLKGGNTEAFF

SEQ ID NO: 6665 - protein, 13 aa, Homo sapiens
  CDR3 for alpha chain variable domain of TCR clone 3333 (TRAV8-1, TRAJ9)
CAVNSVGGFKTIF

SEQ ID NO: 6666 - protein, 15 aa, Homo sapiens
  CDR3 for beta chain variable domain of TCR clone 3333 (TRBV11-2, TRBJ2-3)
CASSGRDGLTDTQYF

SEQ ID NO: 6667 - protein, 11 aa, Homo sapiens
  CDR3 for alpha chain variable domain of TCR clone 3334 (TRAV3, TRAJ21)
CAVGNFNKFYF

SEQ ID NO: 6668 - protein, 16 aa, Homo sapiens
  CDR3 for beta chain variable domain of TCR clone 3334 (TRBV20-1, TRBJ1-2)
CSASMGQGVANYGYTF

SEQ ID NO: 6669 - protein, 14 aa, Homo sapiens
  CDR3 for alpha chain variable domain of TCR clone 3335 (TRAV9-2, TRAJ39)
CALYIYNAGNMLTF

SEQ ID NO: 6670 - protein, 15 aa, Homo sapiens
  CDR3 for beta chain variable domain of TCR clone 3335 (TRBV28, TRBJ1-3)
CASSMGWASGNTIYF

SEQ ID NO: 6671 - protein, 14 aa, Homo sapiens
  CDR3 for alpha chain variable domain of TCR clone 3336 (TRAV2, TRAJ9)
CAVEDRSGGFKTIF

SEQ ID NO: 6672 - protein, 14 aa, Homo sapiens
  CDR3 for beta chain variable domain of TCR clone 3336 (TRBV7-9, TRBJ2-7)
CASSPSGGQNEQYF

SEQ ID NO: 6673 - protein, 10 aa, Homo sapiens
  CDR3 for alpha chain variable domain of TCR clone 3337 (TRAV23/DV6, TRAJ43)
CAAAVAALEQ

SEQ ID NO: 6674 - protein, 16 aa, Homo sapiens
  CDR3 for beta chain variable domain of TCR clone 3337 (TRBV18, TRBJ1-2)
CASSPPERVTIYGYTF

SEQ ID NO: 6675 - protein, 15 aa, Homo sapiens
  CDR3 for alpha chain variable domain of TCR clone 3338 (TRAV26-1, TRAJ15)
CIVRMANQAGTALIF

SEQ ID NO: 6676 - protein, 15 aa, Homo sapiens
  CDR3 for beta chain variable domain of TCR clone 3338 (TRBV20-1, TRBJ1-1)
CSARKAETSNTEAFF

SEQ ID NO: 6677 - protein, 13 aa, Homo sapiens
  CDR3 for alpha chain variable domain of TCR clone 3339 (TRAV13-1, TRAJ6)
CARGSGGSYIPTF

SEQ ID NO: 6678 - protein, 17 aa, Homo sapiens
  CDR3 for beta chain variable domain of TCR clone 3339 (TRBV7-8, TRBJ2-1)
CASSPPTGTLAYNEQFF

SEQ ID NO: 6679 - protein, 14 aa, Homo sapiens
  CDR3 for alpha chain variable domain of TCR clone 3340 (TRAV27, TRAJ22)
CAGVVPGSARQLTF

SEQ ID NO: 6680 - protein, 16 aa, Homo sapiens
  CDR3 for beta chain variable domain of TCR clone 3340 (TRBV9, TRBJ2-7)
CASSVGLGGGTYEQYF

SEQ ID NO: 6681 - protein, 15 aa, Homo sapiens
  CDR3 for alpha chain variable domain of TCR clone 3341 (TRAV4, TRAJ12)
CLVGDLMDSSYKLIF

SEQ ID NO: 6682 - protein, 14 aa, Homo sapiens
  CDR3 for beta chain variable domain of TCR clone 3341 (TRBV7-2, TRBJ1-1)
CASSHRQGRTEAFF

SEQ ID NO: 6683 - protein, 14 aa, Homo sapiens
  CDR3 for alpha chain variable domain of TCR clone 3342 (TRAV12-2, TRAJ13)
CAVKKTGGYQKVTF

SEQ ID NO: 6684 - protein, 16 aa, Homo sapiens
  CDR3 for beta chain variable domain of TCR clone 3342 (TRBV20-1, TRBJ1-2)
CSASMGQGVANYGYTF

SEQ ID NO: 6685 - protein, 13 aa, Homo sapiens
  CDR3 for alpha chain variable domain of TCR clone 3343 (TRAV12-1, TRAJ39)
CVVNYNAGNMLTF

SEQ ID NO: 6686 - protein, 14 aa, Homo sapiens
  CDR3 for beta chain variable domain of TCR clone 3343 (TRBV27, TRBJ2-3)
CASSPLGTTDTQYF

SEQ ID NO: 6687 - protein, 16 aa, Homo sapiens
  CDR3 for alpha chain variable domain of TCR clone 3344 (TRAV8-4, TRAJ18)
CAVTANGGSTLGRLYF

SEQ ID NO: 6688 - protein, 14 aa, Homo sapiens
  CDR3 for beta chain variable domain of TCR clone 3344 (TRBV12-4, TRBJ1-2)
CASSSAGHIYGYTF

SEQ ID NO: 6689 - protein, 12 aa, Homo sapiens
  CDR3 for alpha chain variable domain of TCR clone 3345 (TRAV12-2, TRAJ20)
CAVRPSDYKLSF

SEQ ID NO: 6690 - protein, 14 aa, Homo sapiens
  CDR3 for beta chain variable domain of TCR clone 3345 (TRBV6-1, TRBJ2-7)
CASNRARPDYEQYF

SEQ ID NO: 6691 - protein, 14 aa, Homo sapiens
  CDR3 for alpha chain variable domain of TCR clone 3346 (TRAV13-1, TRAJ9)
CAASALTGGFKTIF

SEQ ID NO: 6692 - protein, 13 aa, Homo sapiens
  CDR3 for beta chain variable domain of TCR clone 3346 (TRBV20-1, TRBJ1-1)
CSAGTVGNAEAFF

SEQ ID NO: 6693 - protein, 11 aa, Homo sapiens
  CDR3 for alpha chain variable domain of TCR clone 3347 (TRAV21, TRAJ20)
CAVRDDYKLSF

SEQ ID NO: 6694 - protein, 14 aa, Homo sapiens
  CDR3 for beta chain variable domain of TCR clone 3347 (TRBV7-2, TRBJ2-7)
CASSPKTSFYEQYF

SEQ ID NO: 6695 - protein, 14 aa, Homo sapiens
  CDR3 for alpha chain variable domain of TCR clone 3348 (TRAV12-2, TRAJ13)
CAVKKTGGYQKVTF

SEQ ID NO: 6696 - protein, 14 aa, Homo sapiens
  CDR3 for beta chain variable domain of TCR clone 3348 (TRBV19, TRBJ2-1)
CASPTFVLSSEQFF

SEQ ID NO: 6697 - protein, 11 aa, Homo sapiens
  CDR3 for alpha chain variable domain of TCR clone 3349 (TRAV21, TRAJ11)
CAVNGYSTLTF

SEQ ID NO: 6698 - protein, 15 aa, Homo sapiens
  CDR3 for beta chain variable domain of TCR clone 3349 (TRBV6-3, TRBJ2-7)
CASSSPGTVFYEQYF

SEQ ID NO: 6699 - protein, 15 aa, Homo sapiens
  CDR3 for alpha chain variable domain of TCR clone 3350 (TRAV3, TRAJ22)
CAVRDRGGSARQLTF

SEQ ID NO: 6700 - protein, 15 aa, Homo sapiens
  CDR3 for beta chain variable domain of TCR clone 3350 (TRBV10-3, TRBJ2-3)
CAISLTSGGTDTQYF

SEQ ID NO: 6701 - protein, 14 aa, Homo sapiens
  CDR3 for alpha chain variable domain of TCR clone 3351 (TRAV1-2, TRAJ16)
CAVNRFSDGQKLLF

SEQ ID NO: 6702 - protein, 14 aa, Homo sapiens
  CDR3 for beta chain variable domain of TCR clone 3351 (TRBV19, TRBJ2-7)
CASSVDSESYEQYF

SEQ ID NO: 6703 - protein, 14 aa, Homo sapiens
  CDR3 for alpha chain variable domain of TCR clone 3352 (TRAV1-2, TRAJ8)
CAVREDTGFQKLVF

SEQ ID NO: 6704 - protein, 13 aa, Homo sapiens
  CDR3 for beta chain variable domain of TCR clone 3352 (TRBV10-3, TRBJ1-2)
CAISERDSYGYTF

SEQ ID NO: 6705 - protein, 14 aa, Homo sapiens
  CDR3 for alpha chain variable domain of TCR clone 3353 (TRAV16, TRAJ57)
CALSGQGGSEKLVF

SEQ ID NO: 6706 - protein, 13 aa, Homo sapiens
  CDR3 for beta chain variable domain of TCR clone 3353 (TRBV5-4, TRBJ2-1)
CASSLQGPREQFF

SEQ ID NO: 6707 - protein, 12 aa, Homo sapiens
  CDR3 for alpha chain variable domain of TCR clone 3354 (TRAV12-3, TRAJ17)
CAMTLTGNKLTF

SEQ ID NO: 6708 - protein, 15 aa, Homo sapiens
  CDR3 for beta chain variable domain of TCR clone 3354 (TRBV20-1, TRBJ2-7)
CSAGDRVSGMDEQYF

SEQ ID NO: 6709 - protein, 15 aa, Homo sapiens
  CDR3 for alpha chain variable domain of TCR clone 3355 (TRAV39, TRAJ32)
CAVDMEGGATNKLIF

SEQ ID NO: 6710 - protein, 17 aa, Homo sapiens
  CDR3 for beta chain variable domain of TCR clone 3355 (TRBV7-2, TRBJ1-4)
CASSFKAGPTTNEKLFF

SEQ ID NO: 6711 - protein, 14 aa, Homo sapiens
  CDR3 for alpha chain variable domain of TCR clone 3356 (TRAV12-1, TRAJ46)
CVVTAKSSGDKLTF

SEQ ID NO: 6712 - protein, 17 aa, Homo sapiens
  CDR3 for beta chain variable domain of TCR clone 3356 (TRBV4-1, TRBJ2-3)
CASSQDPAGGPLDTQYF

SEQ ID NO: 6713 - protein, 14 aa, Homo sapiens
  CDR3 for alpha chain variable domain of TCR clone 3357 (TRAV12-2, TRAJ13)
CAVKKTGGYQKVTF

SEQ ID NO: 6714 - protein, 11 aa, Homo sapiens
  CDR3 for beta chain variable domain of TCR clone 3357 (TRBV11-2, TRBJ2-2)
CASSLPGELFF

SEQ ID NO: 6715 - protein, 16 aa, Homo sapiens
  CDR3 for alpha chain variable domain of TCR clone 3358 (TRAV38-2/DV8, TRAJ45)
CAYTTTSGGGADGLTF

SEQ ID NO: 6716 - protein, 14 aa, Homo sapiens
  CDR3 for beta chain variable domain of TCR clone 3358 (TRBV7-9, TRBJ2-2)
CASSLGHRTGELFF

SEQ ID NO: 6717 - protein, 14 aa, Homo sapiens
  CDR3 for alpha chain variable domain of TCR clone 3359 (TRAV35, TRAJ54)
CAGYLIQGAQKLVF

SEQ ID NO: 6718 - protein, 14 aa, Homo sapiens
  CDR3 for beta chain variable domain of TCR clone 3359 (TRBV7-2, TRBJ2-5)
CASSVGWAEETQYF

SEQ ID NO: 6719 - protein, 14 aa, Homo sapiens
  CDR3 for alpha chain variable domain of TCR clone 3360 (TRAV38-1, TRAJ31)
CAFMKHDNNARLMF

SEQ ID NO: 6720 - protein, 16 aa, Homo sapiens
  CDR3 for beta chain variable domain of TCR clone 3360 (TRBV23-1, TRBJ2-1)
CISAPATGPTYNEQFF

SEQ ID NO: 6721 - protein, 14 aa, Homo sapiens
  CDR3 for alpha chain variable domain of TCR clone 3361 (TRAV2, TRAJ22)
CAVEVKRAARQLTF

SEQ ID NO: 6722 - protein, 14 aa, Homo sapiens
  CDR3 for beta chain variable domain of TCR clone 3361 (TRBV19, TRBJ2-2)
CASTPGYSGGELFF

SEQ ID NO: 6723 - protein, 14 aa, Homo sapiens
  CDR3 for alpha chain variable domain of TCR clone 3362 (TRAV17, TRAJ57)
CATDPQGGSEKLVF

SEQ ID NO: 6724 - protein, 14 aa, Homo sapiens
  CDR3 for beta chain variable domain of TCR clone 3362 (TRBV5-8, TRBJ2-3)
CASSLGQGTDTQYF

SEQ ID NO: 6725 - protein, 13 aa, Homo sapiens
  CDR3 for alpha chain variable domain of TCR clone 3363 (TRAV23/DV6, TRAJ47)
CAASIRNGIWKQT

SEQ ID NO: 6726 - protein, 13 aa, Homo sapiens
  CDR3 for beta chain variable domain of TCR clone 3363 (TRBV19, TRBJ1-2)
CASSQGQVYGYTF

SEQ ID NO: 6727 - protein, 21 aa, Homo sapiens
  CDR3 for alpha chain variable domain of TCR clone 3364 (TRAV8-3, TRAJ6)
CAVGGEEATYLHLEEEPALLF

SEQ ID NO: 6728 - protein, 14 aa, Homo sapiens
  CDR3 for beta chain variable domain of TCR clone 3364 (TRBV5-1, TRBJ2-7)
CASSRGESLYEQYF

SEQ ID NO: 6729 - protein, 15 aa, Homo sapiens
  CDR3 for alpha chain variable domain of TCR clone 3365 (TRAV12-2, TRAJ23)
CAVKPIYNQGGKLIF

SEQ ID NO: 6730 - protein, 15 aa, Homo sapiens
  CDR3 for beta chain variable domain of TCR clone 3365 (TRBV5-1, TRBJ1-2)
CASSLVGGQSQGYTF

SEQ ID NO: 6731 - protein, 14 aa, Homo sapiens
  CDR3 for alpha chain variable domain of TCR clone 3366 (TRAV17, TRAJ31)
CATVPLSGNARLMF

SEQ ID NO: 6732 - protein, 15 aa, Homo sapiens
  CDR3 for beta chain variable domain of TCR clone 3366 (TRBV15, TRBJ2-2)
CATSGTGGRVGELFF

SEQ ID NO: 6733 - protein, 13 aa, Homo sapiens
  CDR3 for alpha chain variable domain of TCR clone 3367 (TRAV14/DV4, TRAJ22)
CAMRDLSARQLTF

SEQ ID NO: 6734 - protein, 18 aa, Homo sapiens
  CDR3 for beta chain variable domain of TCR clone 3367 (TRBV19, TRBJ1-5)
CASSKGQVSIHSNQPQHF

SEQ ID NO: 6735 - protein, 17 aa, Homo sapiens
  CDR3 for alpha chain variable domain of TCR clone 3368 (TRAV4, TRAJ18)
CLVGERSVGSTLGRLYF

SEQ ID NO: 6736 - protein, 16 aa, Homo sapiens
  CDR3 for beta chain variable domain of TCR clone 3368 (TRBV15, TRBJ1-4)
CATSRDSPPGREKLFF

SEQ ID NO: 6737 - protein, 11 aa, Homo sapiens
  CDR3 for alpha chain variable domain of TCR clone 3369 (TRAV2, TRAJ4)
CAVGWYNKLIF

SEQ ID NO: 6738 - protein, 15 aa, Homo sapiens
  CDR3 for beta chain variable domain of TCR clone 3369 (TRBV7-2, TRBJ2-2)
CASSFQRGETGELFF

SEQ ID NO: 6739 - protein, 16 aa, Homo sapiens
  CDR3 for alpha chain variable domain of TCR clone 3370 (TRAV8-4, TRAJ9)
CAVTFNTGGFKNYLWS

SEQ ID NO: 6740 - protein, 15 aa, Homo sapiens
  CDR3 for beta chain variable domain of TCR clone 3370 (TRBV7-9, TRBJ2-2)
CASSPETGAGGELFF

SEQ ID NO: 6741 - protein, 17 aa, Homo sapiens
  CDR3 for alpha chain variable domain of TCR clone 3371 (TRAV13-1, )
CAANIQNPDPAVYQLRD

SEQ ID NO: 6742 - protein, 14 aa, Homo sapiens
  CDR3 for beta chain variable domain of TCR clone 3371 (TRBV19, TRBJ2-7)
CASSIGPNSYEQYF

SEQ ID NO: 6743 - protein, 15 aa, Homo sapiens
  CDR3 for alpha chain variable domain of TCR clone 3372 (TRAV3, TRAJ11)
CAVRDRGSGYSTLTF

SEQ ID NO: 6744 - protein, 13 aa, Homo sapiens
  CDR3 for beta chain variable domain of TCR clone 3372 (TRBV7-9, TRBJ1-2)
CASSLKQNYGYTF

SEQ ID NO: 6745 - protein, 12 aa, Homo sapiens
  CDR3 for alpha chain variable domain of TCR clone 3373 (TRAV12-3, TRAJ17)
CAMTLTGNKLTF

SEQ ID NO: 6746 - protein, 16 aa, Homo sapiens
  CDR3 for beta chain variable domain of TCR clone 3373 (TRBV29-1, TRBJ2-7)
CSVEDAEDGTAYEQYF

SEQ ID NO: 6747 - protein, 12 aa, Homo sapiens
  CDR3 for alpha chain variable domain of TCR clone 3374 (TRAV38-2/DV8, TRAJ47)
CVLMEYGNKLVF

SEQ ID NO: 6748 - protein, 14 aa, Homo sapiens
  CDR3 for beta chain variable domain of TCR clone 3374 (TRBV20-1, TRBJ1-5)
CSATDRGSNQPQHF

SEQ ID NO: 6749 - protein, 14 aa, Homo sapiens
  CDR3 for alpha chain variable domain of TCR clone 3375 (TRAV12-1, TRAJ10)
CVAILTGGGNKLTF

SEQ ID NO: 6750 - protein, 15 aa, Homo sapiens
  CDR3 for beta chain variable domain of TCR clone 3375 (TRBV20-1, TRBJ2-7)
CSARGFRPQTYEQYF

SEQ ID NO: 6751 - protein, 10 aa, Homo sapiens
  CDR3 for alpha chain variable domain of TCR clone 3376 (TRAV23/DV6, TRAJ9)
CASKYWRLQN

SEQ ID NO: 6752 - protein, 14 aa, Homo sapiens
  CDR3 for beta chain variable domain of TCR clone 3376 (TRBV6-1, TRBJ2-7)
CASTRTGDYYEQYF

SEQ ID NO: 6753 - protein, 15 aa, Homo sapiens
  CDR3 for alpha chain variable domain of TCR clone 3377 (TRAV3, TRAJ32)
CAVSSYGGATNKLIF

SEQ ID NO: 6754 - protein, 16 aa, Homo sapiens
  CDR3 for beta chain variable domain of TCR clone 3377 (TRBV5-1, TRBJ2-5)
CASSLSLAGAQETQYF

SEQ ID NO: 6755 - protein, 14 aa, Homo sapiens
  CDR3 for alpha chain variable domain of TCR clone 3378 (TRAV35, TRAJ33)
CAGSSQDSNYQLIW

SEQ ID NO: 6756 - protein, 15 aa, Homo sapiens
  CDR3 for beta chain variable domain of TCR clone 3378 (TRBV29-1, TRBJ2-7)
CSVEFFDRGSYEQYF

SEQ ID NO: 6757 - protein, 12 aa, Homo sapiens
  CDR3 for alpha chain variable domain of TCR clone 3379 (TRAV27, TRAJ33)
CAGDGSNYQLIW

SEQ ID NO: 6758 - protein, 15 aa, Homo sapiens
  CDR3 for beta chain variable domain of TCR clone 3379 (TRBV6-5, TRBJ2-7)
CASSYSTSGNYEQYF

SEQ ID NO: 6759 - protein, 15 aa, Homo sapiens
  CDR3 for alpha chain variable domain of TCR clone 3380 (TRAV8-2, TRAJ44)
DAAEYFDGTASKLTF

SEQ ID NO: 6760 - protein, 14 aa, Homo sapiens
  CDR3 for beta chain variable domain of TCR clone 3380 (TRBV7-8, TRBJ2-3)
CASSLDRGTDTQYF

SEQ ID NO: 6761 - protein, 12 aa, Homo sapiens
  CDR3 for alpha chain variable domain of TCR clone 3381 (TRAV30, TRAJ39)
CGRGNAGNMLTF

SEQ ID NO: 6762 - protein, 12 aa, Homo sapiens
  CDR3 for beta chain variable domain of TCR clone 3381 (TRBV10-3, TRBJ1-1)
CATMDRPPEAFF

SEQ ID NO: 6763 - protein, 12 aa, Homo sapiens
  CDR3 for alpha chain variable domain of TCR clone 3382 (TRAV13-2, TRAJ8)
CAPWLGFQKLVF

SEQ ID NO: 6764 - protein, 18 aa, Homo sapiens
  CDR3 for beta chain variable domain of TCR clone 3382 (TRBV11-2, TRBJ2-3)
CASSLGGASRGAPNTQYF

SEQ ID NO: 6765 - protein, 14 aa, Homo sapiens
  CDR3 for alpha chain variable domain of TCR clone 3383 (TRAV3, TRAJ21)
CAVRDAYNFNKFYF

SEQ ID NO: 6766 - protein, 15 aa, Homo sapiens
  CDR3 for beta chain variable domain of TCR clone 3383 (TRBV6-5, TRBJ1-5)
CASSYSWDSNQPQHF

SEQ ID NO: 6767 - protein, 14 aa, Homo sapiens
  CDR3 for alpha chain variable domain of TCR clone 3384 (TRAV13-1, TRAJ44)
CAAKATGTASKLTF

SEQ ID NO: 6768 - protein, 15 aa, Homo sapiens
  CDR3 for beta chain variable domain of TCR clone 3384 (TRBV19, TRBJ2-1)
CASIKGRGPYNEQFF

SEQ ID NO: 6769 - protein, 13 aa, Homo sapiens
  CDR3 for alpha chain variable domain of TCR clone 3385 (TRAV3, TRAJ20)
CAVRDTGDYKLSF

SEQ ID NO: 6770 - protein, 12 aa, Homo sapiens
  CDR3 for beta chain variable domain of TCR clone 3385 (TRBV29-1, TRBJ2-3)
CSVTGGADTQYF

SEQ ID NO: 6771 - protein, 15 aa, Homo sapiens
  CDR3 for alpha chain variable domain of TCR clone 3386 (TRAV20, TRAJ41)
CAVQANSNSGYALNF

SEQ ID NO: 6772 - protein, 18 aa, Homo sapiens
  CDR3 for beta chain variable domain of TCR clone 3386 (TRBV7-9, TRBJ2-7)
CASSLTTSGSRTWYEQYF

SEQ ID NO: 6773 - protein, 11 aa, Homo sapiens
  CDR3 for alpha chain variable domain of TCR clone 3387 (TRAV2, TRAJ13)
CASGGYQKVTF

SEQ ID NO: 6774 - protein, 13 aa, Homo sapiens
  CDR3 for beta chain variable domain of TCR clone 3387 (TRBV20-1, TRBJ1-1)
CSARVGGNTEAFF

SEQ ID NO: 6775 - protein, 18 aa, Homo sapiens
  CDR3 for alpha chain variable domain of TCR clone 3388 (TRAV13-1, TRAJ52)
CAAKNPNAGGTSYGKLTF

SEQ ID NO: 6776 - protein, 18 aa, Homo sapiens
  CDR3 for beta chain variable domain of TCR clone 3388 (TRBV12-4, TRBJ2-4)
CASSRTGAVDVAKNIQYF

SEQ ID NO: 6777 - protein, 13 aa, Homo sapiens
  CDR3 for alpha chain variable domain of TCR clone 3389 (TRAV12-2, TRAJ9)
CAVKWAGGFKTIF

SEQ ID NO: 6778 - protein, 12 aa, Homo sapiens
  CDR3 for beta chain variable domain of TCR clone 3389 (TRBV7-8, TRBJ2-7)
CASSLGDREQYF

SEQ ID NO: 6779 - protein, 13 aa, Homo sapiens
  CDR3 for alpha chain variable domain of TCR clone 3390 (TRAV12-1, TRAJ6)
CVVFPGGSYIPTF

SEQ ID NO: 6780 - protein, 13 aa, Homo sapiens
  CDR3 for beta chain variable domain of TCR clone 3390 (TRBV7-9, TRBJ1-2)
CASSLKQNYGYTF

SEQ ID NO: 6781 - protein, 14 aa, Homo sapiens
  CDR3 for alpha chain variable domain of TCR clone 3391 (TRAV26-2, TRAJ23)
CSRTLYNQGGKLIF

SEQ ID NO: 6782 - protein, 15 aa, Homo sapiens
  CDR3 for beta chain variable domain of TCR clone 3391 (TRBV20-1, TRBJ2-7)
CSARDRVSGMDEQYF

SEQ ID NO: 6783 - protein, 16 aa, Homo sapiens
  CDR3 for alpha chain variable domain of TCR clone 3392 (TRAV14/DV4, TRAJ54)
CAMREGRIQGAQKLVF

SEQ ID NO: 6784 - protein, 18 aa, Homo sapiens
  CDR3 for beta chain variable domain of TCR clone 3392 (TRBV18, TRBJ1-3)
CASSPRGGAGPSGNTIYF

SEQ ID NO: 6785 - protein, 18 aa, Homo sapiens
  CDR3 for alpha chain variable domain of TCR clone 3393 (TRAV13-1, TRAJ10)
CAASKGRAVTGGGNKLTF

SEQ ID NO: 6786 - protein, 14 aa, Homo sapiens
  CDR3 for beta chain variable domain of TCR clone 3393 (TRBV18, TRBJ2-7)
CASSPRGGAYEQYF

SEQ ID NO: 6787 - protein, 14 aa, Homo sapiens
  CDR3 for alpha chain variable domain of TCR clone 3394 (TRAV12-3, TRAJ37)
CVSEGSSNTGKLIF

SEQ ID NO: 6788 - protein, 14 aa, Homo sapiens
  CDR3 for beta chain variable domain of TCR clone 3394 (TRBV20-1, TRBJ1-1)
CSAQTRIGGTEAFF

SEQ ID NO: 6789 - protein, 13 aa, Homo sapiens
  CDR3 for alpha chain variable domain of TCR clone 3395 (TRAV8-2, TRAJ13)
CVVSDLRYQKVTF

SEQ ID NO: 6790 - protein, 14 aa, Homo sapiens
  CDR3 for beta chain variable domain of TCR clone 3395 (TRBV25-1, TRBJ1-1)
CASTHLGGNTEAFF

SEQ ID NO: 6791 - protein, 12 aa, Homo sapiens
  CDR3 for alpha chain variable domain of TCR clone 3396 (TRAV16, TRAJ10)
CSRTGGGNKLTF

SEQ ID NO: 6792 - protein, 16 aa, Homo sapiens
  CDR3 for beta chain variable domain of TCR clone 3396 (TRBV7-3, TRBJ2-2)
CASSLKRGTLSGELFF

SEQ ID NO: 6793 - protein, 16 aa, Homo sapiens
  CDR3 for alpha chain variable domain of TCR clone 3397 (TRAV26-1, TRAJ31)
CIVRPPVLNNNARLMF

SEQ ID NO: 6794 - protein, 11 aa, Homo sapiens
  CDR3 for beta chain variable domain of TCR clone 3397 (TRBV7-8, TRBJ2-7)
CASSLSLEQYF

SEQ ID NO: 6795 - protein, 13 aa, Homo sapiens
  CDR3 for alpha chain variable domain of TCR clone 3398 (TRAV1-2, TRAJ11)
CAVRREGYSTLTF

SEQ ID NO: 6796 - protein, 14 aa, Homo sapiens
  CDR3 for beta chain variable domain of TCR clone 3398 (TRBV25-1, TRBJ1-1)
CASTHLGGNTEAFF

SEQ ID NO: 6797 - protein, 13 aa, Homo sapiens
  CDR3 for alpha chain variable domain of TCR clone 3399 (TRAV20, TRAJ31)
CAVQAWNNARLMF

SEQ ID NO: 6798 - protein, 16 aa, Homo sapiens
  CDR3 for beta chain variable domain of TCR clone 3399 (TRBV6-6, TRBJ2-1)
CASSWGGQGPYNEQFF

SEQ ID NO: 6799 - protein, 12 aa, Homo sapiens
  CDR3 for alpha chain variable domain of TCR clone 3400 (TRAV1-2, TRAJ33)
CAALDSNYQLIW

SEQ ID NO: 6800 - protein, 14 aa, Homo sapiens
  CDR3 for beta chain variable domain of TCR clone 3400 (TRBV19, TRBJ2-3)
CASSAPRGTDTQYF

SEQ ID NO: 6801 - protein, 19 aa, Homo sapiens
  CDR3 for alpha chain variable domain of TCR clone 3401 (TRAV26-1, TRAJ52)
CIVRAHRNAGGTSYGKLTF

SEQ ID NO: 6802 - protein, 13 aa, Homo sapiens
  CDR3 for beta chain variable domain of TCR clone 3401 (TRBV19, TRBJ2-7)
CASRKAGGSEQYF

SEQ ID NO: 6803 - protein, 16 aa, Homo sapiens
  CDR3 for alpha chain variable domain of TCR clone 3402 (TRAV13-1, TRAJ45)
CAASWESGGGADGLTF

SEQ ID NO: 6804 - protein, 14 aa, Homo sapiens
  CDR3 for beta chain variable domain of TCR clone 3402 (TRBV12-4, TRBJ1-3)
CASGQTVSGNTIYF

SEQ ID NO: 6805 - protein, 11 aa, Homo sapiens
  CDR3 for alpha chain variable domain of TCR clone 3403 (TRAV3, TRAJ21)
CAVGNFNKFYF

SEQ ID NO: 6806 - protein, 16 aa, Homo sapiens
  CDR3 for beta chain variable domain of TCR clone 3403 (TRBV19, TRBJ2-1)
CASSRAGPSSYNEQFF

SEQ ID NO: 6807 - protein, 12 aa, Homo sapiens
  CDR3 for alpha chain variable domain of TCR clone 3404 (TRAV1-1, TRAJ30)
CAVRGRDDKIIF

SEQ ID NO: 6808 - protein, 14 aa, Homo sapiens
  CDR3 for beta chain variable domain of TCR clone 3404 (TRBV6-1, TRBJ1-3)
CASVQGGGGNTIYF

SEQ ID NO: 6809 - protein, 15 aa, Homo sapiens
  CDR3 for alpha chain variable domain of TCR clone 3405 (TRAV12-2, TRAJ53)
CAVNGGGGSNYKLTF

SEQ ID NO: 6810 - protein, 14 aa, Homo sapiens
  CDR3 for beta chain variable domain of TCR clone 3405 (TRBV11-2, TRBJ2-5)
CASSRTGGIETQYF

SEQ ID NO: 6811 - protein, 13 aa, Homo sapiens
  CDR3 for alpha chain variable domain of TCR clone 3406 (TRAV20, TRAJ45)
CAVKKRRCRRTHL

SEQ ID NO: 6812 - protein, 14 aa, Homo sapiens
  CDR3 for beta chain variable domain of TCR clone 3406 (TRBV15, TRBJ2-5)
CATSIGGLGETQYF

SEQ ID NO: 6813 - protein, 13 aa, Homo sapiens
  CDR3 for alpha chain variable domain of TCR clone 3407 (TRAV21, TRAJ37)
CAVSSGNTGKLIF

SEQ ID NO: 6814 - protein, 15 aa, Homo sapiens
  CDR3 for beta chain variable domain of TCR clone 3407 (TRBV12-4, TRBJ1-2)
CASSFVDRGNYGYTF

SEQ ID NO: 6815 - protein, 16 aa, Homo sapiens
  CDR3 for alpha chain variable domain of TCR clone 3408 (TRAV30, TRAJ24)
CGTEIVDADSWGKFQF

SEQ ID NO: 6816 - protein, 15 aa, Homo sapiens
  CDR3 for beta chain variable domain of TCR clone 3408 (TRBV5-1, TRBJ1-1)
CASSSTTGTNTEAFF

SEQ ID NO: 6817 - protein, 14 aa, Homo sapiens
  CDR3 for alpha chain variable domain of TCR clone 3409 (TRAV8-1, TRAJ22)
CAAPSSGSARQLTF

SEQ ID NO: 6818 - protein, 14 aa, Homo sapiens
  CDR3 for beta chain variable domain of TCR clone 3409 (TRBV9, TRBJ2-2)
CASSVGQGAGELFF

SEQ ID NO: 6819 - protein, 14 aa, Homo sapiens
  CDR3 for alpha chain variable domain of TCR clone 3410 (TRAV8-3, TRAJ44)
CAVGLTGTASKLTF

SEQ ID NO: 6820 - protein, 12 aa, Homo sapiens
  CDR3 for beta chain variable domain of TCR clone 3410 (TRBV7-3, TRBJ2-1)
CASSLGFNEQFF

SEQ ID NO: 6821 - protein, 13 aa, Homo sapiens
  CDR3 for alpha chain variable domain of TCR clone 3411 (TRAV26-2, TRAJ43)
CILRAVNNNDMRF

SEQ ID NO: 6822 - protein, 14 aa, Homo sapiens
  CDR3 for beta chain variable domain of TCR clone 3411 (TRBV20-1, TRBJ1-1)
CSAQTRIGGTEAFF

SEQ ID NO: 6823 - protein, 13 aa, Homo sapiens
  CDR3 for alpha chain variable domain of TCR clone 3412 (TRAV12-1, TRAJ6)
CVVYPGGSYIPTF

SEQ ID NO: 6824 - protein, 13 aa, Homo sapiens
  CDR3 for beta chain variable domain of TCR clone 3412 (TRBV4-2, TRBJ1-1)
CASSQAGNTEAFF

SEQ ID NO: 6825 - protein, 14 aa, Homo sapiens
  CDR3 for alpha chain variable domain of TCR clone 3413 (TRAV12-1, TRAJ10)
CVVNSAGGGNKLTF

SEQ ID NO: 6826 - protein, 14 aa, Homo sapiens
  CDR3 for beta chain variable domain of TCR clone 3413 (TRBV12-4, TRBJ1-1)
CASSLGTGGTEAFF

SEQ ID NO: 6827 - protein, 14 aa, Homo sapiens
  CDR3 for alpha chain variable domain of TCR clone 3414 (TRAV27, TRAJ40)
CAGSLLRGTYKYIF

SEQ ID NO: 6828 - protein, 15 aa, Homo sapiens
  CDR3 for beta chain variable domain of TCR clone 3414 (TRBV6-3, TRBJ1-4)
CASSSPGQENEKLFF

SEQ ID NO: 6829 - protein, 15 aa, Homo sapiens
  CDR3 for alpha chain variable domain of TCR clone 3415 (TRAV2, TRAJ11)
CAVGGRNSGYSTLTF

SEQ ID NO: 6830 - protein, 12 aa, Homo sapiens
  CDR3 for beta chain variable domain of TCR clone 3415 (TRBV5-4, TRBJ2-7)
CASSLEAYEQYF

SEQ ID NO: 6831 - protein, 14 aa, Homo sapiens
  CDR3 for alpha chain variable domain of TCR clone 3416 (TRAV3, TRAJ9)
CAVRGNTGGFKTIF

SEQ ID NO: 6832 - protein, 16 aa, Homo sapiens
  CDR3 for beta chain variable domain of TCR clone 3416 (TRBV7-2, TRBJ2-7)
CASSLGLAGGAYEQYF

SEQ ID NO: 6833 - protein, 17 aa, Homo sapiens
  CDR3 for alpha chain variable domain of TCR clone 3417 (TRAV3, TRAJ6)
CAVRDGPRVGGSYIPTF

SEQ ID NO: 6834 - protein, 12 aa, Homo sapiens
  CDR3 for beta chain variable domain of TCR clone 3417 (TRBV11-2, TRBJ2-2)
CASSLGGGELFF

SEQ ID NO: 6835 - protein, 13 aa, Homo sapiens
  CDR3 for alpha chain variable domain of TCR clone 3418 (TRAV29/DV5, TRAJ48)
CAASSFGNEKLTF

SEQ ID NO: 6836 - protein, 14 aa, Homo sapiens
  CDR3 for beta chain variable domain of TCR clone 3418 (TRBV3-1, TRBJ2-2)
CASSQDWVQGELFF

SEQ ID NO: 6837 - protein, 14 aa, Homo sapiens
  CDR3 for alpha chain variable domain of TCR clone 3419 (TRAV1-2, TRAJ16)
CAVNRFSDGQKLLF

SEQ ID NO: 6838 - protein, 13 aa, Homo sapiens
  CDR3 for beta chain variable domain of TCR clone 3419 (TRBV4-2, TRBJ1-1)
CASSQAGNTEAFF

SEQ ID NO: 6839 - protein, 10 aa, Homo sapiens
  CDR3 for alpha chain variable domain of TCR clone 3420 (TRAV25, TRAJ20)
CAVNDYKLSF

SEQ ID NO: 6840 - protein, 18 aa, Homo sapiens
  CDR3 for beta chain variable domain of TCR clone 3420 (TRBV20-1, TRBJ2-6)
CSAETTPTHGSGANVLTF

SEQ ID NO: 6841 - protein, 16 aa, Homo sapiens
  CDR3 for alpha chain variable domain of TCR clone 3421 (TRAV30, TRAJ24)
CGTEIVDADSWGKFQV

SEQ ID NO: 6842 - protein, 14 aa, Homo sapiens
  CDR3 for beta chain variable domain of TCR clone 3421 (TRBV12-5, TRBJ2-5)
CASGSRTHQETQYF

SEQ ID NO: 6843 - protein, 15 aa, Homo sapiens
  CDR3 for alpha chain variable domain of TCR clone 3422 (TRAV3, TRAJ13)
CAVRVYSGGYQKVTF

SEQ ID NO: 6844 - protein, 15 aa, Homo sapiens
  CDR3 for beta chain variable domain of TCR clone 3422 (TRBV7-2, TRBJ2-1)
CASSSGLAGGNEQFF

SEQ ID NO: 6845 - protein, 14 aa, Homo sapiens
  CDR3 for alpha chain variable domain of TCR clone 3423 (TRAV12-1, TRAJ4)
CVVPLKSGYNKLIF

SEQ ID NO: 6846 - protein, 13 aa, Homo sapiens
  CDR3 for beta chain variable domain of TCR clone 3423 (TRBV27, TRBJ2-7)
CASGRGGAYEQYF

SEQ ID NO: 6847 - protein, 10 aa, Homo sapiens
  CDR3 for alpha chain variable domain of TCR clone 3424 (TRAV23/DV6, TRAJ3)
CAATTFALGG

SEQ ID NO: 6848 - protein, 15 aa, Homo sapiens
  CDR3 for beta chain variable domain of TCR clone 3424 (TRBV19, TRBJ1-6)
CASSTQGAVGSPLHF

SEQ ID NO: 6849 - protein, 19 aa, Homo sapiens
  CDR3 for alpha chain variable domain of TCR clone 3425 (TRAV26-1, TRAJ28)
CIVRVAHAYSGAGSYQLTF

SEQ ID NO: 6850 - protein, 17 aa, Homo sapiens
  CDR3 for beta chain variable domain of TCR clone 3425 (TRBV9, TRBJ2-2)
CASSVGGQGTDTGELFF

SEQ ID NO: 6851 - protein, 13 aa, Homo sapiens
  CDR3 for alpha chain variable domain of TCR clone 3426 (TRAV4, TRAJ33)
CLVGDMNNYQLIW

SEQ ID NO: 6852 - protein, 14 aa, Homo sapiens
  CDR3 for beta chain variable domain of TCR clone 3426 (TRBV7-9, TRBJ1-1)
CASSLGGANTEAFF

SEQ ID NO: 6853 - protein, 14 aa, Homo sapiens
  CDR3 for alpha chain variable domain of TCR clone 3427 (TRAV12-3, TRAJ10)
SHLPLTGGGNKLTF

SEQ ID NO: 6854 - protein, 14 aa, Homo sapiens
  CDR3 for beta chain variable domain of TCR clone 3427 (TRBV11-3, TRBJ2-7)
CASSPDRNTYEQYF

SEQ ID NO: 6855 - protein, 15 aa, Homo sapiens
  CDR3 for alpha chain variable domain of TCR clone 3428 (TRAV12-3, TRAJ22)
CAMRTISGSARQLTF

SEQ ID NO: 6856 - protein, 16 aa, Homo sapiens
  CDR3 for beta chain variable domain of TCR clone 3428 (TRBV20-1, TRBJ2-2)
CSARRPGTGNTGELFF

SEQ ID NO: 6857 - protein, 15 aa, Homo sapiens
  CDR3 for alpha chain variable domain of TCR clone 3429 (TRAV20, TRAJ4)
CAVQVFSGGYNKLIF

SEQ ID NO: 6858 - protein, 14 aa, Homo sapiens
  CDR3 for beta chain variable domain of TCR clone 3429 (TRBV7-6, TRBJ2-3)
CASNSGGDANTQYF

SEQ ID NO: 6859 - protein, 16 aa, Homo sapiens
  CDR3 for alpha chain variable domain of TCR clone 3430 (TRAV13-1, TRAJ48)
CAASIFGNFGNEKLTF

SEQ ID NO: 6860 - protein, 14 aa, Homo sapiens
  CDR3 for beta chain variable domain of TCR clone 3430 (TRBV24-1, TRBJ1-1)
CATSIPRGDTEAFF

SEQ ID NO: 6861 - protein, 13 aa, Homo sapiens
  CDR3 for alpha chain variable domain of TCR clone 3431 (TRAV21, TRAJ57)
CAVIEGGSEKLVF

SEQ ID NO: 6862 - protein, 14 aa, Homo sapiens
  CDR3 for beta chain variable domain of TCR clone 3431 (TRBV12-5, TRBJ2-5)
CASGSRTHQETQYF

SEQ ID NO: 6863 - protein, 15 aa, Homo sapiens
  CDR3 for alpha chain variable domain of TCR clone 3432 (TRAV17, TRAJ57)
CATGPSQGGSEKLVF

SEQ ID NO: 6864 - protein, 15 aa, Homo sapiens
  CDR3 for beta chain variable domain of TCR clone 3432 (TRBV9, TRBJ1-6)
CASSVAGTGDSPLHF

SEQ ID NO: 6865 - protein, 17 aa, Homo sapiens
  CDR3 for alpha chain variable domain of TCR clone 3433 (TRAV3, TRAJ6)
CAVRDGPRAGGSYIPTF

SEQ ID NO: 6866 - protein, 19 aa, Homo sapiens
  CDR3 for beta chain variable domain of TCR clone 3433 (TRBV25-1, TRBJ2-2)
CAILVYRVDRGRKTGELFF

SEQ ID NO: 6867 - protein, 14 aa, Homo sapiens
  CDR3 for alpha chain variable domain of TCR clone 3434 (TRAV12-2, TRAJ17)
CAVNIKAAGNKLTF

SEQ ID NO: 6868 - protein, 13 aa, Homo sapiens
  CDR3 for beta chain variable domain of TCR clone 3434 (TRBV7-8, TRBJ2-7)
CASSLTGGREQYF

SEQ ID NO: 6869 - protein, 11 aa, Homo sapiens
  CDR3 for alpha chain variable domain of TCR clone 3435 (TRAV21, TRAJ39)
LLVNAGNMLTF

SEQ ID NO: 6870 - protein, 16 aa, Homo sapiens
  CDR3 for beta chain variable domain of TCR clone 3435 (TRBV9, TRBJ2-7)
CASSVGLGGGTYEQYF

SEQ ID NO: 6871 - protein, 18 aa, Homo sapiens
  CDR3 for alpha chain variable domain of TCR clone 3436 (TRAV12-3, TRAJ52)
CAMSVGGAGGTSYGKLTF

SEQ ID NO: 6872 - protein, 16 aa, Homo sapiens
  CDR3 for beta chain variable domain of TCR clone 3436 (TRBV7-9, TRBJ1-2)
CASSISLDRGGYGYTF

SEQ ID NO: 6873 - protein, 14 aa, Homo sapiens
  CDR3 for alpha chain variable domain of TCR clone 3437 (TRAV26-1, TRAJ38)
CIADNAGNNRKLIW

SEQ ID NO: 6874 - protein, 13 aa, Homo sapiens
  CDR3 for beta chain variable domain of TCR clone 3437 (TRBV2, TRBJ1-5)
CATAGPGNQPQHF

SEQ ID NO: 6875 - protein, 14 aa, Homo sapiens
  CDR3 for alpha chain variable domain of TCR clone 3438 (TRAV12-1, TRAJ30)
CVVNIGGRDDKIIF

SEQ ID NO: 6876 - protein, 14 aa, Homo sapiens
  CDR3 for beta chain variable domain of TCR clone 3438 (TRBV20-1, TRBJ2-1)
CSAQIGGSANEQFF

SEQ ID NO: 6877 - protein, 16 aa, Homo sapiens
  CDR3 for alpha chain variable domain of TCR clone 3439 (TRAV17, TRAJ53)
CATDALSGGSNYKLTF

SEQ ID NO: 6878 - protein, 15 aa, Homo sapiens
  CDR3 for beta chain variable domain of TCR clone 3439 (TRBV20-1, TRBJ2-7)
CSARDRVSGMDEQYF

SEQ ID NO: 6879 - protein, 14 aa, Homo sapiens
  CDR3 for alpha chain variable domain of TCR clone 3440 (TRAV12-3, TRAJ15)
CAMIPPQAGTALIF

SEQ ID NO: 6880 - protein, 14 aa, Homo sapiens
  CDR3 for beta chain variable domain of TCR clone 3440 (TRBV20-1, TRBJ2-2)
CSARKRLATGELFF

SEQ ID NO: 6881 - protein, 15 aa, Homo sapiens
  CDR3 for alpha chain variable domain of TCR clone 3441 (TRAV27, TRAJ38)
CAARRNAGNNRKLIW

SEQ ID NO: 6882 - protein, 13 aa, Homo sapiens
  CDR3 for beta chain variable domain of TCR clone 3441 (TRBV10-3, TRBJ2-7)
CASKLAVNYEQYF

SEQ ID NO: 6883 - protein, 14 aa, Homo sapiens
  CDR3 for alpha chain variable domain of TCR clone 3442 (TRAV21, TRAJ35)
CAVMPIGFGNVLHC

SEQ ID NO: 6884 - protein, 13 aa, Homo sapiens
  CDR3 for beta chain variable domain of TCR clone 3442 (TRBV23-1, TRBJ1-4)
CASRGKFNEKLFF

SEQ ID NO: 6885 - protein, 14 aa, Homo sapiens
  CDR3 for alpha chain variable domain of TCR clone 3443 (TRAV16, TRAJ4)
CALHFSGGYNKLIF

SEQ ID NO: 6886 - protein, 15 aa, Homo sapiens
  CDR3 for beta chain variable domain of TCR clone 3443 (TRBV7-2, TRBJ2-7)
CASSTRLAGVDEQYF

SEQ ID NO: 6887 - protein, 13 aa, Homo sapiens
  CDR3 for alpha chain variable domain of TCR clone 3444 (TRAV8-1, TRAJ23)
YAVTGGQGGKLIF

SEQ ID NO: 6888 - protein, 15 aa, Homo sapiens
  CDR3 for beta chain variable domain of TCR clone 3444 (TRBV20-1, TRBJ2-2)
CSAIPGHSNTGELFF

SEQ ID NO: 6889 - protein, 11 aa, Homo sapiens
  CDR3 for alpha chain variable domain of TCR clone 3445 (TRAV1-2, TRAJ31)
CAVKNNARLMF

SEQ ID NO: 6890 - protein, 12 aa, Homo sapiens
  CDR3 for beta chain variable domain of TCR clone 3445 (TRBV20-1, TRBJ2-5)
CSAPRSQETQYF

SEQ ID NO: 6891 - protein, 23 aa, Homo sapiens
  CDR3 for alpha chain variable domain of TCR clone 3446 (TRAV26-1, TRAJ38)
CIADNAGNNHIQNPDPAVYQLRD

SEQ ID NO: 6892 - protein, 13 aa, Homo sapiens
  CDR3 for beta chain variable domain of TCR clone 3446 (TRBV10-3, TRBJ2-7)
CASKLAVNYEQYF

SEQ ID NO: 6893 - protein, 14 aa, Homo sapiens
  CDR3 for alpha chain variable domain of TCR clone 3447 (TRAV16, TRAJ15)
CALRPNQAGTALIF

SEQ ID NO: 6894 - protein, 16 aa, Homo sapiens
  CDR3 for beta chain variable domain of TCR clone 3447 (TRBV6-5, TRBJ2-2)
CASSYGRVPDTGELFF

SEQ ID NO: 6895 - protein, 15 aa, Homo sapiens
  CDR3 for alpha chain variable domain of TCR clone 3448 (TRAV8-4, TRAJ36)
CAVRKSWTGANNLFF

SEQ ID NO: 6896 - protein, 17 aa, Homo sapiens
  CDR3 for beta chain variable domain of TCR clone 3448 (TRBV3-1, TRBJ2-2)
CASSQDSQGPNTGELFF

SEQ ID NO: 6897 - protein, 18 aa, Homo sapiens
  CDR3 for alpha chain variable domain of TCR clone 3449 (TRAV2, TRAJ32)
CCLLLCFHYGGATNKLIF

SEQ ID NO: 6898 - protein, 16 aa, Homo sapiens
  CDR3 for beta chain variable domain of TCR clone 3449 (TRBV7-9, TRBJ2-7)
CASSYPDREGGYEQYF

SEQ ID NO: 6899 - protein, 12 aa, Homo sapiens
  CDR3 for alpha chain variable domain of TCR clone 3450 (TRAV38-2/DV8, TRAJ57)
CAWKGGSEKLVF

SEQ ID NO: 6900 - protein, 13 aa, Homo sapiens
  CDR3 for beta chain variable domain of TCR clone 3450 (TRBV5-1, TRBJ1-5)
CASSLAQDQPQHF

SEQ ID NO: 6901 - protein, 12 aa, Homo sapiens
  CDR3 for alpha chain variable domain of TCR clone 3451 (TRAV12-2, TRAJ30)
CAVRNRDDKIIF

SEQ ID NO: 6902 - protein, 15 aa, Homo sapiens
  CDR3 for beta chain variable domain of TCR clone 3451 (TRBV6-3, TRBJ1-5)
CASRVDRWSNQPQHF

SEQ ID NO: 6903 - protein, 10 aa, Homo sapiens
  CDR3 for alpha chain variable domain of TCR clone 3452 (TRAV12-3, TRAJ49)
CAMNDDQFYF

SEQ ID NO: 6904 - protein, 16 aa, Homo sapiens
  CDR3 for beta chain variable domain of TCR clone 3452 (TRBV20-1, TRBJ1-4)
CSAPGQGLLTNEKLFF

SEQ ID NO: 6905 - protein, 13 aa, Homo sapiens
  CDR3 for alpha chain variable domain of TCR clone 3453 (TRAV13-1, TRAJ39)
CAASIWAGNMLTF

SEQ ID NO: 6906 - protein, 13 aa, Homo sapiens
  CDR3 for beta chain variable domain of TCR clone 3453 (TRBV11-2, TRBJ1-3)
CASSLEPVNTIYF

SEQ ID NO: 6907 - protein, 13 aa, Homo sapiens
  CDR3 for alpha chain variable domain of TCR clone 3454 (TRAV13-1, TRAJ43)
CAASKNNNNDMRF

SEQ ID NO: 6908 - protein, 14 aa, Homo sapiens
  CDR3 for beta chain variable domain of TCR clone 3454 (TRBV14, TRBJ2-1)
CASSQVQGRGEQFF

SEQ ID NO: 6909 - protein, 13 aa, Homo sapiens
  CDR3 for alpha chain variable domain of TCR clone 3455 (TRAV12-2, TRAJ24)
CAVSTDSWGKLQF

SEQ ID NO: 6910 - protein, 14 aa, Homo sapiens
  CDR3 for beta chain variable domain of TCR clone 3455 (TRBV25-1, TRBJ1-1)
CASTHLGGNTEAFF

SEQ ID NO: 6911 - protein, 13 aa, Homo sapiens
  CDR3 for alpha chain variable domain of TCR clone 3456 (TRAV12-3, TRAJ33)
CAMSVNSNYQLIW

SEQ ID NO: 6912 - protein, 16 aa, Homo sapiens
  CDR3 for beta chain variable domain of TCR clone 3456 (TRBV7-3, TRBJ2-3)
CASSLSGYRPEDTQYF

SEQ ID NO: 6913 - protein, 18 aa, Homo sapiens
  CDR3 for alpha chain variable domain of TCR clone 3457 (TRAV26-1, TRAJ23)
CIVRVGLEVWNQGGKLIF

SEQ ID NO: 6914 - protein, 15 aa, Homo sapiens
  CDR3 for beta chain variable domain of TCR clone 3457 (TRBV10-3, TRBJ2-3)
CAISDWDRDTDTQYF

SEQ ID NO: 6915 - protein, 19 aa, Homo sapiens
  CDR3 for alpha chain variable domain of TCR clone 3458 (TRAV1-2, TRAJ26)
CLLPLCCERPDNYGQNFVF

SEQ ID NO: 6916 - protein, 13 aa, Homo sapiens
  CDR3 for beta chain variable domain of TCR clone 3458 (TRBV19, TRBJ1-2)
CASSQGQVYGYTF

SEQ ID NO: 6917 - protein, 10 aa, Homo sapiens
  CDR3 for alpha chain variable domain of TCR clone 3459 (TRAV12-2, TRAJ20)
CAVYLYKLSF

SEQ ID NO: 6918 - protein, 14 aa, Homo sapiens
  CDR3 for beta chain variable domain of TCR clone 3459 (TRBV10-3, TRBJ2-2)
CAISEVSHSGELFF

SEQ ID NO: 6919 - protein, 12 aa, Homo sapiens
  CDR3 for alpha chain variable domain of TCR clone 3460 (TRAV26-1, TRAJ48)
CIAVFGNEKLTF

SEQ ID NO: 6920 - protein, 17 aa, Homo sapiens
  CDR3 for beta chain variable domain of TCR clone 3460 (TRBV7-6, TRBJ2-1)
CASSFGLAGGTYNEQFF

SEQ ID NO: 6921 - protein, 17 aa, Homo sapiens
  CDR3 for alpha chain variable domain of TCR clone 3461 (TRAV20, TRAJ42)
CAVQAWGYGGSQGNLIF

SEQ ID NO: 6922 - protein, 16 aa, Homo sapiens
  CDR3 for beta chain variable domain of TCR clone 3461 (TRBV29-1, TRBJ2-5)
CSVEGLAGDYQETQYF

SEQ ID NO: 6923 - protein, 14 aa, Homo sapiens
  CDR3 for alpha chain variable domain of TCR clone 3462 (TRAV12-2, TRAJ13)
CAVKKTGGYQKVTF

SEQ ID NO: 6924 - protein, 12 aa, Homo sapiens
  CDR3 for beta chain variable domain of TCR clone 3462 (TRBV29-1, TRBJ1-1)
CSESDGNTEAFF

SEQ ID NO: 6925 - protein, 15 aa, Homo sapiens
  CDR3 for alpha chain variable domain of TCR clone 3463 (TRAV8-4, TRAJ37)
CAVSRGSGNTGKLIF

SEQ ID NO: 6926 - protein, 16 aa, Homo sapiens
  CDR3 for beta chain variable domain of TCR clone 3463 (TRBV7-3, TRBJ2-3)
CASSLSGYRPEDTQYF

SEQ ID NO: 6927 - protein, 13 aa, Homo sapiens
  CDR3 for alpha chain variable domain of TCR clone 3464 (TRAV13-1, TRAJ43)
CAASLSNNNDMRF

SEQ ID NO: 6928 - protein, 15 aa, Homo sapiens
  CDR3 for beta chain variable domain of TCR clone 3464 (TRBV5-1, TRBJ2-1)
CASSQAGYWWNEQFF

SEQ ID NO: 6929 - protein, 13 aa, Homo sapiens
  CDR3 for alpha chain variable domain of TCR clone 3465 (TRAV13-1, TRAJ39)
CSKYSNAGNMLTF

SEQ ID NO: 6930 - protein, 13 aa, Homo sapiens
  CDR3 for beta chain variable domain of TCR clone 3465 (TRBV20-1, TRBJ1-1)
CSARGGGNTEAFF

SEQ ID NO: 6931 - protein, 14 aa, Homo sapiens
  CDR3 for alpha chain variable domain of TCR clone 3466 (TRAV36/DV7, TRAJ44)
CCGANTGTASKLTF

SEQ ID NO: 6932 - protein, 16 aa, Homo sapiens
  CDR3 for beta chain variable domain of TCR clone 3466 (TRBV7-9, TRBJ1-2)
CASSLGFSSGEDGYTF

SEQ ID NO: 6933 - protein, 15 aa, Homo sapiens
  CDR3 for alpha chain variable domain of TCR clone 3467 (TRAV29/DV5, TRAJ24)
CAASGATDSWGKFQF

SEQ ID NO: 6934 - protein, 13 aa, Homo sapiens
  CDR3 for beta chain variable domain of TCR clone 3467 (TRBV19, TRBJ1-2)
CASSVPGQDGYTF

SEQ ID NO: 6935 - protein, 14 aa, Homo sapiens
  CDR3 for alpha chain variable domain of TCR clone 3468 (TRAV26-1, TRAJ39)
CIVRGSRAGNMLTF

SEQ ID NO: 6936 - protein, 14 aa, Homo sapiens
  CDR3 for beta chain variable domain of TCR clone 3468 (TRBV25-1, TRBJ1-1)
CASTHLGGNTEAFF

SEQ ID NO: 6937 - protein, 15 aa, Homo sapiens
  CDR3 for alpha chain variable domain of TCR clone 3469 (TRAV8-3, TRAJ40)
CAAPSLGSGTYKYIF

SEQ ID NO: 6938 - protein, 12 aa, Homo sapiens
  CDR3 for beta chain variable domain of TCR clone 3469 (TRBV11-2, TRBJ2-2)
CASSLGGGELFF

SEQ ID NO: 6939 - protein, 18 aa, Homo sapiens
  CDR3 for alpha chain variable domain of TCR clone 3470 (TRAV21, TRAJ52)
CAVGPSPAGGTSYGKLTF

SEQ ID NO: 6940 - protein, 17 aa, Homo sapiens
  CDR3 for beta chain variable domain of TCR clone 3470 (TRBV13, TRBJ2-3)
CASSLSRVAGGRNTQYF

SEQ ID NO: 6941 - protein, 11 aa, Homo sapiens
  CDR3 for alpha chain variable domain of TCR clone 3471 (TRAV3, TRAJ21)
CAVGNFNKFYF

SEQ ID NO: 6942 - protein, 16 aa, Homo sapiens
  CDR3 for beta chain variable domain of TCR clone 3471 (TRBV19, TRBJ2-1)
CAGSKAGPSSYNEQFF

SEQ ID NO: 6943 - protein, 13 aa, Homo sapiens
  CDR3 for alpha chain variable domain of TCR clone 3472 (TRAV8-4, TRAJ47)
CAVTALYGNKLVF

SEQ ID NO: 6944 - protein, 14 aa, Homo sapiens
  CDR3 for beta chain variable domain of TCR clone 3472 (TRBV19, TRBJ2-7)
CASSIGGAVAEQYF

SEQ ID NO: 6945 - protein, 12 aa, Homo sapiens
  CDR3 for alpha chain variable domain of TCR clone 3473 (TRAV12-2, TRAJ31)
CAVNTPDARLMF

SEQ ID NO: 6946 - protein, 12 aa, Homo sapiens
  CDR3 for beta chain variable domain of TCR clone 3473 (TRBV12-4, TRBJ2-7)
CASSLGGYEQYF

SEQ ID NO: 6947 - protein, 15 aa, Homo sapiens
  CDR3 for alpha chain variable domain of TCR clone 3474 (TRAV14/DV4, TRAJ12)
CAMREERDSSYKLIF

SEQ ID NO: 6948 - protein, 16 aa, Homo sapiens
  CDR3 for beta chain variable domain of TCR clone 3474 (TRBV11-2, TRBJ1-2)
CASSLDRGGNNYGYTF

SEQ ID NO: 6949 - protein, 19 aa, Homo sapiens
  CDR3 for alpha chain variable domain of TCR clone 3475 (TRAV2, TRAJ20)
ILQVREADAAVYRDCKLSF

SEQ ID NO: 6950 - protein, 16 aa, Homo sapiens
  CDR3 for beta chain variable domain of TCR clone 3475 (TRBV9, TRBJ2-2)
CASSAMGKGNTGELFF

SEQ ID NO: 6951 - protein, 13 aa, Homo sapiens
  CDR3 for alpha chain variable domain of TCR clone 3476 (TRAV16, TRAJ20)
CALGPSNDYKLSF

SEQ ID NO: 6952 - protein, 15 aa, Homo sapiens
  CDR3 for beta chain variable domain of TCR clone 3476 (TRBV5-1, TRBJ2-2)
CASSRVGSDTGELFF

SEQ ID NO: 6953 - protein, 11 aa, Homo sapiens
  CDR3 for alpha chain variable domain of TCR clone 3477 (TRAV2, TRAJ13)
CASGGYQKVTF

SEQ ID NO: 6954 - protein, 11 aa, Homo sapiens
  CDR3 for beta chain variable domain of TCR clone 3477 (TRBV5-6, TRBJ2-5)
CASSLERTQYF

SEQ ID NO: 6955 - protein, 21 aa, Homo sapiens
  CDR3 for alpha chain variable domain of TCR clone 3478 (TRAV1-1, TRAJ6)
CAVRREEATYLHLEEEPALLF

SEQ ID NO: 6956 - protein, 15 aa, Homo sapiens
  CDR3 for beta chain variable domain of TCR clone 3478 (TRBV6-6, TRBJ2-1)
CATRQGVSSYNEQFF

SEQ ID NO: 6957 - protein, 13 aa, Homo sapiens
  CDR3 for alpha chain variable domain of TCR clone 3479 (TRAV30, TRAJ6)
CGFIEGGSYIPTF

SEQ ID NO: 6958 - protein, 16 aa, Homo sapiens
  CDR3 for beta chain variable domain of TCR clone 3479 (TRBV7-6, TRBJ2-3)
CASSARTSRGTDTQYF

SEQ ID NO: 6959 - protein, 18 aa, Homo sapiens
  CDR3 for alpha chain variable domain of TCR clone 3480 (TRAV21, TRAJ52)
CAVRPSPAGGTSYGKLTF

SEQ ID NO: 6960 - protein, 16 aa, Homo sapiens
  CDR3 for beta chain variable domain of TCR clone 3480 (TRBV19, TRBJ2-1)
CASSKAGPSSYNEQFF

SEQ ID NO: 6961 - protein, 15 aa, Homo sapiens
  CDR3 for alpha chain variable domain of TCR clone 3481 (TRAV12-1, TRAJ45)
CVVLSGGGGADGLTF

SEQ ID NO: 6962 - protein, 16 aa, Homo sapiens
  CDR3 for beta chain variable domain of TCR clone 3481 (TRBV6-5, TRBJ2-1)
CASSETLAGHYNEQFF

SEQ ID NO: 6963 - protein, 12 aa, Homo sapiens
  CDR3 for alpha chain variable domain of TCR clone 3482 (TRAV12-3, TRAJ17)
CAMTLTGNKLTF

SEQ ID NO: 6964 - protein, 15 aa, Homo sapiens
  CDR3 for beta chain variable domain of TCR clone 3482 (TRBV20-1, TRBJ2-7)
CSARDRVSGMGEQYF

SEQ ID NO: 6965 - protein, 13 aa, Homo sapiens
  CDR3 for alpha chain variable domain of TCR clone 3483 (TRAV2, TRAJ20)
CAVEGPSEYKLSF

SEQ ID NO: 6966 - protein, 16 aa, Homo sapiens
  CDR3 for beta chain variable domain of TCR clone 3483 (TRBV25-1, TRBJ2-7)
CASSELTGGGIYEQYF

SEQ ID NO: 6967 - protein, 14 aa, Homo sapiens
  CDR3 for alpha chain variable domain of TCR clone 3484 (TRAV39, TRAJ42)
CAVDIARSQGNLIF

SEQ ID NO: 6968 - protein, 15 aa, Homo sapiens
  CDR3 for beta chain variable domain of TCR clone 3484 (TRBV27, TRBJ2-7)
CASSLFGTGLDEQYF

SEQ ID NO: 6969 - protein, 11 aa, Homo sapiens
  CDR3 for alpha chain variable domain of TCR clone 3485 (TRAV2, TRAJ20)
CAVSDDYKLSF

SEQ ID NO: 6970 - protein, 20 aa, Homo sapiens
  CDR3 for beta chain variable domain of TCR clone 3485 (TRBV19, TRBJ2-1)
CASSISRTVTSTRLNNEQFF

SEQ ID NO: 6971 - protein, 19 aa, Homo sapiens
  CDR3 for alpha chain variable domain of TCR clone 3486 (TRAV1-2, TRAJ26)
CLLPLCCERPDNYGQNFVF

SEQ ID NO: 6972 - protein, 11 aa, Homo sapiens
  CDR3 for beta chain variable domain of TCR clone 3486 (TRBV29-1, TRBJ2-5)
CSEDRTGTQYF

SEQ ID NO: 6973 - protein, 15 aa, Homo sapiens
  CDR3 for alpha chain variable domain of TCR clone 3487 (TRAV21, TRAJ53)
CATLNSGGSNYKLTF

SEQ ID NO: 6974 - protein, 15 aa, Homo sapiens
  CDR3 for beta chain variable domain of TCR clone 3487 (TRBV5-1, TRBJ2-1)
CASSPPRAPYNEQFF

SEQ ID NO: 6975 - protein, 15 aa, Homo sapiens
  CDR3 for alpha chain variable domain of TCR clone 3488 (TRAV26-1, TRAJ44)
CIARVPFGTASKLTF

SEQ ID NO: 6976 - protein, 15 aa, Homo sapiens
  CDR3 for beta chain variable domain of TCR clone 3488 (TRBV20-1, TRBJ1-1)
CSASRGVTGNTEAFF

SEQ ID NO: 6977 - protein, 14 aa, Homo sapiens
  CDR3 for alpha chain variable domain of TCR clone 3489 (TRAV2, TRAJ23)
CAVGLRNQGGKLIF

SEQ ID NO: 6978 - protein, 13 aa, Homo sapiens
  CDR3 for beta chain variable domain of TCR clone 3489 (TRBV12-4, TRBJ2-5)
CASSPGTEETQYF

SEQ ID NO: 6979 - protein, 14 aa, Homo sapiens
  CDR3 for alpha chain variable domain of TCR clone 3490 (TRAV20, TRAJ18)
CAVGRGSTLGRLYF

SEQ ID NO: 6980 - protein, 14 aa, Homo sapiens
  CDR3 for beta chain variable domain of TCR clone 3490 (TRBV28, TRBJ2-4)
CASTQVTGVNIQYF

SEQ ID NO: 6981 - protein, 14 aa, Homo sapiens
  CDR3 for alpha chain variable domain of TCR clone 3491 (TRAV1-2, TRAJ8)
CAVREDTGFQKLVF

SEQ ID NO: 6982 - protein, 13 aa, Homo sapiens
  CDR3 for beta chain variable domain of TCR clone 3491 (TRBV12-4, TRBJ2-5)
CASRKRGKETQYF

SEQ ID NO: 6983 - protein, 15 aa, Homo sapiens
  CDR3 for alpha chain variable domain of TCR clone 3492 (TRAV3, TRAJ22)
CAVRDRGGSARQLTF

SEQ ID NO: 6984 - protein, 16 aa, Homo sapiens
  CDR3 for beta chain variable domain of TCR clone 3492 (TRBV4-2, TRBJ2-4)
CASSQELRRAKNIQYF

SEQ ID NO: 6985 - protein, 14 aa, Homo sapiens
  CDR3 for alpha chain variable domain of TCR clone 3493 (TRAV12-1, TRAJ37)
CVVTGSSNTGKLIF

SEQ ID NO: 6986 - protein, 20 aa, Homo sapiens
  CDR3 for beta chain variable domain of TCR clone 3493 (TRBV23-1, TRBJ2-5)
CISAPAVPERVLLIQETQYF

SEQ ID NO: 6987 - protein, 16 aa, Homo sapiens
  CDR3 for alpha chain variable domain of TCR clone 3494 (TRAV3, TRAJ32)
CAVRDMGGGATNKLIF

SEQ ID NO: 6988 - protein, 11 aa, Homo sapiens
  CDR3 for beta chain variable domain of TCR clone 3494 (TRBV12-4, TRBJ2-1)
CASSRLNEQFF

SEQ ID NO: 6989 - protein, 13 aa, Homo sapiens
  CDR3 for alpha chain variable domain of TCR clone 3495 (TRAV12-2, TRAJ34)
CAVRGYNTDKLIF

SEQ ID NO: 6990 - protein, 18 aa, Homo sapiens
  CDR3 for beta chain variable domain of TCR clone 3495 (TRBV11-2, TRBJ2-3)
CASSLGGASRGAPNTQYF

SEQ ID NO: 6991 - protein, 14 aa, Homo sapiens
  CDR3 for alpha chain variable domain of TCR clone 3496 (TRAV12-1, TRAJ3)
CVVSGYSSASKIIF

SEQ ID NO: 6992 - protein, 14 aa, Homo sapiens
  CDR3 for beta chain variable domain of TCR clone 3496 (TRBV6-6, TRBJ1-3)
CASSRQGSGNTIYF

SEQ ID NO: 6993 - protein, 14 aa, Homo sapiens
  CDR3 for alpha chain variable domain of TCR clone 3497 (TRAV16, TRAJ54)
CALSLIQGAQKLVS

SEQ ID NO: 6994 - protein, 15 aa, Homo sapiens
  CDR3 for beta chain variable domain of TCR clone 3497 (TRBV20-1, TRBJ2-7)
CSARDRVSGMDEQYF

SEQ ID NO: 6995 - protein, 14 aa, Homo sapiens
  CDR3 for alpha chain variable domain of TCR clone 3498 (TRAV1-2, TRAJ8)
CAVREDTGFQKLVF

SEQ ID NO: 6996 - protein, 16 aa, Homo sapiens
  CDR3 for beta chain variable domain of TCR clone 3498 (TRBV5-1, TRBJ2-2)
CASSLWDTTNTGELFF

SEQ ID NO: 6997 - protein, 16 aa, Homo sapiens
  CDR3 for alpha chain variable domain of TCR clone 3499 (TRAV30, TRAJ24)
CGTEIVDADSWGKFQF

SEQ ID NO: 6998 - protein, 14 aa, Homo sapiens
  CDR3 for beta chain variable domain of TCR clone 3499 (TRBV12-5, TRBJ2-5)
CASGSRTQQETQYF

SEQ ID NO: 6999 - protein, 14 aa, Homo sapiens
  CDR3 for alpha chain variable domain of TCR clone 3500 (TRAV1-2, TRAJ8)
CAVREDTGFQKLVF

SEQ ID NO: 7000 - protein, 17 aa, Homo sapiens
  CDR3 for beta chain variable domain of TCR clone 3500 (TRBV28, TRBJ2-5)
CASSRQGGLAGAETQYF

SEQ ID NO: 7001 - protein, 12 aa, Homo sapiens
  CDR3 for alpha chain variable domain of TCR clone 3501 (TRAV12-2, TRAJ10)
WGVTGGGNKLTF

SEQ ID NO: 7002 - protein, 15 aa, Homo sapiens
  CDR3 for beta chain variable domain of TCR clone 3501 (TRBV20-1, TRBJ2-7)
CSARDRVSGMDEQYF

SEQ ID NO: 7003 - protein, 17 aa, Homo sapiens
  CDR3 for alpha chain variable domain of TCR clone 3502 (TRAV21, TRAJ52)
CAVGVNAGGTSYGKLTF

SEQ ID NO: 7004 - protein, 13 aa, Homo sapiens
  CDR3 for beta chain variable domain of TCR clone 3502 (TRBV5-1, TRBJ1-2)
CASSFQGNYGYTF

SEQ ID NO: 7005 - protein, 13 aa, Homo sapiens
  CDR3 for alpha chain variable domain of TCR clone 3503 (TRAV21, TRAJ57)
CAVTQGGSEKLVF

SEQ ID NO: 7006 - protein, 17 aa, Homo sapiens
  CDR3 for beta chain variable domain of TCR clone 3503 (TRBV13, TRBJ2-3)
CASSLSRVAGGRNTQYF

SEQ ID NO: 7007 - protein, 13 aa, Homo sapiens
  CDR3 for alpha chain variable domain of TCR clone 3504 (TRAV3, TRAJ31)
CAVREGNNARLMF

SEQ ID NO: 7008 - protein, 15 aa, Homo sapiens
  CDR3 for beta chain variable domain of TCR clone 3504 (TRBV6-1, TRBJ1-1)
CASRTPGQLNTEAFF

SEQ ID NO: 7009 - protein, 14 aa, Homo sapiens
  CDR3 for alpha chain variable domain of TCR clone 3505 (TRAV12-2, TRAJ13)
CAVKQTGGYQKVTF

SEQ ID NO: 7010 - protein, 15 aa, Homo sapiens
  CDR3 for beta chain variable domain of TCR clone 3505 (TRBV27, TRBJ2-1)
CASSNGGGSSNEQFF

SEQ ID NO: 7011 - protein, 13 aa, Homo sapiens
  CDR3 for alpha chain variable domain of TCR clone 3506 (TRAV17, TRAJ21)
CATDGGNFNKFYF

SEQ ID NO: 7012 - protein, 13 aa, Homo sapiens
  CDR3 for beta chain variable domain of TCR clone 3506 (TRBV11-3, TRBJ1-1)
CASTGSLNTEAFF

SEQ ID NO: 7013 - protein, 14 aa, Homo sapiens
  CDR3 for alpha chain variable domain of TCR clone 3507 (TRAV13-2, TRAJ17)
CAENSKAAGNKLTF

SEQ ID NO: 7014 - protein, 15 aa, Homo sapiens
  CDR3 for beta chain variable domain of TCR clone 3507 (TRBV27, TRBJ2-1)
CASSNGGGSSNEQFF

SEQ ID NO: 7015 - protein, 14 aa, Homo sapiens
  CDR3 for alpha chain variable domain of TCR clone 3508 (TRAV1-2, TRAJ16)
CAVNRFSDGQKLLF

SEQ ID NO: 7016 - protein, 13 aa, Homo sapiens
  CDR3 for beta chain variable domain of TCR clone 3508 (TRBV20-1, TRBJ1-1)
CSARLGQGTEAFF

SEQ ID NO: 7017 - protein, 15 aa, Homo sapiens
  CDR3 for alpha chain variable domain of TCR clone 3509 (TRAV3, TRAJ22)
CAVRDRGGSARQLTF

SEQ ID NO: 7018 - protein, 20 aa, Homo sapiens
  CDR3 for beta chain variable domain of TCR clone 3509 (TRBV11-2, TRBJ1-6)
CASSLVFATGGSVHPSTLGT

SEQ ID NO: 7019 - protein, 11 aa, Homo sapiens
  CDR3 for alpha chain variable domain of TCR clone 3510 (TRAV35, TRAJ57)
GPQGGSEKLVF

SEQ ID NO: 7020 - protein, 16 aa, Homo sapiens
  CDR3 for beta chain variable domain of TCR clone 3510 (TRBV7-2, TRBJ1-5)
CASSWTGGPGNQPQHF

SEQ ID NO: 7021 - protein, 15 aa, Homo sapiens
  CDR3 for alpha chain variable domain of TCR clone 3511 (TRAV8-1, TRAJ23)
CAVNSHYNQGGKLIF

SEQ ID NO: 7022 - protein, 15 aa, Homo sapiens
  CDR3 for beta chain variable domain of TCR clone 3511 (TRBV11-2, TRBJ1-6)
CASTLRGTGNSPLHF

SEQ ID NO: 7023 - protein, 14 aa, Homo sapiens
  CDR3 for alpha chain variable domain of TCR clone 3512 (TRAV12-3, TRAJ10)
SHLPLTGGGNKLTF

SEQ ID NO: 7024 - protein, 13 aa, Homo sapiens
  CDR3 for beta chain variable domain of TCR clone 3512 (TRBV4-1, TRBJ2-2)
CASSQENTGELFF

SEQ ID NO: 7025 - protein, 12 aa, Homo sapiens
  CDR3 for alpha chain variable domain of TCR clone 3513 (TRAV26-1, TRAJ31)
CIVRNNNARLMF

SEQ ID NO: 7026 - protein, 15 aa, Homo sapiens
  CDR3 for beta chain variable domain of TCR clone 3513 (TRBV20-1, TRBJ2-4)
CSARDLTGGPNIQYF

SEQ ID NO: 7027 - protein, 15 aa, Homo sapiens
  CDR3 for alpha chain variable domain of TCR clone 3514 (TRAV8-3, TRAJ11)
CAVGLLNSGYSTLTF

SEQ ID NO: 7028 - protein, 15 aa, Homo sapiens
  CDR3 for beta chain variable domain of TCR clone 3514 (TRBV13, TRBJ2-1)
CASSLLSGLNNEQFF

SEQ ID NO: 7029 - protein, 18 aa, Homo sapiens
  CDR3 for alpha chain variable domain of TCR clone 3515 (TRAV12-3, TRAJ52)
CAMSRTNAGGTSYGKLTF

SEQ ID NO: 7030 - protein, 17 aa, Homo sapiens
  CDR3 for beta chain variable domain of TCR clone 3515 (TRBV7-3, TRBJ2-3)
CASSLMKWMRGADTQYF

SEQ ID NO: 7031 - protein, 12 aa, Homo sapiens
  CDR3 for alpha chain variable domain of TCR clone 3516 (TRAV36/DV7, TRAJ40)
CAVGTGTYKYIF

SEQ ID NO: 7032 - protein, 14 aa, Homo sapiens
  CDR3 for beta chain variable domain of TCR clone 3516 (TRBV19, TRBJ2-3)
CASSIDLGGDTQYF

SEQ ID NO: 7033 - protein, 15 aa, Homo sapiens
  CDR3 for alpha chain variable domain of TCR clone 3517 (TRAV2, TRAJ9)
CAVEDRGTGGFKTIF

SEQ ID NO: 7034 - protein, 19 aa, Homo sapiens
  CDR3 for beta chain variable domain of TCR clone 3517 (TRBV28, TRBJ2-7)
CASSYSGTSRLGWVYEQYF

SEQ ID NO: 7035 - protein, 11 aa, Homo sapiens
  CDR3 for alpha chain variable domain of TCR clone 3518 (TRAV17, TRAJ9)
CATTGGFKTIF

SEQ ID NO: 7036 - protein, 15 aa, Homo sapiens
  CDR3 for beta chain variable domain of TCR clone 3518 (TRBV9, TRBJ1-6)
CASSVAGTGDSPLHF

SEQ ID NO: 7037 - protein, 15 aa, Homo sapiens
  CDR3 for alpha chain variable domain of TCR clone 3519 (TRAV13-1, TRAJ17)
CAASIERAAGNKLTF

SEQ ID NO: 7038 - protein, 15 aa, Homo sapiens
  CDR3 for beta chain variable domain of TCR clone 3519 (TRBV6-1, TRBJ2-3)
CASSERGGITDTQYF

SEQ ID NO: 7039 - protein, 15 aa, Homo sapiens
  CDR3 for alpha chain variable domain of TCR clone 3520 (TRAV3, TRAJ17)
CAVSPKEAAGNKLTF

SEQ ID NO: 7040 - protein, 14 aa, Homo sapiens
  CDR3 for beta chain variable domain of TCR clone 3520 (TRBV5-1, TRBJ2-3)
CASSLFGPTDTQYF

SEQ ID NO: 7041 - protein, 16 aa, Homo sapiens
  CDR3 for alpha chain variable domain of TCR clone 3521 (TRAV4, TRAJ37)
CLVGWFGSSNTGKLIF

SEQ ID NO: 7042 - protein, 15 aa, Homo sapiens
  CDR3 for beta chain variable domain of TCR clone 3521 (TRBV12-4, TRBJ2-3)
CASSLAERPTDTQYF

SEQ ID NO: 7043 - protein, 16 aa, Homo sapiens
  CDR3 for alpha chain variable domain of TCR clone 3522 (TRAV23/DV6, TRAJ9)
CAASIGGNTGGFKTIF

SEQ ID NO: 7044 - protein, 17 aa, Homo sapiens
  CDR3 for beta chain variable domain of TCR clone 3522 (TRBV13, TRBJ2-3)
CASSLSRVAGGRNTQYF

SEQ ID NO: 7045 - protein, 13 aa, Homo sapiens
  CDR3 for alpha chain variable domain of TCR clone 3523 (TRAV12-2, TRAJ9)
CAVLETGGFKTIF

SEQ ID NO: 7046 - protein, 15 aa, Homo sapiens
  CDR3 for beta chain variable domain of TCR clone 3523 (TRBV6-3, TRBJ2-7)
CASSRTGVNLYEQYF

SEQ ID NO: 7047 - protein, 12 aa, Homo sapiens
  CDR3 for alpha chain variable domain of TCR clone 3524 (TRAV8-1, TRAJ23)
CAVGNQGGKLIF

SEQ ID NO: 7048 - protein, 16 aa, Homo sapiens
  CDR3 for beta chain variable domain of TCR clone 3524 (TRBV7-3, TRBJ2-2)
CASSLKRGTLSGELFF

SEQ ID NO: 7049 - protein, 14 aa, Homo sapiens
  CDR3 for alpha chain variable domain of TCR clone 3525 (TRAV26-1, TRAJ5)
CIVRVRFNRRALTF

SEQ ID NO: 7050 - protein, 17 aa, Homo sapiens
  CDR3 for beta chain variable domain of TCR clone 3525 (TRBV29-1, TRBJ2-3)
CSVEVLAGETSTDTQYF

SEQ ID NO: 7051 - protein, 14 aa, Homo sapiens
  CDR3 for alpha chain variable domain of TCR clone 3526 (TRAV26-1, TRAJ38)
CIADNAGNNRKLIW

SEQ ID NO: 7052 - protein, 16 aa, Homo sapiens
  CDR3 for beta chain variable domain of TCR clone 3526 (TRBV19, TRBJ2-1)
CASSKAGPSSYNEQFF

SEQ ID NO: 7053 - protein, 13 aa, Homo sapiens
  CDR3 for alpha chain variable domain of TCR clone 3527 (TRAV12-3, TRAJ33)
CAMSVNSNYQLIW

SEQ ID NO: 7054 - protein, 15 aa, Homo sapiens
  CDR3 for beta chain variable domain of TCR clone 3527 (TRBV20-1, TRBJ2-7)
CSARDRVSGMDEQYF

SEQ ID NO: 7055 - protein, 13 aa, Homo sapiens
  CDR3 for alpha chain variable domain of TCR clone 3528 (TRAV12-1, TRAJ6)
CVVFPGGSYIPTF

SEQ ID NO: 7056 - protein, 12 aa, Homo sapiens
  CDR3 for beta chain variable domain of TCR clone 3528 (TRBV11-2, TRBJ2-2)
CASSLGGGELFF

SEQ ID NO: 7057 - protein, 11 aa, Homo sapiens
  CDR3 for alpha chain variable domain of TCR clone 3529 (TRAV2, TRAJ13)
CASGGYQKVTF

SEQ ID NO: 7058 - protein, 12 aa, Homo sapiens
  CDR3 for beta chain variable domain of TCR clone 3529 (TRBV7-8, TRBJ2-7)
CASSLGDREQYF

SEQ ID NO: 7059 - protein, 14 aa, Homo sapiens
  CDR3 for alpha chain variable domain of TCR clone 3530 (TRAV2, TRAJ37)
CAVDFTSNTGKLIF

SEQ ID NO: 7060 - protein, 14 aa, Homo sapiens
  CDR3 for beta chain variable domain of TCR clone 3530 (TRBV5-1, TRBJ2-5)
CASSFGGSQETQYF

SEQ ID NO: 7061 - protein, 15 aa, Homo sapiens
  CDR3 for alpha chain variable domain of TCR clone 3531 (TRAV20, TRAJ24)
CAVQAAPDSWGKFQF

SEQ ID NO: 7062 - protein, 14 aa, Homo sapiens
  CDR3 for beta chain variable domain of TCR clone 3531 (TRBV20-1, TRBJ1-1)
CSARDRGQGSEAFF

SEQ ID NO: 7063 - protein, 21 aa, Homo sapiens
  CDR3 for alpha chain variable domain of TCR clone 3532 (TRAV25, TRAJ47)
TATQTTDVGTYFWEYGNKLVF

SEQ ID NO: 7064 - protein, 16 aa, Homo sapiens
  CDR3 for beta chain variable domain of TCR clone 3532 (TRBV6-6, TRBJ2-1)
CASSWGGQGPYNEQFF

SEQ ID NO: 7065 - protein, 14 aa, Homo sapiens
  CDR3 for alpha chain variable domain of TCR clone 3533 (TRAV1-2, TRAJ16)
CAVNRFSDGQKLLF

SEQ ID NO: 7066 - protein, 15 aa, Homo sapiens
  CDR3 for beta chain variable domain of TCR clone 3533 (TRBV4-2, TRBJ1-1)
CASSQQGAGDTEAFF

SEQ ID NO: 7067 - protein, 14 aa, Homo sapiens
  CDR3 for alpha chain variable domain of TCR clone 3534 (TRAV17, TRAJ57)
CATDPQGGSEKLVF

SEQ ID NO: 7068 - protein, 18 aa, Homo sapiens
  CDR3 for beta chain variable domain of TCR clone 3534 (TRBV25-1, TRBJ2-1)
CASSESRAGGPGYNEQFF

SEQ ID NO: 7069 - protein, 14 aa, Homo sapiens
  CDR3 for alpha chain variable domain of TCR clone 3535 (TRAV12-3, TRAJ21)
CAMEGHQGFNKFYF

SEQ ID NO: 7070 - protein, 16 aa, Homo sapiens
  CDR3 for beta chain variable domain of TCR clone 3535 (TRBV19, TRBJ2-1)
CASSKAGPSSYNEQFF

SEQ ID NO: 7071 - protein, 15 aa, Homo sapiens
  CDR3 for alpha chain variable domain of TCR clone 3536 (TRAV20, TRAJ53)
CAVQASGGSNYKLTF

SEQ ID NO: 7072 - protein, 15 aa, Homo sapiens
  CDR3 for beta chain variable domain of TCR clone 3536 (TRBV9, TRBJ2-1)
CASSLAGSSYNEQFF

SEQ ID NO: 7073 - protein, 16 aa, Homo sapiens
  CDR3 for alpha chain variable domain of TCR clone 3537 (TRAV29/DV5, TRAJ36)
CAASAHYQSGANNLFF

SEQ ID NO: 7074 - protein, 16 aa, Homo sapiens
  CDR3 for beta chain variable domain of TCR clone 3537 (TRBV4-2, TRBJ2-3)
CASSQELAGDTDTQYF

SEQ ID NO: 7075 - protein, 16 aa, Homo sapiens
  CDR3 for alpha chain variable domain of TCR clone 3538 (TRAV12-3, TRAJ53)
CAMSPGSGGSNYKLTF

SEQ ID NO: 7076 - protein, 16 aa, Homo sapiens
  CDR3 for beta chain variable domain of TCR clone 3538 (TRBV19, TRBJ2-1)
CASSKAGPSSYNEQFF

SEQ ID NO: 7077 - protein, 15 aa, Homo sapiens
  CDR3 for alpha chain variable domain of TCR clone 3539 (TRAV13-2, TRAJ5)
CAENPHWTGRRALTF

SEQ ID NO: 7078 - protein, 16 aa, Homo sapiens
  CDR3 for beta chain variable domain of TCR clone 3539 (TRBV7-9, TRBJ1-3)
CASSQTSGLRMGTIYF

SEQ ID NO: 7079 - protein, 16 aa, Homo sapiens
  CDR3 for alpha chain variable domain of TCR clone 3540 (TRAV8-3, TRAJ28)
CAVPPQRGAGSYQLTF

SEQ ID NO: 7080 - protein, 13 aa, Homo sapiens
  CDR3 for beta chain variable domain of TCR clone 3540 (TRBV7-6, TRBJ2-3)
CASSLRSDNTQYF

SEQ ID NO: 7081 - protein, 13 aa, Homo sapiens
  CDR3 for alpha chain variable domain of TCR clone 3541 (TRAV2, TRAJ40)
CAVVTSGTYKYIF

SEQ ID NO: 7082 - protein, 15 aa, Homo sapiens
  CDR3 for beta chain variable domain of TCR clone 3541 (TRBV6-3, TRBJ2-7)
CASSSPGTVFYEQYF

SEQ ID NO: 7083 - protein, 12 aa, Homo sapiens
  CDR3 for alpha chain variable domain of TCR clone 3542 (TRAV13-1, TRAJ21)
CAAKEGFNKFYF

SEQ ID NO: 7084 - protein, 15 aa, Homo sapiens
  CDR3 for beta chain variable domain of TCR clone 3542 (TRBV20-1, TRBJ2-7)
CSARDRVSGMDEQYF

SEQ ID NO: 7085 - protein, 12 aa, Homo sapiens
  CDR3 for alpha chain variable domain of TCR clone 3543 (TRAV21, TRAJ13)
PGPSGGYQKVTF

SEQ ID NO: 7086 - protein, 15 aa, Homo sapiens
  CDR3 for beta chain variable domain of TCR clone 3543 (TRBV27, TRBJ2-5)
CASSLYPRGGETQYF

SEQ ID NO: 7087 - protein, 12 aa, Homo sapiens
  CDR3 for alpha chain variable domain of TCR clone 3544 (TRAV38-1, TRAJ47)
CAFETYGNKLVF

SEQ ID NO: 7088 - protein, 15 aa, Homo sapiens
  CDR3 for beta chain variable domain of TCR clone 3544 (TRBV20-1, TRBJ2-7)
CSARKGLAESYEQYF

SEQ ID NO: 7089 - protein, 13 aa, Homo sapiens
  CDR3 for alpha chain variable domain of TCR clone 3545 (TRAV12-3, TRAJ47)
CAMKKEYGNKLVF

SEQ ID NO: 7090 - protein, 15 aa, Homo sapiens
  CDR3 for beta chain variable domain of TCR clone 3545 (TRBV20-1, TRBJ2-7)
CSARDRVSGMDEQYF

SEQ ID NO: 7091 - protein, 14 aa, Homo sapiens
  CDR3 for alpha chain variable domain of TCR clone 3546 (TRAV23/DV6, TRAJ39)
CAASIGNAGNMLTF

SEQ ID NO: 7092 - protein, 12 aa, Homo sapiens
  CDR3 for beta chain variable domain of TCR clone 3546 (TRBV20-1, TRBJ2-5)
CSVGTGSETQYF

SEQ ID NO: 7093 - protein, 18 aa, Homo sapiens
  CDR3 for alpha chain variable domain of TCR clone 3547 (TRAV21, TRAJ52)
CAVRPSPAGGTSYGKLTF

SEQ ID NO: 7094 - protein, 14 aa, Homo sapiens
  CDR3 for beta chain variable domain of TCR clone 3547 (TRBV7-2, TRBJ2-1)
CASSLEGGYNEQFF

SEQ ID NO: 7095 - protein, 13 aa, Homo sapiens
  CDR3 for alpha chain variable domain of TCR clone 3548 (TRAV29/DV5, TRAJ31)
CAASRNNNARLMF

SEQ ID NO: 7096 - protein, 12 aa, Homo sapiens
  CDR3 for beta chain variable domain of TCR clone 3548 (TRBV14, TRBJ2-7)
CASSSLKGEQYF

SEQ ID NO: 7097 - protein, 13 aa, Homo sapiens
  CDR3 for alpha chain variable domain of TCR clone 3549 (TRAV13-1, TRAJ28)
CAANEAGSYQLTF

SEQ ID NO: 7098 - protein, 15 aa, Homo sapiens
  CDR3 for beta chain variable domain of TCR clone 3549 (TRBV7-9, TRBJ1-6)
CASSSPGRGNSPLHF

SEQ ID NO: 7099 - protein, 13 aa, Homo sapiens
  CDR3 for alpha chain variable domain of TCR clone 3550 (TRAV8-1, TRAJ39)
CAVANNAGNMLTF

SEQ ID NO: 7100 - protein, 15 aa, Homo sapiens
  CDR3 for beta chain variable domain of TCR clone 3550 (TRBV7-2, TRBJ2-1)
CASSLNRGAYNEQFF

SEQ ID NO: 7101 - protein, 14 aa, Homo sapiens
  CDR3 for alpha chain variable domain of TCR clone 3551 (TRAV1-2, TRAJ16)
CAVNRFSDGQKLLF

SEQ ID NO: 7102 - protein, 20 aa, Homo sapiens
  CDR3 for beta chain variable domain of TCR clone 3551 (TRBV28, TRBJ2-1)
CASTPIGRSPGLAGGNEQFF

SEQ ID NO: 7103 - protein, 10 aa, Homo sapiens
  CDR3 for alpha chain variable domain of TCR clone 3552 (TRAV1-2, TRAJ20)
CAVTDYKLSF

SEQ ID NO: 7104 - protein, 15 aa, Homo sapiens
  CDR3 for beta chain variable domain of TCR clone 3552 (TRBV7-2, TRBJ2-7)
CASSLVSSGSYEQYF

SEQ ID NO: 7105 - protein, 12 aa, Homo sapiens
  CDR3 for alpha chain variable domain of TCR clone 3553 (TRAV36/DV7, TRAJ50)
CAVEPENLLRQG

SEQ ID NO: 7106 - protein, 13 aa, Homo sapiens
  CDR3 for beta chain variable domain of TCR clone 3553 (TRBV7-2, TRBJ2-7)
CASSSPSGSEQYF

SEQ ID NO: 7107 - protein, 12 aa, Homo sapiens
  CDR3 for alpha chain variable domain of TCR clone 3554 (TRAV13-2, TRAJ58)
CAERRLDSRLTF

SEQ ID NO: 7108 - protein, 15 aa, Homo sapiens
  CDR3 for beta chain variable domain of TCR clone 3554 (TRBV5-1, TRBJ2-5)
CASSSGREMVETQYF

SEQ ID NO: 7109 - protein, 11 aa, Homo sapiens
  CDR3 for alpha chain variable domain of TCR clone 3555 (TRAV12-2, TRAJ30)
CAVGRDDKIIF

SEQ ID NO: 7110 - protein, 14 aa, Homo sapiens
  CDR3 for beta chain variable domain of TCR clone 3555 (TRBV6-1, TRBJ1-3)
CASVQGGGGNTIYF

SEQ ID NO: 7111 - protein, 16 aa, Homo sapiens
  CDR3 for alpha chain variable domain of TCR clone 3556 (TRAV26-1, TRAJ36)
CIVRVPDQTGANNLFF

SEQ ID NO: 7112 - protein, 12 aa, Homo sapiens
  CDR3 for beta chain variable domain of TCR clone 3556 (TRBV29-1, TRBJ2-3)
CSVTGGADTQYF

SEQ ID NO: 7113 - protein, 14 aa, Homo sapiens
  CDR3 for alpha chain variable domain of TCR clone 3557 (TRAV1-2, TRAJ8)
CAVREDTGFQKLVF

SEQ ID NO: 7114 - protein, 15 aa, Homo sapiens
  CDR3 for beta chain variable domain of TCR clone 3557 (TRBV7-9, TRBJ2-2)
CASGPLDTFPGELFF

SEQ ID NO: 7115 - protein, 14 aa, Homo sapiens
  CDR3 for alpha chain variable domain of TCR clone 3558 (TRAV1-2, TRAJ8)
CAVREDTGFQKLVF

SEQ ID NO: 7116 - protein, 22 aa, Homo sapiens
  CDR3 for beta chain variable domain of TCR clone 3558 (TRBV7-3, TRBJ2-2)
GGTQPCISVPAAQEDTPGSCFF

SEQ ID NO: 7117 - protein, 14 aa, Homo sapiens
  CDR3 for alpha chain variable domain of TCR clone 3559 (TRAV8-6, TRAJ30)
CAVRPVNRDDKIIF

SEQ ID NO: 7118 - protein, 17 aa, Homo sapiens
  CDR3 for beta chain variable domain of TCR clone 3559 (TRBV7-8, TRBJ2-6)
CASSAGTGGAGANVLTF

SEQ ID NO: 7119 - protein, 14 aa, Homo sapiens
  CDR3 for alpha chain variable domain of TCR clone 3560 (TRAV1-2, TRAJ16)
CAVNRFSDGQKLLF

SEQ ID NO: 7120 - protein, 15 aa, Homo sapiens
  CDR3 for beta chain variable domain of TCR clone 3560 (TRBV5-1, TRBJ2-1)
CASSPPRAPYNEQFF

SEQ ID NO: 7121 - protein, 15 aa, Homo sapiens
  CDR3 for alpha chain variable domain of TCR clone 3561 (TRAV12-2, TRAJ13)
CRESLGSGGYQKVTF

SEQ ID NO: 7122 - protein, 15 aa, Homo sapiens
  CDR3 for beta chain variable domain of TCR clone 3561 (TRBV6-5, TRBJ2-1)
CASRRAQLSYNEQFF

SEQ ID NO: 7123 - protein, 12 aa, Homo sapiens
  CDR3 for alpha chain variable domain of TCR clone 3562 (TRAV12-3, TRAJ17)
CAMTLTGNKLTF

SEQ ID NO: 7124 - protein, 15 aa, Homo sapiens
  CDR3 for beta chain variable domain of TCR clone 3562 (TRBV20-1, TRBJ2-7)
CSARDRVSGIDEQYF

SEQ ID NO: 7125 - protein, 12 aa, Homo sapiens
  CDR3 for alpha chain variable domain of TCR clone 3563 (TRAV12-3, TRAJ17)
CAMTLTGNKLTF

SEQ ID NO: 7126 - protein, 15 aa, Homo sapiens
  CDR3 for beta chain variable domain of TCR clone 3563 (TRBV27, TRBJ2-1)
CASSNGGGSSNEQFF

SEQ ID NO: 7127 - protein, 14 aa, Homo sapiens
  CDR3 for alpha chain variable domain of TCR clone 3564 (TRAV29/DV5, TRAJ34)
CAASASRETDKLIF

SEQ ID NO: 7128 - protein, 15 aa, Homo sapiens
  CDR3 for beta chain variable domain of TCR clone 3564 (TRBV7-8, TRBJ2-7)
CASSLERAGSYEQYF

SEQ ID NO: 7129 - protein, 12 aa, Homo sapiens
  CDR3 for alpha chain variable domain of TCR clone 3565 (TRAV12-3, TRAJ17)
CAVTLTGNKLTF

SEQ ID NO: 7130 - protein, 15 aa, Homo sapiens
  CDR3 for beta chain variable domain of TCR clone 3565 (TRBV20-1, TRBJ2-7)
CSARDRVSGMDEQYF

SEQ ID NO: 7131 - protein, 12 aa, Homo sapiens
  CDR3 for alpha chain variable domain of TCR clone 3566 (TRAV16, TRAJ26)
CALRSYGQNFVF

SEQ ID NO: 7132 - protein, 14 aa, Homo sapiens
  CDR3 for beta chain variable domain of TCR clone 3566 (TRBV10-3, TRBJ2-1)
CAISSDLAYNEQFS

SEQ ID NO: 7133 - protein, 15 aa, Homo sapiens
  CDR3 for alpha chain variable domain of TCR clone 3567 (TRAV4, TRAJ39)
CLVGPNNNAGNMLTF

SEQ ID NO: 7134 - protein, 12 aa, Homo sapiens
  CDR3 for beta chain variable domain of TCR clone 3567 (TRBV12-4, TRBJ2-7)
CASNPGGGEQYF

SEQ ID NO: 7135 - protein, 15 aa, Homo sapiens
  CDR3 for alpha chain variable domain of TCR clone 3568 (TRAV8-1, TRAJ6)
CAVNANPGGSYIPTF

SEQ ID NO: 7136 - protein, 12 aa, Homo sapiens
  CDR3 for beta chain variable domain of TCR clone 3568 (TRBV5-7, TRBJ2-7)
CASSVQGGEQYF

SEQ ID NO: 7137 - protein, 11 aa, Homo sapiens
  CDR3 for alpha chain variable domain of TCR clone 3569 (TRAV17, TRAJ29)
CYVATDTPLVF

SEQ ID NO: 7138 - protein, 12 aa, Homo sapiens
  CDR3 for beta chain variable domain of TCR clone 3569 (TRBV7-9, TRBJ2-7)
CASSIKREEQYF

SEQ ID NO: 7139 - protein, 14 aa, Homo sapiens
  CDR3 for alpha chain variable domain of TCR clone 3570 (TRAV12-2, TRAJ40)
CAVKIPSGTYKYIF

SEQ ID NO: 7140 - protein, 14 aa, Homo sapiens
  CDR3 for beta chain variable domain of TCR clone 3570 (TRBV7-9, TRBJ1-2)
CASSRQGANYGYTF

SEQ ID NO: 7141 - protein, 11 aa, Homo sapiens
  CDR3 for alpha chain variable domain of TCR clone 3571 (TRAV17, TRAJ43)
CATDVTGDMRF

SEQ ID NO: 7142 - protein, 14 aa, Homo sapiens
  CDR3 for beta chain variable domain of TCR clone 3571 (TRBV12-4, TRBJ1-1)
CASRPGQGRTEAFF

SEQ ID NO: 7143 - protein, 14 aa, Homo sapiens
  CDR3 for alpha chain variable domain of TCR clone 3572 (TRAV12-3, TRAJ11)
CAMTTNSGYSTLTF

SEQ ID NO: 7144 - protein, 16 aa, Homo sapiens
  CDR3 for beta chain variable domain of TCR clone 3572 (TRBV20-1, TRBJ1-1)
CSARALTQGMNTEAFF

SEQ ID NO: 7145 - protein, 13 aa, Homo sapiens
  CDR3 for alpha chain variable domain of TCR clone 3573 (TRAV3, TRAJ21)
CAVREPDFNKFYF

SEQ ID NO: 7146 - protein, 16 aa, Homo sapiens
  CDR3 for beta chain variable domain of TCR clone 3573 (TRBV27, TRBJ2-2)
CASSFRGLVRTGELFF

SEQ ID NO: 7147 - protein, 10 aa, Homo sapiens
  CDR3 for alpha chain variable domain of TCR clone 3574 (TRAV1-2, TRAJ20)
CALNDYKLSF

SEQ ID NO: 7148 - protein, 14 aa, Homo sapiens
  CDR3 for beta chain variable domain of TCR clone 3574 (TRBV19, TRBJ2-1)
CASPTFVLSGEQFF

SEQ ID NO: 7149 - protein, 13 aa, Homo sapiens
  CDR3 for alpha chain variable domain of TCR clone 3575 (TRAV12-1, TRAJ49)
CVVTPFTGNQFYF

SEQ ID NO: 7150 - protein, 13 aa, Homo sapiens
  CDR3 for beta chain variable domain of TCR clone 3575 (TRBV20-1, TRBJ1-1)
CSARGGANTEAFF

SEQ ID NO: 7151 - protein, 11 aa, Homo sapiens
  CDR3 for alpha chain variable domain of TCR clone 3576 (TRAV1-1, TRAJ23)
CAVRQGGKLIF

SEQ ID NO: 7152 - protein, 15 aa, Homo sapiens
  CDR3 for beta chain variable domain of TCR clone 3576 (TRBV20-1, TRBJ1-1)
CSASRGVTGNTEAFF

SEQ ID NO: 7153 - protein, 12 aa, Homo sapiens
  CDR3 for alpha chain variable domain of TCR clone 3577 (TRAV26-1, TRAJ48)
CIVSGGNEKLTF

SEQ ID NO: 7154 - protein, 13 aa, Homo sapiens
  CDR3 for beta chain variable domain of TCR clone 3577 (TRBV18, TRBJ2-7)
CASFRDSAYEQYF

SEQ ID NO: 7155 - protein, 12 aa, Homo sapiens
  CDR3 for alpha chain variable domain of TCR clone 3578 (TRAV12-3, TRAJ17)
CAMTLTGNKLTF

SEQ ID NO: 7156 - protein, 13 aa, Homo sapiens
  CDR3 for beta chain variable domain of TCR clone 3578 (TRBV20-1, TRBJ2-5)
CSARGDYQETQYF

SEQ ID NO: 7157 - protein, 12 aa, Homo sapiens
  CDR3 for alpha chain variable domain of TCR clone 3579 (TRAV12-3, TRAJ17)
CAMTLTGNKLTF

SEQ ID NO: 7158 - protein, 15 aa, Homo sapiens
  CDR3 for beta chain variable domain of TCR clone 3579 (TRBV29-1, TRBJ2-6)
CSFTGGRSGANVLTF

SEQ ID NO: 7159 - protein, 15 aa, Homo sapiens
  CDR3 for alpha chain variable domain of TCR clone 3580 (TRAV3, TRAJ22)
CAVRDRGGSARQLTF

SEQ ID NO: 7160 - protein, 15 aa, Homo sapiens
  CDR3 for beta chain variable domain of TCR clone 3580 (TRBV7-3, TRBJ2-1)
CASSPTGGGEVEQFF

SEQ ID NO: 7161 - protein, 13 aa, Homo sapiens
  CDR3 for alpha chain variable domain of TCR clone 3581 (TRAV1-2, TRAJ20)
CAVPRSNDYKLSF

SEQ ID NO: 7162 - protein, 14 aa, Homo sapiens
  CDR3 for beta chain variable domain of TCR clone 3581 (TRBV20-1, TRBJ2-7)
CSARYGTTYYEQYF

SEQ ID NO: 7163 - protein, 14 aa, Homo sapiens
  CDR3 for alpha chain variable domain of TCR clone 3582 (TRAV2, TRAJ29)
CAGPFQYGNTPLVF

SEQ ID NO: 7164 - protein, 11 aa, Homo sapiens
  CDR3 for beta chain variable domain of TCR clone 3582 (TRBV29-1, TRBJ2-5)
CSEDRTGTQYF

SEQ ID NO: 7165 - protein, 12 aa, Homo sapiens
  CDR3 for alpha chain variable domain of TCR clone 3583 (TRAV3, TRAJ43)
CAVRDPNNDMRF

SEQ ID NO: 7166 - protein, 15 aa, Homo sapiens
  CDR3 for beta chain variable domain of TCR clone 3583 (TRBV4-3, TRBJ2-7)
CASSQGDWGDYEQYF

SEQ ID NO: 7167 - protein, 16 aa, Homo sapiens
  CDR3 for alpha chain variable domain of TCR clone 3584 (TRAV30, TRAJ49)
SAAQRVGPNTGNQFYF

SEQ ID NO: 7168 - protein, 15 aa, Homo sapiens
  CDR3 for beta chain variable domain of TCR clone 3584 (TRBV7-2, TRBJ2-1)
CASSSGLAGGNEQFF

SEQ ID NO: 7169 - protein, 13 aa, Homo sapiens
  CDR3 for alpha chain variable domain of TCR clone 3585 (TRAV13-2, TRAJ40)
CAELISGTYKYIF

SEQ ID NO: 7170 - protein, 14 aa, Homo sapiens
  CDR3 for beta chain variable domain of TCR clone 3585 (TRBV19, TRBJ1-5)
CASGTEVYNQPQHF

SEQ ID NO: 7171 - protein, 12 aa, Homo sapiens
  CDR3 for alpha chain variable domain of TCR clone 3586 (TRAV12-2, TRAJ36)
CAAPRGANNLFF

SEQ ID NO: 7172 - protein, 15 aa, Homo sapiens
  CDR3 for beta chain variable domain of TCR clone 3586 (TRBV11-2, TRBJ1-3)
CASSLDGTVGNTIYF

SEQ ID NO: 7173 - protein, 13 aa, Homo sapiens
  CDR3 for alpha chain variable domain of TCR clone 3587 (TRAV8-3, TRAJ36)
CAVGATGANNLFF

SEQ ID NO: 7174 - protein, 13 aa, Homo sapiens
  CDR3 for beta chain variable domain of TCR clone 3587 (TRBV6-1, TRBJ1-1)
CASSRQGNTEAFF

SEQ ID NO: 7175 - protein, 13 aa, Homo sapiens
  CDR3 for alpha chain variable domain of TCR clone 3588 (TRAV2, TRAJ29)
CAEQNSGNTPLVF

SEQ ID NO: 7176 - protein, 13 aa, Homo sapiens
  CDR3 for beta chain variable domain of TCR clone 3588 (TRBV28, TRBJ1-2)
CASSPGSRNGYTF

SEQ ID NO: 7177 - protein, 17 aa, Homo sapiens
  CDR3 for alpha chain variable domain of TCR clone 3589 (TRAV3, TRAJ6)
CAVRDGPRAGGGYIPTF

SEQ ID NO: 7178 - protein, 14 aa, Homo sapiens
  CDR3 for beta chain variable domain of TCR clone 3589 (TRBV7-2, TRBJ2-7)
CASSPKTSFYEQYF

SEQ ID NO: 7179 - protein, 21 aa, Homo sapiens
  CDR3 for alpha chain variable domain of TCR clone 3590 (TRAV1-1, TRAJ6)
CLLLLRCERLERTGESYIPTF

SEQ ID NO: 7180 - protein, 13 aa, Homo sapiens
  CDR3 for beta chain variable domain of TCR clone 3590 (TRBV10-2, TRBJ2-7)
CASGASGGYEQYF

SEQ ID NO: 7181 - protein, 11 aa, Homo sapiens
  CDR3 for alpha chain variable domain of TCR clone 3591 (TRAV13-1, TRAJ23)
CAASSRGKLIF

SEQ ID NO: 7182 - protein, 13 aa, Homo sapiens
  CDR3 for beta chain variable domain of TCR clone 3591 (TRBV7-3, TRBJ2-5)
CASSFRGGETQYF

SEQ ID NO: 7183 - protein, 11 aa, Homo sapiens
  CDR3 for alpha chain variable domain of TCR clone 3592 (TRAV8-6, TRAJ13)
CALGIYQKVTF

SEQ ID NO: 7184 - protein, 15 aa, Homo sapiens
  CDR3 for beta chain variable domain of TCR clone 3592 (TRBV5-1, TRBJ2-7)
CASSLNGGPAREQYF

SEQ ID NO: 7185 - protein, 15 aa, Homo sapiens
  CDR3 for alpha chain variable domain of TCR clone 3593 (TRAV3, TRAJ5)
CAVRDLDTGRRALTF

SEQ ID NO: 7186 - protein, 16 aa, Homo sapiens
  CDR3 for beta chain variable domain of TCR clone 3593 (TRBV20-1, TRBJ1-2)
CSASMGQGVANYGYTF

SEQ ID NO: 7187 - protein, 17 aa, Homo sapiens
  CDR3 for alpha chain variable domain of TCR clone 3594 (TRAV8-3, TRAJ10)
EASNTVILTGGGNKLTF

SEQ ID NO: 7188 - protein, 16 aa, Homo sapiens
  CDR3 for beta chain variable domain of TCR clone 3594 (TRBV7-9, TRBJ1-2)
CASSLGFSSGEDGYTF

SEQ ID NO: 7189 - protein, 11 aa, Homo sapiens
  CDR3 for alpha chain variable domain of TCR clone 3595 (TRAV1-1, TRAJ23)
CAVRQGGKLIF

SEQ ID NO: 7190 - protein, 13 aa, Homo sapiens
  CDR3 for beta chain variable domain of TCR clone 3595 (TRBV11-2, TRBJ2-5)
CASSRGPSETQYF

SEQ ID NO: 7191 - protein, 15 aa, Homo sapiens
  CDR3 for alpha chain variable domain of TCR clone 3596 (TRAV26-1, TRAJ40)
CIVSFATSGTYKYIF

SEQ ID NO: 7192 - protein, 15 aa, Homo sapiens
  CDR3 for beta chain variable domain of TCR clone 3596 (TRBV5-7, TRBJ2-3)
CASSPGLATTDTQYF

SEQ ID NO: 7193 - protein, 12 aa, Homo sapiens
  CDR3 for alpha chain variable domain of TCR clone 3597 (TRAV23/DV6, TRAJ53)
CAASKLGSGGSN

SEQ ID NO: 7194 - protein, 14 aa, Homo sapiens
  CDR3 for beta chain variable domain of TCR clone 3597 (TRBV7-9, TRBJ2-3)
CASSLEQGTNTQYF

SEQ ID NO: 7195 - protein, 14 aa, Homo sapiens
  CDR3 for alpha chain variable domain of TCR clone 3598 (TRAV12-1, TRAJ30)
CVVNIGGRDGKIIF

SEQ ID NO: 7196 - protein, 14 aa, Homo sapiens
  CDR3 for beta chain variable domain of TCR clone 3598 (TRBV7-6, TRBJ2-3)
CASSLGTVTDTQYF

SEQ ID NO: 7197 - protein, 13 aa, Homo sapiens
  CDR3 for alpha chain variable domain of TCR clone 3599 (TRAV3, TRAJ3)
CAVADSSASKIIF

SEQ ID NO: 7198 - protein, 16 aa, Homo sapiens
  CDR3 for beta chain variable domain of TCR clone 3599 (TRBV5-1, TRBJ2-3)
CASSLGLAVYTDTQYF

SEQ ID NO: 7199 - protein, 14 aa, Homo sapiens
  CDR3 for alpha chain variable domain of TCR clone 3600 (TRAV1-2, TRAJ16)
CAVNRFSDGQKLLF

SEQ ID NO: 7200 - protein, 15 aa, Homo sapiens
  CDR3 for beta chain variable domain of TCR clone 3600 (TRBV7-9, TRBJ2-2)
CASGPLDTFPGELFF

SEQ ID NO: 7201 - protein, 14 aa, Homo sapiens
  CDR3 for alpha chain variable domain of TCR clone 3601 (TRAV1-2, TRAJ16)
CAVNRFSDGQKLLF

SEQ ID NO: 7202 - protein, 14 aa, Homo sapiens
  CDR3 for beta chain variable domain of TCR clone 3601 (TRBV20-1, TRBJ1-5)
CSAPGTGVGQPQHF

SEQ ID NO: 7203 - protein, 10 aa, Homo sapiens
  CDR3 for alpha chain variable domain of TCR clone 3602 (TRAV13-1, TRAJ7)
LIGGNNRLAF

SEQ ID NO: 7204 - protein, 14 aa, Homo sapiens
  CDR3 for beta chain variable domain of TCR clone 3602 (TRBV16, TRBJ1-1)
CASSQAGPNTEAFF

SEQ ID NO: 7205 - protein, 15 aa, Homo sapiens
  CDR3 for alpha chain variable domain of TCR clone 3603 (TRAV8-4, TRAJ37)
CAVSRGSGNTGKLIF

SEQ ID NO: 7206 - protein, 15 aa, Homo sapiens
  CDR3 for beta chain variable domain of TCR clone 3603 (TRBV5-1, TRBJ2-7)
CASSLDLTSSYEQYF

SEQ ID NO: 7207 - protein, 10 aa, Homo sapiens
  CDR3 for alpha chain variable domain of TCR clone 3604 (TRAV36/DV7, TRAJ38)
CAANNRKLIW

SEQ ID NO: 7208 - protein, 15 aa, Homo sapiens
  CDR3 for beta chain variable domain of TCR clone 3604 (TRBV20-1, TRBJ2-7)
CSARDRVSGMDEQYF

SEQ ID NO: 7209 - protein, 13 aa, Homo sapiens
  CDR3 for alpha chain variable domain of TCR clone 3605 (TRAV3, TRAJ21)
CAVREPDFNKFYF

SEQ ID NO: 7210 - protein, 15 aa, Homo sapiens
  CDR3 for beta chain variable domain of TCR clone 3605 (TRBV20-1, TRBJ1-1)
CSASRGVTGNTEAFF

SEQ ID NO: 7211 - protein, 14 aa, Homo sapiens
  CDR3 for alpha chain variable domain of TCR clone 3606 (TRAV17, TRAJ56)
CATEDTGANSKLTF

SEQ ID NO: 7212 - protein, 16 aa, Homo sapiens
  CDR3 for beta chain variable domain of TCR clone 3606 (TRBV19, TRBJ2-1)
CASSIKLAGSYNEQFF

SEQ ID NO: 7213 - protein, 12 aa, Homo sapiens
  CDR3 for alpha chain variable domain of TCR clone 3607 (TRAV8-3, TRAJ26)
CAGDNYGQNFVF

SEQ ID NO: 7214 - protein, 13 aa, Homo sapiens
  CDR3 for beta chain variable domain of TCR clone 3607 (TRBV10-3, TRBJ2-7)
CASKLAVNYEQYF

SEQ ID NO: 7215 - protein, 14 aa, Homo sapiens
  CDR3 for alpha chain variable domain of TCR clone 3608 (TRAV12-1, TRAJ41)
CVVLNSNSGYALNF

SEQ ID NO: 7216 - protein, 14 aa, Homo sapiens
  CDR3 for beta chain variable domain of TCR clone 3608 (TRBV5-1, TRBJ2-7)
CASSRGESLYEQYF

SEQ ID NO: 7217 - protein, 14 aa, Homo sapiens
  CDR3 for alpha chain variable domain of TCR clone 3609 (TRAV8-4, TRAJ23)
CAVSAPGSGGKLIF

SEQ ID NO: 7218 - protein, 17 aa, Homo sapiens
  CDR3 for beta chain variable domain of TCR clone 3609 (TRBV4-3, TRBJ2-3)
CASSQDPLAGAVDTQYF

SEQ ID NO: 7219 - protein, 12 aa, Homo sapiens
  CDR3 for alpha chain variable domain of TCR clone 3610 (TRAV27, TRAJ41)
CAGRNSGYALNF

SEQ ID NO: 7220 - protein, 13 aa, Homo sapiens
  CDR3 for beta chain variable domain of TCR clone 3610 (TRBV12-4, TRBJ1-1)
CASSPGTGFEAFF

SEQ ID NO: 7221 - protein, 14 aa, Homo sapiens
  CDR3 for alpha chain variable domain of TCR clone 3611 (TRAV26-2, TRAJ31)
CILIPGNNNARPMF

SEQ ID NO: 7222 - protein, 16 aa, Homo sapiens
  CDR3 for beta chain variable domain of TCR clone 3611 (TRBV7-3, TRBJ2-1)
CASSLVSGSSNNEQFF

SEQ ID NO: 7223 - protein, 14 aa, Homo sapiens
  CDR3 for alpha chain variable domain of TCR clone 3612 (TRAV2, TRAJ21)
CAVEDLNNFNKFYF

SEQ ID NO: 7224 - protein, 11 aa, Homo sapiens
  CDR3 for beta chain variable domain of TCR clone 3612 (TRBV10-3, TRBJ2-1)
CAISDRGLQFF

SEQ ID NO: 7225 - protein, 14 aa, Homo sapiens
  CDR3 for alpha chain variable domain of TCR clone 3613 (TRAV21, TRAJ11)
CAVRRNSGYSTLTF

SEQ ID NO: 7226 - protein, 11 aa, Homo sapiens
  CDR3 for beta chain variable domain of TCR clone 3613 (TRBV11-2, TRBJ1-1)
CASSINTEAFF

SEQ ID NO: 7227 - protein, 14 aa, Homo sapiens
  CDR3 for alpha chain variable domain of TCR clone 3614 (TRAV21, TRAJ38)
CAVANAGNNRKLIW

SEQ ID NO: 7228 - protein, 16 aa, Homo sapiens
  CDR3 for beta chain variable domain of TCR clone 3614 (TRBV5-4, TRBJ2-1)
CASSLALAGAYNEQFF

SEQ ID NO: 7229 - protein, 15 aa, Homo sapiens
  CDR3 for alpha chain variable domain of TCR clone 3615 (TRAV8-4, TRAJ13)
CAVSDWGGGYQKVTF

SEQ ID NO: 7230 - protein, 15 aa, Homo sapiens
  CDR3 for beta chain variable domain of TCR clone 3615 (TRBV25-1, TRBJ1-4)
CASSPGDSTNEKLFF

SEQ ID NO: 7231 - protein, 12 aa, Homo sapiens
  CDR3 for alpha chain variable domain of TCR clone 3616 (TRAV13-1, TRAJ20)
CAASMGDYKLSF

SEQ ID NO: 7232 - protein, 14 aa, Homo sapiens
  CDR3 for beta chain variable domain of TCR clone 3616 (TRBV20-1, TRBJ2-5)
CSASDSGSGETQYF

SEQ ID NO: 7233 - protein, 12 aa, Homo sapiens
  CDR3 for alpha chain variable domain of TCR clone 3617 (TRAV12-3, TRAJ17)
CAMTLTGNKLTF

SEQ ID NO: 7234 - protein, 11 aa, Homo sapiens
  CDR3 for beta chain variable domain of TCR clone 3617 (TRBV11-2, TRBJ1-1)
CASSINTEAFF

SEQ ID NO: 7235 - protein, 23 aa, Homo sapiens
  CDR3 for alpha chain variable domain of TCR clone 3618 (TRAV12-2, TRAJ36)
SLLIRDSQPSDSATLERANNLFF

SEQ ID NO: 7236 - protein, 17 aa, Homo sapiens
  CDR3 for beta chain variable domain of TCR clone 3618 (TRBV3-1, TRBJ2-3)
CASSQLLDRGHTDTQYF

SEQ ID NO: 7237 - protein, 14 aa, Homo sapiens
  CDR3 for alpha chain variable domain of TCR clone 3619 (TRAV26-1, TRAJ49)
CIVRLTNTGNQFYF

SEQ ID NO: 7238 - protein, 13 aa, Homo sapiens
  CDR3 for beta chain variable domain of TCR clone 3619 (TRBV10-1, TRBJ1-1)
CASQGQTNTEAFF

SEQ ID NO: 7239 - protein, 11 aa, Homo sapiens
  CDR3 for alpha chain variable domain of TCR clone 3620 (TRAV21, TRAJ34)
CAVTNTDKLIF

SEQ ID NO: 7240 - protein, 13 aa, Homo sapiens
  CDR3 for beta chain variable domain of TCR clone 3620 (TRBV29-1, TRBJ1-3)
CSVEGGSGNTIYF

SEQ ID NO: 7241 - protein, 13 aa, Homo sapiens
  CDR3 for alpha chain variable domain of TCR clone 3621 (TRAV8-3, TRAJ5)
CAVGPRGRRALTF

SEQ ID NO: 7242 - protein, 16 aa, Homo sapiens
  CDR3 for beta chain variable domain of TCR clone 3621 (TRBV11-3, TRBJ2-3)
CASSPGGLLGTDTQYF

SEQ ID NO: 7243 - protein, 14 aa, Homo sapiens
  CDR3 for alpha chain variable domain of TCR clone 3622 (TRAV9-2, TRAJ39)
CALYIYNAGNMLTF

SEQ ID NO: 7244 - protein, 14 aa, Homo sapiens
  CDR3 for beta chain variable domain of TCR clone 3622 (TRBV19, TRBJ2-1)
CASPTFVLSGEQFF

SEQ ID NO: 7245 - protein, 16 aa, Homo sapiens
  CDR3 for alpha chain variable domain of TCR clone 3623 (TRAV3, TRAJ10)
CAVRDMRAGGGNKLTF

SEQ ID NO: 7246 - protein, 13 aa, Homo sapiens
  CDR3 for beta chain variable domain of TCR clone 3623 (TRBV12-4, TRBJ2-7)
CASSPTETYEQYF

SEQ ID NO: 7247 - protein, 12 aa, Homo sapiens
  CDR3 for alpha chain variable domain of TCR clone 3624 (TRAV2, TRAJ3)
CAVRSSASKIIF

SEQ ID NO: 7248 - protein, 15 aa, Homo sapiens
  CDR3 for beta chain variable domain of TCR clone 3624 (TRBV15, TRBJ2-5)
CATSRDGGPQETQYF

SEQ ID NO: 7249 - protein, 14 aa, Homo sapiens
  CDR3 for alpha chain variable domain of TCR clone 3625 (TRAV17, TRAJ57)
CATDPQGGSEKLVF

SEQ ID NO: 7250 - protein, 14 aa, Homo sapiens
  CDR3 for beta chain variable domain of TCR clone 3625 (TRBV11-2, TRBJ2-3)
CASSLGGGANTQYF

SEQ ID NO: 7251 - protein, 13 aa, Homo sapiens
  CDR3 for alpha chain variable domain of TCR clone 3626 (TRAV2, TRAJ40)
CTVVTSGTYKYIF

SEQ ID NO: 7252 - protein, 14 aa, Homo sapiens
  CDR3 for beta chain variable domain of TCR clone 3626 (TRBV19, TRBJ2-1)
CASPTFVLSGEQFF

SEQ ID NO: 7253 - protein, 15 aa, Homo sapiens
  CDR3 for alpha chain variable domain of TCR clone 3627 (TRAV14/DV4, TRAJ33)
CAMREGRDSNYQLIW

SEQ ID NO: 7254 - protein, 16 aa, Homo sapiens
  CDR3 for beta chain variable domain of TCR clone 3627 (TRBV12-5, TRBJ2-5)
CASGPRTSGNQETQYF

SEQ ID NO: 7255 - protein, 14 aa, Homo sapiens
  CDR3 for alpha chain variable domain of TCR clone 3628 (TRAV17, TRAJ57)
CATDPQGGSEKLVF

SEQ ID NO: 7256 - protein, 13 aa, Homo sapiens
  CDR3 for beta chain variable domain of TCR clone 3628 (TRBV10-3, TRBJ2-7)
CASKLAVNYEQYF

SEQ ID NO: 7257 - protein, 13 aa, Homo sapiens
  CDR3 for alpha chain variable domain of TCR clone 3629 (TRAV23/DV6, TRAJ21)
CAASREQLQQILL

SEQ ID NO: 7258 - protein, 16 aa, Homo sapiens
  CDR3 for beta chain variable domain of TCR clone 3629 (TRBV20-1, TRBJ2-3)
CSAVRDRGPIADTQYF

SEQ ID NO: 7259 - protein, 15 aa, Homo sapiens
  CDR3 for alpha chain variable domain of TCR clone 3630 (TRAV13-1, TRAJ17)
CAASIHGGCRQQANF

SEQ ID NO: 7260 - protein, 14 aa, Homo sapiens
  CDR3 for beta chain variable domain of TCR clone 3630 (TRBV20-1, TRBJ2-4)
CSARDRGQGGIQYF

SEQ ID NO: 7261 - protein, 14 aa, Homo sapiens
  CDR3 for alpha chain variable domain of TCR clone 3631 (TRAV12-1, TRAJ6)
CVVARIRRKLHTYI

SEQ ID NO: 7262 - protein, 15 aa, Homo sapiens
  CDR3 for beta chain variable domain of TCR clone 3631 (TRBV7-3, TRBJ2-1)
CASSLKASEYNERFF

SEQ ID NO: 7263 - protein, 14 aa, Homo sapiens
  CDR3 for alpha chain variable domain of TCR clone 3632 (TRAV8-4, TRAJ45)
CASGGGGGADGLTF

SEQ ID NO: 7264 - protein, 20 aa, Homo sapiens
  CDR3 for beta chain variable domain of TCR clone 3632 (TRBV4-3, TRBJ2-3)
CASSPRVEMRASGRPDTQYF

SEQ ID NO: 7265 - protein, 15 aa, Homo sapiens
  CDR3 for alpha chain variable domain of TCR clone 3633 (TRAV23/DV6, TRAJ4)
CAASPLRGGYNKLIF

SEQ ID NO: 7266 - protein, 15 aa, Homo sapiens
  CDR3 for beta chain variable domain of TCR clone 3633 (TRBV7-9, TRBJ1-6)
CASSSPGRGNSPLHF

SEQ ID NO: 7267 - protein, 14 aa, Homo sapiens
  CDR3 for alpha chain variable domain of TCR clone 3634 (TRAV20, TRAJ26)
CAVQAAIYGQNFVF

SEQ ID NO: 7268 - protein, 14 aa, Homo sapiens
  CDR3 for beta chain variable domain of TCR clone 3634 (TRBV27, TRBJ2-2)
CASSLGDTTGELFF

SEQ ID NO: 7269 - protein, 16 aa, Homo sapiens
  CDR3 for alpha chain variable domain of TCR clone 3635 (TRAV1-2, TRAJ10)
CAVRGVLTGGGNKLTF

SEQ ID NO: 7270 - protein, 13 aa, Homo sapiens
  CDR3 for beta chain variable domain of TCR clone 3635 (TRBV20-1, TRBJ1-6)
CSAPLGVGSPLHF

SEQ ID NO: 7271 - protein, 15 aa, Homo sapiens
  CDR3 for alpha chain variable domain of TCR clone 3636 (TRAV25, TRAJ52)
CAGRPGGTSYGKLTF

SEQ ID NO: 7272 - protein, 12 aa, Homo sapiens
  CDR3 for beta chain variable domain of TCR clone 3636 (TRBV7-8, TRBJ2-7)
CASSLGDREQYF

SEQ ID NO: 7273 - protein, 14 aa, Homo sapiens
  CDR3 for alpha chain variable domain of TCR clone 3637 (TRAV12-2, TRAJ45)
CAVNIGGGADGLTF

SEQ ID NO: 7274 - protein, 13 aa, Homo sapiens
  CDR3 for beta chain variable domain of TCR clone 3637 (TRBV19, TRBJ2-2)
CASGIWSTGELFF

SEQ ID NO: 7275 - protein, 14 aa, Homo sapiens
  CDR3 for alpha chain variable domain of TCR clone 3638 (TRAV8-4, TRAJ34)
CAVSDPGDTDKLIF

SEQ ID NO: 7276 - protein, 13 aa, Homo sapiens
  CDR3 for beta chain variable domain of TCR clone 3638 (TRBV7-9, TRBJ2-5)
CASLSPGQETQYF

SEQ ID NO: 7277 - protein, 14 aa, Homo sapiens
  CDR3 for alpha chain variable domain of TCR clone 3639 (TRAV12-2, TRAJ40)
CAVKIPSGTYKYIF

SEQ ID NO: 7278 - protein, 15 aa, Homo sapiens
  CDR3 for beta chain variable domain of TCR clone 3639 (TRBV11-3, TRBJ2-3)
CASLKDGREGDTQYF

SEQ ID NO: 7279 - protein, 14 aa, Homo sapiens
  CDR3 for alpha chain variable domain of TCR clone 3640 (TRAV1-2, TRAJ10)
CAVRVTGGGNKLTF

SEQ ID NO: 7280 - protein, 12 aa, Homo sapiens
  CDR3 for beta chain variable domain of TCR clone 3640 (TRBV5-4, TRBJ1-1)
CASSFGQTEAFF

SEQ ID NO: 7281 - protein, 16 aa, Homo sapiens
  CDR3 for alpha chain variable domain of TCR clone 3641 (TRAV13-2, TRAJ28)
CAEKSYSGAGSYQLTF

SEQ ID NO: 7282 - protein, 16 aa, Homo sapiens
  CDR3 for beta chain variable domain of TCR clone 3641 (TRBV19, TRBJ2-1)
CASSKAGPSSYNEQFF

SEQ ID NO: 7283 - protein, 15 aa, Homo sapiens
  CDR3 for alpha chain variable domain of TCR clone 3642 (TRAV12-2, TRAJ53)
CAVNGGGGSNYKLTF

SEQ ID NO: 7284 - protein, 14 aa, Homo sapiens
  CDR3 for beta chain variable domain of TCR clone 3642 (TRBV6-1, TRBJ1-3)
CASVQGGGGNTIYF

SEQ ID NO: 7285 - protein, 15 aa, Homo sapiens
  CDR3 for alpha chain variable domain of TCR clone 3643 (TRAV13-1, TRAJ32)
CAASNGWWCYKQAHL

SEQ ID NO: 7286 - protein, 15 aa, Homo sapiens
  CDR3 for beta chain variable domain of TCR clone 3643 (TRBV20-1, TRBJ1-2)
CSAIRTGAFNYGYTF

SEQ ID NO: 7287 - protein, 18 aa, Homo sapiens
  CDR3 for alpha chain variable domain of TCR clone 3644 (TRAV26-2, TRAJ45)
CILRVDKYSGGGADGLTF

SEQ ID NO: 7288 - protein, 17 aa, Homo sapiens
  CDR3 for beta chain variable domain of TCR clone 3644 (TRBV25-1, TRBJ2-1)
CASSAYGQGRGVYEQFF

SEQ ID NO: 7289 - protein, 14 aa, Homo sapiens
  CDR3 for alpha chain variable domain of TCR clone 3645 (TRAV12-2, TRAJ17)
CAVLFKAAGNKLTF

SEQ ID NO: 7290 - protein, 12 aa, Homo sapiens
  CDR3 for beta chain variable domain of TCR clone 3645 (TRBV29-1, TRBJ2-3)
CSVTGGADTQYF

SEQ ID NO: 7291 - protein, 13 aa, Homo sapiens
  CDR3 for alpha chain variable domain of TCR clone 3646 (TRAV2, TRAJ24)
CDLQLTAGGNSSL

SEQ ID NO: 7292 - protein, 13 aa, Homo sapiens
  CDR3 for beta chain variable domain of TCR clone 3646 (TRBV7-9, TRBJ1-2)
CASSLKQNYGYTF

SEQ ID NO: 7293 - protein, 12 aa, Homo sapiens
  CDR3 for alpha chain variable domain of TCR clone 3647 (TRAV27, TRAJ37)
CADSGSTGKLIF

SEQ ID NO: 7294 - protein, 18 aa, Homo sapiens
  CDR3 for beta chain variable domain of TCR clone 3647 (TRBV7-9, TRBJ1-1)
CASSKPWDTMGMNTEAFF

SEQ ID NO: 7295 - protein, 13 aa, Homo sapiens
  CDR3 for alpha chain variable domain of TCR clone 3648 (TRAV2, TRAJ40)
CAVVTSGTYKYIF

SEQ ID NO: 7296 - protein, 14 aa, Homo sapiens
  CDR3 for beta chain variable domain of TCR clone 3648 (TRBV19, TRBJ2-1)
CASLTFVLSGEQFF

SEQ ID NO: 7297 - protein, 16 aa, Homo sapiens
  CDR3 for alpha chain variable domain of TCR clone 3649 (TRAV3, TRAJ18)
CAVRDGRGSTLGRLYF

SEQ ID NO: 7298 - protein, 17 aa, Homo sapiens
  CDR3 for beta chain variable domain of TCR clone 3649 (TRBV5-1, TRBJ2-3)
CASSKIGLADRTDTQYF

SEQ ID NO: 7299 - protein, 13 aa, Homo sapiens
  CDR3 for alpha chain variable domain of TCR clone 3650 (TRAV1-2, TRAJ9)
CAALNTGGFKTIF

SEQ ID NO: 7300 - protein, 14 aa, Homo sapiens
  CDR3 for beta chain variable domain of TCR clone 3650 (TRBV7-3, TRBJ2-1)
CASSLAGGTNEQFF

SEQ ID NO: 7301 - protein, 15 aa, Homo sapiens
  CDR3 for alpha chain variable domain of TCR clone 3651 (TRAV35, TRAJ38)
CAGFSNAGNNRKLIW

SEQ ID NO: 7302 - protein, 18 aa, Homo sapiens
  CDR3 for beta chain variable domain of TCR clone 3651 (TRBV3-1, TRBJ1-2)
CASSQDVIGWNGDYGYTF

SEQ ID NO: 7303 - protein, 13 aa, Homo sapiens
  CDR3 for alpha chain variable domain of TCR clone 3652 (TRAV13-1, TRAJ21)
CAASIYNFNKFYF

SEQ ID NO: 7304 - protein, 15 aa, Homo sapiens
  CDR3 for beta chain variable domain of TCR clone 3652 (TRBV7-8, TRBJ1-5)
CASSLAGQPNQPQHF

SEQ ID NO: 7305 - protein, 14 aa, Homo sapiens
  CDR3 for alpha chain variable domain of TCR clone 3653 (TRAV26-2, TRAJ32)
CILFRGGATNKLIF

SEQ ID NO: 7306 - protein, 15 aa, Homo sapiens
  CDR3 for beta chain variable domain of TCR clone 3653 (TRBV2, TRBJ2-2)
CASSGFGAGTGELFF

SEQ ID NO: 7307 - protein, 12 aa, Homo sapiens
  CDR3 for alpha chain variable domain of TCR clone 3654 (TRAV13-1, TRAJ21)
CAAKEGFNKFYF

SEQ ID NO: 7308 - protein, 14 aa, Homo sapiens
  CDR3 for beta chain variable domain of TCR clone 3654 (TRBV7-2, TRBJ2-7)
CASSPKTSFYEQYF

SEQ ID NO: 7309 - protein, 15 aa, Homo sapiens
  CDR3 for alpha chain variable domain of TCR clone 3655 (TRAV23/DV6, TRAJ44)
CAARTLTGTASKLTF

SEQ ID NO: 7310 - protein, 17 aa, Homo sapiens
  CDR3 for beta chain variable domain of TCR clone 3655 (TRBV24-1, TRBJ2-1)
CATSDVSTSGTYNEQFF

SEQ ID NO: 7311 - protein, 15 aa, Homo sapiens
  CDR3 for alpha chain variable domain of TCR clone 3656 (TRAV10, TRAJ6)
CVVRPRTGGSYIPTF

SEQ ID NO: 7312 - protein, 15 aa, Homo sapiens
  CDR3 for beta chain variable domain of TCR clone 3656 (TRBV20-1, TRBJ2-7)
CSARDRVSGMDEQYF

SEQ ID NO: 7313 - protein, 15 aa, Homo sapiens
  CDR3 for alpha chain variable domain of TCR clone 3657 (TRAV8-6, TRAJ9)
CAVSDRDTGGFKTIF

SEQ ID NO: 7314 - protein, 16 aa, Homo sapiens
  CDR3 for beta chain variable domain of TCR clone 3657 (TRBV19, TRBJ2-3)
CASSPEWDRGTDTQYF

SEQ ID NO: 7315 - protein, 14 aa, Homo sapiens
  CDR3 for alpha chain variable domain of TCR clone 3658 (TRAV17, TRAJ57)
CATDPQGGSEKLVF

SEQ ID NO: 7316 - protein, 16 aa, Homo sapiens
  CDR3 for beta chain variable domain of TCR clone 3658 (TRBV13, TRBJ2-2)
CASSPRTGEHTGELFF

SEQ ID NO: 7317 - protein, 14 aa, Homo sapiens
  CDR3 for alpha chain variable domain of TCR clone 3659 (TRAV8-4, TRAJ37)
CAVSEPSNTGKLIF

SEQ ID NO: 7318 - protein, 14 aa, Homo sapiens
  CDR3 for beta chain variable domain of TCR clone 3659 (TRBV28, TRBJ2-1)
CAIHRTGARTEQFF

SEQ ID NO: 7319 - protein, 12 aa, Homo sapiens
  CDR3 for alpha chain variable domain of TCR clone 3660 (TRAV8-6, TRAJ57)
CAVQGGSEKLVF

SEQ ID NO: 7320 - protein, 11 aa, Homo sapiens
  CDR3 for beta chain variable domain of TCR clone 3660 (TRBV19, TRBJ1-1)
CASSIGSEAFF

SEQ ID NO: 7321 - protein, 13 aa, Homo sapiens
  CDR3 for alpha chain variable domain of TCR clone 3661 (TRAV3, TRAJ20)
CAVRDGGDYKLSF

SEQ ID NO: 7322 - protein, 16 aa, Homo sapiens
  CDR3 for beta chain variable domain of TCR clone 3661 (TRBV4-1, TRBJ2-5)
CASSQTSGGPLETQYF

SEQ ID NO: 7323 - protein, 12 aa, Homo sapiens
  CDR3 for alpha chain variable domain of TCR clone 3662 (TRAV12-2, TRAJ8)
CAVNTGFQKLVF

SEQ ID NO: 7324 - protein, 14 aa, Homo sapiens
  CDR3 for beta chain variable domain of TCR clone 3662 (TRBV20-1, TRBJ1-1)
CSAQTRIGGTEAFF

SEQ ID NO: 7325 - protein, 11 aa, Homo sapiens
  CDR3 for alpha chain variable domain of TCR clone 3663 (TRAV29/DV5, TRAJ47)
CAAQRGNKLVF

SEQ ID NO: 7326 - protein, 12 aa, Homo sapiens
  CDR3 for beta chain variable domain of TCR clone 3663 (TRBV11-2, TRBJ2-7)
CASSLPTYEQYF

SEQ ID NO: 7327 - protein, 14 aa, Homo sapiens
  CDR3 for alpha chain variable domain of TCR clone 3664 (TRAV1-2, TRAJ16)
CAVNRFSDGQKLLF

SEQ ID NO: 7328 - protein, 15 aa, Homo sapiens
  CDR3 for beta chain variable domain of TCR clone 3664 (TRBV28, TRBJ1-3)
CASGATGNSGNTIYF

SEQ ID NO: 7329 - protein, 16 aa, Homo sapiens
  CDR3 for alpha chain variable domain of TCR clone 3665 (TRAV12-2, TRAJ52)
CRLANAGGTSYGKLTF

SEQ ID NO: 7330 - protein, 14 aa, Homo sapiens
  CDR3 for beta chain variable domain of TCR clone 3665 (TRBV7-6, TRBJ2-3)
CASSLGTVTDTQYF

SEQ ID NO: 7331 - protein, 13 aa, Homo sapiens
  CDR3 for alpha chain variable domain of TCR clone 3666 (TRAV26-2, TRAJ37)
CIRGSSNTGKLIF

SEQ ID NO: 7332 - protein, 16 aa, Homo sapiens
  CDR3 for beta chain variable domain of TCR clone 3666 (TRBV7-2, TRBJ2-5)
CASSPGGARRGETQYF

SEQ ID NO: 7333 - protein, 13 aa, Homo sapiens
  CDR3 for alpha chain variable domain of TCR clone 3667 (TRAV21, TRAJ27)
CAARPGNAGKSTF

SEQ ID NO: 7334 - protein, 13 aa, Homo sapiens
  CDR3 for beta chain variable domain of TCR clone 3667 (TRBV20-1, TRBJ1-1)
CSARGGGNTEAFF

SEQ ID NO: 7335 - protein, 17 aa, Homo sapiens
  CDR3 for alpha chain variable domain of TCR clone 3668 (TRAV3, TRAJ6)
CAVRDGPRAGGSYIPTF

SEQ ID NO: 7336 - protein, 15 aa, Homo sapiens
  CDR3 for beta chain variable domain of TCR clone 3668 (TRBV7-6, TRBJ2-3)
CASSPIIYSTDTQYF

SEQ ID NO: 7337 - protein, 14 aa, Homo sapiens
  CDR3 for alpha chain variable domain of TCR clone 3669 (TRAV29/DV5, TRAJ20)
CAASAPIEDYKLSF

SEQ ID NO: 7338 - protein, 15 aa, Homo sapiens
  CDR3 for beta chain variable domain of TCR clone 3669 (TRBV6-1, TRBJ2-1)
CASSEAAYSYNEQFF

SEQ ID NO: 7339 - protein, 14 aa, Homo sapiens
  CDR3 for alpha chain variable domain of TCR clone 3670 (TRAV2, TRAJ37)
CAVDFTSNTGKLIF

SEQ ID NO: 7340 - protein, 12 aa, Homo sapiens
  CDR3 for beta chain variable domain of TCR clone 3670 (TRBV29-1, TRBJ2-3)
CSVTGGADTQYF

SEQ ID NO: 7341 - protein, 17 aa, Homo sapiens
  CDR3 for alpha chain variable domain of TCR clone 3671 (TRAV14/DV4, TRAJ28)
CAMREVSSGAGSYQLTF

SEQ ID NO: 7342 - protein, 15 aa, Homo sapiens
  CDR3 for beta chain variable domain of TCR clone 3671 (TRBV11-2, TRBJ1-6)
CASTLRETGNSPLHF

SEQ ID NO: 7343 - protein, 13 aa, Homo sapiens
  CDR3 for alpha chain variable domain of TCR clone 3672 (TRAV23/DV6, TRAJ58)
CAASEIGGSRLTF

SEQ ID NO: 7344 - protein, 15 aa, Homo sapiens
  CDR3 for beta chain variable domain of TCR clone 3672 (TRBV19, TRBJ1-1)
CASTSGQIQNTEAFF

SEQ ID NO: 7345 - protein, 16 aa, Homo sapiens
  CDR3 for alpha chain variable domain of TCR clone 3673 (TRAV1-2, TRAJ10)
CAVGGVLTGGGNKLTF

SEQ ID NO: 7346 - protein, 12 aa, Homo sapiens
  CDR3 for beta chain variable domain of TCR clone 3673 (TRBV7-8, TRBJ2-7)
CASSLGDREQYF

SEQ ID NO: 7347 - protein, 12 aa, Homo sapiens
  CDR3 for alpha chain variable domain of TCR clone 3674 (TRAV27, TRAJ41)
CAGRNSGYALNF

SEQ ID NO: 7348 - protein, 15 aa, Homo sapiens
  CDR3 for beta chain variable domain of TCR clone 3674 (TRBV6-3, TRBJ2-7)
CASSSPGTVFYEQYF

SEQ ID NO: 7349 - protein, 14 aa, Homo sapiens
  CDR3 for alpha chain variable domain of TCR clone 3675 (TRAV13-1, TRAJ32)
CAARGSGATNKLIF

SEQ ID NO: 7350 - protein, 15 aa, Homo sapiens
  CDR3 for beta chain variable domain of TCR clone 3675 (TRBV5-5, TRBJ1-1)
CASSLVGKDNTEAFF

SEQ ID NO: 7351 - protein, 15 aa, Homo sapiens
  CDR3 for alpha chain variable domain of TCR clone 3676 (TRAV8-3, TRAJ45)
RASSYSGGGADGLTF

SEQ ID NO: 7352 - protein, 13 aa, Homo sapiens
  CDR3 for beta chain variable domain of TCR clone 3676 (TRBV10-3, TRBJ2-7)
CASKLAVNYEQYF

SEQ ID NO: 7353 - protein, 12 aa, Homo sapiens
  CDR3 for alpha chain variable domain of TCR clone 3677 (TRAV1-1, TRAJ8)
CAGGTGFQKLVF

SEQ ID NO: 7354 - protein, 15 aa, Homo sapiens
  CDR3 for beta chain variable domain of TCR clone 3677 (TRBV20-1, TRBJ2-7)
CSARDRVSGMDEQYF

SEQ ID NO: 7355 - protein, 13 aa, Homo sapiens
  CDR3 for alpha chain variable domain of TCR clone 3678 (TRAV13-2, TRAJ53)
CAENMGGNYKLTF

SEQ ID NO: 7356 - protein, 13 aa, Homo sapiens
  CDR3 for beta chain variable domain of TCR clone 3678 (TRBV4-1, TRBJ2-2)
CASSQENTGELFF

SEQ ID NO: 7357 - protein, 14 aa, Homo sapiens
  CDR3 for alpha chain variable domain of TCR clone 3679 (TRAV13-2, TRAJ29)
CAEGTFETNTPLVF

SEQ ID NO: 7358 - protein, 13 aa, Homo sapiens
  CDR3 for beta chain variable domain of TCR clone 3679 (TRBV2, TRBJ1-1)
CASNLLRNTEAFF

SEQ ID NO: 7359 - protein, 13 aa, Homo sapiens
  CDR3 for alpha chain variable domain of TCR clone 3680 (TRAV39, TRAJ49)
CAVDRNTGNQFYF

SEQ ID NO: 7360 - protein, 14 aa, Homo sapiens
  CDR3 for beta chain variable domain of TCR clone 3680 (TRBV4-1, TRBJ1-1)
CASSRSGQSFEAFF

SEQ ID NO: 7361 - protein, 10 aa, Homo sapiens
  CDR3 for alpha chain variable domain of TCR clone 3681 (TRAV36/DV7, TRAJ48)
CAVGNEKLTF

SEQ ID NO: 7362 - protein, 15 aa, Homo sapiens
  CDR3 for beta chain variable domain of TCR clone 3681 (TRBV6-5, TRBJ1-4)
CASSSVGGAGEKLFF

SEQ ID NO: 7363 - protein, 10 aa, Homo sapiens
  CDR3 for alpha chain variable domain of TCR clone 3682 (TRAV29/DV5, TRAJ48)
CAAGGEKLTF

SEQ ID NO: 7364 - protein, 14 aa, Homo sapiens
  CDR3 for beta chain variable domain of TCR clone 3682 (TRBV7-9, TRBJ2-5)
CASSLAPDQETQYF

SEQ ID NO: 7365 - protein, 13 aa, Homo sapiens
  CDR3 for alpha chain variable domain of TCR clone 3683 (TRAV12-2, TRAJ37)
CAGGSGNTGKLIF

SEQ ID NO: 7366 - protein, 17 aa, Homo sapiens
  CDR3 for beta chain variable domain of TCR clone 3683 (TRBV11-2, TRBJ2-1)
CASSLYPPGVEYNEQFF

SEQ ID NO: 7367 - protein, 10 aa, Homo sapiens
  CDR3 for alpha chain variable domain of TCR clone 3684 (TRAV12-3, TRAJ34)
CAMSADKLIF

SEQ ID NO: 7368 - protein, 15 aa, Homo sapiens
  CDR3 for beta chain variable domain of TCR clone 3684 (TRBV27, TRBJ2-1)
CASSNGGGSSNEQFF

SEQ ID NO: 7369 - protein, 19 aa, Homo sapiens
  CDR3 for alpha chain variable domain of TCR clone 3685 (TRAV2, TRAJ20)
ILQVREADAAVYRDCKLSF

SEQ ID NO: 7370 - protein, 16 aa, Homo sapiens
  CDR3 for beta chain variable domain of TCR clone 3685 (TRBV5-1, TRBJ2-5)
CASSLALLRAGETQYF

SEQ ID NO: 7371 - protein, 13 aa, Homo sapiens
  CDR3 for alpha chain variable domain of TCR clone 3686 (TRAV17, TRAJ5)
CAPMDTGRRALTF

SEQ ID NO: 7372 - protein, 14 aa, Homo sapiens
  CDR3 for beta chain variable domain of TCR clone 3686 (TRBV29-1, TRBJ2-7)
CSVDQRQASYEQYF

SEQ ID NO: 7373 - protein, 14 aa, Homo sapiens
  CDR3 for alpha chain variable domain of TCR clone 3687 (TRAV1-2, TRAJ13)
CAVKHSGGYQKVTF

SEQ ID NO: 7374 - protein, 12 aa, Homo sapiens
  CDR3 for beta chain variable domain of TCR clone 3687 (TRBV7-3, TRBJ2-5)
CASSSPGGTQYF

SEQ ID NO: 7375 - protein, 14 aa, Homo sapiens
  CDR3 for alpha chain variable domain of TCR clone 3688 (TRAV3, TRAJ6)
CAVRDWGGSYIPTF

SEQ ID NO: 7376 - protein, 15 aa, Homo sapiens
  CDR3 for beta chain variable domain of TCR clone 3688 (TRBV5-1, TRBJ2-1)
CASSPPRAPYNEQFF

SEQ ID NO: 7377 - protein, 14 aa, Homo sapiens
  CDR3 for alpha chain variable domain of TCR clone 3689 (TRAV14/DV4, TRAJ42)
CPRGSLRSQGNLIF

SEQ ID NO: 7378 - protein, 18 aa, Homo sapiens
  CDR3 for beta chain variable domain of TCR clone 3689 (TRBV20-1, TRBJ2-3)
CSASGLAGGPGTTDTQYF

SEQ ID NO: 7379 - protein, 14 aa, Homo sapiens
  CDR3 for alpha chain variable domain of TCR clone 3690 (TRAV23/DV6, TRAJ22)
CADISSGSARQLTF

SEQ ID NO: 7380 - protein, 16 aa, Homo sapiens
  CDR3 for beta chain variable domain of TCR clone 3690 (TRBV5-7, TRBJ2-5)
CASIRGQTGYQETQYF

SEQ ID NO: 7381 - protein, 13 aa, Homo sapiens
  CDR3 for alpha chain variable domain of TCR clone 3691 (TRAV12-1, TRAJ17)
CVVSKAAGNKLTF

SEQ ID NO: 7382 - protein, 17 aa, Homo sapiens
  CDR3 for beta chain variable domain of TCR clone 3691 (TRBV4-1, TRBJ2-5)
CASSQDPSGGPQETQYF

SEQ ID NO: 7383 - protein, 15 aa, Homo sapiens
  CDR3 for alpha chain variable domain of TCR clone 3692 (TRAV13-1, TRAJ10)
CAAEVVTGGGNKLTF

SEQ ID NO: 7384 - protein, 13 aa, Homo sapiens
  CDR3 for beta chain variable domain of TCR clone 3692 (TRBV28, TRBJ2-5)
CAGVSRGEETQYF

SEQ ID NO: 7385 - protein, 14 aa, Homo sapiens
  CDR3 for alpha chain variable domain of TCR clone 3693 (TRAV26-1, TRAJ38)
CIADNAGNNRKLIW

SEQ ID NO: 7386 - protein, 15 aa, Homo sapiens
  CDR3 for beta chain variable domain of TCR clone 3693 (TRBV27, TRBJ2-1)
CASSNGGGSSNEQFF

SEQ ID NO: 7387 - protein, 16 aa, Homo sapiens
  CDR3 for alpha chain variable domain of TCR clone 3694 (TRAV30, TRAJ24)
CGTEIVDADSWGKFQF

SEQ ID NO: 7388 - protein, 14 aa, Homo sapiens
  CDR3 for beta chain variable domain of TCR clone 3694 (TRBV12-5, TRBJ2-5)
CAGGSRTHQETQYF

SEQ ID NO: 7389 - protein, 13 aa, Homo sapiens
  CDR3 for alpha chain variable domain of TCR clone 3695 (TRAV6, TRAJ23)
CALDQNQGGKLIF

SEQ ID NO: 7390 - protein, 15 aa, Homo sapiens
  CDR3 for beta chain variable domain of TCR clone 3695 (TRBV28, TRBJ1-2)
CASSGSEQRAFGYTF

SEQ ID NO: 7391 - protein, 13 aa, Homo sapiens
  CDR3 for alpha chain variable domain of TCR clone 3696 (TRAV3, TRAJ3)
CAVRALGASKIIF

SEQ ID NO: 7392 - protein, 18 aa, Homo sapiens
  CDR3 for beta chain variable domain of TCR clone 3696 (TRBV12-4, TRBJ2-5)
CASSPSGGRDPVLRARHA

SEQ ID NO: 7393 - protein, 16 aa, Homo sapiens
  CDR3 for alpha chain variable domain of TCR clone 3697 (TRAV30, TRAJ24)
CGTEIVDADSWGKFQF

SEQ ID NO: 7394 - protein, 14 aa, Homo sapiens
  CDR3 for beta chain variable domain of TCR clone 3697 (TRBV12-5, TRBJ2-5)
CASGSRTHQEAQYF

SEQ ID NO: 7395 - protein, 11 aa, Homo sapiens
  CDR3 for alpha chain variable domain of TCR clone 3698 (TRAV29/DV5, TRAJ47)
CAATYGNKLVF

SEQ ID NO: 7396 - protein, 17 aa, Homo sapiens
  CDR3 for beta chain variable domain of TCR clone 3698 (TRBV7-9, TRBJ2-1)
CASSLVASYPSYNEQFF

SEQ ID NO: 7397 - protein, 11 aa, Homo sapiens
  CDR3 for alpha chain variable domain of TCR clone 3699 (TRAV2, TRAJ33)
CAVDSNYQLIW

SEQ ID NO: 7398 - protein, 17 aa, Homo sapiens
  CDR3 for beta chain variable domain of TCR clone 3699 (TRBV20-1, TRBJ2-3)
CSARDGWNAKERDTQYF

SEQ ID NO: 7399 - protein, 10 aa, Homo sapiens
  CDR3 for alpha chain variable domain of TCR clone 3700 (TRAV30, TRAJ34)
CGTNPDKLIF

SEQ ID NO: 7400 - protein, 12 aa, Homo sapiens
  CDR3 for beta chain variable domain of TCR clone 3700 (TRBV19, TRBJ1-1)
CASSLSDTEAFF

SEQ ID NO: 7401 - protein, 14 aa, Homo sapiens
  CDR3 for alpha chain variable domain of TCR clone 3701 (TRAV12-3, TRAJ10)
SHLPLTGGGNKLTF

SEQ ID NO: 7402 - protein, 13 aa, Homo sapiens
  CDR3 for beta chain variable domain of TCR clone 3701 (TRBV7-9, TRBJ1-2)
CASSLKQNYGYTF

SEQ ID NO: 7403 - protein, 14 aa, Homo sapiens
  CDR3 for alpha chain variable domain of TCR clone 3702 (TRAV12-2, TRAJ13)
CAVKKTGGYQKVTF

SEQ ID NO: 7404 - protein, 13 aa, Homo sapiens
  CDR3 for beta chain variable domain of TCR clone 3702 (TRBV19, TRBJ1-2)
CASSVPGQDGYTF

SEQ ID NO: 7405 - protein, 13 aa, Homo sapiens
  CDR3 for alpha chain variable domain of TCR clone 3703 (TRAV17, TRAJ5)
CAPMDTGRRALTF

SEQ ID NO: 7406 - protein, 16 aa, Homo sapiens
  CDR3 for beta chain variable domain of TCR clone 3703 (TRBV27, TRBJ2-7)
CASSSERRDSAYEQYF

SEQ ID NO: 7407 - protein, 13 aa, Homo sapiens
  CDR3 for alpha chain variable domain of TCR clone 3704 (TRAV10, TRAJ40)
CVVSALGTYKYIF

SEQ ID NO: 7408 - protein, 13 aa, Homo sapiens
  CDR3 for beta chain variable domain of TCR clone 3704 (TRBV20-1, TRBJ2-3)
CSARLAGTDTQYF

SEQ ID NO: 7409 - protein, 13 aa, Homo sapiens
  CDR3 for alpha chain variable domain of TCR clone 3705 (TRAV2, TRAJ40)
CAVVTSGTYKYIF

SEQ ID NO: 7410 - protein, 16 aa, Homo sapiens
  CDR3 for beta chain variable domain of TCR clone 3705 (TRBV7-3, TRBJ2-1)
CASSLEGYRSYNEQFF

SEQ ID NO: 7411 - protein, 11 aa, Homo sapiens
  CDR3 for alpha chain variable domain of TCR clone 3706 (TRAV12-2, TRAJ29)
CAVTLRSPLVF

SEQ ID NO: 7412 - protein, 16 aa, Homo sapiens
  CDR3 for beta chain variable domain of TCR clone 3706 (TRBV29-1, TRBJ2-2)
CSVETRASGNTGELFF

SEQ ID NO: 7413 - protein, 16 aa, Homo sapiens
  CDR3 for alpha chain variable domain of TCR clone 3707 (TRAV23/DV6, TRAJ9)
CAASIGGNTGGFKTIF

SEQ ID NO: 7414 - protein, 12 aa, Homo sapiens
  CDR3 for beta chain variable domain of TCR clone 3707 (TRBV11-2, TRBJ2-1)
CASSVQREGQFF

SEQ ID NO: 7415 - protein, 16 aa, Homo sapiens
  CDR3 for alpha chain variable domain of TCR clone 3708 (TRAV3, TRAJ37)
CAVRGKGSGNTGKLIF

SEQ ID NO: 7416 - protein, 12 aa, Homo sapiens
  CDR3 for beta chain variable domain of TCR clone 3708 (TRBV12-4, TRBJ2-3)
CASSTLPDTQYF

SEQ ID NO: 7417 - protein, 14 aa, Homo sapiens
  CDR3 for alpha chain variable domain of TCR clone 3709 (TRAV1-2, TRAJ8)
CAVREDTGFQKLVF

SEQ ID NO: 7418 - protein, 15 aa, Homo sapiens
  CDR3 for beta chain variable domain of TCR clone 3709 (TRBV10-2, TRBJ2-6)
CASSEQGTGANVLTF

SEQ ID NO: 7419 - protein, 14 aa, Homo sapiens
  CDR3 for alpha chain variable domain of TCR clone 3710 (TRAV1-1, TRAJ30)
CAVRSLNRDDKIIF

SEQ ID NO: 7420 - protein, 14 aa, Homo sapiens
  CDR3 for beta chain variable domain of TCR clone 3710 (TRBV7-8, TRBJ2-3)
CASSLEAGTDTQYF

SEQ ID NO: 7421 - protein, 14 aa, Homo sapiens
  CDR3 for alpha chain variable domain of TCR clone 3711 (TRAV8-4, TRAJ9)
CAVRINTGGFKTIF

SEQ ID NO: 7422 - protein, 14 aa, Homo sapiens
  CDR3 for beta chain variable domain of TCR clone 3711 (TRBV5-1, TRBJ1-1)
CASSLQGASTEAFF

SEQ ID NO: 7423 - protein, 18 aa, Homo sapiens
  CDR3 for alpha chain variable domain of TCR clone 3712 (TRAV21, TRAJ52)
CAVRPSPAGGTSYGKLTF

SEQ ID NO: 7424 - protein, 13 aa, Homo sapiens
  CDR3 for beta chain variable domain of TCR clone 3712 (TRBV10-3, TRBJ2-1)
CAISEFSGREQFF

SEQ ID NO: 7425 - protein, 14 aa, Homo sapiens
  CDR3 for alpha chain variable domain of TCR clone 3713 (TRAV12-2, TRAJ45)
CAVNIGGGADGLTF

SEQ ID NO: 7426 - protein, 17 aa, Homo sapiens
  CDR3 for beta chain variable domain of TCR clone 3713 (TRBV20-1, TRBJ2-2)
CSASGSGQGGLTGELFF

SEQ ID NO: 7427 - protein, 17 aa, Homo sapiens
  CDR3 for alpha chain variable domain of TCR clone 3714 (TRAV3, TRAJ6)
CAVRDGPRAGGSYIPTS

SEQ ID NO: 7428 - protein, 14 aa, Homo sapiens
  CDR3 for beta chain variable domain of TCR clone 3714 (TRBV7-2, TRBJ2-7)
CASSPKTSFYEQYF

SEQ ID NO: 7429 - protein, 12 aa, Homo sapiens
  CDR3 for alpha chain variable domain of TCR clone 3715 (TRAV2, TRAJ29)
CAVDSGNTPLVF

SEQ ID NO: 7430 - protein, 14 aa, Homo sapiens
  CDR3 for beta chain variable domain of TCR clone 3715 (TRBV7-8, TRBJ2-7)
CASSLRGSSYEQYF

SEQ ID NO: 7431 - protein, 13 aa, Homo sapiens
  CDR3 for alpha chain variable domain of TCR clone 3716 (TRAV21, TRAJ24)
GLMTTDSWGKLQF

SEQ ID NO: 7432 - protein, 12 aa, Homo sapiens
  CDR3 for beta chain variable domain of TCR clone 3716 (TRBV11-2, TRBJ2-7)
CASSPPADEQYF

SEQ ID NO: 7433 - protein, 13 aa, Homo sapiens
  CDR3 for alpha chain variable domain of TCR clone 3717 (TRAV17, TRAJ7)
CATDNYGNNRLAF

SEQ ID NO: 7434 - protein, 13 aa, Homo sapiens
  CDR3 for beta chain variable domain of TCR clone 3717 (TRBV27, TRBJ2-1)
CASSSGSYNEQFF

SEQ ID NO: 7435 - protein, 13 aa, Homo sapiens
  CDR3 for alpha chain variable domain of TCR clone 3718 (TRAV1-1, TRAJ10)
CAVNSGGYQKVTF

SEQ ID NO: 7436 - protein, 12 aa, Homo sapiens
  CDR3 for beta chain variable domain of TCR clone 3718 (TRBV28, TRBJ2-1)
CASSVQINEQFF

SEQ ID NO: 7437 - protein, 16 aa, Homo sapiens
  CDR3 for alpha chain variable domain of TCR clone 3719 (TRAV17, TRAJ35)
CATAEGGIGFGNVLHC

SEQ ID NO: 7438 - protein, 19 aa, Homo sapiens
  CDR3 for beta chain variable domain of TCR clone 3719 (TRBV19, TRBJ2-5)
CASSIGQVTDFFLGETQYF

SEQ ID NO: 7439 - protein, 14 aa, Homo sapiens
  CDR3 for alpha chain variable domain of TCR clone 3720 (TRAV27, TRAJ13)
CRSSNSGGYQKVTF

SEQ ID NO: 7440 - protein, 12 aa, Homo sapiens
  CDR3 for beta chain variable domain of TCR clone 3720 (TRBV14, TRBJ2-5)
CASSQLKETQYF

SEQ ID NO: 7441 - protein, 15 aa, Homo sapiens
  CDR3 for alpha chain variable domain of TCR clone 3721 (TRAV13-1, TRAJ17)
CAASIERAAGNKLTF

SEQ ID NO: 7442 - protein, 14 aa, Homo sapiens
  CDR3 for beta chain variable domain of TCR clone 3721 (TRBV4-1, TRBJ2-2)
CASSQAVNTGELFF

SEQ ID NO: 7443 - protein, 13 aa, Homo sapiens
  CDR3 for alpha chain variable domain of TCR clone 3722 (TRAV1-2, TRAJ24)
CAVRADSWGKFQF

SEQ ID NO: 7444 - protein, 13 aa, Homo sapiens
  CDR3 for beta chain variable domain of TCR clone 3722 (TRBV20-1, TRBJ2-1)
CSATGLAGDEQFF

SEQ ID NO: 7445 - protein, 11 aa, Homo sapiens
  CDR3 for alpha chain variable domain of TCR clone 3723 (TRAV2, TRAJ13)
CASGGYQKVTF

SEQ ID NO: 7446 - protein, 20 aa, Homo sapiens
  CDR3 for beta chain variable domain of TCR clone 3723 (TRBV7-8, TRBJ2-2)
CASSHLFPGPTIHITGELFF

SEQ ID NO: 7447 - protein, 16 aa, Homo sapiens
  CDR3 for alpha chain variable domain of TCR clone 3724 (TRAV26-1, TRAJ38)
CIVRPLNAGNNRKLIW

SEQ ID NO: 7448 - protein, 13 aa, Homo sapiens
  CDR3 for beta chain variable domain of TCR clone 3724 (TRBV18, TRBJ1-1)
CASSPNGDTEAFF

SEQ ID NO: 7449 - protein, 12 aa, Homo sapiens
  CDR3 for alpha chain variable domain of TCR clone 3725 (TRAV12-3, TRAJ17)
CAITLTGNKLTF

SEQ ID NO: 7450 - protein, 15 aa, Homo sapiens
  CDR3 for beta chain variable domain of TCR clone 3725 (TRBV20-1, TRBJ2-7)
CSARDRVSGMDEQYF

SEQ ID NO: 7451 - protein, 12 aa, Homo sapiens
  CDR3 for alpha chain variable domain of TCR clone 3726 (TRAV12-3, TRAJ17)
CAMTLTGNKLTF

SEQ ID NO: 7452 - protein, 13 aa, Homo sapiens
  CDR3 for beta chain variable domain of TCR clone 3726 (TRBV9, TRBJ2-2)
CASSPRPAGELFF

SEQ ID NO: 7453 - protein, 11 aa, Homo sapiens
  CDR3 for alpha chain variable domain of TCR clone 3727 (TRAV13-1, TRAJ40)
CAVSGTYKYIF

SEQ ID NO: 7454 - protein, 16 aa, Homo sapiens
  CDR3 for beta chain variable domain of TCR clone 3727 (TRBV10-3, TRBJ2-3)
CAISVSRLALTDTQYF

SEQ ID NO: 7455 - protein, 16 aa, Homo sapiens
  CDR3 for alpha chain variable domain of TCR clone 3728 (TRAV3, TRAJ37)
CAVRGKGSGNTGKLIF

SEQ ID NO: 7456 - protein, 15 aa, Homo sapiens
  CDR3 for beta chain variable domain of TCR clone 3728 (TRBV5-1, TRBJ2-7)
CASSLNGGPAREQYF

SEQ ID NO: 7457 - protein, 20 aa, Homo sapiens
  CDR3 for alpha chain variable domain of TCR clone 3729 (TRAV14/DV4, TRAJ22)
CAMREGPFSISSGSARQLTF

SEQ ID NO: 7458 - protein, 13 aa, Homo sapiens
  CDR3 for beta chain variable domain of TCR clone 3729 (TRBV4-2, TRBJ2-3)
CASSQDWQHTQYF

SEQ ID NO: 7459 - protein, 14 aa, Homo sapiens
  CDR3 for alpha chain variable domain of TCR clone 3730 (TRAV1-2, TRAJ8)
CAVREDTGFQKLVF

SEQ ID NO: 7460 - protein, 18 aa, Homo sapiens
  CDR3 for beta chain variable domain of TCR clone 3730 (TRBV11-2, TRBJ2-3)
CASSLGGASRGAPNTQYF

SEQ ID NO: 7461 - protein, 12 aa, Homo sapiens
  CDR3 for alpha chain variable domain of TCR clone 3731 (TRAV2, TRAJ9)
CAVGAGGFKTIF

SEQ ID NO: 7462 - protein, 11 aa, Homo sapiens
  CDR3 for beta chain variable domain of TCR clone 3731 (TRBV13, TRBJ2-2)
CASSPRTGEHT

SEQ ID NO: 7463 - protein, 17 aa, Homo sapiens
  CDR3 for alpha chain variable domain of TCR clone 3732 (TRAV26-2, TRAJ42)
CILRDESYGGSQGNLIF

SEQ ID NO: 7464 - protein, 15 aa, Homo sapiens
  CDR3 for beta chain variable domain of TCR clone 3732 (TRBV6-6, TRBJ2-7)
CASSYSYGGSYEQYF

SEQ ID NO: 7465 - protein, 14 aa, Homo sapiens
  CDR3 for alpha chain variable domain of TCR clone 3733 (TRAV23/DV6, TRAJ37)
CAASTSSNTGKLIF

SEQ ID NO: 7466 - protein, 15 aa, Homo sapiens
  CDR3 for beta chain variable domain of TCR clone 3733 (TRBV7-9, TRBJ2-7)
CASSPGGGLTYEQYF

SEQ ID NO: 7467 - protein, 13 aa, Homo sapiens
  CDR3 for alpha chain variable domain of TCR clone 3734 (TRAV13-1, TRAJ8)
CAASIRGFQKLVF

SEQ ID NO: 7468 - protein, 14 aa, Homo sapiens
  CDR3 for beta chain variable domain of TCR clone 3734 (TRBV7-2, TRBJ2-1)
CASSLVQGRNEQFF

SEQ ID NO: 7469 - protein, 14 aa, Homo sapiens
  CDR3 for alpha chain variable domain of TCR clone 3735 (TRAV1-2, TRAJ16)
CAVNRFSDGQKLLF

SEQ ID NO: 7470 - protein, 14 aa, Homo sapiens
  CDR3 for beta chain variable domain of TCR clone 3735 (TRBV7-9, TRBJ1-4)
CAITEGEANEKLFF

SEQ ID NO: 7471 - protein, 13 aa, Homo sapiens
  CDR3 for alpha chain variable domain of TCR clone 3736 (TRAV27, TRAJ45)
CRGGGGGADGLTF

SEQ ID NO: 7472 - protein, 13 aa, Homo sapiens
  CDR3 for beta chain variable domain of TCR clone 3736 (TRBV20-1, TRBJ1-1)
CSAPEGGNTEAFF

SEQ ID NO: 7473 - protein, 16 aa, Homo sapiens
  CDR3 for alpha chain variable domain of TCR clone 3737 (TRAV12-3, TRAJ53)
CAMSPGSGGSNYKLTF

SEQ ID NO: 7474 - protein, 16 aa, Homo sapiens
  CDR3 for beta chain variable domain of TCR clone 3737 (TRBV7-9, TRBJ1-2)
CASSLGFSSGEDGYTF

SEQ ID NO: 7475 - protein, 14 aa, Homo sapiens
  CDR3 for alpha chain variable domain of TCR clone 3738 (TRAV1-2, TRAJ8)
CAVREDTGFQKLVF

SEQ ID NO: 7476 - protein, 14 aa, Homo sapiens
  CDR3 for beta chain variable domain of TCR clone 3738 (TRBV7-3, TRBJ2-1)
CASSLAGGTNEQFF

SEQ ID NO: 7477 - protein, 12 aa, Homo sapiens
  CDR3 for alpha chain variable domain of TCR clone 3739 (TRAV21, TRAJ42)
CAVGGSQGNLIF

SEQ ID NO: 7478 - protein, 19 aa, Homo sapiens
  CDR3 for beta chain variable domain of TCR clone 3739 (TRBV5-1, TRBJ2-3)
CASSLTRIAADWSTDTQYF

SEQ ID NO: 7479 - protein, 13 aa, Homo sapiens
  CDR3 for alpha chain variable domain of TCR clone 3740 (TRAV2, TRAJ40)
CAVVTSGTYKYIF

SEQ ID NO: 7480 - protein, 15 aa, Homo sapiens
  CDR3 for beta chain variable domain of TCR clone 3740 (TRBV27, TRBJ2-1)
CASSNGGGSSNEQFF

SEQ ID NO: 7481 - protein, 13 aa, Homo sapiens
  CDR3 for alpha chain variable domain of TCR clone 3741 (TRAV8-3, TRAJ44)
CAVVPGTASKLTF

SEQ ID NO: 7482 - protein, 12 aa, Homo sapiens
  CDR3 for beta chain variable domain of TCR clone 3741 (TRBV7-8, TRBJ2-7)
CASSLGDREQYF

SEQ ID NO: 7483 - protein, 12 aa, Homo sapiens
  CDR3 for alpha chain variable domain of TCR clone 3742 (TRAV2, TRAJ31)
CAVEDNNARLMF

SEQ ID NO: 7484 - protein, 14 aa, Homo sapiens
  CDR3 for beta chain variable domain of TCR clone 3742 (TRBV19, TRBJ2-5)
CASSMTGQQETQYF

SEQ ID NO: 7485 - protein, 14 aa, Homo sapiens
  CDR3 for alpha chain variable domain of TCR clone 3743 (TRAV1-2, TRAJ16)
CAVNRFSDGQKLLF

SEQ ID NO: 7486 - protein, 17 aa, Homo sapiens
  CDR3 for beta chain variable domain of TCR clone 3743 (TRBV28, TRBJ2-5)
CASSRQGGLAGAETQYF

SEQ ID NO: 7487 - protein, 14 aa, Homo sapiens
  CDR3 for alpha chain variable domain of TCR clone 3744 (TRAV1-2, TRAJ16)
CAVRGFSDGQKLLF

SEQ ID NO: 7488 - protein, 16 aa, Homo sapiens
  CDR3 for beta chain variable domain of TCR clone 3744 (TRBV20-1, TRBJ2-1)
CSARDHLAGGRGEQFF

SEQ ID NO: 7489 - protein, 10 aa, Homo sapiens
  CDR3 for alpha chain variable domain of TCR clone 3745 (TRAV30, TRAJ16)
CGTGGQKLLF

SEQ ID NO: 7490 - protein, 14 aa, Homo sapiens
  CDR3 for beta chain variable domain of TCR clone 3745 (TRBV6-1, TRBJ1-2)
CASSTGWPPTGYTF

SEQ ID NO: 7491 - protein, 13 aa, Homo sapiens
  CDR3 for alpha chain variable domain of TCR clone 3746 (TRAV8-4, TRAJ36)
CAVSEGGANNLFF

SEQ ID NO: 7492 - protein, 12 aa, Homo sapiens
  CDR3 for beta chain variable domain of TCR clone 3746 (TRBV28, TRBJ2-7)
CASTGNHYEQYF

SEQ ID NO: 7493 - protein, 13 aa, Homo sapiens
  CDR3 for alpha chain variable domain of TCR clone 3747 (TRAV12-2, TRAJ12)
CAGPEDSSYKLIF

SEQ ID NO: 7494 - protein, 13 aa, Homo sapiens
  CDR3 for beta chain variable domain of TCR clone 3747 (TRBV28, TRBJ2-1)
CASSLIGRDEQFF

SEQ ID NO: 7495 - protein, 12 aa, Homo sapiens
  CDR3 for alpha chain variable domain of TCR clone 3748 (TRAV25, TRAJ45)
DYSGGGADGLTF

SEQ ID NO: 7496 - protein, 19 aa, Homo sapiens
  CDR3 for beta chain variable domain of TCR clone 3748 (TRBV28, TRBJ2-7)
CASSYSGTSRLGWVYEQYF

SEQ ID NO: 7497 - protein, 17 aa, Homo sapiens
  CDR3 for alpha chain variable domain of TCR clone 3749 (TRAV3, TRAJ13)
CAVRDMRRTGGYQKVTF

SEQ ID NO: 7498 - protein, 14 aa, Homo sapiens
  CDR3 for beta chain variable domain of TCR clone 3749 (TRBV5-1, TRBJ2-7)
CASSLTGSGYEQYF

SEQ ID NO: 7499 - protein, 14 aa, Homo sapiens
  CDR3 for alpha chain variable domain of TCR clone 3750 (TRAV8-4, TRAJ16)
CAVSPVGRWPEAAL

SEQ ID NO: 7500 - protein, 15 aa, Homo sapiens
  CDR3 for beta chain variable domain of TCR clone 3750 (TRBV7-3, TRBJ1-6)
CASSLGRGAGSPLHF

SEQ ID NO: 7501 - protein, 13 aa, Homo sapiens
  CDR3 for alpha chain variable domain of TCR clone 3751 (TRAV20, TRAJ9)
CAVPDTGGFKTIF

SEQ ID NO: 7502 - protein, 14 aa, Homo sapiens
  CDR3 for beta chain variable domain of TCR clone 3751 (TRBV7-2, TRBJ2-5)
CASSPRGSSETQYF

SEQ ID NO: 7503 - protein, 14 aa, Homo sapiens
  CDR3 for alpha chain variable domain of TCR clone 3752 (TRAV1-2, TRAJ16)
CAVNRFSDGQKLLF

SEQ ID NO: 7504 - protein, 13 aa, Homo sapiens
  CDR3 for beta chain variable domain of TCR clone 3752 (TRBV20-1, TRBJ1-1)
CSARAGGNTEAFF

SEQ ID NO: 7505 - protein, 14 aa, Homo sapiens
  CDR3 for alpha chain variable domain of TCR clone 3753 (TRAV13-1, TRAJ17)
LSSRSKAAGNKLTF

SEQ ID NO: 7506 - protein, 14 aa, Homo sapiens
  CDR3 for beta chain variable domain of TCR clone 3753 (TRBV7-9, TRBJ2-1)
CASSSMVGFGEQFF

SEQ ID NO: 7507 - protein, 14 aa, Homo sapiens
  CDR3 for alpha chain variable domain of TCR clone 3754 (TRAV17, TRAJ22)
CATVLSGSARQLTF

SEQ ID NO: 7508 - protein, 13 aa, Homo sapiens
  CDR3 for beta chain variable domain of TCR clone 3754 (TRBV15, TRBJ1-6)
CATSGGLNSPLHF

SEQ ID NO: 7509 - protein, 13 aa, Homo sapiens
  CDR3 for alpha chain variable domain of TCR clone 3755 (TRAV2, TRAJ40)
CAVVTSGTYKYIF

SEQ ID NO: 7510 - protein, 14 aa, Homo sapiens
  CDR3 for beta chain variable domain of TCR clone 3755 (TRBV7-2, TRBJ1-1)
CASSFLTGTTEAFF

SEQ ID NO: 7511 - protein, 11 aa, Homo sapiens
  CDR3 for alpha chain variable domain of TCR clone 3756 (TRAV27, TRAJ40)
SLTSGTYKYIF

SEQ ID NO: 7512 - protein, 12 aa, Homo sapiens
  CDR3 for beta chain variable domain of TCR clone 3756 (TRBV18, TRBJ2-3)
CQLNQNTDTQYF

SEQ ID NO: 7513 - protein, 14 aa, Homo sapiens
  CDR3 for alpha chain variable domain of TCR clone 3757 (TRAV26-1, TRAJ45)
CIVREGGGADGLTF

SEQ ID NO: 7514 - protein, 14 aa, Homo sapiens
  CDR3 for beta chain variable domain of TCR clone 3757 (TRBV2, TRBJ1-2)
CASNEGTGPYGYTF

SEQ ID NO: 7515 - protein, 16 aa, Homo sapiens
  CDR3 for alpha chain variable domain of TCR clone 3758 (TRAV16, TRAJ42)
CARKMNYGGSQGNLIF

SEQ ID NO: 7516 - protein, 14 aa, Homo sapiens
  CDR3 for beta chain variable domain of TCR clone 3758 (TRBV14, TRBJ2-3)
CQQPDDRDTDTQYF

SEQ ID NO: 7517 - protein, 12 aa, Homo sapiens
  CDR3 for alpha chain variable domain of TCR clone 3759 (TRAV35, TRAJ40)
CAGRAGTYKYIF

SEQ ID NO: 7518 - protein, 14 aa, Homo sapiens
  CDR3 for beta chain variable domain of TCR clone 3759 (TRBV7-2, TRBJ1-3)
CASSRGGTGNTIYF

SEQ ID NO: 7519 - protein, 12 aa, Homo sapiens
  CDR3 for alpha chain variable domain of TCR clone 3760 (TRAV17, TRAJ43)
CATDAFPADMRF

SEQ ID NO: 7520 - protein, 14 aa, Homo sapiens
  CDR3 for beta chain variable domain of TCR clone 3760 (TRBV20-1, TRBJ2-3)
CSARDGGSTDTQYF

SEQ ID NO: 7521 - protein, 16 aa, Homo sapiens
  CDR3 for alpha chain variable domain of TCR clone 3761 (TRAV16, TRAJ42)
CALSGYYGGSQGNLIF

SEQ ID NO: 7522 - protein, 14 aa, Homo sapiens
  CDR3 for beta chain variable domain of TCR clone 3761 (TRBV3-1, TRBJ2-5)
CASSQAVRQETQYF

SEQ ID NO: 7523 - protein, 14 aa, Homo sapiens
  CDR3 for alpha chain variable domain of TCR clone 3762 (TRAV1-2, TRAJ16)
CAVNRFSDGQKLLF

SEQ ID NO: 7524 - protein, 15 aa, Homo sapiens
  CDR3 for beta chain variable domain of TCR clone 3762 (TRBV6-1, TRBJ2-3)
CASSERGGITDTQYF

SEQ ID NO: 7525 - protein, 13 aa, Homo sapiens
  CDR3 for alpha chain variable domain of TCR clone 3763 (TRAV27, TRAJ6)
CAGGTRGSYIPTF

SEQ ID NO: 7526 - protein, 15 aa, Homo sapiens
  CDR3 for beta chain variable domain of TCR clone 3763 (TRBV5-7, TRBJ2-7)
CASSLGPGRGHEQYF

SEQ ID NO: 7527 - protein, 14 aa, Homo sapiens
  CDR3 for alpha chain variable domain of TCR clone 3764 (TRAV12-2, TRAJ13)
CAVKKTGGYQKVTF

SEQ ID NO: 7528 - protein, 17 aa, Homo sapiens
  CDR3 for beta chain variable domain of TCR clone 3764 (TRBV15, TRBJ2-4)
CATSRDNPQTGLDIQYF

SEQ ID NO: 7529 - protein, 16 aa, Homo sapiens
  CDR3 for alpha chain variable domain of TCR clone 3765 (TRAV26-1, TRAJ36)
CIVRVSYQTGANNLFF

SEQ ID NO: 7530 - protein, 13 aa, Homo sapiens
  CDR3 for beta chain variable domain of TCR clone 3765 (TRBV5-5, TRBJ1-5)
CASSLGIGGDQHF

SEQ ID NO: 7531 - protein, 13 aa, Homo sapiens
  CDR3 for alpha chain variable domain of TCR clone 3766 (TRAV20, TRAJ3)
CARRYSSASKIIF

SEQ ID NO: 7532 - protein, 12 aa, Homo sapiens
  CDR3 for beta chain variable domain of TCR clone 3766 (TRBV28, TRBJ2-1)
CASSFRGNEQFF

SEQ ID NO: 7533 - protein, 15 aa, Homo sapiens
  CDR3 for alpha chain variable domain of TCR clone 3767 (TRAV34, TRAJ36)
CGAPSRLGGANNLFF

SEQ ID NO: 7534 - protein, 16 aa, Homo sapiens
  CDR3 for beta chain variable domain of TCR clone 3767 (TRBV4-3, TRBJ2-1)
CASSYRRLGSWDEQFF

SEQ ID NO: 7535 - protein, 14 aa, Homo sapiens
  CDR3 for alpha chain variable domain of TCR clone 3768 (TRAV9-2, TRAJ39)
CALYIYNAGNMLTF

SEQ ID NO: 7536 - protein, 13 aa, Homo sapiens
  CDR3 for beta chain variable domain of TCR clone 3768 (TRBV11-3, TRBJ1-1)
CASSRQPNTEAFF

SEQ ID NO: 7537 - protein, 12 aa, Homo sapiens
  CDR3 for alpha chain variable domain of TCR clone 3769 (TRAV3, TRAJ43)
CAVRDPNNDMRF

SEQ ID NO: 7538 - protein, 14 aa, Homo sapiens
  CDR3 for beta chain variable domain of TCR clone 3769 (TRBV5-1, TRBJ2-3)
CASSLFGPTDTQYF

SEQ ID NO: 7539 - protein, 14 aa, Homo sapiens
  CDR3 for alpha chain variable domain of TCR clone 3770 (TRAV2, TRAJ9)
CAVEDRSGGFKTIF

SEQ ID NO: 7540 - protein, 15 aa, Homo sapiens
  CDR3 for beta chain variable domain of TCR clone 3770 (TRBV19, TRBJ2-1)
CASSHRDRGPNEQFF

SEQ ID NO: 7541 - protein, 14 aa, Homo sapiens
  CDR3 for alpha chain variable domain of TCR clone 3771 (TRAV1-2, TRAJ8)
CAVREDTGFQKLVF

SEQ ID NO: 7542 - protein, 15 aa, Homo sapiens
  CDR3 for beta chain variable domain of TCR clone 3771 (TRBV11-3, TRBJ2-1)
CASSLGDSSHNEQFF

SEQ ID NO: 7543 - protein, 14 aa, Homo sapiens
  CDR3 for alpha chain variable domain of TCR clone 3772 (TRAV1-2, TRAJ16)
CAVNRFSDGQKLLF

SEQ ID NO: 7544 - protein, 17 aa, Homo sapiens
  CDR3 for beta chain variable domain of TCR clone 3772 (TRBV20-1, TRBJ2-2)
CSASGSGQGGLTGELFF

SEQ ID NO: 7545 - protein, 13 aa, Homo sapiens
  CDR3 for alpha chain variable domain of TCR clone 3773 (TRAV12-2, TRAJ24)
CAVSTDSWGKLQF

SEQ ID NO: 7546 - protein, 15 aa, Homo sapiens
  CDR3 for beta chain variable domain of TCR clone 3773 (TRBV7-2, TRBJ2-2)
CASSPTGANTGELFF

SEQ ID NO: 7547 - protein, 15 aa, Homo sapiens
  CDR3 for alpha chain variable domain of TCR clone 3774 (TRAV29/DV5, TRAJ24)
CAASGATDSWGKFQF

SEQ ID NO: 7548 - protein, 14 aa, Homo sapiens
  CDR3 for beta chain variable domain of TCR clone 3774 (TRBV12-5, TRBJ2-5)
CASGSRTHQETQYF

SEQ ID NO: 7549 - protein, 14 aa, Homo sapiens
  CDR3 for alpha chain variable domain of TCR clone 3775 (TRAV25, TRAJ6)
CAGRESGGSYIPTF

SEQ ID NO: 7550 - protein, 13 aa, Homo sapiens
  CDR3 for beta chain variable domain of TCR clone 3775 (TRBV12-4, TRBJ2-7)
CASSLSGVYEQYF

SEQ ID NO: 7551 - protein, 11 aa, Homo sapiens
  CDR3 for alpha chain variable domain of TCR clone 3776 (TRAV2, TRAJ13)
CASGGYQKVTF

SEQ ID NO: 7552 - protein, 14 aa, Homo sapiens
  CDR3 for beta chain variable domain of TCR clone 3776 (TRBV18, TRBJ1-2)
CASSPDRVVYGYTF

SEQ ID NO: 7553 - protein, 16 aa, Homo sapiens
  CDR3 for alpha chain variable domain of TCR clone 3777 (TRAV3, TRAJ10)
CAVRDMRAGGGNKLTF

SEQ ID NO: 7554 - protein, 14 aa, Homo sapiens
  CDR3 for beta chain variable domain of TCR clone 3777 (TRBV6-1, TRBJ1-3)
CASVQGGGGNTIYF

SEQ ID NO: 7555 - protein, 13 aa, Homo sapiens
  CDR3 for alpha chain variable domain of TCR clone 3778 (TRAV3, TRAJ21)
CAVREPDFNKFYF

SEQ ID NO: 7556 - protein, 14 aa, Homo sapiens
  CDR3 for beta chain variable domain of TCR clone 3778 (TRBV4-2, TRBJ2-1)
CASGLDRAYNEQFF

SEQ ID NO: 7557 - protein, 11 aa, Homo sapiens
  CDR3 for alpha chain variable domain of TCR clone 3779 (TRAV13-1, TRAJ20)
CAASNDYKLSF

SEQ ID NO: 7558 - protein, 15 aa, Homo sapiens
  CDR3 for beta chain variable domain of TCR clone 3779 (TRBV6-3, TRBJ2-7)
CASSSPGTVFYEQYF

SEQ ID NO: 7559 - protein, 14 aa, Homo sapiens
  CDR3 for alpha chain variable domain of TCR clone 3780 (TRAV12-2, TRAJ45)
CAVYSGGGADGLTF

SEQ ID NO: 7560 - protein, 15 aa, Homo sapiens
  CDR3 for beta chain variable domain of TCR clone 3780 (TRBV4-1, TRBJ1-4)
CASSDTGGTNEKLFF

SEQ ID NO: 7561 - protein, 14 aa, Homo sapiens
  CDR3 for alpha chain variable domain of TCR clone 3781 (TRAV12-3, TRAJ10)
SHLPLTGGGNKLTF

SEQ ID NO: 7562 - protein, 13 aa, Homo sapiens
  CDR3 for beta chain variable domain of TCR clone 3781 (TRBV20-1, TRBJ2-2)
CSASAAGTGELFF

SEQ ID NO: 7563 - protein, 12 aa, Homo sapiens
  CDR3 for alpha chain variable domain of TCR clone 3782 (TRAV17, TRAJ20)
CATLANDYKLSF

SEQ ID NO: 7564 - protein, 14 aa, Homo sapiens
  CDR3 for beta chain variable domain of TCR clone 3782 (TRBV10-3, TRBJ1-2)
CAISEDTPYYGYTF

SEQ ID NO: 7565 - protein, 16 aa, Homo sapiens
  CDR3 for alpha chain variable domain of TCR clone 3783 (TRAV4, TRAJ9)
CLVGDPNRPGGFKTIF

SEQ ID NO: 7566 - protein, 14 aa, Homo sapiens
  CDR3 for beta chain variable domain of TCR clone 3783 (TRBV20-1, TRBJ1-1)
CSAQTRIGGTEAFF

SEQ ID NO: 7567 - protein, 14 aa, Homo sapiens
  CDR3 for alpha chain variable domain of TCR clone 3784 (TRAV12-1, TRAJ12)
CVVTRMDSSYKLIF

SEQ ID NO: 7568 - protein, 13 aa, Homo sapiens
  CDR3 for beta chain variable domain of TCR clone 3784 (TRBV20-1, TRBJ1-1)
CSARGGGNTETFF

SEQ ID NO: 7569 - protein, 12 aa, Homo sapiens
  CDR3 for alpha chain variable domain of TCR clone 3785 (TRAV16, TRAJ10)
CSRTGGGNKLTF

SEQ ID NO: 7570 - protein, 14 aa, Homo sapiens
  CDR3 for beta chain variable domain of TCR clone 3785 (TRBV7-2, TRBJ2-1)
CASSLGVGYNEQFF

SEQ ID NO: 7571 - protein, 17 aa, Homo sapiens
  CDR3 for alpha chain variable domain of TCR clone 3786 (TRAV3, TRAJ6)
CAVRDGPRAGGSYIPTF

SEQ ID NO: 7572 - protein, 15 aa, Homo sapiens
  CDR3 for beta chain variable domain of TCR clone 3786 (TRBV7-9, TRBJ1-6)
CASSSPGRGNSPLHF

SEQ ID NO: 7573 - protein, 11 aa, Homo sapiens
  CDR3 for alpha chain variable domain of TCR clone 3787 (TRAV13-1, TRAJ39)
CASHAGNMLTF

SEQ ID NO: 7574 - protein, 15 aa, Homo sapiens
  CDR3 for beta chain variable domain of TCR clone 3787 (TRBV6-3, TRBJ2-7)
CASSSPGTVFYEQYF

SEQ ID NO: 7575 - protein, 13 aa, Homo sapiens
  CDR3 for alpha chain variable domain of TCR clone 3788 (TRAV3, TRAJ27)
CAVRPLGAGKSTF

SEQ ID NO: 7576 - protein, 15 aa, Homo sapiens
  CDR3 for beta chain variable domain of TCR clone 3788 (TRBV9, TRBJ1-6)
CASSVAGTGDSPLHF

SEQ ID NO: 7577 - protein, 14 aa, Homo sapiens
  CDR3 for alpha chain variable domain of TCR clone 3789 (TRAV12-2, TRAJ33)
CAVKRARSNYQLIW

SEQ ID NO: 7578 - protein, 14 aa, Homo sapiens
  CDR3 for beta chain variable domain of TCR clone 3789 (TRBV13, TRBJ2-7)
CASSLKGASYEQYF

SEQ ID NO: 7579 - protein, 11 aa, Homo sapiens
  CDR3 for alpha chain variable domain of TCR clone 3790 (TRAV13-2, TRAJ26)
CAEIPGQNFVF

SEQ ID NO: 7580 - protein, 19 aa, Homo sapiens
  CDR3 for beta chain variable domain of TCR clone 3790 (TRBV19, TRBJ2-2)
CASTRPGLAGGRVTGELFF

SEQ ID NO: 7581 - protein, 15 aa, Homo sapiens
  CDR3 for alpha chain variable domain of TCR clone 3791 (TRAV12-3, TRAJ6)
CAMSATTGGSYIPTF

SEQ ID NO: 7582 - protein, 16 aa, Homo sapiens
  CDR3 for beta chain variable domain of TCR clone 3791 (TRBV27, TRBJ2-5)
CASSFGPGGTKETQYF

SEQ ID NO: 7583 - protein, 12 aa, Homo sapiens
  CDR3 for alpha chain variable domain of TCR clone 3792 (TRAV12-3, TRAJ5)
CAMDTGRRALTF

SEQ ID NO: 7584 - protein, 14 aa, Homo sapiens
  CDR3 for beta chain variable domain of TCR clone 3792 (TRBV20-1, TRBJ2-1)
CSAQIGGSANEQFF

SEQ ID NO: 7585 - protein, 14 aa, Homo sapiens
  CDR3 for alpha chain variable domain of TCR clone 3793 (TRAV13-2, TRAJ26)
CAENLGNYGQNFVF

SEQ ID NO: 7586 - protein, 14 aa, Homo sapiens
  CDR3 for beta chain variable domain of TCR clone 3793 (TRBV19, TRBJ1-3)
CASNRGNSGNTIYF

SEQ ID NO: 7587 - protein, 14 aa, Homo sapiens
  CDR3 for alpha chain variable domain of TCR clone 3794 (TRAV12-3, TRAJ10)
SHLPLTGGGNKLTF

SEQ ID NO: 7588 - protein, 15 aa, Homo sapiens
  CDR3 for beta chain variable domain of TCR clone 3794 (TRBV13, TRBJ2-1)
CASSLLSGLNNEQFF

SEQ ID NO: 7589 - protein, 15 aa, Homo sapiens
  CDR3 for alpha chain variable domain of TCR clone 3795 (TRAV3, TRAJ22)
CAVRDRGGSARQLTF

SEQ ID NO: 7590 - protein, 15 aa, Homo sapiens
  CDR3 for beta chain variable domain of TCR clone 3795 (TRBV19, TRBJ2-5)
CASSIVRASQETQYF

SEQ ID NO: 7591 - protein, 19 aa, Homo sapiens
  CDR3 for alpha chain variable domain of TCR clone 3796 (TRAV2, TRAJ20)
ILQVREADAAVYRDCKLSF

SEQ ID NO: 7592 - protein, 18 aa, Homo sapiens
  CDR3 for beta chain variable domain of TCR clone 3796 (TRBV20-1, TRBJ2-3)
CSASGLAGGPGTTDTQYF

SEQ ID NO: 7593 - protein, 12 aa, Homo sapiens
  CDR3 for alpha chain variable domain of TCR clone 3797 (TRAV12-1, TRAJ40)
CVVYSGTYKYIF

SEQ ID NO: 7594 - protein, 15 aa, Homo sapiens
  CDR3 for beta chain variable domain of TCR clone 3797 (TRBV27, TRBJ1-6)
CASSFDRGLGSPLHF

SEQ ID NO: 7595 - protein, 15 aa, Homo sapiens
  CDR3 for alpha chain variable domain of TCR clone 3798 (TRAV1-2, TRAJ17)
CAVRGYGAAGNKLTF

SEQ ID NO: 7596 - protein, 23 aa, Homo sapiens
  CDR3 for beta chain variable domain of TCR clone 3798 (TRBV11-2, TRBJ2-5)
CASSSPGGEGAASRDPVLRARHA

SEQ ID NO: 7597 - protein, 18 aa, Homo sapiens
  CDR3 for alpha chain variable domain of TCR clone 3799 (TRAV13-1, TRAJ52)
CAAKNPNAGGTSYGKLTF

SEQ ID NO: 7598 - protein, 14 aa, Homo sapiens
  CDR3 for beta chain variable domain of TCR clone 3799 (TRBV4-1, TRBJ2-2)
CASSQAVNTGELFF

SEQ ID NO: 7599 - protein, 12 aa, Homo sapiens
  CDR3 for alpha chain variable domain of TCR clone 3800 (TRAV25, TRAJ7)
CAGSYGNNRLAF

SEQ ID NO: 7600 - protein, 12 aa, Homo sapiens
  CDR3 for beta chain variable domain of TCR clone 3800 (TRBV5-1, TRBJ1-2)
CASSQDTYGYTF

SEQ ID NO: 7601 - protein, 15 aa, Homo sapiens
  CDR3 for alpha chain variable domain of TCR clone 3801 (TRAV2, TRAJ13)
CATPSYSGGYQKVTF

SEQ ID NO: 7602 - protein, 14 aa, Homo sapiens
  CDR3 for beta chain variable domain of TCR clone 3801 (TRBV4-2, TRBJ2-1)
CASGLDRAYNEQFF

SEQ ID NO: 7603 - protein, 15 aa, Homo sapiens
  CDR3 for alpha chain variable domain of TCR clone 3802 (TRAV35, TRAJ42)
CAGQGYGGSQGNLIF

SEQ ID NO: 7604 - protein, 13 aa, Homo sapiens
  CDR3 for beta chain variable domain of TCR clone 3802 (TRBV7-2, TRBJ1-1)
CASSLVQGAEAFF

SEQ ID NO: 7605 - protein, 12 aa, Homo sapiens
  CDR3 for alpha chain variable domain of TCR clone 3803 (TRAV12-3, TRAJ17)
CAMTLTGNKLTF

SEQ ID NO: 7606 - protein, 14 aa, Homo sapiens
  CDR3 for beta chain variable domain of TCR clone 3803 (TRBV7-2, TRBJ2-7)
CASRSQGAAYEQYF

SEQ ID NO: 7607 - protein, 15 aa, Homo sapiens
  CDR3 for alpha chain variable domain of TCR clone 3804 (TRAV13-1, TRAJ17)
CAASIERAAGNKLTF

SEQ ID NO: 7608 - protein, 14 aa, Homo sapiens
  CDR3 for beta chain variable domain of TCR clone 3804 (TRBV7-9, TRBJ2-1)
CASSPRDSLYEQFF

SEQ ID NO: 7609 - protein, 13 aa, Homo sapiens
  CDR3 for alpha chain variable domain of TCR clone 3805 (TRAV35, TRAJ42)
CAGFPGSQGDLIF

SEQ ID NO: 7610 - protein, 14 aa, Homo sapiens
  CDR3 for beta chain variable domain of TCR clone 3805 (TRBV4-1, TRBJ2-2)
CASSQAVNTGELFF

SEQ ID NO: 7611 - protein, 14 aa, Homo sapiens
  CDR3 for alpha chain variable domain of TCR clone 3806 (TRAV2, TRAJ9)
CAVEDRSGGFKTIF

SEQ ID NO: 7612 - protein, 14 aa, Homo sapiens
  CDR3 for beta chain variable domain of TCR clone 3806 (TRBV28, TRBJ2-7)
CASTFYGRAHEQYF

SEQ ID NO: 7613 - protein, 15 aa, Homo sapiens
  CDR3 for alpha chain variable domain of TCR clone 3807 (TRAV27, TRAJ38)
CAARRNAGNNRKLIW

SEQ ID NO: 7614 - protein, 14 aa, Homo sapiens
  CDR3 for beta chain variable domain of TCR clone 3807 (TRBV7-2, TRBJ2-7)
CASSPRDGAYEQYF

SEQ ID NO: 7615 - protein, 15 aa, Homo sapiens
  CDR3 for alpha chain variable domain of TCR clone 3808 (TRAV26-1, TRAJ22)
CIVRVSFWFCKATDL

SEQ ID NO: 7616 - protein, 14 aa, Homo sapiens
  CDR3 for beta chain variable domain of TCR clone 3808 (TRBV18, TRBJ2-7)
CASSPRGGAYEQYF

SEQ ID NO: 7617 - protein, 14 aa, Homo sapiens
  CDR3 for alpha chain variable domain of TCR clone 3809 (TRAV16, TRAJ32)
CALKSGGATNKLIF

SEQ ID NO: 7618 - protein, 17 aa, Homo sapiens
  CDR3 for beta chain variable domain of TCR clone 3809 (TRBV20-1, TRBJ2-1)
CSASSSGLAGSYNEQFF

SEQ ID NO: 7619 - protein, 13 aa, Homo sapiens
  CDR3 for alpha chain variable domain of TCR clone 3810 (TRAV8-6, TRAJ49)
CAVITNTGNQFYF

SEQ ID NO: 7620 - protein, 13 aa, Homo sapiens
  CDR3 for beta chain variable domain of TCR clone 3810 (TRBV10-3, TRBJ2-7)
CASKLAVNYEQYF

SEQ ID NO: 7621 - protein, 17 aa, Homo sapiens
  CDR3 for alpha chain variable domain of TCR clone 3811 (TRAV4, TRAJ13)
CLVGVQGSSGGYQKVTF

SEQ ID NO: 7622 - protein, 16 aa, Homo sapiens
  CDR3 for beta chain variable domain of TCR clone 3811 (TRBV28, TRBJ2-7)
CASSLFFETGGPEQYF

SEQ ID NO: 7623 - protein, 14 aa, Homo sapiens
  CDR3 for alpha chain variable domain of TCR clone 3812 (TRAV1-2, TRAJ16)
CAVNRFSDGQKLLF

SEQ ID NO: 7624 - protein, 14 aa, Homo sapiens
  CDR3 for beta chain variable domain of TCR clone 3812 (TRBV7-9, TRBJ2-1)
CASSPRDSLYEQFF

SEQ ID NO: 7625 - protein, 14 aa, Homo sapiens
  CDR3 for alpha chain variable domain of TCR clone 3813 (TRAV9-2, TRAJ39)
CALYIYNAGNMLTF

SEQ ID NO: 7626 - protein, 12 aa, Homo sapiens
  CDR3 for beta chain variable domain of TCR clone 3813 (TRBV11-2, TRBJ2-2)
CASSLGGGELFF

SEQ ID NO: 7627 - protein, 18 aa, Homo sapiens
  CDR3 for alpha chain variable domain of TCR clone 3814 (TRAV13-1, TRAJ52)
CAADFPNAGGTSYGKLTF

SEQ ID NO: 7628 - protein, 14 aa, Homo sapiens
  CDR3 for beta chain variable domain of TCR clone 3814 (TRBV11-2, TRBJ2-3)
CASSLYAGRDTQYF

SEQ ID NO: 7629 - protein, 13 aa, Homo sapiens
  CDR3 for alpha chain variable domain of TCR clone 3815 (TRAV17, TRAJ5)
CALRGTGRRALTF

SEQ ID NO: 7630 - protein, 11 aa, Homo sapiens
  CDR3 for beta chain variable domain of TCR clone 3815 (TRBV6-3, TRBJ2-3)
CATGQADTQYF

SEQ ID NO: 7631 - protein, 16 aa, Homo sapiens
  CDR3 for alpha chain variable domain of TCR clone 3816 (TRAV12-2, TRAJ6)
CAAPLAGSGGSYIPTF

SEQ ID NO: 7632 - protein, 13 aa, Homo sapiens
  CDR3 for beta chain variable domain of TCR clone 3816 (TRBV6-9, TRBJ2-5)
CASKGDGRRTQYF

SEQ ID NO: 7633 - protein, 12 aa, Homo sapiens
  CDR3 for alpha chain variable domain of TCR clone 3817 (TRAV13-1, TRAJ53)
CAAGGSNYKLTF

SEQ ID NO: 7634 - protein, 15 aa, Homo sapiens
  CDR3 for beta chain variable domain of TCR clone 3817 (TRBV7-2, TRBJ2-1)
CASSSGLAGGNEQFF

SEQ ID NO: 7635 - protein, 13 aa, Homo sapiens
  CDR3 for alpha chain variable domain of TCR clone 3818 (TRAV27, TRAJ11)
CAGGGSGYSTLTF

SEQ ID NO: 7636 - protein, 15 aa, Homo sapiens
  CDR3 for beta chain variable domain of TCR clone 3818 (TRBV5-1, TRBJ1-1)
CASSLGQGRFAEAFF

SEQ ID NO: 7637 - protein, 13 aa, Homo sapiens
  CDR3 for alpha chain variable domain of TCR clone 3819 (TRAV2, TRAJ40)
CAVVTSGTYKYIF

SEQ ID NO: 7638 - protein, 16 aa, Homo sapiens
  CDR3 for beta chain variable domain of TCR clone 3819 (TRBV12-5, TRBJ2-5)
CASGPRTSGNQETQYF

SEQ ID NO: 7639 - protein, 14 aa, Homo sapiens
  CDR3 for alpha chain variable domain of TCR clone 3820 (TRAV12-3, TRAJ12)
CAMSALDSSYKLIF

SEQ ID NO: 7640 - protein, 16 aa, Homo sapiens
  CDR3 for beta chain variable domain of TCR clone 3820 (TRBV7-9, TRBJ2-3)
CASSLQGNPGTDTQYF

SEQ ID NO: 7641 - protein, 14 aa, Homo sapiens
  CDR3 for alpha chain variable domain of TCR clone 3821 (TRAV12-2, TRAJ13)
CAVKKTGGYQKVTF

SEQ ID NO: 7642 - protein, 12 aa, Homo sapiens
  CDR3 for beta chain variable domain of TCR clone 3821 (TRBV6-3, TRBJ2-7)
CASSLTPYEQYF

SEQ ID NO: 7643 - protein, 15 aa, Homo sapiens
  CDR3 for alpha chain variable domain of TCR clone 3822 (TRAV17, TRAJ10)
CATDASGGGGNKLTF

SEQ ID NO: 7644 - protein, 14 aa, Homo sapiens
  CDR3 for beta chain variable domain of TCR clone 3822 (TRBV20-1, TRBJ2-5)
CSVPYRGRAETQYF

SEQ ID NO: 7645 - protein, 13 aa, Homo sapiens
  CDR3 for alpha chain variable domain of TCR clone 3823 (TRAV12-3, TRAJ7)
CAMTPYGNNRLAF

SEQ ID NO: 7646 - protein, 13 aa, Homo sapiens
  CDR3 for beta chain variable domain of TCR clone 3823 (TRBV10-3, TRBJ1-2)
CAINADLNYGYTF

SEQ ID NO: 7647 - protein, 12 aa, Homo sapiens
  CDR3 for alpha chain variable domain of TCR clone 3824 (TRAV21, TRAJ33)
CAKMDSNYQLIW

SEQ ID NO: 7648 - protein, 14 aa, Homo sapiens
  CDR3 for beta chain variable domain of TCR clone 3824 (TRBV7-3, TRBJ1-1)
CASSLKGGNTEAFF

SEQ ID NO: 7649 - protein, 14 aa, Homo sapiens
  CDR3 for alpha chain variable domain of TCR clone 3825 (TRAV1-2, TRAJ37)
CAVRSKSNTGKLIF

SEQ ID NO: 7650 - protein, 14 aa, Homo sapiens
  CDR3 for beta chain variable domain of TCR clone 3825 (TRBV6-3, TRBJ1-2)
CASSEGGGSYGYTF

SEQ ID NO: 7651 - protein, 14 aa, Homo sapiens
  CDR3 for alpha chain variable domain of TCR clone 3826 (TRAV2, TRAJ9)
CAVEDRSGGFKTIF

SEQ ID NO: 7652 - protein, 17 aa, Homo sapiens
  CDR3 for beta chain variable domain of TCR clone 3826 (TRBV11-2, TRBJ2-1)
CASSLYPPGVEYNEQFF

SEQ ID NO: 7653 - protein, 16 aa, Homo sapiens
  CDR3 for alpha chain variable domain of TCR clone 3827 (TRAV30, TRAJ24)
CGAEIVDADSWGKFQF

SEQ ID NO: 7654 - protein, 14 aa, Homo sapiens
  CDR3 for beta chain variable domain of TCR clone 3827 (TRBV12-5, TRBJ2-5)
CASGSRTHQETQYF

SEQ ID NO: 7655 - protein, 14 aa, Homo sapiens
  CDR3 for alpha chain variable domain of TCR clone 3828 (TRAV1-2, TRAJ8)
CAVREDTGFQKLVF

SEQ ID NO: 7656 - protein, 15 aa, Homo sapiens
  CDR3 for beta chain variable domain of TCR clone 3828 (TRBV7-2, TRBJ2-3)
CASSLVVRGPDTQYF

SEQ ID NO: 7657 - protein, 14 aa, Homo sapiens
  CDR3 for alpha chain variable domain of TCR clone 3829 (TRAV1-2, TRAJ8)
CAVREDTGFQKLVF

SEQ ID NO: 7658 - protein, 12 aa, Homo sapiens
  CDR3 for beta chain variable domain of TCR clone 3829 (TRBV27, TRBJ2-2)
CASKLFTGELFF

SEQ ID NO: 7659 - protein, 14 aa, Homo sapiens
  CDR3 for alpha chain variable domain of TCR clone 3830 (TRAV2, TRAJ37)
CAVDFTSNTGKLIF

SEQ ID NO: 7660 - protein, 16 aa, Homo sapiens
  CDR3 for beta chain variable domain of TCR clone 3830 (TRBV20-1, TRBJ1-2)
CSASMGQGVANYGYTF

SEQ ID NO: 7661 - protein, 14 aa, Homo sapiens
  CDR3 for alpha chain variable domain of TCR clone 3831 (TRAV8-6, TRAJ8)
CAVNENTGFQKLVF

SEQ ID NO: 7662 - protein, 11 aa, Homo sapiens
  CDR3 for beta chain variable domain of TCR clone 3831 (TRBV29-1, TRBJ2-5)
CSEDRTGTQYF

SEQ ID NO: 7663 - protein, 12 aa, Homo sapiens
  CDR3 for alpha chain variable domain of TCR clone 3832 (TRAV21, TRAJ39)
CAADNAGNMLTF

SEQ ID NO: 7664 - protein, 13 aa, Homo sapiens
  CDR3 for beta chain variable domain of TCR clone 3832 (TRBV6-1, TRBJ1-1)
CASSRQGNTEAFF

SEQ ID NO: 7665 - protein, 11 aa, Homo sapiens
  CDR3 for alpha chain variable domain of TCR clone 3833 (TRAV8-6, TRAJ23)
CAVISGGKLIF

SEQ ID NO: 7666 - protein, 14 aa, Homo sapiens
  CDR3 for beta chain variable domain of TCR clone 3833 (TRBV12-5, TRBJ2-5)
CASGSRTHQETQYF

SEQ ID NO: 7667 - protein, 13 aa, Homo sapiens
  CDR3 for alpha chain variable domain of TCR clone 3834 (TRAV12-3, TRAJ21)
CAPGPHNFNKFYF

SEQ ID NO: 7668 - protein, 13 aa, Homo sapiens
  CDR3 for beta chain variable domain of TCR clone 3834 (TRBV4-2, TRBJ1-1)
CASSQAGNTEAFF

SEQ ID NO: 7669 - protein, 21 aa, Homo sapiens
  CDR3 for alpha chain variable domain of TCR clone 3835 (TRAV29/DV5, TRAJ52)
CSVLLCSKREAGGTSYGKLTF

SEQ ID NO: 7670 - protein, 15 aa, Homo sapiens
  CDR3 for beta chain variable domain of TCR clone 3835 (TRBV6-1, TRBJ2-1)
CASSELRGQYNEQFF

SEQ ID NO: 7671 - protein, 11 aa, Homo sapiens
  CDR3 for alpha chain variable domain of TCR clone 3836 (TRAV3, TRAJ21)
CAVGNFNKFHF

SEQ ID NO: 7672 - protein, 16 aa, Homo sapiens
  CDR3 for beta chain variable domain of TCR clone 3836 (TRBV19, TRBJ2-1)
CASSKAGPSSYNEQFF

SEQ ID NO: 7673 - protein, 12 aa, Homo sapiens
  CDR3 for alpha chain variable domain of TCR clone 3837 (TRAV17, TRAJ4)
CAVSGGYNKLIF

SEQ ID NO: 7674 - protein, 13 aa, Homo sapiens
  CDR3 for beta chain variable domain of TCR clone 3837 (TRBV6-1, TRBJ1-1)
CASSEGWGTEAFF

SEQ ID NO: 7675 - protein, 14 aa, Homo sapiens
  CDR3 for alpha chain variable domain of TCR clone 3838 (TRAV8-1, TRAJ5)
CAVRTDTGRRALTF

SEQ ID NO: 7676 - protein, 14 aa, Homo sapiens
  CDR3 for beta chain variable domain of TCR clone 3838 (TRBV19, TRBJ2-1)
CASPTFVLSGEQFF

SEQ ID NO: 7677 - protein, 15 aa, Homo sapiens
  CDR3 for alpha chain variable domain of TCR clone 3839 (TRAV26-1, TRAJ47)
CIVRVGWGYGNKLVF

SEQ ID NO: 7678 - protein, 13 aa, Homo sapiens
  CDR3 for beta chain variable domain of TCR clone 3839 (TRBV20-1, TRBJ2-7)
CSARGDTQDEQYF

SEQ ID NO: 7679 - protein, 13 aa, Homo sapiens
  CDR3 for alpha chain variable domain of TCR clone 3840 (TRAV14/DV4, TRAJ4)
CAMKAGGYNKLIF

SEQ ID NO: 7680 - protein, 15 aa, Homo sapiens
  CDR3 for beta chain variable domain of TCR clone 3840 (TRBV11-3, TRBJ1-1)
CASSLGGPGDTEAFF

SEQ ID NO: 7681 - protein, 13 aa, Homo sapiens
  CDR3 for alpha chain variable domain of TCR clone 3841 (TRAV13-1, TRAJ21)
CAASIYNFNKFYF

SEQ ID NO: 7682 - protein, 15 aa, Homo sapiens
  CDR3 for beta chain variable domain of TCR clone 3841 (TRBV5-5, TRBJ1-5)
CASSLKGGGEQPQHF

SEQ ID NO: 7683 - protein, 12 aa, Homo sapiens
  CDR3 for alpha chain variable domain of TCR clone 3842 (TRAV21, TRAJ33)
CAKMDSNYQLIW

SEQ ID NO: 7684 - protein, 15 aa, Homo sapiens
  CDR3 for beta chain variable domain of TCR clone 3842 (TRBV12-4, TRBJ2-5)
CASSPPTGLQETQYF

SEQ ID NO: 7685 - protein, 15 aa, Homo sapiens
  CDR3 for alpha chain variable domain of TCR clone 3843 (TRAV26-1, TRAJ29)
CIVRVEGSGNTPLVF

SEQ ID NO: 7686 - protein, 15 aa, Homo sapiens
  CDR3 for beta chain variable domain of TCR clone 3843 (TRBV12-4, TRBJ1-1)
CQQQDRVVANTEAFF

SEQ ID NO: 7687 - protein, 11 aa, Homo sapiens
  CDR3 for alpha chain variable domain of TCR clone 3844 (TRAV2, TRAJ13)
CASGGYQKVTF

SEQ ID NO: 7688 - protein, 12 aa, Homo sapiens
  CDR3 for beta chain variable domain of TCR clone 3844 (TRBV19, TRBJ1-4)
CASKDWPGGLFF

SEQ ID NO: 7689 - protein, 12 aa, Homo sapiens
  CDR3 for alpha chain variable domain of TCR clone 3845 (TRAV23/DV6, TRAJ16)
CAARGRGQKLLF

SEQ ID NO: 7690 - protein, 15 aa, Homo sapiens
  CDR3 for beta chain variable domain of TCR clone 3845 (TRBV15, TRBJ2-1)
CATSRPGQGLHEQFF

SEQ ID NO: 7691 - protein, 15 aa, Homo sapiens
  CDR3 for alpha chain variable domain of TCR clone 3846 (TRAV17, TRAJ4)
CATGTWSGGYNKLIF

SEQ ID NO: 7692 - protein, 15 aa, Homo sapiens
  CDR3 for beta chain variable domain of TCR clone 3846 (TRBV20-1, TRBJ2-7)
CSARDRVSGMDEQYF

SEQ ID NO: 7693 - protein, 12 aa, Homo sapiens
  CDR3 for alpha chain variable domain of TCR clone 3847 (TRAV21, TRAJ24)
CAVMDSWGKLQF

SEQ ID NO: 7694 - protein, 16 aa, Homo sapiens
  CDR3 for beta chain variable domain of TCR clone 3847 (TRBV13, TRBJ2-2)
CASSEVFGANTGELFF

SEQ ID NO: 7695 - protein, 16 aa, Homo sapiens
  CDR3 for alpha chain variable domain of TCR clone 3848 (TRAV25, TRAJ53)
CAGPKGSGGSNYKLTF

SEQ ID NO: 7696 - protein, 17 aa, Homo sapiens
  CDR3 for beta chain variable domain of TCR clone 3848 (TRBV11-3, TRBJ2-6)
CASKWGQGLSGANVLTF

SEQ ID NO: 7697 - protein, 14 aa, Homo sapiens
  CDR3 for alpha chain variable domain of TCR clone 3849 (TRAV26-1, TRAJ48)
CIVRTNFGNEKLTF

SEQ ID NO: 7698 - protein, 12 aa, Homo sapiens
  CDR3 for beta chain variable domain of TCR clone 3849 (TRBV20-1, TRBJ2-7)
CSASSGANEQYF

SEQ ID NO: 7699 - protein, 14 aa, Homo sapiens
  CDR3 for alpha chain variable domain of TCR clone 3850 (TRAV12-3, TRAJ10)
SHLPLTGGGNKLTF

SEQ ID NO: 7700 - protein, 16 aa, Homo sapiens
  CDR3 for beta chain variable domain of TCR clone 3850 (TRBV4-3, TRBJ2-1)
CASSPALDRGVNEQFF

SEQ ID NO: 7701 - protein, 17 aa, Homo sapiens
  CDR3 for alpha chain variable domain of TCR clone 3851 (TRAV29/DV5, TRAJ40)
CAASVIYTTSGTYKYIF

SEQ ID NO: 7702 - protein, 13 aa, Homo sapiens
  CDR3 for beta chain variable domain of TCR clone 3851 (TRBV6-1, TRBJ2-1)
CASSHDRNNEQFF

SEQ ID NO: 7703 - protein, 16 aa, Homo sapiens
  CDR3 for alpha chain variable domain of TCR clone 3852 (TRAV16, TRAJ52)
CALSAAGGTSYGKLTF

SEQ ID NO: 7704 - protein, 13 aa, Homo sapiens
  CDR3 for beta chain variable domain of TCR clone 3852 (TRBV3-1, TRBJ1-5)
CASSQFGDQPQHF

SEQ ID NO: 7705 - protein, 13 aa, Homo sapiens
  CDR3 for alpha chain variable domain of TCR clone 3853 (TRAV36/DV7, TRAJ37)
CAVFSSNTGKLIF

SEQ ID NO: 7706 - protein, 15 aa, Homo sapiens
  CDR3 for beta chain variable domain of TCR clone 3853 (TRBV20-1, TRBJ1-1)
CSARDPRGEYTEAFF

SEQ ID NO: 7707 - protein, 16 aa, Homo sapiens
  CDR3 for alpha chain variable domain of TCR clone 3854 (TRAV3, TRAJ37)
CAVRVRGSGNTGKLIF

SEQ ID NO: 7708 - protein, 15 aa, Homo sapiens
  CDR3 for beta chain variable domain of TCR clone 3854 (TRBV3-1, TRBJ2-1)
CASSPRDSGFNEQFF

SEQ ID NO: 7709 - protein, 15 aa, Homo sapiens
  CDR3 for alpha chain variable domain of TCR clone 3855 (TRAV8-3, TRAJ11)
CAVGLLNSGYSTLTF

SEQ ID NO: 7710 - protein, 16 aa, Homo sapiens
  CDR3 for beta chain variable domain of TCR clone 3855 (TRBV28, TRBJ2-1)
CASSLWGRTSGTLQFF

SEQ ID NO: 7711 - protein, 15 aa, Homo sapiens
  CDR3 for alpha chain variable domain of TCR clone 3856 (TRAV17, TRAJ22)
CATVAPSGSARQLTF

SEQ ID NO: 7712 - protein, 14 aa, Homo sapiens
  CDR3 for beta chain variable domain of TCR clone 3856 (TRBV20-1, TRBJ1-5)
CSARDGGSGQPQHF

SEQ ID NO: 7713 - protein, 13 aa, Homo sapiens
  CDR3 for alpha chain variable domain of TCR clone 3857 (TRAV8-6, TRAJ16)
CAVSRWVGQKLLF

SEQ ID NO: 7714 - protein, 15 aa, Homo sapiens
  CDR3 for beta chain variable domain of TCR clone 3857 (TRBV12-4, TRBJ2-1)
CASSLSTGVSNEQFF

SEQ ID NO: 7715 - protein, 12 aa, Homo sapiens
  CDR3 for alpha chain variable domain of TCR clone 3858 (TRAV8-4, TRAJ37)
CAKSSNTGKLIF

SEQ ID NO: 7716 - protein, 15 aa, Homo sapiens
  CDR3 for beta chain variable domain of TCR clone 3858 (TRBV7-9, TRBJ2-7)
CASSSSGLAVYEQYF

SEQ ID NO: 7717 - protein, 15 aa, Homo sapiens
  CDR3 for alpha chain variable domain of TCR clone 3859 (TRAV26-1, TRAJ39)
CIVRVASNAGNMLTF

SEQ ID NO: 7718 - protein, 14 aa, Homo sapiens
  CDR3 for beta chain variable domain of TCR clone 3859 (TRBV7-6, TRBJ2-3)
CASSVAGGTDTQYF

SEQ ID NO: 7719 - protein, 16 aa, Homo sapiens
  CDR3 for alpha chain variable domain of TCR clone 3860 (TRAV3, TRAJ37)
CAVRGKGSGNTGKLIF

SEQ ID NO: 7720 - protein, 15 aa, Homo sapiens
  CDR3 for beta chain variable domain of TCR clone 3860 (TRBV20-1, TRBJ2-1)
CSARGGTRYYNEQFF

SEQ ID NO: 7721 - protein, 13 aa, Homo sapiens
  CDR3 for alpha chain variable domain of TCR clone 3861 (TRAV1-1, TRAJ9)
CAAKNTGGFKTIF

SEQ ID NO: 7722 - protein, 15 aa, Homo sapiens
  CDR3 for beta chain variable domain of TCR clone 3861 (TRBV5-1, TRBJ2-1)
CASTGSGRTYNEQFF

SEQ ID NO: 7723 - protein, 12 aa, Homo sapiens
  CDR3 for alpha chain variable domain of TCR clone 3862 (TRAV21, TRAJ27)
CAANTNAGKSTF

SEQ ID NO: 7724 - protein, 15 aa, Homo sapiens
  CDR3 for beta chain variable domain of TCR clone 3862 (TRBV29-1, TRBJ1-4)
CSVVGIGDINEKLFF

SEQ ID NO: 7725 - protein, 14 aa, Homo sapiens
  CDR3 for alpha chain variable domain of TCR clone 3863 (TRAV8-3, TRAJ4)
CAVGAAGGYNKLIF

SEQ ID NO: 7726 - protein, 14 aa, Homo sapiens
  CDR3 for beta chain variable domain of TCR clone 3863 (TRBV12-5, TRBJ2-5)
CASGSRTHQETQYF

SEQ ID NO: 7727 - protein, 11 aa, Homo sapiens
  CDR3 for alpha chain variable domain of TCR clone 3864 (TRAV2, TRAJ33)
CAVDSNYQLIW

SEQ ID NO: 7728 - protein, 13 aa, Homo sapiens
  CDR3 for beta chain variable domain of TCR clone 3864 (TRBV7-2, TRBJ2-4)
CASSREHANIQYF

SEQ ID NO: 7729 - protein, 14 aa, Homo sapiens
  CDR3 for alpha chain variable domain of TCR clone 3865 (TRAV35, TRAJ53)
CAGNSGGSNYKLTF

SEQ ID NO: 7730 - protein, 15 aa, Homo sapiens
  CDR3 for beta chain variable domain of TCR clone 3865 (TRBV7-9, TRBJ2-1)
CASSLGWGRANEQFF

SEQ ID NO: 7731 - protein, 12 aa, Homo sapiens
  CDR3 for alpha chain variable domain of TCR clone 3866 (TRAV12-3, TRAJ17)
CAMTLTGNKLTF

SEQ ID NO: 7732 - protein, 15 aa, Homo sapiens
  CDR3 for beta chain variable domain of TCR clone 3866 (TRBV20-1, TRBJ2-7)
CGARDRVSGMDEQYF

SEQ ID NO: 7733 - protein, 14 aa, Homo sapiens
  CDR3 for alpha chain variable domain of TCR clone 3867 (TRAV22, TRAJ6)
CAGVGPGGSYIPTF

SEQ ID NO: 7734 - protein, 11 aa, Homo sapiens
  CDR3 for beta chain variable domain of TCR clone 3867 (TRBV20-1, TRBJ2-1)
CSLSSGSEQFF

SEQ ID NO: 7735 - protein, 15 aa, Homo sapiens
  CDR3 for alpha chain variable domain of TCR clone 3868 (TRAV27, TRAJ38)
CAARRNAGNNRKLIW

SEQ ID NO: 7736 - protein, 17 aa, Homo sapiens
  CDR3 for beta chain variable domain of TCR clone 3868 (TRBV13, TRBJ2-3)
CASSLSRVAGGRNTQYF

SEQ ID NO: 7737 - protein, 12 aa, Homo sapiens
  CDR3 for alpha chain variable domain of TCR clone 3869 (TRAV13-1, TRAJ21)
CAAKEGFNKFYF

SEQ ID NO: 7738 - protein, 15 aa, Homo sapiens
  CDR3 for beta chain variable domain of TCR clone 3869 (TRBV7-7, TRBJ2-5)
CASSQLERAEETQYF

SEQ ID NO: 7739 - protein, 12 aa, Homo sapiens
  CDR3 for alpha chain variable domain of TCR clone 3870 (TRAV1-1, TRAJ24)
CAVRGSWGKFQF

SEQ ID NO: 7740 - protein, 14 aa, Homo sapiens
  CDR3 for beta chain variable domain of TCR clone 3870 (TRBV20-1, TRBJ2-3)
CSARGGTSTDTQYF

SEQ ID NO: 7741 - protein, 12 aa, Homo sapiens
  CDR3 for alpha chain variable domain of TCR clone 3871 (TRAV13-1, TRAJ21)
CAAKEGLNKFYF

SEQ ID NO: 7742 - protein, 14 aa, Homo sapiens
  CDR3 for beta chain variable domain of TCR clone 3871 (TRBV5-4, TRBJ1-1)
CASSLDSRRDEAFF

SEQ ID NO: 7743 - protein, 12 aa, Homo sapiens
  CDR3 for alpha chain variable domain of TCR clone 3872 (TRAV13-1, TRAJ27)
CAAHTNAGKSTF

SEQ ID NO: 7744 - protein, 15 aa, Homo sapiens
  CDR3 for beta chain variable domain of TCR clone 3872 (TRBV7-9, TRBJ1-6)
CASSSPGRGNSPLHF

SEQ ID NO: 7745 - protein, 15 aa, Homo sapiens
  CDR3 for alpha chain variable domain of TCR clone 3873 (TRAV17, TRAJ52)
CATEAGGTSYGKLTF

SEQ ID NO: 7746 - protein, 16 aa, Homo sapiens
  CDR3 for beta chain variable domain of TCR clone 3873 (TRBV20-1, TRBJ2-1)
CSAGRPAGGPYNEQFF

SEQ ID NO: 7747 - protein, 14 aa, Homo sapiens
  CDR3 for alpha chain variable domain of TCR clone 3874 (TRAV12-1, TRAJ34)
CVVNLDYNTDKLIF

SEQ ID NO: 7748 - protein, 17 aa, Homo sapiens
  CDR3 for beta chain variable domain of TCR clone 3874 (TRBV20-1, TRBJ2-7)
CSAAGTSGGGSSYEQYF

SEQ ID NO: 7749 - protein, 11 aa, Homo sapiens
  CDR3 for alpha chain variable domain of TCR clone 3875 (TRAV3, TRAJ21)
CAVGNFNNFYF

SEQ ID NO: 7750 - protein, 16 aa, Homo sapiens
  CDR3 for beta chain variable domain of TCR clone 3875 (TRBV19, TRBJ2-1)
CASSKAGPSSYNEQFF

SEQ ID NO: 7751 - protein, 14 aa, Homo sapiens
  CDR3 for alpha chain variable domain of TCR clone 3876 (TRAV12-2, TRAJ13)
CAVKKTGGYQKVTF

SEQ ID NO: 7752 - protein, 16 aa, Homo sapiens
  CDR3 for beta chain variable domain of TCR clone 3876 (TRBV20-1, TRBJ1-4)
CSAPGQGLLTNEKLFF

SEQ ID NO: 7753 - protein, 16 aa, Homo sapiens
  CDR3 for alpha chain variable domain of TCR clone 3877 (TRAV3, TRAJ37)
CAVRGKGSGNTGKLIF

SEQ ID NO: 7754 - protein, 16 aa, Homo sapiens
  CDR3 for beta chain variable domain of TCR clone 3877 (TRBV12-5, TRBJ2-5)
CASGPRTSGNQETQYF

SEQ ID NO: 7755 - protein, 14 aa, Homo sapiens
  CDR3 for alpha chain variable domain of TCR clone 3878 (TRAV12-2, TRAJ13)
CAVKKTGGYQKVTF

SEQ ID NO: 7756 - protein, 15 aa, Homo sapiens
  CDR3 for beta chain variable domain of TCR clone 3878 (TRBV27, TRBJ2-1)
CTSSNGGGSSNEQFF

SEQ ID NO: 7757 - protein, 11 aa, Homo sapiens
  CDR3 for alpha chain variable domain of TCR clone 3879 (TRAV3, TRAJ21)
CAVGNFNKFYF

SEQ ID NO: 7758 - protein, 13 aa, Homo sapiens
  CDR3 for beta chain variable domain of TCR clone 3879 (TRBV20-1, TRBJ2-2)
CSASAAGTGELFF

SEQ ID NO: 7759 - protein, 15 aa, Homo sapiens
  CDR3 for alpha chain variable domain of TCR clone 3880 (TRAV25, TRAJ53)
CAATGGGGSNYKLTF

SEQ ID NO: 7760 - protein, 12 aa, Homo sapiens
  CDR3 for beta chain variable domain of TCR clone 3880 (TRBV7-8, TRBJ2-7)
CASSLGDREQYF

SEQ ID NO: 7761 - protein, 16 aa, Homo sapiens
  CDR3 for alpha chain variable domain of TCR clone 3881 (TRAV26-1, TRAJ37)
CIVRGDGSGNTGKLIF

SEQ ID NO: 7762 - protein, 15 aa, Homo sapiens
  CDR3 for beta chain variable domain of TCR clone 3881 (TRBV7-3, TRBJ2-1)
CASSPTGGGEVEQFF

SEQ ID NO: 7763 - protein, 15 aa, Homo sapiens
  CDR3 for alpha chain variable domain of TCR clone 3882 (TRAV21, TRAJ52)
CAVRGGGTSYGKLTF

SEQ ID NO: 7764 - protein, 13 aa, Homo sapiens
  CDR3 for beta chain variable domain of TCR clone 3882 (TRBV6-5, TRBJ2-5)
CATAPSPQETQYF

SEQ ID NO: 7765 - protein, 10 aa, Homo sapiens
  CDR3 for alpha chain variable domain of TCR clone 3883 (TRAV36/DV7, TRAJ49)
CALTGNQFYF

SEQ ID NO: 7766 - protein, 13 aa, Homo sapiens
  CDR3 for beta chain variable domain of TCR clone 3883 (TRBV4-1, TRBJ2-7)
CASSQGQAYEQYF

SEQ ID NO: 7767 - protein, 14 aa, Homo sapiens
  CDR3 for alpha chain variable domain of TCR clone 3884 (TRAV1-2, TRAJ16)
CAVNRFSDGQKLLF

SEQ ID NO: 7768 - protein, 12 aa, Homo sapiens
  CDR3 for beta chain variable domain of TCR clone 3884 (TRBV14, TRBJ1-1)
CASSQLKGLAFF

SEQ ID NO: 7769 - protein, 13 aa, Homo sapiens
  CDR3 for alpha chain variable domain of TCR clone 3885 (TRAV12-3, TRAJ40)
CAMSDSGTYKYIF

SEQ ID NO: 7770 - protein, 22 aa, Homo sapiens
  CDR3 for beta chain variable domain of TCR clone 3885 (TRBV14, TRBJ1-5)
CASSQDGVTPYLPPIGNQPQHF

SEQ ID NO: 7771 - protein, 12 aa, Homo sapiens
  CDR3 for alpha chain variable domain of TCR clone 3886 (TRAV26-1, TRAJ36)
CIVRVRADNLFF

SEQ ID NO: 7772 - protein, 15 aa, Homo sapiens
  CDR3 for beta chain variable domain of TCR clone 3886 (TRBV6-3, TRBJ2-7)
CASSSPGTVFYEQYF

SEQ ID NO: 7773 - protein, 16 aa, Homo sapiens
  CDR3 for alpha chain variable domain of TCR clone 3887 (TRAV3, TRAJ37)
CAVRPHGSGNTGKLIF

SEQ ID NO: 7774 - protein, 15 aa, Homo sapiens
  CDR3 for beta chain variable domain of TCR clone 3887 (TRBV5-5, TRBJ2-7)
CASSLAAPLSYEQYF

SEQ ID NO: 7775 - protein, 18 aa, Homo sapiens
  CDR3 for alpha chain variable domain of TCR clone 3888 (TRAV26-1, TRAJ37)
CIVRVDMHGSSNTGKLIF

SEQ ID NO: 7776 - protein, 15 aa, Homo sapiens
  CDR3 for beta chain variable domain of TCR clone 3888 (TRBV20-1, TRBJ2-7)
CSARVLASPLYEQYF

SEQ ID NO: 7777 - protein, 11 aa, Homo sapiens
  CDR3 for alpha chain variable domain of TCR clone 3889 (TRAV2, TRAJ31)
CAAGPPARLMF

SEQ ID NO: 7778 - protein, 13 aa, Homo sapiens
  CDR3 for beta chain variable domain of TCR clone 3889 (TRBV4-1, TRBJ2-3)
CASSQPPTDTQYF

SEQ ID NO: 7779 - protein, 14 aa, Homo sapiens
  CDR3 for alpha chain variable domain of TCR clone 3890 (TRAV12-3, TRAJ10)
SHLPLTGGGNKLTF

SEQ ID NO: 7780 - protein, 15 aa, Homo sapiens
  CDR3 for beta chain variable domain of TCR clone 3890 (TRBV29-1, TRBJ2-7)
CSVEFFDRGSYEQYF

SEQ ID NO: 7781 - protein, 11 aa, Homo sapiens
  CDR3 for alpha chain variable domain of TCR clone 3891 (TRAV3, TRAJ21)
CAVGNFNKFYF

SEQ ID NO: 7782 - protein, 14 aa, Homo sapiens
  CDR3 for beta chain variable domain of TCR clone 3891 (TRBV12-5, TRBJ2-5)
CASGSRTHQETQYF

SEQ ID NO: 7783 - protein, 13 aa, Homo sapiens
  CDR3 for alpha chain variable domain of TCR clone 3892 (TRAV35, TRAJ48)
GRSRVFGNEKLTF

SEQ ID NO: 7784 - protein, 14 aa, Homo sapiens
  CDR3 for beta chain variable domain of TCR clone 3892 (TRBV20-1, TRBJ2-5)
CSALVPGYQETQYF

SEQ ID NO: 7785 - protein, 14 aa, Homo sapiens
  CDR3 for alpha chain variable domain of TCR clone 3893 (TRAV1-2, TRAJ16)
CAVNRFSDGQKLLF

SEQ ID NO: 7786 - protein, 14 aa, Homo sapiens
  CDR3 for beta chain variable domain of TCR clone 3893 (TRBV20-1, TRBJ1-1)
CSAQTRIGGTEAFF

SEQ ID NO: 7787 - protein, 15 aa, Homo sapiens
  CDR3 for alpha chain variable domain of TCR clone 3894 (TRAV13-2, TRAJ35)
CAESPNIGFGNVLHC

SEQ ID NO: 7788 - protein, 13 aa, Homo sapiens
  CDR3 for beta chain variable domain of TCR clone 3894 (TRBV10-2, TRBJ2-5)
CASSTLARETQYF

SEQ ID NO: 7789 - protein, 14 aa, Homo sapiens
  CDR3 for alpha chain variable domain of TCR clone 3895 (TRAV1-2, TRAJ16)
CAVNRFSDGQKLLF

SEQ ID NO: 7790 - protein, 13 aa, Homo sapiens
  CDR3 for beta chain variable domain of TCR clone 3895 (TRBV7-9, TRBJ2-3)
CASSPGSTDTQYF

SEQ ID NO: 7791 - protein, 14 aa, Homo sapiens
  CDR3 for alpha chain variable domain of TCR clone 3896 (TRAV1-2, TRAJ16)
CAVNRFSDGQKLLF

SEQ ID NO: 7792 - protein, 13 aa, Homo sapiens
  CDR3 for beta chain variable domain of TCR clone 3896 (TRBV12-4, TRBJ2-5)
CASSLGGSRTQYF

SEQ ID NO: 7793 - protein, 16 aa, Homo sapiens
  CDR3 for alpha chain variable domain of TCR clone 3897 (TRAV30, TRAJ24)
CGTEIVDADSWGKFPF

SEQ ID NO: 7794 - protein, 14 aa, Homo sapiens
  CDR3 for beta chain variable domain of TCR clone 3897 (TRBV12-5, TRBJ2-5)
CASGSRTHQETQYF

SEQ ID NO: 7795 - protein, 11 aa, Homo sapiens
  CDR3 for alpha chain variable domain of TCR clone 3898 (TRAV17, TRAJ9)
CGFTGGFKTIF

SEQ ID NO: 7796 - protein, 18 aa, Homo sapiens
  CDR3 for beta chain variable domain of TCR clone 3898 (TRBV12-4, TRBJ2-2)
CASSLVAGTRGRTGELFF

SEQ ID NO: 7797 - protein, 14 aa, Homo sapiens
  CDR3 for alpha chain variable domain of TCR clone 3899 (TRAV1-1, TRAJ34)
CAVSPSYNTDKLIF

SEQ ID NO: 7798 - protein, 16 aa, Homo sapiens
  CDR3 for beta chain variable domain of TCR clone 3899 (TRBV19, TRBJ2-1)
CASSSKGTRSYNEQFF

SEQ ID NO: 7799 - protein, 16 aa, Homo sapiens
  CDR3 for alpha chain variable domain of TCR clone 3900 (TRAV3, TRAJ37)
CAVRGKGSGNTGKLIF

SEQ ID NO: 7800 - protein, 21 aa, Homo sapiens
  CDR3 for beta chain variable domain of TCR clone 3900 (TRBV15, TRBJ2-1)
AWGTQPCTCVPPAEVDTARFF

SEQ ID NO: 7801 - protein, 16 aa, Homo sapiens
  CDR3 for alpha chain variable domain of TCR clone 3901 (TRAV29/DV5, TRAJ30)
QCTSVQQANRDDKIIF

SEQ ID NO: 7802 - protein, 13 aa, Homo sapiens
  CDR3 for beta chain variable domain of TCR clone 3901 (TRBV12-5, TRBJ2-3)
CASQNRGTDTQYF

SEQ ID NO: 7803 - protein, 14 aa, Homo sapiens
  CDR3 for alpha chain variable domain of TCR clone 3902 (TRAV17, TRAJ57)
CATDPQGGSEKLVF

SEQ ID NO: 7804 - protein, 18 aa, Homo sapiens
  CDR3 for beta chain variable domain of TCR clone 3902 (TRBV20-1, TRBJ2-3)
CSASGLAGGPGTTDTQYF

SEQ ID NO: 7805 - protein, 12 aa, Homo sapiens
  CDR3 for alpha chain variable domain of TCR clone 3903 (TRAV38-1, TRAJ34)
CAFMKETDKLIF

SEQ ID NO: 7806 - protein, 17 aa, Homo sapiens
  CDR3 for beta chain variable domain of TCR clone 3903 (TRBV7-8, TRBJ2-6)
CASSAGTGGAGANVLTF

SEQ ID NO: 7807 - protein, 21 aa, Homo sapiens
  CDR3 for alpha chain variable domain of TCR clone 3904 (TRAV30, TRAJ43)
GLPAQLLRNPLPIIELNDMRF

SEQ ID NO: 7808 - protein, 14 aa, Homo sapiens
  CDR3 for beta chain variable domain of TCR clone 3904 (TRBV27, TRBJ2-1)
CASRHLGGGKEQFF

SEQ ID NO: 7809 - protein, 11 aa, Homo sapiens
  CDR3 for alpha chain variable domain of TCR clone 3905 (TRAV2, TRAJ4)
CAAGGYNKLIF

SEQ ID NO: 7810 - protein, 13 aa, Homo sapiens
  CDR3 for beta chain variable domain of TCR clone 3905 (TRBV20-1, TRBJ1-1)
CSARVGGNTEAFF

SEQ ID NO: 7811 - protein, 15 aa, Homo sapiens
  CDR3 for alpha chain variable domain of TCR clone 3906 (TRAV12-2, TRAJ32)
CAVNHYGGATNKLIF

SEQ ID NO: 7812 - protein, 14 aa, Homo sapiens
  CDR3 for beta chain variable domain of TCR clone 3906 (TRBV27, TRBJ2-1)
CASSFGREANEQFF

SEQ ID NO: 7813 - protein, 12 aa, Homo sapiens
  CDR3 for alpha chain variable domain of TCR clone 3907 (TRAV13-2, TRAJ23)
CAERHRGGKLIF

SEQ ID NO: 7814 - protein, 15 aa, Homo sapiens
  CDR3 for beta chain variable domain of TCR clone 3907 (TRBV15, TRBJ2-1)
CATSRPGQGLHEQFF

SEQ ID NO: 7815 - protein, 14 aa, Homo sapiens
  CDR3 for alpha chain variable domain of TCR clone 3908 (TRAV1-2, TRAJ8)
CAVREDTGFQKLVF

SEQ ID NO: 7816 - protein, 14 aa, Homo sapiens
  CDR3 for beta chain variable domain of TCR clone 3908 (TRBV7-2, TRBJ2-7)
CASSPKTSFYEQYF

SEQ ID NO: 7817 - protein, 14 aa, Homo sapiens
  CDR3 for alpha chain variable domain of TCR clone 3909 (TRAV8-2, TRAJ37)
CVVSISGNTGKLIF

SEQ ID NO: 7818 - protein, 13 aa, Homo sapiens
  CDR3 for beta chain variable domain of TCR clone 3909 (TRBV7-8, TRBJ2-7)
RRVRLTEMGEQYF

SEQ ID NO: 7819 - protein, 13 aa, Homo sapiens
  CDR3 for alpha chain variable domain of TCR clone 3910 (TRAV17, TRAJ5)
CAPMDTGRRALTF

SEQ ID NO: 7820 - protein, 11 aa, Homo sapiens
  CDR3 for beta chain variable domain of TCR clone 3910 (TRBV19, TRBJ1-1)
CASSIGSEAFF

SEQ ID NO: 7821 - protein, 14 aa, Homo sapiens
  CDR3 for alpha chain variable domain of TCR clone 3911 (TRAV1-2, TRAJ8)
CAVREDTGFQKLVF

SEQ ID NO: 7822 - protein, 15 aa, Homo sapiens
  CDR3 for beta chain variable domain of TCR clone 3911 (TRBV20-1, TRBJ2-7)
CSAREGRDSLYEQYF

SEQ ID NO: 7823 - protein, 13 aa, Homo sapiens
  CDR3 for alpha chain variable domain of TCR clone 3912 (TRAV12-3, TRAJ46)
CAVKKSSGDKLTF

SEQ ID NO: 7824 - protein, 13 aa, Homo sapiens
  CDR3 for beta chain variable domain of TCR clone 3912 (TRBV6-1, TRBJ2-1)
CASSHDRNNEQFF

SEQ ID NO: 7825 - protein, 12 aa, Homo sapiens
  CDR3 for alpha chain variable domain of TCR clone 3913 (TRAV12-3, TRAJ17)
CAMTLTGNRLTF

SEQ ID NO: 7826 - protein, 15 aa, Homo sapiens
  CDR3 for beta chain variable domain of TCR clone 3913 (TRBV20-1, TRBJ2-7)
CSARDRVSGMDEQYF

SEQ ID NO: 7827 - protein, 15 aa, Homo sapiens
  CDR3 for alpha chain variable domain of TCR clone 3914 (TRAV27, TRAJ39)
ASTSVQENAGNMLTF

SEQ ID NO: 7828 - protein, 14 aa, Homo sapiens
  CDR3 for beta chain variable domain of TCR clone 3914 (TRBV15, TRBJ2-7)
CATSPDRGLYEQYF

SEQ ID NO: 7829 - protein, 11 aa, Homo sapiens
  CDR3 for alpha chain variable domain of TCR clone 3915 (TRAV2, TRAJ13)
CASGGYQKVTF

SEQ ID NO: 7830 - protein, 17 aa, Homo sapiens
  CDR3 for beta chain variable domain of TCR clone 3915 (TRBV20-1, TRBJ2-2)
CSASGSGQGGLTGELFF

SEQ ID NO: 7831 - protein, 14 aa, Homo sapiens
  CDR3 for alpha chain variable domain of TCR clone 3916 (TRAV1-2, TRAJ16)
CAVNRFSDGQKLLF

SEQ ID NO: 7832 - protein, 16 aa, Homo sapiens
  CDR3 for beta chain variable domain of TCR clone 3916 (TRBV13, TRBJ2-2)
CASSPRTGEHTGELFF

SEQ ID NO: 7833 - protein, 12 aa, Homo sapiens
  CDR3 for alpha chain variable domain of TCR clone 3917 (TRAV12-2, TRAJ42)
CAVGGSQGNLIF

SEQ ID NO: 7834 - protein, 15 aa, Homo sapiens
  CDR3 for beta chain variable domain of TCR clone 3917 (TRBV9, TRBJ1-6)
CASSVAGTGDSPLHF

SEQ ID NO: 7835 - protein, 13 aa, Homo sapiens
  CDR3 for alpha chain variable domain of TCR clone 3918 (TRAV21, TRAJ10)
CAVRPGGGNKLTF

SEQ ID NO: 7836 - protein, 14 aa, Homo sapiens
  CDR3 for beta chain variable domain of TCR clone 3918 (TRBV5-4, TRBJ2-7)
CASSADAGSYEQYF

SEQ ID NO: 7837 - protein, 12 aa, Homo sapiens
  CDR3 for alpha chain variable domain of TCR clone 3919 (TRAV2, TRAJ10)
CASTGGGNKLTF

SEQ ID NO: 7838 - protein, 20 aa, Homo sapiens
  CDR3 for beta chain variable domain of TCR clone 3919 (TRBV7-8, TRBJ2-2)
CASSHLFPGPTIHITGELFF

SEQ ID NO: 7839 - protein, 16 aa, Homo sapiens
  CDR3 for alpha chain variable domain of TCR clone 3920 (TRAV3, TRAJ5)
CAVRNLMDTGRRALTF

SEQ ID NO: 7840 - protein, 16 aa, Homo sapiens
  CDR3 for beta chain variable domain of TCR clone 3920 (TRBV4-2, TRBJ2-7)
CASSQEGLAISYEQYF

SEQ ID NO: 7841 - protein, 11 aa, Homo sapiens
  CDR3 for alpha chain variable domain of TCR clone 3921 (TRAV12-3, TRAJ17)
CAMTLTGKLTF

SEQ ID NO: 7842 - protein, 15 aa, Homo sapiens
  CDR3 for beta chain variable domain of TCR clone 3921 (TRBV20-1, TRBJ2-7)
CSARDRVSGMDEQYF

SEQ ID NO: 7843 - protein, 12 aa, Homo sapiens
  CDR3 for alpha chain variable domain of TCR clone 3922 (TRAV21, TRAJ33)
CAKMDSNYQLIW

SEQ ID NO: 7844 - protein, 15 aa, Homo sapiens
  CDR3 for beta chain variable domain of TCR clone 3922 (TRBV9, TRBJ1-6)
CASSVAGTGDSPLHF

SEQ ID NO: 7845 - protein, 16 aa, Homo sapiens
  CDR3 for alpha chain variable domain of TCR clone 3923 (TRAV30, TRAJ24)
CGTEIVDADSWGKFQF

SEQ ID NO: 7846 - protein, 13 aa, Homo sapiens
  CDR3 for beta chain variable domain of TCR clone 3923 (TRBV10-3, TRBJ1-2)
CAISERDSYGYTF

SEQ ID NO: 7847 - protein, 12 aa, Homo sapiens
  CDR3 for alpha chain variable domain of TCR clone 3924 (TRAV12-3, TRAJ17)
CAMTLTGNKLTF

SEQ ID NO: 7848 - protein, 14 aa, Homo sapiens
  CDR3 for beta chain variable domain of TCR clone 3924 (TRBV11-2, TRBJ2-3)
CASSRLARTDTQYF

SEQ ID NO: 7849 - protein, 14 aa, Homo sapiens
  CDR3 for alpha chain variable domain of TCR clone 3925 (TRAV30, TRAJ26)
CGTEIVSYGQNFVF

SEQ ID NO: 7850 - protein, 13 aa, Homo sapiens
  CDR3 for beta chain variable domain of TCR clone 3925 (TRBV24-1, TRBJ2-2)
CATSDWSTGELFF

SEQ ID NO: 7851 - protein, 13 aa, Homo sapiens
  CDR3 for alpha chain variable domain of TCR clone 3926 (TRAV8-1, TRAJ23)
CAWRDNQGGKLIF

SEQ ID NO: 7852 - protein, 13 aa, Homo sapiens
  CDR3 for beta chain variable domain of TCR clone 3926 (TRBV20-1, TRBJ2-7)
CSATHTSGYEQYF

SEQ ID NO: 7853 - protein, 13 aa, Homo sapiens
  CDR3 for alpha chain variable domain of TCR clone 3927 (TRAV23/DV6, TRAJ22)
CASRAGSARQLTF

SEQ ID NO: 7854 - protein, 14 aa, Homo sapiens
  CDR3 for beta chain variable domain of TCR clone 3927 (TRBV7-2, TRBJ2-7)
CASSPKTSFYEQYF

SEQ ID NO: 7855 - protein, 12 aa, Homo sapiens
  CDR3 for alpha chain variable domain of TCR clone 3928 (TRAV12-1, TRAJ20)
CVAHFNDYKLSF

SEQ ID NO: 7856 - protein, 13 aa, Homo sapiens
  CDR3 for beta chain variable domain of TCR clone 3928 (TRBV5-7, TRBJ2-5)
CASSLRLQETQYF

SEQ ID NO: 7857 - protein, 17 aa, Homo sapiens
  CDR3 for alpha chain variable domain of TCR clone 3929 (TRAV3, TRAJ6)
CAVRDGPRAGGRYIPTF

SEQ ID NO: 7858 - protein, 14 aa, Homo sapiens
  CDR3 for beta chain variable domain of TCR clone 3929 (TRBV7-2, TRBJ2-7)
CASSPKTSFYEQYF

SEQ ID NO: 7859 - protein, 11 aa, Homo sapiens
  CDR3 for alpha chain variable domain of TCR clone 3930 (TRAV1-2, TRAJ40)
CAVPGTYKYIF

SEQ ID NO: 7860 - protein, 15 aa, Homo sapiens
  CDR3 for beta chain variable domain of TCR clone 3930 (TRBV25-1, TRBJ1-4)
CTSSPGDSTNEKLFF

SEQ ID NO: 7861 - protein, 14 aa, Homo sapiens
  CDR3 for alpha chain variable domain of TCR clone 3931 (TRAV12-3, TRAJ42)
CAMNYGGSQGNLIF

SEQ ID NO: 7862 - protein, 13 aa, Homo sapiens
  CDR3 for beta chain variable domain of TCR clone 3931 (TRBV20-1, TRBJ1-6)
CSAPLGVGSPLHF

SEQ ID NO: 7863 - protein, 11 aa, Homo sapiens
  CDR3 for alpha chain variable domain of TCR clone 3932 (TRAV2, TRAJ40)
CAVEDPGNLQI

SEQ ID NO: 7864 - protein, 14 aa, Homo sapiens
  CDR3 for beta chain variable domain of TCR clone 3932 (TRBV19, TRBJ2-2)
CASSTLHRSGELFF

SEQ ID NO: 7865 - protein, 14 aa, Homo sapiens
  CDR3 for alpha chain variable domain of TCR clone 3933 (TRAV14/DV4, TRAJ58)
CAMMKETSGSRLTF

SEQ ID NO: 7866 - protein, 12 aa, Homo sapiens
  CDR3 for beta chain variable domain of TCR clone 3933 (TRBV12-4, TRBJ2-1)
CASTYVLNEQFF

SEQ ID NO: 7867 - protein, 14 aa, Homo sapiens
  CDR3 for alpha chain variable domain of TCR clone 3934 (TRAV1-2, TRAJ8)
CAVREDTGFQKLVF

SEQ ID NO: 7868 - protein, 14 aa, Homo sapiens
  CDR3 for beta chain variable domain of TCR clone 3934 (TRBV7-3, TRBJ2-2)
CASSSGGYTGELFF

SEQ ID NO: 7869 - protein, 11 aa, Homo sapiens
  CDR3 for alpha chain variable domain of TCR clone 3935 (TRAV21, TRAJ34)
CAVTNTDKLIF

SEQ ID NO: 7870 - protein, 16 aa, Homo sapiens
  CDR3 for beta chain variable domain of TCR clone 3935 (TRBV20-1, TRBJ1-4)
CSAPGQGLLTNEKLFF

SEQ ID NO: 7871 - protein, 13 aa, Homo sapiens
  CDR3 for alpha chain variable domain of TCR clone 3936 (TRAV35, TRAJ36)
CARPRIGANNLFF

SEQ ID NO: 7872 - protein, 15 aa, Homo sapiens
  CDR3 for beta chain variable domain of TCR clone 3936 (TRBV28, TRBJ2-5)
CASSPPWSYQETQYF

SEQ ID NO: 7873 - protein, 14 aa, Homo sapiens
  CDR3 for alpha chain variable domain of TCR clone 3937 (TRAV12-3, TRAJ39)
SATYLSNAGNMLTF

SEQ ID NO: 7874 - protein, 13 aa, Homo sapiens
  CDR3 for beta chain variable domain of TCR clone 3937 (TRBV28, TRBJ1-2)
CASSPGSRNGYTF

SEQ ID NO: 7875 - protein, 11 aa, Homo sapiens
  CDR3 for alpha chain variable domain of TCR clone 3938 (TRAV1-2, TRAJ40)
CAVPGTYKYIF

SEQ ID NO: 7876 - protein, 15 aa, Homo sapiens
  CDR3 for beta chain variable domain of TCR clone 3938 (TRBV7-9, TRBJ2-7)
CASSLALAEAYEQYF

SEQ ID NO: 7877 - protein, 12 aa, Homo sapiens
  CDR3 for alpha chain variable domain of TCR clone 3939 (TRAV1-1, TRAJ39)
CAVPVVGNMLTF

SEQ ID NO: 7878 - protein, 15 aa, Homo sapiens
  CDR3 for beta chain variable domain of TCR clone 3939 (TRBV7-3, TRBJ2-2)
CASSETGQGTGELFF

SEQ ID NO: 7879 - protein, 14 aa, Homo sapiens
  CDR3 for alpha chain variable domain of TCR clone 3940 (TRAV26-1, TRAJ38)
CIADNAGNNRKLIW

SEQ ID NO: 7880 - protein, 12 aa, Homo sapiens
  CDR3 for beta chain variable domain of TCR clone 3940 (TRBV5-1, TRBJ2-7)
CASSFRGYEQYF

SEQ ID NO: 7881 - protein, 12 aa, Homo sapiens
  CDR3 for alpha chain variable domain of TCR clone 3941 (TRAV21, TRAJ37)
CAVRGNTGKLIF

SEQ ID NO: 7882 - protein, 15 aa, Homo sapiens
  CDR3 for beta chain variable domain of TCR clone 3941 (TRBV20-1, TRBJ2-1)
CSARGGTRYYNEQFF

SEQ ID NO: 7883 - protein, 13 aa, Homo sapiens
  CDR3 for alpha chain variable domain of TCR clone 3942 (TRAV13-1, TRAJ29)
CAASIGLNTPLVF

SEQ ID NO: 7884 - protein, 14 aa, Homo sapiens
  CDR3 for beta chain variable domain of TCR clone 3942 (TRBV20-1, TRBJ2-5)
CSASDSGSGETQYF

SEQ ID NO: 7885 - protein, 10 aa, Homo sapiens
  CDR3 for alpha chain variable domain of TCR clone 3943 (TRAV21, TRAJ49)
CAVTGNQFYF

SEQ ID NO: 7886 - protein, 15 aa, Homo sapiens
  CDR3 for beta chain variable domain of TCR clone 3943 (TRBV6-1, TRBJ2-3)
CASTTLAGHTDTQYF

SEQ ID NO: 7887 - protein, 13 aa, Homo sapiens
  CDR3 for alpha chain variable domain of TCR clone 3944 (TRAV23/DV6, TRAJ36)
CAASQTGANNLFF

SEQ ID NO: 7888 - protein, 13 aa, Homo sapiens
  CDR3 for beta chain variable domain of TCR clone 3944 (TRBV5-4, TRBJ1-5)
CASSLGGDQPQHF

SEQ ID NO: 7889 - protein, 12 aa, Homo sapiens
  CDR3 for alpha chain variable domain of TCR clone 3945 (TRAV38-2/DV8, TRAJ48)
CALLSGNEKLTF

SEQ ID NO: 7890 - protein, 14 aa, Homo sapiens
  CDR3 for beta chain variable domain of TCR clone 3945 (TRBV11-2, TRBJ2-3)
CASSRLARTDTQYF

SEQ ID NO: 7891 - protein, 14 aa, Homo sapiens
  CDR3 for alpha chain variable domain of TCR clone 3946 (TRAV13-1, TRAJ15)
CAASTNQAGTALIF

SEQ ID NO: 7892 - protein, 11 aa, Homo sapiens
  CDR3 for beta chain variable domain of TCR clone 3946 (TRBV7-2, TRBJ2-1)
CASSLRDNEFF

SEQ ID NO: 7893 - protein, 14 aa, Homo sapiens
  CDR3 for alpha chain variable domain of TCR clone 3947 (TRAV1-2, TRAJ8)
CAVREDTGFQKLVF

SEQ ID NO: 7894 - protein, 15 aa, Homo sapiens
  CDR3 for beta chain variable domain of TCR clone 3947 (TRBV28, TRBJ2-1)
CASSIIAGGRSEQFF

SEQ ID NO: 7895 - protein, 12 aa, Homo sapiens
  CDR3 for alpha chain variable domain of TCR clone 3948 (TRAV12-1, TRAJ23)
CVVNWGGGKLIF

SEQ ID NO: 7896 - protein, 14 aa, Homo sapiens
  CDR3 for beta chain variable domain of TCR clone 3948 (TRBV27, TRBJ2-7)
CASSPQRGTYEQYF

SEQ ID NO: 7897 - protein, 12 aa, Homo sapiens
  CDR3 for alpha chain variable domain of TCR clone 3949 (TRAV13-2, TRAJ23)
CAERHRGGKLIF

SEQ ID NO: 7898 - protein, 19 aa, Homo sapiens
  CDR3 for beta chain variable domain of TCR clone 3949 (TRBV19, TRBJ2-5)
CASSIGQVTDFFLGETQYF

SEQ ID NO: 7899 - protein, 14 aa, Homo sapiens
  CDR3 for alpha chain variable domain of TCR clone 3950 (TRAV12-3, TRAJ54)
CAMRIIQGAQKLVF

SEQ ID NO: 7900 - protein, 16 aa, Homo sapiens
  CDR3 for beta chain variable domain of TCR clone 3950 (TRBV28, TRBJ2-1)
CASRVPASGRIGEQFF

SEQ ID NO: 7901 - protein, 18 aa, Homo sapiens
  CDR3 for alpha chain variable domain of TCR clone 3951 (TRAV21, TRAJ52)
CAVRPSPAGGTSYGKLTF

SEQ ID NO: 7902 - protein, 19 aa, Homo sapiens
  CDR3 for beta chain variable domain of TCR clone 3951 (TRBV7-2, TRBJ2-3)
CASSFLSRNWGGGTDTQYF

SEQ ID NO: 7903 - protein, 14 aa, Homo sapiens
  CDR3 for alpha chain variable domain of TCR clone 3952 (TRAV12-1, TRAJ17)
CVVNYKAAGNKLTF

SEQ ID NO: 7904 - protein, 14 aa, Homo sapiens
  CDR3 for beta chain variable domain of TCR clone 3952 (TRBV20-1, TRBJ1-1)
CSAQTRIGGTEAFF

SEQ ID NO: 7905 - protein, 16 aa, Homo sapiens
  CDR3 for alpha chain variable domain of TCR clone 3953 (TRAV1-2, TRAJ10)
CAVRGVLTGGGNKLTF

SEQ ID NO: 7906 - protein, 15 aa, Homo sapiens
  CDR3 for beta chain variable domain of TCR clone 3953 (TRBV29-1, TRBJ2-1)
CSVGRHALFYNEQFF

SEQ ID NO: 7907 - protein, 12 aa, Homo sapiens
  CDR3 for alpha chain variable domain of TCR clone 3954 (TRAV2, TRAJ26)
CAGSPGRLWSEF

SEQ ID NO: 7908 - protein, 16 aa, Homo sapiens
  CDR3 for beta chain variable domain of TCR clone 3954 (TRBV13, TRBJ2-2)
CASSPRTGEHTGELFF

SEQ ID NO: 7909 - protein, 15 aa, Homo sapiens
  CDR3 for alpha chain variable domain of TCR clone 3955 (TRAV8-2, TRAJ24)
CVVSDRTDSWGKLQF

SEQ ID NO: 7910 - protein, 11 aa, Homo sapiens
  CDR3 for beta chain variable domain of TCR clone 3955 (TRBV20-1, TRBJ1-2)
CSVQGAGGYTF

SEQ ID NO: 7911 - protein, 14 aa, Homo sapiens
  CDR3 for alpha chain variable domain of TCR clone 3956 (TRAV1-1, TRAJ27)
CAFSETPMQANQPL

SEQ ID NO: 7912 - protein, 17 aa, Homo sapiens
  CDR3 for beta chain variable domain of TCR clone 3956 (TRBV20-1, TRBJ2-3)
CSARDPKGVSATDTQYF

SEQ ID NO: 7913 - protein, 13 aa, Homo sapiens
  CDR3 for alpha chain variable domain of TCR clone 3957 (TRAV21, TRAJ20)
CAVGLRVDYKLSF

SEQ ID NO: 7914 - protein, 11 aa, Homo sapiens
  CDR3 for beta chain variable domain of TCR clone 3957 (TRBV29-1, TRBJ2-5)
CSEDRTGTQYF

SEQ ID NO: 7915 - protein, 11 aa, Homo sapiens
  CDR3 for alpha chain variable domain of TCR clone 3958 (TRAV13-2, TRAJ23)
CAESPRGKLIF

SEQ ID NO: 7916 - protein, 18 aa, Homo sapiens
  CDR3 for beta chain variable domain of TCR clone 3958 (TRBV6-5, TRBJ1-1)
CASSYSAPGGTGGTEAFF

SEQ ID NO: 7917 - protein, 16 aa, Homo sapiens
  CDR3 for alpha chain variable domain of TCR clone 3959 (TRAV30, TRAJ24)
CGTEIVDADSWGKFRF

SEQ ID NO: 7918 - protein, 14 aa, Homo sapiens
  CDR3 for beta chain variable domain of TCR clone 3959 (TRBV12-5, TRBJ2-5)
CASGSRTHQETQYF

SEQ ID NO: 7919 - protein, 13 aa, Homo sapiens
  CDR3 for alpha chain variable domain of TCR clone 3960 (TRAV17, TRAJ13)
CATDSGGYQKVTF

SEQ ID NO: 7920 - protein, 14 aa, Homo sapiens
  CDR3 for beta chain variable domain of TCR clone 3960 (TRBV6-1, TRBJ1-1)
CASTPLQMNTEAFF

SEQ ID NO: 7921 - protein, 14 aa, Homo sapiens
  CDR3 for alpha chain variable domain of TCR clone 3961 (TRAV22, TRAJ6)
CAGVGPGGSYIPTF

SEQ ID NO: 7922 - protein, 14 aa, Homo sapiens
  CDR3 for beta chain variable domain of TCR clone 3961 (TRBV9, TRBJ2-7)
CASSVGVGSYEQYF

SEQ ID NO: 7923 - protein, 15 aa, Homo sapiens
  CDR3 for alpha chain variable domain of TCR clone 3962 (TRAV8-2, TRAJ24)
CVVSDRTDSWGKLQF

SEQ ID NO: 7924 - protein, 13 aa, Homo sapiens
  CDR3 for beta chain variable domain of TCR clone 3962 (TRBV7-9, TRBJ1-2)
CASSLKQNYGYTF

SEQ ID NO: 7925 - protein, 14 aa, Homo sapiens
  CDR3 for alpha chain variable domain of TCR clone 3963 (TRAV17, TRAJ39)
CATDPVRAGNMLTF

SEQ ID NO: 7926 - protein, 13 aa, Homo sapiens
  CDR3 for beta chain variable domain of TCR clone 3963 (TRBV19, TRBJ1-2)
CASSVPGQDGYTF

SEQ ID NO: 7927 - protein, 12 aa, Homo sapiens
  CDR3 for alpha chain variable domain of TCR clone 3964 (TRAV12-3, TRAJ17)
CAMTLTGNKLTF

SEQ ID NO: 7928 - protein, 12 aa, Homo sapiens
  CDR3 for beta chain variable domain of TCR clone 3964 (TRBV14, TRBJ2-5)
CASSQLKETQYF

SEQ ID NO: 7929 - protein, 11 aa, Homo sapiens
  CDR3 for alpha chain variable domain of TCR clone 3965 (TRAV2, TRAJ31)
CAVYNNARLMF

SEQ ID NO: 7930 - protein, 16 aa, Homo sapiens
  CDR3 for beta chain variable domain of TCR clone 3965 (TRBV28, TRBJ1-6)
CASSSLLEGDNSPLHF

SEQ ID NO: 7931 - protein, 16 aa, Homo sapiens
  CDR3 for alpha chain variable domain of TCR clone 3966 (TRAV17, TRAJ9)
CATGEWGGTGGFKTIF

SEQ ID NO: 7932 - protein, 12 aa, Homo sapiens
  CDR3 for beta chain variable domain of TCR clone 3966 (TRBV11-2, TRBJ2-1)
CASSPGNNEQFF

SEQ ID NO: 7933 - protein, 15 aa, Homo sapiens
  CDR3 for alpha chain variable domain of TCR clone 3967 (TRAV3, TRAJ22)
CAVRDRGGSARQLTF

SEQ ID NO: 7934 - protein, 14 aa, Homo sapiens
  CDR3 for beta chain variable domain of TCR clone 3967 (TRBV20-1, TRBJ2-5)
CSALVPGYQETQYF

SEQ ID NO: 7935 - protein, 12 aa, Homo sapiens
  CDR3 for alpha chain variable domain of TCR clone 3968 (TRAV8-1, TRAJ26)
CAVNNYGQNFVF

SEQ ID NO: 7936 - protein, 12 aa, Homo sapiens
  CDR3 for beta chain variable domain of TCR clone 3968 (TRBV5-5, TRBJ2-5)
CASSYFGETQYF

SEQ ID NO: 7937 - protein, 14 aa, Homo sapiens
  CDR3 for alpha chain variable domain of TCR clone 3969 (TRAV13-1, TRAJ26)
CAAPKGPDGQNFVF

SEQ ID NO: 7938 - protein, 15 aa, Homo sapiens
  CDR3 for beta chain variable domain of TCR clone 3969 (TRBV28, TRBJ2-5)
CASSFRQGALETQYF

SEQ ID NO: 7939 - protein, 16 aa, Homo sapiens
  CDR3 for alpha chain variable domain of TCR clone 3970 (TRAV30, TRAJ24)
CGTEIVDADSWGRFQF

SEQ ID NO: 7940 - protein, 14 aa, Homo sapiens
  CDR3 for beta chain variable domain of TCR clone 3970 (TRBV12-5, TRBJ2-5)
CASGSRTHQETQYF

SEQ ID NO: 7941 - protein, 15 aa, Homo sapiens
  CDR3 for alpha chain variable domain of TCR clone 3971 (TRAV2, TRAJ11)
CAVGGRNSGYSTLTF

SEQ ID NO: 7942 - protein, 14 aa, Homo sapiens
  CDR3 for beta chain variable domain of TCR clone 3971 (TRBV20-1, TRBJ2-1)
CSAQIGGSANEQFF

SEQ ID NO: 7943 - protein, 14 aa, Homo sapiens
  CDR3 for alpha chain variable domain of TCR clone 3972 (TRAV12-2, TRAJ13)
CAVKKTGGYQKVTL

SEQ ID NO: 7944 - protein, 15 aa, Homo sapiens
  CDR3 for beta chain variable domain of TCR clone 3972 (TRBV27, TRBJ2-1)
CASSNGGGSSNEQFF

SEQ ID NO: 7945 - protein, 14 aa, Homo sapiens
  CDR3 for alpha chain variable domain of TCR clone 3973 (TRAV2, TRAJ9)
CAVEDRSGGFKTIF

SEQ ID NO: 7946 - protein, 12 aa, Homo sapiens
  CDR3 for beta chain variable domain of TCR clone 3973 (TRBV12-5, TRBJ2-5)
CASGQGVETQYF

SEQ ID NO: 7947 - protein, 12 aa, Homo sapiens
  CDR3 for alpha chain variable domain of TCR clone 3974 (TRAV29/DV5, TRAJ49)
CAATDTGNQFYF

SEQ ID NO: 7948 - protein, 15 aa, Homo sapiens
  CDR3 for beta chain variable domain of TCR clone 3974 (TRBV19, TRBJ2-2)
CASRQTGADTGELFF

SEQ ID NO: 7949 - protein, 16 aa, Homo sapiens
  CDR3 for alpha chain variable domain of TCR clone 3975 (TRAV26-1, TRAJ23)
CIVRVHPYNQGGKLIF

SEQ ID NO: 7950 - protein, 13 aa, Homo sapiens
  CDR3 for beta chain variable domain of TCR clone 3975 (TRBV20-1, TRBJ2-5)
CSARGDYQETQYF

SEQ ID NO: 7951 - protein, 17 aa, Homo sapiens
  CDR3 for alpha chain variable domain of TCR clone 3976 (TRAV4, TRAJ13)
CLVGVQGSSGGYQKVTF

SEQ ID NO: 7952 - protein, 13 aa, Homo sapiens
  CDR3 for beta chain variable domain of TCR clone 3976 (TRBV10-3, TRBJ2-7)
CASKLAVNYEQYF

SEQ ID NO: 7953 - protein, 14 aa, Homo sapiens
  CDR3 for alpha chain variable domain of TCR clone 3977 (TRAV4, TRAJ30)
CLVGDMNRDDKIIF

SEQ ID NO: 7954 - protein, 14 aa, Homo sapiens
  CDR3 for beta chain variable domain of TCR clone 3977 (TRBV19, TRBJ2-7)
CASSIQEWSYEQYF

SEQ ID NO: 7955 - protein, 15 aa, Homo sapiens
  CDR3 for alpha chain variable domain of TCR clone 3978 (TRAV17, TRAJ22)
CATAPISGSARQLTF

SEQ ID NO: 7956 - protein, 13 aa, Homo sapiens
  CDR3 for beta chain variable domain of TCR clone 3978 (TRBV6-5, TRBJ1-2)
CASSLDTYYGYTF

SEQ ID NO: 7957 - protein, 14 aa, Homo sapiens
  CDR3 for alpha chain variable domain of TCR clone 3979 (TRAV8-4, TRAJ43)
CAVSDPRNNNDMRF

SEQ ID NO: 7958 - protein, 15 aa, Homo sapiens
  CDR3 for beta chain variable domain of TCR clone 3979 (TRBV4-2, TRBJ1-2)
CASSQRTGGRDGYTF

SEQ ID NO: 7959 - protein, 12 aa, Homo sapiens
  CDR3 for alpha chain variable domain of TCR clone 3980 (TRAV12-1, TRAJ32)
CVVKGATNKLIF

SEQ ID NO: 7960 - protein, 15 aa, Homo sapiens
  CDR3 for beta chain variable domain of TCR clone 3980 (TRBV20-1, TRBJ2-3)
CSASGTSGYTDTQYF

SEQ ID NO: 7961 - protein, 15 aa, Homo sapiens
  CDR3 for alpha chain variable domain of TCR clone 3981 (TRAV1-2, TRAJ36)
CAASADQTGANNLFF

SEQ ID NO: 7962 - protein, 15 aa, Homo sapiens
  CDR3 for beta chain variable domain of TCR clone 3981 (TRBV5-1, TRBJ2-7)
CASSFSTDSVYEQYF

SEQ ID NO: 7963 - protein, 12 aa, Homo sapiens
  CDR3 for alpha chain variable domain of TCR clone 3982 (TRAV20, TRAJ39)
CAVGNAGNMLTF

SEQ ID NO: 7964 - protein, 15 aa, Homo sapiens
  CDR3 for beta chain variable domain of TCR clone 3982 (TRBV27, TRBJ2-1)
CASSNGGGSSNEQFF

SEQ ID NO: 7965 - protein, 15 aa, Homo sapiens
  CDR3 for alpha chain variable domain of TCR clone 3983 (TRAV12-2, TRAJ53)
CAVNGGGGSNYKLTF

SEQ ID NO: 7966 - protein, 14 aa, Homo sapiens
  CDR3 for beta chain variable domain of TCR clone 3983 (TRBV12-5, TRBJ2-5)
CASGSRTHQETQYF

SEQ ID NO: 7967 - protein, 15 aa, Homo sapiens
  CDR3 for alpha chain variable domain of TCR clone 3984 (TRAV13-2, TRAJ58)
CVTAQKETSGSRLTF

SEQ ID NO: 7968 - protein, 14 aa, Homo sapiens
  CDR3 for beta chain variable domain of TCR clone 3984 (TRBV7-2, TRBJ2-3)
CASRRGLAADTQYF

SEQ ID NO: 7969 - protein, 10 aa, Homo sapiens
  CDR3 for alpha chain variable domain of TCR clone 3985 (TRAV1-2, TRAJ18)
CAVRGEAQPW

SEQ ID NO: 7970 - protein, 13 aa, Homo sapiens
  CDR3 for beta chain variable domain of TCR clone 3985 (TRBV20-1, TRBJ1-1)
CSARVGGNTEAFF

SEQ ID NO: 7971 - protein, 16 aa, Homo sapiens
  CDR3 for alpha chain variable domain of TCR clone 3986 (TRAV30, TRAJ24)
CGTEIVDADSWGKFQF

SEQ ID NO: 7972 - protein, 15 aa, Homo sapiens
  CDR3 for beta chain variable domain of TCR clone 3986 (TRBV5-1, TRBJ1-1)
CASSLAPRGNTEAFF

SEQ ID NO: 7973 - protein, 18 aa, Homo sapiens
  CDR3 for alpha chain variable domain of TCR clone 3987 (TRAV21, TRAJ52)
CAVRPSPAGGTSYGKLTF

SEQ ID NO: 7974 - protein, 17 aa, Homo sapiens
  CDR3 for beta chain variable domain of TCR clone 3987 (TRBV13, TRBJ2-3)
CASSLSRVAGGKNTQYF

SEQ ID NO: 7975 - protein, 13 aa, Homo sapiens
  CDR3 for alpha chain variable domain of TCR clone 3988 (TRAV12-2, TRAJ49)
CAVNMRTGNQFYF

SEQ ID NO: 7976 - protein, 11 aa, Homo sapiens
  CDR3 for beta chain variable domain of TCR clone 3988 (TRBV5-5, TRBJ1-1)
CASSLGVEAFF

SEQ ID NO: 7977 - protein, 11 aa, Homo sapiens
  CDR3 for alpha chain variable domain of TCR clone 3989 (TRAV3, TRAJ21)
CAVGNFNKFYF

SEQ ID NO: 7978 - protein, 12 aa, Homo sapiens
  CDR3 for beta chain variable domain of TCR clone 3989 (TRBV14, TRBJ2-5)
CASSHLKETQYF

SEQ ID NO: 7979 - protein, 13 aa, Homo sapiens
  CDR3 for alpha chain variable domain of TCR clone 3990 (TRAV3, TRAJ41)
CAVSSNSGYALNF

SEQ ID NO: 7980 - protein, 12 aa, Homo sapiens
  CDR3 for beta chain variable domain of TCR clone 3990 (TRBV2, TRBJ2-1)
CASRPGPREQFF

SEQ ID NO: 7981 - protein, 13 aa, Homo sapiens
  CDR3 for alpha chain variable domain of TCR clone 3991 (TRAV26-1, TRAJ39)
CIVRVVAGNMLTF

SEQ ID NO: 7982 - protein, 14 aa, Homo sapiens
  CDR3 for beta chain variable domain of TCR clone 3991 (TRBV20-1, TRBJ2-5)
CSARRQGIRETQYF

SEQ ID NO: 7983 - protein, 12 aa, Homo sapiens
  CDR3 for alpha chain variable domain of TCR clone 3992 (TRAV2, TRAJ10)
CASTGGGNKLTF

SEQ ID NO: 7984 - protein, 13 aa, Homo sapiens
  CDR3 for beta chain variable domain of TCR clone 3992 (TRBV19, TRBJ1-5)
CASSMRGYQPQHF

SEQ ID NO: 7985 - protein, 13 aa, Homo sapiens
  CDR3 for alpha chain variable domain of TCR clone 3993 (TRAV8-4, TRAJ10)
CAAFTGGGNKLTF

SEQ ID NO: 7986 - protein, 12 aa, Homo sapiens
  CDR3 for beta chain variable domain of TCR clone 3993 (TRBV3-1, TRBJ2-1)
CASSQGSSGQFF

SEQ ID NO: 7987 - protein, 14 aa, Homo sapiens
  CDR3 for alpha chain variable domain of TCR clone 3994 (TRAV9-2, TRAJ39)
CALYIYNAGNMLTF

SEQ ID NO: 7988 - protein, 15 aa, Homo sapiens
  CDR3 for beta chain variable domain of TCR clone 3994 (TRBV27, TRBJ1-6)
CASSFDRGLGSPLHF

SEQ ID NO: 7989 - protein, 14 aa, Homo sapiens
  CDR3 for alpha chain variable domain of TCR clone 3995 (TRAV3, TRAJ6)
CAVRDPWGSYIPTF

SEQ ID NO: 7990 - protein, 16 aa, Homo sapiens
  CDR3 for beta chain variable domain of TCR clone 3995 (TRBV27, TRBJ2-5)
CASSLSRTAGGETQYF

SEQ ID NO: 7991 - protein, 16 aa, Homo sapiens
  CDR3 for alpha chain variable domain of TCR clone 3996 (TRAV21, TRAJ52)
CAVSDAGGTSYGKLTF

SEQ ID NO: 7992 - protein, 13 aa, Homo sapiens
  CDR3 for beta chain variable domain of TCR clone 3996 (TRBV7-3, TRBJ2-5)
CASSFRGSQTQYF

SEQ ID NO: 7993 - protein, 17 aa, Homo sapiens
  CDR3 for alpha chain variable domain of TCR clone 3997 (TRAV8-3, TRAJ42)
CCGAGMNYGGSQGNLIF

SEQ ID NO: 7994 - protein, 11 aa, Homo sapiens
  CDR3 for beta chain variable domain of TCR clone 3997 (TRBV7-2, TRBJ2-3)
CASSSSDTQYF

SEQ ID NO: 7995 - protein, 10 aa, Homo sapiens
  CDR3 for alpha chain variable domain of TCR clone 3998 (TRAV13-2, TRAJ49)
CADTGNQFYF

SEQ ID NO: 7996 - protein, 13 aa, Homo sapiens
  CDR3 for beta chain variable domain of TCR clone 3998 (TRBV10-3, TRBJ1-2)
CAISERDSYGYTF

SEQ ID NO: 7997 - protein, 14 aa, Homo sapiens
  CDR3 for alpha chain variable domain of TCR clone 3999 (TRAV9-2, TRAJ39)
CALYIYNAGNMLTF

SEQ ID NO: 7998 - protein, 13 aa, Homo sapiens
  CDR3 for beta chain variable domain of TCR clone 3999 (TRBV7-9, TRBJ1-2)
CASSLKQNYGYTF

SEQ ID NO: 7999 - protein, 11 aa, Homo sapiens
  CDR3 for alpha chain variable domain of TCR clone 4000 (TRAV13-2, TRAJ20)
CADSNDYKLSF

SEQ ID NO: 8000 - protein, 14 aa, Homo sapiens
  CDR3 for beta chain variable domain of TCR clone 4000 (TRBV11-2, TRBJ1-5)
CASSLDRGRQPQHF

SEQ ID NO: 8001 - protein, 16 aa, Homo sapiens
  CDR3 for alpha chain variable domain of TCR clone 4001 (TRAV3, TRAJ10)
CAVRDMRAGGGNKLTF

SEQ ID NO: 8002 - protein, 16 aa, Homo sapiens
  CDR3 for beta chain variable domain of TCR clone 4001 (TRBV20-1, TRBJ1-4)
CSAPGQGLLTNEKLFF

SEQ ID NO: 8003 - protein, 14 aa, Homo sapiens
  CDR3 for alpha chain variable domain of TCR clone 4002 (TRAV1-2, TRAJ16)
CAVNRFSDGQKLLF

SEQ ID NO: 8004 - protein, 13 aa, Homo sapiens
  CDR3 for beta chain variable domain of TCR clone 4002 (TRBV19, TRBJ2-7)
CASRKAGGSEQYF

SEQ ID NO: 8005 - protein, 12 aa, Homo sapiens
  CDR3 for alpha chain variable domain of TCR clone 4003 (TRAV21, TRAJ33)
CAKMDSNYQLIW

SEQ ID NO: 8006 - protein, 13 aa, Homo sapiens
  CDR3 for beta chain variable domain of TCR clone 4003 (TRBV12-4, TRBJ2-5)
CASSPGTEETQYF

SEQ ID NO: 8007 - protein, 15 aa, Homo sapiens
  CDR3 for alpha chain variable domain of TCR clone 4004 (TRAV17, TRAJ56)
CATDANTGANSKLTF

SEQ ID NO: 8008 - protein, 16 aa, Homo sapiens
  CDR3 for beta chain variable domain of TCR clone 4004 (TRBV7-3, TRBJ2-2)
CASSLKRGTLSGELFF

SEQ ID NO: 8009 - protein, 11 aa, Homo sapiens
  CDR3 for alpha chain variable domain of TCR clone 4005 (TRAV13-2, TRAJ23)
CAESPRGKLIF

SEQ ID NO: 8010 - protein, 12 aa, Homo sapiens
  CDR3 for beta chain variable domain of TCR clone 4005 (TRBV11-2, TRBJ2-2)
CASSLGGGELFF

SEQ ID NO: 8011 - protein, 13 aa, Homo sapiens
  CDR3 for alpha chain variable domain of TCR clone 4006 (TRAV1-2, TRAJ31)
CAVRGYNNARLMF

SEQ ID NO: 8012 - protein, 14 aa, Homo sapiens
  CDR3 for beta chain variable domain of TCR clone 4006 (TRBV12-4, TRBJ1-3)
CASTLTGAGNTIYF

SEQ ID NO: 8013 - protein, 15 aa, Homo sapiens
  CDR3 for alpha chain variable domain of TCR clone 4007 (TRAV13-1, TRAJ8)
CAASIPNTGFQKLVF

SEQ ID NO: 8014 - protein, 13 aa, Homo sapiens
  CDR3 for beta chain variable domain of TCR clone 4007 (TRBV5-4, TRBJ1-1)
CASSFQVNTEAFF

SEQ ID NO: 8015 - protein, 16 aa, Homo sapiens
  CDR3 for alpha chain variable domain of TCR clone 4008 (TRAV30, TRAJ24)
CGTEIVDADSWGNSSL

SEQ ID NO: 8016 - protein, 14 aa, Homo sapiens
  CDR3 for beta chain variable domain of TCR clone 4008 (TRBV12-5, TRBJ2-5)
CASGSRTHQETQYF

SEQ ID NO: 8017 - protein, 14 aa, Homo sapiens
  CDR3 for alpha chain variable domain of TCR clone 4009 (TRAV8-3, TRAJ20)
CAVGPRGNDYKLSF

SEQ ID NO: 8018 - protein, 11 aa, Homo sapiens
  CDR3 for beta chain variable domain of TCR clone 4009 (TRBV10-3, TRBJ2-2)
CATKGTGELFF

SEQ ID NO: 8019 - protein, 12 aa, Homo sapiens
  CDR3 for alpha chain variable domain of TCR clone 4010 (TRAV36/DV7, TRAJ54)
CAVVRGAQKLVF

SEQ ID NO: 8020 - protein, 13 aa, Homo sapiens
  CDR3 for beta chain variable domain of TCR clone 4010 (TRBV7-9, TRBJ1-2)
CASSLKQNYGYTF

SEQ ID NO: 8021 - protein, 15 aa, Homo sapiens
  CDR3 for alpha chain variable domain of TCR clone 4011 (TRAV1-2, TRAJ24)
CAVRGSTDSWGKFQF

SEQ ID NO: 8022 - protein, 16 aa, Homo sapiens
  CDR3 for beta chain variable domain of TCR clone 4011 (TRBV20-1, TRBJ2-1)
CSAATQGPVSYNEQFF

SEQ ID NO: 8023 - protein, 18 aa, Homo sapiens
  CDR3 for alpha chain variable domain of TCR clone 4012 (TRAV13-1, TRAJ52)
CAASKRSAGGTSYGKLTF

SEQ ID NO: 8024 - protein, 14 aa, Homo sapiens
  CDR3 for beta chain variable domain of TCR clone 4012 (TRBV7-2, TRBJ2-5)
CASSTGGELKTQYF

SEQ ID NO: 8025 - protein, 15 aa, Homo sapiens
  CDR3 for alpha chain variable domain of TCR clone 4013 (TRAV8-3, TRAJ27)
CAVGPSKTNAGKSTF

SEQ ID NO: 8026 - protein, 13 aa, Homo sapiens
  CDR3 for beta chain variable domain of TCR clone 4013 (TRBV20-1, TRBJ1-1)
CSAPLGGGTEAFF

SEQ ID NO: 8027 - protein, 14 aa, Homo sapiens
  CDR3 for alpha chain variable domain of TCR clone 4014 (TRAV8-6, TRAJ54)
CAVSPALGAQKLVF

SEQ ID NO: 8028 - protein, 15 aa, Homo sapiens
  CDR3 for beta chain variable domain of TCR clone 4014 (TRBV4-1, TRBJ1-6)
CASSAGQGYNSPLHF

SEQ ID NO: 8029 - protein, 11 aa, Homo sapiens
  CDR3 for alpha chain variable domain of TCR clone 4015 (TRAV2, TRAJ13)
CASGGYQKVTF

SEQ ID NO: 8030 - protein, 18 aa, Homo sapiens
  CDR3 for beta chain variable domain of TCR clone 4015 (TRBV11-2, TRBJ2-3)
CASSLGGASRGAPNTQYF

SEQ ID NO: 8031 - protein, 14 aa, Homo sapiens
  CDR3 for alpha chain variable domain of TCR clone 4016 (TRAV8-4, TRAJ27)
CAVSKGTNAGKSTF

SEQ ID NO: 8032 - protein, 16 aa, Homo sapiens
  CDR3 for beta chain variable domain of TCR clone 4016 (TRBV2, TRBJ2-7)
CASSSTRRGSSYEQYF

SEQ ID NO: 8033 - protein, 15 aa, Homo sapiens
  CDR3 for alpha chain variable domain of TCR clone 4017 (TRAV12-3, TRAJ6)
CAMSASTGGSYIPTF

SEQ ID NO: 8034 - protein, 16 aa, Homo sapiens
  CDR3 for beta chain variable domain of TCR clone 4017 (TRBV20-1, TRBJ1-2)
CSASMGQGVANYGYTF

SEQ ID NO: 8035 - protein, 10 aa, Homo sapiens
  CDR3 for alpha chain variable domain of TCR clone 4018 (TRAV4, TRAJ15)
CLPFWTALIF

SEQ ID NO: 8036 - protein, 15 aa, Homo sapiens
  CDR3 for beta chain variable domain of TCR clone 4018 (TRBV5-1, TRBJ2-1)
CASSFSGTGYNEQFF

SEQ ID NO: 8037 - protein, 15 aa, Homo sapiens
  CDR3 for alpha chain variable domain of TCR clone 4019 (TRAV38-2/DV8, TRAJ45)
CAYWDSGGGADGLTF

SEQ ID NO: 8038 - protein, 16 aa, Homo sapiens
  CDR3 for beta chain variable domain of TCR clone 4019 (TRBV19, TRBJ1-1)
CASSPTRFWPGTEAFF

SEQ ID NO: 8039 - protein, 14 aa, Homo sapiens
  CDR3 for alpha chain variable domain of TCR clone 4020 (TRAV17, TRAJ35)
CATDRPGFGNVLHC

SEQ ID NO: 8040 - protein, 14 aa, Homo sapiens
  CDR3 for beta chain variable domain of TCR clone 4020 (TRBV7-8, TRBJ2-3)
CASSLEAGTDTQYF

SEQ ID NO: 8041 - protein, 12 aa, Homo sapiens
  CDR3 for alpha chain variable domain of TCR clone 4021 (TRAV20, TRAJ24)
CAVYNSWGKLQF

SEQ ID NO: 8042 - protein, 15 aa, Homo sapiens
  CDR3 for beta chain variable domain of TCR clone 4021 (TRBV20-1, TRBJ2-5)
CSARVPPSGRETQYF

SEQ ID NO: 8043 - protein, 14 aa, Homo sapiens
  CDR3 for alpha chain variable domain of TCR clone 4022 (TRAV2, TRAJ9)
CAVEDRSGGFKTIF

SEQ ID NO: 8044 - protein, 15 aa, Homo sapiens
  CDR3 for beta chain variable domain of TCR clone 4022 (TRBV20-1, TRBJ2-7)
CSARDRVSGMDEQYF

SEQ ID NO: 8045 - protein, 15 aa, Homo sapiens
  CDR3 for alpha chain variable domain of TCR clone 4023 (TRAV29/DV5, TRAJ40)
CAASAQGSGTYKYIF

SEQ ID NO: 8046 - protein, 15 aa, Homo sapiens
  CDR3 for beta chain variable domain of TCR clone 4023 (TRBV7-2, TRBJ2-3)
CASSLAGAFIDTQYF

SEQ ID NO: 8047 - protein, 16 aa, Homo sapiens
  CDR3 for alpha chain variable domain of TCR clone 4024 (TRAV3, TRAJ10)
CAVRDMRAGGGNKLTF

SEQ ID NO: 8048 - protein, 11 aa, Homo sapiens
  CDR3 for beta chain variable domain of TCR clone 4024 (TRBV29-1, TRBJ2-5)
CSEDRTGTQYF

SEQ ID NO: 8049 - protein, 12 aa, Homo sapiens
  CDR3 for alpha chain variable domain of TCR clone 4025 (TRAV12-1, TRAJ40)
CVVYSGTYKYIF

SEQ ID NO: 8050 - protein, 14 aa, Homo sapiens
  CDR3 for beta chain variable domain of TCR clone 4025 (TRBV7-6, TRBJ2-1)
CASSLGGGADEQFF

SEQ ID NO: 8051 - protein, 18 aa, Homo sapiens
  CDR3 for alpha chain variable domain of TCR clone 4026 (TRAV21, TRAJ52)
CAVRPSPAGGTSYGKLTF

SEQ ID NO: 8052 - protein, 15 aa, Homo sapiens
  CDR3 for beta chain variable domain of TCR clone 4026 (TRBV20-1, TRBJ2-7)
CSARKGLAESYEQYF

SEQ ID NO: 8053 - protein, 10 aa, Homo sapiens
  CDR3 for alpha chain variable domain of TCR clone 4027 (TRAV2, TRAJ34)
CAVVNDKLIF

SEQ ID NO: 8054 - protein, 16 aa, Homo sapiens
  CDR3 for beta chain variable domain of TCR clone 4027 (TRBV5-1, TRBJ2-3)
CASSLGLAVYTDTQYF

SEQ ID NO: 8055 - protein, 15 aa, Homo sapiens
  CDR3 for alpha chain variable domain of TCR clone 4028 (TRAV38-1, TRAJ37)
CAFIHGSGNTGKLIF

SEQ ID NO: 8056 - protein, 14 aa, Homo sapiens
  CDR3 for beta chain variable domain of TCR clone 4028 (TRBV29-1, TRBJ2-5)
CSVETSGSGETQYF

SEQ ID NO: 8057 - protein, 14 aa, Homo sapiens
  CDR3 for alpha chain variable domain of TCR clone 4029 (TRAV13-1, TRAJ22)
CAASYSGSARQLTF

SEQ ID NO: 8058 - protein, 13 aa, Homo sapiens
  CDR3 for beta chain variable domain of TCR clone 4029 (TRBV6-3, TRBJ1-2)
CASSLTGDYGYTF

SEQ ID NO: 8059 - protein, 14 aa, Homo sapiens
  CDR3 for alpha chain variable domain of TCR clone 4030 (TRAV8-1, TRAJ32)
CAVNARGATNKLIF

SEQ ID NO: 8060 - protein, 14 aa, Homo sapiens
  CDR3 for beta chain variable domain of TCR clone 4030 (TRBV9, TRBJ2-7)
CASSVGVGSYEQYF

SEQ ID NO: 8061 - protein, 14 aa, Homo sapiens
  CDR3 for alpha chain variable domain of TCR clone 4031 (TRAV8-3, TRAJ9)
CAVVHNTGGFKTIF

SEQ ID NO: 8062 - protein, 14 aa, Homo sapiens
  CDR3 for beta chain variable domain of TCR clone 4031 (TRBV7-3, TRBJ2-2)
CASSSGGYTGELFF

SEQ ID NO: 8063 - protein, 14 aa, Homo sapiens
  CDR3 for alpha chain variable domain of TCR clone 4032 (TRAV12-2, TRAJ53)
CAVKGGGSNYKLTF

SEQ ID NO: 8064 - protein, 15 aa, Homo sapiens
  CDR3 for beta chain variable domain of TCR clone 4032 (TRBV10-3, TRBJ2-3)
CAISLTSGGTDTQYF

SEQ ID NO: 8065 - protein, 14 aa, Homo sapiens
  CDR3 for alpha chain variable domain of TCR clone 4033 (TRAV2, TRAJ9)
CAVEDRSGGFKTIF

SEQ ID NO: 8066 - protein, 13 aa, Homo sapiens
  CDR3 for beta chain variable domain of TCR clone 4033 (TRBV27, TRBJ1-1)
CASSLSIGAEAFF

SEQ ID NO: 8067 - protein, 14 aa, Homo sapiens
  CDR3 for alpha chain variable domain of TCR clone 4034 (TRAV21, TRAJ21)
CAVGVEDNFNKFYF

SEQ ID NO: 8068 - protein, 17 aa, Homo sapiens
  CDR3 for beta chain variable domain of TCR clone 4034 (TRBV20-1, TRBJ2-2)
CSASGSGQGGLTGELFF

SEQ ID NO: 8069 - protein, 15 aa, Homo sapiens
  CDR3 for alpha chain variable domain of TCR clone 4035 (TRAV3, TRAJ5)
CAVRDLDTGRRALTF

SEQ ID NO: 8070 - protein, 13 aa, Homo sapiens
  CDR3 for beta chain variable domain of TCR clone 4035 (TRBV20-1, TRBJ2-5)
CSARDSKQATQYF

SEQ ID NO: 8071 - protein, 14 aa, Homo sapiens
  CDR3 for alpha chain variable domain of TCR clone 4036 (TRAV12-3, TRAJ7)
CAMSEIGGNNRLAF

SEQ ID NO: 8072 - protein, 12 aa, Homo sapiens
  CDR3 for beta chain variable domain of TCR clone 4036 (TRBV5-4, TRBJ1-1)
CASSLDRREAFF

SEQ ID NO: 8073 - protein, 15 aa, Homo sapiens
  CDR3 for alpha chain variable domain of TCR clone 4037 (TRAV25, TRAJ23)
CALAPNYNQGGKLIF

SEQ ID NO: 8074 - protein, 13 aa, Homo sapiens
  CDR3 for beta chain variable domain of TCR clone 4037 (TRBV11-3, TRBJ1-1)
CASSWDGNTEAFF

SEQ ID NO: 8075 - protein, 14 aa, Homo sapiens
  CDR3 for alpha chain variable domain of TCR clone 4038 (TRAV1-2, TRAJ8)
CAVREDTGFQKLVF

SEQ ID NO: 8076 - protein, 14 aa, Homo sapiens
  CDR3 for beta chain variable domain of TCR clone 4038 (TRBV25-1, TRBJ1-1)
CASTHLGGNTEAFF

SEQ ID NO: 8077 - protein, 11 aa, Homo sapiens
  CDR3 for alpha chain variable domain of TCR clone 4039 (TRAV3, TRAJ21)
CAVGNFNKFYF

SEQ ID NO: 8078 - protein, 14 aa, Homo sapiens
  CDR3 for beta chain variable domain of TCR clone 4039 (TRBV18, TRBJ2-5)
CASSPGVSQETQYF

SEQ ID NO: 8079 - protein, 12 aa, Homo sapiens
  CDR3 for alpha chain variable domain of TCR clone 4040 (TRAV4, TRAJ34)
CLVGEGTDKLIF

SEQ ID NO: 8080 - protein, 13 aa, Homo sapiens
  CDR3 for beta chain variable domain of TCR clone 4040 (TRBV2, TRBJ2-7)
CATSMGLVYEQYF

SEQ ID NO: 8081 - protein, 12 aa, Homo sapiens
  CDR3 for alpha chain variable domain of TCR clone 4041 (TRAV13-1, TRAJ21)
CAAKEGFNRFYF

SEQ ID NO: 8082 - protein, 15 aa, Homo sapiens
  CDR3 for beta chain variable domain of TCR clone 4041 (TRBV25-1, TRBJ1-4)
CASSPGDSTNEKLFF

SEQ ID NO: 8083 - protein, 11 aa, Homo sapiens
  CDR3 for alpha chain variable domain of TCR clone 4042 (TRAV2, TRAJ33)
CAVDSNYQLIW

SEQ ID NO: 8084 - protein, 15 aa, Homo sapiens
  CDR3 for beta chain variable domain of TCR clone 4042 (TRBV19, TRBJ1-1)
CASTSGQIQNTEAFF

SEQ ID NO: 8085 - protein, 14 aa, Homo sapiens
  CDR3 for alpha chain variable domain of TCR clone 4043 (TRAV21, TRAJ35)
CAVMPIGFGNVLHC

SEQ ID NO: 8086 - protein, 12 aa, Homo sapiens
  CDR3 for beta chain variable domain of TCR clone 4043 (TRBV7-9, TRBJ2-7)
YASSIKREEQYF

SEQ ID NO: 8087 - protein, 10 aa, Homo sapiens
  CDR3 for alpha chain variable domain of TCR clone 4044 (TRAV13-1, TRAJ52)
CAAKTPMLVV

SEQ ID NO: 8088 - protein, 14 aa, Homo sapiens
  CDR3 for beta chain variable domain of TCR clone 4044 (TRBV6-5, TRBJ1-1)
CASSFGQGLTEAFF

SEQ ID NO: 8089 - protein, 15 aa, Homo sapiens
  CDR3 for alpha chain variable domain of TCR clone 4045 (TRAV12-1, TRAJ26)
CVVNSWVTMVRILSL

SEQ ID NO: 8090 - protein, 13 aa, Homo sapiens
  CDR3 for beta chain variable domain of TCR clone 4045 (TRBV10-3, TRBJ2-7)
CASKLAVNYEQYF

SEQ ID NO: 8091 - protein, 13 aa, Homo sapiens
  CDR3 for alpha chain variable domain of TCR clone 4046 (TRAV26-1, TRAJ54)
CIVRVKGAQKLVF

SEQ ID NO: 8092 - protein, 15 aa, Homo sapiens
  CDR3 for beta chain variable domain of TCR clone 4046 (TRBV20-1, TRBJ2-1)
CSAQPGGGPYNEQFF

SEQ ID NO: 8093 - protein, 15 aa, Homo sapiens
  CDR3 for alpha chain variable domain of TCR clone 4047 (TRAV17, TRAJ22)
CATAALLGSARQLTF

SEQ ID NO: 8094 - protein, 13 aa, Homo sapiens
  CDR3 for beta chain variable domain of TCR clone 4047 (TRBV29-1, TRBJ2-3)
CSVVPQGGDTQYF

SEQ ID NO: 8095 - protein, 14 aa, Homo sapiens
  CDR3 for alpha chain variable domain of TCR clone 4048 (TRAV8-1, TRAJ49)
CASSIANTGNQFYF

SEQ ID NO: 8096 - protein, 13 aa, Homo sapiens
  CDR3 for beta chain variable domain of TCR clone 4048 (TRBV11-2, TRBJ2-5)
CASSFSSQETQYF

SEQ ID NO: 8097 - protein, 17 aa, Homo sapiens
  CDR3 for alpha chain variable domain of TCR clone 4049 (TRAV4, )
CLVDIQNPDPAVYQLRD

SEQ ID NO: 8098 - protein, 15 aa, Homo sapiens
  CDR3 for beta chain variable domain of TCR clone 4049 (TRBV20-1, TRBJ1-5)
CSARVGRVVSQPQHF

SEQ ID NO: 8099 - protein, 12 aa, Homo sapiens
  CDR3 for alpha chain variable domain of TCR clone 4050 (TRAV12-1, TRAJ40)
CVVYSGTYKYIF

SEQ ID NO: 8100 - protein, 18 aa, Homo sapiens
  CDR3 for beta chain variable domain of TCR clone 4050 (TRBV11-3, TRBJ2-3)
CASSLGGASRGAPNTQYF

SEQ ID NO: 8101 - protein, 14 aa, Homo sapiens
  CDR3 for alpha chain variable domain of TCR clone 4051 (TRAV30, TRAJ26)
CGTEIVSYGQNFVF

SEQ ID NO: 8102 - protein, 13 aa, Homo sapiens
  CDR3 for beta chain variable domain of TCR clone 4051 (TRBV10-3, TRBJ2-7)
CASKLAVNYEQYF

SEQ ID NO: 8103 - protein, 12 aa, Homo sapiens
  CDR3 for alpha chain variable domain of TCR clone 4052 (TRAV30, TRAJ43)
CGTEERGNDMRF

SEQ ID NO: 8104 - protein, 14 aa, Homo sapiens
  CDR3 for beta chain variable domain of TCR clone 4052 (TRBV7-2, TRBJ2-7)
CASSPKTSFYEQYF

SEQ ID NO: 8105 - protein, 13 aa, Homo sapiens
  CDR3 for alpha chain variable domain of TCR clone 4053 (TRAV12-1, TRAJ33)
CGDAPDSNYQLIW

SEQ ID NO: 8106 - protein, 14 aa, Homo sapiens
  CDR3 for beta chain variable domain of TCR clone 4053 (TRBV13, TRBJ2-7)
CASSLKGASYEQYF

SEQ ID NO: 8107 - protein, 11 aa, Homo sapiens
  CDR3 for alpha chain variable domain of TCR clone 4054 (TRAV12-3, TRAJ43)
CAMSVSNDMRF

SEQ ID NO: 8108 - protein, 12 aa, Homo sapiens
  CDR3 for beta chain variable domain of TCR clone 4054 (TRBV20-1, TRBJ1-1)
QCSTWGGTEAFF

SEQ ID NO: 8109 - protein, 14 aa, Homo sapiens
  CDR3 for alpha chain variable domain of TCR clone 4055 (TRAV12-2, TRAJ13)
CAVKKTGGYQKVTF

SEQ ID NO: 8110 - protein, 18 aa, Homo sapiens
  CDR3 for beta chain variable domain of TCR clone 4055 (TRBV24-1, TRBJ2-2)
CATSDSGQGTANTGELFF

SEQ ID NO: 8111 - protein, 14 aa, Homo sapiens
  CDR3 for alpha chain variable domain of TCR clone 4056 (TRAV17, TRAJ45)
CATASGGGADGLTF

SEQ ID NO: 8112 - protein, 13 aa, Homo sapiens
  CDR3 for beta chain variable domain of TCR clone 4056 (TRBV15, TRBJ2-7)
CATSTTGHYEQYF

SEQ ID NO: 8113 - protein, 14 aa, Homo sapiens
  CDR3 for alpha chain variable domain of TCR clone 4057 (TRAV23/DV6, TRAJ22)
CAASVSGSARQLTF

SEQ ID NO: 8114 - protein, 13 aa, Homo sapiens
  CDR3 for beta chain variable domain of TCR clone 4057 (TRBV11-2, TRBJ2-5)
CASSRGPSETQYF

SEQ ID NO: 8115 - protein, 13 aa, Homo sapiens
  CDR3 for alpha chain variable domain of TCR clone 4058 (TRAV13-1, TRAJ5)
CAASDTGRRALTF

SEQ ID NO: 8116 - protein, 14 aa, Homo sapiens
  CDR3 for beta chain variable domain of TCR clone 4058 (TRBV4-2, TRBJ2-1)
CASGLDRAYNEQFF

SEQ ID NO: 8117 - protein, 11 aa, Homo sapiens
  CDR3 for alpha chain variable domain of TCR clone 4059 (TRAV1-2, TRAJ40)
CAVPGTYKYIF

SEQ ID NO: 8118 - protein, 15 aa, Homo sapiens
  CDR3 for beta chain variable domain of TCR clone 4059 (TRBV25-1, TRBJ1-4)
CASSPGDSTNEKLFF

SEQ ID NO: 8119 - protein, 16 aa, Homo sapiens
  CDR3 for alpha chain variable domain of TCR clone 4060 (TRAV8-2, TRAJ50)
CVVSDHMKTSYDKVIF

SEQ ID NO: 8120 - protein, 15 aa, Homo sapiens
  CDR3 for beta chain variable domain of TCR clone 4060 (TRBV7-2, TRBJ2-1)
CASSFQADEYNEQFF

SEQ ID NO: 8121 - protein, 12 aa, Homo sapiens
  CDR3 for alpha chain variable domain of TCR clone 4061 (TRAV12-3, TRAJ17)
CATTLTGNKLTF

SEQ ID NO: 8122 - protein, 15 aa, Homo sapiens
  CDR3 for beta chain variable domain of TCR clone 4061 (TRBV20-1, TRBJ2-7)
CSARDRVSGMDEQYF

SEQ ID NO: 8123 - protein, 17 aa, Homo sapiens
  CDR3 for alpha chain variable domain of TCR clone 4062 (TRAV38-2/DV8, TRAJ56)
CAYRSEVGTGANSKLTF

SEQ ID NO: 8124 - protein, 14 aa, Homo sapiens
  CDR3 for beta chain variable domain of TCR clone 4062 (TRBV11-1, TRBJ1-1)
CASSLEHPNTEAFF

SEQ ID NO: 8125 - protein, 16 aa, Homo sapiens
  CDR3 for alpha chain variable domain of TCR clone 4063 (TRAV13-1, TRAJ17)
CAASKGVKAAGNKLTF

SEQ ID NO: 8126 - protein, 15 aa, Homo sapiens
  CDR3 for beta chain variable domain of TCR clone 4063 (TRBV20-1, TRBJ1-5)
CSAREGGYSNQPQHF

SEQ ID NO: 8127 - protein, 17 aa, Homo sapiens
  CDR3 for alpha chain variable domain of TCR clone 4064 (TRAV13-2, TRAJ5)
CAESVVIVGHGQESTYF

SEQ ID NO: 8128 - protein, 18 aa, Homo sapiens
  CDR3 for beta chain variable domain of TCR clone 4064 (TRBV4-1, TRBJ2-3)
CASSHQLAGGRSTDTQYF

SEQ ID NO: 8129 - protein, 14 aa, Homo sapiens
  CDR3 for alpha chain variable domain of TCR clone 4065 (TRAV12-1, TRAJ42)
CVVIYGGSQGNLIF

SEQ ID NO: 8130 - protein, 17 aa, Homo sapiens
  CDR3 for beta chain variable domain of TCR clone 4065 (TRBV3-1, TRBJ2-6)
CASSPNTGPAGANVLTF

SEQ ID NO: 8131 - protein, 13 aa, Homo sapiens
  CDR3 for alpha chain variable domain of TCR clone 4066 (TRAV14/DV4, TRAJ16)
CAMREGSGQKLLF

SEQ ID NO: 8132 - protein, 15 aa, Homo sapiens
  CDR3 for beta chain variable domain of TCR clone 4066 (TRBV7-9, TRBJ2-7)
CASSLDLDRGYEQYF

SEQ ID NO: 8133 - protein, 15 aa, Homo sapiens
  CDR3 for alpha chain variable domain of TCR clone 4067 (TRAV27, TRAJ38)
CAARRNAGNNRKLIW

SEQ ID NO: 8134 - protein, 13 aa, Homo sapiens
  CDR3 for beta chain variable domain of TCR clone 4067 (TRBV12-5, TRBJ2-3)
CASGDRQSDTQYF

SEQ ID NO: 8135 - protein, 16 aa, Homo sapiens
  CDR3 for alpha chain variable domain of TCR clone 4068 (TRAV12-3, TRAJ18)
CAMRGSRGSTLGRLYF

SEQ ID NO: 8136 - protein, 19 aa, Homo sapiens
  CDR3 for beta chain variable domain of TCR clone 4068 (TRBV6-3, TRBJ2-7)
CASSYRTGLAGGVSGEQYF

SEQ ID NO: 8137 - protein, 16 aa, Homo sapiens
  CDR3 for alpha chain variable domain of TCR clone 4069 (TRAV27, TRAJ13)
CAGAKSDSGGYQKVTF

SEQ ID NO: 8138 - protein, 15 aa, Homo sapiens
  CDR3 for beta chain variable domain of TCR clone 4069 (TRBV3-1, TRBJ1-2)
CASSPTRLPEGGYTF

SEQ ID NO: 8139 - protein, 14 aa, Homo sapiens
  CDR3 for alpha chain variable domain of TCR clone 4070 (TRAV12-3, TRAJ10)
SHLPLTGGGNKLTF

SEQ ID NO: 8140 - protein, 14 aa, Homo sapiens
  CDR3 for beta chain variable domain of TCR clone 4070 (TRBV12-5, TRBJ2-5)
CASGSRTHQETQYF

SEQ ID NO: 8141 - protein, 13 aa, Homo sapiens
  CDR3 for alpha chain variable domain of TCR clone 4071 (TRAV17, TRAJ22)
CAHHSGSARQLTF

SEQ ID NO: 8142 - protein, 13 aa, Homo sapiens
  CDR3 for beta chain variable domain of TCR clone 4071 (TRBV27, TRBJ1-4)
CASSLMGDEKLFF

SEQ ID NO: 8143 - protein, 14 aa, Homo sapiens
  CDR3 for alpha chain variable domain of TCR clone 4072 (TRAV1-2, TRAJ8)
CAVREDTGFQELVF

SEQ ID NO: 8144 - protein, 16 aa, Homo sapiens
  CDR3 for beta chain variable domain of TCR clone 4072 (TRBV7-3, TRBJ2-2)
CASSLKRGTLSGELFF

SEQ ID NO: 8145 - protein, 15 aa, Homo sapiens
  CDR3 for alpha chain variable domain of TCR clone 4073 (TRAV3, TRAJ3)
CAVRDRDSSASKIIF

SEQ ID NO: 8146 - protein, 12 aa, Homo sapiens
  CDR3 for beta chain variable domain of TCR clone 4073 (TRBV29-1, TRBJ2-3)
CSVTGGADTQYF

SEQ ID NO: 8147 - protein, 11 aa, Homo sapiens
  CDR3 for alpha chain variable domain of TCR clone 4074 (TRAV23/DV6, TRAJ58)
CAARLLRGETS

SEQ ID NO: 8148 - protein, 14 aa, Homo sapiens
  CDR3 for beta chain variable domain of TCR clone 4074 (TRBV2, TRBJ2-7)
CASSLTSGGYEQYF

SEQ ID NO: 8149 - protein, 12 aa, Homo sapiens
  CDR3 for alpha chain variable domain of TCR clone 4075 (TRAV2, TRAJ31)
CAVEDNNARLMF

SEQ ID NO: 8150 - protein, 14 aa, Homo sapiens
  CDR3 for beta chain variable domain of TCR clone 4075 (TRBV28, TRBJ1-5)
CASSRTGLNQPQHF

SEQ ID NO: 8151 - protein, 12 aa, Homo sapiens
  CDR3 for alpha chain variable domain of TCR clone 4076 (TRAV17, TRAJ48)
CALNFGNEKLTF

SEQ ID NO: 8152 - protein, 13 aa, Homo sapiens
  CDR3 for beta chain variable domain of TCR clone 4076 (TRBV6-5, TRBJ2-5)
CASSSPGGETQYF

SEQ ID NO: 8153 - protein, 15 aa, Homo sapiens
  CDR3 for alpha chain variable domain of TCR clone 4077 (TRAV17, TRAJ45)
CATAYSGGGADGLTF

SEQ ID NO: 8154 - protein, 11 aa, Homo sapiens
  CDR3 for beta chain variable domain of TCR clone 4077 (TRBV7-8, TRBJ2-7)
CASSLSLEQYF

SEQ ID NO: 8155 - protein, 11 aa, Homo sapiens
  CDR3 for alpha chain variable domain of TCR clone 4078 (TRAV3, TRAJ21)
CAVGNFNKFYF

SEQ ID NO: 8156 - protein, 16 aa, Homo sapiens
  CDR3 for beta chain variable domain of TCR clone 4078 (TRBV19, TRBJ2-1)
CANSKAGPSSYNEQFF

SEQ ID NO: 8157 - protein, 11 aa, Homo sapiens
  CDR3 for alpha chain variable domain of TCR clone 4079 (TRAV21, TRAJ34)
CAHYNTDKLIF

SEQ ID NO: 8158 - protein, 13 aa, Homo sapiens
  CDR3 for beta chain variable domain of TCR clone 4079 (TRBV20-1, TRBJ2-7)
CSADPGATYEQYF

SEQ ID NO: 8159 - protein, 16 aa, Homo sapiens
  CDR3 for alpha chain variable domain of TCR clone 4080 (TRAV26-1, TRAJ47)
CIVRVVLSQYGNKLVF

SEQ ID NO: 8160 - protein, 16 aa, Homo sapiens
  CDR3 for beta chain variable domain of TCR clone 4080 (TRBV5-1, TRBJ2-1)
CASSFGVSGSYNEQFF

SEQ ID NO: 8161 - protein, 15 aa, Homo sapiens
  CDR3 for alpha chain variable domain of TCR clone 4081 (TRAV17, TRAJ57)
CATGPSQGGSEKLVF

SEQ ID NO: 8162 - protein, 15 aa, Homo sapiens
  CDR3 for beta chain variable domain of TCR clone 4081 (TRBV7-9, TRBJ1-6)
CASSSPGRGNSPLHF

SEQ ID NO: 8163 - protein, 12 aa, Homo sapiens
  CDR3 for alpha chain variable domain of TCR clone 4082 (TRAV1-1, TRAJ12)
CAVGDSSYKLIF

SEQ ID NO: 8164 - protein, 14 aa, Homo sapiens
  CDR3 for beta chain variable domain of TCR clone 4082 (TRBV20-1, TRBJ2-7)
CSAPELAGVGEQYF

SEQ ID NO: 8165 - protein, 12 aa, Homo sapiens
  CDR3 for alpha chain variable domain of TCR clone 4083 (TRAV13-1, TRAJ21)
CAAKEGFNKFYF

SEQ ID NO: 8166 - protein, 16 aa, Homo sapiens
  CDR3 for beta chain variable domain of TCR clone 4083 (TRBV7-2, TRBJ2-6)
CASSLAGRSGANVLTF

SEQ ID NO: 8167 - protein, 14 aa, Homo sapiens
  CDR3 for alpha chain variable domain of TCR clone 4084 (TRAV17, TRAJ42)
CAQNYGGSQGNLIF

SEQ ID NO: 8168 - protein, 13 aa, Homo sapiens
  CDR3 for beta chain variable domain of TCR clone 4084 (TRBV20-1, TRBJ1-2)
CSAPRSGRYGYTF

SEQ ID NO: 8169 - protein, 14 aa, Homo sapiens
  CDR3 for alpha chain variable domain of TCR clone 4085 (TRAV12-2, TRAJ17)
CAVLFKAAGNKLTF

SEQ ID NO: 8170 - protein, 14 aa, Homo sapiens
  CDR3 for beta chain variable domain of TCR clone 4085 (TRBV19, TRBJ2-1)
CASPTFVLSGEQFF

SEQ ID NO: 8171 - protein, 15 aa, Homo sapiens
  CDR3 for alpha chain variable domain of TCR clone 4086 (TRAV13-1, TRAJ5)
CAASPRGHGQESTYF

SEQ ID NO: 8172 - protein, 15 aa, Homo sapiens
  CDR3 for beta chain variable domain of TCR clone 4086 (TRBV6-1, TRBJ2-3)
CASSERGGITDTQYF

SEQ ID NO: 8173 - protein, 14 aa, Homo sapiens
  CDR3 for alpha chain variable domain of TCR clone 4087 (TRAV12-3, TRAJ10)
SHLPLTGGGNKLTF

SEQ ID NO: 8174 - protein, 17 aa, Homo sapiens
  CDR3 for beta chain variable domain of TCR clone 4087 (TRBV20-1, TRBJ2-1)
CSASSSGLAGSYNEQFF

SEQ ID NO: 8175 - protein, 11 aa, Homo sapiens
  CDR3 for alpha chain variable domain of TCR clone 4088 (TRAV12-2, TRAJ29)
CAVTLRSPLVF

SEQ ID NO: 8176 - protein, 16 aa, Homo sapiens
  CDR3 for beta chain variable domain of TCR clone 4088 (TRBV5-1, TRBJ2-2)
CASSLGGTGSTGELFF

SEQ ID NO: 8177 - protein, 18 aa, Homo sapiens
  CDR3 for alpha chain variable domain of TCR clone 4089 (TRAV12-2, )
CAVEDIQNPDPAVYQLRD

SEQ ID NO: 8178 - protein, 15 aa, Homo sapiens
  CDR3 for beta chain variable domain of TCR clone 4089 (TRBV11-1, TRBJ2-7)
CASSLNYGASYEQYF

SEQ ID NO: 8179 - protein, 12 aa, Homo sapiens
  CDR3 for alpha chain variable domain of TCR clone 4090 (TRAV12-2, TRAJ34)
CAVSYNTDKLIF

SEQ ID NO: 8180 - protein, 16 aa, Homo sapiens
  CDR3 for beta chain variable domain of TCR clone 4090 (TRBV27, TRBJ2-5)
CASSYGPGGQKETQYF

SEQ ID NO: 8181 - protein, 13 aa, Homo sapiens
  CDR3 for alpha chain variable domain of TCR clone 4091 (TRAV8-4, TRAJ9)
CAVSETGGFKTIF

SEQ ID NO: 8182 - protein, 14 aa, Homo sapiens
  CDR3 for beta chain variable domain of TCR clone 4091 (TRBV18, TRBJ2-3)
CASSGLADTDTQYF

SEQ ID NO: 8183 - protein, 14 aa, Homo sapiens
  CDR3 for alpha chain variable domain of TCR clone 4092 (TRAV12-1, TRAJ22)
CVVPYRGSARQLTF

SEQ ID NO: 8184 - protein, 15 aa, Homo sapiens
  CDR3 for beta chain variable domain of TCR clone 4092 (TRBV12-4, TRBJ2-1)
CASSLGTSAVNEQFF

SEQ ID NO: 8185 - protein, 13 aa, Homo sapiens
  CDR3 for alpha chain variable domain of TCR clone 4093 (TRAV13-2, TRAJ48)
CAEMDFGNEKLTF

SEQ ID NO: 8186 - protein, 12 aa, Homo sapiens
  CDR3 for beta chain variable domain of TCR clone 4093 (TRBV5-1, TRBJ1-2)
CASSQDTYGYTF

SEQ ID NO: 8187 - protein, 11 aa, Homo sapiens
  CDR3 for alpha chain variable domain of TCR clone 4094 (TRAV17, TRAJ9)
CGFTGGFKTIF

SEQ ID NO: 8188 - protein, 14 aa, Homo sapiens
  CDR3 for beta chain variable domain of TCR clone 4094 (TRBV11-2, TRBJ2-5)
CASSRTGGIETQYF

SEQ ID NO: 8189 - protein, 17 aa, Homo sapiens
  CDR3 for alpha chain variable domain of TCR clone 4095 (TRAV26-1, TRAJ46)
IASSESEKKSSGDKLTF

SEQ ID NO: 8190 - protein, 13 aa, Homo sapiens
  CDR3 for beta chain variable domain of TCR clone 4095 (TRBV12-5, TRBJ2-3)
CASGDRQSDTQYF

SEQ ID NO: 8191 - protein, 14 aa, Homo sapiens
  CDR3 for alpha chain variable domain of TCR clone 4096 (TRAV12-2, TRAJ45)
CAVNKGGGADGLTF

SEQ ID NO: 8192 - protein, 15 aa, Homo sapiens
  CDR3 for beta chain variable domain of TCR clone 4096 (TRBV9, TRBJ1-6)
CASSVAGTGDSPLHF

SEQ ID NO: 8193 - protein, 17 aa, Homo sapiens
  CDR3 for alpha chain variable domain of TCR clone 4097 (TRAV26-1, TRAJ37)
CIVRVITVSSNTGKLIF

SEQ ID NO: 8194 - protein, 15 aa, Homo sapiens
  CDR3 for beta chain variable domain of TCR clone 4097 (TRBV10-1, TRBJ2-3)
CASSATSGGFDTQYF

SEQ ID NO: 8195 - protein, 13 aa, Homo sapiens
  CDR3 for alpha chain variable domain of TCR clone 4098 (TRAV34, TRAJ33)
CGADMNSNYQLIW

SEQ ID NO: 8196 - protein, 16 aa, Homo sapiens
  CDR3 for beta chain variable domain of TCR clone 4098 (TRBV20-1, TRBJ2-1)
CSASLAGGPGYNEQFF

SEQ ID NO: 8197 - protein, 20 aa, Homo sapiens
  CDR3 for alpha chain variable domain of TCR clone 4099 (TRAV8-3, TRAJ44)
LSTSVLWVRLYTGTASKLTF

SEQ ID NO: 8198 - protein, 15 aa, Homo sapiens
  CDR3 for beta chain variable domain of TCR clone 4099 (TRBV6-5, TRBJ1-2)
CASSYSQAFNYGYTF

SEQ ID NO: 8199 - protein, 13 aa, Homo sapiens
  CDR3 for alpha chain variable domain of TCR clone 4100 (TRAV8-6, TRAJ49)
CAVITNTGNQFYF

SEQ ID NO: 8200 - protein, 12 aa, Homo sapiens
  CDR3 for beta chain variable domain of TCR clone 4100 (TRBV12-4, TRBJ2-7)
CASSLGGYEQYF

SEQ ID NO: 8201 - protein, 12 aa, Homo sapiens
  CDR3 for alpha chain variable domain of TCR clone 4101 (TRAV12-3, TRAJ17)
CAMTLTGNKLTF

SEQ ID NO: 8202 - protein, 15 aa, Homo sapiens
  CDR3 for beta chain variable domain of TCR clone 4101 (TRBV11-3, TRBJ2-7)
CASSPGPASSYEQYF

SEQ ID NO: 8203 - protein, 12 aa, Homo sapiens
  CDR3 for alpha chain variable domain of TCR clone 4102 (TRAV25, TRAJ11)
CAGASGYSTLTF

SEQ ID NO: 8204 - protein, 16 aa, Homo sapiens
  CDR3 for beta chain variable domain of TCR clone 4102 (TRBV15, TRBJ1-2)
CATSRGPRTGGGGYTF

SEQ ID NO: 8205 - protein, 12 aa, Homo sapiens
  CDR3 for alpha chain variable domain of TCR clone 4103 (TRAV12-3, TRAJ17)
CAMTLTGNKLTS

SEQ ID NO: 8206 - protein, 15 aa, Homo sapiens
  CDR3 for beta chain variable domain of TCR clone 4103 (TRBV20-1, TRBJ2-7)
CSARDRVSGMDEQYF

SEQ ID NO: 8207 - protein, 12 aa, Homo sapiens
  CDR3 for alpha chain variable domain of TCR clone 4104 (TRAV13-2, TRAJ23)
CAERHRGGKLIF

SEQ ID NO: 8208 - protein, 13 aa, Homo sapiens
  CDR3 for beta chain variable domain of TCR clone 4104 (TRBV20-1, TRBJ2-2)
CSALSGGAGELFF

SEQ ID NO: 8209 - protein, 14 aa, Homo sapiens
  CDR3 for alpha chain variable domain of TCR clone 4105 (TRAV12-3, TRAJ57)
CARALEGGSEKLVF

SEQ ID NO: 8210 - protein, 17 aa, Homo sapiens
  CDR3 for beta chain variable domain of TCR clone 4105 (TRBV11-3, TRBJ2-3)
CASSLGLTGGGTDTQYF

SEQ ID NO: 8211 - protein, 13 aa, Homo sapiens
  CDR3 for alpha chain variable domain of TCR clone 4106 (TRAV8-3, TRAJ28)
CAVGAVGSYQLTF

SEQ ID NO: 8212 - protein, 13 aa, Homo sapiens
  CDR3 for beta chain variable domain of TCR clone 4106 (TRBV19, TRBJ1-2)
CASSVPGQDGYTF

SEQ ID NO: 8213 - protein, 12 aa, Homo sapiens
  CDR3 for alpha chain variable domain of TCR clone 4107 (TRAV8-6, TRAJ43)
CAVSHNNNDMRF

SEQ ID NO: 8214 - protein, 14 aa, Homo sapiens
  CDR3 for beta chain variable domain of TCR clone 4107 (TRBV10-3, TRBJ1-1)
CAISDGSGVTEAFF

SEQ ID NO: 8215 - protein, 14 aa, Homo sapiens
  CDR3 for alpha chain variable domain of TCR clone 4108 (TRAV2, TRAJ9)
CAVEDRSGGFKTIF

SEQ ID NO: 8216 - protein, 17 aa, Homo sapiens
  CDR3 for beta chain variable domain of TCR clone 4108 (TRBV20-1, TRBJ2-7)
CSATRAGGVAGVEEQYF

SEQ ID NO: 8217 - protein, 12 aa, Homo sapiens
  CDR3 for alpha chain variable domain of TCR clone 4109 (TRAV12-3, TRAJ17)
CAMTLTGNKLTF

SEQ ID NO: 8218 - protein, 15 aa, Homo sapiens
  CDR3 for beta chain variable domain of TCR clone 4109 (TRBV6-4, TRBJ2-7)
CASSDQGPPNYEQYF

SEQ ID NO: 8219 - protein, 13 aa, Homo sapiens
  CDR3 for alpha chain variable domain of TCR clone 4110 (TRAV20, TRAJ31)
CAVQAWNNARLMF

SEQ ID NO: 8220 - protein, 13 aa, Homo sapiens
  CDR3 for beta chain variable domain of TCR clone 4110 (TRBV12-4, TRBJ1-2)
CASSLRQGKGYTF

SEQ ID NO: 8221 - protein, 14 aa, Homo sapiens
  CDR3 for alpha chain variable domain of TCR clone 4111 (TRAV4, TRAJ10)
CLVGDTGGGNKLTF

SEQ ID NO: 8222 - protein, 13 aa, Homo sapiens
  CDR3 for beta chain variable domain of TCR clone 4111 (TRBV10-2, TRBJ2-5)
CASSVGPQETQYF

SEQ ID NO: 8223 - protein, 16 aa, Homo sapiens
  CDR3 for alpha chain variable domain of TCR clone 4112 (TRAV26-1, TRAJ53)
CIVRVAMGGSNYKLTF

SEQ ID NO: 8224 - protein, 16 aa, Homo sapiens
  CDR3 for beta chain variable domain of TCR clone 4112 (TRBV28, TRBJ2-7)
CASSLFFETGGPEQYF

SEQ ID NO: 8225 - protein, 10 aa, Homo sapiens
  CDR3 for alpha chain variable domain of TCR clone 4113 (TRAV1-2, TRAJ23)
CAAWAGKLIF

SEQ ID NO: 8226 - protein, 14 aa, Homo sapiens
  CDR3 for beta chain variable domain of TCR clone 4113 (TRBV20-1, TRBJ2-7)
CSAKTGTGGYEQYF

SEQ ID NO: 8227 - protein, 13 aa, Homo sapiens
  CDR3 for alpha chain variable domain of TCR clone 4114 (TRAV2, TRAJ15)
CAVASQAGTALIF

SEQ ID NO: 8228 - protein, 13 aa, Homo sapiens
  CDR3 for beta chain variable domain of TCR clone 4114 (TRBV20-1, TRBJ1-1)
CSAPLGGGTEAFF

SEQ ID NO: 8229 - protein, 13 aa, Homo sapiens
  CDR3 for alpha chain variable domain of TCR clone 4115 (TRAV12-2, TRAJ26)
CAVNENYGQNFVF

SEQ ID NO: 8230 - protein, 13 aa, Homo sapiens
  CDR3 for beta chain variable domain of TCR clone 4115 (TRBV18, TRBJ2-2)
CASSPTRGGELFF

SEQ ID NO: 8231 - protein, 12 aa, Homo sapiens
  CDR3 for alpha chain variable domain of TCR clone 4116 (TRAV12-3, TRAJ17)
CAMTLTGNKLTF

SEQ ID NO: 8232 - protein, 13 aa, Homo sapiens
  CDR3 for beta chain variable domain of TCR clone 4116 (TRBV12-4, TRBJ1-1)
CASSPGTGFEAFF

SEQ ID NO: 8233 - protein, 12 aa, Homo sapiens
  CDR3 for alpha chain variable domain of TCR clone 4117 (TRAV25, TRAJ5)
CAGGGGRRALTF

SEQ ID NO: 8234 - protein, 15 aa, Homo sapiens
  CDR3 for beta chain variable domain of TCR clone 4117 (TRBV19, TRBJ2-4)
CASRGPRRGENIQYF

SEQ ID NO: 8235 - protein, 13 aa, Homo sapiens
  CDR3 for alpha chain variable domain of TCR clone 4118 (TRAV8-4, TRAJ39)
STPPSDAGNMLTF

SEQ ID NO: 8236 - protein, 13 aa, Homo sapiens
  CDR3 for beta chain variable domain of TCR clone 4118 (TRBV12-4, TRBJ2-7)
CASSPTETYEQYF

SEQ ID NO: 8237 - protein, 14 aa, Homo sapiens
  CDR3 for alpha chain variable domain of TCR clone 4119 (TRAV12-1, TRAJ17)
CVVNYKAAGNKLTF

SEQ ID NO: 8238 - protein, 15 aa, Homo sapiens
  CDR3 for beta chain variable domain of TCR clone 4119 (TRBV18, TRBJ2-7)
CASSPTFMDSYEQYF

SEQ ID NO: 8239 - protein, 13 aa, Homo sapiens
  CDR3 for alpha chain variable domain of TCR clone 4120 (TRAV1-1, TRAJ9)
CAAKNTGGFKTIF

SEQ ID NO: 8240 - protein, 16 aa, Homo sapiens
  CDR3 for beta chain variable domain of TCR clone 4120 (TRBV12-5, TRBJ2-5)
CASGPRTSGNQETQYF

SEQ ID NO: 8241 - protein, 10 aa, Homo sapiens
  CDR3 for alpha chain variable domain of TCR clone 4121 (TRAV13-1, TRAJ8)
CAAPFQKLVF

SEQ ID NO: 8242 - protein, 20 aa, Homo sapiens
  CDR3 for beta chain variable domain of TCR clone 4121 (TRBV3-1, TRBJ2-6)
CASSPRPGLEGGAGANVLTF

SEQ ID NO: 8243 - protein, 15 aa, Homo sapiens
  CDR3 for alpha chain variable domain of TCR clone 4122 (TRAV21, TRAJ53)
CATLNSGGSNYKLTF

SEQ ID NO: 8244 - protein, 15 aa, Homo sapiens
  CDR3 for beta chain variable domain of TCR clone 4122 (TRBV7-6, TRBJ1-5)
CASSQSSGINQPQHF

SEQ ID NO: 8245 - protein, 13 aa, Homo sapiens
  CDR3 for alpha chain variable domain of TCR clone 4123 (TRAV35, TRAJ21)
CAGQLSNFNKFYF

SEQ ID NO: 8246 - protein, 16 aa, Homo sapiens
  CDR3 for beta chain variable domain of TCR clone 4123 (TRBV4-3, TRBJ2-2)
CASSHLQGSGTGELFF

SEQ ID NO: 8247 - protein, 15 aa, Homo sapiens
  CDR3 for alpha chain variable domain of TCR clone 4124 (TRAV8-3, TRAJ45)
CASSYSGGGADGLTF

SEQ ID NO: 8248 - protein, 13 aa, Homo sapiens
  CDR3 for beta chain variable domain of TCR clone 4124 (TRBV20-1, TRBJ2-2)
CSASAAGTGELFF

SEQ ID NO: 8249 - protein, 13 aa, Homo sapiens
  CDR3 for alpha chain variable domain of TCR clone 4125 (TRAV8-3, TRAJ28)
CAVGAVGSYQLTF

SEQ ID NO: 8250 - protein, 13 aa, Homo sapiens
  CDR3 for beta chain variable domain of TCR clone 4125 (TRBV29-1, TRBJ2-1)
CSVEGGRVNEQFF

SEQ ID NO: 8251 - protein, 19 aa, Homo sapiens
  CDR3 for alpha chain variable domain of TCR clone 4126 (TRAV1-2, TRAJ26)
CLLPLCCERPDNYGQNFVF

SEQ ID NO: 8252 - protein, 17 aa, Homo sapiens
  CDR3 for beta chain variable domain of TCR clone 4126 (TRBV13, TRBJ2-3)
CASSLSRVAGGRNTQYF

SEQ ID NO: 8253 - protein, 17 aa, Homo sapiens
  CDR3 for alpha chain variable domain of TCR clone 4127 (TRAV23/DV6, TRAJ12)
CAAIDLGAMDSSYKLIF

SEQ ID NO: 8254 - protein, 12 aa, Homo sapiens
  CDR3 for beta chain variable domain of TCR clone 4127 (TRBV10-3, TRBJ2-2)
CAIRENTGELFF

SEQ ID NO: 8255 - protein, 13 aa, Homo sapiens
  CDR3 for alpha chain variable domain of TCR clone 4128 (TRAV21, TRAJ27)
CAARPGNAGKSTF

SEQ ID NO: 8256 - protein, 20 aa, Homo sapiens
  CDR3 for beta chain variable domain of TCR clone 4128 (TRBV7-8, TRBJ2-2)
CASSHLFPGPTIHITGELFF

SEQ ID NO: 8257 - protein, 14 aa, Homo sapiens
  CDR3 for alpha chain variable domain of TCR clone 4129 (TRAV35, TRAJ33)
CAGSSQDSNYQLIW

SEQ ID NO: 8258 - protein, 15 aa, Homo sapiens
  CDR3 for beta chain variable domain of TCR clone 4129 (TRBV28, TRBJ2-5)
CASSPGQGSIETQYF

SEQ ID NO: 8259 - protein, 13 aa, Homo sapiens
  CDR3 for alpha chain variable domain of TCR clone 4130 (TRAV20, TRAJ20)
CAVRDFNDYKLSF

SEQ ID NO: 8260 - protein, 12 aa, Homo sapiens
  CDR3 for beta chain variable domain of TCR clone 4130 (TRBV9, TRBJ2-1)
CASSITYNEQFF

SEQ ID NO: 8261 - protein, 17 aa, Homo sapiens
  CDR3 for alpha chain variable domain of TCR clone 4131 (TRAV8-3, TRAJ52)
CAVGAEAGGTSYGKLTF

SEQ ID NO: 8262 - protein, 15 aa, Homo sapiens
  CDR3 for beta chain variable domain of TCR clone 4131 (TRBV5-1, TRBJ2-5)
CASSRQGLGQETQYF

SEQ ID NO: 8263 - protein, 16 aa, Homo sapiens
  CDR3 for alpha chain variable domain of TCR clone 4132 (TRAV12-2, TRAJ10)
CAVNRVLTGGGNKLTF

SEQ ID NO: 8264 - protein, 16 aa, Homo sapiens
  CDR3 for beta chain variable domain of TCR clone 4132 (TRBV12-5, TRBJ2-5)
CASGPRTSGNQETQYF

SEQ ID NO: 8265 - protein, 14 aa, Homo sapiens
  CDR3 for alpha chain variable domain of TCR clone 4133 (TRAV12-3, TRAJ10)
SHLPLTGGGNKLTF

SEQ ID NO: 8266 - protein, 17 aa, Homo sapiens
  CDR3 for beta chain variable domain of TCR clone 4133 (TRBV13, TRBJ2-3)
CASSLSRVAGGRNTQYF

SEQ ID NO: 8267 - protein, 15 aa, Homo sapiens
  CDR3 for alpha chain variable domain of TCR clone 4134 (TRAV21, TRAJ24)
CAARSSTDSWGKLQF

SEQ ID NO: 8268 - protein, 15 aa, Homo sapiens
  CDR3 for beta chain variable domain of TCR clone 4134 (TRBV20-1, TRBJ1-1)
CSASRGVTGNTEAFF

SEQ ID NO: 8269 - protein, 17 aa, Homo sapiens
  CDR3 for alpha chain variable domain of TCR clone 4135 (TRAV3, TRAJ6)
CAVRDGPRAGGSYIPTF

SEQ ID NO: 8270 - protein, 14 aa, Homo sapiens
  CDR3 for beta chain variable domain of TCR clone 4135 (TRBV7-2, TRBJ2-7)
CASSPKTSLYEQYF

SEQ ID NO: 8271 - protein, 14 aa, Homo sapiens
  CDR3 for alpha chain variable domain of TCR clone 4136 (TRAV8-6, TRAJ52)
CAVIGGTSYGKLTF

SEQ ID NO: 8272 - protein, 15 aa, Homo sapiens
  CDR3 for beta chain variable domain of TCR clone 4136 (TRBV11-2, TRBJ2-5)
CASSLGAGGVETQYF

SEQ ID NO: 8273 - protein, 15 aa, Homo sapiens
  CDR3 for alpha chain variable domain of TCR clone 4137 (TRAV16, TRAJ48)
CALFISNFGNEKLTF

SEQ ID NO: 8274 - protein, 15 aa, Homo sapiens
  CDR3 for beta chain variable domain of TCR clone 4137 (TRBV5-4, TRBJ2-7)
CASSRFGTGSYEQYF

SEQ ID NO: 8275 - protein, 20 aa, Homo sapiens
  CDR3 for alpha chain variable domain of TCR clone 4138 (TRAV25, TRAJ33)
TATQTTDVGTSRGSNYQLIW

SEQ ID NO: 8276 - protein, 14 aa, Homo sapiens
  CDR3 for beta chain variable domain of TCR clone 4138 (TRBV7-2, TRBJ2-5)
CASSTGGELKTQYF

SEQ ID NO: 8277 - protein, 15 aa, Homo sapiens
  CDR3 for alpha chain variable domain of TCR clone 4139 (TRAV13-1, TRAJ52)
CAATSPRTSYGKLTF

SEQ ID NO: 8278 - protein, 12 aa, Homo sapiens
  CDR3 for beta chain variable domain of TCR clone 4139 (TRBV7-8, TRBJ2-7)
CASSLGDREQYF

SEQ ID NO: 8279 - protein, 11 aa, Homo sapiens
  CDR3 for alpha chain variable domain of TCR clone 4140 (TRAV3, TRAJ21)
CAVGNFNKFYF

SEQ ID NO: 8280 - protein, 15 aa, Homo sapiens
  CDR3 for beta chain variable domain of TCR clone 4140 (TRBV29-1, TRBJ2-1)
CSVEGGPASYNEQFF

SEQ ID NO: 8281 - protein, 14 aa, Homo sapiens
  CDR3 for alpha chain variable domain of TCR clone 4141 (TRAV16, TRAJ40)
CALHESYYLRNLQI

SEQ ID NO: 8282 - protein, 12 aa, Homo sapiens
  CDR3 for beta chain variable domain of TCR clone 4141 (TRBV7-3, TRBJ2-3)
CASSSLTDTQYF

SEQ ID NO: 8283 - protein, 14 aa, Homo sapiens
  CDR3 for alpha chain variable domain of TCR clone 4142 (TRAV1-2, TRAJ6)
CAVRSSGGSYIPTF

SEQ ID NO: 8284 - protein, 16 aa, Homo sapiens
  CDR3 for beta chain variable domain of TCR clone 4142 (TRBV7-3, TRBJ2-2)
CASSLKRGTLSGELFF

SEQ ID NO: 8285 - protein, 11 aa, Homo sapiens
  CDR3 for alpha chain variable domain of TCR clone 4143 (TRAV2, TRAJ33)
CAVESNYQLIW

SEQ ID NO: 8286 - protein, 15 aa, Homo sapiens
  CDR3 for beta chain variable domain of TCR clone 4143 (TRBV19, TRBJ1-1)
CASTSGQIQDTEAFF

SEQ ID NO: 8287 - protein, 14 aa, Homo sapiens
  CDR3 for alpha chain variable domain of TCR clone 4144 (TRAV12-2, TRAJ13)
CAVKKTGGYQKVTF

SEQ ID NO: 8288 - protein, 15 aa, Homo sapiens
  CDR3 for beta chain variable domain of TCR clone 4144 (TRBV7-2, TRBJ2-1)
CASSLASGRVNEQFF

SEQ ID NO: 8289 - protein, 14 aa, Homo sapiens
  CDR3 for alpha chain variable domain of TCR clone 4145 (TRAV13-1, TRAJ35)
CAASKGGFGNVLHC

SEQ ID NO: 8290 - protein, 13 aa, Homo sapiens
  CDR3 for beta chain variable domain of TCR clone 4145 (TRBV7-3, TRBJ1-1)
CASSQDWGAKAFF

SEQ ID NO: 8291 - protein, 13 aa, Homo sapiens
  CDR3 for alpha chain variable domain of TCR clone 4146 (TRAV27, TRAJ41)
CAGEGNSGYALNF

SEQ ID NO: 8292 - protein, 16 aa, Homo sapiens
  CDR3 for beta chain variable domain of TCR clone 4146 (TRBV29-1, TRBJ2-7)
CSVEVVGTSGSYEQYF

SEQ ID NO: 8293 - protein, 12 aa, Homo sapiens
  CDR3 for alpha chain variable domain of TCR clone 4147 (TRAV35, TRAJ39)
LAPNNAGNMLTF

SEQ ID NO: 8294 - protein, 13 aa, Homo sapiens
  CDR3 for beta chain variable domain of TCR clone 4147 (TRBV19, TRBJ1-3)
CASRLSLGNTIYF

SEQ ID NO: 8295 - protein, 11 aa, Homo sapiens
  CDR3 for alpha chain variable domain of TCR clone 4148 (TRAV8-6, TRAJ34)
CAVWNTDKLIF

SEQ ID NO: 8296 - protein, 16 aa, Homo sapiens
  CDR3 for beta chain variable domain of TCR clone 4148 (TRBV5-1, TRBJ2-7)
CASSYASTSSGGEQYF

SEQ ID NO: 8297 - protein, 17 aa, Homo sapiens
  CDR3 for alpha chain variable domain of TCR clone 4149 (TRAV13-1, TRAJ52)
CAASSGAGGTSYGKLTF

SEQ ID NO: 8298 - protein, 17 aa, Homo sapiens
  CDR3 for beta chain variable domain of TCR clone 4149 (TRBV11-2, TRBJ2-1)
CASSLYPPGVEYNEQFF

SEQ ID NO: 8299 - protein, 14 aa, Homo sapiens
  CDR3 for alpha chain variable domain of TCR clone 4150 (TRAV38-2/DV8, TRAJ42)
CAYPEGGSQGNLIF

SEQ ID NO: 8300 - protein, 15 aa, Homo sapiens
  CDR3 for beta chain variable domain of TCR clone 4150 (TRBV19, TRBJ2-1)
CASSTGTSSYNEQFF

SEQ ID NO: 8301 - protein, 11 aa, Homo sapiens
  CDR3 for alpha chain variable domain of TCR clone 4151 (TRAV2, TRAJ13)
CASGGYQKVTF

SEQ ID NO: 8302 - protein, 15 aa, Homo sapiens
  CDR3 for beta chain variable domain of TCR clone 4151 (TRBV20-1, TRBJ2-7)
CSARVPAAYFYEQYF

SEQ ID NO: 8303 - protein, 19 aa, Homo sapiens
  CDR3 for alpha chain variable domain of TCR clone 4152 (TRAV25, TRAJ20)
TATQTTDVGILPHDYKLSF

SEQ ID NO: 8304 - protein, 17 aa, Homo sapiens
  CDR3 for beta chain variable domain of TCR clone 4152 (TRBV4-3, TRBJ2-1)
CASSQFSSGRASGEQFF

SEQ ID NO: 8305 - protein, 15 aa, Homo sapiens
  CDR3 for alpha chain variable domain of TCR clone 4153 (TRAV29/DV5, TRAJ53)
CAASASGGSNYKLTF

SEQ ID NO: 8306 - protein, 19 aa, Homo sapiens
  CDR3 for beta chain variable domain of TCR clone 4153 (TRBV5-1, TRBJ2-3)
CASSLWLAGGITTTDTQYF

SEQ ID NO: 8307 - protein, 16 aa, Homo sapiens
  CDR3 for alpha chain variable domain of TCR clone 4154 (TRAV23/DV6, TRAJ9)
CAASIGGNTGGFKTIF

SEQ ID NO: 8308 - protein, 12 aa, Homo sapiens
  CDR3 for beta chain variable domain of TCR clone 4154 (TRBV6-3, TRBJ2-7)
CASSEPGFEQYF

SEQ ID NO: 8309 - protein, 15 aa, Homo sapiens
  CDR3 for alpha chain variable domain of TCR clone 4155 (TRAV12-3, TRAJ22)
CAMRSSSGSARQLTF

SEQ ID NO: 8310 - protein, 18 aa, Homo sapiens
  CDR3 for beta chain variable domain of TCR clone 4155 (TRBV27, TRBJ2-1)
CASRRSGRGESSGNEQFF

SEQ ID NO: 8311 - protein, 12 aa, Homo sapiens
  CDR3 for alpha chain variable domain of TCR clone 4156 (TRAV30, TRAJ15)
CGTNQAGTALIF

SEQ ID NO: 8312 - protein, 13 aa, Homo sapiens
  CDR3 for beta chain variable domain of TCR clone 4156 (TRBV24-1, TRBJ2-7)
CATSDLGPYEQYF

SEQ ID NO: 8313 - protein, 14 aa, Homo sapiens
  CDR3 for alpha chain variable domain of TCR clone 4157 (TRAV34, TRAJ44)
CGADGTGTASKLTF

SEQ ID NO: 8314 - protein, 17 aa, Homo sapiens
  CDR3 for beta chain variable domain of TCR clone 4157 (TRBV11-2, TRBJ2-1)
CASSLYPPGVEYNEQFF

SEQ ID NO: 8315 - protein, 15 aa, Homo sapiens
  CDR3 for alpha chain variable domain of TCR clone 4158 (TRAV2, TRAJ15)
CAVEDRGQAGTALIF

SEQ ID NO: 8316 - protein, 15 aa, Homo sapiens
  CDR3 for beta chain variable domain of TCR clone 4158 (TRBV20-1, TRBJ1-5)
CSATSDRGLGQPQHF

SEQ ID NO: 8317 - protein, 13 aa, Homo sapiens
  CDR3 for alpha chain variable domain of TCR clone 4159 (TRAV35, TRAJ57)
CWSPQGGSEKLVF

SEQ ID NO: 8318 - protein, 18 aa, Homo sapiens
  CDR3 for beta chain variable domain of TCR clone 4159 (TRBV6-6, TRBJ1-3)
CASSYSKWDSISGNTIYF

SEQ ID NO: 8319 - protein, 13 aa, Homo sapiens
  CDR3 for alpha chain variable domain of TCR clone 4160 (TRAV13-1, TRAJ40)
CAAISPGTYKYIF

SEQ ID NO: 8320 - protein, 12 aa, Homo sapiens
  CDR3 for beta chain variable domain of TCR clone 4160 (TRBV3-1, TRBJ2-1)
CASGGLGNEQFF

SEQ ID NO: 8321 - protein, 12 aa, Homo sapiens
  CDR3 for alpha chain variable domain of TCR clone 4161 (TRAV12-3, TRAJ17)
CAMTLTGNKLTF

SEQ ID NO: 8322 - protein, 15 aa, Homo sapiens
  CDR3 for beta chain variable domain of TCR clone 4161 (TRBV20-1, TRBJ2-7)
CSASDRVSGMDEQYF

SEQ ID NO: 8323 - protein, 15 aa, Homo sapiens
  CDR3 for alpha chain variable domain of TCR clone 4162 (TRAV8-6, TRAJ10)
CAVSSKGGGGNKLTF

SEQ ID NO: 8324 - protein, 15 aa, Homo sapiens
  CDR3 for beta chain variable domain of TCR clone 4162 (TRBV28, TRBJ1-2)
CASSSHSIANYGYTF

SEQ ID NO: 8325 - protein, 11 aa, Homo sapiens
  CDR3 for alpha chain variable domain of TCR clone 4163 (TRAV2, TRAJ13)
CASGGYQKVTF

SEQ ID NO: 8326 - protein, 15 aa, Homo sapiens
  CDR3 for beta chain variable domain of TCR clone 4163 (TRBV11-2, TRBJ2-2)
CASSSDRVNAGELFF

SEQ ID NO: 8327 - protein, 14 aa, Homo sapiens
  CDR3 for alpha chain variable domain of TCR clone 4164 (TRAV12-2, TRAJ44)
CAVNPAGTASKLTF

SEQ ID NO: 8328 - protein, 16 aa, Homo sapiens
  CDR3 for beta chain variable domain of TCR clone 4164 (TRBV2, TRBJ2-1)
CASSVGGSLSYNEQFF

SEQ ID NO: 8329 - protein, 12 aa, Homo sapiens
  CDR3 for alpha chain variable domain of TCR clone 4165 (TRAV36/DV7, TRAJ26)
CAVDNYGQNFVF

SEQ ID NO: 8330 - protein, 16 aa, Homo sapiens
  CDR3 for beta chain variable domain of TCR clone 4165 (TRBV7-3, TRBJ2-2)
CASSLTGTGTTGELFF

SEQ ID NO: 8331 - protein, 13 aa, Homo sapiens
  CDR3 for alpha chain variable domain of TCR clone 4166 (TRAV6, TRAJ33)
CALPMDSNYQLIW

SEQ ID NO: 8332 - protein, 15 aa, Homo sapiens
  CDR3 for beta chain variable domain of TCR clone 4166 (TRBV11-2, TRBJ2-2)
CASRGLAANTGELFF

SEQ ID NO: 8333 - protein, 14 aa, Homo sapiens
  CDR3 for alpha chain variable domain of TCR clone 4167 (TRAV12-2, TRAJ12)
CAVINRDSSYKLIF

SEQ ID NO: 8334 - protein, 15 aa, Homo sapiens
  CDR3 for beta chain variable domain of TCR clone 4167 (TRBV28, TRBJ2-1)
CASSLDTSSYNEQFF

SEQ ID NO: 8335 - protein, 13 aa, Homo sapiens
  CDR3 for alpha chain variable domain of TCR clone 4168 (TRAV2, TRAJ40)
CAVVTSGTYKYIF

SEQ ID NO: 8336 - protein, 14 aa, Homo sapiens
  CDR3 for beta chain variable domain of TCR clone 4168 (TRBV19, TRBJ2-1)
CASPTFALSGEQFF

SEQ ID NO: 8337 - protein, 16 aa, Homo sapiens
  CDR3 for alpha chain variable domain of TCR clone 4169 (TRAV1-2, TRAJ10)
CAVRDQGGGGGNKLTF

SEQ ID NO: 8338 - protein, 13 aa, Homo sapiens
  CDR3 for beta chain variable domain of TCR clone 4169 (TRBV29-1, TRBJ1-1)
CSVGDSRNTEAFF

SEQ ID NO: 8339 - protein, 14 aa, Homo sapiens
  CDR3 for alpha chain variable domain of TCR clone 4170 (TRAV13-1, TRAJ3)
CAASKSSSASKIIF

SEQ ID NO: 8340 - protein, 16 aa, Homo sapiens
  CDR3 for beta chain variable domain of TCR clone 4170 (TRBV15, TRBJ2-3)
CATSRDLGIVTDTQYF

SEQ ID NO: 8341 - protein, 14 aa, Homo sapiens
  CDR3 for alpha chain variable domain of TCR clone 4171 (TRAV4, TRAJ30)
CLVGDMNRDDKIIF

SEQ ID NO: 8342 - protein, 16 aa, Homo sapiens
  CDR3 for beta chain variable domain of TCR clone 4171 (TRBV20-1, TRBJ1-4)
CSAPGQGLLTNEKLFF

SEQ ID NO: 8343 - protein, 13 aa, Homo sapiens
  CDR3 for alpha chain variable domain of TCR clone 4172 (TRAV29/DV5, TRAJ31)
CAASRNNNARLMF

SEQ ID NO: 8344 - protein, 12 aa, Homo sapiens
  CDR3 for beta chain variable domain of TCR clone 4172 (TRBV11-2, TRBJ2-1)
CASSPGNNEQFF

SEQ ID NO: 8345 - protein, 16 aa, Homo sapiens
  CDR3 for alpha chain variable domain of TCR clone 4173 (TRAV12-2, TRAJ39)
CAVNRGPNNAGNMLTF

SEQ ID NO: 8346 - protein, 10 aa, Homo sapiens
  CDR3 for beta chain variable domain of TCR clone 4173 (TRBV2, TRBJ2-4)
CASRGSIQYF

SEQ ID NO: 8347 - protein, 14 aa, Homo sapiens
  CDR3 for alpha chain variable domain of TCR clone 4174 (TRAV1-2, TRAJ8)
CAVREDTGFQKLVF

SEQ ID NO: 8348 - protein, 13 aa, Homo sapiens
  CDR3 for beta chain variable domain of TCR clone 4174 (TRBV20-1, TRBJ1-4)
CSARTPYNEKLFF

SEQ ID NO: 8349 - protein, 17 aa, Homo sapiens
  CDR3 for alpha chain variable domain of TCR clone 4175 (TRAV36/DV7, TRAJ52)
CAVAQRAGGTSYGKLTF

SEQ ID NO: 8350 - protein, 14 aa, Homo sapiens
  CDR3 for beta chain variable domain of TCR clone 4175 (TRBV19, TRBJ2-1)
CASPTFVLSGEQFF

SEQ ID NO: 8351 - protein, 13 aa, Homo sapiens
  CDR3 for alpha chain variable domain of TCR clone 4176 (TRAV8-3, TRAJ31)
CAVGARNNARLMF

SEQ ID NO: 8352 - protein, 14 aa, Homo sapiens
  CDR3 for beta chain variable domain of TCR clone 4176 (TRBV12-5, TRBJ2-5)
CASGSRTHQETQYF

SEQ ID NO: 8353 - protein, 14 aa, Homo sapiens
  CDR3 for alpha chain variable domain of TCR clone 4177 (TRAV12-1, TRAJ45)
CVVNVGGGADGLTF

SEQ ID NO: 8354 - protein, 14 aa, Homo sapiens
  CDR3 for beta chain variable domain of TCR clone 4177 (TRBV29-1, TRBJ2-3)
CSVEPGTRTDTQYF

SEQ ID NO: 8355 - protein, 13 aa, Homo sapiens
  CDR3 for alpha chain variable domain of TCR clone 4178 (TRAV13-2, TRAJ40)
CAEFTSGTYKYIF

SEQ ID NO: 8356 - protein, 12 aa, Homo sapiens
  CDR3 for beta chain variable domain of TCR clone 4178 (TRBV11-2, TRBJ2-2)
CASSLGGGELFF

SEQ ID NO: 8357 - protein, 13 aa, Homo sapiens
  CDR3 for alpha chain variable domain of TCR clone 4179 (TRAV2, TRAJ40)
CAVVTSGTYRYIF

SEQ ID NO: 8358 - protein, 14 aa, Homo sapiens
  CDR3 for beta chain variable domain of TCR clone 4179 (TRBV19, TRBJ2-1)
CASPTFVLSGEQFF

SEQ ID NO: 8359 - protein, 13 aa, Homo sapiens
  CDR3 for alpha chain variable domain of TCR clone 4180 (TRAV8-1, TRAJ47)
CAVGMEYGNKLVF

SEQ ID NO: 8360 - protein, 13 aa, Homo sapiens
  CDR3 for beta chain variable domain of TCR clone 4180 (TRBV20-1, TRBJ2-2)
CSARVANTGELFF

SEQ ID NO: 8361 - protein, 14 aa, Homo sapiens
  CDR3 for alpha chain variable domain of TCR clone 4181 (TRAV2, TRAJ9)
CAVEDRSGGFKTIF

SEQ ID NO: 8362 - protein, 13 aa, Homo sapiens
  CDR3 for beta chain variable domain of TCR clone 4181 (TRBV7-3, TRBJ2-5)
CASSFRGGETQYF

SEQ ID NO: 8363 - protein, 14 aa, Homo sapiens
  CDR3 for alpha chain variable domain of TCR clone 4182 (TRAV13-2, TRAJ10)
CAENITGGGNKLTF

SEQ ID NO: 8364 - protein, 15 aa, Homo sapiens
  CDR3 for beta chain variable domain of TCR clone 4182 (TRBV7-2, TRBJ2-7)
CASSLGGAKSGEQYF

SEQ ID NO: 8365 - protein, 16 aa, Homo sapiens
  CDR3 for alpha chain variable domain of TCR clone 4183 (TRAV8-3, TRAJ44)
CAVGTLMTGTASKLTF

SEQ ID NO: 8366 - protein, 15 aa, Homo sapiens
  CDR3 for beta chain variable domain of TCR clone 4183 (TRBV10-2, TRBJ2-6)
CASSEQGTGANVLTF

SEQ ID NO: 8367 - protein, 14 aa, Homo sapiens
  CDR3 for alpha chain variable domain of TCR clone 4184 (TRAV17, TRAJ17)
CATDDAAAGNKLTF

SEQ ID NO: 8368 - protein, 16 aa, Homo sapiens
  CDR3 for beta chain variable domain of TCR clone 4184 (TRBV19, TRBJ2-1)
CASSIETGSPYNEQFF

SEQ ID NO: 8369 - protein, 14 aa, Homo sapiens
  CDR3 for alpha chain variable domain of TCR clone 4185 (TRAV1-2, TRAJ8)
CAVREDTGFQKLVF

SEQ ID NO: 8370 - protein, 14 aa, Homo sapiens
  CDR3 for beta chain variable domain of TCR clone 4185 (TRBV19, TRBJ2-1)
CASPTFVLSGEQFF

SEQ ID NO: 8371 - protein, 16 aa, Homo sapiens
  CDR3 for alpha chain variable domain of TCR clone 4186 (TRAV3, TRAJ10)
CAVRDMRAGGGNKLTF

SEQ ID NO: 8372 - protein, 15 aa, Homo sapiens
  CDR3 for beta chain variable domain of TCR clone 4186 (TRBV6-3, TRBJ2-7)
CASSSPGTVFYEQYF

SEQ ID NO: 8373 - protein, 16 aa, Homo sapiens
  CDR3 for alpha chain variable domain of TCR clone 4187 (TRAV23/DV6, TRAJ9)
CAASIGGNTGGFKTIF

SEQ ID NO: 8374 - protein, 18 aa, Homo sapiens
  CDR3 for beta chain variable domain of TCR clone 4187 (TRBV7-9, TRBJ2-7)
CASSLTTSGSRTWYEQYF

SEQ ID NO: 8375 - protein, 14 aa, Homo sapiens
  CDR3 for alpha chain variable domain of TCR clone 4188 (TRAV8-1, TRAJ4)
CAVPFSGGYNKLIF

SEQ ID NO: 8376 - protein, 16 aa, Homo sapiens
  CDR3 for beta chain variable domain of TCR clone 4188 (TRBV6-1, TRBJ1-2)
CASSGAWQGRSHGYTF

SEQ ID NO: 8377 - protein, 13 aa, Homo sapiens
  CDR3 for alpha chain variable domain of TCR clone 4189 (TRAV25, TRAJ47)
CAGHREYGNKLVF

SEQ ID NO: 8378 - protein, 17 aa, Homo sapiens
  CDR3 for beta chain variable domain of TCR clone 4189 (TRBV7-8, TRBJ2-5)
CASSLASGGRFQETQYF

SEQ ID NO: 8379 - protein, 16 aa, Homo sapiens
  CDR3 for alpha chain variable domain of TCR clone 4190 (TRAV1-2, TRAJ40)
CAVRGSRTSGTYKYIF

SEQ ID NO: 8380 - protein, 14 aa, Homo sapiens
  CDR3 for beta chain variable domain of TCR clone 4190 (TRBV4-1, TRBJ2-3)
CASSQDSGTDTQYF

SEQ ID NO: 8381 - protein, 13 aa, Homo sapiens
  CDR3 for alpha chain variable domain of TCR clone 4191 (TRAV1-2, TRAJ20)
CAVRDGNDYKLSF

SEQ ID NO: 8382 - protein, 16 aa, Homo sapiens
  CDR3 for beta chain variable domain of TCR clone 4191 (TRBV12-5, TRBJ2-5)
CASGPRTSGNQETQYF

SEQ ID NO: 8383 - protein, 12 aa, Homo sapiens
  CDR3 for alpha chain variable domain of TCR clone 4192 (TRAV2, TRAJ33)
CAVPDSNYQLIW

SEQ ID NO: 8384 - protein, 20 aa, Homo sapiens
  CDR3 for beta chain variable domain of TCR clone 4192 (TRBV19, TRBJ2-1)
CASSISRTVTSTRLNNEQFF

SEQ ID NO: 8385 - protein, 16 aa, Homo sapiens
  CDR3 for alpha chain variable domain of TCR clone 4193 (TRAV21, TRAJ37)
CAVRTAGSSDTGKLIF

SEQ ID NO: 8386 - protein, 13 aa, Homo sapiens
  CDR3 for beta chain variable domain of TCR clone 4193 (TRBV7-9, TRBJ2-5)
CASLPSGRETQYF

SEQ ID NO: 8387 - protein, 13 aa, Homo sapiens
  CDR3 for alpha chain variable domain of TCR clone 4194 (TRAV38-2/DV8, TRAJ45)
CAYVGGGADGLTF

SEQ ID NO: 8388 - protein, 13 aa, Homo sapiens
  CDR3 for beta chain variable domain of TCR clone 4194 (TRBV29-1, TRBJ2-1)
CSVEGGRVNEQFF

SEQ ID NO: 8389 - protein, 16 aa, Homo sapiens
  CDR3 for alpha chain variable domain of TCR clone 4195 (TRAV12-2, TRAJ56)
CAVRRVDTGANSKLTF

SEQ ID NO: 8390 - protein, 11 aa, Homo sapiens
  CDR3 for beta chain variable domain of TCR clone 4195 (TRBV3-1, TRBJ2-7)
CASSQVREQYF

SEQ ID NO: 8391 - protein, 14 aa, Homo sapiens
  CDR3 for alpha chain variable domain of TCR clone 4196 (TRAV8-4, TRAJ54)
CAVSEVLGAQKLVF

SEQ ID NO: 8392 - protein, 17 aa, Homo sapiens
  CDR3 for beta chain variable domain of TCR clone 4196 (TRBV4-1, TRBJ1-4)
CASSQEGPRGVEEKLFF

SEQ ID NO: 8393 - protein, 13 aa, Homo sapiens
  CDR3 for alpha chain variable domain of TCR clone 4197 (TRAV2, TRAJ40)
CAVVTSGTYKYIF

SEQ ID NO: 8394 - protein, 14 aa, Homo sapiens
  CDR3 for beta chain variable domain of TCR clone 4197 (TRBV19, TRBJ2-1)
CASPTFVLSGGQFF

SEQ ID NO: 8395 - protein, 14 aa, Homo sapiens
  CDR3 for alpha chain variable domain of TCR clone 4198 (TRAV12-2, TRAJ53)
CAVKGGGSNYKLTF

SEQ ID NO: 8396 - protein, 15 aa, Homo sapiens
  CDR3 for beta chain variable domain of TCR clone 4198 (TRBV11-2, TRBJ2-2)
CASSLDTGNTGELFF

SEQ ID NO: 8397 - protein, 14 aa, Homo sapiens
  CDR3 for alpha chain variable domain of TCR clone 4199 (TRAV1-2, TRAJ16)
CAVNRFSDGQKLLF

SEQ ID NO: 8398 - protein, 19 aa, Homo sapiens
  CDR3 for beta chain variable domain of TCR clone 4199 (TRBV25-1, TRBJ2-2)
CAILVYRVDRGRKTGELFF

SEQ ID NO: 8399 - protein, 15 aa, Homo sapiens
  CDR3 for alpha chain variable domain of TCR clone 4200 (TRAV27, TRAJ38)
CAARRNAGNNRKRIW

SEQ ID NO: 8400 - protein, 13 aa, Homo sapiens
  CDR3 for beta chain variable domain of TCR clone 4200 (TRBV12-5, TRBJ2-3)
CASGDRQSDTQYF

SEQ ID NO: 8401 - protein, 14 aa, Homo sapiens
  CDR3 for alpha chain variable domain of TCR clone 4201 (TRAV26-1, TRAJ52)
CIPAGGTSYGKLTF

SEQ ID NO: 8402 - protein, 16 aa, Homo sapiens
  CDR3 for beta chain variable domain of TCR clone 4201 (TRBV19, TRBJ2-2)
CASTIGARAGAGELFF

SEQ ID NO: 8403 - protein, 11 aa, Homo sapiens
  CDR3 for alpha chain variable domain of TCR clone 4202 (TRAV4, TRAJ31)
CLVGDNARLMF

SEQ ID NO: 8404 - protein, 14 aa, Homo sapiens
  CDR3 for beta chain variable domain of TCR clone 4202 (TRBV4-1, TRBJ2-2)
CASSQAVNTGELFF

SEQ ID NO: 8405 - protein, 16 aa, Homo sapiens
  CDR3 for alpha chain variable domain of TCR clone 4203 (TRAV30, TRAJ24)
CGTAIVDADSWGKFQF

SEQ ID NO: 8406 - protein, 14 aa, Homo sapiens
  CDR3 for beta chain variable domain of TCR clone 4203 (TRBV12-5, TRBJ2-5)
CASGSRTHQETQYF

SEQ ID NO: 8407 - protein, 18 aa, Homo sapiens
  CDR3 for alpha chain variable domain of TCR clone 4204 (TRAV13-1, TRAJ52)
CAAKNPNAGGTSYGKLTF

SEQ ID NO: 8408 - protein, 15 aa, Homo sapiens
  CDR3 for beta chain variable domain of TCR clone 4204 (TRBV2, TRBJ2-2)
CASSRETVGTGELFF

SEQ ID NO: 8409 - protein, 14 aa, Homo sapiens
  CDR3 for alpha chain variable domain of TCR clone 4205 (TRAV26-1, TRAJ38)
CIADNAGNNRKLIW

SEQ ID NO: 8410 - protein, 15 aa, Homo sapiens
  CDR3 for beta chain variable domain of TCR clone 4205 (TRBV4-1, TRBJ1-1)
CASSQEWGHYTEAFF

SEQ ID NO: 8411 - protein, 12 aa, Homo sapiens
  CDR3 for alpha chain variable domain of TCR clone 4206 (TRAV21, TRAJ33)
CAKMDSNYQLIW

SEQ ID NO: 8412 - protein, 18 aa, Homo sapiens
  CDR3 for beta chain variable domain of TCR clone 4206 (TRBV15, TRBJ2-3)
CATSRDGARSWDTDTQYF

SEQ ID NO: 8413 - protein, 12 aa, Homo sapiens
  CDR3 for alpha chain variable domain of TCR clone 4207 (TRAV12-2, TRAJ31)
CAVNTPDARLMF

SEQ ID NO: 8414 - protein, 15 aa, Homo sapiens
  CDR3 for beta chain variable domain of TCR clone 4207 (TRBV20-1, TRBJ2-7)
CSAESGTSGAYEQYF

SEQ ID NO: 8415 - protein, 14 aa, Homo sapiens
  CDR3 for alpha chain variable domain of TCR clone 4208 (TRAV26-1, TRAJ15)
CIVRANQAGTALIF

SEQ ID NO: 8416 - protein, 16 aa, Homo sapiens
  CDR3 for beta chain variable domain of TCR clone 4208 (TRBV20-1, TRBJ1-4)
CSAIGGPRGANEKLFF

SEQ ID NO: 8417 - protein, 13 aa, Homo sapiens
  CDR3 for alpha chain variable domain of TCR clone 4209 (TRAV12-1, TRAJ49)
CVVILNTGNQFYF

SEQ ID NO: 8418 - protein, 13 aa, Homo sapiens
  CDR3 for beta chain variable domain of TCR clone 4209 (TRBV10-3, TRBJ2-7)
CASKLAVNYEQYF

SEQ ID NO: 8419 - protein, 11 aa, Homo sapiens
  CDR3 for alpha chain variable domain of TCR clone 4210 (TRAV27, TRAJ47)
CAGAYGNKLVF

SEQ ID NO: 8420 - protein, 15 aa, Homo sapiens
  CDR3 for beta chain variable domain of TCR clone 4210 (TRBV9, TRBJ2-7)
CASSPHEQGSYEQYF

SEQ ID NO: 8421 - protein, 15 aa, Homo sapiens
  CDR3 for alpha chain variable domain of TCR clone 4211 (TRAV12-2, TRAJ42)
CAVNSHGGSQGNLIF

SEQ ID NO: 8422 - protein, 13 aa, Homo sapiens
  CDR3 for beta chain variable domain of TCR clone 4211 (TRBV27, TRBJ1-1)
CASSVSANTEAFF

SEQ ID NO: 8423 - protein, 14 aa, Homo sapiens
  CDR3 for alpha chain variable domain of TCR clone 4212 (TRAV2, TRAJ9)
CAVEDRSGGFKTIF

SEQ ID NO: 8424 - protein, 15 aa, Homo sapiens
  CDR3 for beta chain variable domain of TCR clone 4212 (TRBV5-7, TRBJ1-5)
CASSYGKLWDQPQHF

SEQ ID NO: 8425 - protein, 12 aa, Homo sapiens
  CDR3 for alpha chain variable domain of TCR clone 4213 (TRAV12-1, TRAJ9)
CVVHTGGFKTIF

SEQ ID NO: 8426 - protein, 16 aa, Homo sapiens
  CDR3 for beta chain variable domain of TCR clone 4213 (TRBV6-1, TRBJ2-1)
CASSARLAGSYNEQFF

SEQ ID NO: 8427 - protein, 14 aa, Homo sapiens
  CDR3 for alpha chain variable domain of TCR clone 4214 (TRAV1-1, TRAJ27)
CAVIYNTNAGKSTF

SEQ ID NO: 8428 - protein, 12 aa, Homo sapiens
  CDR3 for beta chain variable domain of TCR clone 4214 (TRBV11-2, TRBJ2-1)
CASSPGNNEQFF

SEQ ID NO: 8429 - protein, 11 aa, Homo sapiens
  CDR3 for alpha chain variable domain of TCR clone 4215 (TRAV21, TRAJ11)
CAVNGYSTLTF

SEQ ID NO: 8430 - protein, 11 aa, Homo sapiens
  CDR3 for beta chain variable domain of TCR clone 4215 (TRBV19, TRBJ1-1)
CASSIGSGAFF

SEQ ID NO: 8431 - protein, 11 aa, Homo sapiens
  CDR3 for alpha chain variable domain of TCR clone 4216 (TRAV26-2, TRAJ8)
CILTGFQKLVF

SEQ ID NO: 8432 - protein, 19 aa, Homo sapiens
  CDR3 for beta chain variable domain of TCR clone 4216 (TRBV20-1, TRBJ2-1)
CSARGETSGNSPQIDEQFF

SEQ ID NO: 8433 - protein, 16 aa, Homo sapiens
  CDR3 for alpha chain variable domain of TCR clone 4217 (TRAV3, TRAJ40)
CAVRDRIASGTYKYIF

SEQ ID NO: 8434 - protein, 16 aa, Homo sapiens
  CDR3 for beta chain variable domain of TCR clone 4217 (TRBV6-1, TRBJ1-2)
CASSEANSIINYGYTF

SEQ ID NO: 8435 - protein, 16 aa, Homo sapiens
  CDR3 for alpha chain variable domain of TCR clone 4218 (TRAV30, TRAJ24)
CGTEIVDADSRGKFQF

SEQ ID NO: 8436 - protein, 14 aa, Homo sapiens
  CDR3 for beta chain variable domain of TCR clone 4218 (TRBV12-5, TRBJ2-5)
CASGSRTHQETQYF

SEQ ID NO: 8437 - protein, 11 aa, Homo sapiens
  CDR3 for alpha chain variable domain of TCR clone 4219 (TRAV2, TRAJ13)
CASGGYQKVTF

SEQ ID NO: 8438 - protein, 13 aa, Homo sapiens
  CDR3 for beta chain variable domain of TCR clone 4219 (TRBV20-1, TRBJ1-1)
CSAPLGGGTEAFF

SEQ ID NO: 8439 - protein, 17 aa, Homo sapiens
  CDR3 for alpha chain variable domain of TCR clone 4220 (TRAV3, TRAJ42)
CAVRDRDYGGSQGNLIF

SEQ ID NO: 8440 - protein, 14 aa, Homo sapiens
  CDR3 for beta chain variable domain of TCR clone 4220 (TRBV19, TRBJ2-2)
CTSSGQGIAGELFF

SEQ ID NO: 8441 - protein, 13 aa, Homo sapiens
  CDR3 for alpha chain variable domain of TCR clone 4221 (TRAV21, TRAJ45)
CAVMGGGADGLTF

SEQ ID NO: 8442 - protein, 16 aa, Homo sapiens
  CDR3 for beta chain variable domain of TCR clone 4221 (TRBV20-1, TRBJ2-1)
CSARDHLAGGRGEQFF

SEQ ID NO: 8443 - protein, 16 aa, Homo sapiens
  CDR3 for alpha chain variable domain of TCR clone 4222 (TRAV12-2, TRAJ18)
CAVTTDRGSTLGRLYF

SEQ ID NO: 8444 - protein, 15 aa, Homo sapiens
  CDR3 for beta chain variable domain of TCR clone 4222 (TRBV9, TRBJ1-6)
CASSVAGTGDSPLHF

SEQ ID NO: 8445 - protein, 22 aa, Homo sapiens
  CDR3 for alpha chain variable domain of TCR clone 4223 (TRAV8-3, TRAJ32)
CAVEVVLQTSSSLELALCLLSS

SEQ ID NO: 8446 - protein, 12 aa, Homo sapiens
  CDR3 for beta chain variable domain of TCR clone 4223 (TRBV7-8, TRBJ2-7)
CASSLGDREQYF

SEQ ID NO: 8447 - protein, 16 aa, Homo sapiens
  CDR3 for alpha chain variable domain of TCR clone 4224 (TRAV26-1, TRAJ36)
CIVRVPDQTGANNLFF

SEQ ID NO: 8448 - protein, 21 aa, Homo sapiens
  CDR3 for beta chain variable domain of TCR clone 4224 (TRBV6-1, TRBJ1-1)
CASSGVGNYKGISGFDTEAFF

SEQ ID NO: 8449 - protein, 15 aa, Homo sapiens
  CDR3 for alpha chain variable domain of TCR clone 4225 (TRAV12-3, TRAJ6)
CAMSATTGGSYIPTF

SEQ ID NO: 8450 - protein, 15 aa, Homo sapiens
  CDR3 for beta chain variable domain of TCR clone 4225 (TRBV28, TRBJ2-5)
CASSPPWSYQETQYF

SEQ ID NO: 8451 - protein, 13 aa, Homo sapiens
  CDR3 for alpha chain variable domain of TCR clone 4226 (TRAV8-3, TRAJ31)
CAVGARNNARLMF

SEQ ID NO: 8452 - protein, 16 aa, Homo sapiens
  CDR3 for beta chain variable domain of TCR clone 4226 (TRBV18, TRBJ1-3)
CASSLGILNGENTIYF

SEQ ID NO: 8453 - protein, 16 aa, Homo sapiens
  CDR3 for alpha chain variable domain of TCR clone 4227 (TRAV26-1, TRAJ33)
CIVPFWGEDSNYQLIW

SEQ ID NO: 8454 - protein, 14 aa, Homo sapiens
  CDR3 for beta chain variable domain of TCR clone 4227 (TRBV6-3, TRBJ1-1)
CASSYHSKNTEAFF

SEQ ID NO: 8455 - protein, 10 aa, Homo sapiens
  CDR3 for alpha chain variable domain of TCR clone 4228 (TRAV2, TRAJ34)
CAVVNDKLIF

SEQ ID NO: 8456 - protein, 12 aa, Homo sapiens
  CDR3 for beta chain variable domain of TCR clone 4228 (TRBV7-8, TRBJ2-7)
CASSLGDREQYF

SEQ ID NO: 8457 - protein, 17 aa, Homo sapiens
  CDR3 for alpha chain variable domain of TCR clone 4229 (TRAV12-2, TRAJ42)
CAVNILNYGGSQGNLIF

SEQ ID NO: 8458 - protein, 13 aa, Homo sapiens
  CDR3 for beta chain variable domain of TCR clone 4229 (TRBV3-1, TRBJ1-5)
CASSQDLDQPQHF

SEQ ID NO: 8459 - protein, 14 aa, Homo sapiens
  CDR3 for alpha chain variable domain of TCR clone 4230 (TRAV1-2, TRAJ8)
CAVREDTGFQKLVF

SEQ ID NO: 8460 - protein, 13 aa, Homo sapiens
  CDR3 for beta chain variable domain of TCR clone 4230 (TRBV27, TRBJ1-1)
CASSLSIGAEAFF

SEQ ID NO: 8461 - protein, 10 aa, Homo sapiens
  CDR3 for alpha chain variable domain of TCR clone 4231 (TRAV9-2, TRAJ34)
CALSDDKLIF

SEQ ID NO: 8462 - protein, 14 aa, Homo sapiens
  CDR3 for beta chain variable domain of TCR clone 4231 (TRBV7-8, TRBJ2-7)
CASSVGQGAYEQYF

SEQ ID NO: 8463 - protein, 15 aa, Homo sapiens
  CDR3 for alpha chain variable domain of TCR clone 4232 (TRAV17, TRAJ22)
CATVAPSGSARQLTF

SEQ ID NO: 8464 - protein, 15 aa, Homo sapiens
  CDR3 for beta chain variable domain of TCR clone 4232 (TRBV27, TRBJ1-6)
CASSFDRGLGSPLHF

SEQ ID NO: 8465 - protein, 12 aa, Homo sapiens
  CDR3 for alpha chain variable domain of TCR clone 4233 (TRAV27, TRAJ58)
CAGARDTSRLTF

SEQ ID NO: 8466 - protein, 15 aa, Homo sapiens
  CDR3 for beta chain variable domain of TCR clone 4233 (TRBV3-1, TRBJ2-7)
CASSQVAGAQYEQYF

SEQ ID NO: 8467 - protein, 16 aa, Homo sapiens
  CDR3 for alpha chain variable domain of TCR clone 4234 (TRAV3, TRAJ37)
CAVRPHGSGNTGKLIF

SEQ ID NO: 8468 - protein, 16 aa, Homo sapiens
  CDR3 for beta chain variable domain of TCR clone 4234 (TRBV20-1, TRBJ1-4)
CSAPGQGLLTNEKLFF

SEQ ID NO: 8469 - protein, 12 aa, Homo sapiens
  CDR3 for alpha chain variable domain of TCR clone 4235 (TRAV29/DV5, TRAJ49)
CAASAIGNQFYF

SEQ ID NO: 8470 - protein, 17 aa, Homo sapiens
  CDR3 for beta chain variable domain of TCR clone 4235 (TRBV5-1, TRBJ2-2)
CASSRTSGRFSTGELFF

SEQ ID NO: 8471 - protein, 10 aa, Homo sapiens
  CDR3 for alpha chain variable domain of TCR clone 4236 (TRAV12-2, TRAJ10)
CAAWTGVETH

SEQ ID NO: 8472 - protein, 17 aa, Homo sapiens
  CDR3 for beta chain variable domain of TCR clone 4236 (TRBV13, TRBJ2-3)
CASSLSRVAGGRNTQYF

SEQ ID NO: 8473 - protein, 12 aa, Homo sapiens
  CDR3 for alpha chain variable domain of TCR clone 4237 (TRAV12-2, TRAJ42)
CAVGGSQGNLIF

SEQ ID NO: 8474 - protein, 16 aa, Homo sapiens
  CDR3 for beta chain variable domain of TCR clone 4237 (TRBV7-3, TRBJ2-2)
CASSLKRGTLSGELFF

SEQ ID NO: 8475 - protein, 11 aa, Homo sapiens
  CDR3 for alpha chain variable domain of TCR clone 4238 (TRAV3, TRAJ21)
CAVGNFNKFYF

SEQ ID NO: 8476 - protein, 15 aa, Homo sapiens
  CDR3 for beta chain variable domain of TCR clone 4238 (TRBV20-1, TRBJ2-7)
CSARDRVSGMDEQYF

SEQ ID NO: 8477 - protein, 14 aa, Homo sapiens
  CDR3 for alpha chain variable domain of TCR clone 4239 (TRAV12-2, TRAJ53)
CRERGGGSNYKLTF

SEQ ID NO: 8478 - protein, 17 aa, Homo sapiens
  CDR3 for beta chain variable domain of TCR clone 4239 (TRBV7-3, TRBJ2-3)
CASSLMKRMRGADTQYF

SEQ ID NO: 8479 - protein, 11 aa, Homo sapiens
  CDR3 for alpha chain variable domain of TCR clone 4240 (TRAV16, TRAJ26)
CALTRWSEFCL

SEQ ID NO: 8480 - protein, 16 aa, Homo sapiens
  CDR3 for beta chain variable domain of TCR clone 4240 (TRBV9, TRBJ2-1)
CASSVGGGGNYNEQFF

SEQ ID NO: 8481 - protein, 15 aa, Homo sapiens
  CDR3 for alpha chain variable domain of TCR clone 4241 (TRAV13-2, TRAJ5)
CAENPHWTGRRALTF

SEQ ID NO: 8482 - protein, 14 aa, Homo sapiens
  CDR3 for beta chain variable domain of TCR clone 4241 (TRBV5-7, TRBJ2-7)
CASSFKGATGEQYF

SEQ ID NO: 8483 - protein, 13 aa, Homo sapiens
  CDR3 for alpha chain variable domain of TCR clone 4242 (TRAV36/DV7, TRAJ37)
CAVFSSNTGKLIF

SEQ ID NO: 8484 - protein, 18 aa, Homo sapiens
  CDR3 for beta chain variable domain of TCR clone 4242 (TRBV11-2, TRBJ2-3)
CASSLGGASRGAPNTQYF

SEQ ID NO: 8485 - protein, 18 aa, Homo sapiens
  CDR3 for alpha chain variable domain of TCR clone 4243 (TRAV26-2, TRAJ32)
CILRAPLNYGGATNKLIF

SEQ ID NO: 8486 - protein, 13 aa, Homo sapiens
  CDR3 for beta chain variable domain of TCR clone 4243 (TRBV7-3, TRBJ2-1)
CASSLWPYNEQFF

SEQ ID NO: 8487 - protein, 17 aa, Homo sapiens
  CDR3 for alpha chain variable domain of TCR clone 4244 (TRAV13-1, TRAJ28)
CAASPPYSGAGSYQLTF

SEQ ID NO: 8488 - protein, 14 aa, Homo sapiens
  CDR3 for beta chain variable domain of TCR clone 4244 (TRBV24-1, TRBJ1-1)
CATSIPRGDTEAFF

SEQ ID NO: 8489 - protein, 14 aa, Homo sapiens
  CDR3 for alpha chain variable domain of TCR clone 4245 (TRAV2, TRAJ37)
CAVDFTSNTGKLIF

SEQ ID NO: 8490 - protein, 15 aa, Homo sapiens
  CDR3 for beta chain variable domain of TCR clone 4245 (TRBV20-1, TRBJ1-1)
CSASQGVTGNTEAFF

SEQ ID NO: 8491 - protein, 16 aa, Homo sapiens
  CDR3 for alpha chain variable domain of TCR clone 4246 (TRAV35, TRAJ42)
GRMERYYGGSQGNLIF

SEQ ID NO: 8492 - protein, 15 aa, Homo sapiens
  CDR3 for beta chain variable domain of TCR clone 4246 (TRBV6-1, TRBJ2-7)
CASSDWDKPNYEQYF

SEQ ID NO: 8493 - protein, 13 aa, Homo sapiens
  CDR3 for alpha chain variable domain of TCR clone 4247 (TRAV30, TRAJ24)
CGTVTDSWGKLQF

SEQ ID NO: 8494 - protein, 15 aa, Homo sapiens
  CDR3 for beta chain variable domain of TCR clone 4247 (TRBV9, TRBJ1-6)
CASSVAGTGDSPLHF

SEQ ID NO: 8495 - protein, 15 aa, Homo sapiens
  CDR3 for alpha chain variable domain of TCR clone 4248 (TRAV2, TRAJ15)
CAVEDRNQAGTALIF

SEQ ID NO: 8496 - protein, 13 aa, Homo sapiens
  CDR3 for beta chain variable domain of TCR clone 4248 (TRBV10-2, TRBJ2-7)
CASSESGVYEQYF

SEQ ID NO: 8497 - protein, 14 aa, Homo sapiens
  CDR3 for alpha chain variable domain of TCR clone 4249 (TRAV12-1, TRAJ3)
CVVNPGSSASKIIF

SEQ ID NO: 8498 - protein, 15 aa, Homo sapiens
  CDR3 for beta chain variable domain of TCR clone 4249 (TRBV5-7, TRBJ1-2)
CAGSSPGQGNYGYTF

SEQ ID NO: 8499 - protein, 14 aa, Homo sapiens
  CDR3 for alpha chain variable domain of TCR clone 4250 (TRAV21, TRAJ58)
CAVGEETSGSRLTF

SEQ ID NO: 8500 - protein, 14 aa, Homo sapiens
  CDR3 for beta chain variable domain of TCR clone 4250 (TRBV7-2, TRBJ1-1)
CASSFLTGTTEAFF

SEQ ID NO: 8501 - protein, 14 aa, Homo sapiens
  CDR3 for alpha chain variable domain of TCR clone 4251 (TRAV1-2, TRAJ16)
CAVNRFSDGQKLLF

SEQ ID NO: 8502 - protein, 17 aa, Homo sapiens
  CDR3 for beta chain variable domain of TCR clone 4251 (TRBV7-3, TRBJ2-3)
CASSLMKRMRGADTQYF

SEQ ID NO: 8503 - protein, 12 aa, Homo sapiens
  CDR3 for alpha chain variable domain of TCR clone 4252 (TRAV8-2, TRAJ45)
CVQGGGADGLTF

SEQ ID NO: 8504 - protein, 14 aa, Homo sapiens
  CDR3 for beta chain variable domain of TCR clone 4252 (TRBV4-3, TRBJ1-1)
CASSQGWTPARAFF

SEQ ID NO: 8505 - protein, 21 aa, Homo sapiens
  CDR3 for alpha chain variable domain of TCR clone 4253 (TRAV26-1, TRAJ17)
CCVLLHRQSSGSKAAGNKLTF

SEQ ID NO: 8506 - protein, 14 aa, Homo sapiens
  CDR3 for beta chain variable domain of TCR clone 4253 (TRBV28, TRBJ1-2)
CASRIQGANYGYTF

SEQ ID NO: 8507 - protein, 15 aa, Homo sapiens
  CDR3 for alpha chain variable domain of TCR clone 4254 (TRAV8-4, TRAJ45)
CAVIWTGGGADGLTF

SEQ ID NO: 8508 - protein, 12 aa, Homo sapiens
  CDR3 for beta chain variable domain of TCR clone 4254 (TRBV29-1, TRBJ2-7)
CSVGPSGDEQYF

SEQ ID NO: 8509 - protein, 14 aa, Homo sapiens
  CDR3 for alpha chain variable domain of TCR clone 4255 (TRAV26-1, TRAJ38)
CIADNAGNNRKLIW

SEQ ID NO: 8510 - protein, 14 aa, Homo sapiens
  CDR3 for beta chain variable domain of TCR clone 4255 (TRBV18, TRBJ2-7)
CASSPRGGSYEQYF

SEQ ID NO: 8511 - protein, 20 aa, Homo sapiens
  CDR3 for alpha chain variable domain of TCR clone 4256 (TRAV26-1, TRAJ47)
CCVLLHRQSSFMEYGNKLVF

SEQ ID NO: 8512 - protein, 14 aa, Homo sapiens
  CDR3 for beta chain variable domain of TCR clone 4256 (TRBV7-2, TRBJ1-2)
CASSRGGTNYGYTF

SEQ ID NO: 8513 - protein, 14 aa, Homo sapiens
  CDR3 for alpha chain variable domain of TCR clone 4257 (TRAV12-2, TRAJ23)
CAVGGYNQGGKLIF

SEQ ID NO: 8514 - protein, 15 aa, Homo sapiens
  CDR3 for beta chain variable domain of TCR clone 4257 (TRBV20-1, TRBJ2-3)
CSASSGGPRTDTQYF

SEQ ID NO: 8515 - protein, 12 aa, Homo sapiens
  CDR3 for alpha chain variable domain of TCR clone 4258 (TRAV16, TRAJ10)
CSRTGGGNKLTF

SEQ ID NO: 8516 - protein, 14 aa, Homo sapiens
  CDR3 for beta chain variable domain of TCR clone 4258 (TRBV7-2, TRBJ2-7)
CASRSQGAAYEQYF

SEQ ID NO: 8517 - protein, 12 aa, Homo sapiens
  CDR3 for alpha chain variable domain of TCR clone 4259 (TRAV12-3, TRAJ17)
CAMTLTGNKLTF

SEQ ID NO: 8518 - protein, 11 aa, Homo sapiens
  CDR3 for beta chain variable domain of TCR clone 4259 (TRBV12-4, TRBJ2-2)
CASSSAGELFF

SEQ ID NO: 8519 - protein, 14 aa, Homo sapiens
  CDR3 for alpha chain variable domain of TCR clone 4260 (TRAV1-2, TRAJ16)
CAVNRFSDGQKLLF

SEQ ID NO: 8520 - protein, 13 aa, Homo sapiens
  CDR3 for beta chain variable domain of TCR clone 4260 (TRBV20-1, TRBJ1-1)
CSARVGGNTEAFF

SEQ ID NO: 8521 - protein, 13 aa, Homo sapiens
  CDR3 for alpha chain variable domain of TCR clone 4261 (TRAV12-3, TRAJ49)
CAMSRNTGNQFYF

SEQ ID NO: 8522 - protein, 16 aa, Homo sapiens
  CDR3 for beta chain variable domain of TCR clone 4261 (TRBV5-8, TRBJ2-2)
CASSLINPGGAGELFF

SEQ ID NO: 8523 - protein, 13 aa, Homo sapiens
  CDR3 for alpha chain variable domain of TCR clone 4262 (TRAV3, TRAJ26)
CAVSRGYGQNFVF

SEQ ID NO: 8524 - protein, 15 aa, Homo sapiens
  CDR3 for beta chain variable domain of TCR clone 4262 (TRBV27, TRBJ2-1)
CASSLARGAYNEQFF

SEQ ID NO: 8525 - protein, 13 aa, Homo sapiens
  CDR3 for alpha chain variable domain of TCR clone 4263 (TRAV12-1, TRAJ20)
CVGQRFNDYKLSF

SEQ ID NO: 8526 - protein, 14 aa, Homo sapiens
  CDR3 for beta chain variable domain of TCR clone 4263 (TRBV6-3, TRBJ1-5)
CASSYSRFAQPQHF

SEQ ID NO: 8527 - protein, 15 aa, Homo sapiens
  CDR3 for alpha chain variable domain of TCR clone 4264 (TRAV8-3, TRAJ15)
CAVGAANQAGTALIF

SEQ ID NO: 8528 - protein, 14 aa, Homo sapiens
  CDR3 for beta chain variable domain of TCR clone 4264 (TRBV20-1, TRBJ2-1)
CSPNDEASYNEQFF

SEQ ID NO: 8529 - protein, 16 aa, Homo sapiens
  CDR3 for alpha chain variable domain of TCR clone 4265 (TRAV3, TRAJ37)
CAVRVRGSGNTGKLIF

SEQ ID NO: 8530 - protein, 16 aa, Homo sapiens
  CDR3 for beta chain variable domain of TCR clone 4265 (TRBV11-2, TRBJ2-7)
CASSPTTGGVSYEQYF

SEQ ID NO: 8531 - protein, 14 aa, Homo sapiens
  CDR3 for alpha chain variable domain of TCR clone 4266 (TRAV21, TRAJ45)
CAVHSGGGADGLTF

SEQ ID NO: 8532 - protein, 14 aa, Homo sapiens
  CDR3 for beta chain variable domain of TCR clone 4266 (TRBV20-1, TRBJ2-1)
CSARRLAEANEQFF

SEQ ID NO: 8533 - protein, 14 aa, Homo sapiens
  CDR3 for alpha chain variable domain of TCR clone 4267 (TRAV13-1, TRAJ10)
CAAKEPGGGNKLTF

SEQ ID NO: 8534 - protein, 14 aa, Homo sapiens
  CDR3 for beta chain variable domain of TCR clone 4267 (TRBV20-1, TRBJ1-1)
CSAQTRIGGTEAFF

SEQ ID NO: 8535 - protein, 11 aa, Homo sapiens
  CDR3 for alpha chain variable domain of TCR clone 4268 (TRAV17, TRAJ31)
CATDRTARLMF

SEQ ID NO: 8536 - protein, 12 aa, Homo sapiens
  CDR3 for beta chain variable domain of TCR clone 4268 (TRBV29-1, TRBJ2-3)
CSVTGGADTQYF

SEQ ID NO: 8537 - protein, 14 aa, Homo sapiens
  CDR3 for alpha chain variable domain of TCR clone 4269 (TRAV2, TRAJ9)
CAVEDRSGGFKTIF

SEQ ID NO: 8538 - protein, 17 aa, Homo sapiens
  CDR3 for beta chain variable domain of TCR clone 4269 (TRBV24-1, TRBJ2-1)
CATSDVSTSGTYNEQFF

SEQ ID NO: 8539 - protein, 12 aa, Homo sapiens
  CDR3 for alpha chain variable domain of TCR clone 4270 (TRAV12-3, TRAJ17)
CAMTLTGNKITF

SEQ ID NO: 8540 - protein, 15 aa, Homo sapiens
  CDR3 for beta chain variable domain of TCR clone 4270 (TRBV20-1, TRBJ2-7)
CSARDRVSGMDEQYF

SEQ ID NO: 8541 - protein, 14 aa, Homo sapiens
  CDR3 for alpha chain variable domain of TCR clone 4271 (TRAV1-2, TRAJ16)
CAVNRFSDGQKLLF

SEQ ID NO: 8542 - protein, 15 aa, Homo sapiens
  CDR3 for beta chain variable domain of TCR clone 4271 (TRBV5-1, TRBJ2-3)
CASSVTSGSTDTQYF

SEQ ID NO: 8543 - protein, 14 aa, Homo sapiens
  CDR3 for alpha chain variable domain of TCR clone 4272 (TRAV1-2, TRAJ8)
CAVREDTGFQKLVF

SEQ ID NO: 8544 - protein, 11 aa, Homo sapiens
  CDR3 for beta chain variable domain of TCR clone 4272 (TRBV29-1, TRBJ1-4)
CSVSSGEKLFF

SEQ ID NO: 8545 - protein, 12 aa, Homo sapiens
  CDR3 for alpha chain variable domain of TCR clone 4273 (TRAV23/DV6, TRAJ49)
CAATYTGNQFYF

SEQ ID NO: 8546 - protein, 17 aa, Homo sapiens
  CDR3 for beta chain variable domain of TCR clone 4273 (TRBV4-1, TRBJ2-3)
CASSQVLQGGGTDTQYF

SEQ ID NO: 8547 - protein, 14 aa, Homo sapiens
  CDR3 for alpha chain variable domain of TCR clone 4274 (TRAV2, TRAJ9)
CAVEDRSGGFKTIF

SEQ ID NO: 8548 - protein, 15 aa, Homo sapiens
  CDR3 for beta chain variable domain of TCR clone 4274 (TRBV6-6, TRBJ2-7)
CASSYSYGGSYEQYF

SEQ ID NO: 8549 - protein, 15 aa, Homo sapiens
  CDR3 for alpha chain variable domain of TCR clone 4275 (TRAV26-1, TRAJ17)
CIVSSFKAAGNKLTF

SEQ ID NO: 8550 - protein, 14 aa, Homo sapiens
  CDR3 for beta chain variable domain of TCR clone 4275 (TRBV6-1, TRBJ2-2)
CASTWQGNTGELFF

SEQ ID NO: 8551 - protein, 16 aa, Homo sapiens
  CDR3 for alpha chain variable domain of TCR clone 4276 (TRAV30, TRAJ24)
CGTEIVDADSWGKFQF

SEQ ID NO: 8552 - protein, 14 aa, Homo sapiens
  CDR3 for beta chain variable domain of TCR clone 4276 (TRBV12-5, TRBJ2-5)
CASGSRTHQETQYL

SEQ ID NO: 8553 - protein, 16 aa, Homo sapiens
  CDR3 for alpha chain variable domain of TCR clone 4277 (TRAV27, TRAJ34)
CAGGGLGDYNTDKLIF

SEQ ID NO: 8554 - protein, 15 aa, Homo sapiens
  CDR3 for beta chain variable domain of TCR clone 4277 (TRBV9, TRBJ1-4)
CASSVGGSTNEKLFF

SEQ ID NO: 8555 - protein, 21 aa, Homo sapiens
  CDR3 for alpha chain variable domain of TCR clone 4278 (TRAV25, TRAJ53)
TATQTTDVGTGSGGSNYKLTF

SEQ ID NO: 8556 - protein, 16 aa, Homo sapiens
  CDR3 for beta chain variable domain of TCR clone 4278 (TRBV4-2, TRBJ2-3)
CASSLSSGGHTDTQYF

SEQ ID NO: 8557 - protein, 11 aa, Homo sapiens
  CDR3 for alpha chain variable domain of TCR clone 4279 (TRAV3, TRAJ21)
CAVGNFNKLYF

SEQ ID NO: 8558 - protein, 17 aa, Homo sapiens
  CDR3 for beta chain variable domain of TCR clone 4279 (TRBV24-1, TRBJ2-1)
CATSDVSTSGTYNEQFF

SEQ ID NO: 8559 - protein, 14 aa, Homo sapiens
  CDR3 for alpha chain variable domain of TCR clone 4280 (TRAV13-1, TRAJ12)
CSNYPMDSSYKLIF

SEQ ID NO: 8560 - protein, 11 aa, Homo sapiens
  CDR3 for beta chain variable domain of TCR clone 4280 (TRBV20-1, TRBJ2-1)
CSLSSGSEQFF

SEQ ID NO: 8561 - protein, 13 aa, Homo sapiens
  CDR3 for alpha chain variable domain of TCR clone 4281 (TRAV41, TRAJ54)
CAVRIQGAQKLVF

SEQ ID NO: 8562 - protein, 14 aa, Homo sapiens
  CDR3 for beta chain variable domain of TCR clone 4281 (TRBV2, TRBJ2-1)
CASRTGSSYNEQFF

SEQ ID NO: 8563 - protein, 15 aa, Homo sapiens
  CDR3 for alpha chain variable domain of TCR clone 4282 (TRAV6, TRAJ4)
CALGGFSGGYNKLIF

SEQ ID NO: 8564 - protein, 13 aa, Homo sapiens
  CDR3 for beta chain variable domain of TCR clone 4282 (TRBV19, TRBJ1-2)
CASSVPGQDGYTF

SEQ ID NO: 8565 - protein, 15 aa, Homo sapiens
  CDR3 for alpha chain variable domain of TCR clone 4283 (TRAV10, TRAJ39)
CVVSASGNAGNMLTF

SEQ ID NO: 8566 - protein, 13 aa, Homo sapiens
  CDR3 for beta chain variable domain of TCR clone 4283 (TRBV18, TRBJ2-7)
CASQSGGGYEQYF

SEQ ID NO: 8567 - protein, 14 aa, Homo sapiens
  CDR3 for alpha chain variable domain of TCR clone 4284 (TRAV8-4, TRAJ16)
CAVSPVGRWPEAAL

SEQ ID NO: 8568 - protein, 15 aa, Homo sapiens
  CDR3 for beta chain variable domain of TCR clone 4284 (TRBV11-3, TRBJ2-7)
CASSPGPASSYEQYF

SEQ ID NO: 8569 - protein, 11 aa, Homo sapiens
  CDR3 for alpha chain variable domain of TCR clone 4285 (TRAV13-1, TRAJ24)
CAASGWGKLQF

SEQ ID NO: 8570 - protein, 15 aa, Homo sapiens
  CDR3 for beta chain variable domain of TCR clone 4285 (TRBV11-2, TRBJ2-2)
CASSLDTGNTGELFF

SEQ ID NO: 8571 - protein, 22 aa, Homo sapiens
  CDR3 for alpha chain variable domain of TCR clone 4286 (TRAV26-1, TRAJ30)
CIVRVRTEMTRSSLEKGHDFIF

SEQ ID NO: 8572 - protein, 18 aa, Homo sapiens
  CDR3 for beta chain variable domain of TCR clone 4286 (TRBV4-1, TRBJ1-5)
CASSQDPRGQGLNQPQHF

SEQ ID NO: 8573 - protein, 15 aa, Homo sapiens
  CDR3 for alpha chain variable domain of TCR clone 4287 (TRAV17, TRAJ42)
CATDHYGGSQGNLIF

SEQ ID NO: 8574 - protein, 15 aa, Homo sapiens
  CDR3 for beta chain variable domain of TCR clone 4287 (TRBV5-1, TRBJ2-2)
CASSSQGGNTGELFF

SEQ ID NO: 8575 - protein, 13 aa, Homo sapiens
  CDR3 for alpha chain variable domain of TCR clone 4288 (TRAV12-3, TRAJ46)
CAMKKSSGDKLTF

SEQ ID NO: 8576 - protein, 17 aa, Homo sapiens
  CDR3 for beta chain variable domain of TCR clone 4288 (TRBV3-1, TRBJ2-5)
CASSQGLAGMYQETQYF

SEQ ID NO: 8577 - protein, 13 aa, Homo sapiens
  CDR3 for alpha chain variable domain of TCR clone 4289 (TRAV2, TRAJ40)
CAVVTSGTYKYIL

SEQ ID NO: 8578 - protein, 14 aa, Homo sapiens
  CDR3 for beta chain variable domain of TCR clone 4289 (TRBV19, TRBJ2-1)
CASPTFVLSGEQFF

SEQ ID NO: 8579 - protein, 16 aa, Homo sapiens
  CDR3 for alpha chain variable domain of TCR clone 4290 (TRAV8-1, TRAJ48)
CAVTLISNFGNEKLTF

SEQ ID NO: 8580 - protein, 12 aa, Homo sapiens
  CDR3 for beta chain variable domain of TCR clone 4290 (TRBV20-1, TRBJ1-2)
CSAPGFNYGYTF

SEQ ID NO: 8581 - protein, 15 aa, Homo sapiens
  CDR3 for alpha chain variable domain of TCR clone 4291 (TRAV36/DV7, TRAJ44)
CAVCRNTGTASKLTF

SEQ ID NO: 8582 - protein, 13 aa, Homo sapiens
  CDR3 for beta chain variable domain of TCR clone 4291 (TRBV18, TRBJ2-3)
CASSTGRTDTQYF

SEQ ID NO: 8583 - protein, 14 aa, Homo sapiens
  CDR3 for alpha chain variable domain of TCR clone 4292 (TRAV2, TRAJ11)
CAVVPNSGYSTLTF

SEQ ID NO: 8584 - protein, 15 aa, Homo sapiens
  CDR3 for beta chain variable domain of TCR clone 4292 (TRBV4-1, TRBJ1-3)
CASSQDLRVGNTIYF

SEQ ID NO: 8585 - protein, 15 aa, Homo sapiens
  CDR3 for alpha chain variable domain of TCR clone 4293 (TRAV8-4, TRAJ15)
CAVSDPVQAGTALIF

SEQ ID NO: 8586 - protein, 14 aa, Homo sapiens
  CDR3 for beta chain variable domain of TCR clone 4293 (TRBV7-2, TRBJ1-3)
CASSLSRSGNTIYF

SEQ ID NO: 8587 - protein, 15 aa, Homo sapiens
  CDR3 for alpha chain variable domain of TCR clone 4294 (TRAV13-2, TRAJ53)
CAERGSRGSNYKLTF

SEQ ID NO: 8588 - protein, 14 aa, Homo sapiens
  CDR3 for beta chain variable domain of TCR clone 4294 (TRBV4-1, TRBJ2-2)
CASSQYPDTGELFF

SEQ ID NO: 8589 - protein, 14 aa, Homo sapiens
  CDR3 for alpha chain variable domain of TCR clone 4295 (TRAV1-2, TRAJ16)
CAVNRFSDGQKLLF

SEQ ID NO: 8590 - protein, 13 aa, Homo sapiens
  CDR3 for beta chain variable domain of TCR clone 4295 (TRBV19, TRBJ2-7)
CASSTSGSYEQYF

SEQ ID NO: 8591 - protein, 16 aa, Homo sapiens
  CDR3 for alpha chain variable domain of TCR clone 4296 (TRAV30, TRAJ48)
CGTEIKSNFGNEKLTF

SEQ ID NO: 8592 - protein, 17 aa, Homo sapiens
  CDR3 for beta chain variable domain of TCR clone 4296 (TRBV27, TRBJ2-1)
CASSSERGGQSADEQFF

SEQ ID NO: 8593 - protein, 15 aa, Homo sapiens
  CDR3 for alpha chain variable domain of TCR clone 4297 (TRAV13-1, TRAJ5)
CAASPRGHGQESTYF

SEQ ID NO: 8594 - protein, 17 aa, Homo sapiens
  CDR3 for beta chain variable domain of TCR clone 4297 (TRBV3-1, TRBJ2-2)
CASSQFRDKVDTGELFF

SEQ ID NO: 8595 - protein, 14 aa, Homo sapiens
  CDR3 for alpha chain variable domain of TCR clone 4298 (TRAV12-2, TRAJ9)
CAVNMEGGGFKTIF

SEQ ID NO: 8596 - protein, 14 aa, Homo sapiens
  CDR3 for beta chain variable domain of TCR clone 4298 (TRBV27, TRBJ2-5)
CASSSLKGWETQYF

SEQ ID NO: 8597 - protein, 13 aa, Homo sapiens
  CDR3 for alpha chain variable domain of TCR clone 4299 (TRAV2, TRAJ15)
CAVASQAGTALIF

SEQ ID NO: 8598 - protein, 16 aa, Homo sapiens
  CDR3 for beta chain variable domain of TCR clone 4299 (TRBV7-3, TRBJ2-2)
CASSLKRGTLSGELFF

SEQ ID NO: 8599 - protein, 15 aa, Homo sapiens
  CDR3 for alpha chain variable domain of TCR clone 4300 (TRAV12-1, TRAJ42)
CVVTRDGGSQGNLIF

SEQ ID NO: 8600 - protein, 13 aa, Homo sapiens
  CDR3 for beta chain variable domain of TCR clone 4300 (TRBV27, TRBJ2-7)
CASSLTTGYEQYF

SEQ ID NO: 8601 - protein, 16 aa, Homo sapiens
  CDR3 for alpha chain variable domain of TCR clone 4301 (TRAV3, TRAJ10)
CAVRDMRAGGGNKLTF

SEQ ID NO: 8602 - protein, 12 aa, Homo sapiens
  CDR3 for beta chain variable domain of TCR clone 4301 (TRBV20-1, TRBJ2-7)
CSAGLKMGEQYF

SEQ ID NO: 8603 - protein, 15 aa, Homo sapiens
  CDR3 for alpha chain variable domain of TCR clone 4302 (TRAV26-1, TRAJ29)
CIVRVTNSGNTPLVF

SEQ ID NO: 8604 - protein, 12 aa, Homo sapiens
  CDR3 for beta chain variable domain of TCR clone 4302 (TRBV20-1, TRBJ1-2)
CSASWQGYGYTF

SEQ ID NO: 8605 - protein, 18 aa, Homo sapiens
  CDR3 for alpha chain variable domain of TCR clone 4303 (TRAV13-1, TRAJ52)
CAAKNPNAGGTSYGKLTF

SEQ ID NO: 8606 - protein, 14 aa, Homo sapiens
  CDR3 for beta chain variable domain of TCR clone 4303 (TRBV6-5, TRBJ1-1)
CASSFGQGLTEAFF

SEQ ID NO: 8607 - protein, 14 aa, Homo sapiens
  CDR3 for alpha chain variable domain of TCR clone 4304 (TRAV1-2, TRAJ8)
CAVREDTGFQKLVF

SEQ ID NO: 8608 - protein, 13 aa, Homo sapiens
  CDR3 for beta chain variable domain of TCR clone 4304 (TRBV2, TRBJ1-1)
CARNPTGGFHAFF

SEQ ID NO: 8609 - protein, 12 aa, Homo sapiens
  CDR3 for alpha chain variable domain of TCR clone 4305 (TRAV17, TRAJ47)
CAPTVRGNKLVF

SEQ ID NO: 8610 - protein, 13 aa, Homo sapiens
  CDR3 for beta chain variable domain of TCR clone 4305 (TRBV7-2, TRBJ2-4)
CASSLAEGGIQYF

SEQ ID NO: 8611 - protein, 11 aa, Homo sapiens
  CDR3 for alpha chain variable domain of TCR clone 4306 (TRAV2, TRAJ13)
CASGGYQKVTF

SEQ ID NO: 8612 - protein, 14 aa, Homo sapiens
  CDR3 for beta chain variable domain of TCR clone 4306 (TRBV12-5, TRBJ2-5)
CASGSRTHQETQYF

SEQ ID NO: 8613 - protein, 12 aa, Homo sapiens
  CDR3 for alpha chain variable domain of TCR clone 4307 (TRAV12-3, TRAJ17)
CAMTLTGNKLTF

SEQ ID NO: 8614 - protein, 14 aa, Homo sapiens
  CDR3 for beta chain variable domain of TCR clone 4307 (TRBV12-4, TRBJ1-1)
CASSLGTGGTEAFF

SEQ ID NO: 8615 - protein, 19 aa, Homo sapiens
  CDR3 for alpha chain variable domain of TCR clone 4308 (TRAV2, TRAJ20)
ILQVREADAAVYRDCKLSF

SEQ ID NO: 8616 - protein, 17 aa, Homo sapiens
  CDR3 for beta chain variable domain of TCR clone 4308 (TRBV20-1, TRBJ2-2)
CSASGSGQGGLTGELFF

SEQ ID NO: 8617 - protein, 11 aa, Homo sapiens
  CDR3 for alpha chain variable domain of TCR clone 4309 (TRAV12-3, TRAJ27)
CAMANAGKSTF

SEQ ID NO: 8618 - protein, 12 aa, Homo sapiens
  CDR3 for beta chain variable domain of TCR clone 4309 (TRBV12-4, TRBJ2-7)
CASSLGGYEQYF

SEQ ID NO: 8619 - protein, 19 aa, Homo sapiens
  CDR3 for alpha chain variable domain of TCR clone 4310 (TRAV26-1, TRAJ52)
CIVRAHRNAGGTSYGKLTF

SEQ ID NO: 8620 - protein, 13 aa, Homo sapiens
  CDR3 for beta chain variable domain of TCR clone 4310 (TRBV20-1, TRBJ1-6)
CSAPLGVGSPLHF

SEQ ID NO: 8621 - protein, 16 aa, Homo sapiens
  CDR3 for alpha chain variable domain of TCR clone 4311 (TRAV13-1, TRAJ48)
CAASIFGNFGNEKLTF

SEQ ID NO: 8622 - protein, 11 aa, Homo sapiens
  CDR3 for beta chain variable domain of TCR clone 4311 (TRBV27, TRBJ2-3)
CASSLGDTQYF

SEQ ID NO: 8623 - protein, 13 aa, Homo sapiens
  CDR3 for alpha chain variable domain of TCR clone 4312 (TRAV1-2, TRAJ11)
CAVRDSGYSTLTF

SEQ ID NO: 8624 - protein, 16 aa, Homo sapiens
  CDR3 for beta chain variable domain of TCR clone 4312 (TRBV5-1, TRBJ2-7)
CASSWGTGGRAWEQYF

SEQ ID NO: 8625 - protein, 16 aa, Homo sapiens
  CDR3 for alpha chain variable domain of TCR clone 4313 (TRAV16, TRAJ24)
CALSGGSTDSWGKLQF

SEQ ID NO: 8626 - protein, 15 aa, Homo sapiens
  CDR3 for beta chain variable domain of TCR clone 4313 (TRBV27, TRBJ2-1)
CASSNGGGSSNEQFF

SEQ ID NO: 8627 - protein, 13 aa, Homo sapiens
  CDR3 for alpha chain variable domain of TCR clone 4314 (TRAV23/DV6, TRAJ9)
CAASTTGGFKTIF

SEQ ID NO: 8628 - protein, 14 aa, Homo sapiens
  CDR3 for beta chain variable domain of TCR clone 4314 (TRBV5-1, TRBJ2-3)
CASRVDGVSDTQYF

SEQ ID NO: 8629 - protein, 14 aa, Homo sapiens
  CDR3 for alpha chain variable domain of TCR clone 4315 (TRAV1-2, TRAJ16)
CAVNRFSDGQKLLF

SEQ ID NO: 8630 - protein, 13 aa, Homo sapiens
  CDR3 for beta chain variable domain of TCR clone 4315 (TRBV11-2, TRBJ2-1)
CASSLGLAGGRFF

SEQ ID NO: 8631 - protein, 13 aa, Homo sapiens
  CDR3 for alpha chain variable domain of TCR clone 4316 (TRAV23/DV6, TRAJ58)
CAATGTSGSRLTF

SEQ ID NO: 8632 - protein, 13 aa, Homo sapiens
  CDR3 for beta chain variable domain of TCR clone 4316 (TRBV5-5, TRBJ1-2)
CASSFWRGEDYTF

SEQ ID NO: 8633 - protein, 14 aa, Homo sapiens
  CDR3 for alpha chain variable domain of TCR clone 4317 (TRAV16, TRAJ39)
CALSKNNAGNMLTF

SEQ ID NO: 8634 - protein, 19 aa, Homo sapiens
  CDR3 for beta chain variable domain of TCR clone 4317 (TRBV6-6, TRBJ2-1)
AAPSQTSVYFCASSYEQFF

SEQ ID NO: 8635 - protein, 14 aa, Homo sapiens
  CDR3 for alpha chain variable domain of TCR clone 4318 (TRAV41, TRAJ57)
CAVLLQGGSEKLVF

SEQ ID NO: 8636 - protein, 12 aa, Homo sapiens
  CDR3 for beta chain variable domain of TCR clone 4318 (TRBV10-3, TRBJ1-1)
CATMDRPPEAFF

SEQ ID NO: 8637 - protein, 11 aa, Homo sapiens
  CDR3 for alpha chain variable domain of TCR clone 4319 (TRAV1-2, TRAJ11)
CAVRGYSTLTF

SEQ ID NO: 8638 - protein, 13 aa, Homo sapiens
  CDR3 for beta chain variable domain of TCR clone 4319 (TRBV10-3, TRBJ2-7)
CASKLAVNYEQYF

SEQ ID NO: 8639 - protein, 14 aa, Homo sapiens
  CDR3 for alpha chain variable domain of TCR clone 4320 (TRAV8-4, TRAJ13)
CAVTLSGGYQKVTF

SEQ ID NO: 8640 - protein, 16 aa, Homo sapiens
  CDR3 for beta chain variable domain of TCR clone 4320 (TRBV5-7, TRBJ1-4)
CASSPSGGLKTEKLFF

SEQ ID NO: 8641 - protein, 13 aa, Homo sapiens
  CDR3 for alpha chain variable domain of TCR clone 4321 (TRAV2, TRAJ40)
CAVVTSGTYKYIF

SEQ ID NO: 8642 - protein, 14 aa, Homo sapiens
  CDR3 for beta chain variable domain of TCR clone 4321 (TRBV19, TRBJ2-1)
CASPTFVLSGEQSF

SEQ ID NO: 8643 - protein, 12 aa, Homo sapiens
  CDR3 for alpha chain variable domain of TCR clone 4322 (TRAV1-2, TRAJ33)
CAALDSNYQLIW

SEQ ID NO: 8644 - protein, 14 aa, Homo sapiens
  CDR3 for beta chain variable domain of TCR clone 4322 (TRBV20-1, TRBJ2-1)
CSAQIGGSANEQFF

SEQ ID NO: 8645 - protein, 14 aa, Homo sapiens
  CDR3 for alpha chain variable domain of TCR clone 4323 (TRAV12-2, TRAJ40)
CAVKIPSGTYKYIF

SEQ ID NO: 8646 - protein, 14 aa, Homo sapiens
  CDR3 for beta chain variable domain of TCR clone 4323 (TRBV18, TRBJ2-5)
CASSPLRVQETQYF

SEQ ID NO: 8647 - protein, 12 aa, Homo sapiens
  CDR3 for alpha chain variable domain of TCR clone 4324 (TRAV8-3, TRAJ20)
CAVGGGDYKLSF

SEQ ID NO: 8648 - protein, 12 aa, Homo sapiens
  CDR3 for beta chain variable domain of TCR clone 4324 (TRBV3-1, TRBJ2-7)
CASSQVRYEQYF

SEQ ID NO: 8649 - protein, 13 aa, Homo sapiens
  CDR3 for alpha chain variable domain of TCR clone 4325 (TRAV2, TRAJ40)
CAVVTSGTYKYIF

SEQ ID NO: 8650 - protein, 14 aa, Homo sapiens
  CDR3 for beta chain variable domain of TCR clone 4325 (TRBV19, TRBJ2-1)
CASPTFVLSGEQLF

SEQ ID NO: 8651 - protein, 11 aa, Homo sapiens
  CDR3 for alpha chain variable domain of TCR clone 4326 (TRAV12-2, TRAJ36)
CAVDGANNLFF

SEQ ID NO: 8652 - protein, 13 aa, Homo sapiens
  CDR3 for beta chain variable domain of TCR clone 4326 (TRBV7-2, TRBJ2-7)
CASSSPSGSEQYF

SEQ ID NO: 8653 - protein, 11 aa, Homo sapiens
  CDR3 for alpha chain variable domain of TCR clone 4327 (TRAV1-1, TRAJ16)
CAAGDGQKLLF

SEQ ID NO: 8654 - protein, 16 aa, Homo sapiens
  CDR3 for beta chain variable domain of TCR clone 4327 (TRBV7-3, TRBJ2-2)
CASSLKRGTLSGELFF

SEQ ID NO: 8655 - protein, 15 aa, Homo sapiens
  CDR3 for alpha chain variable domain of TCR clone 4328 (TRAV20, TRAJ40)
CAVQRGTSGTYKYIF

SEQ ID NO: 8656 - protein, 19 aa, Homo sapiens
  CDR3 for beta chain variable domain of TCR clone 4328 (TRBV28, TRBJ2-7)
CASSYSGTSRLGWVYEQYF

SEQ ID NO: 8657 - protein, 15 aa, Homo sapiens
  CDR3 for alpha chain variable domain of TCR clone 4329 (TRAV13-2, TRAJ16)
CAENDRFSDGQKLLF

SEQ ID NO: 8658 - protein, 14 aa, Homo sapiens
  CDR3 for beta chain variable domain of TCR clone 4329 (TRBV4-2, TRBJ1-5)
CASSRDRGNQPQHF

SEQ ID NO: 8659 - protein, 12 aa, Homo sapiens
  CDR3 for alpha chain variable domain of TCR clone 4330 (TRAV2, TRAJ37)
CAVAGNTGKLIF

SEQ ID NO: 8660 - protein, 17 aa, Homo sapiens
  CDR3 for beta chain variable domain of TCR clone 4330 (TRBV28, TRBJ2-5)
CASSTPEGDALQETQYF

SEQ ID NO: 8661 - protein, 17 aa, Homo sapiens
  CDR3 for alpha chain variable domain of TCR clone 4331 (TRAV20, TRAJ53)
CAVQAQGSGGSNYKLTF

SEQ ID NO: 8662 - protein, 11 aa, Homo sapiens
  CDR3 for beta chain variable domain of TCR clone 4331 (TRBV18, TRBJ2-5)
CASSPRETQYF

SEQ ID NO: 8663 - protein, 14 aa, Homo sapiens
  CDR3 for alpha chain variable domain of TCR clone 4332 (TRAV12-3, TRAJ10)
SHLPLTGGGNKLTF

SEQ ID NO: 8664 - protein, 15 aa, Homo sapiens
  CDR3 for beta chain variable domain of TCR clone 4332 (TRBV6-5, TRBJ2-1)
CASSYDAGAGNEQFF

SEQ ID NO: 8665 - protein, 17 aa, Homo sapiens
  CDR3 for alpha chain variable domain of TCR clone 4333 (TRAV3, TRAJ42)
CAVRDRDYGGSQGNLIF

SEQ ID NO: 8666 - protein, 13 aa, Homo sapiens
  CDR3 for beta chain variable domain of TCR clone 4333 (TRBV20-1, TRBJ2-5)
CSARRGTGATQYF

SEQ ID NO: 8667 - protein, 14 aa, Homo sapiens
  CDR3 for alpha chain variable domain of TCR clone 4334 (TRAV12-3, TRAJ10)
SHLPLTGGGNKLTF

SEQ ID NO: 8668 - protein, 12 aa, Homo sapiens
  CDR3 for beta chain variable domain of TCR clone 4334 (TRBV7-8, TRBJ2-7)
CASNLGDREQYF

SEQ ID NO: 8669 - protein, 14 aa, Homo sapiens
  CDR3 for alpha chain variable domain of TCR clone 4335 (TRAV1-2, TRAJ8)
CAVREDTGFQKLVF

SEQ ID NO: 8670 - protein, 16 aa, Homo sapiens
  CDR3 for beta chain variable domain of TCR clone 4335 (TRBV29-1, TRBJ2-6)
CSVEDITYSGANVLTF

SEQ ID NO: 8671 - protein, 14 aa, Homo sapiens
  CDR3 for alpha chain variable domain of TCR clone 4336 (TRAV12-2, TRAJ13)
CAVKKTGGYQKVTF

SEQ ID NO: 8672 - protein, 13 aa, Homo sapiens
  CDR3 for beta chain variable domain of TCR clone 4336 (TRBV2, TRBJ2-7)
CASSVGGSGEQYF

SEQ ID NO: 8673 - protein, 13 aa, Homo sapiens
  CDR3 for alpha chain variable domain of TCR clone 4337 (TRAV8-3, TRAJ43)
CAVGPDNNNDMRF

SEQ ID NO: 8674 - protein, 19 aa, Homo sapiens
  CDR3 for beta chain variable domain of TCR clone 4337 (TRBV7-2, TRBJ2-3)
CASSFLSRNWGGGTDTQYF

SEQ ID NO: 8675 - protein, 13 aa, Homo sapiens
  CDR3 for alpha chain variable domain of TCR clone 4338 (TRAV8-6, TRAJ48)
CAGVNFGNEKLTF

SEQ ID NO: 8676 - protein, 16 aa, Homo sapiens
  CDR3 for beta chain variable domain of TCR clone 4338 (TRBV4-2, TRBJ2-6)
CASSQARSSGANVLTF

SEQ ID NO: 8677 - protein, 12 aa, Homo sapiens
  CDR3 for alpha chain variable domain of TCR clone 4339 (TRAV12-3, TRAJ17)
CAMTLTGNKLTF

SEQ ID NO: 8678 - protein, 15 aa, Homo sapiens
  CDR3 for beta chain variable domain of TCR clone 4339 (TRBV20-1, TRBJ2-7)
CSARDRVSGTDEQYF

SEQ ID NO: 8679 - protein, 16 aa, Homo sapiens
  CDR3 for alpha chain variable domain of TCR clone 4340 (TRAV26-1, TRAJ23)
CIVRPRFYNQGGKLIF

SEQ ID NO: 8680 - protein, 13 aa, Homo sapiens
  CDR3 for beta chain variable domain of TCR clone 4340 (TRBV20-1, TRBJ1-1)
CSARGGGNTEAFF

SEQ ID NO: 8681 - protein, 12 aa, Homo sapiens
  CDR3 for alpha chain variable domain of TCR clone 4341 (TRAV8-2, TRAJ6)
CVVSKGSYIPTF

SEQ ID NO: 8682 - protein, 18 aa, Homo sapiens
  CDR3 for beta chain variable domain of TCR clone 4341 (TRBV4-1, TRBJ2-3)
CASSQGGASGGATDTQYF

SEQ ID NO: 8683 - protein, 13 aa, Homo sapiens
  CDR3 for alpha chain variable domain of TCR clone 4342 (TRAV2, TRAJ40)
CAVVTSGTYKYIF

SEQ ID NO: 8684 - protein, 14 aa, Homo sapiens
  CDR3 for beta chain variable domain of TCR clone 4342 (TRBV19, TRBJ2-1)
CASPTFVLGGEQFF

SEQ ID NO: 8685 - protein, 15 aa, Homo sapiens
  CDR3 for alpha chain variable domain of TCR clone 4343 (TRAV21, TRAJ24)
CAARSSTDSWGKLQF

SEQ ID NO: 8686 - protein, 19 aa, Homo sapiens
  CDR3 for beta chain variable domain of TCR clone 4343 (TRBV14, TRBJ2-1)
CASSQDQLWEAPEYNEQFF

SEQ ID NO: 8687 - protein, 13 aa, Homo sapiens
  CDR3 for alpha chain variable domain of TCR clone 4344 (TRAV17, TRAJ21)
CATDGNNFNKFYF

SEQ ID NO: 8688 - protein, 12 aa, Homo sapiens
  CDR3 for beta chain variable domain of TCR clone 4344 (TRBV20-1, TRBJ1-1)
CSARGGNTEAFF

SEQ ID NO: 8689 - protein, 15 aa, Homo sapiens
  CDR3 for alpha chain variable domain of TCR clone 4345 (TRAV8-3, TRAJ45)
CASSYSGGGADGLTF

SEQ ID NO: 8690 - protein, 12 aa, Homo sapiens
  CDR3 for beta chain variable domain of TCR clone 4345 (TRBV29-1, TRBJ2-3)
CSVTGGADTQYF

SEQ ID NO: 8691 - protein, 16 aa, Homo sapiens
  CDR3 for alpha chain variable domain of TCR clone 4346 (TRAV21, TRAJ37)
CAVRPRGSSNTGKLIF

SEQ ID NO: 8692 - protein, 13 aa, Homo sapiens
  CDR3 for beta chain variable domain of TCR clone 4346 (TRBV20-1, TRBJ2-2)
CSALSGGAGELFF

SEQ ID NO: 8693 - protein, 10 aa, Homo sapiens
  CDR3 for alpha chain variable domain of TCR clone 4347 (TRAV1-2, TRAJ18)
CAVRGEAQPW

SEQ ID NO: 8694 - protein, 19 aa, Homo sapiens
  CDR3 for beta chain variable domain of TCR clone 4347 (TRBV6-3, TRBJ1-2)
CASSYSKGRTGPPNYGYTF

SEQ ID NO: 8695 - protein, 10 aa, Homo sapiens
  CDR3 for alpha chain variable domain of TCR clone 4348 (TRAV1-2, TRAJ23)
CAGQGGKLIF

SEQ ID NO: 8696 - protein, 13 aa, Homo sapiens
  CDR3 for beta chain variable domain of TCR clone 4348 (TRBV7-7, TRBJ2-3)
CASSLSRADTQYF

SEQ ID NO: 8697 - protein, 15 aa, Homo sapiens
  CDR3 for alpha chain variable domain of TCR clone 4349 (TRAV21, TRAJ52)
CATRGGGTSYGKLTF

SEQ ID NO: 8698 - protein, 14 aa, Homo sapiens
  CDR3 for beta chain variable domain of TCR clone 4349 (TRBV28, TRBJ2-3)
CASSSAPSTDTQYF

SEQ ID NO: 8699 - protein, 12 aa, Homo sapiens
  CDR3 for alpha chain variable domain of TCR clone 4350 (TRAV24, TRAJ40)
CAFMPGTYKYIF

SEQ ID NO: 8700 - protein, 11 aa, Homo sapiens
  CDR3 for beta chain variable domain of TCR clone 4350 (TRBV10-1, TRBJ2-3)
CASSDSDTQYF

SEQ ID NO: 8701 - protein, 12 aa, Homo sapiens
  CDR3 for alpha chain variable domain of TCR clone 4351 (TRAV16, TRAJ8)
CAPLGGFQKLVF

SEQ ID NO: 8702 - protein, 15 aa, Homo sapiens
  CDR3 for beta chain variable domain of TCR clone 4351 (TRBV6-1, TRBJ1-5)
CASIPDRLGNQPQHF

SEQ ID NO: 8703 - protein, 14 aa, Homo sapiens
  CDR3 for alpha chain variable domain of TCR clone 4352 (TRAV17, TRAJ6)
CATDERRGSYIPTF

SEQ ID NO: 8704 - protein, 13 aa, Homo sapiens
  CDR3 for beta chain variable domain of TCR clone 4352 (TRBV27, TRBJ2-1)
CASSLGRIWGQFF

SEQ ID NO: 8705 - protein, 15 aa, Homo sapiens
  CDR3 for alpha chain variable domain of TCR clone 4353 (TRAV35, TRAJ40)
CAGQLGTSGTYKYIF

SEQ ID NO: 8706 - protein, 14 aa, Homo sapiens
  CDR3 for beta chain variable domain of TCR clone 4353 (TRBV5-1, TRBJ2-7)
CASSRGESLYEQYF

SEQ ID NO: 8707 - protein, 14 aa, Homo sapiens
  CDR3 for alpha chain variable domain of TCR clone 4354 (TRAV12-2, TRAJ17)
CAVLFKAAGNKLTF

SEQ ID NO: 8708 - protein, 14 aa, Homo sapiens
  CDR3 for beta chain variable domain of TCR clone 4354 (TRBV7-7, TRBJ2-2)
CATRQDSDTGELFF

SEQ ID NO: 8709 - protein, 13 aa, Homo sapiens
  CDR3 for alpha chain variable domain of TCR clone 4355 (TRAV20, TRAJ34)
CAVRSYNTDKLIF

SEQ ID NO: 8710 - protein, 15 aa, Homo sapiens
  CDR3 for beta chain variable domain of TCR clone 4355 (TRBV27, TRBJ1-3)
CASSPSPGSGNTIYF

SEQ ID NO: 8711 - protein, 15 aa, Homo sapiens
  CDR3 for alpha chain variable domain of TCR clone 4356 (TRAV2, TRAJ24)
CAVEVLTDSWGKFQF

SEQ ID NO: 8712 - protein, 13 aa, Homo sapiens
  CDR3 for beta chain variable domain of TCR clone 4356 (TRBV10-2, TRBJ2-7)
CASGTSGGYEQYF

SEQ ID NO: 8713 - protein, 14 aa, Homo sapiens
  CDR3 for alpha chain variable domain of TCR clone 4357 (TRAV12-3, TRAJ58)
CAMSTETSGSRLTF

SEQ ID NO: 8714 - protein, 15 aa, Homo sapiens
  CDR3 for beta chain variable domain of TCR clone 4357 (TRBV11-3, TRBJ2-3)
CASLKDGREGDTQYF

SEQ ID NO: 8715 - protein, 17 aa, Homo sapiens
  CDR3 for alpha chain variable domain of TCR clone 4358 (TRAV26-1, TRAJ37)
CIVRVITVSSNTGKLIF

SEQ ID NO: 8716 - protein, 11 aa, Homo sapiens
  CDR3 for beta chain variable domain of TCR clone 4358 (TRBV29-1, TRBJ2-5)
CSEDRTGTQYF

SEQ ID NO: 8717 - protein, 16 aa, Homo sapiens
  CDR3 for alpha chain variable domain of TCR clone 4359 (TRAV1-2, TRAJ10)
CAVRGVLTGGGNKLTF

SEQ ID NO: 8718 - protein, 14 aa, Homo sapiens
  CDR3 for beta chain variable domain of TCR clone 4359 (TRBV25-1, TRBJ1-1)
CASTHLGGNTEAFF

SEQ ID NO: 8719 - protein, 12 aa, Homo sapiens
  CDR3 for alpha chain variable domain of TCR clone 4360 (TRAV5, TRAJ27)
CAEITNAGKSTF

SEQ ID NO: 8720 - protein, 15 aa, Homo sapiens
  CDR3 for beta chain variable domain of TCR clone 4360 (TRBV11-2, TRBJ1-2)
CASSLEGVQRNGYTF

SEQ ID NO: 8721 - protein, 11 aa, Homo sapiens
  CDR3 for alpha chain variable domain of TCR clone 4361 (TRAV2, TRAJ13)
CASGGYQKVTF

SEQ ID NO: 8722 - protein, 13 aa, Homo sapiens
  CDR3 for beta chain variable domain of TCR clone 4361 (TRBV27, TRBJ1-4)
CASSLMGDEKLFF

SEQ ID NO: 8723 - protein, 11 aa, Homo sapiens
  CDR3 for alpha chain variable domain of TCR clone 4362 (TRAV3, TRAJ21)
CAVGNFNKFYF

SEQ ID NO: 8724 - protein, 13 aa, Homo sapiens
  CDR3 for beta chain variable domain of TCR clone 4362 (TRBV4-1, TRBJ2-2)
CASSQENTGELFF

SEQ ID NO: 8725 - protein, 12 aa, Homo sapiens
  CDR3 for alpha chain variable domain of TCR clone 4363 (TRAV17, TRAJ45)
CAAGGGADGLTF

SEQ ID NO: 8726 - protein, 15 aa, Homo sapiens
  CDR3 for beta chain variable domain of TCR clone 4363 (TRBV20-1, TRBJ2-7)
CSARDRVSGMDEQYF

SEQ ID NO: 8727 - protein, 13 aa, Homo sapiens
  CDR3 for alpha chain variable domain of TCR clone 4364 (TRAV12-1, TRAJ39)
CVVPQRAGNMLTF

SEQ ID NO: 8728 - protein, 17 aa, Homo sapiens
  CDR3 for beta chain variable domain of TCR clone 4364 (TRBV4-1, TRBJ2-5)
CASSQDLTGGPIETQYF

SEQ ID NO: 8729 - protein, 12 aa, Homo sapiens
  CDR3 for alpha chain variable domain of TCR clone 4365 (TRAV12-1, TRAJ9)
CVVNPASFKTIF

SEQ ID NO: 8730 - protein, 15 aa, Homo sapiens
  CDR3 for beta chain variable domain of TCR clone 4365 (TRBV4-3, TRBJ2-2)
CASSQGTGGTGELFF

SEQ ID NO: 8731 - protein, 14 aa, Homo sapiens
  CDR3 for alpha chain variable domain of TCR clone 4366 (TRAV1-2, TRAJ6)
CAVSLSGGSYIPTF

SEQ ID NO: 8732 - protein, 15 aa, Homo sapiens
  CDR3 for beta chain variable domain of TCR clone 4366 (TRBV28, TRBJ2-7)
CASSPGGGGFYEQYF

SEQ ID NO: 8733 - protein, 11 aa, Homo sapiens
  CDR3 for alpha chain variable domain of TCR clone 4367 (TRAV8-3, TRAJ16)
CAVVPCQKLLF

SEQ ID NO: 8734 - protein, 12 aa, Homo sapiens
  CDR3 for beta chain variable domain of TCR clone 4367 (TRBV3-1, TRBJ1-1)
CASSQDPTEAFF

SEQ ID NO: 8735 - protein, 13 aa, Homo sapiens
  CDR3 for alpha chain variable domain of TCR clone 4368 (TRAV13-1, TRAJ5)
CAARVTGRRALTF

SEQ ID NO: 8736 - protein, 15 aa, Homo sapiens
  CDR3 for beta chain variable domain of TCR clone 4368 (TRBV28, TRBJ2-7)
CASSPGGRGFYEQYF

SEQ ID NO: 8737 - protein, 12 aa, Homo sapiens
  CDR3 for alpha chain variable domain of TCR clone 4369 (TRAV1-2, TRAJ42)
CVAGGSQGNLIF

SEQ ID NO: 8738 - protein, 12 aa, Homo sapiens
  CDR3 for beta chain variable domain of TCR clone 4369 (TRBV24-1, TRBJ1-1)
CATSDSDRGAFF

SEQ ID NO: 8739 - protein, 11 aa, Homo sapiens
  CDR3 for alpha chain variable domain of TCR clone 4370 (TRAV3, TRAJ21)
CAVGNFNKFYF

SEQ ID NO: 8740 - protein, 16 aa, Homo sapiens
  CDR3 for beta chain variable domain of TCR clone 4370 (TRBV19, TRBJ2-1)
CASSKAGPGSYNEQFF

SEQ ID NO: 8741 - protein, 14 aa, Homo sapiens
  CDR3 for alpha chain variable domain of TCR clone 4371 (TRAV12-3, TRAJ10)
SHLPLTGGGNKLTF

SEQ ID NO: 8742 - protein, 14 aa, Homo sapiens
  CDR3 for beta chain variable domain of TCR clone 4371 (TRBV7-2, TRBJ2-7)
CASSPKTSFYEQYF

SEQ ID NO: 8743 - protein, 13 aa, Homo sapiens
  CDR3 for alpha chain variable domain of TCR clone 4372 (TRAV8-4, TRAJ3)
CAVSDSGASKIIF

SEQ ID NO: 8744 - protein, 16 aa, Homo sapiens
  CDR3 for beta chain variable domain of TCR clone 4372 (TRBV7-9, TRBJ2-7)
CASSNHGGQEKYEQYF

SEQ ID NO: 8745 - protein, 12 aa, Homo sapiens
  CDR3 for alpha chain variable domain of TCR clone 4373 (TRAV21, TRAJ3)
CCFYSSASKIIF

SEQ ID NO: 8746 - protein, 15 aa, Homo sapiens
  CDR3 for beta chain variable domain of TCR clone 4373 (TRBV20-1, TRBJ2-7)
CSARDRVSGMDEQYF

SEQ ID NO: 8747 - protein, 11 aa, Homo sapiens
  CDR3 for alpha chain variable domain of TCR clone 4374 (TRAV3, TRAJ21)
CAVGNFNKFCF

SEQ ID NO: 8748 - protein, 13 aa, Homo sapiens
  CDR3 for beta chain variable domain of TCR clone 4374 (TRBV20-1, TRBJ2-5)
CSARGDYQETQYF

SEQ ID NO: 8749 - protein, 16 aa, Homo sapiens
  CDR3 for alpha chain variable domain of TCR clone 4375 (TRAV38-1, TRAJ32)
CAFMPFLGGATNKLIF

SEQ ID NO: 8750 - protein, 13 aa, Homo sapiens
  CDR3 for beta chain variable domain of TCR clone 4375 (TRBV7-9, TRBJ2-7)
CASSFAGAYEQYF

SEQ ID NO: 8751 - protein, 13 aa, Homo sapiens
  CDR3 for alpha chain variable domain of TCR clone 4376 (TRAV12-3, TRAJ16)
CAVQLSDGQKLLF

SEQ ID NO: 8752 - protein, 14 aa, Homo sapiens
  CDR3 for beta chain variable domain of TCR clone 4376 (TRBV5-1, TRBJ2-1)
CASSLDGDWNEQFF

SEQ ID NO: 8753 - protein, 13 aa, Homo sapiens
  CDR3 for alpha chain variable domain of TCR clone 4377 (TRAV16, TRAJ37)
CALRGSNTGKLIF

SEQ ID NO: 8754 - protein, 15 aa, Homo sapiens
  CDR3 for beta chain variable domain of TCR clone 4377 (TRBV20-1, TRBJ2-1)
CSARGRGLSYNEQFF

SEQ ID NO: 8755 - protein, 15 aa, Homo sapiens
  CDR3 for alpha chain variable domain of TCR clone 4378 (TRAV13-1, TRAJ52)
CALRTGGTSYGKLTF

SEQ ID NO: 8756 - protein, 14 aa, Homo sapiens
  CDR3 for beta chain variable domain of TCR clone 4378 (TRBV20-1, TRBJ2-5)
CSASDSGSGETQYF

SEQ ID NO: 8757 - protein, 17 aa, Homo sapiens
  CDR3 for alpha chain variable domain of TCR clone 4379 (TRAV8-6, TRAJ58)
CAVSSWVGETSGSRLTF

SEQ ID NO: 8758 - protein, 15 aa, Homo sapiens
  CDR3 for beta chain variable domain of TCR clone 4379 (TRBV6-5, TRBJ2-1)
CASSYDAGAGNEQFF

SEQ ID NO: 8759 - protein, 14 aa, Homo sapiens
  CDR3 for alpha chain variable domain of TCR clone 4380 (TRAV21, TRAJ35)
CAVMPIGFGNVLHF

SEQ ID NO: 8760 - protein, 12 aa, Homo sapiens
  CDR3 for beta chain variable domain of TCR clone 4380 (TRBV7-9, TRBJ2-7)
CASSIKREEQYF

SEQ ID NO: 8761 - protein, 18 aa, Homo sapiens
  CDR3 for alpha chain variable domain of TCR clone 4381 (TRAV13-2, TRAJ52)
CAETPLNAGGTSYGKLTF

SEQ ID NO: 8762 - protein, 15 aa, Homo sapiens
  CDR3 for beta chain variable domain of TCR clone 4381 (TRBV7-2, TRBJ2-7)
CASSLKGALTYEQYF

SEQ ID NO: 8763 - protein, 10 aa, Homo sapiens
  CDR3 for alpha chain variable domain of TCR clone 4382 (TRAV1-2, TRAJ31)
CAFFRCQTHV

SEQ ID NO: 8764 - protein, 13 aa, Homo sapiens
  CDR3 for beta chain variable domain of TCR clone 4382 (TRBV7-9, TRBJ1-2)
CASSLKQNYGYTF

SEQ ID NO: 8765 - protein, 16 aa, Homo sapiens
  CDR3 for alpha chain variable domain of TCR clone 4383 (TRAV3, TRAJ37)
CAVRPHGSGNTGKLIF

SEQ ID NO: 8766 - protein, 17 aa, Homo sapiens
  CDR3 for beta chain variable domain of TCR clone 4383 (TRBV7-2, TRBJ2-7)
CASSFETSGSTSSTSGR

SEQ ID NO: 8767 - protein, 16 aa, Homo sapiens
  CDR3 for alpha chain variable domain of TCR clone 4384 (TRAV4, TRAJ5)
CLVGPDHGHGQESTYF

SEQ ID NO: 8768 - protein, 13 aa, Homo sapiens
  CDR3 for beta chain variable domain of TCR clone 4384 (TRBV4-2, TRBJ1-2)
CASSLSASGGYTF

SEQ ID NO: 8769 - protein, 14 aa, Homo sapiens
  CDR3 for alpha chain variable domain of TCR clone 4385 (TRAV1-2, TRAJ8)
CAVREDTGFQKLVF

SEQ ID NO: 8770 - protein, 13 aa, Homo sapiens
  CDR3 for beta chain variable domain of TCR clone 4385 (TRBV29-1, TRBJ1-1)
CSVGDSRNTEAFF

SEQ ID NO: 8771 - protein, 10 aa, Homo sapiens
  CDR3 for alpha chain variable domain of TCR clone 4386 (TRAV30, TRAJ48)
CGIGNEKLTF

SEQ ID NO: 8772 - protein, 13 aa, Homo sapiens
  CDR3 for beta chain variable domain of TCR clone 4386 (TRBV29-1, TRBJ2-7)
CSVGPSGGYEQYF

SEQ ID NO: 8773 - protein, 19 aa, Homo sapiens
  CDR3 for alpha chain variable domain of TCR clone 4387 (TRAV1-2, TRAJ26)
CLLPLCCERPDNYGQNFVF

SEQ ID NO: 8774 - protein, 12 aa, Homo sapiens
  CDR3 for beta chain variable domain of TCR clone 4387 (TRBV20-1, TRBJ2-1)
CSAQYTYNEQFF

SEQ ID NO: 8775 - protein, 14 aa, Homo sapiens
  CDR3 for alpha chain variable domain of TCR clone 4388 (TRAV1-2, TRAJ8)
CAVREDTGFQKLVF

SEQ ID NO: 8776 - protein, 16 aa, Homo sapiens
  CDR3 for beta chain variable domain of TCR clone 4388 (TRBV15, TRBJ2-3)
CATSRDLGIVTDTQYF

SEQ ID NO: 8777 - protein, 12 aa, Homo sapiens
  CDR3 for alpha chain variable domain of TCR clone 4389 (TRAV12-3, TRAJ17)
CAMTLTGNKLTF

SEQ ID NO: 8778 - protein, 13 aa, Homo sapiens
  CDR3 for beta chain variable domain of TCR clone 4389 (TRBV7-2, TRBJ2-2)
CASSLAVTGELFF

SEQ ID NO: 8779 - protein, 15 aa, Homo sapiens
  CDR3 for alpha chain variable domain of TCR clone 4390 (TRAV35, TRAJ38)
CAGFSNAGNNRKLIW

SEQ ID NO: 8780 - protein, 15 aa, Homo sapiens
  CDR3 for beta chain variable domain of TCR clone 4390 (TRBV7-8, TRBJ2-1)
CASSLAGGLYNEQFF

SEQ ID NO: 8781 - protein, 16 aa, Homo sapiens
  CDR3 for alpha chain variable domain of TCR clone 4391 (TRAV12-1, TRAJ48)
CVVNMRDNFGNEKLTF

SEQ ID NO: 8782 - protein, 16 aa, Homo sapiens
  CDR3 for beta chain variable domain of TCR clone 4391 (TRBV7-6, TRBJ2-1)
CASSSVVAGTYNEQFF

SEQ ID NO: 8783 - protein, 13 aa, Homo sapiens
  CDR3 for alpha chain variable domain of TCR clone 4392 (TRAV12-1, TRAJ7)
CVVNMRGNNRLAF

SEQ ID NO: 8784 - protein, 16 aa, Homo sapiens
  CDR3 for beta chain variable domain of TCR clone 4392 (TRBV20-1, TRBJ1-4)
CSAPGQGLLTNEKLFF

SEQ ID NO: 8785 - protein, 14 aa, Homo sapiens
  CDR3 for alpha chain variable domain of TCR clone 4393 (TRAV29/DV5, TRAJ22)
CAASATGSARQLTF

SEQ ID NO: 8786 - protein, 14 aa, Homo sapiens
  CDR3 for beta chain variable domain of TCR clone 4393 (TRBV19, TRBJ2-1)
CASSPGLAPNEQFF

SEQ ID NO: 8787 - protein, 11 aa, Homo sapiens
  CDR3 for alpha chain variable domain of TCR clone 4394 (TRAV2, TRAJ13)
CASGGYQKVTF

SEQ ID NO: 8788 - protein, 13 aa, Homo sapiens
  CDR3 for beta chain variable domain of TCR clone 4394 (TRBV10-3, TRBJ1-2)
CAISERDSYGYTF

SEQ ID NO: 8789 - protein, 14 aa, Homo sapiens
  CDR3 for alpha chain variable domain of TCR clone 4395 (TRAV2, TRAJ22)
CAVEDSGSARQLTF

SEQ ID NO: 8790 - protein, 15 aa, Homo sapiens
  CDR3 for beta chain variable domain of TCR clone 4395 (TRBV28, TRBJ1-2)
CASSLPVGHGDGYTF

SEQ ID NO: 8791 - protein, 15 aa, Homo sapiens
  CDR3 for alpha chain variable domain of TCR clone 4396 (TRAV14/DV4, TRAJ49)
CAMREGRDTGNQFYF

SEQ ID NO: 8792 - protein, 17 aa, Homo sapiens
  CDR3 for beta chain variable domain of TCR clone 4396 (TRBV12-4, TRBJ1-5)
CASSLRGDRGPNQPQHF

SEQ ID NO: 8793 - protein, 13 aa, Homo sapiens
  CDR3 for alpha chain variable domain of TCR clone 4397 (TRAV1-1, TRAJ23)
CAVVANQGGKLIF

SEQ ID NO: 8794 - protein, 12 aa, Homo sapiens
  CDR3 for beta chain variable domain of TCR clone 4397 (TRBV5-7, TRBJ1-1)
CASSLGRGKAFF

SEQ ID NO: 8795 - protein, 14 aa, Homo sapiens
  CDR3 for alpha chain variable domain of TCR clone 4398 (TRAV9-2, TRAJ39)
CALYIYNAGNMLTF

SEQ ID NO: 8796 - protein, 12 aa, Homo sapiens
  CDR3 for beta chain variable domain of TCR clone 4398 (TRBV7-2, TRBJ2-5)
CASSQYQETQYF

SEQ ID NO: 8797 - protein, 13 aa, Homo sapiens
  CDR3 for alpha chain variable domain of TCR clone 4399 (TRAV3, TRAJ27)
CAVRPLGAGKSTV

SEQ ID NO: 8798 - protein, 13 aa, Homo sapiens
  CDR3 for beta chain variable domain of TCR clone 4399 (TRBV7-9, TRBJ2-3)
CASSPGSTDTQYF

SEQ ID NO: 8799 - protein, 11 aa, Homo sapiens
  CDR3 for alpha chain variable domain of TCR clone 4400 (TRAV12-1, TRAJ21)
CVVYNFNKFYF

SEQ ID NO: 8800 - protein, 16 aa, Homo sapiens
  CDR3 for beta chain variable domain of TCR clone 4400 (TRBV6-5, TRBJ2-7)
CASSYFRVGISDEQYF

SEQ ID NO: 8801 - protein, 12 aa, Homo sapiens
  CDR3 for alpha chain variable domain of TCR clone 4401 (TRAV13-2, TRAJ39)
CAENNAGNMLTF

SEQ ID NO: 8802 - protein, 13 aa, Homo sapiens
  CDR3 for beta chain variable domain of TCR clone 4401 (TRBV7-6, TRBJ1-1)
CASSLKLGTEAFF

SEQ ID NO: 8803 - protein, 12 aa, Homo sapiens
  CDR3 for alpha chain variable domain of TCR clone 4402 (TRAV25, TRAJ38)
CAGTGNNRKLIW

SEQ ID NO: 8804 - protein, 14 aa, Homo sapiens
  CDR3 for beta chain variable domain of TCR clone 4402 (TRBV5-4, TRBJ1-1)
CASSLDSRRDEAFF

SEQ ID NO: 8805 - protein, 12 aa, Homo sapiens
  CDR3 for alpha chain variable domain of TCR clone 4403 (TRAV8-3, TRAJ20)
CAVGANDYKLSF

SEQ ID NO: 8806 - protein, 17 aa, Homo sapiens
  CDR3 for beta chain variable domain of TCR clone 4403 (TRBV13, TRBJ2-3)
CASSLSRVAGGRNTQYF

SEQ ID NO: 8807 - protein, 14 aa, Homo sapiens
  CDR3 for alpha chain variable domain of TCR clone 4404 (TRAV1-2, TRAJ15)
CAVRDRQAGTALIF

SEQ ID NO: 8808 - protein, 15 aa, Homo sapiens
  CDR3 for beta chain variable domain of TCR clone 4404 (TRBV7-2, TRBJ2-1)
CASSLASGRVNEQFF

SEQ ID NO: 8809 - protein, 12 aa, Homo sapiens
  CDR3 for alpha chain variable domain of TCR clone 4405 (TRAV13-2, TRAJ23)
CAERHRGGKLIF

SEQ ID NO: 8810 - protein, 14 aa, Homo sapiens
  CDR3 for beta chain variable domain of TCR clone 4405 (TRBV5-1, TRBJ1-2)
CASSPQGANYGYTF

SEQ ID NO: 8811 - protein, 20 aa, Homo sapiens
  CDR3 for alpha chain variable domain of TCR clone 4406 (TRAV26-1, TRAJ37)
CCVLLHRQINGSSNTGKLIF

SEQ ID NO: 8812 - protein, 13 aa, Homo sapiens
  CDR3 for beta chain variable domain of TCR clone 4406 (TRBV20-1, TRBJ2-7)
CSARTSGNYEQYF

SEQ ID NO: 8813 - protein, 16 aa, Homo sapiens
  CDR3 for alpha chain variable domain of TCR clone 4407 (TRAV12-3, TRAJ53)
CAMSPGSGGSNYKLTF

SEQ ID NO: 8814 - protein, 14 aa, Homo sapiens
  CDR3 for beta chain variable domain of TCR clone 4407 (TRBV12-5, TRBJ2-5)
CASGSRTHQETQYF

SEQ ID NO: 8815 - protein, 15 aa, Homo sapiens
  CDR3 for alpha chain variable domain of TCR clone 4408 (TRAV1-2, TRAJ13)
CAVRGSSGGYQKVTF

SEQ ID NO: 8816 - protein, 15 aa, Homo sapiens
  CDR3 for beta chain variable domain of TCR clone 4408 (TRBV11-3, TRBJ1-3)
CASSLSGTSGNTIYF

SEQ ID NO: 8817 - protein, 12 aa, Homo sapiens
  CDR3 for alpha chain variable domain of TCR clone 4409 (TRAV12-3, TRAJ17)
CAMTLTGNNLTF

SEQ ID NO: 8818 - protein, 15 aa, Homo sapiens
  CDR3 for beta chain variable domain of TCR clone 4409 (TRBV20-1, TRBJ2-7)
CSARDRVSGMDEQYF

SEQ ID NO: 8819 - protein, 14 aa, Homo sapiens
  CDR3 for alpha chain variable domain of TCR clone 4410 (TRAV8-3, TRAJ7)
CAAIELYGNNRLAF

SEQ ID NO: 8820 - protein, 15 aa, Homo sapiens
  CDR3 for beta chain variable domain of TCR clone 4410 (TRBV3-1, TRBJ2-1)
CASSTGDTNYNEQFF

SEQ ID NO: 8821 - protein, 18 aa, Homo sapiens
  CDR3 for alpha chain variable domain of TCR clone 4411 (TRAV21, TRAJ52)
CAVRPSPAGGTSYGKLTF

SEQ ID NO: 8822 - protein, 15 aa, Homo sapiens
  CDR3 for beta chain variable domain of TCR clone 4411 (TRBV10-3, TRBJ2-3)
CAISLTSGGTDTQYF

SEQ ID NO: 8823 - protein, 15 aa, Homo sapiens
  CDR3 for alpha chain variable domain of TCR clone 4412 (TRAV13-1, TRAJ5)
CAVSPIDTGRRALTF

SEQ ID NO: 8824 - protein, 18 aa, Homo sapiens
  CDR3 for beta chain variable domain of TCR clone 4412 (TRBV4-1, TRBJ2-2)
CASSFRTSGGEGPGELFF

SEQ ID NO: 8825 - protein, 13 aa, Homo sapiens
  CDR3 for alpha chain variable domain of TCR clone 4413 (TRAV21, TRAJ37)
CAVSSGNTGKLIF

SEQ ID NO: 8826 - protein, 13 aa, Homo sapiens
  CDR3 for beta chain variable domain of TCR clone 4413 (TRBV7-6, TRBJ2-3)
CASSLRSDNTQYF

SEQ ID NO: 8827 - protein, 12 aa, Homo sapiens
  CDR3 for alpha chain variable domain of TCR clone 4414 (TRAV8-2, TRAJ45)
CVQGGGADGLTF

SEQ ID NO: 8828 - protein, 15 aa, Homo sapiens
  CDR3 for beta chain variable domain of TCR clone 4414 (TRBV19, TRBJ1-1)
CASSIRRQMNTEAFF

SEQ ID NO: 8829 - protein, 14 aa, Homo sapiens
  CDR3 for alpha chain variable domain of TCR clone 4415 (TRAV1-2, TRAJ16)
CAVNRFSDGQKLLF

SEQ ID NO: 8830 - protein, 15 aa, Homo sapiens
  CDR3 for beta chain variable domain of TCR clone 4415 (TRBV7-2, TRBJ2-7)
CASSLKGALTYEQYF

SEQ ID NO: 8831 - protein, 11 aa, Homo sapiens
  CDR3 for alpha chain variable domain of TCR clone 4416 (TRAV8-6, TRAJ20)
CAVSYDYKLSF

SEQ ID NO: 8832 - protein, 14 aa, Homo sapiens
  CDR3 for beta chain variable domain of TCR clone 4416 (TRBV10-2, TRBJ2-2)
CASSERSNTGELFF

SEQ ID NO: 8833 - protein, 15 aa, Homo sapiens
  CDR3 for alpha chain variable domain of TCR clone 4417 (TRAV19, TRAJ9)
CALSEARTGGFKTIF

SEQ ID NO: 8834 - protein, 17 aa, Homo sapiens
  CDR3 for beta chain variable domain of TCR clone 4417 (TRBV28, TRBJ2-5)
CASSTPEGDALQETQYF

SEQ ID NO: 8835 - protein, 12 aa, Homo sapiens
  CDR3 for alpha chain variable domain of TCR clone 4418 (TRAV12-2, TRAJ20)
CAVNRNDYKLSF

SEQ ID NO: 8836 - protein, 16 aa, Homo sapiens
  CDR3 for beta chain variable domain of TCR clone 4418 (TRBV7-3, TRBJ1-2)
CASSLGAPVPNYGYTF

SEQ ID NO: 8837 - protein, 14 aa, Homo sapiens
  CDR3 for alpha chain variable domain of TCR clone 4419 (TRAV13-1, TRAJ35)
CAASKGGLGNVLHC

SEQ ID NO: 8838 - protein, 13 aa, Homo sapiens
  CDR3 for beta chain variable domain of TCR clone 4419 (TRBV7-3, TRBJ1-1)
CASSQDWGAEAFF

SEQ ID NO: 8839 - protein, 14 aa, Homo sapiens
  CDR3 for alpha chain variable domain of TCR clone 4420 (TRAV12-2, TRAJ40)
CAVKIPSGTYKYIF

SEQ ID NO: 8840 - protein, 18 aa, Homo sapiens
  CDR3 for beta chain variable domain of TCR clone 4420 (TRBV20-1, TRBJ2-6)
CSAETTPTHGSGANVLTF

SEQ ID NO: 8841 - protein, 22 aa, Homo sapiens
  CDR3 for alpha chain variable domain of TCR clone 4421 (TRAV27, TRAJ41)
CAVRTQIPDIQNPDPAVYQLRD

SEQ ID NO: 8842 - protein, 16 aa, Homo sapiens
  CDR3 for beta chain variable domain of TCR clone 4421 (TRBV5-1, TRBJ2-3)
CASSLGLAVYTDTQYF

SEQ ID NO: 8843 - protein, 11 aa, Homo sapiens
  CDR3 for alpha chain variable domain of TCR clone 4422 (TRAV3, TRAJ21)
CAVGNFNKFYF

SEQ ID NO: 8844 - protein, 13 aa, Homo sapiens
  CDR3 for beta chain variable domain of TCR clone 4422 (TRBV12-5, TRBJ2-3)
CASGDRQSDTQYF

SEQ ID NO: 8845 - protein, 15 aa, Homo sapiens
  CDR3 for alpha chain variable domain of TCR clone 4423 (TRAV29/DV5, TRAJ53)
CAARYSGGSNYKLTF

SEQ ID NO: 8846 - protein, 15 aa, Homo sapiens
  CDR3 for beta chain variable domain of TCR clone 4423 (TRBV28, TRBJ2-1)
CASSLGTRLYNEQFF

SEQ ID NO: 8847 - protein, 17 aa, Homo sapiens
  CDR3 for alpha chain variable domain of TCR clone 4424 (TRAV3, TRAJ6)
CAVRDGPRAGGSSIPTF

SEQ ID NO: 8848 - protein, 14 aa, Homo sapiens
  CDR3 for beta chain variable domain of TCR clone 4424 (TRBV7-2, TRBJ2-7)
CASSPKTSFYEQYF

SEQ ID NO: 8849 - protein, 11 aa, Homo sapiens
  CDR3 for alpha chain variable domain of TCR clone 4425 (TRAV26-1, TRAJ37)
CIVRVGRKLIF

SEQ ID NO: 8850 - protein, 14 aa, Homo sapiens
  CDR3 for beta chain variable domain of TCR clone 4425 (TRBV7-2, TRBJ2-7)
CASSLPPGQGPQYF

SEQ ID NO: 8851 - protein, 11 aa, Homo sapiens
  CDR3 for alpha chain variable domain of TCR clone 4426 (TRAV2, TRAJ13)
CASGGYQKVTF

SEQ ID NO: 8852 - protein, 12 aa, Homo sapiens
  CDR3 for beta chain variable domain of TCR clone 4426 (TRBV11-2, TRBJ2-2)
CASSLGGGELFF

SEQ ID NO: 8853 - protein, 12 aa, Homo sapiens
  CDR3 for alpha chain variable domain of TCR clone 4427 (TRAV12-3, TRAJ17)
CAMTLTGNTLTF

SEQ ID NO: 8854 - protein, 15 aa, Homo sapiens
  CDR3 for beta chain variable domain of TCR clone 4427 (TRBV20-1, TRBJ2-7)
CSARDRVSGMDEQYF

SEQ ID NO: 8855 - protein, 18 aa, Homo sapiens
  CDR3 for alpha chain variable domain of TCR clone 4428 (TRAV26-1, TRAJ30)
CCVLLHRQSTNRDDKIIF

SEQ ID NO: 8856 - protein, 18 aa, Homo sapiens
  CDR3 for beta chain variable domain of TCR clone 4428 (TRBV4-1, TRBJ1-5)
CASSQDPRGQGLNQPQHF

SEQ ID NO: 8857 - protein, 13 aa, Homo sapiens
  CDR3 for alpha chain variable domain of TCR clone 4429 (TRAV36/DV7, TRAJ54)
CAVDIQGAQKLVF

SEQ ID NO: 8858 - protein, 14 aa, Homo sapiens
  CDR3 for beta chain variable domain of TCR clone 4429 (TRBV19, TRBJ2-7)
CSSNFRDTFTGMYF

SEQ ID NO: 8859 - protein, 15 aa, Homo sapiens
  CDR3 for alpha chain variable domain of TCR clone 4430 (TRAV13-1, TRAJ27)
CAASGGNTNAGKSTF

SEQ ID NO: 8860 - protein, 15 aa, Homo sapiens
  CDR3 for beta chain variable domain of TCR clone 4430 (TRBV12-4, TRBJ1-5)
CASTRQGSGNQPQHF

SEQ ID NO: 8861 - protein, 14 aa, Homo sapiens
  CDR3 for alpha chain variable domain of TCR clone 4431 (TRAV12-3, TRAJ10)
SHLPLTGGGNKLTF

SEQ ID NO: 8862 - protein, 15 aa, Homo sapiens
  CDR3 for beta chain variable domain of TCR clone 4431 (TRBV6-3, TRBJ2-7)
CASSSPGTVFYEQYF

SEQ ID NO: 8863 - protein, 13 aa, Homo sapiens
  CDR3 for alpha chain variable domain of TCR clone 4432 (TRAV13-1, TRAJ11)
CAASKEGYSTLTF

SEQ ID NO: 8864 - protein, 21 aa, Homo sapiens
  CDR3 for beta chain variable domain of TCR clone 4432 (TRBV23-1, TRBJ2-5)
CASTPPGQGPGGDPVLRARHA

SEQ ID NO: 8865 - protein, 11 aa, Homo sapiens
  CDR3 for alpha chain variable domain of TCR clone 4433 (TRAV13-2, TRAJ23)
CAESPRGKLIF

SEQ ID NO: 8866 - protein, 15 aa, Homo sapiens
  CDR3 for beta chain variable domain of TCR clone 4433 (TRBV28, TRBJ2-1)
CASSGLAEVDNEQFF

SEQ ID NO: 8867 - protein, 11 aa, Homo sapiens
  CDR3 for alpha chain variable domain of TCR clone 4434 (TRAV21, TRAJ27)
CAVRMQANQPL

SEQ ID NO: 8868 - protein, 16 aa, Homo sapiens
  CDR3 for beta chain variable domain of TCR clone 4434 (TRBV3-1, TRBJ2-7)
CASSQGATGVAYEQYF

SEQ ID NO: 8869 - protein, 13 aa, Homo sapiens
  CDR3 for alpha chain variable domain of TCR clone 4435 (TRAV35, TRAJ33)
CAGRHDSNYQLIW

SEQ ID NO: 8870 - protein, 19 aa, Homo sapiens
  CDR3 for beta chain variable domain of TCR clone 4435 (TRBV6-3, TRBJ2-1)
CASSYSWTSGRATYNEQFF

SEQ ID NO: 8871 - protein, 12 aa, Homo sapiens
  CDR3 for alpha chain variable domain of TCR clone 4436 (TRAV3, TRAJ27)
CAVRDKAGKSTF

SEQ ID NO: 8872 - protein, 13 aa, Homo sapiens
  CDR3 for beta chain variable domain of TCR clone 4436 (TRBV6-5, TRBJ2-5)
CASSPQGGETQYF

SEQ ID NO: 8873 - protein, 17 aa, Homo sapiens
  CDR3 for alpha chain variable domain of TCR clone 4437 (TRAV13-1, TRAJ52)
CAASSGAGGTSYGKLTF

SEQ ID NO: 8874 - protein, 15 aa, Homo sapiens
  CDR3 for beta chain variable domain of TCR clone 4437 (TRBV28, TRBJ2-4)
CAAGSGTLLMGIQYF

SEQ ID NO: 8875 - protein, 15 aa, Homo sapiens
  CDR3 for alpha chain variable domain of TCR clone 4438 (TRAV4, TRAJ26)
CLVGGLDNYGQNFVF

SEQ ID NO: 8876 - protein, 13 aa, Homo sapiens
  CDR3 for beta chain variable domain of TCR clone 4438 (TRBV20-1, TRBJ2-5)
CSASLTGRETQYF

SEQ ID NO: 8877 - protein, 13 aa, Homo sapiens
  CDR3 for alpha chain variable domain of TCR clone 4439 (TRAV21, TRAJ27)
CAARPGNAGKSTL

SEQ ID NO: 8878 - protein, 14 aa, Homo sapiens
  CDR3 for beta chain variable domain of TCR clone 4439 (TRBV7-6, TRBJ2-3)
CASSLGTVTDTQYF

SEQ ID NO: 8879 - protein, 14 aa, Homo sapiens
  CDR3 for alpha chain variable domain of TCR clone 4440 (TRAV13-1, TRAJ35)
CAASKGGFGNVLHC

SEQ ID NO: 8880 - protein, 15 aa, Homo sapiens
  CDR3 for beta chain variable domain of TCR clone 4440 (TRBV7-3, TRBJ2-1)
CASSLGQGPFGEQFF

SEQ ID NO: 8881 - protein, 14 aa, Homo sapiens
  CDR3 for alpha chain variable domain of TCR clone 4441 (TRAV2, TRAJ9)
CAVEDRSGGFKTIF

SEQ ID NO: 8882 - protein, 15 aa, Homo sapiens
  CDR3 for beta chain variable domain of TCR clone 4441 (TRBV7-2, TRBJ2-1)
CASSSGLAGGNEQFF

SEQ ID NO: 8883 - protein, 11 aa, Homo sapiens
  CDR3 for alpha chain variable domain of TCR clone 4442 (TRAV2, TRAJ13)
CASGGYQKVTF

SEQ ID NO: 8884 - protein, 17 aa, Homo sapiens
  CDR3 for beta chain variable domain of TCR clone 4442 (TRBV28, TRBJ2-5)
CASSTPEGDALQETQYF

SEQ ID NO: 8885 - protein, 13 aa, Homo sapiens
  CDR3 for alpha chain variable domain of TCR clone 4443 (TRAV2, TRAJ15)
CAVEAQAGTALIF

SEQ ID NO: 8886 - protein, 14 aa, Homo sapiens
  CDR3 for beta chain variable domain of TCR clone 4443 (TRBV6-5, TRBJ2-7)
CASVASGGAHEQYF

SEQ ID NO: 8887 - protein, 12 aa, Homo sapiens
  CDR3 for alpha chain variable domain of TCR clone 4444 (TRAV9-2, TRAJ20)
CALSEGDYKLSF

SEQ ID NO: 8888 - protein, 13 aa, Homo sapiens
  CDR3 for beta chain variable domain of TCR clone 4444 (TRBV11-2, TRBJ1-6)
CASSLAGVSPLHF

SEQ ID NO: 8889 - protein, 14 aa, Homo sapiens
  CDR3 for alpha chain variable domain of TCR clone 4445 (TRAV1-2, TRAJ16)
CAVNRFSDGQKLLF

SEQ ID NO: 8890 - protein, 14 aa, Homo sapiens
  CDR3 for beta chain variable domain of TCR clone 4445 (TRBV10-2, TRBJ1-5)
CASSSTGRNQPQHF

SEQ ID NO: 8891 - protein, 15 aa, Homo sapiens
  CDR3 for alpha chain variable domain of TCR clone 4446 (TRAV2, TRAJ13)
CATPSYSGGYQKVTF

SEQ ID NO: 8892 - protein, 14 aa, Homo sapiens
  CDR3 for beta chain variable domain of TCR clone 4446 (TRBV11-2, TRBJ2-3)
CASSRLARTDTQYF

SEQ ID NO: 8893 - protein, 16 aa, Homo sapiens
  CDR3 for alpha chain variable domain of TCR clone 4447 (TRAV30, TRAJ24)
CGTETVDADSWGKFQF

SEQ ID NO: 8894 - protein, 14 aa, Homo sapiens
  CDR3 for beta chain variable domain of TCR clone 4447 (TRBV12-5, TRBJ2-5)
CASGSRTHQETQYF

SEQ ID NO: 8895 - protein, 14 aa, Homo sapiens
  CDR3 for alpha chain variable domain of TCR clone 4448 (TRAV26-1, TRAJ44)
CIVRPTGTASKLTF

SEQ ID NO: 8896 - protein, 12 aa, Homo sapiens
  CDR3 for beta chain variable domain of TCR clone 4448 (TRBV11-3, TRBJ1-1)
CASSLRDSEAFF

SEQ ID NO: 8897 - protein, 12 aa, Homo sapiens
  CDR3 for alpha chain variable domain of TCR clone 4449 (TRAV8-3, TRAJ26)
CAGDNYGQNFVF

SEQ ID NO: 8898 - protein, 11 aa, Homo sapiens
  CDR3 for beta chain variable domain of TCR clone 4449 (TRBV19, TRBJ1-1)
CASSIGSEAFF

SEQ ID NO: 8899 - protein, 12 aa, Homo sapiens
  CDR3 for alpha chain variable domain of TCR clone 4450 (TRAV12-2, TRAJ9)
CAVYNGGFKTIF

SEQ ID NO: 8900 - protein, 14 aa, Homo sapiens
  CDR3 for beta chain variable domain of TCR clone 4450 (TRBV6-1, TRBJ1-5)
CASSETGMEQPQHF

SEQ ID NO: 8901 - protein, 13 aa, Homo sapiens
  CDR3 for alpha chain variable domain of TCR clone 4451 (TRAV13-1, TRAJ24)
CAASDGSWGKLQF

SEQ ID NO: 8902 - protein, 13 aa, Homo sapiens
  CDR3 for beta chain variable domain of TCR clone 4451 (TRBV4-3, TRBJ2-5)
CASSQGGGETQYF

SEQ ID NO: 8903 - protein, 13 aa, Homo sapiens
  CDR3 for alpha chain variable domain of TCR clone 4452 (TRAV27, TRAJ45)
CRSSGGGADGLTF

SEQ ID NO: 8904 - protein, 17 aa, Homo sapiens
  CDR3 for beta chain variable domain of TCR clone 4452 (TRBV10-3, TRBJ2-4)
CTSVPSVNKGSKNIQYF

SEQ ID NO: 8905 - protein, 11 aa, Homo sapiens
  CDR3 for alpha chain variable domain of TCR clone 4453 (TRAV13-1, TRAJ20)
CAASNDYKLSF

SEQ ID NO: 8906 - protein, 14 aa, Homo sapiens
  CDR3 for beta chain variable domain of TCR clone 4453 (TRBV7-2, TRBJ2-7)
CASSPKTSFYEQYF

SEQ ID NO: 8907 - protein, 13 aa, Homo sapiens
  CDR3 for alpha chain variable domain of TCR clone 4454 (TRAV2, TRAJ40)
CAVVTSGTYKYIF

SEQ ID NO: 8908 - protein, 14 aa, Homo sapiens
  CDR3 for beta chain variable domain of TCR clone 4454 (TRBV19, TRBJ2-1)
CASPTFVVSGEQFF

SEQ ID NO: 8909 - protein, 15 aa, Homo sapiens
  CDR3 for alpha chain variable domain of TCR clone 4455 (TRAV17, TRAJ57)
CATGPSQGGSEKLVF

SEQ ID NO: 8910 - protein, 16 aa, Homo sapiens
  CDR3 for beta chain variable domain of TCR clone 4455 (TRBV20-1, TRBJ2-2)
CSASASGIPGAGELFF

SEQ ID NO: 8911 - protein, 12 aa, Homo sapiens
  CDR3 for alpha chain variable domain of TCR clone 4456 (TRAV3, TRAJ20)
CAVRDPDYKLSF

SEQ ID NO: 8912 - protein, 13 aa, Homo sapiens
  CDR3 for beta chain variable domain of TCR clone 4456 (TRBV18, TRBJ1-1)
CASSPETKPEAFF

SEQ ID NO: 8913 - protein, 14 aa, Homo sapiens
  CDR3 for alpha chain variable domain of TCR clone 4457 (TRAV20, TRAJ29)
CAVQAWVGNTPLVF

SEQ ID NO: 8914 - protein, 14 aa, Homo sapiens
  CDR3 for beta chain variable domain of TCR clone 4457 (TRBV11-2, TRBJ2-3)
CASSRLARTDTQYF

SEQ ID NO: 8915 - protein, 16 aa, Homo sapiens
  CDR3 for alpha chain variable domain of TCR clone 4458 (TRAV6, TRAJ37)
CALDIFGSSNTGKLIF

SEQ ID NO: 8916 - protein, 14 aa, Homo sapiens
  CDR3 for beta chain variable domain of TCR clone 4458 (TRBV5-7, TRBJ2-7)
CASSLRSATYEQYF

SEQ ID NO: 8917 - protein, 11 aa, Homo sapiens
  CDR3 for alpha chain variable domain of TCR clone 4459 (TRAV12-1, TRAJ43)
CVEYDNNDMRF

SEQ ID NO: 8918 - protein, 14 aa, Homo sapiens
  CDR3 for beta chain variable domain of TCR clone 4459 (TRBV10-2, TRBJ2-1)
CASSEGTSEDEQFF

SEQ ID NO: 8919 - protein, 14 aa, Homo sapiens
  CDR3 for alpha chain variable domain of TCR clone 4460 (TRAV2, TRAJ37)
CAVDFTSNTGKLIF

SEQ ID NO: 8920 - protein, 16 aa, Homo sapiens
  CDR3 for beta chain variable domain of TCR clone 4460 (TRBV27, TRBJ2-7)
CASSSERRDSAYEQYF

SEQ ID NO: 8921 - protein, 13 aa, Homo sapiens
  CDR3 for alpha chain variable domain of TCR clone 4461 (TRAV8-3, TRAJ43)
CAVGPDNNNDMRF

SEQ ID NO: 8922 - protein, 13 aa, Homo sapiens
  CDR3 for beta chain variable domain of TCR clone 4461 (TRBV29-1, TRBJ2-1)
CSVEGGRVNEQFF

SEQ ID NO: 8923 - protein, 14 aa, Homo sapiens
  CDR3 for alpha chain variable domain of TCR clone 4462 (TRAV12-2, TRAJ13)
CAVKKTGGYQKVTF

SEQ ID NO: 8924 - protein, 18 aa, Homo sapiens
  CDR3 for beta chain variable domain of TCR clone 4462 (TRBV20-1, TRBJ2-3)
CSASGLAGGPGTTDTQYF

SEQ ID NO: 8925 - protein, 16 aa, Homo sapiens
  CDR3 for alpha chain variable domain of TCR clone 4463 (TRAV20, TRAJ38)
CAVQASNAGNNRKPIW

SEQ ID NO: 8926 - protein, 16 aa, Homo sapiens
  CDR3 for beta chain variable domain of TCR clone 4463 (TRBV7-8, TRBJ2-6)
CASRVGDSSGANVLTF

SEQ ID NO: 8927 - protein, 15 aa, Homo sapiens
  CDR3 for alpha chain variable domain of TCR clone 4464 (TRAV13-1, TRAJ52)
CAASSPSTSYGKLTF

SEQ ID NO: 8928 - protein, 13 aa, Homo sapiens
  CDR3 for beta chain variable domain of TCR clone 4464 (TRBV27, TRBJ2-5)
CASSLSSLETQYF

SEQ ID NO: 8929 - protein, 13 aa, Homo sapiens
  CDR3 for alpha chain variable domain of TCR clone 4465 (TRAV36/DV7, TRAJ34)
CAGRPYNTDKLIF

SEQ ID NO: 8930 - protein, 15 aa, Homo sapiens
  CDR3 for beta chain variable domain of TCR clone 4465 (TRBV27, TRBJ1-6)
CASSFDRGLGSPLHF

SEQ ID NO: 8931 - protein, 17 aa, Homo sapiens
  CDR3 for alpha chain variable domain of TCR clone 4466 (TRAV4, TRAJ22)
CCVLLPRGGGSARQLTF

SEQ ID NO: 8932 - protein, 14 aa, Homo sapiens
  CDR3 for beta chain variable domain of TCR clone 4466 (TRBV20-1, TRBJ1-1)
CSARAVNGYTEAFF

SEQ ID NO: 8933 - protein, 18 aa, Homo sapiens
  CDR3 for alpha chain variable domain of TCR clone 4467 (TRAV16, TRAJ45)
CAQASYPSSGGGADGLTF

SEQ ID NO: 8934 - protein, 12 aa, Homo sapiens
  CDR3 for beta chain variable domain of TCR clone 4467 (TRBV11-3, TRBJ2-4)
CASSAGRVIQYF

SEQ ID NO: 8935 - protein, 12 aa, Homo sapiens
  CDR3 for alpha chain variable domain of TCR clone 4468 (TRAV13-1, TRAJ49)
CAASPMGNQFYF

SEQ ID NO: 8936 - protein, 10 aa, Homo sapiens
  CDR3 for beta chain variable domain of TCR clone 4468 (TRBV15, TRBJ2-7)
AETGGYEQYF

SEQ ID NO: 8937 - protein, 15 aa, Homo sapiens
  CDR3 for alpha chain variable domain of TCR clone 4469 (TRAV13-1, TRAJ5)
CAASKADTGRRALTF

SEQ ID NO: 8938 - protein, 15 aa, Homo sapiens
  CDR3 for beta chain variable domain of TCR clone 4469 (TRBV19, TRBJ2-1)
CASSMGWNSNNEQFF

SEQ ID NO: 8939 - protein, 17 aa, Homo sapiens
  CDR3 for alpha chain variable domain of TCR clone 4470 (TRAV26-2, TRAJ52)
CILSSSSGGTSYGKLTF

SEQ ID NO: 8940 - protein, 11 aa, Homo sapiens
  CDR3 for beta chain variable domain of TCR clone 4470 (TRBV19, TRBJ1-1)
CATLRNTEAFF

SEQ ID NO: 8941 - protein, 12 aa, Homo sapiens
  CDR3 for alpha chain variable domain of TCR clone 4471 (TRAV13-2, TRAJ23)
CAERHRGGKLIF

SEQ ID NO: 8942 - protein, 14 aa, Homo sapiens
  CDR3 for beta chain variable domain of TCR clone 4471 (TRBV2, TRBJ2-7)
CASSLTSGGYEQYF

SEQ ID NO: 8943 - protein, 12 aa, Homo sapiens
  CDR3 for alpha chain variable domain of TCR clone 4472 (TRAV12-1, TRAJ50)
CVGRTSYDKVIF

SEQ ID NO: 8944 - protein, 12 aa, Homo sapiens
  CDR3 for beta chain variable domain of TCR clone 4472 (TRBV5-7, TRBJ1-1)
CASSLVGTEAFF

SEQ ID NO: 8945 - protein, 15 aa, Homo sapiens
  CDR3 for alpha chain variable domain of TCR clone 4473 (TRAV12-3, TRAJ6)
CAMSATTGGSYIPTF

SEQ ID NO: 8946 - protein, 15 aa, Homo sapiens
  CDR3 for beta chain variable domain of TCR clone 4473 (TRBV28, TRBJ2-1)
CASSIIAGGRSEQFF

SEQ ID NO: 8947 - protein, 13 aa, Homo sapiens
  CDR3 for alpha chain variable domain of TCR clone 4474 (TRAV12-3, TRAJ9)
CAMSADGGFKTIF

SEQ ID NO: 8948 - protein, 14 aa, Homo sapiens
  CDR3 for beta chain variable domain of TCR clone 4474 (TRBV6-1, TRBJ2-7)
CASSERVNPYEQYF

SEQ ID NO: 8949 - protein, 13 aa, Homo sapiens
  CDR3 for alpha chain variable domain of TCR clone 4475 (TRAV1-2, TRAJ9)
CAALNTGGFKTIF

SEQ ID NO: 8950 - protein, 14 aa, Homo sapiens
  CDR3 for beta chain variable domain of TCR clone 4475 (TRBV13, TRBJ2-5)
CASSLERVGETQYF

SEQ ID NO: 8951 - protein, 19 aa, Homo sapiens
  CDR3 for alpha chain variable domain of TCR clone 4476 (TRAV26-1, TRAJ28)
CIVRVAHAYSGAGSYQLTF

SEQ ID NO: 8952 - protein, 17 aa, Homo sapiens
  CDR3 for beta chain variable domain of TCR clone 4476 (TRBV4-1, TRBJ1-4)
CASSQEGPRGVEEKLFF

SEQ ID NO: 8953 - protein, 14 aa, Homo sapiens
  CDR3 for alpha chain variable domain of TCR clone 4477 (TRAV12-2, TRAJ13)
CAVKKTGGYQKVTF

SEQ ID NO: 8954 - protein, 15 aa, Homo sapiens
  CDR3 for beta chain variable domain of TCR clone 4477 (TRBV7-2, TRBJ2-1)
CASSSGLAGGNEQFF

SEQ ID NO: 8955 - protein, 16 aa, Homo sapiens
  CDR3 for alpha chain variable domain of TCR clone 4478 (TRAV38-2/DV8, TRAJ33)
CAYRTGLFDSNYQLIW

SEQ ID NO: 8956 - protein, 13 aa, Homo sapiens
  CDR3 for beta chain variable domain of TCR clone 4478 (TRBV27, TRBJ1-4)
CASSLMGDEKLFF

SEQ ID NO: 8957 - protein, 12 aa, Homo sapiens
  CDR3 for alpha chain variable domain of TCR clone 4479 (TRAV12-1, TRAJ30)
CVVNPRDDKIIF

SEQ ID NO: 8958 - protein, 18 aa, Homo sapiens
  CDR3 for beta chain variable domain of TCR clone 4479 (TRBV5-1, TRBJ2-7)
CASSLAGFGGMSSYEQYF

SEQ ID NO: 8959 - protein, 18 aa, Homo sapiens
  CDR3 for alpha chain variable domain of TCR clone 4480 (TRAV29/DV5, TRAJ37)
CSVLLCSEGSGNTGKLIF

SEQ ID NO: 8960 - protein, 14 aa, Homo sapiens
  CDR3 for beta chain variable domain of TCR clone 4480 (TRBV5-1, TRBJ1-1)
CASSLAVGSGEAFF

SEQ ID NO: 8961 - protein, 14 aa, Homo sapiens
  CDR3 for alpha chain variable domain of TCR clone 4481 (TRAV1-2, TRAJ16)
CAVNRFSDGQKLLF

SEQ ID NO: 8962 - protein, 14 aa, Homo sapiens
  CDR3 for beta chain variable domain of TCR clone 4481 (TRBV14, TRBJ2-1)
CASSQVQGRGEQFF

SEQ ID NO: 8963 - protein, 10 aa, Homo sapiens
  CDR3 for alpha chain variable domain of TCR clone 4482 (TRAV1-2, TRAJ18)
CAVRGEAQPW

SEQ ID NO: 8964 - protein, 14 aa, Homo sapiens
  CDR3 for beta chain variable domain of TCR clone 4482 (TRBV7-2, TRBJ2-7)
CASSFKGQDHEQYF

SEQ ID NO: 8965 - protein, 14 aa, Homo sapiens
  CDR3 for alpha chain variable domain of TCR clone 4483 (TRAV26-1, TRAJ34)
CIVRVAYNTDKLIF

SEQ ID NO: 8966 - protein, 15 aa, Homo sapiens
  CDR3 for beta chain variable domain of TCR clone 4483 (TRBV7-9, TRBJ1-4)
CASSRTGGFNEKLFF

SEQ ID NO: 8967 - protein, 13 aa, Homo sapiens
  CDR3 for alpha chain variable domain of TCR clone 4484 (TRAV1-1, TRAJ15)
CAVVDQAGTALIF

SEQ ID NO: 8968 - protein, 14 aa, Homo sapiens
  CDR3 for beta chain variable domain of TCR clone 4484 (TRBV5-4, TRBJ1-6)
CASSLWSDNSPLHF

SEQ ID NO: 8969 - protein, 11 aa, Homo sapiens
  CDR3 for alpha chain variable domain of TCR clone 4485 (TRAV23/DV6, TRAJ56)
CAAPANSKLTF

SEQ ID NO: 8970 - protein, 14 aa, Homo sapiens
  CDR3 for beta chain variable domain of TCR clone 4485 (TRBV27, TRBJ2-1)
CASSFGREANEQFF

SEQ ID NO: 8971 - protein, 15 aa, Homo sapiens
  CDR3 for alpha chain variable domain of TCR clone 4486 (TRAV26-1, TRAJ39)
CIVRVARNAGNMLTF

SEQ ID NO: 8972 - protein, 16 aa, Homo sapiens
  CDR3 for beta chain variable domain of TCR clone 4486 (TRBV5-1, TRBJ2-1)
CASSLTLAGGRNEQFF

SEQ ID NO: 8973 - protein, 16 aa, Homo sapiens
  CDR3 for alpha chain variable domain of TCR clone 4487 (TRAV30, TRAJ42)
CGTSKNYGGSQGNLIF

SEQ ID NO: 8974 - protein, 14 aa, Homo sapiens
  CDR3 for beta chain variable domain of TCR clone 4487 (TRBV19, TRBJ1-5)
CASNSYGTHQPQHF

SEQ ID NO: 8975 - protein, 14 aa, Homo sapiens
  CDR3 for alpha chain variable domain of TCR clone 4488 (TRAV12-3, TRAJ10)
SHLPLTGGGNKLTF

SEQ ID NO: 8976 - protein, 14 aa, Homo sapiens
  CDR3 for beta chain variable domain of TCR clone 4488 (TRBV4-2, TRBJ2-1)
CASGLDRAYNEQFF

SEQ ID NO: 8977 - protein, 11 aa, Homo sapiens
  CDR3 for alpha chain variable domain of TCR clone 4489 (TRAV23/DV6, TRAJ58)
CAARLLRGETS

SEQ ID NO: 8978 - protein, 14 aa, Homo sapiens
  CDR3 for beta chain variable domain of TCR clone 4489 (TRBV7-3, TRBJ2-1)
CASSLAGGTNEQFF

SEQ ID NO: 8979 - protein, 10 aa, Homo sapiens
  CDR3 for alpha chain variable domain of TCR clone 4490 (TRAV8-2, TRAJ29)
CTGGNTPLVF

SEQ ID NO: 8980 - protein, 13 aa, Homo sapiens
  CDR3 for beta chain variable domain of TCR clone 4490 (TRBV20-1, TRBJ1-1)
CSARGGGNTEAFF

SEQ ID NO: 8981 - protein, 18 aa, Homo sapiens
  CDR3 for alpha chain variable domain of TCR clone 4491 (TRAV26-2, TRAJ17)
CCVLLHPAIKAAGNKLTF

SEQ ID NO: 8982 - protein, 12 aa, Homo sapiens
  CDR3 for beta chain variable domain of TCR clone 4491 (TRBV29-1, TRBJ2-7)
CSARDRPYEQYF

SEQ ID NO: 8983 - protein, 11 aa, Homo sapiens
  CDR3 for alpha chain variable domain of TCR clone 4492 (TRAV3, TRAJ21)
CAVGNFNKFYF

SEQ ID NO: 8984 - protein, 16 aa, Homo sapiens
  CDR3 for beta chain variable domain of TCR clone 4492 (TRBV19, TRBJ2-1)
CASSKAGPSSYNEQFL

SEQ ID NO: 8985 - protein, 19 aa, Homo sapiens
  CDR3 for alpha chain variable domain of TCR clone 4493 (TRAV26-1, TRAJ28)
CIVRVAHAYSGAGSYQLTF

SEQ ID NO: 8986 - protein, 15 aa, Homo sapiens
  CDR3 for beta chain variable domain of TCR clone 4493 (TRBV5-1, TRBJ1-3)
CASSSKTGAGNTIYF

SEQ ID NO: 8987 - protein, 12 aa, Homo sapiens
  CDR3 for alpha chain variable domain of TCR clone 4494 (TRAV23/DV6, TRAJ30)
CAASKGDDKIIF

SEQ ID NO: 8988 - protein, 15 aa, Homo sapiens
  CDR3 for beta chain variable domain of TCR clone 4494 (TRBV29-1, TRBJ2-1)
CSGRDRKSSYNEQFF

SEQ ID NO: 8989 - protein, 17 aa, Homo sapiens
  CDR3 for alpha chain variable domain of TCR clone 4495 (TRAV23/DV6, TRAJ58)
CAARLLRGETSGSRLTF

SEQ ID NO: 8990 - protein, 13 aa, Homo sapiens
  CDR3 for beta chain variable domain of TCR clone 4495 (TRBV6-4, TRBJ1-5)
CASSADLNQPQHF

SEQ ID NO: 8991 - protein, 16 aa, Homo sapiens
  CDR3 for alpha chain variable domain of TCR clone 4496 (TRAV12-3, TRAJ20)
CAMDKLSFGAGTTVTV

SEQ ID NO: 8992 - protein, 14 aa, Homo sapiens
  CDR3 for beta chain variable domain of TCR clone 4496 (TRBV5-4, TRBJ2-2)
CASSLTSRTGELFF

SEQ ID NO: 8993 - protein, 13 aa, Homo sapiens
  CDR3 for alpha chain variable domain of TCR clone 4497 (TRAV38-1, TRAJ42)
CARWGGSQGNLIF

SEQ ID NO: 8994 - protein, 14 aa, Homo sapiens
  CDR3 for beta chain variable domain of TCR clone 4497 (TRBV6-1, TRBJ1-3)
CASVQGGGGNTIYF

SEQ ID NO: 8995 - protein, 21 aa, Homo sapiens
  CDR3 for alpha chain variable domain of TCR clone 4498 (TRAV3, )
CAVRPTPDIQNPDPAVYQLRD

SEQ ID NO: 8996 - protein, 15 aa, Homo sapiens
  CDR3 for beta chain variable domain of TCR clone 4498 (TRBV11-3, TRBJ2-5)
CASSDTSGGIETQYF

SEQ ID NO: 8997 - protein, 14 aa, Homo sapiens
  CDR3 for alpha chain variable domain of TCR clone 4499 (TRAV8-2, TRAJ6)
CVVISAGGSYIPTF

SEQ ID NO: 8998 - protein, 16 aa, Homo sapiens
  CDR3 for beta chain variable domain of TCR clone 4499 (TRBV7-6, TRBJ2-6)
CASSLPGLSGANVLTF

SEQ ID NO: 8999 - protein, 17 aa, Homo sapiens
  CDR3 for alpha chain variable domain of TCR clone 4500 (TRAV3, TRAJ6)
CAVRDGPRAGGSYIPTF

SEQ ID NO: 9000 - protein, 13 aa, Homo sapiens
  CDR3 for beta chain variable domain of TCR clone 4500 (TRBV20-1, TRBJ1-6)
CSAPLGVGSPLHF

SEQ ID NO: 9001 - protein, 14 aa, Homo sapiens
  CDR3 for alpha chain variable domain of TCR clone 4501 (TRAV2, TRAJ9)
CAVEDRSGGFKTIF

SEQ ID NO: 9002 - protein, 16 aa, Homo sapiens
  CDR3 for beta chain variable domain of TCR clone 4501 (TRBV15, TRBJ2-7)
CATSRDGGIPSYEQYF

SEQ ID NO: 9003 - protein, 11 aa, Homo sapiens
  CDR3 for alpha chain variable domain of TCR clone 4502 (TRAV12-3, TRAJ43)
CAMSVSNDMRF

SEQ ID NO: 9004 - protein, 11 aa, Homo sapiens
  CDR3 for beta chain variable domain of TCR clone 4502 (TRBV29-1, TRBJ2-5)
CSEDRTGTQYF

SEQ ID NO: 9005 - protein, 13 aa, Homo sapiens
  CDR3 for alpha chain variable domain of TCR clone 4503 (TRAV2, TRAJ40)
RAVVTSGTYKYIF

SEQ ID NO: 9006 - protein, 14 aa, Homo sapiens
  CDR3 for beta chain variable domain of TCR clone 4503 (TRBV19, TRBJ2-1)
CASPTFVLSGEQFF

SEQ ID NO: 9007 - protein, 16 aa, Homo sapiens
  CDR3 for alpha chain variable domain of TCR clone 4504 (TRAV29/DV5, TRAJ36)
CAASAGVETGANNLFF

SEQ ID NO: 9008 - protein, 16 aa, Homo sapiens
  CDR3 for beta chain variable domain of TCR clone 4504 (TRBV5-1, TRBJ2-3)
CASSLGLAVYTDTQYF

SEQ ID NO: 9009 - protein, 17 aa, Homo sapiens
  CDR3 for alpha chain variable domain of TCR clone 4505 (TRAV3, TRAJ42)
CAVRDRDYGGSQGNLIF

SEQ ID NO: 9010 - protein, 16 aa, Homo sapiens
  CDR3 for beta chain variable domain of TCR clone 4505 (TRBV9, TRBJ2-1)
CASSVGGGGNYNEQFF

SEQ ID NO: 9011 - protein, 14 aa, Homo sapiens
  CDR3 for alpha chain variable domain of TCR clone 4506 (TRAV17, TRAJ57)
CATDPQGGSEKLVF

SEQ ID NO: 9012 - protein, 14 aa, Homo sapiens
  CDR3 for beta chain variable domain of TCR clone 4506 (TRBV27, TRBJ2-5)
CASSSLKGWETQYF

SEQ ID NO: 9013 - protein, 12 aa, Homo sapiens
  CDR3 for alpha chain variable domain of TCR clone 4507 (TRAV16, TRAJ10)
CSRTGGGNKLTF

SEQ ID NO: 9014 - protein, 16 aa, Homo sapiens
  CDR3 for beta chain variable domain of TCR clone 4507 (TRBV12-5, TRBJ2-5)
CASGPRTSGNQETQYF

SEQ ID NO: 9015 - protein, 12 aa, Homo sapiens
  CDR3 for alpha chain variable domain of TCR clone 4508 (TRAV12-3, TRAJ17)
CAMTLTSNKLTF

SEQ ID NO: 9016 - protein, 15 aa, Homo sapiens
  CDR3 for beta chain variable domain of TCR clone 4508 (TRBV20-1, TRBJ2-7)
CSARDRVSGMDEQYF

SEQ ID NO: 9017 - protein, 16 aa, Homo sapiens
  CDR3 for alpha chain variable domain of TCR clone 4509 (TRAV30, TRAJ24)
CGTEIADADSWGKFQF

SEQ ID NO: 9018 - protein, 14 aa, Homo sapiens
  CDR3 for beta chain variable domain of TCR clone 4509 (TRBV12-5, TRBJ2-5)
CASGSRTHQETQYF

SEQ ID NO: 9019 - protein, 12 aa, Homo sapiens
  CDR3 for alpha chain variable domain of TCR clone 4510 (TRAV13-2, TRAJ23)
CAERHRGGKLIF

SEQ ID NO: 9020 - protein, 16 aa, Homo sapiens
  CDR3 for beta chain variable domain of TCR clone 4510 (TRBV2, TRBJ2-3)
CASSTSVEGVTDTQYF

SEQ ID NO: 9021 - protein, 14 aa, Homo sapiens
  CDR3 for alpha chain variable domain of TCR clone 4511 (TRAV1-2, TRAJ16)
CAVNRFSDGQKLLF

SEQ ID NO: 9022 - protein, 10 aa, Homo sapiens
  CDR3 for beta chain variable domain of TCR clone 4511 (TRBV20-1, TRBJ1-4)
PQGANEKLFF

SEQ ID NO: 9023 - protein, 11 aa, Homo sapiens
  CDR3 for alpha chain variable domain of TCR clone 4512 (TRAV2, TRAJ31)
CAAGPPARLMF

SEQ ID NO: 9024 - protein, 12 aa, Homo sapiens
  CDR3 for beta chain variable domain of TCR clone 4512 (TRBV7-8, TRBJ2-7)
CASSLGDREQYF

SEQ ID NO: 9025 - protein, 16 aa, Homo sapiens
  CDR3 for alpha chain variable domain of TCR clone 4513 (TRAV20, TRAJ53)
CAVQAESGGSNYKLTF

SEQ ID NO: 9026 - protein, 14 aa, Homo sapiens
  CDR3 for beta chain variable domain of TCR clone 4513 (TRBV27, TRBJ2-5)
CASSRTFLVDTQYF

SEQ ID NO: 9027 - protein, 12 aa, Homo sapiens
  CDR3 for alpha chain variable domain of TCR clone 4514 (TRAV2, TRAJ45)
CAEEEVLTDSPL

SEQ ID NO: 9028 - protein, 14 aa, Homo sapiens
  CDR3 for beta chain variable domain of TCR clone 4514 (TRBV27, TRBJ2-5)
CASSWREGLETQYF

SEQ ID NO: 9029 - protein, 14 aa, Homo sapiens
  CDR3 for alpha chain variable domain of TCR clone 4515 (TRAV12-2, TRAJ40)
CAVKIPPGTYKYIF

SEQ ID NO: 9030 - protein, 14 aa, Homo sapiens
  CDR3 for beta chain variable domain of TCR clone 4515 (TRBV20-1, TRBJ1-1)
CSAQTRIGGTEAFF

SEQ ID NO: 9031 - protein, 16 aa, Homo sapiens
  CDR3 for alpha chain variable domain of TCR clone 4516 (TRAV26-2, TRAJ37)
CILRDFGSSNTGKLIF

SEQ ID NO: 9032 - protein, 15 aa, Homo sapiens
  CDR3 for beta chain variable domain of TCR clone 4516 (TRBV6-5, TRBJ2-7)
CASRSLAVSSYEQYF

SEQ ID NO: 9033 - protein, 16 aa, Homo sapiens
  CDR3 for alpha chain variable domain of TCR clone 4517 (TRAV12-3, TRAJ53)
CAMSPGSGGSNYKLTF

SEQ ID NO: 9034 - protein, 15 aa, Homo sapiens
  CDR3 for beta chain variable domain of TCR clone 4517 (TRBV18, TRBJ2-7)
CASSPSSTGNYEQYF

SEQ ID NO: 9035 - protein, 13 aa, Homo sapiens
  CDR3 for alpha chain variable domain of TCR clone 4518 (TRAV35, TRAJ48)
CAGHEFGNEKLTF

SEQ ID NO: 9036 - protein, 15 aa, Homo sapiens
  CDR3 for beta chain variable domain of TCR clone 4518 (TRBV27, TRBJ2-7)
CASSPQREGQREQYF

SEQ ID NO: 9037 - protein, 14 aa, Homo sapiens
  CDR3 for alpha chain variable domain of TCR clone 4519 (TRAV12-2, TRAJ17)
CAVLFKAAGNKLTF

SEQ ID NO: 9038 - protein, 20 aa, Homo sapiens
  CDR3 for beta chain variable domain of TCR clone 4519 (TRBV19, TRBJ2-1)
CASSISRTVTSTRLNNEQFF

SEQ ID NO: 9039 - protein, 16 aa, Homo sapiens
  CDR3 for alpha chain variable domain of TCR clone 4520 (TRAV1-2, TRAJ10)
CAVRGVLTGGGNKLTF

SEQ ID NO: 9040 - protein, 16 aa, Homo sapiens
  CDR3 for beta chain variable domain of TCR clone 4520 (TRBV29-1, TRBJ2-7)
CSVEVVGTSGSYEQYF

SEQ ID NO: 9041 - protein, 18 aa, Homo sapiens
  CDR3 for alpha chain variable domain of TCR clone 4521 (TRAV13-1, TRAJ52)
CAAKNPNAGGTSYGKLTF

SEQ ID NO: 9042 - protein, 11 aa, Homo sapiens
  CDR3 for beta chain variable domain of TCR clone 4521 (TRBV29-1, TRBJ2-5)
CSEDRTGTQYF

SEQ ID NO: 9043 - protein, 15 aa, Homo sapiens
  CDR3 for alpha chain variable domain of TCR clone 4522 (TRAV21, TRAJ53)
CATLNSGGSNYKLTF

SEQ ID NO: 9044 - protein, 14 aa, Homo sapiens
  CDR3 for beta chain variable domain of TCR clone 4522 (TRBV20-1, TRBJ2-1)
CSAQIGGSANEQFF

SEQ ID NO: 9045 - protein, 14 aa, Homo sapiens
  CDR3 for alpha chain variable domain of TCR clone 4523 (TRAV12-2, TRAJ17)
CAVNIKAAGNKLTF

SEQ ID NO: 9046 - protein, 13 aa, Homo sapiens
  CDR3 for beta chain variable domain of TCR clone 4523 (TRBV4-1, TRBJ2-2)
CASSQENTGELFF

SEQ ID NO: 9047 - protein, 16 aa, Homo sapiens
  CDR3 for alpha chain variable domain of TCR clone 4524 (TRAV1-2, TRAJ10)
CAVRGVLTGGGNKLTF

SEQ ID NO: 9048 - protein, 16 aa, Homo sapiens
  CDR3 for beta chain variable domain of TCR clone 4524 (TRBV12-5, TRBJ2-5)
CASGPRTSGNQETQYF

SEQ ID NO: 9049 - protein, 11 aa, Homo sapiens
  CDR3 for alpha chain variable domain of TCR clone 4525 (TRAV1-2, TRAJ11)
CAVRGYSTLTF

SEQ ID NO: 9050 - protein, 15 aa, Homo sapiens
  CDR3 for beta chain variable domain of TCR clone 4525 (TRBV3-1, TRBJ2-2)
CASSQDWTRAGELFF

SEQ ID NO: 9051 - protein, 15 aa, Homo sapiens
  CDR3 for alpha chain variable domain of TCR clone 4526 (TRAV38-1, TRAJ37)
CAFIFGSGNTGKLIF

SEQ ID NO: 9052 - protein, 16 aa, Homo sapiens
  CDR3 for beta chain variable domain of TCR clone 4526 (TRBV6-1, TRBJ2-3)
CASSEVIGQGTDTQYF

SEQ ID NO: 9053 - protein, 14 aa, Homo sapiens
  CDR3 for alpha chain variable domain of TCR clone 4527 (TRAV12-1, TRAJ38)
CVVHNAGNNRKLIW

SEQ ID NO: 9054 - protein, 13 aa, Homo sapiens
  CDR3 for beta chain variable domain of TCR clone 4527 (TRBV19, TRBJ2-1)
CATSRGVYNEQFF

SEQ ID NO: 9055 - protein, 14 aa, Homo sapiens
  CDR3 for alpha chain variable domain of TCR clone 4528 (TRAV1-2, TRAJ16)
CVVNRFSDGQKLLF

SEQ ID NO: 9056 - protein, 15 aa, Homo sapiens
  CDR3 for beta chain variable domain of TCR clone 4528 (TRBV9, TRBJ1-6)
CASSVAGTGDSPLHF

SEQ ID NO: 9057 - protein, 12 aa, Homo sapiens
  CDR3 for alpha chain variable domain of TCR clone 4529 (TRAV12-3, TRAJ17)
CAMTLTGNKLTF

SEQ ID NO: 9058 - protein, 15 aa, Homo sapiens
  CDR3 for beta chain variable domain of TCR clone 4529 (TRBV20-1, TRBJ2-7)
CSARERVSGMDEQYF

SEQ ID NO: 9059 - protein, 10 aa, Homo sapiens
  CDR3 for alpha chain variable domain of TCR clone 4530 (TRAV8-1, TRAJ21)
CAVNGTKFYF

SEQ ID NO: 9060 - protein, 16 aa, Homo sapiens
  CDR3 for beta chain variable domain of TCR clone 4530 (TRBV7-2, TRBJ1-5)
CASSPWGPEGNQPQHF

SEQ ID NO: 9061 - protein, 16 aa, Homo sapiens
  CDR3 for alpha chain variable domain of TCR clone 4531 (TRAV3, TRAJ10)
CAVRDMRAGGGNKLTF

SEQ ID NO: 9062 - protein, 14 aa, Homo sapiens
  CDR3 for beta chain variable domain of TCR clone 4531 (TRBV28, TRBJ2-2)
CASTRRSGDGELFF

SEQ ID NO: 9063 - protein, 14 aa, Homo sapiens
  CDR3 for alpha chain variable domain of TCR clone 4532 (TRAV1-2, TRAJ16)
CAVNRFSDGQKLLF

SEQ ID NO: 9064 - protein, 15 aa, Homo sapiens
  CDR3 for beta chain variable domain of TCR clone 4532 (TRBV7-2, TRBJ2-1)
CASSSGLAGGNEQFF

SEQ ID NO: 9065 - protein, 14 aa, Homo sapiens
  CDR3 for alpha chain variable domain of TCR clone 4533 (TRAV1-2, TRAJ16)
CAVNRFSDGQKLLF

SEQ ID NO: 9066 - protein, 14 aa, Homo sapiens
  CDR3 for beta chain variable domain of TCR clone 4533 (TRBV7-2, TRBJ2-5)
CASSPLGQSETQYF

SEQ ID NO: 9067 - protein, 12 aa, Homo sapiens
  CDR3 for alpha chain variable domain of TCR clone 4534 (TRAV12-3, TRAJ17)
CAMTLTGKKLTF

SEQ ID NO: 9068 - protein, 15 aa, Homo sapiens
  CDR3 for beta chain variable domain of TCR clone 4534 (TRBV20-1, TRBJ2-7)
CSARDRVSGMDEQYF

SEQ ID NO: 9069 - protein, 13 aa, Homo sapiens
  CDR3 for alpha chain variable domain of TCR clone 4535 (TRAV9-2, TRAJ49)
CALIQIGGNQFYF

SEQ ID NO: 9070 - protein, 13 aa, Homo sapiens
  CDR3 for beta chain variable domain of TCR clone 4535 (TRBV20-1, TRBJ1-1)
CSARGGGNTEAFF

SEQ ID NO: 9071 - protein, 14 aa, Homo sapiens
  CDR3 for alpha chain variable domain of TCR clone 4536 (TRAV12-3, TRAJ58)
CAMSTETSGSRLTF

SEQ ID NO: 9072 - protein, 11 aa, Homo sapiens
  CDR3 for beta chain variable domain of TCR clone 4536 (TRBV29-1, TRBJ2-5)
CSEDRTGTQYF

SEQ ID NO: 9073 - protein, 16 aa, Homo sapiens
  CDR3 for alpha chain variable domain of TCR clone 4537 (TRAV30, TRAJ24)
CGTEIVDADSWGKFQF

SEQ ID NO: 9074 - protein, 12 aa, Homo sapiens
  CDR3 for beta chain variable domain of TCR clone 4537 (TRBV27, TRBJ2-1)
CASRGFYNEQFF

SEQ ID NO: 9075 - protein, 17 aa, Homo sapiens
  CDR3 for alpha chain variable domain of TCR clone 4538 (TRAV35, TRAJ38)
CAGQLQRNAGNNRKLIW

SEQ ID NO: 9076 - protein, 15 aa, Homo sapiens
  CDR3 for beta chain variable domain of TCR clone 4538 (TRBV7-9, TRBJ2-1)
CASSLGLAGGTEQFF

SEQ ID NO: 9077 - protein, 14 aa, Homo sapiens
  CDR3 for alpha chain variable domain of TCR clone 4539 (TRAV23/DV6, TRAJ13)
CAAMYSGGYQKVTF

SEQ ID NO: 9078 - protein, 16 aa, Homo sapiens
  CDR3 for beta chain variable domain of TCR clone 4539 (TRBV9, TRBJ2-1)
CASSALGGIGNNEQFF

SEQ ID NO: 9079 - protein, 15 aa, Homo sapiens
  CDR3 for alpha chain variable domain of TCR clone 4540 (TRAV8-6, TRAJ11)
CAVSDRRSGYSTLTF

SEQ ID NO: 9080 - protein, 15 aa, Homo sapiens
  CDR3 for beta chain variable domain of TCR clone 4540 (TRBV7-3, TRBJ2-1)
CASSPTGGSRNEQFF

SEQ ID NO: 9081 - protein, 15 aa, Homo sapiens
  CDR3 for alpha chain variable domain of TCR clone 4541 (TRAV21, TRAJ45)
CAVSYSGGGADGLTF

SEQ ID NO: 9082 - protein, 12 aa, Homo sapiens
  CDR3 for beta chain variable domain of TCR clone 4541 (TRBV11-2, TRBJ2-1)
CASSPGNNEQFF

SEQ ID NO: 9083 - protein, 13 aa, Homo sapiens
  CDR3 for alpha chain variable domain of TCR clone 4542 (TRAV2, TRAJ23)
CAVMGNQGGKLIF

SEQ ID NO: 9084 - protein, 15 aa, Homo sapiens
  CDR3 for beta chain variable domain of TCR clone 4542 (TRBV11-2, TRBJ2-1)
CASSSSTISYNEQFF

SEQ ID NO: 9085 - protein, 12 aa, Homo sapiens
  CDR3 for alpha chain variable domain of TCR clone 4543 (TRAV29/DV5, TRAJ34)
CAASGNTDKLIF

SEQ ID NO: 9086 - protein, 16 aa, Homo sapiens
  CDR3 for beta chain variable domain of TCR clone 4543 (TRBV12-4, TRBJ1-5)
CASRQPVEGSNQPQHF

SEQ ID NO: 9087 - protein, 14 aa, Homo sapiens
  CDR3 for alpha chain variable domain of TCR clone 4544 (TRAV23/DV6, TRAJ11)
CAALIGGGYSTLTF

SEQ ID NO: 9088 - protein, 13 aa, Homo sapiens
  CDR3 for beta chain variable domain of TCR clone 4544 (TRBV11-3, TRBJ1-1)
CASSLGGNTEAFF

SEQ ID NO: 9089 - protein, 14 aa, Homo sapiens
  CDR3 for alpha chain variable domain of TCR clone 4545 (TRAV38-2/DV8, TRAJ30)
CAYRSADRDDKIIF

SEQ ID NO: 9090 - protein, 16 aa, Homo sapiens
  CDR3 for beta chain variable domain of TCR clone 4545 (TRBV15, TRBJ1-3)
CATSSPIGFSGNTIYF

SEQ ID NO: 9091 - protein, 12 aa, Homo sapiens
  CDR3 for alpha chain variable domain of TCR clone 4546 (TRAV12-3, TRAJ54)
CGADRGAQKLVF

SEQ ID NO: 9092 - protein, 15 aa, Homo sapiens
  CDR3 for beta chain variable domain of TCR clone 4546 (TRBV27, TRBJ2-1)
CASSLAGGPFNEQFF

SEQ ID NO: 9093 - protein, 15 aa, Homo sapiens
  CDR3 for alpha chain variable domain of TCR clone 4547 (TRAV1-2, TRAJ35)
CAVRDREGFGNVLHC

SEQ ID NO: 9094 - protein, 14 aa, Homo sapiens
  CDR3 for beta chain variable domain of TCR clone 4547 (TRBV28, TRBJ1-4)
CASSRTVGNEKLFF

SEQ ID NO: 9095 - protein, 15 aa, Homo sapiens
  CDR3 for alpha chain variable domain of TCR clone 4548 (TRAV3, TRAJ22)
CAVRDRGGSARQLTF

SEQ ID NO: 9096 - protein, 17 aa, Homo sapiens
  CDR3 for beta chain variable domain of TCR clone 4548 (TRBV28, TRBJ2-5)
CASSTPEGDALQETQYF

SEQ ID NO: 9097 - protein, 16 aa, Homo sapiens
  CDR3 for alpha chain variable domain of TCR clone 4549 (TRAV3, TRAJ27)
CAVRDPQGTNAGKSTF

SEQ ID NO: 9098 - protein, 15 aa, Homo sapiens
  CDR3 for beta chain variable domain of TCR clone 4549 (TRBV20-1, TRBJ2-7)
CSARDRVSGMDEQYF

SEQ ID NO: 9099 - protein, 13 aa, Homo sapiens
  CDR3 for alpha chain variable domain of TCR clone 4550 (TRAV13-1, TRAJ21)
CAASIYNFNKFYF

SEQ ID NO: 9100 - protein, 20 aa, Homo sapiens
  CDR3 for beta chain variable domain of TCR clone 4550 (TRBV7-8, TRBJ2-2)
CASSHLFPGPTIHITGELFF

SEQ ID NO: 9101 - protein, 10 aa, Homo sapiens
  CDR3 for alpha chain variable domain of TCR clone 4551 (TRAV12-2, TRAJ22)
CAVNETQLTF

SEQ ID NO: 9102 - protein, 13 aa, Homo sapiens
  CDR3 for beta chain variable domain of TCR clone 4551 (TRBV6-5, TRBJ2-6)
CASSTSGPLRLDF

SEQ ID NO: 9103 - protein, 11 aa, Homo sapiens
  CDR3 for alpha chain variable domain of TCR clone 4552 (TRAV12-3, TRAJ43)
CAMSVSNDMRF

SEQ ID NO: 9104 - protein, 19 aa, Homo sapiens
  CDR3 for beta chain variable domain of TCR clone 4552 (TRBV28, TRBJ2-7)
CASSYSGTSRLGWVYEQYF

SEQ ID NO: 9105 - protein, 12 aa, Homo sapiens
  CDR3 for alpha chain variable domain of TCR clone 4553 (TRAV13-2, TRAJ23)
CAERHRGGKLIF

SEQ ID NO: 9106 - protein, 13 aa, Homo sapiens
  CDR3 for beta chain variable domain of TCR clone 4553 (TRBV15, TRBJ1-6)
CATSGGLNSPLHF

SEQ ID NO: 9107 - protein, 15 aa, Homo sapiens
  CDR3 for alpha chain variable domain of TCR clone 4554 (TRAV13-2, TRAJ37)
CREYEDPGNTGKLIF

SEQ ID NO: 9108 - protein, 13 aa, Homo sapiens
  CDR3 for beta chain variable domain of TCR clone 4554 (TRBV20-1, TRBJ2-7)
CSARSGHPYEQYF

SEQ ID NO: 9109 - protein, 12 aa, Homo sapiens
  CDR3 for alpha chain variable domain of TCR clone 4555 (TRAV1-2, TRAJ11)
CAVRGGYSTLTF

SEQ ID NO: 9110 - protein, 16 aa, Homo sapiens
  CDR3 for beta chain variable domain of TCR clone 4555 (TRBV7-9, TRBJ2-1)
CASSSPQGTTRNEQFF

SEQ ID NO: 9111 - protein, 18 aa, Homo sapiens
  CDR3 for alpha chain variable domain of TCR clone 4556 (TRAV26-1, TRAJ57)
CIVRVALRFQGGSEKLVF

SEQ ID NO: 9112 - protein, 15 aa, Homo sapiens
  CDR3 for beta chain variable domain of TCR clone 4556 (TRBV27, TRBJ2-1)
CASSNGGGSSNEQFF

SEQ ID NO: 9113 - protein, 17 aa, Homo sapiens
  CDR3 for alpha chain variable domain of TCR clone 4557 (TRAV12-2, TRAJ53)
CAPLTDSQEGSNYKLTF

SEQ ID NO: 9114 - protein, 12 aa, Homo sapiens
  CDR3 for beta chain variable domain of TCR clone 4557 (TRBV11-2, TRBJ2-2)
CASSLGGGELFF

SEQ ID NO: 9115 - protein, 16 aa, Homo sapiens
  CDR3 for alpha chain variable domain of TCR clone 4558 (TRAV3, TRAJ37)
CAVRVRGSGNTGKLIF

SEQ ID NO: 9116 - protein, 16 aa, Homo sapiens
  CDR3 for beta chain variable domain of TCR clone 4558 (TRBV19, TRBJ2-1)
CASSKAGPSSYNEQFF

SEQ ID NO: 9117 - protein, 14 aa, Homo sapiens
  CDR3 for alpha chain variable domain of TCR clone 4559 (TRAV13-1, TRAJ23)
CAASRLGRGGKLIF

SEQ ID NO: 9118 - protein, 13 aa, Homo sapiens
  CDR3 for beta chain variable domain of TCR clone 4559 (TRBV20-1, TRBJ1-1)
CSAPLGGGTEAFF

SEQ ID NO: 9119 - protein, 13 aa, Homo sapiens
  CDR3 for alpha chain variable domain of TCR clone 4560 (TRAV16, TRAJ34)
CALSPYNTDKLIF

SEQ ID NO: 9120 - protein, 17 aa, Homo sapiens
  CDR3 for beta chain variable domain of TCR clone 4560 (TRBV5-1, TRBJ2-1)
CASSTGTSGYSYNEQFF

SEQ ID NO: 9121 - protein, 17 aa, Homo sapiens
  CDR3 for alpha chain variable domain of TCR clone 4561 (TRAV3, TRAJ6)
CAVRDGPRAGGSDIPTF

SEQ ID NO: 9122 - protein, 14 aa, Homo sapiens
  CDR3 for beta chain variable domain of TCR clone 4561 (TRBV7-2, TRBJ2-7)
CASSPKTSFYEQYF

SEQ ID NO: 9123 - protein, 16 aa, Homo sapiens
  CDR3 for alpha chain variable domain of TCR clone 4562 (TRAV30, TRAJ24)
CGTEIVDADSGGKFQF

SEQ ID NO: 9124 - protein, 14 aa, Homo sapiens
  CDR3 for beta chain variable domain of TCR clone 4562 (TRBV12-5, TRBJ2-5)
CASGSRTHQETQYF

SEQ ID NO: 9125 - protein, 15 aa, Homo sapiens
  CDR3 for alpha chain variable domain of TCR clone 4563 (TRAV34, TRAJ38)
CGADFTPGNNRKLIW

SEQ ID NO: 9126 - protein, 14 aa, Homo sapiens
  CDR3 for beta chain variable domain of TCR clone 4563 (TRBV12-5, TRBJ2-5)
CASGSRTHQETQYF

SEQ ID NO: 9127 - protein, 14 aa, Homo sapiens
  CDR3 for alpha chain variable domain of TCR clone 4564 (TRAV12-2, TRAJ13)
CAVAGSGGYQKVTF

SEQ ID NO: 9128 - protein, 14 aa, Homo sapiens
  CDR3 for beta chain variable domain of TCR clone 4564 (TRBV6-5, TRBJ2-7)
CASSYGVGEAEQYF

SEQ ID NO: 9129 - protein, 13 aa, Homo sapiens
  CDR3 for alpha chain variable domain of TCR clone 4565 (TRAV29/DV5, TRAJ9)
CAASETGGFKTIF

SEQ ID NO: 9130 - protein, 15 aa, Homo sapiens
  CDR3 for beta chain variable domain of TCR clone 4565 (TRBV19, TRBJ2-1)
CASSMGSGTGRQQFF

SEQ ID NO: 9131 - protein, 12 aa, Homo sapiens
  CDR3 for alpha chain variable domain of TCR clone 4566 (TRAV12-2, TRAJ10)
WGVTGGGNKLTF

SEQ ID NO: 9132 - protein, 16 aa, Homo sapiens
  CDR3 for beta chain variable domain of TCR clone 4566 (TRBV24-1, TRBJ2-3)
CATSDRRQDLTDTQYF

SEQ ID NO: 9133 - protein, 14 aa, Homo sapiens
  CDR3 for alpha chain variable domain of TCR clone 4567 (TRAV1-2, TRAJ16)
CAVNRFSDGQKLLF

SEQ ID NO: 9134 - protein, 17 aa, Homo sapiens
  CDR3 for beta chain variable domain of TCR clone 4567 (TRBV7-9, TRBJ2-1)
CASSLVASYPSYNEQFF

SEQ ID NO: 9135 - protein, 13 aa, Homo sapiens
  CDR3 for alpha chain variable domain of TCR clone 4568 (TRAV12-1, TRAJ12)
CVVNIESSYKLIF

SEQ ID NO: 9136 - protein, 15 aa, Homo sapiens
  CDR3 for beta chain variable domain of TCR clone 4568 (TRBV2, TRBJ2-5)
CASSSSVAGGETQYF

SEQ ID NO: 9137 - protein, 14 aa, Homo sapiens
  CDR3 for alpha chain variable domain of TCR clone 4569 (TRAV1-2, TRAJ16)
CAVNRFSDGQKLLF

SEQ ID NO: 9138 - protein, 12 aa, Homo sapiens
  CDR3 for beta chain variable domain of TCR clone 4569 (TRBV5-1, TRBJ2-5)
CASSWDQETQYF

SEQ ID NO: 9139 - protein, 14 aa, Homo sapiens
  CDR3 for alpha chain variable domain of TCR clone 4570 (TRAV21, TRAJ10)
CAVALTGGGNKLTF

SEQ ID NO: 9140 - protein, 13 aa, Homo sapiens
  CDR3 for beta chain variable domain of TCR clone 4570 (TRBV7-2, TRBJ1-6)
CASSLGSNSPLHF

SEQ ID NO: 9141 - protein, 19 aa, Homo sapiens
  CDR3 for alpha chain variable domain of TCR clone 4571 (TRAV25, TRAJ20)
TATQTTDVGILPHDYKLSF

SEQ ID NO: 9142 - protein, 15 aa, Homo sapiens
  CDR3 for beta chain variable domain of TCR clone 4571 (TRBV6-6, TRBJ1-5)
CASSSIQGTNQPQHF

SEQ ID NO: 9143 - protein, 11 aa, Homo sapiens
  CDR3 for alpha chain variable domain of TCR clone 4572 (TRAV8-1, TRAJ8)
CAMTGFQKLVF

SEQ ID NO: 9144 - protein, 14 aa, Homo sapiens
  CDR3 for beta chain variable domain of TCR clone 4572 (TRBV5-4, TRBJ1-2)
CASTRQTDNYGYTF

SEQ ID NO: 9145 - protein, 13 aa, Homo sapiens
  CDR3 for alpha chain variable domain of TCR clone 4573 (TRAV21, TRAJ27)
CAARPGNAGKSTF

SEQ ID NO: 9146 - protein, 12 aa, Homo sapiens
  CDR3 for beta chain variable domain of TCR clone 4573 (TRBV6-3, TRBJ2-7)
CASSLTPYEQYF

SEQ ID NO: 9147 - protein, 15 aa, Homo sapiens
  CDR3 for alpha chain variable domain of TCR clone 4574 (TRAV17, TRAJ57)
CATGPSQGGSEKLVF

SEQ ID NO: 9148 - protein, 14 aa, Homo sapiens
  CDR3 for beta chain variable domain of TCR clone 4574 (TRBV11-2, TRBJ1-2)
CASSLYRGNYGYTF

SEQ ID NO: 9149 - protein, 13 aa, Homo sapiens
  CDR3 for alpha chain variable domain of TCR clone 4575 (TRAV12-1, TRAJ22)
CVVPSGSARQLTF

SEQ ID NO: 9150 - protein, 15 aa, Homo sapiens
  CDR3 for beta chain variable domain of TCR clone 4575 (TRBV11-3, TRBJ2-7)
CASSPGPASSYEQYF

SEQ ID NO: 9151 - protein, 12 aa, Homo sapiens
  CDR3 for alpha chain variable domain of TCR clone 4576 (TRAV13-2, TRAJ23)
CAERHRGGKLIF

SEQ ID NO: 9152 - protein, 15 aa, Homo sapiens
  CDR3 for beta chain variable domain of TCR clone 4576 (TRBV20-1, TRBJ2-7)
CSARDRVSGMDEQYF

SEQ ID NO: 9153 - protein, 14 aa, Homo sapiens
  CDR3 for alpha chain variable domain of TCR clone 4577 (TRAV8-1, TRAJ23)
CAVGTYNQGGKLIF

SEQ ID NO: 9154 - protein, 16 aa, Homo sapiens
  CDR3 for beta chain variable domain of TCR clone 4577 (TRBV18, TRBJ1-5)
CASSPSTGNSNQPQHS

SEQ ID NO: 9155 - protein, 14 aa, Homo sapiens
  CDR3 for alpha chain variable domain of TCR clone 4578 (TRAV12-3, TRAJ28)
CAMWSGAGSYQLTF

SEQ ID NO: 9156 - protein, 14 aa, Homo sapiens
  CDR3 for beta chain variable domain of TCR clone 4578 (TRBV19, TRBJ1-5)
CASSLSGGSQPQHF

SEQ ID NO: 9157 - protein, 12 aa, Homo sapiens
  CDR3 for alpha chain variable domain of TCR clone 4579 (TRAV1-1, TRAJ39)
CAVPVVGNMLTF

SEQ ID NO: 9158 - protein, 16 aa, Homo sapiens
  CDR3 for beta chain variable domain of TCR clone 4579 (TRBV28, TRBJ2-7)
CASSPWVATGDLSQYF

SEQ ID NO: 9159 - protein, 16 aa, Homo sapiens
  CDR3 for alpha chain variable domain of TCR clone 4580 (TRAV30, TRAJ24)
CGTEIVDADGWGKFQF

SEQ ID NO: 9160 - protein, 14 aa, Homo sapiens
  CDR3 for beta chain variable domain of TCR clone 4580 (TRBV12-5, TRBJ2-5)
CASGSRTHQETQYF

SEQ ID NO: 9161 - protein, 12 aa, Homo sapiens
  CDR3 for alpha chain variable domain of TCR clone 4581 (TRAV20, TRAJ13)
CCVKRGYQKVTF

SEQ ID NO: 9162 - protein, 13 aa, Homo sapiens
  CDR3 for beta chain variable domain of TCR clone 4581 (TRBV12-5, TRBJ2-1)
CASGLGRGNEQFF

SEQ ID NO: 9163 - protein, 11 aa, Homo sapiens
  CDR3 for alpha chain variable domain of TCR clone 4582 (TRAV12-2, TRAJ49)
CAVHTGNQFYF

SEQ ID NO: 9164 - protein, 15 aa, Homo sapiens
  CDR3 for beta chain variable domain of TCR clone 4582 (TRBV4-2, TRBJ1-1)
CASSQQGAGDTEAFF

SEQ ID NO: 9165 - protein, 21 aa, Homo sapiens
  CDR3 for alpha chain variable domain of TCR clone 4583 (TRAV26-1, TRAJ38)
CIADNAGNNHIQNPDPAVYQL

SEQ ID NO: 9166 - protein, 13 aa, Homo sapiens
  CDR3 for beta chain variable domain of TCR clone 4583 (TRBV20-1, TRBJ1-1)
CSARGGGNTEAFF

SEQ ID NO: 9167 - protein, 12 aa, Homo sapiens
  CDR3 for alpha chain variable domain of TCR clone 4584 (TRAV12-2, TRAJ45)
CAVTGGADGLTF

SEQ ID NO: 9168 - protein, 14 aa, Homo sapiens
  CDR3 for beta chain variable domain of TCR clone 4584 (TRBV5-5, TRBJ2-7)
CASSLGQGTYEQYF

SEQ ID NO: 9169 - protein, 14 aa, Homo sapiens
  CDR3 for alpha chain variable domain of TCR clone 4585 (TRAV22, TRAJ40)
CAVESTSGTYEYIF

SEQ ID NO: 9170 - protein, 17 aa, Homo sapiens
  CDR3 for beta chain variable domain of TCR clone 4585 (TRBV7-9, TRBJ2-2)
CASSLGVAGMNTGELFF

SEQ ID NO: 9171 - protein, 13 aa, Homo sapiens
  CDR3 for alpha chain variable domain of TCR clone 4586 (TRAV8-3, TRAJ44)
CAVVPGTASKLTF

SEQ ID NO: 9172 - protein, 13 aa, Homo sapiens
  CDR3 for beta chain variable domain of TCR clone 4586 (TRBV10-3, TRBJ1-2)
CAISERDSYGYTF

SEQ ID NO: 9173 - protein, 13 aa, Homo sapiens
  CDR3 for alpha chain variable domain of TCR clone 4587 (TRAV13-1, TRAJ53)
CAASKGSNYKLTF

SEQ ID NO: 9174 - protein, 13 aa, Homo sapiens
  CDR3 for beta chain variable domain of TCR clone 4587 (TRBV29-1, TRBJ2-5)
CSVTIASEETQYF

SEQ ID NO: 9175 - protein, 12 aa, Homo sapiens
  CDR3 for alpha chain variable domain of TCR clone 4588 (TRAV12-2, TRAJ7)
CAVMRGNNRLAF

SEQ ID NO: 9176 - protein, 12 aa, Homo sapiens
  CDR3 for beta chain variable domain of TCR clone 4588 (TRBV7-8, TRBJ2-7)
CASSLGDREQYF

SEQ ID NO: 9177 - protein, 22 aa, Homo sapiens
  CDR3 for alpha chain variable domain of TCR clone 4589 (TRAV12-2, TRAJ32)
CSSETPSPVIQPPKSATNKLIF

SEQ ID NO: 9178 - protein, 14 aa, Homo sapiens
  CDR3 for beta chain variable domain of TCR clone 4589 (TRBV7-3, TRBJ2-1)
CASSLSGSYNEQFF

SEQ ID NO: 9179 - protein, 16 aa, Homo sapiens
  CDR3 for alpha chain variable domain of TCR clone 4590 (TRAV3, TRAJ10)
CAVRDMRAGGGNKLTF

SEQ ID NO: 9180 - protein, 17 aa, Homo sapiens
  CDR3 for beta chain variable domain of TCR clone 4590 (TRBV6-5, TRBJ2-4)
CASRPTPGQGSKNIQYF

SEQ ID NO: 9181 - protein, 14 aa, Homo sapiens
  CDR3 for alpha chain variable domain of TCR clone 4591 (TRAV4, TRAJ13)
CLVGYSGGYQKVTF

SEQ ID NO: 9182 - protein, 13 aa, Homo sapiens
  CDR3 for beta chain variable domain of TCR clone 4591 (TRBV18, TRBJ1-1)
CASSGGRNTEAFF

SEQ ID NO: 9183 - protein, 13 aa, Homo sapiens
  CDR3 for alpha chain variable domain of TCR clone 4592 (TRAV27, TRAJ49)
CAPRPYTGNQFCF

SEQ ID NO: 9184 - protein, 16 aa, Homo sapiens
  CDR3 for beta chain variable domain of TCR clone 4592 (TRBV4-1, TRBJ1-2)
CASSQDAGQVLYGYTF

SEQ ID NO: 9185 - protein, 13 aa, Homo sapiens
  CDR3 for alpha chain variable domain of TCR clone 4593 (TRAV13-1, TRAJ11)
CAASIRGYSTLTF

SEQ ID NO: 9186 - protein, 14 aa, Homo sapiens
  CDR3 for beta chain variable domain of TCR clone 4593 (TRBV4-2, TRBJ2-1)
CASGLDRAYNEQFF

SEQ ID NO: 9187 - protein, 13 aa, Homo sapiens
  CDR3 for alpha chain variable domain of TCR clone 4594 (TRAV38-1, TRAJ20)
CAFMRDNDYKLSF

SEQ ID NO: 9188 - protein, 12 aa, Homo sapiens
  CDR3 for beta chain variable domain of TCR clone 4594 (TRBV18, TRBJ2-5)
CASSPSKETQYF

SEQ ID NO: 9189 - protein, 14 aa, Homo sapiens
  CDR3 for alpha chain variable domain of TCR clone 4595 (TRAV8-2, TRAJ23)
CVVSDDNQGGKLIF

SEQ ID NO: 9190 - protein, 13 aa, Homo sapiens
  CDR3 for beta chain variable domain of TCR clone 4595 (TRBV7-7, TRBJ2-2)
CASSLTSAGELFF

SEQ ID NO: 9191 - protein, 14 aa, Homo sapiens
  CDR3 for alpha chain variable domain of TCR clone 4596 (TRAV1-2, TRAJ8)
CAVREDTGFQKLVF

SEQ ID NO: 9192 - protein, 16 aa, Homo sapiens
  CDR3 for beta chain variable domain of TCR clone 4596 (TRBV6-1, TRBJ2-5)
CASSETLDRGAETQYF

SEQ ID NO: 9193 - protein, 14 aa, Homo sapiens
  CDR3 for alpha chain variable domain of TCR clone 4597 (TRAV4, TRAJ41)
CLVGDGDSGYALNF

SEQ ID NO: 9194 - protein, 15 aa, Homo sapiens
  CDR3 for beta chain variable domain of TCR clone 4597 (TRBV27, TRBJ2-7)
CASSLVGGGAHEQYF

SEQ ID NO: 9195 - protein, 16 aa, Homo sapiens
  CDR3 for alpha chain variable domain of TCR clone 4598 (TRAV30, TRAJ24)
CGTEIVDADSWGKFQF

SEQ ID NO: 9196 - protein, 15 aa, Homo sapiens
  CDR3 for beta chain variable domain of TCR clone 4598 (TRBV12-4, TRBJ2-7)
CASSQRTSGNYEQYF

SEQ ID NO: 9197 - protein, 10 aa, Homo sapiens
  CDR3 for alpha chain variable domain of TCR clone 4599 (TRAV23/DV6, TRAJ4)
CAARDFWSRD

SEQ ID NO: 9198 - protein, 13 aa, Homo sapiens
  CDR3 for beta chain variable domain of TCR clone 4599 (TRBV7-2, TRBJ1-1)
CASSRNTNTEAFF

SEQ ID NO: 9199 - protein, 15 aa, Homo sapiens
  CDR3 for alpha chain variable domain of TCR clone 4600 (TRAV21, TRAJ53)
CATLNSGGSNYKLTF

SEQ ID NO: 9200 - protein, 12 aa, Homo sapiens
  CDR3 for beta chain variable domain of TCR clone 4600 (TRBV14, TRBJ2-4)
CASSNLKSIQYF

SEQ ID NO: 9201 - protein, 14 aa, Homo sapiens
  CDR3 for alpha chain variable domain of TCR clone 4601 (TRAV12-1, TRAJ22)
CVAFSSGSARQLTF

SEQ ID NO: 9202 - protein, 21 aa, Homo sapiens
  CDR3 for beta chain variable domain of TCR clone 4601 (TRBV15, TRBJ2-1)
AWGTQPCTCVPPAEVDTARFF

SEQ ID NO: 9203 - protein, 14 aa, Homo sapiens
  CDR3 for alpha chain variable domain of TCR clone 4602 (TRAV12-1, TRAJ43)
CVVNGRSNNNDMRF

SEQ ID NO: 9204 - protein, 10 aa, Homo sapiens
  CDR3 for beta chain variable domain of TCR clone 4602 (TRBV28, TRBJ2-5)
CQQSSWTQYF

SEQ ID NO: 9205 - protein, 18 aa, Homo sapiens
  CDR3 for alpha chain variable domain of TCR clone 4603 (TRAV21, TRAJ52)
CAVRPSPAGGTSYGKLTF

SEQ ID NO: 9206 - protein, 16 aa, Homo sapiens
  CDR3 for beta chain variable domain of TCR clone 4603 (TRBV19, TRBJ2-2)
CASRSPGTGATGELFF

SEQ ID NO: 9207 - protein, 15 aa, Homo sapiens
  CDR3 for alpha chain variable domain of TCR clone 4604 (TRAV12-1, TRAJ9)
CVVSFGDTGGFKTIF

SEQ ID NO: 9208 - protein, 12 aa, Homo sapiens
  CDR3 for beta chain variable domain of TCR clone 4604 (TRBV12-4, TRBJ2-7)
CASSLGGYEQYF

SEQ ID NO: 9209 - protein, 12 aa, Homo sapiens
  CDR3 for alpha chain variable domain of TCR clone 4605 (TRAV12-3, TRAJ17)
CAMTLTGNKLTF

SEQ ID NO: 9210 - protein, 12 aa, Homo sapiens
  CDR3 for beta chain variable domain of TCR clone 4605 (TRBV11-2, TRBJ2-2)
CASSLPTGELFF

SEQ ID NO: 9211 - protein, 14 aa, Homo sapiens
  CDR3 for alpha chain variable domain of TCR clone 4606 (TRAV16, TRAJ33)
CALSAMDSNYQLIW

SEQ ID NO: 9212 - protein, 14 aa, Homo sapiens
  CDR3 for beta chain variable domain of TCR clone 4606 (TRBV4-2, TRBJ2-1)
CASGLDRAYNEQFF

SEQ ID NO: 9213 - protein, 13 aa, Homo sapiens
  CDR3 for alpha chain variable domain of TCR clone 4607 (TRAV21, TRAJ40)
CAVRPSRAYKYIF

SEQ ID NO: 9214 - protein, 12 aa, Homo sapiens
  CDR3 for beta chain variable domain of TCR clone 4607 (TRBV14, TRBJ2-5)
CASSQLKETQYF

SEQ ID NO: 9215 - protein, 12 aa, Homo sapiens
  CDR3 for alpha chain variable domain of TCR clone 4608 (TRAV12-3, TRAJ42)
CAPGGSQGNLIF

SEQ ID NO: 9216 - protein, 14 aa, Homo sapiens
  CDR3 for beta chain variable domain of TCR clone 4608 (TRBV7-2, TRBJ1-6)
CASSLQGANSPLHF

SEQ ID NO: 9217 - protein, 16 aa, Homo sapiens
  CDR3 for alpha chain variable domain of TCR clone 4609 (TRAV1-1, TRAJ29)
CAVRSTRNSGNTPLVF

SEQ ID NO: 9218 - protein, 15 aa, Homo sapiens
  CDR3 for beta chain variable domain of TCR clone 4609 (TRBV29-1, TRBJ2-1)
CSVGRHALFYNEQFF

SEQ ID NO: 9219 - protein, 13 aa, Homo sapiens
  CDR3 for alpha chain variable domain of TCR clone 4610 (TRAV2, TRAJ40)
CAVVTPGTYKYIF

SEQ ID NO: 9220 - protein, 14 aa, Homo sapiens
  CDR3 for beta chain variable domain of TCR clone 4610 (TRBV19, TRBJ2-1)
CASPTFVLSGEQFF

SEQ ID NO: 9221 - protein, 12 aa, Homo sapiens
  CDR3 for alpha chain variable domain of TCR clone 4611 (TRAV13-2, TRAJ23)
CAERHRGGKLIF

SEQ ID NO: 9222 - protein, 13 aa, Homo sapiens
  CDR3 for beta chain variable domain of TCR clone 4611 (TRBV2, TRBJ1-6)
CADSGSYNSPLHF

SEQ ID NO: 9223 - protein, 12 aa, Homo sapiens
  CDR3 for alpha chain variable domain of TCR clone 4612 (TRAV13-2, TRAJ23)
CAERHRGGKLIF

SEQ ID NO: 9224 - protein, 13 aa, Homo sapiens
  CDR3 for beta chain variable domain of TCR clone 4612 (TRBV10-3, TRBJ2-7)
CASKLAVNYEQYF

SEQ ID NO: 9225 - protein, 17 aa, Homo sapiens
  CDR3 for alpha chain variable domain of TCR clone 4613 (TRAV3, TRAJ6)
CAVRDGPRAGGSYIPTF

SEQ ID NO: 9226 - protein, 17 aa, Homo sapiens
  CDR3 for beta chain variable domain of TCR clone 4613 (TRBV20-1, TRBJ1-5)
CSASLSPGQGGNQPQHF

SEQ ID NO: 9227 - protein, 15 aa, Homo sapiens
  CDR3 for alpha chain variable domain of TCR clone 4614 (TRAV26-2, TRAJ50)
CILRDEETSYDKVIF

SEQ ID NO: 9228 - protein, 12 aa, Homo sapiens
  CDR3 for beta chain variable domain of TCR clone 4614 (TRBV5-7, TRBJ1-2)
CASSDGPYGYTF

SEQ ID NO: 9229 - protein, 10 aa, Homo sapiens
  CDR3 for alpha chain variable domain of TCR clone 4615 (TRAV30, TRAJ48)
CGIGNEKLTF

SEQ ID NO: 9230 - protein, 16 aa, Homo sapiens
  CDR3 for beta chain variable domain of TCR clone 4615 (TRBV27, TRBJ2-1)
SMNVEPGTSGDNEQFF

SEQ ID NO: 9231 - protein, 12 aa, Homo sapiens
  CDR3 for alpha chain variable domain of TCR clone 4616 (TRAV12-2, TRAJ43)
CAVNVNNNDMRF

SEQ ID NO: 9232 - protein, 14 aa, Homo sapiens
  CDR3 for beta chain variable domain of TCR clone 4616 (TRBV7-2, TRBJ2-7)
CASSFLGRVYEQYF

SEQ ID NO: 9233 - protein, 12 aa, Homo sapiens
  CDR3 for alpha chain variable domain of TCR clone 4617 (TRAV20, TRAJ4)
CSASGGYNKLIF

SEQ ID NO: 9234 - protein, 13 aa, Homo sapiens
  CDR3 for beta chain variable domain of TCR clone 4617 (TRBV9, TRBJ2-1)
CASSPSGGNEQFF

SEQ ID NO: 9235 - protein, 13 aa, Homo sapiens
  CDR3 for alpha chain variable domain of TCR clone 4618 (TRAV26-1, TRAJ48)
CIVLRVRNEKLTF

SEQ ID NO: 9236 - protein, 14 aa, Homo sapiens
  CDR3 for beta chain variable domain of TCR clone 4618 (TRBV20-1, TRBJ1-5)
CSARDISKNQPQHF

SEQ ID NO: 9237 - protein, 13 aa, Homo sapiens
  CDR3 for alpha chain variable domain of TCR clone 4619 (TRAV17, TRAJ5)
CAPMDTGRRALTF

SEQ ID NO: 9238 - protein, 14 aa, Homo sapiens
  CDR3 for beta chain variable domain of TCR clone 4619 (TRBV19, TRBJ2-1)
CASPTFVLSGEQFF

SEQ ID NO: 9239 - protein, 15 aa, Homo sapiens
  CDR3 for alpha chain variable domain of TCR clone 4620 (TRAV2, TRAJ15)
CAVEDRGQAGTALIF

SEQ ID NO: 9240 - protein, 13 aa, Homo sapiens
  CDR3 for beta chain variable domain of TCR clone 4620 (TRBV12-4, TRBJ2-5)
CASSLGGSRTQYF

SEQ ID NO: 9241 - protein, 13 aa, Homo sapiens
  CDR3 for alpha chain variable domain of TCR clone 4621 (TRAV13-2, TRAJ41)
CAESINSGYALNF

SEQ ID NO: 9242 - protein, 14 aa, Homo sapiens
  CDR3 for beta chain variable domain of TCR clone 4621 (TRBV2, TRBJ2-1)
CASSEALDGNEQFF

SEQ ID NO: 9243 - protein, 15 aa, Homo sapiens
  CDR3 for alpha chain variable domain of TCR clone 4622 (TRAV17, TRAJ57)
CATGPSQGGSEKLVF

SEQ ID NO: 9244 - protein, 13 aa, Homo sapiens
  CDR3 for beta chain variable domain of TCR clone 4622 (TRBV11-2, TRBJ2-5)
CASSSTGEETQYF

SEQ ID NO: 9245 - protein, 14 aa, Homo sapiens
  CDR3 for alpha chain variable domain of TCR clone 4623 (TRAV4, TRAJ23)
CLVGSYNQGGKLIF

SEQ ID NO: 9246 - protein, 18 aa, Homo sapiens
  CDR3 for beta chain variable domain of TCR clone 4623 (TRBV6-5, TRBJ2-6)
CASRTPGQGKTGANVLTF

SEQ ID NO: 9247 - protein, 14 aa, Homo sapiens
  CDR3 for alpha chain variable domain of TCR clone 4624 (TRAV1-2, TRAJ16)
CAVNRFSDGQKLLF

SEQ ID NO: 9248 - protein, 15 aa, Homo sapiens
  CDR3 for beta chain variable domain of TCR clone 4624 (TRBV20-1, TRBJ1-1)
CSASRGVTGNTEAFF

SEQ ID NO: 9249 - protein, 11 aa, Homo sapiens
  CDR3 for alpha chain variable domain of TCR clone 4625 (TRAV21, TRAJ31)
CAVRNNARLMF

SEQ ID NO: 9250 - protein, 17 aa, Homo sapiens
  CDR3 for beta chain variable domain of TCR clone 4625 (TRBV28, TRBJ1-5)
CASSLSWLVSSNQPQHF

SEQ ID NO: 9251 - protein, 14 aa, Homo sapiens
  CDR3 for alpha chain variable domain of TCR clone 4626 (TRAV12-3, TRAJ57)
CAMSAWGGSEKLVF

SEQ ID NO: 9252 - protein, 14 aa, Homo sapiens
  CDR3 for beta chain variable domain of TCR clone 4626 (TRBV7-8, TRBJ2-7)
CASSPRDRVYEQYF

SEQ ID NO: 9253 - protein, 12 aa, Homo sapiens
  CDR3 for alpha chain variable domain of TCR clone 4627 (TRAV12-3, TRAJ17)
CAMTLTGNKLTF

SEQ ID NO: 9254 - protein, 14 aa, Homo sapiens
  CDR3 for beta chain variable domain of TCR clone 4627 (TRBV7-2, TRBJ2-7)
CASSPKTSFYEQYF

SEQ ID NO: 9255 - protein, 17 aa, Homo sapiens
  CDR3 for alpha chain variable domain of TCR clone 4628 (TRAV26-2, TRAJ42)
CILRDVGYGGSQGNLIF

SEQ ID NO: 9256 - protein, 16 aa, Homo sapiens
  CDR3 for beta chain variable domain of TCR clone 4628 (TRBV6-5, TRBJ2-1)
CASSETLAGHYNEQFF

SEQ ID NO: 9257 - protein, 11 aa, Homo sapiens
  CDR3 for alpha chain variable domain of TCR clone 4629 (TRAV22, TRAJ49)
CAVLTGNQFYF

SEQ ID NO: 9258 - protein, 11 aa, Homo sapiens
  CDR3 for beta chain variable domain of TCR clone 4629 (TRBV5-6, TRBJ2-1)
CASSLGGEQFF

SEQ ID NO: 9259 - protein, 13 aa, Homo sapiens
  CDR3 for alpha chain variable domain of TCR clone 4630 (TRAV1-2, TRAJ9)
CAVLNTGGFKTIF

SEQ ID NO: 9260 - protein, 17 aa, Homo sapiens
  CDR3 for beta chain variable domain of TCR clone 4630 (TRBV7-2, TRBJ2-3)
CASSLAGGLAGTAGQYF

SEQ ID NO: 9261 - protein, 13 aa, Homo sapiens
  CDR3 for alpha chain variable domain of TCR clone 4631 (TRAV12-1, TRAJ9)
CVVLNTGGFKTIF

SEQ ID NO: 9262 - protein, 13 aa, Homo sapiens
  CDR3 for beta chain variable domain of TCR clone 4631 (TRBV19, TRBJ1-2)
CASSVPGQDGYTF

SEQ ID NO: 9263 - protein, 14 aa, Homo sapiens
  CDR3 for alpha chain variable domain of TCR clone 4632 (TRAV3, TRAJ17)
CAVRDAAAGNKLTF

SEQ ID NO: 9264 - protein, 15 aa, Homo sapiens
  CDR3 for beta chain variable domain of TCR clone 4632 (TRBV9, TRBJ1-6)
CASSVAGTGDSPLHF

SEQ ID NO: 9265 - protein, 16 aa, Homo sapiens
  CDR3 for alpha chain variable domain of TCR clone 4633 (TRAV30, TRAJ24)
CGTEIVDADSWGKFQF

SEQ ID NO: 9266 - protein, 13 aa, Homo sapiens
  CDR3 for beta chain variable domain of TCR clone 4633 (TRBV7-9, TRBJ1-2)
CASSLKQNYGYTF

SEQ ID NO: 9267 - protein, 18 aa, Homo sapiens
  CDR3 for alpha chain variable domain of TCR clone 4634 (TRAV13-1, TRAJ52)
CAASKRSAGGTSYGKLTF

SEQ ID NO: 9268 - protein, 15 aa, Homo sapiens
  CDR3 for beta chain variable domain of TCR clone 4634 (TRBV20-1, TRBJ1-1)
CSASRGVTGNTEAFF

SEQ ID NO: 9269 - protein, 14 aa, Homo sapiens
  CDR3 for alpha chain variable domain of TCR clone 4635 (TRAV26-1, TRAJ40)
CIVRLLSGTYKYIF

SEQ ID NO: 9270 - protein, 13 aa, Homo sapiens
  CDR3 for beta chain variable domain of TCR clone 4635 (TRBV3-1, TRBJ1-1)
CASSQLQGAEAFF

SEQ ID NO: 9271 - protein, 14 aa, Homo sapiens
  CDR3 for alpha chain variable domain of TCR clone 4636 (TRAV2, TRAJ9)
CAVEDRSGGFKTIF

SEQ ID NO: 9272 - protein, 16 aa, Homo sapiens
  CDR3 for beta chain variable domain of TCR clone 4636 (TRBV28, TRBJ1-5)
CASSLTGQGWNQPQHF

SEQ ID NO: 9273 - protein, 15 aa, Homo sapiens
  CDR3 for alpha chain variable domain of TCR clone 4637 (TRAV27, TRAJ38)
CAGRFNAGNNRKLIW

SEQ ID NO: 9274 - protein, 13 aa, Homo sapiens
  CDR3 for beta chain variable domain of TCR clone 4637 (TRBV20-1, TRBJ2-1)
TSGALPPGNEQFF

SEQ ID NO: 9275 - protein, 10 aa, Homo sapiens
  CDR3 for alpha chain variable domain of TCR clone 4638 (TRAV1-2, TRAJ31)
CAFFDARLMF

SEQ ID NO: 9276 - protein, 17 aa, Homo sapiens
  CDR3 for beta chain variable domain of TCR clone 4638 (TRBV15, TRBJ1-2)
CATSGREIDVVNYGYTF

SEQ ID NO: 9277 - protein, 17 aa, Homo sapiens
  CDR3 for alpha chain variable domain of TCR clone 4639 (TRAV13-1, TRAJ28)
CAASPPYSGAGSYQLTF

SEQ ID NO: 9278 - protein, 19 aa, Homo sapiens
  CDR3 for beta chain variable domain of TCR clone 4639 (TRBV25-1, TRBJ2-2)
CAILVYRVDRGRKTGELFF

SEQ ID NO: 9279 - protein, 12 aa, Homo sapiens
  CDR3 for alpha chain variable domain of TCR clone 4640 (TRAV38-1, TRAJ43)
CAFMTRLADMRF

SEQ ID NO: 9280 - protein, 14 aa, Homo sapiens
  CDR3 for beta chain variable domain of TCR clone 4640 (TRBV27, TRBJ2-2)
CASSLSVVDGRMFF

SEQ ID NO: 9281 - protein, 12 aa, Homo sapiens
  CDR3 for alpha chain variable domain of TCR clone 4641 (TRAV12-3, TRAJ17)
CAMTLTGNKLTF

SEQ ID NO: 9282 - protein, 15 aa, Homo sapiens
  CDR3 for beta chain variable domain of TCR clone 4641 (TRBV2, TRBJ2-1)
CASSELAGSYNEQFF

SEQ ID NO: 9283 - protein, 13 aa, Homo sapiens
  CDR3 for alpha chain variable domain of TCR clone 4642 (TRAV16, TRAJ58)
CALSIPSGSRLTF

SEQ ID NO: 9284 - protein, 14 aa, Homo sapiens
  CDR3 for beta chain variable domain of TCR clone 4642 (TRBV6-5, TRBJ2-7)
CASSPHRGLREQYF

SEQ ID NO: 9285 - protein, 13 aa, Homo sapiens
  CDR3 for alpha chain variable domain of TCR clone 4643 (TRAV27, TRAJ41)
CAGEGNSGYALNF

SEQ ID NO: 9286 - protein, 13 aa, Homo sapiens
  CDR3 for beta chain variable domain of TCR clone 4643 (TRBV27, TRBJ2-7)
CASSFVSSYEQYF

SEQ ID NO: 9287 - protein, 13 aa, Homo sapiens
  CDR3 for alpha chain variable domain of TCR clone 4644 (TRAV13-2, TRAJ15)
CAEKNQAGTALIF

SEQ ID NO: 9288 - protein, 15 aa, Homo sapiens
  CDR3 for beta chain variable domain of TCR clone 4644 (TRBV29-1, TRBJ2-5)
CSVAPGQGARETQYF

SEQ ID NO: 9289 - protein, 14 aa, Homo sapiens
  CDR3 for alpha chain variable domain of TCR clone 4645 (TRAV12-2, TRAJ22)
CAVRFSGSARQLTF

SEQ ID NO: 9290 - protein, 13 aa, Homo sapiens
  CDR3 for beta chain variable domain of TCR clone 4645 (TRBV6-1, TRBJ2-1)
CASTGTGLNEQFF

SEQ ID NO: 9291 - protein, 14 aa, Homo sapiens
  CDR3 for alpha chain variable domain of TCR clone 4646 (TRAV1-2, TRAJ8)
CAVREDTGFQKLVF

SEQ ID NO: 9292 - protein, 13 aa, Homo sapiens
  CDR3 for beta chain variable domain of TCR clone 4646 (TRBV14, TRBJ2-7)
CASSQDRRYEQYF

SEQ ID NO: 9293 - protein, 14 aa, Homo sapiens
  CDR3 for alpha chain variable domain of TCR clone 4647 (TRAV8-3, TRAJ21)
CAVDARDNFNKFYF

SEQ ID NO: 9294 - protein, 16 aa, Homo sapiens
  CDR3 for beta chain variable domain of TCR clone 4647 (TRBV20-1, TRBJ2-1)
CSARDLAGHSYNEQFF

SEQ ID NO: 9295 - protein, 13 aa, Homo sapiens
  CDR3 for alpha chain variable domain of TCR clone 4648 (TRAV17, TRAJ15)
CATDARAGTALIF

SEQ ID NO: 9296 - protein, 14 aa, Homo sapiens
  CDR3 for beta chain variable domain of TCR clone 4648 (TRBV7-2, TRBJ2-5)
CASSIRLTQETQYF

SEQ ID NO: 9297 - protein, 14 aa, Homo sapiens
  CDR3 for alpha chain variable domain of TCR clone 4649 (TRAV17, TRAJ57)
CATDPQGGSEKLVF

SEQ ID NO: 9298 - protein, 14 aa, Homo sapiens
  CDR3 for beta chain variable domain of TCR clone 4649 (TRBV25-1, TRBJ1-1)
CASTHLGGNTEAFF

SEQ ID NO: 9299 - protein, 12 aa, Homo sapiens
  CDR3 for alpha chain variable domain of TCR clone 4650 (TRAV25, TRAJ20)
CAGSSNDYKLSF

SEQ ID NO: 9300 - protein, 12 aa, Homo sapiens
  CDR3 for beta chain variable domain of TCR clone 4650 (TRBV5-4, TRBJ2-7)
CASSPRTEEQYF

SEQ ID NO: 9301 - protein, 13 aa, Homo sapiens
  CDR3 for alpha chain variable domain of TCR clone 4651 (TRAV1-2, TRAJ9)
CAVLNTGGFKTIF

SEQ ID NO: 9302 - protein, 14 aa, Homo sapiens
  CDR3 for beta chain variable domain of TCR clone 4651 (TRBV19, TRBJ2-1)
CASPTFVLSGEQFF

SEQ ID NO: 9303 - protein, 11 aa, Homo sapiens
  CDR3 for alpha chain variable domain of TCR clone 4652 (TRAV35, TRAJ34)
CWARNTDKLIF

SEQ ID NO: 9304 - protein, 12 aa, Homo sapiens
  CDR3 for beta chain variable domain of TCR clone 4652 (TRBV12-5, TRBJ2-5)
CASGQGVETQYF

SEQ ID NO: 9305 - protein, 17 aa, Homo sapiens
  CDR3 for alpha chain variable domain of TCR clone 4653 (TRAV3, TRAJ6)
CAVRDGPRAGGSYIPTF

SEQ ID NO: 9306 - protein, 14 aa, Homo sapiens
  CDR3 for beta chain variable domain of TCR clone 4653 (TRBV7-2, TRBJ2-7)
CASSPKTSFYERYF

SEQ ID NO: 9307 - protein, 14 aa, Homo sapiens
  CDR3 for alpha chain variable domain of TCR clone 4654 (TRAV1-2, TRAJ16)
CAVNRFSDGQKLLF

SEQ ID NO: 9308 - protein, 14 aa, Homo sapiens
  CDR3 for beta chain variable domain of TCR clone 4654 (TRBV20-1, TRBJ2-1)
CSARGGSSYNEQFF

SEQ ID NO: 9309 - protein, 14 aa, Homo sapiens
  CDR3 for alpha chain variable domain of TCR clone 4655 (TRAV1-2, TRAJ8)
CAVREDTGFQKLVF

SEQ ID NO: 9310 - protein, 13 aa, Homo sapiens
  CDR3 for beta chain variable domain of TCR clone 4655 (TRBV12-4, TRBJ1-2)
CASSLRQGKGYTF

SEQ ID NO: 9311 - protein, 12 aa, Homo sapiens
  CDR3 for alpha chain variable domain of TCR clone 4656 (TRAV16, TRAJ10)
CSRTGGGNKLTF

SEQ ID NO: 9312 - protein, 14 aa, Homo sapiens
  CDR3 for beta chain variable domain of TCR clone 4656 (TRBV19, TRBJ2-1)
CASPTFVLSGEQFF

SEQ ID NO: 9313 - protein, 13 aa, Homo sapiens
  CDR3 for alpha chain variable domain of TCR clone 4657 (TRAV2, TRAJ40)
CAVVTSGTYEYIF

SEQ ID NO: 9314 - protein, 14 aa, Homo sapiens
  CDR3 for beta chain variable domain of TCR clone 4657 (TRBV19, TRBJ2-1)
CASPTFVLSGEQFF

SEQ ID NO: 9315 - protein, 12 aa, Homo sapiens
  CDR3 for alpha chain variable domain of TCR clone 4658 (TRAV2, TRAJ33)
CAVPDSNYQLIW

SEQ ID NO: 9316 - protein, 15 aa, Homo sapiens
  CDR3 for beta chain variable domain of TCR clone 4658 (TRBV10-2, TRBJ2-6)
CASSEQGTGANVLTF

SEQ ID NO: 9317 - protein, 17 aa, Homo sapiens
  CDR3 for alpha chain variable domain of TCR clone 4659 (TRAV12-2, TRAJ48)
CASNEKLTFGTGTRLTI

SEQ ID NO: 9318 - protein, 15 aa, Homo sapiens
  CDR3 for beta chain variable domain of TCR clone 4659 (TRBV5-1, TRBJ2-1)
CASSQAGYWWNEQFF

SEQ ID NO: 9319 - protein, 14 aa, Homo sapiens
  CDR3 for alpha chain variable domain of TCR clone 4660 (TRAV8-2, TRAJ4)
CVVSPSGGYNKLIF

SEQ ID NO: 9320 - protein, 16 aa, Homo sapiens
  CDR3 for beta chain variable domain of TCR clone 4660 (TRBV7-3, TRBJ2-1)
CASSLEGYRSYNEQFF

SEQ ID NO: 9321 - protein, 11 aa, Homo sapiens
  CDR3 for alpha chain variable domain of TCR clone 4661 (TRAV13-1, TRAJ15)
CAATPGTALTF

SEQ ID NO: 9322 - protein, 13 aa, Homo sapiens
  CDR3 for beta chain variable domain of TCR clone 4661 (TRBV7-2, TRBJ2-1)
CASSLGVYNEQFF

SEQ ID NO: 9323 - protein, 17 aa, Homo sapiens
  CDR3 for alpha chain variable domain of TCR clone 4662 (TRAV3, TRAJ28)
CAVREAYSGAGSYQLTF

SEQ ID NO: 9324 - protein, 17 aa, Homo sapiens
  CDR3 for beta chain variable domain of TCR clone 4662 (TRBV20-1, TRBJ2-1)
CSASSSGLAGSYNEQFF

SEQ ID NO: 9325 - protein, 11 aa, Homo sapiens
  CDR3 for alpha chain variable domain of TCR clone 4663 (TRAV1-1, TRAJ23)
CAVRQGGKLIF

SEQ ID NO: 9326 - protein, 14 aa, Homo sapiens
  CDR3 for beta chain variable domain of TCR clone 4663 (TRBV7-8, TRBJ2-3)
CASSLEAGTDTQYF

SEQ ID NO: 9327 - protein, 12 aa, Homo sapiens
  CDR3 for alpha chain variable domain of TCR clone 4664 (TRAV21, TRAJ41)
CAVREFRVCTQL

SEQ ID NO: 9328 - protein, 15 aa, Homo sapiens
  CDR3 for beta chain variable domain of TCR clone 4664 (TRBV18, TRBJ1-5)
CASSPQARSNQPQHF

SEQ ID NO: 9329 - protein, 15 aa, Homo sapiens
  CDR3 for alpha chain variable domain of TCR clone 4665 (TRAV2, TRAJ28)
CAVPYSGAGSYQLTF

SEQ ID NO: 9330 - protein, 10 aa, Homo sapiens
  CDR3 for beta chain variable domain of TCR clone 4665 (TRBV23-1, TRBJ2-1)
KWSSYNEQFF

SEQ ID NO: 9331 - protein, 16 aa, Homo sapiens
  CDR3 for alpha chain variable domain of TCR clone 4666 (TRAV14/DV4, TRAJ53)
CAMREGGGGSNYKLTF

SEQ ID NO: 9332 - protein, 18 aa, Homo sapiens
  CDR3 for beta chain variable domain of TCR clone 4666 (TRBV18, TRBJ1-3)
CASSPRGGAGPSGNTIYF

SEQ ID NO: 9333 - protein, 13 aa, Homo sapiens
  CDR3 for alpha chain variable domain of TCR clone 4667 (TRAV2, TRAJ15)
CAVASQAGTALIF

SEQ ID NO: 9334 - protein, 13 aa, Homo sapiens
  CDR3 for beta chain variable domain of TCR clone 4667 (TRBV28, TRBJ2-7)
CASKAGGVYEQYF

SEQ ID NO: 9335 - protein, 14 aa, Homo sapiens
  CDR3 for alpha chain variable domain of TCR clone 4668 (TRAV12-1, TRAJ12)
CVVTRMDSSYKLIF

SEQ ID NO: 9336 - protein, 18 aa, Homo sapiens
  CDR3 for beta chain variable domain of TCR clone 4668 (TRBV20-1, TRBJ2-6)
CSAETTPTHGSGANVLTF

SEQ ID NO: 9337 - protein, 10 aa, Homo sapiens
  CDR3 for alpha chain variable domain of TCR clone 4669 (TRAV12-1, TRAJ20)
CVVNPRKLSF

SEQ ID NO: 9338 - protein, 15 aa, Homo sapiens
  CDR3 for beta chain variable domain of TCR clone 4669 (TRBV5-1, TRBJ2-1)
CASSPPRAPYNEQFF

SEQ ID NO: 9339 - protein, 13 aa, Homo sapiens
  CDR3 for alpha chain variable domain of TCR clone 4670 (TRAV27, TRAJ41)
CAGEGNSGYALNF

SEQ ID NO: 9340 - protein, 15 aa, Homo sapiens
  CDR3 for beta chain variable domain of TCR clone 4670 (TRBV6-3, TRBJ2-7)
CASSSPGTVFYEQYF

SEQ ID NO: 9341 - protein, 15 aa, Homo sapiens
  CDR3 for alpha chain variable domain of TCR clone 4671 (TRAV23/DV6, TRAJ38)
CAARSNAGNNRKLIW

SEQ ID NO: 9342 - protein, 16 aa, Homo sapiens
  CDR3 for beta chain variable domain of TCR clone 4671 (TRBV10-2, TRBJ1-5)
CASSRDRDYSNQPQHF

SEQ ID NO: 9343 - protein, 21 aa, Homo sapiens
  CDR3 for alpha chain variable domain of TCR clone 4672 (TRAV29/DV5, TRAJ52)
CSVLLCSKREAGGTSYGKLTF

SEQ ID NO: 9344 - protein, 13 aa, Homo sapiens
  CDR3 for beta chain variable domain of TCR clone 4672 (TRBV27, TRBJ1-4)
CASSLMGDEKLFF

SEQ ID NO: 9345 - protein, 14 aa, Homo sapiens
  CDR3 for alpha chain variable domain of TCR clone 4673 (TRAV2, TRAJ9)
CAVEDRSGGFKTIF

SEQ ID NO: 9346 - protein, 16 aa, Homo sapiens
  CDR3 for beta chain variable domain of TCR clone 4673 (TRBV20-1, TRBJ2-3)
CSAVRDRGPIADTQYF

SEQ ID NO: 9347 - protein, 10 aa, Homo sapiens
  CDR3 for alpha chain variable domain of TCR clone 4674 (TRAV1-2, TRAJ23)
CAGQGGKLIF

SEQ ID NO: 9348 - protein, 14 aa, Homo sapiens
  CDR3 for beta chain variable domain of TCR clone 4674 (TRBV6-1, TRBJ1-3)
CASVQGGGGNTIYF

SEQ ID NO: 9349 - protein, 14 aa, Homo sapiens
  CDR3 for alpha chain variable domain of TCR clone 4675 (TRAV1-2, TRAJ16)
CAVNRFSDGQKLLF

SEQ ID NO: 9350 - protein, 14 aa, Homo sapiens
  CDR3 for beta chain variable domain of TCR clone 4675 (TRBV23-1, TRBJ2-5)
CASSFLRSQETQYF

SEQ ID NO: 9351 - protein, 16 aa, Homo sapiens
  CDR3 for alpha chain variable domain of TCR clone 4676 (TRAV23/DV6, TRAJ9)
CAASIGGNTGGFKTIF

SEQ ID NO: 9352 - protein, 11 aa, Homo sapiens
  CDR3 for beta chain variable domain of TCR clone 4676 (TRBV11-2, TRBJ2-2)
CASSLPGELFF

SEQ ID NO: 9353 - protein, 12 aa, Homo sapiens
  CDR3 for alpha chain variable domain of TCR clone 4677 (TRAV12-3, TRAJ17)
CAMTLTGNKLTF

SEQ ID NO: 9354 - protein, 16 aa, Homo sapiens
  CDR3 for beta chain variable domain of TCR clone 4677 (TRBV7-2, TRBJ2-3)
CASSLAGAGSGDTQYF

SEQ ID NO: 9355 - protein, 11 aa, Homo sapiens
  CDR3 for alpha chain variable domain of TCR clone 4678 (TRAV12-3, TRAJ43)
CAMSVSNDMRF

SEQ ID NO: 9356 - protein, 14 aa, Homo sapiens
  CDR3 for beta chain variable domain of TCR clone 4678 (TRBV20-1, TRBJ1-1)
SAVLHLGGGTEAFF

SEQ ID NO: 9357 - protein, 18 aa, Homo sapiens
  CDR3 for alpha chain variable domain of TCR clone 4679 (TRAV29/DV5, TRAJ52)
QCTSVQQADGTSYGKLTF

SEQ ID NO: 9358 - protein, 13 aa, Homo sapiens
  CDR3 for beta chain variable domain of TCR clone 4679 (TRBV7-2, TRBJ1-1)
CASNLKGAKVAFF

SEQ ID NO: 9359 - protein, 13 aa, Homo sapiens
  CDR3 for alpha chain variable domain of TCR clone 4680 (TRAV3, TRAJ3)
CAVADSSASKIIF

SEQ ID NO: 9360 - protein, 12 aa, Homo sapiens
  CDR3 for beta chain variable domain of TCR clone 4680 (TRBV7-8, TRBJ2-7)
CASEGGPHGQYF

SEQ ID NO: 9361 - protein, 16 aa, Homo sapiens
  CDR3 for alpha chain variable domain of TCR clone 4681 (TRAV30, TRAJ24)
CGTEIVDADSWGKFQF

SEQ ID NO: 9362 - protein, 18 aa, Homo sapiens
  CDR3 for beta chain variable domain of TCR clone 4681 (TRBV11-2, TRBJ2-6)
CASSLNPFLGTGANVLTF

SEQ ID NO: 9363 - protein, 14 aa, Homo sapiens
  CDR3 for alpha chain variable domain of TCR clone 4682 (TRAV2, TRAJ9)
CAVEDRSGGFKTIF

SEQ ID NO: 9364 - protein, 14 aa, Homo sapiens
  CDR3 for beta chain variable domain of TCR clone 4682 (TRBV4-1, TRBJ2-2)
CASSQAVNTGELFF

SEQ ID NO: 9365 - protein, 15 aa, Homo sapiens
  CDR3 for alpha chain variable domain of TCR clone 4683 (TRAV21, TRAJ53)
CAVRQSGGSNYKLTF

SEQ ID NO: 9366 - protein, 14 aa, Homo sapiens
  CDR3 for beta chain variable domain of TCR clone 4683 (TRBV18, TRBJ2-5)
CASSPGVSQETQYF

SEQ ID NO: 9367 - protein, 13 aa, Homo sapiens
  CDR3 for alpha chain variable domain of TCR clone 4684 (TRAV21, TRAJ20)
CAVGLRVDYKLSF

SEQ ID NO: 9368 - protein, 21 aa, Homo sapiens
  CDR3 for beta chain variable domain of TCR clone 4684 (TRBV15, TRBJ2-1)
AWGTQPCTCVPPAEVDTARFF

SEQ ID NO: 9369 - protein, 16 aa, Homo sapiens
  CDR3 for alpha chain variable domain of TCR clone 4685 (TRAV3, TRAJ10)
CAVRDMRAGGGNKLTF

SEQ ID NO: 9370 - protein, 15 aa, Homo sapiens
  CDR3 for beta chain variable domain of TCR clone 4685 (TRBV20-1, TRBJ2-7)
CSARDRVSGMDEQYF

SEQ ID NO: 9371 - protein, 14 aa, Homo sapiens
  CDR3 for alpha chain variable domain of TCR clone 4686 (TRAV8-1, TRAJ39)
CAVNASNAGNMLTF

SEQ ID NO: 9372 - protein, 13 aa, Homo sapiens
  CDR3 for beta chain variable domain of TCR clone 4686 (TRBV12-4, TRBJ2-5)
CASSPGTEETQYF

SEQ ID NO: 9373 - protein, 16 aa, Homo sapiens
  CDR3 for alpha chain variable domain of TCR clone 4687 (TRAV22, TRAJ45)
CAVERGKRGGADGLTF

SEQ ID NO: 9374 - protein, 16 aa, Homo sapiens
  CDR3 for beta chain variable domain of TCR clone 4687 (TRBV5-1, TRBJ2-5)
CASSLRRTSGQETQYF

SEQ ID NO: 9375 - protein, 12 aa, Homo sapiens
  CDR3 for alpha chain variable domain of TCR clone 4688 (TRAV12-3, TRAJ17)
CAMTLTGNKLTF

SEQ ID NO: 9376 - protein, 13 aa, Homo sapiens
  CDR3 for beta chain variable domain of TCR clone 4688 (TRBV19, TRBJ1-2)
CASSQGQVYGYTF

SEQ ID NO: 9377 - protein, 16 aa, Homo sapiens
  CDR3 for alpha chain variable domain of TCR clone 4689 (TRAV23/DV6, TRAJ48)
CAASGVVNFGNEKLTF

SEQ ID NO: 9378 - protein, 15 aa, Homo sapiens
  CDR3 for beta chain variable domain of TCR clone 4689 (TRBV7-9, TRBJ2-1)
CASSLGWGRANEQFF

SEQ ID NO: 9379 - protein, 13 aa, Homo sapiens
  CDR3 for alpha chain variable domain of TCR clone 4690 (TRAV2, TRAJ15)
CAVASQAGTALIF

SEQ ID NO: 9380 - protein, 15 aa, Homo sapiens
  CDR3 for beta chain variable domain of TCR clone 4690 (TRBV27, TRBJ2-1)
CASSNGGGSSNEQFF

SEQ ID NO: 9381 - protein, 16 aa, Homo sapiens
  CDR3 for alpha chain variable domain of TCR clone 4691 (TRAV14/DV4, TRAJ54)
CAMREGRIQGAQKLVF

SEQ ID NO: 9382 - protein, 15 aa, Homo sapiens
  CDR3 for beta chain variable domain of TCR clone 4691 (TRBV20-1, TRBJ2-7)
CSARDRVSGMDEQYF

SEQ ID NO: 9383 - protein, 15 aa, Homo sapiens
  CDR3 for alpha chain variable domain of TCR clone 4692 (TRAV21, TRAJ53)
CATLNSGGSNYKLTF

SEQ ID NO: 9384 - protein, 17 aa, Homo sapiens
  CDR3 for beta chain variable domain of TCR clone 4692 (TRBV7-8, TRBJ2-6)
CASSAGTGGAGANVLTF

SEQ ID NO: 9385 - protein, 11 aa, Homo sapiens
  CDR3 for alpha chain variable domain of TCR clone 4693 (TRAV1-2, TRAJ20)
CAVSNDYKLSF

SEQ ID NO: 9386 - protein, 17 aa, Homo sapiens
  CDR3 for beta chain variable domain of TCR clone 4693 (TRBV7-8, TRBJ2-6)
CASSAGTGGAGANVLTF

SEQ ID NO: 9387 - protein, 12 aa, Homo sapiens
  CDR3 for alpha chain variable domain of TCR clone 4694 (TRAV12-2, TRAJ9)
CAVNTGGFKTIF

SEQ ID NO: 9388 - protein, 13 aa, Homo sapiens
  CDR3 for beta chain variable domain of TCR clone 4694 (TRBV10-3, TRBJ2-7)
CASKLAVNYEQYF

SEQ ID NO: 9389 - protein, 12 aa, Homo sapiens
  CDR3 for alpha chain variable domain of TCR clone 4695 (TRAV13-1, TRAJ21)
CAAKEGFNKFYF

SEQ ID NO: 9390 - protein, 14 aa, Homo sapiens
  CDR3 for beta chain variable domain of TCR clone 4695 (TRBV7-2, TRBJ2-5)
CASSLSGGGETQYF

SEQ ID NO: 9391 - protein, 12 aa, Homo sapiens
  CDR3 for alpha chain variable domain of TCR clone 4696 (TRAV35, TRAJ49)
CAGWNTGNQFYF

SEQ ID NO: 9392 - protein, 15 aa, Homo sapiens
  CDR3 for beta chain variable domain of TCR clone 4696 (TRBV27, TRBJ1-5)
CASSLGTGFDQPQHF

SEQ ID NO: 9393 - protein, 14 aa, Homo sapiens
  CDR3 for alpha chain variable domain of TCR clone 4697 (TRAV35, TRAJ22)
CAGLRPGSARQLTF

SEQ ID NO: 9394 - protein, 15 aa, Homo sapiens
  CDR3 for beta chain variable domain of TCR clone 4697 (TRBV20-1, TRBJ2-7)
CSARDRVSGMDEQYF

SEQ ID NO: 9395 - protein, 12 aa, Homo sapiens
  CDR3 for alpha chain variable domain of TCR clone 4698 (TRAV12-3, TRAJ17)
CAMKLTGNKLTF

SEQ ID NO: 9396 - protein, 15 aa, Homo sapiens
  CDR3 for beta chain variable domain of TCR clone 4698 (TRBV20-1, TRBJ2-7)
CSARDRVSGMDEQYF

SEQ ID NO: 9397 - protein, 11 aa, Homo sapiens
  CDR3 for alpha chain variable domain of TCR clone 4699 (TRAV3, TRAJ21)
CAVGNSNKFYF

SEQ ID NO: 9398 - protein, 16 aa, Homo sapiens
  CDR3 for beta chain variable domain of TCR clone 4699 (TRBV19, TRBJ2-1)
CASSKAGPSSYNEQFF

SEQ ID NO: 9399 - protein, 11 aa, Homo sapiens
  CDR3 for alpha chain variable domain of TCR clone 4700 (TRAV1-1, TRAJ20)
CAVFNDYKLSF

SEQ ID NO: 9400 - protein, 14 aa, Homo sapiens
  CDR3 for beta chain variable domain of TCR clone 4700 (TRBV19, TRBJ2-1)
CASSKDRGQDEQFF

SEQ ID NO: 9401 - protein, 15 aa, Homo sapiens
  CDR3 for alpha chain variable domain of TCR clone 4701 (TRAV21, TRAJ53)
CATLNSGGSNYKLTF

SEQ ID NO: 9402 - protein, 15 aa, Homo sapiens
  CDR3 for beta chain variable domain of TCR clone 4701 (TRBV11-3, TRBJ2-3)
CASSAGTVVTNTQYF

SEQ ID NO: 9403 - protein, 12 aa, Homo sapiens
  CDR3 for alpha chain variable domain of TCR clone 4702 (TRAV25, TRAJ30)
CAGKNRDDKIIF

SEQ ID NO: 9404 - protein, 11 aa, Homo sapiens
  CDR3 for beta chain variable domain of TCR clone 4702 (TRBV12-4, TRBJ2-7)
CATPEKGEQYF

SEQ ID NO: 9405 - protein, 17 aa, Homo sapiens
  CDR3 for alpha chain variable domain of TCR clone 4703 (TRAV38-1, TRAJ45)
CAFMKHYMGGGADGLTF

SEQ ID NO: 9406 - protein, 13 aa, Homo sapiens
  CDR3 for beta chain variable domain of TCR clone 4703 (TRBV2, TRBJ1-4)
CASSERAGEKLFF

SEQ ID NO: 9407 - protein, 13 aa, Homo sapiens
  CDR3 for alpha chain variable domain of TCR clone 4704 (TRAV3, TRAJ27)
CAVRPLGAGKSTF

SEQ ID NO: 9408 - protein, 15 aa, Homo sapiens
  CDR3 for beta chain variable domain of TCR clone 4704 (TRBV20-1, TRBJ2-7)
CSARDRVSGMDEQYF

SEQ ID NO: 9409 - protein, 16 aa, Homo sapiens
  CDR3 for alpha chain variable domain of TCR clone 4705 (TRAV30, TRAJ24)
CGTEIVDADSWGKFQF

SEQ ID NO: 9410 - protein, 18 aa, Homo sapiens
  CDR3 for beta chain variable domain of TCR clone 4705 (TRBV20-1, TRBJ2-6)
CSAETTPTHGSGANVLTF

SEQ ID NO: 9411 - protein, 15 aa, Homo sapiens
  CDR3 for alpha chain variable domain of TCR clone 4706 (TRAV8-3, TRAJ37)
CAVGAPSSNTGKLIF

SEQ ID NO: 9412 - protein, 15 aa, Homo sapiens
  CDR3 for beta chain variable domain of TCR clone 4706 (TRBV11-2, TRBJ1-2)
CASSQMRGLNYGYTF

SEQ ID NO: 9413 - protein, 14 aa, Homo sapiens
  CDR3 for alpha chain variable domain of TCR clone 4707 (TRAV27, TRAJ49)
CAGRPEGTGNQFYF

SEQ ID NO: 9414 - protein, 16 aa, Homo sapiens
  CDR3 for beta chain variable domain of TCR clone 4707 (TRBV12-5, TRBJ2-5)
CASGPRTSGNQETQYF

SEQ ID NO: 9415 - protein, 14 aa, Homo sapiens
  CDR3 for alpha chain variable domain of TCR clone 4708 (TRAV14/DV4, TRAJ7)
CAMREAYGNNRLAF

SEQ ID NO: 9416 - protein, 15 aa, Homo sapiens
  CDR3 for beta chain variable domain of TCR clone 4708 (TRBV19, TRBJ2-1)
CASSINREPSHEQFF

SEQ ID NO: 9417 - protein, 13 aa, Homo sapiens
  CDR3 for alpha chain variable domain of TCR clone 4709 (TRAV1-2, TRAJ9)
CAALNTGGFKTIF

SEQ ID NO: 9418 - protein, 16 aa, Homo sapiens
  CDR3 for beta chain variable domain of TCR clone 4709 (TRBV28, TRBJ2-2)
CASSLEGGSNTGELFF

SEQ ID NO: 9419 - protein, 10 aa, Homo sapiens
  CDR3 for alpha chain variable domain of TCR clone 4710 (TRAV1-2, TRAJ31)
CVSEDARLMF

SEQ ID NO: 9420 - protein, 14 aa, Homo sapiens
  CDR3 for beta chain variable domain of TCR clone 4710 (TRBV20-1, TRBJ1-3)
CSASPTGAGNTIYF

SEQ ID NO: 9421 - protein, 14 aa, Homo sapiens
  CDR3 for alpha chain variable domain of TCR clone 4711 (TRAV8-1, TRAJ4)
CAVKFSGGYNKLIF

SEQ ID NO: 9422 - protein, 22 aa, Homo sapiens
  CDR3 for beta chain variable domain of TCR clone 4711 (TRBV7-3, TRBJ2-5)
CASARDRVILRPRDPVLRARHA

SEQ ID NO: 9423 - protein, 14 aa, Homo sapiens
  CDR3 for alpha chain variable domain of TCR clone 4712 (TRAV14/DV4, TRAJ26)
CAMREGTYGQNFVF

SEQ ID NO: 9424 - protein, 16 aa, Homo sapiens
  CDR3 for beta chain variable domain of TCR clone 4712 (TRBV9, TRBJ1-2)
CASSVEEKVSPYGYTF

SEQ ID NO: 9425 - protein, 13 aa, Homo sapiens
  CDR3 for alpha chain variable domain of TCR clone 4713 (TRAV1-1, TRAJ9)
CAAKNTGGFKTIF

SEQ ID NO: 9426 - protein, 17 aa, Homo sapiens
  CDR3 for beta chain variable domain of TCR clone 4713 (TRBV13, TRBJ2-3)
CASSLSRVAGGRNTQYF

SEQ ID NO: 9427 - protein, 14 aa, Homo sapiens
  CDR3 for alpha chain variable domain of TCR clone 4714 (TRAV2, TRAJ23)
CAVIIYNQGGKLIF

SEQ ID NO: 9428 - protein, 13 aa, Homo sapiens
  CDR3 for beta chain variable domain of TCR clone 4714 (TRBV20-1, TRBJ2-3)
CSATSGGAGTQYF

SEQ ID NO: 9429 - protein, 16 aa, Homo sapiens
  CDR3 for alpha chain variable domain of TCR clone 4715 (TRAV30, TRAJ24)
CGTEMVDADSWGKFQF

SEQ ID NO: 9430 - protein, 14 aa, Homo sapiens
  CDR3 for beta chain variable domain of TCR clone 4715 (TRBV12-5, TRBJ2-5)
CASGSRTHQETQYF

SEQ ID NO: 9431 - protein, 17 aa, Homo sapiens
  CDR3 for alpha chain variable domain of TCR clone 4716 (TRAV12-2, TRAJ45)
CAVNIWGSGGGADGLTF

SEQ ID NO: 9432 - protein, 18 aa, Homo sapiens
  CDR3 for beta chain variable domain of TCR clone 4716 (TRBV20-1, TRBJ2-6)
CSAETTPTHGSGANVLTF

SEQ ID NO: 9433 - protein, 16 aa, Homo sapiens
  CDR3 for alpha chain variable domain of TCR clone 4717 (TRAV3, TRAJ37)
CAVRGKGSGNTGKLIF

SEQ ID NO: 9434 - protein, 13 aa, Homo sapiens
  CDR3 for beta chain variable domain of TCR clone 4717 (TRBV10-3, TRBJ1-2)
CAISERDSYGYTF

SEQ ID NO: 9435 - protein, 14 aa, Homo sapiens
  CDR3 for alpha chain variable domain of TCR clone 4718 (TRAV12-3, TRAJ10)
SHLPLTGGGNKLTF

SEQ ID NO: 9436 - protein, 19 aa, Homo sapiens
  CDR3 for beta chain variable domain of TCR clone 4718 (TRBV4-1, TRBJ1-1)
CASSRIILTPRGVNTEAFF

SEQ ID NO: 9437 - protein, 11 aa, Homo sapiens
  CDR3 for alpha chain variable domain of TCR clone 4719 (TRAV4, TRAJ21)
CLIYNFNKFYF

SEQ ID NO: 9438 - protein, 17 aa, Homo sapiens
  CDR3 for beta chain variable domain of TCR clone 4719 (TRBV23-1, TRBJ2-1)
CISAPAVNRDQGGEQFF

SEQ ID NO: 9439 - protein, 12 aa, Homo sapiens
  CDR3 for alpha chain variable domain of TCR clone 4720 (TRAV13-2, TRAJ23)
CAERHRGGKLIF

SEQ ID NO: 9440 - protein, 16 aa, Homo sapiens
  CDR3 for beta chain variable domain of TCR clone 4720 (TRBV4-1, TRBJ2-5)
CASSHADRAGGETQYF

SEQ ID NO: 9441 - protein, 13 aa, Homo sapiens
  CDR3 for alpha chain variable domain of TCR clone 4721 (TRAV17, TRAJ34)
CATVPYNTDKLIF

SEQ ID NO: 9442 - protein, 14 aa, Homo sapiens
  CDR3 for beta chain variable domain of TCR clone 4721 (TRBV9, TRBJ2-3)
CASSAGGGPDTQYF

SEQ ID NO: 9443 - protein, 17 aa, Homo sapiens
  CDR3 for alpha chain variable domain of TCR clone 4722 (TRAV3, TRAJ6)
CAVRDGPRAGGSYIPTF

SEQ ID NO: 9444 - protein, 13 aa, Homo sapiens
  CDR3 for beta chain variable domain of TCR clone 4722 (TRBV15, TRBJ2-7)
CATSTTGHYEQYF

SEQ ID NO: 9445 - protein, 17 aa, Homo sapiens
  CDR3 for alpha chain variable domain of TCR clone 4723 (TRAV3, TRAJ6)
CAVRDGPRAGGSYIPTF

SEQ ID NO: 9446 - protein, 18 aa, Homo sapiens
  CDR3 for beta chain variable domain of TCR clone 4723 (TRBV25-1, TRBJ1-2)
CASSGLQNGQGLIFGYTF

SEQ ID NO: 9447 - protein, 12 aa, Homo sapiens
  CDR3 for alpha chain variable domain of TCR clone 4724 (TRAV16, TRAJ10)
CSRTGGGNKLTF

SEQ ID NO: 9448 - protein, 11 aa, Homo sapiens
  CDR3 for beta chain variable domain of TCR clone 4724 (TRBV29-1, TRBJ2-5)
CSEDRTGTQYF

SEQ ID NO: 9449 - protein, 13 aa, Homo sapiens
  CDR3 for alpha chain variable domain of TCR clone 4725 (TRAV8-2, TRAJ44)
CSRGAGTASKLTF

SEQ ID NO: 9450 - protein, 13 aa, Homo sapiens
  CDR3 for beta chain variable domain of TCR clone 4725 (TRBV12-4, TRBJ2-7)
CASSRQASYEQYF

SEQ ID NO: 9451 - protein, 14 aa, Homo sapiens
  CDR3 for alpha chain variable domain of TCR clone 4726 (TRAV2, TRAJ37)
CAVEGSSNTGKLIF

SEQ ID NO: 9452 - protein, 15 aa, Homo sapiens
  CDR3 for beta chain variable domain of TCR clone 4726 (TRBV24-1, TRBJ2-4)
CATSDPRDRANIQYF

SEQ ID NO: 9453 - protein, 14 aa, Homo sapiens
  CDR3 for alpha chain variable domain of TCR clone 4727 (TRAV26-1, TRAJ38)
CIADNAGNNRKLIW

SEQ ID NO: 9454 - protein, 12 aa, Homo sapiens
  CDR3 for beta chain variable domain of TCR clone 4727 (TRBV29-1, TRBJ2-3)
CSVTGGADTQYF

SEQ ID NO: 9455 - protein, 16 aa, Homo sapiens
  CDR3 for alpha chain variable domain of TCR clone 4728 (TRAV3, TRAJ10)
CAVRDMRAGGGNKLTF

SEQ ID NO: 9456 - protein, 15 aa, Homo sapiens
  CDR3 for beta chain variable domain of TCR clone 4728 (TRBV20-1, TRBJ2-1)
CSASSAGSSYNEQFF

SEQ ID NO: 9457 - protein, 12 aa, Homo sapiens
  CDR3 for alpha chain variable domain of TCR clone 4729 (TRAV13-2, TRAJ32)
RVYGGATNKLIF

SEQ ID NO: 9458 - protein, 16 aa, Homo sapiens
  CDR3 for beta chain variable domain of TCR clone 4729 (TRBV7-9, TRBJ1-2)
CASSISLDRGGYGYTF

SEQ ID NO: 9459 - protein, 13 aa, Homo sapiens
  CDR3 for alpha chain variable domain of TCR clone 4730 (TRAV1-1, TRAJ38)
CASNAGNNRKLIW

SEQ ID NO: 9460 - protein, 14 aa, Homo sapiens
  CDR3 for beta chain variable domain of TCR clone 4730 (TRBV15, TRBJ2-1)
CATSGVEDYNEQFF

SEQ ID NO: 9461 - protein, 23 aa, Homo sapiens
  CDR3 for alpha chain variable domain of TCR clone 4731 (TRAV8-4, TRAJ38)
CARLNAGNNHIQNPDPAVYQLRD

SEQ ID NO: 9462 - protein, 14 aa, Homo sapiens
  CDR3 for beta chain variable domain of TCR clone 4731 (TRBV7-8, TRBJ2-3)
CASSLEAGTDTQYF

SEQ ID NO: 9463 - protein, 15 aa, Homo sapiens
  CDR3 for alpha chain variable domain of TCR clone 4732 (TRAV3, TRAJ22)
CAVRDRGGSARQLTF

SEQ ID NO: 9464 - protein, 15 aa, Homo sapiens
  CDR3 for beta chain variable domain of TCR clone 4732 (TRBV20-1, TRBJ1-1)
CSASRGVTGNTEAFF

SEQ ID NO: 9465 - protein, 13 aa, Homo sapiens
  CDR3 for alpha chain variable domain of TCR clone 4733 (TRAV2, TRAJ15)
CAVASQAGTALIF

SEQ ID NO: 9466 - protein, 16 aa, Homo sapiens
  CDR3 for beta chain variable domain of TCR clone 4733 (TRBV7-8, TRBJ2-4)
CASSAERTLAKNIQYF

SEQ ID NO: 9467 - protein, 14 aa, Homo sapiens
  CDR3 for alpha chain variable domain of TCR clone 4734 (TRAV12-2, TRAJ44)
CAVNPAGTASKLTF

SEQ ID NO: 9468 - protein, 15 aa, Homo sapiens
  CDR3 for beta chain variable domain of TCR clone 4734 (TRBV28, TRBJ2-7)
CASSVRQVSSYEQYF

SEQ ID NO: 9469 - protein, 15 aa, Homo sapiens
  CDR3 for alpha chain variable domain of TCR clone 4735 (TRAV8-3, TRAJ21)
CAVGALPPRGYKFYF

SEQ ID NO: 9470 - protein, 15 aa, Homo sapiens
  CDR3 for beta chain variable domain of TCR clone 4735 (TRBV7-8, TRBJ1-5)
CASSLERRGLEPQHF

SEQ ID NO: 9471 - protein, 16 aa, Homo sapiens
  CDR3 for alpha chain variable domain of TCR clone 4736 (TRAV30, TRAJ24)
CGTEIVDADSWGKFQF

SEQ ID NO: 9472 - protein, 12 aa, Homo sapiens
  CDR3 for beta chain variable domain of TCR clone 4736 (TRBV12-4, TRBJ2-3)
CASSSTTDTQYF

SEQ ID NO: 9473 - protein, 15 aa, Homo sapiens
  CDR3 for alpha chain variable domain of TCR clone 4737 (TRAV2, TRAJ15)
CAVEDREQAGTALIF

SEQ ID NO: 9474 - protein, 14 aa, Homo sapiens
  CDR3 for beta chain variable domain of TCR clone 4737 (TRBV11-2, TRBJ2-7)
CASSLGAGAYEQYF

SEQ ID NO: 9475 - protein, 13 aa, Homo sapiens
  CDR3 for alpha chain variable domain of TCR clone 4738 (TRAV13-1, TRAJ21)
CAASKGNFNKFYF

SEQ ID NO: 9476 - protein, 16 aa, Homo sapiens
  CDR3 for beta chain variable domain of TCR clone 4738 (TRBV5-4, TRBJ2-3)
CASSWGTSGGTDTQYF

SEQ ID NO: 9477 - protein, 18 aa, Homo sapiens
  CDR3 for alpha chain variable domain of TCR clone 4739 (TRAV8-4, TRAJ52)
CAVTRANAGGTSYGKLTF

SEQ ID NO: 9478 - protein, 12 aa, Homo sapiens
  CDR3 for beta chain variable domain of TCR clone 4739 (TRBV12-4, TRBJ2-7)
CASSLGGYEQYF

SEQ ID NO: 9479 - protein, 11 aa, Homo sapiens
  CDR3 for alpha chain variable domain of TCR clone 4740 (TRAV21, TRAJ34)
CAHYNTDKLIF

SEQ ID NO: 9480 - protein, 16 aa, Homo sapiens
  CDR3 for beta chain variable domain of TCR clone 4740 (TRBV10-2, TRBJ1-1)
CASSEFGEGASTEAFF

SEQ ID NO: 9481 - protein, 14 aa, Homo sapiens
  CDR3 for alpha chain variable domain of TCR clone 4741 (TRAV12-3, TRAJ10)
SHLPLTGGGNKLTF

SEQ ID NO: 9482 - protein, 13 aa, Homo sapiens
  CDR3 for beta chain variable domain of TCR clone 4741 (TRBV10-3, TRBJ2-7)
CASKLAVNYEQYF

SEQ ID NO: 9483 - protein, 15 aa, Homo sapiens
  CDR3 for alpha chain variable domain of TCR clone 4742 (TRAV17, TRAJ57)
CATGPSQGGSEKLVF

SEQ ID NO: 9484 - protein, 12 aa, Homo sapiens
  CDR3 for beta chain variable domain of TCR clone 4742 (TRBV12-4, TRBJ2-7)
CASSLGGYEQYF

SEQ ID NO: 9485 - protein, 14 aa, Homo sapiens
  CDR3 for alpha chain variable domain of TCR clone 4743 (TRAV35, TRAJ22)
CAGLRPGSARQLTF

SEQ ID NO: 9486 - protein, 14 aa, Homo sapiens
  CDR3 for beta chain variable domain of TCR clone 4743 (TRBV5-1, TRBJ2-7)
CASSRGESLYEQYF

SEQ ID NO: 9487 - protein, 12 aa, Homo sapiens
  CDR3 for alpha chain variable domain of TCR clone 4744 (TRAV8-2, TRAJ5)
CVVSDIGRALTF

SEQ ID NO: 9488 - protein, 14 aa, Homo sapiens
  CDR3 for beta chain variable domain of TCR clone 4744 (TRBV19, TRBJ2-7)
CASNFRDTFTGMYF

SEQ ID NO: 9489 - protein, 15 aa, Homo sapiens
  CDR3 for alpha chain variable domain of TCR clone 4745 (TRAV16, TRAJ39)
CALSPSNNAGNMLTF

SEQ ID NO: 9490 - protein, 14 aa, Homo sapiens
  CDR3 for beta chain variable domain of TCR clone 4745 (TRBV7-7, TRBJ2-7)
CASSPGGPTYEQYF

SEQ ID NO: 9491 - protein, 11 aa, Homo sapiens
  CDR3 for alpha chain variable domain of TCR clone 4746 (TRAV3, TRAJ21)
CAVGNFNKFYF

SEQ ID NO: 9492 - protein, 16 aa, Homo sapiens
  CDR3 for beta chain variable domain of TCR clone 4746 (TRBV19, TRBJ2-1)
CASSKAGPSSYNEQLF

SEQ ID NO: 9493 - protein, 13 aa, Homo sapiens
  CDR3 for alpha chain variable domain of TCR clone 4747 (TRAV13-1, TRAJ26)
CAIVFGPGTRLSV

SEQ ID NO: 9494 - protein, 15 aa, Homo sapiens
  CDR3 for beta chain variable domain of TCR clone 4747 (TRBV12-4, TRBJ2-1)
CASSLLGRTYNEQFF

SEQ ID NO: 9495 - protein, 14 aa, Homo sapiens
  CDR3 for alpha chain variable domain of TCR clone 4748 (TRAV4, TRAJ6)
CLVGEAGGSYIPTF

SEQ ID NO: 9496 - protein, 13 aa, Homo sapiens
  CDR3 for beta chain variable domain of TCR clone 4748 (TRBV7-3, TRBJ1-1)
CASSQDWGAEAFF

SEQ ID NO: 9497 - protein, 16 aa, Homo sapiens
  CDR3 for alpha chain variable domain of TCR clone 4749 (TRAV30, TRAJ24)
CGTEIVDADSWGKFQF

SEQ ID NO: 9498 - protein, 14 aa, Homo sapiens
  CDR3 for beta chain variable domain of TCR clone 4749 (TRBV9, TRBJ2-4)
CASSPSGTSGFQYF

SEQ ID NO: 9499 - protein, 14 aa, Homo sapiens
  CDR3 for alpha chain variable domain of TCR clone 4750 (TRAV8-4, TRAJ12)
CAVSPMDSSYKLIF

SEQ ID NO: 9500 - protein, 15 aa, Homo sapiens
  CDR3 for beta chain variable domain of TCR clone 4750 (TRBV5-5, TRBJ2-1)
CASSPEAETYNEQFF

SEQ ID NO: 9501 - protein, 12 aa, Homo sapiens
  CDR3 for alpha chain variable domain of TCR clone 4751 (TRAV12-3, TRAJ17)
CAMTLTGNKLTF

SEQ ID NO: 9502 - protein, 15 aa, Homo sapiens
  CDR3 for beta chain variable domain of TCR clone 4751 (TRBV20-1, TRBJ2-7)
CSARDRVSGMDEQHF

SEQ ID NO: 9503 - protein, 13 aa, Homo sapiens
  CDR3 for alpha chain variable domain of TCR clone 4752 (TRAV13-2, TRAJ13)
CAERPGGYQKVTF

SEQ ID NO: 9504 - protein, 19 aa, Homo sapiens
  CDR3 for beta chain variable domain of TCR clone 4752 (TRBV4-1, TRBJ2-1)
CASSQGPLPGLGSRNEQFF

SEQ ID NO: 9505 - protein, 12 aa, Homo sapiens
  CDR3 for alpha chain variable domain of TCR clone 4753 (TRAV36/DV7, TRAJ54)
CAVVRGAQKLVF

SEQ ID NO: 9506 - protein, 18 aa, Homo sapiens
  CDR3 for beta chain variable domain of TCR clone 4753 (TRBV20-1, TRBJ2-3)
CSASGLAGGPGTTDTQYF

SEQ ID NO: 9507 - protein, 14 aa, Homo sapiens
  CDR3 for alpha chain variable domain of TCR clone 4754 (TRAV14/DV4, TRAJ20)
CAMRESLNDYKLSF

SEQ ID NO: 9508 - protein, 15 aa, Homo sapiens
  CDR3 for beta chain variable domain of TCR clone 4754 (TRBV7-9, TRBJ2-7)
CASSLALAEAYEQYF

SEQ ID NO: 9509 - protein, 13 aa, Homo sapiens
  CDR3 for alpha chain variable domain of TCR clone 4755 (TRAV13-2, TRAJ11)
CAENYSGYSTLTF

SEQ ID NO: 9510 - protein, 13 aa, Homo sapiens
  CDR3 for beta chain variable domain of TCR clone 4755 (TRBV12-4, TRBJ1-4)
CASAMGHNEKLFF

SEQ ID NO: 9511 - protein, 18 aa, Homo sapiens
  CDR3 for alpha chain variable domain of TCR clone 4756 (TRAV13-1, TRAJ28)
CAASPVPILWGWELPTHF

SEQ ID NO: 9512 - protein, 13 aa, Homo sapiens
  CDR3 for beta chain variable domain of TCR clone 4756 (TRBV15, TRBJ2-7)
CATSTTGHYEQYF

SEQ ID NO: 9513 - protein, 12 aa, Homo sapiens
  CDR3 for alpha chain variable domain of TCR clone 4757 (TRAV13-2, TRAJ23)
CAERHRGGKLIF

SEQ ID NO: 9514 - protein, 13 aa, Homo sapiens
  CDR3 for beta chain variable domain of TCR clone 4757 (TRBV19, TRBJ1-2)
CASSVPGQDGYTF

SEQ ID NO: 9515 - protein, 14 aa, Homo sapiens
  CDR3 for alpha chain variable domain of TCR clone 4758 (TRAV13-1, TRAJ4)
CAASLSGGYNKLIF

SEQ ID NO: 9516 - protein, 12 aa, Homo sapiens
  CDR3 for beta chain variable domain of TCR clone 4758 (TRBV20-1, TRBJ2-5)
CRVAGAGETQYF

SEQ ID NO: 9517 - protein, 20 aa, Homo sapiens
  CDR3 for alpha chain variable domain of TCR clone 4759 (TRAV27, TRAJ10)
ASTSVPSRGILTGGGNKLTF

SEQ ID NO: 9518 - protein, 15 aa, Homo sapiens
  CDR3 for beta chain variable domain of TCR clone 4759 (TRBV9, TRBJ2-3)
CASSLEGGLTDTQYF

SEQ ID NO: 9519 - protein, 16 aa, Homo sapiens
  CDR3 for alpha chain variable domain of TCR clone 4760 (TRAV30, TRAJ24)
CGTEIVDADSWGKFQF

SEQ ID NO: 9520 - protein, 14 aa, Homo sapiens
  CDR3 for beta chain variable domain of TCR clone 4760 (TRBV12-5, TRBJ2-5)
CASGPRTHQETQYF

SEQ ID NO: 9521 - protein, 12 aa, Homo sapiens
  CDR3 for alpha chain variable domain of TCR clone 4761 (TRAV13-2, TRAJ23)
CAERHRGGKLIF

SEQ ID NO: 9522 - protein, 12 aa, Homo sapiens
  CDR3 for beta chain variable domain of TCR clone 4761 (TRBV5-5, TRBJ2-5)
CASSYFGETQYF

SEQ ID NO: 9523 - protein, 18 aa, Homo sapiens
  CDR3 for alpha chain variable domain of TCR clone 4762 (TRAV26-2, TRAJ45)
CILRVDKYSGGGADGLTF

SEQ ID NO: 9524 - protein, 12 aa, Homo sapiens
  CDR3 for beta chain variable domain of TCR clone 4762 (TRBV29-1, TRBJ2-3)
CSVTGGADTQYF

SEQ ID NO: 9525 - protein, 13 aa, Homo sapiens
  CDR3 for alpha chain variable domain of TCR clone 4763 (TRAV8-6, TRAJ40)
CAVSVTGTYKYIF

SEQ ID NO: 9526 - protein, 15 aa, Homo sapiens
  CDR3 for beta chain variable domain of TCR clone 4763 (TRBV4-1, TRBJ2-3)
CASSRGQGIPDTQYF

SEQ ID NO: 9527 - protein, 14 aa, Homo sapiens
  CDR3 for alpha chain variable domain of TCR clone 4764 (TRAV17, TRAJ34)
CATDSLEGTDKLIF

SEQ ID NO: 9528 - protein, 15 aa, Homo sapiens
  CDR3 for beta chain variable domain of TCR clone 4764 (TRBV12-4, TRBJ1-2)
CASSPITGGGYGYTF

SEQ ID NO: 9529 - protein, 15 aa, Homo sapiens
  CDR3 for alpha chain variable domain of TCR clone 4765 (TRAV23/DV6, TRAJ13)
CAAWPGGGGYQKVTF

SEQ ID NO: 9530 - protein, 14 aa, Homo sapiens
  CDR3 for beta chain variable domain of TCR clone 4765 (TRBV6-1, TRBJ2-1)
CASAGGAIKNEQFF

SEQ ID NO: 9531 - protein, 11 aa, Homo sapiens
  CDR3 for alpha chain variable domain of TCR clone 4766 (TRAV23/DV6, TRAJ58)
CAARLLRGETS

SEQ ID NO: 9532 - protein, 15 aa, Homo sapiens
  CDR3 for beta chain variable domain of TCR clone 4766 (TRBV9, TRBJ1-6)
CASSVAGTGDSPLHF

SEQ ID NO: 9533 - protein, 14 aa, Homo sapiens
  CDR3 for alpha chain variable domain of TCR clone 4767 (TRAV1-2, TRAJ16)
CAVNRFSDGQKLLF

SEQ ID NO: 9534 - protein, 15 aa, Homo sapiens
  CDR3 for beta chain variable domain of TCR clone 4767 (TRBV27, TRBJ1-1)
CASSPYADPYTEAFF

SEQ ID NO: 9535 - protein, 15 aa, Homo sapiens
  CDR3 for alpha chain variable domain of TCR clone 4768 (TRAV2, TRAJ24)
CAVVRLKNSWGKLQF

SEQ ID NO: 9536 - protein, 17 aa, Homo sapiens
  CDR3 for beta chain variable domain of TCR clone 4768 (TRBV13, TRBJ2-3)
CASSLSRVAGGRNTQYF

SEQ ID NO: 9537 - protein, 17 aa, Homo sapiens
  CDR3 for alpha chain variable domain of TCR clone 4769 (TRAV3, TRAJ6)
CAVRDGPRAGGSYIPTF

SEQ ID NO: 9538 - protein, 14 aa, Homo sapiens
  CDR3 for beta chain variable domain of TCR clone 4769 (TRBV7-2, TRBJ2-7)
CASSPKTSFYEQYL

SEQ ID NO: 9539 - protein, 13 aa, Homo sapiens
  CDR3 for alpha chain variable domain of TCR clone 4770 (TRAV16, TRAJ52)
CALRGTSYGKLTF

SEQ ID NO: 9540 - protein, 18 aa, Homo sapiens
  CDR3 for beta chain variable domain of TCR clone 4770 (TRBV13, TRBJ2-6)
CASSPMTSGGSGANVLTF

SEQ ID NO: 9541 - protein, 14 aa, Homo sapiens
  CDR3 for alpha chain variable domain of TCR clone 4771 (TRAV12-2, TRAJ13)
CAVKKTGGYQKVTF

SEQ ID NO: 9542 - protein, 15 aa, Homo sapiens
  CDR3 for beta chain variable domain of TCR clone 4771 (TRBV27, TRBJ2-1)
CASSNGGGSSNEQLF

SEQ ID NO: 9543 - protein, 17 aa, Homo sapiens
  CDR3 for alpha chain variable domain of TCR clone 4772 (TRAV3, TRAJ6)
CAVRDGPRAGGSYIPTF

SEQ ID NO: 9544 - protein, 15 aa, Homo sapiens
  CDR3 for beta chain variable domain of TCR clone 4772 (TRBV27, TRBJ2-1)
CASSNGGGSSNEQFF

SEQ ID NO: 9545 - protein, 10 aa, Homo sapiens
  CDR3 for alpha chain variable domain of TCR clone 4773 (TRAV12-3, TRAJ49)
CAMNDDQFYF

SEQ ID NO: 9546 - protein, 16 aa, Homo sapiens
  CDR3 for beta chain variable domain of TCR clone 4773 (TRBV27, TRBJ2-2)
CASSFRGLVRTGELFF

SEQ ID NO: 9547 - protein, 14 aa, Homo sapiens
  CDR3 for alpha chain variable domain of TCR clone 4774 (TRAV9-2, TRAJ39)
CALYIYNAGNMLTF

SEQ ID NO: 9548 - protein, 15 aa, Homo sapiens
  CDR3 for beta chain variable domain of TCR clone 4774 (TRBV5-1, TRBJ2-1)
CASSPPRAPYNEQFF

SEQ ID NO: 9549 - protein, 10 aa, Homo sapiens
  CDR3 for alpha chain variable domain of TCR clone 4775 (TRAV12-3, TRAJ4)
CAMTGAGTRL

SEQ ID NO: 9550 - protein, 14 aa, Homo sapiens
  CDR3 for beta chain variable domain of TCR clone 4775 (TRBV10-3, TRBJ1-1)
CAISDTDRGVEAFF

SEQ ID NO: 9551 - protein, 14 aa, Homo sapiens
  CDR3 for alpha chain variable domain of TCR clone 4776 (TRAV1-2, TRAJ8)
CAVREDTGFQKLVF

SEQ ID NO: 9552 - protein, 16 aa, Homo sapiens
  CDR3 for beta chain variable domain of TCR clone 4776 (TRBV4-3, TRBJ2-1)
CASSPALDRGVNEQFF

SEQ ID NO: 9553 - protein, 17 aa, Homo sapiens
  CDR3 for alpha chain variable domain of TCR clone 4777 (TRAV3, TRAJ6)
CAVGDGPRAGGSYIPTF

SEQ ID NO: 9554 - protein, 14 aa, Homo sapiens
  CDR3 for beta chain variable domain of TCR clone 4777 (TRBV7-2, TRBJ2-7)
CASSPKTSFYEQYF

SEQ ID NO: 9555 - protein, 14 aa, Homo sapiens
  CDR3 for alpha chain variable domain of TCR clone 4778 (TRAV4, TRAJ12)
CLVGYMDSSYKLIF

SEQ ID NO: 9556 - protein, 14 aa, Homo sapiens
  CDR3 for beta chain variable domain of TCR clone 4778 (TRBV27, TRBJ1-1)
CASSPGGGATEAFF

SEQ ID NO: 9557 - protein, 16 aa, Homo sapiens
  CDR3 for alpha chain variable domain of TCR clone 4779 (TRAV17, TRAJ28)
CATASVSGAGSYQLTF

SEQ ID NO: 9558 - protein, 14 aa, Homo sapiens
  CDR3 for beta chain variable domain of TCR clone 4779 (TRBV19, TRBJ2-1)
CASEVTGARNEQFF

SEQ ID NO: 9559 - protein, 12 aa, Homo sapiens
  CDR3 for alpha chain variable domain of TCR clone 4780 (TRAV13-2, TRAJ23)
CAERHRGGKLIF

SEQ ID NO: 9560 - protein, 18 aa, Homo sapiens
  CDR3 for beta chain variable domain of TCR clone 4780 (TRBV11-2, TRBJ2-3)
CASSLGGASRGAPNTQYF

SEQ ID NO: 9561 - protein, 14 aa, Homo sapiens
  CDR3 for alpha chain variable domain of TCR clone 4781 (TRAV26-1, TRAJ21)
CIVRPPYNFNKFYF

SEQ ID NO: 9562 - protein, 11 aa, Homo sapiens
  CDR3 for beta chain variable domain of TCR clone 4781 (TRBV10-3, TRBJ2-7)
CAISEGLEQYF

SEQ ID NO: 9563 - protein, 13 aa, Homo sapiens
  CDR3 for alpha chain variable domain of TCR clone 4782 (TRAV21, TRAJ27)
CAARPGNAGKSTF

SEQ ID NO: 9564 - protein, 14 aa, Homo sapiens
  CDR3 for beta chain variable domain of TCR clone 4782 (TRBV7-2, TRBJ2-7)
CASSPKTSFYEQYF

SEQ ID NO: 9565 - protein, 12 aa, Homo sapiens
  CDR3 for alpha chain variable domain of TCR clone 4783 (TRAV25, TRAJ35)
CAGIGFGNVLHC

SEQ ID NO: 9566 - protein, 12 aa, Homo sapiens
  CDR3 for beta chain variable domain of TCR clone 4783 (TRBV6-3, TRBJ2-7)
CASSRQGYEQYF

SEQ ID NO: 9567 - protein, 14 aa, Homo sapiens
  CDR3 for alpha chain variable domain of TCR clone 4784 (TRAV8-4, TRAJ39)
CAVSLNNAGNMLTF

SEQ ID NO: 9568 - protein, 16 aa, Homo sapiens
  CDR3 for beta chain variable domain of TCR clone 4784 (TRBV13, TRBJ2-7)
CASSSRESGRTYEQYF

SEQ ID NO: 9569 - protein, 17 aa, Homo sapiens
  CDR3 for alpha chain variable domain of TCR clone 4785 (TRAV3, TRAJ6)
CAVRDGPRAGGSYLPTF

SEQ ID NO: 9570 - protein, 14 aa, Homo sapiens
  CDR3 for beta chain variable domain of TCR clone 4785 (TRBV7-2, TRBJ2-7)
CASSPKTSFYEQYF

SEQ ID NO: 9571 - protein, 12 aa, Homo sapiens
  CDR3 for alpha chain variable domain of TCR clone 4786 (TRAV1-1, TRAJ20)
CAVREDDYKLSF

SEQ ID NO: 9572 - protein, 15 aa, Homo sapiens
  CDR3 for beta chain variable domain of TCR clone 4786 (TRBV5-7, TRBJ2-7)
CASSLPGQVFYEQYF

SEQ ID NO: 9573 - protein, 17 aa, Homo sapiens
  CDR3 for alpha chain variable domain of TCR clone 4787 (TRAV13-1, TRAJ52)
CAASSGAGGTSYGKLTF

SEQ ID NO: 9574 - protein, 14 aa, Homo sapiens
  CDR3 for beta chain variable domain of TCR clone 4787 (TRBV12-4, TRBJ2-3)
CASTIAGWGDTQYF

SEQ ID NO: 9575 - protein, 14 aa, Homo sapiens
  CDR3 for alpha chain variable domain of TCR clone 4788 (TRAV1-2, TRAJ16)
CAVNRFSDGQKLLF

SEQ ID NO: 9576 - protein, 17 aa, Homo sapiens
  CDR3 for beta chain variable domain of TCR clone 4788 (TRBV15, TRBJ1-2)
CATSGREIDVVNYGYTF

SEQ ID NO: 9577 - protein, 10 aa, Homo sapiens
  CDR3 for alpha chain variable domain of TCR clone 4789 (TRAV21, TRAJ34)
CAADTDKLIF

SEQ ID NO: 9578 - protein, 16 aa, Homo sapiens
  CDR3 for beta chain variable domain of TCR clone 4789 (TRBV6-5, TRBJ2-2)
CASSHVSRAQPGELFF

SEQ ID NO: 9579 - protein, 12 aa, Homo sapiens
  CDR3 for alpha chain variable domain of TCR clone 4790 (TRAV21, TRAJ29)
CAVTSGNTPLVF

SEQ ID NO: 9580 - protein, 13 aa, Homo sapiens
  CDR3 for beta chain variable domain of TCR clone 4790 (TRBV4-2, TRBJ1-1)
CASSQAGNTEAFF

SEQ ID NO: 9581 - protein, 14 aa, Homo sapiens
  CDR3 for alpha chain variable domain of TCR clone 4791 (TRAV16, TRAJ33)
CALSAMDSNYQLIW

SEQ ID NO: 9582 - protein, 16 aa, Homo sapiens
  CDR3 for beta chain variable domain of TCR clone 4791 (TRBV12-4, TRBJ2-3)
CASSFPSNTNTDTQCF

SEQ ID NO: 9583 - protein, 14 aa, Homo sapiens
  CDR3 for alpha chain variable domain of TCR clone 4792 (TRAV8-4, TRAJ9)
CAVRINTGGFKTIF

SEQ ID NO: 9584 - protein, 15 aa, Homo sapiens
  CDR3 for beta chain variable domain of TCR clone 4792 (TRBV20-1, TRBJ2-7)
CSARDRVSGMDEQYF

SEQ ID NO: 9585 - protein, 18 aa, Homo sapiens
  CDR3 for alpha chain variable domain of TCR clone 4793 (TRAV9-2, TRAJ52)
CALSRHNAGGTSYGKLTF

SEQ ID NO: 9586 - protein, 16 aa, Homo sapiens
  CDR3 for beta chain variable domain of TCR clone 4793 (TRBV19, TRBJ2-1)
CASSKAGPSSYNEQFF

SEQ ID NO: 9587 - protein, 14 aa, Homo sapiens
  CDR3 for alpha chain variable domain of TCR clone 4794 (TRAV12-3, TRAJ9)
CAMSPNTGGSKTIF

SEQ ID NO: 9588 - protein, 12 aa, Homo sapiens
  CDR3 for beta chain variable domain of TCR clone 4794 (TRBV11-2, TRBJ2-2)
CASSLGGGELFF

SEQ ID NO: 9589 - protein, 12 aa, Homo sapiens
  CDR3 for alpha chain variable domain of TCR clone 4795 (TRAV12-3, TRAJ32)
CAGGGATNKLIF

SEQ ID NO: 9590 - protein, 17 aa, Homo sapiens
  CDR3 for beta chain variable domain of TCR clone 4795 (TRBV28, TRBJ2-5)
CASSTPEGDALQETQYF

SEQ ID NO: 9591 - protein, 16 aa, Homo sapiens
  CDR3 for alpha chain variable domain of TCR clone 4796 (TRAV12-3, TRAJ53)
CAMSPGSGGSNYKLTF

SEQ ID NO: 9592 - protein, 11 aa, Homo sapiens
  CDR3 for beta chain variable domain of TCR clone 4796 (TRBV29-1, TRBJ2-5)
RSEDRTGTQYF

SEQ ID NO: 9593 - protein, 15 aa, Homo sapiens
  CDR3 for alpha chain variable domain of TCR clone 4797 (TRAV8-4, TRAJ29)
CAVSEDFRGNTPLVF

SEQ ID NO: 9594 - protein, 18 aa, Homo sapiens
  CDR3 for beta chain variable domain of TCR clone 4797 (TRBV20-1, TRBJ2-6)
CSARTLAGGPSGANVLTF

SEQ ID NO: 9595 - protein, 12 aa, Homo sapiens
  CDR3 for alpha chain variable domain of TCR clone 4798 (TRAV1-2, TRAJ42)
CVAGGSQGNLIF

SEQ ID NO: 9596 - protein, 14 aa, Homo sapiens
  CDR3 for beta chain variable domain of TCR clone 4798 (TRBV5-4, TRBJ2-5)
CASSLVRGQETQYF

SEQ ID NO: 9597 - protein, 11 aa, Homo sapiens
  CDR3 for alpha chain variable domain of TCR clone 4799 (TRAV1-1, TRAJ23)
CAVRQGGKLIF

SEQ ID NO: 9598 - protein, 20 aa, Homo sapiens
  CDR3 for beta chain variable domain of TCR clone 4799 (TRBV11-2, TRBJ1-6)
CASSLVFATGGSVHPSTLGT

SEQ ID NO: 9599 - protein, 14 aa, Homo sapiens
  CDR3 for alpha chain variable domain of TCR clone 4800 (TRAV1-2, TRAJ16)
CAVNRFSDGQKLLF

SEQ ID NO: 9600 - protein, 14 aa, Homo sapiens
  CDR3 for beta chain variable domain of TCR clone 4800 (TRBV7-9, TRBJ2-2)
CASSTVLGRGELFF

SEQ ID NO: 9601 - protein, 15 aa, Homo sapiens
  CDR3 for alpha chain variable domain of TCR clone 4801 (TRAV26-1, TRAJ29)
CIVRVEGSGNTPLVF

SEQ ID NO: 9602 - protein, 15 aa, Homo sapiens
  CDR3 for beta chain variable domain of TCR clone 4801 (TRBV7-9, TRBJ1-5)
CASSQGHQPNQTQHF

SEQ ID NO: 9603 - protein, 11 aa, Homo sapiens
  CDR3 for alpha chain variable domain of TCR clone 4802 (TRAV27, TRAJ47)
CRSNQGNKLVF

SEQ ID NO: 9604 - protein, 16 aa, Homo sapiens
  CDR3 for beta chain variable domain of TCR clone 4802 (TRBV12-4, TRBJ1-5)
CASSRPVGGSNQPQHF

SEQ ID NO: 9605 - protein, 19 aa, Homo sapiens
  CDR3 for alpha chain variable domain of TCR clone 4803 (TRAV21, TRAJ20)
SLVTQPPTSVLPNDYKLSF

SEQ ID NO: 9606 - protein, 16 aa, Homo sapiens
  CDR3 for beta chain variable domain of TCR clone 4803 (TRBV12-5, TRBJ2-5)
CASGPRTSGNQETQYF

SEQ ID NO: 9607 - protein, 14 aa, Homo sapiens
  CDR3 for alpha chain variable domain of TCR clone 4804 (TRAV1-2, TRAJ8)
CAVREDTGFQKLVF

SEQ ID NO: 9608 - protein, 14 aa, Homo sapiens
  CDR3 for beta chain variable domain of TCR clone 4804 (TRBV28, TRBJ2-1)
CASSFDSVSDEQFF

SEQ ID NO: 9609 - protein, 14 aa, Homo sapiens
  CDR3 for alpha chain variable domain of TCR clone 4805 (TRAV23/DV6, TRAJ21)
CAAYKSGPRDKFYF

SEQ ID NO: 9610 - protein, 15 aa, Homo sapiens
  CDR3 for beta chain variable domain of TCR clone 4805 (TRBV5-4, TRBJ2-2)
CASSLTSRGTGELFF

SEQ ID NO: 9611 - protein, 13 aa, Homo sapiens
  CDR3 for alpha chain variable domain of TCR clone 4806 (TRAV14/DV4, TRAJ26)
CAMREAYGQNFVF

SEQ ID NO: 9612 - protein, 19 aa, Homo sapiens
  CDR3 for beta chain variable domain of TCR clone 4806 (TRBV13, TRBJ2-6)
CASSLVHRDRGAGANVLTF

SEQ ID NO: 9613 - protein, 14 aa, Homo sapiens
  CDR3 for alpha chain variable domain of TCR clone 4807 (TRAV12-3, TRAJ10)
SHLPLTGGGNKLTF

SEQ ID NO: 9614 - protein, 16 aa, Homo sapiens
  CDR3 for beta chain variable domain of TCR clone 4807 (TRBV12-5, TRBJ2-5)
CASGPRTSGNQETQYF

SEQ ID NO: 9615 - protein, 13 aa, Homo sapiens
  CDR3 for alpha chain variable domain of TCR clone 4808 (TRAV20, TRAJ35)
CAVQEGFGNVLHC

SEQ ID NO: 9616 - protein, 14 aa, Homo sapiens
  CDR3 for beta chain variable domain of TCR clone 4808 (TRBV5-1, TRBJ1-1)
CASSSATGGTEAFF

SEQ ID NO: 9617 - protein, 16 aa, Homo sapiens
  CDR3 for alpha chain variable domain of TCR clone 4809 (TRAV3, TRAJ21)
CAVRDIERGNFNKFYF

SEQ ID NO: 9618 - protein, 20 aa, Homo sapiens
  CDR3 for beta chain variable domain of TCR clone 4809 (TRBV4-1, TRBJ2-2)
CASSQASPPGLASNTGELFF

SEQ ID NO: 9619 - protein, 17 aa, Homo sapiens
  CDR3 for alpha chain variable domain of TCR clone 4810 (TRAV3, TRAJ6)
CAVRDGPRAGGSYIPTF

SEQ ID NO: 9620 - protein, 13 aa, Homo sapiens
  CDR3 for beta chain variable domain of TCR clone 4810 (TRBV20-1, TRBJ1-1)
CSARGGGNTEAFF

SEQ ID NO: 9621 - protein, 15 aa, Homo sapiens
  CDR3 for alpha chain variable domain of TCR clone 4811 (TRAV27, TRAJ45)
CAPVDSGGGADGLTF

SEQ ID NO: 9622 - protein, 15 aa, Homo sapiens
  CDR3 for beta chain variable domain of TCR clone 4811 (TRBV23-1, TRBJ1-5)
CASSQSRGQGWGAYI

SEQ ID NO: 9623 - protein, 18 aa, Homo sapiens
  CDR3 for alpha chain variable domain of TCR clone 4812 (TRAV13-1, TRAJ52)
CAAKNPNAGGTSYGKLTF

SEQ ID NO: 9624 - protein, 14 aa, Homo sapiens
  CDR3 for beta chain variable domain of TCR clone 4812 (TRBV7-2, TRBJ2-7)
CASRSQGAAYEQYF

SEQ ID NO: 9625 - protein, 15 aa, Homo sapiens
  CDR3 for alpha chain variable domain of TCR clone 4813 (TRAV20, TRAJ28)
CAVQYSWAGSYQLTF

SEQ ID NO: 9626 - protein, 12 aa, Homo sapiens
  CDR3 for beta chain variable domain of TCR clone 4813 (TRBV12-4, TRBJ1-3)
CASRASGNTIYF

SEQ ID NO: 9627 - protein, 11 aa, Homo sapiens
  CDR3 for alpha chain variable domain of TCR clone 4814 (TRAV1-2, TRAJ34)
CAGYNTDKLIF

SEQ ID NO: 9628 - protein, 13 aa, Homo sapiens
  CDR3 for beta chain variable domain of TCR clone 4814 (TRBV11-2, TRBJ1-1)
CASSLGNGAEAFF

SEQ ID NO: 9629 - protein, 13 aa, Homo sapiens
  CDR3 for alpha chain variable domain of TCR clone 4815 (TRAV12-2, TRAJ30)
CAVNLNRDDKIIF

SEQ ID NO: 9630 - protein, 14 aa, Homo sapiens
  CDR3 for beta chain variable domain of TCR clone 4815 (TRBV20-1, TRBJ2-3)
CSASSGGSTDTQYF

SEQ ID NO: 9631 - protein, 18 aa, Homo sapiens
  CDR3 for alpha chain variable domain of TCR clone 4816 (TRAV21, TRAJ52)
CAVRPSPAGGTSYGKLTF

SEQ ID NO: 9632 - protein, 14 aa, Homo sapiens
  CDR3 for beta chain variable domain of TCR clone 4816 (TRBV4-2, TRBJ2-1)
CASGLDRAYNEQFF

SEQ ID NO: 9633 - protein, 16 aa, Homo sapiens
  CDR3 for alpha chain variable domain of TCR clone 4817 (TRAV30, TRAJ24)
CGTEIVDADSWGKFQF

SEQ ID NO: 9634 - protein, 14 aa, Homo sapiens
  CDR3 for beta chain variable domain of TCR clone 4817 (TRBV18, TRBJ2-7)
CASSPRGGAYEQYF

SEQ ID NO: 9635 - protein, 10 aa, Homo sapiens
  CDR3 for alpha chain variable domain of TCR clone 4818 (TRAV1-2, TRAJ31)
CAFFDARLMF

SEQ ID NO: 9636 - protein, 14 aa, Homo sapiens
  CDR3 for beta chain variable domain of TCR clone 4818 (TRBV10-3, TRBJ2-7)
CHQCGTSETYEQYF

SEQ ID NO: 9637 - protein, 14 aa, Homo sapiens
  CDR3 for alpha chain variable domain of TCR clone 4819 (TRAV13-1, TRAJ5)
CAASPGSRRRALTF

SEQ ID NO: 9638 - protein, 17 aa, Homo sapiens
  CDR3 for beta chain variable domain of TCR clone 4819 (TRBV20-1, TRBJ2-1)
CSASSSGLAGSYNEQFF

SEQ ID NO: 9639 - protein, 12 aa, Homo sapiens
  CDR3 for alpha chain variable domain of TCR clone 4820 (TRAV25, TRAJ33)
CAGPDSNYQLIW

SEQ ID NO: 9640 - protein, 20 aa, Homo sapiens
  CDR3 for beta chain variable domain of TCR clone 4820 (TRBV4-1, TRBJ2-2)
CASSQASPPGLASNTGELFF

SEQ ID NO: 9641 - protein, 14 aa, Homo sapiens
  CDR3 for alpha chain variable domain of TCR clone 4821 (TRAV26-1, TRAJ38)
CIADNAGNNRKLIW

SEQ ID NO: 9642 - protein, 15 aa, Homo sapiens
  CDR3 for beta chain variable domain of TCR clone 4821 (TRBV20-1, TRBJ1-1)
CSASRGVTGNTEAFF

SEQ ID NO: 9643 - protein, 14 aa, Homo sapiens
  CDR3 for alpha chain variable domain of TCR clone 4822 (TRAV12-2, TRAJ36)
CAVKISTGANNLFF

SEQ ID NO: 9644 - protein, 14 aa, Homo sapiens
  CDR3 for beta chain variable domain of TCR clone 4822 (TRBV20-1, TRBJ2-3)
CSARGGTSTDTQYF

SEQ ID NO: 9645 - protein, 14 aa, Homo sapiens
  CDR3 for alpha chain variable domain of TCR clone 4823 (TRAV14/DV4, TRAJ32)
SNVLPLTPTNKLIF

SEQ ID NO: 9646 - protein, 17 aa, Homo sapiens
  CDR3 for beta chain variable domain of TCR clone 4823 (TRBV20-1, TRBJ2-1)
CSASSSGLAGSYNEQFF

SEQ ID NO: 9647 - protein, 13 aa, Homo sapiens
  CDR3 for alpha chain variable domain of TCR clone 4824 (TRAV3, TRAJ21)
CAVREPDFNKFYF

SEQ ID NO: 9648 - protein, 14 aa, Homo sapiens
  CDR3 for beta chain variable domain of TCR clone 4824 (TRBV20-1, TRBJ2-3)
CSARGGTSTDTQYF

SEQ ID NO: 9649 - protein, 12 aa, Homo sapiens
  CDR3 for alpha chain variable domain of TCR clone 4825 (TRAV35, TRAJ53)
CAGLGSNYKLTF

SEQ ID NO: 9650 - protein, 15 aa, Homo sapiens
  CDR3 for beta chain variable domain of TCR clone 4825 (TRBV13, TRBJ2-5)
CASSLRPGRGETQYF

SEQ ID NO: 9651 - protein, 14 aa, Homo sapiens
  CDR3 for alpha chain variable domain of TCR clone 4826 (TRAV1-2, TRAJ8)
CAVREDTGFQKLVF

SEQ ID NO: 9652 - protein, 13 aa, Homo sapiens
  CDR3 for beta chain variable domain of TCR clone 4826 (TRBV12-5, TRBJ2-3)
CASGDRQSDTQYF

SEQ ID NO: 9653 - protein, 13 aa, Homo sapiens
  CDR3 for alpha chain variable domain of TCR clone 4827 (TRAV12-2, TRAJ7)
CAGLIYGNNRLAF

SEQ ID NO: 9654 - protein, 14 aa, Homo sapiens
  CDR3 for beta chain variable domain of TCR clone 4827 (TRBV6-1, TRBJ2-1)
CATFTSGQNNEQFF

SEQ ID NO: 9655 - protein, 14 aa, Homo sapiens
  CDR3 for alpha chain variable domain of TCR clone 4828 (TRAV8-3, TRAJ15)
CAVGRHQAGTALIF

SEQ ID NO: 9656 - protein, 15 aa, Homo sapiens
  CDR3 for beta chain variable domain of TCR clone 4828 (TRBV27, TRBJ2-1)
CASSNGGGSSNEQFF

SEQ ID NO: 9657 - protein, 16 aa, Homo sapiens
  CDR3 for alpha chain variable domain of TCR clone 4829 (TRAV21, TRAJ58)
CAVRGDRETSGSRLTF

SEQ ID NO: 9658 - protein, 12 aa, Homo sapiens
  CDR3 for beta chain variable domain of TCR clone 4829 (TRBV19, TRBJ2-3)
CASAGGADTQYF

SEQ ID NO: 9659 - protein, 14 aa, Homo sapiens
  CDR3 for alpha chain variable domain of TCR clone 4830 (TRAV1-2, TRAJ16)
CAVNRFSDGQKLLF

SEQ ID NO: 9660 - protein, 17 aa, Homo sapiens
  CDR3 for beta chain variable domain of TCR clone 4830 (TRBV11-2, TRBJ2-1)
CASSLYPPGVEYNEQFF

SEQ ID NO: 9661 - protein, 14 aa, Homo sapiens
  CDR3 for alpha chain variable domain of TCR clone 4831 (TRAV4, TRAJ17)
CLVGDMAAGNKLTF

SEQ ID NO: 9662 - protein, 15 aa, Homo sapiens
  CDR3 for beta chain variable domain of TCR clone 4831 (TRBV5-5, TRBJ1-5)
CASSSTPGSNQPQHF

SEQ ID NO: 9663 - protein, 13 aa, Homo sapiens
  CDR3 for alpha chain variable domain of TCR clone 4832 (TRAV13-1, TRAJ37)
CAAVSGNTGKLIF

SEQ ID NO: 9664 - protein, 13 aa, Homo sapiens
  CDR3 for beta chain variable domain of TCR clone 4832 (TRBV7-9, TRBJ1-2)
CASSLKQNYGYTF

SEQ ID NO: 9665 - protein, 14 aa, Homo sapiens
  CDR3 for alpha chain variable domain of TCR clone 4833 (TRAV1-2, TRAJ8)
CAVREDKGFQKLVF

SEQ ID NO: 9666 - protein, 15 aa, Homo sapiens
  CDR3 for beta chain variable domain of TCR clone 4833 (TRBV6-3, TRBJ2-7)
CASSSPGTVFYEQYF

SEQ ID NO: 9667 - protein, 15 aa, Homo sapiens
  CDR3 for alpha chain variable domain of TCR clone 4834 (TRAV17, TRAJ57)
CATGPSQGGSEKLVF

SEQ ID NO: 9668 - protein, 13 aa, Homo sapiens
  CDR3 for beta chain variable domain of TCR clone 4834 (TRBV6-5, TRBJ2-5)
CASSPQGGETQYF

SEQ ID NO: 9669 - protein, 14 aa, Homo sapiens
  CDR3 for alpha chain variable domain of TCR clone 4835 (TRAV26-1, TRAJ21)
CIVRVGHNFNKFYF

SEQ ID NO: 9670 - protein, 15 aa, Homo sapiens
  CDR3 for beta chain variable domain of TCR clone 4835 (TRBV4-3, TRBJ2-1)
CASSQGLAGSNEQFF

SEQ ID NO: 9671 - protein, 16 aa, Homo sapiens
  CDR3 for alpha chain variable domain of TCR clone 4836 (TRAV4, TRAJ5)
CLVGPDHGHGQESTYF

SEQ ID NO: 9672 - protein, 17 aa, Homo sapiens
  CDR3 for beta chain variable domain of TCR clone 4836 (TRBV11-2, TRBJ2-1)
CASSLYPPGVEYNEQFF

SEQ ID NO: 9673 - protein, 17 aa, Homo sapiens
  CDR3 for alpha chain variable domain of TCR clone 4837 (TRAV3, TRAJ42)
CAVRDRDYGGSQGNLIF

SEQ ID NO: 9674 - protein, 12 aa, Homo sapiens
  CDR3 for beta chain variable domain of TCR clone 4837 (TRBV29-1, TRBJ2-2)
CSVDKYTGELFF

SEQ ID NO: 9675 - protein, 15 aa, Homo sapiens
  CDR3 for alpha chain variable domain of TCR clone 4838 (TRAV13-1, TRAJ17)
CAASIERAAGNKLTF

SEQ ID NO: 9676 - protein, 17 aa, Homo sapiens
  CDR3 for beta chain variable domain of TCR clone 4838 (TRBV13, TRBJ2-3)
CASSLSRVAGGRNTQYF

SEQ ID NO: 9677 - protein, 16 aa, Homo sapiens
  CDR3 for alpha chain variable domain of TCR clone 4839 (TRAV30, TRAJ24)
CGTEIVDADSWGKFQF

SEQ ID NO: 9678 - protein, 14 aa, Homo sapiens
  CDR3 for beta chain variable domain of TCR clone 4839 (TRBV12-5, TRBJ2-5)
CASGSRTRQETQYF

SEQ ID NO: 9679 - protein, 14 aa, Homo sapiens
  CDR3 for alpha chain variable domain of TCR clone 4840 (TRAV12-2, TRAJ13)
CAVKKTGGYQKVTF

SEQ ID NO: 9680 - protein, 16 aa, Homo sapiens
  CDR3 for beta chain variable domain of TCR clone 4840 (TRBV4-2, TRBJ2-4)
CASSQELRRAKNIQYF

SEQ ID NO: 9681 - protein, 15 aa, Homo sapiens
  CDR3 for alpha chain variable domain of TCR clone 4841 (TRAV21, TRAJ53)
CATLNSGGSNYKLTF

SEQ ID NO: 9682 - protein, 16 aa, Homo sapiens
  CDR3 for beta chain variable domain of TCR clone 4841 (TRBV12-4, TRBJ2-3)
CASSLRLAETTDTQYF

SEQ ID NO: 9683 - protein, 14 aa, Homo sapiens
  CDR3 for alpha chain variable domain of TCR clone 4842 (TRAV12-1, TRAJ17)
CVVNYKAAGNKLTF

SEQ ID NO: 9684 - protein, 14 aa, Homo sapiens
  CDR3 for beta chain variable domain of TCR clone 4842 (TRBV28, TRBJ2-1)
CASSPSTGYNEQFF

SEQ ID NO: 9685 - protein, 11 aa, Homo sapiens
  CDR3 for alpha chain variable domain of TCR clone 4843 (TRAV3, TRAJ21)
CAVGNFNKFYF

SEQ ID NO: 9686 - protein, 16 aa, Homo sapiens
  CDR3 for beta chain variable domain of TCR clone 4843 (TRBV19, TRBJ2-1)
CASSKAGPSPYNEQFF

SEQ ID NO: 9687 - protein, 14 aa, Homo sapiens
  CDR3 for alpha chain variable domain of TCR clone 4844 (TRAV2, TRAJ9)
CAVEDRSGGFKTIF

SEQ ID NO: 9688 - protein, 15 aa, Homo sapiens
  CDR3 for beta chain variable domain of TCR clone 4844 (TRBV12-4, TRBJ2-5)
CASSLSGAFQETQYF

SEQ ID NO: 9689 - protein, 14 aa, Homo sapiens
  CDR3 for alpha chain variable domain of TCR clone 4845 (TRAV8-2, TRAJ4)
CVVSPSGGYNKLIF

SEQ ID NO: 9690 - protein, 15 aa, Homo sapiens
  CDR3 for beta chain variable domain of TCR clone 4845 (TRBV6-6, TRBJ2-7)
CASSYSYGGSYEQYF

SEQ ID NO: 9691 - protein, 12 aa, Homo sapiens
  CDR3 for alpha chain variable domain of TCR clone 4846 (TRAV1-2, TRAJ33)
CAALDSNYQLIW

SEQ ID NO: 9692 - protein, 14 aa, Homo sapiens
  CDR3 for beta chain variable domain of TCR clone 4846 (TRBV20-1, TRBJ2-7)
CSAKRGRSSYEQYF

SEQ ID NO: 9693 - protein, 15 aa, Homo sapiens
  CDR3 for alpha chain variable domain of TCR clone 4847 (TRAV27, TRAJ38)
CAARRNAGNNRKLLW

SEQ ID NO: 9694 - protein, 13 aa, Homo sapiens
  CDR3 for beta chain variable domain of TCR clone 4847 (TRBV12-5, TRBJ2-3)
CASGDRQSDTQYF

SEQ ID NO: 9695 - protein, 14 aa, Homo sapiens
  CDR3 for alpha chain variable domain of TCR clone 4848 (TRAV12-2, TRAJ6)
CAVIASGGSYIPTF

SEQ ID NO: 9696 - protein, 16 aa, Homo sapiens
  CDR3 for beta chain variable domain of TCR clone 4848 (TRBV7-2, TRBJ2-3)
CASSLAGAGSGDTQYF

SEQ ID NO: 9697 - protein, 14 aa, Homo sapiens
  CDR3 for alpha chain variable domain of TCR clone 4849 (TRAV8-6, TRAJ53)
CAVTSGGSNYKLTF

SEQ ID NO: 9698 - protein, 11 aa, Homo sapiens
  CDR3 for beta chain variable domain of TCR clone 4849 (TRBV24-1, TRBJ2-3)
CATSDLDTQYF

SEQ ID NO: 9699 - protein, 14 aa, Homo sapiens
  CDR3 for alpha chain variable domain of TCR clone 4850 (TRAV13-1, TRAJ10)
CAAKEPGGGNKLTF

SEQ ID NO: 9700 - protein, 15 aa, Homo sapiens
  CDR3 for beta chain variable domain of TCR clone 4850 (TRBV27, TRBJ2-1)
CASSNGGGSSNEQFF

SEQ ID NO: 9701 - protein, 13 aa, Homo sapiens
  CDR3 for alpha chain variable domain of TCR clone 4851 (TRAV2, TRAJ40)
CAVVTSGTYKYIF

SEQ ID NO: 9702 - protein, 14 aa, Homo sapiens
  CDR3 for beta chain variable domain of TCR clone 4851 (TRBV19, TRBJ2-1)
RASPTFVLSGEQFF

SEQ ID NO: 9703 - protein, 15 aa, Homo sapiens
  CDR3 for alpha chain variable domain of TCR clone 4852 (TRAV1-2, TRAJ10)
CAVRGFTGGGNKLTF

SEQ ID NO: 9704 - protein, 16 aa, Homo sapiens
  CDR3 for beta chain variable domain of TCR clone 4852 (TRBV4-1, TRBJ2-1)
CASSQEAGQGSDEQFF

SEQ ID NO: 9705 - protein, 11 aa, Homo sapiens
  CDR3 for alpha chain variable domain of TCR clone 4853 (TRAV23/DV6, TRAJ49)
CAVAPVTSSIL

SEQ ID NO: 9706 - protein, 14 aa, Homo sapiens
  CDR3 for beta chain variable domain of TCR clone 4853 (TRBV19, TRBJ2-1)
CASPTFVLSGEQFF

SEQ ID NO: 9707 - protein, 19 aa, Homo sapiens
  CDR3 for alpha chain variable domain of TCR clone 4854 (TRAV2, TRAJ20)
ILQVREADAAVYRDCKLSF

SEQ ID NO: 9708 - protein, 15 aa, Homo sapiens
  CDR3 for beta chain variable domain of TCR clone 4854 (TRBV20-1, TRBJ2-5)
CSAEGTGGLQETQYF

SEQ ID NO: 9709 - protein, 14 aa, Homo sapiens
  CDR3 for alpha chain variable domain of TCR clone 4855 (TRAV12-1, TRAJ13)
CVVIDSGGYQKVTF

SEQ ID NO: 9710 - protein, 17 aa, Homo sapiens
  CDR3 for beta chain variable domain of TCR clone 4855 (TRBV15, TRBJ1-5)
CATSRAPPGTRNQPQHF

SEQ ID NO: 9711 - protein, 11 aa, Homo sapiens
  CDR3 for alpha chain variable domain of TCR clone 4856 (TRAV3, TRAJ21)
CAVGNFNKFYF

SEQ ID NO: 9712 - protein, 14 aa, Homo sapiens
  CDR3 for beta chain variable domain of TCR clone 4856 (TRBV25-1, TRBJ1-1)
CASTHLGGNTEAFF

SEQ ID NO: 9713 - protein, 14 aa, Homo sapiens
  CDR3 for alpha chain variable domain of TCR clone 4857 (TRAV12-1, TRAJ9)
CVVNIITGGFKTIF

SEQ ID NO: 9714 - protein, 17 aa, Homo sapiens
  CDR3 for beta chain variable domain of TCR clone 4857 (TRBV9, TRBJ2-1)
CASSVEPTGMARDEQFF

SEQ ID NO: 9715 - protein, 15 aa, Homo sapiens
  CDR3 for alpha chain variable domain of TCR clone 4858 (TRAV8-3, TRAJ45)
CASSYSGGGADGLTF

SEQ ID NO: 9716 - protein, 13 aa, Homo sapiens
  CDR3 for beta chain variable domain of TCR clone 4858 (TRBV10-3, TRBJ2-7)
CASKLTVNYEQYF

SEQ ID NO: 9717 - protein, 15 aa, Homo sapiens
  CDR3 for alpha chain variable domain of TCR clone 4859 (TRAV34, TRAJ38)
CGADFTPGNNRKLIW

SEQ ID NO: 9718 - protein, 14 aa, Homo sapiens
  CDR3 for beta chain variable domain of TCR clone 4859 (TRBV11-2, TRBJ2-3)
CASSLGGGANTQYF

SEQ ID NO: 9719 - protein, 13 aa, Homo sapiens
  CDR3 for alpha chain variable domain of TCR clone 4860 (TRAV30, TRAJ29)
CGTEDSGNTPLVF

SEQ ID NO: 9720 - protein, 15 aa, Homo sapiens
  CDR3 for beta chain variable domain of TCR clone 4860 (TRBV6-1, TRBJ2-3)
CASSERGGITDTQYF

SEQ ID NO: 9721 - protein, 14 aa, Homo sapiens
  CDR3 for alpha chain variable domain of TCR clone 4861 (TRAV8-3, TRAJ4)
CAVGAAGGYNKLIF

SEQ ID NO: 9722 - protein, 16 aa, Homo sapiens
  CDR3 for beta chain variable domain of TCR clone 4861 (TRBV19, TRBJ2-2)
CASRSPGTGATGELFF

SEQ ID NO: 9723 - protein, 13 aa, Homo sapiens
  CDR3 for alpha chain variable domain of TCR clone 4862 (TRAV12-3, TRAJ13)
CAMSSGGYQKVTF

SEQ ID NO: 9724 - protein, 17 aa, Homo sapiens
  CDR3 for beta chain variable domain of TCR clone 4862 (TRBV4-1, TRBJ1-4)
CASSQEGPRGVEEKLFF

SEQ ID NO: 9725 - protein, 14 aa, Homo sapiens
  CDR3 for alpha chain variable domain of TCR clone 4863 (TRAV8-3, TRAJ48)
CCGCGQFGNEKLTF

SEQ ID NO: 9726 - protein, 15 aa, Homo sapiens
  CDR3 for beta chain variable domain of TCR clone 4863 (TRBV28, TRBJ2-4)
CAAGSGTLLMGIQYF

SEQ ID NO: 9727 - protein, 12 aa, Homo sapiens
  CDR3 for alpha chain variable domain of TCR clone 4864 (TRAV12-3, TRAJ17)
CAMTLTGNKLNF

SEQ ID NO: 9728 - protein, 15 aa, Homo sapiens
  CDR3 for beta chain variable domain of TCR clone 4864 (TRBV20-1, TRBJ2-7)
CSARDRVSGMDEQYF

SEQ ID NO: 9729 - protein, 12 aa, Homo sapiens
  CDR3 for alpha chain variable domain of TCR clone 4865 (TRAV12-3, TRAJ17)
CAMTLTGNKLAF

SEQ ID NO: 9730 - protein, 15 aa, Homo sapiens
  CDR3 for beta chain variable domain of TCR clone 4865 (TRBV20-1, TRBJ2-7)
CSARDRVSGMDEQYF

SEQ ID NO: 9731 - protein, 18 aa, Homo sapiens
  CDR3 for alpha chain variable domain of TCR clone 4866 (TRAV21, TRAJ52)
CAVRPSPAGGTSYGKLTF

SEQ ID NO: 9732 - protein, 17 aa, Homo sapiens
  CDR3 for beta chain variable domain of TCR clone 4866 (TRBV13, TRBJ2-3)
RASSLSRVAGGRNTQYF

SEQ ID NO: 9733 - protein, 14 aa, Homo sapiens
  CDR3 for alpha chain variable domain of TCR clone 4867 (TRAV12-1, TRAJ12)
CVVTRIDSSYKLIF

SEQ ID NO: 9734 - protein, 13 aa, Homo sapiens
  CDR3 for beta chain variable domain of TCR clone 4867 (TRBV20-1, TRBJ1-1)
CSARGGGNTEAFF

SEQ ID NO: 9735 - protein, 10 aa, Homo sapiens
  CDR3 for alpha chain variable domain of TCR clone 4868 (TRAV38-2/DV8, TRAJ21)
CAYRSNKFYF

SEQ ID NO: 9736 - protein, 12 aa, Homo sapiens
  CDR3 for beta chain variable domain of TCR clone 4868 (TRBV11-3, TRBJ2-3)
CASSLWEDTQYF

SEQ ID NO: 9737 - protein, 16 aa, Homo sapiens
  CDR3 for alpha chain variable domain of TCR clone 4869 (TRAV14/DV4, TRAJ12)
CAMREVLMDSSYKLIF

SEQ ID NO: 9738 - protein, 14 aa, Homo sapiens
  CDR3 for beta chain variable domain of TCR clone 4869 (TRBV7-2, TRBJ2-5)
CASSFTQGQETQYF

SEQ ID NO: 9739 - protein, 14 aa, Homo sapiens
  CDR3 for alpha chain variable domain of TCR clone 4870 (TRAV1-2, TRAJ16)
CAVNRFSDGQKLLF

SEQ ID NO: 9740 - protein, 12 aa, Homo sapiens
  CDR3 for beta chain variable domain of TCR clone 4870 (TRBV20-1, TRBJ1-5)
CSAAGWDQPQHF

SEQ ID NO: 9741 - protein, 15 aa, Homo sapiens
  CDR3 for alpha chain variable domain of TCR clone 4871 (TRAV3, TRAJ5)
CAVRDLDTGRRALTF

SEQ ID NO: 9742 - protein, 15 aa, Homo sapiens
  CDR3 for beta chain variable domain of TCR clone 4871 (TRBV28, TRBJ2-5)
CASSPPWSYQETQYF

SEQ ID NO: 9743 - protein, 15 aa, Homo sapiens
  CDR3 for alpha chain variable domain of TCR clone 4872 (TRAV14/DV4, TRAJ22)
CNERGPPGSARQLTF

SEQ ID NO: 9744 - protein, 16 aa, Homo sapiens
  CDR3 for beta chain variable domain of TCR clone 4872 (TRBV19, TRBJ1-6)
CASSVAPVAGNSPLHF

SEQ ID NO: 9745 - protein, 14 aa, Homo sapiens
  CDR3 for alpha chain variable domain of TCR clone 4873 (TRAV1-2, TRAJ16)
CAVNRFSDGQKLLF

SEQ ID NO: 9746 - protein, 13 aa, Homo sapiens
  CDR3 for beta chain variable domain of TCR clone 4873 (TRBV20-1, TRBJ1-6)
CSAPTGLGSPLHF

SEQ ID NO: 9747 - protein, 14 aa, Homo sapiens
  CDR3 for alpha chain variable domain of TCR clone 4874 (TRAV26-1, TRAJ38)
CIADNAGNNRKLIW

SEQ ID NO: 9748 - protein, 13 aa, Homo sapiens
  CDR3 for beta chain variable domain of TCR clone 4874 (TRBV20-1, TRBJ1-1)
CSARGEGNTEAFF

SEQ ID NO: 9749 - protein, 14 aa, Homo sapiens
  CDR3 for alpha chain variable domain of TCR clone 4875 (TRAV26-1, TRAJ38)
CIADNAGNNRKLIW

SEQ ID NO: 9750 - protein, 13 aa, Homo sapiens
  CDR3 for beta chain variable domain of TCR clone 4875 (TRBV20-1, TRBJ1-1)
CSARGGGNTEAFF

SEQ ID NO: 9751 - protein, 14 aa, Homo sapiens
  CDR3 for alpha chain variable domain of TCR clone 4876 (TRAV23/DV6, TRAJ45)
CAASWGGGADGLTF

SEQ ID NO: 9752 - protein, 15 aa, Homo sapiens
  CDR3 for beta chain variable domain of TCR clone 4876 (TRBV4-2, TRBJ1-2)
CASSRNTGAGYGYTF

SEQ ID NO: 9753 - protein, 14 aa, Homo sapiens
  CDR3 for alpha chain variable domain of TCR clone 4877 (TRAV12-3, TRAJ10)
SHLPLTGGGNKLTF

SEQ ID NO: 9754 - protein, 13 aa, Homo sapiens
  CDR3 for beta chain variable domain of TCR clone 4877 (TRBV20-1, TRBJ1-6)
CSAPLGVGSPLHF

SEQ ID NO: 9755 - protein, 14 aa, Homo sapiens
  CDR3 for alpha chain variable domain of TCR clone 4878 (TRAV26-1, TRAJ38)
CIADNAGNNRKLIW

SEQ ID NO: 9756 - protein, 15 aa, Homo sapiens
  CDR3 for beta chain variable domain of TCR clone 4878 (TRBV27, TRBJ2-7)
CASSTAGTGSYEQYF

SEQ ID NO: 9757 - protein, 14 aa, Homo sapiens
  CDR3 for alpha chain variable domain of TCR clone 4879 (TRAV21, TRAJ32)
CCGDYGGATNRLIF

SEQ ID NO: 9758 - protein, 13 aa, Homo sapiens
  CDR3 for beta chain variable domain of TCR clone 4879 (TRBV2, TRBJ1-6)
CASGRGGISPLHF

SEQ ID NO: 9759 - protein, 12 aa, Homo sapiens
  CDR3 for alpha chain variable domain of TCR clone 4880 (TRAV12-3, TRAJ17)
CAMTLTGNKLTF

SEQ ID NO: 9760 - protein, 16 aa, Homo sapiens
  CDR3 for beta chain variable domain of TCR clone 4880 (TRBV15, TRBJ2-3)
CATSRDLGIVTDTQYF

SEQ ID NO: 9761 - protein, 15 aa, Homo sapiens
  CDR3 for alpha chain variable domain of TCR clone 4881 (TRAV17, TRAJ48)
CATDETNFGNEKLTF

SEQ ID NO: 9762 - protein, 14 aa, Homo sapiens
  CDR3 for beta chain variable domain of TCR clone 4881 (TRBV10-3, TRBJ1-3)
CAIRGQRAGNTIYF

SEQ ID NO: 9763 - protein, 15 aa, Homo sapiens
  CDR3 for alpha chain variable domain of TCR clone 4882 (TRAV12-3, TRAJ27)
CAMRAYNTNAGKSTF

SEQ ID NO: 9764 - protein, 13 aa, Homo sapiens
  CDR3 for beta chain variable domain of TCR clone 4882 (TRBV11-2, TRBJ2-5)
CASGRGPSETQYF

SEQ ID NO: 9765 - protein, 13 aa, Homo sapiens
  CDR3 for alpha chain variable domain of TCR clone 4883 (TRAV30, TRAJ18)
CGTEASTLGRLYF

SEQ ID NO: 9766 - protein, 15 aa, Homo sapiens
  CDR3 for beta chain variable domain of TCR clone 4883 (TRBV7-3, TRBJ2-1)
CASSRIGTGSSEQFF

SEQ ID NO: 9767 - protein, 14 aa, Homo sapiens
  CDR3 for alpha chain variable domain of TCR clone 4884 (TRAV38-1, TRAJ40)
CALRPTSGTYKYIF

SEQ ID NO: 9768 - protein, 16 aa, Homo sapiens
  CDR3 for beta chain variable domain of TCR clone 4884 (TRBV6-1, TRBJ1-2)
CASSGAWQGRSHGYTF

SEQ ID NO: 9769 - protein, 18 aa, Homo sapiens
  CDR3 for alpha chain variable domain of TCR clone 4885 (TRAV21, TRAJ52)
CAVRPSPAGGTSYGRLTF

SEQ ID NO: 9770 - protein, 17 aa, Homo sapiens
  CDR3 for beta chain variable domain of TCR clone 4885 (TRBV13, TRBJ2-3)
CASSLSRVAGGRNTQYF

SEQ ID NO: 9771 - protein, 18 aa, Homo sapiens
  CDR3 for alpha chain variable domain of TCR clone 4886 (TRAV21, TRAJ52)
CAVRPSPAGGTSYGKLTF

SEQ ID NO: 9772 - protein, 15 aa, Homo sapiens
  CDR3 for beta chain variable domain of TCR clone 4886 (TRBV20-1, TRBJ2-5)
CSATPLTGDQETQYF

SEQ ID NO: 9773 - protein, 11 aa, Homo sapiens
  CDR3 for alpha chain variable domain of TCR clone 4887 (TRAV3, TRAJ21)
CAVGNFNKFYF

SEQ ID NO: 9774 - protein, 16 aa, Homo sapiens
  CDR3 for beta chain variable domain of TCR clone 4887 (TRBV19, TRBJ2-1)
CASSKAGPSAYNEQFF

SEQ ID NO: 9775 - protein, 13 aa, Homo sapiens
  CDR3 for alpha chain variable domain of TCR clone 4888 (TRAV8-3, TRAJ41)
CAVGADSGYALNF

SEQ ID NO: 9776 - protein, 14 aa, Homo sapiens
  CDR3 for beta chain variable domain of TCR clone 4888 (TRBV2, TRBJ1-1)
CASRALLMNTEAFF

SEQ ID NO: 9777 - protein, 15 aa, Homo sapiens
  CDR3 for alpha chain variable domain of TCR clone 4889 (TRAV39, TRAJ42)
CAVVNYGGSQGNLIF

SEQ ID NO: 9778 - protein, 15 aa, Homo sapiens
  CDR3 for beta chain variable domain of TCR clone 4889 (TRBV10-3, TRBJ1-1)
CAISDLGRANTEAFF

SEQ ID NO: 9779 - protein, 11 aa, Homo sapiens
  CDR3 for alpha chain variable domain of TCR clone 4890 (TRAV2, TRAJ13)
CASGGYQKVTF

SEQ ID NO: 9780 - protein, 14 aa, Homo sapiens
  CDR3 for beta chain variable domain of TCR clone 4890 (TRBV18, TRBJ2-5)
CASSPGVSQETQYF

SEQ ID NO: 9781 - protein, 12 aa, Homo sapiens
  CDR3 for alpha chain variable domain of TCR clone 4891 (TRAV25, TRAJ35)
CAGIGFGNVLHC

SEQ ID NO: 9782 - protein, 15 aa, Homo sapiens
  CDR3 for beta chain variable domain of TCR clone 4891 (TRBV20-1, TRBJ2-5)
CSAPPRTGFGETQYF

SEQ ID NO: 9783 - protein, 13 aa, Homo sapiens
  CDR3 for alpha chain variable domain of TCR clone 4892 (TRAV12-3, TRAJ20)
CAMRRSNDYKLSF

SEQ ID NO: 9784 - protein, 15 aa, Homo sapiens
  CDR3 for beta chain variable domain of TCR clone 4892 (TRBV9, TRBJ2-3)
CASSVAGGRSDTQYF

SEQ ID NO: 9785 - protein, 18 aa, Homo sapiens
  CDR3 for alpha chain variable domain of TCR clone 4893 (TRAV12-3, TRAJ52)
CAMSVGGAGGTSYGKLTF

SEQ ID NO: 9786 - protein, 15 aa, Homo sapiens
  CDR3 for beta chain variable domain of TCR clone 4893 (TRBV27, TRBJ1-6)
CASSFDRGLGSPLHL

SEQ ID NO: 9787 - protein, 15 aa, Homo sapiens
  CDR3 for alpha chain variable domain of TCR clone 4894 (TRAV8-4, TRAJ6)
CAVSAPSGGSYIPTF

SEQ ID NO: 9788 - protein, 15 aa, Homo sapiens
  CDR3 for beta chain variable domain of TCR clone 4894 (TRBV7-3, TRBJ2-2)
CASKANGANTGELFF

SEQ ID NO: 9789 - protein, 14 aa, Homo sapiens
  CDR3 for alpha chain variable domain of TCR clone 4895 (TRAV1-2, TRAJ16)
CAVNRFSDGQKLLF

SEQ ID NO: 9790 - protein, 12 aa, Homo sapiens
  CDR3 for beta chain variable domain of TCR clone 4895 (TRBV6-5, TRBJ2-5)
CASSEGSETQYF

SEQ ID NO: 9791 - protein, 15 aa, Homo sapiens
  CDR3 for alpha chain variable domain of TCR clone 4896 (TRAV21, TRAJ53)
CATLNSGGSNYKLTF

SEQ ID NO: 9792 - protein, 13 aa, Homo sapiens
  CDR3 for beta chain variable domain of TCR clone 4896 (TRBV12-4, TRBJ2-7)
CASSFVPTAEQYF

SEQ ID NO: 9793 - protein, 17 aa, Homo sapiens
  CDR3 for alpha chain variable domain of TCR clone 4897 (TRAV3, TRAJ42)
CAVRDRDYGGSQGNLIF

SEQ ID NO: 9794 - protein, 15 aa, Homo sapiens
  CDR3 for beta chain variable domain of TCR clone 4897 (TRBV27, TRBJ1-6)
CASSFDRGLGSPLHF

SEQ ID NO: 9795 - protein, 11 aa, Homo sapiens
  CDR3 for alpha chain variable domain of TCR clone 4898 (TRAV13-1, TRAJ43)
CAASGANDMRF

SEQ ID NO: 9796 - protein, 14 aa, Homo sapiens
  CDR3 for beta chain variable domain of TCR clone 4898 (TRBV4-1, TRBJ1-1)
CASSPPGVNTEAFF

SEQ ID NO: 9797 - protein, 17 aa, Homo sapiens
  CDR3 for alpha chain variable domain of TCR clone 4899 (TRAV36/DV7, TRAJ52)
CAVAQRAGGTSYGKLTF

SEQ ID NO: 9798 - protein, 15 aa, Homo sapiens
  CDR3 for beta chain variable domain of TCR clone 4899 (TRBV20-1, TRBJ2-7)
CSAESGTSGAYEQYF

SEQ ID NO: 9799 - protein, 19 aa, Homo sapiens
  CDR3 for alpha chain variable domain of TCR clone 4900 (TRAV26-1, TRAJ50)
CCVLLHRQNPKTSYDKVIF

SEQ ID NO: 9800 - protein, 17 aa, Homo sapiens
  CDR3 for beta chain variable domain of TCR clone 4900 (TRBV4-1, TRBJ1-4)
CASSQEGPRGVEEKLFF

SEQ ID NO: 9801 - protein, 11 aa, Homo sapiens
  CDR3 for alpha chain variable domain of TCR clone 4901 (TRAV12-3, TRAJ6)
CAMSGSYIPTF

SEQ ID NO: 9802 - protein, 14 aa, Homo sapiens
  CDR3 for beta chain variable domain of TCR clone 4901 (TRBV7-2, TRBJ2-3)
CASSSGISTDTQYF

SEQ ID NO: 9803 - protein, 14 aa, Homo sapiens
  CDR3 for alpha chain variable domain of TCR clone 4902 (TRAV12-2, TRAJ13)
CAVKKTGGYQKVTF

SEQ ID NO: 9804 - protein, 13 aa, Homo sapiens
  CDR3 for beta chain variable domain of TCR clone 4902 (TRBV20-1, TRBJ2-3)
CSARLAGTDTQYF

SEQ ID NO: 9805 - protein, 11 aa, Homo sapiens
  CDR3 for alpha chain variable domain of TCR clone 4903 (TRAV2, TRAJ13)
CASGGYQKVTF

SEQ ID NO: 9806 - protein, 14 aa, Homo sapiens
  CDR3 for beta chain variable domain of TCR clone 4903 (TRBV6-1, TRBJ1-3)
CASVQGGGGNTIYF

SEQ ID NO: 9807 - protein, 15 aa, Homo sapiens
  CDR3 for alpha chain variable domain of TCR clone 4904 (TRAV14/DV4, TRAJ15)
CAMREGWQAGTALIF

SEQ ID NO: 9808 - protein, 14 aa, Homo sapiens
  CDR3 for beta chain variable domain of TCR clone 4904 (TRBV19, TRBJ2-5)
CASSMTGQQETQYF

SEQ ID NO: 9809 - protein, 13 aa, Homo sapiens
  CDR3 for alpha chain variable domain of TCR clone 4905 (TRAV2, TRAJ40)
CAVVTSGTYNYIF

SEQ ID NO: 9810 - protein, 14 aa, Homo sapiens
  CDR3 for beta chain variable domain of TCR clone 4905 (TRBV19, TRBJ2-1)
CASPTFVLSGEQFF

SEQ ID NO: 9811 - protein, 18 aa, Homo sapiens
  CDR3 for alpha chain variable domain of TCR clone 4906 (TRAV12-3, TRAJ52)
CAMSRTNAGGTSYGKLTF

SEQ ID NO: 9812 - protein, 17 aa, Homo sapiens
  CDR3 for beta chain variable domain of TCR clone 4906 (TRBV13, TRBJ2-3)
CASSLSRVAGGRNTQYF

SEQ ID NO: 9813 - protein, 13 aa, Homo sapiens
  CDR3 for alpha chain variable domain of TCR clone 4907 (TRAV13-2, TRAJ13)
CAERPGGYQKVTF

SEQ ID NO: 9814 - protein, 18 aa, Homo sapiens
  CDR3 for beta chain variable domain of TCR clone 4907 (TRBV7-6, TRBJ2-1)
CASSPRTSGMSSYNEQFF

SEQ ID NO: 9815 - protein, 19 aa, Homo sapiens
  CDR3 for alpha chain variable domain of TCR clone 4908 (TRAV13-1, TRAJ52)
CAASPYQNAGGTSYGKLTF

SEQ ID NO: 9816 - protein, 13 aa, Homo sapiens
  CDR3 for beta chain variable domain of TCR clone 4908 (TRBV15, TRBJ2-7)
CATSTTGHYEQYF

SEQ ID NO: 9817 - protein, 14 aa, Homo sapiens
  CDR3 for alpha chain variable domain of TCR clone 4909 (TRAV3, TRAJ5)
CAVRSDTGRRALTF

SEQ ID NO: 9818 - protein, 14 aa, Homo sapiens
  CDR3 for beta chain variable domain of TCR clone 4909 (TRBV7-2, TRBJ2-3)
CASSFVMPTDTQYF

SEQ ID NO: 9819 - protein, 12 aa, Homo sapiens
  CDR3 for alpha chain variable domain of TCR clone 4910 (TRAV3, TRAJ20)
CAVRDPDYKLSF

SEQ ID NO: 9820 - protein, 11 aa, Homo sapiens
  CDR3 for beta chain variable domain of TCR clone 4910 (TRBV28, TRBJ2-5)
CASSLKETQYF

SEQ ID NO: 9821 - protein, 12 aa, Homo sapiens
  CDR3 for alpha chain variable domain of TCR clone 4911 (TRAV13-1, TRAJ21)
CATTINFNKFYF

SEQ ID NO: 9822 - protein, 14 aa, Homo sapiens
  CDR3 for beta chain variable domain of TCR clone 4911 (TRBV7-2, TRBJ2-7)
CASSPKTSFYEQYF

SEQ ID NO: 9823 - protein, 13 aa, Homo sapiens
  CDR3 for alpha chain variable domain of TCR clone 4912 (TRAV12-1, TRAJ42)
CVVNDPRQGNLIF

SEQ ID NO: 9824 - protein, 15 aa, Homo sapiens
  CDR3 for beta chain variable domain of TCR clone 4912 (TRBV20-1, TRBJ2-3)
CSARESRGQGYTQYF

SEQ ID NO: 9825 - protein, 13 aa, Homo sapiens
  CDR3 for alpha chain variable domain of TCR clone 4913 (TRAV36/DV7, TRAJ21)
CAVEAYNFNKFYF

SEQ ID NO: 9826 - protein, 14 aa, Homo sapiens
  CDR3 for beta chain variable domain of TCR clone 4913 (TRBV6-1, TRBJ1-1)
CASSGTGLNTEAFF

SEQ ID NO: 9827 - protein, 14 aa, Homo sapiens
  CDR3 for alpha chain variable domain of TCR clone 4914 (TRAV29/DV5, TRAJ36)
CAARRKTGANNLFF

SEQ ID NO: 9828 - protein, 15 aa, Homo sapiens
  CDR3 for beta chain variable domain of TCR clone 4914 (TRBV19, TRBJ1-6)
CASSTQGAVGSPLHF

SEQ ID NO: 9829 - protein, 12 aa, Homo sapiens
  CDR3 for alpha chain variable domain of TCR clone 4915 (TRAV12-3, TRAJ17)
CAMTLTGNKLTF

SEQ ID NO: 9830 - protein, 12 aa, Homo sapiens
  CDR3 for beta chain variable domain of TCR clone 4915 (TRBV7-8, TRBJ2-7)
CASSLGDREQYF

SEQ ID NO: 9831 - protein, 14 aa, Homo sapiens
  CDR3 for alpha chain variable domain of TCR clone 4916 (TRAV1-2, TRAJ16)
CAVNRFSDGQKLLF

SEQ ID NO: 9832 - protein, 16 aa, Homo sapiens
  CDR3 for beta chain variable domain of TCR clone 4916 (TRBV5-1, TRBJ2-5)
CASSLRRTSGQETQYF

SEQ ID NO: 9833 - protein, 11 aa, Homo sapiens
  CDR3 for alpha chain variable domain of TCR clone 4917 (TRAV12-3, TRAJ43)
CAMSVSNDMRF

SEQ ID NO: 9834 - protein, 18 aa, Homo sapiens
  CDR3 for beta chain variable domain of TCR clone 4917 (TRBV20-1, TRBJ2-3)
CSASGLAGGPGTTDTQYF

SEQ ID NO: 9835 - protein, 11 aa, Homo sapiens
  CDR3 for alpha chain variable domain of TCR clone 4918 (TRAV1-2, TRAJ20)
CAVANDYKLSF

SEQ ID NO: 9836 - protein, 14 aa, Homo sapiens
  CDR3 for beta chain variable domain of TCR clone 4918 (TRBV12-5, TRBJ2-5)
CASGSRTHQETQYF

SEQ ID NO: 9837 - protein, 16 aa, Homo sapiens
  CDR3 for alpha chain variable domain of TCR clone 4919 (TRAV3, TRAJ13)
CAVRDFESGGYQKVTF

SEQ ID NO: 9838 - protein, 16 aa, Homo sapiens
  CDR3 for beta chain variable domain of TCR clone 4919 (TRBV27, TRBJ2-5)
CASSYGPGGQKETQYF

SEQ ID NO: 9839 - protein, 14 aa, Homo sapiens
  CDR3 for alpha chain variable domain of TCR clone 4920 (TRAV25, TRAJ20)
CAGKGRWDDYKLSF

SEQ ID NO: 9840 - protein, 12 aa, Homo sapiens
  CDR3 for beta chain variable domain of TCR clone 4920 (TRBV12-5, TRBJ2-3)
CASQASTDTQYF

SEQ ID NO: 9841 - protein, 14 aa, Homo sapiens
  CDR3 for alpha chain variable domain of TCR clone 4921 (TRAV8-2, TRAJ44)
CVVSLTGTASKLTF

SEQ ID NO: 9842 - protein, 15 aa, Homo sapiens
  CDR3 for beta chain variable domain of TCR clone 4921 (TRBV7-2, TRBJ2-1)
CASSFSGGIYNEQFF

SEQ ID NO: 9843 - protein, 15 aa, Homo sapiens
  CDR3 for alpha chain variable domain of TCR clone 4922 (TRAV17, TRAJ57)
CATDWTPGGSEKLVF

SEQ ID NO: 9844 - protein, 15 aa, Homo sapiens
  CDR3 for beta chain variable domain of TCR clone 4922 (TRBV27, TRBJ2-1)
CASSLAGGPFNEQFF

SEQ ID NO: 9845 - protein, 16 aa, Homo sapiens
  CDR3 for alpha chain variable domain of TCR clone 4923 (TRAV30, TRAJ24)
CGTEIVDADSWGKFQF

SEQ ID NO: 9846 - protein, 16 aa, Homo sapiens
  CDR3 for beta chain variable domain of TCR clone 4923 (TRBV20-1, TRBJ1-1)
CSARALTQGMNTEAFF

SEQ ID NO: 9847 - protein, 14 aa, Homo sapiens
  CDR3 for alpha chain variable domain of TCR clone 4924 (TRAV1-2, TRAJ8)
CAVREDTGFQKLVF

SEQ ID NO: 9848 - protein, 13 aa, Homo sapiens
  CDR3 for beta chain variable domain of TCR clone 4924 (TRBV27, TRBJ2-7)
CASSLTTGYEQYF

SEQ ID NO: 9849 - protein, 12 aa, Homo sapiens
  CDR3 for alpha chain variable domain of TCR clone 4925 (TRAV35, TRAJ28)
GVEGAGSYQLTF

SEQ ID NO: 9850 - protein, 13 aa, Homo sapiens
  CDR3 for beta chain variable domain of TCR clone 4925 (TRBV9, TRBJ2-1)
CASSPSGGSEQFF

SEQ ID NO: 9851 - protein, 14 aa, Homo sapiens
  CDR3 for alpha chain variable domain of TCR clone 4926 (TRAV26-1, TRAJ38)
CIADNAGNNRKLIW

SEQ ID NO: 9852 - protein, 17 aa, Homo sapiens
  CDR3 for beta chain variable domain of TCR clone 4926 (TRBV13, TRBJ2-3)
CASSLSRVAGGRNTQYF

SEQ ID NO: 9853 - protein, 14 aa, Homo sapiens
  CDR3 for alpha chain variable domain of TCR clone 4927 (TRAV3, TRAJ26)
CAVRDYNYGQNFVF

SEQ ID NO: 9854 - protein, 15 aa, Homo sapiens
  CDR3 for beta chain variable domain of TCR clone 4927 (TRBV20-1, TRBJ2-5)
CSANPPGRGGETQYF

SEQ ID NO: 9855 - protein, 14 aa, Homo sapiens
  CDR3 for alpha chain variable domain of TCR clone 4928 (TRAV10, TRAJ36)
CVVKYEGGANNLFF

SEQ ID NO: 9856 - protein, 16 aa, Homo sapiens
  CDR3 for beta chain variable domain of TCR clone 4928 (TRBV7-3, TRBJ2-2)
CASSLKRGTLSGELFF

SEQ ID NO: 9857 - protein, 13 aa, Homo sapiens
  CDR3 for alpha chain variable domain of TCR clone 4929 (TRAV2, TRAJ24)
CAVEDSGRGKFQF

SEQ ID NO: 9858 - protein, 13 aa, Homo sapiens
  CDR3 for beta chain variable domain of TCR clone 4929 (TRBV10-3, TRBJ2-7)
CASKLAVNYEQYF

SEQ ID NO: 9859 - protein, 10 aa, Homo sapiens
  CDR3 for alpha chain variable domain of TCR clone 4930 (TRAV23/DV6, TRAJ57)
CAASSTLSQG

SEQ ID NO: 9860 - protein, 14 aa, Homo sapiens
  CDR3 for beta chain variable domain of TCR clone 4930 (TRBV13, TRBJ2-5)
CASSLGQGKETQYF

SEQ ID NO: 9861 - protein, 14 aa, Homo sapiens
  CDR3 for alpha chain variable domain of TCR clone 4931 (TRAV1-2, TRAJ16)
CAVNRFSDGQKLLF

SEQ ID NO: 9862 - protein, 16 aa, Homo sapiens
  CDR3 for beta chain variable domain of TCR clone 4931 (TRBV12-4, TRBJ2-1)
CASSAVGQGNGDEQFF

SEQ ID NO: 9863 - protein, 14 aa, Homo sapiens
  CDR3 for alpha chain variable domain of TCR clone 4932 (TRAV12-3, TRAJ10)
SHLPLTGGGNKLTF

SEQ ID NO: 9864 - protein, 16 aa, Homo sapiens
  CDR3 for beta chain variable domain of TCR clone 4932 (TRBV18, TRBJ1-3)
CASSLGILNGENTIYF

SEQ ID NO: 9865 - protein, 14 aa, Homo sapiens
  CDR3 for alpha chain variable domain of TCR clone 4933 (TRAV20, TRAJ4)
CAVRLGGGYNKLIF

SEQ ID NO: 9866 - protein, 21 aa, Homo sapiens
  CDR3 for beta chain variable domain of TCR clone 4933 (TRBV15, TRBJ2-1)
AWGTQPCTCVPPAEVDTARFF

SEQ ID NO: 9867 - protein, 15 aa, Homo sapiens
  CDR3 for alpha chain variable domain of TCR clone 4934 (TRAV13-2, TRAJ10)
CAENKIGGGGNKLTF

SEQ ID NO: 9868 - protein, 15 aa, Homo sapiens
  CDR3 for beta chain variable domain of TCR clone 4934 (TRBV5-1, TRBJ1-2)
CASSPGDRGSYGYTF

SEQ ID NO: 9869 - protein, 15 aa, Homo sapiens
  CDR3 for alpha chain variable domain of TCR clone 4935 (TRAV8-2, TRAJ42)
CVVSAYMGSQGNLIF

SEQ ID NO: 9870 - protein, 11 aa, Homo sapiens
  CDR3 for beta chain variable domain of TCR clone 4935 (TRBV5-1, TRBJ2-1)
CASSIGQEQFF

SEQ ID NO: 9871 - protein, 15 aa, Homo sapiens
  CDR3 for alpha chain variable domain of TCR clone 4936 (TRAV10, TRAJ10)
CVVSADTGGGNKLTF

SEQ ID NO: 9872 - protein, 15 aa, Homo sapiens
  CDR3 for beta chain variable domain of TCR clone 4936 (TRBV11-3, TRBJ2-7)
CASSLLSGSSYEQYF

SEQ ID NO: 9873 - protein, 13 aa, Homo sapiens
  CDR3 for alpha chain variable domain of TCR clone 4937 (TRAV8-6, TRAJ49)
CAVITNTGNQFYF

SEQ ID NO: 9874 - protein, 13 aa, Homo sapiens
  CDR3 for beta chain variable domain of TCR clone 4937 (TRBV7-9, TRBJ1-2)
CASSLKQNYGYTF

SEQ ID NO: 9875 - protein, 13 aa, Homo sapiens
  CDR3 for alpha chain variable domain of TCR clone 4938 (TRAV1-1, TRAJ33)
CAVRRDSNYQLIW

SEQ ID NO: 9876 - protein, 16 aa, Homo sapiens
  CDR3 for beta chain variable domain of TCR clone 4938 (TRBV6-1, TRBJ2-2)
CASSAFRGGDTGELFF

SEQ ID NO: 9877 - protein, 15 aa, Homo sapiens
  CDR3 for alpha chain variable domain of TCR clone 4939 (TRAV14/DV4, TRAJ12)
CAMREGWDSSYKLIF

SEQ ID NO: 9878 - protein, 16 aa, Homo sapiens
  CDR3 for beta chain variable domain of TCR clone 4939 (TRBV2, TRBJ2-5)
CASSETQGVGEETQYF

SEQ ID NO: 9879 - protein, 11 aa, Homo sapiens
  CDR3 for alpha chain variable domain of TCR clone 4940 (TRAV16, TRAJ31)
CALFNNARLMF

SEQ ID NO: 9880 - protein, 14 aa, Homo sapiens
  CDR3 for beta chain variable domain of TCR clone 4940 (TRBV15, TRBJ1-1)
CATSREWGNTEAFF

SEQ ID NO: 9881 - protein, 11 aa, Homo sapiens
  CDR3 for alpha chain variable domain of TCR clone 4941 (TRAV21, TRAJ20)
CCRVNDYKLSF

SEQ ID NO: 9882 - protein, 15 aa, Homo sapiens
  CDR3 for beta chain variable domain of TCR clone 4941 (TRBV2, TRBJ2-2)
CASSRQGPNTGELFF

SEQ ID NO: 9883 - protein, 15 aa, Homo sapiens
  CDR3 for alpha chain variable domain of TCR clone 4942 (TRAV8-4, TRAJ6)
CAVSAPSGGSYIPTF

SEQ ID NO: 9884 - protein, 15 aa, Homo sapiens
  CDR3 for beta chain variable domain of TCR clone 4942 (TRBV2, TRBJ2-1)
CASSEARSAYNEQFF

SEQ ID NO: 9885 - protein, 14 aa, Homo sapiens
  CDR3 for alpha chain variable domain of TCR clone 4943 (TRAV1-2, TRAJ16)
CAVNRFSDGQKLLF

SEQ ID NO: 9886 - protein, 14 aa, Homo sapiens
  CDR3 for beta chain variable domain of TCR clone 4943 (TRBV11-1, TRBJ2-7)
CASSFRQGSYEQYF

SEQ ID NO: 9887 - protein, 12 aa, Homo sapiens
  CDR3 for alpha chain variable domain of TCR clone 4944 (TRAV12-3, TRAJ17)
CAMTLTGNKLTF

SEQ ID NO: 9888 - protein, 15 aa, Homo sapiens
  CDR3 for beta chain variable domain of TCR clone 4944 (TRBV19, TRBJ2-5)
CASHGLAGAQETQYF

SEQ ID NO: 9889 - protein, 15 aa, Homo sapiens
  CDR3 for alpha chain variable domain of TCR clone 4945 (TRAV26-1, TRAJ53)
CIVRVEGGSNYKLTF

SEQ ID NO: 9890 - protein, 14 aa, Homo sapiens
  CDR3 for beta chain variable domain of TCR clone 4945 (TRBV4-3, TRBJ2-1)
CASSQDRWRGEQFF

SEQ ID NO: 9891 - protein, 12 aa, Homo sapiens
  CDR3 for alpha chain variable domain of TCR clone 4946 (TRAV3, TRAJ31)
CAAQRANARLMF

SEQ ID NO: 9892 - protein, 16 aa, Homo sapiens
  CDR3 for beta chain variable domain of TCR clone 4946 (TRBV4-2, TRBJ1-1)
CASSPSPGRAAPEAFF

SEQ ID NO: 9893 - protein, 14 aa, Homo sapiens
  CDR3 for alpha chain variable domain of TCR clone 4947 (TRAV17, TRAJ23)
CATALGGQGGKLIF

SEQ ID NO: 9894 - protein, 13 aa, Homo sapiens
  CDR3 for beta chain variable domain of TCR clone 4947 (TRBV3-1, TRBJ2-5)
CASSPPAAETQYF

SEQ ID NO: 9895 - protein, 11 aa, Homo sapiens
  CDR3 for alpha chain variable domain of TCR clone 4948 (TRAV21, TRAJ41)
CAVRSGYALNF

SEQ ID NO: 9896 - protein, 13 aa, Homo sapiens
  CDR3 for beta chain variable domain of TCR clone 4948 (TRBV7-9, TRBJ1-2)
CASSLKQNYGYTV

SEQ ID NO: 9897 - protein, 14 aa, Homo sapiens
  CDR3 for alpha chain variable domain of TCR clone 4949 (TRAV12-3, TRAJ42)
CAMNYGGSQGNLIF

SEQ ID NO: 9898 - protein, 14 aa, Homo sapiens
  CDR3 for beta chain variable domain of TCR clone 4949 (TRBV7-2, TRBJ2-5)
CASSFTQGQETQYF

SEQ ID NO: 9899 - protein, 14 aa, Homo sapiens
  CDR3 for alpha chain variable domain of TCR clone 4950 (TRAV1-2, TRAJ16)
CAVNRFSDGQKLLF

SEQ ID NO: 9900 - protein, 16 aa, Homo sapiens
  CDR3 for beta chain variable domain of TCR clone 4950 (TRBV20-1, TRBJ1-2)
CSASMGQGVANYGYTF

SEQ ID NO: 9901 - protein, 17 aa, Homo sapiens
  CDR3 for alpha chain variable domain of TCR clone 4951 (TRAV8-4, TRAJ53)
CAVSGPRSEGSNYKLTF

SEQ ID NO: 9902 - protein, 14 aa, Homo sapiens
  CDR3 for beta chain variable domain of TCR clone 4951 (TRBV7-3, TRBJ2-1)
CASSALAGGPEQFF

SEQ ID NO: 9903 - protein, 15 aa, Homo sapiens
  CDR3 for alpha chain variable domain of TCR clone 4952 (TRAV12-1, TRAJ8)
CVVNVENTGFQKLVF

SEQ ID NO: 9904 - protein, 16 aa, Homo sapiens
  CDR3 for beta chain variable domain of TCR clone 4952 (TRBV7-2, TRBJ2-7)
CASSLEAGGPWYEQYF

SEQ ID NO: 9905 - protein, 15 aa, Homo sapiens
  CDR3 for alpha chain variable domain of TCR clone 4953 (TRAV40, TRAJ53)
CLLANSGGSNYKLTF

SEQ ID NO: 9906 - protein, 15 aa, Homo sapiens
  CDR3 for beta chain variable domain of TCR clone 4953 (TRBV7-6, TRBJ2-2)
CASRRTSGNTGELFF

SEQ ID NO: 9907 - protein, 14 aa, Homo sapiens
  CDR3 for alpha chain variable domain of TCR clone 4954 (TRAV13-2, TRAJ22)
CADGTLGSARQLTF

SEQ ID NO: 9908 - protein, 15 aa, Homo sapiens
  CDR3 for beta chain variable domain of TCR clone 4954 (TRBV6-3, TRBJ2-7)
CASSSPGTVFYEQYF

SEQ ID NO: 9909 - protein, 14 aa, Homo sapiens
  CDR3 for alpha chain variable domain of TCR clone 4955 (TRAV17, TRAJ57)
CATDPQGGSEKLVF

SEQ ID NO: 9910 - protein, 16 aa, Homo sapiens
  CDR3 for beta chain variable domain of TCR clone 4955 (TRBV27, TRBJ2-2)
CASSFRGLVRTGELFF

SEQ ID NO: 9911 - protein, 12 aa, Homo sapiens
  CDR3 for alpha chain variable domain of TCR clone 4956 (TRAV16, TRAJ10)
CSRTGGGNKLTF

SEQ ID NO: 9912 - protein, 14 aa, Homo sapiens
  CDR3 for beta chain variable domain of TCR clone 4956 (TRBV7-2, TRBJ1-2)
CASSQTGSTYGYTF

SEQ ID NO: 9913 - protein, 14 aa, Homo sapiens
  CDR3 for alpha chain variable domain of TCR clone 4957 (TRAV23/DV6, TRAJ6)
CAAIPSGGSYIPTF

SEQ ID NO: 9914 - protein, 17 aa, Homo sapiens
  CDR3 for beta chain variable domain of TCR clone 4957 (TRBV7-2, TRBJ2-3)
CASSLGGRAAWRDTQYF

SEQ ID NO: 9915 - protein, 23 aa, Homo sapiens
  CDR3 for alpha chain variable domain of TCR clone 4958 (TRAV12-2, TRAJ22)
CAVSFRVHPGPPIVSGSARQLTF

SEQ ID NO: 9916 - protein, 13 aa, Homo sapiens
  CDR3 for beta chain variable domain of TCR clone 4958 (TRBV12-4, TRBJ1-2)
CASSLDSNYGYTF

SEQ ID NO: 9917 - protein, 13 aa, Homo sapiens
  CDR3 for alpha chain variable domain of TCR clone 4959 (TRAV8-1, TRAJ34)
CAVNAGNTDKLIF

SEQ ID NO: 9918 - protein, 13 aa, Homo sapiens
  CDR3 for beta chain variable domain of TCR clone 4959 (TRBV20-1, TRBJ2-1)
CSAGAGTYNEQFF

SEQ ID NO: 9919 - protein, 14 aa, Homo sapiens
  CDR3 for alpha chain variable domain of TCR clone 4960 (TRAV17, TRAJ32)
CATDPGGAANKLIF

SEQ ID NO: 9920 - protein, 14 aa, Homo sapiens
  CDR3 for beta chain variable domain of TCR clone 4960 (TRBV2, TRBJ1-5)
CASSENRGGQPQHF

SEQ ID NO: 9921 - protein, 13 aa, Homo sapiens
  CDR3 for alpha chain variable domain of TCR clone 4961 (TRAV8-3, TRAJ44)
CAVVPGTASKLTF

SEQ ID NO: 9922 - protein, 13 aa, Homo sapiens
  CDR3 for beta chain variable domain of TCR clone 4961 (TRBV10-3, TRBJ2-7)
CASKLAVNYEQYF

SEQ ID NO: 9923 - protein, 13 aa, Homo sapiens
  CDR3 for alpha chain variable domain of TCR clone 4962 (TRAV17, TRAJ26)
CATVDNYGQNFVF

SEQ ID NO: 9924 - protein, 13 aa, Homo sapiens
  CDR3 for beta chain variable domain of TCR clone 4962 (TRBV14, TRBJ1-1)
CASSREFGTEAFF

SEQ ID NO: 9925 - protein, 17 aa, Homo sapiens
  CDR3 for alpha chain variable domain of TCR clone 4963 (TRAV12-1, TRAJ32)
CVVNMQGYGGATNKLIF

SEQ ID NO: 9926 - protein, 13 aa, Homo sapiens
  CDR3 for beta chain variable domain of TCR clone 4963 (TRBV6-6, TRBJ2-1)
CASSLHQGDEQFF

SEQ ID NO: 9927 - protein, 14 aa, Homo sapiens
  CDR3 for alpha chain variable domain of TCR clone 4964 (TRAV12-2, TRAJ40)
YAVKIPSGTYKYIF

SEQ ID NO: 9928 - protein, 13 aa, Homo sapiens
  CDR3 for beta chain variable domain of TCR clone 4964 (TRBV7-9, TRBJ1-2)
CASSLKQNYGYTF

SEQ ID NO: 9929 - protein, 13 aa, Homo sapiens
  CDR3 for alpha chain variable domain of TCR clone 4965 (TRAV12-2, TRAJ15)
CAVFNQAGTALIF

SEQ ID NO: 9930 - protein, 14 aa, Homo sapiens
  CDR3 for beta chain variable domain of TCR clone 4965 (TRBV7-8, TRBJ1-5)
CQQPGGGADQPQHF

SEQ ID NO: 9931 - protein, 16 aa, Homo sapiens
  CDR3 for alpha chain variable domain of TCR clone 4966 (TRAV12-3, TRAJ53)
CAMSPGRGGSNYKLTF

SEQ ID NO: 9932 - protein, 11 aa, Homo sapiens
  CDR3 for beta chain variable domain of TCR clone 4966 (TRBV29-1, TRBJ2-5)
CSEDRTGTQYF

SEQ ID NO: 9933 - protein, 14 aa, Homo sapiens
  CDR3 for alpha chain variable domain of TCR clone 4967 (TRAV12-3, TRAJ7)
CAMSEIGGNNRLAF

SEQ ID NO: 9934 - protein, 13 aa, Homo sapiens
  CDR3 for beta chain variable domain of TCR clone 4967 (TRBV9, TRBJ1-1)
CASSVARNPEAFF

SEQ ID NO: 9935 - protein, 16 aa, Homo sapiens
  CDR3 for alpha chain variable domain of TCR clone 4968 (TRAV30, TRAJ24)
CGTEIVDADSWGKFQF

SEQ ID NO: 9936 - protein, 14 aa, Homo sapiens
  CDR3 for beta chain variable domain of TCR clone 4968 (TRBV18, TRBJ2-3)
CASSPRTSTDTQYF

SEQ ID NO: 9937 - protein, 21 aa, Homo sapiens
  CDR3 for alpha chain variable domain of TCR clone 4969 (TRAV35, TRAJ52)
CWAGYADGPNAGGTSYGKLTF

SEQ ID NO: 9938 - protein, 12 aa, Homo sapiens
  CDR3 for beta chain variable domain of TCR clone 4969 (TRBV5-1, TRBJ2-7)
CASSFRGYEQYF

SEQ ID NO: 9939 - protein, 15 aa, Homo sapiens
  CDR3 for alpha chain variable domain of TCR clone 4970 (TRAV3, TRAJ9)
CAVRDINTGGFKTIF

SEQ ID NO: 9940 - protein, 13 aa, Homo sapiens
  CDR3 for beta chain variable domain of TCR clone 4970 (TRBV19, TRBJ2-7)
CASSIPSVREQYF

SEQ ID NO: 9941 - protein, 13 aa, Homo sapiens
  CDR3 for alpha chain variable domain of TCR clone 4971 (TRAV13-1, TRAJ5)
CAAEHTGRRALTF

SEQ ID NO: 9942 - protein, 15 aa, Homo sapiens
  CDR3 for beta chain variable domain of TCR clone 4971 (TRBV6-1, TRBJ2-1)
CASSELRGQYNEQFF

SEQ ID NO: 9943 - protein, 21 aa, Homo sapiens
  CDR3 for alpha chain variable domain of TCR clone 4972 (TRAV1-1, TRAJ6)
CLLLLRCERLERTGGSYIPTF

SEQ ID NO: 9944 - protein, 15 aa, Homo sapiens
  CDR3 for beta chain variable domain of TCR clone 4972 (TRBV7-2, TRBJ2-3)
CASSLVVRGPDTQYF

SEQ ID NO: 9945 - protein, 13 aa, Homo sapiens
  CDR3 for alpha chain variable domain of TCR clone 4973 (TRAV12-3, TRAJ43)
CAMRPYNNNDMRF

SEQ ID NO: 9946 - protein, 16 aa, Homo sapiens
  CDR3 for beta chain variable domain of TCR clone 4973 (TRBV11-2, TRBJ2-1)
CASSLLLLSSYNEQFF

SEQ ID NO: 9947 - protein, 15 aa, Homo sapiens
  CDR3 for alpha chain variable domain of TCR clone 4974 (TRAV3, TRAJ22)
CAVRDRGGSARQLTF

SEQ ID NO: 9948 - protein, 15 aa, Homo sapiens
  CDR3 for beta chain variable domain of TCR clone 4974 (TRBV11-2, TRBJ1-1)
CASSSRSSLLLSLDK

SEQ ID NO: 9949 - protein, 11 aa, Homo sapiens
  CDR3 for alpha chain variable domain of TCR clone 4975 (TRAV21, TRAJ39)
LLVNAGNMLTF

SEQ ID NO: 9950 - protein, 17 aa, Homo sapiens
  CDR3 for beta chain variable domain of TCR clone 4975 (TRBV7-8, TRBJ2-6)
CASSAGTGGAGANVLTF

SEQ ID NO: 9951 - protein, 11 aa, Homo sapiens
  CDR3 for alpha chain variable domain of TCR clone 4976 (TRAV3, TRAJ21)
CAVGNFNKFYF

SEQ ID NO: 9952 - protein, 16 aa, Homo sapiens
  CDR3 for beta chain variable domain of TCR clone 4976 (TRBV19, TRBJ2-1)
CASSKAGPSSYNGQFF

SEQ ID NO: 9953 - protein, 15 aa, Homo sapiens
  CDR3 for alpha chain variable domain of TCR clone 4977 (TRAV12-1, TRAJ47)
CVVTNRLKGGNKLVF

SEQ ID NO: 9954 - protein, 19 aa, Homo sapiens
  CDR3 for beta chain variable domain of TCR clone 4977 (TRBV20-1, TRBJ2-5)
CSARPQGLAGTSKSGTQYF

SEQ ID NO: 9955 - protein, 13 aa, Homo sapiens
  CDR3 for alpha chain variable domain of TCR clone 4978 (TRAV8-1, TRAJ28)
CAVSGAGSYQLTF

SEQ ID NO: 9956 - protein, 14 aa, Homo sapiens
  CDR3 for beta chain variable domain of TCR clone 4978 (TRBV19, TRBJ2-5)
CASSMTGQQETQYF

SEQ ID NO: 9957 - protein, 17 aa, Homo sapiens
  CDR3 for alpha chain variable domain of TCR clone 4979 (TRAV4, )
CLVDIQNPDPAVYQLRD

SEQ ID NO: 9958 - protein, 15 aa, Homo sapiens
  CDR3 for beta chain variable domain of TCR clone 4979 (TRBV20-1, TRBJ1-5)
CSASRRGDLGQPQHF

SEQ ID NO: 9959 - protein, 12 aa, Homo sapiens
  CDR3 for alpha chain variable domain of TCR clone 4980 (TRAV13-1, TRAJ21)
CAAKEGFNKFYF

SEQ ID NO: 9960 - protein, 16 aa, Homo sapiens
  CDR3 for beta chain variable domain of TCR clone 4980 (TRBV5-4, TRBJ2-3)
CASQQPGAGGADTQYF

SEQ ID NO: 9961 - protein, 13 aa, Homo sapiens
  CDR3 for alpha chain variable domain of TCR clone 4981 (TRAV2, TRAJ40)
CAVVTSGTYKYIF

SEQ ID NO: 9962 - protein, 14 aa, Homo sapiens
  CDR3 for beta chain variable domain of TCR clone 4981 (TRBV19, TRBJ2-1)
CASPTSVLSGEQFF

SEQ ID NO: 9963 - protein, 14 aa, Homo sapiens
  CDR3 for alpha chain variable domain of TCR clone 4982 (TRAV13-1, TRAJ35)
CAASKGGFGNVLHC

SEQ ID NO: 9964 - protein, 16 aa, Homo sapiens
  CDR3 for beta chain variable domain of TCR clone 4982 (TRBV2, TRBJ2-3)
CQHRGAPRRWTDTQYF

SEQ ID NO: 9965 - protein, 10 aa, Homo sapiens
  CDR3 for alpha chain variable domain of TCR clone 4983 (TRAV12-3, TRAJ49)
CAVHGNQFYF

SEQ ID NO: 9966 - protein, 12 aa, Homo sapiens
  CDR3 for beta chain variable domain of TCR clone 4983 (TRBV24-1, TRBJ2-7)
CATSDPGYEQYF

SEQ ID NO: 9967 - protein, 14 aa, Homo sapiens
  CDR3 for alpha chain variable domain of TCR clone 4984 (TRAV1-2, TRAJ8)
CAVREDTGLQKLVF

SEQ ID NO: 9968 - protein, 15 aa, Homo sapiens
  CDR3 for beta chain variable domain of TCR clone 4984 (TRBV6-3, TRBJ2-7)
CASSSPGTVFYEQYF

SEQ ID NO: 9969 - protein, 12 aa, Homo sapiens
  CDR3 for alpha chain variable domain of TCR clone 4985 (TRAV12-3, TRAJ17)
CAMTLTGTKLTF

SEQ ID NO: 9970 - protein, 15 aa, Homo sapiens
  CDR3 for beta chain variable domain of TCR clone 4985 (TRBV20-1, TRBJ2-7)
CSARDRVSGMDEQYF

SEQ ID NO: 9971 - protein, 14 aa, Homo sapiens
  CDR3 for alpha chain variable domain of TCR clone 4986 (TRAV1-2, TRAJ16)
CAVNRFSDGQKLLF

SEQ ID NO: 9972 - protein, 13 aa, Homo sapiens
  CDR3 for beta chain variable domain of TCR clone 4986 (TRBV6-5, TRBJ1-1)
QTSVYFCALRAFF

SEQ ID NO: 9973 - protein, 15 aa, Homo sapiens
  CDR3 for alpha chain variable domain of TCR clone 4987 (TRAV23/DV6, TRAJ28)
CAALLAYSGAGSYQL

SEQ ID NO: 9974 - protein, 13 aa, Homo sapiens
  CDR3 for beta chain variable domain of TCR clone 4987 (TRBV4-2, TRBJ2-3)
CASSQGNTDTQYF

SEQ ID NO: 9975 - protein, 14 aa, Homo sapiens
  CDR3 for alpha chain variable domain of TCR clone 4988 (TRAV17, TRAJ22)
CATVLSGSARQLTF

SEQ ID NO: 9976 - protein, 14 aa, Homo sapiens
  CDR3 for beta chain variable domain of TCR clone 4988 (TRBV12-4, TRBJ2-5)
CASSFGDRGETQYF

SEQ ID NO: 9977 - protein, 15 aa, Homo sapiens
  CDR3 for alpha chain variable domain of TCR clone 4989 (TRAV4, TRAJ39)
CLVGPNNSAGNMLTF

SEQ ID NO: 9978 - protein, 16 aa, Homo sapiens
  CDR3 for beta chain variable domain of TCR clone 4989 (TRBV13, TRBJ2-2)
CASSPRTGEHTGELFF

SEQ ID NO: 9979 - protein, 14 aa, Homo sapiens
  CDR3 for alpha chain variable domain of TCR clone 4990 (TRAV12-2, TRAJ17)
CAVLFKAAGNKLTF

SEQ ID NO: 9980 - protein, 14 aa, Homo sapiens
  CDR3 for beta chain variable domain of TCR clone 4990 (TRBV29-1, TRBJ2-1)
CSVGAVAGGNEQFF

SEQ ID NO: 9981 - protein, 14 aa, Homo sapiens
  CDR3 for alpha chain variable domain of TCR clone 4991 (TRAV12-3, TRAJ15)
CAMIPPQAGTALIF

SEQ ID NO: 9982 - protein, 14 aa, Homo sapiens
  CDR3 for beta chain variable domain of TCR clone 4991 (TRBV20-1, TRBJ2-2)
CSARRRLATGELFF

SEQ ID NO: 9983 - protein, 14 aa, Homo sapiens
  CDR3 for alpha chain variable domain of TCR clone 4992 (TRAV12-2, TRAJ15)
CAPHTGQAGTALIF

SEQ ID NO: 9984 - protein, 14 aa, Homo sapiens
  CDR3 for beta chain variable domain of TCR clone 4992 (TRBV7-2, TRBJ2-7)
CASSPKTSFYEQYF

SEQ ID NO: 9985 - protein, 11 aa, Homo sapiens
  CDR3 for alpha chain variable domain of TCR clone 4993 (TRAV2, TRAJ33)
CAVESNYQLIW

SEQ ID NO: 9986 - protein, 16 aa, Homo sapiens
  CDR3 for beta chain variable domain of TCR clone 4993 (TRBV4-3, TRBJ2-7)
CASSPRTSGRSYEQYF

SEQ ID NO: 9987 - protein, 12 aa, Homo sapiens
  CDR3 for alpha chain variable domain of TCR clone 4994 (TRAV21, TRAJ9)
CAVRLGGFKTIF

SEQ ID NO: 9988 - protein, 16 aa, Homo sapiens
  CDR3 for beta chain variable domain of TCR clone 4994 (TRBV12-5, TRBJ2-5)
CASGPRTSGNQETQYF

SEQ ID NO: 9989 - protein, 15 aa, Homo sapiens
  CDR3 for alpha chain variable domain of TCR clone 4995 (TRAV12-2, TRAJ43)
CAFDMRFGAGTRLTV

SEQ ID NO: 9990 - protein, 15 aa, Homo sapiens
  CDR3 for beta chain variable domain of TCR clone 4995 (TRBV5-1, TRBJ2-3)
CASSVTSGSTDTQYF

SEQ ID NO: 9991 - protein, 12 aa, Homo sapiens
  CDR3 for alpha chain variable domain of TCR clone 4996 (TRAV29/DV5, TRAJ41)
CAAISSGYALNF

SEQ ID NO: 9992 - protein, 17 aa, Homo sapiens
  CDR3 for beta chain variable domain of TCR clone 4996 (TRBV18, TRBJ2-1)
CASSKGLSGGADNEQFF

SEQ ID NO: 9993 - protein, 14 aa, Homo sapiens
  CDR3 for alpha chain variable domain of TCR clone 4997 (TRAV12-2, TRAJ41)
CAVNRANSGYALNF

SEQ ID NO: 9994 - protein, 13 aa, Homo sapiens
  CDR3 for beta chain variable domain of TCR clone 4997 (TRBV7-9, TRBJ1-2)
CASSLKQNYGYTF

SEQ ID NO: 9995 - protein, 13 aa, Homo sapiens
  CDR3 for alpha chain variable domain of TCR clone 4998 (TRAV8-3, TRAJ36)
CAVGATGANNLFF

SEQ ID NO: 9996 - protein, 17 aa, Homo sapiens
  CDR3 for beta chain variable domain of TCR clone 4998 (TRBV4-2, TRBJ1-1)
CASTQFGGGSGNTEAFF

SEQ ID NO: 9997 - protein, 14 aa, Homo sapiens
  CDR3 for alpha chain variable domain of TCR clone 4999 (TRAV12-3, TRAJ29)
CAMILLSGNTPLVF

SEQ ID NO: 9998 - protein, 16 aa, Homo sapiens
  CDR3 for beta chain variable domain of TCR clone 4999 (TRBV28, TRBJ2-7)
CASSSGTSGGGYEQYF

SEQ ID NO: 9999 - protein, 13 aa, Homo sapiens
  CDR3 for alpha chain variable domain of TCR clone 5000 (TRAV29/DV5, TRAJ31)
CAASRNNNARLMF

SEQ ID NO: 10000 - protein, 16 aa, Homo sapiens
  CDR3 for beta chain variable domain of TCR clone 5000 (TRBV19, TRBJ2-2)
CASRSPGTGATGELFF

SEQ ID NO: 10001 - protein, 12 aa, Homo sapiens
  CDR3 for alpha chain variable domain of TCR clone 5001 (TRAV17, TRAJ31)
CATEQGNARLMF

SEQ ID NO: 10002 - protein, 14 aa, Homo sapiens
  CDR3 for beta chain variable domain of TCR clone 5001 (TRBV28, TRBJ2-7)
CASTTDRDGFVQYF

SEQ ID NO: 10003 - protein, 18 aa, Homo sapiens
  CDR3 for alpha chain variable domain of TCR clone 5002 (TRAV2, TRAJ32)
CCLLLCLHYGGATNKLIF

SEQ ID NO: 10004 - protein, 16 aa, Homo sapiens
  CDR3 for beta chain variable domain of TCR clone 5002 (TRBV7-9, TRBJ2-7)
CASSYPDREGGYEQYF

SEQ ID NO: 10005 - protein, 17 aa, Homo sapiens
  CDR3 for alpha chain variable domain of TCR clone 5003 (TRAV3, TRAJ42)
CAVRDRDYGGSQGNLIF

SEQ ID NO: 10006 - protein, 15 aa, Homo sapiens
  CDR3 for beta chain variable domain of TCR clone 5003 (TRBV6-5, TRBJ2-1)
CASSYDAGAGNEQFF

SEQ ID NO: 10007 - protein, 12 aa, Homo sapiens
  CDR3 for alpha chain variable domain of TCR clone 5004 (TRAV13-2, TRAJ23)
CAERHRGGKLIF

SEQ ID NO: 10008 - protein, 12 aa, Homo sapiens
  CDR3 for beta chain variable domain of TCR clone 5004 (TRBV29-1, TRBJ2-3)
CSVTGGADTQYF

SEQ ID NO: 10009 - protein, 17 aa, Homo sapiens
  CDR3 for alpha chain variable domain of TCR clone 5005 (TRAV3, TRAJ6)
CAVRDGPRAGGSYIPTF

SEQ ID NO: 10010 - protein, 14 aa, Homo sapiens
  CDR3 for beta chain variable domain of TCR clone 5005 (TRBV7-3, TRBJ2-1)
CASSTSGGWDEQFF

SEQ ID NO: 10011 - protein, 12 aa, Homo sapiens
  CDR3 for alpha chain variable domain of TCR clone 5006 (TRAV12-3, TRAJ17)
CAMTLTGNKLTF

SEQ ID NO: 10012 - protein, 16 aa, Homo sapiens
  CDR3 for beta chain variable domain of TCR clone 5006 (TRBV12-5, TRBJ2-5)
CASGPRTSGNQETQYF

SEQ ID NO: 10013 - protein, 16 aa, Homo sapiens
  CDR3 for alpha chain variable domain of TCR clone 5007 (TRAV3, TRAJ10)
CAVRDMNAGGGNKLTF

SEQ ID NO: 10014 - protein, 15 aa, Homo sapiens
  CDR3 for beta chain variable domain of TCR clone 5007 (TRBV20-1, TRBJ2-7)
CSARDRVSGMDEQYF

SEQ ID NO: 10015 - protein, 14 aa, Homo sapiens
  CDR3 for alpha chain variable domain of TCR clone 5008 (TRAV26-1, TRAJ38)
CIANNAGNNRKLIW

SEQ ID NO: 10016 - protein, 13 aa, Homo sapiens
  CDR3 for beta chain variable domain of TCR clone 5008 (TRBV20-1, TRBJ1-1)
CSARGGGNTEAFF

SEQ ID NO: 10017 - protein, 14 aa, Homo sapiens
  CDR3 for alpha chain variable domain of TCR clone 5009 (TRAV12-1, TRAJ3)
CGAARYSSASKIIF

SEQ ID NO: 10018 - protein, 16 aa, Homo sapiens
  CDR3 for beta chain variable domain of TCR clone 5009 (TRBV4-3, TRBJ2-2)
CASSHLQGSGTGELFF

SEQ ID NO: 10019 - protein, 12 aa, Homo sapiens
  CDR3 for alpha chain variable domain of TCR clone 5010 (TRAV26-1, TRAJ35)
CIGLSFGNVLHC

SEQ ID NO: 10020 - protein, 17 aa, Homo sapiens
  CDR3 for beta chain variable domain of TCR clone 5010 (TRBV11-3, TRBJ2-5)
CASSLPGVRGGKETQYF

SEQ ID NO: 10021 - protein, 13 aa, Homo sapiens
  CDR3 for alpha chain variable domain of TCR clone 5011 (TRAV8-6, TRAJ49)
CAVITNTGNQFYF

SEQ ID NO: 10022 - protein, 14 aa, Homo sapiens
  CDR3 for beta chain variable domain of TCR clone 5011 (TRBV19, TRBJ2-1)
CASPTFVLSGEQFF

SEQ ID NO: 10023 - protein, 14 aa, Homo sapiens
  CDR3 for alpha chain variable domain of TCR clone 5012 (TRAV3, TRAJ9)
CAVRDDTGGFKTIF

SEQ ID NO: 10024 - protein, 18 aa, Homo sapiens
  CDR3 for beta chain variable domain of TCR clone 5012 (TRBV20-1, TRBJ2-6)
CSAETTPTHGSGANVLTF

SEQ ID NO: 10025 - protein, 11 aa, Homo sapiens
  CDR3 for alpha chain variable domain of TCR clone 5013 (TRAV1-2, TRAJ20)
CAVANDYKLSF

SEQ ID NO: 10026 - protein, 11 aa, Homo sapiens
  CDR3 for beta chain variable domain of TCR clone 5013 (TRBV29-1, TRBJ2-5)
CSEDRTGTQYF

SEQ ID NO: 10027 - protein, 14 aa, Homo sapiens
  CDR3 for alpha chain variable domain of TCR clone 5014 (TRAV26-1, TRAJ38)
CIADNAGNNRKLIW

SEQ ID NO: 10028 - protein, 20 aa, Homo sapiens
  CDR3 for beta chain variable domain of TCR clone 5014 (TRBV7-8, TRBJ2-2)
CASSHLFPGPTIHITGELFF

SEQ ID NO: 10029 - protein, 16 aa, Homo sapiens
  CDR3 for alpha chain variable domain of TCR clone 5015 (TRAV30, TRAJ24)
CGTEIVDADSWGEFQF

SEQ ID NO: 10030 - protein, 14 aa, Homo sapiens
  CDR3 for beta chain variable domain of TCR clone 5015 (TRBV12-5, TRBJ2-5)
CASGSRTHQETQYF

SEQ ID NO: 10031 - protein, 12 aa, Homo sapiens
  CDR3 for alpha chain variable domain of TCR clone 5016 (TRAV1-1, TRAJ24)
CAVRGSWGKFQF

SEQ ID NO: 10032 - protein, 16 aa, Homo sapiens
  CDR3 for beta chain variable domain of TCR clone 5016 (TRBV27, TRBJ2-5)
CASSSQTSGFQETQYF

SEQ ID NO: 10033 - protein, 12 aa, Homo sapiens
  CDR3 for alpha chain variable domain of TCR clone 5017 (TRAV27, TRAJ37)
CADSGNTGKLIF

SEQ ID NO: 10034 - protein, 18 aa, Homo sapiens
  CDR3 for beta chain variable domain of TCR clone 5017 (TRBV7-9, TRBJ1-1)
CASSKPWDTMGMNTEAFF

SEQ ID NO: 10035 - protein, 14 aa, Homo sapiens
  CDR3 for alpha chain variable domain of TCR clone 5018 (TRAV13-2, TRAJ32)
CAENYGGATNKLIF

SEQ ID NO: 10036 - protein, 17 aa, Homo sapiens
  CDR3 for beta chain variable domain of TCR clone 5018 (TRBV7-8, TRBJ2-6)
CASSAGTGGAGANVLTF

SEQ ID NO: 10037 - protein, 15 aa, Homo sapiens
  CDR3 for alpha chain variable domain of TCR clone 5019 (TRAV26-1, TRAJ44)
CIVRANTGTASKLTF

SEQ ID NO: 10038 - protein, 15 aa, Homo sapiens
  CDR3 for beta chain variable domain of TCR clone 5019 (TRBV15, TRBJ1-5)
CATSREQGGNQPQHF

SEQ ID NO: 10039 - protein, 12 aa, Homo sapiens
  CDR3 for alpha chain variable domain of TCR clone 5020 (TRAV13-1, TRAJ48)
CAANFGNEKLTF

SEQ ID NO: 10040 - protein, 12 aa, Homo sapiens
  CDR3 for beta chain variable domain of TCR clone 5020 (TRBV7-8, TRBJ2-7)
CASSLGDREQYF

SEQ ID NO: 10041 - protein, 14 aa, Homo sapiens
  CDR3 for alpha chain variable domain of TCR clone 5021 (TRAV23/DV6, TRAJ22)
CAADPSGSARQLTF

SEQ ID NO: 10042 - protein, 14 aa, Homo sapiens
  CDR3 for beta chain variable domain of TCR clone 5021 (TRBV5-1, TRBJ2-7)
CASSLWGAQDEQYF

SEQ ID NO: 10043 - protein, 14 aa, Homo sapiens
  CDR3 for alpha chain variable domain of TCR clone 5022 (TRAV10, TRAJ29)
CVVSANSGNTPLVF

SEQ ID NO: 10044 - protein, 16 aa, Homo sapiens
  CDR3 for beta chain variable domain of TCR clone 5022 (TRBV29-1, TRBJ2-7)
CSVEDAEDGTAYEQYF

SEQ ID NO: 10045 - protein, 16 aa, Homo sapiens
  CDR3 for alpha chain variable domain of TCR clone 5023 (TRAV4, TRAJ9)
CLVGDPNRPGGFKTIF

SEQ ID NO: 10046 - protein, 13 aa, Homo sapiens
  CDR3 for beta chain variable domain of TCR clone 5023 (TRBV5-5, TRBJ1-2)
CASSFWRGEDYTF

SEQ ID NO: 10047 - protein, 15 aa, Homo sapiens
  CDR3 for alpha chain variable domain of TCR clone 5024 (TRAV25, TRAJ52)
CAGRPGGTSYGKLTF

SEQ ID NO: 10048 - protein, 16 aa, Homo sapiens
  CDR3 for beta chain variable domain of TCR clone 5024 (TRBV12-4, TRBJ1-5)
CASSSGPRGSNQPQHF

SEQ ID NO: 10049 - protein, 14 aa, Homo sapiens
  CDR3 for alpha chain variable domain of TCR clone 5025 (TRAV25, TRAJ45)
CARESGGGADGLTF

SEQ ID NO: 10050 - protein, 12 aa, Homo sapiens
  CDR3 for beta chain variable domain of TCR clone 5025 (TRBV7-9, TRBJ2-7)
CASSFDSYEQYF

SEQ ID NO: 10051 - protein, 16 aa, Homo sapiens
  CDR3 for alpha chain variable domain of TCR clone 5026 (TRAV12-3, TRAJ53)
CAMSPGSGGSNYKLTF

SEQ ID NO: 10052 - protein, 13 aa, Homo sapiens
  CDR3 for beta chain variable domain of TCR clone 5026 (TRBV12-5, TRBJ2-3)
CASGDRQSDTQYF

SEQ ID NO: 10053 - protein, 14 aa, Homo sapiens
  CDR3 for alpha chain variable domain of TCR clone 5027 (TRAV12-2, TRAJ13)
CAVKKTGGYQKVTF

SEQ ID NO: 10054 - protein, 15 aa, Homo sapiens
  CDR3 for beta chain variable domain of TCR clone 5027 (TRBV5-1, TRBJ2-5)
CASSLGLAEQETQYF

SEQ ID NO: 10055 - protein, 14 aa, Homo sapiens
  CDR3 for alpha chain variable domain of TCR clone 5028 (TRAV12-2, TRAJ13)
CAVKRTGGYQKVTF

SEQ ID NO: 10056 - protein, 15 aa, Homo sapiens
  CDR3 for beta chain variable domain of TCR clone 5028 (TRBV27, TRBJ2-1)
CASSNGGGSSNEQFF

SEQ ID NO: 10057 - protein, 13 aa, Homo sapiens
  CDR3 for alpha chain variable domain of TCR clone 5029 (TRAV27, TRAJ56)
CAGKPGANSKLTF

SEQ ID NO: 10058 - protein, 17 aa, Homo sapiens
  CDR3 for beta chain variable domain of TCR clone 5029 (TRBV5-1, TRBJ2-7)
FAPAADNPGQIPYEQYF

SEQ ID NO: 10059 - protein, 15 aa, Homo sapiens
  CDR3 for alpha chain variable domain of TCR clone 5030 (TRAV1-2, TRAJ9)
CAVRDDGTGGFKTIF

SEQ ID NO: 10060 - protein, 17 aa, Homo sapiens
  CDR3 for beta chain variable domain of TCR clone 5030 (TRBV20-1, TRBJ2-1)
CSASSSGLAGSYNEQFF

SEQ ID NO: 10061 - protein, 12 aa, Homo sapiens
  CDR3 for alpha chain variable domain of TCR clone 5031 (TRAV21, TRAJ37)
CAVRGNTGKLIF

SEQ ID NO: 10062 - protein, 13 aa, Homo sapiens
  CDR3 for beta chain variable domain of TCR clone 5031 (TRBV19, TRBJ1-2)
CASSVPGQDGYTF

SEQ ID NO: 10063 - protein, 14 aa, Homo sapiens
  CDR3 for alpha chain variable domain of TCR clone 5032 (TRAV1-2, TRAJ16)
CAVNRFSDGQKLLF

SEQ ID NO: 10064 - protein, 14 aa, Homo sapiens
  CDR3 for beta chain variable domain of TCR clone 5032 (TRBV20-1, TRBJ2-4)
CSASGRVGENIQYF

SEQ ID NO: 10065 - protein, 17 aa, Homo sapiens
  CDR3 for alpha chain variable domain of TCR clone 5033 (TRAV3, TRAJ42)
CAVRDRDYGGSQGNLIF

SEQ ID NO: 10066 - protein, 15 aa, Homo sapiens
  CDR3 for beta chain variable domain of TCR clone 5033 (TRBV6-3, TRBJ2-7)
CASSSPGTVFYEQYF

SEQ ID NO: 10067 - protein, 21 aa, Homo sapiens
  CDR3 for alpha chain variable domain of TCR clone 5034 (TRAV1-1, TRAJ6)
CLLLLRCERLERTGGSYIPTF

SEQ ID NO: 10068 - protein, 14 aa, Homo sapiens
  CDR3 for beta chain variable domain of TCR clone 5034 (TRBV7-2, TRBJ2-5)
CASSLSGGGETQYF

SEQ ID NO: 10069 - protein, 17 aa, Homo sapiens
  CDR3 for alpha chain variable domain of TCR clone 5035 (TRAV3, TRAJ6)
CAVRDGPRAGGSYIPTF

SEQ ID NO: 10070 - protein, 14 aa, Homo sapiens
  CDR3 for beta chain variable domain of TCR clone 5035 (TRBV19, TRBJ2-1)
CASPTFVLSGEQFF

SEQ ID NO: 10071 - protein, 12 aa, Homo sapiens
  CDR3 for alpha chain variable domain of TCR clone 5036 (TRAV36/DV7, TRAJ40)
CAVAGGTYKYIF

SEQ ID NO: 10072 - protein, 18 aa, Homo sapiens
  CDR3 for beta chain variable domain of TCR clone 5036 (TRBV27, TRBJ2-3)
CASSKGTSGRTSTDTQYF

SEQ ID NO: 10073 - protein, 17 aa, Homo sapiens
  CDR3 for alpha chain variable domain of TCR clone 5037 (TRAV8-6, TRAJ58)
CAVSSWVGETSGSRLTF

SEQ ID NO: 10074 - protein, 14 aa, Homo sapiens
  CDR3 for beta chain variable domain of TCR clone 5037 (TRBV19, TRBJ2-1)
CASPTFVLSGEQFF

SEQ ID NO: 10075 - protein, 10 aa, Homo sapiens
  CDR3 for alpha chain variable domain of TCR clone 5038 (TRAV23/DV6, TRAJ57)
CAASSTLSQG

SEQ ID NO: 10076 - protein, 14 aa, Homo sapiens
  CDR3 for beta chain variable domain of TCR clone 5038 (TRBV19, TRBJ2-1)
CASSKDRGQDEQFF

SEQ ID NO: 10077 - protein, 10 aa, Homo sapiens
  CDR3 for alpha chain variable domain of TCR clone 5039 (TRAV21, TRAJ20)
CAVNVGRLQA

SEQ ID NO: 10078 - protein, 15 aa, Homo sapiens
  CDR3 for beta chain variable domain of TCR clone 5039 (TRBV6-1, TRBJ2-5)
CASSEFPLMGETQYF

SEQ ID NO: 10079 - protein, 13 aa, Homo sapiens
  CDR3 for alpha chain variable domain of TCR clone 5040 (TRAV6, TRAJ16)
CALDDSDGQKLLF

SEQ ID NO: 10080 - protein, 16 aa, Homo sapiens
  CDR3 for beta chain variable domain of TCR clone 5040 (TRBV12-4, TRBJ1-6)
CASNLQGKGSPLHLGT

SEQ ID NO: 10081 - protein, 14 aa, Homo sapiens
  CDR3 for alpha chain variable domain of TCR clone 5041 (TRAV8-6, TRAJ54)
CAVTEGRGAQKLVF

SEQ ID NO: 10082 - protein, 14 aa, Homo sapiens
  CDR3 for beta chain variable domain of TCR clone 5041 (TRBV27, TRBJ2-7)
CASSIGQGAQKQYF

SEQ ID NO: 10083 - protein, 13 aa, Homo sapiens
  CDR3 for alpha chain variable domain of TCR clone 5042 (TRAV2, TRAJ40)
CAVVTSGTYKYIS

SEQ ID NO: 10084 - protein, 14 aa, Homo sapiens
  CDR3 for beta chain variable domain of TCR clone 5042 (TRBV19, TRBJ2-1)
CASPTFVLSGEQFF

SEQ ID NO: 10085 - protein, 11 aa, Homo sapiens
  CDR3 for alpha chain variable domain of TCR clone 5043 (TRAV27, TRAJ20)
CAGLNDYKLSF

SEQ ID NO: 10086 - protein, 16 aa, Homo sapiens
  CDR3 for beta chain variable domain of TCR clone 5043 (TRBV27, TRBJ2-2)
CASSFRGLVRTGELFF

SEQ ID NO: 10087 - protein, 15 aa, Homo sapiens
  CDR3 for alpha chain variable domain of TCR clone 5044 (TRAV36/DV7, TRAJ54)
CAVEKPVQGAQKLVF

SEQ ID NO: 10088 - protein, 17 aa, Homo sapiens
  CDR3 for beta chain variable domain of TCR clone 5044 (TRBV6-5, TRBJ1-2)
CASSSPWEGAFDYGYTF

SEQ ID NO: 10089 - protein, 14 aa, Homo sapiens
  CDR3 for alpha chain variable domain of TCR clone 5045 (TRAV19, TRAJ5)
CALKKDTGRRALTF

SEQ ID NO: 10090 - protein, 15 aa, Homo sapiens
  CDR3 for beta chain variable domain of TCR clone 5045 (TRBV2, TRBJ2-5)
CASSEAGTRQETQYF

SEQ ID NO: 10091 - protein, 14 aa, Homo sapiens
  CDR3 for alpha chain variable domain of TCR clone 5046 (TRAV16, TRAJ17)
CALSEGAAGNKLTF

SEQ ID NO: 10092 - protein, 14 aa, Homo sapiens
  CDR3 for beta chain variable domain of TCR clone 5046 (TRBV28, TRBJ2-2)
CASRIRSGTGELFF

SEQ ID NO: 10093 - protein, 16 aa, Homo sapiens
  CDR3 for alpha chain variable domain of TCR clone 5047 (TRAV26-1, TRAJ23)
CIVRVANSNQGGKLIF

SEQ ID NO: 10094 - protein, 16 aa, Homo sapiens
  CDR3 for beta chain variable domain of TCR clone 5047 (TRBV10-3, TRBJ2-1)
CAISGVGDGGGGEQFF

SEQ ID NO: 10095 - protein, 16 aa, Homo sapiens
  CDR3 for alpha chain variable domain of TCR clone 5048 (TRAV12-3, TRAJ53)
CAMSPGSGGSNYKLTF

SEQ ID NO: 10096 - protein, 14 aa, Homo sapiens
  CDR3 for beta chain variable domain of TCR clone 5048 (TRBV4-1, TRBJ2-7)
CASSPVAGGDEQYF

SEQ ID NO: 10097 - protein, 14 aa, Homo sapiens
  CDR3 for alpha chain variable domain of TCR clone 5049 (TRAV12-3, TRAJ57)
CAMSAWGGSEKLVF

SEQ ID NO: 10098 - protein, 16 aa, Homo sapiens
  CDR3 for beta chain variable domain of TCR clone 5049 (TRBV7-3, TRBJ2-2)
CASSLKRGTLSGELFF

SEQ ID NO: 10099 - protein, 15 aa, Homo sapiens
  CDR3 for alpha chain variable domain of TCR clone 5050 (TRAV8-3, TRAJ27)
CAVGPSKTNAGKSTF

SEQ ID NO: 10100 - protein, 13 aa, Homo sapiens
  CDR3 for beta chain variable domain of TCR clone 5050 (TRBV12-5, TRBJ1-2)
CASGVRTGNGYTF

SEQ ID NO: 10101 - protein, 14 aa, Homo sapiens
  CDR3 for alpha chain variable domain of TCR clone 5051 (TRAV16, TRAJ32)
CALKSGGATNRLIF

SEQ ID NO: 10102 - protein, 13 aa, Homo sapiens
  CDR3 for beta chain variable domain of TCR clone 5051 (TRBV15, TRBJ1-6)
CATSGGLNSPLHF

SEQ ID NO: 10103 - protein, 12 aa, Homo sapiens
  CDR3 for alpha chain variable domain of TCR clone 5052 (TRAV12-3, TRAJ17)
CAMTLTGNKLTF

SEQ ID NO: 10104 - protein, 17 aa, Homo sapiens
  CDR3 for beta chain variable domain of TCR clone 5052 (TRBV7-8, TRBJ2-6)
CASSAGTGGAGANVLTF

SEQ ID NO: 10105 - protein, 18 aa, Homo sapiens
  CDR3 for alpha chain variable domain of TCR clone 5053 (TRAV13-1, TRAJ52)
CAASKRSAGGTSYGKLTF

SEQ ID NO: 10106 - protein, 12 aa, Homo sapiens
  CDR3 for beta chain variable domain of TCR clone 5053 (TRBV12-4, TRBJ2-7)
CASSLGGYEQYF

SEQ ID NO: 10107 - protein, 16 aa, Homo sapiens
  CDR3 for alpha chain variable domain of TCR clone 5054 (TRAV12-3, TRAJ53)
CAMIPGSGGSNYKLTF

SEQ ID NO: 10108 - protein, 11 aa, Homo sapiens
  CDR3 for beta chain variable domain of TCR clone 5054 (TRBV29-1, TRBJ2-5)
CSEDRTGTQYF

SEQ ID NO: 10109 - protein, 14 aa, Homo sapiens
  CDR3 for alpha chain variable domain of TCR clone 5055 (TRAV17, TRAJ23)
CATASYNQGGKLIF

SEQ ID NO: 10110 - protein, 16 aa, Homo sapiens
  CDR3 for beta chain variable domain of TCR clone 5055 (TRBV12-4, TRBJ1-5)
CASSRPVGGSNQPQHF

SEQ ID NO: 10111 - protein, 16 aa, Homo sapiens
  CDR3 for alpha chain variable domain of TCR clone 5056 (TRAV23/DV6, )
CAEPDIQNPDPAVYQL

SEQ ID NO: 10112 - protein, 15 aa, Homo sapiens
  CDR3 for beta chain variable domain of TCR clone 5056 (TRBV12-4, TRBJ2-5)
CASTLNSGRGETQYF

SEQ ID NO: 10113 - protein, 17 aa, Homo sapiens
  CDR3 for alpha chain variable domain of TCR clone 5057 (TRAV3, TRAJ6)
CAVRDGPRAGGSYITTF

SEQ ID NO: 10114 - protein, 14 aa, Homo sapiens
  CDR3 for beta chain variable domain of TCR clone 5057 (TRBV7-2, TRBJ2-7)
CASSPKTSFYEQYF

SEQ ID NO: 10115 - protein, 14 aa, Homo sapiens
  CDR3 for alpha chain variable domain of TCR clone 5058 (TRAV38-1, TRAJ45)
CASHSGGGADGLTF

SEQ ID NO: 10116 - protein, 13 aa, Homo sapiens
  CDR3 for beta chain variable domain of TCR clone 5058 (TRBV7-9, TRBJ2-2)
CASSSAGTGELFF

SEQ ID NO: 10117 - protein, 17 aa, Homo sapiens
  CDR3 for alpha chain variable domain of TCR clone 5059 (TRAV14/DV4, TRAJ3)
CAMREGPEYSSASKIIF

SEQ ID NO: 10118 - protein, 17 aa, Homo sapiens
  CDR3 for beta chain variable domain of TCR clone 5059 (TRBV20-1, TRBJ1-5)
CSARVGGERQGNQPQHF

SEQ ID NO: 10119 - protein, 14 aa, Homo sapiens
  CDR3 for alpha chain variable domain of TCR clone 5060 (TRAV12-2, TRAJ13)
CAVKKTGGYQKVTF

SEQ ID NO: 10120 - protein, 23 aa, Homo sapiens
  CDR3 for beta chain variable domain of TCR clone 5060 (TRBV4-2, TRBJ2-3)
CASSQDPPRASSISGGRGDTQYF

SEQ ID NO: 10121 - protein, 13 aa, Homo sapiens
  CDR3 for alpha chain variable domain of TCR clone 5061 (TRAV12-3, TRAJ21)
CAPGPHNFNKFYF

SEQ ID NO: 10122 - protein, 15 aa, Homo sapiens
  CDR3 for beta chain variable domain of TCR clone 5061 (TRBV10-3, TRBJ2-3)
CAISLTSGGTDTQYF

SEQ ID NO: 10123 - protein, 13 aa, Homo sapiens
  CDR3 for alpha chain variable domain of TCR clone 5062 (TRAV30, TRAJ24)
CGTVTDSWGKLQF

SEQ ID NO: 10124 - protein, 16 aa, Homo sapiens
  CDR3 for beta chain variable domain of TCR clone 5062 (TRBV19, TRBJ2-1)
CASSKAGPSSYNEQFF

SEQ ID NO: 10125 - protein, 11 aa, Homo sapiens
  CDR3 for alpha chain variable domain of TCR clone 5063 (TRAV1-2, TRAJ40)
CAVPGTYKYIF

SEQ ID NO: 10126 - protein, 15 aa, Homo sapiens
  CDR3 for beta chain variable domain of TCR clone 5063 (TRBV28, TRBJ1-3)
CASSLAGSSGNTIYF

SEQ ID NO: 10127 - protein, 14 aa, Homo sapiens
  CDR3 for alpha chain variable domain of TCR clone 5064 (TRAV8-4, TRAJ5)
CAVSTDTGRRALTF

SEQ ID NO: 10128 - protein, 14 aa, Homo sapiens
  CDR3 for beta chain variable domain of TCR clone 5064 (TRBV5-1, TRBJ2-2)
CASSLGGGSGELFF

SEQ ID NO: 10129 - protein, 14 aa, Homo sapiens
  CDR3 for alpha chain variable domain of TCR clone 5065 (TRAV26-1, TRAJ45)
CIEVTGGGADGLTF

SEQ ID NO: 10130 - protein, 16 aa, Homo sapiens
  CDR3 for beta chain variable domain of TCR clone 5065 (TRBV10-2, TRBJ1-1)
CASSEFGEGASTEAFF

SEQ ID NO: 10131 - protein, 14 aa, Homo sapiens
  CDR3 for alpha chain variable domain of TCR clone 5066 (TRAV12-2, TRAJ11)
CAVNMNSGYSTLTF

SEQ ID NO: 10132 - protein, 13 aa, Homo sapiens
  CDR3 for beta chain variable domain of TCR clone 5066 (TRBV6-1, TRBJ1-2)
CASSDSPSYGYTF

SEQ ID NO: 10133 - protein, 14 aa, Homo sapiens
  CDR3 for alpha chain variable domain of TCR clone 5067 (TRAV20, TRAJ37)
CAVQSSSNTGKLIF

SEQ ID NO: 10134 - protein, 14 aa, Homo sapiens
  CDR3 for beta chain variable domain of TCR clone 5067 (TRBV7-3, TRBJ2-2)
CASSLNSNTGELFF

SEQ ID NO: 10135 - protein, 14 aa, Homo sapiens
  CDR3 for alpha chain variable domain of TCR clone 5068 (TRAV13-2, TRAJ39)
GDSVRNNAGNMLTF

SEQ ID NO: 10136 - protein, 13 aa, Homo sapiens
  CDR3 for beta chain variable domain of TCR clone 5068 (TRBV20-1, TRBJ2-7)
CSAPGLADYEQYF

SEQ ID NO: 10137 - protein, 15 aa, Homo sapiens
  CDR3 for alpha chain variable domain of TCR clone 5069 (TRAV13-2, TRAJ50)
CAEEPLKTSYDKVIF

SEQ ID NO: 10138 - protein, 15 aa, Homo sapiens
  CDR3 for beta chain variable domain of TCR clone 5069 (TRBV20-1, TRBJ1-5)
CSARGSVDSNQPQHF

SEQ ID NO: 10139 - protein, 12 aa, Homo sapiens
  CDR3 for alpha chain variable domain of TCR clone 5070 (TRAV10, TRAJ6)
CVVSEGSYIPTF

SEQ ID NO: 10140 - protein, 15 aa, Homo sapiens
  CDR3 for beta chain variable domain of TCR clone 5070 (TRBV4-3, TRBJ2-7)
CASSQGGRGIYEQYF

SEQ ID NO: 10141 - protein, 15 aa, Homo sapiens
  CDR3 for alpha chain variable domain of TCR clone 5071 (TRAV13-1, TRAJ4)
CAASLISGGYNKLIF

SEQ ID NO: 10142 - protein, 15 aa, Homo sapiens
  CDR3 for beta chain variable domain of TCR clone 5071 (TRBV28, TRBJ2-3)
CASTPRGENTDTQYF

SEQ ID NO: 10143 - protein, 16 aa, Homo sapiens
  CDR3 for alpha chain variable domain of TCR clone 5072 (TRAV12-3, TRAJ53)
CAMSPGSGGSNYKLTL

SEQ ID NO: 10144 - protein, 11 aa, Homo sapiens
  CDR3 for beta chain variable domain of TCR clone 5072 (TRBV29-1, TRBJ2-5)
CSEDRTGTQYF

SEQ ID NO: 10145 - protein, 15 aa, Homo sapiens
  CDR3 for alpha chain variable domain of TCR clone 5073 (TRAV3, TRAJ30)
CAVRDRVERGDKIIF

SEQ ID NO: 10146 - protein, 13 aa, Homo sapiens
  CDR3 for beta chain variable domain of TCR clone 5073 (TRBV29-1, TRBJ2-5)
CSACSSRRETQYF

SEQ ID NO: 10147 - protein, 12 aa, Homo sapiens
  CDR3 for alpha chain variable domain of TCR clone 5074 (TRAV20, TRAJ4)
CRASGGYNKLIF

SEQ ID NO: 10148 - protein, 18 aa, Homo sapiens
  CDR3 for beta chain variable domain of TCR clone 5074 (TRBV19, TRBJ1-5)
CASSKGQVSIHSNQPQHF

SEQ ID NO: 10149 - protein, 17 aa, Homo sapiens
  CDR3 for alpha chain variable domain of TCR clone 5075 (TRAV3, TRAJ6)
CAVRDGPRAGGSYIPTF

SEQ ID NO: 10150 - protein, 14 aa, Homo sapiens
  CDR3 for beta chain variable domain of TCR clone 5075 (TRBV7-2, TRBJ2-7)
CASSPKTSSYEQYF

SEQ ID NO: 10151 - protein, 15 aa, Homo sapiens
  CDR3 for alpha chain variable domain of TCR clone 5076 (TRAV3, TRAJ3)
CAVRDRDSSASKIIF

SEQ ID NO: 10152 - protein, 15 aa, Homo sapiens
  CDR3 for beta chain variable domain of TCR clone 5076 (TRBV29-1, TRBJ2-7)
CSVEFFDRGSYEQYF

SEQ ID NO: 10153 - protein, 11 aa, Homo sapiens
  CDR3 for alpha chain variable domain of TCR clone 5077 (TRAV2, TRAJ37)
CAVDNTGKLIF

SEQ ID NO: 10154 - protein, 16 aa, Homo sapiens
  CDR3 for beta chain variable domain of TCR clone 5077 (TRBV9, TRBJ2-1)
CASSVGGGGNYNEQFF

SEQ ID NO: 10155 - protein, 11 aa, Homo sapiens
  CDR3 for alpha chain variable domain of TCR clone 5078 (TRAV17, TRAJ9)
CATTGGFKTIF

SEQ ID NO: 10156 - protein, 13 aa, Homo sapiens
  CDR3 for beta chain variable domain of TCR clone 5078 (TRBV20-1, TRBJ1-1)
CSAPLGGGTEAFF

SEQ ID NO: 10157 - protein, 15 aa, Homo sapiens
  CDR3 for alpha chain variable domain of TCR clone 5079 (TRAV13-1, TRAJ27)
CAARELNTNAGKSTF

SEQ ID NO: 10158 - protein, 14 aa, Homo sapiens
  CDR3 for beta chain variable domain of TCR clone 5079 (TRBV6-5, TRBJ1-2)
CASSYTRDRGRYTF

SEQ ID NO: 10159 - protein, 14 aa, Homo sapiens
  CDR3 for alpha chain variable domain of TCR clone 5080 (TRAV1-2, TRAJ15)
CAVRDRQAGTALIF

SEQ ID NO: 10160 - protein, 14 aa, Homo sapiens
  CDR3 for beta chain variable domain of TCR clone 5080 (TRBV7-8, TRBJ2-7)
CASSPRDRVYEQYF

SEQ ID NO: 10161 - protein, 13 aa, Homo sapiens
  CDR3 for alpha chain variable domain of TCR clone 5081 (TRAV12-2, TRAJ52)
CAVSGTSYGKLTF

SEQ ID NO: 10162 - protein, 16 aa, Homo sapiens
  CDR3 for beta chain variable domain of TCR clone 5081 (TRBV5-7, TRBJ2-7)
CASSPTSGRELDEQYF

SEQ ID NO: 10163 - protein, 11 aa, Homo sapiens
  CDR3 for alpha chain variable domain of TCR clone 5082 (TRAV1-1, TRAJ22)
CLGGFCKATDL

SEQ ID NO: 10164 - protein, 14 aa, Homo sapiens
  CDR3 for beta chain variable domain of TCR clone 5082 (TRBV27, TRBJ2-7)
CASSLAGLSYEQYF

SEQ ID NO: 10165 - protein, 14 aa, Homo sapiens
  CDR3 for alpha chain variable domain of TCR clone 5083 (TRAV14/DV4, TRAJ58)
CAMRARTSGSRLTF

SEQ ID NO: 10166 - protein, 18 aa, Homo sapiens
  CDR3 for beta chain variable domain of TCR clone 5083 (TRBV12-4, TRBJ1-5)
CASSLFLVGVGAYQPQHF

SEQ ID NO: 10167 - protein, 17 aa, Homo sapiens
  CDR3 for alpha chain variable domain of TCR clone 5084 (TRAV4, TRAJ18)
CLVGERSVGSTLGRLYF

SEQ ID NO: 10168 - protein, 16 aa, Homo sapiens
  CDR3 for beta chain variable domain of TCR clone 5084 (TRBV4-2, TRBJ1-1)
CASSPSPGRAAPEAFF

SEQ ID NO: 10169 - protein, 14 aa, Homo sapiens
  CDR3 for alpha chain variable domain of TCR clone 5085 (TRAV12-3, TRAJ22)
CAMSLFGSARQLTF

SEQ ID NO: 10170 - protein, 14 aa, Homo sapiens
  CDR3 for beta chain variable domain of TCR clone 5085 (TRBV7-2, TRBJ2-7)
CASSPKTSFYEQYF

SEQ ID NO: 10171 - protein, 14 aa, Homo sapiens
  CDR3 for alpha chain variable domain of TCR clone 5086 (TRAV12-2, TRAJ13)
CAVKKTGGYQKVTF

SEQ ID NO: 10172 - protein, 15 aa, Homo sapiens
  CDR3 for beta chain variable domain of TCR clone 5086 (TRBV28, TRBJ2-1)
CASSIIAGGRSEQFF

SEQ ID NO: 10173 - protein, 14 aa, Homo sapiens
  CDR3 for alpha chain variable domain of TCR clone 5087 (TRAV1-2, TRAJ16)
CAVNRFSDGQKLLF

SEQ ID NO: 10174 - protein, 15 aa, Homo sapiens
  CDR3 for beta chain variable domain of TCR clone 5087 (TRBV5-5, TRBJ1-5)
CASSSTPGSNQPQHF

SEQ ID NO: 10175 - protein, 14 aa, Homo sapiens
  CDR3 for alpha chain variable domain of TCR clone 5088 (TRAV8-3, TRAJ11)
CAVGSNSGYSTLTF

SEQ ID NO: 10176 - protein, 14 aa, Homo sapiens
  CDR3 for beta chain variable domain of TCR clone 5088 (TRBV5-1, TRBJ2-7)
CASSLTSGGYEQYF

SEQ ID NO: 10177 - protein, 11 aa, Homo sapiens
  CDR3 for alpha chain variable domain of TCR clone 5089 (TRAV3, TRAJ21)
CAAGNFNKFYF

SEQ ID NO: 10178 - protein, 16 aa, Homo sapiens
  CDR3 for beta chain variable domain of TCR clone 5089 (TRBV19, TRBJ2-1)
CASSKAGPSSYNEQFF

SEQ ID NO: 10179 - protein, 16 aa, Homo sapiens
  CDR3 for alpha chain variable domain of TCR clone 5090 (TRAV8-3, TRAJ48)
CAVGLISNFGNEKLTF

SEQ ID NO: 10180 - protein, 13 aa, Homo sapiens
  CDR3 for beta chain variable domain of TCR clone 5090 (TRBV20-1, TRBJ1-5)
CSASWGRSQPQHF

SEQ ID NO: 10181 - protein, 17 aa, Homo sapiens
  CDR3 for alpha chain variable domain of TCR clone 5091 (TRAV26-1, TRAJ53)
CIVRVDDSGGSNYKLTF

SEQ ID NO: 10182 - protein, 15 aa, Homo sapiens
  CDR3 for beta chain variable domain of TCR clone 5091 (TRBV20-1, TRBJ2-7)
CSARDRVSGMDEQYF

SEQ ID NO: 10183 - protein, 13 aa, Homo sapiens
  CDR3 for alpha chain variable domain of TCR clone 5092 (TRAV1-1, TRAJ7)
CAVRDHGNNRLAF

SEQ ID NO: 10184 - protein, 20 aa, Homo sapiens
  CDR3 for beta chain variable domain of TCR clone 5092 (TRBV28, TRBJ2-3)
CASSLGVRSTSGRSTDTQYF

SEQ ID NO: 10185 - protein, 14 aa, Homo sapiens
  CDR3 for alpha chain variable domain of TCR clone 5093 (TRAV1-2, TRAJ16)
CAVNRFSDGQKLLF

SEQ ID NO: 10186 - protein, 13 aa, Homo sapiens
  CDR3 for beta chain variable domain of TCR clone 5093 (TRBV27, TRBJ1-1)
CASSLSIGAEAFF

SEQ ID NO: 10187 - protein, 13 aa, Homo sapiens
  CDR3 for alpha chain variable domain of TCR clone 5094 (TRAV17, TRAJ9)
CATDYTGGFKTIF

SEQ ID NO: 10188 - protein, 16 aa, Homo sapiens
  CDR3 for beta chain variable domain of TCR clone 5094 (TRBV7-7, TRBJ2-1)
CASSLASGTSYNGQFF

SEQ ID NO: 10189 - protein, 13 aa, Homo sapiens
  CDR3 for alpha chain variable domain of TCR clone 5095 (TRAV1-1, TRAJ11)
CAVLNSGYSTLTF

SEQ ID NO: 10190 - protein, 17 aa, Homo sapiens
  CDR3 for beta chain variable domain of TCR clone 5095 (TRBV6-3, TRBJ2-2)
CASSYAGQGINTGELFF

SEQ ID NO: 10191 - protein, 14 aa, Homo sapiens
  CDR3 for alpha chain variable domain of TCR clone 5096 (TRAV1-2, TRAJ16)
CAVNRFSDGQKLLF

SEQ ID NO: 10192 - protein, 17 aa, Homo sapiens
  CDR3 for beta chain variable domain of TCR clone 5096 (TRBV10-3, TRBJ2-4)
CTSVPSVNKGSKNIQYF

SEQ ID NO: 10193 - protein, 16 aa, Homo sapiens
  CDR3 for alpha chain variable domain of TCR clone 5097 (TRAV1-2, TRAJ10)
CAVRGVLTGGGNKLTF

SEQ ID NO: 10194 - protein, 13 aa, Homo sapiens
  CDR3 for beta chain variable domain of TCR clone 5097 (TRBV20-1, TRBJ1-1)
CSAGTVGNTEAFF

SEQ ID NO: 10195 - protein, 16 aa, Homo sapiens
  CDR3 for alpha chain variable domain of TCR clone 5098 (TRAV1-2, TRAJ35)
CAVRGLTIGFGNVLHC

SEQ ID NO: 10196 - protein, 13 aa, Homo sapiens
  CDR3 for beta chain variable domain of TCR clone 5098 (TRBV6-6, TRBJ2-1)
CASSLHQGDEQFF

SEQ ID NO: 10197 - protein, 17 aa, Homo sapiens
  CDR3 for alpha chain variable domain of TCR clone 5099 (TRAV3, TRAJ6)
CAVRDGPRAGGSYIPTF

SEQ ID NO: 10198 - protein, 17 aa, Homo sapiens
  CDR3 for beta chain variable domain of TCR clone 5099 (TRBV27, TRBJ2-6)
CASSLTGFASGANVLTF

SEQ ID NO: 10199 - protein, 12 aa, Homo sapiens
  CDR3 for alpha chain variable domain of TCR clone 5100 (TRAV21, TRAJ11)
CAATSGYSTLTF

SEQ ID NO: 10200 - protein, 13 aa, Homo sapiens
  CDR3 for beta chain variable domain of TCR clone 5100 (TRBV20-1, TRBJ1-1)
CSARGGGNTEAFF

SEQ ID NO: 10201 - protein, 11 aa, Homo sapiens
  CDR3 for alpha chain variable domain of TCR clone 5101 (TRAV1-2, TRAJ8)
CAVSSFQKLVF

SEQ ID NO: 10202 - protein, 16 aa, Homo sapiens
  CDR3 for beta chain variable domain of TCR clone 5101 (TRBV7-3, TRBJ2-2)
CASSLKRGTLSGELFF

SEQ ID NO: 10203 - protein, 13 aa, Homo sapiens
  CDR3 for alpha chain variable domain of TCR clone 5102 (TRAV6, TRAJ16)
CALDDSDGQKLLF

SEQ ID NO: 10204 - protein, 14 aa, Homo sapiens
  CDR3 for beta chain variable domain of TCR clone 5102 (TRBV12-4, TRBJ1-6)
CASNLQGKGSPLHF

SEQ ID NO: 10205 - protein, 13 aa, Homo sapiens
  CDR3 for alpha chain variable domain of TCR clone 5103 (TRAV9-2, TRAJ49)
CALIQIGGNQFYF

SEQ ID NO: 10206 - protein, 13 aa, Homo sapiens
  CDR3 for beta chain variable domain of TCR clone 5103 (TRBV5-5, TRBJ1-2)
CASSFWRGEDYTF

SEQ ID NO: 10207 - protein, 11 aa, Homo sapiens
  CDR3 for alpha chain variable domain of TCR clone 5104 (TRAV3, TRAJ21)
CAVGNFNKFYF

SEQ ID NO: 10208 - protein, 17 aa, Homo sapiens
  CDR3 for beta chain variable domain of TCR clone 5104 (TRBV5-1, TRBJ2-5)
CASAVTRQFGNKETQYF

SEQ ID NO: 10209 - protein, 16 aa, Homo sapiens
  CDR3 for alpha chain variable domain of TCR clone 5105 (TRAV27, TRAJ13)
CAGAKSDSGGYQKVTF

SEQ ID NO: 10210 - protein, 15 aa, Homo sapiens
  CDR3 for beta chain variable domain of TCR clone 5105 (TRBV29-1, TRBJ2-1)
CSVGRHALFYNEQLF

SEQ ID NO: 10211 - protein, 14 aa, Homo sapiens
  CDR3 for alpha chain variable domain of TCR clone 5106 (TRAV13-1, TRAJ35)
CAASKGGFGNVLHC

SEQ ID NO: 10212 - protein, 13 aa, Homo sapiens
  CDR3 for beta chain variable domain of TCR clone 5106 (TRBV7-3, TRBJ1-1)
CASSQDWGAEASF

SEQ ID NO: 10213 - protein, 14 aa, Homo sapiens
  CDR3 for alpha chain variable domain of TCR clone 5107 (TRAV2, TRAJ37)
CAVDFTSNTGKLIF

SEQ ID NO: 10214 - protein, 15 aa, Homo sapiens
  CDR3 for beta chain variable domain of TCR clone 5107 (TRBV20-1, TRBJ1-1)
CSASRGVTGYTEAFF

SEQ ID NO: 10215 - protein, 11 aa, Homo sapiens
  CDR3 for alpha chain variable domain of TCR clone 5108 (TRAV3, TRAJ21)
CAVGNFNKFYF

SEQ ID NO: 10216 - protein, 16 aa, Homo sapiens
  CDR3 for beta chain variable domain of TCR clone 5108 (TRBV19, TRBJ2-1)
CASSKAGPSSYNEQSF

SEQ ID NO: 10217 - protein, 14 aa, Homo sapiens
  CDR3 for alpha chain variable domain of TCR clone 5109 (TRAV3, TRAJ17)
CAVRDAAAGNKLTF

SEQ ID NO: 10218 - protein, 15 aa, Homo sapiens
  CDR3 for beta chain variable domain of TCR clone 5109 (TRBV3-1, TRBJ2-7)
CASSQVRQGAYEQYF

SEQ ID NO: 10219 - protein, 12 aa, Homo sapiens
  CDR3 for alpha chain variable domain of TCR clone 5110 (TRAV2, TRAJ34)
CAVERNTDKLIF

SEQ ID NO: 10220 - protein, 20 aa, Homo sapiens
  CDR3 for beta chain variable domain of TCR clone 5110 (TRBV7-2, TRBJ2-5)
CASSFLRGGGRDPVLRARHA

SEQ ID NO: 10221 - protein, 12 aa, Homo sapiens
  CDR3 for alpha chain variable domain of TCR clone 5111 (TRAV12-3, TRAJ17)
CAMTLTVNKLTF

SEQ ID NO: 10222 - protein, 15 aa, Homo sapiens
  CDR3 for beta chain variable domain of TCR clone 5111 (TRBV20-1, TRBJ2-7)
CSARDRVSGMDEQYF

SEQ ID NO: 10223 - protein, 11 aa, Homo sapiens
  CDR3 for alpha chain variable domain of TCR clone 5112 (TRAV12-2, TRAJ49)
CAVTGGNQFYF

SEQ ID NO: 10224 - protein, 16 aa, Homo sapiens
  CDR3 for beta chain variable domain of TCR clone 5112 (TRBV19, TRBJ1-2)
CASSIGSNRDGYGYTF

SEQ ID NO: 10225 - protein, 12 aa, Homo sapiens
  CDR3 for alpha chain variable domain of TCR clone 5113 (TRAV1-2, TRAJ33)
CAALDSNYQLIW

SEQ ID NO: 10226 - protein, 15 aa, Homo sapiens
  CDR3 for beta chain variable domain of TCR clone 5113 (TRBV27, TRBJ2-1)
CASSNGGGSSNEQFF

SEQ ID NO: 10227 - protein, 12 aa, Homo sapiens
  CDR3 for alpha chain variable domain of TCR clone 5114 (TRAV13-1, TRAJ48)
CAANFGNEKLTF

SEQ ID NO: 10228 - protein, 12 aa, Homo sapiens
  CDR3 for beta chain variable domain of TCR clone 5114 (TRBV11-2, TRBJ2-1)
CASSPGNNEQFF

SEQ ID NO: 10229 - protein, 10 aa, Homo sapiens
  CDR3 for alpha chain variable domain of TCR clone 5115 (TRAV30, TRAJ48)
CGIGNEKLTF

SEQ ID NO: 10230 - protein, 14 aa, Homo sapiens
  CDR3 for beta chain variable domain of TCR clone 5115 (TRBV7-2, TRBJ2-7)
CASSPKTSFYEQYF

SEQ ID NO: 10231 - protein, 16 aa, Homo sapiens
  CDR3 for alpha chain variable domain of TCR clone 5116 (TRAV17, TRAJ9)
CATGEWGGTGGFKTIF

SEQ ID NO: 10232 - protein, 15 aa, Homo sapiens
  CDR3 for beta chain variable domain of TCR clone 5116 (TRBV20-1, TRBJ1-2)
CSARDSRGRNYGYTF

SEQ ID NO: 10233 - protein, 15 aa, Homo sapiens
  CDR3 for alpha chain variable domain of TCR clone 5117 (TRAV21, TRAJ53)
CATLNSGGSNYKLTF

SEQ ID NO: 10234 - protein, 15 aa, Homo sapiens
  CDR3 for beta chain variable domain of TCR clone 5117 (TRBV6-3, TRBJ2-7)
CASSSPGTVFYEQYF

SEQ ID NO: 10235 - protein, 16 aa, Homo sapiens
  CDR3 for alpha chain variable domain of TCR clone 5118 (TRAV16, TRAJ4)
CALSRMFSGGYNKLIF

SEQ ID NO: 10236 - protein, 19 aa, Homo sapiens
  CDR3 for beta chain variable domain of TCR clone 5118 (TRBV28, TRBJ2-7)
CASSYSGTSRLGWVYEQYF

SEQ ID NO: 10237 - protein, 15 aa, Homo sapiens
  CDR3 for alpha chain variable domain of TCR clone 5119 (TRAV29/DV5, TRAJ48)
CAASLGGFGNEKLTF

SEQ ID NO: 10238 - protein, 11 aa, Homo sapiens
  CDR3 for beta chain variable domain of TCR clone 5119 (TRBV20-1, TRBJ2-3)
CSGTSSTTQYF

SEQ ID NO: 10239 - protein, 11 aa, Homo sapiens
  CDR3 for alpha chain variable domain of TCR clone 5120 (TRAV1-2, TRAJ40)
CAVPGTYKYIF

SEQ ID NO: 10240 - protein, 13 aa, Homo sapiens
  CDR3 for beta chain variable domain of TCR clone 5120 (TRBV27, TRBJ1-4)
CASSLMGDEKLFF

SEQ ID NO: 10241 - protein, 12 aa, Homo sapiens
  CDR3 for alpha chain variable domain of TCR clone 5121 (TRAV12-1, TRAJ39)
CVVREAGNMLTF

SEQ ID NO: 10242 - protein, 15 aa, Homo sapiens
  CDR3 for beta chain variable domain of TCR clone 5121 (TRBV5-1, TRBJ2-2)
CASSLRQGDTGELFF

SEQ ID NO: 10243 - protein, 17 aa, Homo sapiens
  CDR3 for alpha chain variable domain of TCR clone 5122 (TRAV1-1, TRAJ32)
CAVRVDELWWCYKQAHL

SEQ ID NO: 10244 - protein, 16 aa, Homo sapiens
  CDR3 for beta chain variable domain of TCR clone 5122 (TRBV5-4, TRBJ2-3)
CASQQPGAGGADTQYF

SEQ ID NO: 10245 - protein, 15 aa, Homo sapiens
  CDR3 for alpha chain variable domain of TCR clone 5123 (TRAV26-1, TRAJ29)
CIVRVEGSGNTPLVL

SEQ ID NO: 10246 - protein, 15 aa, Homo sapiens
  CDR3 for beta chain variable domain of TCR clone 5123 (TRBV7-9, TRBJ1-5)
CASSQGHQPNQPQHF

SEQ ID NO: 10247 - protein, 11 aa, Homo sapiens
  CDR3 for alpha chain variable domain of TCR clone 5124 (TRAV3, TRAJ21)
CAVGNFNKFYF

SEQ ID NO: 10248 - protein, 14 aa, Homo sapiens
  CDR3 for beta chain variable domain of TCR clone 5124 (TRBV6-3, TRBJ1-1)
CASSYHSKNTEAFF

SEQ ID NO: 10249 - protein, 16 aa, Homo sapiens
  CDR3 for alpha chain variable domain of TCR clone 5125 (TRAV16, TRAJ52)
CALSAAGGTSYGKLTF

SEQ ID NO: 10250 - protein, 19 aa, Homo sapiens
  CDR3 for beta chain variable domain of TCR clone 5125 (TRBV19, TRBJ2-5)
CASSIGQVTDFFLGETQYF

SEQ ID NO: 10251 - protein, 16 aa, Homo sapiens
  CDR3 for alpha chain variable domain of TCR clone 5126 (TRAV1-2, TRAJ10)
CAVRGVLTGGGNKLTF

SEQ ID NO: 10252 - protein, 17 aa, Homo sapiens
  CDR3 for beta chain variable domain of TCR clone 5126 (TRBV15, TRBJ1-5)
CATSRAPPGTRNQPQHF

SEQ ID NO: 10253 - protein, 15 aa, Homo sapiens
  CDR3 for alpha chain variable domain of TCR clone 5127 (TRAV2, TRAJ11)
CAVEDPNSGYSTLTF

SEQ ID NO: 10254 - protein, 15 aa, Homo sapiens
  CDR3 for beta chain variable domain of TCR clone 5127 (TRBV20-1, TRBJ2-7)
CSARDRVSGMDEQYF

SEQ ID NO: 10255 - protein, 15 aa, Homo sapiens
  CDR3 for alpha chain variable domain of TCR clone 5128 (TRAV19, TRAJ53)
CALSSSGGSNYKLTF

SEQ ID NO: 10256 - protein, 13 aa, Homo sapiens
  CDR3 for beta chain variable domain of TCR clone 5128 (TRBV7-6, TRBJ2-7)
CASSLDHTHEQYF

SEQ ID NO: 10257 - protein, 12 aa, Homo sapiens
  CDR3 for alpha chain variable domain of TCR clone 5129 (TRAV12-3, TRAJ17)
CAMMLTGNKLTF

SEQ ID NO: 10258 - protein, 15 aa, Homo sapiens
  CDR3 for beta chain variable domain of TCR clone 5129 (TRBV20-1, TRBJ2-7)
CSARDRVSGMDEQYF

SEQ ID NO: 10259 - protein, 14 aa, Homo sapiens
  CDR3 for alpha chain variable domain of TCR clone 5130 (TRAV12-3, TRAJ10)
SHLPLTGGGNKLTF

SEQ ID NO: 10260 - protein, 16 aa, Homo sapiens
  CDR3 for beta chain variable domain of TCR clone 5130 (TRBV20-1, TRBJ1-2)
CSASMGQGVANYGYTF

SEQ ID NO: 10261 - protein, 16 aa, Homo sapiens
  CDR3 for alpha chain variable domain of TCR clone 5131 (TRAV30, TRAJ24)
CGTEIVDADSWGKFQF

SEQ ID NO: 10262 - protein, 14 aa, Homo sapiens
  CDR3 for beta chain variable domain of TCR clone 5131 (TRBV7-2, TRBJ1-1)
CASSFLTGTTEAFF

SEQ ID NO: 10263 - protein, 14 aa, Homo sapiens
  CDR3 for alpha chain variable domain of TCR clone 5132 (TRAV1-2, TRAJ16)
CAVNRFSDGQKLLF

SEQ ID NO: 10264 - protein, 12 aa, Homo sapiens
  CDR3 for beta chain variable domain of TCR clone 5132 (TRBV27, TRBJ2-5)
CASSPTGETQYF

SEQ ID NO: 10265 - protein, 18 aa, Homo sapiens
  CDR3 for alpha chain variable domain of TCR clone 5133 (TRAV21, TRAJ52)
CAVRPSPAGGTSYGKLTF

SEQ ID NO: 10266 - protein, 14 aa, Homo sapiens
  CDR3 for beta chain variable domain of TCR clone 5133 (TRBV6-1, TRBJ1-3)
CASVQGGGGNTIYF

SEQ ID NO: 10267 - protein, 13 aa, Homo sapiens
  CDR3 for alpha chain variable domain of TCR clone 5134 (TRAV2, TRAJ40)
CAVATSGTYKYIF

SEQ ID NO: 10268 - protein, 14 aa, Homo sapiens
  CDR3 for beta chain variable domain of TCR clone 5134 (TRBV19, TRBJ2-1)
CASPTFVLSGEQFF

SEQ ID NO: 10269 - protein, 14 aa, Homo sapiens
  CDR3 for alpha chain variable domain of TCR clone 5135 (TRAV26-1, TRAJ34)
CIVRVAYNTDKLIF

SEQ ID NO: 10270 - protein, 13 aa, Homo sapiens
  CDR3 for beta chain variable domain of TCR clone 5135 (TRBV4-2, TRBJ1-1)
CASSQAGNTEAFF

SEQ ID NO: 10271 - protein, 18 aa, Homo sapiens
  CDR3 for alpha chain variable domain of TCR clone 5136 (TRAV13-1, TRAJ52)
CAASKRSAGGTSYGKLTF

SEQ ID NO: 10272 - protein, 14 aa, Homo sapiens
  CDR3 for beta chain variable domain of TCR clone 5136 (TRBV19, TRBJ2-1)
CASPTFVLSGEQFF

SEQ ID NO: 10273 - protein, 11 aa, Homo sapiens
  CDR3 for alpha chain variable domain of TCR clone 5137 (TRAV17, TRAJ43)
CATDNNNDMRF

SEQ ID NO: 10274 - protein, 15 aa, Homo sapiens
  CDR3 for beta chain variable domain of TCR clone 5137 (TRBV20-1, TRBJ1-2)
CSAIRTGAFNYGYTF

SEQ ID NO: 10275 - protein, 14 aa, Homo sapiens
  CDR3 for alpha chain variable domain of TCR clone 5138 (TRAV2, TRAJ37)
CAVDFTSNTGKLIF

SEQ ID NO: 10276 - protein, 14 aa, Homo sapiens
  CDR3 for beta chain variable domain of TCR clone 5138 (TRBV20-1, TRBJ1-1)
CSAQTRIGGTEAFF

SEQ ID NO: 10277 - protein, 15 aa, Homo sapiens
  CDR3 for alpha chain variable domain of TCR clone 5139 (TRAV26-1, TRAJ29)
CIVRVEGSGNTPLAF

SEQ ID NO: 10278 - protein, 15 aa, Homo sapiens
  CDR3 for beta chain variable domain of TCR clone 5139 (TRBV7-9, TRBJ1-5)
CASSQGHQPNQPQHF

SEQ ID NO: 10279 - protein, 11 aa, Homo sapiens
  CDR3 for alpha chain variable domain of TCR clone 5140 (TRAV21, TRAJ34)
CAVTNTDKLIF

SEQ ID NO: 10280 - protein, 16 aa, Homo sapiens
  CDR3 for beta chain variable domain of TCR clone 5140 (TRBV12-5, TRBJ2-5)
CASGPRTSGNQETQYF

SEQ ID NO: 10281 - protein, 13 aa, Homo sapiens
  CDR3 for alpha chain variable domain of TCR clone 5141 (TRAV1-2, TRAJ12)
CAVSMDSSYKLIF

SEQ ID NO: 10282 - protein, 17 aa, Homo sapiens
  CDR3 for beta chain variable domain of TCR clone 5141 (TRBV11-2, TRBJ2-1)
CASSLYPPGVEYNEQFF

SEQ ID NO: 10283 - protein, 17 aa, Homo sapiens
  CDR3 for alpha chain variable domain of TCR clone 5142 (TRAV3, TRAJ6)
CSVRDGPRAGGSYIPTF

SEQ ID NO: 10284 - protein, 14 aa, Homo sapiens
  CDR3 for beta chain variable domain of TCR clone 5142 (TRBV7-2, TRBJ2-7)
CASSPKTSFYEQYF

SEQ ID NO: 10285 - protein, 16 aa, Homo sapiens
  CDR3 for alpha chain variable domain of TCR clone 5143 (TRAV26-2, TRAJ52)
CIRGPAGGTSYGKLTF

SEQ ID NO: 10286 - protein, 15 aa, Homo sapiens
  CDR3 for beta chain variable domain of TCR clone 5143 (TRBV20-1, TRBJ1-1)
CSASRGVTGNTEAFF

SEQ ID NO: 10287 - protein, 12 aa, Homo sapiens
  CDR3 for alpha chain variable domain of TCR clone 5144 (TRAV13-1, TRAJ42)
VNYGGSQGNLIF

SEQ ID NO: 10288 - protein, 12 aa, Homo sapiens
  CDR3 for beta chain variable domain of TCR clone 5144 (TRBV7-9, TRBJ2-7)
CASSLEGYEQYF

SEQ ID NO: 10289 - protein, 14 aa, Homo sapiens
  CDR3 for alpha chain variable domain of TCR clone 5145 (TRAV12-1, TRAJ38)
CGELKAGNNRKLIW

SEQ ID NO: 10290 - protein, 13 aa, Homo sapiens
  CDR3 for beta chain variable domain of TCR clone 5145 (TRBV4-2, TRBJ1-1)
CASSQAGNTEAFF

SEQ ID NO: 10291 - protein, 15 aa, Homo sapiens
  CDR3 for alpha chain variable domain of TCR clone 5146 (TRAV12-2, TRAJ53)
CAVNGGGGGNYKLTF

SEQ ID NO: 10292 - protein, 17 aa, Homo sapiens
  CDR3 for beta chain variable domain of TCR clone 5146 (TRBV7-3, TRBJ2-3)
CASSLMKRMRGADTQYF

SEQ ID NO: 10293 - protein, 16 aa, Homo sapiens
  CDR3 for alpha chain variable domain of TCR clone 5147 (TRAV30, TRAJ24)
CGTEIVDADSWGKFQF

SEQ ID NO: 10294 - protein, 17 aa, Homo sapiens
  CDR3 for beta chain variable domain of TCR clone 5147 (TRBV20-1, TRBJ2-1)
CSARDPLAGVWDNEQFF

SEQ ID NO: 10295 - protein, 15 aa, Homo sapiens
  CDR3 for alpha chain variable domain of TCR clone 5148 (TRAV38-2/DV8, TRAJ57)
CAYKSGLGGSEKLVF

SEQ ID NO: 10296 - protein, 16 aa, Homo sapiens
  CDR3 for beta chain variable domain of TCR clone 5148 (TRBV28, TRBJ1-5)
CASSFRGGYSNQPQHF

SEQ ID NO: 10297 - protein, 13 aa, Homo sapiens
  CDR3 for alpha chain variable domain of TCR clone 5149 (TRAV21, TRAJ33)
CAVAGDSNYQLIW

SEQ ID NO: 10298 - protein, 13 aa, Homo sapiens
  CDR3 for beta chain variable domain of TCR clone 5149 (TRBV10-3, TRBJ2-7)
CASKLAVNYEQYF

SEQ ID NO: 10299 - protein, 16 aa, Homo sapiens
  CDR3 for alpha chain variable domain of TCR clone 5150 (TRAV12-1, TRAJ4)
CLVNPGISGGYNKLIF

SEQ ID NO: 10300 - protein, 14 aa, Homo sapiens
  CDR3 for beta chain variable domain of TCR clone 5150 (TRBV5-7, TRBJ2-3)
CASRTSGGTDTQYF

SEQ ID NO: 10301 - protein, 14 aa, Homo sapiens
  CDR3 for alpha chain variable domain of TCR clone 5151 (TRAV1-2, TRAJ8)
CAVREDTGFQKLVF

SEQ ID NO: 10302 - protein, 20 aa, Homo sapiens
  CDR3 for beta chain variable domain of TCR clone 5151 (TRBV7-8, TRBJ2-2)
CASSHLFPGPTIHITGELFF

SEQ ID NO: 10303 - protein, 14 aa, Homo sapiens
  CDR3 for alpha chain variable domain of TCR clone 5152 (TRAV1-2, TRAJ8)
CAVREDTGFQKLVF

SEQ ID NO: 10304 - protein, 11 aa, Homo sapiens
  CDR3 for beta chain variable domain of TCR clone 5152 (TRBV20-1, TRBJ2-5)
CSADRAETQYF

SEQ ID NO: 10305 - protein, 11 aa, Homo sapiens
  CDR3 for alpha chain variable domain of TCR clone 5153 (TRAV27, TRAJ20)
CAGADDYKLSF

SEQ ID NO: 10306 - protein, 12 aa, Homo sapiens
  CDR3 for beta chain variable domain of TCR clone 5153 (TRBV2, TRBJ1-1)
CATPSRGTEAFF

SEQ ID NO: 10307 - protein, 14 aa, Homo sapiens
  CDR3 for alpha chain variable domain of TCR clone 5154 (TRAV20, TRAJ16)
CAVRFFSDGQKLLF

SEQ ID NO: 10308 - protein, 16 aa, Homo sapiens
  CDR3 for beta chain variable domain of TCR clone 5154 (TRBV5-1, TRBJ2-3)
CASSSIGAGSTDTQYF

SEQ ID NO: 10309 - protein, 13 aa, Homo sapiens
  CDR3 for alpha chain variable domain of TCR clone 5155 (TRAV38-2/DV8, TRAJ34)
CAYRTWNTDKLIF

SEQ ID NO: 10310 - protein, 16 aa, Homo sapiens
  CDR3 for beta chain variable domain of TCR clone 5155 (TRBV19, TRBJ2-1)
CASSKAGPSSYNEQFF

SEQ ID NO: 10311 - protein, 13 aa, Homo sapiens
  CDR3 for alpha chain variable domain of TCR clone 5156 (TRAV13-1, TRAJ5)
CAARVTGRRALTS

SEQ ID NO: 10312 - protein, 15 aa, Homo sapiens
  CDR3 for beta chain variable domain of TCR clone 5156 (TRBV7-9, TRBJ2-7)
CASSPGGGLTYEQYF

SEQ ID NO: 10313 - protein, 15 aa, Homo sapiens
  CDR3 for alpha chain variable domain of TCR clone 5157 (TRAV16, TRAJ17)
CALSGQEAAGNKLTF

SEQ ID NO: 10314 - protein, 15 aa, Homo sapiens
  CDR3 for beta chain variable domain of TCR clone 5157 (TRBV12-4, TRBJ1-5)
CASTQGTGPLQPQHF

SEQ ID NO: 10315 - protein, 14 aa, Homo sapiens
  CDR3 for alpha chain variable domain of TCR clone 5158 (TRAV26-1, TRAJ45)
CIEVTGGGADGLTF

SEQ ID NO: 10316 - protein, 14 aa, Homo sapiens
  CDR3 for beta chain variable domain of TCR clone 5158 (TRBV6-1, TRBJ1-3)
CASVQGGGGNTIYF

SEQ ID NO: 10317 - protein, 11 aa, Homo sapiens
  CDR3 for alpha chain variable domain of TCR clone 5159 (TRAV3, TRAJ21)
CSVGNFNKFYF

SEQ ID NO: 10318 - protein, 16 aa, Homo sapiens
  CDR3 for beta chain variable domain of TCR clone 5159 (TRBV19, TRBJ2-1)
CASSKAGPSSYNEQFF

SEQ ID NO: 10319 - protein, 15 aa, Homo sapiens
  CDR3 for alpha chain variable domain of TCR clone 5160 (TRAV20, TRAJ50)
CAVRQMKTSYDKVIF

SEQ ID NO: 10320 - protein, 16 aa, Homo sapiens
  CDR3 for beta chain variable domain of TCR clone 5160 (TRBV15, TRBJ1-2)
CATSRGPRTGGGGYTF

SEQ ID NO: 10321 - protein, 14 aa, Homo sapiens
  CDR3 for alpha chain variable domain of TCR clone 5161 (TRAV8-6, TRAJ13)
CAVFSSGGYQKVTF

SEQ ID NO: 10322 - protein, 14 aa, Homo sapiens
  CDR3 for beta chain variable domain of TCR clone 5161 (TRBV7-2, TRBJ1-5)
CASSLTGNNQPQHF

SEQ ID NO: 10323 - protein, 11 aa, Homo sapiens
  CDR3 for alpha chain variable domain of TCR clone 5162 (TRAV3, TRAJ21)
CALGNFNKFYF

SEQ ID NO: 10324 - protein, 16 aa, Homo sapiens
  CDR3 for beta chain variable domain of TCR clone 5162 (TRBV19, TRBJ2-1)
CASSKAGPSSYNEQFF

SEQ ID NO: 10325 - protein, 15 aa, Homo sapiens
  CDR3 for alpha chain variable domain of TCR clone 5163 (TRAV27, TRAJ45)
CRSPQSGGGADGLTF

SEQ ID NO: 10326 - protein, 12 aa, Homo sapiens
  CDR3 for beta chain variable domain of TCR clone 5163 (TRBV24-1, TRBJ2-7)
CATSDPGYEQYF

SEQ ID NO: 10327 - protein, 18 aa, Homo sapiens
  CDR3 for alpha chain variable domain of TCR clone 5164 (TRAV21, TRAJ52)
CAVRPSPAGGTSYGKLAF

SEQ ID NO: 10328 - protein, 17 aa, Homo sapiens
  CDR3 for beta chain variable domain of TCR clone 5164 (TRBV13, TRBJ2-3)
CASSLSRVAGGRNTQYF

SEQ ID NO: 10329 - protein, 18 aa, Homo sapiens
  CDR3 for alpha chain variable domain of TCR clone 5165 (TRAV21, TRAJ52)
CAVRPSPAGGTSYGKLTF

SEQ ID NO: 10330 - protein, 17 aa, Homo sapiens
  CDR3 for beta chain variable domain of TCR clone 5165 (TRBV13, TRBJ2-3)
CASSRSRVAGGRNTQYF

SEQ ID NO: 10331 - protein, 17 aa, Homo sapiens
  CDR3 for alpha chain variable domain of TCR clone 5166 (TRAV21, TRAJ52)
CAVGTNAGGTSYGKLTF

SEQ ID NO: 10332 - protein, 13 aa, Homo sapiens
  CDR3 for beta chain variable domain of TCR clone 5166 (TRBV5-1, TRBJ1-2)
CASSFSGNLGYTF

SEQ ID NO: 10333 - protein, 12 aa, Homo sapiens
  CDR3 for alpha chain variable domain of TCR clone 5167 (TRAV12-3, TRAJ17)
CAMTLTGNKLTF

SEQ ID NO: 10334 - protein, 15 aa, Homo sapiens
  CDR3 for beta chain variable domain of TCR clone 5167 (TRBV5-1, TRBJ2-1)
CASSPPRAPYNEQFF

SEQ ID NO: 10335 - protein, 14 aa, Homo sapiens
  CDR3 for alpha chain variable domain of TCR clone 5168 (TRAV12-1, TRAJ30)
CVVRGMNRDDKIIF

SEQ ID NO: 10336 - protein, 14 aa, Homo sapiens
  CDR3 for beta chain variable domain of TCR clone 5168 (TRBV7-2, TRBJ2-1)
CASSLTSGNRRQFF

SEQ ID NO: 10337 - protein, 11 aa, Homo sapiens
  CDR3 for alpha chain variable domain of TCR clone 5169 (TRAV12-2, TRAJ26)
CAVNNGQNFVF

SEQ ID NO: 10338 - protein, 11 aa, Homo sapiens
  CDR3 for beta chain variable domain of TCR clone 5169 (TRBV12-4, TRBJ2-5)
CASSFQGAQYF

SEQ ID NO: 10339 - protein, 16 aa, Homo sapiens
  CDR3 for alpha chain variable domain of TCR clone 5170 (TRAV8-3, TRAJ44)
CAVGPLNTGTASKLTF

SEQ ID NO: 10340 - protein, 18 aa, Homo sapiens
  CDR3 for beta chain variable domain of TCR clone 5170 (TRBV3-1, TRBJ2-1)
CASSQDLPGRPLFDEQFF

SEQ ID NO: 10341 - protein, 14 aa, Homo sapiens
  CDR3 for alpha chain variable domain of TCR clone 5171 (TRAV38-1, TRAJ45)
CASHSGGGADGLTF

SEQ ID NO: 10342 - protein, 15 aa, Homo sapiens
  CDR3 for beta chain variable domain of TCR clone 5171 (TRBV10-2, TRBJ2-6)
CASSEQGTGANVLTF

SEQ ID NO: 10343 - protein, 17 aa, Homo sapiens
  CDR3 for alpha chain variable domain of TCR clone 5172 (TRAV3, TRAJ6)
CAVRDGPRAGGSYIPTF

SEQ ID NO: 10344 - protein, 13 aa, Homo sapiens
  CDR3 for beta chain variable domain of TCR clone 5172 (TRBV29-1, TRBJ1-1)
CSVGDSRNTEAFF

SEQ ID NO: 10345 - protein, 16 aa, Homo sapiens
  CDR3 for alpha chain variable domain of TCR clone 5173 (TRAV30, TRAJ24)
CGTEIVDADSWGKFQF

SEQ ID NO: 10346 - protein, 14 aa, Homo sapiens
  CDR3 for beta chain variable domain of TCR clone 5173 (TRBV12-5, TRBJ2-5)
RASGSRTHQETQYF

SEQ ID NO: 10347 - protein, 11 aa, Homo sapiens
  CDR3 for alpha chain variable domain of TCR clone 5174 (TRAV8-1, TRAJ8)
CAMTGFQKLVF

SEQ ID NO: 10348 - protein, 14 aa, Homo sapiens
  CDR3 for beta chain variable domain of TCR clone 5174 (TRBV5-4, TRBJ1-2)
CASTRQTGNYGYTF

SEQ ID NO: 10349 - protein, 11 aa, Homo sapiens
  CDR3 for alpha chain variable domain of TCR clone 5175 (TRAV13-2, TRAJ20)
CAENMSYKLSF

SEQ ID NO: 10350 - protein, 13 aa, Homo sapiens
  CDR3 for beta chain variable domain of TCR clone 5175 (TRBV20-1, TRBJ2-5)
CSARYTGEETQYF

SEQ ID NO: 10351 - protein, 15 aa, Homo sapiens
  CDR3 for alpha chain variable domain of TCR clone 5176 (TRAV1-1, TRAJ22)
CAVRVSSGSARQLTF

SEQ ID NO: 10352 - protein, 15 aa, Homo sapiens
  CDR3 for beta chain variable domain of TCR clone 5176 (TRBV20-1, TRBJ2-7)
CSARDRVSGMDEQYF

SEQ ID NO: 10353 - protein, 14 aa, Homo sapiens
  CDR3 for alpha chain variable domain of TCR clone 5177 (TRAV12-2, TRAJ13)
CAVKKTGGYQKVTF

SEQ ID NO: 10354 - protein, 13 aa, Homo sapiens
  CDR3 for beta chain variable domain of TCR clone 5177 (TRBV12-5, TRBJ2-3)
CASGDRQSDTQYF

SEQ ID NO: 10355 - protein, 11 aa, Homo sapiens
  CDR3 for alpha chain variable domain of TCR clone 5178 (TRAV4, TRAJ31)
CLVGDNARLMF

SEQ ID NO: 10356 - protein, 14 aa, Homo sapiens
  CDR3 for beta chain variable domain of TCR clone 5178 (TRBV2, TRBJ1-5)
CASSEAAGGQPQHF

SEQ ID NO: 10357 - protein, 12 aa, Homo sapiens
  CDR3 for alpha chain variable domain of TCR clone 5179 (TRAV12-3, TRAJ17)
CAMTLTGNKLTF

SEQ ID NO: 10358 - protein, 16 aa, Homo sapiens
  CDR3 for beta chain variable domain of TCR clone 5179 (TRBV28, TRBJ1-5)
CASSLTGQGWNQPQHF

SEQ ID NO: 10359 - protein, 13 aa, Homo sapiens
  CDR3 for alpha chain variable domain of TCR clone 5180 (TRAV19, TRAJ26)
CALTFDYGQNFVF

SEQ ID NO: 10360 - protein, 14 aa, Homo sapiens
  CDR3 for beta chain variable domain of TCR clone 5180 (TRBV7-8, TRBJ2-3)
CASSLEAGTDTQYF

SEQ ID NO: 10361 - protein, 17 aa, Homo sapiens
  CDR3 for alpha chain variable domain of TCR clone 5181 (TRAV12-1, TRAJ13)
CVVNKRGEFWGLPESYL

SEQ ID NO: 10362 - protein, 17 aa, Homo sapiens
  CDR3 for beta chain variable domain of TCR clone 5181 (TRBV28, TRBJ2-5)
CASSTPEGDALQETQYF

SEQ ID NO: 10363 - protein, 13 aa, Homo sapiens
  CDR3 for alpha chain variable domain of TCR clone 5182 (TRAV21, TRAJ42)
CAVGGGSQGNLIF

SEQ ID NO: 10364 - protein, 15 aa, Homo sapiens
  CDR3 for beta chain variable domain of TCR clone 5182 (TRBV20-1, TRBJ2-7)
CSARDRVSGMDEQYF

SEQ ID NO: 10365 - protein, 16 aa, Homo sapiens
  CDR3 for alpha chain variable domain of TCR clone 5183 (TRAV2, TRAJ23)
CVGGKLIFGQGTELSV

SEQ ID NO: 10366 - protein, 20 aa, Homo sapiens
  CDR3 for beta chain variable domain of TCR clone 5183 (TRBV20-1, TRBJ2-5)
CSARAGLAGRLAGHLETQYF

SEQ ID NO: 10367 - protein, 12 aa, Homo sapiens
  CDR3 for alpha chain variable domain of TCR clone 5184 (TRAV12-3, TRAJ17)
CSMTLTGNKLTF

SEQ ID NO: 10368 - protein, 15 aa, Homo sapiens
  CDR3 for beta chain variable domain of TCR clone 5184 (TRBV20-1, TRBJ2-7)
CSARDRVSGMDEQYF

SEQ ID NO: 10369 - protein, 10 aa, Homo sapiens
  CDR3 for alpha chain variable domain of TCR clone 5185 (TRAV23/DV6, TRAJ57)
CAASSTLSQG

SEQ ID NO: 10370 - protein, 14 aa, Homo sapiens
  CDR3 for beta chain variable domain of TCR clone 5185 (TRBV20-1, TRBJ2-7)
CSAKRGRSSYEQYF

SEQ ID NO: 10371 - protein, 14 aa, Homo sapiens
  CDR3 for alpha chain variable domain of TCR clone 5186 (TRAV23/DV6, TRAJ17)
CAARGRAAGNKLTF

SEQ ID NO: 10372 - protein, 13 aa, Homo sapiens
  CDR3 for beta chain variable domain of TCR clone 5186 (TRBV7-6, TRBJ1-2)
CASSLVADYGYTF

SEQ ID NO: 10373 - protein, 14 aa, Homo sapiens
  CDR3 for alpha chain variable domain of TCR clone 5187 (TRAV1-2, TRAJ16)
CAVNRFSDGQKLLF

SEQ ID NO: 10374 - protein, 13 aa, Homo sapiens
  CDR3 for beta chain variable domain of TCR clone 5187 (TRBV20-1, TRBJ2-2)
CSALSGGAGELFF

SEQ ID NO: 10375 - protein, 14 aa, Homo sapiens
  CDR3 for alpha chain variable domain of TCR clone 5188 (TRAV12-1, TRAJ9)
CVVNRRTGGFKTIF

SEQ ID NO: 10376 - protein, 16 aa, Homo sapiens
  CDR3 for beta chain variable domain of TCR clone 5188 (TRBV4-1, TRBJ2-3)
CASSQSTSGAEDTQYF

SEQ ID NO: 10377 - protein, 16 aa, Homo sapiens
  CDR3 for alpha chain variable domain of TCR clone 5189 (TRAV3, TRAJ10)
CAVRDMRAGGGNKLTF

SEQ ID NO: 10378 - protein, 14 aa, Homo sapiens
  CDR3 for beta chain variable domain of TCR clone 5189 (TRBV7-2, TRBJ1-4)
CASSVVEGGEKLFF

SEQ ID NO: 10379 - protein, 14 aa, Homo sapiens
  CDR3 for alpha chain variable domain of TCR clone 5190 (TRAV1-2, TRAJ8)
CAVREDTGFQKLVF

SEQ ID NO: 10380 - protein, 13 aa, Homo sapiens
  CDR3 for beta chain variable domain of TCR clone 5190 (TRBV7-9, TRBJ1-2)
CASSLKQNYGYTF

SEQ ID NO: 10381 - protein, 14 aa, Homo sapiens
  CDR3 for alpha chain variable domain of TCR clone 5191 (TRAV1-2, TRAJ16)
CAVNRFSDGQKLLF

SEQ ID NO: 10382 - protein, 14 aa, Homo sapiens
  CDR3 for beta chain variable domain of TCR clone 5191 (TRBV20-1, TRBJ2-7)
CSARRSGSSYEQYF

SEQ ID NO: 10383 - protein, 15 aa, Homo sapiens
  CDR3 for alpha chain variable domain of TCR clone 5192 (TRAV1-2, TRAJ16)
CAVRARFSDGQKLLF

SEQ ID NO: 10384 - protein, 19 aa, Homo sapiens
  CDR3 for beta chain variable domain of TCR clone 5192 (TRBV11-3, TRBJ2-3)
CASGFGTSGGPRGGGTQYF

SEQ ID NO: 10385 - protein, 14 aa, Homo sapiens
  CDR3 for alpha chain variable domain of TCR clone 5193 (TRAV12-3, TRAJ10)
SHLPLTGGGNKLTF

SEQ ID NO: 10386 - protein, 16 aa, Homo sapiens
  CDR3 for beta chain variable domain of TCR clone 5193 (TRBV5-8, TRBJ2-2)
CASSLINPGGAGELFF

SEQ ID NO: 10387 - protein, 16 aa, Homo sapiens
  CDR3 for alpha chain variable domain of TCR clone 5194 (TRAV21, TRAJ37)
CAVRPRGSSNTGKLIF

SEQ ID NO: 10388 - protein, 16 aa, Homo sapiens
  CDR3 for beta chain variable domain of TCR clone 5194 (TRBV2, TRBJ2-1)
CASSVGGSLSYNEQFF

SEQ ID NO: 10389 - protein, 14 aa, Homo sapiens
  CDR3 for alpha chain variable domain of TCR clone 5195 (TRAV1-2, TRAJ16)
CAVNRFSDGQKLLF

SEQ ID NO: 10390 - protein, 13 aa, Homo sapiens
  CDR3 for beta chain variable domain of TCR clone 5195 (TRBV7-2, TRBJ1-1)
CASNLKGAKVAFF

SEQ ID NO: 10391 - protein, 16 aa, Homo sapiens
  CDR3 for alpha chain variable domain of TCR clone 5196 (TRAV25, TRAJ24)
CAQRRGTTDSWGKLQF

SEQ ID NO: 10392 - protein, 14 aa, Homo sapiens
  CDR3 for beta chain variable domain of TCR clone 5196 (TRBV6-6, TRBJ1-5)
CASSYGPANQPQHF

SEQ ID NO: 10393 - protein, 15 aa, Homo sapiens
  CDR3 for alpha chain variable domain of TCR clone 5197 (TRAV12-2, TRAJ8)
CAVREENTGFQKLVF

SEQ ID NO: 10394 - protein, 16 aa, Homo sapiens
  CDR3 for beta chain variable domain of TCR clone 5197 (TRBV7-3, TRBJ2-2)
CASSLKRGTLSGELFF

SEQ ID NO: 10395 - protein, 17 aa, Homo sapiens
  CDR3 for alpha chain variable domain of TCR clone 5198 (TRAV3, TRAJ6)
CAVRDGPRAGGSYIPTF

SEQ ID NO: 10396 - protein, 13 aa, Homo sapiens
  CDR3 for beta chain variable domain of TCR clone 5198 (TRBV27, TRBJ1-1)
CASSLSIGAEAFF

SEQ ID NO: 10397 - protein, 11 aa, Homo sapiens
  CDR3 for alpha chain variable domain of TCR clone 5199 (TRAV2, TRAJ13)
CASGGYQKVTF

SEQ ID NO: 10398 - protein, 15 aa, Homo sapiens
  CDR3 for beta chain variable domain of TCR clone 5199 (TRBV11-1, TRBJ2-7)
CASSLNYGASYEQYF

SEQ ID NO: 10399 - protein, 13 aa, Homo sapiens
  CDR3 for alpha chain variable domain of TCR clone 5200 (TRAV12-1, TRAJ34)
CGEPLRNTDKLIF

SEQ ID NO: 10400 - protein, 20 aa, Homo sapiens
  CDR3 for beta chain variable domain of TCR clone 5200 (TRBV19, TRBJ2-1)
CASSISRTVTSTRLNNEQFF

SEQ ID NO: 10401 - protein, 14 aa, Homo sapiens
  CDR3 for alpha chain variable domain of TCR clone 5201 (TRAV39, TRAJ54)
CAVVLIQGAQKLVF

SEQ ID NO: 10402 - protein, 16 aa, Homo sapiens
  CDR3 for beta chain variable domain of TCR clone 5201 (TRBV3-1, TRBJ2-7)
CASSQGATGVAYEQYF

SEQ ID NO: 10403 - protein, 14 aa, Homo sapiens
  CDR3 for alpha chain variable domain of TCR clone 5202 (TRAV36/DV7, TRAJ40)
CAVETTSGTYKYIF

SEQ ID NO: 10404 - protein, 13 aa, Homo sapiens
  CDR3 for beta chain variable domain of TCR clone 5202 (TRBV29-1, TRBJ2-1)
CSVEGGRVNEQFF

SEQ ID NO: 10405 - protein, 14 aa, Homo sapiens
  CDR3 for alpha chain variable domain of TCR clone 5203 (TRAV12-1, TRAJ17)
CVVNYKAAGNKLTF

SEQ ID NO: 10406 - protein, 15 aa, Homo sapiens
  CDR3 for beta chain variable domain of TCR clone 5203 (TRBV7-6, TRBJ2-3)
CASSYLAGEADTQYF

SEQ ID NO: 10407 - protein, 15 aa, Homo sapiens
  CDR3 for alpha chain variable domain of TCR clone 5204 (TRAV26-1, TRAJ29)
CIVRVEGSGNTPLVL

SEQ ID NO: 10408 - protein, 14 aa, Homo sapiens
  CDR3 for beta chain variable domain of TCR clone 5204 (TRBV18, TRBJ2-5)
CASSPGVSQETQYF

SEQ ID NO: 10409 - protein, 14 aa, Homo sapiens
  CDR3 for alpha chain variable domain of TCR clone 5205 (TRAV13-1, TRAJ5)
CAASPDTGRRALTF

SEQ ID NO: 10410 - protein, 15 aa, Homo sapiens
  CDR3 for beta chain variable domain of TCR clone 5205 (TRBV7-2, TRBJ2-7)
CASSLTGQGTYEQYF

SEQ ID NO: 10411 - protein, 12 aa, Homo sapiens
  CDR3 for alpha chain variable domain of TCR clone 5206 (TRAV12-3, TRAJ32)
CAGGGATNKLIF

SEQ ID NO: 10412 - protein, 15 aa, Homo sapiens
  CDR3 for beta chain variable domain of TCR clone 5206 (TRBV4-3, TRBJ2-1)
CASSQESAIYNEQFF

SEQ ID NO: 10413 - protein, 18 aa, Homo sapiens
  CDR3 for alpha chain variable domain of TCR clone 5207 (TRAV12-3, TRAJ52)
CAMSRTNAGGTSYGKLTF

SEQ ID NO: 10414 - protein, 15 aa, Homo sapiens
  CDR3 for beta chain variable domain of TCR clone 5207 (TRBV19, TRBJ1-2)
CASSVGQVLNYGYTF

SEQ ID NO: 10415 - protein, 16 aa, Homo sapiens
  CDR3 for alpha chain variable domain of TCR clone 5208 (TRAV3, TRAJ21)
CAVRDIERGNFNKFYF

SEQ ID NO: 10416 - protein, 14 aa, Homo sapiens
  CDR3 for beta chain variable domain of TCR clone 5208 (TRBV12-4, TRBJ2-5)
CASSLSSGRETQYF

SEQ ID NO: 10417 - protein, 13 aa, Homo sapiens
  CDR3 for alpha chain variable domain of TCR clone 5209 (TRAV8-1, TRAJ30)
CAVNGRRDDKIIF

SEQ ID NO: 10418 - protein, 15 aa, Homo sapiens
  CDR3 for beta chain variable domain of TCR clone 5209 (TRBV5-7, TRBJ1-5)
CASSYGKLWDQPQHF

SEQ ID NO: 10419 - protein, 11 aa, Homo sapiens
  CDR3 for alpha chain variable domain of TCR clone 5210 (TRAV3, TRAJ21)
CAVGNFDKFYF

SEQ ID NO: 10420 - protein, 16 aa, Homo sapiens
  CDR3 for beta chain variable domain of TCR clone 5210 (TRBV19, TRBJ2-1)
CASSKAGPSSYNEQFF

SEQ ID NO: 10421 - protein, 14 aa, Homo sapiens
  CDR3 for alpha chain variable domain of TCR clone 5211 (TRAV9-2, TRAJ39)
CALYIYNAGNMLTF

SEQ ID NO: 10422 - protein, 16 aa, Homo sapiens
  CDR3 for beta chain variable domain of TCR clone 5211 (TRBV19, TRBJ2-2)
CASRSPGTGATGELFF

SEQ ID NO: 10423 - protein, 14 aa, Homo sapiens
  CDR3 for alpha chain variable domain of TCR clone 5212 (TRAV1-2, TRAJ16)
CAVNRFSDGQKLLF

SEQ ID NO: 10424 - protein, 16 aa, Homo sapiens
  CDR3 for beta chain variable domain of TCR clone 5212 (TRBV4-1, TRBJ1-1)
CASSQDAGMGNTEAFF

SEQ ID NO: 10425 - protein, 15 aa, Homo sapiens
  CDR3 for alpha chain variable domain of TCR clone 5213 (TRAV17, TRAJ22)
CATVAPSGSARQLTF

SEQ ID NO: 10426 - protein, 15 aa, Homo sapiens
  CDR3 for beta chain variable domain of TCR clone 5213 (TRBV11-3, TRBJ2-3)
CASLKDGREGDTQYF

SEQ ID NO: 10427 - protein, 14 aa, Homo sapiens
  CDR3 for alpha chain variable domain of TCR clone 5214 (TRAV12-2, TRAJ13)
CAVKKTGGYQKVTF

SEQ ID NO: 10428 - protein, 12 aa, Homo sapiens
  CDR3 for beta chain variable domain of TCR clone 5214 (TRBV12-4, TRBJ2-7)
CASSLGGYEQYF

SEQ ID NO: 10429 - protein, 13 aa, Homo sapiens
  CDR3 for alpha chain variable domain of TCR clone 5215 (TRAV3, TRAJ27)
CAVRPLGAGKSTF

SEQ ID NO: 10430 - protein, 16 aa, Homo sapiens
  CDR3 for beta chain variable domain of TCR clone 5215 (TRBV10-3, TRBJ2-1)
CAISLTSGNSYNEQFF

SEQ ID NO: 10431 - protein, 10 aa, Homo sapiens
  CDR3 for alpha chain variable domain of TCR clone 5216 (TRAV13-2, TRAJ20)
CAENICRLQA

SEQ ID NO: 10432 - protein, 15 aa, Homo sapiens
  CDR3 for beta chain variable domain of TCR clone 5216 (TRBV18, TRBJ1-2)
CASSPGNGLGYGYTF

SEQ ID NO: 10433 - protein, 14 aa, Homo sapiens
  CDR3 for alpha chain variable domain of TCR clone 5217 (TRAV16, TRAJ32)
CSKRYGGATNKLIF

SEQ ID NO: 10434 - protein, 12 aa, Homo sapiens
  CDR3 for beta chain variable domain of TCR clone 5217 (TRBV7-9, TRBJ2-7)
CATRTDAYEQYF

SEQ ID NO: 10435 - protein, 12 aa, Homo sapiens
  CDR3 for alpha chain variable domain of TCR clone 5218 (TRAV1-1, TRAJ39)
CAVPVVGNMLTF

SEQ ID NO: 10436 - protein, 12 aa, Homo sapiens
  CDR3 for beta chain variable domain of TCR clone 5218 (TRBV2, TRBJ1-2)
CASSGQTYGYTF

SEQ ID NO: 10437 - protein, 14 aa, Homo sapiens
  CDR3 for alpha chain variable domain of TCR clone 5219 (TRAV12-2, TRAJ33)
CAVKRARSNYQLIW

SEQ ID NO: 10438 - protein, 15 aa, Homo sapiens
  CDR3 for beta chain variable domain of TCR clone 5219 (TRBV20-1, TRBJ2-7)
CSARDRVSGMDEQYF

SEQ ID NO: 10439 - protein, 14 aa, Homo sapiens
  CDR3 for alpha chain variable domain of TCR clone 5220 (TRAV38-1, TRAJ43)
CAFMKHNNNNDMRF

SEQ ID NO: 10440 - protein, 15 aa, Homo sapiens
  CDR3 for beta chain variable domain of TCR clone 5220 (TRBV9, TRBJ1-6)
CASSVAGTGDSPLHF

SEQ ID NO: 10441 - protein, 13 aa, Homo sapiens
  CDR3 for alpha chain variable domain of TCR clone 5221 (TRAV26-1, TRAJ40)
CIVRGTGTYKYIF

SEQ ID NO: 10442 - protein, 16 aa, Homo sapiens
  CDR3 for beta chain variable domain of TCR clone 5221 (TRBV20-1, TRBJ1-1)
CSARDRTLSMNTEAFF

SEQ ID NO: 10443 - protein, 18 aa, Homo sapiens
  CDR3 for alpha chain variable domain of TCR clone 5222 (TRAV21, TRAJ52)
CAVRPSPAGGTSYGKLTF

SEQ ID NO: 10444 - protein, 17 aa, Homo sapiens
  CDR3 for beta chain variable domain of TCR clone 5222 (TRBV20-1, TRBJ2-2)
CSASGSGQGGLTGELFF

SEQ ID NO: 10445 - protein, 14 aa, Homo sapiens
  CDR3 for alpha chain variable domain of TCR clone 5223 (TRAV26-1, TRAJ48)
CIVRVGFGNEKLTF

SEQ ID NO: 10446 - protein, 14 aa, Homo sapiens
  CDR3 for beta chain variable domain of TCR clone 5223 (TRBV19, TRBJ2-1)
CASPTFVLSGEQFF

SEQ ID NO: 10447 - protein, 11 aa, Homo sapiens
  CDR3 for alpha chain variable domain of TCR clone 5224 (TRAV2, TRAJ13)
CASGGYQKVTF

SEQ ID NO: 10448 - protein, 15 aa, Homo sapiens
  CDR3 for beta chain variable domain of TCR clone 5224 (TRBV9, TRBJ1-6)
CASSVAGTGDSPLHF

SEQ ID NO: 10449 - protein, 16 aa, Homo sapiens
  CDR3 for alpha chain variable domain of TCR clone 5225 (TRAV29/DV5, TRAJ28)
CAADAYSGAGSYQLTF

SEQ ID NO: 10450 - protein, 15 aa, Homo sapiens
  CDR3 for beta chain variable domain of TCR clone 5225 (TRBV24-1, TRBJ1-4)
CATSDPQGADEKLFF

SEQ ID NO: 10451 - protein, 16 aa, Homo sapiens
  CDR3 for alpha chain variable domain of TCR clone 5226 (TRAV30, TRAJ24)
CGTEIVDADSWGKFQF

SEQ ID NO: 10452 - protein, 13 aa, Homo sapiens
  CDR3 for beta chain variable domain of TCR clone 5226 (TRBV19, TRBJ1-2)
CASSVPGQDGYTF

SEQ ID NO: 10453 - protein, 14 aa, Homo sapiens
  CDR3 for alpha chain variable domain of TCR clone 5227 (TRAV17, TRAJ57)
CATDPQGGSEKLVF

SEQ ID NO: 10454 - protein, 13 aa, Homo sapiens
  CDR3 for beta chain variable domain of TCR clone 5227 (TRBV29-1, TRBJ2-1)
CSVEGGRVNEQFF

SEQ ID NO: 10455 - protein, 14 aa, Homo sapiens
  CDR3 for alpha chain variable domain of TCR clone 5228 (TRAV2, TRAJ9)
CAVEDRSGGFKTIF

SEQ ID NO: 10456 - protein, 15 aa, Homo sapiens
  CDR3 for beta chain variable domain of TCR clone 5228 (TRBV28, TRBJ1-3)
CASSMGWASGNTIYF

SEQ ID NO: 10457 - protein, 15 aa, Homo sapiens
  CDR3 for alpha chain variable domain of TCR clone 5229 (TRAV16, TRAJ10)
CALEGLTGGGNKLTF

SEQ ID NO: 10458 - protein, 14 aa, Homo sapiens
  CDR3 for beta chain variable domain of TCR clone 5229 (TRBV7-6, TRBJ2-3)
CASSLGTVTDTQYF

SEQ ID NO: 10459 - protein, 13 aa, Homo sapiens
  CDR3 for alpha chain variable domain of TCR clone 5230 (TRAV9-2, TRAJ37)
CALHSSNTGKLIF

SEQ ID NO: 10460 - protein, 15 aa, Homo sapiens
  CDR3 for beta chain variable domain of TCR clone 5230 (TRBV7-2, TRBJ2-7)
CASSTPGLTRGEQYF

SEQ ID NO: 10461 - protein, 13 aa, Homo sapiens
  CDR3 for alpha chain variable domain of TCR clone 5231 (TRAV12-1, TRAJ20)
CVVNRETDYKLSF

SEQ ID NO: 10462 - protein, 15 aa, Homo sapiens
  CDR3 for beta chain variable domain of TCR clone 5231 (TRBV14, TRBJ2-1)
CASSLGLAGGTEQFF

SEQ ID NO: 10463 - protein, 15 aa, Homo sapiens
  CDR3 for alpha chain variable domain of TCR clone 5232 (TRAV3, TRAJ17)
CAVRDGPAAGNKLTF

SEQ ID NO: 10464 - protein, 12 aa, Homo sapiens
  CDR3 for beta chain variable domain of TCR clone 5232 (TRBV12-4, TRBJ2-1)
CASSPGRNEQFF

SEQ ID NO: 10465 - protein, 14 aa, Homo sapiens
  CDR3 for alpha chain variable domain of TCR clone 5233 (TRAV12-3, TRAJ10)
SHLPLTGGGNKLTF

SEQ ID NO: 10466 - protein, 14 aa, Homo sapiens
  CDR3 for beta chain variable domain of TCR clone 5233 (TRBV7-6, TRBJ2-3)
CASSLGTVTDTQYF

SEQ ID NO: 10467 - protein, 13 aa, Homo sapiens
  CDR3 for alpha chain variable domain of TCR clone 5234 (TRAV2, TRAJ40)
CAVVTSGTYKYVF

SEQ ID NO: 10468 - protein, 14 aa, Homo sapiens
  CDR3 for beta chain variable domain of TCR clone 5234 (TRBV19, TRBJ2-1)
CASPTFVLSGEQFF

SEQ ID NO: 10469 - protein, 14 aa, Homo sapiens
  CDR3 for alpha chain variable domain of TCR clone 5235 (TRAV12-2, TRAJ40)
CAVKIPSGTHKYIF

SEQ ID NO: 10470 - protein, 17 aa, Homo sapiens
  CDR3 for beta chain variable domain of TCR clone 5235 (TRBV13, TRBJ2-3)
CASSLSRVAGGRNTQYF

SEQ ID NO: 10471 - protein, 13 aa, Homo sapiens
  CDR3 for alpha chain variable domain of TCR clone 5236 (TRAV2, TRAJ29)
CAEQNSGNTPLVF

SEQ ID NO: 10472 - protein, 13 aa, Homo sapiens
  CDR3 for beta chain variable domain of TCR clone 5236 (TRBV28, TRBJ1-2)
CASSPGNRNGYTF

SEQ ID NO: 10473 - protein, 14 aa, Homo sapiens
  CDR3 for alpha chain variable domain of TCR clone 5237 (TRAV12-2, TRAJ44)
CAVNKAGTASKLTF

SEQ ID NO: 10474 - protein, 16 aa, Homo sapiens
  CDR3 for beta chain variable domain of TCR clone 5237 (TRBV6-1, TRBJ1-3)
CASSEGGVTSGNTIYF

SEQ ID NO: 10475 - protein, 12 aa, Homo sapiens
  CDR3 for alpha chain variable domain of TCR clone 5238 (TRAV13-1, TRAJ21)
CAAKEGFNKFYF

SEQ ID NO: 10476 - protein, 15 aa, Homo sapiens
  CDR3 for beta chain variable domain of TCR clone 5238 (TRBV27, TRBJ2-1)
CASSNGGGSSNEQFF

SEQ ID NO: 10477 - protein, 15 aa, Homo sapiens
  CDR3 for alpha chain variable domain of TCR clone 5239 (TRAV8-4, TRAJ29)
CAVSEDFRGNTPLVF

SEQ ID NO: 10478 - protein, 12 aa, Homo sapiens
  CDR3 for beta chain variable domain of TCR clone 5239 (TRBV14, TRBJ2-7)
CASSSLKGEQYF

SEQ ID NO: 10479 - protein, 13 aa, Homo sapiens
  CDR3 for alpha chain variable domain of TCR clone 5240 (TRAV38-2/DV8, TRAJ34)
CAYRTWNTDKLIF

SEQ ID NO: 10480 - protein, 13 aa, Homo sapiens
  CDR3 for beta chain variable domain of TCR clone 5240 (TRBV7-2, TRBJ2-2)
CASSLAVTGELFF

SEQ ID NO: 10481 - protein, 14 aa, Homo sapiens
  CDR3 for alpha chain variable domain of TCR clone 5241 (TRAV12-2, TRAJ13)
CAVKKTGGYQKVIF

SEQ ID NO: 10482 - protein, 15 aa, Homo sapiens
  CDR3 for beta chain variable domain of TCR clone 5241 (TRBV27, TRBJ2-1)
CASSNGGGSSNEQFF

SEQ ID NO: 10483 - protein, 16 aa, Homo sapiens
  CDR3 for alpha chain variable domain of TCR clone 5242 (TRAV4, TRAJ42)
CLVGPIYGGSQGNLIF

SEQ ID NO: 10484 - protein, 13 aa, Homo sapiens
  CDR3 for beta chain variable domain of TCR clone 5242 (TRBV11-2, TRBJ2-7)
CASSPLGSYEQYF

SEQ ID NO: 10485 - protein, 12 aa, Homo sapiens
  CDR3 for alpha chain variable domain of TCR clone 5243 (TRAV21, TRAJ33)
CAKMDSNYQLIW

SEQ ID NO: 10486 - protein, 14 aa, Homo sapiens
  CDR3 for beta chain variable domain of TCR clone 5243 (TRBV2, TRBJ2-7)
CASSLTAGGYEQYF

SEQ ID NO: 10487 - protein, 15 aa, Homo sapiens
  CDR3 for alpha chain variable domain of TCR clone 5244 (TRAV8-3, TRAJ27)
CAVGPSKTNAGKSTF

SEQ ID NO: 10488 - protein, 16 aa, Homo sapiens
  CDR3 for beta chain variable domain of TCR clone 5244 (TRBV6-6, TRBJ2-1)
CASSLLSDSSYNEQFF

SEQ ID NO: 10489 - protein, 14 aa, Homo sapiens
  CDR3 for alpha chain variable domain of TCR clone 5245 (TRAV38-2/DV8, TRAJ29)
CAYRSRSGNTPLVF

SEQ ID NO: 10490 - protein, 17 aa, Homo sapiens
  CDR3 for beta chain variable domain of TCR clone 5245 (TRBV6-1, TRBJ1-2)
CASSGTHSQRGNYGYTF

SEQ ID NO: 10491 - protein, 14 aa, Homo sapiens
  CDR3 for alpha chain variable domain of TCR clone 5246 (TRAV13-1, TRAJ44)
CAAKAAGTASKLTF

SEQ ID NO: 10492 - protein, 13 aa, Homo sapiens
  CDR3 for beta chain variable domain of TCR clone 5246 (TRBV5-5, TRBJ1-2)
CASSFWRGEDYTF

SEQ ID NO: 10493 - protein, 14 aa, Homo sapiens
  CDR3 for alpha chain variable domain of TCR clone 5247 (TRAV34, TRAJ44)
CGADGTGTASKLTF

SEQ ID NO: 10494 - protein, 12 aa, Homo sapiens
  CDR3 for beta chain variable domain of TCR clone 5247 (TRBV6-3, TRBJ2-7)
CASSRQGYEQYF

SEQ ID NO: 10495 - protein, 11 aa, Homo sapiens
  CDR3 for alpha chain variable domain of TCR clone 5248 (TRAV3, TRAJ21)
CAVGNFNKFYF

SEQ ID NO: 10496 - protein, 14 aa, Homo sapiens
  CDR3 for beta chain variable domain of TCR clone 5248 (TRBV7-9, TRBJ2-1)
CASSSMVGFGEQFF

SEQ ID NO: 10497 - protein, 14 aa, Homo sapiens
  CDR3 for alpha chain variable domain of TCR clone 5249 (TRAV1-2, TRAJ16)
CAVNRFSDGQKLLF

SEQ ID NO: 10498 - protein, 16 aa, Homo sapiens
  CDR3 for beta chain variable domain of TCR clone 5249 (TRBV20-1, TRBJ1-4)
CSARPYGGELNEKLFF

SEQ ID NO: 10499 - protein, 13 aa, Homo sapiens
  CDR3 for alpha chain variable domain of TCR clone 5250 (TRAV2, TRAJ40)
CAVVTSGTYKYIF

SEQ ID NO: 10500 - protein, 14 aa, Homo sapiens
  CDR3 for beta chain variable domain of TCR clone 5250 (TRBV19, TRBJ2-1)
CASPTFVLSGERFF

SEQ ID NO: 10501 - protein, 14 aa, Homo sapiens
  CDR3 for alpha chain variable domain of TCR clone 5251 (TRAV26-1, TRAJ39)
CIVRGSRAGNMLTF

SEQ ID NO: 10502 - protein, 15 aa, Homo sapiens
  CDR3 for beta chain variable domain of TCR clone 5251 (TRBV28, TRBJ2-5)
CASSPGQGSIETQYF

SEQ ID NO: 10503 - protein, 13 aa, Homo sapiens
  CDR3 for alpha chain variable domain of TCR clone 5252 (TRAV2, TRAJ13)
CAVESGGYQKVTF

SEQ ID NO: 10504 - protein, 12 aa, Homo sapiens
  CDR3 for beta chain variable domain of TCR clone 5252 (TRBV29-1, TRBJ2-3)
CSVTGGADTQYF

SEQ ID NO: 10505 - protein, 13 aa, Homo sapiens
  CDR3 for alpha chain variable domain of TCR clone 5253 (TRAV20, TRAJ37)
CAGCSSNTGKLIF

SEQ ID NO: 10506 - protein, 17 aa, Homo sapiens
  CDR3 for beta chain variable domain of TCR clone 5253 (TRBV28, TRBJ2-5)
CASSRQGGLAGAETQYF

SEQ ID NO: 10507 - protein, 16 aa, Homo sapiens
  CDR3 for alpha chain variable domain of TCR clone 5254 (TRAV12-3, TRAJ53)
CAMSPGSGGSNYKLKF

SEQ ID NO: 10508 - protein, 11 aa, Homo sapiens
  CDR3 for beta chain variable domain of TCR clone 5254 (TRBV29-1, TRBJ2-5)
CSEDRTGTQYF

SEQ ID NO: 10509 - protein, 15 aa, Homo sapiens
  CDR3 for alpha chain variable domain of TCR clone 5255 (TRAV8-3, TRAJ40)
CAAPSLGSGTYRYIF

SEQ ID NO: 10510 - protein, 12 aa, Homo sapiens
  CDR3 for beta chain variable domain of TCR clone 5255 (TRBV11-2, TRBJ2-2)
CASSLGGGELFF

SEQ ID NO: 10511 - protein, 14 aa, Homo sapiens
  CDR3 for alpha chain variable domain of TCR clone 5256 (TRAV8-3, TRAJ13)
CAVGGTFGYQKVTF

SEQ ID NO: 10512 - protein, 17 aa, Homo sapiens
  CDR3 for beta chain variable domain of TCR clone 5256 (TRBV7-9, TRBJ2-1)
CASSAGTLGRSYNEQFF

SEQ ID NO: 10513 - protein, 14 aa, Homo sapiens
  CDR3 for alpha chain variable domain of TCR clone 5257 (TRAV35, TRAJ46)
CAGPQKSSGDKLTF

SEQ ID NO: 10514 - protein, 12 aa, Homo sapiens
  CDR3 for beta chain variable domain of TCR clone 5257 (TRBV19, TRBJ2-1)
CASSMQDTEQFF

SEQ ID NO: 10515 - protein, 15 aa, Homo sapiens
  CDR3 for alpha chain variable domain of TCR clone 5258 (TRAV1-2, TRAJ12)
CADARWMDSSYKLIF

SEQ ID NO: 10516 - protein, 11 aa, Homo sapiens
  CDR3 for beta chain variable domain of TCR clone 5258 (TRBV29-1, TRBJ2-5)
CSEDRTGTQYF

SEQ ID NO: 10517 - protein, 13 aa, Homo sapiens
  CDR3 for alpha chain variable domain of TCR clone 5259 (TRAV12-2, TRAJ9)
CAGGNTGGFKTIF

SEQ ID NO: 10518 - protein, 17 aa, Homo sapiens
  CDR3 for beta chain variable domain of TCR clone 5259 (TRBV4-1, TRBJ2-1)
CASSQGRGGGLYNEQFF

SEQ ID NO: 10519 - protein, 13 aa, Homo sapiens
  CDR3 for alpha chain variable domain of TCR clone 5260 (TRAV8-1, TRAJ34)
CAVNGKGTDKLIF

SEQ ID NO: 10520 - protein, 13 aa, Homo sapiens
  CDR3 for beta chain variable domain of TCR clone 5260 (TRBV20-1, TRBJ2-5)
CSARLAGVETQYF

SEQ ID NO: 10521 - protein, 10 aa, Homo sapiens
  CDR3 for alpha chain variable domain of TCR clone 5261 (TRAV35, TRAJ41)
DANSGYALNF

SEQ ID NO: 10522 - protein, 14 aa, Homo sapiens
  CDR3 for beta chain variable domain of TCR clone 5261 (TRBV9, TRBJ2-3)
CASSVGLSTDTQYF

SEQ ID NO: 10523 - protein, 15 aa, Homo sapiens
  CDR3 for alpha chain variable domain of TCR clone 5262 (TRAV17, TRAJ13)
CATVPNSGGYQKVTF

SEQ ID NO: 10524 - protein, 13 aa, Homo sapiens
  CDR3 for beta chain variable domain of TCR clone 5262 (TRBV3-1, TRBJ1-5)
CASSQAGGQPQHF

SEQ ID NO: 10525 - protein, 16 aa, Homo sapiens
  CDR3 for alpha chain variable domain of TCR clone 5263 (TRAV13-1, TRAJ18)
CAASRMRGSTLGRLYF

SEQ ID NO: 10526 - protein, 15 aa, Homo sapiens
  CDR3 for beta chain variable domain of TCR clone 5263 (TRBV29-1, TRBJ2-1)
CSVGRHALFYNEQFF

SEQ ID NO: 10527 - protein, 14 aa, Homo sapiens
  CDR3 for alpha chain variable domain of TCR clone 5264 (TRAV13-1, TRAJ10)
CAASSTGGGNKLTF

SEQ ID NO: 10528 - protein, 15 aa, Homo sapiens
  CDR3 for beta chain variable domain of TCR clone 5264 (TRBV11-3, TRBJ1-3)
CASSLFGPSGNTIYF

SEQ ID NO: 10529 - protein, 12 aa, Homo sapiens
  CDR3 for alpha chain variable domain of TCR clone 5265 (TRAV12-1, TRAJ40)
CVVYSGTYKYIF

SEQ ID NO: 10530 - protein, 18 aa, Homo sapiens
  CDR3 for beta chain variable domain of TCR clone 5265 (TRBV11-2, TRBJ2-3)
CASSLGGAARGAPNTQYF

SEQ ID NO: 10531 - protein, 14 aa, Homo sapiens
  CDR3 for alpha chain variable domain of TCR clone 5266 (TRAV1-2, TRAJ8)
CAVREDTGFQKLVF

SEQ ID NO: 10532 - protein, 13 aa, Homo sapiens
  CDR3 for beta chain variable domain of TCR clone 5266 (TRBV12-4, TRBJ1-2)
CASSSGLTVISTF

SEQ ID NO: 10533 - protein, 14 aa, Homo sapiens
  CDR3 for alpha chain variable domain of TCR clone 5267 (TRAV12-2, TRAJ13)
CAVKKTGGYQKVTF

SEQ ID NO: 10534 - protein, 15 aa, Homo sapiens
  CDR3 for beta chain variable domain of TCR clone 5267 (TRBV5-1, TRBJ2-1)
CASSPPRAPYNEQFF

SEQ ID NO: 10535 - protein, 16 aa, Homo sapiens
  CDR3 for alpha chain variable domain of TCR clone 5268 (TRAV14/DV4, TRAJ53)
CAMREGGGGSNYKLTF

SEQ ID NO: 10536 - protein, 14 aa, Homo sapiens
  CDR3 for beta chain variable domain of TCR clone 5268 (TRBV20-1, TRBJ2-7)
CSAKTGTGGYEQYF

SEQ ID NO: 10537 - protein, 14 aa, Homo sapiens
  CDR3 for alpha chain variable domain of TCR clone 5269 (TRAV1-2, TRAJ8)
CAVREDTGFQELVF

SEQ ID NO: 10538 - protein, 17 aa, Homo sapiens
  CDR3 for beta chain variable domain of TCR clone 5269 (TRBV11-2, TRBJ2-1)
CASSLYPPGVEYNEQFF

SEQ ID NO: 10539 - protein, 14 aa, Homo sapiens
  CDR3 for alpha chain variable domain of TCR clone 5270 (TRAV9-2, TRAJ39)
CALYIYNAGNMLTF

SEQ ID NO: 10540 - protein, 14 aa, Homo sapiens
  CDR3 for beta chain variable domain of TCR clone 5270 (TRBV7-9, TRBJ2-1)
CASSPRDSLYEQFF

SEQ ID NO: 10541 - protein, 13 aa, Homo sapiens
  CDR3 for alpha chain variable domain of TCR clone 5271 (TRAV2, TRAJ26)
CAVVGNYGQNFVF

SEQ ID NO: 10542 - protein, 14 aa, Homo sapiens
  CDR3 for beta chain variable domain of TCR clone 5271 (TRBV6-5, TRBJ2-2)
CASTEGQETGELFF

SEQ ID NO: 10543 - protein, 16 aa, Homo sapiens
  CDR3 for alpha chain variable domain of TCR clone 5272 (TRAV12-3, TRAJ53)
CAMSPGSGGSNYKLTF

SEQ ID NO: 10544 - protein, 17 aa, Homo sapiens
  CDR3 for beta chain variable domain of TCR clone 5272 (TRBV11-2, TRBJ2-1)
CASSLYPPGVEYNEQFF

SEQ ID NO: 10545 - protein, 13 aa, Homo sapiens
  CDR3 for alpha chain variable domain of TCR clone 5273 (TRAV21, TRAJ27)
CAARPGNAGKSTF

SEQ ID NO: 10546 - protein, 14 aa, Homo sapiens
  CDR3 for beta chain variable domain of TCR clone 5273 (TRBV5-4, TRBJ1-1)
CASSLDSRRDEAFF

SEQ ID NO: 10547 - protein, 14 aa, Homo sapiens
  CDR3 for alpha chain variable domain of TCR clone 5274 (TRAV2, TRAJ8)
CAGRGNTGFQKLVF

SEQ ID NO: 10548 - protein, 13 aa, Homo sapiens
  CDR3 for beta chain variable domain of TCR clone 5274 (TRBV6-5, TRBJ2-7)
CASRTSGIHEQYF

SEQ ID NO: 10549 - protein, 16 aa, Homo sapiens
  CDR3 for alpha chain variable domain of TCR clone 5275 (TRAV30, TRAJ24)
CGTEIVDADSWGKFQF

SEQ ID NO: 10550 - protein, 13 aa, Homo sapiens
  CDR3 for beta chain variable domain of TCR clone 5275 (TRBV18, TRBJ1-1)
CASSGGRNTEAFF

SEQ ID NO: 10551 - protein, 14 aa, Homo sapiens
  CDR3 for alpha chain variable domain of TCR clone 5276 (TRAV12-3, TRAJ58)
CAMSTETSGSRLTF

SEQ ID NO: 10552 - protein, 15 aa, Homo sapiens
  CDR3 for beta chain variable domain of TCR clone 5276 (TRBV11-3, TRBJ1-1)
CASSLGGPGDTEAFF

SEQ ID NO: 10553 - protein, 15 aa, Homo sapiens
  CDR3 for alpha chain variable domain of TCR clone 5277 (TRAV12-1, TRAJ44)
CVADLPTGTASKLTF

SEQ ID NO: 10554 - protein, 13 aa, Homo sapiens
  CDR3 for beta chain variable domain of TCR clone 5277 (TRBV7-9, TRBJ1-2)
CASSLKQNYGYTF

SEQ ID NO: 10555 - protein, 13 aa, Homo sapiens
  CDR3 for alpha chain variable domain of TCR clone 5278 (TRAV12-1, TRAJ42)
CGGVGGSQGNLIF

SEQ ID NO: 10556 - protein, 15 aa, Homo sapiens
  CDR3 for beta chain variable domain of TCR clone 5278 (TRBV5-4, TRBJ1-4)
CASSSFGTGNEKLFF

SEQ ID NO: 10557 - protein, 13 aa, Homo sapiens
  CDR3 for alpha chain variable domain of TCR clone 5279 (TRAV13-2, TRAJ40)
CAETLSGTYKYIF

SEQ ID NO: 10558 - protein, 16 aa, Homo sapiens
  CDR3 for beta chain variable domain of TCR clone 5279 (TRBV20-1, TRBJ2-1)
CSARDFSGRIGDEQFF

SEQ ID NO: 10559 - protein, 14 aa, Homo sapiens
  CDR3 for alpha chain variable domain of TCR clone 5280 (TRAV27, TRAJ42)
CAGGDGGSQGNLIF

SEQ ID NO: 10560 - protein, 14 aa, Homo sapiens
  CDR3 for beta chain variable domain of TCR clone 5280 (TRBV19, TRBJ1-2)
CASSRQGSSIGYTF

SEQ ID NO: 10561 - protein, 10 aa, Homo sapiens
  CDR3 for alpha chain variable domain of TCR clone 5281 (TRAV21, TRAJ43)
CAVSANDMRF

SEQ ID NO: 10562 - protein, 13 aa, Homo sapiens
  CDR3 for beta chain variable domain of TCR clone 5281 (TRBV7-2, TRBJ1-2)
CASSLDGIYGYTF

SEQ ID NO: 10563 - protein, 16 aa, Homo sapiens
  CDR3 for alpha chain variable domain of TCR clone 5282 (TRAV8-2, TRAJ7)
CVVSEGPYYGNNRLAF

SEQ ID NO: 10564 - protein, 13 aa, Homo sapiens
  CDR3 for beta chain variable domain of TCR clone 5282 (TRBV19, TRBJ2-1)
CASSMYRVNEQFF

SEQ ID NO: 10565 - protein, 16 aa, Homo sapiens
  CDR3 for alpha chain variable domain of TCR clone 5283 (TRAV17, TRAJ28)
CATALDSGAGSYQLTF

SEQ ID NO: 10566 - protein, 15 aa, Homo sapiens
  CDR3 for beta chain variable domain of TCR clone 5283 (TRBV12-4, TRBJ1-2)
CASSFEAGLGYGYTF

SEQ ID NO: 10567 - protein, 16 aa, Homo sapiens
  CDR3 for alpha chain variable domain of TCR clone 5284 (TRAV30, TRAJ24)
CGTEIVDADSWGKFQF

SEQ ID NO: 10568 - protein, 14 aa, Homo sapiens
  CDR3 for beta chain variable domain of TCR clone 5284 (TRBV12-5, TRBJ2-5)
CASGSRAHQETQYF

SEQ ID NO: 10569 - protein, 15 aa, Homo sapiens
  CDR3 for alpha chain variable domain of TCR clone 5285 (TRAV4, TRAJ39)
CLVGPNNNAGNMLTF

SEQ ID NO: 10570 - protein, 15 aa, Homo sapiens
  CDR3 for beta chain variable domain of TCR clone 5285 (TRBV5-1, TRBJ2-1)
CASSPPRAPYNEQFF

SEQ ID NO: 10571 - protein, 11 aa, Homo sapiens
  CDR3 for alpha chain variable domain of TCR clone 5286 (TRAV23/DV6, TRAJ49)
CAARAGNQFYF

SEQ ID NO: 10572 - protein, 13 aa, Homo sapiens
  CDR3 for beta chain variable domain of TCR clone 5286 (TRBV19, TRBJ1-5)
CASSINFNQPQHF

SEQ ID NO: 10573 - protein, 14 aa, Homo sapiens
  CDR3 for alpha chain variable domain of TCR clone 5287 (TRAV1-2, TRAJ8)
CAVREDTGFQKLVF

SEQ ID NO: 10574 - protein, 15 aa, Homo sapiens
  CDR3 for beta chain variable domain of TCR clone 5287 (TRBV6-3, TRBJ2-7)
CASSSPGTVLYEQYF

SEQ ID NO: 10575 - protein, 13 aa, Homo sapiens
  CDR3 for alpha chain variable domain of TCR clone 5288 (TRAV21, TRAJ8)
CAAPNTGFQKLVF

SEQ ID NO: 10576 - protein, 13 aa, Homo sapiens
  CDR3 for beta chain variable domain of TCR clone 5288 (TRBV6-3, TRBJ2-3)
CASTLQGIDTQYF

SEQ ID NO: 10577 - protein, 13 aa, Homo sapiens
  CDR3 for alpha chain variable domain of TCR clone 5289 (TRAV1-2, TRAJ31)
CAVRGYNNARLMF

SEQ ID NO: 10578 - protein, 15 aa, Homo sapiens
  CDR3 for beta chain variable domain of TCR clone 5289 (TRBV5-7, TRBJ2-7)
CASSLGPGRGHEQYF

SEQ ID NO: 10579 - protein, 17 aa, Homo sapiens
  CDR3 for alpha chain variable domain of TCR clone 5290 (TRAV3, TRAJ38)
CAVRGCLNAGNNRKLIW

SEQ ID NO: 10580 - protein, 16 aa, Homo sapiens
  CDR3 for beta chain variable domain of TCR clone 5290 (TRBV20-1, TRBJ1-4)
CSAPGQGLLTNEKLFF

SEQ ID NO: 10581 - protein, 13 aa, Homo sapiens
  CDR3 for alpha chain variable domain of TCR clone 5291 (TRAV13-1, TRAJ39)
CATSIVMQATCSP

SEQ ID NO: 10582 - protein, 16 aa, Homo sapiens
  CDR3 for beta chain variable domain of TCR clone 5291 (TRBV20-1, TRBJ1-4)
CSAPGQGLLTNEKLFF

SEQ ID NO: 10583 - protein, 11 aa, Homo sapiens
  CDR3 for alpha chain variable domain of TCR clone 5292 (TRAV23/DV6, TRAJ9)
CAASLSPPNTG

SEQ ID NO: 10584 - protein, 14 aa, Homo sapiens
  CDR3 for beta chain variable domain of TCR clone 5292 (TRBV11-2, TRBJ2-5)
CASSRTGGIETQYF

SEQ ID NO: 10585 - protein, 11 aa, Homo sapiens
  CDR3 for alpha chain variable domain of TCR clone 5293 (TRAV21, TRAJ34)
CAVTNTDKLIF

SEQ ID NO: 10586 - protein, 14 aa, Homo sapiens
  CDR3 for beta chain variable domain of TCR clone 5293 (TRBV12-4, TRBJ2-1)
CASSLGQGASEQFF

SEQ ID NO: 10587 - protein, 15 aa, Homo sapiens
  CDR3 for alpha chain variable domain of TCR clone 5294 (TRAV12-1, TRAJ6)
CVVNSPSGGSYIPTF

SEQ ID NO: 10588 - protein, 15 aa, Homo sapiens
  CDR3 for beta chain variable domain of TCR clone 5294 (TRBV18, TRBJ1-1)
CASSGRTGEVTEAFF

SEQ ID NO: 10589 - protein, 13 aa, Homo sapiens
  CDR3 for alpha chain variable domain of TCR clone 5295 (TRAV3, TRAJ21)
CAVREPDFNKFYF

SEQ ID NO: 10590 - protein, 18 aa, Homo sapiens
  CDR3 for beta chain variable domain of TCR clone 5295 (TRBV20-1, TRBJ2-6)
CSAETTPTHGSGANVLTF

SEQ ID NO: 10591 - protein, 11 aa, Homo sapiens
  CDR3 for alpha chain variable domain of TCR clone 5296 (TRAV1-1, TRAJ23)
CAVRQGGKLIF

SEQ ID NO: 10592 - protein, 13 aa, Homo sapiens
  CDR3 for beta chain variable domain of TCR clone 5296 (TRBV12-5, TRBJ2-3)
CASGDRQSDTQYF

SEQ ID NO: 10593 - protein, 13 aa, Homo sapiens
  CDR3 for alpha chain variable domain of TCR clone 5297 (TRAV12-1, TRAJ40)
CVVPTSGTYKYIF

SEQ ID NO: 10594 - protein, 14 aa, Homo sapiens
  CDR3 for beta chain variable domain of TCR clone 5297 (TRBV6-1, TRBJ1-3)
CASVQGGGGNTIYF

SEQ ID NO: 10595 - protein, 14 aa, Homo sapiens
  CDR3 for alpha chain variable domain of TCR clone 5298 (TRAV2, TRAJ9)
CAVEDRSGGFKTIF

SEQ ID NO: 10596 - protein, 17 aa, Homo sapiens
  CDR3 for beta chain variable domain of TCR clone 5298 (TRBV13, TRBJ2-3)
CASSLSRVAGGRNTQYF

SEQ ID NO: 10597 - protein, 16 aa, Homo sapiens
  CDR3 for alpha chain variable domain of TCR clone 5299 (TRAV26-1, TRAJ36)
CIVRVPDQTGANNLFF

SEQ ID NO: 10598 - protein, 15 aa, Homo sapiens
  CDR3 for beta chain variable domain of TCR clone 5299 (TRBV19, TRBJ2-4)
CASRGPRRGENIQYF

SEQ ID NO: 10599 - protein, 15 aa, Homo sapiens
  CDR3 for alpha chain variable domain of TCR clone 5300 (TRAV2, TRAJ45)
CAVDGTGGGADGLTF

SEQ ID NO: 10600 - protein, 16 aa, Homo sapiens
  CDR3 for beta chain variable domain of TCR clone 5300 (TRBV6-5, TRBJ2-1)
CASSYSLSGGYNEQFF

SEQ ID NO: 10601 - protein, 13 aa, Homo sapiens
  CDR3 for alpha chain variable domain of TCR clone 5301 (TRAV21, TRAJ57)
CAVTQGGSEKLVF

SEQ ID NO: 10602 - protein, 17 aa, Homo sapiens
  CDR3 for beta chain variable domain of TCR clone 5301 (TRBV20-1, TRBJ2-2)
CSASGSGQGGLTGELFF

SEQ ID NO: 10603 - protein, 10 aa, Homo sapiens
  CDR3 for alpha chain variable domain of TCR clone 5302 (TRAV13-1, TRAJ7)
LIGGNNRLAF

SEQ ID NO: 10604 - protein, 15 aa, Homo sapiens
  CDR3 for beta chain variable domain of TCR clone 5302 (TRBV7-9, TRBJ1-1)
CASSLLEQGGTEAFF

SEQ ID NO: 10605 - protein, 14 aa, Homo sapiens
  CDR3 for alpha chain variable domain of TCR clone 5303 (TRAV1-2, TRAJ16)
CAVRGFSDGQKLLF

SEQ ID NO: 10606 - protein, 12 aa, Homo sapiens
  CDR3 for beta chain variable domain of TCR clone 5303 (TRBV14, TRBJ2-7)
CASSRLKGEQYF

SEQ ID NO: 10607 - protein, 15 aa, Homo sapiens
  CDR3 for alpha chain variable domain of TCR clone 5304 (TRAV26-1, TRAJ56)
CIVRVATGANSKLTF

SEQ ID NO: 10608 - protein, 16 aa, Homo sapiens
  CDR3 for beta chain variable domain of TCR clone 5304 (TRBV12-5, TRBJ2-5)
CASGPRTSGNQETQYF

SEQ ID NO: 10609 - protein, 14 aa, Homo sapiens
  CDR3 for alpha chain variable domain of TCR clone 5305 (TRAV1-2, TRAJ8)
CAVREDTGFQKLVF

SEQ ID NO: 10610 - protein, 12 aa, Homo sapiens
  CDR3 for beta chain variable domain of TCR clone 5305 (TRBV29-1, TRBJ2-7)
CSARDRPYEQYF

SEQ ID NO: 10611 - protein, 12 aa, Homo sapiens
  CDR3 for alpha chain variable domain of TCR clone 5306 (TRAV27, TRAJ11)
CAGASGYSTLTF

SEQ ID NO: 10612 - protein, 14 aa, Homo sapiens
  CDR3 for beta chain variable domain of TCR clone 5306 (TRBV12-5, TRBJ1-3)
CASGPAGSGNTIYF

SEQ ID NO: 10613 - protein, 13 aa, Homo sapiens
  CDR3 for alpha chain variable domain of TCR clone 5307 (TRAV35, TRAJ36)
CAGPRIGANNLFF

SEQ ID NO: 10614 - protein, 15 aa, Homo sapiens
  CDR3 for beta chain variable domain of TCR clone 5307 (TRBV20-1, TRBJ2-7)
CSARDRVSGMDEQYF

SEQ ID NO: 10615 - protein, 13 aa, Homo sapiens
  CDR3 for alpha chain variable domain of TCR clone 5308 (TRAV8-6, TRAJ49)
CAVITNTGNQFYF

SEQ ID NO: 10616 - protein, 13 aa, Homo sapiens
  CDR3 for beta chain variable domain of TCR clone 5308 (TRBV7-9, TRBJ2-7)
CASSFAGAYEQYF

SEQ ID NO: 10617 - protein, 12 aa, Homo sapiens
  CDR3 for alpha chain variable domain of TCR clone 5309 (TRAV8-6, TRAJ43)
CAVSHNNNDMRF

SEQ ID NO: 10618 - protein, 13 aa, Homo sapiens
  CDR3 for beta chain variable domain of TCR clone 5309 (TRBV7-3, TRBJ1-1)
CASSQDWGAEAFF

SEQ ID NO: 10619 - protein, 21 aa, Homo sapiens
  CDR3 for alpha chain variable domain of TCR clone 5310 (TRAV9-2, )
CALIQIGDIQNPDPAVYQLRD

SEQ ID NO: 10620 - protein, 17 aa, Homo sapiens
  CDR3 for beta chain variable domain of TCR clone 5310 (TRBV7-8, TRBJ2-6)
CASSAGTGGAGANVLTF

SEQ ID NO: 10621 - protein, 14 aa, Homo sapiens
  CDR3 for alpha chain variable domain of TCR clone 5311 (TRAV12-2, TRAJ44)
CAVNPAGTASKLTF

SEQ ID NO: 10622 - protein, 14 aa, Homo sapiens
  CDR3 for beta chain variable domain of TCR clone 5311 (TRBV7-2, TRBJ1-3)
CASSRLRSGNTIYF

SEQ ID NO: 10623 - protein, 16 aa, Homo sapiens
  CDR3 for alpha chain variable domain of TCR clone 5312 (TRAV8-3, TRAJ44)
CAVGASNTGTASRLTF

SEQ ID NO: 10624 - protein, 15 aa, Homo sapiens
  CDR3 for beta chain variable domain of TCR clone 5312 (TRBV27, TRBJ1-5)
CASTFNRGSNQPQHF

SEQ ID NO: 10625 - protein, 15 aa, Homo sapiens
  CDR3 for alpha chain variable domain of TCR clone 5313 (TRAV21, TRAJ53)
CATLNSGGSNYKLTF

SEQ ID NO: 10626 - protein, 12 aa, Homo sapiens
  CDR3 for beta chain variable domain of TCR clone 5313 (TRBV7-8, TRBJ2-7)
CASSLGDREQYF

SEQ ID NO: 10627 - protein, 13 aa, Homo sapiens
  CDR3 for alpha chain variable domain of TCR clone 5314 (TRAV17, TRAJ39)
CATDYGAGNMLTF

SEQ ID NO: 10628 - protein, 15 aa, Homo sapiens
  CDR3 for beta chain variable domain of TCR clone 5314 (TRBV10-1, TRBJ1-1)
CASSESQGGNTEAFF

SEQ ID NO: 10629 - protein, 14 aa, Homo sapiens
  CDR3 for alpha chain variable domain of TCR clone 5315 (TRAV14/DV4, TRAJ54)
CAMREAPGAQKLVF

SEQ ID NO: 10630 - protein, 15 aa, Homo sapiens
  CDR3 for beta chain variable domain of TCR clone 5315 (TRBV7-2, TRBJ2-2)
CASRRPGQNTGELFF

SEQ ID NO: 10631 - protein, 14 aa, Homo sapiens
  CDR3 for alpha chain variable domain of TCR clone 5316 (TRAV23/DV6, TRAJ39)
CAASIGNAGNMLTF

SEQ ID NO: 10632 - protein, 14 aa, Homo sapiens
  CDR3 for beta chain variable domain of TCR clone 5316 (TRBV7-3, TRBJ1-1)
CASSLKGGNTEAFF

SEQ ID NO: 10633 - protein, 15 aa, Homo sapiens
  CDR3 for alpha chain variable domain of TCR clone 5317 (TRAV8-6, TRAJ38)
CAVSSNAGNNRKLIW

SEQ ID NO: 10634 - protein, 14 aa, Homo sapiens
  CDR3 for beta chain variable domain of TCR clone 5317 (TRBV14, TRBJ2-1)
CASSQVQGRGEQFF

SEQ ID NO: 10635 - protein, 16 aa, Homo sapiens
  CDR3 for alpha chain variable domain of TCR clone 5318 (TRAV12-1, TRAJ12)
CVVDTLLMDSSYKLIF

SEQ ID NO: 10636 - protein, 13 aa, Homo sapiens
  CDR3 for beta chain variable domain of TCR clone 5318 (TRBV11-2, TRBJ2-1)
CASSSEAYNEQFF

SEQ ID NO: 10637 - protein, 15 aa, Homo sapiens
  CDR3 for alpha chain variable domain of TCR clone 5319 (TRAV21, TRAJ53)
CATLNSGGSNYKLTF

SEQ ID NO: 10638 - protein, 14 aa, Homo sapiens
  CDR3 for beta chain variable domain of TCR clone 5319 (TRBV9, TRBJ1-2)
CASSVSTRSYGYTF

SEQ ID NO: 10639 - protein, 14 aa, Homo sapiens
  CDR3 for alpha chain variable domain of TCR clone 5320 (TRAV1-2, TRAJ16)
CAVNRFSDGQKLLF

SEQ ID NO: 10640 - protein, 12 aa, Homo sapiens
  CDR3 for beta chain variable domain of TCR clone 5320 (TRBV12-4, TRBJ2-7)
CASSLGGYEQYF

SEQ ID NO: 10641 - protein, 12 aa, Homo sapiens
  CDR3 for alpha chain variable domain of TCR clone 5321 (TRAV25, TRAJ54)
CAGGWGAQKLVF

SEQ ID NO: 10642 - protein, 12 aa, Homo sapiens
  CDR3 for beta chain variable domain of TCR clone 5321 (TRBV7-8, TRBJ2-7)
CASSLGDREQYF

SEQ ID NO: 10643 - protein, 14 aa, Homo sapiens
  CDR3 for alpha chain variable domain of TCR clone 5322 (TRAV13-2, TRAJ57)
CAESTQGGSEKLVF

SEQ ID NO: 10644 - protein, 14 aa, Homo sapiens
  CDR3 for beta chain variable domain of TCR clone 5322 (TRBV10-3, TRBJ2-2)
CAISEVSHSGELFF

SEQ ID NO: 10645 - protein, 13 aa, Homo sapiens
  CDR3 for alpha chain variable domain of TCR clone 5323 (TRAV3, TRAJ40)
CAVRGSGAYKYIF

SEQ ID NO: 10646 - protein, 15 aa, Homo sapiens
  CDR3 for beta chain variable domain of TCR clone 5323 (TRBV27, TRBJ1-5)
CASSSSGTGNQPQHF

SEQ ID NO: 10647 - protein, 16 aa, Homo sapiens
  CDR3 for alpha chain variable domain of TCR clone 5324 (TRAV4, TRAJ18)
CCVLLIGGSTLGRLYF

SEQ ID NO: 10648 - protein, 14 aa, Homo sapiens
  CDR3 for beta chain variable domain of TCR clone 5324 (TRBV18, TRBJ1-2)
CASSPSGRDYGYTF

SEQ ID NO: 10649 - protein, 14 aa, Homo sapiens
  CDR3 for alpha chain variable domain of TCR clone 5325 (TRAV1-2, TRAJ16)
CAVNRFSDGQKLLF

SEQ ID NO: 10650 - protein, 13 aa, Homo sapiens
  CDR3 for beta chain variable domain of TCR clone 5325 (TRBV15, TRBJ1-6)
CATSGGLNSPLHF

SEQ ID NO: 10651 - protein, 14 aa, Homo sapiens
  CDR3 for alpha chain variable domain of TCR clone 5326 (TRAV1-2, TRAJ8)
CAVREDTGFQKLVF

SEQ ID NO: 10652 - protein, 13 aa, Homo sapiens
  CDR3 for beta chain variable domain of TCR clone 5326 (TRBV6-4, TRBJ2-3)
CASSVSWADTQYF

SEQ ID NO: 10653 - protein, 11 aa, Homo sapiens
  CDR3 for alpha chain variable domain of TCR clone 5327 (TRAV26-1, TRAJ37)
CIVRVGRKLIF

SEQ ID NO: 10654 - protein, 15 aa, Homo sapiens
  CDR3 for beta chain variable domain of TCR clone 5327 (TRBV19, TRBJ2-7)
CASSIGLAVSYEQYF

SEQ ID NO: 10655 - protein, 11 aa, Homo sapiens
  CDR3 for alpha chain variable domain of TCR clone 5328 (TRAV12-1, TRAJ26)
CVVAYGQNFVF

SEQ ID NO: 10656 - protein, 13 aa, Homo sapiens
  CDR3 for beta chain variable domain of TCR clone 5328 (TRBV7-2, TRBJ2-4)
CASSREHANIQYF

SEQ ID NO: 10657 - protein, 14 aa, Homo sapiens
  CDR3 for alpha chain variable domain of TCR clone 5329 (TRAV13-2, TRAJ17)
CAENSKAAGNKLTF

SEQ ID NO: 10658 - protein, 14 aa, Homo sapiens
  CDR3 for beta chain variable domain of TCR clone 5329 (TRBV4-1, TRBJ2-2)
CASSQAVNTGELFF

SEQ ID NO: 10659 - protein, 12 aa, Homo sapiens
  CDR3 for alpha chain variable domain of TCR clone 5330 (TRAV3, TRAJ20)
CAVRDPDYKLSF

SEQ ID NO: 10660 - protein, 14 aa, Homo sapiens
  CDR3 for beta chain variable domain of TCR clone 5330 (TRBV7-2, TRBJ2-7)
CASSPKTSFYEQYF

SEQ ID NO: 10661 - protein, 14 aa, Homo sapiens
  CDR3 for alpha chain variable domain of TCR clone 5331 (TRAV8-3, TRAJ21)
CAVGLNPRSDKFYF

SEQ ID NO: 10662 - protein, 16 aa, Homo sapiens
  CDR3 for beta chain variable domain of TCR clone 5331 (TRBV7-9, TRBJ2-7)
CASSSPSANTVNEQYF

SEQ ID NO: 10663 - protein, 17 aa, Homo sapiens
  CDR3 for alpha chain variable domain of TCR clone 5332 (TRAV26-1, TRAJ21)
CIAKGKFYFGSGTKLNV

SEQ ID NO: 10664 - protein, 15 aa, Homo sapiens
  CDR3 for beta chain variable domain of TCR clone 5332 (TRBV7-2, TRBJ2-1)
CASSSGLAGGNEQFF

SEQ ID NO: 10665 - protein, 14 aa, Homo sapiens
  CDR3 for alpha chain variable domain of TCR clone 5333 (TRAV8-3, TRAJ4)
CAVGAAGGYNKLIF

SEQ ID NO: 10666 - protein, 13 aa, Homo sapiens
  CDR3 for beta chain variable domain of TCR clone 5333 (TRBV3-1, TRBJ1-1)
CASSPGVITEAFF

SEQ ID NO: 10667 - protein, 16 aa, Homo sapiens
  CDR3 for alpha chain variable domain of TCR clone 5334 (TRAV30, TRAJ24)
CGTGIVDADSWGKFQF

SEQ ID NO: 10668 - protein, 14 aa, Homo sapiens
  CDR3 for beta chain variable domain of TCR clone 5334 (TRBV12-5, TRBJ2-5)
CASGSRTHQETQYF

SEQ ID NO: 10669 - protein, 18 aa, Homo sapiens
  CDR3 for alpha chain variable domain of TCR clone 5335 (TRAV21, TRAJ52)
CAVRPSPAGGTSCGKLTF

SEQ ID NO: 10670 - protein, 17 aa, Homo sapiens
  CDR3 for beta chain variable domain of TCR clone 5335 (TRBV13, TRBJ2-3)
CASSLSRVAGGRNTQYF

SEQ ID NO: 10671 - protein, 17 aa, Homo sapiens
  CDR3 for alpha chain variable domain of TCR clone 5336 (TRAV3, TRAJ6)
CAVRDGPRAGGSYIPTF

SEQ ID NO: 10672 - protein, 14 aa, Homo sapiens
  CDR3 for beta chain variable domain of TCR clone 5336 (TRBV7-2, TRBJ2-7)
CASSPKTSFHEQYF

SEQ ID NO: 10673 - protein, 14 aa, Homo sapiens
  CDR3 for alpha chain variable domain of TCR clone 5337 (TRAV38-1, TRAJ40)
CALRPTSGTYKYIF

SEQ ID NO: 10674 - protein, 15 aa, Homo sapiens
  CDR3 for beta chain variable domain of TCR clone 5337 (TRBV20-1, TRBJ2-7)
CSARDRVSGMDEQYF

SEQ ID NO: 10675 - protein, 17 aa, Homo sapiens
  CDR3 for alpha chain variable domain of TCR clone 5338 (TRAV3, TRAJ6)
CAVRDGPRAGGSYIPTF

SEQ ID NO: 10676 - protein, 15 aa, Homo sapiens
  CDR3 for beta chain variable domain of TCR clone 5338 (TRBV7-8, TRBJ1-5)
CASSLERRGLEPQHF

SEQ ID NO: 10677 - protein, 15 aa, Homo sapiens
  CDR3 for alpha chain variable domain of TCR clone 5339 (TRAV27, TRAJ38)
CAGRFDAGNNRKLIW

SEQ ID NO: 10678 - protein, 13 aa, Homo sapiens
  CDR3 for beta chain variable domain of TCR clone 5339 (TRBV20-1, TRBJ2-1)
TSGALPPGNEQFF

SEQ ID NO: 10679 - protein, 10 aa, Homo sapiens
  CDR3 for alpha chain variable domain of TCR clone 5340 (TRAV23/DV6, TRAJ57)
CAASSTLSQG

SEQ ID NO: 10680 - protein, 13 aa, Homo sapiens
  CDR3 for beta chain variable domain of TCR clone 5340 (TRBV15, TRBJ1-6)
CATSGGLNSPLHF

SEQ ID NO: 10681 - protein, 17 aa, Homo sapiens
  CDR3 for alpha chain variable domain of TCR clone 5341 (TRAV20, TRAJ57)
CAVQAIVAQGGSEKLVF

SEQ ID NO: 10682 - protein, 13 aa, Homo sapiens
  CDR3 for beta chain variable domain of TCR clone 5341 (TRBV20-1, TRBJ2-5)
CSAFVGGGETQYF

SEQ ID NO: 10683 - protein, 12 aa, Homo sapiens
  CDR3 for alpha chain variable domain of TCR clone 5342 (TRAV12-3, TRAJ17)
CAMTLTGNKLTF

SEQ ID NO: 10684 - protein, 17 aa, Homo sapiens
  CDR3 for beta chain variable domain of TCR clone 5342 (TRBV13, TRBJ2-3)
CASSLSRVAGGRNTQYF

SEQ ID NO: 10685 - protein, 14 aa, Homo sapiens
  CDR3 for alpha chain variable domain of TCR clone 5343 (TRAV1-2, TRAJ8)
CAVREDTGFQKLVF

SEQ ID NO: 10686 - protein, 15 aa, Homo sapiens
  CDR3 for beta chain variable domain of TCR clone 5343 (TRBV6-3, TRBJ2-7)
CASSSPGTVFYEQYL

SEQ ID NO: 10687 - protein, 16 aa, Homo sapiens
  CDR3 for alpha chain variable domain of TCR clone 5344 (TRAV30, TRAJ24)
CGPEIVDADSWGKFQF

SEQ ID NO: 10688 - protein, 14 aa, Homo sapiens
  CDR3 for beta chain variable domain of TCR clone 5344 (TRBV12-5, TRBJ2-5)
CASGSRTHQETQYF

SEQ ID NO: 10689 - protein, 13 aa, Homo sapiens
  CDR3 for alpha chain variable domain of TCR clone 5345 (TRAV12-1, TRAJ20)
CVVNVPNDYKLSF

SEQ ID NO: 10690 - protein, 12 aa, Homo sapiens
  CDR3 for beta chain variable domain of TCR clone 5345 (TRBV11-2, TRBJ2-1)
CASSVQREGQFF

SEQ ID NO: 10691 - protein, 14 aa, Homo sapiens
  CDR3 for alpha chain variable domain of TCR clone 5346 (TRAV25, TRAJ45)
CAGNSGGGADGLTF

SEQ ID NO: 10692 - protein, 14 aa, Homo sapiens
  CDR3 for beta chain variable domain of TCR clone 5346 (TRBV29-1, TRBJ1-2)
CSARRGTQTSGYTF

SEQ ID NO: 10693 - protein, 11 aa, Homo sapiens
  CDR3 for alpha chain variable domain of TCR clone 5347 (TRAV2, TRAJ13)
CASGGYQKVTF

SEQ ID NO: 10694 - protein, 17 aa, Homo sapiens
  CDR3 for beta chain variable domain of TCR clone 5347 (TRBV11-2, TRBJ2-1)
CASSLYPPGVEYNEQFF

SEQ ID NO: 10695 - protein, 12 aa, Homo sapiens
  CDR3 for alpha chain variable domain of TCR clone 5348 (TRAV17, TRAJ30)
CATDARDDKIIF

SEQ ID NO: 10696 - protein, 16 aa, Homo sapiens
  CDR3 for beta chain variable domain of TCR clone 5348 (TRBV5-7, TRBJ2-7)
CASSPTSGRELDEQYF

SEQ ID NO: 10697 - protein, 12 aa, Homo sapiens
  CDR3 for alpha chain variable domain of TCR clone 5349 (TRAV12-2, TRAJ21)
CAPSDNFNKFYF

SEQ ID NO: 10698 - protein, 14 aa, Homo sapiens
  CDR3 for beta chain variable domain of TCR clone 5349 (TRBV12-4, TRBJ1-1)
CASSLRSSGTEAFF

SEQ ID NO: 10699 - protein, 18 aa, Homo sapiens
  CDR3 for alpha chain variable domain of TCR clone 5350 (TRAV21, TRAJ52)
CAVRPSPAGGTSYGKLTF

SEQ ID NO: 10700 - protein, 16 aa, Homo sapiens
  CDR3 for beta chain variable domain of TCR clone 5350 (TRBV13, TRBJ2-2)
CASSPRTGEHTGELFF

SEQ ID NO: 10701 - protein, 15 aa, Homo sapiens
  CDR3 for alpha chain variable domain of TCR clone 5351 (TRAV12-3, TRAJ6)
CAMSATTGGSYIPTF

SEQ ID NO: 10702 - protein, 15 aa, Homo sapiens
  CDR3 for beta chain variable domain of TCR clone 5351 (TRBV7-2, TRBJ2-5)
CASSGILAGAETQYF

SEQ ID NO: 10703 - protein, 14 aa, Homo sapiens
  CDR3 for alpha chain variable domain of TCR clone 5352 (TRAV1-2, TRAJ16)
CAVNRFSDGQKLLF

SEQ ID NO: 10704 - protein, 14 aa, Homo sapiens
  CDR3 for beta chain variable domain of TCR clone 5352 (TRBV7-2, TRBJ2-7)
CASRSQGAAYEQYF

SEQ ID NO: 10705 - protein, 17 aa, Homo sapiens
  CDR3 for alpha chain variable domain of TCR clone 5353 (TRAV12-2, TRAJ48)
CASNEKLTFGTGTRLTI

SEQ ID NO: 10706 - protein, 16 aa, Homo sapiens
  CDR3 for beta chain variable domain of TCR clone 5353 (TRBV7-3, TRBJ2-2)
CASSLKRGTLSGELFF

SEQ ID NO: 10707 - protein, 14 aa, Homo sapiens
  CDR3 for alpha chain variable domain of TCR clone 5354 (TRAV12-1, TRAJ17)
CVVSYKAAGNKLTF

SEQ ID NO: 10708 - protein, 17 aa, Homo sapiens
  CDR3 for beta chain variable domain of TCR clone 5354 (TRBV20-1, TRBJ2-1)
CSASSSGLAGSYNEQFF

SEQ ID NO: 10709 - protein, 15 aa, Homo sapiens
  CDR3 for alpha chain variable domain of TCR clone 5355 (TRAV13-1, TRAJ36)
CAASIRQTGANNLFF

SEQ ID NO: 10710 - protein, 17 aa, Homo sapiens
  CDR3 for beta chain variable domain of TCR clone 5355 (TRBV20-1, TRBJ2-2)
CSARDRTSGRHTGELFF

SEQ ID NO: 10711 - protein, 12 aa, Homo sapiens
  CDR3 for alpha chain variable domain of TCR clone 5356 (TRAV26-1, TRAJ23)
CIVTPQGGKLIF

SEQ ID NO: 10712 - protein, 13 aa, Homo sapiens
  CDR3 for beta chain variable domain of TCR clone 5356 (TRBV6-6, TRBJ1-5)
CASSRGSNQPQHF

SEQ ID NO: 10713 - protein, 13 aa, Homo sapiens
  CDR3 for alpha chain variable domain of TCR clone 5357 (TRAV21, TRAJ20)
CAVGLRVDYKLSF

SEQ ID NO: 10714 - protein, 15 aa, Homo sapiens
  CDR3 for beta chain variable domain of TCR clone 5357 (TRBV27, TRBJ2-1)
CASSNGGGSSNEQFF

SEQ ID NO: 10715 - protein, 15 aa, Homo sapiens
  CDR3 for alpha chain variable domain of TCR clone 5358 (TRAV13-1, TRAJ52)
CAATSPRTSYGKLTF

SEQ ID NO: 10716 - protein, 16 aa, Homo sapiens
  CDR3 for beta chain variable domain of TCR clone 5358 (TRBV7-3, TRBJ2-2)
CASSLKRGTLSGELFF

SEQ ID NO: 10717 - protein, 14 aa, Homo sapiens
  CDR3 for alpha chain variable domain of TCR clone 5359 (TRAV1-2, TRAJ8)
CAVREDTGFQKLVF

SEQ ID NO: 10718 - protein, 13 aa, Homo sapiens
  CDR3 for beta chain variable domain of TCR clone 5359 (TRBV23-1, TRBJ1-4)
CASRGKFNEKLFF

SEQ ID NO: 10719 - protein, 16 aa, Homo sapiens
  CDR3 for alpha chain variable domain of TCR clone 5360 (TRAV9-2, TRAJ6)
CALRGPASGGSYIPTF

SEQ ID NO: 10720 - protein, 13 aa, Homo sapiens
  CDR3 for beta chain variable domain of TCR clone 5360 (TRBV7-9, TRBJ2-7)
CASSAGLQYEQYF

SEQ ID NO: 10721 - protein, 17 aa, Homo sapiens
  CDR3 for alpha chain variable domain of TCR clone 5361 (TRAV24, TRAJ42)
CAFRVKNYGGSQGNLIF

SEQ ID NO: 10722 - protein, 15 aa, Homo sapiens
  CDR3 for beta chain variable domain of TCR clone 5361 (TRBV4-3, TRBJ2-7)
CASSQGDWGDYEQYF

SEQ ID NO: 10723 - protein, 14 aa, Homo sapiens
  CDR3 for alpha chain variable domain of TCR clone 5362 (TRAV8-3, TRAJ13)
CAVGAQEGYQKVTF

SEQ ID NO: 10724 - protein, 13 aa, Homo sapiens
  CDR3 for beta chain variable domain of TCR clone 5362 (TRBV11-2, TRBJ2-5)
CASSSTGEETQYF

SEQ ID NO: 10725 - protein, 13 aa, Homo sapiens
  CDR3 for alpha chain variable domain of TCR clone 5363 (TRAV23/DV6, TRAJ24)
CAASEDSWGKLQF

SEQ ID NO: 10726 - protein, 12 aa, Homo sapiens
  CDR3 for beta chain variable domain of TCR clone 5363 (TRBV5-1, TRBJ2-7)
CASSDSTYEQYF

SEQ ID NO: 10727 - protein, 13 aa, Homo sapiens
  CDR3 for alpha chain variable domain of TCR clone 5364 (TRAV13-2, TRAJ16)
CADARTDGQKLLF

SEQ ID NO: 10728 - protein, 15 aa, Homo sapiens
  CDR3 for beta chain variable domain of TCR clone 5364 (TRBV29-1, TRBJ2-1)
CSVEAPRGSPNEQFF

SEQ ID NO: 10729 - protein, 15 aa, Homo sapiens
  CDR3 for alpha chain variable domain of TCR clone 5365 (TRAV1-2, TRAJ39)
CAVEGVDNAGNMLTF

SEQ ID NO: 10730 - protein, 13 aa, Homo sapiens
  CDR3 for beta chain variable domain of TCR clone 5365 (TRBV27, TRBJ1-6)
CASRWTGYSPLHF

SEQ ID NO: 10731 - protein, 15 aa, Homo sapiens
  CDR3 for alpha chain variable domain of TCR clone 5366 (TRAV4, TRAJ28)
CLVEGSGAGSYQLTF

SEQ ID NO: 10732 - protein, 15 aa, Homo sapiens
  CDR3 for beta chain variable domain of TCR clone 5366 (TRBV9, TRBJ2-3)
CASSVRGLAVDTQYF

SEQ ID NO: 10733 - protein, 12 aa, Homo sapiens
  CDR3 for alpha chain variable domain of TCR clone 5367 (TRAV17, TRAJ57)
CATDGGSEKLVF

SEQ ID NO: 10734 - protein, 15 aa, Homo sapiens
  CDR3 for beta chain variable domain of TCR clone 5367 (TRBV6-3, TRBJ2-2)
CASSFLATLTGELFF

SEQ ID NO: 10735 - protein, 15 aa, Homo sapiens
  CDR3 for alpha chain variable domain of TCR clone 5368 (TRAV3, TRAJ22)
CAVRDRGGSARQLTF

SEQ ID NO: 10736 - protein, 13 aa, Homo sapiens
  CDR3 for beta chain variable domain of TCR clone 5368 (TRBV7-9, TRBJ1-2)
CASSLKQNYGYTF

SEQ ID NO: 10737 - protein, 13 aa, Homo sapiens
  CDR3 for alpha chain variable domain of TCR clone 5369 (TRAV20, TRAJ31)
CAVQAWNNARLMF

SEQ ID NO: 10738 - protein, 12 aa, Homo sapiens
  CDR3 for beta chain variable domain of TCR clone 5369 (TRBV11-2, TRBJ2-2)
CASSLGGGELFF

SEQ ID NO: 10739 - protein, 11 aa, Homo sapiens
  CDR3 for alpha chain variable domain of TCR clone 5370 (TRAV17, TRAJ43)
CATPRSNDMRF

SEQ ID NO: 10740 - protein, 14 aa, Homo sapiens
  CDR3 for beta chain variable domain of TCR clone 5370 (TRBV7-2, TRBJ2-7)
CASSPKTSFYEQYF

SEQ ID NO: 10741 - protein, 15 aa, Homo sapiens
  CDR3 for alpha chain variable domain of TCR clone 5371 (TRAV26-1, TRAJ39)
CIVRDGSNAGNMLTF

SEQ ID NO: 10742 - protein, 14 aa, Homo sapiens
  CDR3 for beta chain variable domain of TCR clone 5371 (TRBV10-3, TRBJ1-2)
CAIRAGTGDYGYTF

SEQ ID NO: 10743 - protein, 10 aa, Homo sapiens
  CDR3 for alpha chain variable domain of TCR clone 5372 (TRAV2, TRAJ34)
CAVVNDKLIF

SEQ ID NO: 10744 - protein, 14 aa, Homo sapiens
  CDR3 for beta chain variable domain of TCR clone 5372 (TRBV20-1, TRBJ2-3)
CSARGGTSTDTQYF

SEQ ID NO: 10745 - protein, 19 aa, Homo sapiens
  CDR3 for alpha chain variable domain of TCR clone 5373 (TRAV26-1, TRAJ28)
CIVRVAHAYSGAGSYQLTF

SEQ ID NO: 10746 - protein, 12 aa, Homo sapiens
  CDR3 for beta chain variable domain of TCR clone 5373 (TRBV27, TRBJ2-2)
CASKLFTGELFF

SEQ ID NO: 10747 - protein, 16 aa, Homo sapiens
  CDR3 for alpha chain variable domain of TCR clone 5374 (TRAV8-2, TRAJ45)
CVVSEGTGGGADGLTF

SEQ ID NO: 10748 - protein, 15 aa, Homo sapiens
  CDR3 for beta chain variable domain of TCR clone 5374 (TRBV7-9, TRBJ2-5)
CASSLVAGGLETQYF

SEQ ID NO: 10749 - protein, 14 aa, Homo sapiens
  CDR3 for alpha chain variable domain of TCR clone 5375 (TRAV12-2, TRAJ11)
CAVRKNSGYSTLTF

SEQ ID NO: 10750 - protein, 14 aa, Homo sapiens
  CDR3 for beta chain variable domain of TCR clone 5375 (TRBV7-2, TRBJ2-5)
CASWQERFRETQYF

SEQ ID NO: 10751 - protein, 12 aa, Homo sapiens
  CDR3 for alpha chain variable domain of TCR clone 5376 (TRAV13-2, TRAJ23)
CAERHRGGKLIF

SEQ ID NO: 10752 - protein, 14 aa, Homo sapiens
  CDR3 for beta chain variable domain of TCR clone 5376 (TRBV11-2, TRBJ1-2)
CASSLGTANYGYTF

SEQ ID NO: 10753 - protein, 12 aa, Homo sapiens
  CDR3 for alpha chain variable domain of TCR clone 5377 (TRAV8-4, TRAJ43)
CAVSVNNNDMRF

SEQ ID NO: 10754 - protein, 15 aa, Homo sapiens
  CDR3 for beta chain variable domain of TCR clone 5377 (TRBV20-1, TRBJ2-7)
CSARDPVKGEGEQYF

SEQ ID NO: 10755 - protein, 14 aa, Homo sapiens
  CDR3 for alpha chain variable domain of TCR clone 5378 (TRAV12-1, TRAJ13)
CVVIDSGGHQKVTF

SEQ ID NO: 10756 - protein, 17 aa, Homo sapiens
  CDR3 for beta chain variable domain of TCR clone 5378 (TRBV15, TRBJ1-5)
CATSRAPPGTRNQPQHF

SEQ ID NO: 10757 - protein, 15 aa, Homo sapiens
  CDR3 for alpha chain variable domain of TCR clone 5379 (TRAV26-1, TRAJ29)
CIVRVEGSGNTPLVF

SEQ ID NO: 10758 - protein, 13 aa, Homo sapiens
  CDR3 for beta chain variable domain of TCR clone 5379 (TRBV28, TRBJ1-1)
CASSKQGWTEAFF

SEQ ID NO: 10759 - protein, 11 aa, Homo sapiens
  CDR3 for alpha chain variable domain of TCR clone 5380 (TRAV16, TRAJ26)
CALTRWSEFCL

SEQ ID NO: 10760 - protein, 13 aa, Homo sapiens
  CDR3 for beta chain variable domain of TCR clone 5380 (TRBV4-1, TRBJ2-2)
CASSQENTGELFF

SEQ ID NO: 10761 - protein, 14 aa, Homo sapiens
  CDR3 for alpha chain variable domain of TCR clone 5381 (TRAV16, TRAJ15)
CALSFNQAGTALIF

SEQ ID NO: 10762 - protein, 14 aa, Homo sapiens
  CDR3 for beta chain variable domain of TCR clone 5381 (TRBV19, TRBJ2-2)
CATTGHANTGELFF

SEQ ID NO: 10763 - protein, 12 aa, Homo sapiens
  CDR3 for alpha chain variable domain of TCR clone 5382 (TRAV13-2, TRAJ8)
CAPWLGFQKLVF

SEQ ID NO: 10764 - protein, 14 aa, Homo sapiens
  CDR3 for beta chain variable domain of TCR clone 5382 (TRBV18, TRBJ2-7)
CASSPRGGAYEQYF

SEQ ID NO: 10765 - protein, 14 aa, Homo sapiens
  CDR3 for alpha chain variable domain of TCR clone 5383 (TRAV1-2, TRAJ8)
CAVREDTGFQKLVF

SEQ ID NO: 10766 - protein, 18 aa, Homo sapiens
  CDR3 for beta chain variable domain of TCR clone 5383 (TRBV20-1, TRBJ2-6)
CSAETTPTHGSGANVLTF

SEQ ID NO: 10767 - protein, 15 aa, Homo sapiens
  CDR3 for alpha chain variable domain of TCR clone 5384 (TRAV26-2, TRAJ50)
CILRDEETSYDKVIF

SEQ ID NO: 10768 - protein, 16 aa, Homo sapiens
  CDR3 for beta chain variable domain of TCR clone 5384 (TRBV9, TRBJ2-1)
CASSVGGGGNYNEQFF

SEQ ID NO: 10769 - protein, 14 aa, Homo sapiens
  CDR3 for alpha chain variable domain of TCR clone 5385 (TRAV38-1, TRAJ30)
CAFMPMNRDDKIIF

SEQ ID NO: 10770 - protein, 15 aa, Homo sapiens
  CDR3 for beta chain variable domain of TCR clone 5385 (TRBV7-9, TRBJ2-7)
CASSLDLQGPYEQYF

SEQ ID NO: 10771 - protein, 15 aa, Homo sapiens
  CDR3 for alpha chain variable domain of TCR clone 5386 (TRAV3, TRAJ22)
CAVRDRGGSARQLTF

SEQ ID NO: 10772 - protein, 16 aa, Homo sapiens
  CDR3 for beta chain variable domain of TCR clone 5386 (TRBV25-1, TRBJ1-1)
CASSGDRDRGRIEAFF

SEQ ID NO: 10773 - protein, 14 aa, Homo sapiens
  CDR3 for alpha chain variable domain of TCR clone 5387 (TRAV17, TRAJ57)
CATDPQGGSEKLVF

SEQ ID NO: 10774 - protein, 14 aa, Homo sapiens
  CDR3 for beta chain variable domain of TCR clone 5387 (TRBV13, TRBJ2-7)
CASSLKGASYEQYF

SEQ ID NO: 10775 - protein, 12 aa, Homo sapiens
  CDR3 for alpha chain variable domain of TCR clone 5388 (TRAV1-2, TRAJ37)
CAFPGNTGKLIF

SEQ ID NO: 10776 - protein, 17 aa, Homo sapiens
  CDR3 for beta chain variable domain of TCR clone 5388 (TRBV4-2, TRBJ1-1)
CASSQVATGGMNTEAFF

SEQ ID NO: 10777 - protein, 11 aa, Homo sapiens
  CDR3 for alpha chain variable domain of TCR clone 5389 (TRAV27, TRAJ40)
SLTSGTYKYIF

SEQ ID NO: 10778 - protein, 13 aa, Homo sapiens
  CDR3 for beta chain variable domain of TCR clone 5389 (TRBV2, TRBJ2-5)
CASGTPYQETQYF

SEQ ID NO: 10779 - protein, 12 aa, Homo sapiens
  CDR3 for alpha chain variable domain of TCR clone 5390 (TRAV25, TRAJ11)
CAGYSGYSTLTF

SEQ ID NO: 10780 - protein, 18 aa, Homo sapiens
  CDR3 for beta chain variable domain of TCR clone 5390 (TRBV5-4, TRBJ2-3)
CASSPTAGFLPSTDTQYF

SEQ ID NO: 10781 - protein, 13 aa, Homo sapiens
  CDR3 for alpha chain variable domain of TCR clone 5391 (TRAV8-6, TRAJ21)
CAVSPSSLNKFYF

SEQ ID NO: 10782 - protein, 18 aa, Homo sapiens
  CDR3 for beta chain variable domain of TCR clone 5391 (TRBV11-2, TRBJ2-3)
CASSLGGASRGAPNTQYF

SEQ ID NO: 10783 - protein, 16 aa, Homo sapiens
  CDR3 for alpha chain variable domain of TCR clone 5392 (TRAV30, TRAJ24)
CGTEIVDADSWGKFQS

SEQ ID NO: 10784 - protein, 14 aa, Homo sapiens
  CDR3 for beta chain variable domain of TCR clone 5392 (TRBV12-5, TRBJ2-5)
CASGSRTHQETQYF

SEQ ID NO: 10785 - protein, 15 aa, Homo sapiens
  CDR3 for alpha chain variable domain of TCR clone 5393 (TRAV12-2, TRAJ43)
CAFDMRFGAGTRLIV

SEQ ID NO: 10786 - protein, 18 aa, Homo sapiens
  CDR3 for beta chain variable domain of TCR clone 5393 (TRBV20-1, TRBJ2-3)
CSASGLAGGPGTTDTQYF

SEQ ID NO: 10787 - protein, 15 aa, Homo sapiens
  CDR3 for alpha chain variable domain of TCR clone 5394 (TRAV35, TRAJ40)
CAGVPGASGTYKYIF

SEQ ID NO: 10788 - protein, 14 aa, Homo sapiens
  CDR3 for beta chain variable domain of TCR clone 5394 (TRBV11-2, TRBJ2-5)
CASSRTGGIETQYF

SEQ ID NO: 10789 - protein, 16 aa, Homo sapiens
  CDR3 for alpha chain variable domain of TCR clone 5395 (TRAV38-2/DV8, TRAJ45)
CAYRGNSGGGADGLTF

SEQ ID NO: 10790 - protein, 17 aa, Homo sapiens
  CDR3 for beta chain variable domain of TCR clone 5395 (TRBV11-3, TRBJ2-5)
CASSLPGVRGGKETQYF

SEQ ID NO: 10791 - protein, 14 aa, Homo sapiens
  CDR3 for alpha chain variable domain of TCR clone 5396 (TRAV12-3, TRAJ10)
SHLPLTGGGNKLTF

SEQ ID NO: 10792 - protein, 11 aa, Homo sapiens
  CDR3 for beta chain variable domain of TCR clone 5396 (TRBV11-2, TRBJ2-2)
CASSLPGELFF

SEQ ID NO: 10793 - protein, 13 aa, Homo sapiens
  CDR3 for alpha chain variable domain of TCR clone 5397 (TRAV8-3, TRAJ21)
CAVGAYNFNKFYF

SEQ ID NO: 10794 - protein, 11 aa, Homo sapiens
  CDR3 for beta chain variable domain of TCR clone 5397 (TRBV24-1, TRBJ1-1)
CQAKGWTEAFF

SEQ ID NO: 10795 - protein, 15 aa, Homo sapiens
  CDR3 for alpha chain variable domain of TCR clone 5398 (TRAV8-2, TRAJ40)
CVVSDRGSGTYKYIF

SEQ ID NO: 10796 - protein, 17 aa, Homo sapiens
  CDR3 for beta chain variable domain of TCR clone 5398 (TRBV9, TRBJ2-1)
CASSVRSLSGGNNEQFF

SEQ ID NO: 10797 - protein, 13 aa, Homo sapiens
  CDR3 for alpha chain variable domain of TCR clone 5399 (TRAV26-1, TRAJ29)
CIVRRSGNTPLVF

SEQ ID NO: 10798 - protein, 14 aa, Homo sapiens
  CDR3 for beta chain variable domain of TCR clone 5399 (TRBV20-1, TRBJ1-1)
CSAKTPGANTEAFF

SEQ ID NO: 10799 - protein, 11 aa, Homo sapiens
  CDR3 for alpha chain variable domain of TCR clone 5400 (TRAV21, TRAJ34)
CAVYNTDKLIF

SEQ ID NO: 10800 - protein, 13 aa, Homo sapiens
  CDR3 for beta chain variable domain of TCR clone 5400 (TRBV4-3, TRBJ2-1)
CASGLSVYNEQFF

SEQ ID NO: 10801 - protein, 12 aa, Homo sapiens
  CDR3 for alpha chain variable domain of TCR clone 5401 (TRAV17, TRAJ20)
CATDSNDYKLSF

SEQ ID NO: 10802 - protein, 11 aa, Homo sapiens
  CDR3 for beta chain variable domain of TCR clone 5401 (TRBV11-2, TRBJ1-1)
CASSINTEAFF

SEQ ID NO: 10803 - protein, 16 aa, Homo sapiens
  CDR3 for alpha chain variable domain of TCR clone 5402 (TRAV26-1, TRAJ38)
CIVRAYNAGNNRKLIW

SEQ ID NO: 10804 - protein, 13 aa, Homo sapiens
  CDR3 for beta chain variable domain of TCR clone 5402 (TRBV4-2, TRBJ2-7)
CASSRDPHDEQYF

SEQ ID NO: 10805 - protein, 14 aa, Homo sapiens
  CDR3 for alpha chain variable domain of TCR clone 5403 (TRAV13-1, TRAJ50)
CAARSKTSYDKVIF

SEQ ID NO: 10806 - protein, 17 aa, Homo sapiens
  CDR3 for beta chain variable domain of TCR clone 5403 (TRBV13, TRBJ2-3)
CASSLSRVAGGRNTQYF

SEQ ID NO: 10807 - protein, 17 aa, Homo sapiens
  CDR3 for alpha chain variable domain of TCR clone 5404 (TRAV3, TRAJ42)
CAVRDRDYGGSQGNLIF

SEQ ID NO: 10808 - protein, 15 aa, Homo sapiens
  CDR3 for beta chain variable domain of TCR clone 5404 (TRBV6-6, TRBJ2-7)
CASSYSYGGSYKQYF

SEQ ID NO: 10809 - protein, 14 aa, Homo sapiens
  CDR3 for alpha chain variable domain of TCR clone 5405 (TRAV12-3, TRAJ10)
SHLPLTGGGNKLTF

SEQ ID NO: 10810 - protein, 15 aa, Homo sapiens
  CDR3 for beta chain variable domain of TCR clone 5405 (TRBV6-6, TRBJ1-5)
CASSSIQGTNQPQHF

SEQ ID NO: 10811 - protein, 15 aa, Homo sapiens
  CDR3 for alpha chain variable domain of TCR clone 5406 (TRAV27, TRAJ38)
CAARRNAGNNRKLIW

SEQ ID NO: 10812 - protein, 15 aa, Homo sapiens
  CDR3 for beta chain variable domain of TCR clone 5406 (TRBV2, TRBJ2-1)
CASSELAGSYNEQFF

SEQ ID NO: 10813 - protein, 14 aa, Homo sapiens
  CDR3 for alpha chain variable domain of TCR clone 5407 (TRAV10, TRAJ48)
CVGVFHFGNEKLTF

SEQ ID NO: 10814 - protein, 13 aa, Homo sapiens
  CDR3 for beta chain variable domain of TCR clone 5407 (TRBV4-1, TRBJ2-7)
CASSQGQAYEQYF

SEQ ID NO: 10815 - protein, 14 aa, Homo sapiens
  CDR3 for alpha chain variable domain of TCR clone 5408 (TRAV12-1, TRAJ15)
CVVNRNQAGTALIF

SEQ ID NO: 10816 - protein, 14 aa, Homo sapiens
  CDR3 for beta chain variable domain of TCR clone 5408 (TRBV19, TRBJ1-1)
CATTSGTRGTEAFF

SEQ ID NO: 10817 - protein, 19 aa, Homo sapiens
  CDR3 for alpha chain variable domain of TCR clone 5409 (TRAV21, TRAJ45)
CAVEAPRGDQEEVLTDSPF

SEQ ID NO: 10818 - protein, 12 aa, Homo sapiens
  CDR3 for beta chain variable domain of TCR clone 5409 (TRBV29-1, TRBJ1-3)
CSTRDSGNTIYF

SEQ ID NO: 10819 - protein, 15 aa, Homo sapiens
  CDR3 for alpha chain variable domain of TCR clone 5410 (TRAV12-3, TRAJ54)
CAMSPPFQGAQKLVF

SEQ ID NO: 10820 - protein, 15 aa, Homo sapiens
  CDR3 for beta chain variable domain of TCR clone 5410 (TRBV20-1, TRBJ2-7)
CSARDRVSGMDEQYF

SEQ ID NO: 10821 - protein, 17 aa, Homo sapiens
  CDR3 for alpha chain variable domain of TCR clone 5411 (TRAV3, TRAJ42)
CAVRDRDYGGSQGNLIF

SEQ ID NO: 10822 - protein, 14 aa, Homo sapiens
  CDR3 for beta chain variable domain of TCR clone 5411 (TRBV12-5, TRBJ2-5)
CASGSRTHQETQYF

SEQ ID NO: 10823 - protein, 14 aa, Homo sapiens
  CDR3 for alpha chain variable domain of TCR clone 5412 (TRAV1-2, TRAJ16)
CAVNRFSDGQKLPF

SEQ ID NO: 10824 - protein, 15 aa, Homo sapiens
  CDR3 for beta chain variable domain of TCR clone 5412 (TRBV9, TRBJ1-6)
CASSVAGTGDSPLHF

SEQ ID NO: 10825 - protein, 13 aa, Homo sapiens
  CDR3 for alpha chain variable domain of TCR clone 5413 (TRAV29/DV5, TRAJ31)
CAASRNNNARLMF

SEQ ID NO: 10826 - protein, 16 aa, Homo sapiens
  CDR3 for beta chain variable domain of TCR clone 5413 (TRBV20-1, TRBJ1-4)
CSAPGQGLLTNEKLFF

SEQ ID NO: 10827 - protein, 13 aa, Homo sapiens
  CDR3 for alpha chain variable domain of TCR clone 5414 (TRAV17, TRAJ57)
CAIYQGGSEKLVF

SEQ ID NO: 10828 - protein, 16 aa, Homo sapiens
  CDR3 for beta chain variable domain of TCR clone 5414 (TRBV4-3, TRBJ2-1)
CASSQERLAGFNEQFF

SEQ ID NO: 10829 - protein, 18 aa, Homo sapiens
  CDR3 for alpha chain variable domain of TCR clone 5415 (TRAV21, TRAJ52)
CAVRPSPAGGTSYGKLTF

SEQ ID NO: 10830 - protein, 15 aa, Homo sapiens
  CDR3 for beta chain variable domain of TCR clone 5415 (TRBV20-1, TRBJ1-5)
CSAFKNGQRNQPQHF

SEQ ID NO: 10831 - protein, 15 aa, Homo sapiens
  CDR3 for alpha chain variable domain of TCR clone 5416 (TRAV30, TRAJ13)
CGTQGVTGGYQKVTF

SEQ ID NO: 10832 - protein, 17 aa, Homo sapiens
  CDR3 for beta chain variable domain of TCR clone 5416 (TRBV20-1, TRBJ2-2)
CSARVKRTHVRSGELFF

SEQ ID NO: 10833 - protein, 23 aa, Homo sapiens
  CDR3 for alpha chain variable domain of TCR clone 5417 (TRAV26-1, TRAJ38)
CIADNAGNNHIQNPDPAVYQLRD

SEQ ID NO: 10834 - protein, 13 aa, Homo sapiens
  CDR3 for beta chain variable domain of TCR clone 5417 (TRBV5-4, TRBJ1-1)
CASSVDLGTEAFF

SEQ ID NO: 10835 - protein, 14 aa, Homo sapiens
  CDR3 for alpha chain variable domain of TCR clone 5418 (TRAV8-2, TRAJ5)
CVVDMDTGRRALTF

SEQ ID NO: 10836 - protein, 15 aa, Homo sapiens
  CDR3 for beta chain variable domain of TCR clone 5418 (TRBV5-7, TRBJ2-1)
CASSYISGRGNEQFF

SEQ ID NO: 10837 - protein, 14 aa, Homo sapiens
  CDR3 for alpha chain variable domain of TCR clone 5419 (TRAV1-2, TRAJ8)
CAVREDTGFQKLVF

SEQ ID NO: 10838 - protein, 15 aa, Homo sapiens
  CDR3 for beta chain variable domain of TCR clone 5419 (TRBV5-7, TRBJ2-3)
CASSPGLATTDTQYF

SEQ ID NO: 10839 - protein, 13 aa, Homo sapiens
  CDR3 for alpha chain variable domain of TCR clone 5420 (TRAV36/DV7, TRAJ50)
CAVSKTSYDKVIF

SEQ ID NO: 10840 - protein, 13 aa, Homo sapiens
  CDR3 for beta chain variable domain of TCR clone 5420 (TRBV18, TRBJ2-7)
CASSPGRNYEQYF

SEQ ID NO: 10841 - protein, 18 aa, Homo sapiens
  CDR3 for alpha chain variable domain of TCR clone 5421 (TRAV26-1, TRAJ44)
CIVRVAGGGISTASKLTF

SEQ ID NO: 10842 - protein, 16 aa, Homo sapiens
  CDR3 for beta chain variable domain of TCR clone 5421 (TRBV20-1, TRBJ2-3)
CSAIFPIGGLTDTQYF

SEQ ID NO: 10843 - protein, 13 aa, Homo sapiens
  CDR3 for alpha chain variable domain of TCR clone 5422 (TRAV13-2, TRAJ13)
CAERPGGYQKVTF

SEQ ID NO: 10844 - protein, 17 aa, Homo sapiens
  CDR3 for beta chain variable domain of TCR clone 5422 (TRBV11-2, TRBJ2-1)
CASSLYPPGVEYNEQFF

SEQ ID NO: 10845 - protein, 13 aa, Homo sapiens
  CDR3 for alpha chain variable domain of TCR clone 5423 (TRAV20, TRAJ3)
CASRYSSASKIIF

SEQ ID NO: 10846 - protein, 16 aa, Homo sapiens
  CDR3 for beta chain variable domain of TCR clone 5423 (TRBV6-1, TRBJ1-6)
CASSSDGSPRNSPLHF

SEQ ID NO: 10847 - protein, 12 aa, Homo sapiens
  CDR3 for alpha chain variable domain of TCR clone 5424 (TRAV12-1, TRAJ5)
CVADTGRRALTF

SEQ ID NO: 10848 - protein, 14 aa, Homo sapiens
  CDR3 for beta chain variable domain of TCR clone 5424 (TRBV2, TRBJ1-1)
CASSEQWGDTEAFF

SEQ ID NO: 10849 - protein, 14 aa, Homo sapiens
  CDR3 for alpha chain variable domain of TCR clone 5425 (TRAV1-1, TRAJ34)
CAVSPSYNTDKLIF

SEQ ID NO: 10850 - protein, 15 aa, Homo sapiens
  CDR3 for beta chain variable domain of TCR clone 5425 (TRBV6-3, TRBJ2-7)
CASSSPGTVFYEQYF

SEQ ID NO: 10851 - protein, 14 aa, Homo sapiens
  CDR3 for alpha chain variable domain of TCR clone 5426 (TRAV1-2, TRAJ16)
CAVNRFSDGQKLLF

SEQ ID NO: 10852 - protein, 15 aa, Homo sapiens
  CDR3 for beta chain variable domain of TCR clone 5426 (TRBV20-1, TRBJ1-5)
CSAFKNGQRNQPQHF

SEQ ID NO: 10853 - protein, 16 aa, Homo sapiens
  CDR3 for alpha chain variable domain of TCR clone 5427 (TRAV30, TRAJ24)
CGTEIVDADSWGKFQF

SEQ ID NO: 10854 - protein, 15 aa, Homo sapiens
  CDR3 for beta chain variable domain of TCR clone 5427 (TRBV5-1, TRBJ2-2)
CASSSQGGNTGELFF

SEQ ID NO: 10855 - protein, 14 aa, Homo sapiens
  CDR3 for alpha chain variable domain of TCR clone 5428 (TRAV29/DV5, TRAJ57)
CAARSQGGSEKLVF

SEQ ID NO: 10856 - protein, 15 aa, Homo sapiens
  CDR3 for beta chain variable domain of TCR clone 5428 (TRBV28, TRBJ2-4)
CAAGSGTLLMGIQYF

SEQ ID NO: 10857 - protein, 15 aa, Homo sapiens
  CDR3 for alpha chain variable domain of TCR clone 5429 (TRAV20, TRAJ53)
CAVQASGGSNYKLTF

SEQ ID NO: 10858 - protein, 14 aa, Homo sapiens
  CDR3 for beta chain variable domain of TCR clone 5429 (TRBV7-2, TRBJ1-2)
CASSQTGSTYGYTF

SEQ ID NO: 10859 - protein, 13 aa, Homo sapiens
  CDR3 for alpha chain variable domain of TCR clone 5430 (TRAV8-4, TRAJ49)
CAVRTLTGNQFYF

SEQ ID NO: 10860 - protein, 16 aa, Homo sapiens
  CDR3 for beta chain variable domain of TCR clone 5430 (TRBV5-7, TRBJ2-5)
CASTLAPAGGRETQYF

SEQ ID NO: 10861 - protein, 15 aa, Homo sapiens
  CDR3 for alpha chain variable domain of TCR clone 5431 (TRAV8-2, TRAJ44)
CVVSPNTGTASKLTF

SEQ ID NO: 10862 - protein, 12 aa, Homo sapiens
  CDR3 for beta chain variable domain of TCR clone 5431 (TRBV11-2, TRBJ2-2)
CAVPRNTGELFF

SEQ ID NO: 10863 - protein, 16 aa, Homo sapiens
  CDR3 for alpha chain variable domain of TCR clone 5432 (TRAV12-1, TRAJ12)
CVVNTLLMDSSYKLIF

SEQ ID NO: 10864 - protein, 13 aa, Homo sapiens
  CDR3 for beta chain variable domain of TCR clone 5432 (TRBV14, TRBJ2-7)
CASSQDRRYEQYF

SEQ ID NO: 10865 - protein, 13 aa, Homo sapiens
  CDR3 for alpha chain variable domain of TCR clone 5433 (TRAV12-1, TRAJ38)
CVVPAGNNRKLIW

SEQ ID NO: 10866 - protein, 17 aa, Homo sapiens
  CDR3 for beta chain variable domain of TCR clone 5433 (TRBV4-1, TRBJ2-3)
CASSQSATGGPVDTQYF

SEQ ID NO: 10867 - protein, 13 aa, Homo sapiens
  CDR3 for alpha chain variable domain of TCR clone 5434 (TRAV8-6, TRAJ49)
CAVITNTGNRFYF

SEQ ID NO: 10868 - protein, 15 aa, Homo sapiens
  CDR3 for beta chain variable domain of TCR clone 5434 (TRBV9, TRBJ1-6)
CASSVAGTGDSPLHF

SEQ ID NO: 10869 - protein, 15 aa, Homo sapiens
  CDR3 for alpha chain variable domain of TCR clone 5435 (TRAV22, TRAJ24)
CAVPLSTDSWGKLQF

SEQ ID NO: 10870 - protein, 14 aa, Homo sapiens
  CDR3 for beta chain variable domain of TCR clone 5435 (TRBV7-2, TRBJ2-7)
CASRSQGAAYEQYF

SEQ ID NO: 10871 - protein, 16 aa, Homo sapiens
  CDR3 for alpha chain variable domain of TCR clone 5436 (TRAV8-6, TRAJ4)
CAVSPTFSGGYNKLIF

SEQ ID NO: 10872 - protein, 14 aa, Homo sapiens
  CDR3 for beta chain variable domain of TCR clone 5436 (TRBV29-1, TRBJ2-2)
CSVVTSGAPGELFF

SEQ ID NO: 10873 - protein, 16 aa, Homo sapiens
  CDR3 for alpha chain variable domain of TCR clone 5437 (TRAV26-1, TRAJ38)
CIVRVSGAGNNRKLIW

SEQ ID NO: 10874 - protein, 13 aa, Homo sapiens
  CDR3 for beta chain variable domain of TCR clone 5437 (TRBV14, TRBJ1-2)
CASSQDRRRGYTF

SEQ ID NO: 10875 - protein, 15 aa, Homo sapiens
  CDR3 for alpha chain variable domain of TCR clone 5438 (TRAV12-1, TRAJ36)
CVVNEHQTGANNLFF

SEQ ID NO: 10876 - protein, 14 aa, Homo sapiens
  CDR3 for beta chain variable domain of TCR clone 5438 (TRBV10-3, TRBJ2-5)
CAIRTSGGQETQYF

SEQ ID NO: 10877 - protein, 13 aa, Homo sapiens
  CDR3 for alpha chain variable domain of TCR clone 5439 (TRAV2, TRAJ15)
CAVASQAGTALIF

SEQ ID NO: 10878 - protein, 14 aa, Homo sapiens
  CDR3 for beta chain variable domain of TCR clone 5439 (TRBV5-1, TRBJ2-7)
CASSRGESLYEQYF

SEQ ID NO: 10879 - protein, 14 aa, Homo sapiens
  CDR3 for alpha chain variable domain of TCR clone 5440 (TRAV27, TRAJ22)
CAGLPSGSARQLTF

SEQ ID NO: 10880 - protein, 13 aa, Homo sapiens
  CDR3 for beta chain variable domain of TCR clone 5440 (TRBV7-2, TRBJ2-7)
CASSSPSGSEQYF

SEQ ID NO: 10881 - protein, 14 aa, Homo sapiens
  CDR3 for alpha chain variable domain of TCR clone 5441 (TRAV3, TRAJ42)
CCETLGGSQGNLIF

SEQ ID NO: 10882 - protein, 14 aa, Homo sapiens
  CDR3 for beta chain variable domain of TCR clone 5441 (TRBV19, TRBJ2-5)
CASSSSGIQETQYF

SEQ ID NO: 10883 - protein, 13 aa, Homo sapiens
  CDR3 for alpha chain variable domain of TCR clone 5442 (TRAV35, TRAJ20)
CAGPLSNDYKLSF

SEQ ID NO: 10884 - protein, 14 aa, Homo sapiens
  CDR3 for beta chain variable domain of TCR clone 5442 (TRBV9, TRBJ2-7)
CASSVGVGSYEQYF

SEQ ID NO: 10885 - protein, 17 aa, Homo sapiens
  CDR3 for alpha chain variable domain of TCR clone 5443 (TRAV17, TRAJ52)
CATERPSGGTSYGKLTF

SEQ ID NO: 10886 - protein, 13 aa, Homo sapiens
  CDR3 for beta chain variable domain of TCR clone 5443 (TRBV6-4, TRBJ1-5)
CASSADLNQPQHF

SEQ ID NO: 10887 - protein, 12 aa, Homo sapiens
  CDR3 for alpha chain variable domain of TCR clone 5444 (TRAV13-2, TRAJ8)
CAPWLGFQKLVF

SEQ ID NO: 10888 - protein, 16 aa, Homo sapiens
  CDR3 for beta chain variable domain of TCR clone 5444 (TRBV5-1, TRBJ2-7)
CASSLEGLAGLYEQYF

SEQ ID NO: 10889 - protein, 15 aa, Homo sapiens
  CDR3 for alpha chain variable domain of TCR clone 5445 (TRAV26-1, TRAJ40)
CIVRAVPSGTYKYIF

SEQ ID NO: 10890 - protein, 16 aa, Homo sapiens
  CDR3 for beta chain variable domain of TCR clone 5445 (TRBV7-2, TRBJ2-2)
CASSLRGQANTGELFF

SEQ ID NO: 10891 - protein, 12 aa, Homo sapiens
  CDR3 for alpha chain variable domain of TCR clone 5446 (TRAV12-1, TRAJ40)
CVVYSGTYKYIF

SEQ ID NO: 10892 - protein, 18 aa, Homo sapiens
  CDR3 for beta chain variable domain of TCR clone 5446 (TRBV11-2, TRBJ2-3)
CASSFGGASRGAPNTQYF

SEQ ID NO: 10893 - protein, 12 aa, Homo sapiens
  CDR3 for alpha chain variable domain of TCR clone 5447 (TRAV3, TRAJ20)
CAVRDPDYKLSF

SEQ ID NO: 10894 - protein, 15 aa, Homo sapiens
  CDR3 for beta chain variable domain of TCR clone 5447 (TRBV6-5, TRBJ2-5)
CASSPLAGGIETQYF

SEQ ID NO: 10895 - protein, 12 aa, Homo sapiens
  CDR3 for alpha chain variable domain of TCR clone 5448 (TRAV12-2, TRAJ29)
CAVDSGNTPLVF

SEQ ID NO: 10896 - protein, 13 aa, Homo sapiens
  CDR3 for beta chain variable domain of TCR clone 5448 (TRBV19, TRBJ1-2)
CASSQGQVYGYTF

SEQ ID NO: 10897 - protein, 14 aa, Homo sapiens
  CDR3 for alpha chain variable domain of TCR clone 5449 (TRAV20, TRAJ17)
CAVRREAAGNKLTF

SEQ ID NO: 10898 - protein, 13 aa, Homo sapiens
  CDR3 for beta chain variable domain of TCR clone 5449 (TRBV23-1, TRBJ2-1)
CASNRETYNEQFF

SEQ ID NO: 10899 - protein, 12 aa, Homo sapiens
  CDR3 for alpha chain variable domain of TCR clone 5450 (TRAV1-1, TRAJ29)
CAVISGNTPLVF

SEQ ID NO: 10900 - protein, 17 aa, Homo sapiens
  CDR3 for beta chain variable domain of TCR clone 5450 (TRBV20-1, TRBJ2-2)
CSASGSGQGGLTGELFF

SEQ ID NO: 10901 - protein, 15 aa, Homo sapiens
  CDR3 for alpha chain variable domain of TCR clone 5451 (TRAV23/DV6, TRAJ44)
CAAMKPTGTASKLTF

SEQ ID NO: 10902 - protein, 16 aa, Homo sapiens
  CDR3 for beta chain variable domain of TCR clone 5451 (TRBV28, TRBJ2-5)
CATSGWPSRLKETQYF

SEQ ID NO: 10903 - protein, 15 aa, Homo sapiens
  CDR3 for alpha chain variable domain of TCR clone 5452 (TRAV35, TRAJ23)
CAGQRGYNQGGKPIF

SEQ ID NO: 10904 - protein, 16 aa, Homo sapiens
  CDR3 for beta chain variable domain of TCR clone 5452 (TRBV27, TRBJ2-1)
CASSSRLAGNYNEQFF

SEQ ID NO: 10905 - protein, 14 aa, Homo sapiens
  CDR3 for alpha chain variable domain of TCR clone 5453 (TRAV8-4, TRAJ54)
CAVSEVLGAQKLVF

SEQ ID NO: 10906 - protein, 15 aa, Homo sapiens
  CDR3 for beta chain variable domain of TCR clone 5453 (TRBV6-1, TRBJ2-6)
CASSSRPSGANVLTF

SEQ ID NO: 10907 - protein, 15 aa, Homo sapiens
  CDR3 for alpha chain variable domain of TCR clone 5454 (TRAV21, TRAJ53)
CATLNSGGSNYKLTF

SEQ ID NO: 10908 - protein, 14 aa, Homo sapiens
  CDR3 for beta chain variable domain of TCR clone 5454 (TRBV12-5, TRBJ2-5)
CASGSRTHQETQYF

SEQ ID NO: 10909 - protein, 13 aa, Homo sapiens
  CDR3 for alpha chain variable domain of TCR clone 5455 (TRAV21, TRAJ57)
CAVTQGGSEKLVF

SEQ ID NO: 10910 - protein, 17 aa, Homo sapiens
  CDR3 for beta chain variable domain of TCR clone 5455 (TRBV10-3, TRBJ2-6)
CAISELAESSGANVLTF

SEQ ID NO: 10911 - protein, 14 aa, Homo sapiens
  CDR3 for alpha chain variable domain of TCR clone 5456 (TRAV12-2, TRAJ13)
CAVKKTGGYQKVTF

SEQ ID NO: 10912 - protein, 14 aa, Homo sapiens
  CDR3 for beta chain variable domain of TCR clone 5456 (TRBV5-1, TRBJ2-7)
CASSRGESLYEQYF

SEQ ID NO: 10913 - protein, 11 aa, Homo sapiens
  CDR3 for alpha chain variable domain of TCR clone 5457 (TRAV12-1, TRAJ16)
CGDPDGQKLLF

SEQ ID NO: 10914 - protein, 11 aa, Homo sapiens
  CDR3 for beta chain variable domain of TCR clone 5457 (TRBV29-1, TRBJ2-5)
CSEDRTGTQYF

SEQ ID NO: 10915 - protein, 14 aa, Homo sapiens
  CDR3 for alpha chain variable domain of TCR clone 5458 (TRAV1-2, TRAJ8)
CAVREDTGFQKLVF

SEQ ID NO: 10916 - protein, 12 aa, Homo sapiens
  CDR3 for beta chain variable domain of TCR clone 5458 (TRBV14, TRBJ2-5)
CASSQLKETQYF

SEQ ID NO: 10917 - protein, 12 aa, Homo sapiens
  CDR3 for alpha chain variable domain of TCR clone 5459 (TRAV12-1, TRAJ40)
CVVYSGTYKYIF

SEQ ID NO: 10918 - protein, 19 aa, Homo sapiens
  CDR3 for beta chain variable domain of TCR clone 5459 (TRBV7-2, TRBJ2-3)
CASSFLSRNWGGGTDTQYF

SEQ ID NO: 10919 - protein, 13 aa, Homo sapiens
  CDR3 for alpha chain variable domain of TCR clone 5460 (TRAV2, TRAJ40)
CAVVPSGTYKYIF

SEQ ID NO: 10920 - protein, 14 aa, Homo sapiens
  CDR3 for beta chain variable domain of TCR clone 5460 (TRBV19, TRBJ2-1)
CASPTFVLSGEQFF

SEQ ID NO: 10921 - protein, 12 aa, Homo sapiens
  CDR3 for alpha chain variable domain of TCR clone 5461 (TRAV12-3, TRAJ41)
CAMSYSGYALNF

SEQ ID NO: 10922 - protein, 15 aa, Homo sapiens
  CDR3 for beta chain variable domain of TCR clone 5461 (TRBV5-1, TRBJ2-1)
CASSPPRAPYNEQFF

SEQ ID NO: 10923 - protein, 11 aa, Homo sapiens
  CDR3 for alpha chain variable domain of TCR clone 5462 (TRAV3, TRAJ21)
CAVGNFSKFYF

SEQ ID NO: 10924 - protein, 16 aa, Homo sapiens
  CDR3 for beta chain variable domain of TCR clone 5462 (TRBV19, TRBJ2-1)
CASSKAGPSSYNEQFF

SEQ ID NO: 10925 - protein, 15 aa, Homo sapiens
  CDR3 for alpha chain variable domain of TCR clone 5463 (TRAV3, TRAJ16)
CAVRDGFSDGQKLLF

SEQ ID NO: 10926 - protein, 17 aa, Homo sapiens
  CDR3 for beta chain variable domain of TCR clone 5463 (TRBV6-1, TRBJ2-3)
CASRTRGLAQSTDTQYF

SEQ ID NO: 10927 - protein, 12 aa, Homo sapiens
  CDR3 for alpha chain variable domain of TCR clone 5464 (TRAV21, TRAJ11)
CAATSGYSTLTF

SEQ ID NO: 10928 - protein, 15 aa, Homo sapiens
  CDR3 for beta chain variable domain of TCR clone 5464 (TRBV6-1, TRBJ2-3)
CASSERGGITDTQYF

SEQ ID NO: 10929 - protein, 11 aa, Homo sapiens
  CDR3 for alpha chain variable domain of TCR clone 5465 (TRAV6, TRAJ31)
CALRDNARLMF

SEQ ID NO: 10930 - protein, 12 aa, Homo sapiens
  CDR3 for beta chain variable domain of TCR clone 5465 (TRBV11-2, TRBJ2-2)
CASSLGGGELFF

SEQ ID NO: 10931 - protein, 14 aa, Homo sapiens
  CDR3 for alpha chain variable domain of TCR clone 5466 (TRAV1-1, TRAJ27)
CAVIYNTNAVKSTF

SEQ ID NO: 10932 - protein, 15 aa, Homo sapiens
  CDR3 for beta chain variable domain of TCR clone 5466 (TRBV7-2, TRBJ2-1)
CASSSGLAGGNEQFF

SEQ ID NO: 10933 - protein, 17 aa, Homo sapiens
  CDR3 for alpha chain variable domain of TCR clone 5467 (TRAV3, TRAJ6)
CAVRDGPRAGGSYIPTF

SEQ ID NO: 10934 - protein, 16 aa, Homo sapiens
  CDR3 for beta chain variable domain of TCR clone 5467 (TRBV12-4, TRBJ2-7)
CASSLIGGTGTYEQYF

SEQ ID NO: 10935 - protein, 17 aa, Homo sapiens
  CDR3 for alpha chain variable domain of TCR clone 5468 (TRAV2, TRAJ22)
ILQVREADAAEQRRLTF

SEQ ID NO: 10936 - protein, 16 aa, Homo sapiens
  CDR3 for beta chain variable domain of TCR clone 5468 (TRBV2, TRBJ2-5)
CASSETQGVGEETQYF

SEQ ID NO: 10937 - protein, 16 aa, Homo sapiens
  CDR3 for alpha chain variable domain of TCR clone 5469 (TRAV13-2, TRAJ37)
CAENIRGSSNTGKLIF

SEQ ID NO: 10938 - protein, 15 aa, Homo sapiens
  CDR3 for beta chain variable domain of TCR clone 5469 (TRBV5-1, TRBJ2-7)
CASSPQGRPLDEQYF

SEQ ID NO: 10939 - protein, 14 aa, Homo sapiens
  CDR3 for alpha chain variable domain of TCR clone 5470 (TRAV1-2, TRAJ8)
CAVREDTGFQKLVF

SEQ ID NO: 10940 - protein, 12 aa, Homo sapiens
  CDR3 for beta chain variable domain of TCR clone 5470 (TRBV14, TRBJ2-7)
CASSRLKGEQYF

SEQ ID NO: 10941 - protein, 16 aa, Homo sapiens
  CDR3 for alpha chain variable domain of TCR clone 5471 (TRAV23/DV6, TRAJ52)
CAASMNGGTSYGKLTF

SEQ ID NO: 10942 - protein, 16 aa, Homo sapiens
  CDR3 for beta chain variable domain of TCR clone 5471 (TRBV27, TRBJ2-2)
CASSFRGLVRTGELFF

SEQ ID NO: 10943 - protein, 12 aa, Homo sapiens
  CDR3 for alpha chain variable domain of TCR clone 5472 (TRAV36/DV7, TRAJ54)
RAVVRGAQKLVF

SEQ ID NO: 10944 - protein, 14 aa, Homo sapiens
  CDR3 for beta chain variable domain of TCR clone 5472 (TRBV7-3, TRBJ1-1)
CASSLKGGNTEAFF

SEQ ID NO: 10945 - protein, 15 aa, Homo sapiens
  CDR3 for alpha chain variable domain of TCR clone 5473 (TRAV38-1, TRAJ30)
CAFMMSYGGDDKIIF

SEQ ID NO: 10946 - protein, 16 aa, Homo sapiens
  CDR3 for beta chain variable domain of TCR clone 5473 (TRBV7-9, TRBJ2-7)
CASSFGLAGPSYEQYF

SEQ ID NO: 10947 - protein, 15 aa, Homo sapiens
  CDR3 for alpha chain variable domain of TCR clone 5474 (TRAV12-1, TRAJ44)
CVADLPTGTASKLTF

SEQ ID NO: 10948 - protein, 16 aa, Homo sapiens
  CDR3 for beta chain variable domain of TCR clone 5474 (TRBV12-5, TRBJ2-5)
CASGPRTSGNQETQYF

SEQ ID NO: 10949 - protein, 17 aa, Homo sapiens
  CDR3 for alpha chain variable domain of TCR clone 5475 (TRAV38-2/DV8, TRAJ57)
CAYRSVLTQGGSEKLVF

SEQ ID NO: 10950 - protein, 16 aa, Homo sapiens
  CDR3 for beta chain variable domain of TCR clone 5475 (TRBV7-3, TRBJ2-2)
CASSLKRGTLSGELFF

SEQ ID NO: 10951 - protein, 13 aa, Homo sapiens
  CDR3 for alpha chain variable domain of TCR clone 5476 (TRAV2, TRAJ40)
CAVVTSGTYKYIF

SEQ ID NO: 10952 - protein, 15 aa, Homo sapiens
  CDR3 for beta chain variable domain of TCR clone 5476 (TRBV11-3, TRBJ2-3)
CASLKEGREGDTQYF

SEQ ID NO: 10953 - protein, 18 aa, Homo sapiens
  CDR3 for alpha chain variable domain of TCR clone 5477 (TRAV12-1, TRAJ52)
CVVKLINAGGTSYGKLTF

SEQ ID NO: 10954 - protein, 16 aa, Homo sapiens
  CDR3 for beta chain variable domain of TCR clone 5477 (TRBV7-6, TRBJ2-7)
CASSGGTGALSYEQYF

SEQ ID NO: 10955 - protein, 17 aa, Homo sapiens
  CDR3 for alpha chain variable domain of TCR clone 5478 (TRAV3, TRAJ6)
CAVRDGPRAGGSYIPTF

SEQ ID NO: 10956 - protein, 14 aa, Homo sapiens
  CDR3 for beta chain variable domain of TCR clone 5478 (TRBV7-2, TRBJ2-7)
CASSPKTGFYEQYF

SEQ ID NO: 10957 - protein, 18 aa, Homo sapiens
  CDR3 for alpha chain variable domain of TCR clone 5479 (TRAV12-1, TRAJ26)
SSVIQPPTSVPYGQNFVF

SEQ ID NO: 10958 - protein, 14 aa, Homo sapiens
  CDR3 for beta chain variable domain of TCR clone 5479 (TRBV5-4, TRBJ2-1)
CASSLDQGLNEQFF

SEQ ID NO: 10959 - protein, 15 aa, Homo sapiens
  CDR3 for alpha chain variable domain of TCR clone 5480 (TRAV13-1, TRAJ36)
CAASIRQTGANNLFF

SEQ ID NO: 10960 - protein, 14 aa, Homo sapiens
  CDR3 for beta chain variable domain of TCR clone 5480 (TRBV6-1, TRBJ1-3)
CASVQGGGGNTIYF

SEQ ID NO: 10961 - protein, 10 aa, Homo sapiens
  CDR3 for alpha chain variable domain of TCR clone 5481 (TRAV38-1, TRAJ53)
CAFMKHGLES

SEQ ID NO: 10962 - protein, 13 aa, Homo sapiens
  CDR3 for beta chain variable domain of TCR clone 5481 (TRBV19, TRBJ2-7)
CASSPRQSYEQYF

SEQ ID NO: 10963 - protein, 15 aa, Homo sapiens
  CDR3 for alpha chain variable domain of TCR clone 5482 (TRAV25, TRAJ52)
CAGTSGSTSYGKLTF

SEQ ID NO: 10964 - protein, 16 aa, Homo sapiens
  CDR3 for beta chain variable domain of TCR clone 5482 (TRBV15, TRBJ1-2)
CATSRGPRTGGGGYTF

SEQ ID NO: 10965 - protein, 11 aa, Homo sapiens
  CDR3 for alpha chain variable domain of TCR clone 5483 (TRAV3, TRAJ21)
CAVGNFNKFYF

SEQ ID NO: 10966 - protein, 16 aa, Homo sapiens
  CDR3 for beta chain variable domain of TCR clone 5483 (TRBV19, TRBJ2-1)
CASSEAGPSSYNEQFF

SEQ ID NO: 10967 - protein, 17 aa, Homo sapiens
  CDR3 for alpha chain variable domain of TCR clone 5484 (TRAV3, TRAJ6)
CAVRDGPRAGGSYIPTF

SEQ ID NO: 10968 - protein, 15 aa, Homo sapiens
  CDR3 for beta chain variable domain of TCR clone 5484 (TRBV29-1, TRBJ2-5)
CSVEGLAVNQETQYF

SEQ ID NO: 10969 - protein, 15 aa, Homo sapiens
  CDR3 for alpha chain variable domain of TCR clone 5485 (TRAV8-6, TRAJ23)
CAVREFYNQGGKLIF

SEQ ID NO: 10970 - protein, 15 aa, Homo sapiens
  CDR3 for beta chain variable domain of TCR clone 5485 (TRBV20-1, TRBJ2-1)
CSAITGTSGSNEQFF

SEQ ID NO: 10971 - protein, 18 aa, Homo sapiens
  CDR3 for alpha chain variable domain of TCR clone 5486 (TRAV21, TRAJ52)
RAVRPSPAGGTSYGKLTF

SEQ ID NO: 10972 - protein, 15 aa, Homo sapiens
  CDR3 for beta chain variable domain of TCR clone 5486 (TRBV19, TRBJ1-1)
CASTSGQIQNTEAFF

SEQ ID NO: 10973 - protein, 16 aa, Homo sapiens
  CDR3 for alpha chain variable domain of TCR clone 5487 (TRAV30, TRAJ24)
CGTEIVDADSWGKFQF

SEQ ID NO: 10974 - protein, 17 aa, Homo sapiens
  CDR3 for beta chain variable domain of TCR clone 5487 (TRBV13, TRBJ2-3)
CASSLSRVAGGRNTQYF

SEQ ID NO: 10975 - protein, 16 aa, Homo sapiens
  CDR3 for alpha chain variable domain of TCR clone 5488 (TRAV30, TRAJ24)
CGTEIVDAGSWGKFQF

SEQ ID NO: 10976 - protein, 14 aa, Homo sapiens
  CDR3 for beta chain variable domain of TCR clone 5488 (TRBV12-5, TRBJ2-5)
CASGSRTHQETQYF

SEQ ID NO: 10977 - protein, 15 aa, Homo sapiens
  CDR3 for alpha chain variable domain of TCR clone 5489 (TRAV1-1, TRAJ4)
CAVRAFSGGYNKLIF

SEQ ID NO: 10978 - protein, 16 aa, Homo sapiens
  CDR3 for beta chain variable domain of TCR clone 5489 (TRBV7-2, TRBJ2-6)
CAILSGVSSGANVLTF

SEQ ID NO: 10979 - protein, 10 aa, Homo sapiens
  CDR3 for alpha chain variable domain of TCR clone 5490 (TRAV8-3, TRAJ43)
CAVALADMRF

SEQ ID NO: 10980 - protein, 17 aa, Homo sapiens
  CDR3 for beta chain variable domain of TCR clone 5490 (TRBV10-1, TRBJ2-1)
CASSPQRAGGPFNEQFF

SEQ ID NO: 10981 - protein, 14 aa, Homo sapiens
  CDR3 for alpha chain variable domain of TCR clone 5491 (TRAV1-2, TRAJ16)
CAVNRFSDGQKLLF

SEQ ID NO: 10982 - protein, 15 aa, Homo sapiens
  CDR3 for beta chain variable domain of TCR clone 5491 (TRBV27, TRBJ2-3)
CASSSLAGVIDTQYF

SEQ ID NO: 10983 - protein, 13 aa, Homo sapiens
  CDR3 for alpha chain variable domain of TCR clone 5492 (TRAV3, TRAJ21)
CAVREPDFNKFYF

SEQ ID NO: 10984 - protein, 12 aa, Homo sapiens
  CDR3 for beta chain variable domain of TCR clone 5492 (TRBV28, TRBJ2-6)
CAIQAGANVLTF

SEQ ID NO: 10985 - protein, 14 aa, Homo sapiens
  CDR3 for alpha chain variable domain of TCR clone 5493 (TRAV1-2, TRAJ8)
CAVREDTGFQKLVF

SEQ ID NO: 10986 - protein, 19 aa, Homo sapiens
  CDR3 for beta chain variable domain of TCR clone 5493 (TRBV28, TRBJ2-1)
CASSFSIRGSGRTRYEQFF

SEQ ID NO: 10987 - protein, 13 aa, Homo sapiens
  CDR3 for alpha chain variable domain of TCR clone 5494 (TRAV8-4, TRAJ34)
CAVTLYNTDKLIF

SEQ ID NO: 10988 - protein, 17 aa, Homo sapiens
  CDR3 for beta chain variable domain of TCR clone 5494 (TRBV7-2, TRBJ2-2)
CASSPSWRGGGTGELFF

SEQ ID NO: 10989 - protein, 14 aa, Homo sapiens
  CDR3 for alpha chain variable domain of TCR clone 5495 (TRAV3, TRAJ40)
CAVRDMTGTYKYIF

SEQ ID NO: 10990 - protein, 16 aa, Homo sapiens
  CDR3 for beta chain variable domain of TCR clone 5495 (TRBV18, TRBJ2-7)
CASSPGRAGGAYEQYF

SEQ ID NO: 10991 - protein, 12 aa, Homo sapiens
  CDR3 for alpha chain variable domain of TCR clone 5496 (TRAV27, TRAJ35)
CAGADFGNVLHC

SEQ ID NO: 10992 - protein, 15 aa, Homo sapiens
  CDR3 for beta chain variable domain of TCR clone 5496 (TRBV4-1, TRBJ1-2)
CASSLNTGQGYGYTF

SEQ ID NO: 10993 - protein, 12 aa, Homo sapiens
  CDR3 for alpha chain variable domain of TCR clone 5497 (TRAV2, TRAJ24)
CAATDSWGKFQF

SEQ ID NO: 10994 - protein, 13 aa, Homo sapiens
  CDR3 for beta chain variable domain of TCR clone 5497 (TRBV5-8, TRBJ1-1)
CASSLGGGTEAFF

SEQ ID NO: 10995 - protein, 16 aa, Homo sapiens
  CDR3 for alpha chain variable domain of TCR clone 5498 (TRAV30, TRAJ24)
CGTEIVDADSWGKFQF

SEQ ID NO: 10996 - protein, 14 aa, Homo sapiens
  CDR3 for beta chain variable domain of TCR clone 5498 (TRBV12-5, TRBJ2-5)
CASGSRTHQETQYF

SEQ ID NO: 10997 - protein, 12 aa, Homo sapiens
  CDR3 for alpha chain variable domain of TCR clone 5499 (TRAV21, TRAJ13)
PGPSGGYQKVTF

SEQ ID NO: 10998 - protein, 15 aa, Homo sapiens
  CDR3 for beta chain variable domain of TCR clone 5499 (TRBV20-1, TRBJ2-7)
CSARDRVSGMDEQYF

SEQ ID NO: 10999 - protein, 17 aa, Homo sapiens
  CDR3 for alpha chain variable domain of TCR clone 5500 (TRAV3, TRAJ38)
CAVRDCLNAGNNRKLIW

SEQ ID NO: 11000 - protein, 16 aa, Homo sapiens
  CDR3 for beta chain variable domain of TCR clone 5500 (TRBV20-1, TRBJ1-4)
CSAPGQGLLTNEKLFF

SEQ ID NO: 11001 - protein, 13 aa, Homo sapiens
  CDR3 for alpha chain variable domain of TCR clone 5501 (TRAV17, TRAJ20)
CATDAVGDYKLSF

SEQ ID NO: 11002 - protein, 15 aa, Homo sapiens
  CDR3 for beta chain variable domain of TCR clone 5501 (TRBV9, TRBJ1-3)
CASSARAGGGNTIYF

SEQ ID NO: 11003 - protein, 10 aa, Homo sapiens
  CDR3 for alpha chain variable domain of TCR clone 5502 (TRAV13-1, TRAJ30)
CAARDDKIIF

SEQ ID NO: 11004 - protein, 15 aa, Homo sapiens
  CDR3 for beta chain variable domain of TCR clone 5502 (TRBV9, TRBJ1-6)
CASSVAGTGDSPLHF

SEQ ID NO: 11005 - protein, 15 aa, Homo sapiens
  CDR3 for alpha chain variable domain of TCR clone 5503 (TRAV17, TRAJ57)
CATGPSQGGSKKLVF

SEQ ID NO: 11006 - protein, 16 aa, Homo sapiens
  CDR3 for beta chain variable domain of TCR clone 5503 (TRBV12-4, TRBJ1-5)
CASSRPVGGSNQPQHF

SEQ ID NO: 11007 - protein, 12 aa, Homo sapiens
  CDR3 for alpha chain variable domain of TCR clone 5504 (TRAV26-1, TRAJ17)
CIVRSAGNKLTF

SEQ ID NO: 11008 - protein, 13 aa, Homo sapiens
  CDR3 for beta chain variable domain of TCR clone 5504 (TRBV5-5, TRBJ2-7)
CASSSQTRQRQYF

SEQ ID NO: 11009 - protein, 15 aa, Homo sapiens
  CDR3 for alpha chain variable domain of TCR clone 5505 (TRAV14/DV4, TRAJ12)
CAMREERDSSYKLIF

SEQ ID NO: 11010 - protein, 17 aa, Homo sapiens
  CDR3 for beta chain variable domain of TCR clone 5505 (TRBV2, TRBJ2-1)
CASSRPGQGVMVNEQFF

SEQ ID NO: 11011 - protein, 11 aa, Homo sapiens
  CDR3 for alpha chain variable domain of TCR clone 5506 (TRAV13-1, TRAJ20)
CAASKNYKLSF

SEQ ID NO: 11012 - protein, 16 aa, Homo sapiens
  CDR3 for beta chain variable domain of TCR clone 5506 (TRBV20-1, TRBJ1-4)
CSAPGQGLLTNEKLFF

SEQ ID NO: 11013 - protein, 14 aa, Homo sapiens
  CDR3 for alpha chain variable domain of TCR clone 5507 (TRAV12-1, TRAJ43)
CVVNGRSNNNDMRF

SEQ ID NO: 11014 - protein, 13 aa, Homo sapiens
  CDR3 for beta chain variable domain of TCR clone 5507 (TRBV2, TRBJ1-4)
CASSELGVEKLFF

SEQ ID NO: 11015 - protein, 15 aa, Homo sapiens
  CDR3 for alpha chain variable domain of TCR clone 5508 (TRAV27, TRAJ38)
CAARRNAGNNRKLIW

SEQ ID NO: 11016 - protein, 13 aa, Homo sapiens
  CDR3 for beta chain variable domain of TCR clone 5508 (TRBV12-5, TRBJ2-3)
CASGDRRSDTQYF

SEQ ID NO: 11017 - protein, 14 aa, Homo sapiens
  CDR3 for alpha chain variable domain of TCR clone 5509 (TRAV1-2, TRAJ8)
CAVREDTGFQKLVF

SEQ ID NO: 11018 - protein, 16 aa, Homo sapiens
  CDR3 for beta chain variable domain of TCR clone 5509 (TRBV19, TRBJ2-3)
CASGTGPNDGTDTQYF

SEQ ID NO: 11019 - protein, 13 aa, Homo sapiens
  CDR3 for alpha chain variable domain of TCR clone 5510 (TRAV27, TRAJ6)
CAGGTRGSYIPTF

SEQ ID NO: 11020 - protein, 14 aa, Homo sapiens
  CDR3 for beta chain variable domain of TCR clone 5510 (TRBV6-1, TRBJ1-3)
CASVQGGGGNTIYF

SEQ ID NO: 11021 - protein, 15 aa, Homo sapiens
  CDR3 for alpha chain variable domain of TCR clone 5511 (TRAV12-2, TRAJ50)
CAVNGLETSYDKVIF

SEQ ID NO: 11022 - protein, 14 aa, Homo sapiens
  CDR3 for beta chain variable domain of TCR clone 5511 (TRBV7-2, TRBJ1-1)
CASSFLTGTTEAFF

SEQ ID NO: 11023 - protein, 16 aa, Homo sapiens
  CDR3 for alpha chain variable domain of TCR clone 5512 (TRAV8-6, TRAJ58)
CAVSDHTETSGSRLTF

SEQ ID NO: 11024 - protein, 14 aa, Homo sapiens
  CDR3 for beta chain variable domain of TCR clone 5512 (TRBV7-2, TRBJ1-5)
CASSPRGGPQPQHF

SEQ ID NO: 11025 - protein, 14 aa, Homo sapiens
  CDR3 for alpha chain variable domain of TCR clone 5513 (TRAV12-1, TRAJ17)
CVVNYKAAGNKLTF

SEQ ID NO: 11026 - protein, 13 aa, Homo sapiens
  CDR3 for beta chain variable domain of TCR clone 5513 (TRBV20-1, TRBJ1-1)
CSARGGGNTEAFF

SEQ ID NO: 11027 - protein, 18 aa, Homo sapiens
  CDR3 for alpha chain variable domain of TCR clone 5514 (TRAV13-1, TRAJ52)
CAASKRSAGGTSYGKLTF

SEQ ID NO: 11028 - protein, 12 aa, Homo sapiens
  CDR3 for beta chain variable domain of TCR clone 5514 (TRBV11-2, TRBJ2-2)
CASSLGGGELFF

SEQ ID NO: 11029 - protein, 13 aa, Homo sapiens
  CDR3 for alpha chain variable domain of TCR clone 5515 (TRAV21, TRAJ57)
CAVTQGGSGKLVF

SEQ ID NO: 11030 - protein, 11 aa, Homo sapiens
  CDR3 for beta chain variable domain of TCR clone 5515 (TRBV11-2, TRBJ2-2)
CASSLPGELFF

SEQ ID NO: 11031 - protein, 11 aa, Homo sapiens
  CDR3 for alpha chain variable domain of TCR clone 5516 (TRAV8-4, TRAJ52)
AGGTSYGKLTF

SEQ ID NO: 11032 - protein, 13 aa, Homo sapiens
  CDR3 for beta chain variable domain of TCR clone 5516 (TRBV28, TRBJ2-2)
CASIGGLGGELFF

SEQ ID NO: 11033 - protein, 13 aa, Homo sapiens
  CDR3 for alpha chain variable domain of TCR clone 5517 (TRAV12-3, TRAJ9)
CAMRNTGGFKTIF

SEQ ID NO: 11034 - protein, 13 aa, Homo sapiens
  CDR3 for beta chain variable domain of TCR clone 5517 (TRBV9, TRBJ2-1)
CASSVGQGGEQFF

SEQ ID NO: 11035 - protein, 14 aa, Homo sapiens
  CDR3 for alpha chain variable domain of TCR clone 5518 (TRAV2, TRAJ37)
CAVDFTSNTGKLIF

SEQ ID NO: 11036 - protein, 14 aa, Homo sapiens
  CDR3 for beta chain variable domain of TCR clone 5518 (TRBV7-2, TRBJ2-7)
CASSPKTSFYEQYF

SEQ ID NO: 11037 - protein, 14 aa, Homo sapiens
  CDR3 for alpha chain variable domain of TCR clone 5519 (TRAV23/DV6, TRAJ3)
CAASMASSASKIIF

SEQ ID NO: 11038 - protein, 13 aa, Homo sapiens
  CDR3 for beta chain variable domain of TCR clone 5519 (TRBV27, TRBJ2-5)
CASFSRGLETQYF

SEQ ID NO: 11039 - protein, 11 aa, Homo sapiens
  CDR3 for alpha chain variable domain of TCR clone 5520 (TRAV5, TRAJ3)
CAPGSASKIIF

SEQ ID NO: 11040 - protein, 12 aa, Homo sapiens
  CDR3 for beta chain variable domain of TCR clone 5520 (TRBV18, TRBJ2-1)
CASSSDEDEQFF

SEQ ID NO: 11041 - protein, 13 aa, Homo sapiens
  CDR3 for alpha chain variable domain of TCR clone 5521 (TRAV21, TRAJ27)
CAARPGNAGKSTF

SEQ ID NO: 11042 - protein, 14 aa, Homo sapiens
  CDR3 for beta chain variable domain of TCR clone 5521 (TRBV20-1, TRBJ2-3)
CRAYSGGRTDTQYF

SEQ ID NO: 11043 - protein, 14 aa, Homo sapiens
  CDR3 for alpha chain variable domain of TCR clone 5522 (TRAV8-1, TRAJ34)
CALPRGTTSSSLGL

SEQ ID NO: 11044 - protein, 16 aa, Homo sapiens
  CDR3 for beta chain variable domain of TCR clone 5522 (TRBV11-2, TRBJ1-2)
CASSLDTGGADYGYTF

SEQ ID NO: 11045 - protein, 13 aa, Homo sapiens
  CDR3 for alpha chain variable domain of TCR clone 5523 (TRAV22, TRAJ29)
CAVGGSGNTPLVF

SEQ ID NO: 11046 - protein, 18 aa, Homo sapiens
  CDR3 for beta chain variable domain of TCR clone 5523 (TRBV10-3, TRBJ2-3)
CAISESRVGPMRGDTQYF

SEQ ID NO: 11047 - protein, 13 aa, Homo sapiens
  CDR3 for alpha chain variable domain of TCR clone 5524 (TRAV12-3, TRAJ13)
CAMTSGGHQKVTF

SEQ ID NO: 11048 - protein, 13 aa, Homo sapiens
  CDR3 for beta chain variable domain of TCR clone 5524 (TRBV20-1, TRBJ2-2)
CSALSGGAGELFF

SEQ ID NO: 11049 - protein, 15 aa, Homo sapiens
  CDR3 for alpha chain variable domain of TCR clone 5525 (TRAV8-6, TRAJ11)
CAVNFMNSGYSTLTF

SEQ ID NO: 11050 - protein, 17 aa, Homo sapiens
  CDR3 for beta chain variable domain of TCR clone 5525 (TRBV3-1, TRBJ2-5)
CASSNWGGTSGQETQYF

SEQ ID NO: 11051 - protein, 13 aa, Homo sapiens
  CDR3 for alpha chain variable domain of TCR clone 5526 (TRAV2, TRAJ40)
CAVVTSGTHKYIF

SEQ ID NO: 11052 - protein, 14 aa, Homo sapiens
  CDR3 for beta chain variable domain of TCR clone 5526 (TRBV19, TRBJ2-1)
CASPTFVLSGEQFF

SEQ ID NO: 11053 - protein, 16 aa, Homo sapiens
  CDR3 for alpha chain variable domain of TCR clone 5527 (TRAV8-6, TRAJ22)
CAVSPISSGSARQLTF

SEQ ID NO: 11054 - protein, 14 aa, Homo sapiens
  CDR3 for beta chain variable domain of TCR clone 5527 (TRBV2, TRBJ2-1)
CASSARAAYNEQFF

SEQ ID NO: 11055 - protein, 16 aa, Homo sapiens
  CDR3 for alpha chain variable domain of TCR clone 5528 (TRAV23/DV6, TRAJ9)
CAASIGGNTGGFKTIF

SEQ ID NO: 11056 - protein, 13 aa, Homo sapiens
  CDR3 for beta chain variable domain of TCR clone 5528 (TRBV12-4, TRBJ1-1)
CASSPGTGFEAFF

SEQ ID NO: 11057 - protein, 15 aa, Homo sapiens
  CDR3 for alpha chain variable domain of TCR clone 5529 (TRAV21, TRAJ53)
CATLNSGGSNYKLTF

SEQ ID NO: 11058 - protein, 12 aa, Homo sapiens
  CDR3 for beta chain variable domain of TCR clone 5529 (TRBV5-4, TRBJ2-7)
CASSLEAYEQYF

SEQ ID NO: 11059 - protein, 13 aa, Homo sapiens
  CDR3 for alpha chain variable domain of TCR clone 5530 (TRAV27, TRAJ58)
CAGAETSGSRLTF

SEQ ID NO: 11060 - protein, 13 aa, Homo sapiens
  CDR3 for beta chain variable domain of TCR clone 5530 (TRBV7-2, TRBJ2-1)
CASNRDRWNEQFF

SEQ ID NO: 11061 - protein, 12 aa, Homo sapiens
  CDR3 for alpha chain variable domain of TCR clone 5531 (TRAV12-3, TRAJ17)
CAMTLTGNKLTF

SEQ ID NO: 11062 - protein, 13 aa, Homo sapiens
  CDR3 for beta chain variable domain of TCR clone 5531 (TRBV10-3, TRBJ1-2)
CAISERDSYGYTF

SEQ ID NO: 11063 - protein, 13 aa, Homo sapiens
  CDR3 for alpha chain variable domain of TCR clone 5532 (TRAV27, TRAJ37)
CAGGPSNTGKLIF

SEQ ID NO: 11064 - protein, 14 aa, Homo sapiens
  CDR3 for beta chain variable domain of TCR clone 5532 (TRBV7-8, TRBJ1-5)
CASSLGAFNQPQHF

SEQ ID NO: 11065 - protein, 15 aa, Homo sapiens
  CDR3 for alpha chain variable domain of TCR clone 5533 (TRAV8-3, TRAJ45)
CASSYSGGGADGLTF

SEQ ID NO: 11066 - protein, 12 aa, Homo sapiens
  CDR3 for beta chain variable domain of TCR clone 5533 (TRBV11-2, TRBJ2-3)
CASRPGTDTQYF

SEQ ID NO: 11067 - protein, 17 aa, Homo sapiens
  CDR3 for alpha chain variable domain of TCR clone 5534 (TRAV23/DV6, TRAJ3)
CSNHFCFGWSSASKIIF

SEQ ID NO: 11068 - protein, 15 aa, Homo sapiens
  CDR3 for beta chain variable domain of TCR clone 5534 (TRBV19, TRBJ1-6)
CASSTQGAVGSPLHF

SEQ ID NO: 11069 - protein, 12 aa, Homo sapiens
  CDR3 for alpha chain variable domain of TCR clone 5535 (TRAV12-3, TRAJ17)
CTMTLTGNKLTF

SEQ ID NO: 11070 - protein, 15 aa, Homo sapiens
  CDR3 for beta chain variable domain of TCR clone 5535 (TRBV20-1, TRBJ2-7)
CSARDRVSGMDEQYF

SEQ ID NO: 11071 - protein, 15 aa, Homo sapiens
  CDR3 for alpha chain variable domain of TCR clone 5536 (TRAV38-2/DV8, TRAJ57)
CASARAQGGSEKLVF

SEQ ID NO: 11072 - protein, 17 aa, Homo sapiens
  CDR3 for beta chain variable domain of TCR clone 5536 (TRBV18, TRBJ1-5)
CASSPTMGQGTNQPQHF

SEQ ID NO: 11073 - protein, 18 aa, Homo sapiens
  CDR3 for alpha chain variable domain of TCR clone 5537 (TRAV21, TRAJ52)
CAVRPSPAGGTSYGKLTF

SEQ ID NO: 11074 - protein, 17 aa, Homo sapiens
  CDR3 for beta chain variable domain of TCR clone 5537 (TRBV4-1, TRBJ1-4)
CASSQEGPRGVEEKLFF

SEQ ID NO: 11075 - protein, 11 aa, Homo sapiens
  CDR3 for alpha chain variable domain of TCR clone 5538 (TRAV2, TRAJ13)
CASGGYQKVTF

SEQ ID NO: 11076 - protein, 13 aa, Homo sapiens
  CDR3 for beta chain variable domain of TCR clone 5538 (TRBV6-1, TRBJ1-1)
CASSRQGNTEAFF

SEQ ID NO: 11077 - protein, 20 aa, Homo sapiens
  CDR3 for alpha chain variable domain of TCR clone 5539 (TRAV25, TRAJ21)
TATQTTDVGTYPLSFNKFYF

SEQ ID NO: 11078 - protein, 14 aa, Homo sapiens
  CDR3 for beta chain variable domain of TCR clone 5539 (TRBV20-1, TRBJ2-7)
CSAPELAGVGEQYF

SEQ ID NO: 11079 - protein, 13 aa, Homo sapiens
  CDR3 for alpha chain variable domain of TCR clone 5540 (TRAV24, TRAJ37)
CAFSPGNTGKLIF

SEQ ID NO: 11080 - protein, 15 aa, Homo sapiens
  CDR3 for beta chain variable domain of TCR clone 5540 (TRBV7-6, TRBJ2-5)
CASSKPTGPQETQYF

SEQ ID NO: 11081 - protein, 21 aa, Homo sapiens
  CDR3 for alpha chain variable domain of TCR clone 5541 (TRAV13-1, TRAJ37)
CAATPKEIKHRQTNLWARDNF

SEQ ID NO: 11082 - protein, 13 aa, Homo sapiens
  CDR3 for beta chain variable domain of TCR clone 5541 (TRBV20-1, TRBJ2-7)
CSATSEDSYEQYF

SEQ ID NO: 11083 - protein, 14 aa, Homo sapiens
  CDR3 for alpha chain variable domain of TCR clone 5542 (TRAV17, TRAJ12)
CATDEKDSSYKLIF

SEQ ID NO: 11084 - protein, 18 aa, Homo sapiens
  CDR3 for beta chain variable domain of TCR clone 5542 (TRBV25-1, TRBJ1-2)
CASSGLQNGQGLIFGYTF

SEQ ID NO: 11085 - protein, 18 aa, Homo sapiens
  CDR3 for alpha chain variable domain of TCR clone 5543 (TRAV13-1, TRAJ52)
CAAKNPNAGGTSYGKLTF

SEQ ID NO: 11086 - protein, 15 aa, Homo sapiens
  CDR3 for beta chain variable domain of TCR clone 5543 (TRBV28, TRBJ2-3)
CASSPDRQGANTQYF

SEQ ID NO: 11087 - protein, 13 aa, Homo sapiens
  CDR3 for alpha chain variable domain of TCR clone 5544 (TRAV2, TRAJ13)
CAVESGGYQKVTF

SEQ ID NO: 11088 - protein, 13 aa, Homo sapiens
  CDR3 for beta chain variable domain of TCR clone 5544 (TRBV28, TRBJ2-5)
CASSFAGGETQYF

SEQ ID NO: 11089 - protein, 10 aa, Homo sapiens
  CDR3 for alpha chain variable domain of TCR clone 5545 (TRAV12-3, TRAJ49)
CAMNDDQFYF

SEQ ID NO: 11090 - protein, 15 aa, Homo sapiens
  CDR3 for beta chain variable domain of TCR clone 5545 (TRBV20-1, TRBJ2-7)
CSARDRVSGMDEQYF

SEQ ID NO: 11091 - protein, 11 aa, Homo sapiens
  CDR3 for alpha chain variable domain of TCR clone 5546 (TRAV3, TRAJ21)
CAVGNFNRFYF

SEQ ID NO: 11092 - protein, 16 aa, Homo sapiens
  CDR3 for beta chain variable domain of TCR clone 5546 (TRBV19, TRBJ2-1)
CASSKAGPSSYNEQFF

SEQ ID NO: 11093 - protein, 14 aa, Homo sapiens
  CDR3 for alpha chain variable domain of TCR clone 5547 (TRAV13-1, TRAJ35)
CAASKGGFGNVLHC

SEQ ID NO: 11094 - protein, 16 aa, Homo sapiens
  CDR3 for beta chain variable domain of TCR clone 5547 (TRBV7-9, TRBJ2-1)
CASSDVAGGSYNEQFF

SEQ ID NO: 11095 - protein, 20 aa, Homo sapiens
  CDR3 for alpha chain variable domain of TCR clone 5548 (TRAV30, TRAJ54)
SAAQSRSETQVVQGAQKLVF

SEQ ID NO: 11096 - protein, 11 aa, Homo sapiens
  CDR3 for beta chain variable domain of TCR clone 5548 (TRBV25-1, TRBJ2-4)
CQSRDQNIQYF

SEQ ID NO: 11097 - protein, 11 aa, Homo sapiens
  CDR3 for alpha chain variable domain of TCR clone 5549 (TRAV12-3, TRAJ49)
CAANTGNQFYF

SEQ ID NO: 11098 - protein, 16 aa, Homo sapiens
  CDR3 for beta chain variable domain of TCR clone 5549 (TRBV7-9, TRBJ2-3)
CASSPWREVGTDTQYF

SEQ ID NO: 11099 - protein, 12 aa, Homo sapiens
  CDR3 for alpha chain variable domain of TCR clone 5550 (TRAV2, TRAJ9)
CAVVAGGFKTIF

SEQ ID NO: 11100 - protein, 16 aa, Homo sapiens
  CDR3 for beta chain variable domain of TCR clone 5550 (TRBV13, TRBJ2-2)
CASSPRTGEHTGELFF

SEQ ID NO: 11101 - protein, 16 aa, Homo sapiens
  CDR3 for alpha chain variable domain of TCR clone 5551 (TRAV12-1, TRAJ21)
CVVLSGYFGSGTKLNV

SEQ ID NO: 11102 - protein, 13 aa, Homo sapiens
  CDR3 for beta chain variable domain of TCR clone 5551 (TRBV7-3, TRBJ1-1)
CASSQDWGAEAFF

SEQ ID NO: 11103 - protein, 12 aa, Homo sapiens
  CDR3 for alpha chain variable domain of TCR clone 5552 (TRAV12-3, TRAJ17)
CAMTLTGNKLTF

SEQ ID NO: 11104 - protein, 15 aa, Homo sapiens
  CDR3 for beta chain variable domain of TCR clone 5552 (TRBV5-7, TRBJ2-7)
CASSPYFEGSYEQYF

SEQ ID NO: 11105 - protein, 14 aa, Homo sapiens
  CDR3 for alpha chain variable domain of TCR clone 5553 (TRAV1-2, TRAJ16)
CAVNRFSDGQKLLF

SEQ ID NO: 11106 - protein, 15 aa, Homo sapiens
  CDR3 for beta chain variable domain of TCR clone 5553 (TRBV20-1, TRBJ2-2)
SAVPRTPRTPGSCFF

SEQ ID NO: 11107 - protein, 14 aa, Homo sapiens
  CDR3 for alpha chain variable domain of TCR clone 5554 (TRAV8-6, TRAJ49)
CAVSDPGTGNQFYF

SEQ ID NO: 11108 - protein, 13 aa, Homo sapiens
  CDR3 for beta chain variable domain of TCR clone 5554 (TRBV7-9, TRBJ1-2)
CASSLKQNYGYTF

SEQ ID NO: 11109 - protein, 13 aa, Homo sapiens
  CDR3 for alpha chain variable domain of TCR clone 5555 (TRAV27, TRAJ29)
CAGAHSGNTPLVF

SEQ ID NO: 11110 - protein, 18 aa, Homo sapiens
  CDR3 for beta chain variable domain of TCR clone 5555 (TRBV6-6, TRBJ1-3)
CASSYSKWDSISGNTIYF

SEQ ID NO: 11111 - protein, 16 aa, Homo sapiens
  CDR3 for alpha chain variable domain of TCR clone 5556 (TRAV12-2, TRAJ43)
CAGADMRFGAGTRLTV

SEQ ID NO: 11112 - protein, 16 aa, Homo sapiens
  CDR3 for beta chain variable domain of TCR clone 5556 (TRBV2, TRBJ2-4)
CASSEAPGGEQNIQYF

SEQ ID NO: 11113 - protein, 15 aa, Homo sapiens
  CDR3 for alpha chain variable domain of TCR clone 5557 (TRAV5, TRAJ33)
CAEAPAMDSNYQLIW

SEQ ID NO: 11114 - protein, 12 aa, Homo sapiens
  CDR3 for beta chain variable domain of TCR clone 5557 (TRBV6-3, TRBJ2-7)
CASSLTPYEQYF

SEQ ID NO: 11115 - protein, 22 aa, Homo sapiens
  CDR3 for alpha chain variable domain of TCR clone 5558 (TRAV3, TRAJ38)
CAVRDCLNAGNNHIQNPDPAVY

SEQ ID NO: 11116 - protein, 14 aa, Homo sapiens
  CDR3 for beta chain variable domain of TCR clone 5558 (TRBV5-5, TRBJ1-5)
CASSGQGVDQPQHF

SEQ ID NO: 11117 - protein, 15 aa, Homo sapiens
  CDR3 for alpha chain variable domain of TCR clone 5559 (TRAV26-1, TRAJ29)
CIVRVEGSGDTPLVF

SEQ ID NO: 11118 - protein, 14 aa, Homo sapiens
  CDR3 for beta chain variable domain of TCR clone 5559 (TRBV18, TRBJ2-5)
CASSPGVSQETQYF

SEQ ID NO: 11119 - protein, 14 aa, Homo sapiens
  CDR3 for alpha chain variable domain of TCR clone 5560 (TRAV26-1, TRAJ21)
CIVRPPYNFNKFYF

SEQ ID NO: 11120 - protein, 14 aa, Homo sapiens
  CDR3 for beta chain variable domain of TCR clone 5560 (TRBV4-1, TRBJ2-2)
CASSQAVNTGELFF

SEQ ID NO: 11121 - protein, 13 aa, Homo sapiens
  CDR3 for alpha chain variable domain of TCR clone 5561 (TRAV38-2/DV8, TRAJ49)
CAYRRRTGNQFYF

SEQ ID NO: 11122 - protein, 15 aa, Homo sapiens
  CDR3 for beta chain variable domain of TCR clone 5561 (TRBV24-1, TRBJ1-1)
CATSDSKTVNTEAFF

SEQ ID NO: 11123 - protein, 11 aa, Homo sapiens
  CDR3 for alpha chain variable domain of TCR clone 5562 (TRAV12-2, TRAJ21)
CAVEGFNKFYF

SEQ ID NO: 11124 - protein, 15 aa, Homo sapiens
  CDR3 for beta chain variable domain of TCR clone 5562 (TRBV20-1, TRBJ1-5)
CSASRRGDLGQPQHF

SEQ ID NO: 11125 - protein, 18 aa, Homo sapiens
  CDR3 for alpha chain variable domain of TCR clone 5563 (TRAV21, TRAJ52)
CAVRPSPAGGISYGKLTF

SEQ ID NO: 11126 - protein, 14 aa, Homo sapiens
  CDR3 for beta chain variable domain of TCR clone 5563 (TRBV4-1, TRBJ2-2)
CASSQAVNTGELFF

SEQ ID NO: 11127 - protein, 21 aa, Homo sapiens
  CDR3 for alpha chain variable domain of TCR clone 5564 (TRAV6, TRAJ36)
CARQTTSSLGLERDSPLFPIS

SEQ ID NO: 11128 - protein, 14 aa, Homo sapiens
  CDR3 for beta chain variable domain of TCR clone 5564 (TRBV10-2, TRBJ1-5)
CASSSTGRNQPQHF

SEQ ID NO: 11129 - protein, 10 aa, Homo sapiens
  CDR3 for alpha chain variable domain of TCR clone 5565 (TRAV30, TRAJ48)
CGIGNEKLTF

SEQ ID NO: 11130 - protein, 14 aa, Homo sapiens
  CDR3 for beta chain variable domain of TCR clone 5565 (TRBV7-6, TRBJ2-3)
CASSLGTVTDTQYF

SEQ ID NO: 11131 - protein, 14 aa, Homo sapiens
  CDR3 for alpha chain variable domain of TCR clone 5566 (TRAV26-1, TRAJ34)
CIVRVAYNTDKLIF

SEQ ID NO: 11132 - protein, 14 aa, Homo sapiens
  CDR3 for beta chain variable domain of TCR clone 5566 (TRBV12-5, TRBJ2-5)
CASGSRTHQETQYF

SEQ ID NO: 11133 - protein, 13 aa, Homo sapiens
  CDR3 for alpha chain variable domain of TCR clone 5567 (TRAV2, TRAJ27)
CAVEAPMQANQPL

SEQ ID NO: 11134 - protein, 13 aa, Homo sapiens
  CDR3 for beta chain variable domain of TCR clone 5567 (TRBV10-2, TRBJ2-3)
CASSESGDHTQYF

SEQ ID NO: 11135 - protein, 16 aa, Homo sapiens
  CDR3 for alpha chain variable domain of TCR clone 5568 (TRAV12-3, TRAJ53)
CAMSPGSGGSNYKLTF

SEQ ID NO: 11136 - protein, 11 aa, Homo sapiens
  CDR3 for beta chain variable domain of TCR clone 5568 (TRBV29-1, TRBJ2-5)
CSEDRAGTQYF

SEQ ID NO: 11137 - protein, 12 aa, Homo sapiens
  CDR3 for alpha chain variable domain of TCR clone 5569 (TRAV27, TRAJ35)
CAGADFGNVLHC

SEQ ID NO: 11138 - protein, 15 aa, Homo sapiens
  CDR3 for beta chain variable domain of TCR clone 5569 (TRBV7-2, TRBJ1-2)
CASSLVSGGDYGYTF

SEQ ID NO: 11139 - protein, 16 aa, Homo sapiens
  CDR3 for alpha chain variable domain of TCR clone 5570 (TRAV30, TRAJ24)
CGTEIVDADSWGKFQF

SEQ ID NO: 11140 - protein, 12 aa, Homo sapiens
  CDR3 for beta chain variable domain of TCR clone 5570 (TRBV14, TRBJ2-5)
CASSQLKETQYF

SEQ ID NO: 11141 - protein, 15 aa, Homo sapiens
  CDR3 for alpha chain variable domain of TCR clone 5571 (TRAV8-6, TRAJ6)
CAVSFTSGGSYIPTF

SEQ ID NO: 11142 - protein, 13 aa, Homo sapiens
  CDR3 for beta chain variable domain of TCR clone 5571 (TRBV29-1, TRBJ2-1)
CSVEGGRVNEQFF

SEQ ID NO: 11143 - protein, 14 aa, Homo sapiens
  CDR3 for alpha chain variable domain of TCR clone 5572 (TRAV4, TRAJ6)
CLGPASGGSYIPTF

SEQ ID NO: 11144 - protein, 12 aa, Homo sapiens
  CDR3 for beta chain variable domain of TCR clone 5572 (TRBV6-5, TRBJ2-3)
CASSPSTDTQYF

SEQ ID NO: 11145 - protein, 15 aa, Homo sapiens
  CDR3 for alpha chain variable domain of TCR clone 5573 (TRAV1-2, TRAJ8)
CAVRDRNTGFQKLVF

SEQ ID NO: 11146 - protein, 13 aa, Homo sapiens
  CDR3 for beta chain variable domain of TCR clone 5573 (TRBV5-7, TRBJ2-1)
CASSLVESVEQFF

SEQ ID NO: 11147 - protein, 12 aa, Homo sapiens
  CDR3 for alpha chain variable domain of TCR clone 5574 (TRAV8-3, TRAJ22)
FGGQSSARQLTF

SEQ ID NO: 11148 - protein, 15 aa, Homo sapiens
  CDR3 for beta chain variable domain of TCR clone 5574 (TRBV20-1, TRBJ1-1)
CSASRGVTGNTEAFF

SEQ ID NO: 11149 - protein, 14 aa, Homo sapiens
  CDR3 for alpha chain variable domain of TCR clone 5575 (TRAV8-4, TRAJ8)
CAVSEDTGFQKLVF

SEQ ID NO: 11150 - protein, 16 aa, Homo sapiens
  CDR3 for beta chain variable domain of TCR clone 5575 (TRBV7-3, TRBJ2-1)
CASSKPLAGGYNEQFF

SEQ ID NO: 11151 - protein, 14 aa, Homo sapiens
  CDR3 for alpha chain variable domain of TCR clone 5576 (TRAV8-4, TRAJ34)
CAVSDPGDTDKLIF

SEQ ID NO: 11152 - protein, 14 aa, Homo sapiens
  CDR3 for beta chain variable domain of TCR clone 5576 (TRBV20-1, TRBJ2-5)
CSARDGRAGETQYF

SEQ ID NO: 11153 - protein, 11 aa, Homo sapiens
  CDR3 for alpha chain variable domain of TCR clone 5577 (TRAV12-2, TRAJ29)
CAVTLRSPLVF

SEQ ID NO: 11154 - protein, 14 aa, Homo sapiens
  CDR3 for beta chain variable domain of TCR clone 5577 (TRBV9, TRBJ1-2)
CASSVSTRSYGYTF

SEQ ID NO: 11155 - protein, 13 aa, Homo sapiens
  CDR3 for alpha chain variable domain of TCR clone 5578 (TRAV20, TRAJ20)
CAVQAGSGYKLSF

SEQ ID NO: 11156 - protein, 13 aa, Homo sapiens
  CDR3 for beta chain variable domain of TCR clone 5578 (TRBV3-1, TRBJ2-3)
CASSQGGGDTQYF

SEQ ID NO: 11157 - protein, 13 aa, Homo sapiens
  CDR3 for alpha chain variable domain of TCR clone 5579 (TRAV12-2, TRAJ30)
CAVNLNRDDKIIF

SEQ ID NO: 11158 - protein, 14 aa, Homo sapiens
  CDR3 for beta chain variable domain of TCR clone 5579 (TRBV7-2, TRBJ1-2)
CASSSQGAHYGYTF

SEQ ID NO: 11159 - protein, 15 aa, Homo sapiens
  CDR3 for alpha chain variable domain of TCR clone 5580 (TRAV2, TRAJ15)
CAVEDRGQAGTALIF

SEQ ID NO: 11160 - protein, 15 aa, Homo sapiens
  CDR3 for beta chain variable domain of TCR clone 5580 (TRBV7-2, TRBJ2-3)
CASSLVVRGPDTQYF

SEQ ID NO: 11161 - protein, 15 aa, Homo sapiens
  CDR3 for alpha chain variable domain of TCR clone 5581 (TRAV26-1, TRAJ37)
CIVRVATGNTGKLIF

SEQ ID NO: 11162 - protein, 12 aa, Homo sapiens
  CDR3 for beta chain variable domain of TCR clone 5581 (TRBV12-4, TRBJ1-1)
CASSLVDTEAFF

SEQ ID NO: 11163 - protein, 11 aa, Homo sapiens
  CDR3 for alpha chain variable domain of TCR clone 5582 (TRAV21, TRAJ34)
CAVTNTDNLIF

SEQ ID NO: 11164 - protein, 17 aa, Homo sapiens
  CDR3 for beta chain variable domain of TCR clone 5582 (TRBV20-1, TRBJ2-1)
CSARSPSGGPPTMSSSS

SEQ ID NO: 11165 - protein, 17 aa, Homo sapiens
  CDR3 for alpha chain variable domain of TCR clone 5583 (TRAV3, TRAJ6)
CAVRDGPRAGGSYIPTF

SEQ ID NO: 11166 - protein, 14 aa, Homo sapiens
  CDR3 for beta chain variable domain of TCR clone 5583 (TRBV7-2, TRBJ2-7)
CASNPKTSFYEQYF

SEQ ID NO: 11167 - protein, 13 aa, Homo sapiens
  CDR3 for alpha chain variable domain of TCR clone 5584 (TRAV2, TRAJ24)
TTVPLVSWGKLQF

SEQ ID NO: 11168 - protein, 17 aa, Homo sapiens
  CDR3 for beta chain variable domain of TCR clone 5584 (TRBV5-1, TRBJ2-1)
CASSTGTSGYSYNEQFF

SEQ ID NO: 11169 - protein, 13 aa, Homo sapiens
  CDR3 for alpha chain variable domain of TCR clone 5585 (TRAV13-2, TRAJ48)
CAEMDFGNEKLTF

SEQ ID NO: 11170 - protein, 14 aa, Homo sapiens
  CDR3 for beta chain variable domain of TCR clone 5585 (TRBV20-1, TRBJ2-7)
CSAKRGRSSYEQYF

SEQ ID NO: 11171 - protein, 13 aa, Homo sapiens
  CDR3 for alpha chain variable domain of TCR clone 5586 (TRAV29/DV5, TRAJ49)
CAASTNTGNQFYF

SEQ ID NO: 11172 - protein, 11 aa, Homo sapiens
  CDR3 for beta chain variable domain of TCR clone 5586 (TRBV6-1, TRBJ2-1)
CASISSNEQFF

SEQ ID NO: 11173 - protein, 13 aa, Homo sapiens
  CDR3 for alpha chain variable domain of TCR clone 5587 (TRAV21, TRAJ20)
CAVGLRVDYKLSF

SEQ ID NO: 11174 - protein, 18 aa, Homo sapiens
  CDR3 for beta chain variable domain of TCR clone 5587 (TRBV20-1, TRBJ2-2)
CSARVQTARPSGTGELFF

SEQ ID NO: 11175 - protein, 12 aa, Homo sapiens
  CDR3 for alpha chain variable domain of TCR clone 5588 (TRAV3, TRAJ26)
CAVRDYGQNFVF

SEQ ID NO: 11176 - protein, 16 aa, Homo sapiens
  CDR3 for beta chain variable domain of TCR clone 5588 (TRBV11-2, TRBJ1-2)
SASSPSGREANYGYTF

SEQ ID NO: 11177 - protein, 15 aa, Homo sapiens
  CDR3 for alpha chain variable domain of TCR clone 5589 (TRAV38-2/DV8, TRAJ47)
CAYRSAKGYGNKLVF

SEQ ID NO: 11178 - protein, 15 aa, Homo sapiens
  CDR3 for beta chain variable domain of TCR clone 5589 (TRBV6-6, TRBJ2-7)
CASSYSYGGSYEQYF

SEQ ID NO: 11179 - protein, 12 aa, Homo sapiens
  CDR3 for alpha chain variable domain of TCR clone 5590 (TRAV24, TRAJ37)
CASSSNTGKLIF

SEQ ID NO: 11180 - protein, 11 aa, Homo sapiens
  CDR3 for beta chain variable domain of TCR clone 5590 (TRBV29-1, TRBJ2-5)
CSEDRTGTQYF

SEQ ID NO: 11181 - protein, 15 aa, Homo sapiens
  CDR3 for alpha chain variable domain of TCR clone 5591 (TRAV27, TRAJ38)
CAARRNAGNNRKLSW

SEQ ID NO: 11182 - protein, 13 aa, Homo sapiens
  CDR3 for beta chain variable domain of TCR clone 5591 (TRBV12-5, TRBJ2-3)
CASGDRQSDTQYF

SEQ ID NO: 11183 - protein, 14 aa, Homo sapiens
  CDR3 for alpha chain variable domain of TCR clone 5592 (TRAV12-3, TRAJ10)
SHLPLTGGGNKLTF

SEQ ID NO: 11184 - protein, 13 aa, Homo sapiens
  CDR3 for beta chain variable domain of TCR clone 5592 (TRBV20-1, TRBJ2-1)
TSGALPPGNEQFF

SEQ ID NO: 11185 - protein, 15 aa, Homo sapiens
  CDR3 for alpha chain variable domain of TCR clone 5593 (TRAV20, TRAJ41)
CAVQANSNSGYALNF

SEQ ID NO: 11186 - protein, 14 aa, Homo sapiens
  CDR3 for beta chain variable domain of TCR clone 5593 (TRBV25-1, TRBJ1-1)
CASTHLGGNTEAFF

SEQ ID NO: 11187 - protein, 13 aa, Homo sapiens
  CDR3 for alpha chain variable domain of TCR clone 5594 (TRAV2, TRAJ40)
CAVVTSGTYKYIF

SEQ ID NO: 11188 - protein, 14 aa, Homo sapiens
  CDR3 for beta chain variable domain of TCR clone 5594 (TRBV19, TRBJ2-1)
CASPTFVSSGEQFF

SEQ ID NO: 11189 - protein, 15 aa, Homo sapiens
  CDR3 for alpha chain variable domain of TCR clone 5595 (TRAV3, TRAJ29)
CAVRPGNSGNTPLVF

SEQ ID NO: 11190 - protein, 16 aa, Homo sapiens
  CDR3 for beta chain variable domain of TCR clone 5595 (TRBV24-1, TRBJ2-2)
CATSDPGTANTGELFF

SEQ ID NO: 11191 - protein, 11 aa, Homo sapiens
  CDR3 for alpha chain variable domain of TCR clone 5596 (TRAV12-1, TRAJ3)
CVVSSASKIIF

SEQ ID NO: 11192 - protein, 15 aa, Homo sapiens
  CDR3 for beta chain variable domain of TCR clone 5596 (TRBV20-1, TRBJ2-5)
CSASGTSGGGETQYF

SEQ ID NO: 11193 - protein, 14 aa, Homo sapiens
  CDR3 for alpha chain variable domain of TCR clone 5597 (TRAV8-6, TRAJ5)
CAVSVDTGRRALTF

SEQ ID NO: 11194 - protein, 14 aa, Homo sapiens
  CDR3 for beta chain variable domain of TCR clone 5597 (TRBV6-1, TRBJ1-3)
CASVQGGGGNTIYF

SEQ ID NO: 11195 - protein, 12 aa, Homo sapiens
  CDR3 for alpha chain variable domain of TCR clone 5598 (TRAV20, TRAJ37)
CALPSNTGKLIF

SEQ ID NO: 11196 - protein, 16 aa, Homo sapiens
  CDR3 for beta chain variable domain of TCR clone 5598 (TRBV28, TRBJ1-2)
CASSHGQGVYKDGYTF

SEQ ID NO: 11197 - protein, 12 aa, Homo sapiens
  CDR3 for alpha chain variable domain of TCR clone 5599 (TRAV26-1, TRAJ26)
CIVFIYGQNFVF

SEQ ID NO: 11198 - protein, 15 aa, Homo sapiens
  CDR3 for beta chain variable domain of TCR clone 5599 (TRBV14, TRBJ2-5)
CASSQGEAVQETQYF

SEQ ID NO: 11199 - protein, 17 aa, Homo sapiens
  CDR3 for alpha chain variable domain of TCR clone 5600 (TRAV3, TRAJ42)
CAVRGRDYGGSQGNLIF

SEQ ID NO: 11200 - protein, 14 aa, Homo sapiens
  CDR3 for beta chain variable domain of TCR clone 5600 (TRBV5-4, TRBJ1-1)
CASSLDSRRDEAFF

SEQ ID NO: 11201 - protein, 15 aa, Homo sapiens
  CDR3 for alpha chain variable domain of TCR clone 5601 (TRAV26-1, TRAJ22)
CIVRVSFWFCKATDL

SEQ ID NO: 11202 - protein, 20 aa, Homo sapiens
  CDR3 for beta chain variable domain of TCR clone 5601 (TRBV28, TRBJ2-1)
CASTPIGRSPGLAGGNEQFF

SEQ ID NO: 11203 - protein, 11 aa, Homo sapiens
  CDR3 for alpha chain variable domain of TCR clone 5602 (TRAV2, TRAJ13)
CASGGYQKVTF

SEQ ID NO: 11204 - protein, 15 aa, Homo sapiens
  CDR3 for beta chain variable domain of TCR clone 5602 (TRBV27, TRBJ2-5)
CASSLYPRGGETQYF

SEQ ID NO: 11205 - protein, 15 aa, Homo sapiens
  CDR3 for alpha chain variable domain of TCR clone 5603 (TRAV34, TRAJ38)
CGADFTPGNNRKLIW

SEQ ID NO: 11206 - protein, 16 aa, Homo sapiens
  CDR3 for beta chain variable domain of TCR clone 5603 (TRBV12-5, TRBJ2-5)
CASGPRTNGNQETQYF

SEQ ID NO: 11207 - protein, 12 aa, Homo sapiens
  CDR3 for alpha chain variable domain of TCR clone 5604 (TRAV8-3, TRAJ26)
CAGDNYGQNFVF

SEQ ID NO: 11208 - protein, 15 aa, Homo sapiens
  CDR3 for beta chain variable domain of TCR clone 5604 (TRBV20-1, TRBJ2-3)
CSARRGEAITDTQYF

SEQ ID NO: 11209 - protein, 12 aa, Homo sapiens
  CDR3 for alpha chain variable domain of TCR clone 5605 (TRAV12-3, TRAJ17)
CAMTLKGNKLTF

SEQ ID NO: 11210 - protein, 15 aa, Homo sapiens
  CDR3 for beta chain variable domain of TCR clone 5605 (TRBV20-1, TRBJ2-7)
CSARDRVSGMDEQYF

SEQ ID NO: 11211 - protein, 19 aa, Homo sapiens
  CDR3 for alpha chain variable domain of TCR clone 5606 (TRAV2, TRAJ20)
ILQVREADAAVYRDCKLSF

SEQ ID NO: 11212 - protein, 18 aa, Homo sapiens
  CDR3 for beta chain variable domain of TCR clone 5606 (TRBV7-3, TRBJ2-3)
CASSSTGTYPSSTDTQYF

SEQ ID NO: 11213 - protein, 14 aa, Homo sapiens
  CDR3 for alpha chain variable domain of TCR clone 5607 (TRAV2, TRAJ9)
CAVEDRSGGFKTIF

SEQ ID NO: 11214 - protein, 11 aa, Homo sapiens
  CDR3 for beta chain variable domain of TCR clone 5607 (TRBV12-4, TRBJ2-3)
CASTATDTQYF

SEQ ID NO: 11215 - protein, 15 aa, Homo sapiens
  CDR3 for alpha chain variable domain of TCR clone 5608 (TRAV8-3, TRAJ45)
CASSYSGGGADGLTF

SEQ ID NO: 11216 - protein, 13 aa, Homo sapiens
  CDR3 for beta chain variable domain of TCR clone 5608 (TRBV19, TRBJ1-2)
CASSVPGQDGYTF

SEQ ID NO: 11217 - protein, 12 aa, Homo sapiens
  CDR3 for alpha chain variable domain of TCR clone 5609 (TRAV17, TRAJ29)
CYASSGNTPLVF

SEQ ID NO: 11218 - protein, 17 aa, Homo sapiens
  CDR3 for beta chain variable domain of TCR clone 5609 (TRBV20-1, TRBJ2-2)
CSASGSGQGGLTGELFF

SEQ ID NO: 11219 - protein, 14 aa, Homo sapiens
  CDR3 for alpha chain variable domain of TCR clone 5610 (TRAV3, TRAJ20)
CAVPPAPNDYKLSF

SEQ ID NO: 11220 - protein, 13 aa, Homo sapiens
  CDR3 for beta chain variable domain of TCR clone 5610 (TRBV15, TRBJ1-2)
CATSRVDARSPVF

SEQ ID NO: 11221 - protein, 14 aa, Homo sapiens
  CDR3 for alpha chain variable domain of TCR clone 5611 (TRAV8-1, TRAJ9)
CAVNAWTGGFKTIF

SEQ ID NO: 11222 - protein, 16 aa, Homo sapiens
  CDR3 for beta chain variable domain of TCR clone 5611 (TRBV28, TRBJ2-2)
CASSLEGGSNTGELFF

SEQ ID NO: 11223 - protein, 12 aa, Homo sapiens
  CDR3 for alpha chain variable domain of TCR clone 5612 (TRAV8-3, TRAJ26)
CAGDNYGQNFVF

SEQ ID NO: 11224 - protein, 15 aa, Homo sapiens
  CDR3 for beta chain variable domain of TCR clone 5612 (TRBV12-4, TRBJ2-1)
CASSLSGGASNEQFF

SEQ ID NO: 11225 - protein, 15 aa, Homo sapiens
  CDR3 for alpha chain variable domain of TCR clone 5613 (TRAV9-2, TRAJ39)
CALSDRNNAGNMLTF

SEQ ID NO: 11226 - protein, 15 aa, Homo sapiens
  CDR3 for beta chain variable domain of TCR clone 5613 (TRBV10-3, TRBJ2-2)
CAISPGRTNTGELFF

SEQ ID NO: 11227 - protein, 16 aa, Homo sapiens
  CDR3 for alpha chain variable domain of TCR clone 5614 (TRAV3, TRAJ10)
CAVRDMRAGGGNKLTF

SEQ ID NO: 11228 - protein, 16 aa, Homo sapiens
  CDR3 for beta chain variable domain of TCR clone 5614 (TRBV12-5, TRBJ2-5)
CASGPRTSGNQETQYF

SEQ ID NO: 11229 - protein, 14 aa, Homo sapiens
  CDR3 for alpha chain variable domain of TCR clone 5615 (TRAV13-2, TRAJ6)
CAERGSGGSYIPTF

SEQ ID NO: 11230 - protein, 13 aa, Homo sapiens
  CDR3 for beta chain variable domain of TCR clone 5615 (TRBV19, TRBJ1-2)
CASSQGQVYGYTF

SEQ ID NO: 11231 - protein, 15 aa, Homo sapiens
  CDR3 for alpha chain variable domain of TCR clone 5616 (TRAV12-3, TRAJ6)
CAMSATTGGSYIPTF

SEQ ID NO: 11232 - protein, 15 aa, Homo sapiens
  CDR3 for beta chain variable domain of TCR clone 5616 (TRBV20-1, TRBJ2-7)
CSARDRVSGMDEQYF

SEQ ID NO: 11233 - protein, 10 aa, Homo sapiens
  CDR3 for alpha chain variable domain of TCR clone 5617 (TRAV13-1, TRAJ26)
CAPYGQNFVF

SEQ ID NO: 11234 - protein, 15 aa, Homo sapiens
  CDR3 for beta chain variable domain of TCR clone 5617 (TRBV28, TRBJ2-3)
CASSQELGGTDTQYF

SEQ ID NO: 11235 - protein, 17 aa, Homo sapiens
  CDR3 for alpha chain variable domain of TCR clone 5618 (TRAV13-1, TRAJ10)
CAASIWRGTGGGNKLTF

SEQ ID NO: 11236 - protein, 13 aa, Homo sapiens
  CDR3 for beta chain variable domain of TCR clone 5618 (TRBV20-1, TRBJ1-1)
CSARGGGNTEAFF

SEQ ID NO: 11237 - protein, 14 aa, Homo sapiens
  CDR3 for alpha chain variable domain of TCR clone 5619 (TRAV26-1, TRAJ45)
CIEVTGGGADGLTF

SEQ ID NO: 11238 - protein, 15 aa, Homo sapiens
  CDR3 for beta chain variable domain of TCR clone 5619 (TRBV5-1, TRBJ1-1)
CASSSTTGTNTEAFF

SEQ ID NO: 11239 - protein, 11 aa, Homo sapiens
  CDR3 for alpha chain variable domain of TCR clone 5620 (TRAV1-1, TRAJ5)
CAVRVRRALTF

SEQ ID NO: 11240 - protein, 18 aa, Homo sapiens
  CDR3 for beta chain variable domain of TCR clone 5620 (TRBV12-4, TRBJ1-2)
CASSPNPGQAGPYYGYTF

SEQ ID NO: 11241 - protein, 16 aa, Homo sapiens
  CDR3 for alpha chain variable domain of TCR clone 5621 (TRAV12-2, TRAJ45)
CAVNMYSGGGADGLTF

SEQ ID NO: 11242 - protein, 17 aa, Homo sapiens
  CDR3 for beta chain variable domain of TCR clone 5621 (TRBV6-3, TRBJ2-2)
CASSYRGRDFYTGELFF

SEQ ID NO: 11243 - protein, 15 aa, Homo sapiens
  CDR3 for alpha chain variable domain of TCR clone 5622 (TRAV8-6, TRAJ6)
CAVRDASGGSYIPTF

SEQ ID NO: 11244 - protein, 13 aa, Homo sapiens
  CDR3 for beta chain variable domain of TCR clone 5622 (TRBV2, TRBJ2-2)
CASRAWRTGELFF

SEQ ID NO: 11245 - protein, 16 aa, Homo sapiens
  CDR3 for alpha chain variable domain of TCR clone 5623 (TRAV30, TRAJ24)
CGTEIVDADSWGKFQF

SEQ ID NO: 11246 - protein, 16 aa, Homo sapiens
  CDR3 for beta chain variable domain of TCR clone 5623 (TRBV7-3, TRBJ2-3)
ELSLMKRMRGADTQYF

SEQ ID NO: 11247 - protein, 17 aa, Homo sapiens
  CDR3 for alpha chain variable domain of TCR clone 5624 (TRAV26-1, TRAJ21)
CVAKGKFYFGSGTKLNV

SEQ ID NO: 11248 - protein, 15 aa, Homo sapiens
  CDR3 for beta chain variable domain of TCR clone 5624 (TRBV7-2, TRBJ2-1)
CASSSGLAGGNEQFF

SEQ ID NO: 11249 - protein, 13 aa, Homo sapiens
  CDR3 for alpha chain variable domain of TCR clone 5625 (TRAV8-3, TRAJ20)
CAVGRPNDYKLSF

SEQ ID NO: 11250 - protein, 13 aa, Homo sapiens
  CDR3 for beta chain variable domain of TCR clone 5625 (TRBV6-5, TRBJ1-4)
CASSYLSQEKLFF

SEQ ID NO: 11251 - protein, 13 aa, Homo sapiens
  CDR3 for alpha chain variable domain of TCR clone 5626 (TRAV8-3, TRAJ48)
CAVVPFGNEKLTF

SEQ ID NO: 11252 - protein, 14 aa, Homo sapiens
  CDR3 for beta chain variable domain of TCR clone 5626 (TRBV12-5, TRBJ2-5)
CASGSRTHQETQYF

SEQ ID NO: 11253 - protein, 14 aa, Homo sapiens
  CDR3 for alpha chain variable domain of TCR clone 5627 (TRAV8-3, TRAJ4)
CAVGAAGGYNKLIF

SEQ ID NO: 11254 - protein, 15 aa, Homo sapiens
  CDR3 for beta chain variable domain of TCR clone 5627 (TRBV11-3, TRBJ2-3)
CASLKDGREGDTQYF

SEQ ID NO: 11255 - protein, 15 aa, Homo sapiens
  CDR3 for alpha chain variable domain of TCR clone 5628 (TRAV17, TRAJ56)
TSVLRTPGANSKLTF

SEQ ID NO: 11256 - protein, 15 aa, Homo sapiens
  CDR3 for beta chain variable domain of TCR clone 5628 (TRBV27, TRBJ2-7)
CASSLFGTGLDEQYF

SEQ ID NO: 11257 - protein, 16 aa, Homo sapiens
  CDR3 for alpha chain variable domain of TCR clone 5629 (TRAV30, TRAJ24)
CGTEIVDADSWGKFQF

SEQ ID NO: 11258 - protein, 14 aa, Homo sapiens
  CDR3 for beta chain variable domain of TCR clone 5629 (TRBV9, TRBJ2-7)
CASSVGVGSYEQYF

SEQ ID NO: 11259 - protein, 14 aa, Homo sapiens
  CDR3 for alpha chain variable domain of TCR clone 5630 (TRAV8-3, TRAJ4)
CAVGAAGGYNKLIF

SEQ ID NO: 11260 - protein, 14 aa, Homo sapiens
  CDR3 for beta chain variable domain of TCR clone 5630 (TRBV19, TRBJ2-1)
CASPTFVLSGEQFF

SEQ ID NO: 11261 - protein, 15 aa, Homo sapiens
  CDR3 for alpha chain variable domain of TCR clone 5631 (TRAV3, TRAJ47)
CAVGDIGEYGNKLVF

SEQ ID NO: 11262 - protein, 14 aa, Homo sapiens
  CDR3 for beta chain variable domain of TCR clone 5631 (TRBV13, TRBJ2-5)
CASSLERVGETQYF

SEQ ID NO: 11263 - protein, 12 aa, Homo sapiens
  CDR3 for alpha chain variable domain of TCR clone 5632 (TRAV30, TRAJ39)
CGRGNAGNMLTF

SEQ ID NO: 11264 - protein, 16 aa, Homo sapiens
  CDR3 for beta chain variable domain of TCR clone 5632 (TRBV4-2, TRBJ2-2)
CASSQDPSGREGELFF

SEQ ID NO: 11265 - protein, 14 aa, Homo sapiens
  CDR3 for alpha chain variable domain of TCR clone 5633 (TRAV12-2, TRAJ45)
CAVNKGGGADGLTF

SEQ ID NO: 11266 - protein, 19 aa, Homo sapiens
  CDR3 for beta chain variable domain of TCR clone 5633 (TRBV7-2, TRBJ2-3)
CASSLVLSAYISRPDTQYF

SEQ ID NO: 11267 - protein, 12 aa, Homo sapiens
  CDR3 for alpha chain variable domain of TCR clone 5634 (TRAV12-3, TRAJ17)
CAMTLTGNKLTF

SEQ ID NO: 11268 - protein, 14 aa, Homo sapiens
  CDR3 for beta chain variable domain of TCR clone 5634 (TRBV6-1, TRBJ1-3)
CASVQGGGGNTIYF

SEQ ID NO: 11269 - protein, 14 aa, Homo sapiens
  CDR3 for alpha chain variable domain of TCR clone 5635 (TRAV12-2, TRAJ40)
CAVKIPSGTYKYIF

SEQ ID NO: 11270 - protein, 14 aa, Homo sapiens
  CDR3 for beta chain variable domain of TCR clone 5635 (TRBV11-2, TRBJ1-5)
CASSLDRGRQPQHF

SEQ ID NO: 11271 - protein, 14 aa, Homo sapiens
  CDR3 for alpha chain variable domain of TCR clone 5636 (TRAV9-2, TRAJ39)
CALYIYNAGNMLTF

SEQ ID NO: 11272 - protein, 14 aa, Homo sapiens
  CDR3 for beta chain variable domain of TCR clone 5636 (TRBV25-1, TRBJ1-1)
CASTHLGGNTEAFF

SEQ ID NO: 11273 - protein, 15 aa, Homo sapiens
  CDR3 for alpha chain variable domain of TCR clone 5637 (TRAV13-1, TRAJ50)
CAAKGSETSYDKVIF

SEQ ID NO: 11274 - protein, 13 aa, Homo sapiens
  CDR3 for beta chain variable domain of TCR clone 5637 (TRBV20-1, TRBJ2-3)
CSARAGGRDTQYF

SEQ ID NO: 11275 - protein, 19 aa, Homo sapiens
  CDR3 for alpha chain variable domain of TCR clone 5638 (TRAV8-3, TRAJ34)
LSTSVLWVWGLRNTDKLIF

SEQ ID NO: 11276 - protein, 13 aa, Homo sapiens
  CDR3 for beta chain variable domain of TCR clone 5638 (TRBV12-4, TRBJ2-7)
CASSLSGVYEQYF

SEQ ID NO: 11277 - protein, 12 aa, Homo sapiens
  CDR3 for alpha chain variable domain of TCR clone 5639 (TRAV2, TRAJ31)
CAVEDNNARLMF

SEQ ID NO: 11278 - protein, 14 aa, Homo sapiens
  CDR3 for beta chain variable domain of TCR clone 5639 (TRBV7-3, TRBJ1-1)
CASSLGTGYTEAFF

SEQ ID NO: 11279 - protein, 10 aa, Homo sapiens
  CDR3 for alpha chain variable domain of TCR clone 5640 (TRAV26-1, TRAJ22)
CIAGSRQLTF

SEQ ID NO: 11280 - protein, 17 aa, Homo sapiens
  CDR3 for beta chain variable domain of TCR clone 5640 (TRBV5-4, TRBJ1-1)
CASFPPKGRLQNTEAFF

SEQ ID NO: 11281 - protein, 12 aa, Homo sapiens
  CDR3 for alpha chain variable domain of TCR clone 5641 (TRAV12-3, TRAJ17)
CAMTLTGNKLTF

SEQ ID NO: 11282 - protein, 14 aa, Homo sapiens
  CDR3 for beta chain variable domain of TCR clone 5641 (TRBV25-1, TRBJ1-1)
CASTHLGGNTEAFF

SEQ ID NO: 11283 - protein, 12 aa, Homo sapiens
  CDR3 for alpha chain variable domain of TCR clone 5642 (TRAV8-3, TRAJ15)
CAVGAPLSALIF

SEQ ID NO: 11284 - protein, 17 aa, Homo sapiens
  CDR3 for beta chain variable domain of TCR clone 5642 (TRBV5-5, TRBJ1-1)
CASSLRFRGLMNTEAFF

SEQ ID NO: 11285 - protein, 11 aa, Homo sapiens
  CDR3 for alpha chain variable domain of TCR clone 5643 (TRAV2, TRAJ13)
CASGGYQKVTF

SEQ ID NO: 11286 - protein, 18 aa, Homo sapiens
  CDR3 for beta chain variable domain of TCR clone 5643 (TRBV20-1, TRBJ2-6)
CSAETTPTHGSGANVLTF

SEQ ID NO: 11287 - protein, 13 aa, Homo sapiens
  CDR3 for alpha chain variable domain of TCR clone 5644 (TRAV35, TRAJ42)
CAGFPGSQGNPIF

SEQ ID NO: 11288 - protein, 14 aa, Homo sapiens
  CDR3 for beta chain variable domain of TCR clone 5644 (TRBV19, TRBJ2-1)
CASPTFVLSGEQFF

SEQ ID NO: 11289 - protein, 15 aa, Homo sapiens
  CDR3 for alpha chain variable domain of TCR clone 5645 (TRAV8-3, TRAJ45)
CASSYSGGGADGLTL

SEQ ID NO: 11290 - protein, 13 aa, Homo sapiens
  CDR3 for beta chain variable domain of TCR clone 5645 (TRBV10-3, TRBJ2-7)
CASKLAVNYEQYF

SEQ ID NO: 11291 - protein, 13 aa, Homo sapiens
  CDR3 for alpha chain variable domain of TCR clone 5646 (TRAV8-1, TRAJ23)
CAVTGGQGGKLIF

SEQ ID NO: 11292 - protein, 15 aa, Homo sapiens
  CDR3 for beta chain variable domain of TCR clone 5646 (TRBV20-1, TRBJ2-2)
CSAIPGHSNTGELFF

SEQ ID NO: 11293 - protein, 10 aa, Homo sapiens
  CDR3 for alpha chain variable domain of TCR clone 5647 (TRAV23/DV6, TRAJ57)
CAASPTLSQG

SEQ ID NO: 11294 - protein, 14 aa, Homo sapiens
  CDR3 for beta chain variable domain of TCR clone 5647 (TRBV25-1, TRBJ1-1)
CASTHLGGNTEAFF

SEQ ID NO: 11295 - protein, 12 aa, Homo sapiens
  CDR3 for alpha chain variable domain of TCR clone 5648 (TRAV21, TRAJ31)
CAVWGNNARLMF

SEQ ID NO: 11296 - protein, 14 aa, Homo sapiens
  CDR3 for beta chain variable domain of TCR clone 5648 (TRBV6-1, TRBJ1-3)
CASVQGGGGNTIYF

SEQ ID NO: 11297 - protein, 20 aa, Homo sapiens
  CDR3 for alpha chain variable domain of TCR clone 5649 (TRAV12-3, TRAJ41)
SLFIRDSQPSDSATPEALNF

SEQ ID NO: 11298 - protein, 13 aa, Homo sapiens
  CDR3 for beta chain variable domain of TCR clone 5649 (TRBV10-3, TRBJ2-3)
CAIRDTGADTQYF

SEQ ID NO: 11299 - protein, 14 aa, Homo sapiens
  CDR3 for alpha chain variable domain of TCR clone 5650 (TRAV26-1, TRAJ38)
CIADNAGNNRKLIW

SEQ ID NO: 11300 - protein, 14 aa, Homo sapiens
  CDR3 for beta chain variable domain of TCR clone 5650 (TRBV6-1, TRBJ1-3)
CASVQGGGGNTIYF

SEQ ID NO: 11301 - protein, 13 aa, Homo sapiens
  CDR3 for alpha chain variable domain of TCR clone 5651 (TRAV1-2, TRAJ9)
CAALNTGGFKTIF

SEQ ID NO: 11302 - protein, 16 aa, Homo sapiens
  CDR3 for beta chain variable domain of TCR clone 5651 (TRBV28, TRBJ1-4)
CASSSRTGAANEKLFF

SEQ ID NO: 11303 - protein, 14 aa, Homo sapiens
  CDR3 for alpha chain variable domain of TCR clone 5652 (TRAV39, TRAJ54)
CAVVLIQGAQKLVF

SEQ ID NO: 11304 - protein, 13 aa, Homo sapiens
  CDR3 for beta chain variable domain of TCR clone 5652 (TRBV29-1, TRBJ2-5)
CSVGGTSAETQYF

SEQ ID NO: 11305 - protein, 15 aa, Homo sapiens
  CDR3 for alpha chain variable domain of TCR clone 5653 (TRAV17, TRAJ57)
CATGPSQGGSEKLVF

SEQ ID NO: 11306 - protein, 13 aa, Homo sapiens
  CDR3 for beta chain variable domain of TCR clone 5653 (TRBV27, TRBJ2-1)
CASRTLGVGEQFF

SEQ ID NO: 11307 - protein, 13 aa, Homo sapiens
  CDR3 for alpha chain variable domain of TCR clone 5654 (TRAV22, TRAJ48)
CAVERFGNEKLTF

SEQ ID NO: 11308 - protein, 13 aa, Homo sapiens
  CDR3 for beta chain variable domain of TCR clone 5654 (TRBV20-1, TRBJ2-5)
CSARGDYQETQYF

SEQ ID NO: 11309 - protein, 17 aa, Homo sapiens
  CDR3 for alpha chain variable domain of TCR clone 5655 (TRAV3, TRAJ6)
CAVRDGPRAGGSYIPTF

SEQ ID NO: 11310 - protein, 14 aa, Homo sapiens
  CDR3 for beta chain variable domain of TCR clone 5655 (TRBV20-1, TRBJ2-7)
CSAKRGRSSYEQYF

SEQ ID NO: 11311 - protein, 13 aa, Homo sapiens
  CDR3 for alpha chain variable domain of TCR clone 5656 (TRAV2, TRAJ15)
CAVASQAGTALIF

SEQ ID NO: 11312 - protein, 17 aa, Homo sapiens
  CDR3 for beta chain variable domain of TCR clone 5656 (TRBV20-1, TRBJ2-2)
CSAGGSGQGGLTGELFF

SEQ ID NO: 11313 - protein, 12 aa, Homo sapiens
  CDR3 for alpha chain variable domain of TCR clone 5657 (TRAV3, TRAJ20)
CAVRDPDYKLSF

SEQ ID NO: 11314 - protein, 15 aa, Homo sapiens
  CDR3 for beta chain variable domain of TCR clone 5657 (TRBV9, TRBJ1-6)
CASSVAGTGDSPLHF

SEQ ID NO: 11315 - protein, 14 aa, Homo sapiens
  CDR3 for alpha chain variable domain of TCR clone 5658 (TRAV12-2, TRAJ13)
CAVKKTGGYQKVTF

SEQ ID NO: 11316 - protein, 13 aa, Homo sapiens
  CDR3 for beta chain variable domain of TCR clone 5658 (TRBV28, TRBJ2-3)
CASSLPQVDTQYF

SEQ ID NO: 11317 - protein, 14 aa, Homo sapiens
  CDR3 for alpha chain variable domain of TCR clone 5659 (TRAV12-2, TRAJ13)
CAVKKTGGYQKVTF

SEQ ID NO: 11318 - protein, 17 aa, Homo sapiens
  CDR3 for beta chain variable domain of TCR clone 5659 (TRBV24-1, TRBJ2-1)
CATSDVSTSGTYNEQFF

SEQ ID NO: 11319 - protein, 16 aa, Homo sapiens
  CDR3 for alpha chain variable domain of TCR clone 5660 (TRAV30, TRAJ24)
CGTEIVDADSWGKFQF

SEQ ID NO: 11320 - protein, 16 aa, Homo sapiens
  CDR3 for beta chain variable domain of TCR clone 5660 (TRBV6-3, TRBJ1-1)
CASTDLGTVPNTEAFF

SEQ ID NO: 11321 - protein, 14 aa, Homo sapiens
  CDR3 for alpha chain variable domain of TCR clone 5661 (TRAV9-2, TRAJ48)
CALSSNFGNEKLTF

SEQ ID NO: 11322 - protein, 13 aa, Homo sapiens
  CDR3 for beta chain variable domain of TCR clone 5661 (TRBV7-2, TRBJ2-4)
CASSREHANIQYF

SEQ ID NO: 11323 - protein, 13 aa, Homo sapiens
  CDR3 for alpha chain variable domain of TCR clone 5662 (TRAV13-1, TRAJ5)
CAASDTGRRALTF

SEQ ID NO: 11324 - protein, 12 aa, Homo sapiens
  CDR3 for beta chain variable domain of TCR clone 5662 (TRBV2, TRBJ2-1)
GRGLPSYNEQFF

SEQ ID NO: 11325 - protein, 11 aa, Homo sapiens
  CDR3 for alpha chain variable domain of TCR clone 5663 (TRAV35, TRAJ30)
CAGLRDDKIIF

SEQ ID NO: 11326 - protein, 15 aa, Homo sapiens
  CDR3 for beta chain variable domain of TCR clone 5663 (TRBV2, TRBJ1-3)
CASSISPRSGNTIYF

SEQ ID NO: 11327 - protein, 10 aa, Homo sapiens
  CDR3 for alpha chain variable domain of TCR clone 5664 (TRAV30, TRAJ48)
CGIGNEKLTF

SEQ ID NO: 11328 - protein, 16 aa, Homo sapiens
  CDR3 for beta chain variable domain of TCR clone 5664 (TRBV19, TRBJ2-1)
CASSKAGPSSYNEQFF

SEQ ID NO: 11329 - protein, 18 aa, Homo sapiens
  CDR3 for alpha chain variable domain of TCR clone 5665 (TRAV21, TRAJ52)
CAVRPSPAGGTSYGKLTF

SEQ ID NO: 11330 - protein, 17 aa, Homo sapiens
  CDR3 for beta chain variable domain of TCR clone 5665 (TRBV13, TRBJ2-3)
CASSLPRVAGGRNTQYF

SEQ ID NO: 11331 - protein, 15 aa, Homo sapiens
  CDR3 for alpha chain variable domain of TCR clone 5666 (TRAV21, TRAJ24)
CAARSSTGSWGKLQF

SEQ ID NO: 11332 - protein, 13 aa, Homo sapiens
  CDR3 for beta chain variable domain of TCR clone 5666 (TRBV10-3, TRBJ2-7)
CASKLAVNYEQYF

SEQ ID NO: 11333 - protein, 13 aa, Homo sapiens
  CDR3 for alpha chain variable domain of TCR clone 5667 (TRAV8-2, TRAJ29)
CALPGAGNTPLVF

SEQ ID NO: 11334 - protein, 16 aa, Homo sapiens
  CDR3 for beta chain variable domain of TCR clone 5667 (TRBV5-1, TRBJ2-5)
CASSSSGLGGAETQYF

SEQ ID NO: 11335 - protein, 15 aa, Homo sapiens
  CDR3 for alpha chain variable domain of TCR clone 5668 (TRAV8-3, TRAJ35)
CAVGATIGFGNVLHC

SEQ ID NO: 11336 - protein, 11 aa, Homo sapiens
  CDR3 for beta chain variable domain of TCR clone 5668 (TRBV24-1, TRBJ2-5)
CATSIGETQYF

SEQ ID NO: 11337 - protein, 12 aa, Homo sapiens
  CDR3 for alpha chain variable domain of TCR clone 5669 (TRAV3, TRAJ31)
CAAQRANARLMF

SEQ ID NO: 11338 - protein, 14 aa, Homo sapiens
  CDR3 for beta chain variable domain of TCR clone 5669 (TRBV5-5, TRBJ1-5)
CASSGQGVDQPQHF

SEQ ID NO: 11339 - protein, 15 aa, Homo sapiens
  CDR3 for alpha chain variable domain of TCR clone 5670 (TRAV26-1, TRAJ29)
CIVRVEGSGKTPLVF

SEQ ID NO: 11340 - protein, 15 aa, Homo sapiens
  CDR3 for beta chain variable domain of TCR clone 5670 (TRBV7-9, TRBJ1-5)
CASSQGHQPNQPQHF

SEQ ID NO: 11341 - protein, 13 aa, Homo sapiens
  CDR3 for alpha chain variable domain of TCR clone 5671 (TRAV29/DV5, TRAJ31)
CAASRNNNARLMF

SEQ ID NO: 11342 - protein, 12 aa, Homo sapiens
  CDR3 for beta chain variable domain of TCR clone 5671 (TRBV14, TRBJ2-4)
CASSNLKSIQYF

SEQ ID NO: 11343 - protein, 13 aa, Homo sapiens
  CDR3 for alpha chain variable domain of TCR clone 5672 (TRAV8-6, TRAJ49)
CAVITNTGNQFYF

SEQ ID NO: 11344 - protein, 14 aa, Homo sapiens
  CDR3 for beta chain variable domain of TCR clone 5672 (TRBV28, TRBJ2-7)
CAIVGQGNLYEQYF

SEQ ID NO: 11345 - protein, 11 aa, Homo sapiens
  CDR3 for alpha chain variable domain of TCR clone 5673 (TRAV29/DV5, TRAJ43)
CAAKTNNDMRF

SEQ ID NO: 11346 - protein, 14 aa, Homo sapiens
  CDR3 for beta chain variable domain of TCR clone 5673 (TRBV11-2, TRBJ2-7)
CASSPSTTSYEQYF

SEQ ID NO: 11347 - protein, 14 aa, Homo sapiens
  CDR3 for alpha chain variable domain of TCR clone 5674 (TRAV23/DV6, TRAJ37)
CAASTSSNTGKLIF

SEQ ID NO: 11348 - protein, 14 aa, Homo sapiens
  CDR3 for beta chain variable domain of TCR clone 5674 (TRBV15, TRBJ2-3)
CATRSGTSTDTQYF

SEQ ID NO: 11349 - protein, 11 aa, Homo sapiens
  CDR3 for alpha chain variable domain of TCR clone 5675 (TRAV21, TRAJ39)
LLVNAGNMLTF

SEQ ID NO: 11350 - protein, 12 aa, Homo sapiens
  CDR3 for beta chain variable domain of TCR clone 5675 (TRBV3-1, TRBJ2-1)
CASSQGSSGQFF

SEQ ID NO: 11351 - protein, 13 aa, Homo sapiens
  CDR3 for alpha chain variable domain of TCR clone 5676 (TRAV12-2, TRAJ20)
CAVYPSNDYKLSF

SEQ ID NO: 11352 - protein, 15 aa, Homo sapiens
  CDR3 for beta chain variable domain of TCR clone 5676 (TRBV6-1, TRBJ2-5)
CASSEGWGIQETQYF

SEQ ID NO: 11353 - protein, 14 aa, Homo sapiens
  CDR3 for alpha chain variable domain of TCR clone 5677 (TRAV8-2, TRAJ4)
CVVSPSGGYNKLIF

SEQ ID NO: 11354 - protein, 15 aa, Homo sapiens
  CDR3 for beta chain variable domain of TCR clone 5677 (TRBV4-1, TRBJ1-4)
CASSDTGGTDEKLFF

SEQ ID NO: 11355 - protein, 15 aa, Homo sapiens
  CDR3 for alpha chain variable domain of TCR clone 5678 (TRAV36/DV7, TRAJ53)
WEGENSGGSNYKLTF

SEQ ID NO: 11356 - protein, 15 aa, Homo sapiens
  CDR3 for beta chain variable domain of TCR clone 5678 (TRBV6-1, TRBJ2-5)
CASSEGWGIQETQYF

SEQ ID NO: 11357 - protein, 10 aa, Homo sapiens
  CDR3 for alpha chain variable domain of TCR clone 5679 (TRAV23/DV6, TRAJ57)
CAASSTLSQG

SEQ ID NO: 11358 - protein, 17 aa, Homo sapiens
  CDR3 for beta chain variable domain of TCR clone 5679 (TRBV10-3, TRBJ2-6)
CAISESTAPSGANVLTF

SEQ ID NO: 11359 - protein, 14 aa, Homo sapiens
  CDR3 for alpha chain variable domain of TCR clone 5680 (TRAV23/DV6, TRAJ13)
CAASETGGYQKVTF

SEQ ID NO: 11360 - protein, 13 aa, Homo sapiens
  CDR3 for beta chain variable domain of TCR clone 5680 (TRBV29-1, TRBJ2-1)
CSVEGGRVNEQFF

SEQ ID NO: 11361 - protein, 17 aa, Homo sapiens
  CDR3 for alpha chain variable domain of TCR clone 5681 (TRAV38-1, TRAJ45)
CAFMKHYMGGGADGLTF

SEQ ID NO: 11362 - protein, 19 aa, Homo sapiens
  CDR3 for beta chain variable domain of TCR clone 5681 (TRBV6-1, TRBJ2-5)
CASSEQGLAGGLYQETQYF

SEQ ID NO: 11363 - protein, 17 aa, Homo sapiens
  CDR3 for alpha chain variable domain of TCR clone 5682 (TRAV8-6, TRAJ52)
CAVTRNAGGTSYGKLTF

SEQ ID NO: 11364 - protein, 13 aa, Homo sapiens
  CDR3 for beta chain variable domain of TCR clone 5682 (TRBV7-9, TRBJ1-2)
CASSLKQNYGYTF

SEQ ID NO: 11365 - protein, 12 aa, Homo sapiens
  CDR3 for alpha chain variable domain of TCR clone 5683 (TRAV12-3, TRAJ17)
CAMTLAGNKLTF

SEQ ID NO: 11366 - protein, 15 aa, Homo sapiens
  CDR3 for beta chain variable domain of TCR clone 5683 (TRBV20-1, TRBJ2-7)
CSARDRVSGMDEQYF

SEQ ID NO: 11367 - protein, 13 aa, Homo sapiens
  CDR3 for alpha chain variable domain of TCR clone 5684 (TRAV2, TRAJ40)
CAVVASGTYKYIF

SEQ ID NO: 11368 - protein, 14 aa, Homo sapiens
  CDR3 for beta chain variable domain of TCR clone 5684 (TRBV19, TRBJ2-1)
CASPTFVLSGEQFF

SEQ ID NO: 11369 - protein, 18 aa, Homo sapiens
  CDR3 for alpha chain variable domain of TCR clone 5685 (TRAV8-4, TRAJ52)
CAVASFNAGGTSYGKLTF

SEQ ID NO: 11370 - protein, 14 aa, Homo sapiens
  CDR3 for beta chain variable domain of TCR clone 5685 (TRBV18, TRBJ1-5)
CASSRQQRNQPQHF

SEQ ID NO: 11371 - protein, 14 aa, Homo sapiens
  CDR3 for alpha chain variable domain of TCR clone 5686 (TRAV14/DV4, TRAJ11)
CAMSSNSGYSTLTF

SEQ ID NO: 11372 - protein, 11 aa, Homo sapiens
  CDR3 for beta chain variable domain of TCR clone 5686 (TRBV7-9, TRBJ2-3)
CASSGPDTQYF

SEQ ID NO: 11373 - protein, 15 aa, Homo sapiens
  CDR3 for alpha chain variable domain of TCR clone 5687 (TRAV25, TRAJ52)
CAGRPGGTSYGKLTF

SEQ ID NO: 11374 - protein, 18 aa, Homo sapiens
  CDR3 for beta chain variable domain of TCR clone 5687 (TRBV11-2, TRBJ2-3)
CASSLGGASRGAPNTQYF

SEQ ID NO: 11375 - protein, 10 aa, Homo sapiens
  CDR3 for alpha chain variable domain of TCR clone 5688 (TRAV29/DV5, TRAJ54)
LIQGAQKLVF

SEQ ID NO: 11376 - protein, 18 aa, Homo sapiens
  CDR3 for beta chain variable domain of TCR clone 5688 (TRBV3-1, TRBJ1-2)
CASSQDVIGWNGDYGYTF

SEQ ID NO: 11377 - protein, 11 aa, Homo sapiens
  CDR3 for alpha chain variable domain of TCR clone 5689 (TRAV38-1, TRAJ35)
CAFMSLDRLWE

SEQ ID NO: 11378 - protein, 13 aa, Homo sapiens
  CDR3 for beta chain variable domain of TCR clone 5689 (TRBV4-1, TRBJ2-5)
CASSQEVQETQYF

SEQ ID NO: 11379 - protein, 13 aa, Homo sapiens
  CDR3 for alpha chain variable domain of TCR clone 5690 (TRAV2, TRAJ40)
CAVVTSGTYKYIF

SEQ ID NO: 11380 - protein, 12 aa, Homo sapiens
  CDR3 for beta chain variable domain of TCR clone 5690 (TRBV6-3, TRBJ2-7)
CASSLTPYEQYF

SEQ ID NO: 11381 - protein, 14 aa, Homo sapiens
  CDR3 for alpha chain variable domain of TCR clone 5691 (TRAV29/DV5, TRAJ37)
CAASGSGNTGKLIF

SEQ ID NO: 11382 - protein, 17 aa, Homo sapiens
  CDR3 for beta chain variable domain of TCR clone 5691 (TRBV4-1, TRBJ2-7)
CASSPFLTSGGVVEQYF

SEQ ID NO: 11383 - protein, 13 aa, Homo sapiens
  CDR3 for alpha chain variable domain of TCR clone 5692 (TRAV13-2, TRAJ11)
CAEGDSGYSTLTF

SEQ ID NO: 11384 - protein, 12 aa, Homo sapiens
  CDR3 for beta chain variable domain of TCR clone 5692 (TRBV7-9, TRBJ1-1)
CASSLEGTEAFF

SEQ ID NO: 11385 - protein, 14 aa, Homo sapiens
  CDR3 for alpha chain variable domain of TCR clone 5693 (TRAV17, TRAJ57)
CATDPQGGSEKLVF

SEQ ID NO: 11386 - protein, 15 aa, Homo sapiens
  CDR3 for beta chain variable domain of TCR clone 5693 (TRBV6-3, TRBJ2-7)
CASSSPGTVFYEQYF

SEQ ID NO: 11387 - protein, 15 aa, Homo sapiens
  CDR3 for alpha chain variable domain of TCR clone 5694 (TRAV40, TRAJ45)
CLLGDLGGGADGLTF

SEQ ID NO: 11388 - protein, 17 aa, Homo sapiens
  CDR3 for beta chain variable domain of TCR clone 5694 (TRBV18, TRBJ1-5)
CASSPTMGQGTNQPQHF

SEQ ID NO: 11389 - protein, 16 aa, Homo sapiens
  CDR3 for alpha chain variable domain of TCR clone 5695 (TRAV3, TRAJ37)
CAVRGKGSGNTGKLIF

SEQ ID NO: 11390 - protein, 15 aa, Homo sapiens
  CDR3 for beta chain variable domain of TCR clone 5695 (TRBV9, TRBJ1-4)
CASSVGGSTNEKLFF

SEQ ID NO: 11391 - protein, 22 aa, Homo sapiens
  CDR3 for alpha chain variable domain of TCR clone 5696 (TRAV2, TRAJ10)
ILQVREADAAVYYTGGGNKLTF

SEQ ID NO: 11392 - protein, 16 aa, Homo sapiens
  CDR3 for beta chain variable domain of TCR clone 5696 (TRBV5-7, TRBJ1-2)
CASSRGVTGGSYGYTF

SEQ ID NO: 11393 - protein, 15 aa, Homo sapiens
  CDR3 for alpha chain variable domain of TCR clone 5697 (TRAV2, TRAJ27)
CAVDSITPMQANQPL

SEQ ID NO: 11394 - protein, 18 aa, Homo sapiens
  CDR3 for beta chain variable domain of TCR clone 5697 (TRBV7-9, TRBJ2-7)
CASSLTTSGSRTWYEQYF

SEQ ID NO: 11395 - protein, 16 aa, Homo sapiens
  CDR3 for alpha chain variable domain of TCR clone 5698 (TRAV30, TRAJ24)
CGTEIVDADRWGKFQF

SEQ ID NO: 11396 - protein, 14 aa, Homo sapiens
  CDR3 for beta chain variable domain of TCR clone 5698 (TRBV12-5, TRBJ2-5)
CASGSRTHQETQYF

SEQ ID NO: 11397 - protein, 15 aa, Homo sapiens
  CDR3 for alpha chain variable domain of TCR clone 5699 (TRAV2, TRAJ39)
CAVEDRRNAGNMLTF

SEQ ID NO: 11398 - protein, 16 aa, Homo sapiens
  CDR3 for beta chain variable domain of TCR clone 5699 (TRBV7-8, TRBJ2-7)
CASSLASGTSVYEQYF

SEQ ID NO: 11399 - protein, 14 aa, Homo sapiens
  CDR3 for alpha chain variable domain of TCR clone 5700 (TRAV1-2, TRAJ16)
CAVNRFSDGQKLLF

SEQ ID NO: 11400 - protein, 12 aa, Homo sapiens
  CDR3 for beta chain variable domain of TCR clone 5700 (TRBV20-1, TRBJ2-5)
CSAPRSQETQYF

SEQ ID NO: 11401 - protein, 12 aa, Homo sapiens
  CDR3 for alpha chain variable domain of TCR clone 5701 (TRAV21, TRAJ8)
CALNTGFQKLVF

SEQ ID NO: 11402 - protein, 12 aa, Homo sapiens
  CDR3 for beta chain variable domain of TCR clone 5701 (TRBV7-2, TRBJ2-3)
CASSLTGDTQYF

SEQ ID NO: 11403 - protein, 14 aa, Homo sapiens
  CDR3 for alpha chain variable domain of TCR clone 5702 (TRAV12-2, TRAJ6)
CAVIASGGSYIPTF

SEQ ID NO: 11404 - protein, 15 aa, Homo sapiens
  CDR3 for beta chain variable domain of TCR clone 5702 (TRBV20-1, TRBJ2-7)
CSARDRVSGMDEQYF

SEQ ID NO: 11405 - protein, 14 aa, Homo sapiens
  CDR3 for alpha chain variable domain of TCR clone 5703 (TRAV12-2, TRAJ40)
CAVKIPSGTYKYIF

SEQ ID NO: 11406 - protein, 13 aa, Homo sapiens
  CDR3 for beta chain variable domain of TCR clone 5703 (TRBV7-2, TRBJ2-5)
CASSQTSVETQYF

SEQ ID NO: 11407 - protein, 14 aa, Homo sapiens
  CDR3 for alpha chain variable domain of TCR clone 5704 (TRAV1-2, TRAJ16)
CAVNRFSDGQKLLF

SEQ ID NO: 11408 - protein, 15 aa, Homo sapiens
  CDR3 for beta chain variable domain of TCR clone 5704 (TRBV9, TRBJ1-6)
CASSVAGTGDSTLHF

SEQ ID NO: 11409 - protein, 17 aa, Homo sapiens
  CDR3 for alpha chain variable domain of TCR clone 5705 (TRAV8-6, TRAJ58)
CAVSSWVGETSGSRLTF

SEQ ID NO: 11410 - protein, 16 aa, Homo sapiens
  CDR3 for beta chain variable domain of TCR clone 5705 (TRBV20-1, TRBJ1-4)
CSAPGQGLLTNEKLFF

SEQ ID NO: 11411 - protein, 15 aa, Homo sapiens
  CDR3 for alpha chain variable domain of TCR clone 5706 (TRAV8-4, TRAJ40)
CAVSDDTSGTYKYIF

SEQ ID NO: 11412 - protein, 11 aa, Homo sapiens
  CDR3 for beta chain variable domain of TCR clone 5706 (TRBV19, TRBJ1-2)
CASSISSGYTF

SEQ ID NO: 11413 - protein, 15 aa, Homo sapiens
  CDR3 for alpha chain variable domain of TCR clone 5707 (TRAV8-3, TRAJ45)
CASSYSGGGADGLTF

SEQ ID NO: 11414 - protein, 14 aa, Homo sapiens
  CDR3 for beta chain variable domain of TCR clone 5707 (TRBV11-2, TRBJ2-3)
CASSRLARTDTQYF

SEQ ID NO: 11415 - protein, 16 aa, Homo sapiens
  CDR3 for alpha chain variable domain of TCR clone 5708 (TRAV14/DV4, TRAJ53)
CAMREGGGGSNYKLTF

SEQ ID NO: 11416 - protein, 19 aa, Homo sapiens
  CDR3 for beta chain variable domain of TCR clone 5708 (TRBV28, TRBJ2-4)
CASSFQPGGPAHSKNIQYF

SEQ ID NO: 11417 - protein, 13 aa, Homo sapiens
  CDR3 for alpha chain variable domain of TCR clone 5709 (TRAV8-1, TRAJ32)
CAADGGATNKLIF

SEQ ID NO: 11418 - protein, 18 aa, Homo sapiens
  CDR3 for beta chain variable domain of TCR clone 5709 (TRBV18, TRBJ2-3)
CASSYTSGAAGGTDTQYF

SEQ ID NO: 11419 - protein, 12 aa, Homo sapiens
  CDR3 for alpha chain variable domain of TCR clone 5710 (TRAV13-1, TRAJ21)
CAAKEGFNKFYF

SEQ ID NO: 11420 - protein, 16 aa, Homo sapiens
  CDR3 for beta chain variable domain of TCR clone 5710 (TRBV25-1, TRBJ2-7)
CASSELTGGGIYEQYF

SEQ ID NO: 11421 - protein, 16 aa, Homo sapiens
  CDR3 for alpha chain variable domain of TCR clone 5711 (TRAV8-6, TRAJ4)
CAVTKILSGGYNKLIF

SEQ ID NO: 11422 - protein, 17 aa, Homo sapiens
  CDR3 for beta chain variable domain of TCR clone 5711 (TRBV20-1, TRBJ2-1)
CSASSSGLAGSYNEQFF

SEQ ID NO: 11423 - protein, 14 aa, Homo sapiens
  CDR3 for alpha chain variable domain of TCR clone 5712 (TRAV27, TRAJ49)
CAGRPEGTGNQFYF

SEQ ID NO: 11424 - protein, 15 aa, Homo sapiens
  CDR3 for beta chain variable domain of TCR clone 5712 (TRBV19, TRBJ2-1)
CASSIQATSYNEQFF

SEQ ID NO: 11425 - protein, 17 aa, Homo sapiens
  CDR3 for alpha chain variable domain of TCR clone 5713 (TRAV1-1, TRAJ15)
CLLLLRCPNQAGTALIF

SEQ ID NO: 11426 - protein, 15 aa, Homo sapiens
  CDR3 for beta chain variable domain of TCR clone 5713 (TRBV27, TRBJ2-3)
CASSLGLAGPDTQYF

SEQ ID NO: 11427 - protein, 13 aa, Homo sapiens
  CDR3 for alpha chain variable domain of TCR clone 5714 (TRAV27, TRAJ45)
CMSSGGGADGLTF

SEQ ID NO: 11428 - protein, 17 aa, Homo sapiens
  CDR3 for beta chain variable domain of TCR clone 5714 (TRBV11-2, TRBJ2-1)
CASSLYPPGVEYNEQFF

SEQ ID NO: 11429 - protein, 12 aa, Homo sapiens
  CDR3 for alpha chain variable domain of TCR clone 5715 (TRAV12-3, TRAJ17)
CAMTLTGNKLTF

SEQ ID NO: 11430 - protein, 14 aa, Homo sapiens
  CDR3 for beta chain variable domain of TCR clone 5715 (TRBV19, TRBJ2-2)
CASSTLHRSGELFF

SEQ ID NO: 11431 - protein, 13 aa, Homo sapiens
  CDR3 for alpha chain variable domain of TCR clone 5716 (TRAV12-3, TRAJ54)
CAMKVQGAQKLVF

SEQ ID NO: 11432 - protein, 15 aa, Homo sapiens
  CDR3 for beta chain variable domain of TCR clone 5716 (TRBV28, TRBJ2-7)
CASSPTGTGSYEQYF

SEQ ID NO: 11433 - protein, 15 aa, Homo sapiens
  CDR3 for alpha chain variable domain of TCR clone 5717 (TRAV12-1, TRAJ40)
CVVNRDTSGTYKYIF

SEQ ID NO: 11434 - protein, 13 aa, Homo sapiens
  CDR3 for beta chain variable domain of TCR clone 5717 (TRBV6-1, TRBJ2-1)
CASEGSSYNEQFF

SEQ ID NO: 11435 - protein, 16 aa, Homo sapiens
  CDR3 for alpha chain variable domain of TCR clone 5718 (TRAV30, TRAJ24)
CGTEIVDADSWGNFQF

SEQ ID NO: 11436 - protein, 14 aa, Homo sapiens
  CDR3 for beta chain variable domain of TCR clone 5718 (TRBV12-5, TRBJ2-5)
CASGSRTHQETQYF

SEQ ID NO: 11437 - protein, 17 aa, Homo sapiens
  CDR3 for alpha chain variable domain of TCR clone 5719 (TRAV3, TRAJ6)
CAVRDGPRAGGSYIPTF

SEQ ID NO: 11438 - protein, 13 aa, Homo sapiens
  CDR3 for beta chain variable domain of TCR clone 5719 (TRBV19, TRBJ1-1)
CASSITGESEAFF

SEQ ID NO: 11439 - protein, 13 aa, Homo sapiens
  CDR3 for alpha chain variable domain of TCR clone 5720 (TRAV21, TRAJ27)
CAQWGGNAGKSTF

SEQ ID NO: 11440 - protein, 14 aa, Homo sapiens
  CDR3 for beta chain variable domain of TCR clone 5720 (TRBV2, TRBJ2-3)
CAVGGTISTDTQYF

SEQ ID NO: 11441 - protein, 16 aa, Homo sapiens
  CDR3 for alpha chain variable domain of TCR clone 5721 (TRAV3, TRAJ10)
CAVRDMRAGGGNKLTF

SEQ ID NO: 11442 - protein, 15 aa, Homo sapiens
  CDR3 for beta chain variable domain of TCR clone 5721 (TRBV20-1, TRBJ2-1)
CSAEGGLLAGDEQFF

SEQ ID NO: 11443 - protein, 11 aa, Homo sapiens
  CDR3 for alpha chain variable domain of TCR clone 5722 (TRAV14/DV4, TRAJ26)
CAMRGPSEFCL

SEQ ID NO: 11444 - protein, 14 aa, Homo sapiens
  CDR3 for beta chain variable domain of TCR clone 5722 (TRBV12-4, TRBJ1-3)
CASTLTGAGNTIYF

SEQ ID NO: 11445 - protein, 14 aa, Homo sapiens
  CDR3 for alpha chain variable domain of TCR clone 5723 (TRAV1-2, TRAJ8)
CAVREDTGFQKLVF

SEQ ID NO: 11446 - protein, 18 aa, Homo sapiens
  CDR3 for beta chain variable domain of TCR clone 5723 (TRBV10-2, TRBJ2-2)
CISAPAVHRQADAGELFF

SEQ ID NO: 11447 - protein, 18 aa, Homo sapiens
  CDR3 for alpha chain variable domain of TCR clone 5724 (TRAV21, TRAJ52)
CAVRPSPAGGTSYGRLTF

SEQ ID NO: 11448 - protein, 15 aa, Homo sapiens
  CDR3 for beta chain variable domain of TCR clone 5724 (TRBV20-1, TRBJ1-5)
CSAFKNGQRNQPQHF

SEQ ID NO: 11449 - protein, 12 aa, Homo sapiens
  CDR3 for alpha chain variable domain of TCR clone 5725 (TRAV12-3, TRAJ17)
CAMTLTGNKLTF

SEQ ID NO: 11450 - protein, 15 aa, Homo sapiens
  CDR3 for beta chain variable domain of TCR clone 5725 (TRBV20-1, TRBJ2-7)
CSARDRVSGMDEQYS

SEQ ID NO: 11451 - protein, 11 aa, Homo sapiens
  CDR3 for alpha chain variable domain of TCR clone 5726 (TRAV1-2, TRAJ34)
CAGYNTDKLIF

SEQ ID NO: 11452 - protein, 16 aa, Homo sapiens
  CDR3 for beta chain variable domain of TCR clone 5726 (TRBV10-3, TRBJ2-1)
CAISGVGDGGGGEQFF

SEQ ID NO: 11453 - protein, 14 aa, Homo sapiens
  CDR3 for alpha chain variable domain of TCR clone 5727 (TRAV5, TRAJ4)
CAASFSGGYNKLIF

SEQ ID NO: 11454 - protein, 19 aa, Homo sapiens
  CDR3 for beta chain variable domain of TCR clone 5727 (TRBV2, TRBJ2-7)
CASSDDETSGRANDYEQYF

SEQ ID NO: 11455 - protein, 17 aa, Homo sapiens
  CDR3 for alpha chain variable domain of TCR clone 5728 (TRAV3, TRAJ12)
CAVRDGGRMDSSYKLIF

SEQ ID NO: 11456 - protein, 15 aa, Homo sapiens
  CDR3 for beta chain variable domain of TCR clone 5728 (TRBV20-1, TRBJ2-5)
CSAEGTGGLQETQYF

SEQ ID NO: 11457 - protein, 12 aa, Homo sapiens
  CDR3 for alpha chain variable domain of TCR clone 5729 (TRAV27, TRAJ35)
CAGADFGNVLHC

SEQ ID NO: 11458 - protein, 16 aa, Homo sapiens
  CDR3 for beta chain variable domain of TCR clone 5729 (TRBV6-1, TRBJ2-1)
CASILRQGSSYNEQFF

SEQ ID NO: 11459 - protein, 14 aa, Homo sapiens
  CDR3 for alpha chain variable domain of TCR clone 5730 (TRAV12-1, TRAJ38)
CVVNDAGNNRKLIW

SEQ ID NO: 11460 - protein, 14 aa, Homo sapiens
  CDR3 for beta chain variable domain of TCR clone 5730 (TRBV19, TRBJ1-5)
CASSIVQGIQPQHF

SEQ ID NO: 11461 - protein, 16 aa, Homo sapiens
  CDR3 for alpha chain variable domain of TCR clone 5731 (TRAV26-1, TRAJ23)
CIVRPHGNNQGGKLIF

SEQ ID NO: 11462 - protein, 14 aa, Homo sapiens
  CDR3 for beta chain variable domain of TCR clone 5731 (TRBV19, TRBJ2-1)
CASPTFVLSGEQFF

SEQ ID NO: 11463 - protein, 13 aa, Homo sapiens
  CDR3 for alpha chain variable domain of TCR clone 5732 (TRAV21, TRAJ27)
CAARPGNAGKSTF

SEQ ID NO: 11464 - protein, 14 aa, Homo sapiens
  CDR3 for beta chain variable domain of TCR clone 5732 (TRBV7-6, TRBJ2-3)
CASSLGTATDTQYF

SEQ ID NO: 11465 - protein, 12 aa, Homo sapiens
  CDR3 for alpha chain variable domain of TCR clone 5733 (TRAV38-1, TRAJ57)
CAFMKLPPTLVF

SEQ ID NO: 11466 - protein, 13 aa, Homo sapiens
  CDR3 for beta chain variable domain of TCR clone 5733 (TRBV19, TRBJ2-7)
CASSTSGSYEQYF

SEQ ID NO: 11467 - protein, 14 aa, Homo sapiens
  CDR3 for alpha chain variable domain of TCR clone 5734 (TRAV1-2, TRAJ17)
CAVRDMTAGNKLTF

SEQ ID NO: 11468 - protein, 15 aa, Homo sapiens
  CDR3 for beta chain variable domain of TCR clone 5734 (TRBV20-1, TRBJ2-7)
CSARDRVSGMDEQYF

SEQ ID NO: 11469 - protein, 15 aa, Homo sapiens
  CDR3 for alpha chain variable domain of TCR clone 5735 (TRAV1-2, TRAJ12)
CAVIPEVDSSYKLIF

SEQ ID NO: 11470 - protein, 12 aa, Homo sapiens
  CDR3 for beta chain variable domain of TCR clone 5735 (TRBV20-1, TRBJ1-2)
CSASHPSGGYTF

SEQ ID NO: 11471 - protein, 15 aa, Homo sapiens
  CDR3 for alpha chain variable domain of TCR clone 5736 (TRAV40, TRAJ48)
CLLFISNFGNEKLTF

SEQ ID NO: 11472 - protein, 13 aa, Homo sapiens
  CDR3 for beta chain variable domain of TCR clone 5736 (TRBV19, TRBJ1-5)
CASSINFNQPQHF

SEQ ID NO: 11473 - protein, 17 aa, Homo sapiens
  CDR3 for alpha chain variable domain of TCR clone 5737 (TRAV1-1, TRAJ9)
CLLLLRCQNTGGFKTIF

SEQ ID NO: 11474 - protein, 14 aa, Homo sapiens
  CDR3 for beta chain variable domain of TCR clone 5737 (TRBV20-1, TRBJ2-1)
CSAQIGGSANEQFF

SEQ ID NO: 11475 - protein, 13 aa, Homo sapiens
  CDR3 for alpha chain variable domain of TCR clone 5738 (TRAV23/DV6, TRAJ20)
CAAGGFHDYKLSF

SEQ ID NO: 11476 - protein, 14 aa, Homo sapiens
  CDR3 for beta chain variable domain of TCR clone 5738 (TRBV3-1, TRBJ2-7)
CASSQSGAHYEQYF

SEQ ID NO: 11477 - protein, 14 aa, Homo sapiens
  CDR3 for alpha chain variable domain of TCR clone 5739 (TRAV1-1, TRAJ23)
CAVSIYNQGGKLIF

SEQ ID NO: 11478 - protein, 20 aa, Homo sapiens
  CDR3 for beta chain variable domain of TCR clone 5739 (TRBV6-4, TRBJ2-7)
CASSDSSVSGQVPTSYEQYF

SEQ ID NO: 11479 - protein, 12 aa, Homo sapiens
  CDR3 for alpha chain variable domain of TCR clone 5740 (TRAV1-2, TRAJ33)
CAALDSNYQLIW

SEQ ID NO: 11480 - protein, 17 aa, Homo sapiens
  CDR3 for beta chain variable domain of TCR clone 5740 (TRBV25-1, TRBJ1-2)
CASSEFGSATTNYGYTF

SEQ ID NO: 11481 - protein, 17 aa, Homo sapiens
  CDR3 for alpha chain variable domain of TCR clone 5741 (TRAV3, TRAJ6)
CAVRDGPRAGGSYIPTF

SEQ ID NO: 11482 - protein, 14 aa, Homo sapiens
  CDR3 for beta chain variable domain of TCR clone 5741 (TRBV12-5, TRBJ2-5)
CASGSRTHQETQYF

SEQ ID NO: 11483 - protein, 12 aa, Homo sapiens
  CDR3 for alpha chain variable domain of TCR clone 5742 (TRAV16, TRAJ26)
CALRSYGQNFVF

SEQ ID NO: 11484 - protein, 13 aa, Homo sapiens
  CDR3 for beta chain variable domain of TCR clone 5742 (TRBV12-4, TRBJ1-1)
CASSPGTGFEAFF

SEQ ID NO: 11485 - protein, 12 aa, Homo sapiens
  CDR3 for alpha chain variable domain of TCR clone 5743 (TRAV12-3, TRAJ17)
CAMTLTGNKLTF

SEQ ID NO: 11486 - protein, 13 aa, Homo sapiens
  CDR3 for beta chain variable domain of TCR clone 5743 (TRBV10-3, TRBJ1-1)
CAIIPEGGTEAFF

SEQ ID NO: 11487 - protein, 13 aa, Homo sapiens
  CDR3 for alpha chain variable domain of TCR clone 5744 (TRAV21, TRAJ27)
CAARPGNAGKSTF

SEQ ID NO: 11488 - protein, 13 aa, Homo sapiens
  CDR3 for beta chain variable domain of TCR clone 5744 (TRBV27, TRBJ2-1)
CASRTLGVGEQFF

SEQ ID NO: 11489 - protein, 15 aa, Homo sapiens
  CDR3 for alpha chain variable domain of TCR clone 5745 (TRAV8-3, TRAJ45)
CASSYSGGGADGLTF

SEQ ID NO: 11490 - protein, 16 aa, Homo sapiens
  CDR3 for beta chain variable domain of TCR clone 5745 (TRBV27, TRBJ2-2)
CASSFRGLVRTGELFF

SEQ ID NO: 11491 - protein, 14 aa, Homo sapiens
  CDR3 for alpha chain variable domain of TCR clone 5746 (TRAV12-3, TRAJ10)
SHLPLTGGGNKLTF

SEQ ID NO: 11492 - protein, 13 aa, Homo sapiens
  CDR3 for beta chain variable domain of TCR clone 5746 (TRBV20-1, TRBJ2-5)
CSARGDYQETQYF

SEQ ID NO: 11493 - protein, 12 aa, Homo sapiens
  CDR3 for alpha chain variable domain of TCR clone 5747 (TRAV12-1, TRAJ20)
CVAHFNDYKLSF

SEQ ID NO: 11494 - protein, 14 aa, Homo sapiens
  CDR3 for beta chain variable domain of TCR clone 5747 (TRBV3-1, TRBJ2-2)
CASSLPDNTGELFF

SEQ ID NO: 11495 - protein, 14 aa, Homo sapiens
  CDR3 for alpha chain variable domain of TCR clone 5748 (TRAV1-2, TRAJ8)
CAVREDTGFQKLVF

SEQ ID NO: 11496 - protein, 12 aa, Homo sapiens
  CDR3 for beta chain variable domain of TCR clone 5748 (TRBV28, TRBJ2-3)
CASSLYRDTQYF

SEQ ID NO: 11497 - protein, 15 aa, Homo sapiens
  CDR3 for alpha chain variable domain of TCR clone 5749 (TRAV26-1, TRAJ29)
CIVKVEGSGNTPLVF

SEQ ID NO: 11498 - protein, 14 aa, Homo sapiens
  CDR3 for beta chain variable domain of TCR clone 5749 (TRBV18, TRBJ2-5)
CASSPGVSQETQYF

SEQ ID NO: 11499 - protein, 13 aa, Homo sapiens
  CDR3 for alpha chain variable domain of TCR clone 5750 (TRAV1-2, TRAJ11)
CAVRREGYSTLTF

SEQ ID NO: 11500 - protein, 14 aa, Homo sapiens
  CDR3 for beta chain variable domain of TCR clone 5750 (TRBV14, TRBJ2-7)
CASRHRDKPYEQYF

SEQ ID NO: 11501 - protein, 12 aa, Homo sapiens
  CDR3 for alpha chain variable domain of TCR clone 5751 (TRAV1-1, TRAJ8)
CAGGTGFQKLVF

SEQ ID NO: 11502 - protein, 15 aa, Homo sapiens
  CDR3 for beta chain variable domain of TCR clone 5751 (TRBV7-9, TRBJ1-4)
CAGSRTGGFNEKLFF

SEQ ID NO: 11503 - protein, 11 aa, Homo sapiens
  CDR3 for alpha chain variable domain of TCR clone 5752 (TRAV3, TRAJ21)
CAVGNFNKFYF

SEQ ID NO: 11504 - protein, 15 aa, Homo sapiens
  CDR3 for beta chain variable domain of TCR clone 5752 (TRBV15, TRBJ2-2)
CATSGTGGRVGELFF

SEQ ID NO: 11505 - protein, 12 aa, Homo sapiens
  CDR3 for alpha chain variable domain of TCR clone 5753 (TRAV12-3, TRAJ17)
FAMTLTGNKLTF

SEQ ID NO: 11506 - protein, 15 aa, Homo sapiens
  CDR3 for beta chain variable domain of TCR clone 5753 (TRBV20-1, TRBJ2-7)
CSARDRVSGMDEQYF

SEQ ID NO: 11507 - protein, 14 aa, Homo sapiens
  CDR3 for alpha chain variable domain of TCR clone 5754 (TRAV29/DV5, TRAJ44)
CAAFLVGTASKLTF

SEQ ID NO: 11508 - protein, 16 aa, Homo sapiens
  CDR3 for beta chain variable domain of TCR clone 5754 (TRBV19, TRBJ1-5)
CASSIQGGYSNQPQHF

SEQ ID NO: 11509 - protein, 12 aa, Homo sapiens
  CDR3 for alpha chain variable domain of TCR clone 5755 (TRAV6, TRAJ9)
CALHTGGFKTIF

SEQ ID NO: 11510 - protein, 14 aa, Homo sapiens
  CDR3 for beta chain variable domain of TCR clone 5755 (TRBV7-9, TRBJ2-1)
CASSQGQAEAEQFF

SEQ ID NO: 11511 - protein, 14 aa, Homo sapiens
  CDR3 for alpha chain variable domain of TCR clone 5756 (TRAV12-3, TRAJ10)
SHLPLTGGGNKLTF

SEQ ID NO: 11512 - protein, 12 aa, Homo sapiens
  CDR3 for beta chain variable domain of TCR clone 5756 (TRBV6-6, TRBJ2-3)
CASSSRGDTQYF

SEQ ID NO: 11513 - protein, 14 aa, Homo sapiens
  CDR3 for alpha chain variable domain of TCR clone 5757 (TRAV2, TRAJ20)
CAVDLRKHDYKLSF

SEQ ID NO: 11514 - protein, 15 aa, Homo sapiens
  CDR3 for beta chain variable domain of TCR clone 5757 (TRBV11-3, TRBJ2-7)
CASSLLSGSSYEQYF

SEQ ID NO: 11515 - protein, 15 aa, Homo sapiens
  CDR3 for alpha chain variable domain of TCR clone 5758 (TRAV8-3, TRAJ45)
CASSYSGGGADGLPF

SEQ ID NO: 11516 - protein, 13 aa, Homo sapiens
  CDR3 for beta chain variable domain of TCR clone 5758 (TRBV10-3, TRBJ2-7)
CASKLAVNYEQYF

SEQ ID NO: 11517 - protein, 14 aa, Homo sapiens
  CDR3 for alpha chain variable domain of TCR clone 5759 (TRAV3, TRAJ7)
CAVREEEREQQTRF

SEQ ID NO: 11518 - protein, 12 aa, Homo sapiens
  CDR3 for beta chain variable domain of TCR clone 5759 (TRBV24-1, TRBJ1-4)
CATSDPNEKLFF

SEQ ID NO: 11519 - protein, 13 aa, Homo sapiens
  CDR3 for alpha chain variable domain of TCR clone 5760 (TRAV21, TRAJ27)
CAARPGNAGKPTF

SEQ ID NO: 11520 - protein, 14 aa, Homo sapiens
  CDR3 for beta chain variable domain of TCR clone 5760 (TRBV7-6, TRBJ2-3)
CASSLGTVTDTQYF

SEQ ID NO: 11521 - protein, 15 aa, Homo sapiens
  CDR3 for alpha chain variable domain of TCR clone 5761 (TRAV3, TRAJ17)
CAVRDTGAAGNKLTF

SEQ ID NO: 11522 - protein, 15 aa, Homo sapiens
  CDR3 for beta chain variable domain of TCR clone 5761 (TRBV20-1, TRBJ2-7)
CSARDRVSGMDEQYF

SEQ ID NO: 11523 - protein, 14 aa, Homo sapiens
  CDR3 for alpha chain variable domain of TCR clone 5762 (TRAV1-2, TRAJ16)
CAVNRFSDGQKLLF

SEQ ID NO: 11524 - protein, 13 aa, Homo sapiens
  CDR3 for beta chain variable domain of TCR clone 5762 (TRBV7-6, TRBJ1-2)
CASSLVADYGYTF

SEQ ID NO: 11525 - protein, 14 aa, Homo sapiens
  CDR3 for alpha chain variable domain of TCR clone 5763 (TRAV2, TRAJ9)
CAVEDRSGGFKTIF

SEQ ID NO: 11526 - protein, 15 aa, Homo sapiens
  CDR3 for beta chain variable domain of TCR clone 5763 (TRBV11-3, TRBJ2-3)
CASSAGTVVTNTQYF

SEQ ID NO: 11527 - protein, 12 aa, Homo sapiens
  CDR3 for alpha chain variable domain of TCR clone 5764 (TRAV17, TRAJ30)
CVPERRDDKIIF

SEQ ID NO: 11528 - protein, 11 aa, Homo sapiens
  CDR3 for beta chain variable domain of TCR clone 5764 (TRBV20-1, TRBJ1-2)
CSVQGAGGYTF

SEQ ID NO: 11529 - protein, 15 aa, Homo sapiens
  CDR3 for alpha chain variable domain of TCR clone 5765 (TRAV16, TRAJ16)
CALQGGGPDGQKLLF

SEQ ID NO: 11530 - protein, 13 aa, Homo sapiens
  CDR3 for beta chain variable domain of TCR clone 5765 (TRBV12-5, TRBJ2-3)
CASGDRQSDTQYF

SEQ ID NO: 11531 - protein, 10 aa, Homo sapiens
  CDR3 for alpha chain variable domain of TCR clone 5766 (TRAV39, TRAJ49)
CAVAGNQFYF

SEQ ID NO: 11532 - protein, 14 aa, Homo sapiens
  CDR3 for beta chain variable domain of TCR clone 5766 (TRBV7-8, TRBJ2-7)
CASSPRDRVYEQYF

SEQ ID NO: 11533 - protein, 14 aa, Homo sapiens
  CDR3 for alpha chain variable domain of TCR clone 5767 (TRAV2, TRAJ20)
CAVEDVVNDYKLSF

SEQ ID NO: 11534 - protein, 13 aa, Homo sapiens
  CDR3 for beta chain variable domain of TCR clone 5767 (TRBV19, TRBJ2-7)
CASRKAGGSEQYF

SEQ ID NO: 11535 - protein, 17 aa, Homo sapiens
  CDR3 for alpha chain variable domain of TCR clone 5768 (TRAV3, TRAJ6)
CAVRDGPRAGGSYIPTF

SEQ ID NO: 11536 - protein, 16 aa, Homo sapiens
  CDR3 for beta chain variable domain of TCR clone 5768 (TRBV7-9, TRBJ1-3)
CASSQTSGLRMGTIYF

SEQ ID NO: 11537 - protein, 14 aa, Homo sapiens
  CDR3 for alpha chain variable domain of TCR clone 5769 (TRAV9-2, TRAJ39)
CALYIYNAGNMLTF

SEQ ID NO: 11538 - protein, 17 aa, Homo sapiens
  CDR3 for beta chain variable domain of TCR clone 5769 (TRBV20-1, TRBJ2-2)
CSASGSGQGGLTGELFF

SEQ ID NO: 11539 - protein, 16 aa, Homo sapiens
  CDR3 for alpha chain variable domain of TCR clone 5770 (TRAV30, TRAJ24)
CGTEIVDADSWGKFQF

SEQ ID NO: 11540 - protein, 17 aa, Homo sapiens
  CDR3 for beta chain variable domain of TCR clone 5770 (TRBV7-3, TRBJ2-3)
CASSLMKRMRGADTQYF

SEQ ID NO: 11541 - protein, 12 aa, Homo sapiens
  CDR3 for alpha chain variable domain of TCR clone 5771 (TRAV21, TRAJ11)
CAATSGYSTLTF

SEQ ID NO: 11542 - protein, 13 aa, Homo sapiens
  CDR3 for beta chain variable domain of TCR clone 5771 (TRBV20-1, TRBJ2-7)
QCPELAGVGEQYF

SEQ ID NO: 11543 - protein, 11 aa, Homo sapiens
  CDR3 for alpha chain variable domain of TCR clone 5772 (TRAV12-2, TRAJ26)
CAVEGGQNFVF

SEQ ID NO: 11544 - protein, 17 aa, Homo sapiens
  CDR3 for beta chain variable domain of TCR clone 5772 (TRBV20-1, TRBJ2-1)
CSASGGENTGAYNEQFF

SEQ ID NO: 11545 - protein, 14 aa, Homo sapiens
  CDR3 for alpha chain variable domain of TCR clone 5773 (TRAV23/DV6, TRAJ8)
CAASKNTGFQKLVF

SEQ ID NO: 11546 - protein, 16 aa, Homo sapiens
  CDR3 for beta chain variable domain of TCR clone 5773 (TRBV4-1, TRBJ2-6)
CASSQVGDPEANVLTF

SEQ ID NO: 11547 - protein, 18 aa, Homo sapiens
  CDR3 for alpha chain variable domain of TCR clone 5774 (TRAV13-1, TRAJ52)
CAAKNPNAGGTSYGKLTF

SEQ ID NO: 11548 - protein, 15 aa, Homo sapiens
  CDR3 for beta chain variable domain of TCR clone 5774 (TRBV27, TRBJ2-1)
CASSNGGGSSNEQFF

SEQ ID NO: 11549 - protein, 14 aa, Homo sapiens
  CDR3 for alpha chain variable domain of TCR clone 5775 (TRAV2, TRAJ39)
CAVEGDNAGNMLTF

SEQ ID NO: 11550 - protein, 14 aa, Homo sapiens
  CDR3 for beta chain variable domain of TCR clone 5775 (TRBV28, TRBJ2-4)
CASSPRARGNIQYF

SEQ ID NO: 11551 - protein, 11 aa, Homo sapiens
  CDR3 for alpha chain variable domain of TCR clone 5776 (TRAV3, TRAJ21)
CAVGSFNKFYF

SEQ ID NO: 11552 - protein, 16 aa, Homo sapiens
  CDR3 for beta chain variable domain of TCR clone 5776 (TRBV19, TRBJ2-1)
CASSKAGPSSYNEQFF

SEQ ID NO: 11553 - protein, 13 aa, Homo sapiens
  CDR3 for alpha chain variable domain of TCR clone 5777 (TRAV36/DV7, TRAJ49)
CAGDSNTGNQFYF

SEQ ID NO: 11554 - protein, 15 aa, Homo sapiens
  CDR3 for beta chain variable domain of TCR clone 5777 (TRBV6-5, TRBJ1-6)
CASSLGQGFRSPLHF

SEQ ID NO: 11555 - protein, 14 aa, Homo sapiens
  CDR3 for alpha chain variable domain of TCR clone 5778 (TRAV12-3, TRAJ10)
SHLPLTGGGNKLTF

SEQ ID NO: 11556 - protein, 17 aa, Homo sapiens
  CDR3 for beta chain variable domain of TCR clone 5778 (TRBV28, TRBJ2-3)
CASSPTPAGGRVDTQYF

SEQ ID NO: 11557 - protein, 15 aa, Homo sapiens
  CDR3 for alpha chain variable domain of TCR clone 5779 (TRAV22, TRAJ24)
CAVPLSTDSWGKLQF

SEQ ID NO: 11558 - protein, 16 aa, Homo sapiens
  CDR3 for beta chain variable domain of TCR clone 5779 (TRBV28, TRBJ2-7)
CASSFPDRRLTYEQYF

SEQ ID NO: 11559 - protein, 15 aa, Homo sapiens
  CDR3 for alpha chain variable domain of TCR clone 5780 (TRAV2, TRAJ15)
CAVEDREQAGTALIF

SEQ ID NO: 11560 - protein, 15 aa, Homo sapiens
  CDR3 for beta chain variable domain of TCR clone 5780 (TRBV3-1, TRBJ1-2)
CASSHPGTPGYGYTF

SEQ ID NO: 11561 - protein, 12 aa, Homo sapiens
  CDR3 for alpha chain variable domain of TCR clone 5781 (TRAV1-1, TRAJ8)
CAGGTGFQKLVF

SEQ ID NO: 11562 - protein, 16 aa, Homo sapiens
  CDR3 for beta chain variable domain of TCR clone 5781 (TRBV12-4, TRBJ1-5)
CASSRPVGGSNQPQHF

SEQ ID NO: 11563 - protein, 15 aa, Homo sapiens
  CDR3 for alpha chain variable domain of TCR clone 5782 (TRAV10, TRAJ6)
CVVRPRTGGSYIPTF

SEQ ID NO: 11564 - protein, 14 aa, Homo sapiens
  CDR3 for beta chain variable domain of TCR clone 5782 (TRBV20-1, TRBJ2-4)
CSASGRVGENIQYF

SEQ ID NO: 11565 - protein, 14 aa, Homo sapiens
  CDR3 for alpha chain variable domain of TCR clone 5783 (TRAV12-2, TRAJ13)
CAVKKTGGYQKVTF

SEQ ID NO: 11566 - protein, 15 aa, Homo sapiens
  CDR3 for beta chain variable domain of TCR clone 5783 (TRBV27, TRBJ2-1)
CASSNGGGSSNEQFL

SEQ ID NO: 11567 - protein, 13 aa, Homo sapiens
  CDR3 for alpha chain variable domain of TCR clone 5784 (TRAV12-1, TRAJ31)
CVVNDNNNARLMF

SEQ ID NO: 11568 - protein, 14 aa, Homo sapiens
  CDR3 for beta chain variable domain of TCR clone 5784 (TRBV7-2, TRBJ2-1)
CASSFGTSYGEQFF

SEQ ID NO: 11569 - protein, 13 aa, Homo sapiens
  CDR3 for alpha chain variable domain of TCR clone 5785 (TRAV12-3, TRAJ9)
CAMRNTGGFKTIF

SEQ ID NO: 11570 - protein, 13 aa, Homo sapiens
  CDR3 for beta chain variable domain of TCR clone 5785 (TRBV27, TRBJ2-1)
CASRTLGVGEQFF

SEQ ID NO: 11571 - protein, 14 aa, Homo sapiens
  CDR3 for alpha chain variable domain of TCR clone 5786 (TRAV8-3, TRAJ4)
CAVGAAGGYNKLIF

SEQ ID NO: 11572 - protein, 15 aa, Homo sapiens
  CDR3 for beta chain variable domain of TCR clone 5786 (TRBV6-5, TRBJ1-2)
CASSYSPPRFYGYTF

SEQ ID NO: 11573 - protein, 14 aa, Homo sapiens
  CDR3 for alpha chain variable domain of TCR clone 5787 (TRAV13-1, TRAJ35)
CSASKGGFGNVLHC

SEQ ID NO: 11574 - protein, 13 aa, Homo sapiens
  CDR3 for beta chain variable domain of TCR clone 5787 (TRBV7-3, TRBJ1-1)
CASSQDWGAEAFF

SEQ ID NO: 11575 - protein, 10 aa, Homo sapiens
  CDR3 for alpha chain variable domain of TCR clone 5788 (TRAV27, TRAJ37)
CAGGVGKLIF

SEQ ID NO: 11576 - protein, 13 aa, Homo sapiens
  CDR3 for beta chain variable domain of TCR clone 5788 (TRBV27, TRBJ1-2)
CASSRGLVYGYTF

SEQ ID NO: 11577 - protein, 16 aa, Homo sapiens
  CDR3 for alpha chain variable domain of TCR clone 5789 (TRAV30, TRAJ24)
CGTEIVDADSWGKFQF

SEQ ID NO: 11578 - protein, 14 aa, Homo sapiens
  CDR3 for beta chain variable domain of TCR clone 5789 (TRBV19, TRBJ2-7)
CASNFRDTFTGMYF

SEQ ID NO: 11579 - protein, 16 aa, Homo sapiens
  CDR3 for alpha chain variable domain of TCR clone 5790 (TRAV12-1, TRAJ8)
CVVNGRGNTGFQKLVF

SEQ ID NO: 11580 - protein, 15 aa, Homo sapiens
  CDR3 for beta chain variable domain of TCR clone 5790 (TRBV6-1, TRBJ1-2)
CASNPGRGGSYGYTF

SEQ ID NO: 11581 - protein, 14 aa, Homo sapiens
  CDR3 for alpha chain variable domain of TCR clone 5791 (TRAV21, TRAJ9)
CCGGGGTGGFKTIF

SEQ ID NO: 11582 - protein, 13 aa, Homo sapiens
  CDR3 for beta chain variable domain of TCR clone 5791 (TRBV12-4, TRBJ1-2)
CASSSGLTVISTF

SEQ ID NO: 11583 - protein, 17 aa, Homo sapiens
  CDR3 for alpha chain variable domain of TCR clone 5792 (TRAV36/DV7, TRAJ52)
CAVAQRAGGTSYGKLTF

SEQ ID NO: 11584 - protein, 17 aa, Homo sapiens
  CDR3 for beta chain variable domain of TCR clone 5792 (TRBV28, TRBJ2-5)
CASSTPEGDALQETQYF

SEQ ID NO: 11585 - protein, 16 aa, Homo sapiens
  CDR3 for alpha chain variable domain of TCR clone 5793 (TRAV12-2, TRAJ32)
CAVNLGQGGATNKLIF

SEQ ID NO: 11586 - protein, 14 aa, Homo sapiens
  CDR3 for beta chain variable domain of TCR clone 5793 (TRBV11-2, TRBJ2-3)
CASSRLARTDTQHF

SEQ ID NO: 11587 - protein, 13 aa, Homo sapiens
  CDR3 for alpha chain variable domain of TCR clone 5794 (TRAV21, TRAJ27)
CAARPGHAGKSTF

SEQ ID NO: 11588 - protein, 14 aa, Homo sapiens
  CDR3 for beta chain variable domain of TCR clone 5794 (TRBV7-6, TRBJ2-3)
CASSLGTVTDTQYF

SEQ ID NO: 11589 - protein, 14 aa, Homo sapiens
  CDR3 for alpha chain variable domain of TCR clone 5795 (TRAV29/DV5, TRAJ36)
CAARRKTGANNLFF

SEQ ID NO: 11590 - protein, 12 aa, Homo sapiens
  CDR3 for beta chain variable domain of TCR clone 5795 (TRBV11-2, TRBJ2-1)
CASSPGNNEQFF

SEQ ID NO: 11591 - protein, 14 aa, Homo sapiens
  CDR3 for alpha chain variable domain of TCR clone 5796 (TRAV1-2, TRAJ8)
CAVREDTGFQKLVL

SEQ ID NO: 11592 - protein, 15 aa, Homo sapiens
  CDR3 for beta chain variable domain of TCR clone 5796 (TRBV6-3, TRBJ2-7)
CASSSPGTVFYEQYF

SEQ ID NO: 11593 - protein, 13 aa, Homo sapiens
  CDR3 for alpha chain variable domain of TCR clone 5797 (TRAV8-2, TRAJ34)
CVVSDRRTDKLIF

SEQ ID NO: 11594 - protein, 15 aa, Homo sapiens
  CDR3 for beta chain variable domain of TCR clone 5797 (TRBV20-1, TRBJ2-3)
CSARVVGGSTDTQYF

SEQ ID NO: 11595 - protein, 17 aa, Homo sapiens
  CDR3 for alpha chain variable domain of TCR clone 5798 (TRAV23/DV6, TRAJ58)
CAARLLRGETSGSRLTF

SEQ ID NO: 11596 - protein, 14 aa, Homo sapiens
  CDR3 for beta chain variable domain of TCR clone 5798 (TRBV2, TRBJ2-7)
CASSLTSGGYEQYF

SEQ ID NO: 11597 - protein, 12 aa, Homo sapiens
  CDR3 for alpha chain variable domain of TCR clone 5799 (TRAV12-3, TRAJ17)
CVMTLTGNKLTF

SEQ ID NO: 11598 - protein, 15 aa, Homo sapiens
  CDR3 for beta chain variable domain of TCR clone 5799 (TRBV20-1, TRBJ2-7)
CSARDRVSGMDEQYF

SEQ ID NO: 11599 - protein, 17 aa, Homo sapiens
  CDR3 for alpha chain variable domain of TCR clone 5800 (TRAV26-1, TRAJ53)
CIVRVDDSGGSNYKLTF

SEQ ID NO: 11600 - protein, 15 aa, Homo sapiens
  CDR3 for beta chain variable domain of TCR clone 5800 (TRBV7-9, TRBJ1-4)
CASSRTGGFNEKLFF

SEQ ID NO: 11601 - protein, 16 aa, Homo sapiens
  CDR3 for alpha chain variable domain of TCR clone 5801 (TRAV26-1, TRAJ53)
CTVRVAMGGSNYKLTF

SEQ ID NO: 11602 - protein, 12 aa, Homo sapiens
  CDR3 for beta chain variable domain of TCR clone 5801 (TRBV7-9, TRBJ1-5)
CASSPQGQPQHF

SEQ ID NO: 11603 - protein, 14 aa, Homo sapiens
  CDR3 for alpha chain variable domain of TCR clone 5802 (TRAV26-1, TRAJ15)
CIEAGNQAGTALIF

SEQ ID NO: 11604 - protein, 16 aa, Homo sapiens
  CDR3 for beta chain variable domain of TCR clone 5802 (TRBV27, TRBJ2-7)
CASSWLGGRGSYEQYF

SEQ ID NO: 11605 - protein, 16 aa, Homo sapiens
  CDR3 for alpha chain variable domain of TCR clone 5803 (TRAV3, TRAJ21)
CAVRDIERGNFNKFYF

SEQ ID NO: 11606 - protein, 13 aa, Homo sapiens
  CDR3 for beta chain variable domain of TCR clone 5803 (TRBV28, TRBJ2-5)
CASSSRNQETQYF

SEQ ID NO: 11607 - protein, 11 aa, Homo sapiens
  CDR3 for alpha chain variable domain of TCR clone 5804 (TRAV2, TRAJ33)
CAVESNYQLIW

SEQ ID NO: 11608 - protein, 13 aa, Homo sapiens
  CDR3 for beta chain variable domain of TCR clone 5804 (TRBV27, TRBJ1-4)
CASSLMGDEKLFF

SEQ ID NO: 11609 - protein, 14 aa, Homo sapiens
  CDR3 for alpha chain variable domain of TCR clone 5805 (TRAV8-2, TRAJ4)
CVVSPSGGYNKLIF

SEQ ID NO: 11610 - protein, 15 aa, Homo sapiens
  CDR3 for beta chain variable domain of TCR clone 5805 (TRBV10-2, TRBJ2-5)
CASRGSGGPQETQYF

SEQ ID NO: 11611 - protein, 15 aa, Homo sapiens
  CDR3 for alpha chain variable domain of TCR clone 5806 (TRAV36/DV7, TRAJ21)
CALKFYFGSGTKLNV

SEQ ID NO: 11612 - protein, 13 aa, Homo sapiens
  CDR3 for beta chain variable domain of TCR clone 5806 (TRBV11-3, TRBJ2-5)
CASSSGLQETQYF

SEQ ID NO: 11613 - protein, 13 aa, Homo sapiens
  CDR3 for alpha chain variable domain of TCR clone 5807 (TRAV8-2, TRAJ47)
CVVSEREGNKLVF

SEQ ID NO: 11614 - protein, 16 aa, Homo sapiens
  CDR3 for beta chain variable domain of TCR clone 5807 (TRBV5-1, TRBJ1-1)
CASSKTGTEVGTEAFF

SEQ ID NO: 11615 - protein, 14 aa, Homo sapiens
  CDR3 for alpha chain variable domain of TCR clone 5808 (TRAV1-2, TRAJ15)
CAVRDRQAGTALIF

SEQ ID NO: 11616 - protein, 14 aa, Homo sapiens
  CDR3 for beta chain variable domain of TCR clone 5808 (TRBV4-1, TRBJ2-2)
CASSQAVNTGELFF

SEQ ID NO: 11617 - protein, 11 aa, Homo sapiens
  CDR3 for alpha chain variable domain of TCR clone 5809 (TRAV12-1, TRAJ33)
CVVNSNYQLIW

SEQ ID NO: 11618 - protein, 19 aa, Homo sapiens
  CDR3 for beta chain variable domain of TCR clone 5809 (TRBV7-6, TRBJ2-5)
CASSLVGPGTSGEQETQYF

SEQ ID NO: 11619 - protein, 13 aa, Homo sapiens
  CDR3 for alpha chain variable domain of TCR clone 5810 (TRAV27, TRAJ53)
CAPSGGSNYKLTF

SEQ ID NO: 11620 - protein, 15 aa, Homo sapiens
  CDR3 for beta chain variable domain of TCR clone 5810 (TRBV6-1, TRBJ2-3)
CASSENWNGGGRQYF

SEQ ID NO: 11621 - protein, 14 aa, Homo sapiens
  CDR3 for alpha chain variable domain of TCR clone 5811 (TRAV17, TRAJ42)
CATAGGGSQGNLIF

SEQ ID NO: 11622 - protein, 14 aa, Homo sapiens
  CDR3 for beta chain variable domain of TCR clone 5811 (TRBV7-2, TRBJ2-3)
CASRFSRPSDTQYF

SEQ ID NO: 11623 - protein, 11 aa, Homo sapiens
  CDR3 for alpha chain variable domain of TCR clone 5812 (TRAV30, TRAJ24)
WMLTAGGKFQF

SEQ ID NO: 11624 - protein, 14 aa, Homo sapiens
  CDR3 for beta chain variable domain of TCR clone 5812 (TRBV12-5, TRBJ2-5)
CASGSRTHQETQYF

SEQ ID NO: 11625 - protein, 16 aa, Homo sapiens
  CDR3 for alpha chain variable domain of TCR clone 5813 (TRAV14/DV4, TRAJ20)
CAMREGRSRDDYKLSF

SEQ ID NO: 11626 - protein, 17 aa, Homo sapiens
  CDR3 for beta chain variable domain of TCR clone 5813 (TRBV15, TRBJ1-1)
CATSRVGGADGDTEAFF

SEQ ID NO: 11627 - protein, 11 aa, Homo sapiens
  CDR3 for alpha chain variable domain of TCR clone 5814 (TRAV23/DV6, TRAJ9)
CAASLSPPNTG

SEQ ID NO: 11628 - protein, 18 aa, Homo sapiens
  CDR3 for beta chain variable domain of TCR clone 5814 (TRBV4-1, TRBJ2-7)
CASSQDTGAGSGLNEQYF

SEQ ID NO: 11629 - protein, 12 aa, Homo sapiens
  CDR3 for alpha chain variable domain of TCR clone 5815 (TRAV1-1, TRAJ8)
RAGGTGFQKLVF

SEQ ID NO: 11630 - protein, 13 aa, Homo sapiens
  CDR3 for beta chain variable domain of TCR clone 5815 (TRBV7-9, TRBJ1-2)
CASSLKQNYGYTF

SEQ ID NO: 11631 - protein, 14 aa, Homo sapiens
  CDR3 for alpha chain variable domain of TCR clone 5816 (TRAV1-2, TRAJ8)
CAVREDTGFQKLVF

SEQ ID NO: 11632 - protein, 17 aa, Homo sapiens
  CDR3 for beta chain variable domain of TCR clone 5816 (TRBV20-1, TRBJ2-1)
CSASSSGLAGSYNEQFF

SEQ ID NO: 11633 - protein, 14 aa, Homo sapiens
  CDR3 for alpha chain variable domain of TCR clone 5817 (TRAV1-2, TRAJ6)
CAVSLSGGSYIPTF

SEQ ID NO: 11634 - protein, 15 aa, Homo sapiens
  CDR3 for beta chain variable domain of TCR clone 5817 (TRBV7-9, TRBJ2-7)
CASSPGGGLTYEQYF

SEQ ID NO: 11635 - protein, 13 aa, Homo sapiens
  CDR3 for alpha chain variable domain of TCR clone 5818 (TRAV6, TRAJ4)
CALLRGGYNKLIF

SEQ ID NO: 11636 - protein, 16 aa, Homo sapiens
  CDR3 for beta chain variable domain of TCR clone 5818 (TRBV5-1, TRBJ2-1)
CASSIRSGGSYNEQFF

SEQ ID NO: 11637 - protein, 12 aa, Homo sapiens
  CDR3 for alpha chain variable domain of TCR clone 5819 (TRAV12-3, TRAJ20)
CAMVRGDYKLSF

SEQ ID NO: 11638 - protein, 17 aa, Homo sapiens
  CDR3 for beta chain variable domain of TCR clone 5819 (TRBV28, TRBJ2-5)
CASSTPEGDALQETQYF

SEQ ID NO: 11639 - protein, 16 aa, Homo sapiens
  CDR3 for alpha chain variable domain of TCR clone 5820 (TRAV30, TRAJ24)
CGTELVDADSWGKFQF

SEQ ID NO: 11640 - protein, 14 aa, Homo sapiens
  CDR3 for beta chain variable domain of TCR clone 5820 (TRBV12-5, TRBJ2-5)
CASGSRTHQETQYF

SEQ ID NO: 11641 - protein, 15 aa, Homo sapiens
  CDR3 for alpha chain variable domain of TCR clone 5821 (TRAV12-1, TRAJ5)
CVVNMLETGRRALTF

SEQ ID NO: 11642 - protein, 13 aa, Homo sapiens
  CDR3 for beta chain variable domain of TCR clone 5821 (TRBV14, TRBJ1-5)
CASSQDRRGPQHF

SEQ ID NO: 11643 - protein, 15 aa, Homo sapiens
  CDR3 for alpha chain variable domain of TCR clone 5822 (TRAV27, TRAJ38)
CAARRNAGNNRKLIG

SEQ ID NO: 11644 - protein, 13 aa, Homo sapiens
  CDR3 for beta chain variable domain of TCR clone 5822 (TRBV12-5, TRBJ2-3)
CASGDRQSDTQYF

SEQ ID NO: 11645 - protein, 12 aa, Homo sapiens
  CDR3 for alpha chain variable domain of TCR clone 5823 (TRAV8-3, TRAJ34)
CAVLTNTDKLIF

SEQ ID NO: 11646 - protein, 15 aa, Homo sapiens
  CDR3 for beta chain variable domain of TCR clone 5823 (TRBV7-2, TRBJ2-7)
CASSLGIGNDYEQYF

SEQ ID NO: 11647 - protein, 14 aa, Homo sapiens
  CDR3 for alpha chain variable domain of TCR clone 5824 (TRAV12-1, TRAJ12)
CVVNRPDSSYKLIF

SEQ ID NO: 11648 - protein, 15 aa, Homo sapiens
  CDR3 for beta chain variable domain of TCR clone 5824 (TRBV5-1, TRBJ1-1)
CASSLGMGTSTEAFF

SEQ ID NO: 11649 - protein, 13 aa, Homo sapiens
  CDR3 for alpha chain variable domain of TCR clone 5825 (TRAV12-3, TRAJ50)
CARGGTSYDKVIF

SEQ ID NO: 11650 - protein, 14 aa, Homo sapiens
  CDR3 for beta chain variable domain of TCR clone 5825 (TRBV6-5, TRBJ1-1)
CASSYGQGDTEAFF

SEQ ID NO: 11651 - protein, 12 aa, Homo sapiens
  CDR3 for alpha chain variable domain of TCR clone 5826 (TRAV1-1, TRAJ9)
CALNTGGFKTIF

SEQ ID NO: 11652 - protein, 13 aa, Homo sapiens
  CDR3 for beta chain variable domain of TCR clone 5826 (TRBV29-1, TRBJ2-5)
CSAGLAGEETQYF

SEQ ID NO: 11653 - protein, 11 aa, Homo sapiens
  CDR3 for alpha chain variable domain of TCR clone 5827 (TRAV3, TRAJ21)
CAVGNFNKFYF

SEQ ID NO: 11654 - protein, 16 aa, Homo sapiens
  CDR3 for beta chain variable domain of TCR clone 5827 (TRBV19, TRBJ2-1)
CASSKAGPSSYNEQFS

SEQ ID NO: 11655 - protein, 15 aa, Homo sapiens
  CDR3 for alpha chain variable domain of TCR clone 5828 (TRAV2, TRAJ15)
CAVGGPNQAGTALIF

SEQ ID NO: 11656 - protein, 13 aa, Homo sapiens
  CDR3 for beta chain variable domain of TCR clone 5828 (TRBV2, TRBJ1-5)
CATAGPGNQPQHF

SEQ ID NO: 11657 - protein, 12 aa, Homo sapiens
  CDR3 for alpha chain variable domain of TCR clone 5829 (TRAV8-3, TRAJ26)
CAGDNYGQNFVF

SEQ ID NO: 11658 - protein, 14 aa, Homo sapiens
  CDR3 for beta chain variable domain of TCR clone 5829 (TRBV7-2, TRBJ2-7)
CASRSQGAAYEQYF

SEQ ID NO: 11659 - protein, 14 aa, Homo sapiens
  CDR3 for alpha chain variable domain of TCR clone 5830 (TRAV17, TRAJ22)
CATAISGSARQLTF

SEQ ID NO: 11660 - protein, 13 aa, Homo sapiens
  CDR3 for beta chain variable domain of TCR clone 5830 (TRBV6-3, TRBJ1-2)
CASSLDRSSGYTF

SEQ ID NO: 11661 - protein, 16 aa, Homo sapiens
  CDR3 for alpha chain variable domain of TCR clone 5831 (TRAV12-1, TRAJ53)
CVVTSVAGGSNYKLTF

SEQ ID NO: 11662 - protein, 17 aa, Homo sapiens
  CDR3 for beta chain variable domain of TCR clone 5831 (TRBV7-3, TRBJ2-3)
CASSPRGQGYGTDTQYF

SEQ ID NO: 11663 - protein, 10 aa, Homo sapiens
  CDR3 for alpha chain variable domain of TCR clone 5832 (TRAV12-2, TRAJ43)
CAVKILSMRF

SEQ ID NO: 11664 - protein, 14 aa, Homo sapiens
  CDR3 for beta chain variable domain of TCR clone 5832 (TRBV11-2, TRBJ2-7)
CASSLGNSLYEQYF

SEQ ID NO: 11665 - protein, 14 aa, Homo sapiens
  CDR3 for alpha chain variable domain of TCR clone 5833 (TRAV8-1, TRAJ24)
CAVNAADSWGKLQF

SEQ ID NO: 11666 - protein, 15 aa, Homo sapiens
  CDR3 for beta chain variable domain of TCR clone 5833 (TRBV20-1, TRBJ2-7)
CSARVPAAYFYEQYF

SEQ ID NO: 11667 - protein, 13 aa, Homo sapiens
  CDR3 for alpha chain variable domain of TCR clone 5834 (TRAV8-4, TRAJ4)
CAVSDIGYNKLIF

SEQ ID NO: 11668 - protein, 13 aa, Homo sapiens
  CDR3 for beta chain variable domain of TCR clone 5834 (TRBV19, TRBJ1-2)
CASSQGQVYGYTF

SEQ ID NO: 11669 - protein, 14 aa, Homo sapiens
  CDR3 for alpha chain variable domain of TCR clone 5835 (TRAV13-2, TRAJ17)
CAENSKAAGNKLTF

SEQ ID NO: 11670 - protein, 12 aa, Homo sapiens
  CDR3 for beta chain variable domain of TCR clone 5835 (TRBV14, TRBJ2-7)
CASSSLKGEQYF

SEQ ID NO: 11671 - protein, 13 aa, Homo sapiens
  CDR3 for alpha chain variable domain of TCR clone 5836 (TRAV26-1, TRAJ36)
CIAVRRGANNLFF

SEQ ID NO: 11672 - protein, 19 aa, Homo sapiens
  CDR3 for beta chain variable domain of TCR clone 5836 (TRBV27, TRBJ2-1)
CASSLEILSPGAAGNEQFF

SEQ ID NO: 11673 - protein, 11 aa, Homo sapiens
  CDR3 for alpha chain variable domain of TCR clone 5837 (TRAV13-1, TRAJ5)
CAPKGRRALTF

SEQ ID NO: 11674 - protein, 17 aa, Homo sapiens
  CDR3 for beta chain variable domain of TCR clone 5837 (TRBV28, TRBJ2-5)
CASSTPEGDALQETQYF

SEQ ID NO: 11675 - protein, 14 aa, Homo sapiens
  CDR3 for alpha chain variable domain of TCR clone 5838 (TRAV41, TRAJ32)
CCPNYGGATNKLIF

SEQ ID NO: 11676 - protein, 15 aa, Homo sapiens
  CDR3 for beta chain variable domain of TCR clone 5838 (TRBV11-2, TRBJ2-1)
CASSKNRGLIYEQFF

SEQ ID NO: 11677 - protein, 15 aa, Homo sapiens
  CDR3 for alpha chain variable domain of TCR clone 5839 (TRAV12-1, TRAJ37)
CVVNIMGGNTGKLIF

SEQ ID NO: 11678 - protein, 12 aa, Homo sapiens
  CDR3 for beta chain variable domain of TCR clone 5839 (TRBV2, TRBJ2-7)
CASSRVGYEQYF

SEQ ID NO: 11679 - protein, 11 aa, Homo sapiens
  CDR3 for alpha chain variable domain of TCR clone 5840 (TRAV21, TRAJ48)
CAVDGNEKLTF

SEQ ID NO: 11680 - protein, 15 aa, Homo sapiens
  CDR3 for beta chain variable domain of TCR clone 5840 (TRBV6-6, TRBJ2-5)
CASSPGGGLEETQYF

SEQ ID NO: 11681 - protein, 13 aa, Homo sapiens
  CDR3 for alpha chain variable domain of TCR clone 5841 (TRAV20, TRAJ20)
CAVQNPHDYKLSF

SEQ ID NO: 11682 - protein, 12 aa, Homo sapiens
  CDR3 for beta chain variable domain of TCR clone 5841 (TRBV18, TRBJ2-7)
CASSPNNNEQYF

SEQ ID NO: 11683 - protein, 14 aa, Homo sapiens
  CDR3 for alpha chain variable domain of TCR clone 5842 (TRAV8-3, TRAJ4)
CAVGAAGGYNKLIF

SEQ ID NO: 11684 - protein, 15 aa, Homo sapiens
  CDR3 for beta chain variable domain of TCR clone 5842 (TRBV6-3, TRBJ2-7)
CASSSPGTVFYEQYF

SEQ ID NO: 11685 - protein, 11 aa, Homo sapiens
  CDR3 for alpha chain variable domain of TCR clone 5843 (TRAV2, TRAJ13)
CASGGYQKVTF

SEQ ID NO: 11686 - protein, 16 aa, Homo sapiens
  CDR3 for beta chain variable domain of TCR clone 5843 (TRBV12-4, TRBJ2-5)
CASSFFVRGRQETQYF

SEQ ID NO: 11687 - protein, 14 aa, Homo sapiens
  CDR3 for alpha chain variable domain of TCR clone 5844 (TRAV1-2, TRAJ16)
CAVNRFSDGQKLLF

SEQ ID NO: 11688 - protein, 18 aa, Homo sapiens
  CDR3 for beta chain variable domain of TCR clone 5844 (TRBV11-2, TRBJ2-3)
CASSLGGASRGAPNTQYF

SEQ ID NO: 11689 - protein, 13 aa, Homo sapiens
  CDR3 for alpha chain variable domain of TCR clone 5845 (TRAV2, TRAJ15)
CAVASQAGTALIF

SEQ ID NO: 11690 - protein, 12 aa, Homo sapiens
  CDR3 for beta chain variable domain of TCR clone 5845 (TRBV12-4, TRBJ1-2)
CASSFIWLHLRF

SEQ ID NO: 11691 - protein, 18 aa, Homo sapiens
  CDR3 for alpha chain variable domain of TCR clone 5846 (TRAV21, TRAJ52)
CAVRPSPAGGTSYGKLTF

SEQ ID NO: 11692 - protein, 15 aa, Homo sapiens
  CDR3 for beta chain variable domain of TCR clone 5846 (TRBV20-1, TRBJ2-3)
CSAEPLAGHGDTQYF

SEQ ID NO: 11693 - protein, 14 aa, Homo sapiens
  CDR3 for alpha chain variable domain of TCR clone 5847 (TRAV29/DV5, TRAJ40)
CAAAVASGTYKYIF

SEQ ID NO: 11694 - protein, 13 aa, Homo sapiens
  CDR3 for beta chain variable domain of TCR clone 5847 (TRBV7-9, TRBJ2-7)
CASSFAGAYEQYF

SEQ ID NO: 11695 - protein, 14 aa, Homo sapiens
  CDR3 for alpha chain variable domain of TCR clone 5848 (TRAV26-1, TRAJ31)
CIALPPNNNARLMF

SEQ ID NO: 11696 - protein, 16 aa, Homo sapiens
  CDR3 for beta chain variable domain of TCR clone 5848 (TRBV10-2, TRBJ2-7)
CASSESPGSSGFEQYF

SEQ ID NO: 11697 - protein, 14 aa, Homo sapiens
  CDR3 for alpha chain variable domain of TCR clone 5849 (TRAV12-2, TRAJ6)
CAVIASGGSYIPTF

SEQ ID NO: 11698 - protein, 12 aa, Homo sapiens
  CDR3 for beta chain variable domain of TCR clone 5849 (TRBV5-1, TRBJ1-2)
CASSQDTYGYTF

SEQ ID NO: 11699 - protein, 15 aa, Homo sapiens
  CDR3 for alpha chain variable domain of TCR clone 5850 (TRAV8-3, TRAJ27)
CAVGPSKTNAGKSTF

SEQ ID NO: 11700 - protein, 15 aa, Homo sapiens
  CDR3 for beta chain variable domain of TCR clone 5850 (TRBV7-2, TRBJ2-1)
CASNSGLAGGNEQFF

SEQ ID NO: 11701 - protein, 14 aa, Homo sapiens
  CDR3 for alpha chain variable domain of TCR clone 5851 (TRAV8-2, TRAJ4)
CVVSPSGGYNKLIF

SEQ ID NO: 11702 - protein, 14 aa, Homo sapiens
  CDR3 for beta chain variable domain of TCR clone 5851 (TRBV10-3, TRBJ2-2)
CAISEVSHSGELFF

SEQ ID NO: 11703 - protein, 16 aa, Homo sapiens
  CDR3 for alpha chain variable domain of TCR clone 5852 (TRAV9-2, TRAJ10)
CALSEGGTGGGNKLTF

SEQ ID NO: 11704 - protein, 16 aa, Homo sapiens
  CDR3 for beta chain variable domain of TCR clone 5852 (TRBV7-2, TRBJ1-4)
CASSPVGRFDREKLFF

SEQ ID NO: 11705 - protein, 17 aa, Homo sapiens
  CDR3 for alpha chain variable domain of TCR clone 5853 (TRAV3, TRAJ4)
CAVRDIMFSGGYNKLIF

SEQ ID NO: 11706 - protein, 13 aa, Homo sapiens
  CDR3 for beta chain variable domain of TCR clone 5853 (TRBV28, TRBJ2-1)
CASSLIGRDEQFF

SEQ ID NO: 11707 - protein, 14 aa, Homo sapiens
  CDR3 for alpha chain variable domain of TCR clone 5854 (TRAV12-3, TRAJ10)
SHLPLTGGGNKLTF

SEQ ID NO: 11708 - protein, 17 aa, Homo sapiens
  CDR3 for beta chain variable domain of TCR clone 5854 (TRBV20-1, TRBJ2-2)
CSASGSGQGGLTGELFF

SEQ ID NO: 11709 - protein, 15 aa, Homo sapiens
  CDR3 for alpha chain variable domain of TCR clone 5855 (TRAV38-2/DV8, TRAJ26)
CAYRSRDNYGQNFVF

SEQ ID NO: 11710 - protein, 14 aa, Homo sapiens
  CDR3 for beta chain variable domain of TCR clone 5855 (TRBV29-1, TRBJ1-3)
CSVADRVVGNTIYF

SEQ ID NO: 11711 - protein, 15 aa, Homo sapiens
  CDR3 for alpha chain variable domain of TCR clone 5856 (TRAV17, TRAJ45)
TSVLRTGGGADGLTF

SEQ ID NO: 11712 - protein, 14 aa, Homo sapiens
  CDR3 for beta chain variable domain of TCR clone 5856 (TRBV7-2, TRBJ2-5)
CASSFTQGQETQYF

SEQ ID NO: 11713 - protein, 12 aa, Homo sapiens
  CDR3 for alpha chain variable domain of TCR clone 5857 (TRAV13-2, TRAJ23)
CAERHRGGKLIF

SEQ ID NO: 11714 - protein, 16 aa, Homo sapiens
  CDR3 for beta chain variable domain of TCR clone 5857 (TRBV27, TRBJ2-2)
CASSLSGFWVTGELFF

SEQ ID NO: 11715 - protein, 14 aa, Homo sapiens
  CDR3 for alpha chain variable domain of TCR clone 5858 (TRAV29/DV5, TRAJ32)
CAAAYGGATNKLIF

SEQ ID NO: 11716 - protein, 14 aa, Homo sapiens
  CDR3 for beta chain variable domain of TCR clone 5858 (TRBV20-1, TRBJ1-1)
CSAQTRIGGTEAFF

SEQ ID NO: 11717 - protein, 16 aa, Homo sapiens
  CDR3 for alpha chain variable domain of TCR clone 5859 (TRAV3, TRAJ10)
CAVRDMRAGGGNKLTF

SEQ ID NO: 11718 - protein, 15 aa, Homo sapiens
  CDR3 for beta chain variable domain of TCR clone 5859 (TRBV15, TRBJ1-5)
CATSTTGVVNQPQHF

SEQ ID NO: 11719 - protein, 15 aa, Homo sapiens
  CDR3 for alpha chain variable domain of TCR clone 5860 (TRAV17, TRAJ54)
CATEKLGQGAQKLVF

SEQ ID NO: 11720 - protein, 16 aa, Homo sapiens
  CDR3 for beta chain variable domain of TCR clone 5860 (TRBV9, TRBJ1-2)
CASSVEEKVSPYGYTF

SEQ ID NO: 11721 - protein, 14 aa, Homo sapiens
  CDR3 for alpha chain variable domain of TCR clone 5861 (TRAV3, TRAJ9)
CAVRLNTGGFKTIF

SEQ ID NO: 11722 - protein, 14 aa, Homo sapiens
  CDR3 for beta chain variable domain of TCR clone 5861 (TRBV20-1, TRBJ1-1)
CSAQTRIGGTEAFF

SEQ ID NO: 11723 - protein, 15 aa, Homo sapiens
  CDR3 for alpha chain variable domain of TCR clone 5862 (TRAV2, TRAJ15)
CAVEDREQAGTALIF

SEQ ID NO: 11724 - protein, 14 aa, Homo sapiens
  CDR3 for beta chain variable domain of TCR clone 5862 (TRBV5-1, TRBJ2-7)
CASSRGESLYEQYF

SEQ ID NO: 11725 - protein, 13 aa, Homo sapiens
  CDR3 for alpha chain variable domain of TCR clone 5863 (TRAV12-3, TRAJ53)
CAMRGGSNYKLTF

SEQ ID NO: 11726 - protein, 13 aa, Homo sapiens
  CDR3 for beta chain variable domain of TCR clone 5863 (TRBV18, TRBJ2-5)
CASSLQGQETQYF

SEQ ID NO: 11727 - protein, 13 aa, Homo sapiens
  CDR3 for alpha chain variable domain of TCR clone 5864 (TRAV4, TRAJ15)
CLVGPEAGTALIF

SEQ ID NO: 11728 - protein, 15 aa, Homo sapiens
  CDR3 for beta chain variable domain of TCR clone 5864 (TRBV7-2, TRBJ2-1)
CASSFDPGRRNEQFF

SEQ ID NO: 11729 - protein, 15 aa, Homo sapiens
  CDR3 for alpha chain variable domain of TCR clone 5865 (TRAV17, TRAJ42)
CATDHYGGSQGNLIF

SEQ ID NO: 11730 - protein, 13 aa, Homo sapiens
  CDR3 for beta chain variable domain of TCR clone 5865 (TRBV7-2, TRBJ1-5)
CASSFARNQPQHF

SEQ ID NO: 11731 - protein, 14 aa, Homo sapiens
  CDR3 for alpha chain variable domain of TCR clone 5866 (TRAV1-2, TRAJ8)
CAVREDTGFQKLVF

SEQ ID NO: 11732 - protein, 16 aa, Homo sapiens
  CDR3 for beta chain variable domain of TCR clone 5866 (TRBV27, TRBJ2-2)
CASSFRGLVRTGELFF

SEQ ID NO: 11733 - protein, 15 aa, Homo sapiens
  CDR3 for alpha chain variable domain of TCR clone 5867 (TRAV12-1, TRAJ22)
CVVRISSGSARQLTF

SEQ ID NO: 11734 - protein, 13 aa, Homo sapiens
  CDR3 for beta chain variable domain of TCR clone 5867 (TRBV6-3, TRBJ1-1)
CASSYSRTDSAFF

SEQ ID NO: 11735 - protein, 12 aa, Homo sapiens
  CDR3 for alpha chain variable domain of TCR clone 5868 (TRAV8-4, TRAJ31)
CAVSDSNARLMF

SEQ ID NO: 11736 - protein, 15 aa, Homo sapiens
  CDR3 for beta chain variable domain of TCR clone 5868 (TRBV27, TRBJ2-7)
CASRFWGQGADEQYF

SEQ ID NO: 11737 - protein, 14 aa, Homo sapiens
  CDR3 for alpha chain variable domain of TCR clone 5869 (TRAV2, TRAJ23)
CAVGLRNQGGKLIF

SEQ ID NO: 11738 - protein, 15 aa, Homo sapiens
  CDR3 for beta chain variable domain of TCR clone 5869 (TRBV6-5, TRBJ2-5)
CASSPLAGGIETQYF

SEQ ID NO: 11739 - protein, 15 aa, Homo sapiens
  CDR3 for alpha chain variable domain of TCR clone 5870 (TRAV26-1, TRAJ29)
CVVRVEGSGNTPLVF

SEQ ID NO: 11740 - protein, 15 aa, Homo sapiens
  CDR3 for beta chain variable domain of TCR clone 5870 (TRBV7-9, TRBJ1-5)
CASSQGHQPNQPQHF

SEQ ID NO: 11741 - protein, 14 aa, Homo sapiens
  CDR3 for alpha chain variable domain of TCR clone 5871 (TRAV20, TRAJ17)
CAVQARAAGNKLTF

SEQ ID NO: 11742 - protein, 13 aa, Homo sapiens
  CDR3 for beta chain variable domain of TCR clone 5871 (TRBV19, TRBJ1-2)
CASSPTLNYGYTF

SEQ ID NO: 11743 - protein, 11 aa, Homo sapiens
  CDR3 for alpha chain variable domain of TCR clone 5872 (TRAV1-2, TRAJ20)
CAVSNDYKLSF

SEQ ID NO: 11744 - protein, 16 aa, Homo sapiens
  CDR3 for beta chain variable domain of TCR clone 5872 (TRBV12-5, TRBJ2-5)
CASGPRTSGNQETQYF

SEQ ID NO: 11745 - protein, 12 aa, Homo sapiens
  CDR3 for alpha chain variable domain of TCR clone 5873 (TRAV17, TRAJ39)
CATEGAGNMLTF

SEQ ID NO: 11746 - protein, 15 aa, Homo sapiens
  CDR3 for beta chain variable domain of TCR clone 5873 (TRBV12-4, TRBJ2-1)
CASSLLATGNNEQFF

SEQ ID NO: 11747 - protein, 11 aa, Homo sapiens
  CDR3 for alpha chain variable domain of TCR clone 5874 (TRAV3, TRAJ21)
CAMGNFNKFYF

SEQ ID NO: 11748 - protein, 16 aa, Homo sapiens
  CDR3 for beta chain variable domain of TCR clone 5874 (TRBV19, TRBJ2-1)
CASSKAGPSSYNEQFF

SEQ ID NO: 11749 - protein, 15 aa, Homo sapiens
  CDR3 for alpha chain variable domain of TCR clone 5875 (TRAV38-2/DV8, TRAJ48)
CAYRSPESGNEKLTF

SEQ ID NO: 11750 - protein, 13 aa, Homo sapiens
  CDR3 for beta chain variable domain of TCR clone 5875 (TRBV4-2, TRBJ1-2)
CASSLSASGGYTF

SEQ ID NO: 11751 - protein, 14 aa, Homo sapiens
  CDR3 for alpha chain variable domain of TCR clone 5876 (TRAV1-2, TRAJ8)
CAVREDTGFQKLVF

SEQ ID NO: 11752 - protein, 16 aa, Homo sapiens
  CDR3 for beta chain variable domain of TCR clone 5876 (TRBV7-2, TRBJ2-5)
CASSLAVSGRGETQYF

SEQ ID NO: 11753 - protein, 14 aa, Homo sapiens
  CDR3 for alpha chain variable domain of TCR clone 5877 (TRAV1-2, TRAJ8)
CAVREDTGFQKLVF

SEQ ID NO: 11754 - protein, 16 aa, Homo sapiens
  CDR3 for beta chain variable domain of TCR clone 5877 (TRBV24-1, TRBJ2-3)
CATSDPGTGATDTQYF

SEQ ID NO: 11755 - protein, 12 aa, Homo sapiens
  CDR3 for alpha chain variable domain of TCR clone 5878 (TRAV2, TRAJ33)
CAVPDSNYQLIW

SEQ ID NO: 11756 - protein, 15 aa, Homo sapiens
  CDR3 for beta chain variable domain of TCR clone 5878 (TRBV29-1, TRBJ2-7)
CSVEFFDRGSYEQYF

SEQ ID NO: 11757 - protein, 16 aa, Homo sapiens
  CDR3 for alpha chain variable domain of TCR clone 5879 (TRAV1-2, TRAJ10)
CAVRGVLTGGGNKLTF

SEQ ID NO: 11758 - protein, 13 aa, Homo sapiens
  CDR3 for beta chain variable domain of TCR clone 5879 (TRBV10-3, TRBJ2-7)
CASKLAVNYEQYF

SEQ ID NO: 11759 - protein, 17 aa, Homo sapiens
  CDR3 for alpha chain variable domain of TCR clone 5880 (TRAV3, TRAJ6)
CALRDGPRAGGSYIPTF

SEQ ID NO: 11760 - protein, 14 aa, Homo sapiens
  CDR3 for beta chain variable domain of TCR clone 5880 (TRBV7-2, TRBJ2-7)
CASSPKTSFYEQYF

SEQ ID NO: 11761 - protein, 12 aa, Homo sapiens
  CDR3 for alpha chain variable domain of TCR clone 5881 (TRAV13-2, TRAJ23)
CAERHRGGKLIF

SEQ ID NO: 11762 - protein, 14 aa, Homo sapiens
  CDR3 for beta chain variable domain of TCR clone 5881 (TRBV6-1, TRBJ1-3)
CASVQGGGGNTIYF

SEQ ID NO: 11763 - protein, 17 aa, Homo sapiens
  CDR3 for alpha chain variable domain of TCR clone 5882 (TRAV3, TRAJ6)
CAVRDGPRAGGSYIPTF

SEQ ID NO: 11764 - protein, 16 aa, Homo sapiens
  CDR3 for beta chain variable domain of TCR clone 5882 (TRBV5-1, TRBJ1-3)
CASSPWAPSSGNTIYF

SEQ ID NO: 11765 - protein, 13 aa, Homo sapiens
  CDR3 for alpha chain variable domain of TCR clone 5883 (TRAV8-3, TRAJ37)
CAVGSGNTGKLIF

SEQ ID NO: 11766 - protein, 11 aa, Homo sapiens
  CDR3 for beta chain variable domain of TCR clone 5883 (TRBV29-1, TRBJ1-1)
CSLQQNTEAFF

SEQ ID NO: 11767 - protein, 12 aa, Homo sapiens
  CDR3 for alpha chain variable domain of TCR clone 5884 (TRAV30, TRAJ43)
CGTEERGNDMRF

SEQ ID NO: 11768 - protein, 17 aa, Homo sapiens
  CDR3 for beta chain variable domain of TCR clone 5884 (TRBV7-8, TRBJ2-6)
CASSAGTGGAGANVLTF

SEQ ID NO: 11769 - protein, 17 aa, Homo sapiens
  CDR3 for alpha chain variable domain of TCR clone 5885 (TRAV12-2, TRAJ48)
CASNEKLTFGTGTRLTI

SEQ ID NO: 11770 - protein, 20 aa, Homo sapiens
  CDR3 for beta chain variable domain of TCR clone 5885 (TRBV5-1, TRBJ2-5)
GSWCSVSAGCWGAGEKTQYF

SEQ ID NO: 11771 - protein, 14 aa, Homo sapiens
  CDR3 for alpha chain variable domain of TCR clone 5886 (TRAV12-2, TRAJ40)
CAVKIPSGTYKYIF

SEQ ID NO: 11772 - protein, 13 aa, Homo sapiens
  CDR3 for beta chain variable domain of TCR clone 5886 (TRBV12-4, TRBJ1-1)
CASSPGTGFEAFF

SEQ ID NO: 11773 - protein, 14 aa, Homo sapiens
  CDR3 for alpha chain variable domain of TCR clone 5887 (TRAV16, TRAJ33)
CALSAMDSNYQLIW

SEQ ID NO: 11774 - protein, 15 aa, Homo sapiens
  CDR3 for beta chain variable domain of TCR clone 5887 (TRBV9, TRBJ1-6)
CASSVAGTGDSPLHF

SEQ ID NO: 11775 - protein, 14 aa, Homo sapiens
  CDR3 for alpha chain variable domain of TCR clone 5888 (TRAV8-4, TRAJ15)
CAVILNQAGTALIF

SEQ ID NO: 11776 - protein, 12 aa, Homo sapiens
  CDR3 for beta chain variable domain of TCR clone 5888 (TRBV7-9, TRBJ1-6)
CASSASESPLHF

SEQ ID NO: 11777 - protein, 17 aa, Homo sapiens
  CDR3 for alpha chain variable domain of TCR clone 5889 (TRAV3, TRAJ6)
CAVRDGPRAGGSYIPTF

SEQ ID NO: 11778 - protein, 14 aa, Homo sapiens
  CDR3 for beta chain variable domain of TCR clone 5889 (TRBV7-2, TRBJ2-7)
RASSPKTSFYEQYF

SEQ ID NO: 11779 - protein, 14 aa, Homo sapiens
  CDR3 for alpha chain variable domain of TCR clone 5890 (TRAV35, TRAJ50)
CAGHRKTSYDKVIF

SEQ ID NO: 11780 - protein, 17 aa, Homo sapiens
  CDR3 for beta chain variable domain of TCR clone 5890 (TRBV7-8, TRBJ2-6)
CANSAGTGGAGANVLTF

SEQ ID NO: 11781 - protein, 14 aa, Homo sapiens
  CDR3 for alpha chain variable domain of TCR clone 5891 (TRAV13-1, TRAJ36)
CAAIYQTGANNLFF

SEQ ID NO: 11782 - protein, 15 aa, Homo sapiens
  CDR3 for beta chain variable domain of TCR clone 5891 (TRBV5-1, TRBJ1-1)
CASSPLGGSNTEAFF

SEQ ID NO: 11783 - protein, 14 aa, Homo sapiens
  CDR3 for alpha chain variable domain of TCR clone 5892 (TRAV12-3, TRAJ10)
SHLPLTGGGNKLTF

SEQ ID NO: 11784 - protein, 16 aa, Homo sapiens
  CDR3 for beta chain variable domain of TCR clone 5892 (TRBV7-3, TRBJ2-2)
CASSLKRGTLSGELFF

SEQ ID NO: 11785 - protein, 14 aa, Homo sapiens
  CDR3 for alpha chain variable domain of TCR clone 5893 (TRAV1-2, TRAJ13)
CAVLNSGGYQKVTF

SEQ ID NO: 11786 - protein, 14 aa, Homo sapiens
  CDR3 for beta chain variable domain of TCR clone 5893 (TRBV12-4, TRBJ1-1)
CASSLNDMNTEAFF

SEQ ID NO: 11787 - protein, 14 aa, Homo sapiens
  CDR3 for alpha chain variable domain of TCR clone 5894 (TRAV35, TRAJ13)
CAGSPSGGYQKVTF

SEQ ID NO: 11788 - protein, 14 aa, Homo sapiens
  CDR3 for beta chain variable domain of TCR clone 5894 (TRBV12-5, TRBJ2-5)
CASGSRTHQETQYF

SEQ ID NO: 11789 - protein, 12 aa, Homo sapiens
  CDR3 for alpha chain variable domain of TCR clone 5895 (TRAV17, TRAJ57)
CATDGGSEKLVF

SEQ ID NO: 11790 - protein, 12 aa, Homo sapiens
  CDR3 for beta chain variable domain of TCR clone 5895 (TRBV12-4, TRBJ1-2)
CASSFIWLHLRF

SEQ ID NO: 11791 - protein, 16 aa, Homo sapiens
  CDR3 for alpha chain variable domain of TCR clone 5896 (TRAV12-3, TRAJ53)
CAMSPGSGGSNYKLTF

SEQ ID NO: 11792 - protein, 14 aa, Homo sapiens
  CDR3 for beta chain variable domain of TCR clone 5896 (TRBV2, TRBJ2-7)
CASSLTSGGYEQYF

SEQ ID NO: 11793 - protein, 13 aa, Homo sapiens
  CDR3 for alpha chain variable domain of TCR clone 5897 (TRAV8-2, TRAJ36)
CVVSHLPTNNLFF

SEQ ID NO: 11794 - protein, 18 aa, Homo sapiens
  CDR3 for beta chain variable domain of TCR clone 5897 (TRBV7-9, TRBJ2-6)
CASSFPGAGISGANVLTF

SEQ ID NO: 11795 - protein, 18 aa, Homo sapiens
  CDR3 for alpha chain variable domain of TCR clone 5898 (TRAV26-2, TRAJ45)
CILRLWGYSGGGADGLTF

SEQ ID NO: 11796 - protein, 13 aa, Homo sapiens
  CDR3 for beta chain variable domain of TCR clone 5898 (TRBV7-8, TRBJ2-7)
CASSLTGGREQYF

SEQ ID NO: 11797 - protein, 12 aa, Homo sapiens
  CDR3 for alpha chain variable domain of TCR clone 5899 (TRAV1-1, TRAJ9)
CAVDTGGFKTIF

SEQ ID NO: 11798 - protein, 15 aa, Homo sapiens
  CDR3 for beta chain variable domain of TCR clone 5899 (TRBV6-3, TRBJ2-7)
CASSSPGTVFYEQYF

SEQ ID NO: 11799 - protein, 14 aa, Homo sapiens
  CDR3 for alpha chain variable domain of TCR clone 5900 (TRAV36/DV7, TRAJ32)
CAVGHVGATNKLIF

SEQ ID NO: 11800 - protein, 16 aa, Homo sapiens
  CDR3 for beta chain variable domain of TCR clone 5900 (TRBV12-4, TRBJ1-4)
CASSLKGIGHGEKLFF

SEQ ID NO: 11801 - protein, 13 aa, Homo sapiens
  CDR3 for alpha chain variable domain of TCR clone 5901 (TRAV17, TRAJ5)
CALRGTGRRALTF

SEQ ID NO: 11802 - protein, 15 aa, Homo sapiens
  CDR3 for beta chain variable domain of TCR clone 5901 (TRBV9, TRBJ1-6)
CASSVAGTGDSPLHF

SEQ ID NO: 11803 - protein, 11 aa, Homo sapiens
  CDR3 for alpha chain variable domain of TCR clone 5902 (TRAV1-1, TRAJ3)
CAVRSASKIIF

SEQ ID NO: 11804 - protein, 14 aa, Homo sapiens
  CDR3 for beta chain variable domain of TCR clone 5902 (TRBV2, TRBJ1-6)
CALSPSDPRSPLHF

SEQ ID NO: 11805 - protein, 22 aa, Homo sapiens
  CDR3 for alpha chain variable domain of TCR clone 5903 (TRAV39, TRAJ49)
PCMTSLPPTSVPWTNTGNQFYF

SEQ ID NO: 11806 - protein, 17 aa, Homo sapiens
  CDR3 for beta chain variable domain of TCR clone 5903 (TRBV20-1, TRBJ2-1)
CSARDRRRASSYNEQFF

SEQ ID NO: 11807 - protein, 15 aa, Homo sapiens
  CDR3 for alpha chain variable domain of TCR clone 5904 (TRAV27, TRAJ38)
CAGRFNAGNNRKLIW

SEQ ID NO: 11808 - protein, 13 aa, Homo sapiens
  CDR3 for beta chain variable domain of TCR clone 5904 (TRBV20-1, TRBJ1-1)
CSARVGGNTEAFF

SEQ ID NO: 11809 - protein, 17 aa, Homo sapiens
  CDR3 for alpha chain variable domain of TCR clone 5905 (TRAV1-1, TRAJ4)
CALYNKLIFGAGTRLAV

SEQ ID NO: 11810 - protein, 18 aa, Homo sapiens
  CDR3 for beta chain variable domain of TCR clone 5905 (TRBV27, TRBJ2-7)
CASRTGQFFPGARDEQYF

SEQ ID NO: 11811 - protein, 16 aa, Homo sapiens
  CDR3 for alpha chain variable domain of TCR clone 5906 (TRAV3, TRAJ37)
CAVRPHGSGNTGKLIF

SEQ ID NO: 11812 - protein, 16 aa, Homo sapiens
  CDR3 for beta chain variable domain of TCR clone 5906 (TRBV7-9, TRBJ2-3)
CASSPWREVGTDTQYF

SEQ ID NO: 11813 - protein, 12 aa, Homo sapiens
  CDR3 for alpha chain variable domain of TCR clone 5907 (TRAV8-6, TRAJ36)
CAVSDWLGQTTS

SEQ ID NO: 11814 - protein, 15 aa, Homo sapiens
  CDR3 for beta chain variable domain of TCR clone 5907 (TRBV6-1, TRBJ2-3)
CASSERGGITDTQYF

SEQ ID NO: 11815 - protein, 14 aa, Homo sapiens
  CDR3 for alpha chain variable domain of TCR clone 5908 (TRAV12-2, TRAJ11)
YAVRKNSGYSTLTF

SEQ ID NO: 11816 - protein, 14 aa, Homo sapiens
  CDR3 for beta chain variable domain of TCR clone 5908 (TRBV7-2, TRBJ2-5)
CASWQERFRETQYF

SEQ ID NO: 11817 - protein, 14 aa, Homo sapiens
  CDR3 for alpha chain variable domain of TCR clone 5909 (TRAV20, TRAJ21)
CAAGGIYNFNKFYF

SEQ ID NO: 11818 - protein, 12 aa, Homo sapiens
  CDR3 for beta chain variable domain of TCR clone 5909 (TRBV12-4, TRBJ2-1)
CASSLVRVEQFF

SEQ ID NO: 11819 - protein, 12 aa, Homo sapiens
  CDR3 for alpha chain variable domain of TCR clone 5910 (TRAV14/DV4, TRAJ50)
CAMREGNSKVIF

SEQ ID NO: 11820 - protein, 16 aa, Homo sapiens
  CDR3 for beta chain variable domain of TCR clone 5910 (TRBV28, TRBJ2-3)
CASSLSGQTSTDTQYF

SEQ ID NO: 11821 - protein, 14 aa, Homo sapiens
  CDR3 for alpha chain variable domain of TCR clone 5911 (TRAV12-3, TRAJ10)
SHLPLTGGGNKLTF

SEQ ID NO: 11822 - protein, 15 aa, Homo sapiens
  CDR3 for beta chain variable domain of TCR clone 5911 (TRBV10-3, TRBJ1-3)
CAISDSQGAGNTIYF

SEQ ID NO: 11823 - protein, 14 aa, Homo sapiens
  CDR3 for alpha chain variable domain of TCR clone 5912 (TRAV1-2, TRAJ8)
CAVREDTGFQKLVF

SEQ ID NO: 11824 - protein, 14 aa, Homo sapiens
  CDR3 for beta chain variable domain of TCR clone 5912 (TRBV4-1, TRBJ2-2)
CASSQAVNTGELFF

SEQ ID NO: 11825 - protein, 11 aa, Homo sapiens
  CDR3 for alpha chain variable domain of TCR clone 5913 (TRAV2, TRAJ13)
CASGGYQKVTF

SEQ ID NO: 11826 - protein, 14 aa, Homo sapiens
  CDR3 for beta chain variable domain of TCR clone 5913 (TRBV7-2, TRBJ2-7)
CASSPKTSFYEQYF

SEQ ID NO: 11827 - protein, 15 aa, Homo sapiens
  CDR3 for alpha chain variable domain of TCR clone 5914 (TRAV12-2, TRAJ22)
CAVNGASGSARQLTF

SEQ ID NO: 11828 - protein, 15 aa, Homo sapiens
  CDR3 for beta chain variable domain of TCR clone 5914 (TRBV18, TRBJ2-2)
CASSPPVGFTGELFF

SEQ ID NO: 11829 - protein, 13 aa, Homo sapiens
  CDR3 for alpha chain variable domain of TCR clone 5915 (TRAV12-3, TRAJ20)
CAMSATNDYKLSF

SEQ ID NO: 11830 - protein, 16 aa, Homo sapiens
  CDR3 for beta chain variable domain of TCR clone 5915 (TRBV18, TRBJ2-7)
CASSPYRDGQTYEQYF

SEQ ID NO: 11831 - protein, 13 aa, Homo sapiens
  CDR3 for alpha chain variable domain of TCR clone 5916 (TRAV8-6, TRAJ9)
CAVWDTGGFKTIF

SEQ ID NO: 11832 - protein, 13 aa, Homo sapiens
  CDR3 for beta chain variable domain of TCR clone 5916 (TRBV27, TRBJ1-1)
CASSLSIGAEAFF

SEQ ID NO: 11833 - protein, 16 aa, Homo sapiens
  CDR3 for alpha chain variable domain of TCR clone 5917 (TRAV12-1, TRAJ18)
CVVNPRGGSTLGRLYF

SEQ ID NO: 11834 - protein, 14 aa, Homo sapiens
  CDR3 for beta chain variable domain of TCR clone 5917 (TRBV27, TRBJ2-1)
CASRPMGQGVEQFF

SEQ ID NO: 11835 - protein, 19 aa, Homo sapiens
  CDR3 for alpha chain variable domain of TCR clone 5918 (TRAV1-1, TRAJ13)
CLLLLRCEGESGGYQKVTF

SEQ ID NO: 11836 - protein, 13 aa, Homo sapiens
  CDR3 for beta chain variable domain of TCR clone 5918 (TRBV29-1, TRBJ2-1)
CSVEGGRVNEQFF

SEQ ID NO: 11837 - protein, 13 aa, Homo sapiens
  CDR3 for alpha chain variable domain of TCR clone 5919 (TRAV26-2, TRAJ43)
CILRAVNNNDMRF

SEQ ID NO: 11838 - protein, 13 aa, Homo sapiens
  CDR3 for beta chain variable domain of TCR clone 5919 (TRBV14, TRBJ2-1)
CASSQDRRNEQFF

SEQ ID NO: 11839 - protein, 15 aa, Homo sapiens
  CDR3 for alpha chain variable domain of TCR clone 5920 (TRAV35, TRAJ53)
CAGLTQAGSNYKLTF

SEQ ID NO: 11840 - protein, 11 aa, Homo sapiens
  CDR3 for beta chain variable domain of TCR clone 5920 (TRBV20-1, TRBJ1-2)
CSIWASYGYTF

SEQ ID NO: 11841 - protein, 10 aa, Homo sapiens
  CDR3 for alpha chain variable domain of TCR clone 5921 (TRAV1-2, TRAJ23)
CAGQGGKLIF

SEQ ID NO: 11842 - protein, 12 aa, Homo sapiens
  CDR3 for beta chain variable domain of TCR clone 5921 (TRBV14, TRBJ2-5)
CASSQLKETQYF

SEQ ID NO: 11843 - protein, 15 aa, Homo sapiens
  CDR3 for alpha chain variable domain of TCR clone 5922 (TRAV8-4, TRAJ47)
CAVSDLLGYGNKLVF

SEQ ID NO: 11844 - protein, 16 aa, Homo sapiens
  CDR3 for beta chain variable domain of TCR clone 5922 (TRBV19, TRBJ2-2)
CASSPSGGLNTGELFF

SEQ ID NO: 11845 - protein, 14 aa, Homo sapiens
  CDR3 for alpha chain variable domain of TCR clone 5923 (TRAV12-2, TRAJ13)
CAVKKTGGYQKVTF

SEQ ID NO: 11846 - protein, 15 aa, Homo sapiens
  CDR3 for beta chain variable domain of TCR clone 5923 (TRBV27, TRBJ2-1)
CASSNGGGSSNEHFF

SEQ ID NO: 11847 - protein, 14 aa, Homo sapiens
  CDR3 for alpha chain variable domain of TCR clone 5924 (TRAV9-2, TRAJ39)
CALYIYNAGNMLTF

SEQ ID NO: 11848 - protein, 18 aa, Homo sapiens
  CDR3 for beta chain variable domain of TCR clone 5924 (TRBV20-1, TRBJ2-6)
CSAETTPTHGSGANVLTF

SEQ ID NO: 11849 - protein, 13 aa, Homo sapiens
  CDR3 for alpha chain variable domain of TCR clone 5925 (TRAV12-2, TRAJ10)
CAVPTGGGNKLTF

SEQ ID NO: 11850 - protein, 11 aa, Homo sapiens
  CDR3 for beta chain variable domain of TCR clone 5925 (TRBV12-4, TRBJ2-2)
CASSSAGELFF

SEQ ID NO: 11851 - protein, 15 aa, Homo sapiens
  CDR3 for alpha chain variable domain of TCR clone 5926 (TRAV13-1, TRAJ44)
CAASRGGGTASKLTF

SEQ ID NO: 11852 - protein, 16 aa, Homo sapiens
  CDR3 for beta chain variable domain of TCR clone 5926 (TRBV29-1, TRBJ2-7)
CSVEVVGTSGSYEQYF

SEQ ID NO: 11853 - protein, 14 aa, Homo sapiens
  CDR3 for alpha chain variable domain of TCR clone 5927 (TRAV36/DV7, TRAJ33)
CAVLPRDSNYQLIW

SEQ ID NO: 11854 - protein, 17 aa, Homo sapiens
  CDR3 for beta chain variable domain of TCR clone 5927 (TRBV23-1, TRBJ2-5)
CASSPTLNVIGVETQYF

SEQ ID NO: 11855 - protein, 14 aa, Homo sapiens
  CDR3 for alpha chain variable domain of TCR clone 5928 (TRAV13-1, TRAJ35)
CAASKGGFGNVLHC

SEQ ID NO: 11856 - protein, 13 aa, Homo sapiens
  CDR3 for beta chain variable domain of TCR clone 5928 (TRBV7-3, TRBJ1-1)
CASSQDWGAEAFL

SEQ ID NO: 11857 - protein, 17 aa, Homo sapiens
  CDR3 for alpha chain variable domain of TCR clone 5929 (TRAV3, TRAJ6)
CAVRDGPRAGGSYIPTF

SEQ ID NO: 11858 - protein, 14 aa, Homo sapiens
  CDR3 for beta chain variable domain of TCR clone 5929 (TRBV7-2, TRBJ2-7)
CASSPKTSVYEQYF

SEQ ID NO: 11859 - protein, 21 aa, Homo sapiens
  CDR3 for alpha chain variable domain of TCR clone 5930 (TRAV17, TRAJ57)
TASRAADTASYFCANPEKLVF

SEQ ID NO: 11860 - protein, 16 aa, Homo sapiens
  CDR3 for beta chain variable domain of TCR clone 5930 (TRBV11-2, TRBJ2-3)
CASSFQGRGALDTQYF

SEQ ID NO: 11861 - protein, 14 aa, Homo sapiens
  CDR3 for alpha chain variable domain of TCR clone 5931 (TRAV27, TRAJ42)
CAGEKVGSQGNLIF

SEQ ID NO: 11862 - protein, 15 aa, Homo sapiens
  CDR3 for beta chain variable domain of TCR clone 5931 (TRBV7-2, TRBJ2-2)
CASSLVAGSAGELFF

SEQ ID NO: 11863 - protein, 16 aa, Homo sapiens
  CDR3 for alpha chain variable domain of TCR clone 5932 (TRAV13-2, TRAJ32)
CAENMNYGGATNKLIF

SEQ ID NO: 11864 - protein, 14 aa, Homo sapiens
  CDR3 for beta chain variable domain of TCR clone 5932 (TRBV4-3, TRBJ2-7)
CASSQDVAGGEQYF

SEQ ID NO: 11865 - protein, 18 aa, Homo sapiens
  CDR3 for alpha chain variable domain of TCR clone 5933 (TRAV21, TRAJ52)
CAVRPSPAGGTSYGELTF

SEQ ID NO: 11866 - protein, 17 aa, Homo sapiens
  CDR3 for beta chain variable domain of TCR clone 5933 (TRBV13, TRBJ2-3)
CASSLSRVAGGRNTQYF

SEQ ID NO: 11867 - protein, 18 aa, Homo sapiens
  CDR3 for alpha chain variable domain of TCR clone 5934 (TRAV13-1, TRAJ52)
CAASKRSAGGTSYGKLTF

SEQ ID NO: 11868 - protein, 13 aa, Homo sapiens
  CDR3 for beta chain variable domain of TCR clone 5934 (TRBV12-4, TRBJ1-2)
CASSLRQGEGYTF

SEQ ID NO: 11869 - protein, 15 aa, Homo sapiens
  CDR3 for alpha chain variable domain of TCR clone 5935 (TRAV1-1, TRAJ23)
CAVREGDNQGGKLIF

SEQ ID NO: 11870 - protein, 13 aa, Homo sapiens
  CDR3 for beta chain variable domain of TCR clone 5935 (TRBV10-3, TRBJ2-7)
CAISEKGGYEQYF

SEQ ID NO: 11871 - protein, 15 aa, Homo sapiens
  CDR3 for alpha chain variable domain of TCR clone 5936 (TRAV3, TRAJ4)
CAVRDGTGGYNKLIF

SEQ ID NO: 11872 - protein, 13 aa, Homo sapiens
  CDR3 for beta chain variable domain of TCR clone 5936 (TRBV10-3, TRBJ2-7)
CASKLAVNYEQYF

SEQ ID NO: 11873 - protein, 12 aa, Homo sapiens
  CDR3 for alpha chain variable domain of TCR clone 5937 (TRAV3, TRAJ4)
CAVSGGYNKLIF

SEQ ID NO: 11874 - protein, 17 aa, Homo sapiens
  CDR3 for beta chain variable domain of TCR clone 5937 (TRBV6-5, TRBJ2-6)
CASSSATSGPGANVLTF

SEQ ID NO: 11875 - protein, 13 aa, Homo sapiens
  CDR3 for alpha chain variable domain of TCR clone 5938 (TRAV1-2, TRAJ9)
CAALNTGGFKTIF

SEQ ID NO: 11876 - protein, 14 aa, Homo sapiens
  CDR3 for beta chain variable domain of TCR clone 5938 (TRBV19, TRBJ2-1)
CASPTFVLSGEQFF

SEQ ID NO: 11877 - protein, 14 aa, Homo sapiens
  CDR3 for alpha chain variable domain of TCR clone 5939 (TRAV8-3, TRAJ4)
CAVGAAGGYNKLIF

SEQ ID NO: 11878 - protein, 18 aa, Homo sapiens
  CDR3 for beta chain variable domain of TCR clone 5939 (TRBV6-5, TRBJ1-1)
CASSYSAPGGTGGTEAFF

SEQ ID NO: 11879 - protein, 14 aa, Homo sapiens
  CDR3 for alpha chain variable domain of TCR clone 5940 (TRAV38-1, TRAJ28)
CAFTSGAGSYQLTF

SEQ ID NO: 11880 - protein, 18 aa, Homo sapiens
  CDR3 for beta chain variable domain of TCR clone 5940 (TRBV7-9, TRBJ1-1)
CASSKPWDTMGMNTEAFF

SEQ ID NO: 11881 - protein, 16 aa, Homo sapiens
  CDR3 for alpha chain variable domain of TCR clone 5941 (TRAV12-3, TRAJ53)
CAMSPGGGGSNYKLTF

SEQ ID NO: 11882 - protein, 11 aa, Homo sapiens
  CDR3 for beta chain variable domain of TCR clone 5941 (TRBV29-1, TRBJ2-5)
CSEDRTGTQYF

SEQ ID NO: 11883 - protein, 12 aa, Homo sapiens
  CDR3 for alpha chain variable domain of TCR clone 5942 (TRAV13-1, TRAJ42)
VNYGGSQGNLIF

SEQ ID NO: 11884 - protein, 12 aa, Homo sapiens
  CDR3 for beta chain variable domain of TCR clone 5942 (TRBV7-9, TRBJ1-5)
CASSSDQAPQHF

SEQ ID NO: 11885 - protein, 13 aa, Homo sapiens
  CDR3 for alpha chain variable domain of TCR clone 5943 (TRAV24, TRAJ42)
CAFSTGSQGNLIF

SEQ ID NO: 11886 - protein, 19 aa, Homo sapiens
  CDR3 for beta chain variable domain of TCR clone 5943 (TRBV19, TRBJ2-5)
CASSIGQVTDFFLGETQYF

SEQ ID NO: 11887 - protein, 14 aa, Homo sapiens
  CDR3 for alpha chain variable domain of TCR clone 5944 (TRAV39, TRAJ33)
CAVDIKNSNYQLIW

SEQ ID NO: 11888 - protein, 13 aa, Homo sapiens
  CDR3 for beta chain variable domain of TCR clone 5944 (TRBV4-2, TRBJ2-1)
CASSPGTYNEQFF

SEQ ID NO: 11889 - protein, 13 aa, Homo sapiens
  CDR3 for alpha chain variable domain of TCR clone 5945 (TRAV27, TRAJ42)
CAGARGSQGNLIF

SEQ ID NO: 11890 - protein, 17 aa, Homo sapiens
  CDR3 for beta chain variable domain of TCR clone 5945 (TRBV13, TRBJ2-3)
CASSLSRVAGGRNTQYF

SEQ ID NO: 11891 - protein, 14 aa, Homo sapiens
  CDR3 for alpha chain variable domain of TCR clone 5946 (TRAV1-2, TRAJ16)
CAVNRFSDGQKLLF

SEQ ID NO: 11892 - protein, 14 aa, Homo sapiens
  CDR3 for beta chain variable domain of TCR clone 5946 (TRBV11-2, TRBJ2-5)
CASSRTGGIETQYF

SEQ ID NO: 11893 - protein, 14 aa, Homo sapiens
  CDR3 for alpha chain variable domain of TCR clone 5947 (TRAV17, TRAJ17)
CATVVRGAGNKLTF

SEQ ID NO: 11894 - protein, 14 aa, Homo sapiens
  CDR3 for beta chain variable domain of TCR clone 5947 (TRBV12-4, TRBJ2-7)
CASSFSGADYEQYF

SEQ ID NO: 11895 - protein, 13 aa, Homo sapiens
  CDR3 for alpha chain variable domain of TCR clone 5948 (TRAV3, TRAJ27)
CAVRPLGAGKSTF

SEQ ID NO: 11896 - protein, 17 aa, Homo sapiens
  CDR3 for beta chain variable domain of TCR clone 5948 (TRBV27, TRBJ2-6)
CASSLTGFASGANVLTF

SEQ ID NO: 11897 - protein, 15 aa, Homo sapiens
  CDR3 for alpha chain variable domain of TCR clone 5949 (TRAV8-4, TRAJ37)
CAVSTRSGNTGKLIF

SEQ ID NO: 11898 - protein, 20 aa, Homo sapiens
  CDR3 for beta chain variable domain of TCR clone 5949 (TRBV7-8, TRBJ2-2)
CASSHLFPGPTIHITGELFF

SEQ ID NO: 11899 - protein, 12 aa, Homo sapiens
  CDR3 for alpha chain variable domain of TCR clone 5950 (TRAV13-1, TRAJ42)
VNYGGSQGNLIF

SEQ ID NO: 11900 - protein, 15 aa, Homo sapiens
  CDR3 for beta chain variable domain of TCR clone 5950 (TRBV20-1, TRBJ2-1)
CSASSARSSYNEQFF

SEQ ID NO: 11901 - protein, 13 aa, Homo sapiens
  CDR3 for alpha chain variable domain of TCR clone 5951 (TRAV38-1, TRAJ42)
CARWGGSQGNLIF

SEQ ID NO: 11902 - protein, 14 aa, Homo sapiens
  CDR3 for beta chain variable domain of TCR clone 5951 (TRBV12-4, TRBJ2-1)
CASSLGQGASEQFF

SEQ ID NO: 11903 - protein, 12 aa, Homo sapiens
  CDR3 for alpha chain variable domain of TCR clone 5952 (TRAV12-1, TRAJ23)
CVVNIPGGKLIF

SEQ ID NO: 11904 - protein, 15 aa, Homo sapiens
  CDR3 for beta chain variable domain of TCR clone 5952 (TRBV6-3, TRBJ2-7)
CASSSPGTVFYEQYF

SEQ ID NO: 11905 - protein, 14 aa, Homo sapiens
  CDR3 for alpha chain variable domain of TCR clone 5953 (TRAV12-2, TRAJ53)
CAVKGGGSNYKLTL

SEQ ID NO: 11906 - protein, 14 aa, Homo sapiens
  CDR3 for beta chain variable domain of TCR clone 5953 (TRBV7-7, TRBJ2-2)
CATRQDSDTGELFF

SEQ ID NO: 11907 - protein, 12 aa, Homo sapiens
  CDR3 for alpha chain variable domain of TCR clone 5954 (TRAV13-1, TRAJ49)
CAASSTGNQFYF

SEQ ID NO: 11908 - protein, 14 aa, Homo sapiens
  CDR3 for beta chain variable domain of TCR clone 5954 (TRBV7-2, TRBJ2-5)
CASSPAGNQETQYF

SEQ ID NO: 11909 - protein, 16 aa, Homo sapiens
  CDR3 for alpha chain variable domain of TCR clone 5955 (TRAV30, TRAJ24)
CGTEIVDADSWGKFQF

SEQ ID NO: 11910 - protein, 13 aa, Homo sapiens
  CDR3 for beta chain variable domain of TCR clone 5955 (TRBV9, TRBJ1-1)
CASSPTGSTEAFF

SEQ ID NO: 11911 - protein, 12 aa, Homo sapiens
  CDR3 for alpha chain variable domain of TCR clone 5956 (TRAV13-1, TRAJ15)
CAASQAGTALIF

SEQ ID NO: 11912 - protein, 13 aa, Homo sapiens
  CDR3 for beta chain variable domain of TCR clone 5956 (TRBV10-3, TRBJ1-2)
CAISERDSYGYTF

SEQ ID NO: 11913 - protein, 15 aa, Homo sapiens
  CDR3 for alpha chain variable domain of TCR clone 5957 (TRAV12-2, TRAJ53)
CAVNGGGGSNYKLTF

SEQ ID NO: 11914 - protein, 12 aa, Homo sapiens
  CDR3 for beta chain variable domain of TCR clone 5957 (TRBV11-2, TRBJ2-2)
CASSLGGGELFF

SEQ ID NO: 11915 - protein, 14 aa, Homo sapiens
  CDR3 for alpha chain variable domain of TCR clone 5958 (TRAV29/DV5, TRAJ49)
CAASAQNTGNQFYF

SEQ ID NO: 11916 - protein, 16 aa, Homo sapiens
  CDR3 for beta chain variable domain of TCR clone 5958 (TRBV12-4, TRBJ1-5)
CASRQPVEGSNQPQHF

SEQ ID NO: 11917 - protein, 12 aa, Homo sapiens
  CDR3 for alpha chain variable domain of TCR clone 5959 (TRAV12-3, TRAJ17)
CAMTLTGNKLTF

SEQ ID NO: 11918 - protein, 15 aa, Homo sapiens
  CDR3 for beta chain variable domain of TCR clone 5959 (TRBV20-1, TRBJ2-7)
CSARDRVYGMDEQYF

SEQ ID NO: 11919 - protein, 12 aa, Homo sapiens
  CDR3 for alpha chain variable domain of TCR clone 5960 (TRAV13-2, TRAJ23)
CAERHRGGKLIF

SEQ ID NO: 11920 - protein, 14 aa, Homo sapiens
  CDR3 for beta chain variable domain of TCR clone 5960 (TRBV20-1, TRBJ1-1)
CSAQTRIGGTEAFF

SEQ ID NO: 11921 - protein, 15 aa, Homo sapiens
  CDR3 for alpha chain variable domain of TCR clone 5961 (TRAV26-1, TRAJ24)
CIVPLTTDSWGKFQF

SEQ ID NO: 11922 - protein, 14 aa, Homo sapiens
  CDR3 for beta chain variable domain of TCR clone 5961 (TRBV10-3, TRBJ2-3)
CAISEKGLGDTQYF

SEQ ID NO: 11923 - protein, 14 aa, Homo sapiens
  CDR3 for alpha chain variable domain of TCR clone 5962 (TRAV26-1, TRAJ38)
CIADNAGNNRKLLW

SEQ ID NO: 11924 - protein, 13 aa, Homo sapiens
  CDR3 for beta chain variable domain of TCR clone 5962 (TRBV20-1, TRBJ1-1)
CSARGGGNTEAFF

SEQ ID NO: 11925 - protein, 13 aa, Homo sapiens
  CDR3 for alpha chain variable domain of TCR clone 5963 (TRAV23/DV6, TRAJ34)
CAAIENNTDKLIF

SEQ ID NO: 11926 - protein, 18 aa, Homo sapiens
  CDR3 for beta chain variable domain of TCR clone 5963 (TRBV20-1, TRBJ2-6)
CSAETTPTHGSGANVLTF

SEQ ID NO: 11927 - protein, 13 aa, Homo sapiens
  CDR3 for alpha chain variable domain of TCR clone 5964 (TRAV29/DV5, TRAJ31)
CAASRNNNARLMF

SEQ ID NO: 11928 - protein, 14 aa, Homo sapiens
  CDR3 for beta chain variable domain of TCR clone 5964 (TRBV20-1, TRBJ1-5)
CSARDVTGFQPQHF

SEQ ID NO: 11929 - protein, 17 aa, Homo sapiens
  CDR3 for alpha chain variable domain of TCR clone 5965 (TRAV3, TRAJ6)
CAVRDGPRAGGSYIPTF

SEQ ID NO: 11930 - protein, 14 aa, Homo sapiens
  CDR3 for beta chain variable domain of TCR clone 5965 (TRBV7-2, TRBJ2-7)
CASSPKTSFYEQYV

SEQ ID NO: 11931 - protein, 11 aa, Homo sapiens
  CDR3 for alpha chain variable domain of TCR clone 5966 (TRAV12-1, TRAJ43)
CVVIRNNDMRF

SEQ ID NO: 11932 - protein, 16 aa, Homo sapiens
  CDR3 for beta chain variable domain of TCR clone 5966 (TRBV14, TRBJ2-1)
CASSPRLAGEGNEQFF

SEQ ID NO: 11933 - protein, 13 aa, Homo sapiens
  CDR3 for alpha chain variable domain of TCR clone 5967 (TRAV27, TRAJ41)
CAGEENSGYALNF

SEQ ID NO: 11934 - protein, 14 aa, Homo sapiens
  CDR3 for beta chain variable domain of TCR clone 5967 (TRBV7-2, TRBJ1-1)
CASSFLTGTTEAFF

SEQ ID NO: 11935 - protein, 13 aa, Homo sapiens
  CDR3 for alpha chain variable domain of TCR clone 5968 (TRAV13-1, TRAJ10)
CAAAEGGGNKLTF

SEQ ID NO: 11936 - protein, 15 aa, Homo sapiens
  CDR3 for beta chain variable domain of TCR clone 5968 (TRBV7-8, TRBJ2-2)
CASSLDQGWTGELFF

SEQ ID NO: 11937 - protein, 13 aa, Homo sapiens
  CDR3 for alpha chain variable domain of TCR clone 5969 (TRAV12-1, TRAJ6)
CVVYPGGSYIPTF

SEQ ID NO: 11938 - protein, 13 aa, Homo sapiens
  CDR3 for beta chain variable domain of TCR clone 5969 (TRBV20-1, TRBJ1-3)
CSAGAYSGNTIYF

SEQ ID NO: 11939 - protein, 14 aa, Homo sapiens
  CDR3 for alpha chain variable domain of TCR clone 5970 (TRAV12-3, TRAJ10)
SHLPLTGGGNKLTF

SEQ ID NO: 11940 - protein, 16 aa, Homo sapiens
  CDR3 for beta chain variable domain of TCR clone 5970 (TRBV20-1, TRBJ2-6)
CSASSQGYDGANVLTF

SEQ ID NO: 11941 - protein, 12 aa, Homo sapiens
  CDR3 for alpha chain variable domain of TCR clone 5971 (TRAV12-3, TRAJ17)
CAMTLTGNKLTF

SEQ ID NO: 11942 - protein, 15 aa, Homo sapiens
  CDR3 for beta chain variable domain of TCR clone 5971 (TRBV20-1, TRBJ2-7)
CSARDRVSGMEEQYF

SEQ ID NO: 11943 - protein, 15 aa, Homo sapiens
  CDR3 for alpha chain variable domain of TCR clone 5972 (TRAV4, TRAJ39)
CLVGPNNNAGNMLTF

SEQ ID NO: 11944 - protein, 16 aa, Homo sapiens
  CDR3 for beta chain variable domain of TCR clone 5972 (TRBV27, TRBJ2-2)
CASSFRGLVRTGELFF

SEQ ID NO: 11945 - protein, 12 aa, Homo sapiens
  CDR3 for alpha chain variable domain of TCR clone 5973 (TRAV12-1, TRAJ40)
CVVYSGTYKYIF

SEQ ID NO: 11946 - protein, 13 aa, Homo sapiens
  CDR3 for beta chain variable domain of TCR clone 5973 (TRBV7-6, TRBJ2-1)
CQQLGGGADEQFF

SEQ ID NO: 11947 - protein, 11 aa, Homo sapiens
  CDR3 for alpha chain variable domain of TCR clone 5974 (TRAV29/DV5, TRAJ31)
CAAMNNARLMF

SEQ ID NO: 11948 - protein, 15 aa, Homo sapiens
  CDR3 for beta chain variable domain of TCR clone 5974 (TRBV20-1, TRBJ2-7)
CSARGPLAGGREQYF

SEQ ID NO: 11949 - protein, 15 aa, Homo sapiens
  CDR3 for alpha chain variable domain of TCR clone 5975 (TRAV8-2, TRAJ16)
CVVSDGFSDGQKLLF

SEQ ID NO: 11950 - protein, 13 aa, Homo sapiens
  CDR3 for beta chain variable domain of TCR clone 5975 (TRBV20-1, TRBJ1-1)
CSAPPGGHTEAFF

SEQ ID NO: 11951 - protein, 19 aa, Homo sapiens
  CDR3 for alpha chain variable domain of TCR clone 5976 (TRAV39, TRAJ43)
PCMTSLPPTSVPWANDMRF

SEQ ID NO: 11952 - protein, 15 aa, Homo sapiens
  CDR3 for beta chain variable domain of TCR clone 5976 (TRBV12-4, TRBJ2-5)
CASSPPTGLQETQYF

SEQ ID NO: 11953 - protein, 14 aa, Homo sapiens
  CDR3 for alpha chain variable domain of TCR clone 5977 (TRAV12-3, TRAJ10)
SHLPLTGGGNKLTF

SEQ ID NO: 11954 - protein, 15 aa, Homo sapiens
  CDR3 for beta chain variable domain of TCR clone 5977 (TRBV20-1, TRBJ1-6)
CSARAASSYNSPLHF

SEQ ID NO: 11955 - protein, 15 aa, Homo sapiens
  CDR3 for alpha chain variable domain of TCR clone 5978 (TRAV26-1, TRAJ37)
CIVRVADGNTGKLIF

SEQ ID NO: 11956 - protein, 14 aa, Homo sapiens
  CDR3 for beta chain variable domain of TCR clone 5978 (TRBV10-3, TRBJ2-2)
CATFGQLNTGELFF

SEQ ID NO: 11957 - protein, 15 aa, Homo sapiens
  CDR3 for alpha chain variable domain of TCR clone 5979 (TRAV21, TRAJ53)
CATLNSGGSNYKLTF

SEQ ID NO: 11958 - protein, 14 aa, Homo sapiens
  CDR3 for beta chain variable domain of TCR clone 5979 (TRBV7-2, TRBJ2-7)
CASSPKTSFYEQYF

SEQ ID NO: 11959 - protein, 14 aa, Homo sapiens
  CDR3 for alpha chain variable domain of TCR clone 5980 (TRAV1-2, TRAJ16)
CAVNRFSDGQKLLF

SEQ ID NO: 11960 - protein, 15 aa, Homo sapiens
  CDR3 for beta chain variable domain of TCR clone 5980 (TRBV24-1, TRBJ2-5)
CATSETTGAVGAQYF

SEQ ID NO: 11961 - protein, 11 aa, Homo sapiens
  CDR3 for alpha chain variable domain of TCR clone 5981 (TRAV12-2, TRAJ33)
CAVGSNYQLIW

SEQ ID NO: 11962 - protein, 16 aa, Homo sapiens
  CDR3 for beta chain variable domain of TCR clone 5981 (TRBV27, TRBJ2-7)
CASSSERRDSAYEQYF

SEQ ID NO: 11963 - protein, 15 aa, Homo sapiens
  CDR3 for alpha chain variable domain of TCR clone 5982 (TRAV26-1, TRAJ29)
CIVRVEGSGNKPLVF

SEQ ID NO: 11964 - protein, 15 aa, Homo sapiens
  CDR3 for beta chain variable domain of TCR clone 5982 (TRBV7-9, TRBJ1-5)
CASSQGHQPNQPQHF

SEQ ID NO: 11965 - protein, 14 aa, Homo sapiens
  CDR3 for alpha chain variable domain of TCR clone 5983 (TRAV1-2, TRAJ16)
CAVNRFSDGQKLLF

SEQ ID NO: 11966 - protein, 15 aa, Homo sapiens
  CDR3 for beta chain variable domain of TCR clone 5983 (TRBV5-1, TRBJ2-7)
CASSLNGGPAREQYF

SEQ ID NO: 11967 - protein, 17 aa, Homo sapiens
  CDR3 for alpha chain variable domain of TCR clone 5984 (TRAV3, TRAJ6)
CAVRDGPRAGGSHIPTF

SEQ ID NO: 11968 - protein, 14 aa, Homo sapiens
  CDR3 for beta chain variable domain of TCR clone 5984 (TRBV7-2, TRBJ2-7)
CASSPKTSFYEQYF

SEQ ID NO: 11969 - protein, 13 aa, Homo sapiens
  CDR3 for alpha chain variable domain of TCR clone 5985 (TRAV8-4, TRAJ36)
CAVSVAGANNLFF

SEQ ID NO: 11970 - protein, 15 aa, Homo sapiens
  CDR3 for beta chain variable domain of TCR clone 5985 (TRBV7-2, TRBJ2-5)
CASSLEGRGVETQYF

SEQ ID NO: 11971 - protein, 13 aa, Homo sapiens
  CDR3 for alpha chain variable domain of TCR clone 5986 (TRAV17, TRAJ26)
CATVDNYGQNFVF

SEQ ID NO: 11972 - protein, 14 aa, Homo sapiens
  CDR3 for beta chain variable domain of TCR clone 5986 (TRBV7-2, TRBJ1-1)
CASSFLTGTTEAFF

SEQ ID NO: 11973 - protein, 11 aa, Homo sapiens
  CDR3 for alpha chain variable domain of TCR clone 5987 (TRAV2, TRAJ13)
CASGGYQKVTF

SEQ ID NO: 11974 - protein, 15 aa, Homo sapiens
  CDR3 for beta chain variable domain of TCR clone 5987 (TRBV6-5, TRBJ2-1)
CASSYDAGAGNEQFF

SEQ ID NO: 11975 - protein, 13 aa, Homo sapiens
  CDR3 for alpha chain variable domain of TCR clone 5988 (TRAV27, TRAJ40)
CAGPPSGTYKYIF

SEQ ID NO: 11976 - protein, 14 aa, Homo sapiens
  CDR3 for beta chain variable domain of TCR clone 5988 (TRBV23-1, TRBJ2-5)
CASSFLRSQETQYF

SEQ ID NO: 11977 - protein, 12 aa, Homo sapiens
  CDR3 for alpha chain variable domain of TCR clone 5989 (TRAV12-3, TRAJ17)
CAMTLTGNKLTF

SEQ ID NO: 11978 - protein, 14 aa, Homo sapiens
  CDR3 for beta chain variable domain of TCR clone 5989 (TRBV12-4, TRBJ2-3)
CASSGQGSTDTQYF

SEQ ID NO: 11979 - protein, 11 aa, Homo sapiens
  CDR3 for alpha chain variable domain of TCR clone 5990 (TRAV3, TRAJ21)
CAVGNFNKLYF

SEQ ID NO: 11980 - protein, 16 aa, Homo sapiens
  CDR3 for beta chain variable domain of TCR clone 5990 (TRBV19, TRBJ2-1)
CASSKAGPSSYNEQFF

SEQ ID NO: 11981 - protein, 15 aa, Homo sapiens
  CDR3 for alpha chain variable domain of TCR clone 5991 (TRAV26-1, TRAJ29)
CIVRVEGAGNTPLVF

SEQ ID NO: 11982 - protein, 15 aa, Homo sapiens
  CDR3 for beta chain variable domain of TCR clone 5991 (TRBV7-9, TRBJ1-5)
CASSQGHQPNQPQHF

SEQ ID NO: 11983 - protein, 16 aa, Homo sapiens
  CDR3 for alpha chain variable domain of TCR clone 5992 (TRAV30, TRAJ24)
CGTEIVDADSWGKFQF

SEQ ID NO: 11984 - protein, 17 aa, Homo sapiens
  CDR3 for beta chain variable domain of TCR clone 5992 (TRBV7-2, TRBJ2-7)
CASSPFGSSGPSPEQYF

SEQ ID NO: 11985 - protein, 14 aa, Homo sapiens
  CDR3 for alpha chain variable domain of TCR clone 5993 (TRAV12-2, TRAJ4)
CAEDLSGGYNKLIL

SEQ ID NO: 11986 - protein, 13 aa, Homo sapiens
  CDR3 for beta chain variable domain of TCR clone 5993 (TRBV7-9, TRBJ1-2)
CASSLKQNYGYTF

SEQ ID NO: 11987 - protein, 14 aa, Homo sapiens
  CDR3 for alpha chain variable domain of TCR clone 5994 (TRAV23/DV6, TRAJ37)
CAASTSSNTGKLIF

SEQ ID NO: 11988 - protein, 12 aa, Homo sapiens
  CDR3 for beta chain variable domain of TCR clone 5994 (TRBV27, TRBJ2-2)
CASKLFTGELFF

SEQ ID NO: 11989 - protein, 14 aa, Homo sapiens
  CDR3 for alpha chain variable domain of TCR clone 5995 (TRAV8-3, TRAJ4)
CAVGAAGGYNKLIF

SEQ ID NO: 11990 - protein, 17 aa, Homo sapiens
  CDR3 for beta chain variable domain of TCR clone 5995 (TRBV13, TRBJ2-3)
CASSLSRVAGGRNTQYF

SEQ ID NO: 11991 - protein, 11 aa, Homo sapiens
  CDR3 for alpha chain variable domain of TCR clone 5996 (TRAV8-3, TRAJ4)
CAVGARPDFKR

SEQ ID NO: 11992 - protein, 13 aa, Homo sapiens
  CDR3 for beta chain variable domain of TCR clone 5996 (TRBV20-1, TRBJ1-2)
CSATGIQGSGYTF

SEQ ID NO: 11993 - protein, 14 aa, Homo sapiens
  CDR3 for alpha chain variable domain of TCR clone 5997 (TRAV1-2, TRAJ16)
CAVNRFSGGQKLLF

SEQ ID NO: 11994 - protein, 16 aa, Homo sapiens
  CDR3 for beta chain variable domain of TCR clone 5997 (TRBV9, TRBJ2-1)
CASSVGGGGNYNEQFF

SEQ ID NO: 11995 - protein, 13 aa, Homo sapiens
  CDR3 for alpha chain variable domain of TCR clone 5998 (TRAV2, TRAJ40)
CAVVTSGTYKYIF

SEQ ID NO: 11996 - protein, 14 aa, Homo sapiens
  CDR3 for beta chain variable domain of TCR clone 5998 (TRBV4-2, TRBJ2-1)
CASGLDRAYNEQFF

SEQ ID NO: 11997 - protein, 16 aa, Homo sapiens
  CDR3 for alpha chain variable domain of TCR clone 5999 (TRAV12-2, TRAJ37)
CAVKEKGSSNTGKLIF

SEQ ID NO: 11998 - protein, 12 aa, Homo sapiens
  CDR3 for beta chain variable domain of TCR clone 5999 (TRBV10-1, TRBJ1-5)
CASSDSNQPQHF

SEQ ID NO: 11999 - protein, 12 aa, Homo sapiens
  CDR3 for alpha chain variable domain of TCR clone 6000 (TRAV26-2, TRAJ21)
CILKGNFNKFYF

SEQ ID NO: 12000 - protein, 12 aa, Homo sapiens
  CDR3 for beta chain variable domain of TCR clone 6000 (TRBV12-4, TRBJ2-7)
CASSLGGYEQYF

SEQ ID NO: 12001 - protein, 19 aa, Homo sapiens
  CDR3 for alpha chain variable domain of TCR clone 6001 (TRAV1-1, TRAJ37)
CLLLLRCERSGSNTGKLIF

SEQ ID NO: 12002 - protein, 14 aa, Homo sapiens
  CDR3 for beta chain variable domain of TCR clone 6001 (TRBV29-1, TRBJ2-2)
CSALGGVGAGELFF

SEQ ID NO: 12003 - protein, 11 aa, Homo sapiens
  CDR3 for alpha chain variable domain of TCR clone 6002 (TRAV23/DV6, TRAJ21)
CAANNFNKFYF

SEQ ID NO: 12004 - protein, 12 aa, Homo sapiens
  CDR3 for beta chain variable domain of TCR clone 6002 (TRBV11-2, TRBJ2-1)
CASSPGNNEQFF

SEQ ID NO: 12005 - protein, 15 aa, Homo sapiens
  CDR3 for alpha chain variable domain of TCR clone 6003 (TRAV21, TRAJ40)
CAVRPQTSGTYKYIF

SEQ ID NO: 12006 - protein, 15 aa, Homo sapiens
  CDR3 for beta chain variable domain of TCR clone 6003 (TRBV5-1, TRBJ2-3)
CASSVTSGSTDTQYF

SEQ ID NO: 12007 - protein, 11 aa, Homo sapiens
  CDR3 for alpha chain variable domain of TCR clone 6004 (TRAV12-3, TRAJ27)
CAMANAGKSTF

SEQ ID NO: 12008 - protein, 13 aa, Homo sapiens
  CDR3 for beta chain variable domain of TCR clone 6004 (TRBV9, TRBJ2-7)
CASSVAEYYEQYF

SEQ ID NO: 12009 - protein, 14 aa, Homo sapiens
  CDR3 for alpha chain variable domain of TCR clone 6005 (TRAV19, TRAJ15)
CALSEDQAGTALIF

SEQ ID NO: 12010 - protein, 16 aa, Homo sapiens
  CDR3 for beta chain variable domain of TCR clone 6005 (TRBV7-9, TRBJ2-3)
CASSPWREVGTDTQYF

SEQ ID NO: 12011 - protein, 15 aa, Homo sapiens
  CDR3 for alpha chain variable domain of TCR clone 6006 (TRAV23/DV6, TRAJ12)
CAAIDLGAMDSSYKL

SEQ ID NO: 12012 - protein, 15 aa, Homo sapiens
  CDR3 for beta chain variable domain of TCR clone 6006 (TRBV12-4, TRBJ2-5)
CASTLNSGRGETQYF

SEQ ID NO: 12013 - protein, 14 aa, Homo sapiens
  CDR3 for alpha chain variable domain of TCR clone 6007 (TRAV9-2, TRAJ38)
CALSNAGNNRKLIW

SEQ ID NO: 12014 - protein, 15 aa, Homo sapiens
  CDR3 for beta chain variable domain of TCR clone 6007 (TRBV9, TRBJ2-1)
CASSLAGSSYNEQFF

SEQ ID NO: 12015 - protein, 14 aa, Homo sapiens
  CDR3 for alpha chain variable domain of TCR clone 6008 (TRAV12-1, TRAJ17)
CVVNYKAAGNKLTF

SEQ ID NO: 12016 - protein, 15 aa, Homo sapiens
  CDR3 for beta chain variable domain of TCR clone 6008 (TRBV18, TRBJ2-1)
CASSPPSASYNEQFF

SEQ ID NO: 12017 - protein, 18 aa, Homo sapiens
  CDR3 for alpha chain variable domain of TCR clone 6009 (TRAV13-1, TRAJ52)
CAAKNPNAGGTSYGKLTF

SEQ ID NO: 12018 - protein, 15 aa, Homo sapiens
  CDR3 for beta chain variable domain of TCR clone 6009 (TRBV9, TRBJ1-6)
CASSVAGTGDSPLHF

SEQ ID NO: 12019 - protein, 14 aa, Homo sapiens
  CDR3 for alpha chain variable domain of TCR clone 6010 (TRAV1-2, TRAJ8)
CAVREDTGFQKLVF

SEQ ID NO: 12020 - protein, 15 aa, Homo sapiens
  CDR3 for beta chain variable domain of TCR clone 6010 (TRBV20-1, TRBJ2-7)
CSAESGTSGAYEQYF

SEQ ID NO: 12021 - protein, 13 aa, Homo sapiens
  CDR3 for alpha chain variable domain of TCR clone 6011 (TRAV12-2, TRAJ40)
CAVAPSGTYKYIF

SEQ ID NO: 12022 - protein, 13 aa, Homo sapiens
  CDR3 for beta chain variable domain of TCR clone 6011 (TRBV11-3, TRBJ2-5)
CASSSGLQETQYF

SEQ ID NO: 12023 - protein, 12 aa, Homo sapiens
  CDR3 for alpha chain variable domain of TCR clone 6012 (TRAV12-3, TRAJ17)
CAMTLIGNKLTF

SEQ ID NO: 12024 - protein, 15 aa, Homo sapiens
  CDR3 for beta chain variable domain of TCR clone 6012 (TRBV20-1, TRBJ2-7)
CSARDRVSGMDEQYF

SEQ ID NO: 12025 - protein, 12 aa, Homo sapiens
  CDR3 for alpha chain variable domain of TCR clone 6013 (TRAV1-1, TRAJ8)
CAGGTGFQKLVF

SEQ ID NO: 12026 - protein, 13 aa, Homo sapiens
  CDR3 for beta chain variable domain of TCR clone 6013 (TRBV19, TRBJ1-2)
CASSQGQVYGYTF

SEQ ID NO: 12027 - protein, 12 aa, Homo sapiens
  CDR3 for alpha chain variable domain of TCR clone 6014 (TRAV1-2, TRAJ24)
CAVGGSWGKFQF

SEQ ID NO: 12028 - protein, 13 aa, Homo sapiens
  CDR3 for beta chain variable domain of TCR clone 6014 (TRBV12-4, TRBJ1-2)
CASSLRQGKGYTF

SEQ ID NO: 12029 - protein, 15 aa, Homo sapiens
  CDR3 for alpha chain variable domain of TCR clone 6015 (TRAV3, TRAJ22)
CAVRDRGGSARQLTF

SEQ ID NO: 12030 - protein, 12 aa, Homo sapiens
  CDR3 for beta chain variable domain of TCR clone 6015 (TRBV7-8, TRBJ2-1)
CASSLGHNEQFF

SEQ ID NO: 12031 - protein, 18 aa, Homo sapiens
  CDR3 for alpha chain variable domain of TCR clone 6016 (TRAV21, TRAJ45)
CCGGPQGGSGGGADGLTF

SEQ ID NO: 12032 - protein, 10 aa, Homo sapiens
  CDR3 for beta chain variable domain of TCR clone 6016 (TRBV4-1, TRBJ2-7)
SRGDRHEQYF

SEQ ID NO: 12033 - protein, 11 aa, Homo sapiens
  CDR3 for alpha chain variable domain of TCR clone 6017 (TRAV4, TRAJ31)
CLVGDNARLMF

SEQ ID NO: 12034 - protein, 15 aa, Homo sapiens
  CDR3 for beta chain variable domain of TCR clone 6017 (TRBV10-2, TRBJ2-6)
CASSEQGTGANVLTF

SEQ ID NO: 12035 - protein, 13 aa, Homo sapiens
  CDR3 for alpha chain variable domain of TCR clone 6018 (TRAV3, TRAJ13)
CAVRDGGYQKVTF

SEQ ID NO: 12036 - protein, 14 aa, Homo sapiens
  CDR3 for beta chain variable domain of TCR clone 6018 (TRBV15, TRBJ2-2)
CATSSGWNTGELFF

SEQ ID NO: 12037 - protein, 15 aa, Homo sapiens
  CDR3 for alpha chain variable domain of TCR clone 6019 (TRAV8-3, TRAJ45)
CASSYSGGGADGPTF

SEQ ID NO: 12038 - protein, 13 aa, Homo sapiens
  CDR3 for beta chain variable domain of TCR clone 6019 (TRBV10-3, TRBJ2-7)
CASKLAVNYEQYF

SEQ ID NO: 12039 - protein, 15 aa, Homo sapiens
  CDR3 for alpha chain variable domain of TCR clone 6020 (TRAV2, TRAJ9)
CAVEDRGTGGFKTIF

SEQ ID NO: 12040 - protein, 17 aa, Homo sapiens
  CDR3 for beta chain variable domain of TCR clone 6020 (TRBV4-3, TRBJ2-1)
CASSQFSSGRASGEQFF

SEQ ID NO: 12041 - protein, 12 aa, Homo sapiens
  CDR3 for alpha chain variable domain of TCR clone 6021 (TRAV29/DV5, TRAJ27)
CAASTNAGKSTF

SEQ ID NO: 12042 - protein, 13 aa, Homo sapiens
  CDR3 for beta chain variable domain of TCR clone 6021 (TRBV6-5, TRBJ2-7)
CASSYSGQYEQYF

SEQ ID NO: 12043 - protein, 18 aa, Homo sapiens
  CDR3 for alpha chain variable domain of TCR clone 6022 (TRAV21, TRAJ52)
CAVRPSPAGGTSYGKLTF

SEQ ID NO: 12044 - protein, 14 aa, Homo sapiens
  CDR3 for beta chain variable domain of TCR clone 6022 (TRBV28, TRBJ1-1)
CASSPRTRWAEAFF

SEQ ID NO: 12045 - protein, 14 aa, Homo sapiens
  CDR3 for alpha chain variable domain of TCR clone 6023 (TRAV26-1, TRAJ38)
CIADNAGNNRKLIW

SEQ ID NO: 12046 - protein, 15 aa, Homo sapiens
  CDR3 for beta chain variable domain of TCR clone 6023 (TRBV9, TRBJ1-6)
CASSVAGTGDSPLHF

SEQ ID NO: 12047 - protein, 11 aa, Homo sapiens
  CDR3 for alpha chain variable domain of TCR clone 6024 (TRAV17, TRAJ9)
CATTGGFKTIF

SEQ ID NO: 12048 - protein, 13 aa, Homo sapiens
  CDR3 for beta chain variable domain of TCR clone 6024 (TRBV6-5, TRBJ1-1)
VTSGTPPVGEAFF

SEQ ID NO: 12049 - protein, 12 aa, Homo sapiens
  CDR3 for alpha chain variable domain of TCR clone 6025 (TRAV25, TRAJ53)
CQSGGSNYKLTF

SEQ ID NO: 12050 - protein, 12 aa, Homo sapiens
  CDR3 for beta chain variable domain of TCR clone 6025 (TRBV14, TRBJ2-7)
CASSSLKGEQYF

SEQ ID NO: 12051 - protein, 18 aa, Homo sapiens
  CDR3 for alpha chain variable domain of TCR clone 6026 (TRAV13-1, TRAJ52)
CAASKRSAGGTSYGKLTF

SEQ ID NO: 12052 - protein, 12 aa, Homo sapiens
  CDR3 for beta chain variable domain of TCR clone 6026 (TRBV20-1, TRBJ2-3)
CSARVGTDTQYF

SEQ ID NO: 12053 - protein, 17 aa, Homo sapiens
  CDR3 for alpha chain variable domain of TCR clone 6027 (TRAV3, TRAJ6)
CAVRDGPRAGGSYIPKF

SEQ ID NO: 12054 - protein, 14 aa, Homo sapiens
  CDR3 for beta chain variable domain of TCR clone 6027 (TRBV7-2, TRBJ2-7)
CASSPKTSFYEQYF

SEQ ID NO: 12055 - protein, 14 aa, Homo sapiens
  CDR3 for alpha chain variable domain of TCR clone 6028 (TRAV9-2, TRAJ39)
CALYIYNAGNMLTF

SEQ ID NO: 12056 - protein, 15 aa, Homo sapiens
  CDR3 for beta chain variable domain of TCR clone 6028 (TRBV27, TRBJ1-5)
CASSLGTGFDQPQHF

SEQ ID NO: 12057 - protein, 11 aa, Homo sapiens
  CDR3 for alpha chain variable domain of TCR clone 6029 (TRAV2, TRAJ13)
CASGGYQKVTF

SEQ ID NO: 12058 - protein, 13 aa, Homo sapiens
  CDR3 for beta chain variable domain of TCR clone 6029 (TRBV6-1, TRBJ2-5)
CASGYQSVETQYF

SEQ ID NO: 12059 - protein, 14 aa, Homo sapiens
  CDR3 for alpha chain variable domain of TCR clone 6030 (TRAV38-1, TRAJ48)
CAFMANFGNEKLTF

SEQ ID NO: 12060 - protein, 16 aa, Homo sapiens
  CDR3 for beta chain variable domain of TCR clone 6030 (TRBV4-1, TRBJ2-7)
CASRPSGGGADNEQYF

SEQ ID NO: 12061 - protein, 12 aa, Homo sapiens
  CDR3 for alpha chain variable domain of TCR clone 6031 (TRAV8-6, TRAJ43)
CAVRYNNNDMRF

SEQ ID NO: 12062 - protein, 17 aa, Homo sapiens
  CDR3 for beta chain variable domain of TCR clone 6031 (TRBV13, TRBJ2-3)
CASSLSRVAGGRNTQYF

SEQ ID NO: 12063 - protein, 14 aa, Homo sapiens
  CDR3 for alpha chain variable domain of TCR clone 6032 (TRAV13-1, TRAJ44)
CAAKATGTASKLTF

SEQ ID NO: 12064 - protein, 16 aa, Homo sapiens
  CDR3 for beta chain variable domain of TCR clone 6032 (TRBV19, TRBJ2-1)
CASSKAGPSSYNEQFF

SEQ ID NO: 12065 - protein, 13 aa, Homo sapiens
  CDR3 for alpha chain variable domain of TCR clone 6033 (TRAV17, TRAJ9)
CATDYTGGFKTIF

SEQ ID NO: 12066 - protein, 13 aa, Homo sapiens
  CDR3 for beta chain variable domain of TCR clone 6033 (TRBV10-3, TRBJ2-7)
CAISEKGGYEQYF

SEQ ID NO: 12067 - protein, 13 aa, Homo sapiens
  CDR3 for alpha chain variable domain of TCR clone 6034 (TRAV12-1, TRAJ10)
CVVSTGGGNKLTF

SEQ ID NO: 12068 - protein, 16 aa, Homo sapiens
  CDR3 for beta chain variable domain of TCR clone 6034 (TRBV12-4, TRBJ1-5)
CASSRPVGGSNQPQHF

SEQ ID NO: 12069 - protein, 12 aa, Homo sapiens
  CDR3 for alpha chain variable domain of TCR clone 6035 (TRAV8-3, TRAJ26)
CAGDNYGQNFVF

SEQ ID NO: 12070 - protein, 14 aa, Homo sapiens
  CDR3 for beta chain variable domain of TCR clone 6035 (TRBV19, TRBJ2-1)
CASPTFVLSGEQFF

SEQ ID NO: 12071 - protein, 13 aa, Homo sapiens
  CDR3 for alpha chain variable domain of TCR clone 6036 (TRAV21, TRAJ20)
CAVGLRVDYKLSF

SEQ ID NO: 12072 - protein, 16 aa, Homo sapiens
  CDR3 for beta chain variable domain of TCR clone 6036 (TRBV6-1, TRBJ2-5)
CASSETLDRGAETQYF

SEQ ID NO: 12073 - protein, 14 aa, Homo sapiens
  CDR3 for alpha chain variable domain of TCR clone 6037 (TRAV12-3, TRAJ12)
CASVRMDSSYKLIF

SEQ ID NO: 12074 - protein, 15 aa, Homo sapiens
  CDR3 for beta chain variable domain of TCR clone 6037 (TRBV27, TRBJ2-7)
CASSPPGQGTYEQYF

SEQ ID NO: 12075 - protein, 13 aa, Homo sapiens
  CDR3 for alpha chain variable domain of TCR clone 6038 (TRAV2, TRAJ40)
CAVVTSGTYKYIF

SEQ ID NO: 12076 - protein, 14 aa, Homo sapiens
  CDR3 for beta chain variable domain of TCR clone 6038 (TRBV19, TRBJ2-1)
CAGPTFVLSGEQFF

SEQ ID NO: 12077 - protein, 13 aa, Homo sapiens
  CDR3 for alpha chain variable domain of TCR clone 6039 (TRAV12-1, TRAJ33)
CGDAPDSNYQLIW

SEQ ID NO: 12078 - protein, 15 aa, Homo sapiens
  CDR3 for beta chain variable domain of TCR clone 6039 (TRBV7-2, TRBJ2-2)
CASRRPGQNTGELFF

SEQ ID NO: 12079 - protein, 13 aa, Homo sapiens
  CDR3 for alpha chain variable domain of TCR clone 6040 (TRAV13-1, TRAJ35)
CAASLGFGNVLHC

SEQ ID NO: 12080 - protein, 15 aa, Homo sapiens
  CDR3 for beta chain variable domain of TCR clone 6040 (TRBV20-1, TRBJ2-7)
CSARDRVSGMDEQYF

SEQ ID NO: 12081 - protein, 15 aa, Homo sapiens
  CDR3 for alpha chain variable domain of TCR clone 6041 (TRAV12-2, TRAJ43)
CAFDMRFGAGTRLTV

SEQ ID NO: 12082 - protein, 15 aa, Homo sapiens
  CDR3 for beta chain variable domain of TCR clone 6041 (TRBV28, TRBJ2-1)
CASSGLAEVDNEQFF

SEQ ID NO: 12083 - protein, 13 aa, Homo sapiens
  CDR3 for alpha chain variable domain of TCR clone 6042 (TRAV12-1, TRAJ39)
CVVPQRAGNMLTF

SEQ ID NO: 12084 - protein, 14 aa, Homo sapiens
  CDR3 for beta chain variable domain of TCR clone 6042 (TRBV13, TRBJ2-5)
CASSLERVGETQYF

SEQ ID NO: 12085 - protein, 14 aa, Homo sapiens
  CDR3 for alpha chain variable domain of TCR clone 6043 (TRAV8-3, TRAJ13)
CAVGAQEGYQKVTF

SEQ ID NO: 12086 - protein, 15 aa, Homo sapiens
  CDR3 for beta chain variable domain of TCR clone 6043 (TRBV3-1, TRBJ1-1)
CASKMRATMNTEAFF

SEQ ID NO: 12087 - protein, 15 aa, Homo sapiens
  CDR3 for alpha chain variable domain of TCR clone 6044 (TRAV17, TRAJ4)
CATGTWSGGYNKLIF

SEQ ID NO: 12088 - protein, 16 aa, Homo sapiens
  CDR3 for beta chain variable domain of TCR clone 6044 (TRBV20-1, TRBJ1-4)
CSAPGQGLLTNEKLFF

SEQ ID NO: 12089 - protein, 13 aa, Homo sapiens
  CDR3 for alpha chain variable domain of TCR clone 6045 (TRAV21, TRAJ57)
CAVTQGGSEKLVF

SEQ ID NO: 12090 - protein, 16 aa, Homo sapiens
  CDR3 for beta chain variable domain of TCR clone 6045 (TRBV29-1, TRBJ2-7)
CSVEGAEDGTAYEQYF

SEQ ID NO: 12091 - protein, 15 aa, Homo sapiens
  CDR3 for alpha chain variable domain of TCR clone 6046 (TRAV21, TRAJ38)
CAVRQDAGNNRKLIW

SEQ ID NO: 12092 - protein, 11 aa, Homo sapiens
  CDR3 for beta chain variable domain of TCR clone 6046 (TRBV12-4, TRBJ2-3)
CASTATDTQYF

SEQ ID NO: 12093 - protein, 19 aa, Homo sapiens
  CDR3 for alpha chain variable domain of TCR clone 6047 (TRAV1-1, TRAJ13)
CLLLLRCEGESGGYQKVTF

SEQ ID NO: 12094 - protein, 19 aa, Homo sapiens
  CDR3 for beta chain variable domain of TCR clone 6047 (TRBV14, TRBJ2-1)
CASSQDQLWEAPEYNEQFF

SEQ ID NO: 12095 - protein, 14 aa, Homo sapiens
  CDR3 for alpha chain variable domain of TCR clone 6048 (TRAV26-1, TRAJ8)
CIVRVDTGFQRLVF

SEQ ID NO: 12096 - protein, 15 aa, Homo sapiens
  CDR3 for beta chain variable domain of TCR clone 6048 (TRBV10-2, TRBJ2-7)
CASWNRGQATYERYF

SEQ ID NO: 12097 - protein, 11 aa, Homo sapiens
  CDR3 for alpha chain variable domain of TCR clone 6049 (TRAV2, TRAJ13)
CASVGYQKVTF

SEQ ID NO: 12098 - protein, 16 aa, Homo sapiens
  CDR3 for beta chain variable domain of TCR clone 6049 (TRBV6-1, TRBJ2-5)
CASSETLDRGAETQYF

SEQ ID NO: 12099 - protein, 14 aa, Homo sapiens
  CDR3 for alpha chain variable domain of TCR clone 6050 (TRAV14/DV4, TRAJ32)
SNVLPLTPTNKLIF

SEQ ID NO: 12100 - protein, 14 aa, Homo sapiens
  CDR3 for beta chain variable domain of TCR clone 6050 (TRBV24-1, TRBJ1-5)
CATSDGQLGQPQHF

SEQ ID NO: 12101 - protein, 14 aa, Homo sapiens
  CDR3 for alpha chain variable domain of TCR clone 6051 (TRAV38-1, TRAJ43)
CAFMKHNNNNDMRF

SEQ ID NO: 12102 - protein, 14 aa, Homo sapiens
  CDR3 for beta chain variable domain of TCR clone 6051 (TRBV5-4, TRBJ1-1)
CASSLDSRRDEAFF

SEQ ID NO: 12103 - protein, 11 aa, Homo sapiens
  CDR3 for alpha chain variable domain of TCR clone 6052 (TRAV21, TRAJ34)
CAVTNTDKLIF

SEQ ID NO: 12104 - protein, 16 aa, Homo sapiens
  CDR3 for beta chain variable domain of TCR clone 6052 (TRBV6-1, TRBJ2-5)
CASSETLDRGAETQYF

SEQ ID NO: 12105 - protein, 11 aa, Homo sapiens
  CDR3 for alpha chain variable domain of TCR clone 6053 (TRAV1-1, TRAJ23)
CAVRQGGKLIF

SEQ ID NO: 12106 - protein, 20 aa, Homo sapiens
  CDR3 for beta chain variable domain of TCR clone 6053 (TRBV7-8, TRBJ2-2)
CASSHLFPGPAIHITGELFF

SEQ ID NO: 12107 - protein, 14 aa, Homo sapiens
  CDR3 for alpha chain variable domain of TCR clone 6054 (TRAV12-1, TRAJ4)
CVGDFSGGYNKLIF

SEQ ID NO: 12108 - protein, 15 aa, Homo sapiens
  CDR3 for beta chain variable domain of TCR clone 6054 (TRBV4-2, TRBJ2-7)
CASSQVDRSSYEQYF

SEQ ID NO: 12109 - protein, 15 aa, Homo sapiens
  CDR3 for alpha chain variable domain of TCR clone 6055 (TRAV26-1, TRAJ37)
CIVRLGSGNTGKLIF

SEQ ID NO: 12110 - protein, 13 aa, Homo sapiens
  CDR3 for beta chain variable domain of TCR clone 6055 (TRBV6-6, TRBJ2-7)
CASSSSGSYEQYF

SEQ ID NO: 12111 - protein, 14 aa, Homo sapiens
  CDR3 for alpha chain variable domain of TCR clone 6056 (TRAV26-1, TRAJ16)
CIVRVPSDGQKLLF

SEQ ID NO: 12112 - protein, 17 aa, Homo sapiens
  CDR3 for beta chain variable domain of TCR clone 6056 (TRBV20-1, TRBJ2-1)
CSASSSGLAGSYNEQFF

SEQ ID NO: 12113 - protein, 14 aa, Homo sapiens
  CDR3 for alpha chain variable domain of TCR clone 6057 (TRAV1-2, TRAJ8)
CAVREDTGFQKPVF

SEQ ID NO: 12114 - protein, 15 aa, Homo sapiens
  CDR3 for beta chain variable domain of TCR clone 6057 (TRBV6-3, TRBJ2-7)
CASSSPGTVFYEQYF

SEQ ID NO: 12115 - protein, 12 aa, Homo sapiens
  CDR3 for alpha chain variable domain of TCR clone 6058 (TRAV12-1, TRAJ16)
CVVFRDGQKLLF

SEQ ID NO: 12116 - protein, 16 aa, Homo sapiens
  CDR3 for beta chain variable domain of TCR clone 6058 (TRBV27, TRBJ2-5)
CASSYGPGGQKETQYF

SEQ ID NO: 12117 - protein, 15 aa, Homo sapiens
  CDR3 for alpha chain variable domain of TCR clone 6059 (TRAV1-1, TRAJ36)
CAVRPQGTGANNLFF

SEQ ID NO: 12118 - protein, 17 aa, Homo sapiens
  CDR3 for beta chain variable domain of TCR clone 6059 (TRBV20-1, TRBJ2-7)
CSASGTSGRVGESEQYF

SEQ ID NO: 12119 - protein, 15 aa, Homo sapiens
  CDR3 for alpha chain variable domain of TCR clone 6060 (TRAV3, TRAJ20)
CAVRDIKLSDYKPSF

SEQ ID NO: 12120 - protein, 15 aa, Homo sapiens
  CDR3 for beta chain variable domain of TCR clone 6060 (TRBV7-9, TRBJ1-6)
CASSSPGRGNSPLHF

SEQ ID NO: 12121 - protein, 14 aa, Homo sapiens
  CDR3 for alpha chain variable domain of TCR clone 6061 (TRAV12-2, TRAJ17)
CAVLFKAAGNKLTF

SEQ ID NO: 12122 - protein, 20 aa, Homo sapiens
  CDR3 for beta chain variable domain of TCR clone 6061 (TRBV7-8, TRBJ2-2)
CASSHLFPGPTIHITGELFF

SEQ ID NO: 12123 - protein, 14 aa, Homo sapiens
  CDR3 for alpha chain variable domain of TCR clone 6062 (TRAV12-2, TRAJ13)
CAVKKTGGYQKVTF

SEQ ID NO: 12124 - protein, 16 aa, Homo sapiens
  CDR3 for beta chain variable domain of TCR clone 6062 (TRBV9, TRBJ1-2)
CASSVEEKVSPYGYTF

SEQ ID NO: 12125 - protein, 11 aa, Homo sapiens
  CDR3 for alpha chain variable domain of TCR clone 6063 (TRAV2, TRAJ33)
CAVESNYQLIW

SEQ ID NO: 12126 - protein, 16 aa, Homo sapiens
  CDR3 for beta chain variable domain of TCR clone 6063 (TRBV20-1, TRBJ1-4)
CSAPGQGLLTNEKLFF

SEQ ID NO: 12127 - protein, 16 aa, Homo sapiens
  CDR3 for alpha chain variable domain of TCR clone 6064 (TRAV25, TRAJ52)
CAGPRAGGTSYGKLTF

SEQ ID NO: 12128 - protein, 15 aa, Homo sapiens
  CDR3 for beta chain variable domain of TCR clone 6064 (TRBV10-3, TRBJ2-2)
CAIYTGGTGTGELFF

SEQ ID NO: 12129 - protein, 11 aa, Homo sapiens
  CDR3 for alpha chain variable domain of TCR clone 6065 (TRAV9-2, TRAJ11)
CVPAGYSTLTF

SEQ ID NO: 12130 - protein, 14 aa, Homo sapiens
  CDR3 for beta chain variable domain of TCR clone 6065 (TRBV2, TRBJ2-7)
CASSLTSGGYEQYF

SEQ ID NO: 12131 - protein, 14 aa, Homo sapiens
  CDR3 for alpha chain variable domain of TCR clone 6066 (TRAV14/DV4, TRAJ9)
CAMRESTGGFKTIF

SEQ ID NO: 12132 - protein, 19 aa, Homo sapiens
  CDR3 for beta chain variable domain of TCR clone 6066 (TRBV19, TRBJ2-2)
CASTRPGLAGGRVTGELFF

SEQ ID NO: 12133 - protein, 13 aa, Homo sapiens
  CDR3 for alpha chain variable domain of TCR clone 6067 (TRAV21, TRAJ15)
CAVPNQAGTALIF

SEQ ID NO: 12134 - protein, 15 aa, Homo sapiens
  CDR3 for beta chain variable domain of TCR clone 6067 (TRBV12-4, TRBJ2-7)
CASSRGLAGTYEQYF

SEQ ID NO: 12135 - protein, 14 aa, Homo sapiens
  CDR3 for alpha chain variable domain of TCR clone 6068 (TRAV26-1, TRAJ38)
CIADNAGNNRKLIW

SEQ ID NO: 12136 - protein, 14 aa, Homo sapiens
  CDR3 for beta chain variable domain of TCR clone 6068 (TRBV20-1, TRBJ1-3)
CSASPTGAGNTIYF

SEQ ID NO: 12137 - protein, 17 aa, Homo sapiens
  CDR3 for alpha chain variable domain of TCR clone 6069 (TRAV23/DV6, TRAJ28)
CAALLAYSGAGSYQLTF

SEQ ID NO: 12138 - protein, 13 aa, Homo sapiens
  CDR3 for beta chain variable domain of TCR clone 6069 (TRBV4-2, TRBJ2-3)
CASSQGNTDTQYF

SEQ ID NO: 12139 - protein, 14 aa, Homo sapiens
  CDR3 for alpha chain variable domain of TCR clone 6070 (TRAV26-1, TRAJ38)
CIADNAGNNRKLIW

SEQ ID NO: 12140 - protein, 13 aa, Homo sapiens
  CDR3 for beta chain variable domain of TCR clone 6070 (TRBV20-1, TRBJ2-1)
CSARSSPRDEQFF

SEQ ID NO: 12141 - protein, 12 aa, Homo sapiens
  CDR3 for alpha chain variable domain of TCR clone 6071 (TRAV12-3, TRAJ17)
CAMTLTGNKLTF

SEQ ID NO: 12142 - protein, 15 aa, Homo sapiens
  CDR3 for beta chain variable domain of TCR clone 6071 (TRBV20-1, TRBJ2-7)
CSARDRVSGMDKQYF

SEQ ID NO: 12143 - protein, 16 aa, Homo sapiens
  CDR3 for alpha chain variable domain of TCR clone 6072 (TRAV12-3, TRAJ53)
CAMSPGSGGSNHKLTF

SEQ ID NO: 12144 - protein, 11 aa, Homo sapiens
  CDR3 for beta chain variable domain of TCR clone 6072 (TRBV29-1, TRBJ2-5)
CSEDRTGTQYF

SEQ ID NO: 12145 - protein, 12 aa, Homo sapiens
  CDR3 for alpha chain variable domain of TCR clone 6073 (TRAV13-2, TRAJ54)
CGAHEGAQKLVF

SEQ ID NO: 12146 - protein, 16 aa, Homo sapiens
  CDR3 for beta chain variable domain of TCR clone 6073 (TRBV12-5, TRBJ2-5)
CASGPRTSGNQETQYF

SEQ ID NO: 12147 - protein, 12 aa, Homo sapiens
  CDR3 for alpha chain variable domain of TCR clone 6074 (TRAV16, TRAJ27)
CALNTNAGKSTF

SEQ ID NO: 12148 - protein, 14 aa, Homo sapiens
  CDR3 for beta chain variable domain of TCR clone 6074 (TRBV5-1, TRBJ2-7)
CASSLGVRAYEQYF

SEQ ID NO: 12149 - protein, 18 aa, Homo sapiens
  CDR3 for alpha chain variable domain of TCR clone 6075 (TRAV21, TRAJ52)
CAVRPSPAGGTSYGKLTF

SEQ ID NO: 12150 - protein, 17 aa, Homo sapiens
  CDR3 for beta chain variable domain of TCR clone 6075 (TRBV13, TRBJ2-3)
CASSPSRVAGGRNTQYF

SEQ ID NO: 12151 - protein, 12 aa, Homo sapiens
  CDR3 for alpha chain variable domain of TCR clone 6076 (TRAV1-2, TRAJ39)
TSLLYAGNMLTF

SEQ ID NO: 12152 - protein, 16 aa, Homo sapiens
  CDR3 for beta chain variable domain of TCR clone 6076 (TRBV11-2, TRBJ2-1)
CASSLLLLSSYNEQFF

SEQ ID NO: 12153 - protein, 14 aa, Homo sapiens
  CDR3 for alpha chain variable domain of TCR clone 6077 (TRAV12-2, TRAJ17)
CAVLFKAAGNKLTF

SEQ ID NO: 12154 - protein, 15 aa, Homo sapiens
  CDR3 for beta chain variable domain of TCR clone 6077 (TRBV5-1, TRBJ2-1)
CASSPPRAPYNEQFF

SEQ ID NO: 12155 - protein, 16 aa, Homo sapiens
  CDR3 for alpha chain variable domain of TCR clone 6078 (TRAV30, TRAJ24)
CGTEIVDADSWGKFQF

SEQ ID NO: 12156 - protein, 14 aa, Homo sapiens
  CDR3 for beta chain variable domain of TCR clone 6078 (TRBV7-2, TRBJ2-7)
CASRSQGAAYEQYF

SEQ ID NO: 12157 - protein, 12 aa, Homo sapiens
  CDR3 for alpha chain variable domain of TCR clone 6079 (TRAV12-1, TRAJ6)
CVVSERSYIPTF

SEQ ID NO: 12158 - protein, 13 aa, Homo sapiens
  CDR3 for beta chain variable domain of TCR clone 6079 (TRBV14, TRBJ1-2)
CASSQQGYYGYTF

SEQ ID NO: 12159 - protein, 15 aa, Homo sapiens
  CDR3 for alpha chain variable domain of TCR clone 6080 (TRAV23/DV6, TRAJ38)
CAASGGAGNNRKLIW

SEQ ID NO: 12160 - protein, 13 aa, Homo sapiens
  CDR3 for beta chain variable domain of TCR clone 6080 (TRBV7-2, TRBJ1-2)
CASSLPGLYGYTF

SEQ ID NO: 12161 - protein, 12 aa, Homo sapiens
  CDR3 for alpha chain variable domain of TCR clone 6081 (TRAV12-3, TRAJ17)
CAMTLTDNKLTF

SEQ ID NO: 12162 - protein, 15 aa, Homo sapiens
  CDR3 for beta chain variable domain of TCR clone 6081 (TRBV20-1, TRBJ2-7)
CSARDRVSGMDEQYF

SEQ ID NO: 12163 - protein, 14 aa, Homo sapiens
  CDR3 for alpha chain variable domain of TCR clone 6082 (TRAV1-2, TRAJ16)
CAVNRFSDGQKLLF

SEQ ID NO: 12164 - protein, 14 aa, Homo sapiens
  CDR3 for beta chain variable domain of TCR clone 6082 (TRBV5-5, TRBJ1-2)
CASSLDPYNYGYTF

SEQ ID NO: 12165 - protein, 13 aa, Homo sapiens
  CDR3 for alpha chain variable domain of TCR clone 6083 (TRAV13-1, TRAJ23)
CAASGRGGGKLIF

SEQ ID NO: 12166 - protein, 13 aa, Homo sapiens
  CDR3 for beta chain variable domain of TCR clone 6083 (TRBV7-2, TRBJ1-5)
CASSLAEGGANEF

SEQ ID NO: 12167 - protein, 15 aa, Homo sapiens
  CDR3 for alpha chain variable domain of TCR clone 6084 (TRAV13-1, TRAJ5)
CAVYIRDTGRRALTF

SEQ ID NO: 12168 - protein, 16 aa, Homo sapiens
  CDR3 for beta chain variable domain of TCR clone 6084 (TRBV12-4, TRBJ2-1)
CASTEQGMDRSNEQFF

SEQ ID NO: 12169 - protein, 13 aa, Homo sapiens
  CDR3 for alpha chain variable domain of TCR clone 6085 (TRAV3, TRAJ21)
CAVREPDFNKFYF

SEQ ID NO: 12170 - protein, 13 aa, Homo sapiens
  CDR3 for beta chain variable domain of TCR clone 6085 (TRBV12-4, TRBJ1-2)
CASSYRVNYGYTF

SEQ ID NO: 12171 - protein, 12 aa, Homo sapiens
  CDR3 for alpha chain variable domain of TCR clone 6086 (TRAV12-3, TRAJ17)
SAMTLTGNKLTF

SEQ ID NO: 12172 - protein, 15 aa, Homo sapiens
  CDR3 for beta chain variable domain of TCR clone 6086 (TRBV20-1, TRBJ2-7)
CSARDRVSGMDEQYF

SEQ ID NO: 12173 - protein, 14 aa, Homo sapiens
  CDR3 for alpha chain variable domain of TCR clone 6087 (TRAV29/DV5, TRAJ49)
CAASLSNTGNQFYF

SEQ ID NO: 12174 - protein, 21 aa, Homo sapiens
  CDR3 for beta chain variable domain of TCR clone 6087 (TRBV9, TRBJ2-5)
CASRGRLAGGPEDPVLRARHA

SEQ ID NO: 12175 - protein, 14 aa, Homo sapiens
  CDR3 for alpha chain variable domain of TCR clone 6088 (TRAV12-2, TRAJ13)
CAVKKTGGYRKVTF

SEQ ID NO: 12176 - protein, 15 aa, Homo sapiens
  CDR3 for beta chain variable domain of TCR clone 6088 (TRBV27, TRBJ2-1)
CASSNGGGSSNEQFF

SEQ ID NO: 12177 - protein, 14 aa, Homo sapiens
  CDR3 for alpha chain variable domain of TCR clone 6089 (TRAV8-3, TRAJ22)
CAVVVSGSARQLTF

SEQ ID NO: 12178 - protein, 13 aa, Homo sapiens
  CDR3 for beta chain variable domain of TCR clone 6089 (TRBV4-2, TRBJ2-5)
CASSQGGWQTQYF

SEQ ID NO: 12179 - protein, 10 aa, Homo sapiens
  CDR3 for alpha chain variable domain of TCR clone 6090 (TRAV8-4, TRAJ30)
VFYRDDKIIF

SEQ ID NO: 12180 - protein, 16 aa, Homo sapiens
  CDR3 for beta chain variable domain of TCR clone 6090 (TRBV20-1, TRBJ1-5)
CSAELPGQQTNQPQHF

SEQ ID NO: 12181 - protein, 17 aa, Homo sapiens
  CDR3 for alpha chain variable domain of TCR clone 6091 (TRAV3, TRAJ6)
CAVRDGPRAGGSYTPTF

SEQ ID NO: 12182 - protein, 14 aa, Homo sapiens
  CDR3 for beta chain variable domain of TCR clone 6091 (TRBV7-2, TRBJ2-7)
CASSPKTSFYEQYF

SEQ ID NO: 12183 - protein, 15 aa, Homo sapiens
  CDR3 for alpha chain variable domain of TCR clone 6092 (TRAV8-2, TRAJ16)
CVVSDGFSDGQKLLF

SEQ ID NO: 12184 - protein, 12 aa, Homo sapiens
  CDR3 for beta chain variable domain of TCR clone 6092 (TRBV12-4, TRBJ2-7)
CASSLGGYEQYF

SEQ ID NO: 12185 - protein, 13 aa, Homo sapiens
  CDR3 for alpha chain variable domain of TCR clone 6093 (TRAV12-1, TRAJ35)
CVVRGGFGNVLHC

SEQ ID NO: 12186 - protein, 13 aa, Homo sapiens
  CDR3 for beta chain variable domain of TCR clone 6093 (TRBV19, TRBJ2-1)
CASTNSDVGEQFF

SEQ ID NO: 12187 - protein, 13 aa, Homo sapiens
  CDR3 for alpha chain variable domain of TCR clone 6094 (TRAV29/DV5, TRAJ31)
CAASRNNNARLMF

SEQ ID NO: 12188 - protein, 15 aa, Homo sapiens
  CDR3 for beta chain variable domain of TCR clone 6094 (TRBV27, TRBJ2-1)
CASSNGGGSSNEQFF

SEQ ID NO: 12189 - protein, 18 aa, Homo sapiens
  CDR3 for alpha chain variable domain of TCR clone 6095 (TRAV21, TRAJ52)
CAVRPSPAGGTSYGKLTF

SEQ ID NO: 12190 - protein, 17 aa, Homo sapiens
  CDR3 for beta chain variable domain of TCR clone 6095 (TRBV13, TRBJ2-3)
CASSLARVAGGRNTQYF

SEQ ID NO: 12191 - protein, 16 aa, Homo sapiens
  CDR3 for alpha chain variable domain of TCR clone 6096 (TRAV30, TRAJ24)
CVTEIVDADSWGKFQF

SEQ ID NO: 12192 - protein, 14 aa, Homo sapiens
  CDR3 for beta chain variable domain of TCR clone 6096 (TRBV12-5, TRBJ2-5)
CASGSRTHQETQYF

SEQ ID NO: 12193 - protein, 14 aa, Homo sapiens
  CDR3 for alpha chain variable domain of TCR clone 6097 (TRAV12-1, TRAJ39)
CVVNFNNAGNMLTF

SEQ ID NO: 12194 - protein, 14 aa, Homo sapiens
  CDR3 for beta chain variable domain of TCR clone 6097 (TRBV12-4, TRBJ1-1)
CASSLGTGGTEAFF

SEQ ID NO: 12195 - protein, 16 aa, Homo sapiens
  CDR3 for alpha chain variable domain of TCR clone 6098 (TRAV30, TRAJ24)
YGTEIVDADSWGKFQF

SEQ ID NO: 12196 - protein, 14 aa, Homo sapiens
  CDR3 for beta chain variable domain of TCR clone 6098 (TRBV12-5, TRBJ2-5)
CASGSRTHQETQYF

SEQ ID NO: 12197 - protein, 15 aa, Homo sapiens
  CDR3 for alpha chain variable domain of TCR clone 6099 (TRAV26-1, TRAJ44)
CIVRANTGTASKLTF

SEQ ID NO: 12198 - protein, 16 aa, Homo sapiens
  CDR3 for beta chain variable domain of TCR clone 6099 (TRBV7-7, TRBJ2-1)
CASSLASGTSYNGQFF

SEQ ID NO: 12199 - protein, 17 aa, Homo sapiens
  CDR3 for alpha chain variable domain of TCR clone 6100 (TRAV3, TRAJ6)
CAVRDSPRAGGSYIPTF

SEQ ID NO: 12200 - protein, 14 aa, Homo sapiens
  CDR3 for beta chain variable domain of TCR clone 6100 (TRBV7-2, TRBJ2-7)
CASSPKTSFYEQYF

SEQ ID NO: 12201 - protein, 14 aa, Homo sapiens
  CDR3 for alpha chain variable domain of TCR clone 6101 (TRAV12-2, TRAJ13)
CAVKKTGGYQKITF

SEQ ID NO: 12202 - protein, 15 aa, Homo sapiens
  CDR3 for beta chain variable domain of TCR clone 6101 (TRBV27, TRBJ2-1)
CASSNGGGSSNEQFF

SEQ ID NO: 12203 - protein, 15 aa, Homo sapiens
  CDR3 for alpha chain variable domain of TCR clone 6102 (TRAV3, TRAJ5)
CAVRPLGHGQESTYF

SEQ ID NO: 12204 - protein, 16 aa, Homo sapiens
  CDR3 for beta chain variable domain of TCR clone 6102 (TRBV3-1, TRBJ2-7)
CASSQGVGKGSSEQYF

SEQ ID NO: 12205 - protein, 10 aa, Homo sapiens
  CDR3 for alpha chain variable domain of TCR clone 6103 (TRAV23/DV6, TRAJ57)
CAASSTLSQG

SEQ ID NO: 12206 - protein, 15 aa, Homo sapiens
  CDR3 for beta chain variable domain of TCR clone 6103 (TRBV27, TRBJ1-4)
CASSAQQDLNEKLFF

SEQ ID NO: 12207 - protein, 11 aa, Homo sapiens
  CDR3 for alpha chain variable domain of TCR clone 6104 (TRAV21, TRAJ48)
CAVDGNEKLTF

SEQ ID NO: 12208 - protein, 15 aa, Homo sapiens
  CDR3 for beta chain variable domain of TCR clone 6104 (TRBV2, TRBJ2-1)
CASSELAGSYNEQFF

SEQ ID NO: 12209 - protein, 15 aa, Homo sapiens
  CDR3 for alpha chain variable domain of TCR clone 6105 (TRAV6, TRAJ32)
CALDMGGGATNKLIF

SEQ ID NO: 12210 - protein, 16 aa, Homo sapiens
  CDR3 for beta chain variable domain of TCR clone 6105 (TRBV7-3, TRBJ2-2)
CASSLKRGTLSGELFF

SEQ ID NO: 12211 - protein, 13 aa, Homo sapiens
  CDR3 for alpha chain variable domain of TCR clone 6106 (TRAV12-1, TRAJ31)
CVVVPNNNARLMF

SEQ ID NO: 12212 - protein, 15 aa, Homo sapiens
  CDR3 for beta chain variable domain of TCR clone 6106 (TRBV19, TRBJ1-2)
CASNLGGETPYGYTF

SEQ ID NO: 12213 - protein, 14 aa, Homo sapiens
  CDR3 for alpha chain variable domain of TCR clone 6107 (TRAV1-2, TRAJ16)
CAVRSASDGQKLLF

SEQ ID NO: 12214 - protein, 13 aa, Homo sapiens
  CDR3 for beta chain variable domain of TCR clone 6107 (TRBV6-3, TRBJ1-4)
CASSPGPGEKLFF

SEQ ID NO: 12215 - protein, 12 aa, Homo sapiens
  CDR3 for alpha chain variable domain of TCR clone 6108 (TRAV1-2, TRAJ29)
CAVRNLNTPLVF

SEQ ID NO: 12216 - protein, 16 aa, Homo sapiens
  CDR3 for beta chain variable domain of TCR clone 6108 (TRBV27, TRBJ2-2)
CASSFRGLVRTGELFF

SEQ ID NO: 12217 - protein, 13 aa, Homo sapiens
  CDR3 for alpha chain variable domain of TCR clone 6109 (TRAV17, TRAJ39)
CATEDNAGNMLTF

SEQ ID NO: 12218 - protein, 14 aa, Homo sapiens
  CDR3 for beta chain variable domain of TCR clone 6109 (TRBV19, TRBJ1-2)
CASSPTGGAGGYTF

SEQ ID NO: 12219 - protein, 14 aa, Homo sapiens
  CDR3 for alpha chain variable domain of TCR clone 6110 (TRAV1-2, TRAJ33)
CAVRAPDSNYQLIW

SEQ ID NO: 12220 - protein, 15 aa, Homo sapiens
  CDR3 for beta chain variable domain of TCR clone 6110 (TRBV27, TRBJ2-7)
CASTQRRPEYYEQYF

SEQ ID NO: 12221 - protein, 13 aa, Homo sapiens
  CDR3 for alpha chain variable domain of TCR clone 6111 (TRAV3, TRAJ20)
CAVRDIGDYKLSF

SEQ ID NO: 12222 - protein, 12 aa, Homo sapiens
  CDR3 for beta chain variable domain of TCR clone 6111 (TRBV3-1, TRBJ1-2)
CASTSGLYGYTF

SEQ ID NO: 12223 - protein, 20 aa, Homo sapiens
  CDR3 for alpha chain variable domain of TCR clone 6112 (TRAV26-1, TRAJ42)
CCVLLHRQTYYGGSQGNLIF

SEQ ID NO: 12224 - protein, 16 aa, Homo sapiens
  CDR3 for beta chain variable domain of TCR clone 6112 (TRBV4-1, TRBJ1-1)
CASSSMSERPNTEAFF

SEQ ID NO: 12225 - protein, 11 aa, Homo sapiens
  CDR3 for alpha chain variable domain of TCR clone 6113 (TRAV12-2, TRAJ49)
CAVTGGNQFYF

SEQ ID NO: 12226 - protein, 15 aa, Homo sapiens
  CDR3 for beta chain variable domain of TCR clone 6113 (TRBV7-8, TRBJ1-5)
CASSLERRGLEPQHF

SEQ ID NO: 12227 - protein, 14 aa, Homo sapiens
  CDR3 for alpha chain variable domain of TCR clone 6114 (TRAV17, TRAJ6)
CATPAMGGSYIPTF

SEQ ID NO: 12228 - protein, 12 aa, Homo sapiens
  CDR3 for beta chain variable domain of TCR clone 6114 (TRBV6-3, TRBJ2-7)
CASSLTPYEQYF

SEQ ID NO: 12229 - protein, 16 aa, Homo sapiens
  CDR3 for alpha chain variable domain of TCR clone 6115 (TRAV30, TRAJ24)
CGTEIVDADSWGKFQF

SEQ ID NO: 12230 - protein, 14 aa, Homo sapiens
  CDR3 for beta chain variable domain of TCR clone 6115 (TRBV12-5, TRBJ2-5)
CASGSRTHQETRYF

SEQ ID NO: 12231 - protein, 23 aa, Homo sapiens
  CDR3 for alpha chain variable domain of TCR clone 6116 (TRAV12-2, TRAJ36)
SLLIRDSQPSDSATLERANNLFF

SEQ ID NO: 12232 - protein, 16 aa, Homo sapiens
  CDR3 for beta chain variable domain of TCR clone 6116 (TRBV7-3, TRBJ2-2)
CASSLKRGTLSGELFF

SEQ ID NO: 12233 - protein, 15 aa, Homo sapiens
  CDR3 for alpha chain variable domain of TCR clone 6117 (TRAV17, TRAJ56)
CATDAIPGANSKLTF

SEQ ID NO: 12234 - protein, 15 aa, Homo sapiens
  CDR3 for beta chain variable domain of TCR clone 6117 (TRBV6-3, TRBJ2-2)
CASSRFGGNTGELFF

SEQ ID NO: 12235 - protein, 12 aa, Homo sapiens
  CDR3 for alpha chain variable domain of TCR clone 6118 (TRAV26-2, TRAJ34)
CILRISSDKLIF

SEQ ID NO: 12236 - protein, 15 aa, Homo sapiens
  CDR3 for beta chain variable domain of TCR clone 6118 (TRBV18, TRBJ2-7)
CASSPRGGKGYEQYF

SEQ ID NO: 12237 - protein, 18 aa, Homo sapiens
  CDR3 for alpha chain variable domain of TCR clone 6119 (TRAV13-1, TRAJ52)
CAAKNPNAGGTSYGKLTF

SEQ ID NO: 12238 - protein, 14 aa, Homo sapiens
  CDR3 for beta chain variable domain of TCR clone 6119 (TRBV7-8, TRBJ2-3)
CASSLEAGTDTQYF

SEQ ID NO: 12239 - protein, 14 aa, Homo sapiens
  CDR3 for alpha chain variable domain of TCR clone 6120 (TRAV9-2, TRAJ39)
CALYIYNAGNMLTF

SEQ ID NO: 12240 - protein, 15 aa, Homo sapiens
  CDR3 for beta chain variable domain of TCR clone 6120 (TRBV20-1, TRBJ2-7)
CSARDRVSGMDEQYF

SEQ ID NO: 12241 - protein, 13 aa, Homo sapiens
  CDR3 for alpha chain variable domain of TCR clone 6121 (TRAV27, TRAJ29)
CAGAHSGNTPLVF

SEQ ID NO: 12242 - protein, 14 aa, Homo sapiens
  CDR3 for beta chain variable domain of TCR clone 6121 (TRBV19, TRBJ2-1)
CASPTFVLSGEQFF

SEQ ID NO: 12243 - protein, 14 aa, Homo sapiens
  CDR3 for alpha chain variable domain of TCR clone 6122 (TRAV12-2, TRAJ13)
CAVKKTGGYQKVTF

SEQ ID NO: 12244 - protein, 14 aa, Homo sapiens
  CDR3 for beta chain variable domain of TCR clone 6122 (TRBV6-1, TRBJ1-3)
CASVQGGGGNTIYF

SEQ ID NO: 12245 - protein, 13 aa, Homo sapiens
  CDR3 for alpha chain variable domain of TCR clone 6123 (TRAV24, TRAJ15)
CAFKDQAGTALIF

SEQ ID NO: 12246 - protein, 14 aa, Homo sapiens
  CDR3 for beta chain variable domain of TCR clone 6123 (TRBV2, TRBJ2-1)
CASSLSGSQGEQFF

SEQ ID NO: 12247 - protein, 13 aa, Homo sapiens
  CDR3 for alpha chain variable domain of TCR clone 6124 (TRAV2, TRAJ15)
CAVASQAGTALIF

SEQ ID NO: 12248 - protein, 14 aa, Homo sapiens
  CDR3 for beta chain variable domain of TCR clone 6124 (TRBV19, TRBJ2-1)
CASPTFVLSGEQFF

SEQ ID NO: 12249 - protein, 15 aa, Homo sapiens
  CDR3 for alpha chain variable domain of TCR clone 6125 (TRAV8-6, TRAJ6)
CAVSGESGGSYIPTF

SEQ ID NO: 12250 - protein, 14 aa, Homo sapiens
  CDR3 for beta chain variable domain of TCR clone 6125 (TRBV9, TRBJ2-4)
CASSPSGTSGFQYF

SEQ ID NO: 12251 - protein, 14 aa, Homo sapiens
  CDR3 for alpha chain variable domain of TCR clone 6126 (TRAV1-2, TRAJ28)
CVARSGAGSYQLTF

SEQ ID NO: 12252 - protein, 16 aa, Homo sapiens
  CDR3 for beta chain variable domain of TCR clone 6126 (TRBV5-1, TRBJ2-5)
CASSLRRTSGQETQYF

SEQ ID NO: 12253 - protein, 16 aa, Homo sapiens
  CDR3 for alpha chain variable domain of TCR clone 6127 (TRAV30, TRAJ24)
CGTEIVDADSWGKFQF

SEQ ID NO: 12254 - protein, 15 aa, Homo sapiens
  CDR3 for beta chain variable domain of TCR clone 6127 (TRBV9, TRBJ2-1)
CASSLAGSSYNEQFF

SEQ ID NO: 12255 - protein, 10 aa, Homo sapiens
  CDR3 for alpha chain variable domain of TCR clone 6128 (TRAV25, TRAJ53)
CAGSNYKLTF

SEQ ID NO: 12256 - protein, 14 aa, Homo sapiens
  CDR3 for beta chain variable domain of TCR clone 6128 (TRBV7-7, TRBJ2-7)
CASSLGRGVGEQYF

SEQ ID NO: 12257 - protein, 17 aa, Homo sapiens
  CDR3 for alpha chain variable domain of TCR clone 6129 (TRAV38-2/DV8, TRAJ28)
CAYRFAYSGAGSYQLTF

SEQ ID NO: 12258 - protein, 17 aa, Homo sapiens
  CDR3 for beta chain variable domain of TCR clone 6129 (TRBV4-3, TRBJ2-2)
CASSQDTSARSPGELFF

SEQ ID NO: 12259 - protein, 15 aa, Homo sapiens
  CDR3 for alpha chain variable domain of TCR clone 6130 (TRAV41, TRAJ45)
CAASYSGGGADGLTF

SEQ ID NO: 12260 - protein, 14 aa, Homo sapiens
  CDR3 for beta chain variable domain of TCR clone 6130 (TRBV27, TRBJ2-2)
CASRPGVNTGELFF

SEQ ID NO: 12261 - protein, 11 aa, Homo sapiens
  CDR3 for alpha chain variable domain of TCR clone 6131 (TRAV2, TRAJ13)
CASGGYQKVTF

SEQ ID NO: 12262 - protein, 14 aa, Homo sapiens
  CDR3 for beta chain variable domain of TCR clone 6131 (TRBV19, TRBJ2-7)
CASSMGQGAIEQYF

SEQ ID NO: 12263 - protein, 17 aa, Homo sapiens
  CDR3 for alpha chain variable domain of TCR clone 6132 (TRAV3, TRAJ42)
CAVRDRDYGGSQGNLIF

SEQ ID NO: 12264 - protein, 13 aa, Homo sapiens
  CDR3 for beta chain variable domain of TCR clone 6132 (TRBV10-2, TRBJ2-7)
CASGASGGYEQYF

SEQ ID NO: 12265 - protein, 14 aa, Homo sapiens
  CDR3 for alpha chain variable domain of TCR clone 6133 (TRAV9-2, TRAJ39)
CALYIYNAGNMLTF

SEQ ID NO: 12266 - protein, 13 aa, Homo sapiens
  CDR3 for beta chain variable domain of TCR clone 6133 (TRBV20-1, TRBJ1-1)
CSAGTVGNTEAFF

SEQ ID NO: 12267 - protein, 13 aa, Homo sapiens
  CDR3 for alpha chain variable domain of TCR clone 6134 (TRAV8-4, TRAJ9)
CAVSETGGFKTIF

SEQ ID NO: 12268 - protein, 14 aa, Homo sapiens
  CDR3 for beta chain variable domain of TCR clone 6134 (TRBV13, TRBJ2-5)
CASSLERVGETQYF

SEQ ID NO: 12269 - protein, 16 aa, Homo sapiens
  CDR3 for alpha chain variable domain of TCR clone 6135 (TRAV30, TRAJ24)
CGTEIVDADSWGKFQF

SEQ ID NO: 12270 - protein, 14 aa, Homo sapiens
  CDR3 for beta chain variable domain of TCR clone 6135 (TRBV11-2, TRBJ2-7)
CASSLGAGAYEQYF

SEQ ID NO: 12271 - protein, 12 aa, Homo sapiens
  CDR3 for alpha chain variable domain of TCR clone 6136 (TRAV12-3, TRAJ17)
CAMTLTGNQLTF

SEQ ID NO: 12272 - protein, 15 aa, Homo sapiens
  CDR3 for beta chain variable domain of TCR clone 6136 (TRBV20-1, TRBJ2-7)
CSARDRVSGMDEQYF

SEQ ID NO: 12273 - protein, 16 aa, Homo sapiens
  CDR3 for alpha chain variable domain of TCR clone 6137 (TRAV30, TRAJ24)
CGTEIVDADSWGKFQF

SEQ ID NO: 12274 - protein, 13 aa, Homo sapiens
  CDR3 for beta chain variable domain of TCR clone 6137 (TRBV12-5, TRBJ2-3)
CASGDRQSDTQYF

SEQ ID NO: 12275 - protein, 18 aa, Homo sapiens
  CDR3 for alpha chain variable domain of TCR clone 6138 (TRAV1-1, TRAJ42)
CAVSPSAFYGGSQGNLIF

SEQ ID NO: 12276 - protein, 14 aa, Homo sapiens
  CDR3 for beta chain variable domain of TCR clone 6138 (TRBV6-3, TRBJ2-7)
CASSYSTGGDEQYF

SEQ ID NO: 12277 - protein, 15 aa, Homo sapiens
  CDR3 for alpha chain variable domain of TCR clone 6139 (TRAV12-1, TRAJ45)
CVVLSGGGGADGLTF

SEQ ID NO: 12278 - protein, 15 aa, Homo sapiens
  CDR3 for beta chain variable domain of TCR clone 6139 (TRBV7-2, TRBJ2-1)
CASTHGTGIYNEQFF

SEQ ID NO: 12279 - protein, 14 aa, Homo sapiens
  CDR3 for alpha chain variable domain of TCR clone 6140 (TRAV2, TRAJ42)
CAVVGGGSQGNLIF

SEQ ID NO: 12280 - protein, 15 aa, Homo sapiens
  CDR3 for beta chain variable domain of TCR clone 6140 (TRBV11-3, TRBJ2-3)
CASSFRAAFPDTQYF

SEQ ID NO: 12281 - protein, 14 aa, Homo sapiens
  CDR3 for alpha chain variable domain of TCR clone 6141 (TRAV1-1, TRAJ35)
CAVRSIGFGNVLHC

SEQ ID NO: 12282 - protein, 14 aa, Homo sapiens
  CDR3 for beta chain variable domain of TCR clone 6141 (TRBV19, TRBJ2-1)
CASPTFVLSGEQFF

SEQ ID NO: 12283 - protein, 18 aa, Homo sapiens
  CDR3 for alpha chain variable domain of TCR clone 6142 (TRAV21, TRAJ52)
CAVRPSPAGGTSYGKLTF

SEQ ID NO: 12284 - protein, 15 aa, Homo sapiens
  CDR3 for beta chain variable domain of TCR clone 6142 (TRBV5-1, TRBJ2-3)
CASSVTSGSTDTQYF

SEQ ID NO: 12285 - protein, 13 aa, Homo sapiens
  CDR3 for alpha chain variable domain of TCR clone 6143 (TRAV16, TRAJ11)
CALTQSGYSTLTF

SEQ ID NO: 12286 - protein, 17 aa, Homo sapiens
  CDR3 for beta chain variable domain of TCR clone 6143 (TRBV5-1, TRBJ1-5)
CASSLAFLTRGNQPQHF

SEQ ID NO: 12287 - protein, 12 aa, Homo sapiens
  CDR3 for alpha chain variable domain of TCR clone 6144 (TRAV12-3, TRAJ17)
CAMTLTGNKRTF

SEQ ID NO: 12288 - protein, 15 aa, Homo sapiens
  CDR3 for beta chain variable domain of TCR clone 6144 (TRBV20-1, TRBJ2-7)
CSARDRVSGMDEQYF

SEQ ID NO: 12289 - protein, 11 aa, Homo sapiens
  CDR3 for alpha chain variable domain of TCR clone 6145 (TRAV13-1, TRAJ39)
CASHAGNMLTF

SEQ ID NO: 12290 - protein, 13 aa, Homo sapiens
  CDR3 for beta chain variable domain of TCR clone 6145 (TRBV11-2, TRBJ1-5)
CQQLRQGRQPQHF

SEQ ID NO: 12291 - protein, 13 aa, Homo sapiens
  CDR3 for alpha chain variable domain of TCR clone 6146 (TRAV3, TRAJ8)
CAVRHTGFQKLVF

SEQ ID NO: 12292 - protein, 14 aa, Homo sapiens
  CDR3 for beta chain variable domain of TCR clone 6146 (TRBV7-6, TRBJ2-1)
CASSVAGEINEQFF

SEQ ID NO: 12293 - protein, 13 aa, Homo sapiens
  CDR3 for alpha chain variable domain of TCR clone 6147 (TRAV12-1, TRAJ33)
CGDAPDSNYQLIW

SEQ ID NO: 12294 - protein, 13 aa, Homo sapiens
  CDR3 for beta chain variable domain of TCR clone 6147 (TRBV7-2, TRBJ2-5)
CASSQTSVETQYF

SEQ ID NO: 12295 - protein, 14 aa, Homo sapiens
  CDR3 for alpha chain variable domain of TCR clone 6148 (TRAV12-2, TRAJ3)
CAVKGYSSASKIIF

SEQ ID NO: 12296 - protein, 14 aa, Homo sapiens
  CDR3 for beta chain variable domain of TCR clone 6148 (TRBV4-2, TRBJ2-1)
CASGLDRAYNEQFF

SEQ ID NO: 12297 - protein, 13 aa, Homo sapiens
  CDR3 for alpha chain variable domain of TCR clone 6149 (TRAV12-2, TRAJ7)
CAVSLYGNNRLAF

SEQ ID NO: 12298 - protein, 18 aa, Homo sapiens
  CDR3 for beta chain variable domain of TCR clone 6149 (TRBV4-2, TRBJ2-1)
CASSQQGLAASSYNEQFF

SEQ ID NO: 12299 - protein, 11 aa, Homo sapiens
  CDR3 for alpha chain variable domain of TCR clone 6150 (TRAV1-2, TRAJ31)
CAVNNNARLMF

SEQ ID NO: 12300 - protein, 18 aa, Homo sapiens
  CDR3 for beta chain variable domain of TCR clone 6150 (TRBV25-1, TRBJ1-2)
CASSGLQNGQGLIFGYTF

SEQ ID NO: 12301 - protein, 22 aa, Homo sapiens
  CDR3 for alpha chain variable domain of TCR clone 6151 (TRAV3, TRAJ38)
CAVRDCLNAGNNHIQNPDPAVY

SEQ ID NO: 12302 - protein, 13 aa, Homo sapiens
  CDR3 for beta chain variable domain of TCR clone 6151 (TRBV23-1, TRBJ1-4)
CASRGKFNEKLFF

SEQ ID NO: 12303 - protein, 11 aa, Homo sapiens
  CDR3 for alpha chain variable domain of TCR clone 6152 (TRAV1-1, TRAJ23)
CAVRQGGELIF

SEQ ID NO: 12304 - protein, 20 aa, Homo sapiens
  CDR3 for beta chain variable domain of TCR clone 6152 (TRBV7-8, TRBJ2-2)
CASSHLFPGPTIHITGELFF

SEQ ID NO: 12305 - protein, 16 aa, Homo sapiens
  CDR3 for alpha chain variable domain of TCR clone 6153 (TRAV3, TRAJ23)
CAVEPLIYNQGGKLIF

SEQ ID NO: 12306 - protein, 15 aa, Homo sapiens
  CDR3 for beta chain variable domain of TCR clone 6153 (TRBV19, TRBJ1-5)
CASSPEGRPNQPQHF

SEQ ID NO: 12307 - protein, 14 aa, Homo sapiens
  CDR3 for alpha chain variable domain of TCR clone 6154 (TRAV12-3, TRAJ9)
CAMSPNTGGFKTIF

SEQ ID NO: 12308 - protein, 11 aa, Homo sapiens
  CDR3 for beta chain variable domain of TCR clone 6154 (TRBV29-1, TRBJ2-5)
CSEDRTGTQYF

SEQ ID NO: 12309 - protein, 15 aa, Homo sapiens
  CDR3 for alpha chain variable domain of TCR clone 6155 (TRAV17, TRAJ22)
CATAPISGSARQLTF

SEQ ID NO: 12310 - protein, 14 aa, Homo sapiens
  CDR3 for beta chain variable domain of TCR clone 6155 (TRBV9, TRBJ2-1)
CASSVDPRGKEQFF

SEQ ID NO: 12311 - protein, 15 aa, Homo sapiens
  CDR3 for alpha chain variable domain of TCR clone 6156 (TRAV34, TRAJ38)
CGADFTPGNNRKLIW

SEQ ID NO: 12312 - protein, 14 aa, Homo sapiens
  CDR3 for beta chain variable domain of TCR clone 6156 (TRBV19, TRBJ2-1)
CASPTFVLSGEQFF

SEQ ID NO: 12313 - protein, 14 aa, Homo sapiens
  CDR3 for alpha chain variable domain of TCR clone 6157 (TRAV13-1, TRAJ36)
CAASINTGANNLFF

SEQ ID NO: 12314 - protein, 18 aa, Homo sapiens
  CDR3 for beta chain variable domain of TCR clone 6157 (TRBV20-1, TRBJ2-3)
CSARDPWGQGLSTDTQYF

SEQ ID NO: 12315 - protein, 13 aa, Homo sapiens
  CDR3 for alpha chain variable domain of TCR clone 6158 (TRAV25, TRAJ24)
CAGGTDSWGKFQF

SEQ ID NO: 12316 - protein, 18 aa, Homo sapiens
  CDR3 for beta chain variable domain of TCR clone 6158 (TRBV23-1, TRBJ2-1)
CASGMFRLALSSYNEQFF

SEQ ID NO: 12317 - protein, 13 aa, Homo sapiens
  CDR3 for alpha chain variable domain of TCR clone 6159 (TRAV21, TRAJ27)
CAARPGNAGKSTF

SEQ ID NO: 12318 - protein, 14 aa, Homo sapiens
  CDR3 for beta chain variable domain of TCR clone 6159 (TRBV7-6, TRBJ2-3)
CASSLGAVTDTQYF

SEQ ID NO: 12319 - protein, 14 aa, Homo sapiens
  CDR3 for alpha chain variable domain of TCR clone 6160 (TRAV8-6, TRAJ4)
CAVSGSGGYNKLIF

SEQ ID NO: 12320 - protein, 13 aa, Homo sapiens
  CDR3 for beta chain variable domain of TCR clone 6160 (TRBV3-1, TRBJ2-5)
CASSPGLQETQYF

SEQ ID NO: 12321 - protein, 16 aa, Homo sapiens
  CDR3 for alpha chain variable domain of TCR clone 6161 (TRAV12-2, TRAJ36)
CGTNNLFFGTGTRLTV

SEQ ID NO: 12322 - protein, 14 aa, Homo sapiens
  CDR3 for beta chain variable domain of TCR clone 6161 (TRBV7-2, TRBJ2-1)
CASSLSRVDNEQFF

SEQ ID NO: 12323 - protein, 15 aa, Homo sapiens
  CDR3 for alpha chain variable domain of TCR clone 6162 (TRAV1-2, TRAJ18)
CAWEGRGSTLGRLYF

SEQ ID NO: 12324 - protein, 14 aa, Homo sapiens
  CDR3 for beta chain variable domain of TCR clone 6162 (TRBV4-3, TRBJ2-7)
CASSQDVAGGEQYF

SEQ ID NO: 12325 - protein, 19 aa, Homo sapiens
  CDR3 for alpha chain variable domain of TCR clone 6163 (TRAV29/DV5, TRAJ49)
CSVLLCSKLTVDTGNQFYF

SEQ ID NO: 12326 - protein, 15 aa, Homo sapiens
  CDR3 for beta chain variable domain of TCR clone 6163 (TRBV4-3, TRBJ2-2)
CASSQGGTPTGELFF

SEQ ID NO: 12327 - protein, 15 aa, Homo sapiens
  CDR3 for alpha chain variable domain of TCR clone 6164 (TRAV10, TRAJ44)
CVVSGATDTASKLTF

SEQ ID NO: 12328 - protein, 15 aa, Homo sapiens
  CDR3 for beta chain variable domain of TCR clone 6164 (TRBV12-4, TRBJ1-5)
CASTRQGSGNQPQHF

SEQ ID NO: 12329 - protein, 11 aa, Homo sapiens
  CDR3 for alpha chain variable domain of TCR clone 6165 (TRAV25, TRAJ5)
CRGGGRRALTF

SEQ ID NO: 12330 - protein, 15 aa, Homo sapiens
  CDR3 for beta chain variable domain of TCR clone 6165 (TRBV19, TRBJ2-4)
CASRGPRRGENIQYF

SEQ ID NO: 12331 - protein, 14 aa, Homo sapiens
  CDR3 for alpha chain variable domain of TCR clone 6166 (TRAV12-3, TRAJ9)
CAMSPNTGGFKTIF

SEQ ID NO: 12332 - protein, 14 aa, Homo sapiens
  CDR3 for beta chain variable domain of TCR clone 6166 (TRBV19, TRBJ2-1)
CASPTFVLSGEQFF

SEQ ID NO: 12333 - protein, 13 aa, Homo sapiens
  CDR3 for alpha chain variable domain of TCR clone 6167 (TRAV2, TRAJ40)
CAVVTSGTYKYIF

SEQ ID NO: 12334 - protein, 14 aa, Homo sapiens
  CDR3 for beta chain variable domain of TCR clone 6167 (TRBV20-1, TRBJ1-1)
CSAMGGTANTEAFF

SEQ ID NO: 12335 - protein, 11 aa, Homo sapiens
  CDR3 for alpha chain variable domain of TCR clone 6168 (TRAV2, TRAJ13)
CASGGYQKVTF

SEQ ID NO: 12336 - protein, 14 aa, Homo sapiens
  CDR3 for beta chain variable domain of TCR clone 6168 (TRBV5-7, TRBJ1-2)
CASSLVRGDYGYTF

SEQ ID NO: 12337 - protein, 12 aa, Homo sapiens
  CDR3 for alpha chain variable domain of TCR clone 6169 (TRAV3, TRAJ31)
CAVRDGNARLMF

SEQ ID NO: 12338 - protein, 18 aa, Homo sapiens
  CDR3 for beta chain variable domain of TCR clone 6169 (TRBV7-2, TRBJ2-3)
CASSLKREGSGITDTQHF

SEQ ID NO: 12339 - protein, 12 aa, Homo sapiens
  CDR3 for alpha chain variable domain of TCR clone 6170 (TRAV12-3, TRAJ17)
CAMTHTGNKLTF

SEQ ID NO: 12340 - protein, 15 aa, Homo sapiens
  CDR3 for beta chain variable domain of TCR clone 6170 (TRBV20-1, TRBJ2-7)
CSARDRVSGMDEQYF

SEQ ID NO: 12341 - protein, 15 aa, Homo sapiens
  CDR3 for alpha chain variable domain of TCR clone 6171 (TRAV8-3, TRAJ21)
CAVGALPPRGYKFYF

SEQ ID NO: 12342 - protein, 18 aa, Homo sapiens
  CDR3 for beta chain variable domain of TCR clone 6171 (TRBV25-1, TRBJ1-2)
CASSGLQNGQGLIFGYTF

SEQ ID NO: 12343 - protein, 11 aa, Homo sapiens
  CDR3 for alpha chain variable domain of TCR clone 6172 (TRAV12-2, TRAJ29)
CAVTLRSPLVF

SEQ ID NO: 12344 - protein, 15 aa, Homo sapiens
  CDR3 for beta chain variable domain of TCR clone 6172 (TRBV4-1, TRBJ2-5)
CASSQWDLYQETQYF

SEQ ID NO: 12345 - protein, 11 aa, Homo sapiens
  CDR3 for alpha chain variable domain of TCR clone 6173 (TRAV21, TRAJ49)
CAVSFGNQFYF

SEQ ID NO: 12346 - protein, 15 aa, Homo sapiens
  CDR3 for beta chain variable domain of TCR clone 6173 (TRBV10-3, TRBJ2-1)
CATNGGPGQGDEQFF

SEQ ID NO: 12347 - protein, 17 aa, Homo sapiens
  CDR3 for alpha chain variable domain of TCR clone 6174 (TRAV3, TRAJ6)
CAVRDGPRAGGSYIPTF

SEQ ID NO: 12348 - protein, 14 aa, Homo sapiens
  CDR3 for beta chain variable domain of TCR clone 6174 (TRBV7-2, TRBJ2-7)
CASGPKTSFYEQYF

SEQ ID NO: 12349 - protein, 14 aa, Homo sapiens
  CDR3 for alpha chain variable domain of TCR clone 6175 (TRAV26-1, TRAJ37)
CIVPSSSNTGKLIF

SEQ ID NO: 12350 - protein, 11 aa, Homo sapiens
  CDR3 for beta chain variable domain of TCR clone 6175 (TRBV18, TRBJ2-7)
CASSRSLEQYF

SEQ ID NO: 12351 - protein, 10 aa, Homo sapiens
  CDR3 for alpha chain variable domain of TCR clone 6176 (TRAV8-4, TRAJ43)
CAVSADDMRF

SEQ ID NO: 12352 - protein, 15 aa, Homo sapiens
  CDR3 for beta chain variable domain of TCR clone 6176 (TRBV28, TRBJ2-7)
CASSQLGAGGHEQYF

SEQ ID NO: 12353 - protein, 12 aa, Homo sapiens
  CDR3 for alpha chain variable domain of TCR clone 6177 (TRAV30, TRAJ20)
CGTESNDYKLSF

SEQ ID NO: 12354 - protein, 15 aa, Homo sapiens
  CDR3 for beta chain variable domain of TCR clone 6177 (TRBV9, TRBJ2-7)
CASSAVPIPGYEQYF

SEQ ID NO: 12355 - protein, 17 aa, Homo sapiens
  CDR3 for alpha chain variable domain of TCR clone 6178 (TRAV3, TRAJ6)
CAVRDGPGAGGSYIPTF

SEQ ID NO: 12356 - protein, 14 aa, Homo sapiens
  CDR3 for beta chain variable domain of TCR clone 6178 (TRBV7-2, TRBJ2-7)
CASSPKTSFYEQYF

SEQ ID NO: 12357 - protein, 11 aa, Homo sapiens
  CDR3 for alpha chain variable domain of TCR clone 6179 (TRAV3, TRAJ21)
CAVGNFNKFYF

SEQ ID NO: 12358 - protein, 14 aa, Homo sapiens
  CDR3 for beta chain variable domain of TCR clone 6179 (TRBV19, TRBJ2-1)
CASPTFVLSGEQFF

SEQ ID NO: 12359 - protein, 15 aa, Homo sapiens
  CDR3 for alpha chain variable domain of TCR clone 6180 (TRAV27, TRAJ22)
CAGAPLKGSARQLTF

SEQ ID NO: 12360 - protein, 16 aa, Homo sapiens
  CDR3 for beta chain variable domain of TCR clone 6180 (TRBV19, TRBJ2-2)
CASTLGASGAPGELFF

SEQ ID NO: 12361 - protein, 14 aa, Homo sapiens
  CDR3 for alpha chain variable domain of TCR clone 6181 (TRAV8-3, TRAJ21)
CAVGLNPRSDKFYF

SEQ ID NO: 12362 - protein, 11 aa, Homo sapiens
  CDR3 for beta chain variable domain of TCR clone 6181 (TRBV6-3, TRBJ2-3)
CATGQADTQYF

SEQ ID NO: 12363 - protein, 14 aa, Homo sapiens
  CDR3 for alpha chain variable domain of TCR clone 6182 (TRAV1-2, TRAJ16)
CAVNRFSDGQKLLF

SEQ ID NO: 12364 - protein, 14 aa, Homo sapiens
  CDR3 for beta chain variable domain of TCR clone 6182 (TRBV4-2, TRBJ2-1)
CASGLDRAYNEQFF

SEQ ID NO: 12365 - protein, 16 aa, Homo sapiens
  CDR3 for alpha chain variable domain of TCR clone 6183 (TRAV12-2, TRAJ28)
CAVNEYSGAGSYQLTF

SEQ ID NO: 12366 - protein, 14 aa, Homo sapiens
  CDR3 for beta chain variable domain of TCR clone 6183 (TRBV18, TRBJ2-3)
CASSLGGGSDTQYF

SEQ ID NO: 12367 - protein, 11 aa, Homo sapiens
  CDR3 for alpha chain variable domain of TCR clone 6184 (TRAV3, TRAJ21)
CAVGNFNKFYF

SEQ ID NO: 12368 - protein, 15 aa, Homo sapiens
  CDR3 for beta chain variable domain of TCR clone 6184 (TRBV29-1, TRBJ2-1)
CSVEGGPASYNEQIF

SEQ ID NO: 12369 - protein, 16 aa, Homo sapiens
  CDR3 for alpha chain variable domain of TCR clone 6185 (TRAV30, TRAJ24)
CGTEIGDADSWGKFQF

SEQ ID NO: 12370 - protein, 14 aa, Homo sapiens
  CDR3 for beta chain variable domain of TCR clone 6185 (TRBV12-5, TRBJ2-5)
CASGSRTHQETQYF

SEQ ID NO: 12371 - protein, 14 aa, Homo sapiens
  CDR3 for alpha chain variable domain of TCR clone 6186 (TRAV29/DV5, TRAJ36)
CAARRKTGANNLFF

SEQ ID NO: 12372 - protein, 19 aa, Homo sapiens
  CDR3 for beta chain variable domain of TCR clone 6186 (TRBV7-2, TRBJ2-3)
CASSFLSRNWGGGTDTQYF

SEQ ID NO: 12373 - protein, 11 aa, Homo sapiens
  CDR3 for alpha chain variable domain of TCR clone 6187 (TRAV3, TRAJ21)
SAVGNFNKFYF

SEQ ID NO: 12374 - protein, 16 aa, Homo sapiens
  CDR3 for beta chain variable domain of TCR clone 6187 (TRBV19, TRBJ2-1)
CASSKAGPSSYNEQFF

SEQ ID NO: 12375 - protein, 14 aa, Homo sapiens
  CDR3 for alpha chain variable domain of TCR clone 6188 (TRAV2, TRAJ22)
CAVGRGGSARQLTF

SEQ ID NO: 12376 - protein, 14 aa, Homo sapiens
  CDR3 for beta chain variable domain of TCR clone 6188 (TRBV19, TRBJ2-1)
CASPTFVLSGEQFF

SEQ ID NO: 12377 - protein, 13 aa, Homo sapiens
  CDR3 for alpha chain variable domain of TCR clone 6189 (TRAV1-1, TRAJ30)
CAVRSDRDDKIIF

SEQ ID NO: 12378 - protein, 14 aa, Homo sapiens
  CDR3 for beta chain variable domain of TCR clone 6189 (TRBV28, TRBJ2-7)
CASTFYGRAHEQYF

SEQ ID NO: 12379 - protein, 15 aa, Homo sapiens
  CDR3 for alpha chain variable domain of TCR clone 6190 (TRAV23/DV6, TRAJ18)
CAARYRGSTLGRLYF

SEQ ID NO: 12380 - protein, 16 aa, Homo sapiens
  CDR3 for beta chain variable domain of TCR clone 6190 (TRBV20-1, TRBJ1-2)
CSASMGQGVANYGYTF

SEQ ID NO: 12381 - protein, 15 aa, Homo sapiens
  CDR3 for alpha chain variable domain of TCR clone 6191 (TRAV21, TRAJ24)
CAARSSTDSWGKLQF

SEQ ID NO: 12382 - protein, 15 aa, Homo sapiens
  CDR3 for beta chain variable domain of TCR clone 6191 (TRBV19, TRBJ1-1)
CASTSGQIQNTEAFF

SEQ ID NO: 12383 - protein, 16 aa, Homo sapiens
  CDR3 for alpha chain variable domain of TCR clone 6192 (TRAV26-1, TRAJ23)
CIVRPHGNNQGGKLIF

SEQ ID NO: 12384 - protein, 13 aa, Homo sapiens
  CDR3 for beta chain variable domain of TCR clone 6192 (TRBV27, TRBJ2-7)
CASSLTTGYEQYF

SEQ ID NO: 12385 - protein, 14 aa, Homo sapiens
  CDR3 for alpha chain variable domain of TCR clone 6193 (TRAV8-3, TRAJ4)
CAVGAAGGYNKLIF

SEQ ID NO: 12386 - protein, 16 aa, Homo sapiens
  CDR3 for beta chain variable domain of TCR clone 6193 (TRBV13, TRBJ2-2)
CASSPRTGEHTGELFF

SEQ ID NO: 12387 - protein, 13 aa, Homo sapiens
  CDR3 for alpha chain variable domain of TCR clone 6194 (TRAV26-1, TRAJ48)
CIVRVVGDEKLTF

SEQ ID NO: 12388 - protein, 14 aa, Homo sapiens
  CDR3 for beta chain variable domain of TCR clone 6194 (TRBV12-5, TRBJ2-5)
CASGSRTHQETQYF

SEQ ID NO: 12389 - protein, 10 aa, Homo sapiens
  CDR3 for alpha chain variable domain of TCR clone 6195 (TRAV23/DV6, TRAJ57)
CAASSTLSQV

SEQ ID NO: 12390 - protein, 14 aa, Homo sapiens
  CDR3 for beta chain variable domain of TCR clone 6195 (TRBV25-1, TRBJ1-1)
CASTHLGGNTEAFF

SEQ ID NO: 12391 - protein, 12 aa, Homo sapiens
  CDR3 for alpha chain variable domain of TCR clone 6196 (TRAV2, TRAJ24)
CAATDSWGKFQF

SEQ ID NO: 12392 - protein, 15 aa, Homo sapiens
  CDR3 for beta chain variable domain of TCR clone 6196 (TRBV10-3, TRBJ2-2)
CAIYTGGTGTGELFF

SEQ ID NO: 12393 - protein, 12 aa, Homo sapiens
  CDR3 for alpha chain variable domain of TCR clone 6197 (TRAV12-2, TRAJ21)
CAPSDNFNKFYF

SEQ ID NO: 12394 - protein, 13 aa, Homo sapiens
  CDR3 for beta chain variable domain of TCR clone 6197 (TRBV7-3, TRBJ1-1)
CASSQDWGAEAFF

SEQ ID NO: 12395 - protein, 14 aa, Homo sapiens
  CDR3 for alpha chain variable domain of TCR clone 6198 (TRAV1-2, TRAJ8)
CAVREDTGFQKLVF

SEQ ID NO: 12396 - protein, 11 aa, Homo sapiens
  CDR3 for beta chain variable domain of TCR clone 6198 (TRBV29-1, TRBJ2-5)
CSEDRTGTQYF

SEQ ID NO: 12397 - protein, 12 aa, Homo sapiens
  CDR3 for alpha chain variable domain of TCR clone 6199 (TRAV12-3, TRAJ17)
CAMTLTGNKLPF

SEQ ID NO: 12398 - protein, 15 aa, Homo sapiens
  CDR3 for beta chain variable domain of TCR clone 6199 (TRBV20-1, TRBJ2-7)
CSARDRVSGMDEQYF

SEQ ID NO: 12399 - protein, 16 aa, Homo sapiens
  CDR3 for alpha chain variable domain of TCR clone 6200 (TRAV12-3, TRAJ53)
CAVSPGSGGSNYKLTF

SEQ ID NO: 12400 - protein, 11 aa, Homo sapiens
  CDR3 for beta chain variable domain of TCR clone 6200 (TRBV29-1, TRBJ2-5)
CSEDRTGTQYF

SEQ ID NO: 12401 - protein, 14 aa, Homo sapiens
  CDR3 for alpha chain variable domain of TCR clone 6201 (TRAV12-1, TRAJ34)
CVVNLDYNTDKLIF

SEQ ID NO: 12402 - protein, 13 aa, Homo sapiens
  CDR3 for beta chain variable domain of TCR clone 6201 (TRBV29-1, TRBJ2-1)
CSVEGGRVNEQFF

SEQ ID NO: 12403 - protein, 14 aa, Homo sapiens
  CDR3 for alpha chain variable domain of TCR clone 6202 (TRAV17, TRAJ22)
CATSPSGSARQLTF

SEQ ID NO: 12404 - protein, 15 aa, Homo sapiens
  CDR3 for beta chain variable domain of TCR clone 6202 (TRBV6-3, TRBJ2-7)
CASSSPGTVFYEQYF

SEQ ID NO: 12405 - protein, 15 aa, Homo sapiens
  CDR3 for alpha chain variable domain of TCR clone 6203 (TRAV14/DV4, TRAJ9)
CAMREGNTGGFKTIF

SEQ ID NO: 12406 - protein, 16 aa, Homo sapiens
  CDR3 for beta chain variable domain of TCR clone 6203 (TRBV13, TRBJ2-5)
CASSRGAGIRQETQYF

SEQ ID NO: 12407 - protein, 14 aa, Homo sapiens
  CDR3 for alpha chain variable domain of TCR clone 6204 (TRAV12-3, TRAJ10)
SHLPLTGGGNKLTF

SEQ ID NO: 12408 - protein, 16 aa, Homo sapiens
  CDR3 for beta chain variable domain of TCR clone 6204 (TRBV10-3, TRBJ2-1)
CAISLTSGNSYNEQFF

SEQ ID NO: 12409 - protein, 14 aa, Homo sapiens
  CDR3 for alpha chain variable domain of TCR clone 6205 (TRAV13-1, TRAJ48)
CAASTDFGNEKLTF

SEQ ID NO: 12410 - protein, 15 aa, Homo sapiens
  CDR3 for beta chain variable domain of TCR clone 6205 (TRBV10-2, TRBJ2-5)
CASKPEDRRQETQYF

SEQ ID NO: 12411 - protein, 12 aa, Homo sapiens
  CDR3 for alpha chain variable domain of TCR clone 6206 (TRAV23/DV6, TRAJ16)
CAATGTGQKLLF

SEQ ID NO: 12412 - protein, 15 aa, Homo sapiens
  CDR3 for beta chain variable domain of TCR clone 6206 (TRBV28, TRBJ1-2)
CASSSYRGLVYGYTF

SEQ ID NO: 12413 - protein, 13 aa, Homo sapiens
  CDR3 for alpha chain variable domain of TCR clone 6207 (TRAV13-1, TRAJ6)
CAASSGGSYIPTF

SEQ ID NO: 12414 - protein, 13 aa, Homo sapiens
  CDR3 for beta chain variable domain of TCR clone 6207 (TRBV7-8, TRBJ2-7)
CASSLTGGREQYF

SEQ ID NO: 12415 - protein, 14 aa, Homo sapiens
  CDR3 for alpha chain variable domain of TCR clone 6208 (TRAV14/DV4, TRAJ20)
CAMRESLNDYKLSF

SEQ ID NO: 12416 - protein, 15 aa, Homo sapiens
  CDR3 for beta chain variable domain of TCR clone 6208 (TRBV5-7, TRBJ1-5)
CASSYGKLWDQPQHF

SEQ ID NO: 12417 - protein, 14 aa, Homo sapiens
  CDR3 for alpha chain variable domain of TCR clone 6209 (TRAV12-1, TRAJ36)
CVVNYWGKQPLLWD

SEQ ID NO: 12418 - protein, 13 aa, Homo sapiens
  CDR3 for beta chain variable domain of TCR clone 6209 (TRBV14, TRBJ1-1)
CASSREFGTEAFF

SEQ ID NO: 12419 - protein, 16 aa, Homo sapiens
  CDR3 for alpha chain variable domain of TCR clone 6210 (TRAV1-2, TRAJ10)
CAVRGVLTGGGNKLTF

SEQ ID NO: 12420 - protein, 14 aa, Homo sapiens
  CDR3 for beta chain variable domain of TCR clone 6210 (TRBV12-4, TRBJ1-1)
CASSLGTGGTEAFF

SEQ ID NO: 12421 - protein, 15 aa, Homo sapiens
  CDR3 for alpha chain variable domain of TCR clone 6211 (TRAV12-3, TRAJ11)
CAMSEENSGYSTLTF

SEQ ID NO: 12422 - protein, 13 aa, Homo sapiens
  CDR3 for beta chain variable domain of TCR clone 6211 (TRBV12-4, TRBJ2-1)
CASSFHSGSEQFF

SEQ ID NO: 12423 - protein, 19 aa, Homo sapiens
  CDR3 for alpha chain variable domain of TCR clone 6212 (TRAV26-1, TRAJ52)
CIVRAHRNAGGTSYGKLTF

SEQ ID NO: 12424 - protein, 14 aa, Homo sapiens
  CDR3 for beta chain variable domain of TCR clone 6212 (TRBV4-1, TRBJ2-2)
CASSQAVNTGELFF

SEQ ID NO: 12425 - protein, 12 aa, Homo sapiens
  CDR3 for alpha chain variable domain of TCR clone 6213 (TRAV12-3, TRAJ17)
CALTLTGNKLTF

SEQ ID NO: 12426 - protein, 15 aa, Homo sapiens
  CDR3 for beta chain variable domain of TCR clone 6213 (TRBV20-1, TRBJ2-7)
CSARDRVSGMDEQYF

SEQ ID NO: 12427 - protein, 16 aa, Homo sapiens
  CDR3 for alpha chain variable domain of TCR clone 6214 (TRAV30, TRAJ24)
CGTEIVDADSWGKFQF

SEQ ID NO: 12428 - protein, 11 aa, Homo sapiens
  CDR3 for beta chain variable domain of TCR clone 6214 (TRBV29-1, TRBJ2-5)
CSEDRTGTQYF

SEQ ID NO: 12429 - protein, 16 aa, Homo sapiens
  CDR3 for alpha chain variable domain of TCR clone 6215 (TRAV30, TRAJ24)
CGTEIVDADSWGKFQF

SEQ ID NO: 12430 - protein, 11 aa, Homo sapiens
  CDR3 for beta chain variable domain of TCR clone 6215 (TRBV19, TRBJ1-1)
CASSIGSEAFF

SEQ ID NO: 12431 - protein, 12 aa, Homo sapiens
  CDR3 for alpha chain variable domain of TCR clone 6216 (TRAV26-1, TRAJ17)
CIVRSAGNKLTF

SEQ ID NO: 12432 - protein, 16 aa, Homo sapiens
  CDR3 for beta chain variable domain of TCR clone 6216 (TRBV6-5, TRBJ2-7)
CASSYFRVGISDEQYF

SEQ ID NO: 12433 - protein, 14 aa, Homo sapiens
  CDR3 for alpha chain variable domain of TCR clone 6217 (TRAV12-2, TRAJ11)
CAVEGGSGYSTLTF

SEQ ID NO: 12434 - protein, 11 aa, Homo sapiens
  CDR3 for beta chain variable domain of TCR clone 6217 (TRBV12-4, TRBJ2-3)
CASTATDTQYF

SEQ ID NO: 12435 - protein, 12 aa, Homo sapiens
  CDR3 for alpha chain variable domain of TCR clone 6218 (TRAV38-2/DV8, TRAJ48)
CALLSGNEKLTF

SEQ ID NO: 12436 - protein, 15 aa, Homo sapiens
  CDR3 for beta chain variable domain of TCR clone 6218 (TRBV7-2, TRBJ2-3)
CASSSTGLETDTQYF

SEQ ID NO: 12437 - protein, 11 aa, Homo sapiens
  CDR3 for alpha chain variable domain of TCR clone 6219 (TRAV2, TRAJ13)
CASGGYQKVTF

SEQ ID NO: 12438 - protein, 12 aa, Homo sapiens
  CDR3 for beta chain variable domain of TCR clone 6219 (TRBV5-1, TRBJ2-7)
CASSFRGYEQYF

SEQ ID NO: 12439 - protein, 13 aa, Homo sapiens
  CDR3 for alpha chain variable domain of TCR clone 6220 (TRAV21, TRAJ20)
CAVGLRVDYKLSF

SEQ ID NO: 12440 - protein, 13 aa, Homo sapiens
  CDR3 for beta chain variable domain of TCR clone 6220 (TRBV3-1, TRBJ2-2)
CASLARGSGELFF

SEQ ID NO: 12441 - protein, 14 aa, Homo sapiens
  CDR3 for alpha chain variable domain of TCR clone 6221 (TRAV2, TRAJ9)
CAVEDRSGGFKTIF

SEQ ID NO: 12442 - protein, 14 aa, Homo sapiens
  CDR3 for beta chain variable domain of TCR clone 6221 (TRBV6-1, TRBJ1-3)
CASVQGGGGNTIYF

SEQ ID NO: 12443 - protein, 14 aa, Homo sapiens
  CDR3 for alpha chain variable domain of TCR clone 6222 (TRAV4, TRAJ12)
CLVGDADSSYKLIF

SEQ ID NO: 12444 - protein, 17 aa, Homo sapiens
  CDR3 for beta chain variable domain of TCR clone 6222 (TRBV13, TRBJ2-3)
CASSLSRVAGGRNTQYF

SEQ ID NO: 12445 - protein, 14 aa, Homo sapiens
  CDR3 for alpha chain variable domain of TCR clone 6223 (TRAV29/DV5, TRAJ28)
CAARAGAGSYQLTF

SEQ ID NO: 12446 - protein, 13 aa, Homo sapiens
  CDR3 for beta chain variable domain of TCR clone 6223 (TRBV7-2, TRBJ1-5)
CASSFARNQPQHF

SEQ ID NO: 12447 - protein, 12 aa, Homo sapiens
  CDR3 for alpha chain variable domain of TCR clone 6224 (TRAV12-1, TRAJ20)
CVVNPDDYKLSF

SEQ ID NO: 12448 - protein, 15 aa, Homo sapiens
  CDR3 for beta chain variable domain of TCR clone 6224 (TRBV11-3, TRBJ2-2)
CASSLVGTGAGELFF

SEQ ID NO: 12449 - protein, 14 aa, Homo sapiens
  CDR3 for alpha chain variable domain of TCR clone 6225 (TRAV26-1, TRAJ40)
CIVRLLSGTYKYIF

SEQ ID NO: 12450 - protein, 10 aa, Homo sapiens
  CDR3 for beta chain variable domain of TCR clone 6225 (TRBV15, TRBJ2-7)
AETGGYEQYF

SEQ ID NO: 12451 - protein, 15 aa, Homo sapiens
  CDR3 for alpha chain variable domain of TCR clone 6226 (TRAV29/DV5, TRAJ24)
CAASGATDSWGKFQF

SEQ ID NO: 12452 - protein, 20 aa, Homo sapiens
  CDR3 for beta chain variable domain of TCR clone 6226 (TRBV11-2, TRBJ2-2)
LRTRPCISVPAASLPGSCFF

SEQ ID NO: 12453 - protein, 12 aa, Homo sapiens
  CDR3 for alpha chain variable domain of TCR clone 6227 (TRAV13-1, TRAJ16)
CAASNGGQKLLF

SEQ ID NO: 12454 - protein, 14 aa, Homo sapiens
  CDR3 for beta chain variable domain of TCR clone 6227 (TRBV20-1, TRBJ2-7)
CSARDPTGLDEQYF

SEQ ID NO: 12455 - protein, 13 aa, Homo sapiens
  CDR3 for alpha chain variable domain of TCR clone 6228 (TRAV13-2, TRAJ48)
CAEMDFGNEKLTF

SEQ ID NO: 12456 - protein, 16 aa, Homo sapiens
  CDR3 for beta chain variable domain of TCR clone 6228 (TRBV27, TRBJ2-2)
CASSFRGLVRTGELFF

SEQ ID NO: 12457 - protein, 22 aa, Homo sapiens
  CDR3 for alpha chain variable domain of TCR clone 6229 (TRAV2, TRAJ10)
ILQVREADAAVYYTGGGNKLTF

SEQ ID NO: 12458 - protein, 16 aa, Homo sapiens
  CDR3 for beta chain variable domain of TCR clone 6229 (TRBV29-1, TRBJ2-5)
CSVEGLAGDYQETQYF

SEQ ID NO: 12459 - protein, 11 aa, Homo sapiens
  CDR3 for alpha chain variable domain of TCR clone 6230 (TRAV35, TRAJ31)
CAESGDARLMF

SEQ ID NO: 12460 - protein, 11 aa, Homo sapiens
  CDR3 for beta chain variable domain of TCR clone 6230 (TRBV24-1, TRBJ2-3)
CATSDLDTQYF

SEQ ID NO: 12461 - protein, 15 aa, Homo sapiens
  CDR3 for alpha chain variable domain of TCR clone 6231 (TRAV29/DV5, TRAJ42)
CAAKTDGGSQGNLIF

SEQ ID NO: 12462 - protein, 16 aa, Homo sapiens
  CDR3 for beta chain variable domain of TCR clone 6231 (TRBV7-9, TRBJ2-1)
CASSLVSGPSYNEQFF

SEQ ID NO: 12463 - protein, 13 aa, Homo sapiens
  CDR3 for alpha chain variable domain of TCR clone 6232 (TRAV2, TRAJ39)
CAVLNNAGNMLTF

SEQ ID NO: 12464 - protein, 16 aa, Homo sapiens
  CDR3 for beta chain variable domain of TCR clone 6232 (TRBV19, TRBJ2-1)
CASRTSSGSIVNEQFF

SEQ ID NO: 12465 - protein, 12 aa, Homo sapiens
  CDR3 for alpha chain variable domain of TCR clone 6233 (TRAV21, TRAJ8)
CALNTGFQKLVF

SEQ ID NO: 12466 - protein, 15 aa, Homo sapiens
  CDR3 for beta chain variable domain of TCR clone 6233 (TRBV7-2, TRBJ2-5)
CASSLRGASGETQYF

SEQ ID NO: 12467 - protein, 14 aa, Homo sapiens
  CDR3 for alpha chain variable domain of TCR clone 6234 (TRAV9-2, TRAJ39)
CALYIYNAGNMLTF

SEQ ID NO: 12468 - protein, 14 aa, Homo sapiens
  CDR3 for beta chain variable domain of TCR clone 6234 (TRBV9, TRBJ2-7)
CASSPLRAVGEQYF

SEQ ID NO: 12469 - protein, 13 aa, Homo sapiens
  CDR3 for alpha chain variable domain of TCR clone 6235 (TRAV12-3, TRAJ21)
CAPGPHNFNKFYF

SEQ ID NO: 12470 - protein, 16 aa, Homo sapiens
  CDR3 for beta chain variable domain of TCR clone 6235 (TRBV5-1, TRBJ2-2)
CASSSYREGDTGELFF

SEQ ID NO: 12471 - protein, 17 aa, Homo sapiens
  CDR3 for alpha chain variable domain of TCR clone 6236 (TRAV26-2, TRAJ28)
CILRPLLIVAGSYQLTF

SEQ ID NO: 12472 - protein, 16 aa, Homo sapiens
  CDR3 for beta chain variable domain of TCR clone 6236 (TRBV6-4, TRBJ1-4)
CASSETGQDPNEKLFF

SEQ ID NO: 12473 - protein, 12 aa, Homo sapiens
  CDR3 for alpha chain variable domain of TCR clone 6237 (TRAV20, TRAJ36)
CAVLTGANNLFF

SEQ ID NO: 12474 - protein, 16 aa, Homo sapiens
  CDR3 for beta chain variable domain of TCR clone 6237 (TRBV5-5, TRBJ1-6)
CASSYLSTGFNSPLHF

SEQ ID NO: 12475 - protein, 17 aa, Homo sapiens
  CDR3 for alpha chain variable domain of TCR clone 6238 (TRAV27, TRAJ42)
CAERVIYYGGSQGNLIF

SEQ ID NO: 12476 - protein, 14 aa, Homo sapiens
  CDR3 for beta chain variable domain of TCR clone 6238 (TRBV20-1, TRBJ2-1)
CSAQIGGSANEQFF

SEQ ID NO: 12477 - protein, 16 aa, Homo sapiens
  CDR3 for alpha chain variable domain of TCR clone 6239 (TRAV3, TRAJ10)
CAVRDMRAGGGNKLTF

SEQ ID NO: 12478 - protein, 20 aa, Homo sapiens
  CDR3 for beta chain variable domain of TCR clone 6239 (TRBV28, TRBJ2-1)
CASTPIGRSPGLAGGNEQFF

SEQ ID NO: 12479 - protein, 13 aa, Homo sapiens
  CDR3 for alpha chain variable domain of TCR clone 6240 (TRAV13-1, TRAJ39)
CSKYSNAGNMLTF

SEQ ID NO: 12480 - protein, 18 aa, Homo sapiens
  CDR3 for beta chain variable domain of TCR clone 6240 (TRBV10-2, TRBJ2-2)
CISAPAVHRQADAGELFF

SEQ ID NO: 12481 - protein, 14 aa, Homo sapiens
  CDR3 for alpha chain variable domain of TCR clone 6241 (TRAV22, TRAJ28)
CAVYSGAGSYQLTF

SEQ ID NO: 12482 - protein, 16 aa, Homo sapiens
  CDR3 for beta chain variable domain of TCR clone 6241 (TRBV24-1, TRBJ2-3)
CATSDPGTGATDTQYF

SEQ ID NO: 12483 - protein, 12 aa, Homo sapiens
  CDR3 for alpha chain variable domain of TCR clone 6242 (TRAV12-3, TRAJ17)
CAMTLTGNKLTF

SEQ ID NO: 12484 - protein, 15 aa, Homo sapiens
  CDR3 for beta chain variable domain of TCR clone 6242 (TRBV20-1, TRBJ2-7)
CSARDLVSGMDEQYF

SEQ ID NO: 12485 - protein, 12 aa, Homo sapiens
  CDR3 for alpha chain variable domain of TCR clone 6243 (TRAV13-1, TRAJ21)
CAAKEGFNKFYF

SEQ ID NO: 12486 - protein, 16 aa, Homo sapiens
  CDR3 for beta chain variable domain of TCR clone 6243 (TRBV7-8, TRBJ2-4)
CASSAERTLAKNIQYF

SEQ ID NO: 12487 - protein, 16 aa, Homo sapiens
  CDR3 for alpha chain variable domain of TCR clone 6244 (TRAV3, TRAJ37)
CAVRGKGSGNTGKLIF

SEQ ID NO: 12488 - protein, 14 aa, Homo sapiens
  CDR3 for beta chain variable domain of TCR clone 6244 (TRBV6-1, TRBJ1-3)
CASVQGGGGNTIYF

SEQ ID NO: 12489 - protein, 13 aa, Homo sapiens
  CDR3 for alpha chain variable domain of TCR clone 6245 (TRAV3, TRAJ21)
CAVREPDFNKFYF

SEQ ID NO: 12490 - protein, 17 aa, Homo sapiens
  CDR3 for beta chain variable domain of TCR clone 6245 (TRBV11-2, TRBJ2-3)
CQQLRGASRGAPNTQYF

SEQ ID NO: 12491 - protein, 14 aa, Homo sapiens
  CDR3 for alpha chain variable domain of TCR clone 6246 (TRAV23/DV6, TRAJ10)
CAAAISGGGNKLTF

SEQ ID NO: 12492 - protein, 12 aa, Homo sapiens
  CDR3 for beta chain variable domain of TCR clone 6246 (TRBV28, TRBJ2-7)
CASSVPPYEQYF

SEQ ID NO: 12493 - protein, 15 aa, Homo sapiens
  CDR3 for alpha chain variable domain of TCR clone 6247 (TRAV29/DV5, TRAJ44)
CAASAGTGTASKLTF

SEQ ID NO: 12494 - protein, 12 aa, Homo sapiens
  CDR3 for beta chain variable domain of TCR clone 6247 (TRBV11-2, TRBJ2-2)
CASSLGGGELFF

SEQ ID NO: 12495 - protein, 13 aa, Homo sapiens
  CDR3 for alpha chain variable domain of TCR clone 6248 (TRAV8-6, TRAJ54)
CAVSEEGAQKLVF

SEQ ID NO: 12496 - protein, 15 aa, Homo sapiens
  CDR3 for beta chain variable domain of TCR clone 6248 (TRBV27, TRBJ2-5)
CASSLYPRGGETQYF

SEQ ID NO: 12497 - protein, 13 aa, Homo sapiens
  CDR3 for alpha chain variable domain of TCR clone 6249 (TRAV21, TRAJ27)
CAARPGNAGKSTF

SEQ ID NO: 12498 - protein, 11 aa, Homo sapiens
  CDR3 for beta chain variable domain of TCR clone 6249 (TRBV11-2, TRBJ2-2)
CASSLPGELFF

SEQ ID NO: 12499 - protein, 14 aa, Homo sapiens
  CDR3 for alpha chain variable domain of TCR clone 6250 (TRAV1-2, TRAJ8)
CAVREDTGFQKLVF

SEQ ID NO: 12500 - protein, 16 aa, Homo sapiens
  CDR3 for beta chain variable domain of TCR clone 6250 (TRBV20-1, TRBJ2-1)
CSARDLKQGMNNEQFF

SEQ ID NO: 12501 - protein, 13 aa, Homo sapiens
  CDR3 for alpha chain variable domain of TCR clone 6251 (TRAV27, TRAJ41)
CAGEGNSGYALNF

SEQ ID NO: 12502 - protein, 13 aa, Homo sapiens
  CDR3 for beta chain variable domain of TCR clone 6251 (TRBV19, TRBJ1-2)
CASSVPGQDGYTF

SEQ ID NO: 12503 - protein, 12 aa, Homo sapiens
  CDR3 for alpha chain variable domain of TCR clone 6252 (TRAV12-3, TRAJ17)
CAMTLTGNKQTF

SEQ ID NO: 12504 - protein, 15 aa, Homo sapiens
  CDR3 for beta chain variable domain of TCR clone 6252 (TRBV20-1, TRBJ2-7)
CSARDRVSGMDEQYF

SEQ ID NO: 12505 - protein, 12 aa, Homo sapiens
  CDR3 for alpha chain variable domain of TCR clone 6253 (TRAV12-1, TRAJ40)
CVFYSGTYKYIF

SEQ ID NO: 12506 - protein, 10 aa, Homo sapiens
  CDR3 for beta chain variable domain of TCR clone 6253 (TRBV12-4, TRBJ2-2)
CASSLVAGTR

SEQ ID NO: 12507 - protein, 12 aa, Homo sapiens
  CDR3 for alpha chain variable domain of TCR clone 6254 (TRAV25, TRAJ31)
CAGHLNNARLMF

SEQ ID NO: 12508 - protein, 16 aa, Homo sapiens
  CDR3 for beta chain variable domain of TCR clone 6254 (TRBV10-3, TRBJ2-1)
CAIRGGGRGDYNEQFF

SEQ ID NO: 12509 - protein, 15 aa, Homo sapiens
  CDR3 for alpha chain variable domain of TCR clone 6255 (TRAV8-3, TRAJ45)
CASSYSGGGADGLTF

SEQ ID NO: 12510 - protein, 13 aa, Homo sapiens
  CDR3 for beta chain variable domain of TCR clone 6255 (TRBV10-3, TRBJ2-7)
CASKRAVNYEQYF

SEQ ID NO: 12511 - protein, 23 aa, Homo sapiens
  CDR3 for alpha chain variable domain of TCR clone 6256 (TRAV26-1, TRAJ38)
CIADNAGNNHIQNPDPAVYQLRD

SEQ ID NO: 12512 - protein, 16 aa, Homo sapiens
  CDR3 for beta chain variable domain of TCR clone 6256 (TRBV7-9, TRBJ1-2)
CASSLGFSSGEDGYTF

SEQ ID NO: 12513 - protein, 12 aa, Homo sapiens
  CDR3 for alpha chain variable domain of TCR clone 6257 (TRAV38-1, TRAJ30)
CAFMGRDDKIIF

SEQ ID NO: 12514 - protein, 11 aa, Homo sapiens
  CDR3 for beta chain variable domain of TCR clone 6257 (TRBV19, TRBJ1-1)
CASSTTGQAFF

SEQ ID NO: 12515 - protein, 14 aa, Homo sapiens
  CDR3 for alpha chain variable domain of TCR clone 6258 (TRAV12-2, TRAJ13)
CAVRKTGGYQKVTF

SEQ ID NO: 12516 - protein, 15 aa, Homo sapiens
  CDR3 for beta chain variable domain of TCR clone 6258 (TRBV27, TRBJ2-1)
CASSNGGGSSNEQFF

SEQ ID NO: 12517 - protein, 14 aa, Homo sapiens
  CDR3 for alpha chain variable domain of TCR clone 6259 (TRAV13-2, TRAJ39)
CAENHNNAGNMLTF

SEQ ID NO: 12518 - protein, 13 aa, Homo sapiens
  CDR3 for beta chain variable domain of TCR clone 6259 (TRBV4-3, TRBJ2-1)
CASSQKLERQQFF

SEQ ID NO: 12519 - protein, 14 aa, Homo sapiens
  CDR3 for alpha chain variable domain of TCR clone 6260 (TRAV1-2, TRAJ16)
CAVNRFSDGQKLLF

SEQ ID NO: 12520 - protein, 16 aa, Homo sapiens
  CDR3 for beta chain variable domain of TCR clone 6260 (TRBV6-1, TRBJ2-5)
CASSETLDRGAETQYF

SEQ ID NO: 12521 - protein, 11 aa, Homo sapiens
  CDR3 for alpha chain variable domain of TCR clone 6261 (TRAV12-3, TRAJ43)
CAMSVSNDMRF

SEQ ID NO: 12522 - protein, 17 aa, Homo sapiens
  CDR3 for beta chain variable domain of TCR clone 6261 (TRBV20-1, TRBJ2-1)
CSASSSGLAGSYNEQFF

SEQ ID NO: 12523 - protein, 13 aa, Homo sapiens
  CDR3 for alpha chain variable domain of TCR clone 6262 (TRAV2, TRAJ13)
CAVESGGYQKVTF

SEQ ID NO: 12524 - protein, 13 aa, Homo sapiens
  CDR3 for beta chain variable domain of TCR clone 6262 (TRBV7-2, TRBJ1-1)
CASNLKGAKVAFF

SEQ ID NO: 12525 - protein, 12 aa, Homo sapiens
  CDR3 for alpha chain variable domain of TCR clone 6263 (TRAV4, TRAJ6)
CLAPGGSYIPTF

SEQ ID NO: 12526 - protein, 12 aa, Homo sapiens
  CDR3 for beta chain variable domain of TCR clone 6263 (TRBV6-5, TRBJ2-3)
CASSDTTDTQYF

SEQ ID NO: 12527 - protein, 14 aa, Homo sapiens
  CDR3 for alpha chain variable domain of TCR clone 6264 (TRAV34, TRAJ44)
CGADGTGTASKLTF

SEQ ID NO: 12528 - protein, 17 aa, Homo sapiens
  CDR3 for beta chain variable domain of TCR clone 6264 (TRBV28, TRBJ2-5)
CASSRQGGLAGAETQYF

SEQ ID NO: 12529 - protein, 14 aa, Homo sapiens
  CDR3 for alpha chain variable domain of TCR clone 6265 (TRAV1-2, TRAJ8)
CAVREDTGFQKLVF

SEQ ID NO: 12530 - protein, 15 aa, Homo sapiens
  CDR3 for beta chain variable domain of TCR clone 6265 (TRBV6-3, TRBJ2-7)
CASSPPGTVFYEQYF

SEQ ID NO: 12531 - protein, 13 aa, Homo sapiens
  CDR3 for alpha chain variable domain of TCR clone 6266 (TRAV1-1, TRAJ33)
CASHMDSNYQLIW

SEQ ID NO: 12532 - protein, 18 aa, Homo sapiens
  CDR3 for beta chain variable domain of TCR clone 6266 (TRBV20-1, TRBJ2-2)
CSARVQTARPSGTGELFF

SEQ ID NO: 12533 - protein, 15 aa, Homo sapiens
  CDR3 for alpha chain variable domain of TCR clone 6267 (TRAV1-2, TRAJ9)
CAVRDDGTGGFKTIF

SEQ ID NO: 12534 - protein, 16 aa, Homo sapiens
  CDR3 for beta chain variable domain of TCR clone 6267 (TRBV7-2, TRBJ1-6)
CASSSFESSYNSPLHF

SEQ ID NO: 12535 - protein, 14 aa, Homo sapiens
  CDR3 for alpha chain variable domain of TCR clone 6268 (TRAV1-2, TRAJ16)
CAVNRFSDGQKLLF

SEQ ID NO: 12536 - protein, 13 aa, Homo sapiens
  CDR3 for beta chain variable domain of TCR clone 6268 (TRBV7-2, TRBJ2-2)
CASSLAVTGELFF

SEQ ID NO: 12537 - protein, 15 aa, Homo sapiens
  CDR3 for alpha chain variable domain of TCR clone 6269 (TRAV12-1, TRAJ9)
CVVSFGDTGGFKTIF

SEQ ID NO: 12538 - protein, 12 aa, Homo sapiens
  CDR3 for beta chain variable domain of TCR clone 6269 (TRBV11-3, TRBJ1-1)
CASSHRQGEAFF

SEQ ID NO: 12539 - protein, 13 aa, Homo sapiens
  CDR3 for alpha chain variable domain of TCR clone 6270 (TRAV30, TRAJ49)
CGTESQPVTSSIL

SEQ ID NO: 12540 - protein, 13 aa, Homo sapiens
  CDR3 for beta chain variable domain of TCR clone 6270 (TRBV7-2, TRBJ2-2)
CASSLAVTGELFF

SEQ ID NO: 12541 - protein, 14 aa, Homo sapiens
  CDR3 for alpha chain variable domain of TCR clone 6271 (TRAV26-2, TRAJ32)
CCVGYGGATNKLIF

SEQ ID NO: 12542 - protein, 14 aa, Homo sapiens
  CDR3 for beta chain variable domain of TCR clone 6271 (TRBV7-6, TRBJ2-3)
CASSLGTVTDTQYF

SEQ ID NO: 12543 - protein, 15 aa, Homo sapiens
  CDR3 for alpha chain variable domain of TCR clone 6272 (TRAV12-2, TRAJ53)
CAVNGGGGSNYKLTF

SEQ ID NO: 12544 - protein, 12 aa, Homo sapiens
  CDR3 for beta chain variable domain of TCR clone 6272 (TRBV11-2, TRBJ2-1)
CASSPGNNEQFF

SEQ ID NO: 12545 - protein, 14 aa, Homo sapiens
  CDR3 for alpha chain variable domain of TCR clone 6273 (TRAV12-1, TRAJ17)
CVVNYKAAGNKLTL

SEQ ID NO: 12546 - protein, 17 aa, Homo sapiens
  CDR3 for beta chain variable domain of TCR clone 6273 (TRBV20-1, TRBJ2-1)
CSASSSGLAGSYNEQFF

SEQ ID NO: 12547 - protein, 15 aa, Homo sapiens
  CDR3 for alpha chain variable domain of TCR clone 6274 (TRAV12-3, TRAJ11)
CAMSEENSGYSTLTF

SEQ ID NO: 12548 - protein, 14 aa, Homo sapiens
  CDR3 for beta chain variable domain of TCR clone 6274 (TRBV18, TRBJ2-5)
CASSPGVSQETQYF

SEQ ID NO: 12549 - protein, 14 aa, Homo sapiens
  CDR3 for alpha chain variable domain of TCR clone 6275 (TRAV12-3, TRAJ39)
SATYLSNAGNMLTF

SEQ ID NO: 12550 - protein, 13 aa, Homo sapiens
  CDR3 for beta chain variable domain of TCR clone 6275 (TRBV28, TRBJ1-2)
CASSPGNRNGYTF

SEQ ID NO: 12551 - protein, 15 aa, Homo sapiens
  CDR3 for alpha chain variable domain of TCR clone 6276 (TRAV12-3, TRAJ6)
CAMSATSGGSYIPTF

SEQ ID NO: 12552 - protein, 14 aa, Homo sapiens
  CDR3 for beta chain variable domain of TCR clone 6276 (TRBV7-8, TRBJ2-3)
CASSLEAGTDTQYF

SEQ ID NO: 12553 - protein, 16 aa, Homo sapiens
  CDR3 for alpha chain variable domain of TCR clone 6277 (TRAV30, TRAJ24)
CGTEIVDADSWGKFQC

SEQ ID NO: 12554 - protein, 14 aa, Homo sapiens
  CDR3 for beta chain variable domain of TCR clone 6277 (TRBV12-5, TRBJ2-5)
CASGSRTHQETQYF

SEQ ID NO: 12555 - protein, 19 aa, Homo sapiens
  CDR3 for alpha chain variable domain of TCR clone 6278 (TRAV30, TRAJ52)
CGTEANTNAGGTSYGKLTF

SEQ ID NO: 12556 - protein, 17 aa, Homo sapiens
  CDR3 for beta chain variable domain of TCR clone 6278 (TRBV28, TRBJ2-7)
CASSPLRGRRWKGGQYF

SEQ ID NO: 12557 - protein, 16 aa, Homo sapiens
  CDR3 for alpha chain variable domain of TCR clone 6279 (TRAV30, TRAJ24)
CGTEIVDADSWGKFQF

SEQ ID NO: 12558 - protein, 15 aa, Homo sapiens
  CDR3 for beta chain variable domain of TCR clone 6279 (TRBV4-3, TRBJ1-5)
CASSQEAVGGQPQHF

SEQ ID NO: 12559 - protein, 14 aa, Homo sapiens
  CDR3 for alpha chain variable domain of TCR clone 6280 (TRAV1-2, TRAJ16)
CAVNRFSDGQKLLF

SEQ ID NO: 12560 - protein, 13 aa, Homo sapiens
  CDR3 for beta chain variable domain of TCR clone 6280 (TRBV10-3, TRBJ2-1)
CATGLADNNEQFF

SEQ ID NO: 12561 - protein, 14 aa, Homo sapiens
  CDR3 for alpha chain variable domain of TCR clone 6281 (TRAV13-1, TRAJ35)
CAASKGGFGNVLHC

SEQ ID NO: 12562 - protein, 13 aa, Homo sapiens
  CDR3 for beta chain variable domain of TCR clone 6281 (TRBV7-3, TRBJ1-1)
CASSQDWEAEAFF

SEQ ID NO: 12563 - protein, 13 aa, Homo sapiens
  CDR3 for alpha chain variable domain of TCR clone 6282 (TRAV2, TRAJ40)
CAVVTSGTYKYIF

SEQ ID NO: 12564 - protein, 14 aa, Homo sapiens
  CDR3 for beta chain variable domain of TCR clone 6282 (TRBV7-6, TRBJ2-1)
CASSLGGGADEQFF

SEQ ID NO: 12565 - protein, 14 aa, Homo sapiens
  CDR3 for alpha chain variable domain of TCR clone 6283 (TRAV9-2, TRAJ39)
CALYIYNAGNMLTF

SEQ ID NO: 12566 - protein, 17 aa, Homo sapiens
  CDR3 for beta chain variable domain of TCR clone 6283 (TRBV28, TRBJ2-5)
CASSTPEGDALQETQYF

SEQ ID NO: 12567 - protein, 12 aa, Homo sapiens
  CDR3 for alpha chain variable domain of TCR clone 6284 (TRAV8-3, TRAJ26)
CAGDNYGQNFVF

SEQ ID NO: 12568 - protein, 16 aa, Homo sapiens
  CDR3 for beta chain variable domain of TCR clone 6284 (TRBV12-4, TRBJ2-5)
CASSFFVRGRQETQYF

SEQ ID NO: 12569 - protein, 14 aa, Homo sapiens
  CDR3 for alpha chain variable domain of TCR clone 6285 (TRAV12-3, TRAJ10)
SHLPLTGGGNKLTF

SEQ ID NO: 12570 - protein, 13 aa, Homo sapiens
  CDR3 for beta chain variable domain of TCR clone 6285 (TRBV2, TRBJ1-6)
CASGRGGISPLHF

SEQ ID NO: 12571 - protein, 14 aa, Homo sapiens
  CDR3 for alpha chain variable domain of TCR clone 6286 (TRAV12-2, TRAJ13)
CAVKKTGGYQKVTF

SEQ ID NO: 12572 - protein, 14 aa, Homo sapiens
  CDR3 for beta chain variable domain of TCR clone 6286 (TRBV4-2, TRBJ2-1)
CASGLDRAYNEQFF

SEQ ID NO: 12573 - protein, 14 aa, Homo sapiens
  CDR3 for alpha chain variable domain of TCR clone 6287 (TRAV1-2, TRAJ16)
CAVNRFSDGQKLLF

SEQ ID NO: 12574 - protein, 15 aa, Homo sapiens
  CDR3 for beta chain variable domain of TCR clone 6287 (TRBV28, TRBJ2-5)
CASSPGQGSIETQYF

SEQ ID NO: 12575 - protein, 12 aa, Homo sapiens
  CDR3 for alpha chain variable domain of TCR clone 6288 (TRAV2, TRAJ31)
CAVEDNNARLMF

SEQ ID NO: 12576 - protein, 12 aa, Homo sapiens
  CDR3 for beta chain variable domain of TCR clone 6288 (TRBV28, TRBJ2-3)
CASSLYRDTQYF

SEQ ID NO: 12577 - protein, 11 aa, Homo sapiens
  CDR3 for alpha chain variable domain of TCR clone 6289 (TRAV26-1, TRAJ37)
CIVRVGRKLIF

SEQ ID NO: 12578 - protein, 13 aa, Homo sapiens
  CDR3 for beta chain variable domain of TCR clone 6289 (TRBV7-2, TRBJ2-2)
CASSLAVTGELFF

SEQ ID NO: 12579 - protein, 13 aa, Homo sapiens
  CDR3 for alpha chain variable domain of TCR clone 6290 (TRAV23/DV6, TRAJ31)
CAARRGNNARLMF

SEQ ID NO: 12580 - protein, 15 aa, Homo sapiens
  CDR3 for beta chain variable domain of TCR clone 6290 (TRBV5-4, TRBJ2-3)
CASSLAGRVTDTQYF

SEQ ID NO: 12581 - protein, 14 aa, Homo sapiens
  CDR3 for alpha chain variable domain of TCR clone 6291 (TRAV17, TRAJ45)
CATASGGGADGLTF

SEQ ID NO: 12582 - protein, 17 aa, Homo sapiens
  CDR3 for beta chain variable domain of TCR clone 6291 (TRBV13, TRBJ2-3)
CASSLSRVAGGRNTQYF

SEQ ID NO: 12583 - protein, 14 aa, Homo sapiens
  CDR3 for alpha chain variable domain of TCR clone 6292 (TRAV26-1, TRAJ34)
CIVIVAYNTDKLIF

SEQ ID NO: 12584 - protein, 15 aa, Homo sapiens
  CDR3 for beta chain variable domain of TCR clone 6292 (TRBV20-1, TRBJ2-7)
CSARVPAAYFYKQYF

SEQ ID NO: 12585 - protein, 17 aa, Homo sapiens
  CDR3 for alpha chain variable domain of TCR clone 6293 (TRAV3, TRAJ6)
CAVRDGTRAGGSYIPTF

SEQ ID NO: 12586 - protein, 14 aa, Homo sapiens
  CDR3 for beta chain variable domain of TCR clone 6293 (TRBV7-2, TRBJ2-7)
CASSPKTSFYEQYF

SEQ ID NO: 12587 - protein, 11 aa, Homo sapiens
  CDR3 for alpha chain variable domain of TCR clone 6294 (TRAV1-1, TRAJ23)
CAVRQGGKLIF

SEQ ID NO: 12588 - protein, 12 aa, Homo sapiens
  CDR3 for beta chain variable domain of TCR clone 6294 (TRBV11-2, TRBJ2-2)
CASSLGGGELFF

SEQ ID NO: 12589 - protein, 17 aa, Homo sapiens
  CDR3 for alpha chain variable domain of TCR clone 6295 (TRAV8-3, TRAJ52)
CCGCDLPGDYSYGKLTF

SEQ ID NO: 12590 - protein, 18 aa, Homo sapiens
  CDR3 for beta chain variable domain of TCR clone 6295 (TRBV11-2, TRBJ2-6)
CASSLNPFLGTGANVLTF

SEQ ID NO: 12591 - protein, 13 aa, Homo sapiens
  CDR3 for alpha chain variable domain of TCR clone 6296 (TRAV23/DV6, TRAJ47)
CAASMTRGNKLVF

SEQ ID NO: 12592 - protein, 13 aa, Homo sapiens
  CDR3 for beta chain variable domain of TCR clone 6296 (TRBV9, TRBJ2-2)
CASSTFSSGELFF

SEQ ID NO: 12593 - protein, 17 aa, Homo sapiens
  CDR3 for alpha chain variable domain of TCR clone 6297 (TRAV3, TRAJ6)
CAVRDGPRAGGSYIPTF

SEQ ID NO: 12594 - protein, 14 aa, Homo sapiens
  CDR3 for beta chain variable domain of TCR clone 6297 (TRBV7-2, TRBJ2-7)
CASSPKASFYEQYF

SEQ ID NO: 12595 - protein, 15 aa, Homo sapiens
  CDR3 for alpha chain variable domain of TCR clone 6298 (TRAV12-2, TRAJ53)
CAVNGGGGSNYKLTF

SEQ ID NO: 12596 - protein, 15 aa, Homo sapiens
  CDR3 for beta chain variable domain of TCR clone 6298 (TRBV28, TRBJ2-1)
CASSGLAEVDNEQFF

SEQ ID NO: 12597 - protein, 13 aa, Homo sapiens
  CDR3 for alpha chain variable domain of TCR clone 6299 (TRAV35, TRAJ42)
CAGFPGSQGNLIF

SEQ ID NO: 12598 - protein, 16 aa, Homo sapiens
  CDR3 for beta chain variable domain of TCR clone 6299 (TRBV19, TRBJ2-2)
CASSFPGQGLAGELFF

SEQ ID NO: 12599 - protein, 14 aa, Homo sapiens
  CDR3 for alpha chain variable domain of TCR clone 6300 (TRAV14/DV4, TRAJ20)
CAMREGYNDYKLSF

SEQ ID NO: 12600 - protein, 15 aa, Homo sapiens
  CDR3 for beta chain variable domain of TCR clone 6300 (TRBV28, TRBJ2-7)
CASSLISGGSYEQYF

SEQ ID NO: 12601 - protein, 15 aa, Homo sapiens
  CDR3 for alpha chain variable domain of TCR clone 6301 (TRAV27, TRAJ38)
CAARRNAGNNRKPIW

SEQ ID NO: 12602 - protein, 13 aa, Homo sapiens
  CDR3 for beta chain variable domain of TCR clone 6301 (TRBV12-5, TRBJ2-3)
CASGDRQSDTQYF

SEQ ID NO: 12603 - protein, 14 aa, Homo sapiens
  CDR3 for alpha chain variable domain of TCR clone 6302 (TRAV12-3, TRAJ53)
CAMRSGGSNYKLTF

SEQ ID NO: 12604 - protein, 14 aa, Homo sapiens
  CDR3 for beta chain variable domain of TCR clone 6302 (TRBV18, TRBJ2-7)
CASSPPAGAPEQYF

SEQ ID NO: 12605 - protein, 14 aa, Homo sapiens
  CDR3 for alpha chain variable domain of TCR clone 6303 (TRAV29/DV5, TRAJ44)
CAASALGTASKLTF

SEQ ID NO: 12606 - protein, 13 aa, Homo sapiens
  CDR3 for beta chain variable domain of TCR clone 6303 (TRBV29-1, TRBJ2-7)
CSVKRGGNYEQYF

SEQ ID NO: 12607 - protein, 16 aa, Homo sapiens
  CDR3 for alpha chain variable domain of TCR clone 6304 (TRAV12-3, TRAJ53)
CAMSPGSGGSNDKLTF

SEQ ID NO: 12608 - protein, 11 aa, Homo sapiens
  CDR3 for beta chain variable domain of TCR clone 6304 (TRBV29-1, TRBJ2-5)
CSEDRTGTQYF

SEQ ID NO: 12609 - protein, 16 aa, Homo sapiens
  CDR3 for alpha chain variable domain of TCR clone 6305 (TRAV1-2, TRAJ10)
CAVRGVLTGGGNKLTF

SEQ ID NO: 12610 - protein, 13 aa, Homo sapiens
  CDR3 for beta chain variable domain of TCR clone 6305 (TRBV12-4, TRBJ1-1)
CASSPGTGFEAFF

SEQ ID NO: 12611 - protein, 12 aa, Homo sapiens
  CDR3 for alpha chain variable domain of TCR clone 6306 (TRAV12-3, TRAJ17)
CAMTITGNKLTF

SEQ ID NO: 12612 - protein, 15 aa, Homo sapiens
  CDR3 for beta chain variable domain of TCR clone 6306 (TRBV20-1, TRBJ2-7)
CSARDRVSGMDEQYF

SEQ ID NO: 12613 - protein, 14 aa, Homo sapiens
  CDR3 for alpha chain variable domain of TCR clone 6307 (TRAV1-2, TRAJ8)
CAVREDTGFQKLVS

SEQ ID NO: 12614 - protein, 15 aa, Homo sapiens
  CDR3 for beta chain variable domain of TCR clone 6307 (TRBV6-3, TRBJ2-7)
CASSSPGTVFYEQYF

SEQ ID NO: 12615 - protein, 12 aa, Homo sapiens
  CDR3 for alpha chain variable domain of TCR clone 6308 (TRAV12-1, TRAJ15)
CVVNQAGTALIF

SEQ ID NO: 12616 - protein, 14 aa, Homo sapiens
  CDR3 for beta chain variable domain of TCR clone 6308 (TRBV11-3, TRBJ2-1)
CASSLAVSYNEQFF

SEQ ID NO: 12617 - protein, 14 aa, Homo sapiens
  CDR3 for alpha chain variable domain of TCR clone 6309 (TRAV1-2, TRAJ8)
CAVREDTGFQKLVF

SEQ ID NO: 12618 - protein, 14 aa, Homo sapiens
  CDR3 for beta chain variable domain of TCR clone 6309 (TRBV7-8, TRBJ2-3)
CASSLEAGTDTQYF

SEQ ID NO: 12619 - protein, 10 aa, Homo sapiens
  CDR3 for alpha chain variable domain of TCR clone 6310 (TRAV23/DV6, TRAJ45)
TGGGADGLTF

SEQ ID NO: 12620 - protein, 15 aa, Homo sapiens
  CDR3 for beta chain variable domain of TCR clone 6310 (TRBV27, TRBJ2-1)
CASSNGGGSSNEQFF

SEQ ID NO: 12621 - protein, 13 aa, Homo sapiens
  CDR3 for alpha chain variable domain of TCR clone 6311 (TRAV39, TRAJ58)
CAGEETSGSRLTF

SEQ ID NO: 12622 - protein, 15 aa, Homo sapiens
  CDR3 for beta chain variable domain of TCR clone 6311 (TRBV4-1, TRBJ2-7)
CASSQNTGRLYEQYF

SEQ ID NO: 12623 - protein, 12 aa, Homo sapiens
  CDR3 for alpha chain variable domain of TCR clone 6312 (TRAV12-3, TRAJ17)
CAMTLTGNKLTF

SEQ ID NO: 12624 - protein, 13 aa, Homo sapiens
  CDR3 for beta chain variable domain of TCR clone 6312 (TRBV11-3, TRBJ2-7)
CASSLDKLYEQYF

SEQ ID NO: 12625 - protein, 17 aa, Homo sapiens
  CDR3 for alpha chain variable domain of TCR clone 6313 (TRAV3, TRAJ6)
CAVRDGPRAGGSYVPTF

SEQ ID NO: 12626 - protein, 14 aa, Homo sapiens
  CDR3 for beta chain variable domain of TCR clone 6313 (TRBV7-2, TRBJ2-7)
CASSPKTSFYEQYF

SEQ ID NO: 12627 - protein, 13 aa, Homo sapiens
  CDR3 for alpha chain variable domain of TCR clone 6314 (TRAV12-3, TRAJ29)
CAMTLSGNTPLVF

SEQ ID NO: 12628 - protein, 15 aa, Homo sapiens
  CDR3 for beta chain variable domain of TCR clone 6314 (TRBV5-1, TRBJ2-6)
CASSLDPSGANVLTF

SEQ ID NO: 12629 - protein, 12 aa, Homo sapiens
  CDR3 for alpha chain variable domain of TCR clone 6315 (TRAV27, TRAJ22)
CAGDGAGVEIWF

SEQ ID NO: 12630 - protein, 17 aa, Homo sapiens
  CDR3 for beta chain variable domain of TCR clone 6315 (TRBV5-5, TRBJ1-1)
CASSLRFRGLMNTEAFF

SEQ ID NO: 12631 - protein, 14 aa, Homo sapiens
  CDR3 for alpha chain variable domain of TCR clone 6316 (TRAV17, TRAJ35)
CATWTIGFGNVLHC

SEQ ID NO: 12632 - protein, 15 aa, Homo sapiens
  CDR3 for beta chain variable domain of TCR clone 6316 (TRBV7-2, TRBJ2-5)
CASSPLGLDKETQYF

SEQ ID NO: 12633 - protein, 18 aa, Homo sapiens
  CDR3 for alpha chain variable domain of TCR clone 6317 (TRAV21, TRAJ52)
CAARPSPAGGTSYGKLTF

SEQ ID NO: 12634 - protein, 17 aa, Homo sapiens
  CDR3 for beta chain variable domain of TCR clone 6317 (TRBV13, TRBJ2-3)
CASSLSRVAGGRNTQYF

SEQ ID NO: 12635 - protein, 16 aa, Homo sapiens
  CDR3 for alpha chain variable domain of TCR clone 6318 (TRAV30, TRAJ24)
CGTEIVDADSCGKFQF

SEQ ID NO: 12636 - protein, 14 aa, Homo sapiens
  CDR3 for beta chain variable domain of TCR clone 6318 (TRBV12-5, TRBJ2-5)
CASGSRTHQETQYF

SEQ ID NO: 12637 - protein, 18 aa, Homo sapiens
  CDR3 for alpha chain variable domain of TCR clone 6319 (TRAV21, TRAJ52)
CAVRPSPAGGTSYGKLTF

SEQ ID NO: 12638 - protein, 16 aa, Homo sapiens
  CDR3 for beta chain variable domain of TCR clone 6319 (TRBV7-3, TRBJ2-2)
CASSLKRGTLSGELFF

SEQ ID NO: 12639 - protein, 13 aa, Homo sapiens
  CDR3 for alpha chain variable domain of TCR clone 6320 (TRAV21, TRAJ15)
CAVANQAGTALIF

SEQ ID NO: 12640 - protein, 13 aa, Homo sapiens
  CDR3 for beta chain variable domain of TCR clone 6320 (TRBV10-3, TRBJ2-7)
CASKLAVNYEQYF

SEQ ID NO: 12641 - protein, 14 aa, Homo sapiens
  CDR3 for alpha chain variable domain of TCR clone 6321 (TRAV26-2, TRAJ38)
CILYNAGNNRKLIW

SEQ ID NO: 12642 - protein, 14 aa, Homo sapiens
  CDR3 for beta chain variable domain of TCR clone 6321 (TRBV3-1, TRBJ1-1)
CASSQGGRGSEAFF

SEQ ID NO: 12643 - protein, 13 aa, Homo sapiens
  CDR3 for alpha chain variable domain of TCR clone 6322 (TRAV13-2, TRAJ16)
CADARTDGQKLLF

SEQ ID NO: 12644 - protein, 19 aa, Homo sapiens
  CDR3 for beta chain variable domain of TCR clone 6322 (TRBV5-5, TRBJ2-5)
CASSIGGGWGDPVLRARHA

SEQ ID NO: 12645 - protein, 14 aa, Homo sapiens
  CDR3 for alpha chain variable domain of TCR clone 6323 (TRAV8-3, TRAJ35)
CAVVPQGFGNVLHC

SEQ ID NO: 12646 - protein, 15 aa, Homo sapiens
  CDR3 for beta chain variable domain of TCR clone 6323 (TRBV27, TRBJ2-1)
CASSNGGGSSNEQFF

SEQ ID NO: 12647 - protein, 14 aa, Homo sapiens
  CDR3 for alpha chain variable domain of TCR clone 6324 (TRAV12-2, TRAJ53)
CRERGGGSNYKLTF

SEQ ID NO: 12648 - protein, 17 aa, Homo sapiens
  CDR3 for beta chain variable domain of TCR clone 6324 (TRBV7-3, TRBJ2-3)
RASSLMKRMRGADTQYF

SEQ ID NO: 12649 - protein, 15 aa, Homo sapiens
  CDR3 for alpha chain variable domain of TCR clone 6325 (TRAV13-2, TRAJ45)
CAESDSGGGADGLTF

SEQ ID NO: 12650 - protein, 17 aa, Homo sapiens
  CDR3 for beta chain variable domain of TCR clone 6325 (TRBV27, TRBJ1-6)
CASSLDQLSSYNSPLHF

SEQ ID NO: 12651 - protein, 12 aa, Homo sapiens
  CDR3 for alpha chain variable domain of TCR clone 6326 (TRAV12-3, TRAJ17)
CAMTLTGNKLTF

SEQ ID NO: 12652 - protein, 15 aa, Homo sapiens
  CDR3 for beta chain variable domain of TCR clone 6326 (TRBV20-1, TRBJ2-7)
CSARDRVSGMDEQFF

SEQ ID NO: 12653 - protein, 16 aa, Homo sapiens
  CDR3 for alpha chain variable domain of TCR clone 6327 (TRAV12-3, TRAJ53)
CAMSPGSGGRNYKLTF

SEQ ID NO: 12654 - protein, 11 aa, Homo sapiens
  CDR3 for beta chain variable domain of TCR clone 6327 (TRBV29-1, TRBJ2-5)
CSEDRTGTQYF

SEQ ID NO: 12655 - protein, 14 aa, Homo sapiens
  CDR3 for alpha chain variable domain of TCR clone 6328 (TRAV17, TRAJ16)
CATADFSDGQKLLF

SEQ ID NO: 12656 - protein, 15 aa, Homo sapiens
  CDR3 for beta chain variable domain of TCR clone 6328 (TRBV18, TRBJ2-1)
CASSPPSASYNEQLF

SEQ ID NO: 12657 - protein, 13 aa, Homo sapiens
  CDR3 for alpha chain variable domain of TCR clone 6329 (TRAV36/DV7, TRAJ49)
CAGDSNTGNQFYF

SEQ ID NO: 12658 - protein, 16 aa, Homo sapiens
  CDR3 for beta chain variable domain of TCR clone 6329 (TRBV5-1, TRBJ1-1)
CASSKTGTEVGTEAFF

SEQ ID NO: 12659 - protein, 17 aa, Homo sapiens
  CDR3 for alpha chain variable domain of TCR clone 6330 (TRAV3, TRAJ6)
CAVRDGPRAGGSYIPTF

SEQ ID NO: 12660 - protein, 17 aa, Homo sapiens
  CDR3 for beta chain variable domain of TCR clone 6330 (TRBV28, TRBJ2-5)
CASSTPEGDALQETQYF

SEQ ID NO: 12661 - protein, 13 aa, Homo sapiens
  CDR3 for alpha chain variable domain of TCR clone 6331 (TRAV12-2, TRAJ10)
CAVPTGGGNKLTF

SEQ ID NO: 12662 - protein, 14 aa, Homo sapiens
  CDR3 for beta chain variable domain of TCR clone 6331 (TRBV6-1, TRBJ1-3)
CASVQGGGGNTIYF

SEQ ID NO: 12663 - protein, 12 aa, Homo sapiens
  CDR3 for alpha chain variable domain of TCR clone 6332 (TRAV12-3, TRAJ17)
CAMTLTGNKLTF

SEQ ID NO: 12664 - protein, 15 aa, Homo sapiens
  CDR3 for beta chain variable domain of TCR clone 6332 (TRBV20-1, TRBJ2-7)
CSARDRVSGMDEQYV

SEQ ID NO: 12665 - protein, 14 aa, Homo sapiens
  CDR3 for alpha chain variable domain of TCR clone 6333 (TRAV1-2, TRAJ16)
CAVNRFSDGQKLLF

SEQ ID NO: 12666 - protein, 16 aa, Homo sapiens
  CDR3 for beta chain variable domain of TCR clone 6333 (TRBV18, TRBJ1-4)
CASSLQTVATNEKLFF

SEQ ID NO: 12667 - protein, 15 aa, Homo sapiens
  CDR3 for alpha chain variable domain of TCR clone 6334 (TRAV4, TRAJ39)
CLVGPNNNAGNMLTF

SEQ ID NO: 12668 - protein, 15 aa, Homo sapiens
  CDR3 for beta chain variable domain of TCR clone 6334 (TRBV19, TRBJ1-1)
CASTSGQIQNTEAFF

SEQ ID NO: 12669 - protein, 20 aa, Homo sapiens
  CDR3 for alpha chain variable domain of TCR clone 6335 (TRAV8-3, TRAJ44)
LSTSVLWVRLYTGTASKLTF

SEQ ID NO: 12670 - protein, 16 aa, Homo sapiens
  CDR3 for beta chain variable domain of TCR clone 6335 (TRBV6-4, TRBJ1-2)
CASSEAVGDPNYGYTF

SEQ ID NO: 12671 - protein, 14 aa, Homo sapiens
  CDR3 for alpha chain variable domain of TCR clone 6336 (TRAV35, TRAJ44)
CAGRPSRTASKLTF

SEQ ID NO: 12672 - protein, 14 aa, Homo sapiens
  CDR3 for beta chain variable domain of TCR clone 6336 (TRBV7-2, TRBJ1-3)
CASSRGGTGNTIYF

SEQ ID NO: 12673 - protein, 14 aa, Homo sapiens
  CDR3 for alpha chain variable domain of TCR clone 6337 (TRAV20, TRAJ22)
CAVALGGSARQLTF

SEQ ID NO: 12674 - protein, 17 aa, Homo sapiens
  CDR3 for beta chain variable domain of TCR clone 6337 (TRBV13, TRBJ2-3)
CASSLSRVAGGRNTQYF

SEQ ID NO: 12675 - protein, 15 aa, Homo sapiens
  CDR3 for alpha chain variable domain of TCR clone 6338 (TRAV8-2, TRAJ16)
CVVSDGFSDGQKLLF

SEQ ID NO: 12676 - protein, 15 aa, Homo sapiens
  CDR3 for beta chain variable domain of TCR clone 6338 (TRBV12-4, TRBJ2-5)
CASSPPTGLQETQYF

SEQ ID NO: 12677 - protein, 15 aa, Homo sapiens
  CDR3 for alpha chain variable domain of TCR clone 6339 (TRAV21, TRAJ24)
CAARSSTDSWGKLQF

SEQ ID NO: 12678 - protein, 13 aa, Homo sapiens
  CDR3 for beta chain variable domain of TCR clone 6339 (TRBV11-3, TRBJ2-5)
CASSSTGEETQYF

SEQ ID NO: 12679 - protein, 15 aa, Homo sapiens
  CDR3 for alpha chain variable domain of TCR clone 6340 (TRAV26-1, TRAJ29)
CIVRVEGSGNKPLVF

SEQ ID NO: 12680 - protein, 14 aa, Homo sapiens
  CDR3 for beta chain variable domain of TCR clone 6340 (TRBV18, TRBJ2-5)
CASSPGVSQETQYF

SEQ ID NO: 12681 - protein, 13 aa, Homo sapiens
  CDR3 for alpha chain variable domain of TCR clone 6341 (TRAV1-2, TRAJ34)
CAVRDRDTDKLIF

SEQ ID NO: 12682 - protein, 13 aa, Homo sapiens
  CDR3 for beta chain variable domain of TCR clone 6341 (TRBV29-1, TRBJ2-1)
CSVEGGRVNEQFF

SEQ ID NO: 12683 - protein, 14 aa, Homo sapiens
  CDR3 for alpha chain variable domain of TCR clone 6342 (TRAV1-2, TRAJ8)
CAVREDTGFQKLVF

SEQ ID NO: 12684 - protein, 14 aa, Homo sapiens
  CDR3 for beta chain variable domain of TCR clone 6342 (TRBV7-2, TRBJ2-7)
CASRSQGAAYEQYF

SEQ ID NO: 12685 - protein, 12 aa, Homo sapiens
  CDR3 for alpha chain variable domain of TCR clone 6343 (TRAV12-3, TRAJ17)
CAMTLTGNKLTF

SEQ ID NO: 12686 - protein, 15 aa, Homo sapiens
  CDR3 for beta chain variable domain of TCR clone 6343 (TRBV20-1, TRBJ2-7)
CSARDRVSGMYEQYF

SEQ ID NO: 12687 - protein, 16 aa, Homo sapiens
  CDR3 for alpha chain variable domain of TCR clone 6344 (TRAV3, TRAJ10)
CAVRDMRAGGGNKLTF

SEQ ID NO: 12688 - protein, 15 aa, Homo sapiens
  CDR3 for beta chain variable domain of TCR clone 6344 (TRBV5-1, TRBJ2-1)
CASSPPRAPYNEQFF

SEQ ID NO: 12689 - protein, 15 aa, Homo sapiens
  CDR3 for alpha chain variable domain of TCR clone 6345 (TRAV23/DV6, TRAJ28)
CAALLAYSGAGSYQL

SEQ ID NO: 12690 - protein, 15 aa, Homo sapiens
  CDR3 for beta chain variable domain of TCR clone 6345 (TRBV7-2, TRBJ2-1)
CASSLVAGRYNEQFF

SEQ ID NO: 12691 - protein, 10 aa, Homo sapiens
  CDR3 for alpha chain variable domain of TCR clone 6346 (TRAV23/DV6, TRAJ57)
CSASSTLSQG

SEQ ID NO: 12692 - protein, 14 aa, Homo sapiens
  CDR3 for beta chain variable domain of TCR clone 6346 (TRBV25-1, TRBJ1-1)
CASTHLGGNTEAFF

SEQ ID NO: 12693 - protein, 12 aa, Homo sapiens
  CDR3 for alpha chain variable domain of TCR clone 6347 (TRAV12-2, TRAJ52)
IGGGTSYGKLTF

SEQ ID NO: 12694 - protein, 13 aa, Homo sapiens
  CDR3 for beta chain variable domain of TCR clone 6347 (TRBV12-4, TRBJ1-1)
CASSPGTGFGAFF

SEQ ID NO: 12695 - protein, 12 aa, Homo sapiens
  CDR3 for alpha chain variable domain of TCR clone 6348 (TRAV16, TRAJ10)
CSRTGGGSKLTF

SEQ ID NO: 12696 - protein, 15 aa, Homo sapiens
  CDR3 for beta chain variable domain of TCR clone 6348 (TRBV6-3, TRBJ2-7)
CASSSPGTVFYEQYF

SEQ ID NO: 12697 - protein, 13 aa, Homo sapiens
  CDR3 for alpha chain variable domain of TCR clone 6349 (TRAV12-1, TRAJ13)
CVVTSGGYQKVTF

SEQ ID NO: 12698 - protein, 14 aa, Homo sapiens
  CDR3 for beta chain variable domain of TCR clone 6349 (TRBV27, TRBJ2-1)
CASSATGGYNEQFF

SEQ ID NO: 12699 - protein, 16 aa, Homo sapiens
  CDR3 for alpha chain variable domain of TCR clone 6350 (TRAV12-2, TRAJ5)
CAVTRGSGTGRRALTF

SEQ ID NO: 12700 - protein, 15 aa, Homo sapiens
  CDR3 for beta chain variable domain of TCR clone 6350 (TRBV9, TRBJ2-1)
CASSVGTGELNEQFF

SEQ ID NO: 12701 - protein, 13 aa, Homo sapiens
  CDR3 for alpha chain variable domain of TCR clone 6351 (TRAV21, TRAJ27)
CAARPGNAGKSTF

SEQ ID NO: 12702 - protein, 15 aa, Homo sapiens
  CDR3 for beta chain variable domain of TCR clone 6351 (TRBV20-1, TRBJ2-7)
CSAGDRVSGMDEQYF

SEQ ID NO: 12703 - protein, 13 aa, Homo sapiens
  CDR3 for alpha chain variable domain of TCR clone 6352 (TRAV12-1, TRAJ21)
CVVIPYNFNKFYF

SEQ ID NO: 12704 - protein, 16 aa, Homo sapiens
  CDR3 for beta chain variable domain of TCR clone 6352 (TRBV12-4, TRBJ1-2)
CASSVEPGTGTGGYTF

SEQ ID NO: 12705 - protein, 14 aa, Homo sapiens
  CDR3 for alpha chain variable domain of TCR clone 6353 (TRAV12-2, TRAJ13)
CAVKKTGGYQKVTF

SEQ ID NO: 12706 - protein, 15 aa, Homo sapiens
  CDR3 for beta chain variable domain of TCR clone 6353 (TRBV27, TRBJ2-1)
CASSNGGGSPNEQFF

SEQ ID NO: 12707 - protein, 13 aa, Homo sapiens
  CDR3 for alpha chain variable domain of TCR clone 6354 (TRAV21, TRAJ20)
CAVGLRVDYKLSF

SEQ ID NO: 12708 - protein, 16 aa, Homo sapiens
  CDR3 for beta chain variable domain of TCR clone 6354 (TRBV19, TRBJ2-1)
CASSKAGPSSYNEQFF

SEQ ID NO: 12709 - protein, 17 aa, Homo sapiens
  CDR3 for alpha chain variable domain of TCR clone 6355 (TRAV13-1, TRAJ52)
CAASSGAGGTSYGKLTF

SEQ ID NO: 12710 - protein, 15 aa, Homo sapiens
  CDR3 for beta chain variable domain of TCR clone 6355 (TRBV7-2, TRBJ2-1)
CASSSGLAGGNEQFF

SEQ ID NO: 12711 - protein, 12 aa, Homo sapiens
  CDR3 for alpha chain variable domain of TCR clone 6356 (TRAV3, TRAJ43)
CAVRDPNNDMRF

SEQ ID NO: 12712 - protein, 12 aa, Homo sapiens
  CDR3 for beta chain variable domain of TCR clone 6356 (TRBV24-1, TRBJ1-1)
CATSDSDRGAFF

SEQ ID NO: 12713 - protein, 16 aa, Homo sapiens
  CDR3 for alpha chain variable domain of TCR clone 6357 (TRAV21, TRAJ45)
CAVTMYSGGGADGLTF

SEQ ID NO: 12714 - protein, 16 aa, Homo sapiens
  CDR3 for beta chain variable domain of TCR clone 6357 (TRBV24-1, TRBJ2-3)
CATSDAISGITDTQYF

SEQ ID NO: 12715 - protein, 13 aa, Homo sapiens
  CDR3 for alpha chain variable domain of TCR clone 6358 (TRAV12-1, TRAJ16)
CVVNGPDGQKLLF

SEQ ID NO: 12716 - protein, 12 aa, Homo sapiens
  CDR3 for beta chain variable domain of TCR clone 6358 (TRBV24-1, TRBJ2-2)
CATSDPGLTGLQ

SEQ ID NO: 12717 - protein, 14 aa, Homo sapiens
  CDR3 for alpha chain variable domain of TCR clone 6359 (TRAV1-2, TRAJ8)
CAVREDTGFQKLVF

SEQ ID NO: 12718 - protein, 13 aa, Homo sapiens
  CDR3 for beta chain variable domain of TCR clone 6359 (TRBV24-1, TRBJ2-2)
CATSDWSTGELFF

SEQ ID NO: 12719 - protein, 10 aa, Homo sapiens
  CDR3 for alpha chain variable domain of TCR clone 6360 (TRAV21, TRAJ34)
CAADTDKLIF

SEQ ID NO: 12720 - protein, 14 aa, Homo sapiens
  CDR3 for beta chain variable domain of TCR clone 6360 (TRBV5-4, TRBJ1-2)
CASSSSGSYVGYTF

SEQ ID NO: 12721 - protein, 14 aa, Homo sapiens
  CDR3 for alpha chain variable domain of TCR clone 6361 (TRAV1-2, TRAJ16)
CAVNRFSDGQKLLF

SEQ ID NO: 12722 - protein, 19 aa, Homo sapiens
  CDR3 for beta chain variable domain of TCR clone 6361 (TRBV6-3, TRBJ1-2)
CASSYSKGRTGPPNYGYTF

SEQ ID NO: 12723 - protein, 14 aa, Homo sapiens
  CDR3 for alpha chain variable domain of TCR clone 6362 (TRAV12-3, TRAJ10)
SHLPLTGGGNKLTF

SEQ ID NO: 12724 - protein, 15 aa, Homo sapiens
  CDR3 for beta chain variable domain of TCR clone 6362 (TRBV20-1, TRBJ2-7)
CSARDRVSGMDEQYF

SEQ ID NO: 12725 - protein, 14 aa, Homo sapiens
  CDR3 for alpha chain variable domain of TCR clone 6363 (TRAV12-2, TRAJ13)
CAVKKTGGYQKVTF

SEQ ID NO: 12726 - protein, 16 aa, Homo sapiens
  CDR3 for beta chain variable domain of TCR clone 6363 (TRBV12-4, TRBJ2-5)
CASSFFVRGRQETQYF

SEQ ID NO: 12727 - protein, 12 aa, Homo sapiens
  CDR3 for alpha chain variable domain of TCR clone 6364 (TRAV12-3, TRAJ17)
CAMTLTGNKLTF

SEQ ID NO: 12728 - protein, 15 aa, Homo sapiens
  CDR3 for beta chain variable domain of TCR clone 6364 (TRBV20-1, TRBJ2-7)
CSARDRVSEMDEQYF

SEQ ID NO: 12729 - protein, 15 aa, Homo sapiens
  CDR3 for alpha chain variable domain of TCR clone 6365 (TRAV8-3, TRAJ45)
CAVEGSGGGADGLTF

SEQ ID NO: 12730 - protein, 16 aa, Homo sapiens
  CDR3 for beta chain variable domain of TCR clone 6365 (TRBV6-5, TRBJ2-6)
CASSYPLSSGANVLTF

SEQ ID NO: 12731 - protein, 15 aa, Homo sapiens
  CDR3 for alpha chain variable domain of TCR clone 6366 (TRAV25, TRAJ52)
CAGRPGGTSYGKLTF

SEQ ID NO: 12732 - protein, 15 aa, Homo sapiens
  CDR3 for beta chain variable domain of TCR clone 6366 (TRBV19, TRBJ2-5)
CASHGLAGAQETQYF

SEQ ID NO: 12733 - protein, 14 aa, Homo sapiens
  CDR3 for alpha chain variable domain of TCR clone 6367 (TRAV8-3, TRAJ10)
CAVGNAGGGNKLTF

SEQ ID NO: 12734 - protein, 17 aa, Homo sapiens
  CDR3 for beta chain variable domain of TCR clone 6367 (TRBV27, TRBJ2-7)
CASSTKRPGTGPYEQYF

SEQ ID NO: 12735 - protein, 15 aa, Homo sapiens
  CDR3 for alpha chain variable domain of TCR clone 6368 (TRAV4, TRAJ39)
CLVGPNNNAGNMLTF

SEQ ID NO: 12736 - protein, 13 aa, Homo sapiens
  CDR3 for beta chain variable domain of TCR clone 6368 (TRBV11-3, TRBJ2-5)
CASSSTGEETQYF

SEQ ID NO: 12737 - protein, 14 aa, Homo sapiens
  CDR3 for alpha chain variable domain of TCR clone 6369 (TRAV13-1, TRAJ35)
CAASKGGFGNVLHC

SEQ ID NO: 12738 - protein, 14 aa, Homo sapiens
  CDR3 for beta chain variable domain of TCR clone 6369 (TRBV19, TRBJ2-1)
CASPTFVLSGEQFF

SEQ ID NO: 12739 - protein, 13 aa, Homo sapiens
  CDR3 for alpha chain variable domain of TCR clone 6370 (TRAV20, TRAJ48)
CAVQGVGNEKLTF

SEQ ID NO: 12740 - protein, 18 aa, Homo sapiens
  CDR3 for beta chain variable domain of TCR clone 6370 (TRBV2, TRBJ2-2)
CQQSTGTSGGGNTGELFF

SEQ ID NO: 12741 - protein, 14 aa, Homo sapiens
  CDR3 for alpha chain variable domain of TCR clone 6371 (TRAV27, TRAJ13)
CRSSNSGGYQKVTF

SEQ ID NO: 12742 - protein, 14 aa, Homo sapiens
  CDR3 for beta chain variable domain of TCR clone 6371 (TRBV7-6, TRBJ2-1)
CASSLGGGADEQFF

SEQ ID NO: 12743 - protein, 14 aa, Homo sapiens
  CDR3 for alpha chain variable domain of TCR clone 6372 (TRAV17, TRAJ57)
CATDPQGGSEKLVF

SEQ ID NO: 12744 - protein, 18 aa, Homo sapiens
  CDR3 for beta chain variable domain of TCR clone 6372 (TRBV6-5, TRBJ2-6)
CASSYSGNMESGANVLTF

SEQ ID NO: 12745 - protein, 16 aa, Homo sapiens
  CDR3 for alpha chain variable domain of TCR clone 6373 (TRAV8-4, TRAJ52)
CAVSDPGGTSYGKLTF

SEQ ID NO: 12746 - protein, 15 aa, Homo sapiens
  CDR3 for beta chain variable domain of TCR clone 6373 (TRBV12-4, TRBJ2-7)
CASSQRTSGNYEQYF

SEQ ID NO: 12747 - protein, 14 aa, Homo sapiens
  CDR3 for alpha chain variable domain of TCR clone 6374 (TRAV23/DV6, TRAJ22)
CAAFSSGSARQLTF

SEQ ID NO: 12748 - protein, 14 aa, Homo sapiens
  CDR3 for beta chain variable domain of TCR clone 6374 (TRBV19, TRBJ2-5)
CASSPPGVRETQYF

SEQ ID NO: 12749 - protein, 12 aa, Homo sapiens
  CDR3 for alpha chain variable domain of TCR clone 6375 (TRAV12-2, TRAJ33)
CAVGDSNYQLIW

SEQ ID NO: 12750 - protein, 13 aa, Homo sapiens
  CDR3 for beta chain variable domain of TCR clone 6375 (TRBV6-1, TRBJ1-2)
CASSAREGYGYTF

SEQ ID NO: 12751 - protein, 11 aa, Homo sapiens
  CDR3 for alpha chain variable domain of TCR clone 6376 (TRAV21, TRAJ39)
LLVNAGNMLTF

SEQ ID NO: 12752 - protein, 14 aa, Homo sapiens
  CDR3 for beta chain variable domain of TCR clone 6376 (TRBV19, TRBJ2-1)
CASPTFVLSGEQFF

SEQ ID NO: 12753 - protein, 15 aa, Homo sapiens
  CDR3 for alpha chain variable domain of TCR clone 6377 (TRAV26-1, TRAJ29)
CIVRVEGSGNTPLVF

SEQ ID NO: 12754 - protein, 15 aa, Homo sapiens
  CDR3 for beta chain variable domain of TCR clone 6377 (TRBV7-9, TRBJ1-5)
CASSQGRQPNQPQHF

SEQ ID NO: 12755 - protein, 16 aa, Homo sapiens
  CDR3 for alpha chain variable domain of TCR clone 6378 (TRAV3, TRAJ10)
CAVRDMRAGGGNKLTF

SEQ ID NO: 12756 - protein, 17 aa, Homo sapiens
  CDR3 for beta chain variable domain of TCR clone 6378 (TRBV13, TRBJ2-3)
CASSLSRVAGGRNTQYF

SEQ ID NO: 12757 - protein, 17 aa, Homo sapiens
  CDR3 for alpha chain variable domain of TCR clone 6379 (TRAV1-2, TRAJ6)
CAVRDTTRTGGSYIPTF

SEQ ID NO: 12758 - protein, 12 aa, Homo sapiens
  CDR3 for beta chain variable domain of TCR clone 6379 (TRBV24-1, TRBJ2-3)
CATSSGGDTQYF

SEQ ID NO: 12759 - protein, 15 aa, Homo sapiens
  CDR3 for alpha chain variable domain of TCR clone 6380 (TRAV27, TRAJ37)
CAGIHGSSNTGKLIF

SEQ ID NO: 12760 - protein, 13 aa, Homo sapiens
  CDR3 for beta chain variable domain of TCR clone 6380 (TRBV19, TRBJ2-1)
CASSIRSSWEQFF

SEQ ID NO: 12761 - protein, 13 aa, Homo sapiens
  CDR3 for alpha chain variable domain of TCR clone 6381 (TRAV17, TRAJ5)
CALRGTGRRALTF

SEQ ID NO: 12762 - protein, 13 aa, Homo sapiens
  CDR3 for beta chain variable domain of TCR clone 6381 (TRBV6-1, TRBJ1-1)
CASSRQGNTEAFF

SEQ ID NO: 12763 - protein, 14 aa, Homo sapiens
  CDR3 for alpha chain variable domain of TCR clone 6382 (TRAV3, TRAJ22)
CAVRDSGSARQLTF

SEQ ID NO: 12764 - protein, 15 aa, Homo sapiens
  CDR3 for beta chain variable domain of TCR clone 6382 (TRBV11-2, TRBJ2-5)
CASSLASYSGETQYF

SEQ ID NO: 12765 - protein, 11 aa, Homo sapiens
  CDR3 for alpha chain variable domain of TCR clone 6383 (TRAV3, TRAJ33)
CAVRRNYQLIW

SEQ ID NO: 12766 - protein, 15 aa, Homo sapiens
  CDR3 for beta chain variable domain of TCR clone 6383 (TRBV28, TRBJ1-5)
CASSDQVYSNQPQHF

SEQ ID NO: 12767 - protein, 14 aa, Homo sapiens
  CDR3 for alpha chain variable domain of TCR clone 6384 (TRAV13-2, TRAJ32)
CAESLGGATNKLIF

SEQ ID NO: 12768 - protein, 15 aa, Homo sapiens
  CDR3 for beta chain variable domain of TCR clone 6384 (TRBV20-1, TRBJ1-2)
CSARDSRGRNYGYTF

SEQ ID NO: 12769 - protein, 11 aa, Homo sapiens
  CDR3 for alpha chain variable domain of TCR clone 6385 (TRAV3, TRAJ21)
CAVGNFNKFYF

SEQ ID NO: 12770 - protein, 16 aa, Homo sapiens
  CDR3 for beta chain variable domain of TCR clone 6385 (TRBV7-3, TRBJ2-2)
CASSLKRGTLSGELFF

SEQ ID NO: 12771 - protein, 12 aa, Homo sapiens
  CDR3 for alpha chain variable domain of TCR clone 6386 (TRAV8-3, TRAJ26)
CAGDNYGQNFVF

SEQ ID NO: 12772 - protein, 15 aa, Homo sapiens
  CDR3 for beta chain variable domain of TCR clone 6386 (TRBV4-1, TRBJ1-4)
CASSDTGGTNEKLFF

SEQ ID NO: 12773 - protein, 16 aa, Homo sapiens
  CDR3 for alpha chain variable domain of TCR clone 6387 (TRAV8-3, TRAJ13)
CAVVLMNSGGYQKVTF

SEQ ID NO: 12774 - protein, 15 aa, Homo sapiens
  CDR3 for beta chain variable domain of TCR clone 6387 (TRBV5-4, TRBJ2-5)
CASSLAGGAKETQYF

SEQ ID NO: 12775 - protein, 14 aa, Homo sapiens
  CDR3 for alpha chain variable domain of TCR clone 6388 (TRAV1-2, TRAJ16)
CAVNRFSDGQKLLF

SEQ ID NO: 12776 - protein, 13 aa, Homo sapiens
  CDR3 for beta chain variable domain of TCR clone 6388 (TRBV6-1, TRBJ2-5)
CASGYQSVETQYF

SEQ ID NO: 12777 - protein, 14 aa, Homo sapiens
  CDR3 for alpha chain variable domain of TCR clone 6389 (TRAV17, TRAJ34)
CATDSLEGTDKLIF

SEQ ID NO: 12778 - protein, 14 aa, Homo sapiens
  CDR3 for beta chain variable domain of TCR clone 6389 (TRBV7-2, TRBJ2-7)
CASRSQGAAYEQYF

SEQ ID NO: 12779 - protein, 10 aa, Homo sapiens
  CDR3 for alpha chain variable domain of TCR clone 6390 (TRAV16, TRAJ22)
SAMYLRQLTF

SEQ ID NO: 12780 - protein, 11 aa, Homo sapiens
  CDR3 for beta chain variable domain of TCR clone 6390 (TRBV7-2, TRBJ2-2)
CASSIRGELFF

SEQ ID NO: 12781 - protein, 14 aa, Homo sapiens
  CDR3 for alpha chain variable domain of TCR clone 6391 (TRAV2, TRAJ37)
CAVDFTSNTGKLIF

SEQ ID NO: 12782 - protein, 14 aa, Homo sapiens
  CDR3 for beta chain variable domain of TCR clone 6391 (TRBV6-1, TRBJ1-3)
CASVQGGGGNTIYF

SEQ ID NO: 12783 - protein, 14 aa, Homo sapiens
  CDR3 for alpha chain variable domain of TCR clone 6392 (TRAV12-2, TRAJ5)
CAVNRSTGRRALTF

SEQ ID NO: 12784 - protein, 15 aa, Homo sapiens
  CDR3 for beta chain variable domain of TCR clone 6392 (TRBV20-1, TRBJ2-7)
CSARDRVSGMDEQYF

SEQ ID NO: 12785 - protein, 15 aa, Homo sapiens
  CDR3 for alpha chain variable domain of TCR clone 6393 (TRAV12-1, TRAJ9)
CVVSFGDTGGFKTIF

SEQ ID NO: 12786 - protein, 15 aa, Homo sapiens
  CDR3 for beta chain variable domain of TCR clone 6393 (TRBV20-1, TRBJ2-7)
CSARDRVSGMDEQYF

SEQ ID NO: 12787 - protein, 13 aa, Homo sapiens
  CDR3 for alpha chain variable domain of TCR clone 6394 (TRAV3, TRAJ21)
CAVATSTNFTLDL

SEQ ID NO: 12788 - protein, 16 aa, Homo sapiens
  CDR3 for beta chain variable domain of TCR clone 6394 (TRBV19, TRBJ2-1)
CASSKAGPSSYNEQFF

SEQ ID NO: 12789 - protein, 17 aa, Homo sapiens
  CDR3 for alpha chain variable domain of TCR clone 6395 (TRAV26-1, TRAJ36)
CIVRPPGDQTGANNLFF

SEQ ID NO: 12790 - protein, 15 aa, Homo sapiens
  CDR3 for beta chain variable domain of TCR clone 6395 (TRBV10-3, TRBJ2-6)
CATPAAASGANVLTF

SEQ ID NO: 12791 - protein, 18 aa, Homo sapiens
  CDR3 for alpha chain variable domain of TCR clone 6396 (TRAV21, TRAJ52)
CAVRPSPAGGTSYGKLTF

SEQ ID NO: 12792 - protein, 11 aa, Homo sapiens
  CDR3 for beta chain variable domain of TCR clone 6396 (TRBV12-4, TRBJ2-3)
CASTATDTQYF

SEQ ID NO: 12793 - protein, 12 aa, Homo sapiens
  CDR3 for alpha chain variable domain of TCR clone 6397 (TRAV2, TRAJ9)
CAVGAGGFKTIF

SEQ ID NO: 12794 - protein, 16 aa, Homo sapiens
  CDR3 for beta chain variable domain of TCR clone 6397 (TRBV13, TRBJ2-2)
CASSPRTREHTGELFF

SEQ ID NO: 12795 - protein, 10 aa, Homo sapiens
  CDR3 for alpha chain variable domain of TCR clone 6398 (TRAV21, TRAJ35)
CAVFGNVLHC

SEQ ID NO: 12796 - protein, 17 aa, Homo sapiens
  CDR3 for beta chain variable domain of TCR clone 6398 (TRBV7-2, TRBJ2-2)
CASSPRGAGEGTGELFF

SEQ ID NO: 12797 - protein, 16 aa, Homo sapiens
  CDR3 for alpha chain variable domain of TCR clone 6399 (TRAV12-3, TRAJ53)
CAMSPGSGGSNYKLTF

SEQ ID NO: 12798 - protein, 17 aa, Homo sapiens
  CDR3 for beta chain variable domain of TCR clone 6399 (TRBV20-1, TRBJ2-2)
CSASGSGQGGLTGELFF

SEQ ID NO: 12799 - protein, 16 aa, Homo sapiens
  CDR3 for alpha chain variable domain of TCR clone 6400 (TRAV1-2, TRAJ10)
CAVRGVLTGGGNKLTF

SEQ ID NO: 12800 - protein, 15 aa, Homo sapiens
  CDR3 for beta chain variable domain of TCR clone 6400 (TRBV5-1, TRBJ2-1)
CASSPPRAPYNEQFF

SEQ ID NO: 12801 - protein, 12 aa, Homo sapiens
  CDR3 for alpha chain variable domain of TCR clone 6401 (TRAV13-2, TRAJ23)
CAERHRGGKLIF

SEQ ID NO: 12802 - protein, 15 aa, Homo sapiens
  CDR3 for beta chain variable domain of TCR clone 6401 (TRBV12-4, TRBJ2-5)
CASSPPTGLQETQYF

SEQ ID NO: 12803 - protein, 10 aa, Homo sapiens
  CDR3 for alpha chain variable domain of TCR clone 6402 (TRAV23/DV6, TRAJ57)
CAASSTLSQG

SEQ ID NO: 12804 - protein, 13 aa, Homo sapiens
  CDR3 for beta chain variable domain of TCR clone 6402 (TRBV25-1, TRBJ1-1)
CQHPPGGNTEAFF

SEQ ID NO: 12805 - protein, 18 aa, Homo sapiens
  CDR3 for alpha chain variable domain of TCR clone 6403 (TRAV13-1, TRAJ52)
CAASKRSAGGTSYGKLTF

SEQ ID NO: 12806 - protein, 13 aa, Homo sapiens
  CDR3 for beta chain variable domain of TCR clone 6403 (TRBV12-4, TRBJ1-2)
CASSLRQGKGYAF

SEQ ID NO: 12807 - protein, 14 aa, Homo sapiens
  CDR3 for alpha chain variable domain of TCR clone 6404 (TRAV12-2, TRAJ24)
CAVTPADSWGKLQF

SEQ ID NO: 12808 - protein, 15 aa, Homo sapiens
  CDR3 for beta chain variable domain of TCR clone 6404 (TRBV27, TRBJ2-1)
CASSNGGGSSNEQFF

SEQ ID NO: 12809 - protein, 15 aa, Homo sapiens
  CDR3 for alpha chain variable domain of TCR clone 6405 (TRAV8-3, TRAJ15)
CAVGAPNQAGTALIF

SEQ ID NO: 12810 - protein, 14 aa, Homo sapiens
  CDR3 for beta chain variable domain of TCR clone 6405 (TRBV20-1, TRBJ2-1)
CSPDDEASYNEQFF

SEQ ID NO: 12811 - protein, 13 aa, Homo sapiens
  CDR3 for alpha chain variable domain of TCR clone 6406 (TRAV13-1, TRAJ21)
CAASIYNFNKFYF

SEQ ID NO: 12812 - protein, 15 aa, Homo sapiens
  CDR3 for beta chain variable domain of TCR clone 6406 (TRBV27, TRBJ2-1)
CASSNGGGSSNEQFF

SEQ ID NO: 12813 - protein, 13 aa, Homo sapiens
  CDR3 for alpha chain variable domain of TCR clone 6407 (TRAV12-1, TRAJ40)
CVVNSSGTYKYIL

SEQ ID NO: 12814 - protein, 14 aa, Homo sapiens
  CDR3 for beta chain variable domain of TCR clone 6407 (TRBV2, TRBJ1-6)
CASEVSSYNSPLHF

SEQ ID NO: 12815 - protein, 13 aa, Homo sapiens
  CDR3 for alpha chain variable domain of TCR clone 6408 (TRAV2, TRAJ40)
CAVVTSVTYKYIF

SEQ ID NO: 12816 - protein, 14 aa, Homo sapiens
  CDR3 for beta chain variable domain of TCR clone 6408 (TRBV19, TRBJ2-1)
CASPTFVLSGEQFF

SEQ ID NO: 12817 - protein, 13 aa, Homo sapiens
  CDR3 for alpha chain variable domain of TCR clone 6409 (TRAV21, TRAJ17)
CAPVKAAGNKLTF

SEQ ID NO: 12818 - protein, 11 aa, Homo sapiens
  CDR3 for beta chain variable domain of TCR clone 6409 (TRBV20-1, TRBJ1-2)
CSIWASYGYTF

SEQ ID NO: 12819 - protein, 11 aa, Homo sapiens
  CDR3 for alpha chain variable domain of TCR clone 6410 (TRAV21, TRAJ11)
CAVNGYSTLTF

SEQ ID NO: 12820 - protein, 16 aa, Homo sapiens
  CDR3 for beta chain variable domain of TCR clone 6410 (TRBV12-5, TRBJ2-5)
CASGPRTSGNQETQYF

SEQ ID NO: 12821 - protein, 17 aa, Homo sapiens
  CDR3 for alpha chain variable domain of TCR clone 6411 (TRAV26-1, TRAJ53)
CIVRVDDSGGSNYKLTF

SEQ ID NO: 12822 - protein, 15 aa, Homo sapiens
  CDR3 for beta chain variable domain of TCR clone 6411 (TRBV11-2, TRBJ2-2)
CASSSDRVNAGELFF

SEQ ID NO: 12823 - protein, 14 aa, Homo sapiens
  CDR3 for alpha chain variable domain of TCR clone 6412 (TRAV23/DV6, TRAJ17)
CAASVQAAGNKLTF

SEQ ID NO: 12824 - protein, 18 aa, Homo sapiens
  CDR3 for beta chain variable domain of TCR clone 6412 (TRBV20-1, TRBJ2-7)
CSAGLPPRSGGSPYEQYF

SEQ ID NO: 12825 - protein, 11 aa, Homo sapiens
  CDR3 for alpha chain variable domain of TCR clone 6413 (TRAV12-3, TRAJ43)
CAMSVSNDIRF

SEQ ID NO: 12826 - protein, 13 aa, Homo sapiens
  CDR3 for beta chain variable domain of TCR clone 6413 (TRBV20-1, TRBJ1-1)
CSAPLGGGTEAFF

SEQ ID NO: 12827 - protein, 14 aa, Homo sapiens
  CDR3 for alpha chain variable domain of TCR clone 6414 (TRAV12-2, TRAJ13)
CAAKKTGGYQKVTF

SEQ ID NO: 12828 - protein, 15 aa, Homo sapiens
  CDR3 for beta chain variable domain of TCR clone 6414 (TRBV27, TRBJ2-1)
CASSNGGGSSNEQFF

SEQ ID NO: 12829 - protein, 14 aa, Homo sapiens
  CDR3 for alpha chain variable domain of TCR clone 6415 (TRAV27, TRAJ50)
CAGGRKTSYDKVIF

SEQ ID NO: 12830 - protein, 11 aa, Homo sapiens
  CDR3 for beta chain variable domain of TCR clone 6415 (TRBV12-4, TRBJ2-3)
CASSSVRGRYF

SEQ ID NO: 12831 - protein, 14 aa, Homo sapiens
  CDR3 for alpha chain variable domain of TCR clone 6416 (TRAV8-2, TRAJ37)
CVVSISGNTGKLIF

SEQ ID NO: 12832 - protein, 17 aa, Homo sapiens
  CDR3 for beta chain variable domain of TCR clone 6416 (TRBV7-9, TRBJ2-3)
CASSPTVAGDLTDTQYF

SEQ ID NO: 12833 - protein, 16 aa, Homo sapiens
  CDR3 for alpha chain variable domain of TCR clone 6417 (TRAV38-1, TRAJ45)
CAFMKGSGGGADGLTF

SEQ ID NO: 12834 - protein, 15 aa, Homo sapiens
  CDR3 for beta chain variable domain of TCR clone 6417 (TRBV7-2, TRBJ2-3)
CASSSTGLETDTQYF

SEQ ID NO: 12835 - protein, 15 aa, Homo sapiens
  CDR3 for alpha chain variable domain of TCR clone 6418 (TRAV13-1, TRAJ45)
CAASGSGGGADGLTF

SEQ ID NO: 12836 - protein, 17 aa, Homo sapiens
  CDR3 for beta chain variable domain of TCR clone 6418 (TRBV20-1, TRBJ2-2)
CSASGSGQGGLTGELFF

SEQ ID NO: 12837 - protein, 14 aa, Homo sapiens
  CDR3 for alpha chain variable domain of TCR clone 6419 (TRAV13-1, TRAJ13)
CAASRVGGYQKVTF

SEQ ID NO: 12838 - protein, 14 aa, Homo sapiens
  CDR3 for beta chain variable domain of TCR clone 6419 (TRBV5-1, TRBJ2-7)
CASSATGGYDEQYF

SEQ ID NO: 12839 - protein, 16 aa, Homo sapiens
  CDR3 for alpha chain variable domain of TCR clone 6420 (TRAV30, TRAJ24)
CGTEIVDADSWGQFQF

SEQ ID NO: 12840 - protein, 14 aa, Homo sapiens
  CDR3 for beta chain variable domain of TCR clone 6420 (TRBV12-5, TRBJ2-5)
CASGSRTHQETQYF

SEQ ID NO: 12841 - protein, 15 aa, Homo sapiens
  CDR3 for alpha chain variable domain of TCR clone 6421 (TRAV8-4, TRAJ53)
CAVSDGGGSNYKLTF

SEQ ID NO: 12842 - protein, 15 aa, Homo sapiens
  CDR3 for beta chain variable domain of TCR clone 6421 (TRBV19, TRBJ2-5)
CASHGLAGAQETQYF

SEQ ID NO: 12843 - protein, 13 aa, Homo sapiens
  CDR3 for alpha chain variable domain of TCR clone 6422 (TRAV12-1, TRAJ31)
CVVIPNNNARLMF

SEQ ID NO: 12844 - protein, 15 aa, Homo sapiens
  CDR3 for beta chain variable domain of TCR clone 6422 (TRBV19, TRBJ1-2)
CASNLGGETPYGYTF

SEQ ID NO: 12845 - protein, 12 aa, Homo sapiens
  CDR3 for alpha chain variable domain of TCR clone 6423 (TRAV12-3, TRAJ17)
CAMTLTGNKLTF

SEQ ID NO: 12846 - protein, 18 aa, Homo sapiens
  CDR3 for beta chain variable domain of TCR clone 6423 (TRBV28, TRBJ2-6)
CASSLAGRAVSGANVLTF

SEQ ID NO: 12847 - protein, 15 aa, Homo sapiens
  CDR3 for alpha chain variable domain of TCR clone 6424 (TRAV17, TRAJ48)
CATDETNFGNEKLTF

SEQ ID NO: 12848 - protein, 13 aa, Homo sapiens
  CDR3 for beta chain variable domain of TCR clone 6424 (TRBV12-4, TRBJ1-5)
CASSPDRAQPQHF

SEQ ID NO: 12849 - protein, 13 aa, Homo sapiens
  CDR3 for alpha chain variable domain of TCR clone 6425 (TRAV21, TRAJ26)
CAVIGNYGQNFVF

SEQ ID NO: 12850 - protein, 16 aa, Homo sapiens
  CDR3 for beta chain variable domain of TCR clone 6425 (TRBV6-3, TRBJ2-2)
CASSFSGTDNTGELFF

SEQ ID NO: 12851 - protein, 15 aa, Homo sapiens
  CDR3 for alpha chain variable domain of TCR clone 6426 (TRAV21, TRAJ53)
CATLNSGGSNYKLTF

SEQ ID NO: 12852 - protein, 14 aa, Homo sapiens
  CDR3 for beta chain variable domain of TCR clone 6426 (TRBV7-2, TRBJ2-7)
CASSLPPGQGPQYF

SEQ ID NO: 12853 - protein, 11 aa, Homo sapiens
  CDR3 for alpha chain variable domain of TCR clone 6427 (TRAV13-1, TRAJ43)
CAASMRNDMRF

SEQ ID NO: 12854 - protein, 12 aa, Homo sapiens
  CDR3 for beta chain variable domain of TCR clone 6427 (TRBV29-1, TRBJ2-3)
CSVTGGADTQYF

SEQ ID NO: 12855 - protein, 14 aa, Homo sapiens
  CDR3 for alpha chain variable domain of TCR clone 6428 (TRAV8-3, TRAJ44)
CAVEDTGTASKLTF

SEQ ID NO: 12856 - protein, 15 aa, Homo sapiens
  CDR3 for beta chain variable domain of TCR clone 6428 (TRBV7-2, TRBJ1-1)
CASSSPGGEETEAFF

SEQ ID NO: 12857 - protein, 13 aa, Homo sapiens
  CDR3 for alpha chain variable domain of TCR clone 6429 (TRAV1-1, TRAJ9)
CAAKNTGGFKTIF

SEQ ID NO: 12858 - protein, 12 aa, Homo sapiens
  CDR3 for beta chain variable domain of TCR clone 6429 (TRBV11-2, TRBJ2-2)
CASSLGGGELFF

SEQ ID NO: 12859 - protein, 13 aa, Homo sapiens
  CDR3 for alpha chain variable domain of TCR clone 6430 (TRAV27, TRAJ21)
CAGATHNFNKFYF

SEQ ID NO: 12860 - protein, 14 aa, Homo sapiens
  CDR3 for beta chain variable domain of TCR clone 6430 (TRBV2, TRBJ2-2)
CASKVVRETGELFF

SEQ ID NO: 12861 - protein, 14 aa, Homo sapiens
  CDR3 for alpha chain variable domain of TCR clone 6431 (TRAV29/DV5, TRAJ44)
CAASALGTASKLTF

SEQ ID NO: 12862 - protein, 11 aa, Homo sapiens
  CDR3 for beta chain variable domain of TCR clone 6431 (TRBV29-1, TRBJ1-3)
CSVAIGNTIYF

SEQ ID NO: 12863 - protein, 14 aa, Homo sapiens
  CDR3 for alpha chain variable domain of TCR clone 6432 (TRAV35, TRAJ53)
GRVNSGGSNYKLTF

SEQ ID NO: 12864 - protein, 14 aa, Homo sapiens
  CDR3 for beta chain variable domain of TCR clone 6432 (TRBV7-3, TRBJ2-2)
CASSLLGSTGELFF

SEQ ID NO: 12865 - protein, 12 aa, Homo sapiens
  CDR3 for alpha chain variable domain of TCR clone 6433 (TRAV21, TRAJ49)
CAVNDGGNQFYF

SEQ ID NO: 12866 - protein, 13 aa, Homo sapiens
  CDR3 for beta chain variable domain of TCR clone 6433 (TRBV2, TRBJ1-1)
CASSVLMNTEAFF

SEQ ID NO: 12867 - protein, 14 aa, Homo sapiens
  CDR3 for alpha chain variable domain of TCR clone 6434 (TRAV35, TRAJ33)
CAGSSQDSNYQLIW

SEQ ID NO: 12868 - protein, 14 aa, Homo sapiens
  CDR3 for beta chain variable domain of TCR clone 6434 (TRBV18, TRBJ2-7)
CASSPRGGAYEQYF

SEQ ID NO: 12869 - protein, 12 aa, Homo sapiens
  CDR3 for alpha chain variable domain of TCR clone 6435 (TRAV21, TRAJ23)
CAVMLQGGKLIF

SEQ ID NO: 12870 - protein, 14 aa, Homo sapiens
  CDR3 for beta chain variable domain of TCR clone 6435 (TRBV20-1, TRBJ1-1)
CSAQTRIGGTEAFF

SEQ ID NO: 12871 - protein, 19 aa, Homo sapiens
  CDR3 for alpha chain variable domain of TCR clone 6436 (TRAV1-1, TRAJ27)
CAGSEMTRSSLEKGHDFIF

SEQ ID NO: 12872 - protein, 14 aa, Homo sapiens
  CDR3 for beta chain variable domain of TCR clone 6436 (TRBV11-3, TRBJ1-6)
CASSFSGGDSPLHF

SEQ ID NO: 12873 - protein, 13 aa, Homo sapiens
  CDR3 for alpha chain variable domain of TCR clone 6437 (TRAV12-3, TRAJ40)
CAMSARGTYKYIF

SEQ ID NO: 12874 - protein, 15 aa, Homo sapiens
  CDR3 for beta chain variable domain of TCR clone 6437 (TRBV9, TRBJ1-6)
CASSVAGTGDSPLHF

SEQ ID NO: 12875 - protein, 12 aa, Homo sapiens
  CDR3 for alpha chain variable domain of TCR clone 6438 (TRAV12-3, TRAJ17)
CAMTLTGNKLTF

SEQ ID NO: 12876 - protein, 13 aa, Homo sapiens
  CDR3 for beta chain variable domain of TCR clone 6438 (TRBV23-1, TRBJ1-4)
CASRGKFNEKLFF

SEQ ID NO: 12877 - protein, 17 aa, Homo sapiens
  CDR3 for alpha chain variable domain of TCR clone 6439 (TRAV3, TRAJ38)
CAVRDCLNAGNNRKLIW

SEQ ID NO: 12878 - protein, 16 aa, Homo sapiens
  CDR3 for beta chain variable domain of TCR clone 6439 (TRBV20-1, TRBJ1-4)
CSARPYGGELNEKLFF

SEQ ID NO: 12879 - protein, 15 aa, Homo sapiens
  CDR3 for alpha chain variable domain of TCR clone 6440 (TRAV26-1, TRAJ38)
CIASSNAGNNRKLIW

SEQ ID NO: 12880 - protein, 12 aa, Homo sapiens
  CDR3 for beta chain variable domain of TCR clone 6440 (TRBV5-8, TRBJ1-2)
CASSFGVYGYTF

SEQ ID NO: 12881 - protein, 15 aa, Homo sapiens
  CDR3 for alpha chain variable domain of TCR clone 6441 (TRAV38-2/DV8, TRAJ28)
CAYRSRGAGSYQLTF

SEQ ID NO: 12882 - protein, 14 aa, Homo sapiens
  CDR3 for beta chain variable domain of TCR clone 6441 (TRBV7-9, TRBJ2-7)
CASSLSQGSYEQYF

SEQ ID NO: 12883 - protein, 12 aa, Homo sapiens
  CDR3 for alpha chain variable domain of TCR clone 6442 (TRAV12-3, TRAJ17)
CAMTLTGNKLTF

SEQ ID NO: 12884 - protein, 12 aa, Homo sapiens
  CDR3 for beta chain variable domain of TCR clone 6442 (TRBV11-2, TRBJ2-2)
CASSLGGGELFF

SEQ ID NO: 12885 - protein, 13 aa, Homo sapiens
  CDR3 for alpha chain variable domain of TCR clone 6443 (TRAV21, TRAJ27)
FAALPGNAGKSTF

SEQ ID NO: 12886 - protein, 14 aa, Homo sapiens
  CDR3 for beta chain variable domain of TCR clone 6443 (TRBV7-6, TRBJ2-3)
CASSLGTVTDTQYF

SEQ ID NO: 12887 - protein, 13 aa, Homo sapiens
  CDR3 for alpha chain variable domain of TCR clone 6444 (TRAV4, TRAJ9)
CLVAEGGGFKTIF

SEQ ID NO: 12888 - protein, 17 aa, Homo sapiens
  CDR3 for beta chain variable domain of TCR clone 6444 (TRBV27, TRBJ2-1)
CASSPMKGQGSYNEQFF

SEQ ID NO: 12889 - protein, 16 aa, Homo sapiens
  CDR3 for alpha chain variable domain of TCR clone 6445 (TRAV26-1, TRAJ37)
CIVRGDGSGNTGKLIF

SEQ ID NO: 12890 - protein, 13 aa, Homo sapiens
  CDR3 for beta chain variable domain of TCR clone 6445 (TRBV4-1, TRBJ2-2)
CASSQENTGELFF

SEQ ID NO: 12891 - protein, 13 aa, Homo sapiens
  CDR3 for alpha chain variable domain of TCR clone 6446 (TRAV3, TRAJ21)
CAVREPDFNKFYF

SEQ ID NO: 12892 - protein, 12 aa, Homo sapiens
  CDR3 for beta chain variable domain of TCR clone 6446 (TRBV11-2, TRBJ2-2)
CASSLGGGELFF

SEQ ID NO: 12893 - protein, 11 aa, Homo sapiens
  CDR3 for alpha chain variable domain of TCR clone 6447 (TRAV16, TRAJ49)
CALRSGNQFYF

SEQ ID NO: 12894 - protein, 18 aa, Homo sapiens
  CDR3 for beta chain variable domain of TCR clone 6447 (TRBV28, TRBJ2-7)
CASSSGLAGVGTSSTSGR

SEQ ID NO: 12895 - protein, 16 aa, Homo sapiens
  CDR3 for alpha chain variable domain of TCR clone 6448 (TRAV3, TRAJ37)
CAVRGEGSGNTGKLIF

SEQ ID NO: 12896 - protein, 13 aa, Homo sapiens
  CDR3 for beta chain variable domain of TCR clone 6448 (TRBV14, TRBJ2-7)
CASSQDRRYEQYF

SEQ ID NO: 12897 - protein, 12 aa, Homo sapiens
  CDR3 for alpha chain variable domain of TCR clone 6449 (TRAV12-3, TRAJ17)
CAMTLTGNKLTF

SEQ ID NO: 12898 - protein, 15 aa, Homo sapiens
  CDR3 for beta chain variable domain of TCR clone 6449 (TRBV20-1, TRBJ1-1)
CSASRGVTGNTEAFF

SEQ ID NO: 12899 - protein, 14 aa, Homo sapiens
  CDR3 for alpha chain variable domain of TCR clone 6450 (TRAV4, TRAJ26)
CLVGDQGYGQNFVF

SEQ ID NO: 12900 - protein, 16 aa, Homo sapiens
  CDR3 for beta chain variable domain of TCR clone 6450 (TRBV2, TRBJ2-1)
CASSVGGSLSYNEQFF

SEQ ID NO: 12901 - protein, 16 aa, Homo sapiens
  CDR3 for alpha chain variable domain of TCR clone 6451 (TRAV30, TRAJ24)
CGTEIVDADSWGKFQF

SEQ ID NO: 12902 - protein, 13 aa, Homo sapiens
  CDR3 for beta chain variable domain of TCR clone 6451 (TRBV24-1, TRBJ2-2)
CATSDWSTGELFF

SEQ ID NO: 12903 - protein, 11 aa, Homo sapiens
  CDR3 for alpha chain variable domain of TCR clone 6452 (TRAV3, TRAJ21)
FAVGNFNKFYF

SEQ ID NO: 12904 - protein, 16 aa, Homo sapiens
  CDR3 for beta chain variable domain of TCR clone 6452 (TRBV19, TRBJ2-1)
CASSKAGPSSYNEQFF

SEQ ID NO: 12905 - protein, 14 aa, Homo sapiens
  CDR3 for alpha chain variable domain of TCR clone 6453 (TRAV8-3, TRAJ42)
CAVGAWGSQGNLIF

SEQ ID NO: 12906 - protein, 15 aa, Homo sapiens
  CDR3 for beta chain variable domain of TCR clone 6453 (TRBV29-1, TRBJ1-2)
CSVVLEAGSNYGYTF

SEQ ID NO: 12907 - protein, 14 aa, Homo sapiens
  CDR3 for alpha chain variable domain of TCR clone 6454 (TRAV12-1, TRAJ26)
CVVKGSNYGQNFVF

SEQ ID NO: 12908 - protein, 15 aa, Homo sapiens
  CDR3 for beta chain variable domain of TCR clone 6454 (TRBV10-2, TRBJ2-6)
CASSEQGTGANVLTF

SEQ ID NO: 12909 - protein, 11 aa, Homo sapiens
  CDR3 for alpha chain variable domain of TCR clone 6455 (TRAV22, TRAJ27)
CAVLNAGKSTF

SEQ ID NO: 12910 - protein, 11 aa, Homo sapiens
  CDR3 for beta chain variable domain of TCR clone 6455 (TRBV19, TRBJ2-2)
CASRYSGELFF

SEQ ID NO: 12911 - protein, 13 aa, Homo sapiens
  CDR3 for alpha chain variable domain of TCR clone 6456 (TRAV12-3, TRAJ44)
CARTTGTASKLTF

SEQ ID NO: 12912 - protein, 15 aa, Homo sapiens
  CDR3 for beta chain variable domain of TCR clone 6456 (TRBV29-1, TRBJ1-2)
CSGLDVRGANYGYTF

SEQ ID NO: 12913 - protein, 13 aa, Homo sapiens
  CDR3 for alpha chain variable domain of TCR clone 6457 (TRAV2, TRAJ15)
CAVGGQAGTALIF

SEQ ID NO: 12914 - protein, 16 aa, Homo sapiens
  CDR3 for beta chain variable domain of TCR clone 6457 (TRBV6-4, TRBJ2-3)
CASSDRGDSSTDTQYF

SEQ ID NO: 12915 - protein, 15 aa, Homo sapiens
  CDR3 for alpha chain variable domain of TCR clone 6458 (TRAV26-2, TRAJ16)
CILSLRFSDGQKLLF

SEQ ID NO: 12916 - protein, 13 aa, Homo sapiens
  CDR3 for beta chain variable domain of TCR clone 6458 (TRBV10-3, TRBJ2-7)
CAIRPTEAYEQYF

SEQ ID NO: 12917 - protein, 11 aa, Homo sapiens
  CDR3 for alpha chain variable domain of TCR clone 6459 (TRAV3, TRAJ21)
CAVGNFNKFYL

SEQ ID NO: 12918 - protein, 16 aa, Homo sapiens
  CDR3 for beta chain variable domain of TCR clone 6459 (TRBV19, TRBJ2-1)
CASSKAGPSSYNEQFF

SEQ ID NO: 12919 - protein, 14 aa, Homo sapiens
  CDR3 for alpha chain variable domain of TCR clone 6460 (TRAV16, TRAJ54)
CALSDGQGAQKLVF

SEQ ID NO: 12920 - protein, 13 aa, Homo sapiens
  CDR3 for beta chain variable domain of TCR clone 6460 (TRBV20-1, TRBJ2-4)
CSAPTWAGNIQYF

SEQ ID NO: 12921 - protein, 13 aa, Homo sapiens
  CDR3 for alpha chain variable domain of TCR clone 6461 (TRAV38-2/DV8, TRAJ56)
CAYQSRANSKLTF

SEQ ID NO: 12922 - protein, 16 aa, Homo sapiens
  CDR3 for beta chain variable domain of TCR clone 6461 (TRBV28, TRBJ1-1)
CASSSGGQPVATEAFF

SEQ ID NO: 12923 - protein, 18 aa, Homo sapiens
  CDR3 for alpha chain variable domain of TCR clone 6462 (TRAV23/DV6, TRAJ21)
CAASSGGGTTSTNFTLDL

SEQ ID NO: 12924 - protein, 11 aa, Homo sapiens
  CDR3 for beta chain variable domain of TCR clone 6462 (TRBV7-8, TRBJ2-7)
CASSLSLEQYF

SEQ ID NO: 12925 - protein, 15 aa, Homo sapiens
  CDR3 for alpha chain variable domain of TCR clone 6463 (TRAV8-3, TRAJ27)
CAVGPSKTNAGKSTF

SEQ ID NO: 12926 - protein, 15 aa, Homo sapiens
  CDR3 for beta chain variable domain of TCR clone 6463 (TRBV7-2, TRBJ2-1)
CASSSGLAEGNEQFF

SEQ ID NO: 12927 - protein, 11 aa, Homo sapiens
  CDR3 for alpha chain variable domain of TCR clone 6464 (TRAV12-2, TRAJ49)
CAVHTGNQFYF

SEQ ID NO: 12928 - protein, 15 aa, Homo sapiens
  CDR3 for beta chain variable domain of TCR clone 6464 (TRBV27, TRBJ2-1)
CASSNGGGSSNEQFF

SEQ ID NO: 12929 - protein, 17 aa, Homo sapiens
  CDR3 for alpha chain variable domain of TCR clone 6465 (TRAV13-1, TRAJ28)
CAASPPYSGAGSYQLTF

SEQ ID NO: 12930 - protein, 13 aa, Homo sapiens
  CDR3 for beta chain variable domain of TCR clone 6465 (TRBV12-5, TRBJ2-3)
CASGDRQSDTQYF

SEQ ID NO: 12931 - protein, 12 aa, Homo sapiens
  CDR3 for alpha chain variable domain of TCR clone 6466 (TRAV12-2, TRAJ49)
CAVLNTGNQFYF

SEQ ID NO: 12932 - protein, 14 aa, Homo sapiens
  CDR3 for beta chain variable domain of TCR clone 6466 (TRBV5-4, TRBJ2-3)
CASSLGQGADTQYF

SEQ ID NO: 12933 - protein, 14 aa, Homo sapiens
  CDR3 for alpha chain variable domain of TCR clone 6467 (TRAV1-2, TRAJ8)
CAVREDTGLQKLVF

SEQ ID NO: 12934 - protein, 14 aa, Homo sapiens
  CDR3 for beta chain variable domain of TCR clone 6467 (TRBV7-9, TRBJ1-1)
CASSLGGANTEAFF

SEQ ID NO: 12935 - protein, 18 aa, Homo sapiens
  CDR3 for alpha chain variable domain of TCR clone 6468 (TRAV21, TRAJ52)
CAVRPSPAGGTSYGKLTF

SEQ ID NO: 12936 - protein, 14 aa, Homo sapiens
  CDR3 for beta chain variable domain of TCR clone 6468 (TRBV20-1, TRBJ2-1)
CSAQIGGSANEQFF

SEQ ID NO: 12937 - protein, 15 aa, Homo sapiens
  CDR3 for alpha chain variable domain of TCR clone 6469 (TRAV29/DV5, TRAJ28)
CAAGYSGAGSYQLTF

SEQ ID NO: 12938 - protein, 18 aa, Homo sapiens
  CDR3 for beta chain variable domain of TCR clone 6469 (TRBV3-1, TRBJ1-2)
CASSQDVIGWNGDYGYTF

SEQ ID NO: 12939 - protein, 16 aa, Homo sapiens
  CDR3 for alpha chain variable domain of TCR clone 6470 (TRAV14/DV4, TRAJ54)
CAMREGRIQGAQKLVF

SEQ ID NO: 12940 - protein, 15 aa, Homo sapiens
  CDR3 for beta chain variable domain of TCR clone 6470 (TRBV7-8, TRBJ2-1)
CASSLAGGLYNEQFF

SEQ ID NO: 12941 - protein, 14 aa, Homo sapiens
  CDR3 for alpha chain variable domain of TCR clone 6471 (TRAV1-2, TRAJ16)
CAVNRFSDGQKLLF

SEQ ID NO: 12942 - protein, 12 aa, Homo sapiens
  CDR3 for beta chain variable domain of TCR clone 6471 (TRBV7-8, TRBJ2-7)
CASSLGDREQYF

SEQ ID NO: 12943 - protein, 17 aa, Homo sapiens
  CDR3 for alpha chain variable domain of TCR clone 6472 (TRAV3, TRAJ6)
CAVRDGPRAGGSYIPTF

SEQ ID NO: 12944 - protein, 20 aa, Homo sapiens
  CDR3 for beta chain variable domain of TCR clone 6472 (TRBV28, TRBJ2-1)
CASTPIGRSPGLAGGNEQSF

SEQ ID NO: 12945 - protein, 17 aa, Homo sapiens
  CDR3 for alpha chain variable domain of TCR clone 6473 (TRAV8-6, TRAJ22)
CAVSLYPSSGSARQLTF

SEQ ID NO: 12946 - protein, 16 aa, Homo sapiens
  CDR3 for beta chain variable domain of TCR clone 6473 (TRBV19, TRBJ2-7)
CASSPAGSGSLNEQYF

SEQ ID NO: 12947 - protein, 16 aa, Homo sapiens
  CDR3 for alpha chain variable domain of TCR clone 6474 (TRAV3, TRAJ10)
CAVRDMRAGGGNKLTF

SEQ ID NO: 12948 - protein, 15 aa, Homo sapiens
  CDR3 for beta chain variable domain of TCR clone 6474 (TRBV11-3, TRBJ2-7)
CASSPGPASSYEQYF

SEQ ID NO: 12949 - protein, 14 aa, Homo sapiens
  CDR3 for alpha chain variable domain of TCR clone 6475 (TRAV1-2, TRAJ8)
CAVREDTGSQKLVF

SEQ ID NO: 12950 - protein, 15 aa, Homo sapiens
  CDR3 for beta chain variable domain of TCR clone 6475 (TRBV6-3, TRBJ2-7)
CASSSPGTVFYEQYF

SEQ ID NO: 12951 - protein, 15 aa, Homo sapiens
  CDR3 for alpha chain variable domain of TCR clone 6476 (TRAV3, TRAJ5)
CAVRDRKTGRRALTF

SEQ ID NO: 12952 - protein, 15 aa, Homo sapiens
  CDR3 for beta chain variable domain of TCR clone 6476 (TRBV7-8, TRBJ2-1)
RASSLADSLYNEQFF

SEQ ID NO: 12953 - protein, 14 aa, Homo sapiens
  CDR3 for alpha chain variable domain of TCR clone 6477 (TRAV26-1, TRAJ38)
CIADNAGNNRKLIL

SEQ ID NO: 12954 - protein, 13 aa, Homo sapiens
  CDR3 for beta chain variable domain of TCR clone 6477 (TRBV20-1, TRBJ1-1)
CSARGGGNTEAFF

SEQ ID NO: 12955 - protein, 13 aa, Homo sapiens
  CDR3 for alpha chain variable domain of TCR clone 6478 (TRAV13-2, TRAJ10)
CAENTGGGNKLTF

SEQ ID NO: 12956 - protein, 15 aa, Homo sapiens
  CDR3 for beta chain variable domain of TCR clone 6478 (TRBV12-4, TRBJ2-2)
CASSRQGANTGELFF

SEQ ID NO: 12957 - protein, 12 aa, Homo sapiens
  CDR3 for alpha chain variable domain of TCR clone 6479 (TRAV12-3, TRAJ17)
CAMTFTGNKLTF

SEQ ID NO: 12958 - protein, 15 aa, Homo sapiens
  CDR3 for beta chain variable domain of TCR clone 6479 (TRBV20-1, TRBJ2-7)
CSARDRVSGMDEQYF

SEQ ID NO: 12959 - protein, 12 aa, Homo sapiens
  CDR3 for alpha chain variable domain of TCR clone 6480 (TRAV12-2, TRAJ10)
WGVTGGGNKLTF

SEQ ID NO: 12960 - protein, 15 aa, Homo sapiens
  CDR3 for beta chain variable domain of TCR clone 6480 (TRBV6-3, TRBJ2-7)
CASSSPGTVFYEQYF

SEQ ID NO: 12961 - protein, 17 aa, Homo sapiens
  CDR3 for alpha chain variable domain of TCR clone 6481 (TRAV38-2/DV8, TRAJ28)
CAFLTLYSGAGSYQLTF

SEQ ID NO: 12962 - protein, 13 aa, Homo sapiens
  CDR3 for beta chain variable domain of TCR clone 6481 (TRBV7-2, TRBJ2-5)
CQQLVRGGETQYF

SEQ ID NO: 12963 - protein, 13 aa, Homo sapiens
  CDR3 for alpha chain variable domain of TCR clone 6482 (TRAV29/DV5, TRAJ37)
CAAVPGNTGKLIF

SEQ ID NO: 12964 - protein, 13 aa, Homo sapiens
  CDR3 for beta chain variable domain of TCR clone 6482 (TRBV28, TRBJ2-7)
CASSPTLKREQYF

SEQ ID NO: 12965 - protein, 17 aa, Homo sapiens
  CDR3 for alpha chain variable domain of TCR clone 6483 (TRAV3, TRAJ6)
CAVRDGPRAGGSYIPTF

SEQ ID NO: 12966 - protein, 14 aa, Homo sapiens
  CDR3 for beta chain variable domain of TCR clone 6483 (TRBV7-2, TRBJ2-7)
CASSPKTSFYGQYF

SEQ ID NO: 12967 - protein, 13 aa, Homo sapiens
  CDR3 for alpha chain variable domain of TCR clone 6484 (TRAV21, TRAJ27)
CAARPGNAGQSTF

SEQ ID NO: 12968 - protein, 14 aa, Homo sapiens
  CDR3 for beta chain variable domain of TCR clone 6484 (TRBV7-6, TRBJ2-3)
CASSLGTVTDTQYF

SEQ ID NO: 12969 - protein, 11 aa, Homo sapiens
  CDR3 for alpha chain variable domain of TCR clone 6485 (TRAV21, TRAJ34)
CAVTNTDKLIF

SEQ ID NO: 12970 - protein, 13 aa, Homo sapiens
  CDR3 for beta chain variable domain of TCR clone 6485 (TRBV5-5, TRBJ1-2)
CASSFWRGEDYTF

SEQ ID NO: 12971 - protein, 14 aa, Homo sapiens
  CDR3 for alpha chain variable domain of TCR clone 6486 (TRAV17, TRAJ42)
CATDAPGSQGNLIF

SEQ ID NO: 12972 - protein, 13 aa, Homo sapiens
  CDR3 for beta chain variable domain of TCR clone 6486 (TRBV7-7, TRBJ1-5)
CASSPGKNQPQHF

SEQ ID NO: 12973 - protein, 17 aa, Homo sapiens
  CDR3 for alpha chain variable domain of TCR clone 6487 (TRAV3, TRAJ6)
CAVRYGPRAGGSYIPTF

SEQ ID NO: 12974 - protein, 14 aa, Homo sapiens
  CDR3 for beta chain variable domain of TCR clone 6487 (TRBV7-2, TRBJ2-7)
CASSPKTSFYEQYF

SEQ ID NO: 12975 - protein, 14 aa, Homo sapiens
  CDR3 for alpha chain variable domain of TCR clone 6488 (TRAV3, TRAJ34)
CAVRAPGNTDKLIF

SEQ ID NO: 12976 - protein, 14 aa, Homo sapiens
  CDR3 for beta chain variable domain of TCR clone 6488 (TRBV5-4, TRBJ1-1)
CASSLDSRRDEAFF

SEQ ID NO: 12977 - protein, 16 aa, Homo sapiens
  CDR3 for alpha chain variable domain of TCR clone 6489 (TRAV8-3, TRAJ18)
CAVGARRGSTLGRLYF

SEQ ID NO: 12978 - protein, 14 aa, Homo sapiens
  CDR3 for beta chain variable domain of TCR clone 6489 (TRBV5-4, TRBJ1-3)
CASSSQSAGNTIYF

SEQ ID NO: 12979 - protein, 13 aa, Homo sapiens
  CDR3 for alpha chain variable domain of TCR clone 6490 (TRAV3, TRAJ21)
CAVREPDFNKFYF

SEQ ID NO: 12980 - protein, 16 aa, Homo sapiens
  CDR3 for beta chain variable domain of TCR clone 6490 (TRBV5-1, TRBJ2-3)
CASSLGLAVYTDTQYF

SEQ ID NO: 12981 - protein, 14 aa, Homo sapiens
  CDR3 for alpha chain variable domain of TCR clone 6491 (TRAV2, TRAJ37)
CAVDFTSNTGKLIF

SEQ ID NO: 12982 - protein, 17 aa, Homo sapiens
  CDR3 for beta chain variable domain of TCR clone 6491 (TRBV7-8, TRBJ2-6)
CASSAGTGGAGANVLTF

SEQ ID NO: 12983 - protein, 16 aa, Homo sapiens
  CDR3 for alpha chain variable domain of TCR clone 6492 (TRAV1-2, TRAJ10)
CAVRGVLTGGGNKLTF

SEQ ID NO: 12984 - protein, 15 aa, Homo sapiens
  CDR3 for beta chain variable domain of TCR clone 6492 (TRBV27, TRBJ2-7)
CASSPIVTGAYEQYF

SEQ ID NO: 12985 - protein, 11 aa, Homo sapiens
  CDR3 for alpha chain variable domain of TCR clone 6493 (TRAV13-1, TRAJ24)
CAASGWGKLQF

SEQ ID NO: 12986 - protein, 14 aa, Homo sapiens
  CDR3 for beta chain variable domain of TCR clone 6493 (TRBV7-7, TRBJ2-2)
CATRQDSDTGELFF

SEQ ID NO: 12987 - protein, 14 aa, Homo sapiens
  CDR3 for alpha chain variable domain of TCR clone 6494 (TRAV26-1, TRAJ21)
CIVRVLGNFNKFYF

SEQ ID NO: 12988 - protein, 15 aa, Homo sapiens
  CDR3 for beta chain variable domain of TCR clone 6494 (TRBV6-1, TRBJ2-7)
CASSEAVAGVAEQYF

SEQ ID NO: 12989 - protein, 14 aa, Homo sapiens
  CDR3 for alpha chain variable domain of TCR clone 6495 (TRAV13-1, TRAJ35)
CAASKGGFGNVPHC

SEQ ID NO: 12990 - protein, 13 aa, Homo sapiens
  CDR3 for beta chain variable domain of TCR clone 6495 (TRBV7-3, TRBJ1-1)
CASSQDWGAEAFF

SEQ ID NO: 12991 - protein, 16 aa, Homo sapiens
  CDR3 for alpha chain variable domain of TCR clone 6496 (TRAV3, TRAJ4)
CAVRPSPSGGYNKLIF

SEQ ID NO: 12992 - protein, 12 aa, Homo sapiens
  CDR3 for beta chain variable domain of TCR clone 6496 (TRBV7-9, TRBJ1-5)
CASSPQGQPQHF

SEQ ID NO: 12993 - protein, 11 aa, Homo sapiens
  CDR3 for alpha chain variable domain of TCR clone 6497 (TRAV21, TRAJ11)
CAVNGYSTLTF

SEQ ID NO: 12994 - protein, 17 aa, Homo sapiens
  CDR3 for beta chain variable domain of TCR clone 6497 (TRBV18, TRBJ2-3)
CASSAAGTSGSTDTQYF

SEQ ID NO: 12995 - protein, 17 aa, Homo sapiens
  CDR3 for alpha chain variable domain of TCR clone 6498 (TRAV3, TRAJ6)
CAVRDGPRAGGSYIPAF

SEQ ID NO: 12996 - protein, 14 aa, Homo sapiens
  CDR3 for beta chain variable domain of TCR clone 6498 (TRBV7-2, TRBJ2-7)
CASSPKTSFYEQYF

SEQ ID NO: 12997 - protein, 13 aa, Homo sapiens
  CDR3 for alpha chain variable domain of TCR clone 6499 (TRAV8-2, TRAJ43)
CVVSDQGDNDMRF

SEQ ID NO: 12998 - protein, 12 aa, Homo sapiens
  CDR3 for beta chain variable domain of TCR clone 6499 (TRBV7-8, TRBJ2-7)
CASSLGDREQYF

SEQ ID NO: 12999 - protein, 13 aa, Homo sapiens
  CDR3 for alpha chain variable domain of TCR clone 6500 (TRAV25, TRAJ24)
CAGGTDSWGKFQF

SEQ ID NO: 13000 - protein, 16 aa, Homo sapiens
  CDR3 for beta chain variable domain of TCR clone 6500 (TRBV28, TRBJ2-3)
CASSLFTGVSTDTQYF

SEQ ID NO: 13001 - protein, 12 aa, Homo sapiens
  CDR3 for alpha chain variable domain of TCR clone 6501 (TRAV13-1, TRAJ27)
CAAHTNAGKSTF

SEQ ID NO: 13002 - protein, 14 aa, Homo sapiens
  CDR3 for beta chain variable domain of TCR clone 6501 (TRBV19, TRBJ2-2)
CTSSGQGIAGELFF

SEQ ID NO: 13003 - protein, 17 aa, Homo sapiens
  CDR3 for alpha chain variable domain of TCR clone 6502 (TRAV22, TRAJ53)
CAVEFSNSGGSNYKLTF

SEQ ID NO: 13004 - protein, 15 aa, Homo sapiens
  CDR3 for beta chain variable domain of TCR clone 6502 (TRBV29-1, TRBJ2-1)
CSVPTGLALYNEQFF

SEQ ID NO: 13005 - protein, 12 aa, Homo sapiens
  CDR3 for alpha chain variable domain of TCR clone 6503 (TRAV12-3, TRAJ17)
CAMTLTCNKLTF

SEQ ID NO: 13006 - protein, 15 aa, Homo sapiens
  CDR3 for beta chain variable domain of TCR clone 6503 (TRBV20-1, TRBJ2-7)
CSARDRVSGMDEQYF

SEQ ID NO: 13007 - protein, 15 aa, Homo sapiens
  CDR3 for alpha chain variable domain of TCR clone 6504 (TRAV8-3, TRAJ37)
CAVGGLSSNTGKLIF

SEQ ID NO: 13008 - protein, 15 aa, Homo sapiens
  CDR3 for beta chain variable domain of TCR clone 6504 (TRBV10-3, TRBJ2-7)
CATREQGLRSYEQYF

SEQ ID NO: 13009 - protein, 10 aa, Homo sapiens
  CDR3 for alpha chain variable domain of TCR clone 6505 (TRAV8-3, TRAJ33)
CAVGAIATIS

SEQ ID NO: 13010 - protein, 13 aa, Homo sapiens
  CDR3 for beta chain variable domain of TCR clone 6505 (TRBV27, TRBJ2-7)
CASSLTTGYEQYF

SEQ ID NO: 13011 - protein, 19 aa, Homo sapiens
  CDR3 for alpha chain variable domain of TCR clone 6506 (TRAV2, TRAJ8)
CAVEHRLSETCIWNWHPTS

SEQ ID NO: 13012 - protein, 15 aa, Homo sapiens
  CDR3 for beta chain variable domain of TCR clone 6506 (TRBV15, TRBJ2-7)
CATSSRQESSYEQYF

SEQ ID NO: 13013 - protein, 23 aa, Homo sapiens
  CDR3 for alpha chain variable domain of TCR clone 6507 (TRAV26-1, TRAJ38)
CIADNAGNNHIQNPDPAGYQLRD

SEQ ID NO: 13014 - protein, 13 aa, Homo sapiens
  CDR3 for beta chain variable domain of TCR clone 6507 (TRBV20-1, TRBJ1-1)
CSARGGGNTEAFF

SEQ ID NO: 13015 - protein, 16 aa, Homo sapiens
  CDR3 for alpha chain variable domain of TCR clone 6508 (TRAV30, TRAJ24)
CGTEIVDADSWGKFQF

SEQ ID NO: 13016 - protein, 14 aa, Homo sapiens
  CDR3 for beta chain variable domain of TCR clone 6508 (TRBV12-5, TRBJ2-5)
CASGSRTHQETQYV

SEQ ID NO: 13017 - protein, 12 aa, Homo sapiens
  CDR3 for alpha chain variable domain of TCR clone 6509 (TRAV12-3, TRAJ17)
CAMTLTGNKLTF

SEQ ID NO: 13018 - protein, 15 aa, Homo sapiens
  CDR3 for beta chain variable domain of TCR clone 6509 (TRBV20-1, TRBJ2-7)
CSTRDRVSGMDEQYF

SEQ ID NO: 13019 - protein, 14 aa, Homo sapiens
  CDR3 for alpha chain variable domain of TCR clone 6510 (TRAV12-3, TRAJ10)
SHLPLTGGGNKLTF

SEQ ID NO: 13020 - protein, 16 aa, Homo sapiens
  CDR3 for beta chain variable domain of TCR clone 6510 (TRBV27, TRBJ2-2)
CASSSSGVSNTGELFF

SEQ ID NO: 13021 - protein, 11 aa, Homo sapiens
  CDR3 for alpha chain variable domain of TCR clone 6511 (TRAV13-1, TRAJ5)
CAPKGRRALTF

SEQ ID NO: 13022 - protein, 15 aa, Homo sapiens
  CDR3 for beta chain variable domain of TCR clone 6511 (TRBV11-2, TRBJ1-1)
CASSSRSSLLLSLDK

SEQ ID NO: 13023 - protein, 15 aa, Homo sapiens
  CDR3 for alpha chain variable domain of TCR clone 6512 (TRAV3, TRAJ5)
CAVRDLDTGRRALTF

SEQ ID NO: 13024 - protein, 13 aa, Homo sapiens
  CDR3 for beta chain variable domain of TCR clone 6512 (TRBV12-4, TRBJ2-7)
CASSPTEAYEQYF

SEQ ID NO: 13025 - protein, 12 aa, Homo sapiens
  CDR3 for alpha chain variable domain of TCR clone 6513 (TRAV16, TRAJ56)
CAPTGANSKLTF

SEQ ID NO: 13026 - protein, 16 aa, Homo sapiens
  CDR3 for beta chain variable domain of TCR clone 6513 (TRBV7-9, TRBJ1-2)
CASSLGFSSGEDGYTF

SEQ ID NO: 13027 - protein, 14 aa, Homo sapiens
  CDR3 for alpha chain variable domain of TCR clone 6514 (TRAV13-1, TRAJ48)
CAASRSFGNEKLTF

SEQ ID NO: 13028 - protein, 12 aa, Homo sapiens
  CDR3 for beta chain variable domain of TCR clone 6514 (TRBV6-6, TRBJ2-5)
CASNRQSGTQYF

SEQ ID NO: 13029 - protein, 13 aa, Homo sapiens
  CDR3 for alpha chain variable domain of TCR clone 6515 (TRAV20, TRAJ21)
CAVEGYNFNKFYF

SEQ ID NO: 13030 - protein, 15 aa, Homo sapiens
  CDR3 for beta chain variable domain of TCR clone 6515 (TRBV11-3, TRBJ2-3)
CASLKDGREGDTQYF

SEQ ID NO: 13031 - protein, 15 aa, Homo sapiens
  CDR3 for alpha chain variable domain of TCR clone 6516 (TRAV3, TRAJ5)
CAVRDLDTGRRALTF

SEQ ID NO: 13032 - protein, 12 aa, Homo sapiens
  CDR3 for beta chain variable domain of TCR clone 6516 (TRBV11-2, TRBJ2-2)
CASSLGGGELFF

SEQ ID NO: 13033 - protein, 16 aa, Homo sapiens
  CDR3 for alpha chain variable domain of TCR clone 6517 (TRAV26-2, TRAJ52)
CIRGPAGGTSYGKLTF

SEQ ID NO: 13034 - protein, 15 aa, Homo sapiens
  CDR3 for beta chain variable domain of TCR clone 6517 (TRBV5-1, TRBJ2-1)
CASSWGPGPGGEQFF

SEQ ID NO: 13035 - protein, 16 aa, Homo sapiens
  CDR3 for alpha chain variable domain of TCR clone 6518 (TRAV12-3, TRAJ53)
CAMSPGSGGSNYKLTF

SEQ ID NO: 13036 - protein, 16 aa, Homo sapiens
  CDR3 for beta chain variable domain of TCR clone 6518 (TRBV5-1, TRBJ2-3)
CASSLEGGSFTDTQYF

SEQ ID NO: 13037 - protein, 14 aa, Homo sapiens
  CDR3 for alpha chain variable domain of TCR clone 6519 (TRAV1-2, TRAJ16)
CAVNRFSDGQKLLF

SEQ ID NO: 13038 - protein, 13 aa, Homo sapiens
  CDR3 for beta chain variable domain of TCR clone 6519 (TRBV24-1, TRBJ2-2)
CATSDWSTGELFF

SEQ ID NO: 13039 - protein, 23 aa, Homo sapiens
  CDR3 for alpha chain variable domain of TCR clone 6520 (TRAV12-2, TRAJ22)
CSSETPSPVIQPPGRSSARQLTF

SEQ ID NO: 13040 - protein, 16 aa, Homo sapiens
  CDR3 for beta chain variable domain of TCR clone 6520 (TRBV5-1, TRBJ2-7)
CASSWGTGGRAWEQYF

SEQ ID NO: 13041 - protein, 13 aa, Homo sapiens
  CDR3 for alpha chain variable domain of TCR clone 6521 (TRAV29/DV5, TRAJ44)
CAASTGTASKLTF

SEQ ID NO: 13042 - protein, 11 aa, Homo sapiens
  CDR3 for beta chain variable domain of TCR clone 6521 (TRBV12-4, TRBJ2-3)
CASTATDTQYF

SEQ ID NO: 13043 - protein, 14 aa, Homo sapiens
  CDR3 for alpha chain variable domain of TCR clone 6522 (TRAV12-2, TRAJ40)
CAVKIPSGTYKYIF

SEQ ID NO: 13044 - protein, 11 aa, Homo sapiens
  CDR3 for beta chain variable domain of TCR clone 6522 (TRBV29-1, TRBJ2-5)
CSEDRTGTQYF

SEQ ID NO: 13045 - protein, 12 aa, Homo sapiens
  CDR3 for alpha chain variable domain of TCR clone 6523 (TRAV8-3, TRAJ20)
CAVGANDHKLSF

SEQ ID NO: 13046 - protein, 16 aa, Homo sapiens
  CDR3 for beta chain variable domain of TCR clone 6523 (TRBV19, TRBJ2-2)
CASRSPGTGATGELFF

SEQ ID NO: 13047 - protein, 15 aa, Homo sapiens
  CDR3 for alpha chain variable domain of TCR clone 6524 (TRAV17, TRAJ40)
CATVSSTSGTYKYIF

SEQ ID NO: 13048 - protein, 15 aa, Homo sapiens
  CDR3 for beta chain variable domain of TCR clone 6524 (TRBV5-1, TRBJ2-1)
CASSQAGYWWNEQFF

SEQ ID NO: 13049 - protein, 13 aa, Homo sapiens
  CDR3 for alpha chain variable domain of TCR clone 6525 (TRAV3, TRAJ35)
CGMRKSFGNVLHC

SEQ ID NO: 13050 - protein, 14 aa, Homo sapiens
  CDR3 for beta chain variable domain of TCR clone 6525 (TRBV6-5, TRBJ1-4)
CASSYRAAEEKLFF

SEQ ID NO: 13051 - protein, 12 aa, Homo sapiens
  CDR3 for alpha chain variable domain of TCR clone 6526 (TRAV16, TRAJ10)
CSRTGGGNKLTF

SEQ ID NO: 13052 - protein, 13 aa, Homo sapiens
  CDR3 for beta chain variable domain of TCR clone 6526 (TRBV20-1, TRBJ2-7)
CSADPGATYEQYF

SEQ ID NO: 13053 - protein, 15 aa, Homo sapiens
  CDR3 for alpha chain variable domain of TCR clone 6527 (TRAV12-3, TRAJ11)
CAMSEENSGYSTLTF

SEQ ID NO: 13054 - protein, 20 aa, Homo sapiens
  CDR3 for beta chain variable domain of TCR clone 6527 (TRBV7-8, TRBJ2-2)
CASSHLFPGPTIHITGELFF

SEQ ID NO: 13055 - protein, 13 aa, Homo sapiens
  CDR3 for alpha chain variable domain of TCR clone 6528 (TRAV17, TRAJ9)
CATDYTGGFKTIF

SEQ ID NO: 13056 - protein, 15 aa, Homo sapiens
  CDR3 for beta chain variable domain of TCR clone 6528 (TRBV6-3, TRBJ2-7)
CASSSPGTVFYEQYF

SEQ ID NO: 13057 - protein, 20 aa, Homo sapiens
  CDR3 for alpha chain variable domain of TCR clone 6529 (TRAV26-2, TRAJ39)
CCVLLHPESAFYNAGNMLTF

SEQ ID NO: 13058 - protein, 14 aa, Homo sapiens
  CDR3 for beta chain variable domain of TCR clone 6529 (TRBV12-4, TRBJ1-4)
CASRMTGRSEKLFF

SEQ ID NO: 13059 - protein, 18 aa, Homo sapiens
  CDR3 for alpha chain variable domain of TCR clone 6530 (TRAV21, TRAJ52)
CAVRPSPAGGTSYGKLTF

SEQ ID NO: 13060 - protein, 17 aa, Homo sapiens
  CDR3 for beta chain variable domain of TCR clone 6530 (TRBV13, TRBJ2-3)
CASSLSRVAGGRNTQYL

SEQ ID NO: 13061 - protein, 12 aa, Homo sapiens
  CDR3 for alpha chain variable domain of TCR clone 6531 (TRAV12-3, TRAJ17)
CAMTLTGNKLTF

SEQ ID NO: 13062 - protein, 14 aa, Homo sapiens
  CDR3 for beta chain variable domain of TCR clone 6531 (TRBV4-2, TRBJ2-1)
CASGLDRAYNEQFF

SEQ ID NO: 13063 - protein, 12 aa, Homo sapiens
  CDR3 for alpha chain variable domain of TCR clone 6532 (TRAV17, TRAJ57)
CATDGGSEKLVF

SEQ ID NO: 13064 - protein, 14 aa, Homo sapiens
  CDR3 for beta chain variable domain of TCR clone 6532 (TRBV28, TRBJ2-7)
CASTFYGRAHEQYF

SEQ ID NO: 13065 - protein, 15 aa, Homo sapiens
  CDR3 for alpha chain variable domain of TCR clone 6533 (TRAV12-3, TRAJ6)
CAMSATSGGSYIPTF

SEQ ID NO: 13066 - protein, 11 aa, Homo sapiens
  CDR3 for beta chain variable domain of TCR clone 6533 (TRBV6-4, TRBJ2-1)
CASSDSYAQFF

SEQ ID NO: 13067 - protein, 14 aa, Homo sapiens
  CDR3 for alpha chain variable domain of TCR clone 6534 (TRAV6, TRAJ39)
CALPNNNAGNMLTF

SEQ ID NO: 13068 - protein, 17 aa, Homo sapiens
  CDR3 for beta chain variable domain of TCR clone 6534 (TRBV18, TRBJ2-3)
CASSSRGPASSTDTQYF

SEQ ID NO: 13069 - protein, 14 aa, Homo sapiens
  CDR3 for alpha chain variable domain of TCR clone 6535 (TRAV2, TRAJ9)
CAVEDRSGGFKTIF

SEQ ID NO: 13070 - protein, 16 aa, Homo sapiens
  CDR3 for beta chain variable domain of TCR clone 6535 (TRBV12-5, TRBJ2-5)
CASGPRTSGNQETQYF

SEQ ID NO: 13071 - protein, 18 aa, Homo sapiens
  CDR3 for alpha chain variable domain of TCR clone 6536 (TRAV21, TRAJ52)
CAVRPSPAGGTSYGKLTF

SEQ ID NO: 13072 - protein, 17 aa, Homo sapiens
  CDR3 for beta chain variable domain of TCR clone 6536 (TRBV13, TRBJ2-3)
CASSLSRVAGGGNTQYF

SEQ ID NO: 13073 - protein, 17 aa, Homo sapiens
  CDR3 for alpha chain variable domain of TCR clone 6537 (TRAV8-6, TRAJ58)
CAVSSWVGETSGSRLTF

SEQ ID NO: 13074 - protein, 14 aa, Homo sapiens
  CDR3 for beta chain variable domain of TCR clone 6537 (TRBV20-1, TRBJ2-1)
CSAQIGGSANEQFF

SEQ ID NO: 13075 - protein, 12 aa, Homo sapiens
  CDR3 for alpha chain variable domain of TCR clone 6538 (TRAV20, TRAJ36)
CAQVTGANNLFF

SEQ ID NO: 13076 - protein, 14 aa, Homo sapiens
  CDR3 for beta chain variable domain of TCR clone 6538 (TRBV6-1, TRBJ2-2)
CASSQRQATGELFF

SEQ ID NO: 13077 - protein, 15 aa, Homo sapiens
  CDR3 for alpha chain variable domain of TCR clone 6539 (TRAV1-1, TRAJ4)
CAVRAFSGGYNKLIF

SEQ ID NO: 13078 - protein, 18 aa, Homo sapiens
  CDR3 for beta chain variable domain of TCR clone 6539 (TRBV12-4, TRBJ2-2)
CASSLVAGTRGRTGELFF

SEQ ID NO: 13079 - protein, 16 aa, Homo sapiens
  CDR3 for alpha chain variable domain of TCR clone 6540 (TRAV30, TRAJ24)
CGTEIVDADSWGKFQF

SEQ ID NO: 13080 - protein, 14 aa, Homo sapiens
  CDR3 for beta chain variable domain of TCR clone 6540 (TRBV12-5, TRBJ2-5)
CASGSRTHRETQYF

SEQ ID NO: 13081 - protein, 13 aa, Homo sapiens
  CDR3 for alpha chain variable domain of TCR clone 6541 (TRAV21, TRAJ27)
CAARPGNAGKSTF

SEQ ID NO: 13082 - protein, 17 aa, Homo sapiens
  CDR3 for beta chain variable domain of TCR clone 6541 (TRBV4-1, TRBJ1-4)
CASSQEGPRGVEEKLFF

SEQ ID NO: 13083 - protein, 15 aa, Homo sapiens
  CDR3 for alpha chain variable domain of TCR clone 6542 (TRAV6, TRAJ52)
CALTAGGTSYGKLTF

SEQ ID NO: 13084 - protein, 14 aa, Homo sapiens
  CDR3 for beta chain variable domain of TCR clone 6542 (TRBV11-2, TRBJ2-1)
CASTTGQGNNEQFF

SEQ ID NO: 13085 - protein, 18 aa, Homo sapiens
  CDR3 for alpha chain variable domain of TCR clone 6543 (TRAV12-3, TRAJ52)
CAMSVGGAGGASYGKLTF

SEQ ID NO: 13086 - protein, 15 aa, Homo sapiens
  CDR3 for beta chain variable domain of TCR clone 6543 (TRBV27, TRBJ1-6)
CASSFDRGLGSPLHF

SEQ ID NO: 13087 - protein, 11 aa, Homo sapiens
  CDR3 for alpha chain variable domain of TCR clone 6544 (TRAV21, TRAJ34)
CAVTNTDKLIF

SEQ ID NO: 13088 - protein, 12 aa, Homo sapiens
  CDR3 for beta chain variable domain of TCR clone 6544 (TRBV11-2, TRBJ2-2)
CASSLGGGELFF

SEQ ID NO: 13089 - protein, 14 aa, Homo sapiens
  CDR3 for alpha chain variable domain of TCR clone 6545 (TRAV12-2, TRAJ24)
CAVTPADSWGKLQF

SEQ ID NO: 13090 - protein, 15 aa, Homo sapiens
  CDR3 for beta chain variable domain of TCR clone 6545 (TRBV15, TRBJ2-1)
CATSRPGQGLHEQFF

SEQ ID NO: 13091 - protein, 12 aa, Homo sapiens
  CDR3 for alpha chain variable domain of TCR clone 6546 (TRAV16, TRAJ12)
CALEDSSYKLIF

SEQ ID NO: 13092 - protein, 14 aa, Homo sapiens
  CDR3 for beta chain variable domain of TCR clone 6546 (TRBV12-4, TRBJ1-5)
CASSPTGPRGGTYF

SEQ ID NO: 13093 - protein, 14 aa, Homo sapiens
  CDR3 for alpha chain variable domain of TCR clone 6547 (TRAV12-3, TRAJ10)
SHLPLTGGGNKLTF

SEQ ID NO: 13094 - protein, 14 aa, Homo sapiens
  CDR3 for beta chain variable domain of TCR clone 6547 (TRBV25-1, TRBJ1-1)
CASTHLGGNTEAFF

SEQ ID NO: 13095 - protein, 12 aa, Homo sapiens
  CDR3 for alpha chain variable domain of TCR clone 6548 (TRAV17, TRAJ45)
CAAGGGADGLTF

SEQ ID NO: 13096 - protein, 14 aa, Homo sapiens
  CDR3 for beta chain variable domain of TCR clone 6548 (TRBV20-1, TRBJ1-1)
CSAQTRIGGTEAFF

SEQ ID NO: 13097 - protein, 18 aa, Homo sapiens
  CDR3 for alpha chain variable domain of TCR clone 6549 (TRAV21, TRAJ52)
CAVMPSPAGGTSYGKLTF

SEQ ID NO: 13098 - protein, 17 aa, Homo sapiens
  CDR3 for beta chain variable domain of TCR clone 6549 (TRBV13, TRBJ2-3)
CASSLSRVAGGRNTQYF

SEQ ID NO: 13099 - protein, 12 aa, Homo sapiens
  CDR3 for alpha chain variable domain of TCR clone 6550 (TRAV16, TRAJ10)
CSRTGGGNKLTF

SEQ ID NO: 13100 - protein, 13 aa, Homo sapiens
  CDR3 for beta chain variable domain of TCR clone 6550 (TRBV10-3, TRBJ2-7)
CASKLAVNYEQYF

SEQ ID NO: 13101 - protein, 13 aa, Homo sapiens
  CDR3 for alpha chain variable domain of TCR clone 6551 (TRAV13-2, TRAJ48)
CAEMDFGNEKLTF

SEQ ID NO: 13102 - protein, 14 aa, Homo sapiens
  CDR3 for beta chain variable domain of TCR clone 6551 (TRBV15, TRBJ2-3)
CATRSGTSTDTQYF

SEQ ID NO: 13103 - protein, 15 aa, Homo sapiens
  CDR3 for alpha chain variable domain of TCR clone 6552 (TRAV12-1, TRAJ4)
CVVNGFSGGYNKLIF

SEQ ID NO: 13104 - protein, 18 aa, Homo sapiens
  CDR3 for beta chain variable domain of TCR clone 6552 (TRBV6-5, TRBJ2-1)
CASSYSSRRAGVYNEQFF

SEQ ID NO: 13105 - protein, 17 aa, Homo sapiens
  CDR3 for alpha chain variable domain of TCR clone 6553 (TRAV14/DV4, TRAJ12)
CAMRELPWMDSSYKLIF

SEQ ID NO: 13106 - protein, 14 aa, Homo sapiens
  CDR3 for beta chain variable domain of TCR clone 6553 (TRBV20-1, TRBJ2-7)
CSARRSGSSYEQYF

SEQ ID NO: 13107 - protein, 13 aa, Homo sapiens
  CDR3 for alpha chain variable domain of TCR clone 6554 (TRAV13-2, TRAJ48)
CAEVDFGNEKLTF

SEQ ID NO: 13108 - protein, 15 aa, Homo sapiens
  CDR3 for beta chain variable domain of TCR clone 6554 (TRBV7-9, TRBJ1-6)
CASSSPGRGNSPLHF

SEQ ID NO: 13109 - protein, 16 aa, Homo sapiens
  CDR3 for alpha chain variable domain of TCR clone 6555 (TRAV16, TRAJ52)
CALSAAGGTSYGKLTF

SEQ ID NO: 13110 - protein, 12 aa, Homo sapiens
  CDR3 for beta chain variable domain of TCR clone 6555 (TRBV12-4, TRBJ1-3)
CASSFSGNTMYF

SEQ ID NO: 13111 - protein, 10 aa, Homo sapiens
  CDR3 for alpha chain variable domain of TCR clone 6556 (TRAV2, TRAJ34)
CAVVNDKLIF

SEQ ID NO: 13112 - protein, 14 aa, Homo sapiens
  CDR3 for beta chain variable domain of TCR clone 6556 (TRBV11-2, TRBJ2-3)
CASSRLARTDTQYF

SEQ ID NO: 13113 - protein, 12 aa, Homo sapiens
  CDR3 for alpha chain variable domain of TCR clone 6557 (TRAV10, TRAJ31)
CVVRAHRARLMF

SEQ ID NO: 13114 - protein, 17 aa, Homo sapiens
  CDR3 for beta chain variable domain of TCR clone 6557 (TRBV14, TRBJ2-1)
CASSQDRRDSIYNEQFF

SEQ ID NO: 13115 - protein, 13 aa, Homo sapiens
  CDR3 for alpha chain variable domain of TCR clone 6558 (TRAV14/DV4, TRAJ49)
CAMVENTGNQFYF

SEQ ID NO: 13116 - protein, 13 aa, Homo sapiens
  CDR3 for beta chain variable domain of TCR clone 6558 (TRBV11-3, TRBJ2-1)
CASSSRRVDEQFF

SEQ ID NO: 13117 - protein, 11 aa, Homo sapiens
  CDR3 for alpha chain variable domain of TCR clone 6559 (TRAV1-2, TRAJ20)
CAVSNDYKLSF

SEQ ID NO: 13118 - protein, 16 aa, Homo sapiens
  CDR3 for beta chain variable domain of TCR clone 6559 (TRBV10-3, TRBJ2-1)
CAISGVGDGGGGEQFF

SEQ ID NO: 13119 - protein, 11 aa, Homo sapiens
  CDR3 for alpha chain variable domain of TCR clone 6560 (TRAV9-2, TRAJ43)
CALNNNNDMRF

SEQ ID NO: 13120 - protein, 13 aa, Homo sapiens
  CDR3 for beta chain variable domain of TCR clone 6560 (TRBV20-1, TRBJ2-1)
CSASTGTSNEQFF

SEQ ID NO: 13121 - protein, 10 aa, Homo sapiens
  CDR3 for alpha chain variable domain of TCR clone 6561 (TRAV17, TRAJ31)
CATDGARLMF

SEQ ID NO: 13122 - protein, 13 aa, Homo sapiens
  CDR3 for beta chain variable domain of TCR clone 6561 (TRBV14, TRBJ1-6)
CASSQSIYSPLHF

SEQ ID NO: 13123 - protein, 11 aa, Homo sapiens
  CDR3 for alpha chain variable domain of TCR clone 6562 (TRAV2, TRAJ33)
CAVESNYQLIW

SEQ ID NO: 13124 - protein, 17 aa, Homo sapiens
  CDR3 for beta chain variable domain of TCR clone 6562 (TRBV19, TRBJ2-7)
CASSISFYDSYPYEQYF

SEQ ID NO: 13125 - protein, 18 aa, Homo sapiens
  CDR3 for alpha chain variable domain of TCR clone 6563 (TRAV12-2, )
CAVEDIQNPDPAVYQLRD

SEQ ID NO: 13126 - protein, 20 aa, Homo sapiens
  CDR3 for beta chain variable domain of TCR clone 6563 (TRBV11-3, TRBJ2-7)
CASSQRTSGSLRAVLRAGHQ

SEQ ID NO: 13127 - protein, 13 aa, Homo sapiens
  CDR3 for alpha chain variable domain of TCR clone 6564 (TRAV12-3, TRAJ9)
CAMSADGGFKTIF

SEQ ID NO: 13128 - protein, 13 aa, Homo sapiens
  CDR3 for beta chain variable domain of TCR clone 6564 (TRBV12-5, TRBJ2-3)
CASGDRQSDTQYF

SEQ ID NO: 13129 - protein, 20 aa, Homo sapiens
  CDR3 for alpha chain variable domain of TCR clone 6565 (TRAV8-3, )
CAVGAGDIQNPDPAVYQLRD

SEQ ID NO: 13130 - protein, 14 aa, Homo sapiens
  CDR3 for beta chain variable domain of TCR clone 6565 (TRBV5-1, TRBJ1-5)
CASSLGQGAQPQHF

SEQ ID NO: 13131 - protein, 14 aa, Homo sapiens
  CDR3 for alpha chain variable domain of TCR clone 6566 (TRAV12-2, TRAJ13)
CAVKKTGGYKKVTF

SEQ ID NO: 13132 - protein, 15 aa, Homo sapiens
  CDR3 for beta chain variable domain of TCR clone 6566 (TRBV27, TRBJ2-1)
CASSNGGGSSNEQFF

SEQ ID NO: 13133 - protein, 10 aa, Homo sapiens
  CDR3 for alpha chain variable domain of TCR clone 6567 (TRAV16, TRAJ26)
CALSGSEFCL

SEQ ID NO: 13134 - protein, 12 aa, Homo sapiens
  CDR3 for beta chain variable domain of TCR clone 6567 (TRBV11-2, TRBJ2-1)
CASSPGNNEQFF

SEQ ID NO: 13135 - protein, 11 aa, Homo sapiens
  CDR3 for alpha chain variable domain of TCR clone 6568 (TRAV3, TRAJ21)
CAVCNFNKFYF

SEQ ID NO: 13136 - protein, 16 aa, Homo sapiens
  CDR3 for beta chain variable domain of TCR clone 6568 (TRBV19, TRBJ2-1)
CASSKAGPSSYNEQFF

SEQ ID NO: 13137 - protein, 14 aa, Homo sapiens
  CDR3 for alpha chain variable domain of TCR clone 6569 (TRAV12-3, TRAJ10)
SHLPLTGGGNKLTF

SEQ ID NO: 13138 - protein, 13 aa, Homo sapiens
  CDR3 for beta chain variable domain of TCR clone 6569 (TRBV20-1, TRBJ1-5)
CSASQQVVQPQHF

SEQ ID NO: 13139 - protein, 14 aa, Homo sapiens
  CDR3 for alpha chain variable domain of TCR clone 6570 (TRAV12-2, TRAJ13)
CAVKKTGGYQKVTF

SEQ ID NO: 13140 - protein, 13 aa, Homo sapiens
  CDR3 for beta chain variable domain of TCR clone 6570 (TRBV20-1, TRBJ1-3)
CSARLGVGNTIYF

SEQ ID NO: 13141 - protein, 11 aa, Homo sapiens
  CDR3 for alpha chain variable domain of TCR clone 6571 (TRAV3, TRAJ21)
CAVGNFNKFYF

SEQ ID NO: 13142 - protein, 16 aa, Homo sapiens
  CDR3 for beta chain variable domain of TCR clone 6571 (TRBV19, TRBJ2-1)
CASSKAGPSSYDEQFF

SEQ ID NO: 13143 - protein, 14 aa, Homo sapiens
  CDR3 for alpha chain variable domain of TCR clone 6572 (TRAV26-1, TRAJ39)
CIVRANNAGNMLTF

SEQ ID NO: 13144 - protein, 15 aa, Homo sapiens
  CDR3 for beta chain variable domain of TCR clone 6572 (TRBV28, TRBJ1-2)
CASSLMGGRRDGYTF

SEQ ID NO: 13145 - protein, 14 aa, Homo sapiens
  CDR3 for alpha chain variable domain of TCR clone 6573 (TRAV1-2, TRAJ6)
CAVSLSGGSYIPTF

SEQ ID NO: 13146 - protein, 11 aa, Homo sapiens
  CDR3 for beta chain variable domain of TCR clone 6573 (TRBV6-3, TRBJ2-3)
CATGQADTQYF

SEQ ID NO: 13147 - protein, 13 aa, Homo sapiens
  CDR3 for alpha chain variable domain of TCR clone 6574 (TRAV20, TRAJ49)
CAVQARTGNQFYF

SEQ ID NO: 13148 - protein, 11 aa, Homo sapiens
  CDR3 for beta chain variable domain of TCR clone 6574 (TRBV11-2, TRBJ1-1)
CASSINTEAFF

SEQ ID NO: 13149 - protein, 14 aa, Homo sapiens
  CDR3 for alpha chain variable domain of TCR clone 6575 (TRAV3, TRAJ7)
CAVREEEREQQTRF

SEQ ID NO: 13150 - protein, 14 aa, Homo sapiens
  CDR3 for beta chain variable domain of TCR clone 6575 (TRBV7-7, TRBJ2-2)
CASSTRASGGELFF

SEQ ID NO: 13151 - protein, 13 aa, Homo sapiens
  CDR3 for alpha chain variable domain of TCR clone 6576 (TRAV12-3, TRAJ33)
CAMSVNSNYQLIW

SEQ ID NO: 13152 - protein, 12 aa, Homo sapiens
  CDR3 for beta chain variable domain of TCR clone 6576 (TRBV12-4, TRBJ1-2)
CASSFIWLHLRF

SEQ ID NO: 13153 - protein, 14 aa, Homo sapiens
  CDR3 for alpha chain variable domain of TCR clone 6577 (TRAV13-1, TRAJ52)
CAAAGGTSYGKLTF

SEQ ID NO: 13154 - protein, 17 aa, Homo sapiens
  CDR3 for beta chain variable domain of TCR clone 6577 (TRBV19, TRBJ1-1)
CASSKSGTGGPYTEAFF

SEQ ID NO: 13155 - protein, 14 aa, Homo sapiens
  CDR3 for alpha chain variable domain of TCR clone 6578 (TRAV12-2, TRAJ13)
CAVKKTGGYQKVTF

SEQ ID NO: 13156 - protein, 15 aa, Homo sapiens
  CDR3 for beta chain variable domain of TCR clone 6578 (TRBV27, TRBJ2-1)
CASSNGGGPSNEQFF

SEQ ID NO: 13157 - protein, 14 aa, Homo sapiens
  CDR3 for alpha chain variable domain of TCR clone 6579 (TRAV35, TRAJ22)
CAGLRPGSARQLTS

SEQ ID NO: 13158 - protein, 13 aa, Homo sapiens
  CDR3 for beta chain variable domain of TCR clone 6579 (TRBV20-1, TRBJ2-7)
CSATHTSGYEQYF

SEQ ID NO: 13159 - protein, 12 aa, Homo sapiens
  CDR3 for alpha chain variable domain of TCR clone 6580 (TRAV9-2, TRAJ24)
CAQTDSWGKLQF

SEQ ID NO: 13160 - protein, 13 aa, Homo sapiens
  CDR3 for beta chain variable domain of TCR clone 6580 (TRBV12-4, TRBJ2-1)
CASSFQGYNEQFF

SEQ ID NO: 13161 - protein, 15 aa, Homo sapiens
  CDR3 for alpha chain variable domain of TCR clone 6581 (TRAV26-1, TRAJ29)
CIVRVEGSGNTPLVF

SEQ ID NO: 13162 - protein, 18 aa, Homo sapiens
  CDR3 for beta chain variable domain of TCR clone 6581 (TRBV5-5, TRBJ1-5)
CASSLRQVKGSSNQPQHF

SEQ ID NO: 13163 - protein, 14 aa, Homo sapiens
  CDR3 for alpha chain variable domain of TCR clone 6582 (TRAV13-1, TRAJ35)
CAASKGGFGNVLHC

SEQ ID NO: 13164 - protein, 13 aa, Homo sapiens
  CDR3 for beta chain variable domain of TCR clone 6582 (TRBV7-3, TRBJ1-1)
CASSQDWGAEALF

SEQ ID NO: 13165 - protein, 12 aa, Homo sapiens
  CDR3 for alpha chain variable domain of TCR clone 6583 (TRAV21, TRAJ33)
CAKMDSNYQLIW

SEQ ID NO: 13166 - protein, 12 aa, Homo sapiens
  CDR3 for beta chain variable domain of TCR clone 6583 (TRBV11-2, TRBJ2-2)
CASSLGGGELFF

SEQ ID NO: 13167 - protein, 11 aa, Homo sapiens
  CDR3 for alpha chain variable domain of TCR clone 6584 (TRAV2, TRAJ13)
CASGGYQKVTF

SEQ ID NO: 13168 - protein, 16 aa, Homo sapiens
  CDR3 for beta chain variable domain of TCR clone 6584 (TRBV10-3, TRBJ2-1)
CAISGVGDGGGGEQFF

SEQ ID NO: 13169 - protein, 12 aa, Homo sapiens
  CDR3 for alpha chain variable domain of TCR clone 6585 (TRAV13-1, TRAJ53)
AASGGSNYKLTF

SEQ ID NO: 13170 - protein, 13 aa, Homo sapiens
  CDR3 for beta chain variable domain of TCR clone 6585 (TRBV7-2, TRBJ2-2)
CASSSVRAGELFF

SEQ ID NO: 13171 - protein, 15 aa, Homo sapiens
  CDR3 for alpha chain variable domain of TCR clone 6586 (TRAV26-2, TRAJ57)
CILRDIRGGSEKLVF

SEQ ID NO: 13172 - protein, 11 aa, Homo sapiens
  CDR3 for beta chain variable domain of TCR clone 6586 (TRBV3-1, TRBJ2-7)
CASTSLGEQYF

SEQ ID NO: 13173 - protein, 16 aa, Homo sapiens
  CDR3 for alpha chain variable domain of TCR clone 6587 (TRAV3, TRAJ21)
CAVRDRSASTNFTLDL

SEQ ID NO: 13174 - protein, 16 aa, Homo sapiens
  CDR3 for beta chain variable domain of TCR clone 6587 (TRBV7-2, TRBJ2-5)
CASSLESAGGRETQYF

SEQ ID NO: 13175 - protein, 15 aa, Homo sapiens
  CDR3 for alpha chain variable domain of TCR clone 6588 (TRAV27, TRAJ38)
CAARRNAGNNRKLIW

SEQ ID NO: 13176 - protein, 13 aa, Homo sapiens
  CDR3 for beta chain variable domain of TCR clone 6588 (TRBV20-1, TRBJ1-1)
CSARGGGNTEAFF

SEQ ID NO: 13177 - protein, 17 aa, Homo sapiens
  CDR3 for alpha chain variable domain of TCR clone 6589 (TRAV2, TRAJ23)
CCLLLCWERGLGGKLIF

SEQ ID NO: 13178 - protein, 20 aa, Homo sapiens
  CDR3 for beta chain variable domain of TCR clone 6589 (TRBV3-1, TRBJ2-6)
CASSPRPGLEGGAGANVLTF

SEQ ID NO: 13179 - protein, 17 aa, Homo sapiens
  CDR3 for alpha chain variable domain of TCR clone 6590 (TRAV3, TRAJ6)
CAVIDGPRAGGSYIPTF

SEQ ID NO: 13180 - protein, 14 aa, Homo sapiens
  CDR3 for beta chain variable domain of TCR clone 6590 (TRBV7-2, TRBJ2-7)
CASSPKTSFYEQYF

SEQ ID NO: 13181 - protein, 12 aa, Homo sapiens
  CDR3 for alpha chain variable domain of TCR clone 6591 (TRAV16, TRAJ21)
CALLGNFNKFYF

SEQ ID NO: 13182 - protein, 13 aa, Homo sapiens
  CDR3 for beta chain variable domain of TCR clone 6591 (TRBV28, TRBJ2-7)
CASKAGGVYEQYF

SEQ ID NO: 13183 - protein, 16 aa, Homo sapiens
  CDR3 for alpha chain variable domain of TCR clone 6592 (TRAV3, TRAJ10)
CAVRDMRAGGGNKLTF

SEQ ID NO: 13184 - protein, 15 aa, Homo sapiens
  CDR3 for beta chain variable domain of TCR clone 6592 (TRBV7-2, TRBJ1-5)
CASSRGQGDNQPQHF

SEQ ID NO: 13185 - protein, 14 aa, Homo sapiens
  CDR3 for alpha chain variable domain of TCR clone 6593 (TRAV1-2, TRAJ16)
CAVNRFSDGQKLLF

SEQ ID NO: 13186 - protein, 13 aa, Homo sapiens
  CDR3 for beta chain variable domain of TCR clone 6593 (TRBV10-2, TRBJ2-7)
CASSESGVYEQYF

SEQ ID NO: 13187 - protein, 14 aa, Homo sapiens
  CDR3 for alpha chain variable domain of TCR clone 6594 (TRAV12-1, TRAJ9)
CVVTLNTGGFKTIF

SEQ ID NO: 13188 - protein, 11 aa, Homo sapiens
  CDR3 for beta chain variable domain of TCR clone 6594 (TRBV29-1, TRBJ2-5)
CSEDRTGTQYF

SEQ ID NO: 13189 - protein, 12 aa, Homo sapiens
  CDR3 for alpha chain variable domain of TCR clone 6595 (TRAV8-3, TRAJ26)
CAGDNYGQNFVF

SEQ ID NO: 13190 - protein, 15 aa, Homo sapiens
  CDR3 for beta chain variable domain of TCR clone 6595 (TRBV6-5, TRBJ2-1)
CASSYDAGAGNEQFF

SEQ ID NO: 13191 - protein, 15 aa, Homo sapiens
  CDR3 for alpha chain variable domain of TCR clone 6596 (TRAV26-1, TRAJ52)
CIVGEGGTSYGKLTF

SEQ ID NO: 13192 - protein, 16 aa, Homo sapiens
  CDR3 for beta chain variable domain of TCR clone 6596 (TRBV6-5, TRBJ2-7)
CASSSLAGTFSYEQYF

SEQ ID NO: 13193 - protein, 13 aa, Homo sapiens
  CDR3 for alpha chain variable domain of TCR clone 6597 (TRAV36/DV7, TRAJ38)
CVANAGNNRKLIW

SEQ ID NO: 13194 - protein, 14 aa, Homo sapiens
  CDR3 for beta chain variable domain of TCR clone 6597 (TRBV19, TRBJ2-1)
CASPTFVLSGEQFF

SEQ ID NO: 13195 - protein, 14 aa, Homo sapiens
  CDR3 for alpha chain variable domain of TCR clone 6598 (TRAV3, TRAJ9)
CTVRLNTGGFKTIF

SEQ ID NO: 13196 - protein, 15 aa, Homo sapiens
  CDR3 for beta chain variable domain of TCR clone 6598 (TRBV7-2, TRBJ2-1)
CASSLASGRVNEQFF

SEQ ID NO: 13197 - protein, 15 aa, Homo sapiens
  CDR3 for alpha chain variable domain of TCR clone 6599 (TRAV3, TRAJ17)
CAVRDTGAAGNKLTF

SEQ ID NO: 13198 - protein, 14 aa, Homo sapiens
  CDR3 for beta chain variable domain of TCR clone 6599 (TRBV6-3, TRBJ1-1)
CASSNLPPGAEAFF

SEQ ID NO: 13199 - protein, 15 aa, Homo sapiens
  CDR3 for alpha chain variable domain of TCR clone 6600 (TRAV2, TRAJ11)
CAVGGRNSGYSTLTF

SEQ ID NO: 13200 - protein, 12 aa, Homo sapiens
  CDR3 for beta chain variable domain of TCR clone 6600 (TRBV28, TRBJ2-7)
CASSFSSYEQYF

SEQ ID NO: 13201 - protein, 13 aa, Homo sapiens
  CDR3 for alpha chain variable domain of TCR clone 6601 (TRAV8-4, TRAJ44)
CAVCTGTASKLTF

SEQ ID NO: 13202 - protein, 15 aa, Homo sapiens
  CDR3 for beta chain variable domain of TCR clone 6601 (TRBV14, TRBJ2-1)
CASSQMGLHFNEQFF

SEQ ID NO: 13203 - protein, 15 aa, Homo sapiens
  CDR3 for alpha chain variable domain of TCR clone 6602 (TRAV16, TRAJ27)
CAPCGGGTNAGKSTF

SEQ ID NO: 13204 - protein, 15 aa, Homo sapiens
  CDR3 for beta chain variable domain of TCR clone 6602 (TRBV6-6, TRBJ2-3)
CASSYRRGGTDTQYF

SEQ ID NO: 13205 - protein, 13 aa, Homo sapiens
  CDR3 for alpha chain variable domain of TCR clone 6603 (TRAV3, TRAJ15)
CAVRDQAGTALIF

SEQ ID NO: 13206 - protein, 20 aa, Homo sapiens
  CDR3 for beta chain variable domain of TCR clone 6603 (TRBV23-1, TRBJ2-5)
CISAPAVPERVLLIQETQYF

SEQ ID NO: 13207 - protein, 16 aa, Homo sapiens
  CDR3 for alpha chain variable domain of TCR clone 6604 (TRAV30, TRAJ24)
CGTEIVDADSWGKFQF

SEQ ID NO: 13208 - protein, 13 aa, Homo sapiens
  CDR3 for beta chain variable domain of TCR clone 6604 (TRBV12-4, TRBJ2-5)
CASSPGTEETQYF

SEQ ID NO: 13209 - protein, 14 aa, Homo sapiens
  CDR3 for alpha chain variable domain of TCR clone 6605 (TRAV17, TRAJ57)
CATDPQGGSEKLVF

SEQ ID NO: 13210 - protein, 15 aa, Homo sapiens
  CDR3 for beta chain variable domain of TCR clone 6605 (TRBV12-4, TRBJ1-2)
CASRLGVAGNYGYTF

SEQ ID NO: 13211 - protein, 14 aa, Homo sapiens
  CDR3 for alpha chain variable domain of TCR clone 6606 (TRAV16, TRAJ15)
CALSGPQAGTALIF

SEQ ID NO: 13212 - protein, 17 aa, Homo sapiens
  CDR3 for beta chain variable domain of TCR clone 6606 (TRBV7-8, TRBJ2-6)
CASSAGTGGAGANVLTF

SEQ ID NO: 13213 - protein, 14 aa, Homo sapiens
  CDR3 for alpha chain variable domain of TCR clone 6607 (TRAV9-2, TRAJ39)
CALYIYNAGNMLTF

SEQ ID NO: 13214 - protein, 15 aa, Homo sapiens
  CDR3 for beta chain variable domain of TCR clone 6607 (TRBV9, TRBJ1-6)
CASSVAGTGDSPLHF

SEQ ID NO: 13215 - protein, 12 aa, Homo sapiens
  CDR3 for alpha chain variable domain of TCR clone 6608 (TRAV27, TRAJ35)
CAGADFGNVLHC

SEQ ID NO: 13216 - protein, 15 aa, Homo sapiens
  CDR3 for beta chain variable domain of TCR clone 6608 (TRBV19, TRBJ2-1)
CASSISSGGYNEQFF

SEQ ID NO: 13217 - protein, 11 aa, Homo sapiens
  CDR3 for alpha chain variable domain of TCR clone 6609 (TRAV12-3, TRAJ11)
CAMKGYSTLTF

SEQ ID NO: 13218 - protein, 16 aa, Homo sapiens
  CDR3 for beta chain variable domain of TCR clone 6609 (TRBV11-2, TRBJ2-3)
CASSLGVSGGQDTQYF

SEQ ID NO: 13219 - protein, 12 aa, Homo sapiens
  CDR3 for alpha chain variable domain of TCR clone 6610 (TRAV12-3, TRAJ17)
CAMTLTGNKLTF

SEQ ID NO: 13220 - protein, 16 aa, Homo sapiens
  CDR3 for beta chain variable domain of TCR clone 6610 (TRBV7-3, TRBJ2-2)
CASSLKRGTLSGELFF

SEQ ID NO: 13221 - protein, 14 aa, Homo sapiens
  CDR3 for alpha chain variable domain of TCR clone 6611 (TRAV26-1, TRAJ34)
CIVRVAYNTDKPIF

SEQ ID NO: 13222 - protein, 15 aa, Homo sapiens
  CDR3 for beta chain variable domain of TCR clone 6611 (TRBV20-1, TRBJ2-7)
CSARVPAAYFYEQYF

SEQ ID NO: 13223 - protein, 14 aa, Homo sapiens
  CDR3 for alpha chain variable domain of TCR clone 6612 (TRAV1-2, TRAJ24)
CAVLTTDSWGKFQF

SEQ ID NO: 13224 - protein, 15 aa, Homo sapiens
  CDR3 for beta chain variable domain of TCR clone 6612 (TRBV6-6, TRBJ2-7)
CASSYSYGGSYEQYF

SEQ ID NO: 13225 - protein, 14 aa, Homo sapiens
  CDR3 for alpha chain variable domain of TCR clone 6613 (TRAV8-1, TRAJ23)
CAVQAYNQGGKLIF

SEQ ID NO: 13226 - protein, 13 aa, Homo sapiens
  CDR3 for beta chain variable domain of TCR clone 6613 (TRBV5-1, TRBJ2-7)
CASSLEDNQEQYF

SEQ ID NO: 13227 - protein, 16 aa, Homo sapiens
  CDR3 for alpha chain variable domain of TCR clone 6614 (TRAV12-3, TRAJ53)
CAMSPGSGGSNYKLTF

SEQ ID NO: 13228 - protein, 14 aa, Homo sapiens
  CDR3 for beta chain variable domain of TCR clone 6614 (TRBV15, TRBJ2-5)
CATSIGGLGETQYF

SEQ ID NO: 13229 - protein, 13 aa, Homo sapiens
  CDR3 for alpha chain variable domain of TCR clone 6615 (TRAV9-2, TRAJ6)
CALSAGGSYIPTF

SEQ ID NO: 13230 - protein, 13 aa, Homo sapiens
  CDR3 for beta chain variable domain of TCR clone 6615 (TRBV12-4, TRBJ2-7)
CASSPTETYEQYF

SEQ ID NO: 13231 - protein, 13 aa, Homo sapiens
  CDR3 for alpha chain variable domain of TCR clone 6616 (TRAV13-1, TRAJ6)
CARGSGGSYIPTF

SEQ ID NO: 13232 - protein, 13 aa, Homo sapiens
  CDR3 for beta chain variable domain of TCR clone 6616 (TRBV20-1, TRBJ2-1)
CSARDLVSNEQFF

SEQ ID NO: 13233 - protein, 11 aa, Homo sapiens
  CDR3 for alpha chain variable domain of TCR clone 6617 (TRAV12-3, TRAJ27)
CAMANAGKSTF

SEQ ID NO: 13234 - protein, 17 aa, Homo sapiens
  CDR3 for beta chain variable domain of TCR clone 6617 (TRBV13, TRBJ2-3)
CASSLSRVAGGRNTQYF

SEQ ID NO: 13235 - protein, 15 aa, Homo sapiens
  CDR3 for alpha chain variable domain of TCR clone 6618 (TRAV8-3, TRAJ15)
CAVGAPNQAGTALIF

SEQ ID NO: 13236 - protein, 14 aa, Homo sapiens
  CDR3 for beta chain variable domain of TCR clone 6618 (TRBV20-1, TRBJ2-1)
CSPSDEASYNEQFF

SEQ ID NO: 13237 - protein, 12 aa, Homo sapiens
  CDR3 for alpha chain variable domain of TCR clone 6619 (TRAV12-3, TRAJ17)
CAMTLTGNKLTF

SEQ ID NO: 13238 - protein, 15 aa, Homo sapiens
  CDR3 for beta chain variable domain of TCR clone 6619 (TRBV20-1, TRBJ2-7)
CSARDRVSGMNEQYF

SEQ ID NO: 13239 - protein, 14 aa, Homo sapiens
  CDR3 for alpha chain variable domain of TCR clone 6620 (TRAV2, TRAJ9)
CAVEDRSGGFKTIF

SEQ ID NO: 13240 - protein, 14 aa, Homo sapiens
  CDR3 for beta chain variable domain of TCR clone 6620 (TRBV20-1, TRBJ2-1)
CSAQIGGSANEQFF

SEQ ID NO: 13241 - protein, 14 aa, Homo sapiens
  CDR3 for alpha chain variable domain of TCR clone 6621 (TRAV12-2, TRAJ13)
CAVKKTGGYQKVTF

SEQ ID NO: 13242 - protein, 15 aa, Homo sapiens
  CDR3 for beta chain variable domain of TCR clone 6621 (TRBV27, TRBJ2-1)
CASSNGGGSSNEQSF

SEQ ID NO: 13243 - protein, 14 aa, Homo sapiens
  CDR3 for alpha chain variable domain of TCR clone 6622 (TRAV17, TRAJ37)
CATVPSSNTGKLIF

SEQ ID NO: 13244 - protein, 15 aa, Homo sapiens
  CDR3 for beta chain variable domain of TCR clone 6622 (TRBV12-4, TRBJ2-2)
CASLRRGDLTGELFF

SEQ ID NO: 13245 - protein, 16 aa, Homo sapiens
  CDR3 for alpha chain variable domain of TCR clone 6623 (TRAV1-2, TRAJ10)
CAVRGVLTGGGNKLTF

SEQ ID NO: 13246 - protein, 13 aa, Homo sapiens
  CDR3 for beta chain variable domain of TCR clone 6623 (TRBV24-1, TRBJ2-2)
CATTATRTGELFF

SEQ ID NO: 13247 - protein, 14 aa, Homo sapiens
  CDR3 for alpha chain variable domain of TCR clone 6624 (TRAV1-2, TRAJ16)
CAVNRFSDGQKLLF

SEQ ID NO: 13248 - protein, 16 aa, Homo sapiens
  CDR3 for beta chain variable domain of TCR clone 6624 (TRBV11-2, TRBJ1-1)
CASSLRQGGEHSKAFF

SEQ ID NO: 13249 - protein, 16 aa, Homo sapiens
  CDR3 for alpha chain variable domain of TCR clone 6625 (TRAV8-3, TRAJ44)
CAVGASNTGTASKLTF

SEQ ID NO: 13250 - protein, 14 aa, Homo sapiens
  CDR3 for beta chain variable domain of TCR clone 6625 (TRBV7-6, TRBJ2-3)
CASSLGTVTDTQYF

SEQ ID NO: 13251 - protein, 15 aa, Homo sapiens
  CDR3 for alpha chain variable domain of TCR clone 6626 (TRAV23/DV6, TRAJ45)
CAAKNGGGGADGLTF

SEQ ID NO: 13252 - protein, 13 aa, Homo sapiens
  CDR3 for beta chain variable domain of TCR clone 6626 (TRBV20-1, TRBJ1-1)
CSARGGGNTEAFF

SEQ ID NO: 13253 - protein, 13 aa, Homo sapiens
  CDR3 for alpha chain variable domain of TCR clone 6627 (TRAV29/DV5, TRAJ54)
CAAHLQGAQKLVF

SEQ ID NO: 13254 - protein, 16 aa, Homo sapiens
  CDR3 for beta chain variable domain of TCR clone 6627 (TRBV7-2, TRBJ2-7)
CASSFPLAGGPLEQYF

SEQ ID NO: 13255 - protein, 14 aa, Homo sapiens
  CDR3 for alpha chain variable domain of TCR clone 6628 (TRAV29/DV5, TRAJ43)
CAAIHSYNNNDMRF

SEQ ID NO: 13256 - protein, 14 aa, Homo sapiens
  CDR3 for beta chain variable domain of TCR clone 6628 (TRBV12-4, TRBJ2-5)
CASSSTEGTKTQYF

SEQ ID NO: 13257 - protein, 15 aa, Homo sapiens
  CDR3 for alpha chain variable domain of TCR clone 6629 (TRAV12-3, TRAJ6)
CAMSATTGGSYIPTF

SEQ ID NO: 13258 - protein, 16 aa, Homo sapiens
  CDR3 for beta chain variable domain of TCR clone 6629 (TRBV9, TRBJ2-1)
CASSPTTGASYNEQFF

SEQ ID NO: 13259 - protein, 11 aa, Homo sapiens
  CDR3 for alpha chain variable domain of TCR clone 6630 (TRAV12-2, TRAJ31)
CAVTRWARLMF

SEQ ID NO: 13260 - protein, 15 aa, Homo sapiens
  CDR3 for beta chain variable domain of TCR clone 6630 (TRBV9, TRBJ1-6)
CASSVAGTGDSPLHF

SEQ ID NO: 13261 - protein, 14 aa, Homo sapiens
  CDR3 for alpha chain variable domain of TCR clone 6631 (TRAV1-2, TRAJ17)
CALRRGAAGNKLTF

SEQ ID NO: 13262 - protein, 12 aa, Homo sapiens
  CDR3 for beta chain variable domain of TCR clone 6631 (TRBV11-2, TRBJ2-2)
CASSLGGGELFF

SEQ ID NO: 13263 - protein, 14 aa, Homo sapiens
  CDR3 for alpha chain variable domain of TCR clone 6632 (TRAV1-2, TRAJ8)
CAVREDTGFQKLVF

SEQ ID NO: 13264 - protein, 13 aa, Homo sapiens
  CDR3 for beta chain variable domain of TCR clone 6632 (TRBV14, TRBJ1-1)
CASSREFGTEAFF

SEQ ID NO: 13265 - protein, 14 aa, Homo sapiens
  CDR3 for alpha chain variable domain of TCR clone 6633 (TRAV12-1, TRAJ42)
CVVIYGGSQGNLIF

SEQ ID NO: 13266 - protein, 12 aa, Homo sapiens
  CDR3 for beta chain variable domain of TCR clone 6633 (TRBV11-2, TRBJ2-4)
CASSSASGSEYF

SEQ ID NO: 13267 - protein, 11 aa, Homo sapiens
  CDR3 for alpha chain variable domain of TCR clone 6634 (TRAV21, TRAJ48)
CAVDGNEKLTF

SEQ ID NO: 13268 - protein, 15 aa, Homo sapiens
  CDR3 for beta chain variable domain of TCR clone 6634 (TRBV27, TRBJ2-1)
CASSNGGGSSNEQFF

SEQ ID NO: 13269 - protein, 19 aa, Homo sapiens
  CDR3 for alpha chain variable domain of TCR clone 6635 (TRAV13-1, TRAJ52)
CAASPYQNAGGTSYGKLTF

SEQ ID NO: 13270 - protein, 13 aa, Homo sapiens
  CDR3 for beta chain variable domain of TCR clone 6635 (TRBV29-1, TRBJ2-5)
CSATTSGGETQYF

SEQ ID NO: 13271 - protein, 14 aa, Homo sapiens
  CDR3 for alpha chain variable domain of TCR clone 6636 (TRAV1-2, TRAJ16)
CAVNRFSDGQKLLF

SEQ ID NO: 13272 - protein, 15 aa, Homo sapiens
  CDR3 for beta chain variable domain of TCR clone 6636 (TRBV11-2, TRBJ1-1)
CASSSRSSLLLSLDK

SEQ ID NO: 13273 - protein, 14 aa, Homo sapiens
  CDR3 for alpha chain variable domain of TCR clone 6637 (TRAV1-2, TRAJ16)
CAVNRFSDGQKLLF

SEQ ID NO: 13274 - protein, 15 aa, Homo sapiens
  CDR3 for beta chain variable domain of TCR clone 6637 (TRBV9, TRBJ1-6)
CASSVAGTGDSPLRF

SEQ ID NO: 13275 - protein, 14 aa, Homo sapiens
  CDR3 for alpha chain variable domain of TCR clone 6638 (TRAV1-2, TRAJ16)
CAVNRFSDGQKLLF

SEQ ID NO: 13276 - protein, 14 aa, Homo sapiens
  CDR3 for beta chain variable domain of TCR clone 6638 (TRBV7-2, TRBJ1-2)
CASSQTGSTYGYTF

SEQ ID NO: 13277 - protein, 13 aa, Homo sapiens
  CDR3 for alpha chain variable domain of TCR clone 6639 (TRAV17, TRAJ40)
CATAFSGTYKYIF

SEQ ID NO: 13278 - protein, 18 aa, Homo sapiens
  CDR3 for beta chain variable domain of TCR clone 6639 (TRBV28, TRBJ2-1)
CASSSGLAGGGSYNEQFF

SEQ ID NO: 13279 - protein, 13 aa, Homo sapiens
  CDR3 for alpha chain variable domain of TCR clone 6640 (TRAV3, TRAJ21)
CAVREPDFNKFYF

SEQ ID NO: 13280 - protein, 15 aa, Homo sapiens
  CDR3 for beta chain variable domain of TCR clone 6640 (TRBV4-3, TRBJ2-2)
CASSQGQGGTGELFF

SEQ ID NO: 13281 - protein, 13 aa, Homo sapiens
  CDR3 for alpha chain variable domain of TCR clone 6641 (TRAV3, TRAJ27)
CAVTNTNAGKSTF

SEQ ID NO: 13282 - protein, 13 aa, Homo sapiens
  CDR3 for beta chain variable domain of TCR clone 6641 (TRBV19, TRBJ2-7)
CASQSYGAGEQYF

SEQ ID NO: 13283 - protein, 11 aa, Homo sapiens
  CDR3 for alpha chain variable domain of TCR clone 6642 (TRAV12-3, TRAJ27)
CAMANAGKSTF

SEQ ID NO: 13284 - protein, 13 aa, Homo sapiens
  CDR3 for beta chain variable domain of TCR clone 6642 (TRBV3-1, TRBJ1-1)
CASSPGVITEAFF

SEQ ID NO: 13285 - protein, 16 aa, Homo sapiens
  CDR3 for alpha chain variable domain of TCR clone 6643 (TRAV30, TRAJ24)
CGTEIVDADSWGTFQF

SEQ ID NO: 13286 - protein, 14 aa, Homo sapiens
  CDR3 for beta chain variable domain of TCR clone 6643 (TRBV12-5, TRBJ2-5)
CASGSRTHQETQYF

SEQ ID NO: 13287 - protein, 11 aa, Homo sapiens
  CDR3 for alpha chain variable domain of TCR clone 6644 (TRAV2, TRAJ16)
CAVGDGQKLLF

SEQ ID NO: 13288 - protein, 15 aa, Homo sapiens
  CDR3 for beta chain variable domain of TCR clone 6644 (TRBV11-2, TRBJ2-1)
CASSPAGQSLNEQFF

SEQ ID NO: 13289 - protein, 12 aa, Homo sapiens
  CDR3 for alpha chain variable domain of TCR clone 6645 (TRAV2, TRAJ10)
CASTGGGNKLTF

SEQ ID NO: 13290 - protein, 13 aa, Homo sapiens
  CDR3 for beta chain variable domain of TCR clone 6645 (TRBV7-2, TRBJ2-2)
CQQRTGAAGELFF

SEQ ID NO: 13291 - protein, 14 aa, Homo sapiens
  CDR3 for alpha chain variable domain of TCR clone 6646 (TRAV1-2, TRAJ16)
CAVNRFSDGQKLLF

SEQ ID NO: 13292 - protein, 14 aa, Homo sapiens
  CDR3 for beta chain variable domain of TCR clone 6646 (TRBV7-6, TRBJ2-3)
CASSLGTVTDTQYF

SEQ ID NO: 13293 - protein, 14 aa, Homo sapiens
  CDR3 for alpha chain variable domain of TCR clone 6647 (TRAV1-2, TRAJ8)
CAVREDTGFQKLVF

SEQ ID NO: 13294 - protein, 13 aa, Homo sapiens
  CDR3 for beta chain variable domain of TCR clone 6647 (TRBV7-3, TRBJ1-1)
CASSQDWGAEAFF

SEQ ID NO: 13295 - protein, 14 aa, Homo sapiens
  CDR3 for alpha chain variable domain of TCR clone 6648 (TRAV8-1, TRAJ47)
CAVNAVGYGNKLVF

SEQ ID NO: 13296 - protein, 15 aa, Homo sapiens
  CDR3 for beta chain variable domain of TCR clone 6648 (TRBV3-1, TRBJ2-2)
CASSTTTGPTGELFF

SEQ ID NO: 13297 - protein, 18 aa, Homo sapiens
  CDR3 for alpha chain variable domain of TCR clone 6649 (TRAV21, TRAJ52)
CAVRPSPAGGTSYGKLTL

SEQ ID NO: 13298 - protein, 17 aa, Homo sapiens
  CDR3 for beta chain variable domain of TCR clone 6649 (TRBV13, TRBJ2-3)
CASSLSRVAGGRNTQYF

SEQ ID NO: 13299 - protein, 12 aa, Homo sapiens
  CDR3 for alpha chain variable domain of TCR clone 6650 (TRAV12-2, TRAJ10)
WGVTGGGNKLTF

SEQ ID NO: 13300 - protein, 20 aa, Homo sapiens
  CDR3 for beta chain variable domain of TCR clone 6650 (TRBV19, TRBJ2-1)
CASSISRTVTSTRLNNEQFF

SEQ ID NO: 13301 - protein, 13 aa, Homo sapiens
  CDR3 for alpha chain variable domain of TCR clone 6651 (TRAV20, TRAJ21)
CAVEGYNFNKFYF

SEQ ID NO: 13302 - protein, 16 aa, Homo sapiens
  CDR3 for beta chain variable domain of TCR clone 6651 (TRBV7-2, TRBJ1-2)
CASSSNQDRRGHGYTF

SEQ ID NO: 13303 - protein, 15 aa, Homo sapiens
  CDR3 for alpha chain variable domain of TCR clone 6652 (TRAV21, TRAJ53)
CATLNSGGSNYKLTF

SEQ ID NO: 13304 - protein, 14 aa, Homo sapiens
  CDR3 for beta chain variable domain of TCR clone 6652 (TRBV27, TRBJ2-2)
CASRPGVNTGELFF

SEQ ID NO: 13305 - protein, 18 aa, Homo sapiens
  CDR3 for alpha chain variable domain of TCR clone 6653 (TRAV13-1, TRAJ52)
CAASKRSAGGTSYGKLTF

SEQ ID NO: 13306 - protein, 15 aa, Homo sapiens
  CDR3 for beta chain variable domain of TCR clone 6653 (TRBV6-3, TRBJ2-7)
CASSSPGTVFYEQYF

SEQ ID NO: 13307 - protein, 13 aa, Homo sapiens
  CDR3 for alpha chain variable domain of TCR clone 6654 (TRAV8-2, TRAJ47)
CVVSEREGNKLVF

SEQ ID NO: 13308 - protein, 15 aa, Homo sapiens
  CDR3 for beta chain variable domain of TCR clone 6654 (TRBV6-3, TRBJ2-7)
CASSSPGTVFYEQYF

SEQ ID NO: 13309 - protein, 12 aa, Homo sapiens
  CDR3 for alpha chain variable domain of TCR clone 6655 (TRAV13-1, TRAJ49)
CAASPMGNQFYF

SEQ ID NO: 13310 - protein, 14 aa, Homo sapiens
  CDR3 for beta chain variable domain of TCR clone 6655 (TRBV20-1, TRBJ2-2)
SAVLVPRAPGSCFF

SEQ ID NO: 13311 - protein, 12 aa, Homo sapiens
  CDR3 for alpha chain variable domain of TCR clone 6656 (TRAV23/DV6, TRAJ53)
CAASKLGSGGSN

SEQ ID NO: 13312 - protein, 18 aa, Homo sapiens
  CDR3 for beta chain variable domain of TCR clone 6656 (TRBV11-2, TRBJ2-3)
CASSLGGASRGAPNTQYF

SEQ ID NO: 13313 - protein, 13 aa, Homo sapiens
  CDR3 for alpha chain variable domain of TCR clone 6657 (TRAV1-2, TRAJ12)
CAVSMDSSYKLIF

SEQ ID NO: 13314 - protein, 14 aa, Homo sapiens
  CDR3 for beta chain variable domain of TCR clone 6657 (TRBV7-2, TRBJ2-7)
CASSPKTSFYEQYF

SEQ ID NO: 13315 - protein, 12 aa, Homo sapiens
  CDR3 for alpha chain variable domain of TCR clone 6658 (TRAV23/DV6, TRAJ16)
CAATGTGQKLLF

SEQ ID NO: 13316 - protein, 20 aa, Homo sapiens
  CDR3 for beta chain variable domain of TCR clone 6658 (TRBV6-7, TRBJ1-2)
CASSYSAGQGNPLRVYGYTF

SEQ ID NO: 13317 - protein, 11 aa, Homo sapiens
  CDR3 for alpha chain variable domain of TCR clone 6659 (TRAV2, TRAJ13)
CASGGYQKVTF

SEQ ID NO: 13318 - protein, 15 aa, Homo sapiens
  CDR3 for beta chain variable domain of TCR clone 6659 (TRBV7-2, TRBJ2-1)
CASSSGLAGGNEQFF

SEQ ID NO: 13319 - protein, 14 aa, Homo sapiens
  CDR3 for alpha chain variable domain of TCR clone 6660 (TRAV1-2, TRAJ8)
CAVREDTGFQKLVF

SEQ ID NO: 13320 - protein, 16 aa, Homo sapiens
  CDR3 for beta chain variable domain of TCR clone 6660 (TRBV5-4, TRBJ2-3)
CASQQPGAGGADTQYF

SEQ ID NO: 13321 - protein, 14 aa, Homo sapiens
  CDR3 for alpha chain variable domain of TCR clone 6661 (TRAV1-2, TRAJ8)
CAVREDTGFQKLVF

SEQ ID NO: 13322 - protein, 15 aa, Homo sapiens
  CDR3 for beta chain variable domain of TCR clone 6661 (TRBV6-3, TRBJ2-7)
CASSSPGAVFYEQYF

SEQ ID NO: 13323 - protein, 18 aa, Homo sapiens
  CDR3 for alpha chain variable domain of TCR clone 6662 (TRAV12-3, TRAJ52)
CAMSRTNAGGTSYGKLTF

SEQ ID NO: 13324 - protein, 16 aa, Homo sapiens
  CDR3 for beta chain variable domain of TCR clone 6662 (TRBV7-3, TRBJ2-3)
ELSLMKRMRGADTQYF

SEQ ID NO: 13325 - protein, 14 aa, Homo sapiens
  CDR3 for alpha chain variable domain of TCR clone 6663 (TRAV12-3, TRAJ10)
SHLPLTGGGNKLTF

SEQ ID NO: 13326 - protein, 12 aa, Homo sapiens
  CDR3 for beta chain variable domain of TCR clone 6663 (TRBV14, TRBJ2-5)
CASSQLKETQYF

SEQ ID NO: 13327 - protein, 14 aa, Homo sapiens
  CDR3 for alpha chain variable domain of TCR clone 6664 (TRAV2, TRAJ37)
CAVDFTSNTGKLIF

SEQ ID NO: 13328 - protein, 17 aa, Homo sapiens
  CDR3 for beta chain variable domain of TCR clone 6664 (TRBV19, TRBJ2-7)
CASSISFYDSYPYEQYF

SEQ ID NO: 13329 - protein, 18 aa, Homo sapiens
  CDR3 for alpha chain variable domain of TCR clone 6665 (TRAV1-2, TRAJ18)
CAVRDMGDRGSTLGRLYF

SEQ ID NO: 13330 - protein, 16 aa, Homo sapiens
  CDR3 for beta chain variable domain of TCR clone 6665 (TRBV29-1, TRBJ1-2)
CSVEANRNIANYGYTF

SEQ ID NO: 13331 - protein, 16 aa, Homo sapiens
  CDR3 for alpha chain variable domain of TCR clone 6666 (TRAV4, TRAJ6)
CLVGVYASGGSYIPTF

SEQ ID NO: 13332 - protein, 15 aa, Homo sapiens
  CDR3 for beta chain variable domain of TCR clone 6666 (TRBV14, TRBJ2-5)
CASSQGDRDQETQYF

SEQ ID NO: 13333 - protein, 12 aa, Homo sapiens
  CDR3 for alpha chain variable domain of TCR clone 6667 (TRAV13-2, TRAJ37)
CAEKGNTGKLIF

SEQ ID NO: 13334 - protein, 14 aa, Homo sapiens
  CDR3 for beta chain variable domain of TCR clone 6667 (TRBV6-5, TRBJ2-7)
CASSTTGGPYEQYF

SEQ ID NO: 13335 - protein, 12 aa, Homo sapiens
  CDR3 for alpha chain variable domain of TCR clone 6668 (TRAV27, TRAJ48)
CAGARGNEKLTF

SEQ ID NO: 13336 - protein, 14 aa, Homo sapiens
  CDR3 for beta chain variable domain of TCR clone 6668 (TRBV12-5, TRBJ2-5)
CASGSRTHQETQYF

SEQ ID NO: 13337 - protein, 16 aa, Homo sapiens
  CDR3 for alpha chain variable domain of TCR clone 6669 (TRAV13-2, TRAJ22)
CAENRGSSGSARQLTF

SEQ ID NO: 13338 - protein, 17 aa, Homo sapiens
  CDR3 for beta chain variable domain of TCR clone 6669 (TRBV14, TRBJ2-1)
CASSQDRRVSSYNEQFF

SEQ ID NO: 13339 - protein, 14 aa, Homo sapiens
  CDR3 for alpha chain variable domain of TCR clone 6670 (TRAV2, TRAJ37)
CAVDFTSNTGKLIF

SEQ ID NO: 13340 - protein, 14 aa, Homo sapiens
  CDR3 for beta chain variable domain of TCR clone 6670 (TRBV18, TRBJ2-5)
CASSPPGHQETQYF

SEQ ID NO: 13341 - protein, 14 aa, Homo sapiens
  CDR3 for alpha chain variable domain of TCR clone 6671 (TRAV9-2, TRAJ39)
CALYIYNAGNMLTF

SEQ ID NO: 13342 - protein, 13 aa, Homo sapiens
  CDR3 for beta chain variable domain of TCR clone 6671 (TRBV7-2, TRBJ2-2)
CASSLAVTGELFF

SEQ ID NO: 13343 - protein, 16 aa, Homo sapiens
  CDR3 for alpha chain variable domain of TCR clone 6672 (TRAV12-3, TRAJ52)
CAVSNAGGTSYGKLTF

SEQ ID NO: 13344 - protein, 16 aa, Homo sapiens
  CDR3 for beta chain variable domain of TCR clone 6672 (TRBV6-6, TRBJ2-1)
CASSYSFSGSYNEQFF

SEQ ID NO: 13345 - protein, 17 aa, Homo sapiens
  CDR3 for alpha chain variable domain of TCR clone 6673 (TRAV3, TRAJ6)
CAVRDGPRAGGSYIPTF

SEQ ID NO: 13346 - protein, 15 aa, Homo sapiens
  CDR3 for beta chain variable domain of TCR clone 6673 (TRBV20-1, TRBJ2-7)
CSARDRVSGMDEQYF

SEQ ID NO: 13347 - protein, 15 aa, Homo sapiens
  CDR3 for alpha chain variable domain of TCR clone 6674 (TRAV25, TRAJ52)
CAGRPGGTSYGKLTF

SEQ ID NO: 13348 - protein, 17 aa, Homo sapiens
  CDR3 for beta chain variable domain of TCR clone 6674 (TRBV7-8, TRBJ2-6)
CASSAGTGGAGANDLTF

SEQ ID NO: 13349 - protein, 14 aa, Homo sapiens
  CDR3 for alpha chain variable domain of TCR clone 6675 (TRAV29/DV5, TRAJ36)
CAARRKTGANNLFF

SEQ ID NO: 13350 - protein, 15 aa, Homo sapiens
  CDR3 for beta chain variable domain of TCR clone 6675 (TRBV9, TRBJ1-6)
CASSVAGTGDSPLHF

SEQ ID NO: 13351 - protein, 14 aa, Homo sapiens
  CDR3 for alpha chain variable domain of TCR clone 6676 (TRAV12-2, TRAJ13)
CAVKKTGGYQKVTF

SEQ ID NO: 13352 - protein, 15 aa, Homo sapiens
  CDR3 for beta chain variable domain of TCR clone 6676 (TRBV27, TRBJ2-1)
CASSNGGGSANEQFF

SEQ ID NO: 13353 - protein, 17 aa, Homo sapiens
  CDR3 for alpha chain variable domain of TCR clone 6677 (TRAV26-1, TRAJ53)
CIVRVDDSGGSNYKLTF

SEQ ID NO: 13354 - protein, 19 aa, Homo sapiens
  CDR3 for beta chain variable domain of TCR clone 6677 (TRBV25-1, TRBJ2-2)
CAILVYRVDRGRKTGELFF

SEQ ID NO: 13355 - protein, 15 aa, Homo sapiens
  CDR3 for alpha chain variable domain of TCR clone 6678 (TRAV27, TRAJ38)
CAARRNAGNNRKLIW

SEQ ID NO: 13356 - protein, 13 aa, Homo sapiens
  CDR3 for beta chain variable domain of TCR clone 6678 (TRBV12-5, TRBJ2-3)
CASGERQSDTQYF

SEQ ID NO: 13357 - protein, 12 aa, Homo sapiens
  CDR3 for alpha chain variable domain of TCR clone 6679 (TRAV29/DV5, TRAJ43)
CAAPYNNNDMRF

SEQ ID NO: 13358 - protein, 15 aa, Homo sapiens
  CDR3 for beta chain variable domain of TCR clone 6679 (TRBV18, TRBJ1-6)
CASSRIQGRNSPLHF

SEQ ID NO: 13359 - protein, 13 aa, Homo sapiens
  CDR3 for alpha chain variable domain of TCR clone 6680 (TRAV8-6, TRAJ50)
CAVIKTSYDKVIF

SEQ ID NO: 13360 - protein, 13 aa, Homo sapiens
  CDR3 for beta chain variable domain of TCR clone 6680 (TRBV4-2, TRBJ1-1)
CASSQAGNTEAFF

SEQ ID NO: 13361 - protein, 17 aa, Homo sapiens
  CDR3 for alpha chain variable domain of TCR clone 6681 (TRAV3, TRAJ6)
CAVRDGPRAGGSYIHTF

SEQ ID NO: 13362 - protein, 14 aa, Homo sapiens
  CDR3 for beta chain variable domain of TCR clone 6681 (TRBV7-2, TRBJ2-7)
CASSPKTSFYEQYF

SEQ ID NO: 13363 - protein, 17 aa, Homo sapiens
  CDR3 for alpha chain variable domain of TCR clone 6682 (TRAV29/DV5, TRAJ45)
CAADGPFSGGGADGLTF

SEQ ID NO: 13364 - protein, 13 aa, Homo sapiens
  CDR3 for beta chain variable domain of TCR clone 6682 (TRBV19, TRBJ1-5)
CASSMRGYQPQHF

SEQ ID NO: 13365 - protein, 15 aa, Homo sapiens
  CDR3 for alpha chain variable domain of TCR clone 6683 (TRAV17, TRAJ57)
CATGPSQGGSEKLVF

SEQ ID NO: 13366 - protein, 15 aa, Homo sapiens
  CDR3 for beta chain variable domain of TCR clone 6683 (TRBV7-2, TRBJ1-2)
CASSPRAGWNYGYTF

SEQ ID NO: 13367 - protein, 14 aa, Homo sapiens
  CDR3 for alpha chain variable domain of TCR clone 6684 (TRAV9-2, TRAJ39)
CALYIYNAGNMLTF

SEQ ID NO: 13368 - protein, 18 aa, Homo sapiens
  CDR3 for beta chain variable domain of TCR clone 6684 (TRBV12-4, TRBJ2-2)
CASSLVAGTRGRTGELFF

SEQ ID NO: 13369 - protein, 17 aa, Homo sapiens
  CDR3 for alpha chain variable domain of TCR clone 6685 (TRAV3, TRAJ6)
CAVRDGPRAGGSYIPTF

SEQ ID NO: 13370 - protein, 13 aa, Homo sapiens
  CDR3 for beta chain variable domain of TCR clone 6685 (TRBV7-9, TRBJ1-2)
CASSLKQNYGYTF

SEQ ID NO: 13371 - protein, 11 aa, Homo sapiens
  CDR3 for alpha chain variable domain of TCR clone 6686 (TRAV3, TRAJ21)
CAVGNFNKFYF

SEQ ID NO: 13372 - protein, 16 aa, Homo sapiens
  CDR3 for beta chain variable domain of TCR clone 6686 (TRBV19, TRBJ2-1)
RASSKAGPSSYNEQFF

SEQ ID NO: 13373 - protein, 14 aa, Homo sapiens
  CDR3 for alpha chain variable domain of TCR clone 6687 (TRAV1-2, TRAJ16)
CAVNRFSDGQKLLF

SEQ ID NO: 13374 - protein, 14 aa, Homo sapiens
  CDR3 for beta chain variable domain of TCR clone 6687 (TRBV19, TRBJ2-7)
CASSMGQGAIEQYF

SEQ ID NO: 13375 - protein, 12 aa, Homo sapiens
  CDR3 for alpha chain variable domain of TCR clone 6688 (TRAV9-2, TRAJ9)
CAMNTGGFKTIF

SEQ ID NO: 13376 - protein, 17 aa, Homo sapiens
  CDR3 for beta chain variable domain of TCR clone 6688 (TRBV28, TRBJ2-5)
CASSRQGGLAGAETQYF

SEQ ID NO: 13377 - protein, 10 aa, Homo sapiens
  CDR3 for alpha chain variable domain of TCR clone 6689 (TRAV13-1, TRAJ21)
CAASLNKFYF

SEQ ID NO: 13378 - protein, 13 aa, Homo sapiens
  CDR3 for beta chain variable domain of TCR clone 6689 (TRBV7-9, TRBJ2-7)
CASSFYGSYEQYF

SEQ ID NO: 13379 - protein, 13 aa, Homo sapiens
  CDR3 for alpha chain variable domain of TCR clone 6690 (TRAV24, TRAJ23)
CASHWNQGGKLIF

SEQ ID NO: 13380 - protein, 13 aa, Homo sapiens
  CDR3 for beta chain variable domain of TCR clone 6690 (TRBV13, TRBJ2-1)
CASILGGRGEQFF

SEQ ID NO: 13381 - protein, 16 aa, Homo sapiens
  CDR3 for alpha chain variable domain of TCR clone 6691 (TRAV30, TRAJ24)
CGTEIVDADSWGKFQF

SEQ ID NO: 13382 - protein, 14 aa, Homo sapiens
  CDR3 for beta chain variable domain of TCR clone 6691 (TRBV6-1, TRBJ1-3)
CASVQGGGGNTIYF

SEQ ID NO: 13383 - protein, 12 aa, Homo sapiens
  CDR3 for alpha chain variable domain of TCR clone 6692 (TRAV13-2, TRAJ58)
CAERRLDSRLTF

SEQ ID NO: 13384 - protein, 15 aa, Homo sapiens
  CDR3 for beta chain variable domain of TCR clone 6692 (TRBV5-1, TRBJ2-5)
CASSSGREMVETQYL

SEQ ID NO: 13385 - protein, 19 aa, Homo sapiens
  CDR3 for alpha chain variable domain of TCR clone 6693 (TRAV1-1, TRAJ37)
CAVPSSGRYGSGNTGKLIF

SEQ ID NO: 13386 - protein, 14 aa, Homo sapiens
  CDR3 for beta chain variable domain of TCR clone 6693 (TRBV7-6, TRBJ2-7)
CASSLGDRGYEQYF

SEQ ID NO: 13387 - protein, 14 aa, Homo sapiens
  CDR3 for alpha chain variable domain of TCR clone 6694 (TRAV14/DV4, TRAJ15)
CAMRRDQAGTALIF

SEQ ID NO: 13388 - protein, 14 aa, Homo sapiens
  CDR3 for beta chain variable domain of TCR clone 6694 (TRBV28, TRBJ2-7)
CASRAAGLGYEQYF

SEQ ID NO: 13389 - protein, 18 aa, Homo sapiens
  CDR3 for alpha chain variable domain of TCR clone 6695 (TRAV21, TRAJ52)
CAVRPSPAGGTSYGKLTF

SEQ ID NO: 13390 - protein, 13 aa, Homo sapiens
  CDR3 for beta chain variable domain of TCR clone 6695 (TRBV7-9, TRBJ1-2)
CASSLKQNYGYTF

SEQ ID NO: 13391 - protein, 14 aa, Homo sapiens
  CDR3 for alpha chain variable domain of TCR clone 6696 (TRAV29/DV5, TRAJ45)
CAPYSGGGADGLTF

SEQ ID NO: 13392 - protein, 13 aa, Homo sapiens
  CDR3 for beta chain variable domain of TCR clone 6696 (TRBV29-1, TRBJ2-3)
CSATRGGRDTQYF

SEQ ID NO: 13393 - protein, 13 aa, Homo sapiens
  CDR3 for alpha chain variable domain of TCR clone 6697 (TRAV21, TRAJ27)
CAARPGNAGKSTF

SEQ ID NO: 13394 - protein, 15 aa, Homo sapiens
  CDR3 for beta chain variable domain of TCR clone 6697 (TRBV12-4, TRBJ2-5)
CASSPPTGLQETQYF

SEQ ID NO: 13395 - protein, 15 aa, Homo sapiens
  CDR3 for alpha chain variable domain of TCR clone 6698 (TRAV8-3, TRAJ40)
CAVGGRTSGTYKYIF

SEQ ID NO: 13396 - protein, 15 aa, Homo sapiens
  CDR3 for beta chain variable domain of TCR clone 6698 (TRBV19, TRBJ1-1)
CASSGDGLGNTEAFF

SEQ ID NO: 13397 - protein, 15 aa, Homo sapiens
  CDR3 for alpha chain variable domain of TCR clone 6699 (TRAV12-3, TRAJ6)
CAMSATTGGSYIPTF

SEQ ID NO: 13398 - protein, 16 aa, Homo sapiens
  CDR3 for beta chain variable domain of TCR clone 6699 (TRBV13, TRBJ2-2)
CASSPRTGEHTGELFF

SEQ ID NO: 13399 - protein, 14 aa, Homo sapiens
  CDR3 for alpha chain variable domain of TCR clone 6700 (TRAV12-2, TRAJ13)
CAVKKTGGYQKVTF

SEQ ID NO: 13400 - protein, 15 aa, Homo sapiens
  CDR3 for beta chain variable domain of TCR clone 6700 (TRBV27, TRBJ2-1)
CASSNGEGPPMSSSS

SEQ ID NO: 13401 - protein, 14 aa, Homo sapiens
  CDR3 for alpha chain variable domain of TCR clone 6701 (TRAV12-2, TRAJ13)
CAVKKTGGYQKVTF

SEQ ID NO: 13402 - protein, 18 aa, Homo sapiens
  CDR3 for beta chain variable domain of TCR clone 6701 (TRBV11-2, TRBJ2-3)
CASSLGGASRGAPNTQYF

SEQ ID NO: 13403 - protein, 13 aa, Homo sapiens
  CDR3 for alpha chain variable domain of TCR clone 6702 (TRAV2, TRAJ15)
CAVASQAGTALIF

SEQ ID NO: 13404 - protein, 16 aa, Homo sapiens
  CDR3 for beta chain variable domain of TCR clone 6702 (TRBV11-3, TRBJ2-3)
CASSSGSGGGTDTQYF

SEQ ID NO: 13405 - protein, 14 aa, Homo sapiens
  CDR3 for alpha chain variable domain of TCR clone 6703 (TRAV9-2, TRAJ24)
CALNPRGSWGKLQF

SEQ ID NO: 13406 - protein, 15 aa, Homo sapiens
  CDR3 for beta chain variable domain of TCR clone 6703 (TRBV7-2, TRBJ2-3)
CASSSTGLETDTQYF

SEQ ID NO: 13407 - protein, 15 aa, Homo sapiens
  CDR3 for alpha chain variable domain of TCR clone 6704 (TRAV16, TRAJ16)
CALQGGGSDGQKLLF

SEQ ID NO: 13408 - protein, 14 aa, Homo sapiens
  CDR3 for beta chain variable domain of TCR clone 6704 (TRBV6-1, TRBJ2-7)
CASSERVNPYEQYF

SEQ ID NO: 13409 - protein, 11 aa, Homo sapiens
  CDR3 for alpha chain variable domain of TCR clone 6705 (TRAV2, TRAJ13)
CASGGYQKVTF

SEQ ID NO: 13410 - protein, 15 aa, Homo sapiens
  CDR3 for beta chain variable domain of TCR clone 6705 (TRBV29-1, TRBJ2-1)
CSVPTGLALYNEQFF

SEQ ID NO: 13411 - protein, 14 aa, Homo sapiens
  CDR3 for alpha chain variable domain of TCR clone 6706 (TRAV12-2, TRAJ13)
CAVKKAGGYQKVTF

SEQ ID NO: 13412 - protein, 15 aa, Homo sapiens
  CDR3 for beta chain variable domain of TCR clone 6706 (TRBV27, TRBJ2-1)
CASSNGGGSSNEQFF

SEQ ID NO: 13413 - protein, 12 aa, Homo sapiens
  CDR3 for alpha chain variable domain of TCR clone 6707 (TRAV12-3, TRAJ17)
CAMTLTGNKLTF

SEQ ID NO: 13414 - protein, 12 aa, Homo sapiens
  CDR3 for beta chain variable domain of TCR clone 6707 (TRBV12-4, TRBJ2-7)
CASSLGGYEQYF

SEQ ID NO: 13415 - protein, 15 aa, Homo sapiens
  CDR3 for alpha chain variable domain of TCR clone 6708 (TRAV12-3, TRAJ6)
CAMSATTGGSYIPTF

SEQ ID NO: 13416 - protein, 17 aa, Homo sapiens
  CDR3 for beta chain variable domain of TCR clone 6708 (TRBV20-1, TRBJ2-1)
CSARSPSGGPPTMSSSS

SEQ ID NO: 13417 - protein, 14 aa, Homo sapiens
  CDR3 for alpha chain variable domain of TCR clone 6709 (TRAV1-2, TRAJ8)
CAVREDTGFQKLVF

SEQ ID NO: 13418 - protein, 20 aa, Homo sapiens
  CDR3 for beta chain variable domain of TCR clone 6709 (TRBV28, TRBJ2-1)
CASTPIGRSPGLAGGNEQFF

SEQ ID NO: 13419 - protein, 16 aa, Homo sapiens
  CDR3 for alpha chain variable domain of TCR clone 6710 (TRAV1-1, TRAJ29)
CAVRSTRNSGNTPLVF

SEQ ID NO: 13420 - protein, 14 aa, Homo sapiens
  CDR3 for beta chain variable domain of TCR clone 6710 (TRBV6-1, TRBJ1-3)
CASVQGGGGNTIYF

SEQ ID NO: 13421 - protein, 15 aa, Homo sapiens
  CDR3 for alpha chain variable domain of TCR clone 6711 (TRAV16, TRAJ10)
CALEGLTGGGNKLTF

SEQ ID NO: 13422 - protein, 16 aa, Homo sapiens
  CDR3 for beta chain variable domain of TCR clone 6711 (TRBV5-7, TRBJ1-1)
CASSLVGPRGNTEAFF

SEQ ID NO: 13423 - protein, 14 aa, Homo sapiens
  CDR3 for alpha chain variable domain of TCR clone 6712 (TRAV35, TRAJ22)
CAGHLSGSARQLTF

SEQ ID NO: 13424 - protein, 15 aa, Homo sapiens
  CDR3 for beta chain variable domain of TCR clone 6712 (TRBV7-3, TRBJ1-6)
CASSLGRGAGSPLHF

SEQ ID NO: 13425 - protein, 13 aa, Homo sapiens
  CDR3 for alpha chain variable domain of TCR clone 6713 (TRAV8-3, TRAJ36)
CAVGATGANNLFF

SEQ ID NO: 13426 - protein, 15 aa, Homo sapiens
  CDR3 for beta chain variable domain of TCR clone 6713 (TRBV27, TRBJ1-5)
CASTFNRGSNQPQHF

SEQ ID NO: 13427 - protein, 12 aa, Homo sapiens
  CDR3 for alpha chain variable domain of TCR clone 6714 (TRAV22, TRAJ36)
CAVGTGANNLFF

SEQ ID NO: 13428 - protein, 17 aa, Homo sapiens
  CDR3 for beta chain variable domain of TCR clone 6714 (TRBV15, TRBJ1-4)
CATSRYGTGDPNEKLFF

SEQ ID NO: 13429 - protein, 18 aa, Homo sapiens
  CDR3 for alpha chain variable domain of TCR clone 6715 (TRAV13-1, TRAJ52)
CAAKNPNAGGTSYGKLTF

SEQ ID NO: 13430 - protein, 15 aa, Homo sapiens
  CDR3 for beta chain variable domain of TCR clone 6715 (TRBV20-1, TRBJ2-7)
CSARDRVSGMDEQYF

SEQ ID NO: 13431 - protein, 13 aa, Homo sapiens
  CDR3 for alpha chain variable domain of TCR clone 6716 (TRAV26-1, TRAJ33)
CIVRVEGNYQLIW

SEQ ID NO: 13432 - protein, 13 aa, Homo sapiens
  CDR3 for beta chain variable domain of TCR clone 6716 (TRBV6-3, TRBJ2-7)
CASTWGSSYEQYF

SEQ ID NO: 13433 - protein, 16 aa, Homo sapiens
  CDR3 for alpha chain variable domain of TCR clone 6717 (TRAV26-1, TRAJ56)
CIVRVAETGANSKLTF

SEQ ID NO: 13434 - protein, 15 aa, Homo sapiens
  CDR3 for beta chain variable domain of TCR clone 6717 (TRBV5-7, TRBJ1-4)
CASSLWHQGGEKLFF

SEQ ID NO: 13435 - protein, 16 aa, Homo sapiens
  CDR3 for alpha chain variable domain of TCR clone 6718 (TRAV3, TRAJ10)
CAVRDMRAGGGNKLTF

SEQ ID NO: 13436 - protein, 14 aa, Homo sapiens
  CDR3 for beta chain variable domain of TCR clone 6718 (TRBV12-4, TRBJ1-4)
CASRMTGRSEKLFF

SEQ ID NO: 13437 - protein, 17 aa, Homo sapiens
  CDR3 for alpha chain variable domain of TCR clone 6719 (TRAV8-3, TRAJ32)
CAVGPLDYGGATNKLIF

SEQ ID NO: 13438 - protein, 15 aa, Homo sapiens
  CDR3 for beta chain variable domain of TCR clone 6719 (TRBV18, TRBJ1-2)
CASSPGNGLGYGYTF

SEQ ID NO: 13439 - protein, 12 aa, Homo sapiens
  CDR3 for alpha chain variable domain of TCR clone 6720 (TRAV12-3, TRAJ20)
CAMVRGDYKLSF

SEQ ID NO: 13440 - protein, 12 aa, Homo sapiens
  CDR3 for beta chain variable domain of TCR clone 6720 (TRBV29-1, TRBJ1-1)
CSESDGNTEAFF

SEQ ID NO: 13441 - protein, 19 aa, Homo sapiens
  CDR3 for alpha chain variable domain of TCR clone 6721 (TRAV27, TRAJ49)
TAAQPGDTGLYPTSNQFYF

SEQ ID NO: 13442 - protein, 14 aa, Homo sapiens
  CDR3 for beta chain variable domain of TCR clone 6721 (TRBV9, TRBJ2-3)
CASSNDWGRDTQYF

SEQ ID NO: 13443 - protein, 12 aa, Homo sapiens
  CDR3 for alpha chain variable domain of TCR clone 6722 (TRAV21, TRAJ29)
CAVTSGNTPLVF

SEQ ID NO: 13444 - protein, 15 aa, Homo sapiens
  CDR3 for beta chain variable domain of TCR clone 6722 (TRBV10-2, TRBJ2-6)
CASSEQGTGANVLTF

SEQ ID NO: 13445 - protein, 14 aa, Homo sapiens
  CDR3 for alpha chain variable domain of TCR clone 6723 (TRAV17, TRAJ58)
CATDGETSGSRLTF

SEQ ID NO: 13446 - protein, 15 aa, Homo sapiens
  CDR3 for beta chain variable domain of TCR clone 6723 (TRBV6-3, TRBJ2-7)
CASSSPGTVFYEQYF

SEQ ID NO: 13447 - protein, 15 aa, Homo sapiens
  CDR3 for alpha chain variable domain of TCR clone 6724 (TRAV21, TRAJ53)
CATLNSGGSNYKLTF

SEQ ID NO: 13448 - protein, 14 aa, Homo sapiens
  CDR3 for beta chain variable domain of TCR clone 6724 (TRBV19, TRBJ2-1)
CASPTFVLSGEQFF

SEQ ID NO: 13449 - protein, 15 aa, Homo sapiens
  CDR3 for alpha chain variable domain of TCR clone 6725 (TRAV26-1, TRAJ29)
CIVRVEGSGNIPLVF

SEQ ID NO: 13450 - protein, 14 aa, Homo sapiens
  CDR3 for beta chain variable domain of TCR clone 6725 (TRBV18, TRBJ2-5)
CASSPGVSQETQYF

SEQ ID NO: 13451 - protein, 11 aa, Homo sapiens
  CDR3 for alpha chain variable domain of TCR clone 6726 (TRAV1-2, TRAJ20)
CAVSNDYKLSF

SEQ ID NO: 13452 - protein, 13 aa, Homo sapiens
  CDR3 for beta chain variable domain of TCR clone 6726 (TRBV29-1, TRBJ1-3)
CSVEGGSGNTIYF

SEQ ID NO: 13453 - protein, 12 aa, Homo sapiens
  CDR3 for alpha chain variable domain of TCR clone 6727 (TRAV12-2, TRAJ47)
CAVAEYGNKLVF

SEQ ID NO: 13454 - protein, 15 aa, Homo sapiens
  CDR3 for beta chain variable domain of TCR clone 6727 (TRBV28, TRBJ2-1)
CASSIIAGGRSEQFF

SEQ ID NO: 13455 - protein, 15 aa, Homo sapiens
  CDR3 for alpha chain variable domain of TCR clone 6728 (TRAV27, TRAJ17)
CRSTMIKAAGNKLTF

SEQ ID NO: 13456 - protein, 13 aa, Homo sapiens
  CDR3 for beta chain variable domain of TCR clone 6728 (TRBV18, TRBJ2-7)
CASQSGGGYEQYF

SEQ ID NO: 13457 - protein, 17 aa, Homo sapiens
  CDR3 for alpha chain variable domain of TCR clone 6729 (TRAV1-1, TRAJ32)
CAVRVDELWWCYKQAHL

SEQ ID NO: 13458 - protein, 12 aa, Homo sapiens
  CDR3 for beta chain variable domain of TCR clone 6729 (TRBV7-8, TRBJ2-1)
CASSLGHNEQFF

SEQ ID NO: 13459 - protein, 14 aa, Homo sapiens
  CDR3 for alpha chain variable domain of TCR clone 6730 (TRAV23/DV6, TRAJ8)
CAASKATGFQKLAF

SEQ ID NO: 13460 - protein, 15 aa, Homo sapiens
  CDR3 for beta chain variable domain of TCR clone 6730 (TRBV28, TRBJ2-3)
CASSPDRQGANTQYF

SEQ ID NO: 13461 - protein, 14 aa, Homo sapiens
  CDR3 for alpha chain variable domain of TCR clone 6731 (TRAV12-2, TRAJ6)
CAVNIKGGSYIPTF

SEQ ID NO: 13462 - protein, 14 aa, Homo sapiens
  CDR3 for beta chain variable domain of TCR clone 6731 (TRBV20-1, TRBJ2-7)
CSARDPTGLDEQYF

SEQ ID NO: 13463 - protein, 17 aa, Homo sapiens
  CDR3 for alpha chain variable domain of TCR clone 6732 (TRAV3, TRAJ6)
CAVRDGPRAGGSYIPTF

SEQ ID NO: 13464 - protein, 14 aa, Homo sapiens
  CDR3 for beta chain variable domain of TCR clone 6732 (TRBV7-2, TRBJ2-7)
CASSPRTSFYEQYF

SEQ ID NO: 13465 - protein, 12 aa, Homo sapiens
  CDR3 for alpha chain variable domain of TCR clone 6733 (TRAV12-3, TRAJ17)
CAMTLTGNKLTF

SEQ ID NO: 13466 - protein, 18 aa, Homo sapiens
  CDR3 for beta chain variable domain of TCR clone 6733 (TRBV18, TRBJ2-2)
CASSPRLTAGGPTGELFF

SEQ ID NO: 13467 - protein, 14 aa, Homo sapiens
  CDR3 for alpha chain variable domain of TCR clone 6734 (TRAV8-3, TRAJ39)
CAVGANNAGNMLTF

SEQ ID NO: 13468 - protein, 16 aa, Homo sapiens
  CDR3 for beta chain variable domain of TCR clone 6734 (TRBV12-5, TRBJ2-5)
CASGPRTSGNQETQYF

SEQ ID NO: 13469 - protein, 11 aa, Homo sapiens
  CDR3 for alpha chain variable domain of TCR clone 6735 (TRAV2, TRAJ13)
CASGGYQKVTF

SEQ ID NO: 13470 - protein, 12 aa, Homo sapiens
  CDR3 for beta chain variable domain of TCR clone 6735 (TRBV19, TRBJ2-1)
CASSRQGAEQFF

SEQ ID NO: 13471 - protein, 14 aa, Homo sapiens
  CDR3 for alpha chain variable domain of TCR clone 6736 (TRAV3, TRAJ33)
CAVRDMDSNYQLIW

SEQ ID NO: 13472 - protein, 13 aa, Homo sapiens
  CDR3 for beta chain variable domain of TCR clone 6736 (TRBV2, TRBJ2-5)
CASSGQGEQTQYF

SEQ ID NO: 13473 - protein, 15 aa, Homo sapiens
  CDR3 for alpha chain variable domain of TCR clone 6737 (TRAV12-2, TRAJ53)
CAVNGGGGSNYKLTF

SEQ ID NO: 13474 - protein, 13 aa, Homo sapiens
  CDR3 for beta chain variable domain of TCR clone 6737 (TRBV3-1, TRBJ1-1)
CASSLGVITEAFF

SEQ ID NO: 13475 - protein, 14 aa, Homo sapiens
  CDR3 for alpha chain variable domain of TCR clone 6738 (TRAV12-3, TRAJ10)
SHLPLTGGGNKLTF

SEQ ID NO: 13476 - protein, 13 aa, Homo sapiens
  CDR3 for beta chain variable domain of TCR clone 6738 (TRBV5-1, TRBJ1-1)
CASSLTRESDAFF

SEQ ID NO: 13477 - protein, 13 aa, Homo sapiens
  CDR3 for alpha chain variable domain of TCR clone 6739 (TRAV12-2, TRAJ10)
CAVPTGGGNKLTF

SEQ ID NO: 13478 - protein, 15 aa, Homo sapiens
  CDR3 for beta chain variable domain of TCR clone 6739 (TRBV20-1, TRBJ2-7)
CSARKGLAESYEQYF

SEQ ID NO: 13479 - protein, 13 aa, Homo sapiens
  CDR3 for alpha chain variable domain of TCR clone 6740 (TRAV2, TRAJ40)
CAVVTSGTYKYIF

SEQ ID NO: 13480 - protein, 14 aa, Homo sapiens
  CDR3 for beta chain variable domain of TCR clone 6740 (TRBV7-2, TRBJ2-7)
CASSPKTSFYEQYF

SEQ ID NO: 13481 - protein, 15 aa, Homo sapiens
  CDR3 for alpha chain variable domain of TCR clone 6741 (TRAV26-1, TRAJ29)
CIVRVEGSGDTPLVF

SEQ ID NO: 13482 - protein, 15 aa, Homo sapiens
  CDR3 for beta chain variable domain of TCR clone 6741 (TRBV7-9, TRBJ1-5)
CASSQGHQPNQPQHF

SEQ ID NO: 13483 - protein, 13 aa, Homo sapiens
  CDR3 for alpha chain variable domain of TCR clone 6742 (TRAV13-1, TRAJ26)
CAIVFGPGTRLSV

SEQ ID NO: 13484 - protein, 18 aa, Homo sapiens
  CDR3 for beta chain variable domain of TCR clone 6742 (TRBV11-2, TRBJ2-6)
CASSLNPFLGTGANVLTF

SEQ ID NO: 13485 - protein, 14 aa, Homo sapiens
  CDR3 for alpha chain variable domain of TCR clone 6743 (TRAV1-2, TRAJ16)
CAVNRFSDGQKLLF

SEQ ID NO: 13486 - protein, 12 aa, Homo sapiens
  CDR3 for beta chain variable domain of TCR clone 6743 (TRBV11-2, TRBJ2-2)
CASSLGGGELFL

SEQ ID NO: 13487 - protein, 17 aa, Homo sapiens
  CDR3 for alpha chain variable domain of TCR clone 6744 (TRAV3, TRAJ42)
CAVRDRDYGGSQGNLIF

SEQ ID NO: 13488 - protein, 15 aa, Homo sapiens
  CDR3 for beta chain variable domain of TCR clone 6744 (TRBV5-1, TRBJ2-1)
CASSPPRAPYNEQFF

SEQ ID NO: 13489 - protein, 16 aa, Homo sapiens
  CDR3 for alpha chain variable domain of TCR clone 6745 (TRAV30, TRAJ24)
CGTEIVDADSWGKFQF

SEQ ID NO: 13490 - protein, 14 aa, Homo sapiens
  CDR3 for beta chain variable domain of TCR clone 6745 (TRBV12-5, TRBJ2-5)
CASGSRTHQENQYF

SEQ ID NO: 13491 - protein, 15 aa, Homo sapiens
  CDR3 for alpha chain variable domain of TCR clone 6746 (TRAV12-1, TRAJ9)
CVVSFGDTGGFKTIF

SEQ ID NO: 13492 - protein, 13 aa, Homo sapiens
  CDR3 for beta chain variable domain of TCR clone 6746 (TRBV2, TRBJ1-4)
CASSERAGEKLLF

SEQ ID NO: 13493 - protein, 12 aa, Homo sapiens
  CDR3 for alpha chain variable domain of TCR clone 6747 (TRAV2, TRAJ9)
CAVGAGGFKTIF

SEQ ID NO: 13494 - protein, 16 aa, Homo sapiens
  CDR3 for beta chain variable domain of TCR clone 6747 (TRBV13, TRBJ2-2)
CASSPRAGEHTGELFF

SEQ ID NO: 13495 - protein, 15 aa, Homo sapiens
  CDR3 for alpha chain variable domain of TCR clone 6748 (TRAV9-2, TRAJ56)
CALSDVDGANSKLTF

SEQ ID NO: 13496 - protein, 16 aa, Homo sapiens
  CDR3 for beta chain variable domain of TCR clone 6748 (TRBV27, TRBJ2-2)
CASSFRGLVRTGELFF

SEQ ID NO: 13497 - protein, 10 aa, Homo sapiens
  CDR3 for alpha chain variable domain of TCR clone 6749 (TRAV26-2, TRAJ20)
CIQNDYKLSF

SEQ ID NO: 13498 - protein, 14 aa, Homo sapiens
  CDR3 for beta chain variable domain of TCR clone 6749 (TRBV28, TRBJ1-6)
CATVYSRVRSPLHF

SEQ ID NO: 13499 - protein, 13 aa, Homo sapiens
  CDR3 for alpha chain variable domain of TCR clone 6750 (TRAV2, TRAJ40)
CAVVTSGTYKYIL

SEQ ID NO: 13500 - protein, 15 aa, Homo sapiens
  CDR3 for beta chain variable domain of TCR clone 6750 (TRBV11-3, TRBJ2-3)
CASLKDGREGDTQYF

SEQ ID NO: 13501 - protein, 14 aa, Homo sapiens
  CDR3 for alpha chain variable domain of TCR clone 6751 (TRAV26-1, TRAJ38)
CIADNAGNNRKLIW

SEQ ID NO: 13502 - protein, 15 aa, Homo sapiens
  CDR3 for beta chain variable domain of TCR clone 6751 (TRBV18, TRBJ2-1)
CASSPPSASYNEQFF

SEQ ID NO: 13503 - protein, 11 aa, Homo sapiens
  CDR3 for alpha chain variable domain of TCR clone 6752 (TRAV8-4, TRAJ20)
CAVTNVLTTTS

SEQ ID NO: 13504 - protein, 13 aa, Homo sapiens
  CDR3 for beta chain variable domain of TCR clone 6752 (TRBV19, TRBJ2-3)
CATWDKITDTQYF

SEQ ID NO: 13505 - protein, 15 aa, Homo sapiens
  CDR3 for alpha chain variable domain of TCR clone 6753 (TRAV29/DV5, TRAJ29)
CAASERSSGNTPLVF

SEQ ID NO: 13506 - protein, 12 aa, Homo sapiens
  CDR3 for beta chain variable domain of TCR clone 6753 (TRBV7-9, TRBJ1-4)
CASSTDREKLFF

SEQ ID NO: 13507 - protein, 14 aa, Homo sapiens
  CDR3 for alpha chain variable domain of TCR clone 6754 (TRAV12-1, TRAJ34)
CVVNLDYNTDKLIF

SEQ ID NO: 13508 - protein, 20 aa, Homo sapiens
  CDR3 for beta chain variable domain of TCR clone 6754 (TRBV7-3, TRBJ2-7)
CASSPRGLAGMVAVLRAGHQ

SEQ ID NO: 13509 - protein, 17 aa, Homo sapiens
  CDR3 for alpha chain variable domain of TCR clone 6755 (TRAV3, TRAJ6)
FAVRDGPRAGGSYIPTF

SEQ ID NO: 13510 - protein, 14 aa, Homo sapiens
  CDR3 for beta chain variable domain of TCR clone 6755 (TRBV7-2, TRBJ2-7)
CASSPKTSFYEQYF

SEQ ID NO: 13511 - protein, 17 aa, Homo sapiens
  CDR3 for alpha chain variable domain of TCR clone 6756 (TRAV3, TRAJ42)
CAVRDRDYGGSQGNLIF

SEQ ID NO: 13512 - protein, 14 aa, Homo sapiens
  CDR3 for beta chain variable domain of TCR clone 6756 (TRBV4-1, TRBJ2-2)
CASSQAVNTGELFF

SEQ ID NO: 13513 - protein, 13 aa, Homo sapiens
  CDR3 for alpha chain variable domain of TCR clone 6757 (TRAV27, TRAJ6)
CAGGTRGSYIPTF

SEQ ID NO: 13514 - protein, 13 aa, Homo sapiens
  CDR3 for beta chain variable domain of TCR clone 6757 (TRBV4-1, TRBJ2-5)
CASSLTRGETQYF

SEQ ID NO: 13515 - protein, 12 aa, Homo sapiens
  CDR3 for alpha chain variable domain of TCR clone 6758 (TRAV13-1, TRAJ16)
CAAVSDGQKLLF

SEQ ID NO: 13516 - protein, 16 aa, Homo sapiens
  CDR3 for beta chain variable domain of TCR clone 6758 (TRBV7-2, TRBJ2-1)
CASSLVAGAGYNEQFF

SEQ ID NO: 13517 - protein, 14 aa, Homo sapiens
  CDR3 for alpha chain variable domain of TCR clone 6759 (TRAV12-1, TRAJ45)
CVVNENAGADGLTF

SEQ ID NO: 13518 - protein, 15 aa, Homo sapiens
  CDR3 for beta chain variable domain of TCR clone 6759 (TRBV5-7, TRBJ2-7)
CASSLGPGRGHEQYF

SEQ ID NO: 13519 - protein, 16 aa, Homo sapiens
  CDR3 for alpha chain variable domain of TCR clone 6760 (TRAV3, TRAJ37)
CAVRDSGSGNTGKLIF

SEQ ID NO: 13520 - protein, 12 aa, Homo sapiens
  CDR3 for beta chain variable domain of TCR clone 6760 (TRBV7-2, TRBJ2-5)
CASSLYQETQYF

SEQ ID NO: 13521 - protein, 16 aa, Homo sapiens
  CDR3 for alpha chain variable domain of TCR clone 6761 (TRAV3, TRAJ10)
CAVRDMRAGGGNKLTF

SEQ ID NO: 13522 - protein, 14 aa, Homo sapiens
  CDR3 for beta chain variable domain of TCR clone 6761 (TRBV19, TRBJ2-1)
CASPTFVLSGEQFF

SEQ ID NO: 13523 - protein, 11 aa, Homo sapiens
  CDR3 for alpha chain variable domain of TCR clone 6762 (TRAV12-1, TRAJ30)
CVVNGQDKIIF

SEQ ID NO: 13524 - protein, 12 aa, Homo sapiens
  CDR3 for beta chain variable domain of TCR clone 6762 (TRBV27, TRBJ2-2)
CASKLFTGELFL

SEQ ID NO: 13525 - protein, 14 aa, Homo sapiens
  CDR3 for alpha chain variable domain of TCR clone 6763 (TRAV2, TRAJ37)
CAVDFTSNTGKLIF

SEQ ID NO: 13526 - protein, 14 aa, Homo sapiens
  CDR3 for beta chain variable domain of TCR clone 6763 (TRBV20-1, TRBJ2-7)
CSAPELAGVGEQYF

SEQ ID NO: 13527 - protein, 15 aa, Homo sapiens
  CDR3 for alpha chain variable domain of TCR clone 6764 (TRAV26-1, TRAJ44)
CIVRANTGTASKLTF

SEQ ID NO: 13528 - protein, 13 aa, Homo sapiens
  CDR3 for beta chain variable domain of TCR clone 6764 (TRBV10-3, TRBJ2-7)
CASKLAVNYEQYF

SEQ ID NO: 13529 - protein, 13 aa, Homo sapiens
  CDR3 for alpha chain variable domain of TCR clone 6765 (TRAV12-1, TRAJ40)
CVVKEAGTYKYIF

SEQ ID NO: 13530 - protein, 13 aa, Homo sapiens
  CDR3 for beta chain variable domain of TCR clone 6765 (TRBV24-1, TRBJ2-3)
CATSTGGTDTQYF

SEQ ID NO: 13531 - protein, 13 aa, Homo sapiens
  CDR3 for alpha chain variable domain of TCR clone 6766 (TRAV2, TRAJ40)
CAVVTSGTYKYIF

SEQ ID NO: 13532 - protein, 14 aa, Homo sapiens
  CDR3 for beta chain variable domain of TCR clone 6766 (TRBV19, TRBJ2-1)
CASTTFVLSGEQFF

SEQ ID NO: 13533 - protein, 13 aa, Homo sapiens
  CDR3 for alpha chain variable domain of TCR clone 6767 (TRAV35, TRAJ33)
CAGQLYGVYQLIW

SEQ ID NO: 13534 - protein, 14 aa, Homo sapiens
  CDR3 for beta chain variable domain of TCR clone 6767 (TRBV7-2, TRBJ1-1)
CASSLGGAGTGAFF

SEQ ID NO: 13535 - protein, 22 aa, Homo sapiens
  CDR3 for alpha chain variable domain of TCR clone 6768 (TRAV3, TRAJ38)
CAVRDCLNAGNNHIQNPDPAVY

SEQ ID NO: 13536 - protein, 15 aa, Homo sapiens
  CDR3 for beta chain variable domain of TCR clone 6768 (TRBV6-5, TRBJ2-1)
CASSYDAGAGNEQFF

SEQ ID NO: 13537 - protein, 17 aa, Homo sapiens
  CDR3 for alpha chain variable domain of TCR clone 6769 (TRAV3, TRAJ6)
CAVRDGPSAGGSYIPTF

SEQ ID NO: 13538 - protein, 14 aa, Homo sapiens
  CDR3 for beta chain variable domain of TCR clone 6769 (TRBV7-2, TRBJ2-7)
CASSPKTSFYEQYF

SEQ ID NO: 13539 - protein, 14 aa, Homo sapiens
  CDR3 for alpha chain variable domain of TCR clone 6770 (TRAV12-3, TRAJ10)
SHLPLTGGGNKLTF

SEQ ID NO: 13540 - protein, 14 aa, Homo sapiens
  CDR3 for beta chain variable domain of TCR clone 6770 (TRBV27, TRBJ2-2)
CASSLGAATGELFF

SEQ ID NO: 13541 - protein, 13 aa, Homo sapiens
  CDR3 for alpha chain variable domain of TCR clone 6771 (TRAV8-6, TRAJ49)
CAVSGQTGNQFYF

SEQ ID NO: 13542 - protein, 13 aa, Homo sapiens
  CDR3 for beta chain variable domain of TCR clone 6771 (TRBV10-2, TRBJ2-7)
CASSAESPYEQYF

SEQ ID NO: 13543 - protein, 16 aa, Homo sapiens
  CDR3 for alpha chain variable domain of TCR clone 6772 (TRAV30, TRAJ24)
CGTEIVYADSWGKFQF

SEQ ID NO: 13544 - protein, 14 aa, Homo sapiens
  CDR3 for beta chain variable domain of TCR clone 6772 (TRBV12-5, TRBJ2-5)
CASGSRTHQETQYF

SEQ ID NO: 13545 - protein, 13 aa, Homo sapiens
  CDR3 for alpha chain variable domain of TCR clone 6773 (TRAV12-2, TRAJ9)
CAVKWAGGFKTIF

SEQ ID NO: 13546 - protein, 13 aa, Homo sapiens
  CDR3 for beta chain variable domain of TCR clone 6773 (TRBV7-3, TRBJ1-1)
CASSQDWGAEAFF

SEQ ID NO: 13547 - protein, 15 aa, Homo sapiens
  CDR3 for alpha chain variable domain of TCR clone 6774 (TRAV3, TRAJ5)
RAVRDLDTGRRALTF

SEQ ID NO: 13548 - protein, 13 aa, Homo sapiens
  CDR3 for beta chain variable domain of TCR clone 6774 (TRBV12-4, TRBJ2-7)
CASSPTETYEQYF

SEQ ID NO: 13549 - protein, 11 aa, Homo sapiens
  CDR3 for alpha chain variable domain of TCR clone 6775 (TRAV2, TRAJ20)
CAVVNDYKLSF

SEQ ID NO: 13550 - protein, 17 aa, Homo sapiens
  CDR3 for beta chain variable domain of TCR clone 6775 (TRBV28, TRBJ1-1)
CASSLSGTGYENTEAFF

SEQ ID NO: 13551 - protein, 14 aa, Homo sapiens
  CDR3 for alpha chain variable domain of TCR clone 6776 (TRAV8-4, TRAJ9)
CAVILNTGGFKTIF

SEQ ID NO: 13552 - protein, 11 aa, Homo sapiens
  CDR3 for beta chain variable domain of TCR clone 6776 (TRBV7-9, TRBJ2-6)
CASPRANVLTF

SEQ ID NO: 13553 - protein, 16 aa, Homo sapiens
  CDR3 for alpha chain variable domain of TCR clone 6777 (TRAV10, TRAJ13)
CVVSARNSGGYQKVTF

SEQ ID NO: 13554 - protein, 19 aa, Homo sapiens
  CDR3 for beta chain variable domain of TCR clone 6777 (TRBV12-4, TRBJ2-1)
CASTLAFDPRDKEANEQFF

SEQ ID NO: 13555 - protein, 14 aa, Homo sapiens
  CDR3 for alpha chain variable domain of TCR clone 6778 (TRAV12-3, TRAJ10)
SHLPLTGGGNKLTF

SEQ ID NO: 13556 - protein, 15 aa, Homo sapiens
  CDR3 for beta chain variable domain of TCR clone 6778 (TRBV9, TRBJ2-1)
CASSLAGSSYNEQFF

SEQ ID NO: 13557 - protein, 13 aa, Homo sapiens
  CDR3 for alpha chain variable domain of TCR clone 6779 (TRAV13-1, TRAJ43)
CAASKNNNNDMRF

SEQ ID NO: 13558 - protein, 13 aa, Homo sapiens
  CDR3 for beta chain variable domain of TCR clone 6779 (TRBV4-2, TRBJ1-1)
CASSQAGNTEAFF

SEQ ID NO: 13559 - protein, 14 aa, Homo sapiens
  CDR3 for alpha chain variable domain of TCR clone 6780 (TRAV12-2, TRAJ13)
CAVKKTGGYQKVTF

SEQ ID NO: 13560 - protein, 13 aa, Homo sapiens
  CDR3 for beta chain variable domain of TCR clone 6780 (TRBV19, TRBJ2-7)
CASRKAGGSEQYF

SEQ ID NO: 13561 - protein, 13 aa, Homo sapiens
  CDR3 for alpha chain variable domain of TCR clone 6781 (TRAV12-3, TRAJ31)
CAMSANNNARLMF

SEQ ID NO: 13562 - protein, 16 aa, Homo sapiens
  CDR3 for beta chain variable domain of TCR clone 6781 (TRBV7-9, TRBJ1-2)
CACSLGFSSGEDGYTF

SEQ ID NO: 13563 - protein, 15 aa, Homo sapiens
  CDR3 for alpha chain variable domain of TCR clone 6782 (TRAV27, TRAJ24)
CAGSMTTDSWGKLQF

SEQ ID NO: 13564 - protein, 15 aa, Homo sapiens
  CDR3 for beta chain variable domain of TCR clone 6782 (TRBV6-6, TRBJ1-5)
CASSSPRGQGQPQHF

SEQ ID NO: 13565 - protein, 17 aa, Homo sapiens
  CDR3 for alpha chain variable domain of TCR clone 6783 (TRAV3, TRAJ42)
CAVRDRDYGGSQGNLIF

SEQ ID NO: 13566 - protein, 14 aa, Homo sapiens
  CDR3 for beta chain variable domain of TCR clone 6783 (TRBV19, TRBJ2-2)
CASSGQGIAGELFF

SEQ ID NO: 13567 - protein, 16 aa, Homo sapiens
  CDR3 for alpha chain variable domain of TCR clone 6784 (TRAV12-3, TRAJ4)
CAMTRLFSGGYNKLIF

SEQ ID NO: 13568 - protein, 16 aa, Homo sapiens
  CDR3 for beta chain variable domain of TCR clone 6784 (TRBV27, TRBJ2-1)
CASSARLAGVYNEQFF

SEQ ID NO: 13569 - protein, 19 aa, Homo sapiens
  CDR3 for alpha chain variable domain of TCR clone 6785 (TRAV2, TRAJ20)
ILQVREADAAVYRDCKLSF

SEQ ID NO: 13570 - protein, 16 aa, Homo sapiens
  CDR3 for beta chain variable domain of TCR clone 6785 (TRBV24-1, TRBJ2-3)
CATSDPGTGATDTQYF

SEQ ID NO: 13571 - protein, 17 aa, Homo sapiens
  CDR3 for alpha chain variable domain of TCR clone 6786 (TRAV26-1, TRAJ53)
CIVRVDDSGGSNYKLTF

SEQ ID NO: 13572 - protein, 15 aa, Homo sapiens
  CDR3 for beta chain variable domain of TCR clone 6786 (TRBV20-1, TRBJ1-2)
CSARDPLRQGYGYTF

SEQ ID NO: 13573 - protein, 15 aa, Homo sapiens
  CDR3 for alpha chain variable domain of TCR clone 6787 (TRAV26-1, TRAJ22)
CIVGVSFWFCKATDL

SEQ ID NO: 13574 - protein, 13 aa, Homo sapiens
  CDR3 for beta chain variable domain of TCR clone 6787 (TRBV7-9, TRBJ1-2)
CASSLKQNYGYTF

SEQ ID NO: 13575 - protein, 15 aa, Homo sapiens
  CDR3 for alpha chain variable domain of TCR clone 6788 (TRAV3, TRAJ47)
CAVRDIGKYGNKLVF

SEQ ID NO: 13576 - protein, 14 aa, Homo sapiens
  CDR3 for beta chain variable domain of TCR clone 6788 (TRBV13, TRBJ2-5)
CASSLERVGETQYF

SEQ ID NO: 13577 - protein, 10 aa, Homo sapiens
  CDR3 for alpha chain variable domain of TCR clone 6789 (TRAV1-2, TRAJ18)
CAVRGEAQPW

SEQ ID NO: 13578 - protein, 15 aa, Homo sapiens
  CDR3 for beta chain variable domain of TCR clone 6789 (TRBV9, TRBJ1-6)
CASSVAGTGDSPLHF

SEQ ID NO: 13579 - protein, 13 aa, Homo sapiens
  CDR3 for alpha chain variable domain of TCR clone 6790 (TRAV21, TRAJ27)
CAARPGTAGKSTF

SEQ ID NO: 13580 - protein, 14 aa, Homo sapiens
  CDR3 for beta chain variable domain of TCR clone 6790 (TRBV7-6, TRBJ2-3)
CASSLGTVTDTQYF

SEQ ID NO: 13581 - protein, 11 aa, Homo sapiens
  CDR3 for alpha chain variable domain of TCR clone 6791 (TRAV26-1, TRAJ37)
CIVRVGRKLIF

SEQ ID NO: 13582 - protein, 14 aa, Homo sapiens
  CDR3 for beta chain variable domain of TCR clone 6791 (TRBV9, TRBJ2-4)
CASSPSGTSGFQYF

SEQ ID NO: 13583 - protein, 13 aa, Homo sapiens
  CDR3 for alpha chain variable domain of TCR clone 6792 (TRAV8-3, TRAJ36)
CAVGATGANNLFF

SEQ ID NO: 13584 - protein, 15 aa, Homo sapiens
  CDR3 for beta chain variable domain of TCR clone 6792 (TRBV7-2, TRBJ1-2)
CASSPRASWNYGYTF

SEQ ID NO: 13585 - protein, 11 aa, Homo sapiens
  CDR3 for alpha chain variable domain of TCR clone 6793 (TRAV36/DV7, TRAJ54)
CAVEGAQKLVF

SEQ ID NO: 13586 - protein, 13 aa, Homo sapiens
  CDR3 for beta chain variable domain of TCR clone 6793 (TRBV12-4, TRBJ1-5)
CASSSRSYQPQHF

SEQ ID NO: 13587 - protein, 14 aa, Homo sapiens
  CDR3 for alpha chain variable domain of TCR clone 6794 (TRAV12-1, TRAJ17)
CVVNYKAAGNKLTF

SEQ ID NO: 13588 - protein, 13 aa, Homo sapiens
  CDR3 for beta chain variable domain of TCR clone 6794 (TRBV19, TRBJ2-7)
CASRKAGGSEQYF

SEQ ID NO: 13589 - protein, 13 aa, Homo sapiens
  CDR3 for alpha chain variable domain of TCR clone 6795 (TRAV12-2, TRAJ6)
CAVNVSRKLHTYI

SEQ ID NO: 13590 - protein, 15 aa, Homo sapiens
  CDR3 for beta chain variable domain of TCR clone 6795 (TRBV28, TRBJ2-4)
CAAGSGTLLMGIQYF

SEQ ID NO: 13591 - protein, 13 aa, Homo sapiens
  CDR3 for alpha chain variable domain of TCR clone 6796 (TRAV17, TRAJ54)
CATDAGGAQKLVF

SEQ ID NO: 13592 - protein, 17 aa, Homo sapiens
  CDR3 for beta chain variable domain of TCR clone 6796 (TRBV25-1, TRBJ1-6)
CASSEYIGERGNSPLHF

SEQ ID NO: 13593 - protein, 12 aa, Homo sapiens
  CDR3 for alpha chain variable domain of TCR clone 6797 (TRAV2, TRAJ23)
CAVEDVGGKLIF

SEQ ID NO: 13594 - protein, 13 aa, Homo sapiens
  CDR3 for beta chain variable domain of TCR clone 6797 (TRBV5-1, TRBJ2-4)
CASSLEGGMNQYF

SEQ ID NO: 13595 - protein, 15 aa, Homo sapiens
  CDR3 for alpha chain variable domain of TCR clone 6798 (TRAV3, TRAJ4)
CAVRDGTGGYNKLIF

SEQ ID NO: 13596 - protein, 19 aa, Homo sapiens
  CDR3 for beta chain variable domain of TCR clone 6798 (TRBV27, TRBJ2-2)
CTSVPAVLAGYRTPGSCFF

SEQ ID NO: 13597 - protein, 18 aa, Homo sapiens
  CDR3 for alpha chain variable domain of TCR clone 6799 (TRAV21, TRAJ52)
CAVRPSPAGGTSYGNLTF

SEQ ID NO: 13598 - protein, 17 aa, Homo sapiens
  CDR3 for beta chain variable domain of TCR clone 6799 (TRBV13, TRBJ2-3)
CASSLSRVAGGRNTQYF

SEQ ID NO: 13599 - protein, 16 aa, Homo sapiens
  CDR3 for alpha chain variable domain of TCR clone 6800 (TRAV30, TRAJ24)
CGTEIVDANSWGKFQF

SEQ ID NO: 13600 - protein, 14 aa, Homo sapiens
  CDR3 for beta chain variable domain of TCR clone 6800 (TRBV12-5, TRBJ2-5)
CASGSRTHQETQYF

SEQ ID NO: 13601 - protein, 15 aa, Homo sapiens
  CDR3 for alpha chain variable domain of TCR clone 6801 (TRAV12-1, TRAJ43)
CVVNRGRYNNNDMRF

SEQ ID NO: 13602 - protein, 16 aa, Homo sapiens
  CDR3 for beta chain variable domain of TCR clone 6801 (TRBV19, TRBJ2-3)
CASSFYTTGIGDTQYF

SEQ ID NO: 13603 - protein, 13 aa, Homo sapiens
  CDR3 for alpha chain variable domain of TCR clone 6802 (TRAV41, TRAJ48)
SVPVNFGNEKLTF

SEQ ID NO: 13604 - protein, 16 aa, Homo sapiens
  CDR3 for beta chain variable domain of TCR clone 6802 (TRBV12-5, TRBJ2-5)
CASGPRTSGNQETQYF

SEQ ID NO: 13605 - protein, 14 aa, Homo sapiens
  CDR3 for alpha chain variable domain of TCR clone 6803 (TRAV1-2, TRAJ16)
CAVNRLSDGQKLLF

SEQ ID NO: 13606 - protein, 15 aa, Homo sapiens
  CDR3 for beta chain variable domain of TCR clone 6803 (TRBV9, TRBJ1-6)
CASSVAGTGDSPLHF

SEQ ID NO: 13607 - protein, 14 aa, Homo sapiens
  CDR3 for alpha chain variable domain of TCR clone 6804 (TRAV2, TRAJ8)
CAGRGNTGFQKLVF

SEQ ID NO: 13608 - protein, 14 aa, Homo sapiens
  CDR3 for beta chain variable domain of TCR clone 6804 (TRBV20-1, TRBJ1-1)
CSAQTRIGGTEAFF

SEQ ID NO: 13609 - protein, 12 aa, Homo sapiens
  CDR3 for alpha chain variable domain of TCR clone 6805 (TRAV12-1, TRAJ31)
CVSWNNNARLMF

SEQ ID NO: 13610 - protein, 15 aa, Homo sapiens
  CDR3 for beta chain variable domain of TCR clone 6805 (TRBV7-2, TRBJ1-5)
CASSLDRGQDPPQHF

SEQ ID NO: 13611 - protein, 12 aa, Homo sapiens
  CDR3 for alpha chain variable domain of TCR clone 6806 (TRAV1-1, TRAJ8)
CAGGTGFQKLVF

SEQ ID NO: 13612 - protein, 15 aa, Homo sapiens
  CDR3 for beta chain variable domain of TCR clone 6806 (TRBV7-9, TRBJ1-4)
CACSRTGGFNEKLFF

SEQ ID NO: 13613 - protein, 13 aa, Homo sapiens
  CDR3 for alpha chain variable domain of TCR clone 6807 (TRAV30, TRAJ22)
CGTLSGSARQLTF

SEQ ID NO: 13614 - protein, 14 aa, Homo sapiens
  CDR3 for beta chain variable domain of TCR clone 6807 (TRBV6-1, TRBJ2-1)
CASSEATRVNEQFF

SEQ ID NO: 13615 - protein, 14 aa, Homo sapiens
  CDR3 for alpha chain variable domain of TCR clone 6808 (TRAV8-3, TRAJ4)
CAVGAAGGYNKLIF

SEQ ID NO: 13616 - protein, 16 aa, Homo sapiens
  CDR3 for beta chain variable domain of TCR clone 6808 (TRBV7-2, TRBJ1-2)
CASSRQGGGANYGYTF

SEQ ID NO: 13617 - protein, 22 aa, Homo sapiens
  CDR3 for alpha chain variable domain of TCR clone 6809 (TRAV16, )
CALRTQIPDIQNPDPAVYQLRD

SEQ ID NO: 13618 - protein, 16 aa, Homo sapiens
  CDR3 for beta chain variable domain of TCR clone 6809 (TRBV7-2, TRBJ1-2)
CASSSNQDRRGHGYTF

SEQ ID NO: 13619 - protein, 13 aa, Homo sapiens
  CDR3 for alpha chain variable domain of TCR clone 6810 (TRAV30, TRAJ16)
CGTFGGDGQKLLF

SEQ ID NO: 13620 - protein, 13 aa, Homo sapiens
  CDR3 for beta chain variable domain of TCR clone 6810 (TRBV7-3, TRBJ2-1)
CASSLDSYNEQFF

SEQ ID NO: 13621 - protein, 13 aa, Homo sapiens
  CDR3 for alpha chain variable domain of TCR clone 6811 (TRAV13-2, TRAJ13)
CAETAGGYQKVTF

SEQ ID NO: 13622 - protein, 15 aa, Homo sapiens
  CDR3 for beta chain variable domain of TCR clone 6811 (TRBV20-1, TRBJ1-5)
CSARVGRVVSQPQHF

SEQ ID NO: 13623 - protein, 15 aa, Homo sapiens
  CDR3 for alpha chain variable domain of TCR clone 6812 (TRAV23/DV6, TRAJ18)
CAARYRGSTLGRLYF

SEQ ID NO: 13624 - protein, 11 aa, Homo sapiens
  CDR3 for beta chain variable domain of TCR clone 6812 (TRBV29-1, TRBJ2-5)
CSEDRTGTQYF

SEQ ID NO: 13625 - protein, 14 aa, Homo sapiens
  CDR3 for alpha chain variable domain of TCR clone 6813 (TRAV13-2, TRAJ44)
CAEWRGGTASKLTF

SEQ ID NO: 13626 - protein, 13 aa, Homo sapiens
  CDR3 for beta chain variable domain of TCR clone 6813 (TRBV29-1, TRBJ2-1)
CSVDGGASDEQFF

SEQ ID NO: 13627 - protein, 13 aa, Homo sapiens
  CDR3 for alpha chain variable domain of TCR clone 6814 (TRAV2, TRAJ40)
CAVVTSGTYKYIF

SEQ ID NO: 13628 - protein, 12 aa, Homo sapiens
  CDR3 for beta chain variable domain of TCR clone 6814 (TRBV3-1, TRBJ2-3)
CASSQDRDTQYF

SEQ ID NO: 13629 - protein, 13 aa, Homo sapiens
  CDR3 for alpha chain variable domain of TCR clone 6815 (TRAV1-2, TRAJ9)
CAALNTGGFKTIF

SEQ ID NO: 13630 - protein, 13 aa, Homo sapiens
  CDR3 for beta chain variable domain of TCR clone 6815 (TRBV19, TRBJ1-2)
CASSVPGQDGDTF

SEQ ID NO: 13631 - protein, 12 aa, Homo sapiens
  CDR3 for alpha chain variable domain of TCR clone 6816 (TRAV2, TRAJ36)
CAELTGANNLFF

SEQ ID NO: 13632 - protein, 18 aa, Homo sapiens
  CDR3 for beta chain variable domain of TCR clone 6816 (TRBV19, TRBJ1-1)
CASIIDGGDYTGNTEAFF

SEQ ID NO: 13633 - protein, 16 aa, Homo sapiens
  CDR3 for alpha chain variable domain of TCR clone 6817 (TRAV26-1, TRAJ32)
CIVRTNYGGATNKPIF

SEQ ID NO: 13634 - protein, 14 aa, Homo sapiens
  CDR3 for beta chain variable domain of TCR clone 6817 (TRBV27, TRBJ1-1)
CASSLLSGLSEAFF

SEQ ID NO: 13635 - protein, 16 aa, Homo sapiens
  CDR3 for alpha chain variable domain of TCR clone 6818 (TRAV30, TRAJ24)
CGTEIVDAASWGKFQF

SEQ ID NO: 13636 - protein, 14 aa, Homo sapiens
  CDR3 for beta chain variable domain of TCR clone 6818 (TRBV12-5, TRBJ2-5)
CASGSRTHQETQYF

SEQ ID NO: 13637 - protein, 17 aa, Homo sapiens
  CDR3 for alpha chain variable domain of TCR clone 6819 (TRAV3, TRAJ6)
CAVRDGPRAGGSYIPTL

SEQ ID NO: 13638 - protein, 13 aa, Homo sapiens
  CDR3 for beta chain variable domain of TCR clone 6819 (TRBV20-1, TRBJ1-6)
CSAPLGVGSPLHF

SEQ ID NO: 13639 - protein, 14 aa, Homo sapiens
  CDR3 for alpha chain variable domain of TCR clone 6820 (TRAV12-2, TRAJ9)
CAVSFGTGGFKTIF

SEQ ID NO: 13640 - protein, 18 aa, Homo sapiens
  CDR3 for beta chain variable domain of TCR clone 6820 (TRBV3-1, TRBJ2-7)
CASSRISAGGRSSYEQYF

SEQ ID NO: 13641 - protein, 15 aa, Homo sapiens
  CDR3 for alpha chain variable domain of TCR clone 6821 (TRAV8-6, TRAJ10)
CAVSDQAGGGNKLTF

SEQ ID NO: 13642 - protein, 13 aa, Homo sapiens
  CDR3 for beta chain variable domain of TCR clone 6821 (TRBV10-2, TRBJ2-3)
CASSESGDHTQYF

SEQ ID NO: 13643 - protein, 16 aa, Homo sapiens
  CDR3 for alpha chain variable domain of TCR clone 6822 (TRAV17, TRAJ53)
CATDGGSGGSNYKLTF

SEQ ID NO: 13644 - protein, 14 aa, Homo sapiens
  CDR3 for beta chain variable domain of TCR clone 6822 (TRBV6-1, TRBJ2-2)
CASRELAYTGELFF

SEQ ID NO: 13645 - protein, 14 aa, Homo sapiens
  CDR3 for alpha chain variable domain of TCR clone 6823 (TRAV12-2, TRAJ13)
CAVKETGGYQKVTF

SEQ ID NO: 13646 - protein, 15 aa, Homo sapiens
  CDR3 for beta chain variable domain of TCR clone 6823 (TRBV27, TRBJ2-1)
CASSNGGGSSNEQFF

SEQ ID NO: 13647 - protein, 14 aa, Homo sapiens
  CDR3 for alpha chain variable domain of TCR clone 6824 (TRAV3, TRAJ48)
CAVRLSFGNEKLTF

SEQ ID NO: 13648 - protein, 13 aa, Homo sapiens
  CDR3 for beta chain variable domain of TCR clone 6824 (TRBV10-3, TRBJ2-7)
CASKLAVNYEQYF

SEQ ID NO: 13649 - protein, 14 aa, Homo sapiens
  CDR3 for alpha chain variable domain of TCR clone 6825 (TRAV8-4, TRAJ8)
CAVSEDTGFQKLVF

SEQ ID NO: 13650 - protein, 12 aa, Homo sapiens
  CDR3 for beta chain variable domain of TCR clone 6825 (TRBV14, TRBJ1-1)
CASRPYETEAFF

SEQ ID NO: 13651 - protein, 13 aa, Homo sapiens
  CDR3 for alpha chain variable domain of TCR clone 6826 (TRAV13-1, TRAJ39)
CAASIVMQATCSP

SEQ ID NO: 13652 - protein, 16 aa, Homo sapiens
  CDR3 for beta chain variable domain of TCR clone 6826 (TRBV20-1, TRBJ1-4)
CSAPGQGLLTNEKLFF

SEQ ID NO: 13653 - protein, 16 aa, Homo sapiens
  CDR3 for alpha chain variable domain of TCR clone 6827 (TRAV3, TRAJ6)
CAVRRTPSGGSYIPTF

SEQ ID NO: 13654 - protein, 14 aa, Homo sapiens
  CDR3 for beta chain variable domain of TCR clone 6827 (TRBV3-1, TRBJ1-5)
CASSTGDSNQPQHF

SEQ ID NO: 13655 - protein, 15 aa, Homo sapiens
  CDR3 for alpha chain variable domain of TCR clone 6828 (TRAV9-2, TRAJ56)
CALSDVDGANSKLTF

SEQ ID NO: 13656 - protein, 14 aa, Homo sapiens
  CDR3 for beta chain variable domain of TCR clone 6828 (TRBV5-1, TRBJ2-7)
CASSRGESLYEQYF

SEQ ID NO: 13657 - protein, 13 aa, Homo sapiens
  CDR3 for alpha chain variable domain of TCR clone 6829 (TRAV13-2, TRAJ48)
CAEMDFGNEKLTF

SEQ ID NO: 13658 - protein, 14 aa, Homo sapiens
  CDR3 for beta chain variable domain of TCR clone 6829 (TRBV20-1, TRBJ2-7)
CSAKDRKGAYEQYF

SEQ ID NO: 13659 - protein, 15 aa, Homo sapiens
  CDR3 for alpha chain variable domain of TCR clone 6830 (TRAV29/DV5, TRAJ47)
CAARPTMEYGNKLVF

SEQ ID NO: 13660 - protein, 13 aa, Homo sapiens
  CDR3 for beta chain variable domain of TCR clone 6830 (TRBV20-1, TRBJ1-1)
CSARAGGNTEAFF

SEQ ID NO: 13661 - protein, 14 aa, Homo sapiens
  CDR3 for alpha chain variable domain of TCR clone 6831 (TRAV26-2, TRAJ32)
CCVGYGGATNKLIF

SEQ ID NO: 13662 - protein, 15 aa, Homo sapiens
  CDR3 for beta chain variable domain of TCR clone 6831 (TRBV27, TRBJ2-5)
CASSLYPRGGETQYF

SEQ ID NO: 13663 - protein, 11 aa, Homo sapiens
  CDR3 for alpha chain variable domain of TCR clone 6832 (TRAV1-2, TRAJ40)
CAVPGTYKYIF

SEQ ID NO: 13664 - protein, 16 aa, Homo sapiens
  CDR3 for beta chain variable domain of TCR clone 6832 (TRBV29-1, TRBJ2-7)
CSVEGVGTSGSYEQYF

SEQ ID NO: 13665 - protein, 11 aa, Homo sapiens
  CDR3 for alpha chain variable domain of TCR clone 6833 (TRAV3, TRAJ21)
CAVGNFNKFYF

SEQ ID NO: 13666 - protein, 16 aa, Homo sapiens
  CDR3 for beta chain variable domain of TCR clone 6833 (TRBV19, TRBJ2-1)
CASGKAGPSSYNEQFF

SEQ ID NO: 13667 - protein, 14 aa, Homo sapiens
  CDR3 for alpha chain variable domain of TCR clone 6834 (TRAV13-1, TRAJ35)
CAASKGGFGNVLHC

SEQ ID NO: 13668 - protein, 13 aa, Homo sapiens
  CDR3 for beta chain variable domain of TCR clone 6834 (TRBV7-3, TRBJ1-1)
CASSQDWGAEAVF

SEQ ID NO: 13669 - protein, 14 aa, Homo sapiens
  CDR3 for alpha chain variable domain of TCR clone 6835 (TRAV12-2, TRAJ13)
CAVKKTGGYQKVTF

SEQ ID NO: 13670 - protein, 15 aa, Homo sapiens
  CDR3 for beta chain variable domain of TCR clone 6835 (TRBV27, TRBJ2-1)
CASSNGGGSSNGQFF

SEQ ID NO: 13671 - protein, 15 aa, Homo sapiens
  CDR3 for alpha chain variable domain of TCR clone 6836 (TRAV13-2, TRAJ6)
CAEKVLAGGSYIPTF

SEQ ID NO: 13672 - protein, 13 aa, Homo sapiens
  CDR3 for beta chain variable domain of TCR clone 6836 (TRBV20-1, TRBJ1-1)
CSARGGGNTEAFF

SEQ ID NO: 13673 - protein, 16 aa, Homo sapiens
  CDR3 for alpha chain variable domain of TCR clone 6837 (TRAV30, TRAJ24)
CGTEIVDADSWGKFQF

SEQ ID NO: 13674 - protein, 15 aa, Homo sapiens
  CDR3 for beta chain variable domain of TCR clone 6837 (TRBV19, TRBJ1-1)
CASTSGQIQNTEAFF

SEQ ID NO: 13675 - protein, 16 aa, Homo sapiens
  CDR3 for alpha chain variable domain of TCR clone 6838 (TRAV12-3, TRAJ53)
RAMSPGSGGSNYKLTF

SEQ ID NO: 13676 - protein, 11 aa, Homo sapiens
  CDR3 for beta chain variable domain of TCR clone 6838 (TRBV29-1, TRBJ2-5)
CSEDRTGTQYF

SEQ ID NO: 13677 - protein, 22 aa, Homo sapiens
  CDR3 for alpha chain variable domain of TCR clone 6839 (TRAV1-1, TRAJ30)
CAVRDQTEMTRSSLEKGHDFIF

SEQ ID NO: 13678 - protein, 12 aa, Homo sapiens
  CDR3 for beta chain variable domain of TCR clone 6839 (TRBV28, TRBJ2-6)
CAIQAGANVLTF

SEQ ID NO: 13679 - protein, 13 aa, Homo sapiens
  CDR3 for alpha chain variable domain of TCR clone 6840 (TRAV12-3, TRAJ49)
CAMIPTGWAQFYF

SEQ ID NO: 13680 - protein, 14 aa, Homo sapiens
  CDR3 for beta chain variable domain of TCR clone 6840 (TRBV5-1, TRBJ1-5)
CASSLAGGHQPQHF

SEQ ID NO: 13681 - protein, 13 aa, Homo sapiens
  CDR3 for alpha chain variable domain of TCR clone 6841 (TRAV8-3, TRAJ10)
WAILTGGGNKLTF

SEQ ID NO: 13682 - protein, 10 aa, Homo sapiens
  CDR3 for beta chain variable domain of TCR clone 6841 (TRBV20-1, TRBJ2-5)
CSARFETQYF

SEQ ID NO: 13683 - protein, 14 aa, Homo sapiens
  CDR3 for alpha chain variable domain of TCR clone 6842 (TRAV1-2, TRAJ16)
CAVNRFSDGQKLLF

SEQ ID NO: 13684 - protein, 14 aa, Homo sapiens
  CDR3 for beta chain variable domain of TCR clone 6842 (TRBV20-1, TRBJ2-7)
CSAKRGRSSYEQYF

SEQ ID NO: 13685 - protein, 19 aa, Homo sapiens
  CDR3 for alpha chain variable domain of TCR clone 6843 (TRAV2, TRAJ20)
ILQVREADAAVYRDCKLSF

SEQ ID NO: 13686 - protein, 15 aa, Homo sapiens
  CDR3 for beta chain variable domain of TCR clone 6843 (TRBV7-2, TRBJ2-1)
CASSSGLAGGNEQFF

SEQ ID NO: 13687 - protein, 12 aa, Homo sapiens
  CDR3 for alpha chain variable domain of TCR clone 6844 (TRAV12-3, TRAJ17)
CAMTLTGNKLTF

SEQ ID NO: 13688 - protein, 15 aa, Homo sapiens
  CDR3 for beta chain variable domain of TCR clone 6844 (TRBV20-1, TRBJ2-7)
CSVRDRVSGMDEQYF

SEQ ID NO: 13689 - protein, 13 aa, Homo sapiens
  CDR3 for alpha chain variable domain of TCR clone 6845 (TRAV13-2, TRAJ48)
CAEMDFGNEKLTF

SEQ ID NO: 13690 - protein, 14 aa, Homo sapiens
  CDR3 for beta chain variable domain of TCR clone 6845 (TRBV19, TRBJ1-5)
CASGTEVYNQPQHF

SEQ ID NO: 13691 - protein, 14 aa, Homo sapiens
  CDR3 for alpha chain variable domain of TCR clone 6846 (TRAV16, TRAJ48)
CALTPGFGNEKLTF

SEQ ID NO: 13692 - protein, 15 aa, Homo sapiens
  CDR3 for beta chain variable domain of TCR clone 6846 (TRBV6-6, TRBJ2-7)
CASSYSYGGSYEQYF

SEQ ID NO: 13693 - protein, 13 aa, Homo sapiens
  CDR3 for alpha chain variable domain of TCR clone 6847 (TRAV12-1, TRAJ31)
CVVIPNNNARLMF

SEQ ID NO: 13694 - protein, 15 aa, Homo sapiens
  CDR3 for beta chain variable domain of TCR clone 6847 (TRBV6-3, TRBJ2-7)
CASSSPGTVFYEQYF

SEQ ID NO: 13695 - protein, 16 aa, Homo sapiens
  CDR3 for alpha chain variable domain of TCR clone 6848 (TRAV30, TRAJ24)
CGTEIVDADSWGKFQF

SEQ ID NO: 13696 - protein, 14 aa, Homo sapiens
  CDR3 for beta chain variable domain of TCR clone 6848 (TRBV12-5, TRBJ2-5)
CASGSRTHQETQYS

SEQ ID NO: 13697 - protein, 11 aa, Homo sapiens
  CDR3 for alpha chain variable domain of TCR clone 6849 (TRAV21, TRAJ17)
CAAPAGNKLTF

SEQ ID NO: 13698 - protein, 17 aa, Homo sapiens
  CDR3 for beta chain variable domain of TCR clone 6849 (TRBV9, TRBJ2-5)
CASSVAGQGPSIETQYF

SEQ ID NO: 13699 - protein, 14 aa, Homo sapiens
  CDR3 for alpha chain variable domain of TCR clone 6850 (TRAV1-2, TRAJ16)
CAVNRFSDGQRLLF

SEQ ID NO: 13700 - protein, 15 aa, Homo sapiens
  CDR3 for beta chain variable domain of TCR clone 6850 (TRBV7-9, TRBJ1-6)
CASSSPGRGNSPLHF

SEQ ID NO: 13701 - protein, 10 aa, Homo sapiens
  CDR3 for alpha chain variable domain of TCR clone 6851 (TRAV1-2, TRAJ31)
CVSEDARLMF

SEQ ID NO: 13702 - protein, 14 aa, Homo sapiens
  CDR3 for beta chain variable domain of TCR clone 6851 (TRBV19, TRBJ2-1)
CASPTFVLGGEQFF

SEQ ID NO: 13703 - protein, 15 aa, Homo sapiens
  CDR3 for alpha chain variable domain of TCR clone 6852 (TRAV4, TRAJ10)
CLVGDGSGGGNKLTF

SEQ ID NO: 13704 - protein, 11 aa, Homo sapiens
  CDR3 for beta chain variable domain of TCR clone 6852 (TRBV5-1, TRBJ2-2)
CASSPSRCEHR

SEQ ID NO: 13705 - protein, 12 aa, Homo sapiens
  CDR3 for alpha chain variable domain of TCR clone 6853 (TRAV20, TRAJ23)
CAVQAPGGKLIF

SEQ ID NO: 13706 - protein, 14 aa, Homo sapiens
  CDR3 for beta chain variable domain of TCR clone 6853 (TRBV5-4, TRBJ2-1)
CASSLSGSYNEQFF

SEQ ID NO: 13707 - protein, 17 aa, Homo sapiens
  CDR3 for alpha chain variable domain of TCR clone 6854 (TRAV23/DV6, TRAJ57)
CAASSTLSQGGSEKLVF

SEQ ID NO: 13708 - protein, 14 aa, Homo sapiens
  CDR3 for beta chain variable domain of TCR clone 6854 (TRBV19, TRBJ2-1)
CASSKDRGQDEQFF

SEQ ID NO: 13709 - protein, 16 aa, Homo sapiens
  CDR3 for alpha chain variable domain of TCR clone 6855 (TRAV23/DV6, TRAJ9)
CAASIGGNTGGFKTIF

SEQ ID NO: 13710 - protein, 13 aa, Homo sapiens
  CDR3 for beta chain variable domain of TCR clone 6855 (TRBV10-3, TRBJ2-7)
CASKLAVNYEQYF

SEQ ID NO: 13711 - protein, 14 aa, Homo sapiens
  CDR3 for alpha chain variable domain of TCR clone 6856 (TRAV12-1, TRAJ17)
CVVNYKAAGNKLTF

SEQ ID NO: 13712 - protein, 15 aa, Homo sapiens
  CDR3 for beta chain variable domain of TCR clone 6856 (TRBV7-2, TRBJ2-7)
CASSLALGSAYEQYF

SEQ ID NO: 13713 - protein, 13 aa, Homo sapiens
  CDR3 for alpha chain variable domain of TCR clone 6857 (TRAV26-2, TRAJ43)
CILRAVNNNDMRF

SEQ ID NO: 13714 - protein, 15 aa, Homo sapiens
  CDR3 for beta chain variable domain of TCR clone 6857 (TRBV7-2, TRBJ2-1)
CASTHGTGIYNEQLF

SEQ ID NO: 13715 - protein, 13 aa, Homo sapiens
  CDR3 for alpha chain variable domain of TCR clone 6858 (TRAV8-1, TRAJ36)
CAVNSPTGANNLF

SEQ ID NO: 13716 - protein, 15 aa, Homo sapiens
  CDR3 for beta chain variable domain of TCR clone 6858 (TRBV7-2, TRBJ2-3)
CASSLEQGGTDTQYF

SEQ ID NO: 13717 - protein, 15 aa, Homo sapiens
  CDR3 for alpha chain variable domain of TCR clone 6859 (TRAV13-1, TRAJ32)
CAASNGWWCYKQAHL

SEQ ID NO: 13718 - protein, 15 aa, Homo sapiens
  CDR3 for beta chain variable domain of TCR clone 6859 (TRBV20-1, TRBJ2-7)
CSARDRVSGMDEQYF

SEQ ID NO: 13719 - protein, 14 aa, Homo sapiens
  CDR3 for alpha chain variable domain of TCR clone 6860 (TRAV3, TRAJ44)
CAVNNTGTASKLTF

SEQ ID NO: 13720 - protein, 14 aa, Homo sapiens
  CDR3 for beta chain variable domain of TCR clone 6860 (TRBV11-2, TRBJ2-3)
CASSLGGGTDTQYF

SEQ ID NO: 13721 - protein, 15 aa, Homo sapiens
  CDR3 for alpha chain variable domain of TCR clone 6861 (TRAV3, TRAJ20)
CAVRDIKLSDYKLSF

SEQ ID NO: 13722 - protein, 16 aa, Homo sapiens
  CDR3 for beta chain variable domain of TCR clone 6861 (TRBV20-1, TRBJ1-4)
CSAPGQGLLTNEKLFF

SEQ ID NO: 13723 - protein, 15 aa, Homo sapiens
  CDR3 for alpha chain variable domain of TCR clone 6862 (TRAV21, TRAJ53)
CATLNSGGSNYKLTF

SEQ ID NO: 13724 - protein, 15 aa, Homo sapiens
  CDR3 for beta chain variable domain of TCR clone 6862 (TRBV6-1, TRBJ2-4)
CASSEAVWTINIQYF

SEQ ID NO: 13725 - protein, 13 aa, Homo sapiens
  CDR3 for alpha chain variable domain of TCR clone 6863 (TRAV2, TRAJ40)
CAVVTSGTYKHIF

SEQ ID NO: 13726 - protein, 14 aa, Homo sapiens
  CDR3 for beta chain variable domain of TCR clone 6863 (TRBV19, TRBJ2-1)
CASPTFVLSGEQFF

SEQ ID NO: 13727 - protein, 13 aa, Homo sapiens
  CDR3 for alpha chain variable domain of TCR clone 6864 (TRAV35, TRAJ36)
CAGPRIGANNLFF

SEQ ID NO: 13728 - protein, 15 aa, Homo sapiens
  CDR3 for beta chain variable domain of TCR clone 6864 (TRBV28, TRBJ2-5)
CASSPSWSYQETQYF

SEQ ID NO: 13729 - protein, 13 aa, Homo sapiens
  CDR3 for alpha chain variable domain of TCR clone 6865 (TRAV21, TRAJ27)
CAARPRNAGKSTF

SEQ ID NO: 13730 - protein, 14 aa, Homo sapiens
  CDR3 for beta chain variable domain of TCR clone 6865 (TRBV7-6, TRBJ2-3)
CASSLGTVTDTQYF

SEQ ID NO: 13731 - protein, 12 aa, Homo sapiens
  CDR3 for alpha chain variable domain of TCR clone 6866 (TRAV1-1, TRAJ39)
CAVPVVGNMLTF

SEQ ID NO: 13732 - protein, 15 aa, Homo sapiens
  CDR3 for beta chain variable domain of TCR clone 6866 (TRBV27, TRBJ2-1)
CASSNGGGSSNEQFF

SEQ ID NO: 13733 - protein, 12 aa, Homo sapiens
  CDR3 for alpha chain variable domain of TCR clone 6867 (TRAV13-1, TRAJ21)
CAAKEGFNKFYF

SEQ ID NO: 13734 - protein, 16 aa, Homo sapiens
  CDR3 for beta chain variable domain of TCR clone 6867 (TRBV4-1, TRBJ2-5)
CASSHADRAGGETQYF

SEQ ID NO: 13735 - protein, 15 aa, Homo sapiens
  CDR3 for alpha chain variable domain of TCR clone 6868 (TRAV21, TRAJ53)
CATLNSGGSNYKLTF

SEQ ID NO: 13736 - protein, 15 aa, Homo sapiens
  CDR3 for beta chain variable domain of TCR clone 6868 (TRBV11-3, TRBJ2-3)
CASLKDGREGDTQYF

SEQ ID NO: 13737 - protein, 14 aa, Homo sapiens
  CDR3 for alpha chain variable domain of TCR clone 6869 (TRAV23/DV6, TRAJ37)
CAASTSSNTGKLIF

SEQ ID NO: 13738 - protein, 13 aa, Homo sapiens
  CDR3 for beta chain variable domain of TCR clone 6869 (TRBV18, TRBJ2-5)
CASSPIPGETQYF

SEQ ID NO: 13739 - protein, 15 aa, Homo sapiens
  CDR3 for alpha chain variable domain of TCR clone 6870 (TRAV21, TRAJ53)
CATLNSGGSNYKLTF

SEQ ID NO: 13740 - protein, 15 aa, Homo sapiens
  CDR3 for beta chain variable domain of TCR clone 6870 (TRBV9, TRBJ1-6)
CASSVAGTGDSPLHF

SEQ ID NO: 13741 - protein, 12 aa, Homo sapiens
  CDR3 for alpha chain variable domain of TCR clone 6871 (TRAV12-3, TRAJ17)
CAMTLTGNKLTF

SEQ ID NO: 13742 - protein, 15 aa, Homo sapiens
  CDR3 for beta chain variable domain of TCR clone 6871 (TRBV20-1, TRBJ2-7)
GSARDRVSGMDEQYF

SEQ ID NO: 13743 - protein, 14 aa, Homo sapiens
  CDR3 for alpha chain variable domain of TCR clone 6872 (TRAV21, TRAJ38)
CAVMGAGNNRKLIW

SEQ ID NO: 13744 - protein, 13 aa, Homo sapiens
  CDR3 for beta chain variable domain of TCR clone 6872 (TRBV7-3, TRBJ2-5)
CASSIGFFEAQYF

SEQ ID NO: 13745 - protein, 14 aa, Homo sapiens
  CDR3 for alpha chain variable domain of TCR clone 6873 (TRAV1-2, TRAJ8)
CAVREDTGFQKLVF

SEQ ID NO: 13746 - protein, 17 aa, Homo sapiens
  CDR3 for beta chain variable domain of TCR clone 6873 (TRBV11-3, TRBJ2-3)
CASSPGSSGGRTDTQYF

SEQ ID NO: 13747 - protein, 14 aa, Homo sapiens
  CDR3 for alpha chain variable domain of TCR clone 6874 (TRAV17, TRAJ17)
CATDHRAAGNKLTF

SEQ ID NO: 13748 - protein, 14 aa, Homo sapiens
  CDR3 for beta chain variable domain of TCR clone 6874 (TRBV19, TRBJ1-5)
CASSIGGGGQPQHF

SEQ ID NO: 13749 - protein, 13 aa, Homo sapiens
  CDR3 for alpha chain variable domain of TCR clone 6875 (TRAV8-6, TRAJ49)
CAVITNTGNQFYF

SEQ ID NO: 13750 - protein, 13 aa, Homo sapiens
  CDR3 for beta chain variable domain of TCR clone 6875 (TRBV20-1, TRBJ1-1)
CSARGGGNTEAFF

SEQ ID NO: 13751 - protein, 15 aa, Homo sapiens
  CDR3 for alpha chain variable domain of TCR clone 6876 (TRAV38-2/DV8, TRAJ57)
CAYGRVFGKGTKLTV

SEQ ID NO: 13752 - protein, 18 aa, Homo sapiens
  CDR3 for beta chain variable domain of TCR clone 6876 (TRBV18, TRBJ1-1)
CASSLPGAPQGAGTEAFF

SEQ ID NO: 13753 - protein, 10 aa, Homo sapiens
  CDR3 for alpha chain variable domain of TCR clone 6877 (TRAV2, TRAJ15)
RGQAGTALIF

SEQ ID NO: 13754 - protein, 13 aa, Homo sapiens
  CDR3 for beta chain variable domain of TCR clone 6877 (TRBV10-3, TRBJ2-7)
CASKLAVNYEQYF

SEQ ID NO: 13755 - protein, 13 aa, Homo sapiens
  CDR3 for alpha chain variable domain of TCR clone 6878 (TRAV3, TRAJ20)
CCEAFCNDYKLSF

SEQ ID NO: 13756 - protein, 16 aa, Homo sapiens
  CDR3 for beta chain variable domain of TCR clone 6878 (TRBV12-5, TRBJ2-5)
CASGPRTSGNQETQYF

SEQ ID NO: 13757 - protein, 14 aa, Homo sapiens
  CDR3 for alpha chain variable domain of TCR clone 6879 (TRAV17, TRAJ56)
CATDYTGANSKLTF

SEQ ID NO: 13758 - protein, 14 aa, Homo sapiens
  CDR3 for beta chain variable domain of TCR clone 6879 (TRBV18, TRBJ2-1)
CASSPVRGDNEQFF

SEQ ID NO: 13759 - protein, 13 aa, Homo sapiens
  CDR3 for alpha chain variable domain of TCR clone 6880 (TRAV12-1, TRAJ39)
CVALNNAGNMLTF

SEQ ID NO: 13760 - protein, 15 aa, Homo sapiens
  CDR3 for beta chain variable domain of TCR clone 6880 (TRBV14, TRBJ2-5)
CASSRRGGVQETQYF

SEQ ID NO: 13761 - protein, 14 aa, Homo sapiens
  CDR3 for alpha chain variable domain of TCR clone 6881 (TRAV12-2, TRAJ13)
CAVKKTGGYQKVTF

SEQ ID NO: 13762 - protein, 14 aa, Homo sapiens
  CDR3 for beta chain variable domain of TCR clone 6881 (TRBV4-1, TRBJ2-2)
CASSQAVNTGELFF

SEQ ID NO: 13763 - protein, 14 aa, Homo sapiens
  CDR3 for alpha chain variable domain of TCR clone 6882 (TRAV2, TRAJ9)
CAVEDRSGGFKTIF

SEQ ID NO: 13764 - protein, 15 aa, Homo sapiens
  CDR3 for beta chain variable domain of TCR clone 6882 (TRBV11-3, TRBJ2-3)
CASLKDGREGDTQYF

SEQ ID NO: 13765 - protein, 11 aa, Homo sapiens
  CDR3 for alpha chain variable domain of TCR clone 6883 (TRAV1-2, TRAJ20)
CAVANDYKLSF

SEQ ID NO: 13766 - protein, 18 aa, Homo sapiens
  CDR3 for beta chain variable domain of TCR clone 6883 (TRBV20-1, TRBJ2-6)
CSAETTPTHGSGANDLTF

SEQ ID NO: 13767 - protein, 14 aa, Homo sapiens
  CDR3 for alpha chain variable domain of TCR clone 6884 (TRAV1-2, TRAJ8)
CAVREDTGFQKLVF

SEQ ID NO: 13768 - protein, 15 aa, Homo sapiens
  CDR3 for beta chain variable domain of TCR clone 6884 (TRBV20-1, TRBJ1-1)
CSASRGVTGNTEAFF

SEQ ID NO: 13769 - protein, 11 aa, Homo sapiens
  CDR3 for alpha chain variable domain of TCR clone 6885 (TRAV3, TRAJ21)
CAVGNFNKFYF

SEQ ID NO: 13770 - protein, 16 aa, Homo sapiens
  CDR3 for beta chain variable domain of TCR clone 6885 (TRBV19, TRBJ2-1)
CASSKAGPSSYSEQFF

SEQ ID NO: 13771 - protein, 15 aa, Homo sapiens
  CDR3 for alpha chain variable domain of TCR clone 6886 (TRAV26-1, TRAJ15)
CIVRDANQAGTALIF

SEQ ID NO: 13772 - protein, 13 aa, Homo sapiens
  CDR3 for beta chain variable domain of TCR clone 6886 (TRBV10-3, TRBJ2-7)
CAISEAGPYEQYF

SEQ ID NO: 13773 - protein, 12 aa, Homo sapiens
  CDR3 for alpha chain variable domain of TCR clone 6887 (TRAV35, TRAJ28)
GVEGAGSYQLTF

SEQ ID NO: 13774 - protein, 15 aa, Homo sapiens
  CDR3 for beta chain variable domain of TCR clone 6887 (TRBV5-1, TRBJ2-1)
CASSPPRAPYNEQFF

SEQ ID NO: 13775 - protein, 18 aa, Homo sapiens
  CDR3 for alpha chain variable domain of TCR clone 6888 (TRAV12-2, )
CAVEDIQNLDPAVYQLRD

SEQ ID NO: 13776 - protein, 16 aa, Homo sapiens
  CDR3 for beta chain variable domain of TCR clone 6888 (TRBV6-1, TRBJ1-2)
CASSGAWQGRSHGYTF

SEQ ID NO: 13777 - protein, 12 aa, Homo sapiens
  CDR3 for alpha chain variable domain of TCR clone 6889 (TRAV8-3, TRAJ20)
CAVDFNDYKLSF

SEQ ID NO: 13778 - protein, 12 aa, Homo sapiens
  CDR3 for beta chain variable domain of TCR clone 6889 (TRBV12-4, TRBJ1-3)
CASSFSGNTIYF

SEQ ID NO: 13779 - protein, 14 aa, Homo sapiens
  CDR3 for alpha chain variable domain of TCR clone 6890 (TRAV12-3, TRAJ10)
SHLPLTGGGNKLTF

SEQ ID NO: 13780 - protein, 15 aa, Homo sapiens
  CDR3 for beta chain variable domain of TCR clone 6890 (TRBV10-3, TRBJ1-1)
CAISDRGGMNTEAFF

SEQ ID NO: 13781 - protein, 16 aa, Homo sapiens
  CDR3 for alpha chain variable domain of TCR clone 6891 (TRAV3, TRAJ37)
CAVRGKGSGNTGKLIF

SEQ ID NO: 13782 - protein, 15 aa, Homo sapiens
  CDR3 for beta chain variable domain of TCR clone 6891 (TRBV18, TRBJ2-1)
CASSPPSASYNEQFF

SEQ ID NO: 13783 - protein, 13 aa, Homo sapiens
  CDR3 for alpha chain variable domain of TCR clone 6892 (TRAV8-4, TRAJ40)
CAVSEGGTYKYIF

SEQ ID NO: 13784 - protein, 13 aa, Homo sapiens
  CDR3 for beta chain variable domain of TCR clone 6892 (TRBV20-1, TRBJ1-5)
CSAPGGPNQPQHF

SEQ ID NO: 13785 - protein, 11 aa, Homo sapiens
  CDR3 for alpha chain variable domain of TCR clone 6893 (TRAV1-2, TRAJ40)
CAVPGTYKYIF

SEQ ID NO: 13786 - protein, 11 aa, Homo sapiens
  CDR3 for beta chain variable domain of TCR clone 6893 (TRBV29-1, TRBJ2-7)
VGTSGSYEQYF

SEQ ID NO: 13787 - protein, 14 aa, Homo sapiens
  CDR3 for alpha chain variable domain of TCR clone 6894 (TRAV4, TRAJ10)
CLVGDTGGGNKLIF

SEQ ID NO: 13788 - protein, 13 aa, Homo sapiens
  CDR3 for beta chain variable domain of TCR clone 6894 (TRBV10-2, TRBJ2-5)
CASSVGPQETQYF

SEQ ID NO: 13789 - protein, 10 aa, Homo sapiens
  CDR3 for alpha chain variable domain of TCR clone 6895 (TRAV27, TRAJ58)
SETSGSRLTF

SEQ ID NO: 13790 - protein, 14 aa, Homo sapiens
  CDR3 for beta chain variable domain of TCR clone 6895 (TRBV7-2, TRBJ2-7)
CASSPKTSFYEQYF

SEQ ID NO: 13791 - protein, 16 aa, Homo sapiens
  CDR3 for alpha chain variable domain of TCR clone 6896 (TRAV3, TRAJ4)
CAVRAFFSGGYNKLIF

SEQ ID NO: 13792 - protein, 16 aa, Homo sapiens
  CDR3 for beta chain variable domain of TCR clone 6896 (TRBV6-1, TRBJ1-6)
CASSERGGSGNSPLHF

SEQ ID NO: 13793 - protein, 15 aa, Homo sapiens
  CDR3 for alpha chain variable domain of TCR clone 6897 (TRAV4, TRAJ32)
CLVGEDGGATNKLIF

SEQ ID NO: 13794 - protein, 14 aa, Homo sapiens
  CDR3 for beta chain variable domain of TCR clone 6897 (TRBV7-2, TRBJ2-5)
CASSPRGSSETQYF

SEQ ID NO: 13795 - protein, 12 aa, Homo sapiens
  CDR3 for alpha chain variable domain of TCR clone 6898 (TRAV30, TRAJ39)
CGRGNAGNMLTF

SEQ ID NO: 13796 - protein, 15 aa, Homo sapiens
  CDR3 for beta chain variable domain of TCR clone 6898 (TRBV5-1, TRBJ1-1)
CASSWTGRGNIEAFF

SEQ ID NO: 13797 - protein, 13 aa, Homo sapiens
  CDR3 for alpha chain variable domain of TCR clone 6899 (TRAV8-3, TRAJ36)
CAVGATGANNLFF

SEQ ID NO: 13798 - protein, 15 aa, Homo sapiens
  CDR3 for beta chain variable domain of TCR clone 6899 (TRBV5-1, TRBJ2-3)
CASSVTSGSTDTQYF

SEQ ID NO: 13799 - protein, 13 aa, Homo sapiens
  CDR3 for alpha chain variable domain of TCR clone 6900 (TRAV21, TRAJ20)
CAVGLRVDYKLSF

SEQ ID NO: 13800 - protein, 14 aa, Homo sapiens
  CDR3 for beta chain variable domain of TCR clone 6900 (TRBV4-1, TRBJ2-2)
CASSQAVNTGELFF

SEQ ID NO: 13801 - protein, 12 aa, Homo sapiens
  CDR3 for alpha chain variable domain of TCR clone 6901 (TRAV13-2, TRAJ8)
CAPWLGFQKLVF

SEQ ID NO: 13802 - protein, 15 aa, Homo sapiens
  CDR3 for beta chain variable domain of TCR clone 6901 (TRBV7-2, TRBJ2-1)
CASSSGLAGGNEQFF

SEQ ID NO: 13803 - protein, 13 aa, Homo sapiens
  CDR3 for alpha chain variable domain of TCR clone 6902 (TRAV16, TRAJ37)
CALRGSNTGKLIF

SEQ ID NO: 13804 - protein, 10 aa, Homo sapiens
  CDR3 for beta chain variable domain of TCR clone 6902 (TRBV5-6, TRBJ2-7)
CASSGNEQYF

SEQ ID NO: 13805 - protein, 15 aa, Homo sapiens
  CDR3 for alpha chain variable domain of TCR clone 6903 (TRAV8-2, TRAJ13)
CVVSDLSGGYQKVTF

SEQ ID NO: 13806 - protein, 16 aa, Homo sapiens
  CDR3 for beta chain variable domain of TCR clone 6903 (TRBV27, TRBJ2-2)
CASSFRGLVRTGELFF

SEQ ID NO: 13807 - protein, 14 aa, Homo sapiens
  CDR3 for alpha chain variable domain of TCR clone 6904 (TRAV12-3, TRAJ10)
SHLPLTGGGNKLTF

SEQ ID NO: 13808 - protein, 15 aa, Homo sapiens
  CDR3 for beta chain variable domain of TCR clone 6904 (TRBV6-1, TRBJ2-3)
CASSERGGITDTQYF

SEQ ID NO: 13809 - protein, 13 aa, Homo sapiens
  CDR3 for alpha chain variable domain of TCR clone 6905 (TRAV13-2, TRAJ31)
CAENLNNNARLMF

SEQ ID NO: 13810 - protein, 15 aa, Homo sapiens
  CDR3 for beta chain variable domain of TCR clone 6905 (TRBV5-4, TRBJ2-1)
CASSREGLPYNEQFF

SEQ ID NO: 13811 - protein, 16 aa, Homo sapiens
  CDR3 for alpha chain variable domain of TCR clone 6906 (TRAV1-2, TRAJ10)
CAVRGVLTGGGNKLTF

SEQ ID NO: 13812 - protein, 15 aa, Homo sapiens
  CDR3 for beta chain variable domain of TCR clone 6906 (TRBV6-3, TRBJ2-7)
CASSSPGTVFYEQYF

SEQ ID NO: 13813 - protein, 14 aa, Homo sapiens
  CDR3 for alpha chain variable domain of TCR clone 6907 (TRAV17, TRAJ5)
CATSTDTGRRALTF

SEQ ID NO: 13814 - protein, 14 aa, Homo sapiens
  CDR3 for beta chain variable domain of TCR clone 6907 (TRBV3-1, TRBJ1-5)
CASSTGDSNQPQHF

SEQ ID NO: 13815 - protein, 15 aa, Homo sapiens
  CDR3 for alpha chain variable domain of TCR clone 6908 (TRAV12-3, TRAJ6)
CAMSATTGGSYIPTF

SEQ ID NO: 13816 - protein, 16 aa, Homo sapiens
  CDR3 for beta chain variable domain of TCR clone 6908 (TRBV20-1, TRBJ1-2)
CSASMGQGVANYGDTF

SEQ ID NO: 13817 - protein, 14 aa, Homo sapiens
  CDR3 for alpha chain variable domain of TCR clone 6909 (TRAV12-2, TRAJ13)
CAVKKTGGYQKVTF

SEQ ID NO: 13818 - protein, 11 aa, Homo sapiens
  CDR3 for beta chain variable domain of TCR clone 6909 (TRBV12-4, TRBJ2-2)
CASSSAGELFF

SEQ ID NO: 13819 - protein, 12 aa, Homo sapiens
  CDR3 for alpha chain variable domain of TCR clone 6910 (TRAV16, TRAJ10)
CSRTGGGNKLTF

SEQ ID NO: 13820 - protein, 15 aa, Homo sapiens
  CDR3 for beta chain variable domain of TCR clone 6910 (TRBV9, TRBJ1-6)
CASSVAGTGDSPLHF

SEQ ID NO: 13821 - protein, 23 aa, Homo sapiens
  CDR3 for alpha chain variable domain of TCR clone 6911 (TRAV41, TRAJ32)
CAVRIMVVLQTSSSLELALCLLS

SEQ ID NO: 13822 - protein, 15 aa, Homo sapiens
  CDR3 for beta chain variable domain of TCR clone 6911 (TRBV11-2, TRBJ2-1)
CASSKNRGLIYEQFF

SEQ ID NO: 13823 - protein, 14 aa, Homo sapiens
  CDR3 for alpha chain variable domain of TCR clone 6912 (TRAV26-1, TRAJ38)
CIADNAGNNRKLIW

SEQ ID NO: 13824 - protein, 14 aa, Homo sapiens
  CDR3 for beta chain variable domain of TCR clone 6912 (TRBV7-3, TRBJ1-1)
CASSLGTGYTEAFF

SEQ ID NO: 13825 - protein, 14 aa, Homo sapiens
  CDR3 for alpha chain variable domain of TCR clone 6913 (TRAV13-1, TRAJ35)
CAASKGGFGNVLRC

SEQ ID NO: 13826 - protein, 13 aa, Homo sapiens
  CDR3 for beta chain variable domain of TCR clone 6913 (TRBV7-3, TRBJ1-1)
CASSQDWGAEAFF

SEQ ID NO: 13827 - protein, 14 aa, Homo sapiens
  CDR3 for alpha chain variable domain of TCR clone 6914 (TRAV1-2, TRAJ8)
CAVGEDTGFQKLVF

SEQ ID NO: 13828 - protein, 15 aa, Homo sapiens
  CDR3 for beta chain variable domain of TCR clone 6914 (TRBV6-3, TRBJ2-7)
CASSSPGTVFYEQYF

SEQ ID NO: 13829 - protein, 11 aa, Homo sapiens
  CDR3 for alpha chain variable domain of TCR clone 6915 (TRAV2, TRAJ13)
CASGGYQKVTF

SEQ ID NO: 13830 - protein, 14 aa, Homo sapiens
  CDR3 for beta chain variable domain of TCR clone 6915 (TRBV7-2, TRBJ2-7)
CASSLYPGRYEQYF

SEQ ID NO: 13831 - protein, 12 aa, Homo sapiens
  CDR3 for alpha chain variable domain of TCR clone 6916 (TRAV13-2, TRAJ23)
CAERHRGGKLIF

SEQ ID NO: 13832 - protein, 12 aa, Homo sapiens
  CDR3 for beta chain variable domain of TCR clone 6916 (TRBV11-2, TRBJ2-1)
CASSPGNNEQFF

SEQ ID NO: 13833 - protein, 15 aa, Homo sapiens
  CDR3 for alpha chain variable domain of TCR clone 6917 (TRAV21, TRAJ53)
CATLNSGGSNYKLTF

SEQ ID NO: 13834 - protein, 16 aa, Homo sapiens
  CDR3 for beta chain variable domain of TCR clone 6917 (TRBV19, TRBJ1-5)
CASSTWTGGGNQPQHF

SEQ ID NO: 13835 - protein, 13 aa, Homo sapiens
  CDR3 for alpha chain variable domain of TCR clone 6918 (TRAV21, TRAJ27)
RAARPGNAGKSTF

SEQ ID NO: 13836 - protein, 14 aa, Homo sapiens
  CDR3 for beta chain variable domain of TCR clone 6918 (TRBV7-6, TRBJ2-3)
CASSLGTVTDTQYF

SEQ ID NO: 13837 - protein, 11 aa, Homo sapiens
  CDR3 for alpha chain variable domain of TCR clone 6919 (TRAV1-2, TRAJ20)
CAVSNDYKLSF

SEQ ID NO: 13838 - protein, 17 aa, Homo sapiens
  CDR3 for beta chain variable domain of TCR clone 6919 (TRBV20-1, TRBJ2-2)
CSASGSGQGGLTGELFF

SEQ ID NO: 13839 - protein, 15 aa, Homo sapiens
  CDR3 for alpha chain variable domain of TCR clone 6920 (TRAV27, TRAJ38)
CAARRNAGNNRKLIL

SEQ ID NO: 13840 - protein, 13 aa, Homo sapiens
  CDR3 for beta chain variable domain of TCR clone 6920 (TRBV12-5, TRBJ2-3)
CASGDRQSDTQYF

SEQ ID NO: 13841 - protein, 14 aa, Homo sapiens
  CDR3 for alpha chain variable domain of TCR clone 6921 (TRAV13-2, TRAJ11)
CAETGNSGYSTLTF

SEQ ID NO: 13842 - protein, 16 aa, Homo sapiens
  CDR3 for beta chain variable domain of TCR clone 6921 (TRBV10-3, TRBJ2-1)
CAISGVGDGGGGEQFF

SEQ ID NO: 13843 - protein, 12 aa, Homo sapiens
  CDR3 for alpha chain variable domain of TCR clone 6922 (TRAV13-2, TRAJ23)
CAERHRGGKLIF

SEQ ID NO: 13844 - protein, 13 aa, Homo sapiens
  CDR3 for beta chain variable domain of TCR clone 6922 (TRBV12-4, TRBJ1-2)
CASSLRQGKGYTF

SEQ ID NO: 13845 - protein, 13 aa, Homo sapiens
  CDR3 for alpha chain variable domain of TCR clone 6923 (TRAV26-1, TRAJ9)
CIATYTGGFKTIF

SEQ ID NO: 13846 - protein, 15 aa, Homo sapiens
  CDR3 for beta chain variable domain of TCR clone 6923 (TRBV7-2, TRBJ1-3)
CASSPQGGSGNTIYF

SEQ ID NO: 13847 - protein, 10 aa, Homo sapiens
  CDR3 for alpha chain variable domain of TCR clone 6924 (TRAV1-2, TRAJ31)
CVSEDARLMF

SEQ ID NO: 13848 - protein, 15 aa, Homo sapiens
  CDR3 for beta chain variable domain of TCR clone 6924 (TRBV11-3, TRBJ2-3)
CASLKDGREGDTQYF

SEQ ID NO: 13849 - protein, 11 aa, Homo sapiens
  CDR3 for alpha chain variable domain of TCR clone 6925 (TRAV12-2, TRAJ3)
CAVKRASKIIF

SEQ ID NO: 13850 - protein, 14 aa, Homo sapiens
  CDR3 for beta chain variable domain of TCR clone 6925 (TRBV6-5, TRBJ1-1)
CASNRQRSDTEAFF

SEQ ID NO: 13851 - protein, 13 aa, Homo sapiens
  CDR3 for alpha chain variable domain of TCR clone 6926 (TRAV12-3, TRAJ56)
CAMSFGANSKLTF

SEQ ID NO: 13852 - protein, 12 aa, Homo sapiens
  CDR3 for beta chain variable domain of TCR clone 6926 (TRBV12-4, TRBJ1-4)
CASSETNEKLFF

SEQ ID NO: 13853 - protein, 17 aa, Homo sapiens
  CDR3 for alpha chain variable domain of TCR clone 6927 (TRAV3, TRAJ6)
CAVSDGPRAGGSYIPTF

SEQ ID NO: 13854 - protein, 14 aa, Homo sapiens
  CDR3 for beta chain variable domain of TCR clone 6927 (TRBV7-2, TRBJ2-7)
CASSPKTSFYEQYF

SEQ ID NO: 13855 - protein, 17 aa, Homo sapiens
  CDR3 for alpha chain variable domain of TCR clone 6928 (TRAV3, TRAJ38)
CAVRDCLNAGNNRKLIW

SEQ ID NO: 13856 - protein, 14 aa, Homo sapiens
  CDR3 for beta chain variable domain of TCR clone 6928 (TRBV12-5, TRBJ2-5)
CASGSRTHQETQYF

SEQ ID NO: 13857 - protein, 17 aa, Homo sapiens
  CDR3 for alpha chain variable domain of TCR clone 6929 (TRAV8-6, TRAJ58)
CAVSSWVGETSGSRLTF

SEQ ID NO: 13858 - protein, 14 aa, Homo sapiens
  CDR3 for beta chain variable domain of TCR clone 6929 (TRBV2, TRBJ2-7)
CASRPPGGHYEQYF

SEQ ID NO: 13859 - protein, 11 aa, Homo sapiens
  CDR3 for alpha chain variable domain of TCR clone 6930 (TRAV23/DV6, TRAJ4)
APAGGYNKLIF

SEQ ID NO: 13860 - protein, 17 aa, Homo sapiens
  CDR3 for beta chain variable domain of TCR clone 6930 (TRBV20-1, TRBJ2-1)
CSAPDRGAGVAYNEQFF

SEQ ID NO: 13861 - protein, 17 aa, Homo sapiens
  CDR3 for alpha chain variable domain of TCR clone 6931 (TRAV8-6, TRAJ58)
CAVSSWVGETSGPRLTF

SEQ ID NO: 13862 - protein, 14 aa, Homo sapiens
  CDR3 for beta chain variable domain of TCR clone 6931 (TRBV4-2, TRBJ2-1)
CASGLDRAYNEQFF

SEQ ID NO: 13863 - protein, 13 aa, Homo sapiens
  CDR3 for alpha chain variable domain of TCR clone 6932 (TRAV21, TRAJ57)
CAVTQGGSEKLVF

SEQ ID NO: 13864 - protein, 14 aa, Homo sapiens
  CDR3 for beta chain variable domain of TCR clone 6932 (TRBV5-1, TRBJ2-1)
CASSALWAGNEQFF

SEQ ID NO: 13865 - protein, 13 aa, Homo sapiens
  CDR3 for alpha chain variable domain of TCR clone 6933 (TRAV21, TRAJ58)
CAVKESSGSRLTF

SEQ ID NO: 13866 - protein, 17 aa, Homo sapiens
  CDR3 for beta chain variable domain of TCR clone 6933 (TRBV5-1, TRBJ2-3)
CASSLAGWGSVVDTQYF

SEQ ID NO: 13867 - protein, 19 aa, Homo sapiens
  CDR3 for alpha chain variable domain of TCR clone 6934 (TRAV2, TRAJ20)
ILQVREADAAVYRDCKLSF

SEQ ID NO: 13868 - protein, 13 aa, Homo sapiens
  CDR3 for beta chain variable domain of TCR clone 6934 (TRBV7-3, TRBJ1-1)
CASSQDWGAEAFF

SEQ ID NO: 13869 - protein, 11 aa, Homo sapiens
  CDR3 for alpha chain variable domain of TCR clone 6935 (TRAV1-1, TRAJ23)
CAVRQGGKLIF

SEQ ID NO: 13870 - protein, 15 aa, Homo sapiens
  CDR3 for beta chain variable domain of TCR clone 6935 (TRBV19, TRBJ1-6)
CASSTQGAVGSPLHF

SEQ ID NO: 13871 - protein, 13 aa, Homo sapiens
  CDR3 for alpha chain variable domain of TCR clone 6936 (TRAV17, TRAJ9)
CATDYTGGFKTIF

SEQ ID NO: 13872 - protein, 20 aa, Homo sapiens
  CDR3 for beta chain variable domain of TCR clone 6936 (TRBV28, TRBJ2-1)
CASTPIGRSPGLAGGNEQFF

SEQ ID NO: 13873 - protein, 15 aa, Homo sapiens
  CDR3 for alpha chain variable domain of TCR clone 6937 (TRAV8-3, TRAJ45)
CASSYSGGGADGLTF

SEQ ID NO: 13874 - protein, 15 aa, Homo sapiens
  CDR3 for beta chain variable domain of TCR clone 6937 (TRBV27, TRBJ2-1)
CASSNGGGSSNEQFF

SEQ ID NO: 13875 - protein, 15 aa, Homo sapiens
  CDR3 for alpha chain variable domain of TCR clone 6938 (TRAV8-3, TRAJ45)
CASSYSGGGAAGLTF

SEQ ID NO: 13876 - protein, 13 aa, Homo sapiens
  CDR3 for beta chain variable domain of TCR clone 6938 (TRBV10-3, TRBJ2-7)
CASKLAVNYEQYF

SEQ ID NO: 13877 - protein, 14 aa, Homo sapiens
  CDR3 for alpha chain variable domain of TCR clone 6939 (TRAV1-2, TRAJ16)
CAVNRFSDGQKLLF

SEQ ID NO: 13878 - protein, 14 aa, Homo sapiens
  CDR3 for beta chain variable domain of TCR clone 6939 (TRBV6-1, TRBJ2-2)
CASTWQGNTGELFF

SEQ ID NO: 13879 - protein, 14 aa, Homo sapiens
  CDR3 for alpha chain variable domain of TCR clone 6940 (TRAV17, TRAJ22)
CATVLSGSARQLTF

SEQ ID NO: 13880 - protein, 14 aa, Homo sapiens
  CDR3 for beta chain variable domain of TCR clone 6940 (TRBV19, TRBJ2-1)
CASPTFVLSGEQFF

SEQ ID NO: 13881 - protein, 17 aa, Homo sapiens
  CDR3 for alpha chain variable domain of TCR clone 6941 (TRAV26-2, TRAJ42)
CILRDVGYGGSQGNLIF

SEQ ID NO: 13882 - protein, 14 aa, Homo sapiens
  CDR3 for beta chain variable domain of TCR clone 6941 (TRBV19, TRBJ2-3)
CASSEGPRTDTQYF

SEQ ID NO: 13883 - protein, 18 aa, Homo sapiens
  CDR3 for alpha chain variable domain of TCR clone 6942 (TRAV13-1, TRAJ52)
CAAKNPNAGGTSYGKLTF

SEQ ID NO: 13884 - protein, 15 aa, Homo sapiens
  CDR3 for beta chain variable domain of TCR clone 6942 (TRBV28, TRBJ2-4)
CAAGSGTLLMGIQYF

SEQ ID NO: 13885 - protein, 14 aa, Homo sapiens
  CDR3 for alpha chain variable domain of TCR clone 6943 (TRAV3, TRAJ21)
CAVESQANFNKFYF

SEQ ID NO: 13886 - protein, 14 aa, Homo sapiens
  CDR3 for beta chain variable domain of TCR clone 6943 (TRBV11-2, TRBJ2-1)
CASSLGGSFNEQFF

SEQ ID NO: 13887 - protein, 12 aa, Homo sapiens
  CDR3 for alpha chain variable domain of TCR clone 6944 (TRAV5, TRAJ27)
CAEITNAGKSTF

SEQ ID NO: 13888 - protein, 14 aa, Homo sapiens
  CDR3 for beta chain variable domain of TCR clone 6944 (TRBV12-5, TRBJ2-5)
CASGSRTHQETQYF

SEQ ID NO: 13889 - protein, 14 aa, Homo sapiens
  CDR3 for alpha chain variable domain of TCR clone 6945 (TRAV1-2, TRAJ8)
CAVREDTGFQKLVF

SEQ ID NO: 13890 - protein, 15 aa, Homo sapiens
  CDR3 for beta chain variable domain of TCR clone 6945 (TRBV6-3, TRBJ2-7)
CASSSPGTAFYEQYF

SEQ ID NO: 13891 - protein, 14 aa, Homo sapiens
  CDR3 for alpha chain variable domain of TCR clone 6946 (TRAV26-1, TRAJ38)
CIADNAGNNRKLIW

SEQ ID NO: 13892 - protein, 13 aa, Homo sapiens
  CDR3 for beta chain variable domain of TCR clone 6946 (TRBV20-1, TRBJ1-1)
CNARGGGNTEAFF

SEQ ID NO: 13893 - protein, 14 aa, Homo sapiens
  CDR3 for alpha chain variable domain of TCR clone 6947 (TRAV17, TRAJ32)
CATDPGGATNKLIF

SEQ ID NO: 13894 - protein, 12 aa, Homo sapiens
  CDR3 for beta chain variable domain of TCR clone 6947 (TRBV28, TRBJ2-3)
CASSLYRDTQYF

SEQ ID NO: 13895 - protein, 17 aa, Homo sapiens
  CDR3 for alpha chain variable domain of TCR clone 6948 (TRAV1-1, TRAJ3)
CLLLLRCPYSSASKIIF

SEQ ID NO: 13896 - protein, 13 aa, Homo sapiens
  CDR3 for beta chain variable domain of TCR clone 6948 (TRBV20-1, TRBJ1-1)
CSARAGGNTEAFF

SEQ ID NO: 13897 - protein, 14 aa, Homo sapiens
  CDR3 for alpha chain variable domain of TCR clone 6949 (TRAV12-2, TRAJ52)
CRCAGGTSYGKLTF

SEQ ID NO: 13898 - protein, 13 aa, Homo sapiens
  CDR3 for beta chain variable domain of TCR clone 6949 (TRBV11-2, TRBJ2-1)
CASSLRLTHEQFF

SEQ ID NO: 13899 - protein, 14 aa, Homo sapiens
  CDR3 for alpha chain variable domain of TCR clone 6950 (TRAV9-2, TRAJ39)
CALYIYNAGNMLTF

SEQ ID NO: 13900 - protein, 15 aa, Homo sapiens
  CDR3 for beta chain variable domain of TCR clone 6950 (TRBV7-9, TRBJ1-4)
CASSARTGGNEKLFF

SEQ ID NO: 13901 - protein, 19 aa, Homo sapiens
  CDR3 for alpha chain variable domain of TCR clone 6951 (TRAV26-1, TRAJ28)
CIVRVAHAYSGAGSYQLTF

SEQ ID NO: 13902 - protein, 15 aa, Homo sapiens
  CDR3 for beta chain variable domain of TCR clone 6951 (TRBV20-1, TRBJ1-1)
CSASRGVTGNTEAFF

SEQ ID NO: 13903 - protein, 11 aa, Homo sapiens
  CDR3 for alpha chain variable domain of TCR clone 6952 (TRAV12-3, TRAJ43)
CAMSVSNDMRF

SEQ ID NO: 13904 - protein, 13 aa, Homo sapiens
  CDR3 for beta chain variable domain of TCR clone 6952 (TRBV20-1, TRBJ1-1)
CSAPLGGGTKAFF

SEQ ID NO: 13905 - protein, 14 aa, Homo sapiens
  CDR3 for alpha chain variable domain of TCR clone 6953 (TRAV4, TRAJ26)
CLVGPHNYGQNFVF

SEQ ID NO: 13906 - protein, 14 aa, Homo sapiens
  CDR3 for beta chain variable domain of TCR clone 6953 (TRBV7-9, TRBJ2-7)
CASSLSAATYEQYF

SEQ ID NO: 13907 - protein, 13 aa, Homo sapiens
  CDR3 for alpha chain variable domain of TCR clone 6954 (TRAV12-2, TRAJ31)
CAVKADNNARLMF

SEQ ID NO: 13908 - protein, 15 aa, Homo sapiens
  CDR3 for beta chain variable domain of TCR clone 6954 (TRBV15, TRBJ1-5)
CATSREQGGNQPQHF

SEQ ID NO: 13909 - protein, 14 aa, Homo sapiens
  CDR3 for alpha chain variable domain of TCR clone 6955 (TRAV21, TRAJ37)
CAVKGSSNTGKLIF

SEQ ID NO: 13910 - protein, 13 aa, Homo sapiens
  CDR3 for beta chain variable domain of TCR clone 6955 (TRBV7-2, TRBJ2-5)
CASSQTSVETQYF

SEQ ID NO: 13911 - protein, 14 aa, Homo sapiens
  CDR3 for alpha chain variable domain of TCR clone 6956 (TRAV12-3, TRAJ10)
SHLPLTGGGNKLTF

SEQ ID NO: 13912 - protein, 14 aa, Homo sapiens
  CDR3 for beta chain variable domain of TCR clone 6956 (TRBV6-1, TRBJ1-3)
CASVQGGGGNTMYF

SEQ ID NO: 13913 - protein, 12 aa, Homo sapiens
  CDR3 for alpha chain variable domain of TCR clone 6957 (TRAV25, TRAJ11)
CAGASGYSTLTF

SEQ ID NO: 13914 - protein, 15 aa, Homo sapiens
  CDR3 for beta chain variable domain of TCR clone 6957 (TRBV9, TRBJ1-6)
CASSVAGTGDSPLHF

SEQ ID NO: 13915 - protein, 14 aa, Homo sapiens
  CDR3 for alpha chain variable domain of TCR clone 6958 (TRAV1-2, TRAJ8)
CAVREDTGFQKLVF

SEQ ID NO: 13916 - protein, 14 aa, Homo sapiens
  CDR3 for beta chain variable domain of TCR clone 6958 (TRBV11-3, TRBJ2-3)
CASSRLARTDTQYF

SEQ ID NO: 13917 - protein, 12 aa, Homo sapiens
  CDR3 for alpha chain variable domain of TCR clone 6959 (TRAV6, TRAJ9)
CALVTGGFKTIF

SEQ ID NO: 13918 - protein, 16 aa, Homo sapiens
  CDR3 for beta chain variable domain of TCR clone 6959 (TRBV7-3, TRBJ2-2)
GGTQPCIQWNTGELFF

SEQ ID NO: 13919 - protein, 15 aa, Homo sapiens
  CDR3 for alpha chain variable domain of TCR clone 6960 (TRAV1-1, TRAJ23)
CAVSEGPGRKAYLRT

SEQ ID NO: 13920 - protein, 14 aa, Homo sapiens
  CDR3 for beta chain variable domain of TCR clone 6960 (TRBV10-2, TRBJ2-1)
CASSEGTSEDEQFF

SEQ ID NO: 13921 - protein, 10 aa, Homo sapiens
  CDR3 for alpha chain variable domain of TCR clone 6961 (TRAV23/DV6, TRAJ57)
CAASSTLSQG

SEQ ID NO: 13922 - protein, 14 aa, Homo sapiens
  CDR3 for beta chain variable domain of TCR clone 6961 (TRBV7-8, TRBJ2-1)
CASSSQGTYNEQFF

SEQ ID NO: 13923 - protein, 12 aa, Homo sapiens
  CDR3 for alpha chain variable domain of TCR clone 6962 (TRAV3, TRAJ43)
CAVRGPNNDMRF

SEQ ID NO: 13924 - protein, 15 aa, Homo sapiens
  CDR3 for beta chain variable domain of TCR clone 6962 (TRBV27, TRBJ1-5)
CASSLGTGFDQPQHF

SEQ ID NO: 13925 - protein, 14 aa, Homo sapiens
  CDR3 for alpha chain variable domain of TCR clone 6963 (TRAV17, TRAJ6)
CATPAMGGSYIPTF

SEQ ID NO: 13926 - protein, 13 aa, Homo sapiens
  CDR3 for beta chain variable domain of TCR clone 6963 (TRBV6-3, TRBJ1-1)
CASSYGRGSGAFF

SEQ ID NO: 13927 - protein, 14 aa, Homo sapiens
  CDR3 for alpha chain variable domain of TCR clone 6964 (TRAV1-2, TRAJ16)
CAVNRFSDGQKLLF

SEQ ID NO: 13928 - protein, 13 aa, Homo sapiens
  CDR3 for beta chain variable domain of TCR clone 6964 (TRBV27, TRBJ2-1)
CASRTLGVGEQFF

SEQ ID NO: 13929 - protein, 16 aa, Homo sapiens
  CDR3 for alpha chain variable domain of TCR clone 6965 (TRAV30, TRAJ24)
CGTEIVDAESWGKFQF

SEQ ID NO: 13930 - protein, 14 aa, Homo sapiens
  CDR3 for beta chain variable domain of TCR clone 6965 (TRBV12-5, TRBJ2-5)
CASGSRTHQETQYF

SEQ ID NO: 13931 - protein, 13 aa, Homo sapiens
  CDR3 for alpha chain variable domain of TCR clone 6966 (TRAV26-2, TRAJ43)
CILRAVNNNDMRF

SEQ ID NO: 13932 - protein, 16 aa, Homo sapiens
  CDR3 for beta chain variable domain of TCR clone 6966 (TRBV7-6, TRBJ1-6)
CASSLSSRIGDSPLHF

SEQ ID NO: 13933 - protein, 14 aa, Homo sapiens
  CDR3 for alpha chain variable domain of TCR clone 6967 (TRAV1-2, TRAJ8)
CAVRGDTGFQKLVF

SEQ ID NO: 13934 - protein, 15 aa, Homo sapiens
  CDR3 for beta chain variable domain of TCR clone 6967 (TRBV6-3, TRBJ2-7)
CASSSPGTVFYEQYF

SEQ ID NO: 13935 - protein, 13 aa, Homo sapiens
  CDR3 for alpha chain variable domain of TCR clone 6968 (TRAV2, TRAJ40)
CAAVTSGTYKYIF

SEQ ID NO: 13936 - protein, 14 aa, Homo sapiens
  CDR3 for beta chain variable domain of TCR clone 6968 (TRBV19, TRBJ2-1)
CASPTFVLSGEQFF

SEQ ID NO: 13937 - protein, 13 aa, Homo sapiens
  CDR3 for alpha chain variable domain of TCR clone 6969 (TRAV27, TRAJ3)
ASLRGSSASKIIF

SEQ ID NO: 13938 - protein, 15 aa, Homo sapiens
  CDR3 for beta chain variable domain of TCR clone 6969 (TRBV28, TRBJ1-3)
CASSMGWASGNTMYF

SEQ ID NO: 13939 - protein, 16 aa, Homo sapiens
  CDR3 for alpha chain variable domain of TCR clone 6970 (TRAV3, TRAJ10)
CAVRDMNAGGGNKLTF

SEQ ID NO: 13940 - protein, 15 aa, Homo sapiens
  CDR3 for beta chain variable domain of TCR clone 6970 (TRBV5-1, TRBJ1-2)
CASSLGSVTNYGYTF

SEQ ID NO: 13941 - protein, 17 aa, Homo sapiens
  CDR3 for alpha chain variable domain of TCR clone 6971 (TRAV3, TRAJ6)
CAVRDGPRAGGSYIPTF

SEQ ID NO: 13942 - protein, 14 aa, Homo sapiens
  CDR3 for beta chain variable domain of TCR clone 6971 (TRBV7-2, TRBJ2-7)
CAGSPKTSFYEQYF

SEQ ID NO: 13943 - protein, 10 aa, Homo sapiens
  CDR3 for alpha chain variable domain of TCR clone 6972 (TRAV1-2, TRAJ31)
CAFFDARLMF

SEQ ID NO: 13944 - protein, 13 aa, Homo sapiens
  CDR3 for beta chain variable domain of TCR clone 6972 (TRBV20-1, TRBJ2-2)
CSASAAGTGELFF

SEQ ID NO: 13945 - protein, 16 aa, Homo sapiens
  CDR3 for alpha chain variable domain of TCR clone 6973 (TRAV30, TRAJ24)
CGTEIVDAYSWGKFQF

SEQ ID NO: 13946 - protein, 14 aa, Homo sapiens
  CDR3 for beta chain variable domain of TCR clone 6973 (TRBV12-5, TRBJ2-5)
CASGSRTHQETQYF

SEQ ID NO: 13947 - protein, 14 aa, Homo sapiens
  CDR3 for alpha chain variable domain of TCR clone 6974 (TRAV12-2, TRAJ13)
CAVKKTGGYQKVNF

SEQ ID NO: 13948 - protein, 15 aa, Homo sapiens
  CDR3 for beta chain variable domain of TCR clone 6974 (TRBV27, TRBJ2-1)
CASSNGGGSSNEQFF

SEQ ID NO: 13949 - protein, 15 aa, Homo sapiens
  CDR3 for alpha chain variable domain of TCR clone 6975 (TRAV29/DV5, TRAJ40)
CAASAQGSGTYKYIF

SEQ ID NO: 13950 - protein, 11 aa, Homo sapiens
  CDR3 for beta chain variable domain of TCR clone 6975 (TRBV29-1, TRBJ2-5)
CSEDRTGTQYF

SEQ ID NO: 13951 - protein, 12 aa, Homo sapiens
  CDR3 for alpha chain variable domain of TCR clone 6976 (TRAV12-3, TRAJ42)
CAPGGSQGNLIF

SEQ ID NO: 13952 - protein, 14 aa, Homo sapiens
  CDR3 for beta chain variable domain of TCR clone 6976 (TRBV5-4, TRBJ1-1)
CASSLDSRRDEAFF

SEQ ID NO: 13953 - protein, 13 aa, Homo sapiens
  CDR3 for alpha chain variable domain of TCR clone 6977 (TRAV2, TRAJ40)
CAVVTSGTYKYIF

SEQ ID NO: 13954 - protein, 12 aa, Homo sapiens
  CDR3 for beta chain variable domain of TCR clone 6977 (TRBV14, TRBJ2-7)
CASSRLKGEQYF

SEQ ID NO: 13955 - protein, 15 aa, Homo sapiens
  CDR3 for alpha chain variable domain of TCR clone 6978 (TRAV26-1, TRAJ52)
CIVSDLGTSYGKLTF

SEQ ID NO: 13956 - protein, 15 aa, Homo sapiens
  CDR3 for beta chain variable domain of TCR clone 6978 (TRBV6-5, TRBJ2-7)
CASSASGRWSYEQYF

SEQ ID NO: 13957 - protein, 11 aa, Homo sapiens
  CDR3 for alpha chain variable domain of TCR clone 6979 (TRAV2, TRAJ33)
CAVESNYQLIW

SEQ ID NO: 13958 - protein, 17 aa, Homo sapiens
  CDR3 for beta chain variable domain of TCR clone 6979 (TRBV13, TRBJ2-3)
CASSLSRVAGGRNTQYF

SEQ ID NO: 13959 - protein, 12 aa, Homo sapiens
  CDR3 for alpha chain variable domain of TCR clone 6980 (TRAV38-1, TRAJ47)
CAFETYGNKLVF

SEQ ID NO: 13960 - protein, 14 aa, Homo sapiens
  CDR3 for beta chain variable domain of TCR clone 6980 (TRBV20-1, TRBJ2-2)
CSAPDTANTGELFF

SEQ ID NO: 13961 - protein, 14 aa, Homo sapiens
  CDR3 for alpha chain variable domain of TCR clone 6981 (TRAV1-2, TRAJ8)
CAVREDTGFQKLVF

SEQ ID NO: 13962 - protein, 18 aa, Homo sapiens
  CDR3 for beta chain variable domain of TCR clone 6981 (TRBV10-3, TRBJ2-7)
CAISESGRPSGGRVEQYF

SEQ ID NO: 13963 - protein, 17 aa, Homo sapiens
  CDR3 for alpha chain variable domain of TCR clone 6982 (TRAV3, TRAJ6)
CAVRDGPRAGGSYILTF

SEQ ID NO: 13964 - protein, 14 aa, Homo sapiens
  CDR3 for beta chain variable domain of TCR clone 6982 (TRBV7-2, TRBJ2-7)
CASSPKTSFYEQYF

SEQ ID NO: 13965 - protein, 14 aa, Homo sapiens
  CDR3 for alpha chain variable domain of TCR clone 6983 (TRAV1-2, TRAJ17)
CALRRGAAGNKLTF

SEQ ID NO: 13966 - protein, 14 aa, Homo sapiens
  CDR3 for beta chain variable domain of TCR clone 6983 (TRBV7-2, TRBJ2-7)
CASSLYPGRYEQYF

SEQ ID NO: 13967 - protein, 12 aa, Homo sapiens
  CDR3 for alpha chain variable domain of TCR clone 6984 (TRAV12-3, TRAJ17)
CAMTLTGNKLTF

SEQ ID NO: 13968 - protein, 12 aa, Homo sapiens
  CDR3 for beta chain variable domain of TCR clone 6984 (TRBV28, TRBJ2-6)
CAIQAGANVLTF

SEQ ID NO: 13969 - protein, 16 aa, Homo sapiens
  CDR3 for alpha chain variable domain of TCR clone 6985 (TRAV3, TRAJ28)
CAVLPRSGAGSYQLTF

SEQ ID NO: 13970 - protein, 18 aa, Homo sapiens
  CDR3 for beta chain variable domain of TCR clone 6985 (TRBV23-1, TRBJ2-7)
CASSQYRRTDSTSSTSGR

SEQ ID NO: 13971 - protein, 15 aa, Homo sapiens
  CDR3 for alpha chain variable domain of TCR clone 6986 (TRAV26-1, TRAJ29)
CTVRVEGSGNTPLVF

SEQ ID NO: 13972 - protein, 15 aa, Homo sapiens
  CDR3 for beta chain variable domain of TCR clone 6986 (TRBV7-9, TRBJ1-5)
CASSQGHQPNQPQHF

SEQ ID NO: 13973 - protein, 13 aa, Homo sapiens
  CDR3 for alpha chain variable domain of TCR clone 6987 (TRAV8-6, TRAJ21)
CAVSPSSLNKFYF

SEQ ID NO: 13974 - protein, 13 aa, Homo sapiens
  CDR3 for beta chain variable domain of TCR clone 6987 (TRBV29-1, TRBJ2-1)
CSVEGGRVNEQFF

SEQ ID NO: 13975 - protein, 12 aa, Homo sapiens
  CDR3 for alpha chain variable domain of TCR clone 6988 (TRAV8-3, TRAJ26)
CAGDSYGQNSVF

SEQ ID NO: 13976 - protein, 13 aa, Homo sapiens
  CDR3 for beta chain variable domain of TCR clone 6988 (TRBV27, TRBJ1-1)
CASSLSIGAEAFF

SEQ ID NO: 13977 - protein, 13 aa, Homo sapiens
  CDR3 for alpha chain variable domain of TCR clone 6989 (TRAV9-2, TRAJ49)
CALRHFTGNQFYF

SEQ ID NO: 13978 - protein, 16 aa, Homo sapiens
  CDR3 for beta chain variable domain of TCR clone 6989 (TRBV7-9, TRBJ2-1)
CASSPRLGSSYNEQFF

SEQ ID NO: 13979 - protein, 13 aa, Homo sapiens
  CDR3 for alpha chain variable domain of TCR clone 6990 (TRAV12-1, TRAJ39)
CVALNNAGNMLTF

SEQ ID NO: 13980 - protein, 17 aa, Homo sapiens
  CDR3 for beta chain variable domain of TCR clone 6990 (TRBV6-1, TRBJ2-3)
CASSEFVTGGPTDTQYF

SEQ ID NO: 13981 - protein, 12 aa, Homo sapiens
  CDR3 for alpha chain variable domain of TCR clone 6991 (TRAV8-3, TRAJ7)
CAVEGGNNRLAF

SEQ ID NO: 13982 - protein, 15 aa, Homo sapiens
  CDR3 for beta chain variable domain of TCR clone 6991 (TRBV10-3, TRBJ2-1)
CAISDVQDRAYEQFF

SEQ ID NO: 13983 - protein, 15 aa, Homo sapiens
  CDR3 for alpha chain variable domain of TCR clone 6992 (TRAV12-3, TRAJ6)
CAMSATTGGSYIPTF

SEQ ID NO: 13984 - protein, 12 aa, Homo sapiens
  CDR3 for beta chain variable domain of TCR clone 6992 (TRBV11-2, TRBJ2-2)
CASSLGGGELFF

SEQ ID NO: 13985 - protein, 14 aa, Homo sapiens
  CDR3 for alpha chain variable domain of TCR clone 6993 (TRAV17, TRAJ34)
CATVPTYNTDKLIF

SEQ ID NO: 13986 - protein, 18 aa, Homo sapiens
  CDR3 for beta chain variable domain of TCR clone 6993 (TRBV23-1, TRBJ2-1)
TVSLRQRSEKWLKNEQFF

SEQ ID NO: 13987 - protein, 15 aa, Homo sapiens
  CDR3 for alpha chain variable domain of TCR clone 6994 (TRAV21, TRAJ52)
CAVRGGGTSYGKLTF

SEQ ID NO: 13988 - protein, 12 aa, Homo sapiens
  CDR3 for beta chain variable domain of TCR clone 6994 (TRBV11-2, TRBJ2-2)
CASSLGGGELFF

SEQ ID NO: 13989 - protein, 15 aa, Homo sapiens
  CDR3 for alpha chain variable domain of TCR clone 6995 (TRAV8-4, TRAJ56)
CAVSGGTGANSKLTF

SEQ ID NO: 13990 - protein, 14 aa, Homo sapiens
  CDR3 for beta chain variable domain of TCR clone 6995 (TRBV7-9, TRBJ2-1)
CASSPKGGADEQFF

SEQ ID NO: 13991 - protein, 13 aa, Homo sapiens
  CDR3 for alpha chain variable domain of TCR clone 6996 (TRAV12-1, TRAJ6)
CVVFPGGSYIPTF

SEQ ID NO: 13992 - protein, 14 aa, Homo sapiens
  CDR3 for beta chain variable domain of TCR clone 6996 (TRBV20-1, TRBJ1-3)
CSASPTGAGNTMYF

SEQ ID NO: 13993 - protein, 15 aa, Homo sapiens
  CDR3 for alpha chain variable domain of TCR clone 6997 (TRAV2, TRAJ9)
CAVEDRGTGGFKTIF

SEQ ID NO: 13994 - protein, 13 aa, Homo sapiens
  CDR3 for beta chain variable domain of TCR clone 6997 (TRBV19, TRBJ1-5)
CASSIGGNQPQHF

SEQ ID NO: 13995 - protein, 14 aa, Homo sapiens
  CDR3 for alpha chain variable domain of TCR clone 6998 (TRAV12-3, TRAJ10)
SHLPLTGGGNKLTF

SEQ ID NO: 13996 - protein, 20 aa, Homo sapiens
  CDR3 for beta chain variable domain of TCR clone 6998 (TRBV7-8, TRBJ2-2)
CASSHLFPGPTIHITGELFF

SEQ ID NO: 13997 - protein, 14 aa, Homo sapiens
  CDR3 for alpha chain variable domain of TCR clone 6999 (TRAV1-2, TRAJ16)
CAVNRFSDGQKLLF

SEQ ID NO: 13998 - protein, 16 aa, Homo sapiens
  CDR3 for beta chain variable domain of TCR clone 6999 (TRBV28, TRBJ2-1)
CASSSSYSGSLNEQFF

SEQ ID NO: 13999 - protein, 14 aa, Homo sapiens
  CDR3 for alpha chain variable domain of TCR clone 7000 (TRAV12-2, TRAJ38)
CAPQTAGNNRKLIW

SEQ ID NO: 14000 - protein, 18 aa, Homo sapiens
  CDR3 for beta chain variable domain of TCR clone 7000 (TRBV28, TRBJ1-3)
CASKTPVGQIGSGNTIYF

SEQ ID NO: 14001 - protein, 15 aa, Homo sapiens
  CDR3 for alpha chain variable domain of TCR clone 7001 (TRAV8-2, TRAJ36)
CVVSENWGKQPLLWD

SEQ ID NO: 14002 - protein, 15 aa, Homo sapiens
  CDR3 for beta chain variable domain of TCR clone 7001 (TRBV20-1, TRBJ2-5)
CSAEGTGGLQETQYF

SEQ ID NO: 14003 - protein, 14 aa, Homo sapiens
  CDR3 for alpha chain variable domain of TCR clone 7002 (TRAV12-2, TRAJ13)
CAVKKTGGYQKVTF

SEQ ID NO: 14004 - protein, 16 aa, Homo sapiens
  CDR3 for beta chain variable domain of TCR clone 7002 (TRBV9, TRBJ2-3)
CASSGTSGKDTDTQYF

SEQ ID NO: 14005 - protein, 16 aa, Homo sapiens
  CDR3 for alpha chain variable domain of TCR clone 7003 (TRAV9-2, TRAJ53)
CALRKNSGGSNYKLTF

SEQ ID NO: 14006 - protein, 14 aa, Homo sapiens
  CDR3 for beta chain variable domain of TCR clone 7003 (TRBV28, TRBJ2-1)
CASSLNGRNNEQFF

SEQ ID NO: 14007 - protein, 13 aa, Homo sapiens
  CDR3 for alpha chain variable domain of TCR clone 7004 (TRAV39, TRAJ49)
CAVDRNTGNQFYF

SEQ ID NO: 14008 - protein, 12 aa, Homo sapiens
  CDR3 for beta chain variable domain of TCR clone 7004 (TRBV24-1, TRBJ1-1)
CATLYPDTEAFF

SEQ ID NO: 14009 - protein, 13 aa, Homo sapiens
  CDR3 for alpha chain variable domain of TCR clone 7005 (TRAV1-2, TRAJ12)
CAVSMDSSYKLIF

SEQ ID NO: 14010 - protein, 14 aa, Homo sapiens
  CDR3 for beta chain variable domain of TCR clone 7005 (TRBV20-1, TRBJ2-7)
CSAKRGRSSYEQYF

SEQ ID NO: 14011 - protein, 14 aa, Homo sapiens
  CDR3 for alpha chain variable domain of TCR clone 7006 (TRAV13-1, TRAJ35)
CAASKGGFGNVLHC

SEQ ID NO: 14012 - protein, 12 aa, Homo sapiens
  CDR3 for beta chain variable domain of TCR clone 7006 (TRBV7-3, TRBJ1-1)
CQQPGLGAEAFF

SEQ ID NO: 14013 - protein, 14 aa, Homo sapiens
  CDR3 for alpha chain variable domain of TCR clone 7007 (TRAV29/DV5, TRAJ36)
CAARRKTGANNLFF

SEQ ID NO: 14014 - protein, 12 aa, Homo sapiens
  CDR3 for beta chain variable domain of TCR clone 7007 (TRBV11-2, TRBJ2-2)
CASSLGGGELFF

SEQ ID NO: 14015 - protein, 12 aa, Homo sapiens
  CDR3 for alpha chain variable domain of TCR clone 7008 (TRAV27, )
CAGALKLATTIS

SEQ ID NO: 14016 - protein, 15 aa, Homo sapiens
  CDR3 for beta chain variable domain of TCR clone 7008 (TRBV7-2, TRBJ2-7)
CASSSVAGQTYEQYF

SEQ ID NO: 14017 - protein, 13 aa, Homo sapiens
  CDR3 for alpha chain variable domain of TCR clone 7009 (TRAV2, TRAJ40)
CAVVTSGTYKYIF

SEQ ID NO: 14018 - protein, 14 aa, Homo sapiens
  CDR3 for beta chain variable domain of TCR clone 7009 (TRBV19, TRBJ2-1)
CASPTFVLSDEQFF

SEQ ID NO: 14019 - protein, 13 aa, Homo sapiens
  CDR3 for alpha chain variable domain of TCR clone 7010 (TRAV12-2, TRAJ3)
CAAPYSSASKIIF

SEQ ID NO: 14020 - protein, 18 aa, Homo sapiens
  CDR3 for beta chain variable domain of TCR clone 7010 (TRBV4-1, TRBJ1-5)
CASSQDPPGAGGNQPQHF

SEQ ID NO: 14021 - protein, 16 aa, Homo sapiens
  CDR3 for alpha chain variable domain of TCR clone 7011 (TRAV21, TRAJ37)
CAVRTAGPSNTGKLIF

SEQ ID NO: 14022 - protein, 13 aa, Homo sapiens
  CDR3 for beta chain variable domain of TCR clone 7011 (TRBV7-9, TRBJ2-5)
CASLPSGRETQYF

SEQ ID NO: 14023 - protein, 18 aa, Homo sapiens
  CDR3 for alpha chain variable domain of TCR clone 7012 (TRAV21, TRAJ52)
CAVRPPPAGGTSYGKLTF

SEQ ID NO: 14024 - protein, 17 aa, Homo sapiens
  CDR3 for beta chain variable domain of TCR clone 7012 (TRBV13, TRBJ2-3)
CASSLSRVAGGRNTQYF

SEQ ID NO: 14025 - protein, 15 aa, Homo sapiens
  CDR3 for alpha chain variable domain of TCR clone 7013 (TRAV8-3, TRAJ45)
CASSYSGGGSDGLTF

SEQ ID NO: 14026 - protein, 13 aa, Homo sapiens
  CDR3 for beta chain variable domain of TCR clone 7013 (TRBV10-3, TRBJ2-7)
CASKLAVNYEQYF

SEQ ID NO: 14027 - protein, 16 aa, Homo sapiens
  CDR3 for alpha chain variable domain of TCR clone 7014 (TRAV1-2, TRAJ10)
CAVRGVLTGGGNKLTF

SEQ ID NO: 14028 - protein, 14 aa, Homo sapiens
  CDR3 for beta chain variable domain of TCR clone 7014 (TRBV4-1, TRBJ2-2)
CASSQAVNTGELFF

SEQ ID NO: 14029 - protein, 14 aa, Homo sapiens
  CDR3 for alpha chain variable domain of TCR clone 7015 (TRAV36/DV7, TRAJ16)
CAVEADSDGQKLLF

SEQ ID NO: 14030 - protein, 15 aa, Homo sapiens
  CDR3 for beta chain variable domain of TCR clone 7015 (TRBV5-4, TRBJ2-3)
CATKSSGGALDTQYF

SEQ ID NO: 14031 - protein, 12 aa, Homo sapiens
  CDR3 for alpha chain variable domain of TCR clone 7016 (TRAV12-3, TRAJ20)
CAMVRGDYKLSF

SEQ ID NO: 14032 - protein, 11 aa, Homo sapiens
  CDR3 for beta chain variable domain of TCR clone 7016 (TRBV29-1, TRBJ2-5)
CSEDRTGTQYF

SEQ ID NO: 14033 - protein, 14 aa, Homo sapiens
  CDR3 for alpha chain variable domain of TCR clone 7017 (TRAV35, TRAJ22)
CAGLRPGSARQLTS

SEQ ID NO: 14034 - protein, 15 aa, Homo sapiens
  CDR3 for beta chain variable domain of TCR clone 7017 (TRBV12-4, TRBJ2-5)
CASSPPTGLQETQYF

SEQ ID NO: 14035 - protein, 13 aa, Homo sapiens
  CDR3 for alpha chain variable domain of TCR clone 7018 (TRAV13-2, TRAJ48)
CAEMDFGNEKLTF

SEQ ID NO: 14036 - protein, 15 aa, Homo sapiens
  CDR3 for beta chain variable domain of TCR clone 7018 (TRBV2, TRBJ2-1)
CASSELAGSYNEQFF

SEQ ID NO: 14037 - protein, 17 aa, Homo sapiens
  CDR3 for alpha chain variable domain of TCR clone 7019 (TRAV3, TRAJ6)
CAVRDGPRAGGSYIPTF

SEQ ID NO: 14038 - protein, 15 aa, Homo sapiens
  CDR3 for beta chain variable domain of TCR clone 7019 (TRBV28, TRBJ2-1)
CASSIIAGGRSEQFF

SEQ ID NO: 14039 - protein, 14 aa, Homo sapiens
  CDR3 for alpha chain variable domain of TCR clone 7020 (TRAV12-2, TRAJ53)
CAVKGGGSNYKLTF

SEQ ID NO: 14040 - protein, 14 aa, Homo sapiens
  CDR3 for beta chain variable domain of TCR clone 7020 (TRBV5-4, TRBJ1-1)
CASSLDSRRDEAFF

SEQ ID NO: 14041 - protein, 18 aa, Homo sapiens
  CDR3 for alpha chain variable domain of TCR clone 7021 (TRAV21, TRAJ52)
CAVSPSPAGGTSYGKLTF

SEQ ID NO: 14042 - protein, 17 aa, Homo sapiens
  CDR3 for beta chain variable domain of TCR clone 7021 (TRBV13, TRBJ2-3)
CASSLSRVAGGRNTQYF

SEQ ID NO: 14043 - protein, 12 aa, Homo sapiens
  CDR3 for alpha chain variable domain of TCR clone 7022 (TRAV1-2, TRAJ33)
CAALDSNYQLIW

SEQ ID NO: 14044 - protein, 16 aa, Homo sapiens
  CDR3 for beta chain variable domain of TCR clone 7022 (TRBV24-1, TRBJ2-3)
CATSDRRQDLTDTQYF

SEQ ID NO: 14045 - protein, 17 aa, Homo sapiens
  CDR3 for alpha chain variable domain of TCR clone 7023 (TRAV3, TRAJ42)
CAVRDRDYGGSQGNLIF

SEQ ID NO: 14046 - protein, 16 aa, Homo sapiens
  CDR3 for beta chain variable domain of TCR clone 7023 (TRBV7-3, TRBJ2-2)
CASSLKRGTLSGELFF

SEQ ID NO: 14047 - protein, 12 aa, Homo sapiens
  CDR3 for alpha chain variable domain of TCR clone 7024 (TRAV8-3, TRAJ27)
CAVGTMQANQPL

SEQ ID NO: 14048 - protein, 13 aa, Homo sapiens
  CDR3 for beta chain variable domain of TCR clone 7024 (TRBV24-1, TRBJ2-2)
CATSETNTGELFF

SEQ ID NO: 14049 - protein, 13 aa, Homo sapiens
  CDR3 for alpha chain variable domain of TCR clone 7025 (TRAV12-1, TRAJ29)
CVVVVSGNTPLVF

SEQ ID NO: 14050 - protein, 13 aa, Homo sapiens
  CDR3 for beta chain variable domain of TCR clone 7025 (TRBV7-8, TRBJ2-7)
CASSFAGLYEQYF

SEQ ID NO: 14051 - protein, 13 aa, Homo sapiens
  CDR3 for alpha chain variable domain of TCR clone 7026 (TRAV12-1, TRAJ22)
CVVYSGSARQLTF

SEQ ID NO: 14052 - protein, 15 aa, Homo sapiens
  CDR3 for beta chain variable domain of TCR clone 7026 (TRBV20-1, TRBJ2-7)
CSARDRVSGMDEQYF

SEQ ID NO: 14053 - protein, 15 aa, Homo sapiens
  CDR3 for alpha chain variable domain of TCR clone 7027 (TRAV29/DV5, TRAJ40)
CAASEGTSGTYKYIF

SEQ ID NO: 14054 - protein, 15 aa, Homo sapiens
  CDR3 for beta chain variable domain of TCR clone 7027 (TRBV27, TRBJ1-5)
CASKIQGAGNQPQHF

SEQ ID NO: 14055 - protein, 16 aa, Homo sapiens
  CDR3 for alpha chain variable domain of TCR clone 7028 (TRAV3, TRAJ37)
CAVRGKGSGNTGKLIF

SEQ ID NO: 14056 - protein, 16 aa, Homo sapiens
  CDR3 for beta chain variable domain of TCR clone 7028 (TRBV10-3, TRBJ2-1)
CAISGVGDGGGGEQFF

SEQ ID NO: 14057 - protein, 17 aa, Homo sapiens
  CDR3 for alpha chain variable domain of TCR clone 7029 (TRAV29/DV5, TRAJ52)
CAATSTADGTSYGKLTF

SEQ ID NO: 14058 - protein, 15 aa, Homo sapiens
  CDR3 for beta chain variable domain of TCR clone 7029 (TRBV3-1, TRBJ2-7)
CASSQEWTGSYEQYF

SEQ ID NO: 14059 - protein, 14 aa, Homo sapiens
  CDR3 for alpha chain variable domain of TCR clone 7030 (TRAV8-3, TRAJ39)
CAVGANNAGNMLTF

SEQ ID NO: 14060 - protein, 19 aa, Homo sapiens
  CDR3 for beta chain variable domain of TCR clone 7030 (TRBV25-1, TRBJ2-2)
CAILVYRVDRGRKTGELFF

SEQ ID NO: 14061 - protein, 14 aa, Homo sapiens
  CDR3 for alpha chain variable domain of TCR clone 7031 (TRAV8-3, TRAJ47)
CAVGAQGYGNKLVF

SEQ ID NO: 14062 - protein, 14 aa, Homo sapiens
  CDR3 for beta chain variable domain of TCR clone 7031 (TRBV6-5, TRBJ2-7)
CASSSGVPPYEQYF

SEQ ID NO: 14063 - protein, 12 aa, Homo sapiens
  CDR3 for alpha chain variable domain of TCR clone 7032 (TRAV12-1, TRAJ40)
CVVYSGTYKYIF

SEQ ID NO: 14064 - protein, 17 aa, Homo sapiens
  CDR3 for beta chain variable domain of TCR clone 7032 (TRBV11-2, TRBJ2-3)
CQQLRGASRGAPNTQYF

SEQ ID NO: 14065 - protein, 14 aa, Homo sapiens
  CDR3 for alpha chain variable domain of TCR clone 7033 (TRAV29/DV5, TRAJ4)
CAATVLGGYNKLIF

SEQ ID NO: 14066 - protein, 17 aa, Homo sapiens
  CDR3 for beta chain variable domain of TCR clone 7033 (TRBV11-2, TRBJ2-1)
CASSLYPPGVEYNEQFF

SEQ ID NO: 14067 - protein, 12 aa, Homo sapiens
  CDR3 for alpha chain variable domain of TCR clone 7034 (TRAV12-3, TRAJ17)
CAMTLTGNKLTF

SEQ ID NO: 14068 - protein, 15 aa, Homo sapiens
  CDR3 for beta chain variable domain of TCR clone 7034 (TRBV20-1, TRBJ2-7)
CSARDRGSGMDEQYF

SEQ ID NO: 14069 - protein, 12 aa, Homo sapiens
  CDR3 for alpha chain variable domain of TCR clone 7035 (TRAV13-1, TRAJ39)
CAASNAGNMLTF

SEQ ID NO: 14070 - protein, 15 aa, Homo sapiens
  CDR3 for beta chain variable domain of TCR clone 7035 (TRBV29-1, TRBJ2-5)
CSVAGASGTQETQYF

SEQ ID NO: 14071 - protein, 14 aa, Homo sapiens
  CDR3 for alpha chain variable domain of TCR clone 7036 (TRAV8-6, TRAJ40)
CAVSATSGTYKYIF

SEQ ID NO: 14072 - protein, 16 aa, Homo sapiens
  CDR3 for beta chain variable domain of TCR clone 7036 (TRBV4-2, TRBJ2-7)
CASSQDGGSLRGEQYF

SEQ ID NO: 14073 - protein, 18 aa, Homo sapiens
  CDR3 for alpha chain variable domain of TCR clone 7037 (TRAV13-1, TRAJ52)
CAAKNPNAGGTSYGKLTF

SEQ ID NO: 14074 - protein, 13 aa, Homo sapiens
  CDR3 for beta chain variable domain of TCR clone 7037 (TRBV20-1, TRBJ1-1)
CSARGGGNTEAFF

SEQ ID NO: 14075 - protein, 16 aa, Homo sapiens
  CDR3 for alpha chain variable domain of TCR clone 7038 (TRAV39, TRAJ32)
CAVDMEYGGATNKLIF

SEQ ID NO: 14076 - protein, 14 aa, Homo sapiens
  CDR3 for beta chain variable domain of TCR clone 7038 (TRBV9, TRBJ2-4)
CASSPSGTSGFQYF

SEQ ID NO: 14077 - protein, 15 aa, Homo sapiens
  CDR3 for alpha chain variable domain of TCR clone 7039 (TRAV3, TRAJ22)
CAVRDRGGSARQLTF

SEQ ID NO: 14078 - protein, 13 aa, Homo sapiens
  CDR3 for beta chain variable domain of TCR clone 7039 (TRBV10-3, TRBJ2-7)
CASKLAVNYEQYF

SEQ ID NO: 14079 - protein, 14 aa, Homo sapiens
  CDR3 for alpha chain variable domain of TCR clone 7040 (TRAV20, TRAJ40)
CAVSLTSGTYKYIF

SEQ ID NO: 14080 - protein, 21 aa, Homo sapiens
  CDR3 for beta chain variable domain of TCR clone 7040 (TRBV27, TRBJ1-1)
CASSFLETARREFSLKLSLDK

SEQ ID NO: 14081 - protein, 13 aa, Homo sapiens
  CDR3 for alpha chain variable domain of TCR clone 7041 (TRAV12-3, TRAJ7)
CAMSASGNNRLAF

SEQ ID NO: 14082 - protein, 14 aa, Homo sapiens
  CDR3 for beta chain variable domain of TCR clone 7041 (TRBV13, TRBJ2-5)
CASSLGPRGETQYL

SEQ ID NO: 14083 - protein, 22 aa, Homo sapiens
  CDR3 for alpha chain variable domain of TCR clone 7042 (TRAV8-3, TRAJ32)
CAVEVVLQTSSSLELALCLLSS

SEQ ID NO: 14084 - protein, 15 aa, Homo sapiens
  CDR3 for beta chain variable domain of TCR clone 7042 (TRBV7-2, TRBJ2-1)
CASSSRTSREDEQFF

SEQ ID NO: 14085 - protein, 13 aa, Homo sapiens
  CDR3 for alpha chain variable domain of TCR clone 7043 (TRAV35, TRAJ42)
CAGFPGSQGNLIF

SEQ ID NO: 14086 - protein, 13 aa, Homo sapiens
  CDR3 for beta chain variable domain of TCR clone 7043 (TRBV10-3, TRBJ2-7)
CASKLAVNYEQYF

SEQ ID NO: 14087 - protein, 12 aa, Homo sapiens
  CDR3 for alpha chain variable domain of TCR clone 7044 (TRAV8-4, TRAJ37)
CAVSGNTGKLIF

SEQ ID NO: 14088 - protein, 17 aa, Homo sapiens
  CDR3 for beta chain variable domain of TCR clone 7044 (TRBV7-2, TRBJ2-3)
CASSPQGRARVQDTQYF

SEQ ID NO: 14089 - protein, 14 aa, Homo sapiens
  CDR3 for alpha chain variable domain of TCR clone 7045 (TRAV12-1, TRAJ7)
CVVTPPHGNNRLAF

SEQ ID NO: 14090 - protein, 14 aa, Homo sapiens
  CDR3 for beta chain variable domain of TCR clone 7045 (TRBV28, TRBJ2-7)
CASSLRARGNEQYF

SEQ ID NO: 14091 - protein, 15 aa, Homo sapiens
  CDR3 for alpha chain variable domain of TCR clone 7046 (TRAV19, TRAJ9)
CALSLPDTGGFKTIF

SEQ ID NO: 14092 - protein, 17 aa, Homo sapiens
  CDR3 for beta chain variable domain of TCR clone 7046 (TRBV20-1, TRBJ2-1)
CSARDPLAGVWDNEQFF

SEQ ID NO: 14093 - protein, 15 aa, Homo sapiens
  CDR3 for alpha chain variable domain of TCR clone 7047 (TRAV21, TRAJ18)
CAVRDRGSTLGRLYF

SEQ ID NO: 14094 - protein, 17 aa, Homo sapiens
  CDR3 for beta chain variable domain of TCR clone 7047 (TRBV7-2, TRBJ2-3)
CASSSYSGTRRADTQYF

SEQ ID NO: 14095 - protein, 12 aa, Homo sapiens
  CDR3 for alpha chain variable domain of TCR clone 7048 (TRAV12-2, TRAJ31)
CAVNTPDARLMF

SEQ ID NO: 14096 - protein, 12 aa, Homo sapiens
  CDR3 for beta chain variable domain of TCR clone 7048 (TRBV7-8, TRBJ2-7)
CASSLGDREQYF

SEQ ID NO: 14097 - protein, 14 aa, Homo sapiens
  CDR3 for alpha chain variable domain of TCR clone 7049 (TRAV12-2, TRAJ17)
CAVLFKAAGNKLTF

SEQ ID NO: 14098 - protein, 17 aa, Homo sapiens
  CDR3 for beta chain variable domain of TCR clone 7049 (TRBV20-1, TRBJ2-2)
CSASGSGQGGLTGGLFF

SEQ ID NO: 14099 - protein, 14 aa, Homo sapiens
  CDR3 for alpha chain variable domain of TCR clone 7050 (TRAV6, TRAJ6)
CALPTSGGSYIPTF

SEQ ID NO: 14100 - protein, 15 aa, Homo sapiens
  CDR3 for beta chain variable domain of TCR clone 7050 (TRBV20-1, TRBJ2-7)
CSAESGTSGAYEQYF

SEQ ID NO: 14101 - protein, 14 aa, Homo sapiens
  CDR3 for alpha chain variable domain of TCR clone 7051 (TRAV12-2, TRAJ13)
CAVKKTGGDQKVTF

SEQ ID NO: 14102 - protein, 15 aa, Homo sapiens
  CDR3 for beta chain variable domain of TCR clone 7051 (TRBV27, TRBJ2-1)
CASSNGGGSSNEQFF

SEQ ID NO: 14103 - protein, 13 aa, Homo sapiens
  CDR3 for alpha chain variable domain of TCR clone 7052 (TRAV12-3, TRAJ33)
CAMSVNSNYQLIW

SEQ ID NO: 14104 - protein, 14 aa, Homo sapiens
  CDR3 for beta chain variable domain of TCR clone 7052 (TRBV12-5, TRBJ2-5)
CASGSRTHQETQYF

SEQ ID NO: 14105 - protein, 12 aa, Homo sapiens
  CDR3 for alpha chain variable domain of TCR clone 7053 (TRAV36/DV7, TRAJ40)
CAVGTGTYKYIF

SEQ ID NO: 14106 - protein, 13 aa, Homo sapiens
  CDR3 for beta chain variable domain of TCR clone 7053 (TRBV7-7, TRBJ1-5)
CASSPGKNQPQHF

SEQ ID NO: 14107 - protein, 14 aa, Homo sapiens
  CDR3 for alpha chain variable domain of TCR clone 7054 (TRAV12-1, TRAJ17)
CVVNPKAAGNKLTF

SEQ ID NO: 14108 - protein, 15 aa, Homo sapiens
  CDR3 for beta chain variable domain of TCR clone 7054 (TRBV7-2, TRBJ2-3)
CASSLAGAFIDTQYF

SEQ ID NO: 14109 - protein, 14 aa, Homo sapiens
  CDR3 for alpha chain variable domain of TCR clone 7055 (TRAV12-1, TRAJ40)
CVVNRDSGTYKYIF

SEQ ID NO: 14110 - protein, 10 aa, Homo sapiens
  CDR3 for beta chain variable domain of TCR clone 7055 (TRBV20-1, TRBJ2-1)
GASSYNEQFF

SEQ ID NO: 14111 - protein, 14 aa, Homo sapiens
  CDR3 for alpha chain variable domain of TCR clone 7056 (TRAV16, TRAJ37)
CALDISGNTGKLIF

SEQ ID NO: 14112 - protein, 11 aa, Homo sapiens
  CDR3 for beta chain variable domain of TCR clone 7056 (TRBV6-1, TRBJ2-1)
CASISSNEQFF

SEQ ID NO: 14113 - protein, 15 aa, Homo sapiens
  CDR3 for alpha chain variable domain of TCR clone 7057 (TRAV17, TRAJ35)
CATAFVIGFGNVLHC

SEQ ID NO: 14114 - protein, 14 aa, Homo sapiens
  CDR3 for beta chain variable domain of TCR clone 7057 (TRBV12-4, TRBJ2-5)
CASSQSGGGETQYF

SEQ ID NO: 14115 - protein, 12 aa, Homo sapiens
  CDR3 for alpha chain variable domain of TCR clone 7058 (TRAV12-3, TRAJ17)
CAMTLTGNKLTF

SEQ ID NO: 14116 - protein, 15 aa, Homo sapiens
  CDR3 for beta chain variable domain of TCR clone 7058 (TRBV20-1, TRBJ2-7)
CSARNRVSGMDEQYF

SEQ ID NO: 14117 - protein, 13 aa, Homo sapiens
  CDR3 for alpha chain variable domain of TCR clone 7059 (TRAV2, TRAJ29)
CAVEPTGNTPLVF

SEQ ID NO: 14118 - protein, 14 aa, Homo sapiens
  CDR3 for beta chain variable domain of TCR clone 7059 (TRBV7-3, TRBJ2-2)
CASSLLGSTGELFF

SEQ ID NO: 14119 - protein, 16 aa, Homo sapiens
  CDR3 for alpha chain variable domain of TCR clone 7060 (TRAV30, TRAJ24)
CGTEIVDADSWWKFQF

SEQ ID NO: 14120 - protein, 14 aa, Homo sapiens
  CDR3 for beta chain variable domain of TCR clone 7060 (TRBV12-5, TRBJ2-5)
CASGSRTHQETQYF

SEQ ID NO: 14121 - protein, 11 aa, Homo sapiens
  CDR3 for alpha chain variable domain of TCR clone 7061 (TRAV16, TRAJ26)
CALTRWSEFCL

SEQ ID NO: 14122 - protein, 15 aa, Homo sapiens
  CDR3 for beta chain variable domain of TCR clone 7061 (TRBV6-3, TRBJ2-7)
CASSSPGTVFYEQYF

SEQ ID NO: 14123 - protein, 13 aa, Homo sapiens
  CDR3 for alpha chain variable domain of TCR clone 7062 (TRAV27, TRAJ45)
CRSSGGGADGLTF

SEQ ID NO: 14124 - protein, 17 aa, Homo sapiens
  CDR3 for beta chain variable domain of TCR clone 7062 (TRBV11-2, TRBJ2-1)
CASSLYPPGVEYNEQFL

SEQ ID NO: 14125 - protein, 17 aa, Homo sapiens
  CDR3 for alpha chain variable domain of TCR clone 7063 (TRAV3, TRAJ6)
RAVRDGPRAGGSYIPTF

SEQ ID NO: 14126 - protein, 14 aa, Homo sapiens
  CDR3 for beta chain variable domain of TCR clone 7063 (TRBV7-2, TRBJ2-7)
CASSPKTSFYEQYF

SEQ ID NO: 14127 - protein, 15 aa, Homo sapiens
  CDR3 for alpha chain variable domain of TCR clone 7064 (TRAV23/DV6, TRAJ18)
CAARYRGSTLGRLYF

SEQ ID NO: 14128 - protein, 15 aa, Homo sapiens
  CDR3 for beta chain variable domain of TCR clone 7064 (TRBV7-8, TRBJ2-1)
CASSLADSLYNEQFF

SEQ ID NO: 14129 - protein, 11 aa, Homo sapiens
  CDR3 for alpha chain variable domain of TCR clone 7065 (TRAV27, TRAJ20)
CAGADDYKLSF

SEQ ID NO: 14130 - protein, 13 aa, Homo sapiens
  CDR3 for beta chain variable domain of TCR clone 7065 (TRBV11-3, TRBJ1-2)
CASSQRTSRGYTF

SEQ ID NO: 14131 - protein, 12 aa, Homo sapiens
  CDR3 for alpha chain variable domain of TCR clone 7066 (TRAV17, TRAJ16)
CATVLPGQKLLF

SEQ ID NO: 14132 - protein, 15 aa, Homo sapiens
  CDR3 for beta chain variable domain of TCR clone 7066 (TRBV6-3, TRBJ2-2)
CASSFLATLTGELFF

SEQ ID NO: 14133 - protein, 15 aa, Homo sapiens
  CDR3 for alpha chain variable domain of TCR clone 7067 (TRAV12-1, TRAJ45)
CVVLSGGGGADGLTF

SEQ ID NO: 14134 - protein, 13 aa, Homo sapiens
  CDR3 for beta chain variable domain of TCR clone 7067 (TRBV5-4, TRBJ2-1)
CASSFLAGDEQFF

SEQ ID NO: 14135 - protein, 15 aa, Homo sapiens
  CDR3 for alpha chain variable domain of TCR clone 7068 (TRAV8-2, TRAJ15)
CVVTMGNQAGTALIF

SEQ ID NO: 14136 - protein, 14 aa, Homo sapiens
  CDR3 for beta chain variable domain of TCR clone 7068 (TRBV12-5, TRBJ2-5)
CASGSRTHQETQYF

SEQ ID NO: 14137 - protein, 18 aa, Homo sapiens
  CDR3 for alpha chain variable domain of TCR clone 7069 (TRAV21, TRAJ52)
CAVRPSPAGGASYGKLTF

SEQ ID NO: 14138 - protein, 17 aa, Homo sapiens
  CDR3 for beta chain variable domain of TCR clone 7069 (TRBV13, TRBJ2-3)
CASSLSRVAGGRNTQYF

SEQ ID NO: 14139 - protein, 16 aa, Homo sapiens
  CDR3 for alpha chain variable domain of TCR clone 7070 (TRAV30, TRAJ24)
CGTEIVDADSWGKFQF

SEQ ID NO: 14140 - protein, 20 aa, Homo sapiens
  CDR3 for beta chain variable domain of TCR clone 7070 (TRBV19, TRBJ2-1)
CASSISRTVTSTRLNNEQFF

SEQ ID NO: 14141 - protein, 14 aa, Homo sapiens
  CDR3 for alpha chain variable domain of TCR clone 7071 (TRAV35, TRAJ50)
CAGHRKTSYDKVIF

SEQ ID NO: 14142 - protein, 17 aa, Homo sapiens
  CDR3 for beta chain variable domain of TCR clone 7071 (TRBV7-8, TRBJ2-6)
CASSAGTGGAGANVLTF

SEQ ID NO: 14143 - protein, 14 aa, Homo sapiens
  CDR3 for alpha chain variable domain of TCR clone 7072 (TRAV16, TRAJ54)
CALSLIQGAQKLVS

SEQ ID NO: 14144 - protein, 17 aa, Homo sapiens
  CDR3 for beta chain variable domain of TCR clone 7072 (TRBV11-2, TRBJ2-4)
CASSSVGPGGHRNIQYF

SEQ ID NO: 14145 - protein, 12 aa, Homo sapiens
  CDR3 for alpha chain variable domain of TCR clone 7073 (TRAV8-6, TRAJ11)
CAVSEGYSTLTF

SEQ ID NO: 14146 - protein, 15 aa, Homo sapiens
  CDR3 for beta chain variable domain of TCR clone 7073 (TRBV7-2, TRBJ2-5)
CASTSRSGFVETQYF

SEQ ID NO: 14147 - protein, 16 aa, Homo sapiens
  CDR3 for alpha chain variable domain of TCR clone 7074 (TRAV30, TRAJ24)
CGTEIVDDDSWGKFQF

SEQ ID NO: 14148 - protein, 14 aa, Homo sapiens
  CDR3 for beta chain variable domain of TCR clone 7074 (TRBV12-5, TRBJ2-5)
CASGSRTHQETQYF

SEQ ID NO: 14149 - protein, 16 aa, Homo sapiens
  CDR3 for alpha chain variable domain of TCR clone 7075 (TRAV12-3, TRAJ53)
CAMSPGSGGGNYKLTF

SEQ ID NO: 14150 - protein, 11 aa, Homo sapiens
  CDR3 for beta chain variable domain of TCR clone 7075 (TRBV29-1, TRBJ2-5)
CSEDRTGTQYF

SEQ ID NO: 14151 - protein, 15 aa, Homo sapiens
  CDR3 for alpha chain variable domain of TCR clone 7076 (TRAV8-3, TRAJ11)
CAVGLLNSGYSTLTF

SEQ ID NO: 14152 - protein, 16 aa, Homo sapiens
  CDR3 for beta chain variable domain of TCR clone 7076 (TRBV6-6, TRBJ2-1)
CASSYSFSGSYNEQFF

SEQ ID NO: 14153 - protein, 20 aa, Homo sapiens
  CDR3 for alpha chain variable domain of TCR clone 7077 (TRAV26-1, TRAJ52)
CCVLLHRPSAGGTSYGKLTF

SEQ ID NO: 14154 - protein, 14 aa, Homo sapiens
  CDR3 for beta chain variable domain of TCR clone 7077 (TRBV7-2, TRBJ1-4)
CASSHSKTNEKLFF

SEQ ID NO: 14155 - protein, 17 aa, Homo sapiens
  CDR3 for alpha chain variable domain of TCR clone 7078 (TRAV3, TRAJ6)
CAVRDGPRAGGSYILTF

SEQ ID NO: 14156 - protein, 20 aa, Homo sapiens
  CDR3 for beta chain variable domain of TCR clone 7078 (TRBV28, TRBJ2-1)
CASTPIGRSPGLAGGNEQFF

SEQ ID NO: 14157 - protein, 14 aa, Homo sapiens
  CDR3 for alpha chain variable domain of TCR clone 7079 (TRAV12-1, TRAJ4)
CGEQRSGGYNKLIF

SEQ ID NO: 14158 - protein, 15 aa, Homo sapiens
  CDR3 for beta chain variable domain of TCR clone 7079 (TRBV6-3, TRBJ2-7)
CASSSPGTVFYEQYF

SEQ ID NO: 14159 - protein, 11 aa, Homo sapiens
  CDR3 for alpha chain variable domain of TCR clone 7080 (TRAV3, TRAJ21)
CAVGTFNKFYF

SEQ ID NO: 14160 - protein, 16 aa, Homo sapiens
  CDR3 for beta chain variable domain of TCR clone 7080 (TRBV19, TRBJ2-1)
CASSKAGPSSYNEQFF

SEQ ID NO: 14161 - protein, 14 aa, Homo sapiens
  CDR3 for alpha chain variable domain of TCR clone 7081 (TRAV2, TRAJ3)
CAVEDNSSASKIIF

SEQ ID NO: 14162 - protein, 14 aa, Homo sapiens
  CDR3 for beta chain variable domain of TCR clone 7081 (TRBV6-3, TRBJ2-7)
CASRISGGPGEQYF

SEQ ID NO: 14163 - protein, 14 aa, Homo sapiens
  CDR3 for alpha chain variable domain of TCR clone 7082 (TRAV1-2, TRAJ16)
CAVNRFSDGQKLLF

SEQ ID NO: 14164 - protein, 13 aa, Homo sapiens
  CDR3 for beta chain variable domain of TCR clone 7082 (TRBV6-1, TRBJ1-1)
CASSRQGNTEAFF

SEQ ID NO: 14165 - protein, 13 aa, Homo sapiens
  CDR3 for alpha chain variable domain of TCR clone 7083 (TRAV20, TRAJ54)
CAVQAGGAQKLVF

SEQ ID NO: 14166 - protein, 14 aa, Homo sapiens
  CDR3 for beta chain variable domain of TCR clone 7083 (TRBV4-1, TRBJ2-2)
CASSQAVNTGELFF

SEQ ID NO: 14167 - protein, 13 aa, Homo sapiens
  CDR3 for alpha chain variable domain of TCR clone 7084 (TRAV21, TRAJ27)
CAARPGNAGKSTF

SEQ ID NO: 14168 - protein, 13 aa, Homo sapiens
  CDR3 for beta chain variable domain of TCR clone 7084 (TRBV19, TRBJ1-2)
CASSVPGQDGYTF

SEQ ID NO: 14169 - protein, 14 aa, Homo sapiens
  CDR3 for alpha chain variable domain of TCR clone 7085 (TRAV9-2, TRAJ39)
CALYIYNAGNMLTF

SEQ ID NO: 14170 - protein, 14 aa, Homo sapiens
  CDR3 for beta chain variable domain of TCR clone 7085 (TRBV7-2, TRBJ2-7)
CASRSQGAAYEQYF

SEQ ID NO: 14171 - protein, 16 aa, Homo sapiens
  CDR3 for alpha chain variable domain of TCR clone 7086 (TRAV20, TRAJ53)
CAVQGNSGGSNYKLTF

SEQ ID NO: 14172 - protein, 16 aa, Homo sapiens
  CDR3 for beta chain variable domain of TCR clone 7086 (TRBV29-1, TRBJ2-6)
CSVEDITYSGANVLTF

SEQ ID NO: 14173 - protein, 15 aa, Homo sapiens
  CDR3 for alpha chain variable domain of TCR clone 7087 (TRAV27, TRAJ28)
ASTSHSGAGSYQLTF

SEQ ID NO: 14174 - protein, 15 aa, Homo sapiens
  CDR3 for beta chain variable domain of TCR clone 7087 (TRBV2, TRBJ2-2)
CASSRETVGTGELFF

SEQ ID NO: 14175 - protein, 18 aa, Homo sapiens
  CDR3 for alpha chain variable domain of TCR clone 7088 (TRAV35, TRAJ52)
CAGLLRYPGGTSYGKLTF

SEQ ID NO: 14176 - protein, 13 aa, Homo sapiens
  CDR3 for beta chain variable domain of TCR clone 7088 (TRBV2, TRBJ2-5)
CASGTPYQETQYF

SEQ ID NO: 14177 - protein, 15 aa, Homo sapiens
  CDR3 for alpha chain variable domain of TCR clone 7089 (TRAV16, TRAJ16)
CSKWPGHRDGQKLLF

SEQ ID NO: 14178 - protein, 14 aa, Homo sapiens
  CDR3 for beta chain variable domain of TCR clone 7089 (TRBV7-9, TRBJ2-4)
CASTTGGAKNIQYF

SEQ ID NO: 14179 - protein, 14 aa, Homo sapiens
  CDR3 for alpha chain variable domain of TCR clone 7090 (TRAV1-2, TRAJ16)
CAVNRFSDGQKLLF

SEQ ID NO: 14180 - protein, 17 aa, Homo sapiens
  CDR3 for beta chain variable domain of TCR clone 7090 (TRBV7-3, TRBJ2-5)
CASSLGSGRSGSETQYF

SEQ ID NO: 14181 - protein, 16 aa, Homo sapiens
  CDR3 for alpha chain variable domain of TCR clone 7091 (TRAV38-2/DV8, TRAJ47)
CAYRSAIMQYGNKLVF

SEQ ID NO: 14182 - protein, 14 aa, Homo sapiens
  CDR3 for beta chain variable domain of TCR clone 7091 (TRBV19, TRBJ2-7)
CASSIFAGTYEQYF

SEQ ID NO: 14183 - protein, 13 aa, Homo sapiens
  CDR3 for alpha chain variable domain of TCR clone 7092 (TRAV12-1, TRAJ22)
CVASGGSARQLTF

SEQ ID NO: 14184 - protein, 14 aa, Homo sapiens
  CDR3 for beta chain variable domain of TCR clone 7092 (TRBV11-3, TRBJ1-2)
CASSLGSGTYGYTF

SEQ ID NO: 14185 - protein, 15 aa, Homo sapiens
  CDR3 for alpha chain variable domain of TCR clone 7093 (TRAV26-1, TRAJ29)
CIVRVEGSGNTTLVF

SEQ ID NO: 14186 - protein, 15 aa, Homo sapiens
  CDR3 for beta chain variable domain of TCR clone 7093 (TRBV7-9, TRBJ1-5)
CASSQGHQPNQPQHF

SEQ ID NO: 14187 - protein, 14 aa, Homo sapiens
  CDR3 for alpha chain variable domain of TCR clone 7094 (TRAV4, TRAJ6)
CLVGEAGGSYIPTF

SEQ ID NO: 14188 - protein, 15 aa, Homo sapiens
  CDR3 for beta chain variable domain of TCR clone 7094 (TRBV9, TRBJ2-1)
CASSLAGSSYNEQFF

SEQ ID NO: 14189 - protein, 16 aa, Homo sapiens
  CDR3 for alpha chain variable domain of TCR clone 7095 (TRAV12-2, TRAJ10)
CAVNRVLTGGGNKLTF

SEQ ID NO: 14190 - protein, 13 aa, Homo sapiens
  CDR3 for beta chain variable domain of TCR clone 7095 (TRBV29-1, TRBJ2-7)
CSVKRGGNYEQYF

SEQ ID NO: 14191 - protein, 14 aa, Homo sapiens
  CDR3 for alpha chain variable domain of TCR clone 7096 (TRAV26-1, TRAJ39)
CIVRAYNAGNMLTF

SEQ ID NO: 14192 - protein, 16 aa, Homo sapiens
  CDR3 for beta chain variable domain of TCR clone 7096 (TRBV15, TRBJ2-7)
CATSRDFGAAVYEQYF

SEQ ID NO: 14193 - protein, 13 aa, Homo sapiens
  CDR3 for alpha chain variable domain of TCR clone 7097 (TRAV13-1, TRAJ5)
CAARVTGRRALTF

SEQ ID NO: 14194 - protein, 15 aa, Homo sapiens
  CDR3 for beta chain variable domain of TCR clone 7097 (TRBV7-2, TRBJ1-2)
CASSPRAGWNYGYTF

SEQ ID NO: 14195 - protein, 13 aa, Homo sapiens
  CDR3 for alpha chain variable domain of TCR clone 7098 (TRAV2, TRAJ40)
CAVVTSGTYKYIF

SEQ ID NO: 14196 - protein, 15 aa, Homo sapiens
  CDR3 for beta chain variable domain of TCR clone 7098 (TRBV7-3, TRBJ2-1)
CASSPTGGGEVEQFF

SEQ ID NO: 14197 - protein, 16 aa, Homo sapiens
  CDR3 for alpha chain variable domain of TCR clone 7099 (TRAV14/DV4, TRAJ54)
CAMREGRIQGAQKLVF

SEQ ID NO: 14198 - protein, 19 aa, Homo sapiens
  CDR3 for beta chain variable domain of TCR clone 7099 (TRBV7-2, TRBJ2-3)
CASSFLSRNWGGGTDTQYF

SEQ ID NO: 14199 - protein, 13 aa, Homo sapiens
  CDR3 for alpha chain variable domain of TCR clone 7100 (TRAV21, TRAJ27)
CAARPGNAGKSTF

SEQ ID NO: 14200 - protein, 14 aa, Homo sapiens
  CDR3 for beta chain variable domain of TCR clone 7100 (TRBV7-6, TRBJ2-3)
CASSLWTVTDTQYF

SEQ ID NO: 14201 - protein, 14 aa, Homo sapiens
  CDR3 for alpha chain variable domain of TCR clone 7101 (TRAV1-2, TRAJ16)
CAVNRFSDGQKLLF

SEQ ID NO: 14202 - protein, 16 aa, Homo sapiens
  CDR3 for beta chain variable domain of TCR clone 7101 (TRBV28, TRBJ2-4)
CASSLIQGSLGNIQYF

SEQ ID NO: 14203 - protein, 13 aa, Homo sapiens
  CDR3 for alpha chain variable domain of TCR clone 7102 (TRAV2, TRAJ21)
CAVEDNNFNKFYF

SEQ ID NO: 14204 - protein, 14 aa, Homo sapiens
  CDR3 for beta chain variable domain of TCR clone 7102 (TRBV6-1, TRBJ2-7)
CASSERVNPYEQYF

SEQ ID NO: 14205 - protein, 14 aa, Homo sapiens
  CDR3 for alpha chain variable domain of TCR clone 7103 (TRAV13-1, TRAJ44)
CAAKATGTASKLTF

SEQ ID NO: 14206 - protein, 17 aa, Homo sapiens
  CDR3 for beta chain variable domain of TCR clone 7103 (TRBV7-3, TRBJ2-3)
RASSLMKRMRGAATQYF

SEQ ID NO: 14207 - protein, 15 aa, Homo sapiens
  CDR3 for alpha chain variable domain of TCR clone 7104 (TRAV2, TRAJ13)
CAVEPEFWGLPESYL

SEQ ID NO: 14208 - protein, 14 aa, Homo sapiens
  CDR3 for beta chain variable domain of TCR clone 7104 (TRBV28, TRBJ1-5)
CASSGQALYQPQHF

SEQ ID NO: 14209 - protein, 12 aa, Homo sapiens
  CDR3 for alpha chain variable domain of TCR clone 7105 (TRAV13-2, TRAJ23)
CAERHRGGRLIF

SEQ ID NO: 14210 - protein, 16 aa, Homo sapiens
  CDR3 for beta chain variable domain of TCR clone 7105 (TRBV20-1, TRBJ1-4)
CSAPGQGLLTNEKLFF

SEQ ID NO: 14211 - protein, 12 aa, Homo sapiens
  CDR3 for alpha chain variable domain of TCR clone 7106 (TRAV13-1, TRAJ43)
CAAGRFNNDMRF

SEQ ID NO: 14212 - protein, 14 aa, Homo sapiens
  CDR3 for beta chain variable domain of TCR clone 7106 (TRBV6-3, TRBJ2-5)
CASRRDGGEETQYF

SEQ ID NO: 14213 - protein, 10 aa, Homo sapiens
  CDR3 for alpha chain variable domain of TCR clone 7107 (TRAV13-2, TRAJ20)
CARRDYKLSF

SEQ ID NO: 14214 - protein, 15 aa, Homo sapiens
  CDR3 for beta chain variable domain of TCR clone 7107 (TRBV6-6, TRBJ2-7)
CASSYSIRGVYEQYF

SEQ ID NO: 14215 - protein, 14 aa, Homo sapiens
  CDR3 for alpha chain variable domain of TCR clone 7108 (TRAV2, TRAJ37)
CAVDFTSNTGKLIF

SEQ ID NO: 14216 - protein, 15 aa, Homo sapiens
  CDR3 for beta chain variable domain of TCR clone 7108 (TRBV20-1, TRBJ1-1)
CSASRGVTGNTEAFL

SEQ ID NO: 14217 - protein, 15 aa, Homo sapiens
  CDR3 for alpha chain variable domain of TCR clone 7109 (TRAV26-1, TRAJ22)
CIVRVSLWFCKATDL

SEQ ID NO: 14218 - protein, 12 aa, Homo sapiens
  CDR3 for beta chain variable domain of TCR clone 7109 (TRBV11-2, TRBJ2-2)
CASSLGGGELFF

SEQ ID NO: 14219 - protein, 12 aa, Homo sapiens
  CDR3 for alpha chain variable domain of TCR clone 7110 (TRAV12-1, TRAJ9)
CVVPWAGFKTIF

SEQ ID NO: 14220 - protein, 14 aa, Homo sapiens
  CDR3 for beta chain variable domain of TCR clone 7110 (TRBV6-6, TRBJ2-7)
CASSYGGSSYEQYF

SEQ ID NO: 14221 - protein, 13 aa, Homo sapiens
  CDR3 for alpha chain variable domain of TCR clone 7111 (TRAV27, TRAJ41)
CAGEGNSGYALNF

SEQ ID NO: 14222 - protein, 14 aa, Homo sapiens
  CDR3 for beta chain variable domain of TCR clone 7111 (TRBV11-2, TRBJ2-7)
CASSLGAGAYEQYF

SEQ ID NO: 14223 - protein, 12 aa, Homo sapiens
  CDR3 for alpha chain variable domain of TCR clone 7112 (TRAV9-2, TRAJ40)
CALTSGTYKYIF

SEQ ID NO: 14224 - protein, 16 aa, Homo sapiens
  CDR3 for beta chain variable domain of TCR clone 7112 (TRBV7-7, TRBJ2-2)
CASSPRTGLNTGELFF

SEQ ID NO: 14225 - protein, 14 aa, Homo sapiens
  CDR3 for alpha chain variable domain of TCR clone 7113 (TRAV25, TRAJ6)
CAGRESGGSYIPTF

SEQ ID NO: 14226 - protein, 13 aa, Homo sapiens
  CDR3 for beta chain variable domain of TCR clone 7113 (TRBV27, TRBJ1-1)
CASSLSIGAEAFF

SEQ ID NO: 14227 - protein, 13 aa, Homo sapiens
  CDR3 for alpha chain variable domain of TCR clone 7114 (TRAV21, TRAJ20)
CAVGLRVDYKLSF

SEQ ID NO: 14228 - protein, 12 aa, Homo sapiens
  CDR3 for beta chain variable domain of TCR clone 7114 (TRBV27, TRBJ2-5)
CASSPTGETQYF

SEQ ID NO: 14229 - protein, 13 aa, Homo sapiens
  CDR3 for alpha chain variable domain of TCR clone 7115 (TRAV29/DV5, TRAJ31)
CAASRNNNARLMF

SEQ ID NO: 14230 - protein, 14 aa, Homo sapiens
  CDR3 for beta chain variable domain of TCR clone 7115 (TRBV4-1, TRBJ2-2)
CASSQAVNTGELFF

SEQ ID NO: 14231 - protein, 13 aa, Homo sapiens
  CDR3 for alpha chain variable domain of TCR clone 7116 (TRAV35, TRAJ42)
CAGFPGSQGNLIF

SEQ ID NO: 14232 - protein, 12 aa, Homo sapiens
  CDR3 for beta chain variable domain of TCR clone 7116 (TRBV11-2, TRBJ2-2)
CASSLGGGELFF

SEQ ID NO: 14233 - protein, 12 aa, Homo sapiens
  CDR3 for alpha chain variable domain of TCR clone 7117 (TRAV8-2, TRAJ30)
CVVSDRDDKIIF

SEQ ID NO: 14234 - protein, 16 aa, Homo sapiens
  CDR3 for beta chain variable domain of TCR clone 7117 (TRBV10-3, TRBJ2-6)
CAISTSGDLGANVLTF

SEQ ID NO: 14235 - protein, 13 aa, Homo sapiens
  CDR3 for alpha chain variable domain of TCR clone 7118 (TRAV16, TRAJ30)
CALAQNRDDKIIF

SEQ ID NO: 14236 - protein, 15 aa, Homo sapiens
  CDR3 for beta chain variable domain of TCR clone 7118 (TRBV2, TRBJ1-1)
CASTEPGQGASGAFF

SEQ ID NO: 14237 - protein, 12 aa, Homo sapiens
  CDR3 for alpha chain variable domain of TCR clone 7119 (TRAV13-1, TRAJ21)
CAAKEGFNKFYF

SEQ ID NO: 14238 - protein, 14 aa, Homo sapiens
  CDR3 for beta chain variable domain of TCR clone 7119 (TRBV20-1, TRBJ2-7)
CSAPELAGVGEQYF

SEQ ID NO: 14239 - protein, 12 aa, Homo sapiens
  CDR3 for alpha chain variable domain of TCR clone 7120 (TRAV1-1, TRAJ24)
CAVRGSWGKFQF

SEQ ID NO: 14240 - protein, 14 aa, Homo sapiens
  CDR3 for beta chain variable domain of TCR clone 7120 (TRBV7-2, TRBJ1-2)
CASSQTGSTYGYTF

SEQ ID NO: 14241 - protein, 14 aa, Homo sapiens
  CDR3 for alpha chain variable domain of TCR clone 7121 (TRAV8-3, TRAJ37)
CAVGSSGNTGKLIF

SEQ ID NO: 14242 - protein, 15 aa, Homo sapiens
  CDR3 for beta chain variable domain of TCR clone 7121 (TRBV11-2, TRBJ1-3)
CASSLSPLVRDTIYF

SEQ ID NO: 14243 - protein, 12 aa, Homo sapiens
  CDR3 for alpha chain variable domain of TCR clone 7122 (TRAV23/DV6, TRAJ30)
CAASKGDDKIIF

SEQ ID NO: 14244 - protein, 15 aa, Homo sapiens
  CDR3 for beta chain variable domain of TCR clone 7122 (TRBV12-4, TRBJ2-1)
CASRPTRTGYNEQFF

SEQ ID NO: 14245 - protein, 13 aa, Homo sapiens
  CDR3 for alpha chain variable domain of TCR clone 7123 (TRAV21, TRAJ15)
CAVCNQAGTALIF

SEQ ID NO: 14246 - protein, 16 aa, Homo sapiens
  CDR3 for beta chain variable domain of TCR clone 7123 (TRBV12-4, TRBJ1-5)
CASSRPVGGSNQPQHF

SEQ ID NO: 14247 - protein, 13 aa, Homo sapiens
  CDR3 for alpha chain variable domain of TCR clone 7124 (TRAV13-1, TRAJ21)
CAASIYNFNKFYF

SEQ ID NO: 14248 - protein, 15 aa, Homo sapiens
  CDR3 for beta chain variable domain of TCR clone 7124 (TRBV9, TRBJ2-1)
CASSLAGSSYNEQFF

SEQ ID NO: 14249 - protein, 12 aa, Homo sapiens
  CDR3 for alpha chain variable domain of TCR clone 7125 (TRAV16, TRAJ10)
CSRTGGGNKLTF

SEQ ID NO: 14250 - protein, 19 aa, Homo sapiens
  CDR3 for beta chain variable domain of TCR clone 7125 (TRBV28, TRBJ2-1)
CASSFSIRGSGRTRYEQFF

SEQ ID NO: 14251 - protein, 14 aa, Homo sapiens
  CDR3 for alpha chain variable domain of TCR clone 7126 (TRAV9-2, TRAJ39)
CALYIYNAGNMLTF

SEQ ID NO: 14252 - protein, 13 aa, Homo sapiens
  CDR3 for beta chain variable domain of TCR clone 7126 (TRBV4-1, TRBJ2-2)
CASSQENTGELFF

SEQ ID NO: 14253 - protein, 16 aa, Homo sapiens
  CDR3 for alpha chain variable domain of TCR clone 7127 (TRAV12-2, TRAJ32)
CAVNLGQGGAINKLIF

SEQ ID NO: 14254 - protein, 15 aa, Homo sapiens
  CDR3 for beta chain variable domain of TCR clone 7127 (TRBV20-1, TRBJ2-7)
CSARGPLAGGREQYF

SEQ ID NO: 14255 - protein, 17 aa, Homo sapiens
  CDR3 for alpha chain variable domain of TCR clone 7128 (TRAV36/DV7, TRAJ52)
CAVAQRAGGTSYGKLTF

SEQ ID NO: 14256 - protein, 15 aa, Homo sapiens
  CDR3 for beta chain variable domain of TCR clone 7128 (TRBV7-2, TRBJ2-7)
CASSLALGSAYEQYF

SEQ ID NO: 14257 - protein, 13 aa, Homo sapiens
  CDR3 for alpha chain variable domain of TCR clone 7129 (TRAV20, TRAJ54)
CALTFEGAQKLVF

SEQ ID NO: 14258 - protein, 12 aa, Homo sapiens
  CDR3 for beta chain variable domain of TCR clone 7129 (TRBV5-1, TRBJ2-5)
CASSFSWETQYF

SEQ ID NO: 14259 - protein, 12 aa, Homo sapiens
  CDR3 for alpha chain variable domain of TCR clone 7130 (TRAV12-3, TRAJ17)
CAMTLTGNKLTF

SEQ ID NO: 14260 - protein, 15 aa, Homo sapiens
  CDR3 for beta chain variable domain of TCR clone 7130 (TRBV20-1, TRBJ2-7)
CNARDRVSGMDEQYF

SEQ ID NO: 14261 - protein, 15 aa, Homo sapiens
  CDR3 for alpha chain variable domain of TCR clone 7131 (TRAV13-2, TRAJ45)
CAESDSGGGADGLTF

SEQ ID NO: 14262 - protein, 16 aa, Homo sapiens
  CDR3 for beta chain variable domain of TCR clone 7131 (TRBV11-2, TRBJ2-7)
CASSPTTGGVSYEQYF

SEQ ID NO: 14263 - protein, 13 aa, Homo sapiens
  CDR3 for alpha chain variable domain of TCR clone 7132 (TRAV2, TRAJ40)
CAVVTSGTYKYIF

SEQ ID NO: 14264 - protein, 14 aa, Homo sapiens
  CDR3 for beta chain variable domain of TCR clone 7132 (TRBV19, TRBJ2-1)
CASPTCVLSGEQFF

SEQ ID NO: 14265 - protein, 13 aa, Homo sapiens
  CDR3 for alpha chain variable domain of TCR clone 7133 (TRAV29/DV5, TRAJ34)
CAARVDNTDKLIF

SEQ ID NO: 14266 - protein, 17 aa, Homo sapiens
  CDR3 for beta chain variable domain of TCR clone 7133 (TRBV7-3, TRBJ2-5)
CASSLGSGRSGSETQYF

SEQ ID NO: 14267 - protein, 13 aa, Homo sapiens
  CDR3 for alpha chain variable domain of TCR clone 7134 (TRAV17, TRAJ5)
CAPMDTGRRALTF

SEQ ID NO: 14268 - protein, 14 aa, Homo sapiens
  CDR3 for beta chain variable domain of TCR clone 7134 (TRBV7-3, TRBJ2-1)
CASSLAGGTNEQFF

SEQ ID NO: 14269 - protein, 16 aa, Homo sapiens
  CDR3 for alpha chain variable domain of TCR clone 7135 (TRAV30, TRAJ24)
CGTEIVDADSWGKFQF

SEQ ID NO: 14270 - protein, 11 aa, Homo sapiens
  CDR3 for beta chain variable domain of TCR clone 7135 (TRBV12-4, TRBJ2-3)
CASTATDTQYF

SEQ ID NO: 14271 - protein, 17 aa, Homo sapiens
  CDR3 for alpha chain variable domain of TCR clone 7136 (TRAV16, TRAJ37)
CAFWPKNGSSNTGKLIF

SEQ ID NO: 14272 - protein, 17 aa, Homo sapiens
  CDR3 for beta chain variable domain of TCR clone 7136 (TRBV6-5, TRBJ2-7)
CASSYSFWGQGSYEQYF

SEQ ID NO: 14273 - protein, 16 aa, Homo sapiens
  CDR3 for alpha chain variable domain of TCR clone 7137 (TRAV26-1, TRAJ44)
IASSESRTGTASKLTF

SEQ ID NO: 14274 - protein, 13 aa, Homo sapiens
  CDR3 for beta chain variable domain of TCR clone 7137 (TRBV7-2, TRBJ1-5)
CASSFARNQPQHF

SEQ ID NO: 14275 - protein, 16 aa, Homo sapiens
  CDR3 for alpha chain variable domain of TCR clone 7138 (TRAV14/DV4, TRAJ39)
CAMREAYNNAGNMLTF

SEQ ID NO: 14276 - protein, 14 aa, Homo sapiens
  CDR3 for beta chain variable domain of TCR clone 7138 (TRBV7-9, TRBJ2-5)
CASSPAQDQETQYF

SEQ ID NO: 14277 - protein, 16 aa, Homo sapiens
  CDR3 for alpha chain variable domain of TCR clone 7139 (TRAV26-1, TRAJ32)
CIVRTNYGGATNKLIF

SEQ ID NO: 14278 - protein, 14 aa, Homo sapiens
  CDR3 for beta chain variable domain of TCR clone 7139 (TRBV6-1, TRBJ1-3)
CASVQGGGGNTIYF

SEQ ID NO: 14279 - protein, 14 aa, Homo sapiens
  CDR3 for alpha chain variable domain of TCR clone 7140 (TRAV12-2, TRAJ18)
CAVKRGSTLGRLYF

SEQ ID NO: 14280 - protein, 16 aa, Homo sapiens
  CDR3 for beta chain variable domain of TCR clone 7140 (TRBV27, TRBJ2-3)
CASSFRGQLLRDTQYF

SEQ ID NO: 14281 - protein, 14 aa, Homo sapiens
  CDR3 for alpha chain variable domain of TCR clone 7141 (TRAV17, TRAJ57)
CATDPQGGSEKLVF

SEQ ID NO: 14282 - protein, 18 aa, Homo sapiens
  CDR3 for beta chain variable domain of TCR clone 7141 (TRBV6-6, TRBJ1-3)
CASSYSKWDSISGDTIYF

SEQ ID NO: 14283 - protein, 14 aa, Homo sapiens
  CDR3 for alpha chain variable domain of TCR clone 7142 (TRAV12-2, TRAJ13)
CAVKKTGGYQKVTF

SEQ ID NO: 14284 - protein, 14 aa, Homo sapiens
  CDR3 for beta chain variable domain of TCR clone 7142 (TRBV3-1, TRBJ2-5)
CASSQGPDQETQYF

SEQ ID NO: 14285 - protein, 18 aa, Homo sapiens
  CDR3 for alpha chain variable domain of TCR clone 7143 (TRAV21, TRAJ53)
CAVKGGENSGGSNYKLTF

SEQ ID NO: 14286 - protein, 14 aa, Homo sapiens
  CDR3 for beta chain variable domain of TCR clone 7143 (TRBV11-3, TRBJ1-5)
LTGDRLYYNQPQHF

SEQ ID NO: 14287 - protein, 14 aa, Homo sapiens
  CDR3 for alpha chain variable domain of TCR clone 7144 (TRAV26-1, TRAJ38)
CIADNAGNNRKLIW

SEQ ID NO: 14288 - protein, 12 aa, Homo sapiens
  CDR3 for beta chain variable domain of TCR clone 7144 (TRBV7-8, TRBJ2-7)
CASSLGDREQYF

SEQ ID NO: 14289 - protein, 10 aa, Homo sapiens
  CDR3 for alpha chain variable domain of TCR clone 7145 (TRAV16, TRAJ22)
SAMYLRHLTF

SEQ ID NO: 14290 - protein, 15 aa, Homo sapiens
  CDR3 for beta chain variable domain of TCR clone 7145 (TRBV7-9, TRBJ1-6)
CASSSPGRGNSPLHF

SEQ ID NO: 14291 - protein, 15 aa, Homo sapiens
  CDR3 for alpha chain variable domain of TCR clone 7146 (TRAV17, TRAJ45)
CATAYSGGGADGLTF

SEQ ID NO: 14292 - protein, 15 aa, Homo sapiens
  CDR3 for beta chain variable domain of TCR clone 7146 (TRBV28, TRBJ2-1)
CASSIIAGGRSEQFF

SEQ ID NO: 14293 - protein, 17 aa, Homo sapiens
  CDR3 for alpha chain variable domain of TCR clone 7147 (TRAV3, TRAJ12)
CAVREIGGMDSSYKLIF

SEQ ID NO: 14294 - protein, 14 aa, Homo sapiens
  CDR3 for beta chain variable domain of TCR clone 7147 (TRBV12-4, TRBJ1-1)
CASSFQSFGTEAFF

SEQ ID NO: 14295 - protein, 14 aa, Homo sapiens
  CDR3 for alpha chain variable domain of TCR clone 7148 (TRAV12-2, TRAJ13)
CAVKKTGGYQKVTF

SEQ ID NO: 14296 - protein, 15 aa, Homo sapiens
  CDR3 for beta chain variable domain of TCR clone 7148 (TRBV19, TRBJ1-1)
CASTSGQIQNTEAFF

SEQ ID NO: 14297 - protein, 13 aa, Homo sapiens
  CDR3 for alpha chain variable domain of TCR clone 7149 (TRAV2, TRAJ15)
CAVASQAGTALIF

SEQ ID NO: 14298 - protein, 14 aa, Homo sapiens
  CDR3 for beta chain variable domain of TCR clone 7149 (TRBV11-3, TRBJ2-7)
CASSPAVPPYEQYF

SEQ ID NO: 14299 - protein, 14 aa, Homo sapiens
  CDR3 for alpha chain variable domain of TCR clone 7150 (TRAV1-2, TRAJ16)
CAVNRFSDGQKLLF

SEQ ID NO: 14300 - protein, 14 aa, Homo sapiens
  CDR3 for beta chain variable domain of TCR clone 7150 (TRBV5-1, TRBJ1-5)
CASSLGQGAQPQHF

SEQ ID NO: 14301 - protein, 13 aa, Homo sapiens
  CDR3 for alpha chain variable domain of TCR clone 7151 (TRAV1-2, TRAJ9)
CAALNTGGFKTIF

SEQ ID NO: 14302 - protein, 17 aa, Homo sapiens
  CDR3 for beta chain variable domain of TCR clone 7151 (TRBV13, TRBJ2-3)
CASSLSRVAGGRNTQYF

SEQ ID NO: 14303 - protein, 10 aa, Homo sapiens
  CDR3 for alpha chain variable domain of TCR clone 7152 (TRAV5, TRAJ34)
CAEDTDKLIF

SEQ ID NO: 14304 - protein, 14 aa, Homo sapiens
  CDR3 for beta chain variable domain of TCR clone 7152 (TRBV7-9, TRBJ2-1)
CASSPRDSLYEQFF

SEQ ID NO: 14305 - protein, 11 aa, Homo sapiens
  CDR3 for alpha chain variable domain of TCR clone 7153 (TRAV3, TRAJ21)
CAVGNFNKFYF

SEQ ID NO: 14306 - protein, 16 aa, Homo sapiens
  CDR3 for beta chain variable domain of TCR clone 7153 (TRBV19, TRBJ2-1)
CASSKEGPSSYNEQFF

SEQ ID NO: 14307 - protein, 11 aa, Homo sapiens
  CDR3 for alpha chain variable domain of TCR clone 7154 (TRAV1-1, TRAJ31)
CAVPKQCQTHV

SEQ ID NO: 14308 - protein, 17 aa, Homo sapiens
  CDR3 for beta chain variable domain of TCR clone 7154 (TRBV27, TRBJ2-6)
CASSAGTGFSGANVLTF

SEQ ID NO: 14309 - protein, 15 aa, Homo sapiens
  CDR3 for alpha chain variable domain of TCR clone 7155 (TRAV8-3, TRAJ45)
CASSYSGGGADGLTF

SEQ ID NO: 14310 - protein, 13 aa, Homo sapiens
  CDR3 for beta chain variable domain of TCR clone 7155 (TRBV20-1, TRBJ1-1)
CSAFDKENTEAFF

SEQ ID NO: 14311 - protein, 13 aa, Homo sapiens
  CDR3 for alpha chain variable domain of TCR clone 7156 (TRAV2, TRAJ40)
CAVVTSGTYKYIF

SEQ ID NO: 14312 - protein, 18 aa, Homo sapiens
  CDR3 for beta chain variable domain of TCR clone 7156 (TRBV11-2, TRBJ2-3)
CASSLGGASRGAPNTQYF

SEQ ID NO: 14313 - protein, 12 aa, Homo sapiens
  CDR3 for alpha chain variable domain of TCR clone 7157 (TRAV13-1, TRAJ5)
CAVDTGRRALTF

SEQ ID NO: 14314 - protein, 12 aa, Homo sapiens
  CDR3 for beta chain variable domain of TCR clone 7157 (TRBV28, TRBJ2-1)
CASSFYRHEQFF

SEQ ID NO: 14315 - protein, 14 aa, Homo sapiens
  CDR3 for alpha chain variable domain of TCR clone 7158 (TRAV26-1, TRAJ34)
CIVRESYNTDKLIF

SEQ ID NO: 14316 - protein, 16 aa, Homo sapiens
  CDR3 for beta chain variable domain of TCR clone 7158 (TRBV10-3, TRBJ2-1)
CAISGVGDGGGGEQFF

SEQ ID NO: 14317 - protein, 14 aa, Homo sapiens
  CDR3 for alpha chain variable domain of TCR clone 7159 (TRAV13-1, TRAJ44)
CAAKATGTASKLAF

SEQ ID NO: 14318 - protein, 17 aa, Homo sapiens
  CDR3 for beta chain variable domain of TCR clone 7159 (TRBV7-3, TRBJ2-3)
CASSLMKRMRGADTQYF

SEQ ID NO: 14319 - protein, 16 aa, Homo sapiens
  CDR3 for alpha chain variable domain of TCR clone 7160 (TRAV30, TRAJ24)
CGTEIVDADSWGKFQF

SEQ ID NO: 14320 - protein, 17 aa, Homo sapiens
  CDR3 for beta chain variable domain of TCR clone 7160 (TRBV11-2, TRBJ2-1)
CASSLYPPGVEYNEQFF

SEQ ID NO: 14321 - protein, 13 aa, Homo sapiens
  CDR3 for alpha chain variable domain of TCR clone 7161 (TRAV1-2, TRAJ20)
CAVRDGNDYKLSF

SEQ ID NO: 14322 - protein, 14 aa, Homo sapiens
  CDR3 for beta chain variable domain of TCR clone 7161 (TRBV7-2, TRBJ2-3)
CQQLRGGGRDTQYF

SEQ ID NO: 14323 - protein, 16 aa, Homo sapiens
  CDR3 for alpha chain variable domain of TCR clone 7162 (TRAV13-1, TRAJ15)
CAANGGPVRAGTALIF

SEQ ID NO: 14324 - protein, 13 aa, Homo sapiens
  CDR3 for beta chain variable domain of TCR clone 7162 (TRBV20-1, TRBJ2-3)
CSATSGSRDTQYF

SEQ ID NO: 14325 - protein, 16 aa, Homo sapiens
  CDR3 for alpha chain variable domain of TCR clone 7163 (TRAV26-1, TRAJ50)
CIVRVEAGTSYDKVIF

SEQ ID NO: 14326 - protein, 13 aa, Homo sapiens
  CDR3 for beta chain variable domain of TCR clone 7163 (TRBV25-1, TRBJ1-2)
CASSENMGRGYTF

SEQ ID NO: 14327 - protein, 12 aa, Homo sapiens
  CDR3 for alpha chain variable domain of TCR clone 7164 (TRAV17, TRAJ20)
CATDSNDYKLSF

SEQ ID NO: 14328 - protein, 14 aa, Homo sapiens
  CDR3 for beta chain variable domain of TCR clone 7164 (TRBV6-5, TRBJ1-1)
CASSLGQGLSEAFF

SEQ ID NO: 14329 - protein, 15 aa, Homo sapiens
  CDR3 for alpha chain variable domain of TCR clone 7165 (TRAV26-1, TRAJ29)
CIVRVEGSGNTHLVF

SEQ ID NO: 14330 - protein, 15 aa, Homo sapiens
  CDR3 for beta chain variable domain of TCR clone 7165 (TRBV7-9, TRBJ1-5)
CASSQGHQPNQPQHF

SEQ ID NO: 14331 - protein, 17 aa, Homo sapiens
  CDR3 for alpha chain variable domain of TCR clone 7166 (TRAV3, TRAJ37)
CAVRDMRTPGNTGKLIF

SEQ ID NO: 14332 - protein, 14 aa, Homo sapiens
  CDR3 for beta chain variable domain of TCR clone 7166 (TRBV7-2, TRBJ2-7)
CASSPKTSFYEQYF

SEQ ID NO: 14333 - protein, 14 aa, Homo sapiens
  CDR3 for alpha chain variable domain of TCR clone 7167 (TRAV26-1, TRAJ34)
CIVRVAYNTDKLIF

SEQ ID NO: 14334 - protein, 15 aa, Homo sapiens
  CDR3 for beta chain variable domain of TCR clone 7167 (TRBV7-9, TRBJ1-4)
CAGSRTGGFNEKLFF

SEQ ID NO: 14335 - protein, 14 aa, Homo sapiens
  CDR3 for alpha chain variable domain of TCR clone 7168 (TRAV30, TRAJ33)
CGTVAPRSNYQLIW

SEQ ID NO: 14336 - protein, 14 aa, Homo sapiens
  CDR3 for beta chain variable domain of TCR clone 7168 (TRBV7-2, TRBJ2-7)
CASRSQGAAYEQYF

SEQ ID NO: 14337 - protein, 14 aa, Homo sapiens
  CDR3 for alpha chain variable domain of TCR clone 7169 (TRAV2, TRAJ37)
CAVDFTSNTGKLIF

SEQ ID NO: 14338 - protein, 15 aa, Homo sapiens
  CDR3 for beta chain variable domain of TCR clone 7169 (TRBV3-1, TRBJ2-2)
CASSQGSGTFGELFF

SEQ ID NO: 14339 - protein, 15 aa, Homo sapiens
  CDR3 for alpha chain variable domain of TCR clone 7170 (TRAV3, TRAJ29)
CAVRDPLSGNTPLVF

SEQ ID NO: 14340 - protein, 17 aa, Homo sapiens
  CDR3 for beta chain variable domain of TCR clone 7170 (TRBV7-2, TRBJ2-7)
CASSLGTGTSGRYEQYF

SEQ ID NO: 14341 - protein, 14 aa, Homo sapiens
  CDR3 for alpha chain variable domain of TCR clone 7171 (TRAV13-1, TRAJ35)
CAASKGGFGSVLHC

SEQ ID NO: 14342 - protein, 13 aa, Homo sapiens
  CDR3 for beta chain variable domain of TCR clone 7171 (TRBV7-3, TRBJ1-1)
CASSQDWGAEAFF

SEQ ID NO: 14343 - protein, 17 aa, Homo sapiens
  CDR3 for alpha chain variable domain of TCR clone 7172 (TRAV3, TRAJ6)
CAVRDGPRAGGSYIPTF

SEQ ID NO: 14344 - protein, 16 aa, Homo sapiens
  CDR3 for beta chain variable domain of TCR clone 7172 (TRBV9, TRBJ2-3)
CASSGTSGKDTDTQYF

SEQ ID NO: 14345 - protein, 10 aa, Homo sapiens
  CDR3 for alpha chain variable domain of TCR clone 7173 (TRAV13-1, TRAJ47)
CAAPKLVFGA

SEQ ID NO: 14346 - protein, 14 aa, Homo sapiens
  CDR3 for beta chain variable domain of TCR clone 7173 (TRBV27, TRBJ2-2)
CASSSRLVPGELFF

SEQ ID NO: 14347 - protein, 12 aa, Homo sapiens
  CDR3 for alpha chain variable domain of TCR clone 7174 (TRAV12-3, TRAJ17)
CAMTLTGNKLTF

SEQ ID NO: 14348 - protein, 14 aa, Homo sapiens
  CDR3 for beta chain variable domain of TCR clone 7174 (TRBV4-1, TRBJ2-2)
CASSQAVNTGELFF

SEQ ID NO: 14349 - protein, 12 aa, Homo sapiens
  CDR3 for alpha chain variable domain of TCR clone 7175 (TRAV16, TRAJ10)
CSRTGGGNKLTF

SEQ ID NO: 14350 - protein, 12 aa, Homo sapiens
  CDR3 for beta chain variable domain of TCR clone 7175 (TRBV2, TRBJ1-1)
YCRWTVNTEAFF

SEQ ID NO: 14351 - protein, 12 aa, Homo sapiens
  CDR3 for alpha chain variable domain of TCR clone 7176 (TRAV13-2, TRAJ39)
CAENNAGNMLTF

SEQ ID NO: 14352 - protein, 13 aa, Homo sapiens
  CDR3 for beta chain variable domain of TCR clone 7176 (TRBV19, TRBJ1-1)
CASSPSNGGEAFF

SEQ ID NO: 14353 - protein, 11 aa, Homo sapiens
  CDR3 for alpha chain variable domain of TCR clone 7177 (TRAV3, TRAJ21)
CAVGNFNKFYF

SEQ ID NO: 14354 - protein, 16 aa, Homo sapiens
  CDR3 for beta chain variable domain of TCR clone 7177 (TRBV19, TRBJ2-1)
CARSKAGPSSYNEQFF

SEQ ID NO: 14355 - protein, 15 aa, Homo sapiens
  CDR3 for alpha chain variable domain of TCR clone 7178 (TRAV3, TRAJ3)
CAVRDMSSSASKIIF

SEQ ID NO: 14356 - protein, 17 aa, Homo sapiens
  CDR3 for beta chain variable domain of TCR clone 7178 (TRBV24-1, TRBJ2-1)
CATSDVSTSGTYNEQFF

SEQ ID NO: 14357 - protein, 13 aa, Homo sapiens
  CDR3 for alpha chain variable domain of TCR clone 7179 (TRAV8-3, TRAJ28)
CAVGAVGSYQLTF

SEQ ID NO: 14358 - protein, 15 aa, Homo sapiens
  CDR3 for beta chain variable domain of TCR clone 7179 (TRBV6-1, TRBJ2-3)
CASSERGGITDTQYF

SEQ ID NO: 14359 - protein, 14 aa, Homo sapiens
  CDR3 for alpha chain variable domain of TCR clone 7180 (TRAV13-1, TRAJ35)
CAASKGGFGNVLHR

SEQ ID NO: 14360 - protein, 13 aa, Homo sapiens
  CDR3 for beta chain variable domain of TCR clone 7180 (TRBV7-3, TRBJ1-1)
CASSQDWGAEAFF

SEQ ID NO: 14361 - protein, 14 aa, Homo sapiens
  CDR3 for alpha chain variable domain of TCR clone 7181 (TRAV8-1, TRAJ15)
CAVNGQQAGTALIF

SEQ ID NO: 14362 - protein, 16 aa, Homo sapiens
  CDR3 for beta chain variable domain of TCR clone 7181 (TRBV11-3, TRBJ2-5)
CASSSVVAGSTETQYF

SEQ ID NO: 14363 - protein, 14 aa, Homo sapiens
  CDR3 for alpha chain variable domain of TCR clone 7182 (TRAV29/DV5, TRAJ36)
CAARRKTGANNPFF

SEQ ID NO: 14364 - protein, 14 aa, Homo sapiens
  CDR3 for beta chain variable domain of TCR clone 7182 (TRBV12-5, TRBJ2-5)
CASGSRTHQETQYF

SEQ ID NO: 14365 - protein, 14 aa, Homo sapiens
  CDR3 for alpha chain variable domain of TCR clone 7183 (TRAV1-2, TRAJ16)
CAVNRFSDGQKLLF

SEQ ID NO: 14366 - protein, 16 aa, Homo sapiens
  CDR3 for beta chain variable domain of TCR clone 7183 (TRBV3-1, TRBJ2-5)
CASSPGQFNGFGTQYF

SEQ ID NO: 14367 - protein, 13 aa, Homo sapiens
  CDR3 for alpha chain variable domain of TCR clone 7184 (TRAV13-1, TRAJ23)
CAASSYQGGKLIF

SEQ ID NO: 14368 - protein, 16 aa, Homo sapiens
  CDR3 for beta chain variable domain of TCR clone 7184 (TRBV20-1, TRBJ2-1)
CSANPRLAGTYNEQFF

SEQ ID NO: 14369 - protein, 16 aa, Homo sapiens
  CDR3 for alpha chain variable domain of TCR clone 7185 (TRAV26-1, TRAJ37)
CIVRGDGSGNTGKLIF

SEQ ID NO: 14370 - protein, 14 aa, Homo sapiens
  CDR3 for beta chain variable domain of TCR clone 7185 (TRBV19, TRBJ2-2)
CASSGQGIAGELFF

SEQ ID NO: 14371 - protein, 14 aa, Homo sapiens
  CDR3 for alpha chain variable domain of TCR clone 7186 (TRAV26-1, TRAJ26)
CIVRATFLGQNFVF

SEQ ID NO: 14372 - protein, 14 aa, Homo sapiens
  CDR3 for beta chain variable domain of TCR clone 7186 (TRBV12-4, TRBJ2-5)
CASSLWQKQETQYF

SEQ ID NO: 14373 - protein, 12 aa, Homo sapiens
  CDR3 for alpha chain variable domain of TCR clone 7187 (TRAV5, TRAJ29)
CAESKKETHLLS

SEQ ID NO: 14374 - protein, 15 aa, Homo sapiens
  CDR3 for beta chain variable domain of TCR clone 7187 (TRBV10-1, TRBJ2-3)
CASSATSGGFDTQYF

SEQ ID NO: 14375 - protein, 13 aa, Homo sapiens
  CDR3 for alpha chain variable domain of TCR clone 7188 (TRAV13-1, TRAJ26)
CAIVFGPGTRLSV

SEQ ID NO: 14376 - protein, 14 aa, Homo sapiens
  CDR3 for beta chain variable domain of TCR clone 7188 (TRBV18, TRBJ2-3)
CASSPRTSTDTQYF

SEQ ID NO: 14377 - protein, 17 aa, Homo sapiens
  CDR3 for alpha chain variable domain of TCR clone 7189 (TRAV13-1, TRAJ52)
CAASSGAGGTSYGKLTF

SEQ ID NO: 14378 - protein, 12 aa, Homo sapiens
  CDR3 for beta chain variable domain of TCR clone 7189 (TRBV29-1, TRBJ2-3)
CSVTGGADTQYF

SEQ ID NO: 14379 - protein, 14 aa, Homo sapiens
  CDR3 for alpha chain variable domain of TCR clone 7190 (TRAV4, TRAJ20)
CLVGDFINDYKLSF

SEQ ID NO: 14380 - protein, 15 aa, Homo sapiens
  CDR3 for beta chain variable domain of TCR clone 7190 (TRBV9, TRBJ1-6)
CASSVAGTGDSPLHF

SEQ ID NO: 14381 - protein, 14 aa, Homo sapiens
  CDR3 for alpha chain variable domain of TCR clone 7191 (TRAV1-2, TRAJ16)
CAVNRFSDGQKLLF

SEQ ID NO: 14382 - protein, 12 aa, Homo sapiens
  CDR3 for beta chain variable domain of TCR clone 7191 (TRBV14, TRBJ2-5)
CASSQLKETQYF

SEQ ID NO: 14383 - protein, 16 aa, Homo sapiens
  CDR3 for alpha chain variable domain of TCR clone 7192 (TRAV30, TRAJ24)
CGTEIVDADSWGKFQF

SEQ ID NO: 14384 - protein, 14 aa, Homo sapiens
  CDR3 for beta chain variable domain of TCR clone 7192 (TRBV12-5, TRBJ2-5)
CASGSRTHKETQYF

SEQ ID NO: 14385 - protein, 15 aa, Homo sapiens
  CDR3 for alpha chain variable domain of TCR clone 7193 (TRAV3, TRAJ3)
CAVRDRDSSASKIIF

SEQ ID NO: 14386 - protein, 15 aa, Homo sapiens
  CDR3 for beta chain variable domain of TCR clone 7193 (TRBV19, TRBJ2-1)
CASSSPGVPLDEQFF

SEQ ID NO: 14387 - protein, 15 aa, Homo sapiens
  CDR3 for alpha chain variable domain of TCR clone 7194 (TRAV3, TRAJ20)
CAVRDIKLSDYKLSF

SEQ ID NO: 14388 - protein, 13 aa, Homo sapiens
  CDR3 for beta chain variable domain of TCR clone 7194 (TRBV20-1, TRBJ1-1)
CSARVGGNTEAFF

SEQ ID NO: 14389 - protein, 18 aa, Homo sapiens
  CDR3 for alpha chain variable domain of TCR clone 7195 (TRAV26-1, TRAJ23)
CIVRVGLEVWNQGGKLIF

SEQ ID NO: 14390 - protein, 15 aa, Homo sapiens
  CDR3 for beta chain variable domain of TCR clone 7195 (TRBV9, TRBJ1-6)
CASSVAGTGDSPLHF

SEQ ID NO: 14391 - protein, 12 aa, Homo sapiens
  CDR3 for alpha chain variable domain of TCR clone 7196 (TRAV1-1, TRAJ29)
CASGSGNTPLVF

SEQ ID NO: 14392 - protein, 15 aa, Homo sapiens
  CDR3 for beta chain variable domain of TCR clone 7196 (TRBV27, TRBJ2-1)
CASSNGGGSSNEQFF

SEQ ID NO: 14393 - protein, 16 aa, Homo sapiens
  CDR3 for alpha chain variable domain of TCR clone 7197 (TRAV23/DV6, TRAJ52)
CAARPSGGTSYGKLTF

SEQ ID NO: 14394 - protein, 14 aa, Homo sapiens
  CDR3 for beta chain variable domain of TCR clone 7197 (TRBV20-1, TRBJ2-3)
CSARDASSTDTQYF

SEQ ID NO: 14395 - protein, 14 aa, Homo sapiens
  CDR3 for alpha chain variable domain of TCR clone 7198 (TRAV12-2, TRAJ13)
CAVKKTGGYQKVTF

SEQ ID NO: 14396 - protein, 13 aa, Homo sapiens
  CDR3 for beta chain variable domain of TCR clone 7198 (TRBV15, TRBJ2-7)
CATSTTGHYEQYF

SEQ ID NO: 14397 - protein, 16 aa, Homo sapiens
  CDR3 for alpha chain variable domain of TCR clone 7199 (TRAV36/DV7, TRAJ30)
CAVETYGLDRDDKIIF

SEQ ID NO: 14398 - protein, 15 aa, Homo sapiens
  CDR3 for beta chain variable domain of TCR clone 7199 (TRBV6-6, TRBJ2-5)
CASSYGKIIQETQYF

SEQ ID NO: 14399 - protein, 14 aa, Homo sapiens
  CDR3 for alpha chain variable domain of TCR clone 7200 (TRAV1-2, TRAJ8)
CAAREDTGFQKLVF

SEQ ID NO: 14400 - protein, 13 aa, Homo sapiens
  CDR3 for beta chain variable domain of TCR clone 7200 (TRBV19, TRBJ1-2)
CASSVPGQDGYTF

SEQ ID NO: 14401 - protein, 13 aa, Homo sapiens
  CDR3 for alpha chain variable domain of TCR clone 7201 (TRAV16, TRAJ58)
CALSIPSGSRLTF

SEQ ID NO: 14402 - protein, 16 aa, Homo sapiens
  CDR3 for beta chain variable domain of TCR clone 7201 (TRBV29-1, TRBJ2-6)
CSVEDITYSGANVLTF

SEQ ID NO: 14403 - protein, 14 aa, Homo sapiens
  CDR3 for alpha chain variable domain of TCR clone 7202 (TRAV12-2, TRAJ13)
CAVKKTGGYQKVTF

SEQ ID NO: 14404 - protein, 11 aa, Homo sapiens
  CDR3 for beta chain variable domain of TCR clone 7202 (TRBV12-4, TRBJ2-3)
CASTATDTQYF

SEQ ID NO: 14405 - protein, 18 aa, Homo sapiens
  CDR3 for alpha chain variable domain of TCR clone 7203 (TRAV12-3, TRAJ52)
CAMSRTNAGGTSYGKLTF

SEQ ID NO: 14406 - protein, 15 aa, Homo sapiens
  CDR3 for beta chain variable domain of TCR clone 7203 (TRBV7-2, TRBJ2-1)
CASSLVAGGHNEQFF

SEQ ID NO: 14407 - protein, 12 aa, Homo sapiens
  CDR3 for alpha chain variable domain of TCR clone 7204 (TRAV12-1, TRAJ9)
CVVHTGGFKTIF

SEQ ID NO: 14408 - protein, 14 aa, Homo sapiens
  CDR3 for beta chain variable domain of TCR clone 7204 (TRBV7-2, TRBJ2-7)
CASSPKTSFYEQYF

SEQ ID NO: 14409 - protein, 13 aa, Homo sapiens
  CDR3 for alpha chain variable domain of TCR clone 7205 (TRAV21, TRAJ27)
CAARPGNAGRSTF

SEQ ID NO: 14410 - protein, 14 aa, Homo sapiens
  CDR3 for beta chain variable domain of TCR clone 7205 (TRBV7-6, TRBJ2-3)
CASSLGTVTDTQYF

SEQ ID NO: 14411 - protein, 16 aa, Homo sapiens
  CDR3 for alpha chain variable domain of TCR clone 7206 (TRAV12-2, TRAJ43)
CAGDDMRFGAGTRLTV

SEQ ID NO: 14412 - protein, 13 aa, Homo sapiens
  CDR3 for beta chain variable domain of TCR clone 7206 (TRBV7-8, TRBJ2-7)
CASSLTGGREQYF

SEQ ID NO: 14413 - protein, 21 aa, Homo sapiens
  CDR3 for alpha chain variable domain of TCR clone 7207 (TRAV2, TRAJ27)
ILQVREADAAVYSANAGKSTF

SEQ ID NO: 14414 - protein, 15 aa, Homo sapiens
  CDR3 for beta chain variable domain of TCR clone 7207 (TRBV7-7, TRBJ1-3)
CASSQGEHSGNTIYF

SEQ ID NO: 14415 - protein, 18 aa, Homo sapiens
  CDR3 for alpha chain variable domain of TCR clone 7208 (TRAV21, TRAJ52)
CAVRPSPAGGTSYGKLTF

SEQ ID NO: 14416 - protein, 17 aa, Homo sapiens
  CDR3 for beta chain variable domain of TCR clone 7208 (TRBV13, TRBJ2-3)
CARSLSRVAGGRNTQYF

SEQ ID NO: 14417 - protein, 12 aa, Homo sapiens
  CDR3 for alpha chain variable domain of TCR clone 7209 (TRAV12-3, TRAJ17)
CAMTLTGNKLTF

SEQ ID NO: 14418 - protein, 15 aa, Homo sapiens
  CDR3 for beta chain variable domain of TCR clone 7209 (TRBV20-1, TRBJ2-7)
CSARDRFSGMDEQYF

SEQ ID NO: 14419 - protein, 20 aa, Homo sapiens
  CDR3 for alpha chain variable domain of TCR clone 7210 (TRAV26-1, TRAJ42)
CCVLLHRQTYYGGSQGSLIF

SEQ ID NO: 14420 - protein, 16 aa, Homo sapiens
  CDR3 for beta chain variable domain of TCR clone 7210 (TRBV7-3, TRBJ2-2)
CASSLKRGTLSGELFF

SEQ ID NO: 14421 - protein, 18 aa, Homo sapiens
  CDR3 for alpha chain variable domain of TCR clone 7211 (TRAV26-2, )
CILLDIQNPDPAVYQLRD

SEQ ID NO: 14422 - protein, 15 aa, Homo sapiens
  CDR3 for beta chain variable domain of TCR clone 7211 (TRBV6-3, TRBJ2-7)
CASSSPGTVFYEQYF

SEQ ID NO: 14423 - protein, 13 aa, Homo sapiens
  CDR3 for alpha chain variable domain of TCR clone 7212 (TRAV13-1, TRAJ29)
CAASIGLNTPLVF

SEQ ID NO: 14424 - protein, 15 aa, Homo sapiens
  CDR3 for beta chain variable domain of TCR clone 7212 (TRBV6-1, TRBJ2-5)
CASSEFPLMGETQYF

SEQ ID NO: 14425 - protein, 14 aa, Homo sapiens
  CDR3 for alpha chain variable domain of TCR clone 7213 (TRAV12-3, TRAJ10)
SHLPLTGGGNKLTF

SEQ ID NO: 14426 - protein, 13 aa, Homo sapiens
  CDR3 for beta chain variable domain of TCR clone 7213 (TRBV29-1, TRBJ2-3)
CSATRGGRDTQYF

SEQ ID NO: 14427 - protein, 14 aa, Homo sapiens
  CDR3 for alpha chain variable domain of TCR clone 7214 (TRAV17, TRAJ6)
CATPAMGGSYIPTF

SEQ ID NO: 14428 - protein, 14 aa, Homo sapiens
  CDR3 for beta chain variable domain of TCR clone 7214 (TRBV7-6, TRBJ2-3)
CASSLGTVTDTQYF

SEQ ID NO: 14429 - protein, 17 aa, Homo sapiens
  CDR3 for alpha chain variable domain of TCR clone 7215 (TRAV3, TRAJ42)
CAVRDRDYGGSQGNPIF

SEQ ID NO: 14430 - protein, 15 aa, Homo sapiens
  CDR3 for beta chain variable domain of TCR clone 7215 (TRBV6-6, TRBJ2-7)
CASSYSYGGSYEQYF

SEQ ID NO: 14431 - protein, 20 aa, Homo sapiens
  CDR3 for alpha chain variable domain of TCR clone 7216 (TRAV12-1, TRAJ42)
SSVIQPPTSVKGGSQGNLIF

SEQ ID NO: 14432 - protein, 14 aa, Homo sapiens
  CDR3 for beta chain variable domain of TCR clone 7216 (TRBV25-1, TRBJ1-2)
CASSDTTGVVGYTF

SEQ ID NO: 14433 - protein, 17 aa, Homo sapiens
  CDR3 for alpha chain variable domain of TCR clone 7217 (TRAV8-6, TRAJ58)
CAVSSWVGETSGSRLTF

SEQ ID NO: 14434 - protein, 14 aa, Homo sapiens
  CDR3 for beta chain variable domain of TCR clone 7217 (TRBV4-2, TRBJ2-1)
CASGLDRAYNEQFL

SEQ ID NO: 14435 - protein, 16 aa, Homo sapiens
  CDR3 for alpha chain variable domain of TCR clone 7218 (TRAV19, TRAJ24)
CSSPLSTTDSWGKLQF

SEQ ID NO: 14436 - protein, 13 aa, Homo sapiens
  CDR3 for beta chain variable domain of TCR clone 7218 (TRBV12-5, TRBJ2-3)
CASGDRQSDTQYF

SEQ ID NO: 14437 - protein, 14 aa, Homo sapiens
  CDR3 for alpha chain variable domain of TCR clone 7219 (TRAV12-3, TRAJ10)
SHLPLTGGGNKLTF

SEQ ID NO: 14438 - protein, 17 aa, Homo sapiens
  CDR3 for beta chain variable domain of TCR clone 7219 (TRBV11-2, TRBJ2-1)
CASSLYPPGVEYNEQFF

SEQ ID NO: 14439 - protein, 13 aa, Homo sapiens
  CDR3 for alpha chain variable domain of TCR clone 7220 (TRAV1-2, TRAJ9)
CAALNTGGFKTIF

SEQ ID NO: 14440 - protein, 14 aa, Homo sapiens
  CDR3 for beta chain variable domain of TCR clone 7220 (TRBV19, TRBJ1-4)
CASSMGRHNEKLFF

SEQ ID NO: 14441 - protein, 13 aa, Homo sapiens
  CDR3 for alpha chain variable domain of TCR clone 7221 (TRAV2, TRAJ40)
CALVTSGTYKYIF

SEQ ID NO: 14442 - protein, 14 aa, Homo sapiens
  CDR3 for beta chain variable domain of TCR clone 7221 (TRBV19, TRBJ2-1)
CASPTFVLSGEQFF

SEQ ID NO: 14443 - protein, 11 aa, Homo sapiens
  CDR3 for alpha chain variable domain of TCR clone 7222 (TRAV2, TRAJ13)
CASGGYQKVTF

SEQ ID NO: 14444 - protein, 15 aa, Homo sapiens
  CDR3 for beta chain variable domain of TCR clone 7222 (TRBV4-3, TRBJ2-7)
CASSQDLGSSYEQYF

SEQ ID NO: 14445 - protein, 13 aa, Homo sapiens
  CDR3 for alpha chain variable domain of TCR clone 7223 (TRAV21, TRAJ27)
CAARPGNAGKSTS

SEQ ID NO: 14446 - protein, 14 aa, Homo sapiens
  CDR3 for beta chain variable domain of TCR clone 7223 (TRBV7-6, TRBJ2-3)
CASSLGTVTDTQYF

SEQ ID NO: 14447 - protein, 16 aa, Homo sapiens
  CDR3 for alpha chain variable domain of TCR clone 7224 (TRAV16, TRAJ4)
CALSRMFSGGYNKLIF

SEQ ID NO: 14448 - protein, 15 aa, Homo sapiens
  CDR3 for beta chain variable domain of TCR clone 7224 (TRBV4-1, TRBJ1-4)
CASSDTGGTNEKLFF

SEQ ID NO: 14449 - protein, 14 aa, Homo sapiens
  CDR3 for alpha chain variable domain of TCR clone 7225 (TRAV12-2, TRAJ13)
CAVKKTGGYQKVTF

SEQ ID NO: 14450 - protein, 19 aa, Homo sapiens
  CDR3 for beta chain variable domain of TCR clone 7225 (TRBV7-2, TRBJ2-3)
CASSFLSRNWGGGTDTQYF

SEQ ID NO: 14451 - protein, 21 aa, Homo sapiens
  CDR3 for alpha chain variable domain of TCR clone 7226 (TRAV25, TRAJ47)
TATQTTDVGTYFWEYGNKLVF

SEQ ID NO: 14452 - protein, 13 aa, Homo sapiens
  CDR3 for beta chain variable domain of TCR clone 7226 (TRBV20-1, TRBJ2-5)
CSAREAFQETQYF

SEQ ID NO: 14453 - protein, 10 aa, Homo sapiens
  CDR3 for alpha chain variable domain of TCR clone 7227 (TRAV12-1, TRAJ41)
CVVPELKFRV

SEQ ID NO: 14454 - protein, 12 aa, Homo sapiens
  CDR3 for beta chain variable domain of TCR clone 7227 (TRBV14, TRBJ2-5)
CASSQLKETQYF

SEQ ID NO: 14455 - protein, 16 aa, Homo sapiens
  CDR3 for alpha chain variable domain of TCR clone 7228 (TRAV3, TRAJ10)
CAVRDMRAGGGNKLTF

SEQ ID NO: 14456 - protein, 13 aa, Homo sapiens
  CDR3 for beta chain variable domain of TCR clone 7228 (TRBV20-1, TRBJ2-7)
CSARWGYNYEQYF

SEQ ID NO: 14457 - protein, 13 aa, Homo sapiens
  CDR3 for alpha chain variable domain of TCR clone 7229 (TRAV12-2, TRAJ13)
CAVTAGGYQKVTF

SEQ ID NO: 14458 - protein, 15 aa, Homo sapiens
  CDR3 for beta chain variable domain of TCR clone 7229 (TRBV5-1, TRBJ1-1)
CASSLNDFKNTEAFF

SEQ ID NO: 14459 - protein, 13 aa, Homo sapiens
  CDR3 for alpha chain variable domain of TCR clone 7230 (TRAV23/DV6, TRAJ43)
CAASMGGNNDMRF

SEQ ID NO: 14460 - protein, 14 aa, Homo sapiens
  CDR3 for beta chain variable domain of TCR clone 7230 (TRBV3-1, TRBJ2-3)
CASSWSGVGDTQYF

SEQ ID NO: 14461 - protein, 13 aa, Homo sapiens
  CDR3 for alpha chain variable domain of TCR clone 7231 (TRAV21, TRAJ27)
CAARPGNAGKSTF

SEQ ID NO: 14462 - protein, 17 aa, Homo sapiens
  CDR3 for beta chain variable domain of TCR clone 7231 (TRBV28, TRBJ2-5)
CASSTPEGDALQETQYF

SEQ ID NO: 14463 - protein, 15 aa, Homo sapiens
  CDR3 for alpha chain variable domain of TCR clone 7232 (TRAV27, TRAJ38)
CAARRNAGNNRKLIW

SEQ ID NO: 14464 - protein, 15 aa, Homo sapiens
  CDR3 for beta chain variable domain of TCR clone 7232 (TRBV12-4, TRBJ2-5)
CASSPPTGLQETQYF

SEQ ID NO: 14465 - protein, 15 aa, Homo sapiens
  CDR3 for alpha chain variable domain of TCR clone 7233 (TRAV1-2, TRAJ28)
CAVQYSGAGSYQLTF

SEQ ID NO: 14466 - protein, 15 aa, Homo sapiens
  CDR3 for beta chain variable domain of TCR clone 7233 (TRBV9, TRBJ1-6)
CASSVAGTGDSPLHF

SEQ ID NO: 14467 - protein, 13 aa, Homo sapiens
  CDR3 for alpha chain variable domain of TCR clone 7234 (TRAV21, TRAJ27)
CAARPGNAGNSTF

SEQ ID NO: 14468 - protein, 14 aa, Homo sapiens
  CDR3 for beta chain variable domain of TCR clone 7234 (TRBV7-6, TRBJ2-3)
CASSLGTVTDTQYF

SEQ ID NO: 14469 - protein, 13 aa, Homo sapiens
  CDR3 for alpha chain variable domain of TCR clone 7235 (TRAV23/DV6, TRAJ29)
CAARNSGNTPLVF

SEQ ID NO: 14470 - protein, 15 aa, Homo sapiens
  CDR3 for beta chain variable domain of TCR clone 7235 (TRBV5-1, TRBJ1-1)
CASSSRTGRNTEAFF

SEQ ID NO: 14471 - protein, 16 aa, Homo sapiens
  CDR3 for alpha chain variable domain of TCR clone 7236 (TRAV26-1, TRAJ52)
CIVRVSGGTSYGKLTF

SEQ ID NO: 14472 - protein, 16 aa, Homo sapiens
  CDR3 for beta chain variable domain of TCR clone 7236 (TRBV3-1, TRBJ2-3)
CASSQRAGDPTDTQYF

SEQ ID NO: 14473 - protein, 13 aa, Homo sapiens
  CDR3 for alpha chain variable domain of TCR clone 7237 (TRAV2, TRAJ40)
CAVVTLGTYKYIF

SEQ ID NO: 14474 - protein, 14 aa, Homo sapiens
  CDR3 for beta chain variable domain of TCR clone 7237 (TRBV19, TRBJ2-1)
CASPTFVLSGEQFF

SEQ ID NO: 14475 - protein, 15 aa, Homo sapiens
  CDR3 for alpha chain variable domain of TCR clone 7238 (TRAV21, TRAJ24)
CAARSSTDSWGKLQF

SEQ ID NO: 14476 - protein, 13 aa, Homo sapiens
  CDR3 for beta chain variable domain of TCR clone 7238 (TRBV10-3, TRBJ2-7)
CASKLAVNYEQYF

SEQ ID NO: 14477 - protein, 17 aa, Homo sapiens
  CDR3 for alpha chain variable domain of TCR clone 7239 (TRAV3, TRAJ28)
CAVREAYSGAGSYQLTF

SEQ ID NO: 14478 - protein, 11 aa, Homo sapiens
  CDR3 for beta chain variable domain of TCR clone 7239 (TRBV19, TRBJ2-2)
CASRYSGELFF

SEQ ID NO: 14479 - protein, 11 aa, Homo sapiens
  CDR3 for alpha chain variable domain of TCR clone 7240 (TRAV2, TRAJ33)
CAVDSNYQLIW

SEQ ID NO: 14480 - protein, 13 aa, Homo sapiens
  CDR3 for beta chain variable domain of TCR clone 7240 (TRBV10-3, TRBJ2-7)
CASKLAVNYEQYF

SEQ ID NO: 14481 - protein, 12 aa, Homo sapiens
  CDR3 for alpha chain variable domain of TCR clone 7241 (TRAV29/DV5, TRAJ49)
CAATDTGNQFYF

SEQ ID NO: 14482 - protein, 14 aa, Homo sapiens
  CDR3 for beta chain variable domain of TCR clone 7241 (TRBV7-9, TRBJ2-2)
CASSLVQDTGELFF

SEQ ID NO: 14483 - protein, 13 aa, Homo sapiens
  CDR3 for alpha chain variable domain of TCR clone 7242 (TRAV13-1, TRAJ43)
CAASLSNNNDMRF

SEQ ID NO: 14484 - protein, 20 aa, Homo sapiens
  CDR3 for beta chain variable domain of TCR clone 7242 (TRBV5-1, TRBJ2-5)
GSWCSVSAGCWGAGEKTQYF

SEQ ID NO: 14485 - protein, 15 aa, Homo sapiens
  CDR3 for alpha chain variable domain of TCR clone 7243 (TRAV17, TRAJ57)
CATGPSQGGSEKLVF

SEQ ID NO: 14486 - protein, 16 aa, Homo sapiens
  CDR3 for beta chain variable domain of TCR clone 7243 (TRBV12-4, TRBJ1-5)
CASSRPVGGSNQTQHF

SEQ ID NO: 14487 - protein, 12 aa, Homo sapiens
  CDR3 for alpha chain variable domain of TCR clone 7244 (TRAV29/DV5, TRAJ49)
CAATDTGNQFYF

SEQ ID NO: 14488 - protein, 15 aa, Homo sapiens
  CDR3 for beta chain variable domain of TCR clone 7244 (TRBV20-1, TRBJ1-5)
CSAREGGYSNQPQHF

SEQ ID NO: 14489 - protein, 16 aa, Homo sapiens
  CDR3 for alpha chain variable domain of TCR clone 7245 (TRAV3, TRAJ18)
CAVRDGRGSTLGRLYF

SEQ ID NO: 14490 - protein, 17 aa, Homo sapiens
  CDR3 for beta chain variable domain of TCR clone 7245 (TRBV5-1, TRBJ2-3)
CASSKIGLVDRTDTQYF

SEQ ID NO: 14491 - protein, 16 aa, Homo sapiens
  CDR3 for alpha chain variable domain of TCR clone 7246 (TRAV12-3, TRAJ53)
CAMSPGSGGSNYKLTF

SEQ ID NO: 14492 - protein, 11 aa, Homo sapiens
  CDR3 for beta chain variable domain of TCR clone 7246 (TRBV29-1, TRBJ2-5)
CSGDRTGTQYF

SEQ ID NO: 14493 - protein, 11 aa, Homo sapiens
  CDR3 for alpha chain variable domain of TCR clone 7247 (TRAV2, TRAJ13)
CASGGYQKVTF

SEQ ID NO: 14494 - protein, 15 aa, Homo sapiens
  CDR3 for beta chain variable domain of TCR clone 7247 (TRBV5-4, TRBJ2-7)
CASSRFGTGSYEQYF

SEQ ID NO: 14495 - protein, 13 aa, Homo sapiens
  CDR3 for alpha chain variable domain of TCR clone 7248 (TRAV12-2, TRAJ40)
CAVKGPGTYKYIF

SEQ ID NO: 14496 - protein, 15 aa, Homo sapiens
  CDR3 for beta chain variable domain of TCR clone 7248 (TRBV28, TRBJ1-2)
CASSFRDRPSYGYTF

SEQ ID NO: 14497 - protein, 17 aa, Homo sapiens
  CDR3 for alpha chain variable domain of TCR clone 7249 (TRAV26-1, TRAJ37)
CIVRVITVSSNTGKLIF

SEQ ID NO: 14498 - protein, 14 aa, Homo sapiens
  CDR3 for beta chain variable domain of TCR clone 7249 (TRBV7-7, TRBJ2-2)
CATRQDSDTGELFF

SEQ ID NO: 14499 - protein, 11 aa, Homo sapiens
  CDR3 for alpha chain variable domain of TCR clone 7250 (TRAV27, TRAJ47)
SIVEYGNKLVF

SEQ ID NO: 14500 - protein, 18 aa, Homo sapiens
  CDR3 for beta chain variable domain of TCR clone 7250 (TRBV2, TRBJ2-1)
CASRGLAGGPRTYNEQFF

SEQ ID NO: 14501 - protein, 16 aa, Homo sapiens
  CDR3 for alpha chain variable domain of TCR clone 7251 (TRAV17, TRAJ52)
CATDGAGGTSYGKLTF

SEQ ID NO: 14502 - protein, 14 aa, Homo sapiens
  CDR3 for beta chain variable domain of TCR clone 7251 (TRBV6-1, TRBJ2-1)
CASSLGLAGLWEFF

SEQ ID NO: 14503 - protein, 13 aa, Homo sapiens
  CDR3 for alpha chain variable domain of TCR clone 7252 (TRAV12-2, TRAJ13)
CREEDWGYQKVTF

SEQ ID NO: 14504 - protein, 15 aa, Homo sapiens
  CDR3 for beta chain variable domain of TCR clone 7252 (TRBV27, TRBJ2-1)
CASSNGGGSSNEQFF

SEQ ID NO: 14505 - protein, 18 aa, Homo sapiens
  CDR3 for alpha chain variable domain of TCR clone 7253 (TRAV8-4, TRAJ52)
CAVTRANAGGTSYGKLTF

SEQ ID NO: 14506 - protein, 14 aa, Homo sapiens
  CDR3 for beta chain variable domain of TCR clone 7253 (TRBV19, TRBJ2-7)
CASTVQGRPYEQYF

SEQ ID NO: 14507 - protein, 14 aa, Homo sapiens
  CDR3 for alpha chain variable domain of TCR clone 7254 (TRAV12-3, TRAJ10)
SHLPLTGGGNKLTF

SEQ ID NO: 14508 - protein, 13 aa, Homo sapiens
  CDR3 for beta chain variable domain of TCR clone 7254 (TRBV20-1, TRBJ2-1)
CSASTGTSNEQFF

SEQ ID NO: 14509 - protein, 16 aa, Homo sapiens
  CDR3 for alpha chain variable domain of TCR clone 7255 (TRAV30, TRAJ24)
CGTEIVDADSWGKFQF

SEQ ID NO: 14510 - protein, 12 aa, Homo sapiens
  CDR3 for beta chain variable domain of TCR clone 7255 (TRBV6-3, TRBJ2-7)
CASSLTPYEQYF

SEQ ID NO: 14511 - protein, 16 aa, Homo sapiens
  CDR3 for alpha chain variable domain of TCR clone 7256 (TRAV16, TRAJ4)
CALSRMFSGSYNKLIF

SEQ ID NO: 14512 - protein, 16 aa, Homo sapiens
  CDR3 for beta chain variable domain of TCR clone 7256 (TRBV24-1, TRBJ2-3)
CATSDPGTGATDTQYF

SEQ ID NO: 14513 - protein, 15 aa, Homo sapiens
  CDR3 for alpha chain variable domain of TCR clone 7257 (TRAV23/DV6, TRAJ44)
CAASGGTGTASKLTF

SEQ ID NO: 14514 - protein, 16 aa, Homo sapiens
  CDR3 for beta chain variable domain of TCR clone 7257 (TRBV20-1, TRBJ2-3)
CSALAFDTGDPDTQYF

SEQ ID NO: 14515 - protein, 12 aa, Homo sapiens
  CDR3 for alpha chain variable domain of TCR clone 7258 (TRAV16, TRAJ10)
CSRTGGGNKLTF

SEQ ID NO: 14516 - protein, 14 aa, Homo sapiens
  CDR3 for beta chain variable domain of TCR clone 7258 (TRBV7-2, TRBJ1-1)
CASSFLTGTTEAFF

SEQ ID NO: 14517 - protein, 13 aa, Homo sapiens
  CDR3 for alpha chain variable domain of TCR clone 7259 (TRAV27, TRAJ57)
CRSAQGGSEKLAF

SEQ ID NO: 14518 - protein, 11 aa, Homo sapiens
  CDR3 for beta chain variable domain of TCR clone 7259 (TRBV11-2, TRBJ1-1)
CASSINTEAFF

SEQ ID NO: 14519 - protein, 14 aa, Homo sapiens
  CDR3 for alpha chain variable domain of TCR clone 7260 (TRAV12-3, TRAJ10)
SHLPLTGGGNKLTF

SEQ ID NO: 14520 - protein, 15 aa, Homo sapiens
  CDR3 for beta chain variable domain of TCR clone 7260 (TRBV20-1, TRBJ2-7)
CSAREGRDSLYEQYF

SEQ ID NO: 14521 - protein, 12 aa, Homo sapiens
  CDR3 for alpha chain variable domain of TCR clone 7261 (TRAV13-1, TRAJ49)
CAASPMGNQFYF

SEQ ID NO: 14522 - protein, 13 aa, Homo sapiens
  CDR3 for beta chain variable domain of TCR clone 7261 (TRBV24-1, TRBJ2-2)
CATSDWSTGELFF

SEQ ID NO: 14523 - protein, 15 aa, Homo sapiens
  CDR3 for alpha chain variable domain of TCR clone 7262 (TRAV26-1, TRAJ29)
CIVRVEGSGKTPLVF

SEQ ID NO: 14524 - protein, 14 aa, Homo sapiens
  CDR3 for beta chain variable domain of TCR clone 7262 (TRBV18, TRBJ2-5)
CASSPGVSQETQYF

SEQ ID NO: 14525 - protein, 14 aa, Homo sapiens
  CDR3 for alpha chain variable domain of TCR clone 7263 (TRAV13-1, TRAJ29)
CAASSNSGNTPLVF

SEQ ID NO: 14526 - protein, 13 aa, Homo sapiens
  CDR3 for beta chain variable domain of TCR clone 7263 (TRBV10-2, TRBJ1-1)
CASNDQMNTEAFF

SEQ ID NO: 14527 - protein, 10 aa, Homo sapiens
  CDR3 for alpha chain variable domain of TCR clone 7264 (TRAV30, TRAJ48)
CGIGNEKLTF

SEQ ID NO: 14528 - protein, 16 aa, Homo sapiens
  CDR3 for beta chain variable domain of TCR clone 7264 (TRBV20-1, TRBJ1-4)
CSAPGQGLLTNEKLFF

SEQ ID NO: 14529 - protein, 14 aa, Homo sapiens
  CDR3 for alpha chain variable domain of TCR clone 7265 (TRAV12-2, TRAJ5)
CAVNRSTGRRALTF

SEQ ID NO: 14530 - protein, 15 aa, Homo sapiens
  CDR3 for beta chain variable domain of TCR clone 7265 (TRBV15, TRBJ1-5)
CATSREQGGNQPQHF

SEQ ID NO: 14531 - protein, 14 aa, Homo sapiens
  CDR3 for alpha chain variable domain of TCR clone 7266 (TRAV12-2, TRAJ13)
CAVKKTGGYQKVTF

SEQ ID NO: 14532 - protein, 16 aa, Homo sapiens
  CDR3 for beta chain variable domain of TCR clone 7266 (TRBV12-4, TRBJ1-5)
CASSRPVGGSNQPQHF

SEQ ID NO: 14533 - protein, 14 aa, Homo sapiens
  CDR3 for alpha chain variable domain of TCR clone 7267 (TRAV12-2, TRAJ13)
CSVKKTGGYQKVTF

SEQ ID NO: 14534 - protein, 15 aa, Homo sapiens
  CDR3 for beta chain variable domain of TCR clone 7267 (TRBV27, TRBJ2-1)
CASSNGGGSSNEQFF

SEQ ID NO: 14535 - protein, 15 aa, Homo sapiens
  CDR3 for alpha chain variable domain of TCR clone 7268 (TRAV21, TRAJ32)
CAVNSYGGATNKLIF

SEQ ID NO: 14536 - protein, 14 aa, Homo sapiens
  CDR3 for beta chain variable domain of TCR clone 7268 (TRBV7-2, TRBJ2-7)
CASSPKTSFYEQYF

SEQ ID NO: 14537 - protein, 12 aa, Homo sapiens
  CDR3 for alpha chain variable domain of TCR clone 7269 (TRAV8-3, TRAJ20)
CAVGANDYKLSL

SEQ ID NO: 14538 - protein, 16 aa, Homo sapiens
  CDR3 for beta chain variable domain of TCR clone 7269 (TRBV19, TRBJ2-2)
CASRSPGTGATGELFF

SEQ ID NO: 14539 - protein, 11 aa, Homo sapiens
  CDR3 for alpha chain variable domain of TCR clone 7270 (TRAV2, TRAJ13)
CASGGYQKVTF

SEQ ID NO: 14540 - protein, 17 aa, Homo sapiens
  CDR3 for beta chain variable domain of TCR clone 7270 (TRBV20-1, TRBJ2-1)
CSARDPLAGVWDNEQFF

SEQ ID NO: 14541 - protein, 15 aa, Homo sapiens
  CDR3 for alpha chain variable domain of TCR clone 7271 (TRAV4, TRAJ10)
CLVGDEEGGGNKLTF

SEQ ID NO: 14542 - protein, 17 aa, Homo sapiens
  CDR3 for beta chain variable domain of TCR clone 7271 (TRBV19, TRBJ2-6)
CASSTGQVFSGANVLTF

SEQ ID NO: 14543 - protein, 10 aa, Homo sapiens
  CDR3 for alpha chain variable domain of TCR clone 7272 (TRAV36/DV7, TRAJ48)
CAVGNEKLTF

SEQ ID NO: 14544 - protein, 11 aa, Homo sapiens
  CDR3 for beta chain variable domain of TCR clone 7272 (TRBV6-9, TRBJ2-7)
CARRVASEQYF

SEQ ID NO: 14545 - protein, 12 aa, Homo sapiens
  CDR3 for alpha chain variable domain of TCR clone 7273 (TRAV20, TRAJ45)
CAVRGGADGLTF

SEQ ID NO: 14546 - protein, 14 aa, Homo sapiens
  CDR3 for beta chain variable domain of TCR clone 7273 (TRBV5-7, TRBJ2-5)
CASRETGDSETQYF

SEQ ID NO: 14547 - protein, 16 aa, Homo sapiens
  CDR3 for alpha chain variable domain of TCR clone 7274 (TRAV4, TRAJ22)
CLVGDLYSGSARQLTF

SEQ ID NO: 14548 - protein, 17 aa, Homo sapiens
  CDR3 for beta chain variable domain of TCR clone 7274 (TRBV11-2, TRBJ2-1)
CASSLYPPGVEYNEQFF

SEQ ID NO: 14549 - protein, 15 aa, Homo sapiens
  CDR3 for alpha chain variable domain of TCR clone 7275 (TRAV34, TRAJ38)
CGADFTPGNNRKLIW

SEQ ID NO: 14550 - protein, 14 aa, Homo sapiens
  CDR3 for beta chain variable domain of TCR clone 7275 (TRBV20-1, TRBJ2-1)
CSAQIGGSANEQFF

SEQ ID NO: 14551 - protein, 15 aa, Homo sapiens
  CDR3 for alpha chain variable domain of TCR clone 7276 (TRAV3, TRAJ15)
CAVRPANQAGTALIF

SEQ ID NO: 14552 - protein, 15 aa, Homo sapiens
  CDR3 for beta chain variable domain of TCR clone 7276 (TRBV7-7, TRBJ1-3)
CASSQGEHSGNTIYF

SEQ ID NO: 14553 - protein, 14 aa, Homo sapiens
  CDR3 for alpha chain variable domain of TCR clone 7277 (TRAV1-2, TRAJ8)
CAVREDTGFQKLVF

SEQ ID NO: 14554 - protein, 15 aa, Homo sapiens
  CDR3 for beta chain variable domain of TCR clone 7277 (TRBV5-1, TRBJ2-1)
CASSPPRAPYNEQFF

SEQ ID NO: 14555 - protein, 15 aa, Homo sapiens
  CDR3 for alpha chain variable domain of TCR clone 7278 (TRAV2, TRAJ9)
CAVEDRGTGGFKTIF

SEQ ID NO: 14556 - protein, 16 aa, Homo sapiens
  CDR3 for beta chain variable domain of TCR clone 7278 (TRBV24-1, TRBJ2-3)
CAASDPGTGATDTQYF

SEQ ID NO: 14557 - protein, 14 aa, Homo sapiens
  CDR3 for alpha chain variable domain of TCR clone 7279 (TRAV1-2, TRAJ8)
CAVREDTGFQRLVF

SEQ ID NO: 14558 - protein, 15 aa, Homo sapiens
  CDR3 for beta chain variable domain of TCR clone 7279 (TRBV6-3, TRBJ2-7)
CASSSPGTVFYEQYF

SEQ ID NO: 14559 - protein, 12 aa, Homo sapiens
  CDR3 for alpha chain variable domain of TCR clone 7280 (TRAV17, TRAJ57)
CATDGGSEKLVF

SEQ ID NO: 14560 - protein, 13 aa, Homo sapiens
  CDR3 for beta chain variable domain of TCR clone 7280 (TRBV7-9, TRBJ2-7)
CASSVAGAYEQYF

SEQ ID NO: 14561 - protein, 14 aa, Homo sapiens
  CDR3 for alpha chain variable domain of TCR clone 7281 (TRAV1-2, TRAJ8)
CAVREDTGFQKLVF

SEQ ID NO: 14562 - protein, 13 aa, Homo sapiens
  CDR3 for beta chain variable domain of TCR clone 7281 (TRBV7-6, TRBJ1-2)
CASSLVADYGYTF

SEQ ID NO: 14563 - protein, 13 aa, Homo sapiens
  CDR3 for alpha chain variable domain of TCR clone 7282 (TRAV2, TRAJ40)
CAVVTSGTYKYIF

SEQ ID NO: 14564 - protein, 14 aa, Homo sapiens
  CDR3 for beta chain variable domain of TCR clone 7282 (TRBV19, TRBJ2-1)
CASPTFVLRGEQFF

SEQ ID NO: 14565 - protein, 14 aa, Homo sapiens
  CDR3 for alpha chain variable domain of TCR clone 7283 (TRAV14/DV4, TRAJ57)
CAMREEGGSEKLVF

SEQ ID NO: 14566 - protein, 17 aa, Homo sapiens
  CDR3 for beta chain variable domain of TCR clone 7283 (TRBV10-3, TRBJ1-2)
CAISETRDRGLEYGYTF

SEQ ID NO: 14567 - protein, 13 aa, Homo sapiens
  CDR3 for alpha chain variable domain of TCR clone 7284 (TRAV21, TRAJ27)
CAARPSNAGKSTF

SEQ ID NO: 14568 - protein, 14 aa, Homo sapiens
  CDR3 for beta chain variable domain of TCR clone 7284 (TRBV7-6, TRBJ2-3)
CASSLGTVTDTQYF

SEQ ID NO: 14569 - protein, 12 aa, Homo sapiens
  CDR3 for alpha chain variable domain of TCR clone 7285 (TRAV12-3, TRAJ17)
CAMTLTGNKLTF

SEQ ID NO: 14570 - protein, 15 aa, Homo sapiens
  CDR3 for beta chain variable domain of TCR clone 7285 (TRBV20-1, TRBJ2-7)
CSARDRVSGMDEQYF

SEQ ID NO: 14571 - protein, 13 aa, Homo sapiens
  CDR3 for alpha chain variable domain of TCR clone 7286 (TRAV1-2, TRAJ24)
CAVTTDSWGKLQF

SEQ ID NO: 14572 - protein, 13 aa, Homo sapiens
  CDR3 for beta chain variable domain of TCR clone 7286 (TRBV20-1, TRBJ1-1)
CSARGGGNTEAFF

SEQ ID NO: 14573 - protein, 12 aa, Homo sapiens
  CDR3 for alpha chain variable domain of TCR clone 7287 (TRAV25, TRAJ5)
CAGGGGRRALTF

SEQ ID NO: 14574 - protein, 15 aa, Homo sapiens
  CDR3 for beta chain variable domain of TCR clone 7287 (TRBV20-1, TRBJ2-7)
CSARDRVSGMDEQYF

SEQ ID NO: 14575 - protein, 12 aa, Homo sapiens
  CDR3 for alpha chain variable domain of TCR clone 7288 (TRAV38-1, TRAJ47)
CAFETYGNKLVF

SEQ ID NO: 14576 - protein, 13 aa, Homo sapiens
  CDR3 for beta chain variable domain of TCR clone 7288 (TRBV4-2, TRBJ1-1)
CASSQAGNTEAFF

SEQ ID NO: 14577 - protein, 17 aa, Homo sapiens
  CDR3 for alpha chain variable domain of TCR clone 7289 (TRAV3, TRAJ6)
CAARDGPRAGGSYIPTF

SEQ ID NO: 14578 - protein, 20 aa, Homo sapiens
  CDR3 for beta chain variable domain of TCR clone 7289 (TRBV28, TRBJ2-1)
CASTPIGRSPGLAGGNEQFF

SEQ ID NO: 14579 - protein, 14 aa, Homo sapiens
  CDR3 for alpha chain variable domain of TCR clone 7290 (TRAV16, TRAJ33)
CALSAMDSNYQLIW

SEQ ID NO: 14580 - protein, 14 aa, Homo sapiens
  CDR3 for beta chain variable domain of TCR clone 7290 (TRBV25-1, TRBJ1-1)
CASTHLGGNTEAFF

SEQ ID NO: 14581 - protein, 17 aa, Homo sapiens
  CDR3 for alpha chain variable domain of TCR clone 7291 (TRAV23/DV6, TRAJ53)
CAASKLGSGGSNYKLTF

SEQ ID NO: 14582 - protein, 14 aa, Homo sapiens
  CDR3 for beta chain variable domain of TCR clone 7291 (TRBV7-9, TRBJ2-3)
CASSLEQGTNTQYF

SEQ ID NO: 14583 - protein, 13 aa, Homo sapiens
  CDR3 for alpha chain variable domain of TCR clone 7292 (TRAV2, TRAJ40)
CAVVISGTYKYIF

SEQ ID NO: 14584 - protein, 14 aa, Homo sapiens
  CDR3 for beta chain variable domain of TCR clone 7292 (TRBV19, TRBJ2-1)
CASPTFVLSGEQFF

SEQ ID NO: 14585 - protein, 16 aa, Homo sapiens
  CDR3 for alpha chain variable domain of TCR clone 7293 (TRAV12-3, TRAJ53)
CAMSPGSGGSNYKLTF

SEQ ID NO: 14586 - protein, 11 aa, Homo sapiens
  CDR3 for beta chain variable domain of TCR clone 7293 (TRBV29-1, TRBJ2-5)
CSEGRTGTQYF

SEQ ID NO: 14587 - protein, 14 aa, Homo sapiens
  CDR3 for alpha chain variable domain of TCR clone 7294 (TRAV12-2, TRAJ39)
CAVKGGNAGNMLTF

SEQ ID NO: 14588 - protein, 13 aa, Homo sapiens
  CDR3 for beta chain variable domain of TCR clone 7294 (TRBV12-4, TRBJ1-1)
CASSSGRGTEAFF

SEQ ID NO: 14589 - protein, 14 aa, Homo sapiens
  CDR3 for alpha chain variable domain of TCR clone 7295 (TRAV24, TRAJ16)
CAFPPFSDGQKLLF

SEQ ID NO: 14590 - protein, 12 aa, Homo sapiens
  CDR3 for beta chain variable domain of TCR clone 7295 (TRBV19, TRBJ1-1)
CASTSGGGEAFF

SEQ ID NO: 14591 - protein, 14 aa, Homo sapiens
  CDR3 for alpha chain variable domain of TCR clone 7296 (TRAV2, TRAJ33)
CAVEDQGSNYQLIW

SEQ ID NO: 14592 - protein, 15 aa, Homo sapiens
  CDR3 for beta chain variable domain of TCR clone 7296 (TRBV9, TRBJ2-3)
CASSEQGAGRDTQYF

SEQ ID NO: 14593 - protein, 16 aa, Homo sapiens
  CDR3 for alpha chain variable domain of TCR clone 7297 (TRAV12-3, TRAJ53)
CAISPGSGGSNYKLTF

SEQ ID NO: 14594 - protein, 11 aa, Homo sapiens
  CDR3 for beta chain variable domain of TCR clone 7297 (TRBV29-1, TRBJ2-5)
CSEDRTGTQYF

SEQ ID NO: 14595 - protein, 13 aa, Homo sapiens
  CDR3 for alpha chain variable domain of TCR clone 7298 (TRAV35, TRAJ13)
CAGRAGGYQKVTF

SEQ ID NO: 14596 - protein, 13 aa, Homo sapiens
  CDR3 for beta chain variable domain of TCR clone 7298 (TRBV12-4, TRBJ1-1)
CASTPRMNTEAFF

SEQ ID NO: 14597 - protein, 15 aa, Homo sapiens
  CDR3 for alpha chain variable domain of TCR clone 7299 (TRAV26-1, TRAJ29)
CIVRVEGSGNTPLVF

SEQ ID NO: 14598 - protein, 15 aa, Homo sapiens
  CDR3 for beta chain variable domain of TCR clone 7299 (TRBV7-9, TRBJ1-5)
CASSQGHQPNQHQHF

SEQ ID NO: 14599 - protein, 11 aa, Homo sapiens
  CDR3 for alpha chain variable domain of TCR clone 7300 (TRAV3, TRAJ17)
CAEAAGNKLTF

SEQ ID NO: 14600 - protein, 14 aa, Homo sapiens
  CDR3 for beta chain variable domain of TCR clone 7300 (TRBV20-1, TRBJ2-2)
SAVLALRRTGELFF

SEQ ID NO: 14601 - protein, 14 aa, Homo sapiens
  CDR3 for alpha chain variable domain of TCR clone 7301 (TRAV8-2, TRAJ37)
CVVSISGNTGKLIF

SEQ ID NO: 14602 - protein, 13 aa, Homo sapiens
  CDR3 for beta chain variable domain of TCR clone 7301 (TRBV27, TRBJ1-1)
CASSLSIGAEAFF

SEQ ID NO: 14603 - protein, 13 aa, Homo sapiens
  CDR3 for alpha chain variable domain of TCR clone 7302 (TRAV12-2, TRAJ26)
CAVTDPYGQNFVF

SEQ ID NO: 14604 - protein, 12 aa, Homo sapiens
  CDR3 for beta chain variable domain of TCR clone 7302 (TRBV18, TRBJ2-7)
CASAYVGGEQYF

SEQ ID NO: 14605 - protein, 12 aa, Homo sapiens
  CDR3 for alpha chain variable domain of TCR clone 7303 (TRAV12-2, TRAJ10)
WGVTGGGNKLTF

SEQ ID NO: 14606 - protein, 14 aa, Homo sapiens
  CDR3 for beta chain variable domain of TCR clone 7303 (TRBV12-4, TRBJ1-4)
CASSRQGANEKLFF

SEQ ID NO: 14607 - protein, 16 aa, Homo sapiens
  CDR3 for alpha chain variable domain of TCR clone 7304 (TRAV26-2, TRAJ28)
CILRPYSGAGSYQLTF

SEQ ID NO: 14608 - protein, 17 aa, Homo sapiens
  CDR3 for beta chain variable domain of TCR clone 7304 (TRBV27, TRBJ2-5)
CASRLRPGQGVQETQYF

SEQ ID NO: 14609 - protein, 14 aa, Homo sapiens
  CDR3 for alpha chain variable domain of TCR clone 7305 (TRAV12-3, TRAJ10)
SHLPLTGGGNKLTF

SEQ ID NO: 14610 - protein, 12 aa, Homo sapiens
  CDR3 for beta chain variable domain of TCR clone 7305 (TRBV29-1, TRBJ2-3)
CSVTGGADTQYF

SEQ ID NO: 14611 - protein, 13 aa, Homo sapiens
  CDR3 for alpha chain variable domain of TCR clone 7306 (TRAV13-1, TRAJ40)
CAASTSGTYKYIF

SEQ ID NO: 14612 - protein, 16 aa, Homo sapiens
  CDR3 for beta chain variable domain of TCR clone 7306 (TRBV9, TRBJ2-1)
CASSAYFLGGPSEQFF

SEQ ID NO: 14613 - protein, 16 aa, Homo sapiens
  CDR3 for alpha chain variable domain of TCR clone 7307 (TRAV8-3, TRAJ38)
CAVGASNAGNNRKLIW

SEQ ID NO: 14614 - protein, 15 aa, Homo sapiens
  CDR3 for beta chain variable domain of TCR clone 7307 (TRBV11-3, TRBJ1-3)
CASSLFGPSGNTIYF

SEQ ID NO: 14615 - protein, 14 aa, Homo sapiens
  CDR3 for alpha chain variable domain of TCR clone 7308 (TRAV1-2, TRAJ16)
CAVNRFSDGQKLLF

SEQ ID NO: 14616 - protein, 15 aa, Homo sapiens
  CDR3 for beta chain variable domain of TCR clone 7308 (TRBV7-9, TRBJ1-6)
CASSSPGRGNSPLLF

SEQ ID NO: 14617 - protein, 14 aa, Homo sapiens
  CDR3 for alpha chain variable domain of TCR clone 7309 (TRAV12-2, TRAJ40)
CAVKIPSGTYKYIF

SEQ ID NO: 14618 - protein, 14 aa, Homo sapiens
  CDR3 for beta chain variable domain of TCR clone 7309 (TRBV20-1, TRBJ1-1)
CSAQTRIGGTEASF

SEQ ID NO: 14619 - protein, 14 aa, Homo sapiens
  CDR3 for alpha chain variable domain of TCR clone 7310 (TRAV2, TRAJ37)
CAVDFTSNTGKLIF

SEQ ID NO: 14620 - protein, 14 aa, Homo sapiens
  CDR3 for beta chain variable domain of TCR clone 7310 (TRBV7-7, TRBJ2-7)
CASSLGRGVGEQYF

SEQ ID NO: 14621 - protein, 16 aa, Homo sapiens
  CDR3 for alpha chain variable domain of TCR clone 7311 (TRAV8-6, TRAJ32)
CAVSDPYGGATNKLIF

SEQ ID NO: 14622 - protein, 18 aa, Homo sapiens
  CDR3 for beta chain variable domain of TCR clone 7311 (TRBV4-2, TRBJ2-6)
CASSQLQGVLTGANVLTF

SEQ ID NO: 14623 - protein, 15 aa, Homo sapiens
  CDR3 for alpha chain variable domain of TCR clone 7312 (TRAV21, TRAJ53)
CATLNSGGSNYKLTF

SEQ ID NO: 14624 - protein, 13 aa, Homo sapiens
  CDR3 for beta chain variable domain of TCR clone 7312 (TRBV7-2, TRBJ2-2)
CASSLAVTGELFF

SEQ ID NO: 14625 - protein, 17 aa, Homo sapiens
  CDR3 for alpha chain variable domain of TCR clone 7313 (TRAV3, TRAJ42)
CAVRDRDYGGSQGNLIF

SEQ ID NO: 14626 - protein, 14 aa, Homo sapiens
  CDR3 for beta chain variable domain of TCR clone 7313 (TRBV7-3, TRBJ2-2)
CASSLNSNTGELFF

SEQ ID NO: 14627 - protein, 17 aa, Homo sapiens
  CDR3 for alpha chain variable domain of TCR clone 7314 (TRAV36/DV7, TRAJ52)
CAVAQRAGGTSYGKLTF

SEQ ID NO: 14628 - protein, 15 aa, Homo sapiens
  CDR3 for beta chain variable domain of TCR clone 7314 (TRBV28, TRBJ2-1)
CASSIIAGGRSEQFF

SEQ ID NO: 14629 - protein, 14 aa, Homo sapiens
  CDR3 for alpha chain variable domain of TCR clone 7315 (TRAV12-2, TRAJ13)
CAVKKTGGYQKVTF

SEQ ID NO: 14630 - protein, 12 aa, Homo sapiens
  CDR3 for beta chain variable domain of TCR clone 7315 (TRBV11-2, TRBJ2-1)
CASSPGNNEQFF

SEQ ID NO: 14631 - protein, 14 aa, Homo sapiens
  CDR3 for alpha chain variable domain of TCR clone 7316 (TRAV13-1, TRAJ9)
CAASALTGGFKTIF

SEQ ID NO: 14632 - protein, 16 aa, Homo sapiens
  CDR3 for beta chain variable domain of TCR clone 7316 (TRBV12-4, TRBJ1-5)
CASSRPVGGSNQPQHF

SEQ ID NO: 14633 - protein, 14 aa, Homo sapiens
  CDR3 for alpha chain variable domain of TCR clone 7317 (TRAV13-1, TRAJ35)
CAASKGGVGNVLHC

SEQ ID NO: 14634 - protein, 13 aa, Homo sapiens
  CDR3 for beta chain variable domain of TCR clone 7317 (TRBV7-3, TRBJ1-1)
CASSQDWGAEAFF

SEQ ID NO: 14635 - protein, 14 aa, Homo sapiens
  CDR3 for alpha chain variable domain of TCR clone 7318 (TRAV12-2, TRAJ52)
CRCAGGTSHGKLTF

SEQ ID NO: 14636 - protein, 13 aa, Homo sapiens
  CDR3 for beta chain variable domain of TCR clone 7318 (TRBV11-2, TRBJ2-1)
CASSLRLTHEQFF

SEQ ID NO: 14637 - protein, 16 aa, Homo sapiens
  CDR3 for alpha chain variable domain of TCR clone 7319 (TRAV30, TRAJ24)
CGTEIVDADSWGKFQF

SEQ ID NO: 14638 - protein, 14 aa, Homo sapiens
  CDR3 for beta chain variable domain of TCR clone 7319 (TRBV12-5, TRBJ2-5)
CASGSRTHQETKYF

SEQ ID NO: 14639 - protein, 14 aa, Homo sapiens
  CDR3 for alpha chain variable domain of TCR clone 7320 (TRAV9-2, TRAJ39)
CALYIYNAGNMLTF

SEQ ID NO: 14640 - protein, 11 aa, Homo sapiens
  CDR3 for beta chain variable domain of TCR clone 7320 (TRBV29-1, TRBJ2-5)
CSEDRTGTQYF

SEQ ID NO: 14641 - protein, 13 aa, Homo sapiens
  CDR3 for alpha chain variable domain of TCR clone 7321 (TRAV2, TRAJ40)
CAVVTSGTYKYIF

SEQ ID NO: 14642 - protein, 14 aa, Homo sapiens
  CDR3 for beta chain variable domain of TCR clone 7321 (TRBV19, TRBJ2-1)
CASPTFVLSGEQFS

SEQ ID NO: 14643 - protein, 11 aa, Homo sapiens
  CDR3 for alpha chain variable domain of TCR clone 7322 (TRAV2, TRAJ33)
CAVESNYQLIW

SEQ ID NO: 14644 - protein, 14 aa, Homo sapiens
  CDR3 for beta chain variable domain of TCR clone 7322 (TRBV19, TRBJ2-1)
CASPTFVLSGEQFF

SEQ ID NO: 14645 - protein, 13 aa, Homo sapiens
  CDR3 for alpha chain variable domain of TCR clone 7323 (TRAV12-1, TRAJ43)
CVVSHHNNNDMRF

SEQ ID NO: 14646 - protein, 15 aa, Homo sapiens
  CDR3 for beta chain variable domain of TCR clone 7323 (TRBV3-1, TRBJ2-5)
CASSLPSSSREAQYF

SEQ ID NO: 14647 - protein, 17 aa, Homo sapiens
  CDR3 for alpha chain variable domain of TCR clone 7324 (TRAV26-1, TRAJ58)
CIVRVGAEETSGSRLTF

SEQ ID NO: 14648 - protein, 12 aa, Homo sapiens
  CDR3 for beta chain variable domain of TCR clone 7324 (TRBV11-2, TRBJ2-5)
CASSLDTQTQYF

SEQ ID NO: 14649 - protein, 12 aa, Homo sapiens
  CDR3 for alpha chain variable domain of TCR clone 7325 (TRAV12-3, TRAJ17)
CAMTLTGNKLTF

SEQ ID NO: 14650 - protein, 11 aa, Homo sapiens
  CDR3 for beta chain variable domain of TCR clone 7325 (TRBV11-2, TRBJ2-2)
CASSLPGELFF

SEQ ID NO: 14651 - protein, 14 aa, Homo sapiens
  CDR3 for alpha chain variable domain of TCR clone 7326 (TRAV1-2, TRAJ16)
CAVNRFSDGQKLLF

SEQ ID NO: 14652 - protein, 13 aa, Homo sapiens
  CDR3 for beta chain variable domain of TCR clone 7326 (TRBV12-5, TRBJ2-3)
CASGDRQSDTQYF

SEQ ID NO: 14653 - protein, 14 aa, Homo sapiens
  CDR3 for alpha chain variable domain of TCR clone 7327 (TRAV26-1, TRAJ38)
CIADNAGNNRKLIW

SEQ ID NO: 14654 - protein, 15 aa, Homo sapiens
  CDR3 for beta chain variable domain of TCR clone 7327 (TRBV20-1, TRBJ1-1)
CSARGGGTLKLSLDK

SEQ ID NO: 14655 - protein, 13 aa, Homo sapiens
  CDR3 for alpha chain variable domain of TCR clone 7328 (TRAV16, TRAJ34)
CALSPYNTDKLIF

SEQ ID NO: 14656 - protein, 15 aa, Homo sapiens
  CDR3 for beta chain variable domain of TCR clone 7328 (TRBV12-4, TRBJ2-5)
CASSPPTGLQETQYF

SEQ ID NO: 14657 - protein, 14 aa, Homo sapiens
  CDR3 for alpha chain variable domain of TCR clone 7329 (TRAV12-1, TRAJ22)
CVVTTSGSARQLTF

SEQ ID NO: 14658 - protein, 16 aa, Homo sapiens
  CDR3 for beta chain variable domain of TCR clone 7329 (TRBV6-6, TRBJ2-1)
CASSLLSDSSYNEQFF

SEQ ID NO: 14659 - protein, 16 aa, Homo sapiens
  CDR3 for alpha chain variable domain of TCR clone 7330 (TRAV8-6, TRAJ4)
CAVSERISGGYNKLIF

SEQ ID NO: 14660 - protein, 19 aa, Homo sapiens
  CDR3 for beta chain variable domain of TCR clone 7330 (TRBV19, TRBJ1-5)
CASSISPRQTGGGNQPQHF

SEQ ID NO: 14661 - protein, 15 aa, Homo sapiens
  CDR3 for alpha chain variable domain of TCR clone 7331 (TRAV21, TRAJ40)
CAVRPQTSGTYKYIF

SEQ ID NO: 14662 - protein, 15 aa, Homo sapiens
  CDR3 for beta chain variable domain of TCR clone 7331 (TRBV5-1, TRBJ2-1)
CASSPPRAPYNEQFF

SEQ ID NO: 14663 - protein, 13 aa, Homo sapiens
  CDR3 for alpha chain variable domain of TCR clone 7332 (TRAV2, TRAJ40)
CAVVTSGTYKYIF

SEQ ID NO: 14664 - protein, 13 aa, Homo sapiens
  CDR3 for beta chain variable domain of TCR clone 7332 (TRBV7-9, TRBJ1-2)
CASSLKQNYGYTF

SEQ ID NO: 14665 - protein, 15 aa, Homo sapiens
  CDR3 for alpha chain variable domain of TCR clone 7333 (TRAV26-1, TRAJ29)
CIVRVEGSGNTPLAF

SEQ ID NO: 14666 - protein, 14 aa, Homo sapiens
  CDR3 for beta chain variable domain of TCR clone 7333 (TRBV18, TRBJ2-5)
CASSPGVSQETQYF

SEQ ID NO: 14667 - protein, 15 aa, Homo sapiens
  CDR3 for alpha chain variable domain of TCR clone 7334 (TRAV26-1, TRAJ29)
CIVRVEGSGNTPLVF

SEQ ID NO: 14668 - protein, 15 aa, Homo sapiens
  CDR3 for beta chain variable domain of TCR clone 7334 (TRBV7-9, TRBJ1-5)
CASSQGHQPKQPQHF

SEQ ID NO: 14669 - protein, 12 aa, Homo sapiens
  CDR3 for alpha chain variable domain of TCR clone 7335 (TRAV12-3, TRAJ17)
CAMTLTGNKLTF

SEQ ID NO: 14670 - protein, 15 aa, Homo sapiens
  CDR3 for beta chain variable domain of TCR clone 7335 (TRBV20-1, TRBJ2-7)
YSARDRVSGMDEQYF

SEQ ID NO: 14671 - protein, 12 aa, Homo sapiens
  CDR3 for alpha chain variable domain of TCR clone 7336 (TRAV21, TRAJ37)
CAVRGNTGKLIF

SEQ ID NO: 14672 - protein, 16 aa, Homo sapiens
  CDR3 for beta chain variable domain of TCR clone 7336 (TRBV19, TRBJ2-2)
CASRSPGTGATGELFF

SEQ ID NO: 14673 - protein, 14 aa, Homo sapiens
  CDR3 for alpha chain variable domain of TCR clone 7337 (TRAV12-2, TRAJ13)
CAVKKTGGYQEVTF

SEQ ID NO: 14674 - protein, 17 aa, Homo sapiens
  CDR3 for beta chain variable domain of TCR clone 7337 (TRBV20-1, TRBJ2-2)
CSASGSGQGGLTGELFF

SEQ ID NO: 14675 - protein, 13 aa, Homo sapiens
  CDR3 for alpha chain variable domain of TCR clone 7338 (TRAV8-6, TRAJ49)
CAVITNTGNQFYF

SEQ ID NO: 14676 - protein, 17 aa, Homo sapiens
  CDR3 for beta chain variable domain of TCR clone 7338 (TRBV15, TRBJ1-5)
CATSRAPPGTRNQPQHF

SEQ ID NO: 14677 - protein, 18 aa, Homo sapiens
  CDR3 for alpha chain variable domain of TCR clone 7339 (TRAV21, TRAJ52)
CAVRPSPAGGTSSGKLTF

SEQ ID NO: 14678 - protein, 17 aa, Homo sapiens
  CDR3 for beta chain variable domain of TCR clone 7339 (TRBV13, TRBJ2-3)
CASSLSRVAGGRNTQYF

SEQ ID NO: 14679 - protein, 14 aa, Homo sapiens
  CDR3 for alpha chain variable domain of TCR clone 7340 (TRAV12-3, TRAJ10)
SHLPLTGGGNKLTF

SEQ ID NO: 14680 - protein, 16 aa, Homo sapiens
  CDR3 for beta chain variable domain of TCR clone 7340 (TRBV29-1, TRBJ2-7)
CSVEVVGTSGSYEQYF

SEQ ID NO: 14681 - protein, 16 aa, Homo sapiens
  CDR3 for alpha chain variable domain of TCR clone 7341 (TRAV3, TRAJ10)
CAVRDMRAGGGNKLTF

SEQ ID NO: 14682 - protein, 14 aa, Homo sapiens
  CDR3 for beta chain variable domain of TCR clone 7341 (TRBV11-2, TRBJ2-7)
CASSSTGEGYEQYF

SEQ ID NO: 14683 - protein, 14 aa, Homo sapiens
  CDR3 for alpha chain variable domain of TCR clone 7342 (TRAV29/DV5, TRAJ28)
CAATEGAGSYQLTF

SEQ ID NO: 14684 - protein, 13 aa, Homo sapiens
  CDR3 for beta chain variable domain of TCR clone 7342 (TRBV20-1, TRBJ1-5)
CSASGRGNQPQHF

SEQ ID NO: 14685 - protein, 13 aa, Homo sapiens
  CDR3 for alpha chain variable domain of TCR clone 7343 (TRAV12-3, TRAJ33)
CAMSVNSNYQLIW

SEQ ID NO: 14686 - protein, 13 aa, Homo sapiens
  CDR3 for beta chain variable domain of TCR clone 7343 (TRBV7-2, TRBJ2-2)
CASSVAVTGELFF

SEQ ID NO: 14687 - protein, 11 aa, Homo sapiens
  CDR3 for alpha chain variable domain of TCR clone 7344 (TRAV3, TRAJ21)
CAVVNFNKFYF

SEQ ID NO: 14688 - protein, 16 aa, Homo sapiens
  CDR3 for beta chain variable domain of TCR clone 7344 (TRBV19, TRBJ2-1)
CASSKAGPSSYNEQFF

SEQ ID NO: 14689 - protein, 13 aa, Homo sapiens
  CDR3 for alpha chain variable domain of TCR clone 7345 (TRAV12-3, TRAJ57)
CAMVGAGSEKLVF

SEQ ID NO: 14690 - protein, 15 aa, Homo sapiens
  CDR3 for beta chain variable domain of TCR clone 7345 (TRBV7-2, TRBJ1-3)
CASSWGGITGNTIYF

SEQ ID NO: 14691 - protein, 17 aa, Homo sapiens
  CDR3 for alpha chain variable domain of TCR clone 7346 (TRAV3, TRAJ6)
CAVRDGPRAGGSYRPTF

SEQ ID NO: 14692 - protein, 14 aa, Homo sapiens
  CDR3 for beta chain variable domain of TCR clone 7346 (TRBV7-2, TRBJ2-7)
CASSPKTSFYEQYF

SEQ ID NO: 14693 - protein, 15 aa, Homo sapiens
  CDR3 for alpha chain variable domain of TCR clone 7347 (TRAV8-3, TRAJ45)
CASSYSGGGADGLTF

SEQ ID NO: 14694 - protein, 14 aa, Homo sapiens
  CDR3 for beta chain variable domain of TCR clone 7347 (TRBV19, TRBJ2-1)
CASPTFVLSGEQFF

SEQ ID NO: 14695 - protein, 12 aa, Homo sapiens
  CDR3 for alpha chain variable domain of TCR clone 7348 (TRAV12-3, TRAJ17)
CAMTLTGNKLTF

SEQ ID NO: 14696 - protein, 12 aa, Homo sapiens
  CDR3 for beta chain variable domain of TCR clone 7348 (TRBV11-2, TRBJ2-1)
CASSPGNNEQFF

SEQ ID NO: 14697 - protein, 14 aa, Homo sapiens
  CDR3 for alpha chain variable domain of TCR clone 7349 (TRAV1-2, TRAJ8)
CAVREDAGFQKLVF

SEQ ID NO: 14698 - protein, 15 aa, Homo sapiens
  CDR3 for beta chain variable domain of TCR clone 7349 (TRBV6-3, TRBJ2-7)
CASSSPGTVFYEQYF

SEQ ID NO: 14699 - protein, 14 aa, Homo sapiens
  CDR3 for alpha chain variable domain of TCR clone 7350 (TRAV13-1, TRAJ35)
CAASKGGSGNVLHC

SEQ ID NO: 14700 - protein, 13 aa, Homo sapiens
  CDR3 for beta chain variable domain of TCR clone 7350 (TRBV7-3, TRBJ1-1)
CASSQDWGAEAFF

SEQ ID NO: 14701 - protein, 16 aa, Homo sapiens
  CDR3 for alpha chain variable domain of TCR clone 7351 (TRAV21, TRAJ52)
CAVTNAGGTSYGKLTF

SEQ ID NO: 14702 - protein, 15 aa, Homo sapiens
  CDR3 for beta chain variable domain of TCR clone 7351 (TRBV20-1, TRBJ2-7)
CSARDRVSGMDEQYF

SEQ ID NO: 14703 - protein, 14 aa, Homo sapiens
  CDR3 for alpha chain variable domain of TCR clone 7352 (TRAV4, TRAJ20)
CLVGDFINDYKLSF

SEQ ID NO: 14704 - protein, 15 aa, Homo sapiens
  CDR3 for beta chain variable domain of TCR clone 7352 (TRBV6-5, TRBJ1-1)
CASSYLRGSVPEAFF

SEQ ID NO: 14705 - protein, 11 aa, Homo sapiens
  CDR3 for alpha chain variable domain of TCR clone 7353 (TRAV14/DV4, TRAJ31)
CAMRENARLMF

SEQ ID NO: 14706 - protein, 15 aa, Homo sapiens
  CDR3 for beta chain variable domain of TCR clone 7353 (TRBV19, TRBJ2-1)
CASSLETSGYNEQFF

SEQ ID NO: 14707 - protein, 10 aa, Homo sapiens
  CDR3 for alpha chain variable domain of TCR clone 7354 (TRAV36/DV7, TRAJ48)
CAVGNEKLTF

SEQ ID NO: 14708 - protein, 14 aa, Homo sapiens
  CDR3 for beta chain variable domain of TCR clone 7354 (TRBV7-2, TRBJ2-7)
CASSPKTSFYEQYF

SEQ ID NO: 14709 - protein, 16 aa, Homo sapiens
  CDR3 for alpha chain variable domain of TCR clone 7355 (TRAV35, TRAJ20)
CWADPSSGFNDYKLSF

SEQ ID NO: 14710 - protein, 14 aa, Homo sapiens
  CDR3 for beta chain variable domain of TCR clone 7355 (TRBV10-3, TRBJ2-2)
CAISEVSHSGELFF

SEQ ID NO: 14711 - protein, 14 aa, Homo sapiens
  CDR3 for alpha chain variable domain of TCR clone 7356 (TRAV20, TRAJ42)
CAVQARGSQGNLIF

SEQ ID NO: 14712 - protein, 15 aa, Homo sapiens
  CDR3 for beta chain variable domain of TCR clone 7356 (TRBV2, TRBJ2-1)
CASSELAGSYNEQFF

SEQ ID NO: 14713 - protein, 14 aa, Homo sapiens
  CDR3 for alpha chain variable domain of TCR clone 7357 (TRAV1-2, TRAJ8)
CAVRDPPGFQKLVF

SEQ ID NO: 14714 - protein, 14 aa, Homo sapiens
  CDR3 for beta chain variable domain of TCR clone 7357 (TRBV4-2, TRBJ2-7)
CASSHRTGEYEQYF

SEQ ID NO: 14715 - protein, 17 aa, Homo sapiens
  CDR3 for alpha chain variable domain of TCR clone 7358 (TRAV3, TRAJ6)
CAVRDVPRAGGSYIPTF

SEQ ID NO: 14716 - protein, 14 aa, Homo sapiens
  CDR3 for beta chain variable domain of TCR clone 7358 (TRBV7-2, TRBJ2-7)
CASSPKTSFYEQYF

SEQ ID NO: 14717 - protein, 10 aa, Homo sapiens
  CDR3 for alpha chain variable domain of TCR clone 7359 (TRAV20, TRAJ22)
CAAPARQLTF

SEQ ID NO: 14718 - protein, 11 aa, Homo sapiens
  CDR3 for beta chain variable domain of TCR clone 7359 (TRBV29-1, TRBJ2-5)
CSEDRTGTQYF

SEQ ID NO: 14719 - protein, 14 aa, Homo sapiens
  CDR3 for alpha chain variable domain of TCR clone 7360 (TRAV12-1, TRAJ38)
CVVHNAGNNRKLIW

SEQ ID NO: 14720 - protein, 14 aa, Homo sapiens
  CDR3 for beta chain variable domain of TCR clone 7360 (TRBV14, TRBJ2-7)
CASSHPGGPGEQYF

SEQ ID NO: 14721 - protein, 14 aa, Homo sapiens
  CDR3 for alpha chain variable domain of TCR clone 7361 (TRAV12-1, TRAJ17)
CVVNYKAAGNKLTF

SEQ ID NO: 14722 - protein, 17 aa, Homo sapiens
  CDR3 for beta chain variable domain of TCR clone 7361 (TRBV20-1, TRBJ2-1)
CSASSSGLAGSYNEQLF

SEQ ID NO: 14723 - protein, 16 aa, Homo sapiens
  CDR3 for alpha chain variable domain of TCR clone 7362 (TRAV3, TRAJ10)
CAVRDMNAGGGNKLTL

SEQ ID NO: 14724 - protein, 16 aa, Homo sapiens
  CDR3 for beta chain variable domain of TCR clone 7362 (TRBV6-3, TRBJ1-2)
CASSYSRRASNYGYTF

SEQ ID NO: 14725 - protein, 15 aa, Homo sapiens
  CDR3 for alpha chain variable domain of TCR clone 7363 (TRAV12-1, TRAJ8)
CVVNVENTGFQKLVF

SEQ ID NO: 14726 - protein, 15 aa, Homo sapiens
  CDR3 for beta chain variable domain of TCR clone 7363 (TRBV12-4, TRBJ1-6)
CASSLGQGFRSPLHF

SEQ ID NO: 14727 - protein, 14 aa, Homo sapiens
  CDR3 for alpha chain variable domain of TCR clone 7364 (TRAV12-1, TRAJ39)
CVVSLNNAGNMLTF

SEQ ID NO: 14728 - protein, 13 aa, Homo sapiens
  CDR3 for beta chain variable domain of TCR clone 7364 (TRBV9, TRBJ2-7)
CASSVLQAGEQYF

SEQ ID NO: 14729 - protein, 13 aa, Homo sapiens
  CDR3 for alpha chain variable domain of TCR clone 7365 (TRAV12-1, TRAJ34)
CVVTGYNTDKLIF

SEQ ID NO: 14730 - protein, 14 aa, Homo sapiens
  CDR3 for beta chain variable domain of TCR clone 7365 (TRBV19, TRBJ2-1)
CASPTFVLSGEQFF

SEQ ID NO: 14731 - protein, 13 aa, Homo sapiens
  CDR3 for alpha chain variable domain of TCR clone 7366 (TRAV12-1, TRAJ26)
SATYPYYGQNFVF

SEQ ID NO: 14732 - protein, 15 aa, Homo sapiens
  CDR3 for beta chain variable domain of TCR clone 7366 (TRBV5-1, TRBJ2-6)
CASSLDPSGANVLTF

SEQ ID NO: 14733 - protein, 12 aa, Homo sapiens
  CDR3 for alpha chain variable domain of TCR clone 7367 (TRAV2, TRAJ26)
CAGSPGRLWSEF

SEQ ID NO: 14734 - protein, 17 aa, Homo sapiens
  CDR3 for beta chain variable domain of TCR clone 7367 (TRBV11-2, TRBJ2-1)
CASSLYPPGVEYNEQFF

SEQ ID NO: 14735 - protein, 13 aa, Homo sapiens
  CDR3 for alpha chain variable domain of TCR clone 7368 (TRAV12-2, TRAJ32)
CAAYGGATNKLIF

SEQ ID NO: 14736 - protein, 16 aa, Homo sapiens
  CDR3 for beta chain variable domain of TCR clone 7368 (TRBV19, TRBJ2-3)
CASGTGPNDGTDTQYF

SEQ ID NO: 14737 - protein, 14 aa, Homo sapiens
  CDR3 for alpha chain variable domain of TCR clone 7369 (TRAV1-2, TRAJ16)
CAVNRFSDGQRLLF

SEQ ID NO: 14738 - protein, 15 aa, Homo sapiens
  CDR3 for beta chain variable domain of TCR clone 7369 (TRBV9, TRBJ1-6)
CASSVAGTGDSPLHF

SEQ ID NO: 14739 - protein, 13 aa, Homo sapiens
  CDR3 for alpha chain variable domain of TCR clone 7370 (TRAV1-2, TRAJ9)
CAALNTGGFKTIF

SEQ ID NO: 14740 - protein, 15 aa, Homo sapiens
  CDR3 for beta chain variable domain of TCR clone 7370 (TRBV9, TRBJ1-6)
CASSVAGTGDSPLHF

SEQ ID NO: 14741 - protein, 12 aa, Homo sapiens
  CDR3 for alpha chain variable domain of TCR clone 7371 (TRAV8-6, TRAJ36)
CAVSDWLGQTTS

SEQ ID NO: 14742 - protein, 15 aa, Homo sapiens
  CDR3 for beta chain variable domain of TCR clone 7371 (TRBV10-3, TRBJ2-2)
CAISVATSNTGELFF

SEQ ID NO: 14743 - protein, 12 aa, Homo sapiens
  CDR3 for alpha chain variable domain of TCR clone 7372 (TRAV6, TRAJ10)
CALERGGNKLTF

SEQ ID NO: 14744 - protein, 15 aa, Homo sapiens
  CDR3 for beta chain variable domain of TCR clone 7372 (TRBV12-4, TRBJ1-5)
CASSLPGRSNQPQHF

SEQ ID NO: 14745 - protein, 14 aa, Homo sapiens
  CDR3 for alpha chain variable domain of TCR clone 7373 (TRAV20, TRAJ42)
CCAADGGSQGNLIF

SEQ ID NO: 14746 - protein, 14 aa, Homo sapiens
  CDR3 for beta chain variable domain of TCR clone 7373 (TRBV14, TRBJ2-3)
CASSRKLAADTQYF

SEQ ID NO: 14747 - protein, 13 aa, Homo sapiens
  CDR3 for alpha chain variable domain of TCR clone 7374 (TRAV12-3, TRAJ4)
CAMTERGYNKLIF

SEQ ID NO: 14748 - protein, 17 aa, Homo sapiens
  CDR3 for beta chain variable domain of TCR clone 7374 (TRBV28, TRBJ2-3)
CASSLQVGPSSTDTQYF

SEQ ID NO: 14749 - protein, 11 aa, Homo sapiens
  CDR3 for alpha chain variable domain of TCR clone 7375 (TRAV9-2, TRAJ49)
CALSAGNQFYF

SEQ ID NO: 14750 - protein, 16 aa, Homo sapiens
  CDR3 for beta chain variable domain of TCR clone 7375 (TRBV28, TRBJ2-6)
CASSNRRGSGANVLTF

SEQ ID NO: 14751 - protein, 15 aa, Homo sapiens
  CDR3 for alpha chain variable domain of TCR clone 7376 (TRAV8-3, TRAJ45)
CASSYSGGGADGLTF

SEQ ID NO: 14752 - protein, 13 aa, Homo sapiens
  CDR3 for beta chain variable domain of TCR clone 7376 (TRBV10-3, TRBJ2-7)
CASKLAVNYGQYF

SEQ ID NO: 14753 - protein, 14 aa, Homo sapiens
  CDR3 for alpha chain variable domain of TCR clone 7377 (TRAV35, TRAJ22)
CAGLRPGSARQLTF

SEQ ID NO: 14754 - protein, 17 aa, Homo sapiens
  CDR3 for beta chain variable domain of TCR clone 7377 (TRBV15, TRBJ1-4)
CATSRYGTGDPNEKLFF

SEQ ID NO: 14755 - protein, 12 aa, Homo sapiens
  CDR3 for alpha chain variable domain of TCR clone 7378 (TRAV8-4, TRAJ31)
CAVSDSNARLMF

SEQ ID NO: 14756 - protein, 14 aa, Homo sapiens
  CDR3 for beta chain variable domain of TCR clone 7378 (TRBV20-1, TRBJ2-7)
CSAKRGRSSYEQYF

SEQ ID NO: 14757 - protein, 11 aa, Homo sapiens
  CDR3 for alpha chain variable domain of TCR clone 7379 (TRAV1-2, TRAJ20)
CAVANDYKLSF

SEQ ID NO: 14758 - protein, 17 aa, Homo sapiens
  CDR3 for beta chain variable domain of TCR clone 7379 (TRBV20-1, TRBJ2-1)
CSASSSGLAGSYNEQFF

SEQ ID NO: 14759 - protein, 12 aa, Homo sapiens
  CDR3 for alpha chain variable domain of TCR clone 7380 (TRAV3, TRAJ31)
CAAQRANARLMF

SEQ ID NO: 14760 - protein, 15 aa, Homo sapiens
  CDR3 for beta chain variable domain of TCR clone 7380 (TRBV10-2, TRBJ1-4)
CASTPIDRGNEKLFF

SEQ ID NO: 14761 - protein, 14 aa, Homo sapiens
  CDR3 for alpha chain variable domain of TCR clone 7381 (TRAV1-2, TRAJ16)
CAVNRFSDGQKLLF

SEQ ID NO: 14762 - protein, 11 aa, Homo sapiens
  CDR3 for beta chain variable domain of TCR clone 7381 (TRBV11-2, TRBJ1-1)
CASSINTEAFF

SEQ ID NO: 14763 - protein, 15 aa, Homo sapiens
  CDR3 for alpha chain variable domain of TCR clone 7382 (TRAV13-1, TRAJ17)
CAASIERAAGNKLTF

SEQ ID NO: 14764 - protein, 17 aa, Homo sapiens
  CDR3 for beta chain variable domain of TCR clone 7382 (TRBV11-2, TRBJ2-1)
CASSLYPPGVEYNEQFF

SEQ ID NO: 14765 - protein, 13 aa, Homo sapiens
  CDR3 for alpha chain variable domain of TCR clone 7383 (TRAV2, TRAJ15)
CAVASQAGTALIF

SEQ ID NO: 14766 - protein, 17 aa, Homo sapiens
  CDR3 for beta chain variable domain of TCR clone 7383 (TRBV7-3, TRBJ2-5)
CASSLGSGRSGSETQYF

SEQ ID NO: 14767 - protein, 13 aa, Homo sapiens
  CDR3 for alpha chain variable domain of TCR clone 7384 (TRAV3, TRAJ27)
CAVRPLGAGKSTL

SEQ ID NO: 14768 - protein, 13 aa, Homo sapiens
  CDR3 for beta chain variable domain of TCR clone 7384 (TRBV7-9, TRBJ2-3)
CASSPGSTDTQYF

SEQ ID NO: 14769 - protein, 12 aa, Homo sapiens
  CDR3 for alpha chain variable domain of TCR clone 7385 (TRAV12-1, TRAJ40)
CVVYSGTYKYIF

SEQ ID NO: 14770 - protein, 15 aa, Homo sapiens
  CDR3 for beta chain variable domain of TCR clone 7385 (TRBV20-1, TRBJ2-7)
CSARDRVSGMDEQYF

SEQ ID NO: 14771 - protein, 12 aa, Homo sapiens
  CDR3 for alpha chain variable domain of TCR clone 7386 (TRAV30, TRAJ43)
CGTEERGNDMRF

SEQ ID NO: 14772 - protein, 15 aa, Homo sapiens
  CDR3 for beta chain variable domain of TCR clone 7386 (TRBV10-2, TRBJ2-6)
CASSEQGTGANVLTF

SEQ ID NO: 14773 - protein, 13 aa, Homo sapiens
  CDR3 for alpha chain variable domain of TCR clone 7387 (TRAV12-2, TRAJ10)
CAVPTGGGNKLTF

SEQ ID NO: 14774 - protein, 14 aa, Homo sapiens
  CDR3 for beta chain variable domain of TCR clone 7387 (TRBV15, TRBJ2-1)
CATSGVEDYNEQFF

SEQ ID NO: 14775 - protein, 15 aa, Homo sapiens
  CDR3 for alpha chain variable domain of TCR clone 7388 (TRAV26-1, TRAJ29)
CIVRVEGSGNTPPVF

SEQ ID NO: 14776 - protein, 15 aa, Homo sapiens
  CDR3 for beta chain variable domain of TCR clone 7388 (TRBV7-9, TRBJ1-5)
CASSQGHQPNQPQHF

SEQ ID NO: 14777 - protein, 11 aa, Homo sapiens
  CDR3 for alpha chain variable domain of TCR clone 7389 (TRAV13-1, TRAJ40)
CAVSGTYIYIF

SEQ ID NO: 14778 - protein, 13 aa, Homo sapiens
  CDR3 for beta chain variable domain of TCR clone 7389 (TRBV19, TRBJ1-5)
CASSIGGNQPQHF

SEQ ID NO: 14779 - protein, 14 aa, Homo sapiens
  CDR3 for alpha chain variable domain of TCR clone 7390 (TRAV2, TRAJ9)
CAVEDRSGGFKTIF

SEQ ID NO: 14780 - protein, 13 aa, Homo sapiens
  CDR3 for beta chain variable domain of TCR clone 7390 (TRBV3-1, TRBJ1-5)
CAITRRDGQPQHF

SEQ ID NO: 14781 - protein, 18 aa, Homo sapiens
  CDR3 for alpha chain variable domain of TCR clone 7391 (TRAV13-2, TRAJ52)
CAETPLNAGGTSYGKLTF

SEQ ID NO: 14782 - protein, 14 aa, Homo sapiens
  CDR3 for beta chain variable domain of TCR clone 7391 (TRBV7-9, TRBJ2-1)
CASSSMVGFGEQFF

SEQ ID NO: 14783 - protein, 16 aa, Homo sapiens
  CDR3 for alpha chain variable domain of TCR clone 7392 (TRAV23/DV6, TRAJ9)
CAASIGGNTGGFKTIF

SEQ ID NO: 14784 - protein, 12 aa, Homo sapiens
  CDR3 for beta chain variable domain of TCR clone 7392 (TRBV7-8, TRBJ2-7)
CASSLGDREQYF

SEQ ID NO: 14785 - protein, 15 aa, Homo sapiens
  CDR3 for alpha chain variable domain of TCR clone 7393 (TRAV4, TRAJ39)
CLVGPNNNAGNMLTF

SEQ ID NO: 14786 - protein, 19 aa, Homo sapiens
  CDR3 for beta chain variable domain of TCR clone 7393 (TRBV14, TRBJ2-1)
CASSQDQLWEAPEYNEQFF

SEQ ID NO: 14787 - protein, 16 aa, Homo sapiens
  CDR3 for alpha chain variable domain of TCR clone 7394 (TRAV26-1, TRAJ6)
CIVRVPRTGGSYIPTF

SEQ ID NO: 14788 - protein, 15 aa, Homo sapiens
  CDR3 for beta chain variable domain of TCR clone 7394 (TRBV10-3, TRBJ2-7)
CAISDMTALSYEQYF

SEQ ID NO: 14789 - protein, 15 aa, Homo sapiens
  CDR3 for alpha chain variable domain of TCR clone 7395 (TRAV8-3, TRAJ45)
CASSYSGGGADGLTF

SEQ ID NO: 14790 - protein, 15 aa, Homo sapiens
  CDR3 for beta chain variable domain of TCR clone 7395 (TRBV7-2, TRBJ2-2)
CASSSLTGGTGELFF

SEQ ID NO: 14791 - protein, 16 aa, Homo sapiens
  CDR3 for alpha chain variable domain of TCR clone 7396 (TRAV3, TRAJ37)
CAVRGKGSGNTGKLIF

SEQ ID NO: 14792 - protein, 14 aa, Homo sapiens
  CDR3 for beta chain variable domain of TCR clone 7396 (TRBV7-7, TRBJ2-2)
CASSRDRSTGELFF

SEQ ID NO: 14793 - protein, 15 aa, Homo sapiens
  CDR3 for alpha chain variable domain of TCR clone 7397 (TRAV26-1, TRAJ39)
CIVRDGSNAGNMLTF

SEQ ID NO: 14794 - protein, 16 aa, Homo sapiens
  CDR3 for beta chain variable domain of TCR clone 7397 (TRBV7-2, TRBJ1-3)
CASSRLEASSGNTIYF

SEQ ID NO: 14795 - protein, 17 aa, Homo sapiens
  CDR3 for alpha chain variable domain of TCR clone 7398 (TRAV3, TRAJ6)
CAVRDGPRAGGSYIPTF

SEQ ID NO: 14796 - protein, 20 aa, Homo sapiens
  CDR3 for beta chain variable domain of TCR clone 7398 (TRBV28, TRBJ2-1)
CASTPIGRSPGLAGGNEQFL

SEQ ID NO: 14797 - protein, 15 aa, Homo sapiens
  CDR3 for alpha chain variable domain of TCR clone 7399 (TRAV8-3, TRAJ44)
CAVGAGASTASKLTF

SEQ ID NO: 14798 - protein, 12 aa, Homo sapiens
  CDR3 for beta chain variable domain of TCR clone 7399 (TRBV7-8, TRBJ2-4)
CASSLGGNIQYF

SEQ ID NO: 14799 - protein, 14 aa, Homo sapiens
  CDR3 for alpha chain variable domain of TCR clone 7400 (TRAV1-1, TRAJ27)
CAVIYNTNAGKSTF

SEQ ID NO: 14800 - protein, 15 aa, Homo sapiens
  CDR3 for beta chain variable domain of TCR clone 7400 (TRBV7-2, TRBJ2-1)
CASSSELAGGNEQFF

SEQ ID NO: 14801 - protein, 15 aa, Homo sapiens
  CDR3 for alpha chain variable domain of TCR clone 7401 (TRAV2, TRAJ22)
CAVPSRGGSARQLTF

SEQ ID NO: 14802 - protein, 16 aa, Homo sapiens
  CDR3 for beta chain variable domain of TCR clone 7401 (TRBV12-4, TRBJ1-5)
CASSRPVGGSNQPQHF

SEQ ID NO: 14803 - protein, 14 aa, Homo sapiens
  CDR3 for alpha chain variable domain of TCR clone 7402 (TRAV26-1, TRAJ38)
CIADNAGNNRKPIW

SEQ ID NO: 14804 - protein, 13 aa, Homo sapiens
  CDR3 for beta chain variable domain of TCR clone 7402 (TRBV20-1, TRBJ1-1)
CSARGGGNTEAFF

SEQ ID NO: 14805 - protein, 16 aa, Homo sapiens
  CDR3 for alpha chain variable domain of TCR clone 7403 (TRAV3, TRAJ27)
CAVRDPQGTNAGKSTF

SEQ ID NO: 14806 - protein, 14 aa, Homo sapiens
  CDR3 for beta chain variable domain of TCR clone 7403 (TRBV7-2, TRBJ2-7)
CASRSQGAAYEQYF

SEQ ID NO: 14807 - protein, 13 aa, Homo sapiens
  CDR3 for alpha chain variable domain of TCR clone 7404 (TRAV8-6, TRAJ33)
CAVSEGSNYQLIW

SEQ ID NO: 14808 - protein, 13 aa, Homo sapiens
  CDR3 for beta chain variable domain of TCR clone 7404 (TRBV5-7, TRBJ2-3)
CASSLGRTDTQYF

SEQ ID NO: 14809 - protein, 15 aa, Homo sapiens
  CDR3 for alpha chain variable domain of TCR clone 7405 (TRAV4, TRAJ39)
CLVGPNNNAGNMLTF

SEQ ID NO: 14810 - protein, 12 aa, Homo sapiens
  CDR3 for beta chain variable domain of TCR clone 7405 (TRBV7-8, TRBJ2-7)
CASSLGDREQYF

SEQ ID NO: 14811 - protein, 14 aa, Homo sapiens
  CDR3 for alpha chain variable domain of TCR clone 7406 (TRAV1-2, TRAJ16)
CAVNRFSDGQKLLF

SEQ ID NO: 14812 - protein, 11 aa, Homo sapiens
  CDR3 for beta chain variable domain of TCR clone 7406 (TRBV12-4, TRBJ2-2)
CASSSAGELFF

SEQ ID NO: 14813 - protein, 12 aa, Homo sapiens
  CDR3 for alpha chain variable domain of TCR clone 7407 (TRAV8-3, TRAJ26)
CAGDNYGQNFVF

SEQ ID NO: 14814 - protein, 13 aa, Homo sapiens
  CDR3 for beta chain variable domain of TCR clone 7407 (TRBV7-2, TRBJ2-7)
CASSSPSGSEQYF

SEQ ID NO: 14815 - protein, 13 aa, Homo sapiens
  CDR3 for alpha chain variable domain of TCR clone 7408 (TRAV22, TRAJ12)
CAGRMDSSYKLIF

SEQ ID NO: 14816 - protein, 15 aa, Homo sapiens
  CDR3 for beta chain variable domain of TCR clone 7408 (TRBV10-1, TRBJ2-1)
CASSEWRGTYNEQFF

SEQ ID NO: 14817 - protein, 13 aa, Homo sapiens
  CDR3 for alpha chain variable domain of TCR clone 7409 (TRAV27, TRAJ57)
CRSAQGGSEKLVF

SEQ ID NO: 14818 - protein, 16 aa, Homo sapiens
  CDR3 for beta chain variable domain of TCR clone 7409 (TRBV10-3, TRBJ2-1)
CAISGVGDGGGGEQFF

SEQ ID NO: 14819 - protein, 13 aa, Homo sapiens
  CDR3 for alpha chain variable domain of TCR clone 7410 (TRAV26-2, TRAJ43)
CILRAVNNNDMRF

SEQ ID NO: 14820 - protein, 17 aa, Homo sapiens
  CDR3 for beta chain variable domain of TCR clone 7410 (TRBV20-1, TRBJ2-2)
CSASGSGQGGLTGELFF

SEQ ID NO: 14821 - protein, 13 aa, Homo sapiens
  CDR3 for alpha chain variable domain of TCR clone 7411 (TRAV23/DV6, TRAJ35)
CAAQLGFGNVLHC

SEQ ID NO: 14822 - protein, 15 aa, Homo sapiens
  CDR3 for beta chain variable domain of TCR clone 7411 (TRBV27, TRBJ2-2)
CASSKQGASTGELFF

SEQ ID NO: 14823 - protein, 14 aa, Homo sapiens
  CDR3 for alpha chain variable domain of TCR clone 7412 (TRAV8-6, TRAJ8)
CAVNENTGFQKLVF

SEQ ID NO: 14824 - protein, 15 aa, Homo sapiens
  CDR3 for beta chain variable domain of TCR clone 7412 (TRBV27, TRBJ2-3)
CASSSLAGVIDTQYF

SEQ ID NO: 14825 - protein, 13 aa, Homo sapiens
  CDR3 for alpha chain variable domain of TCR clone 7413 (TRAV4, TRAJ42)
CLVGGGSQGNLIF

SEQ ID NO: 14826 - protein, 15 aa, Homo sapiens
  CDR3 for beta chain variable domain of TCR clone 7413 (TRBV29-1, TRBJ2-7)
CSVEFFDRGSYEQYF

SEQ ID NO: 14827 - protein, 11 aa, Homo sapiens
  CDR3 for alpha chain variable domain of TCR clone 7414 (TRAV12-1, TRAJ34)
CVVNKGRELIF

SEQ ID NO: 14828 - protein, 16 aa, Homo sapiens
  CDR3 for beta chain variable domain of TCR clone 7414 (TRBV5-4, TRBJ2-3)
CASQQPGAGGADTQYF

SEQ ID NO: 14829 - protein, 16 aa, Homo sapiens
  CDR3 for alpha chain variable domain of TCR clone 7415 (TRAV8-1, TRAJ18)
CAVNAGRGSTLGRLYF

SEQ ID NO: 14830 - protein, 15 aa, Homo sapiens
  CDR3 for beta chain variable domain of TCR clone 7415 (TRBV7-2, TRBJ2-5)
CASTPRGASGETQYF

SEQ ID NO: 14831 - protein, 14 aa, Homo sapiens
  CDR3 for alpha chain variable domain of TCR clone 7416 (TRAV1-1, TRAJ27)
CAVIYNTNAGESTF

SEQ ID NO: 14832 - protein, 15 aa, Homo sapiens
  CDR3 for beta chain variable domain of TCR clone 7416 (TRBV7-2, TRBJ2-1)
CASSSGLAGGNEQFF

SEQ ID NO: 14833 - protein, 13 aa, Homo sapiens
  CDR3 for alpha chain variable domain of TCR clone 7417 (TRAV26-1, TRAJ12)
CIVRPDSSYKLIF

SEQ ID NO: 14834 - protein, 15 aa, Homo sapiens
  CDR3 for beta chain variable domain of TCR clone 7417 (TRBV7-2, TRBJ2-1)
CASTHGTGIYNEQFF

SEQ ID NO: 14835 - protein, 15 aa, Homo sapiens
  CDR3 for alpha chain variable domain of TCR clone 7418 (TRAV2, TRAJ20)
CAVDLRGSNDYKLSF

SEQ ID NO: 14836 - protein, 12 aa, Homo sapiens
  CDR3 for beta chain variable domain of TCR clone 7418 (TRBV19, TRBJ2-3)
CASSIGGQAPYF

SEQ ID NO: 14837 - protein, 14 aa, Homo sapiens
  CDR3 for alpha chain variable domain of TCR clone 7419 (TRAV1-2, TRAJ4)
CAVRSPGGYNKLIF

SEQ ID NO: 14838 - protein, 16 aa, Homo sapiens
  CDR3 for beta chain variable domain of TCR clone 7419 (TRBV20-1, TRBJ2-3)
CSAASGRGVSTDTQYF

SEQ ID NO: 14839 - protein, 13 aa, Homo sapiens
  CDR3 for alpha chain variable domain of TCR clone 7420 (TRAV3, TRAJ20)
CCEAFCNDYKLSF

SEQ ID NO: 14840 - protein, 15 aa, Homo sapiens
  CDR3 for beta chain variable domain of TCR clone 7420 (TRBV7-8, TRBJ1-1)
CASSLGDSRNTEAFF

SEQ ID NO: 14841 - protein, 16 aa, Homo sapiens
  CDR3 for alpha chain variable domain of TCR clone 7421 (TRAV30, TRAJ24)
CGTEIVDADSWGKFQF

SEQ ID NO: 14842 - protein, 14 aa, Homo sapiens
  CDR3 for beta chain variable domain of TCR clone 7421 (TRBV12-5, TRBJ2-5)
CASGSQTHQETQYF

SEQ ID NO: 14843 - protein, 14 aa, Homo sapiens
  CDR3 for alpha chain variable domain of TCR clone 7422 (TRAV8-3, TRAJ36)
CAVGLITGANNLFF

SEQ ID NO: 14844 - protein, 15 aa, Homo sapiens
  CDR3 for beta chain variable domain of TCR clone 7422 (TRBV4-1, TRBJ2-1)
CASSQDPGNYNEQFF

SEQ ID NO: 14845 - protein, 14 aa, Homo sapiens
  CDR3 for alpha chain variable domain of TCR clone 7423 (TRAV1-2, TRAJ8)
CAVREDTGFQKLVF

SEQ ID NO: 14846 - protein, 13 aa, Homo sapiens
  CDR3 for beta chain variable domain of TCR clone 7423 (TRBV4-2, TRBJ1-1)
CASSQAGNTEAFF

SEQ ID NO: 14847 - protein, 13 aa, Homo sapiens
  CDR3 for alpha chain variable domain of TCR clone 7424 (TRAV2, TRAJ38)
CAYGAGNNRKLIW

SEQ ID NO: 14848 - protein, 13 aa, Homo sapiens
  CDR3 for beta chain variable domain of TCR clone 7424 (TRBV6-1, TRBJ1-6)
CASSSSWDSPLHF

SEQ ID NO: 14849 - protein, 14 aa, Homo sapiens
  CDR3 for alpha chain variable domain of TCR clone 7425 (TRAV1-2, TRAJ24)
CAVLTTDSWGKFQF

SEQ ID NO: 14850 - protein, 21 aa, Homo sapiens
  CDR3 for beta chain variable domain of TCR clone 7425 (TRBV6-5, TRBJ1-3)
CASSYWEKIAQGMSSGNTIYF

SEQ ID NO: 14851 - protein, 17 aa, Homo sapiens
  CDR3 for alpha chain variable domain of TCR clone 7426 (TRAV26-1, TRAJ37)
CIVRVITVSSNTGKLIF

SEQ ID NO: 14852 - protein, 13 aa, Homo sapiens
  CDR3 for beta chain variable domain of TCR clone 7426 (TRBV2, TRBJ2-7)
CASSVGGSGEQYF

SEQ ID NO: 14853 - protein, 13 aa, Homo sapiens
  CDR3 for alpha chain variable domain of TCR clone 7427 (TRAV17, TRAJ37)
CATDPGNTGKLIF

SEQ ID NO: 14854 - protein, 13 aa, Homo sapiens
  CDR3 for beta chain variable domain of TCR clone 7427 (TRBV5-5, TRBJ2-5)
CASSSLGQETQYF

SEQ ID NO: 14855 - protein, 17 aa, Homo sapiens
  CDR3 for alpha chain variable domain of TCR clone 7428 (TRAV3, TRAJ6)
CAVRDGPRAVGSYIPTF

SEQ ID NO: 14856 - protein, 14 aa, Homo sapiens
  CDR3 for beta chain variable domain of TCR clone 7428 (TRBV7-2, TRBJ2-7)
CASSPKTSFYEQYF

SEQ ID NO: 14857 - protein, 14 aa, Homo sapiens
  CDR3 for alpha chain variable domain of TCR clone 7429 (TRAV21, TRAJ4)
CAAPGVGGYNKLIF

SEQ ID NO: 14858 - protein, 13 aa, Homo sapiens
  CDR3 for beta chain variable domain of TCR clone 7429 (TRBV7-3, TRBJ2-1)
CASSPGSYNEQFF

SEQ ID NO: 14859 - protein, 11 aa, Homo sapiens
  CDR3 for alpha chain variable domain of TCR clone 7430 (TRAV6, TRAJ41)
CALNSGYALNF

SEQ ID NO: 14860 - protein, 15 aa, Homo sapiens
  CDR3 for beta chain variable domain of TCR clone 7430 (TRBV20-1, TRBJ1-5)
CSAFKNGQRNQPQHF

SEQ ID NO: 14861 - protein, 13 aa, Homo sapiens
  CDR3 for alpha chain variable domain of TCR clone 7431 (TRAV21, TRAJ27)
CAARPGNAGKSTF

SEQ ID NO: 14862 - protein, 16 aa, Homo sapiens
  CDR3 for beta chain variable domain of TCR clone 7431 (TRBV7-6, TRBJ2-1)
CIAVPAAWGGADEQFF

SEQ ID NO: 14863 - protein, 11 aa, Homo sapiens
  CDR3 for alpha chain variable domain of TCR clone 7432 (TRAV1-1, TRAJ23)
CAVRQGGKLIF

SEQ ID NO: 14864 - protein, 12 aa, Homo sapiens
  CDR3 for beta chain variable domain of TCR clone 7432 (TRBV19, TRBJ1-1)
CASSIGTEEAFF

SEQ ID NO: 14865 - protein, 17 aa, Homo sapiens
  CDR3 for alpha chain variable domain of TCR clone 7433 (TRAV19, TRAJ32)
CALSERPYGGATNKLIF

SEQ ID NO: 14866 - protein, 15 aa, Homo sapiens
  CDR3 for beta chain variable domain of TCR clone 7433 (TRBV28, TRBJ1-3)
CASSMGWASGNTIYF

SEQ ID NO: 14867 - protein, 13 aa, Homo sapiens
  CDR3 for alpha chain variable domain of TCR clone 7434 (TRAV8-3, TRAJ21)
CAVGIYNFNKFYF

SEQ ID NO: 14868 - protein, 13 aa, Homo sapiens
  CDR3 for beta chain variable domain of TCR clone 7434 (TRBV7-7, TRBJ2-5)
CASSLRAIETQYF

SEQ ID NO: 14869 - protein, 18 aa, Homo sapiens
  CDR3 for alpha chain variable domain of TCR clone 7435 (TRAV13-1, TRAJ52)
CAAKNPNAGGTSYGKLTF

SEQ ID NO: 14870 - protein, 12 aa, Homo sapiens
  CDR3 for beta chain variable domain of TCR clone 7435 (TRBV4-3, TRBJ2-1)
CASSLSGYEQFF

SEQ ID NO: 14871 - protein, 14 aa, Homo sapiens
  CDR3 for alpha chain variable domain of TCR clone 7436 (TRAV12-3, TRAJ10)
SHLPLTGGGNKLTF

SEQ ID NO: 14872 - protein, 22 aa, Homo sapiens
  CDR3 for beta chain variable domain of TCR clone 7436 (TRBV6-1, TRBJ1-3)
CASVQGGGWKHHIFWRGKLAHC

SEQ ID NO: 14873 - protein, 14 aa, Homo sapiens
  CDR3 for alpha chain variable domain of TCR clone 7437 (TRAV12-1, TRAJ17)
CVVNYKAAGNKLTF

SEQ ID NO: 14874 - protein, 17 aa, Homo sapiens
  CDR3 for beta chain variable domain of TCR clone 7437 (TRBV20-1, TRBJ2-1)
RSASSSGLAGSYNEQFF

SEQ ID NO: 14875 - protein, 14 aa, Homo sapiens
  CDR3 for alpha chain variable domain of TCR clone 7438 (TRAV12-2, TRAJ13)
CAVKKTGGYQKVTS

SEQ ID NO: 14876 - protein, 15 aa, Homo sapiens
  CDR3 for beta chain variable domain of TCR clone 7438 (TRBV27, TRBJ2-1)
CASSNGGGSSNEQFF

SEQ ID NO: 14877 - protein, 13 aa, Homo sapiens
  CDR3 for alpha chain variable domain of TCR clone 7439 (TRAV2, TRAJ24)
CAVPTDSWGKLQF

SEQ ID NO: 14878 - protein, 16 aa, Homo sapiens
  CDR3 for beta chain variable domain of TCR clone 7439 (TRBV6-3, TRBJ1-2)
CASSRELSGTPYGYTF

SEQ ID NO: 14879 - protein, 15 aa, Homo sapiens
  CDR3 for alpha chain variable domain of TCR clone 7440 (TRAV8-3, TRAJ45)
CALSYSGGGADGLTS

SEQ ID NO: 14880 - protein, 13 aa, Homo sapiens
  CDR3 for beta chain variable domain of TCR clone 7440 (TRBV10-3, TRBJ2-7)
CASKLAVNYEQYF

SEQ ID NO: 14881 - protein, 14 aa, Homo sapiens
  CDR3 for alpha chain variable domain of TCR clone 7441 (TRAV2, TRAJ37)
CAVEDLGNTGKLIF

SEQ ID NO: 14882 - protein, 11 aa, Homo sapiens
  CDR3 for beta chain variable domain of TCR clone 7441 (TRBV25-1, TRBJ2-2)
CASSAQGDEHR

SEQ ID NO: 14883 - protein, 12 aa, Homo sapiens
  CDR3 for alpha chain variable domain of TCR clone 7442 (TRAV8-3, TRAJ26)
CAGDNYGQNFVF

SEQ ID NO: 14884 - protein, 13 aa, Homo sapiens
  CDR3 for beta chain variable domain of TCR clone 7442 (TRBV20-1, TRBJ1-1)
CSAGTVGNTEAFF

SEQ ID NO: 14885 - protein, 14 aa, Homo sapiens
  CDR3 for alpha chain variable domain of TCR clone 7443 (TRAV20, TRAJ37)
CAVQEASNTGKLIF

SEQ ID NO: 14886 - protein, 15 aa, Homo sapiens
  CDR3 for beta chain variable domain of TCR clone 7443 (TRBV10-3, TRBJ2-5)
CAISESRDRGETQYF

SEQ ID NO: 14887 - protein, 15 aa, Homo sapiens
  CDR3 for alpha chain variable domain of TCR clone 7444 (TRAV2, TRAJ13)
CATPSYSGGYQKVTF

SEQ ID NO: 14888 - protein, 13 aa, Homo sapiens
  CDR3 for beta chain variable domain of TCR clone 7444 (TRBV14, TRBJ1-5)
CASSQDRRGPQHF

SEQ ID NO: 14889 - protein, 14 aa, Homo sapiens
  CDR3 for alpha chain variable domain of TCR clone 7445 (TRAV12-3, TRAJ29)
CAMSFYSGNTPLVF

SEQ ID NO: 14890 - protein, 15 aa, Homo sapiens
  CDR3 for beta chain variable domain of TCR clone 7445 (TRBV5-1, TRBJ2-3)
CASSPGGARTDTQYF

SEQ ID NO: 14891 - protein, 16 aa, Homo sapiens
  CDR3 for alpha chain variable domain of TCR clone 7446 (TRAV26-1, TRAJ56)
CIVRARERGANSKLTF

SEQ ID NO: 14892 - protein, 13 aa, Homo sapiens
  CDR3 for beta chain variable domain of TCR clone 7446 (TRBV7-2, TRBJ1-1)
CASSLRANTEAFF

SEQ ID NO: 14893 - protein, 14 aa, Homo sapiens
  CDR3 for alpha chain variable domain of TCR clone 7447 (TRAV12-2, TRAJ40)
CAVKIPSGTYKCIF

SEQ ID NO: 14894 - protein, 14 aa, Homo sapiens
  CDR3 for beta chain variable domain of TCR clone 7447 (TRBV20-1, TRBJ1-1)
CSAQTRIGGTEAFF

SEQ ID NO: 14895 - protein, 13 aa, Homo sapiens
  CDR3 for alpha chain variable domain of TCR clone 7448 (TRAV3, TRAJ27)
CAVRPLGAGKSTF

SEQ ID NO: 14896 - protein, 12 aa, Homo sapiens
  CDR3 for beta chain variable domain of TCR clone 7448 (TRBV6-1, TRBJ2-7)
CASSDYSYEQYF

SEQ ID NO: 14897 - protein, 16 aa, Homo sapiens
  CDR3 for alpha chain variable domain of TCR clone 7449 (TRAV26-1, TRAJ37)
CIYARHGSSNTGKLIF

SEQ ID NO: 14898 - protein, 16 aa, Homo sapiens
  CDR3 for beta chain variable domain of TCR clone 7449 (TRBV19, TRBJ2-4)
CATGGLAGGTKNIQYF

SEQ ID NO: 14899 - protein, 13 aa, Homo sapiens
  CDR3 for alpha chain variable domain of TCR clone 7450 (TRAV12-1, TRAJ39)
CVVNYNAGNMLTF

SEQ ID NO: 14900 - protein, 12 aa, Homo sapiens
  CDR3 for beta chain variable domain of TCR clone 7450 (TRBV5-7, TRBJ1-1)
CASSLGRGKAFF

SEQ ID NO: 14901 - protein, 13 aa, Homo sapiens
  CDR3 for alpha chain variable domain of TCR clone 7451 (TRAV35, TRAJ42)
CAGFPGSQGNLIF

SEQ ID NO: 14902 - protein, 12 aa, Homo sapiens
  CDR3 for beta chain variable domain of TCR clone 7451 (TRBV7-2, TRBJ1-6)
CASSLSSSPLHF

SEQ ID NO: 14903 - protein, 13 aa, Homo sapiens
  CDR3 for alpha chain variable domain of TCR clone 7452 (TRAV12-3, TRAJ47)
CAMKKEYGNKLVF

SEQ ID NO: 14904 - protein, 17 aa, Homo sapiens
  CDR3 for beta chain variable domain of TCR clone 7452 (TRBV11-2, TRBJ2-1)
CASSLYPPGVEYNEQFF

SEQ ID NO: 14905 - protein, 12 aa, Homo sapiens
  CDR3 for alpha chain variable domain of TCR clone 7453 (TRAV36/DV7, TRAJ54)
CAVVRGAQKLVF

SEQ ID NO: 14906 - protein, 16 aa, Homo sapiens
  CDR3 for beta chain variable domain of TCR clone 7453 (TRBV15, TRBJ2-3)
CATSRDLGIVTDTQYF

SEQ ID NO: 14907 - protein, 14 aa, Homo sapiens
  CDR3 for alpha chain variable domain of TCR clone 7454 (TRAV13-1, TRAJ35)
CAASKGGFGNVLHC

SEQ ID NO: 14908 - protein, 13 aa, Homo sapiens
  CDR3 for beta chain variable domain of TCR clone 7454 (TRBV7-3, TRBJ1-1)
CASSQGWGAEAFF

SEQ ID NO: 14909 - protein, 12 aa, Homo sapiens
  CDR3 for alpha chain variable domain of TCR clone 7455 (TRAV12-1, )
CVVNSWISRTLT

SEQ ID NO: 14910 - protein, 11 aa, Homo sapiens
  CDR3 for beta chain variable domain of TCR clone 7455 (TRBV6-3, TRBJ2-3)
CATGQADTQYF

SEQ ID NO: 14911 - protein, 14 aa, Homo sapiens
  CDR3 for alpha chain variable domain of TCR clone 7456 (TRAV12-2, TRAJ53)
CRERGGGSNYKLTF

SEQ ID NO: 14912 - protein, 14 aa, Homo sapiens
  CDR3 for beta chain variable domain of TCR clone 7456 (TRBV19, TRBJ2-2)
CASSTLHRSGELFF

SEQ ID NO: 14913 - protein, 14 aa, Homo sapiens
  CDR3 for alpha chain variable domain of TCR clone 7457 (TRAV1-2, TRAJ8)
CAVREDTGFQKLVF

SEQ ID NO: 14914 - protein, 17 aa, Homo sapiens
  CDR3 for beta chain variable domain of TCR clone 7457 (TRBV6-5, TRBJ2-7)
CASRPSVGEVQHYEQYF

SEQ ID NO: 14915 - protein, 15 aa, Homo sapiens
  CDR3 for alpha chain variable domain of TCR clone 7458 (TRAV27, TRAJ38)
CAARRNAGNNRTLIW

SEQ ID NO: 14916 - protein, 13 aa, Homo sapiens
  CDR3 for beta chain variable domain of TCR clone 7458 (TRBV12-5, TRBJ2-3)
CASGDRQSDTQYF

SEQ ID NO: 14917 - protein, 14 aa, Homo sapiens
  CDR3 for alpha chain variable domain of TCR clone 7459 (TRAV26-2, TRAJ38)
CILYNAGNNRKLIW

SEQ ID NO: 14918 - protein, 13 aa, Homo sapiens
  CDR3 for beta chain variable domain of TCR clone 7459 (TRBV6-6, TRBJ2-3)
CASSQGGRDTQYF

SEQ ID NO: 14919 - protein, 15 aa, Homo sapiens
  CDR3 for alpha chain variable domain of TCR clone 7460 (TRAV8-3, TRAJ40)
CAVGPYTSGTYKYIF

SEQ ID NO: 14920 - protein, 18 aa, Homo sapiens
  CDR3 for beta chain variable domain of TCR clone 7460 (TRBV7-2, TRBJ2-7)
CASSLDPGVDRASSTSGR

SEQ ID NO: 14921 - protein, 19 aa, Homo sapiens
  CDR3 for alpha chain variable domain of TCR clone 7461 (TRAV3, TRAJ6)
CAVRDGPGQEEATYLHLEE

SEQ ID NO: 14922 - protein, 14 aa, Homo sapiens
  CDR3 for beta chain variable domain of TCR clone 7461 (TRBV7-2, TRBJ2-7)
CASSPKTSFYEQYF

SEQ ID NO: 14923 - protein, 15 aa, Homo sapiens
  CDR3 for alpha chain variable domain of TCR clone 7462 (TRAV3, TRAJ40)
CAVRDVTSGTYKYIF

SEQ ID NO: 14924 - protein, 14 aa, Homo sapiens
  CDR3 for beta chain variable domain of TCR clone 7462 (TRBV28, TRBJ2-5)
CASSLGDRAETQYF

SEQ ID NO: 14925 - protein, 13 aa, Homo sapiens
  CDR3 for alpha chain variable domain of TCR clone 7463 (TRAV2, TRAJ40)
CAVVTSGTCKYIF

SEQ ID NO: 14926 - protein, 14 aa, Homo sapiens
  CDR3 for beta chain variable domain of TCR clone 7463 (TRBV19, TRBJ2-1)
CASPTFVLSGEQFF

SEQ ID NO: 14927 - protein, 18 aa, Homo sapiens
  CDR3 for alpha chain variable domain of TCR clone 7464 (TRAV21, TRAJ52)
CAVRPSPAGGTSYGKLTF

SEQ ID NO: 14928 - protein, 14 aa, Homo sapiens
  CDR3 for beta chain variable domain of TCR clone 7464 (TRBV19, TRBJ2-1)
CASPTFVLSGEQFF

SEQ ID NO: 14929 - protein, 14 aa, Homo sapiens
  CDR3 for alpha chain variable domain of TCR clone 7465 (TRAV1-2, TRAJ16)
CAVNRFSDGQKLLF

SEQ ID NO: 14930 - protein, 17 aa, Homo sapiens
  CDR3 for beta chain variable domain of TCR clone 7465 (TRBV7-2, TRBJ2-7)
CASSFETSGSTSSTSGR

SEQ ID NO: 14931 - protein, 15 aa, Homo sapiens
  CDR3 for alpha chain variable domain of TCR clone 7466 (TRAV12-3, TRAJ48)
CAMSASNFGNEKLTF

SEQ ID NO: 14932 - protein, 13 aa, Homo sapiens
  CDR3 for beta chain variable domain of TCR clone 7466 (TRBV24-1, TRBJ2-1)
CATSRGARNEQFF

SEQ ID NO: 14933 - protein, 13 aa, Homo sapiens
  CDR3 for alpha chain variable domain of TCR clone 7467 (TRAV13-1, TRAJ6)
CAARRGGSYIPTF

SEQ ID NO: 14934 - protein, 16 aa, Homo sapiens
  CDR3 for beta chain variable domain of TCR clone 7467 (TRBV20-1, TRBJ1-4)
CSAPGQGLLTNEKLFF

SEQ ID NO: 14935 - protein, 11 aa, Homo sapiens
  CDR3 for alpha chain variable domain of TCR clone 7468 (TRAV3, TRAJ21)
CAVGNFNKFYF

SEQ ID NO: 14936 - protein, 16 aa, Homo sapiens
  CDR3 for beta chain variable domain of TCR clone 7468 (TRBV19, TRBJ2-1)
CASSKAGPSSHNEQFF

SEQ ID NO: 14937 - protein, 12 aa, Homo sapiens
  CDR3 for alpha chain variable domain of TCR clone 7469 (TRAV12-3, TRAJ17)
CAMTLTGNKLTF

SEQ ID NO: 14938 - protein, 13 aa, Homo sapiens
  CDR3 for beta chain variable domain of TCR clone 7469 (TRBV19, TRBJ1-5)
CASSIGGNQPQHF

SEQ ID NO: 14939 - protein, 12 aa, Homo sapiens
  CDR3 for alpha chain variable domain of TCR clone 7470 (TRAV12-1, TRAJ31)
CVVNDNNARLMF

SEQ ID NO: 14940 - protein, 15 aa, Homo sapiens
  CDR3 for beta chain variable domain of TCR clone 7470 (TRBV3-1, TRBJ2-5)
CASSQEVRLEETQYF

SEQ ID NO: 14941 - protein, 11 aa, Homo sapiens
  CDR3 for alpha chain variable domain of TCR clone 7471 (TRAV21, TRAJ11)
CAVNGYSTLTF

SEQ ID NO: 14942 - protein, 20 aa, Homo sapiens
  CDR3 for beta chain variable domain of TCR clone 7471 (TRBV28, TRBJ2-1)
CASTPIGRSPGLAGGNEQFF

SEQ ID NO: 14943 - protein, 13 aa, Homo sapiens
  CDR3 for alpha chain variable domain of TCR clone 7472 (TRAV24, TRAJ13)
CAFDSGGYQKVTF

SEQ ID NO: 14944 - protein, 14 aa, Homo sapiens
  CDR3 for beta chain variable domain of TCR clone 7472 (TRBV5-4, TRBJ2-1)
CASSLDQGLNEQFF

SEQ ID NO: 14945 - protein, 10 aa, Homo sapiens
  CDR3 for alpha chain variable domain of TCR clone 7473 (TRAV14/DV4, TRAJ48)
CAPRSEKLTF

SEQ ID NO: 14946 - protein, 17 aa, Homo sapiens
  CDR3 for beta chain variable domain of TCR clone 7473 (TRBV28, TRBJ2-5)
CASSTPEGDALQETQYF

SEQ ID NO: 14947 - protein, 17 aa, Homo sapiens
  CDR3 for alpha chain variable domain of TCR clone 7474 (TRAV3, TRAJ6)
CAVRDCPRAGGSYIPTF

SEQ ID NO: 14948 - protein, 14 aa, Homo sapiens
  CDR3 for beta chain variable domain of TCR clone 7474 (TRBV7-2, TRBJ2-7)
CASSPKTSFYEQYF

SEQ ID NO: 14949 - protein, 17 aa, Homo sapiens
  CDR3 for alpha chain variable domain of TCR clone 7475 (TRAV1-2, TRAJ8)
CAVRDPDENTGFQKLVF

SEQ ID NO: 14950 - protein, 16 aa, Homo sapiens
  CDR3 for beta chain variable domain of TCR clone 7475 (TRBV7-9, TRBJ2-2)
CASSGFGGANTGELFS

SEQ ID NO: 14951 - protein, 11 aa, Homo sapiens
  CDR3 for alpha chain variable domain of TCR clone 7476 (TRAV3, TRAJ21)
CAVGDFNKFYF

SEQ ID NO: 14952 - protein, 16 aa, Homo sapiens
  CDR3 for beta chain variable domain of TCR clone 7476 (TRBV19, TRBJ2-1)
CASSKAGPSSYNEQFF

SEQ ID NO: 14953 - protein, 14 aa, Homo sapiens
  CDR3 for alpha chain variable domain of TCR clone 7477 (TRAV4, TRAJ31)
CLVGERLQQCQTHV

SEQ ID NO: 14954 - protein, 19 aa, Homo sapiens
  CDR3 for beta chain variable domain of TCR clone 7477 (TRBV12-4, TRBJ2-1)
CASTLAFDPRDKEANEQFF

SEQ ID NO: 14955 - protein, 13 aa, Homo sapiens
  CDR3 for alpha chain variable domain of TCR clone 7478 (TRAV22, TRAJ29)
CAVGGSGNTPLVF

SEQ ID NO: 14956 - protein, 14 aa, Homo sapiens
  CDR3 for beta chain variable domain of TCR clone 7478 (TRBV5-1, TRBJ2-7)
CASSRGESLYEQYF

SEQ ID NO: 14957 - protein, 12 aa, Homo sapiens
  CDR3 for alpha chain variable domain of TCR clone 7479 (TRAV12-3, TRAJ17)
YAMTLTGNKLTF

SEQ ID NO: 14958 - protein, 15 aa, Homo sapiens
  CDR3 for beta chain variable domain of TCR clone 7479 (TRBV20-1, TRBJ2-7)
CSARDRVSGMDEQYF

SEQ ID NO: 14959 - protein, 14 aa, Homo sapiens
  CDR3 for alpha chain variable domain of TCR clone 7480 (TRAV8-3, TRAJ4)
CAVGASGGYNKLIF

SEQ ID NO: 14960 - protein, 16 aa, Homo sapiens
  CDR3 for beta chain variable domain of TCR clone 7480 (TRBV19, TRBJ2-2)
CASSPSGGLNTGELFF

SEQ ID NO: 14961 - protein, 15 aa, Homo sapiens
  CDR3 for alpha chain variable domain of TCR clone 7481 (TRAV38-1, TRAJ37)
CAFIFGSGNTGKLIF

SEQ ID NO: 14962 - protein, 11 aa, Homo sapiens
  CDR3 for beta chain variable domain of TCR clone 7481 (TRBV12-4, TRBJ2-3)
CASTATDTQYF

SEQ ID NO: 14963 - protein, 15 aa, Homo sapiens
  CDR3 for alpha chain variable domain of TCR clone 7482 (TRAV8-3, TRAJ27)
CAVGPSKTNAGKSTF

SEQ ID NO: 14964 - protein, 15 aa, Homo sapiens
  CDR3 for beta chain variable domain of TCR clone 7482 (TRBV9, TRBJ1-6)
CASSVAGTGDSPLHF

SEQ ID NO: 14965 - protein, 13 aa, Homo sapiens
  CDR3 for alpha chain variable domain of TCR clone 7483 (TRAV29/DV5, TRAJ31)
CAASRNNNARLMF

SEQ ID NO: 14966 - protein, 12 aa, Homo sapiens
  CDR3 for beta chain variable domain of TCR clone 7483 (TRBV14, TRBJ2-7)
CASSRLKGEQYF

SEQ ID NO: 14967 - protein, 18 aa, Homo sapiens
  CDR3 for alpha chain variable domain of TCR clone 7484 (TRAV21, TRAJ52)
CAVRPSPAGGTSYGKLTF

SEQ ID NO: 14968 - protein, 15 aa, Homo sapiens
  CDR3 for beta chain variable domain of TCR clone 7484 (TRBV9, TRBJ1-6)
CASSVAGTGDSPLHF

SEQ ID NO: 14969 - protein, 14 aa, Homo sapiens
  CDR3 for alpha chain variable domain of TCR clone 7485 (TRAV12-2, TRAJ13)
CAVKKTGGYQKVTF

SEQ ID NO: 14970 - protein, 10 aa, Homo sapiens
  CDR3 for beta chain variable domain of TCR clone 7485 (TRBV12-4, TRBJ1-2)
CASSFIWLHL

SEQ ID NO: 14971 - protein, 14 aa, Homo sapiens
  CDR3 for alpha chain variable domain of TCR clone 7486 (TRAV2, TRAJ29)
CAVEDRVGNTPLVC

SEQ ID NO: 14972 - protein, 15 aa, Homo sapiens
  CDR3 for beta chain variable domain of TCR clone 7486 (TRBV10-3, TRBJ2-1)
CAISDVQDRAYEQFF

SEQ ID NO: 14973 - protein, 19 aa, Homo sapiens
  CDR3 for alpha chain variable domain of TCR clone 7487 (TRAV2, TRAJ20)
ILQVREADAAVYRDCKLSF

SEQ ID NO: 14974 - protein, 15 aa, Homo sapiens
  CDR3 for beta chain variable domain of TCR clone 7487 (TRBV9, TRBJ1-6)
CASSVAGTGDSPLHF

SEQ ID NO: 14975 - protein, 13 aa, Homo sapiens
  CDR3 for alpha chain variable domain of TCR clone 7488 (TRAV26-1, TRAJ48)
CIVRVVGDEKLTF

SEQ ID NO: 14976 - protein, 18 aa, Homo sapiens
  CDR3 for beta chain variable domain of TCR clone 7488 (TRBV4-3, TRBJ1-6)
CASSQETPASSYNSPLHF

SEQ ID NO: 14977 - protein, 14 aa, Homo sapiens
  CDR3 for alpha chain variable domain of TCR clone 7489 (TRAV13-1, TRAJ44)
CAAKATGTASKLTF

SEQ ID NO: 14978 - protein, 15 aa, Homo sapiens
  CDR3 for beta chain variable domain of TCR clone 7489 (TRBV9, TRBJ2-1)
CASSLAGSSYNEQFF

SEQ ID NO: 14979 - protein, 22 aa, Homo sapiens
  CDR3 for alpha chain variable domain of TCR clone 7490 (TRAV3, )
CAVRDHTGNNHIQNPDPAVYQL

SEQ ID NO: 14980 - protein, 14 aa, Homo sapiens
  CDR3 for beta chain variable domain of TCR clone 7490 (TRBV7-2, TRBJ2-7)
CASSSTVGGYEQYF

SEQ ID NO: 14981 - protein, 14 aa, Homo sapiens
  CDR3 for alpha chain variable domain of TCR clone 7491 (TRAV17, TRAJ12)
CAILPMDSSYKLIF

SEQ ID NO: 14982 - protein, 13 aa, Homo sapiens
  CDR3 for beta chain variable domain of TCR clone 7491 (TRBV4-1, TRBJ2-2)
CASSQENTGELFF

SEQ ID NO: 14983 - protein, 15 aa, Homo sapiens
  CDR3 for alpha chain variable domain of TCR clone 7492 (TRAV20, TRAJ58)
CAVQDLETSGSRLTF

SEQ ID NO: 14984 - protein, 12 aa, Homo sapiens
  CDR3 for beta chain variable domain of TCR clone 7492 (TRBV9, TRBJ2-2)
CASSARTRELFF

SEQ ID NO: 14985 - protein, 16 aa, Homo sapiens
  CDR3 for alpha chain variable domain of TCR clone 7493 (TRAV30, TRAJ24)
CGTEIVDADSWGKFQF

SEQ ID NO: 14986 - protein, 14 aa, Homo sapiens
  CDR3 for beta chain variable domain of TCR clone 7493 (TRBV12-5, TRBJ2-5)
CASGARTHQETQYF

SEQ ID NO: 14987 - protein, 15 aa, Homo sapiens
  CDR3 for alpha chain variable domain of TCR clone 7494 (TRAV12-2, TRAJ57)
CAVSRGQGGSEKLVF

SEQ ID NO: 14988 - protein, 15 aa, Homo sapiens
  CDR3 for beta chain variable domain of TCR clone 7494 (TRBV5-1, TRBJ2-1)
CASSPPRAPYNEQFF

SEQ ID NO: 14989 - protein, 17 aa, Homo sapiens
  CDR3 for alpha chain variable domain of TCR clone 7495 (TRAV3, TRAJ6)
CAVRDGPRAGGSYIPTF

SEQ ID NO: 14990 - protein, 14 aa, Homo sapiens
  CDR3 for beta chain variable domain of TCR clone 7495 (TRBV7-2, TRBJ2-7)
CASSPETSFYEQYF

SEQ ID NO: 14991 - protein, 14 aa, Homo sapiens
  CDR3 for alpha chain variable domain of TCR clone 7496 (TRAV1-2, TRAJ16)
CAVNRFSDGQKLLF

SEQ ID NO: 14992 - protein, 13 aa, Homo sapiens
  CDR3 for beta chain variable domain of TCR clone 7496 (TRBV10-3, TRBJ2-7)
CASRLAVNYEQYF

SEQ ID NO: 14993 - protein, 15 aa, Homo sapiens
  CDR3 for alpha chain variable domain of TCR clone 7497 (TRAV14/DV4, TRAJ47)
CAMREAMEYGNKLVF

SEQ ID NO: 14994 - protein, 15 aa, Homo sapiens
  CDR3 for beta chain variable domain of TCR clone 7497 (TRBV7-3, TRBJ2-1)
CASSLGQGPFGEQFF

SEQ ID NO: 14995 - protein, 14 aa, Homo sapiens
  CDR3 for alpha chain variable domain of TCR clone 7498 (TRAV38-1, TRAJ40)
CALRPTSGTYKYIF

SEQ ID NO: 14996 - protein, 13 aa, Homo sapiens
  CDR3 for beta chain variable domain of TCR clone 7498 (TRBV25-1, TRBJ1-1)
CQHPPGGNTEAFF

SEQ ID NO: 14997 - protein, 10 aa, Homo sapiens
  CDR3 for alpha chain variable domain of TCR clone 7499 (TRAV12-1, TRAJ20)
CAIYFQRLQA

SEQ ID NO: 14998 - protein, 15 aa, Homo sapiens
  CDR3 for beta chain variable domain of TCR clone 7499 (TRBV5-1, TRBJ1-1)
CASSLGEGENTEAFF

SEQ ID NO: 14999 - protein, 15 aa, Homo sapiens
  CDR3 for alpha chain variable domain of TCR clone 7500 (TRAV17, TRAJ10)
CATVLLTGGGNKLTF

SEQ ID NO: 15000 - protein, 17 aa, Homo sapiens
  CDR3 for beta chain variable domain of TCR clone 7500 (TRBV11-2, TRBJ2-1)
CASSLYPPGVEYNEQFF

SEQ ID NO: 15001 - protein, 16 aa, Homo sapiens
  CDR3 for alpha chain variable domain of TCR clone 7501 (TRAV30, TRAJ24)
CGTEIVDADSWGKCQF

SEQ ID NO: 15002 - protein, 14 aa, Homo sapiens
  CDR3 for beta chain variable domain of TCR clone 7501 (TRBV12-5, TRBJ2-5)
CASGSRTHQETQYF

SEQ ID NO: 15003 - protein, 13 aa, Homo sapiens
  CDR3 for alpha chain variable domain of TCR clone 7502 (TRAV2, TRAJ35)
CAPRVGFGNVLHC

SEQ ID NO: 15004 - protein, 15 aa, Homo sapiens
  CDR3 for beta chain variable domain of TCR clone 7502 (TRBV6-3, TRBJ2-7)
CASSSPGTVFYEQYF

SEQ ID NO: 15005 - protein, 16 aa, Homo sapiens
  CDR3 for alpha chain variable domain of TCR clone 7503 (TRAV12-3, TRAJ53)
CAMSPGSGGSNYKLTF

SEQ ID NO: 15006 - protein, 16 aa, Homo sapiens
  CDR3 for beta chain variable domain of TCR clone 7503 (TRBV12-5, TRBJ2-5)
CASGPRTSGNQETQYF

SEQ ID NO: 15007 - protein, 10 aa, Homo sapiens
  CDR3 for alpha chain variable domain of TCR clone 7504 (TRAV2, TRAJ34)
CAVVNDKLIF

SEQ ID NO: 15008 - protein, 15 aa, Homo sapiens
  CDR3 for beta chain variable domain of TCR clone 7504 (TRBV20-1, TRBJ2-3)
CSARPSGFYTDTQYF

SEQ ID NO: 15009 - protein, 16 aa, Homo sapiens
  CDR3 for alpha chain variable domain of TCR clone 7505 (TRAV12-3, TRAJ53)
CAMSPGSGGSNYKLAF

SEQ ID NO: 15010 - protein, 11 aa, Homo sapiens
  CDR3 for beta chain variable domain of TCR clone 7505 (TRBV29-1, TRBJ2-5)
CSEDRTGTQYF

SEQ ID NO: 15011 - protein, 14 aa, Homo sapiens
  CDR3 for alpha chain variable domain of TCR clone 7506 (TRAV29/DV5, TRAJ13)
CAASLSGGYQKVTF

SEQ ID NO: 15012 - protein, 15 aa, Homo sapiens
  CDR3 for beta chain variable domain of TCR clone 7506 (TRBV10-1, TRBJ2-1)
CASSTGTELYNEQFF

SEQ ID NO: 15013 - protein, 14 aa, Homo sapiens
  CDR3 for alpha chain variable domain of TCR clone 7507 (TRAV12-3, TRAJ10)
SHLPLTGGGNKLTF

SEQ ID NO: 15014 - protein, 15 aa, Homo sapiens
  CDR3 for beta chain variable domain of TCR clone 7507 (TRBV12-4, TRBJ1-1)
CASSLGGLSDTEAFF

SEQ ID NO: 15015 - protein, 17 aa, Homo sapiens
  CDR3 for alpha chain variable domain of TCR clone 7508 (TRAV3, TRAJ6)
CAVRDGPRAGGSYKPTF

SEQ ID NO: 15016 - protein, 14 aa, Homo sapiens
  CDR3 for beta chain variable domain of TCR clone 7508 (TRBV7-2, TRBJ2-7)
CASSPKTSFYEQYF

SEQ ID NO: 15017 - protein, 14 aa, Homo sapiens
  CDR3 for alpha chain variable domain of TCR clone 7509 (TRAV1-2, TRAJ8)
CAVREGTGFQKLVF

SEQ ID NO: 15018 - protein, 15 aa, Homo sapiens
  CDR3 for beta chain variable domain of TCR clone 7509 (TRBV6-3, TRBJ2-7)
CASSSPGTVFYEQYF

SEQ ID NO: 15019 - protein, 13 aa, Homo sapiens
  CDR3 for alpha chain variable domain of TCR clone 7510 (TRAV2, TRAJ24)
CAVGSTDRGKLQF

SEQ ID NO: 15020 - protein, 15 aa, Homo sapiens
  CDR3 for beta chain variable domain of TCR clone 7510 (TRBV5-7, TRBJ2-3)
CASSPWDRATDTQYF

SEQ ID NO: 15021 - protein, 17 aa, Homo sapiens
  CDR3 for alpha chain variable domain of TCR clone 7511 (TRAV3, TRAJ6)
CAVRDGSRAGGSYIPTF

SEQ ID NO: 15022 - protein, 14 aa, Homo sapiens
  CDR3 for beta chain variable domain of TCR clone 7511 (TRBV7-2, TRBJ2-7)
CASSPKTSFYEQYF

SEQ ID NO: 15023 - protein, 15 aa, Homo sapiens
  CDR3 for alpha chain variable domain of TCR clone 7512 (TRAV17, TRAJ34)
CATDPRMVDTDKLIF

SEQ ID NO: 15024 - protein, 12 aa, Homo sapiens
  CDR3 for beta chain variable domain of TCR clone 7512 (TRBV10-2, TRBJ2-3)
CASSEGPGPRYF

SEQ ID NO: 15025 - protein, 15 aa, Homo sapiens
  CDR3 for alpha chain variable domain of TCR clone 7513 (TRAV8-4, TRAJ37)
CAVSRGSGNTGKLIF

SEQ ID NO: 15026 - protein, 14 aa, Homo sapiens
  CDR3 for beta chain variable domain of TCR clone 7513 (TRBV7-9, TRBJ2-5)
CASSLDTAQETQYF

SEQ ID NO: 15027 - protein, 13 aa, Homo sapiens
  CDR3 for alpha chain variable domain of TCR clone 7514 (TRAV29/DV5, TRAJ31)
CAASRNNNARLMF

SEQ ID NO: 15028 - protein, 20 aa, Homo sapiens
  CDR3 for beta chain variable domain of TCR clone 7514 (TRBV19, TRBJ2-1)
CASSISRTVTSTRLNNEQFF

SEQ ID NO: 15029 - protein, 14 aa, Homo sapiens
  CDR3 for alpha chain variable domain of TCR clone 7515 (TRAV1-2, TRAJ16)
CAVNRFSDGQKLLF

SEQ ID NO: 15030 - protein, 14 aa, Homo sapiens
  CDR3 for beta chain variable domain of TCR clone 7515 (TRBV2, TRBJ2-1)
CASSDRAYYNEQFF

SEQ ID NO: 15031 - protein, 16 aa, Homo sapiens
  CDR3 for alpha chain variable domain of TCR clone 7516 (TRAV26-1, TRAJ23)
CIVRPHGNNQGGKLIF

SEQ ID NO: 15032 - protein, 19 aa, Homo sapiens
  CDR3 for beta chain variable domain of TCR clone 7516 (TRBV5-4, TRBJ2-7)
CASSLGQSPGAPTSSTSGR

SEQ ID NO: 15033 - protein, 14 aa, Homo sapiens
  CDR3 for alpha chain variable domain of TCR clone 7517 (TRAV13-1, TRAJ40)
CAAHPTSGTYKYIF

SEQ ID NO: 15034 - protein, 15 aa, Homo sapiens
  CDR3 for beta chain variable domain of TCR clone 7517 (TRBV11-2, TRBJ2-2)
CASSPSGGGTGELFF

SEQ ID NO: 15035 - protein, 15 aa, Homo sapiens
  CDR3 for alpha chain variable domain of TCR clone 7518 (TRAV26-1, TRAJ29)
CIVRAEGSGNTPLVF

SEQ ID NO: 15036 - protein, 15 aa, Homo sapiens
  CDR3 for beta chain variable domain of TCR clone 7518 (TRBV7-9, TRBJ1-5)
CASSQGHQPNQPQHF

SEQ ID NO: 15037 - protein, 14 aa, Homo sapiens
  CDR3 for alpha chain variable domain of TCR clone 7519 (TRAV12-1, TRAJ17)
CVVNYKAAGNKLTF

SEQ ID NO: 15038 - protein, 14 aa, Homo sapiens
  CDR3 for beta chain variable domain of TCR clone 7519 (TRBV11-2, TRBJ1-5)
CASSLDRGRQPQHF

SEQ ID NO: 15039 - protein, 13 aa, Homo sapiens
  CDR3 for alpha chain variable domain of TCR clone 7520 (TRAV3, TRAJ30)
CAVRDRGDDKIIL

SEQ ID NO: 15040 - protein, 16 aa, Homo sapiens
  CDR3 for beta chain variable domain of TCR clone 7520 (TRBV7-3, TRBJ2-2)
CASSLKRGTLSGELFF

SEQ ID NO: 15041 - protein, 16 aa, Homo sapiens
  CDR3 for alpha chain variable domain of TCR clone 7521 (TRAV30, TRAJ24)
CGTEIVDADSWGKFQF

SEQ ID NO: 15042 - protein, 14 aa, Homo sapiens
  CDR3 for beta chain variable domain of TCR clone 7521 (TRBV12-5, TRBJ2-5)
CASGSWTHQETQYF

SEQ ID NO: 15043 - protein, 16 aa, Homo sapiens
  CDR3 for alpha chain variable domain of TCR clone 7522 (TRAV12-3, TRAJ53)
CAMSPGSGGSNYKMTF

SEQ ID NO: 15044 - protein, 11 aa, Homo sapiens
  CDR3 for beta chain variable domain of TCR clone 7522 (TRBV29-1, TRBJ2-5)
CSEDRTGTQYF

SEQ ID NO: 15045 - protein, 14 aa, Homo sapiens
  CDR3 for alpha chain variable domain of TCR clone 7523 (TRAV1-2, TRAJ16)
CAVNRFSDGQKLLF

SEQ ID NO: 15046 - protein, 13 aa, Homo sapiens
  CDR3 for beta chain variable domain of TCR clone 7523 (TRBV12-4, TRBJ2-2)
CASSITGSGELFF

SEQ ID NO: 15047 - protein, 16 aa, Homo sapiens
  CDR3 for alpha chain variable domain of TCR clone 7524 (TRAV12-1, TRAJ43)
CVVNPHRFGAGTRLTV

SEQ ID NO: 15048 - protein, 14 aa, Homo sapiens
  CDR3 for beta chain variable domain of TCR clone 7524 (TRBV7-2, TRBJ2-7)
CASRSQGAAYEQYF

SEQ ID NO: 15049 - protein, 11 aa, Homo sapiens
  CDR3 for alpha chain variable domain of TCR clone 7525 (TRAV38-2/DV8, TRAJ31)
CAYFSNARLMF

SEQ ID NO: 15050 - protein, 13 aa, Homo sapiens
  CDR3 for beta chain variable domain of TCR clone 7525 (TRBV20-1, TRBJ2-7)
CSARDGKSYEQYF

SEQ ID NO: 15051 - protein, 12 aa, Homo sapiens
  CDR3 for alpha chain variable domain of TCR clone 7526 (TRAV29/DV5, TRAJ34)
CAASGNTDKLIF

SEQ ID NO: 15052 - protein, 15 aa, Homo sapiens
  CDR3 for beta chain variable domain of TCR clone 7526 (TRBV10-2, TRBJ2-6)
CASSEQGTGANVLTF

SEQ ID NO: 15053 - protein, 14 aa, Homo sapiens
  CDR3 for alpha chain variable domain of TCR clone 7527 (TRAV1-2, TRAJ16)
CAVNRFSDVQKLLF

SEQ ID NO: 15054 - protein, 15 aa, Homo sapiens
  CDR3 for beta chain variable domain of TCR clone 7527 (TRBV9, TRBJ1-6)
CASSVAGTGDSPLHF

SEQ ID NO: 15055 - protein, 18 aa, Homo sapiens
  CDR3 for alpha chain variable domain of TCR clone 7528 (TRAV23/DV6, )
CAATALIPDIQNPDPAVY

SEQ ID NO: 15056 - protein, 16 aa, Homo sapiens
  CDR3 for beta chain variable domain of TCR clone 7528 (TRBV10-3, TRBJ2-7)
CAISPRGQEQTYEQYF

SEQ ID NO: 15057 - protein, 15 aa, Homo sapiens
  CDR3 for alpha chain variable domain of TCR clone 7529 (TRAV3, TRAJ47)
CAVRDIGEYGNKLVF

SEQ ID NO: 15058 - protein, 14 aa, Homo sapiens
  CDR3 for beta chain variable domain of TCR clone 7529 (TRBV13, TRBJ2-5)
CASSLERVGETQYS

SEQ ID NO: 15059 - protein, 15 aa, Homo sapiens
  CDR3 for alpha chain variable domain of TCR clone 7530 (TRAV10, TRAJ6)
CVVRPRTGGSYIPTF

SEQ ID NO: 15060 - protein, 13 aa, Homo sapiens
  CDR3 for beta chain variable domain of TCR clone 7530 (TRBV7-9, TRBJ1-2)
CASSLKQNYGYTF

SEQ ID NO: 15061 - protein, 18 aa, Homo sapiens
  CDR3 for alpha chain variable domain of TCR clone 7531 (TRAV26-1, TRAJ22)
CIVRVSFWFCKATDLLIW

SEQ ID NO: 15062 - protein, 13 aa, Homo sapiens
  CDR3 for beta chain variable domain of TCR clone 7531 (TRBV7-9, TRBJ1-2)
CASSLKQNYGYTF

SEQ ID NO: 15063 - protein, 14 aa, Homo sapiens
  CDR3 for alpha chain variable domain of TCR clone 7532 (TRAV17, TRAJ54)
CATDANQGAQKLVF

SEQ ID NO: 15064 - protein, 14 aa, Homo sapiens
  CDR3 for beta chain variable domain of TCR clone 7532 (TRBV4-2, TRBJ2-1)
CASGLDRAYNEQFF

SEQ ID NO: 15065 - protein, 13 aa, Homo sapiens
  CDR3 for alpha chain variable domain of TCR clone 7533 (TRAV20, TRAJ20)
CAVQAGSGYKLSF

SEQ ID NO: 15066 - protein, 12 aa, Homo sapiens
  CDR3 for beta chain variable domain of TCR clone 7533 (TRBV11-2, TRBJ2-2)
CASSLGGGELFF

SEQ ID NO: 15067 - protein, 13 aa, Homo sapiens
  CDR3 for alpha chain variable domain of TCR clone 7534 (TRAV35, TRAJ21)
CAGQLSNFNKFYF

SEQ ID NO: 15068 - protein, 16 aa, Homo sapiens
  CDR3 for beta chain variable domain of TCR clone 7534 (TRBV12-5, TRBJ2-5)
CASGPRTSGNQETQYF

SEQ ID NO: 15069 - protein, 13 aa, Homo sapiens
  CDR3 for alpha chain variable domain of TCR clone 7535 (TRAV16, TRAJ28)
CALSGAGSYQLTF

SEQ ID NO: 15070 - protein, 16 aa, Homo sapiens
  CDR3 for beta chain variable domain of TCR clone 7535 (TRBV28, TRBJ1-1)
CASSLSGTGWNTEAFF

SEQ ID NO: 15071 - protein, 13 aa, Homo sapiens
  CDR3 for alpha chain variable domain of TCR clone 7536 (TRAV8-3, TRAJ30)
CCGCLNRDDKIIF

SEQ ID NO: 15072 - protein, 15 aa, Homo sapiens
  CDR3 for beta chain variable domain of TCR clone 7536 (TRBV7-2, TRBJ2-7)
CASSLSGALTYEQYF

SEQ ID NO: 15073 - protein, 12 aa, Homo sapiens
  CDR3 for alpha chain variable domain of TCR clone 7537 (TRAV4, TRAJ26)
CLVGDYGQNFVF

SEQ ID NO: 15074 - protein, 12 aa, Homo sapiens
  CDR3 for beta chain variable domain of TCR clone 7537 (TRBV11-2, TRBJ2-2)
CASSLGGGELFF

SEQ ID NO: 15075 - protein, 14 aa, Homo sapiens
  CDR3 for alpha chain variable domain of TCR clone 7538 (TRAV8-3, TRAJ39)
CAVGANNAGNMLTF

SEQ ID NO: 15076 - protein, 14 aa, Homo sapiens
  CDR3 for beta chain variable domain of TCR clone 7538 (TRBV6-1, TRBJ1-6)
CASSGTAYNSPLHF

SEQ ID NO: 15077 - protein, 13 aa, Homo sapiens
  CDR3 for alpha chain variable domain of TCR clone 7539 (TRAV35, TRAJ42)
CAGFPGSQGNLIF

SEQ ID NO: 15078 - protein, 12 aa, Homo sapiens
  CDR3 for beta chain variable domain of TCR clone 7539 (TRBV7-8, TRBJ2-7)
CASSLGDREQYF

SEQ ID NO: 15079 - protein, 15 aa, Homo sapiens
  CDR3 for alpha chain variable domain of TCR clone 7540 (TRAV2, TRAJ37)
CAVEDGSSNTGKLIF

SEQ ID NO: 15080 - protein, 11 aa, Homo sapiens
  CDR3 for beta chain variable domain of TCR clone 7540 (TRBV12-4, TRBJ2-3)
CASTATDTQYF

SEQ ID NO: 15081 - protein, 16 aa, Homo sapiens
  CDR3 for alpha chain variable domain of TCR clone 7541 (TRAV27, TRAJ56)
CAGVSRKDGANSKLTF

SEQ ID NO: 15082 - protein, 15 aa, Homo sapiens
  CDR3 for beta chain variable domain of TCR clone 7541 (TRBV4-1, TRBJ2-5)
CASSQLAGGQETQYF

SEQ ID NO: 15083 - protein, 13 aa, Homo sapiens
  CDR3 for alpha chain variable domain of TCR clone 7542 (TRAV21, TRAJ44)
CAAHTGTASKLTF

SEQ ID NO: 15084 - protein, 19 aa, Homo sapiens
  CDR3 for beta chain variable domain of TCR clone 7542 (TRBV3-1, TRBJ2-1)
CASSRMIVPGLAGKNEQFF

SEQ ID NO: 15085 - protein, 13 aa, Homo sapiens
  CDR3 for alpha chain variable domain of TCR clone 7543 (TRAV8-6, TRAJ54)
CAVEAQGAQKLVF

SEQ ID NO: 15086 - protein, 13 aa, Homo sapiens
  CDR3 for beta chain variable domain of TCR clone 7543 (TRBV6-5, TRBJ2-2)
CASRTVNTGELFF

SEQ ID NO: 15087 - protein, 14 aa, Homo sapiens
  CDR3 for alpha chain variable domain of TCR clone 7544 (TRAV9-2, TRAJ39)
CALYIYNAGNMLTF

SEQ ID NO: 15088 - protein, 15 aa, Homo sapiens
  CDR3 for beta chain variable domain of TCR clone 7544 (TRBV19, TRBJ2-4)
CASRGPRRGENIQYF

SEQ ID NO: 15089 - protein, 12 aa, Homo sapiens
  CDR3 for alpha chain variable domain of TCR clone 7545 (TRAV3, TRAJ26)
CAVRDYGQNFVF

SEQ ID NO: 15090 - protein, 12 aa, Homo sapiens
  CDR3 for beta chain variable domain of TCR clone 7545 (TRBV29-1, TRBJ2-3)
CSVTGGADTQYF

SEQ ID NO: 15091 - protein, 13 aa, Homo sapiens
  CDR3 for alpha chain variable domain of TCR clone 7546 (TRAV12-3, TRAJ33)
CAMSLNSNYQLIW

SEQ ID NO: 15092 - protein, 15 aa, Homo sapiens
  CDR3 for beta chain variable domain of TCR clone 7546 (TRBV20-1, TRBJ2-7)
CSAESGTSGAYEQYF

SEQ ID NO: 15093 - protein, 16 aa, Homo sapiens
  CDR3 for alpha chain variable domain of TCR clone 7547 (TRAV30, TRAJ24)
CGIEIVDADSWGKFQF

SEQ ID NO: 15094 - protein, 14 aa, Homo sapiens
  CDR3 for beta chain variable domain of TCR clone 7547 (TRBV12-5, TRBJ2-5)
CASGSRTHQETQYF

SEQ ID NO: 15095 - protein, 16 aa, Homo sapiens
  CDR3 for alpha chain variable domain of TCR clone 7548 (TRAV8-6, TRAJ42)
CAVSEGYGGSQGNLIF

SEQ ID NO: 15096 - protein, 16 aa, Homo sapiens
  CDR3 for beta chain variable domain of TCR clone 7548 (TRBV13, TRBJ2-2)
CASSPRTGEHTGELFF

SEQ ID NO: 15097 - protein, 16 aa, Homo sapiens
  CDR3 for alpha chain variable domain of TCR clone 7549 (TRAV3, TRAJ10)
CAVRDMRAGGGNKLTF

SEQ ID NO: 15098 - protein, 14 aa, Homo sapiens
  CDR3 for beta chain variable domain of TCR clone 7549 (TRBV7-2, TRBJ2-7)
CASSPKTSFYEQYF

SEQ ID NO: 15099 - protein, 13 aa, Homo sapiens
  CDR3 for alpha chain variable domain of TCR clone 7550 (TRAV21, TRAJ27)
CAARPGNAGKSPF

SEQ ID NO: 15100 - protein, 14 aa, Homo sapiens
  CDR3 for beta chain variable domain of TCR clone 7550 (TRBV7-6, TRBJ2-3)
CASSLGTVTDTQYF

SEQ ID NO: 15101 - protein, 14 aa, Homo sapiens
  CDR3 for alpha chain variable domain of TCR clone 7551 (TRAV29/DV5, TRAJ44)
CAASATGTASKLTF

SEQ ID NO: 15102 - protein, 16 aa, Homo sapiens
  CDR3 for beta chain variable domain of TCR clone 7551 (TRBV7-9, TRBJ1-3)
CASSQTSGLRMGTIYF

SEQ ID NO: 15103 - protein, 13 aa, Homo sapiens
  CDR3 for alpha chain variable domain of TCR clone 7552 (TRAV8-4, TRAJ9)
CAVSGAGGFKTIF

SEQ ID NO: 15104 - protein, 16 aa, Homo sapiens
  CDR3 for beta chain variable domain of TCR clone 7552 (TRBV5-1, TRBJ2-7)
CASSVTSGSSTYEQYF

SEQ ID NO: 15105 - protein, 16 aa, Homo sapiens
  CDR3 for alpha chain variable domain of TCR clone 7553 (TRAV12-2, TRAJ6)
CAAPLAGSGGSYIPTF

SEQ ID NO: 15106 - protein, 10 aa, Homo sapiens
  CDR3 for beta chain variable domain of TCR clone 7553 (TRBV28, TRBJ1-2)
CASSSDRTVF

SEQ ID NO: 15107 - protein, 11 aa, Homo sapiens
  CDR3 for alpha chain variable domain of TCR clone 7554 (TRAV1-1, TRAJ23)
CAVRQGGKLIF

SEQ ID NO: 15108 - protein, 20 aa, Homo sapiens
  CDR3 for beta chain variable domain of TCR clone 7554 (TRBV7-8, TRBJ2-2)
CASSHLFPGPTIQITGELFF

SEQ ID NO: 15109 - protein, 15 aa, Homo sapiens
  CDR3 for alpha chain variable domain of TCR clone 7555 (TRAV1-1, TRAJ23)
CAVRVCYNQGGKLIF

SEQ ID NO: 15110 - protein, 13 aa, Homo sapiens
  CDR3 for beta chain variable domain of TCR clone 7555 (TRBV7-2, TRBJ1-1)
CASSLTENTEAFF

SEQ ID NO: 15111 - protein, 13 aa, Homo sapiens
  CDR3 for alpha chain variable domain of TCR clone 7556 (TRAV17, TRAJ39)
CATVSNAGNMLTF

SEQ ID NO: 15112 - protein, 15 aa, Homo sapiens
  CDR3 for beta chain variable domain of TCR clone 7556 (TRBV5-1, TRBJ2-1)
CASSPPRAPYNEQFF

SEQ ID NO: 15113 - protein, 14 aa, Homo sapiens
  CDR3 for alpha chain variable domain of TCR clone 7557 (TRAV13-1, TRAJ6)
CAASGPGGSYIPTF

SEQ ID NO: 15114 - protein, 15 aa, Homo sapiens
  CDR3 for beta chain variable domain of TCR clone 7557 (TRBV27, TRBJ2-1)
CASSPLAGGANEQFF

SEQ ID NO: 15115 - protein, 15 aa, Homo sapiens
  CDR3 for alpha chain variable domain of TCR clone 7558 (TRAV8-4, TRAJ39)
CAVSHHRGAGNMLTF

SEQ ID NO: 15116 - protein, 15 aa, Homo sapiens
  CDR3 for beta chain variable domain of TCR clone 7558 (TRBV20-1, TRBJ1-1)
CSARPRQGAPTEAFF

SEQ ID NO: 15117 - protein, 13 aa, Homo sapiens
  CDR3 for alpha chain variable domain of TCR clone 7559 (TRAV12-1, TRAJ12)
CVVNIESSYKLIF

SEQ ID NO: 15118 - protein, 18 aa, Homo sapiens
  CDR3 for beta chain variable domain of TCR clone 7559 (TRBV5-1, TRBJ2-2)
CASSLVALGGRDTGELFF

SEQ ID NO: 15119 - protein, 12 aa, Homo sapiens
  CDR3 for alpha chain variable domain of TCR clone 7560 (TRAV16, TRAJ10)
CSRTGGGNKLTF

SEQ ID NO: 15120 - protein, 13 aa, Homo sapiens
  CDR3 for beta chain variable domain of TCR clone 7560 (TRBV7-7, TRBJ1-1)
CASSLGANTEAFF

SEQ ID NO: 15121 - protein, 14 aa, Homo sapiens
  CDR3 for alpha chain variable domain of TCR clone 7561 (TRAV20, TRAJ16)
CAVQENSDGQKLLF

SEQ ID NO: 15122 - protein, 13 aa, Homo sapiens
  CDR3 for beta chain variable domain of TCR clone 7561 (TRBV27, TRBJ2-3)
CASSSLPGDTQYF

SEQ ID NO: 15123 - protein, 15 aa, Homo sapiens
  CDR3 for alpha chain variable domain of TCR clone 7562 (TRAV13-1, TRAJ43)
CAASGGFGAGTRLTV

SEQ ID NO: 15124 - protein, 18 aa, Homo sapiens
  CDR3 for beta chain variable domain of TCR clone 7562 (TRBV11-2, TRBJ1-6)
CASSLAVQGLSLNSPLHF

SEQ ID NO: 15125 - protein, 13 aa, Homo sapiens
  CDR3 for alpha chain variable domain of TCR clone 7563 (TRAV2, TRAJ40)
CAVVTSGTYTYIF

SEQ ID NO: 15126 - protein, 14 aa, Homo sapiens
  CDR3 for beta chain variable domain of TCR clone 7563 (TRBV19, TRBJ2-1)
CASPTFVLSGEQFF

SEQ ID NO: 15127 - protein, 10 aa, Homo sapiens
  CDR3 for alpha chain variable domain of TCR clone 7564 (TRAV30, TRAJ48)
CGIGNEKLTF

SEQ ID NO: 15128 - protein, 16 aa, Homo sapiens
  CDR3 for beta chain variable domain of TCR clone 7564 (TRBV19, TRBJ1-5)
CASSTWTGGGNQPQHF

SEQ ID NO: 15129 - protein, 16 aa, Homo sapiens
  CDR3 for alpha chain variable domain of TCR clone 7565 (TRAV1-2, TRAJ10)
CAVRGVLTGGGNKLTF

SEQ ID NO: 15130 - protein, 16 aa, Homo sapiens
  CDR3 for beta chain variable domain of TCR clone 7565 (TRBV9, TRBJ2-1)
CASSVGGGGNYNEQFF

SEQ ID NO: 15131 - protein, 14 aa, Homo sapiens
  CDR3 for alpha chain variable domain of TCR clone 7566 (TRAV12-2, TRAJ40)
CAVKIPSGTYNYIF

SEQ ID NO: 15132 - protein, 14 aa, Homo sapiens
  CDR3 for beta chain variable domain of TCR clone 7566 (TRBV20-1, TRBJ1-1)
CSAQTRIGGTEAFF

SEQ ID NO: 15133 - protein, 12 aa, Homo sapiens
  CDR3 for alpha chain variable domain of TCR clone 7567 (TRAV12-3, TRAJ17)
CAMTLTGNKLTF

SEQ ID NO: 15134 - protein, 16 aa, Homo sapiens
  CDR3 for beta chain variable domain of TCR clone 7567 (TRBV29-1, TRBJ2-7)
CSVEVVGTSGSYEQYF

SEQ ID NO: 15135 - protein, 15 aa, Homo sapiens
  CDR3 for alpha chain variable domain of TCR clone 7568 (TRAV2, TRAJ15)
CAVEDRGQAGTALIF

SEQ ID NO: 15136 - protein, 15 aa, Homo sapiens
  CDR3 for beta chain variable domain of TCR clone 7568 (TRBV9, TRBJ1-6)
CASSVAGTGDSPLHF

SEQ ID NO: 15137 - protein, 21 aa, Homo sapiens
  CDR3 for alpha chain variable domain of TCR clone 7569 (TRAV36/DV7, TRAJ39)
TATQTGDSAIYLPNAGNMLTF

SEQ ID NO: 15138 - protein, 16 aa, Homo sapiens
  CDR3 for beta chain variable domain of TCR clone 7569 (TRBV19, TRBJ2-1)
CASSKAGPSSYNEQFF

SEQ ID NO: 15139 - protein, 13 aa, Homo sapiens
  CDR3 for alpha chain variable domain of TCR clone 7570 (TRAV30, TRAJ31)
CGTEITNNARLMF

SEQ ID NO: 15140 - protein, 13 aa, Homo sapiens
  CDR3 for beta chain variable domain of TCR clone 7570 (TRBV12-5, TRBJ2-3)
CASGDRQSDTQYF

SEQ ID NO: 15141 - protein, 22 aa, Homo sapiens
  CDR3 for alpha chain variable domain of TCR clone 7571 (TRAV3, TRAJ38)
CAVRDCLNAGNNHIQNPDPAVY

SEQ ID NO: 15142 - protein, 13 aa, Homo sapiens
  CDR3 for beta chain variable domain of TCR clone 7571 (TRBV12-4, TRBJ1-2)
CASSLRQGKGYTF

SEQ ID NO: 15143 - protein, 14 aa, Homo sapiens
  CDR3 for alpha chain variable domain of TCR clone 7572 (TRAV12-3, TRAJ10)
SHLPLTGGGNKLTF

SEQ ID NO: 15144 - protein, 13 aa, Homo sapiens
  CDR3 for beta chain variable domain of TCR clone 7572 (TRBV7-3, TRBJ1-1)
CASSQDWGAEAFF

SEQ ID NO: 15145 - protein, 14 aa, Homo sapiens
  CDR3 for alpha chain variable domain of TCR clone 7573 (TRAV12-1, TRAJ31)
CVVNNRDNNARLMF

SEQ ID NO: 15146 - protein, 16 aa, Homo sapiens
  CDR3 for beta chain variable domain of TCR clone 7573 (TRBV3-1, TRBJ2-3)
CASSRRAAGGRDTQYF

SEQ ID NO: 15147 - protein, 15 aa, Homo sapiens
  CDR3 for alpha chain variable domain of TCR clone 7574 (TRAV8-3, TRAJ45)
CASSYSGGGADGLTF

SEQ ID NO: 15148 - protein, 11 aa, Homo sapiens
  CDR3 for beta chain variable domain of TCR clone 7574 (TRBV12-4, TRBJ2-3)
CASTATDTQYF

SEQ ID NO: 15149 - protein, 13 aa, Homo sapiens
  CDR3 for alpha chain variable domain of TCR clone 7575 (TRAV16, TRAJ37)
CALGSGNTGKLIF

SEQ ID NO: 15150 - protein, 14 aa, Homo sapiens
  CDR3 for beta chain variable domain of TCR clone 7575 (TRBV27, TRBJ2-5)
CASSSLKGWETQYF

SEQ ID NO: 15151 - protein, 14 aa, Homo sapiens
  CDR3 for alpha chain variable domain of TCR clone 7576 (TRAV16, TRAJ16)
CALSVLSDGQKLLF

SEQ ID NO: 15152 - protein, 12 aa, Homo sapiens
  CDR3 for beta chain variable domain of TCR clone 7576 (TRBV5-5, TRBJ1-2)
CASSALNYGYTF

SEQ ID NO: 15153 - protein, 13 aa, Homo sapiens
  CDR3 for alpha chain variable domain of TCR clone 7577 (TRAV21, TRAJ27)
CAARPGNAGKSAF

SEQ ID NO: 15154 - protein, 14 aa, Homo sapiens
  CDR3 for beta chain variable domain of TCR clone 7577 (TRBV7-6, TRBJ2-3)
CASSLGTVTDTQYF

SEQ ID NO: 15155 - protein, 14 aa, Homo sapiens
  CDR3 for alpha chain variable domain of TCR clone 7578 (TRAV1-2, TRAJ8)
CAVREDTGFQKLVF

SEQ ID NO: 15156 - protein, 14 aa, Homo sapiens
  CDR3 for beta chain variable domain of TCR clone 7578 (TRBV7-2, TRBJ2-7)
CASSLYPGRYEQYF

SEQ ID NO: 15157 - protein, 15 aa, Homo sapiens
  CDR3 for alpha chain variable domain of TCR clone 7579 (TRAV26-1, TRAJ29)
CIVRVEGSGSTPLVF

SEQ ID NO: 15158 - protein, 15 aa, Homo sapiens
  CDR3 for beta chain variable domain of TCR clone 7579 (TRBV7-9, TRBJ1-5)
CASSQGHQPNQPQHF

SEQ ID NO: 15159 - protein, 11 aa, Homo sapiens
  CDR3 for alpha chain variable domain of TCR clone 7580 (TRAV2, TRAJ40)
CAVEGTYKYIF

SEQ ID NO: 15160 - protein, 17 aa, Homo sapiens
  CDR3 for beta chain variable domain of TCR clone 7580 (TRBV10-3, TRBJ1-2)
CAISQTGSASGVDGYTF

SEQ ID NO: 15161 - protein, 14 aa, Homo sapiens
  CDR3 for alpha chain variable domain of TCR clone 7581 (TRAV27, TRAJ13)
CRSSNSGGYQKVTF

SEQ ID NO: 15162 - protein, 13 aa, Homo sapiens
  CDR3 for beta chain variable domain of TCR clone 7581 (TRBV7-6, TRBJ2-1)
CQQLGGGADEQFF

SEQ ID NO: 15163 - protein, 10 aa, Homo sapiens
  CDR3 for alpha chain variable domain of TCR clone 7582 (TRAV23/DV6, TRAJ10)
CAASRLLYSR

SEQ ID NO: 15164 - protein, 15 aa, Homo sapiens
  CDR3 for beta chain variable domain of TCR clone 7582 (TRBV20-1, TRBJ2-1)
CSAEGGLLAGDEQFF

SEQ ID NO: 15165 - protein, 12 aa, Homo sapiens
  CDR3 for alpha chain variable domain of TCR clone 7583 (TRAV12-2, TRAJ10)
WGVTGGGNKLTF

SEQ ID NO: 15166 - protein, 14 aa, Homo sapiens
  CDR3 for beta chain variable domain of TCR clone 7583 (TRBV20-1, TRBJ2-1)
CSAQIGGSANEQFF

SEQ ID NO: 15167 - protein, 14 aa, Homo sapiens
  CDR3 for alpha chain variable domain of TCR clone 7584 (TRAV29/DV5, TRAJ30)
CAARLMNRDDKIIF

SEQ ID NO: 15168 - protein, 17 aa, Homo sapiens
  CDR3 for beta chain variable domain of TCR clone 7584 (TRBV12-4, TRBJ2-3)
CASSGPGLAGGADTQYF

SEQ ID NO: 15169 - protein, 16 aa, Homo sapiens
  CDR3 for alpha chain variable domain of TCR clone 7585 (TRAV30, TRAJ24)
CGTEIVDADSWGKFQF

SEQ ID NO: 15170 - protein, 16 aa, Homo sapiens
  CDR3 for beta chain variable domain of TCR clone 7585 (TRBV4-1, TRBJ2-7)
CASSQEGTASSYEQYF

SEQ ID NO: 15171 - protein, 14 aa, Homo sapiens
  CDR3 for alpha chain variable domain of TCR clone 7586 (TRAV35, TRAJ22)
CAGLRPGSARQLTF

SEQ ID NO: 15172 - protein, 15 aa, Homo sapiens
  CDR3 for beta chain variable domain of TCR clone 7586 (TRBV12-4, TRBJ2-5)
CASSPPAGLQETQYF

SEQ ID NO: 15173 - protein, 16 aa, Homo sapiens
  CDR3 for alpha chain variable domain of TCR clone 7587 (TRAV3, TRAJ37)
CAVRPHGSGNTGKLIF

SEQ ID NO: 15174 - protein, 16 aa, Homo sapiens
  CDR3 for beta chain variable domain of TCR clone 7587 (TRBV2, TRBJ2-1)
CASSVGGSLSYNEQFF

SEQ ID NO: 15175 - protein, 14 aa, Homo sapiens
  CDR3 for alpha chain variable domain of TCR clone 7588 (TRAV1-2, TRAJ16)
CAVNRFSDGQKLLF

SEQ ID NO: 15176 - protein, 13 aa, Homo sapiens
  CDR3 for beta chain variable domain of TCR clone 7588 (TRBV7-2, TRBJ2-7)
CASSSPSGSEQYF

SEQ ID NO: 15177 - protein, 13 aa, Homo sapiens
  CDR3 for alpha chain variable domain of TCR clone 7589 (TRAV29/DV5, TRAJ31)
CAASRNNNARLMF

SEQ ID NO: 15178 - protein, 14 aa, Homo sapiens
  CDR3 for beta chain variable domain of TCR clone 7589 (TRBV7-2, TRBJ2-7)
CASSPKTSFYEQYF

SEQ ID NO: 15179 - protein, 14 aa, Homo sapiens
  CDR3 for alpha chain variable domain of TCR clone 7590 (TRAV1-2, TRAJ16)
CAVSRFSDGQKLLF

SEQ ID NO: 15180 - protein, 15 aa, Homo sapiens
  CDR3 for beta chain variable domain of TCR clone 7590 (TRBV9, TRBJ1-6)
CASSVAGTGDSPLHF

SEQ ID NO: 15181 - protein, 18 aa, Homo sapiens
  CDR3 for alpha chain variable domain of TCR clone 7591 (TRAV21, TRAJ52)
CAVRPSPAGGTSYGKLTF

SEQ ID NO: 15182 - protein, 17 aa, Homo sapiens
  CDR3 for beta chain variable domain of TCR clone 7591 (TRBV11-2, TRBJ2-1)
CASSLYPPGVEYNEQFF

SEQ ID NO: 15183 - protein, 14 aa, Homo sapiens
  CDR3 for alpha chain variable domain of TCR clone 7592 (TRAV12-3, TRAJ42)
CAMNYGGSQGNLIF

SEQ ID NO: 15184 - protein, 15 aa, Homo sapiens
  CDR3 for beta chain variable domain of TCR clone 7592 (TRBV20-1, TRBJ2-7)
CSARDRVSGMDEQYF

SEQ ID NO: 15185 - protein, 15 aa, Homo sapiens
  CDR3 for alpha chain variable domain of TCR clone 7593 (TRAV12-2, TRAJ45)
CAVLLGGGGADGLTF

SEQ ID NO: 15186 - protein, 14 aa, Homo sapiens
  CDR3 for beta chain variable domain of TCR clone 7593 (TRBV7-2, TRBJ2-7)
CASSVGTRTYEQYF

SEQ ID NO: 15187 - protein, 12 aa, Homo sapiens
  CDR3 for alpha chain variable domain of TCR clone 7594 (TRAV23/DV6, TRAJ49)
CAASSTGNQFYF

SEQ ID NO: 15188 - protein, 15 aa, Homo sapiens
  CDR3 for beta chain variable domain of TCR clone 7594 (TRBV10-3, TRBJ2-3)
CAIDTSGRRTDTQYF

SEQ ID NO: 15189 - protein, 12 aa, Homo sapiens
  CDR3 for alpha chain variable domain of TCR clone 7595 (TRAV4, TRAJ26)
CLVGDYGQNFVF

SEQ ID NO: 15190 - protein, 11 aa, Homo sapiens
  CDR3 for beta chain variable domain of TCR clone 7595 (TRBV19, TRBJ1-1)
CASSIGSEAFF

SEQ ID NO: 15191 - protein, 16 aa, Homo sapiens
  CDR3 for alpha chain variable domain of TCR clone 7596 (TRAV12-3, TRAJ53)
CAMSPGSGGSNYKLTF

SEQ ID NO: 15192 - protein, 11 aa, Homo sapiens
  CDR3 for beta chain variable domain of TCR clone 7596 (TRBV29-1, TRBJ2-5)
CGEDRTGTQYF

SEQ ID NO: 15193 - protein, 14 aa, Homo sapiens
  CDR3 for alpha chain variable domain of TCR clone 7597 (TRAV12-2, TRAJ17)
CAVNIKAAGNKLTF

SEQ ID NO: 15194 - protein, 12 aa, Homo sapiens
  CDR3 for beta chain variable domain of TCR clone 7597 (TRBV7-8, TRBJ2-7)
CASSLGDREQYF

SEQ ID NO: 15195 - protein, 11 aa, Homo sapiens
  CDR3 for alpha chain variable domain of TCR clone 7598 (TRAV1-1, TRAJ23)
CAVRQGGKLIL

SEQ ID NO: 15196 - protein, 20 aa, Homo sapiens
  CDR3 for beta chain variable domain of TCR clone 7598 (TRBV7-8, TRBJ2-2)
CASSHLFPGPTIHITGELFF

SEQ ID NO: 15197 - protein, 13 aa, Homo sapiens
  CDR3 for alpha chain variable domain of TCR clone 7599 (TRAV2, TRAJ40)
CAVFTSGTYKYIF

SEQ ID NO: 15198 - protein, 14 aa, Homo sapiens
  CDR3 for beta chain variable domain of TCR clone 7599 (TRBV19, TRBJ2-1)
CASPTFVLSGEQFF

SEQ ID NO: 15199 - protein, 14 aa, Homo sapiens
  CDR3 for alpha chain variable domain of TCR clone 7600 (TRAV13-1, TRAJ35)
CAASKGGFGNVLNC

SEQ ID NO: 15200 - protein, 13 aa, Homo sapiens
  CDR3 for beta chain variable domain of TCR clone 7600 (TRBV7-3, TRBJ1-1)
CASSQDWGAEAFF

SEQ ID NO: 15201 - protein, 14 aa, Homo sapiens
  CDR3 for alpha chain variable domain of TCR clone 7601 (TRAV2, TRAJ37)
CAVDFTSNTGKLIF

SEQ ID NO: 15202 - protein, 15 aa, Homo sapiens
  CDR3 for beta chain variable domain of TCR clone 7601 (TRBV2, TRBJ2-1)
CASSELAGSYNEQFF

SEQ ID NO: 15203 - protein, 14 aa, Homo sapiens
  CDR3 for alpha chain variable domain of TCR clone 7602 (TRAV1-2, TRAJ8)
CAVREDTGFQKLVF

SEQ ID NO: 15204 - protein, 13 aa, Homo sapiens
  CDR3 for beta chain variable domain of TCR clone 7602 (TRBV20-1, TRBJ1-1)
CSARGGGNTEAFF

SEQ ID NO: 15205 - protein, 16 aa, Homo sapiens
  CDR3 for alpha chain variable domain of TCR clone 7603 (TRAV12-3, TRAJ53)
CAMSPGSGGSNYRLTF

SEQ ID NO: 15206 - protein, 11 aa, Homo sapiens
  CDR3 for beta chain variable domain of TCR clone 7603 (TRBV29-1, TRBJ2-5)
CSEDRTGTQYF

SEQ ID NO: 15207 - protein, 12 aa, Homo sapiens
  CDR3 for alpha chain variable domain of TCR clone 7604 (TRAV12-3, TRAJ17)
CAMTLTGNKLTF

SEQ ID NO: 15208 - protein, 15 aa, Homo sapiens
  CDR3 for beta chain variable domain of TCR clone 7604 (TRBV11-3, TRBJ2-3)
CASLRDGREGDTQYF

SEQ ID NO: 15209 - protein, 14 aa, Homo sapiens
  CDR3 for alpha chain variable domain of TCR clone 7605 (TRAV26-1, TRAJ54)
CIVRVPQGAQKLVF

SEQ ID NO: 15210 - protein, 15 aa, Homo sapiens
  CDR3 for beta chain variable domain of TCR clone 7605 (TRBV18, TRBJ2-7)
CASSPNSGSGNEQYF

SEQ ID NO: 15211 - protein, 16 aa, Homo sapiens
  CDR3 for alpha chain variable domain of TCR clone 7606 (TRAV8-3, TRAJ4)
CAVGARGSGGYNKLIF

SEQ ID NO: 15212 - protein, 16 aa, Homo sapiens
  CDR3 for beta chain variable domain of TCR clone 7606 (TRBV4-3, TRBJ2-5)
CASSQDSIQLQETQYF

SEQ ID NO: 15213 - protein, 16 aa, Homo sapiens
  CDR3 for alpha chain variable domain of TCR clone 7607 (TRAV30, TRAJ24)
CGTEIVDADSWGKFQF

SEQ ID NO: 15214 - protein, 14 aa, Homo sapiens
  CDR3 for beta chain variable domain of TCR clone 7607 (TRBV25-1, TRBJ1-1)
CASTHLGGNTEAFF

SEQ ID NO: 15215 - protein, 18 aa, Homo sapiens
  CDR3 for alpha chain variable domain of TCR clone 7608 (TRAV29/DV5, TRAJ52)
CAAGFRGAGGTSYGKLTF

SEQ ID NO: 15216 - protein, 17 aa, Homo sapiens
  CDR3 for beta chain variable domain of TCR clone 7608 (TRBV20-1, TRBJ2-3)
CSARSAGLAGVTDTQYF

SEQ ID NO: 15217 - protein, 13 aa, Homo sapiens
  CDR3 for alpha chain variable domain of TCR clone 7609 (TRAV3, TRAJ27)
CAVRPLGAGKSTF

SEQ ID NO: 15218 - protein, 14 aa, Homo sapiens
  CDR3 for beta chain variable domain of TCR clone 7609 (TRBV25-1, TRBJ1-1)
CASTHLGGNTEAFF

SEQ ID NO: 15219 - protein, 15 aa, Homo sapiens
  CDR3 for alpha chain variable domain of TCR clone 7610 (TRAV21, TRAJ53)
CATLNSGGSNYKLTF

SEQ ID NO: 15220 - protein, 15 aa, Homo sapiens
  CDR3 for beta chain variable domain of TCR clone 7610 (TRBV5-1, TRBJ2-3)
CASSYTSGSTDTQYF

SEQ ID NO: 15221 - protein, 14 aa, Homo sapiens
  CDR3 for alpha chain variable domain of TCR clone 7611 (TRAV8-3, TRAJ33)
CAVGPLGGNYQLIW

SEQ ID NO: 15222 - protein, 12 aa, Homo sapiens
  CDR3 for beta chain variable domain of TCR clone 7611 (TRBV19, TRBJ2-3)
CATTSSTDTQYF

SEQ ID NO: 15223 - protein, 13 aa, Homo sapiens
  CDR3 for alpha chain variable domain of TCR clone 7612 (TRAV2, TRAJ40)
CAVVTSGTYKYIF

SEQ ID NO: 15224 - protein, 14 aa, Homo sapiens
  CDR3 for beta chain variable domain of TCR clone 7612 (TRBV19, TRBJ2-1)
CTSPTFVLSGEQFF

SEQ ID NO: 15225 - protein, 16 aa, Homo sapiens
  CDR3 for alpha chain variable domain of TCR clone 7613 (TRAV30, TRAJ24)
CGTEIVDADSWGKFQF

SEQ ID NO: 15226 - protein, 15 aa, Homo sapiens
  CDR3 for beta chain variable domain of TCR clone 7613 (TRBV12-4, TRBJ2-1)
CASSLLGRTYNEQFF

SEQ ID NO: 15227 - protein, 12 aa, Homo sapiens
  CDR3 for alpha chain variable domain of TCR clone 7614 (TRAV1-1, TRAJ12)
CAVGDSSYKLIF

SEQ ID NO: 15228 - protein, 14 aa, Homo sapiens
  CDR3 for beta chain variable domain of TCR clone 7614 (TRBV15, TRBJ2-3)
CATARDGGGDTQYF

SEQ ID NO: 15229 - protein, 13 aa, Homo sapiens
  CDR3 for alpha chain variable domain of TCR clone 7615 (TRAV21, TRAJ27)
CAACPGNAGKSTF

SEQ ID NO: 15230 - protein, 14 aa, Homo sapiens
  CDR3 for beta chain variable domain of TCR clone 7615 (TRBV7-6, TRBJ2-3)
CASSLGTVTDTQYF

SEQ ID NO: 15231 - protein, 12 aa, Homo sapiens
  CDR3 for alpha chain variable domain of TCR clone 7616 (TRAV23/DV6, TRAJ33)
CAAEDSNYQLIW

SEQ ID NO: 15232 - protein, 14 aa, Homo sapiens
  CDR3 for beta chain variable domain of TCR clone 7616 (TRBV18, TRBJ1-5)
CASSRQQRNQPQHF

SEQ ID NO: 15233 - protein, 14 aa, Homo sapiens
  CDR3 for alpha chain variable domain of TCR clone 7617 (TRAV1-2, TRAJ16)
CAVNRFSDGQKLLL

SEQ ID NO: 15234 - protein, 15 aa, Homo sapiens
  CDR3 for beta chain variable domain of TCR clone 7617 (TRBV9, TRBJ1-6)
CASSVAGTGDSPLHF

SEQ ID NO: 15235 - protein, 12 aa, Homo sapiens
  CDR3 for alpha chain variable domain of TCR clone 7618 (TRAV21, TRAJ33)
CAKMDSNYQLIW

SEQ ID NO: 15236 - protein, 14 aa, Homo sapiens
  CDR3 for beta chain variable domain of TCR clone 7618 (TRBV12-4, TRBJ2-3)
CASTIAGWGDTQYF

SEQ ID NO: 15237 - protein, 18 aa, Homo sapiens
  CDR3 for alpha chain variable domain of TCR clone 7619 (TRAV13-1, TRAJ52)
CAASKRSAGGTSYGKLTF

SEQ ID NO: 15238 - protein, 13 aa, Homo sapiens
  CDR3 for beta chain variable domain of TCR clone 7619 (TRBV10-3, TRBJ2-7)
CASKLAVNYEQYF

SEQ ID NO: 15239 - protein, 15 aa, Homo sapiens
  CDR3 for alpha chain variable domain of TCR clone 7620 (TRAV20, TRAJ40)
CAVQRGTSGTYKYIF

SEQ ID NO: 15240 - protein, 15 aa, Homo sapiens
  CDR3 for beta chain variable domain of TCR clone 7620 (TRBV25-1, TRBJ1-4)
CASSPGDSTNEKLFF

SEQ ID NO: 15241 - protein, 14 aa, Homo sapiens
  CDR3 for alpha chain variable domain of TCR clone 7621 (TRAV29/DV5, TRAJ11)
CAAISNSGYSTLTF

SEQ ID NO: 15242 - protein, 15 aa, Homo sapiens
  CDR3 for beta chain variable domain of TCR clone 7621 (TRBV28, TRBJ2-1)
CASSLSGQGFDEQFF

SEQ ID NO: 15243 - protein, 12 aa, Homo sapiens
  CDR3 for alpha chain variable domain of TCR clone 7622 (TRAV21, TRAJ11)
CAATSGYSTLTF

SEQ ID NO: 15244 - protein, 14 aa, Homo sapiens
  CDR3 for beta chain variable domain of TCR clone 7622 (TRBV20-1, TRBJ2-7)
CSAPGLAGVGEQYF

SEQ ID NO: 15245 - protein, 11 aa, Homo sapiens
  CDR3 for alpha chain variable domain of TCR clone 7623 (TRAV4, TRAJ21)
CLIYNFNKFYF

SEQ ID NO: 15246 - protein, 13 aa, Homo sapiens
  CDR3 for beta chain variable domain of TCR clone 7623 (TRBV6-1, TRBJ2-7)
CASSADTSYERYF

SEQ ID NO: 15247 - protein, 13 aa, Homo sapiens
  CDR3 for alpha chain variable domain of TCR clone 7624 (TRAV1-2, TRAJ9)
CAALNTGGLKTIF

SEQ ID NO: 15248 - protein, 13 aa, Homo sapiens
  CDR3 for beta chain variable domain of TCR clone 7624 (TRBV19, TRBJ1-2)
CASSVPGQDGYTF

SEQ ID NO: 15249 - protein, 12 aa, Homo sapiens
  CDR3 for alpha chain variable domain of TCR clone 7625 (TRAV21, TRAJ26)
CAVDNYGQNFVF

SEQ ID NO: 15250 - protein, 10 aa, Homo sapiens
  CDR3 for beta chain variable domain of TCR clone 7625 (TRBV2, TRBJ2-5)
CASSAATQYF

SEQ ID NO: 15251 - protein, 15 aa, Homo sapiens
  CDR3 for alpha chain variable domain of TCR clone 7626 (TRAV26-1, TRAJ29)
CIVRVEGAGNTPLVF

SEQ ID NO: 15252 - protein, 14 aa, Homo sapiens
  CDR3 for beta chain variable domain of TCR clone 7626 (TRBV18, TRBJ2-5)
CASSPGVSQETQYF

SEQ ID NO: 15253 - protein, 14 aa, Homo sapiens
  CDR3 for alpha chain variable domain of TCR clone 7627 (TRAV12-1, TRAJ45)
CVVNIGGGADGLTF

SEQ ID NO: 15254 - protein, 15 aa, Homo sapiens
  CDR3 for beta chain variable domain of TCR clone 7627 (TRBV7-2, TRBJ2-7)
CASSLKGALTYEQYF

SEQ ID NO: 15255 - protein, 14 aa, Homo sapiens
  CDR3 for alpha chain variable domain of TCR clone 7628 (TRAV1-2, TRAJ8)
CAVREDTGFQKLVF

SEQ ID NO: 15256 - protein, 13 aa, Homo sapiens
  CDR3 for beta chain variable domain of TCR clone 7628 (TRBV5-1, TRBJ1-2)
CASSIDRPEGYTF

SEQ ID NO: 15257 - protein, 13 aa, Homo sapiens
  CDR3 for alpha chain variable domain of TCR clone 7629 (TRAV20, TRAJ7)
CAVLQGGNNRLAF

SEQ ID NO: 15258 - protein, 16 aa, Homo sapiens
  CDR3 for beta chain variable domain of TCR clone 7629 (TRBV6-1, TRBJ2-5)
CASSLRTGGVGETQYF

SEQ ID NO: 15259 - protein, 18 aa, Homo sapiens
  CDR3 for alpha chain variable domain of TCR clone 7630 (TRAV21, TRAJ52)
CAVRPSPAGGTSYGKLPF

SEQ ID NO: 15260 - protein, 17 aa, Homo sapiens
  CDR3 for beta chain variable domain of TCR clone 7630 (TRBV13, TRBJ2-3)
CASSLSRVAGGRNTQYF

SEQ ID NO: 15261 - protein, 12 aa, Homo sapiens
  CDR3 for alpha chain variable domain of TCR clone 7631 (TRAV40, TRAJ20)
CLRGLNDYKLSF

SEQ ID NO: 15262 - protein, 14 aa, Homo sapiens
  CDR3 for beta chain variable domain of TCR clone 7631 (TRBV7-8, TRBJ1-2)
CASSPDSLSYGYTF

SEQ ID NO: 15263 - protein, 15 aa, Homo sapiens
  CDR3 for alpha chain variable domain of TCR clone 7632 (TRAV27, TRAJ38)
CAARRNAGNNRKLIW

SEQ ID NO: 15264 - protein, 13 aa, Homo sapiens
  CDR3 for beta chain variable domain of TCR clone 7632 (TRBV12-5, TRBJ2-3)
RASGDRQSDTQYF

SEQ ID NO: 15265 - protein, 11 aa, Homo sapiens
  CDR3 for alpha chain variable domain of TCR clone 7633 (TRAV12-3, TRAJ27)
CAMANAGKSTF

SEQ ID NO: 15266 - protein, 15 aa, Homo sapiens
  CDR3 for beta chain variable domain of TCR clone 7633 (TRBV6-3, TRBJ2-7)
CASSSPGTVFYEQYF

SEQ ID NO: 15267 - protein, 11 aa, Homo sapiens
  CDR3 for alpha chain variable domain of TCR clone 7634 (TRAV3, TRAJ21)
CAVGNFNKFYS

SEQ ID NO: 15268 - protein, 16 aa, Homo sapiens
  CDR3 for beta chain variable domain of TCR clone 7634 (TRBV19, TRBJ2-1)
CASSKAGPSSYNEQFF

SEQ ID NO: 15269 - protein, 15 aa, Homo sapiens
  CDR3 for alpha chain variable domain of TCR clone 7635 (TRAV12-1, TRAJ37)
CVVNIMGGNTGKLIF

SEQ ID NO: 15270 - protein, 14 aa, Homo sapiens
  CDR3 for beta chain variable domain of TCR clone 7635 (TRBV12-4, TRBJ1-1)
CASSLGTGGTEAFF

SEQ ID NO: 15271 - protein, 14 aa, Homo sapiens
  CDR3 for alpha chain variable domain of TCR clone 7636 (TRAV12-2, TRAJ13)
CAVKKTGGYQKVTF

SEQ ID NO: 15272 - protein, 13 aa, Homo sapiens
  CDR3 for beta chain variable domain of TCR clone 7636 (TRBV15, TRBJ1-6)
CATSGGLNSPLHF

SEQ ID NO: 15273 - protein, 15 aa, Homo sapiens
  CDR3 for alpha chain variable domain of TCR clone 7637 (TRAV8-6, TRAJ48)
CCEPRFNFGNEKLTF

SEQ ID NO: 15274 - protein, 15 aa, Homo sapiens
  CDR3 for beta chain variable domain of TCR clone 7637 (TRBV12-4, TRBJ2-2)
CASSPQPGSTGELFF

SEQ ID NO: 15275 - protein, 15 aa, Homo sapiens
  CDR3 for alpha chain variable domain of TCR clone 7638 (TRAV23/DV6, )
CAADIQNPDPAVYQL

SEQ ID NO: 15276 - protein, 14 aa, Homo sapiens
  CDR3 for beta chain variable domain of TCR clone 7638 (TRBV5-7, TRBJ1-6)
CASSFAGHNSPLHF

SEQ ID NO: 15277 - protein, 11 aa, Homo sapiens
  CDR3 for alpha chain variable domain of TCR clone 7639 (TRAV1-2, TRAJ31)
CASHNNARLMF

SEQ ID NO: 15278 - protein, 13 aa, Homo sapiens
  CDR3 for beta chain variable domain of TCR clone 7639 (TRBV7-9, TRBJ2-7)
CASSPFDHYEQYF

SEQ ID NO: 15279 - protein, 13 aa, Homo sapiens
  CDR3 for alpha chain variable domain of TCR clone 7640 (TRAV1-2, TRAJ27)
CAVFNTNAGKSTF

SEQ ID NO: 15280 - protein, 17 aa, Homo sapiens
  CDR3 for beta chain variable domain of TCR clone 7640 (TRBV11-2, TRBJ2-4)
CASSLGEGEGGKNIQYF

SEQ ID NO: 15281 - protein, 17 aa, Homo sapiens
  CDR3 for alpha chain variable domain of TCR clone 7641 (TRAV23/DV6, TRAJ58)
CAARLLRGETSGSRLTF

SEQ ID NO: 15282 - protein, 15 aa, Homo sapiens
  CDR3 for beta chain variable domain of TCR clone 7641 (TRBV9, TRBJ1-6)
CASSVAGTGDSPLHF

SEQ ID NO: 15283 - protein, 14 aa, Homo sapiens
  CDR3 for alpha chain variable domain of TCR clone 7642 (TRAV9-2, TRAJ39)
CALYIYNAGNMLTF

SEQ ID NO: 15284 - protein, 15 aa, Homo sapiens
  CDR3 for beta chain variable domain of TCR clone 7642 (TRBV3-1, TRBJ2-7)
CASSQVRQGAYEQYF

SEQ ID NO: 15285 - protein, 11 aa, Homo sapiens
  CDR3 for alpha chain variable domain of TCR clone 7643 (TRAV1-2, TRAJ20)
CAVSNDYKLSF

SEQ ID NO: 15286 - protein, 19 aa, Homo sapiens
  CDR3 for beta chain variable domain of TCR clone 7643 (TRBV11-3, TRBJ2-2)
CASSTRPGAKTTNTGELFF

SEQ ID NO: 15287 - protein, 13 aa, Homo sapiens
  CDR3 for alpha chain variable domain of TCR clone 7644 (TRAV2, TRAJ15)
CAVASQAGTALIF

SEQ ID NO: 15288 - protein, 18 aa, Homo sapiens
  CDR3 for beta chain variable domain of TCR clone 7644 (TRBV12-4, TRBJ2-2)
CASSLVAGTRGRTGELFF

SEQ ID NO: 15289 - protein, 16 aa, Homo sapiens
  CDR3 for alpha chain variable domain of TCR clone 7645 (TRAV36/DV7, TRAJ38)
CAVTTSNAGNNRKLIW

SEQ ID NO: 15290 - protein, 12 aa, Homo sapiens
  CDR3 for beta chain variable domain of TCR clone 7645 (TRBV20-1, TRBJ1-1)
CSASGYTLRAFF

SEQ ID NO: 15291 - protein, 13 aa, Homo sapiens
  CDR3 for alpha chain variable domain of TCR clone 7646 (TRAV21, TRAJ27)
CAARPGNAGKSTF

SEQ ID NO: 15292 - protein, 14 aa, Homo sapiens
  CDR3 for beta chain variable domain of TCR clone 7646 (TRBV7-6, TRBJ2-3)
CAGSLGTVTDTQYF

SEQ ID NO: 15293 - protein, 12 aa, Homo sapiens
  CDR3 for alpha chain variable domain of TCR clone 7647 (TRAV17, TRAJ49)
CATVTTGNQFYF

SEQ ID NO: 15294 - protein, 13 aa, Homo sapiens
  CDR3 for beta chain variable domain of TCR clone 7647 (TRBV7-2, TRBJ2-2)
CASSLAVTGELFF

SEQ ID NO: 15295 - protein, 16 aa, Homo sapiens
  CDR3 for alpha chain variable domain of TCR clone 7648 (TRAV27, TRAJ45)
CPPRGRRGGGADGLTF

SEQ ID NO: 15296 - protein, 16 aa, Homo sapiens
  CDR3 for beta chain variable domain of TCR clone 7648 (TRBV7-2, TRBJ1-3)
CASSRLEASSGNTIYF

SEQ ID NO: 15297 - protein, 13 aa, Homo sapiens
  CDR3 for alpha chain variable domain of TCR clone 7649 (TRAV24, TRAJ43)
CAFTRHNNNDMRF

SEQ ID NO: 15298 - protein, 15 aa, Homo sapiens
  CDR3 for beta chain variable domain of TCR clone 7649 (TRBV20-1, TRBJ2-7)
CSARDRVSGMDEQYF

SEQ ID NO: 15299 - protein, 15 aa, Homo sapiens
  CDR3 for alpha chain variable domain of TCR clone 7650 (TRAV3, TRAJ20)
CAVRDIKLSDYKLSF

SEQ ID NO: 15300 - protein, 16 aa, Homo sapiens
  CDR3 for beta chain variable domain of TCR clone 7650 (TRBV12-4, TRBJ2-1)
CASSAVGQGNGDEQFF

SEQ ID NO: 15301 - protein, 14 aa, Homo sapiens
  CDR3 for alpha chain variable domain of TCR clone 7651 (TRAV12-2, TRAJ13)
CAVKKTGGYQKVTF

SEQ ID NO: 15302 - protein, 15 aa, Homo sapiens
  CDR3 for beta chain variable domain of TCR clone 7651 (TRBV27, TRBJ2-1)
CARSNGGGSSNEQFF

SEQ ID NO: 15303 - protein, 13 aa, Homo sapiens
  CDR3 for alpha chain variable domain of TCR clone 7652 (TRAV8-3, TRAJ28)
CAVGAVGSYQLTF

SEQ ID NO: 15304 - protein, 14 aa, Homo sapiens
  CDR3 for beta chain variable domain of TCR clone 7652 (TRBV7-2, TRBJ2-7)
CASRSRGAAYEQYF

SEQ ID NO: 15305 - protein, 16 aa, Homo sapiens
  CDR3 for alpha chain variable domain of TCR clone 7653 (TRAV12-3, TRAJ53)
CAMSPGSGGSNYKLTF

SEQ ID NO: 15306 - protein, 11 aa, Homo sapiens
  CDR3 for beta chain variable domain of TCR clone 7653 (TRBV29-1, TRBJ2-5)
CSEDRTGTQYL

SEQ ID NO: 15307 - protein, 14 aa, Homo sapiens
  CDR3 for alpha chain variable domain of TCR clone 7654 (TRAV2, TRAJ9)
CAVEDRSGGFKTIF

SEQ ID NO: 15308 - protein, 14 aa, Homo sapiens
  CDR3 for beta chain variable domain of TCR clone 7654 (TRBV19, TRBJ2-1)
CASPTFVLSGEQFF

SEQ ID NO: 15309 - protein, 17 aa, Homo sapiens
  CDR3 for alpha chain variable domain of TCR clone 7655 (TRAV26-1, TRAJ36)
CIVRPPGDQTGANNLFF

SEQ ID NO: 15310 - protein, 16 aa, Homo sapiens
  CDR3 for beta chain variable domain of TCR clone 7655 (TRBV19, TRBJ2-1)
CASSKAGPSSYNEQFF

SEQ ID NO: 15311 - protein, 15 aa, Homo sapiens
  CDR3 for alpha chain variable domain of TCR clone 7656 (TRAV8-3, TRAJ45)
CASSYSGGGADGLTF

SEQ ID NO: 15312 - protein, 12 aa, Homo sapiens
  CDR3 for beta chain variable domain of TCR clone 7656 (TRBV11-2, TRBJ2-1)
CASSPGNNEQFF

SEQ ID NO: 15313 - protein, 15 aa, Homo sapiens
  CDR3 for alpha chain variable domain of TCR clone 7657 (TRAV26-1, TRAJ40)
CIVRAVPSGTYKYIF

SEQ ID NO: 15314 - protein, 15 aa, Homo sapiens
  CDR3 for beta chain variable domain of TCR clone 7657 (TRBV20-1, TRBJ2-7)
CSARDRVSGMDEQYF

SEQ ID NO: 15315 - protein, 12 aa, Homo sapiens
  CDR3 for alpha chain variable domain of TCR clone 7658 (TRAV12-2, TRAJ20)
CAVNRNDYKLSF

SEQ ID NO: 15316 - protein, 14 aa, Homo sapiens
  CDR3 for beta chain variable domain of TCR clone 7658 (TRBV7-3, TRBJ2-1)
CASSLAGGTNEQFF

SEQ ID NO: 15317 - protein, 20 aa, Homo sapiens
  CDR3 for alpha chain variable domain of TCR clone 7659 (TRAV1-1, TRAJ4)
CLLLLRCEGFLSGGYNKLIF

SEQ ID NO: 15318 - protein, 13 aa, Homo sapiens
  CDR3 for beta chain variable domain of TCR clone 7659 (TRBV5-5, TRBJ1-2)
CASSFWRGEDYTF

SEQ ID NO: 15319 - protein, 13 aa, Homo sapiens
  CDR3 for alpha chain variable domain of TCR clone 7660 (TRAV27, TRAJ45)
CRSPGGGADGLTF

SEQ ID NO: 15320 - protein, 17 aa, Homo sapiens
  CDR3 for beta chain variable domain of TCR clone 7660 (TRBV11-2, TRBJ2-1)
CASSLYPPGVEYNEQFF

SEQ ID NO: 15321 - protein, 16 aa, Homo sapiens
  CDR3 for alpha chain variable domain of TCR clone 7661 (TRAV1-2, TRAJ10)
CAVRGVLTGGGNKLTL

SEQ ID NO: 15322 - protein, 12 aa, Homo sapiens
  CDR3 for beta chain variable domain of TCR clone 7661 (TRBV7-8, TRBJ2-7)
CASSLGDREQYF

SEQ ID NO: 15323 - protein, 16 aa, Homo sapiens
  CDR3 for alpha chain variable domain of TCR clone 7662 (TRAV26-1, TRAJ28)
CIVRVGLWGWELPTHF

SEQ ID NO: 15324 - protein, 16 aa, Homo sapiens
  CDR3 for beta chain variable domain of TCR clone 7662 (TRBV20-1, TRBJ1-2)
CSASMGQGVANYGYTF

SEQ ID NO: 15325 - protein, 16 aa, Homo sapiens
  CDR3 for alpha chain variable domain of TCR clone 7663 (TRAV30, TRAJ24)
CGTEIVDADSWGKFQF

SEQ ID NO: 15326 - protein, 14 aa, Homo sapiens
  CDR3 for beta chain variable domain of TCR clone 7663 (TRBV5-5, TRBJ1-2)
CASSLDPYNYGYTF

SEQ ID NO: 15327 - protein, 16 aa, Homo sapiens
  CDR3 for alpha chain variable domain of TCR clone 7664 (TRAV3, TRAJ10)
CAVRDMRAGGGNKLTF

SEQ ID NO: 15328 - protein, 14 aa, Homo sapiens
  CDR3 for beta chain variable domain of TCR clone 7664 (TRBV25-1, TRBJ1-1)
CASTHLGGNTEALF

SEQ ID NO: 15329 - protein, 17 aa, Homo sapiens
  CDR3 for alpha chain variable domain of TCR clone 7665 (TRAV1-2, TRAJ8)
CAVRDPDENTGFQKLVF

SEQ ID NO: 15330 - protein, 11 aa, Homo sapiens
  CDR3 for beta chain variable domain of TCR clone 7665 (TRBV7-9, TRBJ2-2)
CASSGFGGANT

SEQ ID NO: 15331 - protein, 14 aa, Homo sapiens
  CDR3 for alpha chain variable domain of TCR clone 7666 (TRAV1-1, TRAJ33)
CAVRPEDSNYQLIW

SEQ ID NO: 15332 - protein, 16 aa, Homo sapiens
  CDR3 for beta chain variable domain of TCR clone 7666 (TRBV19, TRBJ2-6)
CASSMSGLSGANVLTF

SEQ ID NO: 15333 - protein, 15 aa, Homo sapiens
  CDR3 for alpha chain variable domain of TCR clone 7667 (TRAV12-3, TRAJ6)
CAMSATTGGSYIPTF

SEQ ID NO: 15334 - protein, 13 aa, Homo sapiens
  CDR3 for beta chain variable domain of TCR clone 7667 (TRBV6-3, TRBJ2-7)
CASSFSGGYEQYF

SEQ ID NO: 15335 - protein, 15 aa, Homo sapiens
  CDR3 for alpha chain variable domain of TCR clone 7668 (TRAV13-1, TRAJ11)
CAASNRNSGYSTLTF

SEQ ID NO: 15336 - protein, 13 aa, Homo sapiens
  CDR3 for beta chain variable domain of TCR clone 7668 (TRBV4-2, TRBJ1-1)
CASSQAGNTEAFF

SEQ ID NO: 15337 - protein, 14 aa, Homo sapiens
  CDR3 for alpha chain variable domain of TCR clone 7669 (TRAV36/DV7, TRAJ44)
CCGANTGTASKLTF

SEQ ID NO: 15338 - protein, 15 aa, Homo sapiens
  CDR3 for beta chain variable domain of TCR clone 7669 (TRBV12-4, TRBJ2-5)
CASSPPTGLQETQYF

SEQ ID NO: 15339 - protein, 11 aa, Homo sapiens
  CDR3 for alpha chain variable domain of TCR clone 7670 (TRAV2, TRAJ13)
CASGGYQKVTF

SEQ ID NO: 15340 - protein, 17 aa, Homo sapiens
  CDR3 for beta chain variable domain of TCR clone 7670 (TRBV15, TRBJ1-4)
CATSRYGTGDPNEKLFF

SEQ ID NO: 15341 - protein, 14 aa, Homo sapiens
  CDR3 for alpha chain variable domain of TCR clone 7671 (TRAV13-2, TRAJ17)
CAENSKAAGNKLTF

SEQ ID NO: 15342 - protein, 16 aa, Homo sapiens
  CDR3 for beta chain variable domain of TCR clone 7671 (TRBV12-4, TRBJ1-5)
CASSRPVGGSNQPQHF

SEQ ID NO: 15343 - protein, 11 aa, Homo sapiens
  CDR3 for alpha chain variable domain of TCR clone 7672 (TRAV2, TRAJ13)
CASGGYQKVTF

SEQ ID NO: 15344 - protein, 17 aa, Homo sapiens
  CDR3 for beta chain variable domain of TCR clone 7672 (TRBV20-1, TRBJ2-7)
CSAAGTSGGGSSYEQYF

SEQ ID NO: 15345 - protein, 14 aa, Homo sapiens
  CDR3 for alpha chain variable domain of TCR clone 7673 (TRAV12-2, TRAJ44)
CAVNKAGTASKLTF

SEQ ID NO: 15346 - protein, 12 aa, Homo sapiens
  CDR3 for beta chain variable domain of TCR clone 7673 (TRBV19, TRBJ1-4)
CASKDWPRGLFF

SEQ ID NO: 15347 - protein, 15 aa, Homo sapiens
  CDR3 for alpha chain variable domain of TCR clone 7674 (TRAV23/DV6, TRAJ44)
CAASGGTGTASKLTF

SEQ ID NO: 15348 - protein, 15 aa, Homo sapiens
  CDR3 for beta chain variable domain of TCR clone 7674 (TRBV6-3, TRBJ2-7)
CASSSPGTVFYEQYF

SEQ ID NO: 15349 - protein, 14 aa, Homo sapiens
  CDR3 for alpha chain variable domain of TCR clone 7675 (TRAV8-6, TRAJ54)
CAVSLIQGAQKLVF

SEQ ID NO: 15350 - protein, 12 aa, Homo sapiens
  CDR3 for beta chain variable domain of TCR clone 7675 (TRBV7-2, TRBJ2-5)
CASSTGPGPQYF

SEQ ID NO: 15351 - protein, 13 aa, Homo sapiens
  CDR3 for alpha chain variable domain of TCR clone 7676 (TRAV8-6, TRAJ54)
CAVSDQGAQKLVF

SEQ ID NO: 15352 - protein, 17 aa, Homo sapiens
  CDR3 for beta chain variable domain of TCR clone 7676 (TRBV19, TRBJ1-1)
CASSIAGRGLMNTEAFF

SEQ ID NO: 15353 - protein, 14 aa, Homo sapiens
  CDR3 for alpha chain variable domain of TCR clone 7677 (TRAV13-2, TRAJ43)
CAEVPTYNNNDMRF

SEQ ID NO: 15354 - protein, 15 aa, Homo sapiens
  CDR3 for beta chain variable domain of TCR clone 7677 (TRBV7-9, TRBJ2-2)
CASGPLDTFPGELFF

SEQ ID NO: 15355 - protein, 15 aa, Homo sapiens
  CDR3 for alpha chain variable domain of TCR clone 7678 (TRAV13-1, TRAJ17)
CAASIERAAGNKLTF

SEQ ID NO: 15356 - protein, 12 aa, Homo sapiens
  CDR3 for beta chain variable domain of TCR clone 7678 (TRBV5-7, TRBJ1-1)
CANSLGRGKAFF

SEQ ID NO: 15357 - protein, 14 aa, Homo sapiens
  CDR3 for alpha chain variable domain of TCR clone 7679 (TRAV12-2, TRAJ5)
CAVNRSTGRRALTF

SEQ ID NO: 15358 - protein, 14 aa, Homo sapiens
  CDR3 for beta chain variable domain of TCR clone 7679 (TRBV18, TRBJ2-5)
CASSPGVSQETQYF

SEQ ID NO: 15359 - protein, 17 aa, Homo sapiens
  CDR3 for alpha chain variable domain of TCR clone 7680 (TRAV13-1, TRAJ3)
CAASKAGRGSSASKIIF

SEQ ID NO: 15360 - protein, 15 aa, Homo sapiens
  CDR3 for beta chain variable domain of TCR clone 7680 (TRBV20-1, TRBJ1-5)
CSAREGGHSNQPQHF

SEQ ID NO: 15361 - protein, 17 aa, Homo sapiens
  CDR3 for alpha chain variable domain of TCR clone 7681 (TRAV12-3, TRAJ6)
CAMSARGGAGGSYIPTF

SEQ ID NO: 15362 - protein, 15 aa, Homo sapiens
  CDR3 for beta chain variable domain of TCR clone 7681 (TRBV9, TRBJ1-6)
CASSVAGTGDSPLHF

SEQ ID NO: 15363 - protein, 14 aa, Homo sapiens
  CDR3 for alpha chain variable domain of TCR clone 7682 (TRAV12-2, TRAJ44)
CAVNKAGTASKLTF

SEQ ID NO: 15364 - protein, 12 aa, Homo sapiens
  CDR3 for beta chain variable domain of TCR clone 7682 (TRBV12-4, TRBJ2-7)
CASSLGGYEQYF

SEQ ID NO: 15365 - protein, 11 aa, Homo sapiens
  CDR3 for alpha chain variable domain of TCR clone 7683 (TRAV26-1, TRAJ37)
CIVRVGRKLIF

SEQ ID NO: 15366 - protein, 16 aa, Homo sapiens
  CDR3 for beta chain variable domain of TCR clone 7683 (TRBV3-1, TRBJ2-1)
CASSRLLTSGGNEQFF

SEQ ID NO: 15367 - protein, 14 aa, Homo sapiens
  CDR3 for alpha chain variable domain of TCR clone 7684 (TRAV36/DV7, TRAJ44)
CCGANTGTASKLTF

SEQ ID NO: 15368 - protein, 14 aa, Homo sapiens
  CDR3 for beta chain variable domain of TCR clone 7684 (TRBV20-1, TRBJ1-3)
CSASPTGAGNTIYF

SEQ ID NO: 15369 - protein, 16 aa, Homo sapiens
  CDR3 for alpha chain variable domain of TCR clone 7685 (TRAV26-1, TRAJ36)
CIVRVSYQTGANNLFF

SEQ ID NO: 15370 - protein, 16 aa, Homo sapiens
  CDR3 for beta chain variable domain of TCR clone 7685 (TRBV27, TRBJ2-5)
CASSYGPGGQKETQYF

SEQ ID NO: 15371 - protein, 14 aa, Homo sapiens
  CDR3 for alpha chain variable domain of TCR clone 7686 (TRAV12-1, TRAJ23)
CVVNAAGRKAYLRT

SEQ ID NO: 15372 - protein, 12 aa, Homo sapiens
  CDR3 for beta chain variable domain of TCR clone 7686 (TRBV6-5, TRBJ2-3)
CASSDTTDTQYF

SEQ ID NO: 15373 - protein, 14 aa, Homo sapiens
  CDR3 for alpha chain variable domain of TCR clone 7687 (TRAV1-1, TRAJ23)
CAVKAYNQGGKLIF

SEQ ID NO: 15374 - protein, 15 aa, Homo sapiens
  CDR3 for beta chain variable domain of TCR clone 7687 (TRBV7-2, TRBJ2-3)
CASTPTSGETDTQYF

SEQ ID NO: 15375 - protein, 15 aa, Homo sapiens
  CDR3 for alpha chain variable domain of TCR clone 7688 (TRAV26-1, TRAJ44)
CIVRANTGTASKLTF

SEQ ID NO: 15376 - protein, 12 aa, Homo sapiens
  CDR3 for beta chain variable domain of TCR clone 7688 (TRBV2, TRBJ2-1)
GRGLPSYNEQFF

SEQ ID NO: 15377 - protein, 16 aa, Homo sapiens
  CDR3 for alpha chain variable domain of TCR clone 7689 (TRAV30, TRAJ24)
CGTEIVDADSWGKFQF

SEQ ID NO: 15378 - protein, 14 aa, Homo sapiens
  CDR3 for beta chain variable domain of TCR clone 7689 (TRBV12-5, TRBJ2-5)
CASDSRTHQETQYF

SEQ ID NO: 15379 - protein, 11 aa, Homo sapiens
  CDR3 for alpha chain variable domain of TCR clone 7690 (TRAV3, TRAJ21)
CAVGNFNKSYF

SEQ ID NO: 15380 - protein, 16 aa, Homo sapiens
  CDR3 for beta chain variable domain of TCR clone 7690 (TRBV19, TRBJ2-1)
CASSKAGPSSYNEQFF

SEQ ID NO: 15381 - protein, 14 aa, Homo sapiens
  CDR3 for alpha chain variable domain of TCR clone 7691 (TRAV26-2, TRAJ39)
CSLRGNNNAGNMLT

SEQ ID NO: 15382 - protein, 15 aa, Homo sapiens
  CDR3 for beta chain variable domain of TCR clone 7691 (TRBV5-4, TRBJ1-1)
CASSSLGWANTEAFF

SEQ ID NO: 15383 - protein, 15 aa, Homo sapiens
  CDR3 for alpha chain variable domain of TCR clone 7692 (TRAV38-2/DV8, TRAJ31)
CAYRTETRNNARLMF

SEQ ID NO: 15384 - protein, 13 aa, Homo sapiens
  CDR3 for beta chain variable domain of TCR clone 7692 (TRBV28, TRBJ2-1)
CASSPLPSSEQFF

SEQ ID NO: 15385 - protein, 14 aa, Homo sapiens
  CDR3 for alpha chain variable domain of TCR clone 7693 (TRAV13-1, TRAJ35)
CAASKGGFGNGLHC

SEQ ID NO: 15386 - protein, 13 aa, Homo sapiens
  CDR3 for beta chain variable domain of TCR clone 7693 (TRBV7-3, TRBJ1-1)
CASSQDWGAEAFF

SEQ ID NO: 15387 - protein, 14 aa, Homo sapiens
  CDR3 for alpha chain variable domain of TCR clone 7694 (TRAV12-1, TRAJ26)
CVVKGSNYGRNFVF

SEQ ID NO: 15388 - protein, 17 aa, Homo sapiens
  CDR3 for beta chain variable domain of TCR clone 7694 (TRBV11-2, TRBJ2-6)
CASSQRDIFSGANVLTF

SEQ ID NO: 15389 - protein, 14 aa, Homo sapiens
  CDR3 for alpha chain variable domain of TCR clone 7695 (TRAV21, TRAJ22)
CAVFFSGSARQLTF

SEQ ID NO: 15390 - protein, 14 aa, Homo sapiens
  CDR3 for beta chain variable domain of TCR clone 7695 (TRBV19, TRBJ1-1)
CASSIREMNTEAFF

SEQ ID NO: 15391 - protein, 14 aa, Homo sapiens
  CDR3 for alpha chain variable domain of TCR clone 7696 (TRAV8-3, TRAJ4)
CAVGASGGYNKLIF

SEQ ID NO: 15392 - protein, 13 aa, Homo sapiens
  CDR3 for beta chain variable domain of TCR clone 7696 (TRBV27, TRBJ2-7)
CASGRGGAYEQYF

SEQ ID NO: 15393 - protein, 14 aa, Homo sapiens
  CDR3 for alpha chain variable domain of TCR clone 7697 (TRAV1-2, TRAJ16)
CAVNRFSDGQKLLF

SEQ ID NO: 15394 - protein, 13 aa, Homo sapiens
  CDR3 for beta chain variable domain of TCR clone 7697 (TRBV14, TRBJ2-7)
CASSQDRRYEQYF

SEQ ID NO: 15395 - protein, 12 aa, Homo sapiens
  CDR3 for alpha chain variable domain of TCR clone 7698 (TRAV13-1, TRAJ21)
CAAKEGFNKFYF

SEQ ID NO: 15396 - protein, 15 aa, Homo sapiens
  CDR3 for beta chain variable domain of TCR clone 7698 (TRBV28, TRBJ1-3)
CASSLAGSSGNTIYF

SEQ ID NO: 15397 - protein, 15 aa, Homo sapiens
  CDR3 for alpha chain variable domain of TCR clone 7699 (TRAV26-1, TRAJ22)
CIVRVSFWFCKATDL

SEQ ID NO: 15398 - protein, 13 aa, Homo sapiens
  CDR3 for beta chain variable domain of TCR clone 7699 (TRBV7-9, TRBJ1-2)
CASSLKQNYGYAF

SEQ ID NO: 15399 - protein, 14 aa, Homo sapiens
  CDR3 for alpha chain variable domain of TCR clone 7700 (TRAV29/DV5, TRAJ36)
CAARRKTGANNLFF

SEQ ID NO: 15400 - protein, 12 aa, Homo sapiens
  CDR3 for beta chain variable domain of TCR clone 7700 (TRBV14, TRBJ2-5)
CASSQLKETQYF

SEQ ID NO: 15401 - protein, 14 aa, Homo sapiens
  CDR3 for alpha chain variable domain of TCR clone 7701 (TRAV1-2, TRAJ8)
CAVREDTGFQKLVF

SEQ ID NO: 15402 - protein, 16 aa, Homo sapiens
  CDR3 for beta chain variable domain of TCR clone 7701 (TRBV7-2, TRBJ2-5)
CASSPFPTGGEETQYF

SEQ ID NO: 15403 - protein, 14 aa, Homo sapiens
  CDR3 for alpha chain variable domain of TCR clone 7702 (TRAV13-1, TRAJ48)
CAASTDFGNEKLTF

SEQ ID NO: 15404 - protein, 14 aa, Homo sapiens
  CDR3 for beta chain variable domain of TCR clone 7702 (TRBV7-2, TRBJ2-2)
CASSSDGHTGELFF

SEQ ID NO: 15405 - protein, 14 aa, Homo sapiens
  CDR3 for alpha chain variable domain of TCR clone 7703 (TRAV23/DV6, TRAJ53)
CAARSGGSNYKLTF

SEQ ID NO: 15406 - protein, 14 aa, Homo sapiens
  CDR3 for beta chain variable domain of TCR clone 7703 (TRBV27, TRBJ1-1)
CASSPQGKRAEAFF

SEQ ID NO: 15407 - protein, 13 aa, Homo sapiens
  CDR3 for alpha chain variable domain of TCR clone 7704 (TRAV1-2, TRAJ9)
YAALNTGGFKTIF

SEQ ID NO: 15408 - protein, 13 aa, Homo sapiens
  CDR3 for beta chain variable domain of TCR clone 7704 (TRBV19, TRBJ1-2)
CASSVPGQDGYTF

SEQ ID NO: 15409 - protein, 10 aa, Homo sapiens
  CDR3 for alpha chain variable domain of TCR clone 7705 (TRAV38-1, TRAJ34)
CAFMDDKLIF

SEQ ID NO: 15410 - protein, 17 aa, Homo sapiens
  CDR3 for beta chain variable domain of TCR clone 7705 (TRBV11-3, TRBJ2-3)
CASSLGLTGGGTDTQYF

SEQ ID NO: 15411 - protein, 16 aa, Homo sapiens
  CDR3 for alpha chain variable domain of TCR clone 7706 (TRAV12-3, TRAJ53)
CAMSPGSGGSNYKLTF

SEQ ID NO: 15412 - protein, 18 aa, Homo sapiens
  CDR3 for beta chain variable domain of TCR clone 7706 (TRBV10-2, TRBJ2-2)
CISAPAVHRQADAGELFF

SEQ ID NO: 15413 - protein, 15 aa, Homo sapiens
  CDR3 for alpha chain variable domain of TCR clone 7707 (TRAV10, TRAJ6)
CVVSGGSGGSYIPTF

SEQ ID NO: 15414 - protein, 15 aa, Homo sapiens
  CDR3 for beta chain variable domain of TCR clone 7707 (TRBV6-5, TRBJ2-1)
CASRGDFDSYNEQFF

SEQ ID NO: 15415 - protein, 15 aa, Homo sapiens
  CDR3 for alpha chain variable domain of TCR clone 7708 (TRAV29/DV5, TRAJ53)
CAASASGGSNYKLTF

SEQ ID NO: 15416 - protein, 17 aa, Homo sapiens
  CDR3 for beta chain variable domain of TCR clone 7708 (TRBV7-8, TRBJ2-6)
CASSAGTGGAGANVLTF

SEQ ID NO: 15417 - protein, 14 aa, Homo sapiens
  CDR3 for alpha chain variable domain of TCR clone 7709 (TRAV1-2, TRAJ16)
CAVNRFSDGQKLLF

SEQ ID NO: 15418 - protein, 15 aa, Homo sapiens
  CDR3 for beta chain variable domain of TCR clone 7709 (TRBV4-2, TRBJ1-1)
CASSQQGAGDTEAFL

SEQ ID NO: 15419 - protein, 17 aa, Homo sapiens
  CDR3 for alpha chain variable domain of TCR clone 7710 (TRAV3, TRAJ6)
CAVRAGPRAGGSYIPTF

SEQ ID NO: 15420 - protein, 14 aa, Homo sapiens
  CDR3 for beta chain variable domain of TCR clone 7710 (TRBV7-2, TRBJ2-7)
CASSPKTSFYEQYF

SEQ ID NO: 15421 - protein, 14 aa, Homo sapiens
  CDR3 for alpha chain variable domain of TCR clone 7711 (TRAV2, TRAJ9)
CAVEDRSGGFKTIF

SEQ ID NO: 15422 - protein, 16 aa, Homo sapiens
  CDR3 for beta chain variable domain of TCR clone 7711 (TRBV27, TRBJ2-2)
CASSFRGLVRTGELFF

SEQ ID NO: 15423 - protein, 15 aa, Homo sapiens
  CDR3 for alpha chain variable domain of TCR clone 7712 (TRAV8-1, TRAJ42)
CAVRSYGGSQGNLIF

SEQ ID NO: 15424 - protein, 21 aa, Homo sapiens
  CDR3 for beta chain variable domain of TCR clone 7712 (TRBV5-1, TRBJ1-6)
CASSPRGGADSTGGVRSPLHF

SEQ ID NO: 15425 - protein, 11 aa, Homo sapiens
  CDR3 for alpha chain variable domain of TCR clone 7713 (TRAV2, TRAJ33)
CAVESNYQLIW

SEQ ID NO: 15426 - protein, 15 aa, Homo sapiens
  CDR3 for beta chain variable domain of TCR clone 7713 (TRBV19, TRBJ1-1)
CASTPGQIQNTEAFF

SEQ ID NO: 15427 - protein, 13 aa, Homo sapiens
  CDR3 for alpha chain variable domain of TCR clone 7714 (TRAV21, TRAJ27)
CAARPGNAGKSTF

SEQ ID NO: 15428 - protein, 13 aa, Homo sapiens
  CDR3 for beta chain variable domain of TCR clone 7714 (TRBV7-3, TRBJ1-1)
CASSQDWGAEAFF

SEQ ID NO: 15429 - protein, 14 aa, Homo sapiens
  CDR3 for alpha chain variable domain of TCR clone 7715 (TRAV12-3, TRAJ35)
CAMSLIGFGNVLHC

SEQ ID NO: 15430 - protein, 16 aa, Homo sapiens
  CDR3 for beta chain variable domain of TCR clone 7715 (TRBV7-6, TRBJ2-7)
CQQLSSASGNSYEQYF

SEQ ID NO: 15431 - protein, 15 aa, Homo sapiens
  CDR3 for alpha chain variable domain of TCR clone 7716 (TRAV8-3, TRAJ45)
CAPSYSGGGADGLTF

SEQ ID NO: 15432 - protein, 13 aa, Homo sapiens
  CDR3 for beta chain variable domain of TCR clone 7716 (TRBV10-3, TRBJ2-7)
CASKLAVNYEQYF

SEQ ID NO: 15433 - protein, 13 aa, Homo sapiens
  CDR3 for alpha chain variable domain of TCR clone 7717 (TRAV13-2, TRAJ13)
CAERPGGYQKVTF

SEQ ID NO: 15434 - protein, 14 aa, Homo sapiens
  CDR3 for beta chain variable domain of TCR clone 7717 (TRBV20-1, TRBJ2-5)
CSARYRGLQETQYF

SEQ ID NO: 15435 - protein, 12 aa, Homo sapiens
  CDR3 for alpha chain variable domain of TCR clone 7718 (TRAV1-1, TRAJ24)
CAVRGSWGKFQF

SEQ ID NO: 15436 - protein, 15 aa, Homo sapiens
  CDR3 for beta chain variable domain of TCR clone 7718 (TRBV6-3, TRBJ2-7)
CASSSPGTVFYEQYF

SEQ ID NO: 15437 - protein, 13 aa, Homo sapiens
  CDR3 for alpha chain variable domain of TCR clone 7719 (TRAV12-2, TRAJ22)
CALYSGSARQLTF

SEQ ID NO: 15438 - protein, 13 aa, Homo sapiens
  CDR3 for beta chain variable domain of TCR clone 7719 (TRBV19, TRBJ2-1)
CASMEFRSNEQFF

SEQ ID NO: 15439 - protein, 14 aa, Homo sapiens
  CDR3 for alpha chain variable domain of TCR clone 7720 (TRAV12-2, TRAJ17)
CAVLLKAAGNKLTF

SEQ ID NO: 15440 - protein, 17 aa, Homo sapiens
  CDR3 for beta chain variable domain of TCR clone 7720 (TRBV20-1, TRBJ2-2)
CSASGSGQGGLTGELFF

SEQ ID NO: 15441 - protein, 15 aa, Homo sapiens
  CDR3 for alpha chain variable domain of TCR clone 7721 (TRAV19, TRAJ8)
CALSGPNTGFQKLVF

SEQ ID NO: 15442 - protein, 14 aa, Homo sapiens
  CDR3 for beta chain variable domain of TCR clone 7721 (TRBV11-2, TRBJ2-7)
CASSLGAGAYEQYF

SEQ ID NO: 15443 - protein, 14 aa, Homo sapiens
  CDR3 for alpha chain variable domain of TCR clone 7722 (TRAV13-1, TRAJ39)
CAAPPNNAGNMLTF

SEQ ID NO: 15444 - protein, 14 aa, Homo sapiens
  CDR3 for beta chain variable domain of TCR clone 7722 (TRBV12-4, TRBJ1-1)
CASNSGDLNTEAFF

SEQ ID NO: 15445 - protein, 16 aa, Homo sapiens
  CDR3 for alpha chain variable domain of TCR clone 7723 (TRAV1-2, TRAJ10)
CAVRGVLTGGGNKLTF

SEQ ID NO: 15446 - protein, 17 aa, Homo sapiens
  CDR3 for beta chain variable domain of TCR clone 7723 (TRBV28, TRBJ2-5)
CASSTPEGDALQETQYF

SEQ ID NO: 15447 - protein, 12 aa, Homo sapiens
  CDR3 for alpha chain variable domain of TCR clone 7724 (TRAV13-1, TRAJ48)
CAANFGNEKLTF

SEQ ID NO: 15448 - protein, 11 aa, Homo sapiens
  CDR3 for beta chain variable domain of TCR clone 7724 (TRBV20-1, TRBJ1-5)
CSAQGDQPQHF

SEQ ID NO: 15449 - protein, 14 aa, Homo sapiens
  CDR3 for alpha chain variable domain of TCR clone 7725 (TRAV38-1, TRAJ45)
CASHSGGGADGLTL

SEQ ID NO: 15450 - protein, 13 aa, Homo sapiens
  CDR3 for beta chain variable domain of TCR clone 7725 (TRBV10-3, TRBJ1-2)
CAISERDSYGYTF

SEQ ID NO: 15451 - protein, 13 aa, Homo sapiens
  CDR3 for alpha chain variable domain of TCR clone 7726 (TRAV8-3, TRAJ40)
CAVVVSGTYKYIF

SEQ ID NO: 15452 - protein, 15 aa, Homo sapiens
  CDR3 for beta chain variable domain of TCR clone 7726 (TRBV7-2, TRBJ2-1)
CASRKTGSSYNEQFF

SEQ ID NO: 15453 - protein, 14 aa, Homo sapiens
  CDR3 for alpha chain variable domain of TCR clone 7727 (TRAV26-1, TRAJ34)
CIVRVAYNTDKLIF

SEQ ID NO: 15454 - protein, 13 aa, Homo sapiens
  CDR3 for beta chain variable domain of TCR clone 7727 (TRBV7-3, TRBJ2-1)
CASSLDSYNEQFF

SEQ ID NO: 15455 - protein, 14 aa, Homo sapiens
  CDR3 for alpha chain variable domain of TCR clone 7728 (TRAV8-6, TRAJ13)
CAGGSSGGYQKVTF

SEQ ID NO: 15456 - protein, 15 aa, Homo sapiens
  CDR3 for beta chain variable domain of TCR clone 7728 (TRBV7-2, TRBJ2-7)
CASSLSGALTYEQYF

SEQ ID NO: 15457 - protein, 12 aa, Homo sapiens
  CDR3 for alpha chain variable domain of TCR clone 7729 (TRAV26-1, TRAJ35)
CIGLSFGNVLHC

SEQ ID NO: 15458 - protein, 17 aa, Homo sapiens
  CDR3 for beta chain variable domain of TCR clone 7729 (TRBV11-3, TRBJ1-5)
CASSPLTGLRGNQPQHF

SEQ ID NO: 15459 - protein, 12 aa, Homo sapiens
  CDR3 for alpha chain variable domain of TCR clone 7730 (TRAV4, TRAJ26)
CLVGDYGQNFVF

SEQ ID NO: 15460 - protein, 15 aa, Homo sapiens
  CDR3 for beta chain variable domain of TCR clone 7730 (TRBV27, TRBJ2-1)
CASSNGGGSSNEQFF

SEQ ID NO: 15461 - protein, 18 aa, Homo sapiens
  CDR3 for alpha chain variable domain of TCR clone 7731 (TRAV3, TRAJ42)
CAVRDEGTGGGSQGNLIF

SEQ ID NO: 15462 - protein, 16 aa, Homo sapiens
  CDR3 for beta chain variable domain of TCR clone 7731 (TRBV9, TRBJ1-2)
CASSVAKGRVDYGYTF

SEQ ID NO: 15463 - protein, 17 aa, Homo sapiens
  CDR3 for alpha chain variable domain of TCR clone 7732 (TRAV4, )
CLVDIQNPDPAVYQLRD

SEQ ID NO: 15464 - protein, 12 aa, Homo sapiens
  CDR3 for beta chain variable domain of TCR clone 7732 (TRBV6-1, TRBJ2-7)
CASSDYSYEQYF

SEQ ID NO: 15465 - protein, 15 aa, Homo sapiens
  CDR3 for alpha chain variable domain of TCR clone 7733 (TRAV26-1, TRAJ23)
CIVRVLNNQGGKLIF

SEQ ID NO: 15466 - protein, 15 aa, Homo sapiens
  CDR3 for beta chain variable domain of TCR clone 7733 (TRBV11-3, TRBJ2-1)
CASSLAGQTYNEQFF

SEQ ID NO: 15467 - protein, 14 aa, Homo sapiens
  CDR3 for alpha chain variable domain of TCR clone 7734 (TRAV1-2, TRAJ16)
CAVNRFSDGQKLLF

SEQ ID NO: 15468 - protein, 15 aa, Homo sapiens
  CDR3 for beta chain variable domain of TCR clone 7734 (TRBV9, TRBJ1-6)
CASSVAGAGDSPLHF

SEQ ID NO: 15469 - protein, 14 aa, Homo sapiens
  CDR3 for alpha chain variable domain of TCR clone 7735 (TRAV1-2, TRAJ16)
CAVNRSSDGQKLLF

SEQ ID NO: 15470 - protein, 15 aa, Homo sapiens
  CDR3 for beta chain variable domain of TCR clone 7735 (TRBV9, TRBJ1-6)
CASSVAGTGDSPLHF

SEQ ID NO: 15471 - protein, 11 aa, Homo sapiens
  CDR3 for alpha chain variable domain of TCR clone 7736 (TRAV2, TRAJ13)
CASGGYQKVTF

SEQ ID NO: 15472 - protein, 13 aa, Homo sapiens
  CDR3 for beta chain variable domain of TCR clone 7736 (TRBV7-9, TRBJ1-2)
CASSLKQNYGYTF

SEQ ID NO: 15473 - protein, 13 aa, Homo sapiens
  CDR3 for alpha chain variable domain of TCR clone 7737 (TRAV27, TRAJ45)
CRSSGGGADGLTF

SEQ ID NO: 15474 - protein, 15 aa, Homo sapiens
  CDR3 for beta chain variable domain of TCR clone 7737 (TRBV12-4, TRBJ2-5)
CASSPPTGLQETQYF

SEQ ID NO: 15475 - protein, 15 aa, Homo sapiens
  CDR3 for alpha chain variable domain of TCR clone 7738 (TRAV8-6, TRAJ10)
CAVSDQAGGGNKLTF

SEQ ID NO: 15476 - protein, 14 aa, Homo sapiens
  CDR3 for beta chain variable domain of TCR clone 7738 (TRBV4-1, TRBJ2-2)
CASSQAVNTGELFF

SEQ ID NO: 15477 - protein, 16 aa, Homo sapiens
  CDR3 for alpha chain variable domain of TCR clone 7739 (TRAV30, TRAJ24)
CGTEIVDADSWGKFQF

SEQ ID NO: 15478 - protein, 15 aa, Homo sapiens
  CDR3 for beta chain variable domain of TCR clone 7739 (TRBV4-1, TRBJ1-4)
CASSDTGGTNEKLFF

SEQ ID NO: 15479 - protein, 14 aa, Homo sapiens
  CDR3 for alpha chain variable domain of TCR clone 7740 (TRAV38-1, TRAJ40)
CALRPTPGTYKYIF

SEQ ID NO: 15480 - protein, 14 aa, Homo sapiens
  CDR3 for beta chain variable domain of TCR clone 7740 (TRBV25-1, TRBJ1-1)
CASTHLGGNTEAFF

SEQ ID NO: 15481 - protein, 14 aa, Homo sapiens
  CDR3 for alpha chain variable domain of TCR clone 7741 (TRAV1-2, TRAJ8)
CAAREDTGFQKLVF

SEQ ID NO: 15482 - protein, 15 aa, Homo sapiens
  CDR3 for beta chain variable domain of TCR clone 7741 (TRBV6-3, TRBJ2-7)
CASSSPGTVFYEQYF

SEQ ID NO: 15483 - protein, 15 aa, Homo sapiens
  CDR3 for alpha chain variable domain of TCR clone 7742 (TRAV8-3, TRAJ45)
CASSYSGGGADGLAF

SEQ ID NO: 15484 - protein, 13 aa, Homo sapiens
  CDR3 for beta chain variable domain of TCR clone 7742 (TRBV10-3, TRBJ2-7)
CASKLAVNYEQYF

SEQ ID NO: 15485 - protein, 15 aa, Homo sapiens
  CDR3 for alpha chain variable domain of TCR clone 7743 (TRAV3, TRAJ5)
CAVRDLDTGRRALTL

SEQ ID NO: 15486 - protein, 13 aa, Homo sapiens
  CDR3 for beta chain variable domain of TCR clone 7743 (TRBV12-4, TRBJ2-7)
CASSPTETYEQYF

SEQ ID NO: 15487 - protein, 15 aa, Homo sapiens
  CDR3 for alpha chain variable domain of TCR clone 7744 (TRAV26-1, TRAJ29)
CIVGVEGSGNTPLVF

SEQ ID NO: 15488 - protein, 15 aa, Homo sapiens
  CDR3 for beta chain variable domain of TCR clone 7744 (TRBV7-9, TRBJ1-5)
CASSQGHQPNQPQHF

SEQ ID NO: 15489 - protein, 14 aa, Homo sapiens
  CDR3 for alpha chain variable domain of TCR clone 7745 (TRAV1-2, TRAJ16)
CAVNRFSDGQKLLF

SEQ ID NO: 15490 - protein, 13 aa, Homo sapiens
  CDR3 for beta chain variable domain of TCR clone 7745 (TRBV7-2, TRBJ2-2)
CASSSVRAGELFF

SEQ ID NO: 15491 - protein, 16 aa, Homo sapiens
  CDR3 for alpha chain variable domain of TCR clone 7746 (TRAV21, TRAJ37)
CAVRPRGSSSTGKLIF

SEQ ID NO: 15492 - protein, 13 aa, Homo sapiens
  CDR3 for beta chain variable domain of TCR clone 7746 (TRBV7-9, TRBJ2-5)
CASLSPGQETQYF

SEQ ID NO: 15493 - protein, 15 aa, Homo sapiens
  CDR3 for alpha chain variable domain of TCR clone 7747 (TRAV26-1, TRAJ22)
CIVRVSFWFCKATDL

SEQ ID NO: 15494 - protein, 13 aa, Homo sapiens
  CDR3 for beta chain variable domain of TCR clone 7747 (TRBV7-9, TRBJ1-2)
CASSLKQNYGDTF

SEQ ID NO: 15495 - protein, 15 aa, Homo sapiens
  CDR3 for alpha chain variable domain of TCR clone 7748 (TRAV27, TRAJ38)
CAARRNAGNNRKLIW

SEQ ID NO: 15496 - protein, 14 aa, Homo sapiens
  CDR3 for beta chain variable domain of TCR clone 7748 (TRBV6-1, TRBJ1-3)
CASVQGGGGNTIYF

SEQ ID NO: 15497 - protein, 19 aa, Homo sapiens
  CDR3 for alpha chain variable domain of TCR clone 7749 (TRAV21, TRAJ40)
SLVTQPPTSVISGTYKYIF

SEQ ID NO: 15498 - protein, 16 aa, Homo sapiens
  CDR3 for beta chain variable domain of TCR clone 7749 (TRBV28, TRBJ2-3)
CASSFFRDPRLGTQYF

SEQ ID NO: 15499 - protein, 13 aa, Homo sapiens
  CDR3 for alpha chain variable domain of TCR clone 7750 (TRAV12-3, TRAJ33)
CAMSVNSNYQLIW

SEQ ID NO: 15500 - protein, 16 aa, Homo sapiens
  CDR3 for beta chain variable domain of TCR clone 7750 (TRBV12-4, TRBJ1-5)
CASSRPVGGSNQPQHF

SEQ ID NO: 15501 - protein, 17 aa, Homo sapiens
  CDR3 for alpha chain variable domain of TCR clone 7751 (TRAV3, TRAJ42)
CAVRGRDYGGSQGNLIF

SEQ ID NO: 15502 - protein, 15 aa, Homo sapiens
  CDR3 for beta chain variable domain of TCR clone 7751 (TRBV6-6, TRBJ2-7)
CASSYSYGGSYEQYF

SEQ ID NO: 15503 - protein, 15 aa, Homo sapiens
  CDR3 for alpha chain variable domain of TCR clone 7752 (TRAV12-2, TRAJ53)
CAVNGGGGSNYKLTF

SEQ ID NO: 15504 - protein, 15 aa, Homo sapiens
  CDR3 for beta chain variable domain of TCR clone 7752 (TRBV6-3, TRBJ2-7)
CASSSPGTVFYEQYF

SEQ ID NO: 15505 - protein, 13 aa, Homo sapiens
  CDR3 for alpha chain variable domain of TCR clone 7753 (TRAV9-2, TRAJ58)
CSATGTSGSRLTF

SEQ ID NO: 15506 - protein, 14 aa, Homo sapiens
  CDR3 for beta chain variable domain of TCR clone 7753 (TRBV7-9, TRBJ2-1)
CASSPRDSLYEQFF

SEQ ID NO: 15507 - protein, 12 aa, Homo sapiens
  CDR3 for alpha chain variable domain of TCR clone 7754 (TRAV19, TRAJ26)
CSDVNYGQNFVF

SEQ ID NO: 15508 - protein, 14 aa, Homo sapiens
  CDR3 for beta chain variable domain of TCR clone 7754 (TRBV4-1, TRBJ1-1)
CASSRSGQSFEAFF

SEQ ID NO: 15509 - protein, 14 aa, Homo sapiens
  CDR3 for alpha chain variable domain of TCR clone 7755 (TRAV12-3, TRAJ22)
CAMSSFGSARQLTF

SEQ ID NO: 15510 - protein, 11 aa, Homo sapiens
  CDR3 for beta chain variable domain of TCR clone 7755 (TRBV12-4, TRBJ2-2)
CASSSAGELFF

SEQ ID NO: 15511 - protein, 12 aa, Homo sapiens
  CDR3 for alpha chain variable domain of TCR clone 7756 (TRAV12-3, TRAJ17)
CAMTLTGNKLTF

SEQ ID NO: 15512 - protein, 15 aa, Homo sapiens
  CDR3 for beta chain variable domain of TCR clone 7756 (TRBV20-1, TRBJ2-7)
CSDRDRVSGMDEQYF

SEQ ID NO: 15513 - protein, 12 aa, Homo sapiens
  CDR3 for alpha chain variable domain of TCR clone 7757 (TRAV12-3, TRAJ17)
CAMTLTGNKLTF

SEQ ID NO: 15514 - protein, 14 aa, Homo sapiens
  CDR3 for beta chain variable domain of TCR clone 7757 (TRBV12-5, TRBJ2-5)
CASGSRTHQETQYF

SEQ ID NO: 15515 - protein, 13 aa, Homo sapiens
  CDR3 for alpha chain variable domain of TCR clone 7758 (TRAV13-1, TRAJ15)
CAALYQAGTALIF

SEQ ID NO: 15516 - protein, 16 aa, Homo sapiens
  CDR3 for beta chain variable domain of TCR clone 7758 (TRBV5-5, TRBJ1-4)
CASSLVAALLGEKLFF

SEQ ID NO: 15517 - protein, 11 aa, Homo sapiens
  CDR3 for alpha chain variable domain of TCR clone 7759 (TRAV2, TRAJ13)
CASGGYQKVTF

SEQ ID NO: 15518 - protein, 16 aa, Homo sapiens
  CDR3 for beta chain variable domain of TCR clone 7759 (TRBV7-3, TRBJ2-2)
CASSLKRGTLSGELFF

SEQ ID NO: 15519 - protein, 17 aa, Homo sapiens
  CDR3 for alpha chain variable domain of TCR clone 7760 (TRAV26-1, TRAJ57)
CIVRPRFTQGGSEKLVF

SEQ ID NO: 15520 - protein, 16 aa, Homo sapiens
  CDR3 for beta chain variable domain of TCR clone 7760 (TRBV13, TRBJ2-2)
CASSEVFGANTGELFF

SEQ ID NO: 15521 - protein, 12 aa, Homo sapiens
  CDR3 for alpha chain variable domain of TCR clone 7761 (TRAV29/DV5, TRAJ34)
CAASGNTDKLIF

SEQ ID NO: 15522 - protein, 15 aa, Homo sapiens
  CDR3 for beta chain variable domain of TCR clone 7761 (TRBV6-1, TRBJ2-5)
CASSEGWGIQETQYF

SEQ ID NO: 15523 - protein, 15 aa, Homo sapiens
  CDR3 for alpha chain variable domain of TCR clone 7762 (TRAV26-1, TRAJ29)
FIVRVEGSGNTPLVF

SEQ ID NO: 15524 - protein, 15 aa, Homo sapiens
  CDR3 for beta chain variable domain of TCR clone 7762 (TRBV7-9, TRBJ1-5)
CASSQGHQPNQPQHF

SEQ ID NO: 15525 - protein, 16 aa, Homo sapiens
  CDR3 for alpha chain variable domain of TCR clone 7763 (TRAV30, TRAJ24)
CGTEIVDADSWGKFQF

SEQ ID NO: 15526 - protein, 14 aa, Homo sapiens
  CDR3 for beta chain variable domain of TCR clone 7763 (TRBV12-5, TRBJ2-5)
CASSSRTHQETQYF

SEQ ID NO: 15527 - protein, 15 aa, Homo sapiens
  CDR3 for alpha chain variable domain of TCR clone 7764 (TRAV8-4, TRAJ29)
CAVSEDFRGNTPLVF

SEQ ID NO: 15528 - protein, 12 aa, Homo sapiens
  CDR3 for beta chain variable domain of TCR clone 7764 (TRBV14, TRBJ2-7)
CASSSLKGEQYI

SEQ ID NO: 15529 - protein, 14 aa, Homo sapiens
  CDR3 for alpha chain variable domain of TCR clone 7765 (TRAV12-2, TRAJ9)
CAMSPNTGGFKTIF

SEQ ID NO: 15530 - protein, 12 aa, Homo sapiens
  CDR3 for beta chain variable domain of TCR clone 7765 (TRBV19, TRBJ1-5)
CASSIAQQPQHF

SEQ ID NO: 15531 - protein, 14 aa, Homo sapiens
  CDR3 for alpha chain variable domain of TCR clone 7766 (TRAV26-1, TRAJ34)
CIVRVAGNTDKLIF

SEQ ID NO: 15532 - protein, 16 aa, Homo sapiens
  CDR3 for beta chain variable domain of TCR clone 7766 (TRBV12-5, TRBJ2-5)
CASGPRTSGNQETQYF

SEQ ID NO: 15533 - protein, 12 aa, Homo sapiens
  CDR3 for alpha chain variable domain of TCR clone 7767 (TRAV24, TRAJ37)
CASSSNTGKLIF

SEQ ID NO: 15534 - protein, 16 aa, Homo sapiens
  CDR3 for beta chain variable domain of TCR clone 7767 (TRBV19, TRBJ1-1)
CASRFGGPVTGTEAFF

SEQ ID NO: 15535 - protein, 12 aa, Homo sapiens
  CDR3 for alpha chain variable domain of TCR clone 7768 (TRAV13-1, TRAJ48)
CAARVGGEKLTF

SEQ ID NO: 15536 - protein, 14 aa, Homo sapiens
  CDR3 for beta chain variable domain of TCR clone 7768 (TRBV20-1, TRBJ2-7)
CSASSTSGTYEQYF

SEQ ID NO: 15537 - protein, 12 aa, Homo sapiens
  CDR3 for alpha chain variable domain of TCR clone 7769 (TRAV13-1, TRAJ43)
CAAGRFNNDMRF

SEQ ID NO: 15538 - protein, 11 aa, Homo sapiens
  CDR3 for beta chain variable domain of TCR clone 7769 (TRBV29-1, TRBJ2-5)
CSEDRTGTQYF

SEQ ID NO: 15539 - protein, 19 aa, Homo sapiens
  CDR3 for alpha chain variable domain of TCR clone 7770 (TRAV13-1, TRAJ52)
CAASSSPNAGGTSYGKLTF

SEQ ID NO: 15540 - protein, 15 aa, Homo sapiens
  CDR3 for beta chain variable domain of TCR clone 7770 (TRBV9, TRBJ1-6)
CASSTGGGVDSPLHF

SEQ ID NO: 15541 - protein, 14 aa, Homo sapiens
  CDR3 for alpha chain variable domain of TCR clone 7771 (TRAV12-2, TRAJ13)
RAVKKTGGYQKVTF

SEQ ID NO: 15542 - protein, 15 aa, Homo sapiens
  CDR3 for beta chain variable domain of TCR clone 7771 (TRBV27, TRBJ2-1)
CASSNGGGSSNEQFF

SEQ ID NO: 15543 - protein, 14 aa, Homo sapiens
  CDR3 for alpha chain variable domain of TCR clone 7772 (TRAV12-3, TRAJ10)
SHLPLTGGGNKLTF

SEQ ID NO: 15544 - protein, 15 aa, Homo sapiens
  CDR3 for beta chain variable domain of TCR clone 7772 (TRBV27, TRBJ2-1)
CASSNGGGSSNEQFF

SEQ ID NO: 15545 - protein, 20 aa, Homo sapiens
  CDR3 for alpha chain variable domain of TCR clone 7773 (TRAV16, TRAJ32)
CSRGRLSHVLGGGATNKLIF

SEQ ID NO: 15546 - protein, 15 aa, Homo sapiens
  CDR3 for beta chain variable domain of TCR clone 7773 (TRBV9, TRBJ1-6)
CASSVAGTGDSPLHF

SEQ ID NO: 15547 - protein, 14 aa, Homo sapiens
  CDR3 for alpha chain variable domain of TCR clone 7774 (TRAV12-3, TRAJ53)
CAMSGGGSNYKLTF

SEQ ID NO: 15548 - protein, 13 aa, Homo sapiens
  CDR3 for beta chain variable domain of TCR clone 7774 (TRBV3-1, TRBJ1-1)
CASSRQGETEAFF

SEQ ID NO: 15549 - protein, 17 aa, Homo sapiens
  CDR3 for alpha chain variable domain of TCR clone 7775 (TRAV3, TRAJ6)
CAVRDGPMAGGSYIPTF

SEQ ID NO: 15550 - protein, 14 aa, Homo sapiens
  CDR3 for beta chain variable domain of TCR clone 7775 (TRBV7-2, TRBJ2-7)
CASSPKTSFYEQYF

SEQ ID NO: 15551 - protein, 14 aa, Homo sapiens
  CDR3 for alpha chain variable domain of TCR clone 7776 (TRAV12-2, TRAJ13)
CAVKKTGGYQKVTF

SEQ ID NO: 15552 - protein, 15 aa, Homo sapiens
  CDR3 for beta chain variable domain of TCR clone 7776 (TRBV27, TRBJ2-1)
CASSNGGGSSNERFF

SEQ ID NO: 15553 - protein, 17 aa, Homo sapiens
  CDR3 for alpha chain variable domain of TCR clone 7777 (TRAV4, )
CLVDIQNPDPAVYQLRD

SEQ ID NO: 15554 - protein, 16 aa, Homo sapiens
  CDR3 for beta chain variable domain of TCR clone 7777 (TRBV28, TRBJ1-1)
CASSLSGTGWNTEAFF

SEQ ID NO: 15555 - protein, 13 aa, Homo sapiens
  CDR3 for alpha chain variable domain of TCR clone 7778 (TRAV13-2, TRAJ13)
CAERPGGYQKVTF

SEQ ID NO: 15556 - protein, 13 aa, Homo sapiens
  CDR3 for beta chain variable domain of TCR clone 7778 (TRBV28, TRBJ1-2)
CAGRDRGNYGYTF

SEQ ID NO: 15557 - protein, 19 aa, Homo sapiens
  CDR3 for alpha chain variable domain of TCR clone 7779 (TRAV1-2, TRAJ26)
CLLPLCCERPDNYGQNFVF

SEQ ID NO: 15558 - protein, 15 aa, Homo sapiens
  CDR3 for beta chain variable domain of TCR clone 7779 (TRBV27, TRBJ2-1)
CASSNGGGSSNEQFF

SEQ ID NO: 15559 - protein, 18 aa, Homo sapiens
  CDR3 for alpha chain variable domain of TCR clone 7780 (TRAV9-2, TRAJ13)
CQTQRCTEPSGGYQKVTF

SEQ ID NO: 15560 - protein, 13 aa, Homo sapiens
  CDR3 for beta chain variable domain of TCR clone 7780 (TRBV5-7, TRBJ2-5)
CASRSSGGGTQYF

SEQ ID NO: 15561 - protein, 15 aa, Homo sapiens
  CDR3 for alpha chain variable domain of TCR clone 7781 (TRAV16, TRAJ57)
CALSGGQGGSEKLVF

SEQ ID NO: 15562 - protein, 15 aa, Homo sapiens
  CDR3 for beta chain variable domain of TCR clone 7781 (TRBV5-1, TRBJ2-1)
CASSPPRAPYNEQFF

SEQ ID NO: 15563 - protein, 14 aa, Homo sapiens
  CDR3 for alpha chain variable domain of TCR clone 7782 (TRAV1-2, TRAJ16)
CAVNRFSDGQKLLF

SEQ ID NO: 15564 - protein, 13 aa, Homo sapiens
  CDR3 for beta chain variable domain of TCR clone 7782 (TRBV6-6, TRBJ2-7)
CASSPKHLAEQYF

SEQ ID NO: 15565 - protein, 12 aa, Homo sapiens
  CDR3 for alpha chain variable domain of TCR clone 7783 (TRAV12-3, TRAJ17)
CAMTLTGNKLTF

SEQ ID NO: 15566 - protein, 15 aa, Homo sapiens
  CDR3 for beta chain variable domain of TCR clone 7783 (TRBV20-1, TRBJ2-7)
CSARVRVSGMDEQYF

SEQ ID NO: 15567 - protein, 13 aa, Homo sapiens
  CDR3 for alpha chain variable domain of TCR clone 7784 (TRAV1-2, TRAJ9)
CAALNTGGFKTIF

SEQ ID NO: 15568 - protein, 17 aa, Homo sapiens
  CDR3 for beta chain variable domain of TCR clone 7784 (TRBV7-3, TRBJ2-3)
CASSPRGQGYGTDTQYF

SEQ ID NO: 15569 - protein, 12 aa, Homo sapiens
  CDR3 for alpha chain variable domain of TCR clone 7785 (TRAV12-2, TRAJ15)
CAVNQAGTALIF

SEQ ID NO: 15570 - protein, 15 aa, Homo sapiens
  CDR3 for beta chain variable domain of TCR clone 7785 (TRBV3-1, TRBJ1-2)
CASSFRTGPNYGYTF

SEQ ID NO: 15571 - protein, 14 aa, Homo sapiens
  CDR3 for alpha chain variable domain of TCR clone 7786 (TRAV1-2, TRAJ16)
CAVNRFSDGQKLLF

SEQ ID NO: 15572 - protein, 13 aa, Homo sapiens
  CDR3 for beta chain variable domain of TCR clone 7786 (TRBV5-5, TRBJ1-2)
CASSFWRGEDYTF

SEQ ID NO: 15573 - protein, 15 aa, Homo sapiens
  CDR3 for alpha chain variable domain of TCR clone 7787 (TRAV4, TRAJ28)
CLPSYSGAGSYQLTF

SEQ ID NO: 15574 - protein, 16 aa, Homo sapiens
  CDR3 for beta chain variable domain of TCR clone 7787 (TRBV5-7, TRBJ2-1)
CASSGGLAGTYNEQFF

SEQ ID NO: 15575 - protein, 15 aa, Homo sapiens
  CDR3 for alpha chain variable domain of TCR clone 7788 (TRAV8-3, TRAJ45)
CASSYSGGGADGLTF

SEQ ID NO: 15576 - protein, 13 aa, Homo sapiens
  CDR3 for beta chain variable domain of TCR clone 7788 (TRBV10-3, TRBJ2-7)
CASKLAVNYEQYV

SEQ ID NO: 15577 - protein, 15 aa, Homo sapiens
  CDR3 for alpha chain variable domain of TCR clone 7789 (TRAV3, TRAJ23)
CAVRDRGNQGGKLIF

SEQ ID NO: 15578 - protein, 13 aa, Homo sapiens
  CDR3 for beta chain variable domain of TCR clone 7789 (TRBV7-2, TRBJ2-7)
CASSSPSGSEQYF

SEQ ID NO: 15579 - protein, 12 aa, Homo sapiens
  CDR3 for alpha chain variable domain of TCR clone 7790 (TRAV38-2/DV8, TRAJ29)
CAYLRGNTPLVF

SEQ ID NO: 15580 - protein, 15 aa, Homo sapiens
  CDR3 for beta chain variable domain of TCR clone 7790 (TRBV28, TRBJ1-4)
CASSLMKGSGEKLFF

SEQ ID NO: 15581 - protein, 14 aa, Homo sapiens
  CDR3 for alpha chain variable domain of TCR clone 7791 (TRAV8-4, TRAJ8)
CAVSEDTGFQKLVF

SEQ ID NO: 15582 - protein, 13 aa, Homo sapiens
  CDR3 for beta chain variable domain of TCR clone 7791 (TRBV7-9, TRBJ1-2)
CASSLKQNYGYTF

SEQ ID NO: 15583 - protein, 14 aa, Homo sapiens
  CDR3 for alpha chain variable domain of TCR clone 7792 (TRAV26-1, TRAJ38)
CIADNAGNNRKRIW

SEQ ID NO: 15584 - protein, 13 aa, Homo sapiens
  CDR3 for beta chain variable domain of TCR clone 7792 (TRBV20-1, TRBJ1-1)
CSARGGGNTEAFF

SEQ ID NO: 15585 - protein, 14 aa, Homo sapiens
  CDR3 for alpha chain variable domain of TCR clone 7793 (TRAV12-2, TRAJ24)
CAVTPADSWGKLQF

SEQ ID NO: 15586 - protein, 15 aa, Homo sapiens
  CDR3 for beta chain variable domain of TCR clone 7793 (TRBV9, TRBJ1-6)
CASSVAGTGDSPLHF

SEQ ID NO: 15587 - protein, 14 aa, Homo sapiens
  CDR3 for alpha chain variable domain of TCR clone 7794 (TRAV1-2, TRAJ16)
CAVNRFSDGQKLLF

SEQ ID NO: 15588 - protein, 12 aa, Homo sapiens
  CDR3 for beta chain variable domain of TCR clone 7794 (TRBV29-1, TRBJ2-3)
CSVTGGADTQYF

SEQ ID NO: 15589 - protein, 12 aa, Homo sapiens
  CDR3 for alpha chain variable domain of TCR clone 7795 (TRAV12-3, TRAJ17)
CAMTLTGNKLTF

SEQ ID NO: 15590 - protein, 15 aa, Homo sapiens
  CDR3 for beta chain variable domain of TCR clone 7795 (TRBV20-1, TRBJ2-7)
CSARDRVSGMDEQYF

SEQ ID NO: 15591 - protein, 16 aa, Homo sapiens
  CDR3 for alpha chain variable domain of TCR clone 7796 (TRAV23/DV6, TRAJ3)
CSKHAVSYSSASKIIF

SEQ ID NO: 15592 - protein, 15 aa, Homo sapiens
  CDR3 for beta chain variable domain of TCR clone 7796 (TRBV27, TRBJ2-1)
CASSNGGGSSNEQFF

SEQ ID NO: 15593 - protein, 15 aa, Homo sapiens
  CDR3 for alpha chain variable domain of TCR clone 7797 (TRAV3, TRAJ17)
CAVRDTGAAGNKLTF

SEQ ID NO: 15594 - protein, 16 aa, Homo sapiens
  CDR3 for beta chain variable domain of TCR clone 7797 (TRBV7-3, TRBJ2-2)
CASSLKRGTLSGELFF

SEQ ID NO: 15595 - protein, 15 aa, Homo sapiens
  CDR3 for alpha chain variable domain of TCR clone 7798 (TRAV21, TRAJ53)
CATLNSGGSNYKLTF

SEQ ID NO: 15596 - protein, 13 aa, Homo sapiens
  CDR3 for beta chain variable domain of TCR clone 7798 (TRBV12-5, TRBJ2-1)
CASGLGRGNEQFF

SEQ ID NO: 15597 - protein, 16 aa, Homo sapiens
  CDR3 for alpha chain variable domain of TCR clone 7799 (TRAV12-1, TRAJ22)
CVVNSISSGSARQLTF

SEQ ID NO: 15598 - protein, 16 aa, Homo sapiens
  CDR3 for beta chain variable domain of TCR clone 7799 (TRBV19, TRBJ2-1)
CASSIWGQGARNEQFF

SEQ ID NO: 15599 - protein, 14 aa, Homo sapiens
  CDR3 for alpha chain variable domain of TCR clone 7800 (TRAV9-2, TRAJ39)
CALYIYNAGNMLTF

SEQ ID NO: 15600 - protein, 16 aa, Homo sapiens
  CDR3 for beta chain variable domain of TCR clone 7800 (TRBV7-3, TRBJ2-2)
CASSLKRGTLSGELFF

SEQ ID NO: 15601 - protein, 15 aa, Homo sapiens
  CDR3 for alpha chain variable domain of TCR clone 7801 (TRAV1-2, TRAJ38)
CAVRENAGNNRKLIW

SEQ ID NO: 15602 - protein, 13 aa, Homo sapiens
  CDR3 for beta chain variable domain of TCR clone 7801 (TRBV27, TRBJ1-2)
CASSPSHRGRYTF

SEQ ID NO: 15603 - protein, 17 aa, Homo sapiens
  CDR3 for alpha chain variable domain of TCR clone 7802 (TRAV3, TRAJ6)
RAVRDGPRAGGSYIPTF

SEQ ID NO: 15604 - protein, 20 aa, Homo sapiens
  CDR3 for beta chain variable domain of TCR clone 7802 (TRBV28, TRBJ2-1)
CASTPIGRSPGLAGGNEQFF

SEQ ID NO: 15605 - protein, 14 aa, Homo sapiens
  CDR3 for alpha chain variable domain of TCR clone 7803 (TRAV1-2, TRAJ8)
CAVREDTGFQKLVF

SEQ ID NO: 15606 - protein, 15 aa, Homo sapiens
  CDR3 for beta chain variable domain of TCR clone 7803 (TRBV6-1, TRBJ2-3)
CASSERGGITDTQYF

SEQ ID NO: 15607 - protein, 10 aa, Homo sapiens
  CDR3 for alpha chain variable domain of TCR clone 7804 (TRAV1-2, TRAJ20)
CAVTDYKLSF

SEQ ID NO: 15608 - protein, 15 aa, Homo sapiens
  CDR3 for beta chain variable domain of TCR clone 7804 (TRBV6-3, TRBJ2-7)
CASSSPGTVFYEQYF

SEQ ID NO: 15609 - protein, 14 aa, Homo sapiens
  CDR3 for alpha chain variable domain of TCR clone 7805 (TRAV26-1, TRAJ29)
CIVRVEPGNTPLVF

SEQ ID NO: 15610 - protein, 14 aa, Homo sapiens
  CDR3 for beta chain variable domain of TCR clone 7805 (TRBV25-1, TRBJ1-1)
CASTHLGGNTEAFF

SEQ ID NO: 15611 - protein, 17 aa, Homo sapiens
  CDR3 for alpha chain variable domain of TCR clone 7806 (TRAV3, TRAJ6)
CAVRDGPRAGGSYIPTF

SEQ ID NO: 15612 - protein, 14 aa, Homo sapiens
  CDR3 for beta chain variable domain of TCR clone 7806 (TRBV7-2, TRBJ2-7)
CASSPKTSFYEQCF

SEQ ID NO: 15613 - protein, 14 aa, Homo sapiens
  CDR3 for alpha chain variable domain of TCR clone 7807 (TRAV12-2, TRAJ40)
CAVKIPSGTYKYTF

SEQ ID NO: 15614 - protein, 14 aa, Homo sapiens
  CDR3 for beta chain variable domain of TCR clone 7807 (TRBV20-1, TRBJ1-1)
CSAQTRIGGTEAFF

SEQ ID NO: 15615 - protein, 14 aa, Homo sapiens
  CDR3 for alpha chain variable domain of TCR clone 7808 (TRAV1-2, TRAJ8)
CAVREDTGFQKLVF

SEQ ID NO: 15616 - protein, 14 aa, Homo sapiens
  CDR3 for beta chain variable domain of TCR clone 7808 (TRBV20-1, TRBJ2-7)
CSAPELAGVGEQYF

SEQ ID NO: 15617 - protein, 12 aa, Homo sapiens
  CDR3 for alpha chain variable domain of TCR clone 7809 (TRAV8-3, TRAJ20)
CAVGANDYKPSF

SEQ ID NO: 15618 - protein, 16 aa, Homo sapiens
  CDR3 for beta chain variable domain of TCR clone 7809 (TRBV19, TRBJ2-2)
CASRSPGTGATGELFF

SEQ ID NO: 15619 - protein, 11 aa, Homo sapiens
  CDR3 for alpha chain variable domain of TCR clone 7810 (TRAV29/DV5, TRAJ30)
CAVREVDKIIF

SEQ ID NO: 15620 - protein, 16 aa, Homo sapiens
  CDR3 for beta chain variable domain of TCR clone 7810 (TRBV27, TRBJ1-5)
CASSLSGGASNQPQHF

SEQ ID NO: 15621 - protein, 13 aa, Homo sapiens
  CDR3 for alpha chain variable domain of TCR clone 7811 (TRAV3, TRAJ21)
CAVREPDFNKFYF

SEQ ID NO: 15622 - protein, 14 aa, Homo sapiens
  CDR3 for beta chain variable domain of TCR clone 7811 (TRBV20-1, TRBJ1-1)
CSARAVNGYTEAFF

SEQ ID NO: 15623 - protein, 13 aa, Homo sapiens
  CDR3 for alpha chain variable domain of TCR clone 7812 (TRAV8-3, TRAJ43)
CAVGPDNNNDMRF

SEQ ID NO: 15624 - protein, 14 aa, Homo sapiens
  CDR3 for beta chain variable domain of TCR clone 7812 (TRBV20-1, TRBJ1-3)
CSASPTGAGNTIYF

SEQ ID NO: 15625 - protein, 14 aa, Homo sapiens
  CDR3 for alpha chain variable domain of TCR clone 7813 (TRAV17, TRAJ57)
CATDPQGGSEKLVF

SEQ ID NO: 15626 - protein, 20 aa, Homo sapiens
  CDR3 for beta chain variable domain of TCR clone 7813 (TRBV28, TRBJ2-1)
CASTPIGRSPGLAGGNEQFF

SEQ ID NO: 15627 - protein, 14 aa, Homo sapiens
  CDR3 for alpha chain variable domain of TCR clone 7814 (TRAV17, TRAJ15)
CATDRGQAGTALIF

SEQ ID NO: 15628 - protein, 14 aa, Homo sapiens
  CDR3 for beta chain variable domain of TCR clone 7814 (TRBV6-1, TRBJ1-3)
CASVQGGGGNTIYF

SEQ ID NO: 15629 - protein, 16 aa, Homo sapiens
  CDR3 for alpha chain variable domain of TCR clone 7815 (TRAV12-1, TRAJ4)
CVVNMGPVGGYNKLIF

SEQ ID NO: 15630 - protein, 17 aa, Homo sapiens
  CDR3 for beta chain variable domain of TCR clone 7815 (TRBV4-3, TRBJ2-1)
CASSQFSSGRASGEQFF

SEQ ID NO: 15631 - protein, 14 aa, Homo sapiens
  CDR3 for alpha chain variable domain of TCR clone 7816 (TRAV3, TRAJ20)
CAVRDSFNDYKLSF

SEQ ID NO: 15632 - protein, 14 aa, Homo sapiens
  CDR3 for beta chain variable domain of TCR clone 7816 (TRBV19, TRBJ2-1)
CASPTFVLSGEQFF

SEQ ID NO: 15633 - protein, 16 aa, Homo sapiens
  CDR3 for alpha chain variable domain of TCR clone 7817 (TRAV30, TRAJ24)
CGTEIVDADSWGKFQF

SEQ ID NO: 15634 - protein, 14 aa, Homo sapiens
  CDR3 for beta chain variable domain of TCR clone 7817 (TRBV12-5, TRBJ2-5)
CASGSRKHQETQYF

SEQ ID NO: 15635 - protein, 14 aa, Homo sapiens
  CDR3 for alpha chain variable domain of TCR clone 7818 (TRAV25, TRAJ35)
CARRMEGFGNVLHC

SEQ ID NO: 15636 - protein, 15 aa, Homo sapiens
  CDR3 for beta chain variable domain of TCR clone 7818 (TRBV9, TRBJ2-1)
CASSLAGSSYNEQFF

SEQ ID NO: 15637 - protein, 18 aa, Homo sapiens
  CDR3 for alpha chain variable domain of TCR clone 7819 (TRAV21, TRAJ52)
CAVRPSPAGGTSYGKLTF

SEQ ID NO: 15638 - protein, 17 aa, Homo sapiens
  CDR3 for beta chain variable domain of TCR clone 7819 (TRBV14, TRBJ2-3)
CASSQEPSGLSTDTQYF

SEQ ID NO: 15639 - protein, 13 aa, Homo sapiens
  CDR3 for alpha chain variable domain of TCR clone 7820 (TRAV2, TRAJ15)
CAVASQAGTALIF

SEQ ID NO: 15640 - protein, 15 aa, Homo sapiens
  CDR3 for beta chain variable domain of TCR clone 7820 (TRBV5-1, TRBJ2-2)
CASSLRQGDTGELFF

SEQ ID NO: 15641 - protein, 13 aa, Homo sapiens
  CDR3 for alpha chain variable domain of TCR clone 7821 (TRAV21, TRAJ13)
CAVNSGGYQKVTF

SEQ ID NO: 15642 - protein, 17 aa, Homo sapiens
  CDR3 for beta chain variable domain of TCR clone 7821 (TRBV9, TRBJ2-5)
CASSVAGQGPSIETQYF

SEQ ID NO: 15643 - protein, 16 aa, Homo sapiens
  CDR3 for alpha chain variable domain of TCR clone 7822 (TRAV41, TRAJ53)
CAVRFGSGGSNYKLTF

SEQ ID NO: 15644 - protein, 17 aa, Homo sapiens
  CDR3 for beta chain variable domain of TCR clone 7822 (TRBV20-1, TRBJ2-7)
CSARDPEGDHREYEQYF

SEQ ID NO: 15645 - protein, 14 aa, Homo sapiens
  CDR3 for alpha chain variable domain of TCR clone 7823 (TRAV12-2, TRAJ53)
CAVKGGGSNYKLTF

SEQ ID NO: 15646 - protein, 12 aa, Homo sapiens
  CDR3 for beta chain variable domain of TCR clone 7823 (TRBV28, TRBJ2-3)
CASSLYRDTQYF

SEQ ID NO: 15647 - protein, 12 aa, Homo sapiens
  CDR3 for alpha chain variable domain of TCR clone 7824 (TRAV5, TRAJ37)
CAETPHTGKLIF

SEQ ID NO: 15648 - protein, 17 aa, Homo sapiens
  CDR3 for beta chain variable domain of TCR clone 7824 (TRBV29-1, TRBJ2-3)
CSVNAFRASGGVDTQYF

SEQ ID NO: 15649 - protein, 12 aa, Homo sapiens
  CDR3 for alpha chain variable domain of TCR clone 7825 (TRAV12-3, TRAJ17)
CAMTLTGNKLTF

SEQ ID NO: 15650 - protein, 15 aa, Homo sapiens
  CDR3 for beta chain variable domain of TCR clone 7825 (TRBV20-1, TRBJ2-7)
CSARDRVSGMDEKYF

SEQ ID NO: 15651 - protein, 13 aa, Homo sapiens
  CDR3 for alpha chain variable domain of TCR clone 7826 (TRAV27, TRAJ45)
CRSSGGGADGLTF

SEQ ID NO: 15652 - protein, 17 aa, Homo sapiens
  CDR3 for beta chain variable domain of TCR clone 7826 (TRBV11-2, TRBJ2-1)
CASSLCPPGVEYNEQFF

SEQ ID NO: 15653 - protein, 15 aa, Homo sapiens
  CDR3 for alpha chain variable domain of TCR clone 7827 (TRAV21, TRAJ53)
CATLNSGGSNYKLTF

SEQ ID NO: 15654 - protein, 16 aa, Homo sapiens
  CDR3 for beta chain variable domain of TCR clone 7827 (TRBV11-2, TRBJ2-7)
CASSLAPTGVNYEQYF

SEQ ID NO: 15655 - protein, 13 aa, Homo sapiens
  CDR3 for alpha chain variable domain of TCR clone 7828 (TRAV24, TRAJ42)
CAFSTGSQGNLIF

SEQ ID NO: 15656 - protein, 19 aa, Homo sapiens
  CDR3 for beta chain variable domain of TCR clone 7828 (TRBV5-1, TRBJ2-3)
CASSLWLAGGITTTDTQYF

SEQ ID NO: 15657 - protein, 16 aa, Homo sapiens
  CDR3 for alpha chain variable domain of TCR clone 7829 (TRAV41, TRAJ34)
CAFQGIGSYNTDKLIF

SEQ ID NO: 15658 - protein, 13 aa, Homo sapiens
  CDR3 for beta chain variable domain of TCR clone 7829 (TRBV4-2, TRBJ2-1)
CASSPGTYNEQFF

SEQ ID NO: 15659 - protein, 13 aa, Homo sapiens
  CDR3 for alpha chain variable domain of TCR clone 7830 (TRAV9-2, TRAJ53)
CALSGGSNYKLTF

SEQ ID NO: 15660 - protein, 15 aa, Homo sapiens
  CDR3 for beta chain variable domain of TCR clone 7830 (TRBV9, TRBJ1-6)
CASSVAGTGDSPLHF

SEQ ID NO: 15661 - protein, 14 aa, Homo sapiens
  CDR3 for alpha chain variable domain of TCR clone 7831 (TRAV13-1, TRAJ44)
CAAKATGTASKLTF

SEQ ID NO: 15662 - protein, 17 aa, Homo sapiens
  CDR3 for beta chain variable domain of TCR clone 7831 (TRBV11-2, TRBJ2-1)
CASSLYPPGVEYNEQFF

SEQ ID NO: 15663 - protein, 12 aa, Homo sapiens
  CDR3 for alpha chain variable domain of TCR clone 7832 (TRAV17, TRAJ57)
CATDARSEKLVF

SEQ ID NO: 15664 - protein, 18 aa, Homo sapiens
  CDR3 for beta chain variable domain of TCR clone 7832 (TRBV3-1, TRBJ1-1)
CASRPKGNHGQCDAEAFF

SEQ ID NO: 15665 - protein, 13 aa, Homo sapiens
  CDR3 for alpha chain variable domain of TCR clone 7833 (TRAV13-1, TRAJ6)
CAASRGGSYIPTF

SEQ ID NO: 15666 - protein, 14 aa, Homo sapiens
  CDR3 for beta chain variable domain of TCR clone 7833 (TRBV7-2, TRBJ2-5)
CASSFGGAQETQYF

SEQ ID NO: 15667 - protein, 12 aa, Homo sapiens
  CDR3 for alpha chain variable domain of TCR clone 7834 (TRAV6, TRAJ41)
CSSPLGRYALNF

SEQ ID NO: 15668 - protein, 12 aa, Homo sapiens
  CDR3 for beta chain variable domain of TCR clone 7834 (TRBV29-1, TRBJ2-2)
CSVDKYTGELFF

SEQ ID NO: 15669 - protein, 15 aa, Homo sapiens
  CDR3 for alpha chain variable domain of TCR clone 7835 (TRAV3, TRAJ5)
CAVRDLDTGRRALTF

SEQ ID NO: 15670 - protein, 13 aa, Homo sapiens
  CDR3 for beta chain variable domain of TCR clone 7835 (TRBV12-4, TRBJ2-7)
CASSPTETYEQYL

SEQ ID NO: 15671 - protein, 15 aa, Homo sapiens
  CDR3 for alpha chain variable domain of TCR clone 7836 (TRAV13-1, TRAJ45)
CAAPYSGGGADGLTF

SEQ ID NO: 15672 - protein, 13 aa, Homo sapiens
  CDR3 for beta chain variable domain of TCR clone 7836 (TRBV28, TRBJ2-7)
CASSFGQVYEQYF

SEQ ID NO: 15673 - protein, 13 aa, Homo sapiens
  CDR3 for alpha chain variable domain of TCR clone 7837 (TRAV1-2, TRAJ17)
CAVGKAAGNKLTF

SEQ ID NO: 15674 - protein, 15 aa, Homo sapiens
  CDR3 for beta chain variable domain of TCR clone 7837 (TRBV7-9, TRBJ2-1)
CASSGTGGDYNEQFF

SEQ ID NO: 15675 - protein, 10 aa, Homo sapiens
  CDR3 for alpha chain variable domain of TCR clone 7838 (TRAV23/DV6, TRAJ57)
CAASSTLPQG

SEQ ID NO: 15676 - protein, 14 aa, Homo sapiens
  CDR3 for beta chain variable domain of TCR clone 7838 (TRBV25-1, TRBJ1-1)
CASTHLGGNTEAFF

SEQ ID NO: 15677 - protein, 17 aa, Homo sapiens
  CDR3 for alpha chain variable domain of TCR clone 7839 (TRAV3, TRAJ6)
CAVRDGPRAGGSCIPTF

SEQ ID NO: 15678 - protein, 14 aa, Homo sapiens
  CDR3 for beta chain variable domain of TCR clone 7839 (TRBV7-2, TRBJ2-7)
CASSPKTSFYEQYF

SEQ ID NO: 15679 - protein, 14 aa, Homo sapiens
  CDR3 for alpha chain variable domain of TCR clone 7840 (TRAV13-1, TRAJ35)
CAASRGGFGNVLHC

SEQ ID NO: 15680 - protein, 13 aa, Homo sapiens
  CDR3 for beta chain variable domain of TCR clone 7840 (TRBV7-3, TRBJ1-1)
CASSQDWGAEAFF

SEQ ID NO: 15681 - protein, 14 aa, Homo sapiens
  CDR3 for alpha chain variable domain of TCR clone 7841 (TRAV13-1, TRAJ44)
CAAKATGTASKLAF

SEQ ID NO: 15682 - protein, 17 aa, Homo sapiens
  CDR3 for beta chain variable domain of TCR clone 7841 (TRBV7-3, TRBJ2-3)
RASSLMKRMRGADTQYF

SEQ ID NO: 15683 - protein, 16 aa, Homo sapiens
  CDR3 for alpha chain variable domain of TCR clone 7842 (TRAV30, TRAJ24)
CGTEIVDADSWGKFQF

SEQ ID NO: 15684 - protein, 14 aa, Homo sapiens
  CDR3 for beta chain variable domain of TCR clone 7842 (TRBV5-1, TRBJ1-2)
CASSLEPVNYGYTF

SEQ ID NO: 15685 - protein, 14 aa, Homo sapiens
  CDR3 for alpha chain variable domain of TCR clone 7843 (TRAV17, TRAJ31)
CATDAEDNNARLMF

SEQ ID NO: 15686 - protein, 13 aa, Homo sapiens
  CDR3 for beta chain variable domain of TCR clone 7843 (TRBV20-1, TRBJ2-3)
CSARLAGTDTQYF

SEQ ID NO: 15687 - protein, 16 aa, Homo sapiens
  CDR3 for alpha chain variable domain of TCR clone 7844 (TRAV30, TRAJ24)
CGTEIVDADSWRKFQF

SEQ ID NO: 15688 - protein, 14 aa, Homo sapiens
  CDR3 for beta chain variable domain of TCR clone 7844 (TRBV12-5, TRBJ2-5)
CASGSRTHQETQYF

SEQ ID NO: 15689 - protein, 15 aa, Homo sapiens
  CDR3 for alpha chain variable domain of TCR clone 7845 (TRAV12-3, TRAJ6)
CAMSATTGGSYIPTF

SEQ ID NO: 15690 - protein, 15 aa, Homo sapiens
  CDR3 for beta chain variable domain of TCR clone 7845 (TRBV12-4, TRBJ2-5)
CASSPPTGLQETQYF

SEQ ID NO: 15691 - protein, 14 aa, Homo sapiens
  CDR3 for alpha chain variable domain of TCR clone 7846 (TRAV1-2, TRAJ8)
CAVREDTGFQKLVF

SEQ ID NO: 15692 - protein, 14 aa, Homo sapiens
  CDR3 for beta chain variable domain of TCR clone 7846 (TRBV7-2, TRBJ1-1)
CASSFLTGTTEAFF

SEQ ID NO: 15693 - protein, 13 aa, Homo sapiens
  CDR3 for alpha chain variable domain of TCR clone 7847 (TRAV6, TRAJ3)
CSTGYSSASKIIF

SEQ ID NO: 15694 - protein, 13 aa, Homo sapiens
  CDR3 for beta chain variable domain of TCR clone 7847 (TRBV14, TRBJ1-2)
CASSQQGYYGYTF

SEQ ID NO: 15695 - protein, 17 aa, Homo sapiens
  CDR3 for alpha chain variable domain of TCR clone 7848 (TRAV3, TRAJ6)
CAVRDGPRAGGSYIPTF

SEQ ID NO: 15696 - protein, 14 aa, Homo sapiens
  CDR3 for beta chain variable domain of TCR clone 7848 (TRBV7-2, TRBJ2-7)
CASSPKTSCYEQYF

SEQ ID NO: 15697 - protein, 13 aa, Homo sapiens
  CDR3 for alpha chain variable domain of TCR clone 7849 (TRAV12-1, TRAJ30)
CVVNTYRDDKIIF

SEQ ID NO: 15698 - protein, 13 aa, Homo sapiens
  CDR3 for beta chain variable domain of TCR clone 7849 (TRBV9, TRBJ1-2)
CASSRLGGGGYTF

SEQ ID NO: 15699 - protein, 14 aa, Homo sapiens
  CDR3 for alpha chain variable domain of TCR clone 7850 (TRAV39, TRAJ54)
CAVVLIQGAQKLVF

SEQ ID NO: 15700 - protein, 13 aa, Homo sapiens
  CDR3 for beta chain variable domain of TCR clone 7850 (TRBV12-5, TRBJ2-3)
CASGDRQSDTQYF

SEQ ID NO: 15701 - protein, 16 aa, Homo sapiens
  CDR3 for alpha chain variable domain of TCR clone 7851 (TRAV30, TRAJ24)
CSTEIVDADSWGKFQF

SEQ ID NO: 15702 - protein, 14 aa, Homo sapiens
  CDR3 for beta chain variable domain of TCR clone 7851 (TRBV12-5, TRBJ2-5)
CASGSRTHQETQYF

SEQ ID NO: 15703 - protein, 12 aa, Homo sapiens
  CDR3 for alpha chain variable domain of TCR clone 7852 (TRAV23/DV6, TRAJ17)
CAAKAAGNKLTF

SEQ ID NO: 15704 - protein, 17 aa, Homo sapiens
  CDR3 for beta chain variable domain of TCR clone 7852 (TRBV5-5, TRBJ1-1)
CASSLRFRGLMNTEAFF

SEQ ID NO: 15705 - protein, 14 aa, Homo sapiens
  CDR3 for alpha chain variable domain of TCR clone 7853 (TRAV1-2, TRAJ8)
CAVREDTGFQKLVF

SEQ ID NO: 15706 - protein, 12 aa, Homo sapiens
  CDR3 for beta chain variable domain of TCR clone 7853 (TRBV7-9, TRBJ2-7)
CASSFGSYEQYF

SEQ ID NO: 15707 - protein, 11 aa, Homo sapiens
  CDR3 for alpha chain variable domain of TCR clone 7854 (TRAV26-1, TRAJ47)
CIFFHGIWKQT

SEQ ID NO: 15708 - protein, 13 aa, Homo sapiens
  CDR3 for beta chain variable domain of TCR clone 7854 (TRBV24-1, TRBJ2-7)
CATSDLGPYEQYF

SEQ ID NO: 15709 - protein, 16 aa, Homo sapiens
  CDR3 for alpha chain variable domain of TCR clone 7855 (TRAV12-2, TRAJ45)
CAVNRGSGGGADGLTF

SEQ ID NO: 15710 - protein, 14 aa, Homo sapiens
  CDR3 for beta chain variable domain of TCR clone 7855 (TRBV23-1, TRBJ2-2)
EDRGVEKDTGELFF

SEQ ID NO: 15711 - protein, 15 aa, Homo sapiens
  CDR3 for alpha chain variable domain of TCR clone 7856 (TRAV8-3, TRAJ11)
CAVGLLNSGYSTLTF

SEQ ID NO: 15712 - protein, 16 aa, Homo sapiens
  CDR3 for beta chain variable domain of TCR clone 7856 (TRBV7-9, TRBJ1-2)
CASSLGFSAGEDGYTF

SEQ ID NO: 15713 - protein, 14 aa, Homo sapiens
  CDR3 for alpha chain variable domain of TCR clone 7857 (TRAV9-2, TRAJ39)
CALYIYNAGNMLTF

SEQ ID NO: 15714 - protein, 15 aa, Homo sapiens
  CDR3 for beta chain variable domain of TCR clone 7857 (TRBV7-3, TRBJ2-2)
CASSLEVLPTGELFF

SEQ ID NO: 15715 - protein, 14 aa, Homo sapiens
  CDR3 for alpha chain variable domain of TCR clone 7858 (TRAV12-2, TRAJ15)
CAPHTGQAGTALIF

SEQ ID NO: 15716 - protein, 14 aa, Homo sapiens
  CDR3 for beta chain variable domain of TCR clone 7858 (TRBV7-8, TRBJ2-7)
CASSPRDRVYEQYF

SEQ ID NO: 15717 - protein, 13 aa, Homo sapiens
  CDR3 for alpha chain variable domain of TCR clone 7859 (TRAV16, TRAJ58)
CALRWASGSRLTF

SEQ ID NO: 15718 - protein, 16 aa, Homo sapiens
  CDR3 for beta chain variable domain of TCR clone 7859 (TRBV18, TRBJ2-2)
CASSPPRTANTGELFF

SEQ ID NO: 15719 - protein, 13 aa, Homo sapiens
  CDR3 for alpha chain variable domain of TCR clone 7860 (TRAV17, TRAJ9)
CATDYTGGFKTIF

SEQ ID NO: 15720 - protein, 14 aa, Homo sapiens
  CDR3 for beta chain variable domain of TCR clone 7860 (TRBV19, TRBJ2-5)
CASSMTGRQETQYF

SEQ ID NO: 15721 - protein, 11 aa, Homo sapiens
  CDR3 for alpha chain variable domain of TCR clone 7861 (TRAV3, TRAJ21)
CAVGNFNKFYF

SEQ ID NO: 15722 - protein, 17 aa, Homo sapiens
  CDR3 for beta chain variable domain of TCR clone 7861 (TRBV13, TRBJ2-3)
CASSLSRVAGGRNTQYF

SEQ ID NO: 15723 - protein, 11 aa, Homo sapiens
  CDR3 for alpha chain variable domain of TCR clone 7862 (TRAV26-2, TRAJ8)
CILTGFQKLVF

SEQ ID NO: 15724 - protein, 12 aa, Homo sapiens
  CDR3 for beta chain variable domain of TCR clone 7862 (TRBV12-4, TRBJ2-7)
CASSLGGYEQYF

SEQ ID NO: 15725 - protein, 15 aa, Homo sapiens
  CDR3 for alpha chain variable domain of TCR clone 7863 (TRAV2, TRAJ11)
CAVGGRNSGYSTLTF

SEQ ID NO: 15726 - protein, 14 aa, Homo sapiens
  CDR3 for beta chain variable domain of TCR clone 7863 (TRBV6-1, TRBJ1-3)
CASVQGGGGNTIYF

SEQ ID NO: 15727 - protein, 16 aa, Homo sapiens
  CDR3 for alpha chain variable domain of TCR clone 7864 (TRAV12-2, TRAJ32)
CAVNLGQGGATNKLIF

SEQ ID NO: 15728 - protein, 15 aa, Homo sapiens
  CDR3 for beta chain variable domain of TCR clone 7864 (TRBV27, TRBJ2-1)
CASSNGGGSSNEQFF

SEQ ID NO: 15729 - protein, 10 aa, Homo sapiens
  CDR3 for alpha chain variable domain of TCR clone 7865 (TRAV12-2, TRAJ20)
CAVYLYKLSF

SEQ ID NO: 15730 - protein, 16 aa, Homo sapiens
  CDR3 for beta chain variable domain of TCR clone 7865 (TRBV4-3, TRBJ1-6)
CASSAQPGGEGSPLHF

SEQ ID NO: 15731 - protein, 12 aa, Homo sapiens
  CDR3 for alpha chain variable domain of TCR clone 7866 (TRAV1-1, TRAJ43)
CAPRVSSNGMRF

SEQ ID NO: 15732 - protein, 15 aa, Homo sapiens
  CDR3 for beta chain variable domain of TCR clone 7866 (TRBV5-1, TRBJ2-7)
CASSLGDFTTYEQYF

SEQ ID NO: 15733 - protein, 17 aa, Homo sapiens
  CDR3 for alpha chain variable domain of TCR clone 7867 (TRAV3, TRAJ6)
CAVRDGPRAGGSYIPTF

SEQ ID NO: 15734 - protein, 14 aa, Homo sapiens
  CDR3 for beta chain variable domain of TCR clone 7867 (TRBV20-1, TRBJ2-2)
CSAPDTANTGELFF

SEQ ID NO: 15735 - protein, 13 aa, Homo sapiens
  CDR3 for alpha chain variable domain of TCR clone 7868 (TRAV3, TRAJ4)
CAVRDGGYNKLIF

SEQ ID NO: 15736 - protein, 12 aa, Homo sapiens
  CDR3 for beta chain variable domain of TCR clone 7868 (TRBV11-2, TRBJ2-2)
CASSLGGGELFF

SEQ ID NO: 15737 - protein, 14 aa, Homo sapiens
  CDR3 for alpha chain variable domain of TCR clone 7869 (TRAV27, TRAJ13)
CRSSNSGGYQKVTF

SEQ ID NO: 15738 - protein, 16 aa, Homo sapiens
  CDR3 for beta chain variable domain of TCR clone 7869 (TRBV7-6, TRBJ2-1)
CIAVPAAWGGADEQFF

SEQ ID NO: 15739 - protein, 15 aa, Homo sapiens
  CDR3 for alpha chain variable domain of TCR clone 7870 (TRAV13-1, TRAJ39)
CAASPLNNAGNMLTF

SEQ ID NO: 15740 - protein, 15 aa, Homo sapiens
  CDR3 for beta chain variable domain of TCR clone 7870 (TRBV7-6, TRBJ2-1)
CASSSLAGEGNEQFF

SEQ ID NO: 15741 - protein, 13 aa, Homo sapiens
  CDR3 for alpha chain variable domain of TCR clone 7871 (TRAV17, TRAJ40)
CATRSPGTYKYIF

SEQ ID NO: 15742 - protein, 13 aa, Homo sapiens
  CDR3 for beta chain variable domain of TCR clone 7871 (TRBV2, TRBJ1-5)
CATAGPGNQPQHF

SEQ ID NO: 15743 - protein, 14 aa, Homo sapiens
  CDR3 for alpha chain variable domain of TCR clone 7872 (TRAV13-1, TRAJ35)
CAASKGGFGNVLHC

SEQ ID NO: 15744 - protein, 13 aa, Homo sapiens
  CDR3 for beta chain variable domain of TCR clone 7872 (TRBV7-3, TRBJ1-1)
CASSQDWGAEAFS

SEQ ID NO: 15745 - protein, 17 aa, Homo sapiens
  CDR3 for alpha chain variable domain of TCR clone 7873 (TRAV8-6, TRAJ58)
CAVSSWVGETSGSRLTF

SEQ ID NO: 15746 - protein, 12 aa, Homo sapiens
  CDR3 for beta chain variable domain of TCR clone 7873 (TRBV28, TRBJ2-3)
CASSLYRDTQYF

SEQ ID NO: 15747 - protein, 23 aa, Homo sapiens
  CDR3 for alpha chain variable domain of TCR clone 7874 (TRAV8-4, TRAJ38)
CARLNAGNNHIQNPDPAVYQLRD

SEQ ID NO: 15748 - protein, 12 aa, Homo sapiens
  CDR3 for beta chain variable domain of TCR clone 7874 (TRBV6-1, TRBJ2-7)
CASSEPLYEQYF

SEQ ID NO: 15749 - protein, 10 aa, Homo sapiens
  CDR3 for alpha chain variable domain of TCR clone 7875 (TRAV12-3, TRAJ49)
CAMNDDQFYF

SEQ ID NO: 15750 - protein, 13 aa, Homo sapiens
  CDR3 for beta chain variable domain of TCR clone 7875 (TRBV12-4, TRBJ1-1)
CASSPGTGCEAFF

SEQ ID NO: 15751 - protein, 11 aa, Homo sapiens
  CDR3 for alpha chain variable domain of TCR clone 7876 (TRAV21, TRAJ21)
CAADNFNKFYF

SEQ ID NO: 15752 - protein, 13 aa, Homo sapiens
  CDR3 for beta chain variable domain of TCR clone 7876 (TRBV11-3, TRBJ1-1)
CASSRQPNTEAFF

SEQ ID NO: 15753 - protein, 13 aa, Homo sapiens
  CDR3 for alpha chain variable domain of TCR clone 7877 (TRAV12-3, TRAJ39)
CAMIDNAGNMLTF

SEQ ID NO: 15754 - protein, 18 aa, Homo sapiens
  CDR3 for beta chain variable domain of TCR clone 7877 (TRBV9, TRBJ2-5)
CASSVAEGTNAFGETQYF

SEQ ID NO: 15755 - protein, 15 aa, Homo sapiens
  CDR3 for alpha chain variable domain of TCR clone 7878 (TRAV3, TRAJ24)
CAGGMTTDSWGKFQF

SEQ ID NO: 15756 - protein, 14 aa, Homo sapiens
  CDR3 for beta chain variable domain of TCR clone 7878 (TRBV4-1, TRBJ2-2)
CASRRGRASGELFF

SEQ ID NO: 15757 - protein, 13 aa, Homo sapiens
  CDR3 for alpha chain variable domain of TCR clone 7879 (TRAV21, TRAJ20)
CAVGLRVDYKPSF

SEQ ID NO: 15758 - protein, 13 aa, Homo sapiens
  CDR3 for beta chain variable domain of TCR clone 7879 (TRBV6-1, TRBJ1-1)
CASSRQGNTEAFF

SEQ ID NO: 15759 - protein, 13 aa, Homo sapiens
  CDR3 for alpha chain variable domain of TCR clone 7880 (TRAV8-3, TRAJ34)
CAVGAYNTDKLIF

SEQ ID NO: 15760 - protein, 11 aa, Homo sapiens
  CDR3 for beta chain variable domain of TCR clone 7880 (TRBV7-3, TRBJ1-2)
CASSLGDGYTF

SEQ ID NO: 15761 - protein, 18 aa, Homo sapiens
  CDR3 for alpha chain variable domain of TCR clone 7881 (TRAV21, TRAJ52)
CAVRPSPAGGTSYGKLTF

SEQ ID NO: 15762 - protein, 17 aa, Homo sapiens
  CDR3 for beta chain variable domain of TCR clone 7881 (TRBV13, TRBJ2-3)
CASSLSRVAGGRNTQYS

SEQ ID NO: 15763 - protein, 14 aa, Homo sapiens
  CDR3 for alpha chain variable domain of TCR clone 7882 (TRAV1-2, TRAJ16)
CAVNRFSDGQKLLF

SEQ ID NO: 15764 - protein, 15 aa, Homo sapiens
  CDR3 for beta chain variable domain of TCR clone 7882 (TRBV11-2, TRBJ2-1)
CASSLGTSGLNEQFF

SEQ ID NO: 15765 - protein, 14 aa, Homo sapiens
  CDR3 for alpha chain variable domain of TCR clone 7883 (TRAV14/DV4, TRAJ49)
CAFNRYLTGNQFYF

SEQ ID NO: 15766 - protein, 15 aa, Homo sapiens
  CDR3 for beta chain variable domain of TCR clone 7883 (TRBV5-1, TRBJ1-1)
CASSSTTGTNTEAFF

SEQ ID NO: 15767 - protein, 15 aa, Homo sapiens
  CDR3 for alpha chain variable domain of TCR clone 7884 (TRAV26-1, TRAJ22)
CIVRVSFWFCKATDL

SEQ ID NO: 15768 - protein, 15 aa, Homo sapiens
  CDR3 for beta chain variable domain of TCR clone 7884 (TRBV20-1, TRBJ2-7)
CSARDRVSGMDEQYF

SEQ ID NO: 15769 - protein, 12 aa, Homo sapiens
  CDR3 for alpha chain variable domain of TCR clone 7885 (TRAV2, TRAJ43)
CAVEVDNNDMRF

SEQ ID NO: 15770 - protein, 13 aa, Homo sapiens
  CDR3 for beta chain variable domain of TCR clone 7885 (TRBV12-4, TRBJ2-1)
CASRRGATYGQFF

SEQ ID NO: 15771 - protein, 13 aa, Homo sapiens
  CDR3 for alpha chain variable domain of TCR clone 7886 (TRAV12-2, TRAJ15)
CAVFNQAGTALIF

SEQ ID NO: 15772 - protein, 15 aa, Homo sapiens
  CDR3 for beta chain variable domain of TCR clone 7886 (TRBV7-8, TRBJ1-5)
CASSRGGGAGQPQHF

SEQ ID NO: 15773 - protein, 13 aa, Homo sapiens
  CDR3 for alpha chain variable domain of TCR clone 7887 (TRAV8-4, TRAJ54)
CAVTGGGAQKLVF

SEQ ID NO: 15774 - protein, 16 aa, Homo sapiens
  CDR3 for beta chain variable domain of TCR clone 7887 (TRBV2, TRBJ2-6)
CASSEVGGAGANVLTF

SEQ ID NO: 15775 - protein, 14 aa, Homo sapiens
  CDR3 for alpha chain variable domain of TCR clone 7888 (TRAV12-2, TRAJ13)
CAVKKTGGYQKVTF

SEQ ID NO: 15776 - protein, 15 aa, Homo sapiens
  CDR3 for beta chain variable domain of TCR clone 7888 (TRBV27, TRBJ2-1)
CAGSNGGGSSNEQFF

SEQ ID NO: 15777 - protein, 11 aa, Homo sapiens
  CDR3 for alpha chain variable domain of TCR clone 7889 (TRAV13-1, TRAJ39)
CASHAGNMLTF

SEQ ID NO: 15778 - protein, 17 aa, Homo sapiens
  CDR3 for beta chain variable domain of TCR clone 7889 (TRBV4-1, TRBJ2-7)
CASSRDPLGVRGGEQYF

SEQ ID NO: 15779 - protein, 15 aa, Homo sapiens
  CDR3 for alpha chain variable domain of TCR clone 7890 (TRAV16, TRAJ53)
CALIDSGGSNYKLTF

SEQ ID NO: 15780 - protein, 15 aa, Homo sapiens
  CDR3 for beta chain variable domain of TCR clone 7890 (TRBV7-2, TRBJ1-2)
CASSPRAGWNYGYTF

SEQ ID NO: 15781 - protein, 15 aa, Homo sapiens
  CDR3 for alpha chain variable domain of TCR clone 7891 (TRAV12-2, TRAJ11)
CAVNLRNSGYSTLTF

SEQ ID NO: 15782 - protein, 18 aa, Homo sapiens
  CDR3 for beta chain variable domain of TCR clone 7891 (TRBV7-2, TRBJ2-2)
CASSLASRGAGGPGELFF

SEQ ID NO: 15783 - protein, 13 aa, Homo sapiens
  CDR3 for alpha chain variable domain of TCR clone 7892 (TRAV9-2, TRAJ53)
CALSGGSNYKLTF

SEQ ID NO: 15784 - protein, 16 aa, Homo sapiens
  CDR3 for beta chain variable domain of TCR clone 7892 (TRBV20-1, TRBJ2-1)
CSALTWTSGSYNEQFF

SEQ ID NO: 15785 - protein, 15 aa, Homo sapiens
  CDR3 for alpha chain variable domain of TCR clone 7893 (TRAV8-1, TRAJ6)
CAVNTPPGGSYIPTF

SEQ ID NO: 15786 - protein, 14 aa, Homo sapiens
  CDR3 for beta chain variable domain of TCR clone 7893 (TRBV12-5, TRBJ2-5)
CASGSRTHQETQYF

SEQ ID NO: 15787 - protein, 13 aa, Homo sapiens
  CDR3 for alpha chain variable domain of TCR clone 7894 (TRAV38-1, TRAJ42)
CARWGGSQGNLIF

SEQ ID NO: 15788 - protein, 17 aa, Homo sapiens
  CDR3 for beta chain variable domain of TCR clone 7894 (TRBV20-1, TRBJ2-1)
CSARDPLAGAWDNEQFF

SEQ ID NO: 15789 - protein, 13 aa, Homo sapiens
  CDR3 for alpha chain variable domain of TCR clone 7895 (TRAV9-2, TRAJ9)
CALSDRGGFKTIF

SEQ ID NO: 15790 - protein, 14 aa, Homo sapiens
  CDR3 for beta chain variable domain of TCR clone 7895 (TRBV20-1, TRBJ2-2)
CSAPDTANTGELFF

SEQ ID NO: 15791 - protein, 11 aa, Homo sapiens
  CDR3 for alpha chain variable domain of TCR clone 7896 (TRAV2, TRAJ13)
CASGGYQKVTF

SEQ ID NO: 15792 - protein, 14 aa, Homo sapiens
  CDR3 for beta chain variable domain of TCR clone 7896 (TRBV7-2, TRBJ2-7)
CASRSQGAAYEQYF

SEQ ID NO: 15793 - protein, 14 aa, Homo sapiens
  CDR3 for alpha chain variable domain of TCR clone 7897 (TRAV12-2, TRAJ44)
CAVNPAGTASKLTF

SEQ ID NO: 15794 - protein, 15 aa, Homo sapiens
  CDR3 for beta chain variable domain of TCR clone 7897 (TRBV19, TRBJ2-7)
CASSPAGSGEALRYF

SEQ ID NO: 15795 - protein, 13 aa, Homo sapiens
  CDR3 for alpha chain variable domain of TCR clone 7898 (TRAV13-2, TRAJ48)
CAEMDFGNEKLTF

SEQ ID NO: 15796 - protein, 15 aa, Homo sapiens
  CDR3 for beta chain variable domain of TCR clone 7898 (TRBV7-9, TRBJ1-6)
CASSSPGRGNSTLHF

SEQ ID NO: 15797 - protein, 14 aa, Homo sapiens
  CDR3 for alpha chain variable domain of TCR clone 7899 (TRAV1-2, TRAJ8)
CAVREDTGFRKLVF

SEQ ID NO: 15798 - protein, 15 aa, Homo sapiens
  CDR3 for beta chain variable domain of TCR clone 7899 (TRBV6-3, TRBJ2-7)
CASSSPGTVFYEQYF

SEQ ID NO: 15799 - protein, 18 aa, Homo sapiens
  CDR3 for alpha chain variable domain of TCR clone 7900 (TRAV13-1, TRAJ52)
CAAKNPNAGGTSYGKLTF

SEQ ID NO: 15800 - protein, 15 aa, Homo sapiens
  CDR3 for beta chain variable domain of TCR clone 7900 (TRBV5-1, TRBJ2-1)
CASSPPRAPYNEQFF

SEQ ID NO: 15801 - protein, 14 aa, Homo sapiens
  CDR3 for alpha chain variable domain of TCR clone 7901 (TRAV38-1, TRAJ11)
CAFMKHEGYSTLTF

SEQ ID NO: 15802 - protein, 12 aa, Homo sapiens
  CDR3 for beta chain variable domain of TCR clone 7901 (TRBV10-3, TRBJ2-3)
CAISESPQARVF

SEQ ID NO: 15803 - protein, 14 aa, Homo sapiens
  CDR3 for alpha chain variable domain of TCR clone 7902 (TRAV1-2, TRAJ8)
CAVREDTGFQKLVF

SEQ ID NO: 15804 - protein, 11 aa, Homo sapiens
  CDR3 for beta chain variable domain of TCR clone 7902 (TRBV27, TRBJ2-3)
CASSLGDTQYF

SEQ ID NO: 15805 - protein, 14 aa, Homo sapiens
  CDR3 for alpha chain variable domain of TCR clone 7903 (TRAV1-2, TRAJ16)
CAVNRFSDGQKLLF

SEQ ID NO: 15806 - protein, 19 aa, Homo sapiens
  CDR3 for beta chain variable domain of TCR clone 7903 (TRBV7-2, TRBJ2-3)
CASSFLSRNWGGGTDTQYF

SEQ ID NO: 15807 - protein, 12 aa, Homo sapiens
  CDR3 for alpha chain variable domain of TCR clone 7904 (TRAV1-2, TRAJ29)
CAVPSGNTPLVF

SEQ ID NO: 15808 - protein, 13 aa, Homo sapiens
  CDR3 for beta chain variable domain of TCR clone 7904 (TRBV12-4, TRBJ2-7)
CASSPTETYEQYF

SEQ ID NO: 15809 - protein, 13 aa, Homo sapiens
  CDR3 for alpha chain variable domain of TCR clone 7905 (TRAV3, TRAJ21)
CAVREPDFNKFYF

SEQ ID NO: 15810 - protein, 14 aa, Homo sapiens
  CDR3 for beta chain variable domain of TCR clone 7905 (TRBV6-1, TRBJ1-3)
CASVQGGGGNTIYF

SEQ ID NO: 15811 - protein, 10 aa, Homo sapiens
  CDR3 for alpha chain variable domain of TCR clone 7906 (TRAV1-2, TRAJ18)
CAVRGEAQPW

SEQ ID NO: 15812 - protein, 15 aa, Homo sapiens
  CDR3 for beta chain variable domain of TCR clone 7906 (TRBV20-1, TRBJ2-1)
CSAEGGLLAGDEQFF

SEQ ID NO: 15813 - protein, 14 aa, Homo sapiens
  CDR3 for alpha chain variable domain of TCR clone 7907 (TRAV1-2, TRAJ16)
CAVNRFSDGQKLLF

SEQ ID NO: 15814 - protein, 12 aa, Homo sapiens
  CDR3 for beta chain variable domain of TCR clone 7907 (TRBV28, TRBJ2-6)
CAIQAGTNVLTF

SEQ ID NO: 15815 - protein, 14 aa, Homo sapiens
  CDR3 for alpha chain variable domain of TCR clone 7908 (TRAV20, TRAJ13)
CAVLNSGGYQKVTF

SEQ ID NO: 15816 - protein, 14 aa, Homo sapiens
  CDR3 for beta chain variable domain of TCR clone 7908 (TRBV7-2, TRBJ1-1)
CASSFLTGTTEAFF

SEQ ID NO: 15817 - protein, 18 aa, Homo sapiens
  CDR3 for alpha chain variable domain of TCR clone 7909 (TRAV21, TRAJ52)
CAVRPSPAGGTSYGKLTF

SEQ ID NO: 15818 - protein, 17 aa, Homo sapiens
  CDR3 for beta chain variable domain of TCR clone 7909 (TRBV13, TRBJ2-3)
CASGLSRVAGGRNTQYF

SEQ ID NO: 15819 - protein, 18 aa, Homo sapiens
  CDR3 for alpha chain variable domain of TCR clone 7910 (TRAV36/DV7, )
CALTDIQNPDPAVYQLRD

SEQ ID NO: 15820 - protein, 13 aa, Homo sapiens
  CDR3 for beta chain variable domain of TCR clone 7910 (TRBV4-1, TRBJ2-7)
CASSQGQAYEQYF

SEQ ID NO: 15821 - protein, 16 aa, Homo sapiens
  CDR3 for alpha chain variable domain of TCR clone 7911 (TRAV30, TRAJ24)
CGTEIVDADSWGKFQF

SEQ ID NO: 15822 - protein, 14 aa, Homo sapiens
  CDR3 for beta chain variable domain of TCR clone 7911 (TRBV12-5, TRBJ2-5)
CASGSRTHQDTQYF

SEQ ID NO: 15823 - protein, 18 aa, Homo sapiens
  CDR3 for alpha chain variable domain of TCR clone 7912 (TRAV21, TRAJ52)
CAVRPSPAGGTSYGKLTF

SEQ ID NO: 15824 - protein, 14 aa, Homo sapiens
  CDR3 for beta chain variable domain of TCR clone 7912 (TRBV12-5, TRBJ2-5)
CASGSRTHQETQYF

SEQ ID NO: 15825 - protein, 14 aa, Homo sapiens
  CDR3 for alpha chain variable domain of TCR clone 7913 (TRAV26-1, TRAJ49)
CIVRPRNTGNQFYF

SEQ ID NO: 15826 - protein, 13 aa, Homo sapiens
  CDR3 for beta chain variable domain of TCR clone 7913 (TRBV12-4, TRBJ2-4)
CASSNLRGNIQYF

SEQ ID NO: 15827 - protein, 14 aa, Homo sapiens
  CDR3 for alpha chain variable domain of TCR clone 7914 (TRAV38-1, TRAJ45)
CASHSGGGADGLTF

SEQ ID NO: 15828 - protein, 13 aa, Homo sapiens
  CDR3 for beta chain variable domain of TCR clone 7914 (TRBV10-3, TRBJ1-2)
CAISERDSYGYAF

SEQ ID NO: 15829 - protein, 17 aa, Homo sapiens
  CDR3 for alpha chain variable domain of TCR clone 7915 (TRAV3, TRAJ6)
CAVRDGPRAGGSYIPTF

SEQ ID NO: 15830 - protein, 13 aa, Homo sapiens
  CDR3 for beta chain variable domain of TCR clone 7915 (TRBV20-1, TRBJ2-1)
CSASTGTSNEQFF

SEQ ID NO: 15831 - protein, 18 aa, Homo sapiens
  CDR3 for alpha chain variable domain of TCR clone 7916 (TRAV21, TRAJ52)
CAVRPSPAGGTSHGKLTF

SEQ ID NO: 15832 - protein, 17 aa, Homo sapiens
  CDR3 for beta chain variable domain of TCR clone 7916 (TRBV13, TRBJ2-3)
CASSLSRVAGGRNTQYF

SEQ ID NO: 15833 - protein, 12 aa, Homo sapiens
  CDR3 for alpha chain variable domain of TCR clone 7917 (TRAV27, TRAJ13)
CAGVRGYQKVTF

SEQ ID NO: 15834 - protein, 11 aa, Homo sapiens
  CDR3 for beta chain variable domain of TCR clone 7917 (TRBV6-1, TRBJ2-5)
CASTGVETQYF

SEQ ID NO: 15835 - protein, 13 aa, Homo sapiens
  CDR3 for alpha chain variable domain of TCR clone 7918 (TRAV2, TRAJ43)
TTVLKRGNNDMRF

SEQ ID NO: 15836 - protein, 16 aa, Homo sapiens
  CDR3 for beta chain variable domain of TCR clone 7918 (TRBV4-1, TRBJ2-7)
CASSQEWTSGPLEQYF

SEQ ID NO: 15837 - protein, 16 aa, Homo sapiens
  CDR3 for alpha chain variable domain of TCR clone 7919 (TRAV26-1, TRAJ48)
CIVREPPNFGNEKLTF

SEQ ID NO: 15838 - protein, 15 aa, Homo sapiens
  CDR3 for beta chain variable domain of TCR clone 7919 (TRBV7-2, TRBJ2-6)
CASSLQEAGANVLTF

SEQ ID NO: 15839 - protein, 15 aa, Homo sapiens
  CDR3 for alpha chain variable domain of TCR clone 7920 (TRAV12-3, TRAJ6)
CAMSATTGGSYIPTF

SEQ ID NO: 15840 - protein, 16 aa, Homo sapiens
  CDR3 for beta chain variable domain of TCR clone 7920 (TRBV20-1, TRBJ1-2)
CSASMGQGVANYGYAF

SEQ ID NO: 15841 - protein, 23 aa, Homo sapiens
  CDR3 for alpha chain variable domain of TCR clone 7921 (TRAV12-2, TRAJ43)
SLLIRDSQPSDSATYLCAFDMRF

SEQ ID NO: 15842 - protein, 18 aa, Homo sapiens
  CDR3 for beta chain variable domain of TCR clone 7921 (TRBV20-1, TRBJ2-3)
CSASGLAGGPGTTDTQYF

SEQ ID NO: 15843 - protein, 15 aa, Homo sapiens
  CDR3 for alpha chain variable domain of TCR clone 7922 (TRAV8-3, TRAJ45)
CASSYSGGGADVLTF

SEQ ID NO: 15844 - protein, 13 aa, Homo sapiens
  CDR3 for beta chain variable domain of TCR clone 7922 (TRBV10-3, TRBJ2-7)
CASKLAVNYEQYF

SEQ ID NO: 15845 - protein, 15 aa, Homo sapiens
  CDR3 for alpha chain variable domain of TCR clone 7923 (TRAV3, TRAJ22)
CAVRDRGGSARQLTF

SEQ ID NO: 15846 - protein, 15 aa, Homo sapiens
  CDR3 for beta chain variable domain of TCR clone 7923 (TRBV9, TRBJ1-6)
CASSVAGTGDSPLHF

SEQ ID NO: 15847 - protein, 13 aa, Homo sapiens
  CDR3 for alpha chain variable domain of TCR clone 7924 (TRAV9-2, TRAJ49)
CALRPNTGNQFYF

SEQ ID NO: 15848 - protein, 15 aa, Homo sapiens
  CDR3 for beta chain variable domain of TCR clone 7924 (TRBV5-1, TRBJ2-1)
CASSPPRAPYNEQFF

SEQ ID NO: 15849 - protein, 14 aa, Homo sapiens
  CDR3 for alpha chain variable domain of TCR clone 7925 (TRAV1-2, TRAJ8)
CAVREDTGFQKLVF

SEQ ID NO: 15850 - protein, 15 aa, Homo sapiens
  CDR3 for beta chain variable domain of TCR clone 7925 (TRBV6-3, TRBJ2-7)
CASSSSGTVFYEQYF

SEQ ID NO: 15851 - protein, 14 aa, Homo sapiens
  CDR3 for alpha chain variable domain of TCR clone 7926 (TRAV9-2, TRAJ39)
CALYIYNAGNMLTF

SEQ ID NO: 15852 - protein, 16 aa, Homo sapiens
  CDR3 for beta chain variable domain of TCR clone 7926 (TRBV29-1, TRBJ2-6)
CSVEDITYSGANVLTF

SEQ ID NO: 15853 - protein, 14 aa, Homo sapiens
  CDR3 for alpha chain variable domain of TCR clone 7927 (TRAV12-3, TRAJ9)
CAMSPNTGGFKTIF

SEQ ID NO: 15854 - protein, 11 aa, Homo sapiens
  CDR3 for beta chain variable domain of TCR clone 7927 (TRBV11-3, TRBJ2-1)
CASSLGNEQFF

SEQ ID NO: 15855 - protein, 13 aa, Homo sapiens
  CDR3 for alpha chain variable domain of TCR clone 7928 (TRAV21, TRAJ27)
CAARPGNAGKSTF

SEQ ID NO: 15856 - protein, 14 aa, Homo sapiens
  CDR3 for beta chain variable domain of TCR clone 7928 (TRBV7-7, TRBJ2-3)
CASSLGTVTDTQYF

SEQ ID NO: 15857 - protein, 11 aa, Homo sapiens
  CDR3 for alpha chain variable domain of TCR clone 7929 (TRAV3, TRAJ21)
CAVGNFNKFYF

SEQ ID NO: 15858 - protein, 12 aa, Homo sapiens
  CDR3 for beta chain variable domain of TCR clone 7929 (TRBV11-2, TRBJ2-2)
CASSLGGGELFF

SEQ ID NO: 15859 - protein, 13 aa, Homo sapiens
  CDR3 for alpha chain variable domain of TCR clone 7930 (TRAV2, TRAJ29)
CAAGGPGNTPLVF

SEQ ID NO: 15860 - protein, 13 aa, Homo sapiens
  CDR3 for beta chain variable domain of TCR clone 7930 (TRBV14, TRBJ1-2)
CASSEDRRYGYTF

SEQ ID NO: 15861 - protein, 18 aa, Homo sapiens
  CDR3 for alpha chain variable domain of TCR clone 7931 (TRAV21, TRAJ52)
CAVRPSPAGGTSYGKLTF

SEQ ID NO: 15862 - protein, 17 aa, Homo sapiens
  CDR3 for beta chain variable domain of TCR clone 7931 (TRBV13, TRBJ2-3)
WASSLSRVAGGRNTQYF

SEQ ID NO: 15863 - protein, 18 aa, Homo sapiens
  CDR3 for alpha chain variable domain of TCR clone 7932 (TRAV12-2, )
CAVEDIQNPDPAVYQLRD

SEQ ID NO: 15864 - protein, 15 aa, Homo sapiens
  CDR3 for beta chain variable domain of TCR clone 7932 (TRBV27, TRBJ2-1)
CASSNGGGSSNEQFF

SEQ ID NO: 15865 - protein, 15 aa, Homo sapiens
  CDR3 for alpha chain variable domain of TCR clone 7933 (TRAV12-1, TRAJ44)
CVVNINTGTASKLTF

SEQ ID NO: 15866 - protein, 16 aa, Homo sapiens
  CDR3 for beta chain variable domain of TCR clone 7933 (TRBV12-5, TRBJ2-5)
CASGPRTSGNQETQYF

SEQ ID NO: 15867 - protein, 13 aa, Homo sapiens
  CDR3 for alpha chain variable domain of TCR clone 7934 (TRAV20, TRAJ37)
CAGCSSNTGKLIF

SEQ ID NO: 15868 - protein, 11 aa, Homo sapiens
  CDR3 for beta chain variable domain of TCR clone 7934 (TRBV12-4, TRBJ2-3)
WASTATDTQYF

SEQ ID NO: 15869 - protein, 15 aa, Homo sapiens
  CDR3 for alpha chain variable domain of TCR clone 7935 (TRAV12-3, TRAJ6)
CAMSATTGGSHIPTF

SEQ ID NO: 15870 - protein, 16 aa, Homo sapiens
  CDR3 for beta chain variable domain of TCR clone 7935 (TRBV20-1, TRBJ1-2)
CSASMGQGVANYGYTF

SEQ ID NO: 15871 - protein, 11 aa, Homo sapiens
  CDR3 for alpha chain variable domain of TCR clone 7936 (TRAV3, TRAJ21)
CAVGNFNKFYF

SEQ ID NO: 15872 - protein, 16 aa, Homo sapiens
  CDR3 for beta chain variable domain of TCR clone 7936 (TRBV19, TRBJ2-1)
CASSTAGPSSYNEQFF

SEQ ID NO: 15873 - protein, 18 aa, Homo sapiens
  CDR3 for alpha chain variable domain of TCR clone 7937 (TRAV21, TRAJ52)
CSVRPSPAGGTSYGKLTF

SEQ ID NO: 15874 - protein, 17 aa, Homo sapiens
  CDR3 for beta chain variable domain of TCR clone 7937 (TRBV13, TRBJ2-3)
CASSLSRVAGGRNTQYF

SEQ ID NO: 15875 - protein, 14 aa, Homo sapiens
  CDR3 for alpha chain variable domain of TCR clone 7938 (TRAV13-2, TRAJ32)
CAESLGGATNKLIF

SEQ ID NO: 15876 - protein, 12 aa, Homo sapiens
  CDR3 for beta chain variable domain of TCR clone 7938 (TRBV11-2, TRBJ2-1)
CASSPGNNEQFF

SEQ ID NO: 15877 - protein, 15 aa, Homo sapiens
  CDR3 for alpha chain variable domain of TCR clone 7939 (TRAV12-3, TRAJ27)
CAMRAYNTNAGKSTF

SEQ ID NO: 15878 - protein, 13 aa, Homo sapiens
  CDR3 for beta chain variable domain of TCR clone 7939 (TRBV20-1, TRBJ1-5)
CSASPRANQPQHF

SEQ ID NO: 15879 - protein, 11 aa, Homo sapiens
  CDR3 for alpha chain variable domain of TCR clone 7940 (TRAV29/DV5, TRAJ37)
CATSNTGKLIF

SEQ ID NO: 15880 - protein, 12 aa, Homo sapiens
  CDR3 for beta chain variable domain of TCR clone 7940 (TRBV11-2, TRBJ2-1)
CASSPGNNEQFF

SEQ ID NO: 15881 - protein, 13 aa, Homo sapiens
  CDR3 for alpha chain variable domain of TCR clone 7941 (TRAV3, TRAJ21)
CAVREPDFNKFYF

SEQ ID NO: 15882 - protein, 15 aa, Homo sapiens
  CDR3 for beta chain variable domain of TCR clone 7941 (TRBV5-1, TRBJ2-1)
CASSPPRAPYNEQFF

SEQ ID NO: 15883 - protein, 10 aa, Homo sapiens
  CDR3 for alpha chain variable domain of TCR clone 7942 (TRAV27, TRAJ49)
CVVPVTSSIL

SEQ ID NO: 15884 - protein, 16 aa, Homo sapiens
  CDR3 for beta chain variable domain of TCR clone 7942 (TRBV7-3, TRBJ2-1)
CASSKPLAGGYNEQFF

SEQ ID NO: 15885 - protein, 13 aa, Homo sapiens
  CDR3 for alpha chain variable domain of TCR clone 7943 (TRAV17, TRAJ54)
CAAGIQGAQKLVF

SEQ ID NO: 15886 - protein, 14 aa, Homo sapiens
  CDR3 for beta chain variable domain of TCR clone 7943 (TRBV12-4, TRBJ1-1)
CASSPIRRTGEAFF

SEQ ID NO: 15887 - protein, 17 aa, Homo sapiens
  CDR3 for alpha chain variable domain of TCR clone 7944 (TRAV13-1, TRAJ31)
CAPRDRLMFGDGTQLGV

SEQ ID NO: 15888 - protein, 12 aa, Homo sapiens
  CDR3 for beta chain variable domain of TCR clone 7944 (TRBV7-9, TRBJ2-7)
CASSLEGYEQYF

SEQ ID NO: 15889 - protein, 15 aa, Homo sapiens
  CDR3 for alpha chain variable domain of TCR clone 7945 (TRAV2, TRAJ22)
CAVGFFSGSARQLTF

SEQ ID NO: 15890 - protein, 15 aa, Homo sapiens
  CDR3 for beta chain variable domain of TCR clone 7945 (TRBV2, TRBJ2-1)
CASSELAGGYNEQFF

SEQ ID NO: 15891 - protein, 18 aa, Homo sapiens
  CDR3 for alpha chain variable domain of TCR clone 7946 (TRAV14/DV4, TRAJ3)
CAMREGSGGYSSASKIIF

SEQ ID NO: 15892 - protein, 15 aa, Homo sapiens
  CDR3 for beta chain variable domain of TCR clone 7946 (TRBV6-6, TRBJ2-5)
CASSPGGGLEETQYF

SEQ ID NO: 15893 - protein, 15 aa, Homo sapiens
  CDR3 for alpha chain variable domain of TCR clone 7947 (TRAV38-2/DV8, TRAJ28)
CAYRSRGAGSYQLAF

SEQ ID NO: 15894 - protein, 14 aa, Homo sapiens
  CDR3 for beta chain variable domain of TCR clone 7947 (TRBV7-9, TRBJ2-7)
CASSLSQGSYEQYF

SEQ ID NO: 15895 - protein, 14 aa, Homo sapiens
  CDR3 for alpha chain variable domain of TCR clone 7948 (TRAV13-1, TRAJ8)
CAASMSTGFQKLVF

SEQ ID NO: 15896 - protein, 13 aa, Homo sapiens
  CDR3 for beta chain variable domain of TCR clone 7948 (TRBV13, TRBJ2-1)
CASTPGSYNEQFF

SEQ ID NO: 15897 - protein, 14 aa, Homo sapiens
  CDR3 for alpha chain variable domain of TCR clone 7949 (TRAV26-1, TRAJ38)
CIADNAGNNRKLIW

SEQ ID NO: 15898 - protein, 13 aa, Homo sapiens
  CDR3 for beta chain variable domain of TCR clone 7949 (TRBV20-1, TRBJ1-1)
CSARGGGNTEAFL

SEQ ID NO: 15899 - protein, 12 aa, Homo sapiens
  CDR3 for alpha chain variable domain of TCR clone 7950 (TRAV8-3, TRAJ20)
CAVGANGYKLSF

SEQ ID NO: 15900 - protein, 16 aa, Homo sapiens
  CDR3 for beta chain variable domain of TCR clone 7950 (TRBV19, TRBJ2-2)
CASRSPGTGATGELFF

SEQ ID NO: 15901 - protein, 17 aa, Homo sapiens
  CDR3 for alpha chain variable domain of TCR clone 7951 (TRAV3, TRAJ6)
CAVREGPRAGGSYIPTF

SEQ ID NO: 15902 - protein, 14 aa, Homo sapiens
  CDR3 for beta chain variable domain of TCR clone 7951 (TRBV7-2, TRBJ2-7)
CASSPKTSFYEQYF

SEQ ID NO: 15903 - protein, 11 aa, Homo sapiens
  CDR3 for alpha chain variable domain of TCR clone 7952 (TRAV13-1, TRAJ20)
CAAKRRLQAQL

SEQ ID NO: 15904 - protein, 13 aa, Homo sapiens
  CDR3 for beta chain variable domain of TCR clone 7952 (TRBV12-4, TRBJ1-1)
CASSLIGDTEAFF

SEQ ID NO: 15905 - protein, 11 aa, Homo sapiens
  CDR3 for alpha chain variable domain of TCR clone 7953 (TRAV12-2, TRAJ43)
CASPIGNDMRF

SEQ ID NO: 15906 - protein, 14 aa, Homo sapiens
  CDR3 for beta chain variable domain of TCR clone 7953 (TRBV18, TRBJ2-5)
CASSPPGHQETQYF

SEQ ID NO: 15907 - protein, 15 aa, Homo sapiens
  CDR3 for alpha chain variable domain of TCR clone 7954 (TRAV2, TRAJ13)
CAVEANSGGYQKVTF

SEQ ID NO: 15908 - protein, 15 aa, Homo sapiens
  CDR3 for beta chain variable domain of TCR clone 7954 (TRBV5-1, TRBJ2-7)
CASSPINRLTYEQYF

SEQ ID NO: 15909 - protein, 15 aa, Homo sapiens
  CDR3 for alpha chain variable domain of TCR clone 7955 (TRAV8-3, TRAJ23)
CAVGDRYNQGGKLIF

SEQ ID NO: 15910 - protein, 16 aa, Homo sapiens
  CDR3 for beta chain variable domain of TCR clone 7955 (TRBV19, TRBJ2-1)
CASSKAGPSSYNEQFF

SEQ ID NO: 15911 - protein, 12 aa, Homo sapiens
  CDR3 for alpha chain variable domain of TCR clone 7956 (TRAV8-2, TRAJ30)
CVVSDRDDKIIF

SEQ ID NO: 15912 - protein, 16 aa, Homo sapiens
  CDR3 for beta chain variable domain of TCR clone 7956 (TRBV5-4, TRBJ2-5)
CAESPGLAGTQETQYF

SEQ ID NO: 15913 - protein, 14 aa, Homo sapiens
  CDR3 for alpha chain variable domain of TCR clone 7957 (TRAV1-2, TRAJ16)
CAVNRFSDGQKLLF

SEQ ID NO: 15914 - protein, 15 aa, Homo sapiens
  CDR3 for beta chain variable domain of TCR clone 7957 (TRBV28, TRBJ2-1)
CASSIIAGGRSEQFF

SEQ ID NO: 15915 - protein, 11 aa, Homo sapiens
  CDR3 for alpha chain variable domain of TCR clone 7958 (TRAV1-2, TRAJ31)
CAVNNNARLMF

SEQ ID NO: 15916 - protein, 16 aa, Homo sapiens
  CDR3 for beta chain variable domain of TCR clone 7958 (TRBV11-2, TRBJ2-1)
CASSPRLAGVYNEQFF

SEQ ID NO: 15917 - protein, 13 aa, Homo sapiens
  CDR3 for alpha chain variable domain of TCR clone 7959 (TRAV12-2, TRAJ20)
CAVYPSNDYKLSF

SEQ ID NO: 15918 - protein, 14 aa, Homo sapiens
  CDR3 for beta chain variable domain of TCR clone 7959 (TRBV27, TRBJ2-5)
CQQFIPAGGETQYF

SEQ ID NO: 15919 - protein, 13 aa, Homo sapiens
  CDR3 for alpha chain variable domain of TCR clone 7960 (TRAV2, TRAJ40)
CAMVTSGTYKYIF

SEQ ID NO: 15920 - protein, 14 aa, Homo sapiens
  CDR3 for beta chain variable domain of TCR clone 7960 (TRBV19, TRBJ2-1)
CASPTFVLSGEQFF

SEQ ID NO: 15921 - protein, 13 aa, Homo sapiens
  CDR3 for alpha chain variable domain of TCR clone 7961 (TRAV2, TRAJ16)
CAVEFGGGQKLLF

SEQ ID NO: 15922 - protein, 14 aa, Homo sapiens
  CDR3 for beta chain variable domain of TCR clone 7961 (TRBV6-3, TRBJ2-5)
CASSYSLREKTQYF

SEQ ID NO: 15923 - protein, 15 aa, Homo sapiens
  CDR3 for alpha chain variable domain of TCR clone 7962 (TRAV14/DV4, TRAJ12)
CAMRELMDSSYKLIF

SEQ ID NO: 15924 - protein, 10 aa, Homo sapiens
  CDR3 for beta chain variable domain of TCR clone 7962 (TRBV20-1, TRBJ2-7)
CSEGYYEQYF

SEQ ID NO: 15925 - protein, 13 aa, Homo sapiens
  CDR3 for alpha chain variable domain of TCR clone 7963 (TRAV21, TRAJ57)
RAVTQGGSEKLVF

SEQ ID NO: 15926 - protein, 16 aa, Homo sapiens
  CDR3 for beta chain variable domain of TCR clone 7963 (TRBV29-1, TRBJ2-7)
CSVEDAEDGTAYEQYF

SEQ ID NO: 15927 - protein, 15 aa, Homo sapiens
  CDR3 for alpha chain variable domain of TCR clone 7964 (TRAV8-3, TRAJ45)
CASSYSGGGADGLTF

SEQ ID NO: 15928 - protein, 13 aa, Homo sapiens
  CDR3 for beta chain variable domain of TCR clone 7964 (TRBV12-4, TRBJ2-3)
CASSSPLGGTQYF

SEQ ID NO: 15929 - protein, 14 aa, Homo sapiens
  CDR3 for alpha chain variable domain of TCR clone 7965 (TRAV13-1, TRAJ35)
CAASKGGFGNVLHC

SEQ ID NO: 15930 - protein, 13 aa, Homo sapiens
  CDR3 for beta chain variable domain of TCR clone 7965 (TRBV7-3, TRBJ1-1)
CASSQDWGAEDFF

SEQ ID NO: 15931 - protein, 14 aa, Homo sapiens
  CDR3 for alpha chain variable domain of TCR clone 7966 (TRAV1-2, TRAJ8)
CAVREDTGFQKLVF

SEQ ID NO: 15932 - protein, 12 aa, Homo sapiens
  CDR3 for beta chain variable domain of TCR clone 7966 (TRBV7-2, TRBJ2-5)
CASSQYQETQYF

SEQ ID NO: 15933 - protein, 14 aa, Homo sapiens
  CDR3 for alpha chain variable domain of TCR clone 7967 (TRAV12-2, TRAJ40)
CAVKIPSGTYKYIF

SEQ ID NO: 15934 - protein, 14 aa, Homo sapiens
  CDR3 for beta chain variable domain of TCR clone 7967 (TRBV20-1, TRBJ1-1)
CSAQTRIGGTEALF

SEQ ID NO: 15935 - protein, 19 aa, Homo sapiens
  CDR3 for alpha chain variable domain of TCR clone 7968 (TRAV2, TRAJ20)
ILQVREADAAVYRDCKLSF

SEQ ID NO: 15936 - protein, 15 aa, Homo sapiens
  CDR3 for beta chain variable domain of TCR clone 7968 (TRBV4-1, TRBJ1-4)
CASSDTGGTNEKLFF

SEQ ID NO: 15937 - protein, 14 aa, Homo sapiens
  CDR3 for alpha chain variable domain of TCR clone 7969 (TRAV9-2, TRAJ39)
CALYIYNAGNMLTF

SEQ ID NO: 15938 - protein, 15 aa, Homo sapiens
  CDR3 for beta chain variable domain of TCR clone 7969 (TRBV2, TRBJ2-7)
CASSEGLARSYEQYF

SEQ ID NO: 15939 - protein, 14 aa, Homo sapiens
  CDR3 for alpha chain variable domain of TCR clone 7970 (TRAV2, TRAJ9)
CAVEDRSGGFKTIF

SEQ ID NO: 15940 - protein, 15 aa, Homo sapiens
  CDR3 for beta chain variable domain of TCR clone 7970 (TRBV6-3, TRBJ2-2)
CASSFLATLTGELFF

SEQ ID NO: 15941 - protein, 14 aa, Homo sapiens
  CDR3 for alpha chain variable domain of TCR clone 7971 (TRAV12-2, TRAJ6)
CASKWGGGSYIPTF

SEQ ID NO: 15942 - protein, 15 aa, Homo sapiens
  CDR3 for beta chain variable domain of TCR clone 7971 (TRBV5-1, TRBJ2-1)
CASSPPRAPYNEQFF

SEQ ID NO: 15943 - protein, 14 aa, Homo sapiens
  CDR3 for alpha chain variable domain of TCR clone 7972 (TRAV17, TRAJ16)
CATADFSDGQKLLF

SEQ ID NO: 15944 - protein, 12 aa, Homo sapiens
  CDR3 for beta chain variable domain of TCR clone 7972 (TRBV11-2, TRBJ2-1)
CASSPGNNEQFF

SEQ ID NO: 15945 - protein, 12 aa, Homo sapiens
  CDR3 for alpha chain variable domain of TCR clone 7973 (TRAV22, TRAJ20)
CAVGGNDYKLSF

SEQ ID NO: 15946 - protein, 13 aa, Homo sapiens
  CDR3 for beta chain variable domain of TCR clone 7973 (TRBV9, TRBJ1-1)
CASSVGTGTEAFF

SEQ ID NO: 15947 - protein, 15 aa, Homo sapiens
  CDR3 for alpha chain variable domain of TCR clone 7974 (TRAV21, TRAJ53)
CATLNSGGSNYKLTF

SEQ ID NO: 15948 - protein, 12 aa, Homo sapiens
  CDR3 for beta chain variable domain of TCR clone 7974 (TRBV11-2, TRBJ2-2)
CASSLGGGELFF

SEQ ID NO: 15949 - protein, 13 aa, Homo sapiens
  CDR3 for alpha chain variable domain of TCR clone 7975 (TRAV20, TRAJ37)
CAGCSSNTGKLIL

SEQ ID NO: 15950 - protein, 11 aa, Homo sapiens
  CDR3 for beta chain variable domain of TCR clone 7975 (TRBV12-4, TRBJ2-3)
CASTATDTQYF

SEQ ID NO: 15951 - protein, 12 aa, Homo sapiens
  CDR3 for alpha chain variable domain of TCR clone 7976 (TRAV21, TRAJ10)
CAVTGGGNKLTF

SEQ ID NO: 15952 - protein, 14 aa, Homo sapiens
  CDR3 for beta chain variable domain of TCR clone 7976 (TRBV11-3, TRBJ2-3)
CASSLVASTDTQYF

SEQ ID NO: 15953 - protein, 14 aa, Homo sapiens
  CDR3 for alpha chain variable domain of TCR clone 7977 (TRAV26-1, TRAJ38)
CIAANAGNNRKLIW

SEQ ID NO: 15954 - protein, 13 aa, Homo sapiens
  CDR3 for beta chain variable domain of TCR clone 7977 (TRBV20-1, TRBJ1-1)
CSARGGGNTEAFF

SEQ ID NO: 15955 - protein, 14 aa, Homo sapiens
  CDR3 for alpha chain variable domain of TCR clone 7978 (TRAV26-1, TRAJ38)
CIADNAGNNRKLIW

SEQ ID NO: 15956 - protein, 11 aa, Homo sapiens
  CDR3 for beta chain variable domain of TCR clone 7978 (TRBV2, TRBJ1-1)
CASREGTEAFF

SEQ ID NO: 15957 - protein, 17 aa, Homo sapiens
  CDR3 for alpha chain variable domain of TCR clone 7979 (TRAV26-1, TRAJ28)
CIVRARYSGAGSYQLTF

SEQ ID NO: 15958 - protein, 10 aa, Homo sapiens
  CDR3 for beta chain variable domain of TCR clone 7979 (TRBV12-4, TRBJ2-7)
CASLTFEQYF

SEQ ID NO: 15959 - protein, 14 aa, Homo sapiens
  CDR3 for alpha chain variable domain of TCR clone 7980 (TRAV1-2, TRAJ8)
CAVREDTGFQKLVF

SEQ ID NO: 15960 - protein, 14 aa, Homo sapiens
  CDR3 for beta chain variable domain of TCR clone 7980 (TRBV28, TRBJ2-1)
CASSPSTGYNEQFF

SEQ ID NO: 15961 - protein, 16 aa, Homo sapiens
  CDR3 for alpha chain variable domain of TCR clone 7981 (TRAV1-2, TRAJ10)
CAVRDQGGGGGNKLTF

SEQ ID NO: 15962 - protein, 14 aa, Homo sapiens
  CDR3 for beta chain variable domain of TCR clone 7981 (TRBV15, TRBJ2-7)
CATSPDRGLYEQYF

SEQ ID NO: 15963 - protein, 14 aa, Homo sapiens
  CDR3 for alpha chain variable domain of TCR clone 7982 (TRAV12-2, TRAJ13)
CAVKKNGGYQKVTF

SEQ ID NO: 15964 - protein, 15 aa, Homo sapiens
  CDR3 for beta chain variable domain of TCR clone 7982 (TRBV27, TRBJ2-1)
CASSNGGGSSNEQFF

SEQ ID NO: 15965 - protein, 15 aa, Homo sapiens
  CDR3 for alpha chain variable domain of TCR clone 7983 (TRAV8-3, TRAJ45)
CASSYSGGGADGLTS

SEQ ID NO: 15966 - protein, 13 aa, Homo sapiens
  CDR3 for beta chain variable domain of TCR clone 7983 (TRBV10-3, TRBJ2-7)
CASKLAVNYEQYF

SEQ ID NO: 15967 - protein, 11 aa, Homo sapiens
  CDR3 for alpha chain variable domain of TCR clone 7984 (TRAV21, TRAJ31)
CAVRNNARLMF

SEQ ID NO: 15968 - protein, 17 aa, Homo sapiens
  CDR3 for beta chain variable domain of TCR clone 7984 (TRBV4-1, TRBJ2-3)
CASSQGYVSGGTDTQYF

SEQ ID NO: 15969 - protein, 13 aa, Homo sapiens
  CDR3 for alpha chain variable domain of TCR clone 7985 (TRAV20, TRAJ45)
CGYSGGGADGLTF

SEQ ID NO: 15970 - protein, 15 aa, Homo sapiens
  CDR3 for beta chain variable domain of TCR clone 7985 (TRBV27, TRBJ2-7)
CASSTAGTGSYEQYF

SEQ ID NO: 15971 - protein, 11 aa, Homo sapiens
  CDR3 for alpha chain variable domain of TCR clone 7986 (TRAV12-2, TRAJ43)
CAAYNNNDMRF

SEQ ID NO: 15972 - protein, 14 aa, Homo sapiens
  CDR3 for beta chain variable domain of TCR clone 7986 (TRBV7-8, TRBJ1-2)
CASSAGAAIYGYTF

SEQ ID NO: 15973 - protein, 16 aa, Homo sapiens
  CDR3 for alpha chain variable domain of TCR clone 7987 (TRAV12-3, TRAJ53)
CAMSPGSGGSNYNLTF

SEQ ID NO: 15974 - protein, 11 aa, Homo sapiens
  CDR3 for beta chain variable domain of TCR clone 7987 (TRBV29-1, TRBJ2-5)
CSEDRTGTQYF

SEQ ID NO: 15975 - protein, 13 aa, Homo sapiens
  CDR3 for alpha chain variable domain of TCR clone 7988 (TRAV20, TRAJ37)
CAGCSSNAGKLIF

SEQ ID NO: 15976 - protein, 11 aa, Homo sapiens
  CDR3 for beta chain variable domain of TCR clone 7988 (TRBV12-4, TRBJ2-3)
CASTATDTQYF

SEQ ID NO: 15977 - protein, 11 aa, Homo sapiens
  CDR3 for alpha chain variable domain of TCR clone 7989 (TRAV1-2, TRAJ11)
CAVRGYSTLTF

SEQ ID NO: 15978 - protein, 18 aa, Homo sapiens
  CDR3 for beta chain variable domain of TCR clone 7989 (TRBV20-1, TRBJ2-6)
CSAETTPTHGSGANVLTF

SEQ ID NO: 15979 - protein, 13 aa, Homo sapiens
  CDR3 for alpha chain variable domain of TCR clone 7990 (TRAV8-6, TRAJ49)
CAVITNTGNQFYF

SEQ ID NO: 15980 - protein, 15 aa, Homo sapiens
  CDR3 for beta chain variable domain of TCR clone 7990 (TRBV9, TRBJ1-6)
CASSVAGTGDSPLHF

SEQ ID NO: 15981 - protein, 14 aa, Homo sapiens
  CDR3 for alpha chain variable domain of TCR clone 7991 (TRAV12-2, TRAJ40)
CAVKIPSGTYKYIF

SEQ ID NO: 15982 - protein, 14 aa, Homo sapiens
  CDR3 for beta chain variable domain of TCR clone 7991 (TRBV20-1, TRBJ1-1)
CSAQTRIGGTEVFF

SEQ ID NO: 15983 - protein, 14 aa, Homo sapiens
  CDR3 for alpha chain variable domain of TCR clone 7992 (TRAV12-1, TRAJ9)
CVVNKGTGGFKTIF

SEQ ID NO: 15984 - protein, 16 aa, Homo sapiens
  CDR3 for beta chain variable domain of TCR clone 7992 (TRBV4-3, TRBJ2-2)
CASSQDRGSDTGELFF

SEQ ID NO: 15985 - protein, 11 aa, Homo sapiens
  CDR3 for alpha chain variable domain of TCR clone 7993 (TRAV3, TRAJ21)
CAVGNFNKFYF

SEQ ID NO: 15986 - protein, 16 aa, Homo sapiens
  CDR3 for beta chain variable domain of TCR clone 7993 (TRBV19, TRBJ2-1)
CASSKAGPRSYNEQFF

SEQ ID NO: 15987 - protein, 12 aa, Homo sapiens
  CDR3 for alpha chain variable domain of TCR clone 7994 (TRAV4, TRAJ22)
CLVGDINYFFWF

SEQ ID NO: 15988 - protein, 13 aa, Homo sapiens
  CDR3 for beta chain variable domain of TCR clone 7994 (TRBV19, TRBJ1-5)
CASSEGSNQPQHF

SEQ ID NO: 15989 - protein, 12 aa, Homo sapiens
  CDR3 for alpha chain variable domain of TCR clone 7995 (TRAV12-2, TRAJ16)
CAVAPDGQKLLF

SEQ ID NO: 15990 - protein, 13 aa, Homo sapiens
  CDR3 for beta chain variable domain of TCR clone 7995 (TRBV6-1, TRBJ1-1)
CASSVTGRLEAFF

SEQ ID NO: 15991 - protein, 11 aa, Homo sapiens
  CDR3 for alpha chain variable domain of TCR clone 7996 (TRAV2, TRAJ13)
CASGGYQKVTF

SEQ ID NO: 15992 - protein, 16 aa, Homo sapiens
  CDR3 for beta chain variable domain of TCR clone 7996 (TRBV5-1, TRBJ2-7)
CASSWGTGGRAWEQYF

SEQ ID NO: 15993 - protein, 14 aa, Homo sapiens
  CDR3 for alpha chain variable domain of TCR clone 7997 (TRAV1-2, TRAJ16)
CAVNRFSDGQKLLF

SEQ ID NO: 15994 - protein, 15 aa, Homo sapiens
  CDR3 for beta chain variable domain of TCR clone 7997 (TRBV7-3, TRBJ2-2)
ELSLKRGTLSGELFF

SEQ ID NO: 15995 - protein, 16 aa, Homo sapiens
  CDR3 for alpha chain variable domain of TCR clone 7998 (TRAV12-3, TRAJ53)
CAMSPGSGGSDYKLTF

SEQ ID NO: 15996 - protein, 11 aa, Homo sapiens
  CDR3 for beta chain variable domain of TCR clone 7998 (TRBV29-1, TRBJ2-5)
CSEDRTGTQYF

SEQ ID NO: 15997 - protein, 14 aa, Homo sapiens
  CDR3 for alpha chain variable domain of TCR clone 7999 (TRAV12-2, TRAJ40)
CAAKIPSGTYKYIF

SEQ ID NO: 15998 - protein, 14 aa, Homo sapiens
  CDR3 for beta chain variable domain of TCR clone 7999 (TRBV20-1, TRBJ1-1)
CSAQTRIGGTEAFF

SEQ ID NO: 15999 - protein, 13 aa, Homo sapiens
  CDR3 for alpha chain variable domain of TCR clone 8000 (TRAV12-2, TRAJ20)
CAVYPSNDYKLSF

SEQ ID NO: 16000 - protein, 12 aa, Homo sapiens
  CDR3 for beta chain variable domain of TCR clone 8000 (TRBV14, TRBJ2-7)
CASSRLKGEQYF

SEQ ID NO: 16001 - protein, 12 aa, Homo sapiens
  CDR3 for alpha chain variable domain of TCR clone 8001 (TRAV13-2, TRAJ23)
CAERHRGGKLIF

SEQ ID NO: 16002 - protein, 15 aa, Homo sapiens
  CDR3 for beta chain variable domain of TCR clone 8001 (TRBV27, TRBJ2-1)
CASSNGGGSSNEQFF

SEQ ID NO: 16003 - protein, 15 aa, Homo sapiens
  CDR3 for alpha chain variable domain of TCR clone 8002 (TRAV8-3, TRAJ28)
CAVAYSGAGSYQLTF

SEQ ID NO: 16004 - protein, 12 aa, Homo sapiens
  CDR3 for beta chain variable domain of TCR clone 8002 (TRBV5-1, TRBJ2-1)
CASIGGYNEQFF

SEQ ID NO: 16005 - protein, 14 aa, Homo sapiens
  CDR3 for alpha chain variable domain of TCR clone 8003 (TRAV12-1, TRAJ3)
CVVILYSSASKIIF

SEQ ID NO: 16006 - protein, 18 aa, Homo sapiens
  CDR3 for beta chain variable domain of TCR clone 8003 (TRBV12-4, TRBJ2-2)
CASSRSGGAIPNTGELFF

SEQ ID NO: 16007 - protein, 19 aa, Homo sapiens
  CDR3 for alpha chain variable domain of TCR clone 8004 (TRAV23/DV6, TRAJ9)
CSKHRLKGAGHTGGFKTIF

SEQ ID NO: 16008 - protein, 15 aa, Homo sapiens
  CDR3 for beta chain variable domain of TCR clone 8004 (TRBV6-3, TRBJ2-1)
CASSYASDSYNEQFF

SEQ ID NO: 16009 - protein, 14 aa, Homo sapiens
  CDR3 for alpha chain variable domain of TCR clone 8005 (TRAV35, TRAJ22)
CAGLRPGSARQLTF

SEQ ID NO: 16010 - protein, 15 aa, Homo sapiens
  CDR3 for beta chain variable domain of TCR clone 8005 (TRBV12-4, TRBJ2-5)
RASSPPTGLQETQYF

SEQ ID NO: 16011 - protein, 12 aa, Homo sapiens
  CDR3 for alpha chain variable domain of TCR clone 8006 (TRAV23/DV6, TRAJ18)
CAASMNHRGSTL

SEQ ID NO: 16012 - protein, 15 aa, Homo sapiens
  CDR3 for beta chain variable domain of TCR clone 8006 (TRBV27, TRBJ2-7)
CASSPDQGRLYEQYF

SEQ ID NO: 16013 - protein, 11 aa, Homo sapiens
  CDR3 for alpha chain variable domain of TCR clone 8007 (TRAV2, TRAJ21)
CAVFNFNKFYF

SEQ ID NO: 16014 - protein, 14 aa, Homo sapiens
  CDR3 for beta chain variable domain of TCR clone 8007 (TRBV6-1, TRBJ1-3)
CASVQGGGGNTIYF

SEQ ID NO: 16015 - protein, 13 aa, Homo sapiens
  CDR3 for alpha chain variable domain of TCR clone 8008 (TRAV21, TRAJ27)
CAARPGNAGKSTF

SEQ ID NO: 16016 - protein, 14 aa, Homo sapiens
  CDR3 for beta chain variable domain of TCR clone 8008 (TRBV7-6, TRBJ2-3)
CASSLGTVSDTQYF

SEQ ID NO: 16017 - protein, 14 aa, Homo sapiens
  CDR3 for alpha chain variable domain of TCR clone 8009 (TRAV12-2, TRAJ17)
CAVLFKAAGNKLTF

SEQ ID NO: 16018 - protein, 17 aa, Homo sapiens
  CDR3 for beta chain variable domain of TCR clone 8009 (TRBV20-1, TRBJ2-2)
CSASGSGQGGLTGELFL

SEQ ID NO: 16019 - protein, 14 aa, Homo sapiens
  CDR3 for alpha chain variable domain of TCR clone 8010 (TRAV1-2, TRAJ16)
CAVNRFSDGQKLLF

SEQ ID NO: 16020 - protein, 13 aa, Homo sapiens
  CDR3 for beta chain variable domain of TCR clone 8010 (TRBV9, TRBJ2-1)
CASSPSGGSEQFF

SEQ ID NO: 16021 - protein, 16 aa, Homo sapiens
  CDR3 for alpha chain variable domain of TCR clone 8011 (TRAV30, TRAJ24)
CGTEIVDVDSWGKFQF

SEQ ID NO: 16022 - protein, 14 aa, Homo sapiens
  CDR3 for beta chain variable domain of TCR clone 8011 (TRBV12-5, TRBJ2-5)
CASGSRTHQETQYF

SEQ ID NO: 16023 - protein, 14 aa, Homo sapiens
  CDR3 for alpha chain variable domain of TCR clone 8012 (TRAV1-2, TRAJ8)
CAVREDTGFQKLVF

SEQ ID NO: 16024 - protein, 11 aa, Homo sapiens
  CDR3 for beta chain variable domain of TCR clone 8012 (TRBV11-2, TRBJ2-2)
CASSLPGELFF

SEQ ID NO: 16025 - protein, 15 aa, Homo sapiens
  CDR3 for alpha chain variable domain of TCR clone 8013 (TRAV16, TRAJ50)
CALSGWETSYDKVIF

SEQ ID NO: 16026 - protein, 14 aa, Homo sapiens
  CDR3 for beta chain variable domain of TCR clone 8013 (TRBV18, TRBJ2-3)
CASSETSASDTQYF

SEQ ID NO: 16027 - protein, 13 aa, Homo sapiens
  CDR3 for alpha chain variable domain of TCR clone 8014 (TRAV3, TRAJ27)
CAVRPLGAGKSTF

SEQ ID NO: 16028 - protein, 16 aa, Homo sapiens
  CDR3 for beta chain variable domain of TCR clone 8014 (TRBV12-5, TRBJ2-5)
CASGPRTSGNQETQYF

SEQ ID NO: 16029 - protein, 15 aa, Homo sapiens
  CDR3 for alpha chain variable domain of TCR clone 8015 (TRAV12-1, TRAJ37)
CVVNLPTSNTGKLIF

SEQ ID NO: 16030 - protein, 16 aa, Homo sapiens
  CDR3 for beta chain variable domain of TCR clone 8015 (TRBV2, TRBJ2-1)
CASRSPAGGKYNEQFF

SEQ ID NO: 16031 - protein, 13 aa, Homo sapiens
  CDR3 for alpha chain variable domain of TCR clone 8016 (TRAV13-2, TRAJ48)
CAEMDFGNEKLTF

SEQ ID NO: 16032 - protein, 15 aa, Homo sapiens
  CDR3 for beta chain variable domain of TCR clone 8016 (TRBV20-1, TRBJ2-7)
CSARDRVSGMDEQYF

SEQ ID NO: 16033 - protein, 22 aa, Homo sapiens
  CDR3 for alpha chain variable domain of TCR clone 8017 (TRAV36/DV7, TRAJ38)
CVANAGNNHIQNPDPAVYQLRD

SEQ ID NO: 16034 - protein, 14 aa, Homo sapiens
  CDR3 for beta chain variable domain of TCR clone 8017 (TRBV7-2, TRBJ2-7)
CASSLRWEVNEQYF

SEQ ID NO: 16035 - protein, 11 aa, Homo sapiens
  CDR3 for alpha chain variable domain of TCR clone 8018 (TRAV1-1, TRAJ23)
CAVRQGGKLIF

SEQ ID NO: 16036 - protein, 15 aa, Homo sapiens
  CDR3 for beta chain variable domain of TCR clone 8018 (TRBV27, TRBJ2-1)
CASSNGGGSSNEQFF

SEQ ID NO: 16037 - protein, 12 aa, Homo sapiens
  CDR3 for alpha chain variable domain of TCR clone 8019 (TRAV16, TRAJ10)
CSRTGGGNKLTF

SEQ ID NO: 16038 - protein, 17 aa, Homo sapiens
  CDR3 for beta chain variable domain of TCR clone 8019 (TRBV29-1, TRBJ2-1)
CSVEGPQGKSSYNEQFF

SEQ ID NO: 16039 - protein, 13 aa, Homo sapiens
  CDR3 for alpha chain variable domain of TCR clone 8020 (TRAV26-1, TRAJ36)
CIVVGTGANNLFF

SEQ ID NO: 16040 - protein, 15 aa, Homo sapiens
  CDR3 for beta chain variable domain of TCR clone 8020 (TRBV27, TRBJ2-1)
CASSNGGGSSNEQFF

SEQ ID NO: 16041 - protein, 13 aa, Homo sapiens
  CDR3 for alpha chain variable domain of TCR clone 8021 (TRAV12-2, TRAJ20)
CAVNRFDDYKLSF

SEQ ID NO: 16042 - protein, 13 aa, Homo sapiens
  CDR3 for beta chain variable domain of TCR clone 8021 (TRBV18, TRBJ1-1)
CASSGGRNTEAFF

SEQ ID NO: 16043 - protein, 12 aa, Homo sapiens
  CDR3 for alpha chain variable domain of TCR clone 8022 (TRAV12-3, TRAJ17)
CAMTLTGNKLTF

SEQ ID NO: 16044 - protein, 17 aa, Homo sapiens
  CDR3 for beta chain variable domain of TCR clone 8022 (TRBV20-1, TRBJ2-7)
CSATRAGGVAGVEEQYF

SEQ ID NO: 16045 - protein, 13 aa, Homo sapiens
  CDR3 for alpha chain variable domain of TCR clone 8023 (TRAV38-2/DV8, TRAJ45)
CAYVGGGADGLTF

SEQ ID NO: 16046 - protein, 14 aa, Homo sapiens
  CDR3 for beta chain variable domain of TCR clone 8023 (TRBV9, TRBJ2-7)
CASSPLRAVGEQYF

SEQ ID NO: 16047 - protein, 13 aa, Homo sapiens
  CDR3 for alpha chain variable domain of TCR clone 8024 (TRAV29/DV5, TRAJ58)
CAGEETSGSRLTF

SEQ ID NO: 16048 - protein, 15 aa, Homo sapiens
  CDR3 for beta chain variable domain of TCR clone 8024 (TRBV11-2, TRBJ1-6)
CASTGFGTAVSPLHF

SEQ ID NO: 16049 - protein, 14 aa, Homo sapiens
  CDR3 for alpha chain variable domain of TCR clone 8025 (TRAV12-2, TRAJ17)
CAVLFKAAGNKLTF

SEQ ID NO: 16050 - protein, 19 aa, Homo sapiens
  CDR3 for beta chain variable domain of TCR clone 8025 (TRBV28, TRBJ2-7)
CASSYSGTSRLGWVYEQYF

SEQ ID NO: 16051 - protein, 14 aa, Homo sapiens
  CDR3 for alpha chain variable domain of TCR clone 8026 (TRAV12-1, TRAJ9)
CVVNRRTGGFKTIF

SEQ ID NO: 16052 - protein, 13 aa, Homo sapiens
  CDR3 for beta chain variable domain of TCR clone 8026 (TRBV5-7, TRBJ2-1)
CASSLVESVEQFF

SEQ ID NO: 16053 - protein, 20 aa, Homo sapiens
  CDR3 for alpha chain variable domain of TCR clone 8027 (TRAV1-2, TRAJ34)
LLKELQMKDSASPNTDKLIF

SEQ ID NO: 16054 - protein, 18 aa, Homo sapiens
  CDR3 for beta chain variable domain of TCR clone 8027 (TRBV3-1, TRBJ2-5)
CASSQAGTSGGGRETQYF

SEQ ID NO: 16055 - protein, 12 aa, Homo sapiens
  CDR3 for alpha chain variable domain of TCR clone 8028 (TRAV8-3, TRAJ27)
CAVGAEAGKSTF

SEQ ID NO: 16056 - protein, 14 aa, Homo sapiens
  CDR3 for beta chain variable domain of TCR clone 8028 (TRBV2, TRBJ2-1)
CASGLIVGHDEQFF

SEQ ID NO: 16057 - protein, 17 aa, Homo sapiens
  CDR3 for alpha chain variable domain of TCR clone 8029 (TRAV3, TRAJ12)
CAVRDGGRMDSSYKLIF

SEQ ID NO: 16058 - protein, 14 aa, Homo sapiens
  CDR3 for beta chain variable domain of TCR clone 8029 (TRBV12-4, TRBJ1-3)
CASTLTGAGNTIYF

SEQ ID NO: 16059 - protein, 16 aa, Homo sapiens
  CDR3 for alpha chain variable domain of TCR clone 8030 (TRAV30, TRAJ24)
CGTEIVDADSWGKFQF

SEQ ID NO: 16060 - protein, 14 aa, Homo sapiens
  CDR3 for beta chain variable domain of TCR clone 8030 (TRBV7-6, TRBJ2-3)
CASSLGTVTDTQYF

SEQ ID NO: 16061 - protein, 11 aa, Homo sapiens
  CDR3 for alpha chain variable domain of TCR clone 8031 (TRAV12-3, TRAJ27)
CAMANAGKSTF

SEQ ID NO: 16062 - protein, 15 aa, Homo sapiens
  CDR3 for beta chain variable domain of TCR clone 8031 (TRBV27, TRBJ2-5)
CASSLYPRGGETQYF

SEQ ID NO: 16063 - protein, 17 aa, Homo sapiens
  CDR3 for alpha chain variable domain of TCR clone 8032 (TRAV36/DV7, TRAJ52)
CAVAQRAGGTSYGKLTF

SEQ ID NO: 16064 - protein, 16 aa, Homo sapiens
  CDR3 for beta chain variable domain of TCR clone 8032 (TRBV7-2, TRBJ2-5)
CASSPFPTGGEETQYF

SEQ ID NO: 16065 - protein, 16 aa, Homo sapiens
  CDR3 for alpha chain variable domain of TCR clone 8033 (TRAV17, TRAJ35)
CATAEGGIGFGNVLHC

SEQ ID NO: 16066 - protein, 12 aa, Homo sapiens
  CDR3 for beta chain variable domain of TCR clone 8033 (TRBV11-2, TRBJ2-2)
CASSLGGGELFF

SEQ ID NO: 16067 - protein, 13 aa, Homo sapiens
  CDR3 for alpha chain variable domain of TCR clone 8034 (TRAV12-2, TRAJ30)
CAVNLNRDDKIIF

SEQ ID NO: 16068 - protein, 14 aa, Homo sapiens
  CDR3 for beta chain variable domain of TCR clone 8034 (TRBV7-8, TRBJ2-7)
CASSLGRASYEQYF

SEQ ID NO: 16069 - protein, 11 aa, Homo sapiens
  CDR3 for alpha chain variable domain of TCR clone 8035 (TRAV3, TRAJ21)
CAVGHFNKFYF

SEQ ID NO: 16070 - protein, 16 aa, Homo sapiens
  CDR3 for beta chain variable domain of TCR clone 8035 (TRBV19, TRBJ2-1)
CASSKAGPSSYNEQFF

SEQ ID NO: 16071 - protein, 16 aa, Homo sapiens
  CDR3 for alpha chain variable domain of TCR clone 8036 (TRAV12-1, TRAJ28)
CVVIAYSGAGSYQLTF

SEQ ID NO: 16072 - protein, 14 aa, Homo sapiens
  CDR3 for beta chain variable domain of TCR clone 8036 (TRBV5-4, TRBJ1-1)
CASSLDSRRDEAFF

SEQ ID NO: 16073 - protein, 15 aa, Homo sapiens
  CDR3 for alpha chain variable domain of TCR clone 8037 (TRAV27, TRAJ38)
CAARRNADNNRKLIW

SEQ ID NO: 16074 - protein, 13 aa, Homo sapiens
  CDR3 for beta chain variable domain of TCR clone 8037 (TRBV12-5, TRBJ2-3)
CASGDRQSDTQYF

SEQ ID NO: 16075 - protein, 14 aa, Homo sapiens
  CDR3 for alpha chain variable domain of TCR clone 8038 (TRAV12-2, TRAJ13)
CAVKKTGGYQKVTF

SEQ ID NO: 16076 - protein, 14 aa, Homo sapiens
  CDR3 for beta chain variable domain of TCR clone 8038 (TRBV5-1, TRBJ2-5)
CASSLAGKQETQYF

SEQ ID NO: 16077 - protein, 14 aa, Homo sapiens
  CDR3 for alpha chain variable domain of TCR clone 8039 (TRAV26-1, TRAJ45)
CIEVTGGGADGLTF

SEQ ID NO: 16078 - protein, 15 aa, Homo sapiens
  CDR3 for beta chain variable domain of TCR clone 8039 (TRBV6-5, TRBJ2-1)
CASSYDAGAGNEQFF

SEQ ID NO: 16079 - protein, 13 aa, Homo sapiens
  CDR3 for alpha chain variable domain of TCR clone 8040 (TRAV12-3, TRAJ33)
CAMSVNSNYQLIW

SEQ ID NO: 16080 - protein, 14 aa, Homo sapiens
  CDR3 for beta chain variable domain of TCR clone 8040 (TRBV27, TRBJ2-5)
CASSSLKGWETQYF

SEQ ID NO: 16081 - protein, 14 aa, Homo sapiens
  CDR3 for alpha chain variable domain of TCR clone 8041 (TRAV1-2, TRAJ16)
CAVNRFSDGQKLLF

SEQ ID NO: 16082 - protein, 17 aa, Homo sapiens
  CDR3 for beta chain variable domain of TCR clone 8041 (TRBV28, TRBJ2-5)
CASSFGGEWGGQETQYF

SEQ ID NO: 16083 - protein, 14 aa, Homo sapiens
  CDR3 for alpha chain variable domain of TCR clone 8042 (TRAV36/DV7, TRAJ57)
CAVGFPGGSEKLVF

SEQ ID NO: 16084 - protein, 16 aa, Homo sapiens
  CDR3 for beta chain variable domain of TCR clone 8042 (TRBV7-2, TRBJ2-5)
CASSYKTGISLETQYF

SEQ ID NO: 16085 - protein, 14 aa, Homo sapiens
  CDR3 for alpha chain variable domain of TCR clone 8043 (TRAV1-2, TRAJ16)
CAVNRFSDGQKLLF

SEQ ID NO: 16086 - protein, 14 aa, Homo sapiens
  CDR3 for beta chain variable domain of TCR clone 8043 (TRBV12-4, TRBJ2-5)
CASSLWQKQETQYF

SEQ ID NO: 16087 - protein, 13 aa, Homo sapiens
  CDR3 for alpha chain variable domain of TCR clone 8044 (TRAV3, TRAJ20)
CAVRSLNDYKLSF

SEQ ID NO: 16088 - protein, 12 aa, Homo sapiens
  CDR3 for beta chain variable domain of TCR clone 8044 (TRBV6-1, TRBJ2-1)
CASYSTYNEQFF

SEQ ID NO: 16089 - protein, 15 aa, Homo sapiens
  CDR3 for alpha chain variable domain of TCR clone 8045 (TRAV17, TRAJ57)
CATGPSQGGSEKLGF

SEQ ID NO: 16090 - protein, 16 aa, Homo sapiens
  CDR3 for beta chain variable domain of TCR clone 8045 (TRBV12-4, TRBJ1-5)
CASSRPVGGSNQPQHF

SEQ ID NO: 16091 - protein, 12 aa, Homo sapiens
  CDR3 for alpha chain variable domain of TCR clone 8046 (TRAV9-2, TRAJ36)
CALKKGANNLFF

SEQ ID NO: 16092 - protein, 17 aa, Homo sapiens
  CDR3 for beta chain variable domain of TCR clone 8046 (TRBV20-1, TRBJ1-5)
CSAREIPQGVGNQPQHF

SEQ ID NO: 16093 - protein, 13 aa, Homo sapiens
  CDR3 for alpha chain variable domain of TCR clone 8047 (TRAV17, TRAJ9)
CATDYTGGFKTIL

SEQ ID NO: 16094 - protein, 16 aa, Homo sapiens
  CDR3 for beta chain variable domain of TCR clone 8047 (TRBV7-7, TRBJ2-1)
CASSLASGTSYNEQFF

SEQ ID NO: 16095 - protein, 13 aa, Homo sapiens
  CDR3 for alpha chain variable domain of TCR clone 8048 (TRAV9-2, TRAJ49)
CALIQIGGNQFYF

SEQ ID NO: 16096 - protein, 15 aa, Homo sapiens
  CDR3 for beta chain variable domain of TCR clone 8048 (TRBV9, TRBJ1-6)
CASSVAGTGDSPLHF

SEQ ID NO: 16097 - protein, 12 aa, Homo sapiens
  CDR3 for alpha chain variable domain of TCR clone 8049 (TRAV22, TRAJ22)
CAPGGSARQLTF

SEQ ID NO: 16098 - protein, 15 aa, Homo sapiens
  CDR3 for beta chain variable domain of TCR clone 8049 (TRBV9, TRBJ1-6)
CASSVAGTGDSPLHF

SEQ ID NO: 16099 - protein, 15 aa, Homo sapiens
  CDR3 for alpha chain variable domain of TCR clone 8050 (TRAV21, TRAJ53)
CATLNSGGSNYKLTF

SEQ ID NO: 16100 - protein, 13 aa, Homo sapiens
  CDR3 for beta chain variable domain of TCR clone 8050 (TRBV7-3, TRBJ1-1)
CASSQDWGAEAFF

SEQ ID NO: 16101 - protein, 13 aa, Homo sapiens
  CDR3 for alpha chain variable domain of TCR clone 8051 (TRAV12-3, TRAJ7)
CAMTPYGNNRLAF

SEQ ID NO: 16102 - protein, 16 aa, Homo sapiens
  CDR3 for beta chain variable domain of TCR clone 8051 (TRBV20-1, TRBJ1-4)
CSARPYGGEPNEKLFF

SEQ ID NO: 16103 - protein, 14 aa, Homo sapiens
  CDR3 for alpha chain variable domain of TCR clone 8052 (TRAV8-2, TRAJ26)
CVVSDWNYGQNFVF

SEQ ID NO: 16104 - protein, 12 aa, Homo sapiens
  CDR3 for beta chain variable domain of TCR clone 8052 (TRBV5-4, TRBJ2-5)
CASNRAGETQYF

SEQ ID NO: 16105 - protein, 16 aa, Homo sapiens
  CDR3 for alpha chain variable domain of TCR clone 8053 (TRAV20, TRAJ22)
CAVQASSSGSARQLTF

SEQ ID NO: 16106 - protein, 13 aa, Homo sapiens
  CDR3 for beta chain variable domain of TCR clone 8053 (TRBV11-2, TRBJ2-7)
CASSGTRPYEQYF

SEQ ID NO: 16107 - protein, 13 aa, Homo sapiens
  CDR3 for alpha chain variable domain of TCR clone 8054 (TRAV8-6, TRAJ49)
CAVITNTGNQFYF

SEQ ID NO: 16108 - protein, 15 aa, Homo sapiens
  CDR3 for beta chain variable domain of TCR clone 8054 (TRBV7-9, TRBJ1-4)
CASSARTGGNEKLFF

SEQ ID NO: 16109 - protein, 16 aa, Homo sapiens
  CDR3 for alpha chain variable domain of TCR clone 8055 (TRAV3, TRAJ37)
CAVRGKGSGNTGKLIF

SEQ ID NO: 16110 - protein, 15 aa, Homo sapiens
  CDR3 for beta chain variable domain of TCR clone 8055 (TRBV9, TRBJ1-6)
CASSVAGTGDSPLHF

SEQ ID NO: 16111 - protein, 14 aa, Homo sapiens
  CDR3 for alpha chain variable domain of TCR clone 8056 (TRAV4, TRAJ17)
CLVGPQAAGNKLTF

SEQ ID NO: 16112 - protein, 19 aa, Homo sapiens
  CDR3 for beta chain variable domain of TCR clone 8056 (TRBV6-5, TRBJ2-1)
CASRSGGLAGESSYNEQFF

SEQ ID NO: 16113 - protein, 12 aa, Homo sapiens
  CDR3 for alpha chain variable domain of TCR clone 8057 (TRAV21, TRAJ33)
CAKMDSNYQLIW

SEQ ID NO: 16114 - protein, 13 aa, Homo sapiens
  CDR3 for beta chain variable domain of TCR clone 8057 (TRBV3-1, TRBJ2-2)
CASLARGSGELFF

SEQ ID NO: 16115 - protein, 12 aa, Homo sapiens
  CDR3 for alpha chain variable domain of TCR clone 8058 (TRAV2, TRAJ26)
CAVGEYGQNFVF

SEQ ID NO: 16116 - protein, 14 aa, Homo sapiens
  CDR3 for beta chain variable domain of TCR clone 8058 (TRBV7-2, TRBJ2-2)
CASSPSGGTGELFF

SEQ ID NO: 16117 - protein, 16 aa, Homo sapiens
  CDR3 for alpha chain variable domain of TCR clone 8059 (TRAV12-3, TRAJ53)
CAMSPGSGGSKYKLTF

SEQ ID NO: 16118 - protein, 11 aa, Homo sapiens
  CDR3 for beta chain variable domain of TCR clone 8059 (TRBV29-1, TRBJ2-5)
CSEDRTGTQYF

SEQ ID NO: 16119 - protein, 14 aa, Homo sapiens
  CDR3 for alpha chain variable domain of TCR clone 8060 (TRAV1-2, TRAJ16)
CAVNRFSDGQKLLF

SEQ ID NO: 16120 - protein, 13 aa, Homo sapiens
  CDR3 for beta chain variable domain of TCR clone 8060 (TRBV12-4, TRBJ1-5)
CASSPDRAQPQHF

SEQ ID NO: 16121 - protein, 14 aa, Homo sapiens
  CDR3 for alpha chain variable domain of TCR clone 8061 (TRAV12-1, TRAJ12)
CVVTRMDSSYKLIF

SEQ ID NO: 16122 - protein, 14 aa, Homo sapiens
  CDR3 for beta chain variable domain of TCR clone 8061 (TRBV7-2, TRBJ2-2)
CASSLGQNTGELFF

SEQ ID NO: 16123 - protein, 12 aa, Homo sapiens
  CDR3 for alpha chain variable domain of TCR clone 8062 (TRAV30, TRAJ31)
CGTAKHNARLMF

SEQ ID NO: 16124 - protein, 15 aa, Homo sapiens
  CDR3 for beta chain variable domain of TCR clone 8062 (TRBV7-2, TRBJ2-1)
CASSPLAGEYNEQFF

SEQ ID NO: 16125 - protein, 15 aa, Homo sapiens
  CDR3 for alpha chain variable domain of TCR clone 8063 (TRAV25, TRAJ10)
CAGLGLTGGGNKLTF

SEQ ID NO: 16126 - protein, 14 aa, Homo sapiens
  CDR3 for beta chain variable domain of TCR clone 8063 (TRBV7-2, TRBJ2-1)
CASSLEGGYNEQFF

SEQ ID NO: 16127 - protein, 15 aa, Homo sapiens
  CDR3 for alpha chain variable domain of TCR clone 8064 (TRAV17, TRAJ28)
CATDPSGAGSYQLTF

SEQ ID NO: 16128 - protein, 15 aa, Homo sapiens
  CDR3 for beta chain variable domain of TCR clone 8064 (TRBV12-4, TRBJ1-1)
CASSSSGTGNTEAFF

SEQ ID NO: 16129 - protein, 10 aa, Homo sapiens
  CDR3 for alpha chain variable domain of TCR clone 8065 (TRAV12-3, TRAJ34)
CAMSADKLIF

SEQ ID NO: 16130 - protein, 15 aa, Homo sapiens
  CDR3 for beta chain variable domain of TCR clone 8065 (TRBV20-1, TRBJ2-3)
CSARRGEAITDTQYF

SEQ ID NO: 16131 - protein, 14 aa, Homo sapiens
  CDR3 for alpha chain variable domain of TCR clone 8066 (TRAV1-2, TRAJ8)
CAVREDTGFQKLVF

SEQ ID NO: 16132 - protein, 15 aa, Homo sapiens
  CDR3 for beta chain variable domain of TCR clone 8066 (TRBV6-3, TRBJ2-7)
CAGSSPGTVFYEQYF

SEQ ID NO: 16133 - protein, 12 aa, Homo sapiens
  CDR3 for alpha chain variable domain of TCR clone 8067 (TRAV8-3, TRAJ26)
CAGDNYGQNFVF

SEQ ID NO: 16134 - protein, 14 aa, Homo sapiens
  CDR3 for beta chain variable domain of TCR clone 8067 (TRBV6-1, TRBJ1-3)
CASVQGGGGNTIYF

SEQ ID NO: 16135 - protein, 13 aa, Homo sapiens
  CDR3 for alpha chain variable domain of TCR clone 8068 (TRAV3, TRAJ27)
CAVRPLGAGKSTF

SEQ ID NO: 16136 - protein, 14 aa, Homo sapiens
  CDR3 for beta chain variable domain of TCR clone 8068 (TRBV11-2, TRBJ1-2)
CASSLGTANYGYTF

SEQ ID NO: 16137 - protein, 15 aa, Homo sapiens
  CDR3 for alpha chain variable domain of TCR clone 8069 (TRAV12-1, TRAJ9)
CVVSFGDTGGFKTIF

SEQ ID NO: 16138 - protein, 12 aa, Homo sapiens
  CDR3 for beta chain variable domain of TCR clone 8069 (TRBV14, TRBJ2-7)
CASSLYKDEQYF

SEQ ID NO: 16139 - protein, 14 aa, Homo sapiens
  CDR3 for alpha chain variable domain of TCR clone 8070 (TRAV12-3, TRAJ50)
CAMSPKTSYDKVIF

SEQ ID NO: 16140 - protein, 14 aa, Homo sapiens
  CDR3 for beta chain variable domain of TCR clone 8070 (TRBV19, TRBJ1-1)
CASSMGRNAFEAFF

SEQ ID NO: 16141 - protein, 14 aa, Homo sapiens
  CDR3 for alpha chain variable domain of TCR clone 8071 (TRAV2, TRAJ9)
CAVDPNTGGFKTIF

SEQ ID NO: 16142 - protein, 14 aa, Homo sapiens
  CDR3 for beta chain variable domain of TCR clone 8071 (TRBV4-1, TRBJ2-2)
CASSQAVNTGELFF

SEQ ID NO: 16143 - protein, 17 aa, Homo sapiens
  CDR3 for alpha chain variable domain of TCR clone 8072 (TRAV3, TRAJ12)
CAVRDGGRMDSSYKLIF

SEQ ID NO: 16144 - protein, 13 aa, Homo sapiens
  CDR3 for beta chain variable domain of TCR clone 8072 (TRBV7-3, TRBJ1-1)
CASSQDWGAEAFF

SEQ ID NO: 16145 - protein, 14 aa, Homo sapiens
  CDR3 for alpha chain variable domain of TCR clone 8073 (TRAV8-3, TRAJ4)
CAVGAAGGYNKLIF

SEQ ID NO: 16146 - protein, 15 aa, Homo sapiens
  CDR3 for beta chain variable domain of TCR clone 8073 (TRBV9, TRBJ1-6)
CASSVAGTGDSPLHF

SEQ ID NO: 16147 - protein, 14 aa, Homo sapiens
  CDR3 for alpha chain variable domain of TCR clone 8074 (TRAV8-2, TRAJ4)
CVVSPSGGYNKLIF

SEQ ID NO: 16148 - protein, 11 aa, Homo sapiens
  CDR3 for beta chain variable domain of TCR clone 8074 (TRBV29-1, TRBJ2-5)
CSEDRTGTQYF

SEQ ID NO: 16149 - protein, 13 aa, Homo sapiens
  CDR3 for alpha chain variable domain of TCR clone 8075 (TRAV2, TRAJ40)
CAVVSSGTYKYIF

SEQ ID NO: 16150 - protein, 14 aa, Homo sapiens
  CDR3 for beta chain variable domain of TCR clone 8075 (TRBV19, TRBJ2-1)
CASPTFVLSGEQFF

SEQ ID NO: 16151 - protein, 11 aa, Homo sapiens
  CDR3 for alpha chain variable domain of TCR clone 8076 (TRAV12-1, TRAJ34)
CVVNKGRELIF

SEQ ID NO: 16152 - protein, 15 aa, Homo sapiens
  CDR3 for beta chain variable domain of TCR clone 8076 (TRBV10-3, TRBJ2-1)
CAIRNGTSGHNEQFF

SEQ ID NO: 16153 - protein, 14 aa, Homo sapiens
  CDR3 for alpha chain variable domain of TCR clone 8077 (TRAV12-2, TRAJ13)
CAVKKTGGCQKVTF

SEQ ID NO: 16154 - protein, 15 aa, Homo sapiens
  CDR3 for beta chain variable domain of TCR clone 8077 (TRBV27, TRBJ2-1)
CASSNGGGSSNEQFF

SEQ ID NO: 16155 - protein, 14 aa, Homo sapiens
  CDR3 for alpha chain variable domain of TCR clone 8078 (TRAV1-2, TRAJ16)
CAVNRFSDGQKLLF

SEQ ID NO: 16156 - protein, 14 aa, Homo sapiens
  CDR3 for beta chain variable domain of TCR clone 8078 (TRBV20-1, TRBJ2-3)
CSARGGTSTDTQYF

SEQ ID NO: 16157 - protein, 19 aa, Homo sapiens
  CDR3 for alpha chain variable domain of TCR clone 8079 (TRAV2, )
CAVEEDIQNPDPAVYQLRD

SEQ ID NO: 16158 - protein, 14 aa, Homo sapiens
  CDR3 for beta chain variable domain of TCR clone 8079 (TRBV19, TRBJ1-2)
CASNPGQAPYGYTF

SEQ ID NO: 16159 - protein, 13 aa, Homo sapiens
  CDR3 for alpha chain variable domain of TCR clone 8080 (TRAV19, TRAJ57)
CALLQGGSEKLVF

SEQ ID NO: 16160 - protein, 14 aa, Homo sapiens
  CDR3 for beta chain variable domain of TCR clone 8080 (TRBV7-2, TRBJ1-1)
CASSFLTGTTEAFF

SEQ ID NO: 16161 - protein, 14 aa, Homo sapiens
  CDR3 for alpha chain variable domain of TCR clone 8081 (TRAV12-2, TRAJ13)
CAVKKTGGYQNVTF

SEQ ID NO: 16162 - protein, 15 aa, Homo sapiens
  CDR3 for beta chain variable domain of TCR clone 8081 (TRBV27, TRBJ2-1)
CASSNGGGSSNEQFF

SEQ ID NO: 16163 - protein, 13 aa, Homo sapiens
  CDR3 for alpha chain variable domain of TCR clone 8082 (TRAV23/DV6, TRAJ58)
CAASEIGGSRLTF

SEQ ID NO: 16164 - protein, 13 aa, Homo sapiens
  CDR3 for beta chain variable domain of TCR clone 8082 (TRBV3-1, TRBJ1-5)
CASSQFGDQPQHF

SEQ ID NO: 16165 - protein, 13 aa, Homo sapiens
  CDR3 for alpha chain variable domain of TCR clone 8083 (TRAV10, TRAJ45)
CVGSGGGADGLTF

SEQ ID NO: 16166 - protein, 15 aa, Homo sapiens
  CDR3 for beta chain variable domain of TCR clone 8083 (TRBV5-1, TRBJ2-7)
CASSLYPDGGYEQYF

SEQ ID NO: 16167 - protein, 12 aa, Homo sapiens
  CDR3 for alpha chain variable domain of TCR clone 8084 (TRAV8-3, TRAJ26)
CAGDNYGQNFVF

SEQ ID NO: 16168 - protein, 13 aa, Homo sapiens
  CDR3 for beta chain variable domain of TCR clone 8084 (TRBV5-1, TRBJ2-5)
CASSLIPAETQYF

SEQ ID NO: 16169 - protein, 18 aa, Homo sapiens
  CDR3 for alpha chain variable domain of TCR clone 8085 (TRAV12-3, TRAJ52)
CAMSVGGAGGTSYGKLTF

SEQ ID NO: 16170 - protein, 15 aa, Homo sapiens
  CDR3 for beta chain variable domain of TCR clone 8085 (TRBV7-2, TRBJ1-2)
CASSPRAGWNYGYTF

SEQ ID NO: 16171 - protein, 13 aa, Homo sapiens
  CDR3 for alpha chain variable domain of TCR clone 8086 (TRAV3, TRAJ17)
CAVPRAAGNKLTF

SEQ ID NO: 16172 - protein, 15 aa, Homo sapiens
  CDR3 for beta chain variable domain of TCR clone 8086 (TRBV7-2, TRBJ1-1)
CASRSATGWSTEAFF

SEQ ID NO: 16173 - protein, 11 aa, Homo sapiens
  CDR3 for alpha chain variable domain of TCR clone 8087 (TRAV25, TRAJ5)
CRGGGRRALTF

SEQ ID NO: 16174 - protein, 15 aa, Homo sapiens
  CDR3 for beta chain variable domain of TCR clone 8087 (TRBV20-1, TRBJ2-7)
CSARDRVSGMDEQYF

SEQ ID NO: 16175 - protein, 12 aa, Homo sapiens
  CDR3 for alpha chain variable domain of TCR clone 8088 (TRAV3, TRAJ20)
CAVRDPDYKLSF

SEQ ID NO: 16176 - protein, 14 aa, Homo sapiens
  CDR3 for beta chain variable domain of TCR clone 8088 (TRBV11-2, TRBJ2-7)
CASSSTGEGYEQYF

SEQ ID NO: 16177 - protein, 14 aa, Homo sapiens
  CDR3 for alpha chain variable domain of TCR clone 8089 (TRAV1-2, TRAJ16)
CAVNRFSDGQKLLF

SEQ ID NO: 16178 - protein, 12 aa, Homo sapiens
  CDR3 for beta chain variable domain of TCR clone 8089 (TRBV3-1, TRBJ2-2)
CASSLFPGELFF

SEQ ID NO: 16179 - protein, 14 aa, Homo sapiens
  CDR3 for alpha chain variable domain of TCR clone 8090 (TRAV13-1, TRAJ48)
CAASTDFGNEKLTF

SEQ ID NO: 16180 - protein, 14 aa, Homo sapiens
  CDR3 for beta chain variable domain of TCR clone 8090 (TRBV10-3, TRBJ2-5)
CATKGGNNQETQYF

SEQ ID NO: 16181 - protein, 14 aa, Homo sapiens
  CDR3 for alpha chain variable domain of TCR clone 8091 (TRAV12-3, TRAJ42)
CAMNYGGSQGNLIF

SEQ ID NO: 16182 - protein, 16 aa, Homo sapiens
  CDR3 for beta chain variable domain of TCR clone 8091 (TRBV12-4, TRBJ1-5)
CASSSGPRGSNQPQHF

SEQ ID NO: 16183 - protein, 14 aa, Homo sapiens
  CDR3 for alpha chain variable domain of TCR clone 8092 (TRAV12-2, TRAJ17)
CAVLFKAAGNKLTF

SEQ ID NO: 16184 - protein, 13 aa, Homo sapiens
  CDR3 for beta chain variable domain of TCR clone 8092 (TRBV10-3, TRBJ2-7)
CASKLAVNYEQYF

SEQ ID NO: 16185 - protein, 11 aa, Homo sapiens
  CDR3 for alpha chain variable domain of TCR clone 8093 (TRAV2, TRAJ13)
CASGGYQKVTF

SEQ ID NO: 16186 - protein, 15 aa, Homo sapiens
  CDR3 for beta chain variable domain of TCR clone 8093 (TRBV6-3, TRBJ2-3)
RLIHYSVGQADTQYF

SEQ ID NO: 16187 - protein, 16 aa, Homo sapiens
  CDR3 for alpha chain variable domain of TCR clone 8094 (TRAV30, TRAJ24)
CGTEIVDADSWGKFQF

SEQ ID NO: 16188 - protein, 15 aa, Homo sapiens
  CDR3 for beta chain variable domain of TCR clone 8094 (TRBV7-2, TRBJ2-3)
CASSLRGGSTDTQYF

SEQ ID NO: 16189 - protein, 14 aa, Homo sapiens
  CDR3 for alpha chain variable domain of TCR clone 8095 (TRAV9-2, TRAJ9)
CALSDPTGGFKTIF

SEQ ID NO: 16190 - protein, 14 aa, Homo sapiens
  CDR3 for beta chain variable domain of TCR clone 8095 (TRBV20-1, TRBJ2-4)
CSARDRGQGGIQYF

SEQ ID NO: 16191 - protein, 23 aa, Homo sapiens
  CDR3 for alpha chain variable domain of TCR clone 8096 (TRAV26-1, TRAJ38)
CIADNAGNNHIQNPDPAVYQLSD

SEQ ID NO: 16192 - protein, 13 aa, Homo sapiens
  CDR3 for beta chain variable domain of TCR clone 8096 (TRBV20-1, TRBJ1-1)
CSARGGGNTEAFF

SEQ ID NO: 16193 - protein, 14 aa, Homo sapiens
  CDR3 for alpha chain variable domain of TCR clone 8097 (TRAV20, TRAJ29)
CAVQESFRKHTSCL

SEQ ID NO: 16194 - protein, 16 aa, Homo sapiens
  CDR3 for beta chain variable domain of TCR clone 8097 (TRBV7-2, TRBJ2-7)
CASSLDLSGGAYEQYF

SEQ ID NO: 16195 - protein, 21 aa, Homo sapiens
  CDR3 for alpha chain variable domain of TCR clone 8098 (TRAV4, TRAJ39)
CCVLLPRGGAAGGNAGNMLTF

SEQ ID NO: 16196 - protein, 16 aa, Homo sapiens
  CDR3 for beta chain variable domain of TCR clone 8098 (TRBV7-6, TRBJ2-7)
CASSGGTGALSYEQYF

SEQ ID NO: 16197 - protein, 16 aa, Homo sapiens
  CDR3 for alpha chain variable domain of TCR clone 8099 (TRAV26-1, TRAJ23)
CIVRVERYNQGGKLIF

SEQ ID NO: 16198 - protein, 16 aa, Homo sapiens
  CDR3 for beta chain variable domain of TCR clone 8099 (TRBV9, TRBJ1-2)
CASSVDKGGGNYGYTF

SEQ ID NO: 16199 - protein, 12 aa, Homo sapiens
  CDR3 for alpha chain variable domain of TCR clone 8100 (TRAV12-3, TRAJ17)
CAMTLTGNKLTF

SEQ ID NO: 16200 - protein, 11 aa, Homo sapiens
  CDR3 for beta chain variable domain of TCR clone 8100 (TRBV11-2, TRBJ1-1)
CASSINTGAFF

SEQ ID NO: 16201 - protein, 13 aa, Homo sapiens
  CDR3 for alpha chain variable domain of TCR clone 8101 (TRAV12-1, TRAJ39)
CGDDNNAGNMLTF

SEQ ID NO: 16202 - protein, 16 aa, Homo sapiens
  CDR3 for beta chain variable domain of TCR clone 8101 (TRBV7-2, TRBJ1-2)
CASSSNQDRRGHGYTF

SEQ ID NO: 16203 - protein, 14 aa, Homo sapiens
  CDR3 for alpha chain variable domain of TCR clone 8102 (TRAV12-2, TRAJ13)
CAVKKTGGYQKATF

SEQ ID NO: 16204 - protein, 15 aa, Homo sapiens
  CDR3 for beta chain variable domain of TCR clone 8102 (TRBV27, TRBJ2-1)
CASSNGGGSSNEQFF

SEQ ID NO: 16205 - protein, 14 aa, Homo sapiens
  CDR3 for alpha chain variable domain of TCR clone 8103 (TRAV1-1, TRAJ5)
CAVRDGAGRRALTF

SEQ ID NO: 16206 - protein, 14 aa, Homo sapiens
  CDR3 for beta chain variable domain of TCR clone 8103 (TRBV28, TRBJ2-1)
CASSYYTAYNEQFF

SEQ ID NO: 16207 - protein, 11 aa, Homo sapiens
  CDR3 for alpha chain variable domain of TCR clone 8104 (TRAV35, TRAJ34)
CWARNTDKLIF

SEQ ID NO: 16208 - protein, 16 aa, Homo sapiens
  CDR3 for beta chain variable domain of TCR clone 8104 (TRBV12-5, TRBJ2-5)
CASGPRTSGNQETQYF

SEQ ID NO: 16209 - protein, 13 aa, Homo sapiens
  CDR3 for alpha chain variable domain of TCR clone 8105 (TRAV26-1, TRAJ36)
CIVVGTGANNLFF

SEQ ID NO: 16210 - protein, 16 aa, Homo sapiens
  CDR3 for beta chain variable domain of TCR clone 8105 (TRBV10-3, TRBJ2-1)
CAISGVGDGGGGEQFF

SEQ ID NO: 16211 - protein, 18 aa, Homo sapiens
  CDR3 for alpha chain variable domain of TCR clone 8106 (TRAV3, TRAJ32)
CAVRDIRGYGGATNKLIF

SEQ ID NO: 16212 - protein, 10 aa, Homo sapiens
  CDR3 for beta chain variable domain of TCR clone 8106 (TRBV12-4, TRBJ2-2)
CASSLGVRHT

SEQ ID NO: 16213 - protein, 12 aa, Homo sapiens
  CDR3 for alpha chain variable domain of TCR clone 8107 (TRAV8-3, TRAJ20)
CAVGANDYKLSF

SEQ ID NO: 16214 - protein, 16 aa, Homo sapiens
  CDR3 for beta chain variable domain of TCR clone 8107 (TRBV19, TRBJ2-2)
CASRSPGTGATGELFS

SEQ ID NO: 16215 - protein, 14 aa, Homo sapiens
  CDR3 for alpha chain variable domain of TCR clone 8108 (TRAV2, TRAJ9)
CAVEDRSGGFKTIF

SEQ ID NO: 16216 - protein, 13 aa, Homo sapiens
  CDR3 for beta chain variable domain of TCR clone 8108 (TRBV3-1, TRBJ1-1)
CASSPGVITEAFF

SEQ ID NO: 16217 - protein, 14 aa, Homo sapiens
  CDR3 for alpha chain variable domain of TCR clone 8109 (TRAV8-3, TRAJ28)
CAVVPGAGSYQLTF

SEQ ID NO: 16218 - protein, 15 aa, Homo sapiens
  CDR3 for beta chain variable domain of TCR clone 8109 (TRBV6-3, TRBJ2-2)
CASRGMTVDTGELFF

SEQ ID NO: 16219 - protein, 14 aa, Homo sapiens
  CDR3 for alpha chain variable domain of TCR clone 8110 (TRAV8-3, TRAJ39)
CAVGANNAGDMLTF

SEQ ID NO: 16220 - protein, 16 aa, Homo sapiens
  CDR3 for beta chain variable domain of TCR clone 8110 (TRBV6-1, TRBJ2-5)
CASSETLDRGAETQYF

SEQ ID NO: 16221 - protein, 17 aa, Homo sapiens
  CDR3 for alpha chain variable domain of TCR clone 8111 (TRAV23/DV6, TRAJ57)
CAASSTLSQGGSEKLVF

SEQ ID NO: 16222 - protein, 14 aa, Homo sapiens
  CDR3 for beta chain variable domain of TCR clone 8111 (TRBV7-8, TRBJ2-5)
CASSATGGQETQYF

SEQ ID NO: 16223 - protein, 14 aa, Homo sapiens
  CDR3 for alpha chain variable domain of TCR clone 8112 (TRAV1-2, TRAJ16)
CAANRFSDGQKLLF

SEQ ID NO: 16224 - protein, 14 aa, Homo sapiens
  CDR3 for beta chain variable domain of TCR clone 8112 (TRBV7-9, TRBJ2-3)
CASSLEDGTDTQYF

SEQ ID NO: 16225 - protein, 16 aa, Homo sapiens
  CDR3 for alpha chain variable domain of TCR clone 8113 (TRAV21, TRAJ37)
CAVRPRGSSNTSKLIF

SEQ ID NO: 16226 - protein, 16 aa, Homo sapiens
  CDR3 for beta chain variable domain of TCR clone 8113 (TRBV2, TRBJ2-1)
CASSVGGSLSYNEQFF

SEQ ID NO: 16227 - protein, 15 aa, Homo sapiens
  CDR3 for alpha chain variable domain of TCR clone 8114 (TRAV20, TRAJ42)
CAVQATRGSQGNLIF

SEQ ID NO: 16228 - protein, 11 aa, Homo sapiens
  CDR3 for beta chain variable domain of TCR clone 8114 (TRBV12-4, TRBJ2-1)
CASSKFNEQFF

SEQ ID NO: 16229 - protein, 23 aa, Homo sapiens
  CDR3 for alpha chain variable domain of TCR clone 8115 (TRAV26-1, TRAJ38)
CIADNAGNNHIQNPDPAVYQLRD

SEQ ID NO: 16230 - protein, 13 aa, Homo sapiens
  CDR3 for beta chain variable domain of TCR clone 8115 (TRBV20-1, TRBJ1-1)
CSARGGGSTEAFF

SEQ ID NO: 16231 - protein, 16 aa, Homo sapiens
  CDR3 for alpha chain variable domain of TCR clone 8116 (TRAV30, TRAJ24)
CGTEIMDADSWGKFQF

SEQ ID NO: 16232 - protein, 14 aa, Homo sapiens
  CDR3 for beta chain variable domain of TCR clone 8116 (TRBV12-5, TRBJ2-5)
CASGSRTHQETQYF

SEQ ID NO: 16233 - protein, 12 aa, Homo sapiens
  CDR3 for alpha chain variable domain of TCR clone 8117 (TRAV13-2, TRAJ54)
CGAHEGAQKLVF

SEQ ID NO: 16234 - protein, 15 aa, Homo sapiens
  CDR3 for beta chain variable domain of TCR clone 8117 (TRBV27, TRBJ2-7)
CASSPQREGQREQYF

SEQ ID NO: 16235 - protein, 10 aa, Homo sapiens
  CDR3 for alpha chain variable domain of TCR clone 8118 (TRAV12-1, TRAJ41)
CVVPELKFRV

SEQ ID NO: 16236 - protein, 20 aa, Homo sapiens
  CDR3 for beta chain variable domain of TCR clone 8118 (TRBV19, TRBJ2-1)
CASSISRTVTSTRLNNEQFF

SEQ ID NO: 16237 - protein, 14 aa, Homo sapiens
  CDR3 for alpha chain variable domain of TCR clone 8119 (TRAV29/DV5, TRAJ36)
CAARRKTGANNLFF

SEQ ID NO: 16238 - protein, 12 aa, Homo sapiens
  CDR3 for beta chain variable domain of TCR clone 8119 (TRBV12-4, TRBJ2-7)
CASSLGGYEQYF

SEQ ID NO: 16239 - protein, 16 aa, Homo sapiens
  CDR3 for alpha chain variable domain of TCR clone 8120 (TRAV14/DV4, TRAJ53)
CAMREGGGGSNYKLTF

SEQ ID NO: 16240 - protein, 17 aa, Homo sapiens
  CDR3 for beta chain variable domain of TCR clone 8120 (TRBV13, TRBJ2-3)
CASSLSRVAGGRNTQYF

SEQ ID NO: 16241 - protein, 15 aa, Homo sapiens
  CDR3 for alpha chain variable domain of TCR clone 8121 (TRAV27, TRAJ38)
CAARRNAGNNRKLTW

SEQ ID NO: 16242 - protein, 13 aa, Homo sapiens
  CDR3 for beta chain variable domain of TCR clone 8121 (TRBV12-5, TRBJ2-3)
CASGDRQSDTQYF

SEQ ID NO: 16243 - protein, 14 aa, Homo sapiens
  CDR3 for alpha chain variable domain of TCR clone 8122 (TRAV26-1, TRAJ8)
CIVRVDTGFQRLVF

SEQ ID NO: 16244 - protein, 15 aa, Homo sapiens
  CDR3 for beta chain variable domain of TCR clone 8122 (TRBV10-2, TRBJ2-7)
CASWNRGQATYEQYF

SEQ ID NO: 16245 - protein, 16 aa, Homo sapiens
  CDR3 for alpha chain variable domain of TCR clone 8123 (TRAV3, TRAJ37)
CAVRPHGSGNTGKLIF

SEQ ID NO: 16246 - protein, 20 aa, Homo sapiens
  CDR3 for beta chain variable domain of TCR clone 8123 (TRBV28, TRBJ2-1)
CASTPIGRSPGLAGGNEQFF

SEQ ID NO: 16247 - protein, 12 aa, Homo sapiens
  CDR3 for alpha chain variable domain of TCR clone 8124 (TRAV12-3, TRAJ17)
CAMTLTGNKLTF

SEQ ID NO: 16248 - protein, 15 aa, Homo sapiens
  CDR3 for beta chain variable domain of TCR clone 8124 (TRBV20-1, TRBJ2-7)
CSARDRVSGRDEQYF

SEQ ID NO: 16249 - protein, 12 aa, Homo sapiens
  CDR3 for alpha chain variable domain of TCR clone 8125 (TRAV12-3, TRAJ17)
CAMTLTGNKLTF

SEQ ID NO: 16250 - protein, 15 aa, Homo sapiens
  CDR3 for beta chain variable domain of TCR clone 8125 (TRBV20-1, TRBJ2-7)
CSSRDRVSGMDEQYF

SEQ ID NO: 16251 - protein, 14 aa, Homo sapiens
  CDR3 for alpha chain variable domain of TCR clone 8126 (TRAV9-2, TRAJ38)
CALRGAGNNRKLIW

SEQ ID NO: 16252 - protein, 14 aa, Homo sapiens
  CDR3 for beta chain variable domain of TCR clone 8126 (TRBV13, TRBJ2-2)
CASSFQGGAGELFF

SEQ ID NO: 16253 - protein, 16 aa, Homo sapiens
  CDR3 for alpha chain variable domain of TCR clone 8127 (TRAV4, TRAJ22)
CLVGDLYSGSARQLTF

SEQ ID NO: 16254 - protein, 16 aa, Homo sapiens
  CDR3 for beta chain variable domain of TCR clone 8127 (TRBV7-9, TRBJ2-1)
CASSDVAGGSYNERFF

SEQ ID NO: 16255 - protein, 14 aa, Homo sapiens
  CDR3 for alpha chain variable domain of TCR clone 8128 (TRAV1-2, TRAJ16)
CAVNRFSDGQKLLF

SEQ ID NO: 16256 - protein, 15 aa, Homo sapiens
  CDR3 for beta chain variable domain of TCR clone 8128 (TRBV7-2, TRBJ2-2)
CASSTRTGYTGELFF

SEQ ID NO: 16257 - protein, 14 aa, Homo sapiens
  CDR3 for alpha chain variable domain of TCR clone 8129 (TRAV12-2, TRAJ17)
CAVLFKAAGNKLTF

SEQ ID NO: 16258 - protein, 17 aa, Homo sapiens
  CDR3 for beta chain variable domain of TCR clone 8129 (TRBV20-1, TRBJ2-2)
CSASGSGQGGFTGELFF

SEQ ID NO: 16259 - protein, 17 aa, Homo sapiens
  CDR3 for alpha chain variable domain of TCR clone 8130 (TRAV3, TRAJ6)
CAVRDGPRAGGSYIPTF

SEQ ID NO: 16260 - protein, 14 aa, Homo sapiens
  CDR3 for beta chain variable domain of TCR clone 8130 (TRBV27, TRBJ2-2)
CASRPGVNTGELFF

SEQ ID NO: 16261 - protein, 13 aa, Homo sapiens
  CDR3 for alpha chain variable domain of TCR clone 8131 (TRAV21, TRAJ20)
CAVGLRVDYKLSF

SEQ ID NO: 16262 - protein, 16 aa, Homo sapiens
  CDR3 for beta chain variable domain of TCR clone 8131 (TRBV9, TRBJ2-2)
CASSAMGKGNTGELFF

SEQ ID NO: 16263 - protein, 15 aa, Homo sapiens
  CDR3 for alpha chain variable domain of TCR clone 8132 (TRAV35, TRAJ40)
CAGQLGTSGTYKYIF

SEQ ID NO: 16264 - protein, 13 aa, Homo sapiens
  CDR3 for beta chain variable domain of TCR clone 8132 (TRBV7-3, TRBJ2-1)
CQQLSGGTNEQFF

SEQ ID NO: 16265 - protein, 13 aa, Homo sapiens
  CDR3 for alpha chain variable domain of TCR clone 8133 (TRAV21, TRAJ27)
CAARPGNAGKSTF

SEQ ID NO: 16266 - protein, 14 aa, Homo sapiens
  CDR3 for beta chain variable domain of TCR clone 8133 (TRBV7-6, TRBJ2-3)
CASSVGTVTDTQYF

SEQ ID NO: 16267 - protein, 11 aa, Homo sapiens
  CDR3 for alpha chain variable domain of TCR clone 8134 (TRAV12-1, TRAJ41)
CVALSGYALNF

SEQ ID NO: 16268 - protein, 13 aa, Homo sapiens
  CDR3 for beta chain variable domain of TCR clone 8134 (TRBV6-5, TRBJ2-7)
CASSWQGASEQYF

SEQ ID NO: 16269 - protein, 17 aa, Homo sapiens
  CDR3 for alpha chain variable domain of TCR clone 8135 (TRAV3, TRAJ6)
CAVRDGPRAGGSYIPTF

SEQ ID NO: 16270 - protein, 14 aa, Homo sapiens
  CDR3 for beta chain variable domain of TCR clone 8135 (TRBV7-2, TRBJ2-7)
CASSPKTSFYEQHF

SEQ ID NO: 16271 - protein, 15 aa, Homo sapiens
  CDR3 for alpha chain variable domain of TCR clone 8136 (TRAV8-4, TRAJ3)
CAVSEPYSSASKIIF

SEQ ID NO: 16272 - protein, 11 aa, Homo sapiens
  CDR3 for beta chain variable domain of TCR clone 8136 (TRBV29-1, TRBJ2-5)
CSEDRTGTQYF

SEQ ID NO: 16273 - protein, 14 aa, Homo sapiens
  CDR3 for alpha chain variable domain of TCR clone 8137 (TRAV1-2, TRAJ16)
CAVNRFSDGQKLLF

SEQ ID NO: 16274 - protein, 14 aa, Homo sapiens
  CDR3 for beta chain variable domain of TCR clone 8137 (TRBV7-8, TRBJ2-7)
CASSQTQGADEQYF

SEQ ID NO: 16275 - protein, 14 aa, Homo sapiens
  CDR3 for alpha chain variable domain of TCR clone 8138 (TRAV14/DV4, TRAJ22)
CAMSPSGSARQLTF

SEQ ID NO: 16276 - protein, 15 aa, Homo sapiens
  CDR3 for beta chain variable domain of TCR clone 8138 (TRBV2, TRBJ2-3)
CASSERSGHTDTQYF

SEQ ID NO: 16277 - protein, 15 aa, Homo sapiens
  CDR3 for alpha chain variable domain of TCR clone 8139 (TRAV3, TRAJ40)
CAVRDGPGGTYKYIF

SEQ ID NO: 16278 - protein, 16 aa, Homo sapiens
  CDR3 for beta chain variable domain of TCR clone 8139 (TRBV5-1, TRBJ1-1)
CASSSGGNSLNTEAFF

SEQ ID NO: 16279 - protein, 12 aa, Homo sapiens
  CDR3 for alpha chain variable domain of TCR clone 8140 (TRAV27, TRAJ33)
CAGEDSNYQLIW

SEQ ID NO: 16280 - protein, 17 aa, Homo sapiens
  CDR3 for beta chain variable domain of TCR clone 8140 (TRBV7-3, TRBJ1-3)
CASSPLGRGTPGNTIYF

SEQ ID NO: 16281 - protein, 15 aa, Homo sapiens
  CDR3 for alpha chain variable domain of TCR clone 8141 (TRAV12-2, TRAJ53)
CAVNGGGGSNYKLTF

SEQ ID NO: 16282 - protein, 15 aa, Homo sapiens
  CDR3 for beta chain variable domain of TCR clone 8141 (TRBV12-4, TRBJ2-5)
CASSPPTGLQETQYF

SEQ ID NO: 16283 - protein, 14 aa, Homo sapiens
  CDR3 for alpha chain variable domain of TCR clone 8142 (TRAV12-2, TRAJ17)
CAVPFKAAGNKLTF

SEQ ID NO: 16284 - protein, 17 aa, Homo sapiens
  CDR3 for beta chain variable domain of TCR clone 8142 (TRBV20-1, TRBJ2-2)
CSASGSGQGGLTGELFF

SEQ ID NO: 16285 - protein, 13 aa, Homo sapiens
  CDR3 for alpha chain variable domain of TCR clone 8143 (TRAV8-4, TRAJ27)
CAVSPRNAGKSTF

SEQ ID NO: 16286 - protein, 17 aa, Homo sapiens
  CDR3 for beta chain variable domain of TCR clone 8143 (TRBV19, TRBJ2-3)
CASSIDPAGGGTDTQYF

SEQ ID NO: 16287 - protein, 14 aa, Homo sapiens
  CDR3 for alpha chain variable domain of TCR clone 8144 (TRAV1-2, TRAJ8)
CAVREDTGFQKLAF

SEQ ID NO: 16288 - protein, 15 aa, Homo sapiens
  CDR3 for beta chain variable domain of TCR clone 8144 (TRBV6-3, TRBJ2-7)
CASSSPGTVFYEQYF

SEQ ID NO: 16289 - protein, 13 aa, Homo sapiens
  CDR3 for alpha chain variable domain of TCR clone 8145 (TRAV8-4, TRAJ21)
CAVSEYNFNKFYF

SEQ ID NO: 16290 - protein, 12 aa, Homo sapiens
  CDR3 for beta chain variable domain of TCR clone 8145 (TRBV7-9, TRBJ1-5)
CASSSDQAPQHF

SEQ ID NO: 16291 - protein, 14 aa, Homo sapiens
  CDR3 for alpha chain variable domain of TCR clone 8146 (TRAV12-2, TRAJ53)
CAVKGGGSNYKLTF

SEQ ID NO: 16292 - protein, 16 aa, Homo sapiens
  CDR3 for beta chain variable domain of TCR clone 8146 (TRBV20-1, TRBJ1-2)
CSASMGQGVANYGYTF

SEQ ID NO: 16293 - protein, 12 aa, Homo sapiens
  CDR3 for alpha chain variable domain of TCR clone 8147 (TRAV12-3, TRAJ17)
CAMTLTGNKLTF

SEQ ID NO: 16294 - protein, 20 aa, Homo sapiens
  CDR3 for beta chain variable domain of TCR clone 8147 (TRBV28, TRBJ2-1)
CASTPIGRSPGLAGGNEQFF

SEQ ID NO: 16295 - protein, 15 aa, Homo sapiens
  CDR3 for alpha chain variable domain of TCR clone 8148 (TRAV17, TRAJ57)
CATGPSQGGSEKLVF

SEQ ID NO: 16296 - protein, 15 aa, Homo sapiens
  CDR3 for beta chain variable domain of TCR clone 8148 (TRBV19, TRBJ2-4)
CASRGPRRGENIQYF

SEQ ID NO: 16297 - protein, 15 aa, Homo sapiens
  CDR3 for alpha chain variable domain of TCR clone 8149 (TRAV29/DV5, TRAJ53)
CAVSSSGGSNYKLTF

SEQ ID NO: 16298 - protein, 17 aa, Homo sapiens
  CDR3 for beta chain variable domain of TCR clone 8149 (TRBV4-1, TRBJ1-6)
CASSQDRNRDYNSPLHF

SEQ ID NO: 16299 - protein, 15 aa, Homo sapiens
  CDR3 for alpha chain variable domain of TCR clone 8150 (TRAV17, TRAJ28)
CATVYSGAGSYQLTF

SEQ ID NO: 16300 - protein, 12 aa, Homo sapiens
  CDR3 for beta chain variable domain of TCR clone 8150 (TRBV7-2, TRBJ2-5)
CASSLAKETQYF

SEQ ID NO: 16301 - protein, 14 aa, Homo sapiens
  CDR3 for alpha chain variable domain of TCR clone 8151 (TRAV2, TRAJ37)
CAVDFTSNTGKLIF

SEQ ID NO: 16302 - protein, 16 aa, Homo sapiens
  CDR3 for beta chain variable domain of TCR clone 8151 (TRBV19, TRBJ2-1)
CASSKAGPSSYNEQFF

SEQ ID NO: 16303 - protein, 15 aa, Homo sapiens
  CDR3 for alpha chain variable domain of TCR clone 8152 (TRAV27, TRAJ38)
CAARRNAGNNRKLIW

SEQ ID NO: 16304 - protein, 14 aa, Homo sapiens
  CDR3 for beta chain variable domain of TCR clone 8152 (TRBV9, TRBJ2-7)
CASSVGVGSYEQYF

SEQ ID NO: 16305 - protein, 17 aa, Homo sapiens
  CDR3 for alpha chain variable domain of TCR clone 8153 (TRAV3, TRAJ6)
CAVRDGPRAGGSYIPTF

SEQ ID NO: 16306 - protein, 14 aa, Homo sapiens
  CDR3 for beta chain variable domain of TCR clone 8153 (TRBV7-2, TRBJ2-7)
CASSPKTRFYEQYF

SEQ ID NO: 16307 - protein, 12 aa, Homo sapiens
  CDR3 for alpha chain variable domain of TCR clone 8154 (TRAV12-1, TRAJ40)
CVVSSGTYKYIF

SEQ ID NO: 16308 - protein, 16 aa, Homo sapiens
  CDR3 for beta chain variable domain of TCR clone 8154 (TRBV5-4, TRBJ2-3)
CASSFGAGEGTDTQYF

SEQ ID NO: 16309 - protein, 14 aa, Homo sapiens
  CDR3 for alpha chain variable domain of TCR clone 8155 (TRAV1-2, TRAJ8)
CAVREDTGFQKLVF

SEQ ID NO: 16310 - protein, 13 aa, Homo sapiens
  CDR3 for beta chain variable domain of TCR clone 8155 (TRBV7-7, TRBJ2-3)
CASSLSRADTQYF

SEQ ID NO: 16311 - protein, 12 aa, Homo sapiens
  CDR3 for alpha chain variable domain of TCR clone 8156 (TRAV3, TRAJ20)
CAVRDPDYKLSF

SEQ ID NO: 16312 - protein, 15 aa, Homo sapiens
  CDR3 for beta chain variable domain of TCR clone 8156 (TRBV6-3, TRBJ2-7)
CASSSPGTVFYEQYF

SEQ ID NO: 16313 - protein, 12 aa, Homo sapiens
  CDR3 for alpha chain variable domain of TCR clone 8157 (TRAV2, TRAJ9)
CAVGAGGFKTIF

SEQ ID NO: 16314 - protein, 16 aa, Homo sapiens
  CDR3 for beta chain variable domain of TCR clone 8157 (TRBV13, TRBJ2-2)
CASSPRTGGHTGELFF

SEQ ID NO: 16315 - protein, 17 aa, Homo sapiens
  CDR3 for alpha chain variable domain of TCR clone 8158 (TRAV3, TRAJ6)
CAVRDGPRSGGSYIPTF

SEQ ID NO: 16316 - protein, 14 aa, Homo sapiens
  CDR3 for beta chain variable domain of TCR clone 8158 (TRBV7-2, TRBJ2-7)
CASSPKTSFYEQYF

SEQ ID NO: 16317 - protein, 16 aa, Homo sapiens
  CDR3 for alpha chain variable domain of TCR clone 8159 (TRAV26-2, TRAJ48)
CILRPPFNFGNEKLTF

SEQ ID NO: 16318 - protein, 14 aa, Homo sapiens
  CDR3 for beta chain variable domain of TCR clone 8159 (TRBV25-1, TRBJ1-1)
CASTHLGGNTEAFF

SEQ ID NO: 16319 - protein, 14 aa, Homo sapiens
  CDR3 for alpha chain variable domain of TCR clone 8160 (TRAV9-2, TRAJ39)
CALYIYNAGNMLTF

SEQ ID NO: 16320 - protein, 14 aa, Homo sapiens
  CDR3 for beta chain variable domain of TCR clone 8160 (TRBV20-1, TRBJ1-1)
CSAQTRIGGTEAFF

SEQ ID NO: 16321 - protein, 11 aa, Homo sapiens
  CDR3 for alpha chain variable domain of TCR clone 8161 (TRAV2, TRAJ13)
CASGGYQKVTF

SEQ ID NO: 16322 - protein, 15 aa, Homo sapiens
  CDR3 for beta chain variable domain of TCR clone 8161 (TRBV5-1, TRBJ2-7)
CASSLDLTSSYEQYF

SEQ ID NO: 16323 - protein, 11 aa, Homo sapiens
  CDR3 for alpha chain variable domain of TCR clone 8162 (TRAV3, TRAJ21)
CAVGNFNKFYF

SEQ ID NO: 16324 - protein, 16 aa, Homo sapiens
  CDR3 for beta chain variable domain of TCR clone 8162 (TRBV19, TRBJ2-1)
CASSKAGPSSYNERFF

SEQ ID NO: 16325 - protein, 14 aa, Homo sapiens
  CDR3 for alpha chain variable domain of TCR clone 8163 (TRAV13-1, TRAJ45)
VSVPEGGGADGLTF

SEQ ID NO: 16326 - protein, 14 aa, Homo sapiens
  CDR3 for beta chain variable domain of TCR clone 8163 (TRBV27, TRBJ1-1)
CASSPQGKRAEAFF

SEQ ID NO: 16327 - protein, 18 aa, Homo sapiens
  CDR3 for alpha chain variable domain of TCR clone 8164 (TRAV21, TRAJ52)
CAVRPSPAGGTSYVKLTF

SEQ ID NO: 16328 - protein, 17 aa, Homo sapiens
  CDR3 for beta chain variable domain of TCR clone 8164 (TRBV13, TRBJ2-3)
CASSLSRVAGGRNTQYF

SEQ ID NO: 16329 - protein, 13 aa, Homo sapiens
  CDR3 for alpha chain variable domain of TCR clone 8165 (TRAV29/DV5, TRAJ40)
CAASEAGTYKYIF

SEQ ID NO: 16330 - protein, 18 aa, Homo sapiens
  CDR3 for beta chain variable domain of TCR clone 8165 (TRBV14, TRBJ2-1)
CASSQEYGGAYLRGEQFF

SEQ ID NO: 16331 - protein, 16 aa, Homo sapiens
  CDR3 for alpha chain variable domain of TCR clone 8166 (TRAV30, TRAJ24)
CGTEIVDADSWGKFQF

SEQ ID NO: 16332 - protein, 13 aa, Homo sapiens
  CDR3 for beta chain variable domain of TCR clone 8166 (TRBV7-9, TRBJ2-3)
CASSPGSTDTQYF

SEQ ID NO: 16333 - protein, 13 aa, Homo sapiens
  CDR3 for alpha chain variable domain of TCR clone 8167 (TRAV13-2, TRAJ48)
CAEMDFGNEKLTF

SEQ ID NO: 16334 - protein, 15 aa, Homo sapiens
  CDR3 for beta chain variable domain of TCR clone 8167 (TRBV7-9, TRBJ1-6)
CASSSPGRGNSPLLF

SEQ ID NO: 16335 - protein, 14 aa, Homo sapiens
  CDR3 for alpha chain variable domain of TCR clone 8168 (TRAV20, TRAJ44)
CAVQDTGTASKLTF

SEQ ID NO: 16336 - protein, 13 aa, Homo sapiens
  CDR3 for beta chain variable domain of TCR clone 8168 (TRBV29-1, TRBJ1-3)
CSAGTGRGDTIYF

SEQ ID NO: 16337 - protein, 12 aa, Homo sapiens
  CDR3 for alpha chain variable domain of TCR clone 8169 (TRAV13-1, TRAJ22)
DLSSGSARQLTF

SEQ ID NO: 16338 - protein, 13 aa, Homo sapiens
  CDR3 for beta chain variable domain of TCR clone 8169 (TRBV7-7, TRBJ1-5)
CASSPGKNQPQHF

SEQ ID NO: 16339 - protein, 14 aa, Homo sapiens
  CDR3 for alpha chain variable domain of TCR clone 8170 (TRAV29/DV5, TRAJ36)
CAARRKTGANNLFF

SEQ ID NO: 16340 - protein, 13 aa, Homo sapiens
  CDR3 for beta chain variable domain of TCR clone 8170 (TRBV19, TRBJ2-7)
CASSIDRTYEQYF

SEQ ID NO: 16341 - protein, 16 aa, Homo sapiens
  CDR3 for alpha chain variable domain of TCR clone 8171 (TRAV13-1, TRAJ39)
CAASIVMQATCSPLEG

SEQ ID NO: 16342 - protein, 16 aa, Homo sapiens
  CDR3 for beta chain variable domain of TCR clone 8171 (TRBV20-1, TRBJ1-4)
CSAPGQGLLTNEKLFF

SEQ ID NO: 16343 - protein, 14 aa, Homo sapiens
  CDR3 for alpha chain variable domain of TCR clone 8172 (TRAV21, TRAJ35)
CAVMPIGFGNVLHC

SEQ ID NO: 16344 - protein, 12 aa, Homo sapiens
  CDR3 for beta chain variable domain of TCR clone 8172 (TRBV7-9, TRBJ2-7)
CASSSKREEQYF

SEQ ID NO: 16345 - protein, 14 aa, Homo sapiens
  CDR3 for alpha chain variable domain of TCR clone 8173 (TRAV1-2, TRAJ8)
CAVREDTGFQELVF

SEQ ID NO: 16346 - protein, 15 aa, Homo sapiens
  CDR3 for beta chain variable domain of TCR clone 8173 (TRBV6-3, TRBJ2-7)
CASSSPGTVFYEQYF

SEQ ID NO: 16347 - protein, 13 aa, Homo sapiens
  CDR3 for alpha chain variable domain of TCR clone 8174 (TRAV6, TRAJ12)
CALDPYSSYKLIF

SEQ ID NO: 16348 - protein, 15 aa, Homo sapiens
  CDR3 for beta chain variable domain of TCR clone 8174 (TRBV7-3, TRBJ2-1)
CASSLAGAGADEQFF

SEQ ID NO: 16349 - protein, 12 aa, Homo sapiens
  CDR3 for alpha chain variable domain of TCR clone 8175 (TRAV13-1, TRAJ43)
CAASIGDNDMRF

SEQ ID NO: 16350 - protein, 17 aa, Homo sapiens
  CDR3 for beta chain variable domain of TCR clone 8175 (TRBV11-3, TRBJ2-3)
CASSPGSSGGRTDTQYF

SEQ ID NO: 16351 - protein, 11 aa, Homo sapiens
  CDR3 for alpha chain variable domain of TCR clone 8176 (TRAV3, TRAJ21)
CAVGNFNKFYF

SEQ ID NO: 16352 - protein, 14 aa, Homo sapiens
  CDR3 for beta chain variable domain of TCR clone 8176 (TRBV11-2, TRBJ1-2)
CASSLGTANYGYTF

SEQ ID NO: 16353 - protein, 18 aa, Homo sapiens
  CDR3 for alpha chain variable domain of TCR clone 8177 (TRAV21, TRAJ52)
CAVRPSPAGGTSYGKLTF

SEQ ID NO: 16354 - protein, 17 aa, Homo sapiens
  CDR3 for beta chain variable domain of TCR clone 8177 (TRBV13, TRBJ2-3)
CASSLSRVAGGEEYAVF

SEQ ID NO: 16355 - protein, 17 aa, Homo sapiens
  CDR3 for alpha chain variable domain of TCR clone 8178 (TRAV3, TRAJ6)
CAVRDGPRAGGSYIPTL

SEQ ID NO: 16356 - protein, 15 aa, Homo sapiens
  CDR3 for beta chain variable domain of TCR clone 8178 (TRBV7-6, TRBJ2-3)
CASSPIIYSTDTQYF

SEQ ID NO: 16357 - protein, 13 aa, Homo sapiens
  CDR3 for alpha chain variable domain of TCR clone 8179 (TRAV12-3, TRAJ47)
CAMKKEYGNKLVF

SEQ ID NO: 16358 - protein, 16 aa, Homo sapiens
  CDR3 for beta chain variable domain of TCR clone 8179 (TRBV5-4, TRBJ2-3)
CASSFGAGEGTDTQYF

SEQ ID NO: 16359 - protein, 18 aa, Homo sapiens
  CDR3 for alpha chain variable domain of TCR clone 8180 (TRAV8-4, TRAJ52)
CAVTRANAGGTSYRKLTF

SEQ ID NO: 16360 - protein, 20 aa, Homo sapiens
  CDR3 for beta chain variable domain of TCR clone 8180 (TRBV19, TRBJ2-1)
CASSISRTVTSTRLNNEQFF

SEQ ID NO: 16361 - protein, 20 aa, Homo sapiens
  CDR3 for alpha chain variable domain of TCR clone 8181 (TRAV27, TRAJ41)
CAVRTQIPDIQNPDPAVYQL

SEQ ID NO: 16362 - protein, 16 aa, Homo sapiens
  CDR3 for beta chain variable domain of TCR clone 8181 (TRBV5-1, TRBJ2-3)
CASSLGLAVYTDTQYF

SEQ ID NO: 16363 - protein, 13 aa, Homo sapiens
  CDR3 for alpha chain variable domain of TCR clone 8182 (TRAV8-3, TRAJ28)
CAVGAVGSYQLTF

SEQ ID NO: 16364 - protein, 15 aa, Homo sapiens
  CDR3 for beta chain variable domain of TCR clone 8182 (TRBV7-9, TRBJ1-5)
CASSQGHQPNQTQHF

SEQ ID NO: 16365 - protein, 15 aa, Homo sapiens
  CDR3 for alpha chain variable domain of TCR clone 8183 (TRAV2, TRAJ9)
CAVAALNTGGFKTIF

SEQ ID NO: 16366 - protein, 14 aa, Homo sapiens
  CDR3 for beta chain variable domain of TCR clone 8183 (TRBV7-2, TRBJ1-1)
CASSFLTGTTEAFF

SEQ ID NO: 16367 - protein, 13 aa, Homo sapiens
  CDR3 for alpha chain variable domain of TCR clone 8184 (TRAV21, TRAJ27)
CAARPGNAGKSTF

SEQ ID NO: 16368 - protein, 15 aa, Homo sapiens
  CDR3 for beta chain variable domain of TCR clone 8184 (TRBV9, TRBJ1-6)
CASSVAGTGDSPLHF

SEQ ID NO: 16369 - protein, 18 aa, Homo sapiens
  CDR3 for alpha chain variable domain of TCR clone 8185 (TRAV21, TRAJ52)
CAVRPSPAGGTSYGKPTF

SEQ ID NO: 16370 - protein, 17 aa, Homo sapiens
  CDR3 for beta chain variable domain of TCR clone 8185 (TRBV13, TRBJ2-3)
CASSLSRVAGGRNTQYF

SEQ ID NO: 16371 - protein, 14 aa, Homo sapiens
  CDR3 for alpha chain variable domain of TCR clone 8186 (TRAV23/DV6, TRAJ4)
CAAPSSGGYNKLIF

SEQ ID NO: 16372 - protein, 14 aa, Homo sapiens
  CDR3 for beta chain variable domain of TCR clone 8186 (TRBV20-1, TRBJ2-7)
CSAKTGTGGYEQYF

SEQ ID NO: 16373 - protein, 15 aa, Homo sapiens
  CDR3 for alpha chain variable domain of TCR clone 8187 (TRAV30, TRAJ57)
CGTAIPQGGSEKLVF

SEQ ID NO: 16374 - protein, 17 aa, Homo sapiens
  CDR3 for beta chain variable domain of TCR clone 8187 (TRBV11-2, TRBJ2-1)
CASSLYPPGVEYNEQFF

SEQ ID NO: 16375 - protein, 16 aa, Homo sapiens
  CDR3 for alpha chain variable domain of TCR clone 8188 (TRAV21, TRAJ37)
CAVRTAGFSNTGKLIF

SEQ ID NO: 16376 - protein, 13 aa, Homo sapiens
  CDR3 for beta chain variable domain of TCR clone 8188 (TRBV7-9, TRBJ2-5)
CASLPSGRETQYF

SEQ ID NO: 16377 - protein, 14 aa, Homo sapiens
  CDR3 for alpha chain variable domain of TCR clone 8189 (TRAV1-2, TRAJ8)
CAVREDTGFQKLLF

SEQ ID NO: 16378 - protein, 15 aa, Homo sapiens
  CDR3 for beta chain variable domain of TCR clone 8189 (TRBV6-3, TRBJ2-7)
CASSSPGTVFYEQYF

SEQ ID NO: 16379 - protein, 14 aa, Homo sapiens
  CDR3 for alpha chain variable domain of TCR clone 8190 (TRAV27, TRAJ13)
CRSSNSGGYQKVTF

SEQ ID NO: 16380 - protein, 10 aa, Homo sapiens
  CDR3 for beta chain variable domain of TCR clone 8190 (TRBV2, TRBJ2-5)
CASSAATQYF

SEQ ID NO: 16381 - protein, 15 aa, Homo sapiens
  CDR3 for alpha chain variable domain of TCR clone 8191 (TRAV8-2, TRAJ40)
CVVLGTTSGTYKYIF

SEQ ID NO: 16382 - protein, 14 aa, Homo sapiens
  CDR3 for beta chain variable domain of TCR clone 8191 (TRBV19, TRBJ2-1)
CASPTFVLSGEQFF

SEQ ID NO: 16383 - protein, 14 aa, Homo sapiens
  CDR3 for alpha chain variable domain of TCR clone 8192 (TRAV3, TRAJ24)
CAVILTDSWGKLQF

SEQ ID NO: 16384 - protein, 12 aa, Homo sapiens
  CDR3 for beta chain variable domain of TCR clone 8192 (TRBV7-3, TRBJ1-1)
CASSHGGTEAFF

SEQ ID NO: 16385 - protein, 12 aa, Homo sapiens
  CDR3 for alpha chain variable domain of TCR clone 8193 (TRAV2, TRAJ9)
CAVGAGGFKTIF

SEQ ID NO: 16386 - protein, 16 aa, Homo sapiens
  CDR3 for beta chain variable domain of TCR clone 8193 (TRBV6-1, TRBJ1-3)
CASVQGGVETPYILER

SEQ ID NO: 16387 - protein, 10 aa, Homo sapiens
  CDR3 for alpha chain variable domain of TCR clone 8194 (TRAV25, TRAJ20)
CAGNDYKLSF

SEQ ID NO: 16388 - protein, 14 aa, Homo sapiens
  CDR3 for beta chain variable domain of TCR clone 8194 (TRBV19, TRBJ2-1)
CASSKDRGQDEQFF

SEQ ID NO: 16389 - protein, 17 aa, Homo sapiens
  CDR3 for alpha chain variable domain of TCR clone 8195 (TRAV12-1, TRAJ8)
CVVNPKRVNTGFQKLVF

SEQ ID NO: 16390 - protein, 14 aa, Homo sapiens
  CDR3 for beta chain variable domain of TCR clone 8195 (TRBV3-1, TRBJ2-7)
CASSRTSGKEEQYF

SEQ ID NO: 16391 - protein, 11 aa, Homo sapiens
  CDR3 for alpha chain variable domain of TCR clone 8196 (TRAV3, TRAJ21)
CAVGNFNKPYF

SEQ ID NO: 16392 - protein, 16 aa, Homo sapiens
  CDR3 for beta chain variable domain of TCR clone 8196 (TRBV19, TRBJ2-1)
CASSKAGPSSYNEQFF

SEQ ID NO: 16393 - protein, 11 aa, Homo sapiens
  CDR3 for alpha chain variable domain of TCR clone 8197 (TRAV1-1, TRAJ23)
FAVRQGGKLIF

SEQ ID NO: 16394 - protein, 20 aa, Homo sapiens
  CDR3 for beta chain variable domain of TCR clone 8197 (TRBV7-8, TRBJ2-2)
CASSHLFPGPTIHITGELFF

SEQ ID NO: 16395 - protein, 13 aa, Homo sapiens
  CDR3 for alpha chain variable domain of TCR clone 8198 (TRAV12-1, TRAJ16)
CVVSTRNGQKLLF

SEQ ID NO: 16396 - protein, 19 aa, Homo sapiens
  CDR3 for beta chain variable domain of TCR clone 8198 (TRBV6-1, TRBJ2-5)
CASSRFGAGGPGLEETQYF

SEQ ID NO: 16397 - protein, 12 aa, Homo sapiens
  CDR3 for alpha chain variable domain of TCR clone 8199 (TRAV13-1, TRAJ21)
CAAKEGFNKFYF

SEQ ID NO: 16398 - protein, 17 aa, Homo sapiens
  CDR3 for beta chain variable domain of TCR clone 8199 (TRBV20-1, TRBJ2-2)
CSASGSGQGGLTGELFF

SEQ ID NO: 16399 - protein, 13 aa, Homo sapiens
  CDR3 for alpha chain variable domain of TCR clone 8200 (TRAV3, TRAJ15)
CAVRDQAGTALIF

SEQ ID NO: 16400 - protein, 17 aa, Homo sapiens
  CDR3 for beta chain variable domain of TCR clone 8200 (TRBV28, TRBJ2-5)
CASSTPEGDALQETQYF

SEQ ID NO: 16401 - protein, 12 aa, Homo sapiens
  CDR3 for alpha chain variable domain of TCR clone 8201 (TRAV8-6, TRAJ22)
CAVNPGTRQLTF

SEQ ID NO: 16402 - protein, 13 aa, Homo sapiens
  CDR3 for beta chain variable domain of TCR clone 8201 (TRBV7-2, TRBJ2-7)
CASRTSSSWEQYF

SEQ ID NO: 16403 - protein, 14 aa, Homo sapiens
  CDR3 for alpha chain variable domain of TCR clone 8202 (TRAV34, TRAJ44)
CGADGTGTASKLTF

SEQ ID NO: 16404 - protein, 20 aa, Homo sapiens
  CDR3 for beta chain variable domain of TCR clone 8202 (TRBV7-9, TRBJ1-5)
CISVSEAGQGAPYSNQPQHF

SEQ ID NO: 16405 - protein, 12 aa, Homo sapiens
  CDR3 for alpha chain variable domain of TCR clone 8203 (TRAV12-2, TRAJ7)
CAVMRGNNRLAF

SEQ ID NO: 16406 - protein, 15 aa, Homo sapiens
  CDR3 for beta chain variable domain of TCR clone 8203 (TRBV2, TRBJ2-1)
CASSELAGGYNEQFF

SEQ ID NO: 16407 - protein, 11 aa, Homo sapiens
  CDR3 for alpha chain variable domain of TCR clone 8204 (TRAV1-1, TRAJ23)
CAVRQGGKLIF

SEQ ID NO: 16408 - protein, 15 aa, Homo sapiens
  CDR3 for beta chain variable domain of TCR clone 8204 (TRBV5-1, TRBJ2-1)
CASSPPRAPYNEQFF

SEQ ID NO: 16409 - protein, 16 aa, Homo sapiens
  CDR3 for alpha chain variable domain of TCR clone 8205 (TRAV1-1, TRAJ31)
CLLLLRCEANNARLMF

SEQ ID NO: 16410 - protein, 13 aa, Homo sapiens
  CDR3 for beta chain variable domain of TCR clone 8205 (TRBV19, TRBJ1-5)
CASSGGRNQPQHF

SEQ ID NO: 16411 - protein, 12 aa, Homo sapiens
  CDR3 for alpha chain variable domain of TCR clone 8206 (TRAV13-2, TRAJ23)
CAERHRGGKLIF

SEQ ID NO: 16412 - protein, 14 aa, Homo sapiens
  CDR3 for beta chain variable domain of TCR clone 8206 (TRBV19, TRBJ2-1)
CASPTFVLSGEQFF

SEQ ID NO: 16413 - protein, 18 aa, Homo sapiens
  CDR3 for alpha chain variable domain of TCR clone 8207 (TRAV26-2, TRAJ54)
CILRDVEVGIQGAQKLVF

SEQ ID NO: 16414 - protein, 15 aa, Homo sapiens
  CDR3 for beta chain variable domain of TCR clone 8207 (TRBV29-1, TRBJ2-1)
CSVPTGLALYNEQFF

SEQ ID NO: 16415 - protein, 11 aa, Homo sapiens
  CDR3 for alpha chain variable domain of TCR clone 8208 (TRAV12-3, TRAJ43)
CAMSVSNDVRF

SEQ ID NO: 16416 - protein, 13 aa, Homo sapiens
  CDR3 for beta chain variable domain of TCR clone 8208 (TRBV20-1, TRBJ1-1)
CSAPLGGGTEAFF

SEQ ID NO: 16417 - protein, 15 aa, Homo sapiens
  CDR3 for alpha chain variable domain of TCR clone 8209 (TRAV13-1, TRAJ57)
CAASNTQGGSEKLVF

SEQ ID NO: 16418 - protein, 13 aa, Homo sapiens
  CDR3 for beta chain variable domain of TCR clone 8209 (TRBV7-6, TRBJ1-5)
CASSQGPNRPQHF

SEQ ID NO: 16419 - protein, 14 aa, Homo sapiens
  CDR3 for alpha chain variable domain of TCR clone 8210 (TRAV1-2, TRAJ8)
CAVREDTGFQTLVF

SEQ ID NO: 16420 - protein, 15 aa, Homo sapiens
  CDR3 for beta chain variable domain of TCR clone 8210 (TRBV6-3, TRBJ2-7)
CASSSPGTVFYEQYF

SEQ ID NO: 16421 - protein, 12 aa, Homo sapiens
  CDR3 for alpha chain variable domain of TCR clone 8211 (TRAV12-3, TRAJ17)
CAMTLPGNKLTF

SEQ ID NO: 16422 - protein, 15 aa, Homo sapiens
  CDR3 for beta chain variable domain of TCR clone 8211 (TRBV20-1, TRBJ2-7)
CSARDRVSGMDEQYF

SEQ ID NO: 16423 - protein, 13 aa, Homo sapiens
  CDR3 for alpha chain variable domain of TCR clone 8212 (TRAV20, TRAJ37)
CAGCSSSTGKLIF

SEQ ID NO: 16424 - protein, 11 aa, Homo sapiens
  CDR3 for beta chain variable domain of TCR clone 8212 (TRBV12-4, TRBJ2-3)
CASTATDTQYF

SEQ ID NO: 16425 - protein, 16 aa, Homo sapiens
  CDR3 for alpha chain variable domain of TCR clone 8213 (TRAV26-1, TRAJ53)
CIVRVAMGGSNYKLTF

SEQ ID NO: 16426 - protein, 14 aa, Homo sapiens
  CDR3 for beta chain variable domain of TCR clone 8213 (TRBV6-1, TRBJ1-3)
CASVQGGGGNTIYF

SEQ ID NO: 16427 - protein, 13 aa, Homo sapiens
  CDR3 for alpha chain variable domain of TCR clone 8214 (TRAV21, TRAJ57)
CAVTQGGSEKLVL

SEQ ID NO: 16428 - protein, 16 aa, Homo sapiens
  CDR3 for beta chain variable domain of TCR clone 8214 (TRBV29-1, TRBJ2-7)
CSVEDAEDGTAYEQYF

SEQ ID NO: 16429 - protein, 14 aa, Homo sapiens
  CDR3 for alpha chain variable domain of TCR clone 8215 (TRAV29/DV5, TRAJ36)
CAARRKTGANNLFF

SEQ ID NO: 16430 - protein, 13 aa, Homo sapiens
  CDR3 for beta chain variable domain of TCR clone 8215 (TRBV15, TRBJ1-2)
CATSMTANYGYTF

SEQ ID NO: 16431 - protein, 22 aa, Homo sapiens
  CDR3 for alpha chain variable domain of TCR clone 8216 (TRAV13-2, )
CAEILSIPDIQNPDPAVYQLRD

SEQ ID NO: 16432 - protein, 11 aa, Homo sapiens
  CDR3 for beta chain variable domain of TCR clone 8216 (TRBV20-1, TRBJ2-7)
CSARLSYEQYF

SEQ ID NO: 16433 - protein, 18 aa, Homo sapiens
  CDR3 for alpha chain variable domain of TCR clone 8217 (TRAV21, TRAJ52)
CAVRPSPAGGTSYGKLTF

SEQ ID NO: 16434 - protein, 15 aa, Homo sapiens
  CDR3 for beta chain variable domain of TCR clone 8217 (TRBV6-6, TRBJ2-7)
CASSCSYGGSYEQYF

SEQ ID NO: 16435 - protein, 12 aa, Homo sapiens
  CDR3 for alpha chain variable domain of TCR clone 8218 (TRAV12-2, TRAJ10)
WGVTGGGNKLTF

SEQ ID NO: 16436 - protein, 15 aa, Homo sapiens
  CDR3 for beta chain variable domain of TCR clone 8218 (TRBV27, TRBJ2-1)
CASSNGGGSSNEQFF

SEQ ID NO: 16437 - protein, 14 aa, Homo sapiens
  CDR3 for alpha chain variable domain of TCR clone 8219 (TRAV26-1, TRAJ34)
CIVRVAYNTDKLIF

SEQ ID NO: 16438 - protein, 19 aa, Homo sapiens
  CDR3 for beta chain variable domain of TCR clone 8219 (TRBV25-1, TRBJ2-2)
CAILVYRVDRGRKTGELFF

SEQ ID NO: 16439 - protein, 15 aa, Homo sapiens
  CDR3 for alpha chain variable domain of TCR clone 8220 (TRAV8-3, TRAJ45)
CASSYSGGGADGFTF

SEQ ID NO: 16440 - protein, 13 aa, Homo sapiens
  CDR3 for beta chain variable domain of TCR clone 8220 (TRBV10-3, TRBJ2-7)
CASKLAVNYEQYF

SEQ ID NO: 16441 - protein, 20 aa, Homo sapiens
  CDR3 for alpha chain variable domain of TCR clone 8221 (TRAV4, TRAJ29)
CCVLLPRGCVPFSGNTPLVF

SEQ ID NO: 16442 - protein, 12 aa, Homo sapiens
  CDR3 for beta chain variable domain of TCR clone 8221 (TRBV6-1, TRBJ2-7)
CASSDYSYEQYF

SEQ ID NO: 16443 - protein, 16 aa, Homo sapiens
  CDR3 for alpha chain variable domain of TCR clone 8222 (TRAV30, TRAJ24)
CGTEIVDADSWGKFQF

SEQ ID NO: 16444 - protein, 13 aa, Homo sapiens
  CDR3 for beta chain variable domain of TCR clone 8222 (TRBV7-7, TRBJ1-1)
CASSLGANTEAFF

SEQ ID NO: 16445 - protein, 11 aa, Homo sapiens
  CDR3 for alpha chain variable domain of TCR clone 8223 (TRAV2, TRAJ13)
CASGGYQKVTF

SEQ ID NO: 16446 - protein, 13 aa, Homo sapiens
  CDR3 for beta chain variable domain of TCR clone 8223 (TRBV4-2, TRBJ1-1)
CASSQAGNTEAFF

SEQ ID NO: 16447 - protein, 15 aa, Homo sapiens
  CDR3 for alpha chain variable domain of TCR clone 8224 (TRAV2, TRAJ42)
CAVEGYGGSQGNLIF

SEQ ID NO: 16448 - protein, 14 aa, Homo sapiens
  CDR3 for beta chain variable domain of TCR clone 8224 (TRBV11-3, TRBJ2-7)
CASSPDRNTYEQYF

SEQ ID NO: 16449 - protein, 15 aa, Homo sapiens
  CDR3 for alpha chain variable domain of TCR clone 8225 (TRAV14/DV4, TRAJ22)
CAMSRLSGSARQLTF

SEQ ID NO: 16450 - protein, 15 aa, Homo sapiens
  CDR3 for beta chain variable domain of TCR clone 8225 (TRBV28, TRBJ2-5)
CASSFRQGALETQYF

SEQ ID NO: 16451 - protein, 16 aa, Homo sapiens
  CDR3 for alpha chain variable domain of TCR clone 8226 (TRAV23/DV6, TRAJ57)
CAASSTLSQGGSEKLF

SEQ ID NO: 16452 - protein, 14 aa, Homo sapiens
  CDR3 for beta chain variable domain of TCR clone 8226 (TRBV25-1, TRBJ1-1)
CASTHLGGNTEAFF

SEQ ID NO: 16453 - protein, 11 aa, Homo sapiens
  CDR3 for alpha chain variable domain of TCR clone 8227 (TRAV12-3, TRAJ11)
CNATGYSTLTF

SEQ ID NO: 16454 - protein, 18 aa, Homo sapiens
  CDR3 for beta chain variable domain of TCR clone 8227 (TRBV7-2, TRBJ2-3)
CASSLKREGSGITDTQYF

SEQ ID NO: 16455 - protein, 15 aa, Homo sapiens
  CDR3 for alpha chain variable domain of TCR clone 8228 (TRAV8-6, TRAJ23)
CAVRLIYNQGGKLIF

SEQ ID NO: 16456 - protein, 13 aa, Homo sapiens
  CDR3 for beta chain variable domain of TCR clone 8228 (TRBV11-2, TRBJ2-2)
CASSLQNTGELFF

SEQ ID NO: 16457 - protein, 11 aa, Homo sapiens
  CDR3 for alpha chain variable domain of TCR clone 8229 (TRAV1-1, TRAJ23)
CAVRQGGKLIF

SEQ ID NO: 16458 - protein, 13 aa, Homo sapiens
  CDR3 for beta chain variable domain of TCR clone 8229 (TRBV15, TRBJ1-6)
CATSGGLNSPLHF

SEQ ID NO: 16459 - protein, 14 aa, Homo sapiens
  CDR3 for alpha chain variable domain of TCR clone 8230 (TRAV23/DV6, TRAJ17)
CAARGRAAGNKLTF

SEQ ID NO: 16460 - protein, 12 aa, Homo sapiens
  CDR3 for beta chain variable domain of TCR clone 8230 (TRBV7-9, TRBJ2-3)
CASSSITDTQYF

SEQ ID NO: 16461 - protein, 13 aa, Homo sapiens
  CDR3 for alpha chain variable domain of TCR clone 8231 (TRAV21, TRAJ20)
CAVGLRVDYKLSF

SEQ ID NO: 16462 - protein, 15 aa, Homo sapiens
  CDR3 for beta chain variable domain of TCR clone 8231 (TRBV2, TRBJ1-5)
CASSPGPTGNQPQHF

SEQ ID NO: 16463 - protein, 13 aa, Homo sapiens
  CDR3 for alpha chain variable domain of TCR clone 8232 (TRAV29/DV5, TRAJ31)
CAASRNNNARLMF

SEQ ID NO: 16464 - protein, 14 aa, Homo sapiens
  CDR3 for beta chain variable domain of TCR clone 8232 (TRBV25-1, TRBJ1-1)
CASTHLGGNTEAFF

SEQ ID NO: 16465 - protein, 14 aa, Homo sapiens
  CDR3 for alpha chain variable domain of TCR clone 8233 (TRAV1-2, TRAJ8)
CAVREDTGFQKLVF

SEQ ID NO: 16466 - protein, 12 aa, Homo sapiens
  CDR3 for beta chain variable domain of TCR clone 8233 (TRBV6-3, TRBJ2-7)
CASSLTPYEQYF

SEQ ID NO: 16467 - protein, 14 aa, Homo sapiens
  CDR3 for alpha chain variable domain of TCR clone 8234 (TRAV17, TRAJ6)
CATFSSGGSYIPTF

SEQ ID NO: 16468 - protein, 14 aa, Homo sapiens
  CDR3 for beta chain variable domain of TCR clone 8234 (TRBV19, TRBJ1-5)
CASSLSGGSQPQHF

SEQ ID NO: 16469 - protein, 13 aa, Homo sapiens
  CDR3 for alpha chain variable domain of TCR clone 8235 (TRAV8-3, TRAJ28)
CAVGAVGSYQLTF

SEQ ID NO: 16470 - protein, 12 aa, Homo sapiens
  CDR3 for beta chain variable domain of TCR clone 8235 (TRBV11-2, TRBJ2-2)
CASSLGGGELFF

SEQ ID NO: 16471 - protein, 13 aa, Homo sapiens
  CDR3 for alpha chain variable domain of TCR clone 8236 (TRAV25, TRAJ44)
LILGTGTASKLTF

SEQ ID NO: 16472 - protein, 16 aa, Homo sapiens
  CDR3 for beta chain variable domain of TCR clone 8236 (TRBV4-2, TRBJ2-3)
CASSLSGTGSTDTQYF

SEQ ID NO: 16473 - protein, 14 aa, Homo sapiens
  CDR3 for alpha chain variable domain of TCR clone 8237 (TRAV26-1, TRAJ45)
CIEVTGGGADGPTF

SEQ ID NO: 16474 - protein, 13 aa, Homo sapiens
  CDR3 for beta chain variable domain of TCR clone 8237 (TRBV7-6, TRBJ1-2)
CASSLVADYGYTF

SEQ ID NO: 16475 - protein, 12 aa, Homo sapiens
  CDR3 for alpha chain variable domain of TCR clone 8238 (TRAV12-3, TRAJ17)
CAMTLTGNKLTV

SEQ ID NO: 16476 - protein, 15 aa, Homo sapiens
  CDR3 for beta chain variable domain of TCR clone 8238 (TRBV20-1, TRBJ2-7)
CSARDRVSGMDEQYF

SEQ ID NO: 16477 - protein, 15 aa, Homo sapiens
  CDR3 for alpha chain variable domain of TCR clone 8239 (TRAV12-2, TRAJ8)
CAVREENTGFQKLVF

SEQ ID NO: 16478 - protein, 14 aa, Homo sapiens
  CDR3 for beta chain variable domain of TCR clone 8239 (TRBV9, TRBJ1-3)
CASSVVGDGNTIYF

SEQ ID NO: 16479 - protein, 14 aa, Homo sapiens
  CDR3 for alpha chain variable domain of TCR clone 8240 (TRAV21, TRAJ39)
CAVRVNNAGNMLTF

SEQ ID NO: 16480 - protein, 15 aa, Homo sapiens
  CDR3 for beta chain variable domain of TCR clone 8240 (TRBV3-1, TRBJ1-3)
CASSPVGTDRNTIYF

SEQ ID NO: 16481 - protein, 13 aa, Homo sapiens
  CDR3 for alpha chain variable domain of TCR clone 8241 (TRAV17, TRAJ9)
CATFLTGGFKTIF

SEQ ID NO: 16482 - protein, 13 aa, Homo sapiens
  CDR3 for beta chain variable domain of TCR clone 8241 (TRBV4-2, TRBJ1-1)
CASSQAGNTEAFF

SEQ ID NO: 16483 - protein, 15 aa, Homo sapiens
  CDR3 for alpha chain variable domain of TCR clone 8242 (TRAV2, TRAJ9)
CAVEDRGTGGFKTIF

SEQ ID NO: 16484 - protein, 14 aa, Homo sapiens
  CDR3 for beta chain variable domain of TCR clone 8242 (TRBV25-1, TRBJ1-1)
CASTHLGGNTEAFF

SEQ ID NO: 16485 - protein, 16 aa, Homo sapiens
  CDR3 for alpha chain variable domain of TCR clone 8243 (TRAV1-2, TRAJ10)
CAVRGVLTGGGNKPTF

SEQ ID NO: 16486 - protein, 12 aa, Homo sapiens
  CDR3 for beta chain variable domain of TCR clone 8243 (TRBV7-8, TRBJ2-7)
CASSLGDREQYF

SEQ ID NO: 16487 - protein, 13 aa, Homo sapiens
  CDR3 for alpha chain variable domain of TCR clone 8244 (TRAV26-1, TRAJ30)
CIVNMNRDDKIIF

SEQ ID NO: 16488 - protein, 16 aa, Homo sapiens
  CDR3 for beta chain variable domain of TCR clone 8244 (TRBV16, TRBJ2-7)
CASSRPAGESSYEQYF

SEQ ID NO: 16489 - protein, 10 aa, Homo sapiens
  CDR3 for alpha chain variable domain of TCR clone 8245 (TRAV23/DV6, TRAJ57)
CAASSTLSQA

SEQ ID NO: 16490 - protein, 14 aa, Homo sapiens
  CDR3 for beta chain variable domain of TCR clone 8245 (TRBV25-1, TRBJ1-1)
CASTHLGGNTEAFF

SEQ ID NO: 16491 - protein, 13 aa, Homo sapiens
  CDR3 for alpha chain variable domain of TCR clone 8246 (TRAV26-2, TRAJ43)
CILRAVNNNDIRF

SEQ ID NO: 16492 - protein, 15 aa, Homo sapiens
  CDR3 for beta chain variable domain of TCR clone 8246 (TRBV7-2, TRBJ2-1)
CASTHGTGIYNEQFF

SEQ ID NO: 16493 - protein, 14 aa, Homo sapiens
  CDR3 for alpha chain variable domain of TCR clone 8247 (TRAV1-2, TRAJ8)
CAVREDTGFQKLVF

SEQ ID NO: 16494 - protein, 19 aa, Homo sapiens
  CDR3 for beta chain variable domain of TCR clone 8247 (TRBV7-2, TRBJ2-3)
CASSFLSRNWGGGTDTQYF

SEQ ID NO: 16495 - protein, 13 aa, Homo sapiens
  CDR3 for alpha chain variable domain of TCR clone 8248 (TRAV13-1, TRAJ12)
CSKYMGSSYKLIF

SEQ ID NO: 16496 - protein, 14 aa, Homo sapiens
  CDR3 for beta chain variable domain of TCR clone 8248 (TRBV29-1, TRBJ2-3)
CSARAGAGTDTQYF

SEQ ID NO: 16497 - protein, 11 aa, Homo sapiens
  CDR3 for alpha chain variable domain of TCR clone 8249 (TRAV4, TRAJ31)
CLVGDNARLMF

SEQ ID NO: 16498 - protein, 16 aa, Homo sapiens
  CDR3 for beta chain variable domain of TCR clone 8249 (TRBV7-2, TRBJ2-5)
CASSSKWLSGQEAQYF

SEQ ID NO: 16499 - protein, 14 aa, Homo sapiens
  CDR3 for alpha chain variable domain of TCR clone 8250 (TRAV27, TRAJ41)
CAVRTQIPGMHSTS

SEQ ID NO: 16500 - protein, 15 aa, Homo sapiens
  CDR3 for beta chain variable domain of TCR clone 8250 (TRBV9, TRBJ1-6)
CASSVAGTGDSPLHF

SEQ ID NO: 16501 - protein, 11 aa, Homo sapiens
  CDR3 for alpha chain variable domain of TCR clone 8251 (TRAV3, TRAJ21)
CAVGNFKKFYF

SEQ ID NO: 16502 - protein, 16 aa, Homo sapiens
  CDR3 for beta chain variable domain of TCR clone 8251 (TRBV19, TRBJ2-1)
CASSKAGPSSYNEQFF

SEQ ID NO: 16503 - protein, 14 aa, Homo sapiens
  CDR3 for alpha chain variable domain of TCR clone 8252 (TRAV12-2, TRAJ44)
CAVNPAGTASKLTF

SEQ ID NO: 16504 - protein, 14 aa, Homo sapiens
  CDR3 for beta chain variable domain of TCR clone 8252 (TRBV6-1, TRBJ1-3)
CASVQGGGGNTIYF

SEQ ID NO: 16505 - protein, 18 aa, Homo sapiens
  CDR3 for alpha chain variable domain of TCR clone 8253 (TRAV12-3, TRAJ52)
CAMCVGGAGGTSYGKLTF

SEQ ID NO: 16506 - protein, 15 aa, Homo sapiens
  CDR3 for beta chain variable domain of TCR clone 8253 (TRBV27, TRBJ1-6)
CASSFDRGLGSPLHF

SEQ ID NO: 16507 - protein, 18 aa, Homo sapiens
  CDR3 for alpha chain variable domain of TCR clone 8254 (TRAV21, TRAJ45)
CCGGPQGGSGGGADGLTF

SEQ ID NO: 16508 - protein, 12 aa, Homo sapiens
  CDR3 for beta chain variable domain of TCR clone 8254 (TRBV29-1, TRBJ1-3)
CSTRDSGNTIYF

SEQ ID NO: 16509 - protein, 11 aa, Homo sapiens
  CDR3 for alpha chain variable domain of TCR clone 8255 (TRAV2, TRAJ13)
CASGGYQKVTF

SEQ ID NO: 16510 - protein, 14 aa, Homo sapiens
  CDR3 for beta chain variable domain of TCR clone 8255 (TRBV4-2, TRBJ2-3)
CASSQERGTDTQYF

SEQ ID NO: 16511 - protein, 12 aa, Homo sapiens
  CDR3 for alpha chain variable domain of TCR clone 8256 (TRAV20, TRAJ45)
CAVRGGADGLTF

SEQ ID NO: 16512 - protein, 14 aa, Homo sapiens
  CDR3 for beta chain variable domain of TCR clone 8256 (TRBV20-1, TRBJ2-7)
CSAKRGRSSYEQYF

SEQ ID NO: 16513 - protein, 14 aa, Homo sapiens
  CDR3 for alpha chain variable domain of TCR clone 8257 (TRAV9-2, TRAJ35)
CALRSIGFGNVLHC

SEQ ID NO: 16514 - protein, 12 aa, Homo sapiens
  CDR3 for beta chain variable domain of TCR clone 8257 (TRBV5-4, TRBJ2-5)
CASSSTRETQYF

SEQ ID NO: 16515 - protein, 16 aa, Homo sapiens
  CDR3 for alpha chain variable domain of TCR clone 8258 (TRAV36/DV7, TRAJ52)
CAVEDAGGTSYGKLTF

SEQ ID NO: 16516 - protein, 16 aa, Homo sapiens
  CDR3 for beta chain variable domain of TCR clone 8258 (TRBV2, TRBJ2-1)
CASRSPAGGKYNEQFF

SEQ ID NO: 16517 - protein, 15 aa, Homo sapiens
  CDR3 for alpha chain variable domain of TCR clone 8259 (TRAV2, TRAJ20)
CAVDLRGSNDYKLSF

SEQ ID NO: 16518 - protein, 13 aa, Homo sapiens
  CDR3 for beta chain variable domain of TCR clone 8259 (TRBV2, TRBJ2-7)
CANGLAGDYEQYF

SEQ ID NO: 16519 - protein, 15 aa, Homo sapiens
  CDR3 for alpha chain variable domain of TCR clone 8260 (TRAV12-3, TRAJ42)
CAMSGHGGSQGNLIF

SEQ ID NO: 16520 - protein, 14 aa, Homo sapiens
  CDR3 for beta chain variable domain of TCR clone 8260 (TRBV7-2, TRBJ2-7)
CASSPKTSFYEQYF

SEQ ID NO: 16521 - protein, 17 aa, Homo sapiens
  CDR3 for alpha chain variable domain of TCR clone 8261 (TRAV2, TRAJ32)
CCLLLWGGGGATNKLIF

SEQ ID NO: 16522 - protein, 13 aa, Homo sapiens
  CDR3 for beta chain variable domain of TCR clone 8261 (TRBV20-1, TRBJ1-1)
CSARGGGNTEAFF

SEQ ID NO: 16523 - protein, 15 aa, Homo sapiens
  CDR3 for alpha chain variable domain of TCR clone 8262 (TRAV8-3, TRAJ45)
CASSYSGGVADGLTF

SEQ ID NO: 16524 - protein, 13 aa, Homo sapiens
  CDR3 for beta chain variable domain of TCR clone 8262 (TRBV10-3, TRBJ2-7)
CASKLAVNYEQYF

SEQ ID NO: 16525 - protein, 14 aa, Homo sapiens
  CDR3 for alpha chain variable domain of TCR clone 8263 (TRAV14/DV4, TRAJ20)
CAMRESLNDYKLSF

SEQ ID NO: 16526 - protein, 15 aa, Homo sapiens
  CDR3 for beta chain variable domain of TCR clone 8263 (TRBV27, TRBJ2-1)
CASSNGGGSSNEQFF

SEQ ID NO: 16527 - protein, 16 aa, Homo sapiens
  CDR3 for alpha chain variable domain of TCR clone 8264 (TRAV3, TRAJ10)
CAVRDMRAGGGNKLTF

SEQ ID NO: 16528 - protein, 14 aa, Homo sapiens
  CDR3 for beta chain variable domain of TCR clone 8264 (TRBV6-6, TRBJ2-7)
CASSDSGAGYEQYF

SEQ ID NO: 16529 - protein, 14 aa, Homo sapiens
  CDR3 for alpha chain variable domain of TCR clone 8265 (TRAV3, TRAJ9)
CAVRLNTGGFKTIF

SEQ ID NO: 16530 - protein, 15 aa, Homo sapiens
  CDR3 for beta chain variable domain of TCR clone 8265 (TRBV7-2, TRBJ2-1)
CASSLASGRVNEQSF

SEQ ID NO: 16531 - protein, 12 aa, Homo sapiens
  CDR3 for alpha chain variable domain of TCR clone 8266 (TRAV23/DV6, TRAJ49)
CAASNDGNQFYF

SEQ ID NO: 16532 - protein, 14 aa, Homo sapiens
  CDR3 for beta chain variable domain of TCR clone 8266 (TRBV18, TRBJ1-2)
CASSPSRTGNGYTF

SEQ ID NO: 16533 - protein, 14 aa, Homo sapiens
  CDR3 for alpha chain variable domain of TCR clone 8267 (TRAV1-2, TRAJ16)
CAVNRFSDGQKLLF

SEQ ID NO: 16534 - protein, 13 aa, Homo sapiens
  CDR3 for beta chain variable domain of TCR clone 8267 (TRBV18, TRBJ2-7)
CASQSGGGYEQYF

SEQ ID NO: 16535 - protein, 14 aa, Homo sapiens
  CDR3 for alpha chain variable domain of TCR clone 8268 (TRAV13-2, TRAJ16)
CAENNWEDGQKLLF

SEQ ID NO: 16536 - protein, 17 aa, Homo sapiens
  CDR3 for beta chain variable domain of TCR clone 8268 (TRBV20-1, TRBJ1-6)
CSARGGYTFSYNSPLHF

SEQ ID NO: 16537 - protein, 14 aa, Homo sapiens
  CDR3 for alpha chain variable domain of TCR clone 8269 (TRAV12-3, TRAJ10)
SHLPLTGGGNKLTF

SEQ ID NO: 16538 - protein, 16 aa, Homo sapiens
  CDR3 for beta chain variable domain of TCR clone 8269 (TRBV6-1, TRBJ1-3)
CASVQGGVETPYILER

SEQ ID NO: 16539 - protein, 13 aa, Homo sapiens
  CDR3 for alpha chain variable domain of TCR clone 8270 (TRAV13-1, TRAJ6)
CARGSGGSYIPTF

SEQ ID NO: 16540 - protein, 17 aa, Homo sapiens
  CDR3 for beta chain variable domain of TCR clone 8270 (TRBV20-1, TRBJ2-2)
CSASGSGQGGLTGELFF

SEQ ID NO: 16541 - protein, 14 aa, Homo sapiens
  CDR3 for alpha chain variable domain of TCR clone 8271 (TRAV8-4, TRAJ22)
CAVSPQGSARQLTF

SEQ ID NO: 16542 - protein, 15 aa, Homo sapiens
  CDR3 for beta chain variable domain of TCR clone 8271 (TRBV19, TRBJ2-2)
CASRGPGSNTGELFF

SEQ ID NO: 16543 - protein, 21 aa, Homo sapiens
  CDR3 for alpha chain variable domain of TCR clone 8272 (TRAV23/DV6, TRAJ30)
PSLETQPPTSVQQARDDKIIF

SEQ ID NO: 16544 - protein, 15 aa, Homo sapiens
  CDR3 for beta chain variable domain of TCR clone 8272 (TRBV9, TRBJ2-2)
CISVPAASSPGSCFF

SEQ ID NO: 16545 - protein, 14 aa, Homo sapiens
  CDR3 for alpha chain variable domain of TCR clone 8273 (TRAV13-1, TRAJ35)
CAASKGGFGNVLHC

SEQ ID NO: 16546 - protein, 14 aa, Homo sapiens
  CDR3 for beta chain variable domain of TCR clone 8273 (TRBV7-9, TRBJ2-1)
CASSPRDSLYEQFF

SEQ ID NO: 16547 - protein, 15 aa, Homo sapiens
  CDR3 for alpha chain variable domain of TCR clone 8274 (TRAV2, TRAJ15)
CAVEDREQAGTALIF

SEQ ID NO: 16548 - protein, 17 aa, Homo sapiens
  CDR3 for beta chain variable domain of TCR clone 8274 (TRBV7-8, TRBJ2-6)
CASSAGTGGAGANVLTF

SEQ ID NO: 16549 - protein, 15 aa, Homo sapiens
  CDR3 for alpha chain variable domain of TCR clone 8275 (TRAV20, TRAJ23)
CAVQAVRNQGGKLIF

SEQ ID NO: 16550 - protein, 13 aa, Homo sapiens
  CDR3 for beta chain variable domain of TCR clone 8275 (TRBV9, TRBJ2-7)
CASSASDSYEQYF

SEQ ID NO: 16551 - protein, 16 aa, Homo sapiens
  CDR3 for alpha chain variable domain of TCR clone 8276 (TRAV12-3, TRAJ53)
CAMSPGSGGSNYKLTF

SEQ ID NO: 16552 - protein, 15 aa, Homo sapiens
  CDR3 for beta chain variable domain of TCR clone 8276 (TRBV7-2, TRBJ2-1)
CASSSGLAGGNEQFF

SEQ ID NO: 16553 - protein, 16 aa, Homo sapiens
  CDR3 for alpha chain variable domain of TCR clone 8277 (TRAV12-1, TRAJ42)
CVVTPYYGGSQGNLIF

SEQ ID NO: 16554 - protein, 18 aa, Homo sapiens
  CDR3 for beta chain variable domain of TCR clone 8277 (TRBV24-1, TRBJ2-3)
CATSDLPRLAGGADTQYF

SEQ ID NO: 16555 - protein, 12 aa, Homo sapiens
  CDR3 for alpha chain variable domain of TCR clone 8278 (TRAV13-2, TRAJ23)
CAERHRGGKLIF

SEQ ID NO: 16556 - protein, 12 aa, Homo sapiens
  CDR3 for beta chain variable domain of TCR clone 8278 (TRBV12-4, TRBJ1-2)
CASSFIWLHLRF

SEQ ID NO: 16557 - protein, 15 aa, Homo sapiens
  CDR3 for alpha chain variable domain of TCR clone 8279 (TRAV17, TRAJ10)
CATVLLTGGGNKLTF

SEQ ID NO: 16558 - protein, 16 aa, Homo sapiens
  CDR3 for beta chain variable domain of TCR clone 8279 (TRBV7-9, TRBJ2-1)
CASSDVAGGSYNEQFF

SEQ ID NO: 16559 - protein, 17 aa, Homo sapiens
  CDR3 for alpha chain variable domain of TCR clone 8280 (TRAV3, TRAJ6)
CAVRDGPRAGGSYIPTF

SEQ ID NO: 16560 - protein, 20 aa, Homo sapiens
  CDR3 for beta chain variable domain of TCR clone 8280 (TRBV7-8, TRBJ2-2)
CASSHLFPGPTIHITGELFF

SEQ ID NO: 16561 - protein, 14 aa, Homo sapiens
  CDR3 for alpha chain variable domain of TCR clone 8281 (TRAV26-1, TRAJ38)
CIADNAGNNRKLIW

SEQ ID NO: 16562 - protein, 14 aa, Homo sapiens
  CDR3 for beta chain variable domain of TCR clone 8281 (TRBV7-2, TRBJ2-7)
CASRSQGAAYEQYF

SEQ ID NO: 16563 - protein, 14 aa, Homo sapiens
  CDR3 for alpha chain variable domain of TCR clone 8282 (TRAV26-1, TRAJ44)
CIARTTGTASKLTF

SEQ ID NO: 16564 - protein, 14 aa, Homo sapiens
  CDR3 for beta chain variable domain of TCR clone 8282 (TRBV19, TRBJ2-7)
CASSIEASSYEQYF

SEQ ID NO: 16565 - protein, 13 aa, Homo sapiens
  CDR3 for alpha chain variable domain of TCR clone 8283 (TRAV8-1, TRAJ30)
CAVNSNRDDKIIF

SEQ ID NO: 16566 - protein, 13 aa, Homo sapiens
  CDR3 for beta chain variable domain of TCR clone 8283 (TRBV20-1, TRBJ1-1)
CSAPLGGGTEAFF

SEQ ID NO: 16567 - protein, 14 aa, Homo sapiens
  CDR3 for alpha chain variable domain of TCR clone 8284 (TRAV1-2, TRAJ6)
CAVSLPGGSYIPTF

SEQ ID NO: 16568 - protein, 15 aa, Homo sapiens
  CDR3 for beta chain variable domain of TCR clone 8284 (TRBV28, TRBJ2-7)
CASSPGGRGFYEQYF

SEQ ID NO: 16569 - protein, 15 aa, Homo sapiens
  CDR3 for alpha chain variable domain of TCR clone 8285 (TRAV3, TRAJ9)
CAVRGLNTGGFKTIF

SEQ ID NO: 16570 - protein, 14 aa, Homo sapiens
  CDR3 for beta chain variable domain of TCR clone 8285 (TRBV19, TRBJ1-2)
CASEGTGVTYGYTF

SEQ ID NO: 16571 - protein, 11 aa, Homo sapiens
  CDR3 for alpha chain variable domain of TCR clone 8286 (TRAV17, TRAJ9)
CGFTGGFKTIF

SEQ ID NO: 16572 - protein, 14 aa, Homo sapiens
  CDR3 for beta chain variable domain of TCR clone 8286 (TRBV7-2, TRBJ1-1)
CASSFLTGTTEAFF

SEQ ID NO: 16573 - protein, 14 aa, Homo sapiens
  CDR3 for alpha chain variable domain of TCR clone 8287 (TRAV9-2, TRAJ39)
CALYIYNAGNMLTF

SEQ ID NO: 16574 - protein, 14 aa, Homo sapiens
  CDR3 for beta chain variable domain of TCR clone 8287 (TRBV12-4, TRBJ2-5)
CASSSRQGAETQYF

SEQ ID NO: 16575 - protein, 14 aa, Homo sapiens
  CDR3 for alpha chain variable domain of TCR clone 8288 (TRAV34, TRAJ22)
CGADTSGSARQLTF

SEQ ID NO: 16576 - protein, 14 aa, Homo sapiens
  CDR3 for beta chain variable domain of TCR clone 8288 (TRBV6-1, TRBJ1-2)
CASSDTGASYGYTF

SEQ ID NO: 16577 - protein, 11 aa, Homo sapiens
  CDR3 for alpha chain variable domain of TCR clone 8289 (TRAV13-2, TRAJ20)
CAENMSYKLSF

SEQ ID NO: 16578 - protein, 15 aa, Homo sapiens
  CDR3 for beta chain variable domain of TCR clone 8289 (TRBV28, TRBJ2-3)
CAPTFRDWSTDTQYF

SEQ ID NO: 16579 - protein, 14 aa, Homo sapiens
  CDR3 for alpha chain variable domain of TCR clone 8290 (TRAV26-1, TRAJ40)
CIVRVARGTYKYIF

SEQ ID NO: 16580 - protein, 14 aa, Homo sapiens
  CDR3 for beta chain variable domain of TCR clone 8290 (TRBV25-1, TRBJ1-1)
CASTHLGGNTEAFF

SEQ ID NO: 16581 - protein, 15 aa, Homo sapiens
  CDR3 for alpha chain variable domain of TCR clone 8291 (TRAV1-2, TRAJ12)
CAVIPEVDSSYKLIF

SEQ ID NO: 16582 - protein, 12 aa, Homo sapiens
  CDR3 for beta chain variable domain of TCR clone 8291 (TRBV11-2, TRBJ2-2)
CASSLPTGELFF

SEQ ID NO: 16583 - protein, 15 aa, Homo sapiens
  CDR3 for alpha chain variable domain of TCR clone 8292 (TRAV8-3, TRAJ45)
CASSYSGGGADGLTF

SEQ ID NO: 16584 - protein, 13 aa, Homo sapiens
  CDR3 for beta chain variable domain of TCR clone 8292 (TRBV10-3, TRBJ2-7)
CAPKLAVNYEQYF

SEQ ID NO: 16585 - protein, 17 aa, Homo sapiens
  CDR3 for alpha chain variable domain of TCR clone 8293 (TRAV13-1, TRAJ31)
CAPRDRLMFGDGTQLVV

SEQ ID NO: 16586 - protein, 12 aa, Homo sapiens
  CDR3 for beta chain variable domain of TCR clone 8293 (TRBV7-9, TRBJ2-7)
CASSLEGYERYF

SEQ ID NO: 16587 - protein, 13 aa, Homo sapiens
  CDR3 for alpha chain variable domain of TCR clone 8294 (TRAV21, TRAJ17)
CAPVKAAGNKLTF

SEQ ID NO: 16588 - protein, 13 aa, Homo sapiens
  CDR3 for beta chain variable domain of TCR clone 8294 (TRBV20-1, TRBJ1-1)
CSAVDGTLNEAFF

SEQ ID NO: 16589 - protein, 13 aa, Homo sapiens
  CDR3 for alpha chain variable domain of TCR clone 8295 (TRAV12-2, TRAJ20)
CAVYPSNDYKLSF

SEQ ID NO: 16590 - protein, 18 aa, Homo sapiens
  CDR3 for beta chain variable domain of TCR clone 8295 (TRBV25-1, TRBJ1-2)
CASSGLQNGQGLIFGYTF

SEQ ID NO: 16591 - protein, 12 aa, Homo sapiens
  CDR3 for alpha chain variable domain of TCR clone 8296 (TRAV12-3, TRAJ17)
CAMTLTGNKLTF

SEQ ID NO: 16592 - protein, 15 aa, Homo sapiens
  CDR3 for beta chain variable domain of TCR clone 8296 (TRBV20-1, TRBJ2-7)
CSARDRVSVMDEQYF

SEQ ID NO: 16593 - protein, 14 aa, Homo sapiens
  CDR3 for alpha chain variable domain of TCR clone 8297 (TRAV16, TRAJ13)
CALRRSGGYQKVTF

SEQ ID NO: 16594 - protein, 15 aa, Homo sapiens
  CDR3 for beta chain variable domain of TCR clone 8297 (TRBV6-1, TRBJ1-5)
CASSELREGNQPQHF

SEQ ID NO: 16595 - protein, 14 aa, Homo sapiens
  CDR3 for alpha chain variable domain of TCR clone 8298 (TRAV12-2, TRAJ40)
CAVKIPSGTYKYIF

SEQ ID NO: 16596 - protein, 14 aa, Homo sapiens
  CDR3 for beta chain variable domain of TCR clone 8298 (TRBV20-1, TRBJ1-1)
CSAQTRIGGTEAVF

SEQ ID NO: 16597 - protein, 15 aa, Homo sapiens
  CDR3 for alpha chain variable domain of TCR clone 8299 (TRAV8-3, TRAJ27)
CAVGPPKTNAGKSTF

SEQ ID NO: 16598 - protein, 15 aa, Homo sapiens
  CDR3 for beta chain variable domain of TCR clone 8299 (TRBV7-2, TRBJ2-1)
CASSSGLAGGNEQFF

SEQ ID NO: 16599 - protein, 14 aa, Homo sapiens
  CDR3 for alpha chain variable domain of TCR clone 8300 (TRAV12-2, TRAJ9)
CAVNALEGGFKTIF

SEQ ID NO: 16600 - protein, 16 aa, Homo sapiens
  CDR3 for beta chain variable domain of TCR clone 8300 (TRBV7-2, TRBJ2-5)
CASSPFPTGGEETQYF

SEQ ID NO: 16601 - protein, 13 aa, Homo sapiens
  CDR3 for alpha chain variable domain of TCR clone 8301 (TRAV35, TRAJ20)
CAGPLSNDYKLSF

SEQ ID NO: 16602 - protein, 16 aa, Homo sapiens
  CDR3 for beta chain variable domain of TCR clone 8301 (TRBV29-1, TRBJ2-7)
CSVEVVGTSGSYEQYF

SEQ ID NO: 16603 - protein, 13 aa, Homo sapiens
  CDR3 for alpha chain variable domain of TCR clone 8302 (TRAV10, TRAJ15)
CVVRGQAGTALIF

SEQ ID NO: 16604 - protein, 12 aa, Homo sapiens
  CDR3 for beta chain variable domain of TCR clone 8302 (TRBV6-1, TRBJ2-7)
CASRTGRYEQYF

SEQ ID NO: 16605 - protein, 15 aa, Homo sapiens
  CDR3 for alpha chain variable domain of TCR clone 8303 (TRAV17, TRAJ16)
CATALRFSDGRKLLF

SEQ ID NO: 16606 - protein, 15 aa, Homo sapiens
  CDR3 for beta chain variable domain of TCR clone 8303 (TRBV20-1, TRBJ1-1)
CSASRGVTGNTEAFF

SEQ ID NO: 16607 - protein, 15 aa, Homo sapiens
  CDR3 for alpha chain variable domain of TCR clone 8304 (TRAV3, TRAJ9)
CAVRARNTGGFKTIF

SEQ ID NO: 16608 - protein, 15 aa, Homo sapiens
  CDR3 for beta chain variable domain of TCR clone 8304 (TRBV19, TRBJ2-1)
CASSTGTSSYNEQFF

SEQ ID NO: 16609 - protein, 17 aa, Homo sapiens
  CDR3 for alpha chain variable domain of TCR clone 8305 (TRAV13-2, TRAJ28)
CAEEPAGSGAGSYQLTF

SEQ ID NO: 16610 - protein, 15 aa, Homo sapiens
  CDR3 for beta chain variable domain of TCR clone 8305 (TRBV5-5, TRBJ1-1)
CASSLVGKDNTEAFF

SEQ ID NO: 16611 - protein, 12 aa, Homo sapiens
  CDR3 for alpha chain variable domain of TCR clone 8306 (TRAV6, TRAJ4)
NMFSGGYNKLIF

SEQ ID NO: 16612 - protein, 13 aa, Homo sapiens
  CDR3 for beta chain variable domain of TCR clone 8306 (TRBV4-1, TRBJ2-1)
CASSQEVQYEQFF

SEQ ID NO: 16613 - protein, 14 aa, Homo sapiens
  CDR3 for alpha chain variable domain of TCR clone 8307 (TRAV12-2, TRAJ13)
CAVKKTGGYQKVTF

SEQ ID NO: 16614 - protein, 14 aa, Homo sapiens
  CDR3 for beta chain variable domain of TCR clone 8307 (TRBV5-4, TRBJ1-1)
CASSLDSRRDEAFF

SEQ ID NO: 16615 - protein, 14 aa, Homo sapiens
  CDR3 for alpha chain variable domain of TCR clone 8308 (TRAV1-2, TRAJ16)
CAVNRFSDGQKLLF

SEQ ID NO: 16616 - protein, 15 aa, Homo sapiens
  CDR3 for beta chain variable domain of TCR clone 8308 (TRBV9, TRBJ1-6)
CASSVAGTGDSPLLF

SEQ ID NO: 16617 - protein, 12 aa, Homo sapiens
  CDR3 for alpha chain variable domain of TCR clone 8309 (TRAV3, TRAJ27)
CAVRDGAGKSTF

SEQ ID NO: 16618 - protein, 13 aa, Homo sapiens
  CDR3 for beta chain variable domain of TCR clone 8309 (TRBV10-3, TRBJ1-2)
CATNADLNYGYTF

SEQ ID NO: 16619 - protein, 14 aa, Homo sapiens
  CDR3 for alpha chain variable domain of TCR clone 8310 (TRAV9-2, TRAJ39)
CALYIYNAGNMLTF

SEQ ID NO: 16620 - protein, 19 aa, Homo sapiens
  CDR3 for beta chain variable domain of TCR clone 8310 (TRBV7-2, TRBJ2-3)
CASSFLSRNWGGGTDTQYF

SEQ ID NO: 16621 - protein, 18 aa, Homo sapiens
  CDR3 for alpha chain variable domain of TCR clone 8311 (TRAV21, TRAJ52)
CAVRPSPAGGTSDGKLTF

SEQ ID NO: 16622 - protein, 17 aa, Homo sapiens
  CDR3 for beta chain variable domain of TCR clone 8311 (TRBV13, TRBJ2-3)
CASSLSRVAGGRNTQYF

SEQ ID NO: 16623 - protein, 13 aa, Homo sapiens
  CDR3 for alpha chain variable domain of TCR clone 8312 (TRAV20, TRAJ37)
CAGCSSNTGELIF

SEQ ID NO: 16624 - protein, 11 aa, Homo sapiens
  CDR3 for beta chain variable domain of TCR clone 8312 (TRBV12-4, TRBJ2-3)
CASTATDTQYF

SEQ ID NO: 16625 - protein, 14 aa, Homo sapiens
  CDR3 for alpha chain variable domain of TCR clone 8313 (TRAV12-1, TRAJ38)
CGELKAGNNRKLIW

SEQ ID NO: 16626 - protein, 15 aa, Homo sapiens
  CDR3 for beta chain variable domain of TCR clone 8313 (TRBV18, TRBJ2-1)
CASSPPSASYNEQFF

SEQ ID NO: 16627 - protein, 20 aa, Homo sapiens
  CDR3 for alpha chain variable domain of TCR clone 8314 (TRAV21, TRAJ30)
CAVRRRMTRSSLEKGHDFIF

SEQ ID NO: 16628 - protein, 15 aa, Homo sapiens
  CDR3 for beta chain variable domain of TCR clone 8314 (TRBV6-6, TRBJ2-7)
CASSYSYGGSYEQYF

SEQ ID NO: 16629 - protein, 14 aa, Homo sapiens
  CDR3 for alpha chain variable domain of TCR clone 8315 (TRAV12-2, TRAJ53)
CRERGGGSNYKLTF

SEQ ID NO: 16630 - protein, 13 aa, Homo sapiens
  CDR3 for beta chain variable domain of TCR clone 8315 (TRBV3-1, TRBJ1-1)
CASSPGVITEAFF

SEQ ID NO: 16631 - protein, 16 aa, Homo sapiens
  CDR3 for alpha chain variable domain of TCR clone 8316 (TRAV12-3, TRAJ53)
CAMGPGSGGSNYKLTF

SEQ ID NO: 16632 - protein, 11 aa, Homo sapiens
  CDR3 for beta chain variable domain of TCR clone 8316 (TRBV29-1, TRBJ2-5)
CSEDRTGTQYF

SEQ ID NO: 16633 - protein, 14 aa, Homo sapiens
  CDR3 for alpha chain variable domain of TCR clone 8317 (TRAV8-1, TRAJ5)
CAVRTDTGRRALTF

SEQ ID NO: 16634 - protein, 15 aa, Homo sapiens
  CDR3 for beta chain variable domain of TCR clone 8317 (TRBV9, TRBJ1-6)
CASSVAGTGDSPLHF

SEQ ID NO: 16635 - protein, 14 aa, Homo sapiens
  CDR3 for alpha chain variable domain of TCR clone 8318 (TRAV12-2, TRAJ13)
CAVKKTGGYQKVTF

SEQ ID NO: 16636 - protein, 14 aa, Homo sapiens
  CDR3 for beta chain variable domain of TCR clone 8318 (TRBV6-5, TRBJ2-2)
CASTEGQETGELFF

SEQ ID NO: 16637 - protein, 16 aa, Homo sapiens
  CDR3 for alpha chain variable domain of TCR clone 8319 (TRAV30, TRAJ24)
CGTEIVDADSWGKFQF

SEQ ID NO: 16638 - protein, 14 aa, Homo sapiens
  CDR3 for beta chain variable domain of TCR clone 8319 (TRBV12-5, TRBJ2-5)
CVSGSRTHQETQYF

SEQ ID NO: 16639 - protein, 16 aa, Homo sapiens
  CDR3 for alpha chain variable domain of TCR clone 8320 (TRAV30, TRAJ24)
CGTEIVDADSWGKFQF

SEQ ID NO: 16640 - protein, 18 aa, Homo sapiens
  CDR3 for beta chain variable domain of TCR clone 8320 (TRBV7-9, TRBJ2-7)
CTSSLTTSGSRTWYEQYF

SEQ ID NO: 16641 - protein, 12 aa, Homo sapiens
  CDR3 for alpha chain variable domain of TCR clone 8321 (TRAV12-3, TRAJ17)
CAMTLTGNKLTF

SEQ ID NO: 16642 - protein, 13 aa, Homo sapiens
  CDR3 for beta chain variable domain of TCR clone 8321 (TRBV24-1, TRBJ2-2)
CATSDWSTGELFF

SEQ ID NO: 16643 - protein, 14 aa, Homo sapiens
  CDR3 for alpha chain variable domain of TCR clone 8322 (TRAV1-2, TRAJ8)
CAVREDTGFQKLVF

SEQ ID NO: 16644 - protein, 14 aa, Homo sapiens
  CDR3 for beta chain variable domain of TCR clone 8322 (TRBV6-1, TRBJ2-5)
CASSPRTAQGTQYF

SEQ ID NO: 16645 - protein, 13 aa, Homo sapiens
  CDR3 for alpha chain variable domain of TCR clone 8323 (TRAV14/DV4, TRAJ40)
CAMSGSGTYKYIF

SEQ ID NO: 16646 - protein, 15 aa, Homo sapiens
  CDR3 for beta chain variable domain of TCR clone 8323 (TRBV20-1, TRBJ2-7)
CSARDRVSGMDEQYF

SEQ ID NO: 16647 - protein, 14 aa, Homo sapiens
  CDR3 for alpha chain variable domain of TCR clone 8324 (TRAV8-4, TRAJ48)
CAVSETFGNEKLTF

SEQ ID NO: 16648 - protein, 19 aa, Homo sapiens
  CDR3 for beta chain variable domain of TCR clone 8324 (TRBV7-2, TRBJ2-3)
CASSFLSRNWGGGTDTQYF

SEQ ID NO: 16649 - protein, 11 aa, Homo sapiens
  CDR3 for alpha chain variable domain of TCR clone 8325 (TRAV1-1, TRAJ23)
CAVRQGGKLIF

SEQ ID NO: 16650 - protein, 16 aa, Homo sapiens
  CDR3 for beta chain variable domain of TCR clone 8325 (TRBV20-1, TRBJ1-4)
CSAPGQGLLTNEKLFF

SEQ ID NO: 16651 - protein, 13 aa, Homo sapiens
  CDR3 for alpha chain variable domain of TCR clone 8326 (TRAV16, TRAJ31)
CALSAHNNARLMF

SEQ ID NO: 16652 - protein, 14 aa, Homo sapiens
  CDR3 for beta chain variable domain of TCR clone 8326 (TRBV7-2, TRBJ2-5)
CASSFTQGQETQYF

SEQ ID NO: 16653 - protein, 22 aa, Homo sapiens
  CDR3 for alpha chain variable domain of TCR clone 8327 (TRAV34, TRAJ52)
STSVEQTRRSNAGGTSYGKLTF

SEQ ID NO: 16654 - protein, 15 aa, Homo sapiens
  CDR3 for beta chain variable domain of TCR clone 8327 (TRBV5-1, TRBJ2-7)
CASSLNGGPAREQYF

SEQ ID NO: 16655 - protein, 15 aa, Homo sapiens
  CDR3 for alpha chain variable domain of TCR clone 8328 (TRAV14/DV4, TRAJ4)
CAMRDSSGGYNKLIF

SEQ ID NO: 16656 - protein, 12 aa, Homo sapiens
  CDR3 for beta chain variable domain of TCR clone 8328 (TRBV19, TRBJ1-1)
CASSIGTEEAFF

SEQ ID NO: 16657 - protein, 15 aa, Homo sapiens
  CDR3 for alpha chain variable domain of TCR clone 8329 (TRAV1-2, TRAJ12)
CAVIPEVDSSYKLIF

SEQ ID NO: 16658 - protein, 12 aa, Homo sapiens
  CDR3 for beta chain variable domain of TCR clone 8329 (TRBV12-4, TRBJ2-7)
CASSLGGYEQYF

SEQ ID NO: 16659 - protein, 14 aa, Homo sapiens
  CDR3 for alpha chain variable domain of TCR clone 8330 (TRAV12-2, TRAJ13)
CAVKKTGGYQKVTF

SEQ ID NO: 16660 - protein, 13 aa, Homo sapiens
  CDR3 for beta chain variable domain of TCR clone 8330 (TRBV7-3, TRBJ1-1)
CASSQDWGAEAFF

SEQ ID NO: 16661 - protein, 10 aa, Homo sapiens
  CDR3 for alpha chain variable domain of TCR clone 8331 (TRAV2, TRAJ26)
CAVVGLWSEF

SEQ ID NO: 16662 - protein, 15 aa, Homo sapiens
  CDR3 for beta chain variable domain of TCR clone 8331 (TRBV11-2, TRBJ2-1)
CASSLGTSGLNEQFF

SEQ ID NO: 16663 - protein, 14 aa, Homo sapiens
  CDR3 for alpha chain variable domain of TCR clone 8332 (TRAV3, TRAJ32)
CCERRAGATNKLIF

SEQ ID NO: 16664 - protein, 12 aa, Homo sapiens
  CDR3 for beta chain variable domain of TCR clone 8332 (TRBV6-1, TRBJ2-7)
CASSDYSYEQYF

SEQ ID NO: 16665 - protein, 12 aa, Homo sapiens
  CDR3 for alpha chain variable domain of TCR clone 8333 (TRAV12-3, TRAJ17)
CAMTLTGNKLTF

SEQ ID NO: 16666 - protein, 12 aa, Homo sapiens
  CDR3 for beta chain variable domain of TCR clone 8333 (TRBV12-4, TRBJ2-3)
CASSTLPDTQYF

SEQ ID NO: 16667 - protein, 13 aa, Homo sapiens
  CDR3 for alpha chain variable domain of TCR clone 8334 (TRAV12-3, TRAJ15)
CAMSDQAGTALIF

SEQ ID NO: 16668 - protein, 13 aa, Homo sapiens
  CDR3 for beta chain variable domain of TCR clone 8334 (TRBV20-1, TRBJ2-1)
CSAQDGGPNEQFF

SEQ ID NO: 16669 - protein, 17 aa, Homo sapiens
  CDR3 for alpha chain variable domain of TCR clone 8335 (TRAV4, TRAJ18)
CLVGERSVGSTLGRLYF

SEQ ID NO: 16670 - protein, 11 aa, Homo sapiens
  CDR3 for beta chain variable domain of TCR clone 8335 (TRBV29-1, TRBJ2-5)
CSEDRTGTQYF

SEQ ID NO: 16671 - protein, 14 aa, Homo sapiens
  CDR3 for alpha chain variable domain of TCR clone 8336 (TRAV9-2, TRAJ39)
CALYIYNAGNMLTF

SEQ ID NO: 16672 - protein, 13 aa, Homo sapiens
  CDR3 for beta chain variable domain of TCR clone 8336 (TRBV12-5, TRBJ2-3)
CASGDRQSDTQYF

SEQ ID NO: 16673 - protein, 14 aa, Homo sapiens
  CDR3 for alpha chain variable domain of TCR clone 8337 (TRAV12-3, TRAJ42)
CAMNYGGSQGNLIF

SEQ ID NO: 16674 - protein, 12 aa, Homo sapiens
  CDR3 for beta chain variable domain of TCR clone 8337 (TRBV5-4, TRBJ2-5)
CASSSTRETQYF

SEQ ID NO: 16675 - protein, 13 aa, Homo sapiens
  CDR3 for alpha chain variable domain of TCR clone 8338 (TRAV12-2, TRAJ15)
CAVFNQAGTALIF

SEQ ID NO: 16676 - protein, 23 aa, Homo sapiens
  CDR3 for beta chain variable domain of TCR clone 8338 (TRBV7-8, TRBJ1-5)
RRTPPCISVPAAGGGGADQPQHF

SEQ ID NO: 16677 - protein, 14 aa, Homo sapiens
  CDR3 for alpha chain variable domain of TCR clone 8339 (TRAV12-2, TRAJ13)
CAVKKTGGYQEVTF

SEQ ID NO: 16678 - protein, 15 aa, Homo sapiens
  CDR3 for beta chain variable domain of TCR clone 8339 (TRBV27, TRBJ2-1)
CASSNGGGSSNEQFF

SEQ ID NO: 16679 - protein, 12 aa, Homo sapiens
  CDR3 for alpha chain variable domain of TCR clone 8340 (TRAV12-1, TRAJ40)
CVVYSGTYKYIF

SEQ ID NO: 16680 - protein, 17 aa, Homo sapiens
  CDR3 for beta chain variable domain of TCR clone 8340 (TRBV7-3, TRBJ2-3)
CASSPRGQGYGTDTQYF

SEQ ID NO: 16681 - protein, 15 aa, Homo sapiens
  CDR3 for alpha chain variable domain of TCR clone 8341 (TRAV1-2, TRAJ18)
CAVRDRGSTLGRLYF

SEQ ID NO: 16682 - protein, 15 aa, Homo sapiens
  CDR3 for beta chain variable domain of TCR clone 8341 (TRBV10-3, TRBJ2-1)
CAISGGREGSDEQFF

SEQ ID NO: 16683 - protein, 12 aa, Homo sapiens
  CDR3 for alpha chain variable domain of TCR clone 8342 (TRAV2, TRAJ9)
CAVGAGGFKTIF

SEQ ID NO: 16684 - protein, 16 aa, Homo sapiens
  CDR3 for beta chain variable domain of TCR clone 8342 (TRBV13, TRBJ2-2)
CASSTRTGEHTGELFF

SEQ ID NO: 16685 - protein, 15 aa, Homo sapiens
  CDR3 for alpha chain variable domain of TCR clone 8343 (TRAV2, TRAJ9)
CAVAALNTGGFKTIF

SEQ ID NO: 16686 - protein, 14 aa, Homo sapiens
  CDR3 for beta chain variable domain of TCR clone 8343 (TRBV7-2, TRBJ2-7)
CASSSISGFSEQYF

SEQ ID NO: 16687 - protein, 13 aa, Homo sapiens
  CDR3 for alpha chain variable domain of TCR clone 8344 (TRAV2, TRAJ40)
CAVVTSGTYKYIF

SEQ ID NO: 16688 - protein, 16 aa, Homo sapiens
  CDR3 for beta chain variable domain of TCR clone 8344 (TRBV7-2, TRBJ1-2)
CASSSNQDRRGHGYTF

SEQ ID NO: 16689 - protein, 18 aa, Homo sapiens
  CDR3 for alpha chain variable domain of TCR clone 8345 (TRAV21, TRAJ52)
CAVRPSPAGGTSYGKLTF

SEQ ID NO: 16690 - protein, 13 aa, Homo sapiens
  CDR3 for beta chain variable domain of TCR clone 8345 (TRBV27, TRBJ1-1)
CASSLSIGAEAFF

SEQ ID NO: 16691 - protein, 14 aa, Homo sapiens
  CDR3 for alpha chain variable domain of TCR clone 8346 (TRAV12-2, TRAJ40)
CAGKIPSGTYKYIF

SEQ ID NO: 16692 - protein, 14 aa, Homo sapiens
  CDR3 for beta chain variable domain of TCR clone 8346 (TRBV20-1, TRBJ1-1)
CSAQTRIGGTEAFF

SEQ ID NO: 16693 - protein, 13 aa, Homo sapiens
  CDR3 for alpha chain variable domain of TCR clone 8347 (TRAV21, TRAJ23)
CAVSYNQGGKLIF

SEQ ID NO: 16694 - protein, 14 aa, Homo sapiens
  CDR3 for beta chain variable domain of TCR clone 8347 (TRBV7-2, TRBJ2-3)
CASSLTSGTDTQYF

SEQ ID NO: 16695 - protein, 14 aa, Homo sapiens
  CDR3 for alpha chain variable domain of TCR clone 8348 (TRAV1-2, TRAJ16)
CAVNRFSDGQKLLF

SEQ ID NO: 16696 - protein, 12 aa, Homo sapiens
  CDR3 for beta chain variable domain of TCR clone 8348 (TRBV14, TRBJ2-7)
CASSRLKGEQYF

SEQ ID NO: 16697 - protein, 12 aa, Homo sapiens
  CDR3 for alpha chain variable domain of TCR clone 8349 (TRAV12-3, TRAJ17)
CAMTLTGNKLTF

SEQ ID NO: 16698 - protein, 15 aa, Homo sapiens
  CDR3 for beta chain variable domain of TCR clone 8349 (TRBV20-1, TRBJ2-7)
CSARDRVFGMDEQYF

SEQ ID NO: 16699 - protein, 17 aa, Homo sapiens
  CDR3 for alpha chain variable domain of TCR clone 8350 (TRAV3, TRAJ42)
CAVRDRDYGGSQGNLIF

SEQ ID NO: 16700 - protein, 15 aa, Homo sapiens
  CDR3 for beta chain variable domain of TCR clone 8350 (TRBV29-1, TRBJ1-2)
CSVVLEAGSNYGYTF

SEQ ID NO: 16701 - protein, 14 aa, Homo sapiens
  CDR3 for alpha chain variable domain of TCR clone 8351 (TRAV1-2, TRAJ6)
CTVSLSGGSYIPTF

SEQ ID NO: 16702 - protein, 14 aa, Homo sapiens
  CDR3 for beta chain variable domain of TCR clone 8351 (TRBV13, TRBJ2-7)
CASSLSRISYEQYF

SEQ ID NO: 16703 - protein, 17 aa, Homo sapiens
  CDR3 for alpha chain variable domain of TCR clone 8352 (TRAV3, TRAJ6)
CAVRDGPRAGGSYIPTV

SEQ ID NO: 16704 - protein, 14 aa, Homo sapiens
  CDR3 for beta chain variable domain of TCR clone 8352 (TRBV7-2, TRBJ2-7)
CASSPKTSFYEQYF

SEQ ID NO: 16705 - protein, 13 aa, Homo sapiens
  CDR3 for alpha chain variable domain of TCR clone 8353 (TRAV22, TRAJ29)
CAVGGSGNTPLVF

SEQ ID NO: 16706 - protein, 17 aa, Homo sapiens
  CDR3 for beta chain variable domain of TCR clone 8353 (TRBV13, TRBJ2-3)
CASSLSRVAGGRNTQYF

SEQ ID NO: 16707 - protein, 18 aa, Homo sapiens
  CDR3 for alpha chain variable domain of TCR clone 8354 (TRAV21, TRAJ52)
CAVRPSPAGGTSYGKLTF

SEQ ID NO: 16708 - protein, 17 aa, Homo sapiens
  CDR3 for beta chain variable domain of TCR clone 8354 (TRBV13, TRBJ2-3)
CASSLSGVAGGRNTQYF

SEQ ID NO: 16709 - protein, 15 aa, Homo sapiens
  CDR3 for alpha chain variable domain of TCR clone 8355 (TRAV14/DV4, TRAJ22)
CAMREGWTTARQLTF

SEQ ID NO: 16710 - protein, 13 aa, Homo sapiens
  CDR3 for beta chain variable domain of TCR clone 8355 (TRBV5-4, TRBJ1-2)
CASSSRENYGYTF

SEQ ID NO: 16711 - protein, 16 aa, Homo sapiens
  CDR3 for alpha chain variable domain of TCR clone 8356 (TRAV30, TRAJ24)
CGTEIVDADSWGKFQF

SEQ ID NO: 16712 - protein, 14 aa, Homo sapiens
  CDR3 for beta chain variable domain of TCR clone 8356 (TRBV12-5, TRBJ2-5)
CASGSRTHQETQHF

SEQ ID NO: 16713 - protein, 11 aa, Homo sapiens
  CDR3 for alpha chain variable domain of TCR clone 8357 (TRAV3, TRAJ21)
CAVGNFNKFYF

SEQ ID NO: 16714 - protein, 16 aa, Homo sapiens
  CDR3 for beta chain variable domain of TCR clone 8357 (TRBV19, TRBJ2-1)
CASSKAGPSSYNKQFF

SEQ ID NO: 16715 - protein, 15 aa, Homo sapiens
  CDR3 for alpha chain variable domain of TCR clone 8358 (TRAV13-1, TRAJ17)
CAASIERAAGNKLTF

SEQ ID NO: 16716 - protein, 13 aa, Homo sapiens
  CDR3 for beta chain variable domain of TCR clone 8358 (TRBV10-3, TRBJ2-7)
CASKLAVNYEQYF

SEQ ID NO: 16717 - protein, 18 aa, Homo sapiens
  CDR3 for alpha chain variable domain of TCR clone 8359 (TRAV13-1, TRAJ52)
CAASKRSAGGTSYGKLTF

SEQ ID NO: 16718 - protein, 14 aa, Homo sapiens
  CDR3 for beta chain variable domain of TCR clone 8359 (TRBV7-2, TRBJ2-7)
CASSPKTSFYEQYF

SEQ ID NO: 16719 - protein, 14 aa, Homo sapiens
  CDR3 for alpha chain variable domain of TCR clone 8360 (TRAV8-3, TRAJ4)
CAVVLTGGYNKLIF

SEQ ID NO: 16720 - protein, 16 aa, Homo sapiens
  CDR3 for beta chain variable domain of TCR clone 8360 (TRBV2, TRBJ2-7)
CASSPHPWTGDYEQYF

SEQ ID NO: 16721 - protein, 14 aa, Homo sapiens
  CDR3 for alpha chain variable domain of TCR clone 8361 (TRAV1-1, TRAJ27)
CAVIYNTNAGKSTF

SEQ ID NO: 16722 - protein, 15 aa, Homo sapiens
  CDR3 for beta chain variable domain of TCR clone 8361 (TRBV19, TRBJ1-2)
CASSVGQVLNYGYTF

SEQ ID NO: 16723 - protein, 17 aa, Homo sapiens
  CDR3 for alpha chain variable domain of TCR clone 8362 (TRAV3, TRAJ12)
CAVRDGGRMDSSYKLIF

SEQ ID NO: 16724 - protein, 15 aa, Homo sapiens
  CDR3 for beta chain variable domain of TCR clone 8362 (TRBV4-1, TRBJ1-4)
CASSDTGGTNEKLFF

SEQ ID NO: 16725 - protein, 11 aa, Homo sapiens
  CDR3 for alpha chain variable domain of TCR clone 8363 (TRAV25, TRAJ5)
CRGGGRRALTF

SEQ ID NO: 16726 - protein, 15 aa, Homo sapiens
  CDR3 for beta chain variable domain of TCR clone 8363 (TRBV9, TRBJ1-2)
CASSVVGQANYGYTF

SEQ ID NO: 16727 - protein, 13 aa, Homo sapiens
  CDR3 for alpha chain variable domain of TCR clone 8364 (TRAV3, TRAJ27)
CAVRPLGAGKSTF

SEQ ID NO: 16728 - protein, 13 aa, Homo sapiens
  CDR3 for beta chain variable domain of TCR clone 8364 (TRBV7-9, TRBJ2-3)
CASSPRSTDTQYF

SEQ ID NO: 16729 - protein, 16 aa, Homo sapiens
  CDR3 for alpha chain variable domain of TCR clone 8365 (TRAV30, TRAJ24)
CGTEIVDADSWGKFHF

SEQ ID NO: 16730 - protein, 14 aa, Homo sapiens
  CDR3 for beta chain variable domain of TCR clone 8365 (TRBV12-5, TRBJ2-5)
CASGSRTHQETQYF

SEQ ID NO: 16731 - protein, 15 aa, Homo sapiens
  CDR3 for alpha chain variable domain of TCR clone 8366 (TRAV2, TRAJ9)
CAVAALNTGGFKTIF

SEQ ID NO: 16732 - protein, 15 aa, Homo sapiens
  CDR3 for beta chain variable domain of TCR clone 8366 (TRBV6-3, TRBJ2-7)
CASSSPGTVFYEQYF

SEQ ID NO: 16733 - protein, 17 aa, Homo sapiens
  CDR3 for alpha chain variable domain of TCR clone 8367 (TRAV13-1, TRAJ52)
CAASLGAGGTSYGKLTF

SEQ ID NO: 16734 - protein, 15 aa, Homo sapiens
  CDR3 for beta chain variable domain of TCR clone 8367 (TRBV2, TRBJ2-1)
CASSELAGSYNEQFF

SEQ ID NO: 16735 - protein, 13 aa, Homo sapiens
  CDR3 for alpha chain variable domain of TCR clone 8368 (TRAV38-1, TRAJ42)
CARWGGSQGNLIF

SEQ ID NO: 16736 - protein, 15 aa, Homo sapiens
  CDR3 for beta chain variable domain of TCR clone 8368 (TRBV10-3, TRBJ2-3)
CAISLTSGGTDTQYF

SEQ ID NO: 16737 - protein, 11 aa, Homo sapiens
  CDR3 for alpha chain variable domain of TCR clone 8369 (TRAV21, TRAJ34)
CAVTNTDKLIF

SEQ ID NO: 16738 - protein, 14 aa, Homo sapiens
  CDR3 for beta chain variable domain of TCR clone 8369 (TRBV18, TRBJ1-2)
RVAIFLCANYGYTF

SEQ ID NO: 16739 - protein, 15 aa, Homo sapiens
  CDR3 for alpha chain variable domain of TCR clone 8370 (TRAV2, TRAJ38)
CAVEDRIGNNRKLIW

SEQ ID NO: 16740 - protein, 16 aa, Homo sapiens
  CDR3 for beta chain variable domain of TCR clone 8370 (TRBV7-8, TRBJ2-1)
CASSLAGTGRYNEQFF

SEQ ID NO: 16741 - protein, 14 aa, Homo sapiens
  CDR3 for alpha chain variable domain of TCR clone 8371 (TRAV38-1, TRAJ40)
CALRPTSGTYKYIF

SEQ ID NO: 16742 - protein, 20 aa, Homo sapiens
  CDR3 for beta chain variable domain of TCR clone 8371 (TRBV11-2, TRBJ2-2)
LRTRPCISVPAALEAGSCFF

SEQ ID NO: 16743 - protein, 14 aa, Homo sapiens
  CDR3 for alpha chain variable domain of TCR clone 8372 (TRAV12-2, TRAJ13)
CAVKKTGGYQKVTF

SEQ ID NO: 16744 - protein, 16 aa, Homo sapiens
  CDR3 for beta chain variable domain of TCR clone 8372 (TRBV6-1, TRBJ2-5)
CASSETLDRGAETQYF

SEQ ID NO: 16745 - protein, 13 aa, Homo sapiens
  CDR3 for alpha chain variable domain of TCR clone 8373 (TRAV23/DV6, TRAJ22)
CAPYSGSARQLTF

SEQ ID NO: 16746 - protein, 15 aa, Homo sapiens
  CDR3 for beta chain variable domain of TCR clone 8373 (TRBV20-1, TRBJ2-7)
CSARVPAAYFYEQYF

SEQ ID NO: 16747 - protein, 16 aa, Homo sapiens
  CDR3 for alpha chain variable domain of TCR clone 8374 (TRAV12-3, TRAJ53)
CAMSTGSGGSNYKLTF

SEQ ID NO: 16748 - protein, 11 aa, Homo sapiens
  CDR3 for beta chain variable domain of TCR clone 8374 (TRBV29-1, TRBJ2-5)
CSEDRTGTQYF

SEQ ID NO: 16749 - protein, 17 aa, Homo sapiens
  CDR3 for alpha chain variable domain of TCR clone 8375 (TRAV19, TRAJ53)
CALSEADSGGSNYKLTF

SEQ ID NO: 16750 - protein, 13 aa, Homo sapiens
  CDR3 for beta chain variable domain of TCR clone 8375 (TRBV29-1, TRBJ1-1)
CSVGDSRNTEAFF

SEQ ID NO: 16751 - protein, 15 aa, Homo sapiens
  CDR3 for alpha chain variable domain of TCR clone 8376 (TRAV26-1, TRAJ29)
CIVRVEGSGNTPLVF

SEQ ID NO: 16752 - protein, 15 aa, Homo sapiens
  CDR3 for beta chain variable domain of TCR clone 8376 (TRBV7-9, TRBJ1-5)
CASCQGHQPNQPQHF

SEQ ID NO: 16753 - protein, 12 aa, Homo sapiens
  CDR3 for alpha chain variable domain of TCR clone 8377 (TRAV25, TRAJ11)
CAGASGYSTLTF

SEQ ID NO: 16754 - protein, 14 aa, Homo sapiens
  CDR3 for beta chain variable domain of TCR clone 8377 (TRBV5-8, TRBJ2-3)
CAGSLGQGTDTQYF

SEQ ID NO: 16755 - protein, 13 aa, Homo sapiens
  CDR3 for alpha chain variable domain of TCR clone 8378 (TRAV13-1, TRAJ21)
CAASIYNFNKFYF

SEQ ID NO: 16756 - protein, 14 aa, Homo sapiens
  CDR3 for beta chain variable domain of TCR clone 8378 (TRBV20-1, TRBJ2-1)
CSALDRGTYNEQFF

SEQ ID NO: 16757 - protein, 15 aa, Homo sapiens
  CDR3 for alpha chain variable domain of TCR clone 8379 (TRAV17, TRAJ35)
CATAFVIGFGNVLHC

SEQ ID NO: 16758 - protein, 14 aa, Homo sapiens
  CDR3 for beta chain variable domain of TCR clone 8379 (TRBV12-5, TRBJ2-5)
CASGSRTHQETQYF

SEQ ID NO: 16759 - protein, 13 aa, Homo sapiens
  CDR3 for alpha chain variable domain of TCR clone 8380 (TRAV12-2, TRAJ54)
CAVNRRGAQKLVF

SEQ ID NO: 16760 - protein, 18 aa, Homo sapiens
  CDR3 for beta chain variable domain of TCR clone 8380 (TRBV7-3, TRBJ2-5)
CASSLGGAAQGRWETQYF

SEQ ID NO: 16761 - protein, 13 aa, Homo sapiens
  CDR3 for alpha chain variable domain of TCR clone 8381 (TRAV17, TRAJ4)
CATKSGGYDKLIF

SEQ ID NO: 16762 - protein, 14 aa, Homo sapiens
  CDR3 for beta chain variable domain of TCR clone 8381 (TRBV20-1, TRBJ1-5)
CSARDDRGNQPQHF

SEQ ID NO: 16763 - protein, 13 aa, Homo sapiens
  CDR3 for alpha chain variable domain of TCR clone 8382 (TRAV12-2, TRAJ20)
CAVYPSNDYKLSL

SEQ ID NO: 16764 - protein, 15 aa, Homo sapiens
  CDR3 for beta chain variable domain of TCR clone 8382 (TRBV27, TRBJ2-5)
CASSLYPRGGETQYF

SEQ ID NO: 16765 - protein, 13 aa, Homo sapiens
  CDR3 for alpha chain variable domain of TCR clone 8383 (TRAV2, TRAJ40)
CAVVTSGTYKYIF

SEQ ID NO: 16766 - protein, 14 aa, Homo sapiens
  CDR3 for beta chain variable domain of TCR clone 8383 (TRBV19, TRBJ2-1)
CASPTFILSGEQFF

SEQ ID NO: 16767 - protein, 17 aa, Homo sapiens
  CDR3 for alpha chain variable domain of TCR clone 8384 (TRAV23/DV6, TRAJ28)
CAALLAYSGAGSYQLTF

SEQ ID NO: 16768 - protein, 15 aa, Homo sapiens
  CDR3 for beta chain variable domain of TCR clone 8384 (TRBV7-2, TRBJ2-1)
CASSLVAGRYNEQFF

SEQ ID NO: 16769 - protein, 17 aa, Homo sapiens
  CDR3 for alpha chain variable domain of TCR clone 8385 (TRAV3, TRAJ12)
CAVRDGGRMDSSYKLIF

SEQ ID NO: 16770 - protein, 16 aa, Homo sapiens
  CDR3 for beta chain variable domain of TCR clone 8385 (TRBV12-5, TRBJ2-5)
CASGPRTSGNQETQYF

SEQ ID NO: 16771 - protein, 13 aa, Homo sapiens
  CDR3 for alpha chain variable domain of TCR clone 8386 (TRAV21, TRAJ27)
CAARPGNAGKSTF

SEQ ID NO: 16772 - protein, 14 aa, Homo sapiens
  CDR3 for beta chain variable domain of TCR clone 8386 (TRBV7-6, TRBJ2-3)
CASSSGTVTDTQYF

SEQ ID NO: 16773 - protein, 13 aa, Homo sapiens
  CDR3 for alpha chain variable domain of TCR clone 8387 (TRAV20, TRAJ37)
CAGCPSNTGKLIF

SEQ ID NO: 16774 - protein, 11 aa, Homo sapiens
  CDR3 for beta chain variable domain of TCR clone 8387 (TRBV12-4, TRBJ2-3)
CASTATDTQYF

SEQ ID NO: 16775 - protein, 16 aa, Homo sapiens
  CDR3 for alpha chain variable domain of TCR clone 8388 (TRAV30, TRAJ24)
CGTEIVDADSWGKFQF

SEQ ID NO: 16776 - protein, 14 aa, Homo sapiens
  CDR3 for beta chain variable domain of TCR clone 8388 (TRBV12-5, TRBJ2-5)
CASGSRTHQETHYF

SEQ ID NO: 16777 - protein, 13 aa, Homo sapiens
  CDR3 for alpha chain variable domain of TCR clone 8389 (TRAV4, TRAJ20)
CLVGSSNDYKLSF

SEQ ID NO: 16778 - protein, 13 aa, Homo sapiens
  CDR3 for beta chain variable domain of TCR clone 8389 (TRBV7-3, TRBJ1-1)
CASSQDWGAEAFF

SEQ ID NO: 16779 - protein, 15 aa, Homo sapiens
  CDR3 for alpha chain variable domain of TCR clone 8390 (TRAV3, TRAJ13)
CAVRVYSGGYQKVTF

SEQ ID NO: 16780 - protein, 15 aa, Homo sapiens
  CDR3 for beta chain variable domain of TCR clone 8390 (TRBV7-2, TRBJ2-3)
CASSLVVRGPDTQYF

SEQ ID NO: 16781 - protein, 11 aa, Homo sapiens
  CDR3 for alpha chain variable domain of TCR clone 8391 (TRAV2, TRAJ13)
CASGGYQKVTL

SEQ ID NO: 16782 - protein, 13 aa, Homo sapiens
  CDR3 for beta chain variable domain of TCR clone 8391 (TRBV6-1, TRBJ1-1)
CASSRQGNTEAFF

SEQ ID NO: 16783 - protein, 16 aa, Homo sapiens
  CDR3 for alpha chain variable domain of TCR clone 8392 (TRAV1-2, TRAJ10)
CAVRGVLTGGGNKLTF

SEQ ID NO: 16784 - protein, 13 aa, Homo sapiens
  CDR3 for beta chain variable domain of TCR clone 8392 (TRBV4-1, TRBJ2-1)
CASSQVNEYEQFF

SEQ ID NO: 16785 - protein, 13 aa, Homo sapiens
  CDR3 for alpha chain variable domain of TCR clone 8393 (TRAV6, TRAJ45)
SPFSGGGADGLTF

SEQ ID NO: 16786 - protein, 13 aa, Homo sapiens
  CDR3 for beta chain variable domain of TCR clone 8393 (TRBV20-1, TRBJ1-1)
CSARGGGNTEAFF

SEQ ID NO: 16787 - protein, 13 aa, Homo sapiens
  CDR3 for alpha chain variable domain of TCR clone 8394 (TRAV27, TRAJ6)
CAGGTRGSYIPTF

SEQ ID NO: 16788 - protein, 14 aa, Homo sapiens
  CDR3 for beta chain variable domain of TCR clone 8394 (TRBV5-1, TRBJ2-7)
CASSRGESLYEQYF

SEQ ID NO: 16789 - protein, 14 aa, Homo sapiens
  CDR3 for alpha chain variable domain of TCR clone 8395 (TRAV2, TRAJ37)
CAVDFTSNTGKLIL

SEQ ID NO: 16790 - protein, 15 aa, Homo sapiens
  CDR3 for beta chain variable domain of TCR clone 8395 (TRBV20-1, TRBJ1-1)
CSASRGVTGNTEAFF

SEQ ID NO: 16791 - protein, 14 aa, Homo sapiens
  CDR3 for alpha chain variable domain of TCR clone 8396 (TRAV1-2, TRAJ6)
CAVSLPGGSYIPTF

SEQ ID NO: 16792 - protein, 15 aa, Homo sapiens
  CDR3 for beta chain variable domain of TCR clone 8396 (TRBV28, TRBJ2-7)
CASSPGGGGFYEQYF

SEQ ID NO: 16793 - protein, 15 aa, Homo sapiens
  CDR3 for alpha chain variable domain of TCR clone 8397 (TRAV26-1, TRAJ29)
CIVRVEGPGNTPLVF

SEQ ID NO: 16794 - protein, 15 aa, Homo sapiens
  CDR3 for beta chain variable domain of TCR clone 8397 (TRBV7-9, TRBJ1-5)
CASSQGHQPNQPQHF

SEQ ID NO: 16795 - protein, 14 aa, Homo sapiens
  CDR3 for alpha chain variable domain of TCR clone 8398 (TRAV8-1, TRAJ39)
CAVNDNNAGNMLTF

SEQ ID NO: 16796 - protein, 13 aa, Homo sapiens
  CDR3 for beta chain variable domain of TCR clone 8398 (TRBV19, TRBJ2-7)
CASRKAGGSEQYF

SEQ ID NO: 16797 - protein, 14 aa, Homo sapiens
  CDR3 for alpha chain variable domain of TCR clone 8399 (TRAV13-1, TRAJ35)
CAAGKGGFGNVLHC

SEQ ID NO: 16798 - protein, 13 aa, Homo sapiens
  CDR3 for beta chain variable domain of TCR clone 8399 (TRBV7-3, TRBJ1-1)
CASSQDWGAEAFF

SEQ ID NO: 16799 - protein, 16 aa, Homo sapiens
  CDR3 for alpha chain variable domain of TCR clone 8400 (TRAV38-1, TRAJ42)
CAFRLVRGGSQGNLIF

SEQ ID NO: 16800 - protein, 15 aa, Homo sapiens
  CDR3 for beta chain variable domain of TCR clone 8400 (TRBV7-2, TRBJ1-2)
CASSITWTGNYGYTF

SEQ ID NO: 16801 - protein, 12 aa, Homo sapiens
  CDR3 for alpha chain variable domain of TCR clone 8401 (TRAV13-1, TRAJ21)
CAAKEGFNKFYF

SEQ ID NO: 16802 - protein, 12 aa, Homo sapiens
  CDR3 for beta chain variable domain of TCR clone 8401 (TRBV7-6, TRBJ2-3)
CASSTGTDTQYF

SEQ ID NO: 16803 - protein, 12 aa, Homo sapiens
  CDR3 for alpha chain variable domain of TCR clone 8402 (TRAV8-4, TRAJ20)
CAVSDDDYKLSF

SEQ ID NO: 16804 - protein, 17 aa, Homo sapiens
  CDR3 for beta chain variable domain of TCR clone 8402 (TRBV12-4, TRBJ1-5)
CASSRHQAGGVNQPQHF

SEQ ID NO: 16805 - protein, 14 aa, Homo sapiens
  CDR3 for alpha chain variable domain of TCR clone 8403 (TRAV12-3, TRAJ10)
SHLPLTGGGNKLTF

SEQ ID NO: 16806 - protein, 15 aa, Homo sapiens
  CDR3 for beta chain variable domain of TCR clone 8403 (TRBV7-2, TRBJ2-1)
CASSSGLAGGNEQFF

SEQ ID NO: 16807 - protein, 12 aa, Homo sapiens
  CDR3 for alpha chain variable domain of TCR clone 8404 (TRAV1-1, TRAJ8)
CVGGTGFQKLVF

SEQ ID NO: 16808 - protein, 17 aa, Homo sapiens
  CDR3 for beta chain variable domain of TCR clone 8404 (TRBV4-3, TRBJ2-1)
CASSQELAIVSSNEQFF

SEQ ID NO: 16809 - protein, 15 aa, Homo sapiens
  CDR3 for alpha chain variable domain of TCR clone 8405 (TRAV26-1, TRAJ44)
CIVRANTGTASKLTF

SEQ ID NO: 16810 - protein, 15 aa, Homo sapiens
  CDR3 for beta chain variable domain of TCR clone 8405 (TRBV6-1, TRBJ2-4)
CASSEAVWTINIQYF

SEQ ID NO: 16811 - protein, 13 aa, Homo sapiens
  CDR3 for alpha chain variable domain of TCR clone 8406 (TRAV27, TRAJ6)
CAGGTRGSYIPTS

SEQ ID NO: 16812 - protein, 14 aa, Homo sapiens
  CDR3 for beta chain variable domain of TCR clone 8406 (TRBV6-3, TRBJ1-1)
CASSYQRRDTEAFF

SEQ ID NO: 16813 - protein, 15 aa, Homo sapiens
  CDR3 for alpha chain variable domain of TCR clone 8407 (TRAV27, TRAJ38)
CAARRNAGNNRKLIW

SEQ ID NO: 16814 - protein, 13 aa, Homo sapiens
  CDR3 for beta chain variable domain of TCR clone 8407 (TRBV19, TRBJ1-2)
CASSVPGQDGYTF

SEQ ID NO: 16815 - protein, 12 aa, Homo sapiens
  CDR3 for alpha chain variable domain of TCR clone 8408 (TRAV34, TRAJ27)
CGADTNAGKSTF

SEQ ID NO: 16816 - protein, 17 aa, Homo sapiens
  CDR3 for beta chain variable domain of TCR clone 8408 (TRBV7-3, TRBJ2-2)
CASSLSGTSGGTGELFF

SEQ ID NO: 16817 - protein, 11 aa, Homo sapiens
  CDR3 for alpha chain variable domain of TCR clone 8409 (TRAV29/DV5, TRAJ37)
CATSNTGKLIF

SEQ ID NO: 16818 - protein, 18 aa, Homo sapiens
  CDR3 for beta chain variable domain of TCR clone 8409 (TRBV20-1, TRBJ2-6)
CSARTLAGGPSGANVLTF

SEQ ID NO: 16819 - protein, 13 aa, Homo sapiens
  CDR3 for alpha chain variable domain of TCR clone 8410 (TRAV21, TRAJ27)
CAARPGNAGESTF

SEQ ID NO: 16820 - protein, 14 aa, Homo sapiens
  CDR3 for beta chain variable domain of TCR clone 8410 (TRBV7-6, TRBJ2-3)
CASSLGTVTDTQYF

SEQ ID NO: 16821 - protein, 14 aa, Homo sapiens
  CDR3 for alpha chain variable domain of TCR clone 8411 (TRAV13-1, TRAJ22)
CAASYSGSARQLTF

SEQ ID NO: 16822 - protein, 13 aa, Homo sapiens
  CDR3 for beta chain variable domain of TCR clone 8411 (TRBV27, TRBJ1-1)
CASSLSIGAEAFF

SEQ ID NO: 16823 - protein, 10 aa, Homo sapiens
  CDR3 for alpha chain variable domain of TCR clone 8412 (TRAV2, TRAJ34)
CAVVNDKLIF

SEQ ID NO: 16824 - protein, 13 aa, Homo sapiens
  CDR3 for beta chain variable domain of TCR clone 8412 (TRBV7-3, TRBJ1-1)
CASSLTQGTEAFF

SEQ ID NO: 16825 - protein, 18 aa, Homo sapiens
  CDR3 for alpha chain variable domain of TCR clone 8413 (TRAV21, TRAJ52)
CAVRPSPAGGISYGKLTF

SEQ ID NO: 16826 - protein, 14 aa, Homo sapiens
  CDR3 for beta chain variable domain of TCR clone 8413 (TRBV19, TRBJ2-1)
CARGARSFQWEQFF

SEQ ID NO: 16827 - protein, 14 aa, Homo sapiens
  CDR3 for alpha chain variable domain of TCR clone 8414 (TRAV1-2, TRAJ16)
CAVNRFSDGQKLLF

SEQ ID NO: 16828 - protein, 13 aa, Homo sapiens
  CDR3 for beta chain variable domain of TCR clone 8414 (TRBV19, TRBJ1-5)
CASSEGSNQPQHF

SEQ ID NO: 16829 - protein, 11 aa, Homo sapiens
  CDR3 for alpha chain variable domain of TCR clone 8415 (TRAV1-1, TRAJ23)
CAVRQGGKLIF

SEQ ID NO: 16830 - protein, 20 aa, Homo sapiens
  CDR3 for beta chain variable domain of TCR clone 8415 (TRBV7-8, TRBJ2-2)
CASSHLFPGPTIHITGELFL

SEQ ID NO: 16831 - protein, 14 aa, Homo sapiens
  CDR3 for alpha chain variable domain of TCR clone 8416 (TRAV1-2, TRAJ16)
CAVNRFSDGQKLLF

SEQ ID NO: 16832 - protein, 15 aa, Homo sapiens
  CDR3 for beta chain variable domain of TCR clone 8416 (TRBV7-2, TRBJ2-2)
CASSSLTGGTGELFF

SEQ ID NO: 16833 - protein, 11 aa, Homo sapiens
  CDR3 for alpha chain variable domain of TCR clone 8417 (TRAV17, TRAJ9)
CATTGGFKTIF

SEQ ID NO: 16834 - protein, 14 aa, Homo sapiens
  CDR3 for beta chain variable domain of TCR clone 8417 (TRBV12-5, TRBJ2-5)
CASGSRTHQETQYF

SEQ ID NO: 16835 - protein, 21 aa, Homo sapiens
  CDR3 for alpha chain variable domain of TCR clone 8418 (TRAV8-3, TRAJ6)
CAVGGEEATYLHLEEEPALLF

SEQ ID NO: 16836 - protein, 17 aa, Homo sapiens
  CDR3 for beta chain variable domain of TCR clone 8418 (TRBV7-2, TRBJ2-3)
CASSLAGGLAGTAGQYF

SEQ ID NO: 16837 - protein, 17 aa, Homo sapiens
  CDR3 for alpha chain variable domain of TCR clone 8419 (TRAV3, TRAJ6)
CAVRDGPRAGGSYIPTF

SEQ ID NO: 16838 - protein, 15 aa, Homo sapiens
  CDR3 for beta chain variable domain of TCR clone 8419 (TRBV5-5, TRBJ1-5)
CASSSTPGSNQPQHF

SEQ ID NO: 16839 - protein, 14 aa, Homo sapiens
  CDR3 for alpha chain variable domain of TCR clone 8420 (TRAV35, TRAJ22)
CAGLRPGSARQQTF

SEQ ID NO: 16840 - protein, 15 aa, Homo sapiens
  CDR3 for beta chain variable domain of TCR clone 8420 (TRBV12-4, TRBJ2-5)
CASSPPTGLQETQYF

SEQ ID NO: 16841 - protein, 17 aa, Homo sapiens
  CDR3 for alpha chain variable domain of TCR clone 8421 (TRAV3, TRAJ6)
CAVRDGPRAGGSYIPTF

SEQ ID NO: 16842 - protein, 13 aa, Homo sapiens
  CDR3 for beta chain variable domain of TCR clone 8421 (TRBV7-3, TRBJ1-1)
CASSQDWGAEAFF

SEQ ID NO: 16843 - protein, 15 aa, Homo sapiens
  CDR3 for alpha chain variable domain of TCR clone 8422 (TRAV8-3, TRAJ45)
CASSYPGGGADGLTF

SEQ ID NO: 16844 - protein, 13 aa, Homo sapiens
  CDR3 for beta chain variable domain of TCR clone 8422 (TRBV10-3, TRBJ2-7)
CASKLAVNYEQYF

SEQ ID NO: 16845 - protein, 12 aa, Homo sapiens
  CDR3 for alpha chain variable domain of TCR clone 8423 (TRAV3, TRAJ43)
CAVRDPNNDMRF

SEQ ID NO: 16846 - protein, 15 aa, Homo sapiens
  CDR3 for beta chain variable domain of TCR clone 8423 (TRBV27, TRBJ1-5)
CASSPGTGFDQPQHF

SEQ ID NO: 16847 - protein, 15 aa, Homo sapiens
  CDR3 for alpha chain variable domain of TCR clone 8424 (TRAV8-2, TRAJ23)
CVVSAFYNQGGKLIF

SEQ ID NO: 16848 - protein, 13 aa, Homo sapiens
  CDR3 for beta chain variable domain of TCR clone 8424 (TRBV4-1, TRBJ2-1)
CASSQAGGDEQFF

SEQ ID NO: 16849 - protein, 14 aa, Homo sapiens
  CDR3 for alpha chain variable domain of TCR clone 8425 (TRAV3, TRAJ17)
CAVRDAAAGNKLTF

SEQ ID NO: 16850 - protein, 13 aa, Homo sapiens
  CDR3 for beta chain variable domain of TCR clone 8425 (TRBV19, TRBJ1-2)
CASSVPGQDGYTF

SEQ ID NO: 16851 - protein, 12 aa, Homo sapiens
  CDR3 for alpha chain variable domain of TCR clone 8426 (TRAV9-2, TRAJ36)
CALKKGANNLFF

SEQ ID NO: 16852 - protein, 16 aa, Homo sapiens
  CDR3 for beta chain variable domain of TCR clone 8426 (TRBV20-1, TRBJ1-4)
CSAPGQGLLTNEKLFF

SEQ ID NO: 16853 - protein, 14 aa, Homo sapiens
  CDR3 for alpha chain variable domain of TCR clone 8427 (TRAV8-4, TRAJ38)
CAVSYAGNNRKLIW

SEQ ID NO: 16854 - protein, 15 aa, Homo sapiens
  CDR3 for beta chain variable domain of TCR clone 8427 (TRBV12-4, TRBJ2-1)
CASSLLATGNNEQFF

SEQ ID NO: 16855 - protein, 14 aa, Homo sapiens
  CDR3 for alpha chain variable domain of TCR clone 8428 (TRAV1-2, TRAJ8)
CAVREDTGFKKLVF

SEQ ID NO: 16856 - protein, 15 aa, Homo sapiens
  CDR3 for beta chain variable domain of TCR clone 8428 (TRBV6-3, TRBJ2-7)
CASSSPGTVFYEQYF

SEQ ID NO: 16857 - protein, 16 aa, Homo sapiens
  CDR3 for alpha chain variable domain of TCR clone 8429 (TRAV30, TRAJ24)
CGTEIVDADSWGKFQF

SEQ ID NO: 16858 - protein, 14 aa, Homo sapiens
  CDR3 for beta chain variable domain of TCR clone 8429 (TRBV12-5, TRBJ2-5)
CTSGSRTHQETQYF

SEQ ID NO: 16859 - protein, 15 aa, Homo sapiens
  CDR3 for alpha chain variable domain of TCR clone 8430 (TRAV17, TRAJ10)
CATVLLTGGGNKLTF

SEQ ID NO: 16860 - protein, 14 aa, Homo sapiens
  CDR3 for beta chain variable domain of TCR clone 8430 (TRBV12-5, TRBJ2-7)
CASGQTGNSYEQYF

SEQ ID NO: 16861 - protein, 10 aa, Homo sapiens
  CDR3 for alpha chain variable domain of TCR clone 8431 (TRAV23/DV6, TRAJ57)
CAASSTLSQG

SEQ ID NO: 16862 - protein, 14 aa, Homo sapiens
  CDR3 for beta chain variable domain of TCR clone 8431 (TRBV25-1, TRBJ1-1)
RASTHLGGNTEAFF

SEQ ID NO: 16863 - protein, 16 aa, Homo sapiens
  CDR3 for alpha chain variable domain of TCR clone 8432 (TRAV3, TRAJ37)
CAVRPHGSGNTGKLIF

SEQ ID NO: 16864 - protein, 15 aa, Homo sapiens
  CDR3 for beta chain variable domain of TCR clone 8432 (TRBV6-3, TRBJ2-7)
CASSSPGTVFYEQYF

SEQ ID NO: 16865 - protein, 14 aa, Homo sapiens
  CDR3 for alpha chain variable domain of TCR clone 8433 (TRAV3, TRAJ15)
CAVTLNQAGTALIF

SEQ ID NO: 16866 - protein, 17 aa, Homo sapiens
  CDR3 for beta chain variable domain of TCR clone 8433 (TRBV7-8, TRBJ2-7)
CASSFTSGRPPSYEQYF

SEQ ID NO: 16867 - protein, 16 aa, Homo sapiens
  CDR3 for alpha chain variable domain of TCR clone 8434 (TRAV26-1, TRAJ13)
CIVSPKDSGGYQKVTF

SEQ ID NO: 16868 - protein, 16 aa, Homo sapiens
  CDR3 for beta chain variable domain of TCR clone 8434 (TRBV5-7, TRBJ2-5)
CASIRGQTGYQETQYF

SEQ ID NO: 16869 - protein, 13 aa, Homo sapiens
  CDR3 for alpha chain variable domain of TCR clone 8435 (TRAV13-1, TRAJ5)
CAARVTGRRALTF

SEQ ID NO: 16870 - protein, 12 aa, Homo sapiens
  CDR3 for beta chain variable domain of TCR clone 8435 (TRBV3-1, TRBJ2-5)
CASSQRGETQYF

SEQ ID NO: 16871 - protein, 13 aa, Homo sapiens
  CDR3 for alpha chain variable domain of TCR clone 8436 (TRAV2, TRAJ40)
CAVVTSGTYKYIF

SEQ ID NO: 16872 - protein, 14 aa, Homo sapiens
  CDR3 for beta chain variable domain of TCR clone 8436 (TRBV7-2, TRBJ2-7)
CASRSQGAAYEQYF

SEQ ID NO: 16873 - protein, 14 aa, Homo sapiens
  CDR3 for alpha chain variable domain of TCR clone 8437 (TRAV12-2, TRAJ17)
CAVLFKAAGNKLTL

SEQ ID NO: 16874 - protein, 17 aa, Homo sapiens
  CDR3 for beta chain variable domain of TCR clone 8437 (TRBV20-1, TRBJ2-2)
CSASGSGQGGLTGELFF

SEQ ID NO: 16875 - protein, 17 aa, Homo sapiens
  CDR3 for alpha chain variable domain of TCR clone 8438 (TRAV3, TRAJ6)
CAVRDGPRAGGSYIPTF

SEQ ID NO: 16876 - protein, 14 aa, Homo sapiens
  CDR3 for beta chain variable domain of TCR clone 8438 (TRBV7-2, TRBJ2-7)
CARSPKTSFYEQYF

SEQ ID NO: 16877 - protein, 13 aa, Homo sapiens
  CDR3 for alpha chain variable domain of TCR clone 8439 (TRAV21, TRAJ27)
CAARPGNAGKSTF

SEQ ID NO: 16878 - protein, 14 aa, Homo sapiens
  CDR3 for beta chain variable domain of TCR clone 8439 (TRBV7-6, TRBJ2-3)
CASSLGTVTDTRYF

SEQ ID NO: 16879 - protein, 11 aa, Homo sapiens
  CDR3 for alpha chain variable domain of TCR clone 8440 (TRAV26-1, TRAJ37)
CIVRVGRKLIF

SEQ ID NO: 16880 - protein, 16 aa, Homo sapiens
  CDR3 for beta chain variable domain of TCR clone 8440 (TRBV7-3, TRBJ2-6)
CASSLTLAGGANVLTF

SEQ ID NO: 16881 - protein, 17 aa, Homo sapiens
  CDR3 for alpha chain variable domain of TCR clone 8441 (TRAV3, TRAJ6)
CAVRDGPRAGGSYIPTF

SEQ ID NO: 16882 - protein, 13 aa, Homo sapiens
  CDR3 for beta chain variable domain of TCR clone 8441 (TRBV24-1, TRBJ2-2)
CATSDWSTGELFF

SEQ ID NO: 16883 - protein, 13 aa, Homo sapiens
  CDR3 for alpha chain variable domain of TCR clone 8442 (TRAV27, TRAJ45)
CRSSGGGADGLTF

SEQ ID NO: 16884 - protein, 17 aa, Homo sapiens
  CDR3 for beta chain variable domain of TCR clone 8442 (TRBV11-2, TRBJ2-1)
CASSLSPPGVEYNEQFF

SEQ ID NO: 16885 - protein, 12 aa, Homo sapiens
  CDR3 for alpha chain variable domain of TCR clone 8443 (TRAV8-4, TRAJ43)
CAVSVNNNDMRF

SEQ ID NO: 16886 - protein, 13 aa, Homo sapiens
  CDR3 for beta chain variable domain of TCR clone 8443 (TRBV7-7, TRBJ1-1)
CASSLGANTEAFF

SEQ ID NO: 16887 - protein, 13 aa, Homo sapiens
  CDR3 for alpha chain variable domain of TCR clone 8444 (TRAV8-4, TRAJ30)
CATYKNRDDKIIF

SEQ ID NO: 16888 - protein, 11 aa, Homo sapiens
  CDR3 for beta chain variable domain of TCR clone 8444 (TRBV6-1, TRBJ2-1)
CASRGYNEQFF

SEQ ID NO: 16889 - protein, 11 aa, Homo sapiens
  CDR3 for alpha chain variable domain of TCR clone 8445 (TRAV2, TRAJ13)
CASGGYQKVTF

SEQ ID NO: 16890 - protein, 14 aa, Homo sapiens
  CDR3 for beta chain variable domain of TCR clone 8445 (TRBV12-4, TRBJ1-4)
CASRMTGRSEKLFF

SEQ ID NO: 16891 - protein, 12 aa, Homo sapiens
  CDR3 for alpha chain variable domain of TCR clone 8446 (TRAV12-3, TRAJ17)
CAMTLTGNKLTF

SEQ ID NO: 16892 - protein, 14 aa, Homo sapiens
  CDR3 for beta chain variable domain of TCR clone 8446 (TRBV20-1, TRBJ1-1)
CSAQTRIGGTEAFF

SEQ ID NO: 16893 - protein, 13 aa, Homo sapiens
  CDR3 for alpha chain variable domain of TCR clone 8447 (TRAV21, TRAJ20)
CAVGLRVDYKLSF

SEQ ID NO: 16894 - protein, 12 aa, Homo sapiens
  CDR3 for beta chain variable domain of TCR clone 8447 (TRBV11-3, TRBJ1-1)
CASSHRQGEAFF

SEQ ID NO: 16895 - protein, 11 aa, Homo sapiens
  CDR3 for alpha chain variable domain of TCR clone 8448 (TRAV17, TRAJ39)
CATGAGNMLTF

SEQ ID NO: 16896 - protein, 16 aa, Homo sapiens
  CDR3 for beta chain variable domain of TCR clone 8448 (TRBV5-1, TRBJ2-1)
CASSFGVSGSYNEQLF

SEQ ID NO: 16897 - protein, 14 aa, Homo sapiens
  CDR3 for alpha chain variable domain of TCR clone 8449 (TRAV1-1, TRAJ27)
CAVIYNTNAGKSTF

SEQ ID NO: 16898 - protein, 15 aa, Homo sapiens
  CDR3 for beta chain variable domain of TCR clone 8449 (TRBV9, TRBJ1-6)
CASSVAGTGDSPLHF

SEQ ID NO: 16899 - protein, 14 aa, Homo sapiens
  CDR3 for alpha chain variable domain of TCR clone 8450 (TRAV1-2, TRAJ8)
CAVREDTGFQKLVF

SEQ ID NO: 16900 - protein, 13 aa, Homo sapiens
  CDR3 for beta chain variable domain of TCR clone 8450 (TRBV19, TRBJ2-7)
CASRKAGGSEQYF

SEQ ID NO: 16901 - protein, 14 aa, Homo sapiens
  CDR3 for alpha chain variable domain of TCR clone 8451 (TRAV13-1, TRAJ20)
CAARPGSNDYKLSF

SEQ ID NO: 16902 - protein, 12 aa, Homo sapiens
  CDR3 for beta chain variable domain of TCR clone 8451 (TRBV7-8, TRBJ2-7)
CASSLGDREQYF

SEQ ID NO: 16903 - protein, 15 aa, Homo sapiens
  CDR3 for alpha chain variable domain of TCR clone 8452 (TRAV8-3, TRAJ27)
CAVGPSKTNAGKSTL

SEQ ID NO: 16904 - protein, 15 aa, Homo sapiens
  CDR3 for beta chain variable domain of TCR clone 8452 (TRBV7-2, TRBJ2-1)
CASSSGLAGGNEQFF

SEQ ID NO: 16905 - protein, 19 aa, Homo sapiens
  CDR3 for alpha chain variable domain of TCR clone 8453 (TRAV26-1, TRAJ42)
CVLLHRQTYYGGSQGNLIF

SEQ ID NO: 16906 - protein, 16 aa, Homo sapiens
  CDR3 for beta chain variable domain of TCR clone 8453 (TRBV7-3, TRBJ2-2)
CASSLKRGTLSGELFF

SEQ ID NO: 16907 - protein, 12 aa, Homo sapiens
  CDR3 for alpha chain variable domain of TCR clone 8454 (TRAV12-3, TRAJ17)
CAMTLTGNKLTF

SEQ ID NO: 16908 - protein, 15 aa, Homo sapiens
  CDR3 for beta chain variable domain of TCR clone 8454 (TRBV20-1, TRBJ2-7)
CSARDRVSRMDEQYF

SEQ ID NO: 16909 - protein, 14 aa, Homo sapiens
  CDR3 for alpha chain variable domain of TCR clone 8455 (TRAV13-1, TRAJ44)
CAAKATGTASKLTF

SEQ ID NO: 16910 - protein, 14 aa, Homo sapiens
  CDR3 for beta chain variable domain of TCR clone 8455 (TRBV19, TRBJ2-2)
CDSSTLHRSGELFF

SEQ ID NO: 16911 - protein, 14 aa, Homo sapiens
  CDR3 for alpha chain variable domain of TCR clone 8456 (TRAV35, TRAJ22)
CAGLRPGSAKQLTF

SEQ ID NO: 16912 - protein, 13 aa, Homo sapiens
  CDR3 for beta chain variable domain of TCR clone 8456 (TRBV20-1, TRBJ2-7)
CSATHTSGYEQYF

SEQ ID NO: 16913 - protein, 18 aa, Homo sapiens
  CDR3 for alpha chain variable domain of TCR clone 8457 (TRAV21, TRAJ52)
CAVRPSPAGGTRYGKLTF

SEQ ID NO: 16914 - protein, 17 aa, Homo sapiens
  CDR3 for beta chain variable domain of TCR clone 8457 (TRBV13, TRBJ2-3)
CASSLSRVAGGRNTQYF

SEQ ID NO: 16915 - protein, 15 aa, Homo sapiens
  CDR3 for alpha chain variable domain of TCR clone 8458 (TRAV4, TRAJ32)
CLVGEDGGATNKLIF

SEQ ID NO: 16916 - protein, 16 aa, Homo sapiens
  CDR3 for beta chain variable domain of TCR clone 8458 (TRBV13, TRBJ2-2)
CASSPRTGEHTGELFF

SEQ ID NO: 16917 - protein, 15 aa, Homo sapiens
  CDR3 for alpha chain variable domain of TCR clone 8459 (TRAV8-3, TRAJ37)
CAVGGLSSNTGKLIF

SEQ ID NO: 16918 - protein, 15 aa, Homo sapiens
  CDR3 for beta chain variable domain of TCR clone 8459 (TRBV7-8, TRBJ1-1)
CASSLGSGFDTEAFF

SEQ ID NO: 16919 - protein, 18 aa, Homo sapiens
  CDR3 for alpha chain variable domain of TCR clone 8460 (TRAV26-2, TRAJ17)
CCVLLHPAIKAAGNKLTF

SEQ ID NO: 16920 - protein, 15 aa, Homo sapiens
  CDR3 for beta chain variable domain of TCR clone 8460 (TRBV27, TRBJ2-7)
CASSTAGTGSYEQYF

SEQ ID NO: 16921 - protein, 11 aa, Homo sapiens
  CDR3 for alpha chain variable domain of TCR clone 8461 (TRAV1-1, TRAJ23)
CAVRQGGRLIF

SEQ ID NO: 16922 - protein, 20 aa, Homo sapiens
  CDR3 for beta chain variable domain of TCR clone 8461 (TRBV7-8, TRBJ2-2)
CASSHLFPGPTIHITGELFF

SEQ ID NO: 16923 - protein, 12 aa, Homo sapiens
  CDR3 for alpha chain variable domain of TCR clone 8462 (TRAV5, TRAJ3)
CAEDSSASKIIF

SEQ ID NO: 16924 - protein, 12 aa, Homo sapiens
  CDR3 for beta chain variable domain of TCR clone 8462 (TRBV12-4, TRBJ2-1)
CASSPGRNEQFF

SEQ ID NO: 16925 - protein, 14 aa, Homo sapiens
  CDR3 for alpha chain variable domain of TCR clone 8463 (TRAV1-2, TRAJ16)
CAVNRFSDGQKLLF

SEQ ID NO: 16926 - protein, 15 aa, Homo sapiens
  CDR3 for beta chain variable domain of TCR clone 8463 (TRBV27, TRBJ2-3)
CASRSLAGVIDTQYF

SEQ ID NO: 16927 - protein, 14 aa, Homo sapiens
  CDR3 for alpha chain variable domain of TCR clone 8464 (TRAV1-2, TRAJ8)
CAVREDTGFQKLGF

SEQ ID NO: 16928 - protein, 15 aa, Homo sapiens
  CDR3 for beta chain variable domain of TCR clone 8464 (TRBV6-3, TRBJ2-7)
CASSSPGTVFYEQYF

SEQ ID NO: 16929 - protein, 15 aa, Homo sapiens
  CDR3 for alpha chain variable domain of TCR clone 8465 (TRAV1-2, TRAJ15)
CAVDVMGSTGTALIF

SEQ ID NO: 16930 - protein, 13 aa, Homo sapiens
  CDR3 for beta chain variable domain of TCR clone 8465 (TRBV7-2, TRBJ2-5)
CASSQTSVETQYF

SEQ ID NO: 16931 - protein, 12 aa, Homo sapiens
  CDR3 for alpha chain variable domain of TCR clone 8466 (TRAV20, TRAJ39)
CAVGNAGNMLTF

SEQ ID NO: 16932 - protein, 14 aa, Homo sapiens
  CDR3 for beta chain variable domain of TCR clone 8466 (TRBV20-1, TRBJ2-7)
CSAKRGRSSYEQYF

SEQ ID NO: 16933 - protein, 15 aa, Homo sapiens
  CDR3 for alpha chain variable domain of TCR clone 8467 (TRAV12-3, TRAJ6)
CAMSATTGGSYIPTF

SEQ ID NO: 16934 - protein, 14 aa, Homo sapiens
  CDR3 for beta chain variable domain of TCR clone 8467 (TRBV13, TRBJ2-5)
CASSLERVGETQYF

SEQ ID NO: 16935 - protein, 15 aa, Homo sapiens
  CDR3 for alpha chain variable domain of TCR clone 8468 (TRAV27, TRAJ38)
CAARRNAGNNRKLIW

SEQ ID NO: 16936 - protein, 13 aa, Homo sapiens
  CDR3 for beta chain variable domain of TCR clone 8468 (TRBV12-5, TRBJ2-3)
CASGDRQSDTQCF

SEQ ID NO: 16937 - protein, 13 aa, Homo sapiens
  CDR3 for alpha chain variable domain of TCR clone 8469 (TRAV8-3, TRAJ36)
CAVGATGANNLFF

SEQ ID NO: 16938 - protein, 15 aa, Homo sapiens
  CDR3 for beta chain variable domain of TCR clone 8469 (TRBV7-2, TRBJ1-2)
CASSPRAGWNYGDTF

SEQ ID NO: 16939 - protein, 11 aa, Homo sapiens
  CDR3 for alpha chain variable domain of TCR clone 8470 (TRAV2, TRAJ33)
CAVDSNYQLIW

SEQ ID NO: 16940 - protein, 15 aa, Homo sapiens
  CDR3 for beta chain variable domain of TCR clone 8470 (TRBV9, TRBJ1-6)
CASSVAGTGDSPLHF

SEQ ID NO: 16941 - protein, 14 aa, Homo sapiens
  CDR3 for alpha chain variable domain of TCR clone 8471 (TRAV2, TRAJ29)
CAGPFQYGNTPLVF

SEQ ID NO: 16942 - protein, 18 aa, Homo sapiens
  CDR3 for beta chain variable domain of TCR clone 8471 (TRBV6-1, TRBJ1-6)
CASSGSDGRRINNSPLHF

SEQ ID NO: 16943 - protein, 15 aa, Homo sapiens
  CDR3 for alpha chain variable domain of TCR clone 8472 (TRAV27, TRAJ38)
CAARRNAGNNRKLMW

SEQ ID NO: 16944 - protein, 13 aa, Homo sapiens
  CDR3 for beta chain variable domain of TCR clone 8472 (TRBV12-5, TRBJ2-3)
CASGDRQSDTQYF

SEQ ID NO: 16945 - protein, 18 aa, Homo sapiens
  CDR3 for alpha chain variable domain of TCR clone 8473 (TRAV21, TRAJ53)
CAVKGGENSGGSNYKLTF

SEQ ID NO: 16946 - protein, 13 aa, Homo sapiens
  CDR3 for beta chain variable domain of TCR clone 8473 (TRBV12-4, TRBJ1-1)
CASSPGTGFEAFF

SEQ ID NO: 16947 - protein, 16 aa, Homo sapiens
  CDR3 for alpha chain variable domain of TCR clone 8474 (TRAV19, TRAJ53)
CALIADSGGSNYKLTF

SEQ ID NO: 16948 - protein, 16 aa, Homo sapiens
  CDR3 for beta chain variable domain of TCR clone 8474 (TRBV20-1, TRBJ2-7)
CSARGSVVADIYEQYF

SEQ ID NO: 16949 - protein, 12 aa, Homo sapiens
  CDR3 for alpha chain variable domain of TCR clone 8475 (TRAV12-2, TRAJ43)
CAVNVNNNDMRF

SEQ ID NO: 16950 - protein, 17 aa, Homo sapiens
  CDR3 for beta chain variable domain of TCR clone 8475 (TRBV3-1, TRBJ2-2)
CASSQFRDKVDTGELFF

SEQ ID NO: 16951 - protein, 14 aa, Homo sapiens
  CDR3 for alpha chain variable domain of TCR clone 8476 (TRAV13-2, TRAJ43)
CAEIPTYNNNDIRF

SEQ ID NO: 16952 - protein, 15 aa, Homo sapiens
  CDR3 for beta chain variable domain of TCR clone 8476 (TRBV7-9, TRBJ2-2)
CASGPLDTFPGELFF

SEQ ID NO: 16953 - protein, 13 aa, Homo sapiens
  CDR3 for alpha chain variable domain of TCR clone 8477 (TRAV13-1, TRAJ48)
CARSNFGNEKLTF

SEQ ID NO: 16954 - protein, 14 aa, Homo sapiens
  CDR3 for beta chain variable domain of TCR clone 8477 (TRBV7-3, TRBJ2-2)
CASSLLGSTGELFF

SEQ ID NO: 16955 - protein, 14 aa, Homo sapiens
  CDR3 for alpha chain variable domain of TCR clone 8478 (TRAV17, TRAJ57)
CATDPQGGSEKLVF

SEQ ID NO: 16956 - protein, 14 aa, Homo sapiens
  CDR3 for beta chain variable domain of TCR clone 8478 (TRBV7-2, TRBJ2-7)
CASSPKTSFYEQYF

SEQ ID NO: 16957 - protein, 18 aa, Homo sapiens
  CDR3 for alpha chain variable domain of TCR clone 8479 (TRAV13-1, TRAJ52)
CAAKNPNAGGTSYGKLTF

SEQ ID NO: 16958 - protein, 17 aa, Homo sapiens
  CDR3 for beta chain variable domain of TCR clone 8479 (TRBV20-1, TRBJ2-1)
CSASSSGLAGSYNEQFF

SEQ ID NO: 16959 - protein, 15 aa, Homo sapiens
  CDR3 for alpha chain variable domain of TCR clone 8480 (TRAV17, TRAJ23)
CATDAEDNQGGKLIF

SEQ ID NO: 16960 - protein, 14 aa, Homo sapiens
  CDR3 for beta chain variable domain of TCR clone 8480 (TRBV6-1, TRBJ1-3)
CASVQGGGGNTIYF

SEQ ID NO: 16961 - protein, 14 aa, Homo sapiens
  CDR3 for alpha chain variable domain of TCR clone 8481 (TRAV1-2, TRAJ16)
CAVNRFSDGQKLLF

SEQ ID NO: 16962 - protein, 15 aa, Homo sapiens
  CDR3 for beta chain variable domain of TCR clone 8481 (TRBV10-3, TRBJ2-3)
CAISLTSGGTDTQYF

SEQ ID NO: 16963 - protein, 12 aa, Homo sapiens
  CDR3 for alpha chain variable domain of TCR clone 8482 (TRAV12-3, TRAJ17)
CAMTLTGNKLTF

SEQ ID NO: 16964 - protein, 15 aa, Homo sapiens
  CDR3 for beta chain variable domain of TCR clone 8482 (TRBV20-1, TRBJ2-7)
CSARDRVSGMDEHYF

SEQ ID NO: 16965 - protein, 13 aa, Homo sapiens
  CDR3 for alpha chain variable domain of TCR clone 8483 (TRAV12-2, TRAJ12)
CAVNEDSSYKLIF

SEQ ID NO: 16966 - protein, 17 aa, Homo sapiens
  CDR3 for beta chain variable domain of TCR clone 8483 (TRBV20-1, TRBJ2-7)
CSATRAGGVAGVEEQYF

SEQ ID NO: 16967 - protein, 12 aa, Homo sapiens
  CDR3 for alpha chain variable domain of TCR clone 8484 (TRAV24, TRAJ17)
CASKAAGNKLTF

SEQ ID NO: 16968 - protein, 20 aa, Homo sapiens
  CDR3 for beta chain variable domain of TCR clone 8484 (TRBV7-8, TRBJ2-2)
CASSHLFPGPTIHITGELFF

SEQ ID NO: 16969 - protein, 17 aa, Homo sapiens
  CDR3 for alpha chain variable domain of TCR clone 8485 (TRAV3, TRAJ6)
CAVRDGPRAGGSYIPTF

SEQ ID NO: 16970 - protein, 17 aa, Homo sapiens
  CDR3 for beta chain variable domain of TCR clone 8485 (TRBV20-1, TRBJ2-1)
CSAPPRLAGTRYNEQFF

SEQ ID NO: 16971 - protein, 14 aa, Homo sapiens
  CDR3 for alpha chain variable domain of TCR clone 8486 (TRAV12-1, TRAJ17)
CVVNYKAAGNKLTF

SEQ ID NO: 16972 - protein, 17 aa, Homo sapiens
  CDR3 for beta chain variable domain of TCR clone 8486 (TRBV20-1, TRBJ2-1)
CSASSSGLAGSYNGQFF

SEQ ID NO: 16973 - protein, 14 aa, Homo sapiens
  CDR3 for alpha chain variable domain of TCR clone 8487 (TRAV13-1, TRAJ5)
CAAHPDTGRRALTF

SEQ ID NO: 16974 - protein, 14 aa, Homo sapiens
  CDR3 for beta chain variable domain of TCR clone 8487 (TRBV7-2, TRBJ2-7)
CASSLYPGRYEQYF

SEQ ID NO: 16975 - protein, 10 aa, Homo sapiens
  CDR3 for alpha chain variable domain of TCR clone 8488 (TRAV1-2, TRAJ20)
CACNDYKLSF

SEQ ID NO: 16976 - protein, 14 aa, Homo sapiens
  CDR3 for beta chain variable domain of TCR clone 8488 (TRBV20-1, TRBJ1-1)
CSAQTRIGGTEAFF

SEQ ID NO: 16977 - protein, 15 aa, Homo sapiens
  CDR3 for alpha chain variable domain of TCR clone 8489 (TRAV3, TRAJ5)
CAVRDLDTGRSALTF

SEQ ID NO: 16978 - protein, 13 aa, Homo sapiens
  CDR3 for beta chain variable domain of TCR clone 8489 (TRBV12-4, TRBJ2-7)
CASSPTETYEQYF

SEQ ID NO: 16979 - protein, 13 aa, Homo sapiens
  CDR3 for alpha chain variable domain of TCR clone 8490 (TRAV12-1, TRAJ34)
CGEPLRNTDKLIF

SEQ ID NO: 16980 - protein, 15 aa, Homo sapiens
  CDR3 for beta chain variable domain of TCR clone 8490 (TRBV3-1, TRBJ2-2)
CASSQDWTRAGELFF

SEQ ID NO: 16981 - protein, 14 aa, Homo sapiens
  CDR3 for alpha chain variable domain of TCR clone 8491 (TRAV8-4, TRAJ9)
CAVRINTGGFKTIF

SEQ ID NO: 16982 - protein, 15 aa, Homo sapiens
  CDR3 for beta chain variable domain of TCR clone 8491 (TRBV6-5, TRBJ2-1)
CASSYDAGAGNEQFF

SEQ ID NO: 16983 - protein, 14 aa, Homo sapiens
  CDR3 for alpha chain variable domain of TCR clone 8492 (TRAV1-1, TRAJ23)
CAVSIYNQGGKLIF

SEQ ID NO: 16984 - protein, 15 aa, Homo sapiens
  CDR3 for beta chain variable domain of TCR clone 8492 (TRBV9, TRBJ1-6)
CASSVAGTGDSPLHF

SEQ ID NO: 16985 - protein, 10 aa, Homo sapiens
  CDR3 for alpha chain variable domain of TCR clone 8493 (TRAV27, TRAJ43)
CAGANNDMRF

SEQ ID NO: 16986 - protein, 20 aa, Homo sapiens
  CDR3 for beta chain variable domain of TCR clone 8493 (TRBV6-1, TRBJ1-4)
CASSESLAGGMRATNEKLFF

SEQ ID NO: 16987 - protein, 17 aa, Homo sapiens
  CDR3 for alpha chain variable domain of TCR clone 8494 (TRAV13-1, TRAJ52)
CAASPGAGGTSYGKLTF

SEQ ID NO: 16988 - protein, 15 aa, Homo sapiens
  CDR3 for beta chain variable domain of TCR clone 8494 (TRBV2, TRBJ2-1)
CASSELAGSYNEQFF

SEQ ID NO: 16989 - protein, 17 aa, Homo sapiens
  CDR3 for alpha chain variable domain of TCR clone 8495 (TRAV3, TRAJ6)
CAVRDGARAGGSYIPTF

SEQ ID NO: 16990 - protein, 14 aa, Homo sapiens
  CDR3 for beta chain variable domain of TCR clone 8495 (TRBV7-2, TRBJ2-7)
CASSPKTSFYEQYF

SEQ ID NO: 16991 - protein, 16 aa, Homo sapiens
  CDR3 for alpha chain variable domain of TCR clone 8496 (TRAV4, TRAJ22)
CLVGDLYSGSARQLTF

SEQ ID NO: 16992 - protein, 15 aa, Homo sapiens
  CDR3 for beta chain variable domain of TCR clone 8496 (TRBV7-9, TRBJ1-4)
CASSRTGGFNEKLFF

SEQ ID NO: 16993 - protein, 14 aa, Homo sapiens
  CDR3 for alpha chain variable domain of TCR clone 8497 (TRAV2, TRAJ9)
CAVEDRSGGFKTIF

SEQ ID NO: 16994 - protein, 14 aa, Homo sapiens
  CDR3 for beta chain variable domain of TCR clone 8497 (TRBV12-5, TRBJ2-5)
CASGSRTHQETQYF

SEQ ID NO: 16995 - protein, 13 aa, Homo sapiens
  CDR3 for alpha chain variable domain of TCR clone 8498 (TRAV8-2, TRAJ9)
CVVFNTGGFKTIF

SEQ ID NO: 16996 - protein, 16 aa, Homo sapiens
  CDR3 for beta chain variable domain of TCR clone 8498 (TRBV20-1, TRBJ2-2)
CSAILLGAGDTGELFF

SEQ ID NO: 16997 - protein, 16 aa, Homo sapiens
  CDR3 for alpha chain variable domain of TCR clone 8499 (TRAV1-2, TRAJ10)
CAVRGVLTGGGNKLTF

SEQ ID NO: 16998 - protein, 16 aa, Homo sapiens
  CDR3 for beta chain variable domain of TCR clone 8499 (TRBV24-1, TRBJ2-3)
CATSDAISGITDTQYF

SEQ ID NO: 16999 - protein, 13 aa, Homo sapiens
  CDR3 for alpha chain variable domain of TCR clone 8500 (TRAV12-3, TRAJ56)
CAMSFGANSKLTF

SEQ ID NO: 17000 - protein, 15 aa, Homo sapiens
  CDR3 for beta chain variable domain of TCR clone 8500 (TRBV6-3, TRBJ2-7)
CASSSPGTVFYEQYF

SEQ ID NO: 17001 - protein, 14 aa, Homo sapiens
  CDR3 for alpha chain variable domain of TCR clone 8501 (TRAV13-1, TRAJ40)
CAASRASGTYKYIF

SEQ ID NO: 17002 - protein, 13 aa, Homo sapiens
  CDR3 for beta chain variable domain of TCR clone 8501 (TRBV29-1, TRBJ2-7)
CSVGRTGGYEQYF

SEQ ID NO: 17003 - protein, 14 aa, Homo sapiens
  CDR3 for alpha chain variable domain of TCR clone 8502 (TRAV6, TRAJ10)
CALDLTGGGNKLTF

SEQ ID NO: 17004 - protein, 14 aa, Homo sapiens
  CDR3 for beta chain variable domain of TCR clone 8502 (TRBV18, TRBJ2-7)
CASSPAGGPGEQYF

SEQ ID NO: 17005 - protein, 12 aa, Homo sapiens
  CDR3 for alpha chain variable domain of TCR clone 8503 (TRAV3, TRAJ27)
CAVRDKAGKSTF

SEQ ID NO: 17006 - protein, 14 aa, Homo sapiens
  CDR3 for beta chain variable domain of TCR clone 8503 (TRBV15, TRBJ2-5)
CATSIGGLGETQYF

SEQ ID NO: 17007 - protein, 16 aa, Homo sapiens
  CDR3 for alpha chain variable domain of TCR clone 8504 (TRAV8-2, TRAJ45)
CVVSEGTGGGADGLTF

SEQ ID NO: 17008 - protein, 13 aa, Homo sapiens
  CDR3 for beta chain variable domain of TCR clone 8504 (TRBV19, TRBJ2-5)
CASRDSRRETQYF

SEQ ID NO: 17009 - protein, 11 aa, Homo sapiens
  CDR3 for alpha chain variable domain of TCR clone 8505 (TRAV1-1, TRAJ23)
CAVRQGGKLIF

SEQ ID NO: 17010 - protein, 15 aa, Homo sapiens
  CDR3 for beta chain variable domain of TCR clone 8505 (TRBV20-1, TRBJ2-7)
CSARDRVSGMDEQYF

SEQ ID NO: 17011 - protein, 14 aa, Homo sapiens
  CDR3 for alpha chain variable domain of TCR clone 8506 (TRAV13-1, TRAJ35)
CAASKGGFGNVLHC

SEQ ID NO: 17012 - protein, 13 aa, Homo sapiens
  CDR3 for beta chain variable domain of TCR clone 8506 (TRBV7-3, TRBJ1-1)
CASSQEWGAEAFF

SEQ ID NO: 17013 - protein, 16 aa, Homo sapiens
  CDR3 for alpha chain variable domain of TCR clone 8507 (TRAV3, TRAJ18)
CAVRDGRGSTLGRRYF

SEQ ID NO: 17014 - protein, 15 aa, Homo sapiens
  CDR3 for beta chain variable domain of TCR clone 8507 (TRBV7-9, TRBJ1-6)
CASSSPGRGNSPLHF

SEQ ID NO: 17015 - protein, 15 aa, Homo sapiens
  CDR3 for alpha chain variable domain of TCR clone 8508 (TRAV2, TRAJ15)
CAVGGPNQAGTALIF

SEQ ID NO: 17016 - protein, 16 aa, Homo sapiens
  CDR3 for beta chain variable domain of TCR clone 8508 (TRBV5-1, TRBJ2-3)
CASSLEGGSFTDTQYF

SEQ ID NO: 17017 - protein, 13 aa, Homo sapiens
  CDR3 for alpha chain variable domain of TCR clone 8509 (TRAV8-3, TRAJ28)
CAVGAVGGYQLTF

SEQ ID NO: 17018 - protein, 14 aa, Homo sapiens
  CDR3 for beta chain variable domain of TCR clone 8509 (TRBV7-2, TRBJ2-7)
CASRSQGAAYEQYF

SEQ ID NO: 17019 - protein, 14 aa, Homo sapiens
  CDR3 for alpha chain variable domain of TCR clone 8510 (TRAV12-1, TRAJ17)
CVVNYKAAGNKLTF

SEQ ID NO: 17020 - protein, 17 aa, Homo sapiens
  CDR3 for beta chain variable domain of TCR clone 8510 (TRBV20-1, TRBJ2-1)
CSASSSGLAGSYSEQFF

SEQ ID NO: 17021 - protein, 16 aa, Homo sapiens
  CDR3 for alpha chain variable domain of TCR clone 8511 (TRAV30, TRAJ24)
CGTEIVDTDSWGKFQF

SEQ ID NO: 17022 - protein, 14 aa, Homo sapiens
  CDR3 for beta chain variable domain of TCR clone 8511 (TRBV12-5, TRBJ2-5)
CASGSRTHQETQYF

SEQ ID NO: 17023 - protein, 15 aa, Homo sapiens
  CDR3 for alpha chain variable domain of TCR clone 8512 (TRAV21, TRAJ53)
CAVRQSGGSNYKLTF

SEQ ID NO: 17024 - protein, 13 aa, Homo sapiens
  CDR3 for beta chain variable domain of TCR clone 8512 (TRBV7-9, TRBJ1-2)
CASSLKQNYGYTF

SEQ ID NO: 17025 - protein, 11 aa, Homo sapiens
  CDR3 for alpha chain variable domain of TCR clone 8513 (TRAV2, TRAJ33)
CAVDSNYQLIW

SEQ ID NO: 17026 - protein, 20 aa, Homo sapiens
  CDR3 for beta chain variable domain of TCR clone 8513 (TRBV7-8, TRBJ2-2)
CASSHLFPGPTIHITGELFF

SEQ ID NO: 17027 - protein, 14 aa, Homo sapiens
  CDR3 for alpha chain variable domain of TCR clone 8514 (TRAV1-2, TRAJ8)
CAVREDTGFQKLVF

SEQ ID NO: 17028 - protein, 16 aa, Homo sapiens
  CDR3 for beta chain variable domain of TCR clone 8514 (TRBV19, TRBJ2-1)
CASSKAGPGSYNEQFF

SEQ ID NO: 17029 - protein, 13 aa, Homo sapiens
  CDR3 for alpha chain variable domain of TCR clone 8515 (TRAV17, TRAJ5)
CAPMDTGRRALTF

SEQ ID NO: 17030 - protein, 16 aa, Homo sapiens
  CDR3 for beta chain variable domain of TCR clone 8515 (TRBV27, TRBJ2-7)
CANSSERRDSAYEQYF

SEQ ID NO: 17031 - protein, 14 aa, Homo sapiens
  CDR3 for alpha chain variable domain of TCR clone 8516 (TRAV3, TRAJ17)
CAVRDAAAGNKLTF

SEQ ID NO: 17032 - protein, 15 aa, Homo sapiens
  CDR3 for beta chain variable domain of TCR clone 8516 (TRBV6-3, TRBJ2-5)
CASSLLRGDQETQYF

SEQ ID NO: 17033 - protein, 13 aa, Homo sapiens
  CDR3 for alpha chain variable domain of TCR clone 8517 (TRAV17, TRAJ22)
CAHHSGSARQLTF

SEQ ID NO: 17034 - protein, 13 aa, Homo sapiens
  CDR3 for beta chain variable domain of TCR clone 8517 (TRBV19, TRBJ1-2)
CASSVPGQDGYTF

SEQ ID NO: 17035 - protein, 13 aa, Homo sapiens
  CDR3 for alpha chain variable domain of TCR clone 8518 (TRAV21, TRAJ27)
CAARPGNAGKSTF

SEQ ID NO: 17036 - protein, 13 aa, Homo sapiens
  CDR3 for beta chain variable domain of TCR clone 8518 (TRBV11-2, TRBJ2-7)
CASSGTRPYEQYF

SEQ ID NO: 17037 - protein, 14 aa, Homo sapiens
  CDR3 for alpha chain variable domain of TCR clone 8519 (TRAV1-2, TRAJ16)
CAVNRFSDGQKLLF

SEQ ID NO: 17038 - protein, 14 aa, Homo sapiens
  CDR3 for beta chain variable domain of TCR clone 8519 (TRBV13, TRBJ2-5)
CASSLGREQETQYF

SEQ ID NO: 17039 - protein, 15 aa, Homo sapiens
  CDR3 for alpha chain variable domain of TCR clone 8520 (TRAV19, TRAJ23)
CALSEVGNQGGKLIF

SEQ ID NO: 17040 - protein, 13 aa, Homo sapiens
  CDR3 for beta chain variable domain of TCR clone 8520 (TRBV9, TRBJ2-7)
CASSVAEYYEQYF

SEQ ID NO: 17041 - protein, 14 aa, Homo sapiens
  CDR3 for alpha chain variable domain of TCR clone 8521 (TRAV17, TRAJ6)
CATDASGGSYIPTF

SEQ ID NO: 17042 - protein, 13 aa, Homo sapiens
  CDR3 for beta chain variable domain of TCR clone 8521 (TRBV20-1, TRBJ2-5)
CSAREAFQETQYF

SEQ ID NO: 17043 - protein, 14 aa, Homo sapiens
  CDR3 for alpha chain variable domain of TCR clone 8522 (TRAV12-2, TRAJ33)
CAVKRARSNYQLTW

SEQ ID NO: 17044 - protein, 15 aa, Homo sapiens
  CDR3 for beta chain variable domain of TCR clone 8522 (TRBV20-1, TRBJ2-7)
CSARDRVSGMDEQYF

SEQ ID NO: 17045 - protein, 14 aa, Homo sapiens
  CDR3 for alpha chain variable domain of TCR clone 8523 (TRAV13-1, TRAJ35)
CAASKGGFGNVLHC

SEQ ID NO: 17046 - protein, 13 aa, Homo sapiens
  CDR3 for beta chain variable domain of TCR clone 8523 (TRBV7-3, TRBJ1-1)
CASSRDWGAEAFF

SEQ ID NO: 17047 - protein, 11 aa, Homo sapiens
  CDR3 for alpha chain variable domain of TCR clone 8524 (TRAV1-1, TRAJ23)
CAVRPGGKLIF

SEQ ID NO: 17048 - protein, 20 aa, Homo sapiens
  CDR3 for beta chain variable domain of TCR clone 8524 (TRBV7-8, TRBJ2-2)
CASSHLFPGPTIHITGELFF

SEQ ID NO: 17049 - protein, 11 aa, Homo sapiens
  CDR3 for alpha chain variable domain of TCR clone 8525 (TRAV4, TRAJ28)
NSGAGSYQLTF

SEQ ID NO: 17050 - protein, 13 aa, Homo sapiens
  CDR3 for beta chain variable domain of TCR clone 8525 (TRBV12-4, TRBJ2-6)
CASSGTGANVLTF

SEQ ID NO: 17051 - protein, 15 aa, Homo sapiens
  CDR3 for alpha chain variable domain of TCR clone 8526 (TRAV12-2, TRAJ50)
CAVNGLETSYDKVIF

SEQ ID NO: 17052 - protein, 16 aa, Homo sapiens
  CDR3 for beta chain variable domain of TCR clone 8526 (TRBV6-5, TRBJ2-7)
CASSSDPTSGFYEQYF

SEQ ID NO: 17053 - protein, 10 aa, Homo sapiens
  CDR3 for alpha chain variable domain of TCR clone 8527 (TRAV8-4, TRAJ39)
CAVAGNMLTF

SEQ ID NO: 17054 - protein, 14 aa, Homo sapiens
  CDR3 for beta chain variable domain of TCR clone 8527 (TRBV27, TRBJ2-3)
CASRDSPITDTQYF

SEQ ID NO: 17055 - protein, 14 aa, Homo sapiens
  CDR3 for alpha chain variable domain of TCR clone 8528 (TRAV21, TRAJ35)
CAVMPIGFGNVLHC

SEQ ID NO: 17056 - protein, 12 aa, Homo sapiens
  CDR3 for beta chain variable domain of TCR clone 8528 (TRBV7-9, TRBJ2-7)
CASSTKREEQYF

SEQ ID NO: 17057 - protein, 14 aa, Homo sapiens
  CDR3 for alpha chain variable domain of TCR clone 8529 (TRAV1-2, TRAJ16)
CAVNRFSDGQKLLF

SEQ ID NO: 17058 - protein, 13 aa, Homo sapiens
  CDR3 for beta chain variable domain of TCR clone 8529 (TRBV2, TRBJ2-7)
CASSVGGSGEQYF

SEQ ID NO: 17059 - protein, 14 aa, Homo sapiens
  CDR3 for alpha chain variable domain of TCR clone 8530 (TRAV1-2, TRAJ16)
CAVNRFSDGQKLLF

SEQ ID NO: 17060 - protein, 15 aa, Homo sapiens
  CDR3 for beta chain variable domain of TCR clone 8530 (TRBV20-1, TRBJ2-1)
CSARGIGGTYNEQFF

SEQ ID NO: 17061 - protein, 11 aa, Homo sapiens
  CDR3 for alpha chain variable domain of TCR clone 8531 (TRAV1-1, TRAJ23)
CAVRQGGKLIF

SEQ ID NO: 17062 - protein, 20 aa, Homo sapiens
  CDR3 for beta chain variable domain of TCR clone 8531 (TRBV7-8, TRBJ2-2)
CASSHLFPGPTIHITGGLFF

SEQ ID NO: 17063 - protein, 11 aa, Homo sapiens
  CDR3 for alpha chain variable domain of TCR clone 8532 (TRAV1-2, TRAJ31)
CAVNNNARLMF

SEQ ID NO: 17064 - protein, 14 aa, Homo sapiens
  CDR3 for beta chain variable domain of TCR clone 8532 (TRBV19, TRBJ2-1)
CASPTFVLSGEQFF

SEQ ID NO: 17065 - protein, 15 aa, Homo sapiens
  CDR3 for alpha chain variable domain of TCR clone 8533 (TRAV21, TRAJ53)
CATLNSGGSNYKLTF

SEQ ID NO: 17066 - protein, 16 aa, Homo sapiens
  CDR3 for beta chain variable domain of TCR clone 8533 (TRBV9, TRBJ2-1)
CASSVGGGGNYNEQFS

SEQ ID NO: 17067 - protein, 14 aa, Homo sapiens
  CDR3 for alpha chain variable domain of TCR clone 8534 (TRAV1-2, TRAJ16)
CAVNRFSDGQKLLF

SEQ ID NO: 17068 - protein, 15 aa, Homo sapiens
  CDR3 for beta chain variable domain of TCR clone 8534 (TRBV20-1, TRBJ2-5)
CSAEGTGGLQETQYF

SEQ ID NO: 17069 - protein, 16 aa, Homo sapiens
  CDR3 for alpha chain variable domain of TCR clone 8535 (TRAV30, TRAJ24)
CGTEIVDADSWEKFQF

SEQ ID NO: 17070 - protein, 14 aa, Homo sapiens
  CDR3 for beta chain variable domain of TCR clone 8535 (TRBV12-5, TRBJ2-5)
CASGSRTHQETQYF

SEQ ID NO: 17071 - protein, 11 aa, Homo sapiens
  CDR3 for alpha chain variable domain of TCR clone 8536 (TRAV13-1, TRAJ23)
CAASSRGKLIF

SEQ ID NO: 17072 - protein, 16 aa, Homo sapiens
  CDR3 for beta chain variable domain of TCR clone 8536 (TRBV19, TRBJ2-2)
CASRSPGTGATGELFF

SEQ ID NO: 17073 - protein, 14 aa, Homo sapiens
  CDR3 for alpha chain variable domain of TCR clone 8537 (TRAV17, TRAJ56)
CATVPAGANSKLTF

SEQ ID NO: 17074 - protein, 12 aa, Homo sapiens
  CDR3 for beta chain variable domain of TCR clone 8537 (TRBV12-4, TRBJ2-2)
CQQYYRVRGAVF

SEQ ID NO: 17075 - protein, 15 aa, Homo sapiens
  CDR3 for alpha chain variable domain of TCR clone 8538 (TRAV1-2, TRAJ6)
CAVRGGKGGSYIPTF

SEQ ID NO: 17076 - protein, 16 aa, Homo sapiens
  CDR3 for beta chain variable domain of TCR clone 8538 (TRBV7-2, TRBJ2-3)
CASSESGPTGTDTQYF

SEQ ID NO: 17077 - protein, 13 aa, Homo sapiens
  CDR3 for alpha chain variable domain of TCR clone 8539 (TRAV17, TRAJ9)
CATGSTGGFKTIF

SEQ ID NO: 17078 - protein, 13 aa, Homo sapiens
  CDR3 for beta chain variable domain of TCR clone 8539 (TRBV20-1, TRBJ1-1)
CSAPLGGGTEAFF

SEQ ID NO: 17079 - protein, 12 aa, Homo sapiens
  CDR3 for alpha chain variable domain of TCR clone 8540 (TRAV13-1, TRAJ54)
CAASGGAQKLVF

SEQ ID NO: 17080 - protein, 14 aa, Homo sapiens
  CDR3 for beta chain variable domain of TCR clone 8540 (TRBV10-2, TRBJ1-3)
CASTRTDTGNTIYF

SEQ ID NO: 17081 - protein, 13 aa, Homo sapiens
  CDR3 for alpha chain variable domain of TCR clone 8541 (TRAV12-1, TRAJ7)
CVVNMRGNNRLAF

SEQ ID NO: 17082 - protein, 15 aa, Homo sapiens
  CDR3 for beta chain variable domain of TCR clone 8541 (TRBV27, TRBJ2-3)
CASSLGLAATDMQYF

SEQ ID NO: 17083 - protein, 15 aa, Homo sapiens
  CDR3 for alpha chain variable domain of TCR clone 8542 (TRAV8-3, TRAJ45)
CASSYSGGGADGLTF

SEQ ID NO: 17084 - protein, 13 aa, Homo sapiens
  CDR3 for beta chain variable domain of TCR clone 8542 (TRBV10-3, TRBJ2-7)
CASKLAANYEQYF

SEQ ID NO: 17085 - protein, 12 aa, Homo sapiens
  CDR3 for alpha chain variable domain of TCR clone 8543 (TRAV13-1, TRAJ27)
CAAHTNAGKSTF

SEQ ID NO: 17086 - protein, 13 aa, Homo sapiens
  CDR3 for beta chain variable domain of TCR clone 8543 (TRBV20-1, TRBJ1-1)
CSARGGGNTEAFF

SEQ ID NO: 17087 - protein, 14 aa, Homo sapiens
  CDR3 for alpha chain variable domain of TCR clone 8544 (TRAV12-3, TRAJ56)
CAMSVTGANSKLTL

SEQ ID NO: 17088 - protein, 17 aa, Homo sapiens
  CDR3 for beta chain variable domain of TCR clone 8544 (TRBV20-1, TRBJ2-3)
CSASLLGRGGSADTQYF

SEQ ID NO: 17089 - protein, 16 aa, Homo sapiens
  CDR3 for alpha chain variable domain of TCR clone 8545 (TRAV12-3, TRAJ53)
CAMSPGSGGSNYKLPF

SEQ ID NO: 17090 - protein, 11 aa, Homo sapiens
  CDR3 for beta chain variable domain of TCR clone 8545 (TRBV29-1, TRBJ2-5)
CSEDRTGTQYF

SEQ ID NO: 17091 - protein, 13 aa, Homo sapiens
  CDR3 for alpha chain variable domain of TCR clone 8546 (TRAV27, TRAJ43)
CAGAGNNNNDMRF

SEQ ID NO: 17092 - protein, 15 aa, Homo sapiens
  CDR3 for beta chain variable domain of TCR clone 8546 (TRBV20-1, TRBJ2-7)
CSARDRVSGMDEQYF

SEQ ID NO: 17093 - protein, 14 aa, Homo sapiens
  CDR3 for alpha chain variable domain of TCR clone 8547 (TRAV13-2, TRAJ17)
CAENSKAAGNKLTF

SEQ ID NO: 17094 - protein, 20 aa, Homo sapiens
  CDR3 for beta chain variable domain of TCR clone 8547 (TRBV28, TRBJ2-1)
CASTPIGRSPGLAGGNEQFF

SEQ ID NO: 17095 - protein, 23 aa, Homo sapiens
  CDR3 for alpha chain variable domain of TCR clone 8548 (TRAV26-1, TRAJ38)
CIADNAGNNHIQNPDPAAYQLRD

SEQ ID NO: 17096 - protein, 13 aa, Homo sapiens
  CDR3 for beta chain variable domain of TCR clone 8548 (TRBV20-1, TRBJ1-1)
CSARGGGNTEAFF

SEQ ID NO: 17097 - protein, 12 aa, Homo sapiens
  CDR3 for alpha chain variable domain of TCR clone 8549 (TRAV13-1, TRAJ21)
CAAKEGFNKFYF

SEQ ID NO: 17098 - protein, 15 aa, Homo sapiens
  CDR3 for beta chain variable domain of TCR clone 8549 (TRBV9, TRBJ1-6)
CASSVAGTGDSPLHF

SEQ ID NO: 17099 - protein, 12 aa, Homo sapiens
  CDR3 for alpha chain variable domain of TCR clone 8550 (TRAV26-1, TRAJ43)
CIVRVYNNDMRF

SEQ ID NO: 17100 - protein, 14 aa, Homo sapiens
  CDR3 for beta chain variable domain of TCR clone 8550 (TRBV25-1, TRBJ1-4)
CASSYSGGQEKLFF

SEQ ID NO: 17101 - protein, 14 aa, Homo sapiens
  CDR3 for alpha chain variable domain of TCR clone 8551 (TRAV12-2, TRAJ13)
CAVEKTGGYQKVTF

SEQ ID NO: 17102 - protein, 15 aa, Homo sapiens
  CDR3 for beta chain variable domain of TCR clone 8551 (TRBV27, TRBJ2-1)
CASSNGGGSSNEQFF

SEQ ID NO: 17103 - protein, 13 aa, Homo sapiens
  CDR3 for alpha chain variable domain of TCR clone 8552 (TRAV17, TRAJ40)
CATRPSGTYKYIF

SEQ ID NO: 17104 - protein, 16 aa, Homo sapiens
  CDR3 for beta chain variable domain of TCR clone 8552 (TRBV19, TRBJ2-5)
CASSIGTSGSQETQYF

SEQ ID NO: 17105 - protein, 14 aa, Homo sapiens
  CDR3 for alpha chain variable domain of TCR clone 8553 (TRAV12-2, TRAJ13)
CAVKKTGGYQKVTF

SEQ ID NO: 17106 - protein, 16 aa, Homo sapiens
  CDR3 for beta chain variable domain of TCR clone 8553 (TRBV27, TRBJ2-2)
CASSSSGVSNTGELFF

SEQ ID NO: 17107 - protein, 14 aa, Homo sapiens
  CDR3 for alpha chain variable domain of TCR clone 8554 (TRAV12-2, TRAJ13)
CAVKKTGGYQQVTF

SEQ ID NO: 17108 - protein, 15 aa, Homo sapiens
  CDR3 for beta chain variable domain of TCR clone 8554 (TRBV27, TRBJ2-1)
CASSNGGGSSNEQFF

SEQ ID NO: 17109 - protein, 14 aa, Homo sapiens
  CDR3 for alpha chain variable domain of TCR clone 8555 (TRAV12-2, TRAJ17)
CAVLFKAAGNKLTF

SEQ ID NO: 17110 - protein, 17 aa, Homo sapiens
  CDR3 for beta chain variable domain of TCR clone 8555 (TRBV20-1, TRBJ2-2)
RSASGSGQGGLTGELFF

SEQ ID NO: 17111 - protein, 13 aa, Homo sapiens
  CDR3 for alpha chain variable domain of TCR clone 8556 (TRAV21, TRAJ42)
CAVGGGSQGNLIF

SEQ ID NO: 17112 - protein, 13 aa, Homo sapiens
  CDR3 for beta chain variable domain of TCR clone 8556 (TRBV7-2, TRBJ2-5)
CASSPDRGETQYF

SEQ ID NO: 17113 - protein, 12 aa, Homo sapiens
  CDR3 for alpha chain variable domain of TCR clone 8557 (TRAV16, TRAJ10)
CSRTGGGNKLTF

SEQ ID NO: 17114 - protein, 15 aa, Homo sapiens
  CDR3 for beta chain variable domain of TCR clone 8557 (TRBV7-3, TRBJ2-1)
CASSQRGGALIEQFF

SEQ ID NO: 17115 - protein, 17 aa, Homo sapiens
  CDR3 for alpha chain variable domain of TCR clone 8558 (TRAV3, TRAJ6)
CAVRDGPRAGGSYIPTS

SEQ ID NO: 17116 - protein, 20 aa, Homo sapiens
  CDR3 for beta chain variable domain of TCR clone 8558 (TRBV28, TRBJ2-1)
CASTPIGRSPGLAGGNEQFF

SEQ ID NO: 17117 - protein, 15 aa, Homo sapiens
  CDR3 for alpha chain variable domain of TCR clone 8559 (TRAV26-1, TRAJ29)
CIVRVEGSGNTHLVF

SEQ ID NO: 17118 - protein, 14 aa, Homo sapiens
  CDR3 for beta chain variable domain of TCR clone 8559 (TRBV18, TRBJ2-5)
CASSPGVSQETQYF

SEQ ID NO: 17119 - protein, 14 aa, Homo sapiens
  CDR3 for alpha chain variable domain of TCR clone 8560 (TRAV1-2, TRAJ16)
CAVNRFSDGQKLPF

SEQ ID NO: 17120 - protein, 15 aa, Homo sapiens
  CDR3 for beta chain variable domain of TCR clone 8560 (TRBV7-9, TRBJ1-6)
CASSSPGRGNSPLHF

SEQ ID NO: 17121 - protein, 13 aa, Homo sapiens
  CDR3 for alpha chain variable domain of TCR clone 8561 (TRAV6, TRAJ5)
CAPKATGRRALTF

SEQ ID NO: 17122 - protein, 13 aa, Homo sapiens
  CDR3 for beta chain variable domain of TCR clone 8561 (TRBV20-1, TRBJ2-7)
CSASPFSSYEQYF

SEQ ID NO: 17123 - protein, 13 aa, Homo sapiens
  CDR3 for alpha chain variable domain of TCR clone 8562 (TRAV13-1, TRAJ6)
CARGSGGSYIPTF

SEQ ID NO: 17124 - protein, 15 aa, Homo sapiens
  CDR3 for beta chain variable domain of TCR clone 8562 (TRBV2, TRBJ2-1)
CASSELAGSYNEQFF

SEQ ID NO: 17125 - protein, 12 aa, Homo sapiens
  CDR3 for alpha chain variable domain of TCR clone 8563 (TRAV8-6, TRAJ50)
CAVETSYDKVIF

SEQ ID NO: 17126 - protein, 15 aa, Homo sapiens
  CDR3 for beta chain variable domain of TCR clone 8563 (TRBV9, TRBJ2-3)
CASSKSGNRADTQYF

SEQ ID NO: 17127 - protein, 15 aa, Homo sapiens
  CDR3 for alpha chain variable domain of TCR clone 8564 (TRAV8-2, TRAJ24)
CVVSDRTDSWGKLQF

SEQ ID NO: 17128 - protein, 14 aa, Homo sapiens
  CDR3 for beta chain variable domain of TCR clone 8564 (TRBV19, TRBJ2-7)
CASSIEASSYEQYF

SEQ ID NO: 17129 - protein, 13 aa, Homo sapiens
  CDR3 for alpha chain variable domain of TCR clone 8565 (TRAV3, TRAJ21)
CAVREPDFNKFYF

SEQ ID NO: 17130 - protein, 16 aa, Homo sapiens
  CDR3 for beta chain variable domain of TCR clone 8565 (TRBV7-2, TRBJ2-6)
CASSLAGRSGANVLTF

SEQ ID NO: 17131 - protein, 14 aa, Homo sapiens
  CDR3 for alpha chain variable domain of TCR clone 8566 (TRAV12-2, TRAJ41)
CAVTLGLSGYALNF

SEQ ID NO: 17132 - protein, 13 aa, Homo sapiens
  CDR3 for beta chain variable domain of TCR clone 8566 (TRBV27, TRBJ2-3)
CASSLSQGDTQYF

SEQ ID NO: 17133 - protein, 16 aa, Homo sapiens
  CDR3 for alpha chain variable domain of TCR clone 8567 (TRAV17, TRAJ52)
CATDPMGGTSYGKLTF

SEQ ID NO: 17134 - protein, 16 aa, Homo sapiens
  CDR3 for beta chain variable domain of TCR clone 8567 (TRBV6-6, TRBJ2-3)
CASSYLKATSTDTQYF

SEQ ID NO: 17135 - protein, 15 aa, Homo sapiens
  CDR3 for alpha chain variable domain of TCR clone 8568 (TRAV14/DV4, TRAJ21)
CAMREEGYNFNKFYF

SEQ ID NO: 17136 - protein, 15 aa, Homo sapiens
  CDR3 for beta chain variable domain of TCR clone 8568 (TRBV15, TRBJ1-5)
CATSTTGVVNQPQHF

SEQ ID NO: 17137 - protein, 13 aa, Homo sapiens
  CDR3 for alpha chain variable domain of TCR clone 8569 (TRAV25, TRAJ23)
CAGVNNQGGKLIF

SEQ ID NO: 17138 - protein, 15 aa, Homo sapiens
  CDR3 for beta chain variable domain of TCR clone 8569 (TRBV4-1, TRBJ1-1)
CASSQEWGHYTEAFF

SEQ ID NO: 17139 - protein, 14 aa, Homo sapiens
  CDR3 for alpha chain variable domain of TCR clone 8570 (TRAV13-1, TRAJ35)
CAASKGGFGNVLHC

SEQ ID NO: 17140 - protein, 13 aa, Homo sapiens
  CDR3 for beta chain variable domain of TCR clone 8570 (TRBV7-3, TRBJ1-1)
RASSQDWGAEAFF

SEQ ID NO: 17141 - protein, 14 aa, Homo sapiens
  CDR3 for alpha chain variable domain of TCR clone 8571 (TRAV8-6, TRAJ37)
CAVRSRSNTGKLIF

SEQ ID NO: 17142 - protein, 14 aa, Homo sapiens
  CDR3 for beta chain variable domain of TCR clone 8571 (TRBV6-5, TRBJ1-1)
CASRKPDRDTEAFF

SEQ ID NO: 17143 - protein, 14 aa, Homo sapiens
  CDR3 for alpha chain variable domain of TCR clone 8572 (TRAV26-1, TRAJ34)
CIVRVAYNTDKLIF

SEQ ID NO: 17144 - protein, 15 aa, Homo sapiens
  CDR3 for beta chain variable domain of TCR clone 8572 (TRBV7-2, TRBJ2-1)
CASSSGLAGGNEQFF

SEQ ID NO: 17145 - protein, 14 aa, Homo sapiens
  CDR3 for alpha chain variable domain of TCR clone 8573 (TRAV26-1, TRAJ38)
CIADNAGNNRKLIW

SEQ ID NO: 17146 - protein, 15 aa, Homo sapiens
  CDR3 for beta chain variable domain of TCR clone 8573 (TRBV4-1, TRBJ1-1)
CTSSQEWGHYTEAFF

SEQ ID NO: 17147 - protein, 15 aa, Homo sapiens
  CDR3 for alpha chain variable domain of TCR clone 8574 (TRAV35, TRAJ20)
CAGQLVGSNDYKLSF

SEQ ID NO: 17148 - protein, 13 aa, Homo sapiens
  CDR3 for beta chain variable domain of TCR clone 8574 (TRBV19, TRBJ2-7)
CASSKTGTHERYF

SEQ ID NO: 17149 - protein, 12 aa, Homo sapiens
  CDR3 for alpha chain variable domain of TCR clone 8575 (TRAV17, TRAJ20)
CATDENDYKLSF

SEQ ID NO: 17150 - protein, 16 aa, Homo sapiens
  CDR3 for beta chain variable domain of TCR clone 8575 (TRBV24-1, TRBJ2-5)
CATRLAEDCWEKTQYF

SEQ ID NO: 17151 - protein, 12 aa, Homo sapiens
  CDR3 for alpha chain variable domain of TCR clone 8576 (TRAV26-1, TRAJ40)
CSTTSGTYKYIF

SEQ ID NO: 17152 - protein, 14 aa, Homo sapiens
  CDR3 for beta chain variable domain of TCR clone 8576 (TRBV24-1, TRBJ1-1)
CATRPTQGATEAFF

SEQ ID NO: 17153 - protein, 14 aa, Homo sapiens
  CDR3 for alpha chain variable domain of TCR clone 8577 (TRAV12-2, TRAJ40)
CAVKTPSGTYKYIF

SEQ ID NO: 17154 - protein, 14 aa, Homo sapiens
  CDR3 for beta chain variable domain of TCR clone 8577 (TRBV20-1, TRBJ1-1)
CSAQTRIGGTEAFF

SEQ ID NO: 17155 - protein, 13 aa, Homo sapiens
  CDR3 for alpha chain variable domain of TCR clone 8578 (TRAV2, TRAJ40)
CAVVTSGTYKYIF

SEQ ID NO: 17156 - protein, 12 aa, Homo sapiens
  CDR3 for beta chain variable domain of TCR clone 8578 (TRBV11-2, TRBJ2-2)
CASSLGGGELFF

SEQ ID NO: 17157 - protein, 21 aa, Homo sapiens
  CDR3 for alpha chain variable domain of TCR clone 8579 (TRAV1-1, TRAJ30)
CLLLLRCEREGGENRDDKIIF

SEQ ID NO: 17158 - protein, 15 aa, Homo sapiens
  CDR3 for beta chain variable domain of TCR clone 8579 (TRBV7-3, TRBJ2-1)
CASSLSSGSFDEQFF

SEQ ID NO: 17159 - protein, 17 aa, Homo sapiens
  CDR3 for alpha chain variable domain of TCR clone 8580 (TRAV29/DV5, TRAJ42)
CAASAGNYGGSQGNLIF

SEQ ID NO: 17160 - protein, 13 aa, Homo sapiens
  CDR3 for beta chain variable domain of TCR clone 8580 (TRBV19, TRBJ1-2)
CASSQGQVYGYTF

SEQ ID NO: 17161 - protein, 16 aa, Homo sapiens
  CDR3 for alpha chain variable domain of TCR clone 8581 (TRAV3, TRAJ37)
CAVRGKGSGNTGKLIF

SEQ ID NO: 17162 - protein, 18 aa, Homo sapiens
  CDR3 for beta chain variable domain of TCR clone 8581 (TRBV12-4, TRBJ2-2)
CASSLVAGTRGRTGELFF

SEQ ID NO: 17163 - protein, 16 aa, Homo sapiens
  CDR3 for alpha chain variable domain of TCR clone 8582 (TRAV30, TRAJ24)
CGTEIVDADSWVKFQF

SEQ ID NO: 17164 - protein, 14 aa, Homo sapiens
  CDR3 for beta chain variable domain of TCR clone 8582 (TRBV12-5, TRBJ2-5)
CASGSRTHQETQYF

SEQ ID NO: 17165 - protein, 14 aa, Homo sapiens
  CDR3 for alpha chain variable domain of TCR clone 8583 (TRAV29/DV5, TRAJ36)
CAARRKTGANNLFF

SEQ ID NO: 17166 - protein, 16 aa, Homo sapiens
  CDR3 for beta chain variable domain of TCR clone 8583 (TRBV12-5, TRBJ2-5)
CASGPRTSGNQETQYF

SEQ ID NO: 17167 - protein, 11 aa, Homo sapiens
  CDR3 for alpha chain variable domain of TCR clone 8584 (TRAV2, TRAJ13)
CASGGYQKVTF

SEQ ID NO: 17168 - protein, 16 aa, Homo sapiens
  CDR3 for beta chain variable domain of TCR clone 8584 (TRBV27, TRBJ2-2)
CASSLSGFWVTGELFF

SEQ ID NO: 17169 - protein, 14 aa, Homo sapiens
  CDR3 for alpha chain variable domain of TCR clone 8585 (TRAV20, TRAJ56)
CAVQFGGANSKLTF

SEQ ID NO: 17170 - protein, 14 aa, Homo sapiens
  CDR3 for beta chain variable domain of TCR clone 8585 (TRBV20-1, TRBJ2-7)
CSAKRGRSPYEQYF

SEQ ID NO: 17171 - protein, 11 aa, Homo sapiens
  CDR3 for alpha chain variable domain of TCR clone 8586 (TRAV1-2, TRAJ20)
CAVANDYKLSF

SEQ ID NO: 17172 - protein, 15 aa, Homo sapiens
  CDR3 for beta chain variable domain of TCR clone 8586 (TRBV28, TRBJ2-1)
CASSIIAGGRSEQFF

SEQ ID NO: 17173 - protein, 12 aa, Homo sapiens
  CDR3 for alpha chain variable domain of TCR clone 8587 (TRAV12-3, TRAJ17)
CAMTLTGNKLTF

SEQ ID NO: 17174 - protein, 12 aa, Homo sapiens
  CDR3 for beta chain variable domain of TCR clone 8587 (TRBV4-1, TRBJ2-3)
CASSQGTDTQYF

SEQ ID NO: 17175 - protein, 15 aa, Homo sapiens
  CDR3 for alpha chain variable domain of TCR clone 8588 (TRAV21, TRAJ53)
CATLNSGGSNYKLTF

SEQ ID NO: 17176 - protein, 17 aa, Homo sapiens
  CDR3 for beta chain variable domain of TCR clone 8588 (TRBV11-2, TRBJ2-1)
CASSLYPPGVEYNEQFF

SEQ ID NO: 17177 - protein, 15 aa, Homo sapiens
  CDR3 for alpha chain variable domain of TCR clone 8589 (TRAV21, TRAJ24)
CAARSSTDSWGNCSL

SEQ ID NO: 17178 - protein, 13 aa, Homo sapiens
  CDR3 for beta chain variable domain of TCR clone 8589 (TRBV11-2, TRBJ2-5)
CASSSTGEETQYF

SEQ ID NO: 17179 - protein, 13 aa, Homo sapiens
  CDR3 for alpha chain variable domain of TCR clone 8590 (TRAV41, TRAJ40)
CAVRSSGTYKYIF

SEQ ID NO: 17180 - protein, 14 aa, Homo sapiens
  CDR3 for beta chain variable domain of TCR clone 8590 (TRBV18, TRBJ2-5)
CASSPLRVQETQYF

SEQ ID NO: 17181 - protein, 12 aa, Homo sapiens
  CDR3 for alpha chain variable domain of TCR clone 8591 (TRAV2, TRAJ31)
CAVEDNNARLMF

SEQ ID NO: 17182 - protein, 12 aa, Homo sapiens
  CDR3 for beta chain variable domain of TCR clone 8591 (TRBV5-5, TRBJ2-5)
CASSYFGETQYF

SEQ ID NO: 17183 - protein, 12 aa, Homo sapiens
  CDR3 for alpha chain variable domain of TCR clone 8592 (TRAV12-3, TRAJ17)
CAMTLTGNKLTF

SEQ ID NO: 17184 - protein, 15 aa, Homo sapiens
  CDR3 for beta chain variable domain of TCR clone 8592 (TRBV20-1, TRBJ2-7)
CSARDRVTGMDEQYF

SEQ ID NO: 17185 - protein, 13 aa, Homo sapiens
  CDR3 for alpha chain variable domain of TCR clone 8593 (TRAV8-6, TRAJ49)
CAVITNTGNQFYF

SEQ ID NO: 17186 - protein, 14 aa, Homo sapiens
  CDR3 for beta chain variable domain of TCR clone 8593 (TRBV27, TRBJ2-2)
CASRPGVNTGELFF

SEQ ID NO: 17187 - protein, 14 aa, Homo sapiens
  CDR3 for alpha chain variable domain of TCR clone 8594 (TRAV12-2, TRAJ40)
CAVKIPSGPYKYIF

SEQ ID NO: 17188 - protein, 14 aa, Homo sapiens
  CDR3 for beta chain variable domain of TCR clone 8594 (TRBV20-1, TRBJ1-1)
CSAQTRIGGTEAFF

SEQ ID NO: 17189 - protein, 18 aa, Homo sapiens
  CDR3 for alpha chain variable domain of TCR clone 8595 (TRAV13-1, TRAJ52)
CAASKRSAGGTSYGKLTF

SEQ ID NO: 17190 - protein, 13 aa, Homo sapiens
  CDR3 for beta chain variable domain of TCR clone 8595 (TRBV12-4, TRBJ1-2)
CASSLRQGKGDTF

SEQ ID NO: 17191 - protein, 13 aa, Homo sapiens
  CDR3 for alpha chain variable domain of TCR clone 8596 (TRAV8-3, TRAJ43)
CAVGADNNNDMRF

SEQ ID NO: 17192 - protein, 13 aa, Homo sapiens
  CDR3 for beta chain variable domain of TCR clone 8596 (TRBV4-2, TRBJ1-1)
CASSQAGNTEAFF

SEQ ID NO: 17193 - protein, 12 aa, Homo sapiens
  CDR3 for alpha chain variable domain of TCR clone 8597 (TRAV12-3, TRAJ17)
CAMTLTGNKLTF

SEQ ID NO: 17194 - protein, 14 aa, Homo sapiens
  CDR3 for beta chain variable domain of TCR clone 8597 (TRBV7-3, TRBJ2-7)
CASSLSGVSYEQYF

SEQ ID NO: 17195 - protein, 14 aa, Homo sapiens
  CDR3 for alpha chain variable domain of TCR clone 8598 (TRAV1-2, TRAJ16)
CAVNRFSDGQKLLF

SEQ ID NO: 17196 - protein, 15 aa, Homo sapiens
  CDR3 for beta chain variable domain of TCR clone 8598 (TRBV4-1, TRBJ1-4)
CASSDTGGTNEKLFF

SEQ ID NO: 17197 - protein, 15 aa, Homo sapiens
  CDR3 for alpha chain variable domain of TCR clone 8599 (TRAV17, TRAJ57)
CATGPSQGGSEKLVF

SEQ ID NO: 17198 - protein, 15 aa, Homo sapiens
  CDR3 for beta chain variable domain of TCR clone 8599 (TRBV7-3, TRBJ2-1)
CASSPTGGGEVEQFF

SEQ ID NO: 17199 - protein, 14 aa, Homo sapiens
  CDR3 for alpha chain variable domain of TCR clone 8600 (TRAV2, TRAJ37)
CAVDFTSNTGKLIF

SEQ ID NO: 17200 - protein, 15 aa, Homo sapiens
  CDR3 for beta chain variable domain of TCR clone 8600 (TRBV20-1, TRBJ1-1)
CSASRGVTGNTEALF

SEQ ID NO: 17201 - protein, 16 aa, Homo sapiens
  CDR3 for alpha chain variable domain of TCR clone 8601 (TRAV19, TRAJ42)
CALSVNYGGSQGNLIF

SEQ ID NO: 17202 - protein, 13 aa, Homo sapiens
  CDR3 for beta chain variable domain of TCR clone 8601 (TRBV7-3, TRBJ2-1)
CASSPVAYNEQFF

SEQ ID NO: 17203 - protein, 19 aa, Homo sapiens
  CDR3 for alpha chain variable domain of TCR clone 8602 (TRAV17, TRAJ54)
CFLLLCYGRGVQGAQKLVF

SEQ ID NO: 17204 - protein, 14 aa, Homo sapiens
  CDR3 for beta chain variable domain of TCR clone 8602 (TRBV4-1, TRBJ2-5)
CASSRSGSGETQYF

SEQ ID NO: 17205 - protein, 22 aa, Homo sapiens
  CDR3 for alpha chain variable domain of TCR clone 8603 (TRAV1-1, TRAJ38)
CASNAGNNHIQNPDPAVYQLRD

SEQ ID NO: 17206 - protein, 14 aa, Homo sapiens
  CDR3 for beta chain variable domain of TCR clone 8603 (TRBV15, TRBJ2-1)
CATSGVEDYNEQFF

SEQ ID NO: 17207 - protein, 13 aa, Homo sapiens
  CDR3 for alpha chain variable domain of TCR clone 8604 (TRAV8-4, TRAJ10)
CAAFTGGGNKLTF

SEQ ID NO: 17208 - protein, 13 aa, Homo sapiens
  CDR3 for beta chain variable domain of TCR clone 8604 (TRBV7-9, TRBJ1-2)
CASSLKQNYGYTF

SEQ ID NO: 17209 - protein, 14 aa, Homo sapiens
  CDR3 for alpha chain variable domain of TCR clone 8605 (TRAV1-2, TRAJ16)
CAVNRFSDGQKLLF

SEQ ID NO: 17210 - protein, 16 aa, Homo sapiens
  CDR3 for beta chain variable domain of TCR clone 8605 (TRBV9, TRBJ2-1)
CASSALGGIGNNEQFF

SEQ ID NO: 17211 - protein, 15 aa, Homo sapiens
  CDR3 for alpha chain variable domain of TCR clone 8606 (TRAV8-4, TRAJ3)
CAVTGESLVQQCFQD

SEQ ID NO: 17212 - protein, 16 aa, Homo sapiens
  CDR3 for beta chain variable domain of TCR clone 8606 (TRBV4-2, TRBJ1-1)
CASSQAGFGMNTEAFF

SEQ ID NO: 17213 - protein, 15 aa, Homo sapiens
  CDR3 for alpha chain variable domain of TCR clone 8607 (TRAV17, TRAJ57)
CATGPSQGGPEKLVF

SEQ ID NO: 17214 - protein, 16 aa, Homo sapiens
  CDR3 for beta chain variable domain of TCR clone 8607 (TRBV12-4, TRBJ1-5)
CASSRPVGGSNQPQHF

SEQ ID NO: 17215 - protein, 12 aa, Homo sapiens
  CDR3 for alpha chain variable domain of TCR clone 8608 (TRAV12-3, TRAJ17)
CAMTLTGNKLTF

SEQ ID NO: 17216 - protein, 15 aa, Homo sapiens
  CDR3 for beta chain variable domain of TCR clone 8608 (TRBV20-1, TRBJ2-7)
CSARDRISGMDEQYF

SEQ ID NO: 17217 - protein, 14 aa, Homo sapiens
  CDR3 for alpha chain variable domain of TCR clone 8609 (TRAV12-3, TRAJ10)
SHLPLTGGGNKLTF

SEQ ID NO: 17218 - protein, 13 aa, Homo sapiens
  CDR3 for beta chain variable domain of TCR clone 8609 (TRBV6-5, TRBJ2-2)
CASSYSDTGELFF

SEQ ID NO: 17219 - protein, 12 aa, Homo sapiens
  CDR3 for alpha chain variable domain of TCR clone 8610 (TRAV23/DV6, TRAJ16)
CAATGTGQKLLF

SEQ ID NO: 17220 - protein, 15 aa, Homo sapiens
  CDR3 for beta chain variable domain of TCR clone 8610 (TRBV5-1, TRBJ2-3)
CASSLETASTDTQYF

SEQ ID NO: 17221 - protein, 17 aa, Homo sapiens
  CDR3 for alpha chain variable domain of TCR clone 8611 (TRAV29/DV5, TRAJ42)
CAASAGNYGGSQGNLIF

SEQ ID NO: 17222 - protein, 16 aa, Homo sapiens
  CDR3 for beta chain variable domain of TCR clone 8611 (TRBV27, TRBJ2-2)
CASSFRGLVRTGELFF

SEQ ID NO: 17223 - protein, 15 aa, Homo sapiens
  CDR3 for alpha chain variable domain of TCR clone 8612 (TRAV8-4, TRAJ10)
CAVSDQMGGGNKLTF

SEQ ID NO: 17224 - protein, 16 aa, Homo sapiens
  CDR3 for beta chain variable domain of TCR clone 8612 (TRBV20-1, TRBJ2-1)
CSARDVTPPPYNEQFF

SEQ ID NO: 17225 - protein, 14 aa, Homo sapiens
  CDR3 for alpha chain variable domain of TCR clone 8613 (TRAV1-2, TRAJ16)
CAVNRFSDGRKLLF

SEQ ID NO: 17226 - protein, 13 aa, Homo sapiens
  CDR3 for beta chain variable domain of TCR clone 8613 (TRBV20-1, TRBJ2-1)
CSAHGSSYNEQFF

SEQ ID NO: 17227 - protein, 11 aa, Homo sapiens
  CDR3 for alpha chain variable domain of TCR clone 8614 (TRAV12-2, TRAJ11)
CAVNPYSTLTF

SEQ ID NO: 17228 - protein, 12 aa, Homo sapiens
  CDR3 for beta chain variable domain of TCR clone 8614 (TRBV9, TRBJ2-2)
CASSAYTGELFF

SEQ ID NO: 17229 - protein, 13 aa, Homo sapiens
  CDR3 for alpha chain variable domain of TCR clone 8615 (TRAV20, TRAJ37)
CAGCSSNTGKLIF

SEQ ID NO: 17230 - protein, 17 aa, Homo sapiens
  CDR3 for beta chain variable domain of TCR clone 8615 (TRBV11-2, TRBJ2-1)
CASSLYPPGVEYNEQFF

SEQ ID NO: 17231 - protein, 12 aa, Homo sapiens
  CDR3 for alpha chain variable domain of TCR clone 8616 (TRAV12-3, TRAJ17)
CAMTLTGNKLTF

SEQ ID NO: 17232 - protein, 17 aa, Homo sapiens
  CDR3 for beta chain variable domain of TCR clone 8616 (TRBV20-1, TRBJ2-7)
CSARDRVSGWTSSTSGR

SEQ ID NO: 17233 - protein, 12 aa, Homo sapiens
  CDR3 for alpha chain variable domain of TCR clone 8617 (TRAV8-3, TRAJ6)
CAVAGVSYIPTF

SEQ ID NO: 17234 - protein, 14 aa, Homo sapiens
  CDR3 for beta chain variable domain of TCR clone 8617 (TRBV27, TRBJ2-7)
CASATGTERREQYF

SEQ ID NO: 17235 - protein, 13 aa, Homo sapiens
  CDR3 for alpha chain variable domain of TCR clone 8618 (TRAV13-2, TRAJ11)
CAENYSRYSTLTF

SEQ ID NO: 17236 - protein, 13 aa, Homo sapiens
  CDR3 for beta chain variable domain of TCR clone 8618 (TRBV12-4, TRBJ1-4)
CASAMGHNEKLFF

SEQ ID NO: 17237 - protein, 10 aa, Homo sapiens
  CDR3 for alpha chain variable domain of TCR clone 8619 (TRAV23/DV6, TRAJ57)
CAASSTPSQG

SEQ ID NO: 17238 - protein, 14 aa, Homo sapiens
  CDR3 for beta chain variable domain of TCR clone 8619 (TRBV25-1, TRBJ1-1)
CASTHLGGNTEAFF

SEQ ID NO: 17239 - protein, 11 aa, Homo sapiens
  CDR3 for alpha chain variable domain of TCR clone 8620 (TRAV2, TRAJ13)
CASGGYQKVTF

SEQ ID NO: 17240 - protein, 16 aa, Homo sapiens
  CDR3 for beta chain variable domain of TCR clone 8620 (TRBV6-1, TRBJ2-5)
CASSETLDRGAKTQYF

SEQ ID NO: 17241 - protein, 11 aa, Homo sapiens
  CDR3 for alpha chain variable domain of TCR clone 8621 (TRAV29/DV5, TRAJ37)
CATSNTGKLIF

SEQ ID NO: 17242 - protein, 13 aa, Homo sapiens
  CDR3 for beta chain variable domain of TCR clone 8621 (TRBV12-4, TRBJ2-3)
CASSSPLGGTQYF

SEQ ID NO: 17243 - protein, 12 aa, Homo sapiens
  CDR3 for alpha chain variable domain of TCR clone 8622 (TRAV16, TRAJ10)
CSRTGGGNKLTF

SEQ ID NO: 17244 - protein, 13 aa, Homo sapiens
  CDR3 for beta chain variable domain of TCR clone 8622 (TRBV29-1, TRBJ1-1)
CSVGDSRNTEAFF

SEQ ID NO: 17245 - protein, 15 aa, Homo sapiens
  CDR3 for alpha chain variable domain of TCR clone 8623 (TRAV12-2, TRAJ43)
CAFDMRFGAGTRLTV

SEQ ID NO: 17246 - protein, 13 aa, Homo sapiens
  CDR3 for beta chain variable domain of TCR clone 8623 (TRBV6-1, TRBJ1-6)
CASSSSWDSPLHF

SEQ ID NO: 17247 - protein, 14 aa, Homo sapiens
  CDR3 for alpha chain variable domain of TCR clone 8624 (TRAV1-2, TRAJ16)
CAVNRFSDGQKLLF

SEQ ID NO: 17248 - protein, 18 aa, Homo sapiens
  CDR3 for beta chain variable domain of TCR clone 8624 (TRBV6-5, TRBJ2-5)
CASSYSQAGGSYQETQYF

SEQ ID NO: 17249 - protein, 12 aa, Homo sapiens
  CDR3 for alpha chain variable domain of TCR clone 8625 (TRAV25, TRAJ5)
CAGGGGRRALTF

SEQ ID NO: 17250 - protein, 15 aa, Homo sapiens
  CDR3 for beta chain variable domain of TCR clone 8625 (TRBV9, TRBJ1-2)
CASSVVGQANYGYTF

SEQ ID NO: 17251 - protein, 13 aa, Homo sapiens
  CDR3 for alpha chain variable domain of TCR clone 8626 (TRAV21, TRAJ27)
CAARPGNAGKSTF

SEQ ID NO: 17252 - protein, 14 aa, Homo sapiens
  CDR3 for beta chain variable domain of TCR clone 8626 (TRBV7-6, TRBJ2-3)
CASSLGTVTDTQYL

SEQ ID NO: 17253 - protein, 13 aa, Homo sapiens
  CDR3 for alpha chain variable domain of TCR clone 8627 (TRAV8-3, TRAJ34)
CAVGGGNTDKLIF

SEQ ID NO: 17254 - protein, 16 aa, Homo sapiens
  CDR3 for beta chain variable domain of TCR clone 8627 (TRBV7-8, TRBJ1-4)
CASSLGVGTSNEKLFF

SEQ ID NO: 17255 - protein, 14 aa, Homo sapiens
  CDR3 for alpha chain variable domain of TCR clone 8628 (TRAV12-3, TRAJ31)
CAMRLRNNNARLMF

SEQ ID NO: 17256 - protein, 15 aa, Homo sapiens
  CDR3 for beta chain variable domain of TCR clone 8628 (TRBV5-7, TRBJ2-7)
CASSEPGSGWREQYF

SEQ ID NO: 17257 - protein, 18 aa, Homo sapiens
  CDR3 for alpha chain variable domain of TCR clone 8629 (TRAV12-2, )
CAVEDIQNPDPAVYQLRD

SEQ ID NO: 17258 - protein, 15 aa, Homo sapiens
  CDR3 for beta chain variable domain of TCR clone 8629 (TRBV6-5, TRBJ2-7)
CASSRTSGFSYEQYF

SEQ ID NO: 17259 - protein, 14 aa, Homo sapiens
  CDR3 for alpha chain variable domain of TCR clone 8630 (TRAV23/DV6, TRAJ8)
CAASKATGFQKLVF

SEQ ID NO: 17260 - protein, 13 aa, Homo sapiens
  CDR3 for beta chain variable domain of TCR clone 8630 (TRBV11-3, TRBJ2-5)
CASSSGLQETQYF

SEQ ID NO: 17261 - protein, 13 aa, Homo sapiens
  CDR3 for alpha chain variable domain of TCR clone 8631 (TRAV21, TRAJ27)
CAARPGNAGKSTF

SEQ ID NO: 17262 - protein, 14 aa, Homo sapiens
  CDR3 for beta chain variable domain of TCR clone 8631 (TRBV7-6, TRBJ2-1)
CASSLGGGQMSSSS

SEQ ID NO: 17263 - protein, 14 aa, Homo sapiens
  CDR3 for alpha chain variable domain of TCR clone 8632 (TRAV12-2, TRAJ44)
CAVNPAGTASKLTF

SEQ ID NO: 17264 - protein, 12 aa, Homo sapiens
  CDR3 for beta chain variable domain of TCR clone 8632 (TRBV7-8, TRBJ2-7)
CASSLGDREQYF

SEQ ID NO: 17265 - protein, 15 aa, Homo sapiens
  CDR3 for alpha chain variable domain of TCR clone 8633 (TRAV4, TRAJ26)
CLVGDMNNYGQNFVF

SEQ ID NO: 17266 - protein, 16 aa, Homo sapiens
  CDR3 for beta chain variable domain of TCR clone 8633 (TRBV12-5, TRBJ2-5)
CASGPRTSGNQETQYF

SEQ ID NO: 17267 - protein, 14 aa, Homo sapiens
  CDR3 for alpha chain variable domain of TCR clone 8634 (TRAV12-2, TRAJ40)
CAVRIPSGTYKYIF

SEQ ID NO: 17268 - protein, 14 aa, Homo sapiens
  CDR3 for beta chain variable domain of TCR clone 8634 (TRBV20-1, TRBJ1-1)
CSAQTRIGGTEAFF

SEQ ID NO: 17269 - protein, 16 aa, Homo sapiens
  CDR3 for alpha chain variable domain of TCR clone 8635 (TRAV23/DV6, TRAJ9)
CAASIGGNTGGFKTIF

SEQ ID NO: 17270 - protein, 14 aa, Homo sapiens
  CDR3 for beta chain variable domain of TCR clone 8635 (TRBV7-2, TRBJ2-7)
CASSPKTSFYEQYF

SEQ ID NO: 17271 - protein, 15 aa, Homo sapiens
  CDR3 for alpha chain variable domain of TCR clone 8636 (TRAV8-3, TRAJ45)
CASSYSGGGADGLTF

SEQ ID NO: 17272 - protein, 13 aa, Homo sapiens
  CDR3 for beta chain variable domain of TCR clone 8636 (TRBV10-3, TRBJ2-7)
CASKLAVNYEQYL

SEQ ID NO: 17273 - protein, 15 aa, Homo sapiens
  CDR3 for alpha chain variable domain of TCR clone 8637 (TRAV8-3, TRAJ48)
CAVGAQLSGNEKLTF

SEQ ID NO: 17274 - protein, 15 aa, Homo sapiens
  CDR3 for beta chain variable domain of TCR clone 8637 (TRBV5-1, TRBJ2-1)
CASSPPRAPYNEQFF

SEQ ID NO: 17275 - protein, 10 aa, Homo sapiens
  CDR3 for alpha chain variable domain of TCR clone 8638 (TRAV21, TRAJ34)
CAADTDKLIF

SEQ ID NO: 17276 - protein, 17 aa, Homo sapiens
  CDR3 for beta chain variable domain of TCR clone 8638 (TRBV19, TRBJ2-6)
CASSTGQVFSGANVLTF

SEQ ID NO: 17277 - protein, 13 aa, Homo sapiens
  CDR3 for alpha chain variable domain of TCR clone 8639 (TRAV21, TRAJ27)
CAARPGNAGKSTF

SEQ ID NO: 17278 - protein, 14 aa, Homo sapiens
  CDR3 for beta chain variable domain of TCR clone 8639 (TRBV7-6, TRBJ2-3)
CASSLGTVTGTQYF

SEQ ID NO: 17279 - protein, 13 aa, Homo sapiens
  CDR3 for alpha chain variable domain of TCR clone 8640 (TRAV12-1, TRAJ34)
CGEPLRNTDKLIF

SEQ ID NO: 17280 - protein, 20 aa, Homo sapiens
  CDR3 for beta chain variable domain of TCR clone 8640 (TRBV28, TRBJ2-1)
CASTPIGRSPGLAGGNEQFF

SEQ ID NO: 17281 - protein, 15 aa, Homo sapiens
  CDR3 for alpha chain variable domain of TCR clone 8641 (TRAV3, TRAJ20)
CAVRDVKLSDYKLSF

SEQ ID NO: 17282 - protein, 15 aa, Homo sapiens
  CDR3 for beta chain variable domain of TCR clone 8641 (TRBV7-9, TRBJ1-6)
CASSSPGRGNSPLHF

SEQ ID NO: 17283 - protein, 18 aa, Homo sapiens
  CDR3 for alpha chain variable domain of TCR clone 8642 (TRAV12-3, TRAJ52)
CAMSALNAGGTSYGKLTF

SEQ ID NO: 17284 - protein, 13 aa, Homo sapiens
  CDR3 for beta chain variable domain of TCR clone 8642 (TRBV27, TRBJ1-1)
CASSLSIGAEAFF

SEQ ID NO: 17285 - protein, 13 aa, Homo sapiens
  CDR3 for alpha chain variable domain of TCR clone 8643 (TRAV2, TRAJ40)
CAVVTSRTYKYIF

SEQ ID NO: 17286 - protein, 14 aa, Homo sapiens
  CDR3 for beta chain variable domain of TCR clone 8643 (TRBV19, TRBJ2-1)
CASPTFVLSGEQFF

SEQ ID NO: 17287 - protein, 12 aa, Homo sapiens
  CDR3 for alpha chain variable domain of TCR clone 8644 (TRAV16, TRAJ27)
CALNHQCRQINL

SEQ ID NO: 17288 - protein, 17 aa, Homo sapiens
  CDR3 for beta chain variable domain of TCR clone 8644 (TRBV4-1, TRBJ2-7)
CASSRDPLGVRGGEQYF

SEQ ID NO: 17289 - protein, 16 aa, Homo sapiens
  CDR3 for alpha chain variable domain of TCR clone 8645 (TRAV12-3, TRAJ53)
CAMSPRSGGSNYKLTF

SEQ ID NO: 17290 - protein, 11 aa, Homo sapiens
  CDR3 for beta chain variable domain of TCR clone 8645 (TRBV29-1, TRBJ2-5)
CSEDRTGTQYF

SEQ ID NO: 17291 - protein, 11 aa, Homo sapiens
  CDR3 for alpha chain variable domain of TCR clone 8646 (TRAV2, TRAJ13)
CASGGYQKVTF

SEQ ID NO: 17292 - protein, 15 aa, Homo sapiens
  CDR3 for beta chain variable domain of TCR clone 8646 (TRBV19, TRBJ2-1)
CASSIGLAGWDEQFF

SEQ ID NO: 17293 - protein, 14 aa, Homo sapiens
  CDR3 for alpha chain variable domain of TCR clone 8647 (TRAV12-3, TRAJ9)
CAMSPNTGGFKTIF

SEQ ID NO: 17294 - protein, 12 aa, Homo sapiens
  CDR3 for beta chain variable domain of TCR clone 8647 (TRBV19, TRBJ1-5)
CASSIAQQTQHF

SEQ ID NO: 17295 - protein, 14 aa, Homo sapiens
  CDR3 for alpha chain variable domain of TCR clone 8648 (TRAV16, TRAJ58)
CALFKETSGSRLTF

SEQ ID NO: 17296 - protein, 15 aa, Homo sapiens
  CDR3 for beta chain variable domain of TCR clone 8648 (TRBV9, TRBJ1-6)
CASSVAGTGDSPLHF

SEQ ID NO: 17297 - protein, 13 aa, Homo sapiens
  CDR3 for alpha chain variable domain of TCR clone 8649 (TRAV27, TRAJ18)
CAGRGSTLGRLYF

SEQ ID NO: 17298 - protein, 14 aa, Homo sapiens
  CDR3 for beta chain variable domain of TCR clone 8649 (TRBV5-1, TRBJ2-3)
CASSASGGQDTQYF

SEQ ID NO: 17299 - protein, 10 aa, Homo sapiens
  CDR3 for alpha chain variable domain of TCR clone 8650 (TRAV8-4, TRAJ39)
CAVSGNMLTF

SEQ ID NO: 17300 - protein, 15 aa, Homo sapiens
  CDR3 for beta chain variable domain of TCR clone 8650 (TRBV5-1, TRBJ2-3)
CASSSTSGSTDTQYF

SEQ ID NO: 17301 - protein, 13 aa, Homo sapiens
  CDR3 for alpha chain variable domain of TCR clone 8651 (TRAV14/DV4, TRAJ4)
CAMKAGGYNKLIF

SEQ ID NO: 17302 - protein, 15 aa, Homo sapiens
  CDR3 for beta chain variable domain of TCR clone 8651 (TRBV11-3, TRBJ1-1)
CASSLGGPGGTEAFF

SEQ ID NO: 17303 - protein, 15 aa, Homo sapiens
  CDR3 for alpha chain variable domain of TCR clone 8652 (TRAV8-3, TRAJ11)
CAVGLLNSGYSTLTF

SEQ ID NO: 17304 - protein, 13 aa, Homo sapiens
  CDR3 for beta chain variable domain of TCR clone 8652 (TRBV11-2, TRBJ2-5)
CASSSTGEETQYF

SEQ ID NO: 17305 - protein, 14 aa, Homo sapiens
  CDR3 for alpha chain variable domain of TCR clone 8653 (TRAV26-1, TRAJ39)
CIVRGSRAGNMPTF

SEQ ID NO: 17306 - protein, 15 aa, Homo sapiens
  CDR3 for beta chain variable domain of TCR clone 8653 (TRBV7-9, TRBJ1-5)
CASSQGHQPNQPQHF

SEQ ID NO: 17307 - protein, 15 aa, Homo sapiens
  CDR3 for alpha chain variable domain of TCR clone 8654 (TRAV2, TRAJ9)
CAVAALNTGGFKTIF

SEQ ID NO: 17308 - protein, 13 aa, Homo sapiens
  CDR3 for beta chain variable domain of TCR clone 8654 (TRBV3-1, TRBJ2-3)
CASSQGGGDTQYF

SEQ ID NO: 17309 - protein, 13 aa, Homo sapiens
  CDR3 for alpha chain variable domain of TCR clone 8655 (TRAV8-3, TRAJ7)
CAVGAYGNNRLAF

SEQ ID NO: 17310 - protein, 13 aa, Homo sapiens
  CDR3 for beta chain variable domain of TCR clone 8655 (TRBV7-3, TRBJ1-5)
CASSLDSNQPQHF

SEQ ID NO: 17311 - protein, 14 aa, Homo sapiens
  CDR3 for alpha chain variable domain of TCR clone 8656 (TRAV2, TRAJ20)
CAVEDVVNDYKLSF

SEQ ID NO: 17312 - protein, 15 aa, Homo sapiens
  CDR3 for beta chain variable domain of TCR clone 8656 (TRBV6-1, TRBJ2-3)
CASSEIAHSTDTQYF

SEQ ID NO: 17313 - protein, 13 aa, Homo sapiens
  CDR3 for alpha chain variable domain of TCR clone 8657 (TRAV1-2, TRAJ9)
CAALNTGGFNTIF

SEQ ID NO: 17314 - protein, 13 aa, Homo sapiens
  CDR3 for beta chain variable domain of TCR clone 8657 (TRBV19, TRBJ1-2)
CASSVPGQDGYTF

SEQ ID NO: 17315 - protein, 14 aa, Homo sapiens
  CDR3 for alpha chain variable domain of TCR clone 8658 (TRAV8-3, TRAJ13)
CAVGAAGGYQKVTF

SEQ ID NO: 17316 - protein, 14 aa, Homo sapiens
  CDR3 for beta chain variable domain of TCR clone 8658 (TRBV7-8, TRBJ2-2)
CASSLDPNTGELFF

SEQ ID NO: 17317 - protein, 12 aa, Homo sapiens
  CDR3 for alpha chain variable domain of TCR clone 8659 (TRAV12-1, TRAJ40)
CVVYSGTYKYIF

SEQ ID NO: 17318 - protein, 12 aa, Homo sapiens
  CDR3 for beta chain variable domain of TCR clone 8659 (TRBV11-2, TRBJ2-3)
GASRGAPNTQYF

SEQ ID NO: 17319 - protein, 17 aa, Homo sapiens
  CDR3 for alpha chain variable domain of TCR clone 8660 (TRAV3, TRAJ6)
CAVRDGPRAGGSYIPTF

SEQ ID NO: 17320 - protein, 14 aa, Homo sapiens
  CDR3 for beta chain variable domain of TCR clone 8660 (TRBV7-2, TRBJ2-7)
CASSPNTSFYEQYF

SEQ ID NO: 17321 - protein, 15 aa, Homo sapiens
  CDR3 for alpha chain variable domain of TCR clone 8661 (TRAV12-3, TRAJ17)
CAMSPSLAAGNKLTF

SEQ ID NO: 17322 - protein, 15 aa, Homo sapiens
  CDR3 for beta chain variable domain of TCR clone 8661 (TRBV9, TRBJ1-6)
CASSVAGTGDSPLHF

SEQ ID NO: 17323 - protein, 14 aa, Homo sapiens
  CDR3 for alpha chain variable domain of TCR clone 8662 (TRAV26-1, TRAJ34)
CIVRVAYNTDKLIF

SEQ ID NO: 17324 - protein, 15 aa, Homo sapiens
  CDR3 for beta chain variable domain of TCR clone 8662 (TRBV7-3, TRBJ2-1)
CASSPTGGGEVEQFF

SEQ ID NO: 17325 - protein, 15 aa, Homo sapiens
  CDR3 for alpha chain variable domain of TCR clone 8663 (TRAV19, TRAJ9)
CALSEEGTGGFKTIF

SEQ ID NO: 17326 - protein, 15 aa, Homo sapiens
  CDR3 for beta chain variable domain of TCR clone 8663 (TRBV15, TRBJ2-7)
CATSSGTTTTYEQYF

SEQ ID NO: 17327 - protein, 15 aa, Homo sapiens
  CDR3 for alpha chain variable domain of TCR clone 8664 (TRAV8-3, TRAJ11)
CAVGLLNSGYSTLTF

SEQ ID NO: 17328 - protein, 13 aa, Homo sapiens
  CDR3 for beta chain variable domain of TCR clone 8664 (TRBV4-2, TRBJ2-5)
CASSRAGGETQYF

SEQ ID NO: 17329 - protein, 13 aa, Homo sapiens
  CDR3 for alpha chain variable domain of TCR clone 8665 (TRAV27, TRAJ45)
CRSSGGGADGLTF

SEQ ID NO: 17330 - protein, 14 aa, Homo sapiens
  CDR3 for beta chain variable domain of TCR clone 8665 (TRBV7-2, TRBJ2-7)
CASSPKTSFYEQYF

SEQ ID NO: 17331 - protein, 22 aa, Homo sapiens
  CDR3 for alpha chain variable domain of TCR clone 8666 (TRAV12-2, TRAJ32)
CSSETPSPVIQPPKSATNKLIF

SEQ ID NO: 17332 - protein, 15 aa, Homo sapiens
  CDR3 for beta chain variable domain of TCR clone 8666 (TRBV28, TRBJ2-5)
CASSADRGRGETQYF

SEQ ID NO: 17333 - protein, 17 aa, Homo sapiens
  CDR3 for alpha chain variable domain of TCR clone 8667 (TRAV3, TRAJ13)
CAVRDMRRTGGYQKVTF

SEQ ID NO: 17334 - protein, 14 aa, Homo sapiens
  CDR3 for beta chain variable domain of TCR clone 8667 (TRBV12-5, TRBJ2-5)
CASGSRTHQETQYF

SEQ ID NO: 17335 - protein, 14 aa, Homo sapiens
  CDR3 for alpha chain variable domain of TCR clone 8668 (TRAV2, TRAJ37)
CAVDFTSNTGKLIF

SEQ ID NO: 17336 - protein, 12 aa, Homo sapiens
  CDR3 for beta chain variable domain of TCR clone 8668 (TRBV11-2, TRBJ2-2)
CASSLGGGELFF

SEQ ID NO: 17337 - protein, 10 aa, Homo sapiens
  CDR3 for alpha chain variable domain of TCR clone 8669 (TRAV8-4, TRAJ43)
CAVSADDMRF

SEQ ID NO: 17338 - protein, 13 aa, Homo sapiens
  CDR3 for beta chain variable domain of TCR clone 8669 (TRBV7-2, TRBJ2-2)
CASSSVRAGELFF

SEQ ID NO: 17339 - protein, 14 aa, Homo sapiens
  CDR3 for alpha chain variable domain of TCR clone 8670 (TRAV1-2, TRAJ16)
CAVNRFSDGQKLLF

SEQ ID NO: 17340 - protein, 14 aa, Homo sapiens
  CDR3 for beta chain variable domain of TCR clone 8670 (TRBV6-1, TRBJ1-6)
CASSGTAYNSPLHF

SEQ ID NO: 17341 - protein, 15 aa, Homo sapiens
  CDR3 for alpha chain variable domain of TCR clone 8671 (TRAV26-1, TRAJ29)
CIVRVEGSGNTPLFF

SEQ ID NO: 17342 - protein, 15 aa, Homo sapiens
  CDR3 for beta chain variable domain of TCR clone 8671 (TRBV7-9, TRBJ1-5)
CASSQGHQPNQPQHF

SEQ ID NO: 17343 - protein, 14 aa, Homo sapiens
  CDR3 for alpha chain variable domain of TCR clone 8672 (TRAV13-1, TRAJ35)
CAASKGGFGNVLHG

SEQ ID NO: 17344 - protein, 13 aa, Homo sapiens
  CDR3 for beta chain variable domain of TCR clone 8672 (TRBV7-3, TRBJ1-1)
CASSQDWGAEAFF

SEQ ID NO: 17345 - protein, 12 aa, Homo sapiens
  CDR3 for alpha chain variable domain of TCR clone 8673 (TRAV26-1, TRAJ53)
CIEGGSNYKLTF

SEQ ID NO: 17346 - protein, 15 aa, Homo sapiens
  CDR3 for beta chain variable domain of TCR clone 8673 (TRBV5-1, TRBJ2-2)
CASSLLQGRPGELFF

SEQ ID NO: 17347 - protein, 14 aa, Homo sapiens
  CDR3 for alpha chain variable domain of TCR clone 8674 (TRAV1-2, TRAJ16)
CAVNRFSDGQKLLF

SEQ ID NO: 17348 - protein, 15 aa, Homo sapiens
  CDR3 for beta chain variable domain of TCR clone 8674 (TRBV9, TRBJ1-6)
RASSVAGTGDSPLHF

SEQ ID NO: 17349 - protein, 14 aa, Homo sapiens
  CDR3 for alpha chain variable domain of TCR clone 8675 (TRAV12-3, TRAJ10)
SHLPLTGGGNKLTF

SEQ ID NO: 17350 - protein, 12 aa, Homo sapiens
  CDR3 for beta chain variable domain of TCR clone 8675 (TRBV14, TRBJ1-1)
CASSQLKGLAFF

SEQ ID NO: 17351 - protein, 14 aa, Homo sapiens
  CDR3 for alpha chain variable domain of TCR clone 8676 (TRAV12-2, TRAJ13)
CAVTKTGGYQKVTF

SEQ ID NO: 17352 - protein, 15 aa, Homo sapiens
  CDR3 for beta chain variable domain of TCR clone 8676 (TRBV27, TRBJ2-1)
CASSNGGGSSNEQFF

SEQ ID NO: 17353 - protein, 12 aa, Homo sapiens
  CDR3 for alpha chain variable domain of TCR clone 8677 (TRAV21, TRAJ13)
PGPSGGYQKVTF

SEQ ID NO: 17354 - protein, 14 aa, Homo sapiens
  CDR3 for beta chain variable domain of TCR clone 8677 (TRBV19, TRBJ2-1)
CASPTFVLSGEQFF

SEQ ID NO: 17355 - protein, 14 aa, Homo sapiens
  CDR3 for alpha chain variable domain of TCR clone 8678 (TRAV1-2, TRAJ16)
CAVNRFSDGQKLLF

SEQ ID NO: 17356 - protein, 15 aa, Homo sapiens
  CDR3 for beta chain variable domain of TCR clone 8678 (TRBV7-2, TRBJ1-2)
CASSPRAGWNYGYTF

SEQ ID NO: 17357 - protein, 11 aa, Homo sapiens
  CDR3 for alpha chain variable domain of TCR clone 8679 (TRAV8-3, TRAJ37)
PLPSNTGKLIF

SEQ ID NO: 17358 - protein, 14 aa, Homo sapiens
  CDR3 for beta chain variable domain of TCR clone 8679 (TRBV10-1, TRBJ2-5)
CASSESQGAKTQYF

SEQ ID NO: 17359 - protein, 14 aa, Homo sapiens
  CDR3 for alpha chain variable domain of TCR clone 8680 (TRAV1-2, TRAJ8)
CAVREDTGFQKLVF

SEQ ID NO: 17360 - protein, 12 aa, Homo sapiens
  CDR3 for beta chain variable domain of TCR clone 8680 (TRBV14, TRBJ2-7)
CASSSLKGEQYF

SEQ ID NO: 17361 - protein, 14 aa, Homo sapiens
  CDR3 for alpha chain variable domain of TCR clone 8681 (TRAV9-2, TRAJ39)
CALYIYNAGNMLTF

SEQ ID NO: 17362 - protein, 16 aa, Homo sapiens
  CDR3 for beta chain variable domain of TCR clone 8681 (TRBV5-1, TRBJ2-2)
CASSSRTGGRTGELFF

SEQ ID NO: 17363 - protein, 14 aa, Homo sapiens
  CDR3 for alpha chain variable domain of TCR clone 8682 (TRAV13-1, TRAJ9)
CAASALTGGFKTIF

SEQ ID NO: 17364 - protein, 15 aa, Homo sapiens
  CDR3 for beta chain variable domain of TCR clone 8682 (TRBV7-2, TRBJ2-1)
CASSFRESSYNEQFF

SEQ ID NO: 17365 - protein, 14 aa, Homo sapiens
  CDR3 for alpha chain variable domain of TCR clone 8683 (TRAV3, TRAJ36)
CAVRDGTGANNLFF

SEQ ID NO: 17366 - protein, 19 aa, Homo sapiens
  CDR3 for beta chain variable domain of TCR clone 8683 (TRBV19, TRBJ2-6)
CASTPTWGRAASGANVLTF

SEQ ID NO: 17367 - protein, 14 aa, Homo sapiens
  CDR3 for alpha chain variable domain of TCR clone 8684 (TRAV2, TRAJ45)
CAVEDLFQEEVLTD

SEQ ID NO: 17368 - protein, 16 aa, Homo sapiens
  CDR3 for beta chain variable domain of TCR clone 8684 (TRBV19, TRBJ2-2)
CASRSPGTGATGELFF

SEQ ID NO: 17369 - protein, 12 aa, Homo sapiens
  CDR3 for alpha chain variable domain of TCR clone 8685 (TRAV1-1, TRAJ24)
CAVRGSWGKFQF

SEQ ID NO: 17370 - protein, 16 aa, Homo sapiens
  CDR3 for beta chain variable domain of TCR clone 8685 (TRBV27, TRBJ2-2)
CASSFRGLVRTGELFF

SEQ ID NO: 17371 - protein, 14 aa, Homo sapiens
  CDR3 for alpha chain variable domain of TCR clone 8686 (TRAV14/DV4, TRAJ42)
CPRGSLRSQGNLIF

SEQ ID NO: 17372 - protein, 13 aa, Homo sapiens
  CDR3 for beta chain variable domain of TCR clone 8686 (TRBV4-2, TRBJ1-1)
CASSQAGNTEAFF

SEQ ID NO: 17373 - protein, 16 aa, Homo sapiens
  CDR3 for alpha chain variable domain of TCR clone 8687 (TRAV14/DV4, TRAJ20)
CAMREGRSRDDYKLSF

SEQ ID NO: 17374 - protein, 17 aa, Homo sapiens
  CDR3 for beta chain variable domain of TCR clone 8687 (TRBV7-9, TRBJ2-5)
CASSPGLAGGGREPQYF

SEQ ID NO: 17375 - protein, 14 aa, Homo sapiens
  CDR3 for alpha chain variable domain of TCR clone 8688 (TRAV13-1, TRAJ22)
CAASNGGSARQLTF

SEQ ID NO: 17376 - protein, 14 aa, Homo sapiens
  CDR3 for beta chain variable domain of TCR clone 8688 (TRBV18, TRBJ2-2)
CASSPGQNTGELFF

SEQ ID NO: 17377 - protein, 12 aa, Homo sapiens
  CDR3 for alpha chain variable domain of TCR clone 8689 (TRAV13-1, TRAJ21)
CAAKEGFNKFYF

SEQ ID NO: 17378 - protein, 13 aa, Homo sapiens
  CDR3 for beta chain variable domain of TCR clone 8689 (TRBV20-1, TRBJ1-1)
CSAPLGGGTEAFF

SEQ ID NO: 17379 - protein, 15 aa, Homo sapiens
  CDR3 for alpha chain variable domain of TCR clone 8690 (TRAV8-3, TRAJ40)
CATPSLGSGTYKYIF

SEQ ID NO: 17380 - protein, 16 aa, Homo sapiens
  CDR3 for beta chain variable domain of TCR clone 8690 (TRBV7-3, TRBJ2-3)
CASSLSGYRPEDTQYF

SEQ ID NO: 17381 - protein, 18 aa, Homo sapiens
  CDR3 for alpha chain variable domain of TCR clone 8691 (TRAV21, TRAJ52)
CAVRPSPAGGTSYGKLKF

SEQ ID NO: 17382 - protein, 17 aa, Homo sapiens
  CDR3 for beta chain variable domain of TCR clone 8691 (TRBV13, TRBJ2-3)
CASSLSRVAGGRNTQYF

SEQ ID NO: 17383 - protein, 14 aa, Homo sapiens
  CDR3 for alpha chain variable domain of TCR clone 8692 (TRAV12-1, TRAJ30)
CVVNIGGRDDKTIF

SEQ ID NO: 17384 - protein, 14 aa, Homo sapiens
  CDR3 for beta chain variable domain of TCR clone 8692 (TRBV20-1, TRBJ2-1)
CSAQIGGSANEQFF

SEQ ID NO: 17385 - protein, 15 aa, Homo sapiens
  CDR3 for alpha chain variable domain of TCR clone 8693 (TRAV26-1, TRAJ29)
CIVRVGGSGNTPLVF

SEQ ID NO: 17386 - protein, 15 aa, Homo sapiens
  CDR3 for beta chain variable domain of TCR clone 8693 (TRBV7-9, TRBJ1-5)
CASSQGHQPNQPQHF

SEQ ID NO: 17387 - protein, 13 aa, Homo sapiens
  CDR3 for alpha chain variable domain of TCR clone 8694 (TRAV12-3, TRAJ50)
CARGGTSYDKVIF

SEQ ID NO: 17388 - protein, 16 aa, Homo sapiens
  CDR3 for beta chain variable domain of TCR clone 8694 (TRBV6-1, TRBJ2-5)
CASSETLDRGAETQYF

SEQ ID NO: 17389 - protein, 13 aa, Homo sapiens
  CDR3 for alpha chain variable domain of TCR clone 8695 (TRAV12-3, TRAJ13)
CAMSSGGYQKVTF

SEQ ID NO: 17390 - protein, 13 aa, Homo sapiens
  CDR3 for beta chain variable domain of TCR clone 8695 (TRBV7-3, TRBJ1-1)
CASSQDWGAEAFF

SEQ ID NO: 17391 - protein, 13 aa, Homo sapiens
  CDR3 for alpha chain variable domain of TCR clone 8696 (TRAV17, TRAJ5)
CALRGTGRRALTF

SEQ ID NO: 17392 - protein, 14 aa, Homo sapiens
  CDR3 for beta chain variable domain of TCR clone 8696 (TRBV10-3, TRBJ1-2)
CAISDGGRNYGYTF

SEQ ID NO: 17393 - protein, 11 aa, Homo sapiens
  CDR3 for alpha chain variable domain of TCR clone 8697 (TRAV12-2, TRAJ49)
CAVTGGNQFYF

SEQ ID NO: 17394 - protein, 14 aa, Homo sapiens
  CDR3 for beta chain variable domain of TCR clone 8697 (TRBV20-1, TRBJ1-1)
CSAQTRIGGTEAFF

SEQ ID NO: 17395 - protein, 14 aa, Homo sapiens
  CDR3 for alpha chain variable domain of TCR clone 8698 (TRAV8-4, TRAJ8)
CAVSVNTGFQKLVF

SEQ ID NO: 17396 - protein, 15 aa, Homo sapiens
  CDR3 for beta chain variable domain of TCR clone 8698 (TRBV20-1, TRBJ2-3)
CSARRTGLSTDTQYF

SEQ ID NO: 17397 - protein, 15 aa, Homo sapiens
  CDR3 for alpha chain variable domain of TCR clone 8699 (TRAV26-1, TRAJ29)
CIVRVEGPGNTPLVF

SEQ ID NO: 17398 - protein, 14 aa, Homo sapiens
  CDR3 for beta chain variable domain of TCR clone 8699 (TRBV18, TRBJ2-5)
CASSPGVSQETQYF

SEQ ID NO: 17399 - protein, 14 aa, Homo sapiens
  CDR3 for alpha chain variable domain of TCR clone 8700 (TRAV25, TRAJ42)
CAGNYGGSQGNLIF

SEQ ID NO: 17400 - protein, 15 aa, Homo sapiens
  CDR3 for beta chain variable domain of TCR clone 8700 (TRBV6-1, TRBJ2-6)
CASTGSRSGANVLTF

SEQ ID NO: 17401 - protein, 14 aa, Homo sapiens
  CDR3 for alpha chain variable domain of TCR clone 8701 (TRAV12-2, TRAJ44)
CAVNPAGTASKLTF

SEQ ID NO: 17402 - protein, 13 aa, Homo sapiens
  CDR3 for beta chain variable domain of TCR clone 8701 (TRBV4-2, TRBJ1-1)
CASSQAGNTEAFF

SEQ ID NO: 17403 - protein, 16 aa, Homo sapiens
  CDR3 for alpha chain variable domain of TCR clone 8702 (TRAV30, TRAJ24)
CGTDIVDADSWGKFQF

SEQ ID NO: 17404 - protein, 14 aa, Homo sapiens
  CDR3 for beta chain variable domain of TCR clone 8702 (TRBV12-5, TRBJ2-5)
CASGSRTHQETQYF

SEQ ID NO: 17405 - protein, 12 aa, Homo sapiens
  CDR3 for alpha chain variable domain of TCR clone 8703 (TRAV2, TRAJ33)
CAVPDSNYQLIW

SEQ ID NO: 17406 - protein, 18 aa, Homo sapiens
  CDR3 for beta chain variable domain of TCR clone 8703 (TRBV7-3, TRBJ2-3)
CASSSTGTYPGSTDTQYF

SEQ ID NO: 17407 - protein, 16 aa, Homo sapiens
  CDR3 for alpha chain variable domain of TCR clone 8704 (TRAV3, TRAJ37)
CAVRGKGSGNTGKLIF

SEQ ID NO: 17408 - protein, 15 aa, Homo sapiens
  CDR3 for beta chain variable domain of TCR clone 8704 (TRBV6-6, TRBJ2-5)
CASSYGKIIQETQYF

SEQ ID NO: 17409 - protein, 16 aa, Homo sapiens
  CDR3 for alpha chain variable domain of TCR clone 8705 (TRAV1-2, TRAJ33)
CAVRAISMDSNYQLIW

SEQ ID NO: 17410 - protein, 17 aa, Homo sapiens
  CDR3 for beta chain variable domain of TCR clone 8705 (TRBV5-3, TRBJ1-5)
CARSPRRDRRCTQPQHF

SEQ ID NO: 17411 - protein, 15 aa, Homo sapiens
  CDR3 for alpha chain variable domain of TCR clone 8706 (TRAV12-1, TRAJ33)
CVVNGNLDSNYQLIW

SEQ ID NO: 17412 - protein, 13 aa, Homo sapiens
  CDR3 for beta chain variable domain of TCR clone 8706 (TRBV9, TRBJ2-7)
CASSKTGTYEQYF

SEQ ID NO: 17413 - protein, 12 aa, Homo sapiens
  CDR3 for alpha chain variable domain of TCR clone 8707 (TRAV8-6, TRAJ36)
CAVSDWLGQTTS

SEQ ID NO: 17414 - protein, 15 aa, Homo sapiens
  CDR3 for beta chain variable domain of TCR clone 8707 (TRBV9, TRBJ1-6)
CASSVAGTGDSPLHF

SEQ ID NO: 17415 - protein, 13 aa, Homo sapiens
  CDR3 for alpha chain variable domain of TCR clone 8708 (TRAV17, TRAJ48)
CATPHFGNEKLTF

SEQ ID NO: 17416 - protein, 16 aa, Homo sapiens
  CDR3 for beta chain variable domain of TCR clone 8708 (TRBV4-1, TRBJ2-7)
CASSQGQFLSSYEQYF

SEQ ID NO: 17417 - protein, 14 aa, Homo sapiens
  CDR3 for alpha chain variable domain of TCR clone 8709 (TRAV17, TRAJ54)
CAMDANQGAQKLVF

SEQ ID NO: 17418 - protein, 12 aa, Homo sapiens
  CDR3 for beta chain variable domain of TCR clone 8709 (TRBV7-9, TRBJ2-7)
CASSIKREEQYF

SEQ ID NO: 17419 - protein, 14 aa, Homo sapiens
  CDR3 for alpha chain variable domain of TCR clone 8710 (TRAV8-4, TRAJ47)
CAVSIMEYGNKLVF

SEQ ID NO: 17420 - protein, 16 aa, Homo sapiens
  CDR3 for beta chain variable domain of TCR clone 8710 (TRBV14, TRBJ1-2)
CASSQGPTTANYGYTF

SEQ ID NO: 17421 - protein, 14 aa, Homo sapiens
  CDR3 for alpha chain variable domain of TCR clone 8711 (TRAV1-2, TRAJ16)
CAVNRFSGGQKLLF

SEQ ID NO: 17422 - protein, 15 aa, Homo sapiens
  CDR3 for beta chain variable domain of TCR clone 8711 (TRBV9, TRBJ1-6)
CASSVAGTGDSPLHF

SEQ ID NO: 17423 - protein, 14 aa, Homo sapiens
  CDR3 for alpha chain variable domain of TCR clone 8712 (TRAV20, TRAJ4)
CAVRLGGGYNKLIF

SEQ ID NO: 17424 - protein, 14 aa, Homo sapiens
  CDR3 for beta chain variable domain of TCR clone 8712 (TRBV7-3, TRBJ2-3)
CASSPGASRDTQYF

SEQ ID NO: 17425 - protein, 16 aa, Homo sapiens
  CDR3 for alpha chain variable domain of TCR clone 8713 (TRAV22, TRAJ45)
CAVERGKRGGADGLTF

SEQ ID NO: 17426 - protein, 17 aa, Homo sapiens
  CDR3 for beta chain variable domain of TCR clone 8713 (TRBV20-1, TRBJ1-5)
CSAREIPQGVGNQPQHF

SEQ ID NO: 17427 - protein, 14 aa, Homo sapiens
  CDR3 for alpha chain variable domain of TCR clone 8714 (TRAV2, TRAJ37)
CAVDFTSNTGKLIF

SEQ ID NO: 17428 - protein, 14 aa, Homo sapiens
  CDR3 for beta chain variable domain of TCR clone 8714 (TRBV7-3, TRBJ1-1)
CASSLKGGNTEAFF

SEQ ID NO: 17429 - protein, 14 aa, Homo sapiens
  CDR3 for alpha chain variable domain of TCR clone 8715 (TRAV1-2, TRAJ8)
CAVREDTGFQKLVF

SEQ ID NO: 17430 - protein, 16 aa, Homo sapiens
  CDR3 for beta chain variable domain of TCR clone 8715 (TRBV7-6, TRBJ2-7)
CASSGGTGALSYEQYF

SEQ ID NO: 17431 - protein, 13 aa, Homo sapiens
  CDR3 for alpha chain variable domain of TCR clone 8716 (TRAV39, TRAJ58)
CAGEETSGSRSTF

SEQ ID NO: 17432 - protein, 13 aa, Homo sapiens
  CDR3 for beta chain variable domain of TCR clone 8716 (TRBV15, TRBJ2-7)
CATSTTGHYEQYF

SEQ ID NO: 17433 - protein, 14 aa, Homo sapiens
  CDR3 for alpha chain variable domain of TCR clone 8717 (TRAV36/DV7, TRAJ21)
CAVYTTSTNFTLDL

SEQ ID NO: 17434 - protein, 13 aa, Homo sapiens
  CDR3 for beta chain variable domain of TCR clone 8717 (TRBV7-9, TRBJ2-5)
CASLPSGRETQYF

SEQ ID NO: 17435 - protein, 14 aa, Homo sapiens
  CDR3 for alpha chain variable domain of TCR clone 8718 (TRAV9-2, TRAJ39)
CALYIYNAGNMLTF

SEQ ID NO: 17436 - protein, 13 aa, Homo sapiens
  CDR3 for beta chain variable domain of TCR clone 8718 (TRBV4-2, TRBJ1-1)
CASSQAGNTEAFF

SEQ ID NO: 17437 - protein, 21 aa, Homo sapiens
  CDR3 for alpha chain variable domain of TCR clone 8719 (TRAV4, TRAJ3)
CCVLLPRGCPPGYSSASKIIF

SEQ ID NO: 17438 - protein, 14 aa, Homo sapiens
  CDR3 for beta chain variable domain of TCR clone 8719 (TRBV2, TRBJ1-6)
CALSPSDPRSPLHF

SEQ ID NO: 17439 - protein, 14 aa, Homo sapiens
  CDR3 for alpha chain variable domain of TCR clone 8720 (TRAV35, TRAJ35)
CAGRAEALGMCCIA

SEQ ID NO: 17440 - protein, 15 aa, Homo sapiens
  CDR3 for beta chain variable domain of TCR clone 8720 (TRBV6-1, TRBJ1-5)
CASSELREGNQPQHF

SEQ ID NO: 17441 - protein, 15 aa, Homo sapiens
  CDR3 for alpha chain variable domain of TCR clone 8721 (TRAV3, TRAJ4)
CAVGDGTGGYNKLIF

SEQ ID NO: 17442 - protein, 16 aa, Homo sapiens
  CDR3 for beta chain variable domain of TCR clone 8721 (TRBV27, TRBJ2-2)
CASSSSGVSNTGELFF

SEQ ID NO: 17443 - protein, 12 aa, Homo sapiens
  CDR3 for alpha chain variable domain of TCR clone 8722 (TRAV27, TRAJ9)
CAGESGGFKTIF

SEQ ID NO: 17444 - protein, 18 aa, Homo sapiens
  CDR3 for beta chain variable domain of TCR clone 8722 (TRBV11-2, TRBJ2-3)
CASSLGGASRGAPNTQYF

SEQ ID NO: 17445 - protein, 18 aa, Homo sapiens
  CDR3 for alpha chain variable domain of TCR clone 8723 (TRAV21, TRAJ52)
CAVRPSPAGGTSYGKLTF

SEQ ID NO: 17446 - protein, 17 aa, Homo sapiens
  CDR3 for beta chain variable domain of TCR clone 8723 (TRBV13, TRBJ2-3)
CAGSLSRVAGGRNTQYF

SEQ ID NO: 17447 - protein, 14 aa, Homo sapiens
  CDR3 for alpha chain variable domain of TCR clone 8724 (TRAV12-2, TRAJ5)
CAVNRSTGRRALTF

SEQ ID NO: 17448 - protein, 14 aa, Homo sapiens
  CDR3 for beta chain variable domain of TCR clone 8724 (TRBV6-6, TRBJ1-4)
CASRTDREYEKLFF

SEQ ID NO: 17449 - protein, 14 aa, Homo sapiens
  CDR3 for alpha chain variable domain of TCR clone 8725 (TRAV1-2, TRAJ8)
CAVREDTGFQKLVF

SEQ ID NO: 17450 - protein, 12 aa, Homo sapiens
  CDR3 for beta chain variable domain of TCR clone 8725 (TRBV11-2, TRBJ2-7)
CASSPPADEQYF

SEQ ID NO: 17451 - protein, 17 aa, Homo sapiens
  CDR3 for alpha chain variable domain of TCR clone 8726 (TRAV8-1, TRAJ43)
CAVTNDMRFGAGTRLTV

SEQ ID NO: 17452 - protein, 12 aa, Homo sapiens
  CDR3 for beta chain variable domain of TCR clone 8726 (TRBV11-2, TRBJ2-2)
CASSLGGGELFF

SEQ ID NO: 17453 - protein, 14 aa, Homo sapiens
  CDR3 for alpha chain variable domain of TCR clone 8727 (TRAV1-2, TRAJ8)
CAVREDTGFQKLVF

SEQ ID NO: 17454 - protein, 15 aa, Homo sapiens
  CDR3 for beta chain variable domain of TCR clone 8727 (TRBV7-2, TRBJ2-1)
CASSPLAGEYNEQFF

SEQ ID NO: 17455 - protein, 17 aa, Homo sapiens
  CDR3 for alpha chain variable domain of TCR clone 8728 (TRAV3, TRAJ6)
CAVRDGPRARGSYIPTF

SEQ ID NO: 17456 - protein, 14 aa, Homo sapiens
  CDR3 for beta chain variable domain of TCR clone 8728 (TRBV7-2, TRBJ2-7)
CASSPKTSFYEQYF

SEQ ID NO: 17457 - protein, 13 aa, Homo sapiens
  CDR3 for alpha chain variable domain of TCR clone 8729 (TRAV2, TRAJ40)
CAVVTSGTYKSIF

SEQ ID NO: 17458 - protein, 14 aa, Homo sapiens
  CDR3 for beta chain variable domain of TCR clone 8729 (TRBV19, TRBJ2-1)
CASPTFVLSGEQFF

SEQ ID NO: 17459 - protein, 18 aa, Homo sapiens
  CDR3 for alpha chain variable domain of TCR clone 8730 (TRAV21, TRAJ52)
CAVRPSPAGGTSYGKLTF

SEQ ID NO: 17460 - protein, 16 aa, Homo sapiens
  CDR3 for beta chain variable domain of TCR clone 8730 (TRBV5-1, TRBJ2-1)
CASSLTLAGGRNEQFF

SEQ ID NO: 17461 - protein, 15 aa, Homo sapiens
  CDR3 for alpha chain variable domain of TCR clone 8731 (TRAV8-3, TRAJ23)
CAVGDRYNQGGKLTF

SEQ ID NO: 17462 - protein, 17 aa, Homo sapiens
  CDR3 for beta chain variable domain of TCR clone 8731 (TRBV4-1, TRBJ1-4)
CASSQEGPRGVEEKLFF

SEQ ID NO: 17463 - protein, 12 aa, Homo sapiens
  CDR3 for alpha chain variable domain of TCR clone 8732 (TRAV12-3, TRAJ20)
CAMVRGDYKLSF

SEQ ID NO: 17464 - protein, 17 aa, Homo sapiens
  CDR3 for beta chain variable domain of TCR clone 8732 (TRBV10-3, TRBJ1-1)
CAISESGTGGGTTEAFF

SEQ ID NO: 17465 - protein, 12 aa, Homo sapiens
  CDR3 for alpha chain variable domain of TCR clone 8733 (TRAV21, TRAJ13)
PGPSGGYQKVTF

SEQ ID NO: 17466 - protein, 13 aa, Homo sapiens
  CDR3 for beta chain variable domain of TCR clone 8733 (TRBV12-4, TRBJ2-2)
CASSITGSGELFF

SEQ ID NO: 17467 - protein, 14 aa, Homo sapiens
  CDR3 for alpha chain variable domain of TCR clone 8734 (TRAV26-1, TRAJ38)
CIADNAGNNRKLSW

SEQ ID NO: 17468 - protein, 13 aa, Homo sapiens
  CDR3 for beta chain variable domain of TCR clone 8734 (TRBV20-1, TRBJ1-1)
CSARGGGNTEAFF

SEQ ID NO: 17469 - protein, 14 aa, Homo sapiens
  CDR3 for alpha chain variable domain of TCR clone 8735 (TRAV13-1, TRAJ40)
CAASMTSGTYKYIF

SEQ ID NO: 17470 - protein, 13 aa, Homo sapiens
  CDR3 for beta chain variable domain of TCR clone 8735 (TRBV29-1, TRBJ2-1)
CSVEGGRVNEQFF

SEQ ID NO: 17471 - protein, 16 aa, Homo sapiens
  CDR3 for alpha chain variable domain of TCR clone 8736 (TRAV1-2, TRAJ10)
CAVRGVLTGGGNKLTF

SEQ ID NO: 17472 - protein, 14 aa, Homo sapiens
  CDR3 for beta chain variable domain of TCR clone 8736 (TRBV5-1, TRBJ2-7)
CASSRGESLYEQYF

SEQ ID NO: 17473 - protein, 16 aa, Homo sapiens
  CDR3 for alpha chain variable domain of TCR clone 8737 (TRAV26-1, TRAJ41)
CIVRVAVANSGYALNF

SEQ ID NO: 17474 - protein, 15 aa, Homo sapiens
  CDR3 for beta chain variable domain of TCR clone 8737 (TRBV6-1, TRBJ1-1)
CASSEYPRMNTEAFF

SEQ ID NO: 17475 - protein, 16 aa, Homo sapiens
  CDR3 for alpha chain variable domain of TCR clone 8738 (TRAV26-1, TRAJ31)
CIVRPPVLNNNARLMF

SEQ ID NO: 17476 - protein, 17 aa, Homo sapiens
  CDR3 for beta chain variable domain of TCR clone 8738 (TRBV5-1, TRBJ1-5)
CASSLVGREEGNQPQHF

SEQ ID NO: 17477 - protein, 14 aa, Homo sapiens
  CDR3 for alpha chain variable domain of TCR clone 8739 (TRAV1-2, TRAJ16)
CAVNRFSDGQKLLF

SEQ ID NO: 17478 - protein, 13 aa, Homo sapiens
  CDR3 for beta chain variable domain of TCR clone 8739 (TRBV20-1, TRBJ2-1)
CSAHGSSYNEQFF

SEQ ID NO: 17479 - protein, 12 aa, Homo sapiens
  CDR3 for alpha chain variable domain of TCR clone 8740 (TRAV3, TRAJ43)
CAVRDPNNDIRF

SEQ ID NO: 17480 - protein, 15 aa, Homo sapiens
  CDR3 for beta chain variable domain of TCR clone 8740 (TRBV27, TRBJ1-5)
CASSLGTGFDQPQHF

SEQ ID NO: 17481 - protein, 15 aa, Homo sapiens
  CDR3 for alpha chain variable domain of TCR clone 8741 (TRAV3, TRAJ5)
CAVGDLDTGRRALTF

SEQ ID NO: 17482 - protein, 13 aa, Homo sapiens
  CDR3 for beta chain variable domain of TCR clone 8741 (TRBV12-4, TRBJ2-7)
CASSPTETYEQYF

SEQ ID NO: 17483 - protein, 15 aa, Homo sapiens
  CDR3 for alpha chain variable domain of TCR clone 8742 (TRAV26-1, TRAJ29)
CIVRVEGSGNTPLVF

SEQ ID NO: 17484 - protein, 15 aa, Homo sapiens
  CDR3 for beta chain variable domain of TCR clone 8742 (TRBV7-9, TRBJ1-5)
RASSQGHQPNQPQHF

SEQ ID NO: 17485 - protein, 13 aa, Homo sapiens
  CDR3 for alpha chain variable domain of TCR clone 8743 (TRAV8-1, TRAJ30)
CAVIMNRDDKVIF

SEQ ID NO: 17486 - protein, 14 aa, Homo sapiens
  CDR3 for beta chain variable domain of TCR clone 8743 (TRBV7-2, TRBJ1-6)
CASSLQGANSPLHF

SEQ ID NO: 17487 - protein, 13 aa, Homo sapiens
  CDR3 for alpha chain variable domain of TCR clone 8744 (TRAV21, TRAJ27)
CAARPGNAGKSTF

SEQ ID NO: 17488 - protein, 14 aa, Homo sapiens
  CDR3 for beta chain variable domain of TCR clone 8744 (TRBV7-6, TRBJ2-3)
RASSLGTVTDTQYF

SEQ ID NO: 17489 - protein, 19 aa, Homo sapiens
  CDR3 for alpha chain variable domain of TCR clone 8745 (TRAV27, TRAJ53)
ASTSVQSRNSGGSNYKLTF

SEQ ID NO: 17490 - protein, 14 aa, Homo sapiens
  CDR3 for beta chain variable domain of TCR clone 8745 (TRBV7-3, TRBJ2-3)
CASSSTGVADTQYF

SEQ ID NO: 17491 - protein, 12 aa, Homo sapiens
  CDR3 for alpha chain variable domain of TCR clone 8746 (TRAV8-3, TRAJ16)
CAVGAPGQKLLF

SEQ ID NO: 17492 - protein, 16 aa, Homo sapiens
  CDR3 for beta chain variable domain of TCR clone 8746 (TRBV7-2, TRBJ1-1)
CASSLSGTHAGTEAFF

SEQ ID NO: 17493 - protein, 14 aa, Homo sapiens
  CDR3 for alpha chain variable domain of TCR clone 8747 (TRAV1-2, TRAJ16)
CAVNRFSDGQKLLF

SEQ ID NO: 17494 - protein, 15 aa, Homo sapiens
  CDR3 for beta chain variable domain of TCR clone 8747 (TRBV28, TRBJ2-5)
CASSAPRQVQETQYF

SEQ ID NO: 17495 - protein, 15 aa, Homo sapiens
  CDR3 for alpha chain variable domain of TCR clone 8748 (TRAV8-3, TRAJ13)
CAVAPNSGGYQKVTF

SEQ ID NO: 17496 - protein, 12 aa, Homo sapiens
  CDR3 for beta chain variable domain of TCR clone 8748 (TRBV19, TRBJ2-7)
CASTDRDYEQYF

SEQ ID NO: 17497 - protein, 15 aa, Homo sapiens
  CDR3 for alpha chain variable domain of TCR clone 8749 (TRAV12-2, TRAJ43)
CAFDIRFGAGTRLTV

SEQ ID NO: 17498 - protein, 18 aa, Homo sapiens
  CDR3 for beta chain variable domain of TCR clone 8749 (TRBV20-1, TRBJ2-3)
CSASGLAGGPGTTDTQYF

SEQ ID NO: 17499 - protein, 14 aa, Homo sapiens
  CDR3 for alpha chain variable domain of TCR clone 8750 (TRAV8-1, TRAJ39)
CAVNDNNAGNMLTF

SEQ ID NO: 17500 - protein, 14 aa, Homo sapiens
  CDR3 for beta chain variable domain of TCR clone 8750 (TRBV28, TRBJ2-1)
CASSPSTGYNEQFF

SEQ ID NO: 17501 - protein, 14 aa, Homo sapiens
  CDR3 for alpha chain variable domain of TCR clone 8751 (TRAV1-2, TRAJ16)
CAVNRFSDGQKLLF

SEQ ID NO: 17502 - protein, 12 aa, Homo sapiens
  CDR3 for beta chain variable domain of TCR clone 8751 (TRBV12-4, TRBJ2-3)
CASSSTTDTQYF

SEQ ID NO: 17503 - protein, 14 aa, Homo sapiens
  CDR3 for alpha chain variable domain of TCR clone 8752 (TRAV12-3, TRAJ10)
SHLPLTGGGNKLTF

SEQ ID NO: 17504 - protein, 15 aa, Homo sapiens
  CDR3 for beta chain variable domain of TCR clone 8752 (TRBV10-3, TRBJ2-1)
CAISDVQDRAYEQFF

SEQ ID NO: 17505 - protein, 11 aa, Homo sapiens
  CDR3 for alpha chain variable domain of TCR clone 8753 (TRAV1-1, TRAJ23)
CAVRQGGKLIF

SEQ ID NO: 17506 - protein, 13 aa, Homo sapiens
  CDR3 for beta chain variable domain of TCR clone 8753 (TRBV27, TRBJ1-4)
CASSLMGDEKLFF

SEQ ID NO: 17507 - protein, 13 aa, Homo sapiens
  CDR3 for alpha chain variable domain of TCR clone 8754 (TRAV4, TRAJ16)
CLVGSSDGQKLLF

SEQ ID NO: 17508 - protein, 15 aa, Homo sapiens
  CDR3 for beta chain variable domain of TCR clone 8754 (TRBV11-3, TRBJ2-1)
CASSSGGTVADEQFF

SEQ ID NO: 17509 - protein, 14 aa, Homo sapiens
  CDR3 for alpha chain variable domain of TCR clone 8755 (TRAV26-1, TRAJ30)
CIVRPRNRDDKIIF

SEQ ID NO: 17510 - protein, 13 aa, Homo sapiens
  CDR3 for beta chain variable domain of TCR clone 8755 (TRBV6-1, TRBJ1-1)
CASSVDRNTEAFF

SEQ ID NO: 17511 - protein, 16 aa, Homo sapiens
  CDR3 for alpha chain variable domain of TCR clone 8756 (TRAV30, TRAJ24)
CCTEIVDADSWGKFQF

SEQ ID NO: 17512 - protein, 14 aa, Homo sapiens
  CDR3 for beta chain variable domain of TCR clone 8756 (TRBV12-5, TRBJ2-5)
CASGSRTHQETQYF

SEQ ID NO: 17513 - protein, 15 aa, Homo sapiens
  CDR3 for alpha chain variable domain of TCR clone 8757 (TRAV3, TRAJ11)
CAVRDRGSGYSTLTF

SEQ ID NO: 17514 - protein, 11 aa, Homo sapiens
  CDR3 for beta chain variable domain of TCR clone 8757 (TRBV29-1, TRBJ2-5)
CSEDRTGTQYF

SEQ ID NO: 17515 - protein, 13 aa, Homo sapiens
  CDR3 for alpha chain variable domain of TCR clone 8758 (TRAV8-3, TRAJ17)
CAGIKAAGNKLTF

SEQ ID NO: 17516 - protein, 15 aa, Homo sapiens
  CDR3 for beta chain variable domain of TCR clone 8758 (TRBV4-2, TRBJ2-5)
CASSTQTGLQETQYF

SEQ ID NO: 17517 - protein, 18 aa, Homo sapiens
  CDR3 for alpha chain variable domain of TCR clone 8759 (TRAV21, TRAJ52)
CAVRPSPSGGTSYGKLTF

SEQ ID NO: 17518 - protein, 17 aa, Homo sapiens
  CDR3 for beta chain variable domain of TCR clone 8759 (TRBV13, TRBJ2-3)
CASSLSRVAGGRNTQYF

SEQ ID NO: 17519 - protein, 15 aa, Homo sapiens
  CDR3 for alpha chain variable domain of TCR clone 8760 (TRAV3, TRAJ5)
CAVRDLDTGRRALTF

SEQ ID NO: 17520 - protein, 13 aa, Homo sapiens
  CDR3 for beta chain variable domain of TCR clone 8760 (TRBV9, TRBJ2-7)
CASSASDSYEQYF

SEQ ID NO: 17521 - protein, 14 aa, Homo sapiens
  CDR3 for alpha chain variable domain of TCR clone 8761 (TRAV12-2, TRAJ17)
CAVLFKAAGSKLTF

SEQ ID NO: 17522 - protein, 17 aa, Homo sapiens
  CDR3 for beta chain variable domain of TCR clone 8761 (TRBV20-1, TRBJ2-2)
CSASGSGQGGLTGELFF

SEQ ID NO: 17523 - protein, 13 aa, Homo sapiens
  CDR3 for alpha chain variable domain of TCR clone 8762 (TRAV40, TRAJ41)
CLLGAQSGYALNF

SEQ ID NO: 17524 - protein, 15 aa, Homo sapiens
  CDR3 for beta chain variable domain of TCR clone 8762 (TRBV4-2, TRBJ1-1)
CASSQLQGASAEAFF

SEQ ID NO: 17525 - protein, 13 aa, Homo sapiens
  CDR3 for alpha chain variable domain of TCR clone 8763 (TRAV2, TRAJ40)
CAVVTSGTYKYIF

SEQ ID NO: 17526 - protein, 13 aa, Homo sapiens
  CDR3 for beta chain variable domain of TCR clone 8763 (TRBV7-2, TRBJ2-7)
CASSSPSGSEQYF

SEQ ID NO: 17527 - protein, 14 aa, Homo sapiens
  CDR3 for alpha chain variable domain of TCR clone 8764 (TRAV12-2, TRAJ44)
CAVNPAGTASKLTF

SEQ ID NO: 17528 - protein, 12 aa, Homo sapiens
  CDR3 for beta chain variable domain of TCR clone 8764 (TRBV27, TRBJ2-5)
CASSPTGETQYF

SEQ ID NO: 17529 - protein, 14 aa, Homo sapiens
  CDR3 for alpha chain variable domain of TCR clone 8765 (TRAV17, TRAJ32)
CATDPGGATNKLIF

SEQ ID NO: 17530 - protein, 12 aa, Homo sapiens
  CDR3 for beta chain variable domain of TCR clone 8765 (TRBV7-8, TRBJ2-7)
CASSLGDREQYF

SEQ ID NO: 17531 - protein, 12 aa, Homo sapiens
  CDR3 for alpha chain variable domain of TCR clone 8766 (TRAV8-6, TRAJ20)
CAVSSNDYKLSF

SEQ ID NO: 17532 - protein, 15 aa, Homo sapiens
  CDR3 for beta chain variable domain of TCR clone 8766 (TRBV6-5, TRBJ2-2)
CASVSGGPSTGELFF

SEQ ID NO: 17533 - protein, 12 aa, Homo sapiens
  CDR3 for alpha chain variable domain of TCR clone 8767 (TRAV12-3, TRAJ17)
CAMTLTGNKLTF

SEQ ID NO: 17534 - protein, 15 aa, Homo sapiens
  CDR3 for beta chain variable domain of TCR clone 8767 (TRBV20-1, TRBJ2-7)
CSARARVSGMDEQYF

SEQ ID NO: 17535 - protein, 14 aa, Homo sapiens
  CDR3 for alpha chain variable domain of TCR clone 8768 (TRAV35, TRAJ33)
CAGSSQDSNYQLIR

SEQ ID NO: 17536 - protein, 15 aa, Homo sapiens
  CDR3 for beta chain variable domain of TCR clone 8768 (TRBV20-1, TRBJ2-7)
CSAESGTSGAYEQYF

SEQ ID NO: 17537 - protein, 13 aa, Homo sapiens
  CDR3 for alpha chain variable domain of TCR clone 8769 (TRAV3, TRAJ36)
CAVRDSGANNLFF

SEQ ID NO: 17538 - protein, 15 aa, Homo sapiens
  CDR3 for beta chain variable domain of TCR clone 8769 (TRBV6-5, TRBJ2-1)
CASSPREGTYNEQFF

SEQ ID NO: 17539 - protein, 16 aa, Homo sapiens
  CDR3 for alpha chain variable domain of TCR clone 8770 (TRAV13-1, TRAJ8)
CAAFYLLNTGFQKLVF

SEQ ID NO: 17540 - protein, 14 aa, Homo sapiens
  CDR3 for beta chain variable domain of TCR clone 8770 (TRBV29-1, TRBJ2-5)
CSVGPAGGQETQYF

SEQ ID NO: 17541 - protein, 15 aa, Homo sapiens
  CDR3 for alpha chain variable domain of TCR clone 8771 (TRAV12-3, TRAJ23)
CAMILIYNQGGKLIF

SEQ ID NO: 17542 - protein, 14 aa, Homo sapiens
  CDR3 for beta chain variable domain of TCR clone 8771 (TRBV27, TRBJ1-5)
CASSLDPRNQPQHF

SEQ ID NO: 17543 - protein, 17 aa, Homo sapiens
  CDR3 for alpha chain variable domain of TCR clone 8772 (TRAV3, TRAJ6)
CAVRDGPRAGGSYIPTC

SEQ ID NO: 17544 - protein, 14 aa, Homo sapiens
  CDR3 for beta chain variable domain of TCR clone 8772 (TRBV7-2, TRBJ2-7)
CASSPKTSFYEQYF

SEQ ID NO: 17545 - protein, 13 aa, Homo sapiens
  CDR3 for alpha chain variable domain of TCR clone 8773 (TRAV29/DV5, TRAJ33)
CAASVESNYQLIW

SEQ ID NO: 17546 - protein, 14 aa, Homo sapiens
  CDR3 for beta chain variable domain of TCR clone 8773 (TRBV5-7, TRBJ1-1)
CASSLAGDWTEAFF

SEQ ID NO: 17547 - protein, 14 aa, Homo sapiens
  CDR3 for alpha chain variable domain of TCR clone 8774 (TRAV3, TRAJ40)
CAVRDRRGTYKYIF

SEQ ID NO: 17548 - protein, 14 aa, Homo sapiens
  CDR3 for beta chain variable domain of TCR clone 8774 (TRBV6-1, TRBJ1-3)
CASVQGGGGNTIYF

SEQ ID NO: 17549 - protein, 12 aa, Homo sapiens
  CDR3 for alpha chain variable domain of TCR clone 8775 (TRAV20, TRAJ23)
CAVHNQGGKLIF

SEQ ID NO: 17550 - protein, 12 aa, Homo sapiens
  CDR3 for beta chain variable domain of TCR clone 8775 (TRBV7-6, TRBJ2-3)
CASSWAEDTQYF

SEQ ID NO: 17551 - protein, 13 aa, Homo sapiens
  CDR3 for alpha chain variable domain of TCR clone 8776 (TRAV12-2, TRAJ20)
CAVYPSNDYKPSF

SEQ ID NO: 17552 - protein, 15 aa, Homo sapiens
  CDR3 for beta chain variable domain of TCR clone 8776 (TRBV27, TRBJ2-5)
CASSLYPRGGETQYF

SEQ ID NO: 17553 - protein, 14 aa, Homo sapiens
  CDR3 for alpha chain variable domain of TCR clone 8777 (TRAV1-2, TRAJ16)
CAVKEGSDGQKLLF

SEQ ID NO: 17554 - protein, 13 aa, Homo sapiens
  CDR3 for beta chain variable domain of TCR clone 8777 (TRBV20-1, TRBJ1-1)
CSAPLGGGTEAFF

SEQ ID NO: 17555 - protein, 14 aa, Homo sapiens
  CDR3 for alpha chain variable domain of TCR clone 8778 (TRAV12-2, TRAJ13)
CAVKKTGGYQKVTF

SEQ ID NO: 17556 - protein, 15 aa, Homo sapiens
  CDR3 for beta chain variable domain of TCR clone 8778 (TRBV27, TRBJ2-1)
CASGNGGGSSNEQFF

SEQ ID NO: 17557 - protein, 13 aa, Homo sapiens
  CDR3 for alpha chain variable domain of TCR clone 8779 (TRAV38-2/DV8, TRAJ34)
CAYRNYNTDKLIF

SEQ ID NO: 17558 - protein, 16 aa, Homo sapiens
  CDR3 for beta chain variable domain of TCR clone 8779 (TRBV9, TRBJ2-2)
CASSAMGKGNTGELFF

SEQ ID NO: 17559 - protein, 15 aa, Homo sapiens
  CDR3 for alpha chain variable domain of TCR clone 8780 (TRAV26-1, TRAJ44)
CIARVPFGTASKLTF

SEQ ID NO: 17560 - protein, 12 aa, Homo sapiens
  CDR3 for beta chain variable domain of TCR clone 8780 (TRBV11-2, TRBJ2-2)
CASSLGGGELFF

SEQ ID NO: 17561 - protein, 16 aa, Homo sapiens
  CDR3 for alpha chain variable domain of TCR clone 8781 (TRAV38-1, TRAJ56)
CAFMKRQTGANSKLTF

SEQ ID NO: 17562 - protein, 15 aa, Homo sapiens
  CDR3 for beta chain variable domain of TCR clone 8781 (TRBV20-1, TRBJ2-7)
CSARDRVSGMDEQYF

SEQ ID NO: 17563 - protein, 12 aa, Homo sapiens
  CDR3 for alpha chain variable domain of TCR clone 8782 (TRAV13-1, TRAJ11)
CAASKGYSTLTF

SEQ ID NO: 17564 - protein, 14 aa, Homo sapiens
  CDR3 for beta chain variable domain of TCR clone 8782 (TRBV12-4, TRBJ2-7)
CASSPRQDLYEQYF

SEQ ID NO: 17565 - protein, 18 aa, Homo sapiens
  CDR3 for alpha chain variable domain of TCR clone 8783 (TRAV9-2, TRAJ10)
CALSDGALASGGGNKLTF

SEQ ID NO: 17566 - protein, 16 aa, Homo sapiens
  CDR3 for beta chain variable domain of TCR clone 8783 (TRBV28, TRBJ2-7)
CASSSSGTSGSYEQYF

SEQ ID NO: 17567 - protein, 15 aa, Homo sapiens
  CDR3 for alpha chain variable domain of TCR clone 8784 (TRAV26-1, TRAJ29)
CIVRVEGSGNTPLVF

SEQ ID NO: 17568 - protein, 15 aa, Homo sapiens
  CDR3 for beta chain variable domain of TCR clone 8784 (TRBV7-9, TRBJ1-5)
CASGQGHQPNQPQHF

SEQ ID NO: 17569 - protein, 16 aa, Homo sapiens
  CDR3 for alpha chain variable domain of TCR clone 8785 (TRAV30, TRAJ24)
CGTEIVDADSWGKFQF

SEQ ID NO: 17570 - protein, 14 aa, Homo sapiens
  CDR3 for beta chain variable domain of TCR clone 8785 (TRBV12-5, TRBJ2-5)
CASGSRTHQETQCF

SEQ ID NO: 17571 - protein, 18 aa, Homo sapiens
  CDR3 for alpha chain variable domain of TCR clone 8786 (TRAV26-1, TRAJ52)
CIVRVAGAGGTSYGKLTF

SEQ ID NO: 17572 - protein, 12 aa, Homo sapiens
  CDR3 for beta chain variable domain of TCR clone 8786 (TRBV29-1, TRBJ2-3)
CSVTGGADTQYF

SEQ ID NO: 17573 - protein, 12 aa, Homo sapiens
  CDR3 for alpha chain variable domain of TCR clone 8787 (TRAV1-1, TRAJ9)
CAVDTGGFKTIF

SEQ ID NO: 17574 - protein, 19 aa, Homo sapiens
  CDR3 for beta chain variable domain of TCR clone 8787 (TRBV9, TRBJ1-3)
CQQRRPGRNNDRSGNTIYF

SEQ ID NO: 17575 - protein, 14 aa, Homo sapiens
  CDR3 for alpha chain variable domain of TCR clone 8788 (TRAV1-2, TRAJ16)
CAANRFSDGQKLLF

SEQ ID NO: 17576 - protein, 15 aa, Homo sapiens
  CDR3 for beta chain variable domain of TCR clone 8788 (TRBV9, TRBJ1-6)
CASSVAGTGDSPLHF

SEQ ID NO: 17577 - protein, 14 aa, Homo sapiens
  CDR3 for alpha chain variable domain of TCR clone 8789 (TRAV8-3, TRAJ22)
CAVKPPGSARQLTF

SEQ ID NO: 17578 - protein, 14 aa, Homo sapiens
  CDR3 for beta chain variable domain of TCR clone 8789 (TRBV12-4, TRBJ2-2)
CASSLSQDTGELFF

SEQ ID NO: 17579 - protein, 14 aa, Homo sapiens
  CDR3 for alpha chain variable domain of TCR clone 8790 (TRAV1-2, TRAJ8)
CAVREDTGFQQLVF

SEQ ID NO: 17580 - protein, 15 aa, Homo sapiens
  CDR3 for beta chain variable domain of TCR clone 8790 (TRBV6-3, TRBJ2-7)
CASSSPGTVFYEQYF

SEQ ID NO: 17581 - protein, 11 aa, Homo sapiens
  CDR3 for alpha chain variable domain of TCR clone 8791 (TRAV1-1, TRAJ23)
CAVRQGGKLIF

SEQ ID NO: 17582 - protein, 20 aa, Homo sapiens
  CDR3 for beta chain variable domain of TCR clone 8791 (TRBV7-8, TRBJ2-2)
WASSHLFPGPTIHITGELFF

SEQ ID NO: 17583 - protein, 18 aa, Homo sapiens
  CDR3 for alpha chain variable domain of TCR clone 8792 (TRAV21, TRAJ52)
CAVRPSPAGGTSYGKLTF

SEQ ID NO: 17584 - protein, 15 aa, Homo sapiens
  CDR3 for beta chain variable domain of TCR clone 8792 (TRBV7-2, TRBJ2-1)
CASSLASGRVNEQFF

SEQ ID NO: 17585 - protein, 12 aa, Homo sapiens
  CDR3 for alpha chain variable domain of TCR clone 8793 (TRAV12-1, TRAJ26)
CVVDNYGQNFVF

SEQ ID NO: 17586 - protein, 14 aa, Homo sapiens
  CDR3 for beta chain variable domain of TCR clone 8793 (TRBV2, TRBJ2-1)
CASSEELAVNRQFF

SEQ ID NO: 17587 - protein, 14 aa, Homo sapiens
  CDR3 for alpha chain variable domain of TCR clone 8794 (TRAV1-2, TRAJ8)
CAVREDTGFQKLVF

SEQ ID NO: 17588 - protein, 11 aa, Homo sapiens
  CDR3 for beta chain variable domain of TCR clone 8794 (TRBV12-4, TRBJ2-3)
CASTATDTQYF

SEQ ID NO: 17589 - protein, 11 aa, Homo sapiens
  CDR3 for alpha chain variable domain of TCR clone 8795 (TRAV3, TRAJ21)
CAVGNFNEFYF

SEQ ID NO: 17590 - protein, 16 aa, Homo sapiens
  CDR3 for beta chain variable domain of TCR clone 8795 (TRBV19, TRBJ2-1)
CASSKAGPSSYNEQFF

SEQ ID NO: 17591 - protein, 14 aa, Homo sapiens
  CDR3 for alpha chain variable domain of TCR clone 8796 (TRAV12-2, TRAJ13)
CAVKKTGGYQKVTF

SEQ ID NO: 17592 - protein, 15 aa, Homo sapiens
  CDR3 for beta chain variable domain of TCR clone 8796 (TRBV27, TRBJ2-1)
RASSNGGGSSNEQFF

SEQ ID NO: 17593 - protein, 13 aa, Homo sapiens
  CDR3 for alpha chain variable domain of TCR clone 8797 (TRAV21, TRAJ27)
CAARPGNTGKSTF

SEQ ID NO: 17594 - protein, 14 aa, Homo sapiens
  CDR3 for beta chain variable domain of TCR clone 8797 (TRBV7-6, TRBJ2-3)
CASSLGTVTDTQYF

SEQ ID NO: 17595 - protein, 10 aa, Homo sapiens
  CDR3 for alpha chain variable domain of TCR clone 8798 (TRAV23/DV6, TRAJ57)
CAASSTLSQC

SEQ ID NO: 17596 - protein, 14 aa, Homo sapiens
  CDR3 for beta chain variable domain of TCR clone 8798 (TRBV25-1, TRBJ1-1)
CASTHLGGNTEAFF

SEQ ID NO: 17597 - protein, 15 aa, Homo sapiens
  CDR3 for alpha chain variable domain of TCR clone 8799 (TRAV13-1, TRAJ28)
CAAKDSGAGSYQLTF

SEQ ID NO: 17598 - protein, 14 aa, Homo sapiens
  CDR3 for beta chain variable domain of TCR clone 8799 (TRBV6-1, TRBJ2-2)
CASSGQGRAGELFF

SEQ ID NO: 17599 - protein, 15 aa, Homo sapiens
  CDR3 for alpha chain variable domain of TCR clone 8800 (TRAV12-1, TRAJ10)
CGADILTGGGNKLTF

SEQ ID NO: 17600 - protein, 16 aa, Homo sapiens
  CDR3 for beta chain variable domain of TCR clone 8800 (TRBV20-1, TRBJ2-1)
CSARSTSESSYNEQFF

SEQ ID NO: 17601 - protein, 13 aa, Homo sapiens
  CDR3 for alpha chain variable domain of TCR clone 8801 (TRAV2, TRAJ24)
CAVSTDSWGKLQF

SEQ ID NO: 17602 - protein, 13 aa, Homo sapiens
  CDR3 for beta chain variable domain of TCR clone 8801 (TRBV20-1, TRBJ2-2)
CSASAAGTGELFF

SEQ ID NO: 17603 - protein, 11 aa, Homo sapiens
  CDR3 for alpha chain variable domain of TCR clone 8802 (TRAV3, TRAJ21)
CAVGNCNKFYF

SEQ ID NO: 17604 - protein, 16 aa, Homo sapiens
  CDR3 for beta chain variable domain of TCR clone 8802 (TRBV19, TRBJ2-1)
CASSKAGPSSYNEQFF

SEQ ID NO: 17605 - protein, 15 aa, Homo sapiens
  CDR3 for alpha chain variable domain of TCR clone 8803 (TRAV8-3, TRAJ45)
CASSYSGGGADGLTF

SEQ ID NO: 17606 - protein, 13 aa, Homo sapiens
  CDR3 for beta chain variable domain of TCR clone 8803 (TRBV10-3, TRBJ2-7)
CASELAVNYEQYF

SEQ ID NO: 17607 - protein, 15 aa, Homo sapiens
  CDR3 for alpha chain variable domain of TCR clone 8804 (TRAV26-2, TRAJ50)
CILRDEETSYDKVIF

SEQ ID NO: 17608 - protein, 14 aa, Homo sapiens
  CDR3 for beta chain variable domain of TCR clone 8804 (TRBV23-1, TRBJ2-7)
CASSPTVTSSTSGR

SEQ ID NO: 17609 - protein, 16 aa, Homo sapiens
  CDR3 for alpha chain variable domain of TCR clone 8805 (TRAV30, TRAJ24)
CGTEIVDADSWGKFQF

SEQ ID NO: 17610 - protein, 14 aa, Homo sapiens
  CDR3 for beta chain variable domain of TCR clone 8805 (TRBV12-5, TRBJ2-5)
CASGSRIHQETQYF

SEQ ID NO: 17611 - protein, 14 aa, Homo sapiens
  CDR3 for alpha chain variable domain of TCR clone 8806 (TRAV26-1, TRAJ44)
CIVKSTGTASKLTF

SEQ ID NO: 17612 - protein, 15 aa, Homo sapiens
  CDR3 for beta chain variable domain of TCR clone 8806 (TRBV19, TRBJ2-4)
CASSDGGGAKNIQYF

SEQ ID NO: 17613 - protein, 15 aa, Homo sapiens
  CDR3 for alpha chain variable domain of TCR clone 8807 (TRAV17, TRAJ45)
CATAYSGGGADGLTF

SEQ ID NO: 17614 - protein, 13 aa, Homo sapiens
  CDR3 for beta chain variable domain of TCR clone 8807 (TRBV20-1, TRBJ2-4)
CSVGGGAKNIQYF

SEQ ID NO: 17615 - protein, 14 aa, Homo sapiens
  CDR3 for alpha chain variable domain of TCR clone 8808 (TRAV13-1, TRAJ35)
CAASKGGFGDVLHC

SEQ ID NO: 17616 - protein, 13 aa, Homo sapiens
  CDR3 for beta chain variable domain of TCR clone 8808 (TRBV7-3, TRBJ1-1)
CASSQDWGAEAFF

SEQ ID NO: 17617 - protein, 14 aa, Homo sapiens
  CDR3 for alpha chain variable domain of TCR clone 8809 (TRAV9-2, TRAJ39)
CALHIYNAGNMLTF

SEQ ID NO: 17618 - protein, 14 aa, Homo sapiens
  CDR3 for beta chain variable domain of TCR clone 8809 (TRBV12-5, TRBJ2-5)
CASGSRTHQETQYF

SEQ ID NO: 17619 - protein, 13 aa, Homo sapiens
  CDR3 for alpha chain variable domain of TCR clone 8810 (TRAV8-4, TRAJ21)
CAVSDPGFNKFYF

SEQ ID NO: 17620 - protein, 10 aa, Homo sapiens
  CDR3 for beta chain variable domain of TCR clone 8810 (TRBV29-1, TRBJ1-4)
CSVYLGKLFF

SEQ ID NO: 17621 - protein, 14 aa, Homo sapiens
  CDR3 for alpha chain variable domain of TCR clone 8811 (TRAV1-2, TRAJ16)
CAVNRFSDGQKLLF

SEQ ID NO: 17622 - protein, 15 aa, Homo sapiens
  CDR3 for beta chain variable domain of TCR clone 8811 (TRBV19, TRBJ1-1)
CASTSGQIQNTEAFF

SEQ ID NO: 17623 - protein, 21 aa, Homo sapiens
  CDR3 for alpha chain variable domain of TCR clone 8812 (TRAV16, TRAJ22)
HLKKPFAQGEDSAMYLRQLTF

SEQ ID NO: 17624 - protein, 15 aa, Homo sapiens
  CDR3 for beta chain variable domain of TCR clone 8812 (TRBV7-9, TRBJ1-6)
CASSSPGRGNSPLHF

SEQ ID NO: 17625 - protein, 16 aa, Homo sapiens
  CDR3 for alpha chain variable domain of TCR clone 8813 (TRAV1-2, TRAJ10)
CAVRDQGGGGGNKLTF

SEQ ID NO: 17626 - protein, 15 aa, Homo sapiens
  CDR3 for beta chain variable domain of TCR clone 8813 (TRBV4-3, TRBJ2-7)
CASSQDLGSSYEQYF

SEQ ID NO: 17627 - protein, 14 aa, Homo sapiens
  CDR3 for alpha chain variable domain of TCR clone 8814 (TRAV14/DV4, TRAJ23)
CAMRYYNQGGKLIF

SEQ ID NO: 17628 - protein, 17 aa, Homo sapiens
  CDR3 for beta chain variable domain of TCR clone 8814 (TRBV7-2, TRBJ2-2)
CASSPRGAGEGTGELFF

SEQ ID NO: 17629 - protein, 12 aa, Homo sapiens
  CDR3 for alpha chain variable domain of TCR clone 8815 (TRAV17, TRAJ47)
CATDFDGNKLVF

SEQ ID NO: 17630 - protein, 13 aa, Homo sapiens
  CDR3 for beta chain variable domain of TCR clone 8815 (TRBV4-2, TRBJ1-1)
CASSQAGNTEAFF

SEQ ID NO: 17631 - protein, 16 aa, Homo sapiens
  CDR3 for alpha chain variable domain of TCR clone 8816 (TRAV30, TRAJ24)
CGTEIVDADSWGKFQF

SEQ ID NO: 17632 - protein, 14 aa, Homo sapiens
  CDR3 for beta chain variable domain of TCR clone 8816 (TRBV5-4, TRBJ1-3)
CASSSQSAGNTIYF

SEQ ID NO: 17633 - protein, 13 aa, Homo sapiens
  CDR3 for alpha chain variable domain of TCR clone 8817 (TRAV2, TRAJ15)
CAVASQAGTALIF

SEQ ID NO: 17634 - protein, 14 aa, Homo sapiens
  CDR3 for beta chain variable domain of TCR clone 8817 (TRBV6-1, TRBJ1-3)
CASVQGGGGNTIYF

SEQ ID NO: 17635 - protein, 14 aa, Homo sapiens
  CDR3 for alpha chain variable domain of TCR clone 8818 (TRAV12-1, TRAJ17)
CVVNYKAAGNKLTF

SEQ ID NO: 17636 - protein, 14 aa, Homo sapiens
  CDR3 for beta chain variable domain of TCR clone 8818 (TRBV5-4, TRBJ2-2)
CASRLDGGTGELFF

SEQ ID NO: 17637 - protein, 17 aa, Homo sapiens
  CDR3 for alpha chain variable domain of TCR clone 8819 (TRAV1-2, TRAJ27)
CAVRDKTGDTNAGKSTF

SEQ ID NO: 17638 - protein, 15 aa, Homo sapiens
  CDR3 for beta chain variable domain of TCR clone 8819 (TRBV2, TRBJ2-5)
CASSGTVAAGETQYF

SEQ ID NO: 17639 - protein, 12 aa, Homo sapiens
  CDR3 for alpha chain variable domain of TCR clone 8820 (TRAV12-3, TRAJ17)
CAMTLTGNKLTF

SEQ ID NO: 17640 - protein, 15 aa, Homo sapiens
  CDR3 for beta chain variable domain of TCR clone 8820 (TRBV20-1, TRBJ2-7)
CSAKDRVSGMDEQYF

SEQ ID NO: 17641 - protein, 12 aa, Homo sapiens
  CDR3 for alpha chain variable domain of TCR clone 8821 (TRAV17, TRAJ34)
CATDAKGDKLIF

SEQ ID NO: 17642 - protein, 12 aa, Homo sapiens
  CDR3 for beta chain variable domain of TCR clone 8821 (TRBV7-2, TRBJ2-7)
CASSSHSYEQYF

SEQ ID NO: 17643 - protein, 15 aa, Homo sapiens
  CDR3 for alpha chain variable domain of TCR clone 8822 (TRAV13-1, TRAJ9)
CAASTLNTGGFKTIF

SEQ ID NO: 17644 - protein, 15 aa, Homo sapiens
  CDR3 for beta chain variable domain of TCR clone 8822 (TRBV6-5, TRBJ2-4)
CASSLRESPKNIQYF

SEQ ID NO: 17645 - protein, 13 aa, Homo sapiens
  CDR3 for alpha chain variable domain of TCR clone 8823 (TRAV39, TRAJ33)
CAVDRDSNYQLIW

SEQ ID NO: 17646 - protein, 16 aa, Homo sapiens
  CDR3 for beta chain variable domain of TCR clone 8823 (TRBV6-1, TRBJ2-3)
CASSEVIGQGTDTQYF

SEQ ID NO: 17647 - protein, 15 aa, Homo sapiens
  CDR3 for alpha chain variable domain of TCR clone 8824 (TRAV8-2, TRAJ40)
CVALGTTSGTYKYIF

SEQ ID NO: 17648 - protein, 16 aa, Homo sapiens
  CDR3 for beta chain variable domain of TCR clone 8824 (TRBV7-3, TRBJ2-1)
CASSLEGYRSYNEQFF

SEQ ID NO: 17649 - protein, 15 aa, Homo sapiens
  CDR3 for alpha chain variable domain of TCR clone 8825 (TRAV12-1, TRAJ45)
CVVLSGGGGADGLTF

SEQ ID NO: 17650 - protein, 15 aa, Homo sapiens
  CDR3 for beta chain variable domain of TCR clone 8825 (TRBV12-5, TRBJ2-5)
CASGSGLAGRETQYF

SEQ ID NO: 17651 - protein, 13 aa, Homo sapiens
  CDR3 for alpha chain variable domain of TCR clone 8826 (TRAV21, TRAJ27)
CAARPGNAGTSTF

SEQ ID NO: 17652 - protein, 14 aa, Homo sapiens
  CDR3 for beta chain variable domain of TCR clone 8826 (TRBV7-6, TRBJ2-3)
CASSLGTVTDTQYF

SEQ ID NO: 17653 - protein, 11 aa, Homo sapiens
  CDR3 for alpha chain variable domain of TCR clone 8827 (TRAV1-2, TRAJ31)
CAVNNNARPMF

SEQ ID NO: 17654 - protein, 15 aa, Homo sapiens
  CDR3 for beta chain variable domain of TCR clone 8827 (TRBV28, TRBJ2-1)
CASSIIAGGRSEQFF

SEQ ID NO: 17655 - protein, 11 aa, Homo sapiens
  CDR3 for alpha chain variable domain of TCR clone 8828 (TRAV39, TRAJ26)
CAVDLMRHFVF

SEQ ID NO: 17656 - protein, 11 aa, Homo sapiens
  CDR3 for beta chain variable domain of TCR clone 8828 (TRBV7-9, TRBJ2-1)
CASSSQNEQFF

SEQ ID NO: 17657 - protein, 11 aa, Homo sapiens
  CDR3 for alpha chain variable domain of TCR clone 8829 (TRAV26-1, TRAJ37)
CIVRVGRKLIF

SEQ ID NO: 17658 - protein, 14 aa, Homo sapiens
  CDR3 for beta chain variable domain of TCR clone 8829 (TRBV11-3, TRBJ2-7)
CASSSRTGRYEQYF

SEQ ID NO: 17659 - protein, 16 aa, Homo sapiens
  CDR3 for alpha chain variable domain of TCR clone 8830 (TRAV1-2, TRAJ10)
CAVRGVLTGGGDKLTF

SEQ ID NO: 17660 - protein, 12 aa, Homo sapiens
  CDR3 for beta chain variable domain of TCR clone 8830 (TRBV7-8, TRBJ2-7)
CASSLGDREQYF

SEQ ID NO: 17661 - protein, 17 aa, Homo sapiens
  CDR3 for alpha chain variable domain of TCR clone 8831 (TRAV12-1, TRAJ6)
CVVKGGIPSGGSYIPTF

SEQ ID NO: 17662 - protein, 13 aa, Homo sapiens
  CDR3 for beta chain variable domain of TCR clone 8831 (TRBV5-1, TRBJ2-5)
CASSLIPAETQYF

SEQ ID NO: 17663 - protein, 11 aa, Homo sapiens
  CDR3 for alpha chain variable domain of TCR clone 8832 (TRAV12-1, TRAJ16)
CGDPDGQKLLF

SEQ ID NO: 17664 - protein, 13 aa, Homo sapiens
  CDR3 for beta chain variable domain of TCR clone 8832 (TRBV27, TRBJ1-4)
CASSLMGDEKLFF

SEQ ID NO: 17665 - protein, 15 aa, Homo sapiens
  CDR3 for alpha chain variable domain of TCR clone 8833 (TRAV20, TRAJ53)
CAVQASGGSNYKLTF

SEQ ID NO: 17666 - protein, 12 aa, Homo sapiens
  CDR3 for beta chain variable domain of TCR clone 8833 (TRBV7-8, TRBJ2-7)
CASSLSDIGQYF

SEQ ID NO: 17667 - protein, 14 aa, Homo sapiens
  CDR3 for alpha chain variable domain of TCR clone 8834 (TRAV13-1, TRAJ23)
CAASRLGRGGKLIF

SEQ ID NO: 17668 - protein, 13 aa, Homo sapiens
  CDR3 for beta chain variable domain of TCR clone 8834 (TRBV7-7, TRBJ2-5)
CASSRSGQETQYF

SEQ ID NO: 17669 - protein, 15 aa, Homo sapiens
  CDR3 for alpha chain variable domain of TCR clone 8835 (TRAV13-1, TRAJ3)
CAATPGYSSASKIIF

SEQ ID NO: 17670 - protein, 15 aa, Homo sapiens
  CDR3 for beta chain variable domain of TCR clone 8835 (TRBV20-1, TRBJ2-7)
CSARDRVSGMDEQYF

SEQ ID NO: 17671 - protein, 16 aa, Homo sapiens
  CDR3 for alpha chain variable domain of TCR clone 8836 (TRAV14/DV4, TRAJ54)
CAMREGRIQGAQKLVF

SEQ ID NO: 17672 - protein, 13 aa, Homo sapiens
  CDR3 for beta chain variable domain of TCR clone 8836 (TRBV4-2, TRBJ1-1)
CASSQAGNTEAFF

SEQ ID NO: 17673 - protein, 15 aa, Homo sapiens
  CDR3 for alpha chain variable domain of TCR clone 8837 (TRAV17, TRAJ23)
CATDAEDNQGGKLIF

SEQ ID NO: 17674 - protein, 17 aa, Homo sapiens
  CDR3 for beta chain variable domain of TCR clone 8837 (TRBV13, TRBJ2-3)
CASSLSRVAGGRNTQYF

SEQ ID NO: 17675 - protein, 11 aa, Homo sapiens
  CDR3 for alpha chain variable domain of TCR clone 8838 (TRAV20, TRAJ31)
CAVQMRARLMF

SEQ ID NO: 17676 - protein, 14 aa, Homo sapiens
  CDR3 for beta chain variable domain of TCR clone 8838 (TRBV11-2, TRBJ1-4)
CASSLGGLGEKLFF

SEQ ID NO: 17677 - protein, 14 aa, Homo sapiens
  CDR3 for alpha chain variable domain of TCR clone 8839 (TRAV8-6, TRAJ34)
CAVSDQGNTDKLIF

SEQ ID NO: 17678 - protein, 15 aa, Homo sapiens
  CDR3 for beta chain variable domain of TCR clone 8839 (TRBV27, TRBJ2-1)
CASSNGGGSSNEQFF

SEQ ID NO: 17679 - protein, 13 aa, Homo sapiens
  CDR3 for alpha chain variable domain of TCR clone 8840 (TRAV2, TRAJ40)
YAVVTSGTYKYIF

SEQ ID NO: 17680 - protein, 14 aa, Homo sapiens
  CDR3 for beta chain variable domain of TCR clone 8840 (TRBV19, TRBJ2-1)
CASPTFVLSGEQFF

SEQ ID NO: 17681 - protein, 12 aa, Homo sapiens
  CDR3 for alpha chain variable domain of TCR clone 8841 (TRAV12-1, TRAJ31)
CVVNRANARLMF

SEQ ID NO: 17682 - protein, 15 aa, Homo sapiens
  CDR3 for beta chain variable domain of TCR clone 8841 (TRBV19, TRBJ2-1)
CASNTDGDPNNEQFF

SEQ ID NO: 17683 - protein, 14 aa, Homo sapiens
  CDR3 for alpha chain variable domain of TCR clone 8842 (TRAV1-2, TRAJ16)
CAVNRFSDGQKLLF

SEQ ID NO: 17684 - protein, 13 aa, Homo sapiens
  CDR3 for beta chain variable domain of TCR clone 8842 (TRBV10-3, TRBJ2-7)
CASKLAVNYERYF

SEQ ID NO: 17685 - protein, 14 aa, Homo sapiens
  CDR3 for alpha chain variable domain of TCR clone 8843 (TRAV23/DV6, TRAJ40)
CAASLTSGTYRYIF

SEQ ID NO: 17686 - protein, 14 aa, Homo sapiens
  CDR3 for beta chain variable domain of TCR clone 8843 (TRBV5-1, TRBJ2-3)
CASSRGQGGGTQYF

SEQ ID NO: 17687 - protein, 14 aa, Homo sapiens
  CDR3 for alpha chain variable domain of TCR clone 8844 (TRAV29/DV5, TRAJ36)
CAARRKTGANNLFF

SEQ ID NO: 17688 - protein, 13 aa, Homo sapiens
  CDR3 for beta chain variable domain of TCR clone 8844 (TRBV10-3, TRBJ1-1)
CAIIPEGGTEAFF

SEQ ID NO: 17689 - protein, 13 aa, Homo sapiens
  CDR3 for alpha chain variable domain of TCR clone 8845 (TRAV2, TRAJ24)
CAVTTDSWGKLQF

SEQ ID NO: 17690 - protein, 14 aa, Homo sapiens
  CDR3 for beta chain variable domain of TCR clone 8845 (TRBV13, TRBJ2-5)
CASSLGREQETQYF

SEQ ID NO: 17691 - protein, 17 aa, Homo sapiens
  CDR3 for alpha chain variable domain of TCR clone 8846 (TRAV23/DV6, TRAJ9)
CAASLSPPNTGGFKTIF

SEQ ID NO: 17692 - protein, 14 aa, Homo sapiens
  CDR3 for beta chain variable domain of TCR clone 8846 (TRBV11-2, TRBJ2-5)
CASSRTGGIETQYF

SEQ ID NO: 17693 - protein, 13 aa, Homo sapiens
  CDR3 for alpha chain variable domain of TCR clone 8847 (TRAV13-1, TRAJ39)
CSKYSNAGNMLTF

SEQ ID NO: 17694 - protein, 14 aa, Homo sapiens
  CDR3 for beta chain variable domain of TCR clone 8847 (TRBV4-1, TRBJ2-2)
CASSQAVNTGELFF

SEQ ID NO: 17695 - protein, 15 aa, Homo sapiens
  CDR3 for alpha chain variable domain of TCR clone 8848 (TRAV21, TRAJ24)
CAARSSTDSWGKLQF

SEQ ID NO: 17696 - protein, 15 aa, Homo sapiens
  CDR3 for beta chain variable domain of TCR clone 8848 (TRBV9, TRBJ1-6)
CASSVSGTGDSPLHF

SEQ ID NO: 17697 - protein, 15 aa, Homo sapiens
  CDR3 for alpha chain variable domain of TCR clone 8849 (TRAV3, TRAJ4)
CAVRDGTGGYNKLIF

SEQ ID NO: 17698 - protein, 15 aa, Homo sapiens
  CDR3 for beta chain variable domain of TCR clone 8849 (TRBV27, TRBJ2-1)
CASSNGGGSSNEQFF

SEQ ID NO: 17699 - protein, 18 aa, Homo sapiens
  CDR3 for alpha chain variable domain of TCR clone 8850 (TRAV21, TRAJ53)
CAVKGGENSGGSNYKLTF

SEQ ID NO: 17700 - protein, 14 aa, Homo sapiens
  CDR3 for beta chain variable domain of TCR clone 8850 (TRBV6-1, TRBJ1-5)
CASSAGAGSQPQHF

SEQ ID NO: 17701 - protein, 15 aa, Homo sapiens
  CDR3 for alpha chain variable domain of TCR clone 8851 (TRAV23/DV6, TRAJ45)
CAASARGGGADGLTF

SEQ ID NO: 17702 - protein, 15 aa, Homo sapiens
  CDR3 for beta chain variable domain of TCR clone 8851 (TRBV3-1, TRBJ2-5)
CASSRGQASWKTQYF

SEQ ID NO: 17703 - protein, 13 aa, Homo sapiens
  CDR3 for alpha chain variable domain of TCR clone 8852 (TRAV21, TRAJ27)
RAARPGNAGKSTL

SEQ ID NO: 17704 - protein, 14 aa, Homo sapiens
  CDR3 for beta chain variable domain of TCR clone 8852 (TRBV7-6, TRBJ2-3)
CASSLGTVTDTQYF

SEQ ID NO: 17705 - protein, 12 aa, Homo sapiens
  CDR3 for alpha chain variable domain of TCR clone 8853 (TRAV12-1, TRAJ40)
CVVYSGTYKYIF

SEQ ID NO: 17706 - protein, 18 aa, Homo sapiens
  CDR3 for beta chain variable domain of TCR clone 8853 (TRBV11-2, TRBJ2-3)
CASSVGGASRGAPNTQYF

SEQ ID NO: 17707 - protein, 16 aa, Homo sapiens
  CDR3 for alpha chain variable domain of TCR clone 8854 (TRAV8-3, TRAJ10)
CAVGPILTGGGNKLTF

SEQ ID NO: 17708 - protein, 15 aa, Homo sapiens
  CDR3 for beta chain variable domain of TCR clone 8854 (TRBV7-2, TRBJ2-2)
CASRRPGQNTGELFF

SEQ ID NO: 17709 - protein, 16 aa, Homo sapiens
  CDR3 for alpha chain variable domain of TCR clone 8855 (TRAV30, TRAJ24)
CGTEIVDADSWGKFQF

SEQ ID NO: 17710 - protein, 14 aa, Homo sapiens
  CDR3 for beta chain variable domain of TCR clone 8855 (TRBV12-5, TRBJ2-5)
CASGSRTHQETQFF

SEQ ID NO: 17711 - protein, 14 aa, Homo sapiens
  CDR3 for alpha chain variable domain of TCR clone 8856 (TRAV12-2, TRAJ13)
CAVKKTGGYQKVTF

SEQ ID NO: 17712 - protein, 15 aa, Homo sapiens
  CDR3 for beta chain variable domain of TCR clone 8856 (TRBV27, TRBJ2-1)
CASSSGGGSSNEQFF

SEQ ID NO: 17713 - protein, 13 aa, Homo sapiens
  CDR3 for alpha chain variable domain of TCR clone 8857 (TRAV12-1, TRAJ34)
CVVTGYNTDKLIF

SEQ ID NO: 17714 - protein, 15 aa, Homo sapiens
  CDR3 for beta chain variable domain of TCR clone 8857 (TRBV28, TRBJ2-7)
CASKAGGYTSSTSGR

SEQ ID NO: 17715 - protein, 11 aa, Homo sapiens
  CDR3 for alpha chain variable domain of TCR clone 8858 (TRAV3, TRAJ21)
CAVGNFNKFYF

SEQ ID NO: 17716 - protein, 16 aa, Homo sapiens
  CDR3 for beta chain variable domain of TCR clone 8858 (TRBV19, TRBJ2-1)
CASSNAGPSSYNEQFF

SEQ ID NO: 17717 - protein, 14 aa, Homo sapiens
  CDR3 for alpha chain variable domain of TCR clone 8859 (TRAV27, TRAJ49)
CAGRPEGTGNQFYF

SEQ ID NO: 17718 - protein, 14 aa, Homo sapiens
  CDR3 for beta chain variable domain of TCR clone 8859 (TRBV18, TRBJ2-5)
CASSPGVSQETQYF

SEQ ID NO: 17719 - protein, 13 aa, Homo sapiens
  CDR3 for alpha chain variable domain of TCR clone 8860 (TRAV2, TRAJ40)
CAVVTSGTYKYIF

SEQ ID NO: 17720 - protein, 14 aa, Homo sapiens
  CDR3 for beta chain variable domain of TCR clone 8860 (TRBV19, TRBJ2-1)
CVSPTFVLSGEQFF

SEQ ID NO: 17721 - protein, 12 aa, Homo sapiens
  CDR3 for alpha chain variable domain of TCR clone 8861 (TRAV2, TRAJ9)
CAVGAGGLKTIF

SEQ ID NO: 17722 - protein, 16 aa, Homo sapiens
  CDR3 for beta chain variable domain of TCR clone 8861 (TRBV13, TRBJ2-2)
CASSPRTGEHTGELFF

SEQ ID NO: 17723 - protein, 14 aa, Homo sapiens
  CDR3 for alpha chain variable domain of TCR clone 8862 (TRAV3, TRAJ9)
CAVRLNTGGFKTIF

SEQ ID NO: 17724 - protein, 15 aa, Homo sapiens
  CDR3 for beta chain variable domain of TCR clone 8862 (TRBV7-2, TRBJ2-1)
CASSLASGRGNEQFF

SEQ ID NO: 17725 - protein, 12 aa, Homo sapiens
  CDR3 for alpha chain variable domain of TCR clone 8863 (TRAV3, TRAJ26)
CAVRDYGQNFVF

SEQ ID NO: 17726 - protein, 16 aa, Homo sapiens
  CDR3 for beta chain variable domain of TCR clone 8863 (TRBV11-2, TRBJ1-2)
CAGSPSGREANYGYTF

SEQ ID NO: 17727 - protein, 14 aa, Homo sapiens
  CDR3 for alpha chain variable domain of TCR clone 8864 (TRAV23/DV6, TRAJ22)
CAASVSGSARQLTF

SEQ ID NO: 17728 - protein, 13 aa, Homo sapiens
  CDR3 for beta chain variable domain of TCR clone 8864 (TRBV29-1, TRBJ2-1)
CSVEGGRVNEQFF

SEQ ID NO: 17729 - protein, 16 aa, Homo sapiens
  CDR3 for alpha chain variable domain of TCR clone 8865 (TRAV20, TRAJ26)
CAVQHRRDNYGQNFVF

SEQ ID NO: 17730 - protein, 17 aa, Homo sapiens
  CDR3 for beta chain variable domain of TCR clone 8865 (TRBV13, TRBJ2-3)
CASSLSRVAGGRNTQYF

SEQ ID NO: 17731 - protein, 15 aa, Homo sapiens
  CDR3 for alpha chain variable domain of TCR clone 8866 (TRAV3, TRAJ5)
CAVRDLDTGRGALTF

SEQ ID NO: 17732 - protein, 13 aa, Homo sapiens
  CDR3 for beta chain variable domain of TCR clone 8866 (TRBV12-4, TRBJ2-7)
CASSPTETYEQYF

SEQ ID NO: 17733 - protein, 13 aa, Homo sapiens
  CDR3 for alpha chain variable domain of TCR clone 8867 (TRAV1-2, TRAJ9)
CAALNTGGFKTIL

SEQ ID NO: 17734 - protein, 13 aa, Homo sapiens
  CDR3 for beta chain variable domain of TCR clone 8867 (TRBV19, TRBJ1-2)
CASSVPGQDGYTF

SEQ ID NO: 17735 - protein, 18 aa, Homo sapiens
  CDR3 for alpha chain variable domain of TCR clone 8868 (TRAV13-1, TRAJ52)
CAAKNPNAGGTSYRKLTF

SEQ ID NO: 17736 - protein, 16 aa, Homo sapiens
  CDR3 for beta chain variable domain of TCR clone 8868 (TRBV27, TRBJ2-2)
CASSFRGLVRTGELFF

SEQ ID NO: 17737 - protein, 17 aa, Homo sapiens
  CDR3 for alpha chain variable domain of TCR clone 8869 (TRAV3, TRAJ42)
CAVRDRDYGGSQGNLIF

SEQ ID NO: 17738 - protein, 12 aa, Homo sapiens
  CDR3 for beta chain variable domain of TCR clone 8869 (TRBV29-1, TRBJ2-3)
CSVTGGADTQYF

SEQ ID NO: 17739 - protein, 14 aa, Homo sapiens
  CDR3 for alpha chain variable domain of TCR clone 8870 (TRAV12-2, TRAJ13)
CAVKKTGGYQKVTF

SEQ ID NO: 17740 - protein, 13 aa, Homo sapiens
  CDR3 for beta chain variable domain of TCR clone 8870 (TRBV4-1, TRBJ2-1)
CASSQAGGDEQFF

SEQ ID NO: 17741 - protein, 14 aa, Homo sapiens
  CDR3 for alpha chain variable domain of TCR clone 8871 (TRAV26-1, TRAJ38)
CIADNAGNNSKLIW

SEQ ID NO: 17742 - protein, 13 aa, Homo sapiens
  CDR3 for beta chain variable domain of TCR clone 8871 (TRBV20-1, TRBJ1-1)
CSARGGGNTEAFF

SEQ ID NO: 17743 - protein, 14 aa, Homo sapiens
  CDR3 for alpha chain variable domain of TCR clone 8872 (TRAV26-1, TRAJ31)
CIALPPNNNARLMF

SEQ ID NO: 17744 - protein, 16 aa, Homo sapiens
  CDR3 for beta chain variable domain of TCR clone 8872 (TRBV10-2, TRBJ2-7)
CASSESPGSSGSEQYF

SEQ ID NO: 17745 - protein, 12 aa, Homo sapiens
  CDR3 for alpha chain variable domain of TCR clone 8873 (TRAV8-3, TRAJ26)
CAGDNYGQNFVF

SEQ ID NO: 17746 - protein, 15 aa, Homo sapiens
  CDR3 for beta chain variable domain of TCR clone 8873 (TRBV7-2, TRBJ2-1)
CASSSGLAGGNEQFF

SEQ ID NO: 17747 - protein, 14 aa, Homo sapiens
  CDR3 for alpha chain variable domain of TCR clone 8874 (TRAV22, TRAJ40)
CAVAPTSGTYKYIF

SEQ ID NO: 17748 - protein, 16 aa, Homo sapiens
  CDR3 for beta chain variable domain of TCR clone 8874 (TRBV5-1, TRBJ2-7)
CASSFTTGTALVEQYF

SEQ ID NO: 17749 - protein, 12 aa, Homo sapiens
  CDR3 for alpha chain variable domain of TCR clone 8875 (TRAV8-6, TRAJ31)
CAVSPNNARLMF

SEQ ID NO: 17750 - protein, 15 aa, Homo sapiens
  CDR3 for beta chain variable domain of TCR clone 8875 (TRBV19, TRBJ1-2)
CASNDGTGKDYGYTF

SEQ ID NO: 17751 - protein, 15 aa, Homo sapiens
  CDR3 for alpha chain variable domain of TCR clone 8876 (TRAV8-3, TRAJ45)
CASSYSGGGADGLTF

SEQ ID NO: 17752 - protein, 13 aa, Homo sapiens
  CDR3 for beta chain variable domain of TCR clone 8876 (TRBV10-3, TRBJ2-7)
CASRLAVNYEQYF

SEQ ID NO: 17753 - protein, 16 aa, Homo sapiens
  CDR3 for alpha chain variable domain of TCR clone 8877 (TRAV12-3, TRAJ53)
CAMSPGSGGSNYKLTF

SEQ ID NO: 17754 - protein, 11 aa, Homo sapiens
  CDR3 for beta chain variable domain of TCR clone 8877 (TRBV29-1, TRBJ2-5)
CSEDRTETQYF

SEQ ID NO: 17755 - protein, 15 aa, Homo sapiens
  CDR3 for alpha chain variable domain of TCR clone 8878 (TRAV3, TRAJ13)
CAVRVYSGGYQKVTF

SEQ ID NO: 17756 - protein, 14 aa, Homo sapiens
  CDR3 for beta chain variable domain of TCR clone 8878 (TRBV6-1, TRBJ1-3)
CASVQGGGGNTIYF

SEQ ID NO: 17757 - protein, 12 aa, Homo sapiens
  CDR3 for alpha chain variable domain of TCR clone 8879 (TRAV2, TRAJ26)
CAGSPGRLWPEF

SEQ ID NO: 17758 - protein, 17 aa, Homo sapiens
  CDR3 for beta chain variable domain of TCR clone 8879 (TRBV11-2, TRBJ2-1)
CASSLYPPGVEYNEQFF

SEQ ID NO: 17759 - protein, 10 aa, Homo sapiens
  CDR3 for alpha chain variable domain of TCR clone 8880 (TRAV13-1, TRAJ8)
CAAPFQKLVF

SEQ ID NO: 17760 - protein, 14 aa, Homo sapiens
  CDR3 for beta chain variable domain of TCR clone 8880 (TRBV18, TRBJ2-5)
CASSPGVSQETQYF

SEQ ID NO: 17761 - protein, 12 aa, Homo sapiens
  CDR3 for alpha chain variable domain of TCR clone 8881 (TRAV12-1, TRAJ34)
CVVAGATDKLIF

SEQ ID NO: 17762 - protein, 14 aa, Homo sapiens
  CDR3 for beta chain variable domain of TCR clone 8881 (TRBV7-2, TRBJ2-1)
CASSPGTFYNEQFF

SEQ ID NO: 17763 - protein, 15 aa, Homo sapiens
  CDR3 for alpha chain variable domain of TCR clone 8882 (TRAV4, TRAJ36)
CLVGDRQTGANNLFF

SEQ ID NO: 17764 - protein, 15 aa, Homo sapiens
  CDR3 for beta chain variable domain of TCR clone 8882 (TRBV12-4, TRBJ2-1)
CASSFWGEGTREQFF

SEQ ID NO: 17765 - protein, 16 aa, Homo sapiens
  CDR3 for alpha chain variable domain of TCR clone 8883 (TRAV30, TRAJ24)
CGTKIVDADSWGKFQF

SEQ ID NO: 17766 - protein, 14 aa, Homo sapiens
  CDR3 for beta chain variable domain of TCR clone 8883 (TRBV12-5, TRBJ2-5)
CASGSRTHQETQYF

SEQ ID NO: 17767 - protein, 13 aa, Homo sapiens
  CDR3 for alpha chain variable domain of TCR clone 8884 (TRAV2, TRAJ15)
CAVASQAGTALIF

SEQ ID NO: 17768 - protein, 14 aa, Homo sapiens
  CDR3 for beta chain variable domain of TCR clone 8884 (TRBV5-1, TRBJ1-1)
CASSLERVGTEAFF

SEQ ID NO: 17769 - protein, 15 aa, Homo sapiens
  CDR3 for alpha chain variable domain of TCR clone 8885 (TRAV34, TRAJ38)
CGADFTPGNNRKLIW

SEQ ID NO: 17770 - protein, 13 aa, Homo sapiens
  CDR3 for beta chain variable domain of TCR clone 8885 (TRBV7-8, TRBJ2-7)
CASSLGTTYEQYF

SEQ ID NO: 17771 - protein, 14 aa, Homo sapiens
  CDR3 for alpha chain variable domain of TCR clone 8886 (TRAV1-2, TRAJ16)
CAVNRFSDGQKLLF

SEQ ID NO: 17772 - protein, 14 aa, Homo sapiens
  CDR3 for beta chain variable domain of TCR clone 8886 (TRBV7-9, TRBJ2-3)
CASSLEDGTGTQYF

SEQ ID NO: 17773 - protein, 14 aa, Homo sapiens
  CDR3 for alpha chain variable domain of TCR clone 8887 (TRAV1-2, TRAJ16)
CAVNRFSDGQKLLF

SEQ ID NO: 17774 - protein, 15 aa, Homo sapiens
  CDR3 for beta chain variable domain of TCR clone 8887 (TRBV7-9, TRBJ1-6)
CASSSPGCGNSPLHF

SEQ ID NO: 17775 - protein, 12 aa, Homo sapiens
  CDR3 for alpha chain variable domain of TCR clone 8888 (TRAV29/DV5, TRAJ31)
CAASSHNARLMF

SEQ ID NO: 17776 - protein, 17 aa, Homo sapiens
  CDR3 for beta chain variable domain of TCR clone 8888 (TRBV18, TRBJ2-6)
CASSPRQGAVGANVLTF

SEQ ID NO: 17777 - protein, 14 aa, Homo sapiens
  CDR3 for alpha chain variable domain of TCR clone 8889 (TRAV20, TRAJ4)
CAVQASGGYNKLIF

SEQ ID NO: 17778 - protein, 15 aa, Homo sapiens
  CDR3 for beta chain variable domain of TCR clone 8889 (TRBV20-1, TRBJ2-7)
CSAESGTSGAYEQYF

SEQ ID NO: 17779 - protein, 14 aa, Homo sapiens
  CDR3 for alpha chain variable domain of TCR clone 8890 (TRAV2, TRAJ37)
CAVDFTSNTGKLIF

SEQ ID NO: 17780 - protein, 15 aa, Homo sapiens
  CDR3 for beta chain variable domain of TCR clone 8890 (TRBV20-1, TRBJ1-1)
CSASRGVTGNTEAVF

SEQ ID NO: 17781 - protein, 15 aa, Homo sapiens
  CDR3 for alpha chain variable domain of TCR clone 8891 (TRAV17, TRAJ57)
CATGPSQGGSGKLVF

SEQ ID NO: 17782 - protein, 16 aa, Homo sapiens
  CDR3 for beta chain variable domain of TCR clone 8891 (TRBV12-4, TRBJ1-5)
CASSRPVGGSNQPQHF

SEQ ID NO: 17783 - protein, 17 aa, Homo sapiens
  CDR3 for alpha chain variable domain of TCR clone 8892 (TRAV29/DV5, TRAJ10)
CSVLLGRATGGGNKLTF

SEQ ID NO: 17784 - protein, 14 aa, Homo sapiens
  CDR3 for beta chain variable domain of TCR clone 8892 (TRBV18, TRBJ2-5)
CASSPGVSQETQYF

SEQ ID NO: 17785 - protein, 15 aa, Homo sapiens
  CDR3 for alpha chain variable domain of TCR clone 8893 (TRAV13-1, TRAJ17)
CAASIERAAGNKLTF

SEQ ID NO: 17786 - protein, 15 aa, Homo sapiens
  CDR3 for beta chain variable domain of TCR clone 8893 (TRBV6-3, TRBJ2-7)
CASSSPGTVFYEQYF

SEQ ID NO: 17787 - protein, 15 aa, Homo sapiens
  CDR3 for alpha chain variable domain of TCR clone 8894 (TRAV12-2, TRAJ32)
CAVNHYGGATNKLIF

SEQ ID NO: 17788 - protein, 13 aa, Homo sapiens
  CDR3 for beta chain variable domain of TCR clone 8894 (TRBV7-9, TRBJ1-2)
CASSLKQNYGYTF

SEQ ID NO: 17789 - protein, 22 aa, Homo sapiens
  CDR3 for alpha chain variable domain of TCR clone 8895 (TRAV8-6, TRAJ6)
CAVTLGEEATYLHLEEEPALLF

SEQ ID NO: 17790 - protein, 15 aa, Homo sapiens
  CDR3 for beta chain variable domain of TCR clone 8895 (TRBV7-2, TRBJ1-1)
CASSPQGGANTEAFF

SEQ ID NO: 17791 - protein, 12 aa, Homo sapiens
  CDR3 for alpha chain variable domain of TCR clone 8896 (TRAV29/DV5, TRAJ49)
CAALNTGNQFYF

SEQ ID NO: 17792 - protein, 14 aa, Homo sapiens
  CDR3 for beta chain variable domain of TCR clone 8896 (TRBV2, TRBJ2-2)
CASSEWTPTGELFF

SEQ ID NO: 17793 - protein, 14 aa, Homo sapiens
  CDR3 for alpha chain variable domain of TCR clone 8897 (TRAV12-1, TRAJ17)
CVVDERAAGNKLTF

SEQ ID NO: 17794 - protein, 13 aa, Homo sapiens
  CDR3 for beta chain variable domain of TCR clone 8897 (TRBV19, TRBJ2-1)
CATSRGVYNEQFF

SEQ ID NO: 17795 - protein, 11 aa, Homo sapiens
  CDR3 for alpha chain variable domain of TCR clone 8898 (TRAV23/DV6, TRAJ58)
CAARLLRGETS

SEQ ID NO: 17796 - protein, 14 aa, Homo sapiens
  CDR3 for beta chain variable domain of TCR clone 8898 (TRBV7-2, TRBJ2-7)
CASRSQGAAYEQYF

SEQ ID NO: 17797 - protein, 14 aa, Homo sapiens
  CDR3 for alpha chain variable domain of TCR clone 8899 (TRAV12-1, TRAJ17)
CVVNYKAAGNKLTF

SEQ ID NO: 17798 - protein, 15 aa, Homo sapiens
  CDR3 for beta chain variable domain of TCR clone 8899 (TRBV10-2, TRBJ2-6)
CASSEQGTGANVLTF

SEQ ID NO: 17799 - protein, 14 aa, Homo sapiens
  CDR3 for alpha chain variable domain of TCR clone 8900 (TRAV12-2, TRAJ22)
CAVRVSGSARQLTF

SEQ ID NO: 17800 - protein, 13 aa, Homo sapiens
  CDR3 for beta chain variable domain of TCR clone 8900 (TRBV6-1, TRBJ2-1)
CAGAGTGLHEQFF

SEQ ID NO: 17801 - protein, 11 aa, Homo sapiens
  CDR3 for alpha chain variable domain of TCR clone 8901 (TRAV3, TRAJ21)
CAGGNFNKFYF

SEQ ID NO: 17802 - protein, 16 aa, Homo sapiens
  CDR3 for beta chain variable domain of TCR clone 8901 (TRBV19, TRBJ2-1)
CASSKAGPSSYNEQFF

SEQ ID NO: 17803 - protein, 18 aa, Homo sapiens
  CDR3 for alpha chain variable domain of TCR clone 8902 (TRAV21, TRAJ52)
CAVRPSPAGGTSYGKLTF

SEQ ID NO: 17804 - protein, 17 aa, Homo sapiens
  CDR3 for beta chain variable domain of TCR clone 8902 (TRBV13, TRBJ2-3)
CASILSRVAGGRNTQYF

SEQ ID NO: 17805 - protein, 14 aa, Homo sapiens
  CDR3 for alpha chain variable domain of TCR clone 8903 (TRAV17, TRAJ6)
CATDASGGSYIPTF

SEQ ID NO: 17806 - protein, 15 aa, Homo sapiens
  CDR3 for beta chain variable domain of TCR clone 8903 (TRBV9, TRBJ2-1)
CASSLAGSSYNEQFF

SEQ ID NO: 17807 - protein, 15 aa, Homo sapiens
  CDR3 for alpha chain variable domain of TCR clone 8904 (TRAV8-3, TRAJ11)
CAVGLLNSGYSTLTF

SEQ ID NO: 17808 - protein, 16 aa, Homo sapiens
  CDR3 for beta chain variable domain of TCR clone 8904 (TRBV7-9, TRBJ1-2)
CASSLGFSSGEDGDTF

SEQ ID NO: 17809 - protein, 13 aa, Homo sapiens
  CDR3 for alpha chain variable domain of TCR clone 8905 (TRAV12-1, TRAJ16)
CVVNTRNGQKLLF

SEQ ID NO: 17810 - protein, 19 aa, Homo sapiens
  CDR3 for beta chain variable domain of TCR clone 8905 (TRBV6-1, TRBJ2-5)
CASSRFGAGGPGLEETQYF

SEQ ID NO: 17811 - protein, 15 aa, Homo sapiens
  CDR3 for alpha chain variable domain of TCR clone 8906 (TRAV21, TRAJ48)
CAVPISNFGNEKLTF

SEQ ID NO: 17812 - protein, 16 aa, Homo sapiens
  CDR3 for beta chain variable domain of TCR clone 8906 (TRBV5-7, TRBJ2-7)
CASSLAPSVLNYEQYF

SEQ ID NO: 17813 - protein, 12 aa, Homo sapiens
  CDR3 for alpha chain variable domain of TCR clone 8907 (TRAV1-2, TRAJ33)
CAALDSNYQLIW

SEQ ID NO: 17814 - protein, 14 aa, Homo sapiens
  CDR3 for beta chain variable domain of TCR clone 8907 (TRBV5-4, TRBJ2-2)
CASRLDGGTGELFF

SEQ ID NO: 17815 - protein, 13 aa, Homo sapiens
  CDR3 for alpha chain variable domain of TCR clone 8908 (TRAV8-4, TRAJ15)
CALTNQAGTALIF

SEQ ID NO: 17816 - protein, 13 aa, Homo sapiens
  CDR3 for beta chain variable domain of TCR clone 8908 (TRBV11-3, TRBJ2-3)
CASRPVLGDTQYF

SEQ ID NO: 17817 - protein, 14 aa, Homo sapiens
  CDR3 for alpha chain variable domain of TCR clone 8909 (TRAV12-1, TRAJ3)
CVVILYSSASKIIF

SEQ ID NO: 17818 - protein, 17 aa, Homo sapiens
  CDR3 for beta chain variable domain of TCR clone 8909 (TRBV20-1, TRBJ2-1)
CSASSSGLAGSYNEQFF

SEQ ID NO: 17819 - protein, 14 aa, Homo sapiens
  CDR3 for alpha chain variable domain of TCR clone 8910 (TRAV1-2, TRAJ16)
CAVNRFSDGQKLLF

SEQ ID NO: 17820 - protein, 11 aa, Homo sapiens
  CDR3 for beta chain variable domain of TCR clone 8910 (TRBV19, TRBJ2-5)
CASSIKETQYF

SEQ ID NO: 17821 - protein, 14 aa, Homo sapiens
  CDR3 for alpha chain variable domain of TCR clone 8911 (TRAV12-3, TRAJ10)
SHLPLTGGGNKLTF

SEQ ID NO: 17822 - protein, 17 aa, Homo sapiens
  CDR3 for beta chain variable domain of TCR clone 8911 (TRBV19, TRBJ2-7)
CASSISFYDSYPYEQYF

SEQ ID NO: 17823 - protein, 15 aa, Homo sapiens
  CDR3 for alpha chain variable domain of TCR clone 8912 (TRAV2, TRAJ15)
CAVEDRGQAGTALIF

SEQ ID NO: 17824 - protein, 14 aa, Homo sapiens
  CDR3 for beta chain variable domain of TCR clone 8912 (TRBV4-1, TRBJ2-2)
CASSQAVNTGELFF

SEQ ID NO: 17825 - protein, 18 aa, Homo sapiens
  CDR3 for alpha chain variable domain of TCR clone 8913 (TRAV26-1, TRAJ23)
CIVRVGLEVWNQGGKLIF

SEQ ID NO: 17826 - protein, 16 aa, Homo sapiens
  CDR3 for beta chain variable domain of TCR clone 8913 (TRBV12-4, TRBJ2-5)
CASSFFVGGRQETQYF

SEQ ID NO: 17827 - protein, 14 aa, Homo sapiens
  CDR3 for alpha chain variable domain of TCR clone 8914 (TRAV14/DV4, TRAJ49)
CAMREGVNGNQFYF

SEQ ID NO: 17828 - protein, 14 aa, Homo sapiens
  CDR3 for beta chain variable domain of TCR clone 8914 (TRBV5-1, TRBJ1-5)
CASSLESGSRPQHF

SEQ ID NO: 17829 - protein, 15 aa, Homo sapiens
  CDR3 for alpha chain variable domain of TCR clone 8915 (TRAV14/DV4, TRAJ10)
CAMRELTGGGNKLTF

SEQ ID NO: 17830 - protein, 17 aa, Homo sapiens
  CDR3 for beta chain variable domain of TCR clone 8915 (TRBV15, TRBJ1-2)
CATSGREIDVVNYGYTF

SEQ ID NO: 17831 - protein, 17 aa, Homo sapiens
  CDR3 for alpha chain variable domain of TCR clone 8916 (TRAV36/DV7, TRAJ52)
CAVAQRAGGTSYGKLTF

SEQ ID NO: 17832 - protein, 16 aa, Homo sapiens
  CDR3 for beta chain variable domain of TCR clone 8916 (TRBV20-1, TRBJ2-1)
CSARDLKQGMNNEQFF

SEQ ID NO: 17833 - protein, 14 aa, Homo sapiens
  CDR3 for alpha chain variable domain of TCR clone 8917 (TRAV9-2, TRAJ39)
CALYIYNAGNMLTF

SEQ ID NO: 17834 - protein, 17 aa, Homo sapiens
  CDR3 for beta chain variable domain of TCR clone 8917 (TRBV9, TRBJ2-3)
CASRSTAGGPSTDTQYF

SEQ ID NO: 17835 - protein, 12 aa, Homo sapiens
  CDR3 for alpha chain variable domain of TCR clone 8918 (TRAV16, TRAJ10)
CSRTGGGNKLTF

SEQ ID NO: 17836 - protein, 20 aa, Homo sapiens
  CDR3 for beta chain variable domain of TCR clone 8918 (TRBV28, TRBJ2-1)
CASTPIGRSPGLAGGNEQFF

SEQ ID NO: 17837 - protein, 14 aa, Homo sapiens
  CDR3 for alpha chain variable domain of TCR clone 8919 (TRAV27, TRAJ23)
CAGAFDNQGGKLIF

SEQ ID NO: 17838 - protein, 15 aa, Homo sapiens
  CDR3 for beta chain variable domain of TCR clone 8919 (TRBV7-3, TRBJ2-7)
CASSLTGQGKYEQYL

SEQ ID NO: 17839 - protein, 15 aa, Homo sapiens
  CDR3 for alpha chain variable domain of TCR clone 8920 (TRAV14/DV4, TRAJ39)
CAMRAVNNAGNMLTF

SEQ ID NO: 17840 - protein, 15 aa, Homo sapiens
  CDR3 for beta chain variable domain of TCR clone 8920 (TRBV9, TRBJ2-3)
CASSLEGGLTDTQYF

SEQ ID NO: 17841 - protein, 14 aa, Homo sapiens
  CDR3 for alpha chain variable domain of TCR clone 8921 (TRAV1-2, TRAJ16)
CAVNRFSDGQKLLF

SEQ ID NO: 17842 - protein, 14 aa, Homo sapiens
  CDR3 for beta chain variable domain of TCR clone 8921 (TRBV20-1, TRBJ2-1)
CSAQIGGSANEQFF

SEQ ID NO: 17843 - protein, 17 aa, Homo sapiens
  CDR3 for alpha chain variable domain of TCR clone 8922 (TRAV21, TRAJ52)
CAVGANAGGTSYGKLTF

SEQ ID NO: 17844 - protein, 13 aa, Homo sapiens
  CDR3 for beta chain variable domain of TCR clone 8922 (TRBV5-1, TRBJ1-2)
CASSLQGNYGYTF

SEQ ID NO: 17845 - protein, 12 aa, Homo sapiens
  CDR3 for alpha chain variable domain of TCR clone 8923 (TRAV8-3, TRAJ20)
CAVGANDYRLSF

SEQ ID NO: 17846 - protein, 16 aa, Homo sapiens
  CDR3 for beta chain variable domain of TCR clone 8923 (TRBV19, TRBJ2-2)
CASRSPGTGATGELFF

SEQ ID NO: 17847 - protein, 15 aa, Homo sapiens
  CDR3 for alpha chain variable domain of TCR clone 8924 (TRAV17, TRAJ57)
CATGPSQGGSEKLVL

SEQ ID NO: 17848 - protein, 16 aa, Homo sapiens
  CDR3 for beta chain variable domain of TCR clone 8924 (TRBV12-4, TRBJ1-5)
CASSRPVGGSNQPQHF

SEQ ID NO: 17849 - protein, 12 aa, Homo sapiens
  CDR3 for alpha chain variable domain of TCR clone 8925 (TRAV29/DV5, TRAJ34)
CAARHNTDKLIF

SEQ ID NO: 17850 - protein, 14 aa, Homo sapiens
  CDR3 for beta chain variable domain of TCR clone 8925 (TRBV7-2, TRBJ1-5)
CASSTQGAGQPQHF

SEQ ID NO: 17851 - protein, 13 aa, Homo sapiens
  CDR3 for alpha chain variable domain of TCR clone 8926 (TRAV23/DV6, TRAJ34)
CAAIENNTDKLIF

SEQ ID NO: 17852 - protein, 13 aa, Homo sapiens
  CDR3 for beta chain variable domain of TCR clone 8926 (TRBV2, TRBJ1-1)
CASSVLMNTEAFF

SEQ ID NO: 17853 - protein, 11 aa, Homo sapiens
  CDR3 for alpha chain variable domain of TCR clone 8927 (TRAV1-1, TRAJ23)
CAVRQGGKLIF

SEQ ID NO: 17854 - protein, 20 aa, Homo sapiens
  CDR3 for beta chain variable domain of TCR clone 8927 (TRBV7-8, TRBJ2-2)
CASSHLFPGPTIHTTGELFF

SEQ ID NO: 17855 - protein, 13 aa, Homo sapiens
  CDR3 for alpha chain variable domain of TCR clone 8928 (TRAV2, TRAJ15)
CAVASQAGTALIF

SEQ ID NO: 17856 - protein, 12 aa, Homo sapiens
  CDR3 for beta chain variable domain of TCR clone 8928 (TRBV11-2, TRBJ2-2)
CASSLPTGELFF

SEQ ID NO: 17857 - protein, 14 aa, Homo sapiens
  CDR3 for alpha chain variable domain of TCR clone 8929 (TRAV12-2, TRAJ13)
CAVKKTRGYQKVTF

SEQ ID NO: 17858 - protein, 15 aa, Homo sapiens
  CDR3 for beta chain variable domain of TCR clone 8929 (TRBV27, TRBJ2-1)
CASSNGGGSSNEQFF

SEQ ID NO: 17859 - protein, 14 aa, Homo sapiens
  CDR3 for alpha chain variable domain of TCR clone 8930 (TRAV29/DV5, TRAJ36)
CAARRKTGANNLFF

SEQ ID NO: 17860 - protein, 16 aa, Homo sapiens
  CDR3 for beta chain variable domain of TCR clone 8930 (TRBV6-1, TRBJ2-1)
CASILRQGSSYNEQFF

SEQ ID NO: 17861 - protein, 11 aa, Homo sapiens
  CDR3 for alpha chain variable domain of TCR clone 8931 (TRAV3, TRAJ21)
CAVGNFTKFYF

SEQ ID NO: 17862 - protein, 16 aa, Homo sapiens
  CDR3 for beta chain variable domain of TCR clone 8931 (TRBV19, TRBJ2-1)
CASSKAGPSSYNEQFF

SEQ ID NO: 17863 - protein, 15 aa, Homo sapiens
  CDR3 for alpha chain variable domain of TCR clone 8932 (TRAV3, TRAJ32)
CAVRDPGGATNKLIF

SEQ ID NO: 17864 - protein, 14 aa, Homo sapiens
  CDR3 for beta chain variable domain of TCR clone 8932 (TRBV9, TRBJ1-2)
CASSVKGDNYGYTF

SEQ ID NO: 17865 - protein, 16 aa, Homo sapiens
  CDR3 for alpha chain variable domain of TCR clone 8933 (TRAV12-3, TRAJ53)
CAMSPGSGGSNYKLTS

SEQ ID NO: 17866 - protein, 11 aa, Homo sapiens
  CDR3 for beta chain variable domain of TCR clone 8933 (TRBV29-1, TRBJ2-5)
CSEDRTGTQYF

SEQ ID NO: 17867 - protein, 13 aa, Homo sapiens
  CDR3 for alpha chain variable domain of TCR clone 8934 (TRAV23/DV6, TRAJ58)
CAASEIGGSRLTF

SEQ ID NO: 17868 - protein, 14 aa, Homo sapiens
  CDR3 for beta chain variable domain of TCR clone 8934 (TRBV28, TRBJ2-5)
CASSRLAGGETQYF

SEQ ID NO: 17869 - protein, 10 aa, Homo sapiens
  CDR3 for alpha chain variable domain of TCR clone 8935 (TRAV36/DV7, TRAJ48)
CAVGNEKLTF

SEQ ID NO: 17870 - protein, 14 aa, Homo sapiens
  CDR3 for beta chain variable domain of TCR clone 8935 (TRBV7-3, TRBJ2-2)
CASSLNSNTGELFF

SEQ ID NO: 17871 - protein, 13 aa, Homo sapiens
  CDR3 for alpha chain variable domain of TCR clone 8936 (TRAV13-2, TRAJ48)
CAEMDFGNEKLTF

SEQ ID NO: 17872 - protein, 13 aa, Homo sapiens
  CDR3 for beta chain variable domain of TCR clone 8936 (TRBV14, TRBJ2-7)
CASSQDRRYEQYF

SEQ ID NO: 17873 - protein, 14 aa, Homo sapiens
  CDR3 for alpha chain variable domain of TCR clone 8937 (TRAV21, TRAJ21)
CAVRPRDNFNKFYF

SEQ ID NO: 17874 - protein, 14 aa, Homo sapiens
  CDR3 for beta chain variable domain of TCR clone 8937 (TRBV7-9, TRBJ2-1)
CASSLASGSNEQFF

SEQ ID NO: 17875 - protein, 12 aa, Homo sapiens
  CDR3 for alpha chain variable domain of TCR clone 8938 (TRAV16, TRAJ15)
CSNRQAGTALIF

SEQ ID NO: 17876 - protein, 15 aa, Homo sapiens
  CDR3 for beta chain variable domain of TCR clone 8938 (TRBV4-1, TRBJ1-1)
CASSYSGTGGTEAFF

SEQ ID NO: 17877 - protein, 16 aa, Homo sapiens
  CDR3 for alpha chain variable domain of TCR clone 8939 (TRAV14/DV4, TRAJ53)
CAMREGGGGSNYKLTF

SEQ ID NO: 17878 - protein, 13 aa, Homo sapiens
  CDR3 for beta chain variable domain of TCR clone 8939 (TRBV4-2, TRBJ1-1)
CASSQAGNTEAFF

SEQ ID NO: 17879 - protein, 17 aa, Homo sapiens
  CDR3 for alpha chain variable domain of TCR clone 8940 (TRAV3, TRAJ6)
CAVRDGPRAGESYIPTF

SEQ ID NO: 17880 - protein, 14 aa, Homo sapiens
  CDR3 for beta chain variable domain of TCR clone 8940 (TRBV7-2, TRBJ2-7)
CASSPKTSFYEQYF

SEQ ID NO: 17881 - protein, 13 aa, Homo sapiens
  CDR3 for alpha chain variable domain of TCR clone 8941 (TRAV26-1, TRAJ34)
CIVRVGNTDKLIF

SEQ ID NO: 17882 - protein, 15 aa, Homo sapiens
  CDR3 for beta chain variable domain of TCR clone 8941 (TRBV7-3, TRBJ1-2)
CASSPQGFAPGGYTF

SEQ ID NO: 17883 - protein, 12 aa, Homo sapiens
  CDR3 for alpha chain variable domain of TCR clone 8942 (TRAV23/DV6, TRAJ26)
CAASKFGQNFVF

SEQ ID NO: 17884 - protein, 13 aa, Homo sapiens
  CDR3 for beta chain variable domain of TCR clone 8942 (TRBV11-2, TRBJ1-5)
CASSLDRNQPQHF

SEQ ID NO: 17885 - protein, 15 aa, Homo sapiens
  CDR3 for alpha chain variable domain of TCR clone 8943 (TRAV9-2, TRAJ42)
CALSDPGGSQGNLIF

SEQ ID NO: 17886 - protein, 13 aa, Homo sapiens
  CDR3 for beta chain variable domain of TCR clone 8943 (TRBV6-5, TRBJ2-5)
CATAPSPQETQYF

SEQ ID NO: 17887 - protein, 12 aa, Homo sapiens
  CDR3 for alpha chain variable domain of TCR clone 8944 (TRAV17, TRAJ49)
CATASTGNQFYF

SEQ ID NO: 17888 - protein, 15 aa, Homo sapiens
  CDR3 for beta chain variable domain of TCR clone 8944 (TRBV15, TRBJ2-1)
CATSRDLGSYNEQFF

SEQ ID NO: 17889 - protein, 11 aa, Homo sapiens
  CDR3 for alpha chain variable domain of TCR clone 8945 (TRAV2, TRAJ33)
CAVERNYQLIW

SEQ ID NO: 17890 - protein, 15 aa, Homo sapiens
  CDR3 for beta chain variable domain of TCR clone 8945 (TRBV19, TRBJ1-1)
CASTSGQIQNTEAFF

SEQ ID NO: 17891 - protein, 13 aa, Homo sapiens
  CDR3 for alpha chain variable domain of TCR clone 8946 (TRAV12-1, TRAJ33)
CGDAPDSNYQLIW

SEQ ID NO: 17892 - protein, 14 aa, Homo sapiens
  CDR3 for beta chain variable domain of TCR clone 8946 (TRBV7-2, TRBJ2-7)
CASRSQGAAYEQYF

SEQ ID NO: 17893 - protein, 15 aa, Homo sapiens
  CDR3 for alpha chain variable domain of TCR clone 8947 (TRAV8-3, TRAJ45)
CASSYSGGGADGLTF

SEQ ID NO: 17894 - protein, 13 aa, Homo sapiens
  CDR3 for beta chain variable domain of TCR clone 8947 (TRBV10-3, TRBJ2-7)
CASKLAVDYEQYF

SEQ ID NO: 17895 - protein, 13 aa, Homo sapiens
  CDR3 for alpha chain variable domain of TCR clone 8948 (TRAV21, TRAJ56)
CAGWVGANSKLTF

SEQ ID NO: 17896 - protein, 13 aa, Homo sapiens
  CDR3 for beta chain variable domain of TCR clone 8948 (TRBV11-2, TRBJ1-1)
CASSSTRNTEAFF

SEQ ID NO: 17897 - protein, 18 aa, Homo sapiens
  CDR3 for alpha chain variable domain of TCR clone 8949 (TRAV12-3, TRAJ52)
CAMSVGGAGGTSYGKLTF

SEQ ID NO: 17898 - protein, 15 aa, Homo sapiens
  CDR3 for beta chain variable domain of TCR clone 8949 (TRBV27, TRBJ1-6)
CASSFDRGLGSTLHF

SEQ ID NO: 17899 - protein, 17 aa, Homo sapiens
  CDR3 for alpha chain variable domain of TCR clone 8950 (TRAV8-6, TRAJ58)
CAVSSWVGETSGSRLTF

SEQ ID NO: 17900 - protein, 14 aa, Homo sapiens
  CDR3 for beta chain variable domain of TCR clone 8950 (TRBV4-2, TRBJ2-1)
CTSGLDRAYNEQFF

SEQ ID NO: 17901 - protein, 14 aa, Homo sapiens
  CDR3 for alpha chain variable domain of TCR clone 8951 (TRAV3, TRAJ17)
CAVRDAAAGNKLTF

SEQ ID NO: 17902 - protein, 15 aa, Homo sapiens
  CDR3 for beta chain variable domain of TCR clone 8951 (TRBV4-1, TRBJ1-4)
CASSDTGGTNEKLFF

SEQ ID NO: 17903 - protein, 15 aa, Homo sapiens
  CDR3 for alpha chain variable domain of TCR clone 8952 (TRAV26-1, TRAJ29)
CIVRVEGSGNTPLGF

SEQ ID NO: 17904 - protein, 15 aa, Homo sapiens
  CDR3 for beta chain variable domain of TCR clone 8952 (TRBV7-9, TRBJ1-5)
CASSQGHQPNQPQHF

SEQ ID NO: 17905 - protein, 17 aa, Homo sapiens
  CDR3 for alpha chain variable domain of TCR clone 8953 (TRAV1-1, TRAJ32)
CAVRVDELWWCYKQAHL

SEQ ID NO: 17906 - protein, 12 aa, Homo sapiens
  CDR3 for beta chain variable domain of TCR clone 8953 (TRBV19, TRBJ2-1)
CASSRQGAEQFF

SEQ ID NO: 17907 - protein, 18 aa, Homo sapiens
  CDR3 for alpha chain variable domain of TCR clone 8954 (TRAV21, TRAJ52)
CAVRPSPAGGTSYGKLTF

SEQ ID NO: 17908 - protein, 17 aa, Homo sapiens
  CDR3 for beta chain variable domain of TCR clone 8954 (TRBV13, TRBJ2-3)
CASSLSRVAGGRSTQYF

SEQ ID NO: 17909 - protein, 14 aa, Homo sapiens
  CDR3 for alpha chain variable domain of TCR clone 8955 (TRAV12-2, TRAJ17)
CAVLFKAAGNKLTF

SEQ ID NO: 17910 - protein, 12 aa, Homo sapiens
  CDR3 for beta chain variable domain of TCR clone 8955 (TRBV14, TRBJ2-5)
CASSQLKETQYF

SEQ ID NO: 17911 - protein, 13 aa, Homo sapiens
  CDR3 for alpha chain variable domain of TCR clone 8956 (TRAV13-1, TRAJ21)
CAASIYNFNKFYF

SEQ ID NO: 17912 - protein, 16 aa, Homo sapiens
  CDR3 for beta chain variable domain of TCR clone 8956 (TRBV20-1, TRBJ1-4)
CSAPGQGLLTNEKLFF

SEQ ID NO: 17913 - protein, 12 aa, Homo sapiens
  CDR3 for alpha chain variable domain of TCR clone 8957 (TRAV12-3, TRAJ17)
CAMTLTGNKLTF

SEQ ID NO: 17914 - protein, 15 aa, Homo sapiens
  CDR3 for beta chain variable domain of TCR clone 8957 (TRBV20-1, TRBJ2-7)
CSAIDRVSGMDEQYF

SEQ ID NO: 17915 - protein, 16 aa, Homo sapiens
  CDR3 for alpha chain variable domain of TCR clone 8958 (TRAV12-3, TRAJ53)
CAMSPGSGGSNYKLTF

SEQ ID NO: 17916 - protein, 11 aa, Homo sapiens
  CDR3 for beta chain variable domain of TCR clone 8958 (TRBV29-1, TRBJ2-5)
CSEDRTGTQYV

SEQ ID NO: 17917 - protein, 12 aa, Homo sapiens
  CDR3 for alpha chain variable domain of TCR clone 8959 (TRAV13-1, TRAJ21)
CAAKEGFNKFYF

SEQ ID NO: 17918 - protein, 15 aa, Homo sapiens
  CDR3 for beta chain variable domain of TCR clone 8959 (TRBV6-3, TRBJ2-7)
CASSSPGTVFYEQYF

SEQ ID NO: 17919 - protein, 14 aa, Homo sapiens
  CDR3 for alpha chain variable domain of TCR clone 8960 (TRAV2, TRAJ37)
CAVDFTSNTGKLIF

SEQ ID NO: 17920 - protein, 14 aa, Homo sapiens
  CDR3 for beta chain variable domain of TCR clone 8960 (TRBV25-1, TRBJ1-1)
CASTHLGGNTEAFF

SEQ ID NO: 17921 - protein, 13 aa, Homo sapiens
  CDR3 for alpha chain variable domain of TCR clone 8961 (TRAV21, TRAJ20)
CAVGLRVDYKLSF

SEQ ID NO: 17922 - protein, 16 aa, Homo sapiens
  CDR3 for beta chain variable domain of TCR clone 8961 (TRBV4-2, TRBJ1-2)
CASSQEIGGASYGYTF

SEQ ID NO: 17923 - protein, 11 aa, Homo sapiens
  CDR3 for alpha chain variable domain of TCR clone 8962 (TRAV13-1, TRAJ20)
CAASNDYKLSF

SEQ ID NO: 17924 - protein, 16 aa, Homo sapiens
  CDR3 for beta chain variable domain of TCR clone 8962 (TRBV27, TRBJ2-1)
CASSLSKGFGLDEQFF

SEQ ID NO: 17925 - protein, 16 aa, Homo sapiens
  CDR3 for alpha chain variable domain of TCR clone 8963 (TRAV3, TRAJ17)
CAVRDGSPAAGNKLTF

SEQ ID NO: 17926 - protein, 14 aa, Homo sapiens
  CDR3 for beta chain variable domain of TCR clone 8963 (TRBV15, TRBJ2-1)
CATNHGGRHNEQFF

SEQ ID NO: 17927 - protein, 13 aa, Homo sapiens
  CDR3 for alpha chain variable domain of TCR clone 8964 (TRAV2, TRAJ26)
CAVVGNYGQNFVF

SEQ ID NO: 17928 - protein, 15 aa, Homo sapiens
  CDR3 for beta chain variable domain of TCR clone 8964 (TRBV27, TRBJ2-1)
CASSNGGGSSNEQFF

SEQ ID NO: 17929 - protein, 15 aa, Homo sapiens
  CDR3 for alpha chain variable domain of TCR clone 8965 (TRAV12-3, TRAJ6)
CAMSATTGGSYIPTF

SEQ ID NO: 17930 - protein, 16 aa, Homo sapiens
  CDR3 for beta chain variable domain of TCR clone 8965 (TRBV20-1, TRBJ1-2)
CSASMGQGVADYGYTF

SEQ ID NO: 17931 - protein, 14 aa, Homo sapiens
  CDR3 for alpha chain variable domain of TCR clone 8966 (TRAV1-1, TRAJ27)
CAVIYNTNAGKSTF

SEQ ID NO: 17932 - protein, 15 aa, Homo sapiens
  CDR3 for beta chain variable domain of TCR clone 8966 (TRBV7-2, TRBJ2-1)
CTSSSGLAGGNEQFF

SEQ ID NO: 17933 - protein, 14 aa, Homo sapiens
  CDR3 for alpha chain variable domain of TCR clone 8967 (TRAV12-2, TRAJ13)
CAVKKTGGYQTVTF

SEQ ID NO: 17934 - protein, 15 aa, Homo sapiens
  CDR3 for beta chain variable domain of TCR clone 8967 (TRBV27, TRBJ2-1)
CASSNGGGSSNEQFF

SEQ ID NO: 17935 - protein, 12 aa, Homo sapiens
  CDR3 for alpha chain variable domain of TCR clone 8968 (TRAV16, TRAJ10)
CAFTGGGNKLTF

SEQ ID NO: 17936 - protein, 14 aa, Homo sapiens
  CDR3 for beta chain variable domain of TCR clone 8968 (TRBV12-4, TRBJ1-5)
CASSPTGPRGGTYF

SEQ ID NO: 17937 - protein, 15 aa, Homo sapiens
  CDR3 for alpha chain variable domain of TCR clone 8969 (TRAV2, TRAJ39)
CAVEDRRNAGNMPTF

SEQ ID NO: 17938 - protein, 16 aa, Homo sapiens
  CDR3 for beta chain variable domain of TCR clone 8969 (TRBV7-8, TRBJ2-7)
CASSLASGTSVYEQYF

SEQ ID NO: 17939 - protein, 20 aa, Homo sapiens
  CDR3 for alpha chain variable domain of TCR clone 8970 (TRAV13-1, TRAJ10)
CAAKGHGRRKQTHLWDRHSA

SEQ ID NO: 17940 - protein, 13 aa, Homo sapiens
  CDR3 for beta chain variable domain of TCR clone 8970 (TRBV20-1, TRBJ1-1)
CSARGGGNTEAFF

SEQ ID NO: 17941 - protein, 14 aa, Homo sapiens
  CDR3 for alpha chain variable domain of TCR clone 8971 (TRAV1-2, TRAJ16)
CAVNRFSDGQKLLF

SEQ ID NO: 17942 - protein, 13 aa, Homo sapiens
  CDR3 for beta chain variable domain of TCR clone 8971 (TRBV11-2, TRBJ2-5)
CASSFSSQETQYF

SEQ ID NO: 17943 - protein, 16 aa, Homo sapiens
  CDR3 for alpha chain variable domain of TCR clone 8972 (TRAV12-3, TRAJ53)
CAMSPGSGGSNYKLTF

SEQ ID NO: 17944 - protein, 11 aa, Homo sapiens
  CDR3 for beta chain variable domain of TCR clone 8972 (TRBV29-1, TRBJ2-5)
YSEDRTGTQYF

SEQ ID NO: 17945 - protein, 12 aa, Homo sapiens
  CDR3 for alpha chain variable domain of TCR clone 8973 (TRAV3, TRAJ7)
CADLLWEQQTRF

SEQ ID NO: 17946 - protein, 18 aa, Homo sapiens
  CDR3 for beta chain variable domain of TCR clone 8973 (TRBV7-3, TRBJ2-5)
CASSFRGGGDPVLRARHA

SEQ ID NO: 17947 - protein, 16 aa, Homo sapiens
  CDR3 for alpha chain variable domain of TCR clone 8974 (TRAV17, TRAJ4)
CATAAHSSGGYNKLIF

SEQ ID NO: 17948 - protein, 14 aa, Homo sapiens
  CDR3 for beta chain variable domain of TCR clone 8974 (TRBV20-1, TRBJ1-1)
CSAQTRIGGTEAFF

SEQ ID NO: 17949 - protein, 14 aa, Homo sapiens
  CDR3 for alpha chain variable domain of TCR clone 8975 (TRAV35, TRAJ22)
CAGLRPGSARQLTF

SEQ ID NO: 17950 - protein, 15 aa, Homo sapiens
  CDR3 for beta chain variable domain of TCR clone 8975 (TRBV12-4, TRBJ2-5)
CASSPPTGLQEAQYF

SEQ ID NO: 17951 - protein, 13 aa, Homo sapiens
  CDR3 for alpha chain variable domain of TCR clone 8976 (TRAV21, TRAJ27)
CAARPGNAGKSTF

SEQ ID NO: 17952 - protein, 15 aa, Homo sapiens
  CDR3 for beta chain variable domain of TCR clone 8976 (TRBV7-2, TRBJ2-1)
CASSSGLAGGNEQFF

SEQ ID NO: 17953 - protein, 16 aa, Homo sapiens
  CDR3 for alpha chain variable domain of TCR clone 8977 (TRAV30, TRAJ24)
CGKEIVDADSWGKFQF

SEQ ID NO: 17954 - protein, 14 aa, Homo sapiens
  CDR3 for beta chain variable domain of TCR clone 8977 (TRBV12-5, TRBJ2-5)
CASGSRTHQETQYF

SEQ ID NO: 17955 - protein, 14 aa, Homo sapiens
  CDR3 for alpha chain variable domain of TCR clone 8978 (TRAV12-2, TRAJ13)
CAVKKTGGYQKVTF

SEQ ID NO: 17956 - protein, 15 aa, Homo sapiens
  CDR3 for beta chain variable domain of TCR clone 8978 (TRBV20-1, TRBJ1-1)
CSASWDRFLNTEAFF

SEQ ID NO: 17957 - protein, 14 aa, Homo sapiens
  CDR3 for alpha chain variable domain of TCR clone 8979 (TRAV12-3, TRAJ10)
SHLPLTGGGNKLTF

SEQ ID NO: 17958 - protein, 16 aa, Homo sapiens
  CDR3 for beta chain variable domain of TCR clone 8979 (TRBV5-1, TRBJ2-1)
CASSPWTSGEYNEQFF

SEQ ID NO: 17959 - protein, 16 aa, Homo sapiens
  CDR3 for alpha chain variable domain of TCR clone 8980 (TRAV21, TRAJ17)
CAVRPGEEAAGNKLTF

SEQ ID NO: 17960 - protein, 14 aa, Homo sapiens
  CDR3 for beta chain variable domain of TCR clone 8980 (TRBV3-1, TRBJ2-5)
CASSQGPDQETQYF

SEQ ID NO: 17961 - protein, 18 aa, Homo sapiens
  CDR3 for alpha chain variable domain of TCR clone 8981 (TRAV26-1, TRAJ44)
CIVRVAGGGISTASKLTF

SEQ ID NO: 17962 - protein, 12 aa, Homo sapiens
  CDR3 for beta chain variable domain of TCR clone 8981 (TRBV14, TRBJ2-7)
CASSRLKGEQYF

SEQ ID NO: 17963 - protein, 14 aa, Homo sapiens
  CDR3 for alpha chain variable domain of TCR clone 8982 (TRAV1-2, TRAJ16)
CAVNRFSDVQKLLF

SEQ ID NO: 17964 - protein, 15 aa, Homo sapiens
  CDR3 for beta chain variable domain of TCR clone 8982 (TRBV7-9, TRBJ1-6)
CASSSPGRGNSPLHF

SEQ ID NO: 17965 - protein, 14 aa, Homo sapiens
  CDR3 for alpha chain variable domain of TCR clone 8983 (TRAV12-2, TRAJ40)
CAVKIPSGTYKYIF

SEQ ID NO: 17966 - protein, 14 aa, Homo sapiens
  CDR3 for beta chain variable domain of TCR clone 8983 (TRBV20-1, TRBJ1-1)
CSAQTRIGGTEAFL

SEQ ID NO: 17967 - protein, 16 aa, Homo sapiens
  CDR3 for alpha chain variable domain of TCR clone 8984 (TRAV26-1, TRAJ3)
CCVLLHRQSSASKIIF

SEQ ID NO: 17968 - protein, 15 aa, Homo sapiens
  CDR3 for beta chain variable domain of TCR clone 8984 (TRBV3-1, TRBJ2-2)
CASSTTTGPTGELFF

SEQ ID NO: 17969 - protein, 14 aa, Homo sapiens
  CDR3 for alpha chain variable domain of TCR clone 8985 (TRAV3, TRAJ9)
CAVRLNTGGFKTIF

SEQ ID NO: 17970 - protein, 15 aa, Homo sapiens
  CDR3 for beta chain variable domain of TCR clone 8985 (TRBV7-2, TRBJ1-2)
CASSLARRSIYGYTF

SEQ ID NO: 17971 - protein, 12 aa, Homo sapiens
  CDR3 for alpha chain variable domain of TCR clone 8986 (TRAV12-3, TRAJ17)
GAMTLTGNKLTF

SEQ ID NO: 17972 - protein, 15 aa, Homo sapiens
  CDR3 for beta chain variable domain of TCR clone 8986 (TRBV20-1, TRBJ2-7)
CSARDRVSGMDEQYF

SEQ ID NO: 17973 - protein, 13 aa, Homo sapiens
  CDR3 for alpha chain variable domain of TCR clone 8987 (TRAV8-3, TRAJ21)
CAVGLDNFNKFYF

SEQ ID NO: 17974 - protein, 15 aa, Homo sapiens
  CDR3 for beta chain variable domain of TCR clone 8987 (TRBV27, TRBJ2-1)
CASSNGGGSSNEQFF

SEQ ID NO: 17975 - protein, 16 aa, Homo sapiens
  CDR3 for alpha chain variable domain of TCR clone 8988 (TRAV30, TRAJ24)
CGTEIVDADSWGKFQF

SEQ ID NO: 17976 - protein, 16 aa, Homo sapiens
  CDR3 for beta chain variable domain of TCR clone 8988 (TRBV19, TRBJ2-1)
CASSKAGPSSYNEQFF

SEQ ID NO: 17977 - protein, 14 aa, Homo sapiens
  CDR3 for alpha chain variable domain of TCR clone 8989 (TRAV2, TRAJ29)
CAGPFQYGNTPLVF

SEQ ID NO: 17978 - protein, 14 aa, Homo sapiens
  CDR3 for beta chain variable domain of TCR clone 8989 (TRBV7-2, TRBJ2-5)
CQQLKEQGRETQYF

SEQ ID NO: 17979 - protein, 14 aa, Homo sapiens
  CDR3 for alpha chain variable domain of TCR clone 8990 (TRAV20, TRAJ42)
CCAADGGSQGNLIF

SEQ ID NO: 17980 - protein, 15 aa, Homo sapiens
  CDR3 for beta chain variable domain of TCR clone 8990 (TRBV12-4, TRBJ1-3)
CASTPGRRSGNTIYF

SEQ ID NO: 17981 - protein, 14 aa, Homo sapiens
  CDR3 for alpha chain variable domain of TCR clone 8991 (TRAV8-3, TRAJ26)
CAVAPGNYGQNFVF

SEQ ID NO: 17982 - protein, 16 aa, Homo sapiens
  CDR3 for beta chain variable domain of TCR clone 8991 (TRBV3-1, TRBJ2-1)
CASSQVGGTSYNEQFF

SEQ ID NO: 17983 - protein, 14 aa, Homo sapiens
  CDR3 for alpha chain variable domain of TCR clone 8992 (TRAV12-2, TRAJ13)
CAVKKTGGYQKVTF

SEQ ID NO: 17984 - protein, 20 aa, Homo sapiens
  CDR3 for beta chain variable domain of TCR clone 8992 (TRBV7-8, TRBJ2-2)
CASSHLFPGPTIHITGELFF

SEQ ID NO: 17985 - protein, 17 aa, Homo sapiens
  CDR3 for alpha chain variable domain of TCR clone 8993 (TRAV23/DV6, TRAJ58)
CAARLLRGETSGSRLTF

SEQ ID NO: 17986 - protein, 14 aa, Homo sapiens
  CDR3 for beta chain variable domain of TCR clone 8993 (TRBV7-3, TRBJ2-1)
CASSLAGGTNEQFF

SEQ ID NO: 17987 - protein, 13 aa, Homo sapiens
  CDR3 for alpha chain variable domain of TCR clone 8994 (TRAV2, TRAJ40)
CAVVTSGTYKYIF

SEQ ID NO: 17988 - protein, 13 aa, Homo sapiens
  CDR3 for beta chain variable domain of TCR clone 8994 (TRBV19, TRBJ1-2)
CASSVPGQDGYTF

SEQ ID NO: 17989 - protein, 13 aa, Homo sapiens
  CDR3 for alpha chain variable domain of TCR clone 8995 (TRAV2, TRAJ40)
CAVVTSGTYKYIF

SEQ ID NO: 17990 - protein, 14 aa, Homo sapiens
  CDR3 for beta chain variable domain of TCR clone 8995 (TRBV19, TRBJ2-1)
CARPTFVLSGEQFF

SEQ ID NO: 17991 - protein, 15 aa, Homo sapiens
  CDR3 for alpha chain variable domain of TCR clone 8996 (TRAV27, TRAJ38)
CAARRNAGNNRKLIW

SEQ ID NO: 17992 - protein, 13 aa, Homo sapiens
  CDR3 for beta chain variable domain of TCR clone 8996 (TRBV12-5, TRBJ2-3)
CASGDRQSDTQYL

SEQ ID NO: 17993 - protein, 18 aa, Homo sapiens
  CDR3 for alpha chain variable domain of TCR clone 8997 (TRAV12-3, TRAJ52)
CAMSVGGAGGTSYGKLTF

SEQ ID NO: 17994 - protein, 15 aa, Homo sapiens
  CDR3 for beta chain variable domain of TCR clone 8997 (TRBV6-3, TRBJ2-7)
CASSSPGTVFYEQYF

SEQ ID NO: 17995 - protein, 12 aa, Homo sapiens
  CDR3 for alpha chain variable domain of TCR clone 8998 (TRAV38-1, TRAJ20)
CAFIWNDYKLSF

SEQ ID NO: 17996 - protein, 11 aa, Homo sapiens
  CDR3 for beta chain variable domain of TCR clone 8998 (TRBV29-1, TRBJ2-5)
CSEDRTGTQYF

SEQ ID NO: 17997 - protein, 15 aa, Homo sapiens
  CDR3 for alpha chain variable domain of TCR clone 8999 (TRAV29/DV5, TRAJ8)
CAASGRNTGFQKLVF

SEQ ID NO: 17998 - protein, 13 aa, Homo sapiens
  CDR3 for beta chain variable domain of TCR clone 8999 (TRBV2, TRBJ2-3)
CASIIPASDTQYF

SEQ ID NO: 17999 - protein, 13 aa, Homo sapiens
  CDR3 for alpha chain variable domain of TCR clone 9000 (TRAV22, TRAJ29)
FAVGGSGNTPLVF

SEQ ID NO: 18000 - protein, 13 aa, Homo sapiens
  CDR3 for beta chain variable domain of TCR clone 9000 (TRBV4-2, TRBJ1-1)
CASSQAGNTEAFF

SEQ ID NO: 18001 - protein, 14 aa, Homo sapiens
  CDR3 for alpha chain variable domain of TCR clone 9001 (TRAV3, TRAJ9)
CAVRLNTGGSKTIF

SEQ ID NO: 18002 - protein, 15 aa, Homo sapiens
  CDR3 for beta chain variable domain of TCR clone 9001 (TRBV7-2, TRBJ2-1)
CASSLASGRVNEQFF

SEQ ID NO: 18003 - protein, 16 aa, Homo sapiens
  CDR3 for alpha chain variable domain of TCR clone 9002 (TRAV3, TRAJ10)
CAVRDMNAGGGNKLTF

SEQ ID NO: 18004 - protein, 15 aa, Homo sapiens
  CDR3 for beta chain variable domain of TCR clone 9002 (TRBV9, TRBJ1-6)
CASSVAGTGDSPLHF

SEQ ID NO: 18005 - protein, 18 aa, Homo sapiens
  CDR3 for alpha chain variable domain of TCR clone 9003 (TRAV21, TRAJ52)
CAVRPSPAGGTSYGKLTF

SEQ ID NO: 18006 - protein, 14 aa, Homo sapiens
  CDR3 for beta chain variable domain of TCR clone 9003 (TRBV25-1, TRBJ1-1)
CASTHLGGNTEAFF

SEQ ID NO: 18007 - protein, 13 aa, Homo sapiens
  CDR3 for alpha chain variable domain of TCR clone 9004 (TRAV17, TRAJ5)
CATDARGRRALTF

SEQ ID NO: 18008 - protein, 13 aa, Homo sapiens
  CDR3 for beta chain variable domain of TCR clone 9004 (TRBV12-4, TRBJ2-3)
CASSLGAVDTQYF

SEQ ID NO: 18009 - protein, 15 aa, Homo sapiens
  CDR3 for alpha chain variable domain of TCR clone 9005 (TRAV21, TRAJ53)
CATLNSGGSNYKLTF

SEQ ID NO: 18010 - protein, 15 aa, Homo sapiens
  CDR3 for beta chain variable domain of TCR clone 9005 (TRBV7-2, TRBJ2-1)
CASSSGLAGGNEQFF

SEQ ID NO: 18011 - protein, 13 aa, Homo sapiens
  CDR3 for alpha chain variable domain of TCR clone 9006 (TRAV23/DV6, TRAJ27)
CAASKPMQANQPL

SEQ ID NO: 18012 - protein, 12 aa, Homo sapiens
  CDR3 for beta chain variable domain of TCR clone 9006 (TRBV12-4, TRBJ2-7)
CASSLGGYEQYF

SEQ ID NO: 18013 - protein, 11 aa, Homo sapiens
  CDR3 for alpha chain variable domain of TCR clone 9007 (TRAV35, TRAJ34)
CWARNTDKLIF

SEQ ID NO: 18014 - protein, 13 aa, Homo sapiens
  CDR3 for beta chain variable domain of TCR clone 9007 (TRBV10-3, TRBJ2-7)
CASKLAVNYEQYF

SEQ ID NO: 18015 - protein, 16 aa, Homo sapiens
  CDR3 for alpha chain variable domain of TCR clone 9008 (TRAV12-3, TRAJ53)
CAMSPGSGGSNYKLTF

SEQ ID NO: 18016 - protein, 11 aa, Homo sapiens
  CDR3 for beta chain variable domain of TCR clone 9008 (TRBV29-1, TRBJ2-5)
CSEDRTGNQYF

SEQ ID NO: 18017 - protein, 12 aa, Homo sapiens
  CDR3 for alpha chain variable domain of TCR clone 9009 (TRAV8-4, TRAJ43)
CAVSVNNNDMRF

SEQ ID NO: 18018 - protein, 18 aa, Homo sapiens
  CDR3 for beta chain variable domain of TCR clone 9009 (TRBV5-7, TRBJ2-2)
CASSLGASGGLNTGELFF

SEQ ID NO: 18019 - protein, 11 aa, Homo sapiens
  CDR3 for alpha chain variable domain of TCR clone 9010 (TRAV1-2, TRAJ8)
CAVSSFQKLVF

SEQ ID NO: 18020 - protein, 19 aa, Homo sapiens
  CDR3 for beta chain variable domain of TCR clone 9010 (TRBV7-2, TRBJ2-5)
CASGTSGGTPPLGSETQYF

SEQ ID NO: 18021 - protein, 13 aa, Homo sapiens
  CDR3 for alpha chain variable domain of TCR clone 9011 (TRAV1-2, TRAJ9)
CAALNTGGFETIF

SEQ ID NO: 18022 - protein, 13 aa, Homo sapiens
  CDR3 for beta chain variable domain of TCR clone 9011 (TRBV19, TRBJ1-2)
CASSVPGQDGYTF

SEQ ID NO: 18023 - protein, 15 aa, Homo sapiens
  CDR3 for alpha chain variable domain of TCR clone 9012 (TRAV2, TRAJ9)
CAVEDRGTGGFKTIS

SEQ ID NO: 18024 - protein, 16 aa, Homo sapiens
  CDR3 for beta chain variable domain of TCR clone 9012 (TRBV24-1, TRBJ2-3)
CATSDPGTGATDTQYF

SEQ ID NO: 18025 - protein, 14 aa, Homo sapiens
  CDR3 for alpha chain variable domain of TCR clone 9013 (TRAV6, TRAJ17)
CALDIEAAGNKLTF

SEQ ID NO: 18026 - protein, 17 aa, Homo sapiens
  CDR3 for beta chain variable domain of TCR clone 9013 (TRBV2, TRBJ1-5)
CASSVGTGMRGYQPQHF

SEQ ID NO: 18027 - protein, 13 aa, Homo sapiens
  CDR3 for alpha chain variable domain of TCR clone 9014 (TRAV3, TRAJ21)
CAVREPDFNKFYF

SEQ ID NO: 18028 - protein, 14 aa, Homo sapiens
  CDR3 for beta chain variable domain of TCR clone 9014 (TRBV5-5, TRBJ1-2)
CASSLDPYNYGYTF

SEQ ID NO: 18029 - protein, 14 aa, Homo sapiens
  CDR3 for alpha chain variable domain of TCR clone 9015 (TRAV3, TRAJ6)
CAVRDPWGSYIPTF

SEQ ID NO: 18030 - protein, 15 aa, Homo sapiens
  CDR3 for beta chain variable domain of TCR clone 9015 (TRBV19, TRBJ1-6)
CASSTQGAVGSPLHF

SEQ ID NO: 18031 - protein, 16 aa, Homo sapiens
  CDR3 for alpha chain variable domain of TCR clone 9016 (TRAV12-3, TRAJ53)
CAMSPGSGGSSYKLTF

SEQ ID NO: 18032 - protein, 11 aa, Homo sapiens
  CDR3 for beta chain variable domain of TCR clone 9016 (TRBV29-1, TRBJ2-5)
CSEDRTGTQYF

SEQ ID NO: 18033 - protein, 15 aa, Homo sapiens
  CDR3 for alpha chain variable domain of TCR clone 9017 (TRAV26-1, TRAJ44)
CIVRANIGTASKLTF

SEQ ID NO: 18034 - protein, 12 aa, Homo sapiens
  CDR3 for beta chain variable domain of TCR clone 9017 (TRBV2, TRBJ2-1)
GRGLPSYNEQFF

SEQ ID NO: 18035 - protein, 14 aa, Homo sapiens
  CDR3 for alpha chain variable domain of TCR clone 9018 (TRAV12-3, TRAJ43)
CAMSLGGAGTRLTV

SEQ ID NO: 18036 - protein, 16 aa, Homo sapiens
  CDR3 for beta chain variable domain of TCR clone 9018 (TRBV24-1, TRBJ2-1)
CATSGVTGANYNEQFF

SEQ ID NO: 18037 - protein, 13 aa, Homo sapiens
  CDR3 for alpha chain variable domain of TCR clone 9019 (TRAV21, TRAJ27)
CAARPGNAGKSTF

SEQ ID NO: 18038 - protein, 14 aa, Homo sapiens
  CDR3 for beta chain variable domain of TCR clone 9019 (TRBV7-6, TRBJ2-3)
CASSLGTVTDMQYF

SEQ ID NO: 18039 - protein, 16 aa, Homo sapiens
  CDR3 for alpha chain variable domain of TCR clone 9020 (TRAV12-3, TRAJ53)
CAMSPGSGGSNYKLTF

SEQ ID NO: 18040 - protein, 17 aa, Homo sapiens
  CDR3 for beta chain variable domain of TCR clone 9020 (TRBV28, TRBJ2-7)
CASSPLRGRRWKGGQYF

SEQ ID NO: 18041 - protein, 13 aa, Homo sapiens
  CDR3 for alpha chain variable domain of TCR clone 9021 (TRAV9-2, TRAJ5)
CAPPDTGRRALTF

SEQ ID NO: 18042 - protein, 12 aa, Homo sapiens
  CDR3 for beta chain variable domain of TCR clone 9021 (TRBV2, TRBJ2-7)
CASKRGSYEQYF

SEQ ID NO: 18043 - protein, 16 aa, Homo sapiens
  CDR3 for alpha chain variable domain of TCR clone 9022 (TRAV20, TRAJ22)
CAVQASSSGSARQLTF

SEQ ID NO: 18044 - protein, 12 aa, Homo sapiens
  CDR3 for beta chain variable domain of TCR clone 9022 (TRBV11-2, TRBJ2-7)
CASSLPTYEQYF

SEQ ID NO: 18045 - protein, 17 aa, Homo sapiens
  CDR3 for alpha chain variable domain of TCR clone 9023 (TRAV3, TRAJ42)
CAVRDRDYGGSQGNLIF

SEQ ID NO: 18046 - protein, 15 aa, Homo sapiens
  CDR3 for beta chain variable domain of TCR clone 9023 (TRBV7-2, TRBJ2-7)
CASSWGQGAIYEQYF

SEQ ID NO: 18047 - protein, 11 aa, Homo sapiens
  CDR3 for alpha chain variable domain of TCR clone 9024 (TRAV3, TRAJ21)
CAVGNFNTFYF

SEQ ID NO: 18048 - protein, 16 aa, Homo sapiens
  CDR3 for beta chain variable domain of TCR clone 9024 (TRBV19, TRBJ2-1)
CASSKAGPSSYNEQFF

SEQ ID NO: 18049 - protein, 18 aa, Homo sapiens
  CDR3 for alpha chain variable domain of TCR clone 9025 (TRAV26-1, TRAJ23)
CIVRVGLEVWNQGGKLIF

SEQ ID NO: 18050 - protein, 13 aa, Homo sapiens
  CDR3 for beta chain variable domain of TCR clone 9025 (TRBV7-2, TRBJ2-2)
CASSLAVTGELFF

SEQ ID NO: 18051 - protein, 10 aa, Homo sapiens
  CDR3 for alpha chain variable domain of TCR clone 9026 (TRAV21, TRAJ49)
CAVNGNQFYF

SEQ ID NO: 18052 - protein, 14 aa, Homo sapiens
  CDR3 for beta chain variable domain of TCR clone 9026 (TRBV18, TRBJ1-2)
CASSPSGRDYGYTF

SEQ ID NO: 18053 - protein, 15 aa, Homo sapiens
  CDR3 for alpha chain variable domain of TCR clone 9027 (TRAV21, TRAJ53)
CATLNSGGSNYKLTF

SEQ ID NO: 18054 - protein, 13 aa, Homo sapiens
  CDR3 for beta chain variable domain of TCR clone 9027 (TRBV4-2, TRBJ1-1)
CASSQAGNTEAFF

SEQ ID NO: 18055 - protein, 14 aa, Homo sapiens
  CDR3 for alpha chain variable domain of TCR clone 9028 (TRAV38-2/DV8, TRAJ49)
CAYRSPNTGNQFYF

SEQ ID NO: 18056 - protein, 14 aa, Homo sapiens
  CDR3 for beta chain variable domain of TCR clone 9028 (TRBV28, TRBJ1-1)
CASSSEQGYTEAFF

SEQ ID NO: 18057 - protein, 16 aa, Homo sapiens
  CDR3 for alpha chain variable domain of TCR clone 9029 (TRAV3, TRAJ37)
CAVRGRGSGNTGKLIF

SEQ ID NO: 18058 - protein, 13 aa, Homo sapiens
  CDR3 for beta chain variable domain of TCR clone 9029 (TRBV14, TRBJ2-7)
CASSQDRRYEQYF

SEQ ID NO: 18059 - protein, 13 aa, Homo sapiens
  CDR3 for alpha chain variable domain of TCR clone 9030 (TRAV8-3, TRAJ36)
CAVGATGANNLFF

SEQ ID NO: 18060 - protein, 13 aa, Homo sapiens
  CDR3 for beta chain variable domain of TCR clone 9030 (TRBV12-4, TRBJ1-2)
CASSLRQGKGCTF

SEQ ID NO: 18061 - protein, 11 aa, Homo sapiens
  CDR3 for alpha chain variable domain of TCR clone 9031 (TRAV3, TRAJ21)
CAVDNFNKFYF

SEQ ID NO: 18062 - protein, 16 aa, Homo sapiens
  CDR3 for beta chain variable domain of TCR clone 9031 (TRBV19, TRBJ2-1)
CASSKAGPSSYNEQFF

SEQ ID NO: 18063 - protein, 15 aa, Homo sapiens
  CDR3 for alpha chain variable domain of TCR clone 9032 (TRAV3, TRAJ20)
CAVRDIKLSDYKLSF

SEQ ID NO: 18064 - protein, 15 aa, Homo sapiens
  CDR3 for beta chain variable domain of TCR clone 9032 (TRBV7-9, TRBJ1-6)
CASSSPGRGNSTLHF

SEQ ID NO: 18065 - protein, 16 aa, Homo sapiens
  CDR3 for alpha chain variable domain of TCR clone 9033 (TRAV30, TRAJ24)
CGTESVDADSWGKFQF

SEQ ID NO: 18066 - protein, 14 aa, Homo sapiens
  CDR3 for beta chain variable domain of TCR clone 9033 (TRBV12-5, TRBJ2-5)
CASGSRTHQETQYF

SEQ ID NO: 18067 - protein, 12 aa, Homo sapiens
  CDR3 for alpha chain variable domain of TCR clone 9034 (TRAV1-2, TRAJ29)
CAVRNLNTPLVF

SEQ ID NO: 18068 - protein, 15 aa, Homo sapiens
  CDR3 for beta chain variable domain of TCR clone 9034 (TRBV27, TRBJ2-3)
CASSLGLAGPDTQYF

SEQ ID NO: 18069 - protein, 12 aa, Homo sapiens
  CDR3 for alpha chain variable domain of TCR clone 9035 (TRAV36/DV7, TRAJ54)
CAVVRGAQKLVF

SEQ ID NO: 18070 - protein, 13 aa, Homo sapiens
  CDR3 for beta chain variable domain of TCR clone 9035 (TRBV7-3, TRBJ1-1)
CQQLKGGNTEAFF

SEQ ID NO: 18071 - protein, 12 aa, Homo sapiens
  CDR3 for alpha chain variable domain of TCR clone 9036 (TRAV13-2, TRAJ23)
CAERHRGGKLIF

SEQ ID NO: 18072 - protein, 15 aa, Homo sapiens
  CDR3 for beta chain variable domain of TCR clone 9036 (TRBV7-6, TRBJ2-1)
CASSPGQGPYNEQFF

SEQ ID NO: 18073 - protein, 10 aa, Homo sapiens
  CDR3 for alpha chain variable domain of TCR clone 9037 (TRAV8-1, TRAJ21)
CAVNGAKFYF

SEQ ID NO: 18074 - protein, 16 aa, Homo sapiens
  CDR3 for beta chain variable domain of TCR clone 9037 (TRBV7-2, TRBJ1-5)
CASSPWGPEGNQPQHF

SEQ ID NO: 18075 - protein, 14 aa, Homo sapiens
  CDR3 for alpha chain variable domain of TCR clone 9038 (TRAV36/DV7, TRAJ40)
CAVETTSGTYKYIF

SEQ ID NO: 18076 - protein, 13 aa, Homo sapiens
  CDR3 for beta chain variable domain of TCR clone 9038 (TRBV10-3, TRBJ2-5)
CAMTSGARETQYF

SEQ ID NO: 18077 - protein, 14 aa, Homo sapiens
  CDR3 for alpha chain variable domain of TCR clone 9039 (TRAV12-1, TRAJ28)
CVAISGAGSYQLTF

SEQ ID NO: 18078 - protein, 15 aa, Homo sapiens
  CDR3 for beta chain variable domain of TCR clone 9039 (TRBV11-3, TRBJ2-3)
CASLKDGREGDTQYF

SEQ ID NO: 18079 - protein, 15 aa, Homo sapiens
  CDR3 for alpha chain variable domain of TCR clone 9040 (TRAV12-2, TRAJ53)
CAVNGGGGSNYKLTF

SEQ ID NO: 18080 - protein, 16 aa, Homo sapiens
  CDR3 for beta chain variable domain of TCR clone 9040 (TRBV6-1, TRBJ1-2)
CASSGAWQGRSHGYTF

SEQ ID NO: 18081 - protein, 14 aa, Homo sapiens
  CDR3 for alpha chain variable domain of TCR clone 9041 (TRAV13-1, TRAJ35)
CAASNGGFGNVLHC

SEQ ID NO: 18082 - protein, 13 aa, Homo sapiens
  CDR3 for beta chain variable domain of TCR clone 9041 (TRBV7-3, TRBJ1-1)
CASSQDWGAEAFF

SEQ ID NO: 18083 - protein, 16 aa, Homo sapiens
  CDR3 for alpha chain variable domain of TCR clone 9042 (TRAV30, TRAJ24)
CGTEIVNADSWGKFQF

SEQ ID NO: 18084 - protein, 14 aa, Homo sapiens
  CDR3 for beta chain variable domain of TCR clone 9042 (TRBV12-5, TRBJ2-5)
CASGSRTHQETQYF

SEQ ID NO: 18085 - protein, 14 aa, Homo sapiens
  CDR3 for alpha chain variable domain of TCR clone 9043 (TRAV12-1, TRAJ10)
CVVNLAGGGNKLTF

SEQ ID NO: 18086 - protein, 14 aa, Homo sapiens
  CDR3 for beta chain variable domain of TCR clone 9043 (TRBV12-4, TRBJ1-1)
CASSLGTGGTEAFF

SEQ ID NO: 18087 - protein, 12 aa, Homo sapiens
  CDR3 for alpha chain variable domain of TCR clone 9044 (TRAV5, TRAJ9)
CAGNTGGFKTIF

SEQ ID NO: 18088 - protein, 15 aa, Homo sapiens
  CDR3 for beta chain variable domain of TCR clone 9044 (TRBV13, TRBJ1-2)
CASSLGRQPGYGYTF

SEQ ID NO: 18089 - protein, 12 aa, Homo sapiens
  CDR3 for alpha chain variable domain of TCR clone 9045 (TRAV2, TRAJ9)
CAVGAGGFKTIF

SEQ ID NO: 18090 - protein, 19 aa, Homo sapiens
  CDR3 for beta chain variable domain of TCR clone 9045 (TRBV7-9, TRBJ2-6)
CASSLESATVLPGANVLTF

SEQ ID NO: 18091 - protein, 14 aa, Homo sapiens
  CDR3 for alpha chain variable domain of TCR clone 9046 (TRAV1-2, TRAJ16)
CAVNRFSDGQKLLF

SEQ ID NO: 18092 - protein, 16 aa, Homo sapiens
  CDR3 for beta chain variable domain of TCR clone 9046 (TRBV4-1, TRBJ2-3)
CASSQSTSGAEDTQYF

SEQ ID NO: 18093 - protein, 15 aa, Homo sapiens
  CDR3 for alpha chain variable domain of TCR clone 9047 (TRAV3, TRAJ5)
CAVRDLDTGRRALPF

SEQ ID NO: 18094 - protein, 13 aa, Homo sapiens
  CDR3 for beta chain variable domain of TCR clone 9047 (TRBV12-4, TRBJ2-7)
CASSPTETYEQYF

SEQ ID NO: 18095 - protein, 14 aa, Homo sapiens
  CDR3 for alpha chain variable domain of TCR clone 9048 (TRAV12-2, TRAJ13)
CAVKKTGGYQKVTF

SEQ ID NO: 18096 - protein, 15 aa, Homo sapiens
  CDR3 for beta chain variable domain of TCR clone 9048 (TRBV27, TRBJ2-1)
CASSNGGGSSDEQFF

SEQ ID NO: 18097 - protein, 14 aa, Homo sapiens
  CDR3 for alpha chain variable domain of TCR clone 9049 (TRAV1-2, TRAJ8)
CAVREDTGFQKLVF

SEQ ID NO: 18098 - protein, 14 aa, Homo sapiens
  CDR3 for beta chain variable domain of TCR clone 9049 (TRBV6-1, TRBJ1-3)
CASVQGGGGNTIYF

SEQ ID NO: 18099 - protein, 13 aa, Homo sapiens
  CDR3 for alpha chain variable domain of TCR clone 9050 (TRAV3, TRAJ27)
CAVRPLGAGKSTF

SEQ ID NO: 18100 - protein, 13 aa, Homo sapiens
  CDR3 for beta chain variable domain of TCR clone 9050 (TRBV7-9, TRBJ2-3)
CAGSPGSTDTQYF

SEQ ID NO: 18101 - protein, 14 aa, Homo sapiens
  CDR3 for alpha chain variable domain of TCR clone 9051 (TRAV26-1, TRAJ34)
CIVIVAYNTDKLIF

SEQ ID NO: 18102 - protein, 15 aa, Homo sapiens
  CDR3 for beta chain variable domain of TCR clone 9051 (TRBV20-1, TRBJ2-7)
CSARVPAAYFYEQYF

SEQ ID NO: 18103 - protein, 14 aa, Homo sapiens
  CDR3 for alpha chain variable domain of TCR clone 9052 (TRAV12-3, TRAJ10)
SHLPLTGGGNKLTF

SEQ ID NO: 18104 - protein, 14 aa, Homo sapiens
  CDR3 for beta chain variable domain of TCR clone 9052 (TRBV4-1, TRBJ2-2)
CASSQAVNTGELFF

SEQ ID NO: 18105 - protein, 13 aa, Homo sapiens
  CDR3 for alpha chain variable domain of TCR clone 9053 (TRAV3, TRAJ21)
CAVREPDFNKFYF

SEQ ID NO: 18106 - protein, 16 aa, Homo sapiens
  CDR3 for beta chain variable domain of TCR clone 9053 (TRBV12-4, TRBJ2-1)
CASSAVGQGNGDEQFF

SEQ ID NO: 18107 - protein, 15 aa, Homo sapiens
  CDR3 for alpha chain variable domain of TCR clone 9054 (TRAV12-3, TRAJ6)
CAMSPASGGSYIPTF

SEQ ID NO: 18108 - protein, 16 aa, Homo sapiens
  CDR3 for beta chain variable domain of TCR clone 9054 (TRBV10-3, TRBJ1-2)
CAISDKVSGPFYGYTF

SEQ ID NO: 18109 - protein, 11 aa, Homo sapiens
  CDR3 for alpha chain variable domain of TCR clone 9055 (TRAV12-2, TRAJ29)
CAVTLRSPLVF

SEQ ID NO: 18110 - protein, 16 aa, Homo sapiens
  CDR3 for beta chain variable domain of TCR clone 9055 (TRBV19, TRBJ1-5)
CASSIDRGGPRQPQHL

SEQ ID NO: 18111 - protein, 17 aa, Homo sapiens
  CDR3 for alpha chain variable domain of TCR clone 9056 (TRAV3, TRAJ6)
CAVRDGPRAGGSYIPTF

SEQ ID NO: 18112 - protein, 15 aa, Homo sapiens
  CDR3 for beta chain variable domain of TCR clone 9056 (TRBV4-1, TRBJ1-4)
CASSDTGGTNEKLFF

SEQ ID NO: 18113 - protein, 14 aa, Homo sapiens
  CDR3 for alpha chain variable domain of TCR clone 9057 (TRAV12-2, TRAJ13)
CAVQKTGGYQKVTF

SEQ ID NO: 18114 - protein, 15 aa, Homo sapiens
  CDR3 for beta chain variable domain of TCR clone 9057 (TRBV27, TRBJ2-1)
CASSNGGGSSNEQFF

SEQ ID NO: 18115 - protein, 15 aa, Homo sapiens
  CDR3 for alpha chain variable domain of TCR clone 9058 (TRAV26-1, TRAJ40)
CIVRAVPSGTYKYIF

SEQ ID NO: 18116 - protein, 14 aa, Homo sapiens
  CDR3 for beta chain variable domain of TCR clone 9058 (TRBV5-1, TRBJ2-7)
CASSRGESLYEQYF

SEQ ID NO: 18117 - protein, 13 aa, Homo sapiens
  CDR3 for alpha chain variable domain of TCR clone 9059 (TRAV8-4, TRAJ10)
CAAFTGGGNKLTF

SEQ ID NO: 18118 - protein, 12 aa, Homo sapiens
  CDR3 for beta chain variable domain of TCR clone 9059 (TRBV12-5, TRBJ2-5)
CASGQGVETQYF

SEQ ID NO: 18119 - protein, 14 aa, Homo sapiens
  CDR3 for alpha chain variable domain of TCR clone 9060 (TRAV12-2, TRAJ13)
CAVKKTGGYQKVTF

SEQ ID NO: 18120 - protein, 13 aa, Homo sapiens
  CDR3 for beta chain variable domain of TCR clone 9060 (TRBV7-2, TRBJ2-5)
CASSQTSVETQYF

SEQ ID NO: 18121 - protein, 15 aa, Homo sapiens
  CDR3 for alpha chain variable domain of TCR clone 9061 (TRAV9-2, TRAJ9)
CALSLTNTGGFKTIF

SEQ ID NO: 18122 - protein, 13 aa, Homo sapiens
  CDR3 for beta chain variable domain of TCR clone 9061 (TRBV7-3, TRBJ2-5)
CASSFRGGETQYF

SEQ ID NO: 18123 - protein, 13 aa, Homo sapiens
  CDR3 for alpha chain variable domain of TCR clone 9062 (TRAV10, TRAJ15)
CVVSGQAGTALIF

SEQ ID NO: 18124 - protein, 15 aa, Homo sapiens
  CDR3 for beta chain variable domain of TCR clone 9062 (TRBV6-1, TRBJ1-2)
CASSDTIDRGYGYTF

SEQ ID NO: 18125 - protein, 14 aa, Homo sapiens
  CDR3 for alpha chain variable domain of TCR clone 9063 (TRAV12-2, TRAJ13)
CAVKKTGGYQRVTF

SEQ ID NO: 18126 - protein, 15 aa, Homo sapiens
  CDR3 for beta chain variable domain of TCR clone 9063 (TRBV27, TRBJ2-1)
CASSNGGGSSNEQFF

SEQ ID NO: 18127 - protein, 17 aa, Homo sapiens
  CDR3 for alpha chain variable domain of TCR clone 9064 (TRAV3, TRAJ6)
CAVRDGPRAGGSYIPTI

SEQ ID NO: 18128 - protein, 14 aa, Homo sapiens
  CDR3 for beta chain variable domain of TCR clone 9064 (TRBV7-2, TRBJ2-7)
CASSPKTSFYEQYF

SEQ ID NO: 18129 - protein, 13 aa, Homo sapiens
  CDR3 for alpha chain variable domain of TCR clone 9065 (TRAV13-1, TRAJ43)
CAASKNNNNDMRF

SEQ ID NO: 18130 - protein, 17 aa, Homo sapiens
  CDR3 for beta chain variable domain of TCR clone 9065 (TRBV27, TRBJ2-6)
CASSLTGFASGANVLTF

SEQ ID NO: 18131 - protein, 12 aa, Homo sapiens
  CDR3 for alpha chain variable domain of TCR clone 9066 (TRAV2, TRAJ10)
CASTGGGNKLTF

SEQ ID NO: 18132 - protein, 14 aa, Homo sapiens
  CDR3 for beta chain variable domain of TCR clone 9066 (TRBV6-6, TRBJ2-3)
CASRLQREADTQYF

SEQ ID NO: 18133 - protein, 16 aa, Homo sapiens
  CDR3 for alpha chain variable domain of TCR clone 9067 (TRAV30, TRAJ24)
CGTEIVDADSLGKFQF

SEQ ID NO: 18134 - protein, 14 aa, Homo sapiens
  CDR3 for beta chain variable domain of TCR clone 9067 (TRBV12-5, TRBJ2-5)
CASGSRTHQETQYF

SEQ ID NO: 18135 - protein, 14 aa, Homo sapiens
  CDR3 for alpha chain variable domain of TCR clone 9068 (TRAV13-1, TRAJ39)
CAASKNNAGNMLTF

SEQ ID NO: 18136 - protein, 14 aa, Homo sapiens
  CDR3 for beta chain variable domain of TCR clone 9068 (TRBV20-1, TRBJ2-7)
CSAPELAGVGEQYF

SEQ ID NO: 18137 - protein, 16 aa, Homo sapiens
  CDR3 for alpha chain variable domain of TCR clone 9069 (TRAV12-1, TRAJ53)
CVATSVAGGSNYKLTF

SEQ ID NO: 18138 - protein, 16 aa, Homo sapiens
  CDR3 for beta chain variable domain of TCR clone 9069 (TRBV6-6, TRBJ2-3)
CASSYSHAGSTDTQYF

SEQ ID NO: 18139 - protein, 16 aa, Homo sapiens
  CDR3 for alpha chain variable domain of TCR clone 9070 (TRAV30, TRAJ24)
CGTEIVDADSWGKFQF

SEQ ID NO: 18140 - protein, 14 aa, Homo sapiens
  CDR3 for beta chain variable domain of TCR clone 9070 (TRBV4-1, TRBJ2-2)
CASSQAVNTGELFF

SEQ ID NO: 18141 - protein, 12 aa, Homo sapiens
  CDR3 for alpha chain variable domain of TCR clone 9071 (TRAV6, TRAJ20)
CALDRGDYKLSF

SEQ ID NO: 18142 - protein, 13 aa, Homo sapiens
  CDR3 for beta chain variable domain of TCR clone 9071 (TRBV5-1, TRBJ1-2)
CASSFQDGYGYTF

SEQ ID NO: 18143 - protein, 16 aa, Homo sapiens
  CDR3 for alpha chain variable domain of TCR clone 9072 (TRAV14/DV4, TRAJ15)
CAMREGSFQAGTALIF

SEQ ID NO: 18144 - protein, 18 aa, Homo sapiens
  CDR3 for beta chain variable domain of TCR clone 9072 (TRBV12-4, TRBJ2-4)
CASSRTGAVDVAKNIQYF

SEQ ID NO: 18145 - protein, 23 aa, Homo sapiens
  CDR3 for alpha chain variable domain of TCR clone 9073 (TRAV9-2, TRAJ4)
CQTQRCTSVLWVIRSGGYNKLIF

SEQ ID NO: 18146 - protein, 12 aa, Homo sapiens
  CDR3 for beta chain variable domain of TCR clone 9073 (TRBV11-2, TRBJ2-2)
CASSLGGGELFF

SEQ ID NO: 18147 - protein, 18 aa, Homo sapiens
  CDR3 for alpha chain variable domain of TCR clone 9074 (TRAV13-1, TRAJ52)
CAAKNPNAGGTSYGKLTF

SEQ ID NO: 18148 - protein, 15 aa, Homo sapiens
  CDR3 for beta chain variable domain of TCR clone 9074 (TRBV28, TRBJ2-5)
CASSSGRTIQETQYF

SEQ ID NO: 18149 - protein, 11 aa, Homo sapiens
  CDR3 for alpha chain variable domain of TCR clone 9075 (TRAV2, TRAJ23)
CAVETRGKLIF

SEQ ID NO: 18150 - protein, 14 aa, Homo sapiens
  CDR3 for beta chain variable domain of TCR clone 9075 (TRBV7-2, TRBJ2-7)
CASSPKTSFYEQYF

SEQ ID NO: 18151 - protein, 13 aa, Homo sapiens
  CDR3 for alpha chain variable domain of TCR clone 9076 (TRAV13-1, TRAJ23)
CAASTILGGKLIF

SEQ ID NO: 18152 - protein, 14 aa, Homo sapiens
  CDR3 for beta chain variable domain of TCR clone 9076 (TRBV19, TRBJ2-7)
CATSGLAGVYEQYF

SEQ ID NO: 18153 - protein, 14 aa, Homo sapiens
  CDR3 for alpha chain variable domain of TCR clone 9077 (TRAV12-2, TRAJ40)
CAVKIPSGTYKYIF

SEQ ID NO: 18154 - protein, 14 aa, Homo sapiens
  CDR3 for beta chain variable domain of TCR clone 9077 (TRBV6-1, TRBJ1-3)
CASVQGGGGNTIYF

SEQ ID NO: 18155 - protein, 13 aa, Homo sapiens
  CDR3 for alpha chain variable domain of TCR clone 9078 (TRAV21, TRAJ27)
CAARPGNAGKSTF

SEQ ID NO: 18156 - protein, 16 aa, Homo sapiens
  CDR3 for beta chain variable domain of TCR clone 9078 (TRBV20-1, TRBJ1-4)
CSAPGQGLLTNEKLFF

SEQ ID NO: 18157 - protein, 13 aa, Homo sapiens
  CDR3 for alpha chain variable domain of TCR clone 9079 (TRAV2, TRAJ40)
CAVVTSGTYKYIF

SEQ ID NO: 18158 - protein, 13 aa, Homo sapiens
  CDR3 for beta chain variable domain of TCR clone 9079 (TRBV10-2, TRBJ2-7)
CASGASGGYEQYF

SEQ ID NO: 18159 - protein, 12 aa, Homo sapiens
  CDR3 for alpha chain variable domain of TCR clone 9080 (TRAV13-1, TRAJ53)
AASGGSNYKLTF

SEQ ID NO: 18160 - protein, 11 aa, Homo sapiens
  CDR3 for beta chain variable domain of TCR clone 9080 (TRBV12-4, TRBJ2-2)
CASSSAGELFF

SEQ ID NO: 18161 - protein, 14 aa, Homo sapiens
  CDR3 for alpha chain variable domain of TCR clone 9081 (TRAV17, TRAJ39)
CATDPVRAGNMLTF

SEQ ID NO: 18162 - protein, 12 aa, Homo sapiens
  CDR3 for beta chain variable domain of TCR clone 9081 (TRBV2, TRBJ2-4)
CASQGDSGIQYF

SEQ ID NO: 18163 - protein, 16 aa, Homo sapiens
  CDR3 for alpha chain variable domain of TCR clone 9082 (TRAV25, TRAJ53)
CGVEGDSGGSNYKLTF

SEQ ID NO: 18164 - protein, 16 aa, Homo sapiens
  CDR3 for beta chain variable domain of TCR clone 9082 (TRBV4-1, TRBJ2-1)
CASSPYAGGHDNEQFF

SEQ ID NO: 18165 - protein, 17 aa, Homo sapiens
  CDR3 for alpha chain variable domain of TCR clone 9083 (TRAV12-3, TRAJ6)
CTMSARGGAGGSYIPTF

SEQ ID NO: 18166 - protein, 16 aa, Homo sapiens
  CDR3 for beta chain variable domain of TCR clone 9083 (TRBV9, TRBJ1-2)
CASSVEEKVSPYGYTF

SEQ ID NO: 18167 - protein, 14 aa, Homo sapiens
  CDR3 for alpha chain variable domain of TCR clone 9084 (TRAV14/DV4, TRAJ15)
CAMRRDQAGTALIF

SEQ ID NO: 18168 - protein, 16 aa, Homo sapiens
  CDR3 for beta chain variable domain of TCR clone 9084 (TRBV15, TRBJ2-3)
CATSRDLGIVADTQYF

SEQ ID NO: 18169 - protein, 14 aa, Homo sapiens
  CDR3 for alpha chain variable domain of TCR clone 9085 (TRAV9-2, TRAJ39)
CALYIYNAGNMLTF

SEQ ID NO: 18170 - protein, 16 aa, Homo sapiens
  CDR3 for beta chain variable domain of TCR clone 9085 (TRBV12-5, TRBJ2-5)
CASGPRTSGNQETQYF

SEQ ID NO: 18171 - protein, 15 aa, Homo sapiens
  CDR3 for alpha chain variable domain of TCR clone 9086 (TRAV8-3, TRAJ45)
CASSYSGGGADGRTF

SEQ ID NO: 18172 - protein, 13 aa, Homo sapiens
  CDR3 for beta chain variable domain of TCR clone 9086 (TRBV10-3, TRBJ2-7)
CASKLAVNYEQYF

SEQ ID NO: 18173 - protein, 14 aa, Homo sapiens
  CDR3 for alpha chain variable domain of TCR clone 9087 (TRAV8-1, TRAJ24)
CAVNAADSWGKLQF

SEQ ID NO: 18174 - protein, 16 aa, Homo sapiens
  CDR3 for beta chain variable domain of TCR clone 9087 (TRBV4-3, TRBJ2-1)
CASSPALDRGVNEQLF

SEQ ID NO: 18175 - protein, 17 aa, Homo sapiens
  CDR3 for alpha chain variable domain of TCR clone 9088 (TRAV17, TRAJ28)
CATDPRRGGAGRYQLTF

SEQ ID NO: 18176 - protein, 16 aa, Homo sapiens
  CDR3 for beta chain variable domain of TCR clone 9088 (TRBV25-1, TRBJ1-1)
CASSGDRDRGRIEAFF

SEQ ID NO: 18177 - protein, 14 aa, Homo sapiens
  CDR3 for alpha chain variable domain of TCR clone 9089 (TRAV12-1, TRAJ6)
CGEHCAGGSYIPTF

SEQ ID NO: 18178 - protein, 15 aa, Homo sapiens
  CDR3 for beta chain variable domain of TCR clone 9089 (TRBV18, TRBJ1-1)
CASSDRGTGDTEAFF

SEQ ID NO: 18179 - protein, 14 aa, Homo sapiens
  CDR3 for alpha chain variable domain of TCR clone 9090 (TRAV3, TRAJ17)
CAVRERSCRQQANF

SEQ ID NO: 18180 - protein, 17 aa, Homo sapiens
  CDR3 for beta chain variable domain of TCR clone 9090 (TRBV13, TRBJ2-3)
CASSLSRVAGGRNTQYF

SEQ ID NO: 18181 - protein, 14 aa, Homo sapiens
  CDR3 for alpha chain variable domain of TCR clone 9091 (TRAV41, TRAJ48)
CAVISNFGNEKLTF

SEQ ID NO: 18182 - protein, 15 aa, Homo sapiens
  CDR3 for beta chain variable domain of TCR clone 9091 (TRBV11-3, TRBJ2-2)
CASSYFSTGTGELFF

SEQ ID NO: 18183 - protein, 14 aa, Homo sapiens
  CDR3 for alpha chain variable domain of TCR clone 9092 (TRAV8-3, TRAJ27)
CAGGRNTNAGKSTF

SEQ ID NO: 18184 - protein, 16 aa, Homo sapiens
  CDR3 for beta chain variable domain of TCR clone 9092 (TRBV12-5, TRBJ2-5)
CASGPRTSGNQETQYF

SEQ ID NO: 18185 - protein, 13 aa, Homo sapiens
  CDR3 for alpha chain variable domain of TCR clone 9093 (TRAV13-2, TRAJ40)
CAELISGTYKYIF

SEQ ID NO: 18186 - protein, 13 aa, Homo sapiens
  CDR3 for beta chain variable domain of TCR clone 9093 (TRBV20-1, TRBJ2-5)
CSARGDYQETQYF

SEQ ID NO: 18187 - protein, 14 aa, Homo sapiens
  CDR3 for alpha chain variable domain of TCR clone 9094 (TRAV23/DV6, TRAJ40)
CAASLTSGTYKYIF

SEQ ID NO: 18188 - protein, 14 aa, Homo sapiens
  CDR3 for beta chain variable domain of TCR clone 9094 (TRBV5-1, TRBJ2-3)
CASSRGRGGGTQYF

SEQ ID NO: 18189 - protein, 12 aa, Homo sapiens
  CDR3 for alpha chain variable domain of TCR clone 9095 (TRAV25, TRAJ16)
CAGQQDGQKLLF

SEQ ID NO: 18190 - protein, 16 aa, Homo sapiens
  CDR3 for beta chain variable domain of TCR clone 9095 (TRBV19, TRBJ2-1)
CASSIQAGGSYNEQFF

SEQ ID NO: 18191 - protein, 14 aa, Homo sapiens
  CDR3 for alpha chain variable domain of TCR clone 9096 (TRAV24, TRAJ37)
CASDGSSNTGKLIF

SEQ ID NO: 18192 - protein, 15 aa, Homo sapiens
  CDR3 for beta chain variable domain of TCR clone 9096 (TRBV7-3, TRBJ2-2)
CASKANGANTGELFF

SEQ ID NO: 18193 - protein, 18 aa, Homo sapiens
  CDR3 for alpha chain variable domain of TCR clone 9097 (TRAV21, TRAJ52)
CAVRPSPAGGTSYGKLTS

SEQ ID NO: 18194 - protein, 17 aa, Homo sapiens
  CDR3 for beta chain variable domain of TCR clone 9097 (TRBV13, TRBJ2-3)
CASSLSRVAGGRNTQYF

SEQ ID NO: 18195 - protein, 18 aa, Homo sapiens
  CDR3 for alpha chain variable domain of TCR clone 9098 (TRAV13-1, TRAJ52)
CAASERSAGGTSYGKLTF

SEQ ID NO: 18196 - protein, 13 aa, Homo sapiens
  CDR3 for beta chain variable domain of TCR clone 9098 (TRBV12-4, TRBJ1-2)
CASSLRQGKGYTF

SEQ ID NO: 18197 - protein, 12 aa, Homo sapiens
  CDR3 for alpha chain variable domain of TCR clone 9099 (TRAV16, TRAJ29)
CALSLGNTPLVF

SEQ ID NO: 18198 - protein, 14 aa, Homo sapiens
  CDR3 for beta chain variable domain of TCR clone 9099 (TRBV7-2, TRBJ2-1)
CASSLAGSWYEQFF

SEQ ID NO: 18199 - protein, 15 aa, Homo sapiens
  CDR3 for alpha chain variable domain of TCR clone 9100 (TRAV3, TRAJ22)
CAVRDRGGSARQLTF

SEQ ID NO: 18200 - protein, 16 aa, Homo sapiens
  CDR3 for beta chain variable domain of TCR clone 9100 (TRBV9, TRBJ2-2)
CASSAMGKGNTGELFF

SEQ ID NO: 18201 - protein, 13 aa, Homo sapiens
  CDR3 for alpha chain variable domain of TCR clone 9101 (TRAV13-1, TRAJ33)
CAAWTDSNYQLIW

SEQ ID NO: 18202 - protein, 13 aa, Homo sapiens
  CDR3 for beta chain variable domain of TCR clone 9101 (TRBV20-1, TRBJ2-7)
CSARTSGNYEQYF

SEQ ID NO: 18203 - protein, 17 aa, Homo sapiens
  CDR3 for alpha chain variable domain of TCR clone 9102 (TRAV26-1, TRAJ53)
CIVRVDDSGGSNYKLTF

SEQ ID NO: 18204 - protein, 15 aa, Homo sapiens
  CDR3 for beta chain variable domain of TCR clone 9102 (TRBV7-9, TRBJ1-4)
CAGSRTGGFNEKLFF

SEQ ID NO: 18205 - protein, 10 aa, Homo sapiens
  CDR3 for alpha chain variable domain of TCR clone 9103 (TRAV13-2, TRAJ24)
TTDSWGKLQF

SEQ ID NO: 18206 - protein, 13 aa, Homo sapiens
  CDR3 for beta chain variable domain of TCR clone 9103 (TRBV29-1, TRBJ2-1)
CSVEGGRVNEQFF

SEQ ID NO: 18207 - protein, 15 aa, Homo sapiens
  CDR3 for alpha chain variable domain of TCR clone 9104 (TRAV3, TRAJ5)
CAVRDLATGRRALTF

SEQ ID NO: 18208 - protein, 13 aa, Homo sapiens
  CDR3 for beta chain variable domain of TCR clone 9104 (TRBV12-4, TRBJ2-7)
CASSPTETYEQYF

SEQ ID NO: 18209 - protein, 16 aa, Homo sapiens
  CDR3 for alpha chain variable domain of TCR clone 9105 (TRAV12-2, TRAJ6)
CAVRIQASGGSYIPTF

SEQ ID NO: 18210 - protein, 14 aa, Homo sapiens
  CDR3 for beta chain variable domain of TCR clone 9105 (TRBV2, TRBJ2-2)
CASSERRFTGELFF

SEQ ID NO: 18211 - protein, 15 aa, Homo sapiens
  CDR3 for alpha chain variable domain of TCR clone 9106 (TRAV8-3, TRAJ45)
CASSYSGGGADGLTF

SEQ ID NO: 18212 - protein, 13 aa, Homo sapiens
  CDR3 for beta chain variable domain of TCR clone 9106 (TRBV10-3, TRBJ2-7)
CASKPAVNYEQYF

SEQ ID NO: 18213 - protein, 18 aa, Homo sapiens
  CDR3 for alpha chain variable domain of TCR clone 9107 (TRAV21, TRAJ52)
CAVRPSPAGGTSYGKMTF

SEQ ID NO: 18214 - protein, 17 aa, Homo sapiens
  CDR3 for beta chain variable domain of TCR clone 9107 (TRBV13, TRBJ2-3)
CASSLSRVAGGRNTQYF

SEQ ID NO: 18215 - protein, 14 aa, Homo sapiens
  CDR3 for alpha chain variable domain of TCR clone 9108 (TRAV8-3, TRAJ33)
CAVGRMDSNYQLIW

SEQ ID NO: 18216 - protein, 15 aa, Homo sapiens
  CDR3 for beta chain variable domain of TCR clone 9108 (TRBV4-1, TRBJ1-1)
CASSQAPGLNTEAFF

SEQ ID NO: 18217 - protein, 16 aa, Homo sapiens
  CDR3 for alpha chain variable domain of TCR clone 9109 (TRAV30, TRAJ24)
CGTEIVDADSWGKFQF

SEQ ID NO: 18218 - protein, 15 aa, Homo sapiens
  CDR3 for beta chain variable domain of TCR clone 9109 (TRBV11-3, TRBJ2-3)
CASLKDGREGDTQYF

SEQ ID NO: 18219 - protein, 12 aa, Homo sapiens
  CDR3 for alpha chain variable domain of TCR clone 9110 (TRAV13-2, TRAJ23)
CAERHRGGKLIF

SEQ ID NO: 18220 - protein, 14 aa, Homo sapiens
  CDR3 for beta chain variable domain of TCR clone 9110 (TRBV20-1, TRBJ2-4)
CSASGRVGENIQYF

SEQ ID NO: 18221 - protein, 13 aa, Homo sapiens
  CDR3 for alpha chain variable domain of TCR clone 9111 (TRAV25, TRAJ44)
CAGGTGTASKLTF

SEQ ID NO: 18222 - protein, 16 aa, Homo sapiens
  CDR3 for beta chain variable domain of TCR clone 9111 (TRBV6-5, TRBJ2-6)
CASSQQGGAGANVLTF

SEQ ID NO: 18223 - protein, 14 aa, Homo sapiens
  CDR3 for alpha chain variable domain of TCR clone 9112 (TRAV17, TRAJ57)
CATDPQGGSEKLVF

SEQ ID NO: 18224 - protein, 14 aa, Homo sapiens
  CDR3 for beta chain variable domain of TCR clone 9112 (TRBV2, TRBJ1-1)
CASRSGTMNTEAFF

SEQ ID NO: 18225 - protein, 11 aa, Homo sapiens
  CDR3 for alpha chain variable domain of TCR clone 9113 (TRAV19, TRAJ33)
CARDSNYQLIW

SEQ ID NO: 18226 - protein, 17 aa, Homo sapiens
  CDR3 for beta chain variable domain of TCR clone 9113 (TRBV7-3, TRBJ2-3)
CASSLMKRMRGADTQYF

SEQ ID NO: 18227 - protein, 12 aa, Homo sapiens
  CDR3 for alpha chain variable domain of TCR clone 9114 (TRAV12-3, TRAJ17)
CAMTLTGNKLTF

SEQ ID NO: 18228 - protein, 13 aa, Homo sapiens
  CDR3 for beta chain variable domain of TCR clone 9114 (TRBV20-1, TRBJ1-1)
CSARGGGNTEAFF

SEQ ID NO: 18229 - protein, 15 aa, Homo sapiens
  CDR3 for alpha chain variable domain of TCR clone 9115 (TRAV19, TRAJ9)
CALSEARTGGFKTIF

SEQ ID NO: 18230 - protein, 15 aa, Homo sapiens
  CDR3 for beta chain variable domain of TCR clone 9115 (TRBV11-2, TRBJ1-1)
CASSSRSSLLLSLDK

SEQ ID NO: 18231 - protein, 12 aa, Homo sapiens
  CDR3 for alpha chain variable domain of TCR clone 9116 (TRAV12-2, TRAJ8)
CAVATGFQKLVF

SEQ ID NO: 18232 - protein, 14 aa, Homo sapiens
  CDR3 for beta chain variable domain of TCR clone 9116 (TRBV9, TRBJ2-3)
CASSPLALPDTQYF

SEQ ID NO: 18233 - protein, 11 aa, Homo sapiens
  CDR3 for alpha chain variable domain of TCR clone 9117 (TRAV1-1, TRAJ23)
RAVRQGGKLIF

SEQ ID NO: 18234 - protein, 20 aa, Homo sapiens
  CDR3 for beta chain variable domain of TCR clone 9117 (TRBV7-8, TRBJ2-2)
CASSHLFPGPTIHITGELFF

SEQ ID NO: 18235 - protein, 15 aa, Homo sapiens
  CDR3 for alpha chain variable domain of TCR clone 9118 (TRAV8-4, TRAJ53)
CAVSDGGGSNYKLTF

SEQ ID NO: 18236 - protein, 17 aa, Homo sapiens
  CDR3 for beta chain variable domain of TCR clone 9118 (TRBV7-8, TRBJ2-6)
CASSAGTGGAGANVLTF

SEQ ID NO: 18237 - protein, 14 aa, Homo sapiens
  CDR3 for alpha chain variable domain of TCR clone 9119 (TRAV29/DV5, TRAJ12)
CAATRMDSSYKLIF

SEQ ID NO: 18238 - protein, 13 aa, Homo sapiens
  CDR3 for beta chain variable domain of TCR clone 9119 (TRBV7-2, TRBJ2-5)
CASSYWTGETQYF

SEQ ID NO: 18239 - protein, 15 aa, Homo sapiens
  CDR3 for alpha chain variable domain of TCR clone 9120 (TRAV23/DV6, TRAJ44)
CAARLLTGTASKLTF

SEQ ID NO: 18240 - protein, 15 aa, Homo sapiens
  CDR3 for beta chain variable domain of TCR clone 9120 (TRBV12-4, TRBJ1-5)
CASTLNRVSNQPQHF

SEQ ID NO: 18241 - protein, 14 aa, Homo sapiens
  CDR3 for alpha chain variable domain of TCR clone 9121 (TRAV12-2, TRAJ13)
CAVKKTGGYQKVTF

SEQ ID NO: 18242 - protein, 15 aa, Homo sapiens
  CDR3 for beta chain variable domain of TCR clone 9121 (TRBV27, TRBJ2-1)
CASSNRGGSSNEQFF

SEQ ID NO: 18243 - protein, 11 aa, Homo sapiens
  CDR3 for alpha chain variable domain of TCR clone 9122 (TRAV2, TRAJ33)
CAVDSNYQLIW

SEQ ID NO: 18244 - protein, 13 aa, Homo sapiens
  CDR3 for beta chain variable domain of TCR clone 9122 (TRBV4-1, TRBJ2-2)
CASSQENTGELFF

SEQ ID NO: 18245 - protein, 14 aa, Homo sapiens
  CDR3 for alpha chain variable domain of TCR clone 9123 (TRAV26-1, TRAJ49)
CIVRVATGGNQFYF

SEQ ID NO: 18246 - protein, 16 aa, Homo sapiens
  CDR3 for beta chain variable domain of TCR clone 9123 (TRBV6-6, TRBJ1-6)
CASSLHGPGRGSPLHF

SEQ ID NO: 18247 - protein, 23 aa, Homo sapiens
  CDR3 for alpha chain variable domain of TCR clone 9124 (TRAV26-1, )
CIADSAGNNHIQNPDPAVYQLRD

SEQ ID NO: 18248 - protein, 13 aa, Homo sapiens
  CDR3 for beta chain variable domain of TCR clone 9124 (TRBV20-1, TRBJ2-1)
CSARSSPRDEQFF

SEQ ID NO: 18249 - protein, 15 aa, Homo sapiens
  CDR3 for alpha chain variable domain of TCR clone 9125 (TRAV14/DV4, TRAJ33)
CAMREGRDSNYRLIW

SEQ ID NO: 18250 - protein, 15 aa, Homo sapiens
  CDR3 for beta chain variable domain of TCR clone 9125 (TRBV5-5, TRBJ1-5)
CASSSTPGSNQPQHF

SEQ ID NO: 18251 - protein, 14 aa, Homo sapiens
  CDR3 for alpha chain variable domain of TCR clone 9126 (TRAV27, TRAJ41)
CAVRTQIPGMHSTS

SEQ ID NO: 18252 - protein, 16 aa, Homo sapiens
  CDR3 for beta chain variable domain of TCR clone 9126 (TRBV5-1, TRBJ2-3)
CASSLGLAVYTDTQYF

SEQ ID NO: 18253 - protein, 14 aa, Homo sapiens
  CDR3 for alpha chain variable domain of TCR clone 9127 (TRAV1-2, TRAJ16)
CAVNRFSDGQKLLF

SEQ ID NO: 18254 - protein, 13 aa, Homo sapiens
  CDR3 for beta chain variable domain of TCR clone 9127 (TRBV10-3, TRBJ2-7)
CASKLAVSYEQYF

SEQ ID NO: 18255 - protein, 14 aa, Homo sapiens
  CDR3 for alpha chain variable domain of TCR clone 9128 (TRAV8-3, TRAJ3)
CAVVPRSSASKIIF

SEQ ID NO: 18256 - protein, 16 aa, Homo sapiens
  CDR3 for beta chain variable domain of TCR clone 9128 (TRBV4-1, TRBJ2-3)
CASSQLTSGGGDTQYF

SEQ ID NO: 18257 - protein, 17 aa, Homo sapiens
  CDR3 for alpha chain variable domain of TCR clone 9129 (TRAV13-1, TRAJ31)
CAPRDRLMFGDGTQLVG

SEQ ID NO: 18258 - protein, 12 aa, Homo sapiens
  CDR3 for beta chain variable domain of TCR clone 9129 (TRBV7-9, TRBJ2-7)
CASSLEGYEQYF

SEQ ID NO: 18259 - protein, 14 aa, Homo sapiens
  CDR3 for alpha chain variable domain of TCR clone 9130 (TRAV9-2, TRAJ39)
CALYIYNAGNMLTF

SEQ ID NO: 18260 - protein, 16 aa, Homo sapiens
  CDR3 for beta chain variable domain of TCR clone 9130 (TRBV29-1, TRBJ1-2)
CSVEANRDIANYGYTF

SEQ ID NO: 18261 - protein, 14 aa, Homo sapiens
  CDR3 for alpha chain variable domain of TCR clone 9131 (TRAV12-2, TRAJ13)
CAVKKTGGYQKVTF

SEQ ID NO: 18262 - protein, 14 aa, Homo sapiens
  CDR3 for beta chain variable domain of TCR clone 9131 (TRBV7-3, TRBJ1-1)
CASSLGTGYTEAFF

SEQ ID NO: 18263 - protein, 11 aa, Homo sapiens
  CDR3 for alpha chain variable domain of TCR clone 9132 (TRAV2, TRAJ13)
CASGGYQKVTF

SEQ ID NO: 18264 - protein, 11 aa, Homo sapiens
  CDR3 for beta chain variable domain of TCR clone 9132 (TRBV29-1, TRBJ2-5)
CSEDRTGTQYF

SEQ ID NO: 18265 - protein, 17 aa, Homo sapiens
  CDR3 for alpha chain variable domain of TCR clone 9133 (TRAV8-3, TRAJ42)
CAVGNPEERRSQGNLIF

SEQ ID NO: 18266 - protein, 14 aa, Homo sapiens
  CDR3 for beta chain variable domain of TCR clone 9133 (TRBV15, TRBJ2-7)
CATSRVARGYEQYF

SEQ ID NO: 18267 - protein, 14 aa, Homo sapiens
  CDR3 for alpha chain variable domain of TCR clone 9134 (TRAV12-2, TRAJ13)
CAVKKTVGYQKVTF

SEQ ID NO: 18268 - protein, 15 aa, Homo sapiens
  CDR3 for beta chain variable domain of TCR clone 9134 (TRBV27, TRBJ2-1)
CASSNGGGSSNEQFF

SEQ ID NO: 18269 - protein, 14 aa, Homo sapiens
  CDR3 for alpha chain variable domain of TCR clone 9135 (TRAV9-2, TRAJ13)
CALSDSGGYQKVTF

SEQ ID NO: 18270 - protein, 16 aa, Homo sapiens
  CDR3 for beta chain variable domain of TCR clone 9135 (TRBV18, TRBJ2-7)
CASSPTVGQGTYEQYF

SEQ ID NO: 18271 - protein, 13 aa, Homo sapiens
  CDR3 for alpha chain variable domain of TCR clone 9136 (TRAV21, TRAJ22)
CAVKSGSARQLTF

SEQ ID NO: 18272 - protein, 19 aa, Homo sapiens
  CDR3 for beta chain variable domain of TCR clone 9136 (TRBV6-5, TRBJ2-7)
CASSYSNRGSNPFTYEQYF

SEQ ID NO: 18273 - protein, 18 aa, Homo sapiens
  CDR3 for alpha chain variable domain of TCR clone 9137 (TRAV26-2, TRAJ54)
CILRDVEVGIQGAQKLVF

SEQ ID NO: 18274 - protein, 14 aa, Homo sapiens
  CDR3 for beta chain variable domain of TCR clone 9137 (TRBV7-2, TRBJ2-7)
CASSPKTSFYEQYF

SEQ ID NO: 18275 - protein, 14 aa, Homo sapiens
  CDR3 for alpha chain variable domain of TCR clone 9138 (TRAV12-2, TRAJ13)
CAVKKTGGYQKVTF

SEQ ID NO: 18276 - protein, 13 aa, Homo sapiens
  CDR3 for beta chain variable domain of TCR clone 9138 (TRBV19, TRBJ2-2)
CASSIWSTGELFF

SEQ ID NO: 18277 - protein, 13 aa, Homo sapiens
  CDR3 for alpha chain variable domain of TCR clone 9139 (TRAV38-1, TRAJ42)
CARWGGSQGNLIF

SEQ ID NO: 18278 - protein, 15 aa, Homo sapiens
  CDR3 for beta chain variable domain of TCR clone 9139 (TRBV12-4, TRBJ2-5)
CASSPPTGLQETQYF

SEQ ID NO: 18279 - protein, 14 aa, Homo sapiens
  CDR3 for alpha chain variable domain of TCR clone 9140 (TRAV2, TRAJ26)
CAVERDNYGQNFVF

SEQ ID NO: 18280 - protein, 15 aa, Homo sapiens
  CDR3 for beta chain variable domain of TCR clone 9140 (TRBV28, TRBJ2-4)
CASRAPLLAKNIQYF

SEQ ID NO: 18281 - protein, 14 aa, Homo sapiens
  CDR3 for alpha chain variable domain of TCR clone 9141 (TRAV12-1, TRAJ6)
CVVPTSGGSYIPTF

SEQ ID NO: 18282 - protein, 16 aa, Homo sapiens
  CDR3 for beta chain variable domain of TCR clone 9141 (TRBV2, TRBJ2-7)
CASSEPWTGPSYEQYF

SEQ ID NO: 18283 - protein, 12 aa, Homo sapiens
  CDR3 for alpha chain variable domain of TCR clone 9142 (TRAV21, TRAJ35)
CAVVGFGNVLHC

SEQ ID NO: 18284 - protein, 16 aa, Homo sapiens
  CDR3 for beta chain variable domain of TCR clone 9142 (TRBV6-1, TRBJ2-5)
CASSETLDRGAETQYF

SEQ ID NO: 18285 - protein, 17 aa, Homo sapiens
  CDR3 for alpha chain variable domain of TCR clone 9143 (TRAV3, TRAJ6)
CAMRDGPRAGGSYIPTF

SEQ ID NO: 18286 - protein, 14 aa, Homo sapiens
  CDR3 for beta chain variable domain of TCR clone 9143 (TRBV7-2, TRBJ2-7)
CASSPKTSFYEQYF

SEQ ID NO: 18287 - protein, 12 aa, Homo sapiens
  CDR3 for alpha chain variable domain of TCR clone 9144 (TRAV12-3, TRAJ17)
CAMTLTGNKLTF

SEQ ID NO: 18288 - protein, 15 aa, Homo sapiens
  CDR3 for beta chain variable domain of TCR clone 9144 (TRBV20-1, TRBJ2-7)
CSARDRVSGMDEQDF

SEQ ID NO: 18289 - protein, 11 aa, Homo sapiens
  CDR3 for alpha chain variable domain of TCR clone 9145 (TRAV21, TRAJ11)
CAVNGYSTLTL

SEQ ID NO: 18290 - protein, 11 aa, Homo sapiens
  CDR3 for beta chain variable domain of TCR clone 9145 (TRBV19, TRBJ1-1)
CASSIGSEAFF

SEQ ID NO: 18291 - protein, 11 aa, Homo sapiens
  CDR3 for alpha chain variable domain of TCR clone 9146 (TRAV1-2, TRAJ20)
CAVANDYKLSF

SEQ ID NO: 18292 - protein, 18 aa, Homo sapiens
  CDR3 for beta chain variable domain of TCR clone 9146 (TRBV20-1, TRBJ2-6)
CSAETTPTHGSGADVLTF

SEQ ID NO: 18293 - protein, 13 aa, Homo sapiens
  CDR3 for alpha chain variable domain of TCR clone 9147 (TRAV12-2, TRAJ47)
CAVFMEYGNKLVF

SEQ ID NO: 18294 - protein, 13 aa, Homo sapiens
  CDR3 for beta chain variable domain of TCR clone 9147 (TRBV6-5, TRBJ2-5)
CASSPQGGETQYF

SEQ ID NO: 18295 - protein, 14 aa, Homo sapiens
  CDR3 for alpha chain variable domain of TCR clone 9148 (TRAV12-2, TRAJ9)
CAVRGQTGGFKTIF

SEQ ID NO: 18296 - protein, 15 aa, Homo sapiens
  CDR3 for beta chain variable domain of TCR clone 9148 (TRBV7-2, TRBJ2-7)
CASSFTGQGAQEQYF

SEQ ID NO: 18297 - protein, 14 aa, Homo sapiens
  CDR3 for alpha chain variable domain of TCR clone 9149 (TRAV1-2, TRAJ16)
CAVNRFSDGQKLLF

SEQ ID NO: 18298 - protein, 13 aa, Homo sapiens
  CDR3 for beta chain variable domain of TCR clone 9149 (TRBV3-1, TRBJ2-5)
CASISVARETQYF

SEQ ID NO: 18299 - protein, 13 aa, Homo sapiens
  CDR3 for alpha chain variable domain of TCR clone 9150 (TRAV12-2, TRAJ53)
CAGVGGSNYKLTF

SEQ ID NO: 18300 - protein, 17 aa, Homo sapiens
  CDR3 for beta chain variable domain of TCR clone 9150 (TRBV11-2, TRBJ2-1)
CASSLYPPGVEYNEQFF

SEQ ID NO: 18301 - protein, 17 aa, Homo sapiens
  CDR3 for alpha chain variable domain of TCR clone 9151 (TRAV8-6, TRAJ4)
CAVSEKMVFGAGTRLAV

SEQ ID NO: 18302 - protein, 14 aa, Homo sapiens
  CDR3 for beta chain variable domain of TCR clone 9151 (TRBV20-1, TRBJ1-1)
CSAQTRIGGTEAFF

SEQ ID NO: 18303 - protein, 12 aa, Homo sapiens
  CDR3 for alpha chain variable domain of TCR clone 9152 (TRAV8-3, TRAJ20)
CAVGANDYKLSF

SEQ ID NO: 18304 - protein, 15 aa, Homo sapiens
  CDR3 for beta chain variable domain of TCR clone 9152 (TRBV19, TRBJ2-2)
CQPISRDRGHRGAVF

SEQ ID NO: 18305 - protein, 15 aa, Homo sapiens
  CDR3 for alpha chain variable domain of TCR clone 9153 (TRAV26-1, TRAJ29)
CIVRAEGSGNTPLVF

SEQ ID NO: 18306 - protein, 14 aa, Homo sapiens
  CDR3 for beta chain variable domain of TCR clone 9153 (TRBV18, TRBJ2-5)
CASSPGVSQETQYF

SEQ ID NO: 18307 - protein, 17 aa, Homo sapiens
  CDR3 for alpha chain variable domain of TCR clone 9154 (TRAV39, TRAJ32)
CAVDIKWVGGATNKLIF

SEQ ID NO: 18308 - protein, 11 aa, Homo sapiens
  CDR3 for beta chain variable domain of TCR clone 9154 (TRBV18, TRBJ1-2)
CASSPLNGYTF

SEQ ID NO: 18309 - protein, 16 aa, Homo sapiens
  CDR3 for alpha chain variable domain of TCR clone 9155 (TRAV25, TRAJ52)
CAGGFLSGTSYGKLTF

SEQ ID NO: 18310 - protein, 16 aa, Homo sapiens
  CDR3 for beta chain variable domain of TCR clone 9155 (TRBV28, TRBJ2-3)
CASSRSSGQGSDTQYF

SEQ ID NO: 18311 - protein, 12 aa, Homo sapiens
  CDR3 for alpha chain variable domain of TCR clone 9156 (TRAV17, TRAJ12)
CATLRSSYKLIF

SEQ ID NO: 18312 - protein, 16 aa, Homo sapiens
  CDR3 for beta chain variable domain of TCR clone 9156 (TRBV28, TRBJ2-7)
CASSLFFETGGHEQYF

SEQ ID NO: 18313 - protein, 16 aa, Homo sapiens
  CDR3 for alpha chain variable domain of TCR clone 9157 (TRAV3, TRAJ10)
CAVRDMRAGGGNKLTF

SEQ ID NO: 18314 - protein, 15 aa, Homo sapiens
  CDR3 for beta chain variable domain of TCR clone 9157 (TRBV11-2, TRBJ1-2)
CASSLEGVQRNGYTF

SEQ ID NO: 18315 - protein, 16 aa, Homo sapiens
  CDR3 for alpha chain variable domain of TCR clone 9158 (TRAV13-1, TRAJ48)
CAASIFGNFGNEKLTF

SEQ ID NO: 18316 - protein, 13 aa, Homo sapiens
  CDR3 for beta chain variable domain of TCR clone 9158 (TRBV7-7, TRBJ2-3)
CASSLSRADTQYF

SEQ ID NO: 18317 - protein, 13 aa, Homo sapiens
  CDR3 for alpha chain variable domain of TCR clone 9159 (TRAV13-2, TRAJ54)
CAENYQGAQKLVF

SEQ ID NO: 18318 - protein, 15 aa, Homo sapiens
  CDR3 for beta chain variable domain of TCR clone 9159 (TRBV3-1, TRBJ2-5)
CASSRGLALRETQYF

SEQ ID NO: 18319 - protein, 14 aa, Homo sapiens
  CDR3 for alpha chain variable domain of TCR clone 9160 (TRAV1-2, TRAJ16)
CAVNRFSDGQKLLF

SEQ ID NO: 18320 - protein, 15 aa, Homo sapiens
  CDR3 for beta chain variable domain of TCR clone 9160 (TRBV6-5, TRBJ2-1)
CASSYDAGAGNEQFF

SEQ ID NO: 18321 - protein, 15 aa, Homo sapiens
  CDR3 for alpha chain variable domain of TCR clone 9161 (TRAV17, TRAJ13)
CATDAGSGGYQKVTF

SEQ ID NO: 18322 - protein, 17 aa, Homo sapiens
  CDR3 for beta chain variable domain of TCR clone 9161 (TRBV11-2, TRBJ2-1)
CASSLYPPGAEYNEQFF

SEQ ID NO: 18323 - protein, 14 aa, Homo sapiens
  CDR3 for alpha chain variable domain of TCR clone 9162 (TRAV1-2, TRAJ16)
CAVNRVSDGQKLLF

SEQ ID NO: 18324 - protein, 15 aa, Homo sapiens
  CDR3 for beta chain variable domain of TCR clone 9162 (TRBV9, TRBJ1-6)
CASSVAGTGDSPLHF

SEQ ID NO: 18325 - protein, 14 aa, Homo sapiens
  CDR3 for alpha chain variable domain of TCR clone 9163 (TRAV12-2, TRAJ40)
CAVKIPSGTYKYIL

SEQ ID NO: 18326 - protein, 14 aa, Homo sapiens
  CDR3 for beta chain variable domain of TCR clone 9163 (TRBV20-1, TRBJ1-1)
CSAQTRIGGTEAFF

SEQ ID NO: 18327 - protein, 14 aa, Homo sapiens
  CDR3 for alpha chain variable domain of TCR clone 9164 (TRAV27, TRAJ22)
CAGVVPGSARQLTF

SEQ ID NO: 18328 - protein, 15 aa, Homo sapiens
  CDR3 for beta chain variable domain of TCR clone 9164 (TRBV29-1, TRBJ2-7)
CSVEFFDRGSYEQYF

SEQ ID NO: 18329 - protein, 15 aa, Homo sapiens
  CDR3 for alpha chain variable domain of TCR clone 9165 (TRAV21, TRAJ53)
CATLNSRGSNYKLTF

SEQ ID NO: 18330 - protein, 16 aa, Homo sapiens
  CDR3 for beta chain variable domain of TCR clone 9165 (TRBV9, TRBJ2-1)
CASSVGGGGNYNEQFF

SEQ ID NO: 18331 - protein, 16 aa, Homo sapiens
  CDR3 for alpha chain variable domain of TCR clone 9166 (TRAV12-3, TRAJ53)
CAMSPGSGGSNYKLTL

SEQ ID NO: 18332 - protein, 11 aa, Homo sapiens
  CDR3 for beta chain variable domain of TCR clone 9166 (TRBV29-1, TRBJ2-5)
CSEDRTGTQYF

SEQ ID NO: 18333 - protein, 11 aa, Homo sapiens
  CDR3 for alpha chain variable domain of TCR clone 9167 (TRAV12-2, TRAJ31)
CAVTRWARPMF

SEQ ID NO: 18334 - protein, 15 aa, Homo sapiens
  CDR3 for beta chain variable domain of TCR clone 9167 (TRBV19, TRBJ2-7)
CASSIGGGLVNEQYF

SEQ ID NO: 18335 - protein, 16 aa, Homo sapiens
  CDR3 for alpha chain variable domain of TCR clone 9168 (TRAV38-2/DV8, TRAJ45)
CAYRGNSGGGADGLTF

SEQ ID NO: 18336 - protein, 14 aa, Homo sapiens
  CDR3 for beta chain variable domain of TCR clone 9168 (TRBV7-2, TRBJ2-7)
CASSPKTSFYEQYF

SEQ ID NO: 18337 - protein, 13 aa, Homo sapiens
  CDR3 for alpha chain variable domain of TCR clone 9169 (TRAV30, TRAJ24)
CGTVTDSWGKLQF

SEQ ID NO: 18338 - protein, 16 aa, Homo sapiens
  CDR3 for beta chain variable domain of TCR clone 9169 (TRBV7-3, TRBJ2-2)
CASSLKRETLSGELFF

SEQ ID NO: 18339 - protein, 14 aa, Homo sapiens
  CDR3 for alpha chain variable domain of TCR clone 9170 (TRAV1-2, TRAJ16)
CAVNRFSDGQKLLF

SEQ ID NO: 18340 - protein, 14 aa, Homo sapiens
  CDR3 for beta chain variable domain of TCR clone 9170 (TRBV6-1, TRBJ2-1)
CASSEATRVNEQFF

SEQ ID NO: 18341 - protein, 13 aa, Homo sapiens
  CDR3 for alpha chain variable domain of TCR clone 9171 (TRAV12-1, TRAJ26)
CVVRRNYGQNFVF

SEQ ID NO: 18342 - protein, 14 aa, Homo sapiens
  CDR3 for beta chain variable domain of TCR clone 9171 (TRBV7-2, TRBJ2-7)
CASRSQGAAYEQYF

SEQ ID NO: 18343 - protein, 15 aa, Homo sapiens
  CDR3 for alpha chain variable domain of TCR clone 9172 (TRAV27, TRAJ38)
RAARRNAGNNRKLIW

SEQ ID NO: 18344 - protein, 13 aa, Homo sapiens
  CDR3 for beta chain variable domain of TCR clone 9172 (TRBV12-5, TRBJ2-3)
CASGDRQSDTQYF

SEQ ID NO: 18345 - protein, 17 aa, Homo sapiens
  CDR3 for alpha chain variable domain of TCR clone 9173 (TRAV3, TRAJ6)
CAVRDGHRAGGSYIPTF

SEQ ID NO: 18346 - protein, 14 aa, Homo sapiens
  CDR3 for beta chain variable domain of TCR clone 9173 (TRBV7-2, TRBJ2-7)
CASSPKTSFYEQYF

SEQ ID NO: 18347 - protein, 15 aa, Homo sapiens
  CDR3 for alpha chain variable domain of TCR clone 9174 (TRAV35, TRAJ52)
CAGPRGGTSYGKLTF

SEQ ID NO: 18348 - protein, 15 aa, Homo sapiens
  CDR3 for beta chain variable domain of TCR clone 9174 (TRBV6-5, TRBJ1-2)
CASSYSQAFNYGYTF

SEQ ID NO: 18349 - protein, 14 aa, Homo sapiens
  CDR3 for alpha chain variable domain of TCR clone 9175 (TRAV1-2, TRAJ16)
CAVNRLSDGQKLLF

SEQ ID NO: 18350 - protein, 15 aa, Homo sapiens
  CDR3 for beta chain variable domain of TCR clone 9175 (TRBV7-9, TRBJ1-6)
CASSSPGRGNSPLHF

SEQ ID NO: 18351 - protein, 15 aa, Homo sapiens
  CDR3 for alpha chain variable domain of TCR clone 9176 (TRAV21, TRAJ40)
CAVRPQTSGTYKYIF

SEQ ID NO: 18352 - protein, 15 aa, Homo sapiens
  CDR3 for beta chain variable domain of TCR clone 9176 (TRBV5-1, TRBJ2-1)
CASSPPRAPYNEQSF

SEQ ID NO: 18353 - protein, 14 aa, Homo sapiens
  CDR3 for alpha chain variable domain of TCR clone 9177 (TRAV2, TRAJ9)
CAVEDRSGGFKTIF

SEQ ID NO: 18354 - protein, 13 aa, Homo sapiens
  CDR3 for beta chain variable domain of TCR clone 9177 (TRBV12-4, TRBJ1-2)
CASTMTSNYGYTF

SEQ ID NO: 18355 - protein, 14 aa, Homo sapiens
  CDR3 for alpha chain variable domain of TCR clone 9178 (TRAV1-2, TRAJ8)
CAVREDTGFQKLVF

SEQ ID NO: 18356 - protein, 15 aa, Homo sapiens
  CDR3 for beta chain variable domain of TCR clone 9178 (TRBV7-9, TRBJ1-5)
CASSQGHQPNQPQHF

SEQ ID NO: 18357 - protein, 15 aa, Homo sapiens
  CDR3 for alpha chain variable domain of TCR clone 9179 (TRAV21, TRAJ53)
CATLNSGGSNYKLTF

SEQ ID NO: 18358 - protein, 13 aa, Homo sapiens
  CDR3 for beta chain variable domain of TCR clone 9179 (TRBV7-2, TRBJ2-5)
CASSQTSVETQYF

SEQ ID NO: 18359 - protein, 17 aa, Homo sapiens
  CDR3 for alpha chain variable domain of TCR clone 9180 (TRAV3, TRAJ6)
CAVRDGPRAGGSYIPTF

SEQ ID NO: 18360 - protein, 15 aa, Homo sapiens
  CDR3 for beta chain variable domain of TCR clone 9180 (TRBV5-1, TRBJ2-1)
CASSPPRAPYNEQFF

SEQ ID NO: 18361 - protein, 16 aa, Homo sapiens
  CDR3 for alpha chain variable domain of TCR clone 9181 (TRAV21, TRAJ37)
CAVRTAGSSNTGKLIF

SEQ ID NO: 18362 - protein, 14 aa, Homo sapiens
  CDR3 for beta chain variable domain of TCR clone 9181 (TRBV6-1, TRBJ1-3)
CASVQGGGGNTIYF

SEQ ID NO: 18363 - protein, 13 aa, Homo sapiens
  CDR3 for alpha chain variable domain of TCR clone 9182 (TRAV38-2/DV8, TRAJ34)
CAYRNYNTDKLIF

SEQ ID NO: 18364 - protein, 15 aa, Homo sapiens
  CDR3 for beta chain variable domain of TCR clone 9182 (TRBV6-3, TRBJ2-7)
CASSSPGTVFYEQYF

SEQ ID NO: 18365 - protein, 13 aa, Homo sapiens
  CDR3 for alpha chain variable domain of TCR clone 9183 (TRAV38-2/DV8, TRAJ57)
CAYTQGGSEKLVF

SEQ ID NO: 18366 - protein, 18 aa, Homo sapiens
  CDR3 for beta chain variable domain of TCR clone 9183 (TRBV5-5, TRBJ1-5)
CASSLRQVKGSSNQPQHF

SEQ ID NO: 18367 - protein, 11 aa, Homo sapiens
  CDR3 for alpha chain variable domain of TCR clone 9184 (TRAV12-1, TRAJ39)
CVVSAGNMLTF

SEQ ID NO: 18368 - protein, 14 aa, Homo sapiens
  CDR3 for beta chain variable domain of TCR clone 9184 (TRBV7-2, TRBJ2-5)
CASSPRGSSETQYF

SEQ ID NO: 18369 - protein, 16 aa, Homo sapiens
  CDR3 for alpha chain variable domain of TCR clone 9185 (TRAV30, TRAJ24)
CGTEIVDADSWGKFQF

SEQ ID NO: 18370 - protein, 20 aa, Homo sapiens
  CDR3 for beta chain variable domain of TCR clone 9185 (TRBV7-8, TRBJ2-2)
CASSHLFPGPTIHITGELFF

SEQ ID NO: 18371 - protein, 12 aa, Homo sapiens
  CDR3 for alpha chain variable domain of TCR clone 9186 (TRAV2, TRAJ31)
CAVEDDNARLMF

SEQ ID NO: 18372 - protein, 16 aa, Homo sapiens
  CDR3 for beta chain variable domain of TCR clone 9186 (TRBV10-3, TRBJ2-1)
CAISGVGDGGGGEQFF

SEQ ID NO: 18373 - protein, 11 aa, Homo sapiens
  CDR3 for alpha chain variable domain of TCR clone 9187 (TRAV29/DV5, TRAJ31)
CAAMNNARLMF

SEQ ID NO: 18374 - protein, 14 aa, Homo sapiens
  CDR3 for beta chain variable domain of TCR clone 9187 (TRBV15, TRBJ2-5)
CATSIGGLGETQYF

SEQ ID NO: 18375 - protein, 16 aa, Homo sapiens
  CDR3 for alpha chain variable domain of TCR clone 9188 (TRAV30, TRAJ24)
CGTEIVDADSWGKFQF

SEQ ID NO: 18376 - protein, 15 aa, Homo sapiens
  CDR3 for beta chain variable domain of TCR clone 9188 (TRBV5-1, TRBJ2-1)
CASSPPRAPYNEQFF

SEQ ID NO: 18377 - protein, 14 aa, Homo sapiens
  CDR3 for alpha chain variable domain of TCR clone 9189 (TRAV26-1, TRAJ34)
CIVRVAYNTDKLIF

SEQ ID NO: 18378 - protein, 15 aa, Homo sapiens
  CDR3 for beta chain variable domain of TCR clone 9189 (TRBV20-1, TRBJ2-7)
CSARVPAAYFYERYF

SEQ ID NO: 18379 - protein, 11 aa, Homo sapiens
  CDR3 for alpha chain variable domain of TCR clone 9190 (TRAV5, TRAJ31)
CAESNNARLMF

SEQ ID NO: 18380 - protein, 12 aa, Homo sapiens
  CDR3 for beta chain variable domain of TCR clone 9190 (TRBV11-2, TRBJ2-1)
CASSPGNNEQFF

SEQ ID NO: 18381 - protein, 12 aa, Homo sapiens
  CDR3 for alpha chain variable domain of TCR clone 9191 (TRAV13-1, TRAJ17)
CAAPRCRQQANF

SEQ ID NO: 18382 - protein, 15 aa, Homo sapiens
  CDR3 for beta chain variable domain of TCR clone 9191 (TRBV28, TRBJ2-3)
CAPTFRDWSTDTQYF

SEQ ID NO: 18383 - protein, 11 aa, Homo sapiens
  CDR3 for alpha chain variable domain of TCR clone 9192 (TRAV2, TRAJ13)
CASGGYQKVTF

SEQ ID NO: 18384 - protein, 12 aa, Homo sapiens
  CDR3 for beta chain variable domain of TCR clone 9192 (TRBV29-1, TRBJ2-7)
CSARDRPYEQYF

SEQ ID NO: 18385 - protein, 14 aa, Homo sapiens
  CDR3 for alpha chain variable domain of TCR clone 9193 (TRAV19, TRAJ20)
CALSEAPRGRTTTS

SEQ ID NO: 18386 - protein, 15 aa, Homo sapiens
  CDR3 for beta chain variable domain of TCR clone 9193 (TRBV10-3, TRBJ2-3)
CAISLTSGGTDTQYF

SEQ ID NO: 18387 - protein, 12 aa, Homo sapiens
  CDR3 for alpha chain variable domain of TCR clone 9194 (TRAV1-2, TRAJ29)
CAVRNLNTPLVF

SEQ ID NO: 18388 - protein, 18 aa, Homo sapiens
  CDR3 for beta chain variable domain of TCR clone 9194 (TRBV15, TRBJ2-1)
CVPPPGCSGGPTTNEQFF

SEQ ID NO: 18389 - protein, 18 aa, Homo sapiens
  CDR3 for alpha chain variable domain of TCR clone 9195 (TRAV21, TRAJ52)
CAVRPSPAGGTSYGKLTF

SEQ ID NO: 18390 - protein, 17 aa, Homo sapiens
  CDR3 for beta chain variable domain of TCR clone 9195 (TRBV13, TRBJ2-3)
CASSLSRVAGGRNTRYF

SEQ ID NO: 18391 - protein, 13 aa, Homo sapiens
  CDR3 for alpha chain variable domain of TCR clone 9196 (TRAV1-2, TRAJ9)
CAALNTGGFKTIF

SEQ ID NO: 18392 - protein, 13 aa, Homo sapiens
  CDR3 for beta chain variable domain of TCR clone 9196 (TRBV19, TRBJ1-2)
CASSVPGQGGYTF

SEQ ID NO: 18393 - protein, 17 aa, Homo sapiens
  CDR3 for alpha chain variable domain of TCR clone 9197 (TRAV17, TRAJ52)
CATDRNAGGTSYGKLTF

SEQ ID NO: 18394 - protein, 13 aa, Homo sapiens
  CDR3 for beta chain variable domain of TCR clone 9197 (TRBV4-2, TRBJ1-1)
CASSQAGNTEAFF

SEQ ID NO: 18395 - protein, 13 aa, Homo sapiens
  CDR3 for alpha chain variable domain of TCR clone 9198 (TRAV14/DV4, TRAJ23)
CAMIDNQGGKLIF

SEQ ID NO: 18396 - protein, 16 aa, Homo sapiens
  CDR3 for beta chain variable domain of TCR clone 9198 (TRBV12-5, TRBJ2-5)
CASGPRTSGNQETQYF

SEQ ID NO: 18397 - protein, 13 aa, Homo sapiens
  CDR3 for alpha chain variable domain of TCR clone 9199 (TRAV8-3, TRAJ36)
CAVGATGANNLFF

SEQ ID NO: 18398 - protein, 15 aa, Homo sapiens
  CDR3 for beta chain variable domain of TCR clone 9199 (TRBV5-7, TRBJ2-3)
CASSPWDRATDTQYF

SEQ ID NO: 18399 - protein, 14 aa, Homo sapiens
  CDR3 for alpha chain variable domain of TCR clone 9200 (TRAV38-2/DV8, TRAJ31)
CAYRSDNNNARLMF

SEQ ID NO: 18400 - protein, 13 aa, Homo sapiens
  CDR3 for beta chain variable domain of TCR clone 9200 (TRBV28, TRBJ1-1)
CASSKQGWTEAFF

SEQ ID NO: 18401 - protein, 12 aa, Homo sapiens
  CDR3 for alpha chain variable domain of TCR clone 9201 (TRAV17, TRAJ20)
CATQANDYKLSF

SEQ ID NO: 18402 - protein, 14 aa, Homo sapiens
  CDR3 for beta chain variable domain of TCR clone 9201 (TRBV25-1, TRBJ1-1)
CASTHLGGNTEAFF

SEQ ID NO: 18403 - protein, 14 aa, Homo sapiens
  CDR3 for alpha chain variable domain of TCR clone 9202 (TRAV1-2, TRAJ8)
CAVREDTGFQKLVF

SEQ ID NO: 18404 - protein, 15 aa, Homo sapiens
  CDR3 for beta chain variable domain of TCR clone 9202 (TRBV3-1, TRBJ2-7)
CASSQAPSGSYEQYF

SEQ ID NO: 18405 - protein, 14 aa, Homo sapiens
  CDR3 for alpha chain variable domain of TCR clone 9203 (TRAV1-2, TRAJ8)
CAVREDTGFQKLVF

SEQ ID NO: 18406 - protein, 15 aa, Homo sapiens
  CDR3 for beta chain variable domain of TCR clone 9203 (TRBV6-3, TRBJ2-7)
RASSSPGTVFYEQYF

SEQ ID NO: 18407 - protein, 13 aa, Homo sapiens
  CDR3 for alpha chain variable domain of TCR clone 9204 (TRAV2, TRAJ3)
CAVDGSSASKIIF

SEQ ID NO: 18408 - protein, 16 aa, Homo sapiens
  CDR3 for beta chain variable domain of TCR clone 9204 (TRBV15, TRBJ2-3)
CATSPAGGIATDTQYF

SEQ ID NO: 18409 - protein, 14 aa, Homo sapiens
  CDR3 for alpha chain variable domain of TCR clone 9205 (TRAV1-2, TRAJ8)
CAVREDTGFQKLVF

SEQ ID NO: 18410 - protein, 12 aa, Homo sapiens
  CDR3 for beta chain variable domain of TCR clone 9205 (TRBV3-1, TRBJ2-2)
CASSLFPGELFF

SEQ ID NO: 18411 - protein, 12 aa, Homo sapiens
  CDR3 for alpha chain variable domain of TCR clone 9206 (TRAV13-2, TRAJ8)
CAPWLGFQKLVF

SEQ ID NO: 18412 - protein, 11 aa, Homo sapiens
  CDR3 for beta chain variable domain of TCR clone 9206 (TRBV29-1, TRBJ2-5)
CSEDRTGTQYF

SEQ ID NO: 18413 - protein, 12 aa, Homo sapiens
  CDR3 for alpha chain variable domain of TCR clone 9207 (TRAV2, TRAJ9)
CAVGAGGFKTIF

SEQ ID NO: 18414 - protein, 16 aa, Homo sapiens
  CDR3 for beta chain variable domain of TCR clone 9207 (TRBV13, TRBJ2-2)
CASSPRTGERTGELFF

SEQ ID NO: 18415 - protein, 15 aa, Homo sapiens
  CDR3 for alpha chain variable domain of TCR clone 9208 (TRAV26-1, TRAJ29)
CIFRVEGSGNTPLVF

SEQ ID NO: 18416 - protein, 15 aa, Homo sapiens
  CDR3 for beta chain variable domain of TCR clone 9208 (TRBV7-9, TRBJ1-5)
CASSQGHQPNQPQHF

SEQ ID NO: 18417 - protein, 14 aa, Homo sapiens
  CDR3 for alpha chain variable domain of TCR clone 9209 (TRAV12-2, TRAJ40)
CAVKIPSGTYKYIF

SEQ ID NO: 18418 - protein, 17 aa, Homo sapiens
  CDR3 for beta chain variable domain of TCR clone 9209 (TRBV28, TRBJ2-5)
CASSRQGGLAGAETQYF

SEQ ID NO: 18419 - protein, 10 aa, Homo sapiens
  CDR3 for alpha chain variable domain of TCR clone 9210 (TRAV30, TRAJ48)
CGIGNEKLTF

SEQ ID NO: 18420 - protein, 14 aa, Homo sapiens
  CDR3 for beta chain variable domain of TCR clone 9210 (TRBV6-1, TRBJ1-3)
CASVQGGGGNTIYF

SEQ ID NO: 18421 - protein, 15 aa, Homo sapiens
  CDR3 for alpha chain variable domain of TCR clone 9211 (TRAV8-3, TRAJ27)
CAVGPSETNAGKSTF

SEQ ID NO: 18422 - protein, 15 aa, Homo sapiens
  CDR3 for beta chain variable domain of TCR clone 9211 (TRBV7-2, TRBJ2-1)
CASSSGLAGGNEQFF

SEQ ID NO: 18423 - protein, 14 aa, Homo sapiens
  CDR3 for alpha chain variable domain of TCR clone 9212 (TRAV1-2, TRAJ16)
CAVNRFSDGQKLLF

SEQ ID NO: 18424 - protein, 15 aa, Homo sapiens
  CDR3 for beta chain variable domain of TCR clone 9212 (TRBV6-3, TRBJ2-2)
CASSFLATLTGELFF

SEQ ID NO: 18425 - protein, 10 aa, Homo sapiens
  CDR3 for alpha chain variable domain of TCR clone 9213 (TRAV8-4, TRAJ48)
FNFGNEKLTF

SEQ ID NO: 18426 - protein, 12 aa, Homo sapiens
  CDR3 for beta chain variable domain of TCR clone 9213 (TRBV7-3, TRBJ1-2)
CASSKKGVPVTF

SEQ ID NO: 18427 - protein, 12 aa, Homo sapiens
  CDR3 for alpha chain variable domain of TCR clone 9214 (TRAV13-2, TRAJ23)
CAERHRGGKLIF

SEQ ID NO: 18428 - protein, 16 aa, Homo sapiens
  CDR3 for beta chain variable domain of TCR clone 9214 (TRBV11-2, TRBJ1-1)
CASSLRQGGEHSKAFF

SEQ ID NO: 18429 - protein, 13 aa, Homo sapiens
  CDR3 for alpha chain variable domain of TCR clone 9215 (TRAV17, TRAJ5)
CAPMDTGRRALTF

SEQ ID NO: 18430 - protein, 14 aa, Homo sapiens
  CDR3 for beta chain variable domain of TCR clone 9215 (TRBV12-5, TRBJ2-5)
CASGSRTHQETQYF

SEQ ID NO: 18431 - protein, 14 aa, Homo sapiens
  CDR3 for alpha chain variable domain of TCR clone 9216 (TRAV1-2, TRAJ16)
CAVNRFSDGQKLLF

SEQ ID NO: 18432 - protein, 12 aa, Homo sapiens
  CDR3 for beta chain variable domain of TCR clone 9216 (TRBV11-2, TRBJ2-2)
CASSLPTGELFF

SEQ ID NO: 18433 - protein, 17 aa, Homo sapiens
  CDR3 for alpha chain variable domain of TCR clone 9217 (TRAV3, TRAJ6)
CAVRDGPRAGGSYIPTF

SEQ ID NO: 18434 - protein, 14 aa, Homo sapiens
  CDR3 for beta chain variable domain of TCR clone 9217 (TRBV7-2, TRBJ2-7)
CANSPKTSFYEQYF

SEQ ID NO: 18435 - protein, 15 aa, Homo sapiens
  CDR3 for alpha chain variable domain of TCR clone 9218 (TRAV2, TRAJ22)
CAVPSRGGSARQLTF

SEQ ID NO: 18436 - protein, 16 aa, Homo sapiens
  CDR3 for beta chain variable domain of TCR clone 9218 (TRBV7-2, TRBJ2-1)
CASSPRLAGSNNEQFF

SEQ ID NO: 18437 - protein, 11 aa, Homo sapiens
  CDR3 for alpha chain variable domain of TCR clone 9219 (TRAV17, TRAJ43)
CATLRSNDMRF

SEQ ID NO: 18438 - protein, 15 aa, Homo sapiens
  CDR3 for beta chain variable domain of TCR clone 9219 (TRBV11-2, TRBJ2-1)
CASSLGTSGLNEQFF

SEQ ID NO: 18439 - protein, 14 aa, Homo sapiens
  CDR3 for alpha chain variable domain of TCR clone 9220 (TRAV12-2, TRAJ40)
CAVKIPSGTYKYIF

SEQ ID NO: 18440 - protein, 15 aa, Homo sapiens
  CDR3 for beta chain variable domain of TCR clone 9220 (TRBV6-3, TRBJ2-7)
CASSSPGTVFYEQYF

SEQ ID NO: 18441 - protein, 15 aa, Homo sapiens
  CDR3 for alpha chain variable domain of TCR clone 9221 (TRAV17, TRAJ4)
CATGTWSGGYNKLIF

SEQ ID NO: 18442 - protein, 16 aa, Homo sapiens
  CDR3 for beta chain variable domain of TCR clone 9221 (TRBV13, TRBJ2-2)
CASSPRTGEHTGELFF

SEQ ID NO: 18443 - protein, 15 aa, Homo sapiens
  CDR3 for alpha chain variable domain of TCR clone 9222 (TRAV2, TRAJ13)
CATPSYSGGYQKVTF

SEQ ID NO: 18444 - protein, 14 aa, Homo sapiens
  CDR3 for beta chain variable domain of TCR clone 9222 (TRBV27, TRBJ2-2)
CASSLGAATGELFF

SEQ ID NO: 18445 - protein, 13 aa, Homo sapiens
  CDR3 for alpha chain variable domain of TCR clone 9223 (TRAV13-1, TRAJ17)
CAANKAAGNKLTF

SEQ ID NO: 18446 - protein, 14 aa, Homo sapiens
  CDR3 for beta chain variable domain of TCR clone 9223 (TRBV10-3, TRBJ2-5)
CATKGGNNQETQYF

SEQ ID NO: 18447 - protein, 17 aa, Homo sapiens
  CDR3 for alpha chain variable domain of TCR clone 9224 (TRAV3, TRAJ6)
CAVRDGPRAGGSNIPTF

SEQ ID NO: 18448 - protein, 14 aa, Homo sapiens
  CDR3 for beta chain variable domain of TCR clone 9224 (TRBV7-2, TRBJ2-7)
CASSPKTSFYEQYF

SEQ ID NO: 18449 - protein, 13 aa, Homo sapiens
  CDR3 for alpha chain variable domain of TCR clone 9225 (TRAV19, TRAJ57)
CALLQGGSEKLVF

SEQ ID NO: 18450 - protein, 10 aa, Homo sapiens
  CDR3 for beta chain variable domain of TCR clone 9225 (TRBV20-1, TRBJ2-5)
CSARFETQYF

SEQ ID NO: 18451 - protein, 18 aa, Homo sapiens
  CDR3 for alpha chain variable domain of TCR clone 9226 (TRAV26-1, TRAJ23)
CIVRVGLEVWNQGGKLIF

SEQ ID NO: 18452 - protein, 13 aa, Homo sapiens
  CDR3 for beta chain variable domain of TCR clone 9226 (TRBV7-2, TRBJ2-7)
CASILSGRSGLAG

SEQ ID NO: 18453 - protein, 14 aa, Homo sapiens
  CDR3 for alpha chain variable domain of TCR clone 9227 (TRAV12-2, TRAJ24)
CAVTPADSWGKLQF

SEQ ID NO: 18454 - protein, 15 aa, Homo sapiens
  CDR3 for beta chain variable domain of TCR clone 9227 (TRBV20-1, TRBJ2-7)
CSARDRVSGMDEQYF

SEQ ID NO: 18455 - protein, 12 aa, Homo sapiens
  CDR3 for alpha chain variable domain of TCR clone 9228 (TRAV17, TRAJ20)
CATDANDYKLSF

SEQ ID NO: 18456 - protein, 17 aa, Homo sapiens
  CDR3 for beta chain variable domain of TCR clone 9228 (TRBV5-1, TRBJ2-2)
CASSMAGLAGGTGELFF

SEQ ID NO: 18457 - protein, 17 aa, Homo sapiens
  CDR3 for alpha chain variable domain of TCR clone 9229 (TRAV3, TRAJ6)
CAVRDGPRAGGSYIPTF

SEQ ID NO: 18458 - protein, 17 aa, Homo sapiens
  CDR3 for beta chain variable domain of TCR clone 9229 (TRBV20-1, TRBJ2-1)
CSASSSGLAGSYNEQFF

SEQ ID NO: 18459 - protein, 14 aa, Homo sapiens
  CDR3 for alpha chain variable domain of TCR clone 9230 (TRAV30, TRAJ26)
CGTEIVSYGQNFVF

SEQ ID NO: 18460 - protein, 16 aa, Homo sapiens
  CDR3 for beta chain variable domain of TCR clone 9230 (TRBV12-5, TRBJ2-5)
CASGPRTSGNQETQYF

SEQ ID NO: 18461 - protein, 19 aa, Homo sapiens
  CDR3 for alpha chain variable domain of TCR clone 9231 (TRAV26-1, TRAJ52)
CIVRAHRNAGGISYGKLTF

SEQ ID NO: 18462 - protein, 15 aa, Homo sapiens
  CDR3 for beta chain variable domain of TCR clone 9231 (TRBV29-1, TRBJ2-1)
CSGRDRKSSYNEQFF

SEQ ID NO: 18463 - protein, 14 aa, Homo sapiens
  CDR3 for alpha chain variable domain of TCR clone 9232 (TRAV8-4, TRAJ9)
CAVRINTGGFKTIF

SEQ ID NO: 18464 - protein, 15 aa, Homo sapiens
  CDR3 for beta chain variable domain of TCR clone 9232 (TRBV10-2, TRBJ2-6)
CASSEQGTGANDLTF

SEQ ID NO: 18465 - protein, 11 aa, Homo sapiens
  CDR3 for alpha chain variable domain of TCR clone 9233 (TRAV2, TRAJ13)
CASGGYQKVTF

SEQ ID NO: 18466 - protein, 15 aa, Homo sapiens
  CDR3 for beta chain variable domain of TCR clone 9233 (TRBV5-1, TRBJ2-1)
CASSPPRAPYNEQFF

SEQ ID NO: 18467 - protein, 13 aa, Homo sapiens
  CDR3 for alpha chain variable domain of TCR clone 9234 (TRAV4, TRAJ37)
CLVGSGNTGKLIF

SEQ ID NO: 18468 - protein, 16 aa, Homo sapiens
  CDR3 for beta chain variable domain of TCR clone 9234 (TRBV11-3, TRBJ2-2)
CASSSRTSPGTGELFF

SEQ ID NO: 18469 - protein, 13 aa, Homo sapiens
  CDR3 for alpha chain variable domain of TCR clone 9235 (TRAV8-6, TRAJ49)
CAVITNTGNQFYF

SEQ ID NO: 18470 - protein, 15 aa, Homo sapiens
  CDR3 for beta chain variable domain of TCR clone 9235 (TRBV6-3, TRBJ2-7)
CASSSPGTVFYEQYF

SEQ ID NO: 18471 - protein, 11 aa, Homo sapiens
  CDR3 for alpha chain variable domain of TCR clone 9236 (TRAV1-1, TRAJ23)
CAVRQGGKLIF

SEQ ID NO: 18472 - protein, 20 aa, Homo sapiens
  CDR3 for beta chain variable domain of TCR clone 9236 (TRBV7-8, TRBJ2-2)
CASSHLFPGPTTHITGELFF

SEQ ID NO: 18473 - protein, 14 aa, Homo sapiens
  CDR3 for alpha chain variable domain of TCR clone 9237 (TRAV12-3, TRAJ42)
CAMNYGGSQGNLIF

SEQ ID NO: 18474 - protein, 14 aa, Homo sapiens
  CDR3 for beta chain variable domain of TCR clone 9237 (TRBV7-2, TRBJ2-7)
CASRSQGAAYEQYF

SEQ ID NO: 18475 - protein, 14 aa, Homo sapiens
  CDR3 for alpha chain variable domain of TCR clone 9238 (TRAV12-3, TRAJ9)
CAMSPNTGGFKTIF

SEQ ID NO: 18476 - protein, 15 aa, Homo sapiens
  CDR3 for beta chain variable domain of TCR clone 9238 (TRBV6-5, TRBJ2-1)
CASSYDAGAGNEQFF

SEQ ID NO: 18477 - protein, 14 aa, Homo sapiens
  CDR3 for alpha chain variable domain of TCR clone 9239 (TRAV1-2, TRAJ16)
CAVNRFSDGQKLLF

SEQ ID NO: 18478 - protein, 15 aa, Homo sapiens
  CDR3 for beta chain variable domain of TCR clone 9239 (TRBV11-3, TRBJ2-5)
CASSDTSGGIETQYF

SEQ ID NO: 18479 - protein, 13 aa, Homo sapiens
  CDR3 for alpha chain variable domain of TCR clone 9240 (TRAV2, TRAJ41)
CAVEEYSGYALNF

SEQ ID NO: 18480 - protein, 15 aa, Homo sapiens
  CDR3 for beta chain variable domain of TCR clone 9240 (TRBV12-4, TRBJ1-6)
CASSLLGGSNSPLHF

SEQ ID NO: 18481 - protein, 13 aa, Homo sapiens
  CDR3 for alpha chain variable domain of TCR clone 9241 (TRAV12-1, TRAJ6)
CVVFPGGSYIPTF

SEQ ID NO: 18482 - protein, 15 aa, Homo sapiens
  CDR3 for beta chain variable domain of TCR clone 9241 (TRBV20-1, TRBJ2-1)
CSARGIGGTYNEQFF

SEQ ID NO: 18483 - protein, 11 aa, Homo sapiens
  CDR3 for alpha chain variable domain of TCR clone 9242 (TRAV17, TRAJ36)
CAPTGANNLFF

SEQ ID NO: 18484 - protein, 14 aa, Homo sapiens
  CDR3 for beta chain variable domain of TCR clone 9242 (TRBV5-1, TRBJ2-1)
CASSLVTEYNEQFF

SEQ ID NO: 18485 - protein, 16 aa, Homo sapiens
  CDR3 for alpha chain variable domain of TCR clone 9243 (TRAV30, TRAJ24)
CDTEIVDADSWGKFQF

SEQ ID NO: 18486 - protein, 14 aa, Homo sapiens
  CDR3 for beta chain variable domain of TCR clone 9243 (TRBV12-5, TRBJ2-5)
CASGSRTHQETQYF

SEQ ID NO: 18487 - protein, 15 aa, Homo sapiens
  CDR3 for alpha chain variable domain of TCR clone 9244 (TRAV23/DV6, TRAJ37)
CAASRGSSNTGKLIF

SEQ ID NO: 18488 - protein, 15 aa, Homo sapiens
  CDR3 for beta chain variable domain of TCR clone 9244 (TRBV6-5, TRBJ2-7)
CASSARRGSDNEQYF

SEQ ID NO: 18489 - protein, 15 aa, Homo sapiens
  CDR3 for alpha chain variable domain of TCR clone 9245 (TRAV12-2, TRAJ43)
CAFDMRFGAGTRLTV

SEQ ID NO: 18490 - protein, 11 aa, Homo sapiens
  CDR3 for beta chain variable domain of TCR clone 9245 (TRBV11-2, TRBJ2-2)
CASSLPGELFF

SEQ ID NO: 18491 - protein, 14 aa, Homo sapiens
  CDR3 for alpha chain variable domain of TCR clone 9246 (TRAV1-2, TRAJ16)
CAVNRSSDGQKLLF

SEQ ID NO: 18492 - protein, 15 aa, Homo sapiens
  CDR3 for beta chain variable domain of TCR clone 9246 (TRBV7-9, TRBJ1-6)
CASSSPGRGNSPLHF

SEQ ID NO: 18493 - protein, 13 aa, Homo sapiens
  CDR3 for alpha chain variable domain of TCR clone 9247 (TRAV12-3, TRAJ36)
CAMRRPGANNLFF

SEQ ID NO: 18494 - protein, 18 aa, Homo sapiens
  CDR3 for beta chain variable domain of TCR clone 9247 (TRBV11-1, TRBJ2-2)
CASSREAGGPGNTGELFF

SEQ ID NO: 18495 - protein, 17 aa, Homo sapiens
  CDR3 for alpha chain variable domain of TCR clone 9248 (TRAV3, TRAJ42)
CAVRDRDYGGSQGNLIF

SEQ ID NO: 18496 - protein, 14 aa, Homo sapiens
  CDR3 for beta chain variable domain of TCR clone 9248 (TRBV7-2, TRBJ2-7)
CASRSQGAAYEQYF

SEQ ID NO: 18497 - protein, 14 aa, Homo sapiens
  CDR3 for alpha chain variable domain of TCR clone 9249 (TRAV1-2, TRAJ8)
RAVREDTGFQKLVF

SEQ ID NO: 18498 - protein, 15 aa, Homo sapiens
  CDR3 for beta chain variable domain of TCR clone 9249 (TRBV6-3, TRBJ2-7)
CASSSPGTVFYEQYF

SEQ ID NO: 18499 - protein, 13 aa, Homo sapiens
  CDR3 for alpha chain variable domain of TCR clone 9250 (TRAV13-2, TRAJ48)
CAEMDFGNEKLTF

SEQ ID NO: 18500 - protein, 15 aa, Homo sapiens
  CDR3 for beta chain variable domain of TCR clone 9250 (TRBV27, TRBJ2-5)
CASSLYPRGGETQYF

SEQ ID NO: 18501 - protein, 14 aa, Homo sapiens
  CDR3 for alpha chain variable domain of TCR clone 9251 (TRAV3, TRAJ30)
CAVRDIGRDDKIIF

SEQ ID NO: 18502 - protein, 15 aa, Homo sapiens
  CDR3 for beta chain variable domain of TCR clone 9251 (TRBV10-3, TRBJ1-1)
CAISEAGTGGTEAFF

SEQ ID NO: 18503 - protein, 12 aa, Homo sapiens
  CDR3 for alpha chain variable domain of TCR clone 9252 (TRAV24, TRAJ26)
CAFFNYGQNFVF

SEQ ID NO: 18504 - protein, 19 aa, Homo sapiens
  CDR3 for beta chain variable domain of TCR clone 9252 (TRBV7-2, TRBJ2-3)
CASSPGLAGGGLTTDTQYF

SEQ ID NO: 18505 - protein, 16 aa, Homo sapiens
  CDR3 for alpha chain variable domain of TCR clone 9253 (TRAV30, TRAJ24)
CGTEIVDADSWGKFEF

SEQ ID NO: 18506 - protein, 14 aa, Homo sapiens
  CDR3 for beta chain variable domain of TCR clone 9253 (TRBV12-5, TRBJ2-5)
CASGSRTHQETQYF

SEQ ID NO: 18507 - protein, 17 aa, Homo sapiens
  CDR3 for alpha chain variable domain of TCR clone 9254 (TRAV26-2, TRAJ37)
CILRELVGSSNTGKLIF

SEQ ID NO: 18508 - protein, 16 aa, Homo sapiens
  CDR3 for beta chain variable domain of TCR clone 9254 (TRBV6-1, TRBJ2-3)
CASSGNRGRGTDTQYF

SEQ ID NO: 18509 - protein, 17 aa, Homo sapiens
  CDR3 for alpha chain variable domain of TCR clone 9255 (TRAV3, TRAJ6)
CAVRDGPREGGSYIPTF

SEQ ID NO: 18510 - protein, 14 aa, Homo sapiens
  CDR3 for beta chain variable domain of TCR clone 9255 (TRBV7-2, TRBJ2-7)
CASSPKTSFYEQYF

SEQ ID NO: 18511 - protein, 17 aa, Homo sapiens
  CDR3 for alpha chain variable domain of TCR clone 9256 (TRAV29/DV5, TRAJ52)
CAASARAGGTSYGKLTF

SEQ ID NO: 18512 - protein, 15 aa, Homo sapiens
  CDR3 for beta chain variable domain of TCR clone 9256 (TRBV4-2, TRBJ1-1)
CASSQRSSGRTEAFF

SEQ ID NO: 18513 - protein, 14 aa, Homo sapiens
  CDR3 for alpha chain variable domain of TCR clone 9257 (TRAV1-2, TRAJ16)
CAVNRFSDGQKLLF

SEQ ID NO: 18514 - protein, 15 aa, Homo sapiens
  CDR3 for beta chain variable domain of TCR clone 9257 (TRBV9, TRBJ1-6)
CASSVAGTGDSPLHL

SEQ ID NO: 18515 - protein, 12 aa, Homo sapiens
  CDR3 for alpha chain variable domain of TCR clone 9258 (TRAV12-1, TRAJ40)
CVVYSGTYKYTF

SEQ ID NO: 18516 - protein, 18 aa, Homo sapiens
  CDR3 for beta chain variable domain of TCR clone 9258 (TRBV11-2, TRBJ2-3)
CASSLGGASRGAPNTQYF

SEQ ID NO: 18517 - protein, 12 aa, Homo sapiens
  CDR3 for alpha chain variable domain of TCR clone 9259 (TRAV13-1, TRAJ43)
CAAGRFNNDMRF

SEQ ID NO: 18518 - protein, 15 aa, Homo sapiens
  CDR3 for beta chain variable domain of TCR clone 9259 (TRBV29-1, TRBJ2-7)
CSVEFFDRGSYEQYF

SEQ ID NO: 18519 - protein, 14 aa, Homo sapiens
  CDR3 for alpha chain variable domain of TCR clone 9260 (TRAV2, TRAJ37)
CAVAFTSNTGKLIF

SEQ ID NO: 18520 - protein, 15 aa, Homo sapiens
  CDR3 for beta chain variable domain of TCR clone 9260 (TRBV20-1, TRBJ1-1)
CSASRGVTGNTEAFF

SEQ ID NO: 18521 - protein, 12 aa, Homo sapiens
  CDR3 for alpha chain variable domain of TCR clone 9261 (TRAV8-6, TRAJ4)
CAVSDHPNKLIF

SEQ ID NO: 18522 - protein, 14 aa, Homo sapiens
  CDR3 for beta chain variable domain of TCR clone 9261 (TRBV6-6, TRBJ1-5)
CASVDSGFNQPQHF

SEQ ID NO: 18523 - protein, 12 aa, Homo sapiens
  CDR3 for alpha chain variable domain of TCR clone 9262 (TRAV25, TRAJ11)
CAGYSGYSTLTF

SEQ ID NO: 18524 - protein, 13 aa, Homo sapiens
  CDR3 for beta chain variable domain of TCR clone 9262 (TRBV10-3, TRBJ2-7)
CASKLAVNYEQYF

SEQ ID NO: 18525 - protein, 13 aa, Homo sapiens
  CDR3 for alpha chain variable domain of TCR clone 9263 (TRAV2, TRAJ40)
CAVVTSGTYKYIF

SEQ ID NO: 18526 - protein, 15 aa, Homo sapiens
  CDR3 for beta chain variable domain of TCR clone 9263 (TRBV7-3, TRBJ2-2)
CASSETGQGTGELFF

SEQ ID NO: 18527 - protein, 12 aa, Homo sapiens
  CDR3 for alpha chain variable domain of TCR clone 9264 (TRAV1-1, TRAJ8)
CAGGTGFQKLVF

SEQ ID NO: 18528 - protein, 13 aa, Homo sapiens
  CDR3 for beta chain variable domain of TCR clone 9264 (TRBV11-3, TRBJ2-1)
CASSSRRVDEQFF

SEQ ID NO: 18529 - protein, 14 aa, Homo sapiens
  CDR3 for alpha chain variable domain of TCR clone 9265 (TRAV20, TRAJ42)
CAVQAGGSQGKLIF

SEQ ID NO: 18530 - protein, 14 aa, Homo sapiens
  CDR3 for beta chain variable domain of TCR clone 9265 (TRBV28, TRBJ1-2)
CASRIQGANYGYTF

SEQ ID NO: 18531 - protein, 13 aa, Homo sapiens
  CDR3 for alpha chain variable domain of TCR clone 9266 (TRAV8-2, TRAJ21)
CVVSSYNFNKFYF

SEQ ID NO: 18532 - protein, 15 aa, Homo sapiens
  CDR3 for beta chain variable domain of TCR clone 9266 (TRBV18, TRBJ1-1)
CASSDRGTGDTEAFF

SEQ ID NO: 18533 - protein, 15 aa, Homo sapiens
  CDR3 for alpha chain variable domain of TCR clone 9267 (TRAV3, TRAJ5)
CAVRDLGTGRRALTF

SEQ ID NO: 18534 - protein, 13 aa, Homo sapiens
  CDR3 for beta chain variable domain of TCR clone 9267 (TRBV12-4, TRBJ2-7)
CASSPTETYEQYF

SEQ ID NO: 18535 - protein, 14 aa, Homo sapiens
  CDR3 for alpha chain variable domain of TCR clone 9268 (TRAV29/DV5, TRAJ36)
CAARRKTGANNLFF

SEQ ID NO: 18536 - protein, 17 aa, Homo sapiens
  CDR3 for beta chain variable domain of TCR clone 9268 (TRBV7-6, TRBJ2-5)
CASSPGLADPWGETQYF

SEQ ID NO: 18537 - protein, 14 aa, Homo sapiens
  CDR3 for alpha chain variable domain of TCR clone 9269 (TRAV2, TRAJ29)
CAGPFQYGNTPLVF

SEQ ID NO: 18538 - protein, 11 aa, Homo sapiens
  CDR3 for beta chain variable domain of TCR clone 9269 (TRBV27, TRBJ2-3)
CASSLGDTQYF

SEQ ID NO: 18539 - protein, 13 aa, Homo sapiens
  CDR3 for alpha chain variable domain of TCR clone 9270 (TRAV12-3, TRAJ9)
CAMSGGGGFKTIF

SEQ ID NO: 18540 - protein, 15 aa, Homo sapiens
  CDR3 for beta chain variable domain of TCR clone 9270 (TRBV20-1, TRBJ2-1)
CSARVGGVGVLEQFF

SEQ ID NO: 18541 - protein, 15 aa, Homo sapiens
  CDR3 for alpha chain variable domain of TCR clone 9271 (TRAV2, TRAJ24)
CAVEVLTDSWGKFQF

SEQ ID NO: 18542 - protein, 17 aa, Homo sapiens
  CDR3 for beta chain variable domain of TCR clone 9271 (TRBV7-8, TRBJ2-6)
CASSAGTGGAGANVLTF

SEQ ID NO: 18543 - protein, 15 aa, Homo sapiens
  CDR3 for alpha chain variable domain of TCR clone 9272 (TRAV27, TRAJ45)
CAPVDSGGGADGLTF

SEQ ID NO: 18544 - protein, 15 aa, Homo sapiens
  CDR3 for beta chain variable domain of TCR clone 9272 (TRBV5-1, TRBJ1-1)
CASSVDRLGNTEAFF

SEQ ID NO: 18545 - protein, 15 aa, Homo sapiens
  CDR3 for alpha chain variable domain of TCR clone 9273 (TRAV21, TRAJ53)
CATLNSGGSNYKLTF

SEQ ID NO: 18546 - protein, 17 aa, Homo sapiens
  CDR3 for beta chain variable domain of TCR clone 9273 (TRBV4-1, TRBJ2-3)
CASSQGYVSGGTDTQYF

SEQ ID NO: 18547 - protein, 13 aa, Homo sapiens
  CDR3 for alpha chain variable domain of TCR clone 9274 (TRAV8-6, TRAJ49)
CAVITNTGNQFYF

SEQ ID NO: 18548 - protein, 14 aa, Homo sapiens
  CDR3 for beta chain variable domain of TCR clone 9274 (TRBV7-2, TRBJ2-7)
CASRSQGAAYEQYF

SEQ ID NO: 18549 - protein, 18 aa, Homo sapiens
  CDR3 for alpha chain variable domain of TCR clone 9275 (TRAV8-6, TRAJ52)
CAVSRVGAGGTSYGKLTF

SEQ ID NO: 18550 - protein, 14 aa, Homo sapiens
  CDR3 for beta chain variable domain of TCR clone 9275 (TRBV7-2, TRBJ1-4)
CASSHSKTNEKLFF

SEQ ID NO: 18551 - protein, 14 aa, Homo sapiens
  CDR3 for alpha chain variable domain of TCR clone 9276 (TRAV12-1, TRAJ4)
CGEQRSGGYNKLIF

SEQ ID NO: 18552 - protein, 16 aa, Homo sapiens
  CDR3 for beta chain variable domain of TCR clone 9276 (TRBV11-3, TRBJ2-5)
CASSSVVAGSTETQYF

SEQ ID NO: 18553 - protein, 14 aa, Homo sapiens
  CDR3 for alpha chain variable domain of TCR clone 9277 (TRAV12-2, TRAJ5)
CAVNIRVRGRALTF

SEQ ID NO: 18554 - protein, 16 aa, Homo sapiens
  CDR3 for beta chain variable domain of TCR clone 9277 (TRBV5-1, TRBJ1-6)
CASSFTGTGGDSPLHF

SEQ ID NO: 18555 - protein, 15 aa, Homo sapiens
  CDR3 for alpha chain variable domain of TCR clone 9278 (TRAV26-1, TRAJ23)
CIVRVAGYQGGKLIF

SEQ ID NO: 18556 - protein, 12 aa, Homo sapiens
  CDR3 for beta chain variable domain of TCR clone 9278 (TRBV7-2, TRBJ2-5)
CASSQYQETQYF

SEQ ID NO: 18557 - protein, 14 aa, Homo sapiens
  CDR3 for alpha chain variable domain of TCR clone 9279 (TRAV14/DV4, TRAJ15)
CAMRRDQAGTALIF

SEQ ID NO: 18558 - protein, 16 aa, Homo sapiens
  CDR3 for beta chain variable domain of TCR clone 9279 (TRBV12-5, TRBJ2-5)
CASGPRTSGNQETQYF

SEQ ID NO: 18559 - protein, 16 aa, Homo sapiens
  CDR3 for alpha chain variable domain of TCR clone 9280 (TRAV12-3, TRAJ53)
CAMNPGSGGSNYKLTF

SEQ ID NO: 18560 - protein, 11 aa, Homo sapiens
  CDR3 for beta chain variable domain of TCR clone 9280 (TRBV29-1, TRBJ2-5)
CSEDRTGTQYF

SEQ ID NO: 18561 - protein, 18 aa, Homo sapiens
  CDR3 for alpha chain variable domain of TCR clone 9281 (TRAV8-6, TRAJ36)
CAVSDGLRDWGKQPLLWD

SEQ ID NO: 18562 - protein, 16 aa, Homo sapiens
  CDR3 for beta chain variable domain of TCR clone 9281 (TRBV28, TRBJ2-1)
CASSSPEYPRDNEQFF

SEQ ID NO: 18563 - protein, 14 aa, Homo sapiens
  CDR3 for alpha chain variable domain of TCR clone 9282 (TRAV12-3, TRAJ10)
SHLPLTGGGNKLTF

SEQ ID NO: 18564 - protein, 14 aa, Homo sapiens
  CDR3 for beta chain variable domain of TCR clone 9282 (TRBV5-1, TRBJ2-3)
CASSLERDLGPQYF

SEQ ID NO: 18565 - protein, 17 aa, Homo sapiens
  CDR3 for alpha chain variable domain of TCR clone 9283 (TRAV36/DV7, TRAJ52)
CAVAQRAGGTSYGKLTF

SEQ ID NO: 18566 - protein, 13 aa, Homo sapiens
  CDR3 for beta chain variable domain of TCR clone 9283 (TRBV2, TRBJ2-7)
CASSVGGSGEQYF

SEQ ID NO: 18567 - protein, 14 aa, Homo sapiens
  CDR3 for alpha chain variable domain of TCR clone 9284 (TRAV35, TRAJ33)
CAGSSQDSNYQLIW

SEQ ID NO: 18568 - protein, 15 aa, Homo sapiens
  CDR3 for beta chain variable domain of TCR clone 9284 (TRBV4-1, TRBJ1-4)
CASSDTGGTNEKLFF

SEQ ID NO: 18569 - protein, 14 aa, Homo sapiens
  CDR3 for alpha chain variable domain of TCR clone 9285 (TRAV1-2, TRAJ16)
CAVNRFSDGQKLLF

SEQ ID NO: 18570 - protein, 15 aa, Homo sapiens
  CDR3 for beta chain variable domain of TCR clone 9285 (TRBV7-9, TRBJ1-6)
CASSSPGRGNSTLHF

SEQ ID NO: 18571 - protein, 16 aa, Homo sapiens
  CDR3 for alpha chain variable domain of TCR clone 9286 (TRAV30, TRAJ24)
CGTEIVDADNWGKFQF

SEQ ID NO: 18572 - protein, 14 aa, Homo sapiens
  CDR3 for beta chain variable domain of TCR clone 9286 (TRBV12-5, TRBJ2-5)
CASGSRTHQETQYF

SEQ ID NO: 18573 - protein, 14 aa, Homo sapiens
  CDR3 for alpha chain variable domain of TCR clone 9287 (TRAV6, TRAJ6)
CALDRAGGSYIPTF

SEQ ID NO: 18574 - protein, 13 aa, Homo sapiens
  CDR3 for beta chain variable domain of TCR clone 9287 (TRBV10-2, TRBJ2-5)
CASSEGGKETQYF

SEQ ID NO: 18575 - protein, 15 aa, Homo sapiens
  CDR3 for alpha chain variable domain of TCR clone 9288 (TRAV17, TRAJ22)
CATVAPSGSARQLTF

SEQ ID NO: 18576 - protein, 16 aa, Homo sapiens
  CDR3 for beta chain variable domain of TCR clone 9288 (TRBV10-3, TRBJ2-7)
CAISADFVDRPYEQYF

SEQ ID NO: 18577 - protein, 11 aa, Homo sapiens
  CDR3 for alpha chain variable domain of TCR clone 9289 (TRAV8-1, TRAJ8)
CAMTGFQKLVF

SEQ ID NO: 18578 - protein, 14 aa, Homo sapiens
  CDR3 for beta chain variable domain of TCR clone 9289 (TRBV15, TRBJ2-5)
CATSIGGLGETQYF

SEQ ID NO: 18579 - protein, 11 aa, Homo sapiens
  CDR3 for alpha chain variable domain of TCR clone 9290 (TRAV3, TRAJ21)
CAVGNFNKFSF

SEQ ID NO: 18580 - protein, 16 aa, Homo sapiens
  CDR3 for beta chain variable domain of TCR clone 9290 (TRBV19, TRBJ2-1)
CASSKAGPSSYNEQFF

SEQ ID NO: 18581 - protein, 13 aa, Homo sapiens
  CDR3 for alpha chain variable domain of TCR clone 9291 (TRAV22, TRAJ12)
CAGRMDSSYKLIF

SEQ ID NO: 18582 - protein, 13 aa, Homo sapiens
  CDR3 for beta chain variable domain of TCR clone 9291 (TRBV2, TRBJ2-7)
CASSVGGSGEQYF

SEQ ID NO: 18583 - protein, 11 aa, Homo sapiens
  CDR3 for alpha chain variable domain of TCR clone 9292 (TRAV17, TRAJ9)
CVTTGGFKTIF

SEQ ID NO: 18584 - protein, 14 aa, Homo sapiens
  CDR3 for beta chain variable domain of TCR clone 9292 (TRBV7-9, TRBJ2-2)
CASSGLADTGELFF

SEQ ID NO: 18585 - protein, 16 aa, Homo sapiens
  CDR3 for alpha chain variable domain of TCR clone 9293 (TRAV30, TRAJ24)
FGTEIVDADSWGKFQF

SEQ ID NO: 18586 - protein, 14 aa, Homo sapiens
  CDR3 for beta chain variable domain of TCR clone 9293 (TRBV12-5, TRBJ2-5)
CASGSRTHQETQYF

SEQ ID NO: 18587 - protein, 12 aa, Homo sapiens
  CDR3 for alpha chain variable domain of TCR clone 9294 (TRAV8-4, TRAJ37)
CAKSSNTGKLIF

SEQ ID NO: 18588 - protein, 15 aa, Homo sapiens
  CDR3 for beta chain variable domain of TCR clone 9294 (TRBV5-1, TRBJ2-3)
CASSYTSGSTDTQYF

SEQ ID NO: 18589 - protein, 15 aa, Homo sapiens
  CDR3 for alpha chain variable domain of TCR clone 9295 (TRAV16, TRAJ16)
CALQGGGSDGQKLLF

SEQ ID NO: 18590 - protein, 13 aa, Homo sapiens
  CDR3 for beta chain variable domain of TCR clone 9295 (TRBV12-5, TRBJ2-3)
CASGDRQSDTQYF

SEQ ID NO: 18591 - protein, 15 aa, Homo sapiens
  CDR3 for alpha chain variable domain of TCR clone 9296 (TRAV12-2, TRAJ53)
CAVNGGGGSNYKLTF

SEQ ID NO: 18592 - protein, 16 aa, Homo sapiens
  CDR3 for beta chain variable domain of TCR clone 9296 (TRBV7-3, TRBJ2-3)
CASSLSGYRPEDTQYF

SEQ ID NO: 18593 - protein, 13 aa, Homo sapiens
  CDR3 for alpha chain variable domain of TCR clone 9297 (TRAV21, TRAJ27)
CAARPGNAGKSTF

SEQ ID NO: 18594 - protein, 14 aa, Homo sapiens
  CDR3 for beta chain variable domain of TCR clone 9297 (TRBV7-6, TRBJ2-3)
CASSLGTVTDTQYS

SEQ ID NO: 18595 - protein, 14 aa, Homo sapiens
  CDR3 for alpha chain variable domain of TCR clone 9298 (TRAV13-1, TRAJ35)
CAASKGGFGNVQHC

SEQ ID NO: 18596 - protein, 13 aa, Homo sapiens
  CDR3 for beta chain variable domain of TCR clone 9298 (TRBV7-3, TRBJ1-1)
CASSQDWGAEAFF

SEQ ID NO: 18597 - protein, 19 aa, Homo sapiens
  CDR3 for alpha chain variable domain of TCR clone 9299 (TRAV8-3, TRAJ32)
LSTSVLWVRRGGATNKLIF

SEQ ID NO: 18598 - protein, 15 aa, Homo sapiens
  CDR3 for beta chain variable domain of TCR clone 9299 (TRBV7-2, TRBJ2-1)
CASSSPGQYLGEQFF

SEQ ID NO: 18599 - protein, 15 aa, Homo sapiens
  CDR3 for alpha chain variable domain of TCR clone 9300 (TRAV26-1, TRAJ29)
CIVRVEGSGNAPLVF

SEQ ID NO: 18600 - protein, 14 aa, Homo sapiens
  CDR3 for beta chain variable domain of TCR clone 9300 (TRBV18, TRBJ2-5)
CASSPGVSQETQYF

SEQ ID NO: 18601 - protein, 14 aa, Homo sapiens
  CDR3 for alpha chain variable domain of TCR clone 9301 (TRAV2, TRAJ20)
CAVEDGTNDYKLSF

SEQ ID NO: 18602 - protein, 14 aa, Homo sapiens
  CDR3 for beta chain variable domain of TCR clone 9301 (TRBV20-1, TRBJ2-5)
CSARDGRAGETQYF

SEQ ID NO: 18603 - protein, 15 aa, Homo sapiens
  CDR3 for alpha chain variable domain of TCR clone 9302 (TRAV8-3, TRAJ27)
CAVGPSKTNAGKSTF

SEQ ID NO: 18604 - protein, 15 aa, Homo sapiens
  CDR3 for beta chain variable domain of TCR clone 9302 (TRBV7-2, TRBJ2-3)
CASSLAGAFIDTQYF

SEQ ID NO: 18605 - protein, 13 aa, Homo sapiens
  CDR3 for alpha chain variable domain of TCR clone 9303 (TRAV13-1, TRAJ27)
CAASIHQCRQINL

SEQ ID NO: 18606 - protein, 14 aa, Homo sapiens
  CDR3 for beta chain variable domain of TCR clone 9303 (TRBV28, TRBJ2-5)
CASSRLAGGETQYF

SEQ ID NO: 18607 - protein, 15 aa, Homo sapiens
  CDR3 for alpha chain variable domain of TCR clone 9304 (TRAV8-3, TRAJ45)
CASSYSGGGADGLTF

SEQ ID NO: 18608 - protein, 13 aa, Homo sapiens
  CDR3 for beta chain variable domain of TCR clone 9304 (TRBV7-8, TRBJ2-7)
CASSLTGGREQYF

SEQ ID NO: 18609 - protein, 12 aa, Homo sapiens
  CDR3 for alpha chain variable domain of TCR clone 9305 (TRAV1-1, TRAJ39)
CAVPVVGNMLTF

SEQ ID NO: 18610 - protein, 13 aa, Homo sapiens
  CDR3 for beta chain variable domain of TCR clone 9305 (TRBV28, TRBJ2-3)
CASSLPQVDTQYF

SEQ ID NO: 18611 - protein, 15 aa, Homo sapiens
  CDR3 for alpha chain variable domain of TCR clone 9306 (TRAV8-2, TRAJ28)
CVVSESGAGSYQLTF

SEQ ID NO: 18612 - protein, 16 aa, Homo sapiens
  CDR3 for beta chain variable domain of TCR clone 9306 (TRBV10-3, TRBJ2-1)
CAISLTSGNSYNEQFF

SEQ ID NO: 18613 - protein, 14 aa, Homo sapiens
  CDR3 for alpha chain variable domain of TCR clone 9307 (TRAV26-1, TRAJ38)
CIADNAGNNRKLIW

SEQ ID NO: 18614 - protein, 13 aa, Homo sapiens
  CDR3 for beta chain variable domain of TCR clone 9307 (TRBV20-1, TRBJ1-1)
RSARGGGNTEAFF

SEQ ID NO: 18615 - protein, 16 aa, Homo sapiens
  CDR3 for alpha chain variable domain of TCR clone 9308 (TRAV30, TRAJ24)
CGTEIVDADSWGKFQF

SEQ ID NO: 18616 - protein, 13 aa, Homo sapiens
  CDR3 for beta chain variable domain of TCR clone 9308 (TRBV4-2, TRBJ1-1)
CASSQAGNTEAFF

SEQ ID NO: 18617 - protein, 15 aa, Homo sapiens
  CDR3 for alpha chain variable domain of TCR clone 9309 (TRAV8-3, TRAJ45)
CASSYSGGGADGLTF

SEQ ID NO: 18618 - protein, 13 aa, Homo sapiens
  CDR3 for beta chain variable domain of TCR clone 9309 (TRBV10-3, TRBJ2-7)
RASKLAVNYEQYF

SEQ ID NO: 18619 - protein, 16 aa, Homo sapiens
  CDR3 for alpha chain variable domain of TCR clone 9310 (TRAV12-3, TRAJ53)
CAMSPGSGGSNYKPTF

SEQ ID NO: 18620 - protein, 11 aa, Homo sapiens
  CDR3 for beta chain variable domain of TCR clone 9310 (TRBV29-1, TRBJ2-5)
CSEDRTGTQYF

SEQ ID NO: 18621 - protein, 14 aa, Homo sapiens
  CDR3 for alpha chain variable domain of TCR clone 9311 (TRAV2, TRAJ37)
CAVDFTSDTGKLIF

SEQ ID NO: 18622 - protein, 15 aa, Homo sapiens
  CDR3 for beta chain variable domain of TCR clone 9311 (TRBV20-1, TRBJ1-1)
CSASRGVTGNTEAFF

SEQ ID NO: 18623 - protein, 11 aa, Homo sapiens
  CDR3 for alpha chain variable domain of TCR clone 9312 (TRAV12-3, TRAJ43)
CAMSVPNDMRF

SEQ ID NO: 18624 - protein, 13 aa, Homo sapiens
  CDR3 for beta chain variable domain of TCR clone 9312 (TRBV20-1, TRBJ1-1)
CSAPLGGGTEAFF

SEQ ID NO: 18625 - protein, 13 aa, Homo sapiens
  CDR3 for alpha chain variable domain of TCR clone 9313 (TRAV12-2, TRAJ52)
YAVGGTSYGKLTF

SEQ ID NO: 18626 - protein, 14 aa, Homo sapiens
  CDR3 for beta chain variable domain of TCR clone 9313 (TRBV19, TRBJ2-1)
CASPTFVLSGEQFF

SEQ ID NO: 18627 - protein, 12 aa, Homo sapiens
  CDR3 for alpha chain variable domain of TCR clone 9314 (TRAV13-2, TRAJ39)
CAENSERNMLTF

SEQ ID NO: 18628 - protein, 14 aa, Homo sapiens
  CDR3 for beta chain variable domain of TCR clone 9314 (TRBV20-1, TRBJ1-1)
CSAMGGTANTEAFF

SEQ ID NO: 18629 - protein, 15 aa, Homo sapiens
  CDR3 for alpha chain variable domain of TCR clone 9315 (TRAV8-3, TRAJ20)
CAVEAKGSNDYKLSF

SEQ ID NO: 18630 - protein, 16 aa, Homo sapiens
  CDR3 for beta chain variable domain of TCR clone 9315 (TRBV4-2, TRBJ2-3)
CASSQELAGDTDTQYF

SEQ ID NO: 18631 - protein, 11 aa, Homo sapiens
  CDR3 for alpha chain variable domain of TCR clone 9316 (TRAV1-1, TRAJ23)
CAVRQGGKLIF

SEQ ID NO: 18632 - protein, 20 aa, Homo sapiens
  CDR3 for beta chain variable domain of TCR clone 9316 (TRBV7-8, TRBJ2-2)
CASSHLLPGPTIHITGELFF

SEQ ID NO: 18633 - protein, 14 aa, Homo sapiens
  CDR3 for alpha chain variable domain of TCR clone 9317 (TRAV21, TRAJ35)
CAVMPIGFGNVLHC

SEQ ID NO: 18634 - protein, 12 aa, Homo sapiens
  CDR3 for beta chain variable domain of TCR clone 9317 (TRBV7-9, TRBJ2-7)
CASSIKRGEQYF

SEQ ID NO: 18635 - protein, 14 aa, Homo sapiens
  CDR3 for alpha chain variable domain of TCR clone 9318 (TRAV29/DV5, TRAJ36)
CAARRKTGANNLFF

SEQ ID NO: 18636 - protein, 14 aa, Homo sapiens
  CDR3 for beta chain variable domain of TCR clone 9318 (TRBV6-3, TRBJ2-2)
CASSSTSNTGELFF

SEQ ID NO: 18637 - protein, 16 aa, Homo sapiens
  CDR3 for alpha chain variable domain of TCR clone 9319 (TRAV39, TRAJ45)
CAVDRSAGGGADGLTF

SEQ ID NO: 18638 - protein, 14 aa, Homo sapiens
  CDR3 for beta chain variable domain of TCR clone 9319 (TRBV28, TRBJ1-3)
CASSFRDRVNTIYF

SEQ ID NO: 18639 - protein, 15 aa, Homo sapiens
  CDR3 for alpha chain variable domain of TCR clone 9320 (TRAV26-1, TRAJ29)
CIVIVEGSGNTPLVF

SEQ ID NO: 18640 - protein, 15 aa, Homo sapiens
  CDR3 for beta chain variable domain of TCR clone 9320 (TRBV7-9, TRBJ1-5)
CASSQGHQPNQPQHF

SEQ ID NO: 18641 - protein, 15 aa, Homo sapiens
  CDR3 for alpha chain variable domain of TCR clone 9321 (TRAV23/DV6, TRAJ18)
CAARYRGPTLGRLYF

SEQ ID NO: 18642 - protein, 13 aa, Homo sapiens
  CDR3 for beta chain variable domain of TCR clone 9321 (TRBV7-2, TRBJ2-7)
CASSSPSGSEQYF

SEQ ID NO: 18643 - protein, 10 aa, Homo sapiens
  CDR3 for alpha chain variable domain of TCR clone 9322 (TRAV12-2, TRAJ22)
CAVNETQLTF

SEQ ID NO: 18644 - protein, 15 aa, Homo sapiens
  CDR3 for beta chain variable domain of TCR clone 9322 (TRBV27, TRBJ2-1)
CASSNGGGSSNEQFF

SEQ ID NO: 18645 - protein, 15 aa, Homo sapiens
  CDR3 for alpha chain variable domain of TCR clone 9323 (TRAV26-1, TRAJ29)
CIVRVEGSGNTPLVF

SEQ ID NO: 18646 - protein, 14 aa, Homo sapiens
  CDR3 for beta chain variable domain of TCR clone 9323 (TRBV18, TRBJ2-5)
CASPPGVSQETQYF

SEQ ID NO: 18647 - protein, 14 aa, Homo sapiens
  CDR3 for alpha chain variable domain of TCR clone 9324 (TRAV26-1, TRAJ38)
CIADNAGNNRKLIW

SEQ ID NO: 18648 - protein, 13 aa, Homo sapiens
  CDR3 for beta chain variable domain of TCR clone 9324 (TRBV20-1, TRBJ2-2)
CSASAAGTGELFF

SEQ ID NO: 18649 - protein, 12 aa, Homo sapiens
  CDR3 for alpha chain variable domain of TCR clone 9325 (TRAV12-3, TRAJ17)
CAMTLTGNKLTF

SEQ ID NO: 18650 - protein, 15 aa, Homo sapiens
  CDR3 for beta chain variable domain of TCR clone 9325 (TRBV20-1, TRBJ2-7)
CSARDRVSGMDDQYF

SEQ ID NO: 18651 - protein, 14 aa, Homo sapiens
  CDR3 for alpha chain variable domain of TCR clone 9326 (TRAV26-1, TRAJ38)
CIADNAGNNRKLIC

SEQ ID NO: 18652 - protein, 13 aa, Homo sapiens
  CDR3 for beta chain variable domain of TCR clone 9326 (TRBV20-1, TRBJ1-1)
CSARGGGNTEAFF

SEQ ID NO: 18653 - protein, 14 aa, Homo sapiens
  CDR3 for alpha chain variable domain of TCR clone 9327 (TRAV12-1, TRAJ26)
CVVKGSNYGQNFVF

SEQ ID NO: 18654 - protein, 14 aa, Homo sapiens
  CDR3 for beta chain variable domain of TCR clone 9327 (TRBV5-4, TRBJ1-1)
CASSLDSRRDEAFF

SEQ ID NO: 18655 - protein, 12 aa, Homo sapiens
  CDR3 for alpha chain variable domain of TCR clone 9328 (TRAV12-3, TRAJ17)
CAMTLTGNKLTI

SEQ ID NO: 18656 - protein, 15 aa, Homo sapiens
  CDR3 for beta chain variable domain of TCR clone 9328 (TRBV20-1, TRBJ2-7)
CSARDRVSGMDEQYF

SEQ ID NO: 18657 - protein, 14 aa, Homo sapiens
  CDR3 for alpha chain variable domain of TCR clone 9329 (TRAV17, TRAJ57)
CATDAKGGSEKLVF

SEQ ID NO: 18658 - protein, 15 aa, Homo sapiens
  CDR3 for beta chain variable domain of TCR clone 9329 (TRBV7-2, TRBJ2-1)
CASTHGTGIYNEQFF

SEQ ID NO: 18659 - protein, 15 aa, Homo sapiens
  CDR3 for alpha chain variable domain of TCR clone 9330 (TRAV3, TRAJ5)
CAVRDLDTGRRALTF

SEQ ID NO: 18660 - protein, 13 aa, Homo sapiens
  CDR3 for beta chain variable domain of TCR clone 9330 (TRBV12-4, TRBJ2-7)
CASSPTETHEQYF

SEQ ID NO: 18661 - protein, 18 aa, Homo sapiens
  CDR3 for alpha chain variable domain of TCR clone 9331 (TRAV29/DV5, TRAJ52)
CAAGFRGAGGTSYGKLTF

SEQ ID NO: 18662 - protein, 14 aa, Homo sapiens
  CDR3 for beta chain variable domain of TCR clone 9331 (TRBV5-1, TRBJ2-5)
CASSLAGKQETQYF

SEQ ID NO: 18663 - protein, 17 aa, Homo sapiens
  CDR3 for alpha chain variable domain of TCR clone 9332 (TRAV3, TRAJ12)
CAVRDGGRMDSSYKLIF

SEQ ID NO: 18664 - protein, 15 aa, Homo sapiens
  CDR3 for beta chain variable domain of TCR clone 9332 (TRBV5-1, TRBJ2-1)
CASSPPRAPYNEQFF

SEQ ID NO: 18665 - protein, 13 aa, Homo sapiens
  CDR3 for alpha chain variable domain of TCR clone 9333 (TRAV27, TRAJ16)
CAGACSDGQKLLF

SEQ ID NO: 18666 - protein, 14 aa, Homo sapiens
  CDR3 for beta chain variable domain of TCR clone 9333 (TRBV27, TRBJ1-1)
CASSLAGLNTEAFF

SEQ ID NO: 18667 - protein, 14 aa, Homo sapiens
  CDR3 for alpha chain variable domain of TCR clone 9334 (TRAV13-1, TRAJ35)
CAASKGGFGNVLHC

SEQ ID NO: 18668 - protein, 13 aa, Homo sapiens
  CDR3 for beta chain variable domain of TCR clone 9334 (TRBV7-3, TRBJ1-1)
CASSQDRGAEAFF

SEQ ID NO: 18669 - protein, 15 aa, Homo sapiens
  CDR3 for alpha chain variable domain of TCR clone 9335 (TRAV25, TRAJ52)
CAGRPGGTSCGKLTF

SEQ ID NO: 18670 - protein, 17 aa, Homo sapiens
  CDR3 for beta chain variable domain of TCR clone 9335 (TRBV7-8, TRBJ2-6)
CASSAGTGGAGANVLTF

SEQ ID NO: 18671 - protein, 11 aa, Homo sapiens
  CDR3 for alpha chain variable domain of TCR clone 9336 (TRAV8-6, TRAJ34)
CAVWNTDKLIF

SEQ ID NO: 18672 - protein, 16 aa, Homo sapiens
  CDR3 for beta chain variable domain of TCR clone 9336 (TRBV5-1, TRBJ2-7)
CASSYASTSPGGEQYF

SEQ ID NO: 18673 - protein, 14 aa, Homo sapiens
  CDR3 for alpha chain variable domain of TCR clone 9337 (TRAV9-2, TRAJ39)
CALYIYNAGNMLTF

SEQ ID NO: 18674 - protein, 16 aa, Homo sapiens
  CDR3 for beta chain variable domain of TCR clone 9337 (TRBV7-3, TRBJ2-1)
CASSKPLAGGYNEQFF

SEQ ID NO: 18675 - protein, 10 aa, Homo sapiens
  CDR3 for alpha chain variable domain of TCR clone 9338 (TRAV12-3, TRAJ49)
CAMNDDQFYF

SEQ ID NO: 18676 - protein, 15 aa, Homo sapiens
  CDR3 for beta chain variable domain of TCR clone 9338 (TRBV7-2, TRBJ1-2)
CASSPRAGWNYGYTF

SEQ ID NO: 18677 - protein, 14 aa, Homo sapiens
  CDR3 for alpha chain variable domain of TCR clone 9339 (TRAV12-2, TRAJ40)
CAVKIPSGTYKYIF

SEQ ID NO: 18678 - protein, 14 aa, Homo sapiens
  CDR3 for beta chain variable domain of TCR clone 9339 (TRBV20-1, TRBJ1-1)
CSARTRIGGTEAFF

SEQ ID NO: 18679 - protein, 14 aa, Homo sapiens
  CDR3 for alpha chain variable domain of TCR clone 9340 (TRAV12-2, TRAJ17)
CAVLFKAAGNKLTF

SEQ ID NO: 18680 - protein, 17 aa, Homo sapiens
  CDR3 for beta chain variable domain of TCR clone 9340 (TRBV20-1, TRBJ2-2)
CSASGSGQGGLTGELLF

SEQ ID NO: 18681 - protein, 15 aa, Homo sapiens
  CDR3 for alpha chain variable domain of TCR clone 9341 (TRAV8-3, TRAJ45)
CASSHSGGGADGLTF

SEQ ID NO: 18682 - protein, 13 aa, Homo sapiens
  CDR3 for beta chain variable domain of TCR clone 9341 (TRBV10-3, TRBJ2-7)
CASKLAVNYEQYF

SEQ ID NO: 18683 - protein, 10 aa, Homo sapiens
  CDR3 for alpha chain variable domain of TCR clone 9342 (TRAV12-3, TRAJ49)
CAMNDDQFYF

SEQ ID NO: 18684 - protein, 13 aa, Homo sapiens
  CDR3 for beta chain variable domain of TCR clone 9342 (TRBV12-4, TRBJ1-1)
CASSPGAGFEAFF

SEQ ID NO: 18685 - protein, 17 aa, Homo sapiens
  CDR3 for alpha chain variable domain of TCR clone 9343 (TRAV13-1, TRAJ52)
CAASSGAGGTSYGKLTF

SEQ ID NO: 18686 - protein, 15 aa, Homo sapiens
  CDR3 for beta chain variable domain of TCR clone 9343 (TRBV12-4, TRBJ1-5)
CANTRGSGFGQPQHF

SEQ ID NO: 18687 - protein, 18 aa, Homo sapiens
  CDR3 for alpha chain variable domain of TCR clone 9344 (TRAV13-1, TRAJ52)
CAASKRSAGGTSYGKLTF

SEQ ID NO: 18688 - protein, 13 aa, Homo sapiens
  CDR3 for beta chain variable domain of TCR clone 9344 (TRBV12-4, TRBJ1-2)
CASSLRQGKGYSF

SEQ ID NO: 18689 - protein, 14 aa, Homo sapiens
  CDR3 for alpha chain variable domain of TCR clone 9345 (TRAV1-2, TRAJ8)
CAVREDTGFQKLVF

SEQ ID NO: 18690 - protein, 16 aa, Homo sapiens
  CDR3 for beta chain variable domain of TCR clone 9345 (TRBV29-1, TRBJ2-7)
CSVEVVGTSGSYEQYF

SEQ ID NO: 18691 - protein, 13 aa, Homo sapiens
  CDR3 for alpha chain variable domain of TCR clone 9346 (TRAV13-2, TRAJ49)
CAENTNTGNQFYF

SEQ ID NO: 18692 - protein, 12 aa, Homo sapiens
  CDR3 for beta chain variable domain of TCR clone 9346 (TRBV6-6, TRBJ2-3)
CASSSRGDTQYF

SEQ ID NO: 18693 - protein, 14 aa, Homo sapiens
  CDR3 for alpha chain variable domain of TCR clone 9347 (TRAV2, TRAJ17)
CAVVGKAAGNKLTF

SEQ ID NO: 18694 - protein, 13 aa, Homo sapiens
  CDR3 for beta chain variable domain of TCR clone 9347 (TRBV7-2, TRBJ2-7)
CASSAGLSYEQYF

SEQ ID NO: 18695 - protein, 12 aa, Homo sapiens
  CDR3 for alpha chain variable domain of TCR clone 9348 (TRAV12-1, TRAJ40)
CVVYPGTYKYIF

SEQ ID NO: 18696 - protein, 18 aa, Homo sapiens
  CDR3 for beta chain variable domain of TCR clone 9348 (TRBV11-2, TRBJ2-3)
CASSLGGASRGAPNTQYF

SEQ ID NO: 18697 - protein, 14 aa, Homo sapiens
  CDR3 for alpha chain variable domain of TCR clone 9349 (TRAV34, TRAJ44)
CGADGTGTASKLTF

SEQ ID NO: 18698 - protein, 14 aa, Homo sapiens
  CDR3 for beta chain variable domain of TCR clone 9349 (TRBV7-6, TRBJ2-3)
CASSLGTVTDTQYF

SEQ ID NO: 18699 - protein, 14 aa, Homo sapiens
  CDR3 for alpha chain variable domain of TCR clone 9350 (TRAV13-1, TRAJ35)
CAASKGGFGNVLHC

SEQ ID NO: 18700 - protein, 15 aa, Homo sapiens
  CDR3 for beta chain variable domain of TCR clone 9350 (TRBV20-1, TRBJ2-7)
CSARDRVSGMDEQYF

SEQ ID NO: 18701 - protein, 12 aa, Homo sapiens
  CDR3 for alpha chain variable domain of TCR clone 9351 (TRAV1-1, TRAJ8)
CAGGTGFQKLVF

SEQ ID NO: 18702 - protein, 15 aa, Homo sapiens
  CDR3 for beta chain variable domain of TCR clone 9351 (TRBV7-2, TRBJ2-3)
CASSLEQGGTDTQYF

SEQ ID NO: 18703 - protein, 17 aa, Homo sapiens
  CDR3 for alpha chain variable domain of TCR clone 9352 (TRAV8-6, TRAJ58)
CAVSSWVGETSGSRLTF

SEQ ID NO: 18704 - protein, 14 aa, Homo sapiens
  CDR3 for beta chain variable domain of TCR clone 9352 (TRBV4-2, TRBJ2-1)
CASSLDRAYNEQFF

SEQ ID NO: 18705 - protein, 13 aa, Homo sapiens
  CDR3 for alpha chain variable domain of TCR clone 9353 (TRAV25, TRAJ30)
CAGRVDRDDKIIF

SEQ ID NO: 18706 - protein, 17 aa, Homo sapiens
  CDR3 for beta chain variable domain of TCR clone 9353 (TRBV7-9, TRBJ2-6)
CASSFGAGYFGANVLTF

SEQ ID NO: 18707 - protein, 13 aa, Homo sapiens
  CDR3 for alpha chain variable domain of TCR clone 9354 (TRAV1-1, TRAJ23)
CAVVANQGGKLIF

SEQ ID NO: 18708 - protein, 15 aa, Homo sapiens
  CDR3 for beta chain variable domain of TCR clone 9354 (TRBV5-4, TRBJ2-1)
CASSFSGGSYNEQFF

SEQ ID NO: 18709 - protein, 13 aa, Homo sapiens
  CDR3 for alpha chain variable domain of TCR clone 9355 (TRAV2, TRAJ40)
CAVVTSGTYKYIF

SEQ ID NO: 18710 - protein, 14 aa, Homo sapiens
  CDR3 for beta chain variable domain of TCR clone 9355 (TRBV28, TRBJ2-7)
CASSLRARGNEQYF

SEQ ID NO: 18711 - protein, 17 aa, Homo sapiens
  CDR3 for alpha chain variable domain of TCR clone 9356 (TRAV3, TRAJ6)
CAVRDGPRAGGSYIPTF

SEQ ID NO: 18712 - protein, 14 aa, Homo sapiens
  CDR3 for beta chain variable domain of TCR clone 9356 (TRBV7-2, TRBJ2-7)
CASSHKTSFYEQYF

SEQ ID NO: 18713 - protein, 14 aa, Homo sapiens
  CDR3 for alpha chain variable domain of TCR clone 9357 (TRAV13-1, TRAJ35)
CAARKGGFGNVLHC

SEQ ID NO: 18714 - protein, 13 aa, Homo sapiens
  CDR3 for beta chain variable domain of TCR clone 9357 (TRBV7-3, TRBJ1-1)
CASSQDWGAEAFF

SEQ ID NO: 18715 - protein, 13 aa, Homo sapiens
  CDR3 for alpha chain variable domain of TCR clone 9358 (TRAV27, TRAJ45)
CRSSGGGADGLTF

SEQ ID NO: 18716 - protein, 17 aa, Homo sapiens
  CDR3 for beta chain variable domain of TCR clone 9358 (TRBV11-3, TRBJ2-1)
CASSLYPPGVEYNEQFF

SEQ ID NO: 18717 - protein, 15 aa, Homo sapiens
  CDR3 for alpha chain variable domain of TCR clone 9359 (TRAV25, TRAJ52)
CAGRPGGTSYGKLTF

SEQ ID NO: 18718 - protein, 14 aa, Homo sapiens
  CDR3 for beta chain variable domain of TCR clone 9359 (TRBV12-4, TRBJ1-4)
CASRITGRSEKLFF

SEQ ID NO: 18719 - protein, 21 aa, Homo sapiens
  CDR3 for alpha chain variable domain of TCR clone 9360 (TRAV8-3, TRAJ32)
CAVEVVLQTSSSLELALCLLS

SEQ ID NO: 18720 - protein, 15 aa, Homo sapiens
  CDR3 for beta chain variable domain of TCR clone 9360 (TRBV7-2, TRBJ2-1)
CASSSRTSREDEQFF

SEQ ID NO: 18721 - protein, 13 aa, Homo sapiens
  CDR3 for alpha chain variable domain of TCR clone 9361 (TRAV13-1, TRAJ6)
CAARRGGSYIPTF

SEQ ID NO: 18722 - protein, 13 aa, Homo sapiens
  CDR3 for beta chain variable domain of TCR clone 9361 (TRBV5-8, TRBJ1-2)
CASSLGGNYGYTF

SEQ ID NO: 18723 - protein, 11 aa, Homo sapiens
  CDR3 for alpha chain variable domain of TCR clone 9362 (TRAV3, TRAJ21)
CAVGNFNKFYF

SEQ ID NO: 18724 - protein, 16 aa, Homo sapiens
  CDR3 for beta chain variable domain of TCR clone 9362 (TRBV19, TRBJ2-1)
CASSKARPSSYNEQFF

SEQ ID NO: 18725 - protein, 12 aa, Homo sapiens
  CDR3 for alpha chain variable domain of TCR clone 9363 (TRAV13-2, TRAJ39)
CAESRPGNMLTF

SEQ ID NO: 18726 - protein, 15 aa, Homo sapiens
  CDR3 for beta chain variable domain of TCR clone 9363 (TRBV9, TRBJ1-6)
CASSVAGTGDSPLHF

SEQ ID NO: 18727 - protein, 13 aa, Homo sapiens
  CDR3 for alpha chain variable domain of TCR clone 9364 (TRAV2, TRAJ40)
CAVVTSGTYKYIF

SEQ ID NO: 18728 - protein, 14 aa, Homo sapiens
  CDR3 for beta chain variable domain of TCR clone 9364 (TRBV19, TRBJ2-1)
CASPTFVLSGKQFF

SEQ ID NO: 18729 - protein, 14 aa, Homo sapiens
  CDR3 for alpha chain variable domain of TCR clone 9365 (TRAV6, TRAJ8)
CALERGTGFQKLVF

SEQ ID NO: 18730 - protein, 15 aa, Homo sapiens
  CDR3 for beta chain variable domain of TCR clone 9365 (TRBV7-9, TRBJ2-7)
CASSLALAEAYEQYF

SEQ ID NO: 18731 - protein, 14 aa, Homo sapiens
  CDR3 for alpha chain variable domain of TCR clone 9366 (TRAV1-2, TRAJ8)
CAVREDTGFQKLVF

SEQ ID NO: 18732 - protein, 12 aa, Homo sapiens
  CDR3 for beta chain variable domain of TCR clone 9366 (TRBV11-3, TRBJ1-1)
CASSHRQGEAFF

SEQ ID NO: 18733 - protein, 13 aa, Homo sapiens
  CDR3 for alpha chain variable domain of TCR clone 9367 (TRAV8-4, TRAJ26)
CAVSSSMVRILSL

SEQ ID NO: 18734 - protein, 14 aa, Homo sapiens
  CDR3 for beta chain variable domain of TCR clone 9367 (TRBV18, TRBJ2-5)
CASSPRASSETQYF

SEQ ID NO: 18735 - protein, 14 aa, Homo sapiens
  CDR3 for alpha chain variable domain of TCR clone 9368 (TRAV12-1, TRAJ17)
CVVNYKAAGNKLAF

SEQ ID NO: 18736 - protein, 17 aa, Homo sapiens
  CDR3 for beta chain variable domain of TCR clone 9368 (TRBV20-1, TRBJ2-1)
CSASSSGLAGSYNEQFF

SEQ ID NO: 18737 - protein, 14 aa, Homo sapiens
  CDR3 for alpha chain variable domain of TCR clone 9369 (TRAV4, TRAJ9)
CLVGSGTGGFKTIF

SEQ ID NO: 18738 - protein, 15 aa, Homo sapiens
  CDR3 for beta chain variable domain of TCR clone 9369 (TRBV11-3, TRBJ2-3)
CASLKDGREGDTQYF

SEQ ID NO: 18739 - protein, 13 aa, Homo sapiens
  CDR3 for alpha chain variable domain of TCR clone 9370 (TRAV2, TRAJ40)
CAVVTSGAYKYIF

SEQ ID NO: 18740 - protein, 15 aa, Homo sapiens
  CDR3 for beta chain variable domain of TCR clone 9370 (TRBV11-3, TRBJ2-3)
CASLKDGREGDTQYF

SEQ ID NO: 18741 - protein, 14 aa, Homo sapiens
  CDR3 for alpha chain variable domain of TCR clone 9371 (TRAV13-1, TRAJ35)
CAASKGGIGNVLHC

SEQ ID NO: 18742 - protein, 13 aa, Homo sapiens
  CDR3 for beta chain variable domain of TCR clone 9371 (TRBV7-3, TRBJ1-1)
CASSQDWGAEAFF

SEQ ID NO: 18743 - protein, 17 aa, Homo sapiens
  CDR3 for alpha chain variable domain of TCR clone 9372 (TRAV3, TRAJ6)
CAVRDGPRAGGSYIPPF

SEQ ID NO: 18744 - protein, 20 aa, Homo sapiens
  CDR3 for beta chain variable domain of TCR clone 9372 (TRBV28, TRBJ2-1)
CASTPIGRSPGLAGGNEQFF

SEQ ID NO: 18745 - protein, 12 aa, Homo sapiens
  CDR3 for alpha chain variable domain of TCR clone 9373 (TRAV12-1, TRAJ40)
CVFYSGTYKYIF

SEQ ID NO: 18746 - protein, 18 aa, Homo sapiens
  CDR3 for beta chain variable domain of TCR clone 9373 (TRBV12-4, TRBJ2-2)
CASSLVAGTRGRTGELFS

SEQ ID NO: 18747 - protein, 13 aa, Homo sapiens
  CDR3 for alpha chain variable domain of TCR clone 9374 (TRAV8-3, TRAJ28)
CAVGAVGSYQPTF

SEQ ID NO: 18748 - protein, 15 aa, Homo sapiens
  CDR3 for beta chain variable domain of TCR clone 9374 (TRBV7-9, TRBJ1-5)
CASSQGHQPNQPQHF

SEQ ID NO: 18749 - protein, 14 aa, Homo sapiens
  CDR3 for alpha chain variable domain of TCR clone 9375 (TRAV8-1, TRAJ48)
CAVNAGFGNEKLTF

SEQ ID NO: 18750 - protein, 15 aa, Homo sapiens
  CDR3 for beta chain variable domain of TCR clone 9375 (TRBV9, TRBJ1-6)
CASSVAGTGDSPLHF

SEQ ID NO: 18751 - protein, 17 aa, Homo sapiens
  CDR3 for alpha chain variable domain of TCR clone 9376 (TRAV3, TRAJ6)
CAVRDGPRAGGSYIPTF

SEQ ID NO: 18752 - protein, 14 aa, Homo sapiens
  CDR3 for beta chain variable domain of TCR clone 9376 (TRBV7-2, TRBJ2-7)
CASSPKTSFYKQYF

SEQ ID NO: 18753 - protein, 13 aa, Homo sapiens
  CDR3 for alpha chain variable domain of TCR clone 9377 (TRAV29/DV5, TRAJ31)
CAASRNNNARLMF

SEQ ID NO: 18754 - protein, 14 aa, Homo sapiens
  CDR3 for beta chain variable domain of TCR clone 9377 (TRBV20-1, TRBJ2-5)
CSAHRQGLWETQYF

SEQ ID NO: 18755 - protein, 15 aa, Homo sapiens
  CDR3 for alpha chain variable domain of TCR clone 9378 (TRAV12-3, TRAJ53)
CNERPIEGSNYKLTF

SEQ ID NO: 18756 - protein, 13 aa, Homo sapiens
  CDR3 for beta chain variable domain of TCR clone 9378 (TRBV15, TRBJ1-1)
CATSRGIQARAFF

SEQ ID NO: 18757 - protein, 15 aa, Homo sapiens
  CDR3 for alpha chain variable domain of TCR clone 9379 (TRAV17, TRAJ57)
CATGPSQGGSEKLVF

SEQ ID NO: 18758 - protein, 14 aa, Homo sapiens
  CDR3 for beta chain variable domain of TCR clone 9379 (TRBV19, TRBJ2-1)
CASPTFVLSGEQFF

SEQ ID NO: 18759 - protein, 15 aa, Homo sapiens
  CDR3 for alpha chain variable domain of TCR clone 9380 (TRAV12-1, TRAJ41)
CVVNGASNSGYALNF

SEQ ID NO: 18760 - protein, 15 aa, Homo sapiens
  CDR3 for beta chain variable domain of TCR clone 9380 (TRBV7-2, TRBJ1-5)
CASGSTGVDNQPQHF

SEQ ID NO: 18761 - protein, 14 aa, Homo sapiens
  CDR3 for alpha chain variable domain of TCR clone 9381 (TRAV1-2, TRAJ16)
CAVNRFSDGQKLLF

SEQ ID NO: 18762 - protein, 15 aa, Homo sapiens
  CDR3 for beta chain variable domain of TCR clone 9381 (TRBV9, TRBJ1-6)
CAGSVAGTGDSPLHF

SEQ ID NO: 18763 - protein, 12 aa, Homo sapiens
  CDR3 for alpha chain variable domain of TCR clone 9382 (TRAV12-3, TRAJ17)
CAMTLTGNKLTF

SEQ ID NO: 18764 - protein, 15 aa, Homo sapiens
  CDR3 for beta chain variable domain of TCR clone 9382 (TRBV20-1, TRBJ2-7)
CIARDRVSGMDEQYF

SEQ ID NO: 18765 - protein, 13 aa, Homo sapiens
  CDR3 for alpha chain variable domain of TCR clone 9383 (TRAV25, TRAJ16)
CAGRTARSCSLQG

SEQ ID NO: 18766 - protein, 18 aa, Homo sapiens
  CDR3 for beta chain variable domain of TCR clone 9383 (TRBV6-5, TRBJ1-1)
CTSVPALFDGLLNTEAFF

SEQ ID NO: 18767 - protein, 16 aa, Homo sapiens
  CDR3 for alpha chain variable domain of TCR clone 9384 (TRAV3, TRAJ10)
CAVRDMRAGGGNKLTF

SEQ ID NO: 18768 - protein, 15 aa, Homo sapiens
  CDR3 for beta chain variable domain of TCR clone 9384 (TRBV6-6, TRBJ2-5)
CASSPGGGLEETQYF

SEQ ID NO: 18769 - protein, 17 aa, Homo sapiens
  CDR3 for alpha chain variable domain of TCR clone 9385 (TRAV12-1, TRAJ27)
CVVNMSAAGTNAGKSTF

SEQ ID NO: 18770 - protein, 15 aa, Homo sapiens
  CDR3 for beta chain variable domain of TCR clone 9385 (TRBV4-3, TRBJ1-2)
CASSQNYGVMDGYTF

SEQ ID NO: 18771 - protein, 14 aa, Homo sapiens
  CDR3 for alpha chain variable domain of TCR clone 9386 (TRAV1-2, TRAJ8)
CAVREETGFQKLVF

SEQ ID NO: 18772 - protein, 15 aa, Homo sapiens
  CDR3 for beta chain variable domain of TCR clone 9386 (TRBV6-3, TRBJ2-7)
CASSSPGTVFYEQYF

SEQ ID NO: 18773 - protein, 14 aa, Homo sapiens
  CDR3 for alpha chain variable domain of TCR clone 9387 (TRAV1-2, TRAJ8)
CAGREDTGFQKLVF

SEQ ID NO: 18774 - protein, 15 aa, Homo sapiens
  CDR3 for beta chain variable domain of TCR clone 9387 (TRBV6-3, TRBJ2-7)
CASSSPGTVFYEQYF

SEQ ID NO: 18775 - protein, 12 aa, Homo sapiens
  CDR3 for alpha chain variable domain of TCR clone 9388 (TRAV13-1, TRAJ21)
CAAKEGFNKFYF

SEQ ID NO: 18776 - protein, 14 aa, Homo sapiens
  CDR3 for beta chain variable domain of TCR clone 9388 (TRBV11-2, TRBJ1-5)
CASSSRTGNQPQHF

SEQ ID NO: 18777 - protein, 14 aa, Homo sapiens
  CDR3 for alpha chain variable domain of TCR clone 9389 (TRAV1-2, TRAJ8)
CAVREDTGFQKLVF

SEQ ID NO: 18778 - protein, 15 aa, Homo sapiens
  CDR3 for beta chain variable domain of TCR clone 9389 (TRBV6-3, TRBJ2-7)
CASSSPGTVSYEQYF

SEQ ID NO: 18779 - protein, 13 aa, Homo sapiens
  CDR3 for alpha chain variable domain of TCR clone 9390 (TRAV12-2, TRAJ42)
CAVKRGSQGNLIF

SEQ ID NO: 18780 - protein, 12 aa, Homo sapiens
  CDR3 for beta chain variable domain of TCR clone 9390 (TRBV7-8, TRBJ2-7)
CASSLGDREQYF

SEQ ID NO: 18781 - protein, 14 aa, Homo sapiens
  CDR3 for alpha chain variable domain of TCR clone 9391 (TRAV8-6, TRAJ49)
CAVSDPGTGNQFYF

SEQ ID NO: 18782 - protein, 16 aa, Homo sapiens
  CDR3 for beta chain variable domain of TCR clone 9391 (TRBV24-1, TRBJ2-1)
CATSGVTGANYNEQFF

SEQ ID NO: 18783 - protein, 12 aa, Homo sapiens
  CDR3 for alpha chain variable domain of TCR clone 9392 (TRAV1-2, TRAJ11)
CAVRGGYSTLTF

SEQ ID NO: 18784 - protein, 11 aa, Homo sapiens
  CDR3 for beta chain variable domain of TCR clone 9392 (TRBV6-3, TRBJ2-3)
CATGQADTQYF

SEQ ID NO: 18785 - protein, 18 aa, Homo sapiens
  CDR3 for alpha chain variable domain of TCR clone 9393 (TRAV13-1, TRAJ52)
CAASKRSAGGTSYGKLTF

SEQ ID NO: 18786 - protein, 15 aa, Homo sapiens
  CDR3 for beta chain variable domain of TCR clone 9393 (TRBV20-1, TRBJ2-7)
CSARTPGTITYEQYF

SEQ ID NO: 18787 - protein, 12 aa, Homo sapiens
  CDR3 for alpha chain variable domain of TCR clone 9394 (TRAV13-1, TRAJ21)
CAAKEGFNKFYF

SEQ ID NO: 18788 - protein, 13 aa, Homo sapiens
  CDR3 for beta chain variable domain of TCR clone 9394 (TRBV7-9, TRBJ1-2)
CASSLKQNYGYTF

SEQ ID NO: 18789 - protein, 14 aa, Homo sapiens
  CDR3 for alpha chain variable domain of TCR clone 9395 (TRAV2, TRAJ37)
CAVDFTSNTGKLIF

SEQ ID NO: 18790 - protein, 15 aa, Homo sapiens
  CDR3 for beta chain variable domain of TCR clone 9395 (TRBV20-1, TRBJ1-1)
CSASRGVTGNTEASF

SEQ ID NO: 18791 - protein, 17 aa, Homo sapiens
  CDR3 for alpha chain variable domain of TCR clone 9396 (TRAV3, TRAJ12)
CAVRDGGRMDSSYKLIF

SEQ ID NO: 18792 - protein, 13 aa, Homo sapiens
  CDR3 for beta chain variable domain of TCR clone 9396 (TRBV12-4, TRBJ1-2)
CASSLRQGKGYTF

SEQ ID NO: 18793 - protein, 13 aa, Homo sapiens
  CDR3 for alpha chain variable domain of TCR clone 9397 (TRAV2, TRAJ40)
CAVVTSGSYKYIF

SEQ ID NO: 18794 - protein, 14 aa, Homo sapiens
  CDR3 for beta chain variable domain of TCR clone 9397 (TRBV19, TRBJ2-1)
CASPTFVLSGEQFF

SEQ ID NO: 18795 - protein, 18 aa, Homo sapiens
  CDR3 for alpha chain variable domain of TCR clone 9398 (TRAV21, TRAJ52)
RAVRPSPAGGTSYGKLTF

SEQ ID NO: 18796 - protein, 17 aa, Homo sapiens
  CDR3 for beta chain variable domain of TCR clone 9398 (TRBV13, TRBJ2-3)
CASSLSRVAGGRNTQYF

SEQ ID NO: 18797 - protein, 12 aa, Homo sapiens
  CDR3 for alpha chain variable domain of TCR clone 9399 (TRAV13-2, TRAJ23)
CAERHRGGELIF

SEQ ID NO: 18798 - protein, 16 aa, Homo sapiens
  CDR3 for beta chain variable domain of TCR clone 9399 (TRBV20-1, TRBJ1-4)
CSAPGQGLLTNEKLFF

SEQ ID NO: 18799 - protein, 12 aa, Homo sapiens
  CDR3 for alpha chain variable domain of TCR clone 9400 (TRAV2, TRAJ31)
CAVEDNNARLMF

SEQ ID NO: 18800 - protein, 13 aa, Homo sapiens
  CDR3 for beta chain variable domain of TCR clone 9400 (TRBV19, TRBJ2-7)
CASSIDRTYEQYF

SEQ ID NO: 18801 - protein, 14 aa, Homo sapiens
  CDR3 for alpha chain variable domain of TCR clone 9401 (TRAV13-1, TRAJ44)
CAAKATGTASKLTF

SEQ ID NO: 18802 - protein, 16 aa, Homo sapiens
  CDR3 for beta chain variable domain of TCR clone 9401 (TRBV7-3, TRBJ2-2)
CASSLKRGTLSGELFF

SEQ ID NO: 18803 - protein, 18 aa, Homo sapiens
  CDR3 for alpha chain variable domain of TCR clone 9402 (TRAV21, TRAJ52)
CAVRPSPAGGTSYGKLTF

SEQ ID NO: 18804 - protein, 17 aa, Homo sapiens
  CDR3 for beta chain variable domain of TCR clone 9402 (TRBV13, TRBJ2-3)
CASSLSRGAGGRNTQYF

SEQ ID NO: 18805 - protein, 13 aa, Homo sapiens
  CDR3 for alpha chain variable domain of TCR clone 9403 (TRAV21, TRAJ27)
CAARPGNAGKSTF

SEQ ID NO: 18806 - protein, 14 aa, Homo sapiens
  CDR3 for beta chain variable domain of TCR clone 9403 (TRBV7-6, TRBJ2-1)
CASSLGGGADEQFF

SEQ ID NO: 18807 - protein, 15 aa, Homo sapiens
  CDR3 for alpha chain variable domain of TCR clone 9404 (TRAV8-6, TRAJ40)
CAVSEAPSGTYKYIF

SEQ ID NO: 18808 - protein, 14 aa, Homo sapiens
  CDR3 for beta chain variable domain of TCR clone 9404 (TRBV6-5, TRBJ2-7)
CASSTSGGNYEQYF

SEQ ID NO: 18809 - protein, 12 aa, Homo sapiens
  CDR3 for alpha chain variable domain of TCR clone 9405 (TRAV12-2, TRAJ20)
CAVRPSDYKLSF

SEQ ID NO: 18810 - protein, 15 aa, Homo sapiens
  CDR3 for beta chain variable domain of TCR clone 9405 (TRBV7-2, TRBJ2-1)
CASSSGLAGGNEQFF

SEQ ID NO: 18811 - protein, 14 aa, Homo sapiens
  CDR3 for alpha chain variable domain of TCR clone 9406 (TRAV8-4, TRAJ34)
CAVSDPGDTDKLIF

SEQ ID NO: 18812 - protein, 15 aa, Homo sapiens
  CDR3 for beta chain variable domain of TCR clone 9406 (TRBV6-6, TRBJ1-1)
CASSPRGDVETEAFF

SEQ ID NO: 18813 - protein, 11 aa, Homo sapiens
  CDR3 for alpha chain variable domain of TCR clone 9407 (TRAV1-1, TRAJ23)
CAVRQGGKLTF

SEQ ID NO: 18814 - protein, 20 aa, Homo sapiens
  CDR3 for beta chain variable domain of TCR clone 9407 (TRBV7-8, TRBJ2-2)
CASSHLFPGPTIHITGELFF

SEQ ID NO: 18815 - protein, 15 aa, Homo sapiens
  CDR3 for alpha chain variable domain of TCR clone 9408 (TRAV21, TRAJ40)
CAVRPQTSGTYKYIF

SEQ ID NO: 18816 - protein, 13 aa, Homo sapiens
  CDR3 for beta chain variable domain of TCR clone 9408 (TRBV7-2, TRBJ2-2)
CASGSVRARELFF

SEQ ID NO: 18817 - protein, 10 aa, Homo sapiens
  CDR3 for alpha chain variable domain of TCR clone 9409 (TRAV5, TRAJ34)
CAEDTDKLIF

SEQ ID NO: 18818 - protein, 20 aa, Homo sapiens
  CDR3 for beta chain variable domain of TCR clone 9409 (TRBV11-2, TRBJ2-2)
LRTRPCISVPAALEAGSCFF

SEQ ID NO: 18819 - protein, 14 aa, Homo sapiens
  CDR3 for alpha chain variable domain of TCR clone 9410 (TRAV12-2, TRAJ13)
CAVKKTGGYQKVTF

SEQ ID NO: 18820 - protein, 15 aa, Homo sapiens
  CDR3 for beta chain variable domain of TCR clone 9410 (TRBV7-2, TRBJ1-3)
CASSPQGGSGNTIYF

SEQ ID NO: 18821 - protein, 17 aa, Homo sapiens
  CDR3 for alpha chain variable domain of TCR clone 9411 (TRAV3, TRAJ6)
CAVRDGPRAGGIYIPTF

SEQ ID NO: 18822 - protein, 14 aa, Homo sapiens
  CDR3 for beta chain variable domain of TCR clone 9411 (TRBV7-2, TRBJ2-7)
CASSPKTSFYEQYF

SEQ ID NO: 18823 - protein, 12 aa, Homo sapiens
  CDR3 for alpha chain variable domain of TCR clone 9412 (TRAV12-1, TRAJ40)
CVVYSGTYKYIF

SEQ ID NO: 18824 - protein, 18 aa, Homo sapiens
  CDR3 for beta chain variable domain of TCR clone 9412 (TRBV11-2, TRBJ2-3)
RASSLGGASRGAPNTQYF

SEQ ID NO: 18825 - protein, 12 aa, Homo sapiens
  CDR3 for alpha chain variable domain of TCR clone 9413 (TRAV12-1, TRAJ40)
CVVYSGTYKYIL

SEQ ID NO: 18826 - protein, 18 aa, Homo sapiens
  CDR3 for beta chain variable domain of TCR clone 9413 (TRBV11-2, TRBJ2-3)
CASSLGGASRGAPNTQYF

SEQ ID NO: 18827 - protein, 16 aa, Homo sapiens
  CDR3 for alpha chain variable domain of TCR clone 9414 (TRAV1-1, TRAJ36)
CAVRDTLLPGANNLFF

SEQ ID NO: 18828 - protein, 15 aa, Homo sapiens
  CDR3 for beta chain variable domain of TCR clone 9414 (TRBV7-2, TRBJ2-5)
CASSLRGASGETQYF

SEQ ID NO: 18829 - protein, 16 aa, Homo sapiens
  CDR3 for alpha chain variable domain of TCR clone 9415 (TRAV30, TRAJ24)
CGTEIVEADSWGKFQF

SEQ ID NO: 18830 - protein, 14 aa, Homo sapiens
  CDR3 for beta chain variable domain of TCR clone 9415 (TRBV12-5, TRBJ2-5)
CASGSRTHQETQYF

SEQ ID NO: 18831 - protein, 13 aa, Homo sapiens
  CDR3 for alpha chain variable domain of TCR clone 9416 (TRAV3, TRAJ27)
CAVRPLGASKSTF

SEQ ID NO: 18832 - protein, 13 aa, Homo sapiens
  CDR3 for beta chain variable domain of TCR clone 9416 (TRBV7-9, TRBJ2-3)
CASSPGSTDTQYF

SEQ ID NO: 18833 - protein, 14 aa, Homo sapiens
  CDR3 for alpha chain variable domain of TCR clone 9417 (TRAV13-2, TRAJ45)
CAEMSGGGADGLTF

SEQ ID NO: 18834 - protein, 11 aa, Homo sapiens
  CDR3 for beta chain variable domain of TCR clone 9417 (TRBV7-3, TRBJ2-5)
CASSLSETQYF

SEQ ID NO: 18835 - protein, 15 aa, Homo sapiens
  CDR3 for alpha chain variable domain of TCR clone 9418 (TRAV21, TRAJ24)
CAARSSTDSWGKLQF

SEQ ID NO: 18836 - protein, 13 aa, Homo sapiens
  CDR3 for beta chain variable domain of TCR clone 9418 (TRBV11-2, TRBJ2-5)
CASSATGEETQYF

SEQ ID NO: 18837 - protein, 14 aa, Homo sapiens
  CDR3 for alpha chain variable domain of TCR clone 9419 (TRAV38-1, TRAJ45)
CAYYSGGGADGLTF

SEQ ID NO: 18838 - protein, 15 aa, Homo sapiens
  CDR3 for beta chain variable domain of TCR clone 9419 (TRBV15, TRBJ1-4)
CATSRDMGSYEKLFF

SEQ ID NO: 18839 - protein, 14 aa, Homo sapiens
  CDR3 for alpha chain variable domain of TCR clone 9420 (TRAV12-1, TRAJ13)
CVVIDSGGYQKVTF

SEQ ID NO: 18840 - protein, 12 aa, Homo sapiens
  CDR3 for beta chain variable domain of TCR clone 9420 (TRBV24-1, TRBJ1-1)
CATLYPDTEAFF

SEQ ID NO: 18841 - protein, 10 aa, Homo sapiens
  CDR3 for alpha chain variable domain of TCR clone 9421 (TRAV12-3, TRAJ49)
CAMNDDQFYF

SEQ ID NO: 18842 - protein, 18 aa, Homo sapiens
  CDR3 for beta chain variable domain of TCR clone 9421 (TRBV10-3, TRBJ2-3)
CAISESRVGPMRGDTQYF

SEQ ID NO: 18843 - protein, 17 aa, Homo sapiens
  CDR3 for alpha chain variable domain of TCR clone 9422 (TRAV3, TRAJ6)
CAVRDGPRAGGSYIPTF

SEQ ID NO: 18844 - protein, 17 aa, Homo sapiens
  CDR3 for beta chain variable domain of TCR clone 9422 (TRBV13, TRBJ2-3)
CASSLSRVAGGRNTQYF

SEQ ID NO: 18845 - protein, 11 aa, Homo sapiens
  CDR3 for alpha chain variable domain of TCR clone 9423 (TRAV17, TRAJ9)
CATTGGFRTIF

SEQ ID NO: 18846 - protein, 14 aa, Homo sapiens
  CDR3 for beta chain variable domain of TCR clone 9423 (TRBV7-9, TRBJ2-2)
CASSGLADTGELFF

SEQ ID NO: 18847 - protein, 13 aa, Homo sapiens
  CDR3 for alpha chain variable domain of TCR clone 9424 (TRAV12-2, TRAJ30)
RAVNLNRDDKIIF

SEQ ID NO: 18848 - protein, 14 aa, Homo sapiens
  CDR3 for beta chain variable domain of TCR clone 9424 (TRBV7-2, TRBJ1-2)
CASSSQGAHYGYTF

SEQ ID NO: 18849 - protein, 13 aa, Homo sapiens
  CDR3 for alpha chain variable domain of TCR clone 9425 (TRAV8-3, TRAJ36)
CAVGATGANNLFF

SEQ ID NO: 18850 - protein, 15 aa, Homo sapiens
  CDR3 for beta chain variable domain of TCR clone 9425 (TRBV7-2, TRBJ1-2)
CASSPRAGWNYGYAF

SEQ ID NO: 18851 - protein, 15 aa, Homo sapiens
  CDR3 for alpha chain variable domain of TCR clone 9426 (TRAV26-1, TRAJ29)
CIVRVEGSGNTPLVF

SEQ ID NO: 18852 - protein, 15 aa, Homo sapiens
  CDR3 for beta chain variable domain of TCR clone 9426 (TRBV7-9, TRBJ1-5)
CASSQGHQPSQPQHF

SEQ ID NO: 18853 - protein, 14 aa, Homo sapiens
  CDR3 for alpha chain variable domain of TCR clone 9427 (TRAV12-2, TRAJ17)
CAVLFKAAGNKLTF

SEQ ID NO: 18854 - protein, 17 aa, Homo sapiens
  CDR3 for beta chain variable domain of TCR clone 9427 (TRBV20-1, TRBJ2-2)
CSASGSGQGGLTGELSF

SEQ ID NO: 18855 - protein, 13 aa, Homo sapiens
  CDR3 for alpha chain variable domain of TCR clone 9428 (TRAV16, TRAJ30)
CALAQNRDDKIIF

SEQ ID NO: 18856 - protein, 20 aa, Homo sapiens
  CDR3 for beta chain variable domain of TCR clone 9428 (TRBV19, TRBJ1-6)
CASSVRPSTGVVIHPSTLGM

SEQ ID NO: 18857 - protein, 13 aa, Homo sapiens
  CDR3 for alpha chain variable domain of TCR clone 9429 (TRAV2, TRAJ40)
CAVVTSETYKYIF

SEQ ID NO: 18858 - protein, 14 aa, Homo sapiens
  CDR3 for beta chain variable domain of TCR clone 9429 (TRBV19, TRBJ2-1)
CASPTFVLSGEQFF

SEQ ID NO: 18859 - protein, 14 aa, Homo sapiens
  CDR3 for alpha chain variable domain of TCR clone 9430 (TRAV16, TRAJ28)
CALSSGAGSYQLTF

SEQ ID NO: 18860 - protein, 16 aa, Homo sapiens
  CDR3 for beta chain variable domain of TCR clone 9430 (TRBV5-1, TRBJ2-1)
CASSLLPSGRPEEQFF

SEQ ID NO: 18861 - protein, 17 aa, Homo sapiens
  CDR3 for alpha chain variable domain of TCR clone 9431 (TRAV3, TRAJ6)
CAVRDGPRAGGSYIPTF

SEQ ID NO: 18862 - protein, 15 aa, Homo sapiens
  CDR3 for beta chain variable domain of TCR clone 9431 (TRBV6-3, TRBJ2-7)
CASSSPGTVFYEQYF

SEQ ID NO: 18863 - protein, 13 aa, Homo sapiens
  CDR3 for alpha chain variable domain of TCR clone 9432 (TRAV2, TRAJ40)
CAVVTSGTCKYIF

SEQ ID NO: 18864 - protein, 14 aa, Homo sapiens
  CDR3 for beta chain variable domain of TCR clone 9432 (TRBV19, TRBJ2-3)
CASSAPRGTDTQYF

SEQ ID NO: 18865 - protein, 14 aa, Homo sapiens
  CDR3 for alpha chain variable domain of TCR clone 9433 (TRAV1-2, TRAJ8)
CAVREDTGFQKLVF

SEQ ID NO: 18866 - protein, 15 aa, Homo sapiens
  CDR3 for beta chain variable domain of TCR clone 9433 (TRBV7-2, TRBJ1-2)
CASSLVSGGDYGYTF

SEQ ID NO: 18867 - protein, 14 aa, Homo sapiens
  CDR3 for alpha chain variable domain of TCR clone 9434 (TRAV1-2, TRAJ8)
CAVREDTGFQKLVF

SEQ ID NO: 18868 - protein, 17 aa, Homo sapiens
  CDR3 for beta chain variable domain of TCR clone 9434 (TRBV9, TRBJ2-2)
CASSVGGQGTDTGELFF

SEQ ID NO: 18869 - protein, 18 aa, Homo sapiens
  CDR3 for alpha chain variable domain of TCR clone 9435 (TRAV21, TRAJ52)
CAVRPSPAGGTSYGKLTF

SEQ ID NO: 18870 - protein, 17 aa, Homo sapiens
  CDR3 for beta chain variable domain of TCR clone 9435 (TRBV13, TRBJ2-3)
CASSLSRVVGGRNTQYF

SEQ ID NO: 18871 - protein, 14 aa, Homo sapiens
  CDR3 for alpha chain variable domain of TCR clone 9436 (TRAV12-2, TRAJ13)
CAVKNTGGYQKVTF

SEQ ID NO: 18872 - protein, 15 aa, Homo sapiens
  CDR3 for beta chain variable domain of TCR clone 9436 (TRBV27, TRBJ2-1)
CASSNGGGSSNEQFF

SEQ ID NO: 18873 - protein, 14 aa, Homo sapiens
  CDR3 for alpha chain variable domain of TCR clone 9437 (TRAV1-2, TRAJ8)
CAVREDTGFQKLVF

SEQ ID NO: 18874 - protein, 17 aa, Homo sapiens
  CDR3 for beta chain variable domain of TCR clone 9437 (TRBV7-2, TRBJ2-3)
CASSLEARGTSTDTQYF

SEQ ID NO: 18875 - protein, 14 aa, Homo sapiens
  CDR3 for alpha chain variable domain of TCR clone 9438 (TRAV29/DV5, TRAJ36)
CAARRKTGANNLFF

SEQ ID NO: 18876 - protein, 14 aa, Homo sapiens
  CDR3 for beta chain variable domain of TCR clone 9438 (TRBV12-5, TRBJ2-5)
CASGSRTHQGTQYF

SEQ ID NO: 18877 - protein, 18 aa, Homo sapiens
  CDR3 for alpha chain variable domain of TCR clone 9439 (TRAV21, TRAJ52)
CAVRPSPAGGISYGKLTF

SEQ ID NO: 18878 - protein, 17 aa, Homo sapiens
  CDR3 for beta chain variable domain of TCR clone 9439 (TRBV13, TRBJ2-3)
CASSLSRVAGGRNTQYF

SEQ ID NO: 18879 - protein, 10 aa, Homo sapiens
  CDR3 for alpha chain variable domain of TCR clone 9440 (TRAV2, TRAJ34)
CAVVNDKLIF

SEQ ID NO: 18880 - protein, 20 aa, Homo sapiens
  CDR3 for beta chain variable domain of TCR clone 9440 (TRBV28, TRBJ2-1)
CASTPIGRSPGLAGGNEQFF

SEQ ID NO: 18881 - protein, 13 aa, Homo sapiens
  CDR3 for alpha chain variable domain of TCR clone 9441 (TRAV35, TRAJ49)
CAGRLNTGNQFYF

SEQ ID NO: 18882 - protein, 17 aa, Homo sapiens
  CDR3 for beta chain variable domain of TCR clone 9441 (TRBV6-1, TRBJ2-1)
CASSEGGWGQFYNEQFF

SEQ ID NO: 18883 - protein, 14 aa, Homo sapiens
  CDR3 for alpha chain variable domain of TCR clone 9442 (TRAV6, TRAJ8)
CALERGTGFQKLVF

SEQ ID NO: 18884 - protein, 20 aa, Homo sapiens
  CDR3 for beta chain variable domain of TCR clone 9442 (TRBV28, TRBJ2-1)
CASTPIGRSPGLAGGNEQFF

SEQ ID NO: 18885 - protein, 16 aa, Homo sapiens
  CDR3 for alpha chain variable domain of TCR clone 9443 (TRAV13-1, TRAJ48)
CSKYRESNFGNEKLTF

SEQ ID NO: 18886 - protein, 15 aa, Homo sapiens
  CDR3 for beta chain variable domain of TCR clone 9443 (TRBV19, TRBJ2-3)
CAAGDTNAPNDTQYF

SEQ ID NO: 18887 - protein, 15 aa, Homo sapiens
  CDR3 for alpha chain variable domain of TCR clone 9444 (TRAV38-1, TRAJ37)
CAFIFGSGNTGKLIF

SEQ ID NO: 18888 - protein, 13 aa, Homo sapiens
  CDR3 for beta chain variable domain of TCR clone 9444 (TRBV19, TRBJ1-2)
CASSVPGQDGYTF

SEQ ID NO: 18889 - protein, 13 aa, Homo sapiens
  CDR3 for alpha chain variable domain of TCR clone 9445 (TRAV27, TRAJ41)
CAGEGNSGYALNF

SEQ ID NO: 18890 - protein, 14 aa, Homo sapiens
  CDR3 for beta chain variable domain of TCR clone 9445 (TRBV7-3, TRBJ1-1)
CASSLKGGNTEAFF

SEQ ID NO: 18891 - protein, 15 aa, Homo sapiens
  CDR3 for alpha chain variable domain of TCR clone 9446 (TRAV26-1, TRAJ27)
CIVRVEGSGNTPLVF

SEQ ID NO: 18892 - protein, 14 aa, Homo sapiens
  CDR3 for beta chain variable domain of TCR clone 9446 (TRBV18, TRBJ2-5)
CASSPGVSQETQYF

SEQ ID NO: 18893 - protein, 11 aa, Homo sapiens
  CDR3 for alpha chain variable domain of TCR clone 9447 (TRAV12-1, TRAJ34)
CVVNKGRELIF

SEQ ID NO: 18894 - protein, 15 aa, Homo sapiens
  CDR3 for beta chain variable domain of TCR clone 9447 (TRBV7-2, TRBJ1-2)
CASSLVSGGDYGYTF

SEQ ID NO: 18895 - protein, 13 aa, Homo sapiens
  CDR3 for alpha chain variable domain of TCR clone 9448 (TRAV21, TRAJ27)
CAARPGNAGKSTF

SEQ ID NO: 18896 - protein, 14 aa, Homo sapiens
  CDR3 for beta chain variable domain of TCR clone 9448 (TRBV7-6, TRBJ2-3)
CASGLGTVTDTQYF

SEQ ID NO: 18897 - protein, 13 aa, Homo sapiens
  CDR3 for alpha chain variable domain of TCR clone 9449 (TRAV27, TRAJ6)
CAGGTGGSYIPTS

SEQ ID NO: 18898 - protein, 14 aa, Homo sapiens
  CDR3 for beta chain variable domain of TCR clone 9449 (TRBV6-3, TRBJ1-1)
CASSYQRRDTEAFF

SEQ ID NO: 18899 - protein, 14 aa, Homo sapiens
  CDR3 for alpha chain variable domain of TCR clone 9450 (TRAV17, TRAJ16)
CATADFSDGQKLLF

SEQ ID NO: 18900 - protein, 14 aa, Homo sapiens
  CDR3 for beta chain variable domain of TCR clone 9450 (TRBV25-1, TRBJ1-1)
CASTHLGGNTEAFF

SEQ ID NO: 18901 - protein, 11 aa, Homo sapiens
  CDR3 for alpha chain variable domain of TCR clone 9451 (TRAV12-1, TRAJ43)
CVEYDNNDMRF

SEQ ID NO: 18902 - protein, 17 aa, Homo sapiens
  CDR3 for beta chain variable domain of TCR clone 9451 (TRBV4-1, TRBJ1-4)
CASSQEGPRGVEEKLFF

SEQ ID NO: 18903 - protein, 14 aa, Homo sapiens
  CDR3 for alpha chain variable domain of TCR clone 9452 (TRAV4, TRAJ33)
CLVGDVQSNYQLIW

SEQ ID NO: 18904 - protein, 15 aa, Homo sapiens
  CDR3 for beta chain variable domain of TCR clone 9452 (TRBV6-5, TRBJ2-1)
CASSYDAGAGNEQFF

SEQ ID NO: 18905 - protein, 14 aa, Homo sapiens
  CDR3 for alpha chain variable domain of TCR clone 9453 (TRAV2, TRAJ37)
CAVDFTSNTGKLIF

SEQ ID NO: 18906 - protein, 15 aa, Homo sapiens
  CDR3 for beta chain variable domain of TCR clone 9453 (TRBV5-1, TRBJ2-7)
CASSLNGGPAREQYF

SEQ ID NO: 18907 - protein, 12 aa, Homo sapiens
  CDR3 for alpha chain variable domain of TCR clone 9454 (TRAV8-3, TRAJ26)
CAVGAGGQNFVF

SEQ ID NO: 18908 - protein, 14 aa, Homo sapiens
  CDR3 for beta chain variable domain of TCR clone 9454 (TRBV5-1, TRBJ1-5)
CASSLGQGAQPQHF

SEQ ID NO: 18909 - protein, 14 aa, Homo sapiens
  CDR3 for alpha chain variable domain of TCR clone 9455 (TRAV1-2, TRAJ8)
CAVREDTGFQKLVF

SEQ ID NO: 18910 - protein, 15 aa, Homo sapiens
  CDR3 for beta chain variable domain of TCR clone 9455 (TRBV6-3, TRBJ2-7)
CASSSPGTVFYGQYF

SEQ ID NO: 18911 - protein, 13 aa, Homo sapiens
  CDR3 for alpha chain variable domain of TCR clone 9456 (TRAV38-1, TRAJ42)
CARGGGSQGNLIF

SEQ ID NO: 18912 - protein, 17 aa, Homo sapiens
  CDR3 for beta chain variable domain of TCR clone 9456 (TRBV20-1, TRBJ2-1)
CSARDPLAGVWDNEQFF

SEQ ID NO: 18913 - protein, 14 aa, Homo sapiens
  CDR3 for alpha chain variable domain of TCR clone 9457 (TRAV21, TRAJ3)
CAVTGYSSASKIIF

SEQ ID NO: 18914 - protein, 17 aa, Homo sapiens
  CDR3 for beta chain variable domain of TCR clone 9457 (TRBV28, TRBJ2-5)
CASSRQGGLAGAETQYF

SEQ ID NO: 18915 - protein, 15 aa, Homo sapiens
  CDR3 for alpha chain variable domain of TCR clone 9458 (TRAV2, TRAJ15)
CAVEDRGQAGTALIF

SEQ ID NO: 18916 - protein, 17 aa, Homo sapiens
  CDR3 for beta chain variable domain of TCR clone 9458 (TRBV11-2, TRBJ2-1)
CASSLYPPGVEYNEQFF

SEQ ID NO: 18917 - protein, 16 aa, Homo sapiens
  CDR3 for alpha chain variable domain of TCR clone 9459 (TRAV8-4, TRAJ52)
CAAANAGGTSYGKLTF

SEQ ID NO: 18918 - protein, 15 aa, Homo sapiens
  CDR3 for beta chain variable domain of TCR clone 9459 (TRBV6-3, TRBJ2-7)
CASSSPGTVFYEQYF

SEQ ID NO: 18919 - protein, 17 aa, Homo sapiens
  CDR3 for alpha chain variable domain of TCR clone 9460 (TRAV12-1, TRAJ53)
CVAGAIVGGGSNYKLTF

SEQ ID NO: 18920 - protein, 14 aa, Homo sapiens
  CDR3 for beta chain variable domain of TCR clone 9460 (TRBV5-1, TRBJ1-4)
CASSLDRTHEKLFF

SEQ ID NO: 18921 - protein, 14 aa, Homo sapiens
  CDR3 for alpha chain variable domain of TCR clone 9461 (TRAV38-1, TRAJ40)
CALRPTSGTYKYIF

SEQ ID NO: 18922 - protein, 14 aa, Homo sapiens
  CDR3 for beta chain variable domain of TCR clone 9461 (TRBV25-1, TRBJ1-1)
CASTRLGGNTEAFF

SEQ ID NO: 18923 - protein, 14 aa, Homo sapiens
  CDR3 for alpha chain variable domain of TCR clone 9462 (TRAV1-2, TRAJ8)
CAVREDTGFQNLVF

SEQ ID NO: 18924 - protein, 15 aa, Homo sapiens
  CDR3 for beta chain variable domain of TCR clone 9462 (TRBV6-3, TRBJ2-7)
CASSSPGTVFYEQYF

SEQ ID NO: 18925 - protein, 11 aa, Homo sapiens
  CDR3 for alpha chain variable domain of TCR clone 9463 (TRAV26-1, TRAJ37)
CIVRVGRKLIF

SEQ ID NO: 18926 - protein, 14 aa, Homo sapiens
  CDR3 for beta chain variable domain of TCR clone 9463 (TRBV9, TRBJ2-7)
CASSVGVGSYEQYF

SEQ ID NO: 18927 - protein, 12 aa, Homo sapiens
  CDR3 for alpha chain variable domain of TCR clone 9464 (TRAV8-4, TRAJ43)
CAVSVNNNDMRF

SEQ ID NO: 18928 - protein, 16 aa, Homo sapiens
  CDR3 for beta chain variable domain of TCR clone 9464 (TRBV7-2, TRBJ2-6)
CASSLAGRSGANVLTF

SEQ ID NO: 18929 - protein, 13 aa, Homo sapiens
  CDR3 for alpha chain variable domain of TCR clone 9465 (TRAV1-2, TRAJ9)
CAALNTGGFKTIF

SEQ ID NO: 18930 - protein, 13 aa, Homo sapiens
  CDR3 for beta chain variable domain of TCR clone 9465 (TRBV7-3, TRBJ1-1)
CASSQDWGAEAFF

SEQ ID NO: 18931 - protein, 14 aa, Homo sapiens
  CDR3 for alpha chain variable domain of TCR clone 9466 (TRAV3, TRAJ33)
CAVRDMDSNYQLIW

SEQ ID NO: 18932 - protein, 17 aa, Homo sapiens
  CDR3 for beta chain variable domain of TCR clone 9466 (TRBV7-3, TRBJ1-2)
CASSFPQGNDGELWLHL

SEQ ID NO: 18933 - protein, 16 aa, Homo sapiens
  CDR3 for alpha chain variable domain of TCR clone 9467 (TRAV30, TRAJ24)
CGTEIVDADSWGKFQF

SEQ ID NO: 18934 - protein, 13 aa, Homo sapiens
  CDR3 for beta chain variable domain of TCR clone 9467 (TRBV7-2, TRBJ1-3)
CASSLAPGNTIYF

SEQ ID NO: 18935 - protein, 13 aa, Homo sapiens
  CDR3 for alpha chain variable domain of TCR clone 9468 (TRAV38-1, TRAJ7)
CAFMMDGNNRLAF

SEQ ID NO: 18936 - protein, 14 aa, Homo sapiens
  CDR3 for beta chain variable domain of TCR clone 9468 (TRBV4-2, TRBJ2-3)
CASRETRAPGMQYF

SEQ ID NO: 18937 - protein, 16 aa, Homo sapiens
  CDR3 for alpha chain variable domain of TCR clone 9469 (TRAV14/DV4, TRAJ37)
CAMREYGSGNTGKLIF

SEQ ID NO: 18938 - protein, 15 aa, Homo sapiens
  CDR3 for beta chain variable domain of TCR clone 9469 (TRBV2, TRBJ2-5)
CASSEQGLIGETQYF

SEQ ID NO: 18939 - protein, 14 aa, Homo sapiens
  CDR3 for alpha chain variable domain of TCR clone 9470 (TRAV12-3, TRAJ10)
SHLPLTGGGNKLTF

SEQ ID NO: 18940 - protein, 13 aa, Homo sapiens
  CDR3 for beta chain variable domain of TCR clone 9470 (TRBV19, TRBJ1-2)
CASSVPGQDGYTF

SEQ ID NO: 18941 - protein, 14 aa, Homo sapiens
  CDR3 for alpha chain variable domain of TCR clone 9471 (TRAV1-2, TRAJ16)
CAVNRFSDGQKLLF

SEQ ID NO: 18942 - protein, 13 aa, Homo sapiens
  CDR3 for beta chain variable domain of TCR clone 9471 (TRBV4-1, TRBJ1-1)
CASSRKMNTEAFF

SEQ ID NO: 18943 - protein, 14 aa, Homo sapiens
  CDR3 for alpha chain variable domain of TCR clone 9472 (TRAV1-2, TRAJ16)
CAVNRFSDGQKLLF

SEQ ID NO: 18944 - protein, 16 aa, Homo sapiens
  CDR3 for beta chain variable domain of TCR clone 9472 (TRBV5-4, TRBJ2-3)
CASQQPGAGGADTQYF

SEQ ID NO: 18945 - protein, 13 aa, Homo sapiens
  CDR3 for alpha chain variable domain of TCR clone 9473 (TRAV23/DV6, TRAJ34)
CAASIEGTDKLIF

SEQ ID NO: 18946 - protein, 15 aa, Homo sapiens
  CDR3 for beta chain variable domain of TCR clone 9473 (TRBV20-1, TRBJ2-7)
CSAESGTSGAYEQYF

SEQ ID NO: 18947 - protein, 17 aa, Homo sapiens
  CDR3 for alpha chain variable domain of TCR clone 9474 (TRAV26-2, TRAJ52)
CILRVTAGGTSYGKLTF

SEQ ID NO: 18948 - protein, 15 aa, Homo sapiens
  CDR3 for beta chain variable domain of TCR clone 9474 (TRBV7-6, TRBJ2-2)
CASRRTSGNTGELFF

SEQ ID NO: 18949 - protein, 13 aa, Homo sapiens
  CDR3 for alpha chain variable domain of TCR clone 9475 (TRAV25, TRAJ17)
CAGLRAAGNKLTF

SEQ ID NO: 18950 - protein, 15 aa, Homo sapiens
  CDR3 for beta chain variable domain of TCR clone 9475 (TRBV6-5, TRBJ1-1)
CASTLRLGSGTEAFF

SEQ ID NO: 18951 - protein, 14 aa, Homo sapiens
  CDR3 for alpha chain variable domain of TCR clone 9476 (TRAV26-1, TRAJ21)
CIVRPPYNFNKFYF

SEQ ID NO: 18952 - protein, 12 aa, Homo sapiens
  CDR3 for beta chain variable domain of TCR clone 9476 (TRBV7-8, TRBJ2-7)
CASSLGDREQYF

SEQ ID NO: 18953 - protein, 14 aa, Homo sapiens
  CDR3 for alpha chain variable domain of TCR clone 9477 (TRAV12-2, TRAJ13)
CAVKKTGGYQKVTF

SEQ ID NO: 18954 - protein, 16 aa, Homo sapiens
  CDR3 for beta chain variable domain of TCR clone 9477 (TRBV12-4, TRBJ1-5)
CASSSGPRGSNQPQHF

SEQ ID NO: 18955 - protein, 16 aa, Homo sapiens
  CDR3 for alpha chain variable domain of TCR clone 9478 (TRAV12-3, TRAJ53)
CAMSPGSGCSNYKLTF

SEQ ID NO: 18956 - protein, 11 aa, Homo sapiens
  CDR3 for beta chain variable domain of TCR clone 9478 (TRBV29-1, TRBJ2-5)
CSEDRTGTQYF

SEQ ID NO: 18957 - protein, 22 aa, Homo sapiens
  CDR3 for alpha chain variable domain of TCR clone 9479 (TRAV4, TRAJ37)
CLVGDGRLWQHRQTNLWARDNF

SEQ ID NO: 18958 - protein, 15 aa, Homo sapiens
  CDR3 for beta chain variable domain of TCR clone 9479 (TRBV6-6, TRBJ1-1)
CASSYASGAGTEAFF

SEQ ID NO: 18959 - protein, 13 aa, Homo sapiens
  CDR3 for alpha chain variable domain of TCR clone 9480 (TRAV21, TRAJ27)
CAARPGNAGKSTF

SEQ ID NO: 18960 - protein, 14 aa, Homo sapiens
  CDR3 for beta chain variable domain of TCR clone 9480 (TRBV7-6, TRBJ2-3)
CTSSLGTVTDTQYF

SEQ ID NO: 18961 - protein, 15 aa, Homo sapiens
  CDR3 for alpha chain variable domain of TCR clone 9481 (TRAV6, TRAJ21)
CAGLDTTSTNFTLDL

SEQ ID NO: 18962 - protein, 19 aa, Homo sapiens
  CDR3 for beta chain variable domain of TCR clone 9481 (TRBV23-1, TRBJ2-3)
TVSLRQQSRLAGVPDTQYF

SEQ ID NO: 18963 - protein, 16 aa, Homo sapiens
  CDR3 for alpha chain variable domain of TCR clone 9482 (TRAV26-1, TRAJ58)
IASSESGETSGSRLTF

SEQ ID NO: 18964 - protein, 14 aa, Homo sapiens
  CDR3 for beta chain variable domain of TCR clone 9482 (TRBV9, TRBJ2-1)
CASSVDPRGKEQFF

SEQ ID NO: 18965 - protein, 13 aa, Homo sapiens
  CDR3 for alpha chain variable domain of TCR clone 9483 (TRAV13-2, TRAJ48)
CAEMDFGNEKLTF

SEQ ID NO: 18966 - protein, 15 aa, Homo sapiens
  CDR3 for beta chain variable domain of TCR clone 9483 (TRBV7-9, TRBJ1-6)
CASSPPGRGNSPLHF

SEQ ID NO: 18967 - protein, 15 aa, Homo sapiens
  CDR3 for alpha chain variable domain of TCR clone 9484 (TRAV8-3, TRAJ45)
CASSYSGGGAEGLTF

SEQ ID NO: 18968 - protein, 13 aa, Homo sapiens
  CDR3 for beta chain variable domain of TCR clone 9484 (TRBV10-3, TRBJ2-7)
CASKLAVNYEQYF

SEQ ID NO: 18969 - protein, 16 aa, Homo sapiens
  CDR3 for alpha chain variable domain of TCR clone 9485 (TRAV12-3, TRAJ53)
CAMSPGSGGSNYKLTF

SEQ ID NO: 18970 - protein, 16 aa, Homo sapiens
  CDR3 for beta chain variable domain of TCR clone 9485 (TRBV4-2, TRBJ1-1)
CASRPLDGGGDTEAFF

SEQ ID NO: 18971 - protein, 15 aa, Homo sapiens
  CDR3 for alpha chain variable domain of TCR clone 9486 (TRAV12-2, TRAJ53)
CAVNGGGGGNYKLTF

SEQ ID NO: 18972 - protein, 17 aa, Homo sapiens
  CDR3 for beta chain variable domain of TCR clone 9486 (TRBV7-3, TRBJ2-3)
RASSLMKRMRGADTQYF

SEQ ID NO: 18973 - protein, 14 aa, Homo sapiens
  CDR3 for alpha chain variable domain of TCR clone 9487 (TRAV1-2, TRAJ8)
CAEREDTGFQKLVF

SEQ ID NO: 18974 - protein, 15 aa, Homo sapiens
  CDR3 for beta chain variable domain of TCR clone 9487 (TRBV6-3, TRBJ2-7)
CASSSPGTVFYEQYF

SEQ ID NO: 18975 - protein, 13 aa, Homo sapiens
  CDR3 for alpha chain variable domain of TCR clone 9488 (TRAV21, TRAJ27)
CAARPGNAGKSTF

SEQ ID NO: 18976 - protein, 14 aa, Homo sapiens
  CDR3 for beta chain variable domain of TCR clone 9488 (TRBV7-6, TRBJ2-3)
CASSLETVTDTQYF

SEQ ID NO: 18977 - protein, 14 aa, Homo sapiens
  CDR3 for alpha chain variable domain of TCR clone 9489 (TRAV12-3, TRAJ48)
CAMSVNFGNEKLTF

SEQ ID NO: 18978 - protein, 13 aa, Homo sapiens
  CDR3 for beta chain variable domain of TCR clone 9489 (TRBV20-1, TRBJ1-3)
CSSAGNSGNTIYF

SEQ ID NO: 18979 - protein, 14 aa, Homo sapiens
  CDR3 for alpha chain variable domain of TCR clone 9490 (TRAV12-2, TRAJ13)
CAVKKTGGHQKVTF

SEQ ID NO: 18980 - protein, 15 aa, Homo sapiens
  CDR3 for beta chain variable domain of TCR clone 9490 (TRBV27, TRBJ2-1)
CASSNGGGSSNEQFF

SEQ ID NO: 18981 - protein, 18 aa, Homo sapiens
  CDR3 for alpha chain variable domain of TCR clone 9491 (TRAV13-1, TRAJ52)
CAASKRSAGGTSYGKMTF

SEQ ID NO: 18982 - protein, 13 aa, Homo sapiens
  CDR3 for beta chain variable domain of TCR clone 9491 (TRBV12-4, TRBJ1-2)
CASSLRQGKGYTF

SEQ ID NO: 18983 - protein, 14 aa, Homo sapiens
  CDR3 for alpha chain variable domain of TCR clone 9492 (TRAV35, TRAJ22)
CAGLRPGSARQLTF

SEQ ID NO: 18984 - protein, 14 aa, Homo sapiens
  CDR3 for beta chain variable domain of TCR clone 9492 (TRBV12-4, TRBJ2-5)
CQQSPDRPQETQYF

SEQ ID NO: 18985 - protein, 13 aa, Homo sapiens
  CDR3 for alpha chain variable domain of TCR clone 9493 (TRAV17, TRAJ9)
CATDYTGGFRTIF

SEQ ID NO: 18986 - protein, 16 aa, Homo sapiens
  CDR3 for beta chain variable domain of TCR clone 9493 (TRBV7-7, TRBJ2-1)
CASSLASGTSYNEQFF

SEQ ID NO: 18987 - protein, 13 aa, Homo sapiens
  CDR3 for alpha chain variable domain of TCR clone 9494 (TRAV22, TRAJ12)
CTGRMDSSYKLIF

SEQ ID NO: 18988 - protein, 13 aa, Homo sapiens
  CDR3 for beta chain variable domain of TCR clone 9494 (TRBV2, TRBJ2-7)
CASSVGGSGEQYF

SEQ ID NO: 18989 - protein, 12 aa, Homo sapiens
  CDR3 for alpha chain variable domain of TCR clone 9495 (TRAV12-3, TRAJ17)
CAMTLTGNKLTF

SEQ ID NO: 18990 - protein, 13 aa, Homo sapiens
  CDR3 for beta chain variable domain of TCR clone 9495 (TRBV4-2, TRBJ1-1)
CASSQAGNTEAFF

SEQ ID NO: 18991 - protein, 17 aa, Homo sapiens
  CDR3 for alpha chain variable domain of TCR clone 9496 (TRAV13-1, TRAJ28)
CAASPPYSGAGSYQLTF

SEQ ID NO: 18992 - protein, 15 aa, Homo sapiens
  CDR3 for beta chain variable domain of TCR clone 9496 (TRBV20-1, TRBJ2-1)
CSARGGTRYYNEQFF

SEQ ID NO: 18993 - protein, 14 aa, Homo sapiens
  CDR3 for alpha chain variable domain of TCR clone 9497 (TRAV8-4, TRAJ11)
CAVSLNSGYSTLTF

SEQ ID NO: 18994 - protein, 14 aa, Homo sapiens
  CDR3 for beta chain variable domain of TCR clone 9497 (TRBV19, TRBJ2-1)
CASKDPGLANEQFF

SEQ ID NO: 18995 - protein, 14 aa, Homo sapiens
  CDR3 for alpha chain variable domain of TCR clone 9498 (TRAV1-2, TRAJ8)
CAVREDTGFPKLVF

SEQ ID NO: 18996 - protein, 15 aa, Homo sapiens
  CDR3 for beta chain variable domain of TCR clone 9498 (TRBV6-3, TRBJ2-7)
CASSSPGTVFYEQYF

SEQ ID NO: 18997 - protein, 15 aa, Homo sapiens
  CDR3 for alpha chain variable domain of TCR clone 9499 (TRAV8-3, TRAJ45)
CASSYSGGGADGLTF

SEQ ID NO: 18998 - protein, 15 aa, Homo sapiens
  CDR3 for beta chain variable domain of TCR clone 9499 (TRBV12-4, TRBJ2-1)
CASSLLATGNNEQFF

SEQ ID NO: 18999 - protein, 14 aa, Homo sapiens
  CDR3 for alpha chain variable domain of TCR clone 9500 (TRAV22, TRAJ29)
CAVTRNSGNTPLVF

SEQ ID NO: 19000 - protein, 13 aa, Homo sapiens
  CDR3 for beta chain variable domain of TCR clone 9500 (TRBV18, TRBJ1-1)
CASSPETKPEAFF

SEQ ID NO: 19001 - protein, 13 aa, Homo sapiens
  CDR3 for alpha chain variable domain of TCR clone 9501 (TRAV12-3, TRAJ5)
CAMIYTGRRALTF

SEQ ID NO: 19002 - protein, 15 aa, Homo sapiens
  CDR3 for beta chain variable domain of TCR clone 9501 (TRBV20-1, TRBJ2-7)
CSARDRVSGMDEQYF

SEQ ID NO: 19003 - protein, 12 aa, Homo sapiens
  CDR3 for alpha chain variable domain of TCR clone 9502 (TRAV12-3, TRAJ17)
CEMTLTGNKLTF

SEQ ID NO: 19004 - protein, 15 aa, Homo sapiens
  CDR3 for beta chain variable domain of TCR clone 9502 (TRBV20-1, TRBJ2-7)
CSARDRVSGMDEQYF

SEQ ID NO: 19005 - protein, 15 aa, Homo sapiens
  CDR3 for alpha chain variable domain of TCR clone 9503 (TRAV25, TRAJ52)
CAGRPGGTSYGKLTF

SEQ ID NO: 19006 - protein, 14 aa, Homo sapiens
  CDR3 for beta chain variable domain of TCR clone 9503 (TRBV11-2, TRBJ2-1)
CASSLEPSGRGKFF

SEQ ID NO: 19007 - protein, 10 aa, Homo sapiens
  CDR3 for alpha chain variable domain of TCR clone 9504 (TRAV12-3, TRAJ49)
CAMNDDQFYF

SEQ ID NO: 19008 - protein, 15 aa, Homo sapiens
  CDR3 for beta chain variable domain of TCR clone 9504 (TRBV9, TRBJ1-6)
CASSVAGTGDSPLHF

SEQ ID NO: 19009 - protein, 14 aa, Homo sapiens
  CDR3 for alpha chain variable domain of TCR clone 9505 (TRAV1-2, TRAJ16)
CAVNRFSDGQKLLF

SEQ ID NO: 19010 - protein, 13 aa, Homo sapiens
  CDR3 for beta chain variable domain of TCR clone 9505 (TRBV19, TRBJ1-5)
CASKVGPWEPQHF

SEQ ID NO: 19011 - protein, 14 aa, Homo sapiens
  CDR3 for alpha chain variable domain of TCR clone 9506 (TRAV12-2, TRAJ13)
CAVKKTGGYQKVTF

SEQ ID NO: 19012 - protein, 15 aa, Homo sapiens
  CDR3 for beta chain variable domain of TCR clone 9506 (TRBV27, TRBJ2-1)
CASSNGGGSSSEQFF

SEQ ID NO: 19013 - protein, 16 aa, Homo sapiens
  CDR3 for alpha chain variable domain of TCR clone 9507 (TRAV8-3, TRAJ13)
CAVGAYPSGGYQKVTF

SEQ ID NO: 19014 - protein, 15 aa, Homo sapiens
  CDR3 for beta chain variable domain of TCR clone 9507 (TRBV19, TRBJ1-5)
CASSIVWADNQTQHF

SEQ ID NO: 19015 - protein, 15 aa, Homo sapiens
  CDR3 for alpha chain variable domain of TCR clone 9508 (TRAV1-2, TRAJ9)
CAVRDDGTGGFKTIF

SEQ ID NO: 19016 - protein, 16 aa, Homo sapiens
  CDR3 for beta chain variable domain of TCR clone 9508 (TRBV19, TRBJ2-7)
CASSPALGQGLYEQYF

SEQ ID NO: 19017 - protein, 14 aa, Homo sapiens
  CDR3 for alpha chain variable domain of TCR clone 9509 (TRAV1-2, TRAJ16)
CAVNRFSDGQKLLF

SEQ ID NO: 19018 - protein, 16 aa, Homo sapiens
  CDR3 for beta chain variable domain of TCR clone 9509 (TRBV24-1, TRBJ2-3)
CATSDPGTGATDTQYF

SEQ ID NO: 19019 - protein, 11 aa, Homo sapiens
  CDR3 for alpha chain variable domain of TCR clone 9510 (TRAV17, TRAJ43)
CATPRSNDMRF

SEQ ID NO: 19020 - protein, 15 aa, Homo sapiens
  CDR3 for beta chain variable domain of TCR clone 9510 (TRBV11-2, TRBJ2-1)
CASSLGTSGLNGQFF

SEQ ID NO: 19021 - protein, 14 aa, Homo sapiens
  CDR3 for alpha chain variable domain of TCR clone 9511 (TRAV27, TRAJ15)
CAGFDNQAGIALIF

SEQ ID NO: 19022 - protein, 11 aa, Homo sapiens
  CDR3 for beta chain variable domain of TCR clone 9511 (TRBV29-1, TRBJ1-1)
CSVEVGTRTFF

SEQ ID NO: 19023 - protein, 16 aa, Homo sapiens
  CDR3 for alpha chain variable domain of TCR clone 9512 (TRAV25, TRAJ53)
CAGPKGSGGSNYKLTF

SEQ ID NO: 19024 - protein, 15 aa, Homo sapiens
  CDR3 for beta chain variable domain of TCR clone 9512 (TRBV6-3, TRBJ2-7)
CANSSPGTVFYEQYF

SEQ ID NO: 19025 - protein, 14 aa, Homo sapiens
  CDR3 for alpha chain variable domain of TCR clone 9513 (TRAV17, TRAJ16)
CATADFSDGQRLLF

SEQ ID NO: 19026 - protein, 15 aa, Homo sapiens
  CDR3 for beta chain variable domain of TCR clone 9513 (TRBV18, TRBJ2-1)
CASSPPSASYNEQFF

SEQ ID NO: 19027 - protein, 15 aa, Homo sapiens
  CDR3 for alpha chain variable domain of TCR clone 9514 (TRAV3, TRAJ32)
CAVSSYGGATNKLIF

SEQ ID NO: 19028 - protein, 14 aa, Homo sapiens
  CDR3 for beta chain variable domain of TCR clone 9514 (TRBV20-1, TRBJ1-4)
CSARDGSGWEKLFF

SEQ ID NO: 19029 - protein, 15 aa, Homo sapiens
  CDR3 for alpha chain variable domain of TCR clone 9515 (TRAV35, TRAJ53)
CAGLTQAGSNYKLTF

SEQ ID NO: 19030 - protein, 13 aa, Homo sapiens
  CDR3 for beta chain variable domain of TCR clone 9515 (TRBV20-1, TRBJ1-1)
CSAVDGTLNEAFF

SEQ ID NO: 19031 - protein, 11 aa, Homo sapiens
  CDR3 for alpha chain variable domain of TCR clone 9516 (TRAV12-3, TRAJ43)
SAMSVSNDMRF

SEQ ID NO: 19032 - protein, 13 aa, Homo sapiens
  CDR3 for beta chain variable domain of TCR clone 9516 (TRBV20-1, TRBJ1-1)
CSAPLGGGTEAFF

SEQ ID NO: 19033 - protein, 16 aa, Homo sapiens
  CDR3 for alpha chain variable domain of TCR clone 9517 (TRAV30, TRAJ24)
CGTEIVDSDSWGKFQF

SEQ ID NO: 19034 - protein, 14 aa, Homo sapiens
  CDR3 for beta chain variable domain of TCR clone 9517 (TRBV12-5, TRBJ2-5)
CASGSRTHQETQYF

SEQ ID NO: 19035 - protein, 13 aa, Homo sapiens
  CDR3 for alpha chain variable domain of TCR clone 9518 (TRAV2, TRAJ40)
CAVVTSGTYKYIF

SEQ ID NO: 19036 - protein, 14 aa, Homo sapiens
  CDR3 for beta chain variable domain of TCR clone 9518 (TRBV11-3, TRBJ1-6)
CASSFSGGDSPLHF

SEQ ID NO: 19037 - protein, 15 aa, Homo sapiens
  CDR3 for alpha chain variable domain of TCR clone 9519 (TRAV26-1, TRAJ22)
CIVRVSFWFCKATDL

SEQ ID NO: 19038 - protein, 14 aa, Homo sapiens
  CDR3 for beta chain variable domain of TCR clone 9519 (TRBV4-1, TRBJ2-2)
CASSQAVNTGELFF

SEQ ID NO: 19039 - protein, 13 aa, Homo sapiens
  CDR3 for alpha chain variable domain of TCR clone 9520 (TRAV8-1, TRAJ23)
CAWRDNQGGKLIF

SEQ ID NO: 19040 - protein, 10 aa, Homo sapiens
  CDR3 for beta chain variable domain of TCR clone 9520 (TRBV2, TRBJ2-5)
CASSAATQYF

SEQ ID NO: 19041 - protein, 15 aa, Homo sapiens
  CDR3 for alpha chain variable domain of TCR clone 9521 (TRAV27, TRAJ38)
CAARRNAGNNRKLIW

SEQ ID NO: 19042 - protein, 15 aa, Homo sapiens
  CDR3 for beta chain variable domain of TCR clone 9521 (TRBV5-1, TRBJ2-1)
CASSPPRAPYNEQFS

SEQ ID NO: 19043 - protein, 23 aa, Homo sapiens
  CDR3 for alpha chain variable domain of TCR clone 9522 (TRAV8-4, TRAJ32)
CAAYMVVLQTSSSLELALCLLSS

SEQ ID NO: 19044 - protein, 16 aa, Homo sapiens
  CDR3 for beta chain variable domain of TCR clone 9522 (TRBV27, TRBJ2-2)
CASSPLAAANTGELFF

SEQ ID NO: 19045 - protein, 11 aa, Homo sapiens
  CDR3 for alpha chain variable domain of TCR clone 9523 (TRAV12-1, TRAJ13)
CVVEGYQKVTF

SEQ ID NO: 19046 - protein, 14 aa, Homo sapiens
  CDR3 for beta chain variable domain of TCR clone 9523 (TRBV5-1, TRBJ2-7)
CASSLTQGLREQYF

SEQ ID NO: 19047 - protein, 13 aa, Homo sapiens
  CDR3 for alpha chain variable domain of TCR clone 9524 (TRAV29/DV5, TRAJ31)
CAASRNNNARLMF

SEQ ID NO: 19048 - protein, 17 aa, Homo sapiens
  CDR3 for beta chain variable domain of TCR clone 9524 (TRBV5-4, TRBJ2-3)
CISVPAVLTASTDTQYF

SEQ ID NO: 19049 - protein, 13 aa, Homo sapiens
  CDR3 for alpha chain variable domain of TCR clone 9525 (TRAV2, TRAJ40)
CVVVTSGTYKYIF

SEQ ID NO: 19050 - protein, 14 aa, Homo sapiens
  CDR3 for beta chain variable domain of TCR clone 9525 (TRBV19, TRBJ2-1)
CASPTFVLSGEQFF

SEQ ID NO: 19051 - protein, 14 aa, Homo sapiens
  CDR3 for alpha chain variable domain of TCR clone 9526 (TRAV35, TRAJ33)
CAGSSQDSNYQLIW

SEQ ID NO: 19052 - protein, 14 aa, Homo sapiens
  CDR3 for beta chain variable domain of TCR clone 9526 (TRBV5-1, TRBJ2-7)
CASSRGESLYEQYF

SEQ ID NO: 19053 - protein, 12 aa, Homo sapiens
  CDR3 for alpha chain variable domain of TCR clone 9527 (TRAV12-3, TRAJ17)
CAMPLTGNKLTF

SEQ ID NO: 19054 - protein, 15 aa, Homo sapiens
  CDR3 for beta chain variable domain of TCR clone 9527 (TRBV20-1, TRBJ2-7)
CSARDRVSGMDEQYF

SEQ ID NO: 19055 - protein, 15 aa, Homo sapiens
  CDR3 for alpha chain variable domain of TCR clone 9528 (TRAV26-1, TRAJ22)
CIVRVSFWFCKATDL

SEQ ID NO: 19056 - protein, 13 aa, Homo sapiens
  CDR3 for beta chain variable domain of TCR clone 9528 (TRBV7-9, TRBJ1-2)
CASSVKQNYGYTF

SEQ ID NO: 19057 - protein, 11 aa, Homo sapiens
  CDR3 for alpha chain variable domain of TCR clone 9529 (TRAV13-2, TRAJ15)
CSHQAGTALIF

SEQ ID NO: 19058 - protein, 15 aa, Homo sapiens
  CDR3 for beta chain variable domain of TCR clone 9529 (TRBV20-1, TRBJ1-5)
CSATSDRGLGQPQHF

SEQ ID NO: 19059 - protein, 14 aa, Homo sapiens
  CDR3 for alpha chain variable domain of TCR clone 9530 (TRAV1-2, TRAJ16)
CAVNRFSDGQKLLF

SEQ ID NO: 19060 - protein, 18 aa, Homo sapiens
  CDR3 for beta chain variable domain of TCR clone 9530 (TRBV7-6, TRBJ2-1)
CASSPRTSGMSSYNEQFF

SEQ ID NO: 19061 - protein, 11 aa, Homo sapiens
  CDR3 for alpha chain variable domain of TCR clone 9531 (TRAV3, TRAJ21)
CAVGNFNKFYF

SEQ ID NO: 19062 - protein, 16 aa, Homo sapiens
  CDR3 for beta chain variable domain of TCR clone 9531 (TRBV19, TRBJ2-1)
CASSKVGPSSYNEQFF

SEQ ID NO: 19063 - protein, 16 aa, Homo sapiens
  CDR3 for alpha chain variable domain of TCR clone 9532 (TRAV12-3, TRAJ53)
CAMSPGSGGSHYKLTF

SEQ ID NO: 19064 - protein, 11 aa, Homo sapiens
  CDR3 for beta chain variable domain of TCR clone 9532 (TRBV29-1, TRBJ2-5)
CSEDRTGTQYF

SEQ ID NO: 19065 - protein, 14 aa, Homo sapiens
  CDR3 for alpha chain variable domain of TCR clone 9533 (TRAV12-2, TRAJ17)
CAVLFRAAGNKLTF

SEQ ID NO: 19066 - protein, 17 aa, Homo sapiens
  CDR3 for beta chain variable domain of TCR clone 9533 (TRBV20-1, TRBJ2-2)
CSASGSGQGGLTGELFF

SEQ ID NO: 19067 - protein, 17 aa, Homo sapiens
  CDR3 for alpha chain variable domain of TCR clone 9534 (TRAV8-6, TRAJ4)
CAVSDLGVAGGYNKLIF

SEQ ID NO: 19068 - protein, 15 aa, Homo sapiens
  CDR3 for beta chain variable domain of TCR clone 9534 (TRBV10-3, TRBJ2-1)
CAIRNGTSGHNEQFF

SEQ ID NO: 19069 - protein, 12 aa, Homo sapiens
  CDR3 for alpha chain variable domain of TCR clone 9535 (TRAV2, TRAJ9)
CAVGAGGFKTTF

SEQ ID NO: 19070 - protein, 16 aa, Homo sapiens
  CDR3 for beta chain variable domain of TCR clone 9535 (TRBV13, TRBJ2-2)
CASSPRTGEHTGELFF

SEQ ID NO: 19071 - protein, 14 aa, Homo sapiens
  CDR3 for alpha chain variable domain of TCR clone 9536 (TRAV1-2, TRAJ16)
CAVNRFSYGQKLLF

SEQ ID NO: 19072 - protein, 15 aa, Homo sapiens
  CDR3 for beta chain variable domain of TCR clone 9536 (TRBV9, TRBJ1-6)
CASSVAGTGDSPLHF

SEQ ID NO: 19073 - protein, 13 aa, Homo sapiens
  CDR3 for alpha chain variable domain of TCR clone 9537 (TRAV21, TRAJ57)
CAVTQGGAEKLVF

SEQ ID NO: 19074 - protein, 16 aa, Homo sapiens
  CDR3 for beta chain variable domain of TCR clone 9537 (TRBV29-1, TRBJ2-7)
CSVEDAEDGTAYEQYF

SEQ ID NO: 19075 - protein, 13 aa, Homo sapiens
  CDR3 for alpha chain variable domain of TCR clone 9538 (TRAV13-2, TRAJ48)
CAEMDFGNEKLTF

SEQ ID NO: 19076 - protein, 13 aa, Homo sapiens
  CDR3 for beta chain variable domain of TCR clone 9538 (TRBV27, TRBJ1-6)
CASRWTGYSPLHF

SEQ ID NO: 19077 - protein, 17 aa, Homo sapiens
  CDR3 for alpha chain variable domain of TCR clone 9539 (TRAV26-2, TRAJ40)
DAAVSRGNDGGTYKYIF

SEQ ID NO: 19078 - protein, 14 aa, Homo sapiens
  CDR3 for beta chain variable domain of TCR clone 9539 (TRBV5-1, TRBJ1-1)
CASRAQGAMTEAFF

SEQ ID NO: 19079 - protein, 11 aa, Homo sapiens
  CDR3 for alpha chain variable domain of TCR clone 9540 (TRAV3, TRAJ21)
CAVGNFNKFYF

SEQ ID NO: 19080 - protein, 15 aa, Homo sapiens
  CDR3 for beta chain variable domain of TCR clone 9540 (TRBV12-4, TRBJ2-5)
CASSPPTGLQETQYF

SEQ ID NO: 19081 - protein, 12 aa, Homo sapiens
  CDR3 for alpha chain variable domain of TCR clone 9541 (TRAV13-1, TRAJ49)
CAASPMGNQFYF

SEQ ID NO: 19082 - protein, 13 aa, Homo sapiens
  CDR3 for beta chain variable domain of TCR clone 9541 (TRBV20-1, TRBJ2-2)
CSASAAGTRELFF

SEQ ID NO: 19083 - protein, 17 aa, Homo sapiens
  CDR3 for alpha chain variable domain of TCR clone 9542 (TRAV3, TRAJ6)
CAVRDGPRAGGSYIPTF

SEQ ID NO: 19084 - protein, 16 aa, Homo sapiens
  CDR3 for beta chain variable domain of TCR clone 9542 (TRBV27, TRBJ2-2)
CASSFRGLVRTGELFF

SEQ ID NO: 19085 - protein, 12 aa, Homo sapiens
  CDR3 for alpha chain variable domain of TCR clone 9543 (TRAV12-1, TRAJ40)
CVFYSGTYKYIF

SEQ ID NO: 19086 - protein, 15 aa, Homo sapiens
  CDR3 for beta chain variable domain of TCR clone 9543 (TRBV20-1, TRBJ2-7)
CSARDRVSGMDEQYF

SEQ ID NO: 19087 - protein, 13 aa, Homo sapiens
  CDR3 for alpha chain variable domain of TCR clone 9544 (TRAV27, TRAJ45)
CRSSGGGAAGLTF

SEQ ID NO: 19088 - protein, 17 aa, Homo sapiens
  CDR3 for beta chain variable domain of TCR clone 9544 (TRBV11-2, TRBJ2-1)
CASSLYPPGVEYNEQFF

SEQ ID NO: 19089 - protein, 17 aa, Homo sapiens
  CDR3 for alpha chain variable domain of TCR clone 9545 (TRAV3, TRAJ6)
CAVRDGPRAGGSYIPTF

SEQ ID NO: 19090 - protein, 14 aa, Homo sapiens
  CDR3 for beta chain variable domain of TCR clone 9545 (TRBV25-1, TRBJ1-1)
CASTHLGGNTEAFF

SEQ ID NO: 19091 - protein, 11 aa, Homo sapiens
  CDR3 for alpha chain variable domain of TCR clone 9546 (TRAV21, TRAJ34)
CAHYNTDKLIF

SEQ ID NO: 19092 - protein, 15 aa, Homo sapiens
  CDR3 for beta chain variable domain of TCR clone 9546 (TRBV6-3, TRBJ2-7)
CASSSPGTVFYEQYF

SEQ ID NO: 19093 - protein, 14 aa, Homo sapiens
  CDR3 for alpha chain variable domain of TCR clone 9547 (TRAV8-3, TRAJ4)
CAVGAAGGYNKLIF

SEQ ID NO: 19094 - protein, 15 aa, Homo sapiens
  CDR3 for beta chain variable domain of TCR clone 9547 (TRBV6-5, TRBJ2-1)
CASSYDAGAGNEQLF

SEQ ID NO: 19095 - protein, 12 aa, Homo sapiens
  CDR3 for alpha chain variable domain of TCR clone 9548 (TRAV12-3, TRAJ17)
CAMTLTGNELTF

SEQ ID NO: 19096 - protein, 18 aa, Homo sapiens
  CDR3 for beta chain variable domain of TCR clone 9548 (TRBV4-3, TRBJ1-6)
CASSQETPASSYNSPLHF

SEQ ID NO: 19097 - protein, 16 aa, Homo sapiens
  CDR3 for alpha chain variable domain of TCR clone 9549 (TRAV30, TRAJ24)
CGTEIVDADSWGKFQF

SEQ ID NO: 19098 - protein, 14 aa, Homo sapiens
  CDR3 for beta chain variable domain of TCR clone 9549 (TRBV12-5, TRBJ2-5)
CASGSRTNQETQYF

SEQ ID NO: 19099 - protein, 12 aa, Homo sapiens
  CDR3 for alpha chain variable domain of TCR clone 9550 (TRAV12-3, TRAJ17)
CAMTLTGNKLTF

SEQ ID NO: 19100 - protein, 16 aa, Homo sapiens
  CDR3 for beta chain variable domain of TCR clone 9550 (TRBV20-1, TRBJ1-2)
CSASMGQGVANYGYTF

SEQ ID NO: 19101 - protein, 11 aa, Homo sapiens
  CDR3 for alpha chain variable domain of TCR clone 9551 (TRAV21, TRAJ34)
CAHYNTDKLIF

SEQ ID NO: 19102 - protein, 14 aa, Homo sapiens
  CDR3 for beta chain variable domain of TCR clone 9551 (TRBV6-1, TRBJ1-3)
CASVQGGGGNTIYF

SEQ ID NO: 19103 - protein, 11 aa, Homo sapiens
  CDR3 for alpha chain variable domain of TCR clone 9552 (TRAV3, TRAJ21)
CAVGNFNKFYF

SEQ ID NO: 19104 - protein, 16 aa, Homo sapiens
  CDR3 for beta chain variable domain of TCR clone 9552 (TRBV19, TRBJ2-1)
FASSKAGPSSYNEQFF

SEQ ID NO: 19105 - protein, 13 aa, Homo sapiens
  CDR3 for alpha chain variable domain of TCR clone 9553 (TRAV2, TRAJ15)
CAVASQAGTALIF

SEQ ID NO: 19106 - protein, 12 aa, Homo sapiens
  CDR3 for beta chain variable domain of TCR clone 9553 (TRBV7-8, TRBJ2-7)
CASSLGDREQYF

SEQ ID NO: 19107 - protein, 16 aa, Homo sapiens
  CDR3 for alpha chain variable domain of TCR clone 9554 (TRAV12-2, TRAJ45)
CAVKRSPGGGADGLTF

SEQ ID NO: 19108 - protein, 12 aa, Homo sapiens
  CDR3 for beta chain variable domain of TCR clone 9554 (TRBV6-1, TRBJ2-5)
CASSEGRETQYF

SEQ ID NO: 19109 - protein, 14 aa, Homo sapiens
  CDR3 for alpha chain variable domain of TCR clone 9555 (TRAV25, TRAJ39)
CGRSNNNAGNMLTF

SEQ ID NO: 19110 - protein, 15 aa, Homo sapiens
  CDR3 for beta chain variable domain of TCR clone 9555 (TRBV15, TRBJ1-5)
CATSRDPVSNQPQHF

SEQ ID NO: 19111 - protein, 17 aa, Homo sapiens
  CDR3 for alpha chain variable domain of TCR clone 9556 (TRAV3, TRAJ6)
CAVRDGLRAGGSYIPTF

SEQ ID NO: 19112 - protein, 14 aa, Homo sapiens
  CDR3 for beta chain variable domain of TCR clone 9556 (TRBV7-2, TRBJ2-7)
CASSPKTSFYEQYF

SEQ ID NO: 19113 - protein, 13 aa, Homo sapiens
  CDR3 for alpha chain variable domain of TCR clone 9557 (TRAV3, TRAJ27)
CAVRPLGAGKSPF

SEQ ID NO: 19114 - protein, 13 aa, Homo sapiens
  CDR3 for beta chain variable domain of TCR clone 9557 (TRBV7-9, TRBJ2-3)
CASSPGSTDTQYF

SEQ ID NO: 19115 - protein, 14 aa, Homo sapiens
  CDR3 for alpha chain variable domain of TCR clone 9558 (TRAV21, TRAJ15)
CATGPNQAGTALIF

SEQ ID NO: 19116 - protein, 13 aa, Homo sapiens
  CDR3 for beta chain variable domain of TCR clone 9558 (TRBV25-1, TRBJ2-5)
CASSESGRETQYF

SEQ ID NO: 19117 - protein, 14 aa, Homo sapiens
  CDR3 for alpha chain variable domain of TCR clone 9559 (TRAV26-1, TRAJ38)
CIADNAGNNRKLIW

SEQ ID NO: 19118 - protein, 13 aa, Homo sapiens
  CDR3 for beta chain variable domain of TCR clone 9559 (TRBV20-1, TRBJ1-1)
CSARGGGNTEAFS

SEQ ID NO: 19119 - protein, 18 aa, Homo sapiens
  CDR3 for alpha chain variable domain of TCR clone 9560 (TRAV40, TRAJ42)
SSGSRLLNYGGSQGNLIF

SEQ ID NO: 19120 - protein, 13 aa, Homo sapiens
  CDR3 for beta chain variable domain of TCR clone 9560 (TRBV4-1, TRBJ2-2)
CASSQENTGELFF

SEQ ID NO: 19121 - protein, 11 aa, Homo sapiens
  CDR3 for alpha chain variable domain of TCR clone 9561 (TRAV12-3, TRAJ17)
CNDATGNKLTF

SEQ ID NO: 19122 - protein, 15 aa, Homo sapiens
  CDR3 for beta chain variable domain of TCR clone 9561 (TRBV20-1, TRBJ2-7)
CSARDRVSGMDEQYF

SEQ ID NO: 19123 - protein, 16 aa, Homo sapiens
  CDR3 for alpha chain variable domain of TCR clone 9562 (TRAV1-1, TRAJ29)
CAVRSTRNSGNTPLVF

SEQ ID NO: 19124 - protein, 14 aa, Homo sapiens
  CDR3 for beta chain variable domain of TCR clone 9562 (TRBV7-2, TRBJ2-7)
CASSPKTSFYEQYF

SEQ ID NO: 19125 - protein, 21 aa, Homo sapiens
  CDR3 for alpha chain variable domain of TCR clone 9563 (TRAV8-4, TRAJ47)
HLTKPSAHMSDAAERGNKLVF

SEQ ID NO: 19126 - protein, 14 aa, Homo sapiens
  CDR3 for beta chain variable domain of TCR clone 9563 (TRBV12-4, TRBJ2-5)
CASSLWQKQETQYF

SEQ ID NO: 19127 - protein, 13 aa, Homo sapiens
  CDR3 for alpha chain variable domain of TCR clone 9564 (TRAV27, TRAJ41)
CAGEGNSGYALNF

SEQ ID NO: 19128 - protein, 14 aa, Homo sapiens
  CDR3 for beta chain variable domain of TCR clone 9564 (TRBV7-2, TRBJ1-1)
RASSFLTGTTEAFF

SEQ ID NO: 19129 - protein, 13 aa, Homo sapiens
  CDR3 for alpha chain variable domain of TCR clone 9565 (TRAV2, TRAJ40)
CAVVTSGTYKYIF

SEQ ID NO: 19130 - protein, 14 aa, Homo sapiens
  CDR3 for beta chain variable domain of TCR clone 9565 (TRBV12-5, TRBJ2-5)
CASGSRTHQETQYF

SEQ ID NO: 19131 - protein, 13 aa, Homo sapiens
  CDR3 for alpha chain variable domain of TCR clone 9566 (TRAV2, TRAJ40)
CAVVTSGTYKYIF

SEQ ID NO: 19132 - protein, 14 aa, Homo sapiens
  CDR3 for beta chain variable domain of TCR clone 9566 (TRBV19, TRBJ2-1)
CASPTFVLSCEQFF

SEQ ID NO: 19133 - protein, 13 aa, Homo sapiens
  CDR3 for alpha chain variable domain of TCR clone 9567 (TRAV36/DV7, TRAJ48)
CAVPNFGNEKLTF

SEQ ID NO: 19134 - protein, 15 aa, Homo sapiens
  CDR3 for beta chain variable domain of TCR clone 9567 (TRBV4-3, TRBJ2-3)
CASSLGTRSSDTQYF

SEQ ID NO: 19135 - protein, 16 aa, Homo sapiens
  CDR3 for alpha chain variable domain of TCR clone 9568 (TRAV20, TRAJ10)
CAVLRGLTGGGNKLTF

SEQ ID NO: 19136 - protein, 17 aa, Homo sapiens
  CDR3 for beta chain variable domain of TCR clone 9568 (TRBV7-3, TRBJ2-3)
CASSLMKRMRGADTQYF

SEQ ID NO: 19137 - protein, 16 aa, Homo sapiens
  CDR3 for alpha chain variable domain of TCR clone 9569 (TRAV30, TRAJ24)
CGTEIVDADGWGKFQF

SEQ ID NO: 19138 - protein, 16 aa, Homo sapiens
  CDR3 for beta chain variable domain of TCR clone 9569 (TRBV4-1, TRBJ2-7)
CASSQEGTASSYEQYF

SEQ ID NO: 19139 - protein, 13 aa, Homo sapiens
  CDR3 for alpha chain variable domain of TCR clone 9570 (TRAV8-3, TRAJ43)
CAVGPDNNNDIRF

SEQ ID NO: 19140 - protein, 12 aa, Homo sapiens
  CDR3 for beta chain variable domain of TCR clone 9570 (TRBV7-2, TRBJ1-6)
CASSLSSSPLHF

SEQ ID NO: 19141 - protein, 13 aa, Homo sapiens
  CDR3 for alpha chain variable domain of TCR clone 9571 (TRAV21, TRAJ57)
CAVTQGGSEKLVF

SEQ ID NO: 19142 - protein, 15 aa, Homo sapiens
  CDR3 for beta chain variable domain of TCR clone 9571 (TRBV7-3, TRBJ2-3)
CANSLTSGVGDTQYF

SEQ ID NO: 19143 - protein, 12 aa, Homo sapiens
  CDR3 for alpha chain variable domain of TCR clone 9572 (TRAV38-1, TRAJ44)
CASAGTASKLTF

SEQ ID NO: 19144 - protein, 13 aa, Homo sapiens
  CDR3 for beta chain variable domain of TCR clone 9572 (TRBV18, TRBJ1-1)
CASSPNGDTEAFF

SEQ ID NO: 19145 - protein, 13 aa, Homo sapiens
  CDR3 for alpha chain variable domain of TCR clone 9573 (TRAV8-3, TRAJ36)
CAVGATGANNLFF

SEQ ID NO: 19146 - protein, 14 aa, Homo sapiens
  CDR3 for beta chain variable domain of TCR clone 9573 (TRBV7-2, TRBJ2-7)
CASRSQGAAYEQYF

SEQ ID NO: 19147 - protein, 13 aa, Homo sapiens
  CDR3 for alpha chain variable domain of TCR clone 9574 (TRAV27, TRAJ3)
ASLRGSSASKIIF

SEQ ID NO: 19148 - protein, 15 aa, Homo sapiens
  CDR3 for beta chain variable domain of TCR clone 9574 (TRBV28, TRBJ1-3)
CASSMGWASGNTVYF

SEQ ID NO: 19149 - protein, 17 aa, Homo sapiens
  CDR3 for alpha chain variable domain of TCR clone 9575 (TRAV3, TRAJ6)
CAVRDGPRAGGGYIPTF

SEQ ID NO: 19150 - protein, 20 aa, Homo sapiens
  CDR3 for beta chain variable domain of TCR clone 9575 (TRBV28, TRBJ2-1)
CASTPIGRSPGLAGGNEQFF

SEQ ID NO: 19151 - protein, 14 aa, Homo sapiens
  CDR3 for alpha chain variable domain of TCR clone 9576 (TRAV1-2, TRAJ8)
CSVREDTGFQKLVF

SEQ ID NO: 19152 - protein, 15 aa, Homo sapiens
  CDR3 for beta chain variable domain of TCR clone 9576 (TRBV6-3, TRBJ2-7)
CASSSPGTVFYEQYF

SEQ ID NO: 19153 - protein, 12 aa, Homo sapiens
  CDR3 for alpha chain variable domain of TCR clone 9577 (TRAV13-1, TRAJ42)
VNYGGSQGNLIF

SEQ ID NO: 19154 - protein, 15 aa, Homo sapiens
  CDR3 for beta chain variable domain of TCR clone 9577 (TRBV20-1, TRBJ2-1)
CNASSAGSSYNEQFF

SEQ ID NO: 19155 - protein, 15 aa, Homo sapiens
  CDR3 for alpha chain variable domain of TCR clone 9578 (TRAV2, TRAJ15)
CAAGGPNQAGTALIF

SEQ ID NO: 19156 - protein, 13 aa, Homo sapiens
  CDR3 for beta chain variable domain of TCR clone 9578 (TRBV2, TRBJ1-5)
CATAGPGNQPQHF

SEQ ID NO: 19157 - protein, 13 aa, Homo sapiens
  CDR3 for alpha chain variable domain of TCR clone 9579 (TRAV13-2, TRAJ22)
CRDPSGSARQLTL

SEQ ID NO: 19158 - protein, 15 aa, Homo sapiens
  CDR3 for beta chain variable domain of TCR clone 9579 (TRBV11-3, TRBJ2-1)
CASSLAGQTYNEQFF

SEQ ID NO: 19159 - protein, 16 aa, Homo sapiens
  CDR3 for alpha chain variable domain of TCR clone 9580 (TRAV23/DV6, TRAJ9)
CAASIGGNTGGFKTIF

SEQ ID NO: 19160 - protein, 14 aa, Homo sapiens
  CDR3 for beta chain variable domain of TCR clone 9580 (TRBV6-1, TRBJ1-3)
CASVQGGGGNTIYF

SEQ ID NO: 19161 - protein, 16 aa, Homo sapiens
  CDR3 for alpha chain variable domain of TCR clone 9581 (TRAV26-1, TRAJ52)
CIVSNAGGTSYGKLTF

SEQ ID NO: 19162 - protein, 16 aa, Homo sapiens
  CDR3 for beta chain variable domain of TCR clone 9581 (TRBV5-1, TRBJ2-1)
CASSLEGRGLYNEQSF

SEQ ID NO: 19163 - protein, 14 aa, Homo sapiens
  CDR3 for alpha chain variable domain of TCR clone 9582 (TRAV1-2, TRAJ8)
CAVREDTGFHKLVF

SEQ ID NO: 19164 - protein, 15 aa, Homo sapiens
  CDR3 for beta chain variable domain of TCR clone 9582 (TRBV6-3, TRBJ2-7)
CASSSPGTVFYEQYF

SEQ ID NO: 19165 - protein, 13 aa, Homo sapiens
  CDR3 for alpha chain variable domain of TCR clone 9583 (TRAV2, TRAJ40)
CAVVTSGTYKYIF

SEQ ID NO: 19166 - protein, 14 aa, Homo sapiens
  CDR3 for beta chain variable domain of TCR clone 9583 (TRBV19, TRBJ2-1)
CASPTFVLSGEHFF

SEQ ID NO: 19167 - protein, 12 aa, Homo sapiens
  CDR3 for alpha chain variable domain of TCR clone 9584 (TRAV12-3, TRAJ17)
CAMTLTANKLTF

SEQ ID NO: 19168 - protein, 15 aa, Homo sapiens
  CDR3 for beta chain variable domain of TCR clone 9584 (TRBV20-1, TRBJ2-7)
CSARDRVSGMDEQYF

SEQ ID NO: 19169 - protein, 14 aa, Homo sapiens
  CDR3 for alpha chain variable domain of TCR clone 9585 (TRAV1-2, TRAJ27)
CAVRSGANAGKSTF

SEQ ID NO: 19170 - protein, 15 aa, Homo sapiens
  CDR3 for beta chain variable domain of TCR clone 9585 (TRBV18, TRBJ2-7)
CASSPLQGRTYEQYF

SEQ ID NO: 19171 - protein, 15 aa, Homo sapiens
  CDR3 for alpha chain variable domain of TCR clone 9586 (TRAV20, TRAJ45)
CAVQETGGGADGLTF

SEQ ID NO: 19172 - protein, 11 aa, Homo sapiens
  CDR3 for beta chain variable domain of TCR clone 9586 (TRBV12-4, TRBJ2-3)
CASTATDTQYF

SEQ ID NO: 19173 - protein, 14 aa, Homo sapiens
  CDR3 for alpha chain variable domain of TCR clone 9587 (TRAV17, TRAJ16)
CATADFSDGQKLLF

SEQ ID NO: 19174 - protein, 15 aa, Homo sapiens
  CDR3 for beta chain variable domain of TCR clone 9587 (TRBV18, TRBJ2-1)
CASSPPSAPYNEQFF

SEQ ID NO: 19175 - protein, 19 aa, Homo sapiens
  CDR3 for alpha chain variable domain of TCR clone 9588 (TRAV2, TRAJ20)
ILQVREADAAVYRDCKLSF

SEQ ID NO: 19176 - protein, 14 aa, Homo sapiens
  CDR3 for beta chain variable domain of TCR clone 9588 (TRBV6-1, TRBJ1-3)
CASVQGGGGNTIYF

SEQ ID NO: 19177 - protein, 12 aa, Homo sapiens
  CDR3 for alpha chain variable domain of TCR clone 9589 (TRAV12-1, TRAJ40)
CVVYSGTYKYIF

SEQ ID NO: 19178 - protein, 17 aa, Homo sapiens
  CDR3 for beta chain variable domain of TCR clone 9589 (TRBV11-2, TRBJ2-3)
CQQLRGGLAGAPNTQYF

SEQ ID NO: 19179 - protein, 13 aa, Homo sapiens
  CDR3 for alpha chain variable domain of TCR clone 9590 (TRAV12-2, TRAJ39)
CAVNNNAGNMLTF

SEQ ID NO: 19180 - protein, 12 aa, Homo sapiens
  CDR3 for beta chain variable domain of TCR clone 9590 (TRBV5-1, TRBJ2-7)
CASSFRGYEQYF

SEQ ID NO: 19181 - protein, 14 aa, Homo sapiens
  CDR3 for alpha chain variable domain of TCR clone 9591 (TRAV8-3, TRAJ9)
CAVVYNTGGFKTIF

SEQ ID NO: 19182 - protein, 14 aa, Homo sapiens
  CDR3 for beta chain variable domain of TCR clone 9591 (TRBV7-3, TRBJ2-2)
CASSSGGYTGELFL

SEQ ID NO: 19183 - protein, 14 aa, Homo sapiens
  CDR3 for alpha chain variable domain of TCR clone 9592 (TRAV1-2, TRAJ8)
CAVREDTGSQKLVF

SEQ ID NO: 19184 - protein, 14 aa, Homo sapiens
  CDR3 for beta chain variable domain of TCR clone 9592 (TRBV7-6, TRBJ2-3)
CASSLGTVTDTQYF

SEQ ID NO: 19185 - protein, 19 aa, Homo sapiens
  CDR3 for alpha chain variable domain of TCR clone 9593 (TRAV3, TRAJ37)
CAVRDIVGGYPSNTGKLIF

SEQ ID NO: 19186 - protein, 15 aa, Homo sapiens
  CDR3 for beta chain variable domain of TCR clone 9593 (TRBV28, TRBJ2-7)
CASSQLGAGGHEQYF

SEQ ID NO: 19187 - protein, 12 aa, Homo sapiens
  CDR3 for alpha chain variable domain of TCR clone 9594 (TRAV12-1, TRAJ31)
CVVSLLRARLMF

SEQ ID NO: 19188 - protein, 15 aa, Homo sapiens
  CDR3 for beta chain variable domain of TCR clone 9594 (TRBV3-1, TRBJ1-2)
CASSHTGQGGYGYTF

SEQ ID NO: 19189 - protein, 14 aa, Homo sapiens
  CDR3 for alpha chain variable domain of TCR clone 9595 (TRAV1-1, TRAJ23)
CAAPIYNQGGKLIF

SEQ ID NO: 19190 - protein, 13 aa, Homo sapiens
  CDR3 for beta chain variable domain of TCR clone 9595 (TRBV5-1, TRBJ2-5)
CASSWEGEETQYF

SEQ ID NO: 19191 - protein, 13 aa, Homo sapiens
  CDR3 for alpha chain variable domain of TCR clone 9596 (TRAV23/DV6, TRAJ47)
CAASMTRGNKLVF

SEQ ID NO: 19192 - protein, 12 aa, Homo sapiens
  CDR3 for beta chain variable domain of TCR clone 9596 (TRBV28, TRBJ2-7)
CASSFSSYEQYF

SEQ ID NO: 19193 - protein, 13 aa, Homo sapiens
  CDR3 for alpha chain variable domain of TCR clone 9597 (TRAV12-2, TRAJ39)
CAVNNNAGNMLTF

SEQ ID NO: 19194 - protein, 14 aa, Homo sapiens
  CDR3 for beta chain variable domain of TCR clone 9597 (TRBV7-3, TRBJ2-1)
CASSPEGGGNEQFF

SEQ ID NO: 19195 - protein, 13 aa, Homo sapiens
  CDR3 for alpha chain variable domain of TCR clone 9598 (TRAV21, TRAJ27)
CAARPGNAGKSNF

SEQ ID NO: 19196 - protein, 14 aa, Homo sapiens
  CDR3 for beta chain variable domain of TCR clone 9598 (TRBV7-6, TRBJ2-3)
CASSLGTVTDTQYF

SEQ ID NO: 19197 - protein, 13 aa, Homo sapiens
  CDR3 for alpha chain variable domain of TCR clone 9599 (TRAV16, TRAJ22)
SAMLAGSARQLTF

SEQ ID NO: 19198 - protein, 15 aa, Homo sapiens
  CDR3 for beta chain variable domain of TCR clone 9599 (TRBV18, TRBJ2-1)
CASSPPSASYNEQFF

SEQ ID NO: 19199 - protein, 18 aa, Homo sapiens
  CDR3 for alpha chain variable domain of TCR clone 9600 (TRAV13-1, TRAJ52)
CAASKRSAGGTSYGKLTF

SEQ ID NO: 19200 - protein, 16 aa, Homo sapiens
  CDR3 for beta chain variable domain of TCR clone 9600 (TRBV12-5, TRBJ2-5)
CASGPRTSGNQETQYF

SEQ ID NO: 19201 - protein, 13 aa, Homo sapiens
  CDR3 for alpha chain variable domain of TCR clone 9601 (TRAV1-2, TRAJ9)
CAALNTGGFKTIF

SEQ ID NO: 19202 - protein, 13 aa, Homo sapiens
  CDR3 for beta chain variable domain of TCR clone 9601 (TRBV19, TRBJ1-2)
CASSVAGQDGYTF

SEQ ID NO: 19203 - protein, 13 aa, Homo sapiens
  CDR3 for alpha chain variable domain of TCR clone 9602 (TRAV29/DV5, TRAJ31)
CAASRNNNARLMF

SEQ ID NO: 19204 - protein, 14 aa, Homo sapiens
  CDR3 for beta chain variable domain of TCR clone 9602 (TRBV7-2, TRBJ2-5)
CASSPRGSSETQYF

SEQ ID NO: 19205 - protein, 14 aa, Homo sapiens
  CDR3 for alpha chain variable domain of TCR clone 9603 (TRAV1-2, TRAJ8)
CAVREDTGFQKLVF

SEQ ID NO: 19206 - protein, 16 aa, Homo sapiens
  CDR3 for beta chain variable domain of TCR clone 9603 (TRBV29-1, TRBJ1-2)
CSVEANRDIANYGYTF

SEQ ID NO: 19207 - protein, 15 aa, Homo sapiens
  CDR3 for alpha chain variable domain of TCR clone 9604 (TRAV19, TRAJ23)
CALSEGRNQGGKLIF

SEQ ID NO: 19208 - protein, 16 aa, Homo sapiens
  CDR3 for beta chain variable domain of TCR clone 9604 (TRBV7-2, TRBJ2-7)
CASSLDLSGGAYEQYF

SEQ ID NO: 19209 - protein, 14 aa, Homo sapiens
  CDR3 for alpha chain variable domain of TCR clone 9605 (TRAV41, TRAJ48)
CAVISNFGNEKLTF

SEQ ID NO: 19210 - protein, 14 aa, Homo sapiens
  CDR3 for beta chain variable domain of TCR clone 9605 (TRBV7-8, TRBJ2-3)
CASSSRDSTDTQYF

SEQ ID NO: 19211 - protein, 13 aa, Homo sapiens
  CDR3 for alpha chain variable domain of TCR clone 9606 (TRAV21, TRAJ27)
CAARPGNAGKSTF

SEQ ID NO: 19212 - protein, 14 aa, Homo sapiens
  CDR3 for beta chain variable domain of TCR clone 9606 (TRBV7-6, TRBJ2-3)
CASSLGTVTDAQYF

SEQ ID NO: 19213 - protein, 13 aa, Homo sapiens
  CDR3 for alpha chain variable domain of TCR clone 9607 (TRAV13-1, TRAJ9)
CAASGTGGFKTIF

SEQ ID NO: 19214 - protein, 12 aa, Homo sapiens
  CDR3 for beta chain variable domain of TCR clone 9607 (TRBV11-2, TRBJ2-2)
CASSLGGGELFF

SEQ ID NO: 19215 - protein, 14 aa, Homo sapiens
  CDR3 for alpha chain variable domain of TCR clone 9608 (TRAV12-2, TRAJ13)
CAVKKTGGYQKGTF

SEQ ID NO: 19216 - protein, 15 aa, Homo sapiens
  CDR3 for beta chain variable domain of TCR clone 9608 (TRBV27, TRBJ2-1)
CASSNGGGSSNEQFF

SEQ ID NO: 19217 - protein, 14 aa, Homo sapiens
  CDR3 for alpha chain variable domain of TCR clone 9609 (TRAV1-2, TRAJ16)
CAVNRFSDGQKLLF

SEQ ID NO: 19218 - protein, 15 aa, Homo sapiens
  CDR3 for beta chain variable domain of TCR clone 9609 (TRBV9, TRBJ1-6)
CASSVAGTGDPPLHF

SEQ ID NO: 19219 - protein, 14 aa, Homo sapiens
  CDR3 for alpha chain variable domain of TCR clone 9610 (TRAV1-2, TRAJ16)
CAVNRFSDGQKLLF

SEQ ID NO: 19220 - protein, 14 aa, Homo sapiens
  CDR3 for beta chain variable domain of TCR clone 9610 (TRBV5-4, TRBJ1-1)
CASSLDSRRDEAFF

SEQ ID NO: 19221 - protein, 16 aa, Homo sapiens
  CDR3 for alpha chain variable domain of TCR clone 9611 (TRAV30, TRAJ24)
CGTEIVDADSWGKFQF

SEQ ID NO: 19222 - protein, 14 aa, Homo sapiens
  CDR3 for beta chain variable domain of TCR clone 9611 (TRBV12-5, TRBJ2-5)
CASCSRTHQETQYF

SEQ ID NO: 19223 - protein, 12 aa, Homo sapiens
  CDR3 for alpha chain variable domain of TCR clone 9612 (TRAV1-1, TRAJ8)
CAGGTGFQKLVF

SEQ ID NO: 19224 - protein, 14 aa, Homo sapiens
  CDR3 for beta chain variable domain of TCR clone 9612 (TRBV12-5, TRBJ2-5)
CASGSRTHQETQYF

SEQ ID NO: 19225 - protein, 16 aa, Homo sapiens
  CDR3 for alpha chain variable domain of TCR clone 9613 (TRAV8-6, TRAJ58)
CAVSDHTETSGSRLTF

SEQ ID NO: 19226 - protein, 15 aa, Homo sapiens
  CDR3 for beta chain variable domain of TCR clone 9613 (TRBV27, TRBJ2-1)
CASSNGGGSSNEQFF

SEQ ID NO: 19227 - protein, 14 aa, Homo sapiens
  CDR3 for alpha chain variable domain of TCR clone 9614 (TRAV12-2, TRAJ4)
CAEDPSGGYNKLIF

SEQ ID NO: 19228 - protein, 13 aa, Homo sapiens
  CDR3 for beta chain variable domain of TCR clone 9614 (TRBV7-9, TRBJ1-2)
CASSLKQNYGYTF

SEQ ID NO: 19229 - protein, 11 aa, Homo sapiens
  CDR3 for alpha chain variable domain of TCR clone 9615 (TRAV21, TRAJ11)
CAVNGYSTLTF

SEQ ID NO: 19230 - protein, 15 aa, Homo sapiens
  CDR3 for beta chain variable domain of TCR clone 9615 (TRBV20-1, TRBJ2-7)
CSAESGTSGAYEQYF

SEQ ID NO: 19231 - protein, 12 aa, Homo sapiens
  CDR3 for alpha chain variable domain of TCR clone 9616 (TRAV26-1, TRAJ17)
CIVRSAGNKLTF

SEQ ID NO: 19232 - protein, 14 aa, Homo sapiens
  CDR3 for beta chain variable domain of TCR clone 9616 (TRBV27, TRBJ2-3)
CASSWAGTTDTQYF

SEQ ID NO: 19233 - protein, 15 aa, Homo sapiens
  CDR3 for alpha chain variable domain of TCR clone 9617 (TRAV12-3, TRAJ6)
CAMSATTGGSYIPTF

SEQ ID NO: 19234 - protein, 16 aa, Homo sapiens
  CDR3 for beta chain variable domain of TCR clone 9617 (TRBV20-1, TRBJ1-2)
RSASMGQGVANYGYTF

SEQ ID NO: 19235 - protein, 12 aa, Homo sapiens
  CDR3 for alpha chain variable domain of TCR clone 9618 (TRAV25, TRAJ16)
CAGPKDGQKLLF

SEQ ID NO: 19236 - protein, 13 aa, Homo sapiens
  CDR3 for beta chain variable domain of TCR clone 9618 (TRBV3-1, TRBJ1-2)
CASSQRAPGGYTF

SEQ ID NO: 19237 - protein, 17 aa, Homo sapiens
  CDR3 for alpha chain variable domain of TCR clone 9619 (TRAV3, TRAJ6)
CAVRDGPRAGGSYIPTF

SEQ ID NO: 19238 - protein, 13 aa, Homo sapiens
  CDR3 for beta chain variable domain of TCR clone 9619 (TRBV4-2, TRBJ1-1)
CASSQAGNTEAFF

SEQ ID NO: 19239 - protein, 15 aa, Homo sapiens
  CDR3 for alpha chain variable domain of TCR clone 9620 (TRAV3, TRAJ20)
CAVRDIKLSDYKLSF

SEQ ID NO: 19240 - protein, 15 aa, Homo sapiens
  CDR3 for beta chain variable domain of TCR clone 9620 (TRBV7-9, TRBJ1-6)
CASSSPGRGNSPLLF

SEQ ID NO: 19241 - protein, 15 aa, Homo sapiens
  CDR3 for alpha chain variable domain of TCR clone 9621 (TRAV3, TRAJ5)
CAVSDLDTGRRALTF

SEQ ID NO: 19242 - protein, 13 aa, Homo sapiens
  CDR3 for beta chain variable domain of TCR clone 9621 (TRBV12-4, TRBJ2-7)
CASSPTETYEQYF

SEQ ID NO: 19243 - protein, 14 aa, Homo sapiens
  CDR3 for alpha chain variable domain of TCR clone 9622 (TRAV1-2, TRAJ8)
CAVREDTGFQKLVF

SEQ ID NO: 19244 - protein, 13 aa, Homo sapiens
  CDR3 for beta chain variable domain of TCR clone 9622 (TRBV14, TRBJ1-2)
CASSEDRRYGYTF

SEQ ID NO: 19245 - protein, 13 aa, Homo sapiens
  CDR3 for alpha chain variable domain of TCR clone 9623 (TRAV29/DV5, TRAJ31)
CAASRNNNARLMF

SEQ ID NO: 19246 - protein, 15 aa, Homo sapiens
  CDR3 for beta chain variable domain of TCR clone 9623 (TRBV9, TRBJ1-6)
CASSVAGTGDSPLHF

SEQ ID NO: 19247 - protein, 17 aa, Homo sapiens
  CDR3 for alpha chain variable domain of TCR clone 9624 (TRAV3, TRAJ28)
CAVREAYSGAGSYQLTF

SEQ ID NO: 19248 - protein, 15 aa, Homo sapiens
  CDR3 for beta chain variable domain of TCR clone 9624 (TRBV5-1, TRBJ2-1)
CASSPPRAPYNEQFF

SEQ ID NO: 19249 - protein, 20 aa, Homo sapiens
  CDR3 for alpha chain variable domain of TCR clone 9625 (TRAV26-1, TRAJ42)
CCVLLHRQTYYGGSQGNPIF

SEQ ID NO: 19250 - protein, 16 aa, Homo sapiens
  CDR3 for beta chain variable domain of TCR clone 9625 (TRBV7-3, TRBJ2-2)
CASSLKRGTLSGELFF

SEQ ID NO: 19251 - protein, 15 aa, Homo sapiens
  CDR3 for alpha chain variable domain of TCR clone 9626 (TRAV9-2, TRAJ18)
CALSGRGSTLGRLYF

SEQ ID NO: 19252 - protein, 14 aa, Homo sapiens
  CDR3 for beta chain variable domain of TCR clone 9626 (TRBV4-2, TRBJ1-2)
CASSQDRREGGYTF

SEQ ID NO: 19253 - protein, 13 aa, Homo sapiens
  CDR3 for alpha chain variable domain of TCR clone 9627 (TRAV2, TRAJ40)
CAVVTSGNYKYIF

SEQ ID NO: 19254 - protein, 14 aa, Homo sapiens
  CDR3 for beta chain variable domain of TCR clone 9627 (TRBV19, TRBJ2-1)
CASPTFVLSGEQFF

SEQ ID NO: 19255 - protein, 17 aa, Homo sapiens
  CDR3 for alpha chain variable domain of TCR clone 9628 (TRAV3, TRAJ12)
CAVRDGGRMDSSYKLIF

SEQ ID NO: 19256 - protein, 14 aa, Homo sapiens
  CDR3 for beta chain variable domain of TCR clone 9628 (TRBV4-2, TRBJ2-1)
CASGLDRAYNEQFF

SEQ ID NO: 19257 - protein, 15 aa, Homo sapiens
  CDR3 for alpha chain variable domain of TCR clone 9629 (TRAV23/DV6, TRAJ18)
CAARYRGSTLGRLYF

SEQ ID NO: 19258 - protein, 15 aa, Homo sapiens
  CDR3 for beta chain variable domain of TCR clone 9629 (TRBV9, TRBJ1-6)
CASSVAGTGDSPLHF

SEQ ID NO: 19259 - protein, 14 aa, Homo sapiens
  CDR3 for alpha chain variable domain of TCR clone 9630 (TRAV1-2, TRAJ8)
CAVREDTGFQKLVF

SEQ ID NO: 19260 - protein, 15 aa, Homo sapiens
  CDR3 for beta chain variable domain of TCR clone 9630 (TRBV6-3, TRBJ2-7)
CASSSPGTVFHEQYF

SEQ ID NO: 19261 - protein, 14 aa, Homo sapiens
  CDR3 for alpha chain variable domain of TCR clone 9631 (TRAV12-1, TRAJ17)
CVVNYKAAGNKLTF

SEQ ID NO: 19262 - protein, 17 aa, Homo sapiens
  CDR3 for beta chain variable domain of TCR clone 9631 (TRBV20-1, TRBJ2-1)
CSASSSGLAGSYNEQFL

SEQ ID NO: 19263 - protein, 13 aa, Homo sapiens
  CDR3 for alpha chain variable domain of TCR clone 9632 (TRAV12-2, TRAJ11)
CAVPNSGYSTLTF

SEQ ID NO: 19264 - protein, 14 aa, Homo sapiens
  CDR3 for beta chain variable domain of TCR clone 9632 (TRBV4-1, TRBJ2-2)
CASSQAVNTGELFF

SEQ ID NO: 19265 - protein, 14 aa, Homo sapiens
  CDR3 for alpha chain variable domain of TCR clone 9633 (TRAV29/DV5, TRAJ36)
CAARRKTGANNLFF

SEQ ID NO: 19266 - protein, 14 aa, Homo sapiens
  CDR3 for beta chain variable domain of TCR clone 9633 (TRBV7-6, TRBJ2-3)
CASSLGTVTDTQYF

SEQ ID NO: 19267 - protein, 15 aa, Homo sapiens
  CDR3 for alpha chain variable domain of TCR clone 9634 (TRAV27, TRAJ38)
CAARRNAGNNRELIW

SEQ ID NO: 19268 - protein, 13 aa, Homo sapiens
  CDR3 for beta chain variable domain of TCR clone 9634 (TRBV20-1, TRBJ1-1)
CSARAGGNTEAFF

SEQ ID NO: 19269 - protein, 11 aa, Homo sapiens
  CDR3 for alpha chain variable domain of TCR clone 9635 (TRAV3, TRAJ21)
CAVGNFNKFYF

SEQ ID NO: 19270 - protein, 13 aa, Homo sapiens
  CDR3 for beta chain variable domain of TCR clone 9635 (TRBV9, TRBJ2-1)
CASSVGQGGEQFF

SEQ ID NO: 19271 - protein, 14 aa, Homo sapiens
  CDR3 for alpha chain variable domain of TCR clone 9636 (TRAV8-1, TRAJ22)
CAAPSSGSARQLTF

SEQ ID NO: 19272 - protein, 13 aa, Homo sapiens
  CDR3 for beta chain variable domain of TCR clone 9636 (TRBV7-2, TRBJ1-5)
CASSLAEGGANEF

SEQ ID NO: 19273 - protein, 11 aa, Homo sapiens
  CDR3 for alpha chain variable domain of TCR clone 9637 (TRAV2, TRAJ33)
CAVGSNYQLIW

SEQ ID NO: 19274 - protein, 15 aa, Homo sapiens
  CDR3 for beta chain variable domain of TCR clone 9637 (TRBV19, TRBJ1-1)
CASTSGQIQNTEAFF

SEQ ID NO: 19275 - protein, 15 aa, Homo sapiens
  CDR3 for alpha chain variable domain of TCR clone 9638 (TRAV23/DV6, TRAJ39)
CAASMSNNAGNMLTF

SEQ ID NO: 19276 - protein, 16 aa, Homo sapiens
  CDR3 for beta chain variable domain of TCR clone 9638 (TRBV4-1, TRBJ2-1)
CASSPYAGGHDNEQFF

SEQ ID NO: 19277 - protein, 12 aa, Homo sapiens
  CDR3 for alpha chain variable domain of TCR clone 9639 (TRAV38-2/DV8, TRAJ57)
CAWKGGSGKLVF

SEQ ID NO: 19278 - protein, 13 aa, Homo sapiens
  CDR3 for beta chain variable domain of TCR clone 9639 (TRBV5-1, TRBJ1-5)
CASSLAQDQPQHF

SEQ ID NO: 19279 - protein, 13 aa, Homo sapiens
  CDR3 for alpha chain variable domain of TCR clone 9640 (TRAV35, TRAJ27)
CAGENTNAGKSTF

SEQ ID NO: 19280 - protein, 16 aa, Homo sapiens
  CDR3 for beta chain variable domain of TCR clone 9640 (TRBV7-3, TRBJ2-1)
CASSPGAGTYYNEQFF

SEQ ID NO: 19281 - protein, 15 aa, Homo sapiens
  CDR3 for alpha chain variable domain of TCR clone 9641 (TRAV2, TRAJ9)
CAVAALNTGGFKTIF

SEQ ID NO: 19282 - protein, 14 aa, Homo sapiens
  CDR3 for beta chain variable domain of TCR clone 9641 (TRBV7-2, TRBJ2-7)
CASSPKTSFYEQYF

SEQ ID NO: 19283 - protein, 14 aa, Homo sapiens
  CDR3 for alpha chain variable domain of TCR clone 9642 (TRAV2, TRAJ9)
CAVEDRSGGFKTIF

SEQ ID NO: 19284 - protein, 15 aa, Homo sapiens
  CDR3 for beta chain variable domain of TCR clone 9642 (TRBV10-3, TRBJ2-1)
CAIRNGTSGHNEQFF

SEQ ID NO: 19285 - protein, 15 aa, Homo sapiens
  CDR3 for alpha chain variable domain of TCR clone 9643 (TRAV12-3, TRAJ4)
CAMTRGSGGYNKLIF

SEQ ID NO: 19286 - protein, 14 aa, Homo sapiens
  CDR3 for beta chain variable domain of TCR clone 9643 (TRBV4-3, TRBJ2-3)
CASSQAETVDTQYF

SEQ ID NO: 19287 - protein, 15 aa, Homo sapiens
  CDR3 for alpha chain variable domain of TCR clone 9644 (TRAV27, TRAJ38)
CAARRNAGSNRKLIW

SEQ ID NO: 19288 - protein, 13 aa, Homo sapiens
  CDR3 for beta chain variable domain of TCR clone 9644 (TRBV12-5, TRBJ2-3)
CASGDRQSDTQYF

SEQ ID NO: 19289 - protein, 13 aa, Homo sapiens
  CDR3 for alpha chain variable domain of TCR clone 9645 (TRAV2, TRAJ40)
CAVVTSGTYKYNF

SEQ ID NO: 19290 - protein, 14 aa, Homo sapiens
  CDR3 for beta chain variable domain of TCR clone 9645 (TRBV19, TRBJ2-1)
CASPTFVLSGEQFF

SEQ ID NO: 19291 - protein, 14 aa, Homo sapiens
  CDR3 for alpha chain variable domain of TCR clone 9646 (TRAV17, TRAJ56)
CATVPAGANSKLTF

SEQ ID NO: 19292 - protein, 16 aa, Homo sapiens
  CDR3 for beta chain variable domain of TCR clone 9646 (TRBV12-5, TRBJ2-5)
CASGPRTSGNQETQYF

SEQ ID NO: 19293 - protein, 22 aa, Homo sapiens
  CDR3 for alpha chain variable domain of TCR clone 9647 (TRAV1-1, TRAJ30)
CAVRDQTEMTRSSLEKGHDFIF

SEQ ID NO: 19294 - protein, 16 aa, Homo sapiens
  CDR3 for beta chain variable domain of TCR clone 9647 (TRBV6-5, TRBJ1-6)
CASSYSGESYNSPLHF

SEQ ID NO: 19295 - protein, 11 aa, Homo sapiens
  CDR3 for alpha chain variable domain of TCR clone 9648 (TRAV1-1, TRAJ23)
CAVRQGGKLIF

SEQ ID NO: 19296 - protein, 20 aa, Homo sapiens
  CDR3 for beta chain variable domain of TCR clone 9648 (TRBV7-8, TRBJ2-2)
CASSHLFPGPTIHIAGELFF

SEQ ID NO: 19297 - protein, 14 aa, Homo sapiens
  CDR3 for alpha chain variable domain of TCR clone 9649 (TRAV26-1, TRAJ34)
CIVRVAYNTDKLIF

SEQ ID NO: 19298 - protein, 16 aa, Homo sapiens
  CDR3 for beta chain variable domain of TCR clone 9649 (TRBV2, TRBJ2-3)
CASSTSVEGVTDTQYF

SEQ ID NO: 19299 - protein, 14 aa, Homo sapiens
  CDR3 for alpha chain variable domain of TCR clone 9650 (TRAV3, TRAJ34)
CAVRAPGNTDKLIF

SEQ ID NO: 19300 - protein, 15 aa, Homo sapiens
  CDR3 for beta chain variable domain of TCR clone 9650 (TRBV5-1, TRBJ2-5)
CASSSGREMVETQYF

SEQ ID NO: 19301 - protein, 16 aa, Homo sapiens
  CDR3 for alpha chain variable domain of TCR clone 9651 (TRAV30, TRAJ24)
CGTEIEDADSWGKFQF

SEQ ID NO: 19302 - protein, 14 aa, Homo sapiens
  CDR3 for beta chain variable domain of TCR clone 9651 (TRBV12-5, TRBJ2-5)
CASGSRTHQETQYF

SEQ ID NO: 19303 - protein, 16 aa, Homo sapiens
  CDR3 for alpha chain variable domain of TCR clone 9652 (TRAV20, TRAJ52)
CAVQAAGGTSYGKLTF

SEQ ID NO: 19304 - protein, 13 aa, Homo sapiens
  CDR3 for beta chain variable domain of TCR clone 9652 (TRBV27, TRBJ2-7)
CASSLTTGYEQYF

SEQ ID NO: 19305 - protein, 15 aa, Homo sapiens
  CDR3 for alpha chain variable domain of TCR clone 9653 (TRAV27, TRAJ56)
CAGRDGTGANSKLTF

SEQ ID NO: 19306 - protein, 12 aa, Homo sapiens
  CDR3 for beta chain variable domain of TCR clone 9653 (TRBV27, TRBJ2-7)
CASSGGFYEQYF

SEQ ID NO: 19307 - protein, 14 aa, Homo sapiens
  CDR3 for alpha chain variable domain of TCR clone 9654 (TRAV9-2, TRAJ39)
CALYIYNAGNMLTF

SEQ ID NO: 19308 - protein, 13 aa, Homo sapiens
  CDR3 for beta chain variable domain of TCR clone 9654 (TRBV7-3, TRBJ1-1)
CASSQDWGAEAFF

SEQ ID NO: 19309 - protein, 18 aa, Homo sapiens
  CDR3 for alpha chain variable domain of TCR clone 9655 (TRAV1-2, TRAJ18)
CAVRDMGDRGSTLGRLYF

SEQ ID NO: 19310 - protein, 17 aa, Homo sapiens
  CDR3 for beta chain variable domain of TCR clone 9655 (TRBV12-4, TRBJ2-2)
CASSLGVGRGGTGELFF

SEQ ID NO: 19311 - protein, 13 aa, Homo sapiens
  CDR3 for alpha chain variable domain of TCR clone 9656 (TRAV8-3, TRAJ28)
CAVGAVGSYQPTF

SEQ ID NO: 19312 - protein, 14 aa, Homo sapiens
  CDR3 for beta chain variable domain of TCR clone 9656 (TRBV7-2, TRBJ2-7)
CASRSQGAAYEQYF

SEQ ID NO: 19313 - protein, 12 aa, Homo sapiens
  CDR3 for alpha chain variable domain of TCR clone 9657 (TRAV1-2, TRAJ24)
CAVGGSWGKFQF

SEQ ID NO: 19314 - protein, 13 aa, Homo sapiens
  CDR3 for beta chain variable domain of TCR clone 9657 (TRBV20-1, TRBJ1-1)
CSASKRGLTEAFF

SEQ ID NO: 19315 - protein, 13 aa, Homo sapiens
  CDR3 for alpha chain variable domain of TCR clone 9658 (TRAV2, TRAJ40)
CAVVTSGTYKYIF

SEQ ID NO: 19316 - protein, 14 aa, Homo sapiens
  CDR3 for beta chain variable domain of TCR clone 9658 (TRBV19, TRBJ2-1)
CASPTFVLSGEKFF

SEQ ID NO: 19317 - protein, 14 aa, Homo sapiens
  CDR3 for alpha chain variable domain of TCR clone 9659 (TRAV38-1, TRAJ40)
CALRPTSGTYKYIF

SEQ ID NO: 19318 - protein, 17 aa, Homo sapiens
  CDR3 for beta chain variable domain of TCR clone 9659 (TRBV28, TRBJ2-1)
CASTGPGLAVSEDEQFF

SEQ ID NO: 19319 - protein, 15 aa, Homo sapiens
  CDR3 for alpha chain variable domain of TCR clone 9660 (TRAV3, TRAJ5)
CAVRDLDTGRRALTF

SEQ ID NO: 19320 - protein, 13 aa, Homo sapiens
  CDR3 for beta chain variable domain of TCR clone 9660 (TRBV12-4, TRBJ2-7)
CASSPTETCEQYF

SEQ ID NO: 19321 - protein, 11 aa, Homo sapiens
  CDR3 for alpha chain variable domain of TCR clone 9661 (TRAV12-1, TRAJ30)
CVVNGQDKIIF

SEQ ID NO: 19322 - protein, 12 aa, Homo sapiens
  CDR3 for beta chain variable domain of TCR clone 9661 (TRBV27, TRBJ2-2)
CASKLLTGELFF

SEQ ID NO: 19323 - protein, 15 aa, Homo sapiens
  CDR3 for alpha chain variable domain of TCR clone 9662 (TRAV8-4, TRAJ13)
CAVSDRGGGYQKVTF

SEQ ID NO: 19324 - protein, 17 aa, Homo sapiens
  CDR3 for beta chain variable domain of TCR clone 9662 (TRBV25-1, TRBJ1-2)
CASSEFGSATTNYGYTF

SEQ ID NO: 19325 - protein, 12 aa, Homo sapiens
  CDR3 for alpha chain variable domain of TCR clone 9663 (TRAV24, TRAJ5)
CALDTGRRALTF

SEQ ID NO: 19326 - protein, 15 aa, Homo sapiens
  CDR3 for beta chain variable domain of TCR clone 9663 (TRBV29-1, TRBJ2-3)
CSVEVTTGDTDTQYF

SEQ ID NO: 19327 - protein, 12 aa, Homo sapiens
  CDR3 for alpha chain variable domain of TCR clone 9664 (TRAV2, TRAJ24)
CAATDSWGKFQF

SEQ ID NO: 19328 - protein, 12 aa, Homo sapiens
  CDR3 for beta chain variable domain of TCR clone 9664 (TRBV7-3, TRBJ2-5)
CASSSPGGTQYF

SEQ ID NO: 19329 - protein, 13 aa, Homo sapiens
  CDR3 for alpha chain variable domain of TCR clone 9665 (TRAV1-2, TRAJ9)
CAALNTGGFKTIF

SEQ ID NO: 19330 - protein, 13 aa, Homo sapiens
  CDR3 for beta chain variable domain of TCR clone 9665 (TRBV19, TRBJ1-2)
CASSVPGQDGYIF

SEQ ID NO: 19331 - protein, 12 aa, Homo sapiens
  CDR3 for alpha chain variable domain of TCR clone 9666 (TRAV23/DV6, TRAJ17)
CAAKAAGNKLTF

SEQ ID NO: 19332 - protein, 14 aa, Homo sapiens
  CDR3 for beta chain variable domain of TCR clone 9666 (TRBV28, TRBJ1-1)
CASSPRTRWAEAFF

SEQ ID NO: 19333 - protein, 15 aa, Homo sapiens
  CDR3 for alpha chain variable domain of TCR clone 9667 (TRAV26-1, TRAJ29)
CIVRVEGSGNTPIVF

SEQ ID NO: 19334 - protein, 15 aa, Homo sapiens
  CDR3 for beta chain variable domain of TCR clone 9667 (TRBV7-9, TRBJ1-5)
CASSQGHQPNQPQHF

SEQ ID NO: 19335 - protein, 13 aa, Homo sapiens
  CDR3 for alpha chain variable domain of TCR clone 9668 (TRAV13-1, TRAJ10)
CAAPTGGGNKLTF

SEQ ID NO: 19336 - protein, 15 aa, Homo sapiens
  CDR3 for beta chain variable domain of TCR clone 9668 (TRBV19, TRBJ1-4)
CASSPGTATNEKLFF

SEQ ID NO: 19337 - protein, 15 aa, Homo sapiens
  CDR3 for alpha chain variable domain of TCR clone 9669 (TRAV3, TRAJ9)
CAVRARNTGGFKTIF

SEQ ID NO: 19338 - protein, 15 aa, Homo sapiens
  CDR3 for beta chain variable domain of TCR clone 9669 (TRBV9, TRBJ1-6)
CASSVAGTGDSPLHF

SEQ ID NO: 19339 - protein, 13 aa, Homo sapiens
  CDR3 for alpha chain variable domain of TCR clone 9670 (TRAV36/DV7, TRAJ37)
CAVFSSNTGKLIF

SEQ ID NO: 19340 - protein, 16 aa, Homo sapiens
  CDR3 for beta chain variable domain of TCR clone 9670 (TRBV12-4, TRBJ2-5)
CASSFFVRGRQETQYF

SEQ ID NO: 19341 - protein, 19 aa, Homo sapiens
  CDR3 for alpha chain variable domain of TCR clone 9671 (TRAV2, TRAJ20)
ILQVREADAAVYRDCKLSF

SEQ ID NO: 19342 - protein, 13 aa, Homo sapiens
  CDR3 for beta chain variable domain of TCR clone 9671 (TRBV15, TRBJ1-6)
CATSEGLNSPLHF

SEQ ID NO: 19343 - protein, 13 aa, Homo sapiens
  CDR3 for alpha chain variable domain of TCR clone 9672 (TRAV13-1, TRAJ5)
CAASDTGRRALTF

SEQ ID NO: 19344 - protein, 16 aa, Homo sapiens
  CDR3 for beta chain variable domain of TCR clone 9672 (TRBV12-5, TRBJ2-5)
CASGPRTSGNQETQYF

SEQ ID NO: 19345 - protein, 13 aa, Homo sapiens
  CDR3 for alpha chain variable domain of TCR clone 9673 (TRAV8-3, TRAJ36)
CAVGATGANNPFF

SEQ ID NO: 19346 - protein, 15 aa, Homo sapiens
  CDR3 for beta chain variable domain of TCR clone 9673 (TRBV7-2, TRBJ1-2)
CASSPRAGWNYGYTF

SEQ ID NO: 19347 - protein, 15 aa, Homo sapiens
  CDR3 for alpha chain variable domain of TCR clone 9674 (TRAV26-1, TRAJ44)
CIVRVATGTASKLTF

SEQ ID NO: 19348 - protein, 18 aa, Homo sapiens
  CDR3 for beta chain variable domain of TCR clone 9674 (TRBV20-1, TRBJ2-3)
CSAKPLVRVARRTDTQYF

SEQ ID NO: 19349 - protein, 14 aa, Homo sapiens
  CDR3 for alpha chain variable domain of TCR clone 9675 (TRAV1-2, TRAJ8)
CAVREDTGFQKLVF

SEQ ID NO: 19350 - protein, 14 aa, Homo sapiens
  CDR3 for beta chain variable domain of TCR clone 9675 (TRBV12-4, TRBJ1-1)
CASSFDRVNTEAFF

SEQ ID NO: 19351 - protein, 16 aa, Homo sapiens
  CDR3 for alpha chain variable domain of TCR clone 9676 (TRAV30, TRAJ24)
CGSEIVDADSWGKFQF

SEQ ID NO: 19352 - protein, 14 aa, Homo sapiens
  CDR3 for beta chain variable domain of TCR clone 9676 (TRBV12-5, TRBJ2-5)
CASGSRTHQETQYF

SEQ ID NO: 19353 - protein, 12 aa, Homo sapiens
  CDR3 for alpha chain variable domain of TCR clone 9677 (TRAV12-2, TRAJ16)
CAVNLDGQKLLF

SEQ ID NO: 19354 - protein, 16 aa, Homo sapiens
  CDR3 for beta chain variable domain of TCR clone 9677 (TRBV7-9, TRBJ2-1)
CASSLVLTGQGNEQFF

SEQ ID NO: 19355 - protein, 18 aa, Homo sapiens
  CDR3 for alpha chain variable domain of TCR clone 9678 (TRAV21, TRAJ52)
CAVRPSPAGGTSYGTLTF

SEQ ID NO: 19356 - protein, 17 aa, Homo sapiens
  CDR3 for beta chain variable domain of TCR clone 9678 (TRBV13, TRBJ2-3)
CASSLSRVAGGRNTQYF

SEQ ID NO: 19357 - protein, 14 aa, Homo sapiens
  CDR3 for alpha chain variable domain of TCR clone 9679 (TRAV6, TRAJ40)
CALDATSGTYKYIF

SEQ ID NO: 19358 - protein, 16 aa, Homo sapiens
  CDR3 for beta chain variable domain of TCR clone 9679 (TRBV7-8, TRBJ2-5)
CASSPAGGRNQETQYF

SEQ ID NO: 19359 - protein, 16 aa, Homo sapiens
  CDR3 for alpha chain variable domain of TCR clone 9680 (TRAV1-2, TRAJ10)
CAVRGVLTGGGNKLTF

SEQ ID NO: 19360 - protein, 15 aa, Homo sapiens
  CDR3 for beta chain variable domain of TCR clone 9680 (TRBV28, TRBJ2-1)
CASSIIAGGRSEQFF

SEQ ID NO: 19361 - protein, 16 aa, Homo sapiens
  CDR3 for alpha chain variable domain of TCR clone 9681 (TRAV17, TRAJ52)
CATGIIGGTSYGKLTF

SEQ ID NO: 19362 - protein, 14 aa, Homo sapiens
  CDR3 for beta chain variable domain of TCR clone 9681 (TRBV7-3, TRBJ2-2)
CASSSGGYAGELFF

SEQ ID NO: 19363 - protein, 12 aa, Homo sapiens
  CDR3 for alpha chain variable domain of TCR clone 9682 (TRAV16, TRAJ10)
CSRTGGGNKLAF

SEQ ID NO: 19364 - protein, 15 aa, Homo sapiens
  CDR3 for beta chain variable domain of TCR clone 9682 (TRBV6-3, TRBJ2-7)
CASSSPGTVFYEQYF

SEQ ID NO: 19365 - protein, 18 aa, Homo sapiens
  CDR3 for alpha chain variable domain of TCR clone 9683 (TRAV26-1, TRAJ23)
CIVRVGLEVWNQGGKPIF

SEQ ID NO: 19366 - protein, 16 aa, Homo sapiens
  CDR3 for beta chain variable domain of TCR clone 9683 (TRBV12-4, TRBJ2-5)
CASSFFVRGRQETQYF

SEQ ID NO: 19367 - protein, 15 aa, Homo sapiens
  CDR3 for alpha chain variable domain of TCR clone 9684 (TRAV8-3, TRAJ45)
CASSYSGGGVDGLTF

SEQ ID NO: 19368 - protein, 13 aa, Homo sapiens
  CDR3 for beta chain variable domain of TCR clone 9684 (TRBV10-3, TRBJ2-7)
CASKLAVNYEQYF

SEQ ID NO: 19369 - protein, 12 aa, Homo sapiens
  CDR3 for alpha chain variable domain of TCR clone 9685 (TRAV12-2, TRAJ4)
GWPEGGYNKLIF

SEQ ID NO: 19370 - protein, 15 aa, Homo sapiens
  CDR3 for beta chain variable domain of TCR clone 9685 (TRBV9, TRBJ1-6)
CASSVAGTGDSPLHF

SEQ ID NO: 19371 - protein, 21 aa, Homo sapiens
  CDR3 for alpha chain variable domain of TCR clone 9686 (TRAV9-2, )
CALIQIGDIQNPDPAVYQLRD

SEQ ID NO: 19372 - protein, 13 aa, Homo sapiens
  CDR3 for beta chain variable domain of TCR clone 9686 (TRBV20-1, TRBJ1-1)
CSARGGGNTEAFF

SEQ ID NO: 19373 - protein, 17 aa, Homo sapiens
  CDR3 for alpha chain variable domain of TCR clone 9687 (TRAV13-1, TRAJ31)
CAPRDRPMFGDGTQLVV

SEQ ID NO: 19374 - protein, 12 aa, Homo sapiens
  CDR3 for beta chain variable domain of TCR clone 9687 (TRBV7-9, TRBJ2-7)
CASSLEGYEQYF

SEQ ID NO: 19375 - protein, 11 aa, Homo sapiens
  CDR3 for alpha chain variable domain of TCR clone 9688 (TRAV1-1, TRAJ23)
CAVRQGGKLIF

SEQ ID NO: 19376 - protein, 20 aa, Homo sapiens
  CDR3 for beta chain variable domain of TCR clone 9688 (TRBV7-8, TRBJ2-2)
CASSHLSPGPTIHITGELFF

SEQ ID NO: 19377 - protein, 13 aa, Homo sapiens
  CDR3 for alpha chain variable domain of TCR clone 9689 (TRAV2, TRAJ15)
CAVASQAGTALIF

SEQ ID NO: 19378 - protein, 14 aa, Homo sapiens
  CDR3 for beta chain variable domain of TCR clone 9689 (TRBV5-1, TRBJ2-3)
CASSRGQGGGTQYF

SEQ ID NO: 19379 - protein, 10 aa, Homo sapiens
  CDR3 for alpha chain variable domain of TCR clone 9690 (TRAV8-1, TRAJ43)
CAVNVDDMRF

SEQ ID NO: 19380 - protein, 12 aa, Homo sapiens
  CDR3 for beta chain variable domain of TCR clone 9690 (TRBV11-2, TRBJ2-1)
CASSPGNNEQFF

SEQ ID NO: 19381 - protein, 14 aa, Homo sapiens
  CDR3 for alpha chain variable domain of TCR clone 9691 (TRAV12-1, TRAJ12)
CVVNPMDSSYKLIF

SEQ ID NO: 19382 - protein, 16 aa, Homo sapiens
  CDR3 for beta chain variable domain of TCR clone 9691 (TRBV28, TRBJ2-2)
CTSVPAFGRAPGSCFF

SEQ ID NO: 19383 - protein, 14 aa, Homo sapiens
  CDR3 for alpha chain variable domain of TCR clone 9692 (TRAV1-2, TRAJ16)
CAVNRFSDGQKLLF

SEQ ID NO: 19384 - protein, 15 aa, Homo sapiens
  CDR3 for beta chain variable domain of TCR clone 9692 (TRBV9, TRBJ1-6)
CASSVAGTGDSHLHF

SEQ ID NO: 19385 - protein, 14 aa, Homo sapiens
  CDR3 for alpha chain variable domain of TCR clone 9693 (TRAV29/DV5, TRAJ5)
CAASGDTGRRALTF

SEQ ID NO: 19386 - protein, 14 aa, Homo sapiens
  CDR3 for beta chain variable domain of TCR clone 9693 (TRBV7-3, TRBJ2-1)
CASSLSGSYNEQFF

SEQ ID NO: 19387 - protein, 15 aa, Homo sapiens
  CDR3 for alpha chain variable domain of TCR clone 9694 (TRAV14/DV4, TRAJ8)
CAMREGNTGFQKLVF

SEQ ID NO: 19388 - protein, 15 aa, Homo sapiens
  CDR3 for beta chain variable domain of TCR clone 9694 (TRBV28, TRBJ2-1)
CASSRSSGGVDEQFF

SEQ ID NO: 19389 - protein, 15 aa, Homo sapiens
  CDR3 for alpha chain variable domain of TCR clone 9695 (TRAV21, TRAJ13)
CAVPRSFWGLPESYL

SEQ ID NO: 19390 - protein, 15 aa, Homo sapiens
  CDR3 for beta chain variable domain of TCR clone 9695 (TRBV7-9, TRBJ1-6)
CASSSPGRGNSPLHF

SEQ ID NO: 19391 - protein, 14 aa, Homo sapiens
  CDR3 for alpha chain variable domain of TCR clone 9696 (TRAV1-2, TRAJ16)
CAVNRFSDGQKLLF

SEQ ID NO: 19392 - protein, 14 aa, Homo sapiens
  CDR3 for beta chain variable domain of TCR clone 9696 (TRBV6-1, TRBJ2-1)
CASAKDGFYNEQFF

SEQ ID NO: 19393 - protein, 16 aa, Homo sapiens
  CDR3 for alpha chain variable domain of TCR clone 9697 (TRAV12-3, TRAJ58)
CAMTDTEETSGSRLTF

SEQ ID NO: 19394 - protein, 15 aa, Homo sapiens
  CDR3 for beta chain variable domain of TCR clone 9697 (TRBV4-2, TRBJ1-6)
CASSYHRDSDSPLHF

SEQ ID NO: 19395 - protein, 13 aa, Homo sapiens
  CDR3 for alpha chain variable domain of TCR clone 9698 (TRAV2, TRAJ40)
CAVVNSGTYKYIF

SEQ ID NO: 19396 - protein, 14 aa, Homo sapiens
  CDR3 for beta chain variable domain of TCR clone 9698 (TRBV19, TRBJ2-1)
CASPTFVLSGEQFF

SEQ ID NO: 19397 - protein, 14 aa, Homo sapiens
  CDR3 for alpha chain variable domain of TCR clone 9699 (TRAV8-4, TRAJ13)
CAVTLSGGYQKVTF

SEQ ID NO: 19398 - protein, 14 aa, Homo sapiens
  CDR3 for beta chain variable domain of TCR clone 9699 (TRBV7-2, TRBJ1-2)
CASSQTGSTYGDTF

SEQ ID NO: 19399 - protein, 14 aa, Homo sapiens
  CDR3 for alpha chain variable domain of TCR clone 9700 (TRAV12-2, TRAJ17)
CAVLFKAAGNKLTF

SEQ ID NO: 19400 - protein, 17 aa, Homo sapiens
  CDR3 for beta chain variable domain of TCR clone 9700 (TRBV20-1, TRBJ2-2)
CSASGSGQGGLAGELFF

SEQ ID NO: 19401 - protein, 14 aa, Homo sapiens
  CDR3 for alpha chain variable domain of TCR clone 9701 (TRAV26-1, TRAJ38)
FIADNAGNNRKLIW

SEQ ID NO: 19402 - protein, 13 aa, Homo sapiens
  CDR3 for beta chain variable domain of TCR clone 9701 (TRBV20-1, TRBJ1-1)
CSARGGGNTEAFF

SEQ ID NO: 19403 - protein, 16 aa, Homo sapiens
  CDR3 for alpha chain variable domain of TCR clone 9702 (TRAV1-2, TRAJ10)
CAVRGVLTGGGNKLTF

SEQ ID NO: 19404 - protein, 14 aa, Homo sapiens
  CDR3 for beta chain variable domain of TCR clone 9702 (TRBV11-2, TRBJ1-2)
CASSLGTANYGYTF

SEQ ID NO: 19405 - protein, 14 aa, Homo sapiens
  CDR3 for alpha chain variable domain of TCR clone 9703 (TRAV12-1, TRAJ12)
CVVNPMDSSYKLIF

SEQ ID NO: 19406 - protein, 13 aa, Homo sapiens
  CDR3 for beta chain variable domain of TCR clone 9703 (TRBV28, TRBJ2-2)
CASVRESTGELFF

SEQ ID NO: 19407 - protein, 16 aa, Homo sapiens
  CDR3 for alpha chain variable domain of TCR clone 9704 (TRAV30, TRAJ24)
CGTEIVDADSWGKFQF

SEQ ID NO: 19408 - protein, 19 aa, Homo sapiens
  CDR3 for beta chain variable domain of TCR clone 9704 (TRBV7-2, TRBJ2-3)
CASSFLSRNWGGGTDTQYF

SEQ ID NO: 19409 - protein, 11 aa, Homo sapiens
  CDR3 for alpha chain variable domain of TCR clone 9705 (TRAV2, TRAJ13)
CASGGYQKATF

SEQ ID NO: 19410 - protein, 16 aa, Homo sapiens
  CDR3 for beta chain variable domain of TCR clone 9705 (TRBV6-1, TRBJ2-5)
CASSETLDRGAETQYF

SEQ ID NO: 19411 - protein, 14 aa, Homo sapiens
  CDR3 for alpha chain variable domain of TCR clone 9706 (TRAV1-2, TRAJ16)
CAVNRFSDGQKLLF

SEQ ID NO: 19412 - protein, 15 aa, Homo sapiens
  CDR3 for beta chain variable domain of TCR clone 9706 (TRBV10-2, TRBJ2-6)
CASSEQGTGANVLTF

SEQ ID NO: 19413 - protein, 14 aa, Homo sapiens
  CDR3 for alpha chain variable domain of TCR clone 9707 (TRAV1-2, TRAJ8)
CAVREDTGFQKLVF

SEQ ID NO: 19414 - protein, 14 aa, Homo sapiens
  CDR3 for beta chain variable domain of TCR clone 9707 (TRBV20-1, TRBJ2-3)
CSARGGTSTDTQYF

SEQ ID NO: 19415 - protein, 22 aa, Homo sapiens
  CDR3 for alpha chain variable domain of TCR clone 9708 (TRAV21, TRAJ39)
AASQPGDSATPKGAKAGNMLTF

SEQ ID NO: 19416 - protein, 14 aa, Homo sapiens
  CDR3 for beta chain variable domain of TCR clone 9708 (TRBV11-2, TRBJ2-7)
CASSLGAGAYEQYF

SEQ ID NO: 19417 - protein, 13 aa, Homo sapiens
  CDR3 for alpha chain variable domain of TCR clone 9709 (TRAV21, TRAJ27)
CAARPGNAGKSTC

SEQ ID NO: 19418 - protein, 14 aa, Homo sapiens
  CDR3 for beta chain variable domain of TCR clone 9709 (TRBV7-6, TRBJ2-3)
CASSLGTVTDTQYF

SEQ ID NO: 19419 - protein, 13 aa, Homo sapiens
  CDR3 for alpha chain variable domain of TCR clone 9710 (TRAV16, TRAJ53)
CALRGGSNYKLTF

SEQ ID NO: 19420 - protein, 11 aa, Homo sapiens
  CDR3 for beta chain variable domain of TCR clone 9710 (TRBV2, TRBJ2-4)
LQGGSKNIQYF

SEQ ID NO: 19421 - protein, 15 aa, Homo sapiens
  CDR3 for alpha chain variable domain of TCR clone 9711 (TRAV8-3, TRAJ45)
CASSYSVGGADGLTF

SEQ ID NO: 19422 - protein, 13 aa, Homo sapiens
  CDR3 for beta chain variable domain of TCR clone 9711 (TRBV10-3, TRBJ2-7)
CASKLAVNYEQYF

SEQ ID NO: 19423 - protein, 18 aa, Homo sapiens
  CDR3 for alpha chain variable domain of TCR clone 9712 (TRAV26-2, TRAJ33)
CCVLLHPEEPASNYQLIW

SEQ ID NO: 19424 - protein, 18 aa, Homo sapiens
  CDR3 for beta chain variable domain of TCR clone 9712 (TRBV10-3, TRBJ2-2)
CTSVPSTRQGANTGELFF

SEQ ID NO: 19425 - protein, 15 aa, Homo sapiens
  CDR3 for alpha chain variable domain of TCR clone 9713 (TRAV13-2, TRAJ22)
CAENSRPGSARQLTF

SEQ ID NO: 19426 - protein, 17 aa, Homo sapiens
  CDR3 for beta chain variable domain of TCR clone 9713 (TRBV20-1, TRBJ2-6)
CSATRDRGPSGANVLTF

SEQ ID NO: 19427 - protein, 14 aa, Homo sapiens
  CDR3 for alpha chain variable domain of TCR clone 9714 (TRAV12-2, TRAJ13)
CALKKTGGYQKVTF

SEQ ID NO: 19428 - protein, 15 aa, Homo sapiens
  CDR3 for beta chain variable domain of TCR clone 9714 (TRBV27, TRBJ2-1)
CASSNGGGSSNEQFF

SEQ ID NO: 19429 - protein, 14 aa, Homo sapiens
  CDR3 for alpha chain variable domain of TCR clone 9715 (TRAV2, TRAJ20)
CAVELTPNDYKLSF

SEQ ID NO: 19430 - protein, 14 aa, Homo sapiens
  CDR3 for beta chain variable domain of TCR clone 9715 (TRBV4-2, TRBJ1-2)
CASSQVGQNYGYTF

SEQ ID NO: 19431 - protein, 17 aa, Homo sapiens
  CDR3 for alpha chain variable domain of TCR clone 9716 (TRAV23/DV6, TRAJ57)
CAASSTLSQGGSEKLVF

SEQ ID NO: 19432 - protein, 14 aa, Homo sapiens
  CDR3 for beta chain variable domain of TCR clone 9716 (TRBV20-1, TRBJ2-7)
CSAKRGRSSYEQYF

SEQ ID NO: 19433 - protein, 15 aa, Homo sapiens
  CDR3 for alpha chain variable domain of TCR clone 9717 (TRAV27, TRAJ37)
CAGIHGSSNTGRLIF

SEQ ID NO: 19434 - protein, 13 aa, Homo sapiens
  CDR3 for beta chain variable domain of TCR clone 9717 (TRBV19, TRBJ2-1)
CASSIRSSWEQFF

SEQ ID NO: 19435 - protein, 14 aa, Homo sapiens
  CDR3 for alpha chain variable domain of TCR clone 9718 (TRAV1-2, TRAJ8)
CAVREDTGFQKLVF

SEQ ID NO: 19436 - protein, 13 aa, Homo sapiens
  CDR3 for beta chain variable domain of TCR clone 9718 (TRBV4-1, TRBJ2-7)
CASSQGQAYEQYF

SEQ ID NO: 19437 - protein, 17 aa, Homo sapiens
  CDR3 for alpha chain variable domain of TCR clone 9719 (TRAV26-2, TRAJ42)
CILRDVGYGGSQGNLIF

SEQ ID NO: 19438 - protein, 16 aa, Homo sapiens
  CDR3 for beta chain variable domain of TCR clone 9719 (TRBV12-4, TRBJ1-5)
CASSRPVGGSNQPQHF

SEQ ID NO: 19439 - protein, 14 aa, Homo sapiens
  CDR3 for alpha chain variable domain of TCR clone 9720 (TRAV1-2, TRAJ8)
CAVREDTGFQKLVF

SEQ ID NO: 19440 - protein, 15 aa, Homo sapiens
  CDR3 for beta chain variable domain of TCR clone 9720 (TRBV6-3, TRBJ2-7)
CASSSPGTVFYEQCF

SEQ ID NO: 19441 - protein, 11 aa, Homo sapiens
  CDR3 for alpha chain variable domain of TCR clone 9721 (TRAV29/DV5, TRAJ43)
CAARKNNDMRF

SEQ ID NO: 19442 - protein, 15 aa, Homo sapiens
  CDR3 for beta chain variable domain of TCR clone 9721 (TRBV5-1, TRBJ1-2)
CASSLGQVSGRGYTF

SEQ ID NO: 19443 - protein, 14 aa, Homo sapiens
  CDR3 for alpha chain variable domain of TCR clone 9722 (TRAV26-1, TRAJ38)
CIADNAGNNRKLIW

SEQ ID NO: 19444 - protein, 13 aa, Homo sapiens
  CDR3 for beta chain variable domain of TCR clone 9722 (TRBV20-1, TRBJ1-1)
CSARGGGNTEASF

SEQ ID NO: 19445 - protein, 15 aa, Homo sapiens
  CDR3 for alpha chain variable domain of TCR clone 9723 (TRAV8-2, TRAJ15)
CVVSDRYQAGTALIF

SEQ ID NO: 19446 - protein, 13 aa, Homo sapiens
  CDR3 for beta chain variable domain of TCR clone 9723 (TRBV20-1, TRBJ1-1)
CSAPDRRNTEAFF

SEQ ID NO: 19447 - protein, 13 aa, Homo sapiens
  CDR3 for alpha chain variable domain of TCR clone 9724 (TRAV9-2, TRAJ53)
CALSGGSNYKLTF

SEQ ID NO: 19448 - protein, 15 aa, Homo sapiens
  CDR3 for beta chain variable domain of TCR clone 9724 (TRBV7-2, TRBJ2-1)
CASSSGLAGGNEQFF

SEQ ID NO: 19449 - protein, 13 aa, Homo sapiens
  CDR3 for alpha chain variable domain of TCR clone 9725 (TRAV22, TRAJ49)
CAVGMYTGNQFYF

SEQ ID NO: 19450 - protein, 13 aa, Homo sapiens
  CDR3 for beta chain variable domain of TCR clone 9725 (TRBV2, TRBJ2-3)
CASIIPASDTQYF

SEQ ID NO: 19451 - protein, 12 aa, Homo sapiens
  CDR3 for alpha chain variable domain of TCR clone 9726 (TRAV12-3, TRAJ17)
CAMTLTGNKLIF

SEQ ID NO: 19452 - protein, 15 aa, Homo sapiens
  CDR3 for beta chain variable domain of TCR clone 9726 (TRBV20-1, TRBJ2-7)
CSARDRVSGMDEQYF

SEQ ID NO: 19453 - protein, 13 aa, Homo sapiens
  CDR3 for alpha chain variable domain of TCR clone 9727 (TRAV1-2, TRAJ9)
CAALNTGGFKTIF

SEQ ID NO: 19454 - protein, 13 aa, Homo sapiens
  CDR3 for beta chain variable domain of TCR clone 9727 (TRBV19, TRBJ1-2)
CASSVPGQDGYTL

SEQ ID NO: 19455 - protein, 15 aa, Homo sapiens
  CDR3 for alpha chain variable domain of TCR clone 9728 (TRAV12-3, TRAJ6)
CAVSATTGGSYIPTF

SEQ ID NO: 19456 - protein, 16 aa, Homo sapiens
  CDR3 for beta chain variable domain of TCR clone 9728 (TRBV20-1, TRBJ1-2)
CSASMGQGVANYGYTF

SEQ ID NO: 19457 - protein, 14 aa, Homo sapiens
  CDR3 for alpha chain variable domain of TCR clone 9729 (TRAV12-2, TRAJ13)
CAVKKTGSYQKVTF

SEQ ID NO: 19458 - protein, 15 aa, Homo sapiens
  CDR3 for beta chain variable domain of TCR clone 9729 (TRBV27, TRBJ2-1)
CASSNGGGSSNEQFF

SEQ ID NO: 19459 - protein, 11 aa, Homo sapiens
  CDR3 for alpha chain variable domain of TCR clone 9730 (TRAV1-2, TRAJ31)
CAVNNNARLMF

SEQ ID NO: 19460 - protein, 15 aa, Homo sapiens
  CDR3 for beta chain variable domain of TCR clone 9730 (TRBV9, TRBJ1-6)
CASSVAGTGDSPLHF

SEQ ID NO: 19461 - protein, 13 aa, Homo sapiens
  CDR3 for alpha chain variable domain of TCR clone 9731 (TRAV21, TRAJ27)
CAARPGDAGKSTF

SEQ ID NO: 19462 - protein, 14 aa, Homo sapiens
  CDR3 for beta chain variable domain of TCR clone 9731 (TRBV7-6, TRBJ2-3)
CASSLGTVTDTQYF

SEQ ID NO: 19463 - protein, 12 aa, Homo sapiens
  CDR3 for alpha chain variable domain of TCR clone 9732 (TRAV20, TRAJ36)
CAVLTGANNLFF

SEQ ID NO: 19464 - protein, 17 aa, Homo sapiens
  CDR3 for beta chain variable domain of TCR clone 9732 (TRBV11-2, TRBJ2-1)
CASSLYPPGVEYNEQFF

SEQ ID NO: 19465 - protein, 11 aa, Homo sapiens
  CDR3 for alpha chain variable domain of TCR clone 9733 (TRAV26-1, TRAJ37)
CIVRVGRKLIF

SEQ ID NO: 19466 - protein, 15 aa, Homo sapiens
  CDR3 for beta chain variable domain of TCR clone 9733 (TRBV27, TRBJ2-7)
CASSTAGTGSYEQYF

SEQ ID NO: 19467 - protein, 13 aa, Homo sapiens
  CDR3 for alpha chain variable domain of TCR clone 9734 (TRAV2, TRAJ40)
CAVVTSGTYNYIF

SEQ ID NO: 19468 - protein, 15 aa, Homo sapiens
  CDR3 for beta chain variable domain of TCR clone 9734 (TRBV11-3, TRBJ2-3)
CASLKDGREGDTQYF

SEQ ID NO: 19469 - protein, 15 aa, Homo sapiens
  CDR3 for alpha chain variable domain of TCR clone 9735 (TRAV3, TRAJ22)
CAVRDRGGSARQLTS

SEQ ID NO: 19470 - protein, 16 aa, Homo sapiens
  CDR3 for beta chain variable domain of TCR clone 9735 (TRBV5-4, TRBJ2-3)
CASQQPGAGGADTQYF

SEQ ID NO: 19471 - protein, 16 aa, Homo sapiens
  CDR3 for alpha chain variable domain of TCR clone 9736 (TRAV12-3, TRAJ53)
CAMSPGSGGSNYKLTF

SEQ ID NO: 19472 - protein, 17 aa, Homo sapiens
  CDR3 for beta chain variable domain of TCR clone 9736 (TRBV7-8, TRBJ2-6)
CASSAGTGGAGANVLTF

SEQ ID NO: 19473 - protein, 17 aa, Homo sapiens
  CDR3 for alpha chain variable domain of TCR clone 9737 (TRAV4, TRAJ13)
CLVGVQGSSGGYQKVTF

SEQ ID NO: 19474 - protein, 15 aa, Homo sapiens
  CDR3 for beta chain variable domain of TCR clone 9737 (TRBV6-3, TRBJ2-7)
CASSSPGTVFYEQYF

SEQ ID NO: 19475 - protein, 13 aa, Homo sapiens
  CDR3 for alpha chain variable domain of TCR clone 9738 (TRAV13-1, TRAJ39)
CSKYSNAGNMLTF

SEQ ID NO: 19476 - protein, 14 aa, Homo sapiens
  CDR3 for beta chain variable domain of TCR clone 9738 (TRBV18, TRBJ2-7)
CASSPRGGAYEQYF

SEQ ID NO: 19477 - protein, 16 aa, Homo sapiens
  CDR3 for alpha chain variable domain of TCR clone 9739 (TRAV30, TRAJ24)
CGTEIVDADSWGKFQF

SEQ ID NO: 19478 - protein, 14 aa, Homo sapiens
  CDR3 for beta chain variable domain of TCR clone 9739 (TRBV12-5, TRBJ2-5)
CASGSLTHQETQYF

SEQ ID NO: 19479 - protein, 14 aa, Homo sapiens
  CDR3 for alpha chain variable domain of TCR clone 9740 (TRAV26-1, TRAJ16)
CIAVPFSDGQKLLF

SEQ ID NO: 19480 - protein, 12 aa, Homo sapiens
  CDR3 for beta chain variable domain of TCR clone 9740 (TRBV4-2, TRBJ2-1)
CARSAQKNEQFF

SEQ ID NO: 19481 - protein, 15 aa, Homo sapiens
  CDR3 for alpha chain variable domain of TCR clone 9741 (TRAV27, TRAJ38)
CAARRNAGDNRKLIW

SEQ ID NO: 19482 - protein, 13 aa, Homo sapiens
  CDR3 for beta chain variable domain of TCR clone 9741 (TRBV12-5, TRBJ2-3)
CASGDRQSDTQYF

SEQ ID NO: 19483 - protein, 13 aa, Homo sapiens
  CDR3 for alpha chain variable domain of TCR clone 9742 (TRAV12-1, TRAJ13)
CVVGTGGYQKVTF

SEQ ID NO: 19484 - protein, 13 aa, Homo sapiens
  CDR3 for beta chain variable domain of TCR clone 9742 (TRBV4-1, TRBJ2-3)
CASSQPPTDTQYF

SEQ ID NO: 19485 - protein, 13 aa, Homo sapiens
  CDR3 for alpha chain variable domain of TCR clone 9743 (TRAV1-2, TRAJ24)
CAVTTDSWGKLQF

SEQ ID NO: 19486 - protein, 14 aa, Homo sapiens
  CDR3 for beta chain variable domain of TCR clone 9743 (TRBV7-2, TRBJ1-2)
CASSQTGSTYGYTF

SEQ ID NO: 19487 - protein, 17 aa, Homo sapiens
  CDR3 for alpha chain variable domain of TCR clone 9744 (TRAV38-2/DV8, TRAJ48)
CAYRSVFRGLGNEKLTF

SEQ ID NO: 19488 - protein, 15 aa, Homo sapiens
  CDR3 for beta chain variable domain of TCR clone 9744 (TRBV5-1, TRBJ2-5)
CASSRLGTVQETQYF

SEQ ID NO: 19489 - protein, 11 aa, Homo sapiens
  CDR3 for alpha chain variable domain of TCR clone 9745 (TRAV2, TRAJ13)
CAPGGYQKVTF

SEQ ID NO: 19490 - protein, 16 aa, Homo sapiens
  CDR3 for beta chain variable domain of TCR clone 9745 (TRBV6-1, TRBJ2-5)
CASSETLDRGAETQYF

SEQ ID NO: 19491 - protein, 14 aa, Homo sapiens
  CDR3 for alpha chain variable domain of TCR clone 9746 (TRAV9-2, TRAJ36)
RALPWRTGANNLFF

SEQ ID NO: 19492 - protein, 14 aa, Homo sapiens
  CDR3 for beta chain variable domain of TCR clone 9746 (TRBV2, TRBJ1-2)
CASSELQVNYGYTF

SEQ ID NO: 19493 - protein, 15 aa, Homo sapiens
  CDR3 for alpha chain variable domain of TCR clone 9747 (TRAV26-1, TRAJ29)
CIVRVEGSGNTPLVF

SEQ ID NO: 19494 - protein, 15 aa, Homo sapiens
  CDR3 for beta chain variable domain of TCR clone 9747 (TRBV7-9, TRBJ1-5)
CASSQGHRPNQPQHF

SEQ ID NO: 19495 - protein, 11 aa, Homo sapiens
  CDR3 for alpha chain variable domain of TCR clone 9748 (TRAV1-1, TRAJ37)
CAVSPQGKLIF

SEQ ID NO: 19496 - protein, 15 aa, Homo sapiens
  CDR3 for beta chain variable domain of TCR clone 9748 (TRBV27, TRBJ1-2)
CASSLSSTVNYGYTF

SEQ ID NO: 19497 - protein, 15 aa, Homo sapiens
  CDR3 for alpha chain variable domain of TCR clone 9749 (TRAV17, TRAJ22)
CATVAPSGSARQPTF

SEQ ID NO: 19498 - protein, 16 aa, Homo sapiens
  CDR3 for beta chain variable domain of TCR clone 9749 (TRBV10-3, TRBJ2-7)
CAISADFADRPYEQYF

SEQ ID NO: 19499 - protein, 17 aa, Homo sapiens
  CDR3 for alpha chain variable domain of TCR clone 9750 (TRAV12-3, TRAJ52)
CAMSARAGGTSYGKLTF

SEQ ID NO: 19500 - protein, 15 aa, Homo sapiens
  CDR3 for beta chain variable domain of TCR clone 9750 (TRBV6-1, TRBJ2-6)
CASSSDDSGANVLTF

SEQ ID NO: 19501 - protein, 11 aa, Homo sapiens
  CDR3 for alpha chain variable domain of TCR clone 9751 (TRAV1-1, TRAJ23)
CAVRQGGKLIF

SEQ ID NO: 19502 - protein, 20 aa, Homo sapiens
  CDR3 for beta chain variable domain of TCR clone 9751 (TRBV7-8, TRBJ2-2)
CASSHLFPGPTIHITGELLF

SEQ ID NO: 19503 - protein, 15 aa, Homo sapiens
  CDR3 for alpha chain variable domain of TCR clone 9752 (TRAV2, TRAJ21)
CAVDFTTSTNFTLDL

SEQ ID NO: 19504 - protein, 12 aa, Homo sapiens
  CDR3 for beta chain variable domain of TCR clone 9752 (TRBV7-3, TRBJ2-1)
CASSFQSGPQFF

SEQ ID NO: 19505 - protein, 13 aa, Homo sapiens
  CDR3 for alpha chain variable domain of TCR clone 9753 (TRAV23/DV6, TRAJ44)
CSINTGTASKLTF

SEQ ID NO: 19506 - protein, 14 aa, Homo sapiens
  CDR3 for beta chain variable domain of TCR clone 9753 (TRBV2, TRBJ2-1)
CASSEALDGNEQFF

SEQ ID NO: 19507 - protein, 16 aa, Homo sapiens
  CDR3 for alpha chain variable domain of TCR clone 9754 (TRAV3, TRAJ10)
CAVRDMRAGGGNKLTF

SEQ ID NO: 19508 - protein, 15 aa, Homo sapiens
  CDR3 for beta chain variable domain of TCR clone 9754 (TRBV20-1, TRBJ2-7)
CSARVPAAYFYEQYF

SEQ ID NO: 19509 - protein, 11 aa, Homo sapiens
  CDR3 for alpha chain variable domain of TCR clone 9755 (TRAV2, TRAJ13)
CASGGYQKVTF

SEQ ID NO: 19510 - protein, 17 aa, Homo sapiens
  CDR3 for beta chain variable domain of TCR clone 9755 (TRBV5-8, TRBJ2-3)
CASSLLTSGASTDTQYF

SEQ ID NO: 19511 - protein, 14 aa, Homo sapiens
  CDR3 for alpha chain variable domain of TCR clone 9756 (TRAV12-2, TRAJ13)
CAVKKTGGYQKVAF

SEQ ID NO: 19512 - protein, 15 aa, Homo sapiens
  CDR3 for beta chain variable domain of TCR clone 9756 (TRBV27, TRBJ2-1)
CASSNGGGSSNEQFF

SEQ ID NO: 19513 - protein, 13 aa, Homo sapiens
  CDR3 for alpha chain variable domain of TCR clone 9757 (TRAV38-1, TRAJ42)
CARWGGSQGNPIF

SEQ ID NO: 19514 - protein, 17 aa, Homo sapiens
  CDR3 for beta chain variable domain of TCR clone 9757 (TRBV20-1, TRBJ2-1)
CSARDPLAGVWDNEQFF

SEQ ID NO: 19515 - protein, 11 aa, Homo sapiens
  CDR3 for alpha chain variable domain of TCR clone 9758 (TRAV12-1, TRAJ31)
CVVNGDARLMF

SEQ ID NO: 19516 - protein, 17 aa, Homo sapiens
  CDR3 for beta chain variable domain of TCR clone 9758 (TRBV4-3, TRBJ1-5)
CASSQWGDGGPNQPQHF

SEQ ID NO: 19517 - protein, 15 aa, Homo sapiens
  CDR3 for alpha chain variable domain of TCR clone 9759 (TRAV17, TRAJ57)
CATGPSQGGSEKLAF

SEQ ID NO: 19518 - protein, 16 aa, Homo sapiens
  CDR3 for beta chain variable domain of TCR clone 9759 (TRBV12-4, TRBJ1-5)
CASSRPVGGSNQPQHF

SEQ ID NO: 19519 - protein, 13 aa, Homo sapiens
  CDR3 for alpha chain variable domain of TCR clone 9760 (TRAV1-2, TRAJ9)
CAALNTGGFKTIF

SEQ ID NO: 19520 - protein, 14 aa, Homo sapiens
  CDR3 for beta chain variable domain of TCR clone 9760 (TRBV4-1, TRBJ2-2)
CASSQAVNTGELFF

SEQ ID NO: 19521 - protein, 15 aa, Homo sapiens
  CDR3 for alpha chain variable domain of TCR clone 9761 (TRAV26-1, TRAJ29)
CIVRVEGSGNTPLVF

SEQ ID NO: 19522 - protein, 15 aa, Homo sapiens
  CDR3 for beta chain variable domain of TCR clone 9761 (TRBV7-9, TRBJ1-5)
CASSQGHQPNQPQHL

SEQ ID NO: 19523 - protein, 14 aa, Homo sapiens
  CDR3 for alpha chain variable domain of TCR clone 9762 (TRAV12-1, TRAJ6)
CVVPTSGGSYIPTF

SEQ ID NO: 19524 - protein, 17 aa, Homo sapiens
  CDR3 for beta chain variable domain of TCR clone 9762 (TRBV14, TRBJ2-3)
CASSQEPSGLSTDTQYF

SEQ ID NO: 19525 - protein, 16 aa, Homo sapiens
  CDR3 for alpha chain variable domain of TCR clone 9763 (TRAV1-2, TRAJ40)
CAVRAPVPSGTYKYIF

SEQ ID NO: 19526 - protein, 20 aa, Homo sapiens
  CDR3 for beta chain variable domain of TCR clone 9763 (TRBV7-2, TRBJ2-3)
CASSSPLVEVAGRSTDTQYF

SEQ ID NO: 19527 - protein, 18 aa, Homo sapiens
  CDR3 for alpha chain variable domain of TCR clone 9764 (TRAV17, TRAJ45)
CATSLDLYSGGGADGLTF

SEQ ID NO: 19528 - protein, 13 aa, Homo sapiens
  CDR3 for beta chain variable domain of TCR clone 9764 (TRBV10-3, TRBJ2-7)
CASKLAVNYEQYL

SEQ ID NO: 19529 - protein, 11 aa, Homo sapiens
  CDR3 for alpha chain variable domain of TCR clone 9765 (TRAV2, TRAJ23)
CAVETRGKLIF

SEQ ID NO: 19530 - protein, 14 aa, Homo sapiens
  CDR3 for beta chain variable domain of TCR clone 9765 (TRBV2, TRBJ2-3)
CASREGQNTDTQYF

SEQ ID NO: 19531 - protein, 13 aa, Homo sapiens
  CDR3 for alpha chain variable domain of TCR clone 9766 (TRAV21, TRAJ45)
CAAPGGGADGLTF

SEQ ID NO: 19532 - protein, 18 aa, Homo sapiens
  CDR3 for beta chain variable domain of TCR clone 9766 (TRBV4-3, TRBJ1-4)
CASSQGSGQGAANEKLFF

SEQ ID NO: 19533 - protein, 14 aa, Homo sapiens
  CDR3 for alpha chain variable domain of TCR clone 9767 (TRAV25, TRAJ35)
CARRMEGFGNVLHC

SEQ ID NO: 19534 - protein, 13 aa, Homo sapiens
  CDR3 for beta chain variable domain of TCR clone 9767 (TRBV7-2, TRBJ1-4)
CAGSLAGLEKLFF

SEQ ID NO: 19535 - protein, 14 aa, Homo sapiens
  CDR3 for alpha chain variable domain of TCR clone 9768 (TRAV13-1, TRAJ10)
CAAKEPGGGNKLTF

SEQ ID NO: 19536 - protein, 14 aa, Homo sapiens
  CDR3 for beta chain variable domain of TCR clone 9768 (TRBV6-6, TRBJ2-7)
CASSDNGAGYEQYF

SEQ ID NO: 19537 - protein, 15 aa, Homo sapiens
  CDR3 for alpha chain variable domain of TCR clone 9769 (TRAV26-1, TRAJ29)
CIVRVEGSGNTPLVF

SEQ ID NO: 19538 - protein, 15 aa, Homo sapiens
  CDR3 for beta chain variable domain of TCR clone 9769 (TRBV7-9, TRBJ1-5)
CASSQGHQPNQAQHF

SEQ ID NO: 19539 - protein, 15 aa, Homo sapiens
  CDR3 for alpha chain variable domain of TCR clone 9770 (TRAV8-3, TRAJ11)
CAVGLLNSGYSTLTF

SEQ ID NO: 19540 - protein, 16 aa, Homo sapiens
  CDR3 for beta chain variable domain of TCR clone 9770 (TRBV7-3, TRBJ2-2)
CASSLKRGTLSGELFF

SEQ ID NO: 19541 - protein, 14 aa, Homo sapiens
  CDR3 for alpha chain variable domain of TCR clone 9771 (TRAV38-1, TRAJ40)
CALRPTSGTYKYIF

SEQ ID NO: 19542 - protein, 14 aa, Homo sapiens
  CDR3 for beta chain variable domain of TCR clone 9771 (TRBV25-1, TRBJ1-1)
CASTHLGGNTEAVF

SEQ ID NO: 19543 - protein, 12 aa, Homo sapiens
  CDR3 for alpha chain variable domain of TCR clone 9772 (TRAV8-4, TRAJ43)
CAVSVNNNDMRF

SEQ ID NO: 19544 - protein, 14 aa, Homo sapiens
  CDR3 for beta chain variable domain of TCR clone 9772 (TRBV7-2, TRBJ2-7)
CASRSQGAAYEQYF

SEQ ID NO: 19545 - protein, 12 aa, Homo sapiens
  CDR3 for alpha chain variable domain of TCR clone 9773 (TRAV12-3, TRAJ17)
CAMTLTGNKLTF

SEQ ID NO: 19546 - protein, 13 aa, Homo sapiens
  CDR3 for beta chain variable domain of TCR clone 9773 (TRBV12-5, TRBJ2-3)
CASGDRQSDTQYF

SEQ ID NO: 19547 - protein, 12 aa, Homo sapiens
  CDR3 for alpha chain variable domain of TCR clone 9774 (TRAV12-3, TRAJ17)
CAMTLTGNKLTF

SEQ ID NO: 19548 - protein, 15 aa, Homo sapiens
  CDR3 for beta chain variable domain of TCR clone 9774 (TRBV20-1, TRBJ2-7)
CRARDRVSGMDEQYF

SEQ ID NO: 19549 - protein, 14 aa, Homo sapiens
  CDR3 for alpha chain variable domain of TCR clone 9775 (TRAV12-2, TRAJ13)
CAVKKIGGYQKVTF

SEQ ID NO: 19550 - protein, 15 aa, Homo sapiens
  CDR3 for beta chain variable domain of TCR clone 9775 (TRBV27, TRBJ2-1)
CASSNGGGSSNEQFF

SEQ ID NO: 19551 - protein, 14 aa, Homo sapiens
  CDR3 for alpha chain variable domain of TCR clone 9776 (TRAV2, TRAJ9)
CAVEDRSGGFKTIF

SEQ ID NO: 19552 - protein, 14 aa, Homo sapiens
  CDR3 for beta chain variable domain of TCR clone 9776 (TRBV19, TRBJ2-1)
CARGARSFQWEQFF

SEQ ID NO: 19553 - protein, 12 aa, Homo sapiens
  CDR3 for alpha chain variable domain of TCR clone 9777 (TRAV12-1, TRAJ39)
CVVIDAGNMLTF

SEQ ID NO: 19554 - protein, 17 aa, Homo sapiens
  CDR3 for beta chain variable domain of TCR clone 9777 (TRBV7-2, TRBJ2-7)
CASSPFGSSGPSPEQYF

SEQ ID NO: 19555 - protein, 15 aa, Homo sapiens
  CDR3 for alpha chain variable domain of TCR clone 9778 (TRAV8-6, TRAJ10)
CAVSDQAGGGNKLTF

SEQ ID NO: 19556 - protein, 16 aa, Homo sapiens
  CDR3 for beta chain variable domain of TCR clone 9778 (TRBV27, TRBJ2-7)
CASSSERRDSAYEQYF

SEQ ID NO: 19557 - protein, 14 aa, Homo sapiens
  CDR3 for alpha chain variable domain of TCR clone 9779 (TRAV13-2, TRAJ47)
CAESSMEYGNKLVF

SEQ ID NO: 19558 - protein, 12 aa, Homo sapiens
  CDR3 for beta chain variable domain of TCR clone 9779 (TRBV5-1, TRBJ2-1)
CASIGGYNEQFF

SEQ ID NO: 19559 - protein, 13 aa, Homo sapiens
  CDR3 for alpha chain variable domain of TCR clone 9780 (TRAV8-3, TRAJ28)
CAVGSVGSYQLTF

SEQ ID NO: 19560 - protein, 15 aa, Homo sapiens
  CDR3 for beta chain variable domain of TCR clone 9780 (TRBV7-9, TRBJ1-5)
CASSQGHQPNQPQHF

SEQ ID NO: 19561 - protein, 15 aa, Homo sapiens
  CDR3 for alpha chain variable domain of TCR clone 9781 (TRAV3, TRAJ29)
CAVRDSISGNTPLVF

SEQ ID NO: 19562 - protein, 15 aa, Homo sapiens
  CDR3 for beta chain variable domain of TCR clone 9781 (TRBV18, TRBJ2-3)
CASSPGLAGGDTQYF

SEQ ID NO: 19563 - protein, 14 aa, Homo sapiens
  CDR3 for alpha chain variable domain of TCR clone 9782 (TRAV1-1, TRAJ27)
CAVIYNTNAGKSTF

SEQ ID NO: 19564 - protein, 14 aa, Homo sapiens
  CDR3 for beta chain variable domain of TCR clone 9782 (TRBV5-1, TRBJ2-3)
CASSLFGPTDTQYF

SEQ ID NO: 19565 - protein, 15 aa, Homo sapiens
  CDR3 for alpha chain variable domain of TCR clone 9783 (TRAV2, TRAJ9)
CAVEDRGTGGFKTIF

SEQ ID NO: 19566 - protein, 14 aa, Homo sapiens
  CDR3 for beta chain variable domain of TCR clone 9783 (TRBV12-5, TRBJ2-5)
CASGSRTHQETQYF

SEQ ID NO: 19567 - protein, 14 aa, Homo sapiens
  CDR3 for alpha chain variable domain of TCR clone 9784 (TRAV12-2, TRAJ13)
CAVKKTGGNQKVTF

SEQ ID NO: 19568 - protein, 15 aa, Homo sapiens
  CDR3 for beta chain variable domain of TCR clone 9784 (TRBV27, TRBJ2-1)
CASSNGGGSSNEQFF

SEQ ID NO: 19569 - protein, 17 aa, Homo sapiens
  CDR3 for alpha chain variable domain of TCR clone 9785 (TRAV3, TRAJ6)
CAVRDGPRVGGSYIPTF

SEQ ID NO: 19570 - protein, 14 aa, Homo sapiens
  CDR3 for beta chain variable domain of TCR clone 9785 (TRBV7-2, TRBJ2-7)
CASSPKTSFYEQYF

SEQ ID NO: 19571 - protein, 15 aa, Homo sapiens
  CDR3 for alpha chain variable domain of TCR clone 9786 (TRAV17, TRAJ22)
CATVAPSGSARQLTF

SEQ ID NO: 19572 - protein, 16 aa, Homo sapiens
  CDR3 for beta chain variable domain of TCR clone 9786 (TRBV10-3, TRBJ2-7)
CAISADFADRPYEQYL

SEQ ID NO: 19573 - protein, 16 aa, Homo sapiens
  CDR3 for alpha chain variable domain of TCR clone 9787 (TRAV23/DV6, TRAJ9)
CAASIGGNTGGFKTIF

SEQ ID NO: 19574 - protein, 14 aa, Homo sapiens
  CDR3 for beta chain variable domain of TCR clone 9787 (TRBV6-1, TRBJ2-5)
CASSYAGGEETQYF

SEQ ID NO: 19575 - protein, 17 aa, Homo sapiens
  CDR3 for alpha chain variable domain of TCR clone 9788 (TRAV8-6, TRAJ58)
CAVSSWVGETSGSRLTF

SEQ ID NO: 19576 - protein, 14 aa, Homo sapiens
  CDR3 for beta chain variable domain of TCR clone 9788 (TRBV4-2, TRBJ2-1)
CASGLNRAYNEQFF

SEQ ID NO: 19577 - protein, 12 aa, Homo sapiens
  CDR3 for alpha chain variable domain of TCR clone 9789 (TRAV12-3, TRAJ17)
CAMTLTGNKLTF

SEQ ID NO: 19578 - protein, 16 aa, Homo sapiens
  CDR3 for beta chain variable domain of TCR clone 9789 (TRBV6-4, TRBJ1-2)
CASSEAVGDPNYGYTF

SEQ ID NO: 19579 - protein, 11 aa, Homo sapiens
  CDR3 for alpha chain variable domain of TCR clone 9790 (TRAV1-1, TRAJ23)
CAVRQGGKLIF

SEQ ID NO: 19580 - protein, 20 aa, Homo sapiens
  CDR3 for beta chain variable domain of TCR clone 9790 (TRBV7-8, TRBJ2-2)
CASSHLFPGPTIHITGELFF

SEQ ID NO: 19581 - protein, 11 aa, Homo sapiens
  CDR3 for alpha chain variable domain of TCR clone 9791 (TRAV1-1, TRAJ23)
CAVRQGGKPIF

SEQ ID NO: 19582 - protein, 20 aa, Homo sapiens
  CDR3 for beta chain variable domain of TCR clone 9791 (TRBV7-8, TRBJ2-2)
CASSHLFPGPTIHITGELFF

SEQ ID NO: 19583 - protein, 13 aa, Homo sapiens
  CDR3 for alpha chain variable domain of TCR clone 9792 (TRAV12-2, TRAJ50)
CAVIVTSYDKVIF

SEQ ID NO: 19584 - protein, 16 aa, Homo sapiens
  CDR3 for beta chain variable domain of TCR clone 9792 (TRBV6-5, TRBJ2-7)
CASSSDPTSGFYEQYF

SEQ ID NO: 19585 - protein, 14 aa, Homo sapiens
  CDR3 for alpha chain variable domain of TCR clone 9793 (TRAV1-2, TRAJ16)
CAVNRFSDGQKLLF

SEQ ID NO: 19586 - protein, 15 aa, Homo sapiens
  CDR3 for beta chain variable domain of TCR clone 9793 (TRBV6-5, TRBJ2-7)
CASSASGRWSYEQYF

SEQ ID NO: 19587 - protein, 13 aa, Homo sapiens
  CDR3 for alpha chain variable domain of TCR clone 9794 (TRAV38-1, TRAJ20)
CAFMKPNDYKLSF

SEQ ID NO: 19588 - protein, 16 aa, Homo sapiens
  CDR3 for beta chain variable domain of TCR clone 9794 (TRBV12-4, TRBJ1-1)
CASSHRRDRQGTEAFF

SEQ ID NO: 19589 - protein, 14 aa, Homo sapiens
  CDR3 for alpha chain variable domain of TCR clone 9795 (TRAV23/DV6, TRAJ57)
CAAALKGGSEKLVF

SEQ ID NO: 19590 - protein, 12 aa, Homo sapiens
  CDR3 for beta chain variable domain of TCR clone 9795 (TRBV7-3, TRBJ2-1)
CASSFQSGPQFF

SEQ ID NO: 19591 - protein, 14 aa, Homo sapiens
  CDR3 for alpha chain variable domain of TCR clone 9796 (TRAV26-1, TRAJ38)
CIADNAGNNRKLIW

SEQ ID NO: 19592 - protein, 14 aa, Homo sapiens
  CDR3 for beta chain variable domain of TCR clone 9796 (TRBV13, TRBJ2-5)
CASSLGTAQETQYF

SEQ ID NO: 19593 - protein, 14 aa, Homo sapiens
  CDR3 for alpha chain variable domain of TCR clone 9797 (TRAV8-3, TRAJ39)
CAVGANNAGNMLTF

SEQ ID NO: 19594 - protein, 13 aa, Homo sapiens
  CDR3 for beta chain variable domain of TCR clone 9797 (TRBV3-1, TRBJ2-5)
CASSPVLSKTQYF

SEQ ID NO: 19595 - protein, 21 aa, Homo sapiens
  CDR3 for alpha chain variable domain of TCR clone 9798 (TRAV27, TRAJ38)
CAARRNAGNNHIQNPDPAVYQ

SEQ ID NO: 19596 - protein, 13 aa, Homo sapiens
  CDR3 for beta chain variable domain of TCR clone 9798 (TRBV12-5, TRBJ2-3)
CASGDRQSDTQYF

SEQ ID NO: 19597 - protein, 16 aa, Homo sapiens
  CDR3 for alpha chain variable domain of TCR clone 9799 (TRAV30, TRAJ24)
CGTEIVDADSWGKFQF

SEQ ID NO: 19598 - protein, 16 aa, Homo sapiens
  CDR3 for beta chain variable domain of TCR clone 9799 (TRBV20-1, TRBJ1-4)
CSAPGQGLLTNEKLFF

SEQ ID NO: 19599 - protein, 14 aa, Homo sapiens
  CDR3 for alpha chain variable domain of TCR clone 9800 (TRAV1-2, TRAJ16)
CAVNRFSDGQKLLF

SEQ ID NO: 19600 - protein, 14 aa, Homo sapiens
  CDR3 for beta chain variable domain of TCR clone 9800 (TRBV13, TRBJ1-1)
CASTVITVNTEAFF

SEQ ID NO: 19601 - protein, 18 aa, Homo sapiens
  CDR3 for alpha chain variable domain of TCR clone 9801 (TRAV21, TRAJ52)
CAVRPSPAGGTSYGKLTF

SEQ ID NO: 19602 - protein, 17 aa, Homo sapiens
  CDR3 for beta chain variable domain of TCR clone 9801 (TRBV13, TRBJ2-3)
CASRLSRVAGGRNTQYF

SEQ ID NO: 19603 - protein, 15 aa, Homo sapiens
  CDR3 for alpha chain variable domain of TCR clone 9802 (TRAV8-3, TRAJ45)
CASSYSGGGADGLTF

SEQ ID NO: 19604 - protein, 12 aa, Homo sapiens
  CDR3 for beta chain variable domain of TCR clone 9802 (TRBV7-8, TRBJ2-7)
CASSLGDREQYF

SEQ ID NO: 19605 - protein, 14 aa, Homo sapiens
  CDR3 for alpha chain variable domain of TCR clone 9803 (TRAV12-2, TRAJ40)
CAVKIPSGTYKYIF

SEQ ID NO: 19606 - protein, 15 aa, Homo sapiens
  CDR3 for beta chain variable domain of TCR clone 9803 (TRBV6-5, TRBJ2-1)
CASSYDAGAGNEQFF

SEQ ID NO: 19607 - protein, 15 aa, Homo sapiens
  CDR3 for alpha chain variable domain of TCR clone 9804 (TRAV8-3, TRAJ11)
CAVGLLNSGYSTLTF

SEQ ID NO: 19608 - protein, 16 aa, Homo sapiens
  CDR3 for beta chain variable domain of TCR clone 9804 (TRBV5-1, TRBJ2-2)
CASSSYREGDTGELFF

SEQ ID NO: 19609 - protein, 13 aa, Homo sapiens
  CDR3 for alpha chain variable domain of TCR clone 9805 (TRAV2, TRAJ5)
CAVPDTGRRALTF

SEQ ID NO: 19610 - protein, 15 aa, Homo sapiens
  CDR3 for beta chain variable domain of TCR clone 9805 (TRBV7-3, TRBJ2-1)
CASSPTGGGEVEQFF

SEQ ID NO: 19611 - protein, 17 aa, Homo sapiens
  CDR3 for alpha chain variable domain of TCR clone 9806 (TRAV3, TRAJ6)
CAVRDGPRAGGSYIPTF

SEQ ID NO: 19612 - protein, 14 aa, Homo sapiens
  CDR3 for beta chain variable domain of TCR clone 9806 (TRBV7-2, TRBJ2-7)
CASSPKTSFYEQYS

SEQ ID NO: 19613 - protein, 13 aa, Homo sapiens
  CDR3 for alpha chain variable domain of TCR clone 9807 (TRAV1-1, TRAJ20)
CAVRGSNDYKLSF

SEQ ID NO: 19614 - protein, 15 aa, Homo sapiens
  CDR3 for beta chain variable domain of TCR clone 9807 (TRBV7-2, TRBJ2-1)
CASSSRTSREDEQFF

SEQ ID NO: 19615 - protein, 18 aa, Homo sapiens
  CDR3 for alpha chain variable domain of TCR clone 9808 (TRAV21, TRAJ52)
CAVRPSPAGGTSYGKLTF

SEQ ID NO: 19616 - protein, 15 aa, Homo sapiens
  CDR3 for beta chain variable domain of TCR clone 9808 (TRBV27, TRBJ1-4)
CASSAQQDLNEKLFF

SEQ ID NO: 19617 - protein, 13 aa, Homo sapiens
  CDR3 for alpha chain variable domain of TCR clone 9809 (TRAV26-1, TRAJ23)
CIDLRTRGGKLIF

SEQ ID NO: 19618 - protein, 14 aa, Homo sapiens
  CDR3 for beta chain variable domain of TCR clone 9809 (TRBV2, TRBJ2-7)
CASSRDRSSYEQYF

SEQ ID NO: 19619 - protein, 11 aa, Homo sapiens
  CDR3 for alpha chain variable domain of TCR clone 9810 (TRAV3, TRAJ21)
CAVGNFNKFYF

SEQ ID NO: 19620 - protein, 16 aa, Homo sapiens
  CDR3 for beta chain variable domain of TCR clone 9810 (TRBV19, TRBJ2-1)
CASSKAGLSSYNEQFF

SEQ ID NO: 19621 - protein, 14 aa, Homo sapiens
  CDR3 for alpha chain variable domain of TCR clone 9811 (TRAV12-1, TRAJ17)
CVVNYKAAGNKLTF

SEQ ID NO: 19622 - protein, 17 aa, Homo sapiens
  CDR3 for beta chain variable domain of TCR clone 9811 (TRBV20-1, TRBJ2-1)
CGASSSGLAGSYNEQFF

SEQ ID NO: 19623 - protein, 17 aa, Homo sapiens
  CDR3 for alpha chain variable domain of TCR clone 9812 (TRAV8-1, TRAJ43)
CAVTNDMRFGAGTRLTV

SEQ ID NO: 19624 - protein, 13 aa, Homo sapiens
  CDR3 for beta chain variable domain of TCR clone 9812 (TRBV7-3, TRBJ1-1)
CASSQDWGAEAFF

SEQ ID NO: 19625 - protein, 13 aa, Homo sapiens
  CDR3 for alpha chain variable domain of TCR clone 9813 (TRAV8-1, TRAJ30)
CAVIMNRDDKTIF

SEQ ID NO: 19626 - protein, 14 aa, Homo sapiens
  CDR3 for beta chain variable domain of TCR clone 9813 (TRBV7-2, TRBJ1-6)
CASSLQGANSPLHF

SEQ ID NO: 19627 - protein, 13 aa, Homo sapiens
  CDR3 for alpha chain variable domain of TCR clone 9814 (TRAV3, TRAJ15)
CAVRDQAGTALIF

SEQ ID NO: 19628 - protein, 13 aa, Homo sapiens
  CDR3 for beta chain variable domain of TCR clone 9814 (TRBV2, TRBJ2-7)
CASSVGGSGEQYF

SEQ ID NO: 19629 - protein, 14 aa, Homo sapiens
  CDR3 for alpha chain variable domain of TCR clone 9815 (TRAV12-3, TRAJ10)
SHLPLTGGGNKLTF

SEQ ID NO: 19630 - protein, 19 aa, Homo sapiens
  CDR3 for beta chain variable domain of TCR clone 9815 (TRBV7-2, TRBJ2-3)
CASSFLSRNWGGGTDTQYF

SEQ ID NO: 19631 - protein, 10 aa, Homo sapiens
  CDR3 for alpha chain variable domain of TCR clone 9816 (TRAV12-1, TRAJ23)
CVVSGGKLIF

SEQ ID NO: 19632 - protein, 15 aa, Homo sapiens
  CDR3 for beta chain variable domain of TCR clone 9816 (TRBV6-5, TRBJ2-1)
CASSSTSSFYNEQFF

SEQ ID NO: 19633 - protein, 14 aa, Homo sapiens
  CDR3 for alpha chain variable domain of TCR clone 9817 (TRAV12-1, TRAJ17)
RVVNYKAAGNKLTF

SEQ ID NO: 19634 - protein, 17 aa, Homo sapiens
  CDR3 for beta chain variable domain of TCR clone 9817 (TRBV20-1, TRBJ2-1)
CSASSSGLAGSYNEQFF

SEQ ID NO: 19635 - protein, 13 aa, Homo sapiens
  CDR3 for alpha chain variable domain of TCR clone 9818 (TRAV12-3, TRAJ4)
CATTSGGYNKLIF

SEQ ID NO: 19636 - protein, 15 aa, Homo sapiens
  CDR3 for beta chain variable domain of TCR clone 9818 (TRBV7-2, TRBJ2-3)
CASRLAGGSTDTQYF

SEQ ID NO: 19637 - protein, 14 aa, Homo sapiens
  CDR3 for alpha chain variable domain of TCR clone 9819 (TRAV9-2, TRAJ39)
CALYIYNAGNMLTF

SEQ ID NO: 19638 - protein, 13 aa, Homo sapiens
  CDR3 for beta chain variable domain of TCR clone 9819 (TRBV12-4, TRBJ2-7)
CASSRDSGYEQYF

SEQ ID NO: 19639 - protein, 14 aa, Homo sapiens
  CDR3 for alpha chain variable domain of TCR clone 9820 (TRAV13-1, TRAJ41)
CAARSGDSGYALNF

SEQ ID NO: 19640 - protein, 15 aa, Homo sapiens
  CDR3 for beta chain variable domain of TCR clone 9820 (TRBV29-1, TRBJ2-5)
CSVAGASGTQETQYF

SEQ ID NO: 19641 - protein, 14 aa, Homo sapiens
  CDR3 for alpha chain variable domain of TCR clone 9821 (TRAV12-3, TRAJ10)
SHLPLTGGGNKLTF

SEQ ID NO: 19642 - protein, 14 aa, Homo sapiens
  CDR3 for beta chain variable domain of TCR clone 9821 (TRBV18, TRBJ2-3)
CASSPRTSTDTQYF

SEQ ID NO: 19643 - protein, 11 aa, Homo sapiens
  CDR3 for alpha chain variable domain of TCR clone 9822 (TRAV2, TRAJ13)
CASGGYQKVTF

SEQ ID NO: 19644 - protein, 13 aa, Homo sapiens
  CDR3 for beta chain variable domain of TCR clone 9822 (TRBV9, TRBJ2-3)
CASSVGGRDTQYF

SEQ ID NO: 19645 - protein, 14 aa, Homo sapiens
  CDR3 for alpha chain variable domain of TCR clone 9823 (TRAV3, TRAJ30)
CAVRDIGRDDKIIF

SEQ ID NO: 19646 - protein, 14 aa, Homo sapiens
  CDR3 for beta chain variable domain of TCR clone 9823 (TRBV20-1, TRBJ2-3)
CSARGGTSTDTQYF

SEQ ID NO: 19647 - protein, 13 aa, Homo sapiens
  CDR3 for alpha chain variable domain of TCR clone 9824 (TRAV3, TRAJ27)
CAVRPLGAGKSTS

SEQ ID NO: 19648 - protein, 13 aa, Homo sapiens
  CDR3 for beta chain variable domain of TCR clone 9824 (TRBV7-9, TRBJ2-3)
CASSPGSTDTQYF

SEQ ID NO: 19649 - protein, 18 aa, Homo sapiens
  CDR3 for alpha chain variable domain of TCR clone 9825 (TRAV13-1, TRAJ52)
CAAKNPNAGGTSYGKLTF

SEQ ID NO: 19650 - protein, 15 aa, Homo sapiens
  CDR3 for beta chain variable domain of TCR clone 9825 (TRBV11-3, TRBJ2-3)
CASLKDGREGDTQYF

SEQ ID NO: 19651 - protein, 14 aa, Homo sapiens
  CDR3 for alpha chain variable domain of TCR clone 9826 (TRAV13-2, TRAJ17)
CAENSKAAGNKLTF

SEQ ID NO: 19652 - protein, 15 aa, Homo sapiens
  CDR3 for beta chain variable domain of TCR clone 9826 (TRBV20-1, TRBJ2-7)
CSARDRVSGMDEQYF

SEQ ID NO: 19653 - protein, 13 aa, Homo sapiens
  CDR3 for alpha chain variable domain of TCR clone 9827 (TRAV12-3, TRAJ33)
CAMSVNSNYQLIC

SEQ ID NO: 19654 - protein, 13 aa, Homo sapiens
  CDR3 for beta chain variable domain of TCR clone 9827 (TRBV7-2, TRBJ2-2)
CASSLAVTGELFF

SEQ ID NO: 19655 - protein, 14 aa, Homo sapiens
  CDR3 for alpha chain variable domain of TCR clone 9828 (TRAV3, TRAJ13)
CAVSYSGGYQKVTF

SEQ ID NO: 19656 - protein, 15 aa, Homo sapiens
  CDR3 for beta chain variable domain of TCR clone 9828 (TRBV7-2, TRBJ1-3)
CASSLQAGGENTIYF

SEQ ID NO: 19657 - protein, 14 aa, Homo sapiens
  CDR3 for alpha chain variable domain of TCR clone 9829 (TRAV8-6, TRAJ12)
CAVKAADSSYKLIF

SEQ ID NO: 19658 - protein, 15 aa, Homo sapiens
  CDR3 for beta chain variable domain of TCR clone 9829 (TRBV5-1, TRBJ2-5)
CASSLGLAEQETRYF

SEQ ID NO: 19659 - protein, 15 aa, Homo sapiens
  CDR3 for alpha chain variable domain of TCR clone 9830 (TRAV2, TRAJ9)
CAVEDRGTGGFKTIL

SEQ ID NO: 19660 - protein, 16 aa, Homo sapiens
  CDR3 for beta chain variable domain of TCR clone 9830 (TRBV24-1, TRBJ2-3)
CATSDPGTGATDTQYF

SEQ ID NO: 19661 - protein, 12 aa, Homo sapiens
  CDR3 for alpha chain variable domain of TCR clone 9831 (TRAV13-1, TRAJ21)
CAAKEGFNKFYF

SEQ ID NO: 19662 - protein, 13 aa, Homo sapiens
  CDR3 for beta chain variable domain of TCR clone 9831 (TRBV7-2, TRBJ2-5)
CQQLVRGGETQYF

SEQ ID NO: 19663 - protein, 14 aa, Homo sapiens
  CDR3 for alpha chain variable domain of TCR clone 9832 (TRAV26-1, TRAJ39)
CIVRGSRAGNMLTF

SEQ ID NO: 19664 - protein, 15 aa, Homo sapiens
  CDR3 for beta chain variable domain of TCR clone 9832 (TRBV7-9, TRBJ1-5)
CASSQGHQPNQTQHF

SEQ ID NO: 19665 - protein, 14 aa, Homo sapiens
  CDR3 for alpha chain variable domain of TCR clone 9833 (TRAV2, TRAJ9)
CAVEDRSGGFKTIF

SEQ ID NO: 19666 - protein, 15 aa, Homo sapiens
  CDR3 for beta chain variable domain of TCR clone 9833 (TRBV6-3, TRBJ2-7)
CASSSPGTVFYEQYF

SEQ ID NO: 19667 - protein, 12 aa, Homo sapiens
  CDR3 for alpha chain variable domain of TCR clone 9834 (TRAV26-1, TRAJ17)
CIVRSAGNKLTF

SEQ ID NO: 19668 - protein, 11 aa, Homo sapiens
  CDR3 for beta chain variable domain of TCR clone 9834 (TRBV11-2, TRBJ2-2)
CASSLPGELFF

SEQ ID NO: 19669 - protein, 13 aa, Homo sapiens
  CDR3 for alpha chain variable domain of TCR clone 9835 (TRAV13-2, TRAJ21)
CAENVGQLQQILL

SEQ ID NO: 19670 - protein, 16 aa, Homo sapiens
  CDR3 for beta chain variable domain of TCR clone 9835 (TRBV3-1, TRBJ2-5)
CASSQDWASGQETQYF

SEQ ID NO: 19671 - protein, 14 aa, Homo sapiens
  CDR3 for alpha chain variable domain of TCR clone 9836 (TRAV8-1, TRAJ27)
CAVNVGTNAGKSTF

SEQ ID NO: 19672 - protein, 15 aa, Homo sapiens
  CDR3 for beta chain variable domain of TCR clone 9836 (TRBV11-3, TRBJ2-2)
CASSLGGRPTGELFF

SEQ ID NO: 19673 - protein, 14 aa, Homo sapiens
  CDR3 for alpha chain variable domain of TCR clone 9837 (TRAV1-2, TRAJ8)
CAVREDTGFQKLVF

SEQ ID NO: 19674 - protein, 15 aa, Homo sapiens
  CDR3 for beta chain variable domain of TCR clone 9837 (TRBV6-3, TRBJ2-7)
CASSSPGTVFYEQYS

SEQ ID NO: 19675 - protein, 14 aa, Homo sapiens
  CDR3 for alpha chain variable domain of TCR clone 9838 (TRAV2, TRAJ9)
CAVEDRSGGFKTIF

SEQ ID NO: 19676 - protein, 12 aa, Homo sapiens
  CDR3 for beta chain variable domain of TCR clone 9838 (TRBV11-2, TRBJ2-2)
CASSLGGGELFF

SEQ ID NO: 19677 - protein, 16 aa, Homo sapiens
  CDR3 for alpha chain variable domain of TCR clone 9839 (TRAV38-2/DV8, TRAJ44)
CAYRSARGGTASKLTF

SEQ ID NO: 19678 - protein, 16 aa, Homo sapiens
  CDR3 for beta chain variable domain of TCR clone 9839 (TRBV4-2, TRBJ2-3)
CASSLSSGGHTDTQYF

SEQ ID NO: 19679 - protein, 14 aa, Homo sapiens
  CDR3 for alpha chain variable domain of TCR clone 9840 (TRAV41, TRAJ54)
CAVRSNQGAQKLVF

SEQ ID NO: 19680 - protein, 15 aa, Homo sapiens
  CDR3 for beta chain variable domain of TCR clone 9840 (TRBV20-1, TRBJ2-7)
CSAESGTSGAYEQYF

SEQ ID NO: 19681 - protein, 13 aa, Homo sapiens
  CDR3 for alpha chain variable domain of TCR clone 9841 (TRAV12-2, TRAJ45)
CAARGGGADGLTF

SEQ ID NO: 19682 - protein, 13 aa, Homo sapiens
  CDR3 for beta chain variable domain of TCR clone 9841 (TRBV6-5, TRBJ2-5)
CASRTAGRETQYF

SEQ ID NO: 19683 - protein, 11 aa, Homo sapiens
  CDR3 for alpha chain variable domain of TCR clone 9842 (TRAV2, TRAJ13)
CASGGYQKVTF

SEQ ID NO: 19684 - protein, 16 aa, Homo sapiens
  CDR3 for beta chain variable domain of TCR clone 9842 (TRBV6-1, TRBJ2-5)
CASSETLDRGAEAQYF

SEQ ID NO: 19685 - protein, 17 aa, Homo sapiens
  CDR3 for alpha chain variable domain of TCR clone 9843 (TRAV3, TRAJ6)
CAVRDDPRAGGSYIPTF

SEQ ID NO: 19686 - protein, 14 aa, Homo sapiens
  CDR3 for beta chain variable domain of TCR clone 9843 (TRBV7-2, TRBJ2-7)
CASSPKTSFYEQYF

SEQ ID NO: 19687 - protein, 12 aa, Homo sapiens
  CDR3 for alpha chain variable domain of TCR clone 9844 (TRAV12-1, TRAJ40)
CVVYSGTYKYVF

SEQ ID NO: 19688 - protein, 18 aa, Homo sapiens
  CDR3 for beta chain variable domain of TCR clone 9844 (TRBV11-2, TRBJ2-3)
CASSLGGASRGAPNTQYF

SEQ ID NO: 19689 - protein, 19 aa, Homo sapiens
  CDR3 for alpha chain variable domain of TCR clone 9845 (TRAV26-1, TRAJ52)
CIVRAHRNAGGTSYGKLTF

SEQ ID NO: 19690 - protein, 14 aa, Homo sapiens
  CDR3 for beta chain variable domain of TCR clone 9845 (TRBV7-6, TRBJ2-3)
CASSLGTVTDTQYF

SEQ ID NO: 19691 - protein, 17 aa, Homo sapiens
  CDR3 for alpha chain variable domain of TCR clone 9846 (TRAV23/DV6, TRAJ57)
CAASSTLSQGGSEKLVF

SEQ ID NO: 19692 - protein, 13 aa, Homo sapiens
  CDR3 for beta chain variable domain of TCR clone 9846 (TRBV15, TRBJ1-6)
CATSGGLNSPLHF

SEQ ID NO: 19693 - protein, 12 aa, Homo sapiens
  CDR3 for alpha chain variable domain of TCR clone 9847 (TRAV2, TRAJ31)
CAVEDNNARLMF

SEQ ID NO: 19694 - protein, 13 aa, Homo sapiens
  CDR3 for beta chain variable domain of TCR clone 9847 (TRBV7-3, TRBJ1-1)
CASSQDWGAEAFF

SEQ ID NO: 19695 - protein, 15 aa, Homo sapiens
  CDR3 for alpha chain variable domain of TCR clone 9848 (TRAV9-2, TRAJ57)
CALRPNQGGSEKLVF

SEQ ID NO: 19696 - protein, 17 aa, Homo sapiens
  CDR3 for beta chain variable domain of TCR clone 9848 (TRBV20-1, TRBJ2-1)
CSAPPRLAGTRYNEQFF

SEQ ID NO: 19697 - protein, 14 aa, Homo sapiens
  CDR3 for alpha chain variable domain of TCR clone 9849 (TRAV12-2, TRAJ13)
CAMKKTGGYQKVTF

SEQ ID NO: 19698 - protein, 15 aa, Homo sapiens
  CDR3 for beta chain variable domain of TCR clone 9849 (TRBV27, TRBJ2-1)
CASSNGGGSSNEQFF

SEQ ID NO: 19699 - protein, 14 aa, Homo sapiens
  CDR3 for alpha chain variable domain of TCR clone 9850 (TRAV1-2, TRAJ16)
CAVNRFSDGQKLLF

SEQ ID NO: 19700 - protein, 13 aa, Homo sapiens
  CDR3 for beta chain variable domain of TCR clone 9850 (TRBV20-1, TRBJ1-5)
CSASQQVVQPQHF

SEQ ID NO: 19701 - protein, 12 aa, Homo sapiens
  CDR3 for alpha chain variable domain of TCR clone 9851 (TRAV1-1, TRAJ23)
CAVTNQGGKLIF

SEQ ID NO: 19702 - protein, 15 aa, Homo sapiens
  CDR3 for beta chain variable domain of TCR clone 9851 (TRBV3-1, TRBJ2-7)
CASSQVRQGAYEQYF

SEQ ID NO: 19703 - protein, 15 aa, Homo sapiens
  CDR3 for alpha chain variable domain of TCR clone 9852 (TRAV9-2, TRAJ49)
CALSPPDHTGNQFYF

SEQ ID NO: 19704 - protein, 13 aa, Homo sapiens
  CDR3 for beta chain variable domain of TCR clone 9852 (TRBV29-1, TRBJ2-5)
CSVGGTSAETQYF

SEQ ID NO: 19705 - protein, 15 aa, Homo sapiens
  CDR3 for alpha chain variable domain of TCR clone 9853 (TRAV3, TRAJ5)
CAVRGLDTGRRALTF

SEQ ID NO: 19706 - protein, 13 aa, Homo sapiens
  CDR3 for beta chain variable domain of TCR clone 9853 (TRBV12-4, TRBJ2-7)
CASSPTETYEQYF

SEQ ID NO: 19707 - protein, 17 aa, Homo sapiens
  CDR3 for alpha chain variable domain of TCR clone 9854 (TRAV8-6, TRAJ8)
CAVKEGIENTGFQKLVF

SEQ ID NO: 19708 - protein, 15 aa, Homo sapiens
  CDR3 for beta chain variable domain of TCR clone 9854 (TRBV7-2, TRBJ2-1)
CASSSGLAGGNEQFF

SEQ ID NO: 19709 - protein, 17 aa, Homo sapiens
  CDR3 for alpha chain variable domain of TCR clone 9855 (TRAV12-2, TRAJ53)
CAPLTDSQEGSNYKLTF

SEQ ID NO: 19710 - protein, 16 aa, Homo sapiens
  CDR3 for beta chain variable domain of TCR clone 9855 (TRBV20-1, TRBJ2-3)
CSAVRDRGPIADTQYF

SEQ ID NO: 19711 - protein, 14 aa, Homo sapiens
  CDR3 for alpha chain variable domain of TCR clone 9856 (TRAV25, TRAJ27)
CAGEHLTNAGKSTF

SEQ ID NO: 19712 - protein, 15 aa, Homo sapiens
  CDR3 for beta chain variable domain of TCR clone 9856 (TRBV15, TRBJ1-1)
CATSLQGGRNTEAFF

SEQ ID NO: 19713 - protein, 14 aa, Homo sapiens
  CDR3 for alpha chain variable domain of TCR clone 9857 (TRAV12-2, TRAJ13)
CAVKKTGGYQKVTF

SEQ ID NO: 19714 - protein, 12 aa, Homo sapiens
  CDR3 for beta chain variable domain of TCR clone 9857 (TRBV7-8, TRBJ2-7)
CASSLGDREQYF

SEQ ID NO: 19715 - protein, 16 aa, Homo sapiens
  CDR3 for alpha chain variable domain of TCR clone 9858 (TRAV3, TRAJ10)
CAVRDMRAGGGNKLTF

SEQ ID NO: 19716 - protein, 16 aa, Homo sapiens
  CDR3 for beta chain variable domain of TCR clone 9858 (TRBV5-7, TRBJ1-5)
CASSLQQDREYQPQHF

SEQ ID NO: 19717 - protein, 18 aa, Homo sapiens
  CDR3 for alpha chain variable domain of TCR clone 9859 (TRAV21, TRAJ52)
CAVRPSPAGGTSFGKLTF

SEQ ID NO: 19718 - protein, 17 aa, Homo sapiens
  CDR3 for beta chain variable domain of TCR clone 9859 (TRBV13, TRBJ2-3)
CASSLSRVAGGRNTQYF

SEQ ID NO: 19719 - protein, 15 aa, Homo sapiens
  CDR3 for alpha chain variable domain of TCR clone 9860 (TRAV13-1, TRAJ48)
CAASTGGFGNEKLTF

SEQ ID NO: 19720 - protein, 14 aa, Homo sapiens
  CDR3 for beta chain variable domain of TCR clone 9860 (TRBV24-1, TRBJ2-2)
CATGGLGNTGELFF

SEQ ID NO: 19721 - protein, 13 aa, Homo sapiens
  CDR3 for alpha chain variable domain of TCR clone 9861 (TRAV3, TRAJ15)
CAVRDQTGTALIF

SEQ ID NO: 19722 - protein, 15 aa, Homo sapiens
  CDR3 for beta chain variable domain of TCR clone 9861 (TRBV11-1, TRBJ2-7)
CASSLNYGASYEQYF

SEQ ID NO: 19723 - protein, 17 aa, Homo sapiens
  CDR3 for alpha chain variable domain of TCR clone 9862 (TRAV1-1, TRAJ4)
CAPYNKLIFGAGTRLAV

SEQ ID NO: 19724 - protein, 16 aa, Homo sapiens
  CDR3 for beta chain variable domain of TCR clone 9862 (TRBV7-3, TRBJ2-2)
CASSLKRGTLSGELFF

SEQ ID NO: 19725 - protein, 18 aa, Homo sapiens
  CDR3 for alpha chain variable domain of TCR clone 9863 (TRAV13-1, TRAJ45)
CAASIGVYSGGGADGLTF

SEQ ID NO: 19726 - protein, 13 aa, Homo sapiens
  CDR3 for beta chain variable domain of TCR clone 9863 (TRBV27, TRBJ1-1)
CASSYATNTEAFF

SEQ ID NO: 19727 - protein, 14 aa, Homo sapiens
  CDR3 for alpha chain variable domain of TCR clone 9864 (TRAV12-2, TRAJ13)
CAVKKTGGYQKVTF

SEQ ID NO: 19728 - protein, 16 aa, Homo sapiens
  CDR3 for beta chain variable domain of TCR clone 9864 (TRBV7-3, TRBJ2-2)
CASSLKRGTLSGELFF

SEQ ID NO: 19729 - protein, 19 aa, Homo sapiens
  CDR3 for alpha chain variable domain of TCR clone 9865 (TRAV2, TRAJ37)
CAPWLWQHRQTNLWARDNF

SEQ ID NO: 19730 - protein, 19 aa, Homo sapiens
  CDR3 for beta chain variable domain of TCR clone 9865 (TRBV20-1, TRBJ2-7)
CSARGLVEGTSGRGNEQYF

SEQ ID NO: 19731 - protein, 13 aa, Homo sapiens
  CDR3 for alpha chain variable domain of TCR clone 9866 (TRAV13-1, TRAJ8)
CAARNTGFQKLVF

SEQ ID NO: 19732 - protein, 13 aa, Homo sapiens
  CDR3 for beta chain variable domain of TCR clone 9866 (TRBV19, TRBJ2-7)
CASSMGSWPEQYF

SEQ ID NO: 19733 - protein, 10 aa, Homo sapiens
  CDR3 for alpha chain variable domain of TCR clone 9867 (TRAV16, TRAJ22)
SAMYLRQLTF

SEQ ID NO: 19734 - protein, 15 aa, Homo sapiens
  CDR3 for beta chain variable domain of TCR clone 9867 (TRBV7-9, TRBJ1-6)
CASSSPGCGNSPLHF

SEQ ID NO: 19735 - protein, 16 aa, Homo sapiens
  CDR3 for alpha chain variable domain of TCR clone 9868 (TRAV30, TRAJ24)
CGTEIVDADSWGKFQF

SEQ ID NO: 19736 - protein, 14 aa, Homo sapiens
  CDR3 for beta chain variable domain of TCR clone 9868 (TRBV12-5, TRBJ2-5)
CARGSRTHQETQYF

SEQ ID NO: 19737 - protein, 14 aa, Homo sapiens
  CDR3 for alpha chain variable domain of TCR clone 9869 (TRAV35, TRAJ22)
CAWLRPGSARQLTF

SEQ ID NO: 19738 - protein, 15 aa, Homo sapiens
  CDR3 for beta chain variable domain of TCR clone 9869 (TRBV12-4, TRBJ2-5)
CASSPPTGLQETQYF

SEQ ID NO: 19739 - protein, 14 aa, Homo sapiens
  CDR3 for alpha chain variable domain of TCR clone 9870 (TRAV12-2, TRAJ17)
CAGLFKAAGNKLTF

SEQ ID NO: 19740 - protein, 17 aa, Homo sapiens
  CDR3 for beta chain variable domain of TCR clone 9870 (TRBV20-1, TRBJ2-2)
CSASGSGQGGLTGELFF

SEQ ID NO: 19741 - protein, 13 aa, Homo sapiens
  CDR3 for alpha chain variable domain of TCR clone 9871 (TRAV16, TRAJ34)
CALRTWNTDKLIF

SEQ ID NO: 19742 - protein, 16 aa, Homo sapiens
  CDR3 for beta chain variable domain of TCR clone 9871 (TRBV2, TRBJ1-3)
CASSERGVNSGNTIYF

SEQ ID NO: 19743 - protein, 14 aa, Homo sapiens
  CDR3 for alpha chain variable domain of TCR clone 9872 (TRAV12-2, TRAJ44)
CAVNPAGTASKLTF

SEQ ID NO: 19744 - protein, 13 aa, Homo sapiens
  CDR3 for beta chain variable domain of TCR clone 9872 (TRBV20-1, TRBJ1-6)
CSAPVGVGSPLHF

SEQ ID NO: 19745 - protein, 12 aa, Homo sapiens
  CDR3 for alpha chain variable domain of TCR clone 9873 (TRAV13-1, TRAJ48)
CAANFGNEKLTF

SEQ ID NO: 19746 - protein, 20 aa, Homo sapiens
  CDR3 for beta chain variable domain of TCR clone 9873 (TRBV3-1, TRBJ2-6)
CASSPRPGLEGGAGANVLTF

SEQ ID NO: 19747 - protein, 12 aa, Homo sapiens
  CDR3 for alpha chain variable domain of TCR clone 9874 (TRAV9-2, TRAJ57)
CALRSGSEKLVF

SEQ ID NO: 19748 - protein, 15 aa, Homo sapiens
  CDR3 for beta chain variable domain of TCR clone 9874 (TRBV15, TRBJ1-1)
CATSLQGGRNTEAFF

SEQ ID NO: 19749 - protein, 14 aa, Homo sapiens
  CDR3 for alpha chain variable domain of TCR clone 9875 (TRAV12-3, TRAJ10)
SHLPLTGGGNKLIF

SEQ ID NO: 19750 - protein, 14 aa, Homo sapiens
  CDR3 for beta chain variable domain of TCR clone 9875 (TRBV19, TRBJ2-1)
CASPTFVLSGEQFF

SEQ ID NO: 19751 - protein, 14 aa, Homo sapiens
  CDR3 for alpha chain variable domain of TCR clone 9876 (TRAV26-1, TRAJ38)
CIADNAGNNRKLIW

SEQ ID NO: 19752 - protein, 15 aa, Homo sapiens
  CDR3 for beta chain variable domain of TCR clone 9876 (TRBV11-2, TRBJ2-1)
CASSLGPDSYNEQFF

SEQ ID NO: 19753 - protein, 13 aa, Homo sapiens
  CDR3 for alpha chain variable domain of TCR clone 9877 (TRAV2, TRAJ40)
CAVVTSGTYKYIF

SEQ ID NO: 19754 - protein, 15 aa, Homo sapiens
  CDR3 for beta chain variable domain of TCR clone 9877 (TRBV20-1, TRBJ2-7)
CSARDRVSGMDEQYF

SEQ ID NO: 19755 - protein, 15 aa, Homo sapiens
  CDR3 for alpha chain variable domain of TCR clone 9878 (TRAV8-3, TRAJ40)
CAAPSLGSGTYKYIF

SEQ ID NO: 19756 - protein, 13 aa, Homo sapiens
  CDR3 for beta chain variable domain of TCR clone 9878 (TRBV10-3, TRBJ2-7)
CASKLAVNYEQYF

SEQ ID NO: 19757 - protein, 12 aa, Homo sapiens
  CDR3 for alpha chain variable domain of TCR clone 9879 (TRAV6, TRAJ3)
CALYSSASKIIF

SEQ ID NO: 19758 - protein, 12 aa, Homo sapiens
  CDR3 for beta chain variable domain of TCR clone 9879 (TRBV7-2, TRBJ2-3)
CASSLIGETQYF

SEQ ID NO: 19759 - protein, 13 aa, Homo sapiens
  CDR3 for alpha chain variable domain of TCR clone 9880 (TRAV27, TRAJ45)
CRSSGGGADGLTF

SEQ ID NO: 19760 - protein, 17 aa, Homo sapiens
  CDR3 for beta chain variable domain of TCR clone 9880 (TRBV11-2, TRBJ2-1)
CASSLYPPGVEYNEQLF

SEQ ID NO: 19761 - protein, 14 aa, Homo sapiens
  CDR3 for alpha chain variable domain of TCR clone 9881 (TRAV1-2, TRAJ16)
CAVNRFSDGQKLLF

SEQ ID NO: 19762 - protein, 15 aa, Homo sapiens
  CDR3 for beta chain variable domain of TCR clone 9881 (TRBV9, TRBJ1-6)
CASSVAGTGGSPLHF

SEQ ID NO: 19763 - protein, 15 aa, Homo sapiens
  CDR3 for alpha chain variable domain of TCR clone 9882 (TRAV25, TRAJ52)
CAGTSGGTSYGKLTF

SEQ ID NO: 19764 - protein, 15 aa, Homo sapiens
  CDR3 for beta chain variable domain of TCR clone 9882 (TRBV18, TRBJ2-7)
CASSPSSTGNYEQYF

SEQ ID NO: 19765 - protein, 14 aa, Homo sapiens
  CDR3 for alpha chain variable domain of TCR clone 9883 (TRAV13-2, TRAJ17)
CAENGKAAGNKLTF

SEQ ID NO: 19766 - protein, 15 aa, Homo sapiens
  CDR3 for beta chain variable domain of TCR clone 9883 (TRBV14, TRBJ1-1)
CASSQEGMGFTEAFF

SEQ ID NO: 19767 - protein, 14 aa, Homo sapiens
  CDR3 for alpha chain variable domain of TCR clone 9884 (TRAV13-1, TRAJ35)
CAASKGGFGNVLHC

SEQ ID NO: 19768 - protein, 13 aa, Homo sapiens
  CDR3 for beta chain variable domain of TCR clone 9884 (TRBV7-3, TRBJ1-1)
CASRQDWGAEAFF

SEQ ID NO: 19769 - protein, 14 aa, Homo sapiens
  CDR3 for alpha chain variable domain of TCR clone 9885 (TRAV1-2, TRAJ8)
CAVREDTGFQKLVF

SEQ ID NO: 19770 - protein, 15 aa, Homo sapiens
  CDR3 for beta chain variable domain of TCR clone 9885 (TRBV10-3, TRBJ1-1)
CAISEAGTGGTEAFF

SEQ ID NO: 19771 - protein, 23 aa, Homo sapiens
  CDR3 for alpha chain variable domain of TCR clone 9886 (TRAV26-1, TRAJ38)
CIADNAGNNHIQNPDPAVYHLRD

SEQ ID NO: 19772 - protein, 13 aa, Homo sapiens
  CDR3 for beta chain variable domain of TCR clone 9886 (TRBV20-1, TRBJ1-1)
CSARGGGNTEAFF

SEQ ID NO: 19773 - protein, 10 aa, Homo sapiens
  CDR3 for alpha chain variable domain of TCR clone 9887 (TRAV8-4, TRAJ39)
CAVSGNMLTF

SEQ ID NO: 19774 - protein, 14 aa, Homo sapiens
  CDR3 for beta chain variable domain of TCR clone 9887 (TRBV20-1, TRBJ1-1)
CSAQTRIGGTEAFF

SEQ ID NO: 19775 - protein, 16 aa, Homo sapiens
  CDR3 for alpha chain variable domain of TCR clone 9888 (TRAV12-3, TRAJ53)
CAMSPGSGGSNYKLTF

SEQ ID NO: 19776 - protein, 13 aa, Homo sapiens
  CDR3 for beta chain variable domain of TCR clone 9888 (TRBV7-9, TRBJ1-2)
CASSLKQNYGYTF

SEQ ID NO: 19777 - protein, 14 aa, Homo sapiens
  CDR3 for alpha chain variable domain of TCR clone 9889 (TRAV8-6, TRAJ54)
CAVSDFQGAQKLVF

SEQ ID NO: 19778 - protein, 14 aa, Homo sapiens
  CDR3 for beta chain variable domain of TCR clone 9889 (TRBV18, TRBJ2-7)
CASSPRGGAYEQYF

SEQ ID NO: 19779 - protein, 15 aa, Homo sapiens
  CDR3 for alpha chain variable domain of TCR clone 9890 (TRAV12-1, TRAJ9)
CVVSFGDTGGFKTIF

SEQ ID NO: 19780 - protein, 16 aa, Homo sapiens
  CDR3 for beta chain variable domain of TCR clone 9890 (TRBV27, TRBJ2-5)
CASSFGPGGTKETQYF

SEQ ID NO: 19781 - protein, 13 aa, Homo sapiens
  CDR3 for alpha chain variable domain of TCR clone 9891 (TRAV13-1, TRAJ6)
CAASKGGSYIPTF

SEQ ID NO: 19782 - protein, 15 aa, Homo sapiens
  CDR3 for beta chain variable domain of TCR clone 9891 (TRBV12-4, TRBJ1-1)
CASSGRTGMNTEAFF

SEQ ID NO: 19783 - protein, 14 aa, Homo sapiens
  CDR3 for alpha chain variable domain of TCR clone 9892 (TRAV38-1, TRAJ40)
CALRPTSGTYRYIF

SEQ ID NO: 19784 - protein, 14 aa, Homo sapiens
  CDR3 for beta chain variable domain of TCR clone 9892 (TRBV25-1, TRBJ1-1)
CASTHLGGNTEAFF

SEQ ID NO: 19785 - protein, 15 aa, Homo sapiens
  CDR3 for alpha chain variable domain of TCR clone 9893 (TRAV26-1, TRAJ29)
FIVRVEGSGNTPLVF

SEQ ID NO: 19786 - protein, 14 aa, Homo sapiens
  CDR3 for beta chain variable domain of TCR clone 9893 (TRBV18, TRBJ2-5)
CASSPGVSQETQYF

SEQ ID NO: 19787 - protein, 12 aa, Homo sapiens
  CDR3 for alpha chain variable domain of TCR clone 9894 (TRAV3, TRAJ20)
CAVRDPDYKLSF

SEQ ID NO: 19788 - protein, 14 aa, Homo sapiens
  CDR3 for beta chain variable domain of TCR clone 9894 (TRBV4-2, TRBJ2-1)
CASGPDRAYNEQFF

SEQ ID NO: 19789 - protein, 13 aa, Homo sapiens
  CDR3 for alpha chain variable domain of TCR clone 9895 (TRAV8-3, TRAJ48)
CAVVPFGNEKLTF

SEQ ID NO: 19790 - protein, 15 aa, Homo sapiens
  CDR3 for beta chain variable domain of TCR clone 9895 (TRBV11-2, TRBJ2-1)
CASSSPATRYNEQFF

SEQ ID NO: 19791 - protein, 14 aa, Homo sapiens
  CDR3 for alpha chain variable domain of TCR clone 9896 (TRAV3, TRAJ7)
CAVREEEREQQTRF

SEQ ID NO: 19792 - protein, 12 aa, Homo sapiens
  CDR3 for beta chain variable domain of TCR clone 9896 (TRBV7-8, TRBJ2-7)
CASSLGDREQYF

SEQ ID NO: 19793 - protein, 16 aa, Homo sapiens
  CDR3 for alpha chain variable domain of TCR clone 9897 (TRAV3, TRAJ10)
CAVRDMRAGGGNKLTF

SEQ ID NO: 19794 - protein, 16 aa, Homo sapiens
  CDR3 for beta chain variable domain of TCR clone 9897 (TRBV6-1, TRBJ2-5)
CASSETLDRGAETQYF

SEQ ID NO: 19795 - protein, 14 aa, Homo sapiens
  CDR3 for alpha chain variable domain of TCR clone 9898 (TRAV1-1, TRAJ11)
CDRIMNSGYSTLTF

SEQ ID NO: 19796 - protein, 16 aa, Homo sapiens
  CDR3 for beta chain variable domain of TCR clone 9898 (TRBV6-5, TRBJ1-6)
CASSYSGESYNSPLHF

SEQ ID NO: 19797 - protein, 12 aa, Homo sapiens
  CDR3 for alpha chain variable domain of TCR clone 9899 (TRAV21, TRAJ33)
CAKMGSNYQLIW

SEQ ID NO: 19798 - protein, 14 aa, Homo sapiens
  CDR3 for beta chain variable domain of TCR clone 9899 (TRBV2, TRBJ2-7)
CASSLTSGGYEQYF

SEQ ID NO: 19799 - protein, 14 aa, Homo sapiens
  CDR3 for alpha chain variable domain of TCR clone 9900 (TRAV13-1, TRAJ35)
CAASKGGFGNVLHC

SEQ ID NO: 19800 - protein, 13 aa, Homo sapiens
  CDR3 for beta chain variable domain of TCR clone 9900 (TRBV7-3, TRBJ1-1)
CASSQDWRAEAFF

SEQ ID NO: 19801 - protein, 14 aa, Homo sapiens
  CDR3 for alpha chain variable domain of TCR clone 9901 (TRAV13-1, TRAJ24)
CAASPADSWGKFQF

SEQ ID NO: 19802 - protein, 13 aa, Homo sapiens
  CDR3 for beta chain variable domain of TCR clone 9901 (TRBV19, TRBJ2-2)
CASSQRSTGELFF

SEQ ID NO: 19803 - protein, 17 aa, Homo sapiens
  CDR3 for alpha chain variable domain of TCR clone 9902 (TRAV3, TRAJ6)
CAVRDGPRAGGSYIPTF

SEQ ID NO: 19804 - protein, 16 aa, Homo sapiens
  CDR3 for beta chain variable domain of TCR clone 9902 (TRBV7-3, TRBJ2-2)
CASSLKRGTLSGELFF

SEQ ID NO: 19805 - protein, 18 aa, Homo sapiens
  CDR3 for alpha chain variable domain of TCR clone 9903 (TRAV21, TRAJ52)
CAVRPSPAGGTSYGKLTF

SEQ ID NO: 19806 - protein, 17 aa, Homo sapiens
  CDR3 for beta chain variable domain of TCR clone 9903 (TRBV13, TRBJ2-3)
CASSLSRVAGGRDTQYF

SEQ ID NO: 19807 - protein, 13 aa, Homo sapiens
  CDR3 for alpha chain variable domain of TCR clone 9904 (TRAV8-3, TRAJ28)
CAVGAVGRYQLTF

SEQ ID NO: 19808 - protein, 14 aa, Homo sapiens
  CDR3 for beta chain variable domain of TCR clone 9904 (TRBV7-2, TRBJ2-7)
CASRSQGAAYEQYF

SEQ ID NO: 19809 - protein, 14 aa, Homo sapiens
  CDR3 for alpha chain variable domain of TCR clone 9905 (TRAV10, TRAJ39)
CVVSAGGAGNMLTF

SEQ ID NO: 19810 - protein, 16 aa, Homo sapiens
  CDR3 for beta chain variable domain of TCR clone 9905 (TRBV2, TRBJ2-7)
CASSEPWTGPSYEQYF

SEQ ID NO: 19811 - protein, 14 aa, Homo sapiens
  CDR3 for alpha chain variable domain of TCR clone 9906 (TRAV26-1, TRAJ39)
CIVRGSRSGNMLTF

SEQ ID NO: 19812 - protein, 15 aa, Homo sapiens
  CDR3 for beta chain variable domain of TCR clone 9906 (TRBV7-9, TRBJ1-5)
CASSQGHQPNQPQHF

SEQ ID NO: 19813 - protein, 16 aa, Homo sapiens
  CDR3 for alpha chain variable domain of TCR clone 9907 (TRAV13-1, TRAJ48)
CAASIFGNFGNEKLTF

SEQ ID NO: 19814 - protein, 14 aa, Homo sapiens
  CDR3 for beta chain variable domain of TCR clone 9907 (TRBV12-4, TRBJ1-1)
CASSREGLVTEAFF

SEQ ID NO: 19815 - protein, 15 aa, Homo sapiens
  CDR3 for alpha chain variable domain of TCR clone 9908 (TRAV8-3, TRAJ40)
CAVGPYTSGTYKYIF

SEQ ID NO: 19816 - protein, 16 aa, Homo sapiens
  CDR3 for beta chain variable domain of TCR clone 9908 (TRBV7-2, TRBJ2-7)
CASSLDPGGGSGGQYF

SEQ ID NO: 19817 - protein, 15 aa, Homo sapiens
  CDR3 for alpha chain variable domain of TCR clone 9909 (TRAV12-2, TRAJ43)
CAFDMRFGAGTRLTG

SEQ ID NO: 19818 - protein, 18 aa, Homo sapiens
  CDR3 for beta chain variable domain of TCR clone 9909 (TRBV20-1, TRBJ2-3)
CSASGLAGGPGTTDTQYF

SEQ ID NO: 19819 - protein, 13 aa, Homo sapiens
  CDR3 for alpha chain variable domain of TCR clone 9910 (TRAV12-2, TRAJ20)
CAVYPSNDYKLSF

SEQ ID NO: 19820 - protein, 14 aa, Homo sapiens
  CDR3 for beta chain variable domain of TCR clone 9910 (TRBV25-1, TRBJ1-1)
CASTHLGGNTEAFF

SEQ ID NO: 19821 - protein, 14 aa, Homo sapiens
  CDR3 for alpha chain variable domain of TCR clone 9911 (TRAV13-2, TRAJ45)
CAEMPGGGADGLTF

SEQ ID NO: 19822 - protein, 11 aa, Homo sapiens
  CDR3 for beta chain variable domain of TCR clone 9911 (TRBV7-3, TRBJ2-5)
CASSLSETQYF

SEQ ID NO: 19823 - protein, 14 aa, Homo sapiens
  CDR3 for alpha chain variable domain of TCR clone 9912 (TRAV1-2, TRAJ16)
CAVNRFSDGQELLF

SEQ ID NO: 19824 - protein, 15 aa, Homo sapiens
  CDR3 for beta chain variable domain of TCR clone 9912 (TRBV9, TRBJ1-6)
CASSVAGTGDSPLHF

SEQ ID NO: 19825 - protein, 12 aa, Homo sapiens
  CDR3 for alpha chain variable domain of TCR clone 9913 (TRAV12-3, TRAJ17)
CAMTLTGNKLTF

SEQ ID NO: 19826 - protein, 15 aa, Homo sapiens
  CDR3 for beta chain variable domain of TCR clone 9913 (TRBV20-1, TRBJ2-7)
FSARDRVSGMDEQYF

SEQ ID NO: 19827 - protein, 17 aa, Homo sapiens
  CDR3 for alpha chain variable domain of TCR clone 9914 (TRAV13-1, )
CAANIQNPDPAVYQLRD

SEQ ID NO: 19828 - protein, 16 aa, Homo sapiens
  CDR3 for beta chain variable domain of TCR clone 9914 (TRBV5-4, TRBJ2-3)
CASSWGTSGGTDTQYF

SEQ ID NO: 19829 - protein, 11 aa, Homo sapiens
  CDR3 for alpha chain variable domain of TCR clone 9915 (TRAV3, TRAJ21)
CAVGNFNKFYF

SEQ ID NO: 19830 - protein, 18 aa, Homo sapiens
  CDR3 for beta chain variable domain of TCR clone 9915 (TRBV12-4, TRBJ2-2)
CASSLVAGTRGRTGELFF

SEQ ID NO: 19831 - protein, 14 aa, Homo sapiens
  CDR3 for alpha chain variable domain of TCR clone 9916 (TRAV2, TRAJ9)
CAVEDRSGGFKTIF

SEQ ID NO: 19832 - protein, 14 aa, Homo sapiens
  CDR3 for beta chain variable domain of TCR clone 9916 (TRBV5-1, TRBJ2-3)
CASSLFGPTDTQYF

SEQ ID NO: 19833 - protein, 16 aa, Homo sapiens
  CDR3 for alpha chain variable domain of TCR clone 9917 (TRAV26-1, TRAJ32)
CIVRTNYGGATNKLIF

SEQ ID NO: 19834 - protein, 20 aa, Homo sapiens
  CDR3 for beta chain variable domain of TCR clone 9917 (TRBV7-8, TRBJ2-2)
CASSHLFPGPTIHITGELFF

SEQ ID NO: 19835 - protein, 19 aa, Homo sapiens
  CDR3 for alpha chain variable domain of TCR clone 9918 (TRAV26-1, TRAJ22)
CCVLLYRWVFSGSARQLTF

SEQ ID NO: 19836 - protein, 19 aa, Homo sapiens
  CDR3 for beta chain variable domain of TCR clone 9918 (TRBV19, TRBJ2-5)
CASSIGQVTDFFLGETQYF

SEQ ID NO: 19837 - protein, 14 aa, Homo sapiens
  CDR3 for alpha chain variable domain of TCR clone 9919 (TRAV13-1, TRAJ35)
CAASKGGFGNVLHC

SEQ ID NO: 19838 - protein, 14 aa, Homo sapiens
  CDR3 for beta chain variable domain of TCR clone 9919 (TRBV4-1, TRBJ2-2)
CASSQAVNTGELFL

SEQ ID NO: 19839 - protein, 14 aa, Homo sapiens
  CDR3 for alpha chain variable domain of TCR clone 9920 (TRAV8-1, TRAJ27)
CAVNVGTNAGKSTF

SEQ ID NO: 19840 - protein, 17 aa, Homo sapiens
  CDR3 for beta chain variable domain of TCR clone 9920 (TRBV11-2, TRBJ2-1)
CASSLYPPGVEYNEQFF

SEQ ID NO: 19841 - protein, 14 aa, Homo sapiens
  CDR3 for alpha chain variable domain of TCR clone 9921 (TRAV12-2, TRAJ40)
CAVKIPSGTYKYIF

SEQ ID NO: 19842 - protein, 14 aa, Homo sapiens
  CDR3 for beta chain variable domain of TCR clone 9921 (TRBV19, TRBJ2-1)
CASPTFVLSGEQFF

SEQ ID NO: 19843 - protein, 11 aa, Homo sapiens
  CDR3 for alpha chain variable domain of TCR clone 9922 (TRAV3, TRAJ21)
CAVGNFNKFYF

SEQ ID NO: 19844 - protein, 16 aa, Homo sapiens
  CDR3 for beta chain variable domain of TCR clone 9922 (TRBV19, TRBJ2-1)
CASSKAEPSSYNEQFF

SEQ ID NO: 19845 - protein, 16 aa, Homo sapiens
  CDR3 for alpha chain variable domain of TCR clone 9923 (TRAV14/DV4, TRAJ20)
CAMREGRSRDDYKLSF

SEQ ID NO: 19846 - protein, 17 aa, Homo sapiens
  CDR3 for beta chain variable domain of TCR clone 9923 (TRBV13, TRBJ2-3)
CASSLSRVAGGRNTQYF

SEQ ID NO: 19847 - protein, 14 aa, Homo sapiens
  CDR3 for alpha chain variable domain of TCR clone 9924 (TRAV13-1, TRAJ35)
CAASKGGFGNVLHC

SEQ ID NO: 19848 - protein, 18 aa, Homo sapiens
  CDR3 for beta chain variable domain of TCR clone 9924 (TRBV27, TRBJ2-3)
CASSLSGTSGRGTDTQYF

SEQ ID NO: 19849 - protein, 15 aa, Homo sapiens
  CDR3 for alpha chain variable domain of TCR clone 9925 (TRAV17, TRAJ57)
CATGPSPGGSEKLVF

SEQ ID NO: 19850 - protein, 16 aa, Homo sapiens
  CDR3 for beta chain variable domain of TCR clone 9925 (TRBV12-4, TRBJ1-5)
CASSRPVGGSNQPQHF

SEQ ID NO: 19851 - protein, 17 aa, Homo sapiens
  CDR3 for alpha chain variable domain of TCR clone 9926 (TRAV3, TRAJ6)
CAVRDGPRAGGSYMPTF

SEQ ID NO: 19852 - protein, 14 aa, Homo sapiens
  CDR3 for beta chain variable domain of TCR clone 9926 (TRBV7-2, TRBJ2-7)
CASSPKTSFYEQYF

SEQ ID NO: 19853 - protein, 15 aa, Homo sapiens
  CDR3 for alpha chain variable domain of TCR clone 9927 (TRAV27, TRAJ38)
CAARRNAGNNRKLIW

SEQ ID NO: 19854 - protein, 15 aa, Homo sapiens
  CDR3 for beta chain variable domain of TCR clone 9927 (TRBV9, TRBJ1-6)
CASSVAGTGDSPLHF

SEQ ID NO: 19855 - protein, 14 aa, Homo sapiens
  CDR3 for alpha chain variable domain of TCR clone 9928 (TRAV12-2, TRAJ13)
CAVKTTGGYQKVTF

SEQ ID NO: 19856 - protein, 15 aa, Homo sapiens
  CDR3 for beta chain variable domain of TCR clone 9928 (TRBV27, TRBJ2-1)
CASSNGGGSSNEQFF

SEQ ID NO: 19857 - protein, 11 aa, Homo sapiens
  CDR3 for alpha chain variable domain of TCR clone 9929 (TRAV1-2, TRAJ20)
CAVANDYKLSF

SEQ ID NO: 19858 - protein, 15 aa, Homo sapiens
  CDR3 for beta chain variable domain of TCR clone 9929 (TRBV20-1, TRBJ2-7)
CSARDPVKGEGEQYF

SEQ ID NO: 19859 - protein, 14 aa, Homo sapiens
  CDR3 for alpha chain variable domain of TCR clone 9930 (TRAV12-2, TRAJ13)
CAVKKTGCYQKVTF

SEQ ID NO: 19860 - protein, 15 aa, Homo sapiens
  CDR3 for beta chain variable domain of TCR clone 9930 (TRBV27, TRBJ2-1)
CASSNGGGSSNEQFF

SEQ ID NO: 19861 - protein, 14 aa, Homo sapiens
  CDR3 for alpha chain variable domain of TCR clone 9931 (TRAV20, TRAJ6)
CAVQERGGSYIPTF

SEQ ID NO: 19862 - protein, 16 aa, Homo sapiens
  CDR3 for beta chain variable domain of TCR clone 9931 (TRBV11-2, TRBJ2-7)
CASSPTTGGVSYEQYF

SEQ ID NO: 19863 - protein, 17 aa, Homo sapiens
  CDR3 for alpha chain variable domain of TCR clone 9932 (TRAV26-1, TRAJ37)
CIVRVITVSSNTGKLIF

SEQ ID NO: 19864 - protein, 15 aa, Homo sapiens
  CDR3 for beta chain variable domain of TCR clone 9932 (TRBV9, TRBJ1-6)
CASSVAGTGDSPLHF

SEQ ID NO: 19865 - protein, 14 aa, Homo sapiens
  CDR3 for alpha chain variable domain of TCR clone 9933 (TRAV30, TRAJ26)
CGTEIVSYGQNFVF

SEQ ID NO: 19866 - protein, 13 aa, Homo sapiens
  CDR3 for beta chain variable domain of TCR clone 9933 (TRBV19, TRBJ1-3)
CASRLSLGNTMYF

SEQ ID NO: 19867 - protein, 19 aa, Homo sapiens
  CDR3 for alpha chain variable domain of TCR clone 9934 (TRAV29/DV5, TRAJ53)
CSVLLCSKPDRGSNYKLTF

SEQ ID NO: 19868 - protein, 15 aa, Homo sapiens
  CDR3 for beta chain variable domain of TCR clone 9934 (TRBV19, TRBJ2-4)
CASSIGLAGANIQYF

SEQ ID NO: 19869 - protein, 15 aa, Homo sapiens
  CDR3 for alpha chain variable domain of TCR clone 9935 (TRAV23/DV6, TRAJ13)
CAAWPGGGGYQKVTF

SEQ ID NO: 19870 - protein, 14 aa, Homo sapiens
  CDR3 for beta chain variable domain of TCR clone 9935 (TRBV7-2, TRBJ1-1)
CASSFLTGTTEAFF

SEQ ID NO: 19871 - protein, 16 aa, Homo sapiens
  CDR3 for alpha chain variable domain of TCR clone 9936 (TRAV12-3, TRAJ53)
CVMSPGSGGSNYKLTF

SEQ ID NO: 19872 - protein, 11 aa, Homo sapiens
  CDR3 for beta chain variable domain of TCR clone 9936 (TRBV29-1, TRBJ2-5)
CSEDRTGTQYF

SEQ ID NO: 19873 - protein, 12 aa, Homo sapiens
  CDR3 for alpha chain variable domain of TCR clone 9937 (TRAV1-2, TRAJ24)
CAVGGSWGKFQF

SEQ ID NO: 19874 - protein, 14 aa, Homo sapiens
  CDR3 for beta chain variable domain of TCR clone 9937 (TRBV7-2, TRBJ1-2)
CASSQTGSTYGYTF

SEQ ID NO: 19875 - protein, 22 aa, Homo sapiens
  CDR3 for alpha chain variable domain of TCR clone 9938 (TRAV4, )
CLGGRVKPNIQNPDPAVYQLRD

SEQ ID NO: 19876 - protein, 16 aa, Homo sapiens
  CDR3 for beta chain variable domain of TCR clone 9938 (TRBV6-6, TRBJ2-7)
CASIETGTNSSYEQYF

SEQ ID NO: 19877 - protein, 14 aa, Homo sapiens
  CDR3 for alpha chain variable domain of TCR clone 9939 (TRAV12-2, TRAJ13)
CAVKKTGGYQKVTF

SEQ ID NO: 19878 - protein, 15 aa, Homo sapiens
  CDR3 for beta chain variable domain of TCR clone 9939 (TRBV3-1, TRBJ2-7)
CASSQVRQGAYEQYF

SEQ ID NO: 19879 - protein, 13 aa, Homo sapiens
  CDR3 for alpha chain variable domain of TCR clone 9940 (TRAV21, TRAJ11)
CAVPNSGYSTLTF

SEQ ID NO: 19880 - protein, 13 aa, Homo sapiens
  CDR3 for beta chain variable domain of TCR clone 9940 (TRBV7-2, TRBJ1-1)
CASNLKGAKVAFF

SEQ ID NO: 19881 - protein, 13 aa, Homo sapiens
  CDR3 for alpha chain variable domain of TCR clone 9941 (TRAV21, TRAJ20)
CAVGLRVDYKPSF

SEQ ID NO: 19882 - protein, 13 aa, Homo sapiens
  CDR3 for beta chain variable domain of TCR clone 9941 (TRBV6-1, TRBJ1-1)
CASSRQGNTGAFF

SEQ ID NO: 19883 - protein, 15 aa, Homo sapiens
  CDR3 for alpha chain variable domain of TCR clone 9942 (TRAV8-3, TRAJ45)
CASSYSGGGADGLTF

SEQ ID NO: 19884 - protein, 13 aa, Homo sapiens
  CDR3 for beta chain variable domain of TCR clone 9942 (TRBV10-3, TRBJ2-7)
CASKLAVNYEQHF

SEQ ID NO: 19885 - protein, 13 aa, Homo sapiens
  CDR3 for alpha chain variable domain of TCR clone 9943 (TRAV22, TRAJ9)
CAVGSTGGFKTIF

SEQ ID NO: 19886 - protein, 13 aa, Homo sapiens
  CDR3 for beta chain variable domain of TCR clone 9943 (TRBV9, TRBJ2-7)
CASSVAGTGEQYF

SEQ ID NO: 19887 - protein, 14 aa, Homo sapiens
  CDR3 for alpha chain variable domain of TCR clone 9944 (TRAV13-1, TRAJ35)
CAASKGGFGNVLHC

SEQ ID NO: 19888 - protein, 15 aa, Homo sapiens
  CDR3 for beta chain variable domain of TCR clone 9944 (TRBV9, TRBJ1-6)
CASSVAGTGDSPLHF

SEQ ID NO: 19889 - protein, 12 aa, Homo sapiens
  CDR3 for alpha chain variable domain of TCR clone 9945 (TRAV13-1, TRAJ53)
CAAGGSNYKLTF

SEQ ID NO: 19890 - protein, 16 aa, Homo sapiens
  CDR3 for beta chain variable domain of TCR clone 9945 (TRBV5-4, TRBJ2-3)
CASQQPGAGGADTQYF

SEQ ID NO: 19891 - protein, 14 aa, Homo sapiens
  CDR3 for alpha chain variable domain of TCR clone 9946 (TRAV1-2, TRAJ8)
CAVREDTGFQKLVF

SEQ ID NO: 19892 - protein, 15 aa, Homo sapiens
  CDR3 for beta chain variable domain of TCR clone 9946 (TRBV6-3, TRBJ2-7)
CASSSPRTVFYEQYF

SEQ ID NO: 19893 - protein, 17 aa, Homo sapiens
  CDR3 for alpha chain variable domain of TCR clone 9947 (TRAV17, TRAJ28)
CATDPRRGGAGGYQLTF

SEQ ID NO: 19894 - protein, 16 aa, Homo sapiens
  CDR3 for beta chain variable domain of TCR clone 9947 (TRBV25-1, TRBJ1-1)
CASSGDRDRGRIEAFF

SEQ ID NO: 19895 - protein, 14 aa, Homo sapiens
  CDR3 for alpha chain variable domain of TCR clone 9948 (TRAV1-2, TRAJ8)
CAVREYTGFQKLVF

SEQ ID NO: 19896 - protein, 15 aa, Homo sapiens
  CDR3 for beta chain variable domain of TCR clone 9948 (TRBV6-3, TRBJ2-7)
CASSSPGTVFYEQYF

SEQ ID NO: 19897 - protein, 18 aa, Homo sapiens
  CDR3 for alpha chain variable domain of TCR clone 9949 (TRAV21, TRAJ52)
CAVRPSPAGGTSYGQLTF

SEQ ID NO: 19898 - protein, 17 aa, Homo sapiens
  CDR3 for beta chain variable domain of TCR clone 9949 (TRBV13, TRBJ2-3)
CASSLSRVAGGRNTQYF

SEQ ID NO: 19899 - protein, 13 aa, Homo sapiens
  CDR3 for alpha chain variable domain of TCR clone 9950 (TRAV2, TRAJ40)
CAVVTSGTYKYIF

SEQ ID NO: 19900 - protein, 15 aa, Homo sapiens
  CDR3 for beta chain variable domain of TCR clone 9950 (TRBV11-3, TRBJ2-3)
CASLRDGREGDTQYF

SEQ ID NO: 19901 - protein, 15 aa, Homo sapiens
  CDR3 for alpha chain variable domain of TCR clone 9951 (TRAV26-1, TRAJ29)
CIARVEGSGNTPLVF

SEQ ID NO: 19902 - protein, 15 aa, Homo sapiens
  CDR3 for beta chain variable domain of TCR clone 9951 (TRBV7-9, TRBJ1-5)
CASSQGHQPNQPQHF

SEQ ID NO: 19903 - protein, 16 aa, Homo sapiens
  CDR3 for alpha chain variable domain of TCR clone 9952 (TRAV26-2, TRAJ45)
CTTASPIGGGADGLTF

SEQ ID NO: 19904 - protein, 18 aa, Homo sapiens
  CDR3 for beta chain variable domain of TCR clone 9952 (TRBV11-2, TRBJ2-3)
CASSLGGASRGAPNTQYF

SEQ ID NO: 19905 - protein, 13 aa, Homo sapiens
  CDR3 for alpha chain variable domain of TCR clone 9953 (TRAV21, TRAJ27)
CAARPGNAGKSTF

SEQ ID NO: 19906 - protein, 14 aa, Homo sapiens
  CDR3 for beta chain variable domain of TCR clone 9953 (TRBV7-6, TRBJ2-3)
CASSLGTVADTQYF

SEQ ID NO: 19907 - protein, 15 aa, Homo sapiens
  CDR3 for alpha chain variable domain of TCR clone 9954 (TRAV26-1, TRAJ29)
CIVRVEGSGNTPLVF

SEQ ID NO: 19908 - protein, 15 aa, Homo sapiens
  CDR3 for beta chain variable domain of TCR clone 9954 (TRBV7-9, TRBJ1-5)
CASSQGHQPDQPQHF

SEQ ID NO: 19909 - protein, 13 aa, Homo sapiens
  CDR3 for alpha chain variable domain of TCR clone 9955 (TRAV8-1, TRAJ41)
CAVNPGSGYALNF

SEQ ID NO: 19910 - protein, 17 aa, Homo sapiens
  CDR3 for beta chain variable domain of TCR clone 9955 (TRBV3-1, TRBJ2-2)
CASSQFRDKVDTGELFF

SEQ ID NO: 19911 - protein, 16 aa, Homo sapiens
  CDR3 for alpha chain variable domain of TCR clone 9956 (TRAV30, TRAJ24)
CGTEIVDADSWGKFQF

SEQ ID NO: 19912 - protein, 14 aa, Homo sapiens
  CDR3 for beta chain variable domain of TCR clone 9956 (TRBV12-5, TRBJ2-5)
CSSGSRTHQETQYF

SEQ ID NO: 19913 - protein, 14 aa, Homo sapiens
  CDR3 for alpha chain variable domain of TCR clone 9957 (TRAV12-2, TRAJ13)
CAVKKTGGYQKVTF

SEQ ID NO: 19914 - protein, 15 aa, Homo sapiens
  CDR3 for beta chain variable domain of TCR clone 9957 (TRBV6-3, TRBJ2-2)
CASSFLATLTGELFF

SEQ ID NO: 19915 - protein, 14 aa, Homo sapiens
  CDR3 for alpha chain variable domain of TCR clone 9958 (TRAV12-1, TRAJ17)
CVVNYKAAGNKLTF

SEQ ID NO: 19916 - protein, 17 aa, Homo sapiens
  CDR3 for beta chain variable domain of TCR clone 9958 (TRBV20-1, TRBJ2-1)
CSASSSGLAGAYNEQFF

SEQ ID NO: 19917 - protein, 14 aa, Homo sapiens
  CDR3 for alpha chain variable domain of TCR clone 9959 (TRAV1-2, TRAJ16)
CAVNRFSDGKKLLF

SEQ ID NO: 19918 - protein, 15 aa, Homo sapiens
  CDR3 for beta chain variable domain of TCR clone 9959 (TRBV9, TRBJ1-6)
CASSVAGTGDSPLHF

SEQ ID NO: 19919 - protein, 14 aa, Homo sapiens
  CDR3 for alpha chain variable domain of TCR clone 9960 (TRAV12-2, TRAJ13)
CAVKKTGGYQKVTF

SEQ ID NO: 19920 - protein, 16 aa, Homo sapiens
  CDR3 for beta chain variable domain of TCR clone 9960 (TRBV10-3, TRBJ2-1)
CAISGVGDGGGGEQFF

SEQ ID NO: 19921 - protein, 13 aa, Homo sapiens
  CDR3 for alpha chain variable domain of TCR clone 9961 (TRAV13-2, TRAJ48)
CAEMDFGNEKLTF

SEQ ID NO: 19922 - protein, 15 aa, Homo sapiens
  CDR3 for beta chain variable domain of TCR clone 9961 (TRBV7-9, TRBJ1-6)
RASSSPGRGNSPLHF

SEQ ID NO: 19923 - protein, 16 aa, Homo sapiens
  CDR3 for alpha chain variable domain of TCR clone 9962 (TRAV38-2/DV8, TRAJ9)
CAYRSLLNTGGFKTIF

SEQ ID NO: 19924 - protein, 13 aa, Homo sapiens
  CDR3 for beta chain variable domain of TCR clone 9962 (TRBV29-1, TRBJ1-1)
CSVHGQGNTEAFF

SEQ ID NO: 19925 - protein, 15 aa, Homo sapiens
  CDR3 for alpha chain variable domain of TCR clone 9963 (TRAV17, TRAJ57)
CATGPSQGGSEKLVF

SEQ ID NO: 19926 - protein, 16 aa, Homo sapiens
  CDR3 for beta chain variable domain of TCR clone 9963 (TRBV12-4, TRBJ1-5)
CASSRPVGGSNQHQHF

SEQ ID NO: 19927 - protein, 14 aa, Homo sapiens
  CDR3 for alpha chain variable domain of TCR clone 9964 (TRAV2, TRAJ16)
CAVERGSDGQRLLF

SEQ ID NO: 19928 - protein, 12 aa, Homo sapiens
  CDR3 for beta chain variable domain of TCR clone 9964 (TRBV6-5, TRBJ2-7)
CASYIYGYEQYF

SEQ ID NO: 19929 - protein, 11 aa, Homo sapiens
  CDR3 for alpha chain variable domain of TCR clone 9965 (TRAV36/DV7, TRAJ20)
CAANNDYKLSF

SEQ ID NO: 19930 - protein, 13 aa, Homo sapiens
  CDR3 for beta chain variable domain of TCR clone 9965 (TRBV6-1, TRBJ2-7)
CASRASGGYEQYF

SEQ ID NO: 19931 - protein, 13 aa, Homo sapiens
  CDR3 for alpha chain variable domain of TCR clone 9966 (TRAV1-2, TRAJ9)
CAALNTGGFKTIF

SEQ ID NO: 19932 - protein, 17 aa, Homo sapiens
  CDR3 for beta chain variable domain of TCR clone 9966 (TRBV3-1, TRBJ2-7)
CASSEVGHRGPSYEQYF

SEQ ID NO: 19933 - protein, 11 aa, Homo sapiens
  CDR3 for alpha chain variable domain of TCR clone 9967 (TRAV1-1, TRAJ23)
CAVRQGGKLVF

SEQ ID NO: 19934 - protein, 20 aa, Homo sapiens
  CDR3 for beta chain variable domain of TCR clone 9967 (TRBV7-8, TRBJ2-2)
CASSHLFPGPTIHITGELFF

SEQ ID NO: 19935 - protein, 16 aa, Homo sapiens
  CDR3 for alpha chain variable domain of TCR clone 9968 (TRAV12-3, TRAJ53)
CAMSPGSGGSNYKLTF

SEQ ID NO: 19936 - protein, 11 aa, Homo sapiens
  CDR3 for beta chain variable domain of TCR clone 9968 (TRBV29-1, TRBJ2-5)
CSEERTGTQYF

SEQ ID NO: 19937 - protein, 13 aa, Homo sapiens
  CDR3 for alpha chain variable domain of TCR clone 9969 (TRAV26-2, TRAJ43)
CILRAVNNNDMRF

SEQ ID NO: 19938 - protein, 17 aa, Homo sapiens
  CDR3 for beta chain variable domain of TCR clone 9969 (TRBV7-3, TRBJ2-3)
CASSLMKRMRGADTQYF

SEQ ID NO: 19939 - protein, 14 aa, Homo sapiens
  CDR3 for alpha chain variable domain of TCR clone 9970 (TRAV1-2, TRAJ16)
CAVNRFSDGQKLLF

SEQ ID NO: 19940 - protein, 15 aa, Homo sapiens
  CDR3 for beta chain variable domain of TCR clone 9970 (TRBV9, TRBJ1-6)
CASGVAGTGDSPLHF

SEQ ID NO: 19941 - protein, 13 aa, Homo sapiens
  CDR3 for alpha chain variable domain of TCR clone 9971 (TRAV12-1, TRAJ22)
CVVYSGSARQLTF

SEQ ID NO: 19942 - protein, 16 aa, Homo sapiens
  CDR3 for beta chain variable domain of TCR clone 9971 (TRBV5-1, TRBJ2-1)
CASSLADIGSYNEQFF

SEQ ID NO: 19943 - protein, 15 aa, Homo sapiens
  CDR3 for alpha chain variable domain of TCR clone 9972 (TRAV8-3, TRAJ45)
CASSYSGGGADGITF

SEQ ID NO: 19944 - protein, 13 aa, Homo sapiens
  CDR3 for beta chain variable domain of TCR clone 9972 (TRBV10-3, TRBJ2-7)
CASKLAVNYEQYF

SEQ ID NO: 19945 - protein, 13 aa, Homo sapiens
  CDR3 for alpha chain variable domain of TCR clone 9973 (TRAV12-1, TRAJ26)
CVVRRDYGQNFVF

SEQ ID NO: 19946 - protein, 14 aa, Homo sapiens
  CDR3 for beta chain variable domain of TCR clone 9973 (TRBV6-3, TRBJ1-1)
CASRYTGESTEAFF

SEQ ID NO: 19947 - protein, 12 aa, Homo sapiens
  CDR3 for alpha chain variable domain of TCR clone 9974 (TRAV16, TRAJ9)
CALSSGGFRTIF

SEQ ID NO: 19948 - protein, 14 aa, Homo sapiens
  CDR3 for beta chain variable domain of TCR clone 9974 (TRBV7-9, TRBJ2-1)
CASSLAGPYNEQFF

SEQ ID NO: 19949 - protein, 14 aa, Homo sapiens
  CDR3 for alpha chain variable domain of TCR clone 9975 (TRAV1-2, TRAJ16)
CAVNRFSDGQKLLF

SEQ ID NO: 19950 - protein, 15 aa, Homo sapiens
  CDR3 for beta chain variable domain of TCR clone 9975 (TRBV9, TRBJ1-6)
CASSVAGTGDSPLHV

SEQ ID NO: 19951 - protein, 14 aa, Homo sapiens
  CDR3 for alpha chain variable domain of TCR clone 9976 (TRAV2, TRAJ3)
CAVPPYSSASKIIF

SEQ ID NO: 19952 - protein, 16 aa, Homo sapiens
  CDR3 for beta chain variable domain of TCR clone 9976 (TRBV19, TRBJ2-1)
CASSKAGPSSYNEQFF

SEQ ID NO: 19953 - protein, 12 aa, Homo sapiens
  CDR3 for alpha chain variable domain of TCR clone 9977 (TRAV21, TRAJ11)
CAATSGYSTLAF

SEQ ID NO: 19954 - protein, 14 aa, Homo sapiens
  CDR3 for beta chain variable domain of TCR clone 9977 (TRBV20-1, TRBJ2-7)
CSAPELAGVGEQYF

SEQ ID NO: 19955 - protein, 14 aa, Homo sapiens
  CDR3 for alpha chain variable domain of TCR clone 9978 (TRAV12-2, TRAJ17)
CAVLFKAAGNKPTF

SEQ ID NO: 19956 - protein, 17 aa, Homo sapiens
  CDR3 for beta chain variable domain of TCR clone 9978 (TRBV20-1, TRBJ2-2)
CSASGSGQGGLTGELFF

SEQ ID NO: 19957 - protein, 14 aa, Homo sapiens
  CDR3 for alpha chain variable domain of TCR clone 9979 (TRAV12-2, TRAJ13)
CAVKKTGGYQKVTF

SEQ ID NO: 19958 - protein, 15 aa, Homo sapiens
  CDR3 for beta chain variable domain of TCR clone 9979 (TRBV27, TRBJ2-1)
CASSNGGGSSNEQFS

SEQ ID NO: 19959 - protein, 12 aa, Homo sapiens
  CDR3 for alpha chain variable domain of TCR clone 9980 (TRAV13-2, TRAJ23)
CAERHRGGKLIF

SEQ ID NO: 19960 - protein, 16 aa, Homo sapiens
  CDR3 for beta chain variable domain of TCR clone 9980 (TRBV20-1, TRBJ2-7)
CSASTSGRLSSYEQYF

SEQ ID NO: 19961 - protein, 14 aa, Homo sapiens
  CDR3 for alpha chain variable domain of TCR clone 9981 (TRAV8-3, TRAJ9)
CAVVYSTGGFKTIF

SEQ ID NO: 19962 - protein, 14 aa, Homo sapiens
  CDR3 for beta chain variable domain of TCR clone 9981 (TRBV7-3, TRBJ2-2)
CASSSGGYTGELFF

SEQ ID NO: 19963 - protein, 14 aa, Homo sapiens
  CDR3 for alpha chain variable domain of TCR clone 9982 (TRAV12-1, TRAJ17)
CVVNYKAAGNKLTF

SEQ ID NO: 19964 - protein, 17 aa, Homo sapiens
  CDR3 for beta chain variable domain of TCR clone 9982 (TRBV20-1, TRBJ2-1)
CSASSSGLAGSYNEQSF

SEQ ID NO: 19965 - protein, 15 aa, Homo sapiens
  CDR3 for alpha chain variable domain of TCR clone 9983 (TRAV38-1, TRAJ37)
CAFIHGSGNTGKLIF

SEQ ID NO: 19966 - protein, 16 aa, Homo sapiens
  CDR3 for beta chain variable domain of TCR clone 9983 (TRBV12-5, TRBJ2-5)
CASGPRTSGNQETQYF

SEQ ID NO: 19967 - protein, 14 aa, Homo sapiens
  CDR3 for alpha chain variable domain of TCR clone 9984 (TRAV26-1, TRAJ38)
CIADNAGNNRKLIW

SEQ ID NO: 19968 - protein, 13 aa, Homo sapiens
  CDR3 for beta chain variable domain of TCR clone 9984 (TRBV20-1, TRBJ1-1)
CSARGGGNTEAVF

SEQ ID NO: 19969 - protein, 14 aa, Homo sapiens
  CDR3 for alpha chain variable domain of TCR clone 9985 (TRAV1-2, TRAJ6)
CAVSLSGGSYIPAF

SEQ ID NO: 19970 - protein, 15 aa, Homo sapiens
  CDR3 for beta chain variable domain of TCR clone 9985 (TRBV7-9, TRBJ2-7)
CASSPGGGLTYEQYF

SEQ ID NO: 19971 - protein, 14 aa, Homo sapiens
  CDR3 for alpha chain variable domain of TCR clone 9986 (TRAV8-2, TRAJ13)
CVVTASGGYQKVTF

SEQ ID NO: 19972 - protein, 16 aa, Homo sapiens
  CDR3 for beta chain variable domain of TCR clone 9986 (TRBV12-4, TRBJ1-5)
CASSRPVGGSNQPQHF

SEQ ID NO: 19973 - protein, 14 aa, Homo sapiens
  CDR3 for alpha chain variable domain of TCR clone 9987 (TRAV12-2, TRAJ9)
CAVNMEGGGFKTIF

SEQ ID NO: 19974 - protein, 14 aa, Homo sapiens
  CDR3 for beta chain variable domain of TCR clone 9987 (TRBV5-1, TRBJ1-1)
CASSLAVGSGEAFF

SEQ ID NO: 19975 - protein, 12 aa, Homo sapiens
  CDR3 for alpha chain variable domain of TCR clone 9988 (TRAV10, TRAJ6)
CVVSEGSYIPTF

SEQ ID NO: 19976 - protein, 12 aa, Homo sapiens
  CDR3 for beta chain variable domain of TCR clone 9988 (TRBV7-9, TRBJ2-7)
CASSLEGYEQYF

SEQ ID NO: 19977 - protein, 12 aa, Homo sapiens
  CDR3 for alpha chain variable domain of TCR clone 9989 (TRAV12-3, TRAJ17)
CAMTLTGNKLTF

SEQ ID NO: 19978 - protein, 14 aa, Homo sapiens
  CDR3 for beta chain variable domain of TCR clone 9989 (TRBV6-6, TRBJ2-5)
CASSYGGRGETQYF

SEQ ID NO: 19979 - protein, 11 aa, Homo sapiens
  CDR3 for alpha chain variable domain of TCR clone 9990 (TRAV1-2, TRAJ20)
CAVANDYKLSF

SEQ ID NO: 19980 - protein, 16 aa, Homo sapiens
  CDR3 for beta chain variable domain of TCR clone 9990 (TRBV28, TRBJ2-7)
CASSSGTSGRGYEQYF

SEQ ID NO: 19981 - protein, 12 aa, Homo sapiens
  CDR3 for alpha chain variable domain of TCR clone 9991 (TRAV12-3, TRAJ17)
CAMTLTGNKLTF

SEQ ID NO: 19982 - protein, 15 aa, Homo sapiens
  CDR3 for beta chain variable domain of TCR clone 9991 (TRBV7-9, TRBJ1-5)
CASSQGHQPNQPQHF

SEQ ID NO: 19983 - protein, 18 aa, Homo sapiens
  CDR3 for alpha chain variable domain of TCR clone 9992 (TRAV21, TRAJ52)
CAVRPSPAGGTSYGKLTF

SEQ ID NO: 19984 - protein, 15 aa, Homo sapiens
  CDR3 for beta chain variable domain of TCR clone 9992 (TRBV20-1, TRBJ2-1)
CSATSSGTSGGEQFF

SEQ ID NO: 19985 - protein, 13 aa, Homo sapiens
  CDR3 for alpha chain variable domain of TCR clone 9993 (TRAV2, TRAJ15)
CAVASQAGTALIF

SEQ ID NO: 19986 - protein, 16 aa, Homo sapiens
  CDR3 for beta chain variable domain of TCR clone 9993 (TRBV5-1, TRBJ1-1)
CASSSGGNSLNTEAFL

SEQ ID NO: 19987 - protein, 15 aa, Homo sapiens
  CDR3 for alpha chain variable domain of TCR clone 9994 (TRAV3, TRAJ5)
CAVRDLDTGRRALTF

SEQ ID NO: 19988 - protein, 13 aa, Homo sapiens
  CDR3 for beta chain variable domain of TCR clone 9994 (TRBV12-4, TRBJ2-7)
CASSPTEPYEQYF

SEQ ID NO: 19989 - protein, 18 aa, Homo sapiens
  CDR3 for alpha chain variable domain of TCR clone 9995 (TRAV26-1, TRAJ23)
CIVRVGLEVGNQGGKLIF

SEQ ID NO: 19990 - protein, 16 aa, Homo sapiens
  CDR3 for beta chain variable domain of TCR clone 9995 (TRBV12-4, TRBJ2-5)
CASSFFVRGRQETQYF

SEQ ID NO: 19991 - protein, 14 aa, Homo sapiens
  CDR3 for alpha chain variable domain of TCR clone 9996 (TRAV23/DV6, TRAJ49)
CAASTPNTGNQFYF

SEQ ID NO: 19992 - protein, 14 aa, Homo sapiens
  CDR3 for beta chain variable domain of TCR clone 9996 (TRBV18, TRBJ2-3)
CASSETSASDTQYF

SEQ ID NO: 19993 - protein, 14 aa, Homo sapiens
  CDR3 for alpha chain variable domain of TCR clone 9997 (TRAV1-2, TRAJ16)
CAVNRFSDGQKLLF

SEQ ID NO: 19994 - protein, 14 aa, Homo sapiens
  CDR3 for beta chain variable domain of TCR clone 9997 (TRBV7-2, TRBJ1-5)
CASSTQGAGQPQHF

SEQ ID NO: 19995 - protein, 15 aa, Homo sapiens
  CDR3 for alpha chain variable domain of TCR clone 9998 (TRAV12-2, TRAJ53)
CAVNGGGGSNYKLTF

SEQ ID NO: 19996 - protein, 13 aa, Homo sapiens
  CDR3 for beta chain variable domain of TCR clone 9998 (TRBV3-1, TRBJ1-1)
CASSPGVITEALF

SEQ ID NO: 19997 - protein, 14 aa, Homo sapiens
  CDR3 for alpha chain variable domain of TCR clone 9999 (TRAV13-1, TRAJ24)
CAASRTDSWGKLQF

SEQ ID NO: 19998 - protein, 17 aa, Homo sapiens
  CDR3 for beta chain variable domain of TCR clone 9999 (TRBV6-1, TRBJ2-7)
CASSEPIAAPRSSTSGR

SEQ ID NO: 19999 - protein, 18 aa, Homo sapiens
  CDR3 for alpha chain variable domain of TCR clone 10000 (TRAV12-3, TRAJ52)
CAMSRTNAGGTSYGKLTF

SEQ ID NO: 20000 - protein, 13 aa, Homo sapiens
  CDR3 for beta chain variable domain of TCR clone 10000 (TRBV12-4, TRBJ1-2)
CASSLRQGKGYTF

SEQ ID NO: 20001 - protein, 14 aa, Homo sapiens
  CDR3 for alpha chain variable domain of TCR clone 10001 (TRAV1-2, TRAJ8)
CAVREDTGFQKLVF

SEQ ID NO: 20002 - protein, 15 aa, Homo sapiens
  CDR3 for beta chain variable domain of TCR clone 10001 (TRBV5-1, TRBJ2-3)
CASSVTSGSTDTQYF

SEQ ID NO: 20003 - protein, 14 aa, Homo sapiens
  CDR3 for alpha chain variable domain of TCR clone 10002 (TRAV8-3, TRAJ40)
CAVALTSGTYKYIF

SEQ ID NO: 20004 - protein, 14 aa, Homo sapiens
  CDR3 for beta chain variable domain of TCR clone 10002 (TRBV11-3, TRBJ1-1)
CASSPGAWNTEAFF

SEQ ID NO: 20005 - protein, 14 aa, Homo sapiens
  CDR3 for alpha chain variable domain of TCR clone 10003 (TRAV8-3, TRAJ4)
CAVGAAGGYNKLTF

SEQ ID NO: 20006 - protein, 15 aa, Homo sapiens
  CDR3 for beta chain variable domain of TCR clone 10003 (TRBV6-5, TRBJ2-1)
CASSYDAGAGNEQFF

SEQ ID NO: 20007 - protein, 14 aa, Homo sapiens
  CDR3 for alpha chain variable domain of TCR clone 10004 (TRAV14/DV4, TRAJ20)
CAMRESLNDYKLSF

SEQ ID NO: 20008 - protein, 12 aa, Homo sapiens
  CDR3 for beta chain variable domain of TCR clone 10004 (TRBV14, TRBJ2-7)
CASSLYKDEQYF

SEQ ID NO: 20009 - protein, 14 aa, Homo sapiens
  CDR3 for alpha chain variable domain of TCR clone 10005 (TRAV8-6, TRAJ57)
CAAYTQGGSEKLVF

SEQ ID NO: 20010 - protein, 14 aa, Homo sapiens
  CDR3 for beta chain variable domain of TCR clone 10005 (TRBV7-6, TRBJ1-6)
CASSPNRGDSPLHF

SEQ ID NO: 20011 - protein, 14 aa, Homo sapiens
  CDR3 for alpha chain variable domain of TCR clone 10006 (TRAV38-1, TRAJ40)
CALRPTSGTYNYIF

SEQ ID NO: 20012 - protein, 14 aa, Homo sapiens
  CDR3 for beta chain variable domain of TCR clone 10006 (TRBV25-1, TRBJ1-1)
CASTHLGGNTEAFF

SEQ ID NO: 20013 - protein, 13 aa, Homo sapiens
  CDR3 for alpha chain variable domain of TCR clone 10007 (TRAV13-1, TRAJ21)
CAASIYNFNKFYF

SEQ ID NO: 20014 - protein, 14 aa, Homo sapiens
  CDR3 for beta chain variable domain of TCR clone 10007 (TRBV4-1, TRBJ2-2)
CASSQAVNTGELFF

SEQ ID NO: 20015 - protein, 14 aa, Homo sapiens
  CDR3 for alpha chain variable domain of TCR clone 10008 (TRAV20, TRAJ56)
CAVQFGGANSKLTF

SEQ ID NO: 20016 - protein, 14 aa, Homo sapiens
  CDR3 for beta chain variable domain of TCR clone 10008 (TRBV20-1, TRBJ2-7)
CSAKRGRGSYEQYF

SEQ ID NO: 20017 - protein, 15 aa, Homo sapiens
  CDR3 for alpha chain variable domain of TCR clone 10009 (TRAV26-1, TRAJ29)
CIVRVEGSGNTTLVF

SEQ ID NO: 20018 - protein, 14 aa, Homo sapiens
  CDR3 for beta chain variable domain of TCR clone 10009 (TRBV18, TRBJ2-5)
CASSPGVSQETQYF

SEQ ID NO: 20019 - protein, 12 aa, Homo sapiens
  CDR3 for alpha chain variable domain of TCR clone 10010 (TRAV13-1, TRAJ21)
CAAKEGFNKFYF

SEQ ID NO: 20020 - protein, 14 aa, Homo sapiens
  CDR3 for beta chain variable domain of TCR clone 10010 (TRBV18, TRBJ2-7)
RASSPRGGAYEQYF

SEQ ID NO: 20021 - protein, 12 aa, Homo sapiens
  CDR3 for alpha chain variable domain of TCR clone 10011 (TRAV12-3, TRAJ3)
CAIDSSASKIIF

SEQ ID NO: 20022 - protein, 14 aa, Homo sapiens
  CDR3 for beta chain variable domain of TCR clone 10011 (TRBV15, TRBJ2-4)
CATEGGQGANIQYF

SEQ ID NO: 20023 - protein, 17 aa, Homo sapiens
  CDR3 for alpha chain variable domain of TCR clone 10012 (TRAV3, TRAJ6)
CAVRDGPRAGGSYIPTF

SEQ ID NO: 20024 - protein, 16 aa, Homo sapiens
  CDR3 for beta chain variable domain of TCR clone 10012 (TRBV15, TRBJ2-3)
CATSRDLGIVTDTQYF

SEQ ID NO: 20025 - protein, 15 aa, Homo sapiens
  CDR3 for alpha chain variable domain of TCR clone 10013 (TRAV8-3, TRAJ45)
CASPYSGGGADGLTF

SEQ ID NO: 20026 - protein, 13 aa, Homo sapiens
  CDR3 for beta chain variable domain of TCR clone 10013 (TRBV10-3, TRBJ2-7)
CASKLAVNYEQYF

SEQ ID NO: 20027 - protein, 14 aa, Homo sapiens
  CDR3 for alpha chain variable domain of TCR clone 10014 (TRAV12-2, TRAJ13)
CAVKKTGGCQKVTF

SEQ ID NO: 20028 - protein, 12 aa, Homo sapiens
  CDR3 for beta chain variable domain of TCR clone 10014 (TRBV6-3, TRBJ2-7)
CASSLTPYEQYF

SEQ ID NO: 20029 - protein, 18 aa, Homo sapiens
  CDR3 for alpha chain variable domain of TCR clone 10015 (TRAV9-2, TRAJ52)
CALSRHNASGTSYGKLTF

SEQ ID NO: 20030 - protein, 13 aa, Homo sapiens
  CDR3 for beta chain variable domain of TCR clone 10015 (TRBV7-9, TRBJ1-2)
CASSLKQNYGYTF

SEQ ID NO: 20031 - protein, 16 aa, Homo sapiens
  CDR3 for alpha chain variable domain of TCR clone 10016 (TRAV12-3, TRAJ53)
CAMRPGSGGSNYKLTF

SEQ ID NO: 20032 - protein, 11 aa, Homo sapiens
  CDR3 for beta chain variable domain of TCR clone 10016 (TRBV29-1, TRBJ2-5)
CSEDRTGTQYF

SEQ ID NO: 20033 - protein, 14 aa, Homo sapiens
  CDR3 for alpha chain variable domain of TCR clone 10017 (TRAV1-2, TRAJ16)
CAVNRFSDGQKLLF

SEQ ID NO: 20034 - protein, 15 aa, Homo sapiens
  CDR3 for beta chain variable domain of TCR clone 10017 (TRBV7-8, TRBJ2-1)
CASSLHGGPYNEQFF

SEQ ID NO: 20035 - protein, 14 aa, Homo sapiens
  CDR3 for alpha chain variable domain of TCR clone 10018 (TRAV17, TRAJ57)
CATDPQGGSEKLVF

SEQ ID NO: 20036 - protein, 15 aa, Homo sapiens
  CDR3 for beta chain variable domain of TCR clone 10018 (TRBV27, TRBJ2-1)
CASSNGGGSSNEQFF

SEQ ID NO: 20037 - protein, 14 aa, Homo sapiens
  CDR3 for alpha chain variable domain of TCR clone 10019 (TRAV1-2, TRAJ16)
CAVNRFSDGQKLLF

SEQ ID NO: 20038 - protein, 13 aa, Homo sapiens
  CDR3 for beta chain variable domain of TCR clone 10019 (TRBV4-1, TRBJ2-2)
CASSQENTGELFF

SEQ ID NO: 20039 - protein, 10 aa, Homo sapiens
  CDR3 for alpha chain variable domain of TCR clone 10020 (TRAV8-4, TRAJ43)
GAMKNNDMRF

SEQ ID NO: 20040 - protein, 16 aa, Homo sapiens
  CDR3 for beta chain variable domain of TCR clone 10020 (TRBV5-7, TRBJ2-7)
CASSSPGGRTPYEQYF

SEQ ID NO: 20041 - protein, 14 aa, Homo sapiens
  CDR3 for alpha chain variable domain of TCR clone 10021 (TRAV12-2, TRAJ13)
YAVKKTGGYQKVTF

SEQ ID NO: 20042 - protein, 15 aa, Homo sapiens
  CDR3 for beta chain variable domain of TCR clone 10021 (TRBV27, TRBJ2-1)
CASSNGGGSSNEQFF

SEQ ID NO: 20043 - protein, 14 aa, Homo sapiens
  CDR3 for alpha chain variable domain of TCR clone 10022 (TRAV20, TRAJ42)
CAVQAGGSQGNLIF

SEQ ID NO: 20044 - protein, 14 aa, Homo sapiens
  CDR3 for beta chain variable domain of TCR clone 10022 (TRBV28, TRBJ1-2)
CASRIQGANYGDTF

SEQ ID NO: 20045 - protein, 13 aa, Homo sapiens
  CDR3 for alpha chain variable domain of TCR clone 10023 (TRAV2, TRAJ15)
CAVASQAGTALIF

SEQ ID NO: 20046 - protein, 16 aa, Homo sapiens
  CDR3 for beta chain variable domain of TCR clone 10023 (TRBV4-2, TRBJ2-3)
CASSQELAGDTDTQYF

SEQ ID NO: 20047 - protein, 13 aa, Homo sapiens
  CDR3 for alpha chain variable domain of TCR clone 10024 (TRAV2, TRAJ40)
CAVVTSGTSKYIF

SEQ ID NO: 20048 - protein, 14 aa, Homo sapiens
  CDR3 for beta chain variable domain of TCR clone 10024 (TRBV19, TRBJ2-1)
CASPTFVLSGEQFF

SEQ ID NO: 20049 - protein, 14 aa, Homo sapiens
  CDR3 for alpha chain variable domain of TCR clone 10025 (TRAV13-1, TRAJ35)
CAASKGGFGNVLHC

SEQ ID NO: 20050 - protein, 13 aa, Homo sapiens
  CDR3 for beta chain variable domain of TCR clone 10025 (TRBV7-3, TRBJ1-1)
CAGSQDWGAEAFF

SEQ ID NO: 20051 - protein, 11 aa, Homo sapiens
  CDR3 for alpha chain variable domain of TCR clone 10026 (TRAV35, TRAJ30)
CAPGGDDKIIF

SEQ ID NO: 20052 - protein, 16 aa, Homo sapiens
  CDR3 for beta chain variable domain of TCR clone 10026 (TRBV7-6, TRBJ2-1)
CIAVPAAWGGADEQFF

SEQ ID NO: 20053 - protein, 14 aa, Homo sapiens
  CDR3 for alpha chain variable domain of TCR clone 10027 (TRAV1-2, TRAJ16)
CSVNRFSDGQKLLF

SEQ ID NO: 20054 - protein, 15 aa, Homo sapiens
  CDR3 for beta chain variable domain of TCR clone 10027 (TRBV9, TRBJ1-6)
CASSVAGTGDSPLHF

SEQ ID NO: 20055 - protein, 10 aa, Homo sapiens
  CDR3 for alpha chain variable domain of TCR clone 10028 (TRAV1-2, TRAJ20)
CALNDYKLSF

SEQ ID NO: 20056 - protein, 16 aa, Homo sapiens
  CDR3 for beta chain variable domain of TCR clone 10028 (TRBV13, TRBJ2-2)
CASSPRTGEHTGELFF

SEQ ID NO: 20057 - protein, 14 aa, Homo sapiens
  CDR3 for alpha chain variable domain of TCR clone 10029 (TRAV1-2, TRAJ16)
CAVNRFSDGQKLLF

SEQ ID NO: 20058 - protein, 15 aa, Homo sapiens
  CDR3 for beta chain variable domain of TCR clone 10029 (TRBV7-9, TRBJ1-6)
CASSSPGRGNSPLHL

SEQ ID NO: 20059 - protein, 16 aa, Homo sapiens
  CDR3 for alpha chain variable domain of TCR clone 10030 (TRAV30, TRAJ24)
CGTEIVDADSWGKFQF

SEQ ID NO: 20060 - protein, 14 aa, Homo sapiens
  CDR3 for beta chain variable domain of TCR clone 10030 (TRBV12-5, TRBJ2-5)
CDSGSRTHQETQYF

SEQ ID NO: 20061 - protein, 14 aa, Homo sapiens
  CDR3 for alpha chain variable domain of TCR clone 10031 (TRAV38-1, TRAJ45)
CAYYSGGGADGLTL

SEQ ID NO: 20062 - protein, 20 aa, Homo sapiens
  CDR3 for beta chain variable domain of TCR clone 10031 (TRBV28, TRBJ2-1)
CASTPIGRSPGLAGGNEQFF

SEQ ID NO: 20063 - protein, 14 aa, Homo sapiens
  CDR3 for alpha chain variable domain of TCR clone 10032 (TRAV12-2, TRAJ13)
CAVKKTGGYQKVTF

SEQ ID NO: 20064 - protein, 14 aa, Homo sapiens
  CDR3 for beta chain variable domain of TCR clone 10032 (TRBV7-2, TRBJ1-5)
CASSPRGGPQPQHF

SEQ ID NO: 20065 - protein, 11 aa, Homo sapiens
  CDR3 for alpha chain variable domain of TCR clone 10033 (TRAV27, TRAJ47)
CRSNQGNKLVF

SEQ ID NO: 20066 - protein, 16 aa, Homo sapiens
  CDR3 for beta chain variable domain of TCR clone 10033 (TRBV7-9, TRBJ2-1)
CASSDVAGGSYNEQLF

SEQ ID NO: 20067 - protein, 13 aa, Homo sapiens
  CDR3 for alpha chain variable domain of TCR clone 10034 (TRAV3, TRAJ5)
CAVREGGRRALTF

SEQ ID NO: 20068 - protein, 13 aa, Homo sapiens
  CDR3 for beta chain variable domain of TCR clone 10034 (TRBV14, TRBJ1-2)
CASSQDRRYGYTF

SEQ ID NO: 20069 - protein, 14 aa, Homo sapiens
  CDR3 for alpha chain variable domain of TCR clone 10035 (TRAV10, TRAJ15)
CVVSASQAGTALIF

SEQ ID NO: 20070 - protein, 16 aa, Homo sapiens
  CDR3 for beta chain variable domain of TCR clone 10035 (TRBV2, TRBJ2-5)
CASSTLRDRDRETQYF

SEQ ID NO: 20071 - protein, 16 aa, Homo sapiens
  CDR3 for alpha chain variable domain of TCR clone 10036 (TRAV26-1, TRAJ53)
CIVRVAMGGSNYKLTF

SEQ ID NO: 20072 - protein, 12 aa, Homo sapiens
  CDR3 for beta chain variable domain of TCR clone 10036 (TRBV7-9, TRBJ1-5)
CASSPQGQTQHF

SEQ ID NO: 20073 - protein, 22 aa, Homo sapiens
  CDR3 for alpha chain variable domain of TCR clone 10037 (TRAV24, TRAJ42)
CAFNGAKEISSLEKALNSLLNQ

SEQ ID NO: 20074 - protein, 15 aa, Homo sapiens
  CDR3 for beta chain variable domain of TCR clone 10037 (TRBV5-5, TRBJ1-5)
CASSSTPGSNQPQHF

SEQ ID NO: 20075 - protein, 14 aa, Homo sapiens
  CDR3 for alpha chain variable domain of TCR clone 10038 (TRAV34, TRAJ22)
CGADTSGSARQLTF

SEQ ID NO: 20076 - protein, 15 aa, Homo sapiens
  CDR3 for beta chain variable domain of TCR clone 10038 (TRBV5-1, TRBJ2-1)
CASSPPRAPYNEQFF

SEQ ID NO: 20077 - protein, 13 aa, Homo sapiens
  CDR3 for alpha chain variable domain of TCR clone 10039 (TRAV13-1, TRAJ43)
CAASMNNNNDMRF

SEQ ID NO: 20078 - protein, 13 aa, Homo sapiens
  CDR3 for beta chain variable domain of TCR clone 10039 (TRBV29-1, TRBJ2-1)
CSVDGGASDEQFF

SEQ ID NO: 20079 - protein, 14 aa, Homo sapiens
  CDR3 for alpha chain variable domain of TCR clone 10040 (TRAV12-2, TRAJ13)
CAVKKTGGYQKVTF

SEQ ID NO: 20080 - protein, 15 aa, Homo sapiens
  CDR3 for beta chain variable domain of TCR clone 10040 (TRBV27, TRBJ2-1)
CASSNGGGASNEQFF

SEQ ID NO: 20081 - protein, 13 aa, Homo sapiens
  CDR3 for alpha chain variable domain of TCR clone 10041 (TRAV8-2, TRAJ45)
CVVTTLQEEVLTD

SEQ ID NO: 20082 - protein, 14 aa, Homo sapiens
  CDR3 for beta chain variable domain of TCR clone 10041 (TRBV7-2, TRBJ1-1)
CASSFLTGTTEAFF

SEQ ID NO: 20083 - protein, 13 aa, Homo sapiens
  CDR3 for alpha chain variable domain of TCR clone 10042 (TRAV25, TRAJ26)
CAGMDNYGQNFVF

SEQ ID NO: 20084 - protein, 13 aa, Homo sapiens
  CDR3 for beta chain variable domain of TCR clone 10042 (TRBV4-2, TRBJ1-1)
CASSQAGNTEAFF

SEQ ID NO: 20085 - protein, 16 aa, Homo sapiens
  CDR3 for alpha chain variable domain of TCR clone 10043 (TRAV30, TRAJ24)
CGTEIVDADSWGKFQF

SEQ ID NO: 20086 - protein, 14 aa, Homo sapiens
  CDR3 for beta chain variable domain of TCR clone 10043 (TRBV12-5, TRBJ2-5)
CASGTRTHQETQYF

SEQ ID NO: 20087 - protein, 16 aa, Homo sapiens
  CDR3 for alpha chain variable domain of TCR clone 10044 (TRAV1-2, TRAJ10)
CAVRGVLTGGGNKLTF

SEQ ID NO: 20088 - protein, 16 aa, Homo sapiens
  CDR3 for beta chain variable domain of TCR clone 10044 (TRBV4-2, TRBJ2-5)
CASSQELVGSQETQYF

SEQ ID NO: 20089 - protein, 13 aa, Homo sapiens
  CDR3 for alpha chain variable domain of TCR clone 10045 (TRAV26-1, TRAJ33)
CIVRVEGNYQLIW

SEQ ID NO: 20090 - protein, 13 aa, Homo sapiens
  CDR3 for beta chain variable domain of TCR clone 10045 (TRBV20-1, TRBJ1-1)
CSAPLGGGTEAFF

SEQ ID NO: 20091 - protein, 13 aa, Homo sapiens
  CDR3 for alpha chain variable domain of TCR clone 10046 (TRAV2, TRAJ5)
CAVPDTGRRALTF

SEQ ID NO: 20092 - protein, 13 aa, Homo sapiens
  CDR3 for beta chain variable domain of TCR clone 10046 (TRBV4-1, TRBJ1-1)
CASSRKMNTEAFF

SEQ ID NO: 20093 - protein, 14 aa, Homo sapiens
  CDR3 for alpha chain variable domain of TCR clone 10047 (TRAV12-1, TRAJ16)
CVALPLSDGQKLLF

SEQ ID NO: 20094 - protein, 13 aa, Homo sapiens
  CDR3 for beta chain variable domain of TCR clone 10047 (TRBV27, TRBJ2-3)
CACRETSTDTQYF

SEQ ID NO: 20095 - protein, 14 aa, Homo sapiens
  CDR3 for alpha chain variable domain of TCR clone 10048 (TRAV12-2, TRAJ13)
CTVKKTGGYQKVTF

SEQ ID NO: 20096 - protein, 15 aa, Homo sapiens
  CDR3 for beta chain variable domain of TCR clone 10048 (TRBV27, TRBJ2-1)
CASSNGGGSSNEQFF

SEQ ID NO: 20097 - protein, 12 aa, Homo sapiens
  CDR3 for alpha chain variable domain of TCR clone 10049 (TRAV8-3, TRAJ20)
CAVGANDYKLSF

SEQ ID NO: 20098 - protein, 16 aa, Homo sapiens
  CDR3 for beta chain variable domain of TCR clone 10049 (TRBV19, TRBJ2-2)
CASRSPRTGATGELFF

SEQ ID NO: 20099 - protein, 13 aa, Homo sapiens
  CDR3 for alpha chain variable domain of TCR clone 10050 (TRAV21, TRAJ57)
CAVTQGGSEKLVF

SEQ ID NO: 20100 - protein, 14 aa, Homo sapiens
  CDR3 for beta chain variable domain of TCR clone 10050 (TRBV18, TRBJ2-5)
CASSPGVSQETQYF

SEQ ID NO: 20101 - protein, 14 aa, Homo sapiens
  CDR3 for alpha chain variable domain of TCR clone 10051 (TRAV38-1, TRAJ32)
CAFIYGGATNKLIF

SEQ ID NO: 20102 - protein, 17 aa, Homo sapiens
  CDR3 for beta chain variable domain of TCR clone 10051 (TRBV28, TRBJ2-1)
CASTGPGLAVSEDEQFF

SEQ ID NO: 20103 - protein, 12 aa, Homo sapiens
  CDR3 for alpha chain variable domain of TCR clone 10052 (TRAV17, TRAJ45)
CAAGGGADGLTF

SEQ ID NO: 20104 - protein, 13 aa, Homo sapiens
  CDR3 for beta chain variable domain of TCR clone 10052 (TRBV20-1, TRBJ2-7)
CSARGTVSYEQYF

SEQ ID NO: 20105 - protein, 11 aa, Homo sapiens
  CDR3 for alpha chain variable domain of TCR clone 10053 (TRAV1-1, TRAJ23)
CAVRQGGKLIF

SEQ ID NO: 20106 - protein, 20 aa, Homo sapiens
  CDR3 for beta chain variable domain of TCR clone 10053 (TRBV7-8, TRBJ2-2)
CASSHLFPGPTIRITGELFF

SEQ ID NO: 20107 - protein, 11 aa, Homo sapiens
  CDR3 for alpha chain variable domain of TCR clone 10054 (TRAV17, TRAJ9)
CGFTGGFKTIF

SEQ ID NO: 20108 - protein, 14 aa, Homo sapiens
  CDR3 for beta chain variable domain of TCR clone 10054 (TRBV7-9, TRBJ2-2)
CAGSLVQDTGELFF

SEQ ID NO: 20109 - protein, 14 aa, Homo sapiens
  CDR3 for alpha chain variable domain of TCR clone 10055 (TRAV13-2, TRAJ45)
CAEMSGGGADGLTF

SEQ ID NO: 20110 - protein, 14 aa, Homo sapiens
  CDR3 for beta chain variable domain of TCR clone 10055 (TRBV2, TRBJ1-4)
CASNQGGLSLGLFF

SEQ ID NO: 20111 - protein, 19 aa, Homo sapiens
  CDR3 for alpha chain variable domain of TCR clone 10056 (TRAV25, TRAJ43)
TATQTTDVGTYFCAVFMRF

SEQ ID NO: 20112 - protein, 12 aa, Homo sapiens
  CDR3 for beta chain variable domain of TCR clone 10056 (TRBV11-2, TRBJ2-3)
CASSYRPDTQYF

SEQ ID NO: 20113 - protein, 13 aa, Homo sapiens
  CDR3 for alpha chain variable domain of TCR clone 10057 (TRAV2, TRAJ40)
CAVVTSGTYKYIF

SEQ ID NO: 20114 - protein, 14 aa, Homo sapiens
  CDR3 for beta chain variable domain of TCR clone 10057 (TRBV19, TRBJ2-1)
CASPTFGLSGEQFF

SEQ ID NO: 20115 - protein, 14 aa, Homo sapiens
  CDR3 for alpha chain variable domain of TCR clone 10058 (TRAV9-2, TRAJ38)
CALSNAGNNRKLIW

SEQ ID NO: 20116 - protein, 15 aa, Homo sapiens
  CDR3 for beta chain variable domain of TCR clone 10058 (TRBV19, TRBJ2-1)
CASSIQATSYNEQFF

SEQ ID NO: 20117 - protein, 15 aa, Homo sapiens
  CDR3 for alpha chain variable domain of TCR clone 10059 (TRAV12-3, TRAJ6)
CAMSATTGGSYIPTF

SEQ ID NO: 20118 - protein, 13 aa, Homo sapiens
  CDR3 for beta chain variable domain of TCR clone 10059 (TRBV7-9, TRBJ1-2)
CASSLRQNYGYTF

SEQ ID NO: 20119 - protein, 16 aa, Homo sapiens
  CDR3 for alpha chain variable domain of TCR clone 10060 (TRAV13-1, TRAJ52)
CAAIMRGGTSYGKLTF

SEQ ID NO: 20120 - protein, 15 aa, Homo sapiens
  CDR3 for beta chain variable domain of TCR clone 10060 (TRBV3-1, TRBJ2-7)
CASSQVAGAQYEQYF

SEQ ID NO: 20121 - protein, 11 aa, Homo sapiens
  CDR3 for alpha chain variable domain of TCR clone 10061 (TRAV17, TRAJ31)
CATSNNARLMF

SEQ ID NO: 20122 - protein, 16 aa, Homo sapiens
  CDR3 for beta chain variable domain of TCR clone 10061 (TRBV4-2, TRBJ2-3)
CASSQELAGDTDTQYF

SEQ ID NO: 20123 - protein, 15 aa, Homo sapiens
  CDR3 for alpha chain variable domain of TCR clone 10062 (TRAV9-2, TRAJ8)
CALRGLNTGFQKLVF

SEQ ID NO: 20124 - protein, 12 aa, Homo sapiens
  CDR3 for beta chain variable domain of TCR clone 10062 (TRBV12-5, TRBJ2-5)
CASGQGVETQYF

SEQ ID NO: 20125 - protein, 15 aa, Homo sapiens
  CDR3 for alpha chain variable domain of TCR clone 10063 (TRAV17, TRAJ57)
CATGPSQGGSEKLVF

SEQ ID NO: 20126 - protein, 11 aa, Homo sapiens
  CDR3 for beta chain variable domain of TCR clone 10063 (TRBV11-2, TRBJ2-2)
CASSLPGELFF

SEQ ID NO: 20127 - protein, 13 aa, Homo sapiens
  CDR3 for alpha chain variable domain of TCR clone 10064 (TRAV6, TRAJ22)
CAPFSGSARQLTF

SEQ ID NO: 20128 - protein, 13 aa, Homo sapiens
  CDR3 for beta chain variable domain of TCR clone 10064 (TRBV19, TRBJ2-7)
CASRKAGGSEQYF

SEQ ID NO: 20129 - protein, 18 aa, Homo sapiens
  CDR3 for alpha chain variable domain of TCR clone 10065 (TRAV26-1, TRAJ52)
CIVRVEGAGGTSYGKLTF

SEQ ID NO: 20130 - protein, 16 aa, Homo sapiens
  CDR3 for beta chain variable domain of TCR clone 10065 (TRBV7-3, TRBJ2-1)
CASSLEGYRSYNEQFF

SEQ ID NO: 20131 - protein, 12 aa, Homo sapiens
  CDR3 for alpha chain variable domain of TCR clone 10066 (TRAV17, TRAJ12)
CATLRSSYKLIF

SEQ ID NO: 20132 - protein, 16 aa, Homo sapiens
  CDR3 for beta chain variable domain of TCR clone 10066 (TRBV3-1, TRBJ2-7)
CASSQGATGVAYEQYF

SEQ ID NO: 20133 - protein, 15 aa, Homo sapiens
  CDR3 for alpha chain variable domain of TCR clone 10067 (TRAV23/DV6, TRAJ18)
CAARYRGSTLGRLYF

SEQ ID NO: 20134 - protein, 15 aa, Homo sapiens
  CDR3 for beta chain variable domain of TCR clone 10067 (TRBV20-1, TRBJ2-7)
CSARDRVSGVDEQYF

SEQ ID NO: 20135 - protein, 14 aa, Homo sapiens
  CDR3 for alpha chain variable domain of TCR clone 10068 (TRAV8-4, TRAJ13)
CAVTLSGGYQKVTF

SEQ ID NO: 20136 - protein, 14 aa, Homo sapiens
  CDR3 for beta chain variable domain of TCR clone 10068 (TRBV7-2, TRBJ1-2)
CASSQTGSTYGYAF

SEQ ID NO: 20137 - protein, 14 aa, Homo sapiens
  CDR3 for alpha chain variable domain of TCR clone 10069 (TRAV23/DV6, TRAJ24)
CAASLSDSWGKLQF

SEQ ID NO: 20138 - protein, 15 aa, Homo sapiens
  CDR3 for beta chain variable domain of TCR clone 10069 (TRBV9, TRBJ1-6)
CASSVAGTGDSPLHF

SEQ ID NO: 20139 - protein, 15 aa, Homo sapiens
  CDR3 for alpha chain variable domain of TCR clone 10070 (TRAV21, TRAJ40)
CTVRPQTSGTYKYIF

SEQ ID NO: 20140 - protein, 13 aa, Homo sapiens
  CDR3 for beta chain variable domain of TCR clone 10070 (TRBV7-2, TRBJ2-2)
CASSSVRAGELFF

SEQ ID NO: 20141 - protein, 14 aa, Homo sapiens
  CDR3 for alpha chain variable domain of TCR clone 10071 (TRAV23/DV6, TRAJ39)
CAASMRGAGNMLTF

SEQ ID NO: 20142 - protein, 14 aa, Homo sapiens
  CDR3 for beta chain variable domain of TCR clone 10071 (TRBV10-3, TRBJ2-3)
CAISVTRSRDTQYF

SEQ ID NO: 20143 - protein, 17 aa, Homo sapiens
  CDR3 for alpha chain variable domain of TCR clone 10072 (TRAV19, TRAJ28)
CALSEASSGAGSYQLTF

SEQ ID NO: 20144 - protein, 13 aa, Homo sapiens
  CDR3 for beta chain variable domain of TCR clone 10072 (TRBV3-1, TRBJ1-1)
CASSPGVITEAFF

SEQ ID NO: 20145 - protein, 12 aa, Homo sapiens
  CDR3 for alpha chain variable domain of TCR clone 10073 (TRAV1-1, TRAJ29)
CAVEFRKHTSCL

SEQ ID NO: 20146 - protein, 15 aa, Homo sapiens
  CDR3 for beta chain variable domain of TCR clone 10073 (TRBV19, TRBJ2-1)
CASSSPGVPLDEQFF

SEQ ID NO: 20147 - protein, 14 aa, Homo sapiens
  CDR3 for alpha chain variable domain of TCR clone 10074 (TRAV27, TRAJ45)
CAGAQEEVLTDSPL

SEQ ID NO: 20148 - protein, 17 aa, Homo sapiens
  CDR3 for beta chain variable domain of TCR clone 10074 (TRBV11-2, TRBJ2-1)
CASSLYPPGVEYNEQFF

SEQ ID NO: 20149 - protein, 17 aa, Homo sapiens
  CDR3 for alpha chain variable domain of TCR clone 10075 (TRAV23/DV6, )
CAADIQNPDPAVYQLRD

SEQ ID NO: 20150 - protein, 14 aa, Homo sapiens
  CDR3 for beta chain variable domain of TCR clone 10075 (TRBV5-7, TRBJ1-6)
CASSFAGHNSPLHF

SEQ ID NO: 20151 - protein, 14 aa, Homo sapiens
  CDR3 for alpha chain variable domain of TCR clone 10076 (TRAV2, TRAJ37)
CAVDFTSNTVKLIF

SEQ ID NO: 20152 - protein, 15 aa, Homo sapiens
  CDR3 for beta chain variable domain of TCR clone 10076 (TRBV20-1, TRBJ1-1)
CSASRGVTGNTEAFF

SEQ ID NO: 20153 - protein, 15 aa, Homo sapiens
  CDR3 for alpha chain variable domain of TCR clone 10077 (TRAV12-2, TRAJ42)
CAVNSHGGSQGNLIL

SEQ ID NO: 20154 - protein, 13 aa, Homo sapiens
  CDR3 for beta chain variable domain of TCR clone 10077 (TRBV27, TRBJ1-1)
CASSVSANTEAFF

SEQ ID NO: 20155 - protein, 14 aa, Homo sapiens
  CDR3 for alpha chain variable domain of TCR clone 10078 (TRAV21, TRAJ40)
CAVVWTSGTYKYIF

SEQ ID NO: 20156 - protein, 12 aa, Homo sapiens
  CDR3 for beta chain variable domain of TCR clone 10078 (TRBV28, TRBJ2-6)
CAIQAGANVLTF

SEQ ID NO: 20157 - protein, 15 aa, Homo sapiens
  CDR3 for alpha chain variable domain of TCR clone 10079 (TRAV26-1, TRAJ29)
CIIRVEGSGNTPLVF

SEQ ID NO: 20158 - protein, 15 aa, Homo sapiens
  CDR3 for beta chain variable domain of TCR clone 10079 (TRBV7-9, TRBJ1-5)
CASSQGHQPNQPQHF

SEQ ID NO: 20159 - protein, 13 aa, Homo sapiens
  CDR3 for alpha chain variable domain of TCR clone 10080 (TRAV27, TRAJ41)
CAGEGNSGDALNF

SEQ ID NO: 20160 - protein, 14 aa, Homo sapiens
  CDR3 for beta chain variable domain of TCR clone 10080 (TRBV7-2, TRBJ1-1)
CASSFLTGTTEAFF

SEQ ID NO: 20161 - protein, 15 aa, Homo sapiens
  CDR3 for alpha chain variable domain of TCR clone 10081 (TRAV8-3, TRAJ11)
CAVGLLNSGYSTLTF

SEQ ID NO: 20162 - protein, 16 aa, Homo sapiens
  CDR3 for beta chain variable domain of TCR clone 10081 (TRBV15, TRBJ1-2)
CATSRGPRTGGGGYTF

SEQ ID NO: 20163 - protein, 14 aa, Homo sapiens
  CDR3 for alpha chain variable domain of TCR clone 10082 (TRAV26-1, TRAJ39)
CIVRGSRAGNMLTL

SEQ ID NO: 20164 - protein, 15 aa, Homo sapiens
  CDR3 for beta chain variable domain of TCR clone 10082 (TRBV7-9, TRBJ1-5)
CASSQGHQPNQPQHF

SEQ ID NO: 20165 - protein, 15 aa, Homo sapiens
  CDR3 for alpha chain variable domain of TCR clone 10083 (TRAV8-3, TRAJ45)
CASSYSGGGAGGLTF

SEQ ID NO: 20166 - protein, 13 aa, Homo sapiens
  CDR3 for beta chain variable domain of TCR clone 10083 (TRBV10-3, TRBJ2-7)
CASKLAVNYEQYF

SEQ ID NO: 20167 - protein, 16 aa, Homo sapiens
  CDR3 for alpha chain variable domain of TCR clone 10084 (TRAV16, TRAJ57)
CAPYLITQGGSEKLVF

SEQ ID NO: 20168 - protein, 17 aa, Homo sapiens
  CDR3 for beta chain variable domain of TCR clone 10084 (TRBV24-1, TRBJ2-4)
CATSDAEARGVRNMQYF

SEQ ID NO: 20169 - protein, 10 aa, Homo sapiens
  CDR3 for alpha chain variable domain of TCR clone 10085 (TRAV16, TRAJ22)
SAMYLRQLTF

SEQ ID NO: 20170 - protein, 16 aa, Homo sapiens
  CDR3 for beta chain variable domain of TCR clone 10085 (TRBV12-4, TRBJ2-1)
CASSAVGQGNGDEQFF

SEQ ID NO: 20171 - protein, 11 aa, Homo sapiens
  CDR3 for alpha chain variable domain of TCR clone 10086 (TRAV2, TRAJ13)
CASGGYQKVTF

SEQ ID NO: 20172 - protein, 17 aa, Homo sapiens
  CDR3 for beta chain variable domain of TCR clone 10086 (TRBV13, TRBJ2-3)
CASSLSRVAGGRNTQYF

SEQ ID NO: 20173 - protein, 15 aa, Homo sapiens
  CDR3 for alpha chain variable domain of TCR clone 10087 (TRAV8-3, TRAJ45)
CASSYLGGGADGLTF

SEQ ID NO: 20174 - protein, 13 aa, Homo sapiens
  CDR3 for beta chain variable domain of TCR clone 10087 (TRBV10-3, TRBJ2-7)
CASKLAVNYEQYF

SEQ ID NO: 20175 - protein, 14 aa, Homo sapiens
  CDR3 for alpha chain variable domain of TCR clone 10088 (TRAV38-1, TRAJ45)
CAYYSGGGADGLTF

SEQ ID NO: 20176 - protein, 15 aa, Homo sapiens
  CDR3 for beta chain variable domain of TCR clone 10088 (TRBV7-6, TRBJ2-1)
CASSLGGQSHNEQFF

SEQ ID NO: 20177 - protein, 14 aa, Homo sapiens
  CDR3 for alpha chain variable domain of TCR clone 10089 (TRAV35, TRAJ50)
CAGHRKTSYDKAIF

SEQ ID NO: 20178 - protein, 13 aa, Homo sapiens
  CDR3 for beta chain variable domain of TCR clone 10089 (TRBV7-7, TRBJ2-3)
CASSLSRADTQYF

SEQ ID NO: 20179 - protein, 15 aa, Homo sapiens
  CDR3 for alpha chain variable domain of TCR clone 10090 (TRAV1-2, TRAJ28)
CAVQYSGAGSYQLTF

SEQ ID NO: 20180 - protein, 13 aa, Homo sapiens
  CDR3 for beta chain variable domain of TCR clone 10090 (TRBV28, TRBJ2-7)
CASKAGGVYEQYF

SEQ ID NO: 20181 - protein, 12 aa, Homo sapiens
  CDR3 for alpha chain variable domain of TCR clone 10091 (TRAV2, TRAJ9)
CAVGAGGFKTIF

SEQ ID NO: 20182 - protein, 16 aa, Homo sapiens
  CDR3 for beta chain variable domain of TCR clone 10091 (TRBV24-1, TRBJ2-3)
CATSDRRQDLTDTQYF

SEQ ID NO: 20183 - protein, 16 aa, Homo sapiens
  CDR3 for alpha chain variable domain of TCR clone 10092 (TRAV21, TRAJ52)
CAVNNAGGTSYGKLTF

SEQ ID NO: 20184 - protein, 13 aa, Homo sapiens
  CDR3 for beta chain variable domain of TCR clone 10092 (TRBV7-3, TRBJ2-3)
CASSLRGSQTQYF

SEQ ID NO: 20185 - protein, 14 aa, Homo sapiens
  CDR3 for alpha chain variable domain of TCR clone 10093 (TRAV8-3, TRAJ4)
CAVGASGGYNKLIF

SEQ ID NO: 20186 - protein, 16 aa, Homo sapiens
  CDR3 for beta chain variable domain of TCR clone 10093 (TRBV2, TRBJ2-1)
CASSVGGSLSYNEQFF

SEQ ID NO: 20187 - protein, 12 aa, Homo sapiens
  CDR3 for alpha chain variable domain of TCR clone 10094 (TRAV13-1, TRAJ42)
SVLRGSQGNLIF

SEQ ID NO: 20188 - protein, 13 aa, Homo sapiens
  CDR3 for beta chain variable domain of TCR clone 10094 (TRBV2, TRBJ1-4)
CASSELGAEKLFF

SEQ ID NO: 20189 - protein, 13 aa, Homo sapiens
  CDR3 for alpha chain variable domain of TCR clone 10095 (TRAV29/DV5, TRAJ48)
CAASLFGNEKLTF

SEQ ID NO: 20190 - protein, 15 aa, Homo sapiens
  CDR3 for beta chain variable domain of TCR clone 10095 (TRBV20-1, TRBJ1-1)
CSAKPGQKMNTEAFF

SEQ ID NO: 20191 - protein, 13 aa, Homo sapiens
  CDR3 for alpha chain variable domain of TCR clone 10096 (TRAV6, TRAJ40)
CALVTSGTYKYIF

SEQ ID NO: 20192 - protein, 13 aa, Homo sapiens
  CDR3 for beta chain variable domain of TCR clone 10096 (TRBV28, TRBJ2-7)
CASRFTPRPEQYF

SEQ ID NO: 20193 - protein, 12 aa, Homo sapiens
  CDR3 for alpha chain variable domain of TCR clone 10097 (TRAV29/DV5, TRAJ49)
CAATDTGNQFYF

SEQ ID NO: 20194 - protein, 15 aa, Homo sapiens
  CDR3 for beta chain variable domain of TCR clone 10097 (TRBV28, TRBJ1-3)
CASSMGWASGNTIYF

SEQ ID NO: 20195 - protein, 14 aa, Homo sapiens
  CDR3 for alpha chain variable domain of TCR clone 10098 (TRAV29/DV5, TRAJ28)
CAATEGAGSYQLTF

SEQ ID NO: 20196 - protein, 15 aa, Homo sapiens
  CDR3 for beta chain variable domain of TCR clone 10098 (TRBV7-8, TRBJ2-1)
CASSLHGGPYNEQFF

SEQ ID NO: 20197 - protein, 14 aa, Homo sapiens
  CDR3 for alpha chain variable domain of TCR clone 10099 (TRAV1-2, TRAJ8)
CAMREDTGFQKLVF

SEQ ID NO: 20198 - protein, 15 aa, Homo sapiens
  CDR3 for beta chain variable domain of TCR clone 10099 (TRBV6-3, TRBJ2-7)
CASSSPGTVFYEQYF

SEQ ID NO: 20199 - protein, 15 aa, Homo sapiens
  CDR3 for alpha chain variable domain of TCR clone 10100 (TRAV8-2, TRAJ28)
CVVSESGAGSYQLTF

SEQ ID NO: 20200 - protein, 16 aa, Homo sapiens
  CDR3 for beta chain variable domain of TCR clone 10100 (TRBV6-1, TRBJ2-5)
CASSETLDRGAETQYF

SEQ ID NO: 20201 - protein, 16 aa, Homo sapiens
  CDR3 for alpha chain variable domain of TCR clone 10101 (TRAV12-3, TRAJ53)
CATSPGSGGSNYKLTF

SEQ ID NO: 20202 - protein, 11 aa, Homo sapiens
  CDR3 for beta chain variable domain of TCR clone 10101 (TRBV29-1, TRBJ2-5)
CSEDRTGTQYF

SEQ ID NO: 20203 - protein, 16 aa, Homo sapiens
  CDR3 for alpha chain variable domain of TCR clone 10102 (TRAV12-3, TRAJ53)
CAMSPGSGGSNYKLTF

SEQ ID NO: 20204 - protein, 11 aa, Homo sapiens
  CDR3 for beta chain variable domain of TCR clone 10102 (TRBV29-1, TRBJ2-5)
CSEDRTGTQYF

SEQ ID NO: 20205 - protein, 14 aa, Homo sapiens
  CDR3 for alpha chain variable domain of TCR clone 10103 (TRAV35, TRAJ22)
CAGLRPGSARQLTF

SEQ ID NO: 20206 - protein, 15 aa, Homo sapiens
  CDR3 for beta chain variable domain of TCR clone 10103 (TRBV12-4, TRBJ2-5)
CASSPLTGLQETQYF

SEQ ID NO: 20207 - protein, 15 aa, Homo sapiens
  CDR3 for alpha chain variable domain of TCR clone 10104 (TRAV29/DV5, TRAJ8)
CAASGRNTGFQKLVF

SEQ ID NO: 20208 - protein, 15 aa, Homo sapiens
  CDR3 for beta chain variable domain of TCR clone 10104 (TRBV5-1, TRBJ2-1)
CASTGSGRTYNEQFF

SEQ ID NO: 20209 - protein, 15 aa, Homo sapiens
  CDR3 for alpha chain variable domain of TCR clone 10105 (TRAV3, TRAJ20)
CAVRDIKLSDYKLSF

SEQ ID NO: 20210 - protein, 15 aa, Homo sapiens
  CDR3 for beta chain variable domain of TCR clone 10105 (TRBV7-9, TRBJ1-6)
CASSSPGCGNSPLHF

SEQ ID NO: 20211 - protein, 15 aa, Homo sapiens
  CDR3 for alpha chain variable domain of TCR clone 10106 (TRAV26-1, TRAJ29)
CIVRVEGSGNTPLVF

SEQ ID NO: 20212 - protein, 15 aa, Homo sapiens
  CDR3 for beta chain variable domain of TCR clone 10106 (TRBV7-9, TRBJ1-5)
CAGSQGHQPNQPQHF

SEQ ID NO: 20213 - protein, 13 aa, Homo sapiens
  CDR3 for alpha chain variable domain of TCR clone 10107 (TRAV21, TRAJ57)
CAVTQGGPEKLVF

SEQ ID NO: 20214 - protein, 16 aa, Homo sapiens
  CDR3 for beta chain variable domain of TCR clone 10107 (TRBV29-1, TRBJ2-7)
CSVEDAEDGTAYEQYF

SEQ ID NO: 20215 - protein, 15 aa, Homo sapiens
  CDR3 for alpha chain variable domain of TCR clone 10108 (TRAV26-1, TRAJ48)
CIVRVGGFGNEKLTF

SEQ ID NO: 20216 - protein, 16 aa, Homo sapiens
  CDR3 for beta chain variable domain of TCR clone 10108 (TRBV4-1, TRBJ2-3)
CASSQRAGGLTDTQYF

SEQ ID NO: 20217 - protein, 13 aa, Homo sapiens
  CDR3 for alpha chain variable domain of TCR clone 10109 (TRAV2, TRAJ40)
CSVVTSGTYKYIF

SEQ ID NO: 20218 - protein, 14 aa, Homo sapiens
  CDR3 for beta chain variable domain of TCR clone 10109 (TRBV19, TRBJ2-1)
CASPTFVLSGEQFF

SEQ ID NO: 20219 - protein, 15 aa, Homo sapiens
  CDR3 for alpha chain variable domain of TCR clone 10110 (TRAV21, TRAJ32)
CAVNSYGGATNKLIF

SEQ ID NO: 20220 - protein, 13 aa, Homo sapiens
  CDR3 for beta chain variable domain of TCR clone 10110 (TRBV4-2, TRBJ1-1)
CASSQAGNTEAFF

SEQ ID NO: 20221 - protein, 16 aa, Homo sapiens
  CDR3 for alpha chain variable domain of TCR clone 10111 (TRAV8-4, TRAJ53)
CAVSVSPGGSNYKLTF

SEQ ID NO: 20222 - protein, 16 aa, Homo sapiens
  CDR3 for beta chain variable domain of TCR clone 10111 (TRBV7-3, TRBJ2-2)
CASSLKRGTLSGELFF

SEQ ID NO: 20223 - protein, 11 aa, Homo sapiens
  CDR3 for alpha chain variable domain of TCR clone 10112 (TRAV2, TRAJ13)
CASGGYQKVTF

SEQ ID NO: 20224 - protein, 12 aa, Homo sapiens
  CDR3 for beta chain variable domain of TCR clone 10112 (TRBV14, TRBJ2-7)
CASSSLKGEQYF

SEQ ID NO: 20225 - protein, 14 aa, Homo sapiens
  CDR3 for alpha chain variable domain of TCR clone 10113 (TRAV13-1, TRAJ3)
CAASKSSSASKIIF

SEQ ID NO: 20226 - protein, 15 aa, Homo sapiens
  CDR3 for beta chain variable domain of TCR clone 10113 (TRBV5-5, TRBJ2-2)
CASSRQASGAGELFF

SEQ ID NO: 20227 - protein, 14 aa, Homo sapiens
  CDR3 for alpha chain variable domain of TCR clone 10114 (TRAV26-1, TRAJ45)
CIEVTGGGADGLTF

SEQ ID NO: 20228 - protein, 15 aa, Homo sapiens
  CDR3 for beta chain variable domain of TCR clone 10114 (TRBV6-3, TRBJ2-7)
CASSSPGTVFYEQYF

SEQ ID NO: 20229 - protein, 13 aa, Homo sapiens
  CDR3 for alpha chain variable domain of TCR clone 10115 (TRAV2, TRAJ40)
CAVVTSGTYKYIF

SEQ ID NO: 20230 - protein, 14 aa, Homo sapiens
  CDR3 for beta chain variable domain of TCR clone 10115 (TRBV19, TRBJ2-1)
CDSPTFVLSGEQFF

SEQ ID NO: 20231 - protein, 13 aa, Homo sapiens
  CDR3 for alpha chain variable domain of TCR clone 10116 (TRAV12-1, TRAJ6)
CVVFPGGSYIPTF

SEQ ID NO: 20232 - protein, 13 aa, Homo sapiens
  CDR3 for beta chain variable domain of TCR clone 10116 (TRBV12-4, TRBJ2-7)
CASSFVPTAEQYF

SEQ ID NO: 20233 - protein, 12 aa, Homo sapiens
  CDR3 for alpha chain variable domain of TCR clone 10117 (TRAV8-3, TRAJ43)
CAVGAGNNDMRF

SEQ ID NO: 20234 - protein, 18 aa, Homo sapiens
  CDR3 for beta chain variable domain of TCR clone 10117 (TRBV11-2, TRBJ2-3)
CASSLGGASRGAPNTQYF

SEQ ID NO: 20235 - protein, 14 aa, Homo sapiens
  CDR3 for alpha chain variable domain of TCR clone 10118 (TRAV26-1, TRAJ52)
CIVRVGTSYGKLTF

SEQ ID NO: 20236 - protein, 13 aa, Homo sapiens
  CDR3 for beta chain variable domain of TCR clone 10118 (TRBV7-2, TRBJ1-1)
CASSLKASTEAFF

SEQ ID NO: 20237 - protein, 12 aa, Homo sapiens
  CDR3 for alpha chain variable domain of TCR clone 10119 (TRAV20, TRAJ56)
CAVTGANSKLTF

SEQ ID NO: 20238 - protein, 14 aa, Homo sapiens
  CDR3 for beta chain variable domain of TCR clone 10119 (TRBV20-1, TRBJ2-5)
CSALVPGYQETQYS

SEQ ID NO: 20239 - protein, 10 aa, Homo sapiens
  CDR3 for alpha chain variable domain of TCR clone 10120 (TRAV1-2, TRAJ20)
CVPNDYKLSF

SEQ ID NO: 20240 - protein, 16 aa, Homo sapiens
  CDR3 for beta chain variable domain of TCR clone 10120 (TRBV20-1, TRBJ1-1)
CSARDRMGGMNTEAFF

SEQ ID NO: 20241 - protein, 10 aa, Homo sapiens
  CDR3 for alpha chain variable domain of TCR clone 10121 (TRAV27, TRAJ58)
SETSGSRLTF

SEQ ID NO: 20242 - protein, 13 aa, Homo sapiens
  CDR3 for beta chain variable domain of TCR clone 10121 (TRBV4-2, TRBJ1-1)
CASSQAGNTEAFF

SEQ ID NO: 20243 - protein, 14 aa, Homo sapiens
  CDR3 for alpha chain variable domain of TCR clone 10122 (TRAV8-6, TRAJ34)
CAVSDQGNTDKLIF

SEQ ID NO: 20244 - protein, 15 aa, Homo sapiens
  CDR3 for beta chain variable domain of TCR clone 10122 (TRBV2, TRBJ2-7)
CASSEGLARSYEQYF

SEQ ID NO: 20245 - protein, 13 aa, Homo sapiens
  CDR3 for alpha chain variable domain of TCR clone 10123 (TRAV16, TRAJ39)
CALKDNAGNMLTF

SEQ ID NO: 20246 - protein, 17 aa, Homo sapiens
  CDR3 for beta chain variable domain of TCR clone 10123 (TRBV6-1, TRBJ2-1)
CASSVDLRGGLYNEQFF

SEQ ID NO: 20247 - protein, 13 aa, Homo sapiens
  CDR3 for alpha chain variable domain of TCR clone 10124 (TRAV20, TRAJ37)
CAGCSSNTGKLIF

SEQ ID NO: 20248 - protein, 21 aa, Homo sapiens
  CDR3 for beta chain variable domain of TCR clone 10124 (TRBV4-2, TRBJ2-3)
PCSQKTRPCISVPATPDTQYF

SEQ ID NO: 20249 - protein, 11 aa, Homo sapiens
  CDR3 for alpha chain variable domain of TCR clone 10125 (TRAV13-1, TRAJ15)
CAATPGTALIF

SEQ ID NO: 20250 - protein, 11 aa, Homo sapiens
  CDR3 for beta chain variable domain of TCR clone 10125 (TRBV6-1, TRBJ2-1)
CASISSNEQFF

SEQ ID NO: 20251 - protein, 14 aa, Homo sapiens
  CDR3 for alpha chain variable domain of TCR clone 10126 (TRAV19, TRAJ15)
CALRIEQAGTALIF

SEQ ID NO: 20252 - protein, 19 aa, Homo sapiens
  CDR3 for beta chain variable domain of TCR clone 10126 (TRBV28, TRBJ2-4)
CASSFQPGGPAHSKNIQYF

SEQ ID NO: 20253 - protein, 12 aa, Homo sapiens
  CDR3 for alpha chain variable domain of TCR clone 10127 (TRAV3, TRAJ7)
CADLLWEQQTRF

SEQ ID NO: 20254 - protein, 12 aa, Homo sapiens
  CDR3 for beta chain variable domain of TCR clone 10127 (TRBV7-3, TRBJ2-5)
CQQLPGGETQYF

SEQ ID NO: 20255 - protein, 17 aa, Homo sapiens
  CDR3 for alpha chain variable domain of TCR clone 10128 (TRAV3, TRAJ42)
CAVRDRDYGGSKGNLIF

SEQ ID NO: 20256 - protein, 15 aa, Homo sapiens
  CDR3 for beta chain variable domain of TCR clone 10128 (TRBV6-6, TRBJ2-7)
CASSYSYGGSYEQYF

SEQ ID NO: 20257 - protein, 14 aa, Homo sapiens
  CDR3 for alpha chain variable domain of TCR clone 10129 (TRAV29/DV5, TRAJ36)
CAARRKTGANNLLG

SEQ ID NO: 20258 - protein, 14 aa, Homo sapiens
  CDR3 for beta chain variable domain of TCR clone 10129 (TRBV12-5, TRBJ2-5)
CASGSRTHQETQYF

SEQ ID NO: 20259 - protein, 17 aa, Homo sapiens
  CDR3 for alpha chain variable domain of TCR clone 10130 (TRAV3, TRAJ6)
CAVRDGPRAEGSYIPTF

SEQ ID NO: 20260 - protein, 14 aa, Homo sapiens
  CDR3 for beta chain variable domain of TCR clone 10130 (TRBV7-2, TRBJ2-7)
CASSPKTSFYEQYF

SEQ ID NO: 20261 - protein, 13 aa, Homo sapiens
  CDR3 for alpha chain variable domain of TCR clone 10131 (TRAV36/DV7, TRAJ37)
CAAFSSNTGKLIF

SEQ ID NO: 20262 - protein, 18 aa, Homo sapiens
  CDR3 for beta chain variable domain of TCR clone 10131 (TRBV11-2, TRBJ2-3)
CASSLGGASRGAPNTQYF

SEQ ID NO: 20263 - protein, 16 aa, Homo sapiens
  CDR3 for alpha chain variable domain of TCR clone 10132 (TRAV1-2, TRAJ10)
CAVRGVLTGGGNKLTF

SEQ ID NO: 20264 - protein, 15 aa, Homo sapiens
  CDR3 for beta chain variable domain of TCR clone 10132 (TRBV9, TRBJ1-6)
CASSVAGTGDSPLHF

SEQ ID NO: 20265 - protein, 14 aa, Homo sapiens
  CDR3 for alpha chain variable domain of TCR clone 10133 (TRAV26-1, TRAJ48)
CIVSSNFGNEKLTF

SEQ ID NO: 20266 - protein, 13 aa, Homo sapiens
  CDR3 for beta chain variable domain of TCR clone 10133 (TRBV3-1, TRBJ2-5)
CASSLGLVGTQYF

SEQ ID NO: 20267 - protein, 14 aa, Homo sapiens
  CDR3 for alpha chain variable domain of TCR clone 10134 (TRAV2, TRAJ29)
CAVESYSGNTPLVF

SEQ ID NO: 20268 - protein, 15 aa, Homo sapiens
  CDR3 for beta chain variable domain of TCR clone 10134 (TRBV19, TRBJ2-5)
CASSIARARGETQYF

SEQ ID NO: 20269 - protein, 15 aa, Homo sapiens
  CDR3 for alpha chain variable domain of TCR clone 10135 (TRAV3, TRAJ22)
CAVRDRGGSARQLTF

SEQ ID NO: 20270 - protein, 12 aa, Homo sapiens
  CDR3 for beta chain variable domain of TCR clone 10135 (TRBV7-2, TRBJ2-1)
CASSPQDIEQFF

SEQ ID NO: 20271 - protein, 14 aa, Homo sapiens
  CDR3 for alpha chain variable domain of TCR clone 10136 (TRAV8-4, TRAJ8)
CAVIGNTGFQKLVF

SEQ ID NO: 20272 - protein, 16 aa, Homo sapiens
  CDR3 for beta chain variable domain of TCR clone 10136 (TRBV9, TRBJ2-1)
CASSVEGDGSYNEQFF

SEQ ID NO: 20273 - protein, 14 aa, Homo sapiens
  CDR3 for alpha chain variable domain of TCR clone 10137 (TRAV12-2, TRAJ13)
CAVKKTGGYQKVTF

SEQ ID NO: 20274 - protein, 20 aa, Homo sapiens
  CDR3 for beta chain variable domain of TCR clone 10137 (TRBV19, TRBJ2-1)
CASSISRTVTSTRLNNEQFF

SEQ ID NO: 20275 - protein, 14 aa, Homo sapiens
  CDR3 for alpha chain variable domain of TCR clone 10138 (TRAV1-2, TRAJ16)
CAVNRFSDGQKLLF

SEQ ID NO: 20276 - protein, 15 aa, Homo sapiens
  CDR3 for beta chain variable domain of TCR clone 10138 (TRBV4-1, TRBJ2-5)
CASSQWDLYQETQYF

SEQ ID NO: 20277 - protein, 16 aa, Homo sapiens
  CDR3 for alpha chain variable domain of TCR clone 10139 (TRAV12-3, TRAJ53)
CAMSPGSVGSNYKLTF

SEQ ID NO: 20278 - protein, 11 aa, Homo sapiens
  CDR3 for beta chain variable domain of TCR clone 10139 (TRBV29-1, TRBJ2-5)
CSEDRTGTQYF

SEQ ID NO: 20279 - protein, 17 aa, Homo sapiens
  CDR3 for alpha chain variable domain of TCR clone 10140 (TRAV3, TRAJ6)
CAVRDGPRAGGSYIPTF

SEQ ID NO: 20280 - protein, 13 aa, Homo sapiens
  CDR3 for beta chain variable domain of TCR clone 10140 (TRBV20-1, TRBJ2-5)
CSAATELQETQYF

SEQ ID NO: 20281 - protein, 12 aa, Homo sapiens
  CDR3 for alpha chain variable domain of TCR clone 10141 (TRAV12-2, TRAJ10)
WGVTGGGNKLTF

SEQ ID NO: 20282 - protein, 15 aa, Homo sapiens
  CDR3 for beta chain variable domain of TCR clone 10141 (TRBV10-2, TRBJ2-6)
CASSEQGTGANVLTF

SEQ ID NO: 20283 - protein, 14 aa, Homo sapiens
  CDR3 for alpha chain variable domain of TCR clone 10142 (TRAV21, TRAJ35)
RAVMPIGFGNVLHC

SEQ ID NO: 20284 - protein, 12 aa, Homo sapiens
  CDR3 for beta chain variable domain of TCR clone 10142 (TRBV7-9, TRBJ2-7)
CASSIKREEQYF

SEQ ID NO: 20285 - protein, 15 aa, Homo sapiens
  CDR3 for alpha chain variable domain of TCR clone 10143 (TRAV17, TRAJ3)
CATDGPHSSASKIIF

SEQ ID NO: 20286 - protein, 14 aa, Homo sapiens
  CDR3 for beta chain variable domain of TCR clone 10143 (TRBV4-3, TRBJ1-4)
CASSQQPVGEKLFF

SEQ ID NO: 20287 - protein, 13 aa, Homo sapiens
  CDR3 for alpha chain variable domain of TCR clone 10144 (TRAV24, TRAJ43)
CAFTRHNNNDMRF

SEQ ID NO: 20288 - protein, 13 aa, Homo sapiens
  CDR3 for beta chain variable domain of TCR clone 10144 (TRBV2, TRBJ1-1)
CASSVLMNTEAFF

SEQ ID NO: 20289 - protein, 14 aa, Homo sapiens
  CDR3 for alpha chain variable domain of TCR clone 10145 (TRAV13-1, TRAJ35)
RAASKGGFGNVLHC

SEQ ID NO: 20290 - protein, 13 aa, Homo sapiens
  CDR3 for beta chain variable domain of TCR clone 10145 (TRBV7-3, TRBJ1-1)
CASSQDWGAEAFF

SEQ ID NO: 20291 - protein, 15 aa, Homo sapiens
  CDR3 for alpha chain variable domain of TCR clone 10146 (TRAV8-4, TRAJ3)
CAVTGENLVQQCFQD

SEQ ID NO: 20292 - protein, 15 aa, Homo sapiens
  CDR3 for beta chain variable domain of TCR clone 10146 (TRBV6-3, TRBJ2-7)
CASSSPGTVFYEQYF

SEQ ID NO: 20293 - protein, 15 aa, Homo sapiens
  CDR3 for alpha chain variable domain of TCR clone 10147 (TRAV21, TRAJ53)
CATLNSGGSNYKLTF

SEQ ID NO: 20294 - protein, 13 aa, Homo sapiens
  CDR3 for beta chain variable domain of TCR clone 10147 (TRBV7-9, TRBJ1-2)
CASSLKQNYGYTF

SEQ ID NO: 20295 - protein, 14 aa, Homo sapiens
  CDR3 for alpha chain variable domain of TCR clone 10148 (TRAV24, TRAJ39)
CAFPSSQCRQHAHL

SEQ ID NO: 20296 - protein, 13 aa, Homo sapiens
  CDR3 for beta chain variable domain of TCR clone 10148 (TRBV6-5, TRBJ1-6)
CASSYERSTPLHF

SEQ ID NO: 20297 - protein, 13 aa, Homo sapiens
  CDR3 for alpha chain variable domain of TCR clone 10149 (TRAV16, TRAJ11)
CALMNSGYSTLTF

SEQ ID NO: 20298 - protein, 15 aa, Homo sapiens
  CDR3 for beta chain variable domain of TCR clone 10149 (TRBV11-3, TRBJ2-1)
CASSGGTSSLDEQFF

SEQ ID NO: 20299 - protein, 13 aa, Homo sapiens
  CDR3 for alpha chain variable domain of TCR clone 10150 (TRAV13-1, TRAJ6)
CAARRGGSYIPTF

SEQ ID NO: 20300 - protein, 14 aa, Homo sapiens
  CDR3 for beta chain variable domain of TCR clone 10150 (TRBV19, TRBJ2-1)
CASEVTGARNEQFF

SEQ ID NO: 20301 - protein, 13 aa, Homo sapiens
  CDR3 for alpha chain variable domain of TCR clone 10151 (TRAV1-2, TRAJ9)
CAALNTGGFRTIF

SEQ ID NO: 20302 - protein, 13 aa, Homo sapiens
  CDR3 for beta chain variable domain of TCR clone 10151 (TRBV19, TRBJ1-2)
CASSVPGQDGYTF

SEQ ID NO: 20303 - protein, 14 aa, Homo sapiens
  CDR3 for alpha chain variable domain of TCR clone 10152 (TRAV8-2, TRAJ4)
CVASPSGGYNKLIF

SEQ ID NO: 20304 - protein, 15 aa, Homo sapiens
  CDR3 for beta chain variable domain of TCR clone 10152 (TRBV4-1, TRBJ1-4)
CASSDTGGTNEKLFF

SEQ ID NO: 20305 - protein, 12 aa, Homo sapiens
  CDR3 for alpha chain variable domain of TCR clone 10153 (TRAV21, TRAJ13)
PGPSGGYQKVTF

SEQ ID NO: 20306 - protein, 14 aa, Homo sapiens
  CDR3 for beta chain variable domain of TCR clone 10153 (TRBV27, TRBJ2-5)
CASSSLKGWETQYF

SEQ ID NO: 20307 - protein, 13 aa, Homo sapiens
  CDR3 for alpha chain variable domain of TCR clone 10154 (TRAV1-1, TRAJ9)
CAAKNTGGFNTIF

SEQ ID NO: 20308 - protein, 14 aa, Homo sapiens
  CDR3 for beta chain variable domain of TCR clone 10154 (TRBV20-1, TRBJ2-1)
CSAQIGGSANEQFF

SEQ ID NO: 20309 - protein, 14 aa, Homo sapiens
  CDR3 for alpha chain variable domain of TCR clone 10155 (TRAV13-1, TRAJ30)
CAASPQNRDDKIIF

SEQ ID NO: 20310 - protein, 20 aa, Homo sapiens
  CDR3 for beta chain variable domain of TCR clone 10155 (TRBV10-3, TRBJ2-1)
CAISESTSGLAGWISNEQFF

SEQ ID NO: 20311 - protein, 14 aa, Homo sapiens
  CDR3 for alpha chain variable domain of TCR clone 10156 (TRAV12-1, TRAJ12)
CVVTRMDSSYKLIF

SEQ ID NO: 20312 - protein, 15 aa, Homo sapiens
  CDR3 for beta chain variable domain of TCR clone 10156 (TRBV20-1, TRBJ1-1)
CSARGGGTLKLSLDK

SEQ ID NO: 20313 - protein, 13 aa, Homo sapiens
  CDR3 for alpha chain variable domain of TCR clone 10157 (TRAV12-3, TRAJ16)
CAVQLSDGQKLLF

SEQ ID NO: 20314 - protein, 12 aa, Homo sapiens
  CDR3 for beta chain variable domain of TCR clone 10157 (TRBV12-5, TRBJ2-5)
CASGQGVETQYF

SEQ ID NO: 20315 - protein, 13 aa, Homo sapiens
  CDR3 for alpha chain variable domain of TCR clone 10158 (TRAV29/DV5, TRAJ28)
CAAHRTRSYQLTF

SEQ ID NO: 20316 - protein, 13 aa, Homo sapiens
  CDR3 for beta chain variable domain of TCR clone 10158 (TRBV6-3, TRBJ2-3)
CASSYYPADTQYF

SEQ ID NO: 20317 - protein, 14 aa, Homo sapiens
  CDR3 for alpha chain variable domain of TCR clone 10159 (TRAV1-2, TRAJ8)
CAVREDTGFQKLVF

SEQ ID NO: 20318 - protein, 15 aa, Homo sapiens
  CDR3 for beta chain variable domain of TCR clone 10159 (TRBV6-3, TRBJ2-7)
CASSSPGTVFYKQYF

SEQ ID NO: 20319 - protein, 15 aa, Homo sapiens
  CDR3 for alpha chain variable domain of TCR clone 10160 (TRAV26-1, TRAJ29)
SIVRVEGSGNTPLVF

SEQ ID NO: 20320 - protein, 15 aa, Homo sapiens
  CDR3 for beta chain variable domain of TCR clone 10160 (TRBV7-9, TRBJ1-5)
CASSQGHQPNQPQHF

SEQ ID NO: 20321 - protein, 15 aa, Homo sapiens
  CDR3 for alpha chain variable domain of TCR clone 10161 (TRAV12-2, TRAJ53)
CAVNGGGGSNYKLTF

SEQ ID NO: 20322 - protein, 13 aa, Homo sapiens
  CDR3 for beta chain variable domain of TCR clone 10161 (TRBV10-3, TRBJ2-7)
CASKLAVNYEQYF

SEQ ID NO: 20323 - protein, 12 aa, Homo sapiens
  CDR3 for alpha chain variable domain of TCR clone 10162 (TRAV12-1, TRAJ40)
CVVYSGTYKYIF

SEQ ID NO: 20324 - protein, 18 aa, Homo sapiens
  CDR3 for beta chain variable domain of TCR clone 10162 (TRBV11-2, TRBJ2-3)
CASSLGGAPRGAPNTQYF

SEQ ID NO: 20325 - protein, 14 aa, Homo sapiens
  CDR3 for alpha chain variable domain of TCR clone 10163 (TRAV13-1, TRAJ35)
CAASKGGFGNVLHC

SEQ ID NO: 20326 - protein, 13 aa, Homo sapiens
  CDR3 for beta chain variable domain of TCR clone 10163 (TRBV7-3, TRBJ1-1)
CASGQDWGAEAFF

SEQ ID NO: 20327 - protein, 14 aa, Homo sapiens
  CDR3 for alpha chain variable domain of TCR clone 10164 (TRAV12-2, TRAJ13)
CAVKKTGGYQKVTF

SEQ ID NO: 20328 - protein, 15 aa, Homo sapiens
  CDR3 for beta chain variable domain of TCR clone 10164 (TRBV27, TRBJ2-1)
CASSNGGGYSNEQFF

SEQ ID NO: 20329 - protein, 13 aa, Homo sapiens
  CDR3 for alpha chain variable domain of TCR clone 10165 (TRAV12-1, TRAJ9)
CVVLNTGGFKTIF

SEQ ID NO: 20330 - protein, 17 aa, Homo sapiens
  CDR3 for beta chain variable domain of TCR clone 10165 (TRBV20-1, TRBJ2-1)
CSASSSGLAGSYNEQFF

SEQ ID NO: 20331 - protein, 14 aa, Homo sapiens
  CDR3 for alpha chain variable domain of TCR clone 10166 (TRAV8-4, TRAJ9)
CAVRINTGGFKTIF

SEQ ID NO: 20332 - protein, 14 aa, Homo sapiens
  CDR3 for beta chain variable domain of TCR clone 10166 (TRBV10-3, TRBJ2-7)
CHQCGTSETYEQYF

SEQ ID NO: 20333 - protein, 14 aa, Homo sapiens
  CDR3 for alpha chain variable domain of TCR clone 10167 (TRAV2, TRAJ37)
CAVDFTSNTGKLIF

SEQ ID NO: 20334 - protein, 15 aa, Homo sapiens
  CDR3 for beta chain variable domain of TCR clone 10167 (TRBV20-1, TRBJ1-1)
CSASRGVTGSTEAFF

SEQ ID NO: 20335 - protein, 15 aa, Homo sapiens
  CDR3 for alpha chain variable domain of TCR clone 10168 (TRAV13-2, TRAJ40)
CAENRSRQGTYKYIF

SEQ ID NO: 20336 - protein, 16 aa, Homo sapiens
  CDR3 for beta chain variable domain of TCR clone 10168 (TRBV7-2, TRBJ2-1)
CASSLGRTSGDNEQFF

SEQ ID NO: 20337 - protein, 12 aa, Homo sapiens
  CDR3 for alpha chain variable domain of TCR clone 10169 (TRAV2, TRAJ9)
CAVGAGGFKTIF

SEQ ID NO: 20338 - protein, 16 aa, Homo sapiens
  CDR3 for beta chain variable domain of TCR clone 10169 (TRBV13, TRBJ2-2)
CASSPRTGEHTGELLF

SEQ ID NO: 20339 - protein, 13 aa, Homo sapiens
  CDR3 for alpha chain variable domain of TCR clone 10170 (TRAV1-2, TRAJ9)
CAALNTGGFKTIF

SEQ ID NO: 20340 - protein, 13 aa, Homo sapiens
  CDR3 for beta chain variable domain of TCR clone 10170 (TRBV19, TRBJ1-2)
CASSVPGRDGYTF

SEQ ID NO: 20341 - protein, 14 aa, Homo sapiens
  CDR3 for alpha chain variable domain of TCR clone 10171 (TRAV9-2, TRAJ39)
CALYIYNAGNMLTF

SEQ ID NO: 20342 - protein, 15 aa, Homo sapiens
  CDR3 for beta chain variable domain of TCR clone 10171 (TRBV20-1, TRBJ2-7)
CSAESGTSGAYEQYF

SEQ ID NO: 20343 - protein, 12 aa, Homo sapiens
  CDR3 for alpha chain variable domain of TCR clone 10172 (TRAV1-1, TRAJ23)
CAVTNQGGKLIF

SEQ ID NO: 20344 - protein, 13 aa, Homo sapiens
  CDR3 for beta chain variable domain of TCR clone 10172 (TRBV11-3, TRBJ1-1)
CASTGSLNTEAFF

SEQ ID NO: 20345 - protein, 21 aa, Homo sapiens
  CDR3 for alpha chain variable domain of TCR clone 10173 (TRAV20, )
CAVTGANNIQNPDPAVYQLRD

SEQ ID NO: 20346 - protein, 14 aa, Homo sapiens
  CDR3 for beta chain variable domain of TCR clone 10173 (TRBV20-1, TRBJ2-5)
CSALVPGYQETQYF

SEQ ID NO: 20347 - protein, 15 aa, Homo sapiens
  CDR3 for alpha chain variable domain of TCR clone 10174 (TRAV16, TRAJ48)
CALLISNFGNEKLTF

SEQ ID NO: 20348 - protein, 15 aa, Homo sapiens
  CDR3 for beta chain variable domain of TCR clone 10174 (TRBV5-4, TRBJ2-7)
CASSRFGTGSYEQYF

SEQ ID NO: 20349 - protein, 12 aa, Homo sapiens
  CDR3 for alpha chain variable domain of TCR clone 10175 (TRAV29/DV5, TRAJ15)
CAASGEGTALIF

SEQ ID NO: 20350 - protein, 15 aa, Homo sapiens
  CDR3 for beta chain variable domain of TCR clone 10175 (TRBV4-3, TRBJ1-5)
CASSHDSGGGQPQHF

SEQ ID NO: 20351 - protein, 14 aa, Homo sapiens
  CDR3 for alpha chain variable domain of TCR clone 10176 (TRAV35, TRAJ22)
RAGLRPGSARQLTF

SEQ ID NO: 20352 - protein, 15 aa, Homo sapiens
  CDR3 for beta chain variable domain of TCR clone 10176 (TRBV12-4, TRBJ2-5)
CASSPPTGLQETQYF

SEQ ID NO: 20353 - protein, 13 aa, Homo sapiens
  CDR3 for alpha chain variable domain of TCR clone 10177 (TRAV8-3, TRAJ28)
CAVGAVGSYQLTL

SEQ ID NO: 20354 - protein, 14 aa, Homo sapiens
  CDR3 for beta chain variable domain of TCR clone 10177 (TRBV7-2, TRBJ2-7)
CASRSQGAAYEQYF

SEQ ID NO: 20355 - protein, 10 aa, Homo sapiens
  CDR3 for alpha chain variable domain of TCR clone 10178 (TRAV4, TRAJ20)
CLVGDKVTTT

SEQ ID NO: 20356 - protein, 15 aa, Homo sapiens
  CDR3 for beta chain variable domain of TCR clone 10178 (TRBV18, TRBJ2-7)
CASSPSSTGNYEQYF

SEQ ID NO: 20357 - protein, 11 aa, Homo sapiens
  CDR3 for alpha chain variable domain of TCR clone 10179 (TRAV21, TRAJ11)
CAVNGCSTLTF

SEQ ID NO: 20358 - protein, 11 aa, Homo sapiens
  CDR3 for beta chain variable domain of TCR clone 10179 (TRBV19, TRBJ1-1)
CASSIGSEAFF

SEQ ID NO: 20359 - protein, 13 aa, Homo sapiens
  CDR3 for alpha chain variable domain of TCR clone 10180 (TRAV8-3, TRAJ28)
CAVGAVGSYQLTF

SEQ ID NO: 20360 - protein, 15 aa, Homo sapiens
  CDR3 for beta chain variable domain of TCR clone 10180 (TRBV7-9, TRBJ1-5)
CASSQGHQPNQHQHF

SEQ ID NO: 20361 - protein, 14 aa, Homo sapiens
  CDR3 for alpha chain variable domain of TCR clone 10181 (TRAV1-2, TRAJ16)
CAVNRFSDGQKLLF

SEQ ID NO: 20362 - protein, 16 aa, Homo sapiens
  CDR3 for beta chain variable domain of TCR clone 10181 (TRBV19, TRBJ2-2)
CASRSPGTGATGELFF

SEQ ID NO: 20363 - protein, 14 aa, Homo sapiens
  CDR3 for alpha chain variable domain of TCR clone 10182 (TRAV12-2, TRAJ5)
CAVNRSTGRRALTF

SEQ ID NO: 20364 - protein, 15 aa, Homo sapiens
  CDR3 for beta chain variable domain of TCR clone 10182 (TRBV6-6, TRBJ2-7)
CASSYSYGGSYEQYF

SEQ ID NO: 20365 - protein, 17 aa, Homo sapiens
  CDR3 for alpha chain variable domain of TCR clone 10183 (TRAV3, TRAJ6)
CAVRDGPRAGGSYIPTF

SEQ ID NO: 20366 - protein, 14 aa, Homo sapiens
  CDR3 for beta chain variable domain of TCR clone 10183 (TRBV7-2, TRBJ2-7)
CASRPKTSFYEQYF

SEQ ID NO: 20367 - protein, 14 aa, Homo sapiens
  CDR3 for alpha chain variable domain of TCR clone 10184 (TRAV9-2, TRAJ39)
CALYIYNAGNMLTF

SEQ ID NO: 20368 - protein, 13 aa, Homo sapiens
  CDR3 for beta chain variable domain of TCR clone 10184 (TRBV10-3, TRBJ2-7)
CASKLAVNYEQYF

SEQ ID NO: 20369 - protein, 11 aa, Homo sapiens
  CDR3 for alpha chain variable domain of TCR clone 10185 (TRAV21, TRAJ49)
CAHHGGNQFYF

SEQ ID NO: 20370 - protein, 12 aa, Homo sapiens
  CDR3 for beta chain variable domain of TCR clone 10185 (TRBV4-2, TRBJ2-2)
CASSHLPGELFF

SEQ ID NO: 20371 - protein, 13 aa, Homo sapiens
  CDR3 for alpha chain variable domain of TCR clone 10186 (TRAV13-1, TRAJ49)
CAAIWALGNQFYF

SEQ ID NO: 20372 - protein, 15 aa, Homo sapiens
  CDR3 for beta chain variable domain of TCR clone 10186 (TRBV7-6, TRBJ2-5)
CASSSGLAGVETQYF

SEQ ID NO: 20373 - protein, 13 aa, Homo sapiens
  CDR3 for alpha chain variable domain of TCR clone 10187 (TRAV1-2, TRAJ9)
CAALNTGGFKTTF

SEQ ID NO: 20374 - protein, 13 aa, Homo sapiens
  CDR3 for beta chain variable domain of TCR clone 10187 (TRBV19, TRBJ1-2)
CASSVPGQDGYTF

SEQ ID NO: 20375 - protein, 12 aa, Homo sapiens
  CDR3 for alpha chain variable domain of TCR clone 10188 (TRAV13-1, TRAJ53)
CAETGGNYKLTF

SEQ ID NO: 20376 - protein, 15 aa, Homo sapiens
  CDR3 for beta chain variable domain of TCR clone 10188 (TRBV7-2, TRBJ2-7)
CASSSVAGQTYEQYF

SEQ ID NO: 20377 - protein, 14 aa, Homo sapiens
  CDR3 for alpha chain variable domain of TCR clone 10189 (TRAV2, TRAJ37)
CAVDFTSNTGKLIF

SEQ ID NO: 20378 - protein, 13 aa, Homo sapiens
  CDR3 for beta chain variable domain of TCR clone 10189 (TRBV29-1, TRBJ2-2)
CSTTGVNTGELFF

SEQ ID NO: 20379 - protein, 13 aa, Homo sapiens
  CDR3 for alpha chain variable domain of TCR clone 10190 (TRAV21, TRAJ57)
CAVTQGGSGKLVF

SEQ ID NO: 20380 - protein, 16 aa, Homo sapiens
  CDR3 for beta chain variable domain of TCR clone 10190 (TRBV29-1, TRBJ2-7)
CSVEDAEDGTAYEQYF

SEQ ID NO: 20381 - protein, 18 aa, Homo sapiens
  CDR3 for alpha chain variable domain of TCR clone 10191 (TRAV8-6, TRAJ39)
CAVTPQGLIDNAGNMLTF

SEQ ID NO: 20382 - protein, 15 aa, Homo sapiens
  CDR3 for beta chain variable domain of TCR clone 10191 (TRBV9, TRBJ2-1)
CASSVGSGFYNEQFF

SEQ ID NO: 20383 - protein, 14 aa, Homo sapiens
  CDR3 for alpha chain variable domain of TCR clone 10192 (TRAV1-2, TRAJ16)
CAVNRFSDGQKLLF

SEQ ID NO: 20384 - protein, 15 aa, Homo sapiens
  CDR3 for beta chain variable domain of TCR clone 10192 (TRBV9, TRBJ1-6)
CASSVAGTGESPLHF

SEQ ID NO: 20385 - protein, 13 aa, Homo sapiens
  CDR3 for alpha chain variable domain of TCR clone 10193 (TRAV4, TRAJ33)
CLVGDMNNYQLIW

SEQ ID NO: 20386 - protein, 14 aa, Homo sapiens
  CDR3 for beta chain variable domain of TCR clone 10193 (TRBV7-9, TRBJ1-1)
CASSLGGANTVAFF

SEQ ID NO: 20387 - protein, 12 aa, Homo sapiens
  CDR3 for alpha chain variable domain of TCR clone 10194 (TRAV17, TRAJ29)
CYASSGNTPLVF

SEQ ID NO: 20388 - protein, 13 aa, Homo sapiens
  CDR3 for beta chain variable domain of TCR clone 10194 (TRBV14, TRBJ2-7)
CASSQDRRYEQYF

SEQ ID NO: 20389 - protein, 15 aa, Homo sapiens
  CDR3 for alpha chain variable domain of TCR clone 10195 (TRAV20, TRAJ39)
CAVQALLVAGNMLTF

SEQ ID NO: 20390 - protein, 13 aa, Homo sapiens
  CDR3 for beta chain variable domain of TCR clone 10195 (TRBV10-3, TRBJ2-7)
CASKLAVNYEQYF

SEQ ID NO: 20391 - protein, 14 aa, Homo sapiens
  CDR3 for alpha chain variable domain of TCR clone 10196 (TRAV12-2, TRAJ17)
CAVLFKAAGNKLPF

SEQ ID NO: 20392 - protein, 17 aa, Homo sapiens
  CDR3 for beta chain variable domain of TCR clone 10196 (TRBV20-1, TRBJ2-2)
CSASGSGQGGLTGELFF

SEQ ID NO: 20393 - protein, 13 aa, Homo sapiens
  CDR3 for alpha chain variable domain of TCR clone 10197 (TRAV27, TRAJ41)
CAGEGNSGYALNF

SEQ ID NO: 20394 - protein, 14 aa, Homo sapiens
  CDR3 for beta chain variable domain of TCR clone 10197 (TRBV7-2, TRBJ1-1)
CASSFVTGTTEAFF

SEQ ID NO: 20395 - protein, 12 aa, Homo sapiens
  CDR3 for alpha chain variable domain of TCR clone 10198 (TRAV6, TRAJ34)
CALHRGTDKLIF

SEQ ID NO: 20396 - protein, 16 aa, Homo sapiens
  CDR3 for beta chain variable domain of TCR clone 10198 (TRBV3-1, TRBJ2-5)
CASSQDWASGQETQYF

SEQ ID NO: 20397 - protein, 14 aa, Homo sapiens
  CDR3 for alpha chain variable domain of TCR clone 10199 (TRAV26-1, TRAJ45)
CIVRVVGGADRLTF

SEQ ID NO: 20398 - protein, 16 aa, Homo sapiens
  CDR3 for beta chain variable domain of TCR clone 10199 (TRBV7-9, TRBJ1-1)
CASSLTQVRSNTEAFF

SEQ ID NO: 20399 - protein, 16 aa, Homo sapiens
  CDR3 for alpha chain variable domain of TCR clone 10200 (TRAV26-1, TRAJ11)
CIVRVVLGFRIQHPHL

SEQ ID NO: 20400 - protein, 14 aa, Homo sapiens
  CDR3 for beta chain variable domain of TCR clone 10200 (TRBV25-1, TRBJ1-4)
CASSGGGQPEKLFF

SEQ ID NO: 20401 - protein, 10 aa, Homo sapiens
  CDR3 for alpha chain variable domain of TCR clone 10201 (TRAV23/DV6, TRAJ57)
CAASSTLSQG

SEQ ID NO: 20402 - protein, 14 aa, Homo sapiens
  CDR3 for beta chain variable domain of TCR clone 10201 (TRBV25-1, TRBJ1-1)
CASAHLGGNTEAFF

SEQ ID NO: 20403 - protein, 12 aa, Homo sapiens
  CDR3 for alpha chain variable domain of TCR clone 10202 (TRAV3, TRAJ20)
CAVRDPDYKLSF

SEQ ID NO: 20404 - protein, 15 aa, Homo sapiens
  CDR3 for beta chain variable domain of TCR clone 10202 (TRBV7-2, TRBJ2-1)
CASSSGLAGGNEQFF

SEQ ID NO: 20405 - protein, 17 aa, Homo sapiens
  CDR3 for alpha chain variable domain of TCR clone 10203 (TRAV16, TRAJ58)
CITVLSNGETSGSRLTF

SEQ ID NO: 20406 - protein, 16 aa, Homo sapiens
  CDR3 for beta chain variable domain of TCR clone 10203 (TRBV18, TRBJ2-1)
CQLKGLSGGADNEQFF

SEQ ID NO: 20407 - protein, 16 aa, Homo sapiens
  CDR3 for alpha chain variable domain of TCR clone 10204 (TRAV8-3, TRAJ8)
CAVPRDGNTGFQKLVF

SEQ ID NO: 20408 - protein, 15 aa, Homo sapiens
  CDR3 for beta chain variable domain of TCR clone 10204 (TRBV19, TRBJ1-5)
CASSIVWADNQPQHF

SEQ ID NO: 20409 - protein, 14 aa, Homo sapiens
  CDR3 for alpha chain variable domain of TCR clone 10205 (TRAV22, TRAJ57)
CAVELQGGSEKLVF

SEQ ID NO: 20410 - protein, 15 aa, Homo sapiens
  CDR3 for beta chain variable domain of TCR clone 10205 (TRBV20-1, TRBJ2-5)
CSAPPRTGFGETQYF

SEQ ID NO: 20411 - protein, 13 aa, Homo sapiens
  CDR3 for alpha chain variable domain of TCR clone 10206 (TRAV2, TRAJ40)
CAVVTSGTYKYIF

SEQ ID NO: 20412 - protein, 14 aa, Homo sapiens
  CDR3 for beta chain variable domain of TCR clone 10206 (TRBV19, TRBJ2-1)
YASPTFVLSGEQFF

SEQ ID NO: 20413 - protein, 14 aa, Homo sapiens
  CDR3 for alpha chain variable domain of TCR clone 10207 (TRAV1-2, TRAJ16)
CAVNRFSDGQKLLF

SEQ ID NO: 20414 - protein, 15 aa, Homo sapiens
  CDR3 for beta chain variable domain of TCR clone 10207 (TRBV7-9, TRBJ1-5)
CASSQGHQPNQPQHF

SEQ ID NO: 20415 - protein, 22 aa, Homo sapiens
  CDR3 for alpha chain variable domain of TCR clone 10208 (TRAV12-1, )
CVVLRGIPDIQNPDPAVYQLRD

SEQ ID NO: 20416 - protein, 15 aa, Homo sapiens
  CDR3 for beta chain variable domain of TCR clone 10208 (TRBV2, TRBJ2-1)
CASSEARSAYNEQFF

SEQ ID NO: 20417 - protein, 13 aa, Homo sapiens
  CDR3 for alpha chain variable domain of TCR clone 10209 (TRAV27, TRAJ45)
CRSSGGGADGLTF

SEQ ID NO: 20418 - protein, 16 aa, Homo sapiens
  CDR3 for beta chain variable domain of TCR clone 10209 (TRBV11-2, TRBJ2-1)
CQQLIPPGVEYNEQFF

SEQ ID NO: 20419 - protein, 15 aa, Homo sapiens
  CDR3 for alpha chain variable domain of TCR clone 10210 (TRAV17, TRAJ57)
CATGPSQGGSEKLFF

SEQ ID NO: 20420 - protein, 16 aa, Homo sapiens
  CDR3 for beta chain variable domain of TCR clone 10210 (TRBV12-4, TRBJ1-5)
CASSRPVGGSNQPQHF

SEQ ID NO: 20421 - protein, 13 aa, Homo sapiens
  CDR3 for alpha chain variable domain of TCR clone 10211 (TRAV12-3, TRAJ7)
CAMTPYGNNRLAF

SEQ ID NO: 20422 - protein, 16 aa, Homo sapiens
  CDR3 for beta chain variable domain of TCR clone 10211 (TRBV20-1, TRBJ1-4)
CSAPGQGLLTNEKLFF

SEQ ID NO: 20423 - protein, 12 aa, Homo sapiens
  CDR3 for alpha chain variable domain of TCR clone 10212 (TRAV12-2, TRAJ36)
CAAPRGANNLFF

SEQ ID NO: 20424 - protein, 12 aa, Homo sapiens
  CDR3 for beta chain variable domain of TCR clone 10212 (TRBV6-3, TRBJ2-7)
CASSLTPYEQYF

SEQ ID NO: 20425 - protein, 14 aa, Homo sapiens
  CDR3 for alpha chain variable domain of TCR clone 10213 (TRAV1-2, TRAJ8)
CAVREDTGFQKLVF

SEQ ID NO: 20426 - protein, 14 aa, Homo sapiens
  CDR3 for beta chain variable domain of TCR clone 10213 (TRBV7-2, TRBJ1-2)
CASSQTGSTYGYTF

SEQ ID NO: 20427 - protein, 14 aa, Homo sapiens
  CDR3 for alpha chain variable domain of TCR clone 10214 (TRAV1-2, TRAJ8)
CAVRDDTGFQKLVF

SEQ ID NO: 20428 - protein, 15 aa, Homo sapiens
  CDR3 for beta chain variable domain of TCR clone 10214 (TRBV6-3, TRBJ2-7)
CASSSPGTVFYEQYF

SEQ ID NO: 20429 - protein, 15 aa, Homo sapiens
  CDR3 for alpha chain variable domain of TCR clone 10215 (TRAV8-3, TRAJ45)
CASSYSGGGAVGLTF

SEQ ID NO: 20430 - protein, 13 aa, Homo sapiens
  CDR3 for beta chain variable domain of TCR clone 10215 (TRBV10-3, TRBJ2-7)
CASKLAVNYEQYF

SEQ ID NO: 20431 - protein, 13 aa, Homo sapiens
  CDR3 for alpha chain variable domain of TCR clone 10216 (TRAV21, TRAJ57)
CAVTQGGSEKLVF

SEQ ID NO: 20432 - protein, 16 aa, Homo sapiens
  CDR3 for beta chain variable domain of TCR clone 10216 (TRBV29-1, TRBJ2-7)
CSVDDAEDGTAYEQYF

SEQ ID NO: 20433 - protein, 12 aa, Homo sapiens
  CDR3 for alpha chain variable domain of TCR clone 10217 (TRAV12-3, TRAJ17)
CAMTLTGNKLTF

SEQ ID NO: 20434 - protein, 13 aa, Homo sapiens
  CDR3 for beta chain variable domain of TCR clone 10217 (TRBV20-1, TRBJ2-5)
CSAKGDYQETQYF

SEQ ID NO: 20435 - protein, 14 aa, Homo sapiens
  CDR3 for alpha chain variable domain of TCR clone 10218 (TRAV2, TRAJ37)
CAVDFTSNTGKLTF

SEQ ID NO: 20436 - protein, 15 aa, Homo sapiens
  CDR3 for beta chain variable domain of TCR clone 10218 (TRBV20-1, TRBJ1-1)
CSASRGVTGNTEAFF

SEQ ID NO: 20437 - protein, 14 aa, Homo sapiens
  CDR3 for alpha chain variable domain of TCR clone 10219 (TRAV1-2, TRAJ16)
CAVNRFSDGQKLLF

SEQ ID NO: 20438 - protein, 13 aa, Homo sapiens
  CDR3 for beta chain variable domain of TCR clone 10219 (TRBV9, TRBJ2-1)
CASSVGQGGEQFF

SEQ ID NO: 20439 - protein, 18 aa, Homo sapiens
  CDR3 for alpha chain variable domain of TCR clone 10220 (TRAV26-1, TRAJ23)
CIVRVGLEVWNQGGKRIF

SEQ ID NO: 20440 - protein, 16 aa, Homo sapiens
  CDR3 for beta chain variable domain of TCR clone 10220 (TRBV12-4, TRBJ2-5)
CASSFFVRGRQETQYF

SEQ ID NO: 20441 - protein, 14 aa, Homo sapiens
  CDR3 for alpha chain variable domain of TCR clone 10221 (TRAV8-4, TRAJ40)
CAVIPTSGTYKYIL

SEQ ID NO: 20442 - protein, 15 aa, Homo sapiens
  CDR3 for beta chain variable domain of TCR clone 10221 (TRBV7-2, TRBJ2-1)
CASTSASGDYNEQFF

SEQ ID NO: 20443 - protein, 14 aa, Homo sapiens
  CDR3 for alpha chain variable domain of TCR clone 10222 (TRAV9-2, TRAJ39)
CALYIYNAGNMLTF

SEQ ID NO: 20444 - protein, 13 aa, Homo sapiens
  CDR3 for beta chain variable domain of TCR clone 10222 (TRBV27, TRBJ2-7)
CASSFVSSYEQYF

SEQ ID NO: 20445 - protein, 12 aa, Homo sapiens
  CDR3 for alpha chain variable domain of TCR clone 10223 (TRAV12-3, TRAJ17)
CAMTLTGNKLTF

SEQ ID NO: 20446 - protein, 14 aa, Homo sapiens
  CDR3 for beta chain variable domain of TCR clone 10223 (TRBV5-1, TRBJ2-7)
CASSRGESLYEQYF

SEQ ID NO: 20447 - protein, 13 aa, Homo sapiens
  CDR3 for alpha chain variable domain of TCR clone 10224 (TRAV2, TRAJ40)
CAVVTSGTYKCIF

SEQ ID NO: 20448 - protein, 14 aa, Homo sapiens
  CDR3 for beta chain variable domain of TCR clone 10224 (TRBV19, TRBJ2-1)
CASPTFVLSGEQFF

SEQ ID NO: 20449 - protein, 13 aa, Homo sapiens
  CDR3 for alpha chain variable domain of TCR clone 10225 (TRAV8-6, TRAJ49)
CAVITNTGNQFYF

SEQ ID NO: 20450 - protein, 14 aa, Homo sapiens
  CDR3 for beta chain variable domain of TCR clone 10225 (TRBV19, TRBJ2-1)
CASKDPGLANEQFF

SEQ ID NO: 20451 - protein, 18 aa, Homo sapiens
  CDR3 for alpha chain variable domain of TCR clone 10226 (TRAV21, TRAJ52)
CAVRPSPAGGTSYGKLTF

SEQ ID NO: 20452 - protein, 16 aa, Homo sapiens
  CDR3 for beta chain variable domain of TCR clone 10226 (TRBV4-2, TRBJ1-2)
CASSQAGTKANYGYTF

SEQ ID NO: 20453 - protein, 10 aa, Homo sapiens
  CDR3 for alpha chain variable domain of TCR clone 10227 (TRAV12-1, TRAJ21)
CVVNPIKFYF

SEQ ID NO: 20454 - protein, 16 aa, Homo sapiens
  CDR3 for beta chain variable domain of TCR clone 10227 (TRBV20-1, TRBJ2-1)
CSARGLAESSYNEQFF

SEQ ID NO: 20455 - protein, 13 aa, Homo sapiens
  CDR3 for alpha chain variable domain of TCR clone 10228 (TRAV2, TRAJ40)
CAVVTSGTYKYIF

SEQ ID NO: 20456 - protein, 17 aa, Homo sapiens
  CDR3 for beta chain variable domain of TCR clone 10228 (TRBV13, TRBJ2-3)
CASSLSRVAGGRNTQYF

SEQ ID NO: 20457 - protein, 17 aa, Homo sapiens
  CDR3 for alpha chain variable domain of TCR clone 10229 (TRAV3, TRAJ42)
CAVRDRDYGGSQGNLIF

SEQ ID NO: 20458 - protein, 15 aa, Homo sapiens
  CDR3 for beta chain variable domain of TCR clone 10229 (TRBV2, TRBJ2-1)
CASSEEREGDNEQFF

SEQ ID NO: 20459 - protein, 16 aa, Homo sapiens
  CDR3 for alpha chain variable domain of TCR clone 10230 (TRAV3, TRAJ37)
CAVRPHGSGNTGKLIF

SEQ ID NO: 20460 - protein, 16 aa, Homo sapiens
  CDR3 for beta chain variable domain of TCR clone 10230 (TRBV7-3, TRBJ2-2)
CASSLKRGTLSGELFF

SEQ ID NO: 20461 - protein, 12 aa, Homo sapiens
  CDR3 for alpha chain variable domain of TCR clone 10231 (TRAV12-3, TRAJ17)
CAMTLTGNKLTF

SEQ ID NO: 20462 - protein, 15 aa, Homo sapiens
  CDR3 for beta chain variable domain of TCR clone 10231 (TRBV7-2, TRBJ1-2)
CASSPRAGWNYGYTF

SEQ ID NO: 20463 - protein, 15 aa, Homo sapiens
  CDR3 for alpha chain variable domain of TCR clone 10232 (TRAV3, TRAJ29)
CAVRAPLSGNTPLVF

SEQ ID NO: 20464 - protein, 15 aa, Homo sapiens
  CDR3 for beta chain variable domain of TCR clone 10232 (TRBV28, TRBJ1-1)
CASRTKGGLNTEAFF

SEQ ID NO: 20465 - protein, 14 aa, Homo sapiens
  CDR3 for alpha chain variable domain of TCR clone 10233 (TRAV12-2, TRAJ17)
CAVLFKAAGNKLTF

SEQ ID NO: 20466 - protein, 17 aa, Homo sapiens
  CDR3 for beta chain variable domain of TCR clone 10233 (TRBV20-1, TRBJ2-2)
CSASGSGQGGVTGELFF

SEQ ID NO: 20467 - protein, 13 aa, Homo sapiens
  CDR3 for alpha chain variable domain of TCR clone 10234 (TRAV13-2, TRAJ48)
CAEMDSGNEKLTF

SEQ ID NO: 20468 - protein, 15 aa, Homo sapiens
  CDR3 for beta chain variable domain of TCR clone 10234 (TRBV7-9, TRBJ1-6)
CASSSPGRGNSPLHF

SEQ ID NO: 20469 - protein, 16 aa, Homo sapiens
  CDR3 for alpha chain variable domain of TCR clone 10235 (TRAV12-2, TRAJ10)
CAVNRILTGGGNKLTF

SEQ ID NO: 20470 - protein, 12 aa, Homo sapiens
  CDR3 for beta chain variable domain of TCR clone 10235 (TRBV28, TRBJ2-7)
CASSFSSYEQYF

SEQ ID NO: 20471 - protein, 13 aa, Homo sapiens
  CDR3 for alpha chain variable domain of TCR clone 10236 (TRAV2, TRAJ40)
CAVVTSGTYKYIF

SEQ ID NO: 20472 - protein, 14 aa, Homo sapiens
  CDR3 for beta chain variable domain of TCR clone 10236 (TRBV19, TRBJ2-1)
SASPTFVLSGEQFF

SEQ ID NO: 20473 - protein, 14 aa, Homo sapiens
  CDR3 for alpha chain variable domain of TCR clone 10237 (TRAV17, TRAJ22)
CATSPSGSARQLTF

SEQ ID NO: 20474 - protein, 14 aa, Homo sapiens
  CDR3 for beta chain variable domain of TCR clone 10237 (TRBV7-2, TRBJ1-1)
CASSFLTGTTEAFF

SEQ ID NO: 20475 - protein, 12 aa, Homo sapiens
  CDR3 for alpha chain variable domain of TCR clone 10238 (TRAV12-3, TRAJ17)
CAMTLTGNKLTF

SEQ ID NO: 20476 - protein, 15 aa, Homo sapiens
  CDR3 for beta chain variable domain of TCR clone 10238 (TRBV20-1, TRBJ2-7)
SSARDRVSGMDEQYF

SEQ ID NO: 20477 - protein, 13 aa, Homo sapiens
  CDR3 for alpha chain variable domain of TCR clone 10239 (TRAV2, TRAJ40)
CAVVTSGTYKYIF

SEQ ID NO: 20478 - protein, 14 aa, Homo sapiens
  CDR3 for beta chain variable domain of TCR clone 10239 (TRBV19, TRBJ2-1)
CAIPTFVLSGEQFF

SEQ ID NO: 20479 - protein, 13 aa, Homo sapiens
  CDR3 for alpha chain variable domain of TCR clone 10240 (TRAV2, TRAJ40)
CAVVTSGTYQYIF

SEQ ID NO: 20480 - protein, 14 aa, Homo sapiens
  CDR3 for beta chain variable domain of TCR clone 10240 (TRBV19, TRBJ2-1)
CASPTFVLSGEQFF

SEQ ID NO: 20481 - protein, 13 aa, Homo sapiens
  CDR3 for alpha chain variable domain of TCR clone 10241 (TRAV8-4, TRAJ47)
CAVTALYGNKLVF

SEQ ID NO: 20482 - protein, 12 aa, Homo sapiens
  CDR3 for beta chain variable domain of TCR clone 10241 (TRBV28, TRBJ2-1)
CASSFRGNEQFF

SEQ ID NO: 20483 - protein, 17 aa, Homo sapiens
  CDR3 for alpha chain variable domain of TCR clone 10242 (TRAV26-1, TRAJ11)
CIVRVGQSNSGYSTLTF

SEQ ID NO: 20484 - protein, 17 aa, Homo sapiens
  CDR3 for beta chain variable domain of TCR clone 10242 (TRBV9, TRBJ2-1)
CASSPRLGLVGYNEQFF

SEQ ID NO: 20485 - protein, 14 aa, Homo sapiens
  CDR3 for alpha chain variable domain of TCR clone 10243 (TRAV29/DV5, TRAJ29)
CAARSNSGNTPLVF

SEQ ID NO: 20486 - protein, 17 aa, Homo sapiens
  CDR3 for beta chain variable domain of TCR clone 10243 (TRBV4-2, TRBJ2-1)
CASSQVSGLAMNNEQFF

SEQ ID NO: 20487 - protein, 14 aa, Homo sapiens
  CDR3 for alpha chain variable domain of TCR clone 10244 (TRAV9-2, TRAJ39)
CALYIYNAGNMLTF

SEQ ID NO: 20488 - protein, 11 aa, Homo sapiens
  CDR3 for beta chain variable domain of TCR clone 10244 (TRBV11-2, TRBJ2-2)
CASSLPGELFF

SEQ ID NO: 20489 - protein, 14 aa, Homo sapiens
  CDR3 for alpha chain variable domain of TCR clone 10245 (TRAV13-1, TRAJ35)
CAASKGGFGNVLHC

SEQ ID NO: 20490 - protein, 16 aa, Homo sapiens
  CDR3 for beta chain variable domain of TCR clone 10245 (TRBV5-1, TRBJ2-2)
CASSSRTGGRTGELFF

SEQ ID NO: 20491 - protein, 14 aa, Homo sapiens
  CDR3 for alpha chain variable domain of TCR clone 10246 (TRAV12-2, TRAJ5)
CAVNRSTGRRALTF

SEQ ID NO: 20492 - protein, 11 aa, Homo sapiens
  CDR3 for beta chain variable domain of TCR clone 10246 (TRBV29-1, TRBJ2-5)
CSEDRTGTQYF

SEQ ID NO: 20493 - protein, 16 aa, Homo sapiens
  CDR3 for alpha chain variable domain of TCR clone 10247 (TRAV12-3, TRAJ53)
CAMSPGSGGSNYKLTF

SEQ ID NO: 20494 - protein, 15 aa, Homo sapiens
  CDR3 for beta chain variable domain of TCR clone 10247 (TRBV9, TRBJ1-6)
CASSVAGTGDSPLHF

SEQ ID NO: 20495 - protein, 15 aa, Homo sapiens
  CDR3 for alpha chain variable domain of TCR clone 10248 (TRAV26-1, TRAJ18)
CIVRVMSSTLGRLYF

SEQ ID NO: 20496 - protein, 15 aa, Homo sapiens
  CDR3 for beta chain variable domain of TCR clone 10248 (TRBV6-3, TRBJ2-6)
CASNPGGSGANVLTF

SEQ ID NO: 20497 - protein, 15 aa, Homo sapiens
  CDR3 for alpha chain variable domain of TCR clone 10249 (TRAV16, TRAJ12)
CSKWPLRDSSYKLIF

SEQ ID NO: 20498 - protein, 14 aa, Homo sapiens
  CDR3 for beta chain variable domain of TCR clone 10249 (TRBV25-1, TRBJ1-2)
CASSEATGPYGYTF

SEQ ID NO: 20499 - protein, 11 aa, Homo sapiens
  CDR3 for alpha chain variable domain of TCR clone 10250 (TRAV3, TRAJ21)
CAVGNFNKFYF

SEQ ID NO: 20500 - protein, 16 aa, Homo sapiens
  CDR3 for beta chain variable domain of TCR clone 10250 (TRBV19, TRBJ2-1)
CASSKAGPSSCNEQFF

SEQ ID NO: 20501 - protein, 14 aa, Homo sapiens
  CDR3 for alpha chain variable domain of TCR clone 10251 (TRAV29/DV5, TRAJ36)
CAARRKTGANNLFF

SEQ ID NO: 20502 - protein, 15 aa, Homo sapiens
  CDR3 for beta chain variable domain of TCR clone 10251 (TRBV29-1, TRBJ2-1)
CSGRDRKSSYNEQFF

SEQ ID NO: 20503 - protein, 16 aa, Homo sapiens
  CDR3 for alpha chain variable domain of TCR clone 10252 (TRAV1-2, TRAJ10)
CAVRGVLTGGGNKLTF

SEQ ID NO: 20504 - protein, 12 aa, Homo sapiens
  CDR3 for beta chain variable domain of TCR clone 10252 (TRBV7-8, TRBJ2-7)
CASSRGDREQYF

SEQ ID NO: 20505 - protein, 15 aa, Homo sapiens
  CDR3 for alpha chain variable domain of TCR clone 10253 (TRAV26-1, TRAJ58)
CIVRIQETSGSRLTF

SEQ ID NO: 20506 - protein, 13 aa, Homo sapiens
  CDR3 for beta chain variable domain of TCR clone 10253 (TRBV6-5, TRBJ2-1)
CASIGETSKREFF

SEQ ID NO: 20507 - protein, 14 aa, Homo sapiens
  CDR3 for alpha chain variable domain of TCR clone 10254 (TRAV17, TRAJ34)
CATVPTYNTDKLIF

SEQ ID NO: 20508 - protein, 14 aa, Homo sapiens
  CDR3 for beta chain variable domain of TCR clone 10254 (TRBV3-1, TRBJ2-1)
CASNHGTRSNEQFF

SEQ ID NO: 20509 - protein, 14 aa, Homo sapiens
  CDR3 for alpha chain variable domain of TCR clone 10255 (TRAV17, TRAJ35)
CATDRPGFGNVLHC

SEQ ID NO: 20510 - protein, 19 aa, Homo sapiens
  CDR3 for beta chain variable domain of TCR clone 10255 (TRBV11-3, TRBJ2-2)
CASSTRPGAKTTNTGELFF

SEQ ID NO: 20511 - protein, 13 aa, Homo sapiens
  CDR3 for alpha chain variable domain of TCR clone 10256 (TRAV3, TRAJ27)
CAVRPLGAGQSTF

SEQ ID NO: 20512 - protein, 13 aa, Homo sapiens
  CDR3 for beta chain variable domain of TCR clone 10256 (TRBV7-9, TRBJ2-3)
CASSPGSTDTQYF

SEQ ID NO: 20513 - protein, 19 aa, Homo sapiens
  CDR3 for alpha chain variable domain of TCR clone 10257 (TRAV9-2, TRAJ52)
CALSFSLLSGGTSYGKLTF

SEQ ID NO: 20514 - protein, 14 aa, Homo sapiens
  CDR3 for beta chain variable domain of TCR clone 10257 (TRBV7-6, TRBJ2-7)
CASSLFQDSYEQYF

SEQ ID NO: 20515 - protein, 13 aa, Homo sapiens
  CDR3 for alpha chain variable domain of TCR clone 10258 (TRAV21, TRAJ3)
CAVRGSSASKIIF

SEQ ID NO: 20516 - protein, 17 aa, Homo sapiens
  CDR3 for beta chain variable domain of TCR clone 10258 (TRBV5-7, TRBJ2-5)
CASSWIQDRGREGTQYF

SEQ ID NO: 20517 - protein, 14 aa, Homo sapiens
  CDR3 for alpha chain variable domain of TCR clone 10259 (TRAV13-2, TRAJ34)
CAENLGERTDKLIF

SEQ ID NO: 20518 - protein, 13 aa, Homo sapiens
  CDR3 for beta chain variable domain of TCR clone 10259 (TRBV20-1, TRBJ2-7)
CSARWGYNYEQYF

SEQ ID NO: 20519 - protein, 13 aa, Homo sapiens
  CDR3 for alpha chain variable domain of TCR clone 10260 (TRAV12-3, TRAJ54)
CALVPQGAQELVF

SEQ ID NO: 20520 - protein, 15 aa, Homo sapiens
  CDR3 for beta chain variable domain of TCR clone 10260 (TRBV4-1, TRBJ2-2)
CASSQDSRGTGELFF

SEQ ID NO: 20521 - protein, 15 aa, Homo sapiens
  CDR3 for alpha chain variable domain of TCR clone 10261 (TRAV12-3, TRAJ6)
CAMSATTGGSYIPTF

SEQ ID NO: 20522 - protein, 16 aa, Homo sapiens
  CDR3 for beta chain variable domain of TCR clone 10261 (TRBV12-5, TRBJ2-5)
CASGPRTSGNQETQYF

SEQ ID NO: 20523 - protein, 11 aa, Homo sapiens
  CDR3 for alpha chain variable domain of TCR clone 10262 (TRAV16, TRAJ34)
CALYNTDKLIF

SEQ ID NO: 20524 - protein, 13 aa, Homo sapiens
  CDR3 for beta chain variable domain of TCR clone 10262 (TRBV25-1, TRBJ1-1)
CASSGQVRAEAFF

SEQ ID NO: 20525 - protein, 15 aa, Homo sapiens
  CDR3 for alpha chain variable domain of TCR clone 10263 (TRAV25, TRAJ52)
CAGRPGGTSYGELTF

SEQ ID NO: 20526 - protein, 17 aa, Homo sapiens
  CDR3 for beta chain variable domain of TCR clone 10263 (TRBV7-8, TRBJ2-6)
CASSAGTGGAGANVLTL

SEQ ID NO: 20527 - protein, 14 aa, Homo sapiens
  CDR3 for alpha chain variable domain of TCR clone 10264 (TRAV24, TRAJ57)
CASPTQGGSEKLVF

SEQ ID NO: 20528 - protein, 15 aa, Homo sapiens
  CDR3 for beta chain variable domain of TCR clone 10264 (TRBV7-2, TRBJ2-1)
CASSLVAGGHNEQFF

SEQ ID NO: 20529 - protein, 17 aa, Homo sapiens
  CDR3 for alpha chain variable domain of TCR clone 10265 (TRAV19, TRAJ28)
CALSEASSGAGSYQLTF

SEQ ID NO: 20530 - protein, 15 aa, Homo sapiens
  CDR3 for beta chain variable domain of TCR clone 10265 (TRBV9, TRBJ2-1)
CASSLAGSSYNEQFF

SEQ ID NO: 20531 - protein, 12 aa, Homo sapiens
  CDR3 for alpha chain variable domain of TCR clone 10266 (TRAV13-1, TRAJ53)
AASGGSNYKLTF

SEQ ID NO: 20532 - protein, 15 aa, Homo sapiens
  CDR3 for beta chain variable domain of TCR clone 10266 (TRBV20-1, TRBJ2-7)
CSARDRVSGMDEQYF

SEQ ID NO: 20533 - protein, 17 aa, Homo sapiens
  CDR3 for alpha chain variable domain of TCR clone 10267 (TRAV3, TRAJ6)
CAVRDGPRAGGSYIPTF

SEQ ID NO: 20534 - protein, 12 aa, Homo sapiens
  CDR3 for beta chain variable domain of TCR clone 10267 (TRBV5-4, TRBJ2-5)
CASSSTRETQYF

SEQ ID NO: 20535 - protein, 14 aa, Homo sapiens
  CDR3 for alpha chain variable domain of TCR clone 10268 (TRAV38-1, TRAJ45)
CASHSGGGADGLTF

SEQ ID NO: 20536 - protein, 13 aa, Homo sapiens
  CDR3 for beta chain variable domain of TCR clone 10268 (TRBV10-3, TRBJ1-2)
CAISERDSYGDTF

SEQ ID NO: 20537 - protein, 15 aa, Homo sapiens
  CDR3 for alpha chain variable domain of TCR clone 10269 (TRAV4, TRAJ39)
CLVGPNNNAGNMLTF

SEQ ID NO: 20538 - protein, 13 aa, Homo sapiens
  CDR3 for beta chain variable domain of TCR clone 10269 (TRBV11-2, TRBJ2-5)
CASSATGEETQYF

SEQ ID NO: 20539 - protein, 13 aa, Homo sapiens
  CDR3 for alpha chain variable domain of TCR clone 10270 (TRAV1-2, TRAJ9)
CAASNTGGFKTIF

SEQ ID NO: 20540 - protein, 13 aa, Homo sapiens
  CDR3 for beta chain variable domain of TCR clone 10270 (TRBV19, TRBJ1-2)
CASSVPGQDGYTF

SEQ ID NO: 20541 - protein, 13 aa, Homo sapiens
  CDR3 for alpha chain variable domain of TCR clone 10271 (TRAV14/DV4, TRAJ20)
CAMREGRDYKLSF

SEQ ID NO: 20542 - protein, 15 aa, Homo sapiens
  CDR3 for beta chain variable domain of TCR clone 10271 (TRBV7-3, TRBJ2-1)
CASSLSSGSFDEQFF

SEQ ID NO: 20543 - protein, 14 aa, Homo sapiens
  CDR3 for alpha chain variable domain of TCR clone 10272 (TRAV12-2, TRAJ13)
CAVKKTGGYQKVTF

SEQ ID NO: 20544 - protein, 15 aa, Homo sapiens
  CDR3 for beta chain variable domain of TCR clone 10272 (TRBV27, TRBJ2-1)
CASSNGGGSYNEQFF

SEQ ID NO: 20545 - protein, 13 aa, Homo sapiens
  CDR3 for alpha chain variable domain of TCR clone 10273 (TRAV8-3, TRAJ28)
CAVGAVGSYQLTL

SEQ ID NO: 20546 - protein, 15 aa, Homo sapiens
  CDR3 for beta chain variable domain of TCR clone 10273 (TRBV7-9, TRBJ1-5)
CASSQGHQPNQPQHF

SEQ ID NO: 20547 - protein, 15 aa, Homo sapiens
  CDR3 for alpha chain variable domain of TCR clone 10274 (TRAV23/DV6, TRAJ28)
CAAKRTGAGSYQLTF

SEQ ID NO: 20548 - protein, 12 aa, Homo sapiens
  CDR3 for beta chain variable domain of TCR clone 10274 (TRBV12-4, TRBJ2-5)
CQQFHFRETQYF

SEQ ID NO: 20549 - protein, 16 aa, Homo sapiens
  CDR3 for alpha chain variable domain of TCR clone 10275 (TRAV12-3, TRAJ53)
CAMSPGSGGSNYKLTF

SEQ ID NO: 20550 - protein, 15 aa, Homo sapiens
  CDR3 for beta chain variable domain of TCR clone 10275 (TRBV20-1, TRBJ2-7)
CSARDRVSGMDEQYF

SEQ ID NO: 20551 - protein, 14 aa, Homo sapiens
  CDR3 for alpha chain variable domain of TCR clone 10276 (TRAV26-1, TRAJ38)
RIADNAGNNRKLIW

SEQ ID NO: 20552 - protein, 13 aa, Homo sapiens
  CDR3 for beta chain variable domain of TCR clone 10276 (TRBV20-1, TRBJ1-1)
CSARGGGNTEAFF

SEQ ID NO: 20553 - protein, 12 aa, Homo sapiens
  CDR3 for alpha chain variable domain of TCR clone 10277 (TRAV12-1, TRAJ40)
CVVYSGTYEYIF

SEQ ID NO: 20554 - protein, 18 aa, Homo sapiens
  CDR3 for beta chain variable domain of TCR clone 10277 (TRBV11-2, TRBJ2-3)
CASSLGGASRGAPNTQYF

SEQ ID NO: 20555 - protein, 15 aa, Homo sapiens
  CDR3 for alpha chain variable domain of TCR clone 10278 (TRAV41, TRAJ45)
CAASYSGGGADGLTF

SEQ ID NO: 20556 - protein, 14 aa, Homo sapiens
  CDR3 for beta chain variable domain of TCR clone 10278 (TRBV12-5, TRBJ2-5)
CASGSRTDQETQYF

SEQ ID NO: 20557 - protein, 12 aa, Homo sapiens
  CDR3 for alpha chain variable domain of TCR clone 10279 (TRAV29/DV5, TRAJ15)
CASNQAGTALIF

SEQ ID NO: 20558 - protein, 15 aa, Homo sapiens
  CDR3 for beta chain variable domain of TCR clone 10279 (TRBV11-2, TRBJ2-2)
CASSSDRVNAGELFL

SEQ ID NO: 20559 - protein, 15 aa, Homo sapiens
  CDR3 for alpha chain variable domain of TCR clone 10280 (TRAV12-2, TRAJ26)
CAVNSHSNYGQNFVF

SEQ ID NO: 20560 - protein, 14 aa, Homo sapiens
  CDR3 for beta chain variable domain of TCR clone 10280 (TRBV5-1, TRBJ2-7)
CASSLEGRTYEQYF

SEQ ID NO: 20561 - protein, 10 aa, Homo sapiens
  CDR3 for alpha chain variable domain of TCR clone 10281 (TRAV8-4, TRAJ43)
CAVSADDMRF

SEQ ID NO: 20562 - protein, 14 aa, Homo sapiens
  CDR3 for beta chain variable domain of TCR clone 10281 (TRBV10-1, TRBJ1-5)
CASRARGAIQPQHF

SEQ ID NO: 20563 - protein, 14 aa, Homo sapiens
  CDR3 for alpha chain variable domain of TCR clone 10282 (TRAV9-2, TRAJ39)
CALYIYNAGNMLTF

SEQ ID NO: 20564 - protein, 16 aa, Homo sapiens
  CDR3 for beta chain variable domain of TCR clone 10282 (TRBV20-1, TRBJ1-4)
CSAPGQGLLTNEKLFF

SEQ ID NO: 20565 - protein, 16 aa, Homo sapiens
  CDR3 for alpha chain variable domain of TCR clone 10283 (TRAV14/DV4, TRAJ53)
CAMREGGGGSNYKLTF

SEQ ID NO: 20566 - protein, 14 aa, Homo sapiens
  CDR3 for beta chain variable domain of TCR clone 10283 (TRBV12-5, TRBJ2-5)
CASGSRTHQETQYF

SEQ ID NO: 20567 - protein, 15 aa, Homo sapiens
  CDR3 for alpha chain variable domain of TCR clone 10284 (TRAV26-1, TRAJ29)
CIVRVEGSGNTPLGF

SEQ ID NO: 20568 - protein, 14 aa, Homo sapiens
  CDR3 for beta chain variable domain of TCR clone 10284 (TRBV18, TRBJ2-5)
CASSPGVSQETQYF

SEQ ID NO: 20569 - protein, 11 aa, Homo sapiens
  CDR3 for alpha chain variable domain of TCR clone 10285 (TRAV12-3, TRAJ22)
CAMTLARQLTF

SEQ ID NO: 20570 - protein, 17 aa, Homo sapiens
  CDR3 for beta chain variable domain of TCR clone 10285 (TRBV11-2, TRBJ2-1)
CASSLYPPGVEYNEQFF

SEQ ID NO: 20571 - protein, 14 aa, Homo sapiens
  CDR3 for alpha chain variable domain of TCR clone 10286 (TRAV12-3, TRAJ33)
CAMSEEDSNYQLIW

SEQ ID NO: 20572 - protein, 14 aa, Homo sapiens
  CDR3 for beta chain variable domain of TCR clone 10286 (TRBV3-1, TRBJ2-1)
CASSQAVYLGEQFF

SEQ ID NO: 20573 - protein, 14 aa, Homo sapiens
  CDR3 for alpha chain variable domain of TCR clone 10287 (TRAV8-2, TRAJ17)
CAVSEGAAGNKLTF

SEQ ID NO: 20574 - protein, 13 aa, Homo sapiens
  CDR3 for beta chain variable domain of TCR clone 10287 (TRBV19, TRBJ2-1)
CASSMYRVNEQFF

SEQ ID NO: 20575 - protein, 14 aa, Homo sapiens
  CDR3 for alpha chain variable domain of TCR clone 10288 (TRAV26-1, TRAJ38)
CIADNAGNNRKLIW

SEQ ID NO: 20576 - protein, 16 aa, Homo sapiens
  CDR3 for beta chain variable domain of TCR clone 10288 (TRBV12-5, TRBJ2-5)
CASGPRTSGNQETQYF

SEQ ID NO: 20577 - protein, 16 aa, Homo sapiens
  CDR3 for alpha chain variable domain of TCR clone 10289 (TRAV26-1, TRAJ28)
CIVRGYSGAGSYQLTF

SEQ ID NO: 20578 - protein, 17 aa, Homo sapiens
  CDR3 for beta chain variable domain of TCR clone 10289 (TRBV24-1, TRBJ2-2)
CATSDFGGVPYTGELFF

SEQ ID NO: 20579 - protein, 15 aa, Homo sapiens
  CDR3 for alpha chain variable domain of TCR clone 10290 (TRAV8-3, TRAJ45)
CASSYSGGGTDGLTF

SEQ ID NO: 20580 - protein, 13 aa, Homo sapiens
  CDR3 for beta chain variable domain of TCR clone 10290 (TRBV10-3, TRBJ2-7)
CASKLAVNYEQYF

SEQ ID NO: 20581 - protein, 11 aa, Homo sapiens
  CDR3 for alpha chain variable domain of TCR clone 10291 (TRAV3, TRAJ21)
CAVGNFNQFYF

SEQ ID NO: 20582 - protein, 16 aa, Homo sapiens
  CDR3 for beta chain variable domain of TCR clone 10291 (TRBV19, TRBJ2-1)
CASSKAGPSSYNEQFF

SEQ ID NO: 20583 - protein, 13 aa, Homo sapiens
  CDR3 for alpha chain variable domain of TCR clone 10292 (TRAV17, TRAJ40)
CATDEGGTYKYIF

SEQ ID NO: 20584 - protein, 13 aa, Homo sapiens
  CDR3 for beta chain variable domain of TCR clone 10292 (TRBV6-3, TRBJ2-5)
CASSYRMTETQYF

SEQ ID NO: 20585 - protein, 11 aa, Homo sapiens
  CDR3 for alpha chain variable domain of TCR clone 10293 (TRAV3, TRAJ21)
CAVGNFNKFYF

SEQ ID NO: 20586 - protein, 16 aa, Homo sapiens
  CDR3 for beta chain variable domain of TCR clone 10293 (TRBV19, TRBJ2-1)
CASSKAGPSSYNEKFF

SEQ ID NO: 20587 - protein, 16 aa, Homo sapiens
  CDR3 for alpha chain variable domain of TCR clone 10294 (TRAV21, TRAJ37)
CAVRTAGSSNTGKLIL

SEQ ID NO: 20588 - protein, 13 aa, Homo sapiens
  CDR3 for beta chain variable domain of TCR clone 10294 (TRBV7-9, TRBJ2-5)
CASLPSGRETQYF

SEQ ID NO: 20589 - protein, 14 aa, Homo sapiens
  CDR3 for alpha chain variable domain of TCR clone 10295 (TRAV17, TRAJ16)
CATADFSDGQKLLF

SEQ ID NO: 20590 - protein, 15 aa, Homo sapiens
  CDR3 for beta chain variable domain of TCR clone 10295 (TRBV18, TRBJ2-1)
CASSSPSASYNEQFL

SEQ ID NO: 20591 - protein, 12 aa, Homo sapiens
  CDR3 for alpha chain variable domain of TCR clone 10296 (TRAV12-3, TRAJ17)
CAMTLTGNKLTY

SEQ ID NO: 20592 - protein, 15 aa, Homo sapiens
  CDR3 for beta chain variable domain of TCR clone 10296 (TRBV20-1, TRBJ2-7)
CSARDRVSGMDEQYF

SEQ ID NO: 20593 - protein, 13 aa, Homo sapiens
  CDR3 for alpha chain variable domain of TCR clone 10297 (TRAV12-1, TRAJ12)
CVVNIESSYKFIF

SEQ ID NO: 20594 - protein, 15 aa, Homo sapiens
  CDR3 for beta chain variable domain of TCR clone 10297 (TRBV19, TRBJ2-1)
CASSTGTSSYNEQFF

SEQ ID NO: 20595 - protein, 11 aa, Homo sapiens
  CDR3 for alpha chain variable domain of TCR clone 10298 (TRAV1-1, TRAJ23)
CAVRQGGKLIF

SEQ ID NO: 20596 - protein, 20 aa, Homo sapiens
  CDR3 for beta chain variable domain of TCR clone 10298 (TRBV7-8, TRBJ2-2)
CASSHLFPGPTIHITGELFL

SEQ ID NO: 20597 - protein, 18 aa, Homo sapiens
  CDR3 for alpha chain variable domain of TCR clone 10299 (TRAV9-2, TRAJ52)
CALRGPAPGGTSYGKLTF

SEQ ID NO: 20598 - protein, 15 aa, Homo sapiens
  CDR3 for beta chain variable domain of TCR clone 10299 (TRBV6-3, TRBJ2-7)
CASSSPGTVFYEQYF

SEQ ID NO: 20599 - protein, 16 aa, Homo sapiens
  CDR3 for alpha chain variable domain of TCR clone 10300 (TRAV30, TRAJ24)
CGTVIVDADSWGKFQF

SEQ ID NO: 20600 - protein, 14 aa, Homo sapiens
  CDR3 for beta chain variable domain of TCR clone 10300 (TRBV12-5, TRBJ2-5)
CASGSRTHQETQYF

SEQ ID NO: 20601 - protein, 13 aa, Homo sapiens
  CDR3 for alpha chain variable domain of TCR clone 10301 (TRAV3, TRAJ27)
CAVRPLCAGKSTF

SEQ ID NO: 20602 - protein, 13 aa, Homo sapiens
  CDR3 for beta chain variable domain of TCR clone 10301 (TRBV7-9, TRBJ2-3)
CASSPGSTDTQYF

SEQ ID NO: 20603 - protein, 15 aa, Homo sapiens
  CDR3 for alpha chain variable domain of TCR clone 10302 (TRAV14/DV4, TRAJ48)
CAMREGNAGNEKLTF

SEQ ID NO: 20604 - protein, 14 aa, Homo sapiens
  CDR3 for beta chain variable domain of TCR clone 10302 (TRBV28, TRBJ1-5)
CASSGQALYQPQHF

SEQ ID NO: 20605 - protein, 14 aa, Homo sapiens
  CDR3 for alpha chain variable domain of TCR clone 10303 (TRAV1-2, TRAJ16)
CAVNRFSDGQKLLF

SEQ ID NO: 20606 - protein, 16 aa, Homo sapiens
  CDR3 for beta chain variable domain of TCR clone 10303 (TRBV7-2, TRBJ1-2)
CASSSNQDRRGHGYTF

SEQ ID NO: 20607 - protein, 14 aa, Homo sapiens
  CDR3 for alpha chain variable domain of TCR clone 10304 (TRAV35, TRAJ50)
CAGHRKTSYDKVIF

SEQ ID NO: 20608 - protein, 13 aa, Homo sapiens
  CDR3 for beta chain variable domain of TCR clone 10304 (TRBV14, TRBJ1-2)
CASSEDRRYGYTF

SEQ ID NO: 20609 - protein, 17 aa, Homo sapiens
  CDR3 for alpha chain variable domain of TCR clone 10305 (TRAV3, TRAJ6)
CAVRDGPRAGGSYIPTF

SEQ ID NO: 20610 - protein, 15 aa, Homo sapiens
  CDR3 for beta chain variable domain of TCR clone 10305 (TRBV9, TRBJ1-6)
CASSVAGTGDSPLHF

SEQ ID NO: 20611 - protein, 14 aa, Homo sapiens
  CDR3 for alpha chain variable domain of TCR clone 10306 (TRAV12-2, TRAJ13)
GAVKKTGGYQKVTF

SEQ ID NO: 20612 - protein, 15 aa, Homo sapiens
  CDR3 for beta chain variable domain of TCR clone 10306 (TRBV27, TRBJ2-1)
CASSNGGGSSNEQFF

SEQ ID NO: 20613 - protein, 14 aa, Homo sapiens
  CDR3 for alpha chain variable domain of TCR clone 10307 (TRAV17, TRAJ6)
CATVFQGGSYIPTF

SEQ ID NO: 20614 - protein, 17 aa, Homo sapiens
  CDR3 for beta chain variable domain of TCR clone 10307 (TRBV7-8, TRBJ2-6)
CASSAGTGGAGANVLTF

SEQ ID NO: 20615 - protein, 12 aa, Homo sapiens
  CDR3 for alpha chain variable domain of TCR clone 10308 (TRAV16, TRAJ10)
CSRTGGGNKLTF

SEQ ID NO: 20616 - protein, 15 aa, Homo sapiens
  CDR3 for beta chain variable domain of TCR clone 10308 (TRBV11-3, TRBJ2-3)
CASLKDGREGDTQYF

SEQ ID NO: 20617 - protein, 14 aa, Homo sapiens
  CDR3 for alpha chain variable domain of TCR clone 10309 (TRAV12-2, TRAJ13)
CAVKKTGGYQKVTF

SEQ ID NO: 20618 - protein, 17 aa, Homo sapiens
  CDR3 for beta chain variable domain of TCR clone 10309 (TRBV4-1, TRBJ1-4)
CASSQEGPRGVEEKLFF

SEQ ID NO: 20619 - protein, 16 aa, Homo sapiens
  CDR3 for alpha chain variable domain of TCR clone 10310 (TRAV3, TRAJ21)
CAVRDIERGNFNKFYF

SEQ ID NO: 20620 - protein, 13 aa, Homo sapiens
  CDR3 for beta chain variable domain of TCR clone 10310 (TRBV27, TRBJ2-7)
CASSVTTGYEQYF

SEQ ID NO: 20621 - protein, 15 aa, Homo sapiens
  CDR3 for alpha chain variable domain of TCR clone 10311 (TRAV1-2, TRAJ15)
CAVDVMGSAGTALIF

SEQ ID NO: 20622 - protein, 13 aa, Homo sapiens
  CDR3 for beta chain variable domain of TCR clone 10311 (TRBV7-2, TRBJ2-5)
CASSQTSVETQYF

SEQ ID NO: 20623 - protein, 12 aa, Homo sapiens
  CDR3 for alpha chain variable domain of TCR clone 10312 (TRAV20, TRAJ39)
CAVGNAGSMLTF

SEQ ID NO: 20624 - protein, 15 aa, Homo sapiens
  CDR3 for beta chain variable domain of TCR clone 10312 (TRBV27, TRBJ2-1)
CASSNGGGSSNEQFF

SEQ ID NO: 20625 - protein, 17 aa, Homo sapiens
  CDR3 for alpha chain variable domain of TCR clone 10313 (TRAV4, TRAJ28)
CLVGDRALGLGVTNSLS

SEQ ID NO: 20626 - protein, 14 aa, Homo sapiens
  CDR3 for beta chain variable domain of TCR clone 10313 (TRBV4-1, TRBJ2-7)
CASSPVAGGDEQYF

SEQ ID NO: 20627 - protein, 13 aa, Homo sapiens
  CDR3 for alpha chain variable domain of TCR clone 10314 (TRAV13-2, TRAJ48)
FAEMDFGNEKLTF

SEQ ID NO: 20628 - protein, 15 aa, Homo sapiens
  CDR3 for beta chain variable domain of TCR clone 10314 (TRBV7-9, TRBJ1-6)
CASSSPGRGNSPLHF

SEQ ID NO: 20629 - protein, 16 aa, Homo sapiens
  CDR3 for alpha chain variable domain of TCR clone 10315 (TRAV12-3, TRAJ53)
CAMSPGSGSSNYKLTF

SEQ ID NO: 20630 - protein, 11 aa, Homo sapiens
  CDR3 for beta chain variable domain of TCR clone 10315 (TRBV29-1, TRBJ2-5)
CSEDRTGTQYF

SEQ ID NO: 20631 - protein, 14 aa, Homo sapiens
  CDR3 for alpha chain variable domain of TCR clone 10316 (TRAV12-3, TRAJ10)
SHLPLTGGGNKLTF

SEQ ID NO: 20632 - protein, 13 aa, Homo sapiens
  CDR3 for beta chain variable domain of TCR clone 10316 (TRBV4-2, TRBJ1-1)
CASSQAGNTEAFF

SEQ ID NO: 20633 - protein, 14 aa, Homo sapiens
  CDR3 for alpha chain variable domain of TCR clone 10317 (TRAV1-2, TRAJ16)
CAVNRFSGGQKLLF

SEQ ID NO: 20634 - protein, 13 aa, Homo sapiens
  CDR3 for beta chain variable domain of TCR clone 10317 (TRBV20-1, TRBJ1-1)
CSAPLGGGTEAFF

SEQ ID NO: 20635 - protein, 15 aa, Homo sapiens
  CDR3 for alpha chain variable domain of TCR clone 10318 (TRAV29/DV5, TRAJ31)
CSVLLCSKRNPRLMF

SEQ ID NO: 20636 - protein, 14 aa, Homo sapiens
  CDR3 for beta chain variable domain of TCR clone 10318 (TRBV7-8, TRBJ2-7)
CASSVGQGAYEQYF

SEQ ID NO: 20637 - protein, 12 aa, Homo sapiens
  CDR3 for alpha chain variable domain of TCR clone 10319 (TRAV2, TRAJ9)
CAVGAGGFKTIF

SEQ ID NO: 20638 - protein, 16 aa, Homo sapiens
  CDR3 for beta chain variable domain of TCR clone 10319 (TRBV13, TRBJ2-2)
CASSPRTGEHTGELFL

SEQ ID NO: 20639 - protein, 14 aa, Homo sapiens
  CDR3 for alpha chain variable domain of TCR clone 10320 (TRAV3, TRAJ7)
CAVREEEREQQTRF

SEQ ID NO: 20640 - protein, 12 aa, Homo sapiens
  CDR3 for beta chain variable domain of TCR clone 10320 (TRBV6-3, TRBJ2-7)
CASSLTPYEQYF

SEQ ID NO: 20641 - protein, 23 aa, Homo sapiens
  CDR3 for alpha chain variable domain of TCR clone 10321 (TRAV13-2, TRAJ6)
CAEEVHQEEATYLHLEEEPALLF

SEQ ID NO: 20642 - protein, 13 aa, Homo sapiens
  CDR3 for beta chain variable domain of TCR clone 10321 (TRBV9, TRBJ2-7)
CASSVAEYYEQYF

SEQ ID NO: 20643 - protein, 14 aa, Homo sapiens
  CDR3 for alpha chain variable domain of TCR clone 10322 (TRAV8-3, TRAJ4)
CAVGAAGGYNKLIF

SEQ ID NO: 20644 - protein, 15 aa, Homo sapiens
  CDR3 for beta chain variable domain of TCR clone 10322 (TRBV7-8, TRBJ1-1)
CASSLGDSRNTEAFF

SEQ ID NO: 20645 - protein, 15 aa, Homo sapiens
  CDR3 for alpha chain variable domain of TCR clone 10323 (TRAV2, TRAJ9)
CAVEDRGTGGFKTIF

SEQ ID NO: 20646 - protein, 14 aa, Homo sapiens
  CDR3 for beta chain variable domain of TCR clone 10323 (TRBV4-2, TRBJ1-2)
CASSPGGSNYGYTF

SEQ ID NO: 20647 - protein, 12 aa, Homo sapiens
  CDR3 for alpha chain variable domain of TCR clone 10324 (TRAV8-3, TRAJ26)
CAGDNYGQNFVF

SEQ ID NO: 20648 - protein, 15 aa, Homo sapiens
  CDR3 for beta chain variable domain of TCR clone 10324 (TRBV7-2, TRBJ1-2)
CASSPRAGWNYGYTF

SEQ ID NO: 20649 - protein, 13 aa, Homo sapiens
  CDR3 for alpha chain variable domain of TCR clone 10325 (TRAV8-3, TRAJ28)
CAVGAVGRYQLTF

SEQ ID NO: 20650 - protein, 15 aa, Homo sapiens
  CDR3 for beta chain variable domain of TCR clone 10325 (TRBV7-9, TRBJ1-5)
CASSQGHQPNQPQHF

SEQ ID NO: 20651 - protein, 13 aa, Homo sapiens
  CDR3 for alpha chain variable domain of TCR clone 10326 (TRAV6, TRAJ37)
CSHVSGNTGKLIF

SEQ ID NO: 20652 - protein, 16 aa, Homo sapiens
  CDR3 for beta chain variable domain of TCR clone 10326 (TRBV27, TRBJ2-5)
CASSLSRTAGGETQYF

SEQ ID NO: 20653 - protein, 14 aa, Homo sapiens
  CDR3 for alpha chain variable domain of TCR clone 10327 (TRAV26-1, TRAJ38)
CIADNAGNKRKLIW

SEQ ID NO: 20654 - protein, 13 aa, Homo sapiens
  CDR3 for beta chain variable domain of TCR clone 10327 (TRBV20-1, TRBJ1-1)
CSARGGGNTEAFF

SEQ ID NO: 20655 - protein, 10 aa, Homo sapiens
  CDR3 for alpha chain variable domain of TCR clone 10328 (TRAV25, TRAJ20)
CAVNDYKLSF

SEQ ID NO: 20656 - protein, 17 aa, Homo sapiens
  CDR3 for beta chain variable domain of TCR clone 10328 (TRBV5-4, TRBJ2-1)
CASSSAGGRGPYNEQFF

SEQ ID NO: 20657 - protein, 15 aa, Homo sapiens
  CDR3 for alpha chain variable domain of TCR clone 10329 (TRAV12-2, TRAJ53)
CAVNGGGGSNYKLTF

SEQ ID NO: 20658 - protein, 17 aa, Homo sapiens
  CDR3 for beta chain variable domain of TCR clone 10329 (TRBV7-3, TRBJ2-3)
RASSLMKRMRGAATQYF

SEQ ID NO: 20659 - protein, 14 aa, Homo sapiens
  CDR3 for alpha chain variable domain of TCR clone 10330 (TRAV13-2, TRAJ23)
CAENIGPVGGKLIF

SEQ ID NO: 20660 - protein, 17 aa, Homo sapiens
  CDR3 for beta chain variable domain of TCR clone 10330 (TRBV5-1, TRBJ1-1)
CASSFMTGGKRDTEAFF

SEQ ID NO: 20661 - protein, 13 aa, Homo sapiens
  CDR3 for alpha chain variable domain of TCR clone 10331 (TRAV1-2, TRAJ9)
CAVLNTGGSKTIF

SEQ ID NO: 20662 - protein, 14 aa, Homo sapiens
  CDR3 for beta chain variable domain of TCR clone 10331 (TRBV20-1, TRBJ2-3)
CSARGGTSTDTQYF

SEQ ID NO: 20663 - protein, 16 aa, Homo sapiens
  CDR3 for alpha chain variable domain of TCR clone 10332 (TRAV3, TRAJ37)
CAVRPHGSGNTGKLIF

SEQ ID NO: 20664 - protein, 11 aa, Homo sapiens
  CDR3 for beta chain variable domain of TCR clone 10332 (TRBV29-1, TRBJ2-5)
CSEDRTGTQYF

SEQ ID NO: 20665 - protein, 14 aa, Homo sapiens
  CDR3 for alpha chain variable domain of TCR clone 10333 (TRAV1-1, TRAJ12)
CAVRDQDSSYKLIF

SEQ ID NO: 20666 - protein, 15 aa, Homo sapiens
  CDR3 for beta chain variable domain of TCR clone 10333 (TRBV5-1, TRBJ2-5)
CASSRTGTSGETQYF

SEQ ID NO: 20667 - protein, 13 aa, Homo sapiens
  CDR3 for alpha chain variable domain of TCR clone 10334 (TRAV20, TRAJ49)
CVVQARTGNQFYF

SEQ ID NO: 20668 - protein, 14 aa, Homo sapiens
  CDR3 for beta chain variable domain of TCR clone 10334 (TRBV5-1, TRBJ1-1)
CASSLQGASTEAFF

SEQ ID NO: 20669 - protein, 11 aa, Homo sapiens
  CDR3 for alpha chain variable domain of TCR clone 10335 (TRAV6, TRAJ39)
CAPDAGNMLTF

SEQ ID NO: 20670 - protein, 14 aa, Homo sapiens
  CDR3 for beta chain variable domain of TCR clone 10335 (TRBV28, TRBJ1-5)
CASSRTGLNQPQHF

SEQ ID NO: 20671 - protein, 14 aa, Homo sapiens
  CDR3 for alpha chain variable domain of TCR clone 10336 (TRAV12-3, TRAJ10)
SHLPLTGGGNKLTF

SEQ ID NO: 20672 - protein, 15 aa, Homo sapiens
  CDR3 for beta chain variable domain of TCR clone 10336 (TRBV12-4, TRBJ2-5)
CASSPPTGLQETQYF

SEQ ID NO: 20673 - protein, 12 aa, Homo sapiens
  CDR3 for alpha chain variable domain of TCR clone 10337 (TRAV2, TRAJ31)
CAVEDNNARLMF

SEQ ID NO: 20674 - protein, 20 aa, Homo sapiens
  CDR3 for beta chain variable domain of TCR clone 10337 (TRBV7-8, TRBJ2-2)
CASSHLFPGPTIHITGELFF

SEQ ID NO: 20675 - protein, 13 aa, Homo sapiens
  CDR3 for alpha chain variable domain of TCR clone 10338 (TRAV2, TRAJ40)
FAVVTSGTYKYIF

SEQ ID NO: 20676 - protein, 14 aa, Homo sapiens
  CDR3 for beta chain variable domain of TCR clone 10338 (TRBV19, TRBJ2-1)
CASPTFVLSGEQFF

SEQ ID NO: 20677 - protein, 15 aa, Homo sapiens
  CDR3 for alpha chain variable domain of TCR clone 10339 (TRAV26-1, TRAJ29)
CIVRVEGSGNTPLVS

SEQ ID NO: 20678 - protein, 15 aa, Homo sapiens
  CDR3 for beta chain variable domain of TCR clone 10339 (TRBV7-9, TRBJ1-5)
CASSQGHQPNQPQHF

SEQ ID NO: 20679 - protein, 12 aa, Homo sapiens
  CDR3 for alpha chain variable domain of TCR clone 10340 (TRAV1-1, TRAJ23)
CAVTNQGGKLIF

SEQ ID NO: 20680 - protein, 15 aa, Homo sapiens
  CDR3 for beta chain variable domain of TCR clone 10340 (TRBV6-6, TRBJ2-7)
CASSYSYGGSYEQYF

SEQ ID NO: 20681 - protein, 18 aa, Homo sapiens
  CDR3 for alpha chain variable domain of TCR clone 10341 (TRAV21, TRAJ52)
CAVRPSPAGGTSYGKLTF

SEQ ID NO: 20682 - protein, 11 aa, Homo sapiens
  CDR3 for beta chain variable domain of TCR clone 10341 (TRBV11-2, TRBJ2-2)
CASSLPGELFF

SEQ ID NO: 20683 - protein, 14 aa, Homo sapiens
  CDR3 for alpha chain variable domain of TCR clone 10342 (TRAV26-1, TRAJ38)
CIADNAGNNRKLIW

SEQ ID NO: 20684 - protein, 17 aa, Homo sapiens
  CDR3 for beta chain variable domain of TCR clone 10342 (TRBV20-1, TRBJ2-2)
CSASGSGQGGLTGELFF

SEQ ID NO: 20685 - protein, 15 aa, Homo sapiens
  CDR3 for alpha chain variable domain of TCR clone 10343 (TRAV2, TRAJ22)
CAVPSRGGSARQLTF

SEQ ID NO: 20686 - protein, 16 aa, Homo sapiens
  CDR3 for beta chain variable domain of TCR clone 10343 (TRBV29-1, TRBJ2-7)
CSVEDAEDGTAYEQYF

SEQ ID NO: 20687 - protein, 14 aa, Homo sapiens
  CDR3 for alpha chain variable domain of TCR clone 10344 (TRAV1-2, TRAJ16)
CAVNRFSDGQKLLF

SEQ ID NO: 20688 - protein, 15 aa, Homo sapiens
  CDR3 for beta chain variable domain of TCR clone 10344 (TRBV27, TRBJ1-6)
CASSFDRGLGSPLHF

SEQ ID NO: 20689 - protein, 15 aa, Homo sapiens
  CDR3 for alpha chain variable domain of TCR clone 10345 (TRAV4, TRAJ48)
CLVGDIDFGNEKLTF

SEQ ID NO: 20690 - protein, 16 aa, Homo sapiens
  CDR3 for beta chain variable domain of TCR clone 10345 (TRBV7-2, TRBJ2-3)
CASSLARASGISTQYF

SEQ ID NO: 20691 - protein, 12 aa, Homo sapiens
  CDR3 for alpha chain variable domain of TCR clone 10346 (TRAV1-2, TRAJ29)
CAVPSGNTPLVF

SEQ ID NO: 20692 - protein, 14 aa, Homo sapiens
  CDR3 for beta chain variable domain of TCR clone 10346 (TRBV6-1, TRBJ1-3)
CASVQGGGGNTIYF

SEQ ID NO: 20693 - protein, 12 aa, Homo sapiens
  CDR3 for alpha chain variable domain of TCR clone 10347 (TRAV17, TRAJ12)
CATLRSSYKLIF

SEQ ID NO: 20694 - protein, 16 aa, Homo sapiens
  CDR3 for beta chain variable domain of TCR clone 10347 (TRBV28, TRBJ2-7)
CASSLFFETGGPEQYL

SEQ ID NO: 20695 - protein, 13 aa, Homo sapiens
  CDR3 for alpha chain variable domain of TCR clone 10348 (TRAV21, TRAJ57)
CAVTQGGSEKLAF

SEQ ID NO: 20696 - protein, 16 aa, Homo sapiens
  CDR3 for beta chain variable domain of TCR clone 10348 (TRBV29-1, TRBJ2-7)
CSVEDAEDGTAYEQYF

SEQ ID NO: 20697 - protein, 13 aa, Homo sapiens
  CDR3 for alpha chain variable domain of TCR clone 10349 (TRAV2, TRAJ40)
CAVVTSGTYKYLF

SEQ ID NO: 20698 - protein, 14 aa, Homo sapiens
  CDR3 for beta chain variable domain of TCR clone 10349 (TRBV19, TRBJ2-1)
CASPTFVLSGEQFF

SEQ ID NO: 20699 - protein, 12 aa, Homo sapiens
  CDR3 for alpha chain variable domain of TCR clone 10350 (TRAV13-2, TRAJ8)
CAPWLGFQKLVF

SEQ ID NO: 20700 - protein, 22 aa, Homo sapiens
  CDR3 for beta chain variable domain of TCR clone 10350 (TRBV29-1, TRBJ2-5)
TVSNMSPEDSSIYLCSAGTQYF

SEQ ID NO: 20701 - protein, 13 aa, Homo sapiens
  CDR3 for alpha chain variable domain of TCR clone 10351 (TRAV17, TRAJ40)
CAGALGGTYKYIF

SEQ ID NO: 20702 - protein, 18 aa, Homo sapiens
  CDR3 for beta chain variable domain of TCR clone 10351 (TRBV7-2, TRBJ1-4)
CASSLAPGRRDEKLFLAV

SEQ ID NO: 20703 - protein, 14 aa, Homo sapiens
  CDR3 for alpha chain variable domain of TCR clone 10352 (TRAV8-3, TRAJ13)
CAVGAQEGYQKVTF

SEQ ID NO: 20704 - protein, 15 aa, Homo sapiens
  CDR3 for beta chain variable domain of TCR clone 10352 (TRBV15, TRBJ2-2)
CATSGTGGRVGELFF

SEQ ID NO: 20705 - protein, 13 aa, Homo sapiens
  CDR3 for alpha chain variable domain of TCR clone 10353 (TRAV1-2, TRAJ9)
CAALNTGGFKTIF

SEQ ID NO: 20706 - protein, 13 aa, Homo sapiens
  CDR3 for beta chain variable domain of TCR clone 10353 (TRBV11-2, TRBJ2-5)
CASSRGPSETQYF

SEQ ID NO: 20707 - protein, 14 aa, Homo sapiens
  CDR3 for alpha chain variable domain of TCR clone 10354 (TRAV21, TRAJ35)
CAVMPIGFGNVPHC

SEQ ID NO: 20708 - protein, 12 aa, Homo sapiens
  CDR3 for beta chain variable domain of TCR clone 10354 (TRBV7-9, TRBJ2-7)
CASSIKREEQYF

SEQ ID NO: 20709 - protein, 15 aa, Homo sapiens
  CDR3 for alpha chain variable domain of TCR clone 10355 (TRAV8-3, TRAJ27)
CAVGPSKTNAGKSTF

SEQ ID NO: 20710 - protein, 14 aa, Homo sapiens
  CDR3 for beta chain variable domain of TCR clone 10355 (TRBV11-2, TRBJ2-7)
CASSLGAGAYEQYF

SEQ ID NO: 20711 - protein, 14 aa, Homo sapiens
  CDR3 for alpha chain variable domain of TCR clone 10356 (TRAV1-2, TRAJ16)
CAVNRFSDGQKLLF

SEQ ID NO: 20712 - protein, 15 aa, Homo sapiens
  CDR3 for beta chain variable domain of TCR clone 10356 (TRBV7-9, TRBJ1-6)
CASSSPGRGDSPLHF

SEQ ID NO: 20713 - protein, 14 aa, Homo sapiens
  CDR3 for alpha chain variable domain of TCR clone 10357 (TRAV1-2, TRAJ16)
CAVKEGSDGQKLLF

SEQ ID NO: 20714 - protein, 13 aa, Homo sapiens
  CDR3 for beta chain variable domain of TCR clone 10357 (TRBV7-2, TRBJ2-1)
CASSLSPDNEQFF

SEQ ID NO: 20715 - protein, 13 aa, Homo sapiens
  CDR3 for alpha chain variable domain of TCR clone 10358 (TRAV12-1, TRAJ53)
CVVNAESNYKLTF

SEQ ID NO: 20716 - protein, 16 aa, Homo sapiens
  CDR3 for beta chain variable domain of TCR clone 10358 (TRBV19, TRBJ1-1)
CASRPRSEALNTEAFF

SEQ ID NO: 20717 - protein, 17 aa, Homo sapiens
  CDR3 for alpha chain variable domain of TCR clone 10359 (TRAV3, TRAJ42)
CAVRDRDYGGSQGNLIF

SEQ ID NO: 20718 - protein, 13 aa, Homo sapiens
  CDR3 for beta chain variable domain of TCR clone 10359 (TRBV4-1, TRBJ2-3)
CASSQPPTDTQYF

SEQ ID NO: 20719 - protein, 13 aa, Homo sapiens
  CDR3 for alpha chain variable domain of TCR clone 10360 (TRAV21, TRAJ27)
CAARPGNAGKSTF

SEQ ID NO: 20720 - protein, 14 aa, Homo sapiens
  CDR3 for beta chain variable domain of TCR clone 10360 (TRBV7-6, TRBJ2-3)
CASSLGTVTDTQCF

SEQ ID NO: 20721 - protein, 15 aa, Homo sapiens
  CDR3 for alpha chain variable domain of TCR clone 10361 (TRAV23/DV6, TRAJ12)
CAAIDLGAMDSSYKL

SEQ ID NO: 20722 - protein, 14 aa, Homo sapiens
  CDR3 for beta chain variable domain of TCR clone 10361 (TRBV20-1, TRBJ2-1)
CSARRGGSYNEQFF

SEQ ID NO: 20723 - protein, 14 aa, Homo sapiens
  CDR3 for alpha chain variable domain of TCR clone 10362 (TRAV29/DV5, TRAJ44)
CAASATGTASKLTF

SEQ ID NO: 20724 - protein, 14 aa, Homo sapiens
  CDR3 for beta chain variable domain of TCR clone 10362 (TRBV7-2, TRBJ2-7)
CASSPKTSFYEQYF

SEQ ID NO: 20725 - protein, 15 aa, Homo sapiens
  CDR3 for alpha chain variable domain of TCR clone 10363 (TRAV29/DV5, TRAJ29)
CAASERSSGNTPLVF

SEQ ID NO: 20726 - protein, 14 aa, Homo sapiens
  CDR3 for beta chain variable domain of TCR clone 10363 (TRBV7-2, TRBJ2-7)
CASSPKTSFYEQYF

SEQ ID NO: 20727 - protein, 17 aa, Homo sapiens
  CDR3 for alpha chain variable domain of TCR clone 10364 (TRAV4, )
CLVDIQNPDPAVYQLRD

SEQ ID NO: 20728 - protein, 13 aa, Homo sapiens
  CDR3 for beta chain variable domain of TCR clone 10364 (TRBV6-1, TRBJ2-1)
CAGMDPTNNEQFF

SEQ ID NO: 20729 - protein, 14 aa, Homo sapiens
  CDR3 for alpha chain variable domain of TCR clone 10365 (TRAV9-2, TRAJ15)
CALSESQAGTALIF

SEQ ID NO: 20730 - protein, 15 aa, Homo sapiens
  CDR3 for beta chain variable domain of TCR clone 10365 (TRBV10-1, TRBJ2-3)
CASSATSGGFDTQYF

SEQ ID NO: 20731 - protein, 14 aa, Homo sapiens
  CDR3 for alpha chain variable domain of TCR clone 10366 (TRAV9-2, TRAJ39)
CALYIYNAGNMLTF

SEQ ID NO: 20732 - protein, 17 aa, Homo sapiens
  CDR3 for beta chain variable domain of TCR clone 10366 (TRBV7-8, TRBJ2-6)
CASSAGTGGAGANVLTF

SEQ ID NO: 20733 - protein, 17 aa, Homo sapiens
  CDR3 for alpha chain variable domain of TCR clone 10367 (TRAV23/DV6, TRAJ57)
CAASPTLSQGGSEKLVF

SEQ ID NO: 20734 - protein, 14 aa, Homo sapiens
  CDR3 for beta chain variable domain of TCR clone 10367 (TRBV25-1, TRBJ1-1)
CASTHLGGNTEAFF

SEQ ID NO: 20735 - protein, 12 aa, Homo sapiens
  CDR3 for alpha chain variable domain of TCR clone 10368 (TRAV12-3, TRAJ17)
CAMTLTGNKLTF

SEQ ID NO: 20736 - protein, 16 aa, Homo sapiens
  CDR3 for beta chain variable domain of TCR clone 10368 (TRBV12-4, TRBJ1-5)
CASSRPVGGSNQPQHF

SEQ ID NO: 20737 - protein, 15 aa, Homo sapiens
  CDR3 for alpha chain variable domain of TCR clone 10369 (TRAV13-1, TRAJ6)
CAASRGAGGSYIPTF

SEQ ID NO: 20738 - protein, 12 aa, Homo sapiens
  CDR3 for beta chain variable domain of TCR clone 10369 (TRBV19, TRBJ1-4)
CASSNSLEKLFF

SEQ ID NO: 20739 - protein, 14 aa, Homo sapiens
  CDR3 for alpha chain variable domain of TCR clone 10370 (TRAV20, TRAJ22)
CAVQVSGSARQLTF

SEQ ID NO: 20740 - protein, 16 aa, Homo sapiens
  CDR3 for beta chain variable domain of TCR clone 10370 (TRBV12-4, TRBJ1-4)
CASSLKGIGHGEKLFF

SEQ ID NO: 20741 - protein, 14 aa, Homo sapiens
  CDR3 for alpha chain variable domain of TCR clone 10371 (TRAV12-2, TRAJ40)
CAVKIPSGTYKYIF

SEQ ID NO: 20742 - protein, 14 aa, Homo sapiens
  CDR3 for beta chain variable domain of TCR clone 10371 (TRBV12-5, TRBJ2-5)
CASGSRTHQETQYF

SEQ ID NO: 20743 - protein, 16 aa, Homo sapiens
  CDR3 for alpha chain variable domain of TCR clone 10372 (TRAV23/DV6, TRAJ9)
CAASIGGNTGGFKTIF

SEQ ID NO: 20744 - protein, 14 aa, Homo sapiens
  CDR3 for beta chain variable domain of TCR clone 10372 (TRBV9, TRBJ2-7)
CASSVGVGSCEQYF

SEQ ID NO: 20745 - protein, 14 aa, Homo sapiens
  CDR3 for alpha chain variable domain of TCR clone 10373 (TRAV12-2, TRAJ13)
CAVKKTGGYQKVTF

SEQ ID NO: 20746 - protein, 18 aa, Homo sapiens
  CDR3 for beta chain variable domain of TCR clone 10373 (TRBV20-1, TRBJ2-3)
CSASGLAGGPGTTGTQYF

SEQ ID NO: 20747 - protein, 11 aa, Homo sapiens
  CDR3 for alpha chain variable domain of TCR clone 10374 (TRAV17, TRAJ31)
CATSNNARLMF

SEQ ID NO: 20748 - protein, 16 aa, Homo sapiens
  CDR3 for beta chain variable domain of TCR clone 10374 (TRBV7-8, TRBJ2-4)
CASSAERTLAKNSQYF

SEQ ID NO: 20749 - protein, 15 aa, Homo sapiens
  CDR3 for alpha chain variable domain of TCR clone 10375 (TRAV8-3, TRAJ11)
CAVGLLNSGYSTLTL

SEQ ID NO: 20750 - protein, 16 aa, Homo sapiens
  CDR3 for beta chain variable domain of TCR clone 10375 (TRBV7-9, TRBJ1-2)
CASSLGFSSGEDGYTF

SEQ ID NO: 20751 - protein, 12 aa, Homo sapiens
  CDR3 for alpha chain variable domain of TCR clone 10376 (TRAV13-1, TRAJ21)
CAAKEGFNKLYF

SEQ ID NO: 20752 - protein, 14 aa, Homo sapiens
  CDR3 for beta chain variable domain of TCR clone 10376 (TRBV5-4, TRBJ1-1)
CASSLDSRRDEAFF

SEQ ID NO: 20753 - protein, 11 aa, Homo sapiens
  CDR3 for alpha chain variable domain of TCR clone 10377 (TRAV13-1, TRAJ33)
CAANSNYQLIW

SEQ ID NO: 20754 - protein, 14 aa, Homo sapiens
  CDR3 for beta chain variable domain of TCR clone 10377 (TRBV20-1, TRBJ2-1)
CSAQIGGSANEQFF

SEQ ID NO: 20755 - protein, 13 aa, Homo sapiens
  CDR3 for alpha chain variable domain of TCR clone 10378 (TRAV38-2/DV8, TRAJ30)
CAYRSARDDKIIF

SEQ ID NO: 20756 - protein, 14 aa, Homo sapiens
  CDR3 for beta chain variable domain of TCR clone 10378 (TRBV7-9, TRBJ2-1)
CASSIRQGWDEQFF

SEQ ID NO: 20757 - protein, 14 aa, Homo sapiens
  CDR3 for alpha chain variable domain of TCR clone 10379 (TRAV1-2, TRAJ16)
CAVNRFSDGQKLLF

SEQ ID NO: 20758 - protein, 12 aa, Homo sapiens
  CDR3 for beta chain variable domain of TCR clone 10379 (TRBV5-5, TRBJ2-5)
CASSYFGETQYF

SEQ ID NO: 20759 - protein, 15 aa, Homo sapiens
  CDR3 for alpha chain variable domain of TCR clone 10380 (TRAV3, TRAJ5)
CAVRDLDTGRRAITF

SEQ ID NO: 20760 - protein, 13 aa, Homo sapiens
  CDR3 for beta chain variable domain of TCR clone 10380 (TRBV12-4, TRBJ2-7)
CASSPTETYEQYF

SEQ ID NO: 20761 - protein, 11 aa, Homo sapiens
  CDR3 for alpha chain variable domain of TCR clone 10381 (TRAV1-1, TRAJ23)
CSVRQGGKLIF

SEQ ID NO: 20762 - protein, 20 aa, Homo sapiens
  CDR3 for beta chain variable domain of TCR clone 10381 (TRBV7-8, TRBJ2-2)
CASSHLFPGPTIHITGELFF

SEQ ID NO: 20763 - protein, 12 aa, Homo sapiens
  CDR3 for alpha chain variable domain of TCR clone 10382 (TRAV8-3, TRAJ26)
CAGDNYGQNFVF

SEQ ID NO: 20764 - protein, 16 aa, Homo sapiens
  CDR3 for beta chain variable domain of TCR clone 10382 (TRBV4-3, TRBJ2-1)
CASSPALDRGVNEQFF

SEQ ID NO: 20765 - protein, 16 aa, Homo sapiens
  CDR3 for alpha chain variable domain of TCR clone 10383 (TRAV3, TRAJ10)
CAVRDMRAGGGNKLTF

SEQ ID NO: 20766 - protein, 12 aa, Homo sapiens
  CDR3 for beta chain variable domain of TCR clone 10383 (TRBV7-9, TRBJ1-1)
CASSLVRGEAFF

SEQ ID NO: 20767 - protein, 16 aa, Homo sapiens
  CDR3 for alpha chain variable domain of TCR clone 10384 (TRAV30, TRAJ24)
CGTEIVDADSWGKFQF

SEQ ID NO: 20768 - protein, 13 aa, Homo sapiens
  CDR3 for beta chain variable domain of TCR clone 10384 (TRBV28, TRBJ2-7)
CASTPGLAGEQYF

SEQ ID NO: 20769 - protein, 14 aa, Homo sapiens
  CDR3 for alpha chain variable domain of TCR clone 10385 (TRAV12-2, TRAJ40)
CAVKIPSGTSKYIF

SEQ ID NO: 20770 - protein, 14 aa, Homo sapiens
  CDR3 for beta chain variable domain of TCR clone 10385 (TRBV20-1, TRBJ1-1)
CSAQTRIGGTEAFF

SEQ ID NO: 20771 - protein, 14 aa, Homo sapiens
  CDR3 for alpha chain variable domain of TCR clone 10386 (TRAV23/DV6, TRAJ26)
CAPPCGNYGQNFVF

SEQ ID NO: 20772 - protein, 16 aa, Homo sapiens
  CDR3 for beta chain variable domain of TCR clone 10386 (TRBV7-6, TRBJ2-2)
CASSPGLADYTGELFF

SEQ ID NO: 20773 - protein, 14 aa, Homo sapiens
  CDR3 for alpha chain variable domain of TCR clone 10387 (TRAV9-2, TRAJ39)
CALYIYNAGNMLTF

SEQ ID NO: 20774 - protein, 18 aa, Homo sapiens
  CDR3 for beta chain variable domain of TCR clone 10387 (TRBV12-4, TRBJ2-5)
CASSSGGGRDPVLRARHA

SEQ ID NO: 20775 - protein, 16 aa, Homo sapiens
  CDR3 for alpha chain variable domain of TCR clone 10388 (TRAV30, TRAJ24)
CGTEIVDADSWGKFQF

SEQ ID NO: 20776 - protein, 14 aa, Homo sapiens
  CDR3 for beta chain variable domain of TCR clone 10388 (TRBV12-5, TRBJ2-5)
CASGSRTYQETQYF

SEQ ID NO: 20777 - protein, 14 aa, Homo sapiens
  CDR3 for alpha chain variable domain of TCR clone 10389 (TRAV13-2, TRAJ34)
CAENLGERTDKLIF

SEQ ID NO: 20778 - protein, 16 aa, Homo sapiens
  CDR3 for beta chain variable domain of TCR clone 10389 (TRBV5-1, TRBJ2-1)
CASSPWTSGEYNEQFF

SEQ ID NO: 20779 - protein, 13 aa, Homo sapiens
  CDR3 for alpha chain variable domain of TCR clone 10390 (TRAV12-3, TRAJ7)
CAMTPYGNNRPAF

SEQ ID NO: 20780 - protein, 16 aa, Homo sapiens
  CDR3 for beta chain variable domain of TCR clone 10390 (TRBV20-1, TRBJ1-4)
CSARPYGGELNEKLFF

SEQ ID NO: 20781 - protein, 12 aa, Homo sapiens
  CDR3 for alpha chain variable domain of TCR clone 10391 (TRAV12-3, TRAJ17)
CAMTLTGHKLTF

SEQ ID NO: 20782 - protein, 15 aa, Homo sapiens
  CDR3 for beta chain variable domain of TCR clone 10391 (TRBV20-1, TRBJ2-7)
CSARDRVSGMDEQYF

SEQ ID NO: 20783 - protein, 16 aa, Homo sapiens
  CDR3 for alpha chain variable domain of TCR clone 10392 (TRAV26-1, TRAJ37)
CIVRGDGSGNTGKLIS

SEQ ID NO: 20784 - protein, 13 aa, Homo sapiens
  CDR3 for beta chain variable domain of TCR clone 10392 (TRBV4-1, TRBJ2-2)
CASSQENTGELFF

SEQ ID NO: 20785 - protein, 15 aa, Homo sapiens
  CDR3 for alpha chain variable domain of TCR clone 10393 (TRAV3, TRAJ4)
CAQNMFSGGYNKLIF

SEQ ID NO: 20786 - protein, 13 aa, Homo sapiens
  CDR3 for beta chain variable domain of TCR clone 10393 (TRBV12-4, TRBJ2-5)
CASSPGTEETQYF

SEQ ID NO: 20787 - protein, 11 aa, Homo sapiens
  CDR3 for alpha chain variable domain of TCR clone 10394 (TRAV1-2, TRAJ34)
CAVQNTDKLIF

SEQ ID NO: 20788 - protein, 16 aa, Homo sapiens
  CDR3 for beta chain variable domain of TCR clone 10394 (TRBV4-1, TRBJ2-7)
CASSQVGGRGNYEQYF

SEQ ID NO: 20789 - protein, 14 aa, Homo sapiens
  CDR3 for alpha chain variable domain of TCR clone 10395 (TRAV12-2, TRAJ45)
CAVNSGGGADGLTF

SEQ ID NO: 20790 - protein, 18 aa, Homo sapiens
  CDR3 for beta chain variable domain of TCR clone 10395 (TRBV7-2, TRBJ2-7)
CASSLAQGLRDSSYEQYF

SEQ ID NO: 20791 - protein, 13 aa, Homo sapiens
  CDR3 for alpha chain variable domain of TCR clone 10396 (TRAV8-6, TRAJ43)
CAVPGSRNNDMRF

SEQ ID NO: 20792 - protein, 15 aa, Homo sapiens
  CDR3 for beta chain variable domain of TCR clone 10396 (TRBV6-6, TRBJ2-4)
CASSHMGSGKNIQYF

SEQ ID NO: 20793 - protein, 18 aa, Homo sapiens
  CDR3 for alpha chain variable domain of TCR clone 10397 (TRAV13-1, TRAJ52)
CAAKNPNAGGTSYGKLTF

SEQ ID NO: 20794 - protein, 14 aa, Homo sapiens
  CDR3 for beta chain variable domain of TCR clone 10397 (TRBV4-3, TRBJ2-2)
CASSQGHVTGELFF

SEQ ID NO: 20795 - protein, 14 aa, Homo sapiens
  CDR3 for alpha chain variable domain of TCR clone 10398 (TRAV12-2, TRAJ13)
CVVKKTGGYQKVTF

SEQ ID NO: 20796 - protein, 15 aa, Homo sapiens
  CDR3 for beta chain variable domain of TCR clone 10398 (TRBV27, TRBJ2-1)
CASSNGGGSSNEQFF

SEQ ID NO: 20797 - protein, 11 aa, Homo sapiens
  CDR3 for alpha chain variable domain of TCR clone 10399 (TRAV3, TRAJ21)
CAVGNFNKFYF

SEQ ID NO: 20798 - protein, 16 aa, Homo sapiens
  CDR3 for beta chain variable domain of TCR clone 10399 (TRBV19, TRBJ2-1)
CVSSKAGPSSYNEQFF

SEQ ID NO: 20799 - protein, 15 aa, Homo sapiens
  CDR3 for alpha chain variable domain of TCR clone 10400 (TRAV12-3, TRAJ6)
CAMSATTGGSYIPTF

SEQ ID NO: 20800 - protein, 12 aa, Homo sapiens
  CDR3 for beta chain variable domain of TCR clone 10400 (TRBV7-9, TRBJ2-7)
CASSLEGYEQYF

SEQ ID NO: 20801 - protein, 13 aa, Homo sapiens
  CDR3 for alpha chain variable domain of TCR clone 10401 (TRAV21, TRAJ27)
CAARPGNAGKSTF

SEQ ID NO: 20802 - protein, 14 aa, Homo sapiens
  CDR3 for beta chain variable domain of TCR clone 10401 (TRBV19, TRBJ2-1)
CASPTFVLSGEQFF

SEQ ID NO: 20803 - protein, 11 aa, Homo sapiens
  CDR3 for alpha chain variable domain of TCR clone 10402 (TRAV3, TRAJ21)
CAVGNFNKFYF

SEQ ID NO: 20804 - protein, 16 aa, Homo sapiens
  CDR3 for beta chain variable domain of TCR clone 10402 (TRBV19, TRBJ2-1)
CASSKAVPSSYNEQFF

SEQ ID NO: 20805 - protein, 14 aa, Homo sapiens
  CDR3 for alpha chain variable domain of TCR clone 10403 (TRAV38-1, TRAJ45)
CASHSGGGADGLTF

SEQ ID NO: 20806 - protein, 12 aa, Homo sapiens
  CDR3 for beta chain variable domain of TCR clone 10403 (TRBV11-2, TRBJ2-2)
CASSLGGGELFF

SEQ ID NO: 20807 - protein, 13 aa, Homo sapiens
  CDR3 for alpha chain variable domain of TCR clone 10404 (TRAV29/DV5, TRAJ31)
CAASRNNNARLMF

SEQ ID NO: 20808 - protein, 15 aa, Homo sapiens
  CDR3 for beta chain variable domain of TCR clone 10404 (TRBV9, TRBJ2-1)
CASSLAGSSYNEQFF

SEQ ID NO: 20809 - protein, 14 aa, Homo sapiens
  CDR3 for alpha chain variable domain of TCR clone 10405 (TRAV12-1, TRAJ17)
CAVNYKAAGNKLTF

SEQ ID NO: 20810 - protein, 17 aa, Homo sapiens
  CDR3 for beta chain variable domain of TCR clone 10405 (TRBV20-1, TRBJ2-1)
CSASSSGLAGSYNEQFF

SEQ ID NO: 20811 - protein, 15 aa, Homo sapiens
  CDR3 for alpha chain variable domain of TCR clone 10406 (TRAV22, TRAJ28)
CAARRSGAGSYQLTF

SEQ ID NO: 20812 - protein, 15 aa, Homo sapiens
  CDR3 for beta chain variable domain of TCR clone 10406 (TRBV14, TRBJ1-1)
CASSQDGMGRREAFF

SEQ ID NO: 20813 - protein, 15 aa, Homo sapiens
  CDR3 for alpha chain variable domain of TCR clone 10407 (TRAV12-3, TRAJ42)
CAMITSVGSQGNLIF

SEQ ID NO: 20814 - protein, 11 aa, Homo sapiens
  CDR3 for beta chain variable domain of TCR clone 10407 (TRBV19, TRBJ1-1)
CASSIGSEAFF

SEQ ID NO: 20815 - protein, 13 aa, Homo sapiens
  CDR3 for alpha chain variable domain of TCR clone 10408 (TRAV21, TRAJ31)
CAPFRNNNARLMF

SEQ ID NO: 20816 - protein, 12 aa, Homo sapiens
  CDR3 for beta chain variable domain of TCR clone 10408 (TRBV5-1, TRBJ1-1)
CASSFGNTEAFF

SEQ ID NO: 20817 - protein, 14 aa, Homo sapiens
  CDR3 for alpha chain variable domain of TCR clone 10409 (TRAV1-2, TRAJ8)
CAVREDTGFQKLVF

SEQ ID NO: 20818 - protein, 17 aa, Homo sapiens
  CDR3 for beta chain variable domain of TCR clone 10409 (TRBV7-8, TRBJ2-6)
CASSAGTGGAGANVLTF

SEQ ID NO: 20819 - protein, 12 aa, Homo sapiens
  CDR3 for alpha chain variable domain of TCR clone 10410 (TRAV8-6, TRAJ43)
CAVGHNNNDMRF

SEQ ID NO: 20820 - protein, 14 aa, Homo sapiens
  CDR3 for beta chain variable domain of TCR clone 10410 (TRBV10-3, TRBJ1-1)
CAISDGSGVTEAFF

SEQ ID NO: 20821 - protein, 12 aa, Homo sapiens
  CDR3 for alpha chain variable domain of TCR clone 10411 (TRAV2, TRAJ33)
CAVPDSNYQLIW

SEQ ID NO: 20822 - protein, 12 aa, Homo sapiens
  CDR3 for beta chain variable domain of TCR clone 10411 (TRBV7-8, TRBJ2-7)
CASSLGDREQYF

SEQ ID NO: 20823 - protein, 10 aa, Homo sapiens
  CDR3 for alpha chain variable domain of TCR clone 10412 (TRAV26-2, TRAJ22)
LQGSARQLTF

SEQ ID NO: 20824 - protein, 13 aa, Homo sapiens
  CDR3 for beta chain variable domain of TCR clone 10412 (TRBV5-1, TRBJ2-1)
CASSLGSYNEQFF

SEQ ID NO: 20825 - protein, 12 aa, Homo sapiens
  CDR3 for alpha chain variable domain of TCR clone 10413 (TRAV38-2/DV8, TRAJ21)
CAYRSNFNKFYF

SEQ ID NO: 20826 - protein, 15 aa, Homo sapiens
  CDR3 for beta chain variable domain of TCR clone 10413 (TRBV6-1, TRBJ2-7)
CASSDWDKPNYEQYF

SEQ ID NO: 20827 - protein, 18 aa, Homo sapiens
  CDR3 for alpha chain variable domain of TCR clone 10414 (TRAV9-2, TRAJ52)
CALSDLNLGGTSYGKLTF

SEQ ID NO: 20828 - protein, 15 aa, Homo sapiens
  CDR3 for beta chain variable domain of TCR clone 10414 (TRBV6-5, TRBJ1-2)
CASSYLLQGGYGYTF

SEQ ID NO: 20829 - protein, 14 aa, Homo sapiens
  CDR3 for alpha chain variable domain of TCR clone 10415 (TRAV13-1, TRAJ35)
CAASKGGFGNVLHC

SEQ ID NO: 20830 - protein, 13 aa, Homo sapiens
  CDR3 for beta chain variable domain of TCR clone 10415 (TRBV7-9, TRBJ1-2)
CASSLKQNYGYTF

SEQ ID NO: 20831 - protein, 13 aa, Homo sapiens
  CDR3 for alpha chain variable domain of TCR clone 10416 (TRAV8-2, TRAJ15)
CVVSGPGRNCSDL

SEQ ID NO: 20832 - protein, 16 aa, Homo sapiens
  CDR3 for beta chain variable domain of TCR clone 10416 (TRBV20-1, TRBJ1-4)
CSARPYGGELNEKLFF

SEQ ID NO: 20833 - protein, 22 aa, Homo sapiens
  CDR3 for alpha chain variable domain of TCR clone 10417 (TRAV13-2, TRAJ13)
QLLNLETQLSTFVPEGYQKVTF

SEQ ID NO: 20834 - protein, 16 aa, Homo sapiens
  CDR3 for beta chain variable domain of TCR clone 10417 (TRBV5-1, TRBJ2-3)
CASSSIGAGSTDTQYF

SEQ ID NO: 20835 - protein, 14 aa, Homo sapiens
  CDR3 for alpha chain variable domain of TCR clone 10418 (TRAV12-2, TRAJ13)
CAVKKTGGYQKVTF

SEQ ID NO: 20836 - protein, 14 aa, Homo sapiens
  CDR3 for beta chain variable domain of TCR clone 10418 (TRBV2, TRBJ1-5)
CASKKTDSNQPQHF

SEQ ID NO: 20837 - protein, 14 aa, Homo sapiens
  CDR3 for alpha chain variable domain of TCR clone 10419 (TRAV38-1, TRAJ40)
CALRPTSGTYKYIF

SEQ ID NO: 20838 - protein, 14 aa, Homo sapiens
  CDR3 for beta chain variable domain of TCR clone 10419 (TRBV19, TRBJ2-1)
CVSPTFVLSGEQFF

SEQ ID NO: 20839 - protein, 16 aa, Homo sapiens
  CDR3 for alpha chain variable domain of TCR clone 10420 (TRAV30, TRAJ24)
CGTEIVAADSWGKFQF

SEQ ID NO: 20840 - protein, 14 aa, Homo sapiens
  CDR3 for beta chain variable domain of TCR clone 10420 (TRBV12-5, TRBJ2-5)
CASGSRTHQETQYF

SEQ ID NO: 20841 - protein, 15 aa, Homo sapiens
  CDR3 for alpha chain variable domain of TCR clone 10421 (TRAV35, TRAJ34)
CAGTSIVRNTDKLIF

SEQ ID NO: 20842 - protein, 15 aa, Homo sapiens
  CDR3 for beta chain variable domain of TCR clone 10421 (TRBV6-1, TRBJ1-5)
CASSELREGNQPQHF

SEQ ID NO: 20843 - protein, 15 aa, Homo sapiens
  CDR3 for alpha chain variable domain of TCR clone 10422 (TRAV12-1, TRAJ45)
CVVIRRGGGADGLTF

SEQ ID NO: 20844 - protein, 18 aa, Homo sapiens
  CDR3 for beta chain variable domain of TCR clone 10422 (TRBV23-1, TRBJ1-1)
CASEKQGAEATLKLSLDK

SEQ ID NO: 20845 - protein, 14 aa, Homo sapiens
  CDR3 for alpha chain variable domain of TCR clone 10423 (TRAV38-1, TRAJ29)
CAFITPSGNTPLVF

SEQ ID NO: 20846 - protein, 13 aa, Homo sapiens
  CDR3 for beta chain variable domain of TCR clone 10423 (TRBV18, TRBJ2-7)
CQLTERGAYEQYF

SEQ ID NO: 20847 - protein, 15 aa, Homo sapiens
  CDR3 for alpha chain variable domain of TCR clone 10424 (TRAV26-1, TRAJ29)
CIVRVAGSGNTPLVF

SEQ ID NO: 20848 - protein, 15 aa, Homo sapiens
  CDR3 for beta chain variable domain of TCR clone 10424 (TRBV7-9, TRBJ1-5)
CASSQGHQPNQPQHF

SEQ ID NO: 20849 - protein, 15 aa, Homo sapiens
  CDR3 for alpha chain variable domain of TCR clone 10425 (TRAV26-1, TRAJ29)
CIVRVEGSGNAPLVF

SEQ ID NO: 20850 - protein, 15 aa, Homo sapiens
  CDR3 for beta chain variable domain of TCR clone 10425 (TRBV7-9, TRBJ1-5)
CASSQGHQPNQPQHF

SEQ ID NO: 20851 - protein, 18 aa, Homo sapiens
  CDR3 for alpha chain variable domain of TCR clone 10426 (TRAV21, TRAJ52)
CAVRPSPACGTSYGKLTF

SEQ ID NO: 20852 - protein, 17 aa, Homo sapiens
  CDR3 for beta chain variable domain of TCR clone 10426 (TRBV13, TRBJ2-3)
CASSLSRVAGGRNTQYF

SEQ ID NO: 20853 - protein, 13 aa, Homo sapiens
  CDR3 for alpha chain variable domain of TCR clone 10427 (TRAV8-2, TRAJ43)
CVVSDQGDNDTRF

SEQ ID NO: 20854 - protein, 12 aa, Homo sapiens
  CDR3 for beta chain variable domain of TCR clone 10427 (TRBV7-9, TRBJ2-7)
CASRTGFDEQYF

SEQ ID NO: 20855 - protein, 16 aa, Homo sapiens
  CDR3 for alpha chain variable domain of TCR clone 10428 (TRAV1-2, TRAJ6)
CAVRDQGTGGSYIPTF

SEQ ID NO: 20856 - protein, 13 aa, Homo sapiens
  CDR3 for beta chain variable domain of TCR clone 10428 (TRBV12-4, TRBJ1-2)
CASSLRQGKGYTF

SEQ ID NO: 20857 - protein, 17 aa, Homo sapiens
  CDR3 for alpha chain variable domain of TCR clone 10429 (TRAV38-2/DV8, TRAJ23)
CALSRKLIFGQGTELSV

SEQ ID NO: 20858 - protein, 12 aa, Homo sapiens
  CDR3 for beta chain variable domain of TCR clone 10429 (TRBV11-2, TRBJ2-2)
CASSLGGGELFF

SEQ ID NO: 20859 - protein, 14 aa, Homo sapiens
  CDR3 for alpha chain variable domain of TCR clone 10430 (TRAV13-1, TRAJ35)
CAASKGGFGNVRHC

SEQ ID NO: 20860 - protein, 13 aa, Homo sapiens
  CDR3 for beta chain variable domain of TCR clone 10430 (TRBV7-3, TRBJ1-1)
CASSQDWGAEAFF

SEQ ID NO: 20861 - protein, 12 aa, Homo sapiens
  CDR3 for alpha chain variable domain of TCR clone 10431 (TRAV17, TRAJ20)
CATYSNDYKLSF

SEQ ID NO: 20862 - protein, 14 aa, Homo sapiens
  CDR3 for beta chain variable domain of TCR clone 10431 (TRBV25-1, TRBJ1-1)
CASTHLGGNTEAFF

SEQ ID NO: 20863 - protein, 11 aa, Homo sapiens
  CDR3 for alpha chain variable domain of TCR clone 10432 (TRAV17, TRAJ9)
CATTGGFKTIF

SEQ ID NO: 20864 - protein, 14 aa, Homo sapiens
  CDR3 for beta chain variable domain of TCR clone 10432 (TRBV7-9, TRBJ2-2)
CASSGLADTGELLF

SEQ ID NO: 20865 - protein, 11 aa, Homo sapiens
  CDR3 for alpha chain variable domain of TCR clone 10433 (TRAV39, TRAJ33)
CAVDPWIATIS

SEQ ID NO: 20866 - protein, 16 aa, Homo sapiens
  CDR3 for beta chain variable domain of TCR clone 10433 (TRBV18, TRBJ1-4)
CASSPLVGDRAEKLFF

SEQ ID NO: 20867 - protein, 13 aa, Homo sapiens
  CDR3 for alpha chain variable domain of TCR clone 10434 (TRAV2, TRAJ40)
CAVVTSGTYKYIF

SEQ ID NO: 20868 - protein, 13 aa, Homo sapiens
  CDR3 for beta chain variable domain of TCR clone 10434 (TRBV4-2, TRBJ1-1)
CASSQAGNTEAFF

SEQ ID NO: 20869 - protein, 14 aa, Homo sapiens
  CDR3 for alpha chain variable domain of TCR clone 10435 (TRAV12-2, TRAJ40)
CAVKIPSGTYKYIF

SEQ ID NO: 20870 - protein, 15 aa, Homo sapiens
  CDR3 for beta chain variable domain of TCR clone 10435 (TRBV11-3, TRBJ2-3)
CASLRDGREGDTQYF

SEQ ID NO: 20871 - protein, 14 aa, Homo sapiens
  CDR3 for alpha chain variable domain of TCR clone 10436 (TRAV35, TRAJ33)
CAGSSQDSNYQLIC

SEQ ID NO: 20872 - protein, 15 aa, Homo sapiens
  CDR3 for beta chain variable domain of TCR clone 10436 (TRBV20-1, TRBJ2-7)
CSAESGTSGAYEQYF

SEQ ID NO: 20873 - protein, 15 aa, Homo sapiens
  CDR3 for alpha chain variable domain of TCR clone 10437 (TRAV29/DV5, TRAJ48)
CAAKISNFGNEKLTF

SEQ ID NO: 20874 - protein, 15 aa, Homo sapiens
  CDR3 for beta chain variable domain of TCR clone 10437 (TRBV7-8, TRBJ2-1)
CASSPSGTIYNEQFF

SEQ ID NO: 20875 - protein, 17 aa, Homo sapiens
  CDR3 for alpha chain variable domain of TCR clone 10438 (TRAV4, TRAJ42)
CLVGVLNYGGSQGNPIF

SEQ ID NO: 20876 - protein, 12 aa, Homo sapiens
  CDR3 for beta chain variable domain of TCR clone 10438 (TRBV20-1, TRBJ2-1)
CSAQYTYNEQFF

SEQ ID NO: 20877 - protein, 15 aa, Homo sapiens
  CDR3 for alpha chain variable domain of TCR clone 10439 (TRAV8-3, TRAJ11)
CAVGLLNSGYSTLTF

SEQ ID NO: 20878 - protein, 16 aa, Homo sapiens
  CDR3 for beta chain variable domain of TCR clone 10439 (TRBV7-9, TRBJ1-2)
CASSLGFSSGEDGYAF

SEQ ID NO: 20879 - protein, 12 aa, Homo sapiens
  CDR3 for alpha chain variable domain of TCR clone 10440 (TRAV13-1, TRAJ5)
CAAKAGRRALTF

SEQ ID NO: 20880 - protein, 14 aa, Homo sapiens
  CDR3 for beta chain variable domain of TCR clone 10440 (TRBV6-1, TRBJ2-5)
CASGGAGIQETQYF

SEQ ID NO: 20881 - protein, 14 aa, Homo sapiens
  CDR3 for alpha chain variable domain of TCR clone 10441 (TRAV16, TRAJ29)
CALTRNSGNTPLVF

SEQ ID NO: 20882 - protein, 17 aa, Homo sapiens
  CDR3 for beta chain variable domain of TCR clone 10441 (TRBV13, TRBJ2-3)
CASSLSRVAGGRNTQYF

SEQ ID NO: 20883 - protein, 13 aa, Homo sapiens
  CDR3 for alpha chain variable domain of TCR clone 10442 (TRAV21, TRAJ27)
CAARPGNAGKSTV

SEQ ID NO: 20884 - protein, 14 aa, Homo sapiens
  CDR3 for beta chain variable domain of TCR clone 10442 (TRBV7-6, TRBJ2-3)
CASSLGTVTDTQYF

SEQ ID NO: 20885 - protein, 15 aa, Homo sapiens
  CDR3 for alpha chain variable domain of TCR clone 10443 (TRAV17, TRAJ57)
CATGPSQGGSEKLVF

SEQ ID NO: 20886 - protein, 15 aa, Homo sapiens
  CDR3 for beta chain variable domain of TCR clone 10443 (TRBV9, TRBJ2-1)
CASSLAGSSYNEQFF

SEQ ID NO: 20887 - protein, 14 aa, Homo sapiens
  CDR3 for alpha chain variable domain of TCR clone 10444 (TRAV12-2, TRAJ13)
CAVKKTGGYHKVTF

SEQ ID NO: 20888 - protein, 15 aa, Homo sapiens
  CDR3 for beta chain variable domain of TCR clone 10444 (TRBV27, TRBJ2-1)
CASSNGGGSSNEQFF

SEQ ID NO: 20889 - protein, 12 aa, Homo sapiens
  CDR3 for alpha chain variable domain of TCR clone 10445 (TRAV13-2, TRAJ23)
CAERHGGGKLIF

SEQ ID NO: 20890 - protein, 16 aa, Homo sapiens
  CDR3 for beta chain variable domain of TCR clone 10445 (TRBV20-1, TRBJ1-4)
CSAPGQGLLTNEKLFF

SEQ ID NO: 20891 - protein, 18 aa, Homo sapiens
  CDR3 for alpha chain variable domain of TCR clone 10446 (TRAV21, TRAJ52)
CAVRPSPAGGPSYGKLTF

SEQ ID NO: 20892 - protein, 17 aa, Homo sapiens
  CDR3 for beta chain variable domain of TCR clone 10446 (TRBV13, TRBJ2-3)
CASSLSRVAGGRNTQYF

SEQ ID NO: 20893 - protein, 15 aa, Homo sapiens
  CDR3 for alpha chain variable domain of TCR clone 10447 (TRAV17, TRAJ4)
CATGTWSGGYNKLIF

SEQ ID NO: 20894 - protein, 15 aa, Homo sapiens
  CDR3 for beta chain variable domain of TCR clone 10447 (TRBV7-2, TRBJ2-7)
CASSWGQGAIYEQYF

SEQ ID NO: 20895 - protein, 18 aa, Homo sapiens
  CDR3 for alpha chain variable domain of TCR clone 10448 (TRAV21, TRAJ52)
CAVRPSPAGGTSYGKLTF

SEQ ID NO: 20896 - protein, 12 aa, Homo sapiens
  CDR3 for beta chain variable domain of TCR clone 10448 (TRBV7-8, TRBJ2-7)
CASSLGDREQYF

SEQ ID NO: 20897 - protein, 13 aa, Homo sapiens
  CDR3 for alpha chain variable domain of TCR clone 10449 (TRAV8-4, TRAJ49)
CAVSDPGGNQFYF

SEQ ID NO: 20898 - protein, 11 aa, Homo sapiens
  CDR3 for beta chain variable domain of TCR clone 10449 (TRBV29-1, TRBJ1-3)
CSVAIGNTIYF

SEQ ID NO: 20899 - protein, 16 aa, Homo sapiens
  CDR3 for alpha chain variable domain of TCR clone 10450 (TRAV21, TRAJ37)
CAVRTAGSSNTGTLIF

SEQ ID NO: 20900 - protein, 13 aa, Homo sapiens
  CDR3 for beta chain variable domain of TCR clone 10450 (TRBV7-9, TRBJ2-5)
CASLPSGRETQYF

SEQ ID NO: 20901 - protein, 13 aa, Homo sapiens
  CDR3 for alpha chain variable domain of TCR clone 10451 (TRAV1-1, TRAJ9)
CAATNTGGFKTIF

SEQ ID NO: 20902 - protein, 14 aa, Homo sapiens
  CDR3 for beta chain variable domain of TCR clone 10451 (TRBV20-1, TRBJ2-1)
CSAQIGGSANEQFF

SEQ ID NO: 20903 - protein, 17 aa, Homo sapiens
  CDR3 for alpha chain variable domain of TCR clone 10452 (TRAV3, TRAJ12)
CAVRDGGRMDSSYKLIF

SEQ ID NO: 20904 - protein, 17 aa, Homo sapiens
  CDR3 for beta chain variable domain of TCR clone 10452 (TRBV20-1, TRBJ2-1)
CSASSSGLAGSYNEQFF

SEQ ID NO: 20905 - protein, 15 aa, Homo sapiens
  CDR3 for alpha chain variable domain of TCR clone 10453 (TRAV27, TRAJ38)
CAARRNAGNNRKLVW

SEQ ID NO: 20906 - protein, 13 aa, Homo sapiens
  CDR3 for beta chain variable domain of TCR clone 10453 (TRBV12-5, TRBJ2-3)
CASGDRQSDTQYF

SEQ ID NO: 20907 - protein, 17 aa, Homo sapiens
  CDR3 for alpha chain variable domain of TCR clone 10454 (TRAV3, TRAJ6)
CAVRNGPRAGGSYIPTF

SEQ ID NO: 20908 - protein, 14 aa, Homo sapiens
  CDR3 for beta chain variable domain of TCR clone 10454 (TRBV7-2, TRBJ2-7)
CASSPKTSFYEQYF

SEQ ID NO: 20909 - protein, 14 aa, Homo sapiens
  CDR3 for alpha chain variable domain of TCR clone 10455 (TRAV29/DV5, TRAJ20)
CAATIRSNDYKLSF

SEQ ID NO: 20910 - protein, 19 aa, Homo sapiens
  CDR3 for beta chain variable domain of TCR clone 10455 (TRBV25-1, TRBJ2-2)
CAILVYRVDRGRKTGELFF

SEQ ID NO: 20911 - protein, 14 aa, Homo sapiens
  CDR3 for alpha chain variable domain of TCR clone 10456 (TRAV12-2, TRAJ40)
CAVKIPSGTYKYIF

SEQ ID NO: 20912 - protein, 15 aa, Homo sapiens
  CDR3 for beta chain variable domain of TCR clone 10456 (TRBV20-1, TRBJ2-7)
CSARDRVSGMDEQYF

SEQ ID NO: 20913 - protein, 17 aa, Homo sapiens
  CDR3 for alpha chain variable domain of TCR clone 10457 (TRAV1-1, TRAJ32)
CAVRVDELWWCYKQAHL

SEQ ID NO: 20914 - protein, 17 aa, Homo sapiens
  CDR3 for beta chain variable domain of TCR clone 10457 (TRBV13, TRBJ2-3)
CASSLSRVAGGRNTQYF

SEQ ID NO: 20915 - protein, 15 aa, Homo sapiens
  CDR3 for alpha chain variable domain of TCR clone 10458 (TRAV3, TRAJ5)
CAVRDLDTGRRALTF

SEQ ID NO: 20916 - protein, 13 aa, Homo sapiens
  CDR3 for beta chain variable domain of TCR clone 10458 (TRBV12-4, TRBJ2-7)
CASSPAETYEQYF

SEQ ID NO: 20917 - protein, 14 aa, Homo sapiens
  CDR3 for alpha chain variable domain of TCR clone 10459 (TRAV12-3, TRAJ10)
SHLPLTGGGNKLTF

SEQ ID NO: 20918 - protein, 14 aa, Homo sapiens
  CDR3 for beta chain variable domain of TCR clone 10459 (TRBV7-2, TRBJ1-2)
CASSQTGSTYGYTF

SEQ ID NO: 20919 - protein, 20 aa, Homo sapiens
  CDR3 for alpha chain variable domain of TCR clone 10460 (TRAV12-1, TRAJ42)
SSVIQPPTSVKGGSQGNLIF

SEQ ID NO: 20920 - protein, 18 aa, Homo sapiens
  CDR3 for beta chain variable domain of TCR clone 10460 (TRBV11-2, TRBJ2-3)
CAGSLGGASRGAPNTQYF

SEQ ID NO: 20921 - protein, 15 aa, Homo sapiens
  CDR3 for alpha chain variable domain of TCR clone 10461 (TRAV2, TRAJ15)
CAVEDRGQAGTALIF

SEQ ID NO: 20922 - protein, 13 aa, Homo sapiens
  CDR3 for beta chain variable domain of TCR clone 10461 (TRBV10-2, TRBJ2-7)
CASGASGGYEQYL

SEQ ID NO: 20923 - protein, 14 aa, Homo sapiens
  CDR3 for alpha chain variable domain of TCR clone 10462 (TRAV21, TRAJ45)
CAVSSGGGADGLTF

SEQ ID NO: 20924 - protein, 15 aa, Homo sapiens
  CDR3 for beta chain variable domain of TCR clone 10462 (TRBV10-2, TRBJ2-6)
CASSEQGTGANVLTF

SEQ ID NO: 20925 - protein, 13 aa, Homo sapiens
  CDR3 for alpha chain variable domain of TCR clone 10463 (TRAV1-2, TRAJ20)
CAVRDGNDYKLSF

SEQ ID NO: 20926 - protein, 14 aa, Homo sapiens
  CDR3 for beta chain variable domain of TCR clone 10463 (TRBV7-2, TRBJ2-3)
CASSLGGGERYAVF

SEQ ID NO: 20927 - protein, 14 aa, Homo sapiens
  CDR3 for alpha chain variable domain of TCR clone 10464 (TRAV12-2, TRAJ17)
CAVLFKAAGNKLTF

SEQ ID NO: 20928 - protein, 15 aa, Homo sapiens
  CDR3 for beta chain variable domain of TCR clone 10464 (TRBV27, TRBJ2-1)
CASSNGGGSSNEQFF

SEQ ID NO: 20929 - protein, 18 aa, Homo sapiens
  CDR3 for alpha chain variable domain of TCR clone 10465 (TRAV21, TRAJ52)
CAVRPSPAGGTSYGKLTF

SEQ ID NO: 20930 - protein, 17 aa, Homo sapiens
  CDR3 for beta chain variable domain of TCR clone 10465 (TRBV13, TRBJ2-3)
CASSISRVAGGRNTQYF

SEQ ID NO: 20931 - protein, 11 aa, Homo sapiens
  CDR3 for alpha chain variable domain of TCR clone 10466 (TRAV1-2, TRAJ31)
CAVNNNARLMF

SEQ ID NO: 20932 - protein, 15 aa, Homo sapiens
  CDR3 for beta chain variable domain of TCR clone 10466 (TRBV28, TRBJ2-1)
CASSIIAGGRSEQFF

SEQ ID NO: 20933 - protein, 12 aa, Homo sapiens
  CDR3 for alpha chain variable domain of TCR clone 10467 (TRAV16, TRAJ10)
CSRTGGGNKLTF

SEQ ID NO: 20934 - protein, 14 aa, Homo sapiens
  CDR3 for beta chain variable domain of TCR clone 10467 (TRBV12-4, TRBJ1-1)
CASSLGTGGTEAFF

SEQ ID NO: 20935 - protein, 14 aa, Homo sapiens
  CDR3 for alpha chain variable domain of TCR clone 10468 (TRAV21, TRAJ35)
CAVIPIGFGNVLHC

SEQ ID NO: 20936 - protein, 12 aa, Homo sapiens
  CDR3 for beta chain variable domain of TCR clone 10468 (TRBV7-9, TRBJ2-7)
CASSIKREEQYF

SEQ ID NO: 20937 - protein, 14 aa, Homo sapiens
  CDR3 for alpha chain variable domain of TCR clone 10469 (TRAV1-2, TRAJ16)
CAVNRVSDGQKLLF

SEQ ID NO: 20938 - protein, 15 aa, Homo sapiens
  CDR3 for beta chain variable domain of TCR clone 10469 (TRBV7-9, TRBJ1-6)
CASSSPGRGNSPLHF

SEQ ID NO: 20939 - protein, 12 aa, Homo sapiens
  CDR3 for alpha chain variable domain of TCR clone 10470 (TRAV1-2, TRAJ33)
CAALDSNYQLIW

SEQ ID NO: 20940 - protein, 13 aa, Homo sapiens
  CDR3 for beta chain variable domain of TCR clone 10470 (TRBV7-2, TRBJ2-2)
CASSLAVTGELFF

SEQ ID NO: 20941 - protein, 14 aa, Homo sapiens
  CDR3 for alpha chain variable domain of TCR clone 10471 (TRAV12-2, TRAJ17)
CAVLFKAAGNKLTF

SEQ ID NO: 20942 - protein, 17 aa, Homo sapiens
  CDR3 for beta chain variable domain of TCR clone 10471 (TRBV20-1, TRBJ2-2)
CSASGSGQGGLTGELFS

SEQ ID NO: 20943 - protein, 11 aa, Homo sapiens
  CDR3 for alpha chain variable domain of TCR clone 10472 (TRAV8-6, TRAJ13)
CALGIYQKVTF

SEQ ID NO: 20944 - protein, 14 aa, Homo sapiens
  CDR3 for beta chain variable domain of TCR clone 10472 (TRBV6-1, TRBJ1-3)
CASVQGGGGNTIYF

SEQ ID NO: 20945 - protein, 16 aa, Homo sapiens
  CDR3 for alpha chain variable domain of TCR clone 10473 (TRAV3, TRAJ10)
CAVRDMRAGGGNKLTF

SEQ ID NO: 20946 - protein, 16 aa, Homo sapiens
  CDR3 for beta chain variable domain of TCR clone 10473 (TRBV9, TRBJ1-2)
CASSVEEKVSPYGYTF

SEQ ID NO: 20947 - protein, 14 aa, Homo sapiens
  CDR3 for alpha chain variable domain of TCR clone 10474 (TRAV1-2, TRAJ16)
CAVNRFSDGQKLLF

SEQ ID NO: 20948 - protein, 15 aa, Homo sapiens
  CDR3 for beta chain variable domain of TCR clone 10474 (TRBV6-5, TRBJ2-7)
CASSYSTSGNYEQYF

SEQ ID NO: 20949 - protein, 14 aa, Homo sapiens
  CDR3 for alpha chain variable domain of TCR clone 10475 (TRAV9-2, TRAJ39)
CALYIYNAGNMLTF

SEQ ID NO: 20950 - protein, 17 aa, Homo sapiens
  CDR3 for beta chain variable domain of TCR clone 10475 (TRBV25-1, TRBJ2-7)
CASSDARVVFSSYEQYF

SEQ ID NO: 20951 - protein, 14 aa, Homo sapiens
  CDR3 for alpha chain variable domain of TCR clone 10476 (TRAV12-3, TRAJ10)
SHLPLTGGGNKLTF

SEQ ID NO: 20952 - protein, 16 aa, Homo sapiens
  CDR3 for beta chain variable domain of TCR clone 10476 (TRBV5-4, TRBJ2-1)
CASSLVGSGQDNEQFF

SEQ ID NO: 20953 - protein, 14 aa, Homo sapiens
  CDR3 for alpha chain variable domain of TCR clone 10477 (TRAV12-3, TRAJ10)
SHLPLTGGGNKLTF

SEQ ID NO: 20954 - protein, 16 aa, Homo sapiens
  CDR3 for beta chain variable domain of TCR clone 10477 (TRBV19, TRBJ2-1)
CASSKAGPSSYNGQFF

SEQ ID NO: 20955 - protein, 12 aa, Homo sapiens
  CDR3 for alpha chain variable domain of TCR clone 10478 (TRAV16, TRAJ10)
CSRTGGGNKLTF

SEQ ID NO: 20956 - protein, 14 aa, Homo sapiens
  CDR3 for beta chain variable domain of TCR clone 10478 (TRBV12-4, TRBJ1-1)
CASSFDRVNTEAFF

SEQ ID NO: 20957 - protein, 12 aa, Homo sapiens
  CDR3 for alpha chain variable domain of TCR clone 10479 (TRAV17, TRAJ4)
CATDGGYNKLIF

SEQ ID NO: 20958 - protein, 13 aa, Homo sapiens
  CDR3 for beta chain variable domain of TCR clone 10479 (TRBV29-1, TRBJ2-2)
CSTTGVDTGELFF

SEQ ID NO: 20959 - protein, 15 aa, Homo sapiens
  CDR3 for alpha chain variable domain of TCR clone 10480 (TRAV21, TRAJ53)
CATLNSGGSNYKLTF

SEQ ID NO: 20960 - protein, 13 aa, Homo sapiens
  CDR3 for beta chain variable domain of TCR clone 10480 (TRBV7-7, TRBJ1-1)
CASSLGANTEAFF

SEQ ID NO: 20961 - protein, 12 aa, Homo sapiens
  CDR3 for alpha chain variable domain of TCR clone 10481 (TRAV10, TRAJ31)
CVVSANNARLMF

SEQ ID NO: 20962 - protein, 11 aa, Homo sapiens
  CDR3 for beta chain variable domain of TCR clone 10481 (TRBV29-1, TRBJ1-1)
CSVEILTEAFF

SEQ ID NO: 20963 - protein, 13 aa, Homo sapiens
  CDR3 for alpha chain variable domain of TCR clone 10482 (TRAV21, TRAJ57)
CAVTQGGSEKLGF

SEQ ID NO: 20964 - protein, 16 aa, Homo sapiens
  CDR3 for beta chain variable domain of TCR clone 10482 (TRBV29-1, TRBJ2-7)
CSVEDAEDGTAYEQYF

SEQ ID NO: 20965 - protein, 14 aa, Homo sapiens
  CDR3 for alpha chain variable domain of TCR clone 10483 (TRAV35, TRAJ33)
CAGSSQDSNYQLIW

SEQ ID NO: 20966 - protein, 15 aa, Homo sapiens
  CDR3 for beta chain variable domain of TCR clone 10483 (TRBV20-1, TRBJ2-7)
CSADSGTSGAYEQYF

SEQ ID NO: 20967 - protein, 18 aa, Homo sapiens
  CDR3 for alpha chain variable domain of TCR clone 10484 (TRAV13-1, TRAJ52)
CAAKNPNAGGTSYGKLTF

SEQ ID NO: 20968 - protein, 12 aa, Homo sapiens
  CDR3 for beta chain variable domain of TCR clone 10484 (TRBV5-1, TRBJ1-1)
CASSFGNTEAFF

SEQ ID NO: 20969 - protein, 18 aa, Homo sapiens
  CDR3 for alpha chain variable domain of TCR clone 10485 (TRAV12-2, )
CAVEDIQNPDPAVYQLRD

SEQ ID NO: 20970 - protein, 11 aa, Homo sapiens
  CDR3 for beta chain variable domain of TCR clone 10485 (TRBV25-1, TRBJ2-1)
CATTRISEQFF

SEQ ID NO: 20971 - protein, 12 aa, Homo sapiens
  CDR3 for alpha chain variable domain of TCR clone 10486 (TRAV13-2, TRAJ23)
CAERHRGGKLIL

SEQ ID NO: 20972 - protein, 15 aa, Homo sapiens
  CDR3 for beta chain variable domain of TCR clone 10486 (TRBV15, TRBJ2-1)
CATSRPGQGLHEQFF

SEQ ID NO: 20973 - protein, 15 aa, Homo sapiens
  CDR3 for alpha chain variable domain of TCR clone 10487 (TRAV8-3, TRAJ45)
CASSYSRGGADGLTF

SEQ ID NO: 20974 - protein, 13 aa, Homo sapiens
  CDR3 for beta chain variable domain of TCR clone 10487 (TRBV10-3, TRBJ2-7)
CASKLAVNYEQYF

SEQ ID NO: 20975 - protein, 15 aa, Homo sapiens
  CDR3 for alpha chain variable domain of TCR clone 10488 (TRAV26-1, TRAJ29)
CIVRVEGSGNTPLVF

SEQ ID NO: 20976 - protein, 14 aa, Homo sapiens
  CDR3 for beta chain variable domain of TCR clone 10488 (TRBV18, TRBJ2-5)
CASSPGVSKETQYF

SEQ ID NO: 20977 - protein, 23 aa, Homo sapiens
  CDR3 for alpha chain variable domain of TCR clone 10489 (TRAV1-1, TRAJ11)
LLQELQMKDSASYFCAGYSTLTF

SEQ ID NO: 20978 - protein, 14 aa, Homo sapiens
  CDR3 for beta chain variable domain of TCR clone 10489 (TRBV12-4, TRBJ1-4)
CQQFSSATNEKLFF

SEQ ID NO: 20979 - protein, 13 aa, Homo sapiens
  CDR3 for alpha chain variable domain of TCR clone 10490 (TRAV12-1, TRAJ53)
CVVNAESNYKLTF

SEQ ID NO: 20980 - protein, 15 aa, Homo sapiens
  CDR3 for beta chain variable domain of TCR clone 10490 (TRBV2, TRBJ2-5)
CASSGTVAAGETQYF

SEQ ID NO: 20981 - protein, 13 aa, Homo sapiens
  CDR3 for alpha chain variable domain of TCR clone 10491 (TRAV21, TRAJ27)
CAARPGNSGKSTF

SEQ ID NO: 20982 - protein, 14 aa, Homo sapiens
  CDR3 for beta chain variable domain of TCR clone 10491 (TRBV7-6, TRBJ2-3)
CASSLGTVTDTQYF

SEQ ID NO: 20983 - protein, 20 aa, Homo sapiens
  CDR3 for alpha chain variable domain of TCR clone 10492 (TRAV26-1, TRAJ38)
CIADNAGNNHIQNPDPAVYQ

SEQ ID NO: 20984 - protein, 13 aa, Homo sapiens
  CDR3 for beta chain variable domain of TCR clone 10492 (TRBV20-1, TRBJ1-1)
CSARGGGNTEAFF

SEQ ID NO: 20985 - protein, 18 aa, Homo sapiens
  CDR3 for alpha chain variable domain of TCR clone 10493 (TRAV21, TRAJ52)
CAVRPSPAGGTSYGKLTF

SEQ ID NO: 20986 - protein, 14 aa, Homo sapiens
  CDR3 for beta chain variable domain of TCR clone 10493 (TRBV7-2, TRBJ2-7)
CASSPKTSFYEQYF

SEQ ID NO: 20987 - protein, 17 aa, Homo sapiens
  CDR3 for alpha chain variable domain of TCR clone 10494 (TRAV3, TRAJ6)
CAVRDGPGAGGSYIPTF

SEQ ID NO: 20988 - protein, 20 aa, Homo sapiens
  CDR3 for beta chain variable domain of TCR clone 10494 (TRBV28, TRBJ2-1)
CASTPIGRSPGLAGGNEQFF

SEQ ID NO: 20989 - protein, 13 aa, Homo sapiens
  CDR3 for alpha chain variable domain of TCR clone 10495 (TRAV36/DV7, TRAJ33)
CAVDMDSNYQLIW

SEQ ID NO: 20990 - protein, 13 aa, Homo sapiens
  CDR3 for beta chain variable domain of TCR clone 10495 (TRBV19, TRBJ1-2)
CASSVPGQDGYTF

SEQ ID NO: 20991 - protein, 13 aa, Homo sapiens
  CDR3 for alpha chain variable domain of TCR clone 10496 (TRAV29/DV5, TRAJ26)
CAASANYGQNFVF

SEQ ID NO: 20992 - protein, 16 aa, Homo sapiens
  CDR3 for beta chain variable domain of TCR clone 10496 (TRBV7-2, TRBJ1-2)
CASSLVRDTVKYGYTF

SEQ ID NO: 20993 - protein, 13 aa, Homo sapiens
  CDR3 for alpha chain variable domain of TCR clone 10497 (TRAV8-4, TRAJ30)
CAVNRNRDDKIIF

SEQ ID NO: 20994 - protein, 17 aa, Homo sapiens
  CDR3 for beta chain variable domain of TCR clone 10497 (TRBV20-1, TRBJ2-2)
CSASGSGQGGLTGELFF

SEQ ID NO: 20995 - protein, 12 aa, Homo sapiens
  CDR3 for alpha chain variable domain of TCR clone 10498 (TRAV13-1, TRAJ15)
CAANQAGTALIF

SEQ ID NO: 20996 - protein, 14 aa, Homo sapiens
  CDR3 for beta chain variable domain of TCR clone 10498 (TRBV7-2, TRBJ2-5)
CASSPLGQSETQYF

SEQ ID NO: 20997 - protein, 15 aa, Homo sapiens
  CDR3 for alpha chain variable domain of TCR clone 10499 (TRAV3, TRAJ5)
CAVRDLDAGRRALTF

SEQ ID NO: 20998 - protein, 13 aa, Homo sapiens
  CDR3 for beta chain variable domain of TCR clone 10499 (TRBV12-4, TRBJ2-7)
CASSPTETYEQYF

SEQ ID NO: 20999 - protein, 14 aa, Homo sapiens
  CDR3 for alpha chain variable domain of TCR clone 10500 (TRAV13-1, TRAJ6)
CAASNGGGSYIPTF

SEQ ID NO: 21000 - protein, 15 aa, Homo sapiens
  CDR3 for beta chain variable domain of TCR clone 10500 (TRBV10-3, TRBJ2-5)
CAIRPGDVDLGTQYF

SEQ ID NO: 21001 - protein, 11 aa, Homo sapiens
  CDR3 for alpha chain variable domain of TCR clone 10501 (TRAV20, TRAJ23)
CACNQGGKLIF

SEQ ID NO: 21002 - protein, 16 aa, Homo sapiens
  CDR3 for beta chain variable domain of TCR clone 10501 (TRBV7-8, TRBJ2-5)
CASSFGGQPTQETQYF

SEQ ID NO: 21003 - protein, 16 aa, Homo sapiens
  CDR3 for alpha chain variable domain of TCR clone 10502 (TRAV3, TRAJ22)
CAVRDMGSGSARQLTF

SEQ ID NO: 21004 - protein, 14 aa, Homo sapiens
  CDR3 for beta chain variable domain of TCR clone 10502 (TRBV7-3, TRBJ1-1)
CASSLKGGNTEAFF

SEQ ID NO: 21005 - protein, 12 aa, Homo sapiens
  CDR3 for alpha chain variable domain of TCR clone 10503 (TRAV29/DV5, TRAJ34)
CAARHNTDKLIF

SEQ ID NO: 21006 - protein, 13 aa, Homo sapiens
  CDR3 for beta chain variable domain of TCR clone 10503 (TRBV2, TRBJ1-5)
CATAGPGNQPQHF

SEQ ID NO: 21007 - protein, 18 aa, Homo sapiens
  CDR3 for alpha chain variable domain of TCR clone 10504 (TRAV21, TRAJ52)
CAVRPSPAVGTSYGKLTF

SEQ ID NO: 21008 - protein, 17 aa, Homo sapiens
  CDR3 for beta chain variable domain of TCR clone 10504 (TRBV13, TRBJ2-3)
CASSLSRVAGGRNTQYF

SEQ ID NO: 21009 - protein, 13 aa, Homo sapiens
  CDR3 for alpha chain variable domain of TCR clone 10505 (TRAV8-3, TRAJ28)
CAVGAVGSYQLTF

SEQ ID NO: 21010 - protein, 15 aa, Homo sapiens
  CDR3 for beta chain variable domain of TCR clone 10505 (TRBV7-9, TRBJ1-5)
CASSQGRQPNQPQHF

SEQ ID NO: 21011 - protein, 12 aa, Homo sapiens
  CDR3 for alpha chain variable domain of TCR clone 10506 (TRAV25, TRAJ16)
CAGQQDGQKLLF

SEQ ID NO: 21012 - protein, 14 aa, Homo sapiens
  CDR3 for beta chain variable domain of TCR clone 10506 (TRBV12-4, TRBJ2-1)
CASSLGQGASEQFF

SEQ ID NO: 21013 - protein, 12 aa, Homo sapiens
  CDR3 for alpha chain variable domain of TCR clone 10507 (TRAV13-1, TRAJ21)
CAAKEGFNKFYF

SEQ ID NO: 21014 - protein, 16 aa, Homo sapiens
  CDR3 for beta chain variable domain of TCR clone 10507 (TRBV2, TRBJ2-7)
CASSEPWTGPSYEQYF

SEQ ID NO: 21015 - protein, 18 aa, Homo sapiens
  CDR3 for alpha chain variable domain of TCR clone 10508 (TRAV38-1, TRAJ8)
CDVFLCFSMNTGFQKLVF

SEQ ID NO: 21016 - protein, 14 aa, Homo sapiens
  CDR3 for beta chain variable domain of TCR clone 10508 (TRBV4-1, TRBJ2-3)
CASSQEGSTDTQYF

SEQ ID NO: 21017 - protein, 17 aa, Homo sapiens
  CDR3 for alpha chain variable domain of TCR clone 10509 (TRAV3, TRAJ29)
CAVRDSDSEFRKHTSCL

SEQ ID NO: 21018 - protein, 15 aa, Homo sapiens
  CDR3 for beta chain variable domain of TCR clone 10509 (TRBV7-2, TRBJ2-5)
CASSGILAGAETQYF

SEQ ID NO: 21019 - protein, 18 aa, Homo sapiens
  CDR3 for alpha chain variable domain of TCR clone 10510 (TRAV13-1, TRAJ52)
CAASKRSAGGTSYGKLTF

SEQ ID NO: 21020 - protein, 15 aa, Homo sapiens
  CDR3 for beta chain variable domain of TCR clone 10510 (TRBV7-2, TRBJ1-2)
CASSPRAGWNYGYTF

SEQ ID NO: 21021 - protein, 13 aa, Homo sapiens
  CDR3 for alpha chain variable domain of TCR clone 10511 (TRAV3, TRAJ26)
CAVRGAEGQNFVF

SEQ ID NO: 21022 - protein, 15 aa, Homo sapiens
  CDR3 for beta chain variable domain of TCR clone 10511 (TRBV2, TRBJ1-5)
CASSPGPTGNQPQHF

SEQ ID NO: 21023 - protein, 14 aa, Homo sapiens
  CDR3 for alpha chain variable domain of TCR clone 10512 (TRAV1-2, TRAJ16)
CAVNRFSDGQKLLF

SEQ ID NO: 21024 - protein, 14 aa, Homo sapiens
  CDR3 for beta chain variable domain of TCR clone 10512 (TRBV19, TRBJ2-1)
CASEVTGARNEQFF

SEQ ID NO: 21025 - protein, 13 aa, Homo sapiens
  CDR3 for alpha chain variable domain of TCR clone 10513 (TRAV26-2, TRAJ54)
CILRDQGAQKLVF

SEQ ID NO: 21026 - protein, 15 aa, Homo sapiens
  CDR3 for beta chain variable domain of TCR clone 10513 (TRBV28, TRBJ1-5)
CASSFSGYSNQPQHF

SEQ ID NO: 21027 - protein, 15 aa, Homo sapiens
  CDR3 for alpha chain variable domain of TCR clone 10514 (TRAV35, TRAJ40)
CAGQLGTSGTYRYIF

SEQ ID NO: 21028 - protein, 14 aa, Homo sapiens
  CDR3 for beta chain variable domain of TCR clone 10514 (TRBV7-3, TRBJ2-1)
CASSLAGGTNEQFF

SEQ ID NO: 21029 - protein, 12 aa, Homo sapiens
  CDR3 for alpha chain variable domain of TCR clone 10515 (TRAV12-3, TRAJ17)
CAMTLTGNKLTF

SEQ ID NO: 21030 - protein, 15 aa, Homo sapiens
  CDR3 for beta chain variable domain of TCR clone 10515 (TRBV20-1, TRBJ2-7)
CSARDRVSGMDEQYC

SEQ ID NO: 21031 - protein, 12 aa, Homo sapiens
  CDR3 for alpha chain variable domain of TCR clone 10516 (TRAV2, TRAJ31)
CAVEDNNARLMF

SEQ ID NO: 21032 - protein, 11 aa, Homo sapiens
  CDR3 for beta chain variable domain of TCR clone 10516 (TRBV29-1, TRBJ2-5)
CSEDRTGTQYF

SEQ ID NO: 21033 - protein, 12 aa, Homo sapiens
  CDR3 for alpha chain variable domain of TCR clone 10517 (TRAV13-1, TRAJ21)
CAAKEGFNKFYF

SEQ ID NO: 21034 - protein, 14 aa, Homo sapiens
  CDR3 for beta chain variable domain of TCR clone 10517 (TRBV19, TRBJ2-1)
CASPTFVLSGEQFF

SEQ ID NO: 21035 - protein, 17 aa, Homo sapiens
  CDR3 for alpha chain variable domain of TCR clone 10518 (TRAV21, TRAJ40)
CAVRPQSGTSGTYKYIF

SEQ ID NO: 21036 - protein, 13 aa, Homo sapiens
  CDR3 for beta chain variable domain of TCR clone 10518 (TRBV12-4, TRBJ2-7)
CASSPSRDTPRSF

SEQ ID NO: 21037 - protein, 16 aa, Homo sapiens
  CDR3 for alpha chain variable domain of TCR clone 10519 (TRAV16, TRAJ4)
CSLSRMFSGGYNKLIF

SEQ ID NO: 21038 - protein, 16 aa, Homo sapiens
  CDR3 for beta chain variable domain of TCR clone 10519 (TRBV24-1, TRBJ2-3)
CATSDPGTGATDTQYF

SEQ ID NO: 21039 - protein, 14 aa, Homo sapiens
  CDR3 for alpha chain variable domain of TCR clone 10520 (TRAV20, TRAJ9)
CAVQASTGGFKTIF

SEQ ID NO: 21040 - protein, 14 aa, Homo sapiens
  CDR3 for beta chain variable domain of TCR clone 10520 (TRBV12-5, TRBJ1-6)
CASRVGQINSPLHF

SEQ ID NO: 21041 - protein, 14 aa, Homo sapiens
  CDR3 for alpha chain variable domain of TCR clone 10521 (TRAV2, TRAJ37)
CAVDSTSNTGKLIF

SEQ ID NO: 21042 - protein, 15 aa, Homo sapiens
  CDR3 for beta chain variable domain of TCR clone 10521 (TRBV20-1, TRBJ1-1)
CSASRGVTGNTEAFF

SEQ ID NO: 21043 - protein, 12 aa, Homo sapiens
  CDR3 for alpha chain variable domain of TCR clone 10522 (TRAV4, TRAJ26)
CLVGDYGQNFVF

SEQ ID NO: 21044 - protein, 14 aa, Homo sapiens
  CDR3 for beta chain variable domain of TCR clone 10522 (TRBV3-1, TRBJ2-5)
CASSQGPDQETQYF

SEQ ID NO: 21045 - protein, 13 aa, Homo sapiens
  CDR3 for alpha chain variable domain of TCR clone 10523 (TRAV25, TRAJ10)
CAGRTGGGNKLTF

SEQ ID NO: 21046 - protein, 17 aa, Homo sapiens
  CDR3 for beta chain variable domain of TCR clone 10523 (TRBV5-5, TRBJ1-2)
CASSLGSLDGQSEGYTF

SEQ ID NO: 21047 - protein, 12 aa, Homo sapiens
  CDR3 for alpha chain variable domain of TCR clone 10524 (TRAV1-1, TRAJ24)
CAATDSWGKLQF

SEQ ID NO: 21048 - protein, 15 aa, Homo sapiens
  CDR3 for beta chain variable domain of TCR clone 10524 (TRBV12-4, TRBJ1-6)
CASSLGGQGTSPLHF

SEQ ID NO: 21049 - protein, 15 aa, Homo sapiens
  CDR3 for alpha chain variable domain of TCR clone 10525 (TRAV17, TRAJ28)
CATVDSGAGSYQLTF

SEQ ID NO: 21050 - protein, 13 aa, Homo sapiens
  CDR3 for beta chain variable domain of TCR clone 10525 (TRBV4-2, TRBJ1-1)
CASSQAGNTEAFF

SEQ ID NO: 21051 - protein, 11 aa, Homo sapiens
  CDR3 for alpha chain variable domain of TCR clone 10526 (TRAV4, TRAJ20)
CLVGDKVTTTS

SEQ ID NO: 21052 - protein, 13 aa, Homo sapiens
  CDR3 for beta chain variable domain of TCR clone 10526 (TRBV10-3, TRBJ2-7)
CASKLAVNYEQYF

SEQ ID NO: 21053 - protein, 14 aa, Homo sapiens
  CDR3 for alpha chain variable domain of TCR clone 10527 (TRAV12-2, TRAJ17)
CSVLFKAAGNKLTF

SEQ ID NO: 21054 - protein, 17 aa, Homo sapiens
  CDR3 for beta chain variable domain of TCR clone 10527 (TRBV20-1, TRBJ2-2)
CSASGSGQGGLTGELFF

SEQ ID NO: 21055 - protein, 16 aa, Homo sapiens
  CDR3 for alpha chain variable domain of TCR clone 10528 (TRAV12-2, TRAJ40)
CAVIRGGTSGTYKYIF

SEQ ID NO: 21056 - protein, 13 aa, Homo sapiens
  CDR3 for beta chain variable domain of TCR clone 10528 (TRBV10-3, TRBJ2-7)
CASKLAVNYEQYF

SEQ ID NO: 21057 - protein, 15 aa, Homo sapiens
  CDR3 for alpha chain variable domain of TCR clone 10529 (TRAV25, TRAJ52)
CAGRPGGTSYGKLTF

SEQ ID NO: 21058 - protein, 17 aa, Homo sapiens
  CDR3 for beta chain variable domain of TCR clone 10529 (TRBV7-8, TRBJ2-6)
CASSAGTGGAGANVLAF

SEQ ID NO: 21059 - protein, 14 aa, Homo sapiens
  CDR3 for alpha chain variable domain of TCR clone 10530 (TRAV29/DV5, TRAJ34)
CAASASGNTDKLIF

SEQ ID NO: 21060 - protein, 14 aa, Homo sapiens
  CDR3 for beta chain variable domain of TCR clone 10530 (TRBV9, TRBJ2-3)
CASSVGLSTDTQYF

SEQ ID NO: 21061 - protein, 18 aa, Homo sapiens
  CDR3 for alpha chain variable domain of TCR clone 10531 (TRAV13-1, TRAJ52)
CAAKNPNAGGTSYGKLTF

SEQ ID NO: 21062 - protein, 15 aa, Homo sapiens
  CDR3 for beta chain variable domain of TCR clone 10531 (TRBV18, TRBJ2-6)
CASSPSYAGANVLTF

SEQ ID NO: 21063 - protein, 10 aa, Homo sapiens
  CDR3 for alpha chain variable domain of TCR clone 10532 (TRAV30, TRAJ48)
CGIGNEKLTL

SEQ ID NO: 21064 - protein, 14 aa, Homo sapiens
  CDR3 for beta chain variable domain of TCR clone 10532 (TRBV7-6, TRBJ2-3)
CASSVAGGTDTQYF

SEQ ID NO: 21065 - protein, 14 aa, Homo sapiens
  CDR3 for alpha chain variable domain of TCR clone 10533 (TRAV3, TRAJ6)
CAVRDWGGSYIPTF

SEQ ID NO: 21066 - protein, 20 aa, Homo sapiens
  CDR3 for beta chain variable domain of TCR clone 10533 (TRBV7-8, TRBJ2-2)
CASSHLFPGPTIHITGELFF

SEQ ID NO: 21067 - protein, 12 aa, Homo sapiens
  CDR3 for alpha chain variable domain of TCR clone 10534 (TRAV12-3, TRAJ17)
CAMTLTGNKLTF

SEQ ID NO: 21068 - protein, 15 aa, Homo sapiens
  CDR3 for beta chain variable domain of TCR clone 10534 (TRBV20-1, TRBJ2-7)
CSARDRVSGMDELYF

SEQ ID NO: 21069 - protein, 12 aa, Homo sapiens
  CDR3 for alpha chain variable domain of TCR clone 10535 (TRAV21, TRAJ11)
CAATSGYSTLTF

SEQ ID NO: 21070 - protein, 14 aa, Homo sapiens
  CDR3 for beta chain variable domain of TCR clone 10535 (TRBV7-3, TRBJ2-2)
CASSSGGYTGELFF

SEQ ID NO: 21071 - protein, 14 aa, Homo sapiens
  CDR3 for alpha chain variable domain of TCR clone 10536 (TRAV16, TRAJ54)
CALSGLQGAQKLVF

SEQ ID NO: 21072 - protein, 15 aa, Homo sapiens
  CDR3 for beta chain variable domain of TCR clone 10536 (TRBV3-1, TRBJ2-7)
CASSQVAGAQYEQYF

SEQ ID NO: 21073 - protein, 16 aa, Homo sapiens
  CDR3 for alpha chain variable domain of TCR clone 10537 (TRAV3, TRAJ10)
CAVRDMRAGGGNKLTF

SEQ ID NO: 21074 - protein, 13 aa, Homo sapiens
  CDR3 for beta chain variable domain of TCR clone 10537 (TRBV3-1, TRBJ1-1)
CASSPGVITEAFF

SEQ ID NO: 21075 - protein, 15 aa, Homo sapiens
  CDR3 for alpha chain variable domain of TCR clone 10538 (TRAV8-3, TRAJ41)
CAVGSNSNSGYALNF

SEQ ID NO: 21076 - protein, 17 aa, Homo sapiens
  CDR3 for beta chain variable domain of TCR clone 10538 (TRBV25-1, TRBJ2-1)
CASSAYGRGRGVYEQFF

SEQ ID NO: 21077 - protein, 12 aa, Homo sapiens
  CDR3 for alpha chain variable domain of TCR clone 10539 (TRAV13-2, TRAJ23)
CAERHRGGKLIF

SEQ ID NO: 21078 - protein, 16 aa, Homo sapiens
  CDR3 for beta chain variable domain of TCR clone 10539 (TRBV20-1, TRBJ1-4)
CSAPGQGLLANEKLFF

SEQ ID NO: 21079 - protein, 14 aa, Homo sapiens
  CDR3 for alpha chain variable domain of TCR clone 10540 (TRAV1-2, TRAJ6)
CAVSLSGGGYIPTF

SEQ ID NO: 21080 - protein, 15 aa, Homo sapiens
  CDR3 for beta chain variable domain of TCR clone 10540 (TRBV28, TRBJ2-7)
CASSPGGRGFYEQYF

SEQ ID NO: 21081 - protein, 13 aa, Homo sapiens
  CDR3 for alpha chain variable domain of TCR clone 10541 (TRAV1-2, TRAJ9)
CAALSTGGFKTIF

SEQ ID NO: 21082 - protein, 13 aa, Homo sapiens
  CDR3 for beta chain variable domain of TCR clone 10541 (TRBV19, TRBJ1-2)
CASSVPGQDGYTF

SEQ ID NO: 21083 - protein, 14 aa, Homo sapiens
  CDR3 for alpha chain variable domain of TCR clone 10542 (TRAV8-4, TRAJ13)
CAVTLSGGYRKVTF

SEQ ID NO: 21084 - protein, 14 aa, Homo sapiens
  CDR3 for beta chain variable domain of TCR clone 10542 (TRBV7-2, TRBJ1-2)
CASSQTGSTYGYTF

SEQ ID NO: 21085 - protein, 15 aa, Homo sapiens
  CDR3 for alpha chain variable domain of TCR clone 10543 (TRAV17, TRAJ17)
CATDASIIRRQQANF

SEQ ID NO: 21086 - protein, 12 aa, Homo sapiens
  CDR3 for beta chain variable domain of TCR clone 10543 (TRBV5-4, TRBJ2-5)
CASSSIRETQYF

SEQ ID NO: 21087 - protein, 13 aa, Homo sapiens
  CDR3 for alpha chain variable domain of TCR clone 10544 (TRAV21, TRAJ20)
CAVGLRVDYKLSF

SEQ ID NO: 21088 - protein, 13 aa, Homo sapiens
  CDR3 for beta chain variable domain of TCR clone 10544 (TRBV6-3, TRBJ2-5)
CASRGPAEETQYF

SEQ ID NO: 21089 - protein, 14 aa, Homo sapiens
  CDR3 for alpha chain variable domain of TCR clone 10545 (TRAV1-2, TRAJ8)
CAVREDTGFQKLVF

SEQ ID NO: 21090 - protein, 19 aa, Homo sapiens
  CDR3 for beta chain variable domain of TCR clone 10545 (TRBV14, TRBJ2-1)
CASSQDQLWEAPEYNEQFF

SEQ ID NO: 21091 - protein, 16 aa, Homo sapiens
  CDR3 for alpha chain variable domain of TCR clone 10546 (TRAV13-1, TRAJ10)
CAASSHFTGGGNKLTF

SEQ ID NO: 21092 - protein, 13 aa, Homo sapiens
  CDR3 for beta chain variable domain of TCR clone 10546 (TRBV20-1, TRBJ1-6)
CSARAPPEGPLHF

SEQ ID NO: 21093 - protein, 17 aa, Homo sapiens
  CDR3 for alpha chain variable domain of TCR clone 10547 (TRAV23/DV6, TRAJ57)
CAASSTLSQGGPEKLVF

SEQ ID NO: 21094 - protein, 14 aa, Homo sapiens
  CDR3 for beta chain variable domain of TCR clone 10547 (TRBV25-1, TRBJ1-1)
CASTHLGGNTEAFF

SEQ ID NO: 21095 - protein, 11 aa, Homo sapiens
  CDR3 for alpha chain variable domain of TCR clone 10548 (TRAV12-3, TRAJ43)
CAMSVSNDMRF

SEQ ID NO: 21096 - protein, 13 aa, Homo sapiens
  CDR3 for beta chain variable domain of TCR clone 10548 (TRBV20-1, TRBJ1-1)
CSAPLGGGTEALF

SEQ ID NO: 21097 - protein, 15 aa, Homo sapiens
  CDR3 for alpha chain variable domain of TCR clone 10549 (TRAV26-2, TRAJ28)
CILVESGAGSYQLTF

SEQ ID NO: 21098 - protein, 15 aa, Homo sapiens
  CDR3 for beta chain variable domain of TCR clone 10549 (TRBV2, TRBJ2-7)
CASSEGLARSYEQYF

SEQ ID NO: 21099 - protein, 13 aa, Homo sapiens
  CDR3 for alpha chain variable domain of TCR clone 10550 (TRAV27, TRAJ41)
CAGEGNSGYALNF

SEQ ID NO: 21100 - protein, 14 aa, Homo sapiens
  CDR3 for beta chain variable domain of TCR clone 10550 (TRBV7-2, TRBJ1-1)
CASSFLTGTTEASF

SEQ ID NO: 21101 - protein, 13 aa, Homo sapiens
  CDR3 for alpha chain variable domain of TCR clone 10551 (TRAV3, TRAJ21)
CAVREPDFNKFYF

SEQ ID NO: 21102 - protein, 13 aa, Homo sapiens
  CDR3 for beta chain variable domain of TCR clone 10551 (TRBV9, TRBJ2-1)
CASSPSGGNEQFF

SEQ ID NO: 21103 - protein, 12 aa, Homo sapiens
  CDR3 for alpha chain variable domain of TCR clone 10552 (TRAV16, TRAJ10)
CSRTGGGNKLTF

SEQ ID NO: 21104 - protein, 12 aa, Homo sapiens
  CDR3 for beta chain variable domain of TCR clone 10552 (TRBV11-2, TRBJ2-2)
CASSLGGGELFF

SEQ ID NO: 21105 - protein, 10 aa, Homo sapiens
  CDR3 for alpha chain variable domain of TCR clone 10553 (TRAV24, TRAJ23)
CAFLGGKLIF

SEQ ID NO: 21106 - protein, 15 aa, Homo sapiens
  CDR3 for beta chain variable domain of TCR clone 10553 (TRBV7-2, TRBJ2-1)
CASSLVAGRYNEQFF

SEQ ID NO: 21107 - protein, 16 aa, Homo sapiens
  CDR3 for alpha chain variable domain of TCR clone 10554 (TRAV12-3, TRAJ53)
CAMSPGSGGSNYKLTF

SEQ ID NO: 21108 - protein, 14 aa, Homo sapiens
  CDR3 for beta chain variable domain of TCR clone 10554 (TRBV19, TRBJ2-1)
CASPTFVLSGEQFF

SEQ ID NO: 21109 - protein, 14 aa, Homo sapiens
  CDR3 for alpha chain variable domain of TCR clone 10555 (TRAV2, TRAJ37)
CAVDFTSNTGKLIF

SEQ ID NO: 21110 - protein, 20 aa, Homo sapiens
  CDR3 for beta chain variable domain of TCR clone 10555 (TRBV7-8, TRBJ2-2)
CASSHLFPGPTIHITGELFF

SEQ ID NO: 21111 - protein, 14 aa, Homo sapiens
  CDR3 for alpha chain variable domain of TCR clone 10556 (TRAV1-2, TRAJ8)
CAVREDTGLQKLVF

SEQ ID NO: 21112 - protein, 13 aa, Homo sapiens
  CDR3 for beta chain variable domain of TCR clone 10556 (TRBV19, TRBJ1-2)
CASSVPGQDGYTF

SEQ ID NO: 21113 - protein, 12 aa, Homo sapiens
  CDR3 for alpha chain variable domain of TCR clone 10557 (TRAV2, TRAJ32)
CRYGGATNKLIF

SEQ ID NO: 21114 - protein, 23 aa, Homo sapiens
  CDR3 for beta chain variable domain of TCR clone 10557 (TRBV11-3, TRBJ2-2)
CASSLELPLSTSGGIWNTGELFF

SEQ ID NO: 21115 - protein, 15 aa, Homo sapiens
  CDR3 for alpha chain variable domain of TCR clone 10558 (TRAV9-2, TRAJ6)
CALRIGPGGSYIPTF

SEQ ID NO: 21116 - protein, 16 aa, Homo sapiens
  CDR3 for beta chain variable domain of TCR clone 10558 (TRBV5-7, TRBJ2-7)
CASSSPGGRTPYEQYF

SEQ ID NO: 21117 - protein, 11 aa, Homo sapiens
  CDR3 for alpha chain variable domain of TCR clone 10559 (TRAV21, TRAJ11)
CAVNGYSTLTF

SEQ ID NO: 21118 - protein, 13 aa, Homo sapiens
  CDR3 for beta chain variable domain of TCR clone 10559 (TRBV19, TRBJ2-7)
CASSIDRTYEQYF

SEQ ID NO: 21119 - protein, 17 aa, Homo sapiens
  CDR3 for alpha chain variable domain of TCR clone 10560 (TRAV3, TRAJ42)
CAVRDRDYGGSQGNLIF

SEQ ID NO: 21120 - protein, 11 aa, Homo sapiens
  CDR3 for beta chain variable domain of TCR clone 10560 (TRBV12-4, TRBJ2-3)
CASTATDTQYF

SEQ ID NO: 21121 - protein, 11 aa, Homo sapiens
  CDR3 for alpha chain variable domain of TCR clone 10561 (TRAV3, TRAJ32)
CAVREGIMVVL

SEQ ID NO: 21122 - protein, 13 aa, Homo sapiens
  CDR3 for beta chain variable domain of TCR clone 10561 (TRBV2, TRBJ1-1)
CASGEGGNTEAFF

SEQ ID NO: 21123 - protein, 13 aa, Homo sapiens
  CDR3 for alpha chain variable domain of TCR clone 10562 (TRAV26-1, TRAJ29)
CIVRRSGNTPLVF

SEQ ID NO: 21124 - protein, 17 aa, Homo sapiens
  CDR3 for beta chain variable domain of TCR clone 10562 (TRBV19, TRBJ1-1)
CASSIAGRGLMNTEAFF

SEQ ID NO: 21125 - protein, 14 aa, Homo sapiens
  CDR3 for alpha chain variable domain of TCR clone 10563 (TRAV13-1, TRAJ26)
CAASRGNYGQNFVF

SEQ ID NO: 21126 - protein, 16 aa, Homo sapiens
  CDR3 for beta chain variable domain of TCR clone 10563 (TRBV29-1, TRBJ2-6)
CSVEDITYSGANVLTF

SEQ ID NO: 21127 - protein, 12 aa, Homo sapiens
  CDR3 for alpha chain variable domain of TCR clone 10564 (TRAV12-3, TRAJ17)
CAMTLTGNKLTF

SEQ ID NO: 21128 - protein, 15 aa, Homo sapiens
  CDR3 for beta chain variable domain of TCR clone 10564 (TRBV20-1, TRBJ2-7)
CSARDRVSGLDEQYF

SEQ ID NO: 21129 - protein, 14 aa, Homo sapiens
  CDR3 for alpha chain variable domain of TCR clone 10565 (TRAV1-2, TRAJ8)
CAVREDTGFQKLVF

SEQ ID NO: 21130 - protein, 15 aa, Homo sapiens
  CDR3 for beta chain variable domain of TCR clone 10565 (TRBV9, TRBJ2-1)
CASSLAGSSYNEQFF

SEQ ID NO: 21131 - protein, 14 aa, Homo sapiens
  CDR3 for alpha chain variable domain of TCR clone 10566 (TRAV8-3, TRAJ39)
CAVGANNAGNMLTF

SEQ ID NO: 21132 - protein, 12 aa, Homo sapiens
  CDR3 for beta chain variable domain of TCR clone 10566 (TRBV28, TRBJ1-2)
CASLTLAEGYTF

SEQ ID NO: 21133 - protein, 14 aa, Homo sapiens
  CDR3 for alpha chain variable domain of TCR clone 10567 (TRAV12-3, TRAJ9)
CAMSPNTGGFKTTF

SEQ ID NO: 21134 - protein, 12 aa, Homo sapiens
  CDR3 for beta chain variable domain of TCR clone 10567 (TRBV19, TRBJ1-5)
CASSIAQQPQHF

SEQ ID NO: 21135 - protein, 12 aa, Homo sapiens
  CDR3 for alpha chain variable domain of TCR clone 10568 (TRAV38-1, TRAJ47)
CAFETYGNKLVF

SEQ ID NO: 21136 - protein, 14 aa, Homo sapiens
  CDR3 for beta chain variable domain of TCR clone 10568 (TRBV12-5, TRBJ2-5)
CASGSRTHQETQYF

SEQ ID NO: 21137 - protein, 11 aa, Homo sapiens
  CDR3 for alpha chain variable domain of TCR clone 10569 (TRAV2, TRAJ21)
CAVFNFNKFYF

SEQ ID NO: 21138 - protein, 14 aa, Homo sapiens
  CDR3 for beta chain variable domain of TCR clone 10569 (TRBV7-2, TRBJ2-1)
CASSRGGARNEQFF

SEQ ID NO: 21139 - protein, 12 aa, Homo sapiens
  CDR3 for alpha chain variable domain of TCR clone 10570 (TRAV21, TRAJ37)
CAVRGNTGKLIF

SEQ ID NO: 21140 - protein, 15 aa, Homo sapiens
  CDR3 for beta chain variable domain of TCR clone 10570 (TRBV10-2, TRBJ2-6)
CASSEQGTGANVLTF

SEQ ID NO: 21141 - protein, 14 aa, Homo sapiens
  CDR3 for alpha chain variable domain of TCR clone 10571 (TRAV35, TRAJ22)
CAGLRPGSARQLTF

SEQ ID NO: 21142 - protein, 15 aa, Homo sapiens
  CDR3 for beta chain variable domain of TCR clone 10571 (TRBV12-4, TRBJ2-5)
CAGSPPTGLQETQYF

SEQ ID NO: 21143 - protein, 14 aa, Homo sapiens
  CDR3 for alpha chain variable domain of TCR clone 10572 (TRAV35, TRAJ33)
CAGSSRDSNYQLIW

SEQ ID NO: 21144 - protein, 15 aa, Homo sapiens
  CDR3 for beta chain variable domain of TCR clone 10572 (TRBV20-1, TRBJ2-7)
CSAESGTSGAYEQYF

SEQ ID NO: 21145 - protein, 14 aa, Homo sapiens
  CDR3 for alpha chain variable domain of TCR clone 10573 (TRAV2, TRAJ37)
CAVDFTSNTGKLIF

SEQ ID NO: 21146 - protein, 14 aa, Homo sapiens
  CDR3 for beta chain variable domain of TCR clone 10573 (TRBV7-3, TRBJ2-1)
CASSLAGGTNEQFF

SEQ ID NO: 21147 - protein, 15 aa, Homo sapiens
  CDR3 for alpha chain variable domain of TCR clone 10574 (TRAV26-1, TRAJ29)
CIVRVEGSGNTPLVF

SEQ ID NO: 21148 - protein, 14 aa, Homo sapiens
  CDR3 for beta chain variable domain of TCR clone 10574 (TRBV18, TRBJ2-5)
CASSPGASQETQYF

SEQ ID NO: 21149 - protein, 14 aa, Homo sapiens
  CDR3 for alpha chain variable domain of TCR clone 10575 (TRAV6, TRAJ17)
CALDLKAAGNKLTF

SEQ ID NO: 21150 - protein, 17 aa, Homo sapiens
  CDR3 for beta chain variable domain of TCR clone 10575 (TRBV7-8, TRBJ2-7)
CASSFTSGRPPSYEQYF

SEQ ID NO: 21151 - protein, 14 aa, Homo sapiens
  CDR3 for alpha chain variable domain of TCR clone 10576 (TRAV1-2, TRAJ16)
CAVNRFSDGQKLLF

SEQ ID NO: 21152 - protein, 19 aa, Homo sapiens
  CDR3 for beta chain variable domain of TCR clone 10576 (TRBV19, TRBJ2-5)
CASSIGQVTDFFLGETQYF

SEQ ID NO: 21153 - protein, 10 aa, Homo sapiens
  CDR3 for alpha chain variable domain of TCR clone 10577 (TRAV26-1, TRAJ40)
CIAGTYKYIF

SEQ ID NO: 21154 - protein, 15 aa, Homo sapiens
  CDR3 for beta chain variable domain of TCR clone 10577 (TRBV6-3, TRBJ2-7)
CASSSPGTVFYEQYF

SEQ ID NO: 21155 - protein, 15 aa, Homo sapiens
  CDR3 for alpha chain variable domain of TCR clone 10578 (TRAV8-4, TRAJ15)
CAVSDPVQAGTALIF

SEQ ID NO: 21156 - protein, 14 aa, Homo sapiens
  CDR3 for beta chain variable domain of TCR clone 10578 (TRBV7-2, TRBJ2-7)
CASSPKTSFYEQYF

SEQ ID NO: 21157 - protein, 13 aa, Homo sapiens
  CDR3 for alpha chain variable domain of TCR clone 10579 (TRAV2, TRAJ40)
CAVVTSGTYKYIF

SEQ ID NO: 21158 - protein, 14 aa, Homo sapiens
  CDR3 for beta chain variable domain of TCR clone 10579 (TRBV19, TRBJ2-1)
CASPIFVLSGEQFF

SEQ ID NO: 21159 - protein, 14 aa, Homo sapiens
  CDR3 for alpha chain variable domain of TCR clone 10580 (TRAV2, TRAJ11)
CAVVPNSGYSTLTF

SEQ ID NO: 21160 - protein, 15 aa, Homo sapiens
  CDR3 for beta chain variable domain of TCR clone 10580 (TRBV20-1, TRBJ2-7)
CSARDRVSGMDEQYF

SEQ ID NO: 21161 - protein, 13 aa, Homo sapiens
  CDR3 for alpha chain variable domain of TCR clone 10581 (TRAV38-1, TRAJ49)
CAFMKYTGNQFYF

SEQ ID NO: 21162 - protein, 14 aa, Homo sapiens
  CDR3 for beta chain variable domain of TCR clone 10581 (TRBV5-1, TRBJ1-1)
CASSFLQGGGEAFF

SEQ ID NO: 21163 - protein, 13 aa, Homo sapiens
  CDR3 for alpha chain variable domain of TCR clone 10582 (TRAV14/DV4, TRAJ16)
CAMRGTDGQKLLF

SEQ ID NO: 21164 - protein, 18 aa, Homo sapiens
  CDR3 for beta chain variable domain of TCR clone 10582 (TRBV4-1, TRBJ2-3)
CASSHQLAGGRSTDTQYF

SEQ ID NO: 21165 - protein, 15 aa, Homo sapiens
  CDR3 for alpha chain variable domain of TCR clone 10583 (TRAV21, TRAJ53)
CATLNSGGSNYKLTF

SEQ ID NO: 21166 - protein, 13 aa, Homo sapiens
  CDR3 for beta chain variable domain of TCR clone 10583 (TRBV9, TRBJ2-1)
CASSPSGGNEQFF

SEQ ID NO: 21167 - protein, 15 aa, Homo sapiens
  CDR3 for alpha chain variable domain of TCR clone 10584 (TRAV12-2, TRAJ53)
CAVNGGGGSNYKLTF

SEQ ID NO: 21168 - protein, 12 aa, Homo sapiens
  CDR3 for beta chain variable domain of TCR clone 10584 (TRBV6-5, TRBJ2-2)
CASRTGTGELFF

SEQ ID NO: 21169 - protein, 12 aa, Homo sapiens
  CDR3 for alpha chain variable domain of TCR clone 10585 (TRAV17, TRAJ57)
CATGGGSEKLVF

SEQ ID NO: 21170 - protein, 13 aa, Homo sapiens
  CDR3 for beta chain variable domain of TCR clone 10585 (TRBV7-9, TRBJ2-7)
CASSFAGAYEQYF

SEQ ID NO: 21171 - protein, 19 aa, Homo sapiens
  CDR3 for alpha chain variable domain of TCR clone 10586 (TRAV12-1, TRAJ45)
CVVTHDVGYSGGGADGLTF

SEQ ID NO: 21172 - protein, 14 aa, Homo sapiens
  CDR3 for beta chain variable domain of TCR clone 10586 (TRBV6-1, TRBJ1-2)
CASSAGRGPYGYTF

SEQ ID NO: 21173 - protein, 15 aa, Homo sapiens
  CDR3 for alpha chain variable domain of TCR clone 10587 (TRAV3, TRAJ5)
CAVRDLDTGRRALTS

SEQ ID NO: 21174 - protein, 13 aa, Homo sapiens
  CDR3 for beta chain variable domain of TCR clone 10587 (TRBV12-4, TRBJ2-7)
CASSPTETYEQYF

SEQ ID NO: 21175 - protein, 17 aa, Homo sapiens
  CDR3 for alpha chain variable domain of TCR clone 10588 (TRAV3, TRAJ6)
CAVRDGPRAGGSYIPIF

SEQ ID NO: 21176 - protein, 14 aa, Homo sapiens
  CDR3 for beta chain variable domain of TCR clone 10588 (TRBV7-2, TRBJ2-7)
CASSPKTSFYEQYF

SEQ ID NO: 21177 - protein, 13 aa, Homo sapiens
  CDR3 for alpha chain variable domain of TCR clone 10589 (TRAV12-3, TRAJ33)
CAMSVNSNYQLIW

SEQ ID NO: 21178 - protein, 12 aa, Homo sapiens
  CDR3 for beta chain variable domain of TCR clone 10589 (TRBV5-1, TRBJ2-7)
CASRGGGLEQYF

SEQ ID NO: 21179 - protein, 16 aa, Homo sapiens
  CDR3 for alpha chain variable domain of TCR clone 10590 (TRAV3, TRAJ10)
CAVRDMRAGGGNKLTF

SEQ ID NO: 21180 - protein, 12 aa, Homo sapiens
  CDR3 for beta chain variable domain of TCR clone 10590 (TRBV11-2, TRBJ2-2)
CASSLPTGELFF

SEQ ID NO: 21181 - protein, 14 aa, Homo sapiens
  CDR3 for alpha chain variable domain of TCR clone 10591 (TRAV38-2/DV8, TRAJ54)
CAYRRIQGAQKLVF

SEQ ID NO: 21182 - protein, 15 aa, Homo sapiens
  CDR3 for beta chain variable domain of TCR clone 10591 (TRBV6-5, TRBJ2-5)
CASREASGGIETQYF

SEQ ID NO: 21183 - protein, 15 aa, Homo sapiens
  CDR3 for alpha chain variable domain of TCR clone 10592 (TRAV25, TRAJ53)
CPTSNRGGSNYKLTF

SEQ ID NO: 21184 - protein, 14 aa, Homo sapiens
  CDR3 for beta chain variable domain of TCR clone 10592 (TRBV11-2, TRBJ2-3)
CASSRLARTDTQYF

SEQ ID NO: 21185 - protein, 12 aa, Homo sapiens
  CDR3 for alpha chain variable domain of TCR clone 10593 (TRAV12-3, TRAJ20)
CAMVRGGYKLSF

SEQ ID NO: 21186 - protein, 13 aa, Homo sapiens
  CDR3 for beta chain variable domain of TCR clone 10593 (TRBV23-1, TRBJ1-4)
CASRGKFNEKLFF

SEQ ID NO: 21187 - protein, 11 aa, Homo sapiens
  CDR3 for alpha chain variable domain of TCR clone 10594 (TRAV3, TRAJ21)
CAVGNFNKFYF

SEQ ID NO: 21188 - protein, 16 aa, Homo sapiens
  CDR3 for beta chain variable domain of TCR clone 10594 (TRBV19, TRBJ2-1)
CASSKAGPSYYNEQFF

SEQ ID NO: 21189 - protein, 11 aa, Homo sapiens
  CDR3 for alpha chain variable domain of TCR clone 10595 (TRAV1-1, TRAJ23)
CAVRQGGKLIF

SEQ ID NO: 21190 - protein, 13 aa, Homo sapiens
  CDR3 for beta chain variable domain of TCR clone 10595 (TRBV12-4, TRBJ2-2)
CASSPLPPGELFF

SEQ ID NO: 21191 - protein, 15 aa, Homo sapiens
  CDR3 for alpha chain variable domain of TCR clone 10596 (TRAV27, TRAJ38)
CAARRNAGNNRQLIW

SEQ ID NO: 21192 - protein, 13 aa, Homo sapiens
  CDR3 for beta chain variable domain of TCR clone 10596 (TRBV12-5, TRBJ2-3)
CASGDRQSDTQYF

SEQ ID NO: 21193 - protein, 15 aa, Homo sapiens
  CDR3 for alpha chain variable domain of TCR clone 10597 (TRAV12-3, TRAJ54)
CAMSHPVQGAQKLVF

SEQ ID NO: 21194 - protein, 12 aa, Homo sapiens
  CDR3 for beta chain variable domain of TCR clone 10597 (TRBV2, TRBJ2-7)
CARGQGADEQYF

SEQ ID NO: 21195 - protein, 14 aa, Homo sapiens
  CDR3 for alpha chain variable domain of TCR clone 10598 (TRAV23/DV6, TRAJ36)
CAASFPTGANNLFF

SEQ ID NO: 21196 - protein, 13 aa, Homo sapiens
  CDR3 for beta chain variable domain of TCR clone 10598 (TRBV5-1, TRBJ1-1)
CASSLGTDAEAFF

SEQ ID NO: 21197 - protein, 15 aa, Homo sapiens
  CDR3 for alpha chain variable domain of TCR clone 10599 (TRAV12-2, TRAJ53)
CAVNGGGGSNYKLTF

SEQ ID NO: 21198 - protein, 14 aa, Homo sapiens
  CDR3 for beta chain variable domain of TCR clone 10599 (TRBV4-1, TRBJ2-2)
CASSQAVNTGELFF

SEQ ID NO: 21199 - protein, 14 aa, Homo sapiens
  CDR3 for alpha chain variable domain of TCR clone 10600 (TRAV26-1, TRAJ39)
CIVRGPRAGNMLTF

SEQ ID NO: 21200 - protein, 15 aa, Homo sapiens
  CDR3 for beta chain variable domain of TCR clone 10600 (TRBV7-9, TRBJ1-5)
CASSQGHQPNQPQHF

SEQ ID NO: 21201 - protein, 14 aa, Homo sapiens
  CDR3 for alpha chain variable domain of TCR clone 10601 (TRAV12-2, TRAJ13)
CAVKKTGGYQKVTF

SEQ ID NO: 21202 - protein, 17 aa, Homo sapiens
  CDR3 for beta chain variable domain of TCR clone 10601 (TRBV7-8, TRBJ2-6)
CASSAGTGGAGANVLTF

SEQ ID NO: 21203 - protein, 15 aa, Homo sapiens
  CDR3 for alpha chain variable domain of TCR clone 10602 (TRAV3, TRAJ5)
CAVRDPDTGRRALTF

SEQ ID NO: 21204 - protein, 13 aa, Homo sapiens
  CDR3 for beta chain variable domain of TCR clone 10602 (TRBV12-4, TRBJ2-7)
CASSPTETYEQYF

SEQ ID NO: 21205 - protein, 14 aa, Homo sapiens
  CDR3 for alpha chain variable domain of TCR clone 10603 (TRAV12-1, TRAJ17)
CVVDYKAAGNKLTF

SEQ ID NO: 21206 - protein, 17 aa, Homo sapiens
  CDR3 for beta chain variable domain of TCR clone 10603 (TRBV20-1, TRBJ2-1)
CSASSSGLAGSYNEQFF

SEQ ID NO: 21207 - protein, 15 aa, Homo sapiens
  CDR3 for alpha chain variable domain of TCR clone 10604 (TRAV26-1, TRAJ22)
CIVRVSFWLCKATDL

SEQ ID NO: 21208 - protein, 13 aa, Homo sapiens
  CDR3 for beta chain variable domain of TCR clone 10604 (TRBV7-9, TRBJ1-2)
CASSLKQNYGYTF

SEQ ID NO: 21209 - protein, 13 aa, Homo sapiens
  CDR3 for alpha chain variable domain of TCR clone 10605 (TRAV3, TRAJ21)
CAVREPDFNKFYF

SEQ ID NO: 21210 - protein, 15 aa, Homo sapiens
  CDR3 for beta chain variable domain of TCR clone 10605 (TRBV6-1, TRBJ2-3)
CASSERGGITDTQYF

SEQ ID NO: 21211 - protein, 15 aa, Homo sapiens
  CDR3 for alpha chain variable domain of TCR clone 10606 (TRAV8-3, TRAJ27)
CAVGPSKTNAGKSTS

SEQ ID NO: 21212 - protein, 15 aa, Homo sapiens
  CDR3 for beta chain variable domain of TCR clone 10606 (TRBV7-2, TRBJ2-1)
CASSSGLAGGNEQFF

SEQ ID NO: 21213 - protein, 13 aa, Homo sapiens
  CDR3 for alpha chain variable domain of TCR clone 10607 (TRAV27, TRAJ8)
CAGGPTGFQKLVF

SEQ ID NO: 21214 - protein, 15 aa, Homo sapiens
  CDR3 for beta chain variable domain of TCR clone 10607 (TRBV20-1, TRBJ2-7)
CSARDRVSGMDEQYF

SEQ ID NO: 21215 - protein, 18 aa, Homo sapiens
  CDR3 for alpha chain variable domain of TCR clone 10608 (TRAV13-1, TRAJ52)
CAASKRSAGGTSYGKLTL

SEQ ID NO: 21216 - protein, 13 aa, Homo sapiens
  CDR3 for beta chain variable domain of TCR clone 10608 (TRBV12-4, TRBJ1-2)
CASSLRQGKGYTF

SEQ ID NO: 21217 - protein, 13 aa, Homo sapiens
  CDR3 for alpha chain variable domain of TCR clone 10609 (TRAV12-3, TRAJ23)
CRPLYNQGGKLIF

SEQ ID NO: 21218 - protein, 11 aa, Homo sapiens
  CDR3 for beta chain variable domain of TCR clone 10609 (TRBV7-3, TRBJ1-2)
CASSLGDGYTF

SEQ ID NO: 21219 - protein, 14 aa, Homo sapiens
  CDR3 for alpha chain variable domain of TCR clone 10610 (TRAV2, TRAJ9)
CAVEDRSGGFKTIF

SEQ ID NO: 21220 - protein, 16 aa, Homo sapiens
  CDR3 for beta chain variable domain of TCR clone 10610 (TRBV20-1, TRBJ1-4)
CSAPGQGLLTNEKLFF

SEQ ID NO: 21221 - protein, 13 aa, Homo sapiens
  CDR3 for alpha chain variable domain of TCR clone 10611 (TRAV12-2, TRAJ42)
CAVKRGSQGNLIF

SEQ ID NO: 21222 - protein, 13 aa, Homo sapiens
  CDR3 for beta chain variable domain of TCR clone 10611 (TRBV18, TRBJ2-5)
CASSLQGQETQYF

SEQ ID NO: 21223 - protein, 14 aa, Homo sapiens
  CDR3 for alpha chain variable domain of TCR clone 10612 (TRAV38-1, TRAJ40)
CALRPTSGTYKYIF

SEQ ID NO: 21224 - protein, 11 aa, Homo sapiens
  CDR3 for beta chain variable domain of TCR clone 10612 (TRBV25-1, TRBJ1-1)
PTWGGNTEAFF

SEQ ID NO: 21225 - protein, 12 aa, Homo sapiens
  CDR3 for alpha chain variable domain of TCR clone 10613 (TRAV9-2, TRAJ49)
CALSNTGNQFYF

SEQ ID NO: 21226 - protein, 15 aa, Homo sapiens
  CDR3 for beta chain variable domain of TCR clone 10613 (TRBV7-2, TRBJ2-1)
CASSLVGSSYNEQFF

SEQ ID NO: 21227 - protein, 11 aa, Homo sapiens
  CDR3 for alpha chain variable domain of TCR clone 10614 (TRAV3, TRAJ21)
CAVGNFNKFYF

SEQ ID NO: 21228 - protein, 16 aa, Homo sapiens
  CDR3 for beta chain variable domain of TCR clone 10614 (TRBV19, TRBJ2-1)
CASSKAGPSSYNEHFF

SEQ ID NO: 21229 - protein, 12 aa, Homo sapiens
  CDR3 for alpha chain variable domain of TCR clone 10615 (TRAV13-1, TRAJ48)
CAANFGNEKLTF

SEQ ID NO: 21230 - protein, 14 aa, Homo sapiens
  CDR3 for beta chain variable domain of TCR clone 10615 (TRBV9, TRBJ1-2)
CASSVSTRSYGYTF

SEQ ID NO: 21231 - protein, 16 aa, Homo sapiens
  CDR3 for alpha chain variable domain of TCR clone 10616 (TRAV30, TRAJ24)
CGTEIVDADSWGKFLF

SEQ ID NO: 21232 - protein, 14 aa, Homo sapiens
  CDR3 for beta chain variable domain of TCR clone 10616 (TRBV12-5, TRBJ2-5)
CASGSRTHQETQYF

SEQ ID NO: 21233 - protein, 12 aa, Homo sapiens
  CDR3 for alpha chain variable domain of TCR clone 10617 (TRAV8-3, TRAJ20)
CAVCANDYKLSF

SEQ ID NO: 21234 - protein, 16 aa, Homo sapiens
  CDR3 for beta chain variable domain of TCR clone 10617 (TRBV19, TRBJ2-2)
CASRSPGTGATGELFF

SEQ ID NO: 21235 - protein, 17 aa, Homo sapiens
  CDR3 for alpha chain variable domain of TCR clone 10618 (TRAV23/DV6, TRAJ57)
CAASSTLSQGGSEKLVF

SEQ ID NO: 21236 - protein, 14 aa, Homo sapiens
  CDR3 for beta chain variable domain of TCR clone 10618 (TRBV25-1, TRBJ1-1)
CASTHLGGNTEALF

SEQ ID NO: 21237 - protein, 18 aa, Homo sapiens
  CDR3 for alpha chain variable domain of TCR clone 10619 (TRAV26-1, TRAJ39)
CIVRPPDLYNNAGNMLTF

SEQ ID NO: 21238 - protein, 15 aa, Homo sapiens
  CDR3 for beta chain variable domain of TCR clone 10619 (TRBV7-4, TRBJ1-2)
CQQPLTGGLSYGYTF

SEQ ID NO: 21239 - protein, 14 aa, Homo sapiens
  CDR3 for alpha chain variable domain of TCR clone 10620 (TRAV36/DV7, TRAJ57)
CAVGFQGGSEKLVF

SEQ ID NO: 21240 - protein, 12 aa, Homo sapiens
  CDR3 for beta chain variable domain of TCR clone 10620 (TRBV19, TRBJ2-7)
CASTSGTYEQYF

SEQ ID NO: 21241 - protein, 13 aa, Homo sapiens
  CDR3 for alpha chain variable domain of TCR clone 10621 (TRAV26-1, TRAJ20)
CIVRVDSDYKLSF

SEQ ID NO: 21242 - protein, 11 aa, Homo sapiens
  CDR3 for beta chain variable domain of TCR clone 10621 (TRBV7-3, TRBJ2-2)
CASSLNSGGLA

SEQ ID NO: 21243 - protein, 15 aa, Homo sapiens
  CDR3 for alpha chain variable domain of TCR clone 10622 (TRAV12-2, TRAJ53)
CAVNGGGGSNYKLTF

SEQ ID NO: 21244 - protein, 15 aa, Homo sapiens
  CDR3 for beta chain variable domain of TCR clone 10622 (TRBV5-1, TRBJ2-7)
CASSLNGGPAREQYF

SEQ ID NO: 21245 - protein, 14 aa, Homo sapiens
  CDR3 for alpha chain variable domain of TCR clone 10623 (TRAV12-1, TRAJ17)
CVVNYKAAGNRLTF

SEQ ID NO: 21246 - protein, 17 aa, Homo sapiens
  CDR3 for beta chain variable domain of TCR clone 10623 (TRBV20-1, TRBJ2-1)
CSASSSGLAGSYNEQFF

SEQ ID NO: 21247 - protein, 15 aa, Homo sapiens
  CDR3 for alpha chain variable domain of TCR clone 10624 (TRAV27, TRAJ38)
CAARRNAGHNRKLIW

SEQ ID NO: 21248 - protein, 13 aa, Homo sapiens
  CDR3 for beta chain variable domain of TCR clone 10624 (TRBV12-5, TRBJ2-3)
CASGDRQSDTQYF

SEQ ID NO: 21249 - protein, 14 aa, Homo sapiens
  CDR3 for alpha chain variable domain of TCR clone 10625 (TRAV9-2, TRAJ39)
CALYIYNAGNMLTF

SEQ ID NO: 21250 - protein, 13 aa, Homo sapiens
  CDR3 for beta chain variable domain of TCR clone 10625 (TRBV19, TRBJ1-2)
CASSVPGQDGYTF

SEQ ID NO: 21251 - protein, 15 aa, Homo sapiens
  CDR3 for alpha chain variable domain of TCR clone 10626 (TRAV17, TRAJ57)
CATGPSQGGSEKLVF

SEQ ID NO: 21252 - protein, 16 aa, Homo sapiens
  CDR3 for beta chain variable domain of TCR clone 10626 (TRBV12-4, TRBJ1-5)
CASSRPVGGPNQPQHF

SEQ ID NO: 21253 - protein, 14 aa, Homo sapiens
  CDR3 for alpha chain variable domain of TCR clone 10627 (TRAV38-1, TRAJ40)
CALRPTSGTSKYIF

SEQ ID NO: 21254 - protein, 14 aa, Homo sapiens
  CDR3 for beta chain variable domain of TCR clone 10627 (TRBV25-1, TRBJ1-1)
CASTHLGGNTEAFF

SEQ ID NO: 21255 - protein, 15 aa, Homo sapiens
  CDR3 for alpha chain variable domain of TCR clone 10628 (TRAV8-3, TRAJ45)
CASSYSGGGADGLTF

SEQ ID NO: 21256 - protein, 20 aa, Homo sapiens
  CDR3 for beta chain variable domain of TCR clone 10628 (TRBV28, TRBJ2-1)
CASTPIGRSPGLAGGNEQFF

SEQ ID NO: 21257 - protein, 19 aa, Homo sapiens
  CDR3 for alpha chain variable domain of TCR clone 10629 (TRAV30, TRAJ52)
CGTEANTNAGGTSYGKLTF

SEQ ID NO: 21258 - protein, 11 aa, Homo sapiens
  CDR3 for beta chain variable domain of TCR clone 10629 (TRBV29-1, TRBJ2-5)
CSEDRTGTQYF

SEQ ID NO: 21259 - protein, 14 aa, Homo sapiens
  CDR3 for alpha chain variable domain of TCR clone 10630 (TRAV38-1, TRAJ29)
CAFITPSGNTPLVF

SEQ ID NO: 21260 - protein, 14 aa, Homo sapiens
  CDR3 for beta chain variable domain of TCR clone 10630 (TRBV18, TRBJ2-7)
CASSPGGGAYEQYF

SEQ ID NO: 21261 - protein, 14 aa, Homo sapiens
  CDR3 for alpha chain variable domain of TCR clone 10631 (TRAV2, TRAJ37)
CAVDLTSNTGKLIF

SEQ ID NO: 21262 - protein, 15 aa, Homo sapiens
  CDR3 for beta chain variable domain of TCR clone 10631 (TRBV20-1, TRBJ1-1)
CSASRGVTGNTEAFF

SEQ ID NO: 21263 - protein, 14 aa, Homo sapiens
  CDR3 for alpha chain variable domain of TCR clone 10632 (TRAV12-2, TRAJ13)
CAVKKTGGYQKVTF

SEQ ID NO: 21264 - protein, 14 aa, Homo sapiens
  CDR3 for beta chain variable domain of TCR clone 10632 (TRBV20-1, TRBJ2-1)
CSAQIGGSANEQFF

SEQ ID NO: 21265 - protein, 15 aa, Homo sapiens
  CDR3 for alpha chain variable domain of TCR clone 10633 (TRAV12-3, TRAJ6)
CAMSATTGGSYIPTS

SEQ ID NO: 21266 - protein, 16 aa, Homo sapiens
  CDR3 for beta chain variable domain of TCR clone 10633 (TRBV20-1, TRBJ1-2)
CSASMGQGVANYGYTF

SEQ ID NO: 21267 - protein, 17 aa, Homo sapiens
  CDR3 for alpha chain variable domain of TCR clone 10634 (TRAV3, TRAJ6)
CAVRDGPRAGGSYIPTF

SEQ ID NO: 21268 - protein, 14 aa, Homo sapiens
  CDR3 for beta chain variable domain of TCR clone 10634 (TRBV7-2, TRBJ2-7)
CDSSPKTSFYEQYF

SEQ ID NO: 21269 - protein, 16 aa, Homo sapiens
  CDR3 for alpha chain variable domain of TCR clone 10635 (TRAV26-1, TRAJ53)
CIVRVAMGGSNYKLTF

SEQ ID NO: 21270 - protein, 12 aa, Homo sapiens
  CDR3 for beta chain variable domain of TCR clone 10635 (TRBV7-9, TRBJ1-5)
CASSPQGQHQHF

SEQ ID NO: 21271 - protein, 13 aa, Homo sapiens
  CDR3 for alpha chain variable domain of TCR clone 10636 (TRAV2, TRAJ40)
CAVVTSGTYKYIF

SEQ ID NO: 21272 - protein, 14 aa, Homo sapiens
  CDR3 for beta chain variable domain of TCR clone 10636 (TRBV25-1, TRBJ1-1)
CASTHLGGNTEAFF

SEQ ID NO: 21273 - protein, 14 aa, Homo sapiens
  CDR3 for alpha chain variable domain of TCR clone 10637 (TRAV21, TRAJ35)
CAVMPIGFGNVLHC

SEQ ID NO: 21274 - protein, 12 aa, Homo sapiens
  CDR3 for beta chain variable domain of TCR clone 10637 (TRBV7-9, TRBJ2-7)
CAGSIKREEQYF

SEQ ID NO: 21275 - protein, 14 aa, Homo sapiens
  CDR3 for alpha chain variable domain of TCR clone 10638 (TRAV13-1, TRAJ53)
CAANSGGSNYKLTF

SEQ ID NO: 21276 - protein, 12 aa, Homo sapiens
  CDR3 for beta chain variable domain of TCR clone 10638 (TRBV5-1, TRBJ2-7)
CASRGGGLEQYF

SEQ ID NO: 21277 - protein, 12 aa, Homo sapiens
  CDR3 for alpha chain variable domain of TCR clone 10639 (TRAV12-2, TRAJ7)
CAVMRGNNRLVF

SEQ ID NO: 21278 - protein, 12 aa, Homo sapiens
  CDR3 for beta chain variable domain of TCR clone 10639 (TRBV7-8, TRBJ2-7)
CASSLGDREQYF

SEQ ID NO: 21279 - protein, 16 aa, Homo sapiens
  CDR3 for alpha chain variable domain of TCR clone 10640 (TRAV30, TRAJ24)
CGTEIVDADSWGRFQF

SEQ ID NO: 21280 - protein, 15 aa, Homo sapiens
  CDR3 for beta chain variable domain of TCR clone 10640 (TRBV7-9, TRBJ1-4)
CASSARTGGNEKLFF

SEQ ID NO: 21281 - protein, 16 aa, Homo sapiens
  CDR3 for alpha chain variable domain of TCR clone 10641 (TRAV12-3, TRAJ53)
CAMSPGSGGSNYKLTF

SEQ ID NO: 21282 - protein, 14 aa, Homo sapiens
  CDR3 for beta chain variable domain of TCR clone 10641 (TRBV7-6, TRBJ2-3)
CASSLGTVTDTQYF

SEQ ID NO: 21283 - protein, 14 aa, Homo sapiens
  CDR3 for alpha chain variable domain of TCR clone 10642 (TRAV12-3, TRAJ9)
CAMSPNTGGFKTIF

SEQ ID NO: 21284 - protein, 15 aa, Homo sapiens
  CDR3 for beta chain variable domain of TCR clone 10642 (TRBV20-1, TRBJ2-7)
CSAREGRDSLYEQYF

SEQ ID NO: 21285 - protein, 13 aa, Homo sapiens
  CDR3 for alpha chain variable domain of TCR clone 10643 (TRAV21, TRAJ27)
CATRPGNAGKSTF

SEQ ID NO: 21286 - protein, 14 aa, Homo sapiens
  CDR3 for beta chain variable domain of TCR clone 10643 (TRBV7-6, TRBJ2-3)
CASSLGTVTDTQYF

SEQ ID NO: 21287 - protein, 14 aa, Homo sapiens
  CDR3 for alpha chain variable domain of TCR clone 10644 (TRAV1-2, TRAJ16)
CAVNRFSDGQKLPF

SEQ ID NO: 21288 - protein, 13 aa, Homo sapiens
  CDR3 for beta chain variable domain of TCR clone 10644 (TRBV10-3, TRBJ2-7)
CASKLAVNYEQYF

SEQ ID NO: 21289 - protein, 14 aa, Homo sapiens
  CDR3 for alpha chain variable domain of TCR clone 10645 (TRAV12-2, TRAJ40)
CAVKIPSGTYTYIF

SEQ ID NO: 21290 - protein, 14 aa, Homo sapiens
  CDR3 for beta chain variable domain of TCR clone 10645 (TRBV20-1, TRBJ1-1)
CSAQTRIGGTEAFF

SEQ ID NO: 21291 - protein, 15 aa, Homo sapiens
  CDR3 for alpha chain variable domain of TCR clone 10646 (TRAV26-1, TRAJ22)
CIVRVSFWFRKATDL

SEQ ID NO: 21292 - protein, 13 aa, Homo sapiens
  CDR3 for beta chain variable domain of TCR clone 10646 (TRBV7-9, TRBJ1-2)
CASSLKQNYGYTF

SEQ ID NO: 21293 - protein, 13 aa, Homo sapiens
  CDR3 for alpha chain variable domain of TCR clone 10647 (TRAV12-2, TRAJ34)
CALSKGDTDKLIF

SEQ ID NO: 21294 - protein, 13 aa, Homo sapiens
  CDR3 for beta chain variable domain of TCR clone 10647 (TRBV20-1, TRBJ2-1)
CSASGTPGDEQFF

SEQ ID NO: 21295 - protein, 16 aa, Homo sapiens
  CDR3 for alpha chain variable domain of TCR clone 10648 (TRAV12-3, TRAJ53)
CAMSPGSGGSNYKLTF

SEQ ID NO: 21296 - protein, 11 aa, Homo sapiens
  CDR3 for beta chain variable domain of TCR clone 10648 (TRBV29-1, TRBJ2-5)
CSEDRTGTQFF

SEQ ID NO: 21297 - protein, 14 aa, Homo sapiens
  CDR3 for alpha chain variable domain of TCR clone 10649 (TRAV29/DV5, TRAJ36)
CAARRKTGANNLFF

SEQ ID NO: 21298 - protein, 15 aa, Homo sapiens
  CDR3 for beta chain variable domain of TCR clone 10649 (TRBV20-1, TRBJ2-7)
CSARDRVSGMDEQYF

SEQ ID NO: 21299 - protein, 14 aa, Homo sapiens
  CDR3 for alpha chain variable domain of TCR clone 10650 (TRAV13-1, TRAJ35)
CAASKGGFVNVLHC

SEQ ID NO: 21300 - protein, 13 aa, Homo sapiens
  CDR3 for beta chain variable domain of TCR clone 10650 (TRBV7-3, TRBJ1-1)
CASSQDWGAEAFF

SEQ ID NO: 21301 - protein, 13 aa, Homo sapiens
  CDR3 for alpha chain variable domain of TCR clone 10651 (TRAV1-2, TRAJ9)
RAALNTGGFKTIF

SEQ ID NO: 21302 - protein, 13 aa, Homo sapiens
  CDR3 for beta chain variable domain of TCR clone 10651 (TRBV19, TRBJ1-2)
CASSVPGQDGYTF

SEQ ID NO: 21303 - protein, 12 aa, Homo sapiens
  CDR3 for alpha chain variable domain of TCR clone 10652 (TRAV29/DV5, TRAJ49)
CAATDTGNQFYF

SEQ ID NO: 21304 - protein, 13 aa, Homo sapiens
  CDR3 for beta chain variable domain of TCR clone 10652 (TRBV7-3, TRBJ1-1)
CASSQDWGAEAFF

SEQ ID NO: 21305 - protein, 14 aa, Homo sapiens
  CDR3 for alpha chain variable domain of TCR clone 10653 (TRAV20, TRAJ56)
CAVQFGGANSKLTF

SEQ ID NO: 21306 - protein, 14 aa, Homo sapiens
  CDR3 for beta chain variable domain of TCR clone 10653 (TRBV20-1, TRBJ2-7)
RSAKRGRSSYEQYF

SEQ ID NO: 21307 - protein, 18 aa, Homo sapiens
  CDR3 for alpha chain variable domain of TCR clone 10654 (TRAV13-1, TRAJ52)
CAASKRSAGGTSYGKLTF

SEQ ID NO: 21308 - protein, 13 aa, Homo sapiens
  CDR3 for beta chain variable domain of TCR clone 10654 (TRBV7-2, TRBJ2-7)
CASSSPSGSEQYF

SEQ ID NO: 21309 - protein, 17 aa, Homo sapiens
  CDR3 for alpha chain variable domain of TCR clone 10655 (TRAV3, TRAJ42)
CAVRDRDYGGSQGNLIF

SEQ ID NO: 21310 - protein, 15 aa, Homo sapiens
  CDR3 for beta chain variable domain of TCR clone 10655 (TRBV6-6, TRBJ2-7)
CASSYSYGGSYEQHF

SEQ ID NO: 21311 - protein, 13 aa, Homo sapiens
  CDR3 for alpha chain variable domain of TCR clone 10656 (TRAV2, TRAJ40)
CAVVTSGTYKYIF

SEQ ID NO: 21312 - protein, 14 aa, Homo sapiens
  CDR3 for beta chain variable domain of TCR clone 10656 (TRBV12-4, TRBJ2-5)
CASSYSGYFETQYF

SEQ ID NO: 21313 - protein, 18 aa, Homo sapiens
  CDR3 for alpha chain variable domain of TCR clone 10657 (TRAV21, TRAJ52)
CAVRPSPAGGTSYRKLTF

SEQ ID NO: 21314 - protein, 17 aa, Homo sapiens
  CDR3 for beta chain variable domain of TCR clone 10657 (TRBV13, TRBJ2-3)
CASSLSRVAGGRNTQYF

SEQ ID NO: 21315 - protein, 15 aa, Homo sapiens
  CDR3 for alpha chain variable domain of TCR clone 10658 (TRAV6, TRAJ13)
CALGGDSGGYQKVTF

SEQ ID NO: 21316 - protein, 12 aa, Homo sapiens
  CDR3 for beta chain variable domain of TCR clone 10658 (TRBV5-7, TRBJ1-2)
CASSDRIHGYTF

SEQ ID NO: 21317 - protein, 10 aa, Homo sapiens
  CDR3 for alpha chain variable domain of TCR clone 10659 (TRAV23/DV6, TRAJ57)
CAASSTLSQG

SEQ ID NO: 21318 - protein, 12 aa, Homo sapiens
  CDR3 for beta chain variable domain of TCR clone 10659 (TRBV7-6, TRBJ2-7)
CASSLADSEQYF

SEQ ID NO: 21319 - protein, 14 aa, Homo sapiens
  CDR3 for alpha chain variable domain of TCR clone 10660 (TRAV26-1, TRAJ38)
CIADNAGNNRKLIW

SEQ ID NO: 21320 - protein, 11 aa, Homo sapiens
  CDR3 for beta chain variable domain of TCR clone 10660 (TRBV29-1, TRBJ2-5)
CSEDRTGTQYF

SEQ ID NO: 21321 - protein, 16 aa, Homo sapiens
  CDR3 for alpha chain variable domain of TCR clone 10661 (TRAV12-3, TRAJ53)
CAMSPGSGGSNNKLTF

SEQ ID NO: 21322 - protein, 11 aa, Homo sapiens
  CDR3 for beta chain variable domain of TCR clone 10661 (TRBV29-1, TRBJ2-5)
CSEDRTGTQYF

SEQ ID NO: 21323 - protein, 15 aa, Homo sapiens
  CDR3 for alpha chain variable domain of TCR clone 10662 (TRAV8-3, TRAJ45)
CASSYSGGGAYGLTF

SEQ ID NO: 21324 - protein, 13 aa, Homo sapiens
  CDR3 for beta chain variable domain of TCR clone 10662 (TRBV10-3, TRBJ2-7)
CASKLAVNYEQYF

SEQ ID NO: 21325 - protein, 12 aa, Homo sapiens
  CDR3 for alpha chain variable domain of TCR clone 10663 (TRAV12-3, TRAJ17)
CAMTLTGNKLTF

SEQ ID NO: 21326 - protein, 13 aa, Homo sapiens
  CDR3 for beta chain variable domain of TCR clone 10663 (TRBV12-4, TRBJ1-2)
CASSLRQGKGYTF

SEQ ID NO: 21327 - protein, 13 aa, Homo sapiens
  CDR3 for alpha chain variable domain of TCR clone 10664 (TRAV2, TRAJ29)
CAAGNSGNTPLVF

SEQ ID NO: 21328 - protein, 15 aa, Homo sapiens
  CDR3 for beta chain variable domain of TCR clone 10664 (TRBV6-3, TRBJ2-7)
CASSSPGTVFYEQYF

SEQ ID NO: 21329 - protein, 14 aa, Homo sapiens
  CDR3 for alpha chain variable domain of TCR clone 10665 (TRAV12-3, TRAJ10)
SHLPLTGGGNKLTF

SEQ ID NO: 21330 - protein, 14 aa, Homo sapiens
  CDR3 for beta chain variable domain of TCR clone 10665 (TRBV4-1, TRBJ2-2)
CASSLTENTGELFF

SEQ ID NO: 21331 - protein, 15 aa, Homo sapiens
  CDR3 for alpha chain variable domain of TCR clone 10666 (TRAV19, TRAJ23)
CALSEVGNQGGKLIF

SEQ ID NO: 21332 - protein, 13 aa, Homo sapiens
  CDR3 for beta chain variable domain of TCR clone 10666 (TRBV7-9, TRBJ1-2)
CASSLKQNYGYTF

SEQ ID NO: 21333 - protein, 14 aa, Homo sapiens
  CDR3 for alpha chain variable domain of TCR clone 10667 (TRAV12-3, TRAJ5)
CAVNRSTGRRALTF

SEQ ID NO: 21334 - protein, 12 aa, Homo sapiens
  CDR3 for beta chain variable domain of TCR clone 10667 (TRBV19, TRBJ1-5)
CASSIAQQPQHF

SEQ ID NO: 21335 - protein, 14 aa, Homo sapiens
  CDR3 for alpha chain variable domain of TCR clone 10668 (TRAV29/DV5, TRAJ36)
CAARRKTGANNLFF

SEQ ID NO: 21336 - protein, 14 aa, Homo sapiens
  CDR3 for beta chain variable domain of TCR clone 10668 (TRBV12-5, TRBJ2-5)
CASGSRTHQETQYL

SEQ ID NO: 21337 - protein, 14 aa, Homo sapiens
  CDR3 for alpha chain variable domain of TCR clone 10669 (TRAV1-2, TRAJ16)
CAVNRFSDGQKLLF

SEQ ID NO: 21338 - protein, 13 aa, Homo sapiens
  CDR3 for beta chain variable domain of TCR clone 10669 (TRBV20-1, TRBJ1-1)
CSAPPGGHTEAFF

SEQ ID NO: 21339 - protein, 11 aa, Homo sapiens
  CDR3 for alpha chain variable domain of TCR clone 10670 (TRAV22, TRAJ30)
CAGNRDDKIIF

SEQ ID NO: 21340 - protein, 12 aa, Homo sapiens
  CDR3 for beta chain variable domain of TCR clone 10670 (TRBV14, TRBJ2-5)
CASSHLKETQYF

SEQ ID NO: 21341 - protein, 14 aa, Homo sapiens
  CDR3 for alpha chain variable domain of TCR clone 10671 (TRAV1-2, TRAJ8)
CAVREDTGFQKLVF

SEQ ID NO: 21342 - protein, 15 aa, Homo sapiens
  CDR3 for beta chain variable domain of TCR clone 10671 (TRBV6-3, TRBJ2-7)
CASSAPGTVFYEQYF

SEQ ID NO: 21343 - protein, 14 aa, Homo sapiens
  CDR3 for alpha chain variable domain of TCR clone 10672 (TRAV21, TRAJ35)
CAVMPIGLGNVLHC

SEQ ID NO: 21344 - protein, 12 aa, Homo sapiens
  CDR3 for beta chain variable domain of TCR clone 10672 (TRBV7-9, TRBJ2-7)
CASSIKREEQYF

SEQ ID NO: 21345 - protein, 11 aa, Homo sapiens
  CDR3 for alpha chain variable domain of TCR clone 10673 (TRAV2, TRAJ13)
CASGGYQKVTF

SEQ ID NO: 21346 - protein, 15 aa, Homo sapiens
  CDR3 for beta chain variable domain of TCR clone 10673 (TRBV6-3, TRBJ2-7)
CASSSPGTVFYEQYF

SEQ ID NO: 21347 - protein, 18 aa, Homo sapiens
  CDR3 for alpha chain variable domain of TCR clone 10674 (TRAV26-1, TRAJ23)
CIVRVGLEVWNQGGKLIF

SEQ ID NO: 21348 - protein, 16 aa, Homo sapiens
  CDR3 for beta chain variable domain of TCR clone 10674 (TRBV13, TRBJ2-2)
CASSPRTGEHTGELFF

SEQ ID NO: 21349 - protein, 15 aa, Homo sapiens
  CDR3 for alpha chain variable domain of TCR clone 10675 (TRAV3, TRAJ36)
CAVRASQTGANNLFF

SEQ ID NO: 21350 - protein, 16 aa, Homo sapiens
  CDR3 for beta chain variable domain of TCR clone 10675 (TRBV19, TRBJ2-2)
CASRSPGTGATGELFF

SEQ ID NO: 21351 - protein, 17 aa, Homo sapiens
  CDR3 for alpha chain variable domain of TCR clone 10676 (TRAV21, TRAJ52)
CCEAFPAGGTSYGKLTF

SEQ ID NO: 21352 - protein, 17 aa, Homo sapiens
  CDR3 for beta chain variable domain of TCR clone 10676 (TRBV13, TRBJ2-3)
CASSLSRVAGGRNTQYF

SEQ ID NO: 21353 - protein, 13 aa, Homo sapiens
  CDR3 for alpha chain variable domain of TCR clone 10677 (TRAV1-1, TRAJ9)
CAAKNTGGFKTIL

SEQ ID NO: 21354 - protein, 14 aa, Homo sapiens
  CDR3 for beta chain variable domain of TCR clone 10677 (TRBV20-1, TRBJ2-1)
CSAQIGGSANEQFF

SEQ ID NO: 21355 - protein, 18 aa, Homo sapiens
  CDR3 for alpha chain variable domain of TCR clone 10678 (TRAV13-1, TRAJ52)
CAASKRSAGGTSYGKLTF

SEQ ID NO: 21356 - protein, 13 aa, Homo sapiens
  CDR3 for beta chain variable domain of TCR clone 10678 (TRBV12-4, TRBJ1-2)
CASSVRQGKGYTF

SEQ ID NO: 21357 - protein, 12 aa, Homo sapiens
  CDR3 for alpha chain variable domain of TCR clone 10679 (TRAV1-1, TRAJ8)
CAVRPGFQKLVF

SEQ ID NO: 21358 - protein, 22 aa, Homo sapiens
  CDR3 for beta chain variable domain of TCR clone 10679 (TRBV11-3, TRBJ2-2)
LGTRPCISVPAAQGGTPGSCFF

SEQ ID NO: 21359 - protein, 13 aa, Homo sapiens
  CDR3 for alpha chain variable domain of TCR clone 10680 (TRAV41, TRAJ49)
CAVSGTPGNQFYF

SEQ ID NO: 21360 - protein, 18 aa, Homo sapiens
  CDR3 for beta chain variable domain of TCR clone 10680 (TRBV12-4, TRBJ2-5)
CASSSGGGRDPVLRARHA

SEQ ID NO: 21361 - protein, 13 aa, Homo sapiens
  CDR3 for alpha chain variable domain of TCR clone 10681 (TRAV1-2, TRAJ9)
CAALNTGGFKPIF

SEQ ID NO: 21362 - protein, 13 aa, Homo sapiens
  CDR3 for beta chain variable domain of TCR clone 10681 (TRBV19, TRBJ1-2)
CASSVPGQDGYTF

SEQ ID NO: 21363 - protein, 15 aa, Homo sapiens
  CDR3 for alpha chain variable domain of TCR clone 10682 (TRAV20, TRAJ45)
CAVQETGGGADGLTF

SEQ ID NO: 21364 - protein, 12 aa, Homo sapiens
  CDR3 for beta chain variable domain of TCR clone 10682 (TRBV24-1, TRBJ2-7)
CATQGTTYEQYF

SEQ ID NO: 21365 - protein, 14 aa, Homo sapiens
  CDR3 for alpha chain variable domain of TCR clone 10683 (TRAV1-2, TRAJ16)
CAVNRFSDGQKLLF

SEQ ID NO: 21366 - protein, 15 aa, Homo sapiens
  CDR3 for beta chain variable domain of TCR clone 10683 (TRBV9, TRBJ1-6)
CASSVAETGDSPLHF

SEQ ID NO: 21367 - protein, 13 aa, Homo sapiens
  CDR3 for alpha chain variable domain of TCR clone 10684 (TRAV21, TRAJ27)
CAARPGNAGKSTF

SEQ ID NO: 21368 - protein, 13 aa, Homo sapiens
  CDR3 for beta chain variable domain of TCR clone 10684 (TRBV7-9, TRBJ1-2)
CASSLKQNYGYTF

SEQ ID NO: 21369 - protein, 12 aa, Homo sapiens
  CDR3 for alpha chain variable domain of TCR clone 10685 (TRAV12-3, TRAJ17)
CAMTLTGIKLTF

SEQ ID NO: 21370 - protein, 15 aa, Homo sapiens
  CDR3 for beta chain variable domain of TCR clone 10685 (TRBV20-1, TRBJ2-7)
CSARDRVSGMDEQYF

SEQ ID NO: 21371 - protein, 15 aa, Homo sapiens
  CDR3 for alpha chain variable domain of TCR clone 10686 (TRAV3, TRAJ5)
CAVRDLDTGRRALTF

SEQ ID NO: 21372 - protein, 13 aa, Homo sapiens
  CDR3 for beta chain variable domain of TCR clone 10686 (TRBV12-4, TRBJ2-7)
CASSPTETYEQYV

SEQ ID NO: 21373 - protein, 12 aa, Homo sapiens
  CDR3 for alpha chain variable domain of TCR clone 10687 (TRAV21, TRAJ58)
CALSASGSRLTF

SEQ ID NO: 21374 - protein, 15 aa, Homo sapiens
  CDR3 for beta chain variable domain of TCR clone 10687 (TRBV4-2, TRBJ1-2)
CASSQRTGGRDGYTF

SEQ ID NO: 21375 - protein, 11 aa, Homo sapiens
  CDR3 for alpha chain variable domain of TCR clone 10688 (TRAV1-1, TRAJ23)
CAVRQGGKLIF

SEQ ID NO: 21376 - protein, 20 aa, Homo sapiens
  CDR3 for beta chain variable domain of TCR clone 10688 (TRBV7-8, TRBJ2-2)
CASSHLFPGPTIHITRELFF

SEQ ID NO: 21377 - protein, 14 aa, Homo sapiens
  CDR3 for alpha chain variable domain of TCR clone 10689 (TRAV12-2, TRAJ15)
CAPHTGQAGTALIF

SEQ ID NO: 21378 - protein, 14 aa, Homo sapiens
  CDR3 for beta chain variable domain of TCR clone 10689 (TRBV6-1, TRBJ1-3)
CASVQGGGGNTIYF

SEQ ID NO: 21379 - protein, 14 aa, Homo sapiens
  CDR3 for alpha chain variable domain of TCR clone 10690 (TRAV26-1, TRAJ39)
CIARGSRAGNMLTF

SEQ ID NO: 21380 - protein, 15 aa, Homo sapiens
  CDR3 for beta chain variable domain of TCR clone 10690 (TRBV7-9, TRBJ1-5)
CASSQGHQPNQPQHF

SEQ ID NO: 21381 - protein, 14 aa, Homo sapiens
  CDR3 for alpha chain variable domain of TCR clone 10691 (TRAV12-3, TRAJ33)
CNDHGRDSNYQLIW

SEQ ID NO: 21382 - protein, 15 aa, Homo sapiens
  CDR3 for beta chain variable domain of TCR clone 10691 (TRBV28, TRBJ1-5)
CASSLPQQGEQPQHF

SEQ ID NO: 21383 - protein, 15 aa, Homo sapiens
  CDR3 for alpha chain variable domain of TCR clone 10692 (TRAV23/DV6, TRAJ18)
CAARYRGSTLGRLYL

SEQ ID NO: 21384 - protein, 13 aa, Homo sapiens
  CDR3 for beta chain variable domain of TCR clone 10692 (TRBV7-2, TRBJ2-7)
CASSSPSGSEQYF

SEQ ID NO: 21385 - protein, 14 aa, Homo sapiens
  CDR3 for alpha chain variable domain of TCR clone 10693 (TRAV8-4, TRAJ37)
CAVSESSNTGKLIF

SEQ ID NO: 21386 - protein, 16 aa, Homo sapiens
  CDR3 for beta chain variable domain of TCR clone 10693 (TRBV19, TRBJ1-5)
CASSTWTGGGNQPQHF

SEQ ID NO: 21387 - protein, 14 aa, Homo sapiens
  CDR3 for alpha chain variable domain of TCR clone 10694 (TRAV3, TRAJ7)
CAVREEEREQQTRF

SEQ ID NO: 21388 - protein, 15 aa, Homo sapiens
  CDR3 for beta chain variable domain of TCR clone 10694 (TRBV20-1, TRBJ1-5)
CSAFKNGQRNQPQHF

SEQ ID NO: 21389 - protein, 15 aa, Homo sapiens
  CDR3 for alpha chain variable domain of TCR clone 10695 (TRAV27, TRAJ38)
CAARRNAGNNRKLFW

SEQ ID NO: 21390 - protein, 13 aa, Homo sapiens
  CDR3 for beta chain variable domain of TCR clone 10695 (TRBV12-5, TRBJ2-3)
CASGDRQSDTQYF

SEQ ID NO: 21391 - protein, 16 aa, Homo sapiens
  CDR3 for alpha chain variable domain of TCR clone 10696 (TRAV26-1, TRAJ37)
CIVRGDGSGNTGKLIF

SEQ ID NO: 21392 - protein, 17 aa, Homo sapiens
  CDR3 for beta chain variable domain of TCR clone 10696 (TRBV11-2, TRBJ2-1)
CASSLYPPGVEYNEQFF

SEQ ID NO: 21393 - protein, 14 aa, Homo sapiens
  CDR3 for alpha chain variable domain of TCR clone 10697 (TRAV4, TRAJ20)
CLVGRRSNDYKLSF

SEQ ID NO: 21394 - protein, 13 aa, Homo sapiens
  CDR3 for beta chain variable domain of TCR clone 10697 (TRBV19, TRBJ1-2)
CASSVPGQDGYTF

SEQ ID NO: 21395 - protein, 16 aa, Homo sapiens
  CDR3 for alpha chain variable domain of TCR clone 10698 (TRAV30, TRAJ24)
CGTEIVDADSWGKFQF

SEQ ID NO: 21396 - protein, 16 aa, Homo sapiens
  CDR3 for beta chain variable domain of TCR clone 10698 (TRBV6-1, TRBJ2-5)
CASSETLDRGAETQYF

SEQ ID NO: 21397 - protein, 14 aa, Homo sapiens
  CDR3 for alpha chain variable domain of TCR clone 10699 (TRAV12-2, TRAJ40)
CAVKIPSGTYKYIF

SEQ ID NO: 21398 - protein, 14 aa, Homo sapiens
  CDR3 for beta chain variable domain of TCR clone 10699 (TRBV20-1, TRBJ1-1)
CSAQTRIGGTEAFS

SEQ ID NO: 21399 - protein, 13 aa, Homo sapiens
  CDR3 for alpha chain variable domain of TCR clone 10700 (TRAV3, TRAJ27)
CAVRPLGAGRSTF

SEQ ID NO: 21400 - protein, 13 aa, Homo sapiens
  CDR3 for beta chain variable domain of TCR clone 10700 (TRBV7-9, TRBJ2-3)
CASSPGSTDTQYF

SEQ ID NO: 21401 - protein, 23 aa, Homo sapiens
  CDR3 for alpha chain variable domain of TCR clone 10701 (TRAV36/DV7, TRAJ50)
CAVEPENLLRQDIQNPDPAVYQL

SEQ ID NO: 21402 - protein, 13 aa, Homo sapiens
  CDR3 for beta chain variable domain of TCR clone 10701 (TRBV7-2, TRBJ2-7)
CASSSPSGSEQYF

SEQ ID NO: 21403 - protein, 18 aa, Homo sapiens
  CDR3 for alpha chain variable domain of TCR clone 10702 (TRAV13-1, TRAJ52)
CAASKRGAGGTSYGKLTF

SEQ ID NO: 21404 - protein, 13 aa, Homo sapiens
  CDR3 for beta chain variable domain of TCR clone 10702 (TRBV12-4, TRBJ1-2)
CASSLRQGKGYTF

SEQ ID NO: 21405 - protein, 16 aa, Homo sapiens
  CDR3 for alpha chain variable domain of TCR clone 10703 (TRAV21, TRAJ37)
CAVRTAGSSNTGKLIF

SEQ ID NO: 21406 - protein, 13 aa, Homo sapiens
  CDR3 for beta chain variable domain of TCR clone 10703 (TRBV7-9, TRBJ2-5)
CASLPSGREAQYF

SEQ ID NO: 21407 - protein, 10 aa, Homo sapiens
  CDR3 for alpha chain variable domain of TCR clone 10704 (TRAV12-2, TRAJ48)
CAVTSEKLTF

SEQ ID NO: 21408 - protein, 17 aa, Homo sapiens
  CDR3 for beta chain variable domain of TCR clone 10704 (TRBV11-1, TRBJ2-7)
CANSLTGSFGLDYEQYF

SEQ ID NO: 21409 - protein, 13 aa, Homo sapiens
  CDR3 for alpha chain variable domain of TCR clone 10705 (TRAV2, TRAJ40)
CDVVTSGTYKYIF

SEQ ID NO: 21410 - protein, 14 aa, Homo sapiens
  CDR3 for beta chain variable domain of TCR clone 10705 (TRBV19, TRBJ2-1)
CASPTFVLSGEQFF

SEQ ID NO: 21411 - protein, 11 aa, Homo sapiens
  CDR3 for alpha chain variable domain of TCR clone 10706 (TRAV16, TRAJ33)
CALHSNYQLIW

SEQ ID NO: 21412 - protein, 15 aa, Homo sapiens
  CDR3 for beta chain variable domain of TCR clone 10706 (TRBV4-1, TRBJ2-7)
CASSQQGQGFDEQYL

SEQ ID NO: 21413 - protein, 13 aa, Homo sapiens
  CDR3 for alpha chain variable domain of TCR clone 10707 (TRAV12-3, TRAJ13)
CAMSSGGYQKVTF

SEQ ID NO: 21414 - protein, 14 aa, Homo sapiens
  CDR3 for beta chain variable domain of TCR clone 10707 (TRBV6-1, TRBJ1-3)
CASVQGGGGNTIYF

SEQ ID NO: 21415 - protein, 18 aa, Homo sapiens
  CDR3 for alpha chain variable domain of TCR clone 10708 (TRAV26-1, TRAJ23)
CIVRVGLEGWNQGGKLIF

SEQ ID NO: 21416 - protein, 16 aa, Homo sapiens
  CDR3 for beta chain variable domain of TCR clone 10708 (TRBV12-4, TRBJ2-5)
CASSFFVRGRQETQYF

SEQ ID NO: 21417 - protein, 10 aa, Homo sapiens
  CDR3 for alpha chain variable domain of TCR clone 10709 (TRAV12-2, TRAJ43)
CAAKVLSMRF

SEQ ID NO: 21418 - protein, 14 aa, Homo sapiens
  CDR3 for beta chain variable domain of TCR clone 10709 (TRBV11-2, TRBJ2-7)
CASSLGNSLYEQYF

SEQ ID NO: 21419 - protein, 10 aa, Homo sapiens
  CDR3 for alpha chain variable domain of TCR clone 10710 (TRAV13-2, TRAJ47)
CAGRGIWKQT

SEQ ID NO: 21420 - protein, 15 aa, Homo sapiens
  CDR3 for beta chain variable domain of TCR clone 10710 (TRBV20-1, TRBJ2-3)
CSASSGGPRTDTQYF

SEQ ID NO: 21421 - protein, 15 aa, Homo sapiens
  CDR3 for alpha chain variable domain of TCR clone 10711 (TRAV14/DV4, TRAJ12)
CAMTPPVDSSYKLIF

SEQ ID NO: 21422 - protein, 14 aa, Homo sapiens
  CDR3 for beta chain variable domain of TCR clone 10711 (TRBV19, TRBJ2-1)
CASSDNQGANEQFF

SEQ ID NO: 21423 - protein, 14 aa, Homo sapiens
  CDR3 for alpha chain variable domain of TCR clone 10712 (TRAV1-2, TRAJ8)
CAVREDTGFQKLVF

SEQ ID NO: 21424 - protein, 15 aa, Homo sapiens
  CDR3 for beta chain variable domain of TCR clone 10712 (TRBV6-3, TRBJ2-7)
CASSFPGTVFYEQYF

SEQ ID NO: 21425 - protein, 14 aa, Homo sapiens
  CDR3 for alpha chain variable domain of TCR clone 10713 (TRAV12-3, TRAJ13)
CATLDAGGYQKVTF

SEQ ID NO: 21426 - protein, 13 aa, Homo sapiens
  CDR3 for beta chain variable domain of TCR clone 10713 (TRBV2, TRBJ2-7)
CASRINTGWEQYF

SEQ ID NO: 21427 - protein, 16 aa, Homo sapiens
  CDR3 for alpha chain variable domain of TCR clone 10714 (TRAV3, TRAJ10)
CAVRDMRAGGGNKLTF

SEQ ID NO: 21428 - protein, 14 aa, Homo sapiens
  CDR3 for beta chain variable domain of TCR clone 10714 (TRBV7-8, TRBJ2-3)
CASSLEAGTDTQYF

SEQ ID NO: 21429 - protein, 14 aa, Homo sapiens
  CDR3 for alpha chain variable domain of TCR clone 10715 (TRAV26-1, TRAJ38)
CIADNAGNNRKLIR

SEQ ID NO: 21430 - protein, 13 aa, Homo sapiens
  CDR3 for beta chain variable domain of TCR clone 10715 (TRBV20-1, TRBJ1-1)
CSARGGGNTEAFF

SEQ ID NO: 21431 - protein, 16 aa, Homo sapiens
  CDR3 for alpha chain variable domain of TCR clone 10716 (TRAV21, TRAJ37)
CAVRTAGSSNTGKLIF

SEQ ID NO: 21432 - protein, 13 aa, Homo sapiens
  CDR3 for beta chain variable domain of TCR clone 10716 (TRBV7-9, TRBJ2-5)
CASLPSGRETQYL

SEQ ID NO: 21433 - protein, 16 aa, Homo sapiens
  CDR3 for alpha chain variable domain of TCR clone 10717 (TRAV1-2, TRAJ17)
CAVRDGFKAAGNKLTF

SEQ ID NO: 21434 - protein, 14 aa, Homo sapiens
  CDR3 for beta chain variable domain of TCR clone 10717 (TRBV6-1, TRBJ2-5)
CASSYAGGEETQYF

SEQ ID NO: 21435 - protein, 16 aa, Homo sapiens
  CDR3 for alpha chain variable domain of TCR clone 10718 (TRAV30, TRAJ24)
CGTEIVDADSWGKFQF

SEQ ID NO: 21436 - protein, 15 aa, Homo sapiens
  CDR3 for beta chain variable domain of TCR clone 10718 (TRBV7-9, TRBJ1-6)
CASSSPGRGNSPLHF

SEQ ID NO: 21437 - protein, 11 aa, Homo sapiens
  CDR3 for alpha chain variable domain of TCR clone 10719 (TRAV21, TRAJ39)
LLVNAGNMLTF

SEQ ID NO: 21438 - protein, 15 aa, Homo sapiens
  CDR3 for beta chain variable domain of TCR clone 10719 (TRBV29-1, TRBJ2-7)
CSVEFFDRGSYEQYF

SEQ ID NO: 21439 - protein, 12 aa, Homo sapiens
  CDR3 for alpha chain variable domain of TCR clone 10720 (TRAV13-1, TRAJ53)
AASGGSNYKLTF

SEQ ID NO: 21440 - protein, 15 aa, Homo sapiens
  CDR3 for beta chain variable domain of TCR clone 10720 (TRBV28, TRBJ2-1)
CASSIIAGGRSEQFF

SEQ ID NO: 21441 - protein, 17 aa, Homo sapiens
  CDR3 for alpha chain variable domain of TCR clone 10721 (TRAV3, TRAJ6)
CAVRDGPRAGGSYIPTF

SEQ ID NO: 21442 - protein, 14 aa, Homo sapiens
  CDR3 for beta chain variable domain of TCR clone 10721 (TRBV7-2, TRBJ2-7)
CASSPKTSFCEQYF

SEQ ID NO: 21443 - protein, 11 aa, Homo sapiens
  CDR3 for alpha chain variable domain of TCR clone 10722 (TRAV3, TRAJ21)
CAVGNFNKFYF

SEQ ID NO: 21444 - protein, 16 aa, Homo sapiens
  CDR3 for beta chain variable domain of TCR clone 10722 (TRBV19, TRBJ2-1)
CASSKAGTSSYNEQFF

SEQ ID NO: 21445 - protein, 15 aa, Homo sapiens
  CDR3 for alpha chain variable domain of TCR clone 10723 (TRAV12-3, TRAJ6)
CAMSATTGGSYIPTF

SEQ ID NO: 21446 - protein, 16 aa, Homo sapiens
  CDR3 for beta chain variable domain of TCR clone 10723 (TRBV20-1, TRBJ1-2)
CSASMGQGVANYGYIF

SEQ ID NO: 21447 - protein, 14 aa, Homo sapiens
  CDR3 for alpha chain variable domain of TCR clone 10724 (TRAV12-2, TRAJ13)
CAVKKTGGYQKVTF

SEQ ID NO: 21448 - protein, 14 aa, Homo sapiens
  CDR3 for beta chain variable domain of TCR clone 10724 (TRBV7-3, TRBJ1-1)
CASSLKGGNTEAFF

SEQ ID NO: 21449 - protein, 15 aa, Homo sapiens
  CDR3 for alpha chain variable domain of TCR clone 10725 (TRAV26-1, TRAJ22)
CIVRVSFWFCKATDL

SEQ ID NO: 21450 - protein, 13 aa, Homo sapiens
  CDR3 for beta chain variable domain of TCR clone 10725 (TRBV7-9, TRBJ1-2)
CASSLEQNYGYTF

SEQ ID NO: 21451 - protein, 17 aa, Homo sapiens
  CDR3 for alpha chain variable domain of TCR clone 10726 (TRAV17, TRAJ28)
CATDAVYSGAGSYQLTF

SEQ ID NO: 21452 - protein, 16 aa, Homo sapiens
  CDR3 for beta chain variable domain of TCR clone 10726 (TRBV6-1, TRBJ2-5)
CASSETLDRGAETQYF

SEQ ID NO: 21453 - protein, 13 aa, Homo sapiens
  CDR3 for alpha chain variable domain of TCR clone 10727 (TRAV8-3, TRAJ43)
CAVGPDNNNDMRF

SEQ ID NO: 21454 - protein, 14 aa, Homo sapiens
  CDR3 for beta chain variable domain of TCR clone 10727 (TRBV19, TRBJ2-1)
CASPTFVLGGEQFF

SEQ ID NO: 21455 - protein, 16 aa, Homo sapiens
  CDR3 for alpha chain variable domain of TCR clone 10728 (TRAV21, TRAJ52)
CAVTNAGGTSYGKLTF

SEQ ID NO: 21456 - protein, 13 aa, Homo sapiens
  CDR3 for beta chain variable domain of TCR clone 10728 (TRBV20-1, TRBJ2-3)
CSARLAGADTQYF

SEQ ID NO: 21457 - protein, 11 aa, Homo sapiens
  CDR3 for alpha chain variable domain of TCR clone 10729 (TRAV1-2, TRAJ20)
CAVSNDYKLSF

SEQ ID NO: 21458 - protein, 16 aa, Homo sapiens
  CDR3 for beta chain variable domain of TCR clone 10729 (TRBV29-1, TRBJ2-6)
CSVEDITYSGANDLTF

SEQ ID NO: 21459 - protein, 14 aa, Homo sapiens
  CDR3 for alpha chain variable domain of TCR clone 10730 (TRAV12-3, TRAJ11)
CAMSRNSGYSTLTF

SEQ ID NO: 21460 - protein, 13 aa, Homo sapiens
  CDR3 for beta chain variable domain of TCR clone 10730 (TRBV20-1, TRBJ2-1)
CSARPPPGNEQFF

SEQ ID NO: 21461 - protein, 12 aa, Homo sapiens
  CDR3 for alpha chain variable domain of TCR clone 10731 (TRAV8-3, TRAJ20)
CAVGANDYKLSF

SEQ ID NO: 21462 - protein, 16 aa, Homo sapiens
  CDR3 for beta chain variable domain of TCR clone 10731 (TRBV19, TRBJ2-2)
CASRSPGTGATGGLFF

SEQ ID NO: 21463 - protein, 12 aa, Homo sapiens
  CDR3 for alpha chain variable domain of TCR clone 10732 (TRAV17, TRAJ12)
CATLRSSYKLIF

SEQ ID NO: 21464 - protein, 15 aa, Homo sapiens
  CDR3 for beta chain variable domain of TCR clone 10732 (TRBV19, TRBJ2-2)
CASSPRTGWTGELFF

SEQ ID NO: 21465 - protein, 14 aa, Homo sapiens
  CDR3 for alpha chain variable domain of TCR clone 10733 (TRAV1-2, TRAJ8)
CAVREATGFQKLVF

SEQ ID NO: 21466 - protein, 15 aa, Homo sapiens
  CDR3 for beta chain variable domain of TCR clone 10733 (TRBV6-3, TRBJ2-7)
CASSSPGTVFYEQYF

SEQ ID NO: 21467 - protein, 14 aa, Homo sapiens
  CDR3 for alpha chain variable domain of TCR clone 10734 (TRAV35, TRAJ22)
CAGLRPGSAGQLTF

SEQ ID NO: 21468 - protein, 15 aa, Homo sapiens
  CDR3 for beta chain variable domain of TCR clone 10734 (TRBV12-4, TRBJ2-5)
CASSPPTGLQETQYF

SEQ ID NO: 21469 - protein, 14 aa, Homo sapiens
  CDR3 for alpha chain variable domain of TCR clone 10735 (TRAV12-2, TRAJ17)
CAVLFKAAGNKLTF

SEQ ID NO: 21470 - protein, 17 aa, Homo sapiens
  CDR3 for beta chain variable domain of TCR clone 10735 (TRBV20-1, TRBJ2-2)
CSASGSGQGGLTGEPFF

SEQ ID NO: 21471 - protein, 14 aa, Homo sapiens
  CDR3 for alpha chain variable domain of TCR clone 10736 (TRAV12-2, TRAJ13)
CAVKKTGGYQKVTF

SEQ ID NO: 21472 - protein, 15 aa, Homo sapiens
  CDR3 for beta chain variable domain of TCR clone 10736 (TRBV27, TRBJ2-1)
CASSNGGVSSNEQFF

SEQ ID NO: 21473 - protein, 15 aa, Homo sapiens
  CDR3 for alpha chain variable domain of TCR clone 10737 (TRAV8-1, TRAJ6)
CAVNTPPGGSYIPTF

SEQ ID NO: 21474 - protein, 15 aa, Homo sapiens
  CDR3 for beta chain variable domain of TCR clone 10737 (TRBV9, TRBJ2-3)
CASSLEGGLTDTQYF

SEQ ID NO: 21475 - protein, 11 aa, Homo sapiens
  CDR3 for alpha chain variable domain of TCR clone 10738 (TRAV2, TRAJ13)
CASGGYQKVTF

SEQ ID NO: 21476 - protein, 13 aa, Homo sapiens
  CDR3 for beta chain variable domain of TCR clone 10738 (TRBV19, TRBJ1-2)
CASSVPGQDGYTF

SEQ ID NO: 21477 - protein, 17 aa, Homo sapiens
  CDR3 for alpha chain variable domain of TCR clone 10739 (TRAV3, TRAJ6)
CAVRDGPRAGGSYIPTF

SEQ ID NO: 21478 - protein, 14 aa, Homo sapiens
  CDR3 for beta chain variable domain of TCR clone 10739 (TRBV7-2, TRBJ2-7)
CASSPKTSFYEKYF

SEQ ID NO: 21479 - protein, 13 aa, Homo sapiens
  CDR3 for alpha chain variable domain of TCR clone 10740 (TRAV8-6, TRAJ20)
CAVSYSNDYKLSF

SEQ ID NO: 21480 - protein, 15 aa, Homo sapiens
  CDR3 for beta chain variable domain of TCR clone 10740 (TRBV2, TRBJ2-5)
CASTRDGGPQETQYF

SEQ ID NO: 21481 - protein, 13 aa, Homo sapiens
  CDR3 for alpha chain variable domain of TCR clone 10741 (TRAV1-2, TRAJ9)
CAALNTVGFKTIF

SEQ ID NO: 21482 - protein, 13 aa, Homo sapiens
  CDR3 for beta chain variable domain of TCR clone 10741 (TRBV19, TRBJ1-2)
CASSVPGQDGYTF

SEQ ID NO: 21483 - protein, 15 aa, Homo sapiens
  CDR3 for alpha chain variable domain of TCR clone 10742 (TRAV3, TRAJ5)
CAVRDLNTGRRALTF

SEQ ID NO: 21484 - protein, 13 aa, Homo sapiens
  CDR3 for beta chain variable domain of TCR clone 10742 (TRBV12-4, TRBJ2-7)
CASSPTETYEQYF

SEQ ID NO: 21485 - protein, 14 aa, Homo sapiens
  CDR3 for alpha chain variable domain of TCR clone 10743 (TRAV16, TRAJ33)
FALSAMDSNYQLIW

SEQ ID NO: 21486 - protein, 12 aa, Homo sapiens
  CDR3 for beta chain variable domain of TCR clone 10743 (TRBV5-1, TRBJ1-2)
CASSQDTYGYTF

SEQ ID NO: 21487 - protein, 13 aa, Homo sapiens
  CDR3 for alpha chain variable domain of TCR clone 10744 (TRAV1-2, TRAJ9)
CAALNTGGFKTIF

SEQ ID NO: 21488 - protein, 13 aa, Homo sapiens
  CDR3 for beta chain variable domain of TCR clone 10744 (TRBV19, TRBJ1-2)
CASSVPGQDGHTF

SEQ ID NO: 21489 - protein, 11 aa, Homo sapiens
  CDR3 for alpha chain variable domain of TCR clone 10745 (TRAV2, TRAJ13)
CASGGYQKVTF

SEQ ID NO: 21490 - protein, 16 aa, Homo sapiens
  CDR3 for beta chain variable domain of TCR clone 10745 (TRBV4-2, TRBJ2-3)
CASSQELAGDTDTQYF

SEQ ID NO: 21491 - protein, 13 aa, Homo sapiens
  CDR3 for alpha chain variable domain of TCR clone 10746 (TRAV8-3, TRAJ21)
CAVGLDNFNKFYF

SEQ ID NO: 21492 - protein, 13 aa, Homo sapiens
  CDR3 for beta chain variable domain of TCR clone 10746 (TRBV11-2, TRBJ2-5)
CASGHGAKETQYF

SEQ ID NO: 21493 - protein, 11 aa, Homo sapiens
  CDR3 for alpha chain variable domain of TCR clone 10747 (TRAV12-3, TRAJ43)
CAMSVSNDMRF

SEQ ID NO: 21494 - protein, 17 aa, Homo sapiens
  CDR3 for beta chain variable domain of TCR clone 10747 (TRBV12-4, TRBJ1-5)
CASSLEGAGVSNQPQHF

SEQ ID NO: 21495 - protein, 11 aa, Homo sapiens
  CDR3 for alpha chain variable domain of TCR clone 10748 (TRAV8-4, TRAJ34)
CAVSWTDKLIF

SEQ ID NO: 21496 - protein, 11 aa, Homo sapiens
  CDR3 for beta chain variable domain of TCR clone 10748 (TRBV19, TRBJ2-2)
CASRYSGELFF

SEQ ID NO: 21497 - protein, 10 aa, Homo sapiens
  CDR3 for alpha chain variable domain of TCR clone 10749 (TRAV3, TRAJ18)
CAVRLTEAQP

SEQ ID NO: 21498 - protein, 15 aa, Homo sapiens
  CDR3 for beta chain variable domain of TCR clone 10749 (TRBV7-2, TRBJ2-1)
CASTHGTGIYNEQFF

SEQ ID NO: 21499 - protein, 13 aa, Homo sapiens
  CDR3 for alpha chain variable domain of TCR clone 10750 (TRAV8-3, TRAJ28)
CAVGAVGSYQLTF

SEQ ID NO: 21500 - protein, 13 aa, Homo sapiens
  CDR3 for beta chain variable domain of TCR clone 10750 (TRBV7-2, TRBJ1-6)
CASSLKFDSPLHF

SEQ ID NO: 21501 - protein, 14 aa, Homo sapiens
  CDR3 for alpha chain variable domain of TCR clone 10751 (TRAV12-2, TRAJ40)
CAVKITSGTYKYIF

SEQ ID NO: 21502 - protein, 14 aa, Homo sapiens
  CDR3 for beta chain variable domain of TCR clone 10751 (TRBV20-1, TRBJ1-1)
CSAQTRIGGTEAFF

SEQ ID NO: 21503 - protein, 12 aa, Homo sapiens
  CDR3 for alpha chain variable domain of TCR clone 10752 (TRAV2, TRAJ9)
CAVGAGGFKTIL

SEQ ID NO: 21504 - protein, 16 aa, Homo sapiens
  CDR3 for beta chain variable domain of TCR clone 10752 (TRBV13, TRBJ2-2)
CASSPRTGEHTGELFF

SEQ ID NO: 21505 - protein, 15 aa, Homo sapiens
  CDR3 for alpha chain variable domain of TCR clone 10753 (TRAV30, TRAJ32)
CGTEILGGATNKLIF

SEQ ID NO: 21506 - protein, 13 aa, Homo sapiens
  CDR3 for beta chain variable domain of TCR clone 10753 (TRBV6-3, TRBJ2-7)
CASSVSGGYEQYF

SEQ ID NO: 21507 - protein, 13 aa, Homo sapiens
  CDR3 for alpha chain variable domain of TCR clone 10754 (TRAV21, TRAJ27)
CDARPGNAGKSTF

SEQ ID NO: 21508 - protein, 14 aa, Homo sapiens
  CDR3 for beta chain variable domain of TCR clone 10754 (TRBV7-6, TRBJ2-3)
CASSLGTVTDTQYF

SEQ ID NO: 21509 - protein, 14 aa, Homo sapiens
  CDR3 for alpha chain variable domain of TCR clone 10755 (TRAV26-1, TRAJ38)
CIADNAGNNCKLIW

SEQ ID NO: 21510 - protein, 13 aa, Homo sapiens
  CDR3 for beta chain variable domain of TCR clone 10755 (TRBV20-1, TRBJ1-1)
CSARGGGNTEAFF

SEQ ID NO: 21511 - protein, 12 aa, Homo sapiens
  CDR3 for alpha chain variable domain of TCR clone 10756 (TRAV12-3, TRAJ17)
CARTLTGNKLTF

SEQ ID NO: 21512 - protein, 15 aa, Homo sapiens
  CDR3 for beta chain variable domain of TCR clone 10756 (TRBV20-1, TRBJ2-7)
CSARDRVSGMDEQYF

SEQ ID NO: 21513 - protein, 13 aa, Homo sapiens
  CDR3 for alpha chain variable domain of TCR clone 10757 (TRAV2, TRAJ40)
CAVVTSGTYKYIF

SEQ ID NO: 21514 - protein, 16 aa, Homo sapiens
  CDR3 for beta chain variable domain of TCR clone 10757 (TRBV7-3, TRBJ2-2)
CASSLKRGTLSGELFF

SEQ ID NO: 21515 - protein, 17 aa, Homo sapiens
  CDR3 for alpha chain variable domain of TCR clone 10758 (TRAV3, TRAJ38)
CAVRDCLNAGNNRKLIW

SEQ ID NO: 21516 - protein, 16 aa, Homo sapiens
  CDR3 for beta chain variable domain of TCR clone 10758 (TRBV6-5, TRBJ2-1)
CASSYSLSGGYNEQFF

SEQ ID NO: 21517 - protein, 14 aa, Homo sapiens
  CDR3 for alpha chain variable domain of TCR clone 10759 (TRAV12-1, TRAJ17)
CVVNYKAAGNELTF

SEQ ID NO: 21518 - protein, 17 aa, Homo sapiens
  CDR3 for beta chain variable domain of TCR clone 10759 (TRBV20-1, TRBJ2-1)
CSASSSGLAGSYNEQFF

SEQ ID NO: 21519 - protein, 12 aa, Homo sapiens
  CDR3 for alpha chain variable domain of TCR clone 10760 (TRAV12-1, TRAJ40)
CVVYSGTYKYIF

SEQ ID NO: 21520 - protein, 16 aa, Homo sapiens
  CDR3 for beta chain variable domain of TCR clone 10760 (TRBV20-1, TRBJ2-1)
CSARDLKQGMNNEQFF

SEQ ID NO: 21521 - protein, 14 aa, Homo sapiens
  CDR3 for alpha chain variable domain of TCR clone 10761 (TRAV12-2, TRAJ17)
CAVLFKAAGTKLTF

SEQ ID NO: 21522 - protein, 17 aa, Homo sapiens
  CDR3 for beta chain variable domain of TCR clone 10761 (TRBV20-1, TRBJ2-2)
CSASGSGQGGLTGELFF

SEQ ID NO: 21523 - protein, 14 aa, Homo sapiens
  CDR3 for alpha chain variable domain of TCR clone 10762 (TRAV1-2, TRAJ16)
CAVNRFSDGQKLLF

SEQ ID NO: 21524 - protein, 14 aa, Homo sapiens
  CDR3 for beta chain variable domain of TCR clone 10762 (TRBV7-8, TRBJ2-3)
CASSLEAGTDTQYF

SEQ ID NO: 21525 - protein, 11 aa, Homo sapiens
  CDR3 for alpha chain variable domain of TCR clone 10763 (TRAV3, TRAJ21)
CVVGNFNKFYF

SEQ ID NO: 21526 - protein, 16 aa, Homo sapiens
  CDR3 for beta chain variable domain of TCR clone 10763 (TRBV19, TRBJ2-1)
CASSKAGPSSYNEQFF

SEQ ID NO: 21527 - protein, 14 aa, Homo sapiens
  CDR3 for alpha chain variable domain of TCR clone 10764 (TRAV1-2, TRAJ8)
CAVREDTGFQKLVF

SEQ ID NO: 21528 - protein, 15 aa, Homo sapiens
  CDR3 for beta chain variable domain of TCR clone 10764 (TRBV6-3, TRBJ2-7)
CASSSPGTVFYEQHF

SEQ ID NO: 21529 - protein, 12 aa, Homo sapiens
  CDR3 for alpha chain variable domain of TCR clone 10765 (TRAV13-2, TRAJ8)
CAPWLGFQKLVF

SEQ ID NO: 21530 - protein, 13 aa, Homo sapiens
  CDR3 for beta chain variable domain of TCR clone 10765 (TRBV12-4, TRBJ1-2)
CASTMTSNYGYTF

SEQ ID NO: 21531 - protein, 11 aa, Homo sapiens
  CDR3 for alpha chain variable domain of TCR clone 10766 (TRAV23/DV6, TRAJ44)
CAAPTPGKLTF

SEQ ID NO: 21532 - protein, 15 aa, Homo sapiens
  CDR3 for beta chain variable domain of TCR clone 10766 (TRBV7-2, TRBJ2-2)
CASSLVSQFTGELFF

SEQ ID NO: 21533 - protein, 16 aa, Homo sapiens
  CDR3 for alpha chain variable domain of TCR clone 10767 (TRAV13-1, TRAJ40)
CAASIATTSGTYKYIF

SEQ ID NO: 21534 - protein, 14 aa, Homo sapiens
  CDR3 for beta chain variable domain of TCR clone 10767 (TRBV6-1, TRBJ1-3)
CASVQGGGGNTIYF

SEQ ID NO: 21535 - protein, 14 aa, Homo sapiens
  CDR3 for alpha chain variable domain of TCR clone 10768 (TRAV12-2, TRAJ13)
CAVKKPGGYQKVTF

SEQ ID NO: 21536 - protein, 15 aa, Homo sapiens
  CDR3 for beta chain variable domain of TCR clone 10768 (TRBV27, TRBJ2-1)
CASSNGGGSSNEQFF

(The sequence listing continues in the following parts.)
